United States Patent Application Publication US 2020/0095579 A1 - sequence listing, part 3

SEQ ID NO: 15159 - DNA, 20 bp, Artificial Sequence
  Description of Artificial Sequence: Synthetic oligonucleotide
  Target: LAMA2; (+) strand; PAM type: NNAGAAW; PAM sequence: CAAGAAA
catagcttttacagaaactc

SEQ ID NO: 15160 - DNA, 20 bp, Artificial Sequence
  Description of Artificial Sequence: Synthetic oligonucleotide
  Target: LAMA2; (+) strand; PAM type: NNAGAAW; PAM sequence: ATAGAAA
aactgattagcttataaaca

SEQ ID NO: 15161 - DNA, 20 bp, Artificial Sequence
  Description of Artificial Sequence: Synthetic oligonucleotide
  Target: LAMA2; (+) strand; PAM type: NNAGAAW; PAM sequence: AAAGAAT
gaagtgaagagttttaatga

SEQ ID NO: 15162 - DNA, 20 bp, Artificial Sequence
  Description of Artificial Sequence: Synthetic oligonucleotide
  Target: LAMA2; (+) strand; PAM type: NNAGAAW; PAM sequence: AGAGAAT
gttattttccttgtatatgg

SEQ ID NO: 15163 - DNA, 20 bp, Artificial Sequence
  Description of Artificial Sequence: Synthetic oligonucleotide
  Target: LAMA2; (+) strand; PAM type: NNAGAAW; PAM sequence: ACAGAAA
tccttgtatatggagagaat

SEQ ID NO: 15164 - DNA, 20 bp, Artificial Sequence
  Description of Artificial Sequence: Synthetic oligonucleotide
  Target: LAMA2; (+) strand; PAM type: NNAGAAW; PAM sequence: CTAGAAA
atacagaaaaataaattaaa

SEQ ID NO: 15165 - DNA, 20 bp, Artificial Sequence
  Description of Artificial Sequence: Synthetic oligonucleotide
  Target: LAMA2; (+) strand; PAM type: NNAGAAW; PAM sequence: ATAGAAA
attctgcttcaaatcaaatc

SEQ ID NO: 15166 - DNA, 20 bp, Artificial Sequence
  Description of Artificial Sequence: Synthetic oligonucleotide
  Target: LAMA2; (+) strand; PAM type: NNAGAAW; PAM sequence: GCAGAAA
atcatagaaatcagtagcac

SEQ ID NO: 15167 - DNA, 20 bp, Artificial Sequence
  Description of Artificial Sequence: Synthetic oligonucleotide
  Target: LAMA2; (+) strand; PAM type: NNAGAAW; PAM sequence: CCAGAAT
attgtcaatggctaaaaagt

SEQ ID NO: 15168 - DNA, 20 bp, Artificial Sequence
  Description of Artificial Sequence: Synthetic oligonucleotide
  Target: LAMA2; (+) strand; PAM type: NNAGAAW; PAM sequence: AGAGAAA
cactatctttgattgtgtaa

SEQ ID NO: 15169 - DNA, 20 bp, Artificial Sequence
  Description of Artificial Sequence: Synthetic oligonucleotide
  Target: LAMA2; (+) strand; PAM type: NNAGAAW; PAM sequence: AAAGAAA
atctttgattgtgtaaagag

SEQ ID NO: 15170 - DNA, 20 bp, Artificial Sequence
  Description of Artificial Sequence: Synthetic oligonucleotide
  Target: LAMA2; (+) strand; PAM type: NNAGAAW; PAM sequence: ATAGAAA
cgtgggatttttgcattagt

SEQ ID NO: 15171 - DNA, 20 bp, Artificial Sequence
  Description of Artificial Sequence: Synthetic oligonucleotide
  Target: LAMA2; (+) strand; PAM type: NNAGAAW; PAM sequence: TCAGAAT
gcttaagacactttttaaag

SEQ ID NO: 15172 - DNA, 20 bp, Artificial Sequence
  Description of Artificial Sequence: Synthetic oligonucleotide
  Target: LAMA2; (+) strand; PAM type: NNAGAAW; PAM sequence: AAAGAAT
ttgcatttatcaggcttttt

SEQ ID NO: 15173 - DNA, 20 bp, Artificial Sequence
  Description of Artificial Sequence: Synthetic oligonucleotide
  Target: LAMA2; (+) strand; PAM type: NNAGAAW; PAM sequence: AGAGAAT
attaaaaactttttgcagtt

SEQ ID NO: 15174 - DNA, 20 bp, Artificial Sequence
  Description of Artificial Sequence: Synthetic oligonucleotide
  Target: LAMA2; (+) strand; PAM type: NNAGAAW; PAM sequence: GAAGAAA
actttttgcagttagagaat

SEQ ID NO: 15175 - DNA, 20 bp, Artificial Sequence
  Description of Artificial Sequence: Synthetic oligonucleotide
  Target: LAMA2; (+) strand; PAM type: NNAGAAW; PAM sequence: CCAGAAA
taaagcccgccatcttgtgg

SEQ ID NO: 15176 - DNA, 20 bp, Artificial Sequence
  Description of Artificial Sequence: Synthetic oligonucleotide
  Target: LAMA2; (+) strand; PAM type: NNAGAAW; PAM sequence: CTAGAAA
ggccagaaatatgcatgaag

SEQ ID NO: 15177 - DNA, 20 bp, Artificial Sequence
  Description of Artificial Sequence: Synthetic oligonucleotide
  Target: LAMA2; (+) strand; PAM type: NNAGAAW; PAM sequence: TCAGAAT
atagcatactaaacactttt

SEQ ID NO: 15178 - DNA, 20 bp, Artificial Sequence
  Description of Artificial Sequence: Synthetic oligonucleotide
  Target: LAMA2; (+) strand; PAM type: NNAGAAW; PAM sequence: ATAGAAT
cagaatctcatagcaacaat

SEQ ID NO: 15179 - DNA, 20 bp, Artificial Sequence
  Description of Artificial Sequence: Synthetic oligonucleotide
  Target: LAMA2; (+) strand; PAM type: NNAGAAW; PAM sequence: TAAGAAT
taattcatatttgttataaa

SEQ ID NO: 15180 - DNA, 20 bp, Artificial Sequence
  Description of Artificial Sequence: Synthetic oligonucleotide
  Target: LAMA2; (+) strand; PAM type: NNAGAAW; PAM sequence: GTAGAAT
gaattttctaacaggtcatg

SEQ ID NO: 15181 - DNA, 20 bp, Artificial Sequence
  Description of Artificial Sequence: Synthetic oligonucleotide
  Target: LAMA2; (+) strand; PAM type: NNAGAAW; PAM sequence: GAAGAAA
catgaaataaaataaagtcg

SEQ ID NO: 15182 - DNA, 20 bp, Artificial Sequence
  Description of Artificial Sequence: Synthetic oligonucleotide
  Target: LAMA2; (+) strand; PAM type: NNAGAAW; PAM sequence: GGAGAAA
ataaagtcggaagaaattct

SEQ ID NO: 15183 - DNA, 20 bp, Artificial Sequence
  Description of Artificial Sequence: Synthetic oligonucleotide
  Target: LAMA2; (+) strand; PAM type: NNAGAAW; PAM sequence: ATAGAAT
ttctggagaaatatttaata

SEQ ID NO: 15184 - DNA, 20 bp, Artificial Sequence
  Description of Artificial Sequence: Synthetic oligonucleotide
  Target: LAMA2; (+) strand; PAM type: NNAGAAW; PAM sequence: TTAGAAA
tttcatctgcttaggggtaa

SEQ ID NO: 15185 - DNA, 20 bp, Artificial Sequence
  Description of Artificial Sequence: Synthetic oligonucleotide
  Target: LAMA2; (+) strand; PAM type: NNAGAAW; PAM sequence: AAAGAAA
tttagaacagcttaaagttc

SEQ ID NO: 15186 - DNA, 20 bp, Artificial Sequence
  Description of Artificial Sequence: Synthetic oligonucleotide
  Target: LAMA2; (+) strand; PAM type: NNAGAAW; PAM sequence: CCAGAAT
tgcccccacaaccttcccca

SEQ ID NO: 15187 - DNA, 20 bp, Artificial Sequence
  Description of Artificial Sequence: Synthetic oligonucleotide
  Target: LAMA2; (+) strand; PAM type: NNAGAAW; PAM sequence: ATAGAAA
gtccaccgttgttgtaaaat

SEQ ID NO: 15188 - DNA, 20 bp, Artificial Sequence
  Description of Artificial Sequence: Synthetic oligonucleotide
  Target: LAMA2; (+) strand; PAM type: NNAGAAW; PAM sequence: AAAGAAA
taagagtatatttagttttg

SEQ ID NO: 15189 - DNA, 20 bp, Artificial Sequence
  Description of Artificial Sequence: Synthetic oligonucleotide
  Target: LAMA2; (+) strand; PAM type: NNAGAAW; PAM sequence: TTAGAAT
gcctcatatctttctcatga

SEQ ID NO: 15190 - DNA, 20 bp, Artificial Sequence
  Description of Artificial Sequence: Synthetic oligonucleotide
  Target: LAMA2; (+) strand; PAM type: NNAGAAW; PAM sequence: GCAGAAA
gattcagtaacataaaaggc

SEQ ID NO: 15191 - DNA, 20 bp, Artificial Sequence
  Description of Artificial Sequence: Synthetic oligonucleotide
  Target: LAMA2; (+) strand; PAM type: NNAGAAW; PAM sequence: TGAGAAA
ctgcagttgtgaccagggta

SEQ ID NO: 15192 - DNA, 20 bp, Artificial Sequence
  Description of Artificial Sequence: Synthetic oligonucleotide
  Target: LAMA2; (+) strand; PAM type: NNAGAAW; PAM sequence: AAAGAAT
actccccagattatactgat

SEQ ID NO: 15193 - DNA, 20 bp, Artificial Sequence
  Description of Artificial Sequence: Synthetic oligonucleotide
  Target: LAMA2; (+) strand; PAM type: NNAGAAW; PAM sequence: GGAGAAA
tatactcattgtttttaaat

SEQ ID NO: 15194 - DNA, 20 bp, Artificial Sequence
  Description of Artificial Sequence: Synthetic oligonucleotide
  Target: LAMA2; (+) strand; PAM type: NNAGAAW; PAM sequence: TGAGAAT
gaacccaagttcctcacata

SEQ ID NO: 15195 - DNA, 20 bp, Artificial Sequence
  Description of Artificial Sequence: Synthetic oligonucleotide
  Target: LAMA2; (+) strand; PAM type: NNAGAAW; PAM sequence: AGAGAAA
gtatatgcccagtctcccaa

SEQ ID NO: 15196 - DNA, 20 bp, Artificial Sequence
  Description of Artificial Sequence: Synthetic oligonucleotide
  Target: LAMA2; (+) strand; PAM type: NNAGAAW; PAM sequence: CCAGAAA
ctacggattgagggtataag

SEQ ID NO: 15197 - DNA, 20 bp, Artificial Sequence
  Description of Artificial Sequence: Synthetic oligonucleotide
  Target: LAMA2; (+) strand; PAM type: NNAGAAW; PAM sequence: CCAGAAT
atctgttctccgtaacgtag

SEQ ID NO: 15198 - DNA, 20 bp, Artificial Sequence
  Description of Artificial Sequence: Synthetic oligonucleotide
  Target: LAMA2; (+) strand; PAM type: NNAGAAW; PAM sequence: CAAGAAA
gactatagactccaaatggg

SEQ ID NO: 15199 - DNA, 20 bp, Artificial Sequence
  Description of Artificial Sequence: Synthetic oligonucleotide
  Target: LAMA2; (+) strand; PAM type: NNAGAAW; PAM sequence: GGAGAAT
actatttatattctgtaagg

SEQ ID NO: 15200 - DNA, 20 bp, Artificial Sequence
  Description of Artificial Sequence: Synthetic oligonucleotide
  Target: LAMA2; (+) strand; PAM type: NNAGAAW; PAM sequence: GAAGAAA
ttggcacgtgaaatatttag

SEQ ID NO: 15201 - DNA, 20 bp, Artificial Sequence
  Description of Artificial Sequence: Synthetic oligonucleotide
  Target: LAMA2; (+) strand; PAM type: NNAGAAW; PAM sequence: GCAGAAA
ctagttttaacataaagaag

SEQ ID NO: 15202 - DNA, 20 bp, Artificial Sequence
  Description of Artificial Sequence: Synthetic oligonucleotide
  Target: LAMA2; (+) strand; PAM type: NNAGAAW; PAM sequence: CAAGAAA
acacactggtcatatccaac

SEQ ID NO: 15203 - DNA, 20 bp, Artificial Sequence
  Description of Artificial Sequence: Synthetic oligonucleotide
  Target: LAMA2; (+) strand; PAM type: NNAGAAW; PAM sequence: CAAGAAA
aaatactctaaaaaacaaaa

SEQ ID NO: 15204 - DNA, 20 bp, Artificial Sequence
  Description of Artificial Sequence: Synthetic oligonucleotide
  Target: LAMA2; (+) strand; PAM type: NNAGAAW; PAM sequence: ATAGAAA
aaaaaacaaaacaagaaaaa

SEQ ID NO: 15205 - DNA, 20 bp, Artificial Sequence
  Description of Artificial Sequence: Synthetic oligonucleotide
  Target: LAMA2; (+) strand; PAM type: NNAGAAW; PAM sequence: AAAGAAA
caaaacaagaaaaaatagaa

SEQ ID NO: 15206 - DNA, 20 bp, Artificial Sequence
  Description of Artificial Sequence: Synthetic oligonucleotide
  Target: LAMA2; (+) strand; PAM type: NNAGAAW; PAM sequence: AAAGAAA
gttgagtgaatgtcaacata

SEQ ID NO: 15207 - DNA, 20 bp, Artificial Sequence
  Description of Artificial Sequence: Synthetic oligonucleotide
  Target: LAMA2; (+) strand; PAM type: NNAGAAW; PAM sequence: GCAGAAT
aaaggaacactgtaaagatt

SEQ ID NO: 15208 - DNA, 20 bp, Artificial Sequence
  Description of Artificial Sequence: Synthetic oligonucleotide
  Target: LAMA2; (+) strand; PAM type: NNAGAAW; PAM sequence: AGAGAAT
aagattgcagaatagaggta

SEQ ID NO: 15209 - DNA, 20 bp, Artificial Sequence
  Description of Artificial Sequence: Synthetic oligonucleotide
  Target: LAMA2; (+) strand; PAM type: NNAGAAW; PAM sequence: TAAGAAA
gaggtaagagaatgttaaaa

SEQ ID NO: 15210 - DNA, 20 bp, Artificial Sequence
  Description of Artificial Sequence: Synthetic oligonucleotide
  Target: LAMA2; (+) strand; PAM type: NNAGAAW; PAM sequence: AGAGAAT
aaaataagaaaatccaagat

SEQ ID NO: 15211 - DNA, 20 bp, Artificial Sequence
  Description of Artificial Sequence: Synthetic oligonucleotide
  Target: LAMA2; (+) strand; PAM type: NNAGAAW; PAM sequence: ACAGAAA
agatggtaatttaataaaac

SEQ ID NO: 15212 - DNA, 20 bp, Artificial Sequence
  Description of Artificial Sequence: Synthetic oligonucleotide
  Target: LAMA2; (+) strand; PAM type: NNAGAAW; PAM sequence: CTAGAAT
gagcagtgtcctccactcac

SEQ ID NO: 15213 - DNA, 20 bp, Artificial Sequence
  Description of Artificial Sequence: Synthetic oligonucleotide
  Target: LAMA2; (+) strand; PAM type: NNAGAAW; PAM sequence: AAAGAAA
ccatcaataatagactggct

SEQ ID NO: 15214 - DNA, 20 bp, Artificial Sequence
  Description of Artificial Sequence: Synthetic oligonucleotide
  Target: LAMA2; (+) strand; PAM type: NNAGAAW; PAM sequence: AAAGAAT
gaatactatgcagccataaa

SEQ ID NO: 15215 - DNA, 20 bp, Artificial Sequence
  Description of Artificial Sequence: Synthetic oligonucleotide
  Target: LAMA2; (+) strand; PAM type: NNAGAAW; PAM sequence: ACAGAAA
cttagcaaactaacacagga

SEQ ID NO: 15216 - DNA, 20 bp, Artificial Sequence
  Description of Artificial Sequence: Synthetic oligonucleotide
  Target: LAMA2; (+) strand; PAM type: NNAGAAW; PAM sequence: GAAGAAT
gagaggatggagaggattag

SEQ ID NO: 15217 - DNA, 20 bp, Artificial Sequence
  Description of Artificial Sequence: Synthetic oligonucleotide
  Target: LAMA2; (+) strand; PAM type: NNAGAAW; PAM sequence: CTAGAAA
aattactgtgaggccagtgg

SEQ ID NO: 15218 - DNA, 20 bp, Artificial Sequence
  Description of Artificial Sequence: Synthetic oligonucleotide
  Target: LAMA2; (+) strand; PAM type: NNAGAAW; PAM sequence: CCAGAAA
tctgagcttctaaaaaatgc

SEQ ID NO: 15219 - DNA, 20 bp, Artificial Sequence
  Description of Artificial Sequence: Synthetic oligonucleotide
  Target: LAMA2; (+) strand; PAM type: NNAGAAW; PAM sequence: TAAGAAA
aataattatttttgaaaatc

SEQ ID NO: 15220 - DNA, 20 bp, Artificial Sequence
  Description of Artificial Sequence: Synthetic oligonucleotide
  Target: LAMA2; (+) strand; PAM type: NNAGAAW; PAM sequence: CTAGAAT
ctaagaaaagagagcatgtg

SEQ ID NO: 15221 - DNA, 20 bp, Artificial Sequence
  Description of Artificial Sequence: Synthetic oligonucleotide
  Target: LAMA2; (+) strand; PAM type: NNAGAAW; PAM sequence: TGAGAAT
gtatgaacaaaatctttttt

SEQ ID NO: 15222 - DNA, 20 bp, Artificial Sequence
  Description of Artificial Sequence: Synthetic oligonucleotide
  Target: LAMA2; (+) strand; PAM type: NNAGAAW; PAM sequence: GAAGAAT
ttccaaaaggaagtaggcaa

SEQ ID NO: 15223 - DNA, 20 bp, Artificial Sequence
  Description of Artificial Sequence: Synthetic oligonucleotide
  Target: LAMA2; (+) strand; PAM type: NNAGAAW; PAM sequence: AGAGAAT
gtcctgtatataacaacttt

SEQ ID NO: 15224 - DNA, 20 bp, Artificial Sequence
  Description of Artificial Sequence: Synthetic oligonucleotide
  Target: LAMA2; (+) strand; PAM type: NNAGAAW; PAM sequence: TAAGAAT
agtaatcatataatcaatac

SEQ ID NO: 15225 - DNA, 20 bp, Artificial Sequence
  Description of Artificial Sequence: Synthetic oligonucleotide
  Target: LAMA2; (+) strand; PAM type: NNAGAAW; PAM sequence: CCAGAAT
atgaatatgatcttgatcat

SEQ ID NO: 15226 - DNA, 20 bp, Artificial Sequence
  Description of Artificial Sequence: Synthetic oligonucleotide
  Target: LAMA2; (+) strand; PAM type: NNAGAAW; PAM sequence: TAAGAAT
tagacactttgagttataaa

SEQ ID NO: 15227 - DNA, 20 bp, Artificial Sequence
  Description of Artificial Sequence: Synthetic oligonucleotide
  Target: LAMA2; (+) strand; PAM type: NNAGAAW; PAM sequence: ACAGAAA
aattatgatcttttggtaat

SEQ ID NO: 15228 - DNA, 20 bp, Artificial Sequence
  Description of Artificial Sequence: Synthetic oligonucleotide
  Target: LAMA2; (+) strand; PAM type: NNAGAAW; PAM sequence: GAAGAAA
aatacagaaaatatattgat

SEQ ID NO: 15229 - DNA, 20 bp, Artificial Sequence
  Description of Artificial Sequence: Synthetic oligonucleotide
  Target: LAMA2; (+) strand; PAM type: NNAGAAW; PAM sequence: AAAGAAT
gaaaatatattgatgaagaa

SEQ ID NO: 15230 - DNA, 20 bp, Artificial Sequence
  Description of Artificial Sequence: Synthetic oligonucleotide
  Target: LAMA2; (+) strand; PAM type: NNAGAAW; PAM sequence: CTAGAAA
aaagttcagtcaagtctaga

SEQ ID NO: 15231 - DNA, 20 bp, Artificial Sequence
  Description of Artificial Sequence: Synthetic oligonucleotide
  Target: LAMA2; (+) strand; PAM type: NNAGAAW; PAM sequence: CCAGAAA
gaacataattacaacactca

SEQ ID NO: 15232 - DNA, 20 bp, Artificial Sequence
  Description of Artificial Sequence: Synthetic oligonucleotide
  Target: LAMA2; (+) strand; PAM type: NNAGAAW; PAM sequence: GAAGAAT
attccattattaatgtttta

SEQ ID NO: 15233 - DNA, 20 bp, Artificial Sequence
  Description of Artificial Sequence: Synthetic oligonucleotide
  Target: LAMA2; (+) strand; PAM type: NNAGAAW; PAM sequence: ACAGAAA
gtatatgtactgcaaattat

SEQ ID NO: 15234 - DNA, 20 bp, Artificial Sequence
  Description of Artificial Sequence: Synthetic oligonucleotide
  Target: LAMA2; (+) strand; PAM type: NNAGAAW; PAM sequence: ATAGAAA
tatattagcatatgcaacac

SEQ ID NO: 15235 - DNA, 20 bp, Artificial Sequence
  Description of Artificial Sequence: Synthetic oligonucleotide
  Target: LAMA2; (+) strand; PAM type: NNAGAAW; PAM sequence: AAAGAAA
ctctaaaccttgtaattttt

SEQ ID NO: 15236 - DNA, 20 bp, Artificial Sequence
  Description of Artificial Sequence: Synthetic oligonucleotide
  Target: LAMA2; (+) strand; PAM type: NNAGAAW; PAM sequence: TGAGAAT
taaatagaggtgaatgtgcc

SEQ ID NO: 15237 - DNA, 20 bp, Artificial Sequence
  Description of Artificial Sequence: Synthetic oligonucleotide
  Target: LAMA2; (+) strand; PAM type: NNAGAAW; PAM sequence: AAAGAAA
ttggctcaaagtaatatttg

SEQ ID NO: 15238 - DNA, 20 bp, Artificial Sequence
  Description of Artificial Sequence: Synthetic oligonucleotide
  Target: LAMA2; (+) strand; PAM type: NNAGAAW; PAM sequence: GGAGAAT
acacaagagcaaagtccctg

SEQ ID NO: 15239 - DNA, 20 bp, Artificial Sequence
  Description of Artificial Sequence: Synthetic oligonucleotide
  Target: LAMA2; (+) strand; PAM type: NNAGAAW; PAM sequence: TTAGAAA
tgcccgggatgcagaaggta

SEQ ID NO: 15240 - DNA, 20 bp, Artificial Sequence
  Description of Artificial Sequence: Synthetic oligonucleotide
  Target: LAMA2; (+) strand; PAM type: NNAGAAW; PAM sequence: AAAGAAT
cgggatgcagaaggtattag

SEQ ID NO: 15241 - DNA, 20 bp, Artificial Sequence
  Description of Artificial Sequence: Synthetic oligonucleotide
  Target: LAMA2; (+) strand; PAM type: NNAGAAW; PAM sequence: ACAGAAA
tttaatcatcatttctccca

SEQ ID NO: 15242 - DNA, 20 bp, Artificial Sequence
  Description of Artificial Sequence: Synthetic oligonucleotide
  Target: LAMA2; (+) strand; PAM type: NNAGAAW; PAM sequence: ACAGAAA
atttctcccaacagaaaaac

SEQ ID NO: 15243 - DNA, 20 bp, Artificial Sequence
  Description of Artificial Sequence: Synthetic oligonucleotide
  Target: LAMA2; (+) strand; PAM type: NNAGAAW; PAM sequence: GCAGAAT
gtgaattagcgacaatgagg

SEQ ID NO: 15244 - DNA, 20 bp, Artificial Sequence
  Description of Artificial Sequence: Synthetic oligonucleotide
  Target: LAMA2; (+) strand; PAM type: NNAGAAW; PAM sequence: TAAGAAT
acatggctattataattaca

SEQ ID NO: 15245 - DNA, 20 bp, Artificial Sequence
  Description of Artificial Sequence: Synthetic oligonucleotide
  Target: LAMA2; (+) strand; PAM type: NNAGAAW; PAM sequence: TGAGAAA
ttgccatctactaacatgaa

SEQ ID NO: 15246 - DNA, 20 bp, Artificial Sequence
  Description of Artificial Sequence: Synthetic oligonucleotide
  Target: LAMA2; (+) strand; PAM type: NNAGAAW; PAM sequence: TAAGAAA
tttttggcaaaagcccaaat

SEQ ID NO: 15247 - DNA, 20 bp, Artificial Sequence
  Description of Artificial Sequence: Synthetic oligonucleotide
  Target: LAMA2; (+) strand; PAM type: NNAGAAW; PAM sequence: AAAGAAT
aagcccaaattaagaaactt

SEQ ID NO: 15248 - DNA, 20 bp, Artificial Sequence
  Description of Artificial Sequence: Synthetic oligonucleotide
  Target: LAMA2; (+) strand; PAM type: NNAGAAW; PAM sequence: TTAGAAA
taataaacgtgcatgcatgt

SEQ ID NO: 15249 - DNA, 20 bp, Artificial Sequence
  Description of Artificial Sequence: Synthetic oligonucleotide
  Target: LAMA2; (+) strand; PAM type: NNAGAAW; PAM sequence: ACAGAAA
caaaggtgtgaggttctgaa

SEQ ID NO: 15250 - DNA, 20 bp, Artificial Sequence
  Description of Artificial Sequence: Synthetic oligonucleotide
  Target: LAMA2; (+) strand; PAM type: NNAGAAW; PAM sequence: CCAGAAA
tgaaacagaaattatttctg

SEQ ID NO: 15251 - DNA, 20 bp, Artificial Sequence
  Description of Artificial Sequence: Synthetic oligonucleotide
  Target: LAMA2; (+) strand; PAM type: NNAGAAW; PAM sequence: TGAGAAT
gtttcaatcaaacactggta

SEQ ID NO: 15252 - DNA, 20 bp, Artificial Sequence
  Description of Artificial Sequence: Synthetic oligonucleotide
  Target: LAMA2; (+) strand; PAM type: NNAGAAW; PAM sequence: AGAGAAA
aaatcccacgtctatacacc

SEQ ID NO: 15253 - DNA, 20 bp, Artificial Sequence
  Description of Artificial Sequence: Synthetic oligonucleotide
  Target: LAMA2; (+) strand; PAM type: NNAGAAW; PAM sequence: GTAGAAT
ttgcctgcaggcactatttg

SEQ ID NO: 15254 - DNA, 20 bp, Artificial Sequence
  Description of Artificial Sequence: Synthetic oligonucleotide
  Target: LAMA2; (+) strand; PAM type: NNAGAAW; PAM sequence: GGAGAAA
acaaagcttggcagtttaat

SEQ ID NO: 15255 - DNA, 20 bp, Artificial Sequence
  Description of Artificial Sequence: Synthetic oligonucleotide
  Target: LAMA2; (+) strand; PAM type: NNAGAAW; PAM sequence: AGAGAAA
gcagtttaatggagaaaaaa

SEQ ID NO: 15256 - DNA, 20 bp, Artificial Sequence
  Description of Artificial Sequence: Synthetic oligonucleotide
  Target: LAMA2; (+) strand; PAM type: NNAGAAW; PAM sequence: GAAGAAA
aagggaaaggagggaggaag

SEQ ID NO: 15257 - DNA, 20 bp, Artificial Sequence
  Description of Artificial Sequence: Synthetic oligonucleotide
  Target: LAMA2; (+) strand; PAM type: NNAGAAW; PAM sequence: GAAGAAA
aagggaaaggagggagggag

SEQ ID NO: 15258 - DNA, 20 bp, Artificial Sequence
  Description of Artificial Sequence: Synthetic oligonucleotide
  Target: LAMA2; (+) strand; PAM type: NNAGAAW; PAM sequence: GAAGAAA
ggagggagggaggaagaaaa

SEQ ID NO: 15259 - DNA, 20 bp, Artificial Sequence
  Description of Artificial Sequence: Synthetic oligonucleotide
  Target: LAMA2; (+) strand; PAM type: NNAGAAW; PAM sequence: TAAGAAA
aggaaggaaggaaggggaaa

SEQ ID NO: 15260 - DNA, 20 bp, Artificial Sequence
  Description of Artificial Sequence: Synthetic oligonucleotide
  Target: LAMA2; (+) strand; PAM type: NNAGAAW; PAM sequence: TTAGAAT
ctgttttattccacgcatta

SEQ ID NO: 15261 - DNA, 20 bp, Artificial Sequence
  Description of Artificial Sequence: Synthetic oligonucleotide
  Target: LAMA2; (+) strand; PAM type: NNAGAAW; PAM sequence: TAAGAAT
tatagatactgtatgcctct

SEQ ID NO: 15262 - DNA, 20 bp, Artificial Sequence
  Description of Artificial Sequence: Synthetic oligonucleotide
  Target: LAMA2; (+) strand; PAM type: NNAGAAW; PAM sequence: AAAGAAA
atcattttcaatactgtggg

SEQ ID NO: 15263 - DNA, 20 bp, Artificial Sequence
  Description of Artificial Sequence: Synthetic oligonucleotide
  Target: LAMA2; (+) strand; PAM type: NNAGAAW; PAM sequence: TAAGAAT
atgaaaaacacattcatctt

SEQ ID NO: 15264 - DNA, 20 bp, Artificial Sequence
  Description of Artificial Sequence: Synthetic oligonucleotide
  Target: LAMA2; (+) strand; PAM type: NNAGAAW; PAM sequence: TAAGAAA
tttttggtgggggagatttc

SEQ ID NO: 15265 - DNA, 20 bp, Artificial Sequence
  Description of Artificial Sequence: Synthetic oligonucleotide
  Target: LAMA2; (+) strand; PAM type: NNAGAAW; PAM sequence: AGAGAAA
gcaagtgatagatgcctatg

SEQ ID NO: 15266 - DNA, 20 bp, Artificial Sequence
  Description of Artificial Sequence: Synthetic oligonucleotide
  Target: LAMA2; (+) strand; PAM type: NNAGAAW; PAM sequence: GTAGAAA
attttaaaatttaactttca

SEQ ID NO: 15267 - DNA, 20 bp, Artificial Sequence
  Description of Artificial Sequence: Synthetic oligonucleotide
  Target: LAMA2; (+) strand; PAM type: NNAGAAW; PAM sequence: ATAGAAA
gagctgcacagtgatgtcct

SEQ ID NO: 15268 - DNA, 20 bp, Artificial Sequence
  Description of Artificial Sequence: Synthetic oligonucleotide
  Target: LAMA2; (+) strand; PAM type: NNAGAAW; PAM sequence: ACAGAAT
ttaagttctgggatgcatgc

SEQ ID NO: 15269 - DNA, 20 bp, Artificial Sequence
  Description of Artificial Sequence: Synthetic oligonucleotide
  Target: LAMA2; (+) strand; PAM type: NNAGAAW; PAM sequence: AGAGAAA
gctcatcaccactgatcatt

SEQ ID NO: 15270 - DNA, 20 bp, Artificial Sequence
  Description of Artificial Sequence: Synthetic oligonucleotide
  Target: LAMA2; (+) strand; PAM type: NNAGAAW; PAM sequence: GTAGAAA
gctggcaaggctgtggagaa

SEQ ID NO: 15271 - DNA, 20 bp, Artificial Sequence
  Description of Artificial Sequence: Synthetic oligonucleotide
  Target: LAMA2; (+) strand; PAM type: NNAGAAW; PAM sequence: CCAGAAA
gattcctcaaggatccagaa

SEQ ID NO: 15272 - DNA, 20 bp, Artificial Sequence
  Description of Artificial Sequence: Synthetic oligonucleotide
  Target: LAMA2; (+) strand; PAM type: NNAGAAW; PAM sequence: AAAGAAA
ccatcaatgatagattaggt

SEQ ID NO: 15273 - DNA, 20 bp, Artificial Sequence
  Description of Artificial Sequence: Synthetic oligonucleotide
  Target: LAMA2; (+) strand; PAM type: NNAGAAW; PAM sequence: AAAGAAT
gaatactatgcagccataaa

SEQ ID NO: 15274 - DNA, 20 bp, Artificial Sequence
  Description of Artificial Sequence: Synthetic oligonucleotide
  Target: LAMA2; (+) strand; PAM type: NNAGAAW; PAM sequence: GTAGAAT
ctactcgggaggctgagaca

SEQ ID NO: 15275 - DNA, 20 bp, Artificial Sequence
  Description of Artificial Sequence: Synthetic oligonucleotide
  Target: LAMA2; (+) strand; PAM type: NNAGAAW; PAM sequence: GCAGAAA
aggaggtgcggtcgcagtga

SEQ ID NO: 15276 - DNA, 20 bp, Artificial Sequence
  Description of Artificial Sequence: Synthetic oligonucleotide
  Target: LAMA2; (+) strand; PAM type: NNAGAAW; PAM sequence: AAAGAAA
tttacaaatggttttaattt

SEQ ID NO: 15277 - DNA, 20 bp, Artificial Sequence
  Description of Artificial Sequence: Synthetic oligonucleotide
  Target: LAMA2; (+) strand; PAM type: NNAGAAW; PAM sequence: AGAGAAA
agctttgagaccagagcaca

SEQ ID NO: 15278 - DNA, 20 bp, Artificial Sequence
  Description of Artificial Sequence: Synthetic oligonucleotide
  Target: LAMA2; (+) strand; PAM type: NNAGAAW; PAM sequence: CCAGAAT
ttcctctatactgcctaggc

SEQ ID NO: 15279 - DNA, 20 bp, Artificial Sequence
  Description of Artificial Sequence: Synthetic oligonucleotide
  Target: LAMA2; (+) strand; PAM type: NNAGAAW; PAM sequence: AAAGAAA
cacacacatattcatttaac

SEQ ID NO: 15280 - DNA, 20 bp, Artificial Sequence
  Description of Artificial Sequence: Synthetic oligonucleotide
  Target: LAMA2; (+) strand; PAM type: NNAGAAW; PAM sequence: GCAGAAA
gctttcttgaaatctaagaa

SEQ ID NO: 15281 - DNA, 20 bp, Artificial Sequence
  Description of Artificial Sequence: Synthetic oligonucleotide
  Target: LAMA2; (+) strand; PAM type: NNAGAAW; PAM sequence: CAAGAAA
ataactgttaggcagtgggt

SEQ ID NO: 15282 - DNA, 20 bp, Artificial Sequence
  Description of Artificial Sequence: Synthetic oligonucleotide
  Target: LAMA2; (+) strand; PAM type: NNAGAAW; PAM sequence: GTAGAAA
ccttgttatagtttcatgtg

SEQ ID NO: 15283 - DNA, 20 bp, Artificial Sequence
  Description of Artificial Sequence: Synthetic oligonucleotide
  Target: LAMA2; (+) strand; PAM type: NNAGAAW; PAM sequence: GAAGAAA
cctgagactgggtaacttat

SEQ ID NO: 15284 - DNA, 20 bp, Artificial Sequence
  Description of Artificial Sequence: Synthetic oligonucleotide
  Target: LAMA2; (+) strand; PAM type: NNAGAAW; PAM sequence: AGAGAAT
cacatagtggcaggaaagag

SEQ ID NO: 15285 - DNA, 20 bp, Artificial Sequence
  Description of Artificial Sequence: Synthetic oligonucleotide
  Target: LAMA2; (+) strand; PAM type: NNAGAAW; PAM sequence: TGAGAAT
cttcgaacaacctgatcttg

SEQ ID NO: 15286 - DNA, 20 bp, Artificial Sequence
  Description of Artificial Sequence: Synthetic oligonucleotide
  Target: LAMA2; (+) strand; PAM type: NNAGAAW; PAM sequence: AGAGAAA
ggtggtcggtggggggacac

SEQ ID NO: 15287 - DNA, 20 bp, Artificial Sequence
  Description of Artificial Sequence: Synthetic oligonucleotide
  Target: LAMA2; (+) strand; PAM type: NNAGAAW; PAM sequence: AAAGAAT
caaagacatatataacgaaa

SEQ ID NO: 15288 - DNA, 20 bp, Artificial Sequence
  Description of Artificial Sequence: Synthetic oligonucleotide
  Target: LAMA2; (+) strand; PAM type: NNAGAAW; PAM sequence: CCAGAAT
cagattgctggtcctcaccc

SEQ ID NO: 15289 - DNA, 20 bp, Artificial Sequence
  Description of Artificial Sequence: Synthetic oligonucleotide
  Target: LAMA2; (+) strand; PAM type: NNAGAAW; PAM sequence: TGAGAAT
tgtaggtttgtggcagggcc

SEQ ID NO: 15290 - DNA, 20 bp, Artificial Sequence
  Description of Artificial Sequence: Synthetic oligonucleotide
  Target: LAMA2; (+) strand; PAM type: NNAGAAW; PAM sequence: CAAGAAT
gcccagtgcaaaactctctc

SEQ ID NO: 15291 - DNA, 20 bp, Artificial Sequence
  Description of Artificial Sequence: Synthetic oligonucleotide
  Target: LAMA2; (+) strand; PAM type: NNAGAAW; PAM sequence: ATAGAAA
gtgcaaaactctctccaaga

SEQ ID NO: 15292 - DNA, 20 bp, Artificial Sequence
  Description of Artificial Sequence: Synthetic oligonucleotide
  Target: LAMA2; (+) strand; PAM type: NNAGAAW; PAM sequence: GTAGAAA
ttcggatacacccttgaatg

SEQ ID NO: 15293 - DNA, 20 bp, Artificial Sequence
  Description of Artificial Sequence: Synthetic oligonucleotide
  Target: LAMA2; (+) strand; PAM type: NNAGAAW; PAM sequence: ATAGAAA
gagttttcaaaggtaatatt

SEQ ID NO: 15294 - DNA, 20 bp, Artificial Sequence
  Description of Artificial Sequence: Synthetic oligonucleotide
  Target: LAMA2; (+) strand; PAM type: NNAGAAW; PAM sequence: TGAGAAA
attcagctgacaaaagagtt

SEQ ID NO: 15295 - DNA, 20 bp, Artificial Sequence
  Description of Artificial Sequence: Synthetic oligonucleotide
  Target: LAMA2; (+) strand; PAM type: NNAGAAW; PAM sequence: GTAGAAT
attttaaacttttatttgac

SEQ ID NO: 15296 - DNA, 20 bp, Artificial Sequence
  Description of Artificial Sequence: Synthetic oligonucleotide
  Target: LAMA2; (+) strand; PAM type: NNAGAAW; PAM sequence: GCAGAAT
gcctataaagcagactcttg

SEQ ID NO: 15297 - DNA, 20 bp, Artificial Sequence
  Description of Artificial Sequence: Synthetic oligonucleotide
  Target: LAMA2; (+) strand; PAM type: NNAGAAW; PAM sequence: GTAGAAA
tggcagaatagacatcattt

SEQ ID NO: 15298 - DNA, 20 bp, Artificial Sequence
  Description of Artificial Sequence: Synthetic oligonucleotide
  Target: LAMA2; (+) strand; PAM type: NNAGAAW; PAM sequence: GGAGAAT
gtagaaaacctgaagcacct

SEQ ID NO: 15299 - DNA, 20 bp, Artificial Sequence
  Description of Artificial Sequence: Synthetic oligonucleotide
  Target: LAMA2; (+) strand; PAM type: NNAGAAW; PAM sequence: TTAGAAA
attctttctttcttttgagg

SEQ ID NO: 15300 - DNA, 20 bp, Artificial Sequence
  Description of Artificial Sequence: Synthetic oligonucleotide
  Target: LAMA2; (+) strand; PAM type: NNAGAAW; PAM sequence: AAAGAAA
tttaattgctgtaaccccca

SEQ ID NO: 15301 - DNA, 20 bp, Artificial Sequence
  Description of Artificial Sequence: Synthetic oligonucleotide
  Target: LAMA2; (+) strand; PAM type: NNAGAAW; PAM sequence: TGAGAAA
ccccaaaagaaatataatat

SEQ ID NO: 15302 - DNA, 20 bp, Artificial Sequence
  Description of Artificial Sequence: Synthetic oligonucleotide
  Target: LAMA2; (+) strand; PAM type: NNAGAAW; PAM sequence: AGAGAAA
aactcgagacgaggcctttg

SEQ ID NO: 15303 - DNA, 20 bp, Artificial Sequence
  Description of Artificial Sequence: Synthetic oligonucleotide
  Target: LAMA2; (+) strand; PAM type: NNAGAAW; PAM sequence: TCAGAAA
gagagaaatttggaagggct

SEQ ID NO: 15304 - DNA, 20 bp, Artificial Sequence
  Description of Artificial Sequence: Synthetic oligonucleotide
  Target: LAMA2; (+) strand; PAM type: NNAGAAW; PAM sequence: TAAGAAA
acctatacattttatcatct

SEQ ID NO: 15305 - DNA, 20 bp, Artificial Sequence
  Description of Artificial Sequence: Synthetic oligonucleotide
  Target: LAMA2; (+) strand; PAM type: NNAGAAW; PAM sequence: AAAGAAA
atcatcttaagaaatgctga

SEQ ID NO: 15306 - DNA, 20 bp, Artificial Sequence
  Description of Artificial Sequence: Synthetic oligonucleotide
  Target: LAMA2; (+) strand; PAM type: NNAGAAW; PAM sequence: TCAGAAA
cccctcccagacctcctgaa

SEQ ID NO: 15307 - DNA, 20 bp, Artificial Sequence
  Description of Artificial Sequence: Synthetic oligonucleotide
  Target: LAMA2; (+) strand; PAM type: NNAGAAW; PAM sequence: TGAGAAT
gattatgaggcatgttagtt

SEQ ID NO: 15308 - DNA, 20 bp, Artificial Sequence
  Description of Artificial Sequence: Synthetic oligonucleotide
  Target: LAMA2; (+) strand; PAM type: NNAGAAW; PAM sequence: TTAGAAA
atgactcgaaaattatcact

SEQ ID NO: 15309 - DNA, 20 bp, Artificial Sequence
  Description of Artificial Sequence: Synthetic oligonucleotide
  Target: LAMA2; (+) strand; PAM type: NNAGAAW; PAM sequence: GAAGAAA
acttccagatcaatcagttg

SEQ ID NO: 15310 - DNA, 20 bp, Artificial Sequence
  Description of Artificial Sequence: Synthetic oligonucleotide
  Target: LAMA2; (+) strand; PAM type: NNAGAAW; PAM sequence: AAAGAAA
agatcaatcagttggaagaa

SEQ ID NO: 15311 - DNA, 20 bp, Artificial Sequence
  Description of Artificial Sequence: Synthetic oligonucleotide
  Target: LAMA2; (+) strand; PAM type: NNAGAAW; PAM sequence: CTAGAAT
tctactagcatgacaatgac

SEQ ID NO: 15312 - DNA, 20 bp, Artificial Sequence
  Description of Artificial Sequence: Synthetic oligonucleotide
  Target: LAMA2; (+) strand; PAM type: NNAGAAW; PAM sequence: AGAGAAA
atcattacattcaaagtaat

SEQ ID NO: 15313 - DNA, 20 bp, Artificial Sequence
  Description of Artificial Sequence: Synthetic oligonucleotide
  Target: LAMA2; (+) strand; PAM type: NNAGAAW; PAM sequence: CTAGAAT
tcatttcatcaatcagattc

SEQ ID NO: 15314 - DNA, 20 bp, Artificial Sequence
  Description of Artificial Sequence: Synthetic oligonucleotide
  Target: LAMA2; (+) strand; PAM type: NNAGAAW; PAM sequence: GAAGAAA
gagagtcccggggggaaaat

SEQ ID NO: 15315 - DNA, 20 bp, Artificial Sequence
  Description of Artificial Sequence: Synthetic oligonucleotide
  Target: LAMA2; (+) strand; PAM type: NNAGAAW; PAM sequence: TCAGAAA
aatcgcctatttgcagtaaa

SEQ ID NO: 15316 - DNA, 20 bp, Artificial Sequence
  Description of Artificial Sequence: Synthetic oligonucleotide
  Target: LAMA2; (+) strand; PAM type: NNAGAAW; PAM sequence: TAAGAAA
caactctgaaagggggcttc

SEQ ID NO: 15317 - DNA, 20 bp, Artificial Sequence
  Description of Artificial Sequence: Synthetic oligonucleotide
  Target: LAMA2; (+) strand; PAM type: NNAGAAW; PAM sequence: CAAGAAA
ggggcttctaagaaacagaa

SEQ ID NO: 15318 - DNA, 20 bp, Artificial Sequence
  Description of Artificial Sequence: Synthetic oligonucleotide
  Target: LAMA2; (+) strand; PAM type: NNAGAAW; PAM sequence: AAAGAAT
atgaccagttaccatcgccc

SEQ ID NO: 15319 - DNA, 20 bp, Artificial Sequence
  Description of Artificial Sequence: Synthetic oligonucleotide
  Target: LAMA2; (+) strand; PAM type: NNAGAAW; PAM sequence: CAAGAAA
ataacagttacttctcaact

SEQ ID NO: 15320 - DNA, 20 bp, Artificial Sequence
  Description of Artificial Sequence: Synthetic oligonucleotide
  Target: LAMA2; (+) strand; PAM type: NNAGAAW; PAM sequence: TCAGAAA
aagtatctgactccaacagg

SEQ ID NO: 15321 - DNA, 20 bp, Artificial Sequence
  Description of Artificial Sequence: Synthetic oligonucleotide
  Target: LAMA2; (+) strand; PAM type: NNAGAAW; PAM sequence: GTAGAAA
ctctggcatatagtatgtat

SEQ ID NO: 15322 - DNA, 20 bp, Artificial Sequence
  Description of Artificial Sequence: Synthetic oligonucleotide
  Target: LAMA2; (+) strand; PAM type: NNAGAAW; PAM sequence: GAAGAAT
tttagattaagtagtaagag

SEQ ID NO: 15323 - DNA, 20 bp, Artificial Sequence
  Description of Artificial Sequence: Synthetic oligonucleotide
  Target: LAMA2; (+) strand; PAM type: NNAGAAW; PAM sequence: GTAGAAT
gacttagccttgtcattctg

SEQ ID NO: 15324 - DNA, 20 bp, Artificial Sequence
  Description of Artificial Sequence: Synthetic oligonucleotide
  Target: LAMA2; (+) strand; PAM type: NNAGAAW; PAM sequence: CCAGAAA
actgacatgctagcagtatt

SEQ ID NO: 15325 - DNA, 20 bp, Artificial Sequence
  Description of Artificial Sequence: Synthetic oligonucleotide
  Target: LAMA2; (+) strand; PAM type: NNAGAAW; PAM sequence: TGAGAAA
tggaaagcatagtaagtatt

SEQ ID NO: 15326 - DNA, 20 bp, Artificial Sequence
  Description of Artificial Sequence: Synthetic oligonucleotide
  Target: LAMA2; (+) strand; PAM type: NNAGAAW; PAM sequence: TCAGAAA
cccatccctaaatgaccaac

SEQ ID NO: 15327 - DNA, 20 bp, Artificial Sequence
  Description of Artificial Sequence: Synthetic oligonucleotide
  Target: LAMA2; (+) strand; PAM type: NNAGAAW; PAM sequence: TGAGAAT
aatgaccaactcagaaactc

SEQ ID NO: 15328 - DNA, 20 bp, Artificial Sequence
  Description of Artificial Sequence: Synthetic oligonucleotide
  Target: LAMA2; (+) strand; PAM type: NNAGAAW; PAM sequence: CCAGAAA
agaaactctgagaatggggc

SEQ ID NO: 15329 - DNA, 20 bp, Artificial Sequence
  Description of Artificial Sequence: Synthetic oligonucleotide
  Target: LAMA2; (+) strand; PAM type: NNAGAAW; PAM sequence: GAAGAAT
aggataagcactgggtcaca

SEQ ID NO: 15330 - DNA, 20 bp, Artificial Sequence
  Description of Artificial Sequence: Synthetic oligonucleotide
  Target: LAMA2; (+) strand; PAM type: NNAGAAW; PAM sequence: TCAGAAA
agaataaagagaagaacatt

SEQ ID NO: 15331 - DNA, 20 bp, Artificial Sequence
  Description of Artificial Sequence: Synthetic oligonucleotide
  Target: LAMA2; (+) strand; PAM type: NNAGAAW; PAM sequence: AAAGAAA
catatacaaaggcatggagg

SEQ ID NO: 15332 - DNA, 20 bp, Artificial Sequence
  Description of Artificial Sequence: Synthetic oligonucleotide
  Target: LAMA2; (+) strand; PAM type: NNAGAAW; PAM sequence: ATAGAAA
gcatgtgaacgactgaaggg

SEQ ID NO: 15333 - DNA, 20 bp, Artificial Sequence
  Description of Artificial Sequence: Synthetic oligonucleotide
  Target: LAMA2; (+) strand; PAM type: NNAGAAW; PAM sequence: AAAGAAA
gtgaacgactgaagggatag

SEQ ID NO: 15334 - DNA, 20 bp, Artificial Sequence
  Description of Artificial Sequence: Synthetic oligonucleotide
  Target: LAMA2; (+) strand; PAM type: NNAGAAW; PAM sequence: AGAGAAT
agtgcagaccttcagttata

SEQ ID NO: 15335 - DNA, 20 bp, Artificial Sequence
  Description of Artificial Sequence: Synthetic oligonucleotide
  Target: LAMA2; (+) strand; PAM type: NNAGAAW; PAM sequence: GCAGAAT
atgggttaaaataaaatgtt

SEQ ID NO: 15336 - DNA, 20 bp, Artificial Sequence
  Description of Artificial Sequence: Synthetic oligonucleotide
  Target: LAMA2; (+) strand; PAM type: NNAGAAW; PAM sequence: CTAGAAA
gaaaatagtgtgatattagg

SEQ ID NO: 15337 - DNA, 20 bp, Artificial Sequence
  Description of Artificial Sequence: Synthetic oligonucleotide
  Target: LAMA2; (+) strand; PAM type: NNAGAAW; PAM sequence: ATAGAAA
accagggtatttgaggttga

SEQ ID NO: 15338 - DNA, 20 bp, Artificial Sequence
  Description of Artificial Sequence: Synthetic oligonucleotide
  Target: LAMA2; (+) strand; PAM type: NNAGAAW; PAM sequence: AAAGAAT
tagaaatgattcctggcctc

SEQ ID NO: 15339 - DNA, 20 bp, Artificial Sequence
  Description of Artificial Sequence: Synthetic oligonucleotide
  Target: LAMA2; (+) strand; PAM type: NNAGAAW; PAM sequence: GAAGAAA
gcagaagtggagaggaattg

SEQ ID NO: 15340 - DNA, 20 bp, Artificial Sequence
  Description of Artificial Sequence: Synthetic oligonucleotide
  Target: LAMA2; (+) strand; PAM type: NNAGAAW; PAM sequence: GCAGAAA
cttaggaagtgtccagtaca

SEQ ID NO: 15341 - DNA, 20 bp, Artificial Sequence
  Description of Artificial Sequence: Synthetic oligonucleotide
  Target: LAMA2; (+) strand; PAM type: NNAGAAW; PAM sequence: GAAGAAA
gggaactggggacgtcatgg

SEQ ID NO: 15342 - DNA, 20 bp, Artificial Sequence
  Description of Artificial Sequence: Synthetic oligonucleotide
  Target: LAMA2; (+) strand; PAM type: NNAGAAW; PAM sequence: AAAGAAT
taaagagtaagttgctacat

SEQ ID NO: 15343 - DNA, 20 bp, Artificial Sequence
  Description of Artificial Sequence: Synthetic oligonucleotide
  Target: LAMA2; (+) strand; PAM type: NNAGAAW; PAM sequence: ATAGAAA
catggtgacaccctatctct

SEQ ID NO: 15344 - DNA, 20 bp, Artificial Sequence
  Description of Artificial Sequence: Synthetic oligonucleotide
  Target: LAMA2; (+) strand; PAM type: NNAGAAW; PAM sequence: AAAGAAA
agtgtctcaaaaaaaaaaaa

SEQ ID NO: 15345 - DNA, 20 bp, Artificial Sequence
  Description of Artificial Sequence: Synthetic oligonucleotide
  Target: LAMA2; (+) strand; PAM type: NNAGAAW; PAM sequence: AAAGAAA
tcaaaaaaaaaaaaaaagaa

SEQ ID NO: 15346 - DNA, 20 bp, Artificial Sequence
  Description of Artificial Sequence: Synthetic oligonucleotide
  Target: LAMA2; (+) strand; PAM type: NNAGAAW; PAM sequence: AAAGAAA
aaaaaaagaaaaagaaaata

SEQ ID NO: 15347 - DNA, 20 bp, Artificial Sequence
  Description of Artificial Sequence: Synthetic oligonucleotide
  Target: LAMA2; (+) strand; PAM type: NNAGAAW; PAM sequence: GAAGAAT
gatagcttttgcaggttcct

SEQ ID NO: 15348 - DNA, 20 bp, Artificial Sequence
  Description of Artificial Sequence: Synthetic oligonucleotide
  Target: LAMA2; (+) strand; PAM type: NNAGAAW; PAM sequence: AAAGAAA
cacaccaacacaccaaaaaa

SEQ ID NO: 15349 - DNA, 20 bp, Artificial Sequence
  Description of Artificial Sequence: Synthetic oligonucleotide
  Target: LAMA2; (+) strand; PAM type: NNAGAAW; PAM sequence: AAAGAAA
ccaacacaccaaaaaaaaag

SEQ ID NO: 15350 - DNA, 20 bp, Artificial Sequence
  Description of Artificial Sequence: Synthetic oligonucleotide
  Target: LAMA2; (+) strand; PAM type: NNAGAAW; PAM sequence: AAAGAAA
cacaccaaaaaaaaagaaag

SEQ ID NO: 15351 - DNA, 20 bp, Artificial Sequence
  Description of Artificial Sequence: Synthetic oligonucleotide
  Target: LAMA2; (+) strand; PAM type: NNAGAAW; PAM sequence: AAAGAAA
aaaaaaaaagaaagaaagaa

SEQ ID NO: 15352 - DNA, 20 bp, Artificial Sequence
  Description of Artificial Sequence: Synthetic oligonucleotide
  Target: LAMA2; (+) strand; PAM type: NNAGAAW; PAM sequence: GTAGAAA
taattaattacaagttaaaa

SEQ ID NO: 15353 - DNA, 20 bp, Artificial Sequence
  Description of Artificial Sequence: Synthetic oligonucleotide
  Target: LAMA2; (+) strand; PAM type: NNAGAAW; PAM sequence: GTAGAAT
atacttatgccatacttttt

SEQ ID NO: 15354 - DNA, 20 bp, Artificial Sequence
  Description of Artificial Sequence: Synthetic oligonucleotide
  Target: LAMA2; (+) strand; PAM type: NNAGAAW; PAM sequence: TAAGAAT
gtactcatctaatctttctt

SEQ ID NO: 15355 - DNA, 20 bp, Artificial Sequence
  Description of Artificial Sequence: Synthetic oligonucleotide
  Target: LAMA2; (+) strand; PAM type: NNAGAAW; PAM sequence: GGAGAAT
ctactcgggaggctgaggca

SEQ ID NO: 15356 - DNA, 20 bp, Artificial Sequence
  Description of Artificial Sequence: Synthetic oligonucleotide
  Target: LAMA2; (+) strand; PAM type: NNAGAAW; PAM sequence: TCAGAAA
cgacagagtgagactccgtc

SEQ ID NO: 15357 - DNA, 20 bp, Artificial Sequence
  Description of Artificial Sequence: Synthetic oligonucleotide
  Target: LAMA2; (+) strand; PAM type: NNAGAAW; PAM sequence: AAAGAAT
ctaaaattggcagttgtgta

SEQ ID NO: 15358 - DNA, 20 bp, Artificial Sequence
  Description of Artificial Sequence: Synthetic oligonucleotide
  Target: LAMA2; (+) strand; PAM type: NNAGAAW; PAM sequence: AAAGAAA
gacgaatcaatctatataaa

SEQ ID NO: 15359 - DNA, 20 bp, Artificial Sequence
  Description of Artificial Sequence: Synthetic oligonucleotide
  Target: LAMA2; (+) strand; PAM type: NNAGAAW; PAM sequence: GTAGAAT
gtctatgtttctaccactct

SEQ ID NO: 15360 - DNA, 20 bp, Artificial Sequence
  Description of Artificial Sequence: Synthetic oligonucleotide
  Target: LAMA2; (+) strand; PAM type: NNAGAAW; PAM sequence: AGAGAAT
atcactgtgccctagtacat

SEQ ID NO: 15361 - DNA, 20 bp, Artificial Sequence
  Description of Artificial Sequence: Synthetic oligonucleotide
  Target: LAMA2; (+) strand; PAM type: NNAGAAW; PAM sequence: CCAGAAT
aatcagaggagtggctatta

SEQ ID NO: 15362 - DNA, 20 bp, Artificial Sequence
  Description of Artificial Sequence: Synthetic oligonucleotide
  Target: LAMA2; (+) strand; PAM type: NNAGAAW; PAM sequence: ATAGAAA
atgaattagcattattgtct

SEQ ID NO: 15363 - DNA, 20 bp, Artificial Sequence
  Description of Artificial Sequence: Synthetic oligonucleotide
  Target: LAMA2; (+) strand; PAM type: NNAGAAW; PAM sequence: GTAGAAT
tgatgcagttaaatctgtag

SEQ ID NO: 15364 - DNA, 20 bp, Artificial Sequence
  Description of Artificial Sequence: Synthetic oligonucleotide
  Target: LAMA2; (+) strand; PAM type: NNAGAAW; PAM sequence: AAAGAAT
taggaatgaatcagaagtat

SEQ ID NO: 15365 - DNA, 20 bp, Artificial Sequence
  Description of Artificial Sequence: Synthetic oligonucleotide
  Target: LAMA2; (+) strand; PAM type: NNAGAAW; PAM sequence: GGAGAAA
gtaaaaaatagaccccaaat

SEQ ID NO: 15366 - DNA, 20 bp, Artificial Sequence
  Description of Artificial Sequence: Synthetic oligonucleotide
  Target: LAMA2; (+) strand; PAM type: NNAGAAW; PAM sequence: AAAGAAA
tgagacaagctatatgttcc

SEQ ID NO: 15367 - DNA, 20 bp, Artificial Sequence
  Description of Artificial Sequence: Synthetic oligonucleotide
  Target: LAMA2; (+) strand; PAM type: NNAGAAW; PAM sequence: CTAGAAT
tactcatttgtatatagatt

SEQ ID NO: 15368 - DNA, 20 bp, Artificial Sequence
  Description of Artificial Sequence: Synthetic oligonucleotide
  Target: LAMA2; (+) strand; PAM type: NNAGAAW; PAM sequence: TTAGAAA
attcagcacttatattttag

SEQ ID NO: 15369 - DNA, 20 bp, Artificial Sequence
  Description of Artificial Sequence: Synthetic oligonucleotide
  Target: LAMA2; (+) strand; PAM type: NNAGAAW; PAM sequence: GAAGAAA
tgactttctcacaatgagaa

SEQ ID NO: 15370 - DNA, 20 bp, Artificial Sequence
  Description of Artificial Sequence: Synthetic oligonucleotide
  Target: LAMA2; (+) strand; PAM type: NNAGAAW; PAM sequence: ACAGAAA
tgtcttgttcataatggtct

SEQ ID NO: 15371 - DNA, 20 bp, Artificial Sequence
  Description of Artificial Sequence: Synthetic oligonucleotide
  Target: LAMA2; (+) strand; PAM type: NNAGAAW; PAM sequence: TGAGAAA
aatgaataaatgggagccga

SEQ ID NO: 15372 - DNA, 20 bp, Artificial Sequence
  Description of Artificial Sequence: Synthetic oligonucleotide
  Target: LAMA2; (+) strand; PAM type: NNAGAAW; PAM sequence: ATAGAAA
acatagagtgatatgtggtc

SEQ ID NO: 15373 - DNA, 20 bp, Artificial Sequence
  Description of Artificial Sequence: Synthetic oligonucleotide
  Target: LAMA2; (+) strand; PAM type: NNAGAAW; PAM sequence: GGAGAAT
ctactcaggaggctgaggca

SEQ ID NO: 15374 - DNA, 20 bp, Artificial Sequence
  Description of Artificial Sequence: Synthetic oligonucleotide
  Target: LAMA2; (+) strand; PAM type: NNAGAAW; PAM sequence: AGAGAAA
aacgtgtagttatgtctcat

SEQ ID NO: 15375 - DNA, 20 bp, Artificial Sequence
  Description of Artificial Sequence: Synthetic oligonucleotide
  Target: LAMA2; (+) strand; PAM type: NNAGAAW; PAM sequence: CAAGAAA
ataaaatagatgacctctcc

SEQ ID NO: 15376 - DNA, 20 bp, Artificial Sequence
  Description of Artificial Sequence: Synthetic oligonucleotide
  Target: LAMA2; (+) strand; PAM type: NNAGAAW; PAM sequence: AGAGAAT
ttttgactagcataaatagt

SEQ ID NO: 15377 - DNA, 20 bp, Artificial Sequence
  Description of Artificial Sequence: Synthetic oligonucleotide
  Target: LAMA2; (+) strand; PAM type: NNAGAAW; PAM sequence: TTAGAAA
aacatagccctaggctacac

SEQ ID NO: 15378 - DNA, 20 bp, Artificial Sequence
  Description of Artificial Sequence: Synthetic oligonucleotide
  Target: LAMA2; (+) strand; PAM type: NNAGAAW; PAM sequence: CAAGAAT
aatagcggtgctattagccc

SEQ ID NO: 15379 - DNA, 20 bp, Artificial Sequence
  Description of Artificial Sequence: Synthetic oligonucleotide
  Target: LAMA2; (+) strand; PAM type: NNAGAAW; PAM sequence: AAAGAAA
tacttaatacttactgttat

SEQ ID NO: 15380 - DNA, 20 bp, Artificial Sequence
  Description of Artificial Sequence: Synthetic oligonucleotide
  Target: LAMA2; (+) strand; PAM type: NNAGAAW; PAM sequence: CCAGAAA
ttctgggaagtgcacctacc

SEQ ID NO: 15381 - DNA, 20 bp, Artificial Sequence
  Description of Artificial Sequence: Synthetic oligonucleotide
  Target: LAMA2; (+) strand; PAM type: NNAGAAW; PAM sequence: GAAGAAT
gcatgcttcacaaataaggt

SEQ ID NO: 15382 - DNA, 20 bp, Artificial Sequence
  Description of Artificial Sequence: Synthetic oligonucleotide
  Target: LAMA2; (+) strand; PAM type: NNAGAAW; PAM sequence: TTAGAAA
agtatttcatagctgaatta

SEQ ID NO: 15383 - DNA, 20 bp, Artificial Sequence
  Description of Artificial Sequence: Synthetic oligonucleotide
  Target: LAMA2; (+) strand; PAM type: NNAGAAW; PAM sequence: ATAGAAA
tagaaatataagtttaggtt

SEQ ID NO: 15384 - DNA, 20 bp, Artificial Sequence
  Description of Artificial Sequence: Synthetic oligonucleotide
  Target: LAMA2; (+) strand; PAM type: NNAGAAW; PAM sequence: CCAGAAT
tccttttttgaatcatccca

SEQ ID NO: 15385 - DNA, 20 bp, Artificial Sequence
  Description of Artificial Sequence: Synthetic oligonucleotide
  Target: LAMA2; (+) strand; PAM type: NNAGAAW; PAM sequence: TGAGAAA
aaggactatattgatgaagc

SEQ ID NO: 15386 - DNA, 20 bp, Artificial Sequence
  Description of Artificial Sequence: Synthetic oligonucleotide
  Target: LAMA2; (+) strand; PAM type: NNAGAAW; PAM sequence: TAAGAAA
acatgaagctacaaaactgg

SEQ ID NO: 15387 - DNA, 20 bp, Artificial Sequence
  Description of Artificial Sequence: Synthetic oligonucleotide
  Target: LAMA2; (+) strand; PAM type: NNAGAAW; PAM sequence: TCAGAAA
gttagggtcttaaaattatc

SEQ ID NO: 15388 - DNA, 20 bp, Artificial Sequence
  Description of Artificial Sequence: Synthetic oligonucleotide
  Target: LAMA2; (+) strand; PAM type: NNAGAAW; PAM sequence: AAAGAAA
tctcaaatggcattagtaaa

SEQ ID NO: 15389 - DNA, 20 bp, Artificial Sequence
  Description of Artificial Sequence: Synthetic oligonucleotide
  Target: LAMA2; (+) strand; PAM type: NNAGAAW; PAM sequence: TGAGAAT
catagaacctaccaaacaca

SEQ ID NO: 15390 - DNA, 20 bp, Artificial Sequence
  Description of Artificial Sequence: Synthetic oligonucleotide
  Target: LAMA2; (+) strand; PAM type: NNAGAAW; PAM sequence: GGAGAAA
acacatgagaattttttggg

SEQ ID NO: 15391 - DNA, 20 bp, Artificial Sequence
  Description of Artificial Sequence: Synthetic oligonucleotide
  Target: LAMA2; (+) strand; PAM type: NNAGAAW; PAM sequence: AAAGAAA
tacacataagcagtggtgtt

SEQ ID NO: 15392 - DNA, 20 bp, Artificial Sequence
  Description of Artificial Sequence: Synthetic oligonucleotide
  Target: LAMA2; (+) strand; PAM type: NNAGAAW; PAM sequence: TCAGAAT
ttctatgttcagttatcctt

SEQ ID NO: 15393 - DNA, 20 bp, Artificial Sequence
  Description of Artificial Sequence: Synthetic oligonucleotide
  Target: LAMA2; (+) strand; PAM type: NNAGAAW; PAM sequence: AGAGAAT
aattacaaaataagtgctat

SEQ ID NO: 15394 - DNA, 20 bp, Artificial Sequence
  Description of Artificial Sequence: Synthetic oligonucleotide
  Target: LAMA2; (+) strand; PAM type: NNAGAAW; PAM sequence: TAAGAAA
tttattaaatgactattgga

SEQ ID NO: 15395 - DNA, 20 bp, Artificial Sequence
  Description of Artificial Sequence: Synthetic oligonucleotide
  Target: LAMA2; (+) strand; PAM type: NNAGAAW; PAM sequence: CCAGAAA
gaaaaagaagacaatctgtc

SEQ ID NO: 15396 - DNA, 20 bp, Artificial Sequence
  Description of Artificial Sequence: Synthetic oligonucleotide
  Target: LAMA2; (+) strand; PAM type: NNAGAAW; PAM sequence: ACAGAAT
tgttggaatgtttttcatga

SEQ ID NO: 15397 - DNA, 20 bp, Artificial Sequence
  Description of Artificial Sequence: Synthetic oligonucleotide
  Target: LAMA2; (+) strand; PAM type: NNAGAAW; PAM sequence: AAAGAAA
tatagttctactttgctgga

SEQ ID NO: 15398 - DNA, 20 bp, Artificial Sequence
  Description of Artificial Sequence: Synthetic oligonucleotide
  Target: LAMA2; (+) strand; PAM type: NNAGAAW; PAM sequence: GAAGAAT
aaaagctatagctcaacaga

SEQ ID NO: 15399 - DNA, 20 bp, Artificial Sequence
  Description of Artificial Sequence: Synthetic oligonucleotide
  Target: LAMA2; (+) strand; PAM type: NNAGAAW; PAM sequence: GAAGAAT
agtctagccctataaagaag

SEQ ID NO: 15400 - DNA, 20 bp, Artificial Sequence
  Description of Artificial Sequence: Synthetic oligonucleotide
  Target: LAMA2; (+) strand; PAM type: NNAGAAW; PAM sequence: AAAGAAA
aataacttaaaaggaaaaac

SEQ ID NO: 15401 - DNA, 20 bp, Artificial Sequence
  Description of Artificial Sequence: Synthetic oligonucleotide
  Target: LAMA2; (+) strand; PAM type: NNAGAAW; PAM sequence: GGAGAAA
aaacaatttatacatttgca

SEQ ID NO: 15402 - DNA, 20 bp, Artificial Sequence
  Description of Artificial Sequence: Synthetic oligonucleotide
  Target: LAMA2; (+) strand; PAM type: NNAGAAW; PAM sequence: GAAGAAA
gagcaaccaacgaccactat

SEQ ID NO: 15403 - DNA, 20 bp, Artificial Sequence
  Description of Artificial Sequence: Synthetic oligonucleotide
  Target: LAMA2; (+) strand; PAM type: NNAGAAW; PAM sequence: GAAGAAA
gtggaggtcagacaatttga

SEQ ID NO: 15404 - DNA, 20 bp, Artificial Sequence
  Description of Artificial Sequence: Synthetic oligonucleotide
  Target: LAMA2; (+) strand; PAM type: NNAGAAW; PAM sequence: TAAGAAA
aaaaagcattgaaaatacca

SEQ ID NO: 15405 - DNA, 20 bp, Artificial Sequence
  Description of Artificial Sequence: Synthetic oligonucleotide
  Target: LAMA2; (+) strand; PAM type: NNAGAAW; PAM sequence: AAAGAAA
gcattgaaaataccataaga

SEQ ID NO: 15406 - DNA, 20 bp, Artificial Sequence
  Description of Artificial Sequence: Synthetic oligonucleotide
  Target: LAMA2; (+) strand; PAM type: NNAGAAW; PAM sequence: AAAGAAA
aataccataagaaaagaaac

SEQ ID NO: 15407 - DNA, 20 bp, Artificial Sequence
  Description of Artificial Sequence: Synthetic oligonucleotide
  Target: LAMA2; (+) strand; PAM type: NNAGAAW; PAM sequence: ATAGAAA
agaaaagaaacaaagaaatg

SEQ ID NO: 15408 - DNA, 20 bp, Artificial Sequence
  Description of Artificial Sequence: Synthetic oligonucleotide
  Target: LAMA2; (+) strand; PAM type: NNAGAAW; PAM sequence: CAAGAAT
tataaacacacatagacaat

SEQ ID NO: 15409 - DNA, 20 bp, Artificial Sequence
  Description of Artificial Sequence: Synthetic oligonucleotide
  Target: LAMA2; (+) strand; PAM type: NNAGAAW; PAM sequence: GGAGAAA
aagtggatcctttataagca

SEQ ID NO: 15410 - DNA, 20 bp, Artificial Sequence
  Description of Artificial Sequence: Synthetic oligonucleotide
  Target: LAMA2; (+) strand; PAM type: NNAGAAW; PAM sequence: TCAGAAT
ataactaatttctttaaata

SEQ ID NO: 15411 - DNA, 20 bp, Artificial Sequence
  Description of Artificial Sequence: Synthetic oligonucleotide
  Target: LAMA2; (+) strand; PAM type: NNAGAAW; PAM sequence: TAAGAAT
atcagaatgaaatgttattt

SEQ ID NO: 15412 - DNA, 20 bp, Artificial Sequence
  Description of Artificial Sequence: Synthetic oligonucleotide
  Target: LAMA2; (+) strand; PAM type: NNAGAAW; PAM sequence: CAAGAAA
gttttcctacatataatcac

SEQ ID NO: 15413 - DNA, 20 bp, Artificial Sequence
  Description of Artificial Sequence: Synthetic oligonucleotide
  Target: LAMA2; (+) strand; PAM type: NNAGAAW; PAM sequence: ACAGAAA
ctctagagggtgcaaggaaa

SEQ ID NO: 15414 - DNA, 20 bp, Artificial Sequence
  Description of Artificial Sequence: Synthetic oligonucleotide
  Target: LAMA2; (+) strand; PAM type: NNAGAAW; PAM sequence: AGAGAAT
ataagagactctaaaataac

SEQ ID NO: 15415 - DNA, 20 bp, Artificial Sequence
  Description of Artificial Sequence: Synthetic oligonucleotide
  Target: LAMA2; (+) strand; PAM type: NNAGAAW; PAM sequence: AAAGAAA
tatgtcacatgataaaggaa

SEQ ID NO: 15416 - DNA, 20 bp, Artificial Sequence
  Description of Artificial Sequence: Synthetic oligonucleotide
  Target: LAMA2; (+) strand; PAM type: NNAGAAW; PAM sequence: ACAGAAT
catgcacaaacatattctta

SEQ ID NO: 15417 - DNA, 20 bp, Artificial Sequence
  Description of Artificial Sequence: Synthetic oligonucleotide
  Target: LAMA2; (+) strand; PAM type: NNAGAAW; PAM sequence: GGAGAAA
acacgtgaacactggctatg

SEQ ID NO: 15418 - DNA, 20 bp, Artificial Sequence
  Description of Artificial Sequence: Synthetic oligonucleotide
  Target: LAMA2; (+) strand; PAM type: NNAGAAW; PAM sequence: GCAGAAA
gttcacggatggtactcttg

SEQ ID NO: 15419 - DNA, 20 bp, Artificial Sequence
  Description of Artificial Sequence: Synthetic oligonucleotide
  Target: LAMA2; (+) strand; PAM type: NNAGAAW; PAM sequence: CCAGAAT
taggatgggcaaatccatat

SEQ ID NO: 15420 - DNA, 20 bp, Artificial Sequence
  Description of Artificial Sequence: Synthetic oligonucleotide
  Target: LAMA2; (+) strand; PAM type: NNAGAAW; PAM sequence: ACAGAAT
aaagaggctgagtggtgtac

SEQ ID NO: 15421 - DNA, 20 bp, Artificial Sequence
  Description of Artificial Sequence: Synthetic oligonucleotide
  Target: LAMA2; (+) strand; PAM type: NNAGAAW; PAM sequence: CTAGAAA
tactgtccttcagggatgtc

SEQ ID NO: 15422 - DNA, 20 bp, Artificial Sequence
  Description of Artificial Sequence: Synthetic oligonucleotide
  Target: LAMA2; (+) strand; PAM type: NNAGAAW; PAM sequence: GCAGAAT
gggtgctacctgcatatctt

SEQ ID NO: 15423 - DNA, 20 bp, Artificial Sequence
  Description of Artificial Sequence: Synthetic oligonucleotide
  Target: LAMA2; (+) strand; PAM type: NNAGAAW; PAM sequence: TCAGAAA
caactttatggctagatggg

SEQ ID NO: 15424 - DNA, 20 bp, Artificial Sequence
  Description of Artificial Sequence: Synthetic oligonucleotide
  Target: LAMA2; (+) strand; PAM type: NNAGAAW; PAM sequence: GCAGAAT
acaaataaaataagactaat

SEQ ID NO: 15425 - DNA, 20 bp, Artificial Sequence
  Description of Artificial Sequence: Synthetic oligonucleotide
  Target: LAMA2; (+) strand; PAM type: NNAGAAW; PAM sequence: GTAGAAA
tagtctagtttaactttgat

SEQ ID NO: 15426 - DNA, 20 bp, Artificial Sequence
  Description of Artificial Sequence: Synthetic oligonucleotide
  Target: LAMA2; (+) strand; PAM type: NNAGAAW; PAM sequence: AAAGAAT
tatgctgaattaaaaaaaaa

SEQ ID NO: 15427 - DNA, 20 bp, Artificial Sequence
  Description of Artificial Sequence: Synthetic oligonucleotide
  Target: LAMA2; (+) strand; PAM type: NNAGAAW; PAM sequence: CTAGAAA
tttgtttagttagatcttca

SEQ ID NO: 15428 - DNA, 20 bp, Artificial Sequence
  Description of Artificial Sequence: Synthetic oligonucleotide
  Target: LAMA2; (+) strand; PAM type: NNAGAAW; PAM sequence: TTAGAAA
atcttcactagaaataagta

SEQ ID NO: 15429 - DNA, 20 bp, Artificial Sequence
  Description of Artificial Sequence: Synthetic oligonucleotide
  Target: LAMA2; (+) strand; PAM type: NNAGAAW; PAM sequence: ACAGAAA
gataatagattagatgatag

SEQ ID NO: 15430 - DNA, 20 bp, Artificial Sequence
  Description of Artificial Sequence: Synthetic oligonucleotide
  Target: LAMA2; (+) strand; PAM type: NNAGAAW; PAM sequence: AAAGAAT
atagattagatgatagacag

SEQ ID NO: 15431 - DNA, 20 bp, Artificial Sequence
  Description of Artificial Sequence: Synthetic oligonucleotide
  Target: LAMA2; (+) strand; PAM type: NNAGAAW; PAM sequence: GAAGAAT
aagaataagagatttattat

SEQ ID NO: 15432 - DNA, 20 bp, Artificial Sequence
  Description of Artificial Sequence: Synthetic oligonucleotide
  Target: LAMA2; (+) strand; PAM type: NNAGAAW; PAM sequence: AGAGAAT
tcactttgagtccaaaggcc

SEQ ID NO: 15433 - DNA, 20 bp, Artificial Sequence
  Description of Artificial Sequence: Synthetic oligonucleotide
  Target: LAMA2; (+) strand; PAM type: NNAGAAW; PAM sequence: AGAGAAA
aaccacagttcaagaactag

SEQ ID NO: 15434 - DNA, 20 bp, Artificial Sequence
  Description of Artificial Sequence: Synthetic oligonucleotide
  Target: LAMA2; (+) strand; PAM type: NNAGAAW; PAM sequence: GCAGAAA
gtcccagctcaatctgtaag

SEQ ID NO: 15435 - DNA, 20 bp, Artificial Sequence
  Description of Artificial Sequence: Synthetic oligonucleotide
  Target: LAMA2; (+) strand; PAM type: NNAGAAW; PAM sequence: CCAGAAA
gcaatctcttttactgtcat

SEQ ID NO: 15436 - DNA, 20 bp, Artificial Sequence
  Description of Artificial Sequence: Synthetic oligonucleotide
  Target: LAMA2; (+) strand; PAM type: NNAGAAW; PAM sequence: ACAGAAT
taggaaaaataatataaaat

SEQ ID NO: 15437 - DNA, 20 bp, Artificial Sequence
  Description of Artificial Sequence: Synthetic oligonucleotide
  Target: LAMA2; (+) strand; PAM type: NNAGAAW; PAM sequence: ATAGAAA
tcagatataatgcatttctc

SEQ ID NO: 15438 - DNA, 20 bp, Artificial Sequence
  Description of Artificial Sequence: Synthetic oligonucleotide
  Target: LAMA2; (+) strand; PAM type: NNAGAAW; PAM sequence: GAAGAAA
atgtaagctttaaacaaagt

SEQ ID NO: 15439 - DNA, 20 bp, Artificial Sequence
  Description of Artificial Sequence: Synthetic oligonucleotide
  Target: LAMA2; (+) strand; PAM type: NNAGAAW; PAM sequence: CTAGAAA
gtgaagaaaaggggagaagc

SEQ ID NO: 15440 - DNA, 20 bp, Artificial Sequence
  Description of Artificial Sequence: Synthetic oligonucleotide
  Target: LAMA2; (+) strand; PAM type: NNAGAAW; PAM sequence: ACAGAAA
cctagaaaaaataacattat

SEQ ID NO: 15441 - DNA, 20 bp, Artificial Sequence
  Description of Artificial Sequence: Synthetic oligonucleotide
  Target: LAMA2; (+) strand; PAM type: NNAGAAW; PAM sequence: AGAGAAT
aaaaataacattatacagaa

SEQ ID NO: 15442 - DNA, 20 bp, Artificial Sequence
  Description of Artificial Sequence: Synthetic oligonucleotide
  Target: LAMA2; (+) strand; PAM type: NNAGAAW; PAM sequence: ATAGAAA
acaaggagagtaaaaactcc

SEQ ID NO: 15443 - DNA, 20 bp, Artificial Sequence
  Description of Artificial Sequence: Synthetic oligonucleotide
  Target: LAMA2; (+) strand; PAM type: NNAGAAW; PAM sequence: ATAGAAA
gggcaaaagtgaacaaaaag

SEQ ID NO: 15444 - DNA, 20 bp, Artificial Sequence
  Description of Artificial Sequence: Synthetic oligonucleotide
  Target: LAMA2; (+) strand; PAM type: NNAGAAW; PAM sequence: TAAGAAT
taattaactttagttttcac

SEQ ID NO: 15445 - DNA, 20 bp, Artificial Sequence
  Description of Artificial Sequence: Synthetic oligonucleotide
  Target: LAMA2; (+) strand; PAM type: NNAGAAW; PAM sequence: AGAGAAA
tgacaatattcgagttctcc

SEQ ID NO: 15446 - DNA, 20 bp, Artificial Sequence
  Description of Artificial Sequence: Synthetic oligonucleotide
  Target: LAMA2; (+) strand; PAM type: NNAGAAW; PAM sequence: AAAGAAT
acagatatattatatatttt

SEQ ID NO: 15447 - DNA, 20 bp, Artificial Sequence
  Description of Artificial Sequence: Synthetic oligonucleotide
  Target: LAMA2; (+) strand; PAM type: NNAGAAW; PAM sequence: GCAGAAT
aatccaaaggcagtttggag

SEQ ID NO: 15448 - DNA, 20 bp, Artificial Sequence
  Description of Artificial Sequence: Synthetic oligonucleotide
  Target: LAMA2; (+) strand; PAM type: NNAGAAW; PAM sequence: AGAGAAA
ttccaaacaagcagacagag

SEQ ID NO: 15449 - DNA, 20 bp, Artificial Sequence
  Description of Artificial Sequence: Synthetic oligonucleotide
  Target: LAMA2; (+) strand; PAM type: NNAGAAW; PAM sequence: AAAGAAA
agacagagagagaaaaaaat

SEQ ID NO: 15450 - DNA, 20 bp, Artificial Sequence
  Description of Artificial Sequence: Synthetic oligonucleotide
  Target: LAMA2; (+) strand; PAM type: NNAGAAW; PAM sequence: GGAGAAT
ataaagaaatgtgaagggga

SEQ ID NO: 15451 - DNA, 20 bp, Artificial Sequence
  Description of Artificial Sequence: Synthetic oligonucleotide
  Target: LAMA2; (+) strand; PAM type: NNAGAAW; PAM sequence: AGAGAAA
attctggaaaagacaaaaaa

SEQ ID NO: 15452 - DNA, 20 bp, Artificial Sequence
  Description of Artificial Sequence: Synthetic oligonucleotide
  Target: LAMA2; (+) strand; PAM type: NNAGAAW; PAM sequence: AGAGAAA
aaagacaaaaaaagagaaaa

SEQ ID NO: 15453 - DNA, 20 bp, Artificial Sequence
  Description of Artificial Sequence: Synthetic oligonucleotide
  Target: LAMA2; (+) strand; PAM type: NNAGAAW; PAM sequence: CAAGAAA
gtaattatcaccagctgcct

SEQ ID NO: 15454 - DNA, 20 bp, Artificial Sequence
  Description of Artificial Sequence: Synthetic oligonucleotide
  Target: LAMA2; (+) strand; PAM type: NNAGAAW; PAM sequence: AGAGAAA
tgtagcctccaaggcaggga

SEQ ID NO: 15455 - DNA, 20 bp, Artificial Sequence
  Description of Artificial Sequence: Synthetic oligonucleotide
  Target: LAMA2; (+) strand; PAM type: NNAGAAW; PAM sequence: ACAGAAA
atactgcaaatcttagggga

SEQ ID NO: 15456 - DNA, 20 bp, Artificial Sequence
  Description of Artificial Sequence: Synthetic oligonucleotide
  Target: LAMA2; (+) strand; PAM type: NNAGAAW; PAM sequence: GAAGAAA
cactatgcaaactctaacca

SEQ ID NO: 15457 - DNA, 20 bp, Artificial Sequence
  Description of Artificial Sequence: Synthetic oligonucleotide
  Target: LAMA2; (+) strand; PAM type: NNAGAAW; PAM sequence: AAAGAAT
aaaagactttaattttttta

SEQ ID NO: 15458 - DNA, 20 bp, Artificial Sequence
  Description of Artificial Sequence: Synthetic oligonucleotide
  Target: LAMA2; (+) strand; PAM type: NNAGAAW; PAM sequence: AAAGAAA
ttaaaagaattattaaggac

SEQ ID NO: 15459 - DNA, 20 bp, Artificial Sequence
  Description of Artificial Sequence: Synthetic oligonucleotide
  Target: LAMA2; (+) strand; PAM type: NNAGAAW; PAM sequence: ATAGAAT
ggacaaagaaagtgatcatg

SEQ ID NO: 15460 - DNA, 20 bp, Artificial Sequence
  Description of Artificial Sequence: Synthetic oligonucleotide
  Target: LAMA2; (+) strand; PAM type: NNAGAAW; PAM sequence: TCAGAAT
gataaataaagataaatata

SEQ ID NO: 15461 - DNA, 20 bp, Artificial Sequence
  Description of Artificial Sequence: Synthetic oligonucleotide
  Target: LAMA2; (+) strand; PAM type: NNAGAAW; PAM sequence: TTAGAAA
cttatcataatgcaatacaa

SEQ ID NO: 15462 - DNA, 20 bp, Artificial Sequence
  Description of Artificial Sequence: Synthetic oligonucleotide
  Target: LAMA2; (+) strand; PAM type: NNAGAAW; PAM sequence: TGAGAAA
cttcaaagtaatccatggct

SEQ ID NO: 15463 - DNA, 20 bp, Artificial Sequence
  Description of Artificial Sequence: Synthetic oligonucleotide
  Target: LAMA2; (+) strand; PAM type: NNAGAAW; PAM sequence: ACAGAAT
aatttacgaagtatttaata

SEQ ID NO: 15464 - DNA, 20 bp, Artificial Sequence
  Description of Artificial Sequence: Synthetic oligonucleotide
  Target: LAMA2; (+) strand; PAM type: NNAGAAW; PAM sequence: ACAGAAA
caagatgtttaaaaaagtac

SEQ ID NO: 15465 - DNA, 20 bp, Artificial Sequence
  Description of Artificial Sequence: Synthetic oligonucleotide
  Target: LAMA2; (+) strand; PAM type: NNAGAAW; PAM sequence: AAAGAAA
atgtttaaaaaagtacacag

SEQ ID NO: 15466 - DNA, 20 bp, Artificial Sequence
  Description of Artificial Sequence: Synthetic oligonucleotide
  Target: LAMA2; (+) strand; PAM type: NNAGAAW; PAM sequence: GCAGAAA
agaaagaaataaaaataaaa

SEQ ID NO: 15467 - DNA, 20 bp, Artificial Sequence
  Description of Artificial Sequence: Synthetic oligonucleotide
  Target: LAMA2; (+) strand; PAM type: NNAGAAW; PAM sequence: TTAGAAT
acaaaacagcaagttgattc

SEQ ID NO: 15468 - DNA, 20 bp, Artificial Sequence
  Description of Artificial Sequence: Synthetic oligonucleotide
  Target: LAMA2; (+) strand; PAM type: NNAGAAW; PAM sequence: CAAGAAT
acaacacaaatgaataggat

SEQ ID NO: 15469 - DNA, 20 bp, Artificial Sequence
  Description of Artificial Sequence: Synthetic oligonucleotide
  Target: LAMA2; (+) strand; PAM type: NNAGAAW; PAM sequence: AAAGAAA
ttagagcaaaatttactcaa

SEQ ID NO: 15470 - DNA, 20 bp, Artificial Sequence
  Description of Artificial Sequence: Synthetic oligonucleotide
  Target: LAMA2; (+) strand; PAM type: NNAGAAW; PAM sequence: CAAGAAT
cccattatgcaatttgttcc

SEQ ID NO: 15471 - DNA, 20 bp, Artificial Sequence
  Description of Artificial Sequence: Synthetic oligonucleotide
  Target: LAMA2; (+) strand; PAM type: NNAGAAW; PAM sequence: GAAGAAA
tgttcccaagaatggaaaaa

SEQ ID NO: 15472 - DNA, 20 bp, Artificial Sequence
  Description of Artificial Sequence: Synthetic oligonucleotide
  Target: LAMA2; (+) strand; PAM type: NNAGAAW; PAM sequence: AAAGAAA
cctacagaggacagtactac

SEQ ID NO: 15473 - DNA, 20 bp, Artificial Sequence
  Description of Artificial Sequence: Synthetic oligonucleotide
  Target: LAMA2; (+) strand; PAM type: NNAGAAW; PAM sequence: ATAGAAA
taaaatgaacctcagaggag

SEQ ID NO: 15474 - DNA, 20 bp, Artificial Sequence
  Description of Artificial Sequence: Synthetic oligonucleotide
  Target: LAMA2; (+) strand; PAM type: NNAGAAW; PAM sequence: AAAGAAA
aaaatctgttctaaaataat

SEQ ID NO: 15475 - DNA, 20 bp, Artificial Sequence
  Description of Artificial Sequence: Synthetic oligonucleotide
  Target: LAMA2; (+) strand; PAM type: NNAGAAW; PAM sequence: ACAGAAT
gaaggagatgtagttcactt

SEQ ID NO: 15476 - DNA, 20 bp, Artificial Sequence
  Description of Artificial Sequence: Synthetic oligonucleotide
  Target: LAMA2; (+) strand; PAM type: NNAGAAW; PAM sequence: GCAGAAT
ataaccataattgtgccatg

SEQ ID NO: 15477 - DNA, 20 bp, Artificial Sequence
  Description of Artificial Sequence: Synthetic oligonucleotide
  Target: LAMA2; (+) strand; PAM type: NNAGAAW; PAM sequence: AAAGAAA
gcaagaccttatctcacaaa

SEQ ID NO: 15478 - DNA, 20 bp, Artificial Sequence
  Description of Artificial Sequence: Synthetic oligonucleotide
  Target: LAMA2; (+) strand; PAM type: NNAGAAW; PAM sequence: TCAGAAT
ttagtctcttggtactattc

SEQ ID NO: 15479 - DNA, 20 bp, Artificial Sequence
  Description of Artificial Sequence: Synthetic oligonucleotide
  Target: LAMA2; (+) strand; PAM type: NNAGAAW; PAM sequence: GAAGAAT
agttcttgtcccacatcctg

SEQ ID NO: 15480 - DNA, 20 bp, Artificial Sequence
  Description of Artificial Sequence: Synthetic oligonucleotide
  Target: LAMA2; (+) strand; PAM type: NNAGAAW; PAM sequence: TCAGAAA
tttgttcctatttccttttc

SEQ ID NO: 15481 - DNA, 20 bp, Artificial Sequence
  Description of Artificial Sequence: Synthetic oligonucleotide
  Target: LAMA2; (+) strand; PAM type: NNAGAAW; PAM sequence: AAAGAAA
tcctatttccttttctcaga

SEQ ID NO: 15482 - DNA, 20 bp, Artificial Sequence
  Description of Artificial Sequence: Synthetic oligonucleotide
  Target: LAMA2; (+) strand; PAM type: NNAGAAW; PAM sequence: TTAGAAT
tttctcagaaaagaaagtct

SEQ ID NO: 15483 - DNA, 20 bp, Artificial Sequence
  Description of Artificial Sequence: Synthetic oligonucleotide
  Target: LAMA2; (+) strand; PAM type: NNAGAAW; PAM sequence: GCAGAAA
agatcccctctccccaggga

SEQ ID NO: 15484 - DNA, 20 bp, Artificial Sequence
  Description of Artificial Sequence: Synthetic oligonucleotide
  Target: LAMA2; (+) strand; PAM type: NNAGAAW; PAM sequence: CTAGAAA
cccatctccaaattctgatg

SEQ ID NO: 15485 - DNA, 20 bp, Artificial Sequence
  Description of Artificial Sequence: Synthetic oligonucleotide
  Target: LAMA2; (+) strand; PAM type: NNAGAAW; PAM sequence: TCAGAAT
ggctatgatagtccagattt

SEQ ID NO: 15486 - DNA, 20 bp, Artificial Sequence
  Description of Artificial Sequence: Synthetic oligonucleotide
  Target: LAMA2; (+) strand; PAM type: NNAGAAW; PAM sequence: ACAGAAT
ctaagagatacggaagttga

SEQ ID NO: 15487 - DNA, 20 bp, Artificial Sequence
  Description of Artificial Sequence: Synthetic oligonucleotide
  Target: LAMA2; (+) strand; PAM type: NNAGAAW; PAM sequence: TCAGAAT
ataggatttttttttattga

SEQ ID NO: 15488 - DNA, 20 bp, Artificial Sequence
  Description of Artificial Sequence: Synthetic oligonucleotide
  Target: LAMA2; (+) strand; PAM type: NNAGAAW; PAM sequence: CCAGAAT
tgagggaagatgctagcagg

SEQ ID NO: 15489 - DNA, 20 bp, Artificial Sequence
  Description of Artificial Sequence: Synthetic oligonucleotide
  Target: LAMA2; (+) strand; PAM type: NNAGAAW; PAM sequence: CAAGAAA
atgtaccaataatgcctttt

SEQ ID NO: 15490 - DNA, 20 bp, Artificial Sequence
  Description of Artificial Sequence: Synthetic oligonucleotide
  Target: LAMA2; (+) strand; PAM type: NNAGAAW; PAM sequence: TCAGAAT
caaagtttataacttaattt

SEQ ID NO: 15491 - DNA, 20 bp, Artificial Sequence
  Description of Artificial Sequence: Synthetic oligonucleotide
  Target: LAMA2; (+) strand; PAM type: NNAGAAW; PAM sequence: AGAGAAA
tttaaaagtctattggaagc

SEQ ID NO: 15492 - DNA, 20 bp, Artificial Sequence
  Description of Artificial Sequence: Synthetic oligonucleotide
  Target: LAMA2; (+) strand; PAM type: NNAGAAW; PAM sequence: GTAGAAT
tttatgatttctacccgtag

SEQ ID NO: 15493 - DNA, 20 bp, Artificial Sequence
  Description of Artificial Sequence: Synthetic oligonucleotide
  Target: LAMA2; (+) strand; PAM type: NNAGAAW; PAM sequence: TAAGAAT
agggaaaattcgaagccctc

SEQ ID NO: 15494 - DNA, 20 bp, Artificial Sequence
  Description of Artificial Sequence: Synthetic oligonucleotide
  Target: LAMA2; (+) strand; PAM type: NNAGAAW; PAM sequence: ATAGAAA
aaaagcagcttatgtctatt

SEQ ID NO: 15495 - DNA, 20 bp, Artificial Sequence
  Description of Artificial Sequence: Synthetic oligonucleotide
  Target: LAMA2; (+) strand; PAM type: NNAGAAW; PAM sequence: ACAGAAA
tattatagaaaataggaaat

SEQ ID NO: 15496 - DNA, 20 bp, Artificial Sequence
  Description of Artificial Sequence: Synthetic oligonucleotide
  Target: LAMA2; (+) strand; PAM type: NNAGAAW; PAM sequence: GAAGAAA
gaaatacagaaaagcaagaa

SEQ ID NO: 15497 - DNA, 20 bp, Artificial Sequence
  Description of Artificial Sequence: Synthetic oligonucleotide
  Target: LAMA2; (+) strand; PAM type: NNAGAAW; PAM sequence: TGAGAAT
atgtatattgaactagattc

SEQ ID NO: 15498 - DNA, 20 bp, Artificial Sequence
  Description of Artificial Sequence: Synthetic oligonucleotide
  Target: LAMA2; (+) strand; PAM type: NNAGAAW; PAM sequence: ATAGAAT
tttcataaagagagagagta

SEQ ID NO: 15499 - DNA, 20 bp, Artificial Sequence
  Description of Artificial Sequence: Synthetic oligonucleotide
  Target: LAMA2; (+) strand; PAM type: NNAGAAW; PAM sequence: ACAGAAA
tttaaaaagtaaacaaaaaa

SEQ ID NO: 15500 - DNA, 20 bp, Artificial Sequence
  Description of Artificial Sequence: Synthetic oligonucleotide
  Target: LAMA2; (+) strand; PAM type: NNAGAAW; PAM sequence: TTAGAAA
taacttttaaacttgcttgt

SEQ ID NO: 15501 - DNA, 20 bp, Artificial Sequence
  Description of Artificial Sequence: Synthetic oligonucleotide
  Target: LAMA2; (+) strand; PAM type: NNAGAAW; PAM sequence: TCAGAAA
atatatatatgtacacagac

SEQ ID NO: 15502 - DNA, 20 bp, Artificial Sequence
  Description of Artificial Sequence: Synthetic oligonucleotide
  Target: LAMA2; (+) strand; PAM type: NNAGAAW; PAM sequence: AGAGAAT
atatgtacacagactcagaa

SEQ ID NO: 15503 - DNA, 20 bp, Artificial Sequence
  Description of Artificial Sequence: Synthetic oligonucleotide
  Target: LAMA2; (+) strand; PAM type: NNAGAAW; PAM sequence: CAAGAAT
cagactcagaaagagaatac

SEQ ID NO: 15504 - DNA, 20 bp, Artificial Sequence
  Description of Artificial Sequence: Synthetic oligonucleotide
  Target: LAMA2; (+) strand; PAM type: NNAGAAW; PAM sequence: CAAGAAA
aaaaaaaaacctctaaaaag

SEQ ID NO: 15505 - DNA, 20 bp, Artificial Sequence
  Description of Artificial Sequence: Synthetic oligonucleotide
  Target: LAMA2; (+) strand; PAM type: NNAGAAW; PAM sequence: AAAGAAT
aacaaaatatcttgcaactc

SEQ ID NO: 15506 - DNA, 20 bp, Artificial Sequence
  Description of Artificial Sequence: Synthetic oligonucleotide
  Target: LAMA2; (+) strand; PAM type: NNAGAAW; PAM sequence: TTAGAAA
atgtataaagtataattagc

SEQ ID NO: 15507 - DNA, 20 bp, Artificial Sequence
  Description of Artificial Sequence: Synthetic oligonucleotide
  Target: LAMA2; (+) strand; PAM type: NNAGAAW; PAM sequence: TCAGAAA
ctctgatcacactctcctac

SEQ ID NO: 15508 - DNA, 20 bp, Artificial Sequence
  Description of Artificial Sequence: Synthetic oligonucleotide
  Target: LAMA2; (+) strand; PAM type: NNAGAAW; PAM sequence: CCAGAAA
tactcgcacattcaaacctt

SEQ ID NO: 15509 - DNA, 20 bp, Artificial Sequence
  Description of Artificial Sequence: Synthetic oligonucleotide
  Target: LAMA2; (+) strand; PAM type: NNAGAAW; PAM sequence: GAAGAAA
atggttgactaaggatccag

SEQ ID NO: 15510 - DNA, 20 bp, Artificial Sequence
  Description of Artificial Sequence: Synthetic oligonucleotide
  Target: LAMA2; (+) strand; PAM type: NNAGAAW; PAM sequence: TCAGAAA
aagcaaagagcaggtgatat

SEQ ID NO: 15511 - DNA, 20 bp, Artificial Sequence
  Description of Artificial Sequence: Synthetic oligonucleotide
  Target: LAMA2; (+) strand; PAM type: NNAGAAW; PAM sequence: ATAGAAA
atattcagaaatgcaagaag

SEQ ID NO: 15512 - DNA, 20 bp, Artificial Sequence
  Description of Artificial Sequence: Synthetic oligonucleotide
  Target: LAMA2; (+) strand; PAM type: NNAGAAW; PAM sequence: TCAGAAA
taatcatccagccagactaa

SEQ ID NO: 15513 - DNA, 20 bp, Artificial Sequence
  Description of Artificial Sequence: Synthetic oligonucleotide
  Target: LAMA2; (+) strand; PAM type: NNAGAAW; PAM sequence: TCAGAAA
ccagactaatcagaaaaaaa

SEQ ID NO: 15514 - DNA, 20 bp, Artificial Sequence
  Description of Artificial Sequence: Synthetic oligonucleotide
  Target: LAMA2; (+) strand; PAM type: NNAGAAW; PAM sequence: AGAGAAT
tgaatagttctatattcatt

SEQ ID NO: 15515 - DNA, 20 bp, Artificial Sequence
  Description of Artificial Sequence: Synthetic oligonucleotide
  Target: LAMA2; (+) strand; PAM type: NNAGAAW; PAM sequence: GAAGAAA
aattccaccaaatatttaat

SEQ ID NO: 15516 - DNA, 20 bp, Artificial Sequence
  Description of Artificial Sequence: Synthetic oligonucleotide
  Target: LAMA2; (+) strand; PAM type: NNAGAAW; PAM sequence: TCAGAAA
tgaagaaataataaactctt

SEQ ID NO: 15517 - DNA, 20 bp, Artificial Sequence
  Description of Artificial Sequence: Synthetic oligonucleotide
  Target: LAMA2; (+) strand; PAM type: NNAGAAW; PAM sequence: GGAGAAA
ctctttcagaaaattgaaga

SEQ ID NO: 15518 - DNA, 20 bp, Artificial Sequence
  Description of Artificial Sequence: Synthetic oligonucleotide
  Target: LAMA2; (+) strand; PAM type: NNAGAAW; PAM sequence: AAAGAAA
agacaaagatagtttttaaa

SEQ ID NO: 15519 - DNA, 20 bp, Artificial Sequence
  Description of Artificial Sequence: Synthetic oligonucleotide
  Target: LAMA2; (+) strand; PAM type: NNAGAAW; PAM sequence: CAAGAAA
agactaaccagtacaagggg

SEQ ID NO: 15520 - DNA, 20 bp, Artificial Sequence
  Description of Artificial Sequence: Synthetic oligonucleotide
  Target: LAMA2; (+) strand; PAM type: NNAGAAW; PAM sequence: AAAGAAA
gaatactctggagataaata

SEQ ID NO: 15521 - DNA, 20 bp, Artificial Sequence
  Description of Artificial Sequence: Synthetic oligonucleotide
  Target: LAMA2; (+) strand; PAM type: NNAGAAW; PAM sequence: GGAGAAA
aattcatatggaattggaaa

SEQ ID NO: 15522 - DNA, 20 bp, Artificial Sequence
  Description of Artificial Sequence: Synthetic oligonucleotide
  Target: LAMA2; (+) strand; PAM type: NNAGAAW; PAM sequence: AGAGAAT
actaccaagctatggtaatc

SEQ ID NO: 15523 - DNA, 20 bp, Artificial Sequence
  Description of Artificial Sequence: Synthetic oligonucleotide
  Target: LAMA2; (+) strand; PAM type: NNAGAAW; PAM sequence: TTAGAAT
caatattgacaaatagatta

SEQ ID NO: 15524 - DNA, 20 bp, Artificial Sequence
  Description of Artificial Sequence: Synthetic oligonucleotide
  Target: LAMA2; (+) strand; PAM type: NNAGAAW; PAM sequence: TAAGAAA
ataaaacatctaaaaatata

SEQ ID NO: 15525 - DNA, 20 bp, Artificial Sequence
  Description of Artificial Sequence: Synthetic oligonucleotide
  Target: LAMA2; (+) strand; PAM type: NNAGAAW; PAM sequence: TAAGAAA
caaaaaaaaaaaagcacttt

SEQ ID NO: 15526 - DNA, 20 bp, Artificial Sequence
  Description of Artificial Sequence: Synthetic oligonucleotide
  Target: LAMA2; (+) strand; PAM type: NNAGAAW; PAM sequence: GTAGAAT
gaaaagataactacaaacta

SEQ ID NO: 15527 - DNA, 20 bp, Artificial Sequence
  Description of Artificial Sequence: Synthetic oligonucleotide
  Target: LAMA2; (+) strand; PAM type: NNAGAAW; PAM sequence: CAAGAAA
aaaaataagagcaaataacc

SEQ ID NO: 15528 - DNA, 20 bp, Artificial Sequence
  Description of Artificial Sequence: Synthetic oligonucleotide
  Target: LAMA2; (+) strand; PAM type: NNAGAAW; PAM sequence: TTAGAAT
aaaaccaaaatgatgaccag

SEQ ID NO: 15529 - DNA, 20 bp, Artificial Sequence
  Description of Artificial Sequence: Synthetic oligonucleotide
  Target: LAMA2; (+) strand; PAM type: NNAGAAW; PAM sequence: TTAGAAA
atataaatagttcagatact

SEQ ID NO: 15530 - DNA, 20 bp, Artificial Sequence
  Description of Artificial Sequence: Synthetic oligonucleotide
  Target: LAMA2; (+) strand; PAM type: NNAGAAW; PAM sequence: GCAGAAT
cagacaaaaagagagtacat

SEQ ID NO: 15531 - DNA, 20 bp, Artificial Sequence
  Description of Artificial Sequence: Synthetic oligonucleotide
  Target: LAMA2; (+) strand; PAM type: NNAGAAW; PAM sequence: GAAGAAA
agggaagagaaggaaggata

SEQ ID NO: 15532 - DNA, 20 bp, Artificial Sequence
  Description of Artificial Sequence: Synthetic oligonucleotide
  Target: LAMA2; (+) strand; PAM type: NNAGAAW; PAM sequence: AAAGAAA
ggatagaagaaagagattca

SEQ ID NO: 15533 - DNA, 20 bp, Artificial Sequence
  Description of Artificial Sequence: Synthetic oligonucleotide
  Target: LAMA2; (+) strand; PAM type: NNAGAAW; PAM sequence: TAAGAAT
ctgttcctgcattagtttgc

SEQ ID NO: 15534 - DNA, 20 bp, Artificial Sequence
  Description of Artificial Sequence: Synthetic oligonucleotide
  Target: LAMA2; (+) strand; PAM type: NNAGAAW; PAM sequence: AGAGAAT
ctgttttcatgtgtttgttt

SEQ ID NO: 15535 - DNA, 20 bp, Artificial Sequence
  Description of Artificial Sequence: Synthetic oligonucleotide
  Target: LAMA2; (+) strand; PAM type: NNAGAAW; PAM sequence: TCAGAAA
tgtctctaaattgttttgat

SEQ ID NO: 15536 - DNA, 20 bp, Artificial Sequence
  Description of Artificial Sequence: Synthetic oligonucleotide
  Target: LAMA2; (+) strand; PAM type: NNAGAAW; PAM sequence: ATAGAAT
cgtgtaaatttggaacaaat

SEQ ID NO: 15537 - DNA, 20 bp, Artificial Sequence
  Description of Artificial Sequence: Synthetic oligonucleotide
  Target: LAMA2; (+) strand; PAM type: NNAGAAW; PAM sequence: TGAGAAT
tcccaagagaactgtagcaa

SEQ ID NO: 15538 - DNA, 20 bp, Artificial Sequence
  Description of Artificial Sequence: Synthetic oligonucleotide
  Target: LAMA2; (+) strand; PAM type: NNAGAAW; PAM sequence: GCAGAAA
gagaattcctgtttttccca

SEQ ID NO: 15539 - DNA, 20 bp, Artificial Sequence
  Description of Artificial Sequence: Synthetic oligonucleotide
  Target: LAMA2; (+) strand; PAM type: NNAGAAW; PAM sequence: GGAGAAT
gaaaacatcatcagttttct

SEQ ID NO: 15540 - DNA, 20 bp, Artificial Sequence
  Description of Artificial Sequence: Synthetic oligonucleotide
  Target: LAMA2; (+) strand; PAM type: NNAGAAW; PAM sequence: TTAGAAT
aattatttacctgaaagctg

SEQ ID NO: 15541 - DNA, 20 bp, Artificial Sequence
  Description of Artificial Sequence: Synthetic oligonucleotide
  Target: LAMA2; (+) strand; PAM type: NNAGAAW; PAM sequence: TCAGAAA
gaagatgccaaaggctgtct

SEQ ID NO: 15542 - DNA, 20 bp, Artificial Sequence
  Description of Artificial Sequence: Synthetic oligonucleotide
  Target: LAMA2; (+) strand; PAM type: NNAGAAW; PAM sequence: GGAGAAT
agatattctatcacactatt

SEQ ID NO: 15543 - DNA, 20 bp, Artificial Sequence
  Description of Artificial Sequence: Synthetic oligonucleotide
  Target: LAMA2; (+) strand; PAM type: NNAGAAW; PAM sequence: CAAGAAT
gcaggaggatcccttggtgc

SEQ ID NO: 15544 - DNA, 20 bp, Artificial Sequence
  Description of Artificial Sequence: Synthetic oligonucleotide
  Target: LAMA2; (+) strand; PAM type: NNAGAAW; PAM sequence: AAAGAAA
gagtaagatcctgtctctaa

SEQ ID NO: 15545 - DNA, 20 bp, Artificial Sequence
  Description of Artificial Sequence: Synthetic oligonucleotide
  Target: LAMA2; (+) strand; PAM type: NNAGAAW; PAM sequence: TAAGAAT
ccatattatgggttttatgt

SEQ ID NO: 15546 - DNA, 20 bp, Artificial Sequence
  Description of Artificial Sequence: Synthetic oligonucleotide
  Target: LAMA2; (+) strand; PAM type: NNAGAAW; PAM sequence: TTAGAAA
gttggcttatcttacttatc

SEQ ID NO: 15547 - DNA, 20 bp, Artificial Sequence
  Description of Artificial Sequence: Synthetic oligonucleotide
  Target: LAMA2; (+) strand; PAM type: NNAGAAW; PAM sequence: GAAGAAT
ggtacctcttattacaatct

SEQ ID NO: 15548 - DNA, 20 bp, Artificial Sequence
  Description of Artificial Sequence: Synthetic oligonucleotide
  Target: LAMA2; (+) strand; PAM type: NNAGAAW; PAM sequence: GAAGAAA
aacactggtattataaaaat

SEQ ID NO: 15549 - DNA, 20 bp, Artificial Sequence
  Description of Artificial Sequence: Synthetic oligonucleotide
  Target: LAMA2; (+) strand; PAM type: NNAGAAW; PAM sequence: AAAGAAT
ctggtattataaaaatgaag

SEQ ID NO: 15550 - DNA, 20 bp, Artificial Sequence
  Description of Artificial Sequence: Synthetic oligonucleotide
  Target: LAMA2; (+) strand; PAM type: NNAGAAW; PAM sequence: AGAGAAA
tttcagccattttttttcca

SEQ ID NO: 15551 - DNA, 20 bp, Artificial Sequence
  Description of Artificial Sequence: Synthetic oligonucleotide
  Target: LAMA2; (+) strand; PAM type: NNAGAAW; PAM sequence: AAAGAAA
ccattttttttccaagagaa

SEQ ID NO: 15552 - DNA, 20 bp, Artificial Sequence
  Description of Artificial Sequence: Synthetic oligonucleotide
  Target: LAMA2; (+) strand; PAM type: NNAGAAW; PAM sequence: ACAGAAA
attgtaggaagggttaggag

SEQ ID NO: 15553 - DNA, 20 bp, Artificial Sequence
  Description of Artificial Sequence: Synthetic oligonucleotide
  Target: LAMA2; (+) strand; PAM type: NNAGAAW; PAM sequence: CTAGAAA
ctactcaagtaataattcct

SEQ ID NO: 15554 - DNA, 20 bp, Artificial Sequence
  Description of Artificial Sequence: Synthetic oligonucleotide
  Target: LAMA2; (+) strand; PAM type: NNAGAAW; PAM sequence: CAAGAAA
aacactgctttgcagataga

SEQ ID NO: 15555 - DNA, 20 bp, Artificial Sequence
  Description of Artificial Sequence: Synthetic oligonucleotide
  Target: LAMA2; (+) strand; PAM type: NNAGAAW; PAM sequence: GGAGAAT
ccgaggcaggcagagaagtg

SEQ ID NO: 15556 - DNA, 20 bp, Artificial Sequence
  Description of Artificial Sequence: Synthetic oligonucleotide
  Target: LAMA2; (+) strand; PAM type: NNAGAAW; PAM sequence: TGAGAAT
accttggtttattaaaagtt

SEQ ID NO: 15557 - DNA, 20 bp, Artificial Sequence
  Description of Artificial Sequence: Synthetic oligonucleotide
  Target: LAMA2; (+) strand; PAM type: NNAGAAW; PAM sequence: TTAGAAA
aaatgaaattatttaattac

SEQ ID NO: 15558 - DNA, 20 bp, Artificial Sequence
  Description of Artificial Sequence: Synthetic oligonucleotide
  Target: LAMA2; (+) strand; PAM type: NNAGAAW; PAM sequence: GGAGAAT
ctactcaggaggctgaggta

SEQ ID NO: 15559 - DNA, 20 bp, Artificial Sequence
  Description of Artificial Sequence: Synthetic oligonucleotide
  Target: LAMA2; (+) strand; PAM type: NNAGAAW; PAM sequence: AAAGAAT
ataaactttataaactaaaa

SEQ ID NO: 15560 - DNA, 20 bp, Artificial Sequence
  Description of Artificial Sequence: Synthetic oligonucleotide
  Target: LAMA2; (+) strand; PAM type: NNAGAAW; PAM sequence: AGAGAAT
tattttatattttaaaaata

SEQ ID NO: 15561 - DNA, 20 bp, Artificial Sequence
  Description of Artificial Sequence: Synthetic oligonucleotide
  Target: LAMA2; (+) strand; PAM type: NNAGAAW; PAM sequence: AGAGAAA
aaccagggtggacttccatt

SEQ ID NO: 15562 - DNA, 20 bp, Artificial Sequence
  Description of Artificial Sequence: Synthetic oligonucleotide
  Target: LAMA2; (+) strand; PAM type: NNAGAAW; PAM sequence: CAAGAAA
cccaccatgtgagtagagga

SEQ ID NO: 15563 - DNA, 20 bp, Artificial Sequence
  Description of Artificial Sequence: Synthetic oligonucleotide
  Target: LAMA2; (+) strand; PAM type: NNAGAAW; PAM sequence: TCAGAAT
atctgggctttgttgtgtgt

SEQ ID NO: 15564 - DNA, 20 bp, Artificial Sequence
  Description of Artificial Sequence: Synthetic oligonucleotide
  Target: LAMA2; (+) strand; PAM type: NNAGAAW; PAM sequence: CCAGAAA
tgcaagtaagttaatttaga

SEQ ID NO: 15565 - DNA, 20 bp, Artificial Sequence
  Description of Artificial Sequence: Synthetic oligonucleotide
  Target: LAMA2; (+) strand; PAM type: NNAGAAW; PAM sequence: ACAGAAA
ttaatttagaccagaaataa

SEQ ID NO: 15566 - DNA, 20 bp, Artificial Sequence
  Description of Artificial Sequence: Synthetic oligonucleotide
  Target: LAMA2; (+) strand; PAM type: NNAGAAW; PAM sequence: AAAGAAA
ctcaattttcttgctgggca

SEQ ID NO: 15567 - DNA, 20 bp, Artificial Sequence
  Description of Artificial Sequence: Synthetic oligonucleotide
  Target: LAMA2; (+) strand; PAM type: NNAGAAW; PAM sequence: GCAGAAT
tagtatgtatgtctgtctgt

SEQ ID NO: 15568 - DNA, 20 bp, Artificial Sequence
  Description of Artificial Sequence: Synthetic oligonucleotide
  Target: LAMA2; (+) strand; PAM type: NNAGAAW; PAM sequence: CTAGAAA
gtaacaatcatgaaagaagg

SEQ ID NO: 15569 - DNA, 20 bp, Artificial Sequence
  Description of Artificial Sequence: Synthetic oligonucleotide
  Target: LAMA2; (+) strand; PAM type: NNAGAAW; PAM sequence: GCAGAAA
tcaatgattgcctgcataat

SEQ ID NO: 15570 - DNA, 20 bp, Artificial Sequence
  Description of Artificial Sequence: Synthetic oligonucleotide
  Target: LAMA2; (+) strand; PAM type: NNAGAAW; PAM sequence: AGAGAAA
caatttgctggagacctagg

SEQ ID NO: 15571 - DNA, 20 bp, Artificial Sequence
  Description of Artificial Sequence: Synthetic oligonucleotide
  Target: LAMA2; (+) strand; PAM type: NNAGAAW; PAM sequence: TTAGAAA
tgacttaggggacagggtct

SEQ ID NO: 15572 - DNA, 20 bp, Artificial Sequence
  Description of Artificial Sequence: Synthetic oligonucleotide
  Target: LAMA2; (+) strand; PAM type: NNAGAAW; PAM sequence: TGAGAAA
taaaaaataaaaattccatt

SEQ ID NO: 15573 - DNA, 20 bp, Artificial Sequence
  Description of Artificial Sequence: Synthetic oligonucleotide
  Target: LAMA2; (+) strand; PAM type: NNAGAAW; PAM sequence: ACAGAAA
tttgccatatgtaaaaaggg

SEQ ID NO: 15574 - DNA, 20 bp, Artificial Sequence
  Description of Artificial Sequence: Synthetic oligonucleotide
  Target: LAMA2; (+) strand; PAM type: NNAGAAW; PAM sequence: AGAGAAA
attgtaccagactagatttc

SEQ ID NO: 15575 - DNA, 20 bp, Artificial Sequence
  Description of Artificial Sequence: Synthetic oligonucleotide
  Target: LAMA2; (+) strand; PAM type: NNAGAAW; PAM sequence: TCAGAAA
aatttatatttagcatcatg

SEQ ID NO: 15576 - DNA, 20 bp, Artificial Sequence
  Description of Artificial Sequence: Synthetic oligonucleotide
  Target: LAMA2; (+) strand; PAM type: NNAGAAW; PAM sequence: TGAGAAA
tctactctatgaggaggaga

SEQ ID NO: 15577 - DNA, 20 bp, Artificial Sequence
  Description of Artificial Sequence: Synthetic oligonucleotide
  Target: LAMA2; (+) strand; PAM type: NNAGAAW; PAM sequence: AGAGAAA
ttggtggatgtgatctttag

SEQ ID NO: 15578 - DNA, 20 bp, Artificial Sequence
  Description of Artificial Sequence: Synthetic oligonucleotide
  Target: LAMA2; (+) strand; PAM type: NNAGAAW; PAM sequence: GTAGAAT
atgtgatctttagagagaaa

SEQ ID NO: 15579 - DNA, 20 bp, Artificial Sequence
  Description of Artificial Sequence: Synthetic oligonucleotide
  Target: LAMA2; (+) strand; PAM type: NNAGAAW; PAM sequence: CTAGAAA
aaggaataaggagagggaat

SEQ ID NO: 15580 - DNA, 20 bp, Artificial Sequence
  Description of Artificial Sequence: Synthetic oligonucleotide
  Target: LAMA2; (+) strand; PAM type: NNAGAAW; PAM sequence: CCAGAAA
ttaaatcttcttcttattct

SEQ ID NO: 15581 - DNA, 20 bp, Artificial Sequence
  Description of Artificial Sequence: Synthetic oligonucleotide
  Target: LAMA2; (+) strand; PAM type: NNAGAAW; PAM sequence: CAAGAAA
caaaatgtttagatgtagtt

SEQ ID NO: 15582 - DNA, 20 bp, Artificial Sequence
  Description of Artificial Sequence: Synthetic oligonucleotide
  Target: LAMA2; (+) strand; PAM type: NNAGAAW; PAM sequence: CCAGAAA
tagatgtagttcaagaaatt

SEQ ID NO: 15583 - DNA, 20 bp, Artificial Sequence
  Description of Artificial Sequence: Synthetic oligonucleotide
  Target: LAMA2; (+) strand; PAM type: NNAGAAW; PAM sequence: TTAGAAA
aagaaattccagaaactact

SEQ ID NO: 15584 - DNA, 20 bp, Artificial Sequence
  Description of Artificial Sequence: Synthetic oligonucleotide
  Target: LAMA2; (+) strand; PAM type: NNAGAAW; PAM sequence: TAAGAAA
ttagaaaaaggtgatcagcg

SEQ ID NO: 15585 - DNA, 20 bp, Artificial Sequence
  Description of Artificial Sequence: Synthetic oligonucleotide
  Target: LAMA2; (+) strand; PAM type: NNAGAAW; PAM sequence: AGAGAAT
ctagtacaaaaaaaaaatgc

SEQ ID NO: 15586 - DNA, 20 bp, Artificial Sequence
  Description of Artificial Sequence: Synthetic oligonucleotide
  Target: LAMA2; (+) strand; PAM type: NNAGAAW; PAM sequence: TCAGAAT
gttcagccagcattttgcta

SEQ ID NO: 15587 - DNA, 20 bp, Artificial Sequence
  Description of Artificial Sequence: Synthetic oligonucleotide
  Target: LAMA2; (+) strand; PAM type: NNAGAAW; PAM sequence: GCAGAAA
cagcattttgctatcagaat

SEQ ID NO: 15588 - DNA, 20 bp, Artificial Sequence
  Description of Artificial Sequence: Synthetic oligonucleotide
  Target: LAMA2; (+) strand; PAM type: NNAGAAW; PAM sequence: TAAGAAA
actaaatccaatcaagaagc

SEQ ID NO: 15589 - DNA, 20 bp, Artificial Sequence
  Description of Artificial Sequence: Synthetic oligonucleotide
  Target: LAMA2; (+) strand; PAM type: NNAGAAW; PAM sequence: AAAGAAT
aagagcagccctttattctc

SEQ ID NO: 15590 - DNA, 20 bp, Artificial Sequence
  Description of Artificial Sequence: Synthetic oligonucleotide
  Target: LAMA2; (+) strand; PAM type: NNAGAAW; PAM sequence: TAAGAAA
taaaaataacagaagtatta

SEQ ID NO: 15591 - DNA, 20 bp, Artificial Sequence
  Description of Artificial Sequence: Synthetic oligonucleotide
  Target: LAMA2; (+) strand; PAM type: NNAGAAW; PAM sequence: GGAGAAA
gatgaattgtgattgacaga

SEQ ID NO: 15592 - DNA, 20 bp, Artificial Sequence
  Description of Artificial Sequence: Synthetic oligonucleotide
  Target: LAMA2; (+) strand; PAM type: NNAGAAW; PAM sequence: TTAGAAT
ggaaagtatattttgtgggc

SEQ ID NO: 15593 - DNA, 20 bp, Artificial Sequence
  Description of Artificial Sequence: Synthetic oligonucleotide
  Target: LAMA2; (+) strand; PAM type: NNAGAAW; PAM sequence: TCAGAAT
cacatccagacaccgatagt

SEQ ID NO: 15594 - DNA, 20 bp, Artificial Sequence
  Description of Artificial Sequence: Synthetic oligonucleotide
  Target: LAMA2; (+) strand; PAM type: NNAGAAW; PAM sequence: ACAGAAA
gttttttaaaacattgaaaa

SEQ ID NO: 15595 - DNA, 20 bp, Artificial Sequence
  Description of Artificial Sequence: Synthetic oligonucleotide
  Target: LAMA2; (+) strand; PAM type: NNAGAAW; PAM sequence: ACAGAAA
aaaaacagaaatatatgcac

SEQ ID NO: 15596 - DNA, 20 bp, Artificial Sequence
  Description of Artificial Sequence: Synthetic oligonucleotide
  Target: LAMA2; (+) strand; PAM type: NNAGAAW; PAM sequence: GTAGAAT
tgaagggtaaatttctatca

SEQ ID NO: 15597 - DNA, 20 bp, Artificial Sequence
  Description of Artificial Sequence: Synthetic oligonucleotide
  Target: LAMA2; (+) strand; PAM type: NNAGAAW; PAM sequence: TAAGAAA
attttccccaatctcaaaaa

SEQ ID NO: 15598 - DNA, 20 bp, Artificial Sequence
  Description of Artificial Sequence: Synthetic oligonucleotide
  Target: LAMA2; (+) strand; PAM type: NNAGAAW; PAM sequence: GGAGAAA
aatttctttaagacaacaaa

SEQ ID NO: 15599 - DNA, 20 bp, Artificial Sequence
  Description of Artificial Sequence: Synthetic oligonucleotide
  Target: LAMA2; (+) strand; PAM type: NNAGAAW; PAM sequence: GAAGAAA
aaaggaaaggaggaggacag

SEQ ID NO: 15600 - DNA, 20 bp, Artificial Sequence
  Description of Artificial Sequence: Synthetic oligonucleotide
  Target: LAMA2; (+) strand; PAM type: NNAGAAW; PAM sequence: GTAGAAT
gttttgactatcaatccttg

SEQ ID NO: 15601 - DNA, 20 bp, Artificial Sequence
  Description of Artificial Sequence: Synthetic oligonucleotide
  Target: LAMA2; (+) strand; PAM type: NNAGAAW; PAM sequence: TAAGAAA
ccaaaacaatttttatggca

SEQ ID NO: 15602 - DNA, 20 bp, Artificial Sequence
  Description of Artificial Sequence: Synthetic oligonucleotide
  Target: LAMA2; (+) strand; PAM type: NNAGAAW; PAM sequence: TAAGAAA
attttcactaataaatgatg

SEQ ID NO: 15603 - DNA, 20 bp, Artificial Sequence
  Description of Artificial Sequence: Synthetic oligonucleotide
  Target: LAMA2; (+) strand; PAM type: NNAGAAW; PAM sequence: AGAGAAT
tataaattaatctaaagttt

SEQ ID NO: 15604 - DNA, 20 bp, Artificial Sequence
  Description of Artificial Sequence: Synthetic oligonucleotide
  Target: LAMA2; (+) strand; PAM type: NNAGAAW; PAM sequence: CTAGAAA
taaaaactagtggaaagcag

SEQ ID NO: 15605 - DNA, 20 bp, Artificial Sequence
  Description of Artificial Sequence: Synthetic oligonucleotide
  Target: LAMA2; (+) strand; PAM type: NNAGAAW; PAM sequence: AGAGAAA
ataacattgctaaagtatca

SEQ ID NO: 15606 - DNA, 20 bp, Artificial Sequence
  Description of Artificial Sequence: Synthetic oligonucleotide
  Target: LAMA2; (+) strand; PAM type: NNAGAAW; PAM sequence: TGAGAAA
taaaaatattgttttcttta

SEQ ID NO: 15607 - DNA, 20 bp, Artificial Sequence
  Description of Artificial Sequence: Synthetic oligonucleotide
  Target: LAMA2; (+) strand; PAM type: NNAGAAW; PAM sequence: GAAGAAA
agataaagatcagataccaa

SEQ ID NO: 15608 - DNA, 20 bp, Artificial Sequence
  Description of Artificial Sequence: Synthetic oligonucleotide
  Target: LAMA2; (+) strand; PAM type: NNAGAAW; PAM sequence: GCAGAAA
cttttttttgttttttattc

SEQ ID NO: 15609 - DNA, 20 bp, Artificial Sequence
  Description of Artificial Sequence: Synthetic oligonucleotide
  Target: LAMA2; (+) strand; PAM type: NNAGAAW; PAM sequence: ATAGAAA
taaatggcttaaaaaccagg

SEQ ID NO: 15610 - DNA, 20 bp, Artificial Sequence
  Description of Artificial Sequence: Synthetic oligonucleotide
  Target: LAMA2; (+) strand; PAM type: NNAGAAW; PAM sequence: CTAGAAA
caggatagaaaatgctgatg

SEQ ID NO: 15611 - DNA, 20 bp, Artificial Sequence
  Description of Artificial Sequence: Synthetic oligonucleotide
  Target: LAMA2; (+) strand; PAM type: NNAGAAW; PAM sequence: TGAGAAT
tactcatgaattcttctttg

SEQ ID NO: 15612 - DNA, 20 bp, Artificial Sequence
  Description of Artificial Sequence: Synthetic oligonucleotide
  Target: LAMA2; (+) strand; PAM type: NNAGAAW; PAM sequence: TGAGAAA
tgaattcttctttgtgagaa

SEQ ID NO: 15613 - DNA, 20 bp, Artificial Sequence
  Description of Artificial Sequence: Synthetic oligonucleotide
  Target: LAMA2; (+) strand; PAM type: NNAGAAW; PAM sequence: ACAGAAA
agtatccttaggaatgtgtt

SEQ ID NO: 15614 - DNA, 20 bp, Artificial Sequence
  Description of Artificial Sequence: Synthetic oligonucleotide
  Target: LAMA2; (+) strand; PAM type: NNAGAAW; PAM sequence: CAAGAAA
tattgtttatgaaataatga

SEQ ID NO: 15615 - DNA, 20 bp, Artificial Sequence
  Description of Artificial Sequence: Synthetic oligonucleotide
  Target: LAMA2; (+) strand; PAM type: NNAGAAW; PAM sequence: CAAGAAA
ttgtcttctgtgtttcagcc

SEQ ID NO: 15616 - DNA, 20 bp, Artificial Sequence
  Description of Artificial Sequence: Synthetic oligonucleotide
  Target: LAMA2; (+) strand; PAM type: NNAGAAW; PAM sequence: ATAGAAT
agaaatcgtgtattagtgaa

SEQ ID NO: 15617 - DNA, 20 bp, Artificial Sequence
  Description of Artificial Sequence: Synthetic oligonucleotide
  Target: LAMA2; (+) strand; PAM type: NNAGAAW; PAM sequence: TCAGAAT
atagataacataggtaacat

SEQ ID NO: 15618 - DNA, 20 bp, Artificial Sequence
  Description of Artificial Sequence: Synthetic oligonucleotide
  Target: LAMA2; (+) strand; PAM type: NNAGAAW; PAM sequence: TGAGAAA
tattatccccactttacagg

SEQ ID NO: 15619 - DNA, 20 bp, Artificial Sequence
  Description of Artificial Sequence: Synthetic oligonucleotide
  Target: LAMA2; (+) strand; PAM type: NNAGAAW; PAM sequence: ATAGAAA
cctttttcagtagtaagtat

SEQ ID NO: 15620 - DNA, 20 bp, Artificial Sequence
  Description of Artificial Sequence: Synthetic oligonucleotide
  Target: LAMA2; (+) strand; PAM type: NNAGAAW; PAM sequence: TTAGAAT
tgatcttatacaatgaacat

SEQ ID NO: 15621 - DNA, 20 bp, Artificial Sequence
  Description of Artificial Sequence: Synthetic oligonucleotide
  Target: LAMA2; (+) strand; PAM type: NNAGAAW; PAM sequence: TGAGAAA
gtattcatagcaaaagtccc

SEQ ID NO: 15622 - DNA, 20 bp, Artificial Sequence
  Description of Artificial Sequence: Synthetic oligonucleotide
  Target: LAMA2; (+) strand; PAM type: NNAGAAW; PAM sequence: GAAGAAT
cagaacctcgatggcctgaa

SEQ ID NO: 15623 - DNA, 20 bp, Artificial Sequence
  Description of Artificial Sequence: Synthetic oligonucleotide
  Target: LAMA2; (+) strand; PAM type: NNAGAAW; PAM sequence: TCAGAAA
ccttctttcatagattggcc

SEQ ID NO: 15624 - DNA, 20 bp, Artificial Sequence
  Description of Artificial Sequence: Synthetic oligonucleotide
  Target: LAMA2; (+) strand; PAM type: NNAGAAW; PAM sequence: TGAGAAA
atattgacttaaggatttac

SEQ ID NO: 15625 - DNA, 20 bp, Artificial Sequence
  Description of Artificial Sequence: Synthetic oligonucleotide
  Target: LAMA2; (+) strand; PAM type: NNAGAAW; PAM sequence: AGAGAAA
ggatttactgagaaaacctg

SEQ ID NO: 15626 - DNA, 20 bp, Artificial Sequence
  Description of Artificial Sequence: Synthetic oligonucleotide
  Target: LAMA2; (+) strand; PAM type: NNAGAAW; PAM sequence: CCAGAAA
taaaattttttaatgtaagc

SEQ ID NO: 15627 - DNA, 20 bp, Artificial Sequence
  Description of Artificial Sequence: Synthetic oligonucleotide
  Target: LAMA2; (+) strand; PAM type: NNAGAAW; PAM sequence: AAAGAAT
ctcctgctctccaccctcca

SEQ ID NO: 15628 - DNA, 20 bp, Artificial Sequence
  Description of Artificial Sequence: Synthetic oligonucleotide
  Target: LAMA2; (+) strand; PAM type: NNAGAAW; PAM sequence: TGAGAAA
tttaatcctatcctctatta

SEQ ID NO: 15629 - DNA, 20 bp, Artificial Sequence
  Description of Artificial Sequence: Synthetic oligonucleotide
  Target: LAMA2; (+) strand; PAM type: NNAGAAW; PAM sequence: ATAGAAA
gttttctatcttactaaaac

SEQ ID NO: 15630 - DNA, 20 bp, Artificial Sequence
  Description of Artificial Sequence: Synthetic oligonucleotide
  Target: LAMA2; (+) strand; PAM type: NNAGAAW; PAM sequence: ATAGAAA
gtcactactttataatattt

SEQ ID NO: 15631 - DNA, 20 bp, Artificial Sequence
  Description of Artificial Sequence: Synthetic oligonucleotide
  Target: LAMA2; (+) strand; PAM type: NNAGAAW; PAM sequence: GCAGAAA
gcttccatgtgaaattgcct

SEQ ID NO: 15632 - DNA, 20 bp, Artificial Sequence
  Description of Artificial Sequence: Synthetic oligonucleotide
  Target: LAMA2; (+) strand; PAM type: NNAGAAW; PAM sequence: CCAGAAA
aagtggctcatactctaacc

SEQ ID NO: 15633 - DNA, 20 bp, Artificial Sequence
  Description of Artificial Sequence: Synthetic oligonucleotide
  Target: LAMA2; (+) strand; PAM type: NNAGAAW; PAM sequence: ATAGAAT
gtggaaaactgaatttctct

SEQ ID NO: 15634 - DNA, 20 bp, Artificial Sequence
  Description of Artificial Sequence: Synthetic oligonucleotide
  Target: LAMA2; (+) strand; PAM type: NNAGAAW; PAM sequence: GTAGAAT
tgtaattattctcaacttct

SEQ ID NO: 15635 - DNA, 20 bp, Artificial Sequence
  Description of Artificial Sequence: Synthetic oligonucleotide
  Target: LAMA2; (+) strand; PAM type: NNAGAAW; PAM sequence: GGAGAAA
acttctgtagaattatattt

SEQ ID NO: 15636 - DNA, 20 bp, Artificial Sequence
  Description of Artificial Sequence: Synthetic oligonucleotide
  Target: LAMA2; (+) strand; PAM type: NNAGAAW; PAM sequence: CAAGAAA
ccacagtttaaattgaaagt

SEQ ID NO: 15637 - DNA, 20 bp, Artificial Sequence
  Description of Artificial Sequence: Synthetic oligonucleotide
  Target: LAMA2; (+) strand; PAM type: NNAGAAW; PAM sequence: CAAGAAT
atagctacaaaaaataataa

SEQ ID NO: 15638 - DNA, 20 bp, Artificial Sequence
  Description of Artificial Sequence: Synthetic oligonucleotide
  Target: LAMA2; (+) strand; PAM type: NNAGAAW; PAM sequence: TTAGAAA
aacaatcaactttgctgact

SEQ ID NO: 15639 - DNA, 20 bp, Artificial Sequence
  Description of Artificial Sequence: Synthetic oligonucleotide
  Target: LAMA2; (+) strand; PAM type: NNAGAAW; PAM sequence: AAAGAAT
agaaaaagcagagttaactt

SEQ ID NO: 15640 - DNA, 20 bp, Artificial Sequence
  Description of Artificial Sequence: Synthetic oligonucleotide
  Target: LAMA2; (+) strand; PAM type: NNAGAAW; PAM sequence: ACAGAAA
aaaaattaatgaatttgaag

SEQ ID NO: 15641 - DNA, 20 bp, Artificial Sequence
  Description of Artificial Sequence: Synthetic oligonucleotide
  Target: LAMA2; (+) strand; PAM type: NNAGAAW; PAM sequence: CAAGAAA
aagtgattgtcaagtttcat

SEQ ID NO: 15642 - DNA, 20 bp, Artificial Sequence
  Description of Artificial Sequence: Synthetic oligonucleotide
  Target: LAMA2; (+) strand; PAM type: NNAGAAW; PAM sequence: GGAGAAT
ggaaaaacttcaactgctcc

SEQ ID NO: 15643 - DNA, 20 bp, Artificial Sequence
  Description of Artificial Sequence: Synthetic oligonucleotide
  Target: LAMA2; (+) strand; PAM type: NNAGAAW; PAM sequence: TTAGAAT
taaatcattttgcctcagtt

SEQ ID NO: 15644 - DNA, 20 bp, Artificial Sequence
  Description of Artificial Sequence: Synthetic oligonucleotide
  Target: LAMA2; (+) strand; PAM type: NNAGAAW; PAM sequence: GTAGAAT
cctcagttttagaataattt

SEQ ID NO: 15645 - DNA, 20 bp, Artificial Sequence
  Description of Artificial Sequence: Synthetic oligonucleotide
  Target: LAMA2; (+) strand; PAM type: NNAGAAW; PAM sequence: TCAGAAT
ttagaataatttgtagaatg

SEQ ID NO: 15646 - DNA, 20 bp, Artificial Sequence
  Description of Artificial Sequence: Synthetic oligonucleotide
  Target: LAMA2; (+) strand; PAM type: NNAGAAW; PAM sequence: GGAGAAT
tagaatgtcagaataacaat

SEQ ID NO: 15647 - DNA, 20 bp, Artificial Sequence
  Description of Artificial Sequence: Synthetic oligonucleotide
  Target: LAMA2; (+) strand; PAM type: NNAGAAW; PAM sequence: GAAGAAA
ccagataacatgcatttcag

SEQ ID NO: 15648 - DNA, 20 bp, Artificial Sequence
  Description of Artificial Sequence: Synthetic oligonucleotide
  Target: LAMA2; (+) strand; PAM type: NNAGAAW; PAM sequence: ACAGAAA
ttttcatcagagtcacagtg

SEQ ID NO: 15649 - DNA, 20 bp, Artificial Sequence
  Description of Artificial Sequence: Synthetic oligonucleotide
  Target: LAMA2; (+) strand; PAM type: NNAGAAW; PAM sequence: ATAGAAT
agactgccagcatcccagca

SEQ ID NO: 15650 - DNA, 20 bp, Artificial Sequence
  Description of Artificial Sequence: Synthetic oligonucleotide
  Target: LAMA2; (+) strand; PAM type: NNAGAAW; PAM sequence: TGAGAAA
agatgtgcaaaaaaagacgg

SEQ ID NO: 15651 - DNA, 20 bp, Artificial Sequence
  Description of Artificial Sequence: Synthetic oligonucleotide
  Target: LAMA2; (+) strand; PAM type: NNAGAAW; PAM sequence: AAAGAAA
gcaaaaaaagacggtgagaa

SEQ ID NO: 15652 - DNA, 20 bp, Artificial Sequence
  Description of Artificial Sequence: Synthetic oligonucleotide
  Target: LAMA2; (+) strand; PAM type: NNAGAAW; PAM sequence: AAAGAAA
aaaaagacggtgagaaaaag

SEQ ID NO: 15653 - DNA, 20 bp, Artificial Sequence
  Description of Artificial Sequence: Synthetic oligonucleotide
  Target: LAMA2; (+) strand; PAM type: NNAGAAW; PAM sequence: TTAGAAA
ggttaactttttggctgaag

SEQ ID NO: 15654 - DNA, 20 bp, Artificial Sequence
  Description of Artificial Sequence: Synthetic oligonucleotide
  Target: LAMA2; (+) strand; PAM type: NNAGAAW; PAM sequence: AAAGAAA
ctaatttttaccttaatcaa

SEQ ID NO: 15655 - DNA, 20 bp, Artificial Sequence
  Description of Artificial Sequence: Synthetic oligonucleotide
  Target: LAMA2; (+) strand; PAM type: NNAGAAW; PAM sequence: AAAGAAA
aaggaacttgaggataacct

SEQ ID NO: 15656 - DNA, 20 bp, Artificial Sequence
  Description of Artificial Sequence: Synthetic oligonucleotide
  Target: LAMA2; (+) strand; PAM type: NNAGAAW; PAM sequence: TGAGAAT
aaatttcaaaagacatttca

SEQ ID NO: 15657 - DNA, 20 bp, Artificial Sequence
  Description of Artificial Sequence: Synthetic oligonucleotide
  Target: LAMA2; (+) strand; PAM type: NNAGAAW; PAM sequence: ATAGAAT
tatattctattactatttgc

SEQ ID NO: 15658 - DNA, 20 bp, Artificial Sequence
  Description of Artificial Sequence: Synthetic oligonucleotide
  Target: LAMA2; (+) strand; PAM type: NNAGAAW; PAM sequence: CAAGAAA
gcatagaataatacaaatag

SEQ ID NO: 15659 - DNA, 20 bp, Artificial Sequence
  Description of Artificial Sequence: Synthetic oligonucleotide
  Target: LAMA2; (+) strand; PAM type: NNAGAAW; PAM sequence: AAAGAAA
agaataatacaaatagcaag

SEQ ID NO: 15660 - DNA, 20 bp, Artificial Sequence
  Description of Artificial Sequence: Synthetic oligonucleotide
  Target: LAMA2; (+) strand; PAM type: NNAGAAW; PAM sequence: ACAGAAT
caggaatgaaggaacaatat

SEQ ID NO: 15661 - DNA, 20 bp, Artificial Sequence
  Description of Artificial Sequence: Synthetic oligonucleotide
  Target: LAMA2; (+) strand; PAM type: NNAGAAW; PAM sequence: AGAGAAA
aatatacagaataagagcaa

SEQ ID NO: 15662 - DNA, 20 bp, Artificial Sequence
  Description of Artificial Sequence: Synthetic oligonucleotide
  Target: LAMA2; (+) strand; PAM type: NNAGAAW; PAM sequence: ATAGAAA
ccaattagaagtttactagg

SEQ ID NO: 15663 - DNA, 20 bp, Artificial Sequence
  Description of Artificial Sequence: Synthetic oligonucleotide
  Target: LAMA2; (+) strand; PAM type: NNAGAAW; PAM sequence: GTAGAAA
gggaggggaggggaggggtg

SEQ ID NO: 15664 - DNA, 20 bp, Artificial Sequence
  Description of Artificial Sequence: Synthetic oligonucleotide
  Target: LAMA2; (+) strand; PAM type: NNAGAAW; PAM sequence: AAAGAAA
ggggaggggaggggtggtag

SEQ ID NO: 15665 - DNA, 20 bp, Artificial Sequence
  Description of Artificial Sequence: Synthetic oligonucleotide
  Target: LAMA2; (+) strand; PAM type: NNAGAAW; PAM sequence: CAAGAAA
gggcagttttcttgtttgaa

SEQ ID NO: 15666 - DNA, 20 bp, Artificial Sequence
  Description of Artificial Sequence: Synthetic oligonucleotide
  Target: LAMA2; (+) strand; PAM type: NNAGAAW; PAM sequence: TCAGAAA
caactttggaactaggatga

SEQ ID NO: 15667 - DNA, 20 bp, Artificial Sequence
  Description of Artificial Sequence: Synthetic oligonucleotide
  Target: LAMA2; (+) strand; PAM type: NNAGAAW; PAM sequence: TAAGAAT
tttatatttttagtagtatt

SEQ ID NO: 15668 - DNA, 20 bp, Artificial Sequence
  Description of Artificial Sequence: Synthetic oligonucleotide
  Target: LAMA2; (+) strand; PAM type: NNAGAAW; PAM sequence: CTAGAAA
acgactgactgaaaaaaaac

SEQ ID NO: 15669 - DNA, 20 bp, Artificial Sequence
  Description of Artificial Sequence: Synthetic oligonucleotide
  Target: LAMA2; (+) strand; PAM type: NNAGAAW; PAM sequence: TGAGAAA
agtaaatcagtgaaaagatc

SEQ ID NO: 15670 - DNA, 20 bp, Artificial Sequence
  Description of Artificial Sequence: Synthetic oligonucleotide
  Target: LAMA2; (+) strand; PAM type: NNAGAAW; PAM sequence: CTAGAAT
ctgagaaaacatatattcag

SEQ ID NO: 15671 - DNA, 20 bp, Artificial Sequence
  Description of Artificial Sequence: Synthetic oligonucleotide
  Target: LAMA2; (+) strand; PAM type: NNAGAAW; PAM sequence: AAAGAAA
gtatgtaaagcacaagatta

SEQ ID NO: 15672 - DNA, 20 bp, Artificial Sequence
  Description of Artificial Sequence: Synthetic oligonucleotide
  Target: LAMA2; (+) strand; PAM type: NNAGAAW; PAM sequence: GCAGAAT
cacgtaccttgtcacacaat

SEQ ID NO: 15673 - DNA, 20 bp, Artificial Sequence
  Description of Artificial Sequence: Synthetic oligonucleotide
  Target: LAMA2; (+) strand; PAM type: NNAGAAW; PAM sequence: CTAGAAA
tgagaagtgacataaaagtt

SEQ ID NO: 15674 - DNA, 20 bp, Artificial Sequence
  Description of Artificial Sequence: Synthetic oligonucleotide
  Target: LAMA2; (+) strand; PAM type: NNAGAAW; PAM sequence: CCAGAAA
ttgataaaggaaacacataa

SEQ ID NO: 15675 - DNA, 20 bp, Artificial Sequence
  Description of Artificial Sequence: Synthetic oligonucleotide
  Target: LAMA2; (+) strand; PAM type: NNAGAAW; PAM sequence: AAAGAAA
agcagtgtatggggtagatg

SEQ ID NO: 15676 - DNA, 20 bp, Artificial Sequence
  Description of Artificial Sequence: Synthetic oligonucleotide
  Target: LAMA2; (+) strand; PAM type: NNAGAAW; PAM sequence: GAAGAAT
tatggggtagatgaaagaaa

SEQ ID NO: 15677 - DNA, 20 bp, Artificial Sequence
  Description of Artificial Sequence: Synthetic oligonucleotide
  Target: LAMA2; (+) strand; PAM type: NNAGAAW; PAM sequence: AGAGAAA
acccaactatagctgtggca

SEQ ID NO: 15678 - DNA, 20 bp, Artificial Sequence
  Description of Artificial Sequence: Synthetic oligonucleotide
  Target: LAMA2; (+) strand; PAM type: NNAGAAW; PAM sequence: GGAGAAA
ttctgacttagtcatcaagt

SEQ ID NO: 15679 - DNA, 20 bp, Artificial Sequence
  Description of Artificial Sequence: Synthetic oligonucleotide
  Target: LAMA2; (+) strand; PAM type: NNAGAAW; PAM sequence: AAAGAAA
ctgtcttaaagtacaaaata

SEQ ID NO: 15680 - DNA, 20 bp, Artificial Sequence
  Description of Artificial Sequence: Synthetic oligonucleotide
  Target: LAMA2; (+) strand; PAM type: NNAGAAW; PAM sequence: ATAGAAA
cactccagcctgggtggcaa

SEQ ID NO: 15681 - DNA, 20 bp, Artificial Sequence
  Description of Artificial Sequence: Synthetic oligonucleotide
  Target: LAMA2; (+) strand; PAM type: NNAGAAW; PAM sequence: GAAGAAA
tccccccccaaaaaaaaaga

SEQ ID NO: 15682 - DNA, 20 bp, Artificial Sequence
  Description of Artificial Sequence: Synthetic oligonucleotide
  Target: LAMA2; (+) strand; PAM type: NNAGAAW; PAM sequence: AAAGAAA
caaaaaaaaagagaagaaaa

SEQ ID NO: 15683 - DNA, 20 bp, Artificial Sequence
  Description of Artificial Sequence: Synthetic oligonucleotide
  Target: LAMA2; (+) strand; PAM type: NNAGAAW; PAM sequence: TAAGAAA
gaaaggtacaaaagtaacgt

SEQ ID NO: 15684 - DNA, 20 bp, Artificial Sequence
  Description of Artificial Sequence: Synthetic oligonucleotide
  Target: LAMA2; (+) strand; PAM type: NNAGAAW; PAM sequence: AAAGAAA
aatcattgtccatgcatttc

SEQ ID NO: 15685 - DNA, 20 bp, Artificial Sequence
  Description of Artificial Sequence: Synthetic oligonucleotide
  Target: LAMA2; (+) strand; PAM type: NNAGAAW; PAM sequence: TTAGAAA
gccttattttttgtaagacg

SEQ ID NO: 15686 - DNA, 20 bp, Artificial Sequence
  Description of Artificial Sequence: Synthetic oligonucleotide
  Target: LAMA2; (+) strand; PAM type: NNAGAAW; PAM sequence: TTAGAAA
tgtcttactaaggatctgca

SEQ ID NO: 15687 - DNA, 20 bp, Artificial Sequence
  Description of Artificial Sequence: Synthetic oligonucleotide
  Target: LAMA2; (+) strand; PAM type: NNAGAAW; PAM sequence: TCAGAAA
tctaaaaggatgtttgaatt

SEQ ID NO: 15688 - DNA, 20 bp, Artificial Sequence
  Description of Artificial Sequence: Synthetic oligonucleotide
  Target: LAMA2; (+) strand; PAM type: NNAGAAW; PAM sequence: AAAGAAA
tacctgttttaagttgttta

SEQ ID NO: 15689 - DNA, 20 bp, Artificial Sequence
  Description of Artificial Sequence: Synthetic oligonucleotide
  Target: LAMA2; (+) strand; PAM type: NNAGAAW; PAM sequence: ACAGAAA
acctataactgaaaatcaaa

SEQ ID NO: 15690 - DNA, 20 bp, Artificial Sequence
  Description of Artificial Sequence: Synthetic oligonucleotide
  Target: LAMA2; (+) strand; PAM type: NNAGAAW; PAM sequence: CCAGAAA
ttctgagagtatattcaaaa

SEQ ID NO: 15691 - DNA, 20 bp, Artificial Sequence
  Description of Artificial Sequence: Synthetic oligonucleotide
  Target: LAMA2; (+) strand; PAM type: NNAGAAW; PAM sequence: ACAGAAA
agtatattcaaaaccagaaa

SEQ ID NO: 15692 - DNA, 20 bp, Artificial Sequence
  Description of Artificial Sequence: Synthetic oligonucleotide
  Target: LAMA2; (+) strand; PAM type: NNAGAAW; PAM sequence: AAAGAAA
ttacagactgggtaatttat

SEQ ID NO: 15693 - DNA, 20 bp, Artificial Sequence
  Description of Artificial Sequence: Synthetic oligonucleotide
  Target: LAMA2; (+) strand; PAM type: NNAGAAW; PAM sequence: CAAGAAT
ataacaacatcattttgctt

SEQ ID NO: 15694 - DNA, 20 bp, Artificial Sequence
  Description of Artificial Sequence: Synthetic oligonucleotide
  Target: LAMA2; (+) strand; PAM type: NNAGAAW; PAM sequence: TCAGAAT
gactactaattcagccccat

SEQ ID NO: 15695 - DNA, 20 bp, Artificial Sequence
  Description of Artificial Sequence: Synthetic oligonucleotide
  Target: LAMA2; (+) strand; PAM type: NNAGAAW; PAM sequence: CAAGAAT
ccccacctttttggggaagg

SEQ ID NO: 15696 - DNA, 20 bp, Artificial Sequence
  Description of Artificial Sequence: Synthetic oligonucleotide
  Target: LAMA2; (+) strand; PAM type: NNAGAAW; PAM sequence: TAAGAAA
ctttttggggaaggcaagaa

SEQ ID NO: 15697 - DNA, 20 bp, Artificial Sequence
  Description of Artificial Sequence: Synthetic oligonucleotide
  Target: LAMA2; (+) strand; PAM type: NNAGAAW; PAM sequence: GAAGAAA
atgagtagcacaaaatgcta

SEQ ID NO: 15698 - DNA, 20 bp, Artificial Sequence
  Description of Artificial Sequence: Synthetic oligonucleotide
  Target: LAMA2; (+) strand; PAM type: NNAGAAW; PAM sequence: ACAGAAA
gtgattttccatctgaccct

SEQ ID NO: 15699 - DNA, 20 bp, Artificial Sequence
  Description of Artificial Sequence: Synthetic oligonucleotide
  Target: LAMA2; (+) strand; PAM type: NNAGAAW; PAM sequence: AAAGAAA
aatttttaaggtattattca

SEQ ID NO: 15700 - DNA, 20 bp, Artificial Sequence
  Description of Artificial Sequence: Synthetic oligonucleotide
  Target: LAMA2; (+) strand; PAM type: NNAGAAW; PAM sequence: GTAGAAT
ttctgaaatgtatgttctga

SEQ ID NO: 15701 - DNA, 20 bp, Artificial Sequence
  Description of Artificial Sequence: Synthetic oligonucleotide
  Target: LAMA2; (+) strand; PAM type: NNAGAAW; PAM sequence: AAAGAAA
taatttcctcttgaaaacta

SEQ ID NO: 15702 - DNA, 20 bp, Artificial Sequence
  Description of Artificial Sequence: Synthetic oligonucleotide
  Target: LAMA2; (+) strand; PAM type: NNAGAAW; PAM sequence: GGAGAAA
aacgttcccatattgataat

SEQ ID NO: 15703 - DNA, 20 bp, Artificial Sequence
  Description of Artificial Sequence: Synthetic oligonucleotide
  Target: LAMA2; (+) strand; PAM type: NNAGAAW; PAM sequence: ATAGAAA
tttaatgatagtatttgatg

SEQ ID NO: 15704 - DNA, 20 bp, Artificial Sequence
  Description of Artificial Sequence: Synthetic oligonucleotide
  Target: LAMA2; (+) strand; PAM type: NNAGAAW; PAM sequence: GAAGAAA
tgatagaaaataacttcaaa

SEQ ID NO: 15705 - DNA, 20 bp, Artificial Sequence
  Description of Artificial Sequence: Synthetic oligonucleotide
  Target: LAMA2; (+) strand; PAM type: NNAGAAW; PAM sequence: CCAGAAA
actgcattcgaacatacaaa

SEQ ID NO: 15706 - DNA, 20 bp, Artificial Sequence
  Description of Artificial Sequence: Synthetic oligonucleotide
  Target: LAMA2; (+) strand; PAM type: NNAGAAW; PAM sequence: CAAGAAA
cgaacatacaaaccagaaat

SEQ ID NO: 15707 - DNA, 20 bp, Artificial Sequence
  Description of Artificial Sequence: Synthetic oligonucleotide
  Target: LAMA2; (+) strand; PAM type: NNAGAAW; PAM sequence: ATAGAAT
agaggttaatctgaaaatgt

SEQ ID NO: 15708 - DNA, 20 bp, Artificial Sequence
  Description of Artificial Sequence: Synthetic oligonucleotide
  Target: LAMA2; (+) strand; PAM type: NNAGAAW; PAM sequence: GAAGAAA
agttagaaggcaaatgaaag

SEQ ID NO: 15709 - DNA, 20 bp, Artificial Sequence
  Description of Artificial Sequence: Synthetic oligonucleotide
  Target: LAMA2; (+) strand; PAM type: NNAGAAW; PAM sequence: TAAGAAT
tactttcagatccagtgatt

SEQ ID NO: 15710 - DNA, 20 bp, Artificial Sequence
  Description of Artificial Sequence: Synthetic oligonucleotide
  Target: LAMA2; (+) strand; PAM type: NNAGAAW; PAM sequence: TGAGAAT
cagtgatttaagaatgctaa

SEQ ID NO: 15711 - DNA, 20 bp, Artificial Sequence
  Description of Artificial Sequence: Synthetic oligonucleotide
  Target: LAMA2; (+) strand; PAM type: NNAGAAW; PAM sequence: TGAGAAA
ctttaccacaagtatcagag

SEQ ID NO: 15712 - DNA, 20 bp, Artificial Sequence
  Description of Artificial Sequence: Synthetic oligonucleotide
  Target: LAMA2; (+) strand; PAM type: NNAGAAW; PAM sequence: ATAGAAA
actagattgactttctggct

SEQ ID NO: 15713 - DNA, 20 bp, Artificial Sequence
  Description of Artificial Sequence: Synthetic oligonucleotide
  Target: LAMA2; (+) strand; PAM type: NNAGAAW; PAM sequence: ATAGAAT
aagattaagataattaaatg

SEQ ID NO: 15714 - DNA, 20 bp, Artificial Sequence
  Description of Artificial Sequence: Synthetic oligonucleotide
  Target: LAMA2; (+) strand; PAM type: NNAGAAW; PAM sequence: TAAGAAA
tgaagtagtttcccagttta

SEQ ID NO: 15715 - DNA, 20 bp, Artificial Sequence
  Description of Artificial Sequence: Synthetic oligonucleotide
  Target: LAMA2; (+) strand; PAM type: NNAGAAW; PAM sequence: GAAGAAA
tcaggcttcctattttgcct

SEQ ID NO: 15716 - DNA, 20 bp, Artificial Sequence
  Description of Artificial Sequence: Synthetic oligonucleotide
  Target: LAMA2; (+) strand; PAM type: NNAGAAW; PAM sequence: ATAGAAA
ctttagtctacatagccacc

SEQ ID NO: 15717 - DNA, 20 bp, Artificial Sequence
  Description of Artificial Sequence: Synthetic oligonucleotide
  Target: LAMA2; (+) strand; PAM type: NNAGAAW; PAM sequence: AAAGAAA
tttccataataaaaagttta

SEQ ID NO: 15718 - DNA, 20 bp, Artificial Sequence
  Description of Artificial Sequence: Synthetic oligonucleotide
  Target: LAMA2; (+) strand; PAM type: NNAGAAW; PAM sequence: TCAGAAA
cataaagtgcagttcttctt

SEQ ID NO: 15719 - DNA, 20 bp, Artificial Sequence
  Description of Artificial Sequence: Synthetic oligonucleotide
  Target: LAMA2; (+) strand; PAM type: NNAGAAW; PAM sequence: AAAGAAA
tcacttaacattgcatcctc

SEQ ID NO: 15720 - DNA, 20 bp, Artificial Sequence
  Description of Artificial Sequence: Synthetic oligonucleotide
  Target: LAMA2; (+) strand; PAM type: NNAGAAW; PAM sequence: AAAGAAA
atggaaatcaatcacttaaa

SEQ ID NO: 15721 - DNA, 20 bp, Artificial Sequence
  Description of Artificial Sequence: Synthetic oligonucleotide
  Target: LAMA2; (+) strand; PAM type: NNAGAAW; PAM sequence: AAAGAAT
actgggatccaagatattat

SEQ ID NO: 15722 - DNA, 20 bp, Artificial Sequence
  Description of Artificial Sequence: Synthetic oligonucleotide
  Target: LAMA2; (+) strand; PAM type: NNAGAAW; PAM sequence: GGAGAAA
agatattataaagaatttta

SEQ ID NO: 15723 - DNA, 20 bp, Artificial Sequence
  Description of Artificial Sequence: Synthetic oligonucleotide
  Target: LAMA2; (+) strand; PAM type: NNAGAAW; PAM sequence: ACAGAAT
tttcatgtcaatgaacacac

SEQ ID NO: 15724 - DNA, 20 bp, Artificial Sequence
  Description of Artificial Sequence: Synthetic oligonucleotide
  Target: LAMA2; (+) strand; PAM type: NNAGAAW; PAM sequence: TTAGAAA
gatctaatgaatttggaatg

SEQ ID NO: 15725 - DNA, 20 bp, Artificial Sequence
  Description of Artificial Sequence: Synthetic oligonucleotide
  Target: LAMA2; (+) strand; PAM type: NNAGAAW; PAM sequence: CCAGAAA
atcttttaaatctggaatta

SEQ ID NO: 15726 - DNA, 20 bp, Artificial Sequence
  Description of Artificial Sequence: Synthetic oligonucleotide
  Target: LAMA2; (+) strand; PAM type: NNAGAAW; PAM sequence: GGAGAAA
cacgtacccttgaagaactg

SEQ ID NO: 15727 - DNA, 20 bp, Artificial Sequence
  Description of Artificial Sequence: Synthetic oligonucleotide
  Target: LAMA2; (+) strand; PAM type: NNAGAAW; PAM sequence: TAAGAAT
aaacatgaatttactttgag

SEQ ID NO: 15728 - DNA, 20 bp, Artificial Sequence
  Description of Artificial Sequence: Synthetic oligonucleotide
  Target: LAMA2; (+) strand; PAM type: NNAGAAW; PAM sequence: GCAGAAT
gtccttgcgcatttcaaatt

SEQ ID NO: 15729 - DNA, 20 bp, Artificial Sequence
  Description of Artificial Sequence: Synthetic oligonucleotide
  Target: LAMA2; (+) strand; PAM type: NNAGAAW; PAM sequence: TCAGAAT
aatggataatcctgggcttg

SEQ ID NO: 15730 - DNA, 20 bp, Artificial Sequence
  Description of Artificial Sequence: Synthetic oligonucleotide
  Target: LAMA2; (+) strand; PAM type: NNAGAAW; PAM sequence: TCAGAAA
tcatcctgagttgagattag

SEQ ID NO: 15731 - DNA, 20 bp, Artificial Sequence
  Description of Artificial Sequence: Synthetic oligonucleotide
  Target: LAMA2; (+) strand; PAM type: NNAGAAW; PAM sequence: ATAGAAT
tatgaggactcaaccttcat

SEQ ID NO: 15732 - DNA, 20 bp, Artificial Sequence
  Description of Artificial Sequence: Synthetic oligonucleotide
  Target: LAMA2; (+) strand; PAM type: NNAGAAW; PAM sequence: TGAGAAT
cgagatgtgactctaaagta

SEQ ID NO: 15733 - DNA, 20 bp, Artificial Sequence
  Description of Artificial Sequence: Synthetic oligonucleotide
  Target: LAMA2; (+) strand; PAM type: NNAGAAW; PAM sequence: CTAGAAA
ttgggctttggttatctcaa

SEQ ID NO: 15734 - DNA, 20 bp, Artificial Sequence
  Description of Artificial Sequence: Synthetic oligonucleotide
  Target: LAMA2; (+) strand; PAM type: NNAGAAW; PAM sequence: AAAGAAT
ctttggttatctcaactaga

SEQ ID NO: 15735 - DNA, 20 bp, Artificial Sequence
  Description of Artificial Sequence: Synthetic oligonucleotide
  Target: LAMA2; (+) strand; PAM type: NNAGAAW; PAM sequence: TAAGAAA
ttagtccattagggctgcta

SEQ ID NO: 15736 - DNA, 20 bp, Artificial Sequence
  Description of Artificial Sequence: Synthetic oligonucleotide
  Target: LAMA2; (+) strand; PAM type: NNAGAAW; PAM sequence: GTAGAAA
cttcttgctgttctcacata

SEQ ID NO: 15737 - DNA, 20 bp, Artificial Sequence
  Description of Artificial Sequence: Synthetic oligonucleotide
  Target: LAMA2; (+) strand; PAM type: NNAGAAW; PAM sequence: TAAGAAT
tggcgggtaggattttaaca

SEQ ID NO: 15738 - DNA, 20 bp, Artificial Sequence
  Description of Artificial Sequence: Synthetic oligonucleotide
  Target: LAMA2; (+) strand; PAM type: NNAGAAW; PAM sequence: TCAGAAA
aaaacagtattctatcagtc

SEQ ID NO: 15739 - DNA, 20 bp, Artificial Sequence
  Description of Artificial Sequence: Synthetic oligonucleotide
  Target: LAMA2; (+) strand; PAM type: NNAGAAW; PAM sequence: AAAGAAA
gtattctatcagtctcagaa

SEQ ID NO: 15740 - DNA, 20 bp, Artificial Sequence
  Description of Artificial Sequence: Synthetic oligonucleotide
  Target: LAMA2; (+) strand; PAM type: NNAGAAW; PAM sequence: AAAGAAA
tctatcagtctcagaaaaag

SEQ ID NO: 15741 - DNA, 20 bp, Artificial Sequence
  Description of Artificial Sequence: Synthetic oligonucleotide
  Target: LAMA2; (+) strand; PAM type: NNAGAAW; PAM sequence: CAAGAAT
ccttaggaaatcattttggc

SEQ ID NO: 15742 - DNA, 20 bp, Artificial Sequence
  Description of Artificial Sequence: Synthetic oligonucleotide
  Target: LAMA2; (+) strand; PAM type: NNAGAAW; PAM sequence: CCAGAAT
atttcaagactactgccaca

SEQ ID NO: 15743 - DNA, 20 bp, Artificial Sequence
  Description of Artificial Sequence: Synthetic oligonucleotide
  Target: LAMA2; (+) strand; PAM type: NNAGAAW; PAM sequence: TGAGAAT
caactaaatgaacttgctca

SEQ ID NO: 15744 - DNA, 20 bp, Artificial Sequence
  Description of Artificial Sequence: Synthetic oligonucleotide
  Target: LAMA2; (+) strand; PAM type: NNAGAAW; PAM sequence: GCAGAAT
caagaagaagcaaaaagcaa

SEQ ID NO: 15745 - DNA, 20 bp, Artificial Sequence
  Description of Artificial Sequence: Synthetic oligonucleotide
  Target: LAMA2; (+) strand; PAM type: NNAGAAW; PAM sequence: CTAGAAA
acaagtaggataatcaatct

SEQ ID NO: 15746 - DNA, 20 bp, Artificial Sequence
  Description of Artificial Sequence: Synthetic oligonucleotide
  Target: LAMA2; (+) strand; PAM type: NNAGAAW; PAM sequence: CCAGAAT
agtttttaaagttgtaggca

SEQ ID NO: 15747 - DNA, 20 bp, Artificial Sequence
  Description of Artificial Sequence: Synthetic oligonucleotide
  Target: LAMA2; (+) strand; PAM type: NNAGAAW; PAM sequence: CAAGAAT
agtcatgtgtcactcaatga

SEQ ID NO: 15748 - DNA, 20 bp, Artificial Sequence
  Description of Artificial Sequence: Synthetic oligonucleotide
  Target: LAMA2; (+) strand; PAM type: NNAGAAW; PAM sequence: TGAGAAA
tcaatgacaagaatacattc

SEQ ID NO: 15749 - DNA, 20 bp, Artificial Sequence
  Description of Artificial Sequence: Synthetic oligonucleotide
  Target: LAMA2; (+) strand; PAM type: NNAGAAW; PAM sequence: ACAGAAA
cgaaatcttcttggctgtga

SEQ ID NO: 15750 - DNA, 20 bp, Artificial Sequence
  Description of Artificial Sequence: Synthetic oligonucleotide
  Target: LAMA2; (+) strand; PAM type: NNAGAAW; PAM sequence: AAAGAAA
tgcatggcccaaatttgccc

SEQ ID NO: 15751 - DNA, 20 bp, Artificial Sequence
  Description of Artificial Sequence: Synthetic oligonucleotide
  Target: LAMA2; (+) strand; PAM type: NNAGAAW; PAM sequence: AAAGAAT
aaaattccacattacagaca

SEQ ID NO: 15752 - DNA, 20 bp, Artificial Sequence
  Description of Artificial Sequence: Synthetic oligonucleotide
  Target: LAMA2; (+) strand; PAM type: NNAGAAW; PAM sequence: ATAGAAT
tccacattacagacaaaaga

SEQ ID NO: 15753 - DNA, 20 bp, Artificial Sequence
  Description of Artificial Sequence: Synthetic oligonucleotide
  Target: LAMA2; (+) strand; PAM type: NNAGAAW; PAM sequence: TCAGAAA
tatgtacatatgccaaaata

SEQ ID NO: 15754 - DNA, 20 bp, Artificial Sequence
  Description of Artificial Sequence: Synthetic oligonucleotide
  Target: LAMA2; (+) strand; PAM type: NNAGAAW; PAM sequence: AAAGAAT
tacatatgccaaaatatcag

SEQ ID NO: 15755 - DNA, 20 bp, Artificial Sequence
  Description of Artificial Sequence: Synthetic oligonucleotide
  Target: LAMA2; (+) strand; PAM type: NNAGAAW; PAM sequence: GGAGAAA
ttacattcactggctgcatg

SEQ ID NO: 15756 - DNA, 20 bp, Artificial Sequence
  Description of Artificial Sequence: Synthetic oligonucleotide
  Target: LAMA2; (+) strand; PAM type: NNAGAAW; PAM sequence: CGAGAAA
ctataggtttgtggaatttc

SEQ ID NO: 15757 - DNA, 20 bp, Artificial Sequence
  Description of Artificial Sequence: Synthetic oligonucleotide
  Target: LAMA2; (+) strand; PAM type: NNAGAAW; PAM sequence: GTAGAAT
cctcaattataagatagagg

SEQ ID NO: 15758 - DNA, 20 bp, Artificial Sequence
  Description of Artificial Sequence: Synthetic oligonucleotide
  Target: LAMA2; (+) strand; PAM type: NNAGAAW; PAM sequence: AGAGAAT
ctatcatactaagcatgtgt

SEQ ID NO: 15759 - DNA, 20 bp, Artificial Sequence
  Description of Artificial Sequence: Synthetic oligonucleotide
  Target: LAMA2; (+) strand; PAM type: NNAGAAW; PAM sequence: GAAGAAA
tacatctctagagtttcata

SEQ ID NO: 15760 - DNA, 20 bp, Artificial Sequence
  Description of Artificial Sequence: Synthetic oligonucleotide
  Target: LAMA2; (+) strand; PAM type: NNAGAAW; PAM sequence: CTAGAAT
gtttacaacttctcctgatg

SEQ ID NO: 15761 - DNA, 20 bp, Artificial Sequence
  Description of Artificial Sequence: Synthetic oligonucleotide
  Target: LAMA2; (+) strand; PAM type: NNAGAAW; PAM sequence: GAAGAAA
tccaaaaagaggagatagca

SEQ ID NO: 15762 - DNA, 20 bp, Artificial Sequence
  Description of Artificial Sequence: Synthetic oligonucleotide
  Target: LAMA2; (+) strand; PAM type: NNAGAAW; PAM sequence: TTAGAAA
agtgggaagccggagtgttt

SEQ ID NO: 15763 - DNA, 20 bp, Artificial Sequence
  Description of Artificial Sequence: Synthetic oligonucleotide
  Target: LAMA2; (+) strand; PAM type: NNAGAAW; PAM sequence: GGAGAAT
tcatacaagattggcaaatg

SEQ ID NO: 15764 - DNA, 20 bp, Artificial Sequence
  Description of Artificial Sequence: Synthetic oligonucleotide
  Target: LAMA2; (+) strand; PAM type: NNAGAAW; PAM sequence: TAAGAAT
cccataagccctgttatttg

SEQ ID NO: 15765 - DNA, 20 bp, Artificial Sequence
  Description of Artificial Sequence: Synthetic oligonucleotide
  Target: LAMA2; (+) strand; PAM type: NNAGAAW; PAM sequence: TAAGAAA
tgaggctaaaagaggtagac

SEQ ID NO: 15766 - DNA, 20 bp, Artificial Sequence
  Description of Artificial Sequence: Synthetic oligonucleotide
  Target: LAMA2; (+) strand; PAM type: NNAGAAW; PAM sequence: TTAGAAT
aagaaaatgtcataaagacc

SEQ ID NO: 15767 - DNA, 20 bp, Artificial Sequence
  Description of Artificial Sequence: Synthetic oligonucleotide
  Target: LAMA2; (+) strand; PAM type: NNAGAAW; PAM sequence: TTAGAAA
aagaccttagaatgtcagtt

SEQ ID NO: 15768 - DNA, 20 bp, Artificial Sequence
  Description of Artificial Sequence: Synthetic oligonucleotide
  Target: LAMA2; (+) strand; PAM type: NNAGAAW; PAM sequence: TTAGAAA
gataaaattgttgttatgct

SEQ ID NO: 15769 - DNA, 20 bp, Artificial Sequence
  Description of Artificial Sequence: Synthetic oligonucleotide
  Target: LAMA2; (+) strand; PAM type: NNAGAAW; PAM sequence: AGAGAAA
accagacatcaaggttcaaa

SEQ ID NO: 15770 - DNA, 20 bp, Artificial Sequence
  Description of Artificial Sequence: Synthetic oligonucleotide
  Target: LAMA2; (+) strand; PAM type: NNAGAAW; PAM sequence: AAAGAAT
cctagcatttattaattatg

SEQ ID NO: 15771 - DNA, 20 bp, Artificial Sequence
  Description of Artificial Sequence: Synthetic oligonucleotide
  Target: LAMA2; (+) strand; PAM type: NNAGAAW; PAM sequence: TCAGAAT
ggcttttttagtaaatgcat

SEQ ID NO: 15772 - DNA, 20 bp, Artificial Sequence
  Description of Artificial Sequence: Synthetic oligonucleotide
  Target: LAMA2; (+) strand; PAM type: NNAGAAW; PAM sequence: GAAGAAA
acattctagtgaaggagaca

SEQ ID NO: 15773 - DNA, 20 bp, Artificial Sequence
  Description of Artificial Sequence: Synthetic oligonucleotide
  Target: LAMA2; (+) strand; PAM type: NNAGAAW; PAM sequence: CCAGAAA
tcgtctgaatctaatttgtt

SEQ ID NO: 15774 - DNA, 20 bp, Artificial Sequence
  Description of Artificial Sequence: Synthetic oligonucleotide
  Target: LAMA2; (+) strand; PAM type: NNAGAAW; PAM sequence: TAAGAAA
tcagagtaggatcctatata

SEQ ID NO: 15775 - DNA, 20 bp, Artificial Sequence
  Description of Artificial Sequence: Synthetic oligonucleotide
  Target: LAMA2; (+) strand; PAM type: NNAGAAW; PAM sequence: CCAGAAA
ataatgtattctcagcccat

SEQ ID NO: 15776 - DNA, 20 bp, Artificial Sequence
  Description of Artificial Sequence: Synthetic oligonucleotide
  Target: LAMA2; (+) strand; PAM type: NNAGAAW; PAM sequence: CAAGAAT
tgggatgattgtctggcagc

SEQ ID NO: 15777 - DNA, 20 bp, Artificial Sequence
  Description of Artificial Sequence: Synthetic oligonucleotide
  Target: LAMA2; (+) strand; PAM type: NNAGAAW; PAM sequence: TTAGAAA
ctgtaataaaaggatatgtc

SEQ ID NO: 15778 - DNA, 20 bp, Artificial Sequence
  Description of Artificial Sequence: Synthetic oligonucleotide
  Target: LAMA2; (+) strand; PAM type: NNAGAAW; PAM sequence: TCAGAAA
aatatcacagccacaaaaat

SEQ ID NO: 15779 - DNA, 20 bp, Artificial Sequence
  Description of Artificial Sequence: Synthetic oligonucleotide
  Target: LAMA2; (+) strand; PAM type: NNAGAAW; PAM sequence: CAAGAAA
agaccctaacataaaccaca

SEQ ID NO: 15780 - DNA, 20 bp, Artificial Sequence
  Description of Artificial Sequence: Synthetic oligonucleotide
  Target: LAMA2; (+) strand; PAM type: NNAGAAW; PAM sequence: CAAGAAT
atggaaatcattcactctgt

SEQ ID NO: 15781 - DNA, 20 bp, Artificial Sequence
  Description of Artificial Sequence: Synthetic oligonucleotide
  Target: LAMA2; (+) strand; PAM type: NNAGAAW; PAM sequence: AGAGAAA
aggtattttgttccagtgtt

SEQ ID NO: 15782 - DNA, 20 bp, Artificial Sequence
  Description of Artificial Sequence: Synthetic oligonucleotide
  Target: LAMA2; (+) strand; PAM type: NNAGAAW; PAM sequence: ACAGAAA
taaaagatctcacaaccaag

SEQ ID NO: 15783 - DNA, 20 bp, Artificial Sequence
  Description of Artificial Sequence: Synthetic oligonucleotide
  Target: LAMA2; (+) strand; PAM type: NNAGAAW; PAM sequence: AGAGAAT
tgaaagcctggagtcatcag

SEQ ID NO: 15784 - DNA, 20 bp, Artificial Sequence
  Description of Artificial Sequence: Synthetic oligonucleotide
  Target: LAMA2; (+) strand; PAM type: NNAGAAW; PAM sequence: AGAGAAA
catttccaacaggaaactct

SEQ ID NO: 15785 - DNA, 20 bp, Artificial Sequence
  Description of Artificial Sequence: Synthetic oligonucleotide
  Target: LAMA2; (+) strand; PAM type: NNAGAAW; PAM sequence: GAAGAAT
tgtagttagttgttcagtaa

SEQ ID NO: 15786 - DNA, 20 bp, Artificial Sequence
  Description of Artificial Sequence: Synthetic oligonucleotide
  Target: LAMA2; (+) strand; PAM type: NNAGAAW; PAM sequence: AGAGAAA
tttcccaaatttctttaatc

SEQ ID NO: 15787 - DNA, 20 bp, Artificial Sequence
  Description of Artificial Sequence: Synthetic oligonucleotide
  Target: LAMA2; (+) strand; PAM type: NNAGAAW; PAM sequence: TAAGAAA
accgagaactctaagagttt

SEQ ID NO: 15788 - DNA, 20 bp, Artificial Sequence
  Description of Artificial Sequence: Synthetic oligonucleotide
  Target: LAMA2; (+) strand; PAM type: NNAGAAW; PAM sequence: GTAGAAT
ccaacttctcttctatagta

SEQ ID NO: 15789 - DNA, 20 bp, Artificial Sequence
  Description of Artificial Sequence: Synthetic oligonucleotide
  Target: LAMA2; (+) strand; PAM type: NNAGAAW; PAM sequence: GAAGAAA
agtagtagaataacagattt

SEQ ID NO: 15790 - DNA, 20 bp, Artificial Sequence
  Description of Artificial Sequence: Synthetic oligonucleotide
  Target: LAMA2; (+) strand; PAM type: NNAGAAW; PAM sequence: AAAGAAA
gaagatggatatgcattata

SEQ ID NO: 15791 - DNA, 20 bp, Artificial Sequence
  Description of Artificial Sequence: Synthetic oligonucleotide
  Target: LAMA2; (+) strand; PAM type: NNAGAAW; PAM sequence: TGAGAAA
aatgtccatcaacagatgac

SEQ ID NO: 15792 - DNA, 20 bp, Artificial Sequence
  Description of Artificial Sequence: Synthetic oligonucleotide
  Target: LAMA2; (+) strand; PAM type: NNAGAAW; PAM sequence: AAAGAAA
ccatcaacagatgactgaga

SEQ ID NO: 15793 - DNA, 20 bp, Artificial Sequence
  Description of Artificial Sequence: Synthetic oligonucleotide
  Target: LAMA2; (+) strand; PAM type: NNAGAAW; PAM sequence: ACAGAAT
aaatgtggtatatatacacc

SEQ ID NO: 15794 - DNA, 20 bp, Artificial Sequence
  Description of Artificial Sequence: Synthetic oligonucleotide
  Target: LAMA2; (+) strand; PAM type: NNAGAAW; PAM sequence: CCAGAAA
attatcctaagtgacataac

SEQ ID NO: 15795 - DNA, 20 bp, Artificial Sequence
  Description of Artificial Sequence: Synthetic oligonucleotide
  Target: LAMA2; (+) strand; PAM type: NNAGAAW; PAM sequence: ACAGAAA
ctaagtgacataacccagaa

SEQ ID NO: 15796 - DNA, 20 bp, Artificial Sequence
  Description of Artificial Sequence: Synthetic oligonucleotide
  Target: LAMA2; (+) strand; PAM type: NNAGAAW; PAM sequence: ACAGAAT
tattagtcaaaggtcaagtt

SEQ ID NO: 15797 - DNA, 20 bp, Artificial Sequence
  Description of Artificial Sequence: Synthetic oligonucleotide
  Target: LAMA2; (+) strand; PAM type: NNAGAAW; PAM sequence: TCAGAAA
aactacagcattccatcaat

SEQ ID NO: 15798 - DNA, 20 bp, Artificial Sequence
  Description of Artificial Sequence: Synthetic oligonucleotide
  Target: LAMA2; (+) strand; PAM type: NNAGAAW; PAM sequence: CCAGAAA
tactgttactactctgtggt

SEQ ID NO: 15799 - DNA, 20 bp, Artificial Sequence
  Description of Artificial Sequence: Synthetic oligonucleotide
  Target: LAMA2; (+) strand; PAM type: NNAGAAW; PAM sequence: TCAGAAA
actactctgtggtccagaaa

SEQ ID NO: 15800 - DNA, 20 bp, Artificial Sequence
  Description of Artificial Sequence: Synthetic oligonucleotide
  Target: LAMA2; (+) strand; PAM type: NNAGAAW; PAM sequence: AAAGAAT
ctctgtggtccagaaatcag

SEQ ID NO: 15801 - DNA, 20 bp, Artificial Sequence
  Description of Artificial Sequence: Synthetic oligonucleotide
  Target: LAMA2; (+) strand; PAM type: NNAGAAW; PAM sequence: AAAGAAA
ctctatggtatcaccgttaa

SEQ ID NO: 15802 - DNA, 20 bp, Artificial Sequence
  Description of Artificial Sequence: Synthetic oligonucleotide
  Target: LAMA2; (+) strand; PAM type: NNAGAAW; PAM sequence: TCAGAAT
gccctatgaggtttagttgt

SEQ ID NO: 15803 - DNA, 20 bp, Artificial Sequence
  Description of Artificial Sequence: Synthetic oligonucleotide
  Target: LAMA2; (+) strand; PAM type: NNAGAAW; PAM sequence: AAAGAAA
gtattaatttttccttataa

SEQ ID NO: 15804 - DNA, 20 bp, Artificial Sequence
  Description of Artificial Sequence: Synthetic oligonucleotide
  Target: LAMA2; (+) strand; PAM type: NNAGAAW; PAM sequence: AAAGAAA
ttataaacaaataattcaca

SEQ ID NO: 15805 - DNA, 20 bp, Artificial Sequence
  Description of Artificial Sequence: Synthetic oligonucleotide
  Target: LAMA2; (+) strand; PAM type: NNAGAAW; PAM sequence: GAAGAAA
atctaaatttaaaaggaaaa

SEQ ID NO: 15806 - DNA, 20 bp, Artificial Sequence
  Description of Artificial Sequence: Synthetic oligonucleotide
  Target: LAMA2; (+) strand; PAM type: NNAGAAW; PAM sequence: AGAGAAA
caagggagacatatggaggg

SEQ ID NO: 15807 - DNA, 20 bp, Artificial Sequence
  Description of Artificial Sequence: Synthetic oligonucleotide
  Target: LAMA2; (+) strand; PAM type: NNAGAAW; PAM sequence: AAAGAAA
atgcagtgggaattgacatc

SEQ ID NO: 15808 - DNA, 20 bp, Artificial Sequence
  Description of Artificial Sequence: Synthetic oligonucleotide
  Target: LAMA2; (+) strand; PAM type: NNAGAAW; PAM sequence: GCAGAAT
ggaattgacatcaaagaaat

SEQ ID NO: 15809 - DNA, 20 bp, Artificial Sequence
  Description of Artificial Sequence: Synthetic oligonucleotide
  Target: LAMA2; (+) strand; PAM type: NNAGAAW; PAM sequence: TTAGAAT
gtgataccattacacagcta

SEQ ID NO: 15810 - DNA, 20 bp, Artificial Sequence
  Description of Artificial Sequence: Synthetic oligonucleotide
  Target: LAMA2; (+) strand; PAM type: NNAGAAW; PAM sequence: CAAGAAA
ctaattattcacccaggaca

SEQ ID NO: 15811 - DNA, 20 bp, Artificial Sequence
  Description of Artificial Sequence: Synthetic oligonucleotide
  Target: LAMA2; (+) strand; PAM type: NNAGAAW; PAM sequence: ATAGAAA
cacaagaaagcatatttttt

SEQ ID NO: 15812 - DNA, 20 bp, Artificial Sequence
  Description of Artificial Sequence: Synthetic oligonucleotide
  Target: LAMA2; (+) strand; PAM type: NNAGAAW; PAM sequence: ATAGAAA
atacatttgtataaaattac

SEQ ID NO: 15813 - DNA, 20 bp, Artificial Sequence
  Description of Artificial Sequence: Synthetic oligonucleotide
  Target: LAMA2; (+) strand; PAM type: NNAGAAW; PAM sequence: ACAGAAA
atgtaaactaatctatagtc

SEQ ID NO: 15814 - DNA, 20 bp, Artificial Sequence
  Description of Artificial Sequence: Synthetic oligonucleotide
  Target: LAMA2; (+) strand; PAM type: NNAGAAW; PAM sequence: AAAGAAA
gagggattacaaatgagcat

SEQ ID NO: 15815 - DNA, 20 bp, Artificial Sequence
  Description of Artificial Sequence: Synthetic oligonucleotide
  Target: LAMA2; (+) strand; PAM type: NNAGAAW; PAM sequence: GAAGAAA
gatattagaggtatttagga

SEQ ID NO: 15816 - DNA, 20 bp, Artificial Sequence
  Description of Artificial Sequence: Synthetic oligonucleotide
  Target: LAMA2; (+) strand; PAM type: NNAGAAW; PAM sequence: GGAGAAA
tgattgattagatgtggtga

SEQ ID NO: 15817 - DNA, 20 bp, Artificial Sequence
  Description of Artificial Sequence: Synthetic oligonucleotide
  Target: LAMA2; (+) strand; PAM type: NNAGAAW; PAM sequence: TGAGAAT
tagaccccagggtaggagat

SEQ ID NO: 15818 - DNA, 20 bp, Artificial Sequence
  Description of Artificial Sequence: Synthetic oligonucleotide
  Target: LAMA2; (+) strand; PAM type: NNAGAAW; PAM sequence: GAAGAAA
gcttgacattatggaagcca

SEQ ID NO: 15819 - DNA, 20 bp, Artificial Sequence
  Description of Artificial Sequence: Synthetic oligonucleotide
  Target: LAMA2; (+) strand; PAM type: NNAGAAW; PAM sequence: CAAGAAA
caattagattttcagtggat

SEQ ID NO: 15820 - DNA, 20 bp, Artificial Sequence
  Description of Artificial Sequence: Synthetic oligonucleotide
  Target: LAMA2; (+) strand; PAM type: NNAGAAW; PAM sequence: AAAGAAT
gtggatcaagaaagagaaca

SEQ ID NO: 15821 - DNA, 20 bp, Artificial Sequence
  Description of Artificial Sequence: Synthetic oligonucleotide
  Target: LAMA2; (+) strand; PAM type: NNAGAAW; PAM sequence: AAAGAAA
agcctacttttctattttgt

SEQ ID NO: 15822 - DNA, 20 bp, Artificial Sequence
  Description of Artificial Sequence: Synthetic oligonucleotide
  Target: LAMA2; (+) strand; PAM type: NNAGAAW; PAM sequence: AAAGAAA
acttttctattttgtaaaga

SEQ ID NO: 15823 - DNA, 20 bp, Artificial Sequence
  Description of Artificial Sequence: Synthetic oligonucleotide
  Target: LAMA2; (+) strand; PAM type: NNAGAAW; PAM sequence: TAAGAAA
tgtaaagaaaagaaataggg

SEQ ID NO: 15824 - DNA, 20 bp, Artificial Sequence
  Description of Artificial Sequence: Synthetic oligonucleotide
  Target: LAMA2; (+) strand; PAM type: NNAGAAW; PAM sequence: TTAGAAT
tgctctttaatcatgttttc

SEQ ID NO: 15825 - DNA, 20 bp, Artificial Sequence
  Description of Artificial Sequence: Synthetic oligonucleotide
  Target: LAMA2; (+) strand; PAM type: NNAGAAW; PAM sequence: GCAGAAT
ggcttgcctgtgatagagag

SEQ ID NO: 15826 - DNA, 20 bp, Artificial Sequence
  Description of Artificial Sequence: Synthetic oligonucleotide
  Target: LAMA2; (+) strand; PAM type: NNAGAAW; PAM sequence: GTAGAAA
ttaaaatacccaccaagtct

SEQ ID NO: 15827 - DNA, 20 bp, Artificial Sequence
  Description of Artificial Sequence: Synthetic oligonucleotide
  Target: LAMA2; (+) strand; PAM type: NNAGAAW; PAM sequence: CAAGAAA
ttatttgagccaggaacatc

SEQ ID NO: 15828 - DNA, 20 bp, Artificial Sequence
  Description of Artificial Sequence: Synthetic oligonucleotide
  Target: LAMA2; (+) strand; PAM type: NNAGAAW; PAM sequence: AAAGAAT
atccaagaaactagcatcct

SEQ ID NO: 15829 - DNA, 20 bp, Artificial Sequence
  Description of Artificial Sequence: Synthetic oligonucleotide
  Target: LAMA2; (+) strand; PAM type: NNAGAAW; PAM sequence: TTAGAAA
gcatcctaaagaataaacat

SEQ ID NO: 15830 - DNA, 20 bp, Artificial Sequence
  Description of Artificial Sequence: Synthetic oligonucleotide
  Target: LAMA2; (+) strand; PAM type: NNAGAAW; PAM sequence: GTAGAAA
gctagatctaaggacatgtg

SEQ ID NO: 15831 - DNA, 20 bp, Artificial Sequence
  Description of Artificial Sequence: Synthetic oligonucleotide
  Target: LAMA2; (+) strand; PAM type: NNAGAAW; PAM sequence: TCAGAAA
gtggtagaaaagcatgtaat

SEQ ID NO: 15832 - DNA, 20 bp, Artificial Sequence
  Description of Artificial Sequence: Synthetic oligonucleotide
  Target: LAMA2; (+) strand; PAM type: NNAGAAW; PAM sequence: AAAGAAA
aaaataccttgagagaccca

SEQ ID NO: 15833 - DNA, 20 bp, Artificial Sequence
  Description of Artificial Sequence: Synthetic oligonucleotide
  Target: LAMA2; (+) strand; PAM type: NNAGAAW; PAM sequence: ACAGAAA
tcctgtggatagtaaaactt

SEQ ID NO: 15834 - DNA, 20 bp, Artificial Sequence
  Description of Artificial Sequence: Synthetic oligonucleotide
  Target: LAMA2; (+) strand; PAM type: NNAGAAW; PAM sequence: ATAGAAA
tctaactacttatctagatt

SEQ ID NO: 15835 - DNA, 20 bp, Artificial Sequence
  Description of Artificial Sequence: Synthetic oligonucleotide
  Target: LAMA2; (+) strand; PAM type: NNAGAAW; PAM sequence: TGAGAAA
ctaaatatagtgcaagtgct

SEQ ID NO: 15836 - DNA, 20 bp, Artificial Sequence
  Description of Artificial Sequence: Synthetic oligonucleotide
  Target: LAMA2; (+) strand; PAM type: NNAGAAW; PAM sequence: GGAGAAT
gatatagatactaatcagga

SEQ ID NO: 15837 - DNA, 20 bp, Artificial Sequence
  Description of Artificial Sequence: Synthetic oligonucleotide
  Target: LAMA2; (+) strand; PAM type: NNAGAAW; PAM sequence: TGAGAAA
ttttggtggcctgccaacgc

SEQ ID NO: 15838 - DNA, 20 bp, Artificial Sequence
  Description of Artificial Sequence: Synthetic oligonucleotide
  Target: LAMA2; (+) strand; PAM type: NNAGAAW; PAM sequence: TAAGAAT
gttctgaagtttaattacaa

SEQ ID NO: 15839 - DNA, 20 bp, Artificial Sequence
  Description of Artificial Sequence: Synthetic oligonucleotide
  Target: LAMA2; (+) strand; PAM type: NNAGAAW; PAM sequence: GCAGAAA
atgtcatataacccttggtt

SEQ ID NO: 15840 - DNA, 20 bp, Artificial Sequence
  Description of Artificial Sequence: Synthetic oligonucleotide
  Target: LAMA2; (+) strand; PAM type: NNAGAAW; PAM sequence: TTAGAAA
tgttagaacaacaccaggat

SEQ ID NO: 15841 - DNA, 20 bp, Artificial Sequence
  Description of Artificial Sequence: Synthetic oligonucleotide
  Target: LAMA2; (+) strand; PAM type: NNAGAAW; PAM sequence: AAAGAAT
cctttatatgcacctgctga

SEQ ID NO: 15842 - DNA, 20 bp, Artificial Sequence
  Description of Artificial Sequence: Synthetic oligonucleotide
  Target: LAMA2; (+) strand; PAM type: NNAGAAW; PAM sequence: TCAGAAA
aataaagtaactaaaaaatg

SEQ ID NO: 15843 - DNA, 20 bp, Artificial Sequence
  Description of Artificial Sequence: Synthetic oligonucleotide
  Target: LAMA2; (+) strand; PAM type: NNAGAAW; PAM sequence: TTAGAAT
aaatgttaattacactctaa

SEQ ID NO: 15844 - DNA, 20 bp, Artificial Sequence
  Description of Artificial Sequence: Synthetic oligonucleotide
  Target: LAMA2; (+) strand; PAM type: NNAGAAW; PAM sequence: CCAGAAT
agattatgtttggaaaaatc

SEQ ID NO: 15845 - DNA, 20 bp, Artificial Sequence
  Description of Artificial Sequence: Synthetic oligonucleotide
  Target: LAMA2; (+) strand; PAM type: NNAGAAW; PAM sequence: TTAGAAA
ttcattgtaatgtatttgtg

SEQ ID NO: 15846 - DNA, 20 bp, Artificial Sequence
  Description of Artificial Sequence: Synthetic oligonucleotide
  Target: LAMA2; (+) strand; PAM type: NNAGAAW; PAM sequence: TCAGAAA
aataaatttaaagtgtcaag

SEQ ID NO: 15847 - DNA, 20 bp, Artificial Sequence
  Description of Artificial Sequence: Synthetic oligonucleotide
  Target: LAMA2; (+) strand; PAM type: NNAGAAW; PAM sequence: CTAGAAA
aatagtaccacagttattac

SEQ ID NO: 15848 - DNA, 20 bp, Artificial Sequence
  Description of Artificial Sequence: Synthetic oligonucleotide
  Target: LAMA2; (+) strand; PAM type: NNAGAAW; PAM sequence: ACAGAAT
ataagccattcatgaacact

SEQ ID NO: 15849 - DNA, 20 bp, Artificial Sequence
  Description of Artificial Sequence: Synthetic oligonucleotide
  Target: LAMA2; (+) strand; PAM type: NNAGAAW; PAM sequence: GAAGAAT
ctagtgccatgctgtctgct

SEQ ID NO: 15850 - DNA, 20 bp, Artificial Sequence
  Description of Artificial Sequence: Synthetic oligonucleotide
  Target: LAMA2; (+) strand; PAM type: NNAGAAW; PAM sequence: CAAGAAA
ataataaagccgaactgatc

SEQ ID NO: 15851 - DNA, 20 bp, Artificial Sequence
  Description of Artificial Sequence: Synthetic oligonucleotide
  Target: LAMA2; (+) strand; PAM type: NNAGAAW; PAM sequence: AGAGAAA
ccgaggctagatttttaata

SEQ ID NO: 15852 - DNA, 20 bp, Artificial Sequence
  Description of Artificial Sequence: Synthetic oligonucleotide
  Target: LAMA2; (+) strand; PAM type: NNAGAAW; PAM sequence: ATAGAAT
ctagatttttaataagagaa

SEQ ID NO: 15853 - DNA, 20 bp, Artificial Sequence
  Description of Artificial Sequence: Synthetic oligonucleotide
  Target: LAMA2; (+) strand; PAM type: NNAGAAW; PAM sequence: ACAGAAA
taataagagaaatagaatat

SEQ ID NO: 15854 - DNA, 20 bp, Artificial Sequence
  Description of Artificial Sequence: Synthetic oligonucleotide
  Target: LAMA2; (+) strand; PAM type: NNAGAAW; PAM sequence: CAAGAAA
tgcctttgagtggtgaccct

SEQ ID NO: 15855 - DNA, 20 bp, Artificial Sequence
  Description of Artificial Sequence: Synthetic oligonucleotide
  Target: LAMA2; (+) strand; PAM type: NNAGAAW; PAM sequence: CAAGAAA
caccttctctgtgcattatg

SEQ ID NO: 15856 - DNA, 20 bp, Artificial Sequence
  Description of Artificial Sequence: Synthetic oligonucleotide
  Target: LAMA2; (+) strand; PAM type: NNAGAAW; PAM sequence: GCAGAAT
attatgcaagaaaaatataa

SEQ ID NO: 15857 - DNA, 20 bp, Artificial Sequence
  Description of Artificial Sequence: Synthetic oligonucleotide
  Target: LAMA2; (+) strand; PAM type: NNAGAAW; PAM sequence: AAAGAAA
ccagctgactgactgaacga

SEQ ID NO: 15858 - DNA, 20 bp, Artificial Sequence
  Description of Artificial Sequence: Synthetic oligonucleotide
  Target: LAMA2; (+) strand; PAM type: NNAGAAW; PAM sequence: CCAGAAA
tcaatgaaaataaagaagtt

SEQ ID NO: 15859 - DNA, 20 bp, Artificial Sequence
  Description of Artificial Sequence: Synthetic oligonucleotide
  Target: LAMA2; (+) strand; PAM type: NNAGAAW; PAM sequence: AGAGAAT
ggcatcatgggacaatgagg

SEQ ID NO: 15860 - DNA, 20 bp, Artificial Sequence
  Description of Artificial Sequence: Synthetic oligonucleotide
  Target: LAMA2; (+) strand; PAM type: NNAGAAW; PAM sequence: AAAGAAT
gatgctgattaccaccacat

SEQ ID NO: 15861 - DNA, 20 bp, Artificial Sequence
  Description of Artificial Sequence: Synthetic oligonucleotide
  Target: LAMA2; (+) strand; PAM type: NNAGAAW; PAM sequence: GCAGAAA
taactactgatttggacagt

SEQ ID NO: 15862 - DNA, 20 bp, Artificial Sequence
  Description of Artificial Sequence: Synthetic oligonucleotide
  Target: LAMA2; (+) strand; PAM type: NNAGAAW; PAM sequence: GTAGAAT
tattttgttattgttctaat

SEQ ID NO: 15863 - DNA, 20 bp, Artificial Sequence
  Description of Artificial Sequence: Synthetic oligonucleotide
  Target: LAMA2; (+) strand; PAM type: NNAGAAW; PAM sequence: AAAGAAT
tttttagactatataatcca

SEQ ID NO: 15864 - DNA, 20 bp, Artificial Sequence
  Description of Artificial Sequence: Synthetic oligonucleotide
  Target: LAMA2; (+) strand; PAM type: NNAGAAW; PAM sequence: CAAGAAA
cttattttttagctatctcc

SEQ ID NO: 15865 - DNA, 20 bp, Artificial Sequence
  Description of Artificial Sequence: Synthetic oligonucleotide
  Target: LAMA2; (+) strand; PAM type: NNAGAAW; PAM sequence: GAAGAAA
aataggccagaagtaaatct

SEQ ID NO: 15866 - DNA, 20 bp, Artificial Sequence
  Description of Artificial Sequence: Synthetic oligonucleotide
  Target: LAMA2; (+) strand; PAM type: NNAGAAW; PAM sequence: CTAGAAT
aaaaatggtattatgaagtc

SEQ ID NO: 15867 - DNA, 20 bp, Artificial Sequence
  Description of Artificial Sequence: Synthetic oligonucleotide
  Target: LAMA2; (+) strand; PAM type: NNAGAAW; PAM sequence: TGAGAAA
agttgacactgacccatatg

SEQ ID NO: 15868 - DNA, 20 bp, Artificial Sequence
  Description of Artificial Sequence: Synthetic oligonucleotide
  Target: LAMA2; (+) strand; PAM type: NNAGAAW; PAM sequence: CAAGAAT
tagtcaacagcaaatattag

SEQ ID NO: 15869 - DNA, 20 bp, Artificial Sequence
  Description of Artificial Sequence: Synthetic oligonucleotide
  Target: LAMA2; (+) strand; PAM type: NNAGAAW; PAM sequence: ATAGAAA
caaatattagcaagaatttt

SEQ ID NO: 15870 - DNA, 20 bp, Artificial Sequence
  Description of Artificial Sequence: Synthetic oligonucleotide
  Target: LAMA2; (+) strand; PAM type: NNAGAAW; PAM sequence: ATAGAAT
aattatcttaaaccactcca

SEQ ID NO: 15871 - DNA, 20 bp, Artificial Sequence
  Description of Artificial Sequence: Synthetic oligonucleotide
  Target: LAMA2; (+) strand; PAM type: NNAGAAW; PAM sequence: AAAGAAA
aatgaagggaaaatgtgggt

SEQ ID NO: 15872 - DNA, 20 bp, Artificial Sequence
  Description of Artificial Sequence: Synthetic oligonucleotide
  Target: LAMA2; (+) strand; PAM type: NNAGAAW; PAM sequence: TAAGAAA
cactctgagaagtttgggaa

SEQ ID NO: 15873 - DNA, 20 bp, Artificial Sequence
  Description of Artificial Sequence: Synthetic oligonucleotide
  Target: LAMA2; (+) strand; PAM type: NNAGAAW; PAM sequence: AGAGAAA
agaagtttgggaataagaaa

SEQ ID NO: 15874 - DNA, 20 bp, Artificial Sequence
  Description of Artificial Sequence: Synthetic oligonucleotide
  Target: LAMA2; (+) strand; PAM type: NNAGAAW; PAM sequence: TGAGAAT
cttcttaaaggaagttttac

SEQ ID NO: 15875 - DNA, 20 bp, Artificial Sequence
  Description of Artificial Sequence: Synthetic oligonucleotide
  Target: LAMA2; (+) strand; PAM type: NNAGAAW; PAM sequence: GCAGAAA
ttttgcaactaaaatatgag

SEQ ID NO: 15876 - DNA, 20 bp, Artificial Sequence
  Description of Artificial Sequence: Synthetic oligonucleotide
  Target: LAMA2; (+) strand; PAM type: NNAGAAW; PAM sequence: ATAGAAA
tccatgatttgaaaattgga

SEQ ID NO: 15877 - DNA, 20 bp, Artificial Sequence
  Description of Artificial Sequence: Synthetic oligonucleotide
  Target: LAMA2; (+) strand; PAM type: NNAGAAW; PAM sequence: GTAGAAA
aatactagcaaattcataaa

SEQ ID NO: 15878 - DNA, 20 bp, Artificial Sequence
  Description of Artificial Sequence: Synthetic oligonucleotide
  Target: LAMA2; (+) strand; PAM type: NNAGAAW; PAM sequence: TAAGAAA
agtgatatcttccacatatg

SEQ ID NO: 15879 - DNA, 20 bp, Artificial Sequence
  Description of Artificial Sequence: Synthetic oligonucleotide
  Target: LAMA2; (+) strand; PAM type: NNAGAAW; PAM sequence: ATAGAAA
aatgaatgaatgaatgaatt

SEQ ID NO: 15880 - DNA, 20 bp, Artificial Sequence
  Description of Artificial Sequence: Synthetic oligonucleotide
  Target: LAMA2; (+) strand; PAM type: NNAGAAW; PAM sequence: TGAGAAA
caatggtattactttaatat

SEQ ID NO: 15881 - DNA, 20 bp, Artificial Sequence
  Description of Artificial Sequence: Synthetic oligonucleotide
  Target: LAMA2; (+) strand; PAM type: NNAGAAW; PAM sequence: CTAGAAT
tatatttaaaatcaaaagct

SEQ ID NO: 15882 - DNA, 20 bp, Artificial Sequence
  Description of Artificial Sequence: Synthetic oligonucleotide
  Target: LAMA2; (+) strand; PAM type: NNAGAAW; PAM sequence: CTAGAAA
gatttgaagttatcatataa

SEQ ID NO: 15883 - DNA, 20 bp, Artificial Sequence
  Description of Artificial Sequence: Synthetic oligonucleotide
  Target: LAMA2; (+) strand; PAM type: NNAGAAW; PAM sequence: ACAGAAT
actcttcttttcctttactc

SEQ ID NO: 15884 - DNA, 20 bp, Artificial Sequence
  Description of Artificial Sequence: Synthetic oligonucleotide
  Target: LAMA2; (+) strand; PAM type: NNAGAAW; PAM sequence: ACAGAAA
ctgtgccaattgatgtagga

SEQ ID NO: 15885 - DNA, 20 bp, Artificial Sequence
  Description of Artificial Sequence: Synthetic oligonucleotide
  Target: LAMA2; (+) strand; PAM type: NNAGAAW; PAM sequence: CAAGAAT
atcaacctgtcattcagcac

SEQ ID NO: 15886 - DNA, 20 bp, Artificial Sequence
  Description of Artificial Sequence: Synthetic oligonucleotide
  Target: LAMA2; (+) strand; PAM type: NNAGAAW; PAM sequence: GGAGAAA
agggacaccagcaccaccta

SEQ ID NO: 15887 - DNA, 20 bp, Artificial Sequence
  Description of Artificial Sequence: Synthetic oligonucleotide
  Target: LAMA2; (+) strand; PAM type: NNAGAAW; PAM sequence: GCAGAAA
ctctctggacacaaagaagg

SEQ ID NO: 15888 - DNA, 20 bp, Artificial Sequence
  Description of Artificial Sequence: Synthetic oligonucleotide
  Target: LAMA2; (+) strand; PAM type: NNAGAAW; PAM sequence: GGAGAAA
aagggcagaaaatggatctg

SEQ ID NO: 15889 - DNA, 20 bp, Artificial Sequence
  Description of Artificial Sequence: Synthetic oligonucleotide
  Target: LAMA2; (+) strand; PAM type: NNAGAAW; PAM sequence: AAAGAAT
attcaaggatgttaaagcct

SEQ ID NO: 15890 - DNA, 20 bp, Artificial Sequence
  Description of Artificial Sequence: Synthetic oligonucleotide
  Target: LAMA2; (+) strand; PAM type: NNAGAAW; PAM sequence: TTAGAAA
aatgcagaagtggtttaatg

SEQ ID NO: 15891 - DNA, 20 bp, Artificial Sequence
  Description of Artificial Sequence: Synthetic oligonucleotide
  Target: LAMA2; (+) strand; PAM type: NNAGAAW; PAM sequence: GGAGAAT
ttacttgggaggctgaggca

SEQ ID NO: 15892 - DNA, 20 bp, Artificial Sequence
  Description of Artificial Sequence: Synthetic oligonucleotide
  Target: LAMA2; (+) strand; PAM type: NNAGAAW; PAM sequence: AAAGAAA
ccgactcgaaaaaaaaaaaa

SEQ ID NO: 15893 - DNA, 20 bp, Artificial Sequence
  Description of Artificial Sequence: Synthetic oligonucleotide
  Target: LAMA2; (+) strand; PAM type: NNAGAAW; PAM sequence: AAAGAAA
cgaaaaaaaaaaaaaaagaa

SEQ ID NO: 15894 - DNA, 20 bp, Artificial Sequence
  Description of Artificial Sequence: Synthetic oligonucleotide
  Target: LAMA2; (+) strand; PAM type: NNAGAAW; PAM sequence: AAAGAAA
aaaaaaaagaaaaagaaaaa

SEQ ID NO: 15895 - DNA, 20 bp, Artificial Sequence
  Description of Artificial Sequence: Synthetic oligonucleotide
  Target: LAMA2; (+) strand; PAM type: NNAGAAW; PAM sequence: CAAGAAA
atttgctataaaatcaagcc

SEQ ID NO: 15896 - DNA, 20 bp, Artificial Sequence
  Description of Artificial Sequence: Synthetic oligonucleotide
  Target: LAMA2; (+) strand; PAM type: NNAGAAW; PAM sequence: TAAGAAA
actgatcttagctagcatag

SEQ ID NO: 15897 - DNA, 20 bp, Artificial Sequence
  Description of Artificial Sequence: Synthetic oligonucleotide
  Target: LAMA2; (+) strand; PAM type: NNAGAAW; PAM sequence: CAAGAAT
aagtaaatatagcacaagaa

SEQ ID NO: 15898 - DNA, 20 bp, Artificial Sequence
  Description of Artificial Sequence: Synthetic oligonucleotide
  Target: LAMA2; (+) strand; PAM type: NNAGAAW; PAM sequence: TAAGAAT
ataagaacaaatatataatt

SEQ ID NO: 15899 - DNA, 20 bp, Artificial Sequence
  Description of Artificial Sequence: Synthetic oligonucleotide
  Target: LAMA2; (+) strand; PAM type: NNAGAAW; PAM sequence: GGAGAAA
aatagacataaagcccatat

SEQ ID NO: 15900 - DNA, 20 bp, Artificial Sequence
  Description of Artificial Sequence: Synthetic oligonucleotide
  Target: LAMA2; (+) strand; PAM type: NNAGAAW; PAM sequence: CTAGAAT
ttatatcaaagatgaaattc

SEQ ID NO: 15901 - DNA, 20 bp, Artificial Sequence
  Description of Artificial Sequence: Synthetic oligonucleotide
  Target: LAMA2; (+) strand; PAM type: NNAGAAW; PAM sequence: GAAGAAT
aagatgaaattcctagaata

SEQ ID NO: 15902 - DNA, 20 bp, Artificial Sequence
  Description of Artificial Sequence: Synthetic oligonucleotide
  Target: LAMA2; (+) strand; PAM type: NNAGAAW; PAM sequence: AAAGAAT
tgtataactgtgcaaatagg

SEQ ID NO: 15903 - DNA, 20 bp, Artificial Sequence
  Description of Artificial Sequence: Synthetic oligonucleotide
  Target: LAMA2; (+) strand; PAM type: NNAGAAW; PAM sequence: GAAGAAA
aaaaatctttaaaattctta

SEQ ID NO: 15904 - DNA, 20 bp, Artificial Sequence
  Description of Artificial Sequence: Synthetic oligonucleotide
  Target: LAMA2; (+) strand; PAM type: NNAGAAW; PAM sequence: TTAGAAA
ccatactggttgttatagta

SEQ ID NO: 15905 - DNA, 20 bp, Artificial Sequence
  Description of Artificial Sequence: Synthetic oligonucleotide
  Target: LAMA2; (+) strand; PAM type: NNAGAAW; PAM sequence: GTAGAAA
agtgcccttgatcactgctg

SEQ ID NO: 15906 - DNA, 20 bp, Artificial Sequence
  Description of Artificial Sequence: Synthetic oligonucleotide
  Target: LAMA2; (+) strand; PAM type: NNAGAAW; PAM sequence: CAAGAAT
tgggcataataagacatgta

SEQ ID NO: 15907 - DNA, 20 bp, Artificial Sequence
  Description of Artificial Sequence: Synthetic oligonucleotide
  Target: LAMA2; (+) strand; PAM type: NNAGAAW; PAM sequence: AGAGAAA
gaagtattctttataatagc

SEQ ID NO: 15908 - DNA, 20 bp, Artificial Sequence
  Description of Artificial Sequence: Synthetic oligonucleotide
  Target: LAMA2; (+) strand; PAM type: NNAGAAW; PAM sequence: CTAGAAA
tctttataatagcagagaaa

SEQ ID NO: 15909 - DNA, 20 bp, Artificial Sequence
  Description of Artificial Sequence: Synthetic oligonucleotide
  Target: LAMA2; (+) strand; PAM type: NNAGAAW; PAM sequence: TAAGAAA
cataatgggatatcaaggaa

SEQ ID NO: 15910 - DNA, 20 bp, Artificial Sequence
  Description of Artificial Sequence: Synthetic oligonucleotide
  Target: LAMA2; (+) strand; PAM type: NNAGAAW; PAM sequence: ATAGAAA
taaatataacaacataataa

SEQ ID NO: 15911 - DNA, 20 bp, Artificial Sequence
  Description of Artificial Sequence: Synthetic oligonucleotide
  Target: LAMA2; (+) strand; PAM type: NNAGAAW; PAM sequence: TTAGAAA
ggagaagcaaggagatggta

SEQ ID NO: 15912 - DNA, 20 bp, Artificial Sequence
  Description of Artificial Sequence: Synthetic oligonucleotide
  Target: LAMA2; (+) strand; PAM type: NNAGAAW; PAM sequence: AAAGAAA
aagcaaggagatggtattag

SEQ ID NO: 15913 - DNA, 20 bp, Artificial Sequence
  Description of Artificial Sequence: Synthetic oligonucleotide
  Target: LAMA2; (+) strand; PAM type: NNAGAAW; PAM sequence: GAAGAAT
atgtatatcactcatattgt

SEQ ID NO: 15914 - DNA, 20 bp, Artificial Sequence
  Description of Artificial Sequence: Synthetic oligonucleotide
  Target: LAMA2; (+) strand; PAM type: NNAGAAW; PAM sequence: GGAGAAA
aatatttttgaagagtagag

SEQ ID NO: 15915 - DNA, 20 bp, Artificial Sequence
  Description of Artificial Sequence: Synthetic oligonucleotide
  Target: LAMA2; (+) strand; PAM type: NNAGAAW; PAM sequence: TAAGAAT
aaatgataagctagttataa

SEQ ID NO: 15916 - DNA, 20 bp, Artificial Sequence
  Description of Artificial Sequence: Synthetic oligonucleotide
  Target: LAMA2; (+) strand; PAM type: NNAGAAW; PAM sequence: AAAGAAA
aatttctcctcttcaagata

SEQ ID NO: 15917 - DNA, 20 bp, Artificial Sequence
  Description of Artificial Sequence: Synthetic oligonucleotide
  Target: LAMA2; (+) strand; PAM type: NNAGAAW; PAM sequence: TAAGAAA
tcctattaaaacaattacaa

SEQ ID NO: 15918 - DNA, 20 bp, Artificial Sequence
  Description of Artificial Sequence: Synthetic oligonucleotide
  Target: LAMA2; (+) strand; PAM type: NNAGAAW; PAM sequence: CAAGAAA
gcaggtgcccccatactcca

SEQ ID NO: 15919 - DNA, 20 bp, Artificial Sequence
  Description of Artificial Sequence: Synthetic oligonucleotide
  Target: LAMA2; (+) strand; PAM type: NNAGAAW; PAM sequence: GAAGAAA
tgctatagtaacagtagcaa

SEQ ID NO: 15920 - DNA, 20 bp, Artificial Sequence
  Description of Artificial Sequence: Synthetic oligonucleotide
  Target: LAMA2; (+) strand; PAM type: NNAGAAW; PAM sequence: TCAGAAT
acaaattgaagtctaaatac

SEQ ID NO: 15921 - DNA, 20 bp, Artificial Sequence
  Description of Artificial Sequence: Synthetic oligonucleotide
  Target: LAMA2; (+) strand; PAM type: NNAGAAW; PAM sequence: TTAGAAA
caagcaaaaatggtaaatga

SEQ ID NO: 15922 - DNA, 20 bp, Artificial Sequence
  Description of Artificial Sequence: Synthetic oligonucleotide
  Target: LAMA2; (+) strand; PAM type: NNAGAAW; PAM sequence: TGAGAAA
cagctgttttcaaaaccgtt

SEQ ID NO: 15923 - DNA, 20 bp, Artificial Sequence
  Description of Artificial Sequence: Synthetic oligonucleotide
  Target: LAMA2; (+) strand; PAM type: NNAGAAW; PAM sequence: TAAGAAA
gcattttctgaagctataaa

SEQ ID NO: 15924 - DNA, 20 bp, Artificial Sequence
  Description of Artificial Sequence: Synthetic oligonucleotide
  Target: LAMA2; (+) strand; PAM type: NNAGAAW; PAM sequence: ACAGAAT
cagagtggctttctgaggga

SEQ ID NO: 15925 - DNA, 20 bp, Artificial Sequence
  Description of Artificial Sequence: Synthetic oligonucleotide
  Target: LAMA2; (+) strand; PAM type: NNAGAAW; PAM sequence: TTAGAAT
gcacaaactgatgactttct

SEQ ID NO: 15926 - DNA, 20 bp, Artificial Sequence
  Description of Artificial Sequence: Synthetic oligonucleotide
  Target: LAMA2; (+) strand; PAM type: NNAGAAW; PAM sequence: AGAGAAA
attagtttagaaggacaatt

SEQ ID NO: 15927 - DNA, 20 bp, Artificial Sequence
  Description of Artificial Sequence: Synthetic oligonucleotide
  Target: LAMA2; (+) strand; PAM type: NNAGAAW; PAM sequence: AAAGAAA
tagaaggacaattagagaaa

SEQ ID NO: 15928 - DNA, 20 bp, Artificial Sequence
  Description of Artificial Sequence: Synthetic oligonucleotide
  Target: LAMA2; (+) strand; PAM type: NNAGAAW; PAM sequence: ATAGAAA
ccatttatcagactgaagac

SEQ ID NO: 15929 - DNA, 20 bp, Artificial Sequence
  Description of Artificial Sequence: Synthetic oligonucleotide
  Target: LAMA2; (+) strand; PAM type: NNAGAAW; PAM sequence: GCAGAAT
aattgatacaaagcgttcat

SEQ ID NO: 15930 - DNA, 20 bp, Artificial Sequence
  Description of Artificial Sequence: Synthetic oligonucleotide
  Target: LAMA2; (+) strand; PAM type: NNAGAAW; PAM sequence: TTAGAAA
cagaatggctactgagacgt

SEQ ID NO: 15931 - DNA, 20 bp, Artificial Sequence
  Description of Artificial Sequence: Synthetic oligonucleotide
  Target: LAMA2; (+) strand; PAM type: NNAGAAW; PAM sequence: GGAGAAA
attgtagtcatggtctctga

SEQ ID NO: 15932 - DNA, 20 bp, Artificial Sequence
  Description of Artificial Sequence: Synthetic oligonucleotide
  Target: LAMA2; (+) strand; PAM type: NNAGAAW; PAM sequence: TTAGAAT
tgaatgctctcatttgaatc

SEQ ID NO: 15933 - DNA, 20 bp, Artificial Sequence
  Description of Artificial Sequence: Synthetic oligonucleotide
  Target: LAMA2; (+) strand; PAM type: NNAGAAW; PAM sequence: TTAGAAT
catttgaatcttagaatgct

SEQ ID NO: 15934 - DNA, 20 bp, Artificial Sequence
  Description of Artificial Sequence: Synthetic oligonucleotide
  Target: LAMA2; (+) strand; PAM type: NNAGAAW; PAM sequence: GGAGAAA
ctactctggaggctgaggca

SEQ ID NO: 15935 - DNA, 20 bp, Artificial Sequence
  Description of Artificial Sequence: Synthetic oligonucleotide
  Target: LAMA2; (+) strand; PAM type: NNAGAAW; PAM sequence: TGAGAAA
tcaataagtaactgcagatt

SEQ ID NO: 15936 - DNA, 20 bp, Artificial Sequence
  Description of Artificial Sequence: Synthetic oligonucleotide
  Target: LAMA2; (+) strand; PAM type: NNAGAAW; PAM sequence: TGAGAAA
ctcaaaatgtgttattttgt

SEQ ID NO: 15937 - DNA, 20 bp, Artificial Sequence
  Description of Artificial Sequence: Synthetic oligonucleotide
  Target: LAMA2; (+) strand; PAM type: NNAGAAW; PAM sequence: AAAGAAT
aaatgtgttattttgttgag

SEQ ID NO: 15938 - DNA, 20 bp, Artificial Sequence
  Description of Artificial Sequence: Synthetic oligonucleotide
  Target: LAMA2; (+) strand; PAM type: NNAGAAW; PAM sequence: CCAGAAA
agtgaccatgagaacttcac

SEQ ID NO: 15939 - DNA, 20 bp, Artificial Sequence
  Description of Artificial Sequence: Synthetic oligonucleotide
  Target: LAMA2; (+) strand; PAM type: NNAGAAW; PAM sequence: TGAGAAA
taacatcctttcatcacaga

SEQ ID NO: 15940 - DNA, 20 bp, Artificial Sequence
  Description of Artificial Sequence: Synthetic oligonucleotide
  Target: LAMA2; (+) strand; PAM type: NNAGAAW; PAM sequence: ACAGAAA
aaagctttcttcacacaggt

SEQ ID NO: 15941 - DNA, 20 bp, Artificial Sequence
  Description of Artificial Sequence: Synthetic oligonucleotide
  Target: LAMA2; (+) strand; PAM type: NNAGAAW; PAM sequence: CCAGAAT
ttaggagtcatttggggttt

SEQ ID NO: 15942 - DNA, 20 bp, Artificial Sequence
  Description of Artificial Sequence: Synthetic oligonucleotide
  Target: LAMA2; (+) strand; PAM type: NNAGAAW; PAM sequence: ACAGAAA
aacatccaaagtatgttcaa

SEQ ID NO: 15943 - DNA, 20 bp, Artificial Sequence
  Description of Artificial Sequence: Synthetic oligonucleotide
  Target: LAMA2; (+) strand; PAM type: NNAGAAW; PAM sequence: TAAGAAA
aaacccacattccaaacaaa

SEQ ID NO: 15944 - DNA, 20 bp, Artificial Sequence
  Description of Artificial Sequence: Synthetic oligonucleotide
  Target: LAMA2; (+) strand; PAM type: NNAGAAW; PAM sequence: TAAGAAT
atcaagtaattatgaaactc

SEQ ID NO: 15945 - DNA, 20 bp, Artificial Sequence
  Description of Artificial Sequence: Synthetic oligonucleotide
  Target: LAMA2; (+) strand; PAM type: NNAGAAW; PAM sequence: CCAGAAT
ttttaaaaatggaaaacaca

SEQ ID NO: 15946 - DNA, 20 bp, Artificial Sequence
  Description of Artificial Sequence: Synthetic oligonucleotide
  Target: LAMA2; (+) strand; PAM type: NNAGAAW; PAM sequence: AAAGAAA
tgtccttctcaataaaaact

SEQ ID NO: 15947 - DNA, 20 bp, Artificial Sequence
  Description of Artificial Sequence: Synthetic oligonucleotide
  Target: LAMA2; (+) strand; PAM type: NNAGAAW; PAM sequence: CCAGAAA
cactacagagagaggctaca

SEQ ID NO: 15948 - DNA, 20 bp, Artificial Sequence
  Description of Artificial Sequence: Synthetic oligonucleotide
  Target: LAMA2; (+) strand; PAM type: NNAGAAW; PAM sequence: AAAGAAA
acatttttccatagtttggt

SEQ ID NO: 15949 - DNA, 20 bp, Artificial Sequence
  Description of Artificial Sequence: Synthetic oligonucleotide
  Target: LAMA2; (+) strand; PAM type: NNAGAAW; PAM sequence: AAAGAAA
ttttccatagtttggtaaag

SEQ ID NO: 15950 - DNA, 20 bp, Artificial Sequence
  Description of Artificial Sequence: Synthetic oligonucleotide
  Target: LAMA2; (+) strand; PAM type: NNAGAAW; PAM sequence: AGAGAAA
aaacttgcttccggaacaaa

SEQ ID NO: 15951 - DNA, 20 bp, Artificial Sequence
  Description of Artificial Sequence: Synthetic oligonucleotide
  Target: LAMA2; (+) strand; PAM type: NNAGAAW; PAM sequence: GTAGAAT
gagaacagcgtttgcttagt

SEQ ID NO: 15952 - DNA, 20 bp, Artificial Sequence
  Description of Artificial Sequence: Synthetic oligonucleotide
  Target: LAMA2; (+) strand; PAM type: NNAGAAW; PAM sequence: AAAGAAT
gaggggtgaagggtggcagg

SEQ ID NO: 15953 - DNA, 20 bp, Artificial Sequence
  Description of Artificial Sequence: Synthetic oligonucleotide
  Target: LAMA2; (+) strand; PAM type: NNAGAAW; PAM sequence: TCAGAAA
tgaatttcaaccttccccac

SEQ ID NO: 15954 - DNA, 20 bp, Artificial Sequence
  Description of Artificial Sequence: Synthetic oligonucleotide
  Target: LAMA2; (+) strand; PAM type: NNAGAAW; PAM sequence: TGAGAAA
tgaggatcttcaacttagac

SEQ ID NO: 15955 - DNA, 20 bp, Artificial Sequence
  Description of Artificial Sequence: Synthetic oligonucleotide
  Target: LAMA2; (+) strand; PAM type: NNAGAAW; PAM sequence: TCAGAAA
gacattggtcgctgtgccca

SEQ ID NO: 15956 - DNA, 20 bp, Artificial Sequence
  Description of Artificial Sequence: Synthetic oligonucleotide
  Target: LAMA2; (+) strand; PAM type: NNAGAAW; PAM sequence: TTAGAAT
atatctagtacactctgata

SEQ ID NO: 15957 - DNA, 20 bp, Artificial Sequence
  Description of Artificial Sequence: Synthetic oligonucleotide
  Target: LAMA2; (+) strand; PAM type: NNAGAAW; PAM sequence: AAAGAAA
acactctgatattagaattg

SEQ ID NO: 15958 - DNA, 20 bp, Artificial Sequence
  Description of Artificial Sequence: Synthetic oligonucleotide
  Target: LAMA2; (+) strand; PAM type: NNAGAAW; PAM sequence: ACAGAAA
cagttgaaatgttggaaaac

SEQ ID NO: 15959 - DNA, 20 bp, Artificial Sequence
  Description of Artificial Sequence: Synthetic oligonucleotide
  Target: LAMA2; (+) strand; PAM type: NNAGAAW; PAM sequence: CCAGAAT
gttggaaaacacagaaatat

SEQ ID NO: 15960 - DNA, 20 bp, Artificial Sequence
  Description of Artificial Sequence: Synthetic oligonucleotide
  Target: LAMA2; (+) strand; PAM type: NNAGAAW; PAM sequence: TTAGAAA
tacaatttggtgtcctgttt

SEQ ID NO: 15961 - DNA, 20 bp, Artificial Sequence
  Description of Artificial Sequence: Synthetic oligonucleotide
  Target: LAMA2; (+) strand; PAM type: NNAGAAW; PAM sequence: GGAGAAT
ctactcagtaggctgaggca

SEQ ID NO: 15962 - DNA, 20 bp, Artificial Sequence
  Description of Artificial Sequence: Synthetic oligonucleotide
  Target: LAMA2; (+) strand; PAM type: NNAGAAW; PAM sequence: TCAGAAA
accctgcttagcttttgaga

SEQ ID NO: 15963 - DNA, 20 bp, Artificial Sequence
  Description of Artificial Sequence: Synthetic oligonucleotide
  Target: LAMA2; (+) strand; PAM type: NNAGAAW; PAM sequence: TAAGAAT
tctacttttagtcgagttaa

SEQ ID NO: 15964 - DNA, 20 bp, Artificial Sequence
  Description of Artificial Sequence: Synthetic oligonucleotide
  Target: LAMA2; (+) strand; PAM type: NNAGAAW; PAM sequence: TAAGAAT
accactagtaaaaggcagag

SEQ ID NO: 15965 - DNA, 20 bp, Artificial Sequence
  Description of Artificial Sequence: Synthetic oligonucleotide
  Target: LAMA2; (+) strand; PAM type: NNAGAAW; PAM sequence: TTAGAAA
gtgtttccagtttttcacta

SEQ ID NO: 15966 - DNA, 20 bp, Artificial Sequence
  Description of Artificial Sequence: Synthetic oligonucleotide
  Target: LAMA2; (+) strand; PAM type: NNAGAAW; PAM sequence: CTAGAAA
tgagcaatgtgctccttgca

SEQ ID NO: 15967 - DNA, 20 bp, Artificial Sequence
  Description of Artificial Sequence: Synthetic oligonucleotide
  Target: LAMA2; (+) strand; PAM type: NNAGAAW; PAM sequence: CAAGAAA
gaggccagataaccatcatt

SEQ ID NO: 15968 - DNA, 20 bp, Artificial Sequence
  Description of Artificial Sequence: Synthetic oligonucleotide
  Target: LAMA2; (+) strand; PAM type: NNAGAAW; PAM sequence: TCAGAAT
tgagatctgccacatggatt

SEQ ID NO: 15969 - DNA, 20 bp, Artificial Sequence
  Description of Artificial Sequence: Synthetic oligonucleotide
  Target: LAMA2; (+) strand; PAM type: NNAGAAW; PAM sequence: GAAGAAT
tcataaacatgttttcagtt

SEQ ID NO: 15970 - DNA, 20 bp, Artificial Sequence
  Description of Artificial Sequence: Synthetic oligonucleotide
  Target: LAMA2; (+) strand; PAM type: NNAGAAW; PAM sequence: TTAGAAA
acatgttttcagttgaagaa

SEQ ID NO: 15971 - DNA, 20 bp, Artificial Sequence
  Description of Artificial Sequence: Synthetic oligonucleotide
  Target: LAMA2; (+) strand; PAM type: NNAGAAW; PAM sequence: GGAGAAA
cacttataaaaatgtttcta

SEQ ID NO: 15972 - DNA, 20 bp, Artificial Sequence
  Description of Artificial Sequence: Synthetic oligonucleotide
  Target: LAMA2; (+) strand; PAM type: NNAGAAW; PAM sequence: TTAGAAA
gacaaggcaggctcgagttg

SEQ ID NO: 15973 - DNA, 20 bp, Artificial Sequence
  Description of Artificial Sequence: Synthetic oligonucleotide
  Target: LAMA2; (+) strand; PAM type: NNAGAAW; PAM sequence: TAAGAAT
catatttctattaatgcacc

SEQ ID NO: 15974 - DNA, 20 bp, Artificial Sequence
  Description of Artificial Sequence: Synthetic oligonucleotide
  Target: LAMA2; (+) strand; PAM type: NNAGAAW; PAM sequence: TTAGAAA
agcatgccaaattggttggt

SEQ ID NO: 15975 - DNA, 20 bp, Artificial Sequence
  Description of Artificial Sequence: Synthetic oligonucleotide
  Target: LAMA2; (+) strand; PAM type: NNAGAAW; PAM sequence: AAAGAAT
tgccaaattggttggtttag

SEQ ID NO: 15976 - DNA, 20 bp, Artificial Sequence
  Description of Artificial Sequence: Synthetic oligonucleotide
  Target: LAMA2; (+) strand; PAM type: NNAGAAW; PAM sequence: AAAGAAA
ctcttaacttgcacatgagg

SEQ ID NO: 15977 - DNA, 20 bp, Artificial Sequence
  Description of Artificial Sequence: Synthetic oligonucleotide
  Target: LAMA2; (+) strand; PAM type: NNAGAAW; PAM sequence: TCAGAAT
aattagttatgactgtgtgg

SEQ ID NO: 15978 - DNA, 20 bp, Artificial Sequence
  Description of Artificial Sequence: Synthetic oligonucleotide
  Target: LAMA2; (+) strand; PAM type: NNAGAAW; PAM sequence: TTAGAAA
tctattaattgtattatatt

SEQ ID NO: 15979 - DNA, 20 bp, Artificial Sequence
  Description of Artificial Sequence: Synthetic oligonucleotide
  Target: LAMA2; (+) strand; PAM type: NNAGAAW; PAM sequence: AGAGAAA
cgatattatcattgctagtc

SEQ ID NO: 15980 - DNA, 20 bp, Artificial Sequence
  Description of Artificial Sequence: Synthetic oligonucleotide
  Target: LAMA2; (+) strand; PAM type: NNAGAAW; PAM sequence: TCAGAAT
caccattttccatttttgta

SEQ ID NO: 15981 - DNA, 20 bp, Artificial Sequence
  Description of Artificial Sequence: Synthetic oligonucleotide
  Target: LAMA2; (+) strand; PAM type: NNAGAAW; PAM sequence: CCAGAAT
cataagccaccacgcctggc

SEQ ID NO: 15982 - DNA, 20 bp, Artificial Sequence
  Description of Artificial Sequence: Synthetic oligonucleotide
  Target: LAMA2; (+) strand; PAM type: NNAGAAW; PAM sequence: ACAGAAA
tatttgtgctagcacagttg

SEQ ID NO: 15983 - DNA, 20 bp, Artificial Sequence
  Description of Artificial Sequence: Synthetic oligonucleotide
  Target: LAMA2; (+) strand; PAM type: NNAGAAW; PAM sequence: TGAGAAA
agggcaatgtaagggtgtct

SEQ ID NO: 15984 - DNA, 20 bp, Artificial Sequence
  Description of Artificial Sequence: Synthetic oligonucleotide
  Target: LAMA2; (+) strand; PAM type: NNAGAAW; PAM sequence: AGAGAAA
tctttagcccatcgagagct

SEQ ID NO: 15985 - DNA, 20 bp, Artificial Sequence
  Description of Artificial Sequence: Synthetic oligonucleotide
  Target: LAMA2; (+) strand; PAM type: NNAGAAW; PAM sequence: ACAGAAA
gaggctgaacttcaagtatt

SEQ ID NO: 15986 - DNA, 20 bp, Artificial Sequence
  Description of Artificial Sequence: Synthetic oligonucleotide
  Target: LAMA2; (+) strand; PAM type: NNAGAAW; PAM sequence: TAAGAAA
acagtttaaaatgtgaaaac

SEQ ID NO: 15987 - DNA, 20 bp, Artificial Sequence
  Description of Artificial Sequence: Synthetic oligonucleotide
  Target: LAMA2; (+) strand; PAM type: NNAGAAW; PAM sequence: GGAGAAT
aaaacaatacaagtagccat

SEQ ID NO: 15988 - DNA, 20 bp, Artificial Sequence
  Description of Artificial Sequence: Synthetic oligonucleotide
  Target: LAMA2; (+) strand; PAM type: NNAGAAW; PAM sequence: AAAGAAT
aaagaagtgagcacagaagg

SEQ ID NO: 15989 - DNA, 20 bp, Artificial Sequence
  Description of Artificial Sequence: Synthetic oligonucleotide
  Target: LAMA2; (+) strand; PAM type: NNAGAAW; PAM sequence: AGAGAAA
ggatactgatatgtatttaa

SEQ ID NO: 15990 - DNA, 20 bp, Artificial Sequence
  Description of Artificial Sequence: Synthetic oligonucleotide
  Target: LAMA2; (+) strand; PAM type: NNAGAAW; PAM sequence: AAAGAAA
tcttccacttattcatccat

SEQ ID NO: 15991 - DNA, 20 bp, Artificial Sequence
  Description of Artificial Sequence: Synthetic oligonucleotide
  Target: LAMA2; (+) strand; PAM type: NNAGAAW; PAM sequence: AGAGAAA
gattttagcccacatttatt

SEQ ID NO: 15992 - DNA, 20 bp, Artificial Sequence
  Description of Artificial Sequence: Synthetic oligonucleotide
  Target: LAMA2; (+) strand; PAM type: NNAGAAW; PAM sequence: GAAGAAA
ttaattattgactcatgaaa

SEQ ID NO: 15993 - DNA, 20 bp, Artificial Sequence
  Description of Artificial Sequence: Synthetic oligonucleotide
  Target: LAMA2; (+) strand; PAM type: NNAGAAW; PAM sequence: TTAGAAA
agccaccaatctgcagttag

SEQ ID NO: 15994 - DNA, 20 bp, Artificial Sequence
  Description of Artificial Sequence: Synthetic oligonucleotide
  Target: LAMA2; (+) strand; PAM type: NNAGAAW; PAM sequence: GCAGAAT
taaaaagtccccacaaggtg

SEQ ID NO: 15995 - DNA, 20 bp, Artificial Sequence
  Description of Artificial Sequence: Synthetic oligonucleotide
  Target: LAMA2; (+) strand; PAM type: NNAGAAW; PAM sequence: TTAGAAA
gccttcaagtatacactagc

SEQ ID NO: 15996 - DNA, 20 bp, Artificial Sequence
  Description of Artificial Sequence: Synthetic oligonucleotide
  Target: LAMA2; (+) strand; PAM type: NNAGAAW; PAM sequence: TGAGAAT
ttccataacattggctcatc

SEQ ID NO: 15997 - DNA, 20 bp, Artificial Sequence
  Description of Artificial Sequence: Synthetic oligonucleotide
  Target: LAMA2; (+) strand; PAM type: NNAGAAW; PAM sequence: GCAGAAA
cttcttgagggctgcccgtt

SEQ ID NO: 15998 - DNA, 20 bp, Artificial Sequence
  Description of Artificial Sequence: Synthetic oligonucleotide
  Target: LAMA2; (+) strand; PAM type: NNAGAAW; PAM sequence: CTAGAAA
ttgaccagtgccttgtccat

SEQ ID NO: 15999 - DNA, 20 bp, Artificial Sequence
  Description of Artificial Sequence: Synthetic oligonucleotide
  Target: LAMA2; (+) strand; PAM type: NNAGAAW; PAM sequence: TAAGAAA
tctttttgcaggcagcgtaa

SEQ ID NO: 16000 - DNA, 20 bp, Artificial Sequence
  Description of Artificial Sequence: Synthetic oligonucleotide
  Target: LAMA2; (+) strand; PAM type: NNAGAAW; PAM sequence: AGAGAAA
gcttcgtttgactaagatca

SEQ ID NO: 16001 - DNA, 20 bp, Artificial Sequence
  Description of Artificial Sequence: Synthetic oligonucleotide
  Target: LAMA2; (+) strand; PAM type: NNAGAAW; PAM sequence: TAAGAAT
gcccctcactgaaaaattat

SEQ ID NO: 16002 - DNA, 20 bp, Artificial Sequence
  Description of Artificial Sequence: Synthetic oligonucleotide
  Target: LAMA2; (+) strand; PAM type: NNAGAAW; PAM sequence: CAAGAAA
tctagtggactgataatttt

SEQ ID NO: 16003 - DNA, 20 bp, Artificial Sequence
  Description of Artificial Sequence: Synthetic oligonucleotide
  Target: LAMA2; (+) strand; PAM type: NNAGAAW; PAM sequence: CAAGAAA
ggagatggaaatggggaggg

SEQ ID NO: 16004 - DNA, 20 bp, Artificial Sequence
  Description of Artificial Sequence: Synthetic oligonucleotide
  Target: LAMA2; (+) strand; PAM type: NNAGAAW; PAM sequence: TAAGAAT
attttccctgttcgatcttc

SEQ ID NO: 16005 - DNA, 20 bp, Artificial Sequence
  Description of Artificial Sequence: Synthetic oligonucleotide
  Target: LAMA2; (+) strand; PAM type: NNAGAAW; PAM sequence: TCAGAAA
aaagggaaattccagttttc

SEQ ID NO: 16006 - DNA, 20 bp, Artificial Sequence
  Description of Artificial Sequence: Synthetic oligonucleotide
  Target: LAMA2; (+) strand; PAM type: NNAGAAW; PAM sequence: TGAGAAA
agccattccagggtgtgata

SEQ ID NO: 16007 - DNA, 20 bp, Artificial Sequence
  Description of Artificial Sequence: Synthetic oligonucleotide
  Target: LAMA2; (+) strand; PAM type: NNAGAAW; PAM sequence: AAAGAAT
ataatgtagtttttattctt

SEQ ID NO: 16008 - DNA, 20 bp, Artificial Sequence
  Description of Artificial Sequence: Synthetic oligonucleotide
  Target: LAMA2; (+) strand; PAM type: NNAGAAW; PAM sequence: TAAGAAA
taaagaattacgctaatatg

SEQ ID NO: 16009 - DNA, 20 bp, Artificial Sequence
  Description of Artificial Sequence: Synthetic oligonucleotide
  Target: LAMA2; (+) strand; PAM type: NNAGAAW; PAM sequence: GCAGAAT
ttttacagggtccttgtgct

SEQ ID NO: 16010 - DNA, 20 bp, Artificial Sequence
  Description of Artificial Sequence: Synthetic oligonucleotide
  Target: LAMA2; (+) strand; PAM type: NNAGAAW; PAM sequence: CAAGAAA
gagcaagcagttcgggcttt

SEQ ID NO: 16011 - DNA, 20 bp, Artificial Sequence
  Description of Artificial Sequence: Synthetic oligonucleotide
  Target: LAMA2; (+) strand; PAM type: NNAGAAW; PAM sequence: AGAGAAT
ttttattcactgagtacaat

SEQ ID NO: 16012 - DNA, 20 bp, Artificial Sequence
  Description of Artificial Sequence: Synthetic oligonucleotide
  Target: LAMA2; (+) strand; PAM type: NNAGAAW; PAM sequence: ATAGAAT
ttcactgagtacaatagaga

SEQ ID NO: 16013 - DNA, 20 bp, Artificial Sequence
  Description of Artificial Sequence: Synthetic oligonucleotide
  Target: LAMA2; (+) strand; PAM type: NNAGAAW; PAM sequence: TGAGAAT
gataccgctctattttagca

SEQ ID NO: 16014 - DNA, 20 bp, Artificial Sequence
  Description of Artificial Sequence: Synthetic oligonucleotide
  Target: LAMA2; (+) strand; PAM type: NNAGAAW; PAM sequence: TGAGAAA
tgattttgcaacagttcagc

SEQ ID NO: 16015 - DNA, 20 bp, Artificial Sequence
  Description of Artificial Sequence: Synthetic oligonucleotide
  Target: LAMA2; (+) strand; PAM type: NNAGAAW; PAM sequence: TGAGAAA
gacatttccactgctctaag

SEQ ID NO: 16016 - DNA, 20 bp, Artificial Sequence
  Description of Artificial Sequence: Synthetic oligonucleotide
  Target: LAMA2; (+) strand; PAM type: NNAGAAW; PAM sequence: CCAGAAA
taaaaacgttggccttacac

SEQ ID NO: 16017 - DNA, 20 bp, Artificial Sequence
  Description of Artificial Sequence: Synthetic oligonucleotide
  Target: LAMA2; (+) strand; PAM type: NNAGAAW; PAM sequence: CTAGAAA
atactttgacttgtcatatt

SEQ ID NO: 16018 - DNA, 20 bp, Artificial Sequence
  Description of Artificial Sequence: Synthetic oligonucleotide
  Target: LAMA2; (+) strand; PAM type: NNAGAAW; PAM sequence: TAAGAAA
ccaatttgttatcatggaaa

SEQ ID NO: 16019 - DNA, 20 bp, Artificial Sequence
  Description of Artificial Sequence: Synthetic oligonucleotide
  Target: LAMA2; (+) strand; PAM type: NNAGAAW; PAM sequence: ATAGAAT
agttcttccatctctagcta

SEQ ID NO: 16020 - DNA, 20 bp, Artificial Sequence
  Description of Artificial Sequence: Synthetic oligonucleotide
  Target: LAMA2; (+) strand; PAM type: NNAGAAW; PAM sequence: TGAGAAA
agaataataaatatgacatt

SEQ ID NO: 16021 - DNA, 20 bp, Artificial Sequence
  Description of Artificial Sequence: Synthetic oligonucleotide
  Target: LAMA2; (+) strand; PAM type: NNAGAAW; PAM sequence: TAAGAAA
aaccacaatgaggctgggat

SEQ ID NO: 16022 - DNA, 20 bp, Artificial Sequence
  Description of Artificial Sequence: Synthetic oligonucleotide
  Target: LAMA2; (+) strand; PAM type: NNAGAAW; PAM sequence: CCAGAAT
tttaaaaattacttcccaaa

SEQ ID NO: 16023 - DNA, 20 bp, Artificial Sequence
  Description of Artificial Sequence: Synthetic oligonucleotide
  Target: LAMA2; (+) strand; PAM type: NNAGAAW; PAM sequence: GCAGAAA
ctttgtactcatcaggttct

SEQ ID NO: 16024 - DNA, 20 bp, Artificial Sequence
  Description of Artificial Sequence: Synthetic oligonucleotide
  Target: LAMA2; (+) strand; PAM type: NNAGAAW; PAM sequence: ACAGAAT
tgatagtagtcatggaaaag

SEQ ID NO: 16025 - DNA, 20 bp, Artificial Sequence
  Description of Artificial Sequence: Synthetic oligonucleotide
  Target: LAMA2; (+) strand; PAM type: NNAGAAW; PAM sequence: GAAGAAT
acccatcaactacactaccc

SEQ ID NO: 16026 - DNA, 20 bp, Artificial Sequence
  Description of Artificial Sequence: Synthetic oligonucleotide
  Target: LAMA2; (+) strand; PAM type: NNAGAAW; PAM sequence: AGAGAAT
ctactttggaggctgaggca

SEQ ID NO: 16027 - DNA, 20 bp, Artificial Sequence
  Description of Artificial Sequence: Synthetic oligonucleotide
  Target: LAMA2; (+) strand; PAM type: NNAGAAW; PAM sequence: TCAGAAT
acagttatccaattttggat

SEQ ID NO: 16028 - DNA, 20 bp, Artificial Sequence
  Description of Artificial Sequence: Synthetic oligonucleotide
  Target: LAMA2; (+) strand; PAM type: NNAGAAW; PAM sequence: ATAGAAA
aaacctaattaccttttcaa

SEQ ID NO: 16029 - DNA, 20 bp, Artificial Sequence
  Description of Artificial Sequence: Synthetic oligonucleotide
  Target: LAMA2; (+) strand; PAM type: NNAGAAW; PAM sequence: ATAGAAA
gtaaggttaataaactatta

SEQ ID NO: 16030 - DNA, 20 bp, Artificial Sequence
  Description of Artificial Sequence: Synthetic oligonucleotide
  Target: LAMA2; (+) strand; PAM type: NNAGAAW; PAM sequence: AAAGAAA
gtatcctttatttaagccaa

SEQ ID NO: 16031 - DNA, 20 bp, Artificial Sequence
  Description of Artificial Sequence: Synthetic oligonucleotide
  Target: LAMA2; (+) strand; PAM type: NNAGAAW; PAM sequence: TAAGAAT
attcatgtatctgatcctga

SEQ ID NO: 16032 - DNA, 20 bp, Artificial Sequence
  Description of Artificial Sequence: Synthetic oligonucleotide
  Target: LAMA2; (+) strand; PAM type: NNAGAAW; PAM sequence: GAAGAAA
gatcctgataagaattaata

SEQ ID NO: 16033 - DNA, 20 bp, Artificial Sequence
  Description of Artificial Sequence: Synthetic oligonucleotide
  Target: LAMA2; (+) strand; PAM type: NNAGAAW; PAM sequence: AGAGAAT
ataaagtaaaaggtctattt

SEQ ID NO: 16034 - DNA, 20 bp, Artificial Sequence
  Description of Artificial Sequence: Synthetic oligonucleotide
  Target: LAMA2; (+) strand; PAM type: NNAGAAW; PAM sequence: AAAGAAA
catgaaggtacagttaggaa

SEQ ID NO: 16035 - DNA, 20 bp, Artificial Sequence
  Description of Artificial Sequence: Synthetic oligonucleotide
  Target: LAMA2; (+) strand; PAM type: NNAGAAW; PAM sequence: TGAGAAA
ttcatctgaatatcttcttt

SEQ ID NO: 16036 - DNA, 20 bp, Artificial Sequence
  Description of Artificial Sequence: Synthetic oligonucleotide
  Target: LAMA2; (+) strand; PAM type: NNAGAAW; PAM sequence: ATAGAAT
gattattagatttttttcct

SEQ ID NO: 16037 - DNA, 20 bp, Artificial Sequence
  Description of Artificial Sequence: Synthetic oligonucleotide
  Target: LAMA2; (+) strand; PAM type: NNAGAAW; PAM sequence: GGAGAAT
tttgcccatttcaatgtcct

SEQ ID NO: 16038 - DNA, 20 bp, Artificial Sequence
  Description of Artificial Sequence: Synthetic oligonucleotide
  Target: LAMA2; (+) strand; PAM type: NNAGAAW; PAM sequence: GAAGAAT
ggaattttttctatttctgt

SEQ ID NO: 16039 - DNA, 20 bp, Artificial Sequence
  Description of Artificial Sequence: Synthetic oligonucleotide
  Target: LAMA2; (+) strand; PAM type: NNAGAAW; PAM sequence: AGAGAAA
ctagctagagcagtcagaca

SEQ ID NO: 16040 - DNA, 20 bp, Artificial Sequence
  Description of Artificial Sequence: Synthetic oligonucleotide
  Target: LAMA2; (+) strand; PAM type: NNAGAAW; PAM sequence: TCAGAAA
tatatgccaacagcaaacaa

SEQ ID NO: 16041 - DNA, 20 bp, Artificial Sequence
  Description of Artificial Sequence: Synthetic oligonucleotide
  Target: LAMA2; (+) strand; PAM type: NNAGAAW; PAM sequence: AAAGAAA
ccaacagcaaacaatcagaa

SEQ ID NO: 16042 - DNA, 20 bp, Artificial Sequence
  Description of Artificial Sequence: Synthetic oligonucleotide
  Target: LAMA2; (+) strand; PAM type: NNAGAAW; PAM sequence: CAAGAAA
aaacaatcagaaaaagaaat

SEQ ID NO: 16043 - DNA, 20 bp, Artificial Sequence
  Description of Artificial Sequence: Synthetic oligonucleotide
  Target: LAMA2; (+) strand; PAM type: NNAGAAW; PAM sequence: ATAGAAT
tgcaattaatgtactttaag

SEQ ID NO: 16044 - DNA, 20 bp, Artificial Sequence
  Description of Artificial Sequence: Synthetic oligonucleotide
  Target: LAMA2; (+) strand; PAM type: NNAGAAW; PAM sequence: ATAGAAA
atattcagtcccgtggtatc

SEQ ID NO: 16045 - DNA, 20 bp, Artificial Sequence
  Description of Artificial Sequence: Synthetic oligonucleotide
  Target: LAMA2; (+) strand; PAM type: NNAGAAW; PAM sequence: TTAGAAA
tagaaatacgtgtatgttca

SEQ ID NO: 16046 - DNA, 20 bp, Artificial Sequence
  Description of Artificial Sequence: Synthetic oligonucleotide
  Target: LAMA2; (+) strand; PAM type: NNAGAAW; PAM sequence: ACAGAAA
tgtggagattatgatgggaa

SEQ ID NO: 16047 - DNA, 20 bp, Artificial Sequence
  Description of Artificial Sequence: Synthetic oligonucleotide
  Target: LAMA2; (+) strand; PAM type: NNAGAAW; PAM sequence: CAAGAAT
agtaacatagttctttctat

SEQ ID NO: 16048 - DNA, 20 bp, Artificial Sequence
  Description of Artificial Sequence: Synthetic oligonucleotide
  Target: LAMA2; (+) strand; PAM type: NNAGAAW; PAM sequence: TAAGAAA
aagaatatattatcaactgg

SEQ ID NO: 16049 - DNA, 20 bp, Artificial Sequence
  Description of Artificial Sequence: Synthetic oligonucleotide
  Target: LAMA2; (+) strand; PAM type: NNAGAAW; PAM sequence: TTAGAAA
aagcacagttctgtagatac

SEQ ID NO: 16050 - DNA, 20 bp, Artificial Sequence
  Description of Artificial Sequence: Synthetic oligonucleotide
  Target: LAMA2; (+) strand; PAM type: NNAGAAW; PAM sequence: GCAGAAA
gaaaccccacctacagggaa

SEQ ID NO: 16051 - DNA, 20 bp, Artificial Sequence
  Description of Artificial Sequence: Synthetic oligonucleotide
  Target: LAMA2; (+) strand; PAM type: NNAGAAW; PAM sequence: ACAGAAA
cacctacagggaagcagaaa

SEQ ID NO: 16052 - DNA, 20 bp, Artificial Sequence
  Description of Artificial Sequence: Synthetic oligonucleotide
  Target: LAMA2; (+) strand; PAM type: NNAGAAW; PAM sequence: CCAGAAA
taattctggatcaaacaaaa

SEQ ID NO: 16053 - DNA, 20 bp, Artificial Sequence
  Description of Artificial Sequence: Synthetic oligonucleotide
  Target: LAMA2; (+) strand; PAM type: NNAGAAW; PAM sequence: GGAGAAA
gcctaataaatagaagactt

SEQ ID NO: 16054 - DNA, 20 bp, Artificial Sequence
  Description of Artificial Sequence: Synthetic oligonucleotide
  Target: LAMA2; (+) strand; PAM type: NNAGAAW; PAM sequence: AAAGAAT
aatatggaaaatcatagagg

SEQ ID NO: 16055 - DNA, 20 bp, Artificial Sequence
  Description of Artificial Sequence: Synthetic oligonucleotide
  Target: LAMA2; (+) strand; PAM type: NNAGAAW; PAM sequence: CCAGAAA
attctaaaagggaaggtagc

SEQ ID NO: 16056 - DNA, 20 bp, Artificial Sequence
  Description of Artificial Sequence: Synthetic oligonucleotide
  Target: LAMA2; (+) strand; PAM type: NNAGAAW; PAM sequence: TTAGAAT
tctgaaacttatagccctca

SEQ ID NO: 16057 - DNA, 20 bp, Artificial Sequence
  Description of Artificial Sequence: Synthetic oligonucleotide
  Target: LAMA2; (+) strand; PAM type: NNAGAAW; PAM sequence: GTAGAAT
aagtgggattggaccttctt

SEQ ID NO: 16058 - DNA, 20 bp, Artificial Sequence
  Description of Artificial Sequence: Synthetic oligonucleotide
  Target: LAMA2; (+) strand; PAM type: NNAGAAW; PAM sequence: GGAGAAA
cccggctgtattctttgttg

SEQ ID NO: 16059 - DNA, 20 bp, Artificial Sequence
  Description of Artificial Sequence: Synthetic oligonucleotide
  Target: LAMA2; (+) strand; PAM type: NNAGAAW; PAM sequence: GGAGAAA
tgagactatggactccagtg

SEQ ID NO: 16060 - DNA, 20 bp, Artificial Sequence
  Description of Artificial Sequence: Synthetic oligonucleotide
  Target: LAMA2; (+) strand; PAM type: NNAGAAW; PAM sequence: CAAGAAA
ggtaaacagagaagggaaaa

SEQ ID NO: 16061 - DNA, 20 bp, Artificial Sequence
  Description of Artificial Sequence: Synthetic oligonucleotide
  Target: LAMA2; (+) strand; PAM type: NNAGAAW; PAM sequence: GAAGAAA
cccttagtgttgcctcccaa

SEQ ID NO: 16062 - DNA, 20 bp, Artificial Sequence
  Description of Artificial Sequence: Synthetic oligonucleotide
  Target: LAMA2; (+) strand; PAM type: NNAGAAW; PAM sequence: AAAGAAT
tcgtttcttcaccagcttca

SEQ ID NO: 16063 - DNA, 20 bp, Artificial Sequence
  Description of Artificial Sequence: Synthetic oligonucleotide
  Target: LAMA2; (+) strand; PAM type: NNAGAAW; PAM sequence: TAAGAAA
tcactttaaacaatatcttt

SEQ ID NO: 16064 - DNA, 20 bp, Artificial Sequence
  Description of Artificial Sequence: Synthetic oligonucleotide
  Target: LAMA2; (+) strand; PAM type: NNAGAAW; PAM sequence: GTAGAAT
acattctaaaaagacgtgag

SEQ ID NO: 16065 - DNA, 20 bp, Artificial Sequence
  Description of Artificial Sequence: Synthetic oligonucleotide
  Target: LAMA2; (+) strand; PAM type: NNAGAAW; PAM sequence: GCAGAAT
ggcctcaaatttttctgaaa

SEQ ID NO: 16066 - DNA, 20 bp, Artificial Sequence
  Description of Artificial Sequence: Synthetic oligonucleotide
  Target: LAMA2; (+) strand; PAM type: NNAGAAW; PAM sequence: TAAGAAT
catttatatttacgtgtgtc

SEQ ID NO: 16067 - DNA, 20 bp, Artificial Sequence
  Description of Artificial Sequence: Synthetic oligonucleotide
  Target: LAMA2; (+) strand; PAM type: NNAGAAW; PAM sequence: TTAGAAT
tgtgtacttgcttcctagct

SEQ ID NO: 16068 - DNA, 20 bp, Artificial Sequence
  Description of Artificial Sequence: Synthetic oligonucleotide
  Target: LAMA2; (+) strand; PAM type: NNAGAAW; PAM sequence: TTAGAAT
ttcctagctttagaatctgc

SEQ ID NO: 16069 - DNA, 20 bp, Artificial Sequence
  Description of Artificial Sequence: Synthetic oligonucleotide
  Target: LAMA2; (+) strand; PAM type: NNAGAAW; PAM sequence: AAAGAAA
agagtttatatttatattac

SEQ ID NO: 16070 - DNA, 20 bp, Artificial Sequence
  Description of Artificial Sequence: Synthetic oligonucleotide
  Target: LAMA2; (+) strand; PAM type: NNAGAAW; PAM sequence: TCAGAAT
cgcaagcaataaatcctcat

SEQ ID NO: 16071 - DNA, 20 bp, Artificial Sequence
  Description of Artificial Sequence: Synthetic oligonucleotide
  Target: LAMA2; (+) strand; PAM type: NNAGAAW; PAM sequence: ATAGAAA
ttgttgacagagcaatgttg

SEQ ID NO: 16072 - DNA, 20 bp, Artificial Sequence
  Description of Artificial Sequence: Synthetic oligonucleotide
  Target: LAMA2; (+) strand; PAM type: NNAGAAW; PAM sequence: TAAGAAA
agggatttatttttacaatg

SEQ ID NO: 16073 - DNA, 20 bp, Artificial Sequence
  Description of Artificial Sequence: Synthetic oligonucleotide
  Target: LAMA2; (+) strand; PAM type: NNAGAAW; PAM sequence: ATAGAAT
aaactaatttgtgcatgtac

SEQ ID NO: 16074 - DNA, 20 bp, Artificial Sequence
  Description of Artificial Sequence: Synthetic oligonucleotide
  Target: LAMA2; (+) strand; PAM type: NNAGAAW; PAM sequence: AAAGAAT
gttcccttactctatttatg

SEQ ID NO: 16075 - DNA, 20 bp, Artificial Sequence
  Description of Artificial Sequence: Synthetic oligonucleotide
  Target: LAMA2; (+) strand; PAM type: NNAGAAW; PAM sequence: CCAGAAA
gggtatagaccagattcagg

SEQ ID NO: 16076 - DNA, 20 bp, Artificial Sequence
  Description of Artificial Sequence: Synthetic oligonucleotide
  Target: LAMA2; (+) strand; PAM type: NNAGAAW; PAM sequence: TAAGAAA
cacatttgatactacagtac

SEQ ID NO: 16077 - DNA, 20 bp, Artificial Sequence
  Description of Artificial Sequence: Synthetic oligonucleotide
  Target: LAMA2; (+) strand; PAM type: NNAGAAW; PAM sequence: CCAGAAA
acttatcaggaaacaataaa

SEQ ID NO: 16078 - DNA, 20 bp, Artificial Sequence
  Description of Artificial Sequence: Synthetic oligonucleotide
  Target: LAMA2; (+) strand; PAM type: NNAGAAW; PAM sequence: AAAGAAT
cctatggaaattttagcaac

SEQ ID NO: 16079 - DNA, 20 bp, Artificial Sequence
  Description of Artificial Sequence: Synthetic oligonucleotide
  Target: LAMA2; (+) strand; PAM type: NNAGAAW; PAM sequence: TTAGAAA
tttaaaaaactgcctatgct

SEQ ID NO: 16080 - DNA, 20 bp, Artificial Sequence
  Description of Artificial Sequence: Synthetic oligonucleotide
  Target: LAMA2; (+) strand; PAM type: NNAGAAW; PAM sequence: CAAGAAA
tggtctcgaactcctgagct

SEQ ID NO: 16081 - DNA, 20 bp, Artificial Sequence
  Description of Artificial Sequence: Synthetic oligonucleotide
  Target: LAMA2; (+) strand; PAM type: NNAGAAW; PAM sequence: TAAGAAA
tgtgttgtcaaggatgaacc

SEQ ID NO: 16082 - DNA, 20 bp, Artificial Sequence
  Description of Artificial Sequence: Synthetic oligonucleotide
  Target: LAMA2; (+) strand; PAM type: NNAGAAW; PAM sequence: GTAGAAA
ggaaaactggcaagccataa

SEQ ID NO: 16083 - DNA, 20 bp, Artificial Sequence
  Description of Artificial Sequence: Synthetic oligonucleotide
  Target: LAMA2; (+) strand; PAM type: NNAGAAW; PAM sequence: GAAGAAA
ctaaaaccatacaaacccta

SEQ ID NO: 16084 - DNA, 20 bp, Artificial Sequence
  Description of Artificial Sequence: Synthetic oligonucleotide
  Target: LAMA2; (+) strand; PAM type: NNAGAAW; PAM sequence: AAAGAAA
taaagagcttctgcacagca

SEQ ID NO: 16085 - DNA, 20 bp, Artificial Sequence
  Description of Artificial Sequence: Synthetic oligonucleotide
  Target: LAMA2; (+) strand; PAM type: NNAGAAW; PAM sequence: ACAGAAT
gcagagcgaacaggcaacct

SEQ ID NO: 16086 - DNA, 20 bp, Artificial Sequence
  Description of Artificial Sequence: Synthetic oligonucleotide
  Target: LAMA2; (+) strand; PAM type: NNAGAAW; PAM sequence: GGAGAAA
aacaggcaacctacagaatg

SEQ ID NO: 16087 - DNA, 20 bp, Artificial Sequence
  Description of Artificial Sequence: Synthetic oligonucleotide
  Target: LAMA2; (+) strand; PAM type: NNAGAAW; PAM sequence: CCAGAAT
atctgacaaagggctaatat

SEQ ID NO: 16088 - DNA, 20 bp, Artificial Sequence
  Description of Artificial Sequence: Synthetic oligonucleotide
  Target: LAMA2; (+) strand; PAM type: NNAGAAW; PAM sequence: CAAGAAA
aatgaactcaaacaaattta

SEQ ID NO: 16089 - DNA, 20 bp, Artificial Sequence
  Description of Artificial Sequence: Synthetic oligonucleotide
  Target: LAMA2; (+) strand; PAM type: NNAGAAW; PAM sequence: AGAGAAA
gctcatcatcactggccatc

SEQ ID NO: 16090 - DNA, 20 bp, Artificial Sequence
  Description of Artificial Sequence: Synthetic oligonucleotide
  Target: LAMA2; (+) strand; PAM type: NNAGAAW; PAM sequence: TTAGAAT
gagataccatctcacaccag

SEQ ID NO: 16091 - DNA, 20 bp, Artificial Sequence
  Description of Artificial Sequence: Synthetic oligonucleotide
  Target: LAMA2; (+) strand; PAM type: NNAGAAW; PAM sequence: GGAGAAA
acaggtgctggagaggatgt

SEQ ID NO: 16092 - DNA, 20 bp, Artificial Sequence
  Description of Artificial Sequence: Synthetic oligonucleotide
  Target: LAMA2; (+) strand; PAM type: NNAGAAW; PAM sequence: CTAGAAA
cattcctcagggatctagaa

SEQ ID NO: 16093 - DNA, 20 bp, Artificial Sequence
  Description of Artificial Sequence: Synthetic oligonucleotide
  Target: LAMA2; (+) strand; PAM type: NNAGAAW; PAM sequence: AAAGAAA
aagtataataataataaaaa

SEQ ID NO: 16094 - DNA, 20 bp, Artificial Sequence
  Description of Artificial Sequence: Synthetic oligonucleotide
  Target: LAMA2; (+) strand; PAM type: NNAGAAW; PAM sequence: AAAGAAA
gatgagaagcactattctaa

SEQ ID NO: 16095 - DNA, 20 bp, Artificial Sequence
  Description of Artificial Sequence: Synthetic oligonucleotide
  Target: LAMA2; (+) strand; PAM type: NNAGAAW; PAM sequence: TGAGAAT
caaagagttttatagtcatt

SEQ ID NO: 16096 - DNA, 20 bp, Artificial Sequence
  Description of Artificial Sequence: Synthetic oligonucleotide
  Target: LAMA2; (+) strand; PAM type: NNAGAAW; PAM sequence: AAAGAAA
gcaagaccctgtctcaaatg

SEQ ID NO: 16097 - DNA, 20 bp, Artificial Sequence
  Description of Artificial Sequence: Synthetic oligonucleotide
  Target: LAMA2; (+) strand; PAM type: NNAGAAW; PAM sequence: TAAGAAA
aatatcttttaaccaaactt

SEQ ID NO: 16098 - DNA, 20 bp, Artificial Sequence
  Description of Artificial Sequence: Synthetic oligonucleotide
  Target: LAMA2; (+) strand; PAM type: NNAGAAW; PAM sequence: ACAGAAA
ctttctttcttgagtcctgc

SEQ ID NO: 16099 - DNA, 20 bp, Artificial Sequence
  Description of Artificial Sequence: Synthetic oligonucleotide
  Target: LAMA2; (+) strand; PAM type: NNAGAAW; PAM sequence: TCAGAAT
cagttaaattggcactccta

SEQ ID NO: 16100 - DNA, 20 bp, Artificial Sequence
  Description of Artificial Sequence: Synthetic oligonucleotide
  Target: LAMA2; (+) strand; PAM type: NNAGAAW; PAM sequence: TTAGAAT
tcaatttgtaggtagatgcc

SEQ ID NO: 16101 - DNA, 20 bp, Artificial Sequence
  Description of Artificial Sequence: Synthetic oligonucleotide
  Target: LAMA2; (+) strand; PAM type: NNAGAAW; PAM sequence: ATAGAAT
taggtagatgccttagaatg

SEQ ID NO: 16102 - DNA, 20 bp, Artificial Sequence
  Description of Artificial Sequence: Synthetic oligonucleotide
  Target: LAMA2; (+) strand; PAM type: NNAGAAW; PAM sequence: AAAGAAA
aagcaatatcctgtctcaaa

SEQ ID NO: 16103 - DNA, 20 bp, Artificial Sequence
  Description of Artificial Sequence: Synthetic oligonucleotide
  Target: LAMA2; (+) strand; PAM type: NNAGAAW; PAM sequence: GCAGAAT
acagttgcatctggatccaa

SEQ ID NO: 16104 - DNA, 20 bp, Artificial Sequence
  Description of Artificial Sequence: Synthetic oligonucleotide
  Target: LAMA2; (+) strand; PAM type: NNAGAAW; PAM sequence: TCAGAAA
aaattgtccacattttaagg

SEQ ID NO: 16105 - DNA, 20 bp, Artificial Sequence
  Description of Artificial Sequence: Synthetic oligonucleotide
  Target: LAMA2; (+) strand; PAM type: NNAGAAW; PAM sequence: GGAGAAT
ctactcgggaggctgaggca

SEQ ID NO: 16106 - DNA, 20 bp, Artificial Sequence
  Description of Artificial Sequence: Synthetic oligonucleotide
  Target: LAMA2; (+) strand; PAM type: NNAGAAW; PAM sequence: GAAGAAA
ctgccacccacagcaattat

SEQ ID NO: 16107 - DNA, 20 bp, Artificial Sequence
  Description of Artificial Sequence: Synthetic oligonucleotide
  Target: LAMA2; (+) strand; PAM type: NNAGAAW; PAM sequence: GAAGAAA
aaaaggtgctttgcacttta

SEQ ID NO: 16108 - DNA, 20 bp, Artificial Sequence
  Description of Artificial Sequence: Synthetic oligonucleotide
  Target: LAMA2; (-) strand; PAM type: NNGRRT; PAM sequence: TTGGGT
gttttgaatgtacatgtctt

SEQ ID NO: 16109 - DNA, 20 bp, Artificial Sequence
  Description of Artificial Sequence: Synthetic oligonucleotide
  Target: LAMA2; (-) strand; PAM type: NNGRRT; PAM sequence: TTGAAT
ctaagcagtgccttatagtt

SEQ ID NO: 16110 - DNA, 20 bp, Artificial Sequence
  Description of Artificial Sequence: Synthetic oligonucleotide
  Target: LAMA2; (-) strand; PAM type: NNGRRT; PAM sequence: TGGGAT
ttggacctacagataaattg

SEQ ID NO: 16111 - DNA, 20 bp, Artificial Sequence
  Description of Artificial Sequence: Synthetic oligonucleotide
  Target: LAMA2; (-) strand; PAM type: NNGRRT; PAM sequence: GAGAGT
ttaatttctacccaaaaaag

SEQ ID NO: 16112 - DNA, 20 bp, Artificial Sequence
  Description of Artificial Sequence: Synthetic oligonucleotide
  Target: LAMA2; (-) strand; PAM type: NNGRRT; PAM sequence: AAGAAT
aattgcctggatcatatggt

SEQ ID NO: 16113 - DNA, 20 bp, Artificial Sequence
  Description of Artificial Sequence: Synthetic oligonucleotide
  Target: LAMA2; (-) strand; PAM type: NNGRRT; PAM sequence: CTGGAT
atacccagaagcacaattgc

SEQ ID NO: 16114 - DNA, 20 bp, Artificial Sequence
  Description of Artificial Sequence: Synthetic oligonucleotide
  Target: LAMA2; (-) strand; PAM type: NNGRRT; PAM sequence: TTGAGT
gacacaagtttccaactcct

SEQ ID NO: 16115 - DNA, 20 bp, Artificial Sequence
  Description of Artificial Sequence: Synthetic oligonucleotide
  Target: LAMA2; (-) strand; PAM type: NNGRRT; PAM sequence: TGGAAT
tttccaaaaggtcatatatt

SEQ ID NO: 16116 - DNA, 20 bp, Artificial Sequence
  Description of Artificial Sequence: Synthetic oligonucleotide
  Target: LAMA2; (-) strand; PAM type: NNGRRT; PAM sequence: TAGAGT
tccaacattacactatcata

SEQ ID NO: 16117 - DNA, 20 bp, Artificial Sequence
  Description of Artificial Sequence: Synthetic oligonucleotide
  Target: LAMA2; (-) strand; PAM type: NNGRRT; PAM sequence: CAGAGT
cctttatcaacatgccccat

SEQ ID NO: 16118 - DNA, 20 bp, Artificial Sequence
  Description of Artificial Sequence: Synthetic oligonucleotide
  Target: LAMA2; (-) strand; PAM type: NNGRRT; PAM sequence: TTGAAT
aaatctattcattggtgaag

SEQ ID NO: 16119 - DNA, 20 bp, Artificial Sequence
  Description of Artificial Sequence: Synthetic oligonucleotide
  Target: LAMA2; (-) strand; PAM type: NNGRRT; PAM sequence: GTGGGT
caaaagtcaattgaccacgt

SEQ ID NO: 16120 - DNA, 20 bp, Artificial Sequence
  Description of Artificial Sequence: Synthetic oligonucleotide
  Target: LAMA2; (-) strand; PAM type: NNGRRT; PAM sequence: TTGGAT
aatttcctcgtctaattacc

SEQ ID NO: 16121 - DNA, 20 bp, Artificial Sequence
  Description of Artificial Sequence: Synthetic oligonucleotide
  Target: LAMA2; (-) strand; PAM type: NNGRRT; PAM sequence: TTGGGT
tatagtcttagcttctacag

SEQ ID NO: 16122 - DNA, 20 bp, Artificial Sequence
  Description of Artificial Sequence: Synthetic oligonucleotide
  Target: LAMA2; (-) strand; PAM type: NNGRRT; PAM sequence: TGGAGT
ctgtggcttgactttgcatt

SEQ ID NO: 16123 - DNA, 20 bp, Artificial Sequence
  Description of Artificial Sequence: Synthetic oligonucleotide
  Target: LAMA2; (-) strand; PAM type: NNGRRT; PAM sequence: AGGAGT
ttcctcccacagcaatatat

SEQ ID NO: 16124 - DNA, 20 bp, Artificial Sequence
  Description of Artificial Sequence: Synthetic oligonucleotide
  Target: LAMA2; (-) strand; PAM type: NNGRRT; PAM sequence: AGGAGT
ctctattcctatcaagtctt

SEQ ID NO: 16125 - DNA, 20 bp, Artificial Sequence
  Description of Artificial Sequence: Synthetic oligonucleotide
  Target: LAMA2; (-) strand; PAM type: NNGRRT; PAM sequence: AAGAAT
tgttccagtttggggctatg

SEQ ID NO: 16126 - DNA, 20 bp, Artificial Sequence
  Description of Artificial Sequence: Synthetic oligonucleotide
  Target: LAMA2; (-) strand; PAM type: NNGRRT; PAM sequence: TTGGGT
attcaactattaaagtacat

SEQ ID NO: 16127 - DNA, 20 bp, Artificial Sequence
  Description of Artificial Sequence: Synthetic oligonucleotide
  Target: LAMA2; (-) strand; PAM type: NNGRRT; PAM sequence: ATGGAT
tatctatcattctatatcgt

SEQ ID NO: 16128 - DNA, 20 bp, Artificial Sequence
  Description of Artificial Sequence: Synthetic oligonucleotide
  Target: LAMA2; (-) strand; PAM type: NNGRRT; PAM sequence: CTGAAT
taatacattccttttcatct

SEQ ID NO: 16129 - DNA, 20 bp, Artificial Sequence
  Description of Artificial Sequence: Synthetic oligonucleotide
  Target: LAMA2; (-) strand; PAM type: NNGRRT; PAM sequence: GAGAAT
attttacatgaaaatgcctt

SEQ ID NO: 16130 - DNA, 20 bp, Artificial Sequence
  Description of Artificial Sequence: Synthetic oligonucleotide
  Target: LAMA2; (-) strand; PAM type: NNGRRT; PAM sequence: CTGAGT
tctgcagttactgcagttac

SEQ ID NO: 16131 - DNA, 20 bp, Artificial Sequence
  Description of Artificial Sequence: Synthetic oligonucleotide
  Target: LAMA2; (-) strand; PAM type: NNGRRT; PAM sequence: CAGGAT
ccttcctctttacattttcc

SEQ ID NO: 16132 - DNA, 20 bp, Artificial Sequence
  Description of Artificial Sequence: Synthetic oligonucleotide
  Target: LAMA2; (-) strand; PAM type: NNGRRT; PAM sequence: TGGAAT
gcagctgctaactctaattg

SEQ ID NO: 16133 - DNA, 20 bp, Artificial Sequence
  Description of Artificial Sequence: Synthetic oligonucleotide
  Target: LAMA2; (-) strand; PAM type: NNGRRT; PAM sequence: CAGAAT
atatttataaaaaggaaaat

SEQ ID NO: 16134 - DNA, 20 bp, Artificial Sequence
  Description of Artificial Sequence: Synthetic oligonucleotide
  Target: LAMA2; (-) strand; PAM type: NNGRRT; PAM sequence: TTGAAT
tataaaaaggaaaagtttta

SEQ ID NO: 16135 - DNA, 20 bp, Artificial Sequence
  Description of Artificial Sequence: Synthetic oligonucleotide
  Target: LAMA2; (-) strand; PAM type: NNGRRT; PAM sequence: CAGAAT
tctaaacctattgctattct

SEQ ID NO: 16136 - DNA, 20 bp, Artificial Sequence
  Description of Artificial Sequence: Synthetic oligonucleotide
  Target: LAMA2; (-) strand; PAM type: NNGRRT; PAM sequence: GAGAGT
caataataaaacttatattt

SEQ ID NO: 16137 - DNA, 20 bp, Artificial Sequence
  Description of Artificial Sequence: Synthetic oligonucleotide
  Target: LAMA2; (-) strand; PAM type: NNGRRT; PAM sequence: GAGAAT
taagagagtattgctttgaa

SEQ ID NO: 16138 - DNA, 20 bp, Artificial Sequence
  Description of Artificial Sequence: Synthetic oligonucleotide
  Target: LAMA2; (-) strand; PAM type: NNGRRT; PAM sequence: GAGAGT
ttttctttcagtaaaattaa

SEQ ID NO: 16139 - DNA, 20 bp, Artificial Sequence
  Description of Artificial Sequence: Synthetic oligonucleotide
  Target: LAMA2; (-) strand; PAM type: NNGRRT; PAM sequence: TTGAAT
atctaaatattatattaaag

SEQ ID NO: 16140 - DNA, 20 bp, Artificial Sequence
  Description of Artificial Sequence: Synthetic oligonucleotide
  Target: LAMA2; (-) strand; PAM type: NNGRRT; PAM sequence: AAGAAT
cgattacactggggtcatct

SEQ ID NO: 16141 - DNA, 20 bp, Artificial Sequence
  Description of Artificial Sequence: Synthetic oligonucleotide
  Target: LAMA2; (-) strand; PAM type: NNGRRT; PAM sequence: TGGGGT
caacatcccatcgattacac

SEQ ID NO: 16142 - DNA, 20 bp, Artificial Sequence
  Description of Artificial Sequence: Synthetic oligonucleotide
  Target: LAMA2; (-) strand; PAM type: NNGRRT; PAM sequence: TTGAGT
aacaaccttgcccatggtac

SEQ ID NO: 16143 - DNA, 20 bp, Artificial Sequence
  Description of Artificial Sequence: Synthetic oligonucleotide
  Target: LAMA2; (-) strand; PAM type: NNGRRT; PAM sequence: ATGGGT
gattttacacccatttgtca

SEQ ID NO: 16144 - DNA, 20 bp, Artificial Sequence
  Description of Artificial Sequence: Synthetic oligonucleotide
  Target: LAMA2; (-) strand; PAM type: NNGRRT; PAM sequence: TTGGAT
agataatttactttgtgttt

SEQ ID NO: 16145 - DNA, 20 bp, Artificial Sequence
  Description of Artificial Sequence: Synthetic oligonucleotide
  Target: LAMA2; (-) strand; PAM type: NNGRRT; PAM sequence: TAGGAT
tttgtttgtttgtttttttc

SEQ ID NO: 16146 - DNA, 20 bp, Artificial Sequence
  Description of Artificial Sequence: Synthetic oligonucleotide
  Target: LAMA2; (-) strand; PAM type: NNGRRT; PAM sequence: GTGAGT
ggccactggtcatttatgta

SEQ ID NO: 16147 - DNA, 20 bp, Artificial Sequence
  Description of Artificial Sequence: Synthetic oligonucleotide
  Target: LAMA2; (-) strand; PAM type: NNGRRT; PAM sequence: CTGAAT
catattttgtccttagactt

SEQ ID NO: 16148 - DNA, 20 bp, Artificial Sequence
  Description of Artificial Sequence: Synthetic oligonucleotide
  Target: LAMA2; (-) strand; PAM type: NNGRRT; PAM sequence: CAGGGT
gcattagtgtactgttgggt

SEQ ID NO: 16149 - DNA, 20 bp, Artificial Sequence
  Description of Artificial Sequence: Synthetic oligonucleotide
  Target: LAMA2; (-) strand; PAM type: NNGRRT; PAM sequence: TTGGGT
ctgcaggcattagtgtactg

SEQ ID NO: 16150 - DNA, 20 bp, Artificial Sequence
  Description of Artificial Sequence: Synthetic oligonucleotide
  Target: LAMA2; (-) strand; PAM type: NNGRRT; PAM sequence: GTGGGT
tttggtttactccgggaacg

SEQ ID NO: 16151 - DNA, 20 bp, Artificial Sequence
  Description of Artificial Sequence: Synthetic oligonucleotide
  Target: LAMA2; (-) strand; PAM type: NNGRRT; PAM sequence: CAGGAT
ataatggattttgtgagtcg

SEQ ID NO: 16152 - DNA, 20 bp, Artificial Sequence
  Description of Artificial Sequence: Synthetic oligonucleotide
  Target: LAMA2; (-) strand; PAM type: NNGRRT; PAM sequence: GTGAGT
acaactccataatggatttt

SEQ ID NO: 16153 - DNA, 20 bp, Artificial Sequence
  Description of Artificial Sequence: Synthetic oligonucleotide
  Target: LAMA2; (-) strand; PAM type: NNGRRT; PAM sequence: ATGGAT
aggtttaaaacaactccata

SEQ ID NO: 16154 - DNA, 20 bp, Artificial Sequence
  Description of Artificial Sequence: Synthetic oligonucleotide
  Target: LAMA2; (-) strand; PAM type: NNGRRT; PAM sequence: TAGAAT
ttcctgaccaaactaatggt

SEQ ID NO: 16155 - DNA, 20 bp, Artificial Sequence
  Description of Artificial Sequence: Synthetic oligonucleotide
  Target: LAMA2; (-) strand; PAM type: NNGRRT; PAM sequence: CAGAGT
atccaagacatccccaaggc

SEQ ID NO: 16156 - DNA, 20 bp, Artificial Sequence
  Description of Artificial Sequence: Synthetic oligonucleotide
  Target: LAMA2; (-) strand; PAM type: NNGRRT; PAM sequence: CCGGAT
agcgctccttccctctgaga

SEQ ID NO: 16157 - DNA, 20 bp, Artificial Sequence
  Description of Artificial Sequence: Synthetic oligonucleotide
  Target: LAMA2; (-) strand; PAM type: NNGRRT; PAM sequence: AAGGAT
cccaggacggccctctatta

SEQ ID NO: 16158 - DNA, 20 bp, Artificial Sequence
  Description of Artificial Sequence: Synthetic oligonucleotide
  Target: LAMA2; (-) strand; PAM type: NNGRRT; PAM sequence: GAGGGT
ctttggccgggccgccgcct

SEQ ID NO: 16159 - DNA, 20 bp, Artificial Sequence
  Description of Artificial Sequence: Synthetic oligonucleotide
  Target: LAMA2; (-) strand; PAM type: NNGRRT; PAM sequence: AGGAGT
atccacttctcgggagccag

SEQ ID NO: 16160 - DNA, 20 bp, Artificial Sequence
  Description of Artificial Sequence: Synthetic oligonucleotide
  Target: LAMA2; (-) strand; PAM type: NNGRRT; PAM sequence: CCGGAT
cggcatcgtagtggccgcga

SEQ ID NO: 16161 - DNA, 20 bp, Artificial Sequence
  Description of Artificial Sequence: Synthetic oligonucleotide
  Target: LAMA2; (-) strand; PAM type: NNGRRT; PAM sequence: AAGGAT
gaggaatctcggtcccggca

SEQ ID NO: 16162 - DNA, 20 bp, Artificial Sequence
  Description of Artificial Sequence: Synthetic oligonucleotide
  Target: LAMA2; (-) strand; PAM type: NNGRRT; PAM sequence: AGGAAT
tcggaagagtggaagaagtg

SEQ ID NO: 16163 - DNA, 20 bp, Artificial Sequence
  Description of Artificial Sequence: Synthetic oligonucleotide
  Target: LAMA2; (-) strand; PAM type: NNGRRT; PAM sequence: AAGAGT
ccacagacagcaactctcgg

SEQ ID NO: 16164 - DNA, 20 bp, Artificial Sequence
  Description of Artificial Sequence: Synthetic oligonucleotide
  Target: LAMA2; (-) strand; PAM type: NNGRRT; PAM sequence: CGGGAT
agatttcagaaatcaattta

SEQ ID NO: 16165 - DNA, 20 bp, Artificial Sequence
  Description of Artificial Sequence: Synthetic oligonucleotide
  Target: LAMA2; (-) strand; PAM type: NNGRRT; PAM sequence: CAGGAT
gcttgggaagcctttctctg

SEQ ID NO: 16166 - DNA, 20 bp, Artificial Sequence
  Description of Artificial Sequence: Synthetic oligonucleotide
  Target: LAMA2; (-) strand; PAM type: NNGRRT; PAM sequence: CAGGAT
agctaccctccataaagtcc

SEQ ID NO: 16167 - DNA, 20 bp, Artificial Sequence
  Description of Artificial Sequence: Synthetic oligonucleotide
  Target: LAMA2; (-) strand; PAM type: NNGRRT; PAM sequence: GTGGGT
ataggatatgaagataagat

SEQ ID NO: 16168 - DNA, 20 bp, Artificial Sequence
  Description of Artificial Sequence: Synthetic oligonucleotide
  Target: LAMA2; (-) strand; PAM type: NNGRRT; PAM sequence: TAGGAT
acgatttcactacaataaaa

SEQ ID NO: 16169 - DNA, 20 bp, Artificial Sequence
  Description of Artificial Sequence: Synthetic oligonucleotide
  Target: LAMA2; (-) strand; PAM type: NNGRRT; PAM sequence: GAGAAT
aaacactaagaggctctgag

SEQ ID NO: 16170 - DNA, 20 bp, Artificial Sequence
  Description of Artificial Sequence: Synthetic oligonucleotide
  Target: LAMA2; (-) strand; PAM type: NNGRRT; PAM sequence: AAGAAT
gatacaggttttccaactta

SEQ ID NO: 16171 - DNA, 20 bp, Artificial Sequence
  Description of Artificial Sequence: Synthetic oligonucleotide
  Target: LAMA2; (-) strand; PAM type: NNGRRT; PAM sequence: CCGAAT
aaacattttcatatttaaaa

SEQ ID NO: 16172 - DNA, 20 bp, Artificial Sequence
  Description of Artificial Sequence: Synthetic oligonucleotide
  Target: LAMA2; (-) strand; PAM type: NNGRRT; PAM sequence: AAGGAT
ggctagaagttaactggaag

SEQ ID NO: 16173 - DNA, 20 bp, Artificial Sequence
  Description of Artificial Sequence: Synthetic oligonucleotide
  Target: LAMA2; (-) strand; PAM type: NNGRRT; PAM sequence: TGGGAT
ttattattatagaaagagct

SEQ ID NO: 16174 - DNA, 20 bp, Artificial Sequence
  Description of Artificial Sequence: Synthetic oligonucleotide
  Target: LAMA2; (-) strand; PAM type: NNGRRT; PAM sequence: GGGAGT
tattccaagaattttaatca

SEQ ID NO: 16175 - DNA, 20 bp, Artificial Sequence
  Description of Artificial Sequence: Synthetic oligonucleotide
  Target: LAMA2; (-) strand; PAM type: NNGRRT; PAM sequence: AAGAAT
tgcaaggtcatttttattcc

SEQ ID NO: 16176 - DNA, 20 bp, Artificial Sequence
  Description of Artificial Sequence: Synthetic oligonucleotide
  Target: LAMA2; (-) strand; PAM type: NNGRRT; PAM sequence: GTGAAT
agaaggaaaaaagttatata

SEQ ID NO: 16177 - DNA, 20 bp, Artificial Sequence
  Description of Artificial Sequence: Synthetic oligonucleotide
  Target: LAMA2; (-) strand; PAM type: NNGRRT; PAM sequence: TAGAAT
caaagtttaatagttaaaag

SEQ ID NO: 16178 - DNA, 20 bp, Artificial Sequence
  Description of Artificial Sequence: Synthetic oligonucleotide
  Target: LAMA2; (-) strand; PAM type: NNGRRT; PAM sequence: AAGGAT
gccccattccaagtggacat

SEQ ID NO: 16179 - DNA, 20 bp, Artificial Sequence
  Description of Artificial Sequence: Synthetic oligonucleotide
  Target: LAMA2; (-) strand; PAM type: NNGRRT; PAM sequence: TTGAGT
tgatccttactctgcatgct

SEQ ID NO: 16180 - DNA, 20 bp, Artificial Sequence
  Description of Artificial Sequence: Synthetic oligonucleotide
  Target: LAMA2; (-) strand; PAM type: NNGRRT; PAM sequence: CAGGAT
agagaaatcctgtgtgtgtt

SEQ ID NO: 16181 - DNA, 20 bp, Artificial Sequence
  Description of Artificial Sequence: Synthetic oligonucleotide
  Target: LAMA2; (-) strand; PAM type: NNGRRT; PAM sequence: GAGAGT
aatattaccttatttgaaaa

SEQ ID NO: 16182 - DNA, 20 bp, Artificial Sequence
  Description of Artificial Sequence: Synthetic oligonucleotide
  Target: LAMA2; (-) strand; PAM type: NNGRRT; PAM sequence: CAGAGT
tgtgcctgggtcatagaaat

SEQ ID NO: 16183 - DNA, 20 bp, Artificial Sequence
  Description of Artificial Sequence: Synthetic oligonucleotide
  Target: LAMA2; (-) strand; PAM type: NNGRRT; PAM sequence: CTGGGT
gaattcacttcatcttgtgc

SEQ ID NO: 16184 - DNA, 20 bp, Artificial Sequence
  Description of Artificial Sequence: Synthetic oligonucleotide
  Target: LAMA2; (-) strand; PAM type: NNGRRT; PAM sequence: CTGAAT
ggtagtataaacccttcctc

SEQ ID NO: 16185 - DNA, 20 bp, Artificial Sequence
  Description of Artificial Sequence: Synthetic oligonucleotide
  Target: LAMA2; (-) strand; PAM type: NNGRRT; PAM sequence: CAGAAT
gcatttaagtggtatcttga

SEQ ID NO: 16186 - DNA, 20 bp, Artificial Sequence
  Description of Artificial Sequence: Synthetic oligonucleotide
  Target: LAMA2; (-) strand; PAM type: NNGRRT; PAM sequence: TTGAAT
gattgtatgttgtagctatt

SEQ ID NO: 16187 - DNA, 20 bp, Artificial Sequence
  Description of Artificial Sequence: Synthetic oligonucleotide
  Target: LAMA2; (-) strand; PAM type: NNGRRT; PAM sequence: TAGAAT
acaaagacaataatatatac

SEQ ID NO: 16188 - DNA, 20 bp, Artificial Sequence
  Description of Artificial Sequence: Synthetic oligonucleotide
  Target: LAMA2; (-) strand; PAM type: NNGRRT; PAM sequence: ATGAAT
ctatccaattttaaagtttc

SEQ ID NO: 16189 - DNA, 20 bp, Artificial Sequence
  Description of Artificial Sequence: Synthetic oligonucleotide
  Target: LAMA2; (-) strand; PAM type: NNGRRT; PAM sequence: GTGAAT
gagaataataatatctgaag

SEQ ID NO: 16190 - DNA, 20 bp, Artificial Sequence
  Description of Artificial Sequence: Synthetic oligonucleotide
  Target: LAMA2; (-) strand; PAM type: NNGRRT; PAM sequence: GAGAAT
aagttctaaatttgtccttt

SEQ ID NO: 16191 - DNA, 20 bp, Artificial Sequence
  Description of Artificial Sequence: Synthetic oligonucleotide
  Target: LAMA2; (-) strand; PAM type: NNGRRT; PAM sequence: GGGAAT
aaccttggaaccataaaaaa

SEQ ID NO: 16192 - DNA, 20 bp, Artificial Sequence
  Description of Artificial Sequence: Synthetic oligonucleotide
  Target: LAMA2; (-) strand; PAM type: NNGRRT; PAM sequence: TCGAAT
aaattcttaataaagtggta

SEQ ID NO: 16193 - DNA, 20 bp, Artificial Sequence
  Description of Artificial Sequence: Synthetic oligonucleotide
  Target: LAMA2; (-) strand; PAM type: NNGRRT; PAM sequence: TCGAGT
caatgctattcatactacaa

SEQ ID NO: 16194 - DNA, 20 bp, Artificial Sequence
  Description of Artificial Sequence: Synthetic oligonucleotide
  Target: LAMA2; (-) strand; PAM type: NNGRRT; PAM sequence: CTGAAT
tccttggaatatcattcttg

SEQ ID NO: 16195 - DNA, 20 bp, Artificial Sequence
  Description of Artificial Sequence: Synthetic oligonucleotide
  Target: LAMA2; (-) strand; PAM type: NNGRRT; PAM sequence: TGGAAT
atatagctaaagaatttcct

SEQ ID NO: 16196 - DNA, 20 bp, Artificial Sequence
  Description of Artificial Sequence: Synthetic oligonucleotide
  Target: LAMA2; (-) strand; PAM type: NNGRRT; PAM sequence: AAGAAT
gtcaattttaaatatagcta

SEQ ID NO: 16197 - DNA, 20 bp, Artificial Sequence
  Description of Artificial Sequence: Synthetic oligonucleotide
  Target: LAMA2; (-) strand; PAM type: NNGRRT; PAM sequence: CAGAAT
gacactgccttgctgaaatg

SEQ ID NO: 16198 - DNA, 20 bp, Artificial Sequence
  Description of Artificial Sequence: Synthetic oligonucleotide
  Target: LAMA2; (-) strand; PAM type: NNGRRT; PAM sequence: AAGAAT
agtttccacatattattcac

SEQ ID NO: 16199 - DNA, 20 bp, Artificial Sequence
  Description of Artificial Sequence: Synthetic oligonucleotide
  Target: LAMA2; (-) strand; PAM type: NNGRRT; PAM sequence: CCGGAT
gcactgctagagacttcttt

SEQ ID NO: 16200 - DNA, 20 bp, Artificial Sequence
  Description of Artificial Sequence: Synthetic oligonucleotide
  Target: LAMA2; (-) strand; PAM type: NNGRRT; PAM sequence: TTGAGT
tcaagccattaccaagatag

SEQ ID NO: 16201 - DNA, 20 bp, Artificial Sequence
  Description of Artificial Sequence: Synthetic oligonucleotide
  Target: LAMA2; (-) strand; PAM type: NNGRRT; PAM sequence: TTGGAT
cacatgcagttctgataagc

SEQ ID NO: 16202 - DNA, 20 bp, Artificial Sequence
  Description of Artificial Sequence: Synthetic oligonucleotide
  Target: LAMA2; (-) strand; PAM type: NNGRRT; PAM sequence: ATGAAT
tttttttttaacatgtggat

SEQ ID NO: 16203 - DNA, 20 bp, Artificial Sequence
  Description of Artificial Sequence: Synthetic oligonucleotide
  Target: LAMA2; (-) strand; PAM type: NNGRRT; PAM sequence: GTGGAT
ggactttttttttttaacat

SEQ ID NO: 16204 - DNA, 20 bp, Artificial Sequence
  Description of Artificial Sequence: Synthetic oligonucleotide
  Target: LAMA2; (-) strand; PAM type: NNGRRT; PAM sequence: CAGAGT
atatcgaacttgctgcaatt

SEQ ID NO: 16205 - DNA, 20 bp, Artificial Sequence
  Description of Artificial Sequence: Synthetic oligonucleotide
  Target: LAMA2; (-) strand; PAM type: NNGRRT; PAM sequence: ATGAGT
caacagacctatgtgcttct

SEQ ID NO: 16206 - DNA, 20 bp, Artificial Sequence
  Description of Artificial Sequence: Synthetic oligonucleotide
  Target: LAMA2; (-) strand; PAM type: NNGRRT; PAM sequence: TAGAAT
atggatccaccttcagcctt

SEQ ID NO: 16207 - DNA, 20 bp, Artificial Sequence
  Description of Artificial Sequence: Synthetic oligonucleotide
  Target: LAMA2; (-) strand; PAM type: NNGRRT; PAM sequence: ATGGAT
gttgtttgtcatgttcttct

SEQ ID NO: 16208 - DNA, 20 bp, Artificial Sequence
  Description of Artificial Sequence: Synthetic oligonucleotide
  Target: LAMA2; (-) strand; PAM type: NNGRRT; PAM sequence: ATGAGT
gacaaatggctagacagttg

SEQ ID NO: 16209 - DNA, 20 bp, Artificial Sequence
  Description of Artificial Sequence: Synthetic oligonucleotide
  Target: LAMA2; (-) strand; PAM type: NNGRRT; PAM sequence: TAGAAT
aaagcaatagactataatat

SEQ ID NO: 16210 - DNA, 20 bp, Artificial Sequence
  Description of Artificial Sequence: Synthetic oligonucleotide
  Target: LAMA2; (-) strand; PAM type: NNGRRT; PAM sequence: AAGAAT
taacattttcttgacatttt

SEQ ID NO: 16211 - DNA, 20 bp, Artificial Sequence
  Description of Artificial Sequence: Synthetic oligonucleotide
  Target: LAMA2; (-) strand; PAM type: NNGRRT; PAM sequence: AGGGAT
tttttattttaaatcccaga

SEQ ID NO: 16212 - DNA, 20 bp, Artificial Sequence
  Description of Artificial Sequence: Synthetic oligonucleotide
  Target: LAMA2; (-) strand; PAM type: NNGRRT; PAM sequence: GAGGAT
tattcttgccaaaaatgtgt

SEQ ID NO: 16213 - DNA, 20 bp, Artificial Sequence
  Description of Artificial Sequence: Synthetic oligonucleotide
  Target: LAMA2; (-) strand; PAM type: NNGRRT; PAM sequence: ATGAAT
attccaggtttatggccact

SEQ ID NO: 16214 - DNA, 20 bp, Artificial Sequence
  Description of Artificial Sequence: Synthetic oligonucleotide
  Target: LAMA2; (-) strand; PAM type: NNGRRT; PAM sequence: ATGAAT
tgccatgcattttatctgtt

SEQ ID NO: 16215 - DNA, 20 bp, Artificial Sequence
  Description of Artificial Sequence: Synthetic oligonucleotide
  Target: LAMA2; (-) strand; PAM type: NNGRRT; PAM sequence: TTGAAT
aatatgttcatataaatatt

SEQ ID NO: 16216 - DNA, 20 bp, Artificial Sequence
  Description of Artificial Sequence: Synthetic oligonucleotide
  Target: LAMA2; (-) strand; PAM type: NNGRRT; PAM sequence: TTGAAT
cacatctataatattcagtg

SEQ ID NO: 16217 - DNA, 20 bp, Artificial Sequence
  Description of Artificial Sequence: Synthetic oligonucleotide
  Target: LAMA2; (-) strand; PAM type: NNGRRT; PAM sequence: TAGGGT
cattagtttgcatgaaatcc

SEQ ID NO: 16218 - DNA, 20 bp, Artificial Sequence
  Description of Artificial Sequence: Synthetic oligonucleotide
  Target: LAMA2; (-) strand; PAM type: NNGRRT; PAM sequence: AGGAGT
tcccaaagtgctgcgattac

SEQ ID NO: 16219 - DNA, 20 bp, Artificial Sequence
  Description of Artificial Sequence: Synthetic oligonucleotide
  Target: LAMA2; (-) strand; PAM type: NNGRRT; PAM sequence: TGGGAT
gcctcagcctcctgagtagc

SEQ ID NO: 16220 - DNA, 20 bp, Artificial Sequence
  Description of Artificial Sequence: Synthetic oligonucleotide
  Target: LAMA2; (-) strand; PAM type: NNGRRT; PAM sequence: CTGAGT
gattctcctgcctcagcctc

SEQ ID NO: 16221 - DNA, 20 bp, Artificial Sequence
  Description of Artificial Sequence: Synthetic oligonucleotide
  Target: LAMA2; (-) strand; PAM type: NNGRRT; PAM sequence: CAGGGT
ctcactgcaacctctgcctc

SEQ ID NO: 16222 - DNA, 20 bp, Artificial Sequence
  Description of Artificial Sequence: Synthetic oligonucleotide
  Target: LAMA2; (-) strand; PAM type: NNGRRT; PAM sequence: TGGAGT
tctccctctgttgcccaggc

SEQ ID NO: 16223 - DNA, 20 bp, Artificial Sequence
  Description of Artificial Sequence: Synthetic oligonucleotide
  Target: LAMA2; (-) strand; PAM type: NNGRRT; PAM sequence: TAGAGT
ttgttttgttttgtttgaga

SEQ ID NO: 16224 - DNA, 20 bp, Artificial Sequence
  Description of Artificial Sequence: Synthetic oligonucleotide
  Target: LAMA2; (-) strand; PAM type: NNGRRT; PAM sequence: CTGGAT
aaataaggccctactgcaaa

SEQ ID NO: 16225 - DNA, 20 bp, Artificial Sequence
  Description of Artificial Sequence: Synthetic oligonucleotide
  Target: LAMA2; (-) strand; PAM type: NNGRRT; PAM sequence: CCGAAT
actgtaaacaaatcctaaac

SEQ ID NO: 16226 - DNA, 20 bp, Artificial Sequence
  Description of Artificial Sequence: Synthetic oligonucleotide
  Target: LAMA2; (-) strand; PAM type: NNGRRT; PAM sequence: TAGAAT
tcttaccaatggggaaagcc

SEQ ID NO: 16227 - DNA, 20 bp, Artificial Sequence
  Description of Artificial Sequence: Synthetic oligonucleotide
  Target: LAMA2; (-) strand; PAM type: NNGRRT; PAM sequence: AGGAAT
aatattagttccacaagagc

SEQ ID NO: 16228 - DNA, 20 bp, Artificial Sequence
  Description of Artificial Sequence: Synthetic oligonucleotide
  Target: LAMA2; (-) strand; PAM type: NNGRRT; PAM sequence: GAGAGT
ataggcctgctccctgtaca

SEQ ID NO: 16229 - DNA, 20 bp, Artificial Sequence
  Description of Artificial Sequence: Synthetic oligonucleotide
  Target: LAMA2; (-) strand; PAM type: NNGRRT; PAM sequence: ATGGAT
tggactgttggtctagtccc

SEQ ID NO: 16230 - DNA, 20 bp, Artificial Sequence
  Description of Artificial Sequence: Synthetic oligonucleotide
  Target: LAMA2; (-) strand; PAM type: NNGRRT; PAM sequence: TGGAGT
acttaaatgtgttctatcag

SEQ ID NO: 16231 - DNA, 20 bp, Artificial Sequence
  Description of Artificial Sequence: Synthetic oligonucleotide
  Target: LAMA2; (-) strand; PAM type: NNGRRT; PAM sequence: TAGAAT
aagtggaatgctcttgaatg

SEQ ID NO: 16232 - DNA, 20 bp, Artificial Sequence
  Description of Artificial Sequence: Synthetic oligonucleotide
  Target: LAMA2; (-) strand; PAM type: NNGRRT; PAM sequence: TTGAAT
atggttgaagtggaatgctc

SEQ ID NO: 16233 - DNA, 20 bp, Artificial Sequence
  Description of Artificial Sequence: Synthetic oligonucleotide
  Target: LAMA2; (-) strand; PAM type: NNGRRT; PAM sequence: TGGAAT
ccatgataagatggttgaag

SEQ ID NO: 16234 - DNA, 20 bp, Artificial Sequence
  Description of Artificial Sequence: Synthetic oligonucleotide
  Target: LAMA2; (-) strand; PAM type: NNGRRT; PAM sequence: AAGAGT
tgagttgccaaagggaagaa

SEQ ID NO: 16235 - DNA, 20 bp, Artificial Sequence
  Description of Artificial Sequence: Synthetic oligonucleotide
  Target: LAMA2; (-) strand; PAM type: NNGRRT; PAM sequence: CTGAGT
ttttgaataatggaatagca

SEQ ID NO: 16236 - DNA, 20 bp, Artificial Sequence
  Description of Artificial Sequence: Synthetic oligonucleotide
  Target: LAMA2; (-) strand; PAM type: NNGRRT; PAM sequence: TGGAAT
tactgatatattttgaataa

SEQ ID NO: 16237 - DNA, 20 bp, Artificial Sequence
  Description of Artificial Sequence: Synthetic oligonucleotide
  Target: LAMA2; (-) strand; PAM type: NNGRRT; PAM sequence: TTGAAT
ttctgaggtactgatatatt

SEQ ID NO: 16238 - DNA, 20 bp, Artificial Sequence
  Description of Artificial Sequence: Synthetic oligonucleotide
  Target: LAMA2; (-) strand; PAM type: NNGRRT; PAM sequence: GTGAAT
ctatatgtccatgtgggatt

SEQ ID NO: 16239 - DNA, 20 bp, Artificial Sequence
  Description of Artificial Sequence: Synthetic oligonucleotide
  Target: LAMA2; (-) strand; PAM type: NNGRRT; PAM sequence: TGGGAT
aaagtacctatatgtccatg

SEQ ID NO: 16240 - DNA, 20 bp, Artificial Sequence
  Description of Artificial Sequence: Synthetic oligonucleotide
  Target: LAMA2; (-) strand; PAM type: NNGRRT; PAM sequence: CTGAAT
acagaacatagaataagttt

SEQ ID NO: 16241 - DNA, 20 bp, Artificial Sequence
  Description of Artificial Sequence: Synthetic oligonucleotide
  Target: LAMA2; (-) strand; PAM type: NNGRRT; PAM sequence: TAGAAT
acaaaaatggaaacagaaca

SEQ ID NO: 16242 - DNA, 20 bp, Artificial Sequence
  Description of Artificial Sequence: Synthetic oligonucleotide
  Target: LAMA2; (-) strand; PAM type: NNGRRT; PAM sequence: CAGAAT
accttttttgttctaaatga

SEQ ID NO: 16243 - DNA, 20 bp, Artificial Sequence
  Description of Artificial Sequence: Synthetic oligonucleotide
  Target: LAMA2; (-) strand; PAM type: NNGRRT; PAM sequence: AAGAAT
taccttattttattcacagg

SEQ ID NO: 16244 - DNA, 20 bp, Artificial Sequence
  Description of Artificial Sequence: Synthetic oligonucleotide
  Target: LAMA2; (-) strand; PAM type: NNGRRT; PAM sequence: TAGAAT
ttcctaaatgttatatttgt

SEQ ID NO: 16245 - DNA, 20 bp, Artificial Sequence
  Description of Artificial Sequence: Synthetic oligonucleotide
  Target: LAMA2; (-) strand; PAM type: NNGRRT; PAM sequence: ATGAAT
atgtcacagaggccgatatt

SEQ ID NO: 16246 - DNA, 20 bp, Artificial Sequence
  Description of Artificial Sequence: Synthetic oligonucleotide
  Target: LAMA2; (-) strand; PAM type: NNGRRT; PAM sequence: AGGAAT
ctcctgaggttttcatcatc

SEQ ID NO: 16247 - DNA, 20 bp, Artificial Sequence
  Description of Artificial Sequence: Synthetic oligonucleotide
  Target: LAMA2; (-) strand; PAM type: NNGRRT; PAM sequence: TTGAGT
gtacacagttcgggggtcag

SEQ ID NO: 16248 - DNA, 20 bp, Artificial Sequence
  Description of Artificial Sequence: Synthetic oligonucleotide
  Target: LAMA2; (-) strand; PAM type: NNGRRT; PAM sequence: GGGGGT
cttggggaggtacacagttc

SEQ ID NO: 16249 - DNA, 20 bp, Artificial Sequence
  Description of Artificial Sequence: Synthetic oligonucleotide
  Target: LAMA2; (-) strand; PAM type: NNGRRT; PAM sequence: GAGGAT
atattttccttctacaaact

SEQ ID NO: 16250 - DNA, 20 bp, Artificial Sequence
  Description of Artificial Sequence: Synthetic oligonucleotide
  Target: LAMA2; (-) strand; PAM type: NNGRRT; PAM sequence: TGGAAT
tctaattctaaaataagcat

SEQ ID NO: 16251 - DNA, 20 bp, Artificial Sequence
  Description of Artificial Sequence: Synthetic oligonucleotide
  Target: LAMA2; (-) strand; PAM type: NNGRRT; PAM sequence: CAGGGT
gaaatggatttttttttcct

SEQ ID NO: 16252 - DNA, 20 bp, Artificial Sequence
  Description of Artificial Sequence: Synthetic oligonucleotide
  Target: LAMA2; (-) strand; PAM type: NNGRRT; PAM sequence: ATGGAT
tagactaacataacttagaa

SEQ ID NO: 16253 - DNA, 20 bp, Artificial Sequence
  Description of Artificial Sequence: Synthetic oligonucleotide
  Target: LAMA2; (-) strand; PAM type: NNGRRT; PAM sequence: CTGGAT
ccataataccaaatgaatct

SEQ ID NO: 16254 - DNA, 20 bp, Artificial Sequence
  Description of Artificial Sequence: Synthetic oligonucleotide
  Target: LAMA2; (-) strand; PAM type: NNGRRT; PAM sequence: ATGAAT
ttgttcttccataataccaa

SEQ ID NO: 16255 - DNA, 20 bp, Artificial Sequence
  Description of Artificial Sequence: Synthetic oligonucleotide
  Target: LAMA2; (-) strand; PAM type: NNGRRT; PAM sequence: TTGAAT
ctaaaatttgatgaatgcat

SEQ ID NO: 16256 - DNA, 20 bp, Artificial Sequence
  Description of Artificial Sequence: Synthetic oligonucleotide
  Target: LAMA2; (-) strand; PAM type: NNGRRT; PAM sequence: ATGAAT
aatgtaaacactaaaatttg

SEQ ID NO: 16257 - DNA, 20 bp, Artificial Sequence
  Description of Artificial Sequence: Synthetic oligonucleotide
  Target: LAMA2; (-) strand; PAM type: NNGRRT; PAM sequence: AAGAAT
tgtccagtaatcaaagttcc

SEQ ID NO: 16258 - DNA, 20 bp, Artificial Sequence
  Description of Artificial Sequence: Synthetic oligonucleotide
  Target: LAMA2; (-) strand; PAM type: NNGRRT; PAM sequence: AAGAAT
ttacttcagaaaagccaata

SEQ ID NO: 16259 - DNA, 20 bp, Artificial Sequence
  Description of Artificial Sequence: Synthetic oligonucleotide
  Target: LAMA2; (-) strand; PAM type: NNGRRT; PAM sequence: AAGGGT
ttacacattgactattctta

SEQ ID NO: 16260 - DNA, 20 bp, Artificial Sequence
  Description of Artificial Sequence: Synthetic oligonucleotide
  Target: LAMA2; (-) strand; PAM type: NNGRRT; PAM sequence: AGGAAT
aggtttttcatcttttcaga

SEQ ID NO: 16261 - DNA, 20 bp, Artificial Sequence
  Description of Artificial Sequence: Synthetic oligonucleotide
  Target: LAMA2; (-) strand; PAM type: NNGRRT; PAM sequence: CTGAGT
ttggaagacttttgtcttaa

SEQ ID NO: 16262 - DNA, 20 bp, Artificial Sequence
  Description of Artificial Sequence: Synthetic oligonucleotide
  Target: LAMA2; (-) strand; PAM type: NNGRRT; PAM sequence: GTGAGT
aaatatacaaattaggtcct

SEQ ID NO: 16263 - DNA, 20 bp, Artificial Sequence
  Description of Artificial Sequence: Synthetic oligonucleotide
  Target: LAMA2; (-) strand; PAM type: NNGRRT; PAM sequence: TAGAGT
taatcatttgtcaaggcaac

SEQ ID NO: 16264 - DNA, 20 bp, Artificial Sequence
  Description of Artificial Sequence: Synthetic oligonucleotide
  Target: LAMA2; (-) strand; PAM type: NNGRRT; PAM sequence: TGGAAT
ttaacagtatagctactgga

SEQ ID NO: 16265 - DNA, 20 bp, Artificial Sequence
  Description of Artificial Sequence: Synthetic oligonucleotide
  Target: LAMA2; (-) strand; PAM type: NNGRRT; PAM sequence: CTGGAT
gaattttaacagtatagcta

SEQ ID NO: 16266 - DNA, 20 bp, Artificial Sequence
  Description of Artificial Sequence: Synthetic oligonucleotide
  Target: LAMA2; (-) strand; PAM type: NNGRRT; PAM sequence: TGGAAT
actcgaaagggattatacct

SEQ ID NO: 16267 - DNA, 20 bp, Artificial Sequence
  Description of Artificial Sequence: Synthetic oligonucleotide
  Target: LAMA2; (-) strand; PAM type: NNGRRT; PAM sequence: AGGGAT
taagttacaagcaactcgaa

SEQ ID NO: 16268 - DNA, 20 bp, Artificial Sequence
  Description of Artificial Sequence: Synthetic oligonucleotide
  Target: LAMA2; (-) strand; PAM type: NNGRRT; PAM sequence: TAGAAT
tactaactctatttcttcta

SEQ ID NO: 16269 - DNA, 20 bp, Artificial Sequence
  Description of Artificial Sequence: Synthetic oligonucleotide
  Target: LAMA2; (-) strand; PAM type: NNGRRT; PAM sequence: GAGAAT
aagagtgtttctttcagcca

SEQ ID NO: 16270 - DNA, 20 bp, Artificial Sequence
  Description of Artificial Sequence: Synthetic oligonucleotide
  Target: LAMA2; (-) strand; PAM type: NNGRRT; PAM sequence: AAGAGT
tataccacatgatgttggag

SEQ ID NO: 16271 - DNA, 20 bp, Artificial Sequence
  Description of Artificial Sequence: Synthetic oligonucleotide
  Target: LAMA2; (-) strand; PAM type: NNGRRT; PAM sequence: CTGAAT
tccttcacaaacagtctcaa

SEQ ID NO: 16272 - DNA, 20 bp, Artificial Sequence
  Description of Artificial Sequence: Synthetic oligonucleotide
  Target: LAMA2; (-) strand; PAM type: NNGRRT; PAM sequence: TAGAAT
actgcagcacaaattctaat

SEQ ID NO: 16273 - DNA, 20 bp, Artificial Sequence
  Description of Artificial Sequence: Synthetic oligonucleotide
  Target: LAMA2; (-) strand; PAM type: NNGRRT; PAM sequence: GAGAAT
gtaggctaagctataaagtt

SEQ ID NO: 16274 - DNA, 20 bp, Artificial Sequence
  Description of Artificial Sequence: Synthetic oligonucleotide
  Target: LAMA2; (-) strand; PAM type: NNGRRT; PAM sequence: AAGAGT
ataaagaggtacgtattgat

SEQ ID NO: 16275 - DNA, 20 bp, Artificial Sequence
  Description of Artificial Sequence: Synthetic oligonucleotide
  Target: LAMA2; (-) strand; PAM type: NNGRRT; PAM sequence: AAGAGT
cgattcagttacctccaaag

SEQ ID NO: 16276 - DNA, 20 bp, Artificial Sequence
  Description of Artificial Sequence: Synthetic oligonucleotide
  Target: LAMA2; (-) strand; PAM type: NNGRRT; PAM sequence: CCGAGT
gtggtgacttggctatggat

SEQ ID NO: 16277 - DNA, 20 bp, Artificial Sequence
  Description of Artificial Sequence: Synthetic oligonucleotide
  Target: LAMA2; (-) strand; PAM type: NNGRRT; PAM sequence: ATGGAT
agtaaagtggtgacttggct

SEQ ID NO: 16278 - DNA, 20 bp, Artificial Sequence
  Description of Artificial Sequence: Synthetic oligonucleotide
  Target: LAMA2; (-) strand; PAM type: NNGRRT; PAM sequence: ACGAAT
atctaacctaaacctatctt

SEQ ID NO: 16279 - DNA, 20 bp, Artificial Sequence
  Description of Artificial Sequence: Synthetic oligonucleotide
  Target: LAMA2; (-) strand; PAM type: NNGRRT; PAM sequence: AAGGAT
ttttgctgttcttaagcaaa

SEQ ID NO: 16280 - DNA, 20 bp, Artificial Sequence
  Description of Artificial Sequence: Synthetic oligonucleotide
  Target: LAMA2; (-) strand; PAM type: NNGRRT; PAM sequence: TAGAAT
ggtctcctcaaagaaatttt

SEQ ID NO: 16281 - DNA, 20 bp, Artificial Sequence
  Description of Artificial Sequence: Synthetic oligonucleotide
  Target: LAMA2; (-) strand; PAM type: NNGRRT; PAM sequence: TAGGGT
gtttgccatctatagtctct

SEQ ID NO: 16282 - DNA, 20 bp, Artificial Sequence
  Description of Artificial Sequence: Synthetic oligonucleotide
  Target: LAMA2; (-) strand; PAM type: NNGRRT; PAM sequence: CAGAAT
gacttgctgtgtaacctcga

SEQ ID NO: 16283 - DNA, 20 bp, Artificial Sequence
  Description of Artificial Sequence: Synthetic oligonucleotide
  Target: LAMA2; (-) strand; PAM type: NNGRRT; PAM sequence: ATGAAT
tattgtaccacatttgaagt

SEQ ID NO: 16284 - DNA, 20 bp, Artificial Sequence
  Description of Artificial Sequence: Synthetic oligonucleotide
  Target: LAMA2; (-) strand; PAM type: NNGRRT; PAM sequence: AAGAAT
aaacatatacttcatagact

SEQ ID NO: 16285 - DNA, 20 bp, Artificial Sequence
  Description of Artificial Sequence: Synthetic oligonucleotide
  Target: LAMA2; (-) strand; PAM type: NNGRRT; PAM sequence: GAGAGT
tttttactatagtaattagg

SEQ ID NO: 16286 - DNA, 20 bp, Artificial Sequence
  Description of Artificial Sequence: Synthetic oligonucleotide
  Target: LAMA2; (-) strand; PAM type: NNGRRT; PAM sequence: AAGAAT
tgtattaaataatgtattcc

SEQ ID NO: 16287 - DNA, 20 bp, Artificial Sequence
  Description of Artificial Sequence: Synthetic oligonucleotide
  Target: LAMA2; (-) strand; PAM type: NNGRRT; PAM sequence: CAGAGT
cactaagaatcctccctatc

SEQ ID NO: 16288 - DNA, 20 bp, Artificial Sequence
  Description of Artificial Sequence: Synthetic oligonucleotide
  Target: LAMA2; (-) strand; PAM type: NNGRRT; PAM sequence: AAGAAT
aatacacaagtagacacact

SEQ ID NO: 16289 - DNA, 20 bp, Artificial Sequence
  Description of Artificial Sequence: Synthetic oligonucleotide
  Target: LAMA2; (-) strand; PAM type: NNGRRT; PAM sequence: TAGAGT
agttttctctagagatttgt

SEQ ID NO: 16290 - DNA, 20 bp, Artificial Sequence
  Description of Artificial Sequence: Synthetic oligonucleotide
  Target: LAMA2; (-) strand; PAM type: NNGRRT; PAM sequence: ATGAAT
taatgtatcagaatgaaaaa

SEQ ID NO: 16291 - DNA, 20 bp, Artificial Sequence
  Description of Artificial Sequence: Synthetic oligonucleotide
  Target: LAMA2; (-) strand; PAM type: NNGRRT; PAM sequence: CAGAAT
cagtgacttttctaatgtat

SEQ ID NO: 16292 - DNA, 20 bp, Artificial Sequence
  Description of Artificial Sequence: Synthetic oligonucleotide
  Target: LAMA2; (-) strand; PAM type: NNGRRT; PAM sequence: TGGAAT
tagagggaaaatttatattt

SEQ ID NO: 16293 - DNA, 20 bp, Artificial Sequence
  Description of Artificial Sequence: Synthetic oligonucleotide
  Target: LAMA2; (-) strand; PAM type: NNGRRT; PAM sequence: CAGAAT
ttagatggaaaattgaattt

SEQ ID NO: 16294 - DNA, 20 bp, Artificial Sequence
  Description of Artificial Sequence: Synthetic oligonucleotide
  Target: LAMA2; (-) strand; PAM type: NNGRRT; PAM sequence: TTGAAT
gtcattttttagatggaaaa

SEQ ID NO: 16295 - DNA, 20 bp, Artificial Sequence
  Description of Artificial Sequence: Synthetic oligonucleotide
  Target: LAMA2; (-) strand; PAM type: NNGRRT; PAM sequence: GGGGGT
ggggaaaaaaaacaaagaaa

SEQ ID NO: 16296 - DNA, 20 bp, Artificial Sequence
  Description of Artificial Sequence: Synthetic oligonucleotide
  Target: LAMA2; (-) strand; PAM type: NNGRRT; PAM sequence: ATGGGT
atgtttgaaagctatgtgtc

SEQ ID NO: 16297 - DNA, 20 bp, Artificial Sequence
  Description of Artificial Sequence: Synthetic oligonucleotide
  Target: LAMA2; (-) strand; PAM type: NNGRRT; PAM sequence: CTGAAT
atgatagttttataatttca

SEQ ID NO: 16298 - DNA, 20 bp, Artificial Sequence
  Description of Artificial Sequence: Synthetic oligonucleotide
  Target: LAMA2; (-) strand; PAM type: NNGRRT; PAM sequence: TAGAAT
gataaaaaggaatcttgaca

SEQ ID NO: 16299 - DNA, 20 bp, Artificial Sequence
  Description of Artificial Sequence: Synthetic oligonucleotide
  Target: LAMA2; (-) strand; PAM type: NNGRRT; PAM sequence: AGGAAT
ttatttttaagaggataaaa

SEQ ID NO: 16300 - DNA, 20 bp, Artificial Sequence
  Description of Artificial Sequence: Synthetic oligonucleotide
  Target: LAMA2; (-) strand; PAM type: NNGRRT; PAM sequence: GAGGAT
aaagtttcaattatttttaa

SEQ ID NO: 16301 - DNA, 20 bp, Artificial Sequence
  Description of Artificial Sequence: Synthetic oligonucleotide
  Target: LAMA2; (-) strand; PAM type: NNGRRT; PAM sequence: TTGGAT
agacattgaagagttttatt

SEQ ID NO: 16302 - DNA, 20 bp, Artificial Sequence
  Description of Artificial Sequence: Synthetic oligonucleotide
  Target: LAMA2; (-) strand; PAM type: NNGRRT; PAM sequence: AAGAGT
ttctattaagccagacattg

SEQ ID NO: 16303 - DNA, 20 bp, Artificial Sequence
  Description of Artificial Sequence: Synthetic oligonucleotide
  Target: LAMA2; (-) strand; PAM type: NNGRRT; PAM sequence: GAGAAT
ttgaacgcagaggcagaaat

SEQ ID NO: 16304 - DNA, 20 bp, Artificial Sequence
  Description of Artificial Sequence: Synthetic oligonucleotide
  Target: LAMA2; (-) strand; PAM type: NNGRRT; PAM sequence: AAGAAT
tgagttttggtatagaatca

SEQ ID NO: 16305 - DNA, 20 bp, Artificial Sequence
  Description of Artificial Sequence: Synthetic oligonucleotide
  Target: LAMA2; (-) strand; PAM type: NNGRRT; PAM sequence: TAGAAT
ccacttactgagttttggta

SEQ ID NO: 16306 - DNA, 20 bp, Artificial Sequence
  Description of Artificial Sequence: Synthetic oligonucleotide
  Target: LAMA2; (-) strand; PAM type: NNGRRT; PAM sequence: CTGAGT
cttttgaaaactaccactta

SEQ ID NO: 16307 - DNA, 20 bp, Artificial Sequence
  Description of Artificial Sequence: Synthetic oligonucleotide
  Target: LAMA2; (-) strand; PAM type: NNGRRT; PAM sequence: ATGGGT
atgatactataacatcacac

SEQ ID NO: 16308 - DNA, 20 bp, Artificial Sequence
  Description of Artificial Sequence: Synthetic oligonucleotide
  Target: LAMA2; (-) strand; PAM type: NNGRRT; PAM sequence: ATGAAT
cagtatcttccaaatgatct

SEQ ID NO: 16309 - DNA, 20 bp, Artificial Sequence
  Description of Artificial Sequence: Synthetic oligonucleotide
  Target: LAMA2; (-) strand; PAM type: NNGRRT; PAM sequence: ATGAAT
tgataaacattttcttaaga

SEQ ID NO: 16310 - DNA, 20 bp, Artificial Sequence
  Description of Artificial Sequence: Synthetic oligonucleotide
  Target: LAMA2; (-) strand; PAM type: NNGRRT; PAM sequence: AAGAAT
tgtttgataaacattttctt

SEQ ID NO: 16311 - DNA, 20 bp, Artificial Sequence
  Description of Artificial Sequence: Synthetic oligonucleotide
  Target: LAMA2; (-) strand; PAM type: NNGRRT; PAM sequence: AAGGAT
aataccctatgtactacaaa

SEQ ID NO: 16312 - DNA, 20 bp, Artificial Sequence
  Description of Artificial Sequence: Synthetic oligonucleotide
  Target: LAMA2; (-) strand; PAM type: NNGRRT; PAM sequence: TGGAAT
taaactagccacttttttcg

SEQ ID NO: 16313 - DNA, 20 bp, Artificial Sequence
  Description of Artificial Sequence: Synthetic oligonucleotide
  Target: LAMA2; (-) strand; PAM type: NNGRRT; PAM sequence: TTGGGT
atgattaaatttattaaatc

SEQ ID NO: 16314 - DNA, 20 bp, Artificial Sequence
  Description of Artificial Sequence: Synthetic oligonucleotide
  Target: LAMA2; (-) strand; PAM type: NNGRRT; PAM sequence: ATGAAT
aaaaacaactagtttcacag

SEQ ID NO: 16315 - DNA, 20 bp, Artificial Sequence
  Description of Artificial Sequence: Synthetic oligonucleotide
  Target: LAMA2; (-) strand; PAM type: NNGRRT; PAM sequence: AGGGGT
acattagcacaaatcaaggc

SEQ ID NO: 16316 - DNA, 20 bp, Artificial Sequence
  Description of Artificial Sequence: Synthetic oligonucleotide
  Target: LAMA2; (-) strand; PAM type: NNGRRT; PAM sequence: GGGAGT
agaaagatctgtgaatccct

SEQ ID NO: 16317 - DNA, 20 bp, Artificial Sequence
  Description of Artificial Sequence: Synthetic oligonucleotide
  Target: LAMA2; (-) strand; PAM type: NNGRRT; PAM sequence: GTGAAT
tagagctcaaagaaagatct

SEQ ID NO: 16318 - DNA, 20 bp, Artificial Sequence
  Description of Artificial Sequence: Synthetic oligonucleotide
  Target: LAMA2; (-) strand; PAM type: NNGRRT; PAM sequence: TAGAAT
tcatatggctatagattttg

SEQ ID NO: 16319 - DNA, 20 bp, Artificial Sequence
  Description of Artificial Sequence: Synthetic oligonucleotide
  Target: LAMA2; (-) strand; PAM type: NNGRRT; PAM sequence: CTGGAT
tttccacagaagaagctttt

SEQ ID NO: 16320 - DNA, 20 bp, Artificial Sequence
  Description of Artificial Sequence: Synthetic oligonucleotide
  Target: LAMA2; (-) strand; PAM type: NNGRRT; PAM sequence: GTGGGT
ataacatcatatgtccaact

SEQ ID NO: 16321 - DNA, 20 bp, Artificial Sequence
  Description of Artificial Sequence: Synthetic oligonucleotide
  Target: LAMA2; (-) strand; PAM type: NNGRRT; PAM sequence: AGGAAT
gttcactttttaagtctatt

SEQ ID NO: 16322 - DNA, 20 bp, Artificial Sequence
  Description of Artificial Sequence: Synthetic oligonucleotide
  Target: LAMA2; (-) strand; PAM type: NNGRRT; PAM sequence: ATGAGT
gtgagccaccgcgccccgcc

SEQ ID NO: 16323 - DNA, 20 bp, Artificial Sequence
  Description of Artificial Sequence: Synthetic oligonucleotide
  Target: LAMA2; (-) strand; PAM type: NNGRRT; PAM sequence: TGGGAT
gccccggcctcccaaagtgc

SEQ ID NO: 16324 - DNA, 20 bp, Artificial Sequence
  Description of Artificial Sequence: Synthetic oligonucleotide
  Target: LAMA2; (-) strand; PAM type: NNGRRT; PAM sequence: CAGGAT
cagggtttcaccatgttagc

SEQ ID NO: 16325 - DNA, 20 bp, Artificial Sequence
  Description of Artificial Sequence: Synthetic oligonucleotide
  Target: LAMA2; (-) strand; PAM type: NNGRRT; PAM sequence: CAGGGT
ttttttttttttagtagaga

SEQ ID NO: 16326 - DNA, 20 bp, Artificial Sequence
  Description of Artificial Sequence: Synthetic oligonucleotide
  Target: LAMA2; (-) strand; PAM type: NNGRRT; PAM sequence: CAGAGT
cattctcctgcctcagcctc

SEQ ID NO: 16327 - DNA, 20 bp, Artificial Sequence
  Description of Artificial Sequence: Synthetic oligonucleotide
  Target: LAMA2; (-) strand; PAM type: NNGRRT; PAM sequence: CCGGAT
ctcactgcaagctcctcctc

SEQ ID NO: 16328 - DNA, 20 bp, Artificial Sequence
  Description of Artificial Sequence: Synthetic oligonucleotide
  Target: LAMA2; (-) strand; PAM type: NNGRRT; PAM sequence: TGGAGT
tctcgctctgttgcccaagc

SEQ ID NO: 16329 - DNA, 20 bp, Artificial Sequence
  Description of Artificial Sequence: Synthetic oligonucleotide
  Target: LAMA2; (-) strand; PAM type: NNGRRT; PAM sequence: CGGAGT
aaaccttgctcatgagttca

SEQ ID NO: 16330 - DNA, 20 bp, Artificial Sequence
  Description of Artificial Sequence: Synthetic oligonucleotide
  Target: LAMA2; (-) strand; PAM type: NNGRRT; PAM sequence: ATGAGT
ctttgtactaaaccttgctc

SEQ ID NO: 16331 - DNA, 20 bp, Artificial Sequence
  Description of Artificial Sequence: Synthetic oligonucleotide
  Target: LAMA2; (-) strand; PAM type: NNGRRT; PAM sequence: CAGAAT
aaatctcttctgctaatatt

SEQ ID NO: 16332 - DNA, 20 bp, Artificial Sequence
  Description of Artificial Sequence: Synthetic oligonucleotide
  Target: LAMA2; (-) strand; PAM type: NNGRRT; PAM sequence: AGGAAT
gtgagttcaggagctcagca

SEQ ID NO: 16333 - DNA, 20 bp, Artificial Sequence
  Description of Artificial Sequence: Synthetic oligonucleotide
  Target: LAMA2; (-) strand; PAM type: NNGRRT; PAM sequence: GTGAGT
aacaaaggacccctcctgat

SEQ ID NO: 16334 - DNA, 20 bp, Artificial Sequence
  Description of Artificial Sequence: Synthetic oligonucleotide
  Target: LAMA2; (-) strand; PAM type: NNGRRT; PAM sequence: AGGAAT
cgatatccagtgcttccaac

SEQ ID NO: 16335 - DNA, 20 bp, Artificial Sequence
  Description of Artificial Sequence: Synthetic oligonucleotide
  Target: LAMA2; (-) strand; PAM type: NNGRRT; PAM sequence: AAGAAT
tatgagatgggcacagagaa

SEQ ID NO: 16336 - DNA, 20 bp, Artificial Sequence
  Description of Artificial Sequence: Synthetic oligonucleotide
  Target: LAMA2; (-) strand; PAM type: NNGRRT; PAM sequence: TTGAGT
tttggtcaaaggatagatcc

SEQ ID NO: 16337 - DNA, 20 bp, Artificial Sequence
  Description of Artificial Sequence: Synthetic oligonucleotide
  Target: LAMA2; (-) strand; PAM type: NNGRRT; PAM sequence: AAGGAT
aagagtgaaaaatttggtca

SEQ ID NO: 16338 - DNA, 20 bp, Artificial Sequence
  Description of Artificial Sequence: Synthetic oligonucleotide
  Target: LAMA2; (-) strand; PAM type: NNGRRT; PAM sequence: AAGAGT
agagcagtatgaggcccttg

SEQ ID NO: 16339 - DNA, 20 bp, Artificial Sequence
  Description of Artificial Sequence: Synthetic oligonucleotide
  Target: LAMA2; (-) strand; PAM type: NNGRRT; PAM sequence: CTGGAT
taaggagaggacatattggg

SEQ ID NO: 16340 - DNA, 20 bp, Artificial Sequence
  Description of Artificial Sequence: Synthetic oligonucleotide
  Target: LAMA2; (-) strand; PAM type: NNGRRT; PAM sequence: ATGGAT
ttattcagcaggaccaggac

SEQ ID NO: 16341 - DNA, 20 bp, Artificial Sequence
  Description of Artificial Sequence: Synthetic oligonucleotide
  Target: LAMA2; (-) strand; PAM type: NNGRRT; PAM sequence: GAGGGT
gaaaaaaaaaaaaatggaag

SEQ ID NO: 16342 - DNA, 20 bp, Artificial Sequence
  Description of Artificial Sequence: Synthetic oligonucleotide
  Target: LAMA2; (-) strand; PAM type: NNGRRT; PAM sequence: TGGAAT
attaactctttcagtgttac

SEQ ID NO: 16343 - DNA, 20 bp, Artificial Sequence
  Description of Artificial Sequence: Synthetic oligonucleotide
  Target: LAMA2; (-) strand; PAM type: NNGRRT; PAM sequence: CAGAAT
gaattgaaaagctatttttg

SEQ ID NO: 16344 - DNA, 20 bp, Artificial Sequence
  Description of Artificial Sequence: Synthetic oligonucleotide
  Target: LAMA2; (-) strand; PAM type: NNGRRT; PAM sequence: GAGAAT
agcttgagaaagagaataaa

SEQ ID NO: 16345 - DNA, 20 bp, Artificial Sequence
  Description of Artificial Sequence: Synthetic oligonucleotide
  Target: LAMA2; (-) strand; PAM type: NNGRRT; PAM sequence: GAGAAT
ttttatcaaagcttgagaaa

SEQ ID NO: 16346 - DNA, 20 bp, Artificial Sequence
  Description of Artificial Sequence: Synthetic oligonucleotide
  Target: LAMA2; (-) strand; PAM type: NNGRRT; PAM sequence: TTGAAT
agaaaatcagtccctaaaag

SEQ ID NO: 16347 - DNA, 20 bp, Artificial Sequence
  Description of Artificial Sequence: Synthetic oligonucleotide
  Target: LAMA2; (-) strand; PAM type: NNGRRT; PAM sequence: TAGAAT
aaatgtttctaaaaaacatt

SEQ ID NO: 16348 - DNA, 20 bp, Artificial Sequence
  Description of Artificial Sequence: Synthetic oligonucleotide
  Target: LAMA2; (-) strand; PAM type: NNGRRT; PAM sequence: GTGAAT
gataaaatttcagattctgg

SEQ ID NO: 16349 - DNA, 20 bp, Artificial Sequence
  Description of Artificial Sequence: Synthetic oligonucleotide
  Target: LAMA2; (-) strand; PAM type: NNGRRT; PAM sequence: CTGGGT
taaagataaaatttcagatt

SEQ ID NO: 16350 - DNA, 20 bp, Artificial Sequence
  Description of Artificial Sequence: Synthetic oligonucleotide
  Target: LAMA2; (-) strand; PAM type: NNGRRT; PAM sequence: AGGAAT
gagggcaatgttttatccaa

SEQ ID NO: 16351 - DNA, 20 bp, Artificial Sequence
  Description of Artificial Sequence: Synthetic oligonucleotide
  Target: LAMA2; (-) strand; PAM type: NNGRRT; PAM sequence: AAGAAT
gcacagcaaacattttagaa

SEQ ID NO: 16352 - DNA, 20 bp, Artificial Sequence
  Description of Artificial Sequence: Synthetic oligonucleotide
  Target: LAMA2; (-) strand; PAM type: NNGRRT; PAM sequence: GTGAAT
ataaattaatttccattaaa

SEQ ID NO: 16353 - DNA, 20 bp, Artificial Sequence
  Description of Artificial Sequence: Synthetic oligonucleotide
  Target: LAMA2; (-) strand; PAM type: NNGRRT; PAM sequence: GTGAAT
tcacacgctgccatgggtag

SEQ ID NO: 16354 - DNA, 20 bp, Artificial Sequence
  Description of Artificial Sequence: Synthetic oligonucleotide
  Target: LAMA2; (-) strand; PAM type: NNGRRT; PAM sequence: ATGGGT
ggttgaggtcacacgctgcc

SEQ ID NO: 16355 - DNA, 20 bp, Artificial Sequence
  Description of Artificial Sequence: Synthetic oligonucleotide
  Target: LAMA2; (-) strand; PAM type: NNGRRT; PAM sequence: CAGGGT
cttactaatttgtactcttt

SEQ ID NO: 16356 - DNA, 20 bp, Artificial Sequence
  Description of Artificial Sequence: Synthetic oligonucleotide
  Target: LAMA2; (-) strand; PAM type: NNGRRT; PAM sequence: CTGAAT
tgatatatcaggacatagtg

SEQ ID NO: 16357 - DNA, 20 bp, Artificial Sequence
  Description of Artificial Sequence: Synthetic oligonucleotide
  Target: LAMA2; (-) strand; PAM type: NNGRRT; PAM sequence: AGGAGT
ttcattcattgctatctcca

SEQ ID NO: 16358 - DNA, 20 bp, Artificial Sequence
  Description of Artificial Sequence: Synthetic oligonucleotide
  Target: LAMA2; (-) strand; PAM type: NNGRRT; PAM sequence: AAGAAT
caggcatgcctgacacagtt

SEQ ID NO: 16359 - DNA, 20 bp, Artificial Sequence
  Description of Artificial Sequence: Synthetic oligonucleotide
  Target: LAMA2; (-) strand; PAM type: NNGRRT; PAM sequence: AGGAGT
ccaattaagttaacaattct

SEQ ID NO: 16360 - DNA, 20 bp, Artificial Sequence
  Description of Artificial Sequence: Synthetic oligonucleotide
  Target: LAMA2; (-) strand; PAM type: NNGRRT; PAM sequence: GGGGAT
tcagttccaactgcggtttt

SEQ ID NO: 16361 - DNA, 20 bp, Artificial Sequence
  Description of Artificial Sequence: Synthetic oligonucleotide
  Target: LAMA2; (-) strand; PAM type: NNGRRT; PAM sequence: CAGAAT
actctgggagttaccataag

SEQ ID NO: 16362 - DNA, 20 bp, Artificial Sequence
  Description of Artificial Sequence: Synthetic oligonucleotide
  Target: LAMA2; (-) strand; PAM type: NNGRRT; PAM sequence: GGGAGT
tggatgatattctctactct

SEQ ID NO: 16363 - DNA, 20 bp, Artificial Sequence
  Description of Artificial Sequence: Synthetic oligonucleotide
  Target: LAMA2; (-) strand; PAM type: NNGRRT; PAM sequence: CTGGAT
aagttcataaagggggccaa

SEQ ID NO: 16364 - DNA, 20 bp, Artificial Sequence
  Description of Artificial Sequence: Synthetic oligonucleotide
  Target: LAMA2; (-) strand; PAM type: NNGRRT; PAM sequence: GTGAAT
cagcactcagccagcaaggt

SEQ ID NO: 16365 - DNA, 20 bp, Artificial Sequence
  Description of Artificial Sequence: Synthetic oligonucleotide
  Target: LAMA2; (-) strand; PAM type: NNGRRT; PAM sequence: GAGGAT
attttcattctcttaaaggt

SEQ ID NO: 16366 - DNA, 20 bp, Artificial Sequence
  Description of Artificial Sequence: Synthetic oligonucleotide
  Target: LAMA2; (-) strand; PAM type: NNGRRT; PAM sequence: CTGAAT
aatgatgattccatcctctt

SEQ ID NO: 16367 - DNA, 20 bp, Artificial Sequence
  Description of Artificial Sequence: Synthetic oligonucleotide
  Target: LAMA2; (-) strand; PAM type: NNGRRT; PAM sequence: TTGAAT
caccactgattgtaaagtct

SEQ ID NO: 16368 - DNA, 20 bp, Artificial Sequence
  Description of Artificial Sequence: Synthetic oligonucleotide
  Target: LAMA2; (-) strand; PAM type: NNGRRT; PAM sequence: CAGGAT
gttctattaccatccataac

SEQ ID NO: 16369 - DNA, 20 bp, Artificial Sequence
  Description of Artificial Sequence: Synthetic oligonucleotide
  Target: LAMA2; (-) strand; PAM type: NNGRRT; PAM sequence: CAGAGT
ggaaaagagttgaggaaatg

SEQ ID NO: 16370 - DNA, 20 bp, Artificial Sequence
  Description of Artificial Sequence: Synthetic oligonucleotide
  Target: LAMA2; (-) strand; PAM type: NNGRRT; PAM sequence: AAGAGT
ttgggaaaagctgatgggaa

SEQ ID NO: 16371 - DNA, 20 bp, Artificial Sequence
  Description of Artificial Sequence: Synthetic oligonucleotide
  Target: LAMA2; (-) strand; PAM type: NNGRRT; PAM sequence: CTGAGT
gtgaatgatggtaccatttt

SEQ ID NO: 16372 - DNA, 20 bp, Artificial Sequence
  Description of Artificial Sequence: Synthetic oligonucleotide
  Target: LAMA2; (-) strand; PAM type: NNGRRT; PAM sequence: GTGAAT
tgtcaaatttgattcaaggg

SEQ ID NO: 16373 - DNA, 20 bp, Artificial Sequence
  Description of Artificial Sequence: Synthetic oligonucleotide
  Target: LAMA2; (-) strand; PAM type: NNGRRT; PAM sequence: AGGGGT
tagatgtcaaatttgattca

SEQ ID NO: 16374 - DNA, 20 bp, Artificial Sequence
  Description of Artificial Sequence: Synthetic oligonucleotide
  Target: LAMA2; (-) strand; PAM type: NNGRRT; PAM sequence: GTGGAT
atggaataaactctggtggt

SEQ ID NO: 16375 - DNA, 20 bp, Artificial Sequence
  Description of Artificial Sequence: Synthetic oligonucleotide
  Target: LAMA2; (-) strand; PAM type: NNGRRT; PAM sequence: TGGAAT
caaaaagatgtggatattta

SEQ ID NO: 16376 - DNA, 20 bp, Artificial Sequence
  Description of Artificial Sequence: Synthetic oligonucleotide
  Target: LAMA2; (-) strand; PAM type: NNGRRT; PAM sequence: GTGGAT
ggcaatagggacaaaaagat

SEQ ID NO: 16377 - DNA, 20 bp, Artificial Sequence
  Description of Artificial Sequence: Synthetic oligonucleotide
  Target: LAMA2; (-) strand; PAM type: NNGRRT; PAM sequence: AAGAGT
tgaagttgcataggcaaaaa

SEQ ID NO: 16378 - DNA, 20 bp, Artificial Sequence
  Description of Artificial Sequence: Synthetic oligonucleotide
  Target: LAMA2; (-) strand; PAM type: NNGRRT; PAM sequence: CAGAGT
ctaatctgatttactatttt

SEQ ID NO: 16379 - DNA, 20 bp, Artificial Sequence
  Description of Artificial Sequence: Synthetic oligonucleotide
  Target: LAMA2; (-) strand; PAM type: NNGRRT; PAM sequence: TAGAAT
gacttaaaatctaatgaatt

SEQ ID NO: 16380 - DNA, 20 bp, Artificial Sequence
  Description of Artificial Sequence: Synthetic oligonucleotide
  Target: LAMA2; (-) strand; PAM type: NNGRRT; PAM sequence: ATGAAT
atgaatagacttaaaatcta

SEQ ID NO: 16381 - DNA, 20 bp, Artificial Sequence
  Description of Artificial Sequence: Synthetic oligonucleotide
  Target: LAMA2; (-) strand; PAM type: NNGRRT; PAM sequence: ATGAAT
agaaaaatacaagagctgtc

SEQ ID NO: 16382 - DNA, 20 bp, Artificial Sequence
  Description of Artificial Sequence: Synthetic oligonucleotide
  Target: LAMA2; (-) strand; PAM type: NNGRRT; PAM sequence: GAGAAT
gctggtaaataacagaaaaa

SEQ ID NO: 16383 - DNA, 20 bp, Artificial Sequence
  Description of Artificial Sequence: Synthetic oligonucleotide
  Target: LAMA2; (-) strand; PAM type: NNGRRT; PAM sequence: AGGGAT
ttgagaaggagacagccatc

SEQ ID NO: 16384 - DNA, 20 bp, Artificial Sequence
  Description of Artificial Sequence: Synthetic oligonucleotide
  Target: LAMA2; (-) strand; PAM type: NNGRRT; PAM sequence: TGGAAT
ggtgacatttgacatgagat

SEQ ID NO: 16385 - DNA, 20 bp, Artificial Sequence
  Description of Artificial Sequence: Synthetic oligonucleotide
  Target: LAMA2; (-) strand; PAM type: NNGRRT; PAM sequence: ATGAGT
aaagaaattacaacagggag

SEQ ID NO: 16386 - DNA, 20 bp, Artificial Sequence
  Description of Artificial Sequence: Synthetic oligonucleotide
  Target: LAMA2; (-) strand; PAM type: NNGRRT; PAM sequence: AAGGGT
aagaagaaaagtaaataaac

SEQ ID NO: 16387 - DNA, 20 bp, Artificial Sequence
  Description of Artificial Sequence: Synthetic oligonucleotide
  Target: LAMA2; (-) strand; PAM type: NNGRRT; PAM sequence: TGGAAT
tccaattttgacctcctcca

SEQ ID NO: 16388 - DNA, 20 bp, Artificial Sequence
  Description of Artificial Sequence: Synthetic oligonucleotide
  Target: LAMA2; (-) strand; PAM type: NNGRRT; PAM sequence: AGGAAT
gggacagattcactacatac

SEQ ID NO: 16389 - DNA, 20 bp, Artificial Sequence
  Description of Artificial Sequence: Synthetic oligonucleotide
  Target: LAMA2; (-) strand; PAM type: NNGRRT; PAM sequence: TTGGAT
gaggtttatctgaaatatga

SEQ ID NO: 16390 - DNA, 20 bp, Artificial Sequence
  Description of Artificial Sequence: Synthetic oligonucleotide
  Target: LAMA2; (-) strand; PAM type: NNGRRT; PAM sequence: TTGAGT
gctgcttcttcatccaattt

SEQ ID NO: 16391 - DNA, 20 bp, Artificial Sequence
  Description of Artificial Sequence: Synthetic oligonucleotide
  Target: LAMA2; (-) strand; PAM type: NNGRRT; PAM sequence: AAGGAT
aacattcattcatactataa

SEQ ID NO: 16392 - DNA, 20 bp, Artificial Sequence
  Description of Artificial Sequence: Synthetic oligonucleotide
  Target: LAMA2; (-) strand; PAM type: NNGRRT; PAM sequence: TGGAAT
aaatactgctcaactcttac

SEQ ID NO: 16393 - DNA, 20 bp, Artificial Sequence
  Description of Artificial Sequence: Synthetic oligonucleotide
  Target: LAMA2; (-) strand; PAM type: NNGRRT; PAM sequence: GTGAGT
tgccaatcaaatcaccccat

SEQ ID NO: 16394 - DNA, 20 bp, Artificial Sequence
  Description of Artificial Sequence: Synthetic oligonucleotide
  Target: LAMA2; (-) strand; PAM type: NNGRRT; PAM sequence: GTGAGT
tgacatattgtagaggcctt

SEQ ID NO: 16395 - DNA, 20 bp, Artificial Sequence
  Description of Artificial Sequence: Synthetic oligonucleotide
  Target: LAMA2; (-) strand; PAM type: NNGRRT; PAM sequence: AAGAAT
ttcattcttaaagtaaggag

SEQ ID NO: 16396 - DNA, 20 bp, Artificial Sequence
  Description of Artificial Sequence: Synthetic oligonucleotide
  Target: LAMA2; (-) strand; PAM type: NNGRRT; PAM sequence: AAGGAT
caggcactgtgctatgcagt

SEQ ID NO: 16397 - DNA, 20 bp, Artificial Sequence
  Description of Artificial Sequence: Synthetic oligonucleotide
  Target: LAMA2; (-) strand; PAM type: NNGRRT; PAM sequence: TTGAGT
tttagttcttttttctatcg

SEQ ID NO: 16398 - DNA, 20 bp, Artificial Sequence
  Description of Artificial Sequence: Synthetic oligonucleotide
  Target: LAMA2; (-) strand; PAM type: NNGRRT; PAM sequence: AGGAAT
taattggaacatcctgtttc

SEQ ID NO: 16399 - DNA, 20 bp, Artificial Sequence
  Description of Artificial Sequence: Synthetic oligonucleotide
  Target: LAMA2; (-) strand; PAM type: NNGRRT; PAM sequence: ATGGAT
agttttcatttttgcaaaaa

SEQ ID NO: 16400 - DNA, 20 bp, Artificial Sequence
  Description of Artificial Sequence: Synthetic oligonucleotide
  Target: LAMA2; (-) strand; PAM type: NNGRRT; PAM sequence: GGGAGT
caaataccttagtgaaagag

SEQ ID NO: 16401 - DNA, 20 bp, Artificial Sequence
  Description of Artificial Sequence: Synthetic oligonucleotide
  Target: LAMA2; (-) strand; PAM type: NNGRRT; PAM sequence: GAGGGT
gagccaccatgcctagacag

SEQ ID NO: 16402 - DNA, 20 bp, Artificial Sequence
  Description of Artificial Sequence: Synthetic oligonucleotide
  Target: LAMA2; (-) strand; PAM type: NNGRRT; PAM sequence: TGGGAT
gccttggccttccaaagagc

SEQ ID NO: 16403 - DNA, 20 bp, Artificial Sequence
  Description of Artificial Sequence: Synthetic oligonucleotide
  Target: LAMA2; (-) strand; PAM type: NNGRRT; PAM sequence: AGGGAT
cattttatttttgtagaggc

SEQ ID NO: 16404 - DNA, 20 bp, Artificial Sequence
  Description of Artificial Sequence: Synthetic oligonucleotide
  Target: LAMA2; (-) strand; PAM type: NNGRRT; PAM sequence: CTGAGT
aatcttcccatctcagcctc

SEQ ID NO: 16405 - DNA, 20 bp, Artificial Sequence
  Description of Artificial Sequence: Synthetic oligonucleotide
  Target: LAMA2; (-) strand; PAM type: NNGRRT; PAM sequence: CCGGGT
gtcactgcagcctcgacctc

SEQ ID NO: 16406 - DNA, 20 bp, Artificial Sequence
  Description of Artificial Sequence: Synthetic oligonucleotide
  Target: LAMA2; (-) strand; PAM type: NNGRRT; PAM sequence: ATGGGT
taaagtgcagtggtgtgatc

SEQ ID NO: 16407 - DNA, 20 bp, Artificial Sequence
  Description of Artificial Sequence: Synthetic oligonucleotide
  Target: LAMA2; (-) strand; PAM type: NNGRRT; PAM sequence: ATGAAT
tttggatcaaataatgaata

SEQ ID NO: 16408 - DNA, 20 bp, Artificial Sequence
  Description of Artificial Sequence: Synthetic oligonucleotide
  Target: LAMA2; (-) strand; PAM type: NNGRRT; PAM sequence: ATGAAT
tttttgttttggatcaaata

SEQ ID NO: 16409 - DNA, 20 bp, Artificial Sequence
  Description of Artificial Sequence: Synthetic oligonucleotide
  Target: LAMA2; (-) strand; PAM type: NNGRRT; PAM sequence: TTGGAT
gtctataacatgtttttgtt

SEQ ID NO: 16410 - DNA, 20 bp, Artificial Sequence
  Description of Artificial Sequence: Synthetic oligonucleotide
  Target: LAMA2; (-) strand; PAM type: NNGRRT; PAM sequence: TTGAAT
aagcataggatttttgaaaa

SEQ ID NO: 16411 - DNA, 20 bp, Artificial Sequence
  Description of Artificial Sequence: Synthetic oligonucleotide
  Target: LAMA2; (-) strand; PAM type: NNGRRT; PAM sequence: TAGGAT
atatttagagatgagaagca

SEQ ID NO: 16412 - DNA, 20 bp, Artificial Sequence
  Description of Artificial Sequence: Synthetic oligonucleotide
  Target: LAMA2; (-) strand; PAM type: NNGRRT; PAM sequence: CAGAAT
aaaataagcaaggatggaaa

SEQ ID NO: 16413 - DNA, 20 bp, Artificial Sequence
  Description of Artificial Sequence: Synthetic oligonucleotide
  Target: LAMA2; (-) strand; PAM type: NNGRRT; PAM sequence: AAGGAT
tagcttaataaaaaataagc

SEQ ID NO: 16414 - DNA, 20 bp, Artificial Sequence
  Description of Artificial Sequence: Synthetic oligonucleotide
  Target: LAMA2; (-) strand; PAM type: NNGRRT; PAM sequence: ATGAAT
aaaggggatcatttcttaaa

SEQ ID NO: 16415 - DNA, 20 bp, Artificial Sequence
  Description of Artificial Sequence: Synthetic oligonucleotide
  Target: LAMA2; (-) strand; PAM type: NNGRRT; PAM sequence: GGGGAT
acctctatagttggggtaaa

SEQ ID NO: 16416 - DNA, 20 bp, Artificial Sequence
  Description of Artificial Sequence: Synthetic oligonucleotide
  Target: LAMA2; (-) strand; PAM type: NNGRRT; PAM sequence: TGGGGT
gtagtatatacctctatagt

SEQ ID NO: 16417 - DNA, 20 bp, Artificial Sequence
  Description of Artificial Sequence: Synthetic oligonucleotide
  Target: LAMA2; (-) strand; PAM type: NNGRRT; PAM sequence: GAGAAT
taaatattctcctaagactt

SEQ ID NO: 16418 - DNA, 20 bp, Artificial Sequence
  Description of Artificial Sequence: Synthetic oligonucleotide
  Target: LAMA2; (-) strand; PAM type: NNGRRT; PAM sequence: TAGAAT
ataaactctgcagtcaactg

SEQ ID NO: 16419 - DNA, 20 bp, Artificial Sequence
  Description of Artificial Sequence: Synthetic oligonucleotide
  Target: LAMA2; (-) strand; PAM type: NNGRRT; PAM sequence: ATGAAT
aagacattatgaattaaata

SEQ ID NO: 16420 - DNA, 20 bp, Artificial Sequence
  Description of Artificial Sequence: Synthetic oligonucleotide
  Target: LAMA2; (-) strand; PAM type: NNGRRT; PAM sequence: ATGAAT
aaagtgattgaaaagacatt

SEQ ID NO: 16421 - DNA, 20 bp, Artificial Sequence
  Description of Artificial Sequence: Synthetic oligonucleotide
  Target: LAMA2; (-) strand; PAM type: NNGRRT; PAM sequence: ATGAAT
acacttggcatgtattcttc

SEQ ID NO: 16422 - DNA, 20 bp, Artificial Sequence
  Description of Artificial Sequence: Synthetic oligonucleotide
  Target: LAMA2; (-) strand; PAM type: NNGRRT; PAM sequence: CTGAGT
gcctccccagccaggtggaa

SEQ ID NO: 16423 - DNA, 20 bp, Artificial Sequence
  Description of Artificial Sequence: Synthetic oligonucleotide
  Target: LAMA2; (-) strand; PAM type: NNGRRT; PAM sequence: AAGAAT
tccttcctgacatcatgaag

SEQ ID NO: 16424 - DNA, 20 bp, Artificial Sequence
  Description of Artificial Sequence: Synthetic oligonucleotide
  Target: LAMA2; (-) strand; PAM type: NNGRRT; PAM sequence: GTGAGT
cccatgctgttctcaggata

SEQ ID NO: 16425 - DNA, 20 bp, Artificial Sequence
  Description of Artificial Sequence: Synthetic oligonucleotide
  Target: LAMA2; (-) strand; PAM type: NNGRRT; PAM sequence: CAGGAT
tgattcccccatgctgttct

SEQ ID NO: 16426 - DNA, 20 bp, Artificial Sequence
  Description of Artificial Sequence: Synthetic oligonucleotide
  Target: LAMA2; (-) strand; PAM type: NNGRRT; PAM sequence: GAGAGT
ctggaaggtgattagatcat

SEQ ID NO: 16427 - DNA, 20 bp, Artificial Sequence
  Description of Artificial Sequence: Synthetic oligonucleotide
  Target: LAMA2; (-) strand; PAM type: NNGRRT; PAM sequence: TTGAAT
tgtcctcacaaaatctcatc

SEQ ID NO: 16428 - DNA, 20 bp, Artificial Sequence
  Description of Artificial Sequence: Synthetic oligonucleotide
  Target: LAMA2; (-) strand; PAM type: NNGRRT; PAM sequence: GGGAAT
ttcaactggaaatatttaaa

SEQ ID NO: 16429 - DNA, 20 bp, Artificial Sequence
  Description of Artificial Sequence: Synthetic oligonucleotide
  Target: LAMA2; (-) strand; PAM type: NNGRRT; PAM sequence: TTGAAT
agttgggacatcaatagtga

SEQ ID NO: 16430 - DNA, 20 bp, Artificial Sequence
  Description of Artificial Sequence: Synthetic oligonucleotide
  Target: LAMA2; (-) strand; PAM type: NNGRRT; PAM sequence: TGGAAT
tgctgagagtgtgagaaagg

SEQ ID NO: 16431 - DNA, 20 bp, Artificial Sequence
  Description of Artificial Sequence: Synthetic oligonucleotide
  Target: LAMA2; (-) strand; PAM type: NNGRRT; PAM sequence: GAGAGT
cgattatgtgtttatatgct

SEQ ID NO: 16432 - DNA, 20 bp, Artificial Sequence
  Description of Artificial Sequence: Synthetic oligonucleotide
  Target: LAMA2; (-) strand; PAM type: NNGRRT; PAM sequence: ATGAAT
ctttggccccacatgtcata

SEQ ID NO: 16433 - DNA, 20 bp, Artificial Sequence
  Description of Artificial Sequence: Synthetic oligonucleotide
  Target: LAMA2; (-) strand; PAM type: NNGRRT; PAM sequence: CTGAGT
tttcttccaagtcctcattg

SEQ ID NO: 16434 - DNA, 20 bp, Artificial Sequence
  Description of Artificial Sequence: Synthetic oligonucleotide
  Target: LAMA2; (-) strand; PAM type: NNGRRT; PAM sequence: ATGGGT
caaggctgcagtgggcaaag

SEQ ID NO: 16435 - DNA, 20 bp, Artificial Sequence
  Description of Artificial Sequence: Synthetic oligonucleotide
  Target: LAMA2; (-) strand; PAM type: NNGRRT; PAM sequence: GAGGAT
actgagggagactgaggcag

SEQ ID NO: 16436 - DNA, 20 bp, Artificial Sequence
  Description of Artificial Sequence: Synthetic oligonucleotide
  Target: LAMA2; (-) strand; PAM type: NNGRRT; PAM sequence: TTGGGT
aatcaagaaaacattgggtg

SEQ ID NO: 16437 - DNA, 20 bp, Artificial Sequence
  Description of Artificial Sequence: Synthetic oligonucleotide
  Target: LAMA2; (-) strand; PAM type: NNGRRT; PAM sequence: TTGGGT
cttttacaatcaagaaaaca

SEQ ID NO: 16438 - DNA, 20 bp, Artificial Sequence
  Description of Artificial Sequence: Synthetic oligonucleotide
  Target: LAMA2; (-) strand; PAM type: NNGRRT; PAM sequence: ATGGAT
taaacacattgataaaatga

SEQ ID NO: 16439 - DNA, 20 bp, Artificial Sequence
  Description of Artificial Sequence: Synthetic oligonucleotide
  Target: LAMA2; (-) strand; PAM type: NNGRRT; PAM sequence: ATGAAT
attttaaacacattgataaa

SEQ ID NO: 16440 - DNA, 20 bp, Artificial Sequence
  Description of Artificial Sequence: Synthetic oligonucleotide
  Target: LAMA2; (-) strand; PAM type: NNGRRT; PAM sequence: AAGAAT
tttaaagtgaaagaaggagt

SEQ ID NO: 16441 - DNA, 20 bp, Artificial Sequence
  Description of Artificial Sequence: Synthetic oligonucleotide
  Target: LAMA2; (-) strand; PAM type: NNGRRT; PAM sequence: AGGAGT
aaacactttaaagtgaaaga

SEQ ID NO: 16442 - DNA, 20 bp, Artificial Sequence
  Description of Artificial Sequence: Synthetic oligonucleotide
  Target: LAMA2; (-) strand; PAM type: NNGRRT; PAM sequence: ATGAGT
tttatgaatagaatgcaaaa

SEQ ID NO: 16443 - DNA, 20 bp, Artificial Sequence
  Description of Artificial Sequence: Synthetic oligonucleotide
  Target: LAMA2; (-) strand; PAM type: NNGRRT; PAM sequence: TAGAAT
tgactggtcatatttatgaa

SEQ ID NO: 16444 - DNA, 20 bp, Artificial Sequence
  Description of Artificial Sequence: Synthetic oligonucleotide
  Target: LAMA2; (-) strand; PAM type: NNGRRT; PAM sequence: ATGAAT
agttgtgactggtcatattt

SEQ ID NO: 16445 - DNA, 20 bp, Artificial Sequence
  Description of Artificial Sequence: Synthetic oligonucleotide
  Target: LAMA2; (-) strand; PAM type: NNGRRT; PAM sequence: AAGGAT
ttacaaagaaatcttggtga

SEQ ID NO: 16446 - DNA, 20 bp, Artificial Sequence
  Description of Artificial Sequence: Synthetic oligonucleotide
  Target: LAMA2; (-) strand; PAM type: NNGRRT; PAM sequence: TAGAAT
aaattccatttgtagtgaag

SEQ ID NO: 16447 - DNA, 20 bp, Artificial Sequence
  Description of Artificial Sequence: Synthetic oligonucleotide
  Target: LAMA2; (-) strand; PAM type: NNGRRT; PAM sequence: TGGAGT
attctggaacccacttattg

SEQ ID NO: 16448 - DNA, 20 bp, Artificial Sequence
  Description of Artificial Sequence: Synthetic oligonucleotide
  Target: LAMA2; (-) strand; PAM type: NNGRRT; PAM sequence: CAGAAT
acacataatgcattttaata

SEQ ID NO: 16449 - DNA, 20 bp, Artificial Sequence
  Description of Artificial Sequence: Synthetic oligonucleotide
  Target: LAMA2; (-) strand; PAM type: NNGRRT; PAM sequence: CAGAAT
caatggcaatttctttaaaa

SEQ ID NO: 16450 - DNA, 20 bp, Artificial Sequence
  Description of Artificial Sequence: Synthetic oligonucleotide
  Target: LAMA2; (-) strand; PAM type: NNGRRT; PAM sequence: TAGAAT
cttaatgtccacaaaggttt

SEQ ID NO: 16451 - DNA, 20 bp, Artificial Sequence
  Description of Artificial Sequence: Synthetic oligonucleotide
  Target: LAMA2; (-) strand; PAM type: NNGRRT; PAM sequence: GAGGAT
tacaagggaataataaagca

SEQ ID NO: 16452 - DNA, 20 bp, Artificial Sequence
  Description of Artificial Sequence: Synthetic oligonucleotide
  Target: LAMA2; (-) strand; PAM type: NNGRRT; PAM sequence: GGGAAT
aaatacttaatttcctacaa

SEQ ID NO: 16453 - DNA, 20 bp, Artificial Sequence
  Description of Artificial Sequence: Synthetic oligonucleotide
  Target: LAMA2; (-) strand; PAM type: NNGRRT; PAM sequence: ATGGGT
acttctgagctctgctaggg

SEQ ID NO: 16454 - DNA, 20 bp, Artificial Sequence
  Description of Artificial Sequence: Synthetic oligonucleotide
  Target: LAMA2; (-) strand; PAM type: NNGRRT; PAM sequence: AGGGAT
gcctacttctgagctctgct

SEQ ID NO: 16455 - DNA, 20 bp, Artificial Sequence
  Description of Artificial Sequence: Synthetic oligonucleotide
  Target: LAMA2; (-) strand; PAM type: NNGRRT; PAM sequence: CTGGAT
caaaacacaattacctgcag

SEQ ID NO: 16456 - DNA, 20 bp, Artificial Sequence
  Description of Artificial Sequence: Synthetic oligonucleotide
  Target: LAMA2; (-) strand; PAM type: NNGRRT; PAM sequence: GGGAGT
aaactattgaaactcttatc

SEQ ID NO: 16457 - DNA, 20 bp, Artificial Sequence
  Description of Artificial Sequence: Synthetic oligonucleotide
  Target: LAMA2; (-) strand; PAM type: NNGRRT; PAM sequence: ATGGAT
aaggaaatggcggttctaga

SEQ ID NO: 16458 - DNA, 20 bp, Artificial Sequence
  Description of Artificial Sequence: Synthetic oligonucleotide
  Target: LAMA2; (-) strand; PAM type: NNGRRT; PAM sequence: TAGAAT
tcttaaggaaatggcggttc

SEQ ID NO: 16459 - DNA, 20 bp, Artificial Sequence
  Description of Artificial Sequence: Synthetic oligonucleotide
  Target: LAMA2; (-) strand; PAM type: NNGRRT; PAM sequence: ATGAAT
agtgagtgatcttgacctgg

SEQ ID NO: 16460 - DNA, 20 bp, Artificial Sequence
  Description of Artificial Sequence: Synthetic oligonucleotide
  Target: LAMA2; (-) strand; PAM type: NNGRRT; PAM sequence: CTGGAT
acctagtgagtgatcttgac

SEQ ID NO: 16461 - DNA, 20 bp, Artificial Sequence
  Description of Artificial Sequence: Synthetic oligonucleotide
  Target: LAMA2; (-) strand; PAM type: NNGRRT; PAM sequence: GTGAGT
gaggaggtgcacaagaccta

SEQ ID NO: 16462 - DNA, 20 bp, Artificial Sequence
  Description of Artificial Sequence: Synthetic oligonucleotide
  Target: LAMA2; (-) strand; PAM type: NNGRRT; PAM sequence: ACGAGT
agactgtaggtggtataatg

SEQ ID NO: 16463 - DNA, 20 bp, Artificial Sequence
  Description of Artificial Sequence: Synthetic oligonucleotide
  Target: LAMA2; (-) strand; PAM type: NNGRRT; PAM sequence: TAGAAT
ttctctgaatcacattattg

SEQ ID NO: 16464 - DNA, 20 bp, Artificial Sequence
  Description of Artificial Sequence: Synthetic oligonucleotide
  Target: LAMA2; (-) strand; PAM type: NNGRRT; PAM sequence: CTGAAT
acaaaggaaaaaaaaattct

SEQ ID NO: 16465 - DNA, 20 bp, Artificial Sequence
  Description of Artificial Sequence: Synthetic oligonucleotide
  Target: LAMA2; (-) strand; PAM type: NNGRRT; PAM sequence: CAGGGT
ttgcactccagcctgggcaa

SEQ ID NO: 16466 - DNA, 20 bp, Artificial Sequence
  Description of Artificial Sequence: Synthetic oligonucleotide
  Target: LAMA2; (-) strand; PAM type: NNGRRT; PAM sequence: GAGAAT
tactcaggaggctgaggcag

SEQ ID NO: 16467 - DNA, 20 bp, Artificial Sequence
  Description of Artificial Sequence: Synthetic oligonucleotide
  Target: LAMA2; (-) strand; PAM type: NNGRRT; PAM sequence: AAGAAT
cccatccctactaaaaatac

SEQ ID NO: 16468 - DNA, 20 bp, Artificial Sequence
  Description of Artificial Sequence: Synthetic oligonucleotide
  Target: LAMA2; (-) strand; PAM type: NNGRRT; PAM sequence: ATGAGT
ggcaggcagatcacaaggtc

SEQ ID NO: 16469 - DNA, 20 bp, Artificial Sequence
  Description of Artificial Sequence: Synthetic oligonucleotide
  Target: LAMA2; (-) strand; PAM type: NNGRRT; PAM sequence: CAGAAT
taatataggaaactatgacc

SEQ ID NO: 16470 - DNA, 20 bp, Artificial Sequence
  Description of Artificial Sequence: Synthetic oligonucleotide
  Target: LAMA2; (-) strand; PAM type: NNGRRT; PAM sequence: CAGAAT
agtgaataaaatgcctgaca

SEQ ID NO: 16471 - DNA, 20 bp, Artificial Sequence
  Description of Artificial Sequence: Synthetic oligonucleotide
  Target: LAMA2; (-) strand; PAM type: NNGRRT; PAM sequence: GTGAAT
tcaagaacagttgaaacaaa

SEQ ID NO: 16472 - DNA, 20 bp, Artificial Sequence
  Description of Artificial Sequence: Synthetic oligonucleotide
  Target: LAMA2; (-) strand; PAM type: NNGRRT; PAM sequence: CGGGAT
ctgcaatagtcctaatcctc

SEQ ID NO: 16473 - DNA, 20 bp, Artificial Sequence
  Description of Artificial Sequence: Synthetic oligonucleotide
  Target: LAMA2; (-) strand; PAM type: NNGRRT; PAM sequence: GTGGGT
taatgctagatgacgagtta

SEQ ID NO: 16474 - DNA, 20 bp, Artificial Sequence
  Description of Artificial Sequence: Synthetic oligonucleotide
  Target: LAMA2; (-) strand; PAM type: NNGRRT; PAM sequence: ACGAGT
gatatacctaatgctagatg

SEQ ID NO: 16475 - DNA, 20 bp, Artificial Sequence
  Description of Artificial Sequence: Synthetic oligonucleotide
  Target: LAMA2; (-) strand; PAM type: NNGRRT; PAM sequence: AGGGAT
gtggggtggggggagtgggg

SEQ ID NO: 16476 - DNA, 20 bp, Artificial Sequence
  Description of Artificial Sequence: Synthetic oligonucleotide
  Target: LAMA2; (-) strand; PAM type: NNGRRT; PAM sequence: GGGAGT
ggggactgttgtggggtggg

SEQ ID NO: 16477 - DNA, 20 bp, Artificial Sequence
  Description of Artificial Sequence: Synthetic oligonucleotide
  Target: LAMA2; (-) strand; PAM type: NNGRRT; PAM sequence: TGGGGT
tcacactctggggactgttg

SEQ ID NO: 16478 - DNA, 20 bp, Artificial Sequence
  Description of Artificial Sequence: Synthetic oligonucleotide
  Target: LAMA2; (-) strand; PAM type: NNGRRT; PAM sequence: GGGAAT
gcatgttctcaatcataggt

SEQ ID NO: 16479 - DNA, 20 bp, Artificial Sequence
  Description of Artificial Sequence: Synthetic oligonucleotide
  Target: LAMA2; (-) strand; PAM type: NNGRRT; PAM sequence: AAGAAT
cattctcagcaaactatcac

SEQ ID NO: 16480 - DNA, 20 bp, Artificial Sequence
  Description of Artificial Sequence: Synthetic oligonucleotide
  Target: LAMA2; (-) strand; PAM type: NNGRRT; PAM sequence: ATGGAT
ttcatgtcctttgtagggac

SEQ ID NO: 16481 - DNA, 20 bp, Artificial Sequence
  Description of Artificial Sequence: Synthetic oligonucleotide
  Target: LAMA2; (-) strand; PAM type: NNGRRT; PAM sequence: ATGAGT
ctatgcagccataaaaaatg

SEQ ID NO: 16482 - DNA, 20 bp, Artificial Sequence
  Description of Artificial Sequence: Synthetic oligonucleotide
  Target: LAMA2; (-) strand; PAM type: NNGRRT; PAM sequence: TGGAAT
aatgtggcacatatacacca

SEQ ID NO: 16483 - DNA, 20 bp, Artificial Sequence
  Description of Artificial Sequence: Synthetic oligonucleotide
  Target: LAMA2; (-) strand; PAM type: NNGRRT; PAM sequence: CTGGAT
aaatgtccaacaacgataga

SEQ ID NO: 16484 - DNA, 20 bp, Artificial Sequence
  Description of Artificial Sequence: Synthetic oligonucleotide
  Target: LAMA2; (-) strand; PAM type: NNGRRT; PAM sequence: CTGGGT
ttgacccagccatcccatta

SEQ ID NO: 16485 - DNA, 20 bp, Artificial Sequence
  Description of Artificial Sequence: Synthetic oligonucleotide
  Target: LAMA2; (-) strand; PAM type: NNGRRT; PAM sequence: AGGGAT
agtcagtgtggcgattcctc

SEQ ID NO: 16486 - DNA, 20 bp, Artificial Sequence
  Description of Artificial Sequence: Synthetic oligonucleotide
  Target: LAMA2; (-) strand; PAM type: NNGRRT; PAM sequence: GAGGAT
aggaaacaacaggtgctgga

SEQ ID NO: 16487 - DNA, 20 bp, Artificial Sequence
  Description of Artificial Sequence: Synthetic oligonucleotide
  Target: LAMA2; (-) strand; PAM type: NNGRRT; PAM sequence: TAGAAT
agataccatctcacaccagt

SEQ ID NO: 16488 - DNA, 20 bp, Artificial Sequence
  Description of Artificial Sequence: Synthetic oligonucleotide
  Target: LAMA2; (-) strand; PAM type: NNGRRT; PAM sequence: CAGAAT
tctgacaaagggctaatatc

SEQ ID NO: 16489 - DNA, 20 bp, Artificial Sequence
  Description of Artificial Sequence: Synthetic oligonucleotide
  Target: LAMA2; (-) strand; PAM type: NNGRRT; PAM sequence: CAGAGT
gcagcaaaagaaactaccat

SEQ ID NO: 16490 - DNA, 20 bp, Artificial Sequence
  Description of Artificial Sequence: Synthetic oligonucleotide
  Target: LAMA2; (-) strand; PAM type: NNGRRT; PAM sequence: TGGGAT
caaaagccaaaatggacaaa

SEQ ID NO: 16491 - DNA, 20 bp, Artificial Sequence
  Description of Artificial Sequence: Synthetic oligonucleotide
  Target: LAMA2; (-) strand; PAM type: NNGRRT; PAM sequence: ATGGGT
gtaccattcaggacataggc

SEQ ID NO: 16492 - DNA, 20 bp, Artificial Sequence
  Description of Artificial Sequence: Synthetic oligonucleotide
  Target: LAMA2; (-) strand; PAM type: NNGRRT; PAM sequence: ATGGAT
tatacaaaaatcaattcaag

SEQ ID NO: 16493 - DNA, 20 bp, Artificial Sequence
  Description of Artificial Sequence: Synthetic oligonucleotide
  Target: LAMA2; (-) strand; PAM type: NNGRRT; PAM sequence: CTGGAT
ccatatgtagaaagctgaaa

SEQ ID NO: 16494 - DNA, 20 bp, Artificial Sequence
  Description of Artificial Sequence: Synthetic oligonucleotide
  Target: LAMA2; (-) strand; PAM type: NNGRRT; PAM sequence: AAGGAT
agaaaaacaagcaatgggga

SEQ ID NO: 16495 - DNA, 20 bp, Artificial Sequence
  Description of Artificial Sequence: Synthetic oligonucleotide
  Target: LAMA2; (-) strand; PAM type: NNGRRT; PAM sequence: CAGAAT
gctaccaatgcctttcttca

SEQ ID NO: 16496 - DNA, 20 bp, Artificial Sequence
  Description of Artificial Sequence: Synthetic oligonucleotide
  Target: LAMA2; (-) strand; PAM type: NNGRRT; PAM sequence: AAGAAT
attccatgctcatgggtagg

SEQ ID NO: 16497 - DNA, 20 bp, Artificial Sequence
  Description of Artificial Sequence: Synthetic oligonucleotide
  Target: LAMA2; (-) strand; PAM type: NNGRRT; PAM sequence: ATGGGT
tggaagaacattccatgctc

SEQ ID NO: 16498 - DNA, 20 bp, Artificial Sequence
  Description of Artificial Sequence: Synthetic oligonucleotide
  Target: LAMA2; (-) strand; PAM type: NNGRRT; PAM sequence: GAGGAT
cactgctcaaggaaataaaa

SEQ ID NO: 16499 - DNA, 20 bp, Artificial Sequence
  Description of Artificial Sequence: Synthetic oligonucleotide
  Target: LAMA2; (-) strand; PAM type: NNGRRT; PAM sequence: AGGGAT
acctaggaatccaacttaca

SEQ ID NO: 16500 - DNA, 20 bp, Artificial Sequence
  Description of Artificial Sequence: Synthetic oligonucleotide
  Target: LAMA2; (-) strand; PAM type: NNGRRT; PAM sequence: AGGAAT
tcaaagagaataaaatacct

SEQ ID NO: 16501 - DNA, 20 bp, Artificial Sequence
  Description of Artificial Sequence: Synthetic oligonucleotide
  Target: LAMA2; (-) strand; PAM type: NNGRRT; PAM sequence: GAGAAT
ccattcacaattgcttcaaa

SEQ ID NO: 16502 - DNA, 20 bp, Artificial Sequence
  Description of Artificial Sequence: Synthetic oligonucleotide
  Target: LAMA2; (-) strand; PAM type: NNGRRT; PAM sequence: ATGAGT
cagacaaacagagccaaatc

SEQ ID NO: 16503 - DNA, 20 bp, Artificial Sequence
  Description of Artificial Sequence: Synthetic oligonucleotide
  Target: LAMA2; (-) strand; PAM type: NNGRRT; PAM sequence: CAGGAT
aagcaacttcagcaaagtct

SEQ ID NO: 16504 - DNA, 20 bp, Artificial Sequence
  Description of Artificial Sequence: Synthetic oligonucleotide
  Target: LAMA2; (-) strand; PAM type: NNGRRT; PAM sequence: AAGGGT
ttaggcaggagaaggaaata

SEQ ID NO: 16505 - DNA, 20 bp, Artificial Sequence
  Description of Artificial Sequence: Synthetic oligonucleotide
  Target: LAMA2; (-) strand; PAM type: NNGRRT; PAM sequence: AGGGAT
tttgaaaactggcacaagac

SEQ ID NO: 16506 - DNA, 20 bp, Artificial Sequence
  Description of Artificial Sequence: Synthetic oligonucleotide
  Target: LAMA2; (-) strand; PAM type: NNGRRT; PAM sequence: CTGAAT
aacccacagcgaatatcata

SEQ ID NO: 16507 - DNA, 20 bp, Artificial Sequence
  Description of Artificial Sequence: Synthetic oligonucleotide
  Target: LAMA2; (-) strand; PAM type: NNGRRT; PAM sequence: GCGAAT
ctatctatgacaaacccaca

SEQ ID NO: 16508 - DNA, 20 bp, Artificial Sequence
  Description of Artificial Sequence: Synthetic oligonucleotide
  Target: LAMA2; (-) strand; PAM type: NNGRRT; PAM sequence: TGGGAT
gatcaagtgggcttcatccc

SEQ ID NO: 16509 - DNA, 20 bp, Artificial Sequence
  Description of Artificial Sequence: Synthetic oligonucleotide
  Target: LAMA2; (-) strand; PAM type: NNGRRT; PAM sequence: GAGAAT
gcagagacacaaccaaaaaa

SEQ ID NO: 16510 - DNA, 20 bp, Artificial Sequence
  Description of Artificial Sequence: Synthetic oligonucleotide
  Target: LAMA2; (-) strand; PAM type: NNGRRT; PAM sequence: GGGAAT
ttccaatcaatagaaaaaga

SEQ ID NO: 16511 - DNA, 20 bp, Artificial Sequence
  Description of Artificial Sequence: Synthetic oligonucleotide
  Target: LAMA2; (-) strand; PAM type: NNGRRT; PAM sequence: CCGAAT
aggaccagatggattcacag

SEQ ID NO: 16512 - DNA, 20 bp, Artificial Sequence
  Description of Artificial Sequence: Synthetic oligonucleotide
  Target: LAMA2; (-) strand; PAM type: NNGRRT; PAM sequence: ATGGAT
caaaaagagtccaggaccag

SEQ ID NO: 16513 - DNA, 20 bp, Artificial Sequence
  Description of Artificial Sequence: Synthetic oligonucleotide
  Target: LAMA2; (-) strand; PAM type: NNGRRT; PAM sequence: AAGAGT
tcaatagcttaccaaccaaa

SEQ ID NO: 16514 - DNA, 20 bp, Artificial Sequence
  Description of Artificial Sequence: Synthetic oligonucleotide
  Target: LAMA2; (-) strand; PAM type: NNGRRT; PAM sequence: CAGGAT
atctctgaatagacaaataa

SEQ ID NO: 16515 - DNA, 20 bp, Artificial Sequence
  Description of Artificial Sequence: Synthetic oligonucleotide
  Target: LAMA2; (-) strand; PAM type: NNGRRT; PAM sequence: CTGAAT
accaggaagaagttgaatct

SEQ ID NO: 16516 - DNA, 20 bp, Artificial Sequence
  Description of Artificial Sequence: Synthetic oligonucleotide
  Target: LAMA2; (-) strand; PAM type: NNGRRT; PAM sequence: TTGAAT
aagactaaaccaggaagaag

SEQ ID NO: 16517 - DNA, 20 bp, Artificial Sequence
  Description of Artificial Sequence: Synthetic oligonucleotide
  Target: LAMA2; (-) strand; PAM type: NNGRRT; PAM sequence: ATGGAT
aactagaaaatctagaagaa

SEQ ID NO: 16518 - DNA, 20 bp, Artificial Sequence
  Description of Artificial Sequence: Synthetic oligonucleotide
  Target: LAMA2; (-) strand; PAM type: NNGRRT; PAM sequence: GAGAAT
agaaatacaaactaccatca

SEQ ID NO: 16519 - DNA, 20 bp, Artificial Sequence
  Description of Artificial Sequence: Synthetic oligonucleotide
  Target: LAMA2; (-) strand; PAM type: NNGRRT; PAM sequence: GGGGAT
acgcaataaaaaatgataaa

SEQ ID NO: 16520 - DNA, 20 bp, Artificial Sequence
  Description of Artificial Sequence: Synthetic oligonucleotide
  Target: LAMA2; (-) strand; PAM type: NNGRRT; PAM sequence: AAGAAT
taataaagaaaaaaagagag

SEQ ID NO: 16521 - DNA, 20 bp, Artificial Sequence
  Description of Artificial Sequence: Synthetic oligonucleotide
  Target: LAMA2; (-) strand; PAM type: NNGRRT; PAM sequence: AAGGAT
tccaggagctggttttttga

SEQ ID NO: 16522 - DNA, 20 bp, Artificial Sequence
  Description of Artificial Sequence: Synthetic oligonucleotide
  Target: LAMA2; (-) strand; PAM type: NNGRRT; PAM sequence: ATGAAT
aaaaacccttcaaaaaatta

SEQ ID NO: 16523 - DNA, 20 bp, Artificial Sequence
  Description of Artificial Sequence: Synthetic oligonucleotide
  Target: LAMA2; (-) strand; PAM type: NNGRRT; PAM sequence: CAGAAT
agaacaaagacacaacatac

SEQ ID NO: 16524 - DNA, 20 bp, Artificial Sequence
  Description of Artificial Sequence: Synthetic oligonucleotide
  Target: LAMA2; (-) strand; PAM type: NNGRRT; PAM sequence: CTGGGT
aacctgctcctgaatgacta

SEQ ID NO: 16525 - DNA, 20 bp, Artificial Sequence
  Description of Artificial Sequence: Synthetic oligonucleotide
  Target: LAMA2; (-) strand; PAM type: NNGRRT; PAM sequence: CTGAAT
ggaaactgaacaacctgctc

SEQ ID NO: 16526 - DNA, 20 bp, Artificial Sequence
  Description of Artificial Sequence: Synthetic oligonucleotide
  Target: LAMA2; (-) strand; PAM type: NNGRRT; PAM sequence: AAGAAT
tcaaactagaactcaggatt

SEQ ID NO: 16527 - DNA, 20 bp, Artificial Sequence
  Description of Artificial Sequence: Synthetic oligonucleotide
  Target: LAMA2; (-) strand; PAM type: NNGRRT; PAM sequence: CAGGAT
agtgcaatcaaactagaact

SEQ ID NO: 16528 - DNA, 20 bp, Artificial Sequence
  Description of Artificial Sequence: Synthetic oligonucleotide
  Target: LAMA2; (-) strand; PAM type: NNGRRT; PAM sequence: CAGAAT
aactctccaccccaaatcaa

SEQ ID NO: 16529 - DNA, 20 bp, Artificial Sequence
  Description of Artificial Sequence: Synthetic oligonucleotide
  Target: LAMA2; (-) strand; PAM type: NNGRRT; PAM sequence: AGGAAT
gaaagtcaacaaggataccc

SEQ ID NO: 16530 - DNA, 20 bp, Artificial Sequence
  Description of Artificial Sequence: Synthetic oligonucleotide
  Target: LAMA2; (-) strand; PAM type: NNGRRT; PAM sequence: AAGGAT
caacgagacagaaagtcaac

SEQ ID NO: 16531 - DNA, 20 bp, Artificial Sequence
  Description of Artificial Sequence: Synthetic oligonucleotide
  Target: LAMA2; (-) strand; PAM type: NNGRRT; PAM sequence: CTGAGT
ccagattcataaagcaagtc

SEQ ID NO: 16532 - DNA, 20 bp, Artificial Sequence
  Description of Artificial Sequence: Synthetic oligonucleotide
  Target: LAMA2; (-) strand; PAM type: NNGRRT; PAM sequence: AGGGAT
aggccattacataatggtaa

SEQ ID NO: 16533 - DNA, 20 bp, Artificial Sequence
  Description of Artificial Sequence: Synthetic oligonucleotide
  Target: LAMA2; (-) strand; PAM type: NNGRRT; PAM sequence: AGGGGT
aatggaaaacaaaaaaaggc

SEQ ID NO: 16534 - DNA, 20 bp, Artificial Sequence
  Description of Artificial Sequence: Synthetic oligonucleotide
  Target: LAMA2; (-) strand; PAM type: NNGRRT; PAM sequence: AAGGAT
cacacataggctcaaaataa

SEQ ID NO: 16535 - DNA, 20 bp, Artificial Sequence
  Description of Artificial Sequence: Synthetic oligonucleotide
  Target: LAMA2; (-) strand; PAM type: NNGRRT; PAM sequence: AAGAGT
acagactggcaaattggata

SEQ ID NO: 16536 - DNA, 20 bp, Artificial Sequence
  Description of Artificial Sequence: Synthetic oligonucleotide
  Target: LAMA2; (-) strand; PAM type: NNGRRT; PAM sequence: TTGGAT
aaaagacacagactggcaaa

SEQ ID NO: 16537 - DNA, 20 bp, Artificial Sequence
  Description of Artificial Sequence: Synthetic oligonucleotide
  Target: LAMA2; (-) strand; PAM type: NNGRRT; PAM sequence: CAGGAT
accagctaacatcatcatga

SEQ ID NO: 16538 - DNA, 20 bp, Artificial Sequence
  Description of Artificial Sequence: Synthetic oligonucleotide
  Target: LAMA2; (-) strand; PAM type: NNGRRT; PAM sequence: CAGAAT
aaagaaaagaattttcaacc

SEQ ID NO: 16539 - DNA, 20 bp, Artificial Sequence
  Description of Artificial Sequence: Synthetic oligonucleotide
  Target: LAMA2; (-) strand; PAM type: NNGRRT; PAM sequence: AAGAAT
tattcaacattcttaaagaa

SEQ ID NO: 16540 - DNA, 20 bp, Artificial Sequence
  Description of Artificial Sequence: Synthetic oligonucleotide
  Target: LAMA2; (-) strand; PAM type: NNGRRT; PAM sequence: GAGAGT
agaaaccctacaagccagaa

SEQ ID NO: 16541 - DNA, 20 bp, Artificial Sequence
  Description of Artificial Sequence: Synthetic oligonucleotide
  Target: LAMA2; (-) strand; PAM type: NNGRRT; PAM sequence: ACGGGT
agggcagccagagagaaagc

SEQ ID NO: 16542 - DNA, 20 bp, Artificial Sequence
  Description of Artificial Sequence: Synthetic oligonucleotide
  Target: LAMA2; (-) strand; PAM type: NNGRRT; PAM sequence: CAGGAT
ccaagttggaaaacactctg

SEQ ID NO: 16543 - DNA, 20 bp, Artificial Sequence
  Description of Artificial Sequence: Synthetic oligonucleotide
  Target: LAMA2; (-) strand; PAM type: NNGRRT; PAM sequence: GAGAAT
gtgtacctgaaagtgacggg

SEQ ID NO: 16544 - DNA, 20 bp, Artificial Sequence
  Description of Artificial Sequence: Synthetic oligonucleotide
  Target: LAMA2; (-) strand; PAM type: NNGRRT; PAM sequence: AAGAAT
gaagggaagtttagagaaaa

SEQ ID NO: 16545 - DNA, 20 bp, Artificial Sequence
  Description of Artificial Sequence: Synthetic oligonucleotide
  Target: LAMA2; (-) strand; PAM type: NNGRRT; PAM sequence: ATGAAT
tatcagcaatggaagacgaa

SEQ ID NO: 16546 - DNA, 20 bp, Artificial Sequence
  Description of Artificial Sequence: Synthetic oligonucleotide
  Target: LAMA2; (-) strand; PAM type: NNGRRT; PAM sequence: AAGGGT
cgatgcgatcaactggaaga

SEQ ID NO: 16547 - DNA, 20 bp, Artificial Sequence
  Description of Artificial Sequence: Synthetic oligonucleotide
  Target: LAMA2; (-) strand; PAM type: NNGRRT; PAM sequence: AAGAAT
caaggctcgagaactacgtg

SEQ ID NO: 16548 - DNA, 20 bp, Artificial Sequence
  Description of Artificial Sequence: Synthetic oligonucleotide
  Target: LAMA2; (-) strand; PAM type: NNGRRT; PAM sequence: TAGAAT
aatttagaagaatgtataac

SEQ ID NO: 16549 - DNA, 20 bp, Artificial Sequence
  Description of Artificial Sequence: Synthetic oligonucleotide
  Target: LAMA2; (-) strand; PAM type: NNGRRT; PAM sequence: AAGAAT
aaactttgaaaaaaatttag

SEQ ID NO: 16550 - DNA, 20 bp, Artificial Sequence
  Description of Artificial Sequence: Synthetic oligonucleotide
  Target: LAMA2; (-) strand; PAM type: NNGRRT; PAM sequence: GAGGGT
actccaacagacctgcagtt

SEQ ID NO: 16551 - DNA, 20 bp, Artificial Sequence
  Description of Artificial Sequence: Synthetic oligonucleotide
  Target: LAMA2; (-) strand; PAM type: NNGRRT; PAM sequence: CAGGGT
cacactgacacctcacatgg

SEQ ID NO: 16552 - DNA, 20 bp, Artificial Sequence
  Description of Artificial Sequence: Synthetic oligonucleotide
  Target: LAMA2; (-) strand; PAM type: NNGRRT; PAM sequence: GTGGGT
cgggcagactgcctcctcaa

SEQ ID NO: 16553 - DNA, 20 bp, Artificial Sequence
  Description of Artificial Sequence: Synthetic oligonucleotide
  Target: LAMA2; (-) strand; PAM type: NNGRRT; PAM sequence: CTGGGT
aagcagccgggaagctcgaa

SEQ ID NO: 16554 - DNA, 20 bp, Artificial Sequence
  Description of Artificial Sequence: Synthetic oligonucleotide
  Target: LAMA2; (-) strand; PAM type: NNGRRT; PAM sequence: CGGAGT
ctgggaaggtactacgccca

SEQ ID NO: 16555 - DNA, 20 bp, Artificial Sequence
  Description of Artificial Sequence: Synthetic oligonucleotide
  Target: LAMA2; (-) strand; PAM type: NNGRRT; PAM sequence: CCGAAT
gaaaatctggtcactcccac

SEQ ID NO: 16556 - DNA, 20 bp, Artificial Sequence
  Description of Artificial Sequence: Synthetic oligonucleotide
  Target: LAMA2; (-) strand; PAM type: NNGRRT; PAM sequence: AGGGGT
tccctttcctagtcaaagaa

SEQ ID NO: 16557 - DNA, 20 bp, Artificial Sequence
  Description of Artificial Sequence: Synthetic oligonucleotide
  Target: LAMA2; (-) strand; PAM type: NNGRRT; PAM sequence: GGGAGT
tcgggaagcgcaaggggtca

SEQ ID NO: 16558 - DNA, 20 bp, Artificial Sequence
  Description of Artificial Sequence: Synthetic oligonucleotide
  Target: LAMA2; (-) strand; PAM type: NNGRRT; PAM sequence: AGGGGT
tgcctcactcgggaagcgca

SEQ ID NO: 16559 - DNA, 20 bp, Artificial Sequence
  Description of Artificial Sequence: Synthetic oligonucleotide
  Target: LAMA2; (-) strand; PAM type: NNGRRT; PAM sequence: CAGGGT
gcaccgtgcgtgagccgaag

SEQ ID NO: 16560 - DNA, 20 bp, Artificial Sequence
  Description of Artificial Sequence: Synthetic oligonucleotide
  Target: LAMA2; (-) strand; PAM type: NNGRRT; PAM sequence: GTGGGT
cagacagtgggcgcaggtca

SEQ ID NO: 16561 - DNA, 20 bp, Artificial Sequence
  Description of Artificial Sequence: Synthetic oligonucleotide
  Target: LAMA2; (-) strand; PAM type: NNGRRT; PAM sequence: AGGAAT
gtaccgggttcatctcacta

SEQ ID NO: 16562 - DNA, 20 bp, Artificial Sequence
  Description of Artificial Sequence: Synthetic oligonucleotide
  Target: LAMA2; (-) strand; PAM type: NNGRRT; PAM sequence: CCGGGT
ctgcttttccatctgaggta

SEQ ID NO: 16563 - DNA, 20 bp, Artificial Sequence
  Description of Artificial Sequence: Synthetic oligonucleotide
  Target: LAMA2; (-) strand; PAM type: NNGRRT; PAM sequence: CCGAAT
taggggaggagccaagatgg

SEQ ID NO: 16564 - DNA, 20 bp, Artificial Sequence
  Description of Artificial Sequence: Synthetic oligonucleotide
  Target: LAMA2; (-) strand; PAM type: NNGRRT; PAM sequence: ATGGGT
gttgttgggctgacggttat

SEQ ID NO: 16565 - DNA, 20 bp, Artificial Sequence
  Description of Artificial Sequence: Synthetic oligonucleotide
  Target: LAMA2; (-) strand; PAM type: NNGRRT; PAM sequence: AAGAGT
acagatgaaactaatcagat

SEQ ID NO: 16566 - DNA, 20 bp, Artificial Sequence
  Description of Artificial Sequence: Synthetic oligonucleotide
  Target: LAMA2; (-) strand; PAM type: NNGRRT; PAM sequence: CTGGGT
tgatttttacagacagtaga

SEQ ID NO: 16567 - DNA, 20 bp, Artificial Sequence
  Description of Artificial Sequence: Synthetic oligonucleotide
  Target: LAMA2; (-) strand; PAM type: NNGRRT; PAM sequence: ATGAAT
atattgatggatgcaaaaac

SEQ ID NO: 16568 - DNA, 20 bp, Artificial Sequence
  Description of Artificial Sequence: Synthetic oligonucleotide
  Target: LAMA2; (-) strand; PAM type: NNGRRT; PAM sequence: ATGGAT
ttaaaaggagcaaaatattg

SEQ ID NO: 16569 - DNA, 20 bp, Artificial Sequence
  Description of Artificial Sequence: Synthetic oligonucleotide
  Target: LAMA2; (-) strand; PAM type: NNGRRT; PAM sequence: AGGAAT
acattttttccatgcaaccc

SEQ ID NO: 16570 - DNA, 20 bp, Artificial Sequence
  Description of Artificial Sequence: Synthetic oligonucleotide
  Target: LAMA2; (-) strand; PAM type: NNGRRT; PAM sequence: AAGAAT
ctctgttttatatacctatg

SEQ ID NO: 16571 - DNA, 20 bp, Artificial Sequence
  Description of Artificial Sequence: Synthetic oligonucleotide
  Target: LAMA2; (-) strand; PAM type: NNGRRT; PAM sequence: ATGAAT
agattttaaacaactaacaa

SEQ ID NO: 16572 - DNA, 20 bp, Artificial Sequence
  Description of Artificial Sequence: Synthetic oligonucleotide
  Target: LAMA2; (-) strand; PAM type: NNGRRT; PAM sequence: TGGGAT
ttcttatttaatgaataaat

SEQ ID NO: 16573 - DNA, 20 bp, Artificial Sequence
  Description of Artificial Sequence: Synthetic oligonucleotide
  Target: LAMA2; (-) strand; PAM type: NNGRRT; PAM sequence: ATGAAT
cattgacacattcttattta

SEQ ID NO: 16574 - DNA, 20 bp, Artificial Sequence
  Description of Artificial Sequence: Synthetic oligonucleotide
  Target: LAMA2; (-) strand; PAM type: NNGRRT; PAM sequence: TGGAGT
gtcttgctcatctttgtatt

SEQ ID NO: 16575 - DNA, 20 bp, Artificial Sequence
  Description of Artificial Sequence: Synthetic oligonucleotide
  Target: LAMA2; (-) strand; PAM type: NNGRRT; PAM sequence: ATGAAT
tccacattcagcctgactgt

SEQ ID NO: 16576 - DNA, 20 bp, Artificial Sequence
  Description of Artificial Sequence: Synthetic oligonucleotide
  Target: LAMA2; (-) strand; PAM type: NNGRRT; PAM sequence: CAGAAT
tggaaatgtttctacttccc

SEQ ID NO: 16577 - DNA, 20 bp, Artificial Sequence
  Description of Artificial Sequence: Synthetic oligonucleotide
  Target: LAMA2; (-) strand; PAM type: NNGRRT; PAM sequence: GTGGAT
actttaattaatctctcaga

SEQ ID NO: 16578 - DNA, 20 bp, Artificial Sequence
  Description of Artificial Sequence: Synthetic oligonucleotide
  Target: LAMA2; (-) strand; PAM type: NNGRRT; PAM sequence: CAGAGT
cttcactttaattaatctct

SEQ ID NO: 16579 - DNA, 20 bp, Artificial Sequence
  Description of Artificial Sequence: Synthetic oligonucleotide
  Target: LAMA2; (-) strand; PAM type: NNGRRT; PAM sequence: TAGAAT
ttaaaaggtctccagctact

SEQ ID NO: 16580 - DNA, 20 bp, Artificial Sequence
  Description of Artificial Sequence: Synthetic oligonucleotide
  Target: LAMA2; (-) strand; PAM type: NNGRRT; PAM sequence: TGGGGT
atgattggttatatcaatga

SEQ ID NO: 16581 - DNA, 20 bp, Artificial Sequence
  Description of Artificial Sequence: Synthetic oligonucleotide
  Target: LAMA2; (-) strand; PAM type: NNGRRT; PAM sequence: TCGAAT
ttagagacaaagtacaccag

SEQ ID NO: 16582 - DNA, 20 bp, Artificial Sequence
  Description of Artificial Sequence: Synthetic oligonucleotide
  Target: LAMA2; (-) strand; PAM type: NNGRRT; PAM sequence: AGGAGT
aagtcacagccagaagcctg

SEQ ID NO: 16583 - DNA, 20 bp, Artificial Sequence
  Description of Artificial Sequence: Synthetic oligonucleotide
  Target: LAMA2; (-) strand; PAM type: NNGRRT; PAM sequence: TGGAAT
acaagtacacacttttaaaa

SEQ ID NO: 16584 - DNA, 20 bp, Artificial Sequence
  Description of Artificial Sequence: Synthetic oligonucleotide
  Target: LAMA2; (-) strand; PAM type: NNGRRT; PAM sequence: AAGAAT
cacaaattgattccagaagt

SEQ ID NO: 16585 - DNA, 20 bp, Artificial Sequence
  Description of Artificial Sequence: Synthetic oligonucleotide
  Target: LAMA2; (-) strand; PAM type: NNGRRT; PAM sequence: ACGAAT
atagagcgtttccataacag

SEQ ID NO: 16586 - DNA, 20 bp, Artificial Sequence
  Description of Artificial Sequence: Synthetic oligonucleotide
  Target: LAMA2; (-) strand; PAM type: NNGRRT; PAM sequence: CTGAAT
cccacagcagaagaggatag

SEQ ID NO: 16587 - DNA, 20 bp, Artificial Sequence
  Description of Artificial Sequence: Synthetic oligonucleotide
  Target: LAMA2; (-) strand; PAM type: NNGRRT; PAM sequence: GAGGAT
tgcttatacccacagcagaa

SEQ ID NO: 16588 - DNA, 20 bp, Artificial Sequence
  Description of Artificial Sequence: Synthetic oligonucleotide
  Target: LAMA2; (-) strand; PAM type: NNGRRT; PAM sequence: CTGGGT
tttatttttctaatttttgc

SEQ ID NO: 16589 - DNA, 20 bp, Artificial Sequence
  Description of Artificial Sequence: Synthetic oligonucleotide
  Target: LAMA2; (-) strand; PAM type: NNGRRT; PAM sequence: GGGAGT
ttgaggaaaaaaatggataa

SEQ ID NO: 16590 - DNA, 20 bp, Artificial Sequence
  Description of Artificial Sequence: Synthetic oligonucleotide
  Target: LAMA2; (-) strand; PAM type: NNGRRT; PAM sequence: ATGGAT
taataaccttgaggaaaaaa

SEQ ID NO: 16591 - DNA, 20 bp, Artificial Sequence
  Description of Artificial Sequence: Synthetic oligonucleotide
  Target: LAMA2; (-) strand; PAM type: NNGRRT; PAM sequence: GGGAGT
cccagaaccagctggttttt

SEQ ID NO: 16592 - DNA, 20 bp, Artificial Sequence
  Description of Artificial Sequence: Synthetic oligonucleotide
  Target: LAMA2; (-) strand; PAM type: NNGRRT; PAM sequence: GAGGAT
tattacatatatatgagata

SEQ ID NO: 16593 - DNA, 20 bp, Artificial Sequence
  Description of Artificial Sequence: Synthetic oligonucleotide
  Target: LAMA2; (-) strand; PAM type: NNGRRT; PAM sequence: TAGGAT
agacatggttggaactggac

SEQ ID NO: 16594 - DNA, 20 bp, Artificial Sequence
  Description of Artificial Sequence: Synthetic oligonucleotide
  Target: LAMA2; (-) strand; PAM type: NNGRRT; PAM sequence: AAGAAT
tcacctaaagtctctagtaa

SEQ ID NO: 16595 - DNA, 20 bp, Artificial Sequence
  Description of Artificial Sequence: Synthetic oligonucleotide
  Target: LAMA2; (-) strand; PAM type: NNGRRT; PAM sequence: CTGAAT
aatataatattaatattcta

SEQ ID NO: 16596 - DNA, 20 bp, Artificial Sequence
  Description of Artificial Sequence: Synthetic oligonucleotide
  Target: LAMA2; (-) strand; PAM type: NNGRRT; PAM sequence: TAGGGT
accttatctctaccactgaa

SEQ ID NO: 16597 - DNA, 20 bp, Artificial Sequence
  Description of Artificial Sequence: Synthetic oligonucleotide
  Target: LAMA2; (-) strand; PAM type: NNGRRT; PAM sequence: CTGAAT
tctcaaccttatctctacca

SEQ ID NO: 16598 - DNA, 20 bp, Artificial Sequence
  Description of Artificial Sequence: Synthetic oligonucleotide
  Target: LAMA2; (-) strand; PAM type: NNGRRT; PAM sequence: GTGAGT
tttcagcatttggccaaata

SEQ ID NO: 16599 - DNA, 20 bp, Artificial Sequence
  Description of Artificial Sequence: Synthetic oligonucleotide
  Target: LAMA2; (-) strand; PAM type: NNGRRT; PAM sequence: CTGAGT
tgccttgtttatgtcaatgt

SEQ ID NO: 16600 - DNA, 20 bp, Artificial Sequence
  Description of Artificial Sequence: Synthetic oligonucleotide
  Target: LAMA2; (-) strand; PAM type: NNGRRT; PAM sequence: AAGAAT
tatgtatttttttaaagaaa

SEQ ID NO: 16601 - DNA, 20 bp, Artificial Sequence
  Description of Artificial Sequence: Synthetic oligonucleotide
  Target: LAMA2; (-) strand; PAM type: NNGRRT; PAM sequence: TAGAAT
agaatcagaaacgctttgca

SEQ ID NO: 16602 - DNA, 20 bp, Artificial Sequence
  Description of Artificial Sequence: Synthetic oligonucleotide
  Target: LAMA2; (-) strand; PAM type: NNGRRT; PAM sequence: GAGAAT
gctgttccacaaaatactaa

SEQ ID NO: 16603 - DNA, 20 bp, Artificial Sequence
  Description of Artificial Sequence: Synthetic oligonucleotide
  Target: LAMA2; (-) strand; PAM type: NNGRRT; PAM sequence: AAGGGT
ttcaaatatagaagaaaaga

SEQ ID NO: 16604 - DNA, 20 bp, Artificial Sequence
  Description of Artificial Sequence: Synthetic oligonucleotide
  Target: LAMA2; (-) strand; PAM type: NNGRRT; PAM sequence: TCGAGT
ctgtttaagtaatactccca

SEQ ID NO: 16605 - DNA, 20 bp, Artificial Sequence
  Description of Artificial Sequence: Synthetic oligonucleotide
  Target: LAMA2; (-) strand; PAM type: NNGRRT; PAM sequence: TTGGAT
aaatatacaactataaagac

SEQ ID NO: 16606 - DNA, 20 bp, Artificial Sequence
  Description of Artificial Sequence: Synthetic oligonucleotide
  Target: LAMA2; (-) strand; PAM type: NNGRRT; PAM sequence: TTGAAT
gtacacatgcaattaaatat

SEQ ID NO: 16607 - DNA, 20 bp, Artificial Sequence
  Description of Artificial Sequence: Synthetic oligonucleotide
  Target: LAMA2; (-) strand; PAM type: NNGRRT; PAM sequence: ATGAAT
ccaacccaacaaatgggaat

SEQ ID NO: 16608 - DNA, 20 bp, Artificial Sequence
  Description of Artificial Sequence: Synthetic oligonucleotide
  Target: LAMA2; (-) strand; PAM type: NNGRRT; PAM sequence: GGGAAT
tgcctaccaacccaacaaat

SEQ ID NO: 16609 - DNA, 20 bp, Artificial Sequence
  Description of Artificial Sequence: Synthetic oligonucleotide
  Target: LAMA2; (-) strand; PAM type: NNGRRT; PAM sequence: TGGAGT
tctgattattatatttattt

SEQ ID NO: 16610 - DNA, 20 bp, Artificial Sequence
  Description of Artificial Sequence: Synthetic oligonucleotide
  Target: LAMA2; (-) strand; PAM type: NNGRRT; PAM sequence: TTGAAT
ctaacttaaaaaagcaatca

SEQ ID NO: 16611 - DNA, 20 bp, Artificial Sequence
  Description of Artificial Sequence: Synthetic oligonucleotide
  Target: LAMA2; (-) strand; PAM type: NNGRRT; PAM sequence: TAGGAT
tcaaatgcttctcagagttg

SEQ ID NO: 16612 - DNA, 20 bp, Artificial Sequence
  Description of Artificial Sequence: Synthetic oligonucleotide
  Target: LAMA2; (-) strand; PAM type: NNGRRT; PAM sequence: CAGAGT
tgccaacatcaaatgcttct

SEQ ID NO: 16613 - DNA, 20 bp, Artificial Sequence
  Description of Artificial Sequence: Synthetic oligonucleotide
  Target: LAMA2; (-) strand; PAM type: NNGRRT; PAM sequence: CTGAAT
atgttcagatggaaaagatg

SEQ ID NO: 16614 - DNA, 20 bp, Artificial Sequence
  Description of Artificial Sequence: Synthetic oligonucleotide
  Target: LAMA2; (-) strand; PAM type: NNGRRT; PAM sequence: TTGAAT
caacaggtttcccatttgac

SEQ ID NO: 16615 - DNA, 20 bp, Artificial Sequence
  Description of Artificial Sequence: Synthetic oligonucleotide
  Target: LAMA2; (-) strand; PAM type: NNGRRT; PAM sequence: GAGGAT
ggtggaataaaaacaaatgt

SEQ ID NO: 16616 - DNA, 20 bp, Artificial Sequence
  Description of Artificial Sequence: Synthetic oligonucleotide
  Target: LAMA2; (-) strand; PAM type: NNGRRT; PAM sequence: TGGAAT
gtggatcaaggtagatatgg

SEQ ID NO: 16617 - DNA, 20 bp, Artificial Sequence
  Description of Artificial Sequence: Synthetic oligonucleotide
  Target: LAMA2; (-) strand; PAM type: NNGRRT; PAM sequence: GTGGAT
aaaaaaatgaaaagaatcag

SEQ ID NO: 16618 - DNA, 20 bp, Artificial Sequence
  Description of Artificial Sequence: Synthetic oligonucleotide
  Target: LAMA2; (-) strand; PAM type: NNGRRT; PAM sequence: AAGAAT
gaatgaaagaaaaaaatgaa

SEQ ID NO: 16619 - DNA, 20 bp, Artificial Sequence
  Description of Artificial Sequence: Synthetic oligonucleotide
  Target: LAMA2; (-) strand; PAM type: NNGRRT; PAM sequence: GAGAAT
ggaaagaaagccagcacaaa

SEQ ID NO: 16620 - DNA, 20 bp, Artificial Sequence
  Description of Artificial Sequence: Synthetic oligonucleotide
  Target: LAMA2; (-) strand; PAM type: NNGRRT; PAM sequence: TGGGAT
gaagagatgatgagatacca

SEQ ID NO: 16621 - DNA, 20 bp, Artificial Sequence
  Description of Artificial Sequence: Synthetic oligonucleotide
  Target: LAMA2; (-) strand; PAM type: NNGRRT; PAM sequence: TAGAAT
tcaatttcatgttctatttg

SEQ ID NO: 16622 - DNA, 20 bp, Artificial Sequence
  Description of Artificial Sequence: Synthetic oligonucleotide
  Target: LAMA2; (-) strand; PAM type: NNGRRT; PAM sequence: GTGGAT
gtactcaaccaattttgcat

SEQ ID NO: 16623 - DNA, 20 bp, Artificial Sequence
  Description of Artificial Sequence: Synthetic oligonucleotide
  Target: LAMA2; (-) strand; PAM type: NNGRRT; PAM sequence: CAGAAT
atgacttttaattgagaatg

SEQ ID NO: 16624 - DNA, 20 bp, Artificial Sequence
  Description of Artificial Sequence: Synthetic oligonucleotide
  Target: LAMA2; (-) strand; PAM type: NNGRRT; PAM sequence: GAGAAT
agataaaatgacttttaatt

SEQ ID NO: 16625 - DNA, 20 bp, Artificial Sequence
  Description of Artificial Sequence: Synthetic oligonucleotide
  Target: LAMA2; (-) strand; PAM type: NNGRRT; PAM sequence: AGGAAT
aattcatttgttgcttaaaa

SEQ ID NO: 16626 - DNA, 20 bp, Artificial Sequence
  Description of Artificial Sequence: Synthetic oligonucleotide
  Target: LAMA2; (-) strand; PAM type: NNGRRT; PAM sequence: GAGAGT
aaaaggacagataatagggt

SEQ ID NO: 16627 - DNA, 20 bp, Artificial Sequence
  Description of Artificial Sequence: Synthetic oligonucleotide
  Target: LAMA2; (-) strand; PAM type: NNGRRT; PAM sequence: TAGGGT
aaaagaaaaaggacagataa

SEQ ID NO: 16628 - DNA, 20 bp, Artificial Sequence
  Description of Artificial Sequence: Synthetic oligonucleotide
  Target: LAMA2; (-) strand; PAM type: NNGRRT; PAM sequence: CGGAGT
ctgcacttcagcctgggcaa

SEQ ID NO: 16629 - DNA, 20 bp, Artificial Sequence
  Description of Artificial Sequence: Synthetic oligonucleotide
  Target: LAMA2; (-) strand; PAM type: NNGRRT; PAM sequence: GGGAGT
gctagtgaagaggctgaagt

SEQ ID NO: 16630 - DNA, 20 bp, Artificial Sequence
  Description of Artificial Sequence: Synthetic oligonucleotide
  Target: LAMA2; (-) strand; PAM type: NNGRRT; PAM sequence: TGGGGT
aaatagaaaaattagccagg

SEQ ID NO: 16631 - DNA, 20 bp, Artificial Sequence
  Description of Artificial Sequence: Synthetic oligonucleotide
  Target: LAMA2; (-) strand; PAM type: NNGRRT; PAM sequence: AGGAGT
ggggaggattgtttgagccc

SEQ ID NO: 16632 - DNA, 20 bp, Artificial Sequence
  Description of Artificial Sequence: Synthetic oligonucleotide
  Target: LAMA2; (-) strand; PAM type: NNGRRT; PAM sequence: GAGGAT
ctatgggaggccgaggtggg

SEQ ID NO: 16633 - DNA, 20 bp, Artificial Sequence
  Description of Artificial Sequence: Synthetic oligonucleotide
  Target: LAMA2; (-) strand; PAM type: NNGRRT; PAM sequence: AAGAAT
tagaagaaacaagaaatatt

SEQ ID NO: 16634 - DNA, 20 bp, Artificial Sequence
  Description of Artificial Sequence: Synthetic oligonucleotide
  Target: LAMA2; (-) strand; PAM type: NNGRRT; PAM sequence: ACGAGT
acccataccactttataaca

SEQ ID NO: 16635 - DNA, 20 bp, Artificial Sequence
  Description of Artificial Sequence: Synthetic oligonucleotide
  Target: LAMA2; (-) strand; PAM type: NNGRRT; PAM sequence: AAGAAT
aacatcattactttgggaag

SEQ ID NO: 16636 - DNA, 20 bp, Artificial Sequence
  Description of Artificial Sequence: Synthetic oligonucleotide
  Target: LAMA2; (-) strand; PAM type: NNGRRT; PAM sequence: TTGAAT
agaagtcctactttactaaa

SEQ ID NO: 16637 - DNA, 20 bp, Artificial Sequence
  Description of Artificial Sequence: Synthetic oligonucleotide
  Target: LAMA2; (-) strand; PAM type: NNGRRT; PAM sequence: CTGAAT
taaaaagtttaccttagatc

SEQ ID NO: 16638 - DNA, 20 bp, Artificial Sequence
  Description of Artificial Sequence: Synthetic oligonucleotide
  Target: LAMA2; (-) strand; PAM type: NNGRRT; PAM sequence: ATGAAT
gttttcagataaacacaacc

SEQ ID NO: 16639 - DNA, 20 bp, Artificial Sequence
  Description of Artificial Sequence: Synthetic oligonucleotide
  Target: LAMA2; (-) strand; PAM type: NNGRRT; PAM sequence: TAGAAT
taatttcacttgagatgatt

SEQ ID NO: 16640 - DNA, 20 bp, Artificial Sequence
  Description of Artificial Sequence: Synthetic oligonucleotide
  Target: LAMA2; (-) strand; PAM type: NNGRRT; PAM sequence: AGGAGT
gatagtgtttacgggaggat

SEQ ID NO: 16641 - DNA, 20 bp, Artificial Sequence
  Description of Artificial Sequence: Synthetic oligonucleotide
  Target: LAMA2; (-) strand; PAM type: NNGRRT; PAM sequence: GAGGAT
tttctagatagtgtttacgg

SEQ ID NO: 16642 - DNA, 20 bp, Artificial Sequence
  Description of Artificial Sequence: Synthetic oligonucleotide
  Target: LAMA2; (-) strand; PAM type: NNGRRT; PAM sequence: TTGGGT
gtttttagttctacaatagg

SEQ ID NO: 16643 - DNA, 20 bp, Artificial Sequence
  Description of Artificial Sequence: Synthetic oligonucleotide
  Target: LAMA2; (-) strand; PAM type: NNGRRT; PAM sequence: GGGAAT
gaatattatatttgttacaa

SEQ ID NO: 16644 - DNA, 20 bp, Artificial Sequence
  Description of Artificial Sequence: Synthetic oligonucleotide
  Target: LAMA2; (-) strand; PAM type: NNGRRT; PAM sequence: GTGAAT
tacattttttgcacaatgct

SEQ ID NO: 16645 - DNA, 20 bp, Artificial Sequence
  Description of Artificial Sequence: Synthetic oligonucleotide
  Target: LAMA2; (-) strand; PAM type: NNGRRT; PAM sequence: CAGAGT
ccctaaggaaactgggggct

SEQ ID NO: 16646 - DNA, 20 bp, Artificial Sequence
  Description of Artificial Sequence: Synthetic oligonucleotide
  Target: LAMA2; (-) strand; PAM type: NNGRRT; PAM sequence: CTGGAT
gaaaagtaactgaaaaatta

SEQ ID NO: 16647 - DNA, 20 bp, Artificial Sequence
  Description of Artificial Sequence: Synthetic oligonucleotide
  Target: LAMA2; (-) strand; PAM type: NNGRRT; PAM sequence: CAGGAT
cctacgttgatacatttaat

SEQ ID NO: 16648 - DNA, 20 bp, Artificial Sequence
  Description of Artificial Sequence: Synthetic oligonucleotide
  Target: LAMA2; (-) strand; PAM type: NNGRRT; PAM sequence: AAGGAT
ggaactgaatttgtaccagg

SEQ ID NO: 16649 - DNA, 20 bp, Artificial Sequence
  Description of Artificial Sequence: Synthetic oligonucleotide
  Target: LAMA2; (-) strand; PAM type: NNGRRT; PAM sequence: CTGAAT
tttgaggttactgtggggaa

SEQ ID NO: 16650 - DNA, 20 bp, Artificial Sequence
  Description of Artificial Sequence: Synthetic oligonucleotide
  Target: LAMA2; (-) strand; PAM type: NNGRRT; PAM sequence: ATGAGT
gatgggagaggagaaacatc

SEQ ID NO: 16651 - DNA, 20 bp, Artificial Sequence
  Description of Artificial Sequence: Synthetic oligonucleotide
  Target: LAMA2; (-) strand; PAM type: NNGRRT; PAM sequence: ATGAGT
atccaagaaccacaatccca

SEQ ID NO: 16652 - DNA, 20 bp, Artificial Sequence
  Description of Artificial Sequence: Synthetic oligonucleotide
  Target: LAMA2; (-) strand; PAM type: NNGRRT; PAM sequence: CAGGAT
agtgagaatagtggtattat

SEQ ID NO: 16653 - DNA, 20 bp, Artificial Sequence
  Description of Artificial Sequence: Synthetic oligonucleotide
  Target: LAMA2; (-) strand; PAM type: NNGRRT; PAM sequence: GAGAAT
taatgatgttgatgactagt

SEQ ID NO: 16654 - DNA, 20 bp, Artificial Sequence
  Description of Artificial Sequence: Synthetic oligonucleotide
  Target: LAMA2; (-) strand; PAM type: NNGRRT; PAM sequence: TAGGAT
actaatagattttaaggaac

SEQ ID NO: 16655 - DNA, 20 bp, Artificial Sequence
  Description of Artificial Sequence: Synthetic oligonucleotide
  Target: LAMA2; (-) strand; PAM type: NNGRRT; PAM sequence: CTGAAT
agttgtgagatgatggtggc

SEQ ID NO: 16656 - DNA, 20 bp, Artificial Sequence
  Description of Artificial Sequence: Synthetic oligonucleotide
  Target: LAMA2; (-) strand; PAM type: NNGRRT; PAM sequence: AAGAAT
gggagggctaaattgcaagc

SEQ ID NO: 16657 - DNA, 20 bp, Artificial Sequence
  Description of Artificial Sequence: Synthetic oligonucleotide
  Target: LAMA2; (-) strand; PAM type: NNGRRT; PAM sequence: AGGAAT
catgacagcattttagagag

SEQ ID NO: 16658 - DNA, 20 bp, Artificial Sequence
  Description of Artificial Sequence: Synthetic oligonucleotide
  Target: LAMA2; (-) strand; PAM type: NNGRRT; PAM sequence: TTGGAT
ataaatcacattaacagagc

SEQ ID NO: 16659 - DNA, 20 bp, Artificial Sequence
  Description of Artificial Sequence: Synthetic oligonucleotide
  Target: LAMA2; (-) strand; PAM type: NNGRRT; PAM sequence: TGGGAT
cagggctgtcagagactaac

SEQ ID NO: 16660 - DNA, 20 bp, Artificial Sequence
  Description of Artificial Sequence: Synthetic oligonucleotide
  Target: LAMA2; (-) strand; PAM type: NNGRRT; PAM sequence: GAGAAT
atctaaaccagtccacttct

SEQ ID NO: 16661 - DNA, 20 bp, Artificial Sequence
  Description of Artificial Sequence: Synthetic oligonucleotide
  Target: LAMA2; (-) strand; PAM type: NNGRRT; PAM sequence: ATGGAT
taaatccaaaggaattcaga

SEQ ID NO: 16662 - DNA, 20 bp, Artificial Sequence
  Description of Artificial Sequence: Synthetic oligonucleotide
  Target: LAMA2; (-) strand; PAM type: NNGRRT; PAM sequence: CAGAAT
tccataaatccaaaggaatt

SEQ ID NO: 16663 - DNA, 20 bp, Artificial Sequence
  Description of Artificial Sequence: Synthetic oligonucleotide
  Target: LAMA2; (-) strand; PAM type: NNGRRT; PAM sequence: AGGAAT
gatatattccataaatccaa

SEQ ID NO: 16664 - DNA, 20 bp, Artificial Sequence
  Description of Artificial Sequence: Synthetic oligonucleotide
  Target: LAMA2; (-) strand; PAM type: NNGRRT; PAM sequence: CTGGGT
tcgcagcactgcactccagc

SEQ ID NO: 16665 - DNA, 20 bp, Artificial Sequence
  Description of Artificial Sequence: Synthetic oligonucleotide
  Target: LAMA2; (-) strand; PAM type: NNGRRT; PAM sequence: GAGAAT
tactctagaggctgaggaag

SEQ ID NO: 16666 - DNA, 20 bp, Artificial Sequence
  Description of Artificial Sequence: Synthetic oligonucleotide
  Target: LAMA2; (-) strand; PAM type: NNGRRT; PAM sequence: GCGAAT
actttgggagcctgaggcgg

SEQ ID NO: 16667 - DNA, 20 bp, Artificial Sequence
  Description of Artificial Sequence: Synthetic oligonucleotide
  Target: LAMA2; (-) strand; PAM type: NNGRRT; PAM sequence: ATGGGT
aggggaagaatagagccaat

SEQ ID NO: 16668 - DNA, 20 bp, Artificial Sequence
  Description of Artificial Sequence: Synthetic oligonucleotide
  Target: LAMA2; (-) strand; PAM type: NNGRRT; PAM sequence: AAGAAT
gaaaagggtttgattagggg

SEQ ID NO: 16669 - DNA, 20 bp, Artificial Sequence
  Description of Artificial Sequence: Synthetic oligonucleotide
  Target: LAMA2; (-) strand; PAM type: NNGRRT; PAM sequence: AAGGGT
taaacatggttaattgggaa

SEQ ID NO: 16670 - DNA, 20 bp, Artificial Sequence
  Description of Artificial Sequence: Synthetic oligonucleotide
  Target: LAMA2; (-) strand; PAM type: NNGRRT; PAM sequence: TAGGAT
ctaaaaggaagcacataaac

SEQ ID NO: 16671 - DNA, 20 bp, Artificial Sequence
  Description of Artificial Sequence: Synthetic oligonucleotide
  Target: LAMA2; (-) strand; PAM type: NNGRRT; PAM sequence: ATGAAT
ctaaagttgtattttgtctc

SEQ ID NO: 16672 - DNA, 20 bp, Artificial Sequence
  Description of Artificial Sequence: Synthetic oligonucleotide
  Target: LAMA2; (-) strand; PAM type: NNGRRT; PAM sequence: TGGAAT
acaggatcgatgatcagaaa

SEQ ID NO: 16673 - DNA, 20 bp, Artificial Sequence
  Description of Artificial Sequence: Synthetic oligonucleotide
  Target: LAMA2; (-) strand; PAM type: NNGRRT; PAM sequence: CAGGAT
tgcaagcaatagtgcaaaga

SEQ ID NO: 16674 - DNA, 20 bp, Artificial Sequence
  Description of Artificial Sequence: Synthetic oligonucleotide
  Target: LAMA2; (-) strand; PAM type: NNGRRT; PAM sequence: ATGGAT
ctggaagtaaatcttataaa

SEQ ID NO: 16675 - DNA, 20 bp, Artificial Sequence
  Description of Artificial Sequence: Synthetic oligonucleotide
  Target: LAMA2; (-) strand; PAM type: NNGRRT; PAM sequence: AAGGAT
gacttcaacatttctttttg

SEQ ID NO: 16676 - DNA, 20 bp, Artificial Sequence
  Description of Artificial Sequence: Synthetic oligonucleotide
  Target: LAMA2; (-) strand; PAM type: NNGRRT; PAM sequence: TGGGGT
aggtcacattcatagttacc

SEQ ID NO: 16677 - DNA, 20 bp, Artificial Sequence
  Description of Artificial Sequence: Synthetic oligonucleotide
  Target: LAMA2; (-) strand; PAM type: NNGRRT; PAM sequence: CAGGGT
tgataccagtcatattggat

SEQ ID NO: 16678 - DNA, 20 bp, Artificial Sequence
  Description of Artificial Sequence: Synthetic oligonucleotide
  Target: LAMA2; (-) strand; PAM type: NNGRRT; PAM sequence: TTGGAT
cttctatgataccagtcata

SEQ ID NO: 16679 - DNA, 20 bp, Artificial Sequence
  Description of Artificial Sequence: Synthetic oligonucleotide
  Target: LAMA2; (-) strand; PAM type: NNGRRT; PAM sequence: GTGGAT
tccttggcattgcttggctt

SEQ ID NO: 16680 - DNA, 20 bp, Artificial Sequence
  Description of Artificial Sequence: Synthetic oligonucleotide
  Target: LAMA2; (-) strand; PAM type: NNGRRT; PAM sequence: GTGGGT
taatgctagatgacgagtta

SEQ ID NO: 16681 - DNA, 20 bp, Artificial Sequence
  Description of Artificial Sequence: Synthetic oligonucleotide
  Target: LAMA2; (-) strand; PAM type: NNGRRT; PAM sequence: ACGAGT
gatatacctaatgctagatg

SEQ ID NO: 16682 - DNA, 20 bp, Artificial Sequence
  Description of Artificial Sequence: Synthetic oligonucleotide
  Target: LAMA2; (-) strand; PAM type: NNGRRT; PAM sequence: AGGGAT
gtggggtggggggaggggga

SEQ ID NO: 16683 - DNA, 20 bp, Artificial Sequence
  Description of Artificial Sequence: Synthetic oligonucleotide
  Target: LAMA2; (-) strand; PAM type: NNGRRT; PAM sequence: TGGGGT
tcacactctggggactgttg

SEQ ID NO: 16684 - DNA, 20 bp, Artificial Sequence
  Description of Artificial Sequence: Synthetic oligonucleotide
  Target: LAMA2; (-) strand; PAM type: NNGRRT; PAM sequence: GGGAAT
gcatattctcactcataggt

SEQ ID NO: 16685 - DNA, 20 bp, Artificial Sequence
  Description of Artificial Sequence: Synthetic oligonucleotide
  Target: LAMA2; (-) strand; PAM type: NNGRRT; PAM sequence: ATGGAT
ttcatgtgctttgtagggcc

SEQ ID NO: 16686 - DNA, 20 bp, Artificial Sequence
  Description of Artificial Sequence: Synthetic oligonucleotide
  Target: LAMA2; (-) strand; PAM type: NNGRRT; PAM sequence: ATGAGT
ctatgcagccataaaaaatg

SEQ ID NO: 16687 - DNA, 20 bp, Artificial Sequence
  Description of Artificial Sequence: Synthetic oligonucleotide
  Target: LAMA2; (-) strand; PAM type: NNGRRT; PAM sequence: TGGAAT
aatgtggcacatatacacca

SEQ ID NO: 16688 - DNA, 20 bp, Artificial Sequence
  Description of Artificial Sequence: Synthetic oligonucleotide
  Target: LAMA2; (-) strand; PAM type: NNGRRT; PAM sequence: CTGGGT
ttgacccagccatcccatta

SEQ ID NO: 16689 - DNA, 20 bp, Artificial Sequence
  Description of Artificial Sequence: Synthetic oligonucleotide
  Target: LAMA2; (-) strand; PAM type: NNGRRT; PAM sequence: AGGGAT
agtcagtgtggcgattcctc

SEQ ID NO: 16690 - DNA, 20 bp, Artificial Sequence
  Description of Artificial Sequence: Synthetic oligonucleotide
  Target: LAMA2; (-) strand; PAM type: NNGRRT; PAM sequence: GAGGAT
aggaaacaacaggggctgga

SEQ ID NO: 16691 - DNA, 20 bp, Artificial Sequence
  Description of Artificial Sequence: Synthetic oligonucleotide
  Target: LAMA2; (-) strand; PAM type: NNGRRT; PAM sequence: TAGAAT
agataccatctcacaccagt

SEQ ID NO: 16692 - DNA, 20 bp, Artificial Sequence
  Description of Artificial Sequence: Synthetic oligonucleotide
  Target: LAMA2; (-) strand; PAM type: NNGRRT; PAM sequence: CAGAAT
tctgacaaagggctaatatc

SEQ ID NO: 16693 - DNA, 20 bp, Artificial Sequence
  Description of Artificial Sequence: Synthetic oligonucleotide
  Target: LAMA2; (-) strand; PAM type: NNGRRT; PAM sequence: CAGAGT
acagcaaaagaaactaccag

SEQ ID NO: 16694 - DNA, 20 bp, Artificial Sequence
  Description of Artificial Sequence: Synthetic oligonucleotide
  Target: LAMA2; (-) strand; PAM type: NNGRRT; PAM sequence: TGGGAT
caaaagccaaaatggacaaa

SEQ ID NO: 16695 - DNA, 20 bp, Artificial Sequence
  Description of Artificial Sequence: Synthetic oligonucleotide
  Target: LAMA2; (-) strand; PAM type: NNGRRT; PAM sequence: AAGAAT
aatcaattcaagatggatta

SEQ ID NO: 16696 - DNA, 20 bp, Artificial Sequence
  Description of Artificial Sequence: Synthetic oligonucleotide
  Target: LAMA2; (-) strand; PAM type: NNGRRT; PAM sequence: ATGGAT
tatacaaaaatcaattcaag

SEQ ID NO: 16697 - DNA, 20 bp, Artificial Sequence
  Description of Artificial Sequence: Synthetic oligonucleotide
  Target: LAMA2; (-) strand; PAM type: NNGRRT; PAM sequence: CTGGAT
ccatatgtagaaagctgaaa

SEQ ID NO: 16698 - DNA, 20 bp, Artificial Sequence
  Description of Artificial Sequence: Synthetic oligonucleotide
  Target: LAMA2; (-) strand; PAM type: NNGRRT; PAM sequence: AAGGAT
agaaaaacaagcaatgcgga

SEQ ID NO: 16699 - DNA, 20 bp, Artificial Sequence
  Description of Artificial Sequence: Synthetic oligonucleotide
  Target: LAMA2; (-) strand; PAM type: NNGRRT; PAM sequence: CAGAGT
gctaccaatgactttcttca

SEQ ID NO: 16700 - DNA, 20 bp, Artificial Sequence
  Description of Artificial Sequence: Synthetic oligonucleotide
  Target: LAMA2; (-) strand; PAM type: NNGRRT; PAM sequence: AAGAAT
attccatgctcatgggtagg

SEQ ID NO: 16701 - DNA, 20 bp, Artificial Sequence
  Description of Artificial Sequence: Synthetic oligonucleotide
  Target: LAMA2; (-) strand; PAM type: NNGRRT; PAM sequence: ATGGGT
tggaagaacattccatgctc

SEQ ID NO: 16702 - DNA, 20 bp, Artificial Sequence
  Description of Artificial Sequence: Synthetic oligonucleotide
  Target: LAMA2; (-) strand; PAM type: NNGRRT; PAM sequence: GAGGAT
cactgctcaaggaaataaaa

SEQ ID NO: 16703 - DNA, 20 bp, Artificial Sequence
  Description of Artificial Sequence: Synthetic oligonucleotide
  Target: LAMA2; (-) strand; PAM type: NNGRRT; PAM sequence: AGGGAT
acctaggaatccaacttaca

SEQ ID NO: 16704 - DNA, 20 bp, Artificial Sequence
  Description of Artificial Sequence: Synthetic oligonucleotide
  Target: LAMA2; (-) strand; PAM type: NNGRRT; PAM sequence: AGGAAT
acagacattctaaaatacct

SEQ ID NO: 16705 - DNA, 20 bp, Artificial Sequence
  Description of Artificial Sequence: Synthetic oligonucleotide
  Target: LAMA2; (-) strand; PAM type: NNGRRT; PAM sequence: TTGGAT
tcctttctgtattaaatata

SEQ ID NO: 16706 - DNA, 20 bp, Artificial Sequence
  Description of Artificial Sequence: Synthetic oligonucleotide
  Target: LAMA2; (-) strand; PAM type: NNGRRT; PAM sequence: AGGAAT
ttgagtaattgtgttcttat

SEQ ID NO: 16707 - DNA, 20 bp, Artificial Sequence
  Description of Artificial Sequence: Synthetic oligonucleotide
  Target: LAMA2; (-) strand; PAM type: NNGRRT; PAM sequence: TTGAGT
ctactacagcagattagtga

SEQ ID NO: 16708 - DNA, 20 bp, Artificial Sequence
  Description of Artificial Sequence: Synthetic oligonucleotide
  Target: LAMA2; (-) strand; PAM type: NNGRRT; PAM sequence: GGGGGT
atgctaagattttaagattt

SEQ ID NO: 16709 - DNA, 20 bp, Artificial Sequence
  Description of Artificial Sequence: Synthetic oligonucleotide
  Target: LAMA2; (-) strand; PAM type: NNGRRT; PAM sequence: CTGAGT
agcggaggacaactgggacc

SEQ ID NO: 16710 - DNA, 20 bp, Artificial Sequence
  Description of Artificial Sequence: Synthetic oligonucleotide
  Target: LAMA2; (-) strand; PAM type: NNGRRT; PAM sequence: CTGAGT
gcaaccataaaaggcatttc

SEQ ID NO: 16711 - DNA, 20 bp, Artificial Sequence
  Description of Artificial Sequence: Synthetic oligonucleotide
  Target: LAMA2; (-) strand; PAM type: NNGRRT; PAM sequence: CAGAGT
tagattgtaaaaatgtggag

SEQ ID NO: 16712 - DNA, 20 bp, Artificial Sequence
  Description of Artificial Sequence: Synthetic oligonucleotide
  Target: LAMA2; (-) strand; PAM type: NNGRRT; PAM sequence: GAGGAT
tatgattttaatagatttag

SEQ ID NO: 16713 - DNA, 20 bp, Artificial Sequence
  Description of Artificial Sequence: Synthetic oligonucleotide
  Target: LAMA2; (-) strand; PAM type: NNGRRT; PAM sequence: TAGAAT
tatcaaattaagggagcagc

SEQ ID NO: 16714 - DNA, 20 bp, Artificial Sequence
  Description of Artificial Sequence: Synthetic oligonucleotide
  Target: LAMA2; (-) strand; PAM type: NNGRRT; PAM sequence: AGGGAT
aagcttgtaaaaattatagc

SEQ ID NO: 16715 - DNA, 20 bp, Artificial Sequence
  Description of Artificial Sequence: Synthetic oligonucleotide
  Target: LAMA2; (-) strand; PAM type: NNGRRT; PAM sequence: TTGGGT
caccatgttaatggaaagac

SEQ ID NO: 16716 - DNA, 20 bp, Artificial Sequence
  Description of Artificial Sequence: Synthetic oligonucleotide
  Target: LAMA2; (-) strand; PAM type: NNGRRT; PAM sequence: AAGAGT
aggaatgattttggatggaa

SEQ ID NO: 16717 - DNA, 20 bp, Artificial Sequence
  Description of Artificial Sequence: Synthetic oligonucleotide
  Target: LAMA2; (-) strand; PAM type: NNGRRT; PAM sequence: TTGGAT
atgtttaaataggaatgatt

SEQ ID NO: 16718 - DNA, 20 bp, Artificial Sequence
  Description of Artificial Sequence: Synthetic oligonucleotide
  Target: LAMA2; (-) strand; PAM type: NNGRRT; PAM sequence: AGGAAT
acactaataaatgtttaaat

SEQ ID NO: 16719 - DNA, 20 bp, Artificial Sequence
  Description of Artificial Sequence: Synthetic oligonucleotide
  Target: LAMA2; (-) strand; PAM type: NNGRRT; PAM sequence: TAGAAT
tatgagcagttgaatggtat

SEQ ID NO: 16720 - DNA, 20 bp, Artificial Sequence
  Description of Artificial Sequence: Synthetic oligonucleotide
  Target: LAMA2; (-) strand; PAM type: NNGRRT; PAM sequence: TTGAAT
tctttctcctttatgagcag

SEQ ID NO: 16721 - DNA, 20 bp, Artificial Sequence
  Description of Artificial Sequence: Synthetic oligonucleotide
  Target: LAMA2; (-) strand; PAM type: NNGRRT; PAM sequence: TTGAAT
ttttcctgggatatattttc

SEQ ID NO: 16722 - DNA, 20 bp, Artificial Sequence
  Description of Artificial Sequence: Synthetic oligonucleotide
  Target: LAMA2; (-) strand; PAM type: NNGRRT; PAM sequence: TGGGAT
acaggggattttttttttcc

SEQ ID NO: 16723 - DNA, 20 bp, Artificial Sequence
  Description of Artificial Sequence: Synthetic oligonucleotide
  Target: LAMA2; (-) strand; PAM type: NNGRRT; PAM sequence: GGGGAT
aagctttagtttattataca

SEQ ID NO: 16724 - DNA, 20 bp, Artificial Sequence
  Description of Artificial Sequence: Synthetic oligonucleotide
  Target: LAMA2; (-) strand; PAM type: NNGRRT; PAM sequence: AAGGAT
ttttcatatgagggattaag

SEQ ID NO: 16725 - DNA, 20 bp, Artificial Sequence
  Description of Artificial Sequence: Synthetic oligonucleotide
  Target: LAMA2; (-) strand; PAM type: NNGRRT; PAM sequence: AGGGAT
gagtataaatttttcatatg

SEQ ID NO: 16726 - DNA, 20 bp, Artificial Sequence
  Description of Artificial Sequence: Synthetic oligonucleotide
  Target: LAMA2; (-) strand; PAM type: NNGRRT; PAM sequence: GGGAGT
cttttattaatatctaagag

SEQ ID NO: 16727 - DNA, 20 bp, Artificial Sequence
  Description of Artificial Sequence: Synthetic oligonucleotide
  Target: LAMA2; (-) strand; PAM type: NNGRRT; PAM sequence: TGGAGT
aaggggtggttggcctacag

SEQ ID NO: 16728 - DNA, 20 bp, Artificial Sequence
  Description of Artificial Sequence: Synthetic oligonucleotide
  Target: LAMA2; (-) strand; PAM type: NNGRRT; PAM sequence: AGGGGT
ttgcaacatgattgatgaga

SEQ ID NO: 16729 - DNA, 20 bp, Artificial Sequence
  Description of Artificial Sequence: Synthetic oligonucleotide
  Target: LAMA2; (-) strand; PAM type: NNGRRT; PAM sequence: TTGAAT
taatgggtataaagcttcct

SEQ ID NO: 16730 - DNA, 20 bp, Artificial Sequence
  Description of Artificial Sequence: Synthetic oligonucleotide
  Target: LAMA2; (-) strand; PAM type: NNGRRT; PAM sequence: ATGGGT
aaattatggcagccatccta

SEQ ID NO: 16731 - DNA, 20 bp, Artificial Sequence
  Description of Artificial Sequence: Synthetic oligonucleotide
  Target: LAMA2; (-) strand; PAM type: NNGRRT; PAM sequence: TTGGAT
tattcccagaagtggaattg

SEQ ID NO: 16732 - DNA, 20 bp, Artificial Sequence
  Description of Artificial Sequence: Synthetic oligonucleotide
  Target: LAMA2; (-) strand; PAM type: NNGRRT; PAM sequence: TGGAAT
ttggggcatattcccagaag

SEQ ID NO: 16733 - DNA, 20 bp, Artificial Sequence
  Description of Artificial Sequence: Synthetic oligonucleotide
  Target: LAMA2; (-) strand; PAM type: NNGRRT; PAM sequence: CGGAAT
aatttcctctcttttacaga

SEQ ID NO: 16734 - DNA, 20 bp, Artificial Sequence
  Description of Artificial Sequence: Synthetic oligonucleotide
  Target: LAMA2; (-) strand; PAM type: NNGRRT; PAM sequence: CAGAAT
attcatatggtagcatgtgt

SEQ ID NO: 16735 - DNA, 20 bp, Artificial Sequence
  Description of Artificial Sequence: Synthetic oligonucleotide
  Target: LAMA2; (-) strand; PAM type: NNGRRT; PAM sequence: CAGAAT
gactggtatatttcacttag

SEQ ID NO: 16736 - DNA, 20 bp, Artificial Sequence
  Description of Artificial Sequence: Synthetic oligonucleotide
  Target: LAMA2; (-) strand; PAM type: NNGRRT; PAM sequence: TAGAAT
ttctgactactctaggtaag

SEQ ID NO: 16737 - DNA, 20 bp, Artificial Sequence
  Description of Artificial Sequence: Synthetic oligonucleotide
  Target: LAMA2; (-) strand; PAM type: NNGRRT; PAM sequence: CAGAAT
ccatcaacaccattcacatc

SEQ ID NO: 16738 - DNA, 20 bp, Artificial Sequence
  Description of Artificial Sequence: Synthetic oligonucleotide
  Target: LAMA2; (-) strand; PAM type: NNGRRT; PAM sequence: TTGAAT
tgggagtgaggatgttactt

SEQ ID NO: 16739 - DNA, 20 bp, Artificial Sequence
  Description of Artificial Sequence: Synthetic oligonucleotide
  Target: LAMA2; (-) strand; PAM type: NNGRRT; PAM sequence: GAGGAT
ctgtatagagcactgggagt

SEQ ID NO: 16740 - DNA, 20 bp, Artificial Sequence
  Description of Artificial Sequence: Synthetic oligonucleotide
  Target: LAMA2; (-) strand; PAM type: NNGRRT; PAM sequence: GGGAGT
ttttctctgtatagagcact

SEQ ID NO: 16741 - DNA, 20 bp, Artificial Sequence
  Description of Artificial Sequence: Synthetic oligonucleotide
  Target: LAMA2; (-) strand; PAM type: NNGRRT; PAM sequence: AAGAAT
tctatgtaaacgcagaacta

SEQ ID NO: 16742 - DNA, 20 bp, Artificial Sequence
  Description of Artificial Sequence: Synthetic oligonucleotide
  Target: LAMA2; (-) strand; PAM type: NNGRRT; PAM sequence: GAGAAT
taaaccatatattgctatgt

SEQ ID NO: 16743 - DNA, 20 bp, Artificial Sequence
  Description of Artificial Sequence: Synthetic oligonucleotide
  Target: LAMA2; (-) strand; PAM type: NNGRRT; PAM sequence: AAGAAT
tgtgaaaaaaaaatgaatca

SEQ ID NO: 16744 - DNA, 20 bp, Artificial Sequence
  Description of Artificial Sequence: Synthetic oligonucleotide
  Target: LAMA2; (-) strand; PAM type: NNGRRT; PAM sequence: ATGAAT
agcatttatgtgaaaaaaaa

SEQ ID NO: 16745 - DNA, 20 bp, Artificial Sequence
  Description of Artificial Sequence: Synthetic oligonucleotide
  Target: LAMA2; (-) strand; PAM type: NNGRRT; PAM sequence: GAGAAT
acaaagaatgtggcagagaa

SEQ ID NO: 16746 - DNA, 20 bp, Artificial Sequence
  Description of Artificial Sequence: Synthetic oligonucleotide
  Target: LAMA2; (-) strand; PAM type: NNGRRT; PAM sequence: AAGAAT
ccagtggagacagaaccaca

SEQ ID NO: 16747 - DNA, 20 bp, Artificial Sequence
  Description of Artificial Sequence: Synthetic oligonucleotide
  Target: LAMA2; (-) strand; PAM type: NNGRRT; PAM sequence: GAGAGT
tcattggtaaaggaccaatg

SEQ ID NO: 16748 - DNA, 20 bp, Artificial Sequence
  Description of Artificial Sequence: Synthetic oligonucleotide
  Target: LAMA2; (-) strand; PAM type: NNGRRT; PAM sequence: TAGAAT
tcatgaatatttcatgagaa

SEQ ID NO: 16749 - DNA, 20 bp, Artificial Sequence
  Description of Artificial Sequence: Synthetic oligonucleotide
  Target: LAMA2; (-) strand; PAM type: NNGRRT; PAM sequence: GAGAAT
cattctcatgaatatttcat

SEQ ID NO: 16750 - DNA, 20 bp, Artificial Sequence
  Description of Artificial Sequence: Synthetic oligonucleotide
  Target: LAMA2; (-) strand; PAM type: NNGRRT; PAM sequence: ATGAAT
agatctggtgaaacattctc

SEQ ID NO: 16751 - DNA, 20 bp, Artificial Sequence
  Description of Artificial Sequence: Synthetic oligonucleotide
  Target: LAMA2; (-) strand; PAM type: NNGRRT; PAM sequence: TAGAAT
aaaggcacacaactttcaaa

SEQ ID NO: 16752 - DNA, 20 bp, Artificial Sequence
  Description of Artificial Sequence: Synthetic oligonucleotide
  Target: LAMA2; (-) strand; PAM type: NNGRRT; PAM sequence: CAGAGT
gactcaaaactcagaaaact

SEQ ID NO: 16753 - DNA, 20 bp, Artificial Sequence
  Description of Artificial Sequence: Synthetic oligonucleotide
  Target: LAMA2; (-) strand; PAM type: NNGRRT; PAM sequence: AAGAGT
ctctattgccaccatgacca

SEQ ID NO: 16754 - DNA, 20 bp, Artificial Sequence
  Description of Artificial Sequence: Synthetic oligonucleotide
  Target: LAMA2; (-) strand; PAM type: NNGRRT; PAM sequence: AGGAGT
agaacagaggcctaaacgag

SEQ ID NO: 16755 - DNA, 20 bp, Artificial Sequence
  Description of Artificial Sequence: Synthetic oligonucleotide
  Target: LAMA2; (-) strand; PAM type: NNGRRT; PAM sequence: TGGGAT
acctctggggattataaatt

SEQ ID NO: 16756 - DNA, 20 bp, Artificial Sequence
  Description of Artificial Sequence: Synthetic oligonucleotide
  Target: LAMA2; (-) strand; PAM type: NNGRRT; PAM sequence: GGGGAT
tacatatctgagttacctct

SEQ ID NO: 16757 - DNA, 20 bp, Artificial Sequence
  Description of Artificial Sequence: Synthetic oligonucleotide
  Target: LAMA2; (-) strand; PAM type: NNGRRT; PAM sequence: CTGAGT
tattaaagaattatacatat

SEQ ID NO: 16758 - DNA, 20 bp, Artificial Sequence
  Description of Artificial Sequence: Synthetic oligonucleotide
  Target: LAMA2; (-) strand; PAM type: NNGRRT; PAM sequence: AAGAAT
aacaaatcagattgttatta

SEQ ID NO: 16759 - DNA, 20 bp, Artificial Sequence
  Description of Artificial Sequence: Synthetic oligonucleotide
  Target: LAMA2; (-) strand; PAM type: NNGRRT; PAM sequence: TTGGGT
ttcctttccaactcttcatc

SEQ ID NO: 16760 - DNA, 20 bp, Artificial Sequence
  Description of Artificial Sequence: Synthetic oligonucleotide
  Target: LAMA2; (-) strand; PAM type: NNGRRT; PAM sequence: TAGAGT
ttgagagcctactaaagcat

SEQ ID NO: 16761 - DNA, 20 bp, Artificial Sequence
  Description of Artificial Sequence: Synthetic oligonucleotide
  Target: LAMA2; (-) strand; PAM type: NNGRRT; PAM sequence: CTGGAT
tggaatatttaactgttatt

SEQ ID NO: 16762 - DNA, 20 bp, Artificial Sequence
  Description of Artificial Sequence: Synthetic oligonucleotide
  Target: LAMA2; (-) strand; PAM type: NNGRRT; PAM sequence: TGGAAT
tattaaataatagttagctg

SEQ ID NO: 16763 - DNA, 20 bp, Artificial Sequence
  Description of Artificial Sequence: Synthetic oligonucleotide
  Target: LAMA2; (-) strand; PAM type: NNGRRT; PAM sequence: GAGGAT
tcctgaatttatctcagaag

SEQ ID NO: 16764 - DNA, 20 bp, Artificial Sequence
  Description of Artificial Sequence: Synthetic oligonucleotide
  Target: LAMA2; (-) strand; PAM type: NNGRRT; PAM sequence: CTGAAT
gaggagaaaggtcagatttc

SEQ ID NO: 16765 - DNA, 20 bp, Artificial Sequence
  Description of Artificial Sequence: Synthetic oligonucleotide
  Target: LAMA2; (-) strand; PAM type: NNGRRT; PAM sequence: ATGAAT
atactacaacgttatatctg

SEQ ID NO: 16766 - DNA, 20 bp, Artificial Sequence
  Description of Artificial Sequence: Synthetic oligonucleotide
  Target: LAMA2; (-) strand; PAM type: NNGRRT; PAM sequence: TGGAAT
ttagcagagctgaagtgtac

SEQ ID NO: 16767 - DNA, 20 bp, Artificial Sequence
  Description of Artificial Sequence: Synthetic oligonucleotide
  Target: LAMA2; (-) strand; PAM type: NNGRRT; PAM sequence: CTGGAT
agaggatgaatgtattcaaa

SEQ ID NO: 16768 - DNA, 20 bp, Artificial Sequence
  Description of Artificial Sequence: Synthetic oligonucleotide
  Target: LAMA2; (-) strand; PAM type: NNGRRT; PAM sequence: ATGAAT
ccaaaactataccttagagg

SEQ ID NO: 16769 - DNA, 20 bp, Artificial Sequence
  Description of Artificial Sequence: Synthetic oligonucleotide
  Target: LAMA2; (-) strand; PAM type: NNGRRT; PAM sequence: GAGGAT
atacccaaaactatacctta

SEQ ID NO: 16770 - DNA, 20 bp, Artificial Sequence
  Description of Artificial Sequence: Synthetic oligonucleotide
  Target: LAMA2; (-) strand; PAM type: NNGRRT; PAM sequence: TAGAAT
atcgatcattctcagtcctt

SEQ ID NO: 16771 - DNA, 20 bp, Artificial Sequence
  Description of Artificial Sequence: Synthetic oligonucleotide
  Target: LAMA2; (-) strand; PAM type: NNGRRT; PAM sequence: ATGGAT
gttaaagacaaatatcagct

SEQ ID NO: 16772 - DNA, 20 bp, Artificial Sequence
  Description of Artificial Sequence: Synthetic oligonucleotide
  Target: LAMA2; (-) strand; PAM type: NNGRRT; PAM sequence: GAGAGT
aggaatgagaagagaggagg

SEQ ID NO: 16773 - DNA, 20 bp, Artificial Sequence
  Description of Artificial Sequence: Synthetic oligonucleotide
  Target: LAMA2; (-) strand; PAM type: NNGRRT; PAM sequence: AGGAAT
tttgaaggccactgttctag

SEQ ID NO: 16774 - DNA, 20 bp, Artificial Sequence
  Description of Artificial Sequence: Synthetic oligonucleotide
  Target: LAMA2; (-) strand; PAM type: NNGRRT; PAM sequence: AAGAGT
agtgcatttgttatcaagaa

SEQ ID NO: 16775 - DNA, 20 bp, Artificial Sequence
  Description of Artificial Sequence: Synthetic oligonucleotide
  Target: LAMA2; (-) strand; PAM type: NNGRRT; PAM sequence: CTGAAT
aatagaaatattggagtaca

SEQ ID NO: 16776 - DNA, 20 bp, Artificial Sequence
  Description of Artificial Sequence: Synthetic oligonucleotide
  Target: LAMA2; (-) strand; PAM type: NNGRRT; PAM sequence: TGGAGT
agaatataaaatagaaatat

SEQ ID NO: 16777 - DNA, 20 bp, Artificial Sequence
  Description of Artificial Sequence: Synthetic oligonucleotide
  Target: LAMA2; (-) strand; PAM type: NNGRRT; PAM sequence: AAGAAT
gtcaaaaccagtatttaaaa

SEQ ID NO: 16778 - DNA, 20 bp, Artificial Sequence
  Description of Artificial Sequence: Synthetic oligonucleotide
  Target: LAMA2; (-) strand; PAM type: NNGRRT; PAM sequence: AAGGAT
tctggaaggaatatgcgaat

SEQ ID NO: 16779 - DNA, 20 bp, Artificial Sequence
  Description of Artificial Sequence: Synthetic oligonucleotide
  Target: LAMA2; (-) strand; PAM type: NNGRRT; PAM sequence: GCGAAT
gtacgttctggaaggaatat

SEQ ID NO: 16780 - DNA, 20 bp, Artificial Sequence
  Description of Artificial Sequence: Synthetic oligonucleotide
  Target: LAMA2; (-) strand; PAM type: NNGRRT; PAM sequence: AGGAAT
gttaagttgtacgttctgga

SEQ ID NO: 16781 - DNA, 20 bp, Artificial Sequence
  Description of Artificial Sequence: Synthetic oligonucleotide
  Target: LAMA2; (-) strand; PAM type: NNGRRT; PAM sequence: GAGAAT
agaatgggatacttcagagg

SEQ ID NO: 16782 - DNA, 20 bp, Artificial Sequence
  Description of Artificial Sequence: Synthetic oligonucleotide
  Target: LAMA2; (-) strand; PAM type: NNGRRT; PAM sequence: TGGGAT
ggtgaggactgtggaaagaa

SEQ ID NO: 16783 - DNA, 20 bp, Artificial Sequence
  Description of Artificial Sequence: Synthetic oligonucleotide
  Target: LAMA2; (-) strand; PAM type: NNGRRT; PAM sequence: AAGAAT
aggtgggtgaggactgtgga

SEQ ID NO: 16784 - DNA, 20 bp, Artificial Sequence
  Description of Artificial Sequence: Synthetic oligonucleotide
  Target: LAMA2; (-) strand; PAM type: NNGRRT; PAM sequence: GTGGGT
aggaaaataacttgatggag

SEQ ID NO: 16785 - DNA, 20 bp, Artificial Sequence
  Description of Artificial Sequence: Synthetic oligonucleotide
  Target: LAMA2; (-) strand; PAM type: NNGRRT; PAM sequence: AGGAAT
aagaaagatagggatctagt

SEQ ID NO: 16786 - DNA, 20 bp, Artificial Sequence
  Description of Artificial Sequence: Synthetic oligonucleotide
  Target: LAMA2; (-) strand; PAM type: NNGRRT; PAM sequence: AGGGAT
atagtaacgggaagaaagat

SEQ ID NO: 16787 - DNA, 20 bp, Artificial Sequence
  Description of Artificial Sequence: Synthetic oligonucleotide
  Target: LAMA2; (-) strand; PAM type: NNGRRT; PAM sequence: TAGAAT
aattgtgacaaaaaacgaaa

SEQ ID NO: 16788 - DNA, 20 bp, Artificial Sequence
  Description of Artificial Sequence: Synthetic oligonucleotide
  Target: LAMA2; (-) strand; PAM type: NNGRRT; PAM sequence: TGGAAT
aattataacaactttgaaac

SEQ ID NO: 16789 - DNA, 20 bp, Artificial Sequence
  Description of Artificial Sequence: Synthetic oligonucleotide
  Target: LAMA2; (-) strand; PAM type: NNGRRT; PAM sequence: AAGGAT
tttcattgtcttagtcaaag

SEQ ID NO: 16790 - DNA, 20 bp, Artificial Sequence
  Description of Artificial Sequence: Synthetic oligonucleotide
  Target: LAMA2; (-) strand; PAM type: NNGRRT; PAM sequence: CTGAAT
gtgtagtccaagtcactatg

SEQ ID NO: 16791 - DNA, 20 bp, Artificial Sequence
  Description of Artificial Sequence: Synthetic oligonucleotide
  Target: LAMA2; (-) strand; PAM type: NNGRRT; PAM sequence: AGGAAT
ttgagctaccgtagaggaga

SEQ ID NO: 16792 - DNA, 20 bp, Artificial Sequence
  Description of Artificial Sequence: Synthetic oligonucleotide
  Target: LAMA2; (-) strand; PAM type: NNGRRT; PAM sequence: CTGAAT
taattaaacatgtttgattt

SEQ ID NO: 16793 - DNA, 20 bp, Artificial Sequence
  Description of Artificial Sequence: Synthetic oligonucleotide
  Target: LAMA2; (-) strand; PAM type: NNGRRT; PAM sequence: TTGGAT
gagtcgtctttgtcatacct

SEQ ID NO: 16794 - DNA, 20 bp, Artificial Sequence
  Description of Artificial Sequence: Synthetic oligonucleotide
  Target: LAMA2; (-) strand; PAM type: NNGRRT; PAM sequence: CTGAGT
gttctttaagcaacatagag

SEQ ID NO: 16795 - DNA, 20 bp, Artificial Sequence
  Description of Artificial Sequence: Synthetic oligonucleotide
  Target: LAMA2; (-) strand; PAM type: NNGRRT; PAM sequence: AAGAAT
cccaataggaattctatcgt

SEQ ID NO: 16796 - DNA, 20 bp, Artificial Sequence
  Description of Artificial Sequence: Synthetic oligonucleotide
  Target: LAMA2; (-) strand; PAM type: NNGRRT; PAM sequence: AGGAAT
atttctggcacagccccaat

SEQ ID NO: 16797 - DNA, 20 bp, Artificial Sequence
  Description of Artificial Sequence: Synthetic oligonucleotide
  Target: LAMA2; (-) strand; PAM type: NNGRRT; PAM sequence: ATGAGT
tctgctccttctgagctgga

SEQ ID NO: 16798 - DNA, 20 bp, Artificial Sequence
  Description of Artificial Sequence: Synthetic oligonucleotide
  Target: LAMA2; (-) strand; PAM type: NNGRRT; PAM sequence: TGGAAT
tccttctgctccttctgagc

SEQ ID NO: 16799 - DNA, 20 bp, Artificial Sequence
  Description of Artificial Sequence: Synthetic oligonucleotide
  Target: LAMA2; (-) strand; PAM type: NNGRRT; PAM sequence: TTGAAT
tagaggataccattggcttc

SEQ ID NO: 16800 - DNA, 20 bp, Artificial Sequence
  Description of Artificial Sequence: Synthetic oligonucleotide
  Target: LAMA2; (-) strand; PAM type: NNGRRT; PAM sequence: GAGGAT
ttagccactatccacagcta

SEQ ID NO: 16801 - DNA, 20 bp, Artificial Sequence
  Description of Artificial Sequence: Synthetic oligonucleotide
  Target: LAMA2; (-) strand; PAM type: NNGRRT; PAM sequence: CTGGAT
tgcggtccacagtgtggatt

SEQ ID NO: 16802 - DNA, 20 bp, Artificial Sequence
  Description of Artificial Sequence: Synthetic oligonucleotide
  Target: LAMA2; (-) strand; PAM type: NNGRRT; PAM sequence: GTGGAT
acgctgctgcggtccacagt

SEQ ID NO: 16803 - DNA, 20 bp, Artificial Sequence
  Description of Artificial Sequence: Synthetic oligonucleotide
  Target: LAMA2; (-) strand; PAM type: NNGRRT; PAM sequence: TTGGAT
taaatccctatccagagttt

SEQ ID NO: 16804 - DNA, 20 bp, Artificial Sequence
  Description of Artificial Sequence: Synthetic oligonucleotide
  Target: LAMA2; (-) strand; PAM type: NNGRRT; PAM sequence: CAGAGT
ggatcctgtaaatccctatc

SEQ ID NO: 16805 - DNA, 20 bp, Artificial Sequence
  Description of Artificial Sequence: Synthetic oligonucleotide
  Target: LAMA2; (-) strand; PAM type: NNGRRT; PAM sequence: TTGGAT
ttcattttatctaccggcca

SEQ ID NO: 16806 - DNA, 20 bp, Artificial Sequence
  Description of Artificial Sequence: Synthetic oligonucleotide
  Target: LAMA2; (-) strand; PAM type: NNGRRT; PAM sequence: CTGGGT
aggaagaagctcagaaggcg

SEQ ID NO: 16807 - DNA, 20 bp, Artificial Sequence
  Description of Artificial Sequence: Synthetic oligonucleotide
  Target: LAMA2; (-) strand; PAM type: NNGRRT; PAM sequence: AGGGAT
gagctgtgggacatgtgggc

SEQ ID NO: 16808 - DNA, 20 bp, Artificial Sequence
  Description of Artificial Sequence: Synthetic oligonucleotide
  Target: LAMA2; (-) strand; PAM type: NNGRRT; PAM sequence: GAGAGT
ggccgtgtacttggctctgt

SEQ ID NO: 16809 - DNA, 20 bp, Artificial Sequence
  Description of Artificial Sequence: Synthetic oligonucleotide
  Target: LAMA2; (-) strand; PAM type: NNGRRT; PAM sequence: AAGAGT
gatctggtcggcataccata

SEQ ID NO: 16810 - DNA, 20 bp, Artificial Sequence
  Description of Artificial Sequence: Synthetic oligonucleotide
  Target: LAMA2; (-) strand; PAM type: NNGRRT; PAM sequence: CAGAAT
agtttctctacaggtacaag

SEQ ID NO: 16811 - DNA, 20 bp, Artificial Sequence
  Description of Artificial Sequence: Synthetic oligonucleotide
  Target: LAMA2; (-) strand; PAM type: NNGRRT; PAM sequence: AGGAGT
tatggagataattgtcgctc

SEQ ID NO: 16812 - DNA, 20 bp, Artificial Sequence
  Description of Artificial Sequence: Synthetic oligonucleotide
  Target: LAMA2; (-) strand; PAM type: NNGRRT; PAM sequence: CAGGAT
catctggggctccagaactg

SEQ ID NO: 16813 - DNA, 20 bp, Artificial Sequence
  Description of Artificial Sequence: Synthetic oligonucleotide
  Target: LAMA2; (-) strand; PAM type: NNGRRT; PAM sequence: TCGGGT
ggtctgaccttgaggtttca

SEQ ID NO: 16814 - DNA, 20 bp, Artificial Sequence
  Description of Artificial Sequence: Synthetic oligonucleotide
  Target: LAMA2; (-) strand; PAM type: NNGRRT; PAM sequence: AAGAAT
tatccagctacgattggtac

SEQ ID NO: 16815 - DNA, 20 bp, Artificial Sequence
  Description of Artificial Sequence: Synthetic oligonucleotide
  Target: LAMA2; (-) strand; PAM type: NNGRRT; PAM sequence: GTGGGT
gtatcttctaccaagactct

SEQ ID NO: 16816 - DNA, 20 bp, Artificial Sequence
  Description of Artificial Sequence: Synthetic oligonucleotide
  Target: LAMA2; (-) strand; PAM type: NNGRRT; PAM sequence: GTGGGT
ctccgcaggatgagggagtg

SEQ ID NO: 16817 - DNA, 20 bp, Artificial Sequence
  Description of Artificial Sequence: Synthetic oligonucleotide
  Target: LAMA2; (-) strand; PAM type: NNGRRT; PAM sequence: GGGAGT
agatcgcctccgcaggatga

SEQ ID NO: 16818 - DNA, 20 bp, Artificial Sequence
  Description of Artificial Sequence: Synthetic oligonucleotide
  Target: LAMA2; (-) strand; PAM type: NNGRRT; PAM sequence: CAGGAT
gtgcgcaaagatcgcctccg

SEQ ID NO: 16819 - DNA, 20 bp, Artificial Sequence
  Description of Artificial Sequence: Synthetic oligonucleotide
  Target: LAMA2; (-) strand; PAM type: NNGRRT; PAM sequence: TGGGAT
caacgccgaggctggcagcg

SEQ ID NO: 16820 - DNA, 20 bp, Artificial Sequence
  Description of Artificial Sequence: Synthetic oligonucleotide
  Target: LAMA2; (-) strand; PAM type: NNGRRT; PAM sequence: CAGAGT
cgcagtgccgccgtgcacgt

SEQ ID NO: 16821 - DNA, 20 bp, Artificial Sequence
  Description of Artificial Sequence: Synthetic oligonucleotide
  Target: LAMA2; (-) strand; PAM type: NNGRRT; PAM sequence: AGGAAT
tcaatgagggtgtaagcagt

SEQ ID NO: 16822 - DNA, 20 bp, Artificial Sequence
  Description of Artificial Sequence: Synthetic oligonucleotide
  Target: LAMA2; (-) strand; PAM type: NNGRRT; PAM sequence: GAGGGT
gttgcaatagttcagtcaat

SEQ ID NO: 16823 - DNA, 20 bp, Artificial Sequence
  Description of Artificial Sequence: Synthetic oligonucleotide
  Target: LAMA2; (-) strand; PAM type: NNGRRT; PAM sequence: ATGAAT
ggagaataactgcaatatct

SEQ ID NO: 16824 - DNA, 20 bp, Artificial Sequence
  Description of Artificial Sequence: Synthetic oligonucleotide
  Target: LAMA2; (-) strand; PAM type: NNGRRT; PAM sequence: GAGAAT
tcctactatatgcccaaaag

SEQ ID NO: 16825 - DNA, 20 bp, Artificial Sequence
  Description of Artificial Sequence: Synthetic oligonucleotide
  Target: LAMA2; (-) strand; PAM type: NNGRRT; PAM sequence: AGGGGT
cggtgtctatgcctaatttc

SEQ ID NO: 16826 - DNA, 20 bp, Artificial Sequence
  Description of Artificial Sequence: Synthetic oligonucleotide
  Target: LAMA2; (-) strand; PAM type: NNGRRT; PAM sequence: AAGAGT
gtaaaactcgtattcaatct

SEQ ID NO: 16827 - DNA, 20 bp, Artificial Sequence
  Description of Artificial Sequence: Synthetic oligonucleotide
  Target: LAMA2; (-) strand; PAM type: NNGRRT; PAM sequence: GCGAAT
tcatctgtctctatagcatg

SEQ ID NO: 16828 - DNA, 20 bp, Artificial Sequence
  Description of Artificial Sequence: Synthetic oligonucleotide
  Target: LAMA2; (-) strand; PAM type: NNGRRT; PAM sequence: AAGGGT
acattttgggcccatgtgtg

SEQ ID NO: 16829 - DNA, 20 bp, Artificial Sequence
  Description of Artificial Sequence: Synthetic oligonucleotide
  Target: LAMA2; (-) strand; PAM type: NNGRRT; PAM sequence: GTGGAT
ctgcagactccaaagtctct

SEQ ID NO: 16830 - DNA, 20 bp, Artificial Sequence
  Description of Artificial Sequence: Synthetic oligonucleotide
  Target: LAMA2; (-) strand; PAM type: NNGRRT; PAM sequence: TAGGAT
tcatatcagtcaggacaggc

SEQ ID NO: 16831 - DNA, 20 bp, Artificial Sequence
  Description of Artificial Sequence: Synthetic oligonucleotide
  Target: LAMA2; (-) strand; PAM type: NNGRRT; PAM sequence: AGGGAT
ttgagtagaaaaatcagtta

SEQ ID NO: 16832 - DNA, 20 bp, Artificial Sequence
  Description of Artificial Sequence: Synthetic oligonucleotide
  Target: LAMA2; (-) strand; PAM type: NNGRRT; PAM sequence: TTGAGT
aatcggagggagaagagact

SEQ ID NO: 16833 - DNA, 20 bp, Artificial Sequence
  Description of Artificial Sequence: Synthetic oligonucleotide
  Target: LAMA2; (-) strand; PAM type: NNGRRT; PAM sequence: TAGAAT
agattaatatgatagtgatg

SEQ ID NO: 16834 - DNA, 20 bp, Artificial Sequence
  Description of Artificial Sequence: Synthetic oligonucleotide
  Target: LAMA2; (-) strand; PAM type: NNGRRT; PAM sequence: TAGAGT
tcataaggaatttatataat

SEQ ID NO: 16835 - DNA, 20 bp, Artificial Sequence
  Description of Artificial Sequence: Synthetic oligonucleotide
  Target: LAMA2; (-) strand; PAM type: NNGRRT; PAM sequence: AGGAAT
aatattcaaagattttcata

SEQ ID NO: 16836 - DNA, 20 bp, Artificial Sequence
  Description of Artificial Sequence: Synthetic oligonucleotide
  Target: LAMA2; (-) strand; PAM type: NNGRRT; PAM sequence: GTGGGT
tgtgtacacgtagggaaacc

SEQ ID NO: 16837 - DNA, 20 bp, Artificial Sequence
  Description of Artificial Sequence: Synthetic oligonucleotide
  Target: LAMA2; (-) strand; PAM type: NNGRRT; PAM sequence: TAGAAT
aggactagcagagagcatct

SEQ ID NO: 16838 - DNA, 20 bp, Artificial Sequence
  Description of Artificial Sequence: Synthetic oligonucleotide
  Target: LAMA2; (-) strand; PAM type: NNGRRT; PAM sequence: AAGAAT
tggcatttgaactgttactt

SEQ ID NO: 16839 - DNA, 20 bp, Artificial Sequence
  Description of Artificial Sequence: Synthetic oligonucleotide
  Target: LAMA2; (-) strand; PAM type: NNGRRT; PAM sequence: ATGAAT
ttcttttgtttgaagaattt

SEQ ID NO: 16840 - DNA, 20 bp, Artificial Sequence
  Description of Artificial Sequence: Synthetic oligonucleotide
  Target: LAMA2; (-) strand; PAM type: NNGRRT; PAM sequence: AAGAAT
tgataaatttcttttgtttg

SEQ ID NO: 16841 - DNA, 20 bp, Artificial Sequence
  Description of Artificial Sequence: Synthetic oligonucleotide
  Target: LAMA2; (-) strand; PAM type: NNGRRT; PAM sequence: GGGAAT
ataaagactcaaaatcattt

SEQ ID NO: 16842 - DNA, 20 bp, Artificial Sequence
  Description of Artificial Sequence: Synthetic oligonucleotide
  Target: LAMA2; (-) strand; PAM type: NNGRRT; PAM sequence: AAGAAT
atttgctaggcattatgcaa

SEQ ID NO: 16843 - DNA, 20 bp, Artificial Sequence
  Description of Artificial Sequence: Synthetic oligonucleotide
  Target: LAMA2; (-) strand; PAM type: NNGRRT; PAM sequence: AAGGAT
ctgtaccattcatgtcctgt

SEQ ID NO: 16844 - DNA, 20 bp, Artificial Sequence
  Description of Artificial Sequence: Synthetic oligonucleotide
  Target: LAMA2; (-) strand; PAM type: NNGRRT; PAM sequence: CAGAGT
tgatcccacaagctgtgacc

SEQ ID NO: 16845 - DNA, 20 bp, Artificial Sequence
  Description of Artificial Sequence: Synthetic oligonucleotide
  Target: LAMA2; (-) strand; PAM type: NNGRRT; PAM sequence: GTGGAT
agtcagagaaaagagtaaaa

SEQ ID NO: 16846 - DNA, 20 bp, Artificial Sequence
  Description of Artificial Sequence: Synthetic oligonucleotide
  Target: LAMA2; (-) strand; PAM type: NNGRRT; PAM sequence: AAGAGT
aaataaaattagtcagagaa

SEQ ID NO: 16847 - DNA, 20 bp, Artificial Sequence
  Description of Artificial Sequence: Synthetic oligonucleotide
  Target: LAMA2; (-) strand; PAM type: NNGRRT; PAM sequence: AAGAGT
taacagtccccgtggaaagt

SEQ ID NO: 16848 - DNA, 20 bp, Artificial Sequence
  Description of Artificial Sequence: Synthetic oligonucleotide
  Target: LAMA2; (-) strand; PAM type: NNGRRT; PAM sequence: AAGAAT
aaataatggagttaaattaa

SEQ ID NO: 16849 - DNA, 20 bp, Artificial Sequence
  Description of Artificial Sequence: Synthetic oligonucleotide
  Target: LAMA2; (-) strand; PAM type: NNGRRT; PAM sequence: TGGAGT
ttacatttaaaacaaaataa

SEQ ID NO: 16850 - DNA, 20 bp, Artificial Sequence
  Description of Artificial Sequence: Synthetic oligonucleotide
  Target: LAMA2; (-) strand; PAM type: NNGRRT; PAM sequence: AAGGAT
ttgatacatatacagcaaag

SEQ ID NO: 16851 - DNA, 20 bp, Artificial Sequence
  Description of Artificial Sequence: Synthetic oligonucleotide
  Target: LAMA2; (-) strand; PAM type: NNGRRT; PAM sequence: AAGAAT
tcaaggctaggataatgtca

SEQ ID NO: 16852 - DNA, 20 bp, Artificial Sequence
  Description of Artificial Sequence: Synthetic oligonucleotide
  Target: LAMA2; (-) strand; PAM type: NNGRRT; PAM sequence: TAGGAT
ttccttttattattcaaggc

SEQ ID NO: 16853 - DNA, 20 bp, Artificial Sequence
  Description of Artificial Sequence: Synthetic oligonucleotide
  Target: LAMA2; (-) strand; PAM type: NNGRRT; PAM sequence: TAGAAT
catattttaatattattttg

SEQ ID NO: 16854 - DNA, 20 bp, Artificial Sequence
  Description of Artificial Sequence: Synthetic oligonucleotide
  Target: LAMA2; (-) strand; PAM type: NNGRRT; PAM sequence: AAGAAT
agcccttgcaatgtgtgatg

SEQ ID NO: 16855 - DNA, 20 bp, Artificial Sequence
  Description of Artificial Sequence: Synthetic oligonucleotide
  Target: LAMA2; (-) strand; PAM type: NNGRRT; PAM sequence: GAGAAT
tgacccagagctccacttgt

SEQ ID NO: 16856 - DNA, 20 bp, Artificial Sequence
  Description of Artificial Sequence: Synthetic oligonucleotide
  Target: LAMA2; (-) strand; PAM type: NNGRRT; PAM sequence: TTGAGT
aagctttcagtaaacacttg

SEQ ID NO: 16857 - DNA, 20 bp, Artificial Sequence
  Description of Artificial Sequence: Synthetic oligonucleotide
  Target: LAMA2; (-) strand; PAM type: NNGRRT; PAM sequence: CTGGGT
gtttggtaacagtttaaggt

SEQ ID NO: 16858 - DNA, 20 bp, Artificial Sequence
  Description of Artificial Sequence: Synthetic oligonucleotide
  Target: LAMA2; (-) strand; PAM type: NNGRRT; PAM sequence: TGGAAT
tgagcataaactcttcaggc

SEQ ID NO: 16859 - DNA, 20 bp, Artificial Sequence
  Description of Artificial Sequence: Synthetic oligonucleotide
  Target: LAMA2; (-) strand; PAM type: NNGRRT; PAM sequence: TAGGGT
tatcaatttctccttttttt

SEQ ID NO: 16860 - DNA, 20 bp, Artificial Sequence
  Description of Artificial Sequence: Synthetic oligonucleotide
  Target: LAMA2; (-) strand; PAM type: NNGRRT; PAM sequence: TAGAAT
attaaatcgtcatgcatatc

SEQ ID NO: 16861 - DNA, 20 bp, Artificial Sequence
  Description of Artificial Sequence: Synthetic oligonucleotide
  Target: LAMA2; (-) strand; PAM type: NNGRRT; PAM sequence: TGGAAT
ataatattgtactgtttatt

SEQ ID NO: 16862 - DNA, 20 bp, Artificial Sequence
  Description of Artificial Sequence: Synthetic oligonucleotide
  Target: LAMA2; (-) strand; PAM type: NNGRRT; PAM sequence: CAGAAT
agttctagggatctaatgta

SEQ ID NO: 16863 - DNA, 20 bp, Artificial Sequence
  Description of Artificial Sequence: Synthetic oligonucleotide
  Target: LAMA2; (-) strand; PAM type: NNGRRT; PAM sequence: AGGGAT
ttataagatgaataagttct

SEQ ID NO: 16864 - DNA, 20 bp, Artificial Sequence
  Description of Artificial Sequence: Synthetic oligonucleotide
  Target: LAMA2; (-) strand; PAM type: NNGRRT; PAM sequence: ATGAAT
tacacagtttcagttataag

SEQ ID NO: 16865 - DNA, 20 bp, Artificial Sequence
  Description of Artificial Sequence: Synthetic oligonucleotide
  Target: LAMA2; (-) strand; PAM type: NNGRRT; PAM sequence: AAGGGT
taaatgagaggtttgggtca

SEQ ID NO: 16866 - DNA, 20 bp, Artificial Sequence
  Description of Artificial Sequence: Synthetic oligonucleotide
  Target: LAMA2; (-) strand; PAM type: NNGRRT; PAM sequence: TTGGGT
aattggggtaaatgagaggt

SEQ ID NO: 16867 - DNA, 20 bp, Artificial Sequence
  Description of Artificial Sequence: Synthetic oligonucleotide
  Target: LAMA2; (-) strand; PAM type: NNGRRT; PAM sequence: TGGGGT
gaatggtggttgccaggaat

SEQ ID NO: 16868 - DNA, 20 bp, Artificial Sequence
  Description of Artificial Sequence: Synthetic oligonucleotide
  Target: LAMA2; (-) strand; PAM type: NNGRRT; PAM sequence: AGGAAT
tggaatgaatggtggttgcc

SEQ ID NO: 16869 - DNA, 20 bp, Artificial Sequence
  Description of Artificial Sequence: Synthetic oligonucleotide
  Target: LAMA2; (-) strand; PAM type: NNGRRT; PAM sequence: ATGAAT
gcagagagtagaatggtgga

SEQ ID NO: 16870 - DNA, 20 bp, Artificial Sequence
  Description of Artificial Sequence: Synthetic oligonucleotide
  Target: LAMA2; (-) strand; PAM type: NNGRRT; PAM sequence: TGGAAT
agaagcagagagtagaatgg

SEQ ID NO: 16871 - DNA, 20 bp, Artificial Sequence
  Description of Artificial Sequence: Synthetic oligonucleotide
  Target: LAMA2; (-) strand; PAM type: NNGRRT; PAM sequence: TAGAAT
gaactcatagaagcagagag

SEQ ID NO: 16872 - DNA, 20 bp, Artificial Sequence
  Description of Artificial Sequence: Synthetic oligonucleotide
  Target: LAMA2; (-) strand; PAM type: NNGRRT; PAM sequence: GAGAGT
aagttgaactcatagaagca

SEQ ID NO: 16873 - DNA, 20 bp, Artificial Sequence
  Description of Artificial Sequence: Synthetic oligonucleotide
  Target: LAMA2; (-) strand; PAM type: NNGRRT; PAM sequence: TGGAAT
agtatgatctcactcacatg

SEQ ID NO: 16874 - DNA, 20 bp, Artificial Sequence
  Description of Artificial Sequence: Synthetic oligonucleotide
  Target: LAMA2; (-) strand; PAM type: NNGRRT; PAM sequence: ATGGAT
atcctgctatttgcaatgac

SEQ ID NO: 16875 - DNA, 20 bp, Artificial Sequence
  Description of Artificial Sequence: Synthetic oligonucleotide
  Target: LAMA2; (-) strand; PAM type: NNGRRT; PAM sequence: AGGAAT
agagggagagagggagatag

SEQ ID NO: 16876 - DNA, 20 bp, Artificial Sequence
  Description of Artificial Sequence: Synthetic oligonucleotide
  Target: LAMA2; (-) strand; PAM type: NNGRRT; PAM sequence: ATGGAT
aagtatccatcagtgaatga

SEQ ID NO: 16877 - DNA, 20 bp, Artificial Sequence
  Description of Artificial Sequence: Synthetic oligonucleotide
  Target: LAMA2; (-) strand; PAM type: NNGRRT; PAM sequence: ATGAAT
gcctaagtatccatcagtga

SEQ ID NO: 16878 - DNA, 20 bp, Artificial Sequence
  Description of Artificial Sequence: Synthetic oligonucleotide
  Target: LAMA2; (-) strand; PAM type: NNGRRT; PAM sequence: GTGAAT
aatggcctaagtatccatca

SEQ ID NO: 16879 - DNA, 20 bp, Artificial Sequence
  Description of Artificial Sequence: Synthetic oligonucleotide
  Target: LAMA2; (-) strand; PAM type: NNGRRT; PAM sequence: GGGAAT
aacccttctacacttttggt

SEQ ID NO: 16880 - DNA, 20 bp, Artificial Sequence
  Description of Artificial Sequence: Synthetic oligonucleotide
  Target: LAMA2; (-) strand; PAM type: NNGRRT; PAM sequence: AGGAAT
gttaatattcaaaatatata

SEQ ID NO: 16881 - DNA, 20 bp, Artificial Sequence
  Description of Artificial Sequence: Synthetic oligonucleotide
  Target: LAMA2; (-) strand; PAM type: NNGRRT; PAM sequence: AGGAGT
ggcaaaccatatatatgatc

SEQ ID NO: 16882 - DNA, 20 bp, Artificial Sequence
  Description of Artificial Sequence: Synthetic oligonucleotide
  Target: LAMA2; (-) strand; PAM type: NNGRRT; PAM sequence: TGGGAT
taaaaaggcaagttgtggta

SEQ ID NO: 16883 - DNA, 20 bp, Artificial Sequence
  Description of Artificial Sequence: Synthetic oligonucleotide
  Target: LAMA2; (-) strand; PAM type: NNGRRT; PAM sequence: GAGGAT
aactaaaaacttctacagca

SEQ ID NO: 16884 - DNA, 20 bp, Artificial Sequence
  Description of Artificial Sequence: Synthetic oligonucleotide
  Target: LAMA2; (-) strand; PAM type: NNGRRT; PAM sequence: TGGGGT
tcagtcttggtcatgatttt

SEQ ID NO: 16885 - DNA, 20 bp, Artificial Sequence
  Description of Artificial Sequence: Synthetic oligonucleotide
  Target: LAMA2; (-) strand; PAM type: NNGRRT; PAM sequence: ATGGAT
tatacaaaaatcaactgaaa

SEQ ID NO: 16886 - DNA, 20 bp, Artificial Sequence
  Description of Artificial Sequence: Synthetic oligonucleotide
  Target: LAMA2; (-) strand; PAM type: NNGRRT; PAM sequence: TTGGAT
ccacatgcaaaagaatgatt

SEQ ID NO: 16887 - DNA, 20 bp, Artificial Sequence
  Description of Artificial Sequence: Synthetic oligonucleotide
  Target: LAMA2; (-) strand; PAM type: NNGRRT; PAM sequence: AAGAAT
aactagatatccacatgcaa

SEQ ID NO: 16888 - DNA, 20 bp, Artificial Sequence
  Description of Artificial Sequence: Synthetic oligonucleotide
  Target: LAMA2; (-) strand; PAM type: NNGRRT; PAM sequence: CGGAAT
agacatatagaccaatgaaa

SEQ ID NO: 16889 - DNA, 20 bp, Artificial Sequence
  Description of Artificial Sequence: Synthetic oligonucleotide
  Target: LAMA2; (-) strand; PAM type: NNGRRT; PAM sequence: ATGGGT
aggacaaagccagaagcacc

SEQ ID NO: 16890 - DNA, 20 bp, Artificial Sequence
  Description of Artificial Sequence: Synthetic oligonucleotide
  Target: LAMA2; (-) strand; PAM type: NNGRRT; PAM sequence: AAGAAT
acagttctaaaaaaaagaat

SEQ ID NO: 16891 - DNA, 20 bp, Artificial Sequence
  Description of Artificial Sequence: Synthetic oligonucleotide
  Target: LAMA2; (-) strand; PAM type: NNGRRT; PAM sequence: AAGAAT
gaaaaaacagttctaaaaaa

SEQ ID NO: 16892 - DNA, 20 bp, Artificial Sequence
  Description of Artificial Sequence: Synthetic oligonucleotide
  Target: LAMA2; (-) strand; PAM type: NNGRRT; PAM sequence: GAGAAT
tactcaggaggctgaggcag

SEQ ID NO: 16893 - DNA, 20 bp, Artificial Sequence
  Description of Artificial Sequence: Synthetic oligonucleotide
  Target: LAMA2; (-) strand; PAM type: NNGRRT; PAM sequence: AGGAGT
tgggcagattacctgaggtc

SEQ ID NO: 16894 - DNA, 20 bp, Artificial Sequence
  Description of Artificial Sequence: Synthetic oligonucleotide
  Target: LAMA2; (-) strand; PAM type: NNGRRT; PAM sequence: CCGGGT
agaaaatgtagaaaaaatgg

SEQ ID NO: 16895 - DNA, 20 bp, Artificial Sequence
  Description of Artificial Sequence: Synthetic oligonucleotide
  Target: LAMA2; (-) strand; PAM type: NNGRRT; PAM sequence: CAGAGT
acattacccaaaatgatcta

SEQ ID NO: 16896 - DNA, 20 bp, Artificial Sequence
  Description of Artificial Sequence: Synthetic oligonucleotide
  Target: LAMA2; (-) strand; PAM type: NNGRRT; PAM sequence: ATGAAT
tggaaagactttctgtgttc

SEQ ID NO: 16897 - DNA, 20 bp, Artificial Sequence
  Description of Artificial Sequence: Synthetic oligonucleotide
  Target: LAMA2; (-) strand; PAM type: NNGRRT; PAM sequence: ACGAAT
tcaaaaataatgaaatatat

SEQ ID NO: 16898 - DNA, 20 bp, Artificial Sequence
  Description of Artificial Sequence: Synthetic oligonucleotide
  Target: LAMA2; (-) strand; PAM type: NNGRRT; PAM sequence: ACGGGT
ctaatgtaaatgatgagttg

SEQ ID NO: 16899 - DNA, 20 bp, Artificial Sequence
  Description of Artificial Sequence: Synthetic oligonucleotide
  Target: LAMA2; (-) strand; PAM type: NNGRRT; PAM sequence: ATGAGT
ataaatacctaatgtaaatg

SEQ ID NO: 16900 - DNA, 20 bp, Artificial Sequence
  Description of Artificial Sequence: Synthetic oligonucleotide
  Target: LAMA2; (-) strand; PAM type: NNGRRT; PAM sequence: TAGGAT
ggctgggggagggatagcat

SEQ ID NO: 16901 - DNA, 20 bp, Artificial Sequence
  Description of Artificial Sequence: Synthetic oligonucleotide
  Target: LAMA2; (-) strand; PAM type: NNGRRT; PAM sequence: AGGGAT
ggggggtgtggggctggggg

SEQ ID NO: 16902 - DNA, 20 bp, Artificial Sequence
  Description of Artificial Sequence: Synthetic oligonucleotide
  Target: LAMA2; (-) strand; PAM type: NNGRRT; PAM sequence: GGGGGT
acacattggggtctgttggg

SEQ ID NO: 16903 - DNA, 20 bp, Artificial Sequence
  Description of Artificial Sequence: Synthetic oligonucleotide
  Target: LAMA2; (-) strand; PAM type: NNGRRT; PAM sequence: TGGGGT
gggaggggaacattacacat

SEQ ID NO: 16904 - DNA, 20 bp, Artificial Sequence
  Description of Artificial Sequence: Synthetic oligonucleotide
  Target: LAMA2; (-) strand; PAM type: NNGRRT; PAM sequence: GGGAGT
gtgtgttctcactcataagt

SEQ ID NO: 16905 - DNA, 20 bp, Artificial Sequence
  Description of Artificial Sequence: Synthetic oligonucleotide
  Target: LAMA2; (-) strand; PAM type: NNGRRT; PAM sequence: ATGGAT
tttatgtcctttgcagggac

SEQ ID NO: 16906 - DNA, 20 bp, Artificial Sequence
  Description of Artificial Sequence: Synthetic oligonucleotide
  Target: LAMA2; (-) strand; PAM type: NNGRRT; PAM sequence: ATGAGT
actacagagtcataaaaaag

SEQ ID NO: 16907 - DNA, 20 bp, Artificial Sequence
  Description of Artificial Sequence: Synthetic oligonucleotide
  Target: LAMA2; (-) strand; PAM type: NNGRRT; PAM sequence: CAGAGT
atatacaccatggaatacta

SEQ ID NO: 16908 - DNA, 20 bp, Artificial Sequence
  Description of Artificial Sequence: Synthetic oligonucleotide
  Target: LAMA2; (-) strand; PAM type: NNGRRT; PAM sequence: TGGAAT
aatgtggcacatatacacca

SEQ ID NO: 16909 - DNA, 20 bp, Artificial Sequence
  Description of Artificial Sequence: Synthetic oligonucleotide
  Target: LAMA2; (-) strand; PAM type: NNGRRT; PAM sequence: CTGGAT
aaatgtccatcaataataga

SEQ ID NO: 16910 - DNA, 20 bp, Artificial Sequence
  Description of Artificial Sequence: Synthetic oligonucleotide
  Target: LAMA2; (-) strand; PAM type: NNGRRT; PAM sequence: AAGGAT
aaaaaagaattaagtaccca

SEQ ID NO: 16911 - DNA, 20 bp, Artificial Sequence
  Description of Artificial Sequence: Synthetic oligonucleotide
  Target: LAMA2; (-) strand; PAM type: NNGRRT; PAM sequence: AAGAAT
taacaacaaattatccaaaa

SEQ ID NO: 16912 - DNA, 20 bp, Artificial Sequence
  Description of Artificial Sequence: Synthetic oligonucleotide
  Target: LAMA2; (-) strand; PAM type: NNGRRT; PAM sequence: CAGGAT
aaagaaattcaataaagttg

SEQ ID NO: 16913 - DNA, 20 bp, Artificial Sequence
  Description of Artificial Sequence: Synthetic oligonucleotide
  Target: LAMA2; (-) strand; PAM type: NNGRRT; PAM sequence: ATGAGT
ctcccaatcaacatagtact

SEQ ID NO: 16914 - DNA, 20 bp, Artificial Sequence
  Description of Artificial Sequence: Synthetic oligonucleotide
  Target: LAMA2; (-) strand; PAM type: NNGRRT; PAM sequence: TTGGGT
gttacaactgaagatgagat

SEQ ID NO: 16915 - DNA, 20 bp, Artificial Sequence
  Description of Artificial Sequence: Synthetic oligonucleotide
  Target: LAMA2; (-) strand; PAM type: NNGRRT; PAM sequence: GAGGGT
ttggggattatggggatgat

SEQ ID NO: 16916 - DNA, 20 bp, Artificial Sequence
  Description of Artificial Sequence: Synthetic oligonucleotide
  Target: LAMA2; (-) strand; PAM type: NNGRRT; PAM sequence: GGGGAT
ctttgacatttggggattat

SEQ ID NO: 16917 - DNA, 20 bp, Artificial Sequence
  Description of Artificial Sequence: Synthetic oligonucleotide
  Target: LAMA2; (-) strand; PAM type: NNGRRT; PAM sequence: GGGGAT
tctggtttcctttgacattt

SEQ ID NO: 16918 - DNA, 20 bp, Artificial Sequence
  Description of Artificial Sequence: Synthetic oligonucleotide
  Target: LAMA2; (-) strand; PAM type: NNGRRT; PAM sequence: TTGAAT
tataaaggaaaaagttttaa

SEQ ID NO: 16919 - DNA, 20 bp, Artificial Sequence
  Description of Artificial Sequence: Synthetic oligonucleotide
  Target: LAMA2; (-) strand; PAM type: NNGRRT; PAM sequence: CTGGGT
ctataaagaactgcccgaaa

SEQ ID NO: 16920 - DNA, 20 bp, Artificial Sequence
  Description of Artificial Sequence: Synthetic oligonucleotide
  Target: LAMA2; (-) strand; PAM type: NNGRRT; PAM sequence: AAGGGT
tctgagattaggaataagat

SEQ ID NO: 16921 - DNA, 20 bp, Artificial Sequence
  Description of Artificial Sequence: Synthetic oligonucleotide
  Target: LAMA2; (-) strand; PAM type: NNGRRT; PAM sequence: AGGAAT
ttgaaagcttttctgagatt

SEQ ID NO: 16922 - DNA, 20 bp, Artificial Sequence
  Description of Artificial Sequence: Synthetic oligonucleotide
  Target: LAMA2; (-) strand; PAM type: NNGRRT; PAM sequence: CTGAAT
agtctacagctgatgtcata

SEQ ID NO: 16923 - DNA, 20 bp, Artificial Sequence
  Description of Artificial Sequence: Synthetic oligonucleotide
  Target: LAMA2; (-) strand; PAM type: NNGRRT; PAM sequence: AAGAAT
tataccactttcacagaata

SEQ ID NO: 16924 - DNA, 20 bp, Artificial Sequence
  Description of Artificial Sequence: Synthetic oligonucleotide
  Target: LAMA2; (-) strand; PAM type: NNGRRT; PAM sequence: CAGAAT
actactgtataccactttca

SEQ ID NO: 16925 - DNA, 20 bp, Artificial Sequence
  Description of Artificial Sequence: Synthetic oligonucleotide
  Target: LAMA2; (-) strand; PAM type: NNGRRT; PAM sequence: TGGAAT
cagacatactctgggggtcc

SEQ ID NO: 16926 - DNA, 20 bp, Artificial Sequence
  Description of Artificial Sequence: Synthetic oligonucleotide
  Target: LAMA2; (-) strand; PAM type: NNGRRT; PAM sequence: GGGGGT
tgcagtttcagacatactct

SEQ ID NO: 16927 - DNA, 20 bp, Artificial Sequence
  Description of Artificial Sequence: Synthetic oligonucleotide
  Target: LAMA2; (-) strand; PAM type: NNGRRT; PAM sequence: TAGAAT
ctttttcataggtatataca

SEQ ID NO: 16928 - DNA, 20 bp, Artificial Sequence
  Description of Artificial Sequence: Synthetic oligonucleotide
  Target: LAMA2; (-) strand; PAM type: NNGRRT; PAM sequence: GGGAGT
tacaataagatattttgagg

SEQ ID NO: 16929 - DNA, 20 bp, Artificial Sequence
  Description of Artificial Sequence: Synthetic oligonucleotide
  Target: LAMA2; (-) strand; PAM type: NNGRRT; PAM sequence: ATGAGT
acatcatcacaaggagaaag

SEQ ID NO: 16930 - DNA, 20 bp, Artificial Sequence
  Description of Artificial Sequence: Synthetic oligonucleotide
  Target: LAMA2; (-) strand; PAM type: NNGRRT; PAM sequence: AAGGGT
attgtcatagctcaataatc

SEQ ID NO: 16931 - DNA, 20 bp, Artificial Sequence
  Description of Artificial Sequence: Synthetic oligonucleotide
  Target: LAMA2; (-) strand; PAM type: NNGRRT; PAM sequence: TAGGGT
agatgaaccattcctttttc

SEQ ID NO: 16932 - DNA, 20 bp, Artificial Sequence
  Description of Artificial Sequence: Synthetic oligonucleotide
  Target: LAMA2; (-) strand; PAM type: NNGRRT; PAM sequence: CAGGAT
gaattgtgcattttgagtag

SEQ ID NO: 16933 - DNA, 20 bp, Artificial Sequence
  Description of Artificial Sequence: Synthetic oligonucleotide
  Target: LAMA2; (-) strand; PAM type: NNGRRT; PAM sequence: TTGAGT
taagttttgaattgtgcatt

SEQ ID NO: 16934 - DNA, 20 bp, Artificial Sequence
  Description of Artificial Sequence: Synthetic oligonucleotide
  Target: LAMA2; (-) strand; PAM type: NNGRRT; PAM sequence: TTGAAT
agaaaaacaattcataagtt

SEQ ID NO: 16935 - DNA, 20 bp, Artificial Sequence
  Description of Artificial Sequence: Synthetic oligonucleotide
  Target: LAMA2; (-) strand; PAM type: NNGRRT; PAM sequence: ATGAGT
aaatggataattcaacatac

SEQ ID NO: 16936 - DNA, 20 bp, Artificial Sequence
  Description of Artificial Sequence: Synthetic oligonucleotide
  Target: LAMA2; (-) strand; PAM type: NNGRRT; PAM sequence: ATGGAT
gggatttatccttggaataa

SEQ ID NO: 16937 - DNA, 20 bp, Artificial Sequence
  Description of Artificial Sequence: Synthetic oligonucleotide
  Target: LAMA2; (-) strand; PAM type: NNGRRT; PAM sequence: TGGAAT
gattaagagggatttatcct

SEQ ID NO: 16938 - DNA, 20 bp, Artificial Sequence
  Description of Artificial Sequence: Synthetic oligonucleotide
  Target: LAMA2; (-) strand; PAM type: NNGRRT; PAM sequence: AGGGAT
gaacattcaccatgattaag

SEQ ID NO: 16939 - DNA, 20 bp, Artificial Sequence
  Description of Artificial Sequence: Synthetic oligonucleotide
  Target: LAMA2; (-) strand; PAM type: NNGRRT; PAM sequence: GAGAAT
agtacctgataatgagtaag

SEQ ID NO: 16940 - DNA, 20 bp, Artificial Sequence
  Description of Artificial Sequence: Synthetic oligonucleotide
  Target: LAMA2; (-) strand; PAM type: NNGRRT; PAM sequence: ATGAGT
tgggtaatgagtacctgata

SEQ ID NO: 16941 - DNA, 20 bp, Artificial Sequence
  Description of Artificial Sequence: Synthetic oligonucleotide
  Target: LAMA2; (-) strand; PAM type: NNGRRT; PAM sequence: ATGAGT
aatctgaacaaatttgggta

SEQ ID NO: 16942 - DNA, 20 bp, Artificial Sequence
  Description of Artificial Sequence: Synthetic oligonucleotide
  Target: LAMA2; (-) strand; PAM type: NNGRRT; PAM sequence: TTGGGT
aatagaaaatctgaacaaat

SEQ ID NO: 16943 - DNA, 20 bp, Artificial Sequence
  Description of Artificial Sequence: Synthetic oligonucleotide
  Target: LAMA2; (-) strand; PAM type: NNGRRT; PAM sequence: CTGAAT
acacatagaatcgaccaaga

SEQ ID NO: 16944 - DNA, 20 bp, Artificial Sequence
  Description of Artificial Sequence: Synthetic oligonucleotide
  Target: LAMA2; (-) strand; PAM type: NNGRRT; PAM sequence: TAGAAT
gttgataaaggctagacaca

SEQ ID NO: 16945 - DNA, 20 bp, Artificial Sequence
  Description of Artificial Sequence: Synthetic oligonucleotide
  Target: LAMA2; (-) strand; PAM type: NNGRRT; PAM sequence: AAGGAT
acattgcaacagaaataaaa

SEQ ID NO: 16946 - DNA, 20 bp, Artificial Sequence
  Description of Artificial Sequence: Synthetic oligonucleotide
  Target: LAMA2; (-) strand; PAM type: NNGRRT; PAM sequence: GAGGAT
caaactaagaaaaaaggaat

SEQ ID NO: 16947 - DNA, 20 bp, Artificial Sequence
  Description of Artificial Sequence: Synthetic oligonucleotide
  Target: LAMA2; (-) strand; PAM type: NNGRRT; PAM sequence: AGGAAT
ttcagccaaactaagaaaaa

SEQ ID NO: 16948 - DNA, 20 bp, Artificial Sequence
  Description of Artificial Sequence: Synthetic oligonucleotide
  Target: LAMA2; (-) strand; PAM type: NNGRRT; PAM sequence: AAGAAT
tagaaaagatcaatataagt

SEQ ID NO: 16949 - DNA, 20 bp, Artificial Sequence
  Description of Artificial Sequence: Synthetic oligonucleotide
  Target: LAMA2; (-) strand; PAM type: NNGRRT; PAM sequence: GAGAAT
aatgaaattgtgactagaaa

SEQ ID NO: 16950 - DNA, 20 bp, Artificial Sequence
  Description of Artificial Sequence: Synthetic oligonucleotide
  Target: LAMA2; (-) strand; PAM type: NNGRRT; PAM sequence: GGGAAT
gacaaagatagaaaagggaa

SEQ ID NO: 16951 - DNA, 20 bp, Artificial Sequence
  Description of Artificial Sequence: Synthetic oligonucleotide
  Target: LAMA2; (-) strand; PAM type: NNGRRT; PAM sequence: TGGGAT
atacaacacaccaaaacttc

SEQ ID NO: 16952 - DNA, 20 bp, Artificial Sequence
  Description of Artificial Sequence: Synthetic oligonucleotide
  Target: LAMA2; (-) strand; PAM type: NNGRRT; PAM sequence: ATGGGT
aacacactccaaaatgacca

SEQ ID NO: 16953 - DNA, 20 bp, Artificial Sequence
  Description of Artificial Sequence: Synthetic oligonucleotide
  Target: LAMA2; (-) strand; PAM type: NNGRRT; PAM sequence: TAGAAT
gtaagtggtgaagttgtaat

SEQ ID NO: 16954 - DNA, 20 bp, Artificial Sequence
  Description of Artificial Sequence: Synthetic oligonucleotide
  Target: LAMA2; (-) strand; PAM type: NNGRRT; PAM sequence: GAGAGT
gataaggggactgaggcact

SEQ ID NO: 16955 - DNA, 20 bp, Artificial Sequence
  Description of Artificial Sequence: Synthetic oligonucleotide
  Target: LAMA2; (-) strand; PAM type: NNGRRT; PAM sequence: TTGAAT
tccctcatgggacctaggca

SEQ ID NO: 16956 - DNA, 20 bp, Artificial Sequence
  Description of Artificial Sequence: Synthetic oligonucleotide
  Target: LAMA2; (-) strand; PAM type: NNGRRT; PAM sequence: AAGAAT
aacaaaacataagtaagaga

SEQ ID NO: 16957 - DNA, 20 bp, Artificial Sequence
  Description of Artificial Sequence: Synthetic oligonucleotide
  Target: LAMA2; (-) strand; PAM type: NNGRRT; PAM sequence: TAGAAT
aggtttgggagtcaagatga

SEQ ID NO: 16958 - DNA, 20 bp, Artificial Sequence
  Description of Artificial Sequence: Synthetic oligonucleotide
  Target: LAMA2; (-) strand; PAM type: NNGRRT; PAM sequence: GGGAGT
tatcaacatggagtaggttt

SEQ ID NO: 16959 - DNA, 20 bp, Artificial Sequence
  Description of Artificial Sequence: Synthetic oligonucleotide
  Target: LAMA2; (-) strand; PAM type: NNGRRT; PAM sequence: TGGAGT
taagattaagactatcaaca

SEQ ID NO: 16960 - DNA, 20 bp, Artificial Sequence
  Description of Artificial Sequence: Synthetic oligonucleotide
  Target: LAMA2; (-) strand; PAM type: NNGRRT; PAM sequence: AGGGAT
aggtttttggatcaagcagc

SEQ ID NO: 16961 - DNA, 20 bp, Artificial Sequence
  Description of Artificial Sequence: Synthetic oligonucleotide
  Target: LAMA2; (-) strand; PAM type: NNGRRT; PAM sequence: TTGGAT
gtgaagtcattgttaggttt

SEQ ID NO: 16962 - DNA, 20 bp, Artificial Sequence
  Description of Artificial Sequence: Synthetic oligonucleotide
  Target: LAMA2; (-) strand; PAM type: NNGRRT; PAM sequence: ATGAGT
aacagtgcagaaggagggaa

SEQ ID NO: 16963 - DNA, 20 bp, Artificial Sequence
  Description of Artificial Sequence: Synthetic oligonucleotide
  Target: LAMA2; (-) strand; PAM type: NNGRRT; PAM sequence: ATGAGT
aaataagagaaagcaaaaag

SEQ ID NO: 16964 - DNA, 20 bp, Artificial Sequence
  Description of Artificial Sequence: Synthetic oligonucleotide
  Target: LAMA2; (-) strand; PAM type: NNGRRT; PAM sequence: CTGAAT
cactctggacttagggtaag

SEQ ID NO: 16965 - DNA, 20 bp, Artificial Sequence
  Description of Artificial Sequence: Synthetic oligonucleotide
  Target: LAMA2; (-) strand; PAM type: NNGRRT; PAM sequence: TAGGGT
ttggaaattcactctggact

SEQ ID NO: 16966 - DNA, 20 bp, Artificial Sequence
  Description of Artificial Sequence: Synthetic oligonucleotide
  Target: LAMA2; (-) strand; PAM type: NNGRRT; PAM sequence: TGGAAT
ataaacgtgtgaacctgagt

SEQ ID NO: 16967 - DNA, 20 bp, Artificial Sequence
  Description of Artificial Sequence: Synthetic oligonucleotide
  Target: LAMA2; (-) strand; PAM type: NNGRRT; PAM sequence: CTGAGT
taggtgataaacgtgtgaac

SEQ ID NO: 16968 - DNA, 20 bp, Artificial Sequence
  Description of Artificial Sequence: Synthetic oligonucleotide
  Target: LAMA2; (-) strand; PAM type: NNGRRT; PAM sequence: AGGAGT
ttgagtcttgaaggatgaaa

SEQ ID NO: 16969 - DNA, 20 bp, Artificial Sequence
  Description of Artificial Sequence: Synthetic oligonucleotide
  Target: LAMA2; (-) strand; PAM type: NNGRRT; PAM sequence: AAGGAT
aacaattttgttgagtcttg

SEQ ID NO: 16970 - DNA, 20 bp, Artificial Sequence
  Description of Artificial Sequence: Synthetic oligonucleotide
  Target: LAMA2; (-) strand; PAM type: NNGRRT; PAM sequence: TTGAGT
atgaaaaggcaacaattttg

SEQ ID NO: 16971 - DNA, 20 bp, Artificial Sequence
  Description of Artificial Sequence: Synthetic oligonucleotide
  Target: LAMA2; (-) strand; PAM type: NNGRRT; PAM sequence: AAGAGT
tattaatatcagaaggatgg

SEQ ID NO: 16972 - DNA, 20 bp, Artificial Sequence
  Description of Artificial Sequence: Synthetic oligonucleotide
  Target: LAMA2; (-) strand; PAM type: NNGRRT; PAM sequence: AAGGAT
caaaaaattattaatatcag

SEQ ID NO: 16973 - DNA, 20 bp, Artificial Sequence
  Description of Artificial Sequence: Synthetic oligonucleotide
  Target: LAMA2; (-) strand; PAM type: NNGRRT; PAM sequence: CAGGAT
ggtcttgtggtgctttcctc

SEQ ID NO: 16974 - DNA, 20 bp, Artificial Sequence
  Description of Artificial Sequence: Synthetic oligonucleotide
  Target: LAMA2; (-) strand; PAM type: NNGRRT; PAM sequence: TGGGAT
ggctactatgtatcaagcat

SEQ ID NO: 16975 - DNA, 20 bp, Artificial Sequence
  Description of Artificial Sequence: Synthetic oligonucleotide
  Target: LAMA2; (-) strand; PAM type: NNGRRT; PAM sequence: ATGAAT
gttaagcaaaaagaaagtaa

SEQ ID NO: 16976 - DNA, 20 bp, Artificial Sequence
  Description of Artificial Sequence: Synthetic oligonucleotide
  Target: LAMA2; (-) strand; PAM type: NNGRRT; PAM sequence: CTGGAT
ttcatcgttgggtggaattc

SEQ ID NO: 16977 - DNA, 20 bp, Artificial Sequence
  Description of Artificial Sequence: Synthetic oligonucleotide
  Target: LAMA2; (-) strand; PAM type: NNGRRT; PAM sequence: TGGAAT
ataggtctttcatcgttggg

SEQ ID NO: 16978 - DNA, 20 bp, Artificial Sequence
  Description of Artificial Sequence: Synthetic oligonucleotide
  Target: LAMA2; (-) strand; PAM type: NNGRRT; PAM sequence: TTGGGT
cgcctataggtctttcatcg

SEQ ID NO: 16979 - DNA, 20 bp, Artificial Sequence
  Description of Artificial Sequence: Synthetic oligonucleotide
  Target: LAMA2; (-) strand; PAM type: NNGRRT; PAM sequence: CTGAAT
gggagaaccaggaaaggcaa

SEQ ID NO: 16980 - DNA, 20 bp, Artificial Sequence
  Description of Artificial Sequence: Synthetic oligonucleotide
  Target: LAMA2; (-) strand; PAM type: NNGRRT; PAM sequence: GGGAGT
atgccgtgaagggatcagat

SEQ ID NO: 16981 - DNA, 20 bp, Artificial Sequence
  Description of Artificial Sequence: Synthetic oligonucleotide
  Target: LAMA2; (-) strand; PAM type: NNGRRT; PAM sequence: AGGGAT
catcattctggatgccgtga

SEQ ID NO: 16982 - DNA, 20 bp, Artificial Sequence
  Description of Artificial Sequence: Synthetic oligonucleotide
  Target: LAMA2; (-) strand; PAM type: NNGRRT; PAM sequence: CTGGAT
caaacttttggatcatcatt

SEQ ID NO: 16983 - DNA, 20 bp, Artificial Sequence
  Description of Artificial Sequence: Synthetic oligonucleotide
  Target: LAMA2; (-) strand; PAM type: NNGRRT; PAM sequence: TTGGAT
tcacatttggacccaaactt

SEQ ID NO: 16984 - DNA, 20 bp, Artificial Sequence
  Description of Artificial Sequence: Synthetic oligonucleotide
  Target: LAMA2; (-) strand; PAM type: NNGRRT; PAM sequence: AAGAAT
gaggcaaaatcatgatgagc

SEQ ID NO: 16985 - DNA, 20 bp, Artificial Sequence
  Description of Artificial Sequence: Synthetic oligonucleotide
  Target: LAMA2; (-) strand; PAM type: NNGRRT; PAM sequence: TAGGGT
cttgcagtttgaaaattcag

SEQ ID NO: 16986 - DNA, 20 bp, Artificial Sequence
  Description of Artificial Sequence: Synthetic oligonucleotide
  Target: LAMA2; (-) strand; PAM type: NNGRRT; PAM sequence: TGGGGT
gatgtgatctagttgttggg

SEQ ID NO: 16987 - DNA, 20 bp, Artificial Sequence
  Description of Artificial Sequence: Synthetic oligonucleotide
  Target: LAMA2; (-) strand; PAM type: NNGRRT; PAM sequence: TTGGGT
aaagggatgtgatctagttg

SEQ ID NO: 16988 - DNA, 20 bp, Artificial Sequence
  Description of Artificial Sequence: Synthetic oligonucleotide
  Target: LAMA2; (-) strand; PAM type: NNGRRT; PAM sequence: AGGGAT
aaacatagtacccctaataa

SEQ ID NO: 16989 - DNA, 20 bp, Artificial Sequence
  Description of Artificial Sequence: Synthetic oligonucleotide
  Target: LAMA2; (-) strand; PAM type: NNGRRT; PAM sequence: ATGGGT
gacatgaatcaactcattca

SEQ ID NO: 16990 - DNA, 20 bp, Artificial Sequence
  Description of Artificial Sequence: Synthetic oligonucleotide
  Target: LAMA2; (-) strand; PAM type: NNGRRT; PAM sequence: ATGAAT
ataataaagaaggaagggac

SEQ ID NO: 16991 - DNA, 20 bp, Artificial Sequence
  Description of Artificial Sequence: Synthetic oligonucleotide
  Target: LAMA2; (-) strand; PAM type: NNGRRT; PAM sequence: ATGAAT
gatataatctttattcactc

SEQ ID NO: 16992 - DNA, 20 bp, Artificial Sequence
  Description of Artificial Sequence: Synthetic oligonucleotide
  Target: LAMA2; (-) strand; PAM type: NNGRRT; PAM sequence: CAGGAT
atggctttcaggtcatattt

SEQ ID NO: 16993 - DNA, 20 bp, Artificial Sequence
  Description of Artificial Sequence: Synthetic oligonucleotide
  Target: LAMA2; (-) strand; PAM type: NNGRRT; PAM sequence: TGGGAT
accctggtctctagaaatgc

SEQ ID NO: 16994 - DNA, 20 bp, Artificial Sequence
  Description of Artificial Sequence: Synthetic oligonucleotide
  Target: LAMA2; (-) strand; PAM type: NNGRRT; PAM sequence: TGGAGT
aatcctcccacttcagcctt

SEQ ID NO: 16995 - DNA, 20 bp, Artificial Sequence
  Description of Artificial Sequence: Synthetic oligonucleotide
  Target: LAMA2; (-) strand; PAM type: NNGRRT; PAM sequence: TGGAAT
gctcttaacttcttccttta

SEQ ID NO: 16996 - DNA, 20 bp, Artificial Sequence
  Description of Artificial Sequence: Synthetic oligonucleotide
  Target: LAMA2; (-) strand; PAM type: NNGRRT; PAM sequence: AAGAAT
attttttcaactattgacca

SEQ ID NO: 16997 - DNA, 20 bp, Artificial Sequence
  Description of Artificial Sequence: Synthetic oligonucleotide
  Target: LAMA2; (-) strand; PAM type: NNGRRT; PAM sequence: TTGAAT
agacaatcagtcagtgtttg

SEQ ID NO: 16998 - DNA, 20 bp, Artificial Sequence
  Description of Artificial Sequence: Synthetic oligonucleotide
  Target: LAMA2; (-) strand; PAM type: NNGRRT; PAM sequence: GCGGGT
ccagcacctaacattatatg

SEQ ID NO: 16999 - DNA, 20 bp, Artificial Sequence
  Description of Artificial Sequence: Synthetic oligonucleotide
  Target: LAMA2; (-) strand; PAM type: NNGRRT; PAM sequence: TTGGAT
tgattagtttattgaattaa

SEQ ID NO: 17000 - DNA, 20 bp, Artificial Sequence
  Description of Artificial Sequence: Synthetic oligonucleotide
  Target: LAMA2; (-) strand; PAM type: NNGRRT; PAM sequence: TTGAAT
ctaaaatcatgattagttta

SEQ ID NO: 17001 - DNA, 20 bp, Artificial Sequence
  Description of Artificial Sequence: Synthetic oligonucleotide
  Target: LAMA2; (-) strand; PAM type: NNGRRT; PAM sequence: TAGAAT
tcaaactaagtgagggttca

SEQ ID NO: 17002 - DNA, 20 bp, Artificial Sequence
  Description of Artificial Sequence: Synthetic oligonucleotide
  Target: LAMA2; (-) strand; PAM type: NNGRRT; PAM sequence: GAGGGT
tcaaggtaatcaaactaagt

SEQ ID NO: 17003 - DNA, 20 bp, Artificial Sequence
  Description of Artificial Sequence: Synthetic oligonucleotide
  Target: LAMA2; (-) strand; PAM type: NNGRRT; PAM sequence: CTGAAT
tattttaaaaatatttttaa

SEQ ID NO: 17004 - DNA, 20 bp, Artificial Sequence
  Description of Artificial Sequence: Synthetic oligonucleotide
  Target: LAMA2; (-) strand; PAM type: NNGRRT; PAM sequence: CAGAAT
ctgagcacatctattttttc

SEQ ID NO: 17005 - DNA, 20 bp, Artificial Sequence
  Description of Artificial Sequence: Synthetic oligonucleotide
  Target: LAMA2; (-) strand; PAM type: NNGRRT; PAM sequence: GAGAAT
gaaattactttggatcacgt

SEQ ID NO: 17006 - DNA, 20 bp, Artificial Sequence
  Description of Artificial Sequence: Synthetic oligonucleotide
  Target: LAMA2; (-) strand; PAM type: NNGRRT; PAM sequence: TTGGAT
gcacagagaacgaaattact

SEQ ID NO: 17007 - DNA, 20 bp, Artificial Sequence
  Description of Artificial Sequence: Synthetic oligonucleotide
  Target: LAMA2; (-) strand; PAM type: NNGRRT; PAM sequence: TGGAAT
ttgcttttactcatatatct

SEQ ID NO: 17008 - DNA, 20 bp, Artificial Sequence
  Description of Artificial Sequence: Synthetic oligonucleotide
  Target: LAMA2; (-) strand; PAM type: NNGRRT; PAM sequence: TTGAAT
cttaatgtccgaaacagagc

SEQ ID NO: 17009 - DNA, 20 bp, Artificial Sequence
  Description of Artificial Sequence: Synthetic oligonucleotide
  Target: LAMA2; (-) strand; PAM type: NNGRRT; PAM sequence: CAGGAT
aaaaggggaaatataataga

SEQ ID NO: 17010 - DNA, 20 bp, Artificial Sequence
  Description of Artificial Sequence: Synthetic oligonucleotide
  Target: LAMA2; (-) strand; PAM type: NNGRRT; PAM sequence: TTGAGT
tactgttattttaaaagctc

SEQ ID NO: 17011 - DNA, 20 bp, Artificial Sequence
  Description of Artificial Sequence: Synthetic oligonucleotide
  Target: LAMA2; (-) strand; PAM type: NNGRRT; PAM sequence: TAGAAT
gacccacatacaaatacttt

SEQ ID NO: 17012 - DNA, 20 bp, Artificial Sequence
  Description of Artificial Sequence: Synthetic oligonucleotide
  Target: LAMA2; (-) strand; PAM type: NNGRRT; PAM sequence: TGGAAT
gcaactgaggcaggtaccaa

SEQ ID NO: 17013 - DNA, 20 bp, Artificial Sequence
  Description of Artificial Sequence: Synthetic oligonucleotide
  Target: LAMA2; (-) strand; PAM type: NNGRRT; PAM sequence: TTGAGT
ggctgaggcatgagaattgc

SEQ ID NO: 17014 - DNA, 20 bp, Artificial Sequence
  Description of Artificial Sequence: Synthetic oligonucleotide
  Target: LAMA2; (-) strand; PAM type: NNGRRT; PAM sequence: GAGAAT
cactcagaaggctgaggcat

SEQ ID NO: 17015 - DNA, 20 bp, Artificial Sequence
  Description of Artificial Sequence: Synthetic oligonucleotide
  Target: LAMA2; (-) strand; PAM type: NNGRRT; PAM sequence: GGGAGT
tgggtgtggtggtgaatgct

SEQ ID NO: 17016 - DNA, 20 bp, Artificial Sequence
  Description of Artificial Sequence: Synthetic oligonucleotide
  Target: LAMA2; (-) strand; PAM type: NNGRRT; PAM sequence: GTGAAT
ataactaactgggtgtggtg

SEQ ID NO: 17017 - DNA, 20 bp, Artificial Sequence
  Description of Artificial Sequence: Synthetic oligonucleotide
  Target: LAMA2; (-) strand; PAM type: NNGRRT; PAM sequence: CTGGGT
aaaaaaagtacaataactaa

SEQ ID NO: 17018 - DNA, 20 bp, Artificial Sequence
  Description of Artificial Sequence: Synthetic oligonucleotide
  Target: LAMA2; (-) strand; PAM type: NNGRRT; PAM sequence: AGGAGT
aggagaattgctggaggtcc

SEQ ID NO: 17019 - DNA, 20 bp, Artificial Sequence
  Description of Artificial Sequence: Synthetic oligonucleotide
  Target: LAMA2; (-) strand; PAM type: NNGRRT; PAM sequence: GAGAAT
atattgagaagccaagccag

SEQ ID NO: 17020 - DNA, 20 bp, Artificial Sequence
  Description of Artificial Sequence: Synthetic oligonucleotide
  Target: LAMA2; (-) strand; PAM type: NNGRRT; PAM sequence: ATGGGT
agttttcttgtacattatcc

SEQ ID NO: 17021 - DNA, 20 bp, Artificial Sequence
  Description of Artificial Sequence: Synthetic oligonucleotide
  Target: LAMA2; (-) strand; PAM type: NNGRRT; PAM sequence: CTGAGT
atctgtgccaaataattttg

SEQ ID NO: 17022 - DNA, 20 bp, Artificial Sequence
  Description of Artificial Sequence: Synthetic oligonucleotide
  Target: LAMA2; (-) strand; PAM type: NNGRRT; PAM sequence: GAGAAT
ctctctaaatctttattaat

SEQ ID NO: 17023 - DNA, 20 bp, Artificial Sequence
  Description of Artificial Sequence: Synthetic oligonucleotide
  Target: LAMA2; (-) strand; PAM type: NNGRRT; PAM sequence: TGGGGT
attaattcatttaatctagg

SEQ ID NO: 17024 - DNA, 20 bp, Artificial Sequence
  Description of Artificial Sequence: Synthetic oligonucleotide
  Target: LAMA2; (-) strand; PAM type: NNGRRT; PAM sequence: TGGGGT
gatgagcattttgcaaactt

SEQ ID NO: 17025 - DNA, 20 bp, Artificial Sequence
  Description of Artificial Sequence: Synthetic oligonucleotide
  Target: LAMA2; (-) strand; PAM type: NNGRRT; PAM sequence: ATGGAT
tttaacctagtaaacagaag

SEQ ID NO: 17026 - DNA, 20 bp, Artificial Sequence
  Description of Artificial Sequence: Synthetic oligonucleotide
  Target: LAMA2; (-) strand; PAM type: NNGRRT; PAM sequence: AAGAAT
ctttaggattttagcaatgc

SEQ ID NO: 17027 - DNA, 20 bp, Artificial Sequence
  Description of Artificial Sequence: Synthetic oligonucleotide
  Target: LAMA2; (-) strand; PAM type: NNGRRT; PAM sequence: TAGGAT
tttagaaattatccagtctt

SEQ ID NO: 17028 - DNA, 20 bp, Artificial Sequence
  Description of Artificial Sequence: Synthetic oligonucleotide
  Target: LAMA2; (-) strand; PAM type: NNGRRT; PAM sequence: TGGGAT
acctcggcctcccaaaatcc

SEQ ID NO: 17029 - DNA, 20 bp, Artificial Sequence
  Description of Artificial Sequence: Synthetic oligonucleotide
  Target: LAMA2; (-) strand; PAM type: NNGRRT; PAM sequence: TAGAAT
tgtgcttcctgtacagcctg

SEQ ID NO: 17030 - DNA, 20 bp, Artificial Sequence
  Description of Artificial Sequence: Synthetic oligonucleotide
  Target: LAMA2; (-) strand; PAM type: NNGRRT; PAM sequence: GTGAGT
ttggaactgtcctcatgaca

SEQ ID NO: 17031 - DNA, 20 bp, Artificial Sequence
  Description of Artificial Sequence: Synthetic oligonucleotide
  Target: LAMA2; (-) strand; PAM type: NNGRRT; PAM sequence: GAGAAT
ggcctggtgggagatgattg

SEQ ID NO: 17032 - DNA, 20 bp, Artificial Sequence
  Description of Artificial Sequence: Synthetic oligonucleotide
  Target: LAMA2; (-) strand; PAM type: NNGRRT; PAM sequence: TAGGAT
ctctttctccaaaagtgata

SEQ ID NO: 17033 - DNA, 20 bp, Artificial Sequence
  Description of Artificial Sequence: Synthetic oligonucleotide
  Target: LAMA2; (-) strand; PAM type: NNGRRT; PAM sequence: GTGAGT
attagcaggcaagctggtgg

SEQ ID NO: 17034 - DNA, 20 bp, Artificial Sequence
  Description of Artificial Sequence: Synthetic oligonucleotide
  Target: LAMA2; (-) strand; PAM type: NNGRRT; PAM sequence: GTGGGT
atggattagcaggcaagctg

SEQ ID NO: 17035 - DNA, 20 bp, Artificial Sequence
  Description of Artificial Sequence: Synthetic oligonucleotide
  Target: LAMA2; (-) strand; PAM type: NNGRRT; PAM sequence: ATGGAT
atttgagtgacacagatcag

SEQ ID NO: 17036 - DNA, 20 bp, Artificial Sequence
  Description of Artificial Sequence: Synthetic oligonucleotide
  Target: LAMA2; (-) strand; PAM type: NNGRRT; PAM sequence: TTGAGT
ttcttcactgcctgctgtat

SEQ ID NO: 17037 - DNA, 20 bp, Artificial Sequence
  Description of Artificial Sequence: Synthetic oligonucleotide
  Target: LAMA2; (-) strand; PAM type: NNGRRT; PAM sequence: GAGAAT
gattttatgacagatagaag

SEQ ID NO: 17038 - DNA, 20 bp, Artificial Sequence
  Description of Artificial Sequence: Synthetic oligonucleotide
  Target: LAMA2; (-) strand; PAM type: NNGRRT; PAM sequence: CTGGAT
ttatccctagttattggtac

SEQ ID NO: 17039 - DNA, 20 bp, Artificial Sequence
  Description of Artificial Sequence: Synthetic oligonucleotide
  Target: LAMA2; (-) strand; PAM type: NNGRRT; PAM sequence: TAGAAT
gtgaatcttgagggtcatct

SEQ ID NO: 17040 - DNA, 20 bp, Artificial Sequence
  Description of Artificial Sequence: Synthetic oligonucleotide
  Target: LAMA2; (-) strand; PAM type: NNGRRT; PAM sequence: GAGGGT
ccccagaggttgtgaatctt

SEQ ID NO: 17041 - DNA, 20 bp, Artificial Sequence
  Description of Artificial Sequence: Synthetic oligonucleotide
  Target: LAMA2; (-) strand; PAM type: NNGRRT; PAM sequence: GTGAAT
ggatgtgtaccccagaggtt

SEQ ID NO: 17042 - DNA, 20 bp, Artificial Sequence
  Description of Artificial Sequence: Synthetic oligonucleotide
  Target: LAMA2; (-) strand; PAM type: NNGRRT; PAM sequence: TAGGAT
ctcaacaggaggggatcata

SEQ ID NO: 17043 - DNA, 20 bp, Artificial Sequence
  Description of Artificial Sequence: Synthetic oligonucleotide
  Target: LAMA2; (-) strand; PAM type: NNGRRT; PAM sequence: GGGGAT
tccaatcacactcaacagga

SEQ ID NO: 17044 - DNA, 20 bp, Artificial Sequence
  Description of Artificial Sequence: Synthetic oligonucleotide
  Target: LAMA2; (-) strand; PAM type: NNGRRT; PAM sequence: GGGAAT
gtaaaatgttacctaatcat

SEQ ID NO: 17045 - DNA, 20 bp, Artificial Sequence
  Description of Artificial Sequence: Synthetic oligonucleotide
  Target: LAMA2; (-) strand; PAM type: NNGRRT; PAM sequence: CCGAAT
tttagccacctgagttatat

SEQ ID NO: 17046 - DNA, 20 bp, Artificial Sequence
  Description of Artificial Sequence: Synthetic oligonucleotide
  Target: LAMA2; (-) strand; PAM type: NNGRRT; PAM sequence: CTGAGT
aagaaaactaatttagccac

SEQ ID NO: 17047 - DNA, 20 bp, Artificial Sequence
  Description of Artificial Sequence: Synthetic oligonucleotide
  Target: LAMA2; (-) strand; PAM type: NNGRRT; PAM sequence: TTGAGT
ccctcagaataatcttcctt

SEQ ID NO: 17048 - DNA, 20 bp, Artificial Sequence
  Description of Artificial Sequence: Synthetic oligonucleotide
  Target: LAMA2; (-) strand; PAM type: NNGRRT; PAM sequence: CAGAAT
ttgattaagttgggtgccct

SEQ ID NO: 17049 - DNA, 20 bp, Artificial Sequence
  Description of Artificial Sequence: Synthetic oligonucleotide
  Target: LAMA2; (-) strand; PAM type: NNGRRT; PAM sequence: TTGGGT
taggagttcacttgattaag

SEQ ID NO: 17050 - DNA, 20 bp, Artificial Sequence
  Description of Artificial Sequence: Synthetic oligonucleotide
  Target: LAMA2; (-) strand; PAM type: NNGRRT; PAM sequence: AGGAGT
tgagaactagacactctttt

SEQ ID NO: 17051 - DNA, 20 bp, Artificial Sequence
  Description of Artificial Sequence: Synthetic oligonucleotide
  Target: LAMA2; (-) strand; PAM type: NNGRRT; PAM sequence: CTGAGT
tgtgggctaatgtgagtgtt

SEQ ID NO: 17052 - DNA, 20 bp, Artificial Sequence
  Description of Artificial Sequence: Synthetic oligonucleotide
  Target: LAMA2; (-) strand; PAM type: NNGRRT; PAM sequence: GTGAGT
ttgtccaactgtgggctaat

SEQ ID NO: 17053 - DNA, 20 bp, Artificial Sequence
  Description of Artificial Sequence: Synthetic oligonucleotide
  Target: LAMA2; (-) strand; PAM type: NNGRRT; PAM sequence: GAGGGT
ccagtccaccacatgttcat

SEQ ID NO: 17054 - DNA, 20 bp, Artificial Sequence
  Description of Artificial Sequence: Synthetic oligonucleotide
  Target: LAMA2; (-) strand; PAM type: NNGRRT; PAM sequence: GAGGAT
ctgggcaggggcagcaagct

SEQ ID NO: 17055 - DNA, 20 bp, Artificial Sequence
  Description of Artificial Sequence: Synthetic oligonucleotide
  Target: LAMA2; (-) strand; PAM type: NNGRRT; PAM sequence: TTGAAT
tataaatcatacttcaaatt

SEQ ID NO: 17056 - DNA, 20 bp, Artificial Sequence
  Description of Artificial Sequence: Synthetic oligonucleotide
  Target: LAMA2; (-) strand; PAM type: NNGRRT; PAM sequence: TTGAGT
gaagagaaaaagttgaggat

SEQ ID NO: 17057 - DNA, 20 bp, Artificial Sequence
  Description of Artificial Sequence: Synthetic oligonucleotide
  Target: LAMA2; (-) strand; PAM type: NNGRRT; PAM sequence: GAGGAT
tacattgaagagaaaaagtt

SEQ ID NO: 17058 - DNA, 20 bp, Artificial Sequence
  Description of Artificial Sequence: Synthetic oligonucleotide
  Target: LAMA2; (-) strand; PAM type: NNGRRT; PAM sequence: ATGAGT
atagataaagaaaaagaaaa

SEQ ID NO: 17059 - DNA, 20 bp, Artificial Sequence
  Description of Artificial Sequence: Synthetic oligonucleotide
  Target: LAMA2; (-) strand; PAM type: NNGRRT; PAM sequence: GAGAAT
ctacttatcaaatgttagca

SEQ ID NO: 17060 - DNA, 20 bp, Artificial Sequence
  Description of Artificial Sequence: Synthetic oligonucleotide
  Target: LAMA2; (-) strand; PAM type: NNGRRT; PAM sequence: ATGAAT
taagttaatattcaatgccc

SEQ ID NO: 17061 - DNA, 20 bp, Artificial Sequence
  Description of Artificial Sequence: Synthetic oligonucleotide
  Target: LAMA2; (-) strand; PAM type: NNGRRT; PAM sequence: CAGGGT
ttagtgaaccaatgaataaa

SEQ ID NO: 17062 - DNA, 20 bp, Artificial Sequence
  Description of Artificial Sequence: Synthetic oligonucleotide
  Target: LAMA2; (-) strand; PAM type: NNGRRT; PAM sequence: ATGAAT
aattaaggcttagtgaacca

SEQ ID NO: 17063 - DNA, 20 bp, Artificial Sequence
  Description of Artificial Sequence: Synthetic oligonucleotide
  Target: LAMA2; (-) strand; PAM type: NNGRRT; PAM sequence: CAGGAT
ccctggcataccatttggta

SEQ ID NO: 17064 - DNA, 20 bp, Artificial Sequence
  Description of Artificial Sequence: Synthetic oligonucleotide
  Target: LAMA2; (-) strand; PAM type: NNGRRT; PAM sequence: AAGAGT
atagcaattaattttcatga

SEQ ID NO: 17065 - DNA, 20 bp, Artificial Sequence
  Description of Artificial Sequence: Synthetic oligonucleotide
  Target: LAMA2; (-) strand; PAM type: NNGRRT; PAM sequence: CTGAAT
attataaaattgggatcaca

SEQ ID NO: 17066 - DNA, 20 bp, Artificial Sequence
  Description of Artificial Sequence: Synthetic oligonucleotide
  Target: LAMA2; (-) strand; PAM type: NNGRRT; PAM sequence: TGGGAT
tgagagtaaaattataaaat

SEQ ID NO: 17067 - DNA, 20 bp, Artificial Sequence
  Description of Artificial Sequence: Synthetic oligonucleotide
  Target: LAMA2; (-) strand; PAM type: NNGRRT; PAM sequence: GAGAGT
tatattcacatatatggatt

SEQ ID NO: 17068 - DNA, 20 bp, Artificial Sequence
  Description of Artificial Sequence: Synthetic oligonucleotide
  Target: LAMA2; (-) strand; PAM type: NNGRRT; PAM sequence: ATGGAT
tatgtattatattcacatat

SEQ ID NO: 17069 - DNA, 20 bp, Artificial Sequence
  Description of Artificial Sequence: Synthetic oligonucleotide
  Target: LAMA2; (-) strand; PAM type: NNGRRT; PAM sequence: TTGAAT
aaaacttgttaacctcatga

SEQ ID NO: 17070 - DNA, 20 bp, Artificial Sequence
  Description of Artificial Sequence: Synthetic oligonucleotide
  Target: LAMA2; (-) strand; PAM type: NNGRRT; PAM sequence: TAGAAT
agtaataaatgcttattagg

SEQ ID NO: 17071 - DNA, 20 bp, Artificial Sequence
  Description of Artificial Sequence: Synthetic oligonucleotide
  Target: LAMA2; (-) strand; PAM type: NNGRRT; PAM sequence: CTGAGT
ctgtcacctatatttcaaat

SEQ ID NO: 17072 - DNA, 20 bp, Artificial Sequence
  Description of Artificial Sequence: Synthetic oligonucleotide
  Target: LAMA2; (-) strand; PAM type: NNGRRT; PAM sequence: AAGAAT
ctggctttctagttcatagc

SEQ ID NO: 17073 - DNA, 20 bp, Artificial Sequence
  Description of Artificial Sequence: Synthetic oligonucleotide
  Target: LAMA2; (-) strand; PAM type: NNGRRT; PAM sequence: TTGGAT
cctcttgttacctgctttgc

SEQ ID NO: 17074 - DNA, 20 bp, Artificial Sequence
  Description of Artificial Sequence: Synthetic oligonucleotide
  Target: LAMA2; (-) strand; PAM type: NNGRRT; PAM sequence: TGGAAT
cctcaaatctgttcacagtc

SEQ ID NO: 17075 - DNA, 20 bp, Artificial Sequence
  Description of Artificial Sequence: Synthetic oligonucleotide
  Target: LAMA2; (-) strand; PAM type: NNGRRT; PAM sequence: CAGGGT
ggtttatagcactgaaattt

SEQ ID NO: 17076 - DNA, 20 bp, Artificial Sequence
  Description of Artificial Sequence: Synthetic oligonucleotide
  Target: LAMA2; (-) strand; PAM type: NNGRRT; PAM sequence: TAGAGT
gggagaaattagtattccta

SEQ ID NO: 17077 - DNA, 20 bp, Artificial Sequence
  Description of Artificial Sequence: Synthetic oligonucleotide
  Target: LAMA2; (-) strand; PAM type: NNGRRT; PAM sequence: AGGAAT
ctgaaaaacttctgtgtttt

SEQ ID NO: 17078 - DNA, 20 bp, Artificial Sequence
  Description of Artificial Sequence: Synthetic oligonucleotide
  Target: LAMA2; (-) strand; PAM type: NNGRRT; PAM sequence: TGGGGT
ttggatggaaacaggtagac

SEQ ID NO: 17079 - DNA, 20 bp, Artificial Sequence
  Description of Artificial Sequence: Synthetic oligonucleotide
  Target: LAMA2; (-) strand; PAM type: NNGRRT; PAM sequence: TTGGAT
tagaagtggtagtgatagtc

SEQ ID NO: 17080 - DNA, 20 bp, Artificial Sequence
  Description of Artificial Sequence: Synthetic oligonucleotide
  Target: LAMA2; (-) strand; PAM type: NNGRRT; PAM sequence: TGGAAT
ttagaggaaggtgtgtaatt

SEQ ID NO: 17081 - DNA, 20 bp, Artificial Sequence
  Description of Artificial Sequence: Synthetic oligonucleotide
  Target: LAMA2; (-) strand; PAM type: NNGRRT; PAM sequence: GGGAAT
cagtccccacgtccaatact

SEQ ID NO: 17082 - DNA, 20 bp, Artificial Sequence
  Description of Artificial Sequence: Synthetic oligonucleotide
  Target: LAMA2; (-) strand; PAM type: NNGRRT; PAM sequence: AGGGAT
atggtgctacaccattcatg

SEQ ID NO: 17083 - DNA, 20 bp, Artificial Sequence
  Description of Artificial Sequence: Synthetic oligonucleotide
  Target: LAMA2; (-) strand; PAM type: NNGRRT; PAM sequence: GGGGAT
gagaactcacttatcaccaa

SEQ ID NO: 17084 - DNA, 20 bp, Artificial Sequence
  Description of Artificial Sequence: Synthetic oligonucleotide
  Target: LAMA2; (-) strand; PAM type: NNGRRT; PAM sequence: GGGAGT
gagcacacatgtcacatgga

SEQ ID NO: 17085 - DNA, 20 bp, Artificial Sequence
  Description of Artificial Sequence: Synthetic oligonucleotide
  Target: LAMA2; (-) strand; PAM type: NNGRRT; PAM sequence: CTGGGT
cttttaagaaacatctgagg

SEQ ID NO: 17086 - DNA, 20 bp, Artificial Sequence
  Description of Artificial Sequence: Synthetic oligonucleotide
  Target: LAMA2; (-) strand; PAM type: NNGRRT; PAM sequence: GGGGAT
ccatatttatcctacatcgg

SEQ ID NO: 17087 - DNA, 20 bp, Artificial Sequence
  Description of Artificial Sequence: Synthetic oligonucleotide
  Target: LAMA2; (-) strand; PAM type: NNGRRT; PAM sequence: TGGAGT
taaaattagacttatctcac

SEQ ID NO: 17088 - DNA, 20 bp, Artificial Sequence
  Description of Artificial Sequence: Synthetic oligonucleotide
  Target: LAMA2; (-) strand; PAM type: NNGRRT; PAM sequence: GAGGAT
ttgagttccagctctcacat

SEQ ID NO: 17089 - DNA, 20 bp, Artificial Sequence
  Description of Artificial Sequence: Synthetic oligonucleotide
  Target: LAMA2; (-) strand; PAM type: NNGRRT; PAM sequence: TTGAGT
gacaaagtcaaggtctggtt

SEQ ID NO: 17090 - DNA, 20 bp, Artificial Sequence
  Description of Artificial Sequence: Synthetic oligonucleotide
  Target: LAMA2; (-) strand; PAM type: NNGRRT; PAM sequence: AAGAAT
ggcccttggttaaagaagag

SEQ ID NO: 17091 - DNA, 20 bp, Artificial Sequence
  Description of Artificial Sequence: Synthetic oligonucleotide
  Target: LAMA2; (-) strand; PAM type: NNGRRT; PAM sequence: GTGGGT
gagagctggggcagggtggg

SEQ ID NO: 17092 - DNA, 20 bp, Artificial Sequence
  Description of Artificial Sequence: Synthetic oligonucleotide
  Target: LAMA2; (-) strand; PAM type: NNGRRT; PAM sequence: TGGGGT
aaaggagagctggggcaggg

SEQ ID NO: 17093 - DNA, 20 bp, Artificial Sequence
  Description of Artificial Sequence: Synthetic oligonucleotide
  Target: LAMA2; (-) strand; PAM type: NNGRRT; PAM sequence: CAGGGT
ttctaaaaggagagctgggg

SEQ ID NO: 17094 - DNA, 20 bp, Artificial Sequence
  Description of Artificial Sequence: Synthetic oligonucleotide
  Target: LAMA2; (-) strand; PAM type: NNGRRT; PAM sequence: TAGGGT
aacatttttctgaccttcga

SEQ ID NO: 17095 - DNA, 20 bp, Artificial Sequence
  Description of Artificial Sequence: Synthetic oligonucleotide
  Target: LAMA2; (-) strand; PAM type: NNGRRT; PAM sequence: CTGAAT
attaccccatttttaaatca

SEQ ID NO: 17096 - DNA, 20 bp, Artificial Sequence
  Description of Artificial Sequence: Synthetic oligonucleotide
  Target: LAMA2; (-) strand; PAM type: NNGRRT; PAM sequence: AAGAAT
acttgtgaaataaaaacaga

SEQ ID NO: 17097 - DNA, 20 bp, Artificial Sequence
  Description of Artificial Sequence: Synthetic oligonucleotide
  Target: LAMA2; (-) strand; PAM type: NNGRRT; PAM sequence: AGGGGT
aaatataaaggatcatattt

SEQ ID NO: 17098 - DNA, 20 bp, Artificial Sequence
  Description of Artificial Sequence: Synthetic oligonucleotide
  Target: LAMA2; (-) strand; PAM type: NNGRRT; PAM sequence: AAGGAT
tagaagtaataaaaaatata

SEQ ID NO: 17099 - DNA, 20 bp, Artificial Sequence
  Description of Artificial Sequence: Synthetic oligonucleotide
  Target: LAMA2; (-) strand; PAM type: NNGRRT; PAM sequence: TAGAAT
agtatttacatatatttgtt

SEQ ID NO: 17100 - DNA, 20 bp, Artificial Sequence
  Description of Artificial Sequence: Synthetic oligonucleotide
  Target: LAMA2; (-) strand; PAM type: NNGRRT; PAM sequence: CTGAGT
agttgcacacactcttttct

SEQ ID NO: 17101 - DNA, 20 bp, Artificial Sequence
  Description of Artificial Sequence: Synthetic oligonucleotide
  Target: LAMA2; (-) strand; PAM type: NNGRRT; PAM sequence: TGGAGT
ctgctttgaacatatcttcc

SEQ ID NO: 17102 - DNA, 20 bp, Artificial Sequence
  Description of Artificial Sequence: Synthetic oligonucleotide
  Target: LAMA2; (-) strand; PAM type: NNGRRT; PAM sequence: TAGAAT
cataagacttctagtcctag

SEQ ID NO: 17103 - DNA, 20 bp, Artificial Sequence
  Description of Artificial Sequence: Synthetic oligonucleotide
  Target: LAMA2; (-) strand; PAM type: NNGRRT; PAM sequence: TAGAGT
tcactgacgtgggcactttg

SEQ ID NO: 17104 - DNA, 20 bp, Artificial Sequence
  Description of Artificial Sequence: Synthetic oligonucleotide
  Target: LAMA2; (-) strand; PAM type: NNGRRT; PAM sequence: ATGAAT
ccttacatgtatatgtatac

SEQ ID NO: 17105 - DNA, 20 bp, Artificial Sequence
  Description of Artificial Sequence: Synthetic oligonucleotide
  Target: LAMA2; (-) strand; PAM type: NNGRRT; PAM sequence: TTGAAT
tggccttagtgctataccat

SEQ ID NO: 17106 - DNA, 20 bp, Artificial Sequence
  Description of Artificial Sequence: Synthetic oligonucleotide
  Target: LAMA2; (-) strand; PAM type: NNGRRT; PAM sequence: CTGGAT
ccttcctccccttctctatc

SEQ ID NO: 17107 - DNA, 20 bp, Artificial Sequence
  Description of Artificial Sequence: Synthetic oligonucleotide
  Target: LAMA2; (-) strand; PAM type: NNGRRT; PAM sequence: AAGAAT
tacaatcacattattgttga

SEQ ID NO: 17108 - DNA, 20 bp, Artificial Sequence
  Description of Artificial Sequence: Synthetic oligonucleotide
  Target: LAMA2; (-) strand; PAM type: NNGRRT; PAM sequence: ATGAGT
tatttttttaataataaaaa

SEQ ID NO: 17109 - DNA, 20 bp, Artificial Sequence
  Description of Artificial Sequence: Synthetic oligonucleotide
  Target: LAMA2; (-) strand; PAM type: NNGRRT; PAM sequence: TTGAAT
cacttatacctgttaccaca

SEQ ID NO: 17110 - DNA, 20 bp, Artificial Sequence
  Description of Artificial Sequence: Synthetic oligonucleotide
  Target: LAMA2; (-) strand; PAM type: NNGRRT; PAM sequence: GAGGAT
agtaacagttacccttcatt

SEQ ID NO: 17111 - DNA, 20 bp, Artificial Sequence
  Description of Artificial Sequence: Synthetic oligonucleotide
  Target: LAMA2; (-) strand; PAM type: NNGRRT; PAM sequence: CAGGGT
cccatgctccaatattgaac

SEQ ID NO: 17112 - DNA, 20 bp, Artificial Sequence
  Description of Artificial Sequence: Synthetic oligonucleotide
  Target: LAMA2; (-) strand; PAM type: NNGRRT; PAM sequence: GGGGGT
gggaggatgcttctcttaaa

SEQ ID NO: 17113 - DNA, 20 bp, Artificial Sequence
  Description of Artificial Sequence: Synthetic oligonucleotide
  Target: LAMA2; (-) strand; PAM type: NNGRRT; PAM sequence: GAGGAT
cattttggacattatgctgg

SEQ ID NO: 17114 - DNA, 20 bp, Artificial Sequence
  Description of Artificial Sequence: Synthetic oligonucleotide
  Target: LAMA2; (-) strand; PAM type: NNGRRT; PAM sequence: TGGAGT
ttattctacagtcattaact

SEQ ID NO: 17115 - DNA, 20 bp, Artificial Sequence
  Description of Artificial Sequence: Synthetic oligonucleotide
  Target: LAMA2; (-) strand; PAM type: NNGRRT; PAM sequence: TAGAAT
cactagactgcaaatatcag

SEQ ID NO: 17116 - DNA, 20 bp, Artificial Sequence
  Description of Artificial Sequence: Synthetic oligonucleotide
  Target: LAMA2; (-) strand; PAM type: NNGRRT; PAM sequence: GAGAAT
aagcttttgcctctttaaag

SEQ ID NO: 17117 - DNA, 20 bp, Artificial Sequence
  Description of Artificial Sequence: Synthetic oligonucleotide
  Target: LAMA2; (-) strand; PAM type: NNGRRT; PAM sequence: CTGAGT
aacaacatttctgtgacatg

SEQ ID NO: 17118 - DNA, 20 bp, Artificial Sequence
  Description of Artificial Sequence: Synthetic oligonucleotide
  Target: LAMA2; (-) strand; PAM type: NNGRRT; PAM sequence: GTGGAT
ttttaaacaaaatagccaaa

SEQ ID NO: 17119 - DNA, 20 bp, Artificial Sequence
  Description of Artificial Sequence: Synthetic oligonucleotide
  Target: LAMA2; (-) strand; PAM type: NNGRRT; PAM sequence: AAGGGT
tttaaaaataaataaataaa

SEQ ID NO: 17120 - DNA, 20 bp, Artificial Sequence
  Description of Artificial Sequence: Synthetic oligonucleotide
  Target: LAMA2; (-) strand; PAM type: NNGRRT; PAM sequence: CCGAGT
accatacctggcctgaaatg

SEQ ID NO: 17121 - DNA, 20 bp, Artificial Sequence
  Description of Artificial Sequence: Synthetic oligonucleotide
  Target: LAMA2; (-) strand; PAM type: NNGRRT; PAM sequence: CAGGGT
tttttcattttctctagagg

SEQ ID NO: 17122 - DNA, 20 bp, Artificial Sequence
  Description of Artificial Sequence: Synthetic oligonucleotide
  Target: LAMA2; (-) strand; PAM type: NNGRRT; PAM sequence: TCGAGT
aattctcccacctcagcctc

SEQ ID NO: 17123 - DNA, 20 bp, Artificial Sequence
  Description of Artificial Sequence: Synthetic oligonucleotide
  Target: LAMA2; (-) strand; PAM type: NNGRRT; PAM sequence: CAGGGT
tttgttttcttttttcaaga

SEQ ID NO: 17124 - DNA, 20 bp, Artificial Sequence
  Description of Artificial Sequence: Synthetic oligonucleotide
  Target: LAMA2; (-) strand; PAM type: NNGRRT; PAM sequence: TTGAAT
tttaattcagaaaaatatgt

SEQ ID NO: 17125 - DNA, 20 bp, Artificial Sequence
  Description of Artificial Sequence: Synthetic oligonucleotide
  Target: LAMA2; (-) strand; PAM type: NNGRRT; PAM sequence: GAGAGT
tgctttttcatatacttaaa

SEQ ID NO: 17126 - DNA, 20 bp, Artificial Sequence
  Description of Artificial Sequence: Synthetic oligonucleotide
  Target: LAMA2; (-) strand; PAM type: NNGRRT; PAM sequence: CTGAAT
acaagcactagaccacttaa

SEQ ID NO: 17127 - DNA, 20 bp, Artificial Sequence
  Description of Artificial Sequence: Synthetic oligonucleotide
  Target: LAMA2; (-) strand; PAM type: NNGRRT; PAM sequence: TGGAAT
tctttgctgttgataacgta

SEQ ID NO: 17128 - DNA, 20 bp, Artificial Sequence
  Description of Artificial Sequence: Synthetic oligonucleotide
  Target: LAMA2; (-) strand; PAM type: NNGRRT; PAM sequence: TTGAAT
caatcaagctttaatttttt

SEQ ID NO: 17129 - DNA, 20 bp, Artificial Sequence
  Description of Artificial Sequence: Synthetic oligonucleotide
  Target: LAMA2; (-) strand; PAM type: NNGRRT; PAM sequence: AGGAAT
gacctattctataaaattct

SEQ ID NO: 17130 - DNA, 20 bp, Artificial Sequence
  Description of Artificial Sequence: Synthetic oligonucleotide
  Target: LAMA2; (-) strand; PAM type: NNGRRT; PAM sequence: TTGGAT
ggtgtcaatagatgctcaat

SEQ ID NO: 17131 - DNA, 20 bp, Artificial Sequence
  Description of Artificial Sequence: Synthetic oligonucleotide
  Target: LAMA2; (-) strand; PAM type: NNGRRT; PAM sequence: GAGAGT
aaagcttagaagagagaggg

SEQ ID NO: 17132 - DNA, 20 bp, Artificial Sequence
  Description of Artificial Sequence: Synthetic oligonucleotide
  Target: LAMA2; (-) strand; PAM type: NNGRRT; PAM sequence: AAGGGT
ccaggagacattacatagta

SEQ ID NO: 17133 - DNA, 20 bp, Artificial Sequence
  Description of Artificial Sequence: Synthetic oligonucleotide
  Target: LAMA2; (-) strand; PAM type: NNGRRT; PAM sequence: TAGAAT
acacagcccaccaattatta

SEQ ID NO: 17134 - DNA, 20 bp, Artificial Sequence
  Description of Artificial Sequence: Synthetic oligonucleotide
  Target: LAMA2; (-) strand; PAM type: NNGRRT; PAM sequence: CAGGAT
tttagcataacaaaaatctg

SEQ ID NO: 17135 - DNA, 20 bp, Artificial Sequence
  Description of Artificial Sequence: Synthetic oligonucleotide
  Target: LAMA2; (-) strand; PAM type: NNGRRT; PAM sequence: TGGAGT
aataatatcagacagcatta

SEQ ID NO: 17136 - DNA, 20 bp, Artificial Sequence
  Description of Artificial Sequence: Synthetic oligonucleotide
  Target: LAMA2; (-) strand; PAM type: NNGRRT; PAM sequence: AAGAAT
ctaaaatgatagccgtcttc

SEQ ID NO: 17137 - DNA, 20 bp, Artificial Sequence
  Description of Artificial Sequence: Synthetic oligonucleotide
  Target: LAMA2; (-) strand; PAM type: NNGRRT; PAM sequence: AAGAAT
tctcattttcctaagacaca

SEQ ID NO: 17138 - DNA, 20 bp, Artificial Sequence
  Description of Artificial Sequence: Synthetic oligonucleotide
  Target: LAMA2; (-) strand; PAM type: NNGRRT; PAM sequence: TAGAAT
ttttaaagagctataaaaaa

SEQ ID NO: 17139 - DNA, 20 bp, Artificial Sequence
  Description of Artificial Sequence: Synthetic oligonucleotide
  Target: LAMA2; (-) strand; PAM type: NNGRRT; PAM sequence: AGGAAT
acagagtagaaattgaatca

SEQ ID NO: 17140 - DNA, 20 bp, Artificial Sequence
  Description of Artificial Sequence: Synthetic oligonucleotide
  Target: LAMA2; (-) strand; PAM type: NNGRRT; PAM sequence: TTGAAT
aggtcagcacagagtagaaa

SEQ ID NO: 17141 - DNA, 20 bp, Artificial Sequence
  Description of Artificial Sequence: Synthetic oligonucleotide
  Target: LAMA2; (-) strand; PAM type: NNGRRT; PAM sequence: CAGAGT
tcccatatgacaggtcagca

SEQ ID NO: 17142 - DNA, 20 bp, Artificial Sequence
  Description of Artificial Sequence: Synthetic oligonucleotide
  Target: LAMA2; (-) strand; PAM type: NNGRRT; PAM sequence: AAGAAT
ttatctgttgtactgtactg

SEQ ID NO: 17143 - DNA, 20 bp, Artificial Sequence
  Description of Artificial Sequence: Synthetic oligonucleotide
  Target: LAMA2; (-) strand; PAM type: NNGRRT; PAM sequence: TAGAAT
tgcaatctagtgtttcattg

SEQ ID NO: 17144 - DNA, 20 bp, Artificial Sequence
  Description of Artificial Sequence: Synthetic oligonucleotide
  Target: LAMA2; (-) strand; PAM type: NNGRRT; PAM sequence: TAGAGT
acatatatatggggagttct

SEQ ID NO: 17145 - DNA, 20 bp, Artificial Sequence
  Description of Artificial Sequence: Synthetic oligonucleotide
  Target: LAMA2; (-) strand; PAM type: NNGRRT; PAM sequence: GGGAGT
ctgaaatttacatatatatg

SEQ ID NO: 17146 - DNA, 20 bp, Artificial Sequence
  Description of Artificial Sequence: Synthetic oligonucleotide
  Target: LAMA2; (-) strand; PAM type: NNGRRT; PAM sequence: AGGAGT
ttatttagtatttccttgtg

SEQ ID NO: 17147 - DNA, 20 bp, Artificial Sequence
  Description of Artificial Sequence: Synthetic oligonucleotide
  Target: LAMA2; (-) strand; PAM type: NNGRRT; PAM sequence: ATGGAT
agatagtagtacttactact

SEQ ID NO: 17148 - DNA, 20 bp, Artificial Sequence
  Description of Artificial Sequence: Synthetic oligonucleotide
  Target: LAMA2; (-) strand; PAM type: NNGRRT; PAM sequence: TTGAAT
caactttaatgactgttgga

SEQ ID NO: 17149 - DNA, 20 bp, Artificial Sequence
  Description of Artificial Sequence: Synthetic oligonucleotide
  Target: LAMA2; (-) strand; PAM type: NNGRRT; PAM sequence: TTGGAT
tagaacaactttaatgactg

SEQ ID NO: 17150 - DNA, 20 bp, Artificial Sequence
  Description of Artificial Sequence: Synthetic oligonucleotide
  Target: LAMA2; (-) strand; PAM type: NNGRRT; PAM sequence: AAGAGT
aaattaatgaatcatgtgta

SEQ ID NO: 17151 - DNA, 20 bp, Artificial Sequence
  Description of Artificial Sequence: Synthetic oligonucleotide
  Target: LAMA2; (-) strand; PAM type: NNGRRT; PAM sequence: ATGAAT
aagtgtaattcagaaaatta

SEQ ID NO: 17152 - DNA, 20 bp, Artificial Sequence
  Description of Artificial Sequence: Synthetic oligonucleotide
  Target: LAMA2; (-) strand; PAM type: NNGRRT; PAM sequence: GAGGAT
tgtgtctttgtctataaaat

SEQ ID NO: 17153 - DNA, 20 bp, Artificial Sequence
  Description of Artificial Sequence: Synthetic oligonucleotide
  Target: LAMA2; (-) strand; PAM type: NNGRRT; PAM sequence: GGGAAT
ctgtttttgagtttcaacga

SEQ ID NO: 17154 - DNA, 20 bp, Artificial Sequence
  Description of Artificial Sequence: Synthetic oligonucleotide
  Target: LAMA2; (-) strand; PAM type: NNGRRT; PAM sequence: TTGAGT
acatattttgccttctgttt

SEQ ID NO: 17155 - DNA, 20 bp, Artificial Sequence
  Description of Artificial Sequence: Synthetic oligonucleotide
  Target: LAMA2; (-) strand; PAM type: NNGRRT; PAM sequence: TTGAGT
ttttaaaaatattctcagtt

SEQ ID NO: 17156 - DNA, 20 bp, Artificial Sequence
  Description of Artificial Sequence: Synthetic oligonucleotide
  Target: LAMA2; (-) strand; PAM type: NNGRRT; PAM sequence: GGGGGT
ttttaataaaaaccaaactt

SEQ ID NO: 17157 - DNA, 20 bp, Artificial Sequence
  Description of Artificial Sequence: Synthetic oligonucleotide
  Target: LAMA2; (-) strand; PAM type: NNGRRT; PAM sequence: CTGAAT
tgctcaaggaacatttttta

SEQ ID NO: 17158 - DNA, 20 bp, Artificial Sequence
  Description of Artificial Sequence: Synthetic oligonucleotide
  Target: LAMA2; (-) strand; PAM type: NNGRRT; PAM sequence: CTGAGT
ttatgataatgtaagaatta

SEQ ID NO: 17159 - DNA, 20 bp, Artificial Sequence
  Description of Artificial Sequence: Synthetic oligonucleotide
  Target: LAMA2; (-) strand; PAM type: NNGRRT; PAM sequence: AAGAAT
agcgaaatttatgataatgt

SEQ ID NO: 17160 - DNA, 20 bp, Artificial Sequence
  Description of Artificial Sequence: Synthetic oligonucleotide
  Target: LAMA2; (-) strand; PAM type: NNGRRT; PAM sequence: GTGAAT
ctcctcacattgtgaattgt

SEQ ID NO: 17161 - DNA, 20 bp, Artificial Sequence
  Description of Artificial Sequence: Synthetic oligonucleotide
  Target: LAMA2; (-) strand; PAM type: NNGRRT; PAM sequence: GTGAAT
tggtaattgctcctcacatt

SEQ ID NO: 17162 - DNA, 20 bp, Artificial Sequence
  Description of Artificial Sequence: Synthetic oligonucleotide
  Target: LAMA2; (-) strand; PAM type: NNGRRT; PAM sequence: TTGAGT
aatattattttaaaatgccc

SEQ ID NO: 17163 - DNA, 20 bp, Artificial Sequence
  Description of Artificial Sequence: Synthetic oligonucleotide
  Target: LAMA2; (-) strand; PAM type: NNGRRT; PAM sequence: AAGAGT
acagctctgaaatttcacag

SEQ ID NO: 17164 - DNA, 20 bp, Artificial Sequence
  Description of Artificial Sequence: Synthetic oligonucleotide
  Target: LAMA2; (-) strand; PAM type: NNGRRT; PAM sequence: CAGGGT
aagaataaatagacataccc

SEQ ID NO: 17165 - DNA, 20 bp, Artificial Sequence
  Description of Artificial Sequence: Synthetic oligonucleotide
  Target: LAMA2; (-) strand; PAM type: NNGRRT; PAM sequence: AAGAAT
aaaattccctaaaggcagag

SEQ ID NO: 17166 - DNA, 20 bp, Artificial Sequence
  Description of Artificial Sequence: Synthetic oligonucleotide
  Target: LAMA2; (-) strand; PAM type: NNGRRT; PAM sequence: CAGAAT
atttactaccaatctacaaa

SEQ ID NO: 17167 - DNA, 20 bp, Artificial Sequence
  Description of Artificial Sequence: Synthetic oligonucleotide
  Target: LAMA2; (-) strand; PAM type: NNGRRT; PAM sequence: TTGGAT
gctatgtttcacctccactc

SEQ ID NO: 17168 - DNA, 20 bp, Artificial Sequence
  Description of Artificial Sequence: Synthetic oligonucleotide
  Target: LAMA2; (-) strand; PAM type: NNGRRT; PAM sequence: ATGAAT
gtattagtggagaaccaaac

SEQ ID NO: 17169 - DNA, 20 bp, Artificial Sequence
  Description of Artificial Sequence: Synthetic oligonucleotide
  Target: LAMA2; (-) strand; PAM type: NNGRRT; PAM sequence: TTGAAT
gtctcagagaggaatttatt

SEQ ID NO: 17170 - DNA, 20 bp, Artificial Sequence
  Description of Artificial Sequence: Synthetic oligonucleotide
  Target: LAMA2; (-) strand; PAM type: NNGRRT; PAM sequence: AGGAAT
ccatgcagtgtgtctcagag

SEQ ID NO: 17171 - DNA, 20 bp, Artificial Sequence
  Description of Artificial Sequence: Synthetic oligonucleotide
  Target: LAMA2; (-) strand; PAM type: NNGRRT; PAM sequence: AAGAAT
gtataacctttaatttatga

SEQ ID NO: 17172 - DNA, 20 bp, Artificial Sequence
  Description of Artificial Sequence: Synthetic oligonucleotide
  Target: LAMA2; (-) strand; PAM type: NNGRRT; PAM sequence: GAGAGT
ggatggacccaaaacagaat

SEQ ID NO: 17173 - DNA, 20 bp, Artificial Sequence
  Description of Artificial Sequence: Synthetic oligonucleotide
  Target: LAMA2; (-) strand; PAM type: NNGRRT; PAM sequence: CAGAAT
tcttctggatggacccaaaa

SEQ ID NO: 17174 - DNA, 20 bp, Artificial Sequence
  Description of Artificial Sequence: Synthetic oligonucleotide
  Target: LAMA2; (-) strand; PAM type: NNGRRT; PAM sequence: CTGGAT
tctcgaaacattatcatctt

SEQ ID NO: 17175 - DNA, 20 bp, Artificial Sequence
  Description of Artificial Sequence: Synthetic oligonucleotide
  Target: LAMA2; (-) strand; PAM type: NNGRRT; PAM sequence: AAGAGT
ggtaccatagtgaaacacag

SEQ ID NO: 17176 - DNA, 20 bp, Artificial Sequence
  Description of Artificial Sequence: Synthetic oligonucleotide
  Target: LAMA2; (-) strand; PAM type: NNGRRT; PAM sequence: CAGAAT
tcttaatttgataatattga

SEQ ID NO: 17177 - DNA, 20 bp, Artificial Sequence
  Description of Artificial Sequence: Synthetic oligonucleotide
  Target: LAMA2; (-) strand; PAM type: NNGRRT; PAM sequence: AAGAAT
ataaacactcaataatttaa

SEQ ID NO: 17178 - DNA, 20 bp, Artificial Sequence
  Description of Artificial Sequence: Synthetic oligonucleotide
  Target: LAMA2; (-) strand; PAM type: NNGRRT; PAM sequence: TGGAGT
aaataaaaatagaatagtac

SEQ ID NO: 17179 - DNA, 20 bp, Artificial Sequence
  Description of Artificial Sequence: Synthetic oligonucleotide
  Target: LAMA2; (-) strand; PAM type: NNGRRT; PAM sequence: TAGAAT
cacagactacaaaataaaaa

SEQ ID NO: 17180 - DNA, 20 bp, Artificial Sequence
  Description of Artificial Sequence: Synthetic oligonucleotide
  Target: LAMA2; (-) strand; PAM type: NNGRRT; PAM sequence: TTGAGT
tattgaagacaagaggagtt

SEQ ID NO: 17181 - DNA, 20 bp, Artificial Sequence
  Description of Artificial Sequence: Synthetic oligonucleotide
  Target: LAMA2; (-) strand; PAM type: NNGRRT; PAM sequence: AGGAGT
gtaggtatattgaagacaag

SEQ ID NO: 17182 - DNA, 20 bp, Artificial Sequence
  Description of Artificial Sequence: Synthetic oligonucleotide
  Target: LAMA2; (-) strand; PAM type: NNGRRT; PAM sequence: AAGAAT
tagaatgatgtaaatgcata

SEQ ID NO: 17183 - DNA, 20 bp, Artificial Sequence
  Description of Artificial Sequence: Synthetic oligonucleotide
  Target: LAMA2; (-) strand; PAM type: NNGRRT; PAM sequence: TAGAAT
aagaacacacttgaaattga

SEQ ID NO: 17184 - DNA, 20 bp, Artificial Sequence
  Description of Artificial Sequence: Synthetic oligonucleotide
  Target: LAMA2; (-) strand; PAM type: NNGRRT; PAM sequence: AAGAAT
aaaattaaagaaaaaagaaa

SEQ ID NO: 17185 - DNA, 20 bp, Artificial Sequence
  Description of Artificial Sequence: Synthetic oligonucleotide
  Target: LAMA2; (-) strand; PAM type: NNGRRT; PAM sequence: TGGGGT
agaaagctaaaggcaatgac

SEQ ID NO: 17186 - DNA, 20 bp, Artificial Sequence
  Description of Artificial Sequence: Synthetic oligonucleotide
  Target: LAMA2; (-) strand; PAM type: NNGRRT; PAM sequence: AAGGAT
tgttaaaaacaacaacaaaa

SEQ ID NO: 17187 - DNA, 20 bp, Artificial Sequence
  Description of Artificial Sequence: Synthetic oligonucleotide
  Target: LAMA2; (-) strand; PAM type: NNGRRT; PAM sequence: AAGGGT
aaacactggccatcatagaa

SEQ ID NO: 17188 - DNA, 20 bp, Artificial Sequence
  Description of Artificial Sequence: Synthetic oligonucleotide
  Target: LAMA2; (-) strand; PAM type: NNGRRT; PAM sequence: CTGAGT
tctcaaggacctggtcacta

SEQ ID NO: 17189 - DNA, 20 bp, Artificial Sequence
  Description of Artificial Sequence: Synthetic oligonucleotide
  Target: LAMA2; (-) strand; PAM type: NNGRRT; PAM sequence: AAGGAT
aatactccaaactatactta

SEQ ID NO: 17190 - DNA, 20 bp, Artificial Sequence
  Description of Artificial Sequence: Synthetic oligonucleotide
  Target: LAMA2; (-) strand; PAM type: NNGRRT; PAM sequence: AAGAAT
atgaagtagtacagcctggg

SEQ ID NO: 17191 - DNA, 20 bp, Artificial Sequence
  Description of Artificial Sequence: Synthetic oligonucleotide
  Target: LAMA2; (-) strand; PAM type: NNGRRT; PAM sequence: TAGGAT
ttattccctgtatgggctaa

SEQ ID NO: 17192 - DNA, 20 bp, Artificial Sequence
  Description of Artificial Sequence: Synthetic oligonucleotide
  Target: LAMA2; (-) strand; PAM type: NNGRRT; PAM sequence: ATGAAT
gctattaagaacctactgga

SEQ ID NO: 17193 - DNA, 20 bp, Artificial Sequence
  Description of Artificial Sequence: Synthetic oligonucleotide
  Target: LAMA2; (-) strand; PAM type: NNGRRT; PAM sequence: TGGAAT
aagggctattaagaacctac

SEQ ID NO: 17194 - DNA, 20 bp, Artificial Sequence
  Description of Artificial Sequence: Synthetic oligonucleotide
  Target: LAMA2; (-) strand; PAM type: NNGRRT; PAM sequence: ATGGAT
taatctttaaagagcaataa

SEQ ID NO: 17195 - DNA, 20 bp, Artificial Sequence
  Description of Artificial Sequence: Synthetic oligonucleotide
  Target: LAMA2; (-) strand; PAM type: NNGRRT; PAM sequence: AGGAGT
aatattttataataagaaaa

SEQ ID NO: 17196 - DNA, 20 bp, Artificial Sequence
  Description of Artificial Sequence: Synthetic oligonucleotide
  Target: LAMA2; (-) strand; PAM type: NNGRRT; PAM sequence: ATGAAT
tgaattttccagattttaat

SEQ ID NO: 17197 - DNA, 20 bp, Artificial Sequence
  Description of Artificial Sequence: Synthetic oligonucleotide
  Target: LAMA2; (-) strand; PAM type: NNGRRT; PAM sequence: ATGAAT
gattacttatttctgcttct

SEQ ID NO: 17198 - DNA, 20 bp, Artificial Sequence
  Description of Artificial Sequence: Synthetic oligonucleotide
  Target: LAMA2; (-) strand; PAM type: NNGRRT; PAM sequence: TTGGAT
agactttacaataacactgt

SEQ ID NO: 17199 - DNA, 20 bp, Artificial Sequence
  Description of Artificial Sequence: Synthetic oligonucleotide
  Target: LAMA2; (-) strand; PAM type: NNGRRT; PAM sequence: ATGGGT
ttcataatataataaacacc

SEQ ID NO: 17200 - DNA, 20 bp, Artificial Sequence
  Description of Artificial Sequence: Synthetic oligonucleotide
  Target: LAMA2; (-) strand; PAM type: NNGRRT; PAM sequence: ATGAGT
aattgtagggtttcgactgt

SEQ ID NO: 17201 - DNA, 20 bp, Artificial Sequence
  Description of Artificial Sequence: Synthetic oligonucleotide
  Target: LAMA2; (-) strand; PAM type: NNGRRT; PAM sequence: TAGGGT
gagggaaaggaatttaattg

SEQ ID NO: 17202 - DNA, 20 bp, Artificial Sequence
  Description of Artificial Sequence: Synthetic oligonucleotide
  Target: LAMA2; (-) strand; PAM type: NNGRRT; PAM sequence: AGGAAT
ttccctctgaagggagggaa

SEQ ID NO: 17203 - DNA, 20 bp, Artificial Sequence
  Description of Artificial Sequence: Synthetic oligonucleotide
  Target: LAMA2; (-) strand; PAM type: NNGRRT; PAM sequence: CAGAAT
tgatgatgagggtgaaggtg

SEQ ID NO: 17204 - DNA, 20 bp, Artificial Sequence
  Description of Artificial Sequence: Synthetic oligonucleotide
  Target: LAMA2; (-) strand; PAM type: NNGRRT; PAM sequence: GAGGGT
cctattgtaaggatgatgat

SEQ ID NO: 17205 - DNA, 20 bp, Artificial Sequence
  Description of Artificial Sequence: Synthetic oligonucleotide
  Target: LAMA2; (-) strand; PAM type: NNGRRT; PAM sequence: AAGGAT
caaaagataaagcctattgt

SEQ ID NO: 17206 - DNA, 20 bp, Artificial Sequence
  Description of Artificial Sequence: Synthetic oligonucleotide
  Target: LAMA2; (-) strand; PAM type: NNGRRT; PAM sequence: AAGAAT
tgagagtgaaggagggatgg

SEQ ID NO: 17207 - DNA, 20 bp, Artificial Sequence
  Description of Artificial Sequence: Synthetic oligonucleotide
  Target: LAMA2; (-) strand; PAM type: NNGRRT; PAM sequence: AGGGAT
catgtctctgagagtgaagg

SEQ ID NO: 17208 - DNA, 20 bp, Artificial Sequence
  Description of Artificial Sequence: Synthetic oligonucleotide
  Target: LAMA2; (-) strand; PAM type: NNGRRT; PAM sequence: GAGAGT
gatagatcagtcatgtctct

SEQ ID NO: 17209 - DNA, 20 bp, Artificial Sequence
  Description of Artificial Sequence: Synthetic oligonucleotide
  Target: LAMA2; (-) strand; PAM type: NNGRRT; PAM sequence: GGGGGT
aatatattatttttaaatcc

SEQ ID NO: 17210 - DNA, 20 bp, Artificial Sequence
  Description of Artificial Sequence: Synthetic oligonucleotide
  Target: LAMA2; (-) strand; PAM type: NNGRRT; PAM sequence: GAGAGT
gaaatgtgtgagggtcagat

SEQ ID NO: 17211 - DNA, 20 bp, Artificial Sequence
  Description of Artificial Sequence: Synthetic oligonucleotide
  Target: LAMA2; (-) strand; PAM type: NNGRRT; PAM sequence: GAGGGT
ggatgtaggcagaaatgtgt

SEQ ID NO: 17212 - DNA, 20 bp, Artificial Sequence
  Description of Artificial Sequence: Synthetic oligonucleotide
  Target: LAMA2; (-) strand; PAM type: NNGRRT; PAM sequence: CAGGAT
tttattttaagtatatgttg

SEQ ID NO: 17213 - DNA, 20 bp, Artificial Sequence
  Description of Artificial Sequence: Synthetic oligonucleotide
  Target: LAMA2; (-) strand; PAM type: NNGRRT; PAM sequence: GTGAGT
gtgcaccacagagctcagct

SEQ ID NO: 17214 - DNA, 20 bp, Artificial Sequence
  Description of Artificial Sequence: Synthetic oligonucleotide
  Target: LAMA2; (-) strand; PAM type: NNGRRT; PAM sequence: GGGAGT
atgtgatgaaacatactgaa

SEQ ID NO: 17215 - DNA, 20 bp, Artificial Sequence
  Description of Artificial Sequence: Synthetic oligonucleotide
  Target: LAMA2; (-) strand; PAM type: NNGRRT; PAM sequence: CAGGAT
aatgtgggagagaaaagcat

SEQ ID NO: 17216 - DNA, 20 bp, Artificial Sequence
  Description of Artificial Sequence: Synthetic oligonucleotide
  Target: LAMA2; (-) strand; PAM type: NNGRRT; PAM sequence: GGGAAT
agctgatatctaaaagaggg

SEQ ID NO: 17217 - DNA, 20 bp, Artificial Sequence
  Description of Artificial Sequence: Synthetic oligonucleotide
  Target: LAMA2; (-) strand; PAM type: NNGRRT; PAM sequence: TAGAAT
gagaagagatgctttctacc

SEQ ID NO: 17218 - DNA, 20 bp, Artificial Sequence
  Description of Artificial Sequence: Synthetic oligonucleotide
  Target: LAMA2; (-) strand; PAM type: NNGRRT; PAM sequence: AAGAAT
ttcatagagtaaggtgagtg

SEQ ID NO: 17219 - DNA, 20 bp, Artificial Sequence
  Description of Artificial Sequence: Synthetic oligonucleotide
  Target: LAMA2; (-) strand; PAM type: NNGRRT; PAM sequence: GTGAGT
cctggggttcatagagtaag

SEQ ID NO: 17220 - DNA, 20 bp, Artificial Sequence
  Description of Artificial Sequence: Synthetic oligonucleotide
  Target: LAMA2; (-) strand; PAM type: NNGRRT; PAM sequence: TAGAGT
tgtaaagaccctggggttca

SEQ ID NO: 17221 - DNA, 20 bp, Artificial Sequence
  Description of Artificial Sequence: Synthetic oligonucleotide
  Target: LAMA2; (-) strand; PAM type: NNGRRT; PAM sequence: TGGGGT
ctcaagggatgtaaagaccc

SEQ ID NO: 17222 - DNA, 20 bp, Artificial Sequence
  Description of Artificial Sequence: Synthetic oligonucleotide
  Target: LAMA2; (-) strand; PAM type: NNGRRT; PAM sequence: AGGGAT
gaaacacacttcagtcctca

SEQ ID NO: 17223 - DNA, 20 bp, Artificial Sequence
  Description of Artificial Sequence: Synthetic oligonucleotide
  Target: LAMA2; (-) strand; PAM type: NNGRRT; PAM sequence: GAGAGT
gcagttttctaagaagaaaa

SEQ ID NO: 17224 - DNA, 20 bp, Artificial Sequence
  Description of Artificial Sequence: Synthetic oligonucleotide
  Target: LAMA2; (-) strand; PAM type: NNGRRT; PAM sequence: GGGAAT
aggacaagaggcggctcatt

SEQ ID NO: 17225 - DNA, 20 bp, Artificial Sequence
  Description of Artificial Sequence: Synthetic oligonucleotide
  Target: LAMA2; (-) strand; PAM type: NNGRRT; PAM sequence: AGGAAT
aagacttgtttagggagacc

SEQ ID NO: 17226 - DNA, 20 bp, Artificial Sequence
  Description of Artificial Sequence: Synthetic oligonucleotide
  Target: LAMA2; (-) strand; PAM type: NNGRRT; PAM sequence: GGGAGT
aagggtcaagaagtagcttg

SEQ ID NO: 17227 - DNA, 20 bp, Artificial Sequence
  Description of Artificial Sequence: Synthetic oligonucleotide
  Target: LAMA2; (-) strand; PAM type: NNGRRT; PAM sequence: AAGGGT
catggaatctacattttttc

SEQ ID NO: 17228 - DNA, 20 bp, Artificial Sequence
  Description of Artificial Sequence: Synthetic oligonucleotide
  Target: LAMA2; (-) strand; PAM type: NNGRRT; PAM sequence: TGGAAT
ataaaaattttatacgatca

SEQ ID NO: 17229 - DNA, 20 bp, Artificial Sequence
  Description of Artificial Sequence: Synthetic oligonucleotide
  Target: LAMA2; (-) strand; PAM type: NNGRRT; PAM sequence: TTGAAT
taggcatacatctagttgct

SEQ ID NO: 17230 - DNA, 20 bp, Artificial Sequence
  Description of Artificial Sequence: Synthetic oligonucleotide
  Target: LAMA2; (-) strand; PAM type: NNGRRT; PAM sequence: TGGGGT
tgatcaaactacagaacatt

SEQ ID NO: 17231 - DNA, 20 bp, Artificial Sequence
  Description of Artificial Sequence: Synthetic oligonucleotide
  Target: LAMA2; (-) strand; PAM type: NNGRRT; PAM sequence: CCGGGT
aagttaggtgtatgaatttc

SEQ ID NO: 17232 - DNA, 20 bp, Artificial Sequence
  Description of Artificial Sequence: Synthetic oligonucleotide
  Target: LAMA2; (-) strand; PAM type: NNGRRT; PAM sequence: ATGAAT
aaaatccttaagttaggtgt

SEQ ID NO: 17233 - DNA, 20 bp, Artificial Sequence
  Description of Artificial Sequence: Synthetic oligonucleotide
  Target: LAMA2; (-) strand; PAM type: NNGRRT; PAM sequence: AAGAGT
aaattcaatatctaacaaag

SEQ ID NO: 17234 - DNA, 20 bp, Artificial Sequence
  Description of Artificial Sequence: Synthetic oligonucleotide
  Target: LAMA2; (-) strand; PAM type: NNGRRT; PAM sequence: GGGGAT
aaaccaaagacaaaaagcta

SEQ ID NO: 17235 - DNA, 20 bp, Artificial Sequence
  Description of Artificial Sequence: Synthetic oligonucleotide
  Target: LAMA2; (-) strand; PAM type: NNGRRT; PAM sequence: AAGAGT
aaaaaaaggaaaaaaaaaaa

SEQ ID NO: 17236 - DNA, 20 bp, Artificial Sequence
  Description of Artificial Sequence: Synthetic oligonucleotide
  Target: LAMA2; (-) strand; PAM type: NNGRRT; PAM sequence: GAGAAT
gcggggtggggccaaggccg

SEQ ID NO: 17237 - DNA, 20 bp, Artificial Sequence
  Description of Artificial Sequence: Synthetic oligonucleotide
  Target: LAMA2; (-) strand; PAM type: NNGRRT; PAM sequence: CGGGGT
ctcatgggggtcggcggggg

SEQ ID NO: 17238 - DNA, 20 bp, Artificial Sequence
  Description of Artificial Sequence: Synthetic oligonucleotide
  Target: LAMA2; (-) strand; PAM type: NNGRRT; PAM sequence: GGGGGT
ctgaaatcccagctactcat

SEQ ID NO: 17239 - DNA, 20 bp, Artificial Sequence
  Description of Artificial Sequence: Synthetic oligonucleotide
  Target: LAMA2; (-) strand; PAM type: NNGRRT; PAM sequence: CCGGGT
actaaaaatacaaaaattag

SEQ ID NO: 17240 - DNA, 20 bp, Artificial Sequence
  Description of Artificial Sequence: Synthetic oligonucleotide
  Target: LAMA2; (-) strand; PAM type: NNGRRT; PAM sequence: GTGGAT
actttgggaggaccaggcgg

SEQ ID NO: 17241 - DNA, 20 bp, Artificial Sequence
  Description of Artificial Sequence: Synthetic oligonucleotide
  Target: LAMA2; (-) strand; PAM type: NNGRRT; PAM sequence: GCGGGT
cagcactttgggaggaccag

SEQ ID NO: 17242 - DNA, 20 bp, Artificial Sequence
  Description of Artificial Sequence: Synthetic oligonucleotide
  Target: LAMA2; (-) strand; PAM type: NNGRRT; PAM sequence: TAGAAT
ggtctccccaggggaaacaa

SEQ ID NO: 17243 - DNA, 20 bp, Artificial Sequence
  Description of Artificial Sequence: Synthetic oligonucleotide
  Target: LAMA2; (-) strand; PAM type: NNGRRT; PAM sequence: AAGAAT
aaagactactcaaagcacaa

SEQ ID NO: 17244 - DNA, 20 bp, Artificial Sequence
  Description of Artificial Sequence: Synthetic oligonucleotide
  Target: LAMA2; (-) strand; PAM type: NNGRRT; PAM sequence: CAGGAT
tggcatgcacaaaacaagaa

SEQ ID NO: 17245 - DNA, 20 bp, Artificial Sequence
  Description of Artificial Sequence: Synthetic oligonucleotide
  Target: LAMA2; (-) strand; PAM type: NNGRRT; PAM sequence: ATGAGT
taatattaaaaacttcaaaa

SEQ ID NO: 17246 - DNA, 20 bp, Artificial Sequence
  Description of Artificial Sequence: Synthetic oligonucleotide
  Target: LAMA2; (-) strand; PAM type: NNGRRT; PAM sequence: TTGAGT
aaatgataccttgttcatat

SEQ ID NO: 17247 - DNA, 20 bp, Artificial Sequence
  Description of Artificial Sequence: Synthetic oligonucleotide
  Target: LAMA2; (-) strand; PAM type: NNGRRT; PAM sequence: GGGAGT
agcctaccgagaggatattt

SEQ ID NO: 17248 - DNA, 20 bp, Artificial Sequence
  Description of Artificial Sequence: Synthetic oligonucleotide
  Target: LAMA2; (-) strand; PAM type: NNGRRT; PAM sequence: GAGGAT
ccataaaaatagcctaccga

SEQ ID NO: 17249 - DNA, 20 bp, Artificial Sequence
  Description of Artificial Sequence: Synthetic oligonucleotide
  Target: LAMA2; (-) strand; PAM type: NNGRRT; PAM sequence: TAGAGT
aagtgaaaatctacatattg

SEQ ID NO: 17250 - DNA, 20 bp, Artificial Sequence
  Description of Artificial Sequence: Synthetic oligonucleotide
  Target: LAMA2; (-) strand; PAM type: NNGRRT; PAM sequence: AAGAAT
gaaggatgaggggtgaggat

SEQ ID NO: 17251 - DNA, 20 bp, Artificial Sequence
  Description of Artificial Sequence: Synthetic oligonucleotide
  Target: LAMA2; (-) strand; PAM type: NNGRRT; PAM sequence: GAGGAT
tgcagtgaaggatgaggggt

SEQ ID NO: 17252 - DNA, 20 bp, Artificial Sequence
  Description of Artificial Sequence: Synthetic oligonucleotide
  Target: LAMA2; (-) strand; PAM type: NNGRRT; PAM sequence: AGGGGT
ttaccatgcagtgaaggatg

SEQ ID NO: 17253 - DNA, 20 bp, Artificial Sequence
  Description of Artificial Sequence: Synthetic oligonucleotide
  Target: LAMA2; (-) strand; PAM type: NNGRRT; PAM sequence: AAGGAT
tgtccaattaccatgcagtg

SEQ ID NO: 17254 - DNA, 20 bp, Artificial Sequence
  Description of Artificial Sequence: Synthetic oligonucleotide
  Target: LAMA2; (-) strand; PAM type: NNGRRT; PAM sequence: TCGAGT
cctattgtgggaccttgtga

SEQ ID NO: 17255 - DNA, 20 bp, Artificial Sequence
  Description of Artificial Sequence: Synthetic oligonucleotide
  Target: LAMA2; (-) strand; PAM type: NNGRRT; PAM sequence: CTGGAT
gtctacatctttctcccttg

SEQ ID NO: 17256 - DNA, 20 bp, Artificial Sequence
  Description of Artificial Sequence: Synthetic oligonucleotide
  Target: LAMA2; (-) strand; PAM type: NNGRRT; PAM sequence: TTGAGT
ttgccaaaggaaattaacat

SEQ ID NO: 17257 - DNA, 20 bp, Artificial Sequence
  Description of Artificial Sequence: Synthetic oligonucleotide
  Target: LAMA2; (-) strand; PAM type: NNGRRT; PAM sequence: GAGGGT
ttgatcgtgggtgtatctgt

SEQ ID NO: 17258 - DNA, 20 bp, Artificial Sequence
  Description of Artificial Sequence: Synthetic oligonucleotide
  Target: LAMA2; (-) strand; PAM type: NNGRRT; PAM sequence: GTGGGT
aagaatacaaagtattgatc

SEQ ID NO: 17259 - DNA, 20 bp, Artificial Sequence
  Description of Artificial Sequence: Synthetic oligonucleotide
  Target: LAMA2; (-) strand; PAM type: NNGRRT; PAM sequence: AAGAAT
gtgtcaacttgattggattg

SEQ ID NO: 17260 - DNA, 20 bp, Artificial Sequence
  Description of Artificial Sequence: Synthetic oligonucleotide
  Target: LAMA2; (-) strand; PAM type: NNGRRT; PAM sequence: TTGGAT
taatacaagtgtcaacttga

SEQ ID NO: 17261 - DNA, 20 bp, Artificial Sequence
  Description of Artificial Sequence: Synthetic oligonucleotide
  Target: LAMA2; (-) strand; PAM type: NNGRRT; PAM sequence: GGGAAT
tgacctggcaagagaccact

SEQ ID NO: 17262 - DNA, 20 bp, Artificial Sequence
  Description of Artificial Sequence: Synthetic oligonucleotide
  Target: LAMA2; (-) strand; PAM type: NNGRRT; PAM sequence: TAGAGT
taccaaataatttacaaggc

SEQ ID NO: 17263 - DNA, 20 bp, Artificial Sequence
  Description of Artificial Sequence: Synthetic oligonucleotide
  Target: LAMA2; (-) strand; PAM type: NNGRRT; PAM sequence: CAGAAT
ttatttgagctgctgatccc

SEQ ID NO: 17264 - DNA, 20 bp, Artificial Sequence
  Description of Artificial Sequence: Synthetic oligonucleotide
  Target: LAMA2; (-) strand; PAM type: NNGRRT; PAM sequence: TAGGAT
agagcagaggaagctgggga

SEQ ID NO: 17265 - DNA, 20 bp, Artificial Sequence
  Description of Artificial Sequence: Synthetic oligonucleotide
  Target: LAMA2; (-) strand; PAM type: NNGRRT; PAM sequence: GGGGAT
agcccagagcagaggaagct

SEQ ID NO: 17266 - DNA, 20 bp, Artificial Sequence
  Description of Artificial Sequence: Synthetic oligonucleotide
  Target: LAMA2; (-) strand; PAM type: NNGRRT; PAM sequence: GTGAGT
atggaaggaaagtggatgga

SEQ ID NO: 17267 - DNA, 20 bp, Artificial Sequence
  Description of Artificial Sequence: Synthetic oligonucleotide
  Target: LAMA2; (-) strand; PAM type: NNGRRT; PAM sequence: TGGAGT
taggatggaaggaaagtgga

SEQ ID NO: 17268 - DNA, 20 bp, Artificial Sequence
  Description of Artificial Sequence: Synthetic oligonucleotide
  Target: LAMA2; (-) strand; PAM type: NNGRRT; PAM sequence: GTGGAT
taatataggatggaaggaaa

SEQ ID NO: 17269 - DNA, 20 bp, Artificial Sequence
  Description of Artificial Sequence: Synthetic oligonucleotide
  Target: LAMA2; (-) strand; PAM type: NNGRRT; PAM sequence: TAGGAT
gaagtgtcaacaaattaata

SEQ ID NO: 17270 - DNA, 20 bp, Artificial Sequence
  Description of Artificial Sequence: Synthetic oligonucleotide
  Target: LAMA2; (-) strand; PAM type: NNGRRT; PAM sequence: GAGGAT
atatatatatatatggtcca

SEQ ID NO: 17271 - DNA, 20 bp, Artificial Sequence
  Description of Artificial Sequence: Synthetic oligonucleotide
  Target: LAMA2; (-) strand; PAM type: NNGRRT; PAM sequence: AAGAGT
acctacaaatcttctaaaat

SEQ ID NO: 17272 - DNA, 20 bp, Artificial Sequence
  Description of Artificial Sequence: Synthetic oligonucleotide
  Target: LAMA2; (-) strand; PAM type: NNGRRT; PAM sequence: CAGAAT
ctgaaagcatagatagggct

SEQ ID NO: 17273 - DNA, 20 bp, Artificial Sequence
  Description of Artificial Sequence: Synthetic oligonucleotide
  Target: LAMA2; (-) strand; PAM type: NNGRRT; PAM sequence: AAGAGT
acgtgagacacacaaaatta

SEQ ID NO: 17274 - DNA, 20 bp, Artificial Sequence
  Description of Artificial Sequence: Synthetic oligonucleotide
  Target: LAMA2; (-) strand; PAM type: NNGRRT; PAM sequence: CTGAAT
acctaacttctaataacact

SEQ ID NO: 17275 - DNA, 20 bp, Artificial Sequence
  Description of Artificial Sequence: Synthetic oligonucleotide
  Target: LAMA2; (-) strand; PAM type: NNGRRT; PAM sequence: ATGGAT
tacccagaggtccacatcat

SEQ ID NO: 17276 - DNA, 20 bp, Artificial Sequence
  Description of Artificial Sequence: Synthetic oligonucleotide
  Target: LAMA2; (-) strand; PAM type: NNGRRT; PAM sequence: TGGGAT
taattaatcacagttgtgat

SEQ ID NO: 17277 - DNA, 20 bp, Artificial Sequence
  Description of Artificial Sequence: Synthetic oligonucleotide
  Target: LAMA2; (-) strand; PAM type: NNGRRT; PAM sequence: TGGAGT
agaaatagagccagtaaact

SEQ ID NO: 17278 - DNA, 20 bp, Artificial Sequence
  Description of Artificial Sequence: Synthetic oligonucleotide
  Target: LAMA2; (-) strand; PAM type: NNGRRT; PAM sequence: GTGGAT
cactttcattaataagagat

SEQ ID NO: 17279 - DNA, 20 bp, Artificial Sequence
  Description of Artificial Sequence: Synthetic oligonucleotide
  Target: LAMA2; (-) strand; PAM type: NNGRRT; PAM sequence: GTGAGT
ttttattcagaaggagaaat

SEQ ID NO: 17280 - DNA, 20 bp, Artificial Sequence
  Description of Artificial Sequence: Synthetic oligonucleotide
  Target: LAMA2; (-) strand; PAM type: NNGRRT; PAM sequence: AGGAAT
ttgttttgcttttccaaaaa

SEQ ID NO: 17281 - DNA, 20 bp, Artificial Sequence
  Description of Artificial Sequence: Synthetic oligonucleotide
  Target: LAMA2; (-) strand; PAM type: NNGRRT; PAM sequence: TTGGGT
agaagaaggccatctagttc

SEQ ID NO: 17282 - DNA, 20 bp, Artificial Sequence
  Description of Artificial Sequence: Synthetic oligonucleotide
  Target: LAMA2; (-) strand; PAM type: NNGRRT; PAM sequence: GAGGAT
taaaaatacagaaagggagg

SEQ ID NO: 17283 - DNA, 20 bp, Artificial Sequence
  Description of Artificial Sequence: Synthetic oligonucleotide
  Target: LAMA2; (-) strand; PAM type: NNGRRT; PAM sequence: TAGAAT
catgcaccatcatttcaacc

SEQ ID NO: 17284 - DNA, 20 bp, Artificial Sequence
  Description of Artificial Sequence: Synthetic oligonucleotide
  Target: LAMA2; (-) strand; PAM type: NNGRRT; PAM sequence: AAGGAT
cctaaagatagccagatgtg

SEQ ID NO: 17285 - DNA, 20 bp, Artificial Sequence
  Description of Artificial Sequence: Synthetic oligonucleotide
  Target: LAMA2; (-) strand; PAM type: NNGRRT; PAM sequence: GTGAAT
aactctgtggaaaatactca

SEQ ID NO: 17286 - DNA, 20 bp, Artificial Sequence
  Description of Artificial Sequence: Synthetic oligonucleotide
  Target: LAMA2; (-) strand; PAM type: NNGRRT; PAM sequence: TGGAGT
taataatttaaacagacaag

SEQ ID NO: 17287 - DNA, 20 bp, Artificial Sequence
  Description of Artificial Sequence: Synthetic oligonucleotide
  Target: LAMA2; (-) strand; PAM type: NNGRRT; PAM sequence: TGGGAT
agtctggttagcttagaagc

SEQ ID NO: 17288 - DNA, 20 bp, Artificial Sequence
  Description of Artificial Sequence: Synthetic oligonucleotide
  Target: LAMA2; (-) strand; PAM type: NNGRRT; PAM sequence: ATGAGT
atacatgaaaggccaaaatg

SEQ ID NO: 17289 - DNA, 20 bp, Artificial Sequence
  Description of Artificial Sequence: Synthetic oligonucleotide
  Target: LAMA2; (-) strand; PAM type: NNGRRT; PAM sequence: ATGAAT
ttcacccagatagcatttca

SEQ ID NO: 17290 - DNA, 20 bp, Artificial Sequence
  Description of Artificial Sequence: Synthetic oligonucleotide
  Target: LAMA2; (-) strand; PAM type: NNGRRT; PAM sequence: TCGAAT
catgttggtttaaattaacc

SEQ ID NO: 17291 - DNA, 20 bp, Artificial Sequence
  Description of Artificial Sequence: Synthetic oligonucleotide
  Target: LAMA2; (-) strand; PAM type: NNGRRT; PAM sequence: TGGGAT
aaagagaaaacacaaccttt

SEQ ID NO: 17292 - DNA, 20 bp, Artificial Sequence
  Description of Artificial Sequence: Synthetic oligonucleotide
  Target: LAMA2; (-) strand; PAM type: NNGRRT; PAM sequence: TTGAAT
tgtgtttttttcaaagtgca

SEQ ID NO: 17293 - DNA, 20 bp, Artificial Sequence
  Description of Artificial Sequence: Synthetic oligonucleotide
  Target: LAMA2; (-) strand; PAM type: NNGRRT; PAM sequence: GTGAAT
caatattcactgtgggagag

SEQ ID NO: 17294 - DNA, 20 bp, Artificial Sequence
  Description of Artificial Sequence: Synthetic oligonucleotide
  Target: LAMA2; (-) strand; PAM type: NNGRRT; PAM sequence: TAGAGT
atattatgacagctgagctc

SEQ ID NO: 17295 - DNA, 20 bp, Artificial Sequence
  Description of Artificial Sequence: Synthetic oligonucleotide
  Target: LAMA2; (-) strand; PAM type: NNGRRT; PAM sequence: ATGAAT
ttgtagatattctgtccatt

SEQ ID NO: 17296 - DNA, 20 bp, Artificial Sequence
  Description of Artificial Sequence: Synthetic oligonucleotide
  Target: LAMA2; (-) strand; PAM type: NNGRRT; PAM sequence: AGGGAT
gtgtgctgacatttgaaagt

SEQ ID NO: 17297 - DNA, 20 bp, Artificial Sequence
  Description of Artificial Sequence: Synthetic oligonucleotide
  Target: LAMA2; (-) strand; PAM type: NNGRRT; PAM sequence: TTGGAT
tttgatgagtagtatgtgtt

SEQ ID NO: 17298 - DNA, 20 bp, Artificial Sequence
  Description of Artificial Sequence: Synthetic oligonucleotide
  Target: LAMA2; (-) strand; PAM type: NNGRRT; PAM sequence: ATGAGT
cttaaataaagatgactttg

SEQ ID NO: 17299 - DNA, 20 bp, Artificial Sequence
  Description of Artificial Sequence: Synthetic oligonucleotide
  Target: LAMA2; (-) strand; PAM type: NNGRRT; PAM sequence: AGGAAT
ctcttacagactcttgaaac

SEQ ID NO: 17300 - DNA, 20 bp, Artificial Sequence
  Description of Artificial Sequence: Synthetic oligonucleotide
  Target: LAMA2; (-) strand; PAM type: NNGRRT; PAM sequence: TGGAGT
tttaccaaaatatatatatt

SEQ ID NO: 17301 - DNA, 20 bp, Artificial Sequence
  Description of Artificial Sequence: Synthetic oligonucleotide
  Target: LAMA2; (-) strand; PAM type: NNGRRT; PAM sequence: CAGAAT
acagagcaaaatatttcact

SEQ ID NO: 17302 - DNA, 20 bp, Artificial Sequence
  Description of Artificial Sequence: Synthetic oligonucleotide
  Target: LAMA2; (-) strand; PAM type: NNGRRT; PAM sequence: AAGAGT
aaaatacacattagtattta

SEQ ID NO: 17303 - DNA, 20 bp, Artificial Sequence
  Description of Artificial Sequence: Synthetic oligonucleotide
  Target: LAMA2; (-) strand; PAM type: NNGRRT; PAM sequence: CAGAAT
tccttcctcctggaatataa

SEQ ID NO: 17304 - DNA, 20 bp, Artificial Sequence
  Description of Artificial Sequence: Synthetic oligonucleotide
  Target: LAMA2; (-) strand; PAM type: NNGRRT; PAM sequence: TGGAAT
taaggcaatttccttcctcc

SEQ ID NO: 17305 - DNA, 20 bp, Artificial Sequence
  Description of Artificial Sequence: Synthetic oligonucleotide
  Target: LAMA2; (-) strand; PAM type: NNGRRT; PAM sequence: TAGAAT
ctttcatgatgttttcaatt

SEQ ID NO: 17306 - DNA, 20 bp, Artificial Sequence
  Description of Artificial Sequence: Synthetic oligonucleotide
  Target: LAMA2; (-) strand; PAM type: NNGRRT; PAM sequence: ACGAAT
taagtagaaagaagaataaa

SEQ ID NO: 17307 - DNA, 20 bp, Artificial Sequence
  Description of Artificial Sequence: Synthetic oligonucleotide
  Target: LAMA2; (-) strand; PAM type: NNGRRT; PAM sequence: AAGAAT
agcttagcctaagtagaaag

SEQ ID NO: 17308 - DNA, 20 bp, Artificial Sequence
  Description of Artificial Sequence: Synthetic oligonucleotide
  Target: LAMA2; (-) strand; PAM type: NNGRRT; PAM sequence: TTGAAT
cacttagaaacttacataca

SEQ ID NO: 17309 - DNA, 20 bp, Artificial Sequence
  Description of Artificial Sequence: Synthetic oligonucleotide
  Target: LAMA2; (-) strand; PAM type: NNGRRT; PAM sequence: CAGGAT
ggaataaaagatgactcaag

SEQ ID NO: 17310 - DNA, 20 bp, Artificial Sequence
  Description of Artificial Sequence: Synthetic oligonucleotide
  Target: LAMA2; (-) strand; PAM type: NNGRRT; PAM sequence: TGGAAT
acactcaaaaaaaggaaaac

SEQ ID NO: 17311 - DNA, 20 bp, Artificial Sequence
  Description of Artificial Sequence: Synthetic oligonucleotide
  Target: LAMA2; (-) strand; PAM type: NNGRRT; PAM sequence: AAGAGT
aaaagagaaactatgggaca

SEQ ID NO: 17312 - DNA, 20 bp, Artificial Sequence
  Description of Artificial Sequence: Synthetic oligonucleotide
  Target: LAMA2; (-) strand; PAM type: NNGRRT; PAM sequence: TAGAAT
tgatatcctaaaaagtgttt

SEQ ID NO: 17313 - DNA, 20 bp, Artificial Sequence
  Description of Artificial Sequence: Synthetic oligonucleotide
  Target: LAMA2; (-) strand; PAM type: NNGRRT; PAM sequence: GTGGAT
tgttcctgataagtttatct

SEQ ID NO: 17314 - DNA, 20 bp, Artificial Sequence
  Description of Artificial Sequence: Synthetic oligonucleotide
  Target: LAMA2; (-) strand; PAM type: NNGRRT; PAM sequence: CAGAAT
gtgaagtcctacctattcaa

SEQ ID NO: 17315 - DNA, 20 bp, Artificial Sequence
  Description of Artificial Sequence: Synthetic oligonucleotide
  Target: LAMA2; (-) strand; PAM type: NNGRRT; PAM sequence: TTGAAT
tttgcattttaaataccagg

SEQ ID NO: 17316 - DNA, 20 bp, Artificial Sequence
  Description of Artificial Sequence: Synthetic oligonucleotide
  Target: LAMA2; (-) strand; PAM type: NNGRRT; PAM sequence: TAGAAT
aaaatgtatggctaatctct

SEQ ID NO: 17317 - DNA, 20 bp, Artificial Sequence
  Description of Artificial Sequence: Synthetic oligonucleotide
  Target: LAMA2; (-) strand; PAM type: NNGRRT; PAM sequence: AAGGAT
ataatttacctcagatcttt

SEQ ID NO: 17318 - DNA, 20 bp, Artificial Sequence
  Description of Artificial Sequence: Synthetic oligonucleotide
  Target: LAMA2; (-) strand; PAM type: NNGRRT; PAM sequence: TTGAGT
gccttacccaagaaaatccc

SEQ ID NO: 17319 - DNA, 20 bp, Artificial Sequence
  Description of Artificial Sequence: Synthetic oligonucleotide
  Target: LAMA2; (-) strand; PAM type: NNGRRT; PAM sequence: AAGAAT
tgaatcatttctcaaataat

SEQ ID NO: 17320 - DNA, 20 bp, Artificial Sequence
  Description of Artificial Sequence: Synthetic oligonucleotide
  Target: LAMA2; (-) strand; PAM type: NNGRRT; PAM sequence: TTGAAT
atttagcattgagacaacaa

SEQ ID NO: 17321 - DNA, 20 bp, Artificial Sequence
  Description of Artificial Sequence: Synthetic oligonucleotide
  Target: LAMA2; (-) strand; PAM type: NNGRRT; PAM sequence: ATGAAT
ttaatgaatggatagttttt

SEQ ID NO: 17322 - DNA, 20 bp, Artificial Sequence
  Description of Artificial Sequence: Synthetic oligonucleotide
  Target: LAMA2; (-) strand; PAM type: NNGRRT; PAM sequence: ATGGAT
agtttaaaaaggattaatga

SEQ ID NO: 17323 - DNA, 20 bp, Artificial Sequence
  Description of Artificial Sequence: Synthetic oligonucleotide
  Target: LAMA2; (-) strand; PAM type: NNGRRT; PAM sequence: ATGAAT
cttcagtttaaaaaggatta

SEQ ID NO: 17324 - DNA, 20 bp, Artificial Sequence
  Description of Artificial Sequence: Synthetic oligonucleotide
  Target: LAMA2; (-) strand; PAM type: NNGRRT; PAM sequence: AAGGAT
tctaattacttcagtttaaa

SEQ ID NO: 17325 - DNA, 20 bp, Artificial Sequence
  Description of Artificial Sequence: Synthetic oligonucleotide
  Target: LAMA2; (-) strand; PAM type: NNGRRT; PAM sequence: AAGAAT
taaagaataaccatttaata

SEQ ID NO: 17326 - DNA, 20 bp, Artificial Sequence
  Description of Artificial Sequence: Synthetic oligonucleotide
  Target: LAMA2; (-) strand; PAM type: NNGRRT; PAM sequence: AAGAAT
gctcatctttgctcatttta

SEQ ID NO: 17327 - DNA, 20 bp, Artificial Sequence
  Description of Artificial Sequence: Synthetic oligonucleotide
  Target: LAMA2; (-) strand; PAM type: NNGRRT; PAM sequence: AAGAAT
tcactagctgtattatgagg

SEQ ID NO: 17328 - DNA, 20 bp, Artificial Sequence
  Description of Artificial Sequence: Synthetic oligonucleotide
  Target: LAMA2; (-) strand; PAM type: NNGRRT; PAM sequence: TTGAGT
ggactttttcccacctacac

SEQ ID NO: 17329 - DNA, 20 bp, Artificial Sequence
  Description of Artificial Sequence: Synthetic oligonucleotide
  Target: LAMA2; (-) strand; PAM type: NNGRRT; PAM sequence: GTGAAT
tgaaagcattgtggcagcaa

SEQ ID NO: 17330 - DNA, 20 bp, Artificial Sequence
  Description of Artificial Sequence: Synthetic oligonucleotide
  Target: LAMA2; (-) strand; PAM type: NNGRRT; PAM sequence: TTGAAT
ctctgggaatgatagagggc

SEQ ID NO: 17331 - DNA, 20 bp, Artificial Sequence
  Description of Artificial Sequence: Synthetic oligonucleotide
  Target: LAMA2; (-) strand; PAM type: NNGRRT; PAM sequence: GGGAAT
atttgattttgtatgtctct

SEQ ID NO: 17332 - DNA, 20 bp, Artificial Sequence
  Description of Artificial Sequence: Synthetic oligonucleotide
  Target: LAMA2; (-) strand; PAM type: NNGRRT; PAM sequence: ATGAAT
tatttaataaaataatctat

SEQ ID NO: 17333 - DNA, 20 bp, Artificial Sequence
  Description of Artificial Sequence: Synthetic oligonucleotide
  Target: LAMA2; (-) strand; PAM type: NNGRRT; PAM sequence: GTGGGT
ccaagcctgatgtatagcaa

SEQ ID NO: 17334 - DNA, 20 bp, Artificial Sequence
  Description of Artificial Sequence: Synthetic oligonucleotide
  Target: LAMA2; (-) strand; PAM type: NNGRRT; PAM sequence: AGGAGT
gtctagcataaatgctggtc

SEQ ID NO: 17335 - DNA, 20 bp, Artificial Sequence
  Description of Artificial Sequence: Synthetic oligonucleotide
  Target: LAMA2; (-) strand; PAM type: NNGRRT; PAM sequence: CAGGGT
gatcccgttacatttttgag

SEQ ID NO: 17336 - DNA, 20 bp, Artificial Sequence
  Description of Artificial Sequence: Synthetic oligonucleotide
  Target: LAMA2; (-) strand; PAM type: NNGRRT; PAM sequence: TGGAGT
gtgtttccctagggtgagaa

SEQ ID NO: 17337 - DNA, 20 bp, Artificial Sequence
  Description of Artificial Sequence: Synthetic oligonucleotide
  Target: LAMA2; (-) strand; PAM type: NNGRRT; PAM sequence: GAGAAT
aatccgtgtttccctagggt

SEQ ID NO: 17338 - DNA, 20 bp, Artificial Sequence
  Description of Artificial Sequence: Synthetic oligonucleotide
  Target: LAMA2; (-) strand; PAM type: NNGRRT; PAM sequence: TAGGGT
cagtaaaatccgtgtttccc

SEQ ID NO: 17339 - DNA, 20 bp, Artificial Sequence
  Description of Artificial Sequence: Synthetic oligonucleotide
  Target: LAMA2; (-) strand; PAM type: NNGRRT; PAM sequence: CGGAAT
ataatctgaggtgtaaaagt

SEQ ID NO: 17340 - DNA, 20 bp, Artificial Sequence
  Description of Artificial Sequence: Synthetic oligonucleotide
  Target: LAMA2; (-) strand; PAM type: NNGRRT; PAM sequence: CTGAAT
ctgggaatcttcggctaaga

SEQ ID NO: 17341 - DNA, 20 bp, Artificial Sequence
  Description of Artificial Sequence: Synthetic oligonucleotide
  Target: LAMA2; (-) strand; PAM type: NNGRRT; PAM sequence: GGGAAT
gcaacgatggacctggggct

SEQ ID NO: 17342 - DNA, 20 bp, Artificial Sequence
  Description of Artificial Sequence: Synthetic oligonucleotide
  Target: LAMA2; (-) strand; PAM type: NNGRRT; PAM sequence: AGGAAT
aatgcattttgatctgtaga

SEQ ID NO: 17343 - DNA, 20 bp, Artificial Sequence
  Description of Artificial Sequence: Synthetic oligonucleotide
  Target: LAMA2; (-) strand; PAM type: NNGRRT; PAM sequence: TTGAAT
atggattcccttttgtttga

SEQ ID NO: 17344 - DNA, 20 bp, Artificial Sequence
  Description of Artificial Sequence: Synthetic oligonucleotide
  Target: LAMA2; (-) strand; PAM type: NNGRRT; PAM sequence: ATGGAT
cccttccttagttgcctcac

SEQ ID NO: 17345 - DNA, 20 bp, Artificial Sequence
  Description of Artificial Sequence: Synthetic oligonucleotide
  Target: LAMA2; (-) strand; PAM type: NNGRRT; PAM sequence: ATGAGT
cggatggttacatctagggc

SEQ ID NO: 17346 - DNA, 20 bp, Artificial Sequence
  Description of Artificial Sequence: Synthetic oligonucleotide
  Target: LAMA2; (-) strand; PAM type: NNGRRT; PAM sequence: ACGGAT
atcaagccatattccccaga

SEQ ID NO: 17347 - DNA, 20 bp, Artificial Sequence
  Description of Artificial Sequence: Synthetic oligonucleotide
  Target: LAMA2; (-) strand; PAM type: NNGRRT; PAM sequence: ATGGGT
tgaataagtgttagacacca

SEQ ID NO: 17348 - DNA, 20 bp, Artificial Sequence
  Description of Artificial Sequence: Synthetic oligonucleotide
  Target: LAMA2; (-) strand; PAM type: NNGRRT; PAM sequence: ATGAAT
tgaatgaatgaatgagtgac

SEQ ID NO: 17349 - DNA, 20 bp, Artificial Sequence
  Description of Artificial Sequence: Synthetic oligonucleotide
  Target: LAMA2; (-) strand; PAM type: NNGRRT; PAM sequence: ATGAGT
ttgaataaatgaatgaatga

SEQ ID NO: 17350 - DNA, 20 bp, Artificial Sequence
  Description of Artificial Sequence: Synthetic oligonucleotide
  Target: LAMA2; (-) strand; PAM type: NNGRRT; PAM sequence: ATGAAT
ttgtttgaataaatgaatga

SEQ ID NO: 17351 - DNA, 20 bp, Artificial Sequence
  Description of Artificial Sequence: Synthetic oligonucleotide
  Target: LAMA2; (-) strand; PAM type: NNGRRT; PAM sequence: ATGAAT
atatttgtttgaataaatga

SEQ ID NO: 17352 - DNA, 20 bp, Artificial Sequence
  Description of Artificial Sequence: Synthetic oligonucleotide
  Target: LAMA2; (-) strand; PAM type: NNGRRT; PAM sequence: ATGAAT
aaaaatatttgtttgaataa

SEQ ID NO: 17353 - DNA, 20 bp, Artificial Sequence
  Description of Artificial Sequence: Synthetic oligonucleotide
  Target: LAMA2; (-) strand; PAM type: NNGRRT; PAM sequence: TTGAAT
aagagctcaaaaatatttgt

SEQ ID NO: 17354 - DNA, 20 bp, Artificial Sequence
  Description of Artificial Sequence: Synthetic oligonucleotide
  Target: LAMA2; (-) strand; PAM type: NNGRRT; PAM sequence: AAGAAT
ctctaaaataaaaacatcat

SEQ ID NO: 17355 - DNA, 20 bp, Artificial Sequence
  Description of Artificial Sequence: Synthetic oligonucleotide
  Target: LAMA2; (-) strand; PAM type: NNGRRT; PAM sequence: TAGAAT
tctaatcaattcccaacatt

SEQ ID NO: 17356 - DNA, 20 bp, Artificial Sequence
  Description of Artificial Sequence: Synthetic oligonucleotide
  Target: LAMA2; (-) strand; PAM type: NNGRRT; PAM sequence: CAGAGT
tctgtttctcagagagtagg

SEQ ID NO: 17357 - DNA, 20 bp, Artificial Sequence
  Description of Artificial Sequence: Synthetic oligonucleotide
  Target: LAMA2; (-) strand; PAM type: NNGRRT; PAM sequence: GAGAGT
tccttatgatctgtttctca

SEQ ID NO: 17358 - DNA, 20 bp, Artificial Sequence
  Description of Artificial Sequence: Synthetic oligonucleotide
  Target: LAMA2; (-) strand; PAM type: NNGRRT; PAM sequence: AAGAGT
gtttgggcccataagtaaat

SEQ ID NO: 17359 - DNA, 20 bp, Artificial Sequence
  Description of Artificial Sequence: Synthetic oligonucleotide
  Target: LAMA2; (-) strand; PAM type: NNGRRT; PAM sequence: AGGGGT
atgccagattttaactgctc

SEQ ID NO: 17360 - DNA, 20 bp, Artificial Sequence
  Description of Artificial Sequence: Synthetic oligonucleotide
  Target: LAMA2; (-) strand; PAM type: NNGRRT; PAM sequence: CAGAAT
tcactggccaaggtgttagc

SEQ ID NO: 17361 - DNA, 20 bp, Artificial Sequence
  Description of Artificial Sequence: Synthetic oligonucleotide
  Target: LAMA2; (-) strand; PAM type: NNGRRT; PAM sequence: TGGAAT
tgtccactgtctttagaaat

SEQ ID NO: 17362 - DNA, 20 bp, Artificial Sequence
  Description of Artificial Sequence: Synthetic oligonucleotide
  Target: LAMA2; (-) strand; PAM type: NNGRRT; PAM sequence: AGGAAT
atctattctcagagagctgc

SEQ ID NO: 17363 - DNA, 20 bp, Artificial Sequence
  Description of Artificial Sequence: Synthetic oligonucleotide
  Target: LAMA2; (-) strand; PAM type: NNGRRT; PAM sequence: AGGAAT
aaaaataaaaataaattcac

SEQ ID NO: 17364 - DNA, 20 bp, Artificial Sequence
  Description of Artificial Sequence: Synthetic oligonucleotide
  Target: LAMA2; (-) strand; PAM type: NNGRRT; PAM sequence: CAGAGT
ctacactccagcctgggcaa

SEQ ID NO: 17365 - DNA, 20 bp, Artificial Sequence
  Description of Artificial Sequence: Synthetic oligonucleotide
  Target: LAMA2; (-) strand; PAM type: NNGRRT; PAM sequence: GAGGAT
tactctcgtggctgaggcag

SEQ ID NO: 17366 - DNA, 20 bp, Artificial Sequence
  Description of Artificial Sequence: Synthetic oligonucleotide
  Target: LAMA2; (-) strand; PAM type: NNGRRT; PAM sequence: GTGAAT
agtttgctgggtgtagtggc

SEQ ID NO: 17367 - DNA, 20 bp, Artificial Sequence
  Description of Artificial Sequence: Synthetic oligonucleotide
  Target: LAMA2; (-) strand; PAM type: NNGRRT; PAM sequence: CTGGGT
actaaaaatacaaaagtttg

SEQ ID NO: 17368 - DNA, 20 bp, Artificial Sequence
  Description of Artificial Sequence: Synthetic oligonucleotide
  Target: LAMA2; (-) strand; PAM type: NNGRRT; PAM sequence: AGGAGT
tgggtggatcacttgagctc

SEQ ID NO: 17369 - DNA, 20 bp, Artificial Sequence
  Description of Artificial Sequence: Synthetic oligonucleotide
  Target: LAMA2; (-) strand; PAM type: NNGRRT; PAM sequence: GTGGAT
actttgggaggtctaggtgg

SEQ ID NO: 17370 - DNA, 20 bp, Artificial Sequence
  Description of Artificial Sequence: Synthetic oligonucleotide
  Target: LAMA2; (-) strand; PAM type: NNGRRT; PAM sequence: GTGGGT
cagcactttgggaggtctag

SEQ ID NO: 17371 - DNA, 20 bp, Artificial Sequence
  Description of Artificial Sequence: Synthetic oligonucleotide
  Target: LAMA2; (-) strand; PAM type: NNGRRT; PAM sequence: AAGAAT
tataaatttaaagacattta

SEQ ID NO: 17372 - DNA, 20 bp, Artificial Sequence
  Description of Artificial Sequence: Synthetic oligonucleotide
  Target: LAMA2; (-) strand; PAM type: NNGRRT; PAM sequence: CTGGGT
caatttttataagaattaaa

SEQ ID NO: 17373 - DNA, 20 bp, Artificial Sequence
  Description of Artificial Sequence: Synthetic oligonucleotide
  Target: LAMA2; (-) strand; PAM type: NNGRRT; PAM sequence: AAGAAT
aagataatttcaatttttat

SEQ ID NO: 17374 - DNA, 20 bp, Artificial Sequence
  Description of Artificial Sequence: Synthetic oligonucleotide
  Target: LAMA2; (-) strand; PAM type: NNGRRT; PAM sequence: TAGAGT
cctgtggctaaaatatgact

SEQ ID NO: 17375 - DNA, 20 bp, Artificial Sequence
  Description of Artificial Sequence: Synthetic oligonucleotide
  Target: LAMA2; (-) strand; PAM type: NNGRRT; PAM sequence: AGGAAT
cgaataagtttcattctttc

SEQ ID NO: 17376 - DNA, 20 bp, Artificial Sequence
  Description of Artificial Sequence: Synthetic oligonucleotide
  Target: LAMA2; (-) strand; PAM type: NNGRRT; PAM sequence: TCGAAT
accttgtcacgtaataaaag

SEQ ID NO: 17377 - DNA, 20 bp, Artificial Sequence
  Description of Artificial Sequence: Synthetic oligonucleotide
  Target: LAMA2; (-) strand; PAM type: NNGRRT; PAM sequence: TTGAAT
ttactttctgcctttatgct

SEQ ID NO: 17378 - DNA, 20 bp, Artificial Sequence
  Description of Artificial Sequence: Synthetic oligonucleotide
  Target: LAMA2; (-) strand; PAM type: NNGRRT; PAM sequence: TTGAAT
tagaatatgattttccacaa

SEQ ID NO: 17379 - DNA, 20 bp, Artificial Sequence
  Description of Artificial Sequence: Synthetic oligonucleotide
  Target: LAMA2; (-) strand; PAM type: NNGRRT; PAM sequence: TAGAAT
actacttcatcagaataagt

SEQ ID NO: 17380 - DNA, 20 bp, Artificial Sequence
  Description of Artificial Sequence: Synthetic oligonucleotide
  Target: LAMA2; (-) strand; PAM type: NNGRRT; PAM sequence: CAGAAT
tgacaagggaactacttcat

SEQ ID NO: 17381 - DNA, 20 bp, Artificial Sequence
  Description of Artificial Sequence: Synthetic oligonucleotide
  Target: LAMA2; (-) strand; PAM type: NNGRRT; PAM sequence: TAGAAT
aggctattctcattcttaat

SEQ ID NO: 17382 - DNA, 20 bp, Artificial Sequence
  Description of Artificial Sequence: Synthetic oligonucleotide
  Target: LAMA2; (-) strand; PAM type: NNGRRT; PAM sequence: ATGAAT
tccacatgccagcagtagaa

SEQ ID NO: 17383 - DNA, 20 bp, Artificial Sequence
  Description of Artificial Sequence: Synthetic oligonucleotide
  Target: LAMA2; (-) strand; PAM type: NNGRRT; PAM sequence: TAGAAT
ttacttgctaaaataatgtg

SEQ ID NO: 17384 - DNA, 20 bp, Artificial Sequence
  Description of Artificial Sequence: Synthetic oligonucleotide
  Target: LAMA2; (-) strand; PAM type: NNGRRT; PAM sequence: TAGAAT
tgtacaggtaccaccttttc

SEQ ID NO: 17385 - DNA, 20 bp, Artificial Sequence
  Description of Artificial Sequence: Synthetic oligonucleotide
  Target: LAMA2; (-) strand; PAM type: NNGRRT; PAM sequence: AGGGGT
tcctggcatcctgttcctta

SEQ ID NO: 17386 - DNA, 20 bp, Artificial Sequence
  Description of Artificial Sequence: Synthetic oligonucleotide
  Target: LAMA2; (-) strand; PAM type: NNGRRT; PAM sequence: AGGGGT
gccgataactgacagatatg

SEQ ID NO: 17387 - DNA, 20 bp, Artificial Sequence
  Description of Artificial Sequence: Synthetic oligonucleotide
  Target: LAMA2; (-) strand; PAM type: NNGRRT; PAM sequence: TTGAAT
cattccagagacctgcctct

SEQ ID NO: 17388 - DNA, 20 bp, Artificial Sequence
  Description of Artificial Sequence: Synthetic oligonucleotide
  Target: LAMA2; (-) strand; PAM type: NNGRRT; PAM sequence: AAGGGT
acccatctctcagctgaggc

SEQ ID NO: 17389 - DNA, 20 bp, Artificial Sequence
  Description of Artificial Sequence: Synthetic oligonucleotide
  Target: LAMA2; (-) strand; PAM type: NNGRRT; PAM sequence: ATGAAT
ttcttgacaaatatgcatta

SEQ ID NO: 17390 - DNA, 20 bp, Artificial Sequence
  Description of Artificial Sequence: Synthetic oligonucleotide
  Target: LAMA2; (-) strand; PAM type: NNGRRT; PAM sequence: TAGAAT
tttaataaagtgttaccagc

SEQ ID NO: 17391 - DNA, 20 bp, Artificial Sequence
  Description of Artificial Sequence: Synthetic oligonucleotide
  Target: LAMA2; (-) strand; PAM type: NNGRRT; PAM sequence: GTGAAT
tgtcctaaatctgtgagaca

SEQ ID NO: 17392 - DNA, 20 bp, Artificial Sequence
  Description of Artificial Sequence: Synthetic oligonucleotide
  Target: LAMA2; (-) strand; PAM type: NNGRRT; PAM sequence: GGGAAT
ataatccacatataactgat

SEQ ID NO: 17393 - DNA, 20 bp, Artificial Sequence
  Description of Artificial Sequence: Synthetic oligonucleotide
  Target: LAMA2; (-) strand; PAM type: NNGRRT; PAM sequence: TTGAAT
tcttcatatgaatgattaca

SEQ ID NO: 17394 - DNA, 20 bp, Artificial Sequence
  Description of Artificial Sequence: Synthetic oligonucleotide
  Target: LAMA2; (-) strand; PAM type: NNGRRT; PAM sequence: ATGAAT
tgtgttcattgcttcttcat

SEQ ID NO: 17395 - DNA, 20 bp, Artificial Sequence
  Description of Artificial Sequence: Synthetic oligonucleotide
  Target: LAMA2; (-) strand; PAM type: NNGRRT; PAM sequence: GAGGGT
tggaggtgagagaggtgctc

SEQ ID NO: 17396 - DNA, 20 bp, Artificial Sequence
  Description of Artificial Sequence: Synthetic oligonucleotide
  Target: LAMA2; (-) strand; PAM type: NNGRRT; PAM sequence: ATGGAT
tttactttgtaatgagtttt

SEQ ID NO: 17397 - DNA, 20 bp, Artificial Sequence
  Description of Artificial Sequence: Synthetic oligonucleotide
  Target: LAMA2; (-) strand; PAM type: NNGRRT; PAM sequence: ATGAGT
ctaatatattttactttgta

SEQ ID NO: 17398 - DNA, 20 bp, Artificial Sequence
  Description of Artificial Sequence: Synthetic oligonucleotide
  Target: LAMA2; (-) strand; PAM type: NNGRRT; PAM sequence: TAGAGT
acagagagatgatttggaat

SEQ ID NO: 17399 - DNA, 20 bp, Artificial Sequence
  Description of Artificial Sequence: Synthetic oligonucleotide
  Target: LAMA2; (-) strand; PAM type: NNGRRT; PAM sequence: TGGAAT
caagagacagagagatgatt

SEQ ID NO: 17400 - DNA, 20 bp, Artificial Sequence
  Description of Artificial Sequence: Synthetic oligonucleotide
  Target: LAMA2; (-) strand; PAM type: NNGRRT; PAM sequence: AAGAAT
aataacctcaatatttttca

SEQ ID NO: 17401 - DNA, 20 bp, Artificial Sequence
  Description of Artificial Sequence: Synthetic oligonucleotide
  Target: LAMA2; (-) strand; PAM type: NNGRRT; PAM sequence: AAGGAT
attgtatatctcaagaataa

SEQ ID NO: 17402 - DNA, 20 bp, Artificial Sequence
  Description of Artificial Sequence: Synthetic oligonucleotide
  Target: LAMA2; (-) strand; PAM type: NNGRRT; PAM sequence: AAGAAT
cagttgaaattgtatatctc

SEQ ID NO: 17403 - DNA, 20 bp, Artificial Sequence
  Description of Artificial Sequence: Synthetic oligonucleotide
  Target: LAMA2; (-) strand; PAM type: NNGRRT; PAM sequence: TTGAAT
agctattaggacagcaatag

SEQ ID NO: 17404 - DNA, 20 bp, Artificial Sequence
  Description of Artificial Sequence: Synthetic oligonucleotide
  Target: LAMA2; (-) strand; PAM type: NNGRRT; PAM sequence: TAGGAT
atcttatgatggctttgatt

SEQ ID NO: 17405 - DNA, 20 bp, Artificial Sequence
  Description of Artificial Sequence: Synthetic oligonucleotide
  Target: LAMA2; (-) strand; PAM type: NNGRRT; PAM sequence: ATGAAT
attgcacagtaaaaaaaatt

SEQ ID NO: 17406 - DNA, 20 bp, Artificial Sequence
  Description of Artificial Sequence: Synthetic oligonucleotide
  Target: LAMA2; (-) strand; PAM type: NNGRRT; PAM sequence: AAGAAT
ctggcaaaagaaaaattata

SEQ ID NO: 17407 - DNA, 20 bp, Artificial Sequence
  Description of Artificial Sequence: Synthetic oligonucleotide
  Target: LAMA2; (-) strand; PAM type: NNGRRT; PAM sequence: AAGGAT
cattttgattcaaggattat

SEQ ID NO: 17408 - DNA, 20 bp, Artificial Sequence
  Description of Artificial Sequence: Synthetic oligonucleotide
  Target: LAMA2; (-) strand; PAM type: NNGRRT; PAM sequence: AAGGAT
tgcttcaatcattttgattc

SEQ ID NO: 17409 - DNA, 20 bp, Artificial Sequence
  Description of Artificial Sequence: Synthetic oligonucleotide
  Target: LAMA2; (-) strand; PAM type: NNGRRT; PAM sequence: TAGAGT
ttcaatattttaatcaccag

SEQ ID NO: 17410 - DNA, 20 bp, Artificial Sequence
  Description of Artificial Sequence: Synthetic oligonucleotide
  Target: LAMA2; (-) strand; PAM type: NNGRRT; PAM sequence: TGGGGT
ttgccatagttacttatttg

SEQ ID NO: 17411 - DNA, 20 bp, Artificial Sequence
  Description of Artificial Sequence: Synthetic oligonucleotide
  Target: LAMA2; (-) strand; PAM type: NNGRRT; PAM sequence: GTGAGT
atggtagctaagcactttca

SEQ ID NO: 17412 - DNA, 20 bp, Artificial Sequence
  Description of Artificial Sequence: Synthetic oligonucleotide
  Target: LAMA2; (-) strand; PAM type: NNGRRT; PAM sequence: ATGGAT
ggcaattcccagggtccctt

SEQ ID NO: 17413 - DNA, 20 bp, Artificial Sequence
  Description of Artificial Sequence: Synthetic oligonucleotide
  Target: LAMA2; (-) strand; PAM type: NNGRRT; PAM sequence: CAGGGT
ctctgctagaaggcaattcc

SEQ ID NO: 17414 - DNA, 20 bp, Artificial Sequence
  Description of Artificial Sequence: Synthetic oligonucleotide
  Target: LAMA2; (-) strand; PAM type: NNGRRT; PAM sequence: GTGAGT
gaaaaatacttatttgaaat

SEQ ID NO: 17415 - DNA, 20 bp, Artificial Sequence
  Description of Artificial Sequence: Synthetic oligonucleotide
  Target: LAMA2; (-) strand; PAM type: NNGRRT; PAM sequence: GAGGGT
tgtgcttaataaagcaacta

SEQ ID NO: 17416 - DNA, 20 bp, Artificial Sequence
  Description of Artificial Sequence: Synthetic oligonucleotide
  Target: LAMA2; (-) strand; PAM type: NNGRRT; PAM sequence: GAGGGT
ttggattttagcaattaata

SEQ ID NO: 17417 - DNA, 20 bp, Artificial Sequence
  Description of Artificial Sequence: Synthetic oligonucleotide
  Target: LAMA2; (-) strand; PAM type: NNGRRT; PAM sequence: TTGGAT
ggcatgtcttcaggtggaaa

SEQ ID NO: 17418 - DNA, 20 bp, Artificial Sequence
  Description of Artificial Sequence: Synthetic oligonucleotide
  Target: LAMA2; (-) strand; PAM type: NNGRRT; PAM sequence: ACGAGT
ctaaataattgatttttctc

SEQ ID NO: 17419 - DNA, 20 bp, Artificial Sequence
  Description of Artificial Sequence: Synthetic oligonucleotide
  Target: LAMA2; (-) strand; PAM type: NNGRRT; PAM sequence: TTGAGT
actctaataggtctgagtgt

SEQ ID NO: 17420 - DNA, 20 bp, Artificial Sequence
  Description of Artificial Sequence: Synthetic oligonucleotide
  Target: LAMA2; (-) strand; PAM type: NNGRRT; PAM sequence: CTGAGT
tgctagatactctaataggt

SEQ ID NO: 17421 - DNA, 20 bp, Artificial Sequence
  Description of Artificial Sequence: Synthetic oligonucleotide
  Target: LAMA2; (-) strand; PAM type: NNGRRT; PAM sequence: TTGAAT
agttccatcccataatataa

SEQ ID NO: 17422 - DNA, 20 bp, Artificial Sequence
  Description of Artificial Sequence: Synthetic oligonucleotide
  Target: LAMA2; (-) strand; PAM type: NNGRRT; PAM sequence: ATGAGT
ctattggcagaagagtgtga

SEQ ID NO: 17423 - DNA, 20 bp, Artificial Sequence
  Description of Artificial Sequence: Synthetic oligonucleotide
  Target: LAMA2; (-) strand; PAM type: NNGRRT; PAM sequence: GTGAAT
aatactattggcagaagagt

SEQ ID NO: 17424 - DNA, 20 bp, Artificial Sequence
  Description of Artificial Sequence: Synthetic oligonucleotide
  Target: LAMA2; (-) strand; PAM type: NNGRRT; PAM sequence: AAGAGT
agcattaatactattggcag

SEQ ID NO: 17425 - DNA, 20 bp, Artificial Sequence
  Description of Artificial Sequence: Synthetic oligonucleotide
  Target: LAMA2; (-) strand; PAM type: NNGRRT; PAM sequence: ATGAAT
ataaatgaatgaatggataa

SEQ ID NO: 17426 - DNA, 20 bp, Artificial Sequence
  Description of Artificial Sequence: Synthetic oligonucleotide
  Target: LAMA2; (-) strand; PAM type: NNGRRT; PAM sequence: ATGGAT
atgaaggaataaatgaatga

SEQ ID NO: 17427 - DNA, 20 bp, Artificial Sequence
  Description of Artificial Sequence: Synthetic oligonucleotide
  Target: LAMA2; (-) strand; PAM type: NNGRRT; PAM sequence: ATGAAT
ctgtatgaaggaataaatga

SEQ ID NO: 17428 - DNA, 20 bp, Artificial Sequence
  Description of Artificial Sequence: Synthetic oligonucleotide
  Target: LAMA2; (-) strand; PAM type: NNGRRT; PAM sequence: ATGAAT
tatactgtatgaaggaataa

SEQ ID NO: 17429 - DNA, 20 bp, Artificial Sequence
  Description of Artificial Sequence: Synthetic oligonucleotide
  Target: LAMA2; (-) strand; PAM type: NNGRRT; PAM sequence: AGGAAT
gaaagctatatactgtatga

SEQ ID NO: 17430 - DNA, 20 bp, Artificial Sequence
  Description of Artificial Sequence: Synthetic oligonucleotide
  Target: LAMA2; (-) strand; PAM type: NNGRRT; PAM sequence: CAGAGT
ctgcactccagcctgggcaa

SEQ ID NO: 17431 - DNA, 20 bp, Artificial Sequence
  Description of Artificial Sequence: Synthetic oligonucleotide
  Target: LAMA2; (-) strand; PAM type: NNGRRT; PAM sequence: GAGAAT
tactccggaggccgaggcag

SEQ ID NO: 17432 - DNA, 20 bp, Artificial Sequence
  Description of Artificial Sequence: Synthetic oligonucleotide
  Target: LAMA2; (-) strand; PAM type: NNGRRT; PAM sequence: GCGGAT
actttgggaggcagaggcag

SEQ ID NO: 17433 - DNA, 20 bp, Artificial Sequence
  Description of Artificial Sequence: Synthetic oligonucleotide
  Target: LAMA2; (-) strand; PAM type: NNGRRT; PAM sequence: TGGAAT
aaagtgctcaattattcacc

SEQ ID NO: 17434 - DNA, 20 bp, Artificial Sequence
  Description of Artificial Sequence: Synthetic oligonucleotide
  Target: LAMA2; (-) strand; PAM type: NNGRRT; PAM sequence: CTGGGT
actgcaattcaagatgagat

SEQ ID NO: 17435 - DNA, 20 bp, Artificial Sequence
  Description of Artificial Sequence: Synthetic oligonucleotide
  Target: LAMA2; (-) strand; PAM type: NNGRRT; PAM sequence: GGGAAT
aggtccctcccatgaccctt

SEQ ID NO: 17436 - DNA, 20 bp, Artificial Sequence
  Description of Artificial Sequence: Synthetic oligonucleotide
  Target: LAMA2; (-) strand; PAM type: NNGRRT; PAM sequence: TTGAAT
ggaaagacctgcccctatga

SEQ ID NO: 17437 - DNA, 20 bp, Artificial Sequence
  Description of Artificial Sequence: Synthetic oligonucleotide
  Target: LAMA2; (-) strand; PAM type: NNGRRT; PAM sequence: CAGGGT
taataaagaaatacccaaga

SEQ ID NO: 17438 - DNA, 20 bp, Artificial Sequence
  Description of Artificial Sequence: Synthetic oligonucleotide
  Target: LAMA2; (-) strand; PAM type: NNGRRT; PAM sequence: AGGGAT
attttccacattgcagttag

SEQ ID NO: 17439 - DNA, 20 bp, Artificial Sequence
  Description of Artificial Sequence: Synthetic oligonucleotide
  Target: LAMA2; (-) strand; PAM type: NNGRRT; PAM sequence: ATGAAT
aattacttcacatcctttta

SEQ ID NO: 17440 - DNA, 20 bp, Artificial Sequence
  Description of Artificial Sequence: Synthetic oligonucleotide
  Target: LAMA2; (-) strand; PAM type: NNGRRT; PAM sequence: CTGAGT
tctaatgctaccaacacctg

SEQ ID NO: 17441 - DNA, 20 bp, Artificial Sequence
  Description of Artificial Sequence: Synthetic oligonucleotide
  Target: LAMA2; (-) strand; PAM type: NNGRRT; PAM sequence: GGGGAT
gaaaaaacaaaacaaaaagt

SEQ ID NO: 17442 - DNA, 20 bp, Artificial Sequence
  Description of Artificial Sequence: Synthetic oligonucleotide
  Target: LAMA2; (-) strand; PAM type: NNGRRT; PAM sequence: TAGAGT
cccaaatcattatcaccagc

SEQ ID NO: 17443 - DNA, 20 bp, Artificial Sequence
  Description of Artificial Sequence: Synthetic oligonucleotide
  Target: LAMA2; (-) strand; PAM type: NNGRRT; PAM sequence: ATGAGT
tcccatttccctgggttcaa

SEQ ID NO: 17444 - DNA, 20 bp, Artificial Sequence
  Description of Artificial Sequence: Synthetic oligonucleotide
  Target: LAMA2; (-) strand; PAM type: NNGRRT; PAM sequence: CTGGGT
ggatgttacctcccatttcc

SEQ ID NO: 17445 - DNA, 20 bp, Artificial Sequence
  Description of Artificial Sequence: Synthetic oligonucleotide
  Target: LAMA2; (-) strand; PAM type: NNGRRT; PAM sequence: CTGGAT
cttccttctacaagcttatc

SEQ ID NO: 17446 - DNA, 20 bp, Artificial Sequence
  Description of Artificial Sequence: Synthetic oligonucleotide
  Target: LAMA2; (-) strand; PAM type: NNGRRT; PAM sequence: TAGAGT
caaagagaaaaatttaaatg

SEQ ID NO: 17447 - DNA, 20 bp, Artificial Sequence
  Description of Artificial Sequence: Synthetic oligonucleotide
  Target: LAMA2; (-) strand; PAM type: NNGRRT; PAM sequence: TGGAAT
tttcaaaacaatctgaaata

SEQ ID NO: 17448 - DNA, 20 bp, Artificial Sequence
  Description of Artificial Sequence: Synthetic oligonucleotide
  Target: LAMA2; (-) strand; PAM type: NNGRRT; PAM sequence: AGGAAT
gccccccagatacatttctc

SEQ ID NO: 17449 - DNA, 20 bp, Artificial Sequence
  Description of Artificial Sequence: Synthetic oligonucleotide
  Target: LAMA2; (-) strand; PAM type: NNGRRT; PAM sequence: TAGGAT
ccttaaatcccagaatttct

SEQ ID NO: 17450 - DNA, 20 bp, Artificial Sequence
  Description of Artificial Sequence: Synthetic oligonucleotide
  Target: LAMA2; (-) strand; PAM type: NNGRRT; PAM sequence: CAGAAT
tcccactcatccttaaatcc

SEQ ID NO: 17451 - DNA, 20 bp, Artificial Sequence
  Description of Artificial Sequence: Synthetic oligonucleotide
  Target: LAMA2; (-) strand; PAM type: NNGRRT; PAM sequence: GAGAAT
ctatggtcctgctacacttg

SEQ ID NO: 17452 - DNA, 20 bp, Artificial Sequence
  Description of Artificial Sequence: Synthetic oligonucleotide
  Target: LAMA2; (-) strand; PAM type: NNGRRT; PAM sequence: TTGGAT
cctttgttcatacatgggca

SEQ ID NO: 17453 - DNA, 20 bp, Artificial Sequence
  Description of Artificial Sequence: Synthetic oligonucleotide
  Target: LAMA2; (-) strand; PAM type: NNGRRT; PAM sequence: GTGGAT
cgaggaaaatatggtcaaat

SEQ ID NO: 17454 - DNA, 20 bp, Artificial Sequence
  Description of Artificial Sequence: Synthetic oligonucleotide
  Target: LAMA2; (-) strand; PAM type: NNGRRT; PAM sequence: CAGAAT
taatctcagaaagataaaag

SEQ ID NO: 17455 - DNA, 20 bp, Artificial Sequence
  Description of Artificial Sequence: Synthetic oligonucleotide
  Target: LAMA2; (-) strand; PAM type: NNGRRT; PAM sequence: AAGAAT
ttgaaaaaaaaaaaaaaaga

SEQ ID NO: 17456 - DNA, 20 bp, Artificial Sequence
  Description of Artificial Sequence: Synthetic oligonucleotide
  Target: LAMA2; (-) strand; PAM type: NNGRRT; PAM sequence: AAGGAT
gcttgggggtgcggaggtgg

SEQ ID NO: 17457 - DNA, 20 bp, Artificial Sequence
  Description of Artificial Sequence: Synthetic oligonucleotide
  Target: LAMA2; (-) strand; PAM type: NNGRRT; PAM sequence: GGGGGT
gcctgtagtcccagctgctt

SEQ ID NO: 17458 - DNA, 20 bp, Artificial Sequence
  Description of Artificial Sequence: Synthetic oligonucleotide
  Target: LAMA2; (-) strand; PAM type: NNGRRT; PAM sequence: AGGAGT
gcagaaggatcacttggccc

SEQ ID NO: 17459 - DNA, 20 bp, Artificial Sequence
  Description of Artificial Sequence: Synthetic oligonucleotide
  Target: LAMA2; (-) strand; PAM type: NNGRRT; PAM sequence: AAGGAT
actttgaaaggctgaggcag

SEQ ID NO: 17460 - DNA, 20 bp, Artificial Sequence
  Description of Artificial Sequence: Synthetic oligonucleotide
  Target: LAMA2; (-) strand; PAM type: NNGRRT; PAM sequence: TTGGGT
tctcaaaaaaaaagaaaagt

SEQ ID NO: 17461 - DNA, 20 bp, Artificial Sequence
  Description of Artificial Sequence: Synthetic oligonucleotide
  Target: LAMA2; (-) strand; PAM type: NNGRRT; PAM sequence: AAGAAT
tcgtaagtacaatctagttt

SEQ ID NO: 17462 - DNA, 20 bp, Artificial Sequence
  Description of Artificial Sequence: Synthetic oligonucleotide
  Target: LAMA2; (-) strand; PAM type: NNGRRT; PAM sequence: ATGAAT
tgaaagcactgttgaaggta

SEQ ID NO: 17463 - DNA, 20 bp, Artificial Sequence
  Description of Artificial Sequence: Synthetic oligonucleotide
  Target: LAMA2; (-) strand; PAM type: NNGRRT; PAM sequence: ATGAAT
ggctccaacctagggagaga

SEQ ID NO: 17464 - DNA, 20 bp, Artificial Sequence
  Description of Artificial Sequence: Synthetic oligonucleotide
  Target: LAMA2; (-) strand; PAM type: NNGRRT; PAM sequence: GAGAAT
caatggctccaacctaggga

SEQ ID NO: 17465 - DNA, 20 bp, Artificial Sequence
  Description of Artificial Sequence: Synthetic oligonucleotide
  Target: LAMA2; (-) strand; PAM type: NNGRRT; PAM sequence: TGGAGT
tagctagaatgtatatattt

SEQ ID NO: 17466 - DNA, 20 bp, Artificial Sequence
  Description of Artificial Sequence: Synthetic oligonucleotide
  Target: LAMA2; (-) strand; PAM type: NNGRRT; PAM sequence: TAGAAT
tagtgctgaaagtacttagc

SEQ ID NO: 17467 - DNA, 20 bp, Artificial Sequence
  Description of Artificial Sequence: Synthetic oligonucleotide
  Target: LAMA2; (-) strand; PAM type: NNGRRT; PAM sequence: TGGAAT
ttctcttatacaataaatca

SEQ ID NO: 17468 - DNA, 20 bp, Artificial Sequence
  Description of Artificial Sequence: Synthetic oligonucleotide
  Target: LAMA2; (-) strand; PAM type: NNGRRT; PAM sequence: CAGGGT
catcagtgaaggtggatatc

SEQ ID NO: 17469 - DNA, 20 bp, Artificial Sequence
  Description of Artificial Sequence: Synthetic oligonucleotide
  Target: LAMA2; (-) strand; PAM type: NNGRRT; PAM sequence: GTGGAT
agttaaactcatcagtgaag

SEQ ID NO: 17470 - DNA, 20 bp, Artificial Sequence
  Description of Artificial Sequence: Synthetic oligonucleotide
  Target: LAMA2; (-) strand; PAM type: NNGRRT; PAM sequence: ATGAGT
catttggttaacaggtaaga

SEQ ID NO: 17471 - DNA, 20 bp, Artificial Sequence
  Description of Artificial Sequence: Synthetic oligonucleotide
  Target: LAMA2; (-) strand; PAM type: NNGRRT; PAM sequence: AAGAAT
aaagcatttggttaacaggt

SEQ ID NO: 17472 - DNA, 20 bp, Artificial Sequence
  Description of Artificial Sequence: Synthetic oligonucleotide
  Target: LAMA2; (-) strand; PAM type: NNGRRT; PAM sequence: AAGGAT
tcagaaaaaaaaatttctga

SEQ ID NO: 17473 - DNA, 20 bp, Artificial Sequence
  Description of Artificial Sequence: Synthetic oligonucleotide
  Target: LAMA2; (-) strand; PAM type: NNGRRT; PAM sequence: CAGAGT
aggtacttttgcttaaggca

SEQ ID NO: 17474 - DNA, 20 bp, Artificial Sequence
  Description of Artificial Sequence: Synthetic oligonucleotide
  Target: LAMA2; (-) strand; PAM type: NNGRRT; PAM sequence: GCGAAT
gaatcgcttgaacccgggag

SEQ ID NO: 17475 - DNA, 20 bp, Artificial Sequence
  Description of Artificial Sequence: Synthetic oligonucleotide
  Target: LAMA2; (-) strand; PAM type: NNGRRT; PAM sequence: GTGAAT
tactcaggaggctgaggcaa

SEQ ID NO: 17476 - DNA, 20 bp, Artificial Sequence
  Description of Artificial Sequence: Synthetic oligonucleotide
  Target: LAMA2; (-) strand; PAM type: NNGRRT; PAM sequence: AAGAGT
ggcatgcagatcatgaggtc

SEQ ID NO: 17477 - DNA, 20 bp, Artificial Sequence
  Description of Artificial Sequence: Synthetic oligonucleotide
  Target: LAMA2; (-) strand; PAM type: NNGRRT; PAM sequence: ATGAGT
tgatacttgccattaggttg

SEQ ID NO: 17478 - DNA, 20 bp, Artificial Sequence
  Description of Artificial Sequence: Synthetic oligonucleotide
  Target: LAMA2; (-) strand; PAM type: NNGRRT; PAM sequence: AAGAGT
tagctcttactaattcttcc

SEQ ID NO: 17479 - DNA, 20 bp, Artificial Sequence
  Description of Artificial Sequence: Synthetic oligonucleotide
  Target: LAMA2; (-) strand; PAM type: NNGRRT; PAM sequence: CCGAAT
ttctcaaccttctgtcttac

SEQ ID NO: 17480 - DNA, 20 bp, Artificial Sequence
  Description of Artificial Sequence: Synthetic oligonucleotide
  Target: LAMA2; (-) strand; PAM type: NNGRRT; PAM sequence: ATGAGT
caagtggcaaacatcattta

SEQ ID NO: 17481 - DNA, 20 bp, Artificial Sequence
  Description of Artificial Sequence: Synthetic oligonucleotide
  Target: LAMA2; (-) strand; PAM type: NNGRRT; PAM sequence: CAGAAT
acttactatctaagccttta

SEQ ID NO: 17482 - DNA, 20 bp, Artificial Sequence
  Description of Artificial Sequence: Synthetic oligonucleotide
  Target: LAMA2; (-) strand; PAM type: NNGRRT; PAM sequence: TTGAGT
tctcccttacaacagcagag

SEQ ID NO: 17483 - DNA, 20 bp, Artificial Sequence
  Description of Artificial Sequence: Synthetic oligonucleotide
  Target: LAMA2; (-) strand; PAM type: NNGRRT; PAM sequence: CAGAGT
ctgcttctcccttacaacag

SEQ ID NO: 17484 - DNA, 20 bp, Artificial Sequence
  Description of Artificial Sequence: Synthetic oligonucleotide
  Target: LAMA2; (-) strand; PAM type: NNGRRT; PAM sequence: GAGGAT
gggaaataaggcagcaacat

SEQ ID NO: 17485 - DNA, 20 bp, Artificial Sequence
  Description of Artificial Sequence: Synthetic oligonucleotide
  Target: LAMA2; (-) strand; PAM type: NNGRRT; PAM sequence: GTGAGT
atagtttgttcttgcaagag

SEQ ID NO: 17486 - DNA, 20 bp, Artificial Sequence
  Description of Artificial Sequence: Synthetic oligonucleotide
  Target: LAMA2; (-) strand; PAM type: NNGRRT; PAM sequence: CAGAGT
aactcaatactttgcaacta

SEQ ID NO: 17487 - DNA, 20 bp, Artificial Sequence
  Description of Artificial Sequence: Synthetic oligonucleotide
  Target: LAMA2; (-) strand; PAM type: NNGRRT; PAM sequence: CTGGGT
ccttagtctgttaagctttg

SEQ ID NO: 17488 - DNA, 20 bp, Artificial Sequence
  Description of Artificial Sequence: Synthetic oligonucleotide
  Target: LAMA2; (-) strand; PAM type: NNGRRT; PAM sequence: CTGGAT
attactcaaagaaattagca

SEQ ID NO: 17489 - DNA, 20 bp, Artificial Sequence
  Description of Artificial Sequence: Synthetic oligonucleotide
  Target: LAMA2; (-) strand; PAM type: NNGRRT; PAM sequence: ATGAAT
ttttgacaagaactttataa

SEQ ID NO: 17490 - DNA, 20 bp, Artificial Sequence
  Description of Artificial Sequence: Synthetic oligonucleotide
  Target: LAMA2; (-) strand; PAM type: NNGRRT; PAM sequence: TGGGGT
gtttgcaaccactaagattt

SEQ ID NO: 17491 - DNA, 20 bp, Artificial Sequence
  Description of Artificial Sequence: Synthetic oligonucleotide
  Target: LAMA2; (-) strand; PAM type: NNGRRT; PAM sequence: GTGAGT
gactatgatgaacctgtatt

SEQ ID NO: 17492 - DNA, 20 bp, Artificial Sequence
  Description of Artificial Sequence: Synthetic oligonucleotide
  Target: LAMA2; (-) strand; PAM type: NNGRRT; PAM sequence: GAGAGT
gtgtgtgtgatattgatata

SEQ ID NO: 17493 - DNA, 20 bp, Artificial Sequence
  Description of Artificial Sequence: Synthetic oligonucleotide
  Target: LAMA2; (-) strand; PAM type: NNGRRT; PAM sequence: GTGAAT
aagagaacctcttgccttct

SEQ ID NO: 17494 - DNA, 20 bp, Artificial Sequence
  Description of Artificial Sequence: Synthetic oligonucleotide
  Target: LAMA2; (-) strand; PAM type: NNGRRT; PAM sequence: TAGAAT
agtctttgtggaggaaatat

SEQ ID NO: 17495 - DNA, 20 bp, Artificial Sequence
  Description of Artificial Sequence: Synthetic oligonucleotide
  Target: LAMA2; (-) strand; PAM type: NNGRRT; PAM sequence: AAGGAT
caattacaattgtaactgga

SEQ ID NO: 17496 - DNA, 20 bp, Artificial Sequence
  Description of Artificial Sequence: Synthetic oligonucleotide
  Target: LAMA2; (-) strand; PAM type: NNGRRT; PAM sequence: AAGAGT
ccaagtagaaaaatatggga

SEQ ID NO: 17497 - DNA, 20 bp, Artificial Sequence
  Description of Artificial Sequence: Synthetic oligonucleotide
  Target: LAMA2; (-) strand; PAM type: NNGRRT; PAM sequence: TAGAAT
gacttaggcatctagatgat

SEQ ID NO: 17498 - DNA, 20 bp, Artificial Sequence
  Description of Artificial Sequence: Synthetic oligonucleotide
  Target: LAMA2; (-) strand; PAM type: NNGRRT; PAM sequence: AGGGAT
gtgaggaacagaaagaatga

SEQ ID NO: 17499 - DNA, 20 bp, Artificial Sequence
  Description of Artificial Sequence: Synthetic oligonucleotide
  Target: LAMA2; (-) strand; PAM type: NNGRRT; PAM sequence: AAGAAT
gtgtgactgtgaggaacaga

SEQ ID NO: 17500 - DNA, 20 bp, Artificial Sequence
  Description of Artificial Sequence: Synthetic oligonucleotide
  Target: LAMA2; (-) strand; PAM type: NNGRRT; PAM sequence: CTGAGT
gatagtcgagaaatcattat

SEQ ID NO: 17501 - DNA, 20 bp, Artificial Sequence
  Description of Artificial Sequence: Synthetic oligonucleotide
  Target: LAMA2; (-) strand; PAM type: NNGRRT; PAM sequence: TAGGAT
aaaatagcctgatcttaaaa

SEQ ID NO: 17502 - DNA, 20 bp, Artificial Sequence
  Description of Artificial Sequence: Synthetic oligonucleotide
  Target: LAMA2; (-) strand; PAM type: NNGRRT; PAM sequence: CTGGGT
tcaggagtttcacgtttatc

SEQ ID NO: 17503 - DNA, 20 bp, Artificial Sequence
  Description of Artificial Sequence: Synthetic oligonucleotide
  Target: LAMA2; (-) strand; PAM type: NNGRRT; PAM sequence: AGGAGT
aggaagtagatccaactctc

SEQ ID NO: 17504 - DNA, 20 bp, Artificial Sequence
  Description of Artificial Sequence: Synthetic oligonucleotide
  Target: LAMA2; (-) strand; PAM type: NNGRRT; PAM sequence: AAGGGT
tggaggctagaagtgcaggc

SEQ ID NO: 17505 - DNA, 20 bp, Artificial Sequence
  Description of Artificial Sequence: Synthetic oligonucleotide
  Target: LAMA2; (-) strand; PAM type: NNGRRT; PAM sequence: GAGAGT
atgatgtgtgaaagagtttt

SEQ ID NO: 17506 - DNA, 20 bp, Artificial Sequence
  Description of Artificial Sequence: Synthetic oligonucleotide
  Target: LAMA2; (-) strand; PAM type: NNGRRT; PAM sequence: AAGAGT
caggttcaaatgatgtgtga

SEQ ID NO: 17507 - DNA, 20 bp, Artificial Sequence
  Description of Artificial Sequence: Synthetic oligonucleotide
  Target: LAMA2; (-) strand; PAM type: NNGRRT; PAM sequence: TGGGAT
gccttggcctcccaaagtgc

SEQ ID NO: 17508 - DNA, 20 bp, Artificial Sequence
  Description of Artificial Sequence: Synthetic oligonucleotide
  Target: LAMA2; (-) strand; PAM type: NNGRRT; PAM sequence: TGGGGT
ttttttttttttggtagaga

SEQ ID NO: 17509 - DNA, 20 bp, Artificial Sequence
  Description of Artificial Sequence: Synthetic oligonucleotide
  Target: LAMA2; (-) strand; PAM type: NNGRRT; PAM sequence: CTGAGT
gatcctcccacctcagcctc

SEQ ID NO: 17510 - DNA, 20 bp, Artificial Sequence
  Description of Artificial Sequence: Synthetic oligonucleotide
  Target: LAMA2; (-) strand; PAM type: NNGRRT; PAM sequence: AGGGAT
gccttgaacttctgaactca

SEQ ID NO: 17511 - DNA, 20 bp, Artificial Sequence
  Description of Artificial Sequence: Synthetic oligonucleotide
  Target: LAMA2; (-) strand; PAM type: NNGRRT; PAM sequence: TGGAGT
tctggctctgtcacctatgc

SEQ ID NO: 17512 - DNA, 20 bp, Artificial Sequence
  Description of Artificial Sequence: Synthetic oligonucleotide
  Target: LAMA2; (-) strand; PAM type: NNGRRT; PAM sequence: AAGAGT
tgtctgctgaaagcagtaag

SEQ ID NO: 17513 - DNA, 20 bp, Artificial Sequence
  Description of Artificial Sequence: Synthetic oligonucleotide
  Target: LAMA2; (-) strand; PAM type: NNGRRT; PAM sequence: TTGAAT
aacgacctgggacctgtggg

SEQ ID NO: 17514 - DNA, 20 bp, Artificial Sequence
  Description of Artificial Sequence: Synthetic oligonucleotide
  Target: LAMA2; (-) strand; PAM type: NNGRRT; PAM sequence: GTGGGT
gagtcaacgacctgggacct

SEQ ID NO: 17515 - DNA, 20 bp, Artificial Sequence
  Description of Artificial Sequence: Synthetic oligonucleotide
  Target: LAMA2; (-) strand; PAM type: NNGRRT; PAM sequence: ATGAGT
ctagcaattaagagatgaga

SEQ ID NO: 17516 - DNA, 20 bp, Artificial Sequence
  Description of Artificial Sequence: Synthetic oligonucleotide
  Target: LAMA2; (-) strand; PAM type: NNGRRT; PAM sequence: GAGAAT
ctggctagcaattaagagat

SEQ ID NO: 17517 - DNA, 20 bp, Artificial Sequence
  Description of Artificial Sequence: Synthetic oligonucleotide
  Target: LAMA2; (-) strand; PAM type: NNGRRT; PAM sequence: CTGAGT
cagagaggttgggtgcctaa

SEQ ID NO: 17518 - DNA, 20 bp, Artificial Sequence
  Description of Artificial Sequence: Synthetic oligonucleotide
  Target: LAMA2; (-) strand; PAM type: NNGRRT; PAM sequence: TTGGGT
gtgctatgagagcagagagg

SEQ ID NO: 17519 - DNA, 20 bp, Artificial Sequence
  Description of Artificial Sequence: Synthetic oligonucleotide
  Target: LAMA2; (-) strand; PAM type: NNGRRT; PAM sequence: GTGGGT
tatttctatgagttaggaat

SEQ ID NO: 17520 - DNA, 20 bp, Artificial Sequence
  Description of Artificial Sequence: Synthetic oligonucleotide
  Target: LAMA2; (-) strand; PAM type: NNGRRT; PAM sequence: AGGAAT
aacagttatttctatgagtt

SEQ ID NO: 17521 - DNA, 20 bp, Artificial Sequence
  Description of Artificial Sequence: Synthetic oligonucleotide
  Target: LAMA2; (-) strand; PAM type: NNGRRT; PAM sequence: ATGAGT
aaatgtcaacagttatttct

SEQ ID NO: 17522 - DNA, 20 bp, Artificial Sequence
  Description of Artificial Sequence: Synthetic oligonucleotide
  Target: LAMA2; (-) strand; PAM type: NNGRRT; PAM sequence: TAGGAT
ctctaagacaggcagaaaag

SEQ ID NO: 17523 - DNA, 20 bp, Artificial Sequence
  Description of Artificial Sequence: Synthetic oligonucleotide
  Target: LAMA2; (-) strand; PAM type: NNGRRT; PAM sequence: ATGGGT
taatgctaaatgacgagtta

SEQ ID NO: 17524 - DNA, 20 bp, Artificial Sequence
  Description of Artificial Sequence: Synthetic oligonucleotide
  Target: LAMA2; (-) strand; PAM type: NNGRRT; PAM sequence: ACGAGT
gatatacctaatgctaaatg

SEQ ID NO: 17525 - DNA, 20 bp, Artificial Sequence
  Description of Artificial Sequence: Synthetic oligonucleotide
  Target: LAMA2; (-) strand; PAM type: NNGRRT; PAM sequence: AGGGAT
gtggggtggggggagggggg

SEQ ID NO: 17526 - DNA, 20 bp, Artificial Sequence
  Description of Artificial Sequence: Synthetic oligonucleotide
  Target: LAMA2; (-) strand; PAM type: NNGRRT; PAM sequence: TGGGGT
ctctggggactgttgtgggg

SEQ ID NO: 17527 - DNA, 20 bp, Artificial Sequence
  Description of Artificial Sequence: Synthetic oligonucleotide
  Target: LAMA2; (-) strand; PAM type: NNGRRT; PAM sequence: TGGGGT
tcacactctggggactgttg

SEQ ID NO: 17528 - DNA, 20 bp, Artificial Sequence
  Description of Artificial Sequence: Synthetic oligonucleotide
  Target: LAMA2; (-) strand; PAM type: NNGRRT; PAM sequence: GGGAAT
gcatgttctcactcataggt

SEQ ID NO: 17529 - DNA, 20 bp, Artificial Sequence
  Description of Artificial Sequence: Synthetic oligonucleotide
  Target: LAMA2; (-) strand; PAM type: NNGRRT; PAM sequence: ATGAGT
tatgcagccataaaaaaatg

SEQ ID NO: 17530 - DNA, 20 bp, Artificial Sequence
  Description of Artificial Sequence: Synthetic oligonucleotide
  Target: LAMA2; (-) strand; PAM type: NNGRRT; PAM sequence: TGGAAT
aatgtggcacatatacacca

SEQ ID NO: 17531 - DNA, 20 bp, Artificial Sequence
  Description of Artificial Sequence: Synthetic oligonucleotide
  Target: LAMA2; (-) strand; PAM type: NNGRRT; PAM sequence: CTGGAT
aaatgtacaacaatgataga

SEQ ID NO: 17532 - DNA, 20 bp, Artificial Sequence
  Description of Artificial Sequence: Synthetic oligonucleotide
  Target: LAMA2; (-) strand; PAM type: NNGRRT; PAM sequence: CTGGGT
ttgacccagccatcccatta

SEQ ID NO: 17533 - DNA, 20 bp, Artificial Sequence
  Description of Artificial Sequence: Synthetic oligonucleotide
  Target: LAMA2; (-) strand; PAM type: NNGRRT; PAM sequence: AGGGAT
agtcagtgtggcgattcctc

SEQ ID NO: 17534 - DNA, 20 bp, Artificial Sequence
  Description of Artificial Sequence: Synthetic oligonucleotide
  Target: LAMA2; (-) strand; PAM type: NNGRRT; PAM sequence: GAGGAT
aggaaacaacaggggctgga

SEQ ID NO: 17535 - DNA, 20 bp, Artificial Sequence
  Description of Artificial Sequence: Synthetic oligonucleotide
  Target: LAMA2; (-) strand; PAM type: NNGRRT; PAM sequence: TAGAAT
agataccatctcacaccagt

SEQ ID NO: 17536 - DNA, 20 bp, Artificial Sequence
  Description of Artificial Sequence: Synthetic oligonucleotide
  Target: LAMA2; (-) strand; PAM type: NNGRRT; PAM sequence: GTGAAT
aaattcagagttgggaacat

SEQ ID NO: 17537 - DNA, 20 bp, Artificial Sequence
  Description of Artificial Sequence: Synthetic oligonucleotide
  Target: LAMA2; (-) strand; PAM type: NNGRRT; PAM sequence: CAGAGT
acatgaatttactagaaatt

SEQ ID NO: 17538 - DNA, 20 bp, Artificial Sequence
  Description of Artificial Sequence: Synthetic oligonucleotide
  Target: LAMA2; (-) strand; PAM type: NNGRRT; PAM sequence: ATGAAT
ctttcattctctggaaaaac

SEQ ID NO: 17539 - DNA, 20 bp, Artificial Sequence
  Description of Artificial Sequence: Synthetic oligonucleotide
  Target: LAMA2; (-) strand; PAM type: NNGRRT; PAM sequence: TAGAAT
acactgcctgactatgcatc

SEQ ID NO: 17540 - DNA, 20 bp, Artificial Sequence
  Description of Artificial Sequence: Synthetic oligonucleotide
  Target: LAMA2; (-) strand; PAM type: NNGRRT; PAM sequence: GTGAAT
tagcactgggggatacaatg

SEQ ID NO: 17541 - DNA, 20 bp, Artificial Sequence
  Description of Artificial Sequence: Synthetic oligonucleotide
  Target: LAMA2; (-) strand; PAM type: NNGRRT; PAM sequence: GGGGAT
ctttttgtgtattagcactg

SEQ ID NO: 17542 - DNA, 20 bp, Artificial Sequence
  Description of Artificial Sequence: Synthetic oligonucleotide
  Target: LAMA2; (-) strand; PAM type: NNGRRT; PAM sequence: TAGAAT
acactgcgaaaggtaggtag

SEQ ID NO: 17543 - DNA, 20 bp, Artificial Sequence
  Description of Artificial Sequence: Synthetic oligonucleotide
  Target: LAMA2; (-) strand; PAM type: NNGRRT; PAM sequence: AAGGAT
agggaaagggtgaaatttgc

SEQ ID NO: 17544 - DNA, 20 bp, Artificial Sequence
  Description of Artificial Sequence: Synthetic oligonucleotide
  Target: LAMA2; (-) strand; PAM type: NNGRRT; PAM sequence: AAGGGT
gaatgactgaaaggaaggga

SEQ ID NO: 17545 - DNA, 20 bp, Artificial Sequence
  Description of Artificial Sequence: Synthetic oligonucleotide
  Target: LAMA2; (-) strand; PAM type: NNGRRT; PAM sequence: AAGAAT
tctatggagcatggggaaac

SEQ ID NO: 17546 - DNA, 20 bp, Artificial Sequence
  Description of Artificial Sequence: Synthetic oligonucleotide
  Target: LAMA2; (-) strand; PAM type: NNGRRT; PAM sequence: CTGAAT
atgagattttgctagtagtt

SEQ ID NO: 17547 - DNA, 20 bp, Artificial Sequence
  Description of Artificial Sequence: Synthetic oligonucleotide
  Target: LAMA2; (-) strand; PAM type: NNGRRT; PAM sequence: ATGGGT
gactatagcacagcaagaat

SEQ ID NO: 17548 - DNA, 20 bp, Artificial Sequence
  Description of Artificial Sequence: Synthetic oligonucleotide
  Target: LAMA2; (-) strand; PAM type: NNGRRT; PAM sequence: AAGAAT
catattgactatagcacagc

SEQ ID NO: 17549 - DNA, 20 bp, Artificial Sequence
  Description of Artificial Sequence: Synthetic oligonucleotide
  Target: LAMA2; (-) strand; PAM type: NNGRRT; PAM sequence: AAGAGT
aatgaatgaggaggcctcag

SEQ ID NO: 17550 - DNA, 20 bp, Artificial Sequence
  Description of Artificial Sequence: Synthetic oligonucleotide
  Target: LAMA2; (-) strand; PAM type: NNGRRT; PAM sequence: ATGAAT
taagtttgcaaacatctgca

SEQ ID NO: 17551 - DNA, 20 bp, Artificial Sequence
  Description of Artificial Sequence: Synthetic oligonucleotide
  Target: LAMA2; (-) strand; PAM type: NNGRRT; PAM sequence: ACGAAT
atcttcctatttaagtacat

SEQ ID NO: 17552 - DNA, 20 bp, Artificial Sequence
  Description of Artificial Sequence: Synthetic oligonucleotide
  Target: LAMA2; (-) strand; PAM type: NNGRRT; PAM sequence: GTGGAT
gtagctaagggagttcacat

SEQ ID NO: 17553 - DNA, 20 bp, Artificial Sequence
  Description of Artificial Sequence: Synthetic oligonucleotide
  Target: LAMA2; (-) strand; PAM type: NNGRRT; PAM sequence: GGGAGT
gagaaaagaacagtagctaa

SEQ ID NO: 17554 - DNA, 20 bp, Artificial Sequence
  Description of Artificial Sequence: Synthetic oligonucleotide
  Target: LAMA2; (-) strand; PAM type: NNGRRT; PAM sequence: CGGAGT
tccctcaggaaaactgagga

SEQ ID NO: 17555 - DNA, 20 bp, Artificial Sequence
  Description of Artificial Sequence: Synthetic oligonucleotide
  Target: LAMA2; (-) strand; PAM type: NNGRRT; PAM sequence: TGGAAT
tgattcccagggtggataca

SEQ ID NO: 17556 - DNA, 20 bp, Artificial Sequence
  Description of Artificial Sequence: Synthetic oligonucleotide
  Target: LAMA2; (-) strand; PAM type: NNGRRT; PAM sequence: GTGGAT
gcagtgaagtgattcccagg

SEQ ID NO: 17557 - DNA, 20 bp, Artificial Sequence
  Description of Artificial Sequence: Synthetic oligonucleotide
  Target: LAMA2; (-) strand; PAM type: NNGRRT; PAM sequence: CAGGGT
caacgcagtgaagtgattcc

SEQ ID NO: 17558 - DNA, 20 bp, Artificial Sequence
  Description of Artificial Sequence: Synthetic oligonucleotide
  Target: LAMA2; (-) strand; PAM type: NNGRRT; PAM sequence: ATGAAT
tagtaaattgtgaaatattc

SEQ ID NO: 17559 - DNA, 20 bp, Artificial Sequence
  Description of Artificial Sequence: Synthetic oligonucleotide
  Target: LAMA2; (-) strand; PAM type: NNGRRT; PAM sequence: AGGAAT
tgtattatgatttatatcaa

SEQ ID NO: 17560 - DNA, 20 bp, Artificial Sequence
  Description of Artificial Sequence: Synthetic oligonucleotide
  Target: LAMA2; (-) strand; PAM type: NNGRRT; PAM sequence: AAGAGT
agaataagacagtctatgaa

SEQ ID NO: 17561 - DNA, 20 bp, Artificial Sequence
  Description of Artificial Sequence: Synthetic oligonucleotide
  Target: LAMA2; (-) strand; PAM type: NNGRRT; PAM sequence: AAGAAT
atcatgggcataaatctaaa

SEQ ID NO: 17562 - DNA, 20 bp, Artificial Sequence
  Description of Artificial Sequence: Synthetic oligonucleotide
  Target: LAMA2; (-) strand; PAM type: NNGRRT; PAM sequence: CTGAAT
cctgaattttgccataagca

SEQ ID NO: 17563 - DNA, 20 bp, Artificial Sequence
  Description of Artificial Sequence: Synthetic oligonucleotide
  Target: LAMA2; (-) strand; PAM type: NNGRRT; PAM sequence: CTGAAT
ctgccccaacatcaaaagac

SEQ ID NO: 17564 - DNA, 20 bp, Artificial Sequence
  Description of Artificial Sequence: Synthetic oligonucleotide
  Target: LAMA2; (-) strand; PAM type: NNGRRT; PAM sequence: CTGGAT
gtgtcattttcttgacattt

SEQ ID NO: 17565 - DNA, 20 bp, Artificial Sequence
  Description of Artificial Sequence: Synthetic oligonucleotide
  Target: LAMA2; (-) strand; PAM type: NNGRRT; PAM sequence: CTGAAT
atttttaagcaggctctaaa

SEQ ID NO: 17566 - DNA, 20 bp, Artificial Sequence
  Description of Artificial Sequence: Synthetic oligonucleotide
  Target: LAMA2; (-) strand; PAM type: NNGRRT; PAM sequence: GAGGGT
gaagcaagtaatgtgtactt

SEQ ID NO: 17567 - DNA, 20 bp, Artificial Sequence
  Description of Artificial Sequence: Synthetic oligonucleotide
  Target: LAMA2; (-) strand; PAM type: NNGRRT; PAM sequence: ATGGGT
atgaaaaaaaaaattagttg

SEQ ID NO: 17568 - DNA, 20 bp, Artificial Sequence
  Description of Artificial Sequence: Synthetic oligonucleotide
  Target: LAMA2; (-) strand; PAM type: NNGRRT; PAM sequence: TAGGGT
tgggaaaggagaacagttgg

SEQ ID NO: 17569 - DNA, 20 bp, Artificial Sequence
  Description of Artificial Sequence: Synthetic oligonucleotide
  Target: LAMA2; (-) strand; PAM type: NNGRRT; PAM sequence: AAGAAT
actgagattatgattttaaa

SEQ ID NO: 17570 - DNA, 20 bp, Artificial Sequence
  Description of Artificial Sequence: Synthetic oligonucleotide
  Target: LAMA2; (-) strand; PAM type: NNGRRT; PAM sequence: TGGGAT
aatagcttgtcaatatttga

SEQ ID NO: 17571 - DNA, 20 bp, Artificial Sequence
  Description of Artificial Sequence: Synthetic oligonucleotide
  Target: LAMA2; (-) strand; PAM type: NNGRRT; PAM sequence: AAGAAT
ttctagccaatatatagtaa

SEQ ID NO: 17572 - DNA, 20 bp, Artificial Sequence
  Description of Artificial Sequence: Synthetic oligonucleotide
  Target: LAMA2; (-) strand; PAM type: NNGRRT; PAM sequence: AAGAGT
aattctacctgtaggtaaat

SEQ ID NO: 17573 - DNA, 20 bp, Artificial Sequence
  Description of Artificial Sequence: Synthetic oligonucleotide
  Target: LAMA2; (-) strand; PAM type: NNGRRT; PAM sequence: TTGAAT
tatttgatctgctttcctgt

SEQ ID NO: 17574 - DNA, 20 bp, Artificial Sequence
  Description of Artificial Sequence: Synthetic oligonucleotide
  Target: LAMA2; (-) strand; PAM type: NNGRRT; PAM sequence: AAGAAT
aaaactgggaaataaaaaga

SEQ ID NO: 17575 - DNA, 20 bp, Artificial Sequence
  Description of Artificial Sequence: Synthetic oligonucleotide
  Target: LAMA2; (-) strand; PAM type: NNGRRT; PAM sequence: AAGGAT
aagcaaactggttatcatta

SEQ ID NO: 17576 - DNA, 20 bp, Artificial Sequence
  Description of Artificial Sequence: Synthetic oligonucleotide
  Target: LAMA2; (-) strand; PAM type: NNGRRT; PAM sequence: ATGAGT
atcaaatatatttaaaatct

SEQ ID NO: 17577 - DNA, 20 bp, Artificial Sequence
  Description of Artificial Sequence: Synthetic oligonucleotide
  Target: LAMA2; (-) strand; PAM type: NNGRRT; PAM sequence: ATGAAT
tgaaaagaatcataactgca

SEQ ID NO: 17578 - DNA, 20 bp, Artificial Sequence
  Description of Artificial Sequence: Synthetic oligonucleotide
  Target: LAMA2; (-) strand; PAM type: NNGRRT; PAM sequence: AAGAAT
gagacaatttgattattgaa

SEQ ID NO: 17579 - DNA, 20 bp, Artificial Sequence
  Description of Artificial Sequence: Synthetic oligonucleotide
  Target: LAMA2; (-) strand; PAM type: NNGRRT; PAM sequence: CTGAGT
atgagaatcattaaggaaaa

SEQ ID NO: 17580 - DNA, 20 bp, Artificial Sequence
  Description of Artificial Sequence: Synthetic oligonucleotide
  Target: LAMA2; (-) strand; PAM type: NNGRRT; PAM sequence: GAGAAT
atcttaacactgaaaagcat

SEQ ID NO: 17581 - DNA, 20 bp, Artificial Sequence
  Description of Artificial Sequence: Synthetic oligonucleotide
  Target: LAMA2; (-) strand; PAM type: NNGRRT; PAM sequence: CAGAAT
atattcctaaatgggcatgt

SEQ ID NO: 17582 - DNA, 20 bp, Artificial Sequence
  Description of Artificial Sequence: Synthetic oligonucleotide
  Target: LAMA2; (-) strand; PAM type: NNGRRT; PAM sequence: ATGAAT
aagatacaaatatgaaatta

SEQ ID NO: 17583 - DNA, 20 bp, Artificial Sequence
  Description of Artificial Sequence: Synthetic oligonucleotide
  Target: LAMA2; (-) strand; PAM type: NNGRRT; PAM sequence: GTGGAT
attaggaatcaaaactttca

SEQ ID NO: 17584 - DNA, 20 bp, Artificial Sequence
  Description of Artificial Sequence: Synthetic oligonucleotide
  Target: LAMA2; (-) strand; PAM type: NNGRRT; PAM sequence: AGGAAT
gatagagcaaataagttatt

SEQ ID NO: 17585 - DNA, 20 bp, Artificial Sequence
  Description of Artificial Sequence: Synthetic oligonucleotide
  Target: LAMA2; (-) strand; PAM type: NNGRRT; PAM sequence: TGGGAT
atttgattgtagatgcctag

SEQ ID NO: 17586 - DNA, 20 bp, Artificial Sequence
  Description of Artificial Sequence: Synthetic oligonucleotide
  Target: LAMA2; (-) strand; PAM type: NNGRRT; PAM sequence: CTGAAT
ggatctagagagtctagtct

SEQ ID NO: 17587 - DNA, 20 bp, Artificial Sequence
  Description of Artificial Sequence: Synthetic oligonucleotide
  Target: LAMA2; (-) strand; PAM type: NNGRRT; PAM sequence: GAGAGT
aaacaggatgaatggatcta

SEQ ID NO: 17588 - DNA, 20 bp, Artificial Sequence
  Description of Artificial Sequence: Synthetic oligonucleotide
  Target: LAMA2; (-) strand; PAM type: NNGRRT; PAM sequence: ATGGAT
tgaggaagaaaacaggatga

SEQ ID NO: 17589 - DNA, 20 bp, Artificial Sequence
  Description of Artificial Sequence: Synthetic oligonucleotide
  Target: LAMA2; (-) strand; PAM type: NNGRRT; PAM sequence: ATGAAT
ttagtgaggaagaaaacagg

SEQ ID NO: 17590 - DNA, 20 bp, Artificial Sequence
  Description of Artificial Sequence: Synthetic oligonucleotide
  Target: LAMA2; (-) strand; PAM type: NNGRRT; PAM sequence: CAGGAT
cacattagtgaggaagaaaa

SEQ ID NO: 17591 - DNA, 20 bp, Artificial Sequence
  Description of Artificial Sequence: Synthetic oligonucleotide
  Target: LAMA2; (-) strand; PAM type: NNGRRT; PAM sequence: CTGGGT
tcctgccactgcactccagc

SEQ ID NO: 17592 - DNA, 20 bp, Artificial Sequence
  Description of Artificial Sequence: Synthetic oligonucleotide
  Target: LAMA2; (-) strand; PAM type: NNGRRT; PAM sequence: AAGAGT
ctcacttgaacctgggaagc

SEQ ID NO: 17593 - DNA, 20 bp, Artificial Sequence
  Description of Artificial Sequence: Synthetic oligonucleotide
  Target: LAMA2; (-) strand; PAM type: NNGRRT; PAM sequence: TTGGAT
agtttgggaggccgaggcgg

SEQ ID NO: 17594 - DNA, 20 bp, Artificial Sequence
  Description of Artificial Sequence: Synthetic oligonucleotide
  Target: LAMA2; (-) strand; PAM type: NNGRRT; PAM sequence: CTGAGT
tatctacttttaccttttga

SEQ ID NO: 17595 - DNA, 20 bp, Artificial Sequence
  Description of Artificial Sequence: Synthetic oligonucleotide
  Target: LAMA2; (-) strand; PAM type: NNGRRT; PAM sequence: AAGAAT
aaatggcattactcccaaag

SEQ ID NO: 17596 - DNA, 20 bp, Artificial Sequence
  Description of Artificial Sequence: Synthetic oligonucleotide
  Target: LAMA2; (-) strand; PAM type: NNGRRT; PAM sequence: TAGGAT
acattctcacatgctgatct

SEQ ID NO: 17597 - DNA, 20 bp, Artificial Sequence
  Description of Artificial Sequence: Synthetic oligonucleotide
  Target: LAMA2; (-) strand; PAM type: NNGRRT; PAM sequence: AAGAAT
acaagtgatcagcaatggtc

SEQ ID NO: 17598 - DNA, 20 bp, Artificial Sequence
  Description of Artificial Sequence: Synthetic oligonucleotide
  Target: LAMA2; (-) strand; PAM type: NNGRRT; PAM sequence: ATGGAT
ggtattctgtcatatgtttc

SEQ ID NO: 17599 - DNA, 20 bp, Artificial Sequence
  Description of Artificial Sequence: Synthetic oligonucleotide
  Target: LAMA2; (-) strand; PAM type: NNGRRT; PAM sequence: CTGAGT
acaaacaaaaaacttacatg

SEQ ID NO: 17600 - DNA, 20 bp, Artificial Sequence
  Description of Artificial Sequence: Synthetic oligonucleotide
  Target: LAMA2; (-) strand; PAM type: NNGRRT; PAM sequence: TTGAAT
ctatttgggaggagaatcac

SEQ ID NO: 17601 - DNA, 20 bp, Artificial Sequence
  Description of Artificial Sequence: Synthetic oligonucleotide
  Target: LAMA2; (-) strand; PAM type: NNGRRT; PAM sequence: GAGAAT
taatcccagctatttgggag

SEQ ID NO: 17602 - DNA, 20 bp, Artificial Sequence
  Description of Artificial Sequence: Synthetic oligonucleotide
  Target: LAMA2; (-) strand; PAM type: NNGRRT; PAM sequence: CCGGAT
aaaattagctgggcctggtg

SEQ ID NO: 17603 - DNA, 20 bp, Artificial Sequence
  Description of Artificial Sequence: Synthetic oligonucleotide
  Target: LAMA2; (-) strand; PAM type: NNGRRT; PAM sequence: AGGAGT
cgagcagattacccgaggtc

SEQ ID NO: 17604 - DNA, 20 bp, Artificial Sequence
  Description of Artificial Sequence: Synthetic oligonucleotide
  Target: LAMA2; (-) strand; PAM type: NNGRRT; PAM sequence: AAGGAT
tgtgttggtttggcattagg

SEQ ID NO: 17605 - DNA, 20 bp, Artificial Sequence
  Description of Artificial Sequence: Synthetic oligonucleotide
  Target: LAMA2; (-) strand; PAM type: NNGRRT; PAM sequence: TTGAAT
tcggattgggcttcctctct

SEQ ID NO: 17606 - DNA, 20 bp, Artificial Sequence
  Description of Artificial Sequence: Synthetic oligonucleotide
  Target: LAMA2; (-) strand; PAM type: NNGRRT; PAM sequence: TCGGAT
tttaattgtccaggtaatgc

SEQ ID NO: 17607 - DNA, 20 bp, Artificial Sequence
  Description of Artificial Sequence: Synthetic oligonucleotide
  Target: LAMA2; (-) strand; PAM type: NNGRRT; PAM sequence: AAGAAT
ttgtgaaagttaaaaaagct

SEQ ID NO: 17608 - DNA, 20 bp, Artificial Sequence
  Description of Artificial Sequence: Synthetic oligonucleotide
  Target: LAMA2; (-) strand; PAM type: NNGRRT; PAM sequence: AAGAAT
aactcaaagttaaaaaagct

SEQ ID NO: 17609 - DNA, 20 bp, Artificial Sequence
  Description of Artificial Sequence: Synthetic oligonucleotide
  Target: LAMA2; (-) strand; PAM type: NNGRRT; PAM sequence: TTGAGT
caattttaggctgaagaaat

SEQ ID NO: 17610 - DNA, 20 bp, Artificial Sequence
  Description of Artificial Sequence: Synthetic oligonucleotide
  Target: LAMA2; (-) strand; PAM type: NNGRRT; PAM sequence: GAGAAT
attcagtatcctattaattt

SEQ ID NO: 17611 - DNA, 20 bp, Artificial Sequence
  Description of Artificial Sequence: Synthetic oligonucleotide
  Target: LAMA2; (-) strand; PAM type: NNGRRT; PAM sequence: AAGAAT
ttccatttaactttccagga

SEQ ID NO: 17612 - DNA, 20 bp, Artificial Sequence
  Description of Artificial Sequence: Synthetic oligonucleotide
  Target: LAMA2; (-) strand; PAM type: NNGRRT; PAM sequence: CAGGAT
accaacattgccattcttta

SEQ ID NO: 17613 - DNA, 20 bp, Artificial Sequence
  Description of Artificial Sequence: Synthetic oligonucleotide
  Target: LAMA2; (-) strand; PAM type: NNGRRT; PAM sequence: CAGAAT
caatatttgtgtttaactta

SEQ ID NO: 17614 - DNA, 20 bp, Artificial Sequence
  Description of Artificial Sequence: Synthetic oligonucleotide
  Target: LAMA2; (-) strand; PAM type: NNGRRT; PAM sequence: AAGGAT
attgtattgttagaactttg

SEQ ID NO: 17615 - DNA, 20 bp, Artificial Sequence
  Description of Artificial Sequence: Synthetic oligonucleotide
  Target: LAMA2; (-) strand; PAM type: NNGRRT; PAM sequence: CAGAAT
aagctaaaactcacttgatt

SEQ ID NO: 17616 - DNA, 20 bp, Artificial Sequence
  Description of Artificial Sequence: Synthetic oligonucleotide
  Target: LAMA2; (-) strand; PAM type: NNGRRT; PAM sequence: TTGAAT
agaaaatgtacatcaagaat

SEQ ID NO: 17617 - DNA, 20 bp, Artificial Sequence
  Description of Artificial Sequence: Synthetic oligonucleotide
  Target: LAMA2; (-) strand; PAM type: NNGRRT; PAM sequence: AAGAAT
ccagctagaaaatgtacatc

SEQ ID NO: 17618 - DNA, 20 bp, Artificial Sequence
  Description of Artificial Sequence: Synthetic oligonucleotide
  Target: LAMA2; (-) strand; PAM type: NNGRRT; PAM sequence: AAGAAT
tataagcaaagcctgatgtg

SEQ ID NO: 17619 - DNA, 20 bp, Artificial Sequence
  Description of Artificial Sequence: Synthetic oligonucleotide
  Target: LAMA2; (-) strand; PAM type: NNGRRT; PAM sequence: CTGAAT
aagcaggtactcactggaca

SEQ ID NO: 17620 - DNA, 20 bp, Artificial Sequence
  Description of Artificial Sequence: Synthetic oligonucleotide
  Target: LAMA2; (-) strand; PAM type: NNGRRT; PAM sequence: GAGGAT
tgaaacctaatctccaatgt

SEQ ID NO: 17621 - DNA, 20 bp, Artificial Sequence
  Description of Artificial Sequence: Synthetic oligonucleotide
  Target: LAMA2; (-) strand; PAM type: NNGRRT; PAM sequence: ATGAAT
taatatgtattttctatgtt

SEQ ID NO: 17622 - DNA, 20 bp, Artificial Sequence
  Description of Artificial Sequence: Synthetic oligonucleotide
  Target: LAMA2; (-) strand; PAM type: NNGRRT; PAM sequence: AAGAAT
ttttaatagtggtcataata

SEQ ID NO: 17623 - DNA, 20 bp, Artificial Sequence
  Description of Artificial Sequence: Synthetic oligonucleotide
  Target: LAMA2; (-) strand; PAM type: NNGRRT; PAM sequence: CAGAAT
taaacaaatagtgtatacaa

SEQ ID NO: 17624 - DNA, 20 bp, Artificial Sequence
  Description of Artificial Sequence: Synthetic oligonucleotide
  Target: LAMA2; (-) strand; PAM type: NNGRRT; PAM sequence: GAGAGT
aaccaatagtaaatacaaaa

SEQ ID NO: 17625 - DNA, 20 bp, Artificial Sequence
  Description of Artificial Sequence: Synthetic oligonucleotide
  Target: LAMA2; (-) strand; PAM type: NNGRRT; PAM sequence: TAGAAT
attgttttattcctgtgagt

SEQ ID NO: 17626 - DNA, 20 bp, Artificial Sequence
  Description of Artificial Sequence: Synthetic oligonucleotide
  Target: LAMA2; (-) strand; PAM type: NNGRRT; PAM sequence: GTGAGT
tttgttattgttttattcct

SEQ ID NO: 17627 - DNA, 20 bp, Artificial Sequence
  Description of Artificial Sequence: Synthetic oligonucleotide
  Target: LAMA2; (-) strand; PAM type: NNGRRT; PAM sequence: GGGAGT
gtgtagcatccattataata

SEQ ID NO: 17628 - DNA, 20 bp, Artificial Sequence
  Description of Artificial Sequence: Synthetic oligonucleotide
  Target: LAMA2; (-) strand; PAM type: NNGRRT; PAM sequence: TGGAAT
aaacactaaagaaacaacag

SEQ ID NO: 17629 - DNA, 20 bp, Artificial Sequence
  Description of Artificial Sequence: Synthetic oligonucleotide
  Target: LAMA2; (-) strand; PAM type: NNGRRT; PAM sequence: TCGAAT
aaattccaagaacttacttt

SEQ ID NO: 17630 - DNA, 20 bp, Artificial Sequence
  Description of Artificial Sequence: Synthetic oligonucleotide
  Target: LAMA2; (-) strand; PAM type: NNGRRT; PAM sequence: CAGGAT
gaataaaataagcttcccag

SEQ ID NO: 17631 - DNA, 20 bp, Artificial Sequence
  Description of Artificial Sequence: Synthetic oligonucleotide
  Target: LAMA2; (-) strand; PAM type: NNGRRT; PAM sequence: GAGAAT
aaaggaggaagcaaatctaa

SEQ ID NO: 17632 - DNA, 20 bp, Artificial Sequence
  Description of Artificial Sequence: Synthetic oligonucleotide
  Target: LAMA2; (-) strand; PAM type: NNGRRT; PAM sequence: TTGAAT
gtttctgcttccataataga

SEQ ID NO: 17633 - DNA, 20 bp, Artificial Sequence
  Description of Artificial Sequence: Synthetic oligonucleotide
  Target: LAMA2; (-) strand; PAM type: NNGRRT; PAM sequence: AAGAAT
atcatctttaatttagtgta

SEQ ID NO: 17634 - DNA, 20 bp, Artificial Sequence
  Description of Artificial Sequence: Synthetic oligonucleotide
  Target: LAMA2; (-) strand; PAM type: NNGRRT; PAM sequence: CAGAAT
aaagaagttagccactatta

SEQ ID NO: 17635 - DNA, 20 bp, Artificial Sequence
  Description of Artificial Sequence: Synthetic oligonucleotide
  Target: LAMA2; (-) strand; PAM type: NNGRRT; PAM sequence: TAGAAT
attctcattttattttgtcc

SEQ ID NO: 17636 - DNA, 20 bp, Artificial Sequence
  Description of Artificial Sequence: Synthetic oligonucleotide
  Target: LAMA2; (-) strand; PAM type: NNGRRT; PAM sequence: TTGAAT
gttttcataaaaattaaaac

SEQ ID NO: 17637 - DNA, 20 bp, Artificial Sequence
  Description of Artificial Sequence: Synthetic oligonucleotide
  Target: LAMA2; (-) strand; PAM type: NNGRRT; PAM sequence: GTGAAT
taaaagaaaattgctggact

SEQ ID NO: 17638 - DNA, 20 bp, Artificial Sequence
  Description of Artificial Sequence: Synthetic oligonucleotide
  Target: LAMA2; (-) strand; PAM type: NNGRRT; PAM sequence: GTGAAT
aaactgaaagagttgcaact

SEQ ID NO: 17639 - DNA, 20 bp, Artificial Sequence
  Description of Artificial Sequence: Synthetic oligonucleotide
  Target: LAMA2; (-) strand; PAM type: NNGRRT; PAM sequence: AAGAGT
tcacaaatgtctgaaactga

SEQ ID NO: 17640 - DNA, 20 bp, Artificial Sequence
  Description of Artificial Sequence: Synthetic oligonucleotide
  Target: LAMA2; (-) strand; PAM type: NNGRRT; PAM sequence: ACGAAT
ccaatgactagagtcagagc

SEQ ID NO: 17641 - DNA, 20 bp, Artificial Sequence
  Description of Artificial Sequence: Synthetic oligonucleotide
  Target: LAMA2; (-) strand; PAM type: NNGRRT; PAM sequence: TAGAGT
gctcactggccgccaatgac

SEQ ID NO: 17642 - DNA, 20 bp, Artificial Sequence
  Description of Artificial Sequence: Synthetic oligonucleotide
  Target: LAMA2; (-) strand; PAM type: NNGRRT; PAM sequence: CTGGGT
accacattgtgaagttgata

SEQ ID NO: 17643 - DNA, 20 bp, Artificial Sequence
  Description of Artificial Sequence: Synthetic oligonucleotide
  Target: LAMA2; (-) strand; PAM type: NNGRRT; PAM sequence: TTGGGT
attagccatttaactacttt

SEQ ID NO: 17644 - DNA, 20 bp, Artificial Sequence
  Description of Artificial Sequence: Synthetic oligonucleotide
  Target: LAMA2; (-) strand; PAM type: NNGRRT; PAM sequence: AAGGAT
ccaaaaacataaaaactgta

SEQ ID NO: 17645 - DNA, 20 bp, Artificial Sequence
  Description of Artificial Sequence: Synthetic oligonucleotide
  Target: LAMA2; (-) strand; PAM type: NNGRRT; PAM sequence: AGGGAT
gcaaaaccttgacattcttg

SEQ ID NO: 17646 - DNA, 20 bp, Artificial Sequence
  Description of Artificial Sequence: Synthetic oligonucleotide
  Target: LAMA2; (-) strand; PAM type: NNGRRT; PAM sequence: CAGAAT
ctactgaaataatctgacca

SEQ ID NO: 17647 - DNA, 20 bp, Artificial Sequence
  Description of Artificial Sequence: Synthetic oligonucleotide
  Target: LAMA2; (-) strand; PAM type: NNGRRT; PAM sequence: TTGAAT
ttatcacatgtaacagttat

SEQ ID NO: 17648 - DNA, 20 bp, Artificial Sequence
  Description of Artificial Sequence: Synthetic oligonucleotide
  Target: LAMA2; (-) strand; PAM type: NNGRRT; PAM sequence: AGGAGT
ttgaatttaagtgtgtgtat

SEQ ID NO: 17649 - DNA, 20 bp, Artificial Sequence
  Description of Artificial Sequence: Synthetic oligonucleotide
  Target: LAMA2; (-) strand; PAM type: NNGRRT; PAM sequence: TTGAAT
atagaatacagacttttttg

SEQ ID NO: 17650 - DNA, 20 bp, Artificial Sequence
  Description of Artificial Sequence: Synthetic oligonucleotide
  Target: LAMA2; (-) strand; PAM type: NNGRRT; PAM sequence: TAGAAT
attaaggtaattggatatta

SEQ ID NO: 17651 - DNA, 20 bp, Artificial Sequence
  Description of Artificial Sequence: Synthetic oligonucleotide
  Target: LAMA2; (-) strand; PAM type: NNGRRT; PAM sequence: TTGGAT
ccactacacaattaaggtaa

SEQ ID NO: 17652 - DNA, 20 bp, Artificial Sequence
  Description of Artificial Sequence: Synthetic oligonucleotide
  Target: LAMA2; (-) strand; PAM type: NNGRRT; PAM sequence: GAGAAT
ggatagccctgtagataact

SEQ ID NO: 17653 - DNA, 20 bp, Artificial Sequence
  Description of Artificial Sequence: Synthetic oligonucleotide
  Target: LAMA2; (-) strand; PAM type: NNGRRT; PAM sequence: TTGGAT
atgaaatttccatttttctt

SEQ ID NO: 17654 - DNA, 20 bp, Artificial Sequence
  Description of Artificial Sequence: Synthetic oligonucleotide
  Target: LAMA2; (-) strand; PAM type: NNGRRT; PAM sequence: ATGAGT
gaaattaaatagcaccagtg

SEQ ID NO: 17655 - DNA, 20 bp, Artificial Sequence
  Description of Artificial Sequence: Synthetic oligonucleotide
  Target: LAMA2; (-) strand; PAM type: NNGRRT; PAM sequence: TGGGGT
aaaataatcagtggcgttgc

SEQ ID NO: 17656 - DNA, 20 bp, Artificial Sequence
  Description of Artificial Sequence: Synthetic oligonucleotide
  Target: LAMA2; (-) strand; PAM type: NNGRRT; PAM sequence: CAGAAT
tttcttttgagctttttagt

SEQ ID NO: 17657 - DNA, 20 bp, Artificial Sequence
  Description of Artificial Sequence: Synthetic oligonucleotide
  Target: LAMA2; (-) strand; PAM type: NNGRRT; PAM sequence: GAGAAT
taatatcttcatatggaaaa

SEQ ID NO: 17658 - DNA, 20 bp, Artificial Sequence
  Description of Artificial Sequence: Synthetic oligonucleotide
  Target: LAMA2; (-) strand; PAM type: NNGRRT; PAM sequence: TCGGGT
agtttaaattttccatcccc

SEQ ID NO: 17659 - DNA, 20 bp, Artificial Sequence
  Description of Artificial Sequence: Synthetic oligonucleotide
  Target: LAMA2; (-) strand; PAM type: NNGRRT; PAM sequence: TTGAGT
tctaacatacataagtaaat

SEQ ID NO: 17660 - DNA, 20 bp, Artificial Sequence
  Description of Artificial Sequence: Synthetic oligonucleotide
  Target: LAMA2; (-) strand; PAM type: NNGRRT; PAM sequence: CAGAAT
tgagaaactcacataaaaga

SEQ ID NO: 17661 - DNA, 20 bp, Artificial Sequence
  Description of Artificial Sequence: Synthetic oligonucleotide
  Target: LAMA2; (-) strand; PAM type: NNGRRT; PAM sequence: CAGAGT
tagaggagcaaggatacagg

SEQ ID NO: 17662 - DNA, 20 bp, Artificial Sequence
  Description of Artificial Sequence: Synthetic oligonucleotide
  Target: LAMA2; (-) strand; PAM type: NNGRRT; PAM sequence: AAGGAT
attttcaaaaatagaggagc

SEQ ID NO: 17663 - DNA, 20 bp, Artificial Sequence
  Description of Artificial Sequence: Synthetic oligonucleotide
  Target: LAMA2; (-) strand; PAM type: NNGRRT; PAM sequence: CTGGAT
ttttgacatttaatatctcc

SEQ ID NO: 17664 - DNA, 20 bp, Artificial Sequence
  Description of Artificial Sequence: Synthetic oligonucleotide
  Target: LAMA2; (-) strand; PAM type: NNGRRT; PAM sequence: TTGGAT
acaacatttaactcttaaaa

SEQ ID NO: 17665 - DNA, 20 bp, Artificial Sequence
  Description of Artificial Sequence: Synthetic oligonucleotide
  Target: LAMA2; (-) strand; PAM type: NNGRRT; PAM sequence: TTGAAT
aagaattactcaactaaata

SEQ ID NO: 17666 - DNA, 20 bp, Artificial Sequence
  Description of Artificial Sequence: Synthetic oligonucleotide
  Target: LAMA2; (-) strand; PAM type: NNGRRT; PAM sequence: AAGAAT
gataatacaaataagtgaac

SEQ ID NO: 17667 - DNA, 20 bp, Artificial Sequence
  Description of Artificial Sequence: Synthetic oligonucleotide
  Target: LAMA2; (-) strand; PAM type: NNGRRT; PAM sequence: GAGGAT
ctatacaggttcaatctaat

SEQ ID NO: 17668 - DNA, 20 bp, Artificial Sequence
  Description of Artificial Sequence: Synthetic oligonucleotide
  Target: LAMA2; (-) strand; PAM type: NNGRRT; PAM sequence: CAGGAT
gatagtattaggtatgtact

SEQ ID NO: 17669 - DNA, 20 bp, Artificial Sequence
  Description of Artificial Sequence: Synthetic oligonucleotide
  Target: LAMA2; (-) strand; PAM type: NNGRRT; PAM sequence: GAGGAT
tactaaatttctatacagta

SEQ ID NO: 17670 - DNA, 20 bp, Artificial Sequence
  Description of Artificial Sequence: Synthetic oligonucleotide
  Target: LAMA2; (-) strand; PAM type: NNGRRT; PAM sequence: AGGAGT
ctgcccagaaaaccaaatcc

SEQ ID NO: 17671 - DNA, 20 bp, Artificial Sequence
  Description of Artificial Sequence: Synthetic oligonucleotide
  Target: LAMA2; (-) strand; PAM type: NNGRRT; PAM sequence: TTGAGT
cacccacaaaataatatctg

SEQ ID NO: 17672 - DNA, 20 bp, Artificial Sequence
  Description of Artificial Sequence: Synthetic oligonucleotide
  Target: LAMA2; (-) strand; PAM type: NNGRRT; PAM sequence: TAGAAT
gggtgttatgttaaatataa

SEQ ID NO: 17673 - DNA, 20 bp, Artificial Sequence
  Description of Artificial Sequence: Synthetic oligonucleotide
  Target: LAMA2; (-) strand; PAM type: NNGRRT; PAM sequence: TAGGGT
tctttattcaccgaggtata

SEQ ID NO: 17674 - DNA, 20 bp, Artificial Sequence
  Description of Artificial Sequence: Synthetic oligonucleotide
  Target: LAMA2; (-) strand; PAM type: NNGRRT; PAM sequence: TGGGAT
gtcacaaatctagggaatca

SEQ ID NO: 17675 - DNA, 20 bp, Artificial Sequence
  Description of Artificial Sequence: Synthetic oligonucleotide
  Target: LAMA2; (-) strand; PAM type: NNGRRT; PAM sequence: GGGAAT
actgaagagtcacaaatcta

SEQ ID NO: 17676 - DNA, 20 bp, Artificial Sequence
  Description of Artificial Sequence: Synthetic oligonucleotide
  Target: LAMA2; (-) strand; PAM type: NNGRRT; PAM sequence: AAGAGT
actaattaaatgtgtcactg

SEQ ID NO: 17677 - DNA, 20 bp, Artificial Sequence
  Description of Artificial Sequence: Synthetic oligonucleotide
  Target: LAMA2; (-) strand; PAM type: NNGRRT; PAM sequence: TGGGAT
acagtatatacaaagaattc

SEQ ID NO: 17678 - DNA, 20 bp, Artificial Sequence
  Description of Artificial Sequence: Synthetic oligonucleotide
  Target: LAMA2; (-) strand; PAM type: NNGRRT; PAM sequence: AAGAAT
ggtatatcacagtatataca

SEQ ID NO: 17679 - DNA, 20 bp, Artificial Sequence
  Description of Artificial Sequence: Synthetic oligonucleotide
  Target: LAMA2; (-) strand; PAM type: NNGRRT; PAM sequence: CAGAAT
agattcatctataggagaat

SEQ ID NO: 17680 - DNA, 20 bp, Artificial Sequence
  Description of Artificial Sequence: Synthetic oligonucleotide
  Target: LAMA2; (-) strand; PAM type: NNGRRT; PAM sequence: GAGAAT
acgcagagattcatctatag

SEQ ID NO: 17681 - DNA, 20 bp, Artificial Sequence
  Description of Artificial Sequence: Synthetic oligonucleotide
  Target: LAMA2; (-) strand; PAM type: NNGRRT; PAM sequence: CCGAAT
tttaaattcagttttaaaaa

SEQ ID NO: 17682 - DNA, 20 bp, Artificial Sequence
  Description of Artificial Sequence: Synthetic oligonucleotide
  Target: LAMA2; (-) strand; PAM type: NNGRRT; PAM sequence: TTGAAT
aatggaaaacagtcaggttg

SEQ ID NO: 17683 - DNA, 20 bp, Artificial Sequence
  Description of Artificial Sequence: Synthetic oligonucleotide
  Target: LAMA2; (-) strand; PAM type: NNGRRT; PAM sequence: CTGAAT
tcaggtactatacccactac

SEQ ID NO: 17684 - DNA, 20 bp, Artificial Sequence
  Description of Artificial Sequence: Synthetic oligonucleotide
  Target: LAMA2; (-) strand; PAM type: NNGRRT; PAM sequence: CAGAGT
ctgcactccagcctgggtta

SEQ ID NO: 17685 - DNA, 20 bp, Artificial Sequence
  Description of Artificial Sequence: Synthetic oligonucleotide
  Target: LAMA2; (-) strand; PAM type: NNGRRT; PAM sequence: CTGGGT
tcgtgccactgcactccagc

SEQ ID NO: 17686 - DNA, 20 bp, Artificial Sequence
  Description of Artificial Sequence: Synthetic oligonucleotide
  Target: LAMA2; (-) strand; PAM type: NNGRRT; PAM sequence: AGGAGT
caggcggatcacctgaggtc

SEQ ID NO: 17687 - DNA, 20 bp, Artificial Sequence
  Description of Artificial Sequence: Synthetic oligonucleotide
  Target: LAMA2; (-) strand; PAM type: NNGRRT; PAM sequence: GCGGAT
actttggaaggccaaggcag

SEQ ID NO: 17688 - DNA, 20 bp, Artificial Sequence
  Description of Artificial Sequence: Synthetic oligonucleotide
  Target: LAMA2; (-) strand; PAM type: NNGRRT; PAM sequence: AAGGGT
aggggagagagagaaggaga

SEQ ID NO: 17689 - DNA, 20 bp, Artificial Sequence
  Description of Artificial Sequence: Synthetic oligonucleotide
  Target: LAMA2; (-) strand; PAM type: NNGRRT; PAM sequence: AAGAAT
gtccttattttgttttactt

SEQ ID NO: 17690 - DNA, 20 bp, Artificial Sequence
  Description of Artificial Sequence: Synthetic oligonucleotide
  Target: LAMA2; (-) strand; PAM type: NNGRRT; PAM sequence: GAGAAT
ttcatatacaaatcatcaga

SEQ ID NO: 17691 - DNA, 20 bp, Artificial Sequence
  Description of Artificial Sequence: Synthetic oligonucleotide
  Target: LAMA2; (-) strand; PAM type: NNGRRT; PAM sequence: ATGAAT
gttgatactatcaataaaga

SEQ ID NO: 17692 - DNA, 20 bp, Artificial Sequence
  Description of Artificial Sequence: Synthetic oligonucleotide
  Target: LAMA2; (-) strand; PAM type: NNGRRT; PAM sequence: AAGAAT
tcatgttgatactatcaata

SEQ ID NO: 17693 - DNA, 20 bp, Artificial Sequence
  Description of Artificial Sequence: Synthetic oligonucleotide
  Target: LAMA2; (-) strand; PAM type: NNGRRT; PAM sequence: ATGGAT
gggtattagccctttgtcag

SEQ ID NO: 17694 - DNA, 20 bp, Artificial Sequence
  Description of Artificial Sequence: Synthetic oligonucleotide
  Target: LAMA2; (-) strand; PAM type: NNGRRT; PAM sequence: CTGGGT
gtttatgttccttgtagatt

SEQ ID NO: 17695 - DNA, 20 bp, Artificial Sequence
  Description of Artificial Sequence: Synthetic oligonucleotide
  Target: LAMA2; (-) strand; PAM type: NNGRRT; PAM sequence: GTGAAT
cgatggggttgctttttctt

SEQ ID NO: 17696 - DNA, 20 bp, Artificial Sequence
  Description of Artificial Sequence: Synthetic oligonucleotide
  Target: LAMA2; (-) strand; PAM type: NNGRRT; PAM sequence: TGGGGT
atcctttgcccacttttcga

SEQ ID NO: 17697 - DNA, 20 bp, Artificial Sequence
  Description of Artificial Sequence: Synthetic oligonucleotide
  Target: LAMA2; (-) strand; PAM type: NNGRRT; PAM sequence: ATGAGT
tgatcgccattctaactggc

SEQ ID NO: 17698 - DNA, 20 bp, Artificial Sequence
  Description of Artificial Sequence: Synthetic oligonucleotide
  Target: LAMA2; (-) strand; PAM type: NNGRRT; PAM sequence: CAGAAT
ggaatcaccacactgtcttc

SEQ ID NO: 17699 - DNA, 20 bp, Artificial Sequence
  Description of Artificial Sequence: Synthetic oligonucleotide
  Target: LAMA2; (-) strand; PAM type: NNGRRT; PAM sequence: AGGAAT
tttccggttctagatccttg

SEQ ID NO: 17700 - DNA, 20 bp, Artificial Sequence
  Description of Artificial Sequence: Synthetic oligonucleotide
  Target: LAMA2; (-) strand; PAM type: NNGRRT; PAM sequence: CTGGGT
aatacccagtaatgggatgg

SEQ ID NO: 17701 - DNA, 20 bp, Artificial Sequence
  Description of Artificial Sequence: Synthetic oligonucleotide
  Target: LAMA2; (-) strand; PAM type: NNGRRT; PAM sequence: TGGGAT
tttggataaatacccagtaa

SEQ ID NO: 17702 - DNA, 20 bp, Artificial Sequence
  Description of Artificial Sequence: Synthetic oligonucleotide
  Target: LAMA2; (-) strand; PAM type: NNGRRT; PAM sequence: TTGGAT
gtagaatgatttataatcct

SEQ ID NO: 17703 - DNA, 20 bp, Artificial Sequence
  Description of Artificial Sequence: Synthetic oligonucleotide
  Target: LAMA2; (-) strand; PAM type: NNGRRT; PAM sequence: TAGAAT
gtgtgcatgtgtctttatag

SEQ ID NO: 17704 - DNA, 20 bp, Artificial Sequence
  Description of Artificial Sequence: Synthetic oligonucleotide
  Target: LAMA2; (-) strand; PAM type: NNGRRT; PAM sequence: GTGAAT
ggttccaagtctttgctatt

SEQ ID NO: 17705 - DNA, 20 bp, Artificial Sequence
  Description of Artificial Sequence: Synthetic oligonucleotide
  Target: LAMA2; (-) strand; PAM type: NNGRRT; PAM sequence: TTGGGT
agtctatcattgataggcat

SEQ ID NO: 17706 - DNA, 20 bp, Artificial Sequence
  Description of Artificial Sequence: Synthetic oligonucleotide
  Target: LAMA2; (-) strand; PAM type: NNGRRT; PAM sequence: GAGAAT
tgttcctctgttagtttgct

SEQ ID NO: 17707 - DNA, 20 bp, Artificial Sequence
  Description of Artificial Sequence: Synthetic oligonucleotide
  Target: LAMA2; (-) strand; PAM type: NNGRRT; PAM sequence: ATGAGT
tcactgttcaacacccactt

SEQ ID NO: 17708 - DNA, 20 bp, Artificial Sequence
  Description of Artificial Sequence: Synthetic oligonucleotide
  Target: LAMA2; (-) strand; PAM type: NNGRRT; PAM sequence: AGGAAT
aatgtgcaggtttgttacat

SEQ ID NO: 17709 - DNA, 20 bp, Artificial Sequence
  Description of Artificial Sequence: Synthetic oligonucleotide
  Target: LAMA2; (-) strand; PAM type: NNGRRT; PAM sequence: TGGGAT
tttctttctactttaagttc

SEQ ID NO: 17710 - DNA, 20 bp, Artificial Sequence
  Description of Artificial Sequence: Synthetic oligonucleotide
  Target: LAMA2; (-) strand; PAM type: NNGRRT; PAM sequence: TTGAAT
cacatcacaggcataaagtc

SEQ ID NO: 17711 - DNA, 20 bp, Artificial Sequence
  Description of Artificial Sequence: Synthetic oligonucleotide
  Target: LAMA2; (-) strand; PAM type: NNGRRT; PAM sequence: TGGAAT
gcctcagcctccgaaagtgc

SEQ ID NO: 17712 - DNA, 20 bp, Artificial Sequence
  Description of Artificial Sequence: Synthetic oligonucleotide
  Target: LAMA2; (-) strand; PAM type: NNGRRT; PAM sequence: CAGGGT
ttttgcatttttggtagaga

SEQ ID NO: 17713 - DNA, 20 bp, Artificial Sequence
  Description of Artificial Sequence: Synthetic oligonucleotide
  Target: LAMA2; (-) strand; PAM type: NNGRRT; PAM sequence: GGGAGT
cctcagcctcccgagtagct

SEQ ID NO: 17714 - DNA, 20 bp, Artificial Sequence
  Description of Artificial Sequence: Synthetic oligonucleotide
  Target: LAMA2; (-) strand; PAM type: NNGRRT; PAM sequence: CCGAGT
gattctcctacctcagcctc

SEQ ID NO: 17715 - DNA, 20 bp, Artificial Sequence
  Description of Artificial Sequence: Synthetic oligonucleotide
  Target: LAMA2; (-) strand; PAM type: NNGRRT; PAM sequence: TGGAGT
tctcgctctgttggccaggc

SEQ ID NO: 17716 - DNA, 20 bp, Artificial Sequence
  Description of Artificial Sequence: Synthetic oligonucleotide
  Target: LAMA2; (-) strand; PAM type: NNGRRT; PAM sequence: CAGAGT
actttttttttcttttgaga

SEQ ID NO: 17717 - DNA, 20 bp, Artificial Sequence
  Description of Artificial Sequence: Synthetic oligonucleotide
  Target: LAMA2; (-) strand; PAM type: NNGRRT; PAM sequence: TTGGGT
ttatcttctgtctgagaaaa

SEQ ID NO: 17718 - DNA, 20 bp, Artificial Sequence
  Description of Artificial Sequence: Synthetic oligonucleotide
  Target: LAMA2; (-) strand; PAM type: NNGRRT; PAM sequence: CAGGGT
tggactctgttataataact

SEQ ID NO: 17719 - DNA, 20 bp, Artificial Sequence
  Description of Artificial Sequence: Synthetic oligonucleotide
  Target: LAMA2; (-) strand; PAM type: NNGRRT; PAM sequence: GGGAGT
gaaaagcgcaatattcgggt

SEQ ID NO: 17720 - DNA, 20 bp, Artificial Sequence
  Description of Artificial Sequence: Synthetic oligonucleotide
  Target: LAMA2; (-) strand; PAM type: NNGRRT; PAM sequence: TCGGGT
cggtctgaaaagcgcaatat

SEQ ID NO: 17721 - DNA, 20 bp, Artificial Sequence
  Description of Artificial Sequence: Synthetic oligonucleotide
  Target: LAMA2; (-) strand; PAM type: NNGRRT; PAM sequence: TGGGAT
aggaccctccgagccaggtg

SEQ ID NO: 17722 - DNA, 20 bp, Artificial Sequence
  Description of Artificial Sequence: Synthetic oligonucleotide
  Target: LAMA2; (-) strand; PAM type: NNGRRT; PAM sequence: AGGAGT
agttaggctgctcgggggtc

SEQ ID NO: 17723 - DNA, 20 bp, Artificial Sequence
  Description of Artificial Sequence: Synthetic oligonucleotide
  Target: LAMA2; (-) strand; PAM type: NNGRRT; PAM sequence: GGGGGT
gcctcccagttaggctgctc

SEQ ID NO: 17724 - DNA, 20 bp, Artificial Sequence
  Description of Artificial Sequence: Synthetic oligonucleotide
  Target: LAMA2; (-) strand; PAM type: NNGRRT; PAM sequence: GGGGGT
gtgtcagtgtgcccctgctg

SEQ ID NO: 17725 - DNA, 20 bp, Artificial Sequence
  Description of Artificial Sequence: Synthetic oligonucleotide
  Target: LAMA2; (-) strand; PAM type: NNGRRT; PAM sequence: TGGAAT
accctcagctgcaggtctgt

SEQ ID NO: 17726 - DNA, 20 bp, Artificial Sequence
  Description of Artificial Sequence: Synthetic oligonucleotide
  Target: LAMA2; (-) strand; PAM type: NNGRRT; PAM sequence: ATGGGT
ttgatgatggtgatgtacag

SEQ ID NO: 17727 - DNA, 20 bp, Artificial Sequence
  Description of Artificial Sequence: Synthetic oligonucleotide
  Target: LAMA2; (-) strand; PAM type: NNGRRT; PAM sequence: TAGAGT
aggagaggcgctctgcgttt

SEQ ID NO: 17728 - DNA, 20 bp, Artificial Sequence
  Description of Artificial Sequence: Synthetic oligonucleotide
  Target: LAMA2; (-) strand; PAM type: NNGRRT; PAM sequence: CAGAGT
ttgaatgtcctcccgtagct

SEQ ID NO: 17729 - DNA, 20 bp, Artificial Sequence
  Description of Artificial Sequence: Synthetic oligonucleotide
  Target: LAMA2; (-) strand; PAM type: NNGRRT; PAM sequence: TTGAAT
tcaacttctttgcctttggt

SEQ ID NO: 17730 - DNA, 20 bp, Artificial Sequence
  Description of Artificial Sequence: Synthetic oligonucleotide
  Target: LAMA2; (-) strand; PAM type: NNGRRT; PAM sequence: CAGAGT
ttctcctggataatatcctg

SEQ ID NO: 17731 - DNA, 20 bp, Artificial Sequence
  Description of Artificial Sequence: Synthetic oligonucleotide
  Target: LAMA2; (-) strand; PAM type: NNGRRT; PAM sequence: CTGGAT
gctagattggggaagttctc

SEQ ID NO: 17732 - DNA, 20 bp, Artificial Sequence
  Description of Artificial Sequence: Synthetic oligonucleotide
  Target: LAMA2; (-) strand; PAM type: NNGRRT; PAM sequence: CTGAAT
tgtggcgttctctgtatttc

SEQ ID NO: 17733 - DNA, 20 bp, Artificial Sequence
  Description of Artificial Sequence: Synthetic oligonucleotide
  Target: LAMA2; (-) strand; PAM type: NNGRRT; PAM sequence: AGGAGT
tcttggagttgctcttctcg

SEQ ID NO: 17734 - DNA, 20 bp, Artificial Sequence
  Description of Artificial Sequence: Synthetic oligonucleotide
  Target: LAMA2; (-) strand; PAM type: NNGRRT; PAM sequence: TGGAGT
aatctgacaattatgtgtct

SEQ ID NO: 17735 - DNA, 20 bp, Artificial Sequence
  Description of Artificial Sequence: Synthetic oligonucleotide
  Target: LAMA2; (-) strand; PAM type: NNGRRT; PAM sequence: GTGAAT
tttccttcatttcaactttg

SEQ ID NO: 17736 - DNA, 20 bp, Artificial Sequence
  Description of Artificial Sequence: Synthetic oligonucleotide
  Target: LAMA2; (-) strand; PAM type: NNGRRT; PAM sequence: GAGGGT
agtctgatgggctttccttt

SEQ ID NO: 17737 - DNA, 20 bp, Artificial Sequence
  Description of Artificial Sequence: Synthetic oligonucleotide
  Target: LAMA2; (-) strand; PAM type: NNGRRT; PAM sequence: TAGGGT
ccccactctcttctggcttg

SEQ ID NO: 17738 - DNA, 20 bp, Artificial Sequence
  Description of Artificial Sequence: Synthetic oligonucleotide
  Target: LAMA2; (-) strand; PAM type: NNGRRT; PAM sequence: TTGAAT
aattcttttctttaagaatg

SEQ ID NO: 17739 - DNA, 20 bp, Artificial Sequence
  Description of Artificial Sequence: Synthetic oligonucleotide
  Target: LAMA2; (-) strand; PAM type: NNGRRT; PAM sequence: AAGAAT
ggttgaaaattcttttcttt

SEQ ID NO: 17740 - DNA, 20 bp, Artificial Sequence
  Description of Artificial Sequence: Synthetic oligonucleotide
  Target: LAMA2; (-) strand; PAM type: NNGRRT; PAM sequence: CTGGGT
gtttggctggatatgaaatt

SEQ ID NO: 17741 - DNA, 20 bp, Artificial Sequence
  Description of Artificial Sequence: Synthetic oligonucleotide
  Target: LAMA2; (-) strand; PAM type: NNGRRT; PAM sequence: CTGGAT
acttatgaagcttagtttgg

SEQ ID NO: 17742 - DNA, 20 bp, Artificial Sequence
  Description of Artificial Sequence: Synthetic oligonucleotide
  Target: LAMA2; (-) strand; PAM type: NNGRRT; PAM sequence: GTGAAT
taaagttaatattgttatgt

SEQ ID NO: 17743 - DNA, 20 bp, Artificial Sequence
  Description of Artificial Sequence: Synthetic oligonucleotide
  Target: LAMA2; (-) strand; PAM type: NNGRRT; PAM sequence: CAGAAT
cagtttgtgtcttttaattg

SEQ ID NO: 17744 - DNA, 20 bp, Artificial Sequence
  Description of Artificial Sequence: Synthetic oligonucleotide
  Target: LAMA2; (-) strand; PAM type: NNGRRT; PAM sequence: ATGGGT
ttcctgaatacagcacactg

SEQ ID NO: 17745 - DNA, 20 bp, Artificial Sequence
  Description of Artificial Sequence: Synthetic oligonucleotide
  Target: LAMA2; (-) strand; PAM type: NNGRRT; PAM sequence: CTGAAT
ctgcacgtgagatgggtttc

SEQ ID NO: 17746 - DNA, 20 bp, Artificial Sequence
  Description of Artificial Sequence: Synthetic oligonucleotide
  Target: LAMA2; (-) strand; PAM type: NNGRRT; PAM sequence: ATGGGT
tgtgtgtctctgcacgtgag

SEQ ID NO: 17747 - DNA, 20 bp, Artificial Sequence
  Description of Artificial Sequence: Synthetic oligonucleotide
  Target: LAMA2; (-) strand; PAM type: NNGRRT; PAM sequence: TAGGAT
aagtctgttttgtcagagac

SEQ ID NO: 17748 - DNA, 20 bp, Artificial Sequence
  Description of Artificial Sequence: Synthetic oligonucleotide
  Target: LAMA2; (-) strand; PAM type: NNGRRT; PAM sequence: TTGAAT
aggatagttagctcctcttg

SEQ ID NO: 17749 - DNA, 20 bp, Artificial Sequence
  Description of Artificial Sequence: Synthetic oligonucleotide
  Target: LAMA2; (-) strand; PAM type: NNGRRT; PAM sequence: TAGGAT
gtattgggtgcataaatatt

SEQ ID NO: 17750 - DNA, 20 bp, Artificial Sequence
  Description of Artificial Sequence: Synthetic oligonucleotide
  Target: LAMA2; (-) strand; PAM type: NNGRRT; PAM sequence: TTGGGT
tgaatctgggtgctcctgta

SEQ ID NO: 17751 - DNA, 20 bp, Artificial Sequence
  Description of Artificial Sequence: Synthetic oligonucleotide
  Target: LAMA2; (-) strand; PAM type: NNGRRT; PAM sequence: CTGGGT
tgaggacttgctttatgaat

SEQ ID NO: 17752 - DNA, 20 bp, Artificial Sequence
  Description of Artificial Sequence: Synthetic oligonucleotide
  Target: LAMA2; (-) strand; PAM type: NNGRRT; PAM sequence: ATGAAT
ggtcactgaggacttgcttt

SEQ ID NO: 17753 - DNA, 20 bp, Artificial Sequence
  Description of Artificial Sequence: Synthetic oligonucleotide
  Target: LAMA2; (-) strand; PAM type: NNGRRT; PAM sequence: GGGAGT
gtctcccattattaatgtgt

SEQ ID NO: 17754 - DNA, 20 bp, Artificial Sequence
  Description of Artificial Sequence: Synthetic oligonucleotide
  Target: LAMA2; (-) strand; PAM type: NNGRRT; PAM sequence: TGGGGT
gatctgtctaatgttgacag

SEQ ID NO: 17755 - DNA, 20 bp, Artificial Sequence
  Description of Artificial Sequence: Synthetic oligonucleotide
  Target: LAMA2; (-) strand; PAM type: NNGRRT; PAM sequence: CTGGGT
tgcagagctgagttcaattc

SEQ ID NO: 17756 - DNA, 20 bp, Artificial Sequence
  Description of Artificial Sequence: Synthetic oligonucleotide
  Target: LAMA2; (-) strand; PAM type: NNGRRT; PAM sequence: CTGAGT
taggtctgcttggtgcagag

SEQ ID NO: 17757 - DNA, 20 bp, Artificial Sequence
  Description of Artificial Sequence: Synthetic oligonucleotide
  Target: LAMA2; (-) strand; PAM type: NNGRRT; PAM sequence: GAGAGT
tattctgttgatttggggtg

SEQ ID NO: 17758 - DNA, 20 bp, Artificial Sequence
  Description of Artificial Sequence: Synthetic oligonucleotide
  Target: LAMA2; (-) strand; PAM type: NNGRRT; PAM sequence: TGGGGT
aaatgtatattctgttgatt

SEQ ID NO: 17759 - DNA, 20 bp, Artificial Sequence
  Description of Artificial Sequence: Synthetic oligonucleotide
  Target: LAMA2; (-) strand; PAM type: NNGRRT; PAM sequence: TGGAAT
tccaactatgtggtcaattt

SEQ ID NO: 17760 - DNA, 20 bp, Artificial Sequence
  Description of Artificial Sequence: Synthetic oligonucleotide
  Target: LAMA2; (-) strand; PAM type: NNGRRT; PAM sequence: CTGAGT
tttgagtgagattcttaatc

SEQ ID NO: 17761 - DNA, 20 bp, Artificial Sequence
  Description of Artificial Sequence: Synthetic oligonucleotide
  Target: LAMA2; (-) strand; PAM type: NNGRRT; PAM sequence: TTGAGT
ttccatgtagttgagcggct

SEQ ID NO: 17762 - DNA, 20 bp, Artificial Sequence
  Description of Artificial Sequence: Synthetic oligonucleotide
  Target: LAMA2; (-) strand; PAM type: NNGRRT; PAM sequence: TTGAAT
atttccctctacacactgct

SEQ ID NO: 17763 - DNA, 20 bp, Artificial Sequence
  Description of Artificial Sequence: Synthetic oligonucleotide
  Target: LAMA2; (-) strand; PAM type: NNGRRT; PAM sequence: TTGGAT
gtgatgttagggtgtcaatt

SEQ ID NO: 17764 - DNA, 20 bp, Artificial Sequence
  Description of Artificial Sequence: Synthetic oligonucleotide
  Target: LAMA2; (-) strand; PAM type: NNGRRT; PAM sequence: TAGGGT
agttcttttaattgtgatgt

SEQ ID NO: 17765 - DNA, 20 bp, Artificial Sequence
  Description of Artificial Sequence: Synthetic oligonucleotide
  Target: LAMA2; (-) strand; PAM type: NNGRRT; PAM sequence: TTGAAT
ttcttgccttctgctagctt

SEQ ID NO: 17766 - DNA, 20 bp, Artificial Sequence
  Description of Artificial Sequence: Synthetic oligonucleotide
  Target: LAMA2; (-) strand; PAM type: NNGRRT; PAM sequence: AAGGGT
ctggattcattgattttttg

SEQ ID NO: 17767 - DNA, 20 bp, Artificial Sequence
  Description of Artificial Sequence: Synthetic oligonucleotide
  Target: LAMA2; (-) strand; PAM type: NNGRRT; PAM sequence: CTGGAT
tcctttcaaaaaaccagctc

SEQ ID NO: 17768 - DNA, 20 bp, Artificial Sequence
  Description of Artificial Sequence: Synthetic oligonucleotide
  Target: LAMA2; (-) strand; PAM type: NNGRRT; PAM sequence: TGGGAT
gatggtagtttgtatttctg

SEQ ID NO: 17769 - DNA, 20 bp, Artificial Sequence
  Description of Artificial Sequence: Synthetic oligonucleotide
  Target: LAMA2; (-) strand; PAM type: NNGRRT; PAM sequence: AGGAAT
ttgggagagtgtatgtgtcg

SEQ ID NO: 17770 - DNA, 20 bp, Artificial Sequence
  Description of Artificial Sequence: Synthetic oligonucleotide
  Target: LAMA2; (-) strand; PAM type: NNGRRT; PAM sequence: GAGAGT
tcttcctggtttagtcttgg

SEQ ID NO: 17771 - DNA, 20 bp, Artificial Sequence
  Description of Artificial Sequence: Synthetic oligonucleotide
  Target: LAMA2; (-) strand; PAM type: NNGRRT; PAM sequence: GTGAAT
acctctggtagaattcggct

SEQ ID NO: 17772 - DNA, 20 bp, Artificial Sequence
  Description of Artificial Sequence: Synthetic oligonucleotide
  Target: LAMA2; (-) strand; PAM type: NNGRRT; PAM sequence: TAGAAT
gttcctccttgtacctctgg

SEQ ID NO: 17773 - DNA, 20 bp, Artificial Sequence
  Description of Artificial Sequence: Synthetic oligonucleotide
  Target: LAMA2; (-) strand; PAM type: NNGRRT; PAM sequence: AGGAAT
ttgattggaatagtttcaga

SEQ ID NO: 17774 - DNA, 20 bp, Artificial Sequence
  Description of Artificial Sequence: Synthetic oligonucleotide
  Target: LAMA2; (-) strand; PAM type: NNGRRT; PAM sequence: TGGAAT
ttccctctttttctattgat

SEQ ID NO: 17775 - DNA, 20 bp, Artificial Sequence
  Description of Artificial Sequence: Synthetic oligonucleotide
  Target: LAMA2; (-) strand; PAM type: NNGRRT; PAM sequence: GAGGAT
gcctcataaaatgagttagg

SEQ ID NO: 17776 - DNA, 20 bp, Artificial Sequence
  Description of Artificial Sequence: Synthetic oligonucleotide
  Target: LAMA2; (-) strand; PAM type: NNGRRT; PAM sequence: ATGAGT
aatgatgctggcctcataaa

SEQ ID NO: 17777 - DNA, 20 bp, Artificial Sequence
  Description of Artificial Sequence: Synthetic oligonucleotide
  Target: LAMA2; (-) strand; PAM type: NNGRRT; PAM sequence: CAGAAT
tctctgcccggctttggtat

SEQ ID NO: 17778 - DNA, 20 bp, Artificial Sequence
  Description of Artificial Sequence: Synthetic oligonucleotide
  Target: LAMA2; (-) strand; PAM type: NNGRRT; PAM sequence: AAGGAT
tttttgcatcaatgttcatc

SEQ ID NO: 17779 - DNA, 20 bp, Artificial Sequence
  Description of Artificial Sequence: Synthetic oligonucleotide
  Target: LAMA2; (-) strand; PAM type: NNGRRT; PAM sequence: GAGGAT
cggtttgccagtattttatt

SEQ ID NO: 17780 - DNA, 20 bp, Artificial Sequence
  Description of Artificial Sequence: Synthetic oligonucleotide
  Target: LAMA2; (-) strand; PAM type: NNGRRT; PAM sequence: CTGGAT
ataagctttttgatgtgctg

SEQ ID NO: 17781 - DNA, 20 bp, Artificial Sequence
  Description of Artificial Sequence: Synthetic oligonucleotide
  Target: LAMA2; (-) strand; PAM type: NNGRRT; PAM sequence: GTGGAT
atgaagcccacttgatcatg

SEQ ID NO: 17782 - DNA, 20 bp, Artificial Sequence
  Description of Artificial Sequence: Synthetic oligonucleotide
  Target: LAMA2; (-) strand; PAM type: NNGRRT; PAM sequence: AGGGAT
ttgaaccagccttgcatccc

SEQ ID NO: 17783 - DNA, 20 bp, Artificial Sequence
  Description of Artificial Sequence: Synthetic oligonucleotide
  Target: LAMA2; (-) strand; PAM type: NNGRRT; PAM sequence: CTGGAT
tctttggctctgtttatatg

SEQ ID NO: 17784 - DNA, 20 bp, Artificial Sequence
  Description of Artificial Sequence: Synthetic oligonucleotide
  Target: LAMA2; (-) strand; PAM type: NNGRRT; PAM sequence: TTGAAT
gtttttagcatgaagggttg

SEQ ID NO: 17785 - DNA, 20 bp, Artificial Sequence
  Description of Artificial Sequence: Synthetic oligonucleotide
  Target: LAMA2; (-) strand; PAM type: NNGRRT; PAM sequence: AAGGGT
tattgagagtttttagcatg

SEQ ID NO: 17786 - DNA, 20 bp, Artificial Sequence
  Description of Artificial Sequence: Synthetic oligonucleotide
  Target: LAMA2; (-) strand; PAM type: NNGRRT; PAM sequence: GAGAGT
ccatcaatacctaatttatt

SEQ ID NO: 17787 - DNA, 20 bp, Artificial Sequence
  Description of Artificial Sequence: Synthetic oligonucleotide
  Target: LAMA2; (-) strand; PAM type: NNGRRT; PAM sequence: GTGGGT
cattcagtatgatattggct

SEQ ID NO: 17788 - DNA, 20 bp, Artificial Sequence
  Description of Artificial Sequence: Synthetic oligonucleotide
  Target: LAMA2; (-) strand; PAM type: NNGRRT; PAM sequence: GGGAAT
gtcttgtgccagttttcaaa

SEQ ID NO: 17789 - DNA, 20 bp, Artificial Sequence
  Description of Artificial Sequence: Synthetic oligonucleotide
  Target: LAMA2; (-) strand; PAM type: NNGRRT; PAM sequence: TTGAAT
ccagaacttccaacactatg

SEQ ID NO: 17790 - DNA, 20 bp, Artificial Sequence
  Description of Artificial Sequence: Synthetic oligonucleotide
  Target: LAMA2; (-) strand; PAM type: NNGRRT; PAM sequence: TTGAAT
ttgacttcctcttttcctaa

SEQ ID NO: 17791 - DNA, 20 bp, Artificial Sequence
  Description of Artificial Sequence: Synthetic oligonucleotide
  Target: LAMA2; (-) strand; PAM type: NNGRRT; PAM sequence: TGGGGT
gagattttgggctgagacga

SEQ ID NO: 17792 - DNA, 20 bp, Artificial Sequence
  Description of Artificial Sequence: Synthetic oligonucleotide
  Target: LAMA2; (-) strand; PAM type: NNGRRT; PAM sequence: AAGAAT
tttgtctgttgttggtgtat

SEQ ID NO: 17793 - DNA, 20 bp, Artificial Sequence
  Description of Artificial Sequence: Synthetic oligonucleotide
  Target: LAMA2; (-) strand; PAM type: NNGRRT; PAM sequence: GGGAGT
tctttgaagcaattgtgaat

SEQ ID NO: 17794 - DNA, 20 bp, Artificial Sequence
  Description of Artificial Sequence: Synthetic oligonucleotide
  Target: LAMA2; (-) strand; PAM type: NNGRRT; PAM sequence: GTGAAT
ttattctctttgaagcaatt

SEQ ID NO: 17795 - DNA, 20 bp, Artificial Sequence
  Description of Artificial Sequence: Synthetic oligonucleotide
  Target: LAMA2; (-) strand; PAM type: NNGRRT; PAM sequence: TTGGAT
tccttcacatcccttgtaag

SEQ ID NO: 17796 - DNA, 20 bp, Artificial Sequence
  Description of Artificial Sequence: Synthetic oligonucleotide
  Target: LAMA2; (-) strand; PAM type: NNGRRT; PAM sequence: TGGAAT
attcttcctacccatgagca

SEQ ID NO: 17797 - DNA, 20 bp, Artificial Sequence
  Description of Artificial Sequence: Synthetic oligonucleotide
  Target: LAMA2; (-) strand; PAM type: NNGRRT; PAM sequence: TTGAAT
gtagcttgatggggatggca

SEQ ID NO: 17798 - DNA, 20 bp, Artificial Sequence
  Description of Artificial Sequence: Synthetic oligonucleotide
  Target: LAMA2; (-) strand; PAM type: NNGRRT; PAM sequence: GGGGAT
aaagtcattggtagcttgat

SEQ ID NO: 17799 - DNA, 20 bp, Artificial Sequence
  Description of Artificial Sequence: Synthetic oligonucleotide
  Target: LAMA2; (-) strand; PAM type: NNGRRT; PAM sequence: TAGGAT
ccagctttgttcttttggct

SEQ ID NO: 17800 - DNA, 20 bp, Artificial Sequence
  Description of Artificial Sequence: Synthetic oligonucleotide
  Target: LAMA2; (-) strand; PAM type: NNGRRT; PAM sequence: GGGAAT
ccagcaccatttattaaata

SEQ ID NO: 17801 - DNA, 20 bp, Artificial Sequence
  Description of Artificial Sequence: Synthetic oligonucleotide
  Target: LAMA2; (-) strand; PAM type: NNGRRT; PAM sequence: AGGGAT
ttttgtataaggtgtaagga

SEQ ID NO: 17802 - DNA, 20 bp, Artificial Sequence
  Description of Artificial Sequence: Synthetic oligonucleotide
  Target: LAMA2; (-) strand; PAM type: NNGRRT; PAM sequence: TTGAAT
gtttaaatctttaatccatc

SEQ ID NO: 17803 - DNA, 20 bp, Artificial Sequence
  Description of Artificial Sequence: Synthetic oligonucleotide
  Target: LAMA2; (-) strand; PAM type: NNGRRT; PAM sequence: TAGGGT
gtaatgcctaggttttcttc

SEQ ID NO: 17804 - DNA, 20 bp, Artificial Sequence
  Description of Artificial Sequence: Synthetic oligonucleotide
  Target: LAMA2; (-) strand; PAM type: NNGRRT; PAM sequence: CTGAAT
tccttgcccacgcctatgtc

SEQ ID NO: 17805 - DNA, 20 bp, Artificial Sequence
  Description of Artificial Sequence: Synthetic oligonucleotide
  Target: LAMA2; (-) strand; PAM type: NNGRRT; PAM sequence: ATGAGT
ggatattagccctttgtcag

SEQ ID NO: 17806 - DNA, 20 bp, Artificial Sequence
  Description of Artificial Sequence: Synthetic oligonucleotide
  Target: LAMA2; (-) strand; PAM type: NNGRRT; PAM sequence: CTGGAT
gtttgagttcattgtagatt

SEQ ID NO: 17807 - DNA, 20 bp, Artificial Sequence
  Description of Artificial Sequence: Synthetic oligonucleotide
  Target: LAMA2; (-) strand; PAM type: NNGRRT; PAM sequence: TTGAGT
tttttttcttgtaaatttgt

SEQ ID NO: 17808 - DNA, 20 bp, Artificial Sequence
  Description of Artificial Sequence: Synthetic oligonucleotide
  Target: LAMA2; (-) strand; PAM type: NNGRRT; PAM sequence: TGGGGT
gtccttcgcccactttttga

SEQ ID NO: 17809 - DNA, 20 bp, Artificial Sequence
  Description of Artificial Sequence: Synthetic oligonucleotide
  Target: LAMA2; (-) strand; PAM type: NNGRRT; PAM sequence: AGGAAT
tttctagttctagatccctg

SEQ ID NO: 17810 - DNA, 20 bp, Artificial Sequence
  Description of Artificial Sequence: Synthetic oligonucleotide
  Target: LAMA2; (-) strand; PAM type: NNGRRT; PAM sequence: CTGGGT
tatacccagtaatgggatgg

SEQ ID NO: 17811 - DNA, 20 bp, Artificial Sequence
  Description of Artificial Sequence: Synthetic oligonucleotide
  Target: LAMA2; (-) strand; PAM type: NNGRRT; PAM sequence: TGGGAT
tttgggtatatacccagtaa

SEQ ID NO: 17812 - DNA, 20 bp, Artificial Sequence
  Description of Artificial Sequence: Synthetic oligonucleotide
  Target: LAMA2; (-) strand; PAM type: NNGRRT; PAM sequence: TTGGGT
gcagcatgatttatactcat

SEQ ID NO: 17813 - DNA, 20 bp, Artificial Sequence
  Description of Artificial Sequence: Synthetic oligonucleotide
  Target: LAMA2; (-) strand; PAM type: NNGRRT; PAM sequence: GTGAAT
ggttccaagtctttgctatt

SEQ ID NO: 17814 - DNA, 20 bp, Artificial Sequence
  Description of Artificial Sequence: Synthetic oligonucleotide
  Target: LAMA2; (-) strand; PAM type: NNGRRT; PAM sequence: TTGGGT
agtctatcattgttggacat

SEQ ID NO: 17815 - DNA, 20 bp, Artificial Sequence
  Description of Artificial Sequence: Synthetic oligonucleotide
  Target: LAMA2; (-) strand; PAM type: NNGRRT; PAM sequence: AAGGAT
atttcatccatgtccctaca

SEQ ID NO: 17816 - DNA, 20 bp, Artificial Sequence
  Description of Artificial Sequence: Synthetic oligonucleotide
  Target: LAMA2; (-) strand; PAM type: NNGRRT; PAM sequence: GAGAAT
tgttcttgcgatagtttact

SEQ ID NO: 17817 - DNA, 20 bp, Artificial Sequence
  Description of Artificial Sequence: Synthetic oligonucleotide
  Target: LAMA2; (-) strand; PAM type: NNGRRT; PAM sequence: GAGAAT
ttcaattcccacctatgagt

SEQ ID NO: 17818 - DNA, 20 bp, Artificial Sequence
  Description of Artificial Sequence: Synthetic oligonucleotide
  Target: LAMA2; (-) strand; PAM type: NNGRRT; PAM sequence: ATGAGT
tcattgttcaattcccacct

SEQ ID NO: 17819 - DNA, 20 bp, Artificial Sequence
  Description of Artificial Sequence: Synthetic oligonucleotide
  Target: LAMA2; (-) strand; PAM type: NNGRRT; PAM sequence: CAGAGT
cccgaccccaccacagtccc

SEQ ID NO: 17820 - DNA, 20 bp, Artificial Sequence
  Description of Artificial Sequence: Synthetic oligonucleotide
  Target: LAMA2; (-) strand; PAM type: NNGRRT; PAM sequence: TAGGGT
tattattatactctaagttt

SEQ ID NO: 17821 - DNA, 20 bp, Artificial Sequence
  Description of Artificial Sequence: Synthetic oligonucleotide
  Target: LAMA2; (-) strand; PAM type: NNGRRT; PAM sequence: TTGAGT
actaaagtcaaagtaaggaa

SEQ ID NO: 17822 - DNA, 20 bp, Artificial Sequence
  Description of Artificial Sequence: Synthetic oligonucleotide
  Target: LAMA2; (-) strand; PAM type: NNGRRT; PAM sequence: AGGAAT
tgcaaactaaagtcaaagta

SEQ ID NO: 17823 - DNA, 20 bp, Artificial Sequence
  Description of Artificial Sequence: Synthetic oligonucleotide
  Target: LAMA2; (-) strand; PAM type: NNGRRT; PAM sequence: AGGAAT
acataatagtgtatagcatt

SEQ ID NO: 17824 - DNA, 20 bp, Artificial Sequence
  Description of Artificial Sequence: Synthetic oligonucleotide
  Target: LAMA2; (-) strand; PAM type: NNGRRT; PAM sequence: AAGGAT
atagaatattatgaagaatc

SEQ ID NO: 17825 - DNA, 20 bp, Artificial Sequence
  Description of Artificial Sequence: Synthetic oligonucleotide
  Target: LAMA2; (-) strand; PAM type: NNGRRT; PAM sequence: AAGAAT
ctggttaatagaatattatg

SEQ ID NO: 17826 - DNA, 20 bp, Artificial Sequence
  Description of Artificial Sequence: Synthetic oligonucleotide
  Target: LAMA2; (-) strand; PAM type: NNGRRT; PAM sequence: TAGAAT
aggtgttaagtgctggttaa

SEQ ID NO: 17827 - DNA, 20 bp, Artificial Sequence
  Description of Artificial Sequence: Synthetic oligonucleotide
  Target: LAMA2; (-) strand; PAM type: NNGRRT; PAM sequence: TCGGAT
atgaggttttacttgaaaat

SEQ ID NO: 17828 - DNA, 20 bp, Artificial Sequence
  Description of Artificial Sequence: Synthetic oligonucleotide
  Target: LAMA2; (-) strand; PAM type: NNGRRT; PAM sequence: ATGAAT
aaaagttttgaaagttagtg

SEQ ID NO: 17829 - DNA, 20 bp, Artificial Sequence
  Description of Artificial Sequence: Synthetic oligonucleotide
  Target: LAMA2; (-) strand; PAM type: NNGRRT; PAM sequence: ATGAAT
gcatgttttttctttccaga

SEQ ID NO: 17830 - DNA, 20 bp, Artificial Sequence
  Description of Artificial Sequence: Synthetic oligonucleotide
  Target: LAMA2; (-) strand; PAM type: NNGRRT; PAM sequence: CAGAAT
tccagcatgttttttctttc

SEQ ID NO: 17831 - DNA, 20 bp, Artificial Sequence
  Description of Artificial Sequence: Synthetic oligonucleotide
  Target: LAMA2; (-) strand; PAM type: NNGRRT; PAM sequence: TAGAGT
ttatttaaaataaaacacat

SEQ ID NO: 17832 - DNA, 20 bp, Artificial Sequence
  Description of Artificial Sequence: Synthetic oligonucleotide
  Target: LAMA2; (-) strand; PAM type: NNGRRT; PAM sequence: GAGAAT
aggaagggtgggaagagagg

SEQ ID NO: 17833 - DNA, 20 bp, Artificial Sequence
  Description of Artificial Sequence: Synthetic oligonucleotide
  Target: LAMA2; (-) strand; PAM type: NNGRRT; PAM sequence: AAGGGT
aggagatagggaagaaaagg

SEQ ID NO: 17834 - DNA, 20 bp, Artificial Sequence
  Description of Artificial Sequence: Synthetic oligonucleotide
  Target: LAMA2; (-) strand; PAM type: NNGRRT; PAM sequence: GAGAAT
gtgagatattagagtggtca

SEQ ID NO: 17835 - DNA, 20 bp, Artificial Sequence
  Description of Artificial Sequence: Synthetic oligonucleotide
  Target: LAMA2; (-) strand; PAM type: NNGRRT; PAM sequence: TAGAGT
aaatttctagggtgagatat

SEQ ID NO: 17836 - DNA, 20 bp, Artificial Sequence
  Description of Artificial Sequence: Synthetic oligonucleotide
  Target: LAMA2; (-) strand; PAM type: NNGRRT; PAM sequence: TAGGGT
aaatcatttattaaaatttc

SEQ ID NO: 17837 - DNA, 20 bp, Artificial Sequence
  Description of Artificial Sequence: Synthetic oligonucleotide
  Target: LAMA2; (-) strand; PAM type: NNGRRT; PAM sequence: GAGAAT
tttataataaaaagcctgat

SEQ ID NO: 17838 - DNA, 20 bp, Artificial Sequence
  Description of Artificial Sequence: Synthetic oligonucleotide
  Target: LAMA2; (-) strand; PAM type: NNGRRT; PAM sequence: ATGAAT
tcaaaaagttatctataccc

SEQ ID NO: 17839 - DNA, 20 bp, Artificial Sequence
  Description of Artificial Sequence: Synthetic oligonucleotide
  Target: LAMA2; (-) strand; PAM type: NNGRRT; PAM sequence: TGGGAT
taatttttatgtgttaagca

SEQ ID NO: 17840 - DNA, 20 bp, Artificial Sequence
  Description of Artificial Sequence: Synthetic oligonucleotide
  Target: LAMA2; (-) strand; PAM type: NNGRRT; PAM sequence: TAGAAT
tggattaatatatagaactt

SEQ ID NO: 17841 - DNA, 20 bp, Artificial Sequence
  Description of Artificial Sequence: Synthetic oligonucleotide
  Target: LAMA2; (-) strand; PAM type: NNGRRT; PAM sequence: TTGGAT
tcccccaagtagagacggct

SEQ ID NO: 17842 - DNA, 20 bp, Artificial Sequence
  Description of Artificial Sequence: Synthetic oligonucleotide
  Target: LAMA2; (-) strand; PAM type: NNGRRT; PAM sequence: GGGGGT
atggacacttttcaaaatta

SEQ ID NO: 17843 - DNA, 20 bp, Artificial Sequence
  Description of Artificial Sequence: Synthetic oligonucleotide
  Target: LAMA2; (-) strand; PAM type: NNGRRT; PAM sequence: TTGAAT
atagatttactgtatactga

SEQ ID NO: 17844 - DNA, 20 bp, Artificial Sequence
  Description of Artificial Sequence: Synthetic oligonucleotide
  Target: LAMA2; (-) strand; PAM type: NNGRRT; PAM sequence: TCGGGT
tcaaggcaagaatgtttgaa

SEQ ID NO: 17845 - DNA, 20 bp, Artificial Sequence
  Description of Artificial Sequence: Synthetic oligonucleotide
  Target: LAMA2; (-) strand; PAM type: NNGRRT; PAM sequence: TTGAAT
taagatcaaggcaagaatgt

SEQ ID NO: 17846 - DNA, 20 bp, Artificial Sequence
  Description of Artificial Sequence: Synthetic oligonucleotide
  Target: LAMA2; (-) strand; PAM type: NNGRRT; PAM sequence: AAGAAT
ccagcctctaagatcaaggc

SEQ ID NO: 17847 - DNA, 20 bp, Artificial Sequence
  Description of Artificial Sequence: Synthetic oligonucleotide
  Target: LAMA2; (-) strand; PAM type: NNGRRT; PAM sequence: GTGAAT
ctcatggtgtggataaatgg

SEQ ID NO: 17848 - DNA, 20 bp, Artificial Sequence
  Description of Artificial Sequence: Synthetic oligonucleotide
  Target: LAMA2; (-) strand; PAM type: NNGRRT; PAM sequence: ATGGGT
atggctcatggtgtggataa

SEQ ID NO: 17849 - DNA, 20 bp, Artificial Sequence
  Description of Artificial Sequence: Synthetic oligonucleotide
  Target: LAMA2; (-) strand; PAM type: NNGRRT; PAM sequence: GTGGAT
tccacagtatggctcatggt

SEQ ID NO: 17850 - DNA, 20 bp, Artificial Sequence
  Description of Artificial Sequence: Synthetic oligonucleotide
  Target: LAMA2; (-) strand; PAM type: NNGRRT; PAM sequence: GTGGAT
ctgcaggagttggtggctga

SEQ ID NO: 17851 - DNA, 20 bp, Artificial Sequence
  Description of Artificial Sequence: Synthetic oligonucleotide
  Target: LAMA2; (-) strand; PAM type: NNGRRT; PAM sequence: CTGAGT
gcacctgcaggagttggtgg

SEQ ID NO: 17852 - DNA, 20 bp, Artificial Sequence
  Description of Artificial Sequence: Synthetic oligonucleotide
  Target: LAMA2; (-) strand; PAM type: NNGRRT; PAM sequence: AGGAGT
tggaaagaggcagcacctgc

SEQ ID NO: 17853 - DNA, 20 bp, Artificial Sequence
  Description of Artificial Sequence: Synthetic oligonucleotide
  Target: LAMA2; (-) strand; PAM type: NNGRRT; PAM sequence: CTGAAT
agggcagaaatatttagatt

SEQ ID NO: 17854 - DNA, 20 bp, Artificial Sequence
  Description of Artificial Sequence: Synthetic oligonucleotide
  Target: LAMA2; (-) strand; PAM type: NNGRRT; PAM sequence: AGGAAT
aagcaggaatgacagatgaa

SEQ ID NO: 17855 - DNA, 20 bp, Artificial Sequence
  Description of Artificial Sequence: Synthetic oligonucleotide
  Target: LAMA2; (-) strand; PAM type: NNGRRT; PAM sequence: AGGAAT
gccctaggagagtattaagc

SEQ ID NO: 17856 - DNA, 20 bp, Artificial Sequence
  Description of Artificial Sequence: Synthetic oligonucleotide
  Target: LAMA2; (-) strand; PAM type: NNGRRT; PAM sequence: GAGAGT
gacacgatggagagccctag

SEQ ID NO: 17857 - DNA, 20 bp, Artificial Sequence
  Description of Artificial Sequence: Synthetic oligonucleotide
  Target: LAMA2; (-) strand; PAM type: NNGRRT; PAM sequence: GGGGAT
gatggagatctgattacaaa

SEQ ID NO: 17858 - DNA, 20 bp, Artificial Sequence
  Description of Artificial Sequence: Synthetic oligonucleotide
  Target: LAMA2; (-) strand; PAM type: NNGRRT; PAM sequence: CAGAGT
ggtacactgcccagcaactg

SEQ ID NO: 17859 - DNA, 20 bp, Artificial Sequence
  Description of Artificial Sequence: Synthetic oligonucleotide
  Target: LAMA2; (-) strand; PAM type: NNGRRT; PAM sequence: GCGGGT
gatagcctgcaggaaagcat

SEQ ID NO: 17860 - DNA, 20 bp, Artificial Sequence
  Description of Artificial Sequence: Synthetic oligonucleotide
  Target: LAMA2; (-) strand; PAM type: NNGRRT; PAM sequence: TGGGAT
tttaggagaagagagtcaga

SEQ ID NO: 17861 - DNA, 20 bp, Artificial Sequence
  Description of Artificial Sequence: Synthetic oligonucleotide
  Target: LAMA2; (-) strand; PAM type: NNGRRT; PAM sequence: GAGAGT
tatggtgaggtttaggagaa

SEQ ID NO: 17862 - DNA, 20 bp, Artificial Sequence
  Description of Artificial Sequence: Synthetic oligonucleotide
  Target: LAMA2; (-) strand; PAM type: NNGRRT; PAM sequence: CAGGAT
aggggtggttgttcaggaat

SEQ ID NO: 17863 - DNA, 20 bp, Artificial Sequence
  Description of Artificial Sequence: Synthetic oligonucleotide
  Target: LAMA2; (-) strand; PAM type: NNGRRT; PAM sequence: AGGAAT
gcacaaaggggtggttgttc

SEQ ID NO: 17864 - DNA, 20 bp, Artificial Sequence
  Description of Artificial Sequence: Synthetic oligonucleotide
  Target: LAMA2; (-) strand; PAM type: NNGRRT; PAM sequence: AGGGGT
aaagacctttgtgagcacaa

SEQ ID NO: 17865 - DNA, 20 bp, Artificial Sequence
  Description of Artificial Sequence: Synthetic oligonucleotide
  Target: LAMA2; (-) strand; PAM type: NNGRRT; PAM sequence: TAGGGT
cagtgctgccaagaggtgct

SEQ ID NO: 17866 - DNA, 20 bp, Artificial Sequence
  Description of Artificial Sequence: Synthetic oligonucleotide
  Target: LAMA2; (-) strand; PAM type: NNGRRT; PAM sequence: CAGAGT
ggaaacacacagatgacaga

SEQ ID NO: 17867 - DNA, 20 bp, Artificial Sequence
  Description of Artificial Sequence: Synthetic oligonucleotide
  Target: LAMA2; (-) strand; PAM type: NNGRRT; PAM sequence: TAGAAT
atgggaagatgaatagcatc

SEQ ID NO: 17868 - DNA, 20 bp, Artificial Sequence
  Description of Artificial Sequence: Synthetic oligonucleotide
  Target: LAMA2; (-) strand; PAM type: NNGRRT; PAM sequence: ATGAAT
aagcaatttaatatgggaag

SEQ ID NO: 17869 - DNA, 20 bp, Artificial Sequence
  Description of Artificial Sequence: Synthetic oligonucleotide
  Target: LAMA2; (-) strand; PAM type: NNGRRT; PAM sequence: GAGGAT
aaatagacttcagtgccaca

SEQ ID NO: 17870 - DNA, 20 bp, Artificial Sequence
  Description of Artificial Sequence: Synthetic oligonucleotide
  Target: LAMA2; (-) strand; PAM type: NNGRRT; PAM sequence: TAGAAT
tactgaacaaaaaagttcct

SEQ ID NO: 17871 - DNA, 20 bp, Artificial Sequence
  Description of Artificial Sequence: Synthetic oligonucleotide
  Target: LAMA2; (-) strand; PAM type: NNGRRT; PAM sequence: AAGGAT
gcagcctaaaatggagtaag

SEQ ID NO: 17872 - DNA, 20 bp, Artificial Sequence
  Description of Artificial Sequence: Synthetic oligonucleotide
  Target: LAMA2; (-) strand; PAM type: NNGRRT; PAM sequence: TGGAGT
aaaaaaatggcagcctaaaa

SEQ ID NO: 17873 - DNA, 20 bp, Artificial Sequence
  Description of Artificial Sequence: Synthetic oligonucleotide
  Target: LAMA2; (-) strand; PAM type: NNGRRT; PAM sequence: ATGAAT
agcaggatctccatcatctg

SEQ ID NO: 17874 - DNA, 20 bp, Artificial Sequence
  Description of Artificial Sequence: Synthetic oligonucleotide
  Target: LAMA2; (-) strand; PAM type: NNGRRT; PAM sequence: CAGGAT
caggttgcatgaaacgccag

SEQ ID NO: 17875 - DNA, 20 bp, Artificial Sequence
  Description of Artificial Sequence: Synthetic oligonucleotide
  Target: LAMA2; (-) strand; PAM type: NNGRRT; PAM sequence: AAGGAT
aatggtgaaggaagcttctc

SEQ ID NO: 17876 - DNA, 20 bp, Artificial Sequence
  Description of Artificial Sequence: Synthetic oligonucleotide
  Target: LAMA2; (-) strand; PAM type: NNGRRT; PAM sequence: CAGAGT
cttacgtcagtaaatgcaca

SEQ ID NO: 17877 - DNA, 20 bp, Artificial Sequence
  Description of Artificial Sequence: Synthetic oligonucleotide
  Target: LAMA2; (-) strand; PAM type: NNGRRT; PAM sequence: AGGAGT
atattaccttctatccccaa

SEQ ID NO: 17878 - DNA, 20 bp, Artificial Sequence
  Description of Artificial Sequence: Synthetic oligonucleotide
  Target: LAMA2; (-) strand; PAM type: NNGRRT; PAM sequence: GTGGGT
tttctcttgtataatagcat

SEQ ID NO: 17879 - DNA, 20 bp, Artificial Sequence
  Description of Artificial Sequence: Synthetic oligonucleotide
  Target: LAMA2; (-) strand; PAM type: NNGRRT; PAM sequence: CAGGGT
tagcaatatttccactctcc

SEQ ID NO: 17880 - DNA, 20 bp, Artificial Sequence
  Description of Artificial Sequence: Synthetic oligonucleotide
  Target: LAMA2; (-) strand; PAM type: NNGRRT; PAM sequence: AAGAAT
tagtctctcactagtaaaat

SEQ ID NO: 17881 - DNA, 20 bp, Artificial Sequence
  Description of Artificial Sequence: Synthetic oligonucleotide
  Target: LAMA2; (-) strand; PAM type: NNGRRT; PAM sequence: CGGGAT
gctttgtattcatgtagacc

SEQ ID NO: 17882 - DNA, 20 bp, Artificial Sequence
  Description of Artificial Sequence: Synthetic oligonucleotide
  Target: LAMA2; (-) strand; PAM type: NNGRRT; PAM sequence: AAGGAT
aagaggtagagaaacactga

SEQ ID NO: 17883 - DNA, 20 bp, Artificial Sequence
  Description of Artificial Sequence: Synthetic oligonucleotide
  Target: LAMA2; (-) strand; PAM type: NNGRRT; PAM sequence: TGGAAT
cctgactgtatcaccatttc

SEQ ID NO: 17884 - DNA, 20 bp, Artificial Sequence
  Description of Artificial Sequence: Synthetic oligonucleotide
  Target: LAMA2; (-) strand; PAM type: NNGRRT; PAM sequence: GTGAAT
gaagattaagttgatgctgt

SEQ ID NO: 17885 - DNA, 20 bp, Artificial Sequence
  Description of Artificial Sequence: Synthetic oligonucleotide
  Target: LAMA2; (-) strand; PAM type: NNGRRT; PAM sequence: CTGGGT
tgcagtaagtacactacatc

SEQ ID NO: 17886 - DNA, 20 bp, Artificial Sequence
  Description of Artificial Sequence: Synthetic oligonucleotide
  Target: LAMA2; (-) strand; PAM type: NNGRRT; PAM sequence: TTGAAT
agtcatttctatctgggtct

SEQ ID NO: 17887 - DNA, 20 bp, Artificial Sequence
  Description of Artificial Sequence: Synthetic oligonucleotide
  Target: LAMA2; (-) strand; PAM type: NNGRRT; PAM sequence: CTGGGT
ctaaaatcagtcatttctat

SEQ ID NO: 17888 - DNA, 20 bp, Artificial Sequence
  Description of Artificial Sequence: Synthetic oligonucleotide
  Target: LAMA2; (-) strand; PAM type: NNGRRT; PAM sequence: ATGAAT
gagatattgatatgtttaac

SEQ ID NO: 17889 - DNA, 20 bp, Artificial Sequence
  Description of Artificial Sequence: Synthetic oligonucleotide
  Target: LAMA2; (-) strand; PAM type: NNGRRT; PAM sequence: AAGAGT
actgatcctcagtttgacta

SEQ ID NO: 17890 - DNA, 20 bp, Artificial Sequence
  Description of Artificial Sequence: Synthetic oligonucleotide
  Target: LAMA2; (-) strand; PAM type: NNGRRT; PAM sequence: CTGGGT
attatttcagagattatggt

SEQ ID NO: 17891 - DNA, 20 bp, Artificial Sequence
  Description of Artificial Sequence: Synthetic oligonucleotide
  Target: LAMA2; (-) strand; PAM type: NNGRRT; PAM sequence: AAGAAT
gtcataaaactcagttttta

SEQ ID NO: 17892 - DNA, 20 bp, Artificial Sequence
  Description of Artificial Sequence: Synthetic oligonucleotide
  Target: LAMA2; (-) strand; PAM type: NNGRRT; PAM sequence: TTGAAT
ctgaagcatgttgtgacttt

SEQ ID NO: 17893 - DNA, 20 bp, Artificial Sequence
  Description of Artificial Sequence: Synthetic oligonucleotide
  Target: LAMA2; (-) strand; PAM type: NNGRRT; PAM sequence: ATGGAT
ttctaatttctattttcaca

SEQ ID NO: 17894 - DNA, 20 bp, Artificial Sequence
  Description of Artificial Sequence: Synthetic oligonucleotide
  Target: LAMA2; (-) strand; PAM type: NNGRRT; PAM sequence: ATGAAT
aaagtgctcatttgcaatct

SEQ ID NO: 17895 - DNA, 20 bp, Artificial Sequence
  Description of Artificial Sequence: Synthetic oligonucleotide
  Target: LAMA2; (-) strand; PAM type: NNGRRT; PAM sequence: AAGGGT
gtgcctgagataccatattc

SEQ ID NO: 17896 - DNA, 20 bp, Artificial Sequence
  Description of Artificial Sequence: Synthetic oligonucleotide
  Target: LAMA2; (-) strand; PAM type: NNGRRT; PAM sequence: AAGAAT
gaagacagctggtaggcggt

SEQ ID NO: 17897 - DNA, 20 bp, Artificial Sequence
  Description of Artificial Sequence: Synthetic oligonucleotide
  Target: LAMA2; (-) strand; PAM type: NNGRRT; PAM sequence: ATGAGT
tctccagagccatgcatttt

SEQ ID NO: 17898 - DNA, 20 bp, Artificial Sequence
  Description of Artificial Sequence: Synthetic oligonucleotide
  Target: LAMA2; (-) strand; PAM type: NNGRRT; PAM sequence: GAGGAT
tcaaaagcagaggtgggaaa

SEQ ID NO: 17899 - DNA, 20 bp, Artificial Sequence
  Description of Artificial Sequence: Synthetic oligonucleotide
  Target: LAMA2; (-) strand; PAM type: NNGRRT; PAM sequence: TAGAAT
tgaaacactgagccataagc

SEQ ID NO: 17900 - DNA, 20 bp, Artificial Sequence
  Description of Artificial Sequence: Synthetic oligonucleotide
  Target: LAMA2; (-) strand; PAM type: NNGRRT; PAM sequence: CAGAAT
ctgctggcaaacaagtgctg

SEQ ID NO: 17901 - DNA, 20 bp, Artificial Sequence
  Description of Artificial Sequence: Synthetic oligonucleotide
  Target: LAMA2; (-) strand; PAM type: NNGRRT; PAM sequence: TAGAAT
gatcattctggttcaccagg

SEQ ID NO: 17902 - DNA, 20 bp, Artificial Sequence
  Description of Artificial Sequence: Synthetic oligonucleotide
  Target: LAMA2; (-) strand; PAM type: NNGRRT; PAM sequence: CAGGAT
agtctgtcccaagatatatg

SEQ ID NO: 17903 - DNA, 20 bp, Artificial Sequence
  Description of Artificial Sequence: Synthetic oligonucleotide
  Target: LAMA2; (-) strand; PAM type: NNGRRT; PAM sequence: GAGAAT
cttttcatgcatgtttggta

SEQ ID NO: 17904 - DNA, 20 bp, Artificial Sequence
  Description of Artificial Sequence: Synthetic oligonucleotide
  Target: LAMA2; (-) strand; PAM type: NNGRRT; PAM sequence: GAGAAT
aatcccttttctcttgagga

SEQ ID NO: 17905 - DNA, 20 bp, Artificial Sequence
  Description of Artificial Sequence: Synthetic oligonucleotide
  Target: LAMA2; (-) strand; PAM type: NNGRRT; PAM sequence: TTGAAT
taaagtaggcaaaagatatg

SEQ ID NO: 17906 - DNA, 20 bp, Artificial Sequence
  Description of Artificial Sequence: Synthetic oligonucleotide
  Target: LAMA2; (-) strand; PAM type: NNGRRT; PAM sequence: TAGAGT
tcaatttcacgttatgacct

SEQ ID NO: 17907 - DNA, 20 bp, Artificial Sequence
  Description of Artificial Sequence: Synthetic oligonucleotide
  Target: LAMA2; (-) strand; PAM type: NNGRRT; PAM sequence: AAGGGT
aaatgccattctataccagg

SEQ ID NO: 17908 - DNA, 20 bp, Artificial Sequence
  Description of Artificial Sequence: Synthetic oligonucleotide
  Target: LAMA2; (-) strand; PAM type: NNGRRT; PAM sequence: AGGAGT
aaacacatatttggacaagt

SEQ ID NO: 17909 - DNA, 20 bp, Artificial Sequence
  Description of Artificial Sequence: Synthetic oligonucleotide
  Target: LAMA2; (-) strand; PAM type: NNGRRT; PAM sequence: TAGAAT
agaacctccaaaacatcatc

SEQ ID NO: 17910 - DNA, 20 bp, Artificial Sequence
  Description of Artificial Sequence: Synthetic oligonucleotide
  Target: LAMA2; (-) strand; PAM type: NNGRRT; PAM sequence: ATGGGT
acacgcgaatatatagggat

SEQ ID NO: 17911 - DNA, 20 bp, Artificial Sequence
  Description of Artificial Sequence: Synthetic oligonucleotide
  Target: LAMA2; (-) strand; PAM type: NNGRRT; PAM sequence: AGGGAT
aagtgaacacgcgaatatat

SEQ ID NO: 17912 - DNA, 20 bp, Artificial Sequence
  Description of Artificial Sequence: Synthetic oligonucleotide
  Target: LAMA2; (-) strand; PAM type: NNGRRT; PAM sequence: GCGAAT
ttgaaatcaaaagtgaacac

SEQ ID NO: 17913 - DNA, 20 bp, Artificial Sequence
  Description of Artificial Sequence: Synthetic oligonucleotide
  Target: LAMA2; (-) strand; PAM type: NNGRRT; PAM sequence: AAGAAT
actccatctcaaagaaaaaa

SEQ ID NO: 17914 - DNA, 20 bp, Artificial Sequence
  Description of Artificial Sequence: Synthetic oligonucleotide
  Target: LAMA2; (-) strand; PAM type: NNGRRT; PAM sequence: GGGGGT
aagccactgcactccagcca

SEQ ID NO: 17915 - DNA, 20 bp, Artificial Sequence
  Description of Artificial Sequence: Synthetic oligonucleotide
  Target: LAMA2; (-) strand; PAM type: NNGRRT; PAM sequence: GAGAAT
tactcgggaggctgaggcag

SEQ ID NO: 17916 - DNA, 20 bp, Artificial Sequence
  Description of Artificial Sequence: Synthetic oligonucleotide
  Target: LAMA2; (-) strand; PAM type: NNGRRT; PAM sequence: AAGAAT
ccacatggataaatgggatt

SEQ ID NO: 17917 - DNA, 20 bp, Artificial Sequence
  Description of Artificial Sequence: Synthetic oligonucleotide
  Target: LAMA2; (-) strand; PAM type: NNGRRT; PAM sequence: TGGGAT
atattctccacatggataaa

SEQ ID NO: 17918 - DNA, 20 bp, Artificial Sequence
  Description of Artificial Sequence: Synthetic oligonucleotide
  Target: LAMA2; (-) strand; PAM type: NNGRRT; PAM sequence: ATGGAT
cagggtgacatattctccac

SEQ ID NO: 17919 - DNA, 20 bp, Artificial Sequence
  Description of Artificial Sequence: Synthetic oligonucleotide
  Target: LAMA2; (-) strand; PAM type: NNGRRT; PAM sequence: CAGGGT
ggtttgcaaagtgaaatgag

SEQ ID NO: 17920 - DNA, 20 bp, Artificial Sequence
  Description of Artificial Sequence: Synthetic oligonucleotide
  Target: LAMA2; (-) strand; PAM type: NNGRRT; PAM sequence: AAGAAT
aagagaaggagagaggtaca

SEQ ID NO: 17921 - DNA, 20 bp, Artificial Sequence
  Description of Artificial Sequence: Synthetic oligonucleotide
  Target: LAMA2; (-) strand; PAM type: NNGRRT; PAM sequence: ATGGAT
ttgataaatgtgcaaagggc

SEQ ID NO: 17922 - DNA, 20 bp, Artificial Sequence
  Description of Artificial Sequence: Synthetic oligonucleotide
  Target: LAMA2; (-) strand; PAM type: NNGRRT; PAM sequence: AAGAGT
gagccacctgggcacagagt

SEQ ID NO: 17923 - DNA, 20 bp, Artificial Sequence
  Description of Artificial Sequence: Synthetic oligonucleotide
  Target: LAMA2; (-) strand; PAM type: NNGRRT; PAM sequence: CAGAGT
atggacgagccacctgggca

SEQ ID NO: 17924 - DNA, 20 bp, Artificial Sequence
  Description of Artificial Sequence: Synthetic oligonucleotide
  Target: LAMA2; (-) strand; PAM type: NNGRRT; PAM sequence: AAGAGT
ctctcagaatgggatatttt

SEQ ID NO: 17925 - DNA, 20 bp, Artificial Sequence
  Description of Artificial Sequence: Synthetic oligonucleotide
  Target: LAMA2; (-) strand; PAM type: NNGRRT; PAM sequence: TGGGAT
agaaacatgtgctctcagaa

SEQ ID NO: 17926 - DNA, 20 bp, Artificial Sequence
  Description of Artificial Sequence: Synthetic oligonucleotide
  Target: LAMA2; (-) strand; PAM type: NNGRRT; PAM sequence: CAGAAT
ctaagagaaacatgtgctct

SEQ ID NO: 17927 - DNA, 20 bp, Artificial Sequence
  Description of Artificial Sequence: Synthetic oligonucleotide
  Target: LAMA2; (-) strand; PAM type: NNGRRT; PAM sequence: CGGAGT
gcctactgaccctgaaagtc

SEQ ID NO: 17928 - DNA, 20 bp, Artificial Sequence
  Description of Artificial Sequence: Synthetic oligonucleotide
  Target: LAMA2; (-) strand; PAM type: NNGRRT; PAM sequence: ATGAAT
ccatcccttttccacttaaa

SEQ ID NO: 17929 - DNA, 20 bp, Artificial Sequence
  Description of Artificial Sequence: Synthetic oligonucleotide
  Target: LAMA2; (-) strand; PAM type: NNGRRT; PAM sequence: TAGGAT
gataaaacttatcaaaaaca

SEQ ID NO: 17930 - DNA, 20 bp, Artificial Sequence
  Description of Artificial Sequence: Synthetic oligonucleotide
  Target: LAMA2; (-) strand; PAM type: NNGRRT; PAM sequence: AAGAGT
caagggtgaagaatataaac

SEQ ID NO: 17931 - DNA, 20 bp, Artificial Sequence
  Description of Artificial Sequence: Synthetic oligonucleotide
  Target: LAMA2; (-) strand; PAM type: NNGRRT; PAM sequence: AAGAAT
gtagaaggaacacaagggtg

SEQ ID NO: 17932 - DNA, 20 bp, Artificial Sequence
  Description of Artificial Sequence: Synthetic oligonucleotide
  Target: LAMA2; (-) strand; PAM type: NNGRRT; PAM sequence: AAGGGT
gtcctgagtagaaggaacac

SEQ ID NO: 17933 - DNA, 20 bp, Artificial Sequence
  Description of Artificial Sequence: Synthetic oligonucleotide
  Target: LAMA2; (-) strand; PAM type: NNGRRT; PAM sequence: CTGAGT
tgagcatttacaatggagtc

SEQ ID NO: 17934 - DNA, 20 bp, Artificial Sequence
  Description of Artificial Sequence: Synthetic oligonucleotide
  Target: LAMA2; (-) strand; PAM type: NNGRRT; PAM sequence: TGGAGT
ttaatcctgagcatttacaa

SEQ ID NO: 17935 - DNA, 20 bp, Artificial Sequence
  Description of Artificial Sequence: Synthetic oligonucleotide
  Target: LAMA2; (-) strand; PAM type: NNGRRT; PAM sequence: GTGGAT
aagcatattccctcatggtg

SEQ ID NO: 17936 - DNA, 20 bp, Artificial Sequence
  Description of Artificial Sequence: Synthetic oligonucleotide
  Target: LAMA2; (-) strand; PAM type: NNGRRT; PAM sequence: GTGAGT
ataactattaataacagtga

SEQ ID NO: 17937 - DNA, 20 bp, Artificial Sequence
  Description of Artificial Sequence: Synthetic oligonucleotide
  Target: LAMA2; (-) strand; PAM type: NNGRRT; PAM sequence: GTGAGT
aaaaataactattaataaca

SEQ ID NO: 17938 - DNA, 20 bp, Artificial Sequence
  Description of Artificial Sequence: Synthetic oligonucleotide
  Target: LAMA2; (-) strand; PAM type: NNGRRT; PAM sequence: TGGGGT
agttcggggttatttacaga

SEQ ID NO: 17939 - DNA, 20 bp, Artificial Sequence
  Description of Artificial Sequence: Synthetic oligonucleotide
  Target: LAMA2; (-) strand; PAM type: NNGRRT; PAM sequence: CGGGGT
gtgatgacagtataggagtt

SEQ ID NO: 17940 - DNA, 20 bp, Artificial Sequence
  Description of Artificial Sequence: Synthetic oligonucleotide
  Target: LAMA2; (-) strand; PAM type: NNGRRT; PAM sequence: AGGAGT
aacaaaggtgatgacagtat

SEQ ID NO: 17941 - DNA, 20 bp, Artificial Sequence
  Description of Artificial Sequence: Synthetic oligonucleotide
  Target: LAMA2; (-) strand; PAM type: NNGRRT; PAM sequence: CAGAAT
ataaatgtatactttatcca

SEQ ID NO: 17942 - DNA, 20 bp, Artificial Sequence
  Description of Artificial Sequence: Synthetic oligonucleotide
  Target: LAMA2; (-) strand; PAM type: NNGRRT; PAM sequence: AGGAAT
cctgtaaatagtcaagaaaa

SEQ ID NO: 17943 - DNA, 20 bp, Artificial Sequence
  Description of Artificial Sequence: Synthetic oligonucleotide
  Target: LAMA2; (-) strand; PAM type: NNGRRT; PAM sequence: TTGAAT
tatttgcataatccattagc

SEQ ID NO: 17944 - DNA, 20 bp, Artificial Sequence
  Description of Artificial Sequence: Synthetic oligonucleotide
  Target: LAMA2; (-) strand; PAM type: NNGRRT; PAM sequence: CAGAAT
gaagaaccagaaaaaagata

SEQ ID NO: 17945 - DNA, 20 bp, Artificial Sequence
  Description of Artificial Sequence: Synthetic oligonucleotide
  Target: LAMA2; (-) strand; PAM type: NNGRRT; PAM sequence: GTGGGT
attagtgagggccaagcaca

SEQ ID NO: 17946 - DNA, 20 bp, Artificial Sequence
  Description of Artificial Sequence: Synthetic oligonucleotide
  Target: LAMA2; (-) strand; PAM type: NNGRRT; PAM sequence: AGGAAT
ggaaattcagctgctcattg

SEQ ID NO: 17947 - DNA, 20 bp, Artificial Sequence
  Description of Artificial Sequence: Synthetic oligonucleotide
  Target: LAMA2; (-) strand; PAM type: NNGRRT; PAM sequence: GTGAGT
aatttgctttatctctaaaa

SEQ ID NO: 17948 - DNA, 20 bp, Artificial Sequence
  Description of Artificial Sequence: Synthetic oligonucleotide
  Target: LAMA2; (-) strand; PAM type: NNGRRT; PAM sequence: TGGGAT
gcctcagcctcccaaagtgc

SEQ ID NO: 17949 - DNA, 20 bp, Artificial Sequence
  Description of Artificial Sequence: Synthetic oligonucleotide
  Target: LAMA2; (-) strand; PAM type: NNGRRT; PAM sequence: CAGGAT
cggggtttcaccgtggtagc

SEQ ID NO: 17950 - DNA, 20 bp, Artificial Sequence
  Description of Artificial Sequence: Synthetic oligonucleotide
  Target: LAMA2; (-) strand; PAM type: NNGRRT; PAM sequence: CGGGGT
ttttggatttttagtagaga

SEQ ID NO: 17951 - DNA, 20 bp, Artificial Sequence
  Description of Artificial Sequence: Synthetic oligonucleotide
  Target: LAMA2; (-) strand; PAM type: NNGRRT; PAM sequence: TTGGAT
ccacgccgggctaatttttt

SEQ ID NO: 17952 - DNA, 20 bp, Artificial Sequence
  Description of Artificial Sequence: Synthetic oligonucleotide
  Target: LAMA2; (-) strand; PAM type: NNGRRT; PAM sequence: CCGAGT
cattctcctgcctcagcctc

SEQ ID NO: 17953 - DNA, 20 bp, Artificial Sequence
  Description of Artificial Sequence: Synthetic oligonucleotide
  Target: LAMA2; (-) strand; PAM type: NNGRRT; PAM sequence: CCGGGT
ctccctgcaggctccgcctc

SEQ ID NO: 17954 - DNA, 20 bp, Artificial Sequence
  Description of Artificial Sequence: Synthetic oligonucleotide
  Target: LAMA2; (-) strand; PAM type: NNGRRT; PAM sequence: TGGAGT
aaatttttttttttttgaga

SEQ ID NO: 17955 - DNA, 20 bp, Artificial Sequence
  Description of Artificial Sequence: Synthetic oligonucleotide
  Target: LAMA2; (-) strand; PAM type: NNGRRT; PAM sequence: GTGGGT
tactatgctggtttctttta

SEQ ID NO: 17956 - DNA, 20 bp, Artificial Sequence
  Description of Artificial Sequence: Synthetic oligonucleotide
  Target: LAMA2; (-) strand; PAM type: NNGRRT; PAM sequence: TTGGAT
ttctttctaaaatagagaca

SEQ ID NO: 17957 - DNA, 20 bp, Artificial Sequence
  Description of Artificial Sequence: Synthetic oligonucleotide
  Target: LAMA2; (-) strand; PAM type: NNGRRT; PAM sequence: AAGAAT
catctctacttaaaatctac

SEQ ID NO: 17958 - DNA, 20 bp, Artificial Sequence
  Description of Artificial Sequence: Synthetic oligonucleotide
  Target: LAMA2; (-) strand; PAM type: NNGRRT; PAM sequence: GAGAAT
ttattctctattctcatata

SEQ ID NO: 17959 - DNA, 20 bp, Artificial Sequence
  Description of Artificial Sequence: Synthetic oligonucleotide
  Target: LAMA2; (-) strand; PAM type: NNGRRT; PAM sequence: GGGGAT
atccaagctgccattataat

SEQ ID NO: 17960 - DNA, 20 bp, Artificial Sequence
  Description of Artificial Sequence: Synthetic oligonucleotide
  Target: LAMA2; (-) strand; PAM type: NNGRRT; PAM sequence: TAGAAT
agttgctcaagacaaaaatc

SEQ ID NO: 17961 - DNA, 20 bp, Artificial Sequence
  Description of Artificial Sequence: Synthetic oligonucleotide
  Target: LAMA2; (-) strand; PAM type: NNGRRT; PAM sequence: CCGAAT
gtgtaaaaaatacacaggat

SEQ ID NO: 17962 - DNA, 20 bp, Artificial Sequence
  Description of Artificial Sequence: Synthetic oligonucleotide
  Target: LAMA2; (-) strand; PAM type: NNGRRT; PAM sequence: CAGGAT
aggccagtgtaaaaaataca

SEQ ID NO: 17963 - DNA, 20 bp, Artificial Sequence
  Description of Artificial Sequence: Synthetic oligonucleotide
  Target: LAMA2; (-) strand; PAM type: NNGRRT; PAM sequence: ATGAAT
caacaaatacttgtgtacaa

SEQ ID NO: 17964 - DNA, 20 bp, Artificial Sequence
  Description of Artificial Sequence: Synthetic oligonucleotide
  Target: LAMA2; (-) strand; PAM type: NNGRRT; PAM sequence: TAGGAT
tgctgctgaaatctggagaa

SEQ ID NO: 17965 - DNA, 20 bp, Artificial Sequence
  Description of Artificial Sequence: Synthetic oligonucleotide
  Target: LAMA2; (-) strand; PAM type: NNGRRT; PAM sequence: GAGAAT
tctgatgctgctgaaatctg

SEQ ID NO: 17966 - DNA, 20 bp, Artificial Sequence
  Description of Artificial Sequence: Synthetic oligonucleotide
  Target: LAMA2; (-) strand; PAM type: NNGRRT; PAM sequence: GGGGAT
gtacacagaaaatgtaacta

SEQ ID NO: 17967 - DNA, 20 bp, Artificial Sequence
  Description of Artificial Sequence: Synthetic oligonucleotide
  Target: LAMA2; (-) strand; PAM type: NNGRRT; PAM sequence: CAGAAT
acagtgtagcacactgtgta

SEQ ID NO: 17968 - DNA, 20 bp, Artificial Sequence
  Description of Artificial Sequence: Synthetic oligonucleotide
  Target: LAMA2; (-) strand; PAM type: NNGRRT; PAM sequence: TTGAAT
attattgggggagctgaggt

SEQ ID NO: 17969 - DNA, 20 bp, Artificial Sequence
  Description of Artificial Sequence: Synthetic oligonucleotide
  Target: LAMA2; (-) strand; PAM type: NNGRRT; PAM sequence: TAGAGT
gtgatatactcattattgat

SEQ ID NO: 17970 - DNA, 20 bp, Artificial Sequence
  Description of Artificial Sequence: Synthetic oligonucleotide
  Target: LAMA2; (-) strand; PAM type: NNGRRT; PAM sequence: TGGAAT
tgggaaaacattagttactt

SEQ ID NO: 17971 - DNA, 20 bp, Artificial Sequence
  Description of Artificial Sequence: Synthetic oligonucleotide
  Target: LAMA2; (-) strand; PAM type: NNGRRT; PAM sequence: CTGAGT
taatttcagacaaagttatt

SEQ ID NO: 17972 - DNA, 20 bp, Artificial Sequence
  Description of Artificial Sequence: Synthetic oligonucleotide
  Target: LAMA2; (-) strand; PAM type: NNGRRT; PAM sequence: CTGAAT
gtacatccaaataagattac

SEQ ID NO: 17973 - DNA, 20 bp, Artificial Sequence
  Description of Artificial Sequence: Synthetic oligonucleotide
  Target: LAMA2; (-) strand; PAM type: NNGRRT; PAM sequence: AGGAAT
ctgtatgtgtttttaggaag

SEQ ID NO: 17974 - DNA, 20 bp, Artificial Sequence
  Description of Artificial Sequence: Synthetic oligonucleotide
  Target: LAMA2; (-) strand; PAM type: NNGRRT; PAM sequence: TAGAAT
tatatgccactagtgcttct

SEQ ID NO: 17975 - DNA, 20 bp, Artificial Sequence
  Description of Artificial Sequence: Synthetic oligonucleotide
  Target: LAMA2; (-) strand; PAM type: NNGRRT; PAM sequence: TGGGGT
gctgtatctttcctgtctta

SEQ ID NO: 17976 - DNA, 20 bp, Artificial Sequence
  Description of Artificial Sequence: Synthetic oligonucleotide
  Target: LAMA2; (-) strand; PAM type: NNGRRT; PAM sequence: GTGGAT
tttttcatggtgaaatgctt

SEQ ID NO: 17977 - DNA, 20 bp, Artificial Sequence
  Description of Artificial Sequence: Synthetic oligonucleotide
  Target: LAMA2; (-) strand; PAM type: NNGRRT; PAM sequence: AAGAAT
tagagtaccttagagttggc

SEQ ID NO: 17978 - DNA, 20 bp, Artificial Sequence
  Description of Artificial Sequence: Synthetic oligonucleotide
  Target: LAMA2; (-) strand; PAM type: NNGRRT; PAM sequence: TAGAGT
attctagtgttagagtacct

SEQ ID NO: 17979 - DNA, 20 bp, Artificial Sequence
  Description of Artificial Sequence: Synthetic oligonucleotide
  Target: LAMA2; (-) strand; PAM type: NNGRRT; PAM sequence: TAGAGT
caagtttaaaattctagtgt

SEQ ID NO: 17980 - DNA, 20 bp, Artificial Sequence
  Description of Artificial Sequence: Synthetic oligonucleotide
  Target: LAMA2; (-) strand; PAM type: NNGRRT; PAM sequence: AGGAAT
ttctttgtttaggaacaatg

SEQ ID NO: 17981 - DNA, 20 bp, Artificial Sequence
  Description of Artificial Sequence: Synthetic oligonucleotide
  Target: LAMA2; (-) strand; PAM type: NNGRRT; PAM sequence: AAGAGT
ccactacagttaaaagccag

SEQ ID NO: 17982 - DNA, 20 bp, Artificial Sequence
  Description of Artificial Sequence: Synthetic oligonucleotide
  Target: LAMA2; (-) strand; PAM type: NNGRRT; PAM sequence: TTGGAT
agagtagtggtttttctcgg

SEQ ID NO: 17983 - DNA, 20 bp, Artificial Sequence
  Description of Artificial Sequence: Synthetic oligonucleotide
  Target: LAMA2; (-) strand; PAM type: NNGRRT; PAM sequence: AAGAGT
ctgctgattgaagtgcagat

SEQ ID NO: 17984 - DNA, 20 bp, Artificial Sequence
  Description of Artificial Sequence: Synthetic oligonucleotide
  Target: LAMA2; (-) strand; PAM type: NNGRRT; PAM sequence: TTGGGT
catgataatataaactttga

SEQ ID NO: 17985 - DNA, 20 bp, Artificial Sequence
  Description of Artificial Sequence: Synthetic oligonucleotide
  Target: LAMA2; (-) strand; PAM type: NNGRRT; PAM sequence: GAGAAT
tatgtctcatctgaatcata

SEQ ID NO: 17986 - DNA, 20 bp, Artificial Sequence
  Description of Artificial Sequence: Synthetic oligonucleotide
  Target: LAMA2; (-) strand; PAM type: NNGRRT; PAM sequence: CTGAAT
aaagcacttttatgtctcat

SEQ ID NO: 17987 - DNA, 20 bp, Artificial Sequence
  Description of Artificial Sequence: Synthetic oligonucleotide
  Target: LAMA2; (-) strand; PAM type: NNGRRT; PAM sequence: TAGAGT
caagttgaattgcaacatca

SEQ ID NO: 17988 - DNA, 20 bp, Artificial Sequence
  Description of Artificial Sequence: Synthetic oligonucleotide
  Target: LAMA2; (-) strand; PAM type: NNGRRT; PAM sequence: TTGAAT
cttgagtatatgcttacaag

SEQ ID NO: 17989 - DNA, 20 bp, Artificial Sequence
  Description of Artificial Sequence: Synthetic oligonucleotide
  Target: LAMA2; (-) strand; PAM type: NNGRRT; PAM sequence: TTGAGT
cacatgtgcacctatttctc

SEQ ID NO: 17990 - DNA, 20 bp, Artificial Sequence
  Description of Artificial Sequence: Synthetic oligonucleotide
  Target: LAMA2; (-) strand; PAM type: NNGRRT; PAM sequence: TTGAAT
tagtgctgttatgagcattc

SEQ ID NO: 17991 - DNA, 20 bp, Artificial Sequence
  Description of Artificial Sequence: Synthetic oligonucleotide
  Target: LAMA2; (-) strand; PAM type: NNGRRT; PAM sequence: TTGGGT
ttaagggttcacccgtgctg

SEQ ID NO: 17992 - DNA, 20 bp, Artificial Sequence
  Description of Artificial Sequence: Synthetic oligonucleotide
  Target: LAMA2; (-) strand; PAM type: NNGRRT; PAM sequence: AAGGGT
ttttccttaagattatgttt

SEQ ID NO: 17993 - DNA, 20 bp, Artificial Sequence
  Description of Artificial Sequence: Synthetic oligonucleotide
  Target: LAMA2; (-) strand; PAM type: NNGRRT; PAM sequence: TGGAAT
atttttgaatgttatatgaa

SEQ ID NO: 17994 - DNA, 20 bp, Artificial Sequence
  Description of Artificial Sequence: Synthetic oligonucleotide
  Target: LAMA2; (-) strand; PAM type: NNGRRT; PAM sequence: ATGAAT
catctatttttgaatgttat

SEQ ID NO: 17995 - DNA, 20 bp, Artificial Sequence
  Description of Artificial Sequence: Synthetic oligonucleotide
  Target: LAMA2; (-) strand; PAM type: NNGRRT; PAM sequence: TTGAAT
aagttgaattgcatctattt

SEQ ID NO: 17996 - DNA, 20 bp, Artificial Sequence
  Description of Artificial Sequence: Synthetic oligonucleotide
  Target: LAMA2; (-) strand; PAM type: NNGRRT; PAM sequence: TTGAAT
acttctatctagcatgaaag

SEQ ID NO: 17997 - DNA, 20 bp, Artificial Sequence
  Description of Artificial Sequence: Synthetic oligonucleotide
  Target: LAMA2; (-) strand; PAM type: NNGRRT; PAM sequence: AAGAAT
aagagaatattgcccatact

SEQ ID NO: 17998 - DNA, 20 bp, Artificial Sequence
  Description of Artificial Sequence: Synthetic oligonucleotide
  Target: LAMA2; (-) strand; PAM type: NNGRRT; PAM sequence: GAGAAT
aaccatcatatagatcaaaa

SEQ ID NO: 17999 - DNA, 20 bp, Artificial Sequence
  Description of Artificial Sequence: Synthetic oligonucleotide
  Target: LAMA2; (-) strand; PAM type: NNGRRT; PAM sequence: TTGAAT
aaaaatgaacaaatgtacct

SEQ ID NO: 18000 - DNA, 20 bp, Artificial Sequence
  Description of Artificial Sequence: Synthetic oligonucleotide
  Target: LAMA2; (-) strand; PAM type: NNGRRT; PAM sequence: TGGGGT
catctctagtgacaaggaaa

SEQ ID NO: 18001 - DNA, 20 bp, Artificial Sequence
  Description of Artificial Sequence: Synthetic oligonucleotide
  Target: LAMA2; (-) strand; PAM type: NNGRRT; PAM sequence: AAGAGT
tattggaagattgttcagaa

SEQ ID NO: 18002 - DNA, 20 bp, Artificial Sequence
  Description of Artificial Sequence: Synthetic oligonucleotide
  Target: LAMA2; (-) strand; PAM type: NNGRRT; PAM sequence: TTGAGT
caagataaatccaacagaca

SEQ ID NO: 18003 - DNA, 20 bp, Artificial Sequence
  Description of Artificial Sequence: Synthetic oligonucleotide
  Target: LAMA2; (-) strand; PAM type: NNGRRT; PAM sequence: TTGAAT
aacaaaagaaaatgtggaaa

SEQ ID NO: 18004 - DNA, 20 bp, Artificial Sequence
  Description of Artificial Sequence: Synthetic oligonucleotide
  Target: LAMA2; (-) strand; PAM type: NNGRRT; PAM sequence: ATGAAT
gctaaaatcaatatactctc

SEQ ID NO: 18005 - DNA, 20 bp, Artificial Sequence
  Description of Artificial Sequence: Synthetic oligonucleotide
  Target: LAMA2; (-) strand; PAM type: NNGRRT; PAM sequence: GTGGAT
atttttacatatgcaaacct

SEQ ID NO: 18006 - DNA, 20 bp, Artificial Sequence
  Description of Artificial Sequence: Synthetic oligonucleotide
  Target: LAMA2; (-) strand; PAM type: NNGRRT; PAM sequence: TTGGAT
gtatcactgtgatcattctc

SEQ ID NO: 18007 - DNA, 20 bp, Artificial Sequence
  Description of Artificial Sequence: Synthetic oligonucleotide
  Target: LAMA2; (-) strand; PAM type: NNGRRT; PAM sequence: TAGAAT
aatgccaattttgtctttca

SEQ ID NO: 18008 - DNA, 20 bp, Artificial Sequence
  Description of Artificial Sequence: Synthetic oligonucleotide
  Target: LAMA2; (-) strand; PAM type: NNGRRT; PAM sequence: TTGGGT
taacttaaaaaaaaaatcct

SEQ ID NO: 18009 - DNA, 20 bp, Artificial Sequence
  Description of Artificial Sequence: Synthetic oligonucleotide
  Target: LAMA2; (-) strand; PAM type: NNGRRT; PAM sequence: CAGGAT
agaaacaaaatttctgattt

SEQ ID NO: 18010 - DNA, 20 bp, Artificial Sequence
  Description of Artificial Sequence: Synthetic oligonucleotide
  Target: LAMA2; (-) strand; PAM type: NNGRRT; PAM sequence: CTGAGT
tcttcctttttatttaagac

SEQ ID NO: 18011 - DNA, 20 bp, Artificial Sequence
  Description of Artificial Sequence: Synthetic oligonucleotide
  Target: LAMA2; (-) strand; PAM type: NNGRRT; PAM sequence: AGGGGT
aatgtggctgggagctcaag

SEQ ID NO: 18012 - DNA, 20 bp, Artificial Sequence
  Description of Artificial Sequence: Synthetic oligonucleotide
  Target: LAMA2; (-) strand; PAM type: NNGRRT; PAM sequence: AGGAAT
gttattattagacaactaag

SEQ ID NO: 18013 - DNA, 20 bp, Artificial Sequence
  Description of Artificial Sequence: Synthetic oligonucleotide
  Target: LAMA2; (-) strand; PAM type: NNGRRT; PAM sequence: ATGAAT
aaattgacaagttgagatat

SEQ ID NO: 18014 - DNA, 20 bp, Artificial Sequence
  Description of Artificial Sequence: Synthetic oligonucleotide
  Target: LAMA2; (-) strand; PAM type: NNGRRT; PAM sequence: AGGAAT
taagtcatgatttctaaaaa

SEQ ID NO: 18015 - DNA, 20 bp, Artificial Sequence
  Description of Artificial Sequence: Synthetic oligonucleotide
  Target: LAMA2; (-) strand; PAM type: NNGRRT; PAM sequence: TGGAGT
agaaggataagcactgaaga

SEQ ID NO: 18016 - DNA, 20 bp, Artificial Sequence
  Description of Artificial Sequence: Synthetic oligonucleotide
  Target: LAMA2; (-) strand; PAM type: NNGRRT; PAM sequence: AAGGAT
ttatgatagtattacattag

SEQ ID NO: 18017 - DNA, 20 bp, Artificial Sequence
  Description of Artificial Sequence: Synthetic oligonucleotide
  Target: LAMA2; (-) strand; PAM type: NNGRRT; PAM sequence: TGGAAT
taagataaaacacagaaaca

SEQ ID NO: 18018 - DNA, 20 bp, Artificial Sequence
  Description of Artificial Sequence: Synthetic oligonucleotide
  Target: LAMA2; (-) strand; PAM type: NNGRRT; PAM sequence: AAGAAT
ataataatggcaaataggac

SEQ ID NO: 18019 - DNA, 20 bp, Artificial Sequence
  Description of Artificial Sequence: Synthetic oligonucleotide
  Target: LAMA2; (-) strand; PAM type: NNGRRT; PAM sequence: TAGAAT
taaagaaaagtcagactatt

SEQ ID NO: 18020 - DNA, 20 bp, Artificial Sequence
  Description of Artificial Sequence: Synthetic oligonucleotide
  Target: LAMA2; (-) strand; PAM type: NNGRRT; PAM sequence: TTGAGT
caggcagaacatagaggact

SEQ ID NO: 18021 - DNA, 20 bp, Artificial Sequence
  Description of Artificial Sequence: Synthetic oligonucleotide
  Target: LAMA2; (-) strand; PAM type: NNGRRT; PAM sequence: GGGAAT
aaaacagtacagtgggcata

SEQ ID NO: 18022 - DNA, 20 bp, Artificial Sequence
  Description of Artificial Sequence: Synthetic oligonucleotide
  Target: LAMA2; (-) strand; PAM type: NNGRRT; PAM sequence: GTGGAT
aaaccaagaaagaggaaggt

SEQ ID NO: 18023 - DNA, 20 bp, Artificial Sequence
  Description of Artificial Sequence: Synthetic oligonucleotide
  Target: LAMA2; (-) strand; PAM type: NNGRRT; PAM sequence: GAGGAT
tatttcttaagaagccattt

SEQ ID NO: 18024 - DNA, 20 bp, Artificial Sequence
  Description of Artificial Sequence: Synthetic oligonucleotide
  Target: LAMA2; (-) strand; PAM type: NNGRRT; PAM sequence: ATGAGT
ctgccattttgtatattgca

SEQ ID NO: 18025 - DNA, 20 bp, Artificial Sequence
  Description of Artificial Sequence: Synthetic oligonucleotide
  Target: LAMA2; (-) strand; PAM type: NNGRRT; PAM sequence: TTGAAT
tgaaggaataagtatataaa

SEQ ID NO: 18026 - DNA, 20 bp, Artificial Sequence
  Description of Artificial Sequence: Synthetic oligonucleotide
  Target: LAMA2; (-) strand; PAM type: NNGRRT; PAM sequence: AGGAAT
gataaattaccaaaacttga

SEQ ID NO: 18027 - DNA, 20 bp, Artificial Sequence
  Description of Artificial Sequence: Synthetic oligonucleotide
  Target: LAMA2; (-) strand; PAM type: NNGRRT; PAM sequence: AGGAAT
agtagactggagaaattaga

SEQ ID NO: 18028 - DNA, 20 bp, Artificial Sequence
  Description of Artificial Sequence: Synthetic oligonucleotide
  Target: LAMA2; (-) strand; PAM type: NNGRRT; PAM sequence: GGGAGT
aaggtaaaaatttgactcat

SEQ ID NO: 18029 - DNA, 20 bp, Artificial Sequence
  Description of Artificial Sequence: Synthetic oligonucleotide
  Target: LAMA2; (-) strand; PAM type: NNGRRT; PAM sequence: TAGAAT
aagagattcaagaagaaaaa

SEQ ID NO: 18030 - DNA, 20 bp, Artificial Sequence
  Description of Artificial Sequence: Synthetic oligonucleotide
  Target: LAMA2; (-) strand; PAM type: NNGRRT; PAM sequence: AAGAAT
aatagtccctcatggaaaag

SEQ ID NO: 18031 - DNA, 20 bp, Artificial Sequence
  Description of Artificial Sequence: Synthetic oligonucleotide
  Target: LAMA2; (-) strand; PAM type: NNGRRT; PAM sequence: GGGAAT
atcacagttaaatgttagta

SEQ ID NO: 18032 - DNA, 20 bp, Artificial Sequence
  Description of Artificial Sequence: Synthetic oligonucleotide
  Target: LAMA2; (-) strand; PAM type: NNGRRT; PAM sequence: TAGGAT
gttcctcaatcaggccattt

SEQ ID NO: 18033 - DNA, 20 bp, Artificial Sequence
  Description of Artificial Sequence: Synthetic oligonucleotide
  Target: LAMA2; (-) strand; PAM type: NNGRRT; PAM sequence: TAGGAT
cctcagcctcacagaagtgc

SEQ ID NO: 18034 - DNA, 20 bp, Artificial Sequence
  Description of Artificial Sequence: Synthetic oligonucleotide
  Target: LAMA2; (-) strand; PAM type: NNGRRT; PAM sequence: CAGGGT
ttggtacttttagtagagac

SEQ ID NO: 18035 - DNA, 20 bp, Artificial Sequence
  Description of Artificial Sequence: Synthetic oligonucleotide
  Target: LAMA2; (-) strand; PAM type: NNGRRT; PAM sequence: TGGGAT
gcctcagcctcctgagtagc

SEQ ID NO: 18036 - DNA, 20 bp, Artificial Sequence
  Description of Artificial Sequence: Synthetic oligonucleotide
  Target: LAMA2; (-) strand; PAM type: NNGRRT; PAM sequence: CTGAGT
aattctcctgcctcagcctc

SEQ ID NO: 18037 - DNA, 20 bp, Artificial Sequence
  Description of Artificial Sequence: Synthetic oligonucleotide
  Target: LAMA2; (-) strand; PAM type: NNGRRT; PAM sequence: TGGAGT
cttgctcttgtcgcccaggc

SEQ ID NO: 18038 - DNA, 20 bp, Artificial Sequence
  Description of Artificial Sequence: Synthetic oligonucleotide
  Target: LAMA2; (-) strand; PAM type: NNGRRT; PAM sequence: TGGAGT
ctttttttttctttttgaga

SEQ ID NO: 18039 - DNA, 20 bp, Artificial Sequence
  Description of Artificial Sequence: Synthetic oligonucleotide
  Target: LAMA2; (-) strand; PAM type: NNGRRT; PAM sequence: CAGGAT
ttaccattctggagaaatga

SEQ ID NO: 18040 - DNA, 20 bp, Artificial Sequence
  Description of Artificial Sequence: Synthetic oligonucleotide
  Target: LAMA2; (-) strand; PAM type: NNGRRT; PAM sequence: AGGAAT
cttgtaaccacctctcctcc

SEQ ID NO: 18041 - DNA, 20 bp, Artificial Sequence
  Description of Artificial Sequence: Synthetic oligonucleotide
  Target: LAMA2; (-) strand; PAM type: NNGRRT; PAM sequence: CAGAAT
gccaagaatagttgtggccc

SEQ ID NO: 18042 - DNA, 20 bp, Artificial Sequence
  Description of Artificial Sequence: Synthetic oligonucleotide
  Target: LAMA2; (-) strand; PAM type: NNGRRT; PAM sequence: AAGAAT
tcaggggtagacaaaaggcc

SEQ ID NO: 18043 - DNA, 20 bp, Artificial Sequence
  Description of Artificial Sequence: Synthetic oligonucleotide
  Target: LAMA2; (-) strand; PAM type: NNGRRT; PAM sequence: AGGGGT
attccagtgatggaaacttc

SEQ ID NO: 18044 - DNA, 20 bp, Artificial Sequence
  Description of Artificial Sequence: Synthetic oligonucleotide
  Target: LAMA2; (-) strand; PAM type: NNGRRT; PAM sequence: ATGAAT
tccaggtacatgtgcgtgta

SEQ ID NO: 18045 - DNA, 20 bp, Artificial Sequence
  Description of Artificial Sequence: Synthetic oligonucleotide
  Target: LAMA2; (-) strand; PAM type: NNGRRT; PAM sequence: GAGGAT
accttttcacgtgttcttct

SEQ ID NO: 18046 - DNA, 20 bp, Artificial Sequence
  Description of Artificial Sequence: Synthetic oligonucleotide
  Target: LAMA2; (-) strand; PAM type: NNGRRT; PAM sequence: TGGAAT
attgtcatgaaccccttccc

SEQ ID NO: 18047 - DNA, 20 bp, Artificial Sequence
  Description of Artificial Sequence: Synthetic oligonucleotide
  Target: LAMA2; (-) strand; PAM type: NNGRRT; PAM sequence: AGGAAT
ctaagggaagttcctccaga

SEQ ID NO: 18048 - DNA, 20 bp, Artificial Sequence
  Description of Artificial Sequence: Synthetic oligonucleotide
  Target: LAMA2; (-) strand; PAM type: NNGRRT; PAM sequence: GGGAAT
atgcaaacttttctgtacag

SEQ ID NO: 18049 - DNA, 20 bp, Artificial Sequence
  Description of Artificial Sequence: Synthetic oligonucleotide
  Target: LAMA2; (-) strand; PAM type: NNGRRT; PAM sequence: GGGAAT
gaaacttctaagagttactt

SEQ ID NO: 18050 - DNA, 20 bp, Artificial Sequence
  Description of Artificial Sequence: Synthetic oligonucleotide
  Target: LAMA2; (-) strand; PAM type: NNGRRT; PAM sequence: AAGAGT
tccaaaaaggagaaacttct

SEQ ID NO: 18051 - DNA, 20 bp, Artificial Sequence
  Description of Artificial Sequence: Synthetic oligonucleotide
  Target: LAMA2; (-) strand; PAM type: NNGRRT; PAM sequence: TGGAAT
ctgggggttgtgttaaacac

SEQ ID NO: 18052 - DNA, 20 bp, Artificial Sequence
  Description of Artificial Sequence: Synthetic oligonucleotide
  Target: LAMA2; (-) strand; PAM type: NNGRRT; PAM sequence: GGGGGT
taaactgtgactcaaaagct

SEQ ID NO: 18053 - DNA, 20 bp, Artificial Sequence
  Description of Artificial Sequence: Synthetic oligonucleotide
  Target: LAMA2; (-) strand; PAM type: NNGRRT; PAM sequence: AGGGGT
gatattgtaatttggcaatc

SEQ ID NO: 18054 - DNA, 20 bp, Artificial Sequence
  Description of Artificial Sequence: Synthetic oligonucleotide
  Target: LAMA2; (-) strand; PAM type: NNGRRT; PAM sequence: TGGAAT
gattttcaaatgaaatattt

SEQ ID NO: 18055 - DNA, 20 bp, Artificial Sequence
  Description of Artificial Sequence: Synthetic oligonucleotide
  Target: LAMA2; (-) strand; PAM type: NNGRRT; PAM sequence: GGGAAT
gtataaagaaaagtctacat

SEQ ID NO: 18056 - DNA, 20 bp, Artificial Sequence
  Description of Artificial Sequence: Synthetic oligonucleotide
  Target: LAMA2; (-) strand; PAM type: NNGRRT; PAM sequence: CAGAAT
tgaaaggctaattttagcat

SEQ ID NO: 18057 - DNA, 20 bp, Artificial Sequence
  Description of Artificial Sequence: Synthetic oligonucleotide
  Target: LAMA2; (-) strand; PAM type: NNGRRT; PAM sequence: CAGAAT
cttttgaacatttttacttc

SEQ ID NO: 18058 - DNA, 20 bp, Artificial Sequence
  Description of Artificial Sequence: Synthetic oligonucleotide
  Target: LAMA2; (-) strand; PAM type: NNGRRT; PAM sequence: AGGGAT
ttcttgcctgagctattcaa

SEQ ID NO: 18059 - DNA, 20 bp, Artificial Sequence
  Description of Artificial Sequence: Synthetic oligonucleotide
  Target: LAMA2; (-) strand; PAM type: NNGRRT; PAM sequence: TGGGAT
cgtcacttacagtctcctcc

SEQ ID NO: 18060 - DNA, 20 bp, Artificial Sequence
  Description of Artificial Sequence: Synthetic oligonucleotide
  Target: LAMA2; (-) strand; PAM type: NNGRRT; PAM sequence: TTGAAT
cttatccaggcaggacatac

SEQ ID NO: 18061 - DNA, 20 bp, Artificial Sequence
  Description of Artificial Sequence: Synthetic oligonucleotide
  Target: LAMA2; (-) strand; PAM type: NNGRRT; PAM sequence: CCGAAT
aaacagaggtaagtagcatt

SEQ ID NO: 18062 - DNA, 20 bp, Artificial Sequence
  Description of Artificial Sequence: Synthetic oligonucleotide
  Target: LAMA2; (-) strand; PAM type: NNGRRT; PAM sequence: AGGAGT
tacttaaaaccacattctgg

SEQ ID NO: 18063 - DNA, 20 bp, Artificial Sequence
  Description of Artificial Sequence: Synthetic oligonucleotide
  Target: LAMA2; (-) strand; PAM type: NNGRRT; PAM sequence: ATGGAT
aagcactggagaactctcca

SEQ ID NO: 18064 - DNA, 20 bp, Artificial Sequence
  Description of Artificial Sequence: Synthetic oligonucleotide
  Target: LAMA2; (-) strand; PAM type: NNGRRT; PAM sequence: TAGAAT
tccttttaagtaaaacaaaa

SEQ ID NO: 18065 - DNA, 20 bp, Artificial Sequence
  Description of Artificial Sequence: Synthetic oligonucleotide
  Target: LAMA2; (-) strand; PAM type: NNGRRT; PAM sequence: TAGAAT
ttcatgaataagcaaaaatg

SEQ ID NO: 18066 - DNA, 20 bp, Artificial Sequence
  Description of Artificial Sequence: Synthetic oligonucleotide
  Target: LAMA2; (-) strand; PAM type: NNGRRT; PAM sequence: ATGAAT
cagaatttctcccgagtttc

SEQ ID NO: 18067 - DNA, 20 bp, Artificial Sequence
  Description of Artificial Sequence: Synthetic oligonucleotide
  Target: LAMA2; (-) strand; PAM type: NNGRRT; PAM sequence: CCGAGT
gccaatagacagaatttctc

SEQ ID NO: 18068 - DNA, 20 bp, Artificial Sequence
  Description of Artificial Sequence: Synthetic oligonucleotide
  Target: LAMA2; (-) strand; PAM type: NNGRRT; PAM sequence: CAGAAT
aatgagagcctgccaataga

SEQ ID NO: 18069 - DNA, 20 bp, Artificial Sequence
  Description of Artificial Sequence: Synthetic oligonucleotide
  Target: LAMA2; (-) strand; PAM type: NNGRRT; PAM sequence: ATGAAT
aatgagtggttagtgtggtg

SEQ ID NO: 18070 - DNA, 20 bp, Artificial Sequence
  Description of Artificial Sequence: Synthetic oligonucleotide
  Target: LAMA2; (-) strand; PAM type: NNGRRT; PAM sequence: ATGAGT
agcacttaatttcggagtaa

SEQ ID NO: 18071 - DNA, 20 bp, Artificial Sequence
  Description of Artificial Sequence: Synthetic oligonucleotide
  Target: LAMA2; (-) strand; PAM type: NNGRRT; PAM sequence: CGGAGT
tatcactgagcacttaattt

SEQ ID NO: 18072 - DNA, 20 bp, Artificial Sequence
  Description of Artificial Sequence: Synthetic oligonucleotide
  Target: LAMA2; (-) strand; PAM type: NNGRRT; PAM sequence: ATGAAT
agaaaattttgcaactgaga

SEQ ID NO: 18073 - DNA, 20 bp, Artificial Sequence
  Description of Artificial Sequence: Synthetic oligonucleotide
  Target: LAMA2; (-) strand; PAM type: NNGRRT; PAM sequence: GAGAAT
accaagaaaattttgcaact

SEQ ID NO: 18074 - DNA, 20 bp, Artificial Sequence
  Description of Artificial Sequence: Synthetic oligonucleotide
  Target: LAMA2; (-) strand; PAM type: NNGRRT; PAM sequence: GTGAGT
gaaaggaaaagtctacagct

SEQ ID NO: 18075 - DNA, 20 bp, Artificial Sequence
  Description of Artificial Sequence: Synthetic oligonucleotide
  Target: LAMA2; (-) strand; PAM type: NNGRRT; PAM sequence: TTGAGT
tagagattctatttattttg

SEQ ID NO: 18076 - DNA, 20 bp, Artificial Sequence
  Description of Artificial Sequence: Synthetic oligonucleotide
  Target: LAMA2; (-) strand; PAM type: NNGRRT; PAM sequence: GGGGAT
ttaaaattcccattactttt

SEQ ID NO: 18077 - DNA, 20 bp, Artificial Sequence
  Description of Artificial Sequence: Synthetic oligonucleotide
  Target: LAMA2; (-) strand; PAM type: NNGRRT; PAM sequence: GTGAGT
aatttatttggcatgtagat

SEQ ID NO: 18078 - DNA, 20 bp, Artificial Sequence
  Description of Artificial Sequence: Synthetic oligonucleotide
  Target: LAMA2; (-) strand; PAM type: NNGRRT; PAM sequence: TGGAGT
ctgatataacgggtggaggg

SEQ ID NO: 18079 - DNA, 20 bp, Artificial Sequence
  Description of Artificial Sequence: Synthetic oligonucleotide
  Target: LAMA2; (-) strand; PAM type: NNGRRT; PAM sequence: GAGGGT
gggccctgatataacgggtg

SEQ ID NO: 18080 - DNA, 20 bp, Artificial Sequence
  Description of Artificial Sequence: Synthetic oligonucleotide
  Target: LAMA2; (-) strand; PAM type: NNGRRT; PAM sequence: ACGGGT
tggagtggggccctgatata

SEQ ID NO: 18081 - DNA, 20 bp, Artificial Sequence
  Description of Artificial Sequence: Synthetic oligonucleotide
  Target: LAMA2; (-) strand; PAM type: NNGRRT; PAM sequence: TGGAGT
ctaagaaaaaagacaatgga

SEQ ID NO: 18082 - DNA, 20 bp, Artificial Sequence
  Description of Artificial Sequence: Synthetic oligonucleotide
  Target: LAMA2; (-) strand; PAM type: NNGRRT; PAM sequence: ATGGAT
tataactaagaaaaaagaca

SEQ ID NO: 18083 - DNA, 20 bp, Artificial Sequence
  Description of Artificial Sequence: Synthetic oligonucleotide
  Target: LAMA2; (-) strand; PAM type: NNGRRT; PAM sequence: TAGGGT
tgctgcaaggaaaaaactaa

SEQ ID NO: 18084 - DNA, 20 bp, Artificial Sequence
  Description of Artificial Sequence: Synthetic oligonucleotide
  Target: LAMA2; (-) strand; PAM type: NNGRRT; PAM sequence: GAGGGT
agcaggaacatggatgcagg

SEQ ID NO: 18085 - DNA, 20 bp, Artificial Sequence
  Description of Artificial Sequence: Synthetic oligonucleotide
  Target: LAMA2; (-) strand; PAM type: NNGRRT; PAM sequence: ATGGAT
gaatatgaggcagcaggaac

SEQ ID NO: 18086 - DNA, 20 bp, Artificial Sequence
  Description of Artificial Sequence: Synthetic oligonucleotide
  Target: LAMA2; (-) strand; PAM type: NNGRRT; PAM sequence: ATGAAT
tgccaccagctgaagaatga

SEQ ID NO: 18087 - DNA, 20 bp, Artificial Sequence
  Description of Artificial Sequence: Synthetic oligonucleotide
  Target: LAMA2; (-) strand; PAM type: NNGRRT; PAM sequence: ATGAAT
tgattgccaccagctgaaga

SEQ ID NO: 18088 - DNA, 20 bp, Artificial Sequence
  Description of Artificial Sequence: Synthetic oligonucleotide
  Target: LAMA2; (-) strand; PAM type: NNGRRT; PAM sequence: AAGAAT
atgctgattgccaccagctg

SEQ ID NO: 18089 - DNA, 20 bp, Artificial Sequence
  Description of Artificial Sequence: Synthetic oligonucleotide
  Target: LAMA2; (-) strand; PAM type: NNGRRT; PAM sequence: CTGAAT
aacagttttatggagagaaa

SEQ ID NO: 18090 - DNA, 20 bp, Artificial Sequence
  Description of Artificial Sequence: Synthetic oligonucleotide
  Target: LAMA2; (-) strand; PAM type: NNGRRT; PAM sequence: TTGGAT
attcagaaatgaaaggctta

SEQ ID NO: 18091 - DNA, 20 bp, Artificial Sequence
  Description of Artificial Sequence: Synthetic oligonucleotide
  Target: LAMA2; (-) strand; PAM type: NNGRRT; PAM sequence: AAGAAT
aagacatgttaaatgccata

SEQ ID NO: 18092 - DNA, 20 bp, Artificial Sequence
  Description of Artificial Sequence: Synthetic oligonucleotide
  Target: LAMA2; (-) strand; PAM type: NNGRRT; PAM sequence: TGGAGT
agagagtccccaaagaaaga

SEQ ID NO: 18093 - DNA, 20 bp, Artificial Sequence
  Description of Artificial Sequence: Synthetic oligonucleotide
  Target: LAMA2; (-) strand; PAM type: NNGRRT; PAM sequence: GAGAGT
ttgtcttagaagtcatggaa

SEQ ID NO: 18094 - DNA, 20 bp, Artificial Sequence
  Description of Artificial Sequence: Synthetic oligonucleotide
  Target: LAMA2; (-) strand; PAM type: NNGRRT; PAM sequence: GAGAAT
acaaacctaaaatggtggaa

SEQ ID NO: 18095 - DNA, 20 bp, Artificial Sequence
  Description of Artificial Sequence: Synthetic oligonucleotide
  Target: LAMA2; (-) strand; PAM type: NNGRRT; PAM sequence: AAGAAT
ggtatgtaaggattacacag

SEQ ID NO: 18096 - DNA, 20 bp, Artificial Sequence
  Description of Artificial Sequence: Synthetic oligonucleotide
  Target: LAMA2; (-) strand; PAM type: NNGRRT; PAM sequence: AAGGAT
aattcagaacattggtatgt

SEQ ID NO: 18097 - DNA, 20 bp, Artificial Sequence
  Description of Artificial Sequence: Synthetic oligonucleotide
  Target: LAMA2; (-) strand; PAM type: NNGRRT; PAM sequence: TGGAAT
atggaaaaagaggagcagaa

SEQ ID NO: 18098 - DNA, 20 bp, Artificial Sequence
  Description of Artificial Sequence: Synthetic oligonucleotide
  Target: LAMA2; (-) strand; PAM type: NNGRRT; PAM sequence: CAGAAT
atggaatggaaaaagaggag

SEQ ID NO: 18099 - DNA, 20 bp, Artificial Sequence
  Description of Artificial Sequence: Synthetic oligonucleotide
  Target: LAMA2; (-) strand; PAM type: NNGRRT; PAM sequence: TGGAAT
aagtacacaatcagactcta

SEQ ID NO: 18100 - DNA, 20 bp, Artificial Sequence
  Description of Artificial Sequence: Synthetic oligonucleotide
  Target: LAMA2; (-) strand; PAM type: NNGRRT; PAM sequence: TAGAAT
tctttgctgacactcaggta

SEQ ID NO: 18101 - DNA, 20 bp, Artificial Sequence
  Description of Artificial Sequence: Synthetic oligonucleotide
  Target: LAMA2; (-) strand; PAM type: NNGRRT; PAM sequence: GAGAAT
attaagaaggtaaaatcaat

SEQ ID NO: 18102 - DNA, 20 bp, Artificial Sequence
  Description of Artificial Sequence: Synthetic oligonucleotide
  Target: LAMA2; (-) strand; PAM type: NNGRRT; PAM sequence: TGGGAT
atcagaggaatggactaagt

SEQ ID NO: 18103 - DNA, 20 bp, Artificial Sequence
  Description of Artificial Sequence: Synthetic oligonucleotide
  Target: LAMA2; (-) strand; PAM type: NNGRRT; PAM sequence: AGGAAT
tataaaggaaaagacatcag

SEQ ID NO: 18104 - DNA, 20 bp, Artificial Sequence
  Description of Artificial Sequence: Synthetic oligonucleotide
  Target: LAMA2; (-) strand; PAM type: NNGRRT; PAM sequence: CTGAAT
acaacaacaacaaaaatgga

SEQ ID NO: 18105 - DNA, 20 bp, Artificial Sequence
  Description of Artificial Sequence: Synthetic oligonucleotide
  Target: LAMA2; (-) strand; PAM type: NNGRRT; PAM sequence: CTGAGT
ttgagttttatataaaattt

SEQ ID NO: 18106 - DNA, 20 bp, Artificial Sequence
  Description of Artificial Sequence: Synthetic oligonucleotide
  Target: LAMA2; (-) strand; PAM type: NNGRRT; PAM sequence: TTGAGT
gatccaattctaaggtttat

SEQ ID NO: 18107 - DNA, 20 bp, Artificial Sequence
  Description of Artificial Sequence: Synthetic oligonucleotide
  Target: LAMA2; (-) strand; PAM type: NNGRRT; PAM sequence: TTGAGT
tttcctctaggaattaagaa

SEQ ID NO: 18108 - DNA, 20 bp, Artificial Sequence
  Description of Artificial Sequence: Synthetic oligonucleotide
  Target: LAMA2; (-) strand; PAM type: NNGRRT; PAM sequence: AAGAAT
ctctgtttcctctaggaatt

SEQ ID NO: 18109 - DNA, 20 bp, Artificial Sequence
  Description of Artificial Sequence: Synthetic oligonucleotide
  Target: LAMA2; (-) strand; PAM type: NNGRRT; PAM sequence: AGGAAT
gacataactctgtttcctct

SEQ ID NO: 18110 - DNA, 20 bp, Artificial Sequence
  Description of Artificial Sequence: Synthetic oligonucleotide
  Target: LAMA2; (-) strand; PAM type: NNGRRT; PAM sequence: TTGAAT
acagctgtacagtgattggg

SEQ ID NO: 18111 - DNA, 20 bp, Artificial Sequence
  Description of Artificial Sequence: Synthetic oligonucleotide
  Target: LAMA2; (-) strand; PAM type: NNGRRT; PAM sequence: TTGGGT
aagctacagctgtacagtga

SEQ ID NO: 18112 - DNA, 20 bp, Artificial Sequence
  Description of Artificial Sequence: Synthetic oligonucleotide
  Target: LAMA2; (-) strand; PAM type: NNGRRT; PAM sequence: GAGAAT
tacttgggaggctgaggcag

SEQ ID NO: 18113 - DNA, 20 bp, Artificial Sequence
  Description of Artificial Sequence: Synthetic oligonucleotide
  Target: LAMA2; (-) strand; PAM type: NNGRRT; PAM sequence: AGGGGT
tgggaggatcacctgaggtc

SEQ ID NO: 18114 - DNA, 20 bp, Artificial Sequence
  Description of Artificial Sequence: Synthetic oligonucleotide
  Target: LAMA2; (-) strand; PAM type: NNGRRT; PAM sequence: GAGGAT
actttgggaggccaaggtgg

SEQ ID NO: 18115 - DNA, 20 bp, Artificial Sequence
  Description of Artificial Sequence: Synthetic oligonucleotide
  Target: LAMA2; (-) strand; PAM type: NNGRRT; PAM sequence: TTGGAT
atcaaaaactgggtagctat

SEQ ID NO: 18116 - DNA, 20 bp, Artificial Sequence
  Description of Artificial Sequence: Synthetic oligonucleotide
  Target: LAMA2; (-) strand; PAM type: NNGRRT; PAM sequence: CTGGGT
tacttctgcctaatcaaaaa

SEQ ID NO: 18117 - DNA, 20 bp, Artificial Sequence
  Description of Artificial Sequence: Synthetic oligonucleotide
  Target: LAMA2; (-) strand; PAM type: NNGRRT; PAM sequence: TGGGAT
gtctccgcctcccaagtagc

SEQ ID NO: 18118 - DNA, 20 bp, Artificial Sequence
  Description of Artificial Sequence: Synthetic oligonucleotide
  Target: LAMA2; (-) strand; PAM type: NNGRRT; PAM sequence: AAGGGT
acctcagactcctaagctca

SEQ ID NO: 18119 - DNA, 20 bp, Artificial Sequence
  Description of Artificial Sequence: Synthetic oligonucleotide
  Target: LAMA2; (-) strand; PAM type: NNGRRT; PAM sequence: TGGAGT
tcttgctacactgcccaggc

SEQ ID NO: 18120 - DNA, 20 bp, Artificial Sequence
  Description of Artificial Sequence: Synthetic oligonucleotide
  Target: LAMA2; (-) strand; PAM type: NNGRRT; PAM sequence: TAGGGT
tttgattcttttttcagaga

SEQ ID NO: 18121 - DNA, 20 bp, Artificial Sequence
  Description of Artificial Sequence: Synthetic oligonucleotide
  Target: LAMA2; (-) strand; PAM type: NNGRRT; PAM sequence: CAGAGT
tatgtaaaaaagtggaagta

SEQ ID NO: 18122 - DNA, 20 bp, Artificial Sequence
  Description of Artificial Sequence: Synthetic oligonucleotide
  Target: LAMA2; (-) strand; PAM type: NNGRRT; PAM sequence: ATGAAT
ttaaatgcaaaacaatgtat

SEQ ID NO: 18123 - DNA, 20 bp, Artificial Sequence
  Description of Artificial Sequence: Synthetic oligonucleotide
  Target: LAMA2; (-) strand; PAM type: NNGRRT; PAM sequence: ATGGGT
ttttgatttttgtaaatagc

SEQ ID NO: 18124 - DNA, 20 bp, Artificial Sequence
  Description of Artificial Sequence: Synthetic oligonucleotide
  Target: LAMA2; (-) strand; PAM type: NNGRRT; PAM sequence: CAGAAT
ttttaaatccttaacacaaa

SEQ ID NO: 18125 - DNA, 20 bp, Artificial Sequence
  Description of Artificial Sequence: Synthetic oligonucleotide
  Target: LAMA2; (-) strand; PAM type: NNGRRT; PAM sequence: GAGAAT
ttgtggctacataatgtatt

SEQ ID NO: 18126 - DNA, 20 bp, Artificial Sequence
  Description of Artificial Sequence: Synthetic oligonucleotide
  Target: LAMA2; (-) strand; PAM type: NNGRRT; PAM sequence: AAGGAT
taagtgtaggaagactggaa

SEQ ID NO: 18127 - DNA, 20 bp, Artificial Sequence
  Description of Artificial Sequence: Synthetic oligonucleotide
  Target: LAMA2; (-) strand; PAM type: NNGRRT; PAM sequence: GAGAGT
gaaaatagtctatgtctagg

SEQ ID NO: 18128 - DNA, 20 bp, Artificial Sequence
  Description of Artificial Sequence: Synthetic oligonucleotide
  Target: LAMA2; (-) strand; PAM type: NNGRRT; PAM sequence: ATGAAT
acaaatttagctgatacagt

SEQ ID NO: 18129 - DNA, 20 bp, Artificial Sequence
  Description of Artificial Sequence: Synthetic oligonucleotide
  Target: LAMA2; (-) strand; PAM type: NNGRRT; PAM sequence: AAGAGT
atagaatccttaacatctga

SEQ ID NO: 18130 - DNA, 20 bp, Artificial Sequence
  Description of Artificial Sequence: Synthetic oligonucleotide
  Target: LAMA2; (-) strand; PAM type: NNGRRT; PAM sequence: TAGAAT
gaatgaagttatttgggaaa

SEQ ID NO: 18131 - DNA, 20 bp, Artificial Sequence
  Description of Artificial Sequence: Synthetic oligonucleotide
  Target: LAMA2; (-) strand; PAM type: NNGRRT; PAM sequence: ATGAAT
acatgaaatatacttcttac

SEQ ID NO: 18132 - DNA, 20 bp, Artificial Sequence
  Description of Artificial Sequence: Synthetic oligonucleotide
  Target: LAMA2; (-) strand; PAM type: NNGRRT; PAM sequence: GAGAAT
cccacattagaaaacaccta

SEQ ID NO: 18133 - DNA, 20 bp, Artificial Sequence
  Description of Artificial Sequence: Synthetic oligonucleotide
  Target: LAMA2; (-) strand; PAM type: NNGRRT; PAM sequence: TGGAAT
taaattatatcagcatctgc

SEQ ID NO: 18134 - DNA, 20 bp, Artificial Sequence
  Description of Artificial Sequence: Synthetic oligonucleotide
  Target: LAMA2; (-) strand; PAM type: NNGRRT; PAM sequence: ACGAAT
ctatatttgccctgtcttcc

SEQ ID NO: 18135 - DNA, 20 bp, Artificial Sequence
  Description of Artificial Sequence: Synthetic oligonucleotide
  Target: LAMA2; (-) strand; PAM type: NNGRRT; PAM sequence: TTGAAT
gctttttttctttttaacca

SEQ ID NO: 18136 - DNA, 20 bp, Artificial Sequence
  Description of Artificial Sequence: Synthetic oligonucleotide
  Target: LAMA2; (-) strand; PAM type: NNGRRT; PAM sequence: AGGGGT
aagaaattaactttcaattt

SEQ ID NO: 18137 - DNA, 20 bp, Artificial Sequence
  Description of Artificial Sequence: Synthetic oligonucleotide
  Target: LAMA2; (-) strand; PAM type: NNGRRT; PAM sequence: TGGAAT
tatccttggaacattcacct

SEQ ID NO: 18138 - DNA, 20 bp, Artificial Sequence
  Description of Artificial Sequence: Synthetic oligonucleotide
  Target: LAMA2; (-) strand; PAM type: NNGRRT; PAM sequence: ATGGAT
aaatggacaagctattacat

SEQ ID NO: 18139 - DNA, 20 bp, Artificial Sequence
  Description of Artificial Sequence: Synthetic oligonucleotide
  Target: LAMA2; (-) strand; PAM type: NNGRRT; PAM sequence: TGGGGT
cacatattaaaaactatcag

SEQ ID NO: 18140 - DNA, 20 bp, Artificial Sequence
  Description of Artificial Sequence: Synthetic oligonucleotide
  Target: LAMA2; (-) strand; PAM type: NNGRRT; PAM sequence: CAGAAT
gtatacttcttctgaatctt

SEQ ID NO: 18141 - DNA, 20 bp, Artificial Sequence
  Description of Artificial Sequence: Synthetic oligonucleotide
  Target: LAMA2; (-) strand; PAM type: NNGRRT; PAM sequence: CTGAAT
aataatgttgtatacttctt

SEQ ID NO: 18142 - DNA, 20 bp, Artificial Sequence
  Description of Artificial Sequence: Synthetic oligonucleotide
  Target: LAMA2; (-) strand; PAM type: NNGRRT; PAM sequence: AAGAAT
aaacacaagttaccattaaa

SEQ ID NO: 18143 - DNA, 20 bp, Artificial Sequence
  Description of Artificial Sequence: Synthetic oligonucleotide
  Target: LAMA2; (-) strand; PAM type: NNGRRT; PAM sequence: CTGGGT
catctcacttcccacctccc

SEQ ID NO: 18144 - DNA, 20 bp, Artificial Sequence
  Description of Artificial Sequence: Synthetic oligonucleotide
  Target: LAMA2; (-) strand; PAM type: NNGRRT; PAM sequence: TAGAGT
aatctctctcacttgacttt

SEQ ID NO: 18145 - DNA, 20 bp, Artificial Sequence
  Description of Artificial Sequence: Synthetic oligonucleotide
  Target: LAMA2; (-) strand; PAM type: NNGRRT; PAM sequence: CAGAAT
ctcacattcttgtctcactc

SEQ ID NO: 18146 - DNA, 20 bp, Artificial Sequence
  Description of Artificial Sequence: Synthetic oligonucleotide
  Target: LAMA2; (-) strand; PAM type: NNGRRT; PAM sequence: CAGAGT
agttagaaaaacttacacag

SEQ ID NO: 18147 - DNA, 20 bp, Artificial Sequence
  Description of Artificial Sequence: Synthetic oligonucleotide
  Target: LAMA2; (-) strand; PAM type: NNGRRT; PAM sequence: ATGAGT
caacatggctgatatacaat

SEQ ID NO: 18148 - DNA, 20 bp, Artificial Sequence
  Description of Artificial Sequence: Synthetic oligonucleotide
  Target: LAMA2; (-) strand; PAM type: NNGRRT; PAM sequence: AAGAAT
atgaatacattaattaatgc

SEQ ID NO: 18149 - DNA, 20 bp, Artificial Sequence
  Description of Artificial Sequence: Synthetic oligonucleotide
  Target: LAMA2; (-) strand; PAM type: NNGRRT; PAM sequence: ATGAAT
aagtactgaagacatattta

SEQ ID NO: 18150 - DNA, 20 bp, Artificial Sequence
  Description of Artificial Sequence: Synthetic oligonucleotide
  Target: LAMA2; (-) strand; PAM type: NNGRRT; PAM sequence: CTGAAT
tgaactaaattgaaaacttg

SEQ ID NO: 18151 - DNA, 20 bp, Artificial Sequence
  Description of Artificial Sequence: Synthetic oligonucleotide
  Target: LAMA2; (-) strand; PAM type: NNGRRT; PAM sequence: TCGGGT
tatgaaactgataaatggat

SEQ ID NO: 18152 - DNA, 20 bp, Artificial Sequence
  Description of Artificial Sequence: Synthetic oligonucleotide
  Target: LAMA2; (-) strand; PAM type: NNGRRT; PAM sequence: ATGGAT
cattgttatgaaactgataa

SEQ ID NO: 18153 - DNA, 20 bp, Artificial Sequence
  Description of Artificial Sequence: Synthetic oligonucleotide
  Target: LAMA2; (-) strand; PAM type: NNGRRT; PAM sequence: TAGAAT
agagctataaacaatatttt

SEQ ID NO: 18154 - DNA, 20 bp, Artificial Sequence
  Description of Artificial Sequence: Synthetic oligonucleotide
  Target: LAMA2; (-) strand; PAM type: NNGRRT; PAM sequence: TTGAAT
acctcaagaaggtcaactta

SEQ ID NO: 18155 - DNA, 20 bp, Artificial Sequence
  Description of Artificial Sequence: Synthetic oligonucleotide
  Target: LAMA2; (-) strand; PAM type: NNGRRT; PAM sequence: AAGGGT
aatgaaatattaaaataata

SEQ ID NO: 18156 - DNA, 20 bp, Artificial Sequence
  Description of Artificial Sequence: Synthetic oligonucleotide
  Target: LAMA2; (-) strand; PAM type: NNGRRT; PAM sequence: GTGGAT
ggaagtgagatatatacttg

SEQ ID NO: 18157 - DNA, 20 bp, Artificial Sequence
  Description of Artificial Sequence: Synthetic oligonucleotide
  Target: LAMA2; (-) strand; PAM type: NNGRRT; PAM sequence: CAGAGT
tttttctccacacttgcaca

SEQ ID NO: 18158 - DNA, 20 bp, Artificial Sequence
  Description of Artificial Sequence: Synthetic oligonucleotide
  Target: LAMA2; (-) strand; PAM type: NNGRRT; PAM sequence: CTGAGT
gactaaaattccttccactt

SEQ ID NO: 18159 - DNA, 20 bp, Artificial Sequence
  Description of Artificial Sequence: Synthetic oligonucleotide
  Target: LAMA2; (-) strand; PAM type: NNGRRT; PAM sequence: AAGAGT
cctaatccgtttgctttttc

SEQ ID NO: 18160 - DNA, 20 bp, Artificial Sequence
  Description of Artificial Sequence: Synthetic oligonucleotide
  Target: LAMA2; (-) strand; PAM type: NNGRRT; PAM sequence: TTGAAT
ccaaaatgagacattcttac

SEQ ID NO: 18161 - DNA, 20 bp, Artificial Sequence
  Description of Artificial Sequence: Synthetic oligonucleotide
  Target: LAMA2; (-) strand; PAM type: NNGRRT; PAM sequence: GAGAAT
agacatttaaaaagtgtttt

SEQ ID NO: 18162 - DNA, 20 bp, Artificial Sequence
  Description of Artificial Sequence: Synthetic oligonucleotide
  Target: LAMA2; (-) strand; PAM type: NNGRRT; PAM sequence: CAGGAT
taattttttttagcatttct

SEQ ID NO: 18163 - DNA, 20 bp, Artificial Sequence
  Description of Artificial Sequence: Synthetic oligonucleotide
  Target: LAMA2; (-) strand; PAM type: NNGRRT; PAM sequence: TGGGGT
catagtttccctcaatttct

SEQ ID NO: 18164 - DNA, 20 bp, Artificial Sequence
  Description of Artificial Sequence: Synthetic oligonucleotide
  Target: LAMA2; (-) strand; PAM type: NNGRRT; PAM sequence: CAGAAT
gtctgagaaaaaagtagccc

SEQ ID NO: 18165 - DNA, 20 bp, Artificial Sequence
  Description of Artificial Sequence: Synthetic oligonucleotide
  Target: LAMA2; (-) strand; PAM type: NNGRRT; PAM sequence: CTGAGT
cctttaatatgtaagcagat

SEQ ID NO: 18166 - DNA, 20 bp, Artificial Sequence
  Description of Artificial Sequence: Synthetic oligonucleotide
  Target: LAMA2; (-) strand; PAM type: NNGRRT; PAM sequence: CTGAGT
ctgaaaggaaggaactgatt

SEQ ID NO: 18167 - DNA, 20 bp, Artificial Sequence
  Description of Artificial Sequence: Synthetic oligonucleotide
  Target: LAMA2; (-) strand; PAM type: NNGRRT; PAM sequence: AAGGAT
aagacaaagtaattaaagat

SEQ ID NO: 18168 - DNA, 20 bp, Artificial Sequence
  Description of Artificial Sequence: Synthetic oligonucleotide
  Target: LAMA2; (-) strand; PAM type: NNGRRT; PAM sequence: GAGGGT
ctggctagaggccacgccca

SEQ ID NO: 18169 - DNA, 20 bp, Artificial Sequence
  Description of Artificial Sequence: Synthetic oligonucleotide
  Target: LAMA2; (-) strand; PAM type: NNGRRT; PAM sequence: GAGAGT
taaggggttgacaataagga

SEQ ID NO: 18170 - DNA, 20 bp, Artificial Sequence
  Description of Artificial Sequence: Synthetic oligonucleotide
  Target: LAMA2; (-) strand; PAM type: NNGRRT; PAM sequence: AGGGGT
taaaaaaaataatcaaagta

SEQ ID NO: 18171 - DNA, 20 bp, Artificial Sequence
  Description of Artificial Sequence: Synthetic oligonucleotide
  Target: LAMA2; (-) strand; PAM type: NNGRRT; PAM sequence: TTGAAT
ctatatgcaacacatattca

SEQ ID NO: 18172 - DNA, 20 bp, Artificial Sequence
  Description of Artificial Sequence: Synthetic oligonucleotide
  Target: LAMA2; (-) strand; PAM type: NNGRRT; PAM sequence: ATGGGT
ataatggaagattagtaatg

SEQ ID NO: 18173 - DNA, 20 bp, Artificial Sequence
  Description of Artificial Sequence: Synthetic oligonucleotide
  Target: LAMA2; (-) strand; PAM type: NNGRRT; PAM sequence: TGGGAT
caacaaagctataatataga

SEQ ID NO: 18174 - DNA, 20 bp, Artificial Sequence
  Description of Artificial Sequence: Synthetic oligonucleotide
  Target: LAMA2; (-) strand; PAM type: NNGRRT; PAM sequence: TTGAGT
aagcattttcactttatccc

SEQ ID NO: 18175 - DNA, 20 bp, Artificial Sequence
  Description of Artificial Sequence: Synthetic oligonucleotide
  Target: LAMA2; (-) strand; PAM type: NNGRRT; PAM sequence: TTGGGT
tatgtacaattaatgttggt

SEQ ID NO: 18176 - DNA, 20 bp, Artificial Sequence
  Description of Artificial Sequence: Synthetic oligonucleotide
  Target: LAMA2; (-) strand; PAM type: NNGRRT; PAM sequence: ATGAGT
ttgtgaatcaatttaatcac

SEQ ID NO: 18177 - DNA, 20 bp, Artificial Sequence
  Description of Artificial Sequence: Synthetic oligonucleotide
  Target: LAMA2; (-) strand; PAM type: NNGRRT; PAM sequence: GTGAAT
aataaatgacctcaaatttt

SEQ ID NO: 18178 - DNA, 20 bp, Artificial Sequence
  Description of Artificial Sequence: Synthetic oligonucleotide
  Target: LAMA2; (-) strand; PAM type: NNGRRT; PAM sequence: TAGAGT
tttttattttcagagacaat

SEQ ID NO: 18179 - DNA, 20 bp, Artificial Sequence
  Description of Artificial Sequence: Synthetic oligonucleotide
  Target: LAMA2; (-) strand; PAM type: NNGRRT; PAM sequence: CAGAAT
cagatattatgagtttttgt

SEQ ID NO: 18180 - DNA, 20 bp, Artificial Sequence
  Description of Artificial Sequence: Synthetic oligonucleotide
  Target: LAMA2; (-) strand; PAM type: NNGRRT; PAM sequence: ATGAGT
catataaactctcagatatt

SEQ ID NO: 18181 - DNA, 20 bp, Artificial Sequence
  Description of Artificial Sequence: Synthetic oligonucleotide
  Target: LAMA2; (-) strand; PAM type: NNGRRT; PAM sequence: ATGAGT
gcatagtgtaaagaattaga

SEQ ID NO: 18182 - DNA, 20 bp, Artificial Sequence
  Description of Artificial Sequence: Synthetic oligonucleotide
  Target: LAMA2; (-) strand; PAM type: NNGRRT; PAM sequence: TAGAAT
taatgcatagtgtaaagaat

SEQ ID NO: 18183 - DNA, 20 bp, Artificial Sequence
  Description of Artificial Sequence: Synthetic oligonucleotide
  Target: LAMA2; (-) strand; PAM type: NNGRRT; PAM sequence: AAGAAT
tcagcctaatgcatagtgta

SEQ ID NO: 18184 - DNA, 20 bp, Artificial Sequence
  Description of Artificial Sequence: Synthetic oligonucleotide
  Target: LAMA2; (-) strand; PAM type: NNGRRT; PAM sequence: TGGAAT
ttccccccacccccagcttc

SEQ ID NO: 18185 - DNA, 20 bp, Artificial Sequence
  Description of Artificial Sequence: Synthetic oligonucleotide
  Target: LAMA2; (-) strand; PAM type: NNGRRT; PAM sequence: AGGAGT
gttggtttggttgataaatt

SEQ ID NO: 18186 - DNA, 20 bp, Artificial Sequence
  Description of Artificial Sequence: Synthetic oligonucleotide
  Target: LAMA2; (-) strand; PAM type: NNGRRT; PAM sequence: TGGGAT
gagtcactttgaattctcta

SEQ ID NO: 18187 - DNA, 20 bp, Artificial Sequence
  Description of Artificial Sequence: Synthetic oligonucleotide
  Target: LAMA2; (-) strand; PAM type: NNGRRT; PAM sequence: TTGAAT
gtgtcttttcgtgagtcact

SEQ ID NO: 18188 - DNA, 20 bp, Artificial Sequence
  Description of Artificial Sequence: Synthetic oligonucleotide
  Target: LAMA2; (-) strand; PAM type: NNGRRT; PAM sequence: GTGAGT
cttcttttgtgtgtcttttc

SEQ ID NO: 18189 - DNA, 20 bp, Artificial Sequence
  Description of Artificial Sequence: Synthetic oligonucleotide
  Target: LAMA2; (-) strand; PAM type: NNGRRT; PAM sequence: CTGGAT
taaacccataccactgtcct

SEQ ID NO: 18190 - DNA, 20 bp, Artificial Sequence
  Description of Artificial Sequence: Synthetic oligonucleotide
  Target: LAMA2; (-) strand; PAM type: NNGRRT; PAM sequence: GTGAAT
atttccttaaaatttattgt

SEQ ID NO: 18191 - DNA, 20 bp, Artificial Sequence
  Description of Artificial Sequence: Synthetic oligonucleotide
  Target: LAMA2; (-) strand; PAM type: NNGRRT; PAM sequence: CAGGAT
aaaagaaaagaaattcatat

SEQ ID NO: 18192 - DNA, 20 bp, Artificial Sequence
  Description of Artificial Sequence: Synthetic oligonucleotide
  Target: LAMA2; (-) strand; PAM type: NNGRRT; PAM sequence: CAGAGT
ctgtactccagcctgggcaa

SEQ ID NO: 18193 - DNA, 20 bp, Artificial Sequence
  Description of Artificial Sequence: Synthetic oligonucleotide
  Target: LAMA2; (-) strand; PAM type: NNGRRT; PAM sequence: GAGAAT
tactcgggaggataaggcag

SEQ ID NO: 18194 - DNA, 20 bp, Artificial Sequence
  Description of Artificial Sequence: Synthetic oligonucleotide
  Target: LAMA2; (-) strand; PAM type: NNGRRT; PAM sequence: GAGGAT
ctgtaatcccagctactcgg

SEQ ID NO: 18195 - DNA, 20 bp, Artificial Sequence
  Description of Artificial Sequence: Synthetic oligonucleotide
  Target: LAMA2; (-) strand; PAM type: NNGRRT; PAM sequence: AGGAGT
ggcaggaggatcacctgagt

SEQ ID NO: 18196 - DNA, 20 bp, Artificial Sequence
  Description of Artificial Sequence: Synthetic oligonucleotide
  Target: LAMA2; (-) strand; PAM type: NNGRRT; PAM sequence: CTGAGT
ggccgaggcaggaggatcac

SEQ ID NO: 18197 - DNA, 20 bp, Artificial Sequence
  Description of Artificial Sequence: Synthetic oligonucleotide
  Target: LAMA2; (-) strand; PAM type: NNGRRT; PAM sequence: GAGGAT
actttgggaggccgaggcag

SEQ ID NO: 18198 - DNA, 20 bp, Artificial Sequence
  Description of Artificial Sequence: Synthetic oligonucleotide
  Target: LAMA2; (-) strand; PAM type: NNGRRT; PAM sequence: GAGGAT
ccaataagaaattcatatca

SEQ ID NO: 18199 - DNA, 20 bp, Artificial Sequence
  Description of Artificial Sequence: Synthetic oligonucleotide
  Target: LAMA2; (-) strand; PAM type: NNGRRT; PAM sequence: AGGGAT
ccacagggctggacacataa

SEQ ID NO: 18200 - DNA, 20 bp, Artificial Sequence
  Description of Artificial Sequence: Synthetic oligonucleotide
  Target: LAMA2; (-) strand; PAM type: NNGRRT; PAM sequence: TAGAAT
tactgcctttagtccgattc

SEQ ID NO: 18201 - DNA, 20 bp, Artificial Sequence
  Description of Artificial Sequence: Synthetic oligonucleotide
  Target: LAMA2; (-) strand; PAM type: NNGRRT; PAM sequence: ACGAAT
atgtcctctgatcacattca

SEQ ID NO: 18202 - DNA, 20 bp, Artificial Sequence
  Description of Artificial Sequence: Synthetic oligonucleotide
  Target: LAMA2; (-) strand; PAM type: NNGRRT; PAM sequence: ATGAGT
tttagccctttttttacata

SEQ ID NO: 18203 - DNA, 20 bp, Artificial Sequence
  Description of Artificial Sequence: Synthetic oligonucleotide
  Target: LAMA2; (-) strand; PAM type: NNGRRT; PAM sequence: CTGAAT
tggacatctgcaatagcctc

SEQ ID NO: 18204 - DNA, 20 bp, Artificial Sequence
  Description of Artificial Sequence: Synthetic oligonucleotide
  Target: LAMA2; (-) strand; PAM type: NNGRRT; PAM sequence: CAGGGT
cagatccatctgcttctctc

SEQ ID NO: 18205 - DNA, 20 bp, Artificial Sequence
  Description of Artificial Sequence: Synthetic oligonucleotide
  Target: LAMA2; (-) strand; PAM type: NNGRRT; PAM sequence: GGGAGT
agtgtctcatagagaaaacc

SEQ ID NO: 18206 - DNA, 20 bp, Artificial Sequence
  Description of Artificial Sequence: Synthetic oligonucleotide
  Target: LAMA2; (-) strand; PAM type: NNGRRT; PAM sequence: CTGAAT
acacccagatttagctactc

SEQ ID NO: 18207 - DNA, 20 bp, Artificial Sequence
  Description of Artificial Sequence: Synthetic oligonucleotide
  Target: LAMA2; (-) strand; PAM type: NNGRRT; PAM sequence: TAGAGT
tttaatattactctccaaag

SEQ ID NO: 18208 - DNA, 20 bp, Artificial Sequence
  Description of Artificial Sequence: Synthetic oligonucleotide
  Target: LAMA2; (-) strand; PAM type: NNGRRT; PAM sequence: TAGAGT
acccatttacacaccatctg

SEQ ID NO: 18209 - DNA, 20 bp, Artificial Sequence
  Description of Artificial Sequence: Synthetic oligonucleotide
  Target: LAMA2; (-) strand; PAM type: NNGRRT; PAM sequence: CTGGAT
tcgttcctcagggcttaatc

SEQ ID NO: 18210 - DNA, 20 bp, Artificial Sequence
  Description of Artificial Sequence: Synthetic oligonucleotide
  Target: LAMA2; (-) strand; PAM type: NNGRRT; PAM sequence: ATGAAT
agagactcatctatgctttg

SEQ ID NO: 18211 - DNA, 20 bp, Artificial Sequence
  Description of Artificial Sequence: Synthetic oligonucleotide
  Target: LAMA2; (-) strand; PAM type: NNGRRT; PAM sequence: GGGGGT
gtacccaaaatattcataga

SEQ ID NO: 18212 - DNA, 20 bp, Artificial Sequence
  Description of Artificial Sequence: Synthetic oligonucleotide
  Target: LAMA2; (-) strand; PAM type: NNGRRT; PAM sequence: AAGGGT
tatttggaatgttccagcat

SEQ ID NO: 18213 - DNA, 20 bp, Artificial Sequence
  Description of Artificial Sequence: Synthetic oligonucleotide
  Target: LAMA2; (-) strand; PAM type: NNGRRT; PAM sequence: TGGAAT
ccatagctggggcacttatt

SEQ ID NO: 18214 - DNA, 20 bp, Artificial Sequence
  Description of Artificial Sequence: Synthetic oligonucleotide
  Target: LAMA2; (-) strand; PAM type: NNGRRT; PAM sequence: CAGAAT
taaatcatcccaaaggcttt

SEQ ID NO: 18215 - DNA, 20 bp, Artificial Sequence
  Description of Artificial Sequence: Synthetic oligonucleotide
  Target: LAMA2; (-) strand; PAM type: NNGRRT; PAM sequence: TAGAGT
atccatcacccatttaaaat

SEQ ID NO: 18216 - DNA, 20 bp, Artificial Sequence
  Description of Artificial Sequence: Synthetic oligonucleotide
  Target: LAMA2; (-) strand; PAM type: NNGRRT; PAM sequence: AGGGGT
ttattgagtacttactatct

SEQ ID NO: 18217 - DNA, 20 bp, Artificial Sequence
  Description of Artificial Sequence: Synthetic oligonucleotide
  Target: LAMA2; (-) strand; PAM type: NNGRRT; PAM sequence: TTGAGT
taccctgcttctgtcattta

SEQ ID NO: 18218 - DNA, 20 bp, Artificial Sequence
  Description of Artificial Sequence: Synthetic oligonucleotide
  Target: LAMA2; (-) strand; PAM type: NNGRRT; PAM sequence: TAGAGT
agttagcaaaacatcatatc

SEQ ID NO: 18219 - DNA, 20 bp, Artificial Sequence
  Description of Artificial Sequence: Synthetic oligonucleotide
  Target: LAMA2; (-) strand; PAM type: NNGRRT; PAM sequence: TAGAGT
tcacttcatgcttaataaat

SEQ ID NO: 18220 - DNA, 20 bp, Artificial Sequence
  Description of Artificial Sequence: Synthetic oligonucleotide
  Target: LAMA2; (-) strand; PAM type: NNGRRT; PAM sequence: ATGGGT
caatgttcaccatttgggtg

SEQ ID NO: 18221 - DNA, 20 bp, Artificial Sequence
  Description of Artificial Sequence: Synthetic oligonucleotide
  Target: LAMA2; (-) strand; PAM type: NNGRRT; PAM sequence: TTGGGT
ctgaatacaatgttcaccat

SEQ ID NO: 18222 - DNA, 20 bp, Artificial Sequence
  Description of Artificial Sequence: Synthetic oligonucleotide
  Target: LAMA2; (-) strand; PAM type: NNGRRT; PAM sequence: CTGAAT
gaggactgaaaaattactga

SEQ ID NO: 18223 - DNA, 20 bp, Artificial Sequence
  Description of Artificial Sequence: Synthetic oligonucleotide
  Target: LAMA2; (-) strand; PAM type: NNGRRT; PAM sequence: AGGAAT
aaaagggaagaggctgggag

SEQ ID NO: 18224 - DNA, 20 bp, Artificial Sequence
  Description of Artificial Sequence: Synthetic oligonucleotide
  Target: LAMA2; (-) strand; PAM type: NNGRRT; PAM sequence: AGGAAT
gatggaaataatagacaccc

SEQ ID NO: 18225 - DNA, 20 bp, Artificial Sequence
  Description of Artificial Sequence: Synthetic oligonucleotide
  Target: LAMA2; (-) strand; PAM type: NNGRRT; PAM sequence: ATGGAT
ttctaagtgggagctaaaca

SEQ ID NO: 18226 - DNA, 20 bp, Artificial Sequence
  Description of Artificial Sequence: Synthetic oligonucleotide
  Target: LAMA2; (-) strand; PAM type: NNGRRT; PAM sequence: TTGAAT
aataactcagaagcagaaaa

SEQ ID NO: 18227 - DNA, 20 bp, Artificial Sequence
  Description of Artificial Sequence: Synthetic oligonucleotide
  Target: LAMA2; (-) strand; PAM type: NNGRRT; PAM sequence: ATGGAT
atcatgtcctttgcagcaac

SEQ ID NO: 18228 - DNA, 20 bp, Artificial Sequence
  Description of Artificial Sequence: Synthetic oligonucleotide
  Target: LAMA2; (-) strand; PAM type: NNGRRT; PAM sequence: TGGAAT
ggtgtggtatatgaacacca

SEQ ID NO: 18229 - DNA, 20 bp, Artificial Sequence
  Description of Artificial Sequence: Synthetic oligonucleotide
  Target: LAMA2; (-) strand; PAM type: NNGRRT; PAM sequence: CTGGGT
ttgatatagcaatcccatta

SEQ ID NO: 18230 - DNA, 20 bp, Artificial Sequence
  Description of Artificial Sequence: Synthetic oligonucleotide
  Target: LAMA2; (-) strand; PAM type: NNGRRT; PAM sequence: GAGAGT
cccctatggaaatcaatatg

SEQ ID NO: 18231 - DNA, 20 bp, Artificial Sequence
  Description of Artificial Sequence: Synthetic oligonucleotide
  Target: LAMA2; (-) strand; PAM type: NNGRRT; PAM sequence: GGGAAT
aatgcttatacgctgctggt

SEQ ID NO: 18232 - DNA, 20 bp, Artificial Sequence
  Description of Artificial Sequence: Synthetic oligonucleotide
  Target: LAMA2; (-) strand; PAM type: NNGRRT; PAM sequence: GGGAAT
cggtgaggttgcagagaaaa

SEQ ID NO: 18233 - DNA, 20 bp, Artificial Sequence
  Description of Artificial Sequence: Synthetic oligonucleotide
  Target: LAMA2; (-) strand; PAM type: NNGRRT; PAM sequence: TAGAAT
agataccaagtcatacaaat

SEQ ID NO: 18234 - DNA, 20 bp, Artificial Sequence
  Description of Artificial Sequence: Synthetic oligonucleotide
  Target: LAMA2; (-) strand; PAM type: NNGRRT; PAM sequence: CAGAAT
acaaaataaacagacaactg

SEQ ID NO: 18235 - DNA, 20 bp, Artificial Sequence
  Description of Artificial Sequence: Synthetic oligonucleotide
  Target: LAMA2; (-) strand; PAM type: NNGRRT; PAM sequence: AAGAAT
tctcgacattggcctaggta

SEQ ID NO: 18236 - DNA, 20 bp, Artificial Sequence
  Description of Artificial Sequence: Synthetic oligonucleotide
  Target: LAMA2; (-) strand; PAM type: NNGRRT; PAM sequence: AAGAAT
atttaataactggctagcgg

SEQ ID NO: 18237 - DNA, 20 bp, Artificial Sequence
  Description of Artificial Sequence: Synthetic oligonucleotide
  Target: LAMA2; (-) strand; PAM type: NNGRRT; PAM sequence: GAGAAT
taaggcaatgagacaaaata

SEQ ID NO: 18238 - DNA, 20 bp, Artificial Sequence
  Description of Artificial Sequence: Synthetic oligonucleotide
  Target: LAMA2; (-) strand; PAM type: NNGRRT; PAM sequence: CAGAAT
attaccaatgtcatttttca

SEQ ID NO: 18239 - DNA, 20 bp, Artificial Sequence
  Description of Artificial Sequence: Synthetic oligonucleotide
  Target: LAMA2; (-) strand; PAM type: NNGRRT; PAM sequence: AAGAAT
attccatgctcatggataga

SEQ ID NO: 18240 - DNA, 20 bp, Artificial Sequence
  Description of Artificial Sequence: Synthetic oligonucleotide
  Target: LAMA2; (-) strand; PAM type: NNGRRT; PAM sequence: ATGGAT
tggaaaaacattccatgctc

SEQ ID NO: 18241 - DNA, 20 bp, Artificial Sequence
  Description of Artificial Sequence: Synthetic oligonucleotide
  Target: LAMA2; (-) strand; PAM type: NNGRRT; PAM sequence: AGGAAT
ggaggtaaaagatctctacc

SEQ ID NO: 18242 - DNA, 20 bp, Artificial Sequence
  Description of Artificial Sequence: Synthetic oligonucleotide
  Target: LAMA2; (-) strand; PAM type: NNGRRT; PAM sequence: AGGAAT
ctattaaaagtgaaatacct

SEQ ID NO: 18243 - DNA, 20 bp, Artificial Sequence
  Description of Artificial Sequence: Synthetic oligonucleotide
  Target: LAMA2; (-) strand; PAM type: NNGRRT; PAM sequence: TAGGAT
catcatccatctaattaaga

SEQ ID NO: 18244 - DNA, 20 bp, Artificial Sequence
  Description of Artificial Sequence: Synthetic oligonucleotide
  Target: LAMA2; (-) strand; PAM type: NNGRRT; PAM sequence: ATGGAT
gaagggctacaaggtccact

SEQ ID NO: 18245 - DNA, 20 bp, Artificial Sequence
  Description of Artificial Sequence: Synthetic oligonucleotide
  Target: LAMA2; (-) strand; PAM type: NNGRRT; PAM sequence: TAGAAT
atggatcttaggcatgttta

SEQ ID NO: 18246 - DNA, 20 bp, Artificial Sequence
  Description of Artificial Sequence: Synthetic oligonucleotide
  Target: LAMA2; (-) strand; PAM type: NNGRRT; PAM sequence: ATGGAT
agctaaccatacatactcca

SEQ ID NO: 18247 - DNA, 20 bp, Artificial Sequence
  Description of Artificial Sequence: Synthetic oligonucleotide
  Target: LAMA2; (-) strand; PAM type: NNGRRT; PAM sequence: TTGAAT
aagtagtacatgtttctctg

SEQ ID NO: 18248 - DNA, 20 bp, Artificial Sequence
  Description of Artificial Sequence: Synthetic oligonucleotide
  Target: LAMA2; (-) strand; PAM type: NNGRRT; PAM sequence: AAGAGT
cttttcagcttctaaaataa

SEQ ID NO: 18249 - DNA, 20 bp, Artificial Sequence
  Description of Artificial Sequence: Synthetic oligonucleotide
  Target: LAMA2; (-) strand; PAM type: NNGRRT; PAM sequence: GAGAGT
cagaagcaaacaaaaccaaa

SEQ ID NO: 18250 - DNA, 20 bp, Artificial Sequence
  Description of Artificial Sequence: Synthetic oligonucleotide
  Target: LAMA2; (-) strand; PAM type: NNGRRT; PAM sequence: TTGAAT
ctggggggaaagaaagaagg

SEQ ID NO: 18251 - DNA, 20 bp, Artificial Sequence
  Description of Artificial Sequence: Synthetic oligonucleotide
  Target: LAMA2; (-) strand; PAM type: NNGRRT; PAM sequence: AAGGGT
tttgatccacgatgcagatg

SEQ ID NO: 18252 - DNA, 20 bp, Artificial Sequence
  Description of Artificial Sequence: Synthetic oligonucleotide
  Target: LAMA2; (-) strand; PAM type: NNGRRT; PAM sequence: GAGAAT
gcacaaagcaaaatgtggaa

SEQ ID NO: 18253 - DNA, 20 bp, Artificial Sequence
  Description of Artificial Sequence: Synthetic oligonucleotide
  Target: LAMA2; (-) strand; PAM type: NNGRRT; PAM sequence: GTGGGT
ctgctgaaatcctgagctat

SEQ ID NO: 18254 - DNA, 20 bp, Artificial Sequence
  Description of Artificial Sequence: Synthetic oligonucleotide
  Target: LAMA2; (-) strand; PAM type: NNGRRT; PAM sequence: GAGAAT
tcaatatttaaaagacaaaa

SEQ ID NO: 18255 - DNA, 20 bp, Artificial Sequence
  Description of Artificial Sequence: Synthetic oligonucleotide
  Target: LAMA2; (-) strand; PAM type: NNGRRT; PAM sequence: TTGAAT
aataaaatcaaaatttgtgt

SEQ ID NO: 18256 - DNA, 20 bp, Artificial Sequence
  Description of Artificial Sequence: Synthetic oligonucleotide
  Target: LAMA2; (-) strand; PAM type: NNGRRT; PAM sequence: AGGAAT
aatcacctaccatctctcaa

SEQ ID NO: 18257 - DNA, 20 bp, Artificial Sequence
  Description of Artificial Sequence: Synthetic oligonucleotide
  Target: LAMA2; (-) strand; PAM type: NNGRRT; PAM sequence: TGGAGT
aattgataactgatgatagc

SEQ ID NO: 18258 - DNA, 20 bp, Artificial Sequence
  Description of Artificial Sequence: Synthetic oligonucleotide
  Target: LAMA2; (-) strand; PAM type: NNGRRT; PAM sequence: TGGAGT
attaaattaaatgaatattg

SEQ ID NO: 18259 - DNA, 20 bp, Artificial Sequence
  Description of Artificial Sequence: Synthetic oligonucleotide
  Target: LAMA2; (-) strand; PAM type: NNGRRT; PAM sequence: ATGAAT
aaaaaaaaaaattaaattaa

SEQ ID NO: 18260 - DNA, 20 bp, Artificial Sequence
  Description of Artificial Sequence: Synthetic oligonucleotide
  Target: LAMA2; (-) strand; PAM type: NNGRRT; PAM sequence: GAGAAT
tactcgggaggctgaggcgg

SEQ ID NO: 18261 - DNA, 20 bp, Artificial Sequence
  Description of Artificial Sequence: Synthetic oligonucleotide
  Target: LAMA2; (-) strand; PAM type: NNGRRT; PAM sequence: ATGAAT
acttgattataactgacaaa

SEQ ID NO: 18262 - DNA, 20 bp, Artificial Sequence
  Description of Artificial Sequence: Synthetic oligonucleotide
  Target: LAMA2; (-) strand; PAM type: NNGRRT; PAM sequence: TAGAAT
tgaagatagaaagattagga

SEQ ID NO: 18263 - DNA, 20 bp, Artificial Sequence
  Description of Artificial Sequence: Synthetic oligonucleotide
  Target: LAMA2; (-) strand; PAM type: NNGRRT; PAM sequence: TAGGAT
cagagtgaagatagaaagat

SEQ ID NO: 18264 - DNA, 20 bp, Artificial Sequence
  Description of Artificial Sequence: Synthetic oligonucleotide
  Target: LAMA2; (-) strand; PAM type: NNGRRT; PAM sequence: CAGAGT
tgtacacacagactcacaca

SEQ ID NO: 18265 - DNA, 20 bp, Artificial Sequence
  Description of Artificial Sequence: Synthetic oligonucleotide
  Target: LAMA2; (-) strand; PAM type: NNGRRT; PAM sequence: ATGGAT
gctcatgatcaagaaggaag

SEQ ID NO: 18266 - DNA, 20 bp, Artificial Sequence
  Description of Artificial Sequence: Synthetic oligonucleotide
  Target: LAMA2; (-) strand; PAM type: NNGRRT; PAM sequence: AGGGAT
ctgtacaggtatcaaaacct

SEQ ID NO: 18267 - DNA, 20 bp, Artificial Sequence
  Description of Artificial Sequence: Synthetic oligonucleotide
  Target: LAMA2; (-) strand; PAM type: NNGRRT; PAM sequence: AGGAAT
agtagagatagtcatatcag

SEQ ID NO: 18268 - DNA, 20 bp, Artificial Sequence
  Description of Artificial Sequence: Synthetic oligonucleotide
  Target: LAMA2; (-) strand; PAM type: NNGRRT; PAM sequence: AGGAGT
aaggaaaatcagataatgat

SEQ ID NO: 18269 - DNA, 20 bp, Artificial Sequence
  Description of Artificial Sequence: Synthetic oligonucleotide
  Target: LAMA2; (-) strand; PAM type: NNGRRT; PAM sequence: TTGAAT
tgtgactttggcctaggaat

SEQ ID NO: 18270 - DNA, 20 bp, Artificial Sequence
  Description of Artificial Sequence: Synthetic oligonucleotide
  Target: LAMA2; (-) strand; PAM type: NNGRRT; PAM sequence: AGGAAT
tgtacatgtgactttggcct

SEQ ID NO: 18271 - DNA, 20 bp, Artificial Sequence
  Description of Artificial Sequence: Synthetic oligonucleotide
  Target: LAMA2; (-) strand; PAM type: NNGRRT; PAM sequence: GAGGGT
ttggcattgtgtctactatt

SEQ ID NO: 18272 - DNA, 20 bp, Artificial Sequence
  Description of Artificial Sequence: Synthetic oligonucleotide
  Target: LAMA2; (-) strand; PAM type: NNGRRT; PAM sequence: TTGAGT
ttcatcctccatttcttttc

SEQ ID NO: 18273 - DNA, 20 bp, Artificial Sequence
  Description of Artificial Sequence: Synthetic oligonucleotide
  Target: LAMA2; (-) strand; PAM type: NNGRRT; PAM sequence: ATGAGT
tttaaatttactgaataaga

SEQ ID NO: 18274 - DNA, 20 bp, Artificial Sequence
  Description of Artificial Sequence: Synthetic oligonucleotide
  Target: LAMA2; (-) strand; PAM type: NNGRRT; PAM sequence: AAGAAT
caaatttaaatttactgaat

SEQ ID NO: 18275 - DNA, 20 bp, Artificial Sequence
  Description of Artificial Sequence: Synthetic oligonucleotide
  Target: LAMA2; (-) strand; PAM type: NNGRRT; PAM sequence: CTGAAT
gccactcaaatttaaattta

SEQ ID NO: 18276 - DNA, 20 bp, Artificial Sequence
  Description of Artificial Sequence: Synthetic oligonucleotide
  Target: LAMA2; (-) strand; PAM type: NNGRRT; PAM sequence: TGGAAT
agggcatggatagcactagt

SEQ ID NO: 18277 - DNA, 20 bp, Artificial Sequence
  Description of Artificial Sequence: Synthetic oligonucleotide
  Target: LAMA2; (-) strand; PAM type: NNGRRT; PAM sequence: ATGGAT
tctataaaattactgagggc

SEQ ID NO: 18278 - DNA, 20 bp, Artificial Sequence
  Description of Artificial Sequence: Synthetic oligonucleotide
  Target: LAMA2; (-) strand; PAM type: NNGRRT; PAM sequence: CAGAAT
tgttttctgactttgccaca

SEQ ID NO: 18279 - DNA, 20 bp, Artificial Sequence
  Description of Artificial Sequence: Synthetic oligonucleotide
  Target: LAMA2; (-) strand; PAM type: NNGRRT; PAM sequence: AAGAAT
attatcttgtcccttcaaca

SEQ ID NO: 18280 - DNA, 20 bp, Artificial Sequence
  Description of Artificial Sequence: Synthetic oligonucleotide
  Target: LAMA2; (-) strand; PAM type: NNGRRT; PAM sequence: GTGAGT
tttcttttttaaagactttt

SEQ ID NO: 18281 - DNA, 20 bp, Artificial Sequence
  Description of Artificial Sequence: Synthetic oligonucleotide
  Target: LAMA2; (-) strand; PAM type: NNGRRT; PAM sequence: AAGAAT
ctaggttgtgagctacttat

SEQ ID NO: 18282 - DNA, 20 bp, Artificial Sequence
  Description of Artificial Sequence: Synthetic oligonucleotide
  Target: LAMA2; (-) strand; PAM type: NNGRRT; PAM sequence: AGGGAT
tattgtgaactgtgcatgcg

SEQ ID NO: 18283 - DNA, 20 bp, Artificial Sequence
  Description of Artificial Sequence: Synthetic oligonucleotide
  Target: LAMA2; (-) strand; PAM type: NNGRRT; PAM sequence: GTGAGT
acagggctgcacagcaggaa

SEQ ID NO: 18284 - DNA, 20 bp, Artificial Sequence
  Description of Artificial Sequence: Synthetic oligonucleotide
  Target: LAMA2; (-) strand; PAM type: NNGRRT; PAM sequence: CGGGGT
attacagtagcatcctaacc

SEQ ID NO: 18285 - DNA, 20 bp, Artificial Sequence
  Description of Artificial Sequence: Synthetic oligonucleotide
  Target: LAMA2; (-) strand; PAM type: NNGRRT; PAM sequence: ATGGAT
tttttttaattattgtaaag

SEQ ID NO: 18286 - DNA, 20 bp, Artificial Sequence
  Description of Artificial Sequence: Synthetic oligonucleotide
  Target: LAMA2; (-) strand; PAM type: NNGRRT; PAM sequence: CTGAGT
gatcctcttgcctgagcatc

SEQ ID NO: 18287 - DNA, 20 bp, Artificial Sequence
  Description of Artificial Sequence: Synthetic oligonucleotide
  Target: LAMA2; (-) strand; PAM type: NNGRRT; PAM sequence: TGGAGT
ctcactcttgttgcccaggc

SEQ ID NO: 18288 - DNA, 20 bp, Artificial Sequence
  Description of Artificial Sequence: Synthetic oligonucleotide
  Target: LAMA2; (-) strand; PAM type: NNGRRT; PAM sequence: CAGGGT
tttgtttaatttttttaaga

SEQ ID NO: 18289 - DNA, 20 bp, Artificial Sequence
  Description of Artificial Sequence: Synthetic oligonucleotide
  Target: LAMA2; (-) strand; PAM type: NNGRRT; PAM sequence: ATGGAT
cacttctgcagatctcctca

SEQ ID NO: 18290 - DNA, 20 bp, Artificial Sequence
  Description of Artificial Sequence: Synthetic oligonucleotide
  Target: LAMA2; (-) strand; PAM type: NNGRRT; PAM sequence: CTGAGT
tatcacctcctgcatcatcc

SEQ ID NO: 18291 - DNA, 20 bp, Artificial Sequence
  Description of Artificial Sequence: Synthetic oligonucleotide
  Target: LAMA2; (-) strand; PAM type: NNGRRT; PAM sequence: ATGAGT
cacaattttcataattccaa

SEQ ID NO: 18292 - DNA, 20 bp, Artificial Sequence
  Description of Artificial Sequence: Synthetic oligonucleotide
  Target: LAMA2; (-) strand; PAM type: NNGRRT; PAM sequence: CAGAAT
caaatgaagaaacatatacc

SEQ ID NO: 18293 - DNA, 20 bp, Artificial Sequence
  Description of Artificial Sequence: Synthetic oligonucleotide
  Target: LAMA2; (-) strand; PAM type: NNGRRT; PAM sequence: TTGAAT
caaagaagcctagttcaaac

SEQ ID NO: 18294 - DNA, 20 bp, Artificial Sequence
  Description of Artificial Sequence: Synthetic oligonucleotide
  Target: LAMA2; (-) strand; PAM type: NNGRRT; PAM sequence: AAGAAT
ggttgttgtctggtggcaag

SEQ ID NO: 18295 - DNA, 20 bp, Artificial Sequence
  Description of Artificial Sequence: Synthetic oligonucleotide
  Target: LAMA2; (-) strand; PAM type: NNGRRT; PAM sequence: AGGGGT
agaaattcattgaacaatta

SEQ ID NO: 18296 - DNA, 20 bp, Artificial Sequence
  Description of Artificial Sequence: Synthetic oligonucleotide
  Target: LAMA2; (-) strand; PAM type: NNGRRT; PAM sequence: TAGAAT
ataaatgaagaactttgact

SEQ ID NO: 18297 - DNA, 20 bp, Artificial Sequence
  Description of Artificial Sequence: Synthetic oligonucleotide
  Target: LAMA2; (-) strand; PAM type: NNGRRT; PAM sequence: CTGAGT
gtcctggataagcaaaattg

SEQ ID NO: 18298 - DNA, 20 bp, Artificial Sequence
  Description of Artificial Sequence: Synthetic oligonucleotide
  Target: LAMA2; (-) strand; PAM type: NNGRRT; PAM sequence: CTGGAT
aactgggcaaaaagatagtc

SEQ ID NO: 18299 - DNA, 20 bp, Artificial Sequence
  Description of Artificial Sequence: Synthetic oligonucleotide
  Target: LAMA2; (-) strand; PAM type: NNGRRT; PAM sequence: CAGAAT
actatcttttcaacttcctt

SEQ ID NO: 18300 - DNA, 20 bp, Artificial Sequence
  Description of Artificial Sequence: Synthetic oligonucleotide
  Target: LAMA2; (-) strand; PAM type: NNGRRT; PAM sequence: TTGGAT
atcaaatgtagaaaaggatg

SEQ ID NO: 18301 - DNA, 20 bp, Artificial Sequence
  Description of Artificial Sequence: Synthetic oligonucleotide
  Target: LAMA2; (-) strand; PAM type: NNGRRT; PAM sequence: AAGGAT
ttcttaaatcaaatgtagaa

SEQ ID NO: 18302 - DNA, 20 bp, Artificial Sequence
  Description of Artificial Sequence: Synthetic oligonucleotide
  Target: LAMA2; (-) strand; PAM type: NNGRRT; PAM sequence: TTGGAT
tgtaagatttatctcattct

SEQ ID NO: 18303 - DNA, 20 bp, Artificial Sequence
  Description of Artificial Sequence: Synthetic oligonucleotide
  Target: LAMA2; (-) strand; PAM type: NNGRRT; PAM sequence: TCGAGT
ctaattttagaatctagatt

SEQ ID NO: 18304 - DNA, 20 bp, Artificial Sequence
  Description of Artificial Sequence: Synthetic oligonucleotide
  Target: LAMA2; (-) strand; PAM type: NNGRRT; PAM sequence: TAGAAT
cactatgcttggcctaattt

SEQ ID NO: 18305 - DNA, 20 bp, Artificial Sequence
  Description of Artificial Sequence: Synthetic oligonucleotide
  Target: LAMA2; (-) strand; PAM type: NNGRRT; PAM sequence: TGGGAT
acctcagcctcccaaatccc

SEQ ID NO: 18306 - DNA, 20 bp, Artificial Sequence
  Description of Artificial Sequence: Synthetic oligonucleotide
  Target: LAMA2; (-) strand; PAM type: NNGRRT; PAM sequence: CTGAGT
aatcctcctgcctcagcttc

SEQ ID NO: 18307 - DNA, 20 bp, Artificial Sequence
  Description of Artificial Sequence: Synthetic oligonucleotide
  Target: LAMA2; (-) strand; PAM type: NNGRRT; PAM sequence: TGGAGT
tctcattctgttgcccaggt

SEQ ID NO: 18308 - DNA, 20 bp, Artificial Sequence
  Description of Artificial Sequence: Synthetic oligonucleotide
  Target: LAMA2; (-) strand; PAM type: NNGRRT; PAM sequence: CAGGGT
tattttttttttttttgaga

SEQ ID NO: 18309 - DNA, 20 bp, Artificial Sequence
  Description of Artificial Sequence: Synthetic oligonucleotide
  Target: LAMA2; (-) strand; PAM type: NNGRRT; PAM sequence: ATGAGT
aaagtgttaggattacaggc

SEQ ID NO: 18310 - DNA, 20 bp, Artificial Sequence
  Description of Artificial Sequence: Synthetic oligonucleotide
  Target: LAMA2; (-) strand; PAM type: NNGRRT; PAM sequence: TAGGAT
gcctcagcctctgaaagtgt

SEQ ID NO: 18311 - DNA, 20 bp, Artificial Sequence
  Description of Artificial Sequence: Synthetic oligonucleotide
  Target: LAMA2; (-) strand; PAM type: NNGRRT; PAM sequence: CGGGGT
ttttgtatttttagtagaga

SEQ ID NO: 18312 - DNA, 20 bp, Artificial Sequence
  Description of Artificial Sequence: Synthetic oligonucleotide
  Target: LAMA2; (-) strand; PAM type: NNGRRT; PAM sequence: TGGGAT
gcctcagcctcccgagtagc

SEQ ID NO: 18313 - DNA, 20 bp, Artificial Sequence
  Description of Artificial Sequence: Synthetic oligonucleotide
  Target: LAMA2; (-) strand; PAM type: NNGRRT; PAM sequence: CCGAGT
gattctcctgcctcagcctc

SEQ ID NO: 18314 - DNA, 20 bp, Artificial Sequence
  Description of Artificial Sequence: Synthetic oligonucleotide
  Target: LAMA2; (-) strand; PAM type: NNGRRT; PAM sequence: TGGAGT
tctcgctctgttgcccagga

SEQ ID NO: 18315 - DNA, 20 bp, Artificial Sequence
  Description of Artificial Sequence: Synthetic oligonucleotide
  Target: LAMA2; (-) strand; PAM type: NNGRRT; PAM sequence: CAGGAT
tggagtctcgctctgttgcc

SEQ ID NO: 18316 - DNA, 20 bp, Artificial Sequence
  Description of Artificial Sequence: Synthetic oligonucleotide
  Target: LAMA2; (-) strand; PAM type: NNGRRT; PAM sequence: TGGAGT
tattattactattattgaca

SEQ ID NO: 18317 - DNA, 20 bp, Artificial Sequence
  Description of Artificial Sequence: Synthetic oligonucleotide
  Target: LAMA2; (-) strand; PAM type: NNGRRT; PAM sequence: ATGGAT
ttatgggtagatatgttcag

SEQ ID NO: 18318 - DNA, 20 bp, Artificial Sequence
  Description of Artificial Sequence: Synthetic oligonucleotide
  Target: LAMA2; (-) strand; PAM type: NNGRRT; PAM sequence: ATGGGT
ttaaaagataaaatggattt

SEQ ID NO: 18319 - DNA, 20 bp, Artificial Sequence
  Description of Artificial Sequence: Synthetic oligonucleotide
  Target: LAMA2; (-) strand; PAM type: NNGRRT; PAM sequence: ATGGAT
gcagtatattaaaagataaa

SEQ ID NO: 18320 - DNA, 20 bp, Artificial Sequence
  Description of Artificial Sequence: Synthetic oligonucleotide
  Target: LAMA2; (-) strand; PAM type: NNGRRT; PAM sequence: AGGAAT
atattcatgatcatgtgtat

SEQ ID NO: 18321 - DNA, 20 bp, Artificial Sequence
  Description of Artificial Sequence: Synthetic oligonucleotide
  Target: LAMA2; (-) strand; PAM type: NNGRRT; PAM sequence: CGGGGT
ttcagtgagtgaatgttaca

SEQ ID NO: 18322 - DNA, 20 bp, Artificial Sequence
  Description of Artificial Sequence: Synthetic oligonucleotide
  Target: LAMA2; (-) strand; PAM type: NNGRRT; PAM sequence: GTGAAT
ttaaatattacattcagtga

SEQ ID NO: 18323 - DNA, 20 bp, Artificial Sequence
  Description of Artificial Sequence: Synthetic oligonucleotide
  Target: LAMA2; (-) strand; PAM type: NNGRRT; PAM sequence: GTGAGT
ttaattaaatattacattca

SEQ ID NO: 18324 - DNA, 20 bp, Artificial Sequence
  Description of Artificial Sequence: Synthetic oligonucleotide
  Target: LAMA2; (-) strand; PAM type: NNGRRT; PAM sequence: TGGGAT
agaggcataaagaaaatttc

SEQ ID NO: 18325 - DNA, 20 bp, Artificial Sequence
  Description of Artificial Sequence: Synthetic oligonucleotide
  Target: LAMA2; (-) strand; PAM type: NNGRRT; PAM sequence: GTGGAT
atataagtttacaccaaaga

SEQ ID NO: 18326 - DNA, 20 bp, Artificial Sequence
  Description of Artificial Sequence: Synthetic oligonucleotide
  Target: LAMA2; (-) strand; PAM type: NNGRRT; PAM sequence: AAGAGT
cataatataagtttacacca

SEQ ID NO: 18327 - DNA, 20 bp, Artificial Sequence
  Description of Artificial Sequence: Synthetic oligonucleotide
  Target: LAMA2; (-) strand; PAM type: NNGRRT; PAM sequence: AAGGAT
acaatgctgatgactccaaa

SEQ ID NO: 18328 - DNA, 20 bp, Artificial Sequence
  Description of Artificial Sequence: Synthetic oligonucleotide
  Target: LAMA2; (-) strand; PAM type: NNGRRT; PAM sequence: ATGAAT
tggaaacaccttaggtttcc

SEQ ID NO: 18329 - DNA, 20 bp, Artificial Sequence
  Description of Artificial Sequence: Synthetic oligonucleotide
  Target: LAMA2; (-) strand; PAM type: NNGRRT; PAM sequence: GGGAAT
aagtctgctgcattgctgtt

SEQ ID NO: 18330 - DNA, 20 bp, Artificial Sequence
  Description of Artificial Sequence: Synthetic oligonucleotide
  Target: LAMA2; (-) strand; PAM type: NNGRRT; PAM sequence: GTGGGT
acaactataataaagaaatg

SEQ ID NO: 18331 - DNA, 20 bp, Artificial Sequence
  Description of Artificial Sequence: Synthetic oligonucleotide
  Target: LAMA2; (-) strand; PAM type: NNGRRT; PAM sequence: TAGAAT
tcattgcatatgtttgtaaa

SEQ ID NO: 18332 - DNA, 20 bp, Artificial Sequence
  Description of Artificial Sequence: Synthetic oligonucleotide
  Target: LAMA2; (-) strand; PAM type: NNGRRT; PAM sequence: TAGAAT
gaaaaatgtaacacagtatc

SEQ ID NO: 18333 - DNA, 20 bp, Artificial Sequence
  Description of Artificial Sequence: Synthetic oligonucleotide
  Target: LAMA2; (-) strand; PAM type: NNGRRT; PAM sequence: TTGAAT
aatggtaacaacaaaaaata

SEQ ID NO: 18334 - DNA, 20 bp, Artificial Sequence
  Description of Artificial Sequence: Synthetic oligonucleotide
  Target: LAMA2; (-) strand; PAM type: NNGRRT; PAM sequence: TGGAAT
tactgagatcaaccagatgt

SEQ ID NO: 18335 - DNA, 20 bp, Artificial Sequence
  Description of Artificial Sequence: Synthetic oligonucleotide
  Target: LAMA2; (-) strand; PAM type: NNGRRT; PAM sequence: CAGAGT
cagaggaacataacaaaacc

SEQ ID NO: 18336 - DNA, 20 bp, Artificial Sequence
  Description of Artificial Sequence: Synthetic oligonucleotide
  Target: LAMA2; (-) strand; PAM type: NNGRRT; PAM sequence: GTGAGT
gcgacaacaaaaaagaatgg

SEQ ID NO: 18337 - DNA, 20 bp, Artificial Sequence
  Description of Artificial Sequence: Synthetic oligonucleotide
  Target: LAMA2; (-) strand; PAM type: NNGRRT; PAM sequence: ATGGGT
tgatgcgacaacaaaaaaga

SEQ ID NO: 18338 - DNA, 20 bp, Artificial Sequence
  Description of Artificial Sequence: Synthetic oligonucleotide
  Target: LAMA2; (-) strand; PAM type: NNGRRT; PAM sequence: AAGAAT
caactgatgcgacaacaaaa

SEQ ID NO: 18339 - DNA, 20 bp, Artificial Sequence
  Description of Artificial Sequence: Synthetic oligonucleotide
  Target: LAMA2; (-) strand; PAM type: NNGRRT; PAM sequence: CAGAAT
aaaaggcactggatgagctc

SEQ ID NO: 18340 - DNA, 20 bp, Artificial Sequence
  Description of Artificial Sequence: Synthetic oligonucleotide
  Target: LAMA2; (-) strand; PAM type: NNGRRT; PAM sequence: CTGGAT
atacttagaaggaaaaggca

SEQ ID NO: 18341 - DNA, 20 bp, Artificial Sequence
  Description of Artificial Sequence: Synthetic oligonucleotide
  Target: LAMA2; (-) strand; PAM type: NNGRRT; PAM sequence: ATGAAT
acaggtaagccaggaagact

SEQ ID NO: 18342 - DNA, 20 bp, Artificial Sequence
  Description of Artificial Sequence: Synthetic oligonucleotide
  Target: LAMA2; (-) strand; PAM type: NNGRRT; PAM sequence: TGGAGT
cacagcaaacaccagatatc

SEQ ID NO: 18343 - DNA, 20 bp, Artificial Sequence
  Description of Artificial Sequence: Synthetic oligonucleotide
  Target: LAMA2; (-) strand; PAM type: NNGRRT; PAM sequence: TTGGAT
ctaacttccactgtttttat

SEQ ID NO: 18344 - DNA, 20 bp, Artificial Sequence
  Description of Artificial Sequence: Synthetic oligonucleotide
  Target: LAMA2; (-) strand; PAM type: NNGRRT; PAM sequence: TAGGAT
tatatatatatatatggtaa

SEQ ID NO: 18345 - DNA, 20 bp, Artificial Sequence
  Description of Artificial Sequence: Synthetic oligonucleotide
  Target: LAMA2; (-) strand; PAM type: NNGRRT; PAM sequence: TAGAAT
tagaatattcatattatata

SEQ ID NO: 18346 - DNA, 20 bp, Artificial Sequence
  Description of Artificial Sequence: Synthetic oligonucleotide
  Target: LAMA2; (-) strand; PAM type: NNGRRT; PAM sequence: TAGAAT
ctatgtattttattagagat

SEQ ID NO: 18347 - DNA, 20 bp, Artificial Sequence
  Description of Artificial Sequence: Synthetic oligonucleotide
  Target: LAMA2; (-) strand; PAM type: NNGRRT; PAM sequence: TGGAGT
ctagactaaataagtttagt

SEQ ID NO: 18348 - DNA, 20 bp, Artificial Sequence
  Description of Artificial Sequence: Synthetic oligonucleotide
  Target: LAMA2; (-) strand; PAM type: NNGRRT; PAM sequence: CTGAAT
ctatgattgacatttttttt

SEQ ID NO: 18349 - DNA, 20 bp, Artificial Sequence
  Description of Artificial Sequence: Synthetic oligonucleotide
  Target: LAMA2; (-) strand; PAM type: NNGRRT; PAM sequence: GAGAGT
aaatagctgatgaaccttta

SEQ ID NO: 18350 - DNA, 20 bp, Artificial Sequence
  Description of Artificial Sequence: Synthetic oligonucleotide
  Target: LAMA2; (-) strand; PAM type: NNGRRT; PAM sequence: AGGAGT
gttaagattatgtaaacatt

SEQ ID NO: 18351 - DNA, 20 bp, Artificial Sequence
  Description of Artificial Sequence: Synthetic oligonucleotide
  Target: LAMA2; (-) strand; PAM type: NNGRRT; PAM sequence: TTGAAT
aatcaatatctgagctttta

SEQ ID NO: 18352 - DNA, 20 bp, Artificial Sequence
  Description of Artificial Sequence: Synthetic oligonucleotide
  Target: LAMA2; (-) strand; PAM type: NNGRRT; PAM sequence: ATGAAT
atgaatgaccaatttgaaga

SEQ ID NO: 18353 - DNA, 20 bp, Artificial Sequence
  Description of Artificial Sequence: Synthetic oligonucleotide
  Target: LAMA2; (-) strand; PAM type: NNGRRT; PAM sequence: AAGAAT
gctaatgaatgaccaatttg

SEQ ID NO: 18354 - DNA, 20 bp, Artificial Sequence
  Description of Artificial Sequence: Synthetic oligonucleotide
  Target: LAMA2; (-) strand; PAM type: NNGRRT; PAM sequence: ATGAAT
aggtctccaattagttgcta

SEQ ID NO: 18355 - DNA, 20 bp, Artificial Sequence
  Description of Artificial Sequence: Synthetic oligonucleotide
  Target: LAMA2; (-) strand; PAM type: NNGRRT; PAM sequence: GGGAAT
attgccttgttttatggtca

SEQ ID NO: 18356 - DNA, 20 bp, Artificial Sequence
  Description of Artificial Sequence: Synthetic oligonucleotide
  Target: LAMA2; (-) strand; PAM type: NNGRRT; PAM sequence: TAGGAT
acactaataaaatttacatt

SEQ ID NO: 18357 - DNA, 20 bp, Artificial Sequence
  Description of Artificial Sequence: Synthetic oligonucleotide
  Target: LAMA2; (-) strand; PAM type: NNGRRT; PAM sequence: TAGAGT
accatgccattgttgcttca

SEQ ID NO: 18358 - DNA, 20 bp, Artificial Sequence
  Description of Artificial Sequence: Synthetic oligonucleotide
  Target: LAMA2; (-) strand; PAM type: NNGRRT; PAM sequence: ATGAAT
taaatgatatgtacaaagtt

SEQ ID NO: 18359 - DNA, 20 bp, Artificial Sequence
  Description of Artificial Sequence: Synthetic oligonucleotide
  Target: LAMA2; (-) strand; PAM type: NNGRRT; PAM sequence: CAGAGT
atacagctacaaagggatta

SEQ ID NO: 18360 - DNA, 20 bp, Artificial Sequence
  Description of Artificial Sequence: Synthetic oligonucleotide
  Target: LAMA2; (-) strand; PAM type: NNGRRT; PAM sequence: AGGGAT
gcaaaagcatacagctacaa

SEQ ID NO: 18361 - DNA, 20 bp, Artificial Sequence
  Description of Artificial Sequence: Synthetic oligonucleotide
  Target: LAMA2; (-) strand; PAM type: NNGRRT; PAM sequence: TTGGAT
tatgttcagaaaatatagaa

SEQ ID NO: 18362 - DNA, 20 bp, Artificial Sequence
  Description of Artificial Sequence: Synthetic oligonucleotide
  Target: LAMA2; (-) strand; PAM type: NNGRRT; PAM sequence: TAGAAT
tgttgtatgttcagaaaata

SEQ ID NO: 18363 - DNA, 20 bp, Artificial Sequence
  Description of Artificial Sequence: Synthetic oligonucleotide
  Target: LAMA2; (-) strand; PAM type: NNGRRT; PAM sequence: AGGGAT
ggaagccaagaaaagagacc

SEQ ID NO: 18364 - DNA, 20 bp, Artificial Sequence
  Description of Artificial Sequence: Synthetic oligonucleotide
  Target: LAMA2; (-) strand; PAM type: NNGRRT; PAM sequence: ATGGGT
ctcattcctgttttgcaggt

SEQ ID NO: 18365 - DNA, 20 bp, Artificial Sequence
  Description of Artificial Sequence: Synthetic oligonucleotide
  Target: LAMA2; (-) strand; PAM type: NNGRRT; PAM sequence: TCGGAT
gggcattgtcactttttctc

SEQ ID NO: 18366 - DNA, 20 bp, Artificial Sequence
  Description of Artificial Sequence: Synthetic oligonucleotide
  Target: LAMA2; (-) strand; PAM type: NNGRRT; PAM sequence: ATGAGT
ttctcttgctcgcttatatg

SEQ ID NO: 18367 - DNA, 20 bp, Artificial Sequence
  Description of Artificial Sequence: Synthetic oligonucleotide
  Target: LAMA2; (-) strand; PAM type: NNGRRT; PAM sequence: GGGAAT
taagaacaaagagacatgct

SEQ ID NO: 18368 - DNA, 20 bp, Artificial Sequence
  Description of Artificial Sequence: Synthetic oligonucleotide
  Target: LAMA2; (-) strand; PAM type: NNGRRT; PAM sequence: GAGAAT
tatgtctttattagtagcat

SEQ ID NO: 18369 - DNA, 20 bp, Artificial Sequence
  Description of Artificial Sequence: Synthetic oligonucleotide
  Target: LAMA2; (-) strand; PAM type: NNGRRT; PAM sequence: TTGGGT
tctctataaattatccagtc

SEQ ID NO: 18370 - DNA, 20 bp, Artificial Sequence
  Description of Artificial Sequence: Synthetic oligonucleotide
  Target: LAMA2; (-) strand; PAM type: NNGRRT; PAM sequence: GTGAGT
ctccccagccatgtggaact

SEQ ID NO: 18371 - DNA, 20 bp, Artificial Sequence
  Description of Artificial Sequence: Synthetic oligonucleotide
  Target: LAMA2; (-) strand; PAM type: NNGRRT; PAM sequence: TTGAAT
agggacacgttgggaggtat

SEQ ID NO: 18372 - DNA, 20 bp, Artificial Sequence
  Description of Artificial Sequence: Synthetic oligonucleotide
  Target: LAMA2; (-) strand; PAM type: NNGRRT; PAM sequence: TTGAAT
gtccctacccaaatctcatc

SEQ ID NO: 18373 - DNA, 20 bp, Artificial Sequence
  Description of Artificial Sequence: Synthetic oligonucleotide
  Target: LAMA2; (-) strand; PAM type: NNGRRT; PAM sequence: GTGGAT
cacattgaataaacataatg

SEQ ID NO: 18374 - DNA, 20 bp, Artificial Sequence
  Description of Artificial Sequence: Synthetic oligonucleotide
  Target: LAMA2; (-) strand; PAM type: NNGRRT; PAM sequence: TTGAAT
agatacatataggttacaca

SEQ ID NO: 18375 - DNA, 20 bp, Artificial Sequence
  Description of Artificial Sequence: Synthetic oligonucleotide
  Target: LAMA2; (-) strand; PAM type: NNGRRT; PAM sequence: CTGGAT
atataagattatgtaattgt

SEQ ID NO: 18376 - DNA, 20 bp, Artificial Sequence
  Description of Artificial Sequence: Synthetic oligonucleotide
  Target: LAMA2; (-) strand; PAM type: NNGRRT; PAM sequence: TTGAAT
tgatgagtgagtcagagtac

SEQ ID NO: 18377 - DNA, 20 bp, Artificial Sequence
  Description of Artificial Sequence: Synthetic oligonucleotide
  Target: LAMA2; (-) strand; PAM type: NNGRRT; PAM sequence: CAGAGT
tatgtaaatgatgagtgagt

SEQ ID NO: 18378 - DNA, 20 bp, Artificial Sequence
  Description of Artificial Sequence: Synthetic oligonucleotide
  Target: LAMA2; (-) strand; PAM type: NNGRRT; PAM sequence: GTGAGT
aaagcttatgtaaatgatga

SEQ ID NO: 18379 - DNA, 20 bp, Artificial Sequence
  Description of Artificial Sequence: Synthetic oligonucleotide
  Target: LAMA2; (-) strand; PAM type: NNGRRT; PAM sequence: ATGAGT
gctgaaagcttatgtaaatg

SEQ ID NO: 18380 - DNA, 20 bp, Artificial Sequence
  Description of Artificial Sequence: Synthetic oligonucleotide
  Target: LAMA2; (-) strand; PAM type: NNGRRT; PAM sequence: GGGAAT
aaacaaacatatcaggcaga

SEQ ID NO: 18381 - DNA, 20 bp, Artificial Sequence
  Description of Artificial Sequence: Synthetic oligonucleotide
  Target: LAMA2; (-) strand; PAM type: NNGRRT; PAM sequence: CTGAAT
tcatgggaagtaatcttgag

SEQ ID NO: 18382 - DNA, 20 bp, Artificial Sequence
  Description of Artificial Sequence: Synthetic oligonucleotide
  Target: LAMA2; (-) strand; PAM type: NNGRRT; PAM sequence: GAGAAT
tgccagacagtaaaggatct

SEQ ID NO: 18383 - DNA, 20 bp, Artificial Sequence
  Description of Artificial Sequence: Synthetic oligonucleotide
  Target: LAMA2; (-) strand; PAM type: NNGRRT; PAM sequence: AAGGAT
acatattatgccagacagta

SEQ ID NO: 18384 - DNA, 20 bp, Artificial Sequence
  Description of Artificial Sequence: Synthetic oligonucleotide
  Target: LAMA2; (-) strand; PAM type: NNGRRT; PAM sequence: TAGAGT
atgtaatgttttataaaaag

SEQ ID NO: 18385 - DNA, 20 bp, Artificial Sequence
  Description of Artificial Sequence: Synthetic oligonucleotide
  Target: LAMA2; (-) strand; PAM type: NNGRRT; PAM sequence: AAGAAT
ctcccaaagagctgccccca

SEQ ID NO: 18386 - DNA, 20 bp, Artificial Sequence
  Description of Artificial Sequence: Synthetic oligonucleotide
  Target: LAMA2; (-) strand; PAM type: NNGRRT; PAM sequence: ATGAAT
ccaaaaaattccacaggtaa

SEQ ID NO: 18387 - DNA, 20 bp, Artificial Sequence
  Description of Artificial Sequence: Synthetic oligonucleotide
  Target: LAMA2; (-) strand; PAM type: NNGRRT; PAM sequence: TAGAGT
tttttataatatttgattat

SEQ ID NO: 18388 - DNA, 20 bp, Artificial Sequence
  Description of Artificial Sequence: Synthetic oligonucleotide
  Target: LAMA2; (-) strand; PAM type: NNGRRT; PAM sequence: TAGAAT
cttgcggacctggttggcct

SEQ ID NO: 18389 - DNA, 20 bp, Artificial Sequence
  Description of Artificial Sequence: Synthetic oligonucleotide
  Target: LAMA2; (-) strand; PAM type: NNGRRT; PAM sequence: CTGAAT
ctatcctcttaatcactcta

SEQ ID NO: 18390 - DNA, 20 bp, Artificial Sequence
  Description of Artificial Sequence: Synthetic oligonucleotide
  Target: LAMA2; (-) strand; PAM type: NNGRRT; PAM sequence: CAGAGT
gaaccaaagcaatctggctc

SEQ ID NO: 18391 - DNA, 20 bp, Artificial Sequence
  Description of Artificial Sequence: Synthetic oligonucleotide
  Target: LAMA2; (-) strand; PAM type: NNGRRT; PAM sequence: TTGAAT
aatcataatagccagcatcg

SEQ ID NO: 18392 - DNA, 20 bp, Artificial Sequence
  Description of Artificial Sequence: Synthetic oligonucleotide
  Target: LAMA2; (-) strand; PAM type: NNGRRT; PAM sequence: ACGAAT
tcaatgtatttgtaaaataa

SEQ ID NO: 18393 - DNA, 20 bp, Artificial Sequence
  Description of Artificial Sequence: Synthetic oligonucleotide
  Target: LAMA2; (-) strand; PAM type: NNGRRT; PAM sequence: CAGAGT
agcttggcacatagtaggga

SEQ ID NO: 18394 - DNA, 20 bp, Artificial Sequence
  Description of Artificial Sequence: Synthetic oligonucleotide
  Target: LAMA2; (-) strand; PAM type: NNGRRT; PAM sequence: TTGAAT
tttaccaagatctctagatc

SEQ ID NO: 18395 - DNA, 20 bp, Artificial Sequence
  Description of Artificial Sequence: Synthetic oligonucleotide
  Target: LAMA2; (-) strand; PAM type: NNGRRT; PAM sequence: TTGAGT
tttactgagatccctagatc

SEQ ID NO: 18396 - DNA, 20 bp, Artificial Sequence
  Description of Artificial Sequence: Synthetic oligonucleotide
  Target: LAMA2; (-) strand; PAM type: NNGRRT; PAM sequence: GAGAAT
tacttggaaacctgaggcag

SEQ ID NO: 18397 - DNA, 20 bp, Artificial Sequence
  Description of Artificial Sequence: Synthetic oligonucleotide
  Target: LAMA2; (-) strand; PAM type: NNGRRT; PAM sequence: AGGAGT
tgggcggatcacttgaggtc

SEQ ID NO: 18398 - DNA, 20 bp, Artificial Sequence
  Description of Artificial Sequence: Synthetic oligonucleotide
  Target: LAMA2; (-) strand; PAM type: NNGRRT; PAM sequence: GCGGAT
actttgggaggctgaggtgg

SEQ ID NO: 18399 - DNA, 20 bp, Artificial Sequence
  Description of Artificial Sequence: Synthetic oligonucleotide
  Target: LAMA2; (-) strand; PAM type: NNGRRT; PAM sequence: CCGGGT
tgatagaaagtcattcctcg

SEQ ID NO: 18400 - DNA, 20 bp, Artificial Sequence
  Description of Artificial Sequence: Synthetic oligonucleotide
  Target: LAMA2; (-) strand; PAM type: NNGRRT; PAM sequence: TGGAAT
aagatagataatgtttactt

SEQ ID NO: 18401 - DNA, 20 bp, Artificial Sequence
  Description of Artificial Sequence: Synthetic oligonucleotide
  Target: LAMA2; (-) strand; PAM type: NNGRRT; PAM sequence: CTGGGT
aaagaatactatttttcttt

SEQ ID NO: 18402 - DNA, 20 bp, Artificial Sequence
  Description of Artificial Sequence: Synthetic oligonucleotide
  Target: LAMA2; (-) strand; PAM type: NNGRRT; PAM sequence: AAGAAT
taaatactatgtgttatcaa

SEQ ID NO: 18403 - DNA, 20 bp, Artificial Sequence
  Description of Artificial Sequence: Synthetic oligonucleotide
  Target: LAMA2; (-) strand; PAM type: NNGRRT; PAM sequence: TAGGAT
gtgtagaccagaaacaaagt

SEQ ID NO: 18404 - DNA, 20 bp, Artificial Sequence
  Description of Artificial Sequence: Synthetic oligonucleotide
  Target: LAMA2; (-) strand; PAM type: NNGRRT; PAM sequence: GGGAAT
aagcaagattcaggacagca

SEQ ID NO: 18405 - DNA, 20 bp, Artificial Sequence
  Description of Artificial Sequence: Synthetic oligonucleotide
  Target: LAMA2; (-) strand; PAM type: NNGRRT; PAM sequence: GCGGGT
ttgattgcagattcgacact

SEQ ID NO: 18406 - DNA, 20 bp, Artificial Sequence
  Description of Artificial Sequence: Synthetic oligonucleotide
  Target: LAMA2; (-) strand; PAM type: NNGRRT; PAM sequence: TTGGAT
cacactaaaatacatacggt

SEQ ID NO: 18407 - DNA, 20 bp, Artificial Sequence
  Description of Artificial Sequence: Synthetic oligonucleotide
  Target: LAMA2; (-) strand; PAM type: NNGRRT; PAM sequence: TTGAAT
attcttagtattacaaaccc

SEQ ID NO: 18408 - DNA, 20 bp, Artificial Sequence
  Description of Artificial Sequence: Synthetic oligonucleotide
  Target: LAMA2; (-) strand; PAM type: NNGRRT; PAM sequence: AGGAAT
ttaatggtaaaaagaattct

SEQ ID NO: 18409 - DNA, 20 bp, Artificial Sequence
  Description of Artificial Sequence: Synthetic oligonucleotide
  Target: LAMA2; (-) strand; PAM type: NNGRRT; PAM sequence: AAGAAT
aagaagctcttaatggtaaa

SEQ ID NO: 18410 - DNA, 20 bp, Artificial Sequence
  Description of Artificial Sequence: Synthetic oligonucleotide
  Target: LAMA2; (-) strand; PAM type: NNGRRT; PAM sequence: CTGAAT
aggaactccaataatgtttg

SEQ ID NO: 18411 - DNA, 20 bp, Artificial Sequence
  Description of Artificial Sequence: Synthetic oligonucleotide
  Target: LAMA2; (-) strand; PAM type: NNGRRT; PAM sequence: GCGAAT
ctgccacaggccttcagctg

SEQ ID NO: 18412 - DNA, 20 bp, Artificial Sequence
  Description of Artificial Sequence: Synthetic oligonucleotide
  Target: LAMA2; (-) strand; PAM type: NNGRRT; PAM sequence: TGGAGT
tcagaaaccactttggtatc

SEQ ID NO: 18413 - DNA, 20 bp, Artificial Sequence
  Description of Artificial Sequence: Synthetic oligonucleotide
  Target: LAMA2; (-) strand; PAM type: NNGRRT; PAM sequence: CTGAGT
taccaatgaatgatgacagc

SEQ ID NO: 18414 - DNA, 20 bp, Artificial Sequence
  Description of Artificial Sequence: Synthetic oligonucleotide
  Target: LAMA2; (-) strand; PAM type: NNGRRT; PAM sequence: ATGAAT
atctggcacataaattacca

SEQ ID NO: 18415 - DNA, 20 bp, Artificial Sequence
  Description of Artificial Sequence: Synthetic oligonucleotide
  Target: LAMA2; (-) strand; PAM type: NNGRRT; PAM sequence: CTGGAT
gatatcctaccttattcctc

SEQ ID NO: 18416 - DNA, 20 bp, Artificial Sequence
  Description of Artificial Sequence: Synthetic oligonucleotide
  Target: LAMA2; (-) strand; PAM type: NNGRRT; PAM sequence: TTGGAT
tcatgtccttggtcatcagc

SEQ ID NO: 18417 - DNA, 20 bp, Artificial Sequence
  Description of Artificial Sequence: Synthetic oligonucleotide
  Target: LAMA2; (-) strand; PAM type: NNGRRT; PAM sequence: TAGGAT
cttgtagctccccgagtaac

SEQ ID NO: 18418 - DNA, 20 bp, Artificial Sequence
  Description of Artificial Sequence: Synthetic oligonucleotide
  Target: LAMA2; (-) strand; PAM type: NNGRRT; PAM sequence: CCGAGT
tcattcctacttgtagctcc

SEQ ID NO: 18419 - DNA, 20 bp, Artificial Sequence
  Description of Artificial Sequence: Synthetic oligonucleotide
  Target: LAMA2; (-) strand; PAM type: NNGRRT; PAM sequence: ATGAGT
cctgttgaataaatacatca

SEQ ID NO: 18420 - DNA, 20 bp, Artificial Sequence
  Description of Artificial Sequence: Synthetic oligonucleotide
  Target: LAMA2; (-) strand; PAM type: NNGRRT; PAM sequence: TTGAAT
aggaggtgttcaaaggcctg

SEQ ID NO: 18421 - DNA, 20 bp, Artificial Sequence
  Description of Artificial Sequence: Synthetic oligonucleotide
  Target: LAMA2; (-) strand; PAM type: NNGRRT; PAM sequence: AGGGGT
ccctctaggtcctctgaatc

SEQ ID NO: 18422 - DNA, 20 bp, Artificial Sequence
  Description of Artificial Sequence: Synthetic oligonucleotide
  Target: LAMA2; (-) strand; PAM type: NNGRRT; PAM sequence: CTGAAT
ctatttcccctctaggtcct

SEQ ID NO: 18423 - DNA, 20 bp, Artificial Sequence
  Description of Artificial Sequence: Synthetic oligonucleotide
  Target: LAMA2; (-) strand; PAM type: NNGRRT; PAM sequence: CTGAAT
gcattcatgttattttagca

SEQ ID NO: 18424 - DNA, 20 bp, Artificial Sequence
  Description of Artificial Sequence: Synthetic oligonucleotide
  Target: LAMA2; (-) strand; PAM type: NNGRRT; PAM sequence: CAGAGT
ctgcactccagcctgggtga

SEQ ID NO: 18425 - DNA, 20 bp, Artificial Sequence
  Description of Artificial Sequence: Synthetic oligonucleotide
  Target: LAMA2; (-) strand; PAM type: NNGRRT; PAM sequence: CTGGGT
tcgcaccactgcactccagc

SEQ ID NO: 18426 - DNA, 20 bp, Artificial Sequence
  Description of Artificial Sequence: Synthetic oligonucleotide
  Target: LAMA2; (-) strand; PAM type: NNGRRT; PAM sequence: GAGAAT
tactcgggaggctgaggcag

SEQ ID NO: 18427 - DNA, 20 bp, Artificial Sequence
  Description of Artificial Sequence: Synthetic oligonucleotide
  Target: LAMA2; (-) strand; PAM type: NNGRRT; PAM sequence: AGGAGT
gcgggtgatcacttgaggtc

SEQ ID NO: 18428 - DNA, 20 bp, Artificial Sequence
  Description of Artificial Sequence: Synthetic oligonucleotide
  Target: LAMA2; (-) strand; PAM type: NNGRRT; PAM sequence: GCGGGT
atatctattgggaggctgaa

SEQ ID NO: 18429 - DNA, 20 bp, Artificial Sequence
  Description of Artificial Sequence: Synthetic oligonucleotide
  Target: LAMA2; (-) strand; PAM type: NNGRRT; PAM sequence: GAGAAT
tgctggggaggctgaggcaa

SEQ ID NO: 18430 - DNA, 20 bp, Artificial Sequence
  Description of Artificial Sequence: Synthetic oligonucleotide
  Target: LAMA2; (-) strand; PAM type: NNGRRT; PAM sequence: AAGAAT
aaatacaaaaaaaaaaaaaa

SEQ ID NO: 18431 - DNA, 20 bp, Artificial Sequence
  Description of Artificial Sequence: Synthetic oligonucleotide
  Target: LAMA2; (-) strand; PAM type: NNGRRT; PAM sequence: GGGAAT
gttggggcgggggaaatatg

SEQ ID NO: 18432 - DNA, 20 bp, Artificial Sequence
  Description of Artificial Sequence: Synthetic oligonucleotide
  Target: LAMA2; (-) strand; PAM type: NNGRRT; PAM sequence: GGGGAT
acaaatgtagcactctggag

SEQ ID NO: 18433 - DNA, 20 bp, Artificial Sequence
  Description of Artificial Sequence: Synthetic oligonucleotide
  Target: LAMA2; (-) strand; PAM type: NNGRRT; PAM sequence: TTGGGT
cctaatgcagtctatgaagt

SEQ ID NO: 18434 - DNA, 20 bp, Artificial Sequence
  Description of Artificial Sequence: Synthetic oligonucleotide
  Target: LAMA2; (-) strand; PAM type: NNGRRT; PAM sequence: TGGGAT
atgcctttcaattttctttt

SEQ ID NO: 18435 - DNA, 20 bp, Artificial Sequence
  Description of Artificial Sequence: Synthetic oligonucleotide
  Target: LAMA2; (-) strand; PAM type: NNGRRT; PAM sequence: CAGAGT
caaaaaagaaagaaattaac

SEQ ID NO: 18436 - DNA, 20 bp, Artificial Sequence
  Description of Artificial Sequence: Synthetic oligonucleotide
  Target: LAMA2; (-) strand; PAM type: NNGRRT; PAM sequence: AAGAAT
ctctcaggaggctgaggcag

SEQ ID NO: 18437 - DNA, 20 bp, Artificial Sequence
  Description of Artificial Sequence: Synthetic oligonucleotide
  Target: LAMA2; (-) strand; PAM type: NNGRRT; PAM sequence: TGGAGT
cagttggatcaactgaggtc

SEQ ID NO: 18438 - DNA, 20 bp, Artificial Sequence
  Description of Artificial Sequence: Synthetic oligonucleotide
  Target: LAMA2; (-) strand; PAM type: NNGRRT; PAM sequence: TTGGAT
actttgggaggccgaggcag

SEQ ID NO: 18439 - DNA, 20 bp, Artificial Sequence
  Description of Artificial Sequence: Synthetic oligonucleotide
  Target: LAMA2; (-) strand; PAM type: NNGRRT; PAM sequence: CAGAGT
cttacatccgagaaattcac

SEQ ID NO: 18440 - DNA, 20 bp, Artificial Sequence
  Description of Artificial Sequence: Synthetic oligonucleotide
  Target: LAMA2; (-) strand; PAM type: NNGRRT; PAM sequence: ATGGGT
atacaagagctagcaaacac

SEQ ID NO: 18441 - DNA, 20 bp, Artificial Sequence
  Description of Artificial Sequence: Synthetic oligonucleotide
  Target: LAMA2; (-) strand; PAM type: NNGRRT; PAM sequence: ATGGAT
gtactttagaaaggtgttca

SEQ ID NO: 18442 - DNA, 20 bp, Artificial Sequence
  Description of Artificial Sequence: Synthetic oligonucleotide
  Target: LAMA2; (-) strand; PAM type: NNGRRT; PAM sequence: CTGAGT
ctcttgccactatgaatctg

SEQ ID NO: 18443 - DNA, 20 bp, Artificial Sequence
  Description of Artificial Sequence: Synthetic oligonucleotide
  Target: LAMA2; (-) strand; PAM type: NNGRRT; PAM sequence: ATGAAT
tcagtgtgcctcttgccact

SEQ ID NO: 18444 - DNA, 20 bp, Artificial Sequence
  Description of Artificial Sequence: Synthetic oligonucleotide
  Target: LAMA2; (-) strand; PAM type: NNGRRT; PAM sequence: CAGAAT
ttcacatcaaggatacttga

SEQ ID NO: 18445 - DNA, 20 bp, Artificial Sequence
  Description of Artificial Sequence: Synthetic oligonucleotide
  Target: LAMA2; (-) strand; PAM type: NNGRRT; PAM sequence: AAGGAT
ccttcattctctttcacatc

SEQ ID NO: 18446 - DNA, 20 bp, Artificial Sequence
  Description of Artificial Sequence: Synthetic oligonucleotide
  Target: LAMA2; (-) strand; PAM type: NNGRRT; PAM sequence: GTGAGT
tctttcttctttctgatttg

SEQ ID NO: 18447 - DNA, 20 bp, Artificial Sequence
  Description of Artificial Sequence: Synthetic oligonucleotide
  Target: LAMA2; (-) strand; PAM type: NNGRRT; PAM sequence: TGGAAT
attctttattttactccata

SEQ ID NO: 18448 - DNA, 20 bp, Artificial Sequence
  Description of Artificial Sequence: Synthetic oligonucleotide
  Target: LAMA2; (-) strand; PAM type: NNGRRT; PAM sequence: AAGAGT
tactttccctgtaatgctcc

SEQ ID NO: 18449 - DNA, 20 bp, Artificial Sequence
  Description of Artificial Sequence: Synthetic oligonucleotide
  Target: LAMA2; (-) strand; PAM type: NNGRRT; PAM sequence: TTGGAT
cctccatcccatttttatga

SEQ ID NO: 18450 - DNA, 20 bp, Artificial Sequence
  Description of Artificial Sequence: Synthetic oligonucleotide
  Target: LAMA2; (-) strand; PAM type: NNGRRT; PAM sequence: TTGAGT
ccagccaagaataaaaataa

SEQ ID NO: 18451 - DNA, 20 bp, Artificial Sequence
  Description of Artificial Sequence: Synthetic oligonucleotide
  Target: LAMA2; (-) strand; PAM type: NNGRRT; PAM sequence: AAGAAT
tctcatccatttttccagcc

SEQ ID NO: 18452 - DNA, 20 bp, Artificial Sequence
  Description of Artificial Sequence: Synthetic oligonucleotide
  Target: LAMA2; (-) strand; PAM type: NNGRRT; PAM sequence: CAGAAT
actttcaagagggtgaaaga

SEQ ID NO: 18453 - DNA, 20 bp, Artificial Sequence
  Description of Artificial Sequence: Synthetic oligonucleotide
  Target: LAMA2; (-) strand; PAM type: NNGRRT; PAM sequence: GAGGGT
tctgaatgtagaactttcaa

SEQ ID NO: 18454 - DNA, 20 bp, Artificial Sequence
  Description of Artificial Sequence: Synthetic oligonucleotide
  Target: LAMA2; (-) strand; PAM type: NNGRRT; PAM sequence: CTGAAT
tccacgagacaaaagatact

SEQ ID NO: 18455 - DNA, 20 bp, Artificial Sequence
  Description of Artificial Sequence: Synthetic oligonucleotide
  Target: LAMA2; (-) strand; PAM type: NNGRRT; PAM sequence: CTGAAT
gaaaacatggatagtattgg

SEQ ID NO: 18456 - DNA, 20 bp, Artificial Sequence
  Description of Artificial Sequence: Synthetic oligonucleotide
  Target: LAMA2; (-) strand; PAM type: NNGRRT; PAM sequence: ATGGAT
tttggtttcaatgtgaaaac

SEQ ID NO: 18457 - DNA, 20 bp, Artificial Sequence
  Description of Artificial Sequence: Synthetic oligonucleotide
  Target: LAMA2; (-) strand; PAM type: NNGRRT; PAM sequence: CAGAGT
ctgcactccagcccgggtga

SEQ ID NO: 18458 - DNA, 20 bp, Artificial Sequence
  Description of Artificial Sequence: Synthetic oligonucleotide
  Target: LAMA2; (-) strand; PAM type: NNGRRT; PAM sequence: CCGGGT
ttgtgccactgcactccagc

SEQ ID NO: 18459 - DNA, 20 bp, Artificial Sequence
  Description of Artificial Sequence: Synthetic oligonucleotide
  Target: LAMA2; (-) strand; PAM type: NNGRRT; PAM sequence: GAGAAT
tactcaggaggctgaggctt

SEQ ID NO: 18460 - DNA, 20 bp, Artificial Sequence
  Description of Artificial Sequence: Synthetic oligonucleotide
  Target: LAMA2; (-) strand; PAM type: NNGRRT; PAM sequence: GAGAGT
caggtagatcatgtgaagtc

SEQ ID NO: 18461 - DNA, 20 bp, Artificial Sequence
  Description of Artificial Sequence: Synthetic oligonucleotide
  Target: LAMA2; (-) strand; PAM type: NNGRRT; PAM sequence: ATGAAT
gcataatctggaaatgtgga

SEQ ID NO: 18462 - DNA, 20 bp, Artificial Sequence
  Description of Artificial Sequence: Synthetic oligonucleotide
  Target: LAMA2; (-) strand; PAM type: NNGRRT; PAM sequence: TGGAAT
caaagcataatctggaaatg

SEQ ID NO: 18463 - DNA, 20 bp, Artificial Sequence
  Description of Artificial Sequence: Synthetic oligonucleotide
  Target: LAMA2; (-) strand; PAM type: NNGRRT; PAM sequence: TGGGGT
ttgctagatttttattcttg

SEQ ID NO: 18464 - DNA, 20 bp, Artificial Sequence
  Description of Artificial Sequence: Synthetic oligonucleotide
  Target: LAMA2; (-) strand; PAM type: NNGRRT; PAM sequence: TGGAAT
ctcagagttcactgaatttg

SEQ ID NO: 18465 - DNA, 20 bp, Artificial Sequence
  Description of Artificial Sequence: Synthetic oligonucleotide
  Target: LAMA2; (-) strand; PAM type: NNGRRT; PAM sequence: CTGAAT
atatttattctcagagttca

SEQ ID NO: 18466 - DNA, 20 bp, Artificial Sequence
  Description of Artificial Sequence: Synthetic oligonucleotide
  Target: LAMA2; (-) strand; PAM type: NNGRRT; PAM sequence: CAGAGT
ggaccttccatatttattct

SEQ ID NO: 18467 - DNA, 20 bp, Artificial Sequence
  Description of Artificial Sequence: Synthetic oligonucleotide
  Target: LAMA2; (-) strand; PAM type: NNGRRT; PAM sequence: CAGGAT
ttcaaggttcgttttctttg

SEQ ID NO: 18468 - DNA, 20 bp, Artificial Sequence
  Description of Artificial Sequence: Synthetic oligonucleotide
  Target: LAMA2; (-) strand; PAM type: NNGRRT; PAM sequence: GGGAAT
ctgcatctgaaaactggata

SEQ ID NO: 18469 - DNA, 20 bp, Artificial Sequence
  Description of Artificial Sequence: Synthetic oligonucleotide
  Target: LAMA2; (-) strand; PAM type: NNGRRT; PAM sequence: CTGGAT
gggctaactgcatctgaaaa

SEQ ID NO: 18470 - DNA, 20 bp, Artificial Sequence
  Description of Artificial Sequence: Synthetic oligonucleotide
  Target: LAMA2; (-) strand; PAM type: NNGRRT; PAM sequence: AGGGAT
aaacgtataacatcctcaac

SEQ ID NO: 18471 - DNA, 20 bp, Artificial Sequence
  Description of Artificial Sequence: Synthetic oligonucleotide
  Target: LAMA2; (-) strand; PAM type: NNGRRT; PAM sequence: ACGAAT
taattaatttgcaaatactg

SEQ ID NO: 18472 - DNA, 20 bp, Artificial Sequence
  Description of Artificial Sequence: Synthetic oligonucleotide
  Target: LAMA2; (-) strand; PAM type: NNGRRT; PAM sequence: ATGAAT
acaaaaaggaggactgggag

SEQ ID NO: 18473 - DNA, 20 bp, Artificial Sequence
  Description of Artificial Sequence: Synthetic oligonucleotide
  Target: LAMA2; (-) strand; PAM type: NNGRRT; PAM sequence: GAGAAT
acctcaggtcaaactgataa

SEQ ID NO: 18474 - DNA, 20 bp, Artificial Sequence
  Description of Artificial Sequence: Synthetic oligonucleotide
  Target: LAMA2; (-) strand; PAM type: NNGRRT; PAM sequence: CTGAAT
aacatttcccaaacatcctc

SEQ ID NO: 18475 - DNA, 20 bp, Artificial Sequence
  Description of Artificial Sequence: Synthetic oligonucleotide
  Target: LAMA2; (-) strand; PAM type: NNGRRT; PAM sequence: GGGAAT
ggtgctgaaattggcatatg

SEQ ID NO: 18476 - DNA, 20 bp, Artificial Sequence
  Description of Artificial Sequence: Synthetic oligonucleotide
  Target: LAMA2; (-) strand; PAM type: NNGRRT; PAM sequence: GAGGGT
aaatgaccctggtgaaataa

SEQ ID NO: 18477 - DNA, 20 bp, Artificial Sequence
  Description of Artificial Sequence: Synthetic oligonucleotide
  Target: LAMA2; (-) strand; PAM type: NNGRRT; PAM sequence: CTGAAT
attaatgaaaagtaaaattt

SEQ ID NO: 18478 - DNA, 20 bp, Artificial Sequence
  Description of Artificial Sequence: Synthetic oligonucleotide
  Target: LAMA2; (-) strand; PAM type: NNGRRT; PAM sequence: ATGGAT
attatagtcctattccagat

SEQ ID NO: 18479 - DNA, 20 bp, Artificial Sequence
  Description of Artificial Sequence: Synthetic oligonucleotide
  Target: LAMA2; (-) strand; PAM type: NNGRRT; PAM sequence: CTGAAT
ccatttcaaaatttaaaaag

SEQ ID NO: 18480 - DNA, 20 bp, Artificial Sequence
  Description of Artificial Sequence: Synthetic oligonucleotide
  Target: LAMA2; (-) strand; PAM type: NNGRRT; PAM sequence: CAGAGT
ttgcactccagcctaggtga

SEQ ID NO: 18481 - DNA, 20 bp, Artificial Sequence
  Description of Artificial Sequence: Synthetic oligonucleotide
  Target: LAMA2; (-) strand; PAM type: NNGRRT; PAM sequence: GAGAAT
tacttgggaggctgaggcag

SEQ ID NO: 18482 - DNA, 20 bp, Artificial Sequence
  Description of Artificial Sequence: Synthetic oligonucleotide
  Target: LAMA2; (-) strand; PAM type: NNGRRT; PAM sequence: GCGGGT
aaaatagcacaggcatggtg

SEQ ID NO: 18483 - DNA, 20 bp, Artificial Sequence
  Description of Artificial Sequence: Synthetic oligonucleotide
  Target: LAMA2; (-) strand; PAM type: NNGRRT; PAM sequence: AGGAGT
tgggcagatcacctgaggtc

SEQ ID NO: 18484 - DNA, 20 bp, Artificial Sequence
  Description of Artificial Sequence: Synthetic oligonucleotide
  Target: LAMA2; (-) strand; PAM type: NNGRRT; PAM sequence: CTGAAT
aagaaaaattttattaaaag

SEQ ID NO: 18485 - DNA, 20 bp, Artificial Sequence
  Description of Artificial Sequence: Synthetic oligonucleotide
  Target: LAMA2; (-) strand; PAM type: NNGRRT; PAM sequence: AGGAAT
aactaagtcctcaatgcaat

SEQ ID NO: 18486 - DNA, 20 bp, Artificial Sequence
  Description of Artificial Sequence: Synthetic oligonucleotide
  Target: LAMA2; (-) strand; PAM type: NNGRRT; PAM sequence: TTGAAT
tattcaaaatgtacactgtt

SEQ ID NO: 18487 - DNA, 20 bp, Artificial Sequence
  Description of Artificial Sequence: Synthetic oligonucleotide
  Target: LAMA2; (-) strand; PAM type: NNGRRT; PAM sequence: CAGGGT
ggatgtgaaccctgtattca

SEQ ID NO: 18488 - DNA, 20 bp, Artificial Sequence
  Description of Artificial Sequence: Synthetic oligonucleotide
  Target: LAMA2; (-) strand; PAM type: NNGRRT; PAM sequence: TTGGAT
cacggaccagtgagaacatc

SEQ ID NO: 18489 - DNA, 20 bp, Artificial Sequence
  Description of Artificial Sequence: Synthetic oligonucleotide
  Target: LAMA2; (-) strand; PAM type: NNGRRT; PAM sequence: AGGAGT
tcgatttgtgaaattgatat

SEQ ID NO: 18490 - DNA, 20 bp, Artificial Sequence
  Description of Artificial Sequence: Synthetic oligonucleotide
  Target: LAMA2; (-) strand; PAM type: NNGRRT; PAM sequence: AGGAAT
ttatgtgtcatctctgatct

SEQ ID NO: 18491 - DNA, 20 bp, Artificial Sequence
  Description of Artificial Sequence: Synthetic oligonucleotide
  Target: LAMA2; (-) strand; PAM type: NNGRRT; PAM sequence: ACGGGT
ggaccatgaggtgctggcac

SEQ ID NO: 18492 - DNA, 20 bp, Artificial Sequence
  Description of Artificial Sequence: Synthetic oligonucleotide
  Target: LAMA2; (-) strand; PAM type: NNGRRT; PAM sequence: AGGAAT
acaatcctttttaaatttga

SEQ ID NO: 18493 - DNA, 20 bp, Artificial Sequence
  Description of Artificial Sequence: Synthetic oligonucleotide
  Target: LAMA2; (-) strand; PAM type: NNGRRT; PAM sequence: ATGAAT
atgtttcgaatgagtggctt

SEQ ID NO: 18494 - DNA, 20 bp, Artificial Sequence
  Description of Artificial Sequence: Synthetic oligonucleotide
  Target: LAMA2; (-) strand; PAM type: NNGRRT; PAM sequence: ATGAGT
tatctgggaagatgtttcga

SEQ ID NO: 18495 - DNA, 20 bp, Artificial Sequence
  Description of Artificial Sequence: Synthetic oligonucleotide
  Target: LAMA2; (-) strand; PAM type: NNGRRT; PAM sequence: TCGAAT
taagtatctgggaagatgtt

SEQ ID NO: 18496 - DNA, 20 bp, Artificial Sequence
  Description of Artificial Sequence: Synthetic oligonucleotide
  Target: LAMA2; (-) strand; PAM type: NNGRRT; PAM sequence: GAGAAT
tgctttggggtgtcagtctt

SEQ ID NO: 18497 - DNA, 20 bp, Artificial Sequence
  Description of Artificial Sequence: Synthetic oligonucleotide
  Target: LAMA2; (-) strand; PAM type: NNGRRT; PAM sequence: TGGGGT
attatagattaaggatgctt

SEQ ID NO: 18498 - DNA, 20 bp, Artificial Sequence
  Description of Artificial Sequence: Synthetic oligonucleotide
  Target: LAMA2; (-) strand; PAM type: NNGRRT; PAM sequence: AAGGAT
tcctgtgtttattatagatt

SEQ ID NO: 18499 - DNA, 20 bp, Artificial Sequence
  Description of Artificial Sequence: Synthetic oligonucleotide
  Target: LAMA2; (-) strand; PAM type: NNGRRT; PAM sequence: AGGAGT
catgcatgggtgaggatggc

SEQ ID NO: 18500 - DNA, 20 bp, Artificial Sequence
  Description of Artificial Sequence: Synthetic oligonucleotide
  Target: LAMA2; (-) strand; PAM type: NNGRRT; PAM sequence: GAGGAT
ggccttgctcatgcatgggt

SEQ ID NO: 18501 - DNA, 20 bp, Artificial Sequence
  Description of Artificial Sequence: Synthetic oligonucleotide
  Target: LAMA2; (-) strand; PAM type: NNGRRT; PAM sequence: ATGGGT
taaacaggccttgctcatgc

SEQ ID NO: 18502 - DNA, 20 bp, Artificial Sequence
  Description of Artificial Sequence: Synthetic oligonucleotide
  Target: LAMA2; (-) strand; PAM type: NNGRRT; PAM sequence: AGGAAT
atcatcactaactctagtgg

SEQ ID NO: 18503 - DNA, 20 bp, Artificial Sequence
  Description of Artificial Sequence: Synthetic oligonucleotide
  Target: LAMA2; (-) strand; PAM type: NNGRRT; PAM sequence: TTGGGT
tctatgctcctattgggtta

SEQ ID NO: 18504 - DNA, 20 bp, Artificial Sequence
  Description of Artificial Sequence: Synthetic oligonucleotide
  Target: LAMA2; (-) strand; PAM type: NNGRRT; PAM sequence: TTGGGT
tatctacatctatgctccta

SEQ ID NO: 18505 - DNA, 20 bp, Artificial Sequence
  Description of Artificial Sequence: Synthetic oligonucleotide
  Target: LAMA2; (-) strand; PAM type: NNGRRT; PAM sequence: AAGGGT
atcttccctcccccgtgaag

SEQ ID NO: 18506 - DNA, 20 bp, Artificial Sequence
  Description of Artificial Sequence: Synthetic oligonucleotide
  Target: LAMA2; (-) strand; PAM type: NNGRRT; PAM sequence: TTGAAT
tcccaggccattgtaggttc

SEQ ID NO: 18507 - DNA, 20 bp, Artificial Sequence
  Description of Artificial Sequence: Synthetic oligonucleotide
  Target: LAMA2; (-) strand; PAM type: NNGRRT; PAM sequence: GGGAGT
ttcattattattaagacgta

SEQ ID NO: 18508 - DNA, 20 bp, Artificial Sequence
  Description of Artificial Sequence: Synthetic oligonucleotide
  Target: LAMA2; (-) strand; PAM type: NNGRRT; PAM sequence: GGGAAT
tttaaatgcttaggctgcag

SEQ ID NO: 18509 - DNA, 20 bp, Artificial Sequence
  Description of Artificial Sequence: Synthetic oligonucleotide
  Target: LAMA2; (-) strand; PAM type: NNGRRT; PAM sequence: CAGAAT
agagtaattcagattctcaa

SEQ ID NO: 18510 - DNA, 20 bp, Artificial Sequence
  Description of Artificial Sequence: Synthetic oligonucleotide
  Target: LAMA2; (-) strand; PAM type: NNGRRT; PAM sequence: GAGAGT
acattaaaataatacagaag

SEQ ID NO: 18511 - DNA, 20 bp, Artificial Sequence
  Description of Artificial Sequence: Synthetic oligonucleotide
  Target: LAMA2; (-) strand; PAM type: NNGRRT; PAM sequence: GTGAAT
atggttaaaacaaccatcat

SEQ ID NO: 18512 - DNA, 20 bp, Artificial Sequence
  Description of Artificial Sequence: Synthetic oligonucleotide
  Target: LAMA2; (-) strand; PAM type: NNGRRT; PAM sequence: TTGAGT
tgtaatcgggtgtctctcta

SEQ ID NO: 18513 - DNA, 20 bp, Artificial Sequence
  Description of Artificial Sequence: Synthetic oligonucleotide
  Target: LAMA2; (-) strand; PAM type: NNGRRT; PAM sequence: TCGGGT
tccatcaatagcatttgtaa

SEQ ID NO: 18514 - DNA, 20 bp, Artificial Sequence
  Description of Artificial Sequence: Synthetic oligonucleotide
  Target: LAMA2; (-) strand; PAM type: NNGRRT; PAM sequence: CAGGGT
aactatacctgctgtaaatc

SEQ ID NO: 18515 - DNA, 20 bp, Artificial Sequence
  Description of Artificial Sequence: Synthetic oligonucleotide
  Target: LAMA2; (-) strand; PAM type: NNGRRT; PAM sequence: AAGAGT
aacaatggagagtgataaga

SEQ ID NO: 18516 - DNA, 20 bp, Artificial Sequence
  Description of Artificial Sequence: Synthetic oligonucleotide
  Target: LAMA2; (-) strand; PAM type: NNGRRT; PAM sequence: GAGAGT
atcttatcaagaaaacaatg

SEQ ID NO: 18517 - DNA, 20 bp, Artificial Sequence
  Description of Artificial Sequence: Synthetic oligonucleotide
  Target: LAMA2; (-) strand; PAM type: NNGRRT; PAM sequence: ATGAAT
cgtaaataacaatacgctat

SEQ ID NO: 18518 - DNA, 20 bp, Artificial Sequence
  Description of Artificial Sequence: Synthetic oligonucleotide
  Target: LAMA2; (-) strand; PAM type: NNGRRT; PAM sequence: CTGAAT
ttgtgctttataattaaatg

SEQ ID NO: 18519 - DNA, 20 bp, Artificial Sequence
  Description of Artificial Sequence: Synthetic oligonucleotide
  Target: LAMA2; (-) strand; PAM type: NNGRRT; PAM sequence: TTGAAT
agctcttcacgtgcttccat

SEQ ID NO: 18520 - DNA, 20 bp, Artificial Sequence
  Description of Artificial Sequence: Synthetic oligonucleotide
  Target: LAMA2; (-) strand; PAM type: NNGRRT; PAM sequence: CAGAGT
ttaagtccagctagctaaaa

SEQ ID NO: 18521 - DNA, 20 bp, Artificial Sequence
  Description of Artificial Sequence: Synthetic oligonucleotide
  Target: LAMA2; (-) strand; PAM type: NNGRRT; PAM sequence: CTGAAT
attaataacttcagcctgac

SEQ ID NO: 18522 - DNA, 20 bp, Artificial Sequence
  Description of Artificial Sequence: Synthetic oligonucleotide
  Target: LAMA2; (-) strand; PAM type: NNGRRT; PAM sequence: TGGAAT
atttaggcatacaaatagga

SEQ ID NO: 18523 - DNA, 20 bp, Artificial Sequence
  Description of Artificial Sequence: Synthetic oligonucleotide
  Target: LAMA2; (-) strand; PAM type: NNGRRT; PAM sequence: TAGGAT
acattatttaggcatacaaa

SEQ ID NO: 18524 - DNA, 20 bp, Artificial Sequence
  Description of Artificial Sequence: Synthetic oligonucleotide
  Target: LAMA2; (-) strand; PAM type: NNGRRT; PAM sequence: TTGAAT
cagccagctttctgtggctc

SEQ ID NO: 18525 - DNA, 20 bp, Artificial Sequence
  Description of Artificial Sequence: Synthetic oligonucleotide
  Target: LAMA2; (-) strand; PAM type: NNGRRT; PAM sequence: ATGGGT
catatcccgaggaggcccat

SEQ ID NO: 18526 - DNA, 20 bp, Artificial Sequence
  Description of Artificial Sequence: Synthetic oligonucleotide
  Target: LAMA2; (-) strand; PAM type: NNGRRT; PAM sequence: GAGGGT
ttcagctgctgtatattagt

SEQ ID NO: 18527 - DNA, 20 bp, Artificial Sequence
  Description of Artificial Sequence: Synthetic oligonucleotide
  Target: LAMA2; (-) strand; PAM type: NNGRRT; PAM sequence: CAGGAT
atccccaggggattcatgca

SEQ ID NO: 18528 - DNA, 20 bp, Artificial Sequence
  Description of Artificial Sequence: Synthetic oligonucleotide
  Target: LAMA2; (-) strand; PAM type: NNGRRT; PAM sequence: GGGGAT
ttttgaggctaagatcccca

SEQ ID NO: 18529 - DNA, 20 bp, Artificial Sequence
  Description of Artificial Sequence: Synthetic oligonucleotide
  Target: LAMA2; (-) strand; PAM type: NNGRRT; PAM sequence: AGGAGT
aggacaaagttgtctttatc

SEQ ID NO: 18530 - DNA, 20 bp, Artificial Sequence
  Description of Artificial Sequence: Synthetic oligonucleotide
  Target: LAMA2; (-) strand; PAM type: NNGRRT; PAM sequence: CTGAGT
tgcctgtccctggagatgac

SEQ ID NO: 18531 - DNA, 20 bp, Artificial Sequence
  Description of Artificial Sequence: Synthetic oligonucleotide
  Target: LAMA2; (-) strand; PAM type: NNGRRT; PAM sequence: GAGAAT
gcaatctaaaagaataaatg

SEQ ID NO: 18532 - DNA, 20 bp, Artificial Sequence
  Description of Artificial Sequence: Synthetic oligonucleotide
  Target: LAMA2; (-) strand; PAM type: NNGRRT; PAM sequence: AAGAAT
ttgttctatgtgcaatctaa

SEQ ID NO: 18533 - DNA, 20 bp, Artificial Sequence
  Description of Artificial Sequence: Synthetic oligonucleotide
  Target: LAMA2; (-) strand; PAM type: NNGRRT; PAM sequence: AAGAGT
taatattgctgttcagctca

SEQ ID NO: 18534 - DNA, 20 bp, Artificial Sequence
  Description of Artificial Sequence: Synthetic oligonucleotide
  Target: LAMA2; (-) strand; PAM type: NNGRRT; PAM sequence: CTGAAT
caggtaaactctttgacttg

SEQ ID NO: 18535 - DNA, 20 bp, Artificial Sequence
  Description of Artificial Sequence: Synthetic oligonucleotide
  Target: LAMA2; (-) strand; PAM type: NNGRRT; PAM sequence: GTGAGT
tactgtgtgggaatggatga

SEQ ID NO: 18536 - DNA, 20 bp, Artificial Sequence
  Description of Artificial Sequence: Synthetic oligonucleotide
  Target: LAMA2; (-) strand; PAM type: NNGRRT; PAM sequence: ATGAGT
aagatactgtgtgggaatgg

SEQ ID NO: 18537 - DNA, 20 bp, Artificial Sequence
  Description of Artificial Sequence: Synthetic oligonucleotide
  Target: LAMA2; (-) strand; PAM type: NNGRRT; PAM sequence: ATGGAT
tcttaagatactgtgtggga

SEQ ID NO: 18538 - DNA, 20 bp, Artificial Sequence
  Description of Artificial Sequence: Synthetic oligonucleotide
  Target: LAMA2; (-) strand; PAM type: NNGRRT; PAM sequence: GGGAAT
taattcttaagatactgtgt

SEQ ID NO: 18539 - DNA, 20 bp, Artificial Sequence
  Description of Artificial Sequence: Synthetic oligonucleotide
  Target: LAMA2; (-) strand; PAM type: NNGRRT; PAM sequence: ATGAAT
aattctggcactttgttatg

SEQ ID NO: 18540 - DNA, 20 bp, Artificial Sequence
  Description of Artificial Sequence: Synthetic oligonucleotide
  Target: LAMA2; (-) strand; PAM type: NNGRRT; PAM sequence: CAGAAT
aggtagacctgggttatata

SEQ ID NO: 18541 - DNA, 20 bp, Artificial Sequence
  Description of Artificial Sequence: Synthetic oligonucleotide
  Target: LAMA2; (-) strand; PAM type: NNGRRT; PAM sequence: CTGGGT
gactttggagtcaggtagac

SEQ ID NO: 18542 - DNA, 20 bp, Artificial Sequence
  Description of Artificial Sequence: Synthetic oligonucleotide
  Target: LAMA2; (-) strand; PAM type: NNGRRT; PAM sequence: TGGAGT
acttggtgaatttcagactt

SEQ ID NO: 18543 - DNA, 20 bp, Artificial Sequence
  Description of Artificial Sequence: Synthetic oligonucleotide
  Target: LAMA2; (-) strand; PAM type: NNGRRT; PAM sequence: GTGAAT
ctctgtaccaattccacttg

SEQ ID NO: 18544 - DNA, 20 bp, Artificial Sequence
  Description of Artificial Sequence: Synthetic oligonucleotide
  Target: LAMA2; (-) strand; PAM type: NNGRRT; PAM sequence: TGGAAT
gatatggatggacaccatcc

SEQ ID NO: 18545 - DNA, 20 bp, Artificial Sequence
  Description of Artificial Sequence: Synthetic oligonucleotide
  Target: LAMA2; (-) strand; PAM type: NNGRRT; PAM sequence: ATGGAT
aagctggaataaataaggat

SEQ ID NO: 18546 - DNA, 20 bp, Artificial Sequence
  Description of Artificial Sequence: Synthetic oligonucleotide
  Target: LAMA2; (-) strand; PAM type: NNGRRT; PAM sequence: AAGGAT
aatagaaagctggaataaat

SEQ ID NO: 18547 - DNA, 20 bp, Artificial Sequence
  Description of Artificial Sequence: Synthetic oligonucleotide
  Target: LAMA2; (-) strand; PAM type: NNGRRT; PAM sequence: TGGAAT
attttcaggaaatagaaagc

SEQ ID NO: 18548 - DNA, 20 bp, Artificial Sequence
  Description of Artificial Sequence: Synthetic oligonucleotide
  Target: LAMA2; (-) strand; PAM type: NNGRRT; PAM sequence: TTGAAT
attacatttttagagattac

SEQ ID NO: 18549 - DNA, 20 bp, Artificial Sequence
  Description of Artificial Sequence: Synthetic oligonucleotide
  Target: LAMA2; (-) strand; PAM type: NNGRRT; PAM sequence: AAGGAT
atcttgagtcaagtagaaat

SEQ ID NO: 18550 - DNA, 20 bp, Artificial Sequence
  Description of Artificial Sequence: Synthetic oligonucleotide
  Target: LAMA2; (-) strand; PAM type: NNGRRT; PAM sequence: TTGAGT
taactgactaaattaaaatc

SEQ ID NO: 18551 - DNA, 20 bp, Artificial Sequence
  Description of Artificial Sequence: Synthetic oligonucleotide
  Target: LAMA2; (-) strand; PAM type: NNGRRT; PAM sequence: CTGAAT
gtacaatataccatccatag

SEQ ID NO: 18552 - DNA, 20 bp, Artificial Sequence
  Description of Artificial Sequence: Synthetic oligonucleotide
  Target: LAMA2; (-) strand; PAM type: NNGRRT; PAM sequence: AAGAAT
attgtgaggagttacataat

SEQ ID NO: 18553 - DNA, 20 bp, Artificial Sequence
  Description of Artificial Sequence: Synthetic oligonucleotide
  Target: LAMA2; (-) strand; PAM type: NNGRRT; PAM sequence: AGGAGT
gtttattcaggattattgtg

SEQ ID NO: 18554 - DNA, 20 bp, Artificial Sequence
  Description of Artificial Sequence: Synthetic oligonucleotide
  Target: LAMA2; (-) strand; PAM type: NNGRRT; PAM sequence: CAGGAT
ttaatattagctggtttatt

SEQ ID NO: 18555 - DNA, 20 bp, Artificial Sequence
  Description of Artificial Sequence: Synthetic oligonucleotide
  Target: LAMA2; (-) strand; PAM type: NNGRRT; PAM sequence: AGGAAT
gtgttcttcaactatgcaat

SEQ ID NO: 18556 - DNA, 20 bp, Artificial Sequence
  Description of Artificial Sequence: Synthetic oligonucleotide
  Target: LAMA2; (-) strand; PAM type: NNGRRT; PAM sequence: CTGGAT
aaaagatagtgtatttgggt

SEQ ID NO: 18557 - DNA, 20 bp, Artificial Sequence
  Description of Artificial Sequence: Synthetic oligonucleotide
  Target: LAMA2; (-) strand; PAM type: NNGRRT; PAM sequence: TTGGGT
cattagaaaagatagtgtat

SEQ ID NO: 18558 - DNA, 20 bp, Artificial Sequence
  Description of Artificial Sequence: Synthetic oligonucleotide
  Target: LAMA2; (-) strand; PAM type: NNGRRT; PAM sequence: TAGGAT
aaaaattatcctgagctccc

SEQ ID NO: 18559 - DNA, 20 bp, Artificial Sequence
  Description of Artificial Sequence: Synthetic oligonucleotide
  Target: LAMA2; (-) strand; PAM type: NNGRRT; PAM sequence: GAGGGT
actagagtatactagaaaat

SEQ ID NO: 18560 - DNA, 20 bp, Artificial Sequence
  Description of Artificial Sequence: Synthetic oligonucleotide
  Target: LAMA2; (-) strand; PAM type: NNGRRT; PAM sequence: TAGAGT
ttgccattttagaggcacac

SEQ ID NO: 18561 - DNA, 20 bp, Artificial Sequence
  Description of Artificial Sequence: Synthetic oligonucleotide
  Target: LAMA2; (-) strand; PAM type: NNGRRT; PAM sequence: TTGAAT
ggataatagctcatcttatt

SEQ ID NO: 18562 - DNA, 20 bp, Artificial Sequence
  Description of Artificial Sequence: Synthetic oligonucleotide
  Target: LAMA2; (-) strand; PAM type: NNGRRT; PAM sequence: TTGGAT
ttactgccttttaatcccag

SEQ ID NO: 18563 - DNA, 20 bp, Artificial Sequence
  Description of Artificial Sequence: Synthetic oligonucleotide
  Target: LAMA2; (-) strand; PAM type: NNGRRT; PAM sequence: CTGAAT
ataaatggtcaagtctcttg

SEQ ID NO: 18564 - DNA, 20 bp, Artificial Sequence
  Description of Artificial Sequence: Synthetic oligonucleotide
  Target: LAMA2; (-) strand; PAM type: NNGRRT; PAM sequence: TTGAAT
tattttttctagtgcttatc

SEQ ID NO: 18565 - DNA, 20 bp, Artificial Sequence
  Description of Artificial Sequence: Synthetic oligonucleotide
  Target: LAMA2; (-) strand; PAM type: NNGRRT; PAM sequence: TAGAAT
caaaatatgctatgagtaaa

SEQ ID NO: 18566 - DNA, 20 bp, Artificial Sequence
  Description of Artificial Sequence: Synthetic oligonucleotide
  Target: LAMA2; (-) strand; PAM type: NNGRRT; PAM sequence: ATGAGT
tcacttgctcaaaatatgct

SEQ ID NO: 18567 - DNA, 20 bp, Artificial Sequence
  Description of Artificial Sequence: Synthetic oligonucleotide
  Target: LAMA2; (-) strand; PAM type: NNGRRT; PAM sequence: TGGAAT
taatagctgtaattgtgaga

SEQ ID NO: 18568 - DNA, 20 bp, Artificial Sequence
  Description of Artificial Sequence: Synthetic oligonucleotide
  Target: LAMA2; (-) strand; PAM type: NNGRRT; PAM sequence: TTGAGT
tatttttgttcgcaattata

SEQ ID NO: 18569 - DNA, 20 bp, Artificial Sequence
  Description of Artificial Sequence: Synthetic oligonucleotide
  Target: LAMA2; (-) strand; PAM type: NNGRRT; PAM sequence: TTGAGT
tttagacatcttattaacgt

SEQ ID NO: 18570 - DNA, 20 bp, Artificial Sequence
  Description of Artificial Sequence: Synthetic oligonucleotide
  Target: LAMA2; (-) strand; PAM type: NNGRRT; PAM sequence: TAGAAT
tggtaggaaaaagactaaaa

SEQ ID NO: 18571 - DNA, 20 bp, Artificial Sequence
  Description of Artificial Sequence: Synthetic oligonucleotide
  Target: LAMA2; (-) strand; PAM type: NNGRRT; PAM sequence: GTGAGT
cattcctggattagccagga

SEQ ID NO: 18572 - DNA, 20 bp, Artificial Sequence
  Description of Artificial Sequence: Synthetic oligonucleotide
  Target: LAMA2; (-) strand; PAM type: NNGRRT; PAM sequence: AGGAGT
atggcattcctggattagcc

SEQ ID NO: 18573 - DNA, 20 bp, Artificial Sequence
  Description of Artificial Sequence: Synthetic oligonucleotide
  Target: LAMA2; (-) strand; PAM type: NNGRRT; PAM sequence: CTGGAT
ttaactaattaatggcattc

SEQ ID NO: 18574 - DNA, 20 bp, Artificial Sequence
  Description of Artificial Sequence: Synthetic oligonucleotide
  Target: LAMA2; (-) strand; PAM type: NNGRRT; PAM sequence: GTGAAT
gggatagaccaggaagagaa

SEQ ID NO: 18575 - DNA, 20 bp, Artificial Sequence
  Description of Artificial Sequence: Synthetic oligonucleotide
  Target: LAMA2; (-) strand; PAM type: NNGRRT; PAM sequence: AGGGAT
taaacgcattcttagttttg

SEQ ID NO: 18576 - DNA, 20 bp, Artificial Sequence
  Description of Artificial Sequence: Synthetic oligonucleotide
  Target: LAMA2; (-) strand; PAM type: NNGRRT; PAM sequence: TGGAGT
atatttaggttaagaatatg

SEQ ID NO: 18577 - DNA, 20 bp, Artificial Sequence
  Description of Artificial Sequence: Synthetic oligonucleotide
  Target: LAMA2; (-) strand; PAM type: NNGRRT; PAM sequence: AAGAAT
gtgaataaaatatttaggtt

SEQ ID NO: 18578 - DNA, 20 bp, Artificial Sequence
  Description of Artificial Sequence: Synthetic oligonucleotide
  Target: LAMA2; (-) strand; PAM type: NNGRRT; PAM sequence: GTGAAT
aatttttctctgcaagatca

SEQ ID NO: 18579 - DNA, 20 bp, Artificial Sequence
  Description of Artificial Sequence: Synthetic oligonucleotide
  Target: LAMA2; (-) strand; PAM type: NNGRRT; PAM sequence: ATGGAT
aatcattttatactattcac

SEQ ID NO: 18580 - DNA, 20 bp, Artificial Sequence
  Description of Artificial Sequence: Synthetic oligonucleotide
  Target: LAMA2; (-) strand; PAM type: NNGRRT; PAM sequence: TTGAAT
gtttaaatgattgttaaaac

SEQ ID NO: 18581 - DNA, 20 bp, Artificial Sequence
  Description of Artificial Sequence: Synthetic oligonucleotide
  Target: LAMA2; (-) strand; PAM type: NNGRRT; PAM sequence: TTGGAT
ccttccttcaagactgaaaa

SEQ ID NO: 18582 - DNA, 20 bp, Artificial Sequence
  Description of Artificial Sequence: Synthetic oligonucleotide
  Target: LAMA2; (-) strand; PAM type: NNGRRT; PAM sequence: AAGAAT
tgaggaaagaattgacatga

SEQ ID NO: 18583 - DNA, 20 bp, Artificial Sequence
  Description of Artificial Sequence: Synthetic oligonucleotide
  Target: LAMA2; (-) strand; PAM type: NNGRRT; PAM sequence: AAGAAT
cagtaagaagagcatgagga

SEQ ID NO: 18584 - DNA, 20 bp, Artificial Sequence
  Description of Artificial Sequence: Synthetic oligonucleotide
  Target: LAMA2; (-) strand; PAM type: NNGRRT; PAM sequence: AGGAAT
acatcctttaatcagtaatc

SEQ ID NO: 18585 - DNA, 20 bp, Artificial Sequence
  Description of Artificial Sequence: Synthetic oligonucleotide
  Target: LAMA2; (-) strand; PAM type: NNGRRT; PAM sequence: GTGAAT
tgtttaatttccatgtattt

SEQ ID NO: 18586 - DNA, 20 bp, Artificial Sequence
  Description of Artificial Sequence: Synthetic oligonucleotide
  Target: LAMA2; (-) strand; PAM type: NNGRRT; PAM sequence: GGGAGT
tctttatccattggttgttt

SEQ ID NO: 18587 - DNA, 20 bp, Artificial Sequence
  Description of Artificial Sequence: Synthetic oligonucleotide
  Target: LAMA2; (-) strand; PAM type: NNGRRT; PAM sequence: GAGAGT
tttgttggcatataattgtt

SEQ ID NO: 18588 - DNA, 20 bp, Artificial Sequence
  Description of Artificial Sequence: Synthetic oligonucleotide
  Target: LAMA2; (-) strand; PAM type: NNGRRT; PAM sequence: AGGAAT
gattcagtgttagtaggtct

SEQ ID NO: 18589 - DNA, 20 bp, Artificial Sequence
  Description of Artificial Sequence: Synthetic oligonucleotide
  Target: LAMA2; (-) strand; PAM type: NNGRRT; PAM sequence: TAGGGT
ggttctgggcttttctttga

SEQ ID NO: 18590 - DNA, 20 bp, Artificial Sequence
  Description of Artificial Sequence: Synthetic oligonucleotide
  Target: LAMA2; (-) strand; PAM type: NNGRRT; PAM sequence: TAGAAT
ttagttccttaaatgtttgg

SEQ ID NO: 18591 - DNA, 20 bp, Artificial Sequence
  Description of Artificial Sequence: Synthetic oligonucleotide
  Target: LAMA2; (-) strand; PAM type: NNGRRT; PAM sequence: AAGGAT
gttatttggaggattttgag

SEQ ID NO: 18592 - DNA, 20 bp, Artificial Sequence
  Description of Artificial Sequence: Synthetic oligonucleotide
  Target: LAMA2; (-) strand; PAM type: NNGRRT; PAM sequence: GAGGAT
ccctcatcttcagttatttg

SEQ ID NO: 18593 - DNA, 20 bp, Artificial Sequence
  Description of Artificial Sequence: Synthetic oligonucleotide
  Target: LAMA2; (-) strand; PAM type: NNGRRT; PAM sequence: AGGAGT
ggtttgttagtattttcttg

SEQ ID NO: 18594 - DNA, 20 bp, Artificial Sequence
  Description of Artificial Sequence: Synthetic oligonucleotide
  Target: LAMA2; (-) strand; PAM type: NNGRRT; PAM sequence: CTGAAT
atgatccttttaatgtgctg

SEQ ID NO: 18595 - DNA, 20 bp, Artificial Sequence
  Description of Artificial Sequence: Synthetic oligonucleotide
  Target: LAMA2; (-) strand; PAM type: NNGRRT; PAM sequence: GTGAAT
agtgatcccacttgatcaca

SEQ ID NO: 18596 - DNA, 20 bp, Artificial Sequence
  Description of Artificial Sequence: Synthetic oligonucleotide
  Target: LAMA2; (-) strand; PAM type: NNGRRT; PAM sequence: TTGAAT
gcttttatcattaaacaatg

SEQ ID NO: 18597 - DNA, 20 bp, Artificial Sequence
  Description of Artificial Sequence: Synthetic oligonucleotide
  Target: LAMA2; (-) strand; PAM type: NNGRRT; PAM sequence: GAGGAT
tattgagtatgatgttagct

SEQ ID NO: 18598 - DNA, 20 bp, Artificial Sequence
  Description of Artificial Sequence: Synthetic oligonucleotide
  Target: LAMA2; (-) strand; PAM type: NNGRRT; PAM sequence: TTGAGT
aacctttcagcttttcacta

SEQ ID NO: 18599 - DNA, 20 bp, Artificial Sequence
  Description of Artificial Sequence: Synthetic oligonucleotide
  Target: LAMA2; (-) strand; PAM type: NNGRRT; PAM sequence: GTGGGT
gccaaatagaagtggtgcaa

SEQ ID NO: 18600 - DNA, 20 bp, Artificial Sequence
  Description of Artificial Sequence: Synthetic oligonucleotide
  Target: LAMA2; (-) strand; PAM type: NNGRRT; PAM sequence: CAGGGT
aacagttattttggtggagt

SEQ ID NO: 18601 - DNA, 20 bp, Artificial Sequence
  Description of Artificial Sequence: Synthetic oligonucleotide
  Target: LAMA2; (-) strand; PAM type: NNGRRT; PAM sequence: TGGAGT
agttctaacagttattttgg

SEQ ID NO: 18602 - DNA, 20 bp, Artificial Sequence
  Description of Artificial Sequence: Synthetic oligonucleotide
  Target: LAMA2; (-) strand; PAM type: NNGRRT; PAM sequence: CAGAAT
ttttgtatcctgctaattta

SEQ ID NO: 18603 - DNA, 20 bp, Artificial Sequence
  Description of Artificial Sequence: Synthetic oligonucleotide
  Target: LAMA2; (-) strand; PAM type: NNGRRT; PAM sequence: TGGGAT
tttcttttagctatggtgaa

SEQ ID NO: 18604 - DNA, 20 bp, Artificial Sequence
  Description of Artificial Sequence: Synthetic oligonucleotide
  Target: LAMA2; (-) strand; PAM type: NNGRRT; PAM sequence: GTGAAT
ttatttttcttttagctatg

SEQ ID NO: 18605 - DNA, 20 bp, Artificial Sequence
  Description of Artificial Sequence: Synthetic oligonucleotide
  Target: LAMA2; (-) strand; PAM type: NNGRRT; PAM sequence: TTGGGT
agtacaattcaagatgaaat

SEQ ID NO: 18606 - DNA, 20 bp, Artificial Sequence
  Description of Artificial Sequence: Synthetic oligonucleotide
  Target: LAMA2; (-) strand; PAM type: NNGRRT; PAM sequence: TGGAGT
ccacaacacatgggaattat

SEQ ID NO: 18607 - DNA, 20 bp, Artificial Sequence
  Description of Artificial Sequence: Synthetic oligonucleotide
  Target: LAMA2; (-) strand; PAM type: NNGRRT; PAM sequence: GGGAAT
aggtccctcccacaacacat

SEQ ID NO: 18608 - DNA, 20 bp, Artificial Sequence
  Description of Artificial Sequence: Synthetic oligonucleotide
  Target: LAMA2; (-) strand; PAM type: NNGRRT; PAM sequence: GAGAAT
tggatggcagcaggcaagga

SEQ ID NO: 18609 - DNA, 20 bp, Artificial Sequence
  Description of Artificial Sequence: Synthetic oligonucleotide
  Target: LAMA2; (-) strand; PAM type: NNGRRT; PAM sequence: ATGGAT
aaggaggagtcctgtcttac

SEQ ID NO: 18610 - DNA, 20 bp, Artificial Sequence
  Description of Artificial Sequence: Synthetic oligonucleotide
  Target: LAMA2; (-) strand; PAM type: NNGRRT; PAM sequence: AGGAGT
aatcatggtggaaggtaagg

SEQ ID NO: 18611 - DNA, 20 bp, Artificial Sequence
  Description of Artificial Sequence: Synthetic oligonucleotide
  Target: LAMA2; (-) strand; PAM type: NNGRRT; PAM sequence: GAGAAT
tacttgggaggctgaggcag

SEQ ID NO: 18612 - DNA, 20 bp, Artificial Sequence
  Description of Artificial Sequence: Synthetic oligonucleotide
  Target: LAMA2; (-) strand; PAM type: NNGRRT; PAM sequence: GCGGAT
actttgggaggccgaggcgg

SEQ ID NO: 18613 - DNA, 20 bp, Artificial Sequence
  Description of Artificial Sequence: Synthetic oligonucleotide
  Target: LAMA2; (-) strand; PAM type: NNGRRT; PAM sequence: CAGGAT
attagttattccacaaaaca

SEQ ID NO: 18614 - DNA, 20 bp, Artificial Sequence
  Description of Artificial Sequence: Synthetic oligonucleotide
  Target: LAMA2; (-) strand; PAM type: NNGRRT; PAM sequence: TTGAGT
cactgaatctgtggatcaca

SEQ ID NO: 18615 - DNA, 20 bp, Artificial Sequence
  Description of Artificial Sequence: Synthetic oligonucleotide
  Target: LAMA2; (-) strand; PAM type: NNGRRT; PAM sequence: GTGGAT
acaagaattgcactgaatct

SEQ ID NO: 18616 - DNA, 20 bp, Artificial Sequence
  Description of Artificial Sequence: Synthetic oligonucleotide
  Target: LAMA2; (-) strand; PAM type: NNGRRT; PAM sequence: CTGAAT
gaattttgacaagaattgca

SEQ ID NO: 18617 - DNA, 20 bp, Artificial Sequence
  Description of Artificial Sequence: Synthetic oligonucleotide
  Target: LAMA2; (-) strand; PAM type: NNGRRT; PAM sequence: AAGAAT
aacgtcattggaattttgac

SEQ ID NO: 18618 - DNA, 20 bp, Artificial Sequence
  Description of Artificial Sequence: Synthetic oligonucleotide
  Target: LAMA2; (-) strand; PAM type: NNGRRT; PAM sequence: TGGAAT
atttctgtgaaaaacgtcat

SEQ ID NO: 18619 - DNA, 20 bp, Artificial Sequence
  Description of Artificial Sequence: Synthetic oligonucleotide
  Target: LAMA2; (-) strand; PAM type: NNGRRT; PAM sequence: TAGGAT
ttgtggttccataaaatatt

SEQ ID NO: 18620 - DNA, 20 bp, Artificial Sequence
  Description of Artificial Sequence: Synthetic oligonucleotide
  Target: LAMA2; (-) strand; PAM type: NNGRRT; PAM sequence: AAGGGT
ttttttatatggcatgagat

SEQ ID NO: 18621 - DNA, 20 bp, Artificial Sequence
  Description of Artificial Sequence: Synthetic oligonucleotide
  Target: LAMA2; (-) strand; PAM type: NNGRRT; PAM sequence: ATGGAT
ttaattcatttagaatttga

SEQ ID NO: 18622 - DNA, 20 bp, Artificial Sequence
  Description of Artificial Sequence: Synthetic oligonucleotide
  Target: LAMA2; (-) strand; PAM type: NNGRRT; PAM sequence: TTGAAT
gtctttaattcatttagaat

SEQ ID NO: 18623 - DNA, 20 bp, Artificial Sequence
  Description of Artificial Sequence: Synthetic oligonucleotide
  Target: LAMA2; (-) strand; PAM type: NNGRRT; PAM sequence: TAGAAT
gtttcagtctttaattcatt

SEQ ID NO: 18624 - DNA, 20 bp, Artificial Sequence
  Description of Artificial Sequence: Synthetic oligonucleotide
  Target: LAMA2; (-) strand; PAM type: NNGRRT; PAM sequence: TGGGGT
ttattgtgtttcctgtgctt

SEQ ID NO: 18625 - DNA, 20 bp, Artificial Sequence
  Description of Artificial Sequence: Synthetic oligonucleotide
  Target: LAMA2; (-) strand; PAM type: NNGRRT; PAM sequence: TAGGAT
gtagacaaacggaaaccaat

SEQ ID NO: 18626 - DNA, 20 bp, Artificial Sequence
  Description of Artificial Sequence: Synthetic oligonucleotide
  Target: LAMA2; (-) strand; PAM type: NNGRRT; PAM sequence: AAGGGT
gctgtgttgaaagcagacca

SEQ ID NO: 18627 - DNA, 20 bp, Artificial Sequence
  Description of Artificial Sequence: Synthetic oligonucleotide
  Target: LAMA2; (-) strand; PAM type: NNGRRT; PAM sequence: CTGAAT
gggtcattgtgcttttccca

SEQ ID NO: 18628 - DNA, 20 bp, Artificial Sequence
  Description of Artificial Sequence: Synthetic oligonucleotide
  Target: LAMA2; (-) strand; PAM type: NNGRRT; PAM sequence: GTGGGT
gaaaaggtccttaaggcctt

SEQ ID NO: 18629 - DNA, 20 bp, Artificial Sequence
  Description of Artificial Sequence: Synthetic oligonucleotide
  Target: LAMA2; (-) strand; PAM type: NNGRRT; PAM sequence: CGGGAT
tgtgagtgttcaagacatag

SEQ ID NO: 18630 - DNA, 20 bp, Artificial Sequence
  Description of Artificial Sequence: Synthetic oligonucleotide
  Target: LAMA2; (-) strand; PAM type: NNGRRT; PAM sequence: GTGAGT
gcaaaggccctgaggcaggt

SEQ ID NO: 18631 - DNA, 20 bp, Artificial Sequence
  Description of Artificial Sequence: Synthetic oligonucleotide
  Target: LAMA2; (-) strand; PAM type: NNGRRT; PAM sequence: TTGAAT
ccttgttgagaaggtaacac

SEQ ID NO: 18632 - DNA, 20 bp, Artificial Sequence
  Description of Artificial Sequence: Synthetic oligonucleotide
  Target: LAMA2; (-) strand; PAM type: NNGRRT; PAM sequence: TAGAGT
ctgggagctgcaattttaaa

SEQ ID NO: 18633 - DNA, 20 bp, Artificial Sequence
  Description of Artificial Sequence: Synthetic oligonucleotide
  Target: LAMA2; (-) strand; PAM type: NNGRRT; PAM sequence: TTGAAT
attaacttaatacaaacaca

SEQ ID NO: 18634 - DNA, 20 bp, Artificial Sequence
  Description of Artificial Sequence: Synthetic oligonucleotide
  Target: LAMA2; (-) strand; PAM type: NNGRRT; PAM sequence: ATGGAT
ttcaataagattcttaaatt

SEQ ID NO: 18635 - DNA, 20 bp, Artificial Sequence
  Description of Artificial Sequence: Synthetic oligonucleotide
  Target: LAMA2; (-) strand; PAM type: NNGRRT; PAM sequence: TTGAAT
aagcagaccctcaccagaca

SEQ ID NO: 18636 - DNA, 20 bp, Artificial Sequence
  Description of Artificial Sequence: Synthetic oligonucleotide
  Target: LAMA2; (-) strand; PAM type: NNGRRT; PAM sequence: TGGAAT
gaggacagagcccccaagaa

SEQ ID NO: 18637 - DNA, 20 bp, Artificial Sequence
  Description of Artificial Sequence: Synthetic oligonucleotide
  Target: LAMA2; (-) strand; PAM type: NNGRRT; PAM sequence: AAGAAT
gtcatgaggacagagccccc

SEQ ID NO: 18638 - DNA, 20 bp, Artificial Sequence
  Description of Artificial Sequence: Synthetic oligonucleotide
  Target: LAMA2; (-) strand; PAM type: NNGRRT; PAM sequence: GGGGAT
atgtgatggtattaggtgat

SEQ ID NO: 18639 - DNA, 20 bp, Artificial Sequence
  Description of Artificial Sequence: Synthetic oligonucleotide
  Target: LAMA2; (-) strand; PAM type: NNGRRT; PAM sequence: CTGAAT
tacttcacgctttctataga

SEQ ID NO: 18640 - DNA, 20 bp, Artificial Sequence
  Description of Artificial Sequence: Synthetic oligonucleotide
  Target: LAMA2; (-) strand; PAM type: NNGRRT; PAM sequence: CAGAGT
atttagaatacgcttaaaag

SEQ ID NO: 18641 - DNA, 20 bp, Artificial Sequence
  Description of Artificial Sequence: Synthetic oligonucleotide
  Target: LAMA2; (-) strand; PAM type: NNGRRT; PAM sequence: TAGAAT
tgacagatacaactgaaatt

SEQ ID NO: 18642 - DNA, 20 bp, Artificial Sequence
  Description of Artificial Sequence: Synthetic oligonucleotide
  Target: LAMA2; (-) strand; PAM type: NNGRRT; PAM sequence: AAGAGT
agacttctctgttacaaaag

SEQ ID NO: 18643 - DNA, 20 bp, Artificial Sequence
  Description of Artificial Sequence: Synthetic oligonucleotide
  Target: LAMA2; (-) strand; PAM type: NNGRRT; PAM sequence: TAGAAT
ttacattttcatggtattgc

SEQ ID NO: 18644 - DNA, 20 bp, Artificial Sequence
  Description of Artificial Sequence: Synthetic oligonucleotide
  Target: LAMA2; (-) strand; PAM type: NNGRRT; PAM sequence: CTGGGT
gactctatttgaaataggat

SEQ ID NO: 18645 - DNA, 20 bp, Artificial Sequence
  Description of Artificial Sequence: Synthetic oligonucleotide
  Target: LAMA2; (-) strand; PAM type: NNGRRT; PAM sequence: TAGGAT
catcttgactctatttgaaa

SEQ ID NO: 18646 - DNA, 20 bp, Artificial Sequence
  Description of Artificial Sequence: Synthetic oligonucleotide
  Target: LAMA2; (-) strand; PAM type: NNGRRT; PAM sequence: CAGAAT
cttgttcagactttccataa

SEQ ID NO: 18647 - DNA, 20 bp, Artificial Sequence
  Description of Artificial Sequence: Synthetic oligonucleotide
  Target: LAMA2; (-) strand; PAM type: NNGRRT; PAM sequence: GTGGAT
ttccaccaaaaggatgaaat

SEQ ID NO: 18648 - DNA, 20 bp, Artificial Sequence
  Description of Artificial Sequence: Synthetic oligonucleotide
  Target: LAMA2; (-) strand; PAM type: NNGRRT; PAM sequence: AAGGAT
aatacacagtattccaccaa

SEQ ID NO: 18649 - DNA, 20 bp, Artificial Sequence
  Description of Artificial Sequence: Synthetic oligonucleotide
  Target: LAMA2; (-) strand; PAM type: NNGRRT; PAM sequence: AAGAAT
taagtaaaaaattaaactct

SEQ ID NO: 18650 - DNA, 20 bp, Artificial Sequence
  Description of Artificial Sequence: Synthetic oligonucleotide
  Target: LAMA2; (-) strand; PAM type: NNGRRT; PAM sequence: TGGGGT
tcaagaattttctctgtgca

SEQ ID NO: 18651 - DNA, 20 bp, Artificial Sequence
  Description of Artificial Sequence: Synthetic oligonucleotide
  Target: LAMA2; (-) strand; PAM type: NNGRRT; PAM sequence: AAGAAT
tcaatgaagccatttgactc

SEQ ID NO: 18652 - DNA, 20 bp, Artificial Sequence
  Description of Artificial Sequence: Synthetic oligonucleotide
  Target: LAMA2; (-) strand; PAM type: NNGRRT; PAM sequence: ATGAAT
attggaaacatatcttatct

SEQ ID NO: 18653 - DNA, 20 bp, Artificial Sequence
  Description of Artificial Sequence: Synthetic oligonucleotide
  Target: LAMA2; (-) strand; PAM type: NNGRRT; PAM sequence: ATGGGT
catgtttgtattttagagat

SEQ ID NO: 18654 - DNA, 20 bp, Artificial Sequence
  Description of Artificial Sequence: Synthetic oligonucleotide
  Target: LAMA2; (-) strand; PAM type: NNGRRT; PAM sequence: TGGAAT
ataagtcataggtaaagaaa

SEQ ID NO: 18655 - DNA, 20 bp, Artificial Sequence
  Description of Artificial Sequence: Synthetic oligonucleotide
  Target: LAMA2; (-) strand; PAM type: NNGRRT; PAM sequence: CTGAGT
aagaccaaaagtaatatttt

SEQ ID NO: 18656 - DNA, 20 bp, Artificial Sequence
  Description of Artificial Sequence: Synthetic oligonucleotide
  Target: LAMA2; (-) strand; PAM type: NNGRRT; PAM sequence: TTGAGT
cataaagtgctaaaaatata

SEQ ID NO: 18657 - DNA, 20 bp, Artificial Sequence
  Description of Artificial Sequence: Synthetic oligonucleotide
  Target: LAMA2; (-) strand; PAM type: NNGRRT; PAM sequence: AAGAGT
gagtaaagaagctgttacaa

SEQ ID NO: 18658 - DNA, 20 bp, Artificial Sequence
  Description of Artificial Sequence: Synthetic oligonucleotide
  Target: LAMA2; (-) strand; PAM type: NNGRRT; PAM sequence: AAGAGT
ggatatcatgacaacaacag

SEQ ID NO: 18659 - DNA, 20 bp, Artificial Sequence
  Description of Artificial Sequence: Synthetic oligonucleotide
  Target: LAMA2; (-) strand; PAM type: NNGRRT; PAM sequence: GAGGAT
ttaaaaatttaagtaatctg

SEQ ID NO: 18660 - DNA, 20 bp, Artificial Sequence
  Description of Artificial Sequence: Synthetic oligonucleotide
  Target: LAMA2; (-) strand; PAM type: NNGRRT; PAM sequence: CTGGGT
aaaaggcatgagggaagttt

SEQ ID NO: 18661 - DNA, 20 bp, Artificial Sequence
  Description of Artificial Sequence: Synthetic oligonucleotide
  Target: LAMA2; (-) strand; PAM type: NNGRRT; PAM sequence: TAGAAT
cttcactggtgaatacaagt

SEQ ID NO: 18662 - DNA, 20 bp, Artificial Sequence
  Description of Artificial Sequence: Synthetic oligonucleotide
  Target: LAMA2; (-) strand; PAM type: NNGRRT; PAM sequence: GTGAAT
tagatcaaatggcttcactg

SEQ ID NO: 18663 - DNA, 20 bp, Artificial Sequence
  Description of Artificial Sequence: Synthetic oligonucleotide
  Target: LAMA2; (-) strand; PAM type: NNGRRT; PAM sequence: TGGAAT
tcccacatttattatagata

SEQ ID NO: 18664 - DNA, 20 bp, Artificial Sequence
  Description of Artificial Sequence: Synthetic oligonucleotide
  Target: LAMA2; (-) strand; PAM type: NNGRRT; PAM sequence: GTGAGT
tataagaaatgaaaactcca

SEQ ID NO: 18665 - DNA, 20 bp, Artificial Sequence
  Description of Artificial Sequence: Synthetic oligonucleotide
  Target: LAMA2; (-) strand; PAM type: NNGRRT; PAM sequence: GTGGAT
atatttgaaaaattaggtaa

SEQ ID NO: 18666 - DNA, 20 bp, Artificial Sequence
  Description of Artificial Sequence: Synthetic oligonucleotide
  Target: LAMA2; (-) strand; PAM type: NNGRRT; PAM sequence: TGGAAT
aaaggttacacaacaatatc

SEQ ID NO: 18667 - DNA, 20 bp, Artificial Sequence
  Description of Artificial Sequence: Synthetic oligonucleotide
  Target: LAMA2; (-) strand; PAM type: NNGRRT; PAM sequence: CAGGAT
aaaaacaagacatataagag

SEQ ID NO: 18668 - DNA, 20 bp, Artificial Sequence
  Description of Artificial Sequence: Synthetic oligonucleotide
  Target: LAMA2; (-) strand; PAM type: NNGRRT; PAM sequence: TAGAAT
gaaaaatttactatgaaaat

SEQ ID NO: 18669 - DNA, 20 bp, Artificial Sequence
  Description of Artificial Sequence: Synthetic oligonucleotide
  Target: LAMA2; (-) strand; PAM type: NNGRRT; PAM sequence: AGGAAT
atagtggaattagtgaggaa

SEQ ID NO: 18670 - DNA, 20 bp, Artificial Sequence
  Description of Artificial Sequence: Synthetic oligonucleotide
  Target: LAMA2; (-) strand; PAM type: NNGRRT; PAM sequence: TGGAAT
tgaaaatacactgaccatag

SEQ ID NO: 18671 - DNA, 20 bp, Artificial Sequence
  Description of Artificial Sequence: Synthetic oligonucleotide
  Target: LAMA2; (-) strand; PAM type: NNGRRT; PAM sequence: AAGAAT
tctcaaaaagtttagtctca

SEQ ID NO: 18672 - DNA, 20 bp, Artificial Sequence
  Description of Artificial Sequence: Synthetic oligonucleotide
  Target: LAMA2; (-) strand; PAM type: NNGRRT; PAM sequence: TTGGAT
tttcaagtcactgccatatg

SEQ ID NO: 18673 - DNA, 20 bp, Artificial Sequence
  Description of Artificial Sequence: Synthetic oligonucleotide
  Target: LAMA2; (-) strand; PAM type: NNGRRT; PAM sequence: AGGAGT
tcccaaagtgctgggattac

SEQ ID NO: 18674 - DNA, 20 bp, Artificial Sequence
  Description of Artificial Sequence: Synthetic oligonucleotide
  Target: LAMA2; (-) strand; PAM type: NNGRRT; PAM sequence: TGGGAT
gccttggcctcccaaagtgc

SEQ ID NO: 18675 - DNA, 20 bp, Artificial Sequence
  Description of Artificial Sequence: Synthetic oligonucleotide
  Target: LAMA2; (-) strand; PAM type: NNGRRT; PAM sequence: TGGGGT
cacacccagctaatttgttt

SEQ ID NO: 18676 - DNA, 20 bp, Artificial Sequence
  Description of Artificial Sequence: Synthetic oligonucleotide
  Target: LAMA2; (-) strand; PAM type: NNGRRT; PAM sequence: CAGAAT
gattctcccacctcagactc

SEQ ID NO: 18677 - DNA, 20 bp, Artificial Sequence
  Description of Artificial Sequence: Synthetic oligonucleotide
  Target: LAMA2; (-) strand; PAM type: NNGRRT; PAM sequence: CTGGGT
ctcaccacaacctctacctc

SEQ ID NO: 18678 - DNA, 20 bp, Artificial Sequence
  Description of Artificial Sequence: Synthetic oligonucleotide
  Target: LAMA2; (-) strand; PAM type: NNGRRT; PAM sequence: TGGAGT
tccagctctgtcacccaggc

SEQ ID NO: 18679 - DNA, 20 bp, Artificial Sequence
  Description of Artificial Sequence: Synthetic oligonucleotide
  Target: LAMA2; (-) strand; PAM type: NNGRRT; PAM sequence: CAGGGT
tttctttgcttttttttaga

SEQ ID NO: 18680 - DNA, 20 bp, Artificial Sequence
  Description of Artificial Sequence: Synthetic oligonucleotide
  Target: LAMA2; (-) strand; PAM type: NNGRRT; PAM sequence: TAGAAT
agtactgcaaccaacaacta

SEQ ID NO: 18681 - DNA, 20 bp, Artificial Sequence
  Description of Artificial Sequence: Synthetic oligonucleotide
  Target: LAMA2; (-) strand; PAM type: NNGRRT; PAM sequence: AAGAGT
taaaaaggtggttaatacaa

SEQ ID NO: 18682 - DNA, 20 bp, Artificial Sequence
  Description of Artificial Sequence: Synthetic oligonucleotide
  Target: LAMA2; (-) strand; PAM type: NNGRRT; PAM sequence: GTGAAT
acagagaaaaaaggaagcta

SEQ ID NO: 18683 - DNA, 20 bp, Artificial Sequence
  Description of Artificial Sequence: Synthetic oligonucleotide
  Target: LAMA2; (-) strand; PAM type: NNGRRT; PAM sequence: ATGAAT
tatagtaacactaaatgtaa

SEQ ID NO: 18684 - DNA, 20 bp, Artificial Sequence
  Description of Artificial Sequence: Synthetic oligonucleotide
  Target: LAMA2; (-) strand; PAM type: NNGRRT; PAM sequence: GAGAAT
aagacaaacagaaaacagat

SEQ ID NO: 18685 - DNA, 20 bp, Artificial Sequence
  Description of Artificial Sequence: Synthetic oligonucleotide
  Target: LAMA2; (-) strand; PAM type: NNGRRT; PAM sequence: TGGAAT
caagctaatgaaagaagaaa

SEQ ID NO: 18686 - DNA, 20 bp, Artificial Sequence
  Description of Artificial Sequence: Synthetic oligonucleotide
  Target: LAMA2; (-) strand; PAM type: NNGRRT; PAM sequence: ATGAGT
ccatatttatggtaattagt

SEQ ID NO: 18687 - DNA, 20 bp, Artificial Sequence
  Description of Artificial Sequence: Synthetic oligonucleotide
  Target: LAMA2; (-) strand; PAM type: NNGRRT; PAM sequence: TAGAAT
aattaaacatatgagaacta

SEQ ID NO: 18688 - DNA, 20 bp, Artificial Sequence
  Description of Artificial Sequence: Synthetic oligonucleotide
  Target: LAMA2; (-) strand; PAM type: NNGRRT; PAM sequence: TAGAAT
tatggagtttaatatataca

SEQ ID NO: 18689 - DNA, 20 bp, Artificial Sequence
  Description of Artificial Sequence: Synthetic oligonucleotide
  Target: LAMA2; (-) strand; PAM type: NNGRRT; PAM sequence: TGGAGT
atggtaacaattacttccta

SEQ ID NO: 18690 - DNA, 20 bp, Artificial Sequence
  Description of Artificial Sequence: Synthetic oligonucleotide
  Target: LAMA2; (-) strand; PAM type: NNGRRT; PAM sequence: TGGGAT
taaaaaaggcagaaaagaaa

SEQ ID NO: 18691 - DNA, 20 bp, Artificial Sequence
  Description of Artificial Sequence: Synthetic oligonucleotide
  Target: LAMA2; (-) strand; PAM type: NNGRRT; PAM sequence: TAGAGT
taataatgataggatatatt

SEQ ID NO: 18692 - DNA, 20 bp, Artificial Sequence
  Description of Artificial Sequence: Synthetic oligonucleotide
  Target: LAMA2; (-) strand; PAM type: NNGRRT; PAM sequence: TAGGAT
tgaaaaacaagtaataatga

SEQ ID NO: 18693 - DNA, 20 bp, Artificial Sequence
  Description of Artificial Sequence: Synthetic oligonucleotide
  Target: LAMA2; (-) strand; PAM type: NNGRRT; PAM sequence: TGGAGT
ttaaaaaaaatagccttcaa

SEQ ID NO: 18694 - DNA, 20 bp, Artificial Sequence
  Description of Artificial Sequence: Synthetic oligonucleotide
  Target: LAMA2; (-) strand; PAM type: NNGRRT; PAM sequence: TTGAAT
tccacagaatctagaagctt

SEQ ID NO: 18695 - DNA, 20 bp, Artificial Sequence
  Description of Artificial Sequence: Synthetic oligonucleotide
  Target: LAMA2; (-) strand; PAM type: NNGRRT; PAM sequence: CAGAAT
tggtgaaagacattgatcca

SEQ ID NO: 18696 - DNA, 20 bp, Artificial Sequence
  Description of Artificial Sequence: Synthetic oligonucleotide
  Target: LAMA2; (-) strand; PAM type: NNGRRT; PAM sequence: AAGAAT
cattcgagaaaatatcggct

SEQ ID NO: 18697 - DNA, 20 bp, Artificial Sequence
  Description of Artificial Sequence: Synthetic oligonucleotide
  Target: LAMA2; (-) strand; PAM type: NNGRRT; PAM sequence: AAGAAT
tctcagggagagtggagaga

SEQ ID NO: 18698 - DNA, 20 bp, Artificial Sequence
  Description of Artificial Sequence: Synthetic oligonucleotide
  Target: LAMA2; (-) strand; PAM type: NNGRRT; PAM sequence: GAGAGT
gatgtgactgaagtctcagg

SEQ ID NO: 18699 - DNA, 20 bp, Artificial Sequence
  Description of Artificial Sequence: Synthetic oligonucleotide
  Target: LAMA2; (-) strand; PAM type: NNGRRT; PAM sequence: AGGGAT
agcacggcaaacggtctagc

SEQ ID NO: 18700 - DNA, 20 bp, Artificial Sequence
  Description of Artificial Sequence: Synthetic oligonucleotide
  Target: LAMA2; (-) strand; PAM type: NNGRRT; PAM sequence: TAGAAT
agacaaatgaaaagaagcca

SEQ ID NO: 18701 - DNA, 20 bp, Artificial Sequence
  Description of Artificial Sequence: Synthetic oligonucleotide
  Target: LAMA2; (-) strand; PAM type: NNGRRT; PAM sequence: AGGGAT
gattgaatccagcagaaaaa

SEQ ID NO: 18702 - DNA, 20 bp, Artificial Sequence
  Description of Artificial Sequence: Synthetic oligonucleotide
  Target: LAMA2; (-) strand; PAM type: NNGRRT; PAM sequence: TTGAAT
taaatgtatgtaatagaaga

SEQ ID NO: 18703 - DNA, 20 bp, Artificial Sequence
  Description of Artificial Sequence: Synthetic oligonucleotide
  Target: LAMA2; (-) strand; PAM type: NNGRRT; PAM sequence: ATGGAT
taatttttttaaagtatcaa

SEQ ID NO: 18704 - DNA, 20 bp, Artificial Sequence
  Description of Artificial Sequence: Synthetic oligonucleotide
  Target: LAMA2; (-) strand; PAM type: NNGRRT; PAM sequence: TGGAGT
tgactaagtggagagatatt

SEQ ID NO: 18705 - DNA, 20 bp, Artificial Sequence
  Description of Artificial Sequence: Synthetic oligonucleotide
  Target: LAMA2; (-) strand; PAM type: NNGRRT; PAM sequence: CAGAGT
ctcccagttgtttccaacgt

SEQ ID NO: 18706 - DNA, 20 bp, Artificial Sequence
  Description of Artificial Sequence: Synthetic oligonucleotide
  Target: LAMA2; (-) strand; PAM type: NNGRRT; PAM sequence: AGGAAT
gaccaagcttgtcataaaac

SEQ ID NO: 18707 - DNA, 20 bp, Artificial Sequence
  Description of Artificial Sequence: Synthetic oligonucleotide
  Target: LAMA2; (-) strand; PAM type: NNGRRT; PAM sequence: CAGAAT
aagagaaaaataacatcttc

SEQ ID NO: 18708 - DNA, 20 bp, Artificial Sequence
  Description of Artificial Sequence: Synthetic oligonucleotide
  Target: LAMA2; (-) strand; PAM type: NNGRRT; PAM sequence: CAGAAT
gcctctacactaactcttga

SEQ ID NO: 18709 - DNA, 20 bp, Artificial Sequence
  Description of Artificial Sequence: Synthetic oligonucleotide
  Target: LAMA2; (-) strand; PAM type: NNGRRT; PAM sequence: TTGAGT
ctaactaagctacaaaacat

SEQ ID NO: 18710 - DNA, 20 bp, Artificial Sequence
  Description of Artificial Sequence: Synthetic oligonucleotide
  Target: LAMA2; (-) strand; PAM type: NNGRRT; PAM sequence: CAGAAT
agtaaactagaaacaaccat

SEQ ID NO: 18711 - DNA, 20 bp, Artificial Sequence
  Description of Artificial Sequence: Synthetic oligonucleotide
  Target: LAMA2; (-) strand; PAM type: NNGRRT; PAM sequence: AAGAGT
gaaagtctatccctagaact

SEQ ID NO: 18712 - DNA, 20 bp, Artificial Sequence
  Description of Artificial Sequence: Synthetic oligonucleotide
  Target: LAMA2; (-) strand; PAM type: NNGRRT; PAM sequence: TGGAGT
aaacaagtcggggtttccac

SEQ ID NO: 18713 - DNA, 20 bp, Artificial Sequence
  Description of Artificial Sequence: Synthetic oligonucleotide
  Target: LAMA2; (-) strand; PAM type: NNGRRT; PAM sequence: CGGGGT
aaagagtgtggtaaacaagt

SEQ ID NO: 18714 - DNA, 20 bp, Artificial Sequence
  Description of Artificial Sequence: Synthetic oligonucleotide
  Target: LAMA2; (-) strand; PAM type: NNGRRT; PAM sequence: AAGAGT
taagagtcagccaagaagga

SEQ ID NO: 18715 - DNA, 20 bp, Artificial Sequence
  Description of Artificial Sequence: Synthetic oligonucleotide
  Target: LAMA2; (-) strand; PAM type: NNGRRT; PAM sequence: AAGAGT
ggaagacaaactttggagtt

SEQ ID NO: 18716 - DNA, 20 bp, Artificial Sequence
  Description of Artificial Sequence: Synthetic oligonucleotide
  Target: LAMA2; (-) strand; PAM type: NNGRRT; PAM sequence: TGGAGT
agagttgggaagacaaactt

SEQ ID NO: 18717 - DNA, 20 bp, Artificial Sequence
  Description of Artificial Sequence: Synthetic oligonucleotide
  Target: LAMA2; (-) strand; PAM type: NNGRRT; PAM sequence: CAGAGT
aagatccttgggaagtctcc

SEQ ID NO: 18718 - DNA, 20 bp, Artificial Sequence
  Description of Artificial Sequence: Synthetic oligonucleotide
  Target: LAMA2; (-) strand; PAM type: NNGRRT; PAM sequence: TAGGAT
ttcagggctatgaagtcagc

SEQ ID NO: 18719 - DNA, 20 bp, Artificial Sequence
  Description of Artificial Sequence: Synthetic oligonucleotide
  Target: LAMA2; (-) strand; PAM type: NNGRRT; PAM sequence: TAGAAT
caggataagaagataaacat

SEQ ID NO: 18720 - DNA, 20 bp, Artificial Sequence
  Description of Artificial Sequence: Synthetic oligonucleotide
  Target: LAMA2; (-) strand; PAM type: NNGRRT; PAM sequence: CAGGAT
tagtgtgttcagcaatctca

SEQ ID NO: 18721 - DNA, 20 bp, Artificial Sequence
  Description of Artificial Sequence: Synthetic oligonucleotide
  Target: LAMA2; (-) strand; PAM type: NNGRRT; PAM sequence: TTGAAT
ttttattgatttgctgacag

SEQ ID NO: 18722 - DNA, 20 bp, Artificial Sequence
  Description of Artificial Sequence: Synthetic oligonucleotide
  Target: LAMA2; (-) strand; PAM type: NNGRRT; PAM sequence: CAGGGT
taagctagccattttcctct

SEQ ID NO: 18723 - DNA, 20 bp, Artificial Sequence
  Description of Artificial Sequence: Synthetic oligonucleotide
  Target: LAMA2; (-) strand; PAM type: NNGRRT; PAM sequence: CTGGAT
aaagacaacaaccataaaag

SEQ ID NO: 18724 - DNA, 20 bp, Artificial Sequence
  Description of Artificial Sequence: Synthetic oligonucleotide
  Target: LAMA2; (-) strand; PAM type: NNGRRT; PAM sequence: AAGAAT
ggggcatgaagcttcttact

SEQ ID NO: 18725 - DNA, 20 bp, Artificial Sequence
  Description of Artificial Sequence: Synthetic oligonucleotide
  Target: LAMA2; (-) strand; PAM type: NNGRRT; PAM sequence: TGGAAT
aattgtttacttgaaaaccc

SEQ ID NO: 18726 - DNA, 20 bp, Artificial Sequence
  Description of Artificial Sequence: Synthetic oligonucleotide
  Target: LAMA2; (-) strand; PAM type: NNGRRT; PAM sequence: CAGAAT
tgcgggtttctcattatacc

SEQ ID NO: 18727 - DNA, 20 bp, Artificial Sequence
  Description of Artificial Sequence: Synthetic oligonucleotide
  Target: LAMA2; (-) strand; PAM type: NNGRRT; PAM sequence: GCGGGT
acacctgcttaaataccact

SEQ ID NO: 18728 - DNA, 20 bp, Artificial Sequence
  Description of Artificial Sequence: Synthetic oligonucleotide
  Target: LAMA2; (-) strand; PAM type: NNGRRT; PAM sequence: CAGAAT
tataatcattctccatttag

SEQ ID NO: 18729 - DNA, 20 bp, Artificial Sequence
  Description of Artificial Sequence: Synthetic oligonucleotide
  Target: LAMA2; (-) strand; PAM type: NNGRRT; PAM sequence: TCGGGT
acatttgttccaccatcaat

SEQ ID NO: 18730 - DNA, 20 bp, Artificial Sequence
  Description of Artificial Sequence: Synthetic oligonucleotide
  Target: LAMA2; (-) strand; PAM type: NNGRRT; PAM sequence: AGGAGT
tttcttcaggccaaactcct

SEQ ID NO: 18731 - DNA, 20 bp, Artificial Sequence
  Description of Artificial Sequence: Synthetic oligonucleotide
  Target: LAMA2; (-) strand; PAM type: NNGRRT; PAM sequence: TCGAAT
gccaccatgcctggcaccac

SEQ ID NO: 18732 - DNA, 20 bp, Artificial Sequence
  Description of Artificial Sequence: Synthetic oligonucleotide
  Target: LAMA2; (-) strand; PAM type: NNGRRT; PAM sequence: AGGAGT
tcccaaagtgctgggcttac

SEQ ID NO: 18733 - DNA, 20 bp, Artificial Sequence
  Description of Artificial Sequence: Synthetic oligonucleotide
  Target: LAMA2; (-) strand; PAM type: NNGRRT; PAM sequence: TCGAAT
gcccgggctggttgctggtc

SEQ ID NO: 18734 - DNA, 20 bp, Artificial Sequence
  Description of Artificial Sequence: Synthetic oligonucleotide
  Target: LAMA2; (-) strand; PAM type: NNGRRT; PAM sequence: AGGGGT
ttgcttttttttgtagagat

SEQ ID NO: 18735 - DNA, 20 bp, Artificial Sequence
  Description of Artificial Sequence: Synthetic oligonucleotide
  Target: LAMA2; (-) strand; PAM type: NNGRRT; PAM sequence: CTGAGT
gattctcctgcctcaacctc

SEQ ID NO: 18736 - DNA, 20 bp, Artificial Sequence
  Description of Artificial Sequence: Synthetic oligonucleotide
  Target: LAMA2; (-) strand; PAM type: NNGRRT; PAM sequence: ATGAAT
ccaggctggagtgcagagac

SEQ ID NO: 18737 - DNA, 20 bp, Artificial Sequence
  Description of Artificial Sequence: Synthetic oligonucleotide
  Target: LAMA2; (-) strand; PAM type: NNGRRT; PAM sequence: TGGAGT
tcttgctctgtctcccaggc

SEQ ID NO: 18738 - DNA, 20 bp, Artificial Sequence
  Description of Artificial Sequence: Synthetic oligonucleotide
  Target: LAMA2; (-) strand; PAM type: NNGRRT; PAM sequence: TTGAAT
tgtccctttaatatttccac

SEQ ID NO: 18739 - DNA, 20 bp, Artificial Sequence
  Description of Artificial Sequence: Synthetic oligonucleotide
  Target: LAMA2; (-) strand; PAM type: NNGRRT; PAM sequence: TAGGAT
acctttaaatttgaagtgcc

SEQ ID NO: 18740 - DNA, 20 bp, Artificial Sequence
  Description of Artificial Sequence: Synthetic oligonucleotide
  Target: LAMA2; (-) strand; PAM type: NNGRRT; PAM sequence: CTGAGT
tgtttaggtatttccaagac

SEQ ID NO: 18741 - DNA, 20 bp, Artificial Sequence
  Description of Artificial Sequence: Synthetic oligonucleotide
  Target: LAMA2; (-) strand; PAM type: NNGRRT; PAM sequence: TAGGGT
tgaacaccagtaggtattgc

SEQ ID NO: 18742 - DNA, 20 bp, Artificial Sequence
  Description of Artificial Sequence: Synthetic oligonucleotide
  Target: LAMA2; (-) strand; PAM type: NNGRRT; PAM sequence: GGGAAT
aaaatgaagtgttttgacaa

SEQ ID NO: 18743 - DNA, 20 bp, Artificial Sequence
  Description of Artificial Sequence: Synthetic oligonucleotide
  Target: LAMA2; (-) strand; PAM type: NNGRRT; PAM sequence: GTGAAT
ttcaatttaaatattattac

SEQ ID NO: 18744 - DNA, 20 bp, Artificial Sequence
  Description of Artificial Sequence: Synthetic oligonucleotide
  Target: LAMA2; (-) strand; PAM type: NNGRRT; PAM sequence: AAGGAT
ttattgaggagggtagaggt

SEQ ID NO: 18745 - DNA, 20 bp, Artificial Sequence
  Description of Artificial Sequence: Synthetic oligonucleotide
  Target: LAMA2; (-) strand; PAM type: NNGRRT; PAM sequence: GAGGGT
tttgagatgaatttattgag

SEQ ID NO: 18746 - DNA, 20 bp, Artificial Sequence
  Description of Artificial Sequence: Synthetic oligonucleotide
  Target: LAMA2; (-) strand; PAM type: NNGRRT; PAM sequence: ATGAAT
ggaaaatcttatcatttgag

SEQ ID NO: 18747 - DNA, 20 bp, Artificial Sequence
  Description of Artificial Sequence: Synthetic oligonucleotide
  Target: LAMA2; (-) strand; PAM type: NNGRRT; PAM sequence: ATGGAT
ataaattattcttcacaatg

SEQ ID NO: 18748 - DNA, 20 bp, Artificial Sequence
  Description of Artificial Sequence: Synthetic oligonucleotide
  Target: LAMA2; (-) strand; PAM type: NNGRRT; PAM sequence: CAGAAT
tataaacattcccatatttc

SEQ ID NO: 18749 - DNA, 20 bp, Artificial Sequence
  Description of Artificial Sequence: Synthetic oligonucleotide
  Target: LAMA2; (-) strand; PAM type: NNGRRT; PAM sequence: TTGAGT
ttgtcactagtttaattttc

SEQ ID NO: 18750 - DNA, 20 bp, Artificial Sequence
  Description of Artificial Sequence: Synthetic oligonucleotide
  Target: LAMA2; (-) strand; PAM type: NNGRRT; PAM sequence: ATGAAT
ataaattttgccattaattt

SEQ ID NO: 18751 - DNA, 20 bp, Artificial Sequence
  Description of Artificial Sequence: Synthetic oligonucleotide
  Target: LAMA2; (-) strand; PAM type: NNGRRT; PAM sequence: CAGAAT
tggagatctgttaattgtat

SEQ ID NO: 18752 - DNA, 20 bp, Artificial Sequence
  Description of Artificial Sequence: Synthetic oligonucleotide
  Target: LAMA2; (-) strand; PAM type: NNGRRT; PAM sequence: TAGGGT
ataaggtgctatacagcaca

SEQ ID NO: 18753 - DNA, 20 bp, Artificial Sequence
  Description of Artificial Sequence: Synthetic oligonucleotide
  Target: LAMA2; (-) strand; PAM type: NNGRRT; PAM sequence: AAGAAT
aagtaggagctatttcagtg

SEQ ID NO: 18754 - DNA, 20 bp, Artificial Sequence
  Description of Artificial Sequence: Synthetic oligonucleotide
  Target: LAMA2; (-) strand; PAM type: NNGRRT; PAM sequence: AAGAAT
agaacaacagcttccagaaa

SEQ ID NO: 18755 - DNA, 20 bp, Artificial Sequence
  Description of Artificial Sequence: Synthetic oligonucleotide
  Target: LAMA2; (-) strand; PAM type: NNGRRT; PAM sequence: GTGGAT
ttgtcagcctgtgcaatgat

SEQ ID NO: 18756 - DNA, 20 bp, Artificial Sequence
  Description of Artificial Sequence: Synthetic oligonucleotide
  Target: LAMA2; (-) strand; PAM type: NNGRRT; PAM sequence: CAGAGT
cccatcattatactatccta

SEQ ID NO: 18757 - DNA, 20 bp, Artificial Sequence
  Description of Artificial Sequence: Synthetic oligonucleotide
  Target: LAMA2; (-) strand; PAM type: NNGRRT; PAM sequence: GCGGGT
ctcttggccttgcacgtcct

SEQ ID NO: 18758 - DNA, 20 bp, Artificial Sequence
  Description of Artificial Sequence: Synthetic oligonucleotide
  Target: LAMA2; (-) strand; PAM type: NNGRRT; PAM sequence: TAGAGT
ctattatcactatcccccag

SEQ ID NO: 18759 - DNA, 20 bp, Artificial Sequence
  Description of Artificial Sequence: Synthetic oligonucleotide
  Target: LAMA2; (-) strand; PAM type: NNGRRT; PAM sequence: TTGAAT
agccgaggcaggagaatcgc

SEQ ID NO: 18760 - DNA, 20 bp, Artificial Sequence
  Description of Artificial Sequence: Synthetic oligonucleotide
  Target: LAMA2; (-) strand; PAM type: NNGRRT; PAM sequence: GAGAAT
tactcaggaagccgaggcag

SEQ ID NO: 18761 - DNA, 20 bp, Artificial Sequence
  Description of Artificial Sequence: Synthetic oligonucleotide
  Target: LAMA2; (-) strand; PAM type: NNGRRT; PAM sequence: CGGGGT
actaaaaacacaaaaattag

SEQ ID NO: 18762 - DNA, 20 bp, Artificial Sequence
  Description of Artificial Sequence: Synthetic oligonucleotide
  Target: LAMA2; (-) strand; PAM type: NNGRRT; PAM sequence: AGGAGT
tgggcagaccacttaaggtc

SEQ ID NO: 18763 - DNA, 20 bp, Artificial Sequence
  Description of Artificial Sequence: Synthetic oligonucleotide
  Target: LAMA2; (-) strand; PAM type: NNGRRT; PAM sequence: GAGAAT
ttaatattttattttttagg

SEQ ID NO: 18764 - DNA, 20 bp, Artificial Sequence
  Description of Artificial Sequence: Synthetic oligonucleotide
  Target: LAMA2; (-) strand; PAM type: NNGRRT; PAM sequence: TAGAGT
caaagagtcagtagggtaca

SEQ ID NO: 18765 - DNA, 20 bp, Artificial Sequence
  Description of Artificial Sequence: Synthetic oligonucleotide
  Target: LAMA2; (-) strand; PAM type: NNGRRT; PAM sequence: TAGGGT
aatctttgacaaagagtcag

SEQ ID NO: 18766 - DNA, 20 bp, Artificial Sequence
  Description of Artificial Sequence: Synthetic oligonucleotide
  Target: LAMA2; (-) strand; PAM type: NNGRRT; PAM sequence: AAGAGT
aaaatagataatctttgaca

SEQ ID NO: 18767 - DNA, 20 bp, Artificial Sequence
  Description of Artificial Sequence: Synthetic oligonucleotide
  Target: LAMA2; (-) strand; PAM type: NNGRRT; PAM sequence: ATGAGT
tccaaagtgttaaacattgc

SEQ ID NO: 18768 - DNA, 20 bp, Artificial Sequence
  Description of Artificial Sequence: Synthetic oligonucleotide
  Target: LAMA2; (-) strand; PAM type: NNGRRT; PAM sequence: CTGAAT
agatgaaaagcattgtagag

SEQ ID NO: 18769 - DNA, 20 bp, Artificial Sequence
  Description of Artificial Sequence: Synthetic oligonucleotide
  Target: LAMA2; (-) strand; PAM type: NNGRRT; PAM sequence: ATGGGT
gaatggggagttattattta

SEQ ID NO: 18770 - DNA, 20 bp, Artificial Sequence
  Description of Artificial Sequence: Synthetic oligonucleotide
  Target: LAMA2; (-) strand; PAM type: NNGRRT; PAM sequence: GGGAGT
ggactgggggagagagaatg

SEQ ID NO: 18771 - DNA, 20 bp, Artificial Sequence
  Description of Artificial Sequence: Synthetic oligonucleotide
  Target: LAMA2; (-) strand; PAM type: NNGRRT; PAM sequence: GAGAAT
ttgccagggactgggggaga

SEQ ID NO: 18772 - DNA, 20 bp, Artificial Sequence
  Description of Artificial Sequence: Synthetic oligonucleotide
  Target: LAMA2; (-) strand; PAM type: NNGRRT; PAM sequence: TAGAAT
aaatttatagagacagaagg

SEQ ID NO: 18773 - DNA, 20 bp, Artificial Sequence
  Description of Artificial Sequence: Synthetic oligonucleotide
  Target: LAMA2; (-) strand; PAM type: NNGRRT; PAM sequence: CAGAAT
ttccacttatatgacgtgcc

SEQ ID NO: 18774 - DNA, 20 bp, Artificial Sequence
  Description of Artificial Sequence: Synthetic oligonucleotide
  Target: LAMA2; (-) strand; PAM type: NNGRRT; PAM sequence: TTGAAT
agaatctcgaagacactatg

SEQ ID NO: 18775 - DNA, 20 bp, Artificial Sequence
  Description of Artificial Sequence: Synthetic oligonucleotide
  Target: LAMA2; (-) strand; PAM type: NNGRRT; PAM sequence: AAGAAT
tgatatatgctacaacgtgg

SEQ ID NO: 18776 - DNA, 20 bp, Artificial Sequence
  Description of Artificial Sequence: Synthetic oligonucleotide
  Target: LAMA2; (-) strand; PAM type: NNGRRT; PAM sequence: TGGAAT
gtctacttatacatagacat

SEQ ID NO: 18777 - DNA, 20 bp, Artificial Sequence
  Description of Artificial Sequence: Synthetic oligonucleotide
  Target: LAMA2; (-) strand; PAM type: NNGRRT; PAM sequence: GTGAGT
tgccatatatgtacgtgtgt

SEQ ID NO: 18778 - DNA, 20 bp, Artificial Sequence
  Description of Artificial Sequence: Synthetic oligonucleotide
  Target: LAMA2; (-) strand; PAM type: NNGRRT; PAM sequence: ATGGAT
gaattaacctgtgttcatca

SEQ ID NO: 18779 - DNA, 20 bp, Artificial Sequence
  Description of Artificial Sequence: Synthetic oligonucleotide
  Target: LAMA2; (-) strand; PAM type: NNGRRT; PAM sequence: TGGAAT
taagaacaatagccagaagg

SEQ ID NO: 18780 - DNA, 20 bp, Artificial Sequence
  Description of Artificial Sequence: Synthetic oligonucleotide
  Target: LAMA2; (-) strand; PAM type: NNGRRT; PAM sequence: ATGAGT
ttttcagacttcagtttacc

SEQ ID NO: 18781 - DNA, 20 bp, Artificial Sequence
  Description of Artificial Sequence: Synthetic oligonucleotide
  Target: LAMA2; (-) strand; PAM type: NNGRRT; PAM sequence: GTGAAT
tataatataataaaagttat

SEQ ID NO: 18782 - DNA, 20 bp, Artificial Sequence
  Description of Artificial Sequence: Synthetic oligonucleotide
  Target: LAMA2; (-) strand; PAM type: NNGRRT; PAM sequence: GGGGAT
gtagtccctccttatcctca

SEQ ID NO: 18783 - DNA, 20 bp, Artificial Sequence
  Description of Artificial Sequence: Synthetic oligonucleotide
  Target: LAMA2; (-) strand; PAM type: NNGRRT; PAM sequence: TAGAAT
gttcctcaaagaattaacag

SEQ ID NO: 18784 - DNA, 20 bp, Artificial Sequence
  Description of Artificial Sequence: Synthetic oligonucleotide
  Target: LAMA2; (-) strand; PAM type: NNGRRT; PAM sequence: AAGAAT
aacaatatagtggttcctca

SEQ ID NO: 18785 - DNA, 20 bp, Artificial Sequence
  Description of Artificial Sequence: Synthetic oligonucleotide
  Target: LAMA2; (-) strand; PAM type: NNGRRT; PAM sequence: GGGAAT
aatccttgtgtatggccgat

SEQ ID NO: 18786 - DNA, 20 bp, Artificial Sequence
  Description of Artificial Sequence: Synthetic oligonucleotide
  Target: LAMA2; (-) strand; PAM type: NNGRRT; PAM sequence: TAGAAT
tggcaagggtgtggagaaat

SEQ ID NO: 18787 - DNA, 20 bp, Artificial Sequence
  Description of Artificial Sequence: Synthetic oligonucleotide
  Target: LAMA2; (-) strand; PAM type: NNGRRT; PAM sequence: AAGGGT
acagaaaaagaagtgttggc

SEQ ID NO: 18788 - DNA, 20 bp, Artificial Sequence
  Description of Artificial Sequence: Synthetic oligonucleotide
  Target: LAMA2; (-) strand; PAM type: NNGRRT; PAM sequence: CAGGAT
acaagctaagcaaaattgtc

SEQ ID NO: 18789 - DNA, 20 bp, Artificial Sequence
  Description of Artificial Sequence: Synthetic oligonucleotide
  Target: LAMA2; (-) strand; PAM type: NNGRRT; PAM sequence: AAGGAT
acaatatagccaaatttaga

SEQ ID NO: 18790 - DNA, 20 bp, Artificial Sequence
  Description of Artificial Sequence: Synthetic oligonucleotide
  Target: LAMA2; (-) strand; PAM type: NNGRRT; PAM sequence: TTGAGT
catttactaactgactcttt

SEQ ID NO: 18791 - DNA, 20 bp, Artificial Sequence
  Description of Artificial Sequence: Synthetic oligonucleotide
  Target: LAMA2; (-) strand; PAM type: NNGRRT; PAM sequence: AAGAGT
ataatttatacaaataataa

SEQ ID NO: 18792 - DNA, 20 bp, Artificial Sequence
  Description of Artificial Sequence: Synthetic oligonucleotide
  Target: LAMA2; (-) strand; PAM type: NNGRRT; PAM sequence: CAGGAT
gtccagtgtctaggacaaaa

SEQ ID NO: 18793 - DNA, 20 bp, Artificial Sequence
  Description of Artificial Sequence: Synthetic oligonucleotide
  Target: LAMA2; (-) strand; PAM type: NNGRRT; PAM sequence: CGGAGT
ttataatagtatctttctta

SEQ ID NO: 18794 - DNA, 20 bp, Artificial Sequence
  Description of Artificial Sequence: Synthetic oligonucleotide
  Target: LAMA2; (-) strand; PAM type: NNGRRT; PAM sequence: CTGGAT
ggctttgacatcagaaagaa

SEQ ID NO: 18795 - DNA, 20 bp, Artificial Sequence
  Description of Artificial Sequence: Synthetic oligonucleotide
  Target: LAMA2; (-) strand; PAM type: NNGRRT; PAM sequence: TGGAGT
actctaaggttcaggtcatc

SEQ ID NO: 18796 - DNA, 20 bp, Artificial Sequence
  Description of Artificial Sequence: Synthetic oligonucleotide
  Target: LAMA2; (-) strand; PAM type: NNGRRT; PAM sequence: TAGAGT
aaatcctaagtttcactttt

SEQ ID NO: 18797 - DNA, 20 bp, Artificial Sequence
  Description of Artificial Sequence: Synthetic oligonucleotide
  Target: LAMA2; (-) strand; PAM type: NNGRRT; PAM sequence: TGGGGT
atcctttgcccactttttga

SEQ ID NO: 18798 - DNA, 20 bp, Artificial Sequence
  Description of Artificial Sequence: Synthetic oligonucleotide
  Target: LAMA2; (-) strand; PAM type: NNGRRT; PAM sequence: TGGGAT
gatcgccattctaactggtg

SEQ ID NO: 18799 - DNA, 20 bp, Artificial Sequence
  Description of Artificial Sequence: Synthetic oligonucleotide
  Target: LAMA2; (-) strand; PAM type: NNGRRT; PAM sequence: AGGAAT
tttctagttctagatccttg

SEQ ID NO: 18800 - DNA, 20 bp, Artificial Sequence
  Description of Artificial Sequence: Synthetic oligonucleotide
  Target: LAMA2; (-) strand; PAM type: NNGRRT; PAM sequence: CTGGGT
tatacccagtaatgggatgg

SEQ ID NO: 18801 - DNA, 20 bp, Artificial Sequence
  Description of Artificial Sequence: Synthetic oligonucleotide
  Target: LAMA2; (-) strand; PAM type: NNGRRT; PAM sequence: TGGGAT
tttgggtatatacccagtaa

SEQ ID NO: 18802 - DNA, 20 bp, Artificial Sequence
  Description of Artificial Sequence: Synthetic oligonucleotide
  Target: LAMA2; (-) strand; PAM type: NNGRRT; PAM sequence: TTGGGT
gcagcatgatttataatcct

SEQ ID NO: 18803 - DNA, 20 bp, Artificial Sequence
  Description of Artificial Sequence: Synthetic oligonucleotide
  Target: LAMA2; (-) strand; PAM type: NNGRRT; PAM sequence: GTGAAT
ggttccaagtctttgctatt

SEQ ID NO: 18804 - DNA, 20 bp, Artificial Sequence
  Description of Artificial Sequence: Synthetic oligonucleotide
  Target: LAMA2; (-) strand; PAM type: NNGRRT; PAM sequence: TTGGGT
agtctatcattgatggacat

SEQ ID NO: 18805 - DNA, 20 bp, Artificial Sequence
  Description of Artificial Sequence: Synthetic oligonucleotide
  Target: LAMA2; (-) strand; PAM type: NNGRRT; PAM sequence: GAGAAT
tgtccttgctatagtttgct

SEQ ID NO: 18806 - DNA, 20 bp, Artificial Sequence
  Description of Artificial Sequence: Synthetic oligonucleotide
  Target: LAMA2; (-) strand; PAM type: NNGRRT; PAM sequence: ATGAGT
tcattgttcgtttcccacct

SEQ ID NO: 18807 - DNA, 20 bp, Artificial Sequence
  Description of Artificial Sequence: Synthetic oligonucleotide
  Target: LAMA2; (-) strand; PAM type: NNGRRT; PAM sequence: TAGGAT
tattattatgctttaagtta

SEQ ID NO: 18808 - DNA, 20 bp, Artificial Sequence
  Description of Artificial Sequence: Synthetic oligonucleotide
  Target: LAMA2; (-) strand; PAM type: NNGRRT; PAM sequence: ATGAAT
aagattacttaaattgacca

SEQ ID NO: 18809 - DNA, 20 bp, Artificial Sequence
  Description of Artificial Sequence: Synthetic oligonucleotide
  Target: LAMA2; (-) strand; PAM type: NNGRRT; PAM sequence: CTGAAT
cgatcaaggacctacaattt

SEQ ID NO: 18810 - DNA, 20 bp, Artificial Sequence
  Description of Artificial Sequence: Synthetic oligonucleotide
  Target: LAMA2; (-) strand; PAM type: NNGRRT; PAM sequence: AAGAAT
tgcaattgaaattacccaaa

SEQ ID NO: 18811 - DNA, 20 bp, Artificial Sequence
  Description of Artificial Sequence: Synthetic oligonucleotide
  Target: LAMA2; (-) strand; PAM type: NNGRRT; PAM sequence: ATGAAT
gttcttccttaggaaaatca

SEQ ID NO: 18812 - DNA, 20 bp, Artificial Sequence
  Description of Artificial Sequence: Synthetic oligonucleotide
  Target: LAMA2; (-) strand; PAM type: NNGRRT; PAM sequence: GTGAAT
cattcaagcaggtattcctt

SEQ ID NO: 18813 - DNA, 20 bp, Artificial Sequence
  Description of Artificial Sequence: Synthetic oligonucleotide
  Target: LAMA2; (-) strand; PAM type: NNGRRT; PAM sequence: TTGAAT
cttctataaaatttggagta

SEQ ID NO: 18814 - DNA, 20 bp, Artificial Sequence
  Description of Artificial Sequence: Synthetic oligonucleotide
  Target: LAMA2; (-) strand; PAM type: NNGRRT; PAM sequence: TGGAGT
aatgcttcttctataaaatt

SEQ ID NO: 18815 - DNA, 20 bp, Artificial Sequence
  Description of Artificial Sequence: Synthetic oligonucleotide
  Target: LAMA2; (-) strand; PAM type: NNGRRT; PAM sequence: AGGAAT
aaagttctcaatatgttttt

SEQ ID NO: 18816 - DNA, 20 bp, Artificial Sequence
  Description of Artificial Sequence: Synthetic oligonucleotide
  Target: LAMA2; (-) strand; PAM type: NNGRRT; PAM sequence: TAGGAT
tatatagtcctacatttaaa

SEQ ID NO: 18817 - DNA, 20 bp, Artificial Sequence
  Description of Artificial Sequence: Synthetic oligonucleotide
  Target: LAMA2; (-) strand; PAM type: NNGRRT; PAM sequence: AAGGAT
aaagtaataaaattacgaaa

SEQ ID NO: 18818 - DNA, 20 bp, Artificial Sequence
  Description of Artificial Sequence: Synthetic oligonucleotide
  Target: LAMA2; (-) strand; PAM type: NNGRRT; PAM sequence: GAGAAT
atattattgcagtggagtga

SEQ ID NO: 18819 - DNA, 20 bp, Artificial Sequence
  Description of Artificial Sequence: Synthetic oligonucleotide
  Target: LAMA2; (-) strand; PAM type: NNGRRT; PAM sequence: TGGAGT
catctgtaatattattgcag

SEQ ID NO: 18820 - DNA, 20 bp, Artificial Sequence
  Description of Artificial Sequence: Synthetic oligonucleotide
  Target: LAMA2; (-) strand; PAM type: NNGRRT; PAM sequence: GGGAAT
atttatactattcttaatca

SEQ ID NO: 18821 - DNA, 20 bp, Artificial Sequence
  Description of Artificial Sequence: Synthetic oligonucleotide
  Target: LAMA2; (-) strand; PAM type: NNGRRT; PAM sequence: TTGGAT
aaaaaatttcatttgagggg

SEQ ID NO: 18822 - DNA, 20 bp, Artificial Sequence
  Description of Artificial Sequence: Synthetic oligonucleotide
  Target: LAMA2; (-) strand; PAM type: NNGRRT; PAM sequence: AGGGGT
tcaccaaaaaatttcatttg

SEQ ID NO: 18823 - DNA, 20 bp, Artificial Sequence
  Description of Artificial Sequence: Synthetic oligonucleotide
  Target: LAMA2; (-) strand; PAM type: NNGRRT; PAM sequence: TTGGAT
ttattggatgtttaaaacgt

SEQ ID NO: 18824 - DNA, 20 bp, Artificial Sequence
  Description of Artificial Sequence: Synthetic oligonucleotide
  Target: LAMA2; (-) strand; PAM type: NNGRRT; PAM sequence: TTGGAT
actagcatgttatatcttta

SEQ ID NO: 18825 - DNA, 20 bp, Artificial Sequence
  Description of Artificial Sequence: Synthetic oligonucleotide
  Target: LAMA2; (-) strand; PAM type: NNGRRT; PAM sequence: ATGGGT
aaacgtttggaaacctggaa

SEQ ID NO: 18826 - DNA, 20 bp, Artificial Sequence
  Description of Artificial Sequence: Synthetic oligonucleotide
  Target: LAMA2; (-) strand; PAM type: NNGRRT; PAM sequence: CAGAAT
ctttatgtgcattctcaaaa

SEQ ID NO: 18827 - DNA, 20 bp, Artificial Sequence
  Description of Artificial Sequence: Synthetic oligonucleotide
  Target: LAMA2; (-) strand; PAM type: NNGRRT; PAM sequence: CAGAAT
agtctcattttgttacagtt

SEQ ID NO: 18828 - DNA, 20 bp, Artificial Sequence
  Description of Artificial Sequence: Synthetic oligonucleotide
  Target: LAMA2; (-) strand; PAM type: NNGRRT; PAM sequence: TAGAGT
aaaaaggactgtgaataaat

SEQ ID NO: 18829 - DNA, 20 bp, Artificial Sequence
  Description of Artificial Sequence: Synthetic oligonucleotide
  Target: LAMA2; (-) strand; PAM type: NNGRRT; PAM sequence: GTGAAT
agacaaatttaaaaaggact

SEQ ID NO: 18830 - DNA, 20 bp, Artificial Sequence
  Description of Artificial Sequence: Synthetic oligonucleotide
  Target: LAMA2; (-) strand; PAM type: NNGRRT; PAM sequence: GAGAAT
gaagttttaataaaaatcaa

SEQ ID NO: 18831 - DNA, 20 bp, Artificial Sequence
  Description of Artificial Sequence: Synthetic oligonucleotide
  Target: LAMA2; (-) strand; PAM type: NNGRRT; PAM sequence: TGGAAT
atgtagttcacgaataaagt

SEQ ID NO: 18832 - DNA, 20 bp, Artificial Sequence
  Description of Artificial Sequence: Synthetic oligonucleotide
  Target: LAMA2; (-) strand; PAM type: NNGRRT; PAM sequence: ACGAAT
tttatataagcatgtagttc

SEQ ID NO: 18833 - DNA, 20 bp, Artificial Sequence
  Description of Artificial Sequence: Synthetic oligonucleotide
  Target: LAMA2; (-) strand; PAM type: NNGRRT; PAM sequence: AAGAAT
atggaaaaaccaaatgtttc

SEQ ID NO: 18834 - DNA, 20 bp, Artificial Sequence
  Description of Artificial Sequence: Synthetic oligonucleotide
  Target: LAMA2; (-) strand; PAM type: NNGRRT; PAM sequence: CAGAAT
tttttataagataaaaaaat

SEQ ID NO: 18835 - DNA, 20 bp, Artificial Sequence
  Description of Artificial Sequence: Synthetic oligonucleotide
  Target: LAMA2; (-) strand; PAM type: NNGRRT; PAM sequence: GGGGAT
caaatactacacagttacat

SEQ ID NO: 18836 - DNA, 20 bp, Artificial Sequence
  Description of Artificial Sequence: Synthetic oligonucleotide
  Target: LAMA2; (-) strand; PAM type: NNGRRT; PAM sequence: GGGAGT
tatgttaccctggcatttca

SEQ ID NO: 18837 - DNA, 20 bp, Artificial Sequence
  Description of Artificial Sequence: Synthetic oligonucleotide
  Target: LAMA2; (-) strand; PAM type: NNGRRT; PAM sequence: ATGAAT
tgtttgtttttattattgca

SEQ ID NO: 18838 - DNA, 20 bp, Artificial Sequence
  Description of Artificial Sequence: Synthetic oligonucleotide
  Target: LAMA2; (-) strand; PAM type: NNGRRT; PAM sequence: TTGGGT
gagttggaggtaaagtcagc

SEQ ID NO: 18839 - DNA, 20 bp, Artificial Sequence
  Description of Artificial Sequence: Synthetic oligonucleotide
  Target: LAMA2; (-) strand; PAM type: NNGRRT; PAM sequence: TTGAGT
agattagtggacaaaaatct

SEQ ID NO: 18840 - DNA, 20 bp, Artificial Sequence
  Description of Artificial Sequence: Synthetic oligonucleotide
  Target: LAMA2; (-) strand; PAM type: NNGRRT; PAM sequence: ACGAGT
aatcttgaaaaggaaagaac

SEQ ID NO: 18841 - DNA, 20 bp, Artificial Sequence
  Description of Artificial Sequence: Synthetic oligonucleotide
  Target: LAMA2; (-) strand; PAM type: NNGRRT; PAM sequence: TTGGAT
acctattccaggttgatacg

SEQ ID NO: 18842 - DNA, 20 bp, Artificial Sequence
  Description of Artificial Sequence: Synthetic oligonucleotide
  Target: LAMA2; (-) strand; PAM type: NNGRRT; PAM sequence: GAGGAT
tacttccttcataaagttgt

SEQ ID NO: 18843 - DNA, 20 bp, Artificial Sequence
  Description of Artificial Sequence: Synthetic oligonucleotide
  Target: LAMA2; (-) strand; PAM type: NNGRRT; PAM sequence: TAGAGT
ctttaacttaggtgttaata

SEQ ID NO: 18844 - DNA, 20 bp, Artificial Sequence
  Description of Artificial Sequence: Synthetic oligonucleotide
  Target: LAMA2; (-) strand; PAM type: NNGRRT; PAM sequence: CAGAGT
catatatattttaaagacca

SEQ ID NO: 18845 - DNA, 20 bp, Artificial Sequence
  Description of Artificial Sequence: Synthetic oligonucleotide
  Target: LAMA2; (-) strand; PAM type: NNGRRT; PAM sequence: AAGAGT
gaggtgactcttcaattaag

SEQ ID NO: 18846 - DNA, 20 bp, Artificial Sequence
  Description of Artificial Sequence: Synthetic oligonucleotide
  Target: LAMA2; (-) strand; PAM type: NNGRRT; PAM sequence: GGGGAT
tgaaaagagaacattcaaat

SEQ ID NO: 18847 - DNA, 20 bp, Artificial Sequence
  Description of Artificial Sequence: Synthetic oligonucleotide
  Target: LAMA2; (-) strand; PAM type: NNGRRT; PAM sequence: CAGAAT
tgaaattatttaaagatgaa

SEQ ID NO: 18848 - DNA, 20 bp, Artificial Sequence
  Description of Artificial Sequence: Synthetic oligonucleotide
  Target: LAMA2; (-) strand; PAM type: NNGRRT; PAM sequence: TTGAAT
agccaaaagaaggtcatgat

SEQ ID NO: 18849 - DNA, 20 bp, Artificial Sequence
  Description of Artificial Sequence: Synthetic oligonucleotide
  Target: LAMA2; (-) strand; PAM type: NNGRRT; PAM sequence: TAGAAT
taggtcagaaacttcaaaat

SEQ ID NO: 18850 - DNA, 20 bp, Artificial Sequence
  Description of Artificial Sequence: Synthetic oligonucleotide
  Target: LAMA2; (-) strand; PAM type: NNGRRT; PAM sequence: AAGAAT
tttatgcctgcagtgagtct

SEQ ID NO: 18851 - DNA, 20 bp, Artificial Sequence
  Description of Artificial Sequence: Synthetic oligonucleotide
  Target: LAMA2; (-) strand; PAM type: NNGRRT; PAM sequence: GTGAGT
tcccagggtttatgcctgca

SEQ ID NO: 18852 - DNA, 20 bp, Artificial Sequence
  Description of Artificial Sequence: Synthetic oligonucleotide
  Target: LAMA2; (-) strand; PAM type: NNGRRT; PAM sequence: CAGGGT
ggcttaacttttccttatcc

SEQ ID NO: 18853 - DNA, 20 bp, Artificial Sequence
  Description of Artificial Sequence: Synthetic oligonucleotide
  Target: LAMA2; (-) strand; PAM type: NNGRRT; PAM sequence: AAGAAT
aaagccttattagaggtatg

SEQ ID NO: 18854 - DNA, 20 bp, Artificial Sequence
  Description of Artificial Sequence: Synthetic oligonucleotide
  Target: LAMA2; (-) strand; PAM type: NNGRRT; PAM sequence: GTGGAT
tctgttaaacctaaacataa

SEQ ID NO: 18855 - DNA, 20 bp, Artificial Sequence
  Description of Artificial Sequence: Synthetic oligonucleotide
  Target: LAMA2; (-) strand; PAM type: NNGRRT; PAM sequence: CTGGAT
gtccatgtgaatggcaaaga

SEQ ID NO: 18856 - DNA, 20 bp, Artificial Sequence
  Description of Artificial Sequence: Synthetic oligonucleotide
  Target: LAMA2; (-) strand; PAM type: NNGRRT; PAM sequence: GTGAAT
acactataaactgagtccat

SEQ ID NO: 18857 - DNA, 20 bp, Artificial Sequence
  Description of Artificial Sequence: Synthetic oligonucleotide
  Target: LAMA2; (-) strand; PAM type: NNGRRT; PAM sequence: CTGAGT
gcataaccagacactataaa

SEQ ID NO: 18858 - DNA, 20 bp, Artificial Sequence
  Description of Artificial Sequence: Synthetic oligonucleotide
  Target: LAMA2; (-) strand; PAM type: NNGRRT; PAM sequence: CTGAGT
gtgatacccaagggataaaa

SEQ ID NO: 18859 - DNA, 20 bp, Artificial Sequence
  Description of Artificial Sequence: Synthetic oligonucleotide
  Target: LAMA2; (-) strand; PAM type: NNGRRT; PAM sequence: AGGGAT
ttcctcatttgtgataccca

SEQ ID NO: 18860 - DNA, 20 bp, Artificial Sequence
  Description of Artificial Sequence: Synthetic oligonucleotide
  Target: LAMA2; (-) strand; PAM type: NNGRRT; PAM sequence: TGGAAT
gaagtagtatttcaccaata

SEQ ID NO: 18861 - DNA, 20 bp, Artificial Sequence
  Description of Artificial Sequence: Synthetic oligonucleotide
  Target: LAMA2; (-) strand; PAM type: NNGRRT; PAM sequence: ATGAAT
ttatagttgtccccaaaagg

SEQ ID NO: 18862 - DNA, 20 bp, Artificial Sequence
  Description of Artificial Sequence: Synthetic oligonucleotide
  Target: LAMA2; (-) strand; PAM type: NNGRRT; PAM sequence: AAGGAT
atggttatagttgtccccaa

SEQ ID NO: 18863 - DNA, 20 bp, Artificial Sequence
  Description of Artificial Sequence: Synthetic oligonucleotide
  Target: LAMA2; (-) strand; PAM type: NNGRRT; PAM sequence: ATGAGT
tttttccaattcaacaggtt

SEQ ID NO: 18864 - DNA, 20 bp, Artificial Sequence
  Description of Artificial Sequence: Synthetic oligonucleotide
  Target: LAMA2; (-) strand; PAM type: NNGRRT; PAM sequence: AAGAAT
tacaggaggcaaaaaaggag

SEQ ID NO: 18865 - DNA, 20 bp, Artificial Sequence
  Description of Artificial Sequence: Synthetic oligonucleotide
  Target: LAMA2; (-) strand; PAM type: NNGRRT; PAM sequence: CAGAGT
attggcctaattggttccaa

SEQ ID NO: 18866 - DNA, 20 bp, Artificial Sequence
  Description of Artificial Sequence: Synthetic oligonucleotide
  Target: LAMA2; (-) strand; PAM type: NNGRRT; PAM sequence: CTGGAT
gatttatgaagtgctgagag

SEQ ID NO: 18867 - DNA, 20 bp, Artificial Sequence
  Description of Artificial Sequence: Synthetic oligonucleotide
  Target: LAMA2; (-) strand; PAM type: NNGRRT; PAM sequence: CTGAAT
tgtattttctcccaattttt

SEQ ID NO: 18868 - DNA, 20 bp, Artificial Sequence
  Description of Artificial Sequence: Synthetic oligonucleotide
  Target: LAMA2; (-) strand; PAM type: NNGRRT; PAM sequence: TGGAAT
atacagacattttctcaaga

SEQ ID NO: 18869 - DNA, 20 bp, Artificial Sequence
  Description of Artificial Sequence: Synthetic oligonucleotide
  Target: LAMA2; (-) strand; PAM type: NNGRRT; PAM sequence: TTGGAT
gctgcaagcctgatgtcatt

SEQ ID NO: 18870 - DNA, 20 bp, Artificial Sequence
  Description of Artificial Sequence: Synthetic oligonucleotide
  Target: LAMA2; (-) strand; PAM type: NNGRRT; PAM sequence: AAGAGT
tcaattgccaatgaagtgtg

SEQ ID NO: 18871 - DNA, 20 bp, Artificial Sequence
  Description of Artificial Sequence: Synthetic oligonucleotide
  Target: LAMA2; (-) strand; PAM type: NNGRRT; PAM sequence: AGGGAT
ccaacacaacattaataaat

SEQ ID NO: 18872 - DNA, 20 bp, Artificial Sequence
  Description of Artificial Sequence: Synthetic oligonucleotide
  Target: LAMA2; (-) strand; PAM type: NNGRRT; PAM sequence: ATGGGT
ggtacctctgcacgtaccta

SEQ ID NO: 18873 - DNA, 20 bp, Artificial Sequence
  Description of Artificial Sequence: Synthetic oligonucleotide
  Target: LAMA2; (-) strand; PAM type: NNGRRT; PAM sequence: TGGGAT
attgaatagattatgaaaaa

SEQ ID NO: 18874 - DNA, 20 bp, Artificial Sequence
  Description of Artificial Sequence: Synthetic oligonucleotide
  Target: LAMA2; (-) strand; PAM type: NNGRRT; PAM sequence: TTGAAT
cagttatttttaaagttcaa

SEQ ID NO: 18875 - DNA, 20 bp, Artificial Sequence
  Description of Artificial Sequence: Synthetic oligonucleotide
  Target: LAMA2; (-) strand; PAM type: NNGRRT; PAM sequence: TAGAAT
gttgctagcagtagatacca

SEQ ID NO: 18876 - DNA, 20 bp, Artificial Sequence
  Description of Artificial Sequence: Synthetic oligonucleotide
  Target: LAMA2; (-) strand; PAM type: NNGRRT; PAM sequence: CTGAAT
tatacagatattttctacat

SEQ ID NO: 18877 - DNA, 20 bp, Artificial Sequence
  Description of Artificial Sequence: Synthetic oligonucleotide
  Target: LAMA2; (-) strand; PAM type: NNGRRT; PAM sequence: ATGAGT
gcaaaatacctttcatgcct

SEQ ID NO: 18878 - DNA, 20 bp, Artificial Sequence
  Description of Artificial Sequence: Synthetic oligonucleotide
  Target: LAMA2; (-) strand; PAM type: NNGRRT; PAM sequence: ATGAAT
aaatgaatgaattttagaaa

SEQ ID NO: 18879 - DNA, 20 bp, Artificial Sequence
  Description of Artificial Sequence: Synthetic oligonucleotide
  Target: LAMA2; (-) strand; PAM type: NNGRRT; PAM sequence: ATGAAT
tcagcttctatcctaaatga

SEQ ID NO: 18880 - DNA, 20 bp, Artificial Sequence
  Description of Artificial Sequence: Synthetic oligonucleotide
  Target: LAMA2; (-) strand; PAM type: NNGRRT; PAM sequence: ATGAAT
tctttcagcttctatcctaa

SEQ ID NO: 18881 - DNA, 20 bp, Artificial Sequence
  Description of Artificial Sequence: Synthetic oligonucleotide
  Target: LAMA2; (-) strand; PAM type: NNGRRT; PAM sequence: AAGGAT
gaggaaggggtcatgagcca

SEQ ID NO: 18882 - DNA, 20 bp, Artificial Sequence
  Description of Artificial Sequence: Synthetic oligonucleotide
  Target: LAMA2; (-) strand; PAM type: NNGRRT; PAM sequence: AGGGGT
ctggctttgaagatggagga

SEQ ID NO: 18883 - DNA, 20 bp, Artificial Sequence
  Description of Artificial Sequence: Synthetic oligonucleotide
  Target: LAMA2; (-) strand; PAM type: NNGRRT; PAM sequence: AAGGAT
gaggttagggtggtacaacg

SEQ ID NO: 18884 - DNA, 20 bp, Artificial Sequence
  Description of Artificial Sequence: Synthetic oligonucleotide
  Target: LAMA2; (-) strand; PAM type: NNGRRT; PAM sequence: TAGGGT
agggaggcaaaagaagaggt

SEQ ID NO: 18885 - DNA, 20 bp, Artificial Sequence
  Description of Artificial Sequence: Synthetic oligonucleotide
  Target: LAMA2; (-) strand; PAM type: NNGRRT; PAM sequence: AAGGGT
actgggctcaatgtaatcat

SEQ ID NO: 18886 - DNA, 20 bp, Artificial Sequence
  Description of Artificial Sequence: Synthetic oligonucleotide
  Target: LAMA2; (-) strand; PAM type: NNGRRT; PAM sequence: CTGGAT
cttgagatgaaaggatcacc

SEQ ID NO: 18887 - DNA, 20 bp, Artificial Sequence
  Description of Artificial Sequence: Synthetic oligonucleotide
  Target: LAMA2; (-) strand; PAM type: NNGRRT; PAM sequence: AAGGAT
agttaaagaccttgagatga

SEQ ID NO: 18888 - DNA, 20 bp, Artificial Sequence
  Description of Artificial Sequence: Synthetic oligonucleotide
  Target: LAMA2; (-) strand; PAM type: NNGRRT; PAM sequence: GTGAAT
atatttaattcttggaacct

SEQ ID NO: 18889 - DNA, 20 bp, Artificial Sequence
  Description of Artificial Sequence: Synthetic oligonucleotide
  Target: LAMA2; (-) strand; PAM type: NNGRRT; PAM sequence: TAGAGT
atgagataggctagttatgg

SEQ ID NO: 18890 - DNA, 20 bp, Artificial Sequence
  Description of Artificial Sequence: Synthetic oligonucleotide
  Target: LAMA2; (-) strand; PAM type: NNGRRT; PAM sequence: CTGAAT
tgtccagaagacagcactaa

SEQ ID NO: 18891 - DNA, 20 bp, Artificial Sequence
  Description of Artificial Sequence: Synthetic oligonucleotide
  Target: LAMA2; (-) strand; PAM type: NNGRRT; PAM sequence: AGGAGT
gaggagagaatgaagataga

SEQ ID NO: 18892 - DNA, 20 bp, Artificial Sequence
  Description of Artificial Sequence: Synthetic oligonucleotide
  Target: LAMA2; (-) strand; PAM type: NNGRRT; PAM sequence: GAGAAT
aggttaacaatggcagagga

SEQ ID NO: 18893 - DNA, 20 bp, Artificial Sequence
  Description of Artificial Sequence: Synthetic oligonucleotide
  Target: LAMA2; (-) strand; PAM type: NNGRRT; PAM sequence: AGGAGT
accctattacaatcactctc

SEQ ID NO: 18894 - DNA, 20 bp, Artificial Sequence
  Description of Artificial Sequence: Synthetic oligonucleotide
  Target: LAMA2; (-) strand; PAM type: NNGRRT; PAM sequence: AAGAGT
ccttctctagggactttctt

SEQ ID NO: 18895 - DNA, 20 bp, Artificial Sequence
  Description of Artificial Sequence: Synthetic oligonucleotide
  Target: LAMA2; (-) strand; PAM type: NNGRRT; PAM sequence: AAGAAT
cccctctgtgagaaacaccc

SEQ ID NO: 18896 - DNA, 20 bp, Artificial Sequence
  Description of Artificial Sequence: Synthetic oligonucleotide
  Target: LAMA2; (-) strand; PAM type: NNGRRT; PAM sequence: CAGGGT
acaaacacggcggaaggccg

SEQ ID NO: 18897 - DNA, 20 bp, Artificial Sequence
  Description of Artificial Sequence: Synthetic oligonucleotide
  Target: LAMA2; (-) strand; PAM type: NNGRRT; PAM sequence: AAGAGT
tttaaggcagcatgcgcgtt

SEQ ID NO: 18898 - DNA, 20 bp, Artificial Sequence
  Description of Artificial Sequence: Synthetic oligonucleotide
  Target: LAMA2; (-) strand; PAM type: NNGRRT; PAM sequence: ATGGAT
ctgtgtccactcagggttga

SEQ ID NO: 18899 - DNA, 20 bp, Artificial Sequence
  Description of Artificial Sequence: Synthetic oligonucleotide
  Target: LAMA2; (-) strand; PAM type: NNGRRT; PAM sequence: TTGAAT
tgtgctgtgtccactcaggg

SEQ ID NO: 18900 - DNA, 20 bp, Artificial Sequence
  Description of Artificial Sequence: Synthetic oligonucleotide
  Target: LAMA2; (-) strand; PAM type: NNGRRT; PAM sequence: CAGGGT
aaacatgtgctgtgtccact

SEQ ID NO: 18901 - DNA, 20 bp, Artificial Sequence
  Description of Artificial Sequence: Synthetic oligonucleotide
  Target: LAMA2; (-) strand; PAM type: NNGRRT; PAM sequence: TGGGAT
taagaaagattcttctgcct

SEQ ID NO: 18902 - DNA, 20 bp, Artificial Sequence
  Description of Artificial Sequence: Synthetic oligonucleotide
  Target: LAMA2; (-) strand; PAM type: NNGRRT; PAM sequence: TGGAAT
tgatgatgatggtggttttg

SEQ ID NO: 18903 - DNA, 20 bp, Artificial Sequence
  Description of Artificial Sequence: Synthetic oligonucleotide
  Target: LAMA2; (-) strand; PAM type: NNGRRT; PAM sequence: AGGAGT
gctacccagtctgggaagtg

SEQ ID NO: 18904 - DNA, 20 bp, Artificial Sequence
  Description of Artificial Sequence: Synthetic oligonucleotide
  Target: LAMA2; (-) strand; PAM type: NNGRRT; PAM sequence: TGGGAT
ctgcctggccgcccatcgtc

SEQ ID NO: 18905 - DNA, 20 bp, Artificial Sequence
  Description of Artificial Sequence: Synthetic oligonucleotide
  Target: LAMA2; (-) strand; PAM type: NNGRRT; PAM sequence: CCGAGT
tgccttggcctcccaaagtg

SEQ ID NO: 18906 - DNA, 20 bp, Artificial Sequence
  Description of Artificial Sequence: Synthetic oligonucleotide
  Target: LAMA2; (-) strand; PAM type: NNGRRT; PAM sequence: TGGAGT
gtgctcaatgttgcccaggc

SEQ ID NO: 18907 - DNA, 20 bp, Artificial Sequence
  Description of Artificial Sequence: Synthetic oligonucleotide
  Target: LAMA2; (-) strand; PAM type: NNGRRT; PAM sequence: CGGAGT
cgaggtgccgagattgcaga

SEQ ID NO: 18908 - DNA, 20 bp, Artificial Sequence
  Description of Artificial Sequence: Synthetic oligonucleotide
  Target: LAMA2; (-) strand; PAM type: NNGRRT; PAM sequence: GCGAGT
ctggtctccagctcctaacc

SEQ ID NO: 18909 - DNA, 20 bp, Artificial Sequence
  Description of Artificial Sequence: Synthetic oligonucleotide
  Target: LAMA2; (-) strand; PAM type: NNGRRT; PAM sequence: CAGAGT
catgaattctttcaacagat

SEQ ID NO: 18910 - DNA, 20 bp, Artificial Sequence
  Description of Artificial Sequence: Synthetic oligonucleotide
  Target: LAMA2; (-) strand; PAM type: NNGRRT; PAM sequence: ATGAAT
aaagtttctgatcttggttc

SEQ ID NO: 18911 - DNA, 20 bp, Artificial Sequence
  Description of Artificial Sequence: Synthetic oligonucleotide
  Target: LAMA2; (-) strand; PAM type: NNGRRT; PAM sequence: TAGAAT
gaagtataatgttaacagag

SEQ ID NO: 18912 - DNA, 20 bp, Artificial Sequence
  Description of Artificial Sequence: Synthetic oligonucleotide
  Target: LAMA2; (-) strand; PAM type: NNGRRT; PAM sequence: CAGAGT
tgttagaagtataatgttaa

SEQ ID NO: 18913 - DNA, 20 bp, Artificial Sequence
  Description of Artificial Sequence: Synthetic oligonucleotide
  Target: LAMA2; (-) strand; PAM type: NNGRRT; PAM sequence: ATGAAT
ttatgacattacacacataa

SEQ ID NO: 18914 - DNA, 20 bp, Artificial Sequence
  Description of Artificial Sequence: Synthetic oligonucleotide
  Target: LAMA2; (-) strand; PAM type: NNGRRT; PAM sequence: GTGAAT
tcacagagtacaacaatggt

SEQ ID NO: 18915 - DNA, 20 bp, Artificial Sequence
  Description of Artificial Sequence: Synthetic oligonucleotide
  Target: LAMA2; (-) strand; PAM type: NNGRRT; PAM sequence: CAGAGT
tcctttcaatgaaactgtca

SEQ ID NO: 18916 - DNA, 20 bp, Artificial Sequence
  Description of Artificial Sequence: Synthetic oligonucleotide
  Target: LAMA2; (-) strand; PAM type: NNGRRT; PAM sequence: CTGAGT
ctggtaaaagagcaggtagg

SEQ ID NO: 18917 - DNA, 20 bp, Artificial Sequence
  Description of Artificial Sequence: Synthetic oligonucleotide
  Target: LAMA2; (-) strand; PAM type: NNGRRT; PAM sequence: GTGAAT
aaaagattgacctgcctcct

SEQ ID NO: 18918 - DNA, 20 bp, Artificial Sequence
  Description of Artificial Sequence: Synthetic oligonucleotide
  Target: LAMA2; (-) strand; PAM type: NNGRRT; PAM sequence: ATGAAT
tgagcagagtccaaattgga

SEQ ID NO: 18919 - DNA, 20 bp, Artificial Sequence
  Description of Artificial Sequence: Synthetic oligonucleotide
  Target: LAMA2; (-) strand; PAM type: NNGRRT; PAM sequence: TGGAAT
cgagtgagcagagtccaaat

SEQ ID NO: 18920 - DNA, 20 bp, Artificial Sequence
  Description of Artificial Sequence: Synthetic oligonucleotide
  Target: LAMA2; (-) strand; PAM type: NNGRRT; PAM sequence: CAGAGT
aaacgagtaacacgagtgag

SEQ ID NO: 18921 - DNA, 20 bp, Artificial Sequence
  Description of Artificial Sequence: Synthetic oligonucleotide
  Target: LAMA2; (-) strand; PAM type: NNGRRT; PAM sequence: ACGAGT
gtcttaagaaaacgagtaac

SEQ ID NO: 18922 - DNA, 20 bp, Artificial Sequence
  Description of Artificial Sequence: Synthetic oligonucleotide
  Target: LAMA2; (-) strand; PAM type: NNGRRT; PAM sequence: ACGAGT
tttagtccagtcttaagaaa

SEQ ID NO: 18923 - DNA, 20 bp, Artificial Sequence
  Description of Artificial Sequence: Synthetic oligonucleotide
  Target: LAMA2; (-) strand; PAM type: NNGRRT; PAM sequence: AAGGGT
caaattaattatcagctcta

SEQ ID NO: 18924 - DNA, 20 bp, Artificial Sequence
  Description of Artificial Sequence: Synthetic oligonucleotide
  Target: LAMA2; (-) strand; PAM type: NNGRRT; PAM sequence: GTGAAT
ggttaactctgcctcttact

SEQ ID NO: 18925 - DNA, 20 bp, Artificial Sequence
  Description of Artificial Sequence: Synthetic oligonucleotide
  Target: LAMA2; (-) strand; PAM type: NNGRRT; PAM sequence: CAGAAT
atatttgaaaatttttatat

SEQ ID NO: 18926 - DNA, 20 bp, Artificial Sequence
  Description of Artificial Sequence: Synthetic oligonucleotide
  Target: LAMA2; (-) strand; PAM type: NNGRRT; PAM sequence: TTGAGT
tggatgggtgttgggtacat

SEQ ID NO: 18927 - DNA, 20 bp, Artificial Sequence
  Description of Artificial Sequence: Synthetic oligonucleotide
  Target: LAMA2; (-) strand; PAM type: NNGRRT; PAM sequence: TTGGGT
ttaatacttatggatgggtg

SEQ ID NO: 18928 - DNA, 20 bp, Artificial Sequence
  Description of Artificial Sequence: Synthetic oligonucleotide
  Target: LAMA2; (-) strand; PAM type: NNGRRT; PAM sequence: ATGGGT
tcctgagttaatacttatgg

SEQ ID NO: 18929 - DNA, 20 bp, Artificial Sequence
  Description of Artificial Sequence: Synthetic oligonucleotide
  Target: LAMA2; (-) strand; PAM type: NNGRRT; PAM sequence: ATGGAT
ggggtcctgagttaatactt

SEQ ID NO: 18930 - DNA, 20 bp, Artificial Sequence
  Description of Artificial Sequence: Synthetic oligonucleotide
  Target: LAMA2; (-) strand; PAM type: NNGRRT; PAM sequence: CTGAGT
aaactgatacaagaggggtc

SEQ ID NO: 18931 - DNA, 20 bp, Artificial Sequence
  Description of Artificial Sequence: Synthetic oligonucleotide
  Target: LAMA2; (-) strand; PAM type: NNGRRT; PAM sequence: AGGGGT
gggttgaaaactgatacaag

SEQ ID NO: 18932 - DNA, 20 bp, Artificial Sequence
  Description of Artificial Sequence: Synthetic oligonucleotide
  Target: LAMA2; (-) strand; PAM type: NNGRRT; PAM sequence: ATGGGT
aggggtggagtaggatgtgg

SEQ ID NO: 18933 - DNA, 20 bp, Artificial Sequence
  Description of Artificial Sequence: Synthetic oligonucleotide
  Target: LAMA2; (-) strand; PAM type: NNGRRT; PAM sequence: GTGGAT
ctggaggggtggagtaggat

SEQ ID NO: 18934 - DNA, 20 bp, Artificial Sequence
  Description of Artificial Sequence: Synthetic oligonucleotide
  Target: LAMA2; (-) strand; PAM type: NNGRRT; PAM sequence: TAGGAT
aataatctggaggggtggag

SEQ ID NO: 18935 - DNA, 20 bp, Artificial Sequence
  Description of Artificial Sequence: Synthetic oligonucleotide
  Target: LAMA2; (-) strand; PAM type: NNGRRT; PAM sequence: TGGAGT
ttcccaataatctggagggg

SEQ ID NO: 18936 - DNA, 20 bp, Artificial Sequence
  Description of Artificial Sequence: Synthetic oligonucleotide
  Target: LAMA2; (-) strand; PAM type: NNGRRT; PAM sequence: AGGGGT
tttgcttcccaataatctgg

SEQ ID NO: 18937 - DNA, 20 bp, Artificial Sequence
  Description of Artificial Sequence: Synthetic oligonucleotide
  Target: LAMA2; (-) strand; PAM type: NNGRRT; PAM sequence: TGGAAT
tacaaagcgagtaatacata

SEQ ID NO: 18938 - DNA, 20 bp, Artificial Sequence
  Description of Artificial Sequence: Synthetic oligonucleotide
  Target: LAMA2; (-) strand; PAM type: NNGRRT; PAM sequence: GCGAGT
cataatgaagtagttacaaa

SEQ ID NO: 18939 - DNA, 20 bp, Artificial Sequence
  Description of Artificial Sequence: Synthetic oligonucleotide
  Target: LAMA2; (-) strand; PAM type: NNGRRT; PAM sequence: AAGAGT
gacaatggtttcctttataa

SEQ ID NO: 18940 - DNA, 20 bp, Artificial Sequence
  Description of Artificial Sequence: Synthetic oligonucleotide
  Target: LAMA2; (-) strand; PAM type: NNGRRT; PAM sequence: AAGAAT
gtaaatatttgttaatatta

SEQ ID NO: 18941 - DNA, 20 bp, Artificial Sequence
  Description of Artificial Sequence: Synthetic oligonucleotide
  Target: LAMA2; (-) strand; PAM type: NNGRRT; PAM sequence: CTGAGT
aggtgtgatgaatttgaata

SEQ ID NO: 18942 - DNA, 20 bp, Artificial Sequence
  Description of Artificial Sequence: Synthetic oligonucleotide
  Target: LAMA2; (-) strand; PAM type: NNGRRT; PAM sequence: TTGAAT
tggaagcaggtgtgatgaat

SEQ ID NO: 18943 - DNA, 20 bp, Artificial Sequence
  Description of Artificial Sequence: Synthetic oligonucleotide
  Target: LAMA2; (-) strand; PAM type: NNGRRT; PAM sequence: ATGAAT
aaaacttggaagcaggtgtg

SEQ ID NO: 18944 - DNA, 20 bp, Artificial Sequence
  Description of Artificial Sequence: Synthetic oligonucleotide
  Target: LAMA2; (-) strand; PAM type: NNGRRT; PAM sequence: GTGAAT
aatgcagtatgtgacttctt

SEQ ID NO: 18945 - DNA, 20 bp, Artificial Sequence
  Description of Artificial Sequence: Synthetic oligonucleotide
  Target: LAMA2; (-) strand; PAM type: NNGRRT; PAM sequence: CAGGAT
gaaccctaagtagcaaaatg

SEQ ID NO: 18946 - DNA, 20 bp, Artificial Sequence
  Description of Artificial Sequence: Synthetic oligonucleotide
  Target: LAMA2; (-) strand; PAM type: NNGRRT; PAM sequence: CAGAGT
caaaaatatgaaccctgaat

SEQ ID NO: 18947 - DNA, 20 bp, Artificial Sequence
  Description of Artificial Sequence: Synthetic oligonucleotide
  Target: LAMA2; (-) strand; PAM type: NNGRRT; PAM sequence: CTGAAT
ttgtgccaaaaatatgaacc

SEQ ID NO: 18948 - DNA, 20 bp, Artificial Sequence
  Description of Artificial Sequence: Synthetic oligonucleotide
  Target: LAMA2; (-) strand; PAM type: NNGRRT; PAM sequence: CAGGAT
gagtaaattgctatagtaca

SEQ ID NO: 18949 - DNA, 20 bp, Artificial Sequence
  Description of Artificial Sequence: Synthetic oligonucleotide
  Target: LAMA2; (-) strand; PAM type: NNGRRT; PAM sequence: TGGAGT
gttaaatgaaaaaagcaaca

SEQ ID NO: 18950 - DNA, 20 bp, Artificial Sequence
  Description of Artificial Sequence: Synthetic oligonucleotide
  Target: LAMA2; (-) strand; PAM type: NNGRRT; PAM sequence: CGGGAT
gatggaagagcaatgaatgg

SEQ ID NO: 18951 - DNA, 20 bp, Artificial Sequence
  Description of Artificial Sequence: Synthetic oligonucleotide
  Target: LAMA2; (-) strand; PAM type: NNGRRT; PAM sequence: ATGAAT
aaccctgagatggaagagca

SEQ ID NO: 18952 - DNA, 20 bp, Artificial Sequence
  Description of Artificial Sequence: Synthetic oligonucleotide
  Target: LAMA2; (-) strand; PAM type: NNGRRT; PAM sequence: AAGAAT
tgattataaatgtgatttgg

SEQ ID NO: 18953 - DNA, 20 bp, Artificial Sequence
  Description of Artificial Sequence: Synthetic oligonucleotide
  Target: LAMA2; (-) strand; PAM type: NNGRRT; PAM sequence: GAGAAT
cttattttcaatgtccctaa

SEQ ID NO: 18954 - DNA, 20 bp, Artificial Sequence
  Description of Artificial Sequence: Synthetic oligonucleotide
  Target: LAMA2; (-) strand; PAM type: NNGRRT; PAM sequence: AAGGGT
ttgttgaaattgtttttcaa

SEQ ID NO: 18955 - DNA, 20 bp, Artificial Sequence
  Description of Artificial Sequence: Synthetic oligonucleotide
  Target: LAMA2; (-) strand; PAM type: NNGRRT; PAM sequence: CTGGAT
tcctaataataataatctaa

SEQ ID NO: 18956 - DNA, 20 bp, Artificial Sequence
  Description of Artificial Sequence: Synthetic oligonucleotide
  Target: LAMA2; (-) strand; PAM type: NNGRRT; PAM sequence: CAGAAT
aatgaattattccaccacct

SEQ ID NO: 18957 - DNA, 20 bp, Artificial Sequence
  Description of Artificial Sequence: Synthetic oligonucleotide
  Target: LAMA2; (-) strand; PAM type: NNGRRT; PAM sequence: ATGAAT
agaagttaacacattggaaa

SEQ ID NO: 18958 - DNA, 20 bp, Artificial Sequence
  Description of Artificial Sequence: Synthetic oligonucleotide
  Target: LAMA2; (-) strand; PAM type: NNGRRT; PAM sequence: AGGAAT
tcctgtattataagagaaaa

SEQ ID NO: 18959 - DNA, 20 bp, Artificial Sequence
  Description of Artificial Sequence: Synthetic oligonucleotide
  Target: LAMA2; (-) strand; PAM type: NNGRRT; PAM sequence: CTGAAT
gaaacgatttgtaattgtca

SEQ ID NO: 18960 - DNA, 20 bp, Artificial Sequence
  Description of Artificial Sequence: Synthetic oligonucleotide
  Target: LAMA2; (-) strand; PAM type: NNGRRT; PAM sequence: GGGAGT
aaacctagaataatgtggtg

SEQ ID NO: 18961 - DNA, 20 bp, Artificial Sequence
  Description of Artificial Sequence: Synthetic oligonucleotide
  Target: LAMA2; (-) strand; PAM type: NNGRRT; PAM sequence: TAGAAT
tacatttacttcaataaacc

SEQ ID NO: 18962 - DNA, 20 bp, Artificial Sequence
  Description of Artificial Sequence: Synthetic oligonucleotide
  Target: LAMA2; (-) strand; PAM type: NNGRRT; PAM sequence: GTGAGT
gtctaattattattttctgt

SEQ ID NO: 18963 - DNA, 20 bp, Artificial Sequence
  Description of Artificial Sequence: Synthetic oligonucleotide
  Target: LAMA2; (-) strand; PAM type: NNGRRT; PAM sequence: GAGGAT
tattaagtctgtgtacaaca

SEQ ID NO: 18964 - DNA, 20 bp, Artificial Sequence
  Description of Artificial Sequence: Synthetic oligonucleotide
  Target: LAMA2; (-) strand; PAM type: NNGRRT; PAM sequence: GAGAAT
gtgaaaagtgggctgaaatg

SEQ ID NO: 18965 - DNA, 20 bp, Artificial Sequence
  Description of Artificial Sequence: Synthetic oligonucleotide
  Target: LAMA2; (-) strand; PAM type: NNGRRT; PAM sequence: CTGAGT
ggaggtcatggcctaaagta

SEQ ID NO: 18966 - DNA, 20 bp, Artificial Sequence
  Description of Artificial Sequence: Synthetic oligonucleotide
  Target: LAMA2; (-) strand; PAM type: NNGRRT; PAM sequence: GTGAGT
atttttctggaaggtctgtg

SEQ ID NO: 18967 - DNA, 20 bp, Artificial Sequence
  Description of Artificial Sequence: Synthetic oligonucleotide
  Target: LAMA2; (-) strand; PAM type: NNGRRT; PAM sequence: AAGGGT
aataacaagaaaaggatgag

SEQ ID NO: 18968 - DNA, 20 bp, Artificial Sequence
  Description of Artificial Sequence: Synthetic oligonucleotide
  Target: LAMA2; (-) strand; PAM type: NNGRRT; PAM sequence: AAGGAT
atagaaaccaataacaagaa

SEQ ID NO: 18969 - DNA, 20 bp, Artificial Sequence
  Description of Artificial Sequence: Synthetic oligonucleotide
  Target: LAMA2; (-) strand; PAM type: NNGRRT; PAM sequence: TTGAGT
tgcaggtaatgtctctctgt

SEQ ID NO: 18970 - DNA, 20 bp, Artificial Sequence
  Description of Artificial Sequence: Synthetic oligonucleotide
  Target: LAMA2; (-) strand; PAM type: NNGRRT; PAM sequence: GGGAAT
aatacccattggaataatct

SEQ ID NO: 18971 - DNA, 20 bp, Artificial Sequence
  Description of Artificial Sequence: Synthetic oligonucleotide
  Target: LAMA2; (-) strand; PAM type: NNGRRT; PAM sequence: TGGAAT
ttttcaagcttaatacccat

SEQ ID NO: 18972 - DNA, 20 bp, Artificial Sequence
  Description of Artificial Sequence: Synthetic oligonucleotide
  Target: LAMA2; (-) strand; PAM type: NNGRRT; PAM sequence: AAGGAT
tatacaatatcagaaccaga

SEQ ID NO: 18973 - DNA, 20 bp, Artificial Sequence
  Description of Artificial Sequence: Synthetic oligonucleotide
  Target: LAMA2; (-) strand; PAM type: NNGRRT; PAM sequence: GAGAGT
ggtggctttcattaagtgat

SEQ ID NO: 18974 - DNA, 20 bp, Artificial Sequence
  Description of Artificial Sequence: Synthetic oligonucleotide
  Target: LAMA2; (-) strand; PAM type: NNGRRT; PAM sequence: ATGGAT
tatgtgctcttgcccatgtt

SEQ ID NO: 18975 - DNA, 20 bp, Artificial Sequence
  Description of Artificial Sequence: Synthetic oligonucleotide
  Target: LAMA2; (-) strand; PAM type: NNGRRT; PAM sequence: AAGAGT
aaatctaagaaatgctacta

SEQ ID NO: 18976 - DNA, 20 bp, Artificial Sequence
  Description of Artificial Sequence: Synthetic oligonucleotide
  Target: LAMA2; (-) strand; PAM type: NNGRRT; PAM sequence: AAGAAT
cccagatcctttgtccccag

SEQ ID NO: 18977 - DNA, 20 bp, Artificial Sequence
  Description of Artificial Sequence: Synthetic oligonucleotide
  Target: LAMA2; (-) strand; PAM type: NNGRRT; PAM sequence: GAGAAT
tactccggaagctgaggcag

SEQ ID NO: 18978 - DNA, 20 bp, Artificial Sequence
  Description of Artificial Sequence: Synthetic oligonucleotide
  Target: LAMA2; (-) strand; PAM type: NNGRRT; PAM sequence: GGGGGT
acaaaaaaaaaaaattagtc

SEQ ID NO: 18979 - DNA, 20 bp, Artificial Sequence
  Description of Artificial Sequence: Synthetic oligonucleotide
  Target: LAMA2; (-) strand; PAM type: NNGRRT; PAM sequence: AGGAGT
ggcaggcggatcacgatgtc

SEQ ID NO: 18980 - DNA, 20 bp, Artificial Sequence
  Description of Artificial Sequence: Synthetic oligonucleotide
  Target: LAMA2; (-) strand; PAM type: NNGRRT; PAM sequence: GCGGAT
actttgggaggctggggcag

SEQ ID NO: 18981 - DNA, 20 bp, Artificial Sequence
  Description of Artificial Sequence: Synthetic oligonucleotide
  Target: LAMA2; (-) strand; PAM type: NNGRRT; PAM sequence: CAGAAT
tgttagttaagtctgaaaac

SEQ ID NO: 18982 - DNA, 20 bp, Artificial Sequence
  Description of Artificial Sequence: Synthetic oligonucleotide
  Target: LAMA2; (-) strand; PAM type: NNGRRT; PAM sequence: TGGGGT
aaatgatatttgtacagcac

SEQ ID NO: 18983 - DNA, 20 bp, Artificial Sequence
  Description of Artificial Sequence: Synthetic oligonucleotide
  Target: LAMA2; (-) strand; PAM type: NNGRRT; PAM sequence: TAGAGT
aacggacaatgatcatcaca

SEQ ID NO: 18984 - DNA, 20 bp, Artificial Sequence
  Description of Artificial Sequence: Synthetic oligonucleotide
  Target: LAMA2; (-) strand; PAM type: NNGRRT; PAM sequence: AAGAAT
tggagaatagggtctttctt

SEQ ID NO: 18985 - DNA, 20 bp, Artificial Sequence
  Description of Artificial Sequence: Synthetic oligonucleotide
  Target: LAMA2; (-) strand; PAM type: NNGRRT; PAM sequence: TAGGGT
tttagtgtggaaatggagaa

SEQ ID NO: 18986 - DNA, 20 bp, Artificial Sequence
  Description of Artificial Sequence: Synthetic oligonucleotide
  Target: LAMA2; (-) strand; PAM type: NNGRRT; PAM sequence: GAGAAT
tctcatttagtgtggaaatg

SEQ ID NO: 18987 - DNA, 20 bp, Artificial Sequence
  Description of Artificial Sequence: Synthetic oligonucleotide
  Target: LAMA2; (-) strand; PAM type: NNGRRT; PAM sequence: AAGAGT
gatgttcctcctataataag

SEQ ID NO: 18988 - DNA, 20 bp, Artificial Sequence
  Description of Artificial Sequence: Synthetic oligonucleotide
  Target: LAMA2; (-) strand; PAM type: NNGRRT; PAM sequence: TTGAAT
atttaattactgatgtagca

SEQ ID NO: 18989 - DNA, 20 bp, Artificial Sequence
  Description of Artificial Sequence: Synthetic oligonucleotide
  Target: LAMA2; (-) strand; PAM type: NNGRRT; PAM sequence: GAGAGT
agtattcttagcaggcttca

SEQ ID NO: 18990 - DNA, 20 bp, Artificial Sequence
  Description of Artificial Sequence: Synthetic oligonucleotide
  Target: LAMA2; (-) strand; PAM type: NNGRRT; PAM sequence: GTGAAT
gagtaaacttttaaaatgta

SEQ ID NO: 18991 - DNA, 20 bp, Artificial Sequence
  Description of Artificial Sequence: Synthetic oligonucleotide
  Target: LAMA2; (-) strand; PAM type: NNGRRT; PAM sequence: TTGAGT
acttgaaagtcatgtagttt

SEQ ID NO: 18992 - DNA, 20 bp, Artificial Sequence
  Description of Artificial Sequence: Synthetic oligonucleotide
  Target: LAMA2; (-) strand; PAM type: NNGRRT; PAM sequence: TGGAAT
attaattaaatttgttggca

SEQ ID NO: 18993 - DNA, 20 bp, Artificial Sequence
  Description of Artificial Sequence: Synthetic oligonucleotide
  Target: LAMA2; (-) strand; PAM type: NNGRRT; PAM sequence: ATGGGT
ccctctttcatttattttct

SEQ ID NO: 18994 - DNA, 20 bp, Artificial Sequence
  Description of Artificial Sequence: Synthetic oligonucleotide
  Target: LAMA2; (-) strand; PAM type: NNGRRT; PAM sequence: ATGAGT
accgccttacagaagactga

SEQ ID NO: 18995 - DNA, 20 bp, Artificial Sequence
  Description of Artificial Sequence: Synthetic oligonucleotide
  Target: LAMA2; (-) strand; PAM type: NNGRRT; PAM sequence: CTGAAT
agtcaccgccttacagaaga

SEQ ID NO: 18996 - DNA, 20 bp, Artificial Sequence
  Description of Artificial Sequence: Synthetic oligonucleotide
  Target: LAMA2; (-) strand; PAM type: NNGRRT; PAM sequence: TGGAAT
catagctcctgtgttggctc

SEQ ID NO: 18997 - DNA, 20 bp, Artificial Sequence
  Description of Artificial Sequence: Synthetic oligonucleotide
  Target: LAMA2; (-) strand; PAM type: NNGRRT; PAM sequence: GTGGAT
agttctcatgcagctacaat

SEQ ID NO: 18998 - DNA, 20 bp, Artificial Sequence
  Description of Artificial Sequence: Synthetic oligonucleotide
  Target: LAMA2; (-) strand; PAM type: NNGRRT; PAM sequence: CTGAGT
agaactttgcttagaaagca

SEQ ID NO: 18999 - DNA, 20 bp, Artificial Sequence
  Description of Artificial Sequence: Synthetic oligonucleotide
  Target: LAMA2; (-) strand; PAM type: NNGRRT; PAM sequence: ATGGAT
aataagactacactaaggtt

SEQ ID NO: 19000 - DNA, 20 bp, Artificial Sequence
  Description of Artificial Sequence: Synthetic oligonucleotide
  Target: LAMA2; (-) strand; PAM type: NNGRRT; PAM sequence: GAGAAT
ctgcgtgttcttgtgaaaga

SEQ ID NO: 19001 - DNA, 20 bp, Artificial Sequence
  Description of Artificial Sequence: Synthetic oligonucleotide
  Target: LAMA2; (-) strand; PAM type: NNGRRT; PAM sequence: ATGAAT
agggaagagataatgagata

SEQ ID NO: 19002 - DNA, 20 bp, Artificial Sequence
  Description of Artificial Sequence: Synthetic oligonucleotide
  Target: LAMA2; (-) strand; PAM type: NNGRRT; PAM sequence: TGGAGT
ggaactaaggcatacgttcc

SEQ ID NO: 19003 - DNA, 20 bp, Artificial Sequence
  Description of Artificial Sequence: Synthetic oligonucleotide
  Target: LAMA2; (-) strand; PAM type: NNGRRT; PAM sequence: TTGAAT
tcttgcctgtttgttagagc

SEQ ID NO: 19004 - DNA, 20 bp, Artificial Sequence
  Description of Artificial Sequence: Synthetic oligonucleotide
  Target: LAMA2; (-) strand; PAM type: NNGRRT; PAM sequence: TTGGAT
ttgatatttattacatttag

SEQ ID NO: 19005 - DNA, 20 bp, Artificial Sequence
  Description of Artificial Sequence: Synthetic oligonucleotide
  Target: LAMA2; (-) strand; PAM type: NNGRRT; PAM sequence: ATGGGT
attcttcaggcaaatgagaa

SEQ ID NO: 19006 - DNA, 20 bp, Artificial Sequence
  Description of Artificial Sequence: Synthetic oligonucleotide
  Target: LAMA2; (-) strand; PAM type: NNGRRT; PAM sequence: CAGGGT
cagtaagccacaagttatct

SEQ ID NO: 19007 - DNA, 20 bp, Artificial Sequence
  Description of Artificial Sequence: Synthetic oligonucleotide
  Target: LAMA2; (-) strand; PAM type: NNGRRT; PAM sequence: GGGGAT
gatatttcatggcaaacttt

SEQ ID NO: 19008 - DNA, 20 bp, Artificial Sequence
  Description of Artificial Sequence: Synthetic oligonucleotide
  Target: LAMA2; (-) strand; PAM type: NNGRRT; PAM sequence: TAGAAT
caaacacagaatgctacaaa

SEQ ID NO: 19009 - DNA, 20 bp, Artificial Sequence
  Description of Artificial Sequence: Synthetic oligonucleotide
  Target: LAMA2; (-) strand; PAM type: NNGRRT; PAM sequence: CAGAAT
ggaaatactactatcaaaca

SEQ ID NO: 19010 - DNA, 20 bp, Artificial Sequence
  Description of Artificial Sequence: Synthetic oligonucleotide
  Target: LAMA2; (-) strand; PAM type: NNGRRT; PAM sequence: TAGGAT
tataggaatgctgtattttc

SEQ ID NO: 19011 - DNA, 20 bp, Artificial Sequence
  Description of Artificial Sequence: Synthetic oligonucleotide
  Target: LAMA2; (-) strand; PAM type: NNGRRT; PAM sequence: AGGAAT
aatttaataattttttatat

SEQ ID NO: 19012 - DNA, 20 bp, Artificial Sequence
  Description of Artificial Sequence: Synthetic oligonucleotide
  Target: LAMA2; (-) strand; PAM type: NNGRRT; PAM sequence: CAGAAT
acagaaatgtatatgatgat

SEQ ID NO: 19013 - DNA, 20 bp, Artificial Sequence
  Description of Artificial Sequence: Synthetic oligonucleotide
  Target: LAMA2; (-) strand; PAM type: NNGRRT; PAM sequence: TAGAGT
taaaatataaaaacgtttct

SEQ ID NO: 19014 - DNA, 20 bp, Artificial Sequence
  Description of Artificial Sequence: Synthetic oligonucleotide
  Target: LAMA2; (-) strand; PAM type: NNGRRT; PAM sequence: TGGGAT
gcctcagcctcacaaagtgt

SEQ ID NO: 19015 - DNA, 20 bp, Artificial Sequence
  Description of Artificial Sequence: Synthetic oligonucleotide
  Target: LAMA2; (-) strand; PAM type: NNGRRT; PAM sequence: TGGAGT
ttttttgtatttagtagaga

SEQ ID NO: 19016 - DNA, 20 bp, Artificial Sequence
  Description of Artificial Sequence: Synthetic oligonucleotide
  Target: LAMA2; (-) strand; PAM type: NNGRRT; PAM sequence: CTGGAT
tgcctcagcctcccaagtag

SEQ ID NO: 19017 - DNA, 20 bp, Artificial Sequence
  Description of Artificial Sequence: Synthetic oligonucleotide
  Target: LAMA2; (-) strand; PAM type: NNGRRT; PAM sequence: TGGAGT
tcctgctctgttgtccagga

SEQ ID NO: 19018 - DNA, 20 bp, Artificial Sequence
  Description of Artificial Sequence: Synthetic oligonucleotide
  Target: LAMA2; (-) strand; PAM type: NNGRRT; PAM sequence: CAGGAT
ctgcgtcctgctctgttgtc

SEQ ID NO: 19019 - DNA, 20 bp, Artificial Sequence
  Description of Artificial Sequence: Synthetic oligonucleotide
  Target: LAMA2; (-) strand; PAM type: NNGRRT; PAM sequence: AAGAAT
gtcttaaaatcataaagaag

SEQ ID NO: 19020 - DNA, 20 bp, Artificial Sequence
  Description of Artificial Sequence: Synthetic oligonucleotide
  Target: LAMA2; (-) strand; PAM type: NNGRRT; PAM sequence: TAGAGT
aatcttataaaatgcacaga

SEQ ID NO: 19021 - DNA, 20 bp, Artificial Sequence
  Description of Artificial Sequence: Synthetic oligonucleotide
  Target: LAMA2; (-) strand; PAM type: NNGRRT; PAM sequence: ATGGAT
attcaacaagaaacatacca

SEQ ID NO: 19022 - DNA, 20 bp, Artificial Sequence
  Description of Artificial Sequence: Synthetic oligonucleotide
  Target: LAMA2; (-) strand; PAM type: NNGRRT; PAM sequence: TAGAAT
atattgaacaactcatcacg

SEQ ID NO: 19023 - DNA, 20 bp, Artificial Sequence
  Description of Artificial Sequence: Synthetic oligonucleotide
  Target: LAMA2; (-) strand; PAM type: NNGRRT; PAM sequence: AGGAAT
atttttaggtattattcata

SEQ ID NO: 19024 - DNA, 20 bp, Artificial Sequence
  Description of Artificial Sequence: Synthetic oligonucleotide
  Target: LAMA2; (-) strand; PAM type: NNGRRT; PAM sequence: TAGAAT
gggcaaaagtaggaacaaca

SEQ ID NO: 19025 - DNA, 20 bp, Artificial Sequence
  Description of Artificial Sequence: Synthetic oligonucleotide
  Target: LAMA2; (-) strand; PAM type: NNGRRT; PAM sequence: AGGAGT
atattaaagctgccaccttt

SEQ ID NO: 19026 - DNA, 20 bp, Artificial Sequence
  Description of Artificial Sequence: Synthetic oligonucleotide
  Target: LAMA2; (-) strand; PAM type: NNGRRT; PAM sequence: AGGAAT
atgccaagacattttgggag

SEQ ID NO: 19027 - DNA, 20 bp, Artificial Sequence
  Description of Artificial Sequence: Synthetic oligonucleotide
  Target: LAMA2; (-) strand; PAM type: NNGRRT; PAM sequence: TTGAAT
atgtatgtgcctgtaactgc

SEQ ID NO: 19028 - DNA, 20 bp, Artificial Sequence
  Description of Artificial Sequence: Synthetic oligonucleotide
  Target: LAMA2; (-) strand; PAM type: NNGRRT; PAM sequence: ATGAAT
actgcaggtgagaaatactg

SEQ ID NO: 19029 - DNA, 20 bp, Artificial Sequence
  Description of Artificial Sequence: Synthetic oligonucleotide
  Target: LAMA2; (-) strand; PAM type: NNGRRT; PAM sequence: TTGAGT
gctttgagcattctgtttta

SEQ ID NO: 19030 - DNA, 20 bp, Artificial Sequence
  Description of Artificial Sequence: Synthetic oligonucleotide
  Target: LAMA2; (-) strand; PAM type: NNGRRT; PAM sequence: AGGGGT
cagccaagatatttgtcctg

SEQ ID NO: 19031 - DNA, 20 bp, Artificial Sequence
  Description of Artificial Sequence: Synthetic oligonucleotide
  Target: LAMA2; (-) strand; PAM type: NNGRRT; PAM sequence: GTGGAT
gcacagttgtggaacaacta

SEQ ID NO: 19032 - DNA, 20 bp, Artificial Sequence
  Description of Artificial Sequence: Synthetic oligonucleotide
  Target: LAMA2; (-) strand; PAM type: NNGRRT; PAM sequence: TAGGGT
acccatcgaatgagtcaaag

SEQ ID NO: 19033 - DNA, 20 bp, Artificial Sequence
  Description of Artificial Sequence: Synthetic oligonucleotide
  Target: LAMA2; (-) strand; PAM type: NNGRRT; PAM sequence: ATGAGT
gaggggaaatcacccatcga

SEQ ID NO: 19034 - DNA, 20 bp, Artificial Sequence
  Description of Artificial Sequence: Synthetic oligonucleotide
  Target: LAMA2; (-) strand; PAM type: NNGRRT; PAM sequence: TCGAAT
catggaggggaaatcaccca

SEQ ID NO: 19035 - DNA, 20 bp, Artificial Sequence
  Description of Artificial Sequence: Synthetic oligonucleotide
  Target: LAMA2; (-) strand; PAM type: NNGRRT; PAM sequence: TTGAAT
tattccttcaagatgtttac

SEQ ID NO: 19036 - DNA, 20 bp, Artificial Sequence
  Description of Artificial Sequence: Synthetic oligonucleotide
  Target: LAMA2; (-) strand; PAM type: NNGRRT; PAM sequence: TGGAAT
aaaaatataaaaatttggta

SEQ ID NO: 19037 - DNA, 20 bp, Artificial Sequence
  Description of Artificial Sequence: Synthetic oligonucleotide
  Target: LAMA2; (-) strand; PAM type: NNGRRT; PAM sequence: TAGGAT
gtaactcatgcatacgtgta

SEQ ID NO: 19038 - DNA, 20 bp, Artificial Sequence
  Description of Artificial Sequence: Synthetic oligonucleotide
  Target: LAMA2; (-) strand; PAM type: NNGRRT; PAM sequence: AGGGAT
gctacagagggaatcctgaa

SEQ ID NO: 19039 - DNA, 20 bp, Artificial Sequence
  Description of Artificial Sequence: Synthetic oligonucleotide
  Target: LAMA2; (-) strand; PAM type: NNGRRT; PAM sequence: GGGAAT
caggactgctgagctacaga

SEQ ID NO: 19040 - DNA, 20 bp, Artificial Sequence
  Description of Artificial Sequence: Synthetic oligonucleotide
  Target: LAMA2; (-) strand; PAM type: NNGRRT; PAM sequence: GTGGAT
ttggcagctctaagctctaa

SEQ ID NO: 19041 - DNA, 20 bp, Artificial Sequence
  Description of Artificial Sequence: Synthetic oligonucleotide
  Target: LAMA2; (-) strand; PAM type: NNGRRT; PAM sequence: ATGAAT
ttctaggtagaaagacagat

SEQ ID NO: 19042 - DNA, 20 bp, Artificial Sequence
  Description of Artificial Sequence: Synthetic oligonucleotide
  Target: LAMA2; (-) strand; PAM type: NNGRRT; PAM sequence: TGGAAT
agaatagtgaagaaacatta

SEQ ID NO: 19043 - DNA, 20 bp, Artificial Sequence
  Description of Artificial Sequence: Synthetic oligonucleotide
  Target: LAMA2; (-) strand; PAM type: NNGRRT; PAM sequence: AAGAAT
tctttaccaatgtagtccaa

SEQ ID NO: 19044 - DNA, 20 bp, Artificial Sequence
  Description of Artificial Sequence: Synthetic oligonucleotide
  Target: LAMA2; (-) strand; PAM type: NNGRRT; PAM sequence: TAGAAT
gctctatttacaaatttata

SEQ ID NO: 19045 - DNA, 20 bp, Artificial Sequence
  Description of Artificial Sequence: Synthetic oligonucleotide
  Target: LAMA2; (-) strand; PAM type: NNGRRT; PAM sequence: AGGAAT
ttaacagagtgacaatggag

SEQ ID NO: 19046 - DNA, 20 bp, Artificial Sequence
  Description of Artificial Sequence: Synthetic oligonucleotide
  Target: LAMA2; (-) strand; PAM type: NNGRRT; PAM sequence: CAGAGT
agaggtattgttactgttaa

SEQ ID NO: 19047 - DNA, 20 bp, Artificial Sequence
  Description of Artificial Sequence: Synthetic oligonucleotide
  Target: LAMA2; (-) strand; PAM type: NNGRRT; PAM sequence: AGGGGT
aaaggtaaacatgcaagaaa

SEQ ID NO: 19048 - DNA, 20 bp, Artificial Sequence
  Description of Artificial Sequence: Synthetic oligonucleotide
  Target: LAMA2; (-) strand; PAM type: NNGRRT; PAM sequence: AAGGGT
aacctgaaacacattaaatg

SEQ ID NO: 19049 - DNA, 20 bp, Artificial Sequence
  Description of Artificial Sequence: Synthetic oligonucleotide
  Target: LAMA2; (-) strand; PAM type: NNGRRT; PAM sequence: ACGGAT
attccagtgttatgaagaca

SEQ ID NO: 19050 - DNA, 20 bp, Artificial Sequence
  Description of Artificial Sequence: Synthetic oligonucleotide
  Target: LAMA2; (-) strand; PAM type: NNGRRT; PAM sequence: GTGAAT
acaagctagaaattcccagt

SEQ ID NO: 19051 - DNA, 20 bp, Artificial Sequence
  Description of Artificial Sequence: Synthetic oligonucleotide
  Target: LAMA2; (-) strand; PAM type: NNGRRT; PAM sequence: CTGGAT
ttaaaagaaatggattaaga

SEQ ID NO: 19052 - DNA, 20 bp, Artificial Sequence
  Description of Artificial Sequence: Synthetic oligonucleotide
  Target: LAMA2; (-) strand; PAM type: NNGRRT; PAM sequence: ATGGAT
caaccatggctttaaaagaa

SEQ ID NO: 19053 - DNA, 20 bp, Artificial Sequence
  Description of Artificial Sequence: Synthetic oligonucleotide
  Target: LAMA2; (-) strand; PAM type: NNGRRT; PAM sequence: TTGAAT
gtataacaacaacaataaca

SEQ ID NO: 19054 - DNA, 20 bp, Artificial Sequence
  Description of Artificial Sequence: Synthetic oligonucleotide
  Target: LAMA2; (-) strand; PAM type: NNGRRT; PAM sequence: GGGAGT
aatccagtttccaggccggg

SEQ ID NO: 19055 - DNA, 20 bp, Artificial Sequence
  Description of Artificial Sequence: Synthetic oligonucleotide
  Target: LAMA2; (-) strand; PAM type: NNGRRT; PAM sequence: GGGGAT
atatgacggtggcccagtgc

SEQ ID NO: 19056 - DNA, 20 bp, Artificial Sequence
  Description of Artificial Sequence: Synthetic oligonucleotide
  Target: LAMA2; (-) strand; PAM type: NNGRRT; PAM sequence: TGGAGT
attttctaaggggtgtatct

SEQ ID NO: 19057 - DNA, 20 bp, Artificial Sequence
  Description of Artificial Sequence: Synthetic oligonucleotide
  Target: LAMA2; (-) strand; PAM type: NNGRRT; PAM sequence: AGGGGT
tcttacctctccattttcta

SEQ ID NO: 19058 - DNA, 20 bp, Artificial Sequence
  Description of Artificial Sequence: Synthetic oligonucleotide
  Target: LAMA2; (-) strand; PAM type: NNGRRT; PAM sequence: GTGAGT
gtatcaaatgtgcttaaatg

SEQ ID NO: 19059 - DNA, 20 bp, Artificial Sequence
  Description of Artificial Sequence: Synthetic oligonucleotide
  Target: LAMA2; (-) strand; PAM type: NNGRRT; PAM sequence: GTGGAT
ttttcatttgggtctttcat

SEQ ID NO: 19060 - DNA, 20 bp, Artificial Sequence
  Description of Artificial Sequence: Synthetic oligonucleotide
  Target: LAMA2; (-) strand; PAM type: NNGRRT; PAM sequence: TTGGGT
ttgaaagaattacttttcat

SEQ ID NO: 19061 - DNA, 20 bp, Artificial Sequence
  Description of Artificial Sequence: Synthetic oligonucleotide
  Target: LAMA2; (-) strand; PAM type: NNGRRT; PAM sequence: AAGAAT
gaaaaacatcaaaagattga

SEQ ID NO: 19062 - DNA, 20 bp, Artificial Sequence
  Description of Artificial Sequence: Synthetic oligonucleotide
  Target: LAMA2; (-) strand; PAM type: NNGRRT; PAM sequence: CAGGAT
tgaatctaaaatcttaacca

SEQ ID NO: 19063 - DNA, 20 bp, Artificial Sequence
  Description of Artificial Sequence: Synthetic oligonucleotide
  Target: LAMA2; (-) strand; PAM type: NNGRRT; PAM sequence: ATGAAT
atgtggcttaaaatcaatga

SEQ ID NO: 19064 - DNA, 20 bp, Artificial Sequence
  Description of Artificial Sequence: Synthetic oligonucleotide
  Target: LAMA2; (-) strand; PAM type: NNGRRT; PAM sequence: ATGAAT
gaatatgtggcttaaaatca

SEQ ID NO: 19065 - DNA, 20 bp, Artificial Sequence
  Description of Artificial Sequence: Synthetic oligonucleotide
  Target: LAMA2; (-) strand; PAM type: NNGRRT; PAM sequence: TAGAAT
ataacaactgaagccatggt

SEQ ID NO: 19066 - DNA, 20 bp, Artificial Sequence
  Description of Artificial Sequence: Synthetic oligonucleotide
  Target: LAMA2; (-) strand; PAM type: NNGRRT; PAM sequence: CTGGAT
ggtgcagagaatttaagtaa

SEQ ID NO: 19067 - DNA, 20 bp, Artificial Sequence
  Description of Artificial Sequence: Synthetic oligonucleotide
  Target: LAMA2; (-) strand; PAM type: NNGRRT; PAM sequence: GAGAAT
ggcgatgaaactgaggtgca

SEQ ID NO: 19068 - DNA, 20 bp, Artificial Sequence
  Description of Artificial Sequence: Synthetic oligonucleotide
  Target: LAMA2; (-) strand; PAM type: NNGRRT; PAM sequence: CAGAGT
acaaaacaataaaaatagca

SEQ ID NO: 19069 - DNA, 20 bp, Artificial Sequence
  Description of Artificial Sequence: Synthetic oligonucleotide
  Target: LAMA2; (-) strand; PAM type: NNGRRT; PAM sequence: AAGGAT
tgggtatttgagagaagact

SEQ ID NO: 19070 - DNA, 20 bp, Artificial Sequence
  Description of Artificial Sequence: Synthetic oligonucleotide
  Target: LAMA2; (-) strand; PAM type: NNGRRT; PAM sequence: TTGGGT
gagagtcactaagtcaaagt

SEQ ID NO: 19071 - DNA, 20 bp, Artificial Sequence
  Description of Artificial Sequence: Synthetic oligonucleotide
  Target: LAMA2; (-) strand; PAM type: NNGRRT; PAM sequence: GAGAGT
agaaatattgaataattcaa

SEQ ID NO: 19072 - DNA, 20 bp, Artificial Sequence
  Description of Artificial Sequence: Synthetic oligonucleotide
  Target: LAMA2; (-) strand; PAM type: NNGRRT; PAM sequence: TTGAAT
ggaaacatactaaagaaata

SEQ ID NO: 19073 - DNA, 20 bp, Artificial Sequence
  Description of Artificial Sequence: Synthetic oligonucleotide
  Target: LAMA2; (-) strand; PAM type: NNGRRT; PAM sequence: GTGGGT
attaggtagcatgaaaggag

SEQ ID NO: 19074 - DNA, 20 bp, Artificial Sequence
  Description of Artificial Sequence: Synthetic oligonucleotide
  Target: LAMA2; (-) strand; PAM type: NNGRRT; PAM sequence: ATGAGT
tgtgggagagaatatcagac

SEQ ID NO: 19075 - DNA, 20 bp, Artificial Sequence
  Description of Artificial Sequence: Synthetic oligonucleotide
  Target: LAMA2; (-) strand; PAM type: NNGRRT; PAM sequence: GAGAAT
gatgtttggactatgtggga

SEQ ID NO: 19076 - DNA, 20 bp, Artificial Sequence
  Description of Artificial Sequence: Synthetic oligonucleotide
  Target: LAMA2; (-) strand; PAM type: NNGRRT; PAM sequence: ATGGGT
gggcatgatagaatgtgaat

SEQ ID NO: 19077 - DNA, 20 bp, Artificial Sequence
  Description of Artificial Sequence: Synthetic oligonucleotide
  Target: LAMA2; (-) strand; PAM type: NNGRRT; PAM sequence: GTGAAT
tggggtgggcatgatagaat

SEQ ID NO: 19078 - DNA, 20 bp, Artificial Sequence
  Description of Artificial Sequence: Synthetic oligonucleotide
  Target: LAMA2; (-) strand; PAM type: NNGRRT; PAM sequence: TAGAAT
attggctggggtgggcatga

SEQ ID NO: 19079 - DNA, 20 bp, Artificial Sequence
  Description of Artificial Sequence: Synthetic oligonucleotide
  Target: LAMA2; (-) strand; PAM type: NNGRRT; PAM sequence: TGGGGT
agagataaccctagattggc

SEQ ID NO: 19080 - DNA, 20 bp, Artificial Sequence
  Description of Artificial Sequence: Synthetic oligonucleotide
  Target: LAMA2; (-) strand; PAM type: NNGRRT; PAM sequence: GAGGGT
atataaaaatagtgcctaat

SEQ ID NO: 19081 - DNA, 20 bp, Artificial Sequence
  Description of Artificial Sequence: Synthetic oligonucleotide
  Target: LAMA2; (-) strand; PAM type: NNGRRT; PAM sequence: TGGAAT
aaaactggtatttttgaaca

SEQ ID NO: 19082 - DNA, 20 bp, Artificial Sequence
  Description of Artificial Sequence: Synthetic oligonucleotide
  Target: LAMA2; (-) strand; PAM type: NNGRRT; PAM sequence: TGGAAT
tttctgctgagagtaccatt

SEQ ID NO: 19083 - DNA, 20 bp, Artificial Sequence
  Description of Artificial Sequence: Synthetic oligonucleotide
  Target: LAMA2; (-) strand; PAM type: NNGRRT; PAM sequence: GAGAGT
ggcagattgagatttctgct

SEQ ID NO: 19084 - DNA, 20 bp, Artificial Sequence
  Description of Artificial Sequence: Synthetic oligonucleotide
  Target: LAMA2; (-) strand; PAM type: NNGRRT; PAM sequence: TTGAGT
agctgtttgactcactgcat

SEQ ID NO: 19085 - DNA, 20 bp, Artificial Sequence
  Description of Artificial Sequence: Synthetic oligonucleotide
  Target: LAMA2; (-) strand; PAM type: NNGRRT; PAM sequence: TTGGAT
caggccaaactggccaggaa

SEQ ID NO: 19086 - DNA, 20 bp, Artificial Sequence
  Description of Artificial Sequence: Synthetic oligonucleotide
  Target: LAMA2; (-) strand; PAM type: NNGRRT; PAM sequence: AGGAAT
atcctcaggccaaactggcc

SEQ ID NO: 19087 - DNA, 20 bp, Artificial Sequence
  Description of Artificial Sequence: Synthetic oligonucleotide
  Target: LAMA2; (-) strand; PAM type: NNGRRT; PAM sequence: TAGGAT
agtcttatgtaaactgaatc

SEQ ID NO: 19088 - DNA, 20 bp, Artificial Sequence
  Description of Artificial Sequence: Synthetic oligonucleotide
  Target: LAMA2; (-) strand; PAM type: NNGRRT; PAM sequence: CTGAAT
aattattagtcttatgtaaa

SEQ ID NO: 19089 - DNA, 20 bp, Artificial Sequence
  Description of Artificial Sequence: Synthetic oligonucleotide
  Target: LAMA2; (-) strand; PAM type: NNGRRT; PAM sequence: GAGAAT
agaatagtcttaaattgttt

SEQ ID NO: 19090 - DNA, 20 bp, Artificial Sequence
  Description of Artificial Sequence: Synthetic oligonucleotide
  Target: LAMA2; (-) strand; PAM type: NNGRRT; PAM sequence: TAGAAT
ttgaatcatttttaaaggta

SEQ ID NO: 19091 - DNA, 20 bp, Artificial Sequence
  Description of Artificial Sequence: Synthetic oligonucleotide
  Target: LAMA2; (-) strand; PAM type: NNGRRT; PAM sequence: TTGAAT
ttgcttaataaatttctgaa

SEQ ID NO: 19092 - DNA, 20 bp, Artificial Sequence
  Description of Artificial Sequence: Synthetic oligonucleotide
  Target: LAMA2; (-) strand; PAM type: NNGRRT; PAM sequence: CTGAAT
ttatattgcttaataaattt

SEQ ID NO: 19093 - DNA, 20 bp, Artificial Sequence
  Description of Artificial Sequence: Synthetic oligonucleotide
  Target: LAMA2; (-) strand; PAM type: NNGRRT; PAM sequence: TAGGGT
taatgaagggagagaatggg

SEQ ID NO: 19094 - DNA, 20 bp, Artificial Sequence
  Description of Artificial Sequence: Synthetic oligonucleotide
  Target: LAMA2; (-) strand; PAM type: NNGRRT; PAM sequence: ATGGGT
attattaatgaagggagaga

SEQ ID NO: 19095 - DNA, 20 bp, Artificial Sequence
  Description of Artificial Sequence: Synthetic oligonucleotide
  Target: LAMA2; (-) strand; PAM type: NNGRRT; PAM sequence: GAGAAT
aaccattattaatgaaggga

SEQ ID NO: 19096 - DNA, 20 bp, Artificial Sequence
  Description of Artificial Sequence: Synthetic oligonucleotide
  Target: LAMA2; (-) strand; PAM type: NNGRRT; PAM sequence: AGGAAT
tggcaggctgacttggttta

SEQ ID NO: 19097 - DNA, 20 bp, Artificial Sequence
  Description of Artificial Sequence: Synthetic oligonucleotide
  Target: LAMA2; (-) strand; PAM type: NNGRRT; PAM sequence: AGGAGT
gtttttagtaagtgttgttt

SEQ ID NO: 19098 - DNA, 20 bp, Artificial Sequence
  Description of Artificial Sequence: Synthetic oligonucleotide
  Target: LAMA2; (-) strand; PAM type: NNGRRT; PAM sequence: ATGAGT
cttatttcattcacttcccc

SEQ ID NO: 19099 - DNA, 20 bp, Artificial Sequence
  Description of Artificial Sequence: Synthetic oligonucleotide
  Target: LAMA2; (-) strand; PAM type: NNGRRT; PAM sequence: TTGAAT
atcattctatggcaaatatt

SEQ ID NO: 19100 - DNA, 20 bp, Artificial Sequence
  Description of Artificial Sequence: Synthetic oligonucleotide
  Target: LAMA2; (-) strand; PAM type: NNGRRT; PAM sequence: CTGAAT
atagatagcctaggagaggt

SEQ ID NO: 19101 - DNA, 20 bp, Artificial Sequence
  Description of Artificial Sequence: Synthetic oligonucleotide
  Target: LAMA2; (-) strand; PAM type: NNGRRT; PAM sequence: ATGAAT
cacaaagtaagctatataaa

SEQ ID NO: 19102 - DNA, 20 bp, Artificial Sequence
  Description of Artificial Sequence: Synthetic oligonucleotide
  Target: LAMA2; (-) strand; PAM type: NNGRRT; PAM sequence: GAGGAT
tcattgagctgagagtcttg

SEQ ID NO: 19103 - DNA, 20 bp, Artificial Sequence
  Description of Artificial Sequence: Synthetic oligonucleotide
  Target: LAMA2; (-) strand; PAM type: NNGRRT; PAM sequence: GAGAGT
agttatattatcattgagct

SEQ ID NO: 19104 - DNA, 20 bp, Artificial Sequence
  Description of Artificial Sequence: Synthetic oligonucleotide
  Target: LAMA2; (-) strand; PAM type: NNGRRT; PAM sequence: GAGAAT
tatggatgaaatatttacct

SEQ ID NO: 19105 - DNA, 20 bp, Artificial Sequence
  Description of Artificial Sequence: Synthetic oligonucleotide
  Target: LAMA2; (-) strand; PAM type: NNGRRT; PAM sequence: ATGGAT
cttttaatccttaccagatt

SEQ ID NO: 19106 - DNA, 20 bp, Artificial Sequence
  Description of Artificial Sequence: Synthetic oligonucleotide
  Target: LAMA2; (-) strand; PAM type: NNGRRT; PAM sequence: TAGGAT
atgccatgatatatcagaat

SEQ ID NO: 19107 - DNA, 20 bp, Artificial Sequence
  Description of Artificial Sequence: Synthetic oligonucleotide
  Target: LAMA2; (-) strand; PAM type: NNGRRT; PAM sequence: CAGAAT
ttttctatgccatgatatat

SEQ ID NO: 19108 - DNA, 20 bp, Artificial Sequence
  Description of Artificial Sequence: Synthetic oligonucleotide
  Target: LAMA2; (-) strand; PAM type: NNGRRT; PAM sequence: CAGAAT
caaataactggaaccagtac

SEQ ID NO: 19109 - DNA, 20 bp, Artificial Sequence
  Description of Artificial Sequence: Synthetic oligonucleotide
  Target: LAMA2; (-) strand; PAM type: NNGRRT; PAM sequence: TAGAAT
agaaaagtatccaaaacttt

SEQ ID NO: 19110 - DNA, 20 bp, Artificial Sequence
  Description of Artificial Sequence: Synthetic oligonucleotide
  Target: LAMA2; (-) strand; PAM type: NNGRRT; PAM sequence: CTGGAT
ttattccacagctactttgt

SEQ ID NO: 19111 - DNA, 20 bp, Artificial Sequence
  Description of Artificial Sequence: Synthetic oligonucleotide
  Target: LAMA2; (-) strand; PAM type: NNGRRT; PAM sequence: ACGAGT
taattttaaaactaaagctg

SEQ ID NO: 19112 - DNA, 20 bp, Artificial Sequence
  Description of Artificial Sequence: Synthetic oligonucleotide
  Target: LAMA2; (-) strand; PAM type: NNGRRT; PAM sequence: AGGGAT
acaattaataattgtattcc

SEQ ID NO: 19113 - DNA, 20 bp, Artificial Sequence
  Description of Artificial Sequence: Synthetic oligonucleotide
  Target: LAMA2; (-) strand; PAM type: NNGRRT; PAM sequence: AAGAGT
ggctttgagacttttgagat

SEQ ID NO: 19114 - DNA, 20 bp, Artificial Sequence
  Description of Artificial Sequence: Synthetic oligonucleotide
  Target: LAMA2; (-) strand; PAM type: NNGRRT; PAM sequence: ATGAAT
acacataggcattattggag

SEQ ID NO: 19115 - DNA, 20 bp, Artificial Sequence
  Description of Artificial Sequence: Synthetic oligonucleotide
  Target: LAMA2; (-) strand; PAM type: NNGRRT; PAM sequence: CCGAGT
ggaggtaaattctgtatgta

SEQ ID NO: 19116 - DNA, 20 bp, Artificial Sequence
  Description of Artificial Sequence: Synthetic oligonucleotide
  Target: LAMA2; (-) strand; PAM type: NNGRRT; PAM sequence: TAGAAT
aaagaaaataactgcaaacc

SEQ ID NO: 19117 - DNA, 20 bp, Artificial Sequence
  Description of Artificial Sequence: Synthetic oligonucleotide
  Target: LAMA2; (-) strand; PAM type: NNGRRT; PAM sequence: TCGGAT
gtcactccaaaagatagtaa

SEQ ID NO: 19118 - DNA, 20 bp, Artificial Sequence
  Description of Artificial Sequence: Synthetic oligonucleotide
  Target: LAMA2; (-) strand; PAM type: NNGRRT; PAM sequence: TTGAAT
tgattaactgaaatttaaat

SEQ ID NO: 19119 - DNA, 20 bp, Artificial Sequence
  Description of Artificial Sequence: Synthetic oligonucleotide
  Target: LAMA2; (-) strand; PAM type: NNGRRT; PAM sequence: TGGAAT
tggctagtgtaatggggaaa

SEQ ID NO: 19120 - DNA, 20 bp, Artificial Sequence
  Description of Artificial Sequence: Synthetic oligonucleotide
  Target: LAMA2; (-) strand; PAM type: NNGRRT; PAM sequence: CTGAGT
ctgctagtcccatgtggcta

SEQ ID NO: 19121 - DNA, 20 bp, Artificial Sequence
  Description of Artificial Sequence: Synthetic oligonucleotide
  Target: LAMA2; (-) strand; PAM type: NNGRRT; PAM sequence: GGGAAT
aattagaatcatagagcaga

SEQ ID NO: 19122 - DNA, 20 bp, Artificial Sequence
  Description of Artificial Sequence: Synthetic oligonucleotide
  Target: LAMA2; (-) strand; PAM type: NNGRRT; PAM sequence: TAGAAT
agttccaagtcatttttaat

SEQ ID NO: 19123 - DNA, 20 bp, Artificial Sequence
  Description of Artificial Sequence: Synthetic oligonucleotide
  Target: LAMA2; (-) strand; PAM type: NNGRRT; PAM sequence: GAGAGT
aaaggatgaaaactaaagaa

SEQ ID NO: 19124 - DNA, 20 bp, Artificial Sequence
  Description of Artificial Sequence: Synthetic oligonucleotide
  Target: LAMA2; (-) strand; PAM type: NNGRRT; PAM sequence: AAGGAT
atgaagatacagaaagacaa

SEQ ID NO: 19125 - DNA, 20 bp, Artificial Sequence
  Description of Artificial Sequence: Synthetic oligonucleotide
  Target: LAMA2; (-) strand; PAM type: NNGRRT; PAM sequence: TAGAAT
gtaatccagaagaaaatacc

SEQ ID NO: 19126 - DNA, 20 bp, Artificial Sequence
  Description of Artificial Sequence: Synthetic oligonucleotide
  Target: LAMA2; (-) strand; PAM type: NNGRRT; PAM sequence: GAGAAT
aatatttacatagctgagaa

SEQ ID NO: 19127 - DNA, 20 bp, Artificial Sequence
  Description of Artificial Sequence: Synthetic oligonucleotide
  Target: LAMA2; (-) strand; PAM type: NNGRRT; PAM sequence: ATGAAT
tatatgaaattaagaatcct

SEQ ID NO: 19128 - DNA, 20 bp, Artificial Sequence
  Description of Artificial Sequence: Synthetic oligonucleotide
  Target: LAMA2; (-) strand; PAM type: NNGRRT; PAM sequence: AAGAAT
actgaaaaatatatgaaatt

SEQ ID NO: 19129 - DNA, 20 bp, Artificial Sequence
  Description of Artificial Sequence: Synthetic oligonucleotide
  Target: LAMA2; (-) strand; PAM type: NNGRRT; PAM sequence: CTGGGT
tggcgccactgcactccagc

SEQ ID NO: 19130 - DNA, 20 bp, Artificial Sequence
  Description of Artificial Sequence: Synthetic oligonucleotide
  Target: LAMA2; (-) strand; PAM type: NNGRRT; PAM sequence: TAGAAT
aaatagaatattgaaaattt

SEQ ID NO: 19131 - DNA, 20 bp, Artificial Sequence
  Description of Artificial Sequence: Synthetic oligonucleotide
  Target: LAMA2; (-) strand; PAM type: NNGRRT; PAM sequence: TAGAAT
atgctcaaggagattaaaaa

SEQ ID NO: 19132 - DNA, 20 bp, Artificial Sequence
  Description of Artificial Sequence: Synthetic oligonucleotide
  Target: LAMA2; (-) strand; PAM type: NNGRRT; PAM sequence: TAGAAT
tatccaaaaaggccatatat

SEQ ID NO: 19133 - DNA, 20 bp, Artificial Sequence
  Description of Artificial Sequence: Synthetic oligonucleotide
  Target: LAMA2; (-) strand; PAM type: NNGRRT; PAM sequence: AAGAAT
agaatgtaagacagcataaa

SEQ ID NO: 19134 - DNA, 20 bp, Artificial Sequence
  Description of Artificial Sequence: Synthetic oligonucleotide
  Target: LAMA2; (-) strand; PAM type: NNGRRT; PAM sequence: AAGAAT
acaaagataatcaggcacac

SEQ ID NO: 19135 - DNA, 20 bp, Artificial Sequence
  Description of Artificial Sequence: Synthetic oligonucleotide
  Target: LAMA2; (-) strand; PAM type: NNGRRT; PAM sequence: CAGGAT
gtagcatcagaaagttcaca

SEQ ID NO: 19136 - DNA, 20 bp, Artificial Sequence
  Description of Artificial Sequence: Synthetic oligonucleotide
  Target: LAMA2; (-) strand; PAM type: NNGRRT; PAM sequence: TTGAAT
agaaatttgaatccctaaaa

SEQ ID NO: 19137 - DNA, 20 bp, Artificial Sequence
  Description of Artificial Sequence: Synthetic oligonucleotide
  Target: LAMA2; (-) strand; PAM type: NNGRRT; PAM sequence: TTGAAT
catctgaatgtcccagaaat

SEQ ID NO: 19138 - DNA, 20 bp, Artificial Sequence
  Description of Artificial Sequence: Synthetic oligonucleotide
  Target: LAMA2; (-) strand; PAM type: NNGRRT; PAM sequence: CTGAAT
atagcaatgctttgaatcat

SEQ ID NO: 19139 - DNA, 20 bp, Artificial Sequence
  Description of Artificial Sequence: Synthetic oligonucleotide
  Target: LAMA2; (-) strand; PAM type: NNGRRT; PAM sequence: TTGAAT
cactgggttatagcaatgct

SEQ ID NO: 19140 - DNA, 20 bp, Artificial Sequence
  Description of Artificial Sequence: Synthetic oligonucleotide
  Target: LAMA2; (-) strand; PAM type: NNGRRT; PAM sequence: CTGGGT
tggaattaaagcagctgtca

SEQ ID NO: 19141 - DNA, 20 bp, Artificial Sequence
  Description of Artificial Sequence: Synthetic oligonucleotide
  Target: LAMA2; (-) strand; PAM type: NNGRRT; PAM sequence: TGGAAT
gcatgggaatgagcgtatac

SEQ ID NO: 19142 - DNA, 20 bp, Artificial Sequence
  Description of Artificial Sequence: Synthetic oligonucleotide
  Target: LAMA2; (-) strand; PAM type: NNGRRT; PAM sequence: GGGAAT
actccaaagataagcagcat

SEQ ID NO: 19143 - DNA, 20 bp, Artificial Sequence
  Description of Artificial Sequence: Synthetic oligonucleotide
  Target: LAMA2; (-) strand; PAM type: NNGRRT; PAM sequence: ATGGGT
aagttggattccaggactgc

SEQ ID NO: 19144 - DNA, 20 bp, Artificial Sequence
  Description of Artificial Sequence: Synthetic oligonucleotide
  Target: LAMA2; (-) strand; PAM type: NNGRRT; PAM sequence: TTGGAT
ctgtattaggaggacaaaag

SEQ ID NO: 19145 - DNA, 20 bp, Artificial Sequence
  Description of Artificial Sequence: Synthetic oligonucleotide
  Target: LAMA2; (-) strand; PAM type: NNGRRT; PAM sequence: GAGAGT
agccatgtgagagctatcaa

SEQ ID NO: 19146 - DNA, 20 bp, Artificial Sequence
  Description of Artificial Sequence: Synthetic oligonucleotide
  Target: LAMA2; (-) strand; PAM type: NNGRRT; PAM sequence: CTGGAT
aatgacaacaactagacaaa

SEQ ID NO: 19147 - DNA, 20 bp, Artificial Sequence
  Description of Artificial Sequence: Synthetic oligonucleotide
  Target: LAMA2; (-) strand; PAM type: NNGRRT; PAM sequence: AAGAGT
tttatggtagattatacagt

SEQ ID NO: 19148 - DNA, 20 bp, Artificial Sequence
  Description of Artificial Sequence: Synthetic oligonucleotide
  Target: LAMA2; (-) strand; PAM type: NNGRRT; PAM sequence: GAGGAT
atagctggatgagggaatgt

SEQ ID NO: 19149 - DNA, 20 bp, Artificial Sequence
  Description of Artificial Sequence: Synthetic oligonucleotide
  Target: LAMA2; (-) strand; PAM type: NNGRRT; PAM sequence: GGGAAT
tcctagggatagctggatga

SEQ ID NO: 19150 - DNA, 20 bp, Artificial Sequence
  Description of Artificial Sequence: Synthetic oligonucleotide
  Target: LAMA2; (-) strand; PAM type: NNGRRT; PAM sequence: CTGGAT
gatattattcctagggatag

SEQ ID NO: 19151 - DNA, 20 bp, Artificial Sequence
  Description of Artificial Sequence: Synthetic oligonucleotide
  Target: LAMA2; (-) strand; PAM type: NNGRRT; PAM sequence: AGGGAT
ttatttaagatattattcct

SEQ ID NO: 19152 - DNA, 20 bp, Artificial Sequence
  Description of Artificial Sequence: Synthetic oligonucleotide
  Target: LAMA2; (-) strand; PAM type: NNGRRT; PAM sequence: CTGAAT
attggtaaaatgaatgaaac

SEQ ID NO: 19153 - DNA, 20 bp, Artificial Sequence
  Description of Artificial Sequence: Synthetic oligonucleotide
  Target: LAMA2; (-) strand; PAM type: NNGRRT; PAM sequence: ATGAAT
gaaaaaatgaaattggtaaa

SEQ ID NO: 19154 - DNA, 20 bp, Artificial Sequence
  Description of Artificial Sequence: Synthetic oligonucleotide
  Target: LAMA2; (-) strand; PAM type: NNGRRT; PAM sequence: TTGGAT
aatgcaaaatagtacctgaa

SEQ ID NO: 19155 - DNA, 20 bp, Artificial Sequence
  Description of Artificial Sequence: Synthetic oligonucleotide
  Target: LAMA2; (-) strand; PAM type: NNGRRT; PAM sequence: CTGAAT
gactaaatgcaaaatagtac

SEQ ID NO: 19156 - DNA, 20 bp, Artificial Sequence
  Description of Artificial Sequence: Synthetic oligonucleotide
  Target: LAMA2; (-) strand; PAM type: NNGRRT; PAM sequence: CTGAAT
aaacatcaggcaaacccaaa

SEQ ID NO: 19157 - DNA, 20 bp, Artificial Sequence
  Description of Artificial Sequence: Synthetic oligonucleotide
  Target: LAMA2; (-) strand; PAM type: NNGRRT; PAM sequence: AGGAAT
tcttatttctgacatattta

SEQ ID NO: 19158 - DNA, 20 bp, Artificial Sequence
  Description of Artificial Sequence: Synthetic oligonucleotide
  Target: LAMA2; (-) strand; PAM type: NNGRRT; PAM sequence: AGGAGT
taggaagatttcttgagcct

SEQ ID NO: 19159 - DNA, 20 bp, Artificial Sequence
  Description of Artificial Sequence: Synthetic oligonucleotide
  Target: LAMA2; (-) strand; PAM type: NNGRRT; PAM sequence: AGGAGT
tggaaagatcacttgaggcc

SEQ ID NO: 19160 - DNA, 20 bp, Artificial Sequence
  Description of Artificial Sequence: Synthetic oligonucleotide
  Target: LAMA2; (-) strand; PAM type: NNGRRT; PAM sequence: ATGGGT
atttcataatgccttgttac

SEQ ID NO: 19161 - DNA, 20 bp, Artificial Sequence
  Description of Artificial Sequence: Synthetic oligonucleotide
  Target: LAMA2; (-) strand; PAM type: NNGRRT; PAM sequence: GTGGAT
tgtaataaactttagactca

SEQ ID NO: 19162 - DNA, 20 bp, Artificial Sequence
  Description of Artificial Sequence: Synthetic oligonucleotide
  Target: LAMA2; (-) strand; PAM type: NNGRRT; PAM sequence: TTGAAT
cagaggctgaaattgggggc

SEQ ID NO: 19163 - DNA, 20 bp, Artificial Sequence
  Description of Artificial Sequence: Synthetic oligonucleotide
  Target: LAMA2; (-) strand; PAM type: NNGRRT; PAM sequence: TTGGAT
acatagggcagtattgaagt

SEQ ID NO: 19164 - DNA, 20 bp, Artificial Sequence
  Description of Artificial Sequence: Synthetic oligonucleotide
  Target: LAMA2; (-) strand; PAM type: NNGRRT; PAM sequence: TGGAGT
gggaaacaggtgggagtaac

SEQ ID NO: 19165 - DNA, 20 bp, Artificial Sequence
  Description of Artificial Sequence: Synthetic oligonucleotide
  Target: LAMA2; (-) strand; PAM type: NNGRRT; PAM sequence: GGGAGT
aaccatgaagggaaacaggt

SEQ ID NO: 19166 - DNA, 20 bp, Artificial Sequence
  Description of Artificial Sequence: Synthetic oligonucleotide
  Target: LAMA2; (-) strand; PAM type: NNGRRT; PAM sequence: TGGAGT
ttgatctcttgaaatcaatg

SEQ ID NO: 19167 - DNA, 20 bp, Artificial Sequence
  Description of Artificial Sequence: Synthetic oligonucleotide
  Target: LAMA2; (-) strand; PAM type: NNGRRT; PAM sequence: CAGGGT
aggcctaggatgctaggttt

SEQ ID NO: 19168 - DNA, 20 bp, Artificial Sequence
  Description of Artificial Sequence: Synthetic oligonucleotide
  Target: LAMA2; (-) strand; PAM type: NNGRRT; PAM sequence: TAGGAT
tctccctttgggtgcaggcc

SEQ ID NO: 19169 - DNA, 20 bp, Artificial Sequence
  Description of Artificial Sequence: Synthetic oligonucleotide
  Target: LAMA2; (-) strand; PAM type: NNGRRT; PAM sequence: TTGGGT
aataagcttctcttctccct

SEQ ID NO: 19170 - DNA, 20 bp, Artificial Sequence
  Description of Artificial Sequence: Synthetic oligonucleotide
  Target: LAMA2; (-) strand; PAM type: NNGRRT; PAM sequence: CAGAAT
cttacgattatctcatagct

SEQ ID NO: 19171 - DNA, 20 bp, Artificial Sequence
  Description of Artificial Sequence: Synthetic oligonucleotide
  Target: LAMA2; (-) strand; PAM type: NNGRRT; PAM sequence: CTGGAT
agcctccttctatttgcagc

SEQ ID NO: 19172 - DNA, 20 bp, Artificial Sequence
  Description of Artificial Sequence: Synthetic oligonucleotide
  Target: LAMA2; (-) strand; PAM type: NNGRRT; PAM sequence: TAGGGT
ttgctcaaagcaggacaaag

SEQ ID NO: 19173 - DNA, 20 bp, Artificial Sequence
  Description of Artificial Sequence: Synthetic oligonucleotide
  Target: LAMA2; (-) strand; PAM type: NNGRRT; PAM sequence: CAGGGT
tccaagtaaagccaagttct

SEQ ID NO: 19174 - DNA, 20 bp, Artificial Sequence
  Description of Artificial Sequence: Synthetic oligonucleotide
  Target: LAMA2; (-) strand; PAM type: NNGRRT; PAM sequence: AGGAGT
gaattaaaagttctggtctc

SEQ ID NO: 19175 - DNA, 20 bp, Artificial Sequence
  Description of Artificial Sequence: Synthetic oligonucleotide
  Target: LAMA2; (-) strand; PAM type: NNGRRT; PAM sequence: ATGAAT
atgagcctctgacaaatata

SEQ ID NO: 19176 - DNA, 20 bp, Artificial Sequence
  Description of Artificial Sequence: Synthetic oligonucleotide
  Target: LAMA2; (-) strand; PAM type: NNGRRT; PAM sequence: AAGAGT
atacagacataagaatcacc

SEQ ID NO: 19177 - DNA, 20 bp, Artificial Sequence
  Description of Artificial Sequence: Synthetic oligonucleotide
  Target: LAMA2; (-) strand; PAM type: NNGRRT; PAM sequence: AAGAAT
taagccaggaatacagacat

SEQ ID NO: 19178 - DNA, 20 bp, Artificial Sequence
  Description of Artificial Sequence: Synthetic oligonucleotide
  Target: LAMA2; (-) strand; PAM type: NNGRRT; PAM sequence: AGGAAT
aaatagctgaacattaagcc

SEQ ID NO: 19179 - DNA, 20 bp, Artificial Sequence
  Description of Artificial Sequence: Synthetic oligonucleotide
  Target: LAMA2; (-) strand; PAM type: NNGRRT; PAM sequence: CAGGGT
actggtgccctgttctccta

SEQ ID NO: 19180 - DNA, 20 bp, Artificial Sequence
  Description of Artificial Sequence: Synthetic oligonucleotide
  Target: LAMA2; (-) strand; PAM type: NNGRRT; PAM sequence: TAGAAT
tttcttcagttggaagtagt

SEQ ID NO: 19181 - DNA, 20 bp, Artificial Sequence
  Description of Artificial Sequence: Synthetic oligonucleotide
  Target: LAMA2; (-) strand; PAM type: NNGRRT; PAM sequence: TAGGAT
aaatattataattttaattc

SEQ ID NO: 19182 - DNA, 20 bp, Artificial Sequence
  Description of Artificial Sequence: Synthetic oligonucleotide
  Target: LAMA2; (-) strand; PAM type: NNGRRT; PAM sequence: GTGAGT
aataaattaaaagcaataat

SEQ ID NO: 19183 - DNA, 20 bp, Artificial Sequence
  Description of Artificial Sequence: Synthetic oligonucleotide
  Target: LAMA2; (-) strand; PAM type: NNGRRT; PAM sequence: ACGAAT
gcaaaatcactatggtaacc

SEQ ID NO: 19184 - DNA, 20 bp, Artificial Sequence
  Description of Artificial Sequence: Synthetic oligonucleotide
  Target: LAMA2; (-) strand; PAM type: NNGRRT; PAM sequence: GAGAGT
tccattgagctgcagtccag

SEQ ID NO: 19185 - DNA, 20 bp, Artificial Sequence
  Description of Artificial Sequence: Synthetic oligonucleotide
  Target: LAMA2; (-) strand; PAM type: NNGRRT; PAM sequence: GTGAAT
tgtttcaaagcagaatcaaa

SEQ ID NO: 19186 - DNA, 20 bp, Artificial Sequence
  Description of Artificial Sequence: Synthetic oligonucleotide
  Target: LAMA2; (-) strand; PAM type: NNGRRT; PAM sequence: CAGAAT
aagcctgccatgtttcaaag

SEQ ID NO: 19187 - DNA, 20 bp, Artificial Sequence
  Description of Artificial Sequence: Synthetic oligonucleotide
  Target: LAMA2; (-) strand; PAM type: NNGRRT; PAM sequence: AGGGAT
gatttaatgatggtttctcc

SEQ ID NO: 19188 - DNA, 20 bp, Artificial Sequence
  Description of Artificial Sequence: Synthetic oligonucleotide
  Target: LAMA2; (-) strand; PAM type: NNGRRT; PAM sequence: TTGGGT
aaacattttttaatacagtc

SEQ ID NO: 19189 - DNA, 20 bp, Artificial Sequence
  Description of Artificial Sequence: Synthetic oligonucleotide
  Target: LAMA2; (-) strand; PAM type: NNGRRT; PAM sequence: GAGAAT
ttaacaatgttatatcaaag

SEQ ID NO: 19190 - DNA, 20 bp, Artificial Sequence
  Description of Artificial Sequence: Synthetic oligonucleotide
  Target: LAMA2; (-) strand; PAM type: NNGRRT; PAM sequence: AAGGGT
ctccctaaaggaacaattgc

SEQ ID NO: 19191 - DNA, 20 bp, Artificial Sequence
  Description of Artificial Sequence: Synthetic oligonucleotide
  Target: LAMA2; (-) strand; PAM type: NNGRRT; PAM sequence: AAGAAT
tggccccacattggtctaaa

SEQ ID NO: 19192 - DNA, 20 bp, Artificial Sequence
  Description of Artificial Sequence: Synthetic oligonucleotide
  Target: LAMA2; (-) strand; PAM type: NNGRRT; PAM sequence: CAGAGT
gctgctctgtgtattccaac

SEQ ID NO: 19193 - DNA, 20 bp, Artificial Sequence
  Description of Artificial Sequence: Synthetic oligonucleotide
  Target: LAMA2; (-) strand; PAM type: NNGRRT; PAM sequence: AGGAAT
ctgatcaacaaagaaaaagg

SEQ ID NO: 19194 - DNA, 20 bp, Artificial Sequence
  Description of Artificial Sequence: Synthetic oligonucleotide
  Target: LAMA2; (-) strand; PAM type: NNGRRT; PAM sequence: GGGAGT
ttttttttttggaggagtaa

SEQ ID NO: 19195 - DNA, 20 bp, Artificial Sequence
  Description of Artificial Sequence: Synthetic oligonucleotide
  Target: LAMA2; (-) strand; PAM type: NNGRRT; PAM sequence: AGGAGT
atatttttttttttttttgg

SEQ ID NO: 19196 - DNA, 20 bp, Artificial Sequence
  Description of Artificial Sequence: Synthetic oligonucleotide
  Target: LAMA2; (-) strand; PAM type: NNGRRT; PAM sequence: GTGGAT
cattaatttaacagggattt

SEQ ID NO: 19197 - DNA, 20 bp, Artificial Sequence
  Description of Artificial Sequence: Synthetic oligonucleotide
  Target: LAMA2; (-) strand; PAM type: NNGRRT; PAM sequence: AGGGAT
caatactgcattaatttaac

SEQ ID NO: 19198 - DNA, 20 bp, Artificial Sequence
  Description of Artificial Sequence: Synthetic oligonucleotide
  Target: LAMA2; (-) strand; PAM type: NNGRRT; PAM sequence: CAGGAT
aaatattggtgttttctcct

SEQ ID NO: 19199 - DNA, 20 bp, Artificial Sequence
  Description of Artificial Sequence: Synthetic oligonucleotide
  Target: LAMA2; (-) strand; PAM type: NNGRRT; PAM sequence: GTGGAT
tacccttctgttccatatca

SEQ ID NO: 19200 - DNA, 20 bp, Artificial Sequence
  Description of Artificial Sequence: Synthetic oligonucleotide
  Target: LAMA2; (-) strand; PAM type: NNGRRT; PAM sequence: GAGAGT
atcatatcgtagaggttaaa

SEQ ID NO: 19201 - DNA, 20 bp, Artificial Sequence
  Description of Artificial Sequence: Synthetic oligonucleotide
  Target: LAMA2; (-) strand; PAM type: NNGRRT; PAM sequence: GAGAAT
aatgttagctactgaacctt

SEQ ID NO: 19202 - DNA, 20 bp, Artificial Sequence
  Description of Artificial Sequence: Synthetic oligonucleotide
  Target: LAMA2; (-) strand; PAM type: NNGRRT; PAM sequence: AGGAGT
agctcagtcatttcatagtt

SEQ ID NO: 19203 - DNA, 20 bp, Artificial Sequence
  Description of Artificial Sequence: Synthetic oligonucleotide
  Target: LAMA2; (-) strand; PAM type: NNGRRT; PAM sequence: CTGGAT
ttatttttgtctacttggcc

SEQ ID NO: 19204 - DNA, 20 bp, Artificial Sequence
  Description of Artificial Sequence: Synthetic oligonucleotide
  Target: LAMA2; (-) strand; PAM type: NNGRRT; PAM sequence: ATGAAT
tgcgacaagtattagtatat

SEQ ID NO: 19205 - DNA, 20 bp, Artificial Sequence
  Description of Artificial Sequence: Synthetic oligonucleotide
  Target: LAMA2; (-) strand; PAM type: NNGRRT; PAM sequence: CTGAAT
tctggtgctctgagaataca

SEQ ID NO: 19206 - DNA, 20 bp, Artificial Sequence
  Description of Artificial Sequence: Synthetic oligonucleotide
  Target: LAMA2; (-) strand; PAM type: NNGRRT; PAM sequence: GAGAAT
ttgtacctttctggtgctct

SEQ ID NO: 19207 - DNA, 20 bp, Artificial Sequence
  Description of Artificial Sequence: Synthetic oligonucleotide
  Target: LAMA2; (-) strand; PAM type: NNGRRT; PAM sequence: AAGAAT
ttcatcaaagctaaaaggta

SEQ ID NO: 19208 - DNA, 20 bp, Artificial Sequence
  Description of Artificial Sequence: Synthetic oligonucleotide
  Target: LAMA2; (-) strand; PAM type: NNGRRT; PAM sequence: CAGAAT
tataaatatacatcatttgc

SEQ ID NO: 19209 - DNA, 20 bp, Artificial Sequence
  Description of Artificial Sequence: Synthetic oligonucleotide
  Target: LAMA2; (-) strand; PAM type: NNGRRT; PAM sequence: AAGAGT
tcaaaagctcaaaataagct

SEQ ID NO: 19210 - DNA, 20 bp, Artificial Sequence
  Description of Artificial Sequence: Synthetic oligonucleotide
  Target: LAMA2; (-) strand; PAM type: NNGRRT; PAM sequence: GTGGGT
aatacaagccttctctaaat

SEQ ID NO: 19211 - DNA, 20 bp, Artificial Sequence
  Description of Artificial Sequence: Synthetic oligonucleotide
  Target: LAMA2; (-) strand; PAM type: NNGRRT; PAM sequence: AGGAAT
tgtgtagaggggcgggatta

SEQ ID NO: 19212 - DNA, 20 bp, Artificial Sequence
  Description of Artificial Sequence: Synthetic oligonucleotide
  Target: LAMA2; (-) strand; PAM type: NNGRRT; PAM sequence: CGGGAT
gggtggggtgtgtagagggg

SEQ ID NO: 19213 - DNA, 20 bp, Artificial Sequence
  Description of Artificial Sequence: Synthetic oligonucleotide
  Target: LAMA2; (-) strand; PAM type: NNGRRT; PAM sequence: TGGGGT
ctacagatgggttgaatggg

SEQ ID NO: 19214 - DNA, 20 bp, Artificial Sequence
  Description of Artificial Sequence: Synthetic oligonucleotide
  Target: LAMA2; (-) strand; PAM type: NNGRRT; PAM sequence: ATGGGT
ggaggctacagatgggttga

SEQ ID NO: 19215 - DNA, 20 bp, Artificial Sequence
  Description of Artificial Sequence: Synthetic oligonucleotide
  Target: LAMA2; (-) strand; PAM type: NNGRRT; PAM sequence: TTGAAT
aaagggaggctacagatggg

SEQ ID NO: 19216 - DNA, 20 bp, Artificial Sequence
  Description of Artificial Sequence: Synthetic oligonucleotide
  Target: LAMA2; (-) strand; PAM type: NNGRRT; PAM sequence: ATGGGT
agctgaaagggaggctacag

SEQ ID NO: 19217 - DNA, 20 bp, Artificial Sequence
  Description of Artificial Sequence: Synthetic oligonucleotide
  Target: LAMA2; (-) strand; PAM type: NNGRRT; PAM sequence: TGGGAT
tctgtattgctattagcttt

SEQ ID NO: 19218 - DNA, 20 bp, Artificial Sequence
  Description of Artificial Sequence: Synthetic oligonucleotide
  Target: LAMA2; (-) strand; PAM type: NNGRRT; PAM sequence: GTGGAT
ttgggaagaaatgttggtca

SEQ ID NO: 19219 - DNA, 20 bp, Artificial Sequence
  Description of Artificial Sequence: Synthetic oligonucleotide
  Target: LAMA2; (-) strand; PAM type: NNGRRT; PAM sequence: TTGGAT
gaataacatgtcttaggaac

SEQ ID NO: 19220 - DNA, 20 bp, Artificial Sequence
  Description of Artificial Sequence: Synthetic oligonucleotide
  Target: LAMA2; (-) strand; PAM type: NNGRRT; PAM sequence: AGGAAT
ttcatatagtaaacttttag

SEQ ID NO: 19221 - DNA, 20 bp, Artificial Sequence
  Description of Artificial Sequence: Synthetic oligonucleotide
  Target: LAMA2; (-) strand; PAM type: NNGRRT; PAM sequence: GTGAGT
tgcgttttgaggaatcttct

SEQ ID NO: 19222 - DNA, 20 bp, Artificial Sequence
  Description of Artificial Sequence: Synthetic oligonucleotide
  Target: LAMA2; (-) strand; PAM type: NNGRRT; PAM sequence: AGGAAT
caaatcaggtatgcgttttg

SEQ ID NO: 19223 - DNA, 20 bp, Artificial Sequence
  Description of Artificial Sequence: Synthetic oligonucleotide
  Target: LAMA2; (-) strand; PAM type: NNGRRT; PAM sequence: TTGGAT
cactttttaagtagcttcta

SEQ ID NO: 19224 - DNA, 20 bp, Artificial Sequence
  Description of Artificial Sequence: Synthetic oligonucleotide
  Target: LAMA2; (-) strand; PAM type: NNGRRT; PAM sequence: ATGGAT
attcaaatagtaatgttata

SEQ ID NO: 19225 - DNA, 20 bp, Artificial Sequence
  Description of Artificial Sequence: Synthetic oligonucleotide
  Target: LAMA2; (-) strand; PAM type: NNGRRT; PAM sequence: CAGAAT
cccagcctctgcccccaaca

SEQ ID NO: 19226 - DNA, 20 bp, Artificial Sequence
  Description of Artificial Sequence: Synthetic oligonucleotide
  Target: LAMA2; (-) strand; PAM type: NNGRRT; PAM sequence: ATGGGT
cagtactttgaccacacaac

SEQ ID NO: 19227 - DNA, 20 bp, Artificial Sequence
  Description of Artificial Sequence: Synthetic oligonucleotide
  Target: LAMA2; (-) strand; PAM type: NNGRRT; PAM sequence: ATGGAT
aatgtagtgacattattata

SEQ ID NO: 19228 - DNA, 20 bp, Artificial Sequence
  Description of Artificial Sequence: Synthetic oligonucleotide
  Target: LAMA2; (-) strand; PAM type: NNGRRT; PAM sequence: CAGAAT
atttatgtattaaggcattt

SEQ ID NO: 19229 - DNA, 20 bp, Artificial Sequence
  Description of Artificial Sequence: Synthetic oligonucleotide
  Target: LAMA2; (-) strand; PAM type: NNGRRT; PAM sequence: AAGGAT
caattttaaagacttcataa

SEQ ID NO: 19230 - DNA, 20 bp, Artificial Sequence
  Description of Artificial Sequence: Synthetic oligonucleotide
  Target: LAMA2; (-) strand; PAM type: NNGRRT; PAM sequence: GAGAAT
ataaattttactataagatg

SEQ ID NO: 19231 - DNA, 20 bp, Artificial Sequence
  Description of Artificial Sequence: Synthetic oligonucleotide
  Target: LAMA2; (-) strand; PAM type: NNGRRT; PAM sequence: AAGAAT
ttaataataaaaataacaga

SEQ ID NO: 19232 - DNA, 20 bp, Artificial Sequence
  Description of Artificial Sequence: Synthetic oligonucleotide
  Target: LAMA2; (-) strand; PAM type: NNGRRT; PAM sequence: CTGAGT
caattcagatagaattttac

SEQ ID NO: 19233 - DNA, 20 bp, Artificial Sequence
  Description of Artificial Sequence: Synthetic oligonucleotide
  Target: LAMA2; (-) strand; PAM type: NNGRRT; PAM sequence: TAGAAT
tgatgtcaattcaattcaga

SEQ ID NO: 19234 - DNA, 20 bp, Artificial Sequence
  Description of Artificial Sequence: Synthetic oligonucleotide
  Target: LAMA2; (-) strand; PAM type: NNGRRT; PAM sequence: TGGGAT
agggctgtcttttctgacaa

SEQ ID NO: 19235 - DNA, 20 bp, Artificial Sequence
  Description of Artificial Sequence: Synthetic oligonucleotide
  Target: LAMA2; (-) strand; PAM type: NNGRRT; PAM sequence: TGGGAT
tagcagtttaataaattgaa

SEQ ID NO: 19236 - DNA, 20 bp, Artificial Sequence
  Description of Artificial Sequence: Synthetic oligonucleotide
  Target: LAMA2; (-) strand; PAM type: NNGRRT; PAM sequence: TTGAAT
aagattagcagtttaataaa

SEQ ID NO: 19237 - DNA, 20 bp, Artificial Sequence
  Description of Artificial Sequence: Synthetic oligonucleotide
  Target: LAMA2; (-) strand; PAM type: NNGRRT; PAM sequence: TTGGAT
caatgaaatctgaagttttt

SEQ ID NO: 19238 - DNA, 20 bp, Artificial Sequence
  Description of Artificial Sequence: Synthetic oligonucleotide
  Target: LAMA2; (-) strand; PAM type: NNGRRT; PAM sequence: GTGGAT
aatattaacaatggccaaga

SEQ ID NO: 19239 - DNA, 20 bp, Artificial Sequence
  Description of Artificial Sequence: Synthetic oligonucleotide
  Target: LAMA2; (-) strand; PAM type: NNGRRT; PAM sequence: AAGAGT
gtacaatattaacaatggcc

SEQ ID NO: 19240 - DNA, 20 bp, Artificial Sequence
  Description of Artificial Sequence: Synthetic oligonucleotide
  Target: LAMA2; (-) strand; PAM type: NNGRRT; PAM sequence: ATGAAT
attttctataataaattgca

SEQ ID NO: 19241 - DNA, 20 bp, Artificial Sequence
  Description of Artificial Sequence: Synthetic oligonucleotide
  Target: LAMA2; (-) strand; PAM type: NNGRRT; PAM sequence: CTGAAT
atacacttcagaattgggac

SEQ ID NO: 19242 - DNA, 20 bp, Artificial Sequence
  Description of Artificial Sequence: Synthetic oligonucleotide
  Target: LAMA2; (-) strand; PAM type: NNGRRT; PAM sequence: CAGAAT
ttggtaatctcaatacactt

SEQ ID NO: 19243 - DNA, 20 bp, Artificial Sequence
  Description of Artificial Sequence: Synthetic oligonucleotide
  Target: LAMA2; (-) strand; PAM type: NNGRRT; PAM sequence: GAGAAT
ttcttttctttctttatgta

SEQ ID NO: 19244 - DNA, 20 bp, Artificial Sequence
  Description of Artificial Sequence: Synthetic oligonucleotide
  Target: LAMA2; (-) strand; PAM type: NNGRRT; PAM sequence: ATGAGT
cagattatagatgtcataat

SEQ ID NO: 19245 - DNA, 20 bp, Artificial Sequence
  Description of Artificial Sequence: Synthetic oligonucleotide
  Target: LAMA2; (-) strand; PAM type: NNGRRT; PAM sequence: TGGAAT
catgatctgccattccatca

SEQ ID NO: 19246 - DNA, 20 bp, Artificial Sequence
  Description of Artificial Sequence: Synthetic oligonucleotide
  Target: LAMA2; (-) strand; PAM type: NNGRRT; PAM sequence: GGGAGT
taatcctcttccttttgctt

SEQ ID NO: 19247 - DNA, 20 bp, Artificial Sequence
  Description of Artificial Sequence: Synthetic oligonucleotide
  Target: LAMA2; (-) strand; PAM type: NNGRRT; PAM sequence: CAGAGT
tcagatggaagaatgcatgg

SEQ ID NO: 19248 - DNA, 20 bp, Artificial Sequence
  Description of Artificial Sequence: Synthetic oligonucleotide
  Target: LAMA2; (-) strand; PAM type: NNGRRT; PAM sequence: AAGAAT
ctttggtgaggatcagatgg

SEQ ID NO: 19249 - DNA, 20 bp, Artificial Sequence
  Description of Artificial Sequence: Synthetic oligonucleotide
  Target: LAMA2; (-) strand; PAM type: NNGRRT; PAM sequence: GAGGAT
agcatctccaaggctttggt

SEQ ID NO: 19250 - DNA, 20 bp, Artificial Sequence
  Description of Artificial Sequence: Synthetic oligonucleotide
  Target: LAMA2; (-) strand; PAM type: NNGRRT; PAM sequence: GAGAAT
ttcacctccatctgtaaaat

SEQ ID NO: 19251 - DNA, 20 bp, Artificial Sequence
  Description of Artificial Sequence: Synthetic oligonucleotide
  Target: LAMA2; (-) strand; PAM type: NNGRRT; PAM sequence: TGGAAT
taagtgttccatttatgaag

SEQ ID NO: 19252 - DNA, 20 bp, Artificial Sequence
  Description of Artificial Sequence: Synthetic oligonucleotide
  Target: LAMA2; (-) strand; PAM type: NNGRRT; PAM sequence: GTGGAT
ggtttttccgagtagagatg

SEQ ID NO: 19253 - DNA, 20 bp, Artificial Sequence
  Description of Artificial Sequence: Synthetic oligonucleotide
  Target: LAMA2; (-) strand; PAM type: NNGRRT; PAM sequence: CCGAGT
tgacacacccttgggttttt

SEQ ID NO: 19254 - DNA, 20 bp, Artificial Sequence
  Description of Artificial Sequence: Synthetic oligonucleotide
  Target: LAMA2; (-) strand; PAM type: NNGRRT; PAM sequence: TTGGGT
actgattaactgacacaccc

SEQ ID NO: 19255 - DNA, 20 bp, Artificial Sequence
  Description of Artificial Sequence: Synthetic oligonucleotide
  Target: LAMA2; (-) strand; PAM type: NNGRRT; PAM sequence: AAGGAT
agtgttgaaatagtttccct

SEQ ID NO: 19256 - DNA, 20 bp, Artificial Sequence
  Description of Artificial Sequence: Synthetic oligonucleotide
  Target: LAMA2; (-) strand; PAM type: NNGRRT; PAM sequence: CTGGGT
taatcataaccattccactc

SEQ ID NO: 19257 - DNA, 20 bp, Artificial Sequence
  Description of Artificial Sequence: Synthetic oligonucleotide
  Target: LAMA2; (-) strand; PAM type: NNGRRT; PAM sequence: TAGAAT
aatagtacacatcctcaggc

SEQ ID NO: 19258 - DNA, 20 bp, Artificial Sequence
  Description of Artificial Sequence: Synthetic oligonucleotide
  Target: LAMA2; (-) strand; PAM type: NNGRRT; PAM sequence: CAGAAT
cttatgtactacccaggtag

SEQ ID NO: 19259 - DNA, 20 bp, Artificial Sequence
  Description of Artificial Sequence: Synthetic oligonucleotide
  Target: LAMA2; (-) strand; PAM type: NNGRRT; PAM sequence: TAGAAT
ggatttttgttatccctgat

SEQ ID NO: 19260 - DNA, 20 bp, Artificial Sequence
  Description of Artificial Sequence: Synthetic oligonucleotide
  Target: LAMA2; (-) strand; PAM type: NNGRRT; PAM sequence: TAGGAT
cctttgcaaaataagtatca

SEQ ID NO: 19261 - DNA, 20 bp, Artificial Sequence
  Description of Artificial Sequence: Synthetic oligonucleotide
  Target: LAMA2; (-) strand; PAM type: NNGRRT; PAM sequence: CTGAAT
gaaataaataattctgatta

SEQ ID NO: 19262 - DNA, 20 bp, Artificial Sequence
  Description of Artificial Sequence: Synthetic oligonucleotide
  Target: LAMA2; (-) strand; PAM type: NNGRRT; PAM sequence: TTGAAT
gtttagaaggcacttacaat

SEQ ID NO: 19263 - DNA, 20 bp, Artificial Sequence
  Description of Artificial Sequence: Synthetic oligonucleotide
  Target: LAMA2; (-) strand; PAM type: NNGRRT; PAM sequence: TCGGGT
tcaacataatagtagtaggc

SEQ ID NO: 19264 - DNA, 20 bp, Artificial Sequence
  Description of Artificial Sequence: Synthetic oligonucleotide
  Target: LAMA2; (-) strand; PAM type: NNGRRT; PAM sequence: CAGAGT
tacaatacatataagggtaa

SEQ ID NO: 19265 - DNA, 20 bp, Artificial Sequence
  Description of Artificial Sequence: Synthetic oligonucleotide
  Target: LAMA2; (-) strand; PAM type: NNGRRT; PAM sequence: AAGGGT
tgtgattatacaatacatat

SEQ ID NO: 19266 - DNA, 20 bp, Artificial Sequence
  Description of Artificial Sequence: Synthetic oligonucleotide
  Target: LAMA2; (-) strand; PAM type: NNGRRT; PAM sequence: GTGGAT
gtagtagataagtgctgtaa

SEQ ID NO: 19267 - DNA, 20 bp, Artificial Sequence
  Description of Artificial Sequence: Synthetic oligonucleotide
  Target: LAMA2; (-) strand; PAM type: NNGRRT; PAM sequence: GAGAGT
taaaggtagtttatcctgaa

SEQ ID NO: 19268 - DNA, 20 bp, Artificial Sequence
  Description of Artificial Sequence: Synthetic oligonucleotide
  Target: LAMA2; (-) strand; PAM type: NNGRRT; PAM sequence: AAGAAT
tttttcccttgacataatct

SEQ ID NO: 19269 - DNA, 20 bp, Artificial Sequence
  Description of Artificial Sequence: Synthetic oligonucleotide
  Target: LAMA2; (-) strand; PAM type: NNGRRT; PAM sequence: GAGGAT
tttttctttaaaaagcaata

SEQ ID NO: 19270 - DNA, 20 bp, Artificial Sequence
  Description of Artificial Sequence: Synthetic oligonucleotide
  Target: LAMA2; (-) strand; PAM type: NNGRRT; PAM sequence: ATGGAT
tttatctttctatgagataa

SEQ ID NO: 19271 - DNA, 20 bp, Artificial Sequence
  Description of Artificial Sequence: Synthetic oligonucleotide
  Target: LAMA2; (-) strand; PAM type: NNGRRT; PAM sequence: GTGAGT
cagtaggtgaaataattatg

SEQ ID NO: 19272 - DNA, 20 bp, Artificial Sequence
  Description of Artificial Sequence: Synthetic oligonucleotide
  Target: LAMA2; (-) strand; PAM type: NNGRRT; PAM sequence: CAGGAT
gttggaaaacaattataaaa

SEQ ID NO: 19273 - DNA, 20 bp, Artificial Sequence
  Description of Artificial Sequence: Synthetic oligonucleotide
  Target: LAMA2; (-) strand; PAM type: NNGRRT; PAM sequence: AAGAGT
tgacagagcccctcatgtta

SEQ ID NO: 19274 - DNA, 20 bp, Artificial Sequence
  Description of Artificial Sequence: Synthetic oligonucleotide
  Target: LAMA2; (-) strand; PAM type: NNGRRT; PAM sequence: TAGAAT
attcatttatgacaagaact

SEQ ID NO: 19275 - DNA, 20 bp, Artificial Sequence
  Description of Artificial Sequence: Synthetic oligonucleotide
  Target: LAMA2; (-) strand; PAM type: NNGRRT; PAM sequence: CTGGAT
ctacatccatctcctgccaa

SEQ ID NO: 19276 - DNA, 20 bp, Artificial Sequence
  Description of Artificial Sequence: Synthetic oligonucleotide
  Target: LAMA2; (-) strand; PAM type: NNGRRT; PAM sequence: TAGGAT
tttggcgtttctgtctgcct

SEQ ID NO: 19277 - DNA, 20 bp, Artificial Sequence
  Description of Artificial Sequence: Synthetic oligonucleotide
  Target: LAMA2; (-) strand; PAM type: NNGRRT; PAM sequence: GAGGGT
cttaatggaattaactagta

SEQ ID NO: 19278 - DNA, 20 bp, Artificial Sequence
  Description of Artificial Sequence: Synthetic oligonucleotide
  Target: LAMA2; (-) strand; PAM type: NNGRRT; PAM sequence: TGGAAT
aaatggcccatgttgcttaa

SEQ ID NO: 19279 - DNA, 20 bp, Artificial Sequence
  Description of Artificial Sequence: Synthetic oligonucleotide
  Target: LAMA2; (-) strand; PAM type: NNGRRT; PAM sequence: CAGAGT
acaggctctttctgtggtca

SEQ ID NO: 19280 - DNA, 20 bp, Artificial Sequence
  Description of Artificial Sequence: Synthetic oligonucleotide
  Target: LAMA2; (-) strand; PAM type: NNGRRT; PAM sequence: AAGGGT
ttgagtgtttgtgcaggtag

SEQ ID NO: 19281 - DNA, 20 bp, Artificial Sequence
  Description of Artificial Sequence: Synthetic oligonucleotide
  Target: LAMA2; (-) strand; PAM type: NNGRRT; PAM sequence: TTGAGT
tgagccttggcaaatttcag

SEQ ID NO: 19282 - DNA, 20 bp, Artificial Sequence
  Description of Artificial Sequence: Synthetic oligonucleotide
  Target: LAMA2; (-) strand; PAM type: NNGRRT; PAM sequence: TAGGGT
tatttctagcctcccctctc

SEQ ID NO: 19283 - DNA, 20 bp, Artificial Sequence
  Description of Artificial Sequence: Synthetic oligonucleotide
  Target: LAMA2; (-) strand; PAM type: NNGRRT; PAM sequence: GAGGAT
ggccttaccatggaacagct

SEQ ID NO: 19284 - DNA, 20 bp, Artificial Sequence
  Description of Artificial Sequence: Synthetic oligonucleotide
  Target: LAMA2; (-) strand; PAM type: NNGRRT; PAM sequence: CTGAGT
tgttccaaactatctctcct

SEQ ID NO: 19285 - DNA, 20 bp, Artificial Sequence
  Description of Artificial Sequence: Synthetic oligonucleotide
  Target: LAMA2; (-) strand; PAM type: NNGRRT; PAM sequence: AGGGAT
ctgtgctattttccactgat

SEQ ID NO: 19286 - DNA, 20 bp, Artificial Sequence
  Description of Artificial Sequence: Synthetic oligonucleotide
  Target: LAMA2; (-) strand; PAM type: NNGRRT; PAM sequence: TGGAAT
aaaacaaattttagtatcct

SEQ ID NO: 19287 - DNA, 20 bp, Artificial Sequence
  Description of Artificial Sequence: Synthetic oligonucleotide
  Target: LAMA2; (-) strand; PAM type: NNGRRT; PAM sequence: TGGAGT
atttgatctgcatccaattt

SEQ ID NO: 19288 - DNA, 20 bp, Artificial Sequence
  Description of Artificial Sequence: Synthetic oligonucleotide
  Target: LAMA2; (-) strand; PAM type: NNGRRT; PAM sequence: TGGGAT
ttatgctgtacaagttctct

SEQ ID NO: 19289 - DNA, 20 bp, Artificial Sequence
  Description of Artificial Sequence: Synthetic oligonucleotide
  Target: LAMA2; (-) strand; PAM type: NNGRRT; PAM sequence: CAGAAT
cccaaattctctttccagac

SEQ ID NO: 19290 - DNA, 20 bp, Artificial Sequence
  Description of Artificial Sequence: Synthetic oligonucleotide
  Target: LAMA2; (-) strand; PAM type: NNGRRT; PAM sequence: CAGAAT
gttgtagtgacagtattttt

SEQ ID NO: 19291 - DNA, 20 bp, Artificial Sequence
  Description of Artificial Sequence: Synthetic oligonucleotide
  Target: LAMA2; (-) strand; PAM type: NNGRRT; PAM sequence: CAGAGT
ctgcagctgtgggttctgga

SEQ ID NO: 19292 - DNA, 20 bp, Artificial Sequence
  Description of Artificial Sequence: Synthetic oligonucleotide
  Target: LAMA2; (-) strand; PAM type: NNGRRT; PAM sequence: GTGGGT
gtttactcatttctgcagct

SEQ ID NO: 19293 - DNA, 20 bp, Artificial Sequence
  Description of Artificial Sequence: Synthetic oligonucleotide
  Target: LAMA2; (-) strand; PAM type: NNGRRT; PAM sequence: TTGAAT
aacaagaatgtcatttagtt

SEQ ID NO: 19294 - DNA, 20 bp, Artificial Sequence
  Description of Artificial Sequence: Synthetic oligonucleotide
  Target: LAMA2; (-) strand; PAM type: NNGRRT; PAM sequence: AAGAAT
tcgtatcaatgggaactaac

SEQ ID NO: 19295 - DNA, 20 bp, Artificial Sequence
  Description of Artificial Sequence: Synthetic oligonucleotide
  Target: LAMA2; (-) strand; PAM type: NNGRRT; PAM sequence: GTGAGT
gttttcctttagggaattgt

SEQ ID NO: 19296 - DNA, 20 bp, Artificial Sequence
  Description of Artificial Sequence: Synthetic oligonucleotide
  Target: LAMA2; (-) strand; PAM type: NNGRRT; PAM sequence: GGGAAT
ctttttgtagttttccttta

SEQ ID NO: 19297 - DNA, 20 bp, Artificial Sequence
  Description of Artificial Sequence: Synthetic oligonucleotide
  Target: LAMA2; (-) strand; PAM type: NNGRRT; PAM sequence: CTGGAT
gaaaacattcattcttatca

SEQ ID NO: 19298 - DNA, 20 bp, Artificial Sequence
  Description of Artificial Sequence: Synthetic oligonucleotide
  Target: LAMA2; (-) strand; PAM type: NNGRRT; PAM sequence: TAGAGT
aaatgtctgcacataaaata

SEQ ID NO: 19299 - DNA, 20 bp, Artificial Sequence
  Description of Artificial Sequence: Synthetic oligonucleotide
  Target: LAMA2; (-) strand; PAM type: NNGRRT; PAM sequence: AGGAGT
aggagtggggaaatgtacaa

SEQ ID NO: 19300 - DNA, 20 bp, Artificial Sequence
  Description of Artificial Sequence: Synthetic oligonucleotide
  Target: LAMA2; (-) strand; PAM type: NNGRRT; PAM sequence: AGGAGT
tgtttatgtgatgtaaacgg

SEQ ID NO: 19301 - DNA, 20 bp, Artificial Sequence
  Description of Artificial Sequence: Synthetic oligonucleotide
  Target: LAMA2; (-) strand; PAM type: NNGRRT; PAM sequence: CAGAAT
aagctagctagttcactaat

SEQ ID NO: 19302 - DNA, 20 bp, Artificial Sequence
  Description of Artificial Sequence: Synthetic oligonucleotide
  Target: LAMA2; (-) strand; PAM type: NNGRRT; PAM sequence: ATGAAT
ggtgtagctgtagtacataa

SEQ ID NO: 19303 - DNA, 20 bp, Artificial Sequence
  Description of Artificial Sequence: Synthetic oligonucleotide
  Target: LAMA2; (-) strand; PAM type: NNGRRT; PAM sequence: TGGGAT
tattttgttaccgatttttc

SEQ ID NO: 19304 - DNA, 20 bp, Artificial Sequence
  Description of Artificial Sequence: Synthetic oligonucleotide
  Target: LAMA2; (-) strand; PAM type: NNGRRT; PAM sequence: TAGAAT
tggattttaaaatttaaatc

SEQ ID NO: 19305 - DNA, 20 bp, Artificial Sequence
  Description of Artificial Sequence: Synthetic oligonucleotide
  Target: LAMA2; (-) strand; PAM type: NNGRRT; PAM sequence: GTGGAT
tgtgttattaatattcttat

SEQ ID NO: 19306 - DNA, 20 bp, Artificial Sequence
  Description of Artificial Sequence: Synthetic oligonucleotide
  Target: LAMA2; (-) strand; PAM type: NNGRRT; PAM sequence: GAGGGT
gaggaagtatatagatctct

SEQ ID NO: 19307 - DNA, 20 bp, Artificial Sequence
  Description of Artificial Sequence: Synthetic oligonucleotide
  Target: LAMA2; (-) strand; PAM type: NNGRRT; PAM sequence: TTGGAT
attttgcttctgtgttgttt

SEQ ID NO: 19308 - DNA, 20 bp, Artificial Sequence
  Description of Artificial Sequence: Synthetic oligonucleotide
  Target: LAMA2; (-) strand; PAM type: NNGRRT; PAM sequence: TTGAGT
aaaattgggaatttcctggc

SEQ ID NO: 19309 - DNA, 20 bp, Artificial Sequence
  Description of Artificial Sequence: Synthetic oligonucleotide
  Target: LAMA2; (-) strand; PAM type: NNGRRT; PAM sequence: GGGAAT
taaaatagagttgcaaaatt

SEQ ID NO: 19310 - DNA, 20 bp, Artificial Sequence
  Description of Artificial Sequence: Synthetic oligonucleotide
  Target: LAMA2; (-) strand; PAM type: NNGRRT; PAM sequence: TAGAGT
atctctcttaaatgataaaa

SEQ ID NO: 19311 - DNA, 20 bp, Artificial Sequence
  Description of Artificial Sequence: Synthetic oligonucleotide
  Target: LAMA2; (-) strand; PAM type: NNGRRT; PAM sequence: CAGAAT
gatgctacaaaatgataatc

SEQ ID NO: 19312 - DNA, 20 bp, Artificial Sequence
  Description of Artificial Sequence: Synthetic oligonucleotide
  Target: LAMA2; (-) strand; PAM type: NNGRRT; PAM sequence: ATGAAT
cttaaccatgtctctttaaa

SEQ ID NO: 19313 - DNA, 20 bp, Artificial Sequence
  Description of Artificial Sequence: Synthetic oligonucleotide
  Target: LAMA2; (-) strand; PAM type: NNGRRT; PAM sequence: TTGAAT
tttcctaaggaatttaggaa

SEQ ID NO: 19314 - DNA, 20 bp, Artificial Sequence
  Description of Artificial Sequence: Synthetic oligonucleotide
  Target: LAMA2; (-) strand; PAM type: NNGRRT; PAM sequence: AGGAAT
ttgtgtttcctaaggaattt

SEQ ID NO: 19315 - DNA, 20 bp, Artificial Sequence
  Description of Artificial Sequence: Synthetic oligonucleotide
  Target: LAMA2; (-) strand; PAM type: NNGRRT; PAM sequence: AGGAAT
aacatggtttgtgtttccta

SEQ ID NO: 19316 - DNA, 20 bp, Artificial Sequence
  Description of Artificial Sequence: Synthetic oligonucleotide
  Target: LAMA2; (-) strand; PAM type: NNGRRT; PAM sequence: AAGAGT
gatgcggaaactaaacttca

SEQ ID NO: 19317 - DNA, 20 bp, Artificial Sequence
  Description of Artificial Sequence: Synthetic oligonucleotide
  Target: LAMA2; (-) strand; PAM type: NNGRRT; PAM sequence: TCGGAT
ttattacatctgcaccttag

SEQ ID NO: 19318 - DNA, 20 bp, Artificial Sequence
  Description of Artificial Sequence: Synthetic oligonucleotide
  Target: LAMA2; (-) strand; PAM type: NNGRRT; PAM sequence: AAGAAT
actcaaagagcaagtttcta

SEQ ID NO: 19319 - DNA, 20 bp, Artificial Sequence
  Description of Artificial Sequence: Synthetic oligonucleotide
  Target: LAMA2; (-) strand; PAM type: NNGRRT; PAM sequence: ATGAAT
tgcacattgcatttaattta

SEQ ID NO: 19320 - DNA, 20 bp, Artificial Sequence
  Description of Artificial Sequence: Synthetic oligonucleotide
  Target: LAMA2; (-) strand; PAM type: NNGRRT; PAM sequence: GAGAGT
aggagacaaacaaaatcact

SEQ ID NO: 19321 - DNA, 20 bp, Artificial Sequence
  Description of Artificial Sequence: Synthetic oligonucleotide
  Target: LAMA2; (-) strand; PAM type: NNGRRT; PAM sequence: GTGAAT
accaaatttcatcttttaag

SEQ ID NO: 19322 - DNA, 20 bp, Artificial Sequence
  Description of Artificial Sequence: Synthetic oligonucleotide
  Target: LAMA2; (-) strand; PAM type: NNGRRT; PAM sequence: GTGAAT
ttaaaatataatacaactaa

SEQ ID NO: 19323 - DNA, 20 bp, Artificial Sequence
  Description of Artificial Sequence: Synthetic oligonucleotide
  Target: LAMA2; (-) strand; PAM type: NNGRRT; PAM sequence: ATGAAT
ttttaatctgtgactataac

SEQ ID NO: 19324 - DNA, 20 bp, Artificial Sequence
  Description of Artificial Sequence: Synthetic oligonucleotide
  Target: LAMA2; (-) strand; PAM type: NNGRRT; PAM sequence: CAGAAT
atattgaaaattactgtttt

SEQ ID NO: 19325 - DNA, 20 bp, Artificial Sequence
  Description of Artificial Sequence: Synthetic oligonucleotide
  Target: LAMA2; (-) strand; PAM type: NNGRRT; PAM sequence: ATGGAT
tattgagcaccaaccttgct

SEQ ID NO: 19326 - DNA, 20 bp, Artificial Sequence
  Description of Artificial Sequence: Synthetic oligonucleotide
  Target: LAMA2; (-) strand; PAM type: NNGRRT; PAM sequence: TTGAAT
attctgcattaaattacaag

SEQ ID NO: 19327 - DNA, 20 bp, Artificial Sequence
  Description of Artificial Sequence: Synthetic oligonucleotide
  Target: LAMA2; (-) strand; PAM type: NNGRRT; PAM sequence: GAGAAT
gactgcattaaatttgctct

SEQ ID NO: 19328 - DNA, 20 bp, Artificial Sequence
  Description of Artificial Sequence: Synthetic oligonucleotide
  Target: LAMA2; (-) strand; PAM type: NNGRRT; PAM sequence: GAGAAT
tcattgagtaaaaaatttaa

SEQ ID NO: 19329 - DNA, 20 bp, Artificial Sequence
  Description of Artificial Sequence: Synthetic oligonucleotide
  Target: LAMA2; (-) strand; PAM type: NNGRRT; PAM sequence: TTGAGT
cagagacacatgaatcatca

SEQ ID NO: 19330 - DNA, 20 bp, Artificial Sequence
  Description of Artificial Sequence: Synthetic oligonucleotide
  Target: LAMA2; (-) strand; PAM type: NNGRRT; PAM sequence: ATGAAT
tcttagtttctcagagacac

SEQ ID NO: 19331 - DNA, 20 bp, Artificial Sequence
  Description of Artificial Sequence: Synthetic oligonucleotide
  Target: LAMA2; (-) strand; PAM type: NNGRRT; PAM sequence: CAGAAT
gttagactatcccaaaagca

SEQ ID NO: 19332 - DNA, 20 bp, Artificial Sequence
  Description of Artificial Sequence: Synthetic oligonucleotide
  Target: LAMA2; (-) strand; PAM type: NNGRRT; PAM sequence: ATGAAT
cccatcccctgtactccttc

SEQ ID NO: 19333 - DNA, 20 bp, Artificial Sequence
  Description of Artificial Sequence: Synthetic oligonucleotide
  Target: LAMA2; (-) strand; PAM type: NNGRRT; PAM sequence: GAGAGT
tgcctgcacatctgacattt

SEQ ID NO: 19334 - DNA, 20 bp, Artificial Sequence
  Description of Artificial Sequence: Synthetic oligonucleotide
  Target: LAMA2; (-) strand; PAM type: NNGRRT; PAM sequence: GAGAAT
ctgtcaagtaatttaactct

SEQ ID NO: 19335 - DNA, 20 bp, Artificial Sequence
  Description of Artificial Sequence: Synthetic oligonucleotide
  Target: LAMA2; (-) strand; PAM type: NNGRRT; PAM sequence: ACGGAT
aagactacctggcaacaaat

SEQ ID NO: 19336 - DNA, 20 bp, Artificial Sequence
  Description of Artificial Sequence: Synthetic oligonucleotide
  Target: LAMA2; (-) strand; PAM type: NNGRRT; PAM sequence: AGGAGT
ggccgcctctctgcttttgt

SEQ ID NO: 19337 - DNA, 20 bp, Artificial Sequence
  Description of Artificial Sequence: Synthetic oligonucleotide
  Target: LAMA2; (-) strand; PAM type: NNGRRT; PAM sequence: GGGAAT
tggcacaaggcatgtgatcg

SEQ ID NO: 19338 - DNA, 20 bp, Artificial Sequence
  Description of Artificial Sequence: Synthetic oligonucleotide
  Target: LAMA2; (-) strand; PAM type: NNGRRT; PAM sequence: TAGAAT
gttacaagatgcaaggcatt

SEQ ID NO: 19339 - DNA, 20 bp, Artificial Sequence
  Description of Artificial Sequence: Synthetic oligonucleotide
  Target: LAMA2; (-) strand; PAM type: NNGRRT; PAM sequence: ATGAGT
gaggttactgtaaaggttta

SEQ ID NO: 19340 - DNA, 20 bp, Artificial Sequence
  Description of Artificial Sequence: Synthetic oligonucleotide
  Target: LAMA2; (-) strand; PAM type: NNGRRT; PAM sequence: AAGAGT
atttgcaaaatgggaacaac

SEQ ID NO: 19341 - DNA, 20 bp, Artificial Sequence
  Description of Artificial Sequence: Synthetic oligonucleotide
  Target: LAMA2; (-) strand; PAM type: NNGRRT; PAM sequence: CTGGGT
acgcagactataccatcagc

SEQ ID NO: 19342 - DNA, 20 bp, Artificial Sequence
  Description of Artificial Sequence: Synthetic oligonucleotide
  Target: LAMA2; (-) strand; PAM type: NNGRRT; PAM sequence: GAGGGT
tatgcaaacacaggcagttt

SEQ ID NO: 19343 - DNA, 20 bp, Artificial Sequence
  Description of Artificial Sequence: Synthetic oligonucleotide
  Target: LAMA2; (-) strand; PAM type: NNGRRT; PAM sequence: AAGAAT
tcctacataagatgagtcta

SEQ ID NO: 19344 - DNA, 20 bp, Artificial Sequence
  Description of Artificial Sequence: Synthetic oligonucleotide
  Target: LAMA2; (-) strand; PAM type: NNGRRT; PAM sequence: ATGAGT
cactattcctcctacataag

SEQ ID NO: 19345 - DNA, 20 bp, Artificial Sequence
  Description of Artificial Sequence: Synthetic oligonucleotide
  Target: LAMA2; (-) strand; PAM type: NNGRRT; PAM sequence: ATGGGT
agtcacactgatgttctttc

SEQ ID NO: 19346 - DNA, 20 bp, Artificial Sequence
  Description of Artificial Sequence: Synthetic oligonucleotide
  Target: LAMA2; (-) strand; PAM type: NNGRRT; PAM sequence: GGGAGT
tcattatcagatatttggca

SEQ ID NO: 19347 - DNA, 20 bp, Artificial Sequence
  Description of Artificial Sequence: Synthetic oligonucleotide
  Target: LAMA2; (-) strand; PAM type: NNGRRT; PAM sequence: TAGAAT
gttacagagactacgagtga

SEQ ID NO: 19348 - DNA, 20 bp, Artificial Sequence
  Description of Artificial Sequence: Synthetic oligonucleotide
  Target: LAMA2; (-) strand; PAM type: NNGRRT; PAM sequence: ACGAGT
actaggaggttacagagact

SEQ ID NO: 19349 - DNA, 20 bp, Artificial Sequence
  Description of Artificial Sequence: Synthetic oligonucleotide
  Target: LAMA2; (-) strand; PAM type: NNGRRT; PAM sequence: AGGAAT
agtgagtggatagaggaaga

SEQ ID NO: 19350 - DNA, 20 bp, Artificial Sequence
  Description of Artificial Sequence: Synthetic oligonucleotide
  Target: LAMA2; (-) strand; PAM type: NNGRRT; PAM sequence: GTGGAT
ttgatatcacaataaagtga

SEQ ID NO: 19351 - DNA, 20 bp, Artificial Sequence
  Description of Artificial Sequence: Synthetic oligonucleotide
  Target: LAMA2; (-) strand; PAM type: NNGRRT; PAM sequence: GTGAGT
tattttgatatcacaataaa

SEQ ID NO: 19352 - DNA, 20 bp, Artificial Sequence
  Description of Artificial Sequence: Synthetic oligonucleotide
  Target: LAMA2; (-) strand; PAM type: NNGRRT; PAM sequence: AAGGAT
cagatagctttaaaatctcc

SEQ ID NO: 19353 - DNA, 20 bp, Artificial Sequence
  Description of Artificial Sequence: Synthetic oligonucleotide
  Target: LAMA2; (-) strand; PAM type: NNGRRT; PAM sequence: CAGGAT
tattaaagttgtattaaaga

SEQ ID NO: 19354 - DNA, 20 bp, Artificial Sequence
  Description of Artificial Sequence: Synthetic oligonucleotide
  Target: LAMA2; (-) strand; PAM type: NNGRRT; PAM sequence: TAGGGT
caacagcccatcaataccac

SEQ ID NO: 19355 - DNA, 20 bp, Artificial Sequence
  Description of Artificial Sequence: Synthetic oligonucleotide
  Target: LAMA2; (-) strand; PAM type: NNGRRT; PAM sequence: ATGGAT
gttcctcactcttacacatc

SEQ ID NO: 19356 - DNA, 20 bp, Artificial Sequence
  Description of Artificial Sequence: Synthetic oligonucleotide
  Target: LAMA2; (-) strand; PAM type: NNGRRT; PAM sequence: GAGGAT
gcataaaaaatgaaatctag

SEQ ID NO: 19357 - DNA, 20 bp, Artificial Sequence
  Description of Artificial Sequence: Synthetic oligonucleotide
  Target: LAMA2; (-) strand; PAM type: NNGRRT; PAM sequence: GAGGAT
caaatcataaacaccatgta

SEQ ID NO: 19358 - DNA, 20 bp, Artificial Sequence
  Description of Artificial Sequence: Synthetic oligonucleotide
  Target: LAMA2; (-) strand; PAM type: NNGRRT; PAM sequence: TGGAAT
gcagtataattacatttcag

SEQ ID NO: 19359 - DNA, 20 bp, Artificial Sequence
  Description of Artificial Sequence: Synthetic oligonucleotide
  Target: LAMA2; (-) strand; PAM type: NNGRRT; PAM sequence: AAGAGT
atttacataagtattaatgg

SEQ ID NO: 19360 - DNA, 20 bp, Artificial Sequence
  Description of Artificial Sequence: Synthetic oligonucleotide
  Target: LAMA2; (-) strand; PAM type: NNGRRT; PAM sequence: GAGAAT
tactcaggaggctgaggcag

SEQ ID NO: 19361 - DNA, 20 bp, Artificial Sequence
  Description of Artificial Sequence: Synthetic oligonucleotide
  Target: LAMA2; (-) strand; PAM type: NNGRRT; PAM sequence: ATGGGT
tttcttaaattggtcatatc

SEQ ID NO: 19362 - DNA, 20 bp, Artificial Sequence
  Description of Artificial Sequence: Synthetic oligonucleotide
  Target: LAMA2; (-) strand; PAM type: NNGRRT; PAM sequence: TGGAAT
catatctgagggactcaggc

SEQ ID NO: 19363 - DNA, 20 bp, Artificial Sequence
  Description of Artificial Sequence: Synthetic oligonucleotide
  Target: LAMA2; (-) strand; PAM type: NNGRRT; PAM sequence: ATGGAT
attttacaaatgattacatt

SEQ ID NO: 19364 - DNA, 20 bp, Artificial Sequence
  Description of Artificial Sequence: Synthetic oligonucleotide
  Target: LAMA2; (-) strand; PAM type: NNGRRT; PAM sequence: ATGAAT
taaaaccctgtaagctcaaa

SEQ ID NO: 19365 - DNA, 20 bp, Artificial Sequence
  Description of Artificial Sequence: Synthetic oligonucleotide
  Target: LAMA2; (-) strand; PAM type: NNGRRT; PAM sequence: GAGGAT
gcaaaaggttgtgtataccc

SEQ ID NO: 19366 - DNA, 20 bp, Artificial Sequence
  Description of Artificial Sequence: Synthetic oligonucleotide
  Target: LAMA2; (-) strand; PAM type: NNGRRT; PAM sequence: TTGGAT
gaagaagacattagacacat

SEQ ID NO: 19367 - DNA, 20 bp, Artificial Sequence
  Description of Artificial Sequence: Synthetic oligonucleotide
  Target: LAMA2; (-) strand; PAM type: NNGRRT; PAM sequence: AGGAAT
ttttttaaataaaggctaga

SEQ ID NO: 19368 - DNA, 20 bp, Artificial Sequence
  Description of Artificial Sequence: Synthetic oligonucleotide
  Target: LAMA2; (-) strand; PAM type: NNGRRT; PAM sequence: GAGGGT
aacggaacaagcacagtgat

SEQ ID NO: 19369 - DNA, 20 bp, Artificial Sequence
  Description of Artificial Sequence: Synthetic oligonucleotide
  Target: LAMA2; (-) strand; PAM type: NNGRRT; PAM sequence: CTGAAT
ttttttaaatatctttctta

SEQ ID NO: 19370 - DNA, 20 bp, Artificial Sequence
  Description of Artificial Sequence: Synthetic oligonucleotide
  Target: LAMA2; (-) strand; PAM type: NNGRRT; PAM sequence: GAGAGT
atggtaaacaacagcatcaa

SEQ ID NO: 19371 - DNA, 20 bp, Artificial Sequence
  Description of Artificial Sequence: Synthetic oligonucleotide
  Target: LAMA2; (-) strand; PAM type: NNGRRT; PAM sequence: GGGAAT
atacaaagttgctaatccat

SEQ ID NO: 19372 - DNA, 20 bp, Artificial Sequence
  Description of Artificial Sequence: Synthetic oligonucleotide
  Target: LAMA2; (-) strand; PAM type: NNGRRT; PAM sequence: TGGAGT
gtaaaattcaggaagatctt

SEQ ID NO: 19373 - DNA, 20 bp, Artificial Sequence
  Description of Artificial Sequence: Synthetic oligonucleotide
  Target: LAMA2; (-) strand; PAM type: NNGRRT; PAM sequence: ATGAAT
ttgactcgttaattttaatt

SEQ ID NO: 19374 - DNA, 20 bp, Artificial Sequence
  Description of Artificial Sequence: Synthetic oligonucleotide
  Target: LAMA2; (-) strand; PAM type: NNGRRT; PAM sequence: TGGGAT
ctattacctcagggaagatt

SEQ ID NO: 19375 - DNA, 20 bp, Artificial Sequence
  Description of Artificial Sequence: Synthetic oligonucleotide
  Target: LAMA2; (-) strand; PAM type: NNGRRT; PAM sequence: ATGAGT
ttgcaataggcatcatgata

SEQ ID NO: 19376 - DNA, 20 bp, Artificial Sequence
  Description of Artificial Sequence: Synthetic oligonucleotide
  Target: LAMA2; (-) strand; PAM type: NNGRRT; PAM sequence: AAGAGT
atcttttttcacataatttt

SEQ ID NO: 19377 - DNA, 20 bp, Artificial Sequence
  Description of Artificial Sequence: Synthetic oligonucleotide
  Target: LAMA2; (-) strand; PAM type: NNGRRT; PAM sequence: AAGAGT
ggtatgatggaaggtctaca

SEQ ID NO: 19378 - DNA, 20 bp, Artificial Sequence
  Description of Artificial Sequence: Synthetic oligonucleotide
  Target: LAMA2; (-) strand; PAM type: NNGRRT; PAM sequence: AGGAAT
catgaaacatttggtataca

SEQ ID NO: 19379 - DNA, 20 bp, Artificial Sequence
  Description of Artificial Sequence: Synthetic oligonucleotide
  Target: LAMA2; (-) strand; PAM type: NNGRRT; PAM sequence: CAGAGT
cagaacgaaatccagttgca

SEQ ID NO: 19380 - DNA, 20 bp, Artificial Sequence
  Description of Artificial Sequence: Synthetic oligonucleotide
  Target: LAMA2; (-) strand; PAM type: NNGRRT; PAM sequence: CTGAAT
agcttgctgggccatagttc

SEQ ID NO: 19381 - DNA, 20 bp, Artificial Sequence
  Description of Artificial Sequence: Synthetic oligonucleotide
  Target: LAMA2; (-) strand; PAM type: NNGRRT; PAM sequence: AAGAAT
atttccaaagtcatgaagca

SEQ ID NO: 19382 - DNA, 20 bp, Artificial Sequence
  Description of Artificial Sequence: Synthetic oligonucleotide
  Target: LAMA2; (-) strand; PAM type: NNGRRT; PAM sequence: CAGGGT
cagtattctgtctagtgata

SEQ ID NO: 19383 - DNA, 20 bp, Artificial Sequence
  Description of Artificial Sequence: Synthetic oligonucleotide
  Target: LAMA2; (-) strand; PAM type: NNGRRT; PAM sequence: AGGAAT
tgaatccacacaaaaagaca

SEQ ID NO: 19384 - DNA, 20 bp, Artificial Sequence
  Description of Artificial Sequence: Synthetic oligonucleotide
  Target: LAMA2; (-) strand; PAM type: NNGRRT; PAM sequence: CTGAAT
ttcagtaaacctggagattg

SEQ ID NO: 19385 - DNA, 20 bp, Artificial Sequence
  Description of Artificial Sequence: Synthetic oligonucleotide
  Target: LAMA2; (-) strand; PAM type: NNGRRT; PAM sequence: GGGAAT
ccggagtatatcaacacagt

SEQ ID NO: 19386 - DNA, 20 bp, Artificial Sequence
  Description of Artificial Sequence: Synthetic oligonucleotide
  Target: LAMA2; (-) strand; PAM type: NNGRRT; PAM sequence: CGGAGT
gtggagctatgtgggggaac

SEQ ID NO: 19387 - DNA, 20 bp, Artificial Sequence
  Description of Artificial Sequence: Synthetic oligonucleotide
  Target: LAMA2; (-) strand; PAM type: NNGRRT; PAM sequence: CGGGGT
tgcatgaggttgggagttag

SEQ ID NO: 19388 - DNA, 20 bp, Artificial Sequence
  Description of Artificial Sequence: Synthetic oligonucleotide
  Target: LAMA2; (-) strand; PAM type: NNGRRT; PAM sequence: GGGAGT
gtggagctatgcatgaggtt

SEQ ID NO: 19389 - DNA, 20 bp, Artificial Sequence
  Description of Artificial Sequence: Synthetic oligonucleotide
  Target: LAMA2; (-) strand; PAM type: NNGRRT; PAM sequence: GTGGAT
ttttgttcttcatccttttt

SEQ ID NO: 19390 - DNA, 20 bp, Artificial Sequence
  Description of Artificial Sequence: Synthetic oligonucleotide
  Target: LAMA2; (-) strand; PAM type: NNGRRT; PAM sequence: TTGAAT
cccggcctcgcagtcccatt

SEQ ID NO: 19391 - DNA, 20 bp, Artificial Sequence
  Description of Artificial Sequence: Synthetic oligonucleotide
  Target: LAMA2; (-) strand; PAM type: NNGRRT; PAM sequence: CAGGGT
tggatgttttttagtagaga

SEQ ID NO: 19392 - DNA, 20 bp, Artificial Sequence
  Description of Artificial Sequence: Synthetic oligonucleotide
  Target: LAMA2; (-) strand; PAM type: NNGRRT; PAM sequence: TTGGAT
ccactatgcctggctaattt

SEQ ID NO: 19393 - DNA, 20 bp, Artificial Sequence
  Description of Artificial Sequence: Synthetic oligonucleotide
  Target: LAMA2; (-) strand; PAM type: NNGRRT; PAM sequence: TGGGAT
gcctcagcctcccaagtagc

SEQ ID NO: 19394 - DNA, 20 bp, Artificial Sequence
  Description of Artificial Sequence: Synthetic oligonucleotide
  Target: LAMA2; (-) strand; PAM type: NNGRRT; PAM sequence: CAGAGT
ctttttttttttttttgaga

SEQ ID NO: 19395 - DNA, 20 bp, Artificial Sequence
  Description of Artificial Sequence: Synthetic oligonucleotide
  Target: LAMA2; (-) strand; PAM type: NNGRRT; PAM sequence: CTGGAT
tatatatatgtgtgagaagg

SEQ ID NO: 19396 - DNA, 20 bp, Artificial Sequence
  Description of Artificial Sequence: Synthetic oligonucleotide
  Target: LAMA2; (-) strand; PAM type: NNGRRT; PAM sequence: TTGAAT
agatcctgatttcaattgct

SEQ ID NO: 19397 - DNA, 20 bp, Artificial Sequence
  Description of Artificial Sequence: Synthetic oligonucleotide
  Target: LAMA2; (-) strand; PAM type: NNGRRT; PAM sequence: ATGAAT
ctattgtgaataatgctaaa

SEQ ID NO: 19398 - DNA, 20 bp, Artificial Sequence
  Description of Artificial Sequence: Synthetic oligonucleotide
  Target: LAMA2; (-) strand; PAM type: NNGRRT; PAM sequence: GTGAAT
gcttccatatcttgactatt

SEQ ID NO: 19399 - DNA, 20 bp, Artificial Sequence
  Description of Artificial Sequence: Synthetic oligonucleotide
  Target: LAMA2; (-) strand; PAM type: NNGRRT; PAM sequence: CAGGAT
gtccacattgcctgaaatgg

SEQ ID NO: 19400 - DNA, 20 bp, Artificial Sequence
  Description of Artificial Sequence: Synthetic oligonucleotide
  Target: LAMA2; (-) strand; PAM type: NNGRRT; PAM sequence: CTGAGT
accattctactctcatgttt

SEQ ID NO: 19401 - DNA, 20 bp, Artificial Sequence
  Description of Artificial Sequence: Synthetic oligonucleotide
  Target: LAMA2; (-) strand; PAM type: NNGRRT; PAM sequence: ATGAGT
tatttgatgtatacaaccta

SEQ ID NO: 19402 - DNA, 20 bp, Artificial Sequence
  Description of Artificial Sequence: Synthetic oligonucleotide
  Target: LAMA2; (-) strand; PAM type: NNGRRT; PAM sequence: CTGAAT
agatgtgccaagctttctat

SEQ ID NO: 19403 - DNA, 20 bp, Artificial Sequence
  Description of Artificial Sequence: Synthetic oligonucleotide
  Target: LAMA2; (-) strand; PAM type: NNGRRT; PAM sequence: ATGAGT
catctctctcttcccaagct

SEQ ID NO: 19404 - DNA, 20 bp, Artificial Sequence
  Description of Artificial Sequence: Synthetic oligonucleotide
  Target: LAMA2; (-) strand; PAM type: NNGRRT; PAM sequence: ATGGGT
atgggttcaaatcttttctt

SEQ ID NO: 19405 - DNA, 20 bp, Artificial Sequence
  Description of Artificial Sequence: Synthetic oligonucleotide
  Target: LAMA2; (-) strand; PAM type: NNGRRT; PAM sequence: ATGGGT
gaagaggaaccctcagctta

SEQ ID NO: 19406 - DNA, 20 bp, Artificial Sequence
  Description of Artificial Sequence: Synthetic oligonucleotide
  Target: LAMA2; (-) strand; PAM type: NNGRRT; PAM sequence: GTGGGT
agctgatgcctccactcaca

SEQ ID NO: 19407 - DNA, 20 bp, Artificial Sequence
  Description of Artificial Sequence: Synthetic oligonucleotide
  Target: LAMA2; (-) strand; PAM type: NNGRRT; PAM sequence: TGGGAT
gaaaaagattgcaaagggtc

SEQ ID NO: 19408 - DNA, 20 bp, Artificial Sequence
  Description of Artificial Sequence: Synthetic oligonucleotide
  Target: LAMA2; (-) strand; PAM type: NNGRRT; PAM sequence: AAGGGT
tttttatgaaaaagattgca

SEQ ID NO: 19409 - DNA, 20 bp, Artificial Sequence
  Description of Artificial Sequence: Synthetic oligonucleotide
  Target: LAMA2; (-) strand; PAM type: NNGRRT; PAM sequence: GTGAAT
ggtggtggttgcacaactct

SEQ ID NO: 19410 - DNA, 20 bp, Artificial Sequence
  Description of Artificial Sequence: Synthetic oligonucleotide
  Target: LAMA2; (-) strand; PAM type: NNGRRT; PAM sequence: TTGGAT
gttgttgaaatgatctaaaa

SEQ ID NO: 19411 - DNA, 20 bp, Artificial Sequence
  Description of Artificial Sequence: Synthetic oligonucleotide
  Target: LAMA2; (-) strand; PAM type: NNGRRT; PAM sequence: TTGAGT
aacgtgtacaaggtttcttt

SEQ ID NO: 19412 - DNA, 20 bp, Artificial Sequence
  Description of Artificial Sequence: Synthetic oligonucleotide
  Target: LAMA2; (-) strand; PAM type: NNGRRT; PAM sequence: AGGAAT
gattttcagggagtgggtac

SEQ ID NO: 19413 - DNA, 20 bp, Artificial Sequence
  Description of Artificial Sequence: Synthetic oligonucleotide
  Target: LAMA2; (-) strand; PAM type: NNGRRT; PAM sequence: GTGGGT
agcaagcagattttcaggga

SEQ ID NO: 19414 - DNA, 20 bp, Artificial Sequence
  Description of Artificial Sequence: Synthetic oligonucleotide
  Target: LAMA2; (-) strand; PAM type: NNGRRT; PAM sequence: GGGAGT
ctagagcaagcagattttca

SEQ ID NO: 19415 - DNA, 20 bp, Artificial Sequence
  Description of Artificial Sequence: Synthetic oligonucleotide
  Target: LAMA2; (-) strand; PAM type: NNGRRT; PAM sequence: CCGAGT
ccaagccactatcatttgtc

SEQ ID NO: 19416 - DNA, 20 bp, Artificial Sequence
  Description of Artificial Sequence: Synthetic oligonucleotide
  Target: LAMA2; (-) strand; PAM type: NNGRRT; PAM sequence: CAGAAT
agcatttctcatctgaattc

SEQ ID NO: 19417 - DNA, 20 bp, Artificial Sequence
  Description of Artificial Sequence: Synthetic oligonucleotide
  Target: LAMA2; (-) strand; PAM type: NNGRRT; PAM sequence: CTGAAT
ctttaagcagcatttctcat

SEQ ID NO: 19418 - DNA, 20 bp, Artificial Sequence
  Description of Artificial Sequence: Synthetic oligonucleotide
  Target: LAMA2; (-) strand; PAM type: NNGRRT; PAM sequence: CTGGGT
tctaggtcttcttgtacttc

SEQ ID NO: 19419 - DNA, 20 bp, Artificial Sequence
  Description of Artificial Sequence: Synthetic oligonucleotide
  Target: LAMA2; (-) strand; PAM type: NNGRRT; PAM sequence: GAGAAT
ttattttcacatccaacaaa

SEQ ID NO: 19420 - DNA, 20 bp, Artificial Sequence
  Description of Artificial Sequence: Synthetic oligonucleotide
  Target: LAMA2; (-) strand; PAM type: NNGRRT; PAM sequence: TAGAAT
tcattttcttaggaagcaaa

SEQ ID NO: 19421 - DNA, 20 bp, Artificial Sequence
  Description of Artificial Sequence: Synthetic oligonucleotide
  Target: LAMA2; (-) strand; PAM type: NNGRRT; PAM sequence: TGGAAT
tataatatatgaatgcaatg

SEQ ID NO: 19422 - DNA, 20 bp, Artificial Sequence
  Description of Artificial Sequence: Synthetic oligonucleotide
  Target: LAMA2; (-) strand; PAM type: NNGRRT; PAM sequence: ATGAAT
acaaagtgatgttataatat

SEQ ID NO: 19423 - DNA, 20 bp, Artificial Sequence
  Description of Artificial Sequence: Synthetic oligonucleotide
  Target: LAMA2; (-) strand; PAM type: NNGRRT; PAM sequence: TGGGGT
tttctaattatgtaaattta

SEQ ID NO: 19424 - DNA, 20 bp, Artificial Sequence
  Description of Artificial Sequence: Synthetic oligonucleotide
  Target: LAMA2; (-) strand; PAM type: NNGRRT; PAM sequence: ATGGGT
tttatggtgtaggtttaaat

SEQ ID NO: 19425 - DNA, 20 bp, Artificial Sequence
  Description of Artificial Sequence: Synthetic oligonucleotide
  Target: LAMA2; (-) strand; PAM type: NNGRRT; PAM sequence: CAGAAT
ttactgaaaacagcagcagg

SEQ ID NO: 19426 - DNA, 20 bp, Artificial Sequence
  Description of Artificial Sequence: Synthetic oligonucleotide
  Target: LAMA2; (-) strand; PAM type: NNGRRT; PAM sequence: CTGGAT
tcatcaacgtttattactat

SEQ ID NO: 19427 - DNA, 20 bp, Artificial Sequence
  Description of Artificial Sequence: Synthetic oligonucleotide
  Target: LAMA2; (-) strand; PAM type: NNGRRT; PAM sequence: TAGAAT
tattgtaaaagtcttaccag

SEQ ID NO: 19428 - DNA, 20 bp, Artificial Sequence
  Description of Artificial Sequence: Synthetic oligonucleotide
  Target: LAMA2; (-) strand; PAM type: NNGRRT; PAM sequence: TTGGGT
ttaacacttgatattcaaaa

SEQ ID NO: 19429 - DNA, 20 bp, Artificial Sequence
  Description of Artificial Sequence: Synthetic oligonucleotide
  Target: LAMA2; (-) strand; PAM type: NNGRRT; PAM sequence: CTGAAT
taacatctgagggataaact

SEQ ID NO: 19430 - DNA, 20 bp, Artificial Sequence
  Description of Artificial Sequence: Synthetic oligonucleotide
  Target: LAMA2; (-) strand; PAM type: NNGRRT; PAM sequence: AGGGAT
tatgcttgaaataacatctg

SEQ ID NO: 19431 - DNA, 20 bp, Artificial Sequence
  Description of Artificial Sequence: Synthetic oligonucleotide
  Target: LAMA2; (-) strand; PAM type: NNGRRT; PAM sequence: AAGGAT
cggatcttaaatatatattc

SEQ ID NO: 19432 - DNA, 20 bp, Artificial Sequence
  Description of Artificial Sequence: Synthetic oligonucleotide
  Target: LAMA2; (-) strand; PAM type: NNGRRT; PAM sequence: TCGGAT
gcaactgtgcccagtcccta

SEQ ID NO: 19433 - DNA, 20 bp, Artificial Sequence
  Description of Artificial Sequence: Synthetic oligonucleotide
  Target: LAMA2; (-) strand; PAM type: NNGRRT; PAM sequence: CAGGGT
tttctttttttcttttgaga

SEQ ID NO: 19434 - DNA, 20 bp, Artificial Sequence
  Description of Artificial Sequence: Synthetic oligonucleotide
  Target: LAMA2; (-) strand; PAM type: NNGRRT; PAM sequence: GTGAGT
tacttttagtgcacagcatg

SEQ ID NO: 19435 - DNA, 20 bp, Artificial Sequence
  Description of Artificial Sequence: Synthetic oligonucleotide
  Target: LAMA2; (-) strand; PAM type: NNGRRT; PAM sequence: AAGAAT
gggcacaaaatctcagttaa

SEQ ID NO: 19436 - DNA, 20 bp, Artificial Sequence
  Description of Artificial Sequence: Synthetic oligonucleotide
  Target: LAMA2; (-) strand; PAM type: NNGRRT; PAM sequence: GGGAAT
ttacagaggctgagggctgt

SEQ ID NO: 19437 - DNA, 20 bp, Artificial Sequence
  Description of Artificial Sequence: Synthetic oligonucleotide
  Target: LAMA2; (-) strand; PAM type: NNGRRT; PAM sequence: GTGAGT
caatcaaattcttagaagga

SEQ ID NO: 19438 - DNA, 20 bp, Artificial Sequence
  Description of Artificial Sequence: Synthetic oligonucleotide
  Target: LAMA2; (-) strand; PAM type: NNGRRT; PAM sequence: AGGAGT
aaaacaatcaaattcttaga

SEQ ID NO: 19439 - DNA, 20 bp, Artificial Sequence
  Description of Artificial Sequence: Synthetic oligonucleotide
  Target: LAMA2; (-) strand; PAM type: NNGRRT; PAM sequence: ATGGAT
acctgtccatcaacagatga

SEQ ID NO: 19440 - DNA, 20 bp, Artificial Sequence
  Description of Artificial Sequence: Synthetic oligonucleotide
  Target: LAMA2; (-) strand; PAM type: NNGRRT; PAM sequence: ATGAAT
atcaacctgtccatcaacag

SEQ ID NO: 19441 - DNA, 20 bp, Artificial Sequence
  Description of Artificial Sequence: Synthetic oligonucleotide
  Target: LAMA2; (-) strand; PAM type: NNGRRT; PAM sequence: TAGAAT
ttttccaaaacaactaaaag

SEQ ID NO: 19442 - DNA, 20 bp, Artificial Sequence
  Description of Artificial Sequence: Synthetic oligonucleotide
  Target: LAMA2; (-) strand; PAM type: NNGRRT; PAM sequence: TGGAGT
agccattatggaaaactaca

SEQ ID NO: 19443 - DNA, 20 bp, Artificial Sequence
  Description of Artificial Sequence: Synthetic oligonucleotide
  Target: LAMA2; (-) strand; PAM type: NNGRRT; PAM sequence: GGGAAT
aatccttgtacactgttggt

SEQ ID NO: 19444 - DNA, 20 bp, Artificial Sequence
  Description of Artificial Sequence: Synthetic oligonucleotide
  Target: LAMA2; (-) strand; PAM type: NNGRRT; PAM sequence: CAGAAT
tggcgagaatatggaaaaaa

SEQ ID NO: 19445 - DNA, 20 bp, Artificial Sequence
  Description of Artificial Sequence: Synthetic oligonucleotide
  Target: LAMA2; (-) strand; PAM type: NNGRRT; PAM sequence: GAGAAT
agaagataacaaatgttggc

SEQ ID NO: 19446 - DNA, 20 bp, Artificial Sequence
  Description of Artificial Sequence: Synthetic oligonucleotide
  Target: LAMA2; (-) strand; PAM type: NNGRRT; PAM sequence: CAGAAT
agatatcatctcacacctgt

SEQ ID NO: 19447 - DNA, 20 bp, Artificial Sequence
  Description of Artificial Sequence: Synthetic oligonucleotide
  Target: LAMA2; (-) strand; PAM type: NNGRRT; PAM sequence: CTGAAT
attaaaaatgagcaaggaag

SEQ ID NO: 19448 - DNA, 20 bp, Artificial Sequence
  Description of Artificial Sequence: Synthetic oligonucleotide
  Target: LAMA2; (-) strand; PAM type: NNGRRT; PAM sequence: AAGAGT
ttaatatccacaaatatata

SEQ ID NO: 19449 - DNA, 20 bp, Artificial Sequence
  Description of Artificial Sequence: Synthetic oligonucleotide
  Target: LAMA2; (-) strand; PAM type: NNGRRT; PAM sequence: ATGAAT
acaatgtgaagagacaaact

SEQ ID NO: 19450 - DNA, 20 bp, Artificial Sequence
  Description of Artificial Sequence: Synthetic oligonucleotide
  Target: LAMA2; (-) strand; PAM type: NNGRRT; PAM sequence: TTGGGT
caaaagtaaaaacaaacaaa

SEQ ID NO: 19451 - DNA, 20 bp, Artificial Sequence
  Description of Artificial Sequence: Synthetic oligonucleotide
  Target: LAMA2; (-) strand; PAM type: NNGRRT; PAM sequence: TTGAAT
ttgatctgggtaataatgtt

SEQ ID NO: 19452 - DNA, 20 bp, Artificial Sequence
  Description of Artificial Sequence: Synthetic oligonucleotide
  Target: LAMA2; (-) strand; PAM type: NNGRRT; PAM sequence: CTGGGT
agaaagtatatgacattgat

SEQ ID NO: 19453 - DNA, 20 bp, Artificial Sequence
  Description of Artificial Sequence: Synthetic oligonucleotide
  Target: LAMA2; (-) strand; PAM type: NNGRRT; PAM sequence: ATGAAT
tatacaaaactcaattcgaa

SEQ ID NO: 19454 - DNA, 20 bp, Artificial Sequence
  Description of Artificial Sequence: Synthetic oligonucleotide
  Target: LAMA2; (-) strand; PAM type: NNGRRT; PAM sequence: AAGAAT
aactaggtatccacatgcag

SEQ ID NO: 19455 - DNA, 20 bp, Artificial Sequence
  Description of Artificial Sequence: Synthetic oligonucleotide
  Target: LAMA2; (-) strand; PAM type: NNGRRT; PAM sequence: ATGAAT
agaaaaggatagtctgttca

SEQ ID NO: 19456 - DNA, 20 bp, Artificial Sequence
  Description of Artificial Sequence: Synthetic oligonucleotide
  Target: LAMA2; (-) strand; PAM type: NNGRRT; PAM sequence: AAGGAT
ctaagaatacacaatgagaa

SEQ ID NO: 19457 - DNA, 20 bp, Artificial Sequence
  Description of Artificial Sequence: Synthetic oligonucleotide
  Target: LAMA2; (-) strand; PAM type: NNGRRT; PAM sequence: AAGAAT
ttatttttgacaaagatgct

SEQ ID NO: 19458 - DNA, 20 bp, Artificial Sequence
  Description of Artificial Sequence: Synthetic oligonucleotide
  Target: LAMA2; (-) strand; PAM type: NNGRRT; PAM sequence: AAGAAT
atcctgtgttcatggattgg

SEQ ID NO: 19459 - DNA, 20 bp, Artificial Sequence
  Description of Artificial Sequence: Synthetic oligonucleotide
  Target: LAMA2; (-) strand; PAM type: NNGRRT; PAM sequence: ATGGAT
tggaaagatatcctgtgttc

SEQ ID NO: 19460 - DNA, 20 bp, Artificial Sequence
  Description of Artificial Sequence: Synthetic oligonucleotide
  Target: LAMA2; (-) strand; PAM type: NNGRRT; PAM sequence: ATGAAT
tgaaagaaattgaagaaggc

SEQ ID NO: 19461 - DNA, 20 bp, Artificial Sequence
  Description of Artificial Sequence: Synthetic oligonucleotide
  Target: LAMA2; (-) strand; PAM type: NNGRRT; PAM sequence: AGGAGT
cttaggaataaatttaacca

SEQ ID NO: 19462 - DNA, 20 bp, Artificial Sequence
  Description of Artificial Sequence: Synthetic oligonucleotide
  Target: LAMA2; (-) strand; PAM type: NNGRRT; PAM sequence: AGGAAT
ataaaaaagattaaatgctt

SEQ ID NO: 19463 - DNA, 20 bp, Artificial Sequence
  Description of Artificial Sequence: Synthetic oligonucleotide
  Target: LAMA2; (-) strand; PAM type: NNGRRT; PAM sequence: TGGAGT
tgccatctatgaaatatact

SEQ ID NO: 19464 - DNA, 20 bp, Artificial Sequence
  Description of Artificial Sequence: Synthetic oligonucleotide
  Target: LAMA2; (-) strand; PAM type: NNGRRT; PAM sequence: AAGGAT
taaatgccatttacagaata

SEQ ID NO: 19465 - DNA, 20 bp, Artificial Sequence
  Description of Artificial Sequence: Synthetic oligonucleotide
  Target: LAMA2; (-) strand; PAM type: NNGRRT; PAM sequence: CAGAAT
tactatataaatgccattta

SEQ ID NO: 19466 - DNA, 20 bp, Artificial Sequence
  Description of Artificial Sequence: Synthetic oligonucleotide
  Target: LAMA2; (-) strand; PAM type: NNGRRT; PAM sequence: AAGGAT
taagaaagaaactggcagcc

SEQ ID NO: 19467 - DNA, 20 bp, Artificial Sequence
  Description of Artificial Sequence: Synthetic oligonucleotide
  Target: LAMA2; (-) strand; PAM type: NNGRRT; PAM sequence: AAGAGT
ctttcagcttcagtatcctt

SEQ ID NO: 19468 - DNA, 20 bp, Artificial Sequence
  Description of Artificial Sequence: Synthetic oligonucleotide
  Target: LAMA2; (-) strand; PAM type: NNGRRT; PAM sequence: CAGAAT
cacgtatttcctccatcacc

SEQ ID NO: 19469 - DNA, 20 bp, Artificial Sequence
  Description of Artificial Sequence: Synthetic oligonucleotide
  Target: LAMA2; (-) strand; PAM type: NNGRRT; PAM sequence: CAGAGT
agatcacaaaaattaaaggt

SEQ ID NO: 19470 - DNA, 20 bp, Artificial Sequence
  Description of Artificial Sequence: Synthetic oligonucleotide
  Target: LAMA2; (-) strand; PAM type: NNGRRT; PAM sequence: TGGGGT
ctctttcaaaataattattt

SEQ ID NO: 19471 - DNA, 20 bp, Artificial Sequence
  Description of Artificial Sequence: Synthetic oligonucleotide
  Target: LAMA2; (-) strand; PAM type: NNGRRT; PAM sequence: ATGAGT
tccagagtttataaattcaa

SEQ ID NO: 19472 - DNA, 20 bp, Artificial Sequence
  Description of Artificial Sequence: Synthetic oligonucleotide
  Target: LAMA2; (-) strand; PAM type: NNGRRT; PAM sequence: CAGAGT
taattttaaaataagcattc

SEQ ID NO: 19473 - DNA, 20 bp, Artificial Sequence
  Description of Artificial Sequence: Synthetic oligonucleotide
  Target: LAMA2; (-) strand; PAM type: NNGRRT; PAM sequence: TTGAGT
atgcaccactctggttttac

SEQ ID NO: 19474 - DNA, 20 bp, Artificial Sequence
  Description of Artificial Sequence: Synthetic oligonucleotide
  Target: LAMA2; (-) strand; PAM type: NNGRRT; PAM sequence: TAGGAT
tatgccttattctcaatttg

SEQ ID NO: 19475 - DNA, 20 bp, Artificial Sequence
  Description of Artificial Sequence: Synthetic oligonucleotide
  Target: LAMA2; (-) strand; PAM type: NNGRRT; PAM sequence: TGGGAT
gcctcggcctcccaaagtgc

SEQ ID NO: 19476 - DNA, 20 bp, Artificial Sequence
  Description of Artificial Sequence: Synthetic oligonucleotide
  Target: LAMA2; (-) strand; PAM type: NNGRRT; PAM sequence: CGGGAT
cggggtttcaccgttttagc

SEQ ID NO: 19477 - DNA, 20 bp, Artificial Sequence
  Description of Artificial Sequence: Synthetic oligonucleotide
  Target: LAMA2; (-) strand; PAM type: NNGRRT; PAM sequence: CGGGGT
ttttgtatttttagtagaga

SEQ ID NO: 19478 - DNA, 20 bp, Artificial Sequence
  Description of Artificial Sequence: Synthetic oligonucleotide
  Target: LAMA2; (-) strand; PAM type: NNGRRT; PAM sequence: CCGGGT
ctcactgcaagctccgcctc

SEQ ID NO: 19479 - DNA, 20 bp, Artificial Sequence
  Description of Artificial Sequence: Synthetic oligonucleotide
  Target: LAMA2; (-) strand; PAM type: NNGRRT; PAM sequence: CGGGAT
cccaggctggagtgcagtgg

SEQ ID NO: 19480 - DNA, 20 bp, Artificial Sequence
  Description of Artificial Sequence: Synthetic oligonucleotide
  Target: LAMA2; (-) strand; PAM type: NNGRRT; PAM sequence: TGGAGT
tctcgctctgtcgcccaggc

SEQ ID NO: 19481 - DNA, 20 bp, Artificial Sequence
  Description of Artificial Sequence: Synthetic oligonucleotide
  Target: LAMA2; (-) strand; PAM type: NNGRRT; PAM sequence: CGGAAT
ttttttttttttttttgaga

SEQ ID NO: 19482 - DNA, 20 bp, Artificial Sequence
  Description of Artificial Sequence: Synthetic oligonucleotide
  Target: LAMA2; (-) strand; PAM type: NNGRRT; PAM sequence: CTGAGT
gcccctttaaaattatttta

SEQ ID NO: 19483 - DNA, 20 bp, Artificial Sequence
  Description of Artificial Sequence: Synthetic oligonucleotide
  Target: LAMA2; (-) strand; PAM type: NNGRRT; PAM sequence: TGGAAT
ttataattaagctctttcac

SEQ ID NO: 19484 - DNA, 20 bp, Artificial Sequence
  Description of Artificial Sequence: Synthetic oligonucleotide
  Target: LAMA2; (-) strand; PAM type: NNGRRT; PAM sequence: TGGGGT
tgactagtgctagtatgtgg

SEQ ID NO: 19485 - DNA, 20 bp, Artificial Sequence
  Description of Artificial Sequence: Synthetic oligonucleotide
  Target: LAMA2; (-) strand; PAM type: NNGRRT; PAM sequence: CAGAGT
cacttatattcacagtgaac

SEQ ID NO: 19486 - DNA, 20 bp, Artificial Sequence
  Description of Artificial Sequence: Synthetic oligonucleotide
  Target: LAMA2; (-) strand; PAM type: NNGRRT; PAM sequence: GTGAGT
gtcttttaagaaaaagaaaa

SEQ ID NO: 19487 - DNA, 20 bp, Artificial Sequence
  Description of Artificial Sequence: Synthetic oligonucleotide
  Target: LAMA2; (-) strand; PAM type: NNGRRT; PAM sequence: CAGAAT
tccagtgaatatttattgcc

SEQ ID NO: 19488 - DNA, 20 bp, Artificial Sequence
  Description of Artificial Sequence: Synthetic oligonucleotide
  Target: LAMA2; (-) strand; PAM type: NNGRRT; PAM sequence: GTGAAT
aggaatacgctgtaagtcca

SEQ ID NO: 19489 - DNA, 20 bp, Artificial Sequence
  Description of Artificial Sequence: Synthetic oligonucleotide
  Target: LAMA2; (-) strand; PAM type: NNGRRT; PAM sequence: AGGAAT
gaacttggttccttaaaaaa

SEQ ID NO: 19490 - DNA, 20 bp, Artificial Sequence
  Description of Artificial Sequence: Synthetic oligonucleotide
  Target: LAMA2; (-) strand; PAM type: NNGRRT; PAM sequence: AAGAGT
tgaatgttgctgttgggctt

SEQ ID NO: 19491 - DNA, 20 bp, Artificial Sequence
  Description of Artificial Sequence: Synthetic oligonucleotide
  Target: LAMA2; (-) strand; PAM type: NNGRRT; PAM sequence: ATGAAT
gtgtaattaggaaaattata

SEQ ID NO: 19492 - DNA, 20 bp, Artificial Sequence
  Description of Artificial Sequence: Synthetic oligonucleotide
  Target: LAMA2; (-) strand; PAM type: NNGRRT; PAM sequence: GGGAGT
ctttcttagcaaaaagaaaa

SEQ ID NO: 19493 - DNA, 20 bp, Artificial Sequence
  Description of Artificial Sequence: Synthetic oligonucleotide
  Target: LAMA2; (-) strand; PAM type: NNGRRT; PAM sequence: AAGAAT
tttgtaatatgctttcccag

SEQ ID NO: 19494 - DNA, 20 bp, Artificial Sequence
  Description of Artificial Sequence: Synthetic oligonucleotide
  Target: LAMA2; (-) strand; PAM type: NNGRRT; PAM sequence: CAGGGT
tgctgccaagttcacagaat

SEQ ID NO: 19495 - DNA, 20 bp, Artificial Sequence
  Description of Artificial Sequence: Synthetic oligonucleotide
  Target: LAMA2; (-) strand; PAM type: NNGRRT; PAM sequence: CAGAAT
tacatttgctgccaagttca

SEQ ID NO: 19496 - DNA, 20 bp, Artificial Sequence
  Description of Artificial Sequence: Synthetic oligonucleotide
  Target: LAMA2; (-) strand; PAM type: NNGRRT; PAM sequence: CTGAAT
caatcatccaggggccaggg

SEQ ID NO: 19497 - DNA, 20 bp, Artificial Sequence
  Description of Artificial Sequence: Synthetic oligonucleotide
  Target: LAMA2; (-) strand; PAM type: NNGRRT; PAM sequence: AAGAAT
cagcatgaatgaaaggtaaa

SEQ ID NO: 19498 - DNA, 20 bp, Artificial Sequence
  Description of Artificial Sequence: Synthetic oligonucleotide
  Target: LAMA2; (-) strand; PAM type: NNGRRT; PAM sequence: ATGAAT
ttcctcttgacaaacacagc

SEQ ID NO: 19499 - DNA, 20 bp, Artificial Sequence
  Description of Artificial Sequence: Synthetic oligonucleotide
  Target: LAMA2; (-) strand; PAM type: NNGRRT; PAM sequence: ATGAAT
aatattacaactcaagaaaa

SEQ ID NO: 19500 - DNA, 20 bp, Artificial Sequence
  Description of Artificial Sequence: Synthetic oligonucleotide
  Target: LAMA2; (-) strand; PAM type: NNGRRT; PAM sequence: CAGGAT
tattttctgtcgggtccatg

SEQ ID NO: 19501 - DNA, 20 bp, Artificial Sequence
  Description of Artificial Sequence: Synthetic oligonucleotide
  Target: LAMA2; (-) strand; PAM type: NNGRRT; PAM sequence: TCGGGT
actcaggaccttattttctg

SEQ ID NO: 19502 - DNA, 20 bp, Artificial Sequence
  Description of Artificial Sequence: Synthetic oligonucleotide
  Target: LAMA2; (-) strand; PAM type: NNGRRT; PAM sequence: GGGAGT
gtgttgatggttagctggca

SEQ ID NO: 19503 - DNA, 20 bp, Artificial Sequence
  Description of Artificial Sequence: Synthetic oligonucleotide
  Target: LAMA2; (-) strand; PAM type: NNGRRT; PAM sequence: CAGAGT
ccctagttccttcaaagaaa

SEQ ID NO: 19504 - DNA, 20 bp, Artificial Sequence
  Description of Artificial Sequence: Synthetic oligonucleotide
  Target: LAMA2; (-) strand; PAM type: NNGRRT; PAM sequence: TAGGAT
tcatctatttactagttttg

SEQ ID NO: 19505 - DNA, 20 bp, Artificial Sequence
  Description of Artificial Sequence: Synthetic oligonucleotide
  Target: LAMA2; (-) strand; PAM type: NNGRRT; PAM sequence: TTGGAT
taccattattctgtacagag

SEQ ID NO: 19506 - DNA, 20 bp, Artificial Sequence
  Description of Artificial Sequence: Synthetic oligonucleotide
  Target: LAMA2; (-) strand; PAM type: NNGRRT; PAM sequence: CAGAGT
gttcctaccattattctgta

SEQ ID NO: 19507 - DNA, 20 bp, Artificial Sequence
  Description of Artificial Sequence: Synthetic oligonucleotide
  Target: LAMA2; (-) strand; PAM type: NNGRRT; PAM sequence: AGGGAT
acagaagaacgtgatggaga

SEQ ID NO: 19508 - DNA, 20 bp, Artificial Sequence
  Description of Artificial Sequence: Synthetic oligonucleotide
  Target: LAMA2; (-) strand; PAM type: NNGRRT; PAM sequence: GGGAGT
tgtagaattattgacatctg

SEQ ID NO: 19509 - DNA, 20 bp, Artificial Sequence
  Description of Artificial Sequence: Synthetic oligonucleotide
  Target: LAMA2; (-) strand; PAM type: NNGRRT; PAM sequence: TAGAAT
gttgtaggaagaggagattg

SEQ ID NO: 19510 - DNA, 20 bp, Artificial Sequence
  Description of Artificial Sequence: Synthetic oligonucleotide
  Target: LAMA2; (-) strand; PAM type: NNGRRT; PAM sequence: CAGAGT
ctgacttttgcggttgagat

SEQ ID NO: 19511 - DNA, 20 bp, Artificial Sequence
  Description of Artificial Sequence: Synthetic oligonucleotide
  Target: LAMA2; (-) strand; PAM type: NNGRRT; PAM sequence: GGGGAT
ggtgctgaggctgttgctct

SEQ ID NO: 19512 - DNA, 20 bp, Artificial Sequence
  Description of Artificial Sequence: Synthetic oligonucleotide
  Target: LAMA2; (-) strand; PAM type: NNGRRT; PAM sequence: CAGAGT
aaaaaaaaaaagagtaaggt

SEQ ID NO: 19513 - DNA, 20 bp, Artificial Sequence
  Description of Artificial Sequence: Synthetic oligonucleotide
  Target: LAMA2; (-) strand; PAM type: NNGRRT; PAM sequence: AAGAGT
tgtctcaaaaaaaaaaaaaa

SEQ ID NO: 19514 - DNA, 20 bp, Artificial Sequence
  Description of Artificial Sequence: Synthetic oligonucleotide
  Target: LAMA2; (-) strand; PAM type: NNGRRT; PAM sequence: CTGGGT
ttgtgccactgcactccagc

SEQ ID NO: 19515 - DNA, 20 bp, Artificial Sequence
  Description of Artificial Sequence: Synthetic oligonucleotide
  Target: LAMA2; (-) strand; PAM type: NNGRRT; PAM sequence: GAGAAT
tactcaggaggctgaggtgg

SEQ ID NO: 19516 - DNA, 20 bp, Artificial Sequence
  Description of Artificial Sequence: Synthetic oligonucleotide
  Target: LAMA2; (-) strand; PAM type: NNGRRT; PAM sequence: AAGAGT
caattttcatgcaagcaatt

SEQ ID NO: 19517 - DNA, 20 bp, Artificial Sequence
  Description of Artificial Sequence: Synthetic oligonucleotide
  Target: LAMA2; (-) strand; PAM type: NNGRRT; PAM sequence: TTGGGT
aaggaaagcaggacatgttc

SEQ ID NO: 19518 - DNA, 20 bp, Artificial Sequence
  Description of Artificial Sequence: Synthetic oligonucleotide
  Target: LAMA2; (-) strand; PAM type: NNGRRT; PAM sequence: GAGAAT
aggtcactgaacatcaatag

SEQ ID NO: 19519 - DNA, 20 bp, Artificial Sequence
  Description of Artificial Sequence: Synthetic oligonucleotide
  Target: LAMA2; (-) strand; PAM type: NNGRRT; PAM sequence: ATGAAT
cctggacagcctgagacaac

SEQ ID NO: 19520 - DNA, 20 bp, Artificial Sequence
  Description of Artificial Sequence: Synthetic oligonucleotide
  Target: LAMA2; (-) strand; PAM type: NNGRRT; PAM sequence: CAGGAT
cactggatctctccatttag

SEQ ID NO: 19521 - DNA, 20 bp, Artificial Sequence
  Description of Artificial Sequence: Synthetic oligonucleotide
  Target: LAMA2; (-) strand; PAM type: NNGRRT; PAM sequence: CTGGAT
taaaaaaaatgtaaatgaca

SEQ ID NO: 19522 - DNA, 20 bp, Artificial Sequence
  Description of Artificial Sequence: Synthetic oligonucleotide
  Target: LAMA2; (-) strand; PAM type: NNGRRT; PAM sequence: AAGAGT
ttagttgccattacccttga

SEQ ID NO: 19523 - DNA, 20 bp, Artificial Sequence
  Description of Artificial Sequence: Synthetic oligonucleotide
  Target: LAMA2; (-) strand; PAM type: NNGRRT; PAM sequence: GTGGAT
ctatcttatagtgctgtttg

SEQ ID NO: 19524 - DNA, 20 bp, Artificial Sequence
  Description of Artificial Sequence: Synthetic oligonucleotide
  Target: LAMA2; (-) strand; PAM type: NNGRRT; PAM sequence: GTGAAT
ctcctccacttactatctgt

SEQ ID NO: 19525 - DNA, 20 bp, Artificial Sequence
  Description of Artificial Sequence: Synthetic oligonucleotide
  Target: LAMA2; (-) strand; PAM type: NNGRRT; PAM sequence: GAGAGT
tgtgtttgtgtgtgtgttca

SEQ ID NO: 19526 - DNA, 20 bp, Artificial Sequence
  Description of Artificial Sequence: Synthetic oligonucleotide
  Target: LAMA2; (-) strand; PAM type: NNGRRT; PAM sequence: AAGGAT
gagtctatgtgtacaactgt

SEQ ID NO: 19527 - DNA, 20 bp, Artificial Sequence
  Description of Artificial Sequence: Synthetic oligonucleotide
  Target: LAMA2; (-) strand; PAM type: NNGRRT; PAM sequence: CTGAGT
acttcagtgggtttataaac

SEQ ID NO: 19528 - DNA, 20 bp, Artificial Sequence
  Description of Artificial Sequence: Synthetic oligonucleotide
  Target: LAMA2; (-) strand; PAM type: NNGRRT; PAM sequence: GTGGGT
aatgatgagtcttcacttca

SEQ ID NO: 19529 - DNA, 20 bp, Artificial Sequence
  Description of Artificial Sequence: Synthetic oligonucleotide
  Target: LAMA2; (-) strand; PAM type: NNGRRT; PAM sequence: ATGAGT
attgtatattttcataaatg

SEQ ID NO: 19530 - DNA, 20 bp, Artificial Sequence
  Description of Artificial Sequence: Synthetic oligonucleotide
  Target: LAMA2; (-) strand; PAM type: NNGRRT; PAM sequence: AGGAAT
tgatcttttctcattgcaca

SEQ ID NO: 19531 - DNA, 20 bp, Artificial Sequence
  Description of Artificial Sequence: Synthetic oligonucleotide
  Target: LAMA2; (-) strand; PAM type: NNGRRT; PAM sequence: TAGAGT
gtttaattttatttcatctg

SEQ ID NO: 19532 - DNA, 20 bp, Artificial Sequence
  Description of Artificial Sequence: Synthetic oligonucleotide
  Target: LAMA2; (-) strand; PAM type: NNGRRT; PAM sequence: CTGAAT
tctcaatatatcaacattct

SEQ ID NO: 19533 - DNA, 20 bp, Artificial Sequence
  Description of Artificial Sequence: Synthetic oligonucleotide
  Target: LAMA2; (-) strand; PAM type: NNGRRT; PAM sequence: TGGAGT
aacattgtgtgtatgcaaac

SEQ ID NO: 19534 - DNA, 20 bp, Artificial Sequence
  Description of Artificial Sequence: Synthetic oligonucleotide
  Target: LAMA2; (-) strand; PAM type: NNGRRT; PAM sequence: AGGAGT
ggaatcatactaatgcatac

SEQ ID NO: 19535 - DNA, 20 bp, Artificial Sequence
  Description of Artificial Sequence: Synthetic oligonucleotide
  Target: LAMA2; (-) strand; PAM type: NNGRRT; PAM sequence: TGGAAT
tgtcagagactttaaattta

SEQ ID NO: 19536 - DNA, 20 bp, Artificial Sequence
  Description of Artificial Sequence: Synthetic oligonucleotide
  Target: LAMA2; (-) strand; PAM type: NNGRRT; PAM sequence: CAGGAT
tatgtatagaagcagcattt

SEQ ID NO: 19537 - DNA, 20 bp, Artificial Sequence
  Description of Artificial Sequence: Synthetic oligonucleotide
  Target: LAMA2; (-) strand; PAM type: NNGRRT; PAM sequence: TTGGAT
agctgtataaatacattaat

SEQ ID NO: 19538 - DNA, 20 bp, Artificial Sequence
  Description of Artificial Sequence: Synthetic oligonucleotide
  Target: LAMA2; (-) strand; PAM type: NNGRRT; PAM sequence: ACGAGT
tctgtgtgtgtgtgtatttt

SEQ ID NO: 19539 - DNA, 20 bp, Artificial Sequence
  Description of Artificial Sequence: Synthetic oligonucleotide
  Target: LAMA2; (-) strand; PAM type: NNGRRT; PAM sequence: TTGAAT
tgcgcgtgtgtgtgtgtgtg

SEQ ID NO: 19540 - DNA, 20 bp, Artificial Sequence
  Description of Artificial Sequence: Synthetic oligonucleotide
  Target: LAMA2; (-) strand; PAM type: NNGRRT; PAM sequence: TTGAAT
aaaggttcttcagagaaaag

SEQ ID NO: 19541 - DNA, 20 bp, Artificial Sequence
  Description of Artificial Sequence: Synthetic oligonucleotide
  Target: LAMA2; (-) strand; PAM type: NNGRRT; PAM sequence: GAGAGT
cgatagaaaacaaagtaact

SEQ ID NO: 19542 - DNA, 20 bp, Artificial Sequence
  Description of Artificial Sequence: Synthetic oligonucleotide
  Target: LAMA2; (-) strand; PAM type: NNGRRT; PAM sequence: AGGGGT
taagagttgagggctaaagc

SEQ ID NO: 19543 - DNA, 20 bp, Artificial Sequence
  Description of Artificial Sequence: Synthetic oligonucleotide
  Target: LAMA2; (-) strand; PAM type: NNGRRT; PAM sequence: AAGAGT
atcagaactgaaacatgcct

SEQ ID NO: 19544 - DNA, 20 bp, Artificial Sequence
  Description of Artificial Sequence: Synthetic oligonucleotide
  Target: LAMA2; (-) strand; PAM type: NNGRRT; PAM sequence: AAGGAT
gtacaaatgtcactaagcca

SEQ ID NO: 19545 - DNA, 20 bp, Artificial Sequence
  Description of Artificial Sequence: Synthetic oligonucleotide
  Target: LAMA2; (-) strand; PAM type: NNGRRT; PAM sequence: TAGAGT
ggggcaggagtgaggcagat

SEQ ID NO: 19546 - DNA, 20 bp, Artificial Sequence
  Description of Artificial Sequence: Synthetic oligonucleotide
  Target: LAMA2; (-) strand; PAM type: NNGRRT; PAM sequence: AGGAGT
caggtcccctgagaaggggc

SEQ ID NO: 19547 - DNA, 20 bp, Artificial Sequence
  Description of Artificial Sequence: Synthetic oligonucleotide
  Target: LAMA2; (-) strand; PAM type: NNGRRT; PAM sequence: TGGGAT
tcaccatgtaggacctgtca

SEQ ID NO: 19548 - DNA, 20 bp, Artificial Sequence
  Description of Artificial Sequence: Synthetic oligonucleotide
  Target: LAMA2; (-) strand; PAM type: NNGRRT; PAM sequence: TGGGGT
tctatccattctaggcttcc

SEQ ID NO: 19549 - DNA, 20 bp, Artificial Sequence
  Description of Artificial Sequence: Synthetic oligonucleotide
  Target: LAMA2; (-) strand; PAM type: NNGRRT; PAM sequence: ATGAAT
tcttcatgaatttgtgttgg

SEQ ID NO: 19550 - DNA, 20 bp, Artificial Sequence
  Description of Artificial Sequence: Synthetic oligonucleotide
  Target: LAMA2; (-) strand; PAM type: NNGRRT; PAM sequence: TTGGAT
cttttcttcatgaatttgtg

SEQ ID NO: 19551 - DNA, 20 bp, Artificial Sequence
  Description of Artificial Sequence: Synthetic oligonucleotide
  Target: LAMA2; (-) strand; PAM type: NNGRRT; PAM sequence: ATGAAT
gcagatcttggcttttcttc

SEQ ID NO: 19552 - DNA, 20 bp, Artificial Sequence
  Description of Artificial Sequence: Synthetic oligonucleotide
  Target: LAMA2; (-) strand; PAM type: NNGRRT; PAM sequence: TGGAAT
tcgtcctcctgttgctcttc

SEQ ID NO: 19553 - DNA, 20 bp, Artificial Sequence
  Description of Artificial Sequence: Synthetic oligonucleotide
  Target: LAMA2; (-) strand; PAM type: NNGRRT; PAM sequence: TGGGAT
cttcattctatcatctgatt

SEQ ID NO: 19554 - DNA, 20 bp, Artificial Sequence
  Description of Artificial Sequence: Synthetic oligonucleotide
  Target: LAMA2; (-) strand; PAM type: NNGRRT; PAM sequence: GAGAGT
accgaaagctcaccactagt

SEQ ID NO: 19555 - DNA, 20 bp, Artificial Sequence
  Description of Artificial Sequence: Synthetic oligonucleotide
  Target: LAMA2; (-) strand; PAM type: NNGRRT; PAM sequence: TTGGAT
aagggttcaataagcatttg

SEQ ID NO: 19556 - DNA, 20 bp, Artificial Sequence
  Description of Artificial Sequence: Synthetic oligonucleotide
  Target: LAMA2; (-) strand; PAM type: NNGRRT; PAM sequence: AAGGGT
cccatcactacccacagagg

SEQ ID NO: 19557 - DNA, 20 bp, Artificial Sequence
  Description of Artificial Sequence: Synthetic oligonucleotide
  Target: LAMA2; (-) strand; PAM type: NNGRRT; PAM sequence: CTGAAT
tcgattccagtctgaattca

SEQ ID NO: 19558 - DNA, 20 bp, Artificial Sequence
  Description of Artificial Sequence: Synthetic oligonucleotide
  Target: LAMA2; (-) strand; PAM type: NNGRRT; PAM sequence: CTGAAT
acaatgtgttcgattccagt

SEQ ID NO: 19559 - DNA, 20 bp, Artificial Sequence
  Description of Artificial Sequence: Synthetic oligonucleotide
  Target: LAMA2; (-) strand; PAM type: NNGRRT; PAM sequence: CTGGAT
tagttattcttgcaaactta

SEQ ID NO: 19560 - DNA, 20 bp, Artificial Sequence
  Description of Artificial Sequence: Synthetic oligonucleotide
  Target: LAMA2; (-) strand; PAM type: NNGRRT; PAM sequence: GAGGAT
cccaaccagagatatcataa

SEQ ID NO: 19561 - DNA, 20 bp, Artificial Sequence
  Description of Artificial Sequence: Synthetic oligonucleotide
  Target: LAMA2; (-) strand; PAM type: NNGRRT; PAM sequence: TTGGGT
gcattgctccaaattttgtt

SEQ ID NO: 19562 - DNA, 20 bp, Artificial Sequence
  Description of Artificial Sequence: Synthetic oligonucleotide
  Target: LAMA2; (-) strand; PAM type: NNGRRT; PAM sequence: AGGAGT
cagctaggaaagaatctaag

SEQ ID NO: 19563 - DNA, 20 bp, Artificial Sequence
  Description of Artificial Sequence: Synthetic oligonucleotide
  Target: LAMA2; (-) strand; PAM type: NNGRRT; PAM sequence: AAGAAT
ataggaatacacagctagga

SEQ ID NO: 19564 - DNA, 20 bp, Artificial Sequence
  Description of Artificial Sequence: Synthetic oligonucleotide
  Target: LAMA2; (-) strand; PAM type: NNGRRT; PAM sequence: AGGAAT
ctgttaagctaagactatat

SEQ ID NO: 19565 - DNA, 20 bp, Artificial Sequence
  Description of Artificial Sequence: Synthetic oligonucleotide
  Target: LAMA2; (-) strand; PAM type: NNGRRT; PAM sequence: AAGAGT
aataattacacagataaaag

SEQ ID NO: 19566 - DNA, 20 bp, Artificial Sequence
  Description of Artificial Sequence: Synthetic oligonucleotide
  Target: LAMA2; (-) strand; PAM type: NNGRRT; PAM sequence: AGGAGT
ctgaaaggaatttgacatac

SEQ ID NO: 19567 - DNA, 20 bp, Artificial Sequence
  Description of Artificial Sequence: Synthetic oligonucleotide
  Target: LAMA2; (-) strand; PAM type: NNGRRT; PAM sequence: AGGAAT
cacttttttttttctctgaa

SEQ ID NO: 19568 - DNA, 20 bp, Artificial Sequence
  Description of Artificial Sequence: Synthetic oligonucleotide
  Target: LAMA2; (-) strand; PAM type: NNGRRT; PAM sequence: TTGAGT
gtgacctgtaatccacagaa

SEQ ID NO: 19569 - DNA, 20 bp, Artificial Sequence
  Description of Artificial Sequence: Synthetic oligonucleotide
  Target: LAMA2; (-) strand; PAM type: NNGRRT; PAM sequence: CAGAAT
ggtgggtgacctgtaatcca

SEQ ID NO: 19570 - DNA, 20 bp, Artificial Sequence
  Description of Artificial Sequence: Synthetic oligonucleotide
  Target: LAMA2; (-) strand; PAM type: NNGRRT; PAM sequence: GTGGGT
ttcatctgaaacatgcccag

SEQ ID NO: 19571 - DNA, 20 bp, Artificial Sequence
  Description of Artificial Sequence: Synthetic oligonucleotide
  Target: LAMA2; (-) strand; PAM type: NNGRRT; PAM sequence: AGGAGT
agcaaagccttagctgcttt

SEQ ID NO: 19572 - DNA, 20 bp, Artificial Sequence
  Description of Artificial Sequence: Synthetic oligonucleotide
  Target: LAMA2; (-) strand; PAM type: NNGRRT; PAM sequence: CAGAGT
gtctctctctcatgttgtat

SEQ ID NO: 19573 - DNA, 20 bp, Artificial Sequence
  Description of Artificial Sequence: Synthetic oligonucleotide
  Target: LAMA2; (-) strand; PAM type: NNGRRT; PAM sequence: CTGAAT
agtccttgcacttgtcattc

SEQ ID NO: 19574 - DNA, 20 bp, Artificial Sequence
  Description of Artificial Sequence: Synthetic oligonucleotide
  Target: LAMA2; (-) strand; PAM type: NNGRRT; PAM sequence: TAGAAT
cttcttttctttaatttctt

SEQ ID NO: 19575 - DNA, 20 bp, Artificial Sequence
  Description of Artificial Sequence: Synthetic oligonucleotide
  Target: LAMA2; (-) strand; PAM type: NNGRRT; PAM sequence: CTGAAT
tgacctgtaacccataataa

SEQ ID NO: 19576 - DNA, 20 bp, Artificial Sequence
  Description of Artificial Sequence: Synthetic oligonucleotide
  Target: LAMA2; (-) strand; PAM type: NNGRRT; PAM sequence: ATGGGT
actgtgaccacaggtcacgg

SEQ ID NO: 19577 - DNA, 20 bp, Artificial Sequence
  Description of Artificial Sequence: Synthetic oligonucleotide
  Target: LAMA2; (-) strand; PAM type: NNGRRT; PAM sequence: ACGGAT
taacactgtgaccacaggtc

SEQ ID NO: 19578 - DNA, 20 bp, Artificial Sequence
  Description of Artificial Sequence: Synthetic oligonucleotide
  Target: LAMA2; (-) strand; PAM type: NNGRRT; PAM sequence: AAGAAT
ttctttaacttacctcttcc

SEQ ID NO: 19579 - DNA, 20 bp, Artificial Sequence
  Description of Artificial Sequence: Synthetic oligonucleotide
  Target: LAMA2; (-) strand; PAM type: NNGRRT; PAM sequence: CTGAGT
tcttacatgtccgatgacta

SEQ ID NO: 19580 - DNA, 20 bp, Artificial Sequence
  Description of Artificial Sequence: Synthetic oligonucleotide
  Target: LAMA2; (-) strand; PAM type: NNGRRT; PAM sequence: CTGAAT
ttcatgcagcatgtagggca

SEQ ID NO: 19581 - DNA, 20 bp, Artificial Sequence
  Description of Artificial Sequence: Synthetic oligonucleotide
  Target: LAMA2; (-) strand; PAM type: NNGRRT; PAM sequence: ATGGAT
aaagaaaaataattttataa

SEQ ID NO: 19582 - DNA, 20 bp, Artificial Sequence
  Description of Artificial Sequence: Synthetic oligonucleotide
  Target: LAMA2; (-) strand; PAM type: NNGRRT; PAM sequence: AAGGAT
tacgtttaggtaaatcaatg

SEQ ID NO: 19583 - DNA, 20 bp, Artificial Sequence
  Description of Artificial Sequence: Synthetic oligonucleotide
  Target: LAMA2; (-) strand; PAM type: NNGRRT; PAM sequence: ATGGGT
cttatttttaaaaatattat

SEQ ID NO: 19584 - DNA, 20 bp, Artificial Sequence
  Description of Artificial Sequence: Synthetic oligonucleotide
  Target: LAMA2; (-) strand; PAM type: NNGRRT; PAM sequence: ATGAAT
agactggactagagcttcca

SEQ ID NO: 19585 - DNA, 20 bp, Artificial Sequence
  Description of Artificial Sequence: Synthetic oligonucleotide
  Target: LAMA2; (-) strand; PAM type: NNGRRT; PAM sequence: TTGAAT
atattatcagtaattatttg

SEQ ID NO: 19586 - DNA, 20 bp, Artificial Sequence
  Description of Artificial Sequence: Synthetic oligonucleotide
  Target: LAMA2; (-) strand; PAM type: NNGRRT; PAM sequence: CTGAAT
ggatatctactagatggtca

SEQ ID NO: 19587 - DNA, 20 bp, Artificial Sequence
  Description of Artificial Sequence: Synthetic oligonucleotide
  Target: LAMA2; (-) strand; PAM type: NNGRRT; PAM sequence: TTGGAT
cattcactcaaatatatgta

SEQ ID NO: 19588 - DNA, 20 bp, Artificial Sequence
  Description of Artificial Sequence: Synthetic oligonucleotide
  Target: LAMA2; (-) strand; PAM type: NNGRRT; PAM sequence: TAGGGT
caaccaagagttctcatttt

SEQ ID NO: 19589 - DNA, 20 bp, Artificial Sequence
  Description of Artificial Sequence: Synthetic oligonucleotide
  Target: LAMA2; (-) strand; PAM type: NNGRRT; PAM sequence: AAGAGT
ttttgttattttctccaacc

SEQ ID NO: 19590 - DNA, 20 bp, Artificial Sequence
  Description of Artificial Sequence: Synthetic oligonucleotide
  Target: LAMA2; (-) strand; PAM type: NNGRRT; PAM sequence: CAGGAT
ctggccttaatgaacacata

SEQ ID NO: 19591 - DNA, 20 bp, Artificial Sequence
  Description of Artificial Sequence: Synthetic oligonucleotide
  Target: LAMA2; (-) strand; PAM type: NNGRRT; PAM sequence: AAGAAT
agactagacatttccttacc

SEQ ID NO: 19592 - DNA, 20 bp, Artificial Sequence
  Description of Artificial Sequence: Synthetic oligonucleotide
  Target: LAMA2; (-) strand; PAM type: NNGRRT; PAM sequence: AAGAGT
aaatatactggataaatgac

SEQ ID NO: 19593 - DNA, 20 bp, Artificial Sequence
  Description of Artificial Sequence: Synthetic oligonucleotide
  Target: LAMA2; (-) strand; PAM type: NNGRRT; PAM sequence: CTGGAT
gcacgggtaattcaaatata

SEQ ID NO: 19594 - DNA, 20 bp, Artificial Sequence
  Description of Artificial Sequence: Synthetic oligonucleotide
  Target: LAMA2; (-) strand; PAM type: NNGRRT; PAM sequence: ACGGGT
aatatatgaaacagtaatgc

SEQ ID NO: 19595 - DNA, 20 bp, Artificial Sequence
  Description of Artificial Sequence: Synthetic oligonucleotide
  Target: LAMA2; (-) strand; PAM type: NNGRRT; PAM sequence: ATGAAT
ttataaaatatgaaagtacc

SEQ ID NO: 19596 - DNA, 20 bp, Artificial Sequence
  Description of Artificial Sequence: Synthetic oligonucleotide
  Target: LAMA2; (-) strand; PAM type: NNGRRT; PAM sequence: TGGAAT
aagaatcttattcaaatcaa

SEQ ID NO: 19597 - DNA, 20 bp, Artificial Sequence
  Description of Artificial Sequence: Synthetic oligonucleotide
  Target: LAMA2; (-) strand; PAM type: NNGRRT; PAM sequence: AAGAAT
aaagctttcactgtaattta

SEQ ID NO: 19598 - DNA, 20 bp, Artificial Sequence
  Description of Artificial Sequence: Synthetic oligonucleotide
  Target: LAMA2; (-) strand; PAM type: NNGRRT; PAM sequence: ATGAAT
ctaagtgtattatcatcttt

SEQ ID NO: 19599 - DNA, 20 bp, Artificial Sequence
  Description of Artificial Sequence: Synthetic oligonucleotide
  Target: LAMA2; (-) strand; PAM type: NNGRRT; PAM sequence: CTGGAT
taaaggctctgagtctggct

SEQ ID NO: 19600 - DNA, 20 bp, Artificial Sequence
  Description of Artificial Sequence: Synthetic oligonucleotide
  Target: LAMA2; (-) strand; PAM type: NNGRRT; PAM sequence: CTGAGT
tctagcacagagtaaaggct

SEQ ID NO: 19601 - DNA, 20 bp, Artificial Sequence
  Description of Artificial Sequence: Synthetic oligonucleotide
  Target: LAMA2; (-) strand; PAM type: NNGRRT; PAM sequence: CAGAGT
tggtcattgtgtttctagca

SEQ ID NO: 19602 - DNA, 20 bp, Artificial Sequence
  Description of Artificial Sequence: Synthetic oligonucleotide
  Target: LAMA2; (-) strand; PAM type: NNGRRT; PAM sequence: TGGAAT
gtcagttgaatccatggatg

SEQ ID NO: 19603 - DNA, 20 bp, Artificial Sequence
  Description of Artificial Sequence: Synthetic oligonucleotide
  Target: LAMA2; (-) strand; PAM type: NNGRRT; PAM sequence: ATGGAT
ttctgcagtcagttgaatcc

SEQ ID NO: 19604 - DNA, 20 bp, Artificial Sequence
  Description of Artificial Sequence: Synthetic oligonucleotide
  Target: LAMA2; (-) strand; PAM type: NNGRRT; PAM sequence: TTGAAT
catttttcttctgcagtcag

SEQ ID NO: 19605 - DNA, 20 bp, Artificial Sequence
  Description of Artificial Sequence: Synthetic oligonucleotide
  Target: LAMA2; (-) strand; PAM type: NNGRRT; PAM sequence: GGGAAT
ttgttataccatattattta

SEQ ID NO: 19606 - DNA, 20 bp, Artificial Sequence
  Description of Artificial Sequence: Synthetic oligonucleotide
  Target: LAMA2; (-) strand; PAM type: NNGRRT; PAM sequence: GAGGAT
tcctgtggatatcaaaatct

SEQ ID NO: 19607 - DNA, 20 bp, Artificial Sequence
  Description of Artificial Sequence: Synthetic oligonucleotide
  Target: LAMA2; (-) strand; PAM type: NNGRRT; PAM sequence: GTGGAT
gattggttccaggacctcct

SEQ ID NO: 19608 - DNA, 20 bp, Artificial Sequence
  Description of Artificial Sequence: Synthetic oligonucleotide
  Target: LAMA2; (-) strand; PAM type: NNGRRT; PAM sequence: GGGGAT
tatagtttcaggggatttgt

SEQ ID NO: 19609 - DNA, 20 bp, Artificial Sequence
  Description of Artificial Sequence: Synthetic oligonucleotide
  Target: LAMA2; (-) strand; PAM type: NNGRRT; PAM sequence: GGGGAT
cctcatcagttatagtttca

SEQ ID NO: 19610 - DNA, 20 bp, Artificial Sequence
  Description of Artificial Sequence: Synthetic oligonucleotide
  Target: LAMA2; (-) strand; PAM type: NNGRRT; PAM sequence: ATGAGT
gacaaagaatttttatgtaa

SEQ ID NO: 19611 - DNA, 20 bp, Artificial Sequence
  Description of Artificial Sequence: Synthetic oligonucleotide
  Target: LAMA2; (-) strand; PAM type: NNGRRT; PAM sequence: AAGAAT
aggatgtacagatatggaca

SEQ ID NO: 19612 - DNA, 20 bp, Artificial Sequence
  Description of Artificial Sequence: Synthetic oligonucleotide
  Target: LAMA2; (-) strand; PAM type: NNGRRT; PAM sequence: AAGGAT
catatgtgtagcttgagatt

SEQ ID NO: 19613 - DNA, 20 bp, Artificial Sequence
  Description of Artificial Sequence: Synthetic oligonucleotide
  Target: LAMA2; (-) strand; PAM type: NNGRRT; PAM sequence: GTGGAT
ctttgaaataagtagcagaa

SEQ ID NO: 19614 - DNA, 20 bp, Artificial Sequence
  Description of Artificial Sequence: Synthetic oligonucleotide
  Target: LAMA2; (-) strand; PAM type: NNGRRT; PAM sequence: ATGAAT
atgaaggctactgaaagatc

SEQ ID NO: 19615 - DNA, 20 bp, Artificial Sequence
  Description of Artificial Sequence: Synthetic oligonucleotide
  Target: LAMA2; (-) strand; PAM type: NNGRRT; PAM sequence: GAGAAT
ttgagtgaatggatggatgg

SEQ ID NO: 19616 - DNA, 20 bp, Artificial Sequence
  Description of Artificial Sequence: Synthetic oligonucleotide
  Target: LAMA2; (-) strand; PAM type: NNGRRT; PAM sequence: ATGGAT
caagtttcttgagtgaatgg

SEQ ID NO: 19617 - DNA, 20 bp, Artificial Sequence
  Description of Artificial Sequence: Synthetic oligonucleotide
  Target: LAMA2; (-) strand; PAM type: NNGRRT; PAM sequence: ATGGAT
aatacaagtttcttgagtga

SEQ ID NO: 19618 - DNA, 20 bp, Artificial Sequence
  Description of Artificial Sequence: Synthetic oligonucleotide
  Target: LAMA2; (-) strand; PAM type: NNGRRT; PAM sequence: GTGAAT
taacaatacaagtttcttga

SEQ ID NO: 19619 - DNA, 20 bp, Artificial Sequence
  Description of Artificial Sequence: Synthetic oligonucleotide
  Target: LAMA2; (-) strand; PAM type: NNGRRT; PAM sequence: TTGAGT
tccctaacaatacaagtttc

SEQ ID NO: 19620 - DNA, 20 bp, Artificial Sequence
  Description of Artificial Sequence: Synthetic oligonucleotide
  Target: LAMA2; (-) strand; PAM type: NNGRRT; PAM sequence: TAGAAT
cctcaatggcatttttattt

SEQ ID NO: 19621 - DNA, 20 bp, Artificial Sequence
  Description of Artificial Sequence: Synthetic oligonucleotide
  Target: LAMA2; (-) strand; PAM type: NNGRRT; PAM sequence: TAGAGT
atggttatcaactggttttt

SEQ ID NO: 19622 - DNA, 20 bp, Artificial Sequence
  Description of Artificial Sequence: Synthetic oligonucleotide
  Target: LAMA2; (-) strand; PAM type: NNGRRT; PAM sequence: AGGAAT
gtgtatgttcatgctgtcac

SEQ ID NO: 19623 - DNA, 20 bp, Artificial Sequence
  Description of Artificial Sequence: Synthetic oligonucleotide
  Target: LAMA2; (-) strand; PAM type: NNGRRT; PAM sequence: GTGGGT
tttctattacagacatgttg

SEQ ID NO: 19624 - DNA, 20 bp, Artificial Sequence
  Description of Artificial Sequence: Synthetic oligonucleotide
  Target: LAMA2; (-) strand; PAM type: NNGRRT; PAM sequence: GAGGGT
ttcctatggggtgacagcca

SEQ ID NO: 19625 - DNA, 20 bp, Artificial Sequence
  Description of Artificial Sequence: Synthetic oligonucleotide
  Target: LAMA2; (-) strand; PAM type: NNGRRT; PAM sequence: TGGGGT
gcatacttcctgatttccta

SEQ ID NO: 19626 - DNA, 20 bp, Artificial Sequence
  Description of Artificial Sequence: Synthetic oligonucleotide
  Target: LAMA2; (-) strand; PAM type: NNGRRT; PAM sequence: CTGGAT
acagtgtaattccaagtcca

SEQ ID NO: 19627 - DNA, 20 bp, Artificial Sequence
  Description of Artificial Sequence: Synthetic oligonucleotide
  Target: LAMA2; (-) strand; PAM type: NNGRRT; PAM sequence: TAGGAT
aaataaatcataatgttgga

SEQ ID NO: 19628 - DNA, 20 bp, Artificial Sequence
  Description of Artificial Sequence: Synthetic oligonucleotide
  Target: LAMA2; (-) strand; PAM type: NNGRRT; PAM sequence: TTGGAT
cttcaaaataaatcataatg

SEQ ID NO: 19629 - DNA, 20 bp, Artificial Sequence
  Description of Artificial Sequence: Synthetic oligonucleotide
  Target: LAMA2; (-) strand; PAM type: NNGRRT; PAM sequence: TGGGAT
agttagtcccaagctgtttc

SEQ ID NO: 19630 - DNA, 20 bp, Artificial Sequence
  Description of Artificial Sequence: Synthetic oligonucleotide
  Target: LAMA2; (-) strand; PAM type: NNGRRT; PAM sequence: GTGAAT
ctactctgccaagagatctt

SEQ ID NO: 19631 - DNA, 20 bp, Artificial Sequence
  Description of Artificial Sequence: Synthetic oligonucleotide
  Target: LAMA2; (-) strand; PAM type: NNGRRT; PAM sequence: AAGGAT
aaccgtgtgatagctacatg

SEQ ID NO: 19632 - DNA, 20 bp, Artificial Sequence
  Description of Artificial Sequence: Synthetic oligonucleotide
  Target: LAMA2; (-) strand; PAM type: NNGRRT; PAM sequence: AAGAAT
aatcatgtttgtgccgtatg

SEQ ID NO: 19633 - DNA, 20 bp, Artificial Sequence
  Description of Artificial Sequence: Synthetic oligonucleotide
  Target: LAMA2; (-) strand; PAM type: NNGRRT; PAM sequence: GTGAAT
tatttggtgtgaatgctgtg

SEQ ID NO: 19634 - DNA, 20 bp, Artificial Sequence
  Description of Artificial Sequence: Synthetic oligonucleotide
  Target: LAMA2; (-) strand; PAM type: NNGRRT; PAM sequence: GTGAAT
attattagagtttatttggt

SEQ ID NO: 19635 - DNA, 20 bp, Artificial Sequence
  Description of Artificial Sequence: Synthetic oligonucleotide
  Target: LAMA2; (-) strand; PAM type: NNGRRT; PAM sequence: TAGAGT
ttatagtttctgaacattat

SEQ ID NO: 19636 - DNA, 20 bp, Artificial Sequence
  Description of Artificial Sequence: Synthetic oligonucleotide
  Target: LAMA2; (-) strand; PAM type: NNGRRT; PAM sequence: TAGGAT
ggaggaaatcgctacatgtc

SEQ ID NO: 19637 - DNA, 20 bp, Artificial Sequence
  Description of Artificial Sequence: Synthetic oligonucleotide
  Target: LAMA2; (-) strand; PAM type: NNGRRT; PAM sequence: ATGGAT
ttaaaagaatggataaatat

SEQ ID NO: 19638 - DNA, 20 bp, Artificial Sequence
  Description of Artificial Sequence: Synthetic oligonucleotide
  Target: LAMA2; (-) strand; PAM type: NNGRRT; PAM sequence: ATGGAT
tagagttaaatgttaaaaga

SEQ ID NO: 19639 - DNA, 20 bp, Artificial Sequence
  Description of Artificial Sequence: Synthetic oligonucleotide
  Target: LAMA2; (-) strand; PAM type: NNGRRT; PAM sequence: AAGAAT
aggttagagttaaatgttaa

SEQ ID NO: 19640 - DNA, 20 bp, Artificial Sequence
  Description of Artificial Sequence: Synthetic oligonucleotide
  Target: LAMA2; (-) strand; PAM type: NNGRRT; PAM sequence: TAGAGT
tatttttggcttaaggaggt

SEQ ID NO: 19641 - DNA, 20 bp, Artificial Sequence
  Description of Artificial Sequence: Synthetic oligonucleotide
  Target: LAMA2; (-) strand; PAM type: NNGRRT; PAM sequence: TTGAGT
agccagaaatgtgtttagaa

SEQ ID NO: 19642 - DNA, 20 bp, Artificial Sequence
  Description of Artificial Sequence: Synthetic oligonucleotide
  Target: LAMA2; (-) strand; PAM type: NNGRRT; PAM sequence: TAGAAT
aggtgagccagaaatgtgtt

SEQ ID NO: 19643 - DNA, 20 bp, Artificial Sequence
  Description of Artificial Sequence: Synthetic oligonucleotide
  Target: LAMA2; (-) strand; PAM type: NNGRRT; PAM sequence: AAGAGT
ctctaatgcagggattctaa

SEQ ID NO: 19644 - DNA, 20 bp, Artificial Sequence
  Description of Artificial Sequence: Synthetic oligonucleotide
  Target: LAMA2; (-) strand; PAM type: NNGRRT; PAM sequence: AGGGAT
tactgaatcctctctaatgc

SEQ ID NO: 19645 - DNA, 20 bp, Artificial Sequence
  Description of Artificial Sequence: Synthetic oligonucleotide
  Target: LAMA2; (-) strand; PAM type: NNGRRT; PAM sequence: CTGAAT
aaaatatgaatctgaaaata

SEQ ID NO: 19646 - DNA, 20 bp, Artificial Sequence
  Description of Artificial Sequence: Synthetic oligonucleotide
  Target: LAMA2; (-) strand; PAM type: NNGRRT; PAM sequence: ATGAAT
aatgcaatgtcttctaaaat

SEQ ID NO: 19647 - DNA, 20 bp, Artificial Sequence
  Description of Artificial Sequence: Synthetic oligonucleotide
  Target: LAMA2; (-) strand; PAM type: NNGRRT; PAM sequence: TAGAAT
ctgggatgcttagtaaggaa

SEQ ID NO: 19648 - DNA, 20 bp, Artificial Sequence
  Description of Artificial Sequence: Synthetic oligonucleotide
  Target: LAMA2; (-) strand; PAM type: NNGRRT; PAM sequence: AGGAAT
tctacctgggatgcttagta

SEQ ID NO: 19649 - DNA, 20 bp, Artificial Sequence
  Description of Artificial Sequence: Synthetic oligonucleotide
  Target: LAMA2; (-) strand; PAM type: NNGRRT; PAM sequence: TGGGAT
tccacctaattgaatctacc

SEQ ID NO: 19650 - DNA, 20 bp, Artificial Sequence
  Description of Artificial Sequence: Synthetic oligonucleotide
  Target: LAMA2; (-) strand; PAM type: NNGRRT; PAM sequence: TTGAAT
tatgaatatgttccacctaa

SEQ ID NO: 19651 - DNA, 20 bp, Artificial Sequence
  Description of Artificial Sequence: Synthetic oligonucleotide
  Target: LAMA2; (-) strand; PAM type: NNGRRT; PAM sequence: ATGAAT
aaatgcctcatgataaaaat

SEQ ID NO: 19652 - DNA, 20 bp, Artificial Sequence
  Description of Artificial Sequence: Synthetic oligonucleotide
  Target: LAMA2; (-) strand; PAM type: NNGRRT; PAM sequence: AAGAAT
aaactaattctggtgtcaca

SEQ ID NO: 19653 - DNA, 20 bp, Artificial Sequence
  Description of Artificial Sequence: Synthetic oligonucleotide
  Target: LAMA2; (-) strand; PAM type: NNGRRT; PAM sequence: TTGAGT
actgactgccaataaactac

SEQ ID NO: 19654 - DNA, 20 bp, Artificial Sequence
  Description of Artificial Sequence: Synthetic oligonucleotide
  Target: LAMA2; (-) strand; PAM type: NNGRRT; PAM sequence: TGGAAT
tgtgactcaaggtcacccac

SEQ ID NO: 19655 - DNA, 20 bp, Artificial Sequence
  Description of Artificial Sequence: Synthetic oligonucleotide
  Target: LAMA2; (-) strand; PAM type: NNGRRT; PAM sequence: TTGGGT
ctgtgctatctgggagatgc

SEQ ID NO: 19656 - DNA, 20 bp, Artificial Sequence
  Description of Artificial Sequence: Synthetic oligonucleotide
  Target: LAMA2; (-) strand; PAM type: NNGRRT; PAM sequence: GGGAGT
ggtacagggatgcaggaagt

SEQ ID NO: 19657 - DNA, 20 bp, Artificial Sequence
  Description of Artificial Sequence: Synthetic oligonucleotide
  Target: LAMA2; (-) strand; PAM type: NNGRRT; PAM sequence: AGGGAT
gcacacagtgctaaaggtac

SEQ ID NO: 19658 - DNA, 20 bp, Artificial Sequence
  Description of Artificial Sequence: Synthetic oligonucleotide
  Target: LAMA2; (-) strand; PAM type: NNGRRT; PAM sequence: TTGAGT
aattgttaaagaaagtgaaa

SEQ ID NO: 19659 - DNA, 20 bp, Artificial Sequence
  Description of Artificial Sequence: Synthetic oligonucleotide
  Target: LAMA2; (-) strand; PAM type: NNGRRT; PAM sequence: ATGGAT
actatttttgtattctgtaa

SEQ ID NO: 19660 - DNA, 20 bp, Artificial Sequence
  Description of Artificial Sequence: Synthetic oligonucleotide
  Target: LAMA2; (-) strand; PAM type: NNGRRT; PAM sequence: AGGAAT
tgcaaccataaaaaagaatg

SEQ ID NO: 19661 - DNA, 20 bp, Artificial Sequence
  Description of Artificial Sequence: Synthetic oligonucleotide
  Target: LAMA2; (-) strand; PAM type: NNGRRT; PAM sequence: AAGAAT
aattatctgcaaccataaaa

SEQ ID NO: 19662 - DNA, 20 bp, Artificial Sequence
  Description of Artificial Sequence: Synthetic oligonucleotide
  Target: LAMA2; (-) strand; PAM type: NNGRRT; PAM sequence: ATGAAT
ataaattgtatatctgcata

SEQ ID NO: 19663 - DNA, 20 bp, Artificial Sequence
  Description of Artificial Sequence: Synthetic oligonucleotide
  Target: LAMA2; (-) strand; PAM type: NNGRRT; PAM sequence: CTGAAT
atcctgagggtggagccctc

SEQ ID NO: 19664 - DNA, 20 bp, Artificial Sequence
  Description of Artificial Sequence: Synthetic oligonucleotide
  Target: LAMA2; (-) strand; PAM type: NNGRRT; PAM sequence: GAGGGT
ttggtaggtaattagatcct

SEQ ID NO: 19665 - DNA, 20 bp, Artificial Sequence
  Description of Artificial Sequence: Synthetic oligonucleotide
  Target: LAMA2; (-) strand; PAM type: NNGRRT; PAM sequence: CTGAAT
aactgaatatggctaatgga

SEQ ID NO: 19666 - DNA, 20 bp, Artificial Sequence
  Description of Artificial Sequence: Synthetic oligonucleotide
  Target: LAMA2; (-) strand; PAM type: NNGRRT; PAM sequence: CTGAAT
gatactatattacaggtgaa

SEQ ID NO: 19667 - DNA, 20 bp, Artificial Sequence
  Description of Artificial Sequence: Synthetic oligonucleotide
  Target: LAMA2; (-) strand; PAM type: NNGRRT; PAM sequence: AGGAAT
gagctagcaattccacttct

SEQ ID NO: 19668 - DNA, 20 bp, Artificial Sequence
  Description of Artificial Sequence: Synthetic oligonucleotide
  Target: LAMA2; (-) strand; PAM type: NNGRRT; PAM sequence: GAGAGT
ctctctgatggttagactaa

SEQ ID NO: 19669 - DNA, 20 bp, Artificial Sequence
  Description of Artificial Sequence: Synthetic oligonucleotide
  Target: LAMA2; (-) strand; PAM type: NNGRRT; PAM sequence: TAGGAT
atactgatcctccctcataa

SEQ ID NO: 19670 - DNA, 20 bp, Artificial Sequence
  Description of Artificial Sequence: Synthetic oligonucleotide
  Target: LAMA2; (-) strand; PAM type: NNGRRT; PAM sequence: AAGGAT
actgttggcacggataaagg

SEQ ID NO: 19671 - DNA, 20 bp, Artificial Sequence
  Description of Artificial Sequence: Synthetic oligonucleotide
  Target: LAMA2; (-) strand; PAM type: NNGRRT; PAM sequence: ACGGAT
aaataaaaggtactgttggc

SEQ ID NO: 19672 - DNA, 20 bp, Artificial Sequence
  Description of Artificial Sequence: Synthetic oligonucleotide
  Target: LAMA2; (-) strand; PAM type: NNGRRT; PAM sequence: AAGAAT
aagagcaaagaattctgatg

SEQ ID NO: 19673 - DNA, 20 bp, Artificial Sequence
  Description of Artificial Sequence: Synthetic oligonucleotide
  Target: LAMA2; (-) strand; PAM type: NNGRRT; PAM sequence: AAGAAT
acagggacttctcaagagca

SEQ ID NO: 19674 - DNA, 20 bp, Artificial Sequence
  Description of Artificial Sequence: Synthetic oligonucleotide
  Target: LAMA2; (-) strand; PAM type: NNGRRT; PAM sequence: GTGAAT
tgttaaacctgaatggaatg

SEQ ID NO: 19675 - DNA, 20 bp, Artificial Sequence
  Description of Artificial Sequence: Synthetic oligonucleotide
  Target: LAMA2; (-) strand; PAM type: NNGRRT; PAM sequence: TGGAAT
aaaaatatgttaaacctgaa

SEQ ID NO: 19676 - DNA, 20 bp, Artificial Sequence
  Description of Artificial Sequence: Synthetic oligonucleotide
  Target: LAMA2; (-) strand; PAM type: NNGRRT; PAM sequence: CTGAAT
ctctaaaaaatatgttaaac

SEQ ID NO: 19677 - DNA, 20 bp, Artificial Sequence
  Description of Artificial Sequence: Synthetic oligonucleotide
  Target: LAMA2; (-) strand; PAM type: NNGRRT; PAM sequence: AAGAAT
caagaagataaaaattcatc

SEQ ID NO: 19678 - DNA, 20 bp, Artificial Sequence
  Description of Artificial Sequence: Synthetic oligonucleotide
  Target: LAMA2; (-) strand; PAM type: NNGRRT; PAM sequence: TGGGGT
ccctaaattacttaagaatc

SEQ ID NO: 19679 - DNA, 20 bp, Artificial Sequence
  Description of Artificial Sequence: Synthetic oligonucleotide
  Target: LAMA2; (-) strand; PAM type: NNGRRT; PAM sequence: AAGAAT
tattgtgccctaaattactt

SEQ ID NO: 19680 - DNA, 20 bp, Artificial Sequence
  Description of Artificial Sequence: Synthetic oligonucleotide
  Target: LAMA2; (-) strand; PAM type: NNGRRT; PAM sequence: GTGAAT
ctcccattgattaaagagat

SEQ ID NO: 19681 - DNA, 20 bp, Artificial Sequence
  Description of Artificial Sequence: Synthetic oligonucleotide
  Target: LAMA2; (-) strand; PAM type: NNGRRT; PAM sequence: AAGGAT
aaattctagcagttctggag

SEQ ID NO: 19682 - DNA, 20 bp, Artificial Sequence
  Description of Artificial Sequence: Synthetic oligonucleotide
  Target: LAMA2; (-) strand; PAM type: NNGRRT; PAM sequence: GCGAAT
cggatcctctgaaatctcag

SEQ ID NO: 19683 - DNA, 20 bp, Artificial Sequence
  Description of Artificial Sequence: Synthetic oligonucleotide
  Target: LAMA2; (-) strand; PAM type: NNGRRT; PAM sequence: GCGGAT
atcaagtcagcattcagtgt

SEQ ID NO: 19684 - DNA, 20 bp, Artificial Sequence
  Description of Artificial Sequence: Synthetic oligonucleotide
  Target: LAMA2; (-) strand; PAM type: NNGRRT; PAM sequence: TTGGGT
gacaatggggtcaatttctc

SEQ ID NO: 19685 - DNA, 20 bp, Artificial Sequence
  Description of Artificial Sequence: Synthetic oligonucleotide
  Target: LAMA2; (-) strand; PAM type: NNGRRT; PAM sequence: TGGGGT
acttactcttctggtgacaa

SEQ ID NO: 19686 - DNA, 20 bp, Artificial Sequence
  Description of Artificial Sequence: Synthetic oligonucleotide
  Target: LAMA2; (-) strand; PAM type: NNGRRT; PAM sequence: TGGGAT
ttaacagacaaaaagataag

SEQ ID NO: 19687 - DNA, 20 bp, Artificial Sequence
  Description of Artificial Sequence: Synthetic oligonucleotide
  Target: LAMA2; (-) strand; PAM type: NNGRRT; PAM sequence: TTGGAT
catgtaataagcggcacagc

SEQ ID NO: 19688 - DNA, 20 bp, Artificial Sequence
  Description of Artificial Sequence: Synthetic oligonucleotide
  Target: LAMA2; (-) strand; PAM type: NNGRRT; PAM sequence: CTGAAT
agcgtctcagctctgcccta

SEQ ID NO: 19689 - DNA, 20 bp, Artificial Sequence
  Description of Artificial Sequence: Synthetic oligonucleotide
  Target: LAMA2; (-) strand; PAM type: NNGRRT; PAM sequence: TAGAAT
aaggaaaataaaacagtatg

SEQ ID NO: 19690 - DNA, 20 bp, Artificial Sequence
  Description of Artificial Sequence: Synthetic oligonucleotide
  Target: LAMA2; (-) strand; PAM type: NNGRRT; PAM sequence: CTGGGT
cggttatcactcatagcaat

SEQ ID NO: 19691 - DNA, 20 bp, Artificial Sequence
  Description of Artificial Sequence: Synthetic oligonucleotide
  Target: LAMA2; (-) strand; PAM type: NNGRRT; PAM sequence: GTGAAT
gtgggaggtgccataaacca

SEQ ID NO: 19692 - DNA, 20 bp, Artificial Sequence
  Description of Artificial Sequence: Synthetic oligonucleotide
  Target: LAMA2; (-) strand; PAM type: NNGRRT; PAM sequence: CTGAAT
tttactttatagagttatgg

SEQ ID NO: 19693 - DNA, 20 bp, Artificial Sequence
  Description of Artificial Sequence: Synthetic oligonucleotide
  Target: LAMA2; (-) strand; PAM type: NNGRRT; PAM sequence: TAGAGT
attcacaggagtttacttta

SEQ ID NO: 19694 - DNA, 20 bp, Artificial Sequence
  Description of Artificial Sequence: Synthetic oligonucleotide
  Target: LAMA2; (-) strand; PAM type: NNGRRT; PAM sequence: AGGAGT
acagtagatactctattcac

SEQ ID NO: 19695 - DNA, 20 bp, Artificial Sequence
  Description of Artificial Sequence: Synthetic oligonucleotide
  Target: LAMA2; (-) strand; PAM type: NNGRRT; PAM sequence: TAGAAT
ttaccttagtgggatcattc

SEQ ID NO: 19696 - DNA, 20 bp, Artificial Sequence
  Description of Artificial Sequence: Synthetic oligonucleotide
  Target: LAMA2; (-) strand; PAM type: NNGRRT; PAM sequence: TGGGAT
tgacggtggtcttaccttag

SEQ ID NO: 19697 - DNA, 20 bp, Artificial Sequence
  Description of Artificial Sequence: Synthetic oligonucleotide
  Target: LAMA2; (-) strand; PAM type: NNGRRT; PAM sequence: TAGGAT
gaaaacatgtgaggagtatt

SEQ ID NO: 19698 - DNA, 20 bp, Artificial Sequence
  Description of Artificial Sequence: Synthetic oligonucleotide
  Target: LAMA2; (-) strand; PAM type: NNGRRT; PAM sequence: AGGAGT
acgaggaaagaaaacatgtg

SEQ ID NO: 19699 - DNA, 20 bp, Artificial Sequence
  Description of Artificial Sequence: Synthetic oligonucleotide
  Target: LAMA2; (-) strand; PAM type: NNGRRT; PAM sequence: TTGGGT
atcttgtgatgatggagagg

SEQ ID NO: 19700 - DNA, 20 bp, Artificial Sequence
  Description of Artificial Sequence: Synthetic oligonucleotide
  Target: LAMA2; (-) strand; PAM type: NNGRRT; PAM sequence: TAGAAT
tttttaagtcccgccaaaat

SEQ ID NO: 19701 - DNA, 20 bp, Artificial Sequence
  Description of Artificial Sequence: Synthetic oligonucleotide
  Target: LAMA2; (-) strand; PAM type: NNGRRT; PAM sequence: TTGAGT
taaatgagtgtttattgaac

SEQ ID NO: 19702 - DNA, 20 bp, Artificial Sequence
  Description of Artificial Sequence: Synthetic oligonucleotide
  Target: LAMA2; (-) strand; PAM type: NNGRRT; PAM sequence: ATGAGT
tcttatttttatatatttaa

SEQ ID NO: 19703 - DNA, 20 bp, Artificial Sequence
  Description of Artificial Sequence: Synthetic oligonucleotide
  Target: LAMA2; (-) strand; PAM type: NNGRRT; PAM sequence: TTGAGT
aaatgtataatgctttgctt

SEQ ID NO: 19704 - DNA, 20 bp, Artificial Sequence
  Description of Artificial Sequence: Synthetic oligonucleotide
  Target: LAMA2; (-) strand; PAM type: NNGRRT; PAM sequence: TTGGAT
aatggaactggctagggagt

SEQ ID NO: 19705 - DNA, 20 bp, Artificial Sequence
  Description of Artificial Sequence: Synthetic oligonucleotide
  Target: LAMA2; (-) strand; PAM type: NNGRRT; PAM sequence: GGGAGT
tgaactaatggaactggcta

SEQ ID NO: 19706 - DNA, 20 bp, Artificial Sequence
  Description of Artificial Sequence: Synthetic oligonucleotide
  Target: LAMA2; (-) strand; PAM type: NNGRRT; PAM sequence: AAGAAT
catatctgagttccttgact

SEQ ID NO: 19707 - DNA, 20 bp, Artificial Sequence
  Description of Artificial Sequence: Synthetic oligonucleotide
  Target: LAMA2; (-) strand; PAM type: NNGRRT; PAM sequence: CTGAGT
atatgtaggtggacacatat

SEQ ID NO: 19708 - DNA, 20 bp, Artificial Sequence
  Description of Artificial Sequence: Synthetic oligonucleotide
  Target: LAMA2; (-) strand; PAM type: NNGRRT; PAM sequence: TAGAAT
acaaaaaaaacagatttagc

SEQ ID NO: 19709 - DNA, 20 bp, Artificial Sequence
  Description of Artificial Sequence: Synthetic oligonucleotide
  Target: LAMA2; (-) strand; PAM type: NNGRRT; PAM sequence: AAGGAT
aatctacccagctatttttt

SEQ ID NO: 19710 - DNA, 20 bp, Artificial Sequence
  Description of Artificial Sequence: Synthetic oligonucleotide
  Target: LAMA2; (-) strand; PAM type: NNGRRT; PAM sequence: CTGGGT
ttgaaaagaaccaacaaaat

SEQ ID NO: 19711 - DNA, 20 bp, Artificial Sequence
  Description of Artificial Sequence: Synthetic oligonucleotide
  Target: LAMA2; (-) strand; PAM type: NNGRRT; PAM sequence: ATGGAT
tacgcacactgttttacttg

SEQ ID NO: 19712 - DNA, 20 bp, Artificial Sequence
  Description of Artificial Sequence: Synthetic oligonucleotide
  Target: LAMA2; (-) strand; PAM type: NNGRRT; PAM sequence: TAGAGT
agtcagcaccaagtccatgc

SEQ ID NO: 19713 - DNA, 20 bp, Artificial Sequence
  Description of Artificial Sequence: Synthetic oligonucleotide
  Target: LAMA2; (-) strand; PAM type: NNGRRT; PAM sequence: AAGAGT
ctgtgatcttagcccaaagg

SEQ ID NO: 19714 - DNA, 20 bp, Artificial Sequence
  Description of Artificial Sequence: Synthetic oligonucleotide
  Target: LAMA2; (-) strand; PAM type: NNGRRT; PAM sequence: CCGAGT
tccaactgaaatatccttga

SEQ ID NO: 19715 - DNA, 20 bp, Artificial Sequence
  Description of Artificial Sequence: Synthetic oligonucleotide
  Target: LAMA2; (-) strand; PAM type: NNGRRT; PAM sequence: CTGGAT
aaatatacatacatttgtcg

SEQ ID NO: 19716 - DNA, 20 bp, Artificial Sequence
  Description of Artificial Sequence: Synthetic oligonucleotide
  Target: LAMA2; (-) strand; PAM type: NNGRRT; PAM sequence: ATGGAT
agctcttatttcaccctggc

SEQ ID NO: 19717 - DNA, 20 bp, Artificial Sequence
  Description of Artificial Sequence: Synthetic oligonucleotide
  Target: LAMA2; (-) strand; PAM type: NNGRRT; PAM sequence: TTGAAT
atactatacaggagatgagt

SEQ ID NO: 19718 - DNA, 20 bp, Artificial Sequence
  Description of Artificial Sequence: Synthetic oligonucleotide
  Target: LAMA2; (-) strand; PAM type: NNGRRT; PAM sequence: ATGAGT
ttccatatactatacaggag

SEQ ID NO: 19719 - DNA, 20 bp, Artificial Sequence
  Description of Artificial Sequence: Synthetic oligonucleotide
  Target: LAMA2; (-) strand; PAM type: NNGRRT; PAM sequence: TTGAGT
caatcatcagaaaactagct

SEQ ID NO: 19720 - DNA, 20 bp, Artificial Sequence
  Description of Artificial Sequence: Synthetic oligonucleotide
  Target: LAMA2; (-) strand; PAM type: NNGRRT; PAM sequence: CAGGAT
gcatgttgtgcacgagtatc

SEQ ID NO: 19721 - DNA, 20 bp, Artificial Sequence
  Description of Artificial Sequence: Synthetic oligonucleotide
  Target: LAMA2; (-) strand; PAM type: NNGRRT; PAM sequence: ACGAGT
aacaaacctgcatgttgtgc

SEQ ID NO: 19722 - DNA, 20 bp, Artificial Sequence
  Description of Artificial Sequence: Synthetic oligonucleotide
  Target: LAMA2; (-) strand; PAM type: NNGRRT; PAM sequence: ATGGGT
tggaaaattatgcctaggtg

SEQ ID NO: 19723 - DNA, 20 bp, Artificial Sequence
  Description of Artificial Sequence: Synthetic oligonucleotide
  Target: LAMA2; (-) strand; PAM type: NNGRRT; PAM sequence: AGGGAT
tccaaataaaataacagtaa

SEQ ID NO: 19724 - DNA, 20 bp, Artificial Sequence
  Description of Artificial Sequence: Synthetic oligonucleotide
  Target: LAMA2; (-) strand; PAM type: NNGRRT; PAM sequence: ATGAGT
tcattgtttagctctcattt

SEQ ID NO: 19725 - DNA, 20 bp, Artificial Sequence
  Description of Artificial Sequence: Synthetic oligonucleotide
  Target: LAMA2; (-) strand; PAM type: NNGRRT; PAM sequence: TTGAGT
ggtgtgtgttgttcccctcc

SEQ ID NO: 19726 - DNA, 20 bp, Artificial Sequence
  Description of Artificial Sequence: Synthetic oligonucleotide
  Target: LAMA2; (-) strand; PAM type: NNGRRT; PAM sequence: TGGAAT
tacagtctcaatttaccacc

SEQ ID NO: 19727 - DNA, 20 bp, Artificial Sequence
  Description of Artificial Sequence: Synthetic oligonucleotide
  Target: LAMA2; (-) strand; PAM type: NNGRRT; PAM sequence: CTGAAT
atctcctgtctgtgcatgct

SEQ ID NO: 19728 - DNA, 20 bp, Artificial Sequence
  Description of Artificial Sequence: Synthetic oligonucleotide
  Target: LAMA2; (-) strand; PAM type: NNGRRT; PAM sequence: AGGGGT
gagttgattcctaggcctct

SEQ ID NO: 19729 - DNA, 20 bp, Artificial Sequence
  Description of Artificial Sequence: Synthetic oligonucleotide
  Target: LAMA2; (-) strand; PAM type: NNGRRT; PAM sequence: GGGAGT
tttggatatggcaagaagga

SEQ ID NO: 19730 - DNA, 20 bp, Artificial Sequence
  Description of Artificial Sequence: Synthetic oligonucleotide
  Target: LAMA2; (-) strand; PAM type: NNGRRT; PAM sequence: TTGGAT
tcaaaatgttgttaatattt

SEQ ID NO: 19731 - DNA, 20 bp, Artificial Sequence
  Description of Artificial Sequence: Synthetic oligonucleotide
  Target: LAMA2; (-) strand; PAM type: NNGRRT; PAM sequence: GGGGGT
ctgggatctatgtgtttttt

SEQ ID NO: 19732 - DNA, 20 bp, Artificial Sequence
  Description of Artificial Sequence: Synthetic oligonucleotide
  Target: LAMA2; (-) strand; PAM type: NNGRRT; PAM sequence: TGGGAT
aattctccttctctgatgcc

SEQ ID NO: 19733 - DNA, 20 bp, Artificial Sequence
  Description of Artificial Sequence: Synthetic oligonucleotide
  Target: LAMA2; (-) strand; PAM type: NNGRRT; PAM sequence: CTGAAT
gctgggagtggtcttgaaga

SEQ ID NO: 19734 - DNA, 20 bp, Artificial Sequence
  Description of Artificial Sequence: Synthetic oligonucleotide
  Target: LAMA2; (-) strand; PAM type: NNGRRT; PAM sequence: GGGAGT
gaaagcaggaaggcccagct

SEQ ID NO: 19735 - DNA, 20 bp, Artificial Sequence
  Description of Artificial Sequence: Synthetic oligonucleotide
  Target: LAMA2; (-) strand; PAM type: NNGRRT; PAM sequence: CTGGGT
ccaggctggttctttaatca

SEQ ID NO: 19736 - DNA, 20 bp, Artificial Sequence
  Description of Artificial Sequence: Synthetic oligonucleotide
  Target: LAMA2; (-) strand; PAM type: NNGRRT; PAM sequence: GTGGGT
aaagtggtgccaggcttgaa

SEQ ID NO: 19737 - DNA, 20 bp, Artificial Sequence
  Description of Artificial Sequence: Synthetic oligonucleotide
  Target: LAMA2; (-) strand; PAM type: NNGRRT; PAM sequence: TGGAAT
cagctctccagggtttctga

SEQ ID NO: 19738 - DNA, 20 bp, Artificial Sequence
  Description of Artificial Sequence: Synthetic oligonucleotide
  Target: LAMA2; (-) strand; PAM type: NNGRRT; PAM sequence: CAGGGT
ttagaaaagttccagctctc

SEQ ID NO: 19739 - DNA, 20 bp, Artificial Sequence
  Description of Artificial Sequence: Synthetic oligonucleotide
  Target: LAMA2; (-) strand; PAM type: NNGRRT; PAM sequence: AAGAAT
ggctttttttcttggaaagg

SEQ ID NO: 19740 - DNA, 20 bp, Artificial Sequence
  Description of Artificial Sequence: Synthetic oligonucleotide
  Target: LAMA2; (-) strand; PAM type: NNGRRT; PAM sequence: ATGAGT
tcttcgaagtgataatataa

SEQ ID NO: 19741 - DNA, 20 bp, Artificial Sequence
  Description of Artificial Sequence: Synthetic oligonucleotide
  Target: LAMA2; (-) strand; PAM type: NNGRRT; PAM sequence: ATGGGT
ctttaggaaaagctagacat

SEQ ID NO: 19742 - DNA, 20 bp, Artificial Sequence
  Description of Artificial Sequence: Synthetic oligonucleotide
  Target: LAMA2; (-) strand; PAM type: NNGRRT; PAM sequence: TTGGGT
gactatttttaggtcttttc

SEQ ID NO: 19743 - DNA, 20 bp, Artificial Sequence
  Description of Artificial Sequence: Synthetic oligonucleotide
  Target: LAMA2; (-) strand; PAM type: NNGRRT; PAM sequence: TTGAAT
atattaatatttgcattcag

SEQ ID NO: 19744 - DNA, 20 bp, Artificial Sequence
  Description of Artificial Sequence: Synthetic oligonucleotide
  Target: LAMA2; (-) strand; PAM type: NNGRRT; PAM sequence: AAGGAT
ttgagttaatttgttattca

SEQ ID NO: 19745 - DNA, 20 bp, Artificial Sequence
  Description of Artificial Sequence: Synthetic oligonucleotide
  Target: LAMA2; (-) strand; PAM type: NNGRRT; PAM sequence: TTGAGT
ttgtacatgataaatgtgag

SEQ ID NO: 19746 - DNA, 20 bp, Artificial Sequence
  Description of Artificial Sequence: Synthetic oligonucleotide
  Target: LAMA2; (-) strand; PAM type: NNGRRT; PAM sequence: GTGAGT
acacattgtacatgataaat

SEQ ID NO: 19747 - DNA, 20 bp, Artificial Sequence
  Description of Artificial Sequence: Synthetic oligonucleotide
  Target: LAMA2; (-) strand; PAM type: NNGRRT; PAM sequence: ATGGAT
gacccatggatggagaaacc

SEQ ID NO: 19748 - DNA, 20 bp, Artificial Sequence
  Description of Artificial Sequence: Synthetic oligonucleotide
  Target: LAMA2; (-) strand; PAM type: NNGRRT; PAM sequence: ATGGAT
atctgcagttggttagaccc

SEQ ID NO: 19749 - DNA, 20 bp, Artificial Sequence
  Description of Artificial Sequence: Synthetic oligonucleotide
  Target: LAMA2; (-) strand; PAM type: NNGRRT; PAM sequence: AAGGAT
tccctcaaacaccaagattc

SEQ ID NO: 19750 - DNA, 20 bp, Artificial Sequence
  Description of Artificial Sequence: Synthetic oligonucleotide
  Target: LAMA2; (-) strand; PAM type: NNGRRT; PAM sequence: GGGAAT
agccatccctcaatatccat

SEQ ID NO: 19751 - DNA, 20 bp, Artificial Sequence
  Description of Artificial Sequence: Synthetic oligonucleotide
  Target: LAMA2; (-) strand; PAM type: NNGRRT; PAM sequence: CAGAAT
gagagctaatagcatatatg

SEQ ID NO: 19752 - DNA, 20 bp, Artificial Sequence
  Description of Artificial Sequence: Synthetic oligonucleotide
  Target: LAMA2; (-) strand; PAM type: NNGRRT; PAM sequence: GTGAGT
caaatccaaaagcaaatgaa

SEQ ID NO: 19753 - DNA, 20 bp, Artificial Sequence
  Description of Artificial Sequence: Synthetic oligonucleotide
  Target: LAMA2; (-) strand; PAM type: NNGRRT; PAM sequence: GTGAGT
atggtcccctaccatgcatg

SEQ ID NO: 19754 - DNA, 20 bp, Artificial Sequence
  Description of Artificial Sequence: Synthetic oligonucleotide
  Target: LAMA2; (-) strand; PAM type: NNGRRT; PAM sequence: AGGGAT
ggagaagctgtggagaacta

SEQ ID NO: 19755 - DNA, 20 bp, Artificial Sequence
  Description of Artificial Sequence: Synthetic oligonucleotide
  Target: LAMA2; (-) strand; PAM type: NNGRRT; PAM sequence: CTGGGT
gagctcgagagcaaacatcc

SEQ ID NO: 19756 - DNA, 20 bp, Artificial Sequence
  Description of Artificial Sequence: Synthetic oligonucleotide
  Target: LAMA2; (-) strand; PAM type: NNGRRT; PAM sequence: AAGGAT
aacacaagtaaagagtggta

SEQ ID NO: 19757 - DNA, 20 bp, Artificial Sequence
  Description of Artificial Sequence: Synthetic oligonucleotide
  Target: LAMA2; (-) strand; PAM type: NNGRRT; PAM sequence: AAGAGT
taaacgtagaaacacaagta

SEQ ID NO: 19758 - DNA, 20 bp, Artificial Sequence
  Description of Artificial Sequence: Synthetic oligonucleotide
  Target: LAMA2; (-) strand; PAM type: NNGRRT; PAM sequence: TTGAAT
ttatggctaagatccccatc

SEQ ID NO: 19759 - DNA, 20 bp, Artificial Sequence
  Description of Artificial Sequence: Synthetic oligonucleotide
  Target: LAMA2; (-) strand; PAM type: NNGRRT; PAM sequence: AGGAAT
aaatttttacttaagctttc

SEQ ID NO: 19760 - DNA, 20 bp, Artificial Sequence
  Description of Artificial Sequence: Synthetic oligonucleotide
  Target: LAMA2; (-) strand; PAM type: NNGRRT; PAM sequence: TGGAAT
tttctaaatattaaggtgat

SEQ ID NO: 19761 - DNA, 20 bp, Artificial Sequence
  Description of Artificial Sequence: Synthetic oligonucleotide
  Target: LAMA2; (-) strand; PAM type: NNGRRT; PAM sequence: AAGGAT
agggatttgtcatgtcatgg

SEQ ID NO: 19762 - DNA, 20 bp, Artificial Sequence
  Description of Artificial Sequence: Synthetic oligonucleotide
  Target: LAMA2; (-) strand; PAM type: NNGRRT; PAM sequence: AGGGAT
tgtgattattcattttatgg

SEQ ID NO: 19763 - DNA, 20 bp, Artificial Sequence
  Description of Artificial Sequence: Synthetic oligonucleotide
  Target: LAMA2; (-) strand; PAM type: NNGRRT; PAM sequence: TAGAAT
caaattaaactcaaatgaat

SEQ ID NO: 19764 - DNA, 20 bp, Artificial Sequence
  Description of Artificial Sequence: Synthetic oligonucleotide
  Target: LAMA2; (-) strand; PAM type: NNGRRT; PAM sequence: ATGAAT
aaaatccaaattaaactcaa

SEQ ID NO: 19765 - DNA, 20 bp, Artificial Sequence
  Description of Artificial Sequence: Synthetic oligonucleotide
  Target: LAMA2; (-) strand; PAM type: NNGRRT; PAM sequence: ATGAAT
agtaaaggctcagcaactga

SEQ ID NO: 19766 - DNA, 20 bp, Artificial Sequence
  Description of Artificial Sequence: Synthetic oligonucleotide
  Target: LAMA2; (-) strand; PAM type: NNGRRT; PAM sequence: CTGAAT
gtttagtaaaggctcagcaa

SEQ ID NO: 19767 - DNA, 20 bp, Artificial Sequence
  Description of Artificial Sequence: Synthetic oligonucleotide
  Target: LAMA2; (-) strand; PAM type: NNGRRT; PAM sequence: CAGAAT
atcagcaacttactatttca

SEQ ID NO: 19768 - DNA, 20 bp, Artificial Sequence
  Description of Artificial Sequence: Synthetic oligonucleotide
  Target: LAMA2; (-) strand; PAM type: NNGRRT; PAM sequence: AAGAAT
ccgctctgtctgtaaccttc

SEQ ID NO: 19769 - DNA, 20 bp, Artificial Sequence
  Description of Artificial Sequence: Synthetic oligonucleotide
  Target: LAMA2; (-) strand; PAM type: NNGRRT; PAM sequence: AAGAGT
tatttagaattcgtgttgtc

SEQ ID NO: 19770 - DNA, 20 bp, Artificial Sequence
  Description of Artificial Sequence: Synthetic oligonucleotide
  Target: LAMA2; (-) strand; PAM type: NNGRRT; PAM sequence: TAGAAT
agacttattctcacactatt

SEQ ID NO: 19771 - DNA, 20 bp, Artificial Sequence
  Description of Artificial Sequence: Synthetic oligonucleotide
  Target: LAMA2; (-) strand; PAM type: NNGRRT; PAM sequence: ATGAAT
gcatgccactggacctggct

SEQ ID NO: 19772 - DNA, 20 bp, Artificial Sequence
  Description of Artificial Sequence: Synthetic oligonucleotide
  Target: LAMA2; (-) strand; PAM type: NNGRRT; PAM sequence: TGGGAT
catagcttctttccagtagc

SEQ ID NO: 19773 - DNA, 20 bp, Artificial Sequence
  Description of Artificial Sequence: Synthetic oligonucleotide
  Target: LAMA2; (-) strand; PAM type: NNGRRT; PAM sequence: CAGGGT
tgaaaacggagtgatacaga

SEQ ID NO: 19774 - DNA, 20 bp, Artificial Sequence
  Description of Artificial Sequence: Synthetic oligonucleotide
  Target: LAMA2; (-) strand; PAM type: NNGRRT; PAM sequence: CGGAGT
tctttacagcagtgtgaaaa

SEQ ID NO: 19775 - DNA, 20 bp, Artificial Sequence
  Description of Artificial Sequence: Synthetic oligonucleotide
  Target: LAMA2; (-) strand; PAM type: NNGRRT; PAM sequence: TCGGGT
cctttataaattacccagtc

SEQ ID NO: 19776 - DNA, 20 bp, Artificial Sequence
  Description of Artificial Sequence: Synthetic oligonucleotide
  Target: LAMA2; (-) strand; PAM type: NNGRRT; PAM sequence: GTGAGT
cctcctagccatgcagaagg

SEQ ID NO: 19777 - DNA, 20 bp, Artificial Sequence
  Description of Artificial Sequence: Synthetic oligonucleotide
  Target: LAMA2; (-) strand; PAM type: NNGRRT; PAM sequence: AAGGGT
gaggcctcctagccatgcag

SEQ ID NO: 19778 - DNA, 20 bp, Artificial Sequence
  Description of Artificial Sequence: Synthetic oligonucleotide
  Target: LAMA2; (-) strand; PAM type: NNGRRT; PAM sequence: GTGAGT
tgctgtcctcatgatagtga

SEQ ID NO: 19779 - DNA, 20 bp, Artificial Sequence
  Description of Artificial Sequence: Synthetic oligonucleotide
  Target: LAMA2; (-) strand; PAM type: NNGRRT; PAM sequence: GTGAGT
cccatgctgtcctcatgata

SEQ ID NO: 19780 - DNA, 20 bp, Artificial Sequence
  Description of Artificial Sequence: Synthetic oligonucleotide
  Target: LAMA2; (-) strand; PAM type: NNGRRT; PAM sequence: CTGGAT
gtatggagggagggaggaga

SEQ ID NO: 19781 - DNA, 20 bp, Artificial Sequence
  Description of Artificial Sequence: Synthetic oligonucleotide
  Target: LAMA2; (-) strand; PAM type: NNGRRT; PAM sequence: AAGAAT
atatctttagggcaacatac

SEQ ID NO: 19782 - DNA, 20 bp, Artificial Sequence
  Description of Artificial Sequence: Synthetic oligonucleotide
  Target: LAMA2; (-) strand; PAM type: NNGRRT; PAM sequence: GAGAGT
gtagttttgctatgttaatg

SEQ ID NO: 19783 - DNA, 20 bp, Artificial Sequence
  Description of Artificial Sequence: Synthetic oligonucleotide
  Target: LAMA2; (-) strand; PAM type: NNGRRT; PAM sequence: TAGAAT
caacctgctgacatttgatt

SEQ ID NO: 19784 - DNA, 20 bp, Artificial Sequence
  Description of Artificial Sequence: Synthetic oligonucleotide
  Target: LAMA2; (-) strand; PAM type: NNGRRT; PAM sequence: AGGAAT
aaagttatatgtcatttctg

SEQ ID NO: 19785 - DNA, 20 bp, Artificial Sequence
  Description of Artificial Sequence: Synthetic oligonucleotide
  Target: LAMA2; (-) strand; PAM type: NNGRRT; PAM sequence: ATGAGT
taattgatacttccttcatt

SEQ ID NO: 19786 - DNA, 20 bp, Artificial Sequence
  Description of Artificial Sequence: Synthetic oligonucleotide
  Target: LAMA2; (-) strand; PAM type: NNGRRT; PAM sequence: AAGAAT
ttcaaatatttgttgagtag

SEQ ID NO: 19787 - DNA, 20 bp, Artificial Sequence
  Description of Artificial Sequence: Synthetic oligonucleotide
  Target: LAMA2; (-) strand; PAM type: NNGRRT; PAM sequence: TTGAGT
aataagcattcaaatatttg

SEQ ID NO: 19788 - DNA, 20 bp, Artificial Sequence
  Description of Artificial Sequence: Synthetic oligonucleotide
  Target: LAMA2; (-) strand; PAM type: NNGRRT; PAM sequence: TTGAAT
accttgtgtgttatcaaccc

SEQ ID NO: 19789 - DNA, 20 bp, Artificial Sequence
  Description of Artificial Sequence: Synthetic oligonucleotide
  Target: LAMA2; (-) strand; PAM type: NNGRRT; PAM sequence: AAGGAT
ggaagcataatttctagtca

SEQ ID NO: 19790 - DNA, 20 bp, Artificial Sequence
  Description of Artificial Sequence: Synthetic oligonucleotide
  Target: LAMA2; (-) strand; PAM type: NNGRRT; PAM sequence: TAGGGT
catctatatgaatatatcta

SEQ ID NO: 19791 - DNA, 20 bp, Artificial Sequence
  Description of Artificial Sequence: Synthetic oligonucleotide
  Target: LAMA2; (-) strand; PAM type: NNGRRT; PAM sequence: ATGAAT
taatatgcctgtacatctat

SEQ ID NO: 19792 - DNA, 20 bp, Artificial Sequence
  Description of Artificial Sequence: Synthetic oligonucleotide
  Target: LAMA2; (-) strand; PAM type: NNGRRT; PAM sequence: GAGGAT
agcacttgtataataatgac

SEQ ID NO: 19793 - DNA, 20 bp, Artificial Sequence
  Description of Artificial Sequence: Synthetic oligonucleotide
  Target: LAMA2; (-) strand; PAM type: NNGRRT; PAM sequence: CAGAAT
catgttttgagaatgcttag

SEQ ID NO: 19794 - DNA, 20 bp, Artificial Sequence
  Description of Artificial Sequence: Synthetic oligonucleotide
  Target: LAMA2; (-) strand; PAM type: NNGRRT; PAM sequence: GAGAAT
acttgtctcatacatgtttt

SEQ ID NO: 19795 - DNA, 20 bp, Artificial Sequence
  Description of Artificial Sequence: Synthetic oligonucleotide
  Target: LAMA2; (-) strand; PAM type: NNGRRT; PAM sequence: TCGAGT
agtgactttgaggcaaaaac

SEQ ID NO: 19796 - DNA, 20 bp, Artificial Sequence
  Description of Artificial Sequence: Synthetic oligonucleotide
  Target: LAMA2; (-) strand; PAM type: NNGRRT; PAM sequence: TTGAGT
aaaagtttcctatttgccag

SEQ ID NO: 19797 - DNA, 20 bp, Artificial Sequence
  Description of Artificial Sequence: Synthetic oligonucleotide
  Target: LAMA2; (-) strand; PAM type: NNGRRT; PAM sequence: CCGGGT
atactgggaggacaaggatg

SEQ ID NO: 19798 - DNA, 20 bp, Artificial Sequence
  Description of Artificial Sequence: Synthetic oligonucleotide
  Target: LAMA2; (-) strand; PAM type: NNGRRT; PAM sequence: AAGGAT
cacacacatactgggaggac

SEQ ID NO: 19799 - DNA, 20 bp, Artificial Sequence
  Description of Artificial Sequence: Synthetic oligonucleotide
  Target: LAMA2; (-) strand; PAM type: NNGRRT; PAM sequence: TTGAAT
aagggtacacagggtactac

SEQ ID NO: 19800 - DNA, 20 bp, Artificial Sequence
  Description of Artificial Sequence: Synthetic oligonucleotide
  Target: LAMA2; (-) strand; PAM type: NNGRRT; PAM sequence: CAGGGT
gtgtatcccctaagggtaca

SEQ ID NO: 19801 - DNA, 20 bp, Artificial Sequence
  Description of Artificial Sequence: Synthetic oligonucleotide
  Target: LAMA2; (-) strand; PAM type: NNGRRT; PAM sequence: AAGGGT
tattagcatgtgtatcccct

SEQ ID NO: 19802 - DNA, 20 bp, Artificial Sequence
  Description of Artificial Sequence: Synthetic oligonucleotide
  Target: LAMA2; (-) strand; PAM type: NNGRRT; PAM sequence: AGGAGT
cctgacatgttgagtttctt

SEQ ID NO: 19803 - DNA, 20 bp, Artificial Sequence
  Description of Artificial Sequence: Synthetic oligonucleotide
  Target: LAMA2; (-) strand; PAM type: NNGRRT; PAM sequence: TTGAGT
tctccttcctacctgacatg

SEQ ID NO: 19804 - DNA, 20 bp, Artificial Sequence
  Description of Artificial Sequence: Synthetic oligonucleotide
  Target: LAMA2; (-) strand; PAM type: NNGRRT; PAM sequence: TAGGAT
taaatatgaagaatttatat

SEQ ID NO: 19805 - DNA, 20 bp, Artificial Sequence
  Description of Artificial Sequence: Synthetic oligonucleotide
  Target: LAMA2; (-) strand; PAM type: NNGRRT; PAM sequence: AAGAAT
gtaagactcttctaaatatg

SEQ ID NO: 19806 - DNA, 20 bp, Artificial Sequence
  Description of Artificial Sequence: Synthetic oligonucleotide
  Target: LAMA2; (-) strand; PAM type: NNGRRT; PAM sequence: TTGGGT
atcactttctccagaaagga

SEQ ID NO: 19807 - DNA, 20 bp, Artificial Sequence
  Description of Artificial Sequence: Synthetic oligonucleotide
  Target: LAMA2; (-) strand; PAM type: NNGRRT; PAM sequence: AAGGAT
gaaaaatcactttctccaga

SEQ ID NO: 19808 - DNA, 20 bp, Artificial Sequence
  Description of Artificial Sequence: Synthetic oligonucleotide
  Target: LAMA2; (-) strand; PAM type: NNGRRT; PAM sequence: AAGAAT
tctttttcatgttacattag

SEQ ID NO: 19809 - DNA, 20 bp, Artificial Sequence
  Description of Artificial Sequence: Synthetic oligonucleotide
  Target: LAMA2; (-) strand; PAM type: NNGRRT; PAM sequence: TGGGAT
gtcaatagtaattactagat

SEQ ID NO: 19810 - DNA, 20 bp, Artificial Sequence
  Description of Artificial Sequence: Synthetic oligonucleotide
  Target: LAMA2; (-) strand; PAM type: NNGRRT; PAM sequence: TGGAGT
ctcagtttccatataataca

SEQ ID NO: 19811 - DNA, 20 bp, Artificial Sequence
  Description of Artificial Sequence: Synthetic oligonucleotide
  Target: LAMA2; (-) strand; PAM type: NNGRRT; PAM sequence: GTGGGT
tgcaaccaactgtcttggat

SEQ ID NO: 19812 - DNA, 20 bp, Artificial Sequence
  Description of Artificial Sequence: Synthetic oligonucleotide
  Target: LAMA2; (-) strand; PAM type: NNGRRT; PAM sequence: TTGGAT
ctattttgcaaccaactgtc

SEQ ID NO: 19813 - DNA, 20 bp, Artificial Sequence
  Description of Artificial Sequence: Synthetic oligonucleotide
  Target: LAMA2; (-) strand; PAM type: NNGRRT; PAM sequence: AGGAAT
aagatacatggcaggtgcca

SEQ ID NO: 19814 - DNA, 20 bp, Artificial Sequence
  Description of Artificial Sequence: Synthetic oligonucleotide
  Target: LAMA2; (-) strand; PAM type: NNGRRT; PAM sequence: GTGAAT
atctcttcacatcctacccg

SEQ ID NO: 19815 - DNA, 20 bp, Artificial Sequence
  Description of Artificial Sequence: Synthetic oligonucleotide
  Target: LAMA2; (-) strand; PAM type: NNGRRT; PAM sequence: CAGAAT
tctgcactgctaaagactgc

SEQ ID NO: 19816 - DNA, 20 bp, Artificial Sequence
  Description of Artificial Sequence: Synthetic oligonucleotide
  Target: LAMA2; (-) strand; PAM type: NNGRRT; PAM sequence: CAGAGT
caacctctgaagccagactc

SEQ ID NO: 19817 - DNA, 20 bp, Artificial Sequence
  Description of Artificial Sequence: Synthetic oligonucleotide
  Target: LAMA2; (-) strand; PAM type: NNGRRT; PAM sequence: CTGAGT
tatttttgtatactagaaac

SEQ ID NO: 19818 - DNA, 20 bp, Artificial Sequence
  Description of Artificial Sequence: Synthetic oligonucleotide
  Target: LAMA2; (-) strand; PAM type: NNGRRT; PAM sequence: AGGAAT
taatcctcaaaaatgctttt

SEQ ID NO: 19819 - DNA, 20 bp, Artificial Sequence
  Description of Artificial Sequence: Synthetic oligonucleotide
  Target: LAMA2; (-) strand; PAM type: NNGRRT; PAM sequence: GTGGGT
aaatttctgtattagagcct

SEQ ID NO: 19820 - DNA, 20 bp, Artificial Sequence
  Description of Artificial Sequence: Synthetic oligonucleotide
  Target: LAMA2; (-) strand; PAM type: NNGRRT; PAM sequence: ATGAAT
taacagctaggtaatctgta

SEQ ID NO: 19821 - DNA, 20 bp, Artificial Sequence
  Description of Artificial Sequence: Synthetic oligonucleotide
  Target: LAMA2; (-) strand; PAM type: NNGRRT; PAM sequence: CTGAAT
taaattattcaatgatggca

SEQ ID NO: 19822 - DNA, 20 bp, Artificial Sequence
  Description of Artificial Sequence: Synthetic oligonucleotide
  Target: LAMA2; (-) strand; PAM type: NNGRRT; PAM sequence: TAGAAT
aataaattcacacattttaa

SEQ ID NO: 19823 - DNA, 20 bp, Artificial Sequence
  Description of Artificial Sequence: Synthetic oligonucleotide
  Target: LAMA2; (-) strand; PAM type: NNGRRT; PAM sequence: CTGGAT
caaacatatccagaaagtat

SEQ ID NO: 19824 - DNA, 20 bp, Artificial Sequence
  Description of Artificial Sequence: Synthetic oligonucleotide
  Target: LAMA2; (-) strand; PAM type: NNGRRT; PAM sequence: TGGAAT
gcctcagcctctcaaagtgc

SEQ ID NO: 19825 - DNA, 20 bp, Artificial Sequence
  Description of Artificial Sequence: Synthetic oligonucleotide
  Target: LAMA2; (-) strand; PAM type: NNGRRT; PAM sequence: CCGAGT
aatcctcctgtctcagcctc

SEQ ID NO: 19826 - DNA, 20 bp, Artificial Sequence
  Description of Artificial Sequence: Synthetic oligonucleotide
  Target: LAMA2; (-) strand; PAM type: NNGRRT; PAM sequence: CAGAGT
ctgtcgcccaggctggagtg

SEQ ID NO: 19827 - DNA, 20 bp, Artificial Sequence
  Description of Artificial Sequence: Synthetic oligonucleotide
  Target: LAMA2; (-) strand; PAM type: NNGRRT; PAM sequence: TGGAGT
tctcactctgtcgcccaggc

SEQ ID NO: 19828 - DNA, 20 bp, Artificial Sequence
  Description of Artificial Sequence: Synthetic oligonucleotide
  Target: LAMA2; (-) strand; PAM type: NNGRRT; PAM sequence: CAGAGT
aatagattttttttttgaga

SEQ ID NO: 19829 - DNA, 20 bp, Artificial Sequence
  Description of Artificial Sequence: Synthetic oligonucleotide
  Target: LAMA2; (-) strand; PAM type: NNGRRT; PAM sequence: TTGGGT
cagtttataccagcagtgtt

SEQ ID NO: 19830 - DNA, 20 bp, Artificial Sequence
  Description of Artificial Sequence: Synthetic oligonucleotide
  Target: LAMA2; (-) strand; PAM type: NNGRRT; PAM sequence: TTGGGT
aaaaagcatactttacccct

SEQ ID NO: 19831 - DNA, 20 bp, Artificial Sequence
  Description of Artificial Sequence: Synthetic oligonucleotide
  Target: LAMA2; (-) strand; PAM type: NNGRRT; PAM sequence: TGGAGT
ggagccatgataaaactttc

SEQ ID NO: 19832 - DNA, 20 bp, Artificial Sequence
  Description of Artificial Sequence: Synthetic oligonucleotide
  Target: LAMA2; (-) strand; PAM type: NNGRRT; PAM sequence: AGGGGT
aatcagaacagagtttgcct

SEQ ID NO: 19833 - DNA, 20 bp, Artificial Sequence
  Description of Artificial Sequence: Synthetic oligonucleotide
  Target: LAMA2; (-) strand; PAM type: NNGRRT; PAM sequence: CAGAGT
ttacgttctaaaaatcagaa

SEQ ID NO: 19834 - DNA, 20 bp, Artificial Sequence
  Description of Artificial Sequence: Synthetic oligonucleotide
  Target: LAMA2; (-) strand; PAM type: NNGRRT; PAM sequence: TCGAGT
ataaatcttaacatattatg

SEQ ID NO: 19835 - DNA, 20 bp, Artificial Sequence
  Description of Artificial Sequence: Synthetic oligonucleotide
  Target: LAMA2; (-) strand; PAM type: NNGRRT; PAM sequence: ATGGAT
actactgatgcacaaacaac

SEQ ID NO: 19836 - DNA, 20 bp, Artificial Sequence
  Description of Artificial Sequence: Synthetic oligonucleotide
  Target: LAMA2; (-) strand; PAM type: NNGRRT; PAM sequence: ATGGAT
taatttctatcaacaggaga

SEQ ID NO: 19837 - DNA, 20 bp, Artificial Sequence
  Description of Artificial Sequence: Synthetic oligonucleotide
  Target: LAMA2; (-) strand; PAM type: NNGRRT; PAM sequence: GAGAAT
atcctaatttctatcaacag

SEQ ID NO: 19838 - DNA, 20 bp, Artificial Sequence
  Description of Artificial Sequence: Synthetic oligonucleotide
  Target: LAMA2; (-) strand; PAM type: NNGRRT; PAM sequence: TAGAAT
atcaaatattagagatgata

SEQ ID NO: 19839 - DNA, 20 bp, Artificial Sequence
  Description of Artificial Sequence: Synthetic oligonucleotide
  Target: LAMA2; (-) strand; PAM type: NNGRRT; PAM sequence: AGGAAT
tacttcataagagaagatac

SEQ ID NO: 19840 - DNA, 20 bp, Artificial Sequence
  Description of Artificial Sequence: Synthetic oligonucleotide
  Target: LAMA2; (-) strand; PAM type: NNGRRT; PAM sequence: TAGGAT
taagttaaaattttggtttt

SEQ ID NO: 19841 - DNA, 20 bp, Artificial Sequence
  Description of Artificial Sequence: Synthetic oligonucleotide
  Target: LAMA2; (-) strand; PAM type: NNGRRT; PAM sequence: ATGGGT
cacacaaacatttacttgat

SEQ ID NO: 19842 - DNA, 20 bp, Artificial Sequence
  Description of Artificial Sequence: Synthetic oligonucleotide
  Target: LAMA2; (-) strand; PAM type: NNGRRT; PAM sequence: TAGAGT
ccattttccatatttgtata

SEQ ID NO: 19843 - DNA, 20 bp, Artificial Sequence
  Description of Artificial Sequence: Synthetic oligonucleotide
  Target: LAMA2; (-) strand; PAM type: NNGRRT; PAM sequence: AAGAGT
atctactctcagcatttttt

SEQ ID NO: 19844 - DNA, 20 bp, Artificial Sequence
  Description of Artificial Sequence: Synthetic oligonucleotide
  Target: LAMA2; (-) strand; PAM type: NNGRRT; PAM sequence: TTGAAT
atcatgtgtgacatgatatt

SEQ ID NO: 19845 - DNA, 20 bp, Artificial Sequence
  Description of Artificial Sequence: Synthetic oligonucleotide
  Target: LAMA2; (-) strand; PAM type: NNGRRT; PAM sequence: ATGAAT
ctctgtactggaacactgac

SEQ ID NO: 19846 - DNA, 20 bp, Artificial Sequence
  Description of Artificial Sequence: Synthetic oligonucleotide
  Target: LAMA2; (-) strand; PAM type: NNGRRT; PAM sequence: AAGGAT
taaaaaaaaaaaaagaaatt

SEQ ID NO: 19847 - DNA, 20 bp, Artificial Sequence
  Description of Artificial Sequence: Synthetic oligonucleotide
  Target: LAMA2; (-) strand; PAM type: NNGRRT; PAM sequence: GTGAAT
agaaagcacttcttattgaa

SEQ ID NO: 19848 - DNA, 20 bp, Artificial Sequence
  Description of Artificial Sequence: Synthetic oligonucleotide
  Target: LAMA2; (-) strand; PAM type: NNGRRT; PAM sequence: TTGAAT
caggattcctctgttgccat

SEQ ID NO: 19849 - DNA, 20 bp, Artificial Sequence
  Description of Artificial Sequence: Synthetic oligonucleotide
  Target: LAMA2; (-) strand; PAM type: NNGRRT; PAM sequence: CAGGAT
gtctccatgcacatgcacgc

SEQ ID NO: 19850 - DNA, 20 bp, Artificial Sequence
  Description of Artificial Sequence: Synthetic oligonucleotide
  Target: LAMA2; (-) strand; PAM type: NNGRRT; PAM sequence: TGGGAT
cctatagatgatgatgtgtt

SEQ ID NO: 19851 - DNA, 20 bp, Artificial Sequence
  Description of Artificial Sequence: Synthetic oligonucleotide
  Target: LAMA2; (-) strand; PAM type: NNGRRT; PAM sequence: CAGAGT
aagaagataaatgagtgcag

SEQ ID NO: 19852 - DNA, 20 bp, Artificial Sequence
  Description of Artificial Sequence: Synthetic oligonucleotide
  Target: LAMA2; (-) strand; PAM type: NNGRRT; PAM sequence: ATGAGT
tgaaagccttaagaagataa

SEQ ID NO: 19853 - DNA, 20 bp, Artificial Sequence
  Description of Artificial Sequence: Synthetic oligonucleotide
  Target: LAMA2; (-) strand; PAM type: NNGRRT; PAM sequence: CTGAAT
ctccagtcaagctctgggta

SEQ ID NO: 19854 - DNA, 20 bp, Artificial Sequence
  Description of Artificial Sequence: Synthetic oligonucleotide
  Target: LAMA2; (-) strand; PAM type: NNGRRT; PAM sequence: CTGGGT
ttagtgtctccagtcaagct

SEQ ID NO: 19855 - DNA, 20 bp, Artificial Sequence
  Description of Artificial Sequence: Synthetic oligonucleotide
  Target: LAMA2; (-) strand; PAM type: NNGRRT; PAM sequence: ATGGGT
tttttgatgcctttttttaa

SEQ ID NO: 19856 - DNA, 20 bp, Artificial Sequence
  Description of Artificial Sequence: Synthetic oligonucleotide
  Target: LAMA2; (-) strand; PAM type: NNGRRT; PAM sequence: TAGGAT
aaacctttcagtactcttat

SEQ ID NO: 19857 - DNA, 20 bp, Artificial Sequence
  Description of Artificial Sequence: Synthetic oligonucleotide
  Target: LAMA2; (-) strand; PAM type: NNGRRT; PAM sequence: AAGGAT
gggtggaattagagtggaat

SEQ ID NO: 19858 - DNA, 20 bp, Artificial Sequence
  Description of Artificial Sequence: Synthetic oligonucleotide
  Target: LAMA2; (-) strand; PAM type: NNGRRT; PAM sequence: TGGAAT
tggcatgggtggaattagag

SEQ ID NO: 19859 - DNA, 20 bp, Artificial Sequence
  Description of Artificial Sequence: Synthetic oligonucleotide
  Target: LAMA2; (-) strand; PAM type: NNGRRT; PAM sequence: TAGAGT
acccatggcatgggtggaat

SEQ ID NO: 19860 - DNA, 20 bp, Artificial Sequence
  Description of Artificial Sequence: Synthetic oligonucleotide
  Target: LAMA2; (-) strand; PAM type: NNGRRT; PAM sequence: TGGAAT
gtttttacccatggcatggg

SEQ ID NO: 19861 - DNA, 20 bp, Artificial Sequence
  Description of Artificial Sequence: Synthetic oligonucleotide
  Target: LAMA2; (-) strand; PAM type: NNGRRT; PAM sequence: ATGGGT
gaactgtttttacccatggc

SEQ ID NO: 19862 - DNA, 20 bp, Artificial Sequence
  Description of Artificial Sequence: Synthetic oligonucleotide
  Target: LAMA2; (-) strand; PAM type: NNGRRT; PAM sequence: TTGAAT
gaagacgcttgccaagatgg

SEQ ID NO: 19863 - DNA, 20 bp, Artificial Sequence
  Description of Artificial Sequence: Synthetic oligonucleotide
  Target: LAMA2; (-) strand; PAM type: NNGRRT; PAM sequence: GAGAAT
gcccccagactcacagcgtt

SEQ ID NO: 19864 - DNA, 20 bp, Artificial Sequence
  Description of Artificial Sequence: Synthetic oligonucleotide
  Target: LAMA2; (-) strand; PAM type: NNGRRT; PAM sequence: CAGAAT
agcagttttgaagctaatgt

SEQ ID NO: 19865 - DNA, 20 bp, Artificial Sequence
  Description of Artificial Sequence: Synthetic oligonucleotide
  Target: LAMA2; (-) strand; PAM type: NNGRRT; PAM sequence: ATGAAT
gtctaatcggtggaacagtg

SEQ ID NO: 19866 - DNA, 20 bp, Artificial Sequence
  Description of Artificial Sequence: Synthetic oligonucleotide
  Target: LAMA2; (-) strand; PAM type: NNGRRT; PAM sequence: CCGAGT
tgccatattataacatggta

SEQ ID NO: 19867 - DNA, 20 bp, Artificial Sequence
  Description of Artificial Sequence: Synthetic oligonucleotide
  Target: LAMA2; (-) strand; PAM type: NNGRRT; PAM sequence: AGGGAT
gctcgtcgttgtatcacagg

SEQ ID NO: 19868 - DNA, 20 bp, Artificial Sequence
  Description of Artificial Sequence: Synthetic oligonucleotide
  Target: LAMA2; (-) strand; PAM type: NNGRRT; PAM sequence: CAGGGT
gttgatgtgcccttgaatac

SEQ ID NO: 19869 - DNA, 20 bp, Artificial Sequence
  Description of Artificial Sequence: Synthetic oligonucleotide
  Target: LAMA2; (-) strand; PAM type: NNGRRT; PAM sequence: TTGAAT
caaatgaagttgatgtgccc

SEQ ID NO: 19870 - DNA, 20 bp, Artificial Sequence
  Description of Artificial Sequence: Synthetic oligonucleotide
  Target: LAMA2; (-) strand; PAM type: NNGRRT; PAM sequence: GGGAGT
acatcctcatcaagaaaaat

SEQ ID NO: 19871 - DNA, 20 bp, Artificial Sequence
  Description of Artificial Sequence: Synthetic oligonucleotide
  Target: LAMA2; (-) strand; PAM type: NNGRRT; PAM sequence: ATGGAT
gattactgattaccatgaaa

SEQ ID NO: 19872 - DNA, 20 bp, Artificial Sequence
  Description of Artificial Sequence: Synthetic oligonucleotide
  Target: LAMA2; (-) strand; PAM type: NNGRRT; PAM sequence: AAGAGT
atgggcaaatggcatggcga

SEQ ID NO: 19873 - DNA, 20 bp, Artificial Sequence
  Description of Artificial Sequence: Synthetic oligonucleotide
  Target: LAMA2; (-) strand; PAM type: NNGRRT; PAM sequence: ACGGAT
aaaggccgatatggagaagt

SEQ ID NO: 19874 - DNA, 20 bp, Artificial Sequence
  Description of Artificial Sequence: Synthetic oligonucleotide
  Target: LAMA2; (-) strand; PAM type: NNGRRT; PAM sequence: GTGGGT
ccagtcacaaagttctggta

SEQ ID NO: 19875 - DNA, 20 bp, Artificial Sequence
  Description of Artificial Sequence: Synthetic oligonucleotide
  Target: LAMA2; (-) strand; PAM type: NNGRRT; PAM sequence: CAGGAT
gttacaatcgtgatttggaa

SEQ ID NO: 19876 - DNA, 20 bp, Artificial Sequence
  Description of Artificial Sequence: Synthetic oligonucleotide
  Target: LAMA2; (-) strand; PAM type: NNGRRT; PAM sequence: TAGAAT
agcccagctacgccggacaa

SEQ ID NO: 19877 - DNA, 20 bp, Artificial Sequence
  Description of Artificial Sequence: Synthetic oligonucleotide
  Target: LAMA2; (-) strand; PAM type: NNGRRT; PAM sequence: AAGGAT
ttcagggtgtatgaaatatg

SEQ ID NO: 19878 - DNA, 20 bp, Artificial Sequence
  Description of Artificial Sequence: Synthetic oligonucleotide
  Target: LAMA2; (-) strand; PAM type: NNGRRT; PAM sequence: CAGGGT
gggagaaaccacattagctt

SEQ ID NO: 19879 - DNA, 20 bp, Artificial Sequence
  Description of Artificial Sequence: Synthetic oligonucleotide
  Target: LAMA2; (-) strand; PAM type: NNGRRT; PAM sequence: GAGGAT
atggagtaaccttagcacca

SEQ ID NO: 19880 - DNA, 20 bp, Artificial Sequence
  Description of Artificial Sequence: Synthetic oligonucleotide
  Target: LAMA2; (-) strand; PAM type: NNGRRT; PAM sequence: TGGAGT
gaccagaaaaagtcagaaaa

SEQ ID NO: 19881 - DNA, 20 bp, Artificial Sequence
  Description of Artificial Sequence: Synthetic oligonucleotide
  Target: LAMA2; (-) strand; PAM type: NNGRRT; PAM sequence: TGGGAT
gatagtatgctccacggcac

SEQ ID NO: 19882 - DNA, 20 bp, Artificial Sequence
  Description of Artificial Sequence: Synthetic oligonucleotide
  Target: LAMA2; (-) strand; PAM type: NNGRRT; PAM sequence: CTGGAT
ctcgtgttcaaggacagaat

SEQ ID NO: 19883 - DNA, 20 bp, Artificial Sequence
  Description of Artificial Sequence: Synthetic oligonucleotide
  Target: LAMA2; (-) strand; PAM type: NNGRRT; PAM sequence: CAGAAT
tcatttctcgtgttcaagga

SEQ ID NO: 19884 - DNA, 20 bp, Artificial Sequence
  Description of Artificial Sequence: Synthetic oligonucleotide
  Target: LAMA2; (-) strand; PAM type: NNGRRT; PAM sequence: CTGAAT
tcttttacaagaaaatctca

SEQ ID NO: 19885 - DNA, 20 bp, Artificial Sequence
  Description of Artificial Sequence: Synthetic oligonucleotide
  Target: LAMA2; (-) strand; PAM type: NNGRRT; PAM sequence: GGGAGT
aggagtcgtaagaaagcagt

SEQ ID NO: 19886 - DNA, 20 bp, Artificial Sequence
  Description of Artificial Sequence: Synthetic oligonucleotide
  Target: LAMA2; (-) strand; PAM type: NNGRRT; PAM sequence: AGGAGT
tttatctagccacatcttgg

SEQ ID NO: 19887 - DNA, 20 bp, Artificial Sequence
  Description of Artificial Sequence: Synthetic oligonucleotide
  Target: LAMA2; (-) strand; PAM type: NNGRRT; PAM sequence: TGGAAT
gcatcagtttaatactgtct

SEQ ID NO: 19888 - DNA, 20 bp, Artificial Sequence
  Description of Artificial Sequence: Synthetic oligonucleotide
  Target: LAMA2; (-) strand; PAM type: NNGRRT; PAM sequence: CCGAAT
attaagcatggtgggtgctc

SEQ ID NO: 19889 - DNA, 20 bp, Artificial Sequence
  Description of Artificial Sequence: Synthetic oligonucleotide
  Target: LAMA2; (-) strand; PAM type: NNGRRT; PAM sequence: GTGGGT
taataaagaaattaagcatg

SEQ ID NO: 19890 - DNA, 20 bp, Artificial Sequence
  Description of Artificial Sequence: Synthetic oligonucleotide
  Target: LAMA2; (-) strand; PAM type: NNGRRT; PAM sequence: TAGAAT
agcatgtagtttaaaactac

SEQ ID NO: 19891 - DNA, 20 bp, Artificial Sequence
  Description of Artificial Sequence: Synthetic oligonucleotide
  Target: LAMA2; (-) strand; PAM type: NNGRRT; PAM sequence: CTGAAT
ttgcaaaggaagaagtaagc

SEQ ID NO: 19892 - DNA, 20 bp, Artificial Sequence
  Description of Artificial Sequence: Synthetic oligonucleotide
  Target: LAMA2; (-) strand; PAM type: NNGRRT; PAM sequence: AAGGGT
gggacctactgaatctgata

SEQ ID NO: 19893 - DNA, 20 bp, Artificial Sequence
  Description of Artificial Sequence: Synthetic oligonucleotide
  Target: LAMA2; (-) strand; PAM type: NNGRRT; PAM sequence: CTGAAT
taggaatagtaggggaccta

SEQ ID NO: 19894 - DNA, 20 bp, Artificial Sequence
  Description of Artificial Sequence: Synthetic oligonucleotide
  Target: LAMA2; (-) strand; PAM type: NNGRRT; PAM sequence: AGGAAT
ataaaaactctctgcaactt

SEQ ID NO: 19895 - DNA, 20 bp, Artificial Sequence
  Description of Artificial Sequence: Synthetic oligonucleotide
  Target: LAMA2; (-) strand; PAM type: NNGRRT; PAM sequence: CAGAAT
gcataaattgtccccgttaa

SEQ ID NO: 19896 - DNA, 20 bp, Artificial Sequence
  Description of Artificial Sequence: Synthetic oligonucleotide
  Target: LAMA2; (-) strand; PAM type: NNGRRT; PAM sequence: TTGAAT
cttaaccaaacattagtcaa

SEQ ID NO: 19897 - DNA, 20 bp, Artificial Sequence
  Description of Artificial Sequence: Synthetic oligonucleotide
  Target: LAMA2; (-) strand; PAM type: NNGRRT; PAM sequence: GAGGAT
tagaccaatatattttatga

SEQ ID NO: 19898 - DNA, 20 bp, Artificial Sequence
  Description of Artificial Sequence: Synthetic oligonucleotide
  Target: LAMA2; (-) strand; PAM type: NNGRRT; PAM sequence: GAGAAT
attttatcaagcattttaaa

SEQ ID NO: 19899 - DNA, 20 bp, Artificial Sequence
  Description of Artificial Sequence: Synthetic oligonucleotide
  Target: LAMA2; (-) strand; PAM type: NNGRRT; PAM sequence: ATGAAT
ccaatgatttgacaatttag

SEQ ID NO: 19900 - DNA, 20 bp, Artificial Sequence
  Description of Artificial Sequence: Synthetic oligonucleotide
  Target: LAMA2; (-) strand; PAM type: NNGRRT; PAM sequence: GGGGAT
atcattttaaaaattacaca

SEQ ID NO: 19901 - DNA, 20 bp, Artificial Sequence
  Description of Artificial Sequence: Synthetic oligonucleotide
  Target: LAMA2; (-) strand; PAM type: NNGRRT; PAM sequence: CAGAAT
gaataatataataaatagaa

SEQ ID NO: 19902 - DNA, 20 bp, Artificial Sequence
  Description of Artificial Sequence: Synthetic oligonucleotide
  Target: LAMA2; (-) strand; PAM type: NNGRRT; PAM sequence: ATGAAT
ttaaaaccaaaacaggtcaa

SEQ ID NO: 19903 - DNA, 20 bp, Artificial Sequence
  Description of Artificial Sequence: Synthetic oligonucleotide
  Target: LAMA2; (-) strand; PAM type: NNGRRT; PAM sequence: CTGAAT
acaatgaacataaagcattc

SEQ ID NO: 19904 - DNA, 20 bp, Artificial Sequence
  Description of Artificial Sequence: Synthetic oligonucleotide
  Target: LAMA2; (-) strand; PAM type: NNGRRT; PAM sequence: GAGAGT
ttctaaagtttgacatctta

SEQ ID NO: 19905 - DNA, 20 bp, Artificial Sequence
  Description of Artificial Sequence: Synthetic oligonucleotide
  Target: LAMA2; (-) strand; PAM type: NNGRRT; PAM sequence: AGGAAT
gaaaaaaatgaaagaaaggt

SEQ ID NO: 19906 - DNA, 20 bp, Artificial Sequence
  Description of Artificial Sequence: Synthetic oligonucleotide
  Target: LAMA2; (-) strand; PAM type: NNGRRT; PAM sequence: CAGAGT
atcagaaaaaacataccata

SEQ ID NO: 19907 - DNA, 20 bp, Artificial Sequence
  Description of Artificial Sequence: Synthetic oligonucleotide
  Target: LAMA2; (-) strand; PAM type: NNGRRT; PAM sequence: CAGGAT
actaaacacacagtaattgt

SEQ ID NO: 19908 - DNA, 20 bp, Artificial Sequence
  Description of Artificial Sequence: Synthetic oligonucleotide
  Target: LAMA2; (-) strand; PAM type: NNGRRT; PAM sequence: AAGAAT
ataaaagtagacagaaaagg

SEQ ID NO: 19909 - DNA, 20 bp, Artificial Sequence
  Description of Artificial Sequence: Synthetic oligonucleotide
  Target: LAMA2; (-) strand; PAM type: NNGRRT; PAM sequence: TGGAAT
agataataaaggaaataaaa

SEQ ID NO: 19910 - DNA, 20 bp, Artificial Sequence
  Description of Artificial Sequence: Synthetic oligonucleotide
  Target: LAMA2; (-) strand; PAM type: NNGRRT; PAM sequence: TGGAAT
cctgaacctaaaataaaagt

SEQ ID NO: 19911 - DNA, 20 bp, Artificial Sequence
  Description of Artificial Sequence: Synthetic oligonucleotide
  Target: LAMA2; (-) strand; PAM type: NNGRRT; PAM sequence: CTGGGT
aattttattatgcttattat

SEQ ID NO: 19912 - DNA, 20 bp, Artificial Sequence
  Description of Artificial Sequence: Synthetic oligonucleotide
  Target: LAMA2; (-) strand; PAM type: NNGRRT; PAM sequence: GGGGGT
ctgcttgaaaagggtgggag

SEQ ID NO: 19913 - DNA, 20 bp, Artificial Sequence
  Description of Artificial Sequence: Synthetic oligonucleotide
  Target: LAMA2; (-) strand; PAM type: NNGRRT; PAM sequence: AAGGGT
gacaccagggcctgcttgaa

SEQ ID NO: 19914 - DNA, 20 bp, Artificial Sequence
  Description of Artificial Sequence: Synthetic oligonucleotide
  Target: LAMA2; (-) strand; PAM type: NNGRRT; PAM sequence: TTGAGT
cttatgagtggagctaaaca

SEQ ID NO: 19915 - DNA, 20 bp, Artificial Sequence
  Description of Artificial Sequence: Synthetic oligonucleotide
  Target: LAMA2; (-) strand; PAM type: NNGRRT; PAM sequence: ATGAGT
gatactgcatgttctctctt

SEQ ID NO: 19916 - DNA, 20 bp, Artificial Sequence
  Description of Artificial Sequence: Synthetic oligonucleotide
  Target: LAMA2; (-) strand; PAM type: NNGRRT; PAM sequence: AAGAAT
tatcctaagtgaattaatgc

SEQ ID NO: 19917 - DNA, 20 bp, Artificial Sequence
  Description of Artificial Sequence: Synthetic oligonucleotide
  Target: LAMA2; (-) strand; PAM type: NNGRRT; PAM sequence: GTGAAT
gcagaaggccattatcctaa

SEQ ID NO: 19918 - DNA, 20 bp, Artificial Sequence
  Description of Artificial Sequence: Synthetic oligonucleotide
  Target: LAMA2; (-) strand; PAM type: NNGRRT; PAM sequence: ATGGAT
atcatgtcctttgaagcaac

SEQ ID NO: 19919 - DNA, 20 bp, Artificial Sequence
  Description of Artificial Sequence: Synthetic oligonucleotide
  Target: LAMA2; (-) strand; PAM type: NNGRRT; PAM sequence: AAGAAT
aatactacacagccataaaa

SEQ ID NO: 19920 - DNA, 20 bp, Artificial Sequence
  Description of Artificial Sequence: Synthetic oligonucleotide
  Target: LAMA2; (-) strand; PAM type: NNGRRT; PAM sequence: TGGAAT
aatgtagtacatatacacca

SEQ ID NO: 19921 - DNA, 20 bp, Artificial Sequence
  Description of Artificial Sequence: Synthetic oligonucleotide
  Target: LAMA2; (-) strand; PAM type: NNGRRT; PAM sequence: CTGAAT
taggtaccatcattggtgga

SEQ ID NO: 19922 - DNA, 20 bp, Artificial Sequence
  Description of Artificial Sequence: Synthetic oligonucleotide
  Target: LAMA2; (-) strand; PAM type: NNGRRT; PAM sequence: TGGAAT
tattcacaataacaaagaca

SEQ ID NO: 19923 - DNA, 20 bp, Artificial Sequence
  Description of Artificial Sequence: Synthetic oligonucleotide
  Target: LAMA2; (-) strand; PAM type: NNGRRT; PAM sequence: AGGAAT
attactgcgtatatgcccaa

SEQ ID NO: 19924 - DNA, 20 bp, Artificial Sequence
  Description of Artificial Sequence: Synthetic oligonucleotide
  Target: LAMA2; (-) strand; PAM type: NNGRRT; PAM sequence: CAGAGT
atatatataagctagaacca

SEQ ID NO: 19925 - DNA, 20 bp, Artificial Sequence
  Description of Artificial Sequence: Synthetic oligonucleotide
  Target: LAMA2; (-) strand; PAM type: NNGRRT; PAM sequence: ATGAAT
atggctatgttgtcataagg

SEQ ID NO: 19926 - DNA, 20 bp, Artificial Sequence
  Description of Artificial Sequence: Synthetic oligonucleotide
  Target: LAMA2; (-) strand; PAM type: NNGRRT; PAM sequence: AAGGAT
aataatggctatgttgtcat

SEQ ID NO: 19927 - DNA, 20 bp, Artificial Sequence
  Description of Artificial Sequence: Synthetic oligonucleotide
  Target: LAMA2; (-) strand; PAM type: NNGRRT; PAM sequence: GTGAAT
aaaatttttgaaatcatcta

SEQ ID NO: 19928 - DNA, 20 bp, Artificial Sequence
  Description of Artificial Sequence: Synthetic oligonucleotide
  Target: LAMA2; (-) strand; PAM type: NNGRRT; PAM sequence: ATGAGT
agatcatacaaatataggcc

SEQ ID NO: 19929 - DNA, 20 bp, Artificial Sequence
  Description of Artificial Sequence: Synthetic oligonucleotide
  Target: LAMA2; (-) strand; PAM type: NNGRRT; PAM sequence: GTGAAT
ttatagttcctagaagcttt

SEQ ID NO: 19930 - DNA, 20 bp, Artificial Sequence
  Description of Artificial Sequence: Synthetic oligonucleotide
  Target: LAMA2; (-) strand; PAM type: NNGRRT; PAM sequence: TGGAAT
agcctaaaatttcctaaatg

SEQ ID NO: 19931 - DNA, 20 bp, Artificial Sequence
  Description of Artificial Sequence: Synthetic oligonucleotide
  Target: LAMA2; (-) strand; PAM type: NNGRRT; PAM sequence: TGGAGT
cgccctagcacacatgcagc

SEQ ID NO: 19932 - DNA, 20 bp, Artificial Sequence
  Description of Artificial Sequence: Synthetic oligonucleotide
  Target: LAMA2; (-) strand; PAM type: NNGRRT; PAM sequence: ATGAAT
agaccaaagtataatgacag

SEQ ID NO: 19933 - DNA, 20 bp, Artificial Sequence
  Description of Artificial Sequence: Synthetic oligonucleotide
  Target: LAMA2; (-) strand; PAM type: NNGRRT; PAM sequence: GAGAAT
accactgtgcccggcctaat

SEQ ID NO: 19934 - DNA, 20 bp, Artificial Sequence
  Description of Artificial Sequence: Synthetic oligonucleotide
  Target: LAMA2; (-) strand; PAM type: NNGRRT; PAM sequence: TGGGGT
ttccaaagtactgggattcc

SEQ ID NO: 19935 - DNA, 20 bp, Artificial Sequence
  Description of Artificial Sequence: Synthetic oligonucleotide
  Target: LAMA2; (-) strand; PAM type: NNGRRT; PAM sequence: TGGGAT
gcttcggccttccaaagtac

SEQ ID NO: 19936 - DNA, 20 bp, Artificial Sequence
  Description of Artificial Sequence: Synthetic oligonucleotide
  Target: LAMA2; (-) strand; PAM type: NNGRRT; PAM sequence: CAGGGT
ttttgtatttttaatagaga

SEQ ID NO: 19937 - DNA, 20 bp, Artificial Sequence
  Description of Artificial Sequence: Synthetic oligonucleotide
  Target: LAMA2; (-) strand; PAM type: NNGRRT; PAM sequence: CTGAGT
tattctcctgcctcagtctc

SEQ ID NO: 19938 - DNA, 20 bp, Artificial Sequence
  Description of Artificial Sequence: Synthetic oligonucleotide
  Target: LAMA2; (-) strand; PAM type: NNGRRT; PAM sequence: CTGGGT
acccactgcaacctcacttc

SEQ ID NO: 19939 - DNA, 20 bp, Artificial Sequence
  Description of Artificial Sequence: Synthetic oligonucleotide
  Target: LAMA2; (-) strand; PAM type: NNGRRT; PAM sequence: TAGGGT
atttgtatttatttttgaga

SEQ ID NO: 19940 - DNA, 20 bp, Artificial Sequence
  Description of Artificial Sequence: Synthetic oligonucleotide
  Target: LAMA2; (-) strand; PAM type: NNGRRT; PAM sequence: GAGAAT
ttgttaaaagtaaatataat

SEQ ID NO: 19941 - DNA, 20 bp, Artificial Sequence
  Description of Artificial Sequence: Synthetic oligonucleotide
  Target: LAMA2; (-) strand; PAM type: NNGRRT; PAM sequence: CAGGAT
gtagtcatctggccataggc

SEQ ID NO: 19942 - DNA, 20 bp, Artificial Sequence
  Description of Artificial Sequence: Synthetic oligonucleotide
  Target: LAMA2; (-) strand; PAM type: NNGRRT; PAM sequence: AAGAGT
caggtagagatgataggagg

SEQ ID NO: 19943 - DNA, 20 bp, Artificial Sequence
  Description of Artificial Sequence: Synthetic oligonucleotide
  Target: LAMA2; (-) strand; PAM type: NNGRRT; PAM sequence: CTGGAT
tacctcaatttaataattca

SEQ ID NO: 19944 - DNA, 20 bp, Artificial Sequence
  Description of Artificial Sequence: Synthetic oligonucleotide
  Target: LAMA2; (-) strand; PAM type: NNGRRT; PAM sequence: TGGAGT
gtttataatgagtgaaggta

SEQ ID NO: 19945 - DNA, 20 bp, Artificial Sequence
  Description of Artificial Sequence: Synthetic oligonucleotide
  Target: LAMA2; (-) strand; PAM type: NNGRRT; PAM sequence: ATGAGT
taaaggaaacaatgtttata

SEQ ID NO: 19946 - DNA, 20 bp, Artificial Sequence
  Description of Artificial Sequence: Synthetic oligonucleotide
  Target: LAMA2; (-) strand; PAM type: NNGRRT; PAM sequence: GAGAAT
taagttctgtaaatatgtcc

SEQ ID NO: 19947 - DNA, 20 bp, Artificial Sequence
  Description of Artificial Sequence: Synthetic oligonucleotide
  Target: LAMA2; (-) strand; PAM type: NNGRRT; PAM sequence: GTGAAT
gttcctggaacatatcctct

SEQ ID NO: 19948 - DNA, 20 bp, Artificial Sequence
  Description of Artificial Sequence: Synthetic oligonucleotide
  Target: LAMA2; (-) strand; PAM type: NNGRRT; PAM sequence: TGGGGT
ctgtgatttcaggtatcaac

SEQ ID NO: 19949 - DNA, 20 bp, Artificial Sequence
  Description of Artificial Sequence: Synthetic oligonucleotide
  Target: LAMA2; (-) strand; PAM type: NNGRRT; PAM sequence: ATGAAT
tgctctgtcgcaccagggat

SEQ ID NO: 19950 - DNA, 20 bp, Artificial Sequence
  Description of Artificial Sequence: Synthetic oligonucleotide
  Target: LAMA2; (-) strand; PAM type: NNGRRT; PAM sequence: AGGGAT
ccatcttgctctgtcgcacc

SEQ ID NO: 19951 - DNA, 20 bp, Artificial Sequence
  Description of Artificial Sequence: Synthetic oligonucleotide
  Target: LAMA2; (-) strand; PAM type: NNGRRT; PAM sequence: TTGAAT
gttttaatttgcatgtcatt

SEQ ID NO: 19952 - DNA, 20 bp, Artificial Sequence
  Description of Artificial Sequence: Synthetic oligonucleotide
  Target: LAMA2; (-) strand; PAM type: NNGRRT; PAM sequence: TGGAGT
agaaatgtttgatgaatacc

SEQ ID NO: 19953 - DNA, 20 bp, Artificial Sequence
  Description of Artificial Sequence: Synthetic oligonucleotide
  Target: LAMA2; (-) strand; PAM type: NNGRRT; PAM sequence: ATGAAT
aactacattagaaatgtttg

SEQ ID NO: 19954 - DNA, 20 bp, Artificial Sequence
  Description of Artificial Sequence: Synthetic oligonucleotide
  Target: LAMA2; (-) strand; PAM type: NNGRRT; PAM sequence: GAGAAT
gctaccaaccataaagtaaa

SEQ ID NO: 19955 - DNA, 20 bp, Artificial Sequence
  Description of Artificial Sequence: Synthetic oligonucleotide
  Target: LAMA2; (-) strand; PAM type: NNGRRT; PAM sequence: AAGAGT
tggaaactgaacaaggtgag

SEQ ID NO: 19956 - DNA, 20 bp, Artificial Sequence
  Description of Artificial Sequence: Synthetic oligonucleotide
  Target: LAMA2; (-) strand; PAM type: NNGRRT; PAM sequence: CAGAAT
tatgaagttgggactgtgca

SEQ ID NO: 19957 - DNA, 20 bp, Artificial Sequence
  Description of Artificial Sequence: Synthetic oligonucleotide
  Target: LAMA2; (-) strand; PAM type: NNGRRT; PAM sequence: CTGAAT
agacttatttatatacctca

SEQ ID NO: 19958 - DNA, 20 bp, Artificial Sequence
  Description of Artificial Sequence: Synthetic oligonucleotide
  Target: LAMA2; (-) strand; PAM type: NNGRRT; PAM sequence: CAGAGT
acttgtttgctactataaat

SEQ ID NO: 19959 - DNA, 20 bp, Artificial Sequence
  Description of Artificial Sequence: Synthetic oligonucleotide
  Target: LAMA2; (-) strand; PAM type: NNGRRT; PAM sequence: TAGAAT
ttacacaaaagtaaagataa

SEQ ID NO: 19960 - DNA, 20 bp, Artificial Sequence
  Description of Artificial Sequence: Synthetic oligonucleotide
  Target: LAMA2; (-) strand; PAM type: NNGRRT; PAM sequence: AAGAAT
caaattattgagaaaactat

SEQ ID NO: 19961 - DNA, 20 bp, Artificial Sequence
  Description of Artificial Sequence: Synthetic oligonucleotide
  Target: LAMA2; (-) strand; PAM type: NNGRRT; PAM sequence: ATGAAT
tacctaacaaaaatattaaa

SEQ ID NO: 19962 - DNA, 20 bp, Artificial Sequence
  Description of Artificial Sequence: Synthetic oligonucleotide
  Target: LAMA2; (-) strand; PAM type: NNGRRT; PAM sequence: TTGGAT
atgacatggctggcatggcc

SEQ ID NO: 19963 - DNA, 20 bp, Artificial Sequence
  Description of Artificial Sequence: Synthetic oligonucleotide
  Target: LAMA2; (-) strand; PAM type: NNGRRT; PAM sequence: TTGGAT
gacttcatttaaggaaccaa

SEQ ID NO: 19964 - DNA, 20 bp, Artificial Sequence
  Description of Artificial Sequence: Synthetic oligonucleotide
  Target: LAMA2; (-) strand; PAM type: NNGRRT; PAM sequence: ATGAAT
ttaaagaataaatttattac

SEQ ID NO: 19965 - DNA, 20 bp, Artificial Sequence
  Description of Artificial Sequence: Synthetic oligonucleotide
  Target: LAMA2; (-) strand; PAM type: NNGRRT; PAM sequence: AAGAAT
gctaatacactgatagatta

SEQ ID NO: 19966 - DNA, 20 bp, Artificial Sequence
  Description of Artificial Sequence: Synthetic oligonucleotide
  Target: LAMA2; (-) strand; PAM type: NNGRRT; PAM sequence: ATGAGT
acatgaaagtaattattgag

SEQ ID NO: 19967 - DNA, 20 bp, Artificial Sequence
  Description of Artificial Sequence: Synthetic oligonucleotide
  Target: LAMA2; (-) strand; PAM type: NNGRRT; PAM sequence: GTGAGT
tattgcctacatctcagtgt

SEQ ID NO: 19968 - DNA, 20 bp, Artificial Sequence
  Description of Artificial Sequence: Synthetic oligonucleotide
  Target: LAMA2; (-) strand; PAM type: NNGRRT; PAM sequence: ATGAAT
tttcttaatgtttggagttc

SEQ ID NO: 19969 - DNA, 20 bp, Artificial Sequence
  Description of Artificial Sequence: Synthetic oligonucleotide
  Target: LAMA2; (-) strand; PAM type: NNGRRT; PAM sequence: TGGAGT
gcatttgatttcttaatgtt

SEQ ID NO: 19970 - DNA, 20 bp, Artificial Sequence
  Description of Artificial Sequence: Synthetic oligonucleotide
  Target: LAMA2; (-) strand; PAM type: NNGRRT; PAM sequence: AGGAGT
tcccaaacgcttttatatca

SEQ ID NO: 19971 - DNA, 20 bp, Artificial Sequence
  Description of Artificial Sequence: Synthetic oligonucleotide
  Target: LAMA2; (-) strand; PAM type: NNGRRT; PAM sequence: ATGAAT
gaagcgtcccagtgcattct

SEQ ID NO: 19972 - DNA, 20 bp, Artificial Sequence
  Description of Artificial Sequence: Synthetic oligonucleotide
  Target: LAMA2; (-) strand; PAM type: NNGRRT; PAM sequence: AAGAAT
ttataaagaaagcaggtaac

SEQ ID NO: 19973 - DNA, 20 bp, Artificial Sequence
  Description of Artificial Sequence: Synthetic oligonucleotide
  Target: LAMA2; (-) strand; PAM type: NNGRRT; PAM sequence: AAGAGT
ttactcaaaaaggggtaggg

SEQ ID NO: 19974 - DNA, 20 bp, Artificial Sequence
  Description of Artificial Sequence: Synthetic oligonucleotide
  Target: LAMA2; (-) strand; PAM type: NNGRRT; PAM sequence: AGGGGT
catatactcattactcaaaa

SEQ ID NO: 19975 - DNA, 20 bp, Artificial Sequence
  Description of Artificial Sequence: Synthetic oligonucleotide
  Target: LAMA2; (-) strand; PAM type: NNGRRT; PAM sequence: CTGAAT
gtatctctcctgaattacca

SEQ ID NO: 19976 - DNA, 20 bp, Artificial Sequence
  Description of Artificial Sequence: Synthetic oligonucleotide
  Target: LAMA2; (-) strand; PAM type: NNGRRT; PAM sequence: CTGAAT
tgttaatagtggtatctctc

SEQ ID NO: 19977 - DNA, 20 bp, Artificial Sequence
  Description of Artificial Sequence: Synthetic oligonucleotide
  Target: LAMA2; (-) strand; PAM type: NNGRRT; PAM sequence: GAGGGT
taatgtccatataaagttga

SEQ ID NO: 19978 - DNA, 20 bp, Artificial Sequence
  Description of Artificial Sequence: Synthetic oligonucleotide
  Target: LAMA2; (-) strand; PAM type: NNGRRT; PAM sequence: AAGGAT
atatggaataagtattatta

SEQ ID NO: 19979 - DNA, 20 bp, Artificial Sequence
  Description of Artificial Sequence: Synthetic oligonucleotide
  Target: LAMA2; (-) strand; PAM type: NNGRRT; PAM sequence: TGGAAT
ataattgaaaagtaattata

SEQ ID NO: 19980 - DNA, 20 bp, Artificial Sequence
  Description of Artificial Sequence: Synthetic oligonucleotide
  Target: LAMA2; (-) strand; PAM type: NNGRRT; PAM sequence: AAGAAT
tattttatttctttactatt

SEQ ID NO: 19981 - DNA, 20 bp, Artificial Sequence
  Description of Artificial Sequence: Synthetic oligonucleotide
  Target: LAMA2; (-) strand; PAM type: NNGRRT; PAM sequence: TGGGAT
tttaaatttggaagtaagac

SEQ ID NO: 19982 - DNA, 20 bp, Artificial Sequence
  Description of Artificial Sequence: Synthetic oligonucleotide
  Target: LAMA2; (-) strand; PAM type: NNGRRT; PAM sequence: CTGAAT
ataattaaaaaaaataaaaa

SEQ ID NO: 19983 - DNA, 20 bp, Artificial Sequence
  Description of Artificial Sequence: Synthetic oligonucleotide
  Target: LAMA2; (-) strand; PAM type: NNGRRT; PAM sequence: GTGGGT
taatgctagatgacgagtta

SEQ ID NO: 19984 - DNA, 20 bp, Artificial Sequence
  Description of Artificial Sequence: Synthetic oligonucleotide
  Target: LAMA2; (-) strand; PAM type: NNGRRT; PAM sequence: ACGAGT
gatatacctaatgctagatg

SEQ ID NO: 19985 - DNA, 20 bp, Artificial Sequence
  Description of Artificial Sequence: Synthetic oligonucleotide
  Target: LAMA2; (-) strand; PAM type: NNGRRT; PAM sequence: AGGGAT
gtggggtggggggagggggg

SEQ ID NO: 19986 - DNA, 20 bp, Artificial Sequence
  Description of Artificial Sequence: Synthetic oligonucleotide
  Target: LAMA2; (-) strand; PAM type: NNGRRT; PAM sequence: TGGGGT
tcacactctggggactgttg

SEQ ID NO: 19987 - DNA, 20 bp, Artificial Sequence
  Description of Artificial Sequence: Synthetic oligonucleotide
  Target: LAMA2; (-) strand; PAM type: NNGRRT; PAM sequence: GGGAAT
tatcacatggacacaggaag

SEQ ID NO: 19988 - DNA, 20 bp, Artificial Sequence
  Description of Artificial Sequence: Synthetic oligonucleotide
  Target: LAMA2; (-) strand; PAM type: NNGRRT; PAM sequence: GGGAAT
acatattctcactcataggt

SEQ ID NO: 19989 - DNA, 20 bp, Artificial Sequence
  Description of Artificial Sequence: Synthetic oligonucleotide
  Target: LAMA2; (-) strand; PAM type: NNGRRT; PAM sequence: ATGGAT
ttcatgtcctttgtagggac

SEQ ID NO: 19990 - DNA, 20 bp, Artificial Sequence
  Description of Artificial Sequence: Synthetic oligonucleotide
  Target: LAMA2; (-) strand; PAM type: NNGRRT; PAM sequence: ATGAGT
ctatgcagccataaaaaatg

SEQ ID NO: 19991 - DNA, 20 bp, Artificial Sequence
  Description of Artificial Sequence: Synthetic oligonucleotide
  Target: LAMA2; (-) strand; PAM type: NNGRRT; PAM sequence: TGGAAT
aatgtggcacttatacacca

SEQ ID NO: 19992 - DNA, 20 bp, Artificial Sequence
  Description of Artificial Sequence: Synthetic oligonucleotide
  Target: LAMA2; (-) strand; PAM type: NNGRRT; PAM sequence: CTGGAT
aaatgtccaacaatgataga

SEQ ID NO: 19993 - DNA, 20 bp, Artificial Sequence
  Description of Artificial Sequence: Synthetic oligonucleotide
  Target: LAMA2; (-) strand; PAM type: NNGRRT; PAM sequence: CTGGGT
ttgacccagccatcccatta

SEQ ID NO: 19994 - DNA, 20 bp, Artificial Sequence
  Description of Artificial Sequence: Synthetic oligonucleotide
  Target: LAMA2; (-) strand; PAM type: NNGRRT; PAM sequence: AGGGAT
agtcagtgtggccattcctc

SEQ ID NO: 19995 - DNA, 20 bp, Artificial Sequence
  Description of Artificial Sequence: Synthetic oligonucleotide
  Target: LAMA2; (-) strand; PAM type: NNGRRT; PAM sequence: GAGGAT
aggaaacaacaggtgctgga

SEQ ID NO: 19996 - DNA, 20 bp, Artificial Sequence
  Description of Artificial Sequence: Synthetic oligonucleotide
  Target: LAMA2; (-) strand; PAM type: NNGRRT; PAM sequence: TAGAAT
agataccatctcacaccagt

SEQ ID NO: 19997 - DNA, 20 bp, Artificial Sequence
  Description of Artificial Sequence: Synthetic oligonucleotide
  Target: LAMA2; (-) strand; PAM type: NNGRRT; PAM sequence: CAGAAT
tctgacaaagggctaatatc

SEQ ID NO: 19998 - DNA, 20 bp, Artificial Sequence
  Description of Artificial Sequence: Synthetic oligonucleotide
  Target: LAMA2; (-) strand; PAM type: NNGRRT; PAM sequence: CAGAGT
acagcaaaagaaactaccat

SEQ ID NO: 19999 - DNA, 20 bp, Artificial Sequence
  Description of Artificial Sequence: Synthetic oligonucleotide
  Target: LAMA2; (-) strand; PAM type: NNGRRT; PAM sequence: TGGGAT
caaaagacaaaattgacaaa

SEQ ID NO: 20000 - DNA, 20 bp, Artificial Sequence
  Description of Artificial Sequence: Synthetic oligonucleotide
  Target: LAMA2; (-) strand; PAM type: NNGRRT; PAM sequence: ATGGAT
tatacaaaaatcaattcaag

SEQ ID NO: 20001 - DNA, 20 bp, Artificial Sequence
  Description of Artificial Sequence: Synthetic oligonucleotide
  Target: LAMA2; (-) strand; PAM type: NNGRRT; PAM sequence: CTGGAT
ccatatgtagaaagctgaaa

SEQ ID NO: 20002 - DNA, 20 bp, Artificial Sequence
  Description of Artificial Sequence: Synthetic oligonucleotide
  Target: LAMA2; (-) strand; PAM type: NNGRRT; PAM sequence: AAGGAT
agaaaaacaagcaatgggga

SEQ ID NO: 20003 - DNA, 20 bp, Artificial Sequence
  Description of Artificial Sequence: Synthetic oligonucleotide
  Target: LAMA2; (-) strand; PAM type: NNGRRT; PAM sequence: CAGAAT
gctaccaatgcctttcttca

SEQ ID NO: 20004 - DNA, 20 bp, Artificial Sequence
  Description of Artificial Sequence: Synthetic oligonucleotide
  Target: LAMA2; (-) strand; PAM type: NNGRRT; PAM sequence: AAGAAT
attccatgctcatgggtagg

SEQ ID NO: 20005 - DNA, 20 bp, Artificial Sequence
  Description of Artificial Sequence: Synthetic oligonucleotide
  Target: LAMA2; (-) strand; PAM type: NNGRRT; PAM sequence: ATGGGT
tggaagaacattccatgctc

SEQ ID NO: 20006 - DNA, 20 bp, Artificial Sequence
  Description of Artificial Sequence: Synthetic oligonucleotide
  Target: LAMA2; (-) strand; PAM type: NNGRRT; PAM sequence: GAGGAT
cactgctcaaggaaataaaa

SEQ ID NO: 20007 - DNA, 20 bp, Artificial Sequence
  Description of Artificial Sequence: Synthetic oligonucleotide
  Target: LAMA2; (-) strand; PAM type: NNGRRT; PAM sequence: AGGGAT
acctaggaatccaacttaca

SEQ ID NO: 20008 - DNA, 20 bp, Artificial Sequence
  Description of Artificial Sequence: Synthetic oligonucleotide
  Target: LAMA2; (-) strand; PAM type: NNGRRT; PAM sequence: AGGAAT
tcaaagagaataaaatacct

SEQ ID NO: 20009 - DNA, 20 bp, Artificial Sequence
  Description of Artificial Sequence: Synthetic oligonucleotide
  Target: LAMA2; (-) strand; PAM type: NNGRRT; PAM sequence: GAGAAT
ccattcacaattgcttcaaa

SEQ ID NO: 20010 - DNA, 20 bp, Artificial Sequence
  Description of Artificial Sequence: Synthetic oligonucleotide
  Target: LAMA2; (-) strand; PAM type: NNGRRT; PAM sequence: ATGAGT
aacaaacagagagccaaatc

SEQ ID NO: 20011 - DNA, 20 bp, Artificial Sequence
  Description of Artificial Sequence: Synthetic oligonucleotide
  Target: LAMA2; (-) strand; PAM type: NNGRRT; PAM sequence: CAGGAT
aagcaacttcagcaaagtct

SEQ ID NO: 20012 - DNA, 20 bp, Artificial Sequence
  Description of Artificial Sequence: Synthetic oligonucleotide
  Target: LAMA2; (-) strand; PAM type: NNGRRT; PAM sequence: AAGGGT
ttaggcaggagaaggaaata

SEQ ID NO: 20013 - DNA, 20 bp, Artificial Sequence
  Description of Artificial Sequence: Synthetic oligonucleotide
  Target: LAMA2; (-) strand; PAM type: NNGRRT; PAM sequence: AGGGAT
tttgaaaactggcacaagac

SEQ ID NO: 20014 - DNA, 20 bp, Artificial Sequence
  Description of Artificial Sequence: Synthetic oligonucleotide
  Target: LAMA2; (-) strand; PAM type: NNGRRT; PAM sequence: CAGAAT
aacccacagccagtatcata

SEQ ID NO: 20015 - DNA, 20 bp, Artificial Sequence
  Description of Artificial Sequence: Synthetic oligonucleotide
  Target: LAMA2; (-) strand; PAM type: NNGRRT; PAM sequence: TGGGAT
gatcaagtaggcttcatccc

SEQ ID NO: 20016 - DNA, 20 bp, Artificial Sequence
  Description of Artificial Sequence: Synthetic oligonucleotide
  Target: LAMA2; (-) strand; PAM type: NNGRRT; PAM sequence: ACGAAT
ctcagtaaaatactggcaaa

SEQ ID NO: 20017 - DNA, 20 bp, Artificial Sequence
  Description of Artificial Sequence: Synthetic oligonucleotide
  Target: LAMA2; (-) strand; PAM type: NNGRRT; PAM sequence: GAGAAT
gcagagacacaaccaaaaaa

SEQ ID NO: 20018 - DNA, 20 bp, Artificial Sequence
  Description of Artificial Sequence: Synthetic oligonucleotide
  Target: LAMA2; (-) strand; PAM type: NNGRRT; PAM sequence: GGGAAT
ttccaatcaatagaaaaaga

SEQ ID NO: 20019 - DNA, 20 bp, Artificial Sequence
  Description of Artificial Sequence: Synthetic oligonucleotide
  Target: LAMA2; (-) strand; PAM type: NNGRRT; PAM sequence: CCGAAT
aggaccagatggattcacag

SEQ ID NO: 20020 - DNA, 20 bp, Artificial Sequence
  Description of Artificial Sequence: Synthetic oligonucleotide
  Target: LAMA2; (-) strand; PAM type: NNGRRT; PAM sequence: ATGGAT
caaaaagagtccaggaccag

SEQ ID NO: 20021 - DNA, 20 bp, Artificial Sequence
  Description of Artificial Sequence: Synthetic oligonucleotide
  Target: LAMA2; (-) strand; PAM type: NNGRRT; PAM sequence: AAGAGT
tcaatagcttaccaaccaaa

SEQ ID NO: 20022 - DNA, 20 bp, Artificial Sequence
  Description of Artificial Sequence: Synthetic oligonucleotide
  Target: LAMA2; (-) strand; PAM type: NNGRRT; PAM sequence: CAGGAT
atctctgaatagaccaataa

SEQ ID NO: 20023 - DNA, 20 bp, Artificial Sequence
  Description of Artificial Sequence: Synthetic oligonucleotide
  Target: LAMA2; (-) strand; PAM type: NNGRRT; PAM sequence: CTGAAT
accaggaagaagttgaatct

SEQ ID NO: 20024 - DNA, 20 bp, Artificial Sequence
  Description of Artificial Sequence: Synthetic oligonucleotide
  Target: LAMA2; (-) strand; PAM type: NNGRRT; PAM sequence: TTGAAT
aagactaaaccaggaagaag

SEQ ID NO: 20025 - DNA, 20 bp, Artificial Sequence
  Description of Artificial Sequence: Synthetic oligonucleotide
  Target: LAMA2; (-) strand; PAM type: NNGRRT; PAM sequence: ATGGAT
aactagaaaatctagaagaa

SEQ ID NO: 20026 - DNA, 20 bp, Artificial Sequence
  Description of Artificial Sequence: Synthetic oligonucleotide
  Target: LAMA2; (-) strand; PAM type: NNGRRT; PAM sequence: GAGAAT
agaaatacaaactaaaatca

SEQ ID NO: 20027 - DNA, 20 bp, Artificial Sequence
  Description of Artificial Sequence: Synthetic oligonucleotide
  Target: LAMA2; (-) strand; PAM type: NNGRRT; PAM sequence: ACGGAT
atgataaaggggatatcacc

SEQ ID NO: 20028 - DNA, 20 bp, Artificial Sequence
  Description of Artificial Sequence: Synthetic oligonucleotide
  Target: LAMA2; (-) strand; PAM type: NNGRRT; PAM sequence: GGGGAT
atgcaataaaaaatgataaa

SEQ ID NO: 20029 - DNA, 20 bp, Artificial Sequence
  Description of Artificial Sequence: Synthetic oligonucleotide
  Target: LAMA2; (-) strand; PAM type: NNGRRT; PAM sequence: AAGAAT
taataaagaaaaaaagagag

SEQ ID NO: 20030 - DNA, 20 bp, Artificial Sequence
  Description of Artificial Sequence: Synthetic oligonucleotide
  Target: LAMA2; (-) strand; PAM type: NNGRRT; PAM sequence: AAGGGT
tccaggagctggttttttga

SEQ ID NO: 20031 - DNA, 20 bp, Artificial Sequence
  Description of Artificial Sequence: Synthetic oligonucleotide
  Target: LAMA2; (-) strand; PAM type: NNGRRT; PAM sequence: ATGAAT
aaaaacccttcaaaaaatta

SEQ ID NO: 20032 - DNA, 20 bp, Artificial Sequence
  Description of Artificial Sequence: Synthetic oligonucleotide
  Target: LAMA2; (-) strand; PAM type: NNGRRT; PAM sequence: CAGAAT
agaacaaagacacaacatac

SEQ ID NO: 20033 - DNA, 20 bp, Artificial Sequence
  Description of Artificial Sequence: Synthetic oligonucleotide
  Target: LAMA2; (-) strand; PAM type: NNGRRT; PAM sequence: CTGGGT
aacctgctcctgaatgacta

SEQ ID NO: 20034 - DNA, 20 bp, Artificial Sequence
  Description of Artificial Sequence: Synthetic oligonucleotide
  Target: LAMA2; (-) strand; PAM type: NNGRRT; PAM sequence: CTGAAT
ggaaactgaacaacctgctc

SEQ ID NO: 20035 - DNA, 20 bp, Artificial Sequence
  Description of Artificial Sequence: Synthetic oligonucleotide
  Target: LAMA2; (-) strand; PAM type: NNGRRT; PAM sequence: AAGAAT
tcaaactagaactcaggatt

SEQ ID NO: 20036 - DNA, 20 bp, Artificial Sequence
  Description of Artificial Sequence: Synthetic oligonucleotide
  Target: LAMA2; (-) strand; PAM type: NNGRRT; PAM sequence: CAGGAT
agtgcaatcaaactagaact

SEQ ID NO: 20037 - DNA, 20 bp, Artificial Sequence
  Description of Artificial Sequence: Synthetic oligonucleotide
  Target: LAMA2; (-) strand; PAM type: NNGRRT; PAM sequence: CAGAAT
aactctccaccccaaatcaa

SEQ ID NO: 20038 - DNA, 20 bp, Artificial Sequence
  Description of Artificial Sequence: Synthetic oligonucleotide
  Target: LAMA2; (-) strand; PAM type: NNGRRT; PAM sequence: AGGAAT
agaagtcaacaaggataccc

SEQ ID NO: 20039 - DNA, 20 bp, Artificial Sequence
  Description of Artificial Sequence: Synthetic oligonucleotide
  Target: LAMA2; (-) strand; PAM type: NNGRRT; PAM sequence: AAGGAT
aaagtcaacaagaagtcaac

SEQ ID NO: 20040 - DNA, 20 bp, Artificial Sequence
  Description of Artificial Sequence: Synthetic oligonucleotide
  Target: LAMA2; (-) strand; PAM type: NNGRRT; PAM sequence: CTGAGT
ccagattcataaagcaagtc

SEQ ID NO: 20041 - DNA, 20 bp, Artificial Sequence
  Description of Artificial Sequence: Synthetic oligonucleotide
  Target: LAMA2; (-) strand; PAM type: NNGRRT; PAM sequence: AGGGAT
aggccattacataatggtaa

SEQ ID NO: 20042 - DNA, 20 bp, Artificial Sequence
  Description of Artificial Sequence: Synthetic oligonucleotide
  Target: LAMA2; (-) strand; PAM type: NNGRRT; PAM sequence: AGGGGT
aatggaaaacaaaaaaaggc

SEQ ID NO: 20043 - DNA, 20 bp, Artificial Sequence
  Description of Artificial Sequence: Synthetic oligonucleotide
  Target: LAMA2; (-) strand; PAM type: NNGRRT; PAM sequence: AAGGAT
cacacataggctcaaaataa

SEQ ID NO: 20044 - DNA, 20 bp, Artificial Sequence
  Description of Artificial Sequence: Synthetic oligonucleotide
  Target: LAMA2; (-) strand; PAM type: NNGRRT; PAM sequence: AAGAGT
acagactggcaaattggata

SEQ ID NO: 20045 - DNA, 20 bp, Artificial Sequence
  Description of Artificial Sequence: Synthetic oligonucleotide
  Target: LAMA2; (-) strand; PAM type: NNGRRT; PAM sequence: TTGGAT
aaaagacacagactggcaaa

SEQ ID NO: 20046 - DNA, 20 bp, Artificial Sequence
  Description of Artificial Sequence: Synthetic oligonucleotide
  Target: LAMA2; (-) strand; PAM type: NNGRRT; PAM sequence: CAGGAT
accagctaacatcatcatga

SEQ ID NO: 20047 - DNA, 20 bp, Artificial Sequence
  Description of Artificial Sequence: Synthetic oligonucleotide
  Target: LAMA2; (-) strand; PAM type: NNGRRT; PAM sequence: CAGAAT
aaagaaaagaattttcaacc

SEQ ID NO: 20048 - DNA, 20 bp, Artificial Sequence
  Description of Artificial Sequence: Synthetic oligonucleotide
  Target: LAMA2; (-) strand; PAM type: NNGRRT; PAM sequence: AAGAAT
tattcaacattcttaaagaa

SEQ ID NO: 20049 - DNA, 20 bp, Artificial Sequence
  Description of Artificial Sequence: Synthetic oligonucleotide
  Target: LAMA2; (-) strand; PAM type: NNGRRT; PAM sequence: GAGAGT
agaaactctacaagccggaa

SEQ ID NO: 20050 - DNA, 20 bp, Artificial Sequence
  Description of Artificial Sequence: Synthetic oligonucleotide
  Target: LAMA2; (-) strand; PAM type: NNGRRT; PAM sequence: TCGGGT
agggcagccagagagaaagg

SEQ ID NO: 20051 - DNA, 20 bp, Artificial Sequence
  Description of Artificial Sequence: Synthetic oligonucleotide
  Target: LAMA2; (-) strand; PAM type: NNGRRT; PAM sequence: CAGGAT
ccaagttggaaaacactctg

SEQ ID NO: 20052 - DNA, 20 bp, Artificial Sequence
  Description of Artificial Sequence: Synthetic oligonucleotide
  Target: LAMA2; (-) strand; PAM type: NNGRRT; PAM sequence: GAGAAT
gtgtacctgaaagtgatggg

SEQ ID NO: 20053 - DNA, 20 bp, Artificial Sequence
  Description of Artificial Sequence: Synthetic oligonucleotide
  Target: LAMA2; (-) strand; PAM type: NNGRRT; PAM sequence: AAGAAT
gaagggaagtttagagaaaa

SEQ ID NO: 20054 - DNA, 20 bp, Artificial Sequence
  Description of Artificial Sequence: Synthetic oligonucleotide
  Target: LAMA2; (-) strand; PAM type: NNGRRT; PAM sequence: ATGAAT
tatcagcaatggaagatgaa

SEQ ID NO: 20055 - DNA, 20 bp, Artificial Sequence
  Description of Artificial Sequence: Synthetic oligonucleotide
  Target: LAMA2; (-) strand; PAM type: NNGRRT; PAM sequence: AAGGGT
cgatgcgatcaactggaaga

SEQ ID NO: 20056 - DNA, 20 bp, Artificial Sequence
  Description of Artificial Sequence: Synthetic oligonucleotide
  Target: LAMA2; (-) strand; PAM type: NNGRRT; PAM sequence: AAGAAT
caaggctcgagaactacgtg

SEQ ID NO: 20057 - DNA, 20 bp, Artificial Sequence
  Description of Artificial Sequence: Synthetic oligonucleotide
  Target: LAMA2; (-) strand; PAM type: NNGRRT; PAM sequence: TAGAAT
aatgtagaagaatgtataac

SEQ ID NO: 20058 - DNA, 20 bp, Artificial Sequence
  Description of Artificial Sequence: Synthetic oligonucleotide
  Target: LAMA2; (-) strand; PAM type: NNGRRT; PAM sequence: AAGAAT
aaactttgaaaaaaatgtag

SEQ ID NO: 20059 - DNA, 20 bp, Artificial Sequence
  Description of Artificial Sequence: Synthetic oligonucleotide
  Target: LAMA2; (-) strand; PAM type: NNGRRT; PAM sequence: CTGGAT
tcaccagcaacggaacaaag

SEQ ID NO: 20060 - DNA, 20 bp, Artificial Sequence
  Description of Artificial Sequence: Synthetic oligonucleotide
  Target: LAMA2; (-) strand; PAM type: NNGRRT; PAM sequence: CAGAGT
aaactggaaactctaaaaag

SEQ ID NO: 20061 - DNA, 20 bp, Artificial Sequence
  Description of Artificial Sequence: Synthetic oligonucleotide
  Target: LAMA2; (-) strand; PAM type: NNGRRT; PAM sequence: CAGGGT
cacactgacacctcacacgg

SEQ ID NO: 20062 - DNA, 20 bp, Artificial Sequence
  Description of Artificial Sequence: Synthetic oligonucleotide
  Target: LAMA2; (-) strand; PAM type: NNGRRT; PAM sequence: GTGGGT
cgggcagactgcctcctcaa

SEQ ID NO: 20063 - DNA, 20 bp, Artificial Sequence
  Description of Artificial Sequence: Synthetic oligonucleotide
  Target: LAMA2; (-) strand; PAM type: NNGRRT; PAM sequence: CTGGGT
aagcagctgggaagctccaa

SEQ ID NO: 20064 - DNA, 20 bp, Artificial Sequence
  Description of Artificial Sequence: Synthetic oligonucleotide
  Target: LAMA2; (-) strand; PAM type: NNGRRT; PAM sequence: TGGAGT
cttggagggtcctacgccca

SEQ ID NO: 20065 - DNA, 20 bp, Artificial Sequence
  Description of Artificial Sequence: Synthetic oligonucleotide
  Target: LAMA2; (-) strand; PAM type: NNGRRT; PAM sequence: GAGGGT
tatatcctgcacctggcttg

SEQ ID NO: 20066 - DNA, 20 bp, Artificial Sequence
  Description of Artificial Sequence: Synthetic oligonucleotide
  Target: LAMA2; (-) strand; PAM type: NNGRRT; PAM sequence: CGGAAT
gaaaatcgggtcactcccac

SEQ ID NO: 20067 - DNA, 20 bp, Artificial Sequence
  Description of Artificial Sequence: Synthetic oligonucleotide
  Target: LAMA2; (-) strand; PAM type: NNGRRT; PAM sequence: TCGGGT
gacggacggcacctggaaaa

SEQ ID NO: 20068 - DNA, 20 bp, Artificial Sequence
  Description of Artificial Sequence: Synthetic oligonucleotide
  Target: LAMA2; (-) strand; PAM type: NNGRRT; PAM sequence: AGGGGT
tccctttccgagtcacagaa

SEQ ID NO: 20069 - DNA, 20 bp, Artificial Sequence
  Description of Artificial Sequence: Synthetic oligonucleotide
  Target: LAMA2; (-) strand; PAM type: NNGRRT; PAM sequence: CCGAGT
ggggtcagggagttcccttt

SEQ ID NO: 20070 - DNA, 20 bp, Artificial Sequence
  Description of Artificial Sequence: Synthetic oligonucleotide
  Target: LAMA2; (-) strand; PAM type: NNGRRT; PAM sequence: GGGAGT
ttgggaagcgcaaggggtca

SEQ ID NO: 20071 - DNA, 20 bp, Artificial Sequence
  Description of Artificial Sequence: Synthetic oligonucleotide
  Target: LAMA2; (-) strand; PAM type: NNGRRT; PAM sequence: AGGGGT
tgcctcacttgggaagcgca

SEQ ID NO: 20072 - DNA, 20 bp, Artificial Sequence
  Description of Artificial Sequence: Synthetic oligonucleotide
  Target: LAMA2; (-) strand; PAM type: NNGRRT; PAM sequence: GTGGGT
cagacagtgggcgcaggtca

SEQ ID NO: 20073 - DNA, 20 bp, Artificial Sequence
  Description of Artificial Sequence: Synthetic oligonucleotide
  Target: LAMA2; (-) strand; PAM type: NNGRRT; PAM sequence: GGGAAT
gtaccgggttcatctcacta

SEQ ID NO: 20074 - DNA, 20 bp, Artificial Sequence
  Description of Artificial Sequence: Synthetic oligonucleotide
  Target: LAMA2; (-) strand; PAM type: NNGRRT; PAM sequence: CCGGGT
ctgcatttccatctgaggta

SEQ ID NO: 20075 - DNA, 20 bp, Artificial Sequence
  Description of Artificial Sequence: Synthetic oligonucleotide
  Target: LAMA2; (-) strand; PAM type: NNGRRT; PAM sequence: CTGAAT
aaaggtaactcactaaaaaa

SEQ ID NO: 20076 - DNA, 20 bp, Artificial Sequence
  Description of Artificial Sequence: Synthetic oligonucleotide
  Target: LAMA2; (-) strand; PAM type: NNGRRT; PAM sequence: AAGAAT
atggtgataaaagtactgat

SEQ ID NO: 20077 - DNA, 20 bp, Artificial Sequence
  Description of Artificial Sequence: Synthetic oligonucleotide
  Target: LAMA2; (-) strand; PAM type: NNGRRT; PAM sequence: GAGAGT
tttcttcacctttcaagacg

SEQ ID NO: 20078 - DNA, 20 bp, Artificial Sequence
  Description of Artificial Sequence: Synthetic oligonucleotide
  Target: LAMA2; (-) strand; PAM type: NNGRRT; PAM sequence: GTGAAT
gaatgaaggagggaggtgtt

SEQ ID NO: 20079 - DNA, 20 bp, Artificial Sequence
  Description of Artificial Sequence: Synthetic oligonucleotide
  Target: LAMA2; (-) strand; PAM type: NNGRRT; PAM sequence: TGGAAT
taataaaaatgtatggatgg

SEQ ID NO: 20080 - DNA, 20 bp, Artificial Sequence
  Description of Artificial Sequence: Synthetic oligonucleotide
  Target: LAMA2; (-) strand; PAM type: NNGRRT; PAM sequence: ATGGAT
gaaacacataataaaaatgt

SEQ ID NO: 20081 - DNA, 20 bp, Artificial Sequence
  Description of Artificial Sequence: Synthetic oligonucleotide
  Target: LAMA2; (-) strand; PAM type: NNGRRT; PAM sequence: AGGGAT
tgacaagtggtgaagaatgt

SEQ ID NO: 20082 - DNA, 20 bp, Artificial Sequence
  Description of Artificial Sequence: Synthetic oligonucleotide
  Target: LAMA2; (-) strand; PAM type: NNGRRT; PAM sequence: AAGAAT
acagacactgacaagtggtg

SEQ ID NO: 20083 - DNA, 20 bp, Artificial Sequence
  Description of Artificial Sequence: Synthetic oligonucleotide
  Target: LAMA2; (-) strand; PAM type: NNGRRT; PAM sequence: CTGAAT
cattaattattggtccagag

SEQ ID NO: 20084 - DNA, 20 bp, Artificial Sequence
  Description of Artificial Sequence: Synthetic oligonucleotide
  Target: LAMA2; (-) strand; PAM type: NNGRRT; PAM sequence: TTGAAT
tgattattatatttctattt

SEQ ID NO: 20085 - DNA, 20 bp, Artificial Sequence
  Description of Artificial Sequence: Synthetic oligonucleotide
  Target: LAMA2; (-) strand; PAM type: NNGRRT; PAM sequence: ATGAAT
cgtatttccctcgtaatcaa

SEQ ID NO: 20086 - DNA, 20 bp, Artificial Sequence
  Description of Artificial Sequence: Synthetic oligonucleotide
  Target: LAMA2; (-) strand; PAM type: NNGRRT; PAM sequence: AAGAAT
tggtatcattattataagta

SEQ ID NO: 20087 - DNA, 20 bp, Artificial Sequence
  Description of Artificial Sequence: Synthetic oligonucleotide
  Target: LAMA2; (-) strand; PAM type: NNGRRT; PAM sequence: ATGGGT
aatcaaaatatataataatc

SEQ ID NO: 20088 - DNA, 20 bp, Artificial Sequence
  Description of Artificial Sequence: Synthetic oligonucleotide
  Target: LAMA2; (-) strand; PAM type: NNGRRT; PAM sequence: TAGGAT
cttgggatagatgagagttc

SEQ ID NO: 20089 - DNA, 20 bp, Artificial Sequence
  Description of Artificial Sequence: Synthetic oligonucleotide
  Target: LAMA2; (-) strand; PAM type: NNGRRT; PAM sequence: GAGAGT
tttctaatcttgggatagat

SEQ ID NO: 20090 - DNA, 20 bp, Artificial Sequence
  Description of Artificial Sequence: Synthetic oligonucleotide
  Target: LAMA2; (-) strand; PAM type: NNGRRT; PAM sequence: TGGGAT
caaatacatttttctaatct

SEQ ID NO: 20091 - DNA, 20 bp, Artificial Sequence
  Description of Artificial Sequence: Synthetic oligonucleotide
  Target: LAMA2; (-) strand; PAM type: NNGRRT; PAM sequence: TGGAAT
ataacaaaataaattctaga

SEQ ID NO: 20092 - DNA, 20 bp, Artificial Sequence
  Description of Artificial Sequence: Synthetic oligonucleotide
  Target: LAMA2; (-) strand; PAM type: NNGRRT; PAM sequence: AAGAGT
ttaaatgtagatgagtaaaa

SEQ ID NO: 20093 - DNA, 20 bp, Artificial Sequence
  Description of Artificial Sequence: Synthetic oligonucleotide
  Target: LAMA2; (-) strand; PAM type: NNGRRT; PAM sequence: ATGAGT
gaaagtaatattaaatgtag

SEQ ID NO: 20094 - DNA, 20 bp, Artificial Sequence
  Description of Artificial Sequence: Synthetic oligonucleotide
  Target: LAMA2; (-) strand; PAM type: NNGRRT; PAM sequence: CAGAGT
tgcagactcagactcaataa

SEQ ID NO: 20095 - DNA, 20 bp, Artificial Sequence
  Description of Artificial Sequence: Synthetic oligonucleotide
  Target: LAMA2; (-) strand; PAM type: NNGRRT; PAM sequence: AAGAGT
aaaatgaagtccatatgaat

SEQ ID NO: 20096 - DNA, 20 bp, Artificial Sequence
  Description of Artificial Sequence: Synthetic oligonucleotide
  Target: LAMA2; (-) strand; PAM type: NNGRRT; PAM sequence: ATGAAT
cataagaaaatgaagtccat

SEQ ID NO: 20097 - DNA, 20 bp, Artificial Sequence
  Description of Artificial Sequence: Synthetic oligonucleotide
  Target: LAMA2; (-) strand; PAM type: NNGRRT; PAM sequence: AAGAAT
tgtaaattcaaggcttctga

SEQ ID NO: 20098 - DNA, 20 bp, Artificial Sequence
  Description of Artificial Sequence: Synthetic oligonucleotide
  Target: LAMA2; (-) strand; PAM type: NNGRRT; PAM sequence: TGGAGT
ctttaaaacaatgtctttcc

SEQ ID NO: 20099 - DNA, 20 bp, Artificial Sequence
  Description of Artificial Sequence: Synthetic oligonucleotide
  Target: LAMA2; (-) strand; PAM type: NNGRRT; PAM sequence: CAGAAT
gaaagacagatggcagataa

SEQ ID NO: 20100 - DNA, 20 bp, Artificial Sequence
  Description of Artificial Sequence: Synthetic oligonucleotide
  Target: LAMA2; (-) strand; PAM type: NNGRRT; PAM sequence: CAGAAT
gttcagaacagttgaagata

SEQ ID NO: 20101 - DNA, 20 bp, Artificial Sequence
  Description of Artificial Sequence: Synthetic oligonucleotide
  Target: LAMA2; (-) strand; PAM type: NNGRRT; PAM sequence: AAGGAT
tgaatcctaaagtacattaa

SEQ ID NO: 20102 - DNA, 20 bp, Artificial Sequence
  Description of Artificial Sequence: Synthetic oligonucleotide
  Target: LAMA2; (-) strand; PAM type: NNGRRT; PAM sequence: CTGAAT
cagatgagcaaaacaccaaa

SEQ ID NO: 20103 - DNA, 20 bp, Artificial Sequence
  Description of Artificial Sequence: Synthetic oligonucleotide
  Target: LAMA2; (-) strand; PAM type: NNGRRT; PAM sequence: ATGAAT
gagtcacaggcaattaactt

SEQ ID NO: 20104 - DNA, 20 bp, Artificial Sequence
  Description of Artificial Sequence: Synthetic oligonucleotide
  Target: LAMA2; (-) strand; PAM type: NNGRRT; PAM sequence: CTGAGT
ggagcacaactggtgggtgt

SEQ ID NO: 20105 - DNA, 20 bp, Artificial Sequence
  Description of Artificial Sequence: Synthetic oligonucleotide
  Target: LAMA2; (-) strand; PAM type: NNGRRT; PAM sequence: GTGGGT
ttgccaaaggagcacaactg

SEQ ID NO: 20106 - DNA, 20 bp, Artificial Sequence
  Description of Artificial Sequence: Synthetic oligonucleotide
  Target: LAMA2; (-) strand; PAM type: NNGRRT; PAM sequence: AGGGGT
cttagcattacacaaaacac

SEQ ID NO: 20107 - DNA, 20 bp, Artificial Sequence
  Description of Artificial Sequence: Synthetic oligonucleotide
  Target: LAMA2; (-) strand; PAM type: NNGRRT; PAM sequence: ACGAGT
tcattgttcaactcccactt

SEQ ID NO: 20108 - DNA, 20 bp, Artificial Sequence
  Description of Artificial Sequence: Synthetic oligonucleotide
  Target: LAMA2; (-) strand; PAM type: NNGRRT; PAM sequence: TGGAAT
tattattatactttaagttc

SEQ ID NO: 20109 - DNA, 20 bp, Artificial Sequence
  Description of Artificial Sequence: Synthetic oligonucleotide
  Target: LAMA2; (-) strand; PAM type: NNGRRT; PAM sequence: AAGGGT
aacggtaaacaaagctaatc

SEQ ID NO: 20110 - DNA, 20 bp, Artificial Sequence
  Description of Artificial Sequence: Synthetic oligonucleotide
  Target: LAMA2; (-) strand; PAM type: NNGRRT; PAM sequence: TTGAGT
aaaaaggaacttaatttttg

SEQ ID NO: 20111 - DNA, 20 bp, Artificial Sequence
  Description of Artificial Sequence: Synthetic oligonucleotide
  Target: LAMA2; (-) strand; PAM type: NNGRRT; PAM sequence: TAGAAT
aaaataaatagctatctagg

SEQ ID NO: 20112 - DNA, 20 bp, Artificial Sequence
  Description of Artificial Sequence: Synthetic oligonucleotide
  Target: LAMA2; (-) strand; PAM type: NNGRRT; PAM sequence: TTGGGT
atatttctctttaataactc

SEQ ID NO: 20113 - DNA, 20 bp, Artificial Sequence
  Description of Artificial Sequence: Synthetic oligonucleotide
  Target: LAMA2; (-) strand; PAM type: NNGRRT; PAM sequence: GAGAAT
ctgaatatcaaacatgatga

SEQ ID NO: 20114 - DNA, 20 bp, Artificial Sequence
  Description of Artificial Sequence: Synthetic oligonucleotide
  Target: LAMA2; (-) strand; PAM type: NNGRRT; PAM sequence: CTGAAT
aaattaagattaaattagtt

SEQ ID NO: 20115 - DNA, 20 bp, Artificial Sequence
  Description of Artificial Sequence: Synthetic oligonucleotide
  Target: LAMA2; (-) strand; PAM type: NNGRRT; PAM sequence: TTGAAT
agtaagaaaaaacagaaaat

SEQ ID NO: 20116 - DNA, 20 bp, Artificial Sequence
  Description of Artificial Sequence: Synthetic oligonucleotide
  Target: LAMA2; (-) strand; PAM type: NNGRRT; PAM sequence: ATGAAT
aatattacaagtaaaagaaa

SEQ ID NO: 20117 - DNA, 20 bp, Artificial Sequence
  Description of Artificial Sequence: Synthetic oligonucleotide
  Target: LAMA2; (-) strand; PAM type: NNGRRT; PAM sequence: AGGAAT
aagagataaacaaaatgaac

SEQ ID NO: 20118 - DNA, 20 bp, Artificial Sequence
  Description of Artificial Sequence: Synthetic oligonucleotide
  Target: LAMA2; (-) strand; PAM type: NNGRRT; PAM sequence: ATGAGT
tgcatactaaatacatacta

SEQ ID NO: 20119 - DNA, 20 bp, Artificial Sequence
  Description of Artificial Sequence: Synthetic oligonucleotide
  Target: LAMA2; (-) strand; PAM type: NNGRRT; PAM sequence: CAGAAT
gaaagcaaaaagcagaatga

SEQ ID NO: 20120 - DNA, 20 bp, Artificial Sequence
  Description of Artificial Sequence: Synthetic oligonucleotide
  Target: LAMA2; (-) strand; PAM type: NNGRRT; PAM sequence: CAGAAT
tagggagagaaagcaaaaag

SEQ ID NO: 20121 - DNA, 20 bp, Artificial Sequence
  Description of Artificial Sequence: Synthetic oligonucleotide
  Target: LAMA2; (-) strand; PAM type: NNGRRT; PAM sequence: ATGAAT
atagaaataatacaggatga

SEQ ID NO: 20122 - DNA, 20 bp, Artificial Sequence
  Description of Artificial Sequence: Synthetic oligonucleotide
  Target: LAMA2; (-) strand; PAM type: NNGRRT; PAM sequence: ATGAAT
aaaaatagaaataatacagg

SEQ ID NO: 20123 - DNA, 20 bp, Artificial Sequence
  Description of Artificial Sequence: Synthetic oligonucleotide
  Target: LAMA2; (-) strand; PAM type: NNGRRT; PAM sequence: CAGGAT
attaaaaaatagaaataata

SEQ ID NO: 20124 - DNA, 20 bp, Artificial Sequence
  Description of Artificial Sequence: Synthetic oligonucleotide
  Target: LAMA2; (-) strand; PAM type: NNGRRT; PAM sequence: GGGAAT
gataagaagcaatagatgag

SEQ ID NO: 20125 - DNA, 20 bp, Artificial Sequence
  Description of Artificial Sequence: Synthetic oligonucleotide
  Target: LAMA2; (-) strand; PAM type: NNGRRT; PAM sequence: GGGGAT
ttcattggaattgatatttt

SEQ ID NO: 20126 - DNA, 20 bp, Artificial Sequence
  Description of Artificial Sequence: Synthetic oligonucleotide
  Target: LAMA2; (-) strand; PAM type: NNGRRT; PAM sequence: TGGAAT
aagaaaataaaggtgttcat

SEQ ID NO: 20127 - DNA, 20 bp, Artificial Sequence
  Description of Artificial Sequence: Synthetic oligonucleotide
  Target: LAMA2; (-) strand; PAM type: NNGRRT; PAM sequence: GGGAAT
tacaggtgcaaagtagcctt

SEQ ID NO: 20128 - DNA, 20 bp, Artificial Sequence
  Description of Artificial Sequence: Synthetic oligonucleotide
  Target: LAMA2; (-) strand; PAM type: NNGRRT; PAM sequence: AAGAAT
gctgatgatgctacattgag

SEQ ID NO: 20129 - DNA, 20 bp, Artificial Sequence
  Description of Artificial Sequence: Synthetic oligonucleotide
  Target: LAMA2; (-) strand; PAM type: NNGRRT; PAM sequence: GAGGGT
aaagttaaaaccaaagagta

SEQ ID NO: 20130 - DNA, 20 bp, Artificial Sequence
  Description of Artificial Sequence: Synthetic oligonucleotide
  Target: LAMA2; (-) strand; PAM type: NNGRRT; PAM sequence: AAGAGT
ataaagaaaagttaaaacca

SEQ ID NO: 20131 - DNA, 20 bp, Artificial Sequence
  Description of Artificial Sequence: Synthetic oligonucleotide
  Target: LAMA2; (-) strand; PAM type: NNGRRT; PAM sequence: CAGGAT
caaaaccagttttgcaatga

SEQ ID NO: 20132 - DNA, 20 bp, Artificial Sequence
  Description of Artificial Sequence: Synthetic oligonucleotide
  Target: LAMA2; (-) strand; PAM type: NNGRRT; PAM sequence: CCGGGT
gcagttacaggctttgcagt

SEQ ID NO: 20133 - DNA, 20 bp, Artificial Sequence
  Description of Artificial Sequence: Synthetic oligonucleotide
  Target: LAMA2; (-) strand; PAM type: NNGRRT; PAM sequence: AAGGAT
gcagatacaggggccaaaac

SEQ ID NO: 20134 - DNA, 20 bp, Artificial Sequence
  Description of Artificial Sequence: Synthetic oligonucleotide
  Target: LAMA2; (-) strand; PAM type: NNGRRT; PAM sequence: TGGAAT
tcttgacagtgggacattac

SEQ ID NO: 20135 - DNA, 20 bp, Artificial Sequence
  Description of Artificial Sequence: Synthetic oligonucleotide
  Target: LAMA2; (-) strand; PAM type: NNGRRT; PAM sequence: ATGGAT
caccacacgtagaatagatt

SEQ ID NO: 20136 - DNA, 20 bp, Artificial Sequence
  Description of Artificial Sequence: Synthetic oligonucleotide
  Target: LAMA2; (-) strand; PAM type: NNGRRT; PAM sequence: TAGAAT
acctggtgggtcaccacacg

SEQ ID NO: 20137 - DNA, 20 bp, Artificial Sequence
  Description of Artificial Sequence: Synthetic oligonucleotide
  Target: LAMA2; (-) strand; PAM type: NNGRRT; PAM sequence: GTGGGT
atcctgctacagtgaacctg

SEQ ID NO: 20138 - DNA, 20 bp, Artificial Sequence
  Description of Artificial Sequence: Synthetic oligonucleotide
  Target: LAMA2; (-) strand; PAM type: NNGRRT; PAM sequence: TGGGGT
ttaacacactagttgggcaa

SEQ ID NO: 20139 - DNA, 20 bp, Artificial Sequence
  Description of Artificial Sequence: Synthetic oligonucleotide
  Target: LAMA2; (-) strand; PAM type: NNGRRT; PAM sequence: AAGGGT
ttgaatgcactttagtttta

SEQ ID NO: 20140 - DNA, 20 bp, Artificial Sequence
  Description of Artificial Sequence: Synthetic oligonucleotide
  Target: LAMA2; (-) strand; PAM type: NNGRRT; PAM sequence: TTGAAT
aattagatgcaaaggtagat

SEQ ID NO: 20141 - DNA, 20 bp, Artificial Sequence
  Description of Artificial Sequence: Synthetic oligonucleotide
  Target: LAMA2; (-) strand; PAM type: NNGRRT; PAM sequence: CTGAAT
acccttgacagaattcatta

SEQ ID NO: 20142 - DNA, 20 bp, Artificial Sequence
  Description of Artificial Sequence: Synthetic oligonucleotide
  Target: LAMA2; (-) strand; PAM type: NNGRRT; PAM sequence: CAGAAT
attcagaataaaacccttga

SEQ ID NO: 20143 - DNA, 20 bp, Artificial Sequence
  Description of Artificial Sequence: Synthetic oligonucleotide
  Target: LAMA2; (-) strand; PAM type: NNGRRT; PAM sequence: CAGAAT
tagaagattatttaaaaatt

SEQ ID NO: 20144 - DNA, 20 bp, Artificial Sequence
  Description of Artificial Sequence: Synthetic oligonucleotide
  Target: LAMA2; (-) strand; PAM type: NNGRRT; PAM sequence: CTGGGT
atgagtattttaaggcttat

SEQ ID NO: 20145 - DNA, 20 bp, Artificial Sequence
  Description of Artificial Sequence: Synthetic oligonucleotide
  Target: LAMA2; (-) strand; PAM type: NNGRRT; PAM sequence: ATGAGT
aacagaaaaatttgaatata

SEQ ID NO: 20146 - DNA, 20 bp, Artificial Sequence
  Description of Artificial Sequence: Synthetic oligonucleotide
  Target: LAMA2; (-) strand; PAM type: NNGRRT; PAM sequence: TTGAAT
ttataattgaacagaaaaat

SEQ ID NO: 20147 - DNA, 20 bp, Artificial Sequence
  Description of Artificial Sequence: Synthetic oligonucleotide
  Target: LAMA2; (-) strand; PAM type: NNGRRT; PAM sequence: CAGAAT
gtagttatacaccgtctggt

SEQ ID NO: 20148 - DNA, 20 bp, Artificial Sequence
  Description of Artificial Sequence: Synthetic oligonucleotide
  Target: LAMA2; (-) strand; PAM type: NNGRRT; PAM sequence: AAGAAT
atggtatgctaactttttca

SEQ ID NO: 20149 - DNA, 20 bp, Artificial Sequence
  Description of Artificial Sequence: Synthetic oligonucleotide
  Target: LAMA2; (-) strand; PAM type: NNGRRT; PAM sequence: AAGGGT
ttaataaaaatatttttaat

SEQ ID NO: 20150 - DNA, 20 bp, Artificial Sequence
  Description of Artificial Sequence: Synthetic oligonucleotide
  Target: LAMA2; (-) strand; PAM type: NNGRRT; PAM sequence: AGGAGT
tttctgcttactgtgtccac

SEQ ID NO: 20151 - DNA, 20 bp, Artificial Sequence
  Description of Artificial Sequence: Synthetic oligonucleotide
  Target: LAMA2; (-) strand; PAM type: NNGRRT; PAM sequence: TGGAAT
tttttcatttcagataatat

SEQ ID NO: 20152 - DNA, 20 bp, Artificial Sequence
  Description of Artificial Sequence: Synthetic oligonucleotide
  Target: LAMA2; (-) strand; PAM type: NNGRRT; PAM sequence: CAGGAT
gaagatgcactaagagcctg

SEQ ID NO: 20153 - DNA, 20 bp, Artificial Sequence
  Description of Artificial Sequence: Synthetic oligonucleotide
  Target: LAMA2; (-) strand; PAM type: NNGRRT; PAM sequence: GAGAAT
tttctgtggagttttgaaaa

SEQ ID NO: 20154 - DNA, 20 bp, Artificial Sequence
  Description of Artificial Sequence: Synthetic oligonucleotide
  Target: LAMA2; (-) strand; PAM type: NNGRRT; PAM sequence: TGGAGT
gtaaaggttagagatttctg

SEQ ID NO: 20155 - DNA, 20 bp, Artificial Sequence
  Description of Artificial Sequence: Synthetic oligonucleotide
  Target: LAMA2; (-) strand; PAM type: NNGRRT; PAM sequence: ATGAGT
ataccagacatcaccactgt

SEQ ID NO: 20156 - DNA, 20 bp, Artificial Sequence
  Description of Artificial Sequence: Synthetic oligonucleotide
  Target: LAMA2; (-) strand; PAM type: NNGRRT; PAM sequence: TTGAGT
taataattctcagtacaata

SEQ ID NO: 20157 - DNA, 20 bp, Artificial Sequence
  Description of Artificial Sequence: Synthetic oligonucleotide
  Target: LAMA2; (-) strand; PAM type: NNGRRT; PAM sequence: TAGGAT
acaggaggcatctttcttat

SEQ ID NO: 20158 - DNA, 20 bp, Artificial Sequence
  Description of Artificial Sequence: Synthetic oligonucleotide
  Target: LAMA2; (-) strand; PAM type: NNGRRT; PAM sequence: TTGAAT
ctaaaaacctgtcatttaat

SEQ ID NO: 20159 - DNA, 20 bp, Artificial Sequence
  Description of Artificial Sequence: Synthetic oligonucleotide
  Target: LAMA2; (-) strand; PAM type: NNGRRT; PAM sequence: TTGGAT
acttatttaaagttactaac

SEQ ID NO: 20160 - DNA, 20 bp, Artificial Sequence
  Description of Artificial Sequence: Synthetic oligonucleotide
  Target: LAMA2; (-) strand; PAM type: NNGRRT; PAM sequence: ATGAAT
ggttaataagcattttggag

SEQ ID NO: 20161 - DNA, 20 bp, Artificial Sequence
  Description of Artificial Sequence: Synthetic oligonucleotide
  Target: LAMA2; (-) strand; PAM type: NNGRRT; PAM sequence: GAGAAT
actcatatgttatagtataa

SEQ ID NO: 20162 - DNA, 20 bp, Artificial Sequence
  Description of Artificial Sequence: Synthetic oligonucleotide
  Target: LAMA2; (-) strand; PAM type: NNGRRT; PAM sequence: TTGAAT
taggaatttccctttctttc

SEQ ID NO: 20163 - DNA, 20 bp, Artificial Sequence
  Description of Artificial Sequence: Synthetic oligonucleotide
  Target: LAMA2; (-) strand; PAM type: NNGRRT; PAM sequence: AGGAAT
ccctctttggtctgacatct

SEQ ID NO: 20164 - DNA, 20 bp, Artificial Sequence
  Description of Artificial Sequence: Synthetic oligonucleotide
  Target: LAMA2; (-) strand; PAM type: NNGRRT; PAM sequence: GTGGGT
ttcagctgcaatttccgtct

SEQ ID NO: 20165 - DNA, 20 bp, Artificial Sequence
  Description of Artificial Sequence: Synthetic oligonucleotide
  Target: LAMA2; (-) strand; PAM type: NNGRRT; PAM sequence: GGGAGT
tttctagtgtccctgcttca

SEQ ID NO: 20166 - DNA, 20 bp, Artificial Sequence
  Description of Artificial Sequence: Synthetic oligonucleotide
  Target: LAMA2; (-) strand; PAM type: NNGRRT; PAM sequence: AAGAAT
tgcctctgtaggcttgcagg

SEQ ID NO: 20167 - DNA, 20 bp, Artificial Sequence
  Description of Artificial Sequence: Synthetic oligonucleotide
  Target: LAMA2; (-) strand; PAM type: NNGRRT; PAM sequence: GGGGAT
cccacgtggcacacaggttt

SEQ ID NO: 20168 - DNA, 20 bp, Artificial Sequence
  Description of Artificial Sequence: Synthetic oligonucleotide
  Target: LAMA2; (-) strand; PAM type: NNGRRT; PAM sequence: GAGAAT
agaatgccagcacataaggg

SEQ ID NO: 20169 - DNA, 20 bp, Artificial Sequence
  Description of Artificial Sequence: Synthetic oligonucleotide
  Target: LAMA2; (-) strand; PAM type: NNGRRT; PAM sequence: AAGAAT
atcatttccttgacttgttg

SEQ ID NO: 20170 - DNA, 20 bp, Artificial Sequence
  Description of Artificial Sequence: Synthetic oligonucleotide
  Target: LAMA2; (-) strand; PAM type: NNGRRT; PAM sequence: GGGAAT
ggctgtattatttttcctat

SEQ ID NO: 20171 - DNA, 20 bp, Artificial Sequence
  Description of Artificial Sequence: Synthetic oligonucleotide
  Target: LAMA2; (-) strand; PAM type: NNGRRT; PAM sequence: ATGAAT
gaatatgatcacagattttt

SEQ ID NO: 20172 - DNA, 20 bp, Artificial Sequence
  Description of Artificial Sequence: Synthetic oligonucleotide
  Target: LAMA2; (-) strand; PAM type: NNGRRT; PAM sequence: AAGAAT
atttttatgatttatgtgat

SEQ ID NO: 20173 - DNA, 20 bp, Artificial Sequence
  Description of Artificial Sequence: Synthetic oligonucleotide
  Target: LAMA2; (-) strand; PAM type: NNGRRT; PAM sequence: TTGAAT
ttttccaaacctggttactt

SEQ ID NO: 20174 - DNA, 20 bp, Artificial Sequence
  Description of Artificial Sequence: Synthetic oligonucleotide
  Target: LAMA2; (-) strand; PAM type: NNGRRT; PAM sequence: TTGAAT
tctcttgtttaacccaatca

SEQ ID NO: 20175 - DNA, 20 bp, Artificial Sequence
  Description of Artificial Sequence: Synthetic oligonucleotide
  Target: LAMA2; (-) strand; PAM type: NNGRRT; PAM sequence: GTGAGT
ctgttcaattttacaattct

SEQ ID NO: 20176 - DNA, 20 bp, Artificial Sequence
  Description of Artificial Sequence: Synthetic oligonucleotide
  Target: LAMA2; (-) strand; PAM type: NNGRRT; PAM sequence: TTGAAT
ttctctccttcattattttt

SEQ ID NO: 20177 - DNA, 20 bp, Artificial Sequence
  Description of Artificial Sequence: Synthetic oligonucleotide
  Target: LAMA2; (-) strand; PAM type: NNGRRT; PAM sequence: GAGGAT
ttttttatcatcctcaaact

SEQ ID NO: 20178 - DNA, 20 bp, Artificial Sequence
  Description of Artificial Sequence: Synthetic oligonucleotide
  Target: LAMA2; (-) strand; PAM type: NNGRRT; PAM sequence: AGGGGT
tggttgacaggttttctact

SEQ ID NO: 20179 - DNA, 20 bp, Artificial Sequence
  Description of Artificial Sequence: Synthetic oligonucleotide
  Target: LAMA2; (-) strand; PAM type: NNGRRT; PAM sequence: GTGAGT
tctttccatgaagttggact

SEQ ID NO: 20180 - DNA, 20 bp, Artificial Sequence
  Description of Artificial Sequence: Synthetic oligonucleotide
  Target: LAMA2; (-) strand; PAM type: NNGRRT; PAM sequence: ATGGGT
taatctagtgaaactgtctt

SEQ ID NO: 20181 - DNA, 20 bp, Artificial Sequence
  Description of Artificial Sequence: Synthetic oligonucleotide
  Target: LAMA2; (-) strand; PAM type: NNGRRT; PAM sequence: TAGAAT
tcctcagctgtctcctcatt

SEQ ID NO: 20182 - DNA, 20 bp, Artificial Sequence
  Description of Artificial Sequence: Synthetic oligonucleotide
  Target: LAMA2; (-) strand; PAM type: NNGRRT; PAM sequence: CAGGGT
gatgtggaattgctggttga

SEQ ID NO: 20183 - DNA, 20 bp, Artificial Sequence
  Description of Artificial Sequence: Synthetic oligonucleotide
  Target: LAMA2; (-) strand; PAM type: NNGRRT; PAM sequence: TGGAAT
ttggggtaaatgtttggatg

SEQ ID NO: 20184 - DNA, 20 bp, Artificial Sequence
  Description of Artificial Sequence: Synthetic oligonucleotide
  Target: LAMA2; (-) strand; PAM type: NNGRRT; PAM sequence: TTGGAT
gagttttttggggtaaatgt

SEQ ID NO: 20185 - DNA, 20 bp, Artificial Sequence
  Description of Artificial Sequence: Synthetic oligonucleotide
  Target: LAMA2; (-) strand; PAM type: NNGRRT; PAM sequence: TGGGGT
tatacattgtaagagttttt

SEQ ID NO: 20186 - DNA, 20 bp, Artificial Sequence
  Description of Artificial Sequence: Synthetic oligonucleotide
  Target: LAMA2; (-) strand; PAM type: NNGRRT; PAM sequence: AAGAGT
ggtttttctctatacattgt

SEQ ID NO: 20187 - DNA, 20 bp, Artificial Sequence
  Description of Artificial Sequence: Synthetic oligonucleotide
  Target: LAMA2; (-) strand; PAM type: NNGRRT; PAM sequence: ATGAAT
gcaatgatacttagatacaa

SEQ ID NO: 20188 - DNA, 20 bp, Artificial Sequence
  Description of Artificial Sequence: Synthetic oligonucleotide
  Target: LAMA2; (-) strand; PAM type: NNGRRT; PAM sequence: TGGAAT
cattctcctctttttaaatc

SEQ ID NO: 20189 - DNA, 20 bp, Artificial Sequence
  Description of Artificial Sequence: Synthetic oligonucleotide
  Target: LAMA2; (-) strand; PAM type: NNGRRT; PAM sequence: TTGAGT
tgcaaaaatattataaacat

SEQ ID NO: 20190 - DNA, 20 bp, Artificial Sequence
  Description of Artificial Sequence: Synthetic oligonucleotide
  Target: LAMA2; (-) strand; PAM type: NNGRRT; PAM sequence: GAGAGT
acttgaaataaacaaatact

SEQ ID NO: 20191 - DNA, 20 bp, Artificial Sequence
  Description of Artificial Sequence: Synthetic oligonucleotide
  Target: LAMA2; (-) strand; PAM type: NNGRRT; PAM sequence: CTGAAT
aatgaggtatcccaagaaat

SEQ ID NO: 20192 - DNA, 20 bp, Artificial Sequence
  Description of Artificial Sequence: Synthetic oligonucleotide
  Target: LAMA2; (-) strand; PAM type: NNGRRT; PAM sequence: AGGAAT
aaaaatgcctggctaagcaa

SEQ ID NO: 20193 - DNA, 20 bp, Artificial Sequence
  Description of Artificial Sequence: Synthetic oligonucleotide
  Target: LAMA2; (-) strand; PAM type: NNGRRT; PAM sequence: GAGGAT
ccatgagaatgatatgactt

SEQ ID NO: 20194 - DNA, 20 bp, Artificial Sequence
  Description of Artificial Sequence: Synthetic oligonucleotide
  Target: LAMA2; (-) strand; PAM type: NNGRRT; PAM sequence: GAGAAT
ttgaaaagtgattatgccat

SEQ ID NO: 20195 - DNA, 20 bp, Artificial Sequence
  Description of Artificial Sequence: Synthetic oligonucleotide
  Target: LAMA2; (-) strand; PAM type: NNGRRT; PAM sequence: CAGAAT
gaggtaagatagacataaaa

SEQ ID NO: 20196 - DNA, 20 bp, Artificial Sequence
  Description of Artificial Sequence: Synthetic oligonucleotide
  Target: LAMA2; (-) strand; PAM type: NNGRRT; PAM sequence: TAGGGT
gcaatggtaaagaaaatata

SEQ ID NO: 20197 - DNA, 20 bp, Artificial Sequence
  Description of Artificial Sequence: Synthetic oligonucleotide
  Target: LAMA2; (-) strand; PAM type: NNGRRT; PAM sequence: ATGAGT
tccttccttctttcttttgt

SEQ ID NO: 20198 - DNA, 20 bp, Artificial Sequence
  Description of Artificial Sequence: Synthetic oligonucleotide
  Target: LAMA2; (-) strand; PAM type: NNGRRT; PAM sequence: CAGAAT
ccatttcatagattataaaa

SEQ ID NO: 20199 - DNA, 20 bp, Artificial Sequence
  Description of Artificial Sequence: Synthetic oligonucleotide
  Target: LAMA2; (-) strand; PAM type: NNGRRT; PAM sequence: AGGAAT
gtccatttgtaaaaatgccc

SEQ ID NO: 20200 - DNA, 20 bp, Artificial Sequence
  Description of Artificial Sequence: Synthetic oligonucleotide
  Target: LAMA2; (-) strand; PAM type: NNGRRT; PAM sequence: CAGGAT
ctacatctgtaatttagatt

SEQ ID NO: 20201 - DNA, 20 bp, Artificial Sequence
  Description of Artificial Sequence: Synthetic oligonucleotide
  Target: LAMA2; (-) strand; PAM type: NNGRRT; PAM sequence: AGGGGT
cataatattatttgaactgt

SEQ ID NO: 20202 - DNA, 20 bp, Artificial Sequence
  Description of Artificial Sequence: Synthetic oligonucleotide
  Target: LAMA2; (-) strand; PAM type: NNGRRT; PAM sequence: GAGAGT
ttccaaaatttggtcaagga

SEQ ID NO: 20203 - DNA, 20 bp, Artificial Sequence
  Description of Artificial Sequence: Synthetic oligonucleotide
  Target: LAMA2; (-) strand; PAM type: NNGRRT; PAM sequence: AAGGGT
accaagctaggtttgaggac

SEQ ID NO: 20204 - DNA, 20 bp, Artificial Sequence
  Description of Artificial Sequence: Synthetic oligonucleotide
  Target: LAMA2; (-) strand; PAM type: NNGRRT; PAM sequence: CAGAAT
ttcttaacacactgacttag

SEQ ID NO: 20205 - DNA, 20 bp, Artificial Sequence
  Description of Artificial Sequence: Synthetic oligonucleotide
  Target: LAMA2; (-) strand; PAM type: NNGRRT; PAM sequence: AAGGGT
ggccagagggatcagatatc

SEQ ID NO: 20206 - DNA, 20 bp, Artificial Sequence
  Description of Artificial Sequence: Synthetic oligonucleotide
  Target: LAMA2; (-) strand; PAM type: NNGRRT; PAM sequence: AGGGAT
tcttgttgaagacaggccag

SEQ ID NO: 20207 - DNA, 20 bp, Artificial Sequence
  Description of Artificial Sequence: Synthetic oligonucleotide
  Target: LAMA2; (-) strand; PAM type: NNGRRT; PAM sequence: CAGGAT
ttcttgctaaaccaaattaa

SEQ ID NO: 20208 - DNA, 20 bp, Artificial Sequence
  Description of Artificial Sequence: Synthetic oligonucleotide
  Target: LAMA2; (-) strand; PAM type: NNGRRT; PAM sequence: GGGGAT
agacatcaggggtaggtagg

SEQ ID NO: 20209 - DNA, 20 bp, Artificial Sequence
  Description of Artificial Sequence: Synthetic oligonucleotide
  Target: LAMA2; (-) strand; PAM type: NNGRRT; PAM sequence: AGGGGT
aatcattaagaggagacatc

SEQ ID NO: 20210 - DNA, 20 bp, Artificial Sequence
  Description of Artificial Sequence: Synthetic oligonucleotide
  Target: LAMA2; (-) strand; PAM type: NNGRRT; PAM sequence: AAGGAT
agagatttatagccacgagc

SEQ ID NO: 20211 - DNA, 20 bp, Artificial Sequence
  Description of Artificial Sequence: Synthetic oligonucleotide
  Target: LAMA2; (-) strand; PAM type: NNGRRT; PAM sequence: AAGGGT
agggattcagtgccaaggaa

SEQ ID NO: 20212 - DNA, 20 bp, Artificial Sequence
  Description of Artificial Sequence: Synthetic oligonucleotide
  Target: LAMA2; (-) strand; PAM type: NNGRRT; PAM sequence: AGGGAT
ccaatacaacatgaacaagt

SEQ ID NO: 20213 - DNA, 20 bp, Artificial Sequence
  Description of Artificial Sequence: Synthetic oligonucleotide
  Target: LAMA2; (-) strand; PAM type: NNGRRT; PAM sequence: ATGGGT
ccaaggctagataatagttg

SEQ ID NO: 20214 - DNA, 20 bp, Artificial Sequence
  Description of Artificial Sequence: Synthetic oligonucleotide
  Target: LAMA2; (-) strand; PAM type: NNGRRT; PAM sequence: AAGGAT
ttaaaataagttaacaaaag

SEQ ID NO: 20215 - DNA, 20 bp, Artificial Sequence
  Description of Artificial Sequence: Synthetic oligonucleotide
  Target: LAMA2; (-) strand; PAM type: NNGRRT; PAM sequence: AGGAAT
ttttgtgtgataattgcttc

SEQ ID NO: 20216 - DNA, 20 bp, Artificial Sequence
  Description of Artificial Sequence: Synthetic oligonucleotide
  Target: LAMA2; (-) strand; PAM type: NNGRRT; PAM sequence: AGGAAT
gtactactgacaaagttacc

SEQ ID NO: 20217 - DNA, 20 bp, Artificial Sequence
  Description of Artificial Sequence: Synthetic oligonucleotide
  Target: LAMA2; (-) strand; PAM type: NNGRRT; PAM sequence: GGGAGT
actgtgattgttagtcagct

SEQ ID NO: 20218 - DNA, 20 bp, Artificial Sequence
  Description of Artificial Sequence: Synthetic oligonucleotide
  Target: LAMA2; (-) strand; PAM type: NNGRRT; PAM sequence: TTGAAT
ttttccctttaaaaacaaag

SEQ ID NO: 20219 - DNA, 20 bp, Artificial Sequence
  Description of Artificial Sequence: Synthetic oligonucleotide
  Target: LAMA2; (-) strand; PAM type: NNGRRT; PAM sequence: GTGAAT
tttatgtacagatgcaccat

SEQ ID NO: 20220 - DNA, 20 bp, Artificial Sequence
  Description of Artificial Sequence: Synthetic oligonucleotide
  Target: LAMA2; (-) strand; PAM type: NNGRRT; PAM sequence: TAGAGT
attttaacactttatttgta

SEQ ID NO: 20221 - DNA, 20 bp, Artificial Sequence
  Description of Artificial Sequence: Synthetic oligonucleotide
  Target: LAMA2; (-) strand; PAM type: NNGRRT; PAM sequence: TGGAGT
aactgttaatctaaacaaaa

SEQ ID NO: 20222 - DNA, 20 bp, Artificial Sequence
  Description of Artificial Sequence: Synthetic oligonucleotide
  Target: LAMA2; (-) strand; PAM type: NNGRRT; PAM sequence: ATGAAT
tctataatttatttgtactg

SEQ ID NO: 20223 - DNA, 20 bp, Artificial Sequence
  Description of Artificial Sequence: Synthetic oligonucleotide
  Target: LAMA2; (-) strand; PAM type: NNGRRT; PAM sequence: CTGAAT
aaagttttgtaccttccaga

SEQ ID NO: 20224 - DNA, 20 bp, Artificial Sequence
  Description of Artificial Sequence: Synthetic oligonucleotide
  Target: LAMA2; (-) strand; PAM type: NNGRRT; PAM sequence: TCGAAT
aatataattgaacctaaata

SEQ ID NO: 20225 - DNA, 20 bp, Artificial Sequence
  Description of Artificial Sequence: Synthetic oligonucleotide
  Target: LAMA2; (-) strand; PAM type: NNGRRT; PAM sequence: GGGAAT
tcagtccctaaagcatagat

SEQ ID NO: 20226 - DNA, 20 bp, Artificial Sequence
  Description of Artificial Sequence: Synthetic oligonucleotide
  Target: LAMA2; (-) strand; PAM type: NNGRRT; PAM sequence: GAGAAT
cagtgtcctcttccagatgt

SEQ ID NO: 20227 - DNA, 20 bp, Artificial Sequence
  Description of Artificial Sequence: Synthetic oligonucleotide
  Target: LAMA2; (-) strand; PAM type: NNGRRT; PAM sequence: GGGAGT
aaaataagacagaaaaacca

SEQ ID NO: 20228 - DNA, 20 bp, Artificial Sequence
  Description of Artificial Sequence: Synthetic oligonucleotide
  Target: LAMA2; (-) strand; PAM type: NNGRRT; PAM sequence: CTGGAT
aggggtacagacaacatgtt

SEQ ID NO: 20229 - DNA, 20 bp, Artificial Sequence
  Description of Artificial Sequence: Synthetic oligonucleotide
  Target: LAMA2; (-) strand; PAM type: NNGRRT; PAM sequence: AGGGGT
aagaaaatcactgctgtaag

SEQ ID NO: 20230 - DNA, 20 bp, Artificial Sequence
  Description of Artificial Sequence: Synthetic oligonucleotide
  Target: LAMA2; (-) strand; PAM type: NNGRRT; PAM sequence: TAGAGT
acagtttctacttggagaaa

SEQ ID NO: 20231 - DNA, 20 bp, Artificial Sequence
  Description of Artificial Sequence: Synthetic oligonucleotide
  Target: LAMA2; (-) strand; PAM type: NNGRRT; PAM sequence: AGGAAT
aggattatagcaaaggaagt

SEQ ID NO: 20232 - DNA, 20 bp, Artificial Sequence
  Description of Artificial Sequence: Synthetic oligonucleotide
  Target: LAMA2; (-) strand; PAM type: NNGRRT; PAM sequence: GAGGAT
gaatataaaaatgccctcaa

SEQ ID NO: 20233 - DNA, 20 bp, Artificial Sequence
  Description of Artificial Sequence: Synthetic oligonucleotide
  Target: LAMA2; (-) strand; PAM type: NNGRRT; PAM sequence: GGGAAT
aagacatatgagatatcaca

SEQ ID NO: 20234 - DNA, 20 bp, Artificial Sequence
  Description of Artificial Sequence: Synthetic oligonucleotide
  Target: LAMA2; (-) strand; PAM type: NNGRRT; PAM sequence: TTGAAT
ctgctttatggttgagctct

SEQ ID NO: 20235 - DNA, 20 bp, Artificial Sequence
  Description of Artificial Sequence: Synthetic oligonucleotide
  Target: LAMA2; (-) strand; PAM type: NNGRRT; PAM sequence: ATGAAT
tcttggaagatcctcttgac

SEQ ID NO: 20236 - DNA, 20 bp, Artificial Sequence
  Description of Artificial Sequence: Synthetic oligonucleotide
  Target: LAMA2; (-) strand; PAM type: NNGRRT; PAM sequence: ATGAGT
ctcatcgaccattgtcatcc

SEQ ID NO: 20237 - DNA, 20 bp, Artificial Sequence
  Description of Artificial Sequence: Synthetic oligonucleotide
  Target: LAMA2; (-) strand; PAM type: NNGRRT; PAM sequence: TAGAGT
agagtatattttatataatt

SEQ ID NO: 20238 - DNA, 20 bp, Artificial Sequence
  Description of Artificial Sequence: Synthetic oligonucleotide
  Target: LAMA2; (-) strand; PAM type: NNGRRT; PAM sequence: TAGAGT
aatctttctttactacatta

SEQ ID NO: 20239 - DNA, 20 bp, Artificial Sequence
  Description of Artificial Sequence: Synthetic oligonucleotide
  Target: LAMA2; (-) strand; PAM type: NNGRRT; PAM sequence: TTGAGT
ataaatcaacagaactatac

SEQ ID NO: 20240 - DNA, 20 bp, Artificial Sequence
  Description of Artificial Sequence: Synthetic oligonucleotide
  Target: LAMA2; (-) strand; PAM type: NNGRRT; PAM sequence: AGGAAT
catcctaagagatattcctt

SEQ ID NO: 20241 - DNA, 20 bp, Artificial Sequence
  Description of Artificial Sequence: Synthetic oligonucleotide
  Target: LAMA2; (-) strand; PAM type: NNGRRT; PAM sequence: AGGGAT
ggtctcaagcattttggata

SEQ ID NO: 20242 - DNA, 20 bp, Artificial Sequence
  Description of Artificial Sequence: Synthetic oligonucleotide
  Target: LAMA2; (-) strand; PAM type: NNGRRT; PAM sequence: TTGGAT
catttctggtctcaagcatt

SEQ ID NO: 20243 - DNA, 20 bp, Artificial Sequence
  Description of Artificial Sequence: Synthetic oligonucleotide
  Target: LAMA2; (-) strand; PAM type: NNGRRT; PAM sequence: AGGAAT
agattttggattttctgatt

SEQ ID NO: 20244 - DNA, 20 bp, Artificial Sequence
  Description of Artificial Sequence: Synthetic oligonucleotide
  Target: LAMA2; (-) strand; PAM type: NNGRRT; PAM sequence: TTGGAT
tcactagagcatttcagatt

SEQ ID NO: 20245 - DNA, 20 bp, Artificial Sequence
  Description of Artificial Sequence: Synthetic oligonucleotide
  Target: LAMA2; (-) strand; PAM type: NNGRRT; PAM sequence: TGGAAT
gcacctatatgatgctcaaa

SEQ ID NO: 20246 - DNA, 20 bp, Artificial Sequence
  Description of Artificial Sequence: Synthetic oligonucleotide
  Target: LAMA2; (-) strand; PAM type: NNGRRT; PAM sequence: AAGAAT
ttagcaaagacattgggaac

SEQ ID NO: 20247 - DNA, 20 bp, Artificial Sequence
  Description of Artificial Sequence: Synthetic oligonucleotide
  Target: LAMA2; (-) strand; PAM type: NNGRRT; PAM sequence: TAGAAT
attcaacttgtggacataga

SEQ ID NO: 20248 - DNA, 20 bp, Artificial Sequence
  Description of Artificial Sequence: Synthetic oligonucleotide
  Target: LAMA2; (-) strand; PAM type: NNGRRT; PAM sequence: TGGAGT
aggaagctttatgacaggag

SEQ ID NO: 20249 - DNA, 20 bp, Artificial Sequence
  Description of Artificial Sequence: Synthetic oligonucleotide
  Target: LAMA2; (-) strand; PAM type: NNGRRT; PAM sequence: AGGAGT
gcttaaggaagctttatgac

SEQ ID NO: 20250 - DNA, 20 bp, Artificial Sequence
  Description of Artificial Sequence: Synthetic oligonucleotide
  Target: LAMA2; (-) strand; PAM type: NNGRRT; PAM sequence: TGGAAT
caatcaactataatgcaagg

SEQ ID NO: 20251 - DNA, 20 bp, Artificial Sequence
  Description of Artificial Sequence: Synthetic oligonucleotide
  Target: LAMA2; (-) strand; PAM type: NNGRRT; PAM sequence: TTGGGT
ctttaaaggccaatatctag

SEQ ID NO: 20252 - DNA, 20 bp, Artificial Sequence
  Description of Artificial Sequence: Synthetic oligonucleotide
  Target: LAMA2; (-) strand; PAM type: NNGRRT; PAM sequence: AGGAAT
ctgaagcaacacattagggt

SEQ ID NO: 20253 - DNA, 20 bp, Artificial Sequence
  Description of Artificial Sequence: Synthetic oligonucleotide
  Target: LAMA2; (-) strand; PAM type: NNGRRT; PAM sequence: TAGGGT
aataacctgaagcaacacat

SEQ ID NO: 20254 - DNA, 20 bp, Artificial Sequence
  Description of Artificial Sequence: Synthetic oligonucleotide
  Target: LAMA2; (-) strand; PAM type: NNGRRT; PAM sequence: AAGAGT
gaagttgagagcatcttcaa

SEQ ID NO: 20255 - DNA, 20 bp, Artificial Sequence
  Description of Artificial Sequence: Synthetic oligonucleotide
  Target: LAMA2; (-) strand; PAM type: NNGRRT; PAM sequence: CTGAAT
tttaaattaactttttgata

SEQ ID NO: 20256 - DNA, 20 bp, Artificial Sequence
  Description of Artificial Sequence: Synthetic oligonucleotide
  Target: LAMA2; (-) strand; PAM type: NNGRRT; PAM sequence: GAGAAT
gcagtcctccttatatccaa

SEQ ID NO: 20257 - DNA, 20 bp, Artificial Sequence
  Description of Artificial Sequence: Synthetic oligonucleotide
  Target: LAMA2; (-) strand; PAM type: NNGRRT; PAM sequence: AAGAAT
agaagtaaggagaaaaattt

SEQ ID NO: 20258 - DNA, 20 bp, Artificial Sequence
  Description of Artificial Sequence: Synthetic oligonucleotide
  Target: LAMA2; (-) strand; PAM type: NNGRRT; PAM sequence: AGGGAT
acccagattgagcagaagat

SEQ ID NO: 20259 - DNA, 20 bp, Artificial Sequence
  Description of Artificial Sequence: Synthetic oligonucleotide
  Target: LAMA2; (-) strand; PAM type: NNGRRT; PAM sequence: CTGAAT
tgctatacgcatagtacgag

SEQ ID NO: 20260 - DNA, 20 bp, Artificial Sequence
  Description of Artificial Sequence: Synthetic oligonucleotide
  Target: LAMA2; (-) strand; PAM type: NNGRRT; PAM sequence: TTGAAT
ctctacatttcccctcttcc

SEQ ID NO: 20261 - DNA, 20 bp, Artificial Sequence
  Description of Artificial Sequence: Synthetic oligonucleotide
  Target: LAMA2; (-) strand; PAM type: NNGRRT; PAM sequence: AAGAGT
ggatataatctctcaattta

SEQ ID NO: 20262 - DNA, 20 bp, Artificial Sequence
  Description of Artificial Sequence: Synthetic oligonucleotide
  Target: LAMA2; (-) strand; PAM type: NNGRRT; PAM sequence: AAGGAT
ccatataatgaaaaacaggg

SEQ ID NO: 20263 - DNA, 20 bp, Artificial Sequence
  Description of Artificial Sequence: Synthetic oligonucleotide
  Target: LAMA2; (-) strand; PAM type: NNGRRT; PAM sequence: TGGGGT
aatttgacaggtagagaaac

SEQ ID NO: 20264 - DNA, 20 bp, Artificial Sequence
  Description of Artificial Sequence: Synthetic oligonucleotide
  Target: LAMA2; (-) strand; PAM type: NNGRRT; PAM sequence: AGGAAT
tgtacatttgaggcaagcat

SEQ ID NO: 20265 - DNA, 20 bp, Artificial Sequence
  Description of Artificial Sequence: Synthetic oligonucleotide
  Target: LAMA2; (-) strand; PAM type: NNGRRT; PAM sequence: ATGGAT
aaaattaaagacattaatgc

SEQ ID NO: 20266 - DNA, 20 bp, Artificial Sequence
  Description of Artificial Sequence: Synthetic oligonucleotide
  Target: LAMA2; (-) strand; PAM type: NNGRRT; PAM sequence: AGGAAT
gtcatgataaatacctgtgc

SEQ ID NO: 20267 - DNA, 20 bp, Artificial Sequence
  Description of Artificial Sequence: Synthetic oligonucleotide
  Target: LAMA2; (-) strand; PAM type: NNGRRT; PAM sequence: TAGAGT
atcttcatgtaggttgagtg

SEQ ID NO: 20268 - DNA, 20 bp, Artificial Sequence
  Description of Artificial Sequence: Synthetic oligonucleotide
  Target: LAMA2; (-) strand; PAM type: NNGRRT; PAM sequence: TTGAGT
tatgttgatcttcatgtagg

SEQ ID NO: 20269 - DNA, 20 bp, Artificial Sequence
  Description of Artificial Sequence: Synthetic oligonucleotide
  Target: LAMA2; (-) strand; PAM type: NNGRRT; PAM sequence: ATGGAT
ctggtgagaaagattattgg

SEQ ID NO: 20270 - DNA, 20 bp, Artificial Sequence
  Description of Artificial Sequence: Synthetic oligonucleotide
  Target: LAMA2; (-) strand; PAM type: NNGRRT; PAM sequence: TTGGAT
tacactggtgagaaagatta

SEQ ID NO: 20271 - DNA, 20 bp, Artificial Sequence
  Description of Artificial Sequence: Synthetic oligonucleotide
  Target: LAMA2; (-) strand; PAM type: NNGRRT; PAM sequence: CCGGAT
cctcttgcaaattgaagaag

SEQ ID NO: 20272 - DNA, 20 bp, Artificial Sequence
  Description of Artificial Sequence: Synthetic oligonucleotide
  Target: LAMA2; (-) strand; PAM type: NNGRRT; PAM sequence: TAGAGT
ttaattgcattattgtttca

SEQ ID NO: 20273 - DNA, 20 bp, Artificial Sequence
  Description of Artificial Sequence: Synthetic oligonucleotide
  Target: LAMA2; (-) strand; PAM type: NNGRRT; PAM sequence: TGGAGT
tctcttaaatcatgcaccct

SEQ ID NO: 20274 - DNA, 20 bp, Artificial Sequence
  Description of Artificial Sequence: Synthetic oligonucleotide
  Target: LAMA2; (-) strand; PAM type: NNGRRT; PAM sequence: CAGAGT
tattatgtatacagatgata

SEQ ID NO: 20275 - DNA, 20 bp, Artificial Sequence
  Description of Artificial Sequence: Synthetic oligonucleotide
  Target: LAMA2; (-) strand; PAM type: NNGRRT; PAM sequence: GTGGAT
aaatagtaactaaagcgttg

SEQ ID NO: 20276 - DNA, 20 bp, Artificial Sequence
  Description of Artificial Sequence: Synthetic oligonucleotide
  Target: LAMA2; (-) strand; PAM type: NNGRRT; PAM sequence: CAGAAT
aataatttttcaaaccaact

SEQ ID NO: 20277 - DNA, 20 bp, Artificial Sequence
  Description of Artificial Sequence: Synthetic oligonucleotide
  Target: LAMA2; (-) strand; PAM type: NNGRRT; PAM sequence: GTGGGT
tgcacagatttgaaaaggca

SEQ ID NO: 20278 - DNA, 20 bp, Artificial Sequence
  Description of Artificial Sequence: Synthetic oligonucleotide
  Target: LAMA2; (-) strand; PAM type: NNGRRT; PAM sequence: CAGGAT
aaatattttatagctctgtt

SEQ ID NO: 20279 - DNA, 20 bp, Artificial Sequence
  Description of Artificial Sequence: Synthetic oligonucleotide
  Target: LAMA2; (-) strand; PAM type: NNGRRT; PAM sequence: TGGGGT
cagtggggcagtctggaggg

SEQ ID NO: 20280 - DNA, 20 bp, Artificial Sequence
  Description of Artificial Sequence: Synthetic oligonucleotide
  Target: LAMA2; (-) strand; PAM type: NNGRRT; PAM sequence: GAGGGT
tctatcagtggggcagtctg

SEQ ID NO: 20281 - DNA, 20 bp, Artificial Sequence
  Description of Artificial Sequence: Synthetic oligonucleotide
  Target: LAMA2; (-) strand; PAM type: NNGRRT; PAM sequence: TTGAGT
tagcatctgatgatcaaagc

SEQ ID NO: 20282 - DNA, 20 bp, Artificial Sequence
  Description of Artificial Sequence: Synthetic oligonucleotide
  Target: LAMA2; (-) strand; PAM type: NNGRRT; PAM sequence: TGGGAT
ggcattgtaagacagttgaa

SEQ ID NO: 20283 - DNA, 20 bp, Artificial Sequence
  Description of Artificial Sequence: Synthetic oligonucleotide
  Target: LAMA2; (-) strand; PAM type: NNGRRT; PAM sequence: TTGAAT
cttgaggcattgtaagacag

SEQ ID NO: 20284 - DNA, 20 bp, Artificial Sequence
  Description of Artificial Sequence: Synthetic oligonucleotide
  Target: LAMA2; (-) strand; PAM type: NNGRRT; PAM sequence: TGGAAT
ctctgcttatcccaaagctg

SEQ ID NO: 20285 - DNA, 20 bp, Artificial Sequence
  Description of Artificial Sequence: Synthetic oligonucleotide
  Target: LAMA2; (-) strand; PAM type: NNGRRT; PAM sequence: AAGGGT
gtgatgggaagcagaatgct

SEQ ID NO: 20286 - DNA, 20 bp, Artificial Sequence
  Description of Artificial Sequence: Synthetic oligonucleotide
  Target: LAMA2; (-) strand; PAM type: NNGRRT; PAM sequence: CAGAAT
atgttgtgggtgatgggaag

SEQ ID NO: 20287 - DNA, 20 bp, Artificial Sequence
  Description of Artificial Sequence: Synthetic oligonucleotide
  Target: LAMA2; (-) strand; PAM type: NNGRRT; PAM sequence: GTGGGT
tgcatgagctgcttcatgtt

SEQ ID NO: 20288 - DNA, 20 bp, Artificial Sequence
  Description of Artificial Sequence: Synthetic oligonucleotide
  Target: LAMA2; (-) strand; PAM type: NNGRRT; PAM sequence: TAGGGT
aacactgattactgagggct

SEQ ID NO: 20289 - DNA, 20 bp, Artificial Sequence
  Description of Artificial Sequence: Synthetic oligonucleotide
  Target: LAMA2; (-) strand; PAM type: NNGRRT; PAM sequence: GGGAAT
gaaccttaaaggaggaatct

SEQ ID NO: 20290 - DNA, 20 bp, Artificial Sequence
  Description of Artificial Sequence: Synthetic oligonucleotide
  Target: LAMA2; (-) strand; PAM type: NNGRRT; PAM sequence: AGGAAT
aatggaaggaaccttaaagg

SEQ ID NO: 20291 - DNA, 20 bp, Artificial Sequence
  Description of Artificial Sequence: Synthetic oligonucleotide
  Target: LAMA2; (-) strand; PAM type: NNGRRT; PAM sequence: TAGGGT
actgtatgtattccttcaga

SEQ ID NO: 20292 - DNA, 20 bp, Artificial Sequence
  Description of Artificial Sequence: Synthetic oligonucleotide
  Target: LAMA2; (-) strand; PAM type: NNGRRT; PAM sequence: AAGGAT
aaatttctactttgaggctt

SEQ ID NO: 20293 - DNA, 20 bp, Artificial Sequence
  Description of Artificial Sequence: Synthetic oligonucleotide
  Target: LAMA2; (-) strand; PAM type: NNGRRT; PAM sequence: AGGAGT
tttttttccttgatgtttct

SEQ ID NO: 20294 - DNA, 20 bp, Artificial Sequence
  Description of Artificial Sequence: Synthetic oligonucleotide
  Target: LAMA2; (-) strand; PAM type: NNGRRT; PAM sequence: ATGAAT
tagaaaaaaacctgagcatt

SEQ ID NO: 20295 - DNA, 20 bp, Artificial Sequence
  Description of Artificial Sequence: Synthetic oligonucleotide
  Target: LAMA2; (-) strand; PAM type: NNGRRT; PAM sequence: TCGAAT
tcgtcctgctggggagccac

SEQ ID NO: 20296 - DNA, 20 bp, Artificial Sequence
  Description of Artificial Sequence: Synthetic oligonucleotide
  Target: LAMA2; (-) strand; PAM type: NNGRRT; PAM sequence: GTGAGT
actgatgctgatctgctgag

SEQ ID NO: 20297 - DNA, 20 bp, Artificial Sequence
  Description of Artificial Sequence: Synthetic oligonucleotide
  Target: LAMA2; (-) strand; PAM type: NNGRRT; PAM sequence: CAGAAT
tcacgatcagtcagttaaag

SEQ ID NO: 20298 - DNA, 20 bp, Artificial Sequence
  Description of Artificial Sequence: Synthetic oligonucleotide
  Target: LAMA2; (-) strand; PAM type: NNGRRT; PAM sequence: AAGAAT
ttgattttgtctttctttaa

SEQ ID NO: 20299 - DNA, 20 bp, Artificial Sequence
  Description of Artificial Sequence: Synthetic oligonucleotide
  Target: LAMA2; (-) strand; PAM type: NNGRRT; PAM sequence: AAGGAT
gctatacaaagttgcatatt

SEQ ID NO: 20300 - DNA, 20 bp, Artificial Sequence
  Description of Artificial Sequence: Synthetic oligonucleotide
  Target: LAMA2; (-) strand; PAM type: NNGRRT; PAM sequence: CTGAGT
tagaaggaaaagtaaatctc

SEQ ID NO: 20301 - DNA, 20 bp, Artificial Sequence
  Description of Artificial Sequence: Synthetic oligonucleotide
  Target: LAMA2; (-) strand; PAM type: NNGRRT; PAM sequence: TAGGGT
tgcttccaatctggcacttt

SEQ ID NO: 20302 - DNA, 20 bp, Artificial Sequence
  Description of Artificial Sequence: Synthetic oligonucleotide
  Target: LAMA2; (-) strand; PAM type: NNGRRT; PAM sequence: CAGGAT
taaaataaaattctaaaccc

SEQ ID NO: 20303 - DNA, 20 bp, Artificial Sequence
  Description of Artificial Sequence: Synthetic oligonucleotide
  Target: LAMA2; (-) strand; PAM type: NNGRRT; PAM sequence: AGGGAT
taaacaacattaatttagga

SEQ ID NO: 20304 - DNA, 20 bp, Artificial Sequence
  Description of Artificial Sequence: Synthetic oligonucleotide
  Target: LAMA2; (-) strand; PAM type: NNGRRT; PAM sequence: CTGAGT
acaccaccagttcccattca

SEQ ID NO: 20305 - DNA, 20 bp, Artificial Sequence
  Description of Artificial Sequence: Synthetic oligonucleotide
  Target: LAMA2; (-) strand; PAM type: NNGRRT; PAM sequence: CAGAGT
acattttttgtaatagcatt

SEQ ID NO: 20306 - DNA, 20 bp, Artificial Sequence
  Description of Artificial Sequence: Synthetic oligonucleotide
  Target: LAMA2; (-) strand; PAM type: NNGRRT; PAM sequence: TTGAAT
cgatttttattttacagcta

SEQ ID NO: 20307 - DNA, 20 bp, Artificial Sequence
  Description of Artificial Sequence: Synthetic oligonucleotide
  Target: LAMA2; (-) strand; PAM type: NNGRRT; PAM sequence: TAGGAT
ccagagtttcctaaatagaa

SEQ ID NO: 20308 - DNA, 20 bp, Artificial Sequence
  Description of Artificial Sequence: Synthetic oligonucleotide
  Target: LAMA2; (-) strand; PAM type: NNGRRT; PAM sequence: TAGAAT
gaataccagagtttcctaaa

SEQ ID NO: 20309 - DNA, 20 bp, Artificial Sequence
  Description of Artificial Sequence: Synthetic oligonucleotide
  Target: LAMA2; (-) strand; PAM type: NNGRRT; PAM sequence: CAGAGT
ttttgttcttttgggaatac

SEQ ID NO: 20310 - DNA, 20 bp, Artificial Sequence
  Description of Artificial Sequence: Synthetic oligonucleotide
  Target: LAMA2; (-) strand; PAM type: NNGRRT; PAM sequence: GGGAAT
atgtgctgttttgttctttt

SEQ ID NO: 20311 - DNA, 20 bp, Artificial Sequence
  Description of Artificial Sequence: Synthetic oligonucleotide
  Target: LAMA2; (-) strand; PAM type: NNGRRT; PAM sequence: AAGAAT
aaaggatggaaaatctggta

SEQ ID NO: 20312 - DNA, 20 bp, Artificial Sequence
  Description of Artificial Sequence: Synthetic oligonucleotide
  Target: LAMA2; (-) strand; PAM type: NNGRRT; PAM sequence: AAGGAT
atgcatatgaccaaagaaga

SEQ ID NO: 20313 - DNA, 20 bp, Artificial Sequence
  Description of Artificial Sequence: Synthetic oligonucleotide
  Target: LAMA2; (-) strand; PAM type: NNGRRT; PAM sequence: CCGAAT
aattctttgttctgattcta

SEQ ID NO: 20314 - DNA, 20 bp, Artificial Sequence
  Description of Artificial Sequence: Synthetic oligonucleotide
  Target: LAMA2; (-) strand; PAM type: NNGRRT; PAM sequence: TGGGAT
cgggaaccaacaactactaa

SEQ ID NO: 20315 - DNA, 20 bp, Artificial Sequence
  Description of Artificial Sequence: Synthetic oligonucleotide
  Target: LAMA2; (-) strand; PAM type: NNGRRT; PAM sequence: CAGGAT
tataagaaaaatatttcagc

SEQ ID NO: 20316 - DNA, 20 bp, Artificial Sequence
  Description of Artificial Sequence: Synthetic oligonucleotide
  Target: LAMA2; (-) strand; PAM type: NNGRRT; PAM sequence: GTGGGT
ggaatatgaagagcttcact

SEQ ID NO: 20317 - DNA, 20 bp, Artificial Sequence
  Description of Artificial Sequence: Synthetic oligonucleotide
  Target: LAMA2; (-) strand; PAM type: NNGRRT; PAM sequence: GGGAAT
gatgtgaaaatgatcggtag

SEQ ID NO: 20318 - DNA, 20 bp, Artificial Sequence
  Description of Artificial Sequence: Synthetic oligonucleotide
  Target: LAMA2; (-) strand; PAM type: NNGRRT; PAM sequence: CTGAAT
tgttaatgttattttgttca

SEQ ID NO: 20319 - DNA, 20 bp, Artificial Sequence
  Description of Artificial Sequence: Synthetic oligonucleotide
  Target: LAMA2; (-) strand; PAM type: NNGRRT; PAM sequence: TTGAAT
tatttagaaaagtggcttta

SEQ ID NO: 20320 - DNA, 20 bp, Artificial Sequence
  Description of Artificial Sequence: Synthetic oligonucleotide
  Target: LAMA2; (-) strand; PAM type: NNGRRT; PAM sequence: AAGAAT
tcgaacagcaattactggta

SEQ ID NO: 20321 - DNA, 20 bp, Artificial Sequence
  Description of Artificial Sequence: Synthetic oligonucleotide
  Target: LAMA2; (-) strand; PAM type: NNGRRT; PAM sequence: ATGGAT
tgtaccatagactcctggtc

SEQ ID NO: 20322 - DNA, 20 bp, Artificial Sequence
  Description of Artificial Sequence: Synthetic oligonucleotide
  Target: LAMA2; (-) strand; PAM type: NNGRRT; PAM sequence: AAGGAT
taacactaaaaaagcagagg

SEQ ID NO: 20323 - DNA, 20 bp, Artificial Sequence
  Description of Artificial Sequence: Synthetic oligonucleotide
  Target: LAMA2; (-) strand; PAM type: NNGRRT; PAM sequence: AAGAAT
tgggattaggctcctaaaaa

SEQ ID NO: 20324 - DNA, 20 bp, Artificial Sequence
  Description of Artificial Sequence: Synthetic oligonucleotide
  Target: LAMA2; (-) strand; PAM type: NNGRRT; PAM sequence: TGGGAT
tgtgagccacttttattatt

SEQ ID NO: 20325 - DNA, 20 bp, Artificial Sequence
  Description of Artificial Sequence: Synthetic oligonucleotide
  Target: LAMA2; (-) strand; PAM type: NNGRRT; PAM sequence: TTGAGT
tgctaaattggctagtattc

SEQ ID NO: 20326 - DNA, 20 bp, Artificial Sequence
  Description of Artificial Sequence: Synthetic oligonucleotide
  Target: LAMA2; (-) strand; PAM type: NNGRRT; PAM sequence: CAGGAT
aaaatgtgaaaaatgtttca

SEQ ID NO: 20327 - DNA, 20 bp, Artificial Sequence
  Description of Artificial Sequence: Synthetic oligonucleotide
  Target: LAMA2; (-) strand; PAM type: NNGRRT; PAM sequence: GGGAAT
caactcctagctgagactgt

SEQ ID NO: 20328 - DNA, 20 bp, Artificial Sequence
  Description of Artificial Sequence: Synthetic oligonucleotide
  Target: LAMA2; (-) strand; PAM type: NNGRRT; PAM sequence: GTGGGT
aatgcacctaggatagccct

SEQ ID NO: 20329 - DNA, 20 bp, Artificial Sequence
  Description of Artificial Sequence: Synthetic oligonucleotide
  Target: LAMA2; (-) strand; PAM type: NNGRRT; PAM sequence: TAGGAT
ttttgaaaatgaaatgcacc

SEQ ID NO: 20330 - DNA, 20 bp, Artificial Sequence
  Description of Artificial Sequence: Synthetic oligonucleotide
  Target: LAMA2; (-) strand; PAM type: NNGRRT; PAM sequence: CAGGAT
tgtagcctgcagcaaaccag

SEQ ID NO: 20331 - DNA, 20 bp, Artificial Sequence
  Description of Artificial Sequence: Synthetic oligonucleotide
  Target: LAMA2; (-) strand; PAM type: NNGRRT; PAM sequence: CTGAAT
ctgaaattcccaaactgttt

SEQ ID NO: 20332 - DNA, 20 bp, Artificial Sequence
  Description of Artificial Sequence: Synthetic oligonucleotide
  Target: LAMA2; (-) strand; PAM type: NNGRRT; PAM sequence: GAGAAT
cagaactttacagatgcaaa

SEQ ID NO: 20333 - DNA, 20 bp, Artificial Sequence
  Description of Artificial Sequence: Synthetic oligonucleotide
  Target: LAMA2; (-) strand; PAM type: NNGRRT; PAM sequence: GAGAAT
aatttaataatattcagaga

SEQ ID NO: 20334 - DNA, 20 bp, Artificial Sequence
  Description of Artificial Sequence: Synthetic oligonucleotide
  Target: LAMA2; (-) strand; PAM type: NNGRRT; PAM sequence: AAGAGT
aagcaagaacaacaaaacaa

SEQ ID NO: 20335 - DNA, 20 bp, Artificial Sequence
  Description of Artificial Sequence: Synthetic oligonucleotide
  Target: LAMA2; (-) strand; PAM type: NNGRRT; PAM sequence: TAGAAT
ttaatttgagatccgtgaag

SEQ ID NO: 20336 - DNA, 20 bp, Artificial Sequence
  Description of Artificial Sequence: Synthetic oligonucleotide
  Target: LAMA2; (-) strand; PAM type: NNGRRT; PAM sequence: TAGAGT
acctaaaaaaaacaatttct

SEQ ID NO: 20337 - DNA, 20 bp, Artificial Sequence
  Description of Artificial Sequence: Synthetic oligonucleotide
  Target: LAMA2; (-) strand; PAM type: NNGRRT; PAM sequence: CAGAAT
aattattttgtaaagcaaga

SEQ ID NO: 20338 - DNA, 20 bp, Artificial Sequence
  Description of Artificial Sequence: Synthetic oligonucleotide
  Target: LAMA2; (-) strand; PAM type: NNGRRT; PAM sequence: GCGAGT
agagtggaacatatttgtta

SEQ ID NO: 20339 - DNA, 20 bp, Artificial Sequence
  Description of Artificial Sequence: Synthetic oligonucleotide
  Target: LAMA2; (-) strand; PAM type: NNGRRT; PAM sequence: GAGAGT
acaaaatatgctgctcaaag

SEQ ID NO: 20340 - DNA, 20 bp, Artificial Sequence
  Description of Artificial Sequence: Synthetic oligonucleotide
  Target: LAMA2; (-) strand; PAM type: NNGRRT; PAM sequence: CTGAAT
gaggggtttgaactccactt

SEQ ID NO: 20341 - DNA, 20 bp, Artificial Sequence
  Description of Artificial Sequence: Synthetic oligonucleotide
  Target: LAMA2; (-) strand; PAM type: NNGRRT; PAM sequence: AGGGGT
ggaagttatggatggcgagg

SEQ ID NO: 20342 - DNA, 20 bp, Artificial Sequence
  Description of Artificial Sequence: Synthetic oligonucleotide
  Target: LAMA2; (-) strand; PAM type: NNGRRT; PAM sequence: ATGGAT
gatttaaataggaggaagtt

SEQ ID NO: 20343 - DNA, 20 bp, Artificial Sequence
  Description of Artificial Sequence: Synthetic oligonucleotide
  Target: LAMA2; (-) strand; PAM type: NNGRRT; PAM sequence: TGGAAT
tcttgatgggatctgattta

SEQ ID NO: 20344 - DNA, 20 bp, Artificial Sequence
  Description of Artificial Sequence: Synthetic oligonucleotide
  Target: LAMA2; (-) strand; PAM type: NNGRRT; PAM sequence: TGGGAT
cattgccaagttagtcttga

SEQ ID NO: 20345 - DNA, 20 bp, Artificial Sequence
  Description of Artificial Sequence: Synthetic oligonucleotide
  Target: LAMA2; (-) strand; PAM type: NNGRRT; PAM sequence: TAGAAT
gtccgttcagtcaggggtct

SEQ ID NO: 20346 - DNA, 20 bp, Artificial Sequence
  Description of Artificial Sequence: Synthetic oligonucleotide
  Target: LAMA2; (-) strand; PAM type: NNGRRT; PAM sequence: AGGGGT
agaagggggtccgttcagtc

SEQ ID NO: 20347 - DNA, 20 bp, Artificial Sequence
  Description of Artificial Sequence: Synthetic oligonucleotide
  Target: LAMA2; (-) strand; PAM type: NNGRRT; PAM sequence: GGGGGT
gggattcccttggccaagaa

SEQ ID NO: 20348 - DNA, 20 bp, Artificial Sequence
  Description of Artificial Sequence: Synthetic oligonucleotide
  Target: LAMA2; (-) strand; PAM type: NNGRRT; PAM sequence: TGGGAT
caggtttctttaggtttctt

SEQ ID NO: 20349 - DNA, 20 bp, Artificial Sequence
  Description of Artificial Sequence: Synthetic oligonucleotide
  Target: LAMA2; (-) strand; PAM type: NNGRRT; PAM sequence: AGGAAT
aaagggagcagggtataatg

SEQ ID NO: 20350 - DNA, 20 bp, Artificial Sequence
  Description of Artificial Sequence: Synthetic oligonucleotide
  Target: LAMA2; (-) strand; PAM type: NNGRRT; PAM sequence: CAGGGT
tgtctaaactccaaagggag

SEQ ID NO: 20351 - DNA, 20 bp, Artificial Sequence
  Description of Artificial Sequence: Synthetic oligonucleotide
  Target: LAMA2; (-) strand; PAM type: NNGRRT; PAM sequence: TAGAAT
atgctataccagagtgaggt

SEQ ID NO: 20352 - DNA, 20 bp, Artificial Sequence
  Description of Artificial Sequence: Synthetic oligonucleotide
  Target: LAMA2; (-) strand; PAM type: NNGRRT; PAM sequence: CAGAGT
tctgttatgttatgctatac

SEQ ID NO: 20353 - DNA, 20 bp, Artificial Sequence
  Description of Artificial Sequence: Synthetic oligonucleotide
  Target: LAMA2; (-) strand; PAM type: NNGRRT; PAM sequence: CAGAAT
acagctttgcaaggtcattt

SEQ ID NO: 20354 - DNA, 20 bp, Artificial Sequence
  Description of Artificial Sequence: Synthetic oligonucleotide
  Target: LAMA2; (-) strand; PAM type: NNGRRT; PAM sequence: TAGAAT
taagggaaggagattctcta

SEQ ID NO: 20355 - DNA, 20 bp, Artificial Sequence
  Description of Artificial Sequence: Synthetic oligonucleotide
  Target: LAMA2; (-) strand; PAM type: NNGRRT; PAM sequence: GTGAAT
ggtaaagtagcaggctgatg

SEQ ID NO: 20356 - DNA, 20 bp, Artificial Sequence
  Description of Artificial Sequence: Synthetic oligonucleotide
  Target: LAMA2; (-) strand; PAM type: NNGRRT; PAM sequence: TAGGGT
tagatgaagcctcaaggtag

SEQ ID NO: 20357 - DNA, 20 bp, Artificial Sequence
  Description of Artificial Sequence: Synthetic oligonucleotide
  Target: LAMA2; (-) strand; PAM type: NNGRRT; PAM sequence: GTGGGT
agtcagcttgagttaagaga

SEQ ID NO: 20358 - DNA, 20 bp, Artificial Sequence
  Description of Artificial Sequence: Synthetic oligonucleotide
  Target: LAMA2; (-) strand; PAM type: NNGRRT; PAM sequence: GAGAGT
ttgaagtcagcttgagttaa

SEQ ID NO: 20359 - DNA, 20 bp, Artificial Sequence
  Description of Artificial Sequence: Synthetic oligonucleotide
  Target: LAMA2; (-) strand; PAM type: NNGRRT; PAM sequence: TTGAGT
cctgaacagttgaagtcagc

SEQ ID NO: 20360 - DNA, 20 bp, Artificial Sequence
  Description of Artificial Sequence: Synthetic oligonucleotide
  Target: LAMA2; (-) strand; PAM type: NNGRRT; PAM sequence: AAGAGT
tctgactggcaattggtcga

SEQ ID NO: 20361 - DNA, 20 bp, Artificial Sequence
  Description of Artificial Sequence: Synthetic oligonucleotide
  Target: LAMA2; (-) strand; PAM type: NNGRRT; PAM sequence: ATGGAT
tgggggcttccaagtcattg

SEQ ID NO: 20362 - DNA, 20 bp, Artificial Sequence
  Description of Artificial Sequence: Synthetic oligonucleotide
  Target: LAMA2; (-) strand; PAM type: NNGRRT; PAM sequence: CTGGGT
agaatatgtgccaaagatga

SEQ ID NO: 20363 - DNA, 20 bp, Artificial Sequence
  Description of Artificial Sequence: Synthetic oligonucleotide
  Target: LAMA2; (-) strand; PAM type: NNGRRT; PAM sequence: GAGAAT
acacagccttaggaggtcct

SEQ ID NO: 20364 - DNA, 20 bp, Artificial Sequence
  Description of Artificial Sequence: Synthetic oligonucleotide
  Target: LAMA2; (-) strand; PAM type: NNGRRT; PAM sequence: ATGAGT
atcatagctatgggaaataa

SEQ ID NO: 20365 - DNA, 20 bp, Artificial Sequence
  Description of Artificial Sequence: Synthetic oligonucleotide
  Target: LAMA2; (-) strand; PAM type: NNGRRT; PAM sequence: ACGGAT
aacgtcaagagaatgttatg

SEQ ID NO: 20366 - DNA, 20 bp, Artificial Sequence
  Description of Artificial Sequence: Synthetic oligonucleotide
  Target: LAMA2; (-) strand; PAM type: NNGRRT; PAM sequence: GAGAAT
ttaattaggaaaaacgtcaa

SEQ ID NO: 20367 - DNA, 20 bp, Artificial Sequence
  Description of Artificial Sequence: Synthetic oligonucleotide
  Target: LAMA2; (-) strand; PAM type: NNGRRT; PAM sequence: GTGAAT
aacactgtagacagatgcat

SEQ ID NO: 20368 - DNA, 20 bp, Artificial Sequence
  Description of Artificial Sequence: Synthetic oligonucleotide
  Target: LAMA2; (-) strand; PAM type: NNGRRT; PAM sequence: ACGAAT
atctagtattcattcagttg

SEQ ID NO: 20369 - DNA, 20 bp, Artificial Sequence
  Description of Artificial Sequence: Synthetic oligonucleotide
  Target: LAMA2; (-) strand; PAM type: NNGRRT; PAM sequence: AAGAGT
taagctattttatttttctc

SEQ ID NO: 20370 - DNA, 20 bp, Artificial Sequence
  Description of Artificial Sequence: Synthetic oligonucleotide
  Target: LAMA2; (-) strand; PAM type: NNGRRT; PAM sequence: CAGAAT
taggtgacatgcgttttgtg

SEQ ID NO: 20371 - DNA, 20 bp, Artificial Sequence
  Description of Artificial Sequence: Synthetic oligonucleotide
  Target: LAMA2; (-) strand; PAM type: NNGRRT; PAM sequence: TTGGGT
ttggtttattagctgatgac

SEQ ID NO: 20372 - DNA, 20 bp, Artificial Sequence
  Description of Artificial Sequence: Synthetic oligonucleotide
  Target: LAMA2; (-) strand; PAM type: NNGRRT; PAM sequence: TTGGAT
tggctctatttcttcctaat

SEQ ID NO: 20373 - DNA, 20 bp, Artificial Sequence
  Description of Artificial Sequence: Synthetic oligonucleotide
  Target: LAMA2; (-) strand; PAM type: NNGRRT; PAM sequence: CTGGAT
ggaatgggctatagacacat

SEQ ID NO: 20374 - DNA, 20 bp, Artificial Sequence
  Description of Artificial Sequence: Synthetic oligonucleotide
  Target: LAMA2; (-) strand; PAM type: NNGRRT; PAM sequence: TGGAAT
tgattgaaaaaatgcttaac

SEQ ID NO: 20375 - DNA, 20 bp, Artificial Sequence
  Description of Artificial Sequence: Synthetic oligonucleotide
  Target: LAMA2; (-) strand; PAM type: NNGRRT; PAM sequence: TTGAAT
tctttgtcgttccctttctt

SEQ ID NO: 20376 - DNA, 20 bp, Artificial Sequence
  Description of Artificial Sequence: Synthetic oligonucleotide
  Target: LAMA2; (-) strand; PAM type: NNGRRT; PAM sequence: TTGGAT
gaaaccatttaaaaaacttg

SEQ ID NO: 20377 - DNA, 20 bp, Artificial Sequence
  Description of Artificial Sequence: Synthetic oligonucleotide
  Target: LAMA2; (-) strand; PAM type: NNGRRT; PAM sequence: AAGGAT
tttaagttgcattttcctag

SEQ ID NO: 20378 - DNA, 20 bp, Artificial Sequence
  Description of Artificial Sequence: Synthetic oligonucleotide
  Target: LAMA2; (-) strand; PAM type: NNGRRT; PAM sequence: TTGAGT
acattatagattttttttct

SEQ ID NO: 20379 - DNA, 20 bp, Artificial Sequence
  Description of Artificial Sequence: Synthetic oligonucleotide
  Target: LAMA2; (-) strand; PAM type: NNGRRT; PAM sequence: TGGAGT
tacttgcaaatcaataggct

SEQ ID NO: 20380 - DNA, 20 bp, Artificial Sequence
  Description of Artificial Sequence: Synthetic oligonucleotide
  Target: LAMA2; (-) strand; PAM type: NNGRRT; PAM sequence: TTGAAT
ttttgcatttttaaaaattt

SEQ ID NO: 20381 - DNA, 20 bp, Artificial Sequence
  Description of Artificial Sequence: Synthetic oligonucleotide
  Target: LAMA2; (-) strand; PAM type: NNGRRT; PAM sequence: AGGAGT
aagccacataaaattatgtg

SEQ ID NO: 20382 - DNA, 20 bp, Artificial Sequence
  Description of Artificial Sequence: Synthetic oligonucleotide
  Target: LAMA2; (-) strand; PAM type: NNGRRT; PAM sequence: AGGGGT
gttcatgagtgactttgggt

SEQ ID NO: 20383 - DNA, 20 bp, Artificial Sequence
  Description of Artificial Sequence: Synthetic oligonucleotide
  Target: LAMA2; (-) strand; PAM type: NNGRRT; PAM sequence: TTGGGT
atctacgttcatgagtgact

SEQ ID NO: 20384 - DNA, 20 bp, Artificial Sequence
  Description of Artificial Sequence: Synthetic oligonucleotide
  Target: LAMA2; (-) strand; PAM type: NNGRRT; PAM sequence: ATGAGT
ggatattttcatctacgttc

SEQ ID NO: 20385 - DNA, 20 bp, Artificial Sequence
  Description of Artificial Sequence: Synthetic oligonucleotide
  Target: LAMA2; (-) strand; PAM type: NNGRRT; PAM sequence: TAGGAT
tgggttgttaatattttatt

SEQ ID NO: 20386 - DNA, 20 bp, Artificial Sequence
  Description of Artificial Sequence: Synthetic oligonucleotide
  Target: LAMA2; (-) strand; PAM type: NNGRRT; PAM sequence: TTGGGT
atttttataaactgatggat

SEQ ID NO: 20387 - DNA, 20 bp, Artificial Sequence
  Description of Artificial Sequence: Synthetic oligonucleotide
  Target: LAMA2; (-) strand; PAM type: NNGRRT; PAM sequence: ATGGAT
ctgactatttttataaactg

SEQ ID NO: 20388 - DNA, 20 bp, Artificial Sequence
  Description of Artificial Sequence: Synthetic oligonucleotide
  Target: LAMA2; (-) strand; PAM type: NNGRRT; PAM sequence: ACGGAT
attttaaagtaacctcaaac

SEQ ID NO: 20389 - DNA, 20 bp, Artificial Sequence
  Description of Artificial Sequence: Synthetic oligonucleotide
  Target: LAMA2; (-) strand; PAM type: NNGRRT; PAM sequence: AAGAAT
ttcaaaatttttcagacatg

SEQ ID NO: 20390 - DNA, 20 bp, Artificial Sequence
  Description of Artificial Sequence: Synthetic oligonucleotide
  Target: LAMA2; (-) strand; PAM type: NNGRRT; PAM sequence: GAGAAT
taagtgggagtcgttatagt

SEQ ID NO: 20391 - DNA, 20 bp, Artificial Sequence
  Description of Artificial Sequence: Synthetic oligonucleotide
  Target: LAMA2; (-) strand; PAM type: NNGRRT; PAM sequence: GGGAGT
cttctagcacaatgttaagt

SEQ ID NO: 20392 - DNA, 20 bp, Artificial Sequence
  Description of Artificial Sequence: Synthetic oligonucleotide
  Target: LAMA2; (-) strand; PAM type: NNGRRT; PAM sequence: GTGAGT
gataagtatatcatctataa

SEQ ID NO: 20393 - DNA, 20 bp, Artificial Sequence
  Description of Artificial Sequence: Synthetic oligonucleotide
  Target: LAMA2; (-) strand; PAM type: NNGRRT; PAM sequence: AAGAAT
tccttattgactcactgatt

SEQ ID NO: 20394 - DNA, 20 bp, Artificial Sequence
  Description of Artificial Sequence: Synthetic oligonucleotide
  Target: LAMA2; (-) strand; PAM type: NNGRRT; PAM sequence: TGGGAT
accttggcctcccaaagtgc

SEQ ID NO: 20395 - DNA, 20 bp, Artificial Sequence
  Description of Artificial Sequence: Synthetic oligonucleotide
  Target: LAMA2; (-) strand; PAM type: NNGRRT; PAM sequence: CAGGGT
cagggttttgccatgttggc

SEQ ID NO: 20396 - DNA, 20 bp, Artificial Sequence
  Description of Artificial Sequence: Synthetic oligonucleotide
  Target: LAMA2; (-) strand; PAM type: NNGRRT; PAM sequence: CAGGGT
ttttgtatttttagtagaga

SEQ ID NO: 20397 - DNA, 20 bp, Artificial Sequence
  Description of Artificial Sequence: Synthetic oligonucleotide
  Target: LAMA2; (-) strand; PAM type: NNGRRT; PAM sequence: TGGGAT
gcatcagcctcccgagtagc

SEQ ID NO: 20398 - DNA, 20 bp, Artificial Sequence
  Description of Artificial Sequence: Synthetic oligonucleotide
  Target: LAMA2; (-) strand; PAM type: NNGRRT; PAM sequence: CCGAGT
aattctcttgcatcagcctc

SEQ ID NO: 20399 - DNA, 20 bp, Artificial Sequence
  Description of Artificial Sequence: Synthetic oligonucleotide
  Target: LAMA2; (-) strand; PAM type: NNGRRT; PAM sequence: CTGGGT
ctcactgcagcctctgcctc

SEQ ID NO: 20400 - DNA, 20 bp, Artificial Sequence
  Description of Artificial Sequence: Synthetic oligonucleotide
  Target: LAMA2; (-) strand; PAM type: NNGRRT; PAM sequence: TGGAGT
tctcgctctatgccccaggc

SEQ ID NO: 20401 - DNA, 20 bp, Artificial Sequence
  Description of Artificial Sequence: Synthetic oligonucleotide
  Target: LAMA2; (-) strand; PAM type: NNGRRT; PAM sequence: GAGGGT
tgtatatatatatttttgga

SEQ ID NO: 20402 - DNA, 20 bp, Artificial Sequence
  Description of Artificial Sequence: Synthetic oligonucleotide
  Target: LAMA2; (-) strand; PAM type: NNGRRT; PAM sequence: TAGAAT
aaagccccacttctttcctt

SEQ ID NO: 20403 - DNA, 20 bp, Artificial Sequence
  Description of Artificial Sequence: Synthetic oligonucleotide
  Target: LAMA2; (-) strand; PAM type: NNGRRT; PAM sequence: TAGGGT
gtaccagaccatttactgta

SEQ ID NO: 20404 - DNA, 20 bp, Artificial Sequence
  Description of Artificial Sequence: Synthetic oligonucleotide
  Target: LAMA2; (-) strand; PAM type: NNGRRT; PAM sequence: AAGGAT
ttttatgtataatgtggagt

SEQ ID NO: 20405 - DNA, 20 bp, Artificial Sequence
  Description of Artificial Sequence: Synthetic oligonucleotide
  Target: LAMA2; (-) strand; PAM type: NNGRRT; PAM sequence: TGGAGT
gtttatttttatgtataatg

SEQ ID NO: 20406 - DNA, 20 bp, Artificial Sequence
  Description of Artificial Sequence: Synthetic oligonucleotide
  Target: LAMA2; (-) strand; PAM type: NNGRRT; PAM sequence: GGGAGT
aatttatgatttgtttcaag

SEQ ID NO: 20407 - DNA, 20 bp, Artificial Sequence
  Description of Artificial Sequence: Synthetic oligonucleotide
  Target: LAMA2; (-) strand; PAM type: NNGRRT; PAM sequence: AAGAGT
cagttttatgctatctgtgg

SEQ ID NO: 20408 - DNA, 20 bp, Artificial Sequence
  Description of Artificial Sequence: Synthetic oligonucleotide
  Target: LAMA2; (-) strand; PAM type: NNGRRT; PAM sequence: AGGAAT
tagcagccctgtatcagctc

SEQ ID NO: 20409 - DNA, 20 bp, Artificial Sequence
  Description of Artificial Sequence: Synthetic oligonucleotide
  Target: LAMA2; (-) strand; PAM type: NNGRRT; PAM sequence: TTGGGT
tcttatgaagacattccact

SEQ ID NO: 20410 - DNA, 20 bp, Artificial Sequence
  Description of Artificial Sequence: Synthetic oligonucleotide
  Target: LAMA2; (-) strand; PAM type: NNGRRT; PAM sequence: TAGAGT
aagatttgttggggtgaacc

SEQ ID NO: 20411 - DNA, 20 bp, Artificial Sequence
  Description of Artificial Sequence: Synthetic oligonucleotide
  Target: LAMA2; (-) strand; PAM type: NNGRRT; PAM sequence: TGGGGT
aggctgttttcaagatttgt

SEQ ID NO: 20412 - DNA, 20 bp, Artificial Sequence
  Description of Artificial Sequence: Synthetic oligonucleotide
  Target: LAMA2; (-) strand; PAM type: NNGRRT; PAM sequence: TGGAAT
tggcatgcagttaatttatt

SEQ ID NO: 20413 - DNA, 20 bp, Artificial Sequence
  Description of Artificial Sequence: Synthetic oligonucleotide
  Target: LAMA2; (-) strand; PAM type: NNGRRT; PAM sequence: CTGGAT
gaattttacattgttgagtg

SEQ ID NO: 20414 - DNA, 20 bp, Artificial Sequence
  Description of Artificial Sequence: Synthetic oligonucleotide
  Target: LAMA2; (-) strand; PAM type: NNGRRT; PAM sequence: TTGAGT
acatcatgaattttacattg

SEQ ID NO: 20415 - DNA, 20 bp, Artificial Sequence
  Description of Artificial Sequence: Synthetic oligonucleotide
  Target: LAMA2; (-) strand; PAM type: NNGRRT; PAM sequence: ATGAAT
ttgatttgatgccaaacatc

SEQ ID NO: 20416 - DNA, 20 bp, Artificial Sequence
  Description of Artificial Sequence: Synthetic oligonucleotide
  Target: LAMA2; (-) strand; PAM type: NNGRRT; PAM sequence: TGGGGT
gacatgattttcttgccatt

SEQ ID NO: 20417 - DNA, 20 bp, Artificial Sequence
  Description of Artificial Sequence: Synthetic oligonucleotide
  Target: LAMA2; (-) strand; PAM type: NNGRRT; PAM sequence: TGGGAT
gccttggcctcccaaagtgc

SEQ ID NO: 20418 - DNA, 20 bp, Artificial Sequence
  Description of Artificial Sequence: Synthetic oligonucleotide
  Target: LAMA2; (-) strand; PAM type: NNGRRT; PAM sequence: TGGGGT
ttttgtatttttagtagaga

SEQ ID NO: 20419 - DNA, 20 bp, Artificial Sequence
  Description of Artificial Sequence: Synthetic oligonucleotide
  Target: LAMA2; (-) strand; PAM type: NNGRRT; PAM sequence: TGGAGT
tctcgctctgttgcttaggc

SEQ ID NO: 20420 - DNA, 20 bp, Artificial Sequence
  Description of Artificial Sequence: Synthetic oligonucleotide
  Target: LAMA2; (-) strand; PAM type: NNGRRT; PAM sequence: TAGGGT
aacatttggaccatagcata

SEQ ID NO: 20421 - DNA, 20 bp, Artificial Sequence
  Description of Artificial Sequence: Synthetic oligonucleotide
  Target: LAMA2; (-) strand; PAM type: NNGRRT; PAM sequence: AAGGAT
gcatcctcaacctcttttgt

SEQ ID NO: 20422 - DNA, 20 bp, Artificial Sequence
  Description of Artificial Sequence: Synthetic oligonucleotide
  Target: LAMA2; (-) strand; PAM type: NNGRRT; PAM sequence: AAGAAT
gaagacatttttgcctggta

SEQ ID NO: 20423 - DNA, 20 bp, Artificial Sequence
  Description of Artificial Sequence: Synthetic oligonucleotide
  Target: LAMA2; (-) strand; PAM type: NNGRRT; PAM sequence: AGGAGT
tacacttaatttctatttgt

SEQ ID NO: 20424 - DNA, 20 bp, Artificial Sequence
  Description of Artificial Sequence: Synthetic oligonucleotide
  Target: LAMA2; (-) strand; PAM type: NNGRRT; PAM sequence: GAGAGT
acaacgtgaagttttacatt

SEQ ID NO: 20425 - DNA, 20 bp, Artificial Sequence
  Description of Artificial Sequence: Synthetic oligonucleotide
  Target: LAMA2; (-) strand; PAM type: NNGRRT; PAM sequence: ATGAGT
cactgagccgcacatagaac

SEQ ID NO: 20426 - DNA, 20 bp, Artificial Sequence
  Description of Artificial Sequence: Synthetic oligonucleotide
  Target: LAMA2; (-) strand; PAM type: NNGRRT; PAM sequence: CTGGAT
gtgtcagaaccaacaatcca

SEQ ID NO: 20427 - DNA, 20 bp, Artificial Sequence
  Description of Artificial Sequence: Synthetic oligonucleotide
  Target: LAMA2; (-) strand; PAM type: NNGRRT; PAM sequence: GGGGGT
gtggcaggggccagcatgtt

SEQ ID NO: 20428 - DNA, 20 bp, Artificial Sequence
  Description of Artificial Sequence: Synthetic oligonucleotide
  Target: LAMA2; (-) strand; PAM type: NNGRRT; PAM sequence: GTGGGT
gcctcactcaaccacaaggg

SEQ ID NO: 20429 - DNA, 20 bp, Artificial Sequence
  Description of Artificial Sequence: Synthetic oligonucleotide
  Target: LAMA2; (-) strand; PAM type: NNGRRT; PAM sequence: AGGGGT
tactgcctcactcaaccaca

SEQ ID NO: 20430 - DNA, 20 bp, Artificial Sequence
  Description of Artificial Sequence: Synthetic oligonucleotide
  Target: LAMA2; (-) strand; PAM type: NNGRRT; PAM sequence: TAGAAT
agtaaacaaaatgccaggtt

SEQ ID NO: 20431 - DNA, 20 bp, Artificial Sequence
  Description of Artificial Sequence: Synthetic oligonucleotide
  Target: LAMA2; (-) strand; PAM type: NNGRRT; PAM sequence: AGGAAT
ggttctttatgaacactaca

SEQ ID NO: 20432 - DNA, 20 bp, Artificial Sequence
  Description of Artificial Sequence: Synthetic oligonucleotide
  Target: LAMA2; (-) strand; PAM type: NNGRRT; PAM sequence: CAGGAT
atgtgagatcaagctgtcag

SEQ ID NO: 20433 - DNA, 20 bp, Artificial Sequence
  Description of Artificial Sequence: Synthetic oligonucleotide
  Target: LAMA2; (-) strand; PAM type: NNGRRT; PAM sequence: ATGAGT
gaatcaggtcatccgcttat

SEQ ID NO: 20434 - DNA, 20 bp, Artificial Sequence
  Description of Artificial Sequence: Synthetic oligonucleotide
  Target: LAMA2; (-) strand; PAM type: NNGRRT; PAM sequence: GAGAAT
aaaggtaaccacaaaaatga

SEQ ID NO: 20435 - DNA, 20 bp, Artificial Sequence
  Description of Artificial Sequence: Synthetic oligonucleotide
  Target: LAMA2; (-) strand; PAM type: NNGRRT; PAM sequence: TTGAAT
ataaagcagagatccagcat

SEQ ID NO: 20436 - DNA, 20 bp, Artificial Sequence
  Description of Artificial Sequence: Synthetic oligonucleotide
  Target: LAMA2; (-) strand; PAM type: NNGRRT; PAM sequence: AGGGAT
aatctggctcaactagatta

SEQ ID NO: 20437 - DNA, 20 bp, Artificial Sequence
  Description of Artificial Sequence: Synthetic oligonucleotide
  Target: LAMA2; (-) strand; PAM type: NNGRRT; PAM sequence: GAGAAT
agcctcattttgcagataat

SEQ ID NO: 20438 - DNA, 20 bp, Artificial Sequence
  Description of Artificial Sequence: Synthetic oligonucleotide
  Target: LAMA2; (-) strand; PAM type: NNGRRT; PAM sequence: AGGGGT
gagagctttgtacaattctg

SEQ ID NO: 20439 - DNA, 20 bp, Artificial Sequence
  Description of Artificial Sequence: Synthetic oligonucleotide
  Target: LAMA2; (-) strand; PAM type: NNGRRT; PAM sequence: GCGGGT
aataaagtctaaaacactct

SEQ ID NO: 20440 - DNA, 20 bp, Artificial Sequence
  Description of Artificial Sequence: Synthetic oligonucleotide
  Target: LAMA2; (-) strand; PAM type: NNGRRT; PAM sequence: CAGAAT
aacttgccacattgtagcca

SEQ ID NO: 20441 - DNA, 20 bp, Artificial Sequence
  Description of Artificial Sequence: Synthetic oligonucleotide
  Target: LAMA2; (-) strand; PAM type: NNGRRT; PAM sequence: AAGGAT
attgcgttagcgcccacctt

SEQ ID NO: 20442 - DNA, 20 bp, Artificial Sequence
  Description of Artificial Sequence: Synthetic oligonucleotide
  Target: LAMA2; (-) strand; PAM type: NNGRRT; PAM sequence: AAGGAT
tccttttttttttttttcat

SEQ ID NO: 20443 - DNA, 20 bp, Artificial Sequence
  Description of Artificial Sequence: Synthetic oligonucleotide
  Target: LAMA2; (-) strand; PAM type: NNGRRT; PAM sequence: GTGAAT
caggcctctctcctttgctt

SEQ ID NO: 20444 - DNA, 20 bp, Artificial Sequence
  Description of Artificial Sequence: Synthetic oligonucleotide
  Target: LAMA2; (-) strand; PAM type: NNGRRT; PAM sequence: AGGAAT
agttccctttgagggctaag

SEQ ID NO: 20445 - DNA, 20 bp, Artificial Sequence
  Description of Artificial Sequence: Synthetic oligonucleotide
  Target: LAMA2; (-) strand; PAM type: NNGRRT; PAM sequence: CAGGGT
gtctgaaatcaaggtatcgg

SEQ ID NO: 20446 - DNA, 20 bp, Artificial Sequence
  Description of Artificial Sequence: Synthetic oligonucleotide
  Target: LAMA2; (-) strand; PAM type: NNGRRT; PAM sequence: CTGGGT
ccataataaaataccataga

SEQ ID NO: 20447 - DNA, 20 bp, Artificial Sequence
  Description of Artificial Sequence: Synthetic oligonucleotide
  Target: LAMA2; (-) strand; PAM type: NNGRRT; PAM sequence: AAGAAT
ttgttttatatatatataac

SEQ ID NO: 20448 - DNA, 20 bp, Artificial Sequence
  Description of Artificial Sequence: Synthetic oligonucleotide
  Target: LAMA2; (-) strand; PAM type: NNGRRT; PAM sequence: GAGAGT
taacttctttatacattaga

SEQ ID NO: 20449 - DNA, 20 bp, Artificial Sequence
  Description of Artificial Sequence: Synthetic oligonucleotide
  Target: LAMA2; (-) strand; PAM type: NNGRRT; PAM sequence: TTGAGT
ttagcatactatgagtcggg

SEQ ID NO: 20450 - DNA, 20 bp, Artificial Sequence
  Description of Artificial Sequence: Synthetic oligonucleotide
  Target: LAMA2; (-) strand; PAM type: NNGRRT; PAM sequence: TCGGGT
tgtagttagcatactatgag

SEQ ID NO: 20451 - DNA, 20 bp, Artificial Sequence
  Description of Artificial Sequence: Synthetic oligonucleotide
  Target: LAMA2; (-) strand; PAM type: NNGRRT; PAM sequence: ATGAGT
ctcagtgtagttagcatact

SEQ ID NO: 20452 - DNA, 20 bp, Artificial Sequence
  Description of Artificial Sequence: Synthetic oligonucleotide
  Target: LAMA2; (-) strand; PAM type: NNGRRT; PAM sequence: AGGAAT
tttgttcctgaagaagccac

SEQ ID NO: 20453 - DNA, 20 bp, Artificial Sequence
  Description of Artificial Sequence: Synthetic oligonucleotide
  Target: LAMA2; (-) strand; PAM type: NNGRRT; PAM sequence: TTGGAT
tataactttggatttttttt

SEQ ID NO: 20454 - DNA, 20 bp, Artificial Sequence
  Description of Artificial Sequence: Synthetic oligonucleotide
  Target: LAMA2; (-) strand; PAM type: NNGRRT; PAM sequence: TTGGAT
caccctgcccagctataact

SEQ ID NO: 20455 - DNA, 20 bp, Artificial Sequence
  Description of Artificial Sequence: Synthetic oligonucleotide
  Target: LAMA2; (-) strand; PAM type: NNGRRT; PAM sequence: TGGGAT
gcctcagcctcccaaagtgc

SEQ ID NO: 20456 - DNA, 20 bp, Artificial Sequence
  Description of Artificial Sequence: Synthetic oligonucleotide
  Target: LAMA2; (-) strand; PAM type: NNGRRT; PAM sequence: CAGGAT
cggggtttcaccatgttaac

SEQ ID NO: 20457 - DNA, 20 bp, Artificial Sequence
  Description of Artificial Sequence: Synthetic oligonucleotide
  Target: LAMA2; (-) strand; PAM type: NNGRRT; PAM sequence: CGGGGT
tgtattttttttagtagaga

SEQ ID NO: 20458 - DNA, 20 bp, Artificial Sequence
  Description of Artificial Sequence: Synthetic oligonucleotide
  Target: LAMA2; (-) strand; PAM type: NNGRRT; PAM sequence: CTGGAT
ctcactgcaacctctgcctc

SEQ ID NO: 20459 - DNA, 20 bp, Artificial Sequence
  Description of Artificial Sequence: Synthetic oligonucleotide
  Target: LAMA2; (-) strand; PAM type: NNGRRT; PAM sequence: TGGAGT
ccttgctctgtcacccaggc

SEQ ID NO: 20460 - DNA, 20 bp, Artificial Sequence
  Description of Artificial Sequence: Synthetic oligonucleotide
  Target: LAMA2; (-) strand; PAM type: NNGRRT; PAM sequence: TGGAAT
tttttcttttttttttgaga

SEQ ID NO: 20461 - DNA, 20 bp, Artificial Sequence
  Description of Artificial Sequence: Synthetic oligonucleotide
  Target: LAMA2; (-) strand; PAM type: NNGRRT; PAM sequence: TTGGAT
aagactgtgcatttataact

SEQ ID NO: 20462 - DNA, 20 bp, Artificial Sequence
  Description of Artificial Sequence: Synthetic oligonucleotide
  Target: LAMA2; (-) strand; PAM type: NNGRRT; PAM sequence: CAGAAT
tatatatatatatatactta

SEQ ID NO: 20463 - DNA, 20 bp, Artificial Sequence
  Description of Artificial Sequence: Synthetic oligonucleotide
  Target: LAMA2; (-) strand; PAM type: NNGRRT; PAM sequence: ATGAAT
caattacaaacatttctgga

SEQ ID NO: 20464 - DNA, 20 bp, Artificial Sequence
  Description of Artificial Sequence: Synthetic oligonucleotide
  Target: LAMA2; (-) strand; PAM type: NNGRRT; PAM sequence: TGGAAT
gtgacaattacaaacatttc

SEQ ID NO: 20465 - DNA, 20 bp, Artificial Sequence
  Description of Artificial Sequence: Synthetic oligonucleotide
  Target: LAMA2; (-) strand; PAM type: NNGRRT; PAM sequence: ACGAGT
attttatagtgtttgatggc

SEQ ID NO: 20466 - DNA, 20 bp, Artificial Sequence
  Description of Artificial Sequence: Synthetic oligonucleotide
  Target: LAMA2; (-) strand; PAM type: NNGRRT; PAM sequence: TTGGAT
taatttatttaaaatacacc

SEQ ID NO: 20467 - DNA, 20 bp, Artificial Sequence
  Description of Artificial Sequence: Synthetic oligonucleotide
  Target: LAMA2; (-) strand; PAM type: NNGRRT; PAM sequence: TGGGAT
gtctcaaccaccaaaagtgt

SEQ ID NO: 20468 - DNA, 20 bp, Artificial Sequence
  Description of Artificial Sequence: Synthetic oligonucleotide
  Target: LAMA2; (-) strand; PAM type: NNGRRT; PAM sequence: TGGGGT
tttttgtatttttagtagag

SEQ ID NO: 20469 - DNA, 20 bp, Artificial Sequence
  Description of Artificial Sequence: Synthetic oligonucleotide
  Target: LAMA2; (-) strand; PAM type: NNGRRT; PAM sequence: TAGAGT
gctaatttttgtatttttag

SEQ ID NO: 20470 - DNA, 20 bp, Artificial Sequence
  Description of Artificial Sequence: Synthetic oligonucleotide
  Target: LAMA2; (-) strand; PAM type: NNGRRT; PAM sequence: CGGAGT
ctcactgcaatctccgcctc

SEQ ID NO: 20471 - DNA, 20 bp, Artificial Sequence
  Description of Artificial Sequence: Synthetic oligonucleotide
  Target: LAMA2; (-) strand; PAM type: NNGRRT; PAM sequence: TGGAGT
tctcagtctgtcacccaggc

SEQ ID NO: 20472 - DNA, 20 bp, Artificial Sequence
  Description of Artificial Sequence: Synthetic oligonucleotide
  Target: LAMA2; (-) strand; PAM type: NNGRRT; PAM sequence: TGGAGT
cctttcttttttttttgaga

SEQ ID NO: 20473 - DNA, 20 bp, Artificial Sequence
  Description of Artificial Sequence: Synthetic oligonucleotide
  Target: LAMA2; (-) strand; PAM type: NNGRRT; PAM sequence: TTGAGT
aaatttgacaatatctgttc

SEQ ID NO: 20474 - DNA, 20 bp, Artificial Sequence
  Description of Artificial Sequence: Synthetic oligonucleotide
  Target: LAMA2; (-) strand; PAM type: NNGRRT; PAM sequence: TAGAAT
caataatttttacaacagct

SEQ ID NO: 20475 - DNA, 20 bp, Artificial Sequence
  Description of Artificial Sequence: Synthetic oligonucleotide
  Target: LAMA2; (-) strand; PAM type: NNGRRT; PAM sequence: TAGGAT
gccaaacaatttttagcaga

SEQ ID NO: 20476 - DNA, 20 bp, Artificial Sequence
  Description of Artificial Sequence: Synthetic oligonucleotide
  Target: LAMA2; (-) strand; PAM type: NNGRRT; PAM sequence: AAGAGT
ttgaagatacttgaaaagat

SEQ ID NO: 20477 - DNA, 20 bp, Artificial Sequence
  Description of Artificial Sequence: Synthetic oligonucleotide
  Target: LAMA2; (-) strand; PAM type: NNGRRT; PAM sequence: AAGAAT
caacatgccctgctgaaaat

SEQ ID NO: 20478 - DNA, 20 bp, Artificial Sequence
  Description of Artificial Sequence: Synthetic oligonucleotide
  Target: LAMA2; (-) strand; PAM type: NNGRRT; PAM sequence: AGGAAT
ggaagtgatgagaagacatc

SEQ ID NO: 20479 - DNA, 20 bp, Artificial Sequence
  Description of Artificial Sequence: Synthetic oligonucleotide
  Target: LAMA2; (-) strand; PAM type: NNGRRT; PAM sequence: TTGGAT
ctttttcagtgtgccaaatg

SEQ ID NO: 20480 - DNA, 20 bp, Artificial Sequence
  Description of Artificial Sequence: Synthetic oligonucleotide
  Target: LAMA2; (-) strand; PAM type: NNGRRT; PAM sequence: ATGGGT
ctcaggcttcagtttgagag

SEQ ID NO: 20481 - DNA, 20 bp, Artificial Sequence
  Description of Artificial Sequence: Synthetic oligonucleotide
  Target: LAMA2; (-) strand; PAM type: NNGRRT; PAM sequence: CTGAGT
atagctgtaaatatattcat

SEQ ID NO: 20482 - DNA, 20 bp, Artificial Sequence
  Description of Artificial Sequence: Synthetic oligonucleotide
  Target: LAMA2; (-) strand; PAM type: NNGRRT; PAM sequence: ACGAAT
atatggtaactatttcagat

SEQ ID NO: 20483 - DNA, 20 bp, Artificial Sequence
  Description of Artificial Sequence: Synthetic oligonucleotide
  Target: LAMA2; (-) strand; PAM type: NNGRRT; PAM sequence: AGGGGT
tcagaatgctacagccaggg

SEQ ID NO: 20484 - DNA, 20 bp, Artificial Sequence
  Description of Artificial Sequence: Synthetic oligonucleotide
  Target: LAMA2; (-) strand; PAM type: NNGRRT; PAM sequence: CAGAAT
ccttcaaaatccagttattt

SEQ ID NO: 20485 - DNA, 20 bp, Artificial Sequence
  Description of Artificial Sequence: Synthetic oligonucleotide
  Target: LAMA2; (-) strand; PAM type: NNGRRT; PAM sequence: AAGAAT
ggagttgagttattactcac

SEQ ID NO: 20486 - DNA, 20 bp, Artificial Sequence
  Description of Artificial Sequence: Synthetic oligonucleotide
  Target: LAMA2; (-) strand; PAM type: NNGRRT; PAM sequence: TTGAGT
aaattttacttaaccaggag

SEQ ID NO: 20487 - DNA, 20 bp, Artificial Sequence
  Description of Artificial Sequence: Synthetic oligonucleotide
  Target: LAMA2; (-) strand; PAM type: NNGRRT; PAM sequence: AGGAGT
ttctgaaattttacttaacc

SEQ ID NO: 20488 - DNA, 20 bp, Artificial Sequence
  Description of Artificial Sequence: Synthetic oligonucleotide
  Target: LAMA2; (-) strand; PAM type: NNGRRT; PAM sequence: TAGGAT
atataaaatgtgaaatgtaa

SEQ ID NO: 20489 - DNA, 20 bp, Artificial Sequence
  Description of Artificial Sequence: Synthetic oligonucleotide
  Target: LAMA2; (-) strand; PAM type: NNGRRT; PAM sequence: AAGAAT
aaacttctctacaaagaaaa

SEQ ID NO: 20490 - DNA, 20 bp, Artificial Sequence
  Description of Artificial Sequence: Synthetic oligonucleotide
  Target: LAMA2; (-) strand; PAM type: NNGRRT; PAM sequence: AAGAAT
caaatttcagtaactactta

SEQ ID NO: 20491 - DNA, 20 bp, Artificial Sequence
  Description of Artificial Sequence: Synthetic oligonucleotide
  Target: LAMA2; (-) strand; PAM type: NNGRRT; PAM sequence: AGGGGT
aacaggtttttttttttctc

SEQ ID NO: 20492 - DNA, 20 bp, Artificial Sequence
  Description of Artificial Sequence: Synthetic oligonucleotide
  Target: LAMA2; (-) strand; PAM type: NNGRRT; PAM sequence: AAGAAT
tcaccttctgagacattact

SEQ ID NO: 20493 - DNA, 20 bp, Artificial Sequence
  Description of Artificial Sequence: Synthetic oligonucleotide
  Target: LAMA2; (-) strand; PAM type: NNGRRT; PAM sequence: CAGAAT
ctattatataataaaccctg

SEQ ID NO: 20494 - DNA, 20 bp, Artificial Sequence
  Description of Artificial Sequence: Synthetic oligonucleotide
  Target: LAMA2; (-) strand; PAM type: NNGRRT; PAM sequence: AAGAAT
aaatgtccaccccctatttt

SEQ ID NO: 20495 - DNA, 20 bp, Artificial Sequence
  Description of Artificial Sequence: Synthetic oligonucleotide
  Target: LAMA2; (-) strand; PAM type: NNGRRT; PAM sequence: GGGAGT
ttcctgtgctaaataatgct

SEQ ID NO: 20496 - DNA, 20 bp, Artificial Sequence
  Description of Artificial Sequence: Synthetic oligonucleotide
  Target: LAMA2; (-) strand; PAM type: NNGRRT; PAM sequence: TTGAGT
tatcattttcagacaccatc

SEQ ID NO: 20497 - DNA, 20 bp, Artificial Sequence
  Description of Artificial Sequence: Synthetic oligonucleotide
  Target: LAMA2; (-) strand; PAM type: NNGRRT; PAM sequence: TGGAGT
gacctcaaattaagcccagt

SEQ ID NO: 20498 - DNA, 20 bp, Artificial Sequence
  Description of Artificial Sequence: Synthetic oligonucleotide
  Target: LAMA2; (-) strand; PAM type: NNGRRT; PAM sequence: GGGAGT
tctgtctgtttatgtgtgag

SEQ ID NO: 20499 - DNA, 20 bp, Artificial Sequence
  Description of Artificial Sequence: Synthetic oligonucleotide
  Target: LAMA2; (-) strand; PAM type: NNGRRT; PAM sequence: GTGGGT
gcttgcaaagctttttgtct

SEQ ID NO: 20500 - DNA, 20 bp, Artificial Sequence
  Description of Artificial Sequence: Synthetic oligonucleotide
  Target: LAMA2; (-) strand; PAM type: NNGRRT; PAM sequence: ATGAGT
actcttttttttcctgcagt

SEQ ID NO: 20501 - DNA, 20 bp, Artificial Sequence
  Description of Artificial Sequence: Synthetic oligonucleotide
  Target: LAMA2; (-) strand; PAM type: NNGRRT; PAM sequence: TCGGAT
ggtaaagtttcaaaagagtt

SEQ ID NO: 20502 - DNA, 20 bp, Artificial Sequence
  Description of Artificial Sequence: Synthetic oligonucleotide
  Target: LAMA2; (-) strand; PAM type: NNGRRT; PAM sequence: AAGAGT
ttttctaggtaaagtttcaa

SEQ ID NO: 20503 - DNA, 20 bp, Artificial Sequence
  Description of Artificial Sequence: Synthetic oligonucleotide
  Target: LAMA2; (-) strand; PAM type: NNGRRT; PAM sequence: ACGAGT
ttttatgggatcaagctgtc

SEQ ID NO: 20504 - DNA, 20 bp, Artificial Sequence
  Description of Artificial Sequence: Synthetic oligonucleotide
  Target: LAMA2; (-) strand; PAM type: NNGRRT; PAM sequence: TGGGAT
ctcatccttgctgagtttta

SEQ ID NO: 20505 - DNA, 20 bp, Artificial Sequence
  Description of Artificial Sequence: Synthetic oligonucleotide
  Target: LAMA2; (-) strand; PAM type: NNGRRT; PAM sequence: CTGAGT
agagtcaaacctcatccttg

SEQ ID NO: 20506 - DNA, 20 bp, Artificial Sequence
  Description of Artificial Sequence: Synthetic oligonucleotide
  Target: LAMA2; (-) strand; PAM type: NNGRRT; PAM sequence: CAGAGT
tactatataaatcagggatg

SEQ ID NO: 20507 - DNA, 20 bp, Artificial Sequence
  Description of Artificial Sequence: Synthetic oligonucleotide
  Target: LAMA2; (-) strand; PAM type: NNGRRT; PAM sequence: AGGGAT
catactgtactatataaatc

SEQ ID NO: 20508 - DNA, 20 bp, Artificial Sequence
  Description of Artificial Sequence: Synthetic oligonucleotide
  Target: LAMA2; (-) strand; PAM type: NNGRRT; PAM sequence: AGGAGT
agcaataactagatttttaa

SEQ ID NO: 20509 - DNA, 20 bp, Artificial Sequence
  Description of Artificial Sequence: Synthetic oligonucleotide
  Target: LAMA2; (-) strand; PAM type: NNGRRT; PAM sequence: TGGGAT
gcctcagcctcccaaagtgc

SEQ ID NO: 20510 - DNA, 20 bp, Artificial Sequence
  Description of Artificial Sequence: Synthetic oligonucleotide
  Target: LAMA2; (-) strand; PAM type: NNGRRT; PAM sequence: CAGGAT
tgggatttcatcgtgttagc

SEQ ID NO: 20511 - DNA, 20 bp, Artificial Sequence
  Description of Artificial Sequence: Synthetic oligonucleotide
  Target: LAMA2; (-) strand; PAM type: NNGRRT; PAM sequence: TGGGAT
ttatgtatatttagtagaga

SEQ ID NO: 20512 - DNA, 20 bp, Artificial Sequence
  Description of Artificial Sequence: Synthetic oligonucleotide
  Target: LAMA2; (-) strand; PAM type: NNGRRT; PAM sequence: TGGGAT
gcctcagcctcccgagtagc

SEQ ID NO: 20513 - DNA, 20 bp, Artificial Sequence
  Description of Artificial Sequence: Synthetic oligonucleotide
  Target: LAMA2; (-) strand; PAM type: NNGRRT; PAM sequence: CCGAGT
cattctcctgcctcagcctc

SEQ ID NO: 20514 - DNA, 20 bp, Artificial Sequence
  Description of Artificial Sequence: Synthetic oligonucleotide
  Target: LAMA2; (-) strand; PAM type: NNGRRT; PAM sequence: TGGAGT
tctcgctctgtcgcccgggc

SEQ ID NO: 20515 - DNA, 20 bp, Artificial Sequence
  Description of Artificial Sequence: Synthetic oligonucleotide
  Target: LAMA2; (-) strand; PAM type: NNGRRT; PAM sequence: TGGAGT
ttttttttttttttttgaga

SEQ ID NO: 20516 - DNA, 20 bp, Artificial Sequence
  Description of Artificial Sequence: Synthetic oligonucleotide
  Target: LAMA2; (-) strand; PAM type: NNGRRT; PAM sequence: AAGGGT
tggataagtgaatccagagt

SEQ ID NO: 20517 - DNA, 20 bp, Artificial Sequence
  Description of Artificial Sequence: Synthetic oligonucleotide
  Target: LAMA2; (-) strand; PAM type: NNGRRT; PAM sequence: CAGAGT
atcttctggataagtgaatc

SEQ ID NO: 20518 - DNA, 20 bp, Artificial Sequence
  Description of Artificial Sequence: Synthetic oligonucleotide
  Target: LAMA2; (-) strand; PAM type: NNGRRT; PAM sequence: GTGAAT
tccccagatcttctggataa

SEQ ID NO: 20519 - DNA, 20 bp, Artificial Sequence
  Description of Artificial Sequence: Synthetic oligonucleotide
  Target: LAMA2; (-) strand; PAM type: NNGRRT; PAM sequence: CTGGAT
cgtagatttccccagatctt

SEQ ID NO: 20520 - DNA, 20 bp, Artificial Sequence
  Description of Artificial Sequence: Synthetic oligonucleotide
  Target: LAMA2; (-) strand; PAM type: NNGRRT; PAM sequence: ATGGGT
agagtgccccccaaattctt

SEQ ID NO: 20521 - DNA, 20 bp, Artificial Sequence
  Description of Artificial Sequence: Synthetic oligonucleotide
  Target: LAMA2; (-) strand; PAM type: NNGRRT; PAM sequence: AAGAGT
atttaaaaaagtagtcataa

SEQ ID NO: 20522 - DNA, 20 bp, Artificial Sequence
  Description of Artificial Sequence: Synthetic oligonucleotide
  Target: LAMA2; (-) strand; PAM type: NNGRRT; PAM sequence: CTGAAT
ttggataagaaagtcaatcc

SEQ ID NO: 20523 - DNA, 20 bp, Artificial Sequence
  Description of Artificial Sequence: Synthetic oligonucleotide
  Target: LAMA2; (-) strand; PAM type: NNGRRT; PAM sequence: TTGGAT
cccttgtacaggatagacta

SEQ ID NO: 20524 - DNA, 20 bp, Artificial Sequence
  Description of Artificial Sequence: Synthetic oligonucleotide
  Target: LAMA2; (-) strand; PAM type: NNGRRT; PAM sequence: CAGGAT
tattttagggttcccttgta

SEQ ID NO: 20525 - DNA, 20 bp, Artificial Sequence
  Description of Artificial Sequence: Synthetic oligonucleotide
  Target: LAMA2; (-) strand; PAM type: NNGRRT; PAM sequence: TAGGGT
ggtggctaacgaggttattt

SEQ ID NO: 20526 - DNA, 20 bp, Artificial Sequence
  Description of Artificial Sequence: Synthetic oligonucleotide
  Target: LAMA2; (-) strand; PAM type: NNGRRT; PAM sequence: TAGAAT
gaaagagctagaaactcttc

SEQ ID NO: 20527 - DNA, 20 bp, Artificial Sequence
  Description of Artificial Sequence: Synthetic oligonucleotide
  Target: LAMA2; (-) strand; PAM type: NNGRRT; PAM sequence: GTGGGT
cctgtgtttataactggcta

SEQ ID NO: 20528 - DNA, 20 bp, Artificial Sequence
  Description of Artificial Sequence: Synthetic oligonucleotide
  Target: LAMA2; (-) strand; PAM type: NNGRRT; PAM sequence: AAGGGT
ccaacaggccctgtgaagtt

SEQ ID NO: 20529 - DNA, 20 bp, Artificial Sequence
  Description of Artificial Sequence: Synthetic oligonucleotide
  Target: LAMA2; (-) strand; PAM type: NNGRRT; PAM sequence: TAGGAT
ttgtttttgggtgttctaat

SEQ ID NO: 20530 - DNA, 20 bp, Artificial Sequence
  Description of Artificial Sequence: Synthetic oligonucleotide
  Target: LAMA2; (-) strand; PAM type: NNGRRT; PAM sequence: TTGGGT
atcctttattttgtttgttt

SEQ ID NO: 20531 - DNA, 20 bp, Artificial Sequence
  Description of Artificial Sequence: Synthetic oligonucleotide
  Target: LAMA2; (-) strand; PAM type: NNGRRT; PAM sequence: TTGAAT
ggactggccatgtcacccat

SEQ ID NO: 20532 - DNA, 20 bp, Artificial Sequence
  Description of Artificial Sequence: Synthetic oligonucleotide
  Target: LAMA2; (-) strand; PAM type: NNGRRT; PAM sequence: CTGAGT
tatttattattagtagtcaa

SEQ ID NO: 20533 - DNA, 20 bp, Artificial Sequence
  Description of Artificial Sequence: Synthetic oligonucleotide
  Target: LAMA2; (-) strand; PAM type: NNGRRT; PAM sequence: TAGGGT
agtcactttaccatattttg

SEQ ID NO: 20534 - DNA, 20 bp, Artificial Sequence
  Description of Artificial Sequence: Synthetic oligonucleotide
  Target: LAMA2; (-) strand; PAM type: NNGRRT; PAM sequence: TGGAGT
tttcttttcaattgttgtca

SEQ ID NO: 20535 - DNA, 20 bp, Artificial Sequence
  Description of Artificial Sequence: Synthetic oligonucleotide
  Target: LAMA2; (-) strand; PAM type: NNGRRT; PAM sequence: CTGAGT
agatatggacaatagctcag

SEQ ID NO: 20536 - DNA, 20 bp, Artificial Sequence
  Description of Artificial Sequence: Synthetic oligonucleotide
  Target: LAMA2; (-) strand; PAM type: NNGRRT; PAM sequence: CTGGGT
acatgccacattttctgtgg

SEQ ID NO: 20537 - DNA, 20 bp, Artificial Sequence
  Description of Artificial Sequence: Synthetic oligonucleotide
  Target: LAMA2; (-) strand; PAM type: NNGRRT; PAM sequence: TTGAAT
aacactggctgttcagtgtc

SEQ ID NO: 20538 - DNA, 20 bp, Artificial Sequence
  Description of Artificial Sequence: Synthetic oligonucleotide
  Target: LAMA2; (-) strand; PAM type: NNGRRT; PAM sequence: AAGAGT
agggaggttggaggtagaaa

SEQ ID NO: 20539 - DNA, 20 bp, Artificial Sequence
  Description of Artificial Sequence: Synthetic oligonucleotide
  Target: LAMA2; (-) strand; PAM type: NNGRRT; PAM sequence: GTGAAT
gattcttctccaccaggtat

SEQ ID NO: 20540 - DNA, 20 bp, Artificial Sequence
  Description of Artificial Sequence: Synthetic oligonucleotide
  Target: LAMA2; (-) strand; PAM type: NNGRRT; PAM sequence: TTGAGT
gaggactaaggtaatcaaat

SEQ ID NO: 20541 - DNA, 20 bp, Artificial Sequence
  Description of Artificial Sequence: Synthetic oligonucleotide
  Target: LAMA2; (-) strand; PAM type: NNGRRT; PAM sequence: CAGAAT
ctgcaagggagttataagtc

SEQ ID NO: 20542 - DNA, 20 bp, Artificial Sequence
  Description of Artificial Sequence: Synthetic oligonucleotide
  Target: LAMA2; (-) strand; PAM type: NNGRRT; PAM sequence: GGGAGT
gggtcccttctgagctgcaa

SEQ ID NO: 20543 - DNA, 20 bp, Artificial Sequence
  Description of Artificial Sequence: Synthetic oligonucleotide
  Target: LAMA2; (-) strand; PAM type: NNGRRT; PAM sequence: ACGGGT
ggcattttaattactggacc

SEQ ID NO: 20544 - DNA, 20 bp, Artificial Sequence
  Description of Artificial Sequence: Synthetic oligonucleotide
  Target: LAMA2; (-) strand; PAM type: NNGRRT; PAM sequence: TTGAAT
attcaatgcttaaatgcttt

SEQ ID NO: 20545 - DNA, 20 bp, Artificial Sequence
  Description of Artificial Sequence: Synthetic oligonucleotide
  Target: LAMA2; (-) strand; PAM type: NNGRRT; PAM sequence: TAGAAT
gtgattagaaacatttccta

SEQ ID NO: 20546 - DNA, 20 bp, Artificial Sequence
  Description of Artificial Sequence: Synthetic oligonucleotide
  Target: LAMA2; (-) strand; PAM type: NNGRRT; PAM sequence: TAGGGT
actcagccagagctggggga

SEQ ID NO: 20547 - DNA, 20 bp, Artificial Sequence
  Description of Artificial Sequence: Synthetic oligonucleotide
  Target: LAMA2; (-) strand; PAM type: NNGRRT; PAM sequence: GGGGAT
gcctaactcagccagagctg

SEQ ID NO: 20548 - DNA, 20 bp, Artificial Sequence
  Description of Artificial Sequence: Synthetic oligonucleotide
  Target: LAMA2; (-) strand; PAM type: NNGRRT; PAM sequence: GGGAAT
tgggtggtaggtgctttcat

SEQ ID NO: 20549 - DNA, 20 bp, Artificial Sequence
  Description of Artificial Sequence: Synthetic oligonucleotide
  Target: LAMA2; (-) strand; PAM type: NNGRRT; PAM sequence: CTGGGT
aagagggatatttctgcctg

SEQ ID NO: 20550 - DNA, 20 bp, Artificial Sequence
  Description of Artificial Sequence: Synthetic oligonucleotide
  Target: LAMA2; (-) strand; PAM type: NNGRRT; PAM sequence: AGGGAT
gtttagtgagaaagtcaaag

SEQ ID NO: 20551 - DNA, 20 bp, Artificial Sequence
  Description of Artificial Sequence: Synthetic oligonucleotide
  Target: LAMA2; (-) strand; PAM type: NNGRRT; PAM sequence: AGGAAT
gaatccagttgtcactcacc

SEQ ID NO: 20552 - DNA, 20 bp, Artificial Sequence
  Description of Artificial Sequence: Synthetic oligonucleotide
  Target: LAMA2; (-) strand; PAM type: NNGRRT; PAM sequence: TAGAAT
tctagaggttagaagaagaa

SEQ ID NO: 20553 - DNA, 20 bp, Artificial Sequence
  Description of Artificial Sequence: Synthetic oligonucleotide
  Target: LAMA2; (-) strand; PAM type: NNGRRT; PAM sequence: AAGAAT
taggttctagaggttagaag

SEQ ID NO: 20554 - DNA, 20 bp, Artificial Sequence
  Description of Artificial Sequence: Synthetic oligonucleotide
  Target: LAMA2; (-) strand; PAM type: NNGRRT; PAM sequence: AAGAAT
atccctttattcactcaaca

SEQ ID NO: 20555 - DNA, 20 bp, Artificial Sequence
  Description of Artificial Sequence: Synthetic oligonucleotide
  Target: LAMA2; (-) strand; PAM type: NNGRRT; PAM sequence: TAGGAT
gtttcaaattttttaaaatt

SEQ ID NO: 20556 - DNA, 20 bp, Artificial Sequence
  Description of Artificial Sequence: Synthetic oligonucleotide
  Target: LAMA2; (-) strand; PAM type: NNGRRT; PAM sequence: AAGAAT
ataaaatttgagggctggaa

SEQ ID NO: 20557 - DNA, 20 bp, Artificial Sequence
  Description of Artificial Sequence: Synthetic oligonucleotide
  Target: LAMA2; (-) strand; PAM type: NNGRRT; PAM sequence: TAGAGT
ctcacacaaaacacatttaa

SEQ ID NO: 20558 - DNA, 20 bp, Artificial Sequence
  Description of Artificial Sequence: Synthetic oligonucleotide
  Target: LAMA2; (-) strand; PAM type: NNGRRT; PAM sequence: CAGGGT
atggaggaaccacaagaaca

SEQ ID NO: 20559 - DNA, 20 bp, Artificial Sequence
  Description of Artificial Sequence: Synthetic oligonucleotide
  Target: LAMA2; (-) strand; PAM type: NNGRRT; PAM sequence: CAGGGT
gttcaagtgacttaatcttt

SEQ ID NO: 20560 - DNA, 20 bp, Artificial Sequence
  Description of Artificial Sequence: Synthetic oligonucleotide
  Target: LAMA2; (-) strand; PAM type: NNGRRT; PAM sequence: GTGAAT
agcaaattaaactcagttaa

SEQ ID NO: 20561 - DNA, 20 bp, Artificial Sequence
  Description of Artificial Sequence: Synthetic oligonucleotide
  Target: LAMA2; (-) strand; PAM type: NNGRRT; PAM sequence: TGGAAT
ttctcttgcagagaatattt

SEQ ID NO: 20562 - DNA, 20 bp, Artificial Sequence
  Description of Artificial Sequence: Synthetic oligonucleotide
  Target: LAMA2; (-) strand; PAM type: NNGRRT; PAM sequence: GAGAAT
atgtgtatgcttctcttgca

SEQ ID NO: 20563 - DNA, 20 bp, Artificial Sequence
  Description of Artificial Sequence: Synthetic oligonucleotide
  Target: LAMA2; (-) strand; PAM type: NNGRRT; PAM sequence: TAGAAT
aataaacatttgaaatgctt

SEQ ID NO: 20564 - DNA, 20 bp, Artificial Sequence
  Description of Artificial Sequence: Synthetic oligonucleotide
  Target: LAMA2; (-) strand; PAM type: NNGRRT; PAM sequence: CAGGGT
aaagcaatgtcaagtctgct

SEQ ID NO: 20565 - DNA, 20 bp, Artificial Sequence
  Description of Artificial Sequence: Synthetic oligonucleotide
  Target: LAMA2; (-) strand; PAM type: NNGRRT; PAM sequence: GAGAGT
tctgaaaaattttagattat

SEQ ID NO: 20566 - DNA, 20 bp, Artificial Sequence
  Description of Artificial Sequence: Synthetic oligonucleotide
  Target: LAMA2; (-) strand; PAM type: NNGRRT; PAM sequence: ATGAAT
gtattcagagctaaaaagaa

SEQ ID NO: 20567 - DNA, 20 bp, Artificial Sequence
  Description of Artificial Sequence: Synthetic oligonucleotide
  Target: LAMA2; (-) strand; PAM type: NNGRRT; PAM sequence: ATGGAT
ggatgtttttcaggaggtaa

SEQ ID NO: 20568 - DNA, 20 bp, Artificial Sequence
  Description of Artificial Sequence: Synthetic oligonucleotide
  Target: LAMA2; (-) strand; PAM type: NNGRRT; PAM sequence: CAGGAT
tgccagaacatggtagcaag

SEQ ID NO: 20569 - DNA, 20 bp, Artificial Sequence
  Description of Artificial Sequence: Synthetic oligonucleotide
  Target: LAMA2; (-) strand; PAM type: NNGRRT; PAM sequence: TTGAAT
ttggtatttacccaaataag

SEQ ID NO: 20570 - DNA, 20 bp, Artificial Sequence
  Description of Artificial Sequence: Synthetic oligonucleotide
  Target: LAMA2; (-) strand; PAM type: NNGRRT; PAM sequence: GAGAAT
aactcttgttcattgctggt

SEQ ID NO: 20571 - DNA, 20 bp, Artificial Sequence
  Description of Artificial Sequence: Synthetic oligonucleotide
  Target: LAMA2; (-) strand; PAM type: NNGRRT; PAM sequence: GAGAAT
tgacaatatgaaatgctggt

SEQ ID NO: 20572 - DNA, 20 bp, Artificial Sequence
  Description of Artificial Sequence: Synthetic oligonucleotide
  Target: LAMA2; (-) strand; PAM type: NNGRRT; PAM sequence: TAGAAT
atataccactacatatctat

SEQ ID NO: 20573 - DNA, 20 bp, Artificial Sequence
  Description of Artificial Sequence: Synthetic oligonucleotide
  Target: LAMA2; (-) strand; PAM type: NNGRRT; PAM sequence: GAGAAT
ctcatcatcttacatcatta

SEQ ID NO: 20574 - DNA, 20 bp, Artificial Sequence
  Description of Artificial Sequence: Synthetic oligonucleotide
  Target: LAMA2; (-) strand; PAM type: NNGRRT; PAM sequence: GAGAAT
tctgtgaaagacactgtgaa

SEQ ID NO: 20575 - DNA, 20 bp, Artificial Sequence
  Description of Artificial Sequence: Synthetic oligonucleotide
  Target: LAMA2; (-) strand; PAM type: NNGRRT; PAM sequence: CTGAGT
agaagaaaatctaaataacc

SEQ ID NO: 20576 - DNA, 20 bp, Artificial Sequence
  Description of Artificial Sequence: Synthetic oligonucleotide
  Target: LAMA2; (-) strand; PAM type: NNGRRT; PAM sequence: ATGGAT
aatggatcatagacctcaaa

SEQ ID NO: 20577 - DNA, 20 bp, Artificial Sequence
  Description of Artificial Sequence: Synthetic oligonucleotide
  Target: LAMA2; (-) strand; PAM type: NNGRRT; PAM sequence: ATGGAT
ctcacaaaaattaacacaaa

SEQ ID NO: 20578 - DNA, 20 bp, Artificial Sequence
  Description of Artificial Sequence: Synthetic oligonucleotide
  Target: LAMA2; (-) strand; PAM type: NNGRRT; PAM sequence: CAGGAT
ggatctcctagtcaagctcc

SEQ ID NO: 20579 - DNA, 20 bp, Artificial Sequence
  Description of Artificial Sequence: Synthetic oligonucleotide
  Target: LAMA2; (-) strand; PAM type: NNGRRT; PAM sequence: TTGGAT
ccaaatgcacctgtcctaac

SEQ ID NO: 20580 - DNA, 20 bp, Artificial Sequence
  Description of Artificial Sequence: Synthetic oligonucleotide
  Target: LAMA2; (-) strand; PAM type: NNGRRT; PAM sequence: GTGGGT
ctggattagctacctcgagg

SEQ ID NO: 20581 - DNA, 20 bp, Artificial Sequence
  Description of Artificial Sequence: Synthetic oligonucleotide
  Target: LAMA2; (-) strand; PAM type: NNGRRT; PAM sequence: GAGGGT
aggactggattagctacctc

SEQ ID NO: 20582 - DNA, 20 bp, Artificial Sequence
  Description of Artificial Sequence: Synthetic oligonucleotide
  Target: LAMA2; (-) strand; PAM type: NNGRRT; PAM sequence: CTGGAT
gagttcttgctcttgtagga

SEQ ID NO: 20583 - DNA, 20 bp, Artificial Sequence
  Description of Artificial Sequence: Synthetic oligonucleotide
  Target: LAMA2; (-) strand; PAM type: NNGRRT; PAM sequence: GTGAGT
gaattaatacctttcttaga

SEQ ID NO: 20584 - DNA, 20 bp, Artificial Sequence
  Description of Artificial Sequence: Synthetic oligonucleotide
  Target: LAMA2; (-) strand; PAM type: NNGRRT; PAM sequence: TAGAGT
aaaggaattaatacctttct

SEQ ID NO: 20585 - DNA, 20 bp, Artificial Sequence
  Description of Artificial Sequence: Synthetic oligonucleotide
  Target: LAMA2; (-) strand; PAM type: NNGRRT; PAM sequence: AGGAAT
aggtgattaggtttttaaaa

SEQ ID NO: 20586 - DNA, 20 bp, Artificial Sequence
  Description of Artificial Sequence: Synthetic oligonucleotide
  Target: LAMA2; (-) strand; PAM type: NNGRRT; PAM sequence: TGGGGT
tagtgaggtttggttcctaa

SEQ ID NO: 20587 - DNA, 20 bp, Artificial Sequence
  Description of Artificial Sequence: Synthetic oligonucleotide
  Target: LAMA2; (-) strand; PAM type: NNGRRT; PAM sequence: TAGAAT
gacatcatttgtgttatggt

SEQ ID NO: 20588 - DNA, 20 bp, Artificial Sequence
  Description of Artificial Sequence: Synthetic oligonucleotide
  Target: LAMA2; (-) strand; PAM type: NNGRRT; PAM sequence: GGGAAT
atctttcacaaaggagcaaa

SEQ ID NO: 20589 - DNA, 20 bp, Artificial Sequence
  Description of Artificial Sequence: Synthetic oligonucleotide
  Target: LAMA2; (-) strand; PAM type: NNGRRT; PAM sequence: ATGAAT
cagcccagaaatacacccgc

SEQ ID NO: 20590 - DNA, 20 bp, Artificial Sequence
  Description of Artificial Sequence: Synthetic oligonucleotide
  Target: LAMA2; (-) strand; PAM type: NNGRRT; PAM sequence: CAGAAT
agtcacttagatcaatggaa

SEQ ID NO: 20591 - DNA, 20 bp, Artificial Sequence
  Description of Artificial Sequence: Synthetic oligonucleotide
  Target: LAMA2; (-) strand; PAM type: NNGRRT; PAM sequence: TTGGAT
aaatcccagcaagttatttt

SEQ ID NO: 20592 - DNA, 20 bp, Artificial Sequence
  Description of Artificial Sequence: Synthetic oligonucleotide
  Target: LAMA2; (-) strand; PAM type: NNGRRT; PAM sequence: TAGGAT
ataaataggaagactcaagg

SEQ ID NO: 20593 - DNA, 20 bp, Artificial Sequence
  Description of Artificial Sequence: Synthetic oligonucleotide
  Target: LAMA2; (-) strand; PAM type: NNGRRT; PAM sequence: TGGAAT
tatatattagcaaagaaaat

SEQ ID NO: 20594 - DNA, 20 bp, Artificial Sequence
  Description of Artificial Sequence: Synthetic oligonucleotide
  Target: LAMA2; (-) strand; PAM type: NNGRRT; PAM sequence: GAGAAT
atggttctcagaaggaagat

SEQ ID NO: 20595 - DNA, 20 bp, Artificial Sequence
  Description of Artificial Sequence: Synthetic oligonucleotide
  Target: LAMA2; (-) strand; PAM type: NNGRRT; PAM sequence: AAGGAT
ttttagactgtaagcattac

SEQ ID NO: 20596 - DNA, 20 bp, Artificial Sequence
  Description of Artificial Sequence: Synthetic oligonucleotide
  Target: LAMA2; (-) strand; PAM type: NNGRRT; PAM sequence: TTGAAT
gggaatcaacaactctgatt

SEQ ID NO: 20597 - DNA, 20 bp, Artificial Sequence
  Description of Artificial Sequence: Synthetic oligonucleotide
  Target: LAMA2; (-) strand; PAM type: NNGRRT; PAM sequence: GGGAAT
tagccctttatgactctact

SEQ ID NO: 20598 - DNA, 20 bp, Artificial Sequence
  Description of Artificial Sequence: Synthetic oligonucleotide
  Target: LAMA2; (-) strand; PAM type: NNGRRT; PAM sequence: TAGAAT
cagaagctttgatataggat

SEQ ID NO: 20599 - DNA, 20 bp, Artificial Sequence
  Description of Artificial Sequence: Synthetic oligonucleotide
  Target: LAMA2; (-) strand; PAM type: NNGRRT; PAM sequence: TAGGAT
ggaagtcagaagctttgata

SEQ ID NO: 20600 - DNA, 20 bp, Artificial Sequence
  Description of Artificial Sequence: Synthetic oligonucleotide
  Target: LAMA2; (-) strand; PAM type: NNGRRT; PAM sequence: GGGAGT
ggaaacctccttagatatgg

SEQ ID NO: 20601 - DNA, 20 bp, Artificial Sequence
  Description of Artificial Sequence: Synthetic oligonucleotide
  Target: LAMA2; (-) strand; PAM type: NNGRRT; PAM sequence: TGGGAT
agaaatgcatttttgtggca

SEQ ID NO: 20602 - DNA, 20 bp, Artificial Sequence
  Description of Artificial Sequence: Synthetic oligonucleotide
  Target: LAMA2; (-) strand; PAM type: NNGRRT; PAM sequence: AAGGAT
attttatagataaagtgaca

SEQ ID NO: 20603 - DNA, 20 bp, Artificial Sequence
  Description of Artificial Sequence: Synthetic oligonucleotide
  Target: LAMA2; (-) strand; PAM type: NNGRRT; PAM sequence: AAGAAT
tctcatgagttattagatta

SEQ ID NO: 20604 - DNA, 20 bp, Artificial Sequence
  Description of Artificial Sequence: Synthetic oligonucleotide
  Target: LAMA2; (-) strand; PAM type: NNGRRT; PAM sequence: ATGAGT
tattacatatccagtgtctc

SEQ ID NO: 20605 - DNA, 20 bp, Artificial Sequence
  Description of Artificial Sequence: Synthetic oligonucleotide
  Target: LAMA2; (-) strand; PAM type: NNGRRT; PAM sequence: AAGAAT
caagggaaagcaagggggtt

SEQ ID NO: 20606 - DNA, 20 bp, Artificial Sequence
  Description of Artificial Sequence: Synthetic oligonucleotide
  Target: LAMA2; (-) strand; PAM type: NNGRRT; PAM sequence: GGGGGT
gaaatgtcaagggaaagcaa

SEQ ID NO: 20607 - DNA, 20 bp, Artificial Sequence
  Description of Artificial Sequence: Synthetic oligonucleotide
  Target: LAMA2; (-) strand; PAM type: NNGRRT; PAM sequence: TGGGAT
ctcagattcacttagtctag

SEQ ID NO: 20608 - DNA, 20 bp, Artificial Sequence
  Description of Artificial Sequence: Synthetic oligonucleotide
  Target: LAMA2; (-) strand; PAM type: NNGRRT; PAM sequence: CTGGAT
cattattttctctgttaata

SEQ ID NO: 20609 - DNA, 20 bp, Artificial Sequence
  Description of Artificial Sequence: Synthetic oligonucleotide
  Target: LAMA2; (-) strand; PAM type: NNGRRT; PAM sequence: CAGAAT
ctactgtggtgtttaatctg

SEQ ID NO: 20610 - DNA, 20 bp, Artificial Sequence
  Description of Artificial Sequence: Synthetic oligonucleotide
  Target: LAMA2; (-) strand; PAM type: NNGRRT; PAM sequence: AAGGAT
gaaaggcatgttttgccctc

SEQ ID NO: 20611 - DNA, 20 bp, Artificial Sequence
  Description of Artificial Sequence: Synthetic oligonucleotide
  Target: LAMA2; (-) strand; PAM type: NNGRRT; PAM sequence: AGGAAT
aagaacatcagtttaattat

SEQ ID NO: 20612 - DNA, 20 bp, Artificial Sequence
  Description of Artificial Sequence: Synthetic oligonucleotide
  Target: LAMA2; (-) strand; PAM type: NNGRRT; PAM sequence: TAGAAT
gattcattcattacatattc

SEQ ID NO: 20613 - DNA, 20 bp, Artificial Sequence
  Description of Artificial Sequence: Synthetic oligonucleotide
  Target: LAMA2; (-) strand; PAM type: NNGRRT; PAM sequence: ATGGAT
aattttctttaagaatgaaa

SEQ ID NO: 20614 - DNA, 20 bp, Artificial Sequence
  Description of Artificial Sequence: Synthetic oligonucleotide
  Target: LAMA2; (-) strand; PAM type: NNGRRT; PAM sequence: AAGAAT
aagatataataattttcttt

SEQ ID NO: 20615 - DNA, 20 bp, Artificial Sequence
  Description of Artificial Sequence: Synthetic oligonucleotide
  Target: LAMA2; (-) strand; PAM type: NNGRRT; PAM sequence: CTGAGT
ttagttttctttattattta

SEQ ID NO: 20616 - DNA, 20 bp, Artificial Sequence
  Description of Artificial Sequence: Synthetic oligonucleotide
  Target: LAMA2; (-) strand; PAM type: NNGRRT; PAM sequence: TAGAAT
caaaaatcatgcatcataaa

SEQ ID NO: 20617 - DNA, 20 bp, Artificial Sequence
  Description of Artificial Sequence: Synthetic oligonucleotide
  Target: LAMA2; (-) strand; PAM type: NNGRRT; PAM sequence: TGGGAT
gcctcagcctcccaaaatgc

SEQ ID NO: 20618 - DNA, 20 bp, Artificial Sequence
  Description of Artificial Sequence: Synthetic oligonucleotide
  Target: LAMA2; (-) strand; PAM type: NNGRRT; PAM sequence: CAGGAT
cagggtttcgtcatgttggc

SEQ ID NO: 20619 - DNA, 20 bp, Artificial Sequence
  Description of Artificial Sequence: Synthetic oligonucleotide
  Target: LAMA2; (-) strand; PAM type: NNGRRT; PAM sequence: CAGGGT
ttttgtatttttagtacaga

SEQ ID NO: 20620 - DNA, 20 bp, Artificial Sequence
  Description of Artificial Sequence: Synthetic oligonucleotide
  Target: LAMA2; (-) strand; PAM type: NNGRRT; PAM sequence: TGGGAT
gcctcagcctcccaagtagc

SEQ ID NO: 20621 - DNA, 20 bp, Artificial Sequence
  Description of Artificial Sequence: Synthetic oligonucleotide
  Target: LAMA2; (-) strand; PAM type: NNGRRT; PAM sequence: CTGGGT
ctcactgcaacctccgcctc

SEQ ID NO: 20622 - DNA, 20 bp, Artificial Sequence
  Description of Artificial Sequence: Synthetic oligonucleotide
  Target: LAMA2; (-) strand; PAM type: NNGRRT; PAM sequence: TGGAGT
gtctcgctctgtcaccaggc

SEQ ID NO: 20623 - DNA, 20 bp, Artificial Sequence
  Description of Artificial Sequence: Synthetic oligonucleotide
  Target: LAMA2; (-) strand; PAM type: NNGRRT; PAM sequence: TGGAGT
ttattattttttttttgaga

SEQ ID NO: 20624 - DNA, 20 bp, Artificial Sequence
  Description of Artificial Sequence: Synthetic oligonucleotide
  Target: LAMA2; (-) strand; PAM type: NNGRRT; PAM sequence: ATGGGT
tatatggaagaaagtaactc

SEQ ID NO: 20625 - DNA, 20 bp, Artificial Sequence
  Description of Artificial Sequence: Synthetic oligonucleotide
  Target: LAMA2; (-) strand; PAM type: NNGRRT; PAM sequence: GAGAGT
aagctcaatctaacctggag

SEQ ID NO: 20626 - DNA, 20 bp, Artificial Sequence
  Description of Artificial Sequence: Synthetic oligonucleotide
  Target: LAMA2; (-) strand; PAM type: NNGRRT; PAM sequence: CTGAGT
gcctgttgacactgatttct

SEQ ID NO: 20627 - DNA, 20 bp, Artificial Sequence
  Description of Artificial Sequence: Synthetic oligonucleotide
  Target: LAMA2; (-) strand; PAM type: NNGRRT; PAM sequence: CAGAGT
taggagaaatatcctttgta

SEQ ID NO: 20628 - DNA, 20 bp, Artificial Sequence
  Description of Artificial Sequence: Synthetic oligonucleotide
  Target: LAMA2; (-) strand; PAM type: NNGRRT; PAM sequence: TTGAAT
tattccaaaagagaaaatat

SEQ ID NO: 20629 - DNA, 20 bp, Artificial Sequence
  Description of Artificial Sequence: Synthetic oligonucleotide
  Target: LAMA2; (-) strand; PAM type: NNGRRT; PAM sequence: CAGAGT
agctcttgttttaataggaa

SEQ ID NO: 20630 - DNA, 20 bp, Artificial Sequence
  Description of Artificial Sequence: Synthetic oligonucleotide
  Target: LAMA2; (-) strand; PAM type: NNGRRT; PAM sequence: TAGGAT
aaaggtcttatggtttaaga

SEQ ID NO: 20631 - DNA, 20 bp, Artificial Sequence
  Description of Artificial Sequence: Synthetic oligonucleotide
  Target: LAMA2; (-) strand; PAM type: NNGRRT; PAM sequence: TGGGGT
atccacagtagattatatcc

SEQ ID NO: 20632 - DNA, 20 bp, Artificial Sequence
  Description of Artificial Sequence: Synthetic oligonucleotide
  Target: LAMA2; (-) strand; PAM type: NNGRRT; PAM sequence: ATGAAT
aataggaggtgtctttgtct

SEQ ID NO: 20633 - DNA, 20 bp, Artificial Sequence
  Description of Artificial Sequence: Synthetic oligonucleotide
  Target: LAMA2; (-) strand; PAM type: NNGRRT; PAM sequence: TGGAAT
ttgaattttttttaaaagcc

SEQ ID NO: 20634 - DNA, 20 bp, Artificial Sequence
  Description of Artificial Sequence: Synthetic oligonucleotide
  Target: LAMA2; (-) strand; PAM type: NNGRRT; PAM sequence: TTGAAT
aaaatctgatgtttctgtat

SEQ ID NO: 20635 - DNA, 20 bp, Artificial Sequence
  Description of Artificial Sequence: Synthetic oligonucleotide
  Target: LAMA2; (-) strand; PAM type: NNGRRT; PAM sequence: ATGAGT
gatcaaatgactgataatat

SEQ ID NO: 20636 - DNA, 20 bp, Artificial Sequence
  Description of Artificial Sequence: Synthetic oligonucleotide
  Target: LAMA2; (-) strand; PAM type: NNGRRT; PAM sequence: TGGAAT
atacactgagatgttaatgt

SEQ ID NO: 20637 - DNA, 20 bp, Artificial Sequence
  Description of Artificial Sequence: Synthetic oligonucleotide
  Target: LAMA2; (-) strand; PAM type: NNGRRT; PAM sequence: ATGAAT
agaagaaaaatattgtacaa

SEQ ID NO: 20638 - DNA, 20 bp, Artificial Sequence
  Description of Artificial Sequence: Synthetic oligonucleotide
  Target: LAMA2; (-) strand; PAM type: NNGRRT; PAM sequence: ATGAGT
acagggagggtcactacaag

SEQ ID NO: 20639 - DNA, 20 bp, Artificial Sequence
  Description of Artificial Sequence: Synthetic oligonucleotide
  Target: LAMA2; (-) strand; PAM type: NNGRRT; PAM sequence: GAGGGT
tctcaggcaacatgtacagg

SEQ ID NO: 20640 - DNA, 20 bp, Artificial Sequence
  Description of Artificial Sequence: Synthetic oligonucleotide
  Target: LAMA2; (-) strand; PAM type: NNGRRT; PAM sequence: TTGAAT
attgaatactgtaaacattt

SEQ ID NO: 20641 - DNA, 20 bp, Artificial Sequence
  Description of Artificial Sequence: Synthetic oligonucleotide
  Target: LAMA2; (-) strand; PAM type: NNGRRT; PAM sequence: TTGAAT
ccaagatttatataatttca

SEQ ID NO: 20642 - DNA, 20 bp, Artificial Sequence
  Description of Artificial Sequence: Synthetic oligonucleotide
  Target: LAMA2; (-) strand; PAM type: NNGRRT; PAM sequence: CAGAAT
tctaatttacattttcccct

SEQ ID NO: 20643 - DNA, 20 bp, Artificial Sequence
  Description of Artificial Sequence: Synthetic oligonucleotide
  Target: LAMA2; (-) strand; PAM type: NNGRRT; PAM sequence: ATGAAT
agaattgtatcaggcattta

SEQ ID NO: 20644 - DNA, 20 bp, Artificial Sequence
  Description of Artificial Sequence: Synthetic oligonucleotide
  Target: LAMA2; (-) strand; PAM type: NNGRRT; PAM sequence: CAGAAT
tagtcaattttcagaaagta

SEQ ID NO: 20645 - DNA, 20 bp, Artificial Sequence
  Description of Artificial Sequence: Synthetic oligonucleotide
  Target: LAMA2; (-) strand; PAM type: NNGRRT; PAM sequence: CAGGAT
gatgacaattttataatggc

SEQ ID NO: 20646 - DNA, 20 bp, Artificial Sequence
  Description of Artificial Sequence: Synthetic oligonucleotide
  Target: LAMA2; (-) strand; PAM type: NNGRRT; PAM sequence: GTGGAT
ctcatttattctacctatga

SEQ ID NO: 20647 - DNA, 20 bp, Artificial Sequence
  Description of Artificial Sequence: Synthetic oligonucleotide
  Target: LAMA2; (-) strand; PAM type: NNGRRT; PAM sequence: ATGAGT
ttctctcatttattctacct

SEQ ID NO: 20648 - DNA, 20 bp, Artificial Sequence
  Description of Artificial Sequence: Synthetic oligonucleotide
  Target: LAMA2; (-) strand; PAM type: NNGRRT; PAM sequence: TTGAAT
tcaggttttacatataaata

SEQ ID NO: 20649 - DNA, 20 bp, Artificial Sequence
  Description of Artificial Sequence: Synthetic oligonucleotide
  Target: LAMA2; (-) strand; PAM type: NNGRRT; PAM sequence: ATGGGT
ttggcaaatcttggtgatac

SEQ ID NO: 20650 - DNA, 20 bp, Artificial Sequence
  Description of Artificial Sequence: Synthetic oligonucleotide
  Target: LAMA2; (-) strand; PAM type: NNGRRT; PAM sequence: AAGAAT
gatattctttaaggaataaa

SEQ ID NO: 20651 - DNA, 20 bp, Artificial Sequence
  Description of Artificial Sequence: Synthetic oligonucleotide
  Target: LAMA2; (-) strand; PAM type: NNGRRT; PAM sequence: AGGAAT
aaattgtcagatattcttta

SEQ ID NO: 20652 - DNA, 20 bp, Artificial Sequence
  Description of Artificial Sequence: Synthetic oligonucleotide
  Target: LAMA2; (-) strand; PAM type: NNGRRT; PAM sequence: TAGAGT
gttcttggagactgctattt

SEQ ID NO: 20653 - DNA, 20 bp, Artificial Sequence
  Description of Artificial Sequence: Synthetic oligonucleotide
  Target: LAMA2; (-) strand; PAM type: NNGRRT; PAM sequence: CTGGGT
tcctatggatcacatacttc

SEQ ID NO: 20654 - DNA, 20 bp, Artificial Sequence
  Description of Artificial Sequence: Synthetic oligonucleotide
  Target: LAMA2; (-) strand; PAM type: NNGRRT; PAM sequence: ATGGAT
aataaaatatgtacactcct

SEQ ID NO: 20655 - DNA, 20 bp, Artificial Sequence
  Description of Artificial Sequence: Synthetic oligonucleotide
  Target: LAMA2; (-) strand; PAM type: NNGRRT; PAM sequence: AGGAAT
tttcaagttctagatccctg

SEQ ID NO: 20656 - DNA, 20 bp, Artificial Sequence
  Description of Artificial Sequence: Synthetic oligonucleotide
  Target: LAMA2; (-) strand; PAM type: NNGRRT; PAM sequence: CTGGGT
catacccagtaatgggatgg

SEQ ID NO: 20657 - DNA, 20 bp, Artificial Sequence
  Description of Artificial Sequence: Synthetic oligonucleotide
  Target: LAMA2; (-) strand; PAM type: NNGRRT; PAM sequence: TGGGAT
tttgggtacatacccagtaa

SEQ ID NO: 20658 - DNA, 20 bp, Artificial Sequence
  Description of Artificial Sequence: Synthetic oligonucleotide
  Target: LAMA2; (-) strand; PAM type: NNGRRT; PAM sequence: TTGGGT
gcagcatgatttatagtcct

SEQ ID NO: 20659 - DNA, 20 bp, Artificial Sequence
  Description of Artificial Sequence: Synthetic oligonucleotide
  Target: LAMA2; (-) strand; PAM type: NNGRRT; PAM sequence: GTGAAT
ggttccaagtctttgctatt

SEQ ID NO: 20660 - DNA, 20 bp, Artificial Sequence
  Description of Artificial Sequence: Synthetic oligonucleotide
  Target: LAMA2; (-) strand; PAM type: NNGRRT; PAM sequence: TTGGGT
agtctatcattgttggacat

SEQ ID NO: 20661 - DNA, 20 bp, Artificial Sequence
  Description of Artificial Sequence: Synthetic oligonucleotide
  Target: LAMA2; (-) strand; PAM type: NNGRRT; PAM sequence: GAGAAT
tgtccttgtgatagtttact

SEQ ID NO: 20662 - DNA, 20 bp, Artificial Sequence
  Description of Artificial Sequence: Synthetic oligonucleotide
  Target: LAMA2; (-) strand; PAM type: NNGRRT; PAM sequence: ATGAGT
tcattgttcaattcccacct

SEQ ID NO: 20663 - DNA, 20 bp, Artificial Sequence
  Description of Artificial Sequence: Synthetic oligonucleotide
  Target: LAMA2; (-) strand; PAM type: NNGRRT; PAM sequence: CAGAGT
ccccaccccacaacagtccc

SEQ ID NO: 20664 - DNA, 20 bp, Artificial Sequence
  Description of Artificial Sequence: Synthetic oligonucleotide
  Target: LAMA2; (-) strand; PAM type: NNGRRT; PAM sequence: TAGGGT
tattattatactttaagttt

SEQ ID NO: 20665 - DNA, 20 bp, Artificial Sequence
  Description of Artificial Sequence: Synthetic oligonucleotide
  Target: LAMA2; (-) strand; PAM type: NNGRRT; PAM sequence: AGGAAT
tttcactatatgttttttga

SEQ ID NO: 20666 - DNA, 20 bp, Artificial Sequence
  Description of Artificial Sequence: Synthetic oligonucleotide
  Target: LAMA2; (-) strand; PAM type: NNGRRT; PAM sequence: CTGAAT
catatactgatagaaacttt

SEQ ID NO: 20667 - DNA, 20 bp, Artificial Sequence
  Description of Artificial Sequence: Synthetic oligonucleotide
  Target: LAMA2; (-) strand; PAM type: NNGRRT; PAM sequence: GGGAAT
cctcggcctcccacagtgct

SEQ ID NO: 20668 - DNA, 20 bp, Artificial Sequence
  Description of Artificial Sequence: Synthetic oligonucleotide
  Target: LAMA2; (-) strand; PAM type: NNGRRT; PAM sequence: CAGGGT
ttttgtatttttagtagaga

SEQ ID NO: 20669 - DNA, 20 bp, Artificial Sequence
  Description of Artificial Sequence: Synthetic oligonucleotide
  Target: LAMA2; (-) strand; PAM type: NNGRRT; PAM sequence: TGGGAT
gcctcagcctcacgagtagc

SEQ ID NO: 20670 - DNA, 20 bp, Artificial Sequence
  Description of Artificial Sequence: Synthetic oligonucleotide
  Target: LAMA2; (-) strand; PAM type: NNGRRT; PAM sequence: ACGAGT
gattctcctgcctcagcctc

SEQ ID NO: 20671 - DNA, 20 bp, Artificial Sequence
  Description of Artificial Sequence: Synthetic oligonucleotide
  Target: LAMA2; (-) strand; PAM type: NNGRRT; PAM sequence: TGGAGT
tcttgctctgtctcccaggc

SEQ ID NO: 20672 - DNA, 20 bp, Artificial Sequence
  Description of Artificial Sequence: Synthetic oligonucleotide
  Target: LAMA2; (-) strand; PAM type: NNGRRT; PAM sequence: TGGAGT
tttttattttttttttgaga

SEQ ID NO: 20673 - DNA, 20 bp, Artificial Sequence
  Description of Artificial Sequence: Synthetic oligonucleotide
  Target: LAMA2; (-) strand; PAM type: NNGRRT; PAM sequence: ATGAGT
tggcctttccttattatttt

SEQ ID NO: 20674 - DNA, 20 bp, Artificial Sequence
  Description of Artificial Sequence: Synthetic oligonucleotide
  Target: LAMA2; (-) strand; PAM type: NNGRRT; PAM sequence: TTGAGT
tcttaattattgccaataaa

SEQ ID NO: 20675 - DNA, 20 bp, Artificial Sequence
  Description of Artificial Sequence: Synthetic oligonucleotide
  Target: LAMA2; (-) strand; PAM type: NNGRRT; PAM sequence: GTGAAT
attgttgggtcatagggtgt

SEQ ID NO: 20676 - DNA, 20 bp, Artificial Sequence
  Description of Artificial Sequence: Synthetic oligonucleotide
  Target: LAMA2; (-) strand; PAM type: NNGRRT; PAM sequence: TAGGGT
tctagaaaattgttgggtca

SEQ ID NO: 20677 - DNA, 20 bp, Artificial Sequence
  Description of Artificial Sequence: Synthetic oligonucleotide
  Target: LAMA2; (-) strand; PAM type: NNGRRT; PAM sequence: TTGGGT
tatatacatctagaaaattg

SEQ ID NO: 20678 - DNA, 20 bp, Artificial Sequence
  Description of Artificial Sequence: Synthetic oligonucleotide
  Target: LAMA2; (-) strand; PAM type: NNGRRT; PAM sequence: CTGGGT
gaacacttttatgtgtttat

SEQ ID NO: 20679 - DNA, 20 bp, Artificial Sequence
  Description of Artificial Sequence: Synthetic oligonucleotide
  Target: LAMA2; (-) strand; PAM type: NNGRRT; PAM sequence: CTGGAT
atattacaatttgtttacct

SEQ ID NO: 20680 - DNA, 20 bp, Artificial Sequence
  Description of Artificial Sequence: Synthetic oligonucleotide
  Target: LAMA2; (-) strand; PAM type: NNGRRT; PAM sequence: CTGAAT
tgcagcataaccctgacatg

SEQ ID NO: 20681 - DNA, 20 bp, Artificial Sequence
  Description of Artificial Sequence: Synthetic oligonucleotide
  Target: LAMA2; (-) strand; PAM type: NNGRRT; PAM sequence: AAGAAT
tatgtaccaggcattattct

SEQ ID NO: 20682 - DNA, 20 bp, Artificial Sequence
  Description of Artificial Sequence: Synthetic oligonucleotide
  Target: LAMA2; (-) strand; PAM type: NNGRRT; PAM sequence: ATGGAT
ctaacgtaaataacgagtta

SEQ ID NO: 20683 - DNA, 20 bp, Artificial Sequence
  Description of Artificial Sequence: Synthetic oligonucleotide
  Target: LAMA2; (-) strand; PAM type: NNGRRT; PAM sequence: ACGAGT
agatatacctaacgtaaata

SEQ ID NO: 20684 - DNA, 20 bp, Artificial Sequence
  Description of Artificial Sequence: Synthetic oligonucleotide
  Target: LAMA2; (-) strand; PAM type: NNGRRT; PAM sequence: AGGGAT
gtagggtggggggagggggg

SEQ ID NO: 20685 - DNA, 20 bp, Artificial Sequence
  Description of Artificial Sequence: Synthetic oligonucleotide
  Target: LAMA2; (-) strand; PAM type: NNGRRT; PAM sequence: TAGGGT
tcacacaccggggcctgtcg

SEQ ID NO: 20686 - DNA, 20 bp, Artificial Sequence
  Description of Artificial Sequence: Synthetic oligonucleotide
  Target: LAMA2; (-) strand; PAM type: NNGRRT; PAM sequence: ATGGAT
ttcacgtcctttgtagggac

SEQ ID NO: 20687 - DNA, 20 bp, Artificial Sequence
  Description of Artificial Sequence: Synthetic oligonucleotide
  Target: LAMA2; (-) strand; PAM type: NNGRRT; PAM sequence: ATGAGT
ctatgcagccataaaaaagg

SEQ ID NO: 20688 - DNA, 20 bp, Artificial Sequence
  Description of Artificial Sequence: Synthetic oligonucleotide
  Target: LAMA2; (-) strand; PAM type: NNGRRT; PAM sequence: AAGGAT
aatactatgcagccataaaa

SEQ ID NO: 20689 - DNA, 20 bp, Artificial Sequence
  Description of Artificial Sequence: Synthetic oligonucleotide
  Target: LAMA2; (-) strand; PAM type: NNGRRT; PAM sequence: TGGAAT
aatgtggcatgtatacacca

SEQ ID NO: 20690 - DNA, 20 bp, Artificial Sequence
  Description of Artificial Sequence: Synthetic oligonucleotide
  Target: LAMA2; (-) strand; PAM type: NNGRRT; PAM sequence: CTGGAT
aaatgtccatcaatgataga

SEQ ID NO: 20691 - DNA, 20 bp, Artificial Sequence
  Description of Artificial Sequence: Synthetic oligonucleotide
  Target: LAMA2; (-) strand; PAM type: NNGRRT; PAM sequence: AAGGAT
cattactgggtatataccca

SEQ ID NO: 20692 - DNA, 20 bp, Artificial Sequence
  Description of Artificial Sequence: Synthetic oligonucleotide
  Target: LAMA2; (-) strand; PAM type: NNGRRT; PAM sequence: CTGGGT
ttgacccagtcatcccatta

SEQ ID NO: 20693 - DNA, 20 bp, Artificial Sequence
  Description of Artificial Sequence: Synthetic oligonucleotide
  Target: LAMA2; (-) strand; PAM type: NNGRRT; PAM sequence: AAGGAT
agacagtggggcgattcctc

SEQ ID NO: 20694 - DNA, 20 bp, Artificial Sequence
  Description of Artificial Sequence: Synthetic oligonucleotide
  Target: LAMA2; (-) strand; PAM type: NNGRRT; PAM sequence: TGGGAT
gaacacttttacactgttgg

SEQ ID NO: 20695 - DNA, 20 bp, Artificial Sequence
  Description of Artificial Sequence: Synthetic oligonucleotide
  Target: LAMA2; (-) strand; PAM type: NNGRRT; PAM sequence: GAGGAT
tggaaacaacaggtgctgga

SEQ ID NO: 20696 - DNA, 20 bp, Artificial Sequence
  Description of Artificial Sequence: Synthetic oligonucleotide
  Target: LAMA2; (-) strand; PAM type: NNGRRT; PAM sequence: AAGGAT
aaccccatcaaaattgggca

SEQ ID NO: 20697 - DNA, 20 bp, Artificial Sequence
  Description of Artificial Sequence: Synthetic oligonucleotide
  Target: LAMA2; (-) strand; PAM type: NNGRRT; PAM sequence: CAGAAT
tctgacaaagggctaatatc

SEQ ID NO: 20698 - DNA, 20 bp, Artificial Sequence
  Description of Artificial Sequence: Synthetic oligonucleotide
  Target: LAMA2; (-) strand; PAM type: NNGRRT; PAM sequence: CAGAAT
cagagtgaacaggcaaccta

SEQ ID NO: 20699 - DNA, 20 bp, Artificial Sequence
  Description of Artificial Sequence: Synthetic oligonucleotide
  Target: LAMA2; (-) strand; PAM type: NNGRRT; PAM sequence: CAGAGT
acagcaaaagaaactaccat

SEQ ID NO: 20700 - DNA, 20 bp, Artificial Sequence
  Description of Artificial Sequence: Synthetic oligonucleotide
  Target: LAMA2; (-) strand; PAM type: NNGRRT; PAM sequence: TGGGAT
caaaagccaaagttgacaaa

SEQ ID NO: 20701 - DNA, 20 bp, Artificial Sequence
  Description of Artificial Sequence: Synthetic oligonucleotide
  Target: LAMA2; (-) strand; PAM type: NNGRRT; PAM sequence: ATGGGT
ataccattgaggacataggc

SEQ ID NO: 20702 - DNA, 20 bp, Artificial Sequence
  Description of Artificial Sequence: Synthetic oligonucleotide
  Target: LAMA2; (-) strand; PAM type: NNGRRT; PAM sequence: ATGGAT
tatacaaaaattaattcaag

SEQ ID NO: 20703 - DNA, 20 bp, Artificial Sequence
  Description of Artificial Sequence: Synthetic oligonucleotide
  Target: LAMA2; (-) strand; PAM type: NNGRRT; PAM sequence: CTGGAT
ccatatgtagaaagctgaaa

SEQ ID NO: 20704 - DNA, 20 bp, Artificial Sequence
  Description of Artificial Sequence: Synthetic oligonucleotide
  Target: LAMA2; (-) strand; PAM type: NNGRRT; PAM sequence: ATGGAT
acaaaaacaagcaatgggga

SEQ ID NO: 20705 - DNA, 20 bp, Artificial Sequence
  Description of Artificial Sequence: Synthetic oligonucleotide
  Target: LAMA2; (-) strand; PAM type: NNGRRT; PAM sequence: GGGAAT
cctgacaaaaacaagcaatg

SEQ ID NO: 20706 - DNA, 20 bp, Artificial Sequence
  Description of Artificial Sequence: Synthetic oligonucleotide
  Target: LAMA2; (-) strand; PAM type: NNGRRT; PAM sequence: CAGAAT
agagatgtagatcaatggaa

SEQ ID NO: 20707 - DNA, 20 bp, Artificial Sequence
  Description of Artificial Sequence: Synthetic oligonucleotide
  Target: LAMA2; (-) strand; PAM type: NNGRRT; PAM sequence: CAGAAT
gctaccagtgactttcttca

SEQ ID NO: 20708 - DNA, 20 bp, Artificial Sequence
  Description of Artificial Sequence: Synthetic oligonucleotide
  Target: LAMA2; (-) strand; PAM type: NNGRRT; PAM sequence: AAGAAT
attccatgcttatggatagg

SEQ ID NO: 20709 - DNA, 20 bp, Artificial Sequence
  Description of Artificial Sequence: Synthetic oligonucleotide
  Target: LAMA2; (-) strand; PAM type: NNGRRT; PAM sequence: ATGGAT
tggaagaacattccatgctt

SEQ ID NO: 20710 - DNA, 20 bp, Artificial Sequence
  Description of Artificial Sequence: Synthetic oligonucleotide
  Target: LAMA2; (-) strand; PAM type: NNGRRT; PAM sequence: AGGGAT
acctaggaatccaacttaca

SEQ ID NO: 20711 - DNA, 20 bp, Artificial Sequence
  Description of Artificial Sequence: Synthetic oligonucleotide
  Target: LAMA2; (-) strand; PAM type: NNGRRT; PAM sequence: AGGAAT
tcaaagagaataaaatacct

SEQ ID NO: 20712 - DNA, 20 bp, Artificial Sequence
  Description of Artificial Sequence: Synthetic oligonucleotide
  Target: LAMA2; (-) strand; PAM type: NNGRRT; PAM sequence: GAGAAT
ctattcacaattgcttcaaa

SEQ ID NO: 20713 - DNA, 20 bp, Artificial Sequence
  Description of Artificial Sequence: Synthetic oligonucleotide
  Target: LAMA2; (-) strand; PAM type: NNGRRT; PAM sequence: ATGAGT
gacaatcagagagccaaatc

SEQ ID NO: 20714 - DNA, 20 bp, Artificial Sequence
  Description of Artificial Sequence: Synthetic oligonucleotide
  Target: LAMA2; (-) strand; PAM type: NNGRRT; PAM sequence: CAGGAT
aagcaacttcaccaaagtct

SEQ ID NO: 20715 - DNA, 20 bp, Artificial Sequence
  Description of Artificial Sequence: Synthetic oligonucleotide
  Target: LAMA2; (-) strand; PAM type: NNGRRT; PAM sequence: AAGGGT
tcaggcaggagaaagtaatg

SEQ ID NO: 20716 - DNA, 20 bp, Artificial Sequence
  Description of Artificial Sequence: Synthetic oligonucleotide
  Target: LAMA2; (-) strand; PAM type: NNGRRT; PAM sequence: AGGGAT
tttgaaaactggcacaagac

SEQ ID NO: 20717 - DNA, 20 bp, Artificial Sequence
  Description of Artificial Sequence: Synthetic oligonucleotide
  Target: LAMA2; (-) strand; PAM type: NNGRRT; PAM sequence: CTGAAT
aacccacagccaatatcata

SEQ ID NO: 20718 - DNA, 20 bp, Artificial Sequence
  Description of Artificial Sequence: Synthetic oligonucleotide
  Target: LAMA2; (-) strand; PAM type: NNGRRT; PAM sequence: TGGGAT
ctcaataaattaggtattga

SEQ ID NO: 20719 - DNA, 20 bp, Artificial Sequence
  Description of Artificial Sequence: Synthetic oligonucleotide
  Target: LAMA2; (-) strand; PAM type: NNGRRT; PAM sequence: CGGGAT
gatcaagtgggcttcatcca

SEQ ID NO: 20720 - DNA, 20 bp, Artificial Sequence
  Description of Artificial Sequence: Synthetic oligonucleotide
  Target: LAMA2; (-) strand; PAM type: NNGRRT; PAM sequence: CTGAAT
ctcaataaaataatggcaaa

SEQ ID NO: 20721 - DNA, 20 bp, Artificial Sequence
  Description of Artificial Sequence: Synthetic oligonucleotide
  Target: LAMA2; (-) strand; PAM type: NNGRRT; PAM sequence: GAGAAT
ggcagagacacaacaaaaaa

SEQ ID NO: 20722 - DNA, 20 bp, Artificial Sequence
  Description of Artificial Sequence: Synthetic oligonucleotide
  Target: LAMA2; (-) strand; PAM type: NNGRRT; PAM sequence: GGGAAT
ttccaatcaatagaaaaaga

SEQ ID NO: 20723 - DNA, 20 bp, Artificial Sequence
  Description of Artificial Sequence: Synthetic oligonucleotide
  Target: LAMA2; (-) strand; PAM type: NNGRRT; PAM sequence: CCGAAT
aggaccagatggattcacag

SEQ ID NO: 20724 - DNA, 20 bp, Artificial Sequence
  Description of Artificial Sequence: Synthetic oligonucleotide
  Target: LAMA2; (-) strand; PAM type: NNGRRT; PAM sequence: ATGGAT
caaaaaaagtccaggaccag

SEQ ID NO: 20725 - DNA, 20 bp, Artificial Sequence
  Description of Artificial Sequence: Synthetic oligonucleotide
  Target: LAMA2; (-) strand; PAM type: NNGRRT; PAM sequence: CTGAAT
acaaggaagaagttgaatct

SEQ ID NO: 20726 - DNA, 20 bp, Artificial Sequence
  Description of Artificial Sequence: Synthetic oligonucleotide
  Target: LAMA2; (-) strand; PAM type: NNGRRT; PAM sequence: TTGAAT
aatactaaacaaggaagaag

SEQ ID NO: 20727 - DNA, 20 bp, Artificial Sequence
  Description of Artificial Sequence: Synthetic oligonucleotide
  Target: LAMA2; (-) strand; PAM type: NNGRRT; PAM sequence: ATGGAT
aactagaaaatcttgaagaa

SEQ ID NO: 20728 - DNA, 20 bp, Artificial Sequence
  Description of Artificial Sequence: Synthetic oligonucleotide
  Target: LAMA2; (-) strand; PAM type: NNGRRT; PAM sequence: GAGAAT
agaaatacaaactaccatca

SEQ ID NO: 20729 - DNA, 20 bp, Artificial Sequence
  Description of Artificial Sequence: Synthetic oligonucleotide
  Target: LAMA2; (-) strand; PAM type: NNGRRT; PAM sequence: GGGGAT
atgcaataaaaaatgataaa

SEQ ID NO: 20730 - DNA, 20 bp, Artificial Sequence
  Description of Artificial Sequence: Synthetic oligonucleotide
  Target: LAMA2; (-) strand; PAM type: NNGRRT; PAM sequence: AAGAAT
taataaagaagaaaagagag

SEQ ID NO: 20731 - DNA, 20 bp, Artificial Sequence
  Description of Artificial Sequence: Synthetic oligonucleotide
  Target: LAMA2; (-) strand; PAM type: NNGRRT; PAM sequence: GTGAAT
aaaaacccttcaacaaatca

SEQ ID NO: 20732 - DNA, 20 bp, Artificial Sequence
  Description of Artificial Sequence: Synthetic oligonucleotide
  Target: LAMA2; (-) strand; PAM type: NNGRRT; PAM sequence: TAGAGT
cagagcagaactgaaggaga

SEQ ID NO: 20733 - DNA, 20 bp, Artificial Sequence
  Description of Artificial Sequence: Synthetic oligonucleotide
  Target: LAMA2; (-) strand; PAM type: NNGRRT; PAM sequence: CAGAAT
agaacaaagatacaacatac

SEQ ID NO: 20734 - DNA, 20 bp, Artificial Sequence
  Description of Artificial Sequence: Synthetic oligonucleotide
  Target: LAMA2; (-) strand; PAM type: NNGRRT; PAM sequence: TGGAAT
gtatataacgaaatgaaggc

SEQ ID NO: 20735 - DNA, 20 bp, Artificial Sequence
  Description of Artificial Sequence: Synthetic oligonucleotide
  Target: LAMA2; (-) strand; PAM type: NNGRRT; PAM sequence: CTGGGT
aacctgttcctgaatgacta

SEQ ID NO: 20736 - DNA, 20 bp, Artificial Sequence
  Description of Artificial Sequence: Synthetic oligonucleotide
  Target: LAMA2; (-) strand; PAM type: NNGRRT; PAM sequence: CTGAAT
ggaaactgaacaacctgttc

SEQ ID NO: 20737 - DNA, 20 bp, Artificial Sequence
  Description of Artificial Sequence: Synthetic oligonucleotide
  Target: LAMA2; (-) strand; PAM type: NNGRRT; PAM sequence: CAGGAT
agtgcaatcaaactagaact

SEQ ID NO: 20738 - DNA, 20 bp, Artificial Sequence
  Description of Artificial Sequence: Synthetic oligonucleotide
  Target: LAMA2; (-) strand; PAM type: NNGRRT; PAM sequence: CAGAAT
aactctccaccccaaatcaa

SEQ ID NO: 20739 - DNA, 20 bp, Artificial Sequence
  Description of Artificial Sequence: Synthetic oligonucleotide
  Target: LAMA2; (-) strand; PAM type: NNGRRT; PAM sequence: AGGAAT
gaaaggtaacaaggatatcc

SEQ ID NO: 20740 - DNA, 20 bp, Artificial Sequence
  Description of Artificial Sequence: Synthetic oligonucleotide
  Target: LAMA2; (-) strand; PAM type: NNGRRT; PAM sequence: AAGGAT
caacgagacagaaaggtaac

SEQ ID NO: 20741 - DNA, 20 bp, Artificial Sequence
  Description of Artificial Sequence: Synthetic oligonucleotide
  Target: LAMA2; (-) strand; PAM type: NNGRRT; PAM sequence: AGGGAT
aggccattacataatggtaa

SEQ ID NO: 20742 - DNA, 20 bp, Artificial Sequence
  Description of Artificial Sequence: Synthetic oligonucleotide
  Target: LAMA2; (-) strand; PAM type: NNGRRT; PAM sequence: AGGGGT
aatagaaaacaaaaaaaggc

SEQ ID NO: 20743 - DNA, 20 bp, Artificial Sequence
  Description of Artificial Sequence: Synthetic oligonucleotide
  Target: LAMA2; (-) strand; PAM type: NNGRRT; PAM sequence: AGGGAT
cacacacaggctcaaaataa

SEQ ID NO: 20744 - DNA, 20 bp, Artificial Sequence
  Description of Artificial Sequence: Synthetic oligonucleotide
  Target: LAMA2; (-) strand; PAM type: NNGRRT; PAM sequence: TTGGAT
aaaagacacagactggcaaa

SEQ ID NO: 20745 - DNA, 20 bp, Artificial Sequence
  Description of Artificial Sequence: Synthetic oligonucleotide
  Target: LAMA2; (-) strand; PAM type: NNGRRT; PAM sequence: CAGGAT
accagctaacatcataatga

SEQ ID NO: 20746 - DNA, 20 bp, Artificial Sequence
  Description of Artificial Sequence: Synthetic oligonucleotide
  Target: LAMA2; (-) strand; PAM type: NNGRRT; PAM sequence: CAGAAT
aaagaaaagaattttcaacc

SEQ ID NO: 20747 - DNA, 20 bp, Artificial Sequence
  Description of Artificial Sequence: Synthetic oligonucleotide
  Target: LAMA2; (-) strand; PAM type: NNGRRT; PAM sequence: AAGAAT
tattcaacattcttaaagaa

SEQ ID NO: 20748 - DNA, 20 bp, Artificial Sequence
  Description of Artificial Sequence: Synthetic oligonucleotide
  Target: LAMA2; (-) strand; PAM type: NNGRRT; PAM sequence: GAGAGT
agaaactctacaagccggaa

SEQ ID NO: 20749 - DNA, 20 bp, Artificial Sequence
  Description of Artificial Sequence: Synthetic oligonucleotide
  Target: LAMA2; (-) strand; PAM type: NNGRRT; PAM sequence: TCGGGT
agggcagccagagagaaagg

SEQ ID NO: 20750 - DNA, 20 bp, Artificial Sequence
  Description of Artificial Sequence: Synthetic oligonucleotide
  Target: LAMA2; (-) strand; PAM type: NNGRRT; PAM sequence: GAGAAT
attcaaattcaggaaacaca

SEQ ID NO: 20751 - DNA, 20 bp, Artificial Sequence
  Description of Artificial Sequence: Synthetic oligonucleotide
  Target: LAMA2; (-) strand; PAM type: NNGRRT; PAM sequence: CAGGAT
ccaagttggaaaacattctg

SEQ ID NO: 20752 - DNA, 20 bp, Artificial Sequence
  Description of Artificial Sequence: Synthetic oligonucleotide
  Target: LAMA2; (-) strand; PAM type: NNGRRT; PAM sequence: GAGAAT
gggtacatgaaagtggcggg

SEQ ID NO: 20753 - DNA, 20 bp, Artificial Sequence
  Description of Artificial Sequence: Synthetic oligonucleotide
  Target: LAMA2; (-) strand; PAM type: NNGRRT; PAM sequence: TTGGGT
aagaccaaatctatgcctga

SEQ ID NO: 20754 - DNA, 20 bp, Artificial Sequence
  Description of Artificial Sequence: Synthetic oligonucleotide
  Target: LAMA2; (-) strand; PAM type: NNGRRT; PAM sequence: AAGAGT
gaagagaagtttagagaaaa

SEQ ID NO: 20755 - DNA, 20 bp, Artificial Sequence
  Description of Artificial Sequence: Synthetic oligonucleotide
  Target: LAMA2; (-) strand; PAM type: NNGRRT; PAM sequence: ATGAAT
tatcagtgattgaagatcaa

SEQ ID NO: 20756 - DNA, 20 bp, Artificial Sequence
  Description of Artificial Sequence: Synthetic oligonucleotide
  Target: LAMA2; (-) strand; PAM type: NNGRRT; PAM sequence: AAGGGT
tgattcgatcaactggaaga

SEQ ID NO: 20757 - DNA, 20 bp, Artificial Sequence
  Description of Artificial Sequence: Synthetic oligonucleotide
  Target: LAMA2; (-) strand; PAM type: NNGRRT; PAM sequence: TAGAAT
agataggacaaatggctacc

SEQ ID NO: 20758 - DNA, 20 bp, Artificial Sequence
  Description of Artificial Sequence: Synthetic oligonucleotide
  Target: LAMA2; (-) strand; PAM type: NNGRRT; PAM sequence: AGGAGT
ctggatggagaatgactttg

SEQ ID NO: 20759 - DNA, 20 bp, Artificial Sequence
  Description of Artificial Sequence: Synthetic oligonucleotide
  Target: LAMA2; (-) strand; PAM type: NNGRRT; PAM sequence: GAGAAT
caatggaacaaagctggatg

SEQ ID NO: 20760 - DNA, 20 bp, Artificial Sequence
  Description of Artificial Sequence: Synthetic oligonucleotide
  Target: LAMA2; (-) strand; PAM type: NNGRRT; PAM sequence: CTGGAT
ttgccagcaatggaacaaag

SEQ ID NO: 20761 - DNA, 20 bp, Artificial Sequence
  Description of Artificial Sequence: Synthetic oligonucleotide
  Target: LAMA2; (-) strand; PAM type: NNGRRT; PAM sequence: AGGAAT
gagcgcctctcctcctccaa

SEQ ID NO: 20762 - DNA, 20 bp, Artificial Sequence
  Description of Artificial Sequence: Synthetic oligonucleotide
  Target: LAMA2; (-) strand; PAM type: NNGRRT; PAM sequence: GAGGGT
actccaacagacctgcagct

SEQ ID NO: 20763 - DNA, 20 bp, Artificial Sequence
  Description of Artificial Sequence: Synthetic oligonucleotide
  Target: LAMA2; (-) strand; PAM type: NNGRRT; PAM sequence: TGGAGT
atacccaggcaaacagggtc

SEQ ID NO: 20764 - DNA, 20 bp, Artificial Sequence
  Description of Artificial Sequence: Synthetic oligonucleotide
  Target: LAMA2; (-) strand; PAM type: NNGRRT; PAM sequence: CAGGGT
gctgctgatacccaggcaaa

SEQ ID NO: 20765 - DNA, 20 bp, Artificial Sequence
  Description of Artificial Sequence: Synthetic oligonucleotide
  Target: LAMA2; (-) strand; PAM type: NNGRRT; PAM sequence: CCGAGT
cagactgacatcccacacgg

SEQ ID NO: 20766 - DNA, 20 bp, Artificial Sequence
  Description of Artificial Sequence: Synthetic oligonucleotide
  Target: LAMA2; (-) strand; PAM type: NNGRRT; PAM sequence: CTGAAT
ctcaagtggatccctgagcc

SEQ ID NO: 20767 - DNA, 20 bp, Artificial Sequence
  Description of Artificial Sequence: Synthetic oligonucleotide
  Target: LAMA2; (-) strand; PAM type: NNGRRT; PAM sequence: GTGGAT
tgaacagactgcctcctcaa

SEQ ID NO: 20768 - DNA, 20 bp, Artificial Sequence
  Description of Artificial Sequence: Synthetic oligonucleotide
  Target: LAMA2; (-) strand; PAM type: NNGRRT; PAM sequence: GAGAAT
cagcatggagtttgagatct

SEQ ID NO: 20769 - DNA, 20 bp, Artificial Sequence
  Description of Artificial Sequence: Synthetic oligonucleotide
  Target: LAMA2; (-) strand; PAM type: NNGRRT; PAM sequence: TGGAGT
gagtagtggttctcccagca

SEQ ID NO: 20770 - DNA, 20 bp, Artificial Sequence
  Description of Artificial Sequence: Synthetic oligonucleotide
  Target: LAMA2; (-) strand; PAM type: NNGRRT; PAM sequence: GAGAGT
ccctgtctgacagctttgaa

SEQ ID NO: 20771 - DNA, 20 bp, Artificial Sequence
  Description of Artificial Sequence: Synthetic oligonucleotide
  Target: LAMA2; (-) strand; PAM type: NNGRRT; PAM sequence: GGGAGT
cctctgtagactccacctct

SEQ ID NO: 20772 - DNA, 20 bp, Artificial Sequence
  Description of Artificial Sequence: Synthetic oligonucleotide
  Target: LAMA2; (-) strand; PAM type: NNGRRT; PAM sequence: AAGGAT
ggtgaagcccactgcagctc

SEQ ID NO: 20773 - DNA, 20 bp, Artificial Sequence
  Description of Artificial Sequence: Synthetic oligonucleotide
  Target: LAMA2; (-) strand; PAM type: NNGRRT; PAM sequence: CTGGGT
ctgtggctgggaagcttgaa

SEQ ID NO: 20774 - DNA, 20 bp, Artificial Sequence
  Description of Artificial Sequence: Synthetic oligonucleotide
  Target: LAMA2; (-) strand; PAM type: NNGRRT; PAM sequence: TTGAGT
gcgcccgccattgccgaggc

SEQ ID NO: 20775 - DNA, 20 bp, Artificial Sequence
  Description of Artificial Sequence: Synthetic oligonucleotide
  Target: LAMA2; (-) strand; PAM type: NNGRRT; PAM sequence: GAGGGT
tatatcccacacctggctcg

SEQ ID NO: 20776 - DNA, 20 bp, Artificial Sequence
  Description of Artificial Sequence: Synthetic oligonucleotide
  Target: LAMA2; (-) strand; PAM type: NNGRRT; PAM sequence: TCGGGT
gacagacggcacctggaaaa

SEQ ID NO: 20777 - DNA, 20 bp, Artificial Sequence
  Description of Artificial Sequence: Synthetic oligonucleotide
  Target: LAMA2; (-) strand; PAM type: NNGRRT; PAM sequence: AGGGGT
cacctcacccgggaagcaca

SEQ ID NO: 20778 - DNA, 20 bp, Artificial Sequence
  Description of Artificial Sequence: Synthetic oligonucleotide
  Target: LAMA2; (-) strand; PAM type: NNGRRT; PAM sequence: GTGGGT
tcactggggcttgtctgaca

SEQ ID NO: 20779 - DNA, 20 bp, Artificial Sequence
  Description of Artificial Sequence: Synthetic oligonucleotide
  Target: LAMA2; (-) strand; PAM type: NNGRRT; PAM sequence: ATGGGT
cagcatgagcgacacagaat

SEQ ID NO: 20780 - DNA, 20 bp, Artificial Sequence
  Description of Artificial Sequence: Synthetic oligonucleotide
  Target: LAMA2; (-) strand; PAM type: NNGRRT; PAM sequence: CAGAAT
agctcccagcatgagcgaca

SEQ ID NO: 20781 - DNA, 20 bp, Artificial Sequence
  Description of Artificial Sequence: Synthetic oligonucleotide
  Target: LAMA2; (-) strand; PAM type: NNGRRT; PAM sequence: TGGAAT
tttttagaaaccagtataat

SEQ ID NO: 20782 - DNA, 20 bp, Artificial Sequence
  Description of Artificial Sequence: Synthetic oligonucleotide
  Target: LAMA2; (-) strand; PAM type: NNGRRT; PAM sequence: CAGGGT
attataattaaaaatgcctt

SEQ ID NO: 20783 - DNA, 20 bp, Artificial Sequence
  Description of Artificial Sequence: Synthetic oligonucleotide
  Target: LAMA2; (-) strand; PAM type: NNGRRT; PAM sequence: TAGAGT
ttacctagaacaggagtctt

SEQ ID NO: 20784 - DNA, 20 bp, Artificial Sequence
  Description of Artificial Sequence: Synthetic oligonucleotide
  Target: LAMA2; (-) strand; PAM type: NNGRRT; PAM sequence: AGGAGT
actaatcaattacctagaac

SEQ ID NO: 20785 - DNA, 20 bp, Artificial Sequence
  Description of Artificial Sequence: Synthetic oligonucleotide
  Target: LAMA2; (-) strand; PAM type: NNGRRT; PAM sequence: AAGAAT
tggattagctgagagcagta

SEQ ID NO: 20786 - DNA, 20 bp, Artificial Sequence
  Description of Artificial Sequence: Synthetic oligonucleotide
  Target: LAMA2; (-) strand; PAM type: NNGRRT; PAM sequence: ATGGAT
tggatgtctaaaaccatata

SEQ ID NO: 20787 - DNA, 20 bp, Artificial Sequence
  Description of Artificial Sequence: Synthetic oligonucleotide
  Target: LAMA2; (-) strand; PAM type: NNGRRT; PAM sequence: CTGGAT
tattcctttcagtgtctatc

SEQ ID NO: 20788 - DNA, 20 bp, Artificial Sequence
  Description of Artificial Sequence: Synthetic oligonucleotide
  Target: LAMA2; (-) strand; PAM type: NNGRRT; PAM sequence: ATGAAT
aaattcaatacatacacaca

SEQ ID NO: 20789 - DNA, 20 bp, Artificial Sequence
  Description of Artificial Sequence: Synthetic oligonucleotide
  Target: LAMA2; (-) strand; PAM type: NNGRRT; PAM sequence: ATGAAT
ttgaatattgaatacataca

SEQ ID NO: 20790 - DNA, 20 bp, Artificial Sequence
  Description of Artificial Sequence: Synthetic oligonucleotide
  Target: LAMA2; (-) strand; PAM type: NNGRRT; PAM sequence: TTGAAT
atgaatacatacattgaata

SEQ ID NO: 20791 - DNA, 20 bp, Artificial Sequence
  Description of Artificial Sequence: Synthetic oligonucleotide
  Target: LAMA2; (-) strand; PAM type: NNGRRT; PAM sequence: TTGAAT
aggatcaatgaatacataca

SEQ ID NO: 20792 - DNA, 20 bp, Artificial Sequence
  Description of Artificial Sequence: Synthetic oligonucleotide
  Target: LAMA2; (-) strand; PAM type: NNGRRT; PAM sequence: ATGAAT
atcaagtatatgcaggatca

SEQ ID NO: 20793 - DNA, 20 bp, Artificial Sequence
  Description of Artificial Sequence: Synthetic oligonucleotide
  Target: LAMA2; (-) strand; PAM type: NNGRRT; PAM sequence: CAGGAT
atcaaatcatcaagtatatg

SEQ ID NO: 20794 - DNA, 20 bp, Artificial Sequence
  Description of Artificial Sequence: Synthetic oligonucleotide
  Target: LAMA2; (-) strand; PAM type: NNGRRT; PAM sequence: TGGAAT
ttctggcaagttaatataac

SEQ ID NO: 20795 - DNA, 20 bp, Artificial Sequence
  Description of Artificial Sequence: Synthetic oligonucleotide
  Target: LAMA2; (-) strand; PAM type: NNGRRT; PAM sequence: TAGAAT
ttaatattctctcttctaac

SEQ ID NO: 20796 - DNA, 20 bp, Artificial Sequence
  Description of Artificial Sequence: Synthetic oligonucleotide
  Target: LAMA2; (-) strand; PAM type: NNGRRT; PAM sequence: GAGGGT
cccactcttaccccatcctt

SEQ ID NO: 20797 - DNA, 20 bp, Artificial Sequence
  Description of Artificial Sequence: Synthetic oligonucleotide
  Target: LAMA2; (-) strand; PAM type: NNGRRT; PAM sequence: ATGAAT
acttcacagctaatgactgg

SEQ ID NO: 20798 - DNA, 20 bp, Artificial Sequence
  Description of Artificial Sequence: Synthetic oligonucleotide
  Target: LAMA2; (-) strand; PAM type: NNGRRT; PAM sequence: CTGGAT
caagacttcacagctaatga

SEQ ID NO: 20799 - DNA, 20 bp, Artificial Sequence
  Description of Artificial Sequence: Synthetic oligonucleotide
  Target: LAMA2; (-) strand; PAM type: NNGRRT; PAM sequence: TGGAAT
cattaccttcaaaatgtatc

SEQ ID NO: 20800 - DNA, 20 bp, Artificial Sequence
  Description of Artificial Sequence: Synthetic oligonucleotide
  Target: LAMA2; (-) strand; PAM type: NNGRRT; PAM sequence: CTGAGT
actttatataattagctaag

SEQ ID NO: 20801 - DNA, 20 bp, Artificial Sequence
  Description of Artificial Sequence: Synthetic oligonucleotide
  Target: LAMA2; (-) strand; PAM type: NNGRRT; PAM sequence: ATGGAT
tcttctggtttaaatgacat

SEQ ID NO: 20802 - DNA, 20 bp, Artificial Sequence
  Description of Artificial Sequence: Synthetic oligonucleotide
  Target: LAMA2; (-) strand; PAM type: NNGRRT; PAM sequence: TGGGGT
gtttcctaacctctaaatgt

SEQ ID NO: 20803 - DNA, 20 bp, Artificial Sequence
  Description of Artificial Sequence: Synthetic oligonucleotide
  Target: LAMA2; (-) strand; PAM type: NNGRRT; PAM sequence: TCGAAT
actcttctcaaggtcattgg

SEQ ID NO: 20804 - DNA, 20 bp, Artificial Sequence
  Description of Artificial Sequence: Synthetic oligonucleotide
  Target: LAMA2; (-) strand; PAM type: NNGRRT; PAM sequence: AAGAAT
tcaattattttctattttct

SEQ ID NO: 20805 - DNA, 20 bp, Artificial Sequence
  Description of Artificial Sequence: Synthetic oligonucleotide
  Target: LAMA2; (-) strand; PAM type: NNGRRT; PAM sequence: TTGAAT
tcatactttctcttttctcc

SEQ ID NO: 20806 - DNA, 20 bp, Artificial Sequence
  Description of Artificial Sequence: Synthetic oligonucleotide
  Target: LAMA2; (-) strand; PAM type: NNGRRT; PAM sequence: CTGGAT
ccatgttctttgctatgttc

SEQ ID NO: 20807 - DNA, 20 bp, Artificial Sequence
  Description of Artificial Sequence: Synthetic oligonucleotide
  Target: LAMA2; (-) strand; PAM type: NNGRRT; PAM sequence: CTGGAT
ctgtacctgcaactgctgag

SEQ ID NO: 20808 - DNA, 20 bp, Artificial Sequence
  Description of Artificial Sequence: Synthetic oligonucleotide
  Target: LAMA2; (-) strand; PAM type: NNGRRT; PAM sequence: GAGGGT
atgggaaatcgctgtagctt

SEQ ID NO: 20809 - DNA, 20 bp, Artificial Sequence
  Description of Artificial Sequence: Synthetic oligonucleotide
  Target: LAMA2; (-) strand; PAM type: NNGRRT; PAM sequence: AAGGAT
ttacctttatcctttaggcc

SEQ ID NO: 20810 - DNA, 20 bp, Artificial Sequence
  Description of Artificial Sequence: Synthetic oligonucleotide
  Target: LAMA2; (-) strand; PAM type: NNGRRT; PAM sequence: AAGGAT
aatggagttaaagcactgtc

SEQ ID NO: 20811 - DNA, 20 bp, Artificial Sequence
  Description of Artificial Sequence: Synthetic oligonucleotide
  Target: LAMA2; (-) strand; PAM type: NNGRRT; PAM sequence: TGGAGT
taaaaaagaaggaaatgcaa

SEQ ID NO: 20812 - DNA, 20 bp, Artificial Sequence
  Description of Artificial Sequence: Synthetic oligonucleotide
  Target: LAMA2; (-) strand; PAM type: NNGRRT; PAM sequence: ATGAAT
aatacattccaaatatatgc

SEQ ID NO: 20813 - DNA, 20 bp, Artificial Sequence
  Description of Artificial Sequence: Synthetic oligonucleotide
  Target: LAMA2; (-) strand; PAM type: NNGRRT; PAM sequence: CAGAAT
atggaagggaagtgaacaac

SEQ ID NO: 20814 - DNA, 20 bp, Artificial Sequence
  Description of Artificial Sequence: Synthetic oligonucleotide
  Target: LAMA2; (-) strand; PAM type: NNGRRT; PAM sequence: ATGAAT
tagaacaattcaatgtcaac

SEQ ID NO: 20815 - DNA, 20 bp, Artificial Sequence
  Description of Artificial Sequence: Synthetic oligonucleotide
  Target: LAMA2; (-) strand; PAM type: NNGRRT; PAM sequence: AGGAAT
tttaaggaactaaaggacaa

SEQ ID NO: 20816 - DNA, 20 bp, Artificial Sequence
  Description of Artificial Sequence: Synthetic oligonucleotide
  Target: LAMA2; (-) strand; PAM type: NNGRRT; PAM sequence: ATGGGT
aagaaagaggaggaaagtgc

SEQ ID NO: 20817 - DNA, 20 bp, Artificial Sequence
  Description of Artificial Sequence: Synthetic oligonucleotide
  Target: LAMA2; (-) strand; PAM type: NNGRRT; PAM sequence: GTGAGT
taaatttagtaaaacttaaa

SEQ ID NO: 20818 - DNA, 20 bp, Artificial Sequence
  Description of Artificial Sequence: Synthetic oligonucleotide
  Target: LAMA2; (-) strand; PAM type: NNGRRT; PAM sequence: AAGAGT
atataaatcatgtcaaaagt

SEQ ID NO: 20819 - DNA, 20 bp, Artificial Sequence
  Description of Artificial Sequence: Synthetic oligonucleotide
  Target: LAMA2; (-) strand; PAM type: NNGRRT; PAM sequence: TAGAAT
ggaagaagctgagatctcct

SEQ ID NO: 20820 - DNA, 20 bp, Artificial Sequence
  Description of Artificial Sequence: Synthetic oligonucleotide
  Target: LAMA2; (-) strand; PAM type: NNGRRT; PAM sequence: AAGAAT
ctggcagacactgctataat

SEQ ID NO: 20821 - DNA, 20 bp, Artificial Sequence
  Description of Artificial Sequence: Synthetic oligonucleotide
  Target: LAMA2; (-) strand; PAM type: NNGRRT; PAM sequence: AGGAGT
cacagtcttcagaaattaat

SEQ ID NO: 20822 - DNA, 20 bp, Artificial Sequence
  Description of Artificial Sequence: Synthetic oligonucleotide
  Target: LAMA2; (-) strand; PAM type: NNGRRT; PAM sequence: TAGGAT
ctatattttgttctaagata

SEQ ID NO: 20823 - DNA, 20 bp, Artificial Sequence
  Description of Artificial Sequence: Synthetic oligonucleotide
  Target: LAMA2; (-) strand; PAM type: NNGRRT; PAM sequence: AGGAAT
taaatatggagaaaaaaatc

SEQ ID NO: 20824 - DNA, 20 bp, Artificial Sequence
  Description of Artificial Sequence: Synthetic oligonucleotide
  Target: LAMA2; (-) strand; PAM type: NNGRRT; PAM sequence: CAGAAT
tacctgagggattcactagc

SEQ ID NO: 20825 - DNA, 20 bp, Artificial Sequence
  Description of Artificial Sequence: Synthetic oligonucleotide
  Target: LAMA2; (-) strand; PAM type: NNGRRT; PAM sequence: AGGGAT
tcaatataaagaaatacctg

SEQ ID NO: 20826 - DNA, 20 bp, Artificial Sequence
  Description of Artificial Sequence: Synthetic oligonucleotide
  Target: LAMA2; (-) strand; PAM type: NNGRRT; PAM sequence: ATGGGT
caggttctggaaattcagct

SEQ ID NO: 20827 - DNA, 20 bp, Artificial Sequence
  Description of Artificial Sequence: Synthetic oligonucleotide
  Target: LAMA2; (-) strand; PAM type: NNGRRT; PAM sequence: CAGGAT
ttcggtccacctggataacg

SEQ ID NO: 20828 - DNA, 20 bp, Artificial Sequence
  Description of Artificial Sequence: Synthetic oligonucleotide
  Target: LAMA2; (-) strand; PAM type: NNGRRT; PAM sequence: CTGGAT
tgtgactggattcggtccac

SEQ ID NO: 20829 - DNA, 20 bp, Artificial Sequence
  Description of Artificial Sequence: Synthetic oligonucleotide
  Target: LAMA2; (-) strand; PAM type: NNGRRT; PAM sequence: CTGGAT
acttttaaggtctcatgtga

SEQ ID NO: 20830 - DNA, 20 bp, Artificial Sequence
  Description of Artificial Sequence: Synthetic oligonucleotide
  Target: LAMA2; (-) strand; PAM type: NNGRRT; PAM sequence: ATGAAT
catctttaaagccagaaatg

SEQ ID NO: 20831 - DNA, 20 bp, Artificial Sequence
  Description of Artificial Sequence: Synthetic oligonucleotide
  Target: LAMA2; (-) strand; PAM type: NNGRRT; PAM sequence: CAGAAT
ttgttcattcaggttgttgg

SEQ ID NO: 20832 - DNA, 20 bp, Artificial Sequence
  Description of Artificial Sequence: Synthetic oligonucleotide
  Target: LAMA2; (-) strand; PAM type: NNGRRT; PAM sequence: GAGAAT
cctttctggtggctctagag

SEQ ID NO: 20833 - DNA, 20 bp, Artificial Sequence
  Description of Artificial Sequence: Synthetic oligonucleotide
  Target: LAMA2; (-) strand; PAM type: NNGRRT; PAM sequence: ATGGAT
actaaaatgatggtgtcggc

SEQ ID NO: 20834 - DNA, 20 bp, Artificial Sequence
  Description of Artificial Sequence: Synthetic oligonucleotide
  Target: LAMA2; (-) strand; PAM type: NNGRRT; PAM sequence: ATGGGT
ctgtaggcgaatattccaat

SEQ ID NO: 20835 - DNA, 20 bp, Artificial Sequence
  Description of Artificial Sequence: Synthetic oligonucleotide
  Target: LAMA2; (-) strand; PAM type: NNGRRT; PAM sequence: GCGAAT
gttggaatacagttctgtag

SEQ ID NO: 20836 - DNA, 20 bp, Artificial Sequence
  Description of Artificial Sequence: Synthetic oligonucleotide
  Target: LAMA2; (-) strand; PAM type: NNGRRT; PAM sequence: TGGAAT
tccaacatatgcatccttgt

SEQ ID NO: 20837 - DNA, 20 bp, Artificial Sequence
  Description of Artificial Sequence: Synthetic oligonucleotide
  Target: LAMA2; (-) strand; PAM type: NNGRRT; PAM sequence: GTGAAT
attatctcatggttctgtag

SEQ ID NO: 20838 - DNA, 20 bp, Artificial Sequence
  Description of Artificial Sequence: Synthetic oligonucleotide
  Target: LAMA2; (-) strand; PAM type: NNGRRT; PAM sequence: AAGGGT
ccctaatccctgcattgtgc

SEQ ID NO: 20839 - DNA, 20 bp, Artificial Sequence
  Description of Artificial Sequence: Synthetic oligonucleotide
  Target: LAMA2; (-) strand; PAM type: NNGRRT; PAM sequence: AAGAAT
tctctaacacactttattat

SEQ ID NO: 20840 - DNA, 20 bp, Artificial Sequence
  Description of Artificial Sequence: Synthetic oligonucleotide
  Target: LAMA2; (-) strand; PAM type: NNGRRT; PAM sequence: GCGGAT
caagtccggtccatttatac

SEQ ID NO: 20841 - DNA, 20 bp, Artificial Sequence
  Description of Artificial Sequence: Synthetic oligonucleotide
  Target: LAMA2; (-) strand; PAM type: NNGRRT; PAM sequence: CGGAGT
ttctttttgctctactggag

SEQ ID NO: 20842 - DNA, 20 bp, Artificial Sequence
  Description of Artificial Sequence: Synthetic oligonucleotide
  Target: LAMA2; (-) strand; PAM type: NNGRRT; PAM sequence: AAGAGT
cttggtcagatgcggaaaaa

SEQ ID NO: 20843 - DNA, 20 bp, Artificial Sequence
  Description of Artificial Sequence: Synthetic oligonucleotide
  Target: LAMA2; (-) strand; PAM type: NNGRRT; PAM sequence: CAGGAT
gcaaagccgctcttaacctt

SEQ ID NO: 20844 - DNA, 20 bp, Artificial Sequence
  Description of Artificial Sequence: Synthetic oligonucleotide
  Target: LAMA2; (-) strand; PAM type: NNGRRT; PAM sequence: AAGAAT
gtctcatattggagtccagt

SEQ ID NO: 20845 - DNA, 20 bp, Artificial Sequence
  Description of Artificial Sequence: Synthetic oligonucleotide
  Target: LAMA2; (-) strand; PAM type: NNGRRT; PAM sequence: TGGAGT
atagaaataaagtctcatat

SEQ ID NO: 20846 - DNA, 20 bp, Artificial Sequence
  Description of Artificial Sequence: Synthetic oligonucleotide
  Target: LAMA2; (-) strand; PAM type: NNGRRT; PAM sequence: ATGGAT
tctccaggccttgcaaacca

SEQ ID NO: 20847 - DNA, 20 bp, Artificial Sequence
  Description of Artificial Sequence: Synthetic oligonucleotide
  Target: LAMA2; (-) strand; PAM type: NNGRRT; PAM sequence: TTGGAT
tataatgaatgtttgacttt

SEQ ID NO: 20848 - DNA, 20 bp, Artificial Sequence
  Description of Artificial Sequence: Synthetic oligonucleotide
  Target: LAMA2; (-) strand; PAM type: NNGRRT; PAM sequence: ATGAAT
agattggaagaattattata

SEQ ID NO: 20849 - DNA, 20 bp, Artificial Sequence
  Description of Artificial Sequence: Synthetic oligonucleotide
  Target: LAMA2; (-) strand; PAM type: NNGRRT; PAM sequence: AAGAAT
tataacaacaactagattgg

SEQ ID NO: 20850 - DNA, 20 bp, Artificial Sequence
  Description of Artificial Sequence: Synthetic oligonucleotide
  Target: LAMA2; (-) strand; PAM type: NNGRRT; PAM sequence: TGGGGT
actcaagaaattcagcaaaa

SEQ ID NO: 20851 - DNA, 20 bp, Artificial Sequence
  Description of Artificial Sequence: Synthetic oligonucleotide
  Target: LAMA2; (-) strand; PAM type: NNGRRT; PAM sequence: ATGGAT
tttaaactgtatttatgcta

SEQ ID NO: 20852 - DNA, 20 bp, Artificial Sequence
  Description of Artificial Sequence: Synthetic oligonucleotide
  Target: LAMA2; (-) strand; PAM type: NNGRRT; PAM sequence: TTGAAT
attcctaggtggtttatcta

SEQ ID NO: 20853 - DNA, 20 bp, Artificial Sequence
  Description of Artificial Sequence: Synthetic oligonucleotide
  Target: LAMA2; (-) strand; PAM type: NNGRRT; PAM sequence: CAGAGT
tatctagtttcataaagaca

SEQ ID NO: 20854 - DNA, 20 bp, Artificial Sequence
  Description of Artificial Sequence: Synthetic oligonucleotide
  Target: LAMA2; (-) strand; PAM type: NNGRRT; PAM sequence: CTGAGT
ggctactaagatgaaactgg

SEQ ID NO: 20855 - DNA, 20 bp, Artificial Sequence
  Description of Artificial Sequence: Synthetic oligonucleotide
  Target: LAMA2; (-) strand; PAM type: NNGRRT; PAM sequence: TAGAAT
catttccatctaaaataaac

SEQ ID NO: 20856 - DNA, 20 bp, Artificial Sequence
  Description of Artificial Sequence: Synthetic oligonucleotide
  Target: LAMA2; (-) strand; PAM type: NNGRRT; PAM sequence: TTGAAT
aactaagttcttgtacaggt

SEQ ID NO: 20857 - DNA, 20 bp, Artificial Sequence
  Description of Artificial Sequence: Synthetic oligonucleotide
  Target: LAMA2; (-) strand; PAM type: NNGRRT; PAM sequence: GTGAAT
tttcacatgggcattcacta

SEQ ID NO: 20858 - DNA, 20 bp, Artificial Sequence
  Description of Artificial Sequence: Synthetic oligonucleotide
  Target: LAMA2; (-) strand; PAM type: NNGRRT; PAM sequence: TTGGAT
aaggcttggtaaaagcaaaa

SEQ ID NO: 20859 - DNA, 20 bp, Artificial Sequence
  Description of Artificial Sequence: Synthetic oligonucleotide
  Target: LAMA2; (-) strand; PAM type: NNGRRT; PAM sequence: TAGAAT
gtgtctttgagtcttcttgt

SEQ ID NO: 20860 - DNA, 20 bp, Artificial Sequence
  Description of Artificial Sequence: Synthetic oligonucleotide
  Target: LAMA2; (-) strand; PAM type: NNGRRT; PAM sequence: TTGAGT
cagggggagcaccagtgtct

SEQ ID NO: 20861 - DNA, 20 bp, Artificial Sequence
  Description of Artificial Sequence: Synthetic oligonucleotide
  Target: LAMA2; (-) strand; PAM type: NNGRRT; PAM sequence: CAGAAT
ttgaagaggtgctgaccatg

SEQ ID NO: 20862 - DNA, 20 bp, Artificial Sequence
  Description of Artificial Sequence: Synthetic oligonucleotide
  Target: LAMA2; (-) strand; PAM type: NNGRRT; PAM sequence: AGGGGT
acactttctcatactctcaa

SEQ ID NO: 20863 - DNA, 20 bp, Artificial Sequence
  Description of Artificial Sequence: Synthetic oligonucleotide
  Target: LAMA2; (-) strand; PAM type: NNGRRT; PAM sequence: AAGAGT
gacattccaaagttcctgct

SEQ ID NO: 20864 - DNA, 20 bp, Artificial Sequence
  Description of Artificial Sequence: Synthetic oligonucleotide
  Target: LAMA2; (-) strand; PAM type: NNGRRT; PAM sequence: CAGAGT
tttactattttctaagaaaa

SEQ ID NO: 20865 - DNA, 20 bp, Artificial Sequence
  Description of Artificial Sequence: Synthetic oligonucleotide
  Target: LAMA2; (-) strand; PAM type: NNGRRT; PAM sequence: AGGAGT
ataggtaccctttagaacaa

SEQ ID NO: 20866 - DNA, 20 bp, Artificial Sequence
  Description of Artificial Sequence: Synthetic oligonucleotide
  Target: LAMA2; (-) strand; PAM type: NNGRRT; PAM sequence: CAGAGT
attagaataaatagccttgg

SEQ ID NO: 20867 - DNA, 20 bp, Artificial Sequence
  Description of Artificial Sequence: Synthetic oligonucleotide
  Target: LAMA2; (-) strand; PAM type: NNGRRT; PAM sequence: TAGAAT
atcttgagtagataaatcat

SEQ ID NO: 20868 - DNA, 20 bp, Artificial Sequence
  Description of Artificial Sequence: Synthetic oligonucleotide
  Target: LAMA2; (-) strand; PAM type: NNGRRT; PAM sequence: TTGAGT
tcactttatttctttttatc

SEQ ID NO: 20869 - DNA, 20 bp, Artificial Sequence
  Description of Artificial Sequence: Synthetic oligonucleotide
  Target: LAMA2; (-) strand; PAM type: NNGRRT; PAM sequence: TTGAGT
aagctgagattatgtctcag

SEQ ID NO: 20870 - DNA, 20 bp, Artificial Sequence
  Description of Artificial Sequence: Synthetic oligonucleotide
  Target: LAMA2; (-) strand; PAM type: NNGRRT; PAM sequence: TAGAAT
acaaaatgaaaaccaaaata

SEQ ID NO: 20871 - DNA, 20 bp, Artificial Sequence
  Description of Artificial Sequence: Synthetic oligonucleotide
  Target: LAMA2; (-) strand; PAM type: NNGRRT; PAM sequence: GGGAGT
cattgaagaaaacaagggaa

SEQ ID NO: 20872 - DNA, 20 bp, Artificial Sequence
  Description of Artificial Sequence: Synthetic oligonucleotide
  Target: LAMA2; (-) strand; PAM type: NNGRRT; PAM sequence: AAGGGT
atattcagaggtttttatag

SEQ ID NO: 20873 - DNA, 20 bp, Artificial Sequence
  Description of Artificial Sequence: Synthetic oligonucleotide
  Target: LAMA2; (-) strand; PAM type: NNGRRT; PAM sequence: AGGGGT
aaagcaaaaagtgttttata

SEQ ID NO: 20874 - DNA, 20 bp, Artificial Sequence
  Description of Artificial Sequence: Synthetic oligonucleotide
  Target: LAMA2; (-) strand; PAM type: NNGRRT; PAM sequence: CTGAAT
agccttactacctggaatat

SEQ ID NO: 20875 - DNA, 20 bp, Artificial Sequence
  Description of Artificial Sequence: Synthetic oligonucleotide
  Target: LAMA2; (-) strand; PAM type: NNGRRT; PAM sequence: TGGAAT
aaaatatcagccttactacc

SEQ ID NO: 20876 - DNA, 20 bp, Artificial Sequence
  Description of Artificial Sequence: Synthetic oligonucleotide
  Target: LAMA2; (-) strand; PAM type: NNGRRT; PAM sequence: AAGAGT
agaatagaaatagggaaaat

SEQ ID NO: 20877 - DNA, 20 bp, Artificial Sequence
  Description of Artificial Sequence: Synthetic oligonucleotide
  Target: LAMA2; (-) strand; PAM type: NNGRRT; PAM sequence: AAGAAT
attaatctattaaaacatgg

SEQ ID NO: 20878 - DNA, 20 bp, Artificial Sequence
  Description of Artificial Sequence: Synthetic oligonucleotide
  Target: LAMA2; (-) strand; PAM type: NNGRRT; PAM sequence: ATGAGT
gtgcatgtacatatatacac

SEQ ID NO: 20879 - DNA, 20 bp, Artificial Sequence
  Description of Artificial Sequence: Synthetic oligonucleotide
  Target: LAMA2; (-) strand; PAM type: NNGRRT; PAM sequence: GTGAGT
atatatatacttatatgtgt

SEQ ID NO: 20880 - DNA, 20 bp, Artificial Sequence
  Description of Artificial Sequence: Synthetic oligonucleotide
  Target: LAMA2; (-) strand; PAM type: NNGRRT; PAM sequence: TGGAAT
aatgaagaaactatccaata

SEQ ID NO: 20881 - DNA, 20 bp, Artificial Sequence
  Description of Artificial Sequence: Synthetic oligonucleotide
  Target: LAMA2; (-) strand; PAM type: NNGRRT; PAM sequence: TTGAGT
gtgctgattgctgaacacgt

SEQ ID NO: 20882 - DNA, 20 bp, Artificial Sequence
  Description of Artificial Sequence: Synthetic oligonucleotide
  Target: LAMA2; (-) strand; PAM type: NNGRRT; PAM sequence: TAGAGT
gaaccttcacagtctagtac

SEQ ID NO: 20883 - DNA, 20 bp, Artificial Sequence
  Description of Artificial Sequence: Synthetic oligonucleotide
  Target: LAMA2; (-) strand; PAM type: NNGRRT; PAM sequence: CAGGAT
aagatggcaggtggtgaaag

SEQ ID NO: 20884 - DNA, 20 bp, Artificial Sequence
  Description of Artificial Sequence: Synthetic oligonucleotide
  Target: LAMA2; (-) strand; PAM type: NNGRRT; PAM sequence: TTGAGT
aagatgagggaattgaagca

SEQ ID NO: 20885 - DNA, 20 bp, Artificial Sequence
  Description of Artificial Sequence: Synthetic oligonucleotide
  Target: LAMA2; (-) strand; PAM type: NNGRRT; PAM sequence: GGGAAT
tacattgattttaaagatga

SEQ ID NO: 20886 - DNA, 20 bp, Artificial Sequence
  Description of Artificial Sequence: Synthetic oligonucleotide
  Target: LAMA2; (-) strand; PAM type: NNGRRT; PAM sequence: AAGAAT
cacacacaaccttatgtggt

SEQ ID NO: 20887 - DNA, 20 bp, Artificial Sequence
  Description of Artificial Sequence: Synthetic oligonucleotide
  Target: LAMA2; (-) strand; PAM type: NNGRRT; PAM sequence: TTGGAT
aagcactctacaatgtggct

SEQ ID NO: 20888 - DNA, 20 bp, Artificial Sequence
  Description of Artificial Sequence: Synthetic oligonucleotide
  Target: LAMA2; (-) strand; PAM type: NNGRRT; PAM sequence: AGGGGT
atgtccgtacgtccatcaat

SEQ ID NO: 20889 - DNA, 20 bp, Artificial Sequence
  Description of Artificial Sequence: Synthetic oligonucleotide
  Target: LAMA2; (-) strand; PAM type: NNGRRT; PAM sequence: CTGGGT
tcacaccactgcactccagc

SEQ ID NO: 20890 - DNA, 20 bp, Artificial Sequence
  Description of Artificial Sequence: Synthetic oligonucleotide
  Target: LAMA2; (-) strand; PAM type: NNGRRT; PAM sequence: GAGAAT
ctactcgggaggctgaggca

SEQ ID NO: 20891 - DNA, 20 bp, Artificial Sequence
  Description of Artificial Sequence: Synthetic oligonucleotide
  Target: LAMA2; (-) strand; PAM type: NNGRRT; PAM sequence: AGGAGT
gaagggtgactcatgagttc

SEQ ID NO: 20892 - DNA, 20 bp, Artificial Sequence
  Description of Artificial Sequence: Synthetic oligonucleotide
  Target: LAMA2; (-) strand; PAM type: NNGRRT; PAM sequence: ATGAGT
gaggctgagaagggtgactc

SEQ ID NO: 20893 - DNA, 20 bp, Artificial Sequence
  Description of Artificial Sequence: Synthetic oligonucleotide
  Target: LAMA2; (-) strand; PAM type: NNGRRT; PAM sequence: AAGGGT
cagcactttgggaggctgag

SEQ ID NO: 20894 - DNA, 20 bp, Artificial Sequence
  Description of Artificial Sequence: Synthetic oligonucleotide
  Target: LAMA2; (-) strand; PAM type: NNGRRT; PAM sequence: AAGGGT
gagatttatcccacagttat

SEQ ID NO: 20895 - DNA, 20 bp, Artificial Sequence
  Description of Artificial Sequence: Synthetic oligonucleotide
  Target: LAMA2; (-) strand; PAM type: NNGRRT; PAM sequence: ATGGGT
tggtagcatgtctaaaatat

SEQ ID NO: 20896 - DNA, 20 bp, Artificial Sequence
  Description of Artificial Sequence: Synthetic oligonucleotide
  Target: LAMA2; (-) strand; PAM type: NNGRRT; PAM sequence: AGGGGT
gataatatactctattagag

SEQ ID NO: 20897 - DNA, 20 bp, Artificial Sequence
  Description of Artificial Sequence: Synthetic oligonucleotide
  Target: LAMA2; (-) strand; PAM type: NNGRRT; PAM sequence: TTGGAT
aaaatgtcatttttcaccca

SEQ ID NO: 20898 - DNA, 20 bp, Artificial Sequence
  Description of Artificial Sequence: Synthetic oligonucleotide
  Target: LAMA2; (-) strand; PAM type: NNGRRT; PAM sequence: AGGGAT
ggtctcgaactcatggcctc

SEQ ID NO: 20899 - DNA, 20 bp, Artificial Sequence
  Description of Artificial Sequence: Synthetic oligonucleotide
  Target: LAMA2; (-) strand; PAM type: NNGRRT; PAM sequence: CAGGGT
ttttgtatttttagtaaaca

SEQ ID NO: 20900 - DNA, 20 bp, Artificial Sequence
  Description of Artificial Sequence: Synthetic oligonucleotide
  Target: LAMA2; (-) strand; PAM type: NNGRRT; PAM sequence: TGGAAT
gcctcagcctcccaagtagc

SEQ ID NO: 20901 - DNA, 20 bp, Artificial Sequence
  Description of Artificial Sequence: Synthetic oligonucleotide
  Target: LAMA2; (-) strand; PAM type: NNGRRT; PAM sequence: TGGAGT
tcttgctctgttgcccagtc

SEQ ID NO: 20902 - DNA, 20 bp, Artificial Sequence
  Description of Artificial Sequence: Synthetic oligonucleotide
  Target: LAMA2; (-) strand; PAM type: NNGRRT; PAM sequence: TGGAGT
tcctttttttttttttgaga

SEQ ID NO: 20903 - DNA, 20 bp, Artificial Sequence
  Description of Artificial Sequence: Synthetic oligonucleotide
  Target: LAMA2; (-) strand; PAM type: NNGRRT; PAM sequence: TTGAAT
agtaagttcagaatagattt

SEQ ID NO: 20904 - DNA, 20 bp, Artificial Sequence
  Description of Artificial Sequence: Synthetic oligonucleotide
  Target: LAMA2; (-) strand; PAM type: NNGRRT; PAM sequence: CAGAAT
ttcttgggattcagtaagtt

SEQ ID NO: 20905 - DNA, 20 bp, Artificial Sequence
  Description of Artificial Sequence: Synthetic oligonucleotide
  Target: LAMA2; (-) strand; PAM type: NNGRRT; PAM sequence: TGGGAT
tttcctctcctaattattct

SEQ ID NO: 20906 - DNA, 20 bp, Artificial Sequence
  Description of Artificial Sequence: Synthetic oligonucleotide
  Target: LAMA2; (-) strand; PAM type: NNGRRT; PAM sequence: TAGAAT
gttctatagtaacaggcaga

SEQ ID NO: 20907 - DNA, 20 bp, Artificial Sequence
  Description of Artificial Sequence: Synthetic oligonucleotide
  Target: LAMA2; (-) strand; PAM type: NNGRRT; PAM sequence: AAGGGT
gcatgaaaatacctactttg

SEQ ID NO: 20908 - DNA, 20 bp, Artificial Sequence
  Description of Artificial Sequence: Synthetic oligonucleotide
  Target: LAMA2; (-) strand; PAM type: NNGRRT; PAM sequence: CTGAAT
ttgggaaaattaattcaact

SEQ ID NO: 20909 - DNA, 20 bp, Artificial Sequence
  Description of Artificial Sequence: Synthetic oligonucleotide
  Target: LAMA2; (-) strand; PAM type: NNGRRT; PAM sequence: AAGAAT
taatgcaaaagtatatgttt

SEQ ID NO: 20910 - DNA, 20 bp, Artificial Sequence
  Description of Artificial Sequence: Synthetic oligonucleotide
  Target: LAMA2; (-) strand; PAM type: NNGRRT; PAM sequence: TAGAAT
ctaacattttcatggaactt

SEQ ID NO: 20911 - DNA, 20 bp, Artificial Sequence
  Description of Artificial Sequence: Synthetic oligonucleotide
  Target: LAMA2; (-) strand; PAM type: NNGRRT; PAM sequence: CTGGAT
tggcaacaaatcagtatgat

SEQ ID NO: 20912 - DNA, 20 bp, Artificial Sequence
  Description of Artificial Sequence: Synthetic oligonucleotide
  Target: LAMA2; (-) strand; PAM type: NNGRRT; PAM sequence: TAGAAT
gatgattcaattgaataatc

SEQ ID NO: 20913 - DNA, 20 bp, Artificial Sequence
  Description of Artificial Sequence: Synthetic oligonucleotide
  Target: LAMA2; (-) strand; PAM type: NNGRRT; PAM sequence: TTGAAT
gcgttgttgtgatgattcaa

SEQ ID NO: 20914 - DNA, 20 bp, Artificial Sequence
  Description of Artificial Sequence: Synthetic oligonucleotide
  Target: LAMA2; (-) strand; PAM type: NNGRRT; PAM sequence: GTGAAT
tttagctgtgtgtgacagga

SEQ ID NO: 20915 - DNA, 20 bp, Artificial Sequence
  Description of Artificial Sequence: Synthetic oligonucleotide
  Target: LAMA2; (-) strand; PAM type: NNGRRT; PAM sequence: AGGAGT
actttttagctgtgtgtgac

SEQ ID NO: 20916 - DNA, 20 bp, Artificial Sequence
  Description of Artificial Sequence: Synthetic oligonucleotide
  Target: LAMA2; (-) strand; PAM type: NNGRRT; PAM sequence: AAGAGT
gatggtatagcatagtggaa

SEQ ID NO: 20917 - DNA, 20 bp, Artificial Sequence
  Description of Artificial Sequence: Synthetic oligonucleotide
  Target: LAMA2; (-) strand; PAM type: NNGRRT; PAM sequence: TAGGGT
ttttagagctaaagcttata

SEQ ID NO: 20918 - DNA, 20 bp, Artificial Sequence
  Description of Artificial Sequence: Synthetic oligonucleotide
  Target: LAMA2; (-) strand; PAM type: NNGRRT; PAM sequence: TAGAAT
aaatttctattgtagggtaa

SEQ ID NO: 20919 - DNA, 20 bp, Artificial Sequence
  Description of Artificial Sequence: Synthetic oligonucleotide
  Target: LAMA2; (-) strand; PAM type: NNGRRT; PAM sequence: TAGGGT
gtccactgaaatttctattg

SEQ ID NO: 20920 - DNA, 20 bp, Artificial Sequence
  Description of Artificial Sequence: Synthetic oligonucleotide
  Target: LAMA2; (-) strand; PAM type: NNGRRT; PAM sequence: TAGAGT
acagtgggttatttaaatat

SEQ ID NO: 20921 - DNA, 20 bp, Artificial Sequence
  Description of Artificial Sequence: Synthetic oligonucleotide
  Target: LAMA2; (-) strand; PAM type: NNGRRT; PAM sequence: GTGGGT
accatgccagtttattaaca

SEQ ID NO: 20922 - DNA, 20 bp, Artificial Sequence
  Description of Artificial Sequence: Synthetic oligonucleotide
  Target: LAMA2; (-) strand; PAM type: NNGRRT; PAM sequence: AGGAAT
cctgtctggggtgatagaaa

SEQ ID NO: 20923 - DNA, 20 bp, Artificial Sequence
  Description of Artificial Sequence: Synthetic oligonucleotide
  Target: LAMA2; (-) strand; PAM type: NNGRRT; PAM sequence: TGGGGT
tgagtagagatccacctgtc

SEQ ID NO: 20924 - DNA, 20 bp, Artificial Sequence
  Description of Artificial Sequence: Synthetic oligonucleotide
  Target: LAMA2; (-) strand; PAM type: NNGRRT; PAM sequence: ATGAGT
atccatttctctgaagatac

SEQ ID NO: 20925 - DNA, 20 bp, Artificial Sequence
  Description of Artificial Sequence: Synthetic oligonucleotide
  Target: LAMA2; (-) strand; PAM type: NNGRRT; PAM sequence: TAGGGT
aaatggaatgtgctgctttg

SEQ ID NO: 20926 - DNA, 20 bp, Artificial Sequence
  Description of Artificial Sequence: Synthetic oligonucleotide
  Target: LAMA2; (-) strand; PAM type: NNGRRT; PAM sequence: TGGAAT
atatctagagctgttgaaaa

SEQ ID NO: 20927 - DNA, 20 bp, Artificial Sequence
  Description of Artificial Sequence: Synthetic oligonucleotide
  Target: LAMA2; (-) strand; PAM type: NNGRRT; PAM sequence: AGGGGT
caggaggattgcttgagccc

SEQ ID NO: 20928 - DNA, 20 bp, Artificial Sequence
  Description of Artificial Sequence: Synthetic oligonucleotide
  Target: LAMA2; (-) strand; PAM type: NNGRRT; PAM sequence: GAGGAT
tacttgggaggctgaggcag

SEQ ID NO: 20929 - DNA, 20 bp, Artificial Sequence
  Description of Artificial Sequence: Synthetic oligonucleotide
  Target: LAMA2; (-) strand; PAM type: NNGRRT; PAM sequence: AAGAAT
ccctccagaaaaccctgtgt

SEQ ID NO: 20930 - DNA, 20 bp, Artificial Sequence
  Description of Artificial Sequence: Synthetic oligonucleotide
  Target: LAMA2; (-) strand; PAM type: NNGRRT; PAM sequence: GGGAAT
ttccctaattttgaggttct

SEQ ID NO: 20931 - DNA, 20 bp, Artificial Sequence
  Description of Artificial Sequence: Synthetic oligonucleotide
  Target: LAMA2; (-) strand; PAM type: NNGRRT; PAM sequence: CCGGAT
gtcttcatctttctcctatg

SEQ ID NO: 20932 - DNA, 20 bp, Artificial Sequence
  Description of Artificial Sequence: Synthetic oligonucleotide
  Target: LAMA2; (-) strand; PAM type: NNGRRT; PAM sequence: TAGAAT
gcaggagaacgtggaaggtc

SEQ ID NO: 20933 - DNA, 20 bp, Artificial Sequence
  Description of Artificial Sequence: Synthetic oligonucleotide
  Target: LAMA2; (-) strand; PAM type: NNGRRT; PAM sequence: TAGGAT
taatcagctgccagcgtggc

SEQ ID NO: 20934 - DNA, 20 bp, Artificial Sequence
  Description of Artificial Sequence: Synthetic oligonucleotide
  Target: LAMA2; (-) strand; PAM type: NNGRRT; PAM sequence: CTGGGT
aagacagaaccaccctcatt

SEQ ID NO: 20935 - DNA, 20 bp, Artificial Sequence
  Description of Artificial Sequence: Synthetic oligonucleotide
  Target: LAMA2; (-) strand; PAM type: NNGRRT; PAM sequence: TTGAGT
ttgccaaaggagattaacat

SEQ ID NO: 20936 - DNA, 20 bp, Artificial Sequence
  Description of Artificial Sequence: Synthetic oligonucleotide
  Target: LAMA2; (-) strand; PAM type: NNGRRT; PAM sequence: GAGGGT
ttgtacctgagtgtgtctgt

SEQ ID NO: 20937 - DNA, 20 bp, Artificial Sequence
  Description of Artificial Sequence: Synthetic oligonucleotide
  Target: LAMA2; (-) strand; PAM type: NNGRRT; PAM sequence: CTGAGT
aagtatgcaaagtattgtac

SEQ ID NO: 20938 - DNA, 20 bp, Artificial Sequence
  Description of Artificial Sequence: Synthetic oligonucleotide
  Target: LAMA2; (-) strand; PAM type: NNGRRT; PAM sequence: GAGAAT
acctgtatgagaaagcgttg

SEQ ID NO: 20939 - DNA, 20 bp, Artificial Sequence
  Description of Artificial Sequence: Synthetic oligonucleotide
  Target: LAMA2; (-) strand; PAM type: NNGRRT; PAM sequence: GGGAGT
aaaaggtttggaaaggtaat

SEQ ID NO: 20940 - DNA, 20 bp, Artificial Sequence
  Description of Artificial Sequence: Synthetic oligonucleotide
  Target: LAMA2; (-) strand; PAM type: NNGRRT; PAM sequence: CAGGAT
ttcatccatagaggtgtgac

SEQ ID NO: 20941 - DNA, 20 bp, Artificial Sequence
  Description of Artificial Sequence: Synthetic oligonucleotide
  Target: LAMA2; (-) strand; PAM type: NNGRRT; PAM sequence: GAGAGT
ttcatgacaccaccatttaa

SEQ ID NO: 20942 - DNA, 20 bp, Artificial Sequence
  Description of Artificial Sequence: Synthetic oligonucleotide
  Target: LAMA2; (-) strand; PAM type: NNGRRT; PAM sequence: TAGGAT
ttttcccagcttctgtatat

SEQ ID NO: 20943 - DNA, 20 bp, Artificial Sequence
  Description of Artificial Sequence: Synthetic oligonucleotide
  Target: LAMA2; (-) strand; PAM type: NNGRRT; PAM sequence: TGGGAT
atagagaaggcataaaaaac

SEQ ID NO: 20944 - DNA, 20 bp, Artificial Sequence
  Description of Artificial Sequence: Synthetic oligonucleotide
  Target: LAMA2; (-) strand; PAM type: NNGRRT; PAM sequence: CTGAAT
agatcttgcataagtatctg

SEQ ID NO: 20945 - DNA, 20 bp, Artificial Sequence
  Description of Artificial Sequence: Synthetic oligonucleotide
  Target: LAMA2; (-) strand; PAM type: NNGRRT; PAM sequence: TGGAAT
cacgtcttaatgtttcccta

SEQ ID NO: 20946 - DNA, 20 bp, Artificial Sequence
  Description of Artificial Sequence: Synthetic oligonucleotide
  Target: LAMA2; (-) strand; PAM type: NNGRRT; PAM sequence: TAGGAT
ctacctccgaagtttgctct

SEQ ID NO: 20947 - DNA, 20 bp, Artificial Sequence
  Description of Artificial Sequence: Synthetic oligonucleotide
  Target: LAMA2; (-) strand; PAM type: NNGRRT; PAM sequence: ACGAAT
tgaattttcactaaaatgag

SEQ ID NO: 20948 - DNA, 20 bp, Artificial Sequence
  Description of Artificial Sequence: Synthetic oligonucleotide
  Target: LAMA2; (-) strand; PAM type: NNGRRT; PAM sequence: GTGAAT
attttgctttcagagcatca

SEQ ID NO: 20949 - DNA, 20 bp, Artificial Sequence
  Description of Artificial Sequence: Synthetic oligonucleotide
  Target: LAMA2; (-) strand; PAM type: NNGRRT; PAM sequence: GTGGAT
gagattttccagagctggtt

SEQ ID NO: 20950 - DNA, 20 bp, Artificial Sequence
  Description of Artificial Sequence: Synthetic oligonucleotide
  Target: LAMA2; (-) strand; PAM type: NNGRRT; PAM sequence: TGGAGT
tttgacatgtctgttaatat

SEQ ID NO: 20951 - DNA, 20 bp, Artificial Sequence
  Description of Artificial Sequence: Synthetic oligonucleotide
  Target: LAMA2; (-) strand; PAM type: NNGRRT; PAM sequence: AAGGGT
tcttccaaaataaacaggta

SEQ ID NO: 20952 - DNA, 20 bp, Artificial Sequence
  Description of Artificial Sequence: Synthetic oligonucleotide
  Target: LAMA2; (-) strand; PAM type: NNGRRT; PAM sequence: CAGGGT
acactccagaggagaatcaa

SEQ ID NO: 20953 - DNA, 20 bp, Artificial Sequence
  Description of Artificial Sequence: Synthetic oligonucleotide
  Target: LAMA2; (-) strand; PAM type: NNGRRT; PAM sequence: GAGAAT
tactaagtcacactccagag

SEQ ID NO: 20954 - DNA, 20 bp, Artificial Sequence
  Description of Artificial Sequence: Synthetic oligonucleotide
  Target: LAMA2; (-) strand; PAM type: NNGRRT; PAM sequence: ATGGAT
ataagaatcccaaaggtgca

SEQ ID NO: 20955 - DNA, 20 bp, Artificial Sequence
  Description of Artificial Sequence: Synthetic oligonucleotide
  Target: LAMA2; (-) strand; PAM type: NNGRRT; PAM sequence: AAGAAT
ggttgtgaattttagaagat

SEQ ID NO: 20956 - DNA, 20 bp, Artificial Sequence
  Description of Artificial Sequence: Synthetic oligonucleotide
  Target: LAMA2; (-) strand; PAM type: NNGRRT; PAM sequence: GTGAAT
tacagcagtagaaagtggtt

SEQ ID NO: 20957 - DNA, 20 bp, Artificial Sequence
  Description of Artificial Sequence: Synthetic oligonucleotide
  Target: LAMA2; (-) strand; PAM type: NNGRRT; PAM sequence: TGGAAT
agaagccagaacaccaacct

SEQ ID NO: 20958 - DNA, 20 bp, Artificial Sequence
  Description of Artificial Sequence: Synthetic oligonucleotide
  Target: LAMA2; (-) strand; PAM type: NNGRRT; PAM sequence: ATGAAT
aagtgctaaatatgagttga

SEQ ID NO: 20959 - DNA, 20 bp, Artificial Sequence
  Description of Artificial Sequence: Synthetic oligonucleotide
  Target: LAMA2; (-) strand; PAM type: NNGRRT; PAM sequence: TTGAAT
cctaaagtgctaaatatgag

SEQ ID NO: 20960 - DNA, 20 bp, Artificial Sequence
  Description of Artificial Sequence: Synthetic oligonucleotide
  Target: LAMA2; (-) strand; PAM type: NNGRRT; PAM sequence: ATGAGT
tatggcctaaagtgctaaat

SEQ ID NO: 20961 - DNA, 20 bp, Artificial Sequence
  Description of Artificial Sequence: Synthetic oligonucleotide
  Target: LAMA2; (-) strand; PAM type: NNGRRT; PAM sequence: CTGGAT
tacgtacaccttccacaacc

SEQ ID NO: 20962 - DNA, 20 bp, Artificial Sequence
  Description of Artificial Sequence: Synthetic oligonucleotide
  Target: LAMA2; (-) strand; PAM type: NNGRRT; PAM sequence: CAGAGT
acaatagaaagtatagaaaa

SEQ ID NO: 20963 - DNA, 20 bp, Artificial Sequence
  Description of Artificial Sequence: Synthetic oligonucleotide
  Target: LAMA2; (-) strand; PAM type: NNGRRT; PAM sequence: AAGGAT
tgcttaaagattttgtcttt

SEQ ID NO: 20964 - DNA, 20 bp, Artificial Sequence
  Description of Artificial Sequence: Synthetic oligonucleotide
  Target: LAMA2; (-) strand; PAM type: NNGRRT; PAM sequence: GAGAAT
atgcaattttctttttaaat

SEQ ID NO: 20965 - DNA, 20 bp, Artificial Sequence
  Description of Artificial Sequence: Synthetic oligonucleotide
  Target: LAMA2; (-) strand; PAM type: NNGRRT; PAM sequence: ATGAAT
tattgtcaaatagataacaa

SEQ ID NO: 20966 - DNA, 20 bp, Artificial Sequence
  Description of Artificial Sequence: Synthetic oligonucleotide
  Target: LAMA2; (-) strand; PAM type: NNGRRT; PAM sequence: TAGGGT
tacagagatttcttattgac

SEQ ID NO: 20967 - DNA, 20 bp, Artificial Sequence
  Description of Artificial Sequence: Synthetic oligonucleotide
  Target: LAMA2; (-) strand; PAM type: NNGRRT; PAM sequence: TTGGAT
ttccatttactaacttatgt

SEQ ID NO: 20968 - DNA, 20 bp, Artificial Sequence
  Description of Artificial Sequence: Synthetic oligonucleotide
  Target: LAMA2; (-) strand; PAM type: NNGRRT; PAM sequence: CAGGGT
gttaggcccagacccaaaaa

SEQ ID NO: 20969 - DNA, 20 bp, Artificial Sequence
  Description of Artificial Sequence: Synthetic oligonucleotide
  Target: LAMA2; (-) strand; PAM type: NNGRRT; PAM sequence: GTGAGT
atagtacaatctcaacagat

SEQ ID NO: 20970 - DNA, 20 bp, Artificial Sequence
  Description of Artificial Sequence: Synthetic oligonucleotide
  Target: LAMA2; (-) strand; PAM type: NNGRRT; PAM sequence: TTGAGT
tgacatacactgatcaaatc

SEQ ID NO: 20971 - DNA, 20 bp, Artificial Sequence
  Description of Artificial Sequence: Synthetic oligonucleotide
  Target: LAMA2; (-) strand; PAM type: NNGRRT; PAM sequence: ATGAGT
ggcaacattccatataggaa

SEQ ID NO: 20972 - DNA, 20 bp, Artificial Sequence
  Description of Artificial Sequence: Synthetic oligonucleotide
  Target: LAMA2; (-) strand; PAM type: NNGRRT; PAM sequence: ATGAAT
cttgaaaatataaatctcct

SEQ ID NO: 20973 - DNA, 20 bp, Artificial Sequence
  Description of Artificial Sequence: Synthetic oligonucleotide
  Target: LAMA2; (-) strand; PAM type: NNGRRT; PAM sequence: ATGGAT
cagacaaaattttaaaacaa

SEQ ID NO: 20974 - DNA, 20 bp, Artificial Sequence
  Description of Artificial Sequence: Synthetic oligonucleotide
  Target: LAMA2; (-) strand; PAM type: NNGRRT; PAM sequence: AGGAGT
caattgaaaaccagacaatt

SEQ ID NO: 20975 - DNA, 20 bp, Artificial Sequence
  Description of Artificial Sequence: Synthetic oligonucleotide
  Target: LAMA2; (-) strand; PAM type: NNGRRT; PAM sequence: AAGAAT
tttgaagagtttgatcaggt

SEQ ID NO: 20976 - DNA, 20 bp, Artificial Sequence
  Description of Artificial Sequence: Synthetic oligonucleotide
  Target: LAMA2; (-) strand; PAM type: NNGRRT; PAM sequence: AAGAGT
ttcaaagtaaatagaatttg

SEQ ID NO: 20977 - DNA, 20 bp, Artificial Sequence
  Description of Artificial Sequence: Synthetic oligonucleotide
  Target: LAMA2; (-) strand; PAM type: NNGRRT; PAM sequence: TAGAAT
cagctataattcaaagtaaa

SEQ ID NO: 20978 - DNA, 20 bp, Artificial Sequence
  Description of Artificial Sequence: Synthetic oligonucleotide
  Target: LAMA2; (-) strand; PAM type: NNGRRT; PAM sequence: TGGAAT
ttgttaaaatgtttattcac

SEQ ID NO: 20979 - DNA, 20 bp, Artificial Sequence
  Description of Artificial Sequence: Synthetic oligonucleotide
  Target: LAMA2; (-) strand; PAM type: NNGRRT; PAM sequence: ATGAAT
gagaggaatgagaggccaac

SEQ ID NO: 20980 - DNA, 20 bp, Artificial Sequence
  Description of Artificial Sequence: Synthetic oligonucleotide
  Target: LAMA2; (-) strand; PAM type: NNGRRT; PAM sequence: AGGAAT
actgtgaaaggcatatagag

SEQ ID NO: 20981 - DNA, 20 bp, Artificial Sequence
  Description of Artificial Sequence: Synthetic oligonucleotide
  Target: LAMA2; (-) strand; PAM type: NNGRRT; PAM sequence: AAGAGT
ttttgattggcaaggggaaa

SEQ ID NO: 20982 - DNA, 20 bp, Artificial Sequence
  Description of Artificial Sequence: Synthetic oligonucleotide
  Target: LAMA2; (-) strand; PAM type: NNGRRT; PAM sequence: CAGGAT
ctcagcccgtccactgctca

SEQ ID NO: 20983 - DNA, 20 bp, Artificial Sequence
  Description of Artificial Sequence: Synthetic oligonucleotide
  Target: LAMA2; (-) strand; PAM type: NNGRRT; PAM sequence: CAGAGT
gatgaaaagtatgaatgtga

SEQ ID NO: 20984 - DNA, 20 bp, Artificial Sequence
  Description of Artificial Sequence: Synthetic oligonucleotide
  Target: LAMA2; (-) strand; PAM type: NNGRRT; PAM sequence: ATGAAT
aaaaagtagtgatgaaaagt

SEQ ID NO: 20985 - DNA, 20 bp, Artificial Sequence
  Description of Artificial Sequence: Synthetic oligonucleotide
  Target: LAMA2; (-) strand; PAM type: NNGRRT; PAM sequence: TTGGGT
acctgataagataacctgta

SEQ ID NO: 20986 - DNA, 20 bp, Artificial Sequence
  Description of Artificial Sequence: Synthetic oligonucleotide
  Target: LAMA2; (-) strand; PAM type: NNGRRT; PAM sequence: TGGGAT
gttgggaaaagtcctgaatt

SEQ ID NO: 20987 - DNA, 20 bp, Artificial Sequence
  Description of Artificial Sequence: Synthetic oligonucleotide
  Target: LAMA2; (-) strand; PAM type: NNGRRT; PAM sequence: CTGAAT
agaactggttgggaaaagtc

SEQ ID NO: 20988 - DNA, 20 bp, Artificial Sequence
  Description of Artificial Sequence: Synthetic oligonucleotide
  Target: LAMA2; (-) strand; PAM type: NNGRRT; PAM sequence: GGGGAT
aaactgagttatgcagtcca

SEQ ID NO: 20989 - DNA, 20 bp, Artificial Sequence
  Description of Artificial Sequence: Synthetic oligonucleotide
  Target: LAMA2; (-) strand; PAM type: NNGRRT; PAM sequence: CTGAGT
ttggtttagaagggaataaa

SEQ ID NO: 20990 - DNA, 20 bp, Artificial Sequence
  Description of Artificial Sequence: Synthetic oligonucleotide
  Target: LAMA2; (-) strand; PAM type: NNGRRT; PAM sequence: GGGAAT
ctagaaaagttggtttagaa

SEQ ID NO: 20991 - DNA, 20 bp, Artificial Sequence
  Description of Artificial Sequence: Synthetic oligonucleotide
  Target: LAMA2; (-) strand; PAM type: NNGRRT; PAM sequence: CAGAGT
ttaatgcatagaaaatgaac

SEQ ID NO: 20992 - DNA, 20 bp, Artificial Sequence
  Description of Artificial Sequence: Synthetic oligonucleotide
  Target: LAMA2; (-) strand; PAM type: NNGRRT; PAM sequence: CAGAAT
ttgtagaattagaaaacagg

SEQ ID NO: 20993 - DNA, 20 bp, Artificial Sequence
  Description of Artificial Sequence: Synthetic oligonucleotide
  Target: LAMA2; (-) strand; PAM type: NNGRRT; PAM sequence: TAGAAT
gaacataaacaagaggattg

SEQ ID NO: 20994 - DNA, 20 bp, Artificial Sequence
  Description of Artificial Sequence: Synthetic oligonucleotide
  Target: LAMA2; (-) strand; PAM type: NNGRRT; PAM sequence: GAGGAT
ttagaatagaacataaacaa

SEQ ID NO: 20995 - DNA, 20 bp, Artificial Sequence
  Description of Artificial Sequence: Synthetic oligonucleotide
  Target: LAMA2; (-) strand; PAM type: NNGRRT; PAM sequence: TAGAAT
tttaaaagctcgataattat

SEQ ID NO: 20996 - DNA, 20 bp, Artificial Sequence
  Description of Artificial Sequence: Synthetic oligonucleotide
  Target: LAMA2; (-) strand; PAM type: NNGRRT; PAM sequence: TTGAGT
ccttcagtgtatgtataaat

SEQ ID NO: 20997 - DNA, 20 bp, Artificial Sequence
  Description of Artificial Sequence: Synthetic oligonucleotide
  Target: LAMA2; (-) strand; PAM type: NNGRRT; PAM sequence: TAGGAT
catatctgtcaatttccatt

SEQ ID NO: 20998 - DNA, 20 bp, Artificial Sequence
  Description of Artificial Sequence: Synthetic oligonucleotide
  Target: LAMA2; (-) strand; PAM type: NNGRRT; PAM sequence: CAGGAT
aaaggctttataatactgag

SEQ ID NO: 20999 - DNA, 20 bp, Artificial Sequence
  Description of Artificial Sequence: Synthetic oligonucleotide
  Target: LAMA2; (-) strand; PAM type: NNGRRT; PAM sequence: AGGGAT
accagagcaaatatttcagg

SEQ ID NO: 21000 - DNA, 20 bp, Artificial Sequence
  Description of Artificial Sequence: Synthetic oligonucleotide
  Target: LAMA2; (-) strand; PAM type: NNGRRT; PAM sequence: TGGAGT
atcactgttatttcactaaa

SEQ ID NO: 21001 - DNA, 20 bp, Artificial Sequence
  Description of Artificial Sequence: Synthetic oligonucleotide
  Target: LAMA2; (-) strand; PAM type: NNGRRT; PAM sequence: GAGGAT
gaaggatgggataacctatt

SEQ ID NO: 21002 - DNA, 20 bp, Artificial Sequence
  Description of Artificial Sequence: Synthetic oligonucleotide
  Target: LAMA2; (-) strand; PAM type: NNGRRT; PAM sequence: TGGGAT
atgaattgaggaatgaagga

SEQ ID NO: 21003 - DNA, 20 bp, Artificial Sequence
  Description of Artificial Sequence: Synthetic oligonucleotide
  Target: LAMA2; (-) strand; PAM type: NNGRRT; PAM sequence: AAGGAT
gaaatatgaattgaggaatg

SEQ ID NO: 21004 - DNA, 20 bp, Artificial Sequence
  Description of Artificial Sequence: Synthetic oligonucleotide
  Target: LAMA2; (-) strand; PAM type: NNGRRT; PAM sequence: AGGAAT
atctcaagaaatatgaattg

SEQ ID NO: 21005 - DNA, 20 bp, Artificial Sequence
  Description of Artificial Sequence: Synthetic oligonucleotide
  Target: LAMA2; (-) strand; PAM type: NNGRRT; PAM sequence: ATGAAT
ccctctcaatctcaagaaat

SEQ ID NO: 21006 - DNA, 20 bp, Artificial Sequence
  Description of Artificial Sequence: Synthetic oligonucleotide
  Target: LAMA2; (-) strand; PAM type: NNGRRT; PAM sequence: AAGAAT
cataaaactaagcttcataa

SEQ ID NO: 21007 - DNA, 20 bp, Artificial Sequence
  Description of Artificial Sequence: Synthetic oligonucleotide
  Target: LAMA2; (-) strand; PAM type: NNGRRT; PAM sequence: ATGAGT
aacacaagtagctgtttccc

SEQ ID NO: 21008 - DNA, 20 bp, Artificial Sequence
  Description of Artificial Sequence: Synthetic oligonucleotide
  Target: LAMA2; (-) strand; PAM type: NNGRRT; PAM sequence: AAGGGT
agcggttcattccatttcat

SEQ ID NO: 21009 - DNA, 20 bp, Artificial Sequence
  Description of Artificial Sequence: Synthetic oligonucleotide
  Target: LAMA2; (-) strand; PAM type: NNGRRT; PAM sequence: GTGAAT
cttttcaatacaaagagaaa

SEQ ID NO: 21010 - DNA, 20 bp, Artificial Sequence
  Description of Artificial Sequence: Synthetic oligonucleotide
  Target: LAMA2; (-) strand; PAM type: NNGRRT; PAM sequence: AGGGAT
tggattcgactatatttact

SEQ ID NO: 21011 - DNA, 20 bp, Artificial Sequence
  Description of Artificial Sequence: Synthetic oligonucleotide
  Target: LAMA2; (-) strand; PAM type: NNGRRT; PAM sequence: ATGGAT
ggcaattcttatattactgg

SEQ ID NO: 21012 - DNA, 20 bp, Artificial Sequence
  Description of Artificial Sequence: Synthetic oligonucleotide
  Target: LAMA2; (-) strand; PAM type: NNGRRT; PAM sequence: CTGGAT
ttgaggcaattcttatatta

SEQ ID NO: 21013 - DNA, 20 bp, Artificial Sequence
  Description of Artificial Sequence: Synthetic oligonucleotide
  Target: LAMA2; (-) strand; PAM type: NNGRRT; PAM sequence: AGGAGT
aaatatggttttccacaggt

SEQ ID NO: 21014 - DNA, 20 bp, Artificial Sequence
  Description of Artificial Sequence: Synthetic oligonucleotide
  Target: LAMA2; (-) strand; PAM type: NNGRRT; PAM sequence: ACGAGT
cagactcatttattaatttt

SEQ ID NO: 21015 - DNA, 20 bp, Artificial Sequence
  Description of Artificial Sequence: Synthetic oligonucleotide
  Target: LAMA2; (-) strand; PAM type: NNGRRT; PAM sequence: CAGAGT
gatatttccaaagcctgatg

SEQ ID NO: 21016 - DNA, 20 bp, Artificial Sequence
  Description of Artificial Sequence: Synthetic oligonucleotide
  Target: LAMA2; (-) strand; PAM type: NNGRRT; PAM sequence: CAGAAT
ttaaaaatgaattttcctgc

SEQ ID NO: 21017 - DNA, 20 bp, Artificial Sequence
  Description of Artificial Sequence: Synthetic oligonucleotide
  Target: LAMA2; (-) strand; PAM type: NNGRRT; PAM sequence: ATGAAT
tgttacttggatttttaaaa

SEQ ID NO: 21018 - DNA, 20 bp, Artificial Sequence
  Description of Artificial Sequence: Synthetic oligonucleotide
  Target: LAMA2; (-) strand; PAM type: NNGRRT; PAM sequence: TTGGAT
atatttatccattctgttac

SEQ ID NO: 21019 - DNA, 20 bp, Artificial Sequence
  Description of Artificial Sequence: Synthetic oligonucleotide
  Target: LAMA2; (-) strand; PAM type: NNGRRT; PAM sequence: CTGGGT
acattctgaactgagaatgt

SEQ ID NO: 21020 - DNA, 20 bp, Artificial Sequence
  Description of Artificial Sequence: Synthetic oligonucleotide
  Target: LAMA2; (-) strand; PAM type: NNGRRT; PAM sequence: GAGAAT
cgctatgaacattctgaact

SEQ ID NO: 21021 - DNA, 20 bp, Artificial Sequence
  Description of Artificial Sequence: Synthetic oligonucleotide
  Target: LAMA2; (-) strand; PAM type: NNGRRT; PAM sequence: ATGAAT
ggaggcactatgaaaaaatt

SEQ ID NO: 21022 - DNA, 20 bp, Artificial Sequence
  Description of Artificial Sequence: Synthetic oligonucleotide
  Target: LAMA2; (-) strand; PAM type: NNGRRT; PAM sequence: ATGAAT
aattgctaggttgttaaaac

SEQ ID NO: 21023 - DNA, 20 bp, Artificial Sequence
  Description of Artificial Sequence: Synthetic oligonucleotide
  Target: LAMA2; (-) strand; PAM type: NNGRRT; PAM sequence: AAGGAT
gtcaatgtggaaaaggaaat

SEQ ID NO: 21024 - DNA, 20 bp, Artificial Sequence
  Description of Artificial Sequence: Synthetic oligonucleotide
  Target: LAMA2; (-) strand; PAM type: NNGRRT; PAM sequence: AAGAAT
gaacatgctatattccactt

SEQ ID NO: 21025 - DNA, 20 bp, Artificial Sequence
  Description of Artificial Sequence: Synthetic oligonucleotide
  Target: LAMA2; (-) strand; PAM type: NNGRRT; PAM sequence: TGGAAT
gtgaactcacaaaggcacag

SEQ ID NO: 21026 - DNA, 20 bp, Artificial Sequence
  Description of Artificial Sequence: Synthetic oligonucleotide
  Target: LAMA2; (-) strand; PAM type: NNGRRT; PAM sequence: CAGGGT
aactgtgtgtagaggtgccc

SEQ ID NO: 21027 - DNA, 20 bp, Artificial Sequence
  Description of Artificial Sequence: Synthetic oligonucleotide
  Target: LAMA2; (-) strand; PAM type: NNGRRT; PAM sequence: TAGGAT
ccgtgtagtttcaatgcctc

SEQ ID NO: 21028 - DNA, 20 bp, Artificial Sequence
  Description of Artificial Sequence: Synthetic oligonucleotide
  Target: LAMA2; (-) strand; PAM type: NNGRRT; PAM sequence: TGGGAT
tgaagattccccagtggctc

SEQ ID NO: 21029 - DNA, 20 bp, Artificial Sequence
  Description of Artificial Sequence: Synthetic oligonucleotide
  Target: LAMA2; (-) strand; PAM type: NNGRRT; PAM sequence: CTGAAT
agtaggttctcatcaagcat

SEQ ID NO: 21030 - DNA, 20 bp, Artificial Sequence
  Description of Artificial Sequence: Synthetic oligonucleotide
  Target: LAMA2; (-) strand; PAM type: NNGRRT; PAM sequence: TAGAAT
ccctcgcttctgcactctct

SEQ ID NO: 21031 - DNA, 20 bp, Artificial Sequence
  Description of Artificial Sequence: Synthetic oligonucleotide
  Target: LAMA2; (-) strand; PAM type: NNGRRT; PAM sequence: AAGAAT
ctttcctcttgctttagata

SEQ ID NO: 21032 - DNA, 20 bp, Artificial Sequence
  Description of Artificial Sequence: Synthetic oligonucleotide
  Target: LAMA2; (-) strand; PAM type: NNGRRT; PAM sequence: CTGAGT
gaaaaagctttgagaatatt

SEQ ID NO: 21033 - DNA, 20 bp, Artificial Sequence
  Description of Artificial Sequence: Synthetic oligonucleotide
  Target: LAMA2; (-) strand; PAM type: NNGRRT; PAM sequence: GAGAAT
ttattcagggaaaaagcttt

SEQ ID NO: 21034 - DNA, 20 bp, Artificial Sequence
  Description of Artificial Sequence: Synthetic oligonucleotide
  Target: LAMA2; (-) strand; PAM type: NNGRRT; PAM sequence: AAGGAT
gttacaagacttcttttctg

SEQ ID NO: 21035 - DNA, 20 bp, Artificial Sequence
  Description of Artificial Sequence: Synthetic oligonucleotide
  Target: LAMA2; (-) strand; PAM type: NNGRRT; PAM sequence: ATGAGT
attgtgtaagagactttgca

SEQ ID NO: 21036 - DNA, 20 bp, Artificial Sequence
  Description of Artificial Sequence: Synthetic oligonucleotide
  Target: LAMA2; (-) strand; PAM type: NNGRRT; PAM sequence: AAGAGT
ttccagttgtgtcttcccca

SEQ ID NO: 21037 - DNA, 20 bp, Artificial Sequence
  Description of Artificial Sequence: Synthetic oligonucleotide
  Target: LAMA2; (-) strand; PAM type: NNGRRT; PAM sequence: AGGAAT
aatttagaggatgcacccct

SEQ ID NO: 21038 - DNA, 20 bp, Artificial Sequence
  Description of Artificial Sequence: Synthetic oligonucleotide
  Target: LAMA2; (-) strand; PAM type: NNGRRT; PAM sequence: GAGGAT
agatatcactctgcaattta

SEQ ID NO: 21039 - DNA, 20 bp, Artificial Sequence
  Description of Artificial Sequence: Synthetic oligonucleotide
  Target: LAMA2; (-) strand; PAM type: NNGRRT; PAM sequence: AAGGAT
ggctcttaagtaattcttaa

SEQ ID NO: 21040 - DNA, 20 bp, Artificial Sequence
  Description of Artificial Sequence: Synthetic oligonucleotide
  Target: LAMA2; (-) strand; PAM type: NNGRRT; PAM sequence: TGGGAT
acctccgtctcccaaagtgc

SEQ ID NO: 21041 - DNA, 20 bp, Artificial Sequence
  Description of Artificial Sequence: Synthetic oligonucleotide
  Target: LAMA2; (-) strand; PAM type: NNGRRT; PAM sequence: TGGGAT
ttttgtattttttgtagaga

SEQ ID NO: 21042 - DNA, 20 bp, Artificial Sequence
  Description of Artificial Sequence: Synthetic oligonucleotide
  Target: LAMA2; (-) strand; PAM type: NNGRRT; PAM sequence: CCGAGT
agttcttgtgcctcagcctc

SEQ ID NO: 21043 - DNA, 20 bp, Artificial Sequence
  Description of Artificial Sequence: Synthetic oligonucleotide
  Target: LAMA2; (-) strand; PAM type: NNGRRT; PAM sequence: TGGAGT
ctctgtcattcaggctgatg

SEQ ID NO: 21044 - DNA, 20 bp, Artificial Sequence
  Description of Artificial Sequence: Synthetic oligonucleotide
  Target: LAMA2; (-) strand; PAM type: NNGRRT; PAM sequence: TAGAGT
tctttctttattttttgacc

SEQ ID NO: 21045 - DNA, 20 bp, Artificial Sequence
  Description of Artificial Sequence: Synthetic oligonucleotide
  Target: LAMA2; (-) strand; PAM type: NNGRRT; PAM sequence: TAGAAT
gttacccatttacacaatat

SEQ ID NO: 21046 - DNA, 20 bp, Artificial Sequence
  Description of Artificial Sequence: Synthetic oligonucleotide
  Target: LAMA2; (-) strand; PAM type: NNGRRT; PAM sequence: CAGGAT
cggaccatttaaacaatttt

SEQ ID NO: 21047 - DNA, 20 bp, Artificial Sequence
  Description of Artificial Sequence: Synthetic oligonucleotide
  Target: LAMA2; (-) strand; PAM type: NNGRRT; PAM sequence: TTGAAT
tgccattattacaacgtatt

SEQ ID NO: 21048 - DNA, 20 bp, Artificial Sequence
  Description of Artificial Sequence: Synthetic oligonucleotide
  Target: LAMA2; (-) strand; PAM type: NNGRRT; PAM sequence: AGGAAT
ataatataaaacatgaacta

SEQ ID NO: 21049 - DNA, 20 bp, Artificial Sequence
  Description of Artificial Sequence: Synthetic oligonucleotide
  Target: LAMA2; (-) strand; PAM type: NNGRRT; PAM sequence: AGGAAT
aaactaaaatactatgagag

SEQ ID NO: 21050 - DNA, 20 bp, Artificial Sequence
  Description of Artificial Sequence: Synthetic oligonucleotide
  Target: LAMA2; (-) strand; PAM type: NNGRRT; PAM sequence: GGGGAT
acctgtatagcccgggagtt

SEQ ID NO: 21051 - DNA, 20 bp, Artificial Sequence
  Description of Artificial Sequence: Synthetic oligonucleotide
  Target: LAMA2; (-) strand; PAM type: NNGRRT; PAM sequence: GGGAGT
gccacagacctgtatagccc

SEQ ID NO: 21052 - DNA, 20 bp, Artificial Sequence
  Description of Artificial Sequence: Synthetic oligonucleotide
  Target: LAMA2; (-) strand; PAM type: NNGRRT; PAM sequence: GAGAAT
aataaggttcctgctcctgt

SEQ ID NO: 21053 - DNA, 20 bp, Artificial Sequence
  Description of Artificial Sequence: Synthetic oligonucleotide
  Target: LAMA2; (-) strand; PAM type: NNGRRT; PAM sequence: TGGGAT
tggacacagaggaggggttt

SEQ ID NO: 21054 - DNA, 20 bp, Artificial Sequence
  Description of Artificial Sequence: Synthetic oligonucleotide
  Target: LAMA2; (-) strand; PAM type: NNGRRT; PAM sequence: AGGGGT
tttttccatggacacagagg

SEQ ID NO: 21055 - DNA, 20 bp, Artificial Sequence
  Description of Artificial Sequence: Synthetic oligonucleotide
  Target: LAMA2; (-) strand; PAM type: NNGRRT; PAM sequence: ATGGGT
ccacctttttggcatcaggc

SEQ ID NO: 21056 - DNA, 20 bp, Artificial Sequence
  Description of Artificial Sequence: Synthetic oligonucleotide
  Target: LAMA2; (-) strand; PAM type: NNGRRT; PAM sequence: TTGAAT
agagtcaaagtgtgtataat

SEQ ID NO: 21057 - DNA, 20 bp, Artificial Sequence
  Description of Artificial Sequence: Synthetic oligonucleotide
  Target: LAMA2; (-) strand; PAM type: NNGRRT; PAM sequence: AAGAGT
ttttccattttgtcaataaa

SEQ ID NO: 21058 - DNA, 20 bp, Artificial Sequence
  Description of Artificial Sequence: Synthetic oligonucleotide
  Target: LAMA2; (-) strand; PAM type: NNGRRT; PAM sequence: AAGGAT
aataaaatacattttgaatt

SEQ ID NO: 21059 - DNA, 20 bp, Artificial Sequence
  Description of Artificial Sequence: Synthetic oligonucleotide
  Target: LAMA2; (-) strand; PAM type: NNGRRT; PAM sequence: TTGAAT
atgctcaaataaaatacatt

SEQ ID NO: 21060 - DNA, 20 bp, Artificial Sequence
  Description of Artificial Sequence: Synthetic oligonucleotide
  Target: LAMA2; (-) strand; PAM type: NNGRRT; PAM sequence: TTGAAT
tgaattacatgctatttttc

SEQ ID NO: 21061 - DNA, 20 bp, Artificial Sequence
  Description of Artificial Sequence: Synthetic oligonucleotide
  Target: LAMA2; (-) strand; PAM type: NNGRRT; PAM sequence: TTGAAT
ctattttgattatttaaaat

SEQ ID NO: 21062 - DNA, 20 bp, Artificial Sequence
  Description of Artificial Sequence: Synthetic oligonucleotide
  Target: LAMA2; (-) strand; PAM type: NNGRRT; PAM sequence: AAGAAT
cgtttgaaaggaggtttggg

SEQ ID NO: 21063 - DNA, 20 bp, Artificial Sequence
  Description of Artificial Sequence: Synthetic oligonucleotide
  Target: LAMA2; (-) strand; PAM type: NNGRRT; PAM sequence: TAGAAT
caaacaaggactgaactatt

SEQ ID NO: 21064 - DNA, 20 bp, Artificial Sequence
  Description of Artificial Sequence: Synthetic oligonucleotide
  Target: LAMA2; (-) strand; PAM type: NNGRRT; PAM sequence: AAGGAT
gctacacattttctcaataa

SEQ ID NO: 21065 - DNA, 20 bp, Artificial Sequence
  Description of Artificial Sequence: Synthetic oligonucleotide
  Target: LAMA2; (-) strand; PAM type: NNGRRT; PAM sequence: AGGGGT
tggcattattgtgagtaatg

SEQ ID NO: 21066 - DNA, 20 bp, Artificial Sequence
  Description of Artificial Sequence: Synthetic oligonucleotide
  Target: LAMA2; (-) strand; PAM type: NNGRRT; PAM sequence: GTGAGT
ctacagcacttggcattatt

SEQ ID NO: 21067 - DNA, 20 bp, Artificial Sequence
  Description of Artificial Sequence: Synthetic oligonucleotide
  Target: LAMA2; (-) strand; PAM type: NNGRRT; PAM sequence: TCGAAT
ccactgagaaatggccttat

SEQ ID NO: 21068 - DNA, 20 bp, Artificial Sequence
  Description of Artificial Sequence: Synthetic oligonucleotide
  Target: LAMA2; (-) strand; PAM type: NNGRRT; PAM sequence: CAGGAT
gctcgctacggctgattaaa

SEQ ID NO: 21069 - DNA, 20 bp, Artificial Sequence
  Description of Artificial Sequence: Synthetic oligonucleotide
  Target: LAMA2; (-) strand; PAM type: NNGRRT; PAM sequence: GAGAAT
attcctcttagtgttccaca

SEQ ID NO: 21070 - DNA, 20 bp, Artificial Sequence
  Description of Artificial Sequence: Synthetic oligonucleotide
  Target: LAMA2; (-) strand; PAM type: NNGRRT; PAM sequence: CTGGAT
aattcctggttgggaatgta

SEQ ID NO: 21071 - DNA, 20 bp, Artificial Sequence
  Description of Artificial Sequence: Synthetic oligonucleotide
  Target: LAMA2; (-) strand; PAM type: NNGRRT; PAM sequence: GGGAAT
ccagacagcaattcctggtt

SEQ ID NO: 21072 - DNA, 20 bp, Artificial Sequence
  Description of Artificial Sequence: Synthetic oligonucleotide
  Target: LAMA2; (-) strand; PAM type: NNGRRT; PAM sequence: CAGGGT
catgcagagacttggcttcg

SEQ ID NO: 21073 - DNA, 20 bp, Artificial Sequence
  Description of Artificial Sequence: Synthetic oligonucleotide
  Target: LAMA2; (-) strand; PAM type: NNGRRT; PAM sequence: GTGAGT
caggaatcaaaattgaagct

SEQ ID NO: 21074 - DNA, 20 bp, Artificial Sequence
  Description of Artificial Sequence: Synthetic oligonucleotide
  Target: LAMA2; (-) strand; PAM type: NNGRRT; PAM sequence: AGGAAT
agcaagatcatttataggac

SEQ ID NO: 21075 - DNA, 20 bp, Artificial Sequence
  Description of Artificial Sequence: Synthetic oligonucleotide
  Target: LAMA2; (-) strand; PAM type: NNGRRT; PAM sequence: TTGAAT
tgcaattaaataggcttagt

SEQ ID NO: 21076 - DNA, 20 bp, Artificial Sequence
  Description of Artificial Sequence: Synthetic oligonucleotide
  Target: LAMA2; (-) strand; PAM type: NNGRRT; PAM sequence: CTGGAT
gtcactcactttctgtgagt

SEQ ID NO: 21077 - DNA, 20 bp, Artificial Sequence
  Description of Artificial Sequence: Synthetic oligonucleotide
  Target: LAMA2; (-) strand; PAM type: NNGRRT; PAM sequence: GTGAGT
cagaaagtcactcactttct

SEQ ID NO: 21078 - DNA, 20 bp, Artificial Sequence
  Description of Artificial Sequence: Synthetic oligonucleotide
  Target: LAMA2; (-) strand; PAM type: NNGRRT; PAM sequence: GAGAGT
acgatctttgtcaaaattgg

SEQ ID NO: 21079 - DNA, 20 bp, Artificial Sequence
  Description of Artificial Sequence: Synthetic oligonucleotide
  Target: LAMA2; (-) strand; PAM type: NNGRRT; PAM sequence: AGGAGT
ggaatgataggcatttattt

SEQ ID NO: 21080 - DNA, 20 bp, Artificial Sequence
  Description of Artificial Sequence: Synthetic oligonucleotide
  Target: LAMA2; (-) strand; PAM type: NNGRRT; PAM sequence: GGGAAT
aaatcactggagtacggagt

SEQ ID NO: 21081 - DNA, 20 bp, Artificial Sequence
  Description of Artificial Sequence: Synthetic oligonucleotide
  Target: LAMA2; (-) strand; PAM type: NNGRRT; PAM sequence: CGGAGT
acgcagaaatcactggagta

SEQ ID NO: 21082 - DNA, 20 bp, Artificial Sequence
  Description of Artificial Sequence: Synthetic oligonucleotide
  Target: LAMA2; (-) strand; PAM type: NNGRRT; PAM sequence: TGGAGT
ttgcaagacgcagaaatcac

SEQ ID NO: 21083 - DNA, 20 bp, Artificial Sequence
  Description of Artificial Sequence: Synthetic oligonucleotide
  Target: LAMA2; (-) strand; PAM type: NNGRRT; PAM sequence: ACGAAT
tattttacttactgttgtat

SEQ ID NO: 21084 - DNA, 20 bp, Artificial Sequence
  Description of Artificial Sequence: Synthetic oligonucleotide
  Target: LAMA2; (-) strand; PAM type: NNGRRT; PAM sequence: CGGGAT
cagaagatgcataatcatta

SEQ ID NO: 21085 - DNA, 20 bp, Artificial Sequence
  Description of Artificial Sequence: Synthetic oligonucleotide
  Target: LAMA2; (-) strand; PAM type: NNGRRT; PAM sequence: ACGGGT
aagtaacatcaggaagtaac

SEQ ID NO: 21086 - DNA, 20 bp, Artificial Sequence
  Description of Artificial Sequence: Synthetic oligonucleotide
  Target: LAMA2; (-) strand; PAM type: NNGRRT; PAM sequence: AAGAGT
tatgtctcagagtgaaacaa

SEQ ID NO: 21087 - DNA, 20 bp, Artificial Sequence
  Description of Artificial Sequence: Synthetic oligonucleotide
  Target: LAMA2; (-) strand; PAM type: NNGRRT; PAM sequence: CAGAGT
tcaatcttctagatatgtct

SEQ ID NO: 21088 - DNA, 20 bp, Artificial Sequence
  Description of Artificial Sequence: Synthetic oligonucleotide
  Target: LAMA2; (-) strand; PAM type: NNGRRT; PAM sequence: GGGAGT
attttatctaatataaacaa

SEQ ID NO: 21089 - DNA, 20 bp, Artificial Sequence
  Description of Artificial Sequence: Synthetic oligonucleotide
  Target: LAMA2; (-) strand; PAM type: NNGRRT; PAM sequence: CAGGAT
tgtacctttcttacctaaaa

SEQ ID NO: 21090 - DNA, 20 bp, Artificial Sequence
  Description of Artificial Sequence: Synthetic oligonucleotide
  Target: LAMA2; (-) strand; PAM type: NNGRRT; PAM sequence: AAGGGT
aaagaatggatatgataaga

SEQ ID NO: 21091 - DNA, 20 bp, Artificial Sequence
  Description of Artificial Sequence: Synthetic oligonucleotide
  Target: LAMA2; (-) strand; PAM type: NNGRRT; PAM sequence: ATGGAT
gagatacattattggaaaga

SEQ ID NO: 21092 - DNA, 20 bp, Artificial Sequence
  Description of Artificial Sequence: Synthetic oligonucleotide
  Target: LAMA2; (-) strand; PAM type: NNGRRT; PAM sequence: AAGAAT
ggaggagatacattattgga

SEQ ID NO: 21093 - DNA, 20 bp, Artificial Sequence
  Description of Artificial Sequence: Synthetic oligonucleotide
  Target: LAMA2; (-) strand; PAM type: NNGRRT; PAM sequence: CTGAAT
atgcatgtatgtgtgtgcct

SEQ ID NO: 21094 - DNA, 20 bp, Artificial Sequence
  Description of Artificial Sequence: Synthetic oligonucleotide
  Target: LAMA2; (-) strand; PAM type: NNGRRT; PAM sequence: TGGAAT
taaattaacatctacccatt

SEQ ID NO: 21095 - DNA, 20 bp, Artificial Sequence
  Description of Artificial Sequence: Synthetic oligonucleotide
  Target: LAMA2; (-) strand; PAM type: NNGRRT; PAM sequence: AAGAAT
gaaaatgtccattttgagaa

SEQ ID NO: 21096 - DNA, 20 bp, Artificial Sequence
  Description of Artificial Sequence: Synthetic oligonucleotide
  Target: LAMA2; (-) strand; PAM type: NNGRRT; PAM sequence: AGGAAT
gagaactcttttcaccttaa

SEQ ID NO: 21097 - DNA, 20 bp, Artificial Sequence
  Description of Artificial Sequence: Synthetic oligonucleotide
  Target: LAMA2; (-) strand; PAM type: NNGRRT; PAM sequence: ATGAAT
tcttgtcttagttcattcac

SEQ ID NO: 21098 - DNA, 20 bp, Artificial Sequence
  Description of Artificial Sequence: Synthetic oligonucleotide
  Target: LAMA2; (-) strand; PAM type: NNGRRT; PAM sequence: TTGAAT
aatggcatctaaggagtata

SEQ ID NO: 21099 - DNA, 20 bp, Artificial Sequence
  Description of Artificial Sequence: Synthetic oligonucleotide
  Target: LAMA2; (-) strand; PAM type: NNGRRT; PAM sequence: AGGAGT
aaataggacaatggcatcta

SEQ ID NO: 21100 - DNA, 20 bp, Artificial Sequence
  Description of Artificial Sequence: Synthetic oligonucleotide
  Target: LAMA2; (-) strand; PAM type: NNGRRT; PAM sequence: CTGAAT
atagggaaagaaacttaaaa

SEQ ID NO: 21101 - DNA, 20 bp, Artificial Sequence
  Description of Artificial Sequence: Synthetic oligonucleotide
  Target: LAMA2; (-) strand; PAM type: NNGRRT; PAM sequence: GTGGGT
atttcaaactgtagatggat

SEQ ID NO: 21102 - DNA, 20 bp, Artificial Sequence
  Description of Artificial Sequence: Synthetic oligonucleotide
  Target: LAMA2; (-) strand; PAM type: NNGRRT; PAM sequence: ATGGAT
ttacatatttcaaactgtag

SEQ ID NO: 21103 - DNA, 20 bp, Artificial Sequence
  Description of Artificial Sequence: Synthetic oligonucleotide
  Target: LAMA2; (-) strand; PAM type: NNGRRT; PAM sequence: TTGAAT
tatatgtgattacaaacacc

SEQ ID NO: 21104 - DNA, 20 bp, Artificial Sequence
  Description of Artificial Sequence: Synthetic oligonucleotide
  Target: LAMA2; (-) strand; PAM type: NNGRRT; PAM sequence: GGGAAT
ttggctttccctgtcattca

SEQ ID NO: 21105 - DNA, 20 bp, Artificial Sequence
  Description of Artificial Sequence: Synthetic oligonucleotide
  Target: LAMA2; (-) strand; PAM type: NNGRRT; PAM sequence: TAGGAT
gcctcagcctcccaaagtgc

SEQ ID NO: 21106 - DNA, 20 bp, Artificial Sequence
  Description of Artificial Sequence: Synthetic oligonucleotide
  Target: LAMA2; (-) strand; PAM type: NNGRRT; PAM sequence: GGGGGT
tttgcatttgtagaagaggc

SEQ ID NO: 21107 - DNA, 20 bp, Artificial Sequence
  Description of Artificial Sequence: Synthetic oligonucleotide
  Target: LAMA2; (-) strand; PAM type: NNGRRT; PAM sequence: TGGAGT
tctcgctctatcccccaggc

SEQ ID NO: 21108 - DNA, 20 bp, Artificial Sequence
  Description of Artificial Sequence: Synthetic oligonucleotide
  Target: LAMA2; (-) strand; PAM type: NNGRRT; PAM sequence: CAGAGT
tatttatttttttttggaga

SEQ ID NO: 21109 - DNA, 20 bp, Artificial Sequence
  Description of Artificial Sequence: Synthetic oligonucleotide
  Target: LAMA2; (-) strand; PAM type: NNGRRT; PAM sequence: GAGGGT
aaaaagagtaaaactgaaaa

SEQ ID NO: 21110 - DNA, 20 bp, Artificial Sequence
  Description of Artificial Sequence: Synthetic oligonucleotide
  Target: LAMA2; (-) strand; PAM type: NNGRRT; PAM sequence: AAGAGT
gggaaaaaaaagaaataaaa

SEQ ID NO: 21111 - DNA, 20 bp, Artificial Sequence
  Description of Artificial Sequence: Synthetic oligonucleotide
  Target: LAMA2; (-) strand; PAM type: NNGRRT; PAM sequence: ATGGGT
tacattagtatgttcttcag

SEQ ID NO: 21112 - DNA, 20 bp, Artificial Sequence
  Description of Artificial Sequence: Synthetic oligonucleotide
  Target: LAMA2; (-) strand; PAM type: NNGRRT; PAM sequence: AAGAAT
acatgttctgacaattgtga

SEQ ID NO: 21113 - DNA, 20 bp, Artificial Sequence
  Description of Artificial Sequence: Synthetic oligonucleotide
  Target: LAMA2; (-) strand; PAM type: NNGRRT; PAM sequence: AGGAAT
aatataacatttctcaatat

SEQ ID NO: 21114 - DNA, 20 bp, Artificial Sequence
  Description of Artificial Sequence: Synthetic oligonucleotide
  Target: LAMA2; (-) strand; PAM type: NNGRRT; PAM sequence: TGGAAT
ctttccaaataggggtgccc

SEQ ID NO: 21115 - DNA, 20 bp, Artificial Sequence
  Description of Artificial Sequence: Synthetic oligonucleotide
  Target: LAMA2; (-) strand; PAM type: NNGRRT; PAM sequence: AGGGGT
ttaaaaaccactttccaaat

SEQ ID NO: 21116 - DNA, 20 bp, Artificial Sequence
  Description of Artificial Sequence: Synthetic oligonucleotide
  Target: LAMA2; (-) strand; PAM type: NNGRRT; PAM sequence: ATGGGT
ttaaagtgttttatagtgag

SEQ ID NO: 21117 - DNA, 20 bp, Artificial Sequence
  Description of Artificial Sequence: Synthetic oligonucleotide
  Target: LAMA2; (-) strand; PAM type: NNGRRT; PAM sequence: TTGAAT
aaaataagcaataaagctta

SEQ ID NO: 21118 - DNA, 20 bp, Artificial Sequence
  Description of Artificial Sequence: Synthetic oligonucleotide
  Target: LAMA2; (-) strand; PAM type: NNGRRT; PAM sequence: ATGAGT
aactgaaagtgttctaggtg

SEQ ID NO: 21119 - DNA, 20 bp, Artificial Sequence
  Description of Artificial Sequence: Synthetic oligonucleotide
  Target: LAMA2; (-) strand; PAM type: NNGRRT; PAM sequence: TAGAGT
caccttgtgttatttattat

SEQ ID NO: 21120 - DNA, 20 bp, Artificial Sequence
  Description of Artificial Sequence: Synthetic oligonucleotide
  Target: LAMA2; (-) strand; PAM type: NNGRRT; PAM sequence: TTGAAT
ttgtcaggctggggtcacat

SEQ ID NO: 21121 - DNA, 20 bp, Artificial Sequence
  Description of Artificial Sequence: Synthetic oligonucleotide
  Target: LAMA2; (-) strand; PAM type: NNGRRT; PAM sequence: TGGGGT
ggtataccgggttgtcaggc

SEQ ID NO: 21122 - DNA, 20 bp, Artificial Sequence
  Description of Artificial Sequence: Synthetic oligonucleotide
  Target: LAMA2; (-) strand; PAM type: NNGRRT; PAM sequence: CCGGGT
ttgctttcattaaaggtata

SEQ ID NO: 21123 - DNA, 20 bp, Artificial Sequence
  Description of Artificial Sequence: Synthetic oligonucleotide
  Target: LAMA2; (-) strand; PAM type: NNGRRT; PAM sequence: AAGAAT
cattttaacccagcttctag

SEQ ID NO: 21124 - DNA, 20 bp, Artificial Sequence
  Description of Artificial Sequence: Synthetic oligonucleotide
  Target: LAMA2; (-) strand; PAM type: NNGRRT; PAM sequence: ACGGGT
atgaaaccagtgattttaag

SEQ ID NO: 21125 - DNA, 20 bp, Artificial Sequence
  Description of Artificial Sequence: Synthetic oligonucleotide
  Target: LAMA2; (-) strand; PAM type: NNGRRT; PAM sequence: GTGAAT
tcatttcacagagccgcgct

SEQ ID NO: 21126 - DNA, 20 bp, Artificial Sequence
  Description of Artificial Sequence: Synthetic oligonucleotide
  Target: LAMA2; (-) strand; PAM type: NNGRRT; PAM sequence: TTGGAT
gacagaaagtagccacctac

SEQ ID NO: 21127 - DNA, 20 bp, Artificial Sequence
  Description of Artificial Sequence: Synthetic oligonucleotide
  Target: LAMA2; (-) strand; PAM type: NNGRRT; PAM sequence: AGGAGT
ttcagctcacctgagtgggt

SEQ ID NO: 21128 - DNA, 20 bp, Artificial Sequence
  Description of Artificial Sequence: Synthetic oligonucleotide
  Target: LAMA2; (-) strand; PAM type: NNGRRT; PAM sequence: GTGGGT
ccgactttcagctcacctga

SEQ ID NO: 21129 - DNA, 20 bp, Artificial Sequence
  Description of Artificial Sequence: Synthetic oligonucleotide
  Target: LAMA2; (-) strand; PAM type: NNGRRT; PAM sequence: CTGAGT
catgccgactttcagctcac

SEQ ID NO: 21130 - DNA, 20 bp, Artificial Sequence
  Description of Artificial Sequence: Synthetic oligonucleotide
  Target: LAMA2; (-) strand; PAM type: NNGRRT; PAM sequence: ATGAAT
cactgtaaataagtctgaat

SEQ ID NO: 21131 - DNA, 20 bp, Artificial Sequence
  Description of Artificial Sequence: Synthetic oligonucleotide
  Target: LAMA2; (-) strand; PAM type: NNGRRT; PAM sequence: CTGAAT
taaatccactgtaaataagt

SEQ ID NO: 21132 - DNA, 20 bp, Artificial Sequence
  Description of Artificial Sequence: Synthetic oligonucleotide
  Target: LAMA2; (-) strand; PAM type: NNGRRT; PAM sequence: CTGAGT
tgtttacaactattaaatag

SEQ ID NO: 21133 - DNA, 20 bp, Artificial Sequence
  Description of Artificial Sequence: Synthetic oligonucleotide
  Target: LAMA2; (-) strand; PAM type: NNGRRT; PAM sequence: CTGGGT
aaatgcttcatatttgtgtg

SEQ ID NO: 21134 - DNA, 20 bp, Artificial Sequence
  Description of Artificial Sequence: Synthetic oligonucleotide
  Target: LAMA2; (-) strand; PAM type: NNGRRT; PAM sequence: TGGGAT
ttggagaaaatgtgatcctt

SEQ ID NO: 21135 - DNA, 20 bp, Artificial Sequence
  Description of Artificial Sequence: Synthetic oligonucleotide
  Target: LAMA2; (-) strand; PAM type: NNGRRT; PAM sequence: CTGGAT
atctaatgggtctcagcatt

SEQ ID NO: 21136 - DNA, 20 bp, Artificial Sequence
  Description of Artificial Sequence: Synthetic oligonucleotide
  Target: LAMA2; (-) strand; PAM type: NNGRRT; PAM sequence: ATGGGT
aaataaattaattttatcta

SEQ ID NO: 21137 - DNA, 20 bp, Artificial Sequence
  Description of Artificial Sequence: Synthetic oligonucleotide
  Target: LAMA2; (-) strand; PAM type: NNGRRT; PAM sequence: AAGAGT
atattcttaaaagaagaatg

SEQ ID NO: 21138 - DNA, 20 bp, Artificial Sequence
  Description of Artificial Sequence: Synthetic oligonucleotide
  Target: LAMA2; (-) strand; PAM type: NNGRRT; PAM sequence: AAGAAT
ttctcttatattcttaaaag

SEQ ID NO: 21139 - DNA, 20 bp, Artificial Sequence
  Description of Artificial Sequence: Synthetic oligonucleotide
  Target: LAMA2; (-) strand; PAM type: NNGRRT; PAM sequence: TTGGAT
gatgttactaaatccaagtc

SEQ ID NO: 21140 - DNA, 20 bp, Artificial Sequence
  Description of Artificial Sequence: Synthetic oligonucleotide
  Target: LAMA2; (-) strand; PAM type: NNGRRT; PAM sequence: AAGGAT
cctttcttgatttaaagacc

SEQ ID NO: 21141 - DNA, 20 bp, Artificial Sequence
  Description of Artificial Sequence: Synthetic oligonucleotide
  Target: LAMA2; (-) strand; PAM type: NNGRRT; PAM sequence: CAGAGT
agaggaaaatacactttgtg

SEQ ID NO: 21142 - DNA, 20 bp, Artificial Sequence
  Description of Artificial Sequence: Synthetic oligonucleotide
  Target: LAMA2; (-) strand; PAM type: NNGRRT; PAM sequence: CAGGAT
catgtgacacatctaccctc

SEQ ID NO: 21143 - DNA, 20 bp, Artificial Sequence
  Description of Artificial Sequence: Synthetic oligonucleotide
  Target: LAMA2; (-) strand; PAM type: NNGRRT; PAM sequence: GAGAGT
tgattgctgagtaagctgca

SEQ ID NO: 21144 - DNA, 20 bp, Artificial Sequence
  Description of Artificial Sequence: Synthetic oligonucleotide
  Target: LAMA2; (-) strand; PAM type: NNGRRT; PAM sequence: CTGAGT
gttttttaatcttctgattg

SEQ ID NO: 21145 - DNA, 20 bp, Artificial Sequence
  Description of Artificial Sequence: Synthetic oligonucleotide
  Target: LAMA2; (-) strand; PAM type: NNGRRT; PAM sequence: TGGGAT
gcctcagcctcccaaattgc

SEQ ID NO: 21146 - DNA, 20 bp, Artificial Sequence
  Description of Artificial Sequence: Synthetic oligonucleotide
  Target: LAMA2; (-) strand; PAM type: NNGRRT; PAM sequence: TGGGGT
tttggtatttttagtagaga

SEQ ID NO: 21147 - DNA, 20 bp, Artificial Sequence
  Description of Artificial Sequence: Synthetic oligonucleotide
  Target: LAMA2; (-) strand; PAM type: NNGRRT; PAM sequence: TGGGAT
gcctcagcctcctgagtagc

SEQ ID NO: 21148 - DNA, 20 bp, Artificial Sequence
  Description of Artificial Sequence: Synthetic oligonucleotide
  Target: LAMA2; (-) strand; PAM type: NNGRRT; PAM sequence: CTGAGT
gattctactgcctcagcctc

SEQ ID NO: 21149 - DNA, 20 bp, Artificial Sequence
  Description of Artificial Sequence: Synthetic oligonucleotide
  Target: LAMA2; (-) strand; PAM type: NNGRRT; PAM sequence: CCGGGT
ctcactgcaacctccacatc

SEQ ID NO: 21150 - DNA, 20 bp, Artificial Sequence
  Description of Artificial Sequence: Synthetic oligonucleotide
  Target: LAMA2; (-) strand; PAM type: NNGRRT; PAM sequence: TGGAGT
tctccctctgtcacccaggc

SEQ ID NO: 21151 - DNA, 20 bp, Artificial Sequence
  Description of Artificial Sequence: Synthetic oligonucleotide
  Target: LAMA2; (-) strand; PAM type: NNGRRT; PAM sequence: CAGAGT
ttttttttttttttttgaga

SEQ ID NO: 21152 - DNA, 20 bp, Artificial Sequence
  Description of Artificial Sequence: Synthetic oligonucleotide
  Target: LAMA2; (-) strand; PAM type: NNGRRT; PAM sequence: CTGGGT
atgtaaaatcctctacaggc

SEQ ID NO: 21153 - DNA, 20 bp, Artificial Sequence
  Description of Artificial Sequence: Synthetic oligonucleotide
  Target: LAMA2; (-) strand; PAM type: NNGRRT; PAM sequence: ATGAGT
tttattttcaagcaatactc

SEQ ID NO: 21154 - DNA, 20 bp, Artificial Sequence
  Description of Artificial Sequence: Synthetic oligonucleotide
  Target: LAMA2; (-) strand; PAM type: NNGRRT; PAM sequence: AGGAAT
aaagactcctttgtttacaa

SEQ ID NO: 21155 - DNA, 20 bp, Artificial Sequence
  Description of Artificial Sequence: Synthetic oligonucleotide
  Target: LAMA2; (-) strand; PAM type: NNGRRT; PAM sequence: CCGGAT
gctgcacctcttaccaatgg

SEQ ID NO: 21156 - DNA, 20 bp, Artificial Sequence
  Description of Artificial Sequence: Synthetic oligonucleotide
  Target: LAMA2; (-) strand; PAM type: NNGRRT; PAM sequence: TAGGGT
aagataatgggaaggaaacg

SEQ ID NO: 21157 - DNA, 20 bp, Artificial Sequence
  Description of Artificial Sequence: Synthetic oligonucleotide
  Target: LAMA2; (-) strand; PAM type: NNGRRT; PAM sequence: TGGAAT
ctgaacgaatccaacactta

SEQ ID NO: 21158 - DNA, 20 bp, Artificial Sequence
  Description of Artificial Sequence: Synthetic oligonucleotide
  Target: LAMA2; (-) strand; PAM type: NNGRRT; PAM sequence: ACGAAT
agtaaatatttgcagactga

SEQ ID NO: 21159 - DNA, 20 bp, Artificial Sequence
  Description of Artificial Sequence: Synthetic oligonucleotide
  Target: LAMA2; (-) strand; PAM type: NNGRRT; PAM sequence: AAGGGT
ccaacataataccattagca

SEQ ID NO: 21160 - DNA, 20 bp, Artificial Sequence
  Description of Artificial Sequence: Synthetic oligonucleotide
  Target: LAMA2; (-) strand; PAM type: NNGRRT; PAM sequence: AGGAGT
atgaagaatctgaggctcag

SEQ ID NO: 21161 - DNA, 20 bp, Artificial Sequence
  Description of Artificial Sequence: Synthetic oligonucleotide
  Target: LAMA2; (-) strand; PAM type: NNGRRT; PAM sequence: AAGAAT
tctattcacatttacaaatg

SEQ ID NO: 21162 - DNA, 20 bp, Artificial Sequence
  Description of Artificial Sequence: Synthetic oligonucleotide
  Target: LAMA2; (-) strand; PAM type: NNGRRT; PAM sequence: TAGAAT
tgtatccttatagcctagcc

SEQ ID NO: 21163 - DNA, 20 bp, Artificial Sequence
  Description of Artificial Sequence: Synthetic oligonucleotide
  Target: LAMA2; (-) strand; PAM type: NNGRRT; PAM sequence: CTGAAT
tgtacaatgccttctttgaa

SEQ ID NO: 21164 - DNA, 20 bp, Artificial Sequence
  Description of Artificial Sequence: Synthetic oligonucleotide
  Target: LAMA2; (-) strand; PAM type: NNGRRT; PAM sequence: AAGAAT
agtgtattaaatgctaacac

SEQ ID NO: 21165 - DNA, 20 bp, Artificial Sequence
  Description of Artificial Sequence: Synthetic oligonucleotide
  Target: LAMA2; (-) strand; PAM type: NNGRRT; PAM sequence: TCGAGT
taaacattttcaatcccaca

SEQ ID NO: 21166 - DNA, 20 bp, Artificial Sequence
  Description of Artificial Sequence: Synthetic oligonucleotide
  Target: LAMA2; (-) strand; PAM type: NNGRRT; PAM sequence: CAGAGT
tgttttactacatttcccac

SEQ ID NO: 21167 - DNA, 20 bp, Artificial Sequence
  Description of Artificial Sequence: Synthetic oligonucleotide
  Target: LAMA2; (-) strand; PAM type: NNGRRT; PAM sequence: ATGAAT
acataattatacaagccact

SEQ ID NO: 21168 - DNA, 20 bp, Artificial Sequence
  Description of Artificial Sequence: Synthetic oligonucleotide
  Target: LAMA2; (-) strand; PAM type: NNGRRT; PAM sequence: ATGGAT
ttgaaaatacagaaaagatg

SEQ ID NO: 21169 - DNA, 20 bp, Artificial Sequence
  Description of Artificial Sequence: Synthetic oligonucleotide
  Target: LAMA2; (-) strand; PAM type: NNGRRT; PAM sequence: AAGAAT
tagagatgcatgagctatca

SEQ ID NO: 21170 - DNA, 20 bp, Artificial Sequence
  Description of Artificial Sequence: Synthetic oligonucleotide
  Target: LAMA2; (-) strand; PAM type: NNGRRT; PAM sequence: TGGGAT
aggttctgctatttgttaaa

SEQ ID NO: 21171 - DNA, 20 bp, Artificial Sequence
  Description of Artificial Sequence: Synthetic oligonucleotide
  Target: LAMA2; (-) strand; PAM type: NNGRRT; PAM sequence: AAGAAT
ttctggaaatttcaaaatag

SEQ ID NO: 21172 - DNA, 20 bp, Artificial Sequence
  Description of Artificial Sequence: Synthetic oligonucleotide
  Target: LAMA2; (-) strand; PAM type: NNGRRT; PAM sequence: AAGAGT
tgacatgcaaaacttaaaca

SEQ ID NO: 21173 - DNA, 20 bp, Artificial Sequence
  Description of Artificial Sequence: Synthetic oligonucleotide
  Target: LAMA2; (-) strand; PAM type: NNGRRT; PAM sequence: AAGAAT
actgtatctagatacagtcc

SEQ ID NO: 21174 - DNA, 20 bp, Artificial Sequence
  Description of Artificial Sequence: Synthetic oligonucleotide
  Target: LAMA2; (-) strand; PAM type: NNGRRT; PAM sequence: CAGAAT
aattctgatccttttaattt

SEQ ID NO: 21175 - DNA, 20 bp, Artificial Sequence
  Description of Artificial Sequence: Synthetic oligonucleotide
  Target: LAMA2; (-) strand; PAM type: NNGRRT; PAM sequence: TGGAAT
tattgtgaaatctaactgcc

SEQ ID NO: 21176 - DNA, 20 bp, Artificial Sequence
  Description of Artificial Sequence: Synthetic oligonucleotide
  Target: LAMA2; (-) strand; PAM type: NNGRRT; PAM sequence: CTGAAT
ggccagagaccagaactcgc

SEQ ID NO: 21177 - DNA, 20 bp, Artificial Sequence
  Description of Artificial Sequence: Synthetic oligonucleotide
  Target: LAMA2; (-) strand; PAM type: NNGRRT; PAM sequence: ATGAAT
gactactagccacatttcag

SEQ ID NO: 21178 - DNA, 20 bp, Artificial Sequence
  Description of Artificial Sequence: Synthetic oligonucleotide
  Target: LAMA2; (-) strand; PAM type: NNGRRT; PAM sequence: AAGGAT
gactaacaaactccatggca

SEQ ID NO: 21179 - DNA, 20 bp, Artificial Sequence
  Description of Artificial Sequence: Synthetic oligonucleotide
  Target: LAMA2; (-) strand; PAM type: NNGRRT; PAM sequence: ATGAAT
cttaaataataaatgaatag

SEQ ID NO: 21180 - DNA, 20 bp, Artificial Sequence
  Description of Artificial Sequence: Synthetic oligonucleotide
  Target: LAMA2; (-) strand; PAM type: NNGRRT; PAM sequence: ATGAAT
actaaatacttaaataataa

SEQ ID NO: 21181 - DNA, 20 bp, Artificial Sequence
  Description of Artificial Sequence: Synthetic oligonucleotide
  Target: LAMA2; (-) strand; PAM type: NNGRRT; PAM sequence: ATGGGT
atggatggatgggtggacgg

SEQ ID NO: 21182 - DNA, 20 bp, Artificial Sequence
  Description of Artificial Sequence: Synthetic oligonucleotide
  Target: LAMA2; (-) strand; PAM type: NNGRRT; PAM sequence: ACGGAT
atggatggatggatgggtgg

SEQ ID NO: 21183 - DNA, 20 bp, Artificial Sequence
  Description of Artificial Sequence: Synthetic oligonucleotide
  Target: LAMA2; (-) strand; PAM type: NNGRRT; PAM sequence: ATGGGT
atgaatggatggatggatgg

SEQ ID NO: 21184 - DNA, 20 bp, Artificial Sequence
  Description of Artificial Sequence: Synthetic oligonucleotide
  Target: LAMA2; (-) strand; PAM type: NNGRRT; PAM sequence: ATGGAT
attgatgaatggatggatgg

SEQ ID NO: 21185 - DNA, 20 bp, Artificial Sequence
  Description of Artificial Sequence: Synthetic oligonucleotide
  Target: LAMA2; (-) strand; PAM type: NNGRRT; PAM sequence: ATGGAT
gtgaattgatgaatggatgg

SEQ ID NO: 21186 - DNA, 20 bp, Artificial Sequence
  Description of Artificial Sequence: Synthetic oligonucleotide
  Target: LAMA2; (-) strand; PAM type: NNGRRT; PAM sequence: ATGGAT
atgggtgaattgatgaatgg

SEQ ID NO: 21187 - DNA, 20 bp, Artificial Sequence
  Description of Artificial Sequence: Synthetic oligonucleotide
  Target: LAMA2; (-) strand; PAM type: NNGRRT; PAM sequence: ATGGAT
tcgaatgggtgaattgatga

SEQ ID NO: 21188 - DNA, 20 bp, Artificial Sequence
  Description of Artificial Sequence: Synthetic oligonucleotide
  Target: LAMA2; (-) strand; PAM type: NNGRRT; PAM sequence: ATGAAT
tttgtcgaatgggtgaattg

SEQ ID NO: 21189 - DNA, 20 bp, Artificial Sequence
  Description of Artificial Sequence: Synthetic oligonucleotide
  Target: LAMA2; (-) strand; PAM type: NNGRRT; PAM sequence: GTGAAT
agtagacttttgtcgaatgg

SEQ ID NO: 21190 - DNA, 20 bp, Artificial Sequence
  Description of Artificial Sequence: Synthetic oligonucleotide
  Target: LAMA2; (-) strand; PAM type: NNGRRT; PAM sequence: ATGGGT
gttcagtagacttttgtcga

SEQ ID NO: 21191 - DNA, 20 bp, Artificial Sequence
  Description of Artificial Sequence: Synthetic oligonucleotide
  Target: LAMA2; (-) strand; PAM type: NNGRRT; PAM sequence: TCGAAT
tcatgttcagtagacttttg

SEQ ID NO: 21192 - DNA, 20 bp, Artificial Sequence
  Description of Artificial Sequence: Synthetic oligonucleotide
  Target: LAMA2; (-) strand; PAM type: NNGRRT; PAM sequence: CAGGAT
tatcttgccatctatatatg

SEQ ID NO: 21193 - DNA, 20 bp, Artificial Sequence
  Description of Artificial Sequence: Synthetic oligonucleotide
  Target: LAMA2; (-) strand; PAM type: NNGRRT; PAM sequence: AAGAGT
cttaacacaacggggttttg

SEQ ID NO: 21194 - DNA, 20 bp, Artificial Sequence
  Description of Artificial Sequence: Synthetic oligonucleotide
  Target: LAMA2; (-) strand; PAM type: NNGRRT; PAM sequence: CGGGGT
gataagtctccttaacacaa

SEQ ID NO: 21195 - DNA, 20 bp, Artificial Sequence
  Description of Artificial Sequence: Synthetic oligonucleotide
  Target: LAMA2; (-) strand; PAM type: NNGRRT; PAM sequence: CAGAAT
tttggatatatatctagaaa

SEQ ID NO: 21196 - DNA, 20 bp, Artificial Sequence
  Description of Artificial Sequence: Synthetic oligonucleotide
  Target: LAMA2; (-) strand; PAM type: NNGRRT; PAM sequence: TTGGAT
aatacctattttcagttctt

SEQ ID NO: 21197 - DNA, 20 bp, Artificial Sequence
  Description of Artificial Sequence: Synthetic oligonucleotide
  Target: LAMA2; (-) strand; PAM type: NNGRRT; PAM sequence: TTGGAT
attcatcagttgatgaatat

SEQ ID NO: 21198 - DNA, 20 bp, Artificial Sequence
  Description of Artificial Sequence: Synthetic oligonucleotide
  Target: LAMA2; (-) strand; PAM type: NNGRRT; PAM sequence: ATGAAT
gtttattcattcatcagttg

SEQ ID NO: 21199 - DNA, 20 bp, Artificial Sequence
  Description of Artificial Sequence: Synthetic oligonucleotide
  Target: LAMA2; (-) strand; PAM type: NNGRRT; PAM sequence: CAGAAT
tatcagcccaaaagaaaacc

SEQ ID NO: 21200 - DNA, 20 bp, Artificial Sequence
  Description of Artificial Sequence: Synthetic oligonucleotide
  Target: LAMA2; (-) strand; PAM type: NNGRRT; PAM sequence: TAGGAT
aggaactttgacatttgggg

SEQ ID NO: 21201 - DNA, 20 bp, Artificial Sequence
  Description of Artificial Sequence: Synthetic oligonucleotide
  Target: LAMA2; (-) strand; PAM type: NNGRRT; PAM sequence: TGGGGT
tagagaggaactttgacatt

SEQ ID NO: 21202 - DNA, 20 bp, Artificial Sequence
  Description of Artificial Sequence: Synthetic oligonucleotide
  Target: LAMA2; (-) strand; PAM type: NNGRRT; PAM sequence: TTGAGT
aactcatccaacactattaa

SEQ ID NO: 21203 - DNA, 20 bp, Artificial Sequence
  Description of Artificial Sequence: Synthetic oligonucleotide
  Target: LAMA2; (-) strand; PAM type: NNGRRT; PAM sequence: CTGAGT
ggatggaatcatcctggctg

SEQ ID NO: 21204 - DNA, 20 bp, Artificial Sequence
  Description of Artificial Sequence: Synthetic oligonucleotide
  Target: LAMA2; (-) strand; PAM type: NNGRRT; PAM sequence: TGGAAT
accagatataggcagttgga

SEQ ID NO: 21205 - DNA, 20 bp, Artificial Sequence
  Description of Artificial Sequence: Synthetic oligonucleotide
  Target: LAMA2; (-) strand; PAM type: NNGRRT; PAM sequence: TTGGAT
aaatcaccagatataggcag

SEQ ID NO: 21206 - DNA, 20 bp, Artificial Sequence
  Description of Artificial Sequence: Synthetic oligonucleotide
  Target: LAMA2; (-) strand; PAM type: NNGRRT; PAM sequence: TTGAAT
ctagacacttgacagtactt

SEQ ID NO: 21207 - DNA, 20 bp, Artificial Sequence
  Description of Artificial Sequence: Synthetic oligonucleotide
  Target: LAMA2; (-) strand; PAM type: NNGRRT; PAM sequence: GGGAAT
ggaatcaatgctgggaattt

SEQ ID NO: 21208 - DNA, 20 bp, Artificial Sequence
  Description of Artificial Sequence: Synthetic oligonucleotide
  Target: LAMA2; (-) strand; PAM type: NNGRRT; PAM sequence: GGGAAT
tagatttgggaatcaatgct

SEQ ID NO: 21209 - DNA, 20 bp, Artificial Sequence
  Description of Artificial Sequence: Synthetic oligonucleotide
  Target: LAMA2; (-) strand; PAM type: NNGRRT; PAM sequence: GGGAAT
ccaaataacttgttagattt

SEQ ID NO: 21210 - DNA, 20 bp, Artificial Sequence
  Description of Artificial Sequence: Synthetic oligonucleotide
  Target: LAMA2; (-) strand; PAM type: NNGRRT; PAM sequence: AGGAGT
catttttcagttcctttctc

SEQ ID NO: 21211 - DNA, 20 bp, Artificial Sequence
  Description of Artificial Sequence: Synthetic oligonucleotide
  Target: LAMA2; (-) strand; PAM type: NNGRRT; PAM sequence: ATGAAT
tgagcttgatttaaaaggaa

SEQ ID NO: 21212 - DNA, 20 bp, Artificial Sequence
  Description of Artificial Sequence: Synthetic oligonucleotide
  Target: LAMA2; (-) strand; PAM type: NNGRRT; PAM sequence: GTGAGT
attattaagaatacagtttt

SEQ ID NO: 21213 - DNA, 20 bp, Artificial Sequence
  Description of Artificial Sequence: Synthetic oligonucleotide
  Target: LAMA2; (-) strand; PAM type: NNGRRT; PAM sequence: AAGAAT
atcttaaaagcttaattatt

SEQ ID NO: 21214 - DNA, 20 bp, Artificial Sequence
  Description of Artificial Sequence: Synthetic oligonucleotide
  Target: LAMA2; (-) strand; PAM type: NNGRRT; PAM sequence: CAGAGT
gtacaatctggtgattttag

SEQ ID NO: 21215 - DNA, 20 bp, Artificial Sequence
  Description of Artificial Sequence: Synthetic oligonucleotide
  Target: LAMA2; (-) strand; PAM type: NNGRRT; PAM sequence: TGGAAT
gactgacttagaatgatctc

SEQ ID NO: 21216 - DNA, 20 bp, Artificial Sequence
  Description of Artificial Sequence: Synthetic oligonucleotide
  Target: LAMA2; (-) strand; PAM type: NNGRRT; PAM sequence: TAGAAT
aagtgctcagttgactgact

SEQ ID NO: 21217 - DNA, 20 bp, Artificial Sequence
  Description of Artificial Sequence: Synthetic oligonucleotide
  Target: LAMA2; (-) strand; PAM type: NNGRRT; PAM sequence: AAGGGT
tttttaaaatcatatagtta

SEQ ID NO: 21218 - DNA, 20 bp, Artificial Sequence
  Description of Artificial Sequence: Synthetic oligonucleotide
  Target: LAMA2; (-) strand; PAM type: NNGRRT; PAM sequence: GAGAAT
tccaaatgctgaaaagatat

SEQ ID NO: 21219 - DNA, 20 bp, Artificial Sequence
  Description of Artificial Sequence: Synthetic oligonucleotide
  Target: LAMA2; (-) strand; PAM type: NNGRRT; PAM sequence: ATGAAT
catgctgagaaaggaagctg

SEQ ID NO: 21220 - DNA, 20 bp, Artificial Sequence
  Description of Artificial Sequence: Synthetic oligonucleotide
  Target: LAMA2; (-) strand; PAM type: NNGRRT; PAM sequence: AGGAAT
cttaggtattatacagctgt

SEQ ID NO: 21221 - DNA, 20 bp, Artificial Sequence
  Description of Artificial Sequence: Synthetic oligonucleotide
  Target: LAMA2; (-) strand; PAM type: NNGRRT; PAM sequence: GTGAAT
ggcagaggaaaaaagagatg

SEQ ID NO: 21222 - DNA, 20 bp, Artificial Sequence
  Description of Artificial Sequence: Synthetic oligonucleotide
  Target: LAMA2; (-) strand; PAM type: NNGRRT; PAM sequence: GCGGAT
catcagtaggataggagaca

SEQ ID NO: 21223 - DNA, 20 bp, Artificial Sequence
  Description of Artificial Sequence: Synthetic oligonucleotide
  Target: LAMA2; (-) strand; PAM type: NNGRRT; PAM sequence: TAGGAT
tgctgcaatgcttccatcag

SEQ ID NO: 21224 - DNA, 20 bp, Artificial Sequence
  Description of Artificial Sequence: Synthetic oligonucleotide
  Target: LAMA2; (-) strand; PAM type: NNGRRT; PAM sequence: AAGGAT
gagggaactttgaaagcact

SEQ ID NO: 21225 - DNA, 20 bp, Artificial Sequence
  Description of Artificial Sequence: Synthetic oligonucleotide
  Target: LAMA2; (-) strand; PAM type: NNGRRT; PAM sequence: TAGAAT
agaaaaaaaacagctcttat

SEQ ID NO: 21226 - DNA, 20 bp, Artificial Sequence
  Description of Artificial Sequence: Synthetic oligonucleotide
  Target: LAMA2; (-) strand; PAM type: NNGRRT; PAM sequence: AAGAGT
ggcaaaatatctcagagaga

SEQ ID NO: 21227 - DNA, 20 bp, Artificial Sequence
  Description of Artificial Sequence: Synthetic oligonucleotide
  Target: LAMA2; (-) strand; PAM type: NNGRRT; PAM sequence: TTGGAT
aaaaaatagagtgctaaatt

SEQ ID NO: 21228 - DNA, 20 bp, Artificial Sequence
  Description of Artificial Sequence: Synthetic oligonucleotide
  Target: LAMA2; (-) strand; PAM type: NNGRRT; PAM sequence: TAGAGT
agagaaaagtaaaaaaaaaa

SEQ ID NO: 21229 - DNA, 20 bp, Artificial Sequence
  Description of Artificial Sequence: Synthetic oligonucleotide
  Target: LAMA2; (-) strand; PAM type: NNGRRT; PAM sequence: CAGAAT
agtagaggaaaagtgtgata

SEQ ID NO: 21230 - DNA, 20 bp, Artificial Sequence
  Description of Artificial Sequence: Synthetic oligonucleotide
  Target: LAMA2; (-) strand; PAM type: NNGRRT; PAM sequence: TAGGAT
cattaatcttattataaatc

SEQ ID NO: 21231 - DNA, 20 bp, Artificial Sequence
  Description of Artificial Sequence: Synthetic oligonucleotide
  Target: LAMA2; (-) strand; PAM type: NNGRRT; PAM sequence: TAGGAT
gcaaataaaaattgttacct

SEQ ID NO: 21232 - DNA, 20 bp, Artificial Sequence
  Description of Artificial Sequence: Synthetic oligonucleotide
  Target: LAMA2; (-) strand; PAM type: NNGRRT; PAM sequence: TAGAGT
agaactgacaaagcaatgcc

SEQ ID NO: 21233 - DNA, 20 bp, Artificial Sequence
  Description of Artificial Sequence: Synthetic oligonucleotide
  Target: LAMA2; (-) strand; PAM type: NNGRRT; PAM sequence: ATGAAT
ttaaaggaaacacagctgtc

SEQ ID NO: 21234 - DNA, 20 bp, Artificial Sequence
  Description of Artificial Sequence: Synthetic oligonucleotide
  Target: LAMA2; (-) strand; PAM type: NNGRRT; PAM sequence: GTGAAT
ctagttttatttctagaaag

SEQ ID NO: 21235 - DNA, 20 bp, Artificial Sequence
  Description of Artificial Sequence: Synthetic oligonucleotide
  Target: LAMA2; (-) strand; PAM type: NNGRRT; PAM sequence: ATGAAT
attatttttctctcatctac

SEQ ID NO: 21236 - DNA, 20 bp, Artificial Sequence
  Description of Artificial Sequence: Synthetic oligonucleotide
  Target: LAMA2; (-) strand; PAM type: NNGRRT; PAM sequence: TTGGGT
ttttatatgtaaaatcaaat

SEQ ID NO: 21237 - DNA, 20 bp, Artificial Sequence
  Description of Artificial Sequence: Synthetic oligonucleotide
  Target: LAMA2; (-) strand; PAM type: NNGRRT; PAM sequence: TGGAAT
tcttaaaagttcaaatagtt

SEQ ID NO: 21238 - DNA, 20 bp, Artificial Sequence
  Description of Artificial Sequence: Synthetic oligonucleotide
  Target: LAMA2; (-) strand; PAM type: NNGRRT; PAM sequence: GAGGAT
atttattatgccaattgaga

SEQ ID NO: 21239 - DNA, 20 bp, Artificial Sequence
  Description of Artificial Sequence: Synthetic oligonucleotide
  Target: LAMA2; (-) strand; PAM type: NNGRRT; PAM sequence: TAGAAT
aacaagccttaaaacaagag

SEQ ID NO: 21240 - DNA, 20 bp, Artificial Sequence
  Description of Artificial Sequence: Synthetic oligonucleotide
  Target: LAMA2; (-) strand; PAM type: NNGRRT; PAM sequence: AAGAGT
gtggaaacaagccttaaaac

SEQ ID NO: 21241 - DNA, 20 bp, Artificial Sequence
  Description of Artificial Sequence: Synthetic oligonucleotide
  Target: LAMA2; (-) strand; PAM type: NNGRRT; PAM sequence: AAGGAT
tttgtataaaagataatgca

SEQ ID NO: 21242 - DNA, 20 bp, Artificial Sequence
  Description of Artificial Sequence: Synthetic oligonucleotide
  Target: LAMA2; (-) strand; PAM type: NNGRRT; PAM sequence: TAGAAT
ttttatattcagtgggcact

SEQ ID NO: 21243 - DNA, 20 bp, Artificial Sequence
  Description of Artificial Sequence: Synthetic oligonucleotide
  Target: LAMA2; (-) strand; PAM type: NNGRRT; PAM sequence: TAGAAT
cagaatttatcaaacatatc

SEQ ID NO: 21244 - DNA, 20 bp, Artificial Sequence
  Description of Artificial Sequence: Synthetic oligonucleotide
  Target: LAMA2; (-) strand; PAM type: NNGRRT; PAM sequence: CAGAAT
aatttatacaggtaaattta

SEQ ID NO: 21245 - DNA, 20 bp, Artificial Sequence
  Description of Artificial Sequence: Synthetic oligonucleotide
  Target: LAMA2; (-) strand; PAM type: NNGRRT; PAM sequence: AGGGAT
tctccctaaacagataggac

SEQ ID NO: 21246 - DNA, 20 bp, Artificial Sequence
  Description of Artificial Sequence: Synthetic oligonucleotide
  Target: LAMA2; (-) strand; PAM type: NNGRRT; PAM sequence: TTGAAT
cactgcagtagctcatccct

SEQ ID NO: 21247 - DNA, 20 bp, Artificial Sequence
  Description of Artificial Sequence: Synthetic oligonucleotide
  Target: LAMA2; (-) strand; PAM type: NNGRRT; PAM sequence: ATGGAT
tgattcaattaagttctttt

SEQ ID NO: 21248 - DNA, 20 bp, Artificial Sequence
  Description of Artificial Sequence: Synthetic oligonucleotide
  Target: LAMA2; (-) strand; PAM type: NNGRRT; PAM sequence: GAGAGT
taaggaaaaaatgaatttta

SEQ ID NO: 21249 - DNA, 20 bp, Artificial Sequence
  Description of Artificial Sequence: Synthetic oligonucleotide
  Target: LAMA2; (-) strand; PAM type: NNGRRT; PAM sequence: ATGAAT
aaagttttgataaggaaaaa

SEQ ID NO: 21250 - DNA, 20 bp, Artificial Sequence
  Description of Artificial Sequence: Synthetic oligonucleotide
  Target: LAMA2; (-) strand; PAM type: NNGRRT; PAM sequence: GTGAAT
aaggataggactgaataata

SEQ ID NO: 21251 - DNA, 20 bp, Artificial Sequence
  Description of Artificial Sequence: Synthetic oligonucleotide
  Target: LAMA2; (-) strand; PAM type: NNGRRT; PAM sequence: CTGAAT
gaaataatgaaaggatagga

SEQ ID NO: 21252 - DNA, 20 bp, Artificial Sequence
  Description of Artificial Sequence: Synthetic oligonucleotide
  Target: LAMA2; (-) strand; PAM type: NNGRRT; PAM sequence: AAGGAT
aaaagcaaatgaaataatga

SEQ ID NO: 21253 - DNA, 20 bp, Artificial Sequence
  Description of Artificial Sequence: Synthetic oligonucleotide
  Target: LAMA2; (-) strand; PAM type: NNGRRT; PAM sequence: TAGAAT
gatattagtgataacaaggc

SEQ ID NO: 21254 - DNA, 20 bp, Artificial Sequence
  Description of Artificial Sequence: Synthetic oligonucleotide
  Target: LAMA2; (-) strand; PAM type: NNGRRT; PAM sequence: CAGGAT
actcagcttttaagggatcc

SEQ ID NO: 21255 - DNA, 20 bp, Artificial Sequence
  Description of Artificial Sequence: Synthetic oligonucleotide
  Target: LAMA2; (-) strand; PAM type: NNGRRT; PAM sequence: AGGGAT
tggcgtttactcagctttta

SEQ ID NO: 21256 - DNA, 20 bp, Artificial Sequence
  Description of Artificial Sequence: Synthetic oligonucleotide
  Target: LAMA2; (-) strand; PAM type: NNGRRT; PAM sequence: TGGAAT
gccagaggttctcagcaagc

SEQ ID NO: 21257 - DNA, 20 bp, Artificial Sequence
  Description of Artificial Sequence: Synthetic oligonucleotide
  Target: LAMA2; (-) strand; PAM type: NNGRRT; PAM sequence: TGGAGT
gtaaaagagaatgtctacaa

SEQ ID NO: 21258 - DNA, 20 bp, Artificial Sequence
  Description of Artificial Sequence: Synthetic oligonucleotide
  Target: LAMA2; (-) strand; PAM type: NNGRRT; PAM sequence: GAGAAT
tggccccaaatgaagtaaaa

SEQ ID NO: 21259 - DNA, 20 bp, Artificial Sequence
  Description of Artificial Sequence: Synthetic oligonucleotide
  Target: LAMA2; (-) strand; PAM type: NNGRRT; PAM sequence: CTGAAT
tagaaatgagaaaaaagatc

SEQ ID NO: 21260 - DNA, 20 bp, Artificial Sequence
  Description of Artificial Sequence: Synthetic oligonucleotide
  Target: LAMA2; (-) strand; PAM type: NNGRRT; PAM sequence: TAGGGT
atggcactattttccctgtg

SEQ ID NO: 21261 - DNA, 20 bp, Artificial Sequence
  Description of Artificial Sequence: Synthetic oligonucleotide
  Target: LAMA2; (-) strand; PAM type: NNGRRT; PAM sequence: TAGAAT
caccctgtttatttccttca

SEQ ID NO: 21262 - DNA, 20 bp, Artificial Sequence
  Description of Artificial Sequence: Synthetic oligonucleotide
  Target: LAMA2; (-) strand; PAM type: NNGRRT; PAM sequence: GAGAAT
gtaatgatgttccatgccat

SEQ ID NO: 21263 - DNA, 20 bp, Artificial Sequence
  Description of Artificial Sequence: Synthetic oligonucleotide
  Target: LAMA2; (-) strand; PAM type: NNGRRT; PAM sequence: AGGAGT
caggaggatcacttgagctc

SEQ ID NO: 21264 - DNA, 20 bp, Artificial Sequence
  Description of Artificial Sequence: Synthetic oligonucleotide
  Target: LAMA2; (-) strand; PAM type: NNGRRT; PAM sequence: GAGGAT
tactcaggaggctgaggcag

SEQ ID NO: 21265 - DNA, 20 bp, Artificial Sequence
  Description of Artificial Sequence: Synthetic oligonucleotide
  Target: LAMA2; (-) strand; PAM type: NNGRRT; PAM sequence: AGGAGT
tgggaggattgcttgagctc

SEQ ID NO: 21266 - DNA, 20 bp, Artificial Sequence
  Description of Artificial Sequence: Synthetic oligonucleotide
  Target: LAMA2; (-) strand; PAM type: NNGRRT; PAM sequence: GAGGAT
actttgggaggctgaggtgg

SEQ ID NO: 21267 - DNA, 20 bp, Artificial Sequence
  Description of Artificial Sequence: Synthetic oligonucleotide
  Target: LAMA2; (-) strand; PAM type: NNGRRT; PAM sequence: CTGGGT
tcaaaaaaatgtaactcagg

SEQ ID NO: 21268 - DNA, 20 bp, Artificial Sequence
  Description of Artificial Sequence: Synthetic oligonucleotide
  Target: LAMA2; (-) strand; PAM type: NNGRRT; PAM sequence: TAGAAT
ttctactatcaaaatatata

SEQ ID NO: 21269 - DNA, 20 bp, Artificial Sequence
  Description of Artificial Sequence: Synthetic oligonucleotide
  Target: LAMA2; (-) strand; PAM type: NNGRRT; PAM sequence: TCGAAT
ctctcccctgacatacagtc

SEQ ID NO: 21270 - DNA, 20 bp, Artificial Sequence
  Description of Artificial Sequence: Synthetic oligonucleotide
  Target: LAMA2; (-) strand; PAM type: NNGRRT; PAM sequence: ATGGAT
gaaaatttctaaactggact

SEQ ID NO: 21271 - DNA, 20 bp, Artificial Sequence
  Description of Artificial Sequence: Synthetic oligonucleotide
  Target: LAMA2; (-) strand; PAM type: NNGRRT; PAM sequence: CTGAAT
agacatgctgaatttaagac

SEQ ID NO: 21272 - DNA, 20 bp, Artificial Sequence
  Description of Artificial Sequence: Synthetic oligonucleotide
  Target: LAMA2; (-) strand; PAM type: NNGRRT; PAM sequence: CTGAAT
ctctagaccagacagacatg

SEQ ID NO: 21273 - DNA, 20 bp, Artificial Sequence
  Description of Artificial Sequence: Synthetic oligonucleotide
  Target: LAMA2; (-) strand; PAM type: NNGRRT; PAM sequence: CTGGGT
taaatcaattgcactttctc

SEQ ID NO: 21274 - DNA, 20 bp, Artificial Sequence
  Description of Artificial Sequence: Synthetic oligonucleotide
  Target: LAMA2; (-) strand; PAM type: NNGRRT; PAM sequence: CTGGGT
agtaataactttcccttcta

SEQ ID NO: 21275 - DNA, 20 bp, Artificial Sequence
  Description of Artificial Sequence: Synthetic oligonucleotide
  Target: LAMA2; (-) strand; PAM type: NNGRRT; PAM sequence: ATGGAT
ctcaatattcactctctctg

SEQ ID NO: 21276 - DNA, 20 bp, Artificial Sequence
  Description of Artificial Sequence: Synthetic oligonucleotide
  Target: LAMA2; (-) strand; PAM type: NNGRRT; PAM sequence: TGGGGT
aacaagtgatgtggggaatg

SEQ ID NO: 21277 - DNA, 20 bp, Artificial Sequence
  Description of Artificial Sequence: Synthetic oligonucleotide
  Target: LAMA2; (-) strand; PAM type: NNGRRT; PAM sequence: GGGAAT
cattccaaacaagtgatgtg

SEQ ID NO: 21278 - DNA, 20 bp, Artificial Sequence
  Description of Artificial Sequence: Synthetic oligonucleotide
  Target: LAMA2; (-) strand; PAM type: NNGRRT; PAM sequence: AAGGAT
ttcataagggggtagaaatt

SEQ ID NO: 21279 - DNA, 20 bp, Artificial Sequence
  Description of Artificial Sequence: Synthetic oligonucleotide
  Target: LAMA2; (-) strand; PAM type: NNGRRT; PAM sequence: GGGGGT
gtgaagctacatattcataa

SEQ ID NO: 21280 - DNA, 20 bp, Artificial Sequence
  Description of Artificial Sequence: Synthetic oligonucleotide
  Target: LAMA2; (-) strand; PAM type: NNGRRT; PAM sequence: TGGGAT
tattattatactttaagttc

SEQ ID NO: 21281 - DNA, 20 bp, Artificial Sequence
  Description of Artificial Sequence: Synthetic oligonucleotide
  Target: LAMA2; (-) strand; PAM type: NNGRRT; PAM sequence: CAGGAT
tggaaatgttccttctgcct

SEQ ID NO: 21282 - DNA, 20 bp, Artificial Sequence
  Description of Artificial Sequence: Synthetic oligonucleotide
  Target: LAMA2; (-) strand; PAM type: NNGRRT; PAM sequence: TAGAAT
cactgaagtaataaaggata

SEQ ID NO: 21283 - DNA, 20 bp, Artificial Sequence
  Description of Artificial Sequence: Synthetic oligonucleotide
  Target: LAMA2; (-) strand; PAM type: NNGRRT; PAM sequence: AAGGAT
gagaaaccactgaagtaata

SEQ ID NO: 21284 - DNA, 20 bp, Artificial Sequence
  Description of Artificial Sequence: Synthetic oligonucleotide
  Target: LAMA2; (-) strand; PAM type: NNGRRT; PAM sequence: TCGAGT
tttactatatttctggatgg

SEQ ID NO: 21285 - DNA, 20 bp, Artificial Sequence
  Description of Artificial Sequence: Synthetic oligonucleotide
  Target: LAMA2; (-) strand; PAM type: NNGRRT; PAM sequence: CTGGAT
gtgggttatttactatattt

SEQ ID NO: 21286 - DNA, 20 bp, Artificial Sequence
  Description of Artificial Sequence: Synthetic oligonucleotide
  Target: LAMA2; (-) strand; PAM type: NNGRRT; PAM sequence: GTGGGT
ctccagtgaaattgcatctt

SEQ ID NO: 21287 - DNA, 20 bp, Artificial Sequence
  Description of Artificial Sequence: Synthetic oligonucleotide
  Target: LAMA2; (-) strand; PAM type: NNGRRT; PAM sequence: ATGGAT
tctgtggggattactacaaa

SEQ ID NO: 21288 - DNA, 20 bp, Artificial Sequence
  Description of Artificial Sequence: Synthetic oligonucleotide
  Target: LAMA2; (-) strand; PAM type: NNGRRT; PAM sequence: GGGGAT
taattaagttttccatctgt

SEQ ID NO: 21289 - DNA, 20 bp, Artificial Sequence
  Description of Artificial Sequence: Synthetic oligonucleotide
  Target: LAMA2; (-) strand; PAM type: NNGRRT; PAM sequence: CAGGGT
aaactgaattctgattaaaa

SEQ ID NO: 21290 - DNA, 20 bp, Artificial Sequence
  Description of Artificial Sequence: Synthetic oligonucleotide
  Target: LAMA2; (-) strand; PAM type: NNGRRT; PAM sequence: CTGAAT
aacactttattatataaaaa

SEQ ID NO: 21291 - DNA, 20 bp, Artificial Sequence
  Description of Artificial Sequence: Synthetic oligonucleotide
  Target: LAMA2; (-) strand; PAM type: NNGRRT; PAM sequence: TGGAAT
cccaagcaattttgattctc

SEQ ID NO: 21292 - DNA, 20 bp, Artificial Sequence
  Description of Artificial Sequence: Synthetic oligonucleotide
  Target: LAMA2; (-) strand; PAM type: NNGRRT; PAM sequence: GAGAGT
atcatatagtcttagcctaa

SEQ ID NO: 21293 - DNA, 20 bp, Artificial Sequence
  Description of Artificial Sequence: Synthetic oligonucleotide
  Target: LAMA2; (-) strand; PAM type: NNGRRT; PAM sequence: AAGAAT
taaaataaagcagagatata

SEQ ID NO: 21294 - DNA, 20 bp, Artificial Sequence
  Description of Artificial Sequence: Synthetic oligonucleotide
  Target: LAMA2; (-) strand; PAM type: NNGRRT; PAM sequence: CTGAAT
taaggtccccagggtagtag

SEQ ID NO: 21295 - DNA, 20 bp, Artificial Sequence
  Description of Artificial Sequence: Synthetic oligonucleotide
  Target: LAMA2; (-) strand; PAM type: NNGRRT; PAM sequence: CAGGGT
actcaagtgtttaaggtccc

SEQ ID NO: 21296 - DNA, 20 bp, Artificial Sequence
  Description of Artificial Sequence: Synthetic oligonucleotide
  Target: LAMA2; (-) strand; PAM type: NNGRRT; PAM sequence: ATGAAT
aatttaattcttgatttaat

SEQ ID NO: 21297 - DNA, 20 bp, Artificial Sequence
  Description of Artificial Sequence: Synthetic oligonucleotide
  Target: LAMA2; (-) strand; PAM type: NNGRRT; PAM sequence: GGGGAT
ttttacacttttcatattat

SEQ ID NO: 21298 - DNA, 20 bp, Artificial Sequence
  Description of Artificial Sequence: Synthetic oligonucleotide
  Target: LAMA2; (-) strand; PAM type: NNGRRT; PAM sequence: GTGAAT
gcaaaggagaagcagctctg

SEQ ID NO: 21299 - DNA, 20 bp, Artificial Sequence
  Description of Artificial Sequence: Synthetic oligonucleotide
  Target: LAMA2; (-) strand; PAM type: NNGRRT; PAM sequence: CAGGAT
ccaatcctaaggtttcttag

SEQ ID NO: 21300 - DNA, 20 bp, Artificial Sequence
  Description of Artificial Sequence: Synthetic oligonucleotide
  Target: LAMA2; (-) strand; PAM type: NNGRRT; PAM sequence: CAGAAT
taatgtgcccttgagttaat

SEQ ID NO: 21301 - DNA, 20 bp, Artificial Sequence
  Description of Artificial Sequence: Synthetic oligonucleotide
  Target: LAMA2; (-) strand; PAM type: NNGRRT; PAM sequence: TTGAGT
aatataaaactaatgtgccc

SEQ ID NO: 21302 - DNA, 20 bp, Artificial Sequence
  Description of Artificial Sequence: Synthetic oligonucleotide
  Target: LAMA2; (-) strand; PAM type: NNGRRT; PAM sequence: GAGAGT
cttaaattcttcagggaaat

SEQ ID NO: 21303 - DNA, 20 bp, Artificial Sequence
  Description of Artificial Sequence: Synthetic oligonucleotide
  Target: LAMA2; (-) strand; PAM type: NNGRRT; PAM sequence: CAGAAT
acattaagaattacaggtaa

SEQ ID NO: 21304 - DNA, 20 bp, Artificial Sequence
  Description of Artificial Sequence: Synthetic oligonucleotide
  Target: LAMA2; (-) strand; PAM type: NNGRRT; PAM sequence: AAGAAT
caagagaaagatagaacatt

SEQ ID NO: 21305 - DNA, 20 bp, Artificial Sequence
  Description of Artificial Sequence: Synthetic oligonucleotide
  Target: LAMA2; (-) strand; PAM type: NNGRRT; PAM sequence: TTGGAT
aaaagccctgaattttcatt

SEQ ID NO: 21306 - DNA, 20 bp, Artificial Sequence
  Description of Artificial Sequence: Synthetic oligonucleotide
  Target: LAMA2; (-) strand; PAM type: NNGRRT; PAM sequence: CTGAAT
attacactgaaacaaaagcc

SEQ ID NO: 21307 - DNA, 20 bp, Artificial Sequence
  Description of Artificial Sequence: Synthetic oligonucleotide
  Target: LAMA2; (-) strand; PAM type: NNGRRT; PAM sequence: CTGAGT
aattccatgtcagttttggg

SEQ ID NO: 21308 - DNA, 20 bp, Artificial Sequence
  Description of Artificial Sequence: Synthetic oligonucleotide
  Target: LAMA2; (-) strand; PAM type: NNGRRT; PAM sequence: TAGGGT
catacttatttttgtcttct

SEQ ID NO: 21309 - DNA, 20 bp, Artificial Sequence
  Description of Artificial Sequence: Synthetic oligonucleotide
  Target: LAMA2; (-) strand; PAM type: NNGRRT; PAM sequence: ATGAGT
atatgactatatggaacatc

SEQ ID NO: 21310 - DNA, 20 bp, Artificial Sequence
  Description of Artificial Sequence: Synthetic oligonucleotide
  Target: LAMA2; (-) strand; PAM type: NNGRRT; PAM sequence: ATGAAT
tttgatttgattttatccta

SEQ ID NO: 21311 - DNA, 20 bp, Artificial Sequence
  Description of Artificial Sequence: Synthetic oligonucleotide
  Target: LAMA2; (-) strand; PAM type: NNGRRT; PAM sequence: ATGAAT
actaatttgctttcatccta

SEQ ID NO: 21312 - DNA, 20 bp, Artificial Sequence
  Description of Artificial Sequence: Synthetic oligonucleotide
  Target: LAMA2; (-) strand; PAM type: NNGRRT; PAM sequence: CTGAAT
ttccttctctcaaaattatg

SEQ ID NO: 21313 - DNA, 20 bp, Artificial Sequence
  Description of Artificial Sequence: Synthetic oligonucleotide
  Target: LAMA2; (-) strand; PAM type: NNGRRT; PAM sequence: TAGGGT
agtaaactaggcatcattag

SEQ ID NO: 21314 - DNA, 20 bp, Artificial Sequence
  Description of Artificial Sequence: Synthetic oligonucleotide
  Target: LAMA2; (-) strand; PAM type: NNGRRT; PAM sequence: TGGAAT
cagaacccatatactcaaaa

SEQ ID NO: 21315 - DNA, 20 bp, Artificial Sequence
  Description of Artificial Sequence: Synthetic oligonucleotide
  Target: LAMA2; (-) strand; PAM type: NNGRRT; PAM sequence: AAGAAT
tgcagggtcagctgaacagt

SEQ ID NO: 21316 - DNA, 20 bp, Artificial Sequence
  Description of Artificial Sequence: Synthetic oligonucleotide
  Target: LAMA2; (-) strand; PAM type: NNGRRT; PAM sequence: CAGGGT
ataaacaagaagctaaaatg

SEQ ID NO: 21317 - DNA, 20 bp, Artificial Sequence
  Description of Artificial Sequence: Synthetic oligonucleotide
  Target: LAMA2; (-) strand; PAM type: NNGRRT; PAM sequence: CTGGGT
aaaaaccatgctacttaatg

SEQ ID NO: 21318 - DNA, 20 bp, Artificial Sequence
  Description of Artificial Sequence: Synthetic oligonucleotide
  Target: LAMA2; (-) strand; PAM type: NNGRRT; PAM sequence: TTGAGT
tggcttacttcaaatggact

SEQ ID NO: 21319 - DNA, 20 bp, Artificial Sequence
  Description of Artificial Sequence: Synthetic oligonucleotide
  Target: LAMA2; (-) strand; PAM type: NNGRRT; PAM sequence: TTGAAT
tgaaatcttcccatgtgaca

SEQ ID NO: 21320 - DNA, 20 bp, Artificial Sequence
  Description of Artificial Sequence: Synthetic oligonucleotide
  Target: LAMA2; (-) strand; PAM type: NNGRRT; PAM sequence: ATGGAT
aagatggaagcttcactctg

SEQ ID NO: 21321 - DNA, 20 bp, Artificial Sequence
  Description of Artificial Sequence: Synthetic oligonucleotide
  Target: LAMA2; (-) strand; PAM type: NNGRRT; PAM sequence: GAGGGT
tgaaaatcttgcataattga

SEQ ID NO: 21322 - DNA, 20 bp, Artificial Sequence
  Description of Artificial Sequence: Synthetic oligonucleotide
  Target: LAMA2; (-) strand; PAM type: NNGRRT; PAM sequence: TTGAAT
tacttaagggttttaaaaaa

SEQ ID NO: 21323 - DNA, 20 bp, Artificial Sequence
  Description of Artificial Sequence: Synthetic oligonucleotide
  Target: LAMA2; (-) strand; PAM type: NNGRRT; PAM sequence: AAGGGT
aattatgtcttcaaatactt

SEQ ID NO: 21324 - DNA, 20 bp, Artificial Sequence
  Description of Artificial Sequence: Synthetic oligonucleotide
  Target: LAMA2; (-) strand; PAM type: NNGRRT; PAM sequence: AAGAAT
gctaaactaagctattactg

SEQ ID NO: 21325 - DNA, 20 bp, Artificial Sequence
  Description of Artificial Sequence: Synthetic oligonucleotide
  Target: LAMA2; (-) strand; PAM type: NNGRRT; PAM sequence: ATGGAT
tgggatttaatgtgcaaaac

SEQ ID NO: 21326 - DNA, 20 bp, Artificial Sequence
  Description of Artificial Sequence: Synthetic oligonucleotide
  Target: LAMA2; (-) strand; PAM type: NNGRRT; PAM sequence: TGGGAT
gccttaataatgcagtatat

SEQ ID NO: 21327 - DNA, 20 bp, Artificial Sequence
  Description of Artificial Sequence: Synthetic oligonucleotide
  Target: LAMA2; (-) strand; PAM type: NNGRRT; PAM sequence: ATGAAT
gcattaaggtcagcttcact

SEQ ID NO: 21328 - DNA, 20 bp, Artificial Sequence
  Description of Artificial Sequence: Synthetic oligonucleotide
  Target: LAMA2; (-) strand; PAM type: NNGRRT; PAM sequence: GTGGAT
gccaatttcatcaactaaat

SEQ ID NO: 21329 - DNA, 20 bp, Artificial Sequence
  Description of Artificial Sequence: Synthetic oligonucleotide
  Target: LAMA2; (-) strand; PAM type: NNGRRT; PAM sequence: ATGAAT
tatggcctcttagctcagac

SEQ ID NO: 21330 - DNA, 20 bp, Artificial Sequence
  Description of Artificial Sequence: Synthetic oligonucleotide
  Target: LAMA2; (-) strand; PAM type: NNGRRT; PAM sequence: AAGAAT
ttagtctgctccctgccagc

SEQ ID NO: 21331 - DNA, 20 bp, Artificial Sequence
  Description of Artificial Sequence: Synthetic oligonucleotide
  Target: LAMA2; (-) strand; PAM type: NNGRRT; PAM sequence: AGGGAT
gagtttattattttggtgtc

SEQ ID NO: 21332 - DNA, 20 bp, Artificial Sequence
  Description of Artificial Sequence: Synthetic oligonucleotide
  Target: LAMA2; (-) strand; PAM type: NNGRRT; PAM sequence: CAGAGT
tctgagaaagaaatgagcat

SEQ ID NO: 21333 - DNA, 20 bp, Artificial Sequence
  Description of Artificial Sequence: Synthetic oligonucleotide
  Target: LAMA2; (-) strand; PAM type: NNGRRT; PAM sequence: CAGGGT
ggatattgagtggacaggca

SEQ ID NO: 21334 - DNA, 20 bp, Artificial Sequence
  Description of Artificial Sequence: Synthetic oligonucleotide
  Target: LAMA2; (-) strand; PAM type: NNGRRT; PAM sequence: TTGAGT
cttacttattggatgggata

SEQ ID NO: 21335 - DNA, 20 bp, Artificial Sequence
  Description of Artificial Sequence: Synthetic oligonucleotide
  Target: LAMA2; (-) strand; PAM type: NNGRRT; PAM sequence: TGGGAT
tttgttacttacttattgga

SEQ ID NO: 21336 - DNA, 20 bp, Artificial Sequence
  Description of Artificial Sequence: Synthetic oligonucleotide
  Target: LAMA2; (-) strand; PAM type: NNGRRT; PAM sequence: TTGGAT
gtaagtttgttacttactta

SEQ ID NO: 21337 - DNA, 20 bp, Artificial Sequence
  Description of Artificial Sequence: Synthetic oligonucleotide
  Target: LAMA2; (-) strand; PAM type: NNGRRT; PAM sequence: TGGGGT
atggatgctgagcttattca

SEQ ID NO: 21338 - DNA, 20 bp, Artificial Sequence
  Description of Artificial Sequence: Synthetic oligonucleotide
  Target: LAMA2; (-) strand; PAM type: NNGRRT; PAM sequence: ATGGAT
tgaaaagtgtacttgcagaa

SEQ ID NO: 21339 - DNA, 20 bp, Artificial Sequence
  Description of Artificial Sequence: Synthetic oligonucleotide
  Target: LAMA2; (-) strand; PAM type: NNGRRT; PAM sequence: TGGGAT
gtgtttattatttatttaca

SEQ ID NO: 21340 - DNA, 20 bp, Artificial Sequence
  Description of Artificial Sequence: Synthetic oligonucleotide
  Target: LAMA2; (-) strand; PAM type: NNGRRT; PAM sequence: TTGAGT
aattggtgtagaaattctat

SEQ ID NO: 21341 - DNA, 20 bp, Artificial Sequence
  Description of Artificial Sequence: Synthetic oligonucleotide
  Target: LAMA2; (-) strand; PAM type: NNGRRT; PAM sequence: TGGAAT
tataaaatatttatgttctt

SEQ ID NO: 21342 - DNA, 20 bp, Artificial Sequence
  Description of Artificial Sequence: Synthetic oligonucleotide
  Target: LAMA2; (-) strand; PAM type: NNGRRT; PAM sequence: ATGGGT
ccttttattaaggtatgaag

SEQ ID NO: 21343 - DNA, 20 bp, Artificial Sequence
  Description of Artificial Sequence: Synthetic oligonucleotide
  Target: LAMA2; (-) strand; PAM type: NNGRRT; PAM sequence: ATGGGT
gattcacaaaaaaatagtgt

SEQ ID NO: 21344 - DNA, 20 bp, Artificial Sequence
  Description of Artificial Sequence: Synthetic oligonucleotide
  Target: LAMA2; (-) strand; PAM type: NNGRRT; PAM sequence: ATGGGT
ttctaaaaagaagggataga

SEQ ID NO: 21345 - DNA, 20 bp, Artificial Sequence
  Description of Artificial Sequence: Synthetic oligonucleotide
  Target: LAMA2; (-) strand; PAM type: NNGRRT; PAM sequence: TAGAAT
atttttctaaaaagaaggga

SEQ ID NO: 21346 - DNA, 20 bp, Artificial Sequence
  Description of Artificial Sequence: Synthetic oligonucleotide
  Target: LAMA2; (-) strand; PAM type: NNGRRT; PAM sequence: AGGGAT
aacgaatttttctaaaaaga

SEQ ID NO: 21347 - DNA, 20 bp, Artificial Sequence
  Description of Artificial Sequence: Synthetic oligonucleotide
  Target: LAMA2; (-) strand; PAM type: NNGRRT; PAM sequence: ACGAAT
gtggttgttctaggtgaaca

SEQ ID NO: 21348 - DNA, 20 bp, Artificial Sequence
  Description of Artificial Sequence: Synthetic oligonucleotide
  Target: LAMA2; (-) strand; PAM type: NNGRRT; PAM sequence: CTGGAT
gggaatgtgaattcaagcag

SEQ ID NO: 21349 - DNA, 20 bp, Artificial Sequence
  Description of Artificial Sequence: Synthetic oligonucleotide
  Target: LAMA2; (-) strand; PAM type: NNGRRT; PAM sequence: GTGAAT
agaggctgccctgagggaat

SEQ ID NO: 21350 - DNA, 20 bp, Artificial Sequence
  Description of Artificial Sequence: Synthetic oligonucleotide
  Target: LAMA2; (-) strand; PAM type: NNGRRT; PAM sequence: GGGAAT
actgagagaggctgccctga

SEQ ID NO: 21351 - DNA, 20 bp, Artificial Sequence
  Description of Artificial Sequence: Synthetic oligonucleotide
  Target: LAMA2; (-) strand; PAM type: NNGRRT; PAM sequence: TGGGGT
aacaaaacaacatttttggt

SEQ ID NO: 21352 - DNA, 20 bp, Artificial Sequence
  Description of Artificial Sequence: Synthetic oligonucleotide
  Target: LAMA2; (-) strand; PAM type: NNGRRT; PAM sequence: GAGAAT
ctgtagtccagctgaggcag

SEQ ID NO: 21353 - DNA, 20 bp, Artificial Sequence
  Description of Artificial Sequence: Synthetic oligonucleotide
  Target: LAMA2; (-) strand; PAM type: NNGRRT; PAM sequence: TTGAGT
atagttatttataatcactt

SEQ ID NO: 21354 - DNA, 20 bp, Artificial Sequence
  Description of Artificial Sequence: Synthetic oligonucleotide
  Target: LAMA2; (-) strand; PAM type: NNGRRT; PAM sequence: GAGAGT
agcactaagctcacctttaa

SEQ ID NO: 21355 - DNA, 20 bp, Artificial Sequence
  Description of Artificial Sequence: Synthetic oligonucleotide
  Target: LAMA2; (-) strand; PAM type: NNGRRT; PAM sequence: AAGAGT
taattaggcgcattctgggt

SEQ ID NO: 21356 - DNA, 20 bp, Artificial Sequence
  Description of Artificial Sequence: Synthetic oligonucleotide
  Target: LAMA2; (-) strand; PAM type: NNGRRT; PAM sequence: CTGGGT
ccattttaattaggcgcatt

SEQ ID NO: 21357 - DNA, 20 bp, Artificial Sequence
  Description of Artificial Sequence: Synthetic oligonucleotide
  Target: LAMA2; (-) strand; PAM type: NNGRRT; PAM sequence: TTGAAT
tctttagcttatagtattca

SEQ ID NO: 21358 - DNA, 20 bp, Artificial Sequence
  Description of Artificial Sequence: Synthetic oligonucleotide
  Target: LAMA2; (-) strand; PAM type: NNGRRT; PAM sequence: TAGAAT
agaacatttaaacttaatgt

SEQ ID NO: 21359 - DNA, 20 bp, Artificial Sequence
  Description of Artificial Sequence: Synthetic oligonucleotide
  Target: LAMA2; (-) strand; PAM type: NNGRRT; PAM sequence: GTGGAT
tgggaggataagcatttcat

SEQ ID NO: 21360 - DNA, 20 bp, Artificial Sequence
  Description of Artificial Sequence: Synthetic oligonucleotide
  Target: LAMA2; (-) strand; PAM type: NNGRRT; PAM sequence: GAGGAT
tgagtaaagaaggtcattgg

SEQ ID NO: 21361 - DNA, 20 bp, Artificial Sequence
  Description of Artificial Sequence: Synthetic oligonucleotide
  Target: LAMA2; (-) strand; PAM type: NNGRRT; PAM sequence: CTGAGT
aatgagtaaggtaaaaaatt

SEQ ID NO: 21362 - DNA, 20 bp, Artificial Sequence
  Description of Artificial Sequence: Synthetic oligonucleotide
  Target: LAMA2; (-) strand; PAM type: NNGRRT; PAM sequence: ATGAGT
tttctcttcttttccaaaca

SEQ ID NO: 21363 - DNA, 20 bp, Artificial Sequence
  Description of Artificial Sequence: Synthetic oligonucleotide
  Target: LAMA2; (-) strand; PAM type: NNGRRT; PAM sequence: TAGAAT
accaaatacagtgtttggcc

SEQ ID NO: 21364 - DNA, 20 bp, Artificial Sequence
  Description of Artificial Sequence: Synthetic oligonucleotide
  Target: LAMA2; (-) strand; PAM type: NNGRRT; PAM sequence: CTGAGT
ggataataatatctacctta

SEQ ID NO: 21365 - DNA, 20 bp, Artificial Sequence
  Description of Artificial Sequence: Synthetic oligonucleotide
  Target: LAMA2; (-) strand; PAM type: NNGRRT; PAM sequence: GAGGAT
catttcttaatctatacaat

SEQ ID NO: 21366 - DNA, 20 bp, Artificial Sequence
  Description of Artificial Sequence: Synthetic oligonucleotide
  Target: LAMA2; (-) strand; PAM type: NNGRRT; PAM sequence: CAGAAT
taaaccaaagagtctggctc

SEQ ID NO: 21367 - DNA, 20 bp, Artificial Sequence
  Description of Artificial Sequence: Synthetic oligonucleotide
  Target: LAMA2; (-) strand; PAM type: NNGRRT; PAM sequence: AAGAGT
ggaacccagcatttaaacca

SEQ ID NO: 21368 - DNA, 20 bp, Artificial Sequence
  Description of Artificial Sequence: Synthetic oligonucleotide
  Target: LAMA2; (-) strand; PAM type: NNGRRT; PAM sequence: GAGAGT
gatgacaaaattgaggcaca

SEQ ID NO: 21369 - DNA, 20 bp, Artificial Sequence
  Description of Artificial Sequence: Synthetic oligonucleotide
  Target: LAMA2; (-) strand; PAM type: NNGRRT; PAM sequence: GAGAGT
ctttcccacatcaaccctat

SEQ ID NO: 21370 - DNA, 20 bp, Artificial Sequence
  Description of Artificial Sequence: Synthetic oligonucleotide
  Target: LAMA2; (-) strand; PAM type: NNGRRT; PAM sequence: TTGGGT
aataacaatcagctcttaga

SEQ ID NO: 21371 - DNA, 20 bp, Artificial Sequence
  Description of Artificial Sequence: Synthetic oligonucleotide
  Target: LAMA2; (-) strand; PAM type: NNGRRT; PAM sequence: ATGGAT
cgtagagatttggaaagcac

SEQ ID NO: 21372 - DNA, 20 bp, Artificial Sequence
  Description of Artificial Sequence: Synthetic oligonucleotide
  Target: LAMA2; (-) strand; PAM type: NNGRRT; PAM sequence: ATGAAT
tagataaattgacttatcca

SEQ ID NO: 21373 - DNA, 20 bp, Artificial Sequence
  Description of Artificial Sequence: Synthetic oligonucleotide
  Target: LAMA2; (-) strand; PAM type: NNGRRT; PAM sequence: GAGAAT
aatagggtttgagcttctat

SEQ ID NO: 21374 - DNA, 20 bp, Artificial Sequence
  Description of Artificial Sequence: Synthetic oligonucleotide
  Target: LAMA2; (-) strand; PAM type: NNGRRT; PAM sequence: TAGGGT
ctcgcaggtgcagttcgcaa

SEQ ID NO: 21375 - DNA, 20 bp, Artificial Sequence
  Description of Artificial Sequence: Synthetic oligonucleotide
  Target: LAMA2; (-) strand; PAM type: NNGRRT; PAM sequence: TGGGAT
acagatgcaggggaggagtt

SEQ ID NO: 21376 - DNA, 20 bp, Artificial Sequence
  Description of Artificial Sequence: Synthetic oligonucleotide
  Target: LAMA2; (-) strand; PAM type: NNGRRT; PAM sequence: AGGAGT
tttttccacagatgcagggg

SEQ ID NO: 21377 - DNA, 20 bp, Artificial Sequence
  Description of Artificial Sequence: Synthetic oligonucleotide
  Target: LAMA2; (-) strand; PAM type: NNGRRT; PAM sequence: AAGAAT
tctaacatccttggttgtta

SEQ ID NO: 21378 - DNA, 20 bp, Artificial Sequence
  Description of Artificial Sequence: Synthetic oligonucleotide
  Target: LAMA2; (-) strand; PAM type: NNGRRT; PAM sequence: AGGAAT
tgagtagcctttaattatga

SEQ ID NO: 21379 - DNA, 20 bp, Artificial Sequence
  Description of Artificial Sequence: Synthetic oligonucleotide
  Target: LAMA2; (-) strand; PAM type: NNGRRT; PAM sequence: TTGAGT
atgttatgactatcataggc

SEQ ID NO: 21380 - DNA, 20 bp, Artificial Sequence
  Description of Artificial Sequence: Synthetic oligonucleotide
  Target: LAMA2; (-) strand; PAM type: NNGRRT; PAM sequence: TTGGGT
gcaaacaagtaggtcttcca

SEQ ID NO: 21381 - DNA, 20 bp, Artificial Sequence
  Description of Artificial Sequence: Synthetic oligonucleotide
  Target: LAMA2; (-) strand; PAM type: NNGRRT; PAM sequence: GAGAAT
atgtaaatgaagatggttaa

SEQ ID NO: 21382 - DNA, 20 bp, Artificial Sequence
  Description of Artificial Sequence: Synthetic oligonucleotide
  Target: LAMA2; (-) strand; PAM type: NNGRRT; PAM sequence: ATGAGT
atgcaagttagtcgtgaaca

SEQ ID NO: 21383 - DNA, 20 bp, Artificial Sequence
  Description of Artificial Sequence: Synthetic oligonucleotide
  Target: LAMA2; (-) strand; PAM type: NNGRRT; PAM sequence: ACGAGT
ggctgagaaggagatgcaat

SEQ ID NO: 21384 - DNA, 20 bp, Artificial Sequence
  Description of Artificial Sequence: Synthetic oligonucleotide
  Target: LAMA2; (-) strand; PAM type: NNGRRT; PAM sequence: CTGGAT
gcaatgggcagccagctctg

SEQ ID NO: 21385 - DNA, 20 bp, Artificial Sequence
  Description of Artificial Sequence: Synthetic oligonucleotide
  Target: LAMA2; (-) strand; PAM type: NNGRRT; PAM sequence: TGGAAT
aattctaatatgtattcagc

SEQ ID NO: 21386 - DNA, 20 bp, Artificial Sequence
  Description of Artificial Sequence: Synthetic oligonucleotide
  Target: LAMA2; (-) strand; PAM type: NNGRRT; PAM sequence: TAGGGT
cagacttgagggtaaatcca

SEQ ID NO: 21387 - DNA, 20 bp, Artificial Sequence
  Description of Artificial Sequence: Synthetic oligonucleotide
  Target: LAMA2; (-) strand; PAM type: NNGRRT; PAM sequence: GAGGGT
tagtaatgttggtcagactt

SEQ ID NO: 21388 - DNA, 20 bp, Artificial Sequence
  Description of Artificial Sequence: Synthetic oligonucleotide
  Target: LAMA2; (-) strand; PAM type: NNGRRT; PAM sequence: ATGAAT
taaagagacaacaatgggtc

SEQ ID NO: 21389 - DNA, 20 bp, Artificial Sequence
  Description of Artificial Sequence: Synthetic oligonucleotide
  Target: LAMA2; (-) strand; PAM type: NNGRRT; PAM sequence: ATGGGT
caacaaataaagagacaaca

SEQ ID NO: 21390 - DNA, 20 bp, Artificial Sequence
  Description of Artificial Sequence: Synthetic oligonucleotide
  Target: LAMA2; (-) strand; PAM type: NNGRRT; PAM sequence: ATGGAT
acccaatccctttggcactg

SEQ ID NO: 21391 - DNA, 20 bp, Artificial Sequence
  Description of Artificial Sequence: Synthetic oligonucleotide
  Target: LAMA2; (-) strand; PAM type: NNGRRT; PAM sequence: TAGAAT
tcaacgtaattataccaaat

SEQ ID NO: 21392 - DNA, 20 bp, Artificial Sequence
  Description of Artificial Sequence: Synthetic oligonucleotide
  Target: LAMA2; (-) strand; PAM type: NNGRRT; PAM sequence: CAGGAT
ttatatgcatttttaaaaat

SEQ ID NO: 21393 - DNA, 20 bp, Artificial Sequence
  Description of Artificial Sequence: Synthetic oligonucleotide
  Target: LAMA2; (-) strand; PAM type: NNGRRT; PAM sequence: AAGAAT
tgaaaacattttgaaaatga

SEQ ID NO: 21394 - DNA, 20 bp, Artificial Sequence
  Description of Artificial Sequence: Synthetic oligonucleotide
  Target: LAMA2; (-) strand; PAM type: NNGRRT; PAM sequence: TGGAAT
taaaataccacattgaaagc

SEQ ID NO: 21395 - DNA, 20 bp, Artificial Sequence
  Description of Artificial Sequence: Synthetic oligonucleotide
  Target: LAMA2; (-) strand; PAM type: NNGRRT; PAM sequence: GTGAAT
ttctaggatttataaactaa

SEQ ID NO: 21396 - DNA, 20 bp, Artificial Sequence
  Description of Artificial Sequence: Synthetic oligonucleotide
  Target: LAMA2; (-) strand; PAM type: NNGRRT; PAM sequence: TAGGAT
taaccctctcacaaaacttc

SEQ ID NO: 21397 - DNA, 20 bp, Artificial Sequence
  Description of Artificial Sequence: Synthetic oligonucleotide
  Target: LAMA2; (-) strand; PAM type: NNGRRT; PAM sequence: ATGGAT
tttcaggttgttagatgaaa

SEQ ID NO: 21398 - DNA, 20 bp, Artificial Sequence
  Description of Artificial Sequence: Synthetic oligonucleotide
  Target: LAMA2; (-) strand; PAM type: NNGRRT; PAM sequence: AAGGAT
ttttataaaatatttttaaa

SEQ ID NO: 21399 - DNA, 20 bp, Artificial Sequence
  Description of Artificial Sequence: Synthetic oligonucleotide
  Target: LAMA2; (-) strand; PAM type: NNGRRT; PAM sequence: CAGAGT
caaatattcaattcatatct

SEQ ID NO: 21400 - DNA, 20 bp, Artificial Sequence
  Description of Artificial Sequence: Synthetic oligonucleotide
  Target: LAMA2; (-) strand; PAM type: NNGRRT; PAM sequence: CAGGAT
ggaaattaaaatctcgtctt

SEQ ID NO: 21401 - DNA, 20 bp, Artificial Sequence
  Description of Artificial Sequence: Synthetic oligonucleotide
  Target: LAMA2; (-) strand; PAM type: NNGRRT; PAM sequence: CTGAAT
agctccctttttttttttct

SEQ ID NO: 21402 - DNA, 20 bp, Artificial Sequence
  Description of Artificial Sequence: Synthetic oligonucleotide
  Target: LAMA2; (-) strand; PAM type: NNGRRT; PAM sequence: AGGGAT
gatctataagatttatgacc

SEQ ID NO: 21403 - DNA, 20 bp, Artificial Sequence
  Description of Artificial Sequence: Synthetic oligonucleotide
  Target: LAMA2; (-) strand; PAM type: NNGRRT; PAM sequence: TAGAAT
gcctagttacaacctatagc

SEQ ID NO: 21404 - DNA, 20 bp, Artificial Sequence
  Description of Artificial Sequence: Synthetic oligonucleotide
  Target: LAMA2; (-) strand; PAM type: NNGRRT; PAM sequence: AAGAAT
ctatgtgatgccagaaatta

SEQ ID NO: 21405 - DNA, 20 bp, Artificial Sequence
  Description of Artificial Sequence: Synthetic oligonucleotide
  Target: LAMA2; (-) strand; PAM type: NNGRRT; PAM sequence: TTGAGT
gcccaaaggtcaactcaaat

SEQ ID NO: 21406 - DNA, 20 bp, Artificial Sequence
  Description of Artificial Sequence: Synthetic oligonucleotide
  Target: LAMA2; (-) strand; PAM type: NNGRRT; PAM sequence: TTGAGT
cgtgcattcaatatgatctc

SEQ ID NO: 21407 - DNA, 20 bp, Artificial Sequence
  Description of Artificial Sequence: Synthetic oligonucleotide
  Target: LAMA2; (-) strand; PAM type: NNGRRT; PAM sequence: TGGAAT
cttaaatttacctattgtct

SEQ ID NO: 21408 - DNA, 20 bp, Artificial Sequence
  Description of Artificial Sequence: Synthetic oligonucleotide
  Target: LAMA2; (-) strand; PAM type: NNGRRT; PAM sequence: CTGAAT
caattttctagagaatatgg

SEQ ID NO: 21409 - DNA, 20 bp, Artificial Sequence
  Description of Artificial Sequence: Synthetic oligonucleotide
  Target: LAMA2; (-) strand; PAM type: NNGRRT; PAM sequence: GAGAAT
agagcattctcaattttcta

SEQ ID NO: 21410 - DNA, 20 bp, Artificial Sequence
  Description of Artificial Sequence: Synthetic oligonucleotide
  Target: LAMA2; (-) strand; PAM type: NNGRRT; PAM sequence: ATGAGT
agagaggtgagtcaaaatat

SEQ ID NO: 21411 - DNA, 20 bp, Artificial Sequence
  Description of Artificial Sequence: Synthetic oligonucleotide
  Target: LAMA2; (-) strand; PAM type: NNGRRT; PAM sequence: GTGAGT
attggaagaagcacagagag

SEQ ID NO: 21412 - DNA, 20 bp, Artificial Sequence
  Description of Artificial Sequence: Synthetic oligonucleotide
  Target: LAMA2; (-) strand; PAM type: NNGRRT; PAM sequence: AAGAAT
aggtatttagttaatagtta

SEQ ID NO: 21413 - DNA, 20 bp, Artificial Sequence
  Description of Artificial Sequence: Synthetic oligonucleotide
  Target: LAMA2; (-) strand; PAM type: NNGRRT; PAM sequence: TGGAAT
ctgtttcccattctgcaaaa

SEQ ID NO: 21414 - DNA, 20 bp, Artificial Sequence
  Description of Artificial Sequence: Synthetic oligonucleotide
  Target: LAMA2; (-) strand; PAM type: NNGRRT; PAM sequence: GAGAAT
tctctcctacttattctcag

SEQ ID NO: 21415 - DNA, 20 bp, Artificial Sequence
  Description of Artificial Sequence: Synthetic oligonucleotide
  Target: LAMA2; (-) strand; PAM type: NNGRRT; PAM sequence: GAGAAT
aagctggagatgagggtaat

SEQ ID NO: 21416 - DNA, 20 bp, Artificial Sequence
  Description of Artificial Sequence: Synthetic oligonucleotide
  Target: LAMA2; (-) strand; PAM type: NNGRRT; PAM sequence: GAGGGT
tcagtggagaagctggagat

SEQ ID NO: 21417 - DNA, 20 bp, Artificial Sequence
  Description of Artificial Sequence: Synthetic oligonucleotide
  Target: LAMA2; (-) strand; PAM type: NNGRRT; PAM sequence: TTGAGT
gtaggataagagaaaccatt

SEQ ID NO: 21418 - DNA, 20 bp, Artificial Sequence
  Description of Artificial Sequence: Synthetic oligonucleotide
  Target: LAMA2; (-) strand; PAM type: NNGRRT; PAM sequence: TAGGAT
tattatcttgaacagttggg

SEQ ID NO: 21419 - DNA, 20 bp, Artificial Sequence
  Description of Artificial Sequence: Synthetic oligonucleotide
  Target: LAMA2; (-) strand; PAM type: NNGRRT; PAM sequence: TTGGGT
ctaattattatcttgaacag

SEQ ID NO: 21420 - DNA, 20 bp, Artificial Sequence
  Description of Artificial Sequence: Synthetic oligonucleotide
  Target: LAMA2; (-) strand; PAM type: NNGRRT; PAM sequence: GGGGAT
ctgtatttgcatacacaaca

SEQ ID NO: 21421 - DNA, 20 bp, Artificial Sequence
  Description of Artificial Sequence: Synthetic oligonucleotide
  Target: LAMA2; (-) strand; PAM type: NNGRRT; PAM sequence: TAGGGT
aaaattaaaacttccatcat

SEQ ID NO: 21422 - DNA, 20 bp, Artificial Sequence
  Description of Artificial Sequence: Synthetic oligonucleotide
  Target: LAMA2; (-) strand; PAM type: NNGRRT; PAM sequence: ATGGGT
aaacaagcactcctttaatc

SEQ ID NO: 21423 - DNA, 20 bp, Artificial Sequence
  Description of Artificial Sequence: Synthetic oligonucleotide
  Target: LAMA2; (-) strand; PAM type: NNGRRT; PAM sequence: TGGGAT
aaatataatgaattgcttct

SEQ ID NO: 21424 - DNA, 20 bp, Artificial Sequence
  Description of Artificial Sequence: Synthetic oligonucleotide
  Target: LAMA2; (-) strand; PAM type: NNGRRT; PAM sequence: ATGAAT
tgcatttgaaataaaatata

SEQ ID NO: 21425 - DNA, 20 bp, Artificial Sequence
  Description of Artificial Sequence: Synthetic oligonucleotide
  Target: LAMA2; (-) strand; PAM type: NNGRRT; PAM sequence: GAGAAT
cacatattaagtcaatgtgt

SEQ ID NO: 21426 - DNA, 20 bp, Artificial Sequence
  Description of Artificial Sequence: Synthetic oligonucleotide
  Target: LAMA2; (-) strand; PAM type: NNGRRT; PAM sequence: GAGAGT
taacgttaaatgctcccaca

SEQ ID NO: 21427 - DNA, 20 bp, Artificial Sequence
  Description of Artificial Sequence: Synthetic oligonucleotide
  Target: LAMA2; (-) strand; PAM type: NNGRRT; PAM sequence: GTGGGT
cttcttctgtgggtccttct

SEQ ID NO: 21428 - DNA, 20 bp, Artificial Sequence
  Description of Artificial Sequence: Synthetic oligonucleotide
  Target: LAMA2; (-) strand; PAM type: NNGRRT; PAM sequence: GTGGGT
acattagggaaacttcttct

SEQ ID NO: 21429 - DNA, 20 bp, Artificial Sequence
  Description of Artificial Sequence: Synthetic oligonucleotide
  Target: LAMA2; (-) strand; PAM type: NNGRRT; PAM sequence: GTGGAT
catatgttcatttgataagg

SEQ ID NO: 21430 - DNA, 20 bp, Artificial Sequence
  Description of Artificial Sequence: Synthetic oligonucleotide
  Target: LAMA2; (-) strand; PAM type: NNGRRT; PAM sequence: AAGGGT
ataacatatgttcatttgat

SEQ ID NO: 21431 - DNA, 20 bp, Artificial Sequence
  Description of Artificial Sequence: Synthetic oligonucleotide
  Target: LAMA2; (-) strand; PAM type: NNGRRT; PAM sequence: TAGAAT
gataaacttaagggtgtatt

SEQ ID NO: 21432 - DNA, 20 bp, Artificial Sequence
  Description of Artificial Sequence: Synthetic oligonucleotide
  Target: LAMA2; (-) strand; PAM type: NNGRRT; PAM sequence: AAGGGT
actaaaaaaaagataaactt

SEQ ID NO: 21433 - DNA, 20 bp, Artificial Sequence
  Description of Artificial Sequence: Synthetic oligonucleotide
  Target: LAMA2; (-) strand; PAM type: NNGRRT; PAM sequence: AAGAAT
tctgtcaaaatatgtgcatt

SEQ ID NO: 21434 - DNA, 20 bp, Artificial Sequence
  Description of Artificial Sequence: Synthetic oligonucleotide
  Target: LAMA2; (-) strand; PAM type: NNGRRT; PAM sequence: AAGAAT
acaattaaccttgttctaaa

SEQ ID NO: 21435 - DNA, 20 bp, Artificial Sequence
  Description of Artificial Sequence: Synthetic oligonucleotide
  Target: LAMA2; (-) strand; PAM type: NNGRRT; PAM sequence: GTGAAT
atctatatatgtttatgtat

SEQ ID NO: 21436 - DNA, 20 bp, Artificial Sequence
  Description of Artificial Sequence: Synthetic oligonucleotide
  Target: LAMA2; (-) strand; PAM type: NNGRRT; PAM sequence: CTGAAT
aaaataatccctcttaatgg

SEQ ID NO: 21437 - DNA, 20 bp, Artificial Sequence
  Description of Artificial Sequence: Synthetic oligonucleotide
  Target: LAMA2; (-) strand; PAM type: NNGRRT; PAM sequence: TGGGAT
ggaggaggggaagctgttat

SEQ ID NO: 21438 - DNA, 20 bp, Artificial Sequence
  Description of Artificial Sequence: Synthetic oligonucleotide
  Target: LAMA2; (-) strand; PAM type: NNGRRT; PAM sequence: CCGGAT
agcagaaaatgttcttcatc

SEQ ID NO: 21439 - DNA, 20 bp, Artificial Sequence
  Description of Artificial Sequence: Synthetic oligonucleotide
  Target: LAMA2; (-) strand; PAM type: NNGRRT; PAM sequence: CAGAAT
tgcacaataaaaaacatcta

SEQ ID NO: 21440 - DNA, 20 bp, Artificial Sequence
  Description of Artificial Sequence: Synthetic oligonucleotide
  Target: LAMA2; (-) strand; PAM type: NNGRRT; PAM sequence: TAGAGT
ttcaacaacaaaaataaaat

SEQ ID NO: 21441 - DNA, 20 bp, Artificial Sequence
  Description of Artificial Sequence: Synthetic oligonucleotide
  Target: LAMA2; (-) strand; PAM type: NNGRRT; PAM sequence: AAGAAT
tgtcattgaaacctactggt

SEQ ID NO: 21442 - DNA, 20 bp, Artificial Sequence
  Description of Artificial Sequence: Synthetic oligonucleotide
  Target: LAMA2; (-) strand; PAM type: NNGRRT; PAM sequence: TGGGAT
atttccaggagaatttagta

SEQ ID NO: 21443 - DNA, 20 bp, Artificial Sequence
  Description of Artificial Sequence: Synthetic oligonucleotide
  Target: LAMA2; (-) strand; PAM type: NNGRRT; PAM sequence: GAGAAT
gtcatatacaaaatttccag

SEQ ID NO: 21444 - DNA, 20 bp, Artificial Sequence
  Description of Artificial Sequence: Synthetic oligonucleotide
  Target: LAMA2; (-) strand; PAM type: NNGRRT; PAM sequence: CAGAAT
ttgactagctccttacagtt

SEQ ID NO: 21445 - DNA, 20 bp, Artificial Sequence
  Description of Artificial Sequence: Synthetic oligonucleotide
  Target: LAMA2; (-) strand; PAM type: NNGRRT; PAM sequence: TAGGAT
gccttggcctcccaaagtgc

SEQ ID NO: 21446 - DNA, 20 bp, Artificial Sequence
  Description of Artificial Sequence: Synthetic oligonucleotide
  Target: LAMA2; (-) strand; PAM type: NNGRRT; PAM sequence: TGGGGT
ttttgtatttttagtagaaa

SEQ ID NO: 21447 - DNA, 20 bp, Artificial Sequence
  Description of Artificial Sequence: Synthetic oligonucleotide
  Target: LAMA2; (-) strand; PAM type: NNGRRT; PAM sequence: TGGGAT
gtctcagcctcctgagtagc

SEQ ID NO: 21448 - DNA, 20 bp, Artificial Sequence
  Description of Artificial Sequence: Synthetic oligonucleotide
  Target: LAMA2; (-) strand; PAM type: NNGRRT; PAM sequence: CTGAGT
gattctagtgtctcagcctc

SEQ ID NO: 21449 - DNA, 20 bp, Artificial Sequence
  Description of Artificial Sequence: Synthetic oligonucleotide
  Target: LAMA2; (-) strand; PAM type: NNGRRT; PAM sequence: CTGGGT
ctcactgaaacccctgccta

SEQ ID NO: 21450 - DNA, 20 bp, Artificial Sequence
  Description of Artificial Sequence: Synthetic oligonucleotide
  Target: LAMA2; (-) strand; PAM type: NNGRRT; PAM sequence: TGGAGT
tcttgctctgttgcccagac

SEQ ID NO: 21451 - DNA, 20 bp, Artificial Sequence
  Description of Artificial Sequence: Synthetic oligonucleotide
  Target: LAMA2; (-) strand; PAM type: NNGRRT; PAM sequence: CAGAGT
ttattttattttatttgaga

SEQ ID NO: 21452 - DNA, 20 bp, Artificial Sequence
  Description of Artificial Sequence: Synthetic oligonucleotide
  Target: LAMA2; (-) strand; PAM type: NNGRRT; PAM sequence: CTGGGT
actgactccaaccagaagca

SEQ ID NO: 21453 - DNA, 20 bp, Artificial Sequence
  Description of Artificial Sequence: Synthetic oligonucleotide
  Target: LAMA2; (-) strand; PAM type: NNGRRT; PAM sequence: AAGGAT
gttaaaataaaataaaaaaa

SEQ ID NO: 21454 - DNA, 20 bp, Artificial Sequence
  Description of Artificial Sequence: Synthetic oligonucleotide
  Target: LAMA2; (-) strand; PAM type: NNGRRT; PAM sequence: CGGGAT
actatgggtgattttcttga

SEQ ID NO: 21455 - DNA, 20 bp, Artificial Sequence
  Description of Artificial Sequence: Synthetic oligonucleotide
  Target: LAMA2; (-) strand; PAM type: NNGRRT; PAM sequence: ATGGGT
tgacccaaagacagttcact

SEQ ID NO: 21456 - DNA, 20 bp, Artificial Sequence
  Description of Artificial Sequence: Synthetic oligonucleotide
  Target: LAMA2; (-) strand; PAM type: NNGRRT; PAM sequence: AAGAAT
cagcgtgtgcactgcgagta

SEQ ID NO: 21457 - DNA, 20 bp, Artificial Sequence
  Description of Artificial Sequence: Synthetic oligonucleotide
  Target: LAMA2; (-) strand; PAM type: NNGRRT; PAM sequence: GCGAGT
acatacccagcgtgtgcact

SEQ ID NO: 21458 - DNA, 20 bp, Artificial Sequence
  Description of Artificial Sequence: Synthetic oligonucleotide
  Target: LAMA2; (-) strand; PAM type: NNGRRT; PAM sequence: AGGAGT
ggatcaaagattccacatta

SEQ ID NO: 21459 - DNA, 20 bp, Artificial Sequence
  Description of Artificial Sequence: Synthetic oligonucleotide
  Target: LAMA2; (-) strand; PAM type: NNGRRT; PAM sequence: CTGGAT
tttgaatttataaatattat

SEQ ID NO: 21460 - DNA, 20 bp, Artificial Sequence
  Description of Artificial Sequence: Synthetic oligonucleotide
  Target: LAMA2; (-) strand; PAM type: NNGRRT; PAM sequence: TTGAAT
aaaggctggtctgggatgct

SEQ ID NO: 21461 - DNA, 20 bp, Artificial Sequence
  Description of Artificial Sequence: Synthetic oligonucleotide
  Target: LAMA2; (-) strand; PAM type: NNGRRT; PAM sequence: TGGGAT
caaggagataaaggctggtc

SEQ ID NO: 21462 - DNA, 20 bp, Artificial Sequence
  Description of Artificial Sequence: Synthetic oligonucleotide
  Target: LAMA2; (-) strand; PAM type: NNGRRT; PAM sequence: CTGGGT
ggaaagtctaaatgaatctg

SEQ ID NO: 21463 - DNA, 20 bp, Artificial Sequence
  Description of Artificial Sequence: Synthetic oligonucleotide
  Target: LAMA2; (-) strand; PAM type: NNGRRT; PAM sequence: ATGAAT
caactcagtggaaagtctaa

SEQ ID NO: 21464 - DNA, 20 bp, Artificial Sequence
  Description of Artificial Sequence: Synthetic oligonucleotide
  Target: LAMA2; (-) strand; PAM type: NNGRRT; PAM sequence: TGGGAT
ttaatagttcttcctatttt

SEQ ID NO: 21465 - DNA, 20 bp, Artificial Sequence
  Description of Artificial Sequence: Synthetic oligonucleotide
  Target: LAMA2; (-) strand; PAM type: NNGRRT; PAM sequence: CAGGGT
agtatttctctggcttaact

SEQ ID NO: 21466 - DNA, 20 bp, Artificial Sequence
  Description of Artificial Sequence: Synthetic oligonucleotide
  Target: LAMA2; (-) strand; PAM type: NNGRRT; PAM sequence: CTGAAT
tcagatcatgaacactattt

SEQ ID NO: 21467 - DNA, 20 bp, Artificial Sequence
  Description of Artificial Sequence: Synthetic oligonucleotide
  Target: LAMA2; (-) strand; PAM type: NNGRRT; PAM sequence: TTGAAT
tttgatcctgctcctgacac

SEQ ID NO: 21468 - DNA, 20 bp, Artificial Sequence
  Description of Artificial Sequence: Synthetic oligonucleotide
  Target: LAMA2; (-) strand; PAM type: NNGRRT; PAM sequence: ATGAAT
gagacttgcttgatggctaa

SEQ ID NO: 21469 - DNA, 20 bp, Artificial Sequence
  Description of Artificial Sequence: Synthetic oligonucleotide
  Target: LAMA2; (-) strand; PAM type: NNGRRT; PAM sequence: TTGAAT
ctgaagggccatcaaccatt

SEQ ID NO: 21470 - DNA, 20 bp, Artificial Sequence
  Description of Artificial Sequence: Synthetic oligonucleotide
  Target: LAMA2; (-) strand; PAM type: NNGRRT; PAM sequence: TTGGGT
tctttgcacatatttctaat

SEQ ID NO: 21471 - DNA, 20 bp, Artificial Sequence
  Description of Artificial Sequence: Synthetic oligonucleotide
  Target: LAMA2; (-) strand; PAM type: NNGRRT; PAM sequence: TGGAAT
caggtatgccctcacactga

SEQ ID NO: 21472 - DNA, 20 bp, Artificial Sequence
  Description of Artificial Sequence: Synthetic oligonucleotide
  Target: LAMA2; (-) strand; PAM type: NNGRRT; PAM sequence: CTGAAT
tcttctgtagccaaatccct

SEQ ID NO: 21473 - DNA, 20 bp, Artificial Sequence
  Description of Artificial Sequence: Synthetic oligonucleotide
  Target: LAMA2; (-) strand; PAM type: NNGRRT; PAM sequence: CTGAGT
ttaactgactttcgactgct

SEQ ID NO: 21474 - DNA, 20 bp, Artificial Sequence
  Description of Artificial Sequence: Synthetic oligonucleotide
  Target: LAMA2; (-) strand; PAM type: NNGRRT; PAM sequence: GTGAAT
acattgctatttctgcagac

SEQ ID NO: 21475 - DNA, 20 bp, Artificial Sequence
  Description of Artificial Sequence: Synthetic oligonucleotide
  Target: LAMA2; (-) strand; PAM type: NNGRRT; PAM sequence: GAGGAT
agattagggtctggccaatg

SEQ ID NO: 21476 - DNA, 20 bp, Artificial Sequence
  Description of Artificial Sequence: Synthetic oligonucleotide
  Target: LAMA2; (-) strand; PAM type: NNGRRT; PAM sequence: TAGGGT
ctcaccccagagacagagat

SEQ ID NO: 21477 - DNA, 20 bp, Artificial Sequence
  Description of Artificial Sequence: Synthetic oligonucleotide
  Target: LAMA2; (-) strand; PAM type: NNGRRT; PAM sequence: AAGAGT
ctccactactgctctgacaa

SEQ ID NO: 21478 - DNA, 20 bp, Artificial Sequence
  Description of Artificial Sequence: Synthetic oligonucleotide
  Target: LAMA2; (-) strand; PAM type: NNGRRT; PAM sequence: AAGGAT
tttctccaaaggatgatgca

SEQ ID NO: 21479 - DNA, 20 bp, Artificial Sequence
  Description of Artificial Sequence: Synthetic oligonucleotide
  Target: LAMA2; (-) strand; PAM type: NNGRRT; PAM sequence: AAGGAT
agtgtggccttttttctcca

SEQ ID NO: 21480 - DNA, 20 bp, Artificial Sequence
  Description of Artificial Sequence: Synthetic oligonucleotide
  Target: LAMA2; (-) strand; PAM type: NNGRRT; PAM sequence: TTGAGT
agaaactttatttcacctca

SEQ ID NO: 21481 - DNA, 20 bp, Artificial Sequence
  Description of Artificial Sequence: Synthetic oligonucleotide
  Target: LAMA2; (-) strand; PAM type: NNGRRT; PAM sequence: GTGAAT
attaatcagatattctctga

SEQ ID NO: 21482 - DNA, 20 bp, Artificial Sequence
  Description of Artificial Sequence: Synthetic oligonucleotide
  Target: LAMA2; (-) strand; PAM type: NNGRRT; PAM sequence: CTGAGT
aaacattaatcagatattct

SEQ ID NO: 21483 - DNA, 20 bp, Artificial Sequence
  Description of Artificial Sequence: Synthetic oligonucleotide
  Target: LAMA2; (-) strand; PAM type: NNGRRT; PAM sequence: GAGGAT
tggtttaggagcaattagaa

SEQ ID NO: 21484 - DNA, 20 bp, Artificial Sequence
  Description of Artificial Sequence: Synthetic oligonucleotide
  Target: LAMA2; (-) strand; PAM type: NNGRRT; PAM sequence: AGGAAT
agcaacccagtaaaatcaac

SEQ ID NO: 21485 - DNA, 20 bp, Artificial Sequence
  Description of Artificial Sequence: Synthetic oligonucleotide
  Target: LAMA2; (-) strand; PAM type: NNGRRT; PAM sequence: AAGAAT
tgctgaggctgaatatatag

SEQ ID NO: 21486 - DNA, 20 bp, Artificial Sequence
  Description of Artificial Sequence: Synthetic oligonucleotide
  Target: LAMA2; (-) strand; PAM type: NNGRRT; PAM sequence: CTGAAT
gtatcacttttatgctgagg

SEQ ID NO: 21487 - DNA, 20 bp, Artificial Sequence
  Description of Artificial Sequence: Synthetic oligonucleotide
  Target: LAMA2; (-) strand; PAM type: NNGRRT; PAM sequence: AAGGGT
ttgcacccctccctcccagg

SEQ ID NO: 21488 - DNA, 20 bp, Artificial Sequence
  Description of Artificial Sequence: Synthetic oligonucleotide
  Target: LAMA2; (-) strand; PAM type: NNGRRT; PAM sequence: ATGAGT
cagggttagcctcagtgatg

SEQ ID NO: 21489 - DNA, 20 bp, Artificial Sequence
  Description of Artificial Sequence: Synthetic oligonucleotide
  Target: LAMA2; (-) strand; PAM type: NNGRRT; PAM sequence: CAGGGT
cgggcagaaacagccctctt

SEQ ID NO: 21490 - DNA, 20 bp, Artificial Sequence
  Description of Artificial Sequence: Synthetic oligonucleotide
  Target: LAMA2; (-) strand; PAM type: NNGRRT; PAM sequence: AGGGGT
ttatgcatcctggttgaaac

SEQ ID NO: 21491 - DNA, 20 bp, Artificial Sequence
  Description of Artificial Sequence: Synthetic oligonucleotide
  Target: LAMA2; (-) strand; PAM type: NNGRRT; PAM sequence: CTGGGT
agttgctagctaaattctct

SEQ ID NO: 21492 - DNA, 20 bp, Artificial Sequence
  Description of Artificial Sequence: Synthetic oligonucleotide
  Target: LAMA2; (-) strand; PAM type: NNGRRT; PAM sequence: GGGGGT
aggttgcctgtagtgaactg

SEQ ID NO: 21493 - DNA, 20 bp, Artificial Sequence
  Description of Artificial Sequence: Synthetic oligonucleotide
  Target: LAMA2; (-) strand; PAM type: NNGRRT; PAM sequence: GTGGAT
gattatgctcacctagataa

SEQ ID NO: 21494 - DNA, 20 bp, Artificial Sequence
  Description of Artificial Sequence: Synthetic oligonucleotide
  Target: LAMA2; (-) strand; PAM type: NNGRRT; PAM sequence: GGGAGT
actattgtctaacatgtata

SEQ ID NO: 21495 - DNA, 20 bp, Artificial Sequence
  Description of Artificial Sequence: Synthetic oligonucleotide
  Target: LAMA2; (-) strand; PAM type: NNGRRT; PAM sequence: TAGGGT
gatgtttgttaaataaaatg

SEQ ID NO: 21496 - DNA, 20 bp, Artificial Sequence
  Description of Artificial Sequence: Synthetic oligonucleotide
  Target: LAMA2; (-) strand; PAM type: NNGRRT; PAM sequence: AAGGAT
agatgtgaggtgctgagggc

SEQ ID NO: 21497 - DNA, 20 bp, Artificial Sequence
  Description of Artificial Sequence: Synthetic oligonucleotide
  Target: LAMA2; (-) strand; PAM type: NNGRRT; PAM sequence: AAGAAT
tattcaaatggaattctccc

SEQ ID NO: 21498 - DNA, 20 bp, Artificial Sequence
  Description of Artificial Sequence: Synthetic oligonucleotide
  Target: LAMA2; (-) strand; PAM type: NNGRRT; PAM sequence: TGGAAT
ggtgatttttactattcaaa

SEQ ID NO: 21499 - DNA, 20 bp, Artificial Sequence
  Description of Artificial Sequence: Synthetic oligonucleotide
  Target: LAMA2; (-) strand; PAM type: NNGRRT; PAM sequence: CTGAAT
catatgcatgttgccatctt

SEQ ID NO: 21500 - DNA, 20 bp, Artificial Sequence
  Description of Artificial Sequence: Synthetic oligonucleotide
  Target: LAMA2; (-) strand; PAM type: NNGRRT; PAM sequence: CAGAAT
ctgatcacacaaatcactta

SEQ ID NO: 21501 - DNA, 20 bp, Artificial Sequence
  Description of Artificial Sequence: Synthetic oligonucleotide
  Target: LAMA2; (-) strand; PAM type: NNGRRT; PAM sequence: CAGAAT
ttcccaaactcatgtgatca

SEQ ID NO: 21502 - DNA, 20 bp, Artificial Sequence
  Description of Artificial Sequence: Synthetic oligonucleotide
  Target: LAMA2; (-) strand; PAM type: NNGRRT; PAM sequence: ATGGAT
ccagaacttttaacatgcaa

SEQ ID NO: 21503 - DNA, 20 bp, Artificial Sequence
  Description of Artificial Sequence: Synthetic oligonucleotide
  Target: LAMA2; (-) strand; PAM type: NNGRRT; PAM sequence: GAGGGT
cttgctatatagttaaagca

SEQ ID NO: 21504 - DNA, 20 bp, Artificial Sequence
  Description of Artificial Sequence: Synthetic oligonucleotide
  Target: LAMA2; (-) strand; PAM type: NNGRRT; PAM sequence: AGGGGT
cagttcccacatatagagaa

SEQ ID NO: 21505 - DNA, 20 bp, Artificial Sequence
  Description of Artificial Sequence: Synthetic oligonucleotide
  Target: LAMA2; (-) strand; PAM type: NNGRRT; PAM sequence: TTGGGT
ataggtcagcagaaacatgc

SEQ ID NO: 21506 - DNA, 20 bp, Artificial Sequence
  Description of Artificial Sequence: Synthetic oligonucleotide
  Target: LAMA2; (-) strand; PAM type: NNGRRT; PAM sequence: AGGGAT
aattaggaggacggagaaaa

SEQ ID NO: 21507 - DNA, 20 bp, Artificial Sequence
  Description of Artificial Sequence: Synthetic oligonucleotide
  Target: LAMA2; (-) strand; PAM type: NNGRRT; PAM sequence: TGGAAT
gattcctgtgcctctaagaa

SEQ ID NO: 21508 - DNA, 20 bp, Artificial Sequence
  Description of Artificial Sequence: Synthetic oligonucleotide
  Target: LAMA2; (-) strand; PAM type: NNGRRT; PAM sequence: AAGAAT
tgaatgattcctgtgcctct

SEQ ID NO: 21509 - DNA, 20 bp, Artificial Sequence
  Description of Artificial Sequence: Synthetic oligonucleotide
  Target: LAMA2; (-) strand; PAM type: NNGRRT; PAM sequence: CTGAAT
ttagcatggaatgaaagaag

SEQ ID NO: 21510 - DNA, 20 bp, Artificial Sequence
  Description of Artificial Sequence: Synthetic oligonucleotide
  Target: LAMA2; (-) strand; PAM type: NNGRRT; PAM sequence: TGGAAT
gatgttggtgggtcttagca

SEQ ID NO: 21511 - DNA, 20 bp, Artificial Sequence
  Description of Artificial Sequence: Synthetic oligonucleotide
  Target: LAMA2; (-) strand; PAM type: NNGRRT; PAM sequence: GTGGGT
tgatgatggtagagatgttg

SEQ ID NO: 21512 - DNA, 20 bp, Artificial Sequence
  Description of Artificial Sequence: Synthetic oligonucleotide
  Target: LAMA2; (-) strand; PAM type: NNGRRT; PAM sequence: ATGGAT
tttttcaaatagaaaatggg

SEQ ID NO: 21513 - DNA, 20 bp, Artificial Sequence
  Description of Artificial Sequence: Synthetic oligonucleotide
  Target: LAMA2; (-) strand; PAM type: NNGRRT; PAM sequence: TGGGAT
atcctttttcaaatagaaaa

SEQ ID NO: 21514 - DNA, 20 bp, Artificial Sequence
  Description of Artificial Sequence: Synthetic oligonucleotide
  Target: LAMA2; (-) strand; PAM type: NNGRRT; PAM sequence: AGGAAT
agggcaaaaggcagagacat

SEQ ID NO: 21515 - DNA, 20 bp, Artificial Sequence
  Description of Artificial Sequence: Synthetic oligonucleotide
  Target: LAMA2; (-) strand; PAM type: NNGRRT; PAM sequence: AGGGAT
tgtgctacatgtttgaatga

SEQ ID NO: 21516 - DNA, 20 bp, Artificial Sequence
  Description of Artificial Sequence: Synthetic oligonucleotide
  Target: LAMA2; (-) strand; PAM type: NNGRRT; PAM sequence: TTGAAT
ggccatcttgtgctacatgt

SEQ ID NO: 21517 - DNA, 20 bp, Artificial Sequence
  Description of Artificial Sequence: Synthetic oligonucleotide
  Target: LAMA2; (-) strand; PAM type: NNGRRT; PAM sequence: CAGAAT
aactagtgttcaacttgtga

SEQ ID NO: 21518 - DNA, 20 bp, Artificial Sequence
  Description of Artificial Sequence: Synthetic oligonucleotide
  Target: LAMA2; (-) strand; PAM type: NNGRRT; PAM sequence: GTGAAT
tagtggtgttttggccctaa

SEQ ID NO: 21519 - DNA, 20 bp, Artificial Sequence
  Description of Artificial Sequence: Synthetic oligonucleotide
  Target: LAMA2; (-) strand; PAM type: NNGRRT; PAM sequence: ATGAAT
atcttagcaaaggtatcatc

SEQ ID NO: 21520 - DNA, 20 bp, Artificial Sequence
  Description of Artificial Sequence: Synthetic oligonucleotide
  Target: LAMA2; (-) strand; PAM type: NNGRRT; PAM sequence: TAGAAT
ttgtccagatgataaaagtc

SEQ ID NO: 21521 - DNA, 20 bp, Artificial Sequence
  Description of Artificial Sequence: Synthetic oligonucleotide
  Target: LAMA2; (-) strand; PAM type: NNGRRT; PAM sequence: TAGAAT
ttaagtttcatgttgtccta

SEQ ID NO: 21522 - DNA, 20 bp, Artificial Sequence
  Description of Artificial Sequence: Synthetic oligonucleotide
  Target: LAMA2; (-) strand; PAM type: NNGRRT; PAM sequence: ATGAAT
tcttgaggataaaactgtag

SEQ ID NO: 21523 - DNA, 20 bp, Artificial Sequence
  Description of Artificial Sequence: Synthetic oligonucleotide
  Target: LAMA2; (-) strand; PAM type: NNGRRT; PAM sequence: GAGGAT
tgatatctagtatgaatctt

SEQ ID NO: 21524 - DNA, 20 bp, Artificial Sequence
  Description of Artificial Sequence: Synthetic oligonucleotide
  Target: LAMA2; (-) strand; PAM type: NNGRRT; PAM sequence: ATGAAT
gaatttctttgatatctagt

SEQ ID NO: 21525 - DNA, 20 bp, Artificial Sequence
  Description of Artificial Sequence: Synthetic oligonucleotide
  Target: LAMA2; (-) strand; PAM type: NNGRRT; PAM sequence: AGGAAT
ctgaaatttaagatacaaaa

SEQ ID NO: 21526 - DNA, 20 bp, Artificial Sequence
  Description of Artificial Sequence: Synthetic oligonucleotide
  Target: LAMA2; (-) strand; PAM type: NNGRRT; PAM sequence: TGGGAT
tgaagcagacaaaatctaaa

SEQ ID NO: 21527 - DNA, 20 bp, Artificial Sequence
  Description of Artificial Sequence: Synthetic oligonucleotide
  Target: LAMA2; (-) strand; PAM type: NNGRRT; PAM sequence: TCGAAT
gaggggtgattagacttgat

SEQ ID NO: 21528 - DNA, 20 bp, Artificial Sequence
  Description of Artificial Sequence: Synthetic oligonucleotide
  Target: LAMA2; (-) strand; PAM type: NNGRRT; PAM sequence: AGGGGT
cccatgagcatagtaagcag

SEQ ID NO: 21529 - DNA, 20 bp, Artificial Sequence
  Description of Artificial Sequence: Synthetic oligonucleotide
  Target: LAMA2; (-) strand; PAM type: NNGRRT; PAM sequence: GTGAAT
aggcacaaggagactcacaa

SEQ ID NO: 21530 - DNA, 20 bp, Artificial Sequence
  Description of Artificial Sequence: Synthetic oligonucleotide
  Target: LAMA2; (-) strand; PAM type: NNGRRT; PAM sequence: TGGAGT
tggcctcttgacacctcaac

SEQ ID NO: 21531 - DNA, 20 bp, Artificial Sequence
  Description of Artificial Sequence: Synthetic oligonucleotide
  Target: LAMA2; (-) strand; PAM type: NNGRRT; PAM sequence: ATGAGT
tacaaactgcacaaccacat

SEQ ID NO: 21532 - DNA, 20 bp, Artificial Sequence
  Description of Artificial Sequence: Synthetic oligonucleotide
  Target: LAMA2; (-) strand; PAM type: NNGRRT; PAM sequence: CTGAGT
gccctcaatcttccccttcc

SEQ ID NO: 21533 - DNA, 20 bp, Artificial Sequence
  Description of Artificial Sequence: Synthetic oligonucleotide
  Target: LAMA2; (-) strand; PAM type: NNGRRT; PAM sequence: CTGGAT
atggaaaagaagagggtaaa

SEQ ID NO: 21534 - DNA, 20 bp, Artificial Sequence
  Description of Artificial Sequence: Synthetic oligonucleotide
  Target: LAMA2; (-) strand; PAM type: NNGRRT; PAM sequence: GAGGGT
agggacttcatggaaaagaa

SEQ ID NO: 21535 - DNA, 20 bp, Artificial Sequence
  Description of Artificial Sequence: Synthetic oligonucleotide
  Target: LAMA2; (-) strand; PAM type: NNGRRT; PAM sequence: GAGGGT
gacataatcagcaaaagact

SEQ ID NO: 21536 - DNA, 20 bp, Artificial Sequence
  Description of Artificial Sequence: Synthetic oligonucleotide
  Target: LAMA2; (-) strand; PAM type: NNGRRT; PAM sequence: GAGGGT
gtattggcaaaggcacagaa

SEQ ID NO: 21537 - DNA, 20 bp, Artificial Sequence
  Description of Artificial Sequence: Synthetic oligonucleotide
  Target: LAMA2; (-) strand; PAM type: NNGRRT; PAM sequence: AGGAGT
gattagttagtctcggatgg

SEQ ID NO: 21538 - DNA, 20 bp, Artificial Sequence
  Description of Artificial Sequence: Synthetic oligonucleotide
  Target: LAMA2; (-) strand; PAM type: NNGRRT; PAM sequence: TCGGAT
tgaacagggattagttagtc

SEQ ID NO: 21539 - DNA, 20 bp, Artificial Sequence
  Description of Artificial Sequence: Synthetic oligonucleotide
  Target: LAMA2; (-) strand; PAM type: NNGRRT; PAM sequence: AGGGAT
ctgacttttgggagctgaac

SEQ ID NO: 21540 - DNA, 20 bp, Artificial Sequence
  Description of Artificial Sequence: Synthetic oligonucleotide
  Target: LAMA2; (-) strand; PAM type: NNGRRT; PAM sequence: CAGGAT
ggcccaatcaaggacatttt

SEQ ID NO: 21541 - DNA, 20 bp, Artificial Sequence
  Description of Artificial Sequence: Synthetic oligonucleotide
  Target: LAMA2; (-) strand; PAM type: NNGRRT; PAM sequence: GAGAAT
tcttcacactacagtccatg

SEQ ID NO: 21542 - DNA, 20 bp, Artificial Sequence
  Description of Artificial Sequence: Synthetic oligonucleotide
  Target: LAMA2; (-) strand; PAM type: NNGRRT; PAM sequence: ACGGAT
gaatgaatgccttgctagaa

SEQ ID NO: 21543 - DNA, 20 bp, Artificial Sequence
  Description of Artificial Sequence: Synthetic oligonucleotide
  Target: LAMA2; (-) strand; PAM type: NNGRRT; PAM sequence: ATGAAT
ttttaaaaatagtttatcga

SEQ ID NO: 21544 - DNA, 20 bp, Artificial Sequence
  Description of Artificial Sequence: Synthetic oligonucleotide
  Target: LAMA2; (-) strand; PAM type: NNGRRT; PAM sequence: TCGAAT
gcatttttaaaaatagttta

SEQ ID NO: 21545 - DNA, 20 bp, Artificial Sequence
  Description of Artificial Sequence: Synthetic oligonucleotide
  Target: LAMA2; (-) strand; PAM type: NNGRRT; PAM sequence: ATGAGT
attttcatatgcaaggcaga

SEQ ID NO: 21546 - DNA, 20 bp, Artificial Sequence
  Description of Artificial Sequence: Synthetic oligonucleotide
  Target: LAMA2; (-) strand; PAM type: NNGRRT; PAM sequence: CAGAAT
tctcattttcatatgcaagg

SEQ ID NO: 21547 - DNA, 20 bp, Artificial Sequence
  Description of Artificial Sequence: Synthetic oligonucleotide
  Target: LAMA2; (-) strand; PAM type: NNGRRT; PAM sequence: TTGGAT
tgtgttagagtctgatcaag

SEQ ID NO: 21548 - DNA, 20 bp, Artificial Sequence
  Description of Artificial Sequence: Synthetic oligonucleotide
  Target: LAMA2; (-) strand; PAM type: NNGRRT; PAM sequence: TAGAGT
tattaataaaaatagtgtgt

SEQ ID NO: 21549 - DNA, 20 bp, Artificial Sequence
  Description of Artificial Sequence: Synthetic oligonucleotide
  Target: LAMA2; (-) strand; PAM type: NNGRRT; PAM sequence: GAGAAT
aaaaagtaatttgagggtca

SEQ ID NO: 21550 - DNA, 20 bp, Artificial Sequence
  Description of Artificial Sequence: Synthetic oligonucleotide
  Target: LAMA2; (-) strand; PAM type: NNGRRT; PAM sequence: GAGGGT
taggaattaaaaagtaattt

SEQ ID NO: 21551 - DNA, 20 bp, Artificial Sequence
  Description of Artificial Sequence: Synthetic oligonucleotide
  Target: LAMA2; (-) strand; PAM type: NNGRRT; PAM sequence: AGGAAT
atttctgaaggtgttccgtt

SEQ ID NO: 21552 - DNA, 20 bp, Artificial Sequence
  Description of Artificial Sequence: Synthetic oligonucleotide
  Target: LAMA2; (-) strand; PAM type: NNGRRT; PAM sequence: ATGGGT
cttcagcacattactggtgt

SEQ ID NO: 21553 - DNA, 20 bp, Artificial Sequence
  Description of Artificial Sequence: Synthetic oligonucleotide
  Target: LAMA2; (-) strand; PAM type: NNGRRT; PAM sequence: GTGAAT
aggacgtgtaaggaaaattt

SEQ ID NO: 21554 - DNA, 20 bp, Artificial Sequence
  Description of Artificial Sequence: Synthetic oligonucleotide
  Target: LAMA2; (-) strand; PAM type: NNGRRT; PAM sequence: TAGAAT
ggaaaataactataattaaa

SEQ ID NO: 21555 - DNA, 20 bp, Artificial Sequence
  Description of Artificial Sequence: Synthetic oligonucleotide
  Target: LAMA2; (-) strand; PAM type: NNGRRT; PAM sequence: GGGAAT
agctttatataacgagatct

SEQ ID NO: 21556 - DNA, 20 bp, Artificial Sequence
  Description of Artificial Sequence: Synthetic oligonucleotide
  Target: LAMA2; (-) strand; PAM type: NNGRRT; PAM sequence: ATGAGT
ttcagctcactttcctcaag

SEQ ID NO: 21557 - DNA, 20 bp, Artificial Sequence
  Description of Artificial Sequence: Synthetic oligonucleotide
  Target: LAMA2; (-) strand; PAM type: NNGRRT; PAM sequence: AAGGAT
tgactttgtgccactggaat

SEQ ID NO: 21558 - DNA, 20 bp, Artificial Sequence
  Description of Artificial Sequence: Synthetic oligonucleotide
  Target: LAMA2; (-) strand; PAM type: NNGRRT; PAM sequence: TGGAAT
agagagtgactttgtgccac

SEQ ID NO: 21559 - DNA, 20 bp, Artificial Sequence
  Description of Artificial Sequence: Synthetic oligonucleotide
  Target: LAMA2; (-) strand; PAM type: NNGRRT; PAM sequence: GAGAGT
ctcattttgtttaccactaa

SEQ ID NO: 21560 - DNA, 20 bp, Artificial Sequence
  Description of Artificial Sequence: Synthetic oligonucleotide
  Target: LAMA2; (-) strand; PAM type: NNGRRT; PAM sequence: TTGAAT
aagataagaaggagattctt

SEQ ID NO: 21561 - DNA, 20 bp, Artificial Sequence
  Description of Artificial Sequence: Synthetic oligonucleotide
  Target: LAMA2; (-) strand; PAM type: NNGRRT; PAM sequence: TTGAGT
tataaaatatgcaataaaat

SEQ ID NO: 21562 - DNA, 20 bp, Artificial Sequence
  Description of Artificial Sequence: Synthetic oligonucleotide
  Target: LAMA2; (-) strand; PAM type: NNGRRT; PAM sequence: AAGAAT
gttgtataaatactgcttag

SEQ ID NO: 21563 - DNA, 20 bp, Artificial Sequence
  Description of Artificial Sequence: Synthetic oligonucleotide
  Target: LAMA2; (-) strand; PAM type: NNGRRT; PAM sequence: ATGAGT
acaaaagattttatacactt

SEQ ID NO: 21564 - DNA, 20 bp, Artificial Sequence
  Description of Artificial Sequence: Synthetic oligonucleotide
  Target: LAMA2; (-) strand; PAM type: NNGRRT; PAM sequence: GAGAGT
taaatccagtacattatatt

SEQ ID NO: 21565 - DNA, 20 bp, Artificial Sequence
  Description of Artificial Sequence: Synthetic oligonucleotide
  Target: LAMA2; (-) strand; PAM type: NNGRRT; PAM sequence: GAGAAT
ggggatcaaaaacaatgtgg

SEQ ID NO: 21566 - DNA, 20 bp, Artificial Sequence
  Description of Artificial Sequence: Synthetic oligonucleotide
  Target: LAMA2; (-) strand; PAM type: NNGRRT; PAM sequence: GGGGAT
cagcaagtgtcaaaattgaa

SEQ ID NO: 21567 - DNA, 20 bp, Artificial Sequence
  Description of Artificial Sequence: Synthetic oligonucleotide
  Target: LAMA2; (-) strand; PAM type: NNGRRT; PAM sequence: CTGAAT
ggagaaacagaacagggcat

SEQ ID NO: 21568 - DNA, 20 bp, Artificial Sequence
  Description of Artificial Sequence: Synthetic oligonucleotide
  Target: LAMA2; (-) strand; PAM type: NNGRRT; PAM sequence: AGGAAT
aaagcatgcctgcatattat

SEQ ID NO: 21569 - DNA, 20 bp, Artificial Sequence
  Description of Artificial Sequence: Synthetic oligonucleotide
  Target: LAMA2; (-) strand; PAM type: NNGRRT; PAM sequence: ATGAAT
ctatttgtatgtatttgcat

SEQ ID NO: 21570 - DNA, 20 bp, Artificial Sequence
  Description of Artificial Sequence: Synthetic oligonucleotide
  Target: LAMA2; (-) strand; PAM type: NNGRRT; PAM sequence: CTGAAT
gatgggagctgtgggtatat

SEQ ID NO: 21571 - DNA, 20 bp, Artificial Sequence
  Description of Artificial Sequence: Synthetic oligonucleotide
  Target: LAMA2; (-) strand; PAM type: NNGRRT; PAM sequence: GTGGGT
ttattaattggatgggagct

SEQ ID NO: 21572 - DNA, 20 bp, Artificial Sequence
  Description of Artificial Sequence: Synthetic oligonucleotide
  Target: LAMA2; (-) strand; PAM type: NNGRRT; PAM sequence: TTGGAT
actcagaagattcttattaa

SEQ ID NO: 21573 - DNA, 20 bp, Artificial Sequence
  Description of Artificial Sequence: Synthetic oligonucleotide
  Target: LAMA2; (-) strand; PAM type: NNGRRT; PAM sequence: CAGAAT
gaaattcagtaataagagtt

SEQ ID NO: 21574 - DNA, 20 bp, Artificial Sequence
  Description of Artificial Sequence: Synthetic oligonucleotide
  Target: LAMA2; (-) strand; PAM type: NNGRRT; PAM sequence: AAGAGT
tcgcaaggaaattcagtaat

SEQ ID NO: 21575 - DNA, 20 bp, Artificial Sequence
  Description of Artificial Sequence: Synthetic oligonucleotide
  Target: LAMA2; (-) strand; PAM type: NNGRRT; PAM sequence: AGGAAT
atctgctgctggcactctgg

SEQ ID NO: 21576 - DNA, 20 bp, Artificial Sequence
  Description of Artificial Sequence: Synthetic oligonucleotide
  Target: LAMA2; (-) strand; PAM type: NNGRRT; PAM sequence: AAGAAT
aaatgagaccaaagcataat

SEQ ID NO: 21577 - DNA, 20 bp, Artificial Sequence
  Description of Artificial Sequence: Synthetic oligonucleotide
  Target: LAMA2; (-) strand; PAM type: NNGRRT; PAM sequence: ATGGAT
tctccccttctcccaggatg

SEQ ID NO: 21578 - DNA, 20 bp, Artificial Sequence
  Description of Artificial Sequence: Synthetic oligonucleotide
  Target: LAMA2; (-) strand; PAM type: NNGRRT; PAM sequence: CAGGAT
ttttcattctccccttctcc

SEQ ID NO: 21579 - DNA, 20 bp, Artificial Sequence
  Description of Artificial Sequence: Synthetic oligonucleotide
  Target: LAMA2; (-) strand; PAM type: NNGRRT; PAM sequence: GAGGGT
gacatgatcctccaggtaca

SEQ ID NO: 21580 - DNA, 20 bp, Artificial Sequence
  Description of Artificial Sequence: Synthetic oligonucleotide
  Target: LAMA2; (-) strand; PAM type: NNGRRT; PAM sequence: AGGGAT
gacaagctgtcacagctgcc

SEQ ID NO: 21581 - DNA, 20 bp, Artificial Sequence
  Description of Artificial Sequence: Synthetic oligonucleotide
  Target: LAMA2; (-) strand; PAM type: NNGRRT; PAM sequence: TGGAAT
gttagtacaaggaaatgttc

SEQ ID NO: 21582 - DNA, 20 bp, Artificial Sequence
  Description of Artificial Sequence: Synthetic oligonucleotide
  Target: LAMA2; (-) strand; PAM type: NNGRRT; PAM sequence: ATGGAT
attagaattgagataaaaaa

SEQ ID NO: 21583 - DNA, 20 bp, Artificial Sequence
  Description of Artificial Sequence: Synthetic oligonucleotide
  Target: LAMA2; (-) strand; PAM type: NNGRRT; PAM sequence: TAGAAT
aattatttaaagcaagtgat

SEQ ID NO: 21584 - DNA, 20 bp, Artificial Sequence
  Description of Artificial Sequence: Synthetic oligonucleotide
  Target: LAMA2; (-) strand; PAM type: NNGRRT; PAM sequence: CAGAAT
cctgtgtgcgaaaatattgg

SEQ ID NO: 21585 - DNA, 20 bp, Artificial Sequence
  Description of Artificial Sequence: Synthetic oligonucleotide
  Target: LAMA2; (-) strand; PAM type: NNGRRT; PAM sequence: TAGAGT
tactaatatggatgaagccc

SEQ ID NO: 21586 - DNA, 20 bp, Artificial Sequence
  Description of Artificial Sequence: Synthetic oligonucleotide
  Target: LAMA2; (-) strand; PAM type: NNGRRT; PAM sequence: ATGGAT
gagaaatgtattatactaat

SEQ ID NO: 21587 - DNA, 20 bp, Artificial Sequence
  Description of Artificial Sequence: Synthetic oligonucleotide
  Target: LAMA2; (-) strand; PAM type: NNGRRT; PAM sequence: AAGGAT
attctaatcccactgacatt

SEQ ID NO: 21588 - DNA, 20 bp, Artificial Sequence
  Description of Artificial Sequence: Synthetic oligonucleotide
  Target: LAMA2; (-) strand; PAM type: NNGRRT; PAM sequence: TTGGAT
atgatggccaaatgctaaca

SEQ ID NO: 21589 - DNA, 20 bp, Artificial Sequence
  Description of Artificial Sequence: Synthetic oligonucleotide
  Target: LAMA2; (-) strand; PAM type: NNGRRT; PAM sequence: ATGGAT
cataaatttgacagaaatga

SEQ ID NO: 21590 - DNA, 20 bp, Artificial Sequence
  Description of Artificial Sequence: Synthetic oligonucleotide
  Target: LAMA2; (-) strand; PAM type: NNGRRT; PAM sequence: ATGAAT
ctcacataaatttgacagaa

SEQ ID NO: 21591 - DNA, 20 bp, Artificial Sequence
  Description of Artificial Sequence: Synthetic oligonucleotide
  Target: LAMA2; (-) strand; PAM type: NNGRRT; PAM sequence: AAGAGT
ggacccacctgaataattgg

SEQ ID NO: 21592 - DNA, 20 bp, Artificial Sequence
  Description of Artificial Sequence: Synthetic oligonucleotide
  Target: LAMA2; (-) strand; PAM type: NNGRRT; PAM sequence: CTGAAT
ctgcatgtcctgggacccac

SEQ ID NO: 21593 - DNA, 20 bp, Artificial Sequence
  Description of Artificial Sequence: Synthetic oligonucleotide
  Target: LAMA2; (-) strand; PAM type: NNGRRT; PAM sequence: TAGAGT
tgggtctttggtgcttacag

SEQ ID NO: 21594 - DNA, 20 bp, Artificial Sequence
  Description of Artificial Sequence: Synthetic oligonucleotide
  Target: LAMA2; (-) strand; PAM type: NNGRRT; PAM sequence: CTGGGT
taatgaaatagggtacccta

SEQ ID NO: 21595 - DNA, 20 bp, Artificial Sequence
  Description of Artificial Sequence: Synthetic oligonucleotide
  Target: LAMA2; (-) strand; PAM type: NNGRRT; PAM sequence: TAGGGT
agacacatttcttaatgaaa

SEQ ID NO: 21596 - DNA, 20 bp, Artificial Sequence
  Description of Artificial Sequence: Synthetic oligonucleotide
  Target: LAMA2; (-) strand; PAM type: NNGRRT; PAM sequence: ATGAAT
agtgatttggttttgattca

SEQ ID NO: 21597 - DNA, 20 bp, Artificial Sequence
  Description of Artificial Sequence: Synthetic oligonucleotide
  Target: LAMA2; (-) strand; PAM type: NNGRRT; PAM sequence: AGGAAT
tatgattttatacatttgtc

SEQ ID NO: 21598 - DNA, 20 bp, Artificial Sequence
  Description of Artificial Sequence: Synthetic oligonucleotide
  Target: LAMA2; (-) strand; PAM type: NNGRRT; PAM sequence: AAGAAT
tagatgatctgtgggaaagg

SEQ ID NO: 21599 - DNA, 20 bp, Artificial Sequence
  Description of Artificial Sequence: Synthetic oligonucleotide
  Target: LAMA2; (-) strand; PAM type: NNGRRT; PAM sequence: CTGGAT
ctccaggacttgggaactca

SEQ ID NO: 21600 - DNA, 20 bp, Artificial Sequence
  Description of Artificial Sequence: Synthetic oligonucleotide
  Target: LAMA2; (-) strand; PAM type: NNGRRT; PAM sequence: TAGAAT
gtaaatgactaacttagcct

SEQ ID NO: 21601 - DNA, 20 bp, Artificial Sequence
  Description of Artificial Sequence: Synthetic oligonucleotide
  Target: LAMA2; (-) strand; PAM type: NNGRRT; PAM sequence: CAGGAT
gggtgggggttattggaaga

SEQ ID NO: 21602 - DNA, 20 bp, Artificial Sequence
  Description of Artificial Sequence: Synthetic oligonucleotide
  Target: LAMA2; (-) strand; PAM type: NNGRRT; PAM sequence: GGGGGT
atccctaactttatgggggt

SEQ ID NO: 21603 - DNA, 20 bp, Artificial Sequence
  Description of Artificial Sequence: Synthetic oligonucleotide
  Target: LAMA2; (-) strand; PAM type: NNGRRT; PAM sequence: GGGGGT
aataatatccctaactttat

SEQ ID NO: 21604 - DNA, 20 bp, Artificial Sequence
  Description of Artificial Sequence: Synthetic oligonucleotide
  Target: LAMA2; (-) strand; PAM type: NNGRRT; PAM sequence: TGGAAT
aattaccataataaaattag

SEQ ID NO: 21605 - DNA, 20 bp, Artificial Sequence
  Description of Artificial Sequence: Synthetic oligonucleotide
  Target: LAMA2; (-) strand; PAM type: NNGRRT; PAM sequence: ATGGAT
tgttcttaagacttcatgcc

SEQ ID NO: 21606 - DNA, 20 bp, Artificial Sequence
  Description of Artificial Sequence: Synthetic oligonucleotide
  Target: LAMA2; (-) strand; PAM type: NNGRRT; PAM sequence: TGGAGT
ctttaggagtcactttttct

SEQ ID NO: 21607 - DNA, 20 bp, Artificial Sequence
  Description of Artificial Sequence: Synthetic oligonucleotide
  Target: LAMA2; (-) strand; PAM type: NNGRRT; PAM sequence: AGGAGT
tatcaaattatttagacttt

SEQ ID NO: 21608 - DNA, 20 bp, Artificial Sequence
  Description of Artificial Sequence: Synthetic oligonucleotide
  Target: LAMA2; (-) strand; PAM type: NNGRRT; PAM sequence: TCGAAT
atccattttcatctgattta

SEQ ID NO: 21609 - DNA, 20 bp, Artificial Sequence
  Description of Artificial Sequence: Synthetic oligonucleotide
  Target: LAMA2; (-) strand; PAM type: NNGRRT; PAM sequence: ACGGAT
ttgagaaactgaaagagcct

SEQ ID NO: 21610 - DNA, 20 bp, Artificial Sequence
  Description of Artificial Sequence: Synthetic oligonucleotide
  Target: LAMA2; (-) strand; PAM type: NNGRRT; PAM sequence: TAGAGT
agtgtctgccaaggggatac

SEQ ID NO: 21611 - DNA, 20 bp, Artificial Sequence
  Description of Artificial Sequence: Synthetic oligonucleotide
  Target: LAMA2; (-) strand; PAM type: NNGRRT; PAM sequence: GGGGAT
ttgtcttcagtgtctgccaa

SEQ ID NO: 21612 - DNA, 20 bp, Artificial Sequence
  Description of Artificial Sequence: Synthetic oligonucleotide
  Target: LAMA2; (-) strand; PAM type: NNGRRT; PAM sequence: CTGAAT
tagatgattttgttaaattt

SEQ ID NO: 21613 - DNA, 20 bp, Artificial Sequence
  Description of Artificial Sequence: Synthetic oligonucleotide
  Target: LAMA2; (-) strand; PAM type: NNGRRT; PAM sequence: GGGAAT
atacaaggaggagatgacat

SEQ ID NO: 21614 - DNA, 20 bp, Artificial Sequence
  Description of Artificial Sequence: Synthetic oligonucleotide
  Target: LAMA2; (-) strand; PAM type: NNGRRT; PAM sequence: CAGAAT
acatataattgcatttatat

SEQ ID NO: 21615 - DNA, 20 bp, Artificial Sequence
  Description of Artificial Sequence: Synthetic oligonucleotide
  Target: LAMA2; (-) strand; PAM type: NNGRRT; PAM sequence: TAGAAT
ttaagtgaccttttcacaaa

SEQ ID NO: 21616 - DNA, 20 bp, Artificial Sequence
  Description of Artificial Sequence: Synthetic oligonucleotide
  Target: LAMA2; (-) strand; PAM type: NNGRRT; PAM sequence: TAGAGT
tctgaggttattctaaaacg

SEQ ID NO: 21617 - DNA, 20 bp, Artificial Sequence
  Description of Artificial Sequence: Synthetic oligonucleotide
  Target: LAMA2; (-) strand; PAM type: NNGRRT; PAM sequence: AAGAAT
actatagcattataacattt

SEQ ID NO: 21618 - DNA, 20 bp, Artificial Sequence
  Description of Artificial Sequence: Synthetic oligonucleotide
  Target: LAMA2; (-) strand; PAM type: NNGRRT; PAM sequence: AGGAAT
ttagaactaaaataattttg

SEQ ID NO: 21619 - DNA, 20 bp, Artificial Sequence
  Description of Artificial Sequence: Synthetic oligonucleotide
  Target: LAMA2; (-) strand; PAM type: NNGRRT; PAM sequence: CAGGGT
ttagttctttacagatacat

SEQ ID NO: 21620 - DNA, 20 bp, Artificial Sequence
  Description of Artificial Sequence: Synthetic oligonucleotide
  Target: LAMA2; (-) strand; PAM type: NNGRRT; PAM sequence: TGGAGT
tccagaacgtgacaggaact

SEQ ID NO: 21621 - DNA, 20 bp, Artificial Sequence
  Description of Artificial Sequence: Synthetic oligonucleotide
  Target: LAMA2; (-) strand; PAM type: NNGRRT; PAM sequence: GTGAGT
atgcctgctgtgtcatatag

SEQ ID NO: 21622 - DNA, 20 bp, Artificial Sequence
  Description of Artificial Sequence: Synthetic oligonucleotide
  Target: LAMA2; (-) strand; PAM type: NNGRRT; PAM sequence: AGGGAT
ataacaactctacaagctgt

SEQ ID NO: 21623 - DNA, 20 bp, Artificial Sequence
  Description of Artificial Sequence: Synthetic oligonucleotide
  Target: LAMA2; (-) strand; PAM type: NNGRRT; PAM sequence: CAGAAT
tggacgcctaagttcagtaa

SEQ ID NO: 21624 - DNA, 20 bp, Artificial Sequence
  Description of Artificial Sequence: Synthetic oligonucleotide
  Target: LAMA2; (-) strand; PAM type: NNGRRT; PAM sequence: ATGGGT
ctgtaaggagaaagtaattt

SEQ ID NO: 21625 - DNA, 20 bp, Artificial Sequence
  Description of Artificial Sequence: Synthetic oligonucleotide
  Target: LAMA2; (-) strand; PAM type: NNGRRT; PAM sequence: TAGAAT
gatcacagtcatttcaattg

SEQ ID NO: 21626 - DNA, 20 bp, Artificial Sequence
  Description of Artificial Sequence: Synthetic oligonucleotide
  Target: LAMA2; (-) strand; PAM type: NNGRRT; PAM sequence: ATGAAT
aggtcaaatggtaatgtaca

SEQ ID NO: 21627 - DNA, 20 bp, Artificial Sequence
  Description of Artificial Sequence: Synthetic oligonucleotide
  Target: LAMA2; (-) strand; PAM type: NNGRRT; PAM sequence: GCGAAT
tcagaaatgtctgaattaaa

SEQ ID NO: 21628 - DNA, 20 bp, Artificial Sequence
  Description of Artificial Sequence: Synthetic oligonucleotide
  Target: LAMA2; (-) strand; PAM type: NNGRRT; PAM sequence: CTGAAT
gctatttgtttcagaaatgt

SEQ ID NO: 21629 - DNA, 20 bp, Artificial Sequence
  Description of Artificial Sequence: Synthetic oligonucleotide
  Target: LAMA2; (-) strand; PAM type: NNGRRT; PAM sequence: AAGAGT
aaaaatgtaaaggcaaagga

SEQ ID NO: 21630 - DNA, 20 bp, Artificial Sequence
  Description of Artificial Sequence: Synthetic oligonucleotide
  Target: LAMA2; (-) strand; PAM type: NNGRRT; PAM sequence: AAGAGT
gagccaccgcgcccagcccc

SEQ ID NO: 21631 - DNA, 20 bp, Artificial Sequence
  Description of Artificial Sequence: Synthetic oligonucleotide
  Target: LAMA2; (-) strand; PAM type: NNGRRT; PAM sequence: TGGGAT
gccttggcctcccaaagtgc

SEQ ID NO: 21632 - DNA, 20 bp, Artificial Sequence
  Description of Artificial Sequence: Synthetic oligonucleotide
  Target: LAMA2; (-) strand; PAM type: NNGRRT; PAM sequence: TGGGAT
gcctcagcctcctgagtagc

SEQ ID NO: 21633 - DNA, 20 bp, Artificial Sequence
  Description of Artificial Sequence: Synthetic oligonucleotide
  Target: LAMA2; (-) strand; PAM type: NNGRRT; PAM sequence: CTGAGT
gattctcccgcctcagcctc

SEQ ID NO: 21634 - DNA, 20 bp, Artificial Sequence
  Description of Artificial Sequence: Synthetic oligonucleotide
  Target: LAMA2; (-) strand; PAM type: NNGRRT; PAM sequence: TGGAGT
tctcactcggtcgcccaggc

SEQ ID NO: 21635 - DNA, 20 bp, Artificial Sequence
  Description of Artificial Sequence: Synthetic oligonucleotide
  Target: LAMA2; (-) strand; PAM type: NNGRRT; PAM sequence: TGGAGT
gtttgttttgttttttgaga

SEQ ID NO: 21636 - DNA, 20 bp, Artificial Sequence
  Description of Artificial Sequence: Synthetic oligonucleotide
  Target: LAMA2; (-) strand; PAM type: NNGRRT; PAM sequence: GGGAGT
ggtgtttgctaaaaagcaaa

SEQ ID NO: 21637 - DNA, 20 bp, Artificial Sequence
  Description of Artificial Sequence: Synthetic oligonucleotide
  Target: LAMA2; (-) strand; PAM type: NNGRRT; PAM sequence: TTGAAT
aacaacatgctgtattttaa

SEQ ID NO: 21638 - DNA, 20 bp, Artificial Sequence
  Description of Artificial Sequence: Synthetic oligonucleotide
  Target: LAMA2; (-) strand; PAM type: NNGRRT; PAM sequence: AGGAAT
aaatctgtccaccctcatgg

SEQ ID NO: 21639 - DNA, 20 bp, Artificial Sequence
  Description of Artificial Sequence: Synthetic oligonucleotide
  Target: LAMA2; (-) strand; PAM type: NNGRRT; PAM sequence: CTGGAT
tagcacacagaatcgcttct

SEQ ID NO: 21640 - DNA, 20 bp, Artificial Sequence
  Description of Artificial Sequence: Synthetic oligonucleotide
  Target: LAMA2; (-) strand; PAM type: NNGRRT; PAM sequence: CAGAAT
gatcgcagtcacatagcaca

SEQ ID NO: 21641 - DNA, 20 bp, Artificial Sequence
  Description of Artificial Sequence: Synthetic oligonucleotide
  Target: LAMA2; (-) strand; PAM type: NNGRRT; PAM sequence: CGGGAT
ttgcggtgacacagagccaa

SEQ ID NO: 21642 - DNA, 20 bp, Artificial Sequence
  Description of Artificial Sequence: Synthetic oligonucleotide
  Target: LAMA2; (-) strand; PAM type: NNGRRT; PAM sequence: TGGGAT
catgagccatgcagcgcctc

SEQ ID NO: 21643 - DNA, 20 bp, Artificial Sequence
  Description of Artificial Sequence: Synthetic oligonucleotide
  Target: LAMA2; (-) strand; PAM type: NNGRRT; PAM sequence: AGGAAT
aaaagggcaagggttcaatt

SEQ ID NO: 21644 - DNA, 20 bp, Artificial Sequence
  Description of Artificial Sequence: Synthetic oligonucleotide
  Target: LAMA2; (-) strand; PAM type: NNGRRT; PAM sequence: AAGGGT
atggttatttttaaaagggc

SEQ ID NO: 21645 - DNA, 20 bp, Artificial Sequence
  Description of Artificial Sequence: Synthetic oligonucleotide
  Target: LAMA2; (-) strand; PAM type: NNGRRT; PAM sequence: ACGGAT
gaatatgctttttaaagcat

SEQ ID NO: 21646 - DNA, 20 bp, Artificial Sequence
  Description of Artificial Sequence: Synthetic oligonucleotide
  Target: LAMA2; (-) strand; PAM type: NNGRRT; PAM sequence: TTGAAT
agttttatgaccctatgaac

SEQ ID NO: 21647 - DNA, 20 bp, Artificial Sequence
  Description of Artificial Sequence: Synthetic oligonucleotide
  Target: LAMA2; (-) strand; PAM type: NNGRRT; PAM sequence: CTGAGT
tgaaatgcctgataaatggg

SEQ ID NO: 21648 - DNA, 20 bp, Artificial Sequence
  Description of Artificial Sequence: Synthetic oligonucleotide
  Target: LAMA2; (-) strand; PAM type: NNGRRT; PAM sequence: TTGGGT
tagaaacaactttccccgtt

SEQ ID NO: 21649 - DNA, 20 bp, Artificial Sequence
  Description of Artificial Sequence: Synthetic oligonucleotide
  Target: LAMA2; (-) strand; PAM type: NNGRRT; PAM sequence: ATGAAT
atgagccaagaaataaaacc

SEQ ID NO: 21650 - DNA, 20 bp, Artificial Sequence
  Description of Artificial Sequence: Synthetic oligonucleotide
  Target: LAMA2; (-) strand; PAM type: NNGRRT; PAM sequence: CAGGAT
tagctaggaagtaatgaggc

SEQ ID NO: 21651 - DNA, 20 bp, Artificial Sequence
  Description of Artificial Sequence: Synthetic oligonucleotide
  Target: LAMA2; (-) strand; PAM type: NNGRRT; PAM sequence: AGGAAT
ctgaattacagaaagattca

SEQ ID NO: 21652 - DNA, 20 bp, Artificial Sequence
  Description of Artificial Sequence: Synthetic oligonucleotide
  Target: LAMA2; (-) strand; PAM type: NNGRRT; PAM sequence: CTGAAT
tcttactacagatgaagaag

SEQ ID NO: 21653 - DNA, 20 bp, Artificial Sequence
  Description of Artificial Sequence: Synthetic oligonucleotide
  Target: LAMA2; (-) strand; PAM type: NNGRRT; PAM sequence: GTGGAT
gcagacataaaccctctgaa

SEQ ID NO: 21654 - DNA, 20 bp, Artificial Sequence
  Description of Artificial Sequence: Synthetic oligonucleotide
  Target: LAMA2; (-) strand; PAM type: NNGRRT; PAM sequence: TGGAGT
acctcttggcatttgcttct

SEQ ID NO: 21655 - DNA, 20 bp, Artificial Sequence
  Description of Artificial Sequence: Synthetic oligonucleotide
  Target: LAMA2; (-) strand; PAM type: NNGRRT; PAM sequence: GGGAGT
ctttctttctgtgttttccc

SEQ ID NO: 21656 - DNA, 20 bp, Artificial Sequence
  Description of Artificial Sequence: Synthetic oligonucleotide
  Target: LAMA2; (-) strand; PAM type: NNGRRT; PAM sequence: AAGAAT
tatatcccattggcttggcc

SEQ ID NO: 21657 - DNA, 20 bp, Artificial Sequence
  Description of Artificial Sequence: Synthetic oligonucleotide
  Target: LAMA2; (-) strand; PAM type: NNGRRT; PAM sequence: TTGGGT
ctttagtgggtaaaatttgc

SEQ ID NO: 21658 - DNA, 20 bp, Artificial Sequence
  Description of Artificial Sequence: Synthetic oligonucleotide
  Target: LAMA2; (-) strand; PAM type: NNGRRT; PAM sequence: GTGGGT
accaattcaggattccttta

SEQ ID NO: 21659 - DNA, 20 bp, Artificial Sequence
  Description of Artificial Sequence: Synthetic oligonucleotide
  Target: LAMA2; (-) strand; PAM type: NNGRRT; PAM sequence: CAGGAT
tagaacctccctgaccaatt

SEQ ID NO: 21660 - DNA, 20 bp, Artificial Sequence
  Description of Artificial Sequence: Synthetic oligonucleotide
  Target: LAMA2; (-) strand; PAM type: NNGRRT; PAM sequence: AAGAGT
gaattaagatgagcttccac

SEQ ID NO: 21661 - DNA, 20 bp, Artificial Sequence
  Description of Artificial Sequence: Synthetic oligonucleotide
  Target: LAMA2; (-) strand; PAM type: NNGRRT; PAM sequence: ATGAAT
atgctcttatagcactctga

SEQ ID NO: 21662 - DNA, 20 bp, Artificial Sequence
  Description of Artificial Sequence: Synthetic oligonucleotide
  Target: LAMA2; (-) strand; PAM type: NNGRRT; PAM sequence: CTGAAT
tgttatgctcttatagcact

SEQ ID NO: 21663 - DNA, 20 bp, Artificial Sequence
  Description of Artificial Sequence: Synthetic oligonucleotide
  Target: LAMA2; (-) strand; PAM type: NNGRRT; PAM sequence: ATGAAT
agcctctagaatcgtgagaa

SEQ ID NO: 21664 - DNA, 20 bp, Artificial Sequence
  Description of Artificial Sequence: Synthetic oligonucleotide
  Target: LAMA2; (-) strand; PAM type: NNGRRT; PAM sequence: TAGAAT
atcttgtacttcccagcctc

SEQ ID NO: 21665 - DNA, 20 bp, Artificial Sequence
  Description of Artificial Sequence: Synthetic oligonucleotide
  Target: LAMA2; (-) strand; PAM type: NNGRRT; PAM sequence: CTGGAT
gataggaaatctgccagcac

SEQ ID NO: 21666 - DNA, 20 bp, Artificial Sequence
  Description of Artificial Sequence: Synthetic oligonucleotide
  Target: LAMA2; (-) strand; PAM type: NNGRRT; PAM sequence: GTGGGT
ctcccccaagtgaggttcca

SEQ ID NO: 21667 - DNA, 20 bp, Artificial Sequence
  Description of Artificial Sequence: Synthetic oligonucleotide
  Target: LAMA2; (-) strand; PAM type: NNGRRT; PAM sequence: GAGAGT
cacttataaaagaggcctca

SEQ ID NO: 21668 - DNA, 20 bp, Artificial Sequence
  Description of Artificial Sequence: Synthetic oligonucleotide
  Target: LAMA2; (-) strand; PAM type: NNGRRT; PAM sequence: TGGGAT
gagaatggagctctcatgaa

SEQ ID NO: 21669 - DNA, 20 bp, Artificial Sequence
  Description of Artificial Sequence: Synthetic oligonucleotide
  Target: LAMA2; (-) strand; PAM type: NNGRRT; PAM sequence: ATGAAT
gtcatgagaatggagctctc

SEQ ID NO: 21670 - DNA, 20 bp, Artificial Sequence
  Description of Artificial Sequence: Synthetic oligonucleotide
  Target: LAMA2; (-) strand; PAM type: NNGRRT; PAM sequence: GAGAAT
ttgggaggtgattaggtcat

SEQ ID NO: 21671 - DNA, 20 bp, Artificial Sequence
  Description of Artificial Sequence: Synthetic oligonucleotide
  Target: LAMA2; (-) strand; PAM type: NNGRRT; PAM sequence: CTGAAT
cagaggtgctctgtaatgga

SEQ ID NO: 21672 - DNA, 20 bp, Artificial Sequence
  Description of Artificial Sequence: Synthetic oligonucleotide
  Target: LAMA2; (-) strand; PAM type: NNGRRT; PAM sequence: TGGAAT
ctgcaagacaacctacagtg

SEQ ID NO: 21673 - DNA, 20 bp, Artificial Sequence
  Description of Artificial Sequence: Synthetic oligonucleotide
  Target: LAMA2; (-) strand; PAM type: NNGRRT; PAM sequence: TTGAAT
tactgtaagatatgtagggc

SEQ ID NO: 21674 - DNA, 20 bp, Artificial Sequence
  Description of Artificial Sequence: Synthetic oligonucleotide
  Target: LAMA2; (-) strand; PAM type: NNGRRT; PAM sequence: CAGAGT
cagatcagctaggttggctc

SEQ ID NO: 21675 - DNA, 20 bp, Artificial Sequence
  Description of Artificial Sequence: Synthetic oligonucleotide
  Target: LAMA2; (-) strand; PAM type: NNGRRT; PAM sequence: TGGAGT
ggtcatgagctaaccaattg

SEQ ID NO: 21676 - DNA, 20 bp, Artificial Sequence
  Description of Artificial Sequence: Synthetic oligonucleotide
  Target: LAMA2; (-) strand; PAM type: NNGRRT; PAM sequence: TTGAGT
tcattctcaccactttttta

SEQ ID NO: 21677 - DNA, 20 bp, Artificial Sequence
  Description of Artificial Sequence: Synthetic oligonucleotide
  Target: LAMA2; (-) strand; PAM type: NNGRRT; PAM sequence: GAGAGT
tcctcaggacaaccctggca

SEQ ID NO: 21678 - DNA, 20 bp, Artificial Sequence
  Description of Artificial Sequence: Synthetic oligonucleotide
  Target: LAMA2; (-) strand; PAM type: NNGRRT; PAM sequence: CGGGGT
tcccataaatgtgtctctct

SEQ ID NO: 21679 - DNA, 20 bp, Artificial Sequence
  Description of Artificial Sequence: Synthetic oligonucleotide
  Target: LAMA2; (-) strand; PAM type: NNGRRT; PAM sequence: GAGAGT
gaggtaaaataaatatggga

SEQ ID NO: 21680 - DNA, 20 bp, Artificial Sequence
  Description of Artificial Sequence: Synthetic oligonucleotide
  Target: LAMA2; (-) strand; PAM type: NNGRRT; PAM sequence: AGGGGT
catattgatttactcattaa

SEQ ID NO: 21681 - DNA, 20 bp, Artificial Sequence
  Description of Artificial Sequence: Synthetic oligonucleotide
  Target: LAMA2; (-) strand; PAM type: NNGRRT; PAM sequence: CTGAGT
aaaacggtattgaaaaatat

SEQ ID NO: 21682 - DNA, 20 bp, Artificial Sequence
  Description of Artificial Sequence: Synthetic oligonucleotide
  Target: LAMA2; (-) strand; PAM type: NNGRRT; PAM sequence: TAGGAT
tttaatgatataaatatgct

SEQ ID NO: 21683 - DNA, 20 bp, Artificial Sequence
  Description of Artificial Sequence: Synthetic oligonucleotide
  Target: LAMA2; (-) strand; PAM type: NNGRRT; PAM sequence: AAGAAT
cacattatgaaataatatgc

SEQ ID NO: 21684 - DNA, 20 bp, Artificial Sequence
  Description of Artificial Sequence: Synthetic oligonucleotide
  Target: LAMA2; (-) strand; PAM type: NNGRRT; PAM sequence: TTGAAT
gtacaatgttataaaaattg

SEQ ID NO: 21685 - DNA, 20 bp, Artificial Sequence
  Description of Artificial Sequence: Synthetic oligonucleotide
  Target: LAMA2; (-) strand; PAM type: NNGRRT; PAM sequence: GTGAAT
ttacaatattatttatcatg

SEQ ID NO: 21686 - DNA, 20 bp, Artificial Sequence
  Description of Artificial Sequence: Synthetic oligonucleotide
  Target: LAMA2; (-) strand; PAM type: NNGRRT; PAM sequence: TGGAAT
ttagagaaataatcagaaat

SEQ ID NO: 21687 - DNA, 20 bp, Artificial Sequence
  Description of Artificial Sequence: Synthetic oligonucleotide
  Target: LAMA2; (-) strand; PAM type: NNGRRT; PAM sequence: CTGAGT
taaaatgtaaaatgggttga

SEQ ID NO: 21688 - DNA, 20 bp, Artificial Sequence
  Description of Artificial Sequence: Synthetic oligonucleotide
  Target: LAMA2; (-) strand; PAM type: NNGRRT; PAM sequence: ATGGGT
ttttatttttaaaatgtaaa

SEQ ID NO: 21689 - DNA, 20 bp, Artificial Sequence
  Description of Artificial Sequence: Synthetic oligonucleotide
  Target: LAMA2; (-) strand; PAM type: NNGRRT; PAM sequence: AAGAAT
tttttaaaatgaccgtagct

SEQ ID NO: 21690 - DNA, 20 bp, Artificial Sequence
  Description of Artificial Sequence: Synthetic oligonucleotide
  Target: LAMA2; (-) strand; PAM type: NNGRRT; PAM sequence: CAGGGT
ctatcctgcttaaaatactt

SEQ ID NO: 21691 - DNA, 20 bp, Artificial Sequence
  Description of Artificial Sequence: Synthetic oligonucleotide
  Target: LAMA2; (-) strand; PAM type: NNGRRT; PAM sequence: ATGGAT
tgaaacgttagaaaatgctg

SEQ ID NO: 21692 - DNA, 20 bp, Artificial Sequence
  Description of Artificial Sequence: Synthetic oligonucleotide
  Target: LAMA2; (-) strand; PAM type: NNGRRT; PAM sequence: ATGAGT
aagtaaactttcattctctg

SEQ ID NO: 21693 - DNA, 20 bp, Artificial Sequence
  Description of Artificial Sequence: Synthetic oligonucleotide
  Target: LAMA2; (-) strand; PAM type: NNGRRT; PAM sequence: TAGAAT
ctttttgccctaatatttga

SEQ ID NO: 21694 - DNA, 20 bp, Artificial Sequence
  Description of Artificial Sequence: Synthetic oligonucleotide
  Target: LAMA2; (-) strand; PAM type: NNGRRT; PAM sequence: CTGAAT
acttcttcatttttagtaat

SEQ ID NO: 21695 - DNA, 20 bp, Artificial Sequence
  Description of Artificial Sequence: Synthetic oligonucleotide
  Target: LAMA2; (-) strand; PAM type: NNGRRT; PAM sequence: CAGAAT
aattttatcaaaattaactg

SEQ ID NO: 21696 - DNA, 20 bp, Artificial Sequence
  Description of Artificial Sequence: Synthetic oligonucleotide
  Target: LAMA2; (-) strand; PAM type: NNGRRT; PAM sequence: TTGGGT
cctcactgatgttatgacaa

SEQ ID NO: 21697 - DNA, 20 bp, Artificial Sequence
  Description of Artificial Sequence: Synthetic oligonucleotide
  Target: LAMA2; (-) strand; PAM type: NNGRRT; PAM sequence: CAGGAT
cagaggaacttaggagttat

SEQ ID NO: 21698 - DNA, 20 bp, Artificial Sequence
  Description of Artificial Sequence: Synthetic oligonucleotide
  Target: LAMA2; (-) strand; PAM type: NNGRRT; PAM sequence: AGGAGT
aggtgggaacagaggaactt

SEQ ID NO: 21699 - DNA, 20 bp, Artificial Sequence
  Description of Artificial Sequence: Synthetic oligonucleotide
  Target: LAMA2; (-) strand; PAM type: NNGRRT; PAM sequence: AAGAAT
gtcgaatgacttagacccaa

SEQ ID NO: 21700 - DNA, 20 bp, Artificial Sequence
  Description of Artificial Sequence: Synthetic oligonucleotide
  Target: LAMA2; (-) strand; PAM type: NNGRRT; PAM sequence: TCGAAT
attgtccactctcttcacag

SEQ ID NO: 21701 - DNA, 20 bp, Artificial Sequence
  Description of Artificial Sequence: Synthetic oligonucleotide
  Target: LAMA2; (-) strand; PAM type: NNGRRT; PAM sequence: GTGAAT
cagaccctaaaactatcaga

SEQ ID NO: 21702 - DNA, 20 bp, Artificial Sequence
  Description of Artificial Sequence: Synthetic oligonucleotide
  Target: LAMA2; (-) strand; PAM type: NNGRRT; PAM sequence: CAGAGT
aagtcagaccctaaaactat

SEQ ID NO: 21703 - DNA, 20 bp, Artificial Sequence
  Description of Artificial Sequence: Synthetic oligonucleotide
  Target: LAMA2; (-) strand; PAM type: NNGRRT; PAM sequence: CTGAGT
cgagcatctgctgattttta

SEQ ID NO: 21704 - DNA, 20 bp, Artificial Sequence
  Description of Artificial Sequence: Synthetic oligonucleotide
  Target: LAMA2; (-) strand; PAM type: NNGRRT; PAM sequence: CTGAAT
agcagtgtttgagtgactgg

SEQ ID NO: 21705 - DNA, 20 bp, Artificial Sequence
  Description of Artificial Sequence: Synthetic oligonucleotide
  Target: LAMA2; (-) strand; PAM type: NNGRRT; PAM sequence: TTGAGT
ctttcaagccgtagcagtgt

SEQ ID NO: 21706 - DNA, 20 bp, Artificial Sequence
  Description of Artificial Sequence: Synthetic oligonucleotide
  Target: LAMA2; (-) strand; PAM type: NNGRRT; PAM sequence: TGGGGT
aaagttgaaatgcattggcg

SEQ ID NO: 21707 - DNA, 20 bp, Artificial Sequence
  Description of Artificial Sequence: Synthetic oligonucleotide
  Target: LAMA2; (-) strand; PAM type: NNGRRT; PAM sequence: CCGGAT
acaccttgacttttcttgat

SEQ ID NO: 21708 - DNA, 20 bp, Artificial Sequence
  Description of Artificial Sequence: Synthetic oligonucleotide
  Target: LAMA2; (-) strand; PAM type: NNGRRT; PAM sequence: TGGGGT
agtagatgaaaagatgtttt

SEQ ID NO: 21709 - DNA, 20 bp, Artificial Sequence
  Description of Artificial Sequence: Synthetic oligonucleotide
  Target: LAMA2; (-) strand; PAM type: NNGRRT; PAM sequence: GGGAAT
tgtataagaatactgcttga

SEQ ID NO: 21710 - DNA, 20 bp, Artificial Sequence
  Description of Artificial Sequence: Synthetic oligonucleotide
  Target: LAMA2; (-) strand; PAM type: NNGRRT; PAM sequence: AAGAAT
aaggctgtggctggatgtat

SEQ ID NO: 21711 - DNA, 20 bp, Artificial Sequence
  Description of Artificial Sequence: Synthetic oligonucleotide
  Target: LAMA2; (-) strand; PAM type: NNGRRT; PAM sequence: CTGGAT
gatttgggtgaaggctgtgg

SEQ ID NO: 21712 - DNA, 20 bp, Artificial Sequence
  Description of Artificial Sequence: Synthetic oligonucleotide
  Target: LAMA2; (-) strand; PAM type: NNGRRT; PAM sequence: TTGGGT
atattttcttagctcatgat

SEQ ID NO: 21713 - DNA, 20 bp, Artificial Sequence
  Description of Artificial Sequence: Synthetic oligonucleotide
  Target: LAMA2; (-) strand; PAM type: NNGRRT; PAM sequence: CAGAAT
tcactctttactttcatctg

SEQ ID NO: 21714 - DNA, 20 bp, Artificial Sequence
  Description of Artificial Sequence: Synthetic oligonucleotide
  Target: LAMA2; (-) strand; PAM type: NNGRRT; PAM sequence: AAGGGT
aaactagtgattgttggaat

SEQ ID NO: 21715 - DNA, 20 bp, Artificial Sequence
  Description of Artificial Sequence: Synthetic oligonucleotide
  Target: LAMA2; (-) strand; PAM type: NNGRRT; PAM sequence: TGGAAT
atattcaaactagtgattgt

SEQ ID NO: 21716 - DNA, 20 bp, Artificial Sequence
  Description of Artificial Sequence: Synthetic oligonucleotide
  Target: LAMA2; (-) strand; PAM type: NNGRRT; PAM sequence: TTGAAT
gtatgtgagcattatccagg

SEQ ID NO: 21717 - DNA, 20 bp, Artificial Sequence
  Description of Artificial Sequence: Synthetic oligonucleotide
  Target: LAMA2; (-) strand; PAM type: NNGRRT; PAM sequence: GAGAGT
taaaatcttaccatggtgct

SEQ ID NO: 21718 - DNA, 20 bp, Artificial Sequence
  Description of Artificial Sequence: Synthetic oligonucleotide
  Target: LAMA2; (-) strand; PAM type: NNGRRT; PAM sequence: GTGAAT
tacttaaatttgccacaaca

SEQ ID NO: 21719 - DNA, 20 bp, Artificial Sequence
  Description of Artificial Sequence: Synthetic oligonucleotide
  Target: LAMA2; (-) strand; PAM type: NNGRRT; PAM sequence: GAGAAT
tccacatatctaaagtgctg

SEQ ID NO: 21720 - DNA, 20 bp, Artificial Sequence
  Description of Artificial Sequence: Synthetic oligonucleotide
  Target: LAMA2; (-) strand; PAM type: NNGRRT; PAM sequence: TAGAAT
aattagaataacttatcaat

SEQ ID NO: 21721 - DNA, 20 bp, Artificial Sequence
  Description of Artificial Sequence: Synthetic oligonucleotide
  Target: LAMA2; (-) strand; PAM type: NNGRRT; PAM sequence: TAGAAT
atttagaataacttatcaat

SEQ ID NO: 21722 - DNA, 20 bp, Artificial Sequence
  Description of Artificial Sequence: Synthetic oligonucleotide
  Target: LAMA2; (-) strand; PAM type: NNGRRT; PAM sequence: TAGAAT
acaattataaacttatcatt

SEQ ID NO: 21723 - DNA, 20 bp, Artificial Sequence
  Description of Artificial Sequence: Synthetic oligonucleotide
  Target: LAMA2; (-) strand; PAM type: NNGRRT; PAM sequence: GAGGAT
tagagatatacagattctta

SEQ ID NO: 21724 - DNA, 20 bp, Artificial Sequence
  Description of Artificial Sequence: Synthetic oligonucleotide
  Target: LAMA2; (-) strand; PAM type: NNGRRT; PAM sequence: CAGAGT
tgagctttggatttaaagaa

SEQ ID NO: 21725 - DNA, 20 bp, Artificial Sequence
  Description of Artificial Sequence: Synthetic oligonucleotide
  Target: LAMA2; (-) strand; PAM type: NNGRRT; PAM sequence: TTGGAT
agtaaaaatgtcagtgagct

SEQ ID NO: 21726 - DNA, 20 bp, Artificial Sequence
  Description of Artificial Sequence: Synthetic oligonucleotide
  Target: LAMA2; (-) strand; PAM type: NNGRRT; PAM sequence: CAGAAT
tctatggtgtttctttgggc

SEQ ID NO: 21727 - DNA, 20 bp, Artificial Sequence
  Description of Artificial Sequence: Synthetic oligonucleotide
  Target: LAMA2; (-) strand; PAM type: NNGRRT; PAM sequence: ATGAAT
ttattatcttaatttaatag

SEQ ID NO: 21728 - DNA, 20 bp, Artificial Sequence
  Description of Artificial Sequence: Synthetic oligonucleotide
  Target: LAMA2; (-) strand; PAM type: NNGRRT; PAM sequence: CTGAGT
acactaaatagaaagaaaac

SEQ ID NO: 21729 - DNA, 20 bp, Artificial Sequence
  Description of Artificial Sequence: Synthetic oligonucleotide
  Target: LAMA2; (-) strand; PAM type: NNGRRT; PAM sequence: CGGAAT
tatcttaagtagttcttcag

SEQ ID NO: 21730 - DNA, 20 bp, Artificial Sequence
  Description of Artificial Sequence: Synthetic oligonucleotide
  Target: LAMA2; (-) strand; PAM type: NNGRRT; PAM sequence: CCGAGT
gtttagaaaaatactttaca

SEQ ID NO: 21731 - DNA, 20 bp, Artificial Sequence
  Description of Artificial Sequence: Synthetic oligonucleotide
  Target: LAMA2; (-) strand; PAM type: NNGRRT; PAM sequence: TAGAAT
tcattttcactgaatatatt

SEQ ID NO: 21732 - DNA, 20 bp, Artificial Sequence
  Description of Artificial Sequence: Synthetic oligonucleotide
  Target: LAMA2; (-) strand; PAM type: NNGRRT; PAM sequence: CTGAAT
tgatgactaaatcattttca

SEQ ID NO: 21733 - DNA, 20 bp, Artificial Sequence
  Description of Artificial Sequence: Synthetic oligonucleotide
  Target: LAMA2; (-) strand; PAM type: NNGRRT; PAM sequence: ATGAGT
tcaaatggaagactaatgtt

SEQ ID NO: 21734 - DNA, 20 bp, Artificial Sequence
  Description of Artificial Sequence: Synthetic oligonucleotide
  Target: LAMA2; (-) strand; PAM type: NNGRRT; PAM sequence: TTGAAT
gagggaagaaacccaaatac

SEQ ID NO: 21735 - DNA, 20 bp, Artificial Sequence
  Description of Artificial Sequence: Synthetic oligonucleotide
  Target: LAMA2; (-) strand; PAM type: NNGRRT; PAM sequence: AAGAAT
cggcagttgacccagctact

SEQ ID NO: 21736 - DNA, 20 bp, Artificial Sequence
  Description of Artificial Sequence: Synthetic oligonucleotide
  Target: LAMA2; (-) strand; PAM type: NNGRRT; PAM sequence: AGGAAT
cttcaaagccatccaagaca

SEQ ID NO: 21737 - DNA, 20 bp, Artificial Sequence
  Description of Artificial Sequence: Synthetic oligonucleotide
  Target: LAMA2; (-) strand; PAM type: NNGRRT; PAM sequence: GAGAAT
agattgcaaaaataatgttt

SEQ ID NO: 21738 - DNA, 20 bp, Artificial Sequence
  Description of Artificial Sequence: Synthetic oligonucleotide
  Target: LAMA2; (-) strand; PAM type: NNGRRT; PAM sequence: AAGGGT
ttgctatcatgcaatattca

SEQ ID NO: 21739 - DNA, 20 bp, Artificial Sequence
  Description of Artificial Sequence: Synthetic oligonucleotide
  Target: LAMA2; (-) strand; PAM type: NNGRRT; PAM sequence: TTGAAT
ttgcaaatactttaaaatgg

SEQ ID NO: 21740 - DNA, 20 bp, Artificial Sequence
  Description of Artificial Sequence: Synthetic oligonucleotide
  Target: LAMA2; (-) strand; PAM type: NNGRRT; PAM sequence: CAGAAT
atagttagaaacgcacacaa

SEQ ID NO: 21741 - DNA, 20 bp, Artificial Sequence
  Description of Artificial Sequence: Synthetic oligonucleotide
  Target: LAMA2; (-) strand; PAM type: NNGRRT; PAM sequence: ACGGAT
ttctaatttgtttatgctgt

SEQ ID NO: 21742 - DNA, 20 bp, Artificial Sequence
  Description of Artificial Sequence: Synthetic oligonucleotide
  Target: LAMA2; (-) strand; PAM type: NNGRRT; PAM sequence: TCGGGT
ttaactgtaacaccttatat

SEQ ID NO: 21743 - DNA, 20 bp, Artificial Sequence
  Description of Artificial Sequence: Synthetic oligonucleotide
  Target: LAMA2; (-) strand; PAM type: NNGRRT; PAM sequence: AAGAAT
ctatgaagtttaagaaagga

SEQ ID NO: 21744 - DNA, 20 bp, Artificial Sequence
  Description of Artificial Sequence: Synthetic oligonucleotide
  Target: LAMA2; (-) strand; PAM type: NNGRRT; PAM sequence: AAGGAT
ttcttttcagttctacactt

SEQ ID NO: 21745 - DNA, 20 bp, Artificial Sequence
  Description of Artificial Sequence: Synthetic oligonucleotide
  Target: LAMA2; (-) strand; PAM type: NNGRRT; PAM sequence: TTGAGT
taaaaatttgacacaaagtg

SEQ ID NO: 21746 - DNA, 20 bp, Artificial Sequence
  Description of Artificial Sequence: Synthetic oligonucleotide
  Target: LAMA2; (-) strand; PAM type: NNGRRT; PAM sequence: TTGGGT
gcaaatgcatcgcccagtct

SEQ ID NO: 21747 - DNA, 20 bp, Artificial Sequence
  Description of Artificial Sequence: Synthetic oligonucleotide
  Target: LAMA2; (-) strand; PAM type: NNGRRT; PAM sequence: TTGGGT
taatgctgtggccccaggta

SEQ ID NO: 21748 - DNA, 20 bp, Artificial Sequence
  Description of Artificial Sequence: Synthetic oligonucleotide
  Target: LAMA2; (-) strand; PAM type: NNGRRT; PAM sequence: TTGAAT
cattattttgtgatgtaata

SEQ ID NO: 21749 - DNA, 20 bp, Artificial Sequence
  Description of Artificial Sequence: Synthetic oligonucleotide
  Target: LAMA2; (-) strand; PAM type: NNGRRT; PAM sequence: CAGAAT
gctcttttctggtattatta

SEQ ID NO: 21750 - DNA, 20 bp, Artificial Sequence
  Description of Artificial Sequence: Synthetic oligonucleotide
  Target: LAMA2; (-) strand; PAM type: NNGRRT; PAM sequence: CAGAAT
atgttgttaaaatgactctt

SEQ ID NO: 21751 - DNA, 20 bp, Artificial Sequence
  Description of Artificial Sequence: Synthetic oligonucleotide
  Target: LAMA2; (-) strand; PAM type: NNGRRT; PAM sequence: CTGGGT
tcttcactgacgctcattga

SEQ ID NO: 21752 - DNA, 20 bp, Artificial Sequence
  Description of Artificial Sequence: Synthetic oligonucleotide
  Target: LAMA2; (-) strand; PAM type: NNGRRT; PAM sequence: CTGAGT
attcaccaggctgtatcagc

SEQ ID NO: 21753 - DNA, 20 bp, Artificial Sequence
  Description of Artificial Sequence: Synthetic oligonucleotide
  Target: LAMA2; (-) strand; PAM type: NNGRRT; PAM sequence: ATGAAT
ctttcttattccccaaatca

SEQ ID NO: 21754 - DNA, 20 bp, Artificial Sequence
  Description of Artificial Sequence: Synthetic oligonucleotide
  Target: LAMA2; (-) strand; PAM type: NNGRRT; PAM sequence: AGGAGT
tccattgcaaagcaaaacct

SEQ ID NO: 21755 - DNA, 20 bp, Artificial Sequence
  Description of Artificial Sequence: Synthetic oligonucleotide
  Target: LAMA2; (-) strand; PAM type: NNGRRT; PAM sequence: GTGAAT
aaattcattactataaatgg

SEQ ID NO: 21756 - DNA, 20 bp, Artificial Sequence
  Description of Artificial Sequence: Synthetic oligonucleotide
  Target: LAMA2; (-) strand; PAM type: NNGRRT; PAM sequence: ATGGGT
gttaaaattcattactataa

SEQ ID NO: 21757 - DNA, 20 bp, Artificial Sequence
  Description of Artificial Sequence: Synthetic oligonucleotide
  Target: LAMA2; (-) strand; PAM type: NNGRRT; PAM sequence: AGGGAT
cttcactgcaatggggcaca

SEQ ID NO: 21758 - DNA, 20 bp, Artificial Sequence
  Description of Artificial Sequence: Synthetic oligonucleotide
  Target: LAMA2; (-) strand; PAM type: NNGRRT; PAM sequence: GGGGGT
ggcaaaacagtaggcacatg

SEQ ID NO: 21759 - DNA, 20 bp, Artificial Sequence
  Description of Artificial Sequence: Synthetic oligonucleotide
  Target: LAMA2; (-) strand; PAM type: NNGRRT; PAM sequence: ATGAAT
tgatacatgcaacaatatgg

SEQ ID NO: 21760 - DNA, 20 bp, Artificial Sequence
  Description of Artificial Sequence: Synthetic oligonucleotide
  Target: LAMA2; (-) strand; PAM type: NNGRRT; PAM sequence: ATGGAT
ctgctgatacatgcaacaat

SEQ ID NO: 21761 - DNA, 20 bp, Artificial Sequence
  Description of Artificial Sequence: Synthetic oligonucleotide
  Target: LAMA2; (-) strand; PAM type: NNGRRT; PAM sequence: TGGAAT
gtcactgtacattacacaaa

SEQ ID NO: 21762 - DNA, 20 bp, Artificial Sequence
  Description of Artificial Sequence: Synthetic oligonucleotide
  Target: LAMA2; (-) strand; PAM type: NNGRRT; PAM sequence: TGGAGT
tccaagagttggcaaagatg

SEQ ID NO: 21763 - DNA, 20 bp, Artificial Sequence
  Description of Artificial Sequence: Synthetic oligonucleotide
  Target: LAMA2; (-) strand; PAM type: NNGRRT; PAM sequence: AAGAGT
taaaaaagggttaaaagtcc

SEQ ID NO: 21764 - DNA, 20 bp, Artificial Sequence
  Description of Artificial Sequence: Synthetic oligonucleotide
  Target: LAMA2; (-) strand; PAM type: NNGRRT; PAM sequence: AAGGGT
cagaattcttaaaattaaaa

SEQ ID NO: 21765 - DNA, 20 bp, Artificial Sequence
  Description of Artificial Sequence: Synthetic oligonucleotide
  Target: LAMA2; (-) strand; PAM type: NNGRRT; PAM sequence: CAGAAT
caagagaaatacacatgcat

SEQ ID NO: 21766 - DNA, 20 bp, Artificial Sequence
  Description of Artificial Sequence: Synthetic oligonucleotide
  Target: LAMA2; (-) strand; PAM type: NNGRRT; PAM sequence: AAGGAT
aatgacaaataaataaatga

SEQ ID NO: 21767 - DNA, 20 bp, Artificial Sequence
  Description of Artificial Sequence: Synthetic oligonucleotide
  Target: LAMA2; (-) strand; PAM type: NNGRRT; PAM sequence: CAGAAT
tacgttaaagaacatgtatc

SEQ ID NO: 21768 - DNA, 20 bp, Artificial Sequence
  Description of Artificial Sequence: Synthetic oligonucleotide
  Target: LAMA2; (-) strand; PAM type: NNGRRT; PAM sequence: TTGGGT
atctttggaccttgtctttc

SEQ ID NO: 21769 - DNA, 20 bp, Artificial Sequence
  Description of Artificial Sequence: Synthetic oligonucleotide
  Target: LAMA2; (-) strand; PAM type: NNGRRT; PAM sequence: TGGAAT
agaaaaattaatattcaaaa

SEQ ID NO: 21770 - DNA, 20 bp, Artificial Sequence
  Description of Artificial Sequence: Synthetic oligonucleotide
  Target: LAMA2; (-) strand; PAM type: NNGRRT; PAM sequence: TTGGGT
aacaaataatgtttgaaaaa

SEQ ID NO: 21771 - DNA, 20 bp, Artificial Sequence
  Description of Artificial Sequence: Synthetic oligonucleotide
  Target: LAMA2; (-) strand; PAM type: NNGRRT; PAM sequence: AAGGAT
caaagtaattcaatgggaaa

SEQ ID NO: 21772 - DNA, 20 bp, Artificial Sequence
  Description of Artificial Sequence: Synthetic oligonucleotide
  Target: LAMA2; (-) strand; PAM type: NNGRRT; PAM sequence: AGGAGT
tagttgatagattttgacaa

SEQ ID NO: 21773 - DNA, 20 bp, Artificial Sequence
  Description of Artificial Sequence: Synthetic oligonucleotide
  Target: LAMA2; (-) strand; PAM type: NNGRRT; PAM sequence: AAGAGT
aatagatcggtgaagcagaa

SEQ ID NO: 21774 - DNA, 20 bp, Artificial Sequence
  Description of Artificial Sequence: Synthetic oligonucleotide
  Target: LAMA2; (-) strand; PAM type: NNGRRT; PAM sequence: AAGAAT
atattaactagtattaacat

SEQ ID NO: 21775 - DNA, 20 bp, Artificial Sequence
  Description of Artificial Sequence: Synthetic oligonucleotide
  Target: LAMA2; (-) strand; PAM type: NNGRRT; PAM sequence: AGGAAT
ggaaacgatgaatgaggttg

SEQ ID NO: 21776 - DNA, 20 bp, Artificial Sequence
  Description of Artificial Sequence: Synthetic oligonucleotide
  Target: LAMA2; (-) strand; PAM type: NNGRRT; PAM sequence: ATGAAT
ctcaaaaggtattggaaacg

SEQ ID NO: 21777 - DNA, 20 bp, Artificial Sequence
  Description of Artificial Sequence: Synthetic oligonucleotide
  Target: LAMA2; (-) strand; PAM type: NNGRRT; PAM sequence: AAGAAT
tcctagcaggctttttggta

SEQ ID NO: 21778 - DNA, 20 bp, Artificial Sequence
  Description of Artificial Sequence: Synthetic oligonucleotide
  Target: LAMA2; (-) strand; PAM type: NNGRRT; PAM sequence: TGGGAT
gttatgccatgttcatacac

SEQ ID NO: 21779 - DNA, 20 bp, Artificial Sequence
  Description of Artificial Sequence: Synthetic oligonucleotide
  Target: LAMA2; (-) strand; PAM type: NNGRRT; PAM sequence: CAGAGT
tataacaacctaaaaaaatg

SEQ ID NO: 21780 - DNA, 20 bp, Artificial Sequence
  Description of Artificial Sequence: Synthetic oligonucleotide
  Target: LAMA2; (-) strand; PAM type: NNGRRT; PAM sequence: ACGGAT
cttttgataaaaaatatgaa

SEQ ID NO: 21781 - DNA, 20 bp, Artificial Sequence
  Description of Artificial Sequence: Synthetic oligonucleotide
  Target: LAMA2; (-) strand; PAM type: NNGRRT; PAM sequence: AAGGAT
ttagcaagattacagtatag

SEQ ID NO: 21782 - DNA, 20 bp, Artificial Sequence
  Description of Artificial Sequence: Synthetic oligonucleotide
  Target: LAMA2; (-) strand; PAM type: NNGRRT; PAM sequence: AAGGAT
cttaaactaaggaacaaggc

SEQ ID NO: 21783 - DNA, 20 bp, Artificial Sequence
  Description of Artificial Sequence: Synthetic oligonucleotide
  Target: LAMA2; (-) strand; PAM type: NNGRRT; PAM sequence: CTGGAT
ttaatctgaggattgtaaga

SEQ ID NO: 21784 - DNA, 20 bp, Artificial Sequence
  Description of Artificial Sequence: Synthetic oligonucleotide
  Target: LAMA2; (-) strand; PAM type: NNGRRT; PAM sequence: GAGGAT
tggccaagcaggattaatct

SEQ ID NO: 21785 - DNA, 20 bp, Artificial Sequence
  Description of Artificial Sequence: Synthetic oligonucleotide
  Target: LAMA2; (-) strand; PAM type: NNGRRT; PAM sequence: CAGGAT
ggataatccccatggccaag

SEQ ID NO: 21786 - DNA, 20 bp, Artificial Sequence
  Description of Artificial Sequence: Synthetic oligonucleotide
  Target: LAMA2; (-) strand; PAM type: NNGRRT; PAM sequence: AAGGAT
aggattcaacataattttaa

SEQ ID NO: 21787 - DNA, 20 bp, Artificial Sequence
  Description of Artificial Sequence: Synthetic oligonucleotide
  Target: LAMA2; (-) strand; PAM type: NNGRRT; PAM sequence: CAGGAT
attaagaaaatgctagcaaa

SEQ ID NO: 21788 - DNA, 20 bp, Artificial Sequence
  Description of Artificial Sequence: Synthetic oligonucleotide
  Target: LAMA2; (-) strand; PAM type: NNGRRT; PAM sequence: CTGAAT
attatgaggagggaatactt

SEQ ID NO: 21789 - DNA, 20 bp, Artificial Sequence
  Description of Artificial Sequence: Synthetic oligonucleotide
  Target: LAMA2; (-) strand; PAM type: NNGRRT; PAM sequence: GGGAAT
gcttttataaattatgagga

SEQ ID NO: 21790 - DNA, 20 bp, Artificial Sequence
  Description of Artificial Sequence: Synthetic oligonucleotide
  Target: LAMA2; (-) strand; PAM type: NNGRRT; PAM sequence: TTGGGT
tcttttcaaatagtgagctt

SEQ ID NO: 21791 - DNA, 20 bp, Artificial Sequence
  Description of Artificial Sequence: Synthetic oligonucleotide
  Target: LAMA2; (-) strand; PAM type: NNGRRT; PAM sequence: TAGAAT
tttttcttgattaacctttc

SEQ ID NO: 21792 - DNA, 20 bp, Artificial Sequence
  Description of Artificial Sequence: Synthetic oligonucleotide
  Target: LAMA2; (-) strand; PAM type: NNGRRT; PAM sequence: TAGGAT
tattattatcttaatgtcta

SEQ ID NO: 21793 - DNA, 20 bp, Artificial Sequence
  Description of Artificial Sequence: Synthetic oligonucleotide
  Target: LAMA2; (-) strand; PAM type: NNGRRT; PAM sequence: AGGAAT
aactcaaagtaagcaaaaga

SEQ ID NO: 21794 - DNA, 20 bp, Artificial Sequence
  Description of Artificial Sequence: Synthetic oligonucleotide
  Target: LAMA2; (-) strand; PAM type: NNGRRT; PAM sequence: GGGGGT
ctgccactgcactcgagcct

SEQ ID NO: 21795 - DNA, 20 bp, Artificial Sequence
  Description of Artificial Sequence: Synthetic oligonucleotide
  Target: LAMA2; (-) strand; PAM type: NNGRRT; PAM sequence: GAGAAT
tactcaggaggctgaggcag

SEQ ID NO: 21796 - DNA, 20 bp, Artificial Sequence
  Description of Artificial Sequence: Synthetic oligonucleotide
  Target: LAMA2; (-) strand; PAM type: NNGRRT; PAM sequence: GCGGAT
attttgggaggctgaggctg

SEQ ID NO: 21797 - DNA, 20 bp, Artificial Sequence
  Description of Artificial Sequence: Synthetic oligonucleotide
  Target: LAMA2; (-) strand; PAM type: NNGRRT; PAM sequence: AAGGAT
aaatgcccatattagagaaa

SEQ ID NO: 21798 - DNA, 20 bp, Artificial Sequence
  Description of Artificial Sequence: Synthetic oligonucleotide
  Target: LAMA2; (-) strand; PAM type: NNGRRT; PAM sequence: TGGAGT
acacagcatatcaaaatatg

SEQ ID NO: 21799 - DNA, 20 bp, Artificial Sequence
  Description of Artificial Sequence: Synthetic oligonucleotide
  Target: LAMA2; (-) strand; PAM type: NNGRRT; PAM sequence: TAGAAT
attatgttctcagaacaatt

SEQ ID NO: 21800 - DNA, 20 bp, Artificial Sequence
  Description of Artificial Sequence: Synthetic oligonucleotide
  Target: LAMA2; (-) strand; PAM type: NNGRRT; PAM sequence: CAGAAT
aagttttcatccaacaactc

SEQ ID NO: 21801 - DNA, 20 bp, Artificial Sequence
  Description of Artificial Sequence: Synthetic oligonucleotide
  Target: LAMA2; (-) strand; PAM type: NNGRRT; PAM sequence: AAGGAT
atgtagatctaaaaaccgtt

SEQ ID NO: 21802 - DNA, 20 bp, Artificial Sequence
  Description of Artificial Sequence: Synthetic oligonucleotide
  Target: LAMA2; (-) strand; PAM type: NNGRRT; PAM sequence: GTGAAT
atcactgctcaaaaatacat

SEQ ID NO: 21803 - DNA, 20 bp, Artificial Sequence
  Description of Artificial Sequence: Synthetic oligonucleotide
  Target: LAMA2; (-) strand; PAM type: NNGRRT; PAM sequence: AGGAAT
tctgaacaaggaatgttact

SEQ ID NO: 21804 - DNA, 20 bp, Artificial Sequence
  Description of Artificial Sequence: Synthetic oligonucleotide
  Target: LAMA2; (-) strand; PAM type: NNGRRT; PAM sequence: AGGAAT
aaaaagtacacttctgaaca

SEQ ID NO: 21805 - DNA, 20 bp, Artificial Sequence
  Description of Artificial Sequence: Synthetic oligonucleotide
  Target: LAMA2; (-) strand; PAM type: NNGRRT; PAM sequence: CAGAAT
aatggagtaagaccctgtct

SEQ ID NO: 21806 - DNA, 20 bp, Artificial Sequence
  Description of Artificial Sequence: Synthetic oligonucleotide
  Target: LAMA2; (-) strand; PAM type: NNGRRT; PAM sequence: TGGAGT
ctgcactctagcctgggcaa

SEQ ID NO: 21807 - DNA, 20 bp, Artificial Sequence
  Description of Artificial Sequence: Synthetic oligonucleotide
  Target: LAMA2; (-) strand; PAM type: NNGRRT; PAM sequence: GAGGGT
tttcttgagcccagaaggtg

SEQ ID NO: 21808 - DNA, 20 bp, Artificial Sequence
  Description of Artificial Sequence: Synthetic oligonucleotide
  Target: LAMA2; (-) strand; PAM type: NNGRRT; PAM sequence: GAGGAT
tactctggaggctgaggtga

SEQ ID NO: 21809 - DNA, 20 bp, Artificial Sequence
  Description of Artificial Sequence: Synthetic oligonucleotide
  Target: LAMA2; (-) strand; PAM type: NNGRRT; PAM sequence: CAGGAT
cctgtaatcccagaattttg

SEQ ID NO: 21810 - DNA, 20 bp, Artificial Sequence
  Description of Artificial Sequence: Synthetic oligonucleotide
  Target: LAMA2; (-) strand; PAM type: NNGRRT; PAM sequence: CAGAAT
gtggtatacacctgtaatcc

SEQ ID NO: 21811 - DNA, 20 bp, Artificial Sequence
  Description of Artificial Sequence: Synthetic oligonucleotide
  Target: LAMA2; (-) strand; PAM type: NNGRRT; PAM sequence: CTGAAT
attcgttgaaaaataaagat

SEQ ID NO: 21812 - DNA, 20 bp, Artificial Sequence
  Description of Artificial Sequence: Synthetic oligonucleotide
  Target: LAMA2; (-) strand; PAM type: NNGRRT; PAM sequence: ATGAAT
gacaaaaccaaagaaataaa

SEQ ID NO: 21813 - DNA, 20 bp, Artificial Sequence
  Description of Artificial Sequence: Synthetic oligonucleotide
  Target: LAMA2; (-) strand; PAM type: NNGRRT; PAM sequence: AAGGAT
atatatgacaatatagtaca

SEQ ID NO: 21814 - DNA, 20 bp, Artificial Sequence
  Description of Artificial Sequence: Synthetic oligonucleotide
  Target: LAMA2; (-) strand; PAM type: NNGRRT; PAM sequence: AAGAGT
aattgatatacacaaggaaa

SEQ ID NO: 21815 - DNA, 20 bp, Artificial Sequence
  Description of Artificial Sequence: Synthetic oligonucleotide
  Target: LAMA2; (-) strand; PAM type: NNGRRT; PAM sequence: AGGAAT
gaaaattttaatgtacacaa

SEQ ID NO: 21816 - DNA, 20 bp, Artificial Sequence
  Description of Artificial Sequence: Synthetic oligonucleotide
  Target: LAMA2; (-) strand; PAM type: NNGRRT; PAM sequence: AGGAAT
gtcagcagacctgaaacaac

SEQ ID NO: 21817 - DNA, 20 bp, Artificial Sequence
  Description of Artificial Sequence: Synthetic oligonucleotide
  Target: LAMA2; (-) strand; PAM type: NNGRRT; PAM sequence: TAGGAT
aattgctgcaaaccagtatt

SEQ ID NO: 21818 - DNA, 20 bp, Artificial Sequence
  Description of Artificial Sequence: Synthetic oligonucleotide
  Target: LAMA2; (-) strand; PAM type: NNGRRT; PAM sequence: AAGAAT
gatttccagaaagagacaat

SEQ ID NO: 21819 - DNA, 20 bp, Artificial Sequence
  Description of Artificial Sequence: Synthetic oligonucleotide
  Target: LAMA2; (-) strand; PAM type: NNGRRT; PAM sequence: TTGGAT
aaaataaaaaatagactcaa

SEQ ID NO: 21820 - DNA, 20 bp, Artificial Sequence
  Description of Artificial Sequence: Synthetic oligonucleotide
  Target: LAMA2; (-) strand; PAM type: NNGRRT; PAM sequence: GTGAGT
tcaagaataaatgaaaaaat

SEQ ID NO: 21821 - DNA, 20 bp, Artificial Sequence
  Description of Artificial Sequence: Synthetic oligonucleotide
  Target: LAMA2; (-) strand; PAM type: NNGRRT; PAM sequence: AAGAAT
tttataaacattatattttc

SEQ ID NO: 21822 - DNA, 20 bp, Artificial Sequence
  Description of Artificial Sequence: Synthetic oligonucleotide
  Target: LAMA2; (-) strand; PAM type: NNGRRT; PAM sequence: TGGAAT
tagtcctgcaataaaaaaga

SEQ ID NO: 21823 - DNA, 20 bp, Artificial Sequence
  Description of Artificial Sequence: Synthetic oligonucleotide
  Target: LAMA2; (-) strand; PAM type: NNGRRT; PAM sequence: AGGAAT
caggagaaaagtcagtcagt

SEQ ID NO: 21824 - DNA, 20 bp, Artificial Sequence
  Description of Artificial Sequence: Synthetic oligonucleotide
  Target: LAMA2; (-) strand; PAM type: NNGRRT; PAM sequence: AAGAAT
taaaaattatcaggcatgta

SEQ ID NO: 21825 - DNA, 20 bp, Artificial Sequence
  Description of Artificial Sequence: Synthetic oligonucleotide
  Target: LAMA2; (-) strand; PAM type: NNGRRT; PAM sequence: AAGAAT
aactcaaaagcaagcttcaa

SEQ ID NO: 21826 - DNA, 20 bp, Artificial Sequence
  Description of Artificial Sequence: Synthetic oligonucleotide
  Target: LAMA2; (-) strand; PAM type: NNGRRT; PAM sequence: CAGAGT
taagccatattttcaacagc

SEQ ID NO: 21827 - DNA, 20 bp, Artificial Sequence
  Description of Artificial Sequence: Synthetic oligonucleotide
  Target: LAMA2; (-) strand; PAM type: NNGRRT; PAM sequence: TGGAAT
cttacagcccagagaaagct

SEQ ID NO: 21828 - DNA, 20 bp, Artificial Sequence
  Description of Artificial Sequence: Synthetic oligonucleotide
  Target: LAMA2; (-) strand; PAM type: NNGRRT; PAM sequence: TGGGAT
aatgctgataggtgcatgca

SEQ ID NO: 21829 - DNA, 20 bp, Artificial Sequence
  Description of Artificial Sequence: Synthetic oligonucleotide
  Target: LAMA2; (-) strand; PAM type: NNGRRT; PAM sequence: CTGAAT
gcgttctcttgagtcattga

SEQ ID NO: 21830 - DNA, 20 bp, Artificial Sequence
  Description of Artificial Sequence: Synthetic oligonucleotide
  Target: LAMA2; (-) strand; PAM type: NNGRRT; PAM sequence: TTGAGT
agatgtgcagaagcgttctc

SEQ ID NO: 21831 - DNA, 20 bp, Artificial Sequence
  Description of Artificial Sequence: Synthetic oligonucleotide
  Target: LAMA2; (-) strand; PAM type: NNGRRT; PAM sequence: TAGAAT
ctgaaacttatgatggcaaa

SEQ ID NO: 21832 - DNA, 20 bp, Artificial Sequence
  Description of Artificial Sequence: Synthetic oligonucleotide
  Target: LAMA2; (-) strand; PAM type: NNGRRT; PAM sequence: TGGAGT
ctgagttgagagacaaagag

SEQ ID NO: 21833 - DNA, 20 bp, Artificial Sequence
  Description of Artificial Sequence: Synthetic oligonucleotide
  Target: LAMA2; (-) strand; PAM type: NNGRRT; PAM sequence: AAGAGT
tatagctgagttgagagaca

SEQ ID NO: 21834 - DNA, 20 bp, Artificial Sequence
  Description of Artificial Sequence: Synthetic oligonucleotide
  Target: LAMA2; (-) strand; PAM type: NNGRRT; PAM sequence: CTGAGT
acccaaagcccgcattatag

SEQ ID NO: 21835 - DNA, 20 bp, Artificial Sequence
  Description of Artificial Sequence: Synthetic oligonucleotide
  Target: LAMA2; (-) strand; PAM type: NNGRRT; PAM sequence: GAGGGT
tttctaggctgcaacacaga

SEQ ID NO: 21836 - DNA, 20 bp, Artificial Sequence
  Description of Artificial Sequence: Synthetic oligonucleotide
  Target: LAMA2; (-) strand; PAM type: NNGRRT; PAM sequence: TTGAAT
gaaacaattgtttttagata

SEQ ID NO: 21837 - DNA, 20 bp, Artificial Sequence
  Description of Artificial Sequence: Synthetic oligonucleotide
  Target: LAMA2; (-) strand; PAM type: NNGRRT; PAM sequence: AAGAAT
ttgtgttgcattaggcactg

SEQ ID NO: 21838 - DNA, 20 bp, Artificial Sequence
  Description of Artificial Sequence: Synthetic oligonucleotide
  Target: LAMA2; (-) strand; PAM type: NNGRRT; PAM sequence: TGGAAT
tccaatatttcacaacccag

SEQ ID NO: 21839 - DNA, 20 bp, Artificial Sequence
  Description of Artificial Sequence: Synthetic oligonucleotide
  Target: LAMA2; (-) strand; PAM type: NNGRRT; PAM sequence: TAGGGT
atctctatagggtactgcta

SEQ ID NO: 21840 - DNA, 20 bp, Artificial Sequence
  Description of Artificial Sequence: Synthetic oligonucleotide
  Target: LAMA2; (-) strand; PAM type: NNGRRT; PAM sequence: TAGGGT
aaaaaaagtttacatctcta

SEQ ID NO: 21841 - DNA, 20 bp, Artificial Sequence
  Description of Artificial Sequence: Synthetic oligonucleotide
  Target: LAMA2; (-) strand; PAM type: NNGRRT; PAM sequence: TAGAGT
atcatacatgtgaaggtggt

SEQ ID NO: 21842 - DNA, 20 bp, Artificial Sequence
  Description of Artificial Sequence: Synthetic oligonucleotide
  Target: LAMA2; (-) strand; PAM type: NNGRRT; PAM sequence: AAGAAT
cagacatctgaacttccttg

SEQ ID NO: 21843 - DNA, 20 bp, Artificial Sequence
  Description of Artificial Sequence: Synthetic oligonucleotide
  Target: LAMA2; (-) strand; PAM type: NNGRRT; PAM sequence: ATGAAT
atgctattgacaatagaaaa

SEQ ID NO: 21844 - DNA, 20 bp, Artificial Sequence
  Description of Artificial Sequence: Synthetic oligonucleotide
  Target: LAMA2; (-) strand; PAM type: NNGRRT; PAM sequence: AGGAGT
aagaacactttgaaattctg

SEQ ID NO: 21845 - DNA, 20 bp, Artificial Sequence
  Description of Artificial Sequence: Synthetic oligonucleotide
  Target: LAMA2; (-) strand; PAM type: NNGRRT; PAM sequence: TTGGAT
ccaagtgatatggtggatgc

SEQ ID NO: 21846 - DNA, 20 bp, Artificial Sequence
  Description of Artificial Sequence: Synthetic oligonucleotide
  Target: LAMA2; (-) strand; PAM type: NNGRRT; PAM sequence: GTGGAT
tcctgagtccaagtgatatg

SEQ ID NO: 21847 - DNA, 20 bp, Artificial Sequence
  Description of Artificial Sequence: Synthetic oligonucleotide
  Target: LAMA2; (-) strand; PAM type: NNGRRT; PAM sequence: CTGAGT
agtttccctagggcttactc

SEQ ID NO: 21848 - DNA, 20 bp, Artificial Sequence
  Description of Artificial Sequence: Synthetic oligonucleotide
  Target: LAMA2; (-) strand; PAM type: NNGRRT; PAM sequence: GTGGAT
tggctatatcatagcattct

SEQ ID NO: 21849 - DNA, 20 bp, Artificial Sequence
  Description of Artificial Sequence: Synthetic oligonucleotide
  Target: LAMA2; (-) strand; PAM type: NNGRRT; PAM sequence: TAGAGT
ttcaatttcaagagtttaat

SEQ ID NO: 21850 - DNA, 20 bp, Artificial Sequence
  Description of Artificial Sequence: Synthetic oligonucleotide
  Target: LAMA2; (-) strand; PAM type: NNGRRT; PAM sequence: AAGAGT
gaggtatcaacttcaatttc

SEQ ID NO: 21851 - DNA, 20 bp, Artificial Sequence
  Description of Artificial Sequence: Synthetic oligonucleotide
  Target: LAMA2; (-) strand; PAM type: NNGRRT; PAM sequence: TGGAAT
actacgttttcatagaaact

SEQ ID NO: 21852 - DNA, 20 bp, Artificial Sequence
  Description of Artificial Sequence: Synthetic oligonucleotide
  Target: LAMA2; (-) strand; PAM type: NNGRRT; PAM sequence: CAGAGT
attcagtcaactttagtcaa

SEQ ID NO: 21853 - DNA, 20 bp, Artificial Sequence
  Description of Artificial Sequence: Synthetic oligonucleotide
  Target: LAMA2; (-) strand; PAM type: NNGRRT; PAM sequence: ATGAGT
aattgtctgatacaggctct

SEQ ID NO: 21854 - DNA, 20 bp, Artificial Sequence
  Description of Artificial Sequence: Synthetic oligonucleotide
  Target: LAMA2; (-) strand; PAM type: NNGRRT; PAM sequence: AAGAAT
gtatttctttatagcaatgc

SEQ ID NO: 21855 - DNA, 20 bp, Artificial Sequence
  Description of Artificial Sequence: Synthetic oligonucleotide
  Target: LAMA2; (-) strand; PAM type: NNGRRT; PAM sequence: ATGAGT
ttggtgctgtccttgtgacc

SEQ ID NO: 21856 - DNA, 20 bp, Artificial Sequence
  Description of Artificial Sequence: Synthetic oligonucleotide
  Target: LAMA2; (-) strand; PAM type: NNGRRT; PAM sequence: TTGGAT
tggagcctggtgggaggtgt

SEQ ID NO: 21857 - DNA, 20 bp, Artificial Sequence
  Description of Artificial Sequence: Synthetic oligonucleotide
  Target: LAMA2; (-) strand; PAM type: NNGRRT; PAM sequence: TTGGAT
ttgagaggtctctgatacag

SEQ ID NO: 21858 - DNA, 20 bp, Artificial Sequence
  Description of Artificial Sequence: Synthetic oligonucleotide
  Target: LAMA2; (-) strand; PAM type: NNGRRT; PAM sequence: GAGAAT
gtaatatttgtttagcaata

SEQ ID NO: 21859 - DNA, 20 bp, Artificial Sequence
  Description of Artificial Sequence: Synthetic oligonucleotide
  Target: LAMA2; (-) strand; PAM type: NNGRRT; PAM sequence: GAGAAT
ttattcaggaagttatagtg

SEQ ID NO: 21860 - DNA, 20 bp, Artificial Sequence
  Description of Artificial Sequence: Synthetic oligonucleotide
  Target: LAMA2; (-) strand; PAM type: NNGRRT; PAM sequence: ATGAAT
taattgtataaaaccaaagc

SEQ ID NO: 21861 - DNA, 20 bp, Artificial Sequence
  Description of Artificial Sequence: Synthetic oligonucleotide
  Target: LAMA2; (-) strand; PAM type: NNGRRT; PAM sequence: TCGGGT
ttaaacaaaataggccataa

SEQ ID NO: 21862 - DNA, 20 bp, Artificial Sequence
  Description of Artificial Sequence: Synthetic oligonucleotide
  Target: LAMA2; (-) strand; PAM type: NNGRRT; PAM sequence: TTGAGT
gtttttctttgccaactgct

SEQ ID NO: 21863 - DNA, 20 bp, Artificial Sequence
  Description of Artificial Sequence: Synthetic oligonucleotide
  Target: LAMA2; (-) strand; PAM type: NNGRRT; PAM sequence: TAGGAT
gtagaatcaaatttcaaaat

SEQ ID NO: 21864 - DNA, 20 bp, Artificial Sequence
  Description of Artificial Sequence: Synthetic oligonucleotide
  Target: LAMA2; (-) strand; PAM type: NNGRRT; PAM sequence: TAGAAT
aacttaaagaacatcagatg

SEQ ID NO: 21865 - DNA, 20 bp, Artificial Sequence
  Description of Artificial Sequence: Synthetic oligonucleotide
  Target: LAMA2; (-) strand; PAM type: NNGRRT; PAM sequence: TAGAAT
tggacaaagcttccaaggca

SEQ ID NO: 21866 - DNA, 20 bp, Artificial Sequence
  Description of Artificial Sequence: Synthetic oligonucleotide
  Target: LAMA2; (-) strand; PAM type: NNGRRT; PAM sequence: CAGGAT
aaaaaaaaaaaaatgattat

SEQ ID NO: 21867 - DNA, 20 bp, Artificial Sequence
  Description of Artificial Sequence: Synthetic oligonucleotide
  Target: LAMA2; (-) strand; PAM type: NNGRRT; PAM sequence: CTGGGT
tcgcgccactgcactccagc

SEQ ID NO: 21868 - DNA, 20 bp, Artificial Sequence
  Description of Artificial Sequence: Synthetic oligonucleotide
  Target: LAMA2; (-) strand; PAM type: NNGRRT; PAM sequence: GAGAAT
tactcgggaggctgaggcag

SEQ ID NO: 21869 - DNA, 20 bp, Artificial Sequence
  Description of Artificial Sequence: Synthetic oligonucleotide
  Target: LAMA2; (-) strand; PAM type: NNGRRT; PAM sequence: GCGGAT
actttgggaggccgaggcgg

SEQ ID NO: 21870 - DNA, 20 bp, Artificial Sequence
  Description of Artificial Sequence: Synthetic oligonucleotide
  Target: LAMA2; (-) strand; PAM type: NNGRRT; PAM sequence: AGGAGT
ttcttatatccaccattacc

SEQ ID NO: 21871 - DNA, 20 bp, Artificial Sequence
  Description of Artificial Sequence: Synthetic oligonucleotide
  Target: LAMA2; (-) strand; PAM type: NNGRRT; PAM sequence: CTGAGT
agggtatcacctctctctgt

SEQ ID NO: 21872 - DNA, 20 bp, Artificial Sequence
  Description of Artificial Sequence: Synthetic oligonucleotide
  Target: LAMA2; (-) strand; PAM type: NNGRRT; PAM sequence: AAGGGT
gagcatgacttggcattaca

SEQ ID NO: 21873 - DNA, 20 bp, Artificial Sequence
  Description of Artificial Sequence: Synthetic oligonucleotide
  Target: LAMA2; (-) strand; PAM type: NNGRRT; PAM sequence: GGGAGT
ctttcctccctcagcctaga

SEQ ID NO: 21874 - DNA, 20 bp, Artificial Sequence
  Description of Artificial Sequence: Synthetic oligonucleotide
  Target: LAMA2; (-) strand; PAM type: NNGRRT; PAM sequence: AAGAAT
cgggagcccagtggcccaga

SEQ ID NO: 21875 - DNA, 20 bp, Artificial Sequence
  Description of Artificial Sequence: Synthetic oligonucleotide
  Target: LAMA2; (-) strand; PAM type: NNGRRT; PAM sequence: AAGAAT
gctctgtctaaaaaaaaaaa

SEQ ID NO: 21876 - DNA, 20 bp, Artificial Sequence
  Description of Artificial Sequence: Synthetic oligonucleotide
  Target: LAMA2; (-) strand; PAM type: NNGRRT; PAM sequence: GAGAAT
tactcctgaggctgaggcag

SEQ ID NO: 21877 - DNA, 20 bp, Artificial Sequence
  Description of Artificial Sequence: Synthetic oligonucleotide
  Target: LAMA2; (-) strand; PAM type: NNGRRT; PAM sequence: GCGGAT
actttgggaggccgaggagg

SEQ ID NO: 21878 - DNA, 20 bp, Artificial Sequence
  Description of Artificial Sequence: Synthetic oligonucleotide
  Target: LAMA2; (-) strand; PAM type: NNGRRT; PAM sequence: CTGAGT
cggcccaccacacttccaag

SEQ ID NO: 21879 - DNA, 20 bp, Artificial Sequence
  Description of Artificial Sequence: Synthetic oligonucleotide
  Target: LAMA2; (-) strand; PAM type: NNGRRT; PAM sequence: CAGAAT
catttctccgtatccggtgg

SEQ ID NO: 21880 - DNA, 20 bp, Artificial Sequence
  Description of Artificial Sequence: Synthetic oligonucleotide
  Target: LAMA2; (-) strand; PAM type: NNGRRT; PAM sequence: TGGAAT
taaaatgtcatttaggatct

SEQ ID NO: 21881 - DNA, 20 bp, Artificial Sequence
  Description of Artificial Sequence: Synthetic oligonucleotide
  Target: LAMA2; (-) strand; PAM type: NNGRRT; PAM sequence: TAGGAT
tgaatttctaaaatgtcatt

SEQ ID NO: 21882 - DNA, 20 bp, Artificial Sequence
  Description of Artificial Sequence: Synthetic oligonucleotide
  Target: LAMA2; (-) strand; PAM type: NNGRRT; PAM sequence: GTGAAT
caatttaataaaaatgccaa

SEQ ID NO: 21883 - DNA, 20 bp, Artificial Sequence
  Description of Artificial Sequence: Synthetic oligonucleotide
  Target: LAMA2; (-) strand; PAM type: NNGRRT; PAM sequence: TTGAAT
tattgcaatcttaacttctt

SEQ ID NO: 21884 - DNA, 20 bp, Artificial Sequence
  Description of Artificial Sequence: Synthetic oligonucleotide
  Target: LAMA2; (-) strand; PAM type: NNGRRT; PAM sequence: CAGGAT
aattaatcaattttcttttt

SEQ ID NO: 21885 - DNA, 20 bp, Artificial Sequence
  Description of Artificial Sequence: Synthetic oligonucleotide
  Target: LAMA2; (-) strand; PAM type: NNGRRT; PAM sequence: TTGGGT
ttgctagaattttctgaagc

SEQ ID NO: 21886 - DNA, 20 bp, Artificial Sequence
  Description of Artificial Sequence: Synthetic oligonucleotide
  Target: LAMA2; (-) strand; PAM type: NNGRRT; PAM sequence: TAGAAT
tacataattcatatttttgc

SEQ ID NO: 21887 - DNA, 20 bp, Artificial Sequence
  Description of Artificial Sequence: Synthetic oligonucleotide
  Target: LAMA2; (-) strand; PAM type: NNGRRT; PAM sequence: GGGAAT
agggcatcagactagacttg

SEQ ID NO: 21888 - DNA, 20 bp, Artificial Sequence
  Description of Artificial Sequence: Synthetic oligonucleotide
  Target: LAMA2; (-) strand; PAM type: NNGRRT; PAM sequence: TAGAAT
aatatgttagcataacatga

SEQ ID NO: 21889 - DNA, 20 bp, Artificial Sequence
  Description of Artificial Sequence: Synthetic oligonucleotide
  Target: LAMA2; (-) strand; PAM type: NNGRRT; PAM sequence: ATGGGT
gaggtagagaggggctgggt

SEQ ID NO: 21890 - DNA, 20 bp, Artificial Sequence
  Description of Artificial Sequence: Synthetic oligonucleotide
  Target: LAMA2; (-) strand; PAM type: NNGRRT; PAM sequence: CTGGGT
ctttctgaggtagagagggg

SEQ ID NO: 21891 - DNA, 20 bp, Artificial Sequence
  Description of Artificial Sequence: Synthetic oligonucleotide
  Target: LAMA2; (-) strand; PAM type: NNGRRT; PAM sequence: GTGAAT
tccagaaaccataatgctat

SEQ ID NO: 21892 - DNA, 20 bp, Artificial Sequence
  Description of Artificial Sequence: Synthetic oligonucleotide
  Target: LAMA2; (-) strand; PAM type: NNGRRT; PAM sequence: AAGGAT
ttacattgcattggaaatcc

SEQ ID NO: 21893 - DNA, 20 bp, Artificial Sequence
  Description of Artificial Sequence: Synthetic oligonucleotide
  Target: LAMA2; (-) strand; PAM type: NNGRRT; PAM sequence: TTGGAT
acattttgcaccagagaatt

SEQ ID NO: 21894 - DNA, 20 bp, Artificial Sequence
  Description of Artificial Sequence: Synthetic oligonucleotide
  Target: LAMA2; (-) strand; PAM type: NNGRRT; PAM sequence: GAGAAT
actctgtacattttgcacca

SEQ ID NO: 21895 - DNA, 20 bp, Artificial Sequence
  Description of Artificial Sequence: Synthetic oligonucleotide
  Target: LAMA2; (-) strand; PAM type: NNGRRT; PAM sequence: GAGGGT
gcagtcacagagattgcagc

SEQ ID NO: 21896 - DNA, 20 bp, Artificial Sequence
  Description of Artificial Sequence: Synthetic oligonucleotide
  Target: LAMA2; (-) strand; PAM type: NNGRRT; PAM sequence: CTGAAT
acaggagcattttttagtct

SEQ ID NO: 21897 - DNA, 20 bp, Artificial Sequence
  Description of Artificial Sequence: Synthetic oligonucleotide
  Target: LAMA2; (-) strand; PAM type: NNGRRT; PAM sequence: CAGAAT
ttaaaactgagcaatggaaa

SEQ ID NO: 21898 - DNA, 20 bp, Artificial Sequence
  Description of Artificial Sequence: Synthetic oligonucleotide
  Target: LAMA2; (-) strand; PAM type: NNGRRT; PAM sequence: CTGAAT
tgaagcaggtataacaaaca

SEQ ID NO: 21899 - DNA, 20 bp, Artificial Sequence
  Description of Artificial Sequence: Synthetic oligonucleotide
  Target: LAMA2; (-) strand; PAM type: NNGRRT; PAM sequence: TTGGGT
aactagaaaaaaaggtgggt

SEQ ID NO: 21900 - DNA, 20 bp, Artificial Sequence
  Description of Artificial Sequence: Synthetic oligonucleotide
  Target: LAMA2; (-) strand; PAM type: NNGRRT; PAM sequence: GTGGGT
tccaccaactagaaaaaaag

SEQ ID NO: 21901 - DNA, 20 bp, Artificial Sequence
  Description of Artificial Sequence: Synthetic oligonucleotide
  Target: LAMA2; (-) strand; PAM type: NNGRRT; PAM sequence: TGGAAT
agtttaaactgcatttatcc

SEQ ID NO: 21902 - DNA, 20 bp, Artificial Sequence
  Description of Artificial Sequence: Synthetic oligonucleotide
  Target: LAMA2; (-) strand; PAM type: NNGRRT; PAM sequence: AAGAAT
tgatcataattgcgagatat

SEQ ID NO: 21903 - DNA, 20 bp, Artificial Sequence
  Description of Artificial Sequence: Synthetic oligonucleotide
  Target: LAMA2; (-) strand; PAM type: NNGRRT; PAM sequence: TTGAGT
tcaaaagcaacataaaaaca

SEQ ID NO: 21904 - DNA, 20 bp, Artificial Sequence
  Description of Artificial Sequence: Synthetic oligonucleotide
  Target: LAMA2; (-) strand; PAM type: NNGRRT; PAM sequence: TGGGAT
gcctcggcctcccaaagtgg

SEQ ID NO: 21905 - DNA, 20 bp, Artificial Sequence
  Description of Artificial Sequence: Synthetic oligonucleotide
  Target: LAMA2; (-) strand; PAM type: NNGRRT; PAM sequence: CAGGAT
cggggtttcaccgtgttagc

SEQ ID NO: 21906 - DNA, 20 bp, Artificial Sequence
  Description of Artificial Sequence: Synthetic oligonucleotide
  Target: LAMA2; (-) strand; PAM type: NNGRRT; PAM sequence: CGGGGT
ttttgtatttttagtagaga

SEQ ID NO: 21907 - DNA, 20 bp, Artificial Sequence
  Description of Artificial Sequence: Synthetic oligonucleotide
  Target: LAMA2; (-) strand; PAM type: NNGRRT; PAM sequence: CCGAGT
cattctccggcctcagcctt

SEQ ID NO: 21908 - DNA, 20 bp, Artificial Sequence
  Description of Artificial Sequence: Synthetic oligonucleotide
  Target: LAMA2; (-) strand; PAM type: NNGRRT; PAM sequence: CAGAGT
tctcgctctttcgcccaggc

SEQ ID NO: 21909 - DNA, 20 bp, Artificial Sequence
  Description of Artificial Sequence: Synthetic oligonucleotide
  Target: LAMA2; (-) strand; PAM type: NNGRRT; PAM sequence: CGGAGT
ttttttttttttttttgaga

SEQ ID NO: 21910 - DNA, 20 bp, Artificial Sequence
  Description of Artificial Sequence: Synthetic oligonucleotide
  Target: LAMA2; (-) strand; PAM type: NNGRRT; PAM sequence: ATGGAT
aacctcattgttaggagttc

SEQ ID NO: 21911 - DNA, 20 bp, Artificial Sequence
  Description of Artificial Sequence: Synthetic oligonucleotide
  Target: LAMA2; (-) strand; PAM type: NNGRRT; PAM sequence: AGGAGT
atgtagttaacctcattgtt

SEQ ID NO: 21912 - DNA, 20 bp, Artificial Sequence
  Description of Artificial Sequence: Synthetic oligonucleotide
  Target: LAMA2; (-) strand; PAM type: NNGRRT; PAM sequence: CTGAGT
taaaacaaaacagaagaaca

SEQ ID NO: 21913 - DNA, 20 bp, Artificial Sequence
  Description of Artificial Sequence: Synthetic oligonucleotide
  Target: LAMA2; (-) strand; PAM type: NNGRRT; PAM sequence: GAGAAT
gttaggggagaaatcaccct

SEQ ID NO: 21914 - DNA, 20 bp, Artificial Sequence
  Description of Artificial Sequence: Synthetic oligonucleotide
  Target: LAMA2; (-) strand; PAM type: NNGRRT; PAM sequence: CAGAGT
gaggaaagacaagagaccct

SEQ ID NO: 21915 - DNA, 20 bp, Artificial Sequence
  Description of Artificial Sequence: Synthetic oligonucleotide
  Target: LAMA2; (-) strand; PAM type: NNGRRT; PAM sequence: GTGGAT
ccaggccggcatctgtcaca

SEQ ID NO: 21916 - DNA, 20 bp, Artificial Sequence
  Description of Artificial Sequence: Synthetic oligonucleotide
  Target: LAMA2; (-) strand; PAM type: NNGRRT; PAM sequence: CCGAAT
gtggattcttggcatcgagt

SEQ ID NO: 21917 - DNA, 20 bp, Artificial Sequence
  Description of Artificial Sequence: Synthetic oligonucleotide
  Target: LAMA2; (-) strand; PAM type: NNGRRT; PAM sequence: TCGAGT
agccaagtggattcttggca

SEQ ID NO: 21918 - DNA, 20 bp, Artificial Sequence
  Description of Artificial Sequence: Synthetic oligonucleotide
  Target: LAMA2; (-) strand; PAM type: NNGRRT; PAM sequence: GTGGAT
atagcagctgctgcagccaa

SEQ ID NO: 21919 - DNA, 20 bp, Artificial Sequence
  Description of Artificial Sequence: Synthetic oligonucleotide
  Target: LAMA2; (-) strand; PAM type: NNGRRT; PAM sequence: CTGGGT
agtccttttgcttcagagca

SEQ ID NO: 21920 - DNA, 20 bp, Artificial Sequence
  Description of Artificial Sequence: Synthetic oligonucleotide
  Target: LAMA2; (-) strand; PAM type: NNGRRT; PAM sequence: CCGGAT
agttccctactcacccacgt

SEQ ID NO: 21921 - DNA, 20 bp, Artificial Sequence
  Description of Artificial Sequence: Synthetic oligonucleotide
  Target: LAMA2; (-) strand; PAM type: NNGRRT; PAM sequence: ATGAAT
attgcctaaggttggttgga

SEQ ID NO: 21922 - DNA, 20 bp, Artificial Sequence
  Description of Artificial Sequence: Synthetic oligonucleotide
  Target: LAMA2; (-) strand; PAM type: NNGRRT; PAM sequence: TGGAAT
catgattgcctaaggttggt

SEQ ID NO: 21923 - DNA, 20 bp, Artificial Sequence
  Description of Artificial Sequence: Synthetic oligonucleotide
  Target: LAMA2; (-) strand; PAM type: NNGRRT; PAM sequence: AAGAGT
aaattgaatctaaatgtaga

SEQ ID NO: 21924 - DNA, 20 bp, Artificial Sequence
  Description of Artificial Sequence: Synthetic oligonucleotide
  Target: LAMA2; (-) strand; PAM type: NNGRRT; PAM sequence: TTGAAT
gcctttcacactaacacaaa

SEQ ID NO: 21925 - DNA, 20 bp, Artificial Sequence
  Description of Artificial Sequence: Synthetic oligonucleotide
  Target: LAMA2; (-) strand; PAM type: NNGRRT; PAM sequence: CTGAAT
ggtcaaaatacagcagaagg

SEQ ID NO: 21926 - DNA, 20 bp, Artificial Sequence
  Description of Artificial Sequence: Synthetic oligonucleotide
  Target: LAMA2; (-) strand; PAM type: NNGRRT; PAM sequence: AGGGGT
agccttcagagtcacctgca

SEQ ID NO: 21927 - DNA, 20 bp, Artificial Sequence
  Description of Artificial Sequence: Synthetic oligonucleotide
  Target: LAMA2; (-) strand; PAM type: NNGRRT; PAM sequence: CAGAGT
agaatggtctgctcagcctt

SEQ ID NO: 21928 - DNA, 20 bp, Artificial Sequence
  Description of Artificial Sequence: Synthetic oligonucleotide
  Target: LAMA2; (-) strand; PAM type: NNGRRT; PAM sequence: TAGAAT
agagcctcatctaccagggg

SEQ ID NO: 21929 - DNA, 20 bp, Artificial Sequence
  Description of Artificial Sequence: Synthetic oligonucleotide
  Target: LAMA2; (-) strand; PAM type: NNGRRT; PAM sequence: AGGGGT
gctgcagagcctcatctacc

SEQ ID NO: 21930 - DNA, 20 bp, Artificial Sequence
  Description of Artificial Sequence: Synthetic oligonucleotide
  Target: LAMA2; (-) strand; PAM type: NNGRRT; PAM sequence: CTGGAT
gtccatgtgggcaacaatct

SEQ ID NO: 21931 - DNA, 20 bp, Artificial Sequence
  Description of Artificial Sequence: Synthetic oligonucleotide
  Target: LAMA2; (-) strand; PAM type: NNGRRT; PAM sequence: TTGGAT
ataaaaagaagaatgaggaa

SEQ ID NO: 21932 - DNA, 20 bp, Artificial Sequence
  Description of Artificial Sequence: Synthetic oligonucleotide
  Target: LAMA2; (-) strand; PAM type: NNGRRT; PAM sequence: AGGAAT
acaaaataaaaagaagaatg

SEQ ID NO: 21933 - DNA, 20 bp, Artificial Sequence
  Description of Artificial Sequence: Synthetic oligonucleotide
  Target: LAMA2; (-) strand; PAM type: NNGRRT; PAM sequence: AAGAAT
tcaactgacaaaataaaaag

SEQ ID NO: 21934 - DNA, 20 bp, Artificial Sequence
  Description of Artificial Sequence: Synthetic oligonucleotide
  Target: LAMA2; (-) strand; PAM type: NNGRRT; PAM sequence: TTGAGT
cctcgaaatagattgcatac

SEQ ID NO: 21935 - DNA, 20 bp, Artificial Sequence
  Description of Artificial Sequence: Synthetic oligonucleotide
  Target: LAMA2; (-) strand; PAM type: NNGRRT; PAM sequence: GAGGAT
cccacctcgaatgatcactt

SEQ ID NO: 21936 - DNA, 20 bp, Artificial Sequence
  Description of Artificial Sequence: Synthetic oligonucleotide
  Target: LAMA2; (-) strand; PAM type: NNGRRT; PAM sequence: TCGAAT
gcatgagtaggtgtcccacc

SEQ ID NO: 21937 - DNA, 20 bp, Artificial Sequence
  Description of Artificial Sequence: Synthetic oligonucleotide
  Target: LAMA2; (-) strand; PAM type: NNGRRT; PAM sequence: ATGAGT
tgcctgacgataattctagc

SEQ ID NO: 21938 - DNA, 20 bp, Artificial Sequence
  Description of Artificial Sequence: Synthetic oligonucleotide
  Target: LAMA2; (-) strand; PAM type: NNGRRT; PAM sequence: CTGAAT
gagaaatcactatgacaaaa

SEQ ID NO: 21939 - DNA, 20 bp, Artificial Sequence
  Description of Artificial Sequence: Synthetic oligonucleotide
  Target: LAMA2; (-) strand; PAM type: NNGRRT; PAM sequence: GAGGAT
ggtcacagttctatggactc

SEQ ID NO: 21940 - DNA, 20 bp, Artificial Sequence
  Description of Artificial Sequence: Synthetic oligonucleotide
  Target: LAMA2; (-) strand; PAM type: NNGRRT; PAM sequence: TCGGGT
agtatatccaagaagtcttc

SEQ ID NO: 21941 - DNA, 20 bp, Artificial Sequence
  Description of Artificial Sequence: Synthetic oligonucleotide
  Target: LAMA2; (-) strand; PAM type: NNGRRT; PAM sequence: ATGAAT
gtagctttgataagaatgta

SEQ ID NO: 21942 - DNA, 20 bp, Artificial Sequence
  Description of Artificial Sequence: Synthetic oligonucleotide
  Target: LAMA2; (-) strand; PAM type: NNGRRT; PAM sequence: AAGAAT
tttccataagtagctttgat

SEQ ID NO: 21943 - DNA, 20 bp, Artificial Sequence
  Description of Artificial Sequence: Synthetic oligonucleotide
  Target: LAMA2; (-) strand; PAM type: NNGRRT; PAM sequence: TAGAGT
agagcttgaatattttctat

SEQ ID NO: 21944 - DNA, 20 bp, Artificial Sequence
  Description of Artificial Sequence: Synthetic oligonucleotide
  Target: LAMA2; (-) strand; PAM type: NNGRRT; PAM sequence: TTGAAT
acagactctaaaataagagc

SEQ ID NO: 21945 - DNA, 20 bp, Artificial Sequence
  Description of Artificial Sequence: Synthetic oligonucleotide
  Target: LAMA2; (-) strand; PAM type: NNGRRT; PAM sequence: ATGAAT
catgctatttttcttttctg

SEQ ID NO: 21946 - DNA, 20 bp, Artificial Sequence
  Description of Artificial Sequence: Synthetic oligonucleotide
  Target: LAMA2; (-) strand; PAM type: NNGRRT; PAM sequence: GTGAAT
ttaaactcactatgtctgca

SEQ ID NO: 21947 - DNA, 20 bp, Artificial Sequence
  Description of Artificial Sequence: Synthetic oligonucleotide
  Target: LAMA2; (-) strand; PAM type: NNGRRT; PAM sequence: TTGAAT
gatctacagtatatgatctc

SEQ ID NO: 21948 - DNA, 20 bp, Artificial Sequence
  Description of Artificial Sequence: Synthetic oligonucleotide
  Target: LAMA2; (-) strand; PAM type: NNGRRT; PAM sequence: ATGGGT
ggccctgcctggttcccctg

SEQ ID NO: 21949 - DNA, 20 bp, Artificial Sequence
  Description of Artificial Sequence: Synthetic oligonucleotide
  Target: LAMA2; (-) strand; PAM type: NNGRRT; PAM sequence: TAGAAT
gcacactggggtgaacagat

SEQ ID NO: 21950 - DNA, 20 bp, Artificial Sequence
  Description of Artificial Sequence: Synthetic oligonucleotide
  Target: LAMA2; (-) strand; PAM type: NNGRRT; PAM sequence: TGGGGT
gacaacattgtatggcacac

SEQ ID NO: 21951 - DNA, 20 bp, Artificial Sequence
  Description of Artificial Sequence: Synthetic oligonucleotide
  Target: LAMA2; (-) strand; PAM type: NNGRRT; PAM sequence: CAGAAT
tgatttttttcaaagtgatt

SEQ ID NO: 21952 - DNA, 20 bp, Artificial Sequence
  Description of Artificial Sequence: Synthetic oligonucleotide
  Target: LAMA2; (-) strand; PAM type: NNGRRT; PAM sequence: CGGAAT
attttggtcataagaaaaca

SEQ ID NO: 21953 - DNA, 20 bp, Artificial Sequence
  Description of Artificial Sequence: Synthetic oligonucleotide
  Target: LAMA2; (-) strand; PAM type: NNGRRT; PAM sequence: ATGAAT
aggacactgagaccggtatc

SEQ ID NO: 21954 - DNA, 20 bp, Artificial Sequence
  Description of Artificial Sequence: Synthetic oligonucleotide
  Target: LAMA2; (-) strand; PAM type: NNGRRT; PAM sequence: GAGGGT
tactcaaagaatatgaccat

SEQ ID NO: 21955 - DNA, 20 bp, Artificial Sequence
  Description of Artificial Sequence: Synthetic oligonucleotide
  Target: LAMA2; (-) strand; PAM type: NNGRRT; PAM sequence: AAGAAT
taaggtgaaccgtctactca

SEQ ID NO: 21956 - DNA, 20 bp, Artificial Sequence
  Description of Artificial Sequence: Synthetic oligonucleotide
  Target: LAMA2; (-) strand; PAM type: NNGRRT; PAM sequence: TTGGAT
tgatttctcattttatccca

SEQ ID NO: 21957 - DNA, 20 bp, Artificial Sequence
  Description of Artificial Sequence: Synthetic oligonucleotide
  Target: LAMA2; (-) strand; PAM type: NNGRRT; PAM sequence: TAGAAT
atatcgattctatattctca

SEQ ID NO: 21958 - DNA, 20 bp, Artificial Sequence
  Description of Artificial Sequence: Synthetic oligonucleotide
  Target: LAMA2; (-) strand; PAM type: NNGRRT; PAM sequence: ATGGAT
acatcaatcagaaaagcatt

SEQ ID NO: 21959 - DNA, 20 bp, Artificial Sequence
  Description of Artificial Sequence: Synthetic oligonucleotide
  Target: LAMA2; (-) strand; PAM type: NNGRRT; PAM sequence: GTGAAT
caaggaatacatatataaaa

SEQ ID NO: 21960 - DNA, 20 bp, Artificial Sequence
  Description of Artificial Sequence: Synthetic oligonucleotide
  Target: LAMA2; (-) strand; PAM type: NNGRRT; PAM sequence: AGGAAT
aaatatcaaaaggaaaccca

SEQ ID NO: 21961 - DNA, 20 bp, Artificial Sequence
  Description of Artificial Sequence: Synthetic oligonucleotide
  Target: LAMA2; (-) strand; PAM type: NNGRRT; PAM sequence: ATGAAT
caaagaaagtataattaaag

SEQ ID NO: 21962 - DNA, 20 bp, Artificial Sequence
  Description of Artificial Sequence: Synthetic oligonucleotide
  Target: LAMA2; (-) strand; PAM type: NNGRRT; PAM sequence: TTGAAT
tttgagatttaaatttataa

SEQ ID NO: 21963 - DNA, 20 bp, Artificial Sequence
  Description of Artificial Sequence: Synthetic oligonucleotide
  Target: LAMA2; (-) strand; PAM type: NNGRRT; PAM sequence: CAGAAT
tacaaagttcaaacctcaaa

SEQ ID NO: 21964 - DNA, 20 bp, Artificial Sequence
  Description of Artificial Sequence: Synthetic oligonucleotide
  Target: LAMA2; (-) strand; PAM type: NNGRRT; PAM sequence: AGGGAT
gcaatggctttgattgcatc

SEQ ID NO: 21965 - DNA, 20 bp, Artificial Sequence
  Description of Artificial Sequence: Synthetic oligonucleotide
  Target: LAMA2; (-) strand; PAM type: NNGRRT; PAM sequence: GGGGAT
atacaccattttttttttca

SEQ ID NO: 21966 - DNA, 20 bp, Artificial Sequence
  Description of Artificial Sequence: Synthetic oligonucleotide
  Target: LAMA2; (-) strand; PAM type: NNGRRT; PAM sequence: TTGAAT
gtttacaaatcaagtgaagc

SEQ ID NO: 21967 - DNA, 20 bp, Artificial Sequence
  Description of Artificial Sequence: Synthetic oligonucleotide
  Target: LAMA2; (-) strand; PAM type: NNGRRT; PAM sequence: ATGAAT
cattctcctttctcttgcac

SEQ ID NO: 21968 - DNA, 20 bp, Artificial Sequence
  Description of Artificial Sequence: Synthetic oligonucleotide
  Target: LAMA2; (-) strand; PAM type: NNGRRT; PAM sequence: TGGAAT
actttgcattggcatctcca

SEQ ID NO: 21969 - DNA, 20 bp, Artificial Sequence
  Description of Artificial Sequence: Synthetic oligonucleotide
  Target: LAMA2; (-) strand; PAM type: NNGRRT; PAM sequence: GGGAGT
atgttctctgggctctctgt

SEQ ID NO: 21970 - DNA, 20 bp, Artificial Sequence
  Description of Artificial Sequence: Synthetic oligonucleotide
  Target: LAMA2; (-) strand; PAM type: NNGRRT; PAM sequence: ATGAAT
ggttttattgaaactgaatt

SEQ ID NO: 21971 - DNA, 20 bp, Artificial Sequence
  Description of Artificial Sequence: Synthetic oligonucleotide
  Target: LAMA2; (-) strand; PAM type: NNGRRT; PAM sequence: CTGAAT
ataggtaggttttattgaaa

SEQ ID NO: 21972 - DNA, 20 bp, Artificial Sequence
  Description of Artificial Sequence: Synthetic oligonucleotide
  Target: LAMA2; (-) strand; PAM type: NNGRRT; PAM sequence: TTGAGT
cctccaggagtttaaggagt

SEQ ID NO: 21973 - DNA, 20 bp, Artificial Sequence
  Description of Artificial Sequence: Synthetic oligonucleotide
  Target: LAMA2; (-) strand; PAM type: NNGRRT; PAM sequence: AGGAGT
aagttacctccaggagttta

SEQ ID NO: 21974 - DNA, 20 bp, Artificial Sequence
  Description of Artificial Sequence: Synthetic oligonucleotide
  Target: LAMA2; (-) strand; PAM type: NNGRRT; PAM sequence: AGGAGT
ttcaaataaaagttacctcc

SEQ ID NO: 21975 - DNA, 20 bp, Artificial Sequence
  Description of Artificial Sequence: Synthetic oligonucleotide
  Target: LAMA2; (-) strand; PAM type: NNGRRT; PAM sequence: ATGAAT
ataaactttaaaatgtgaca

SEQ ID NO: 21976 - DNA, 20 bp, Artificial Sequence
  Description of Artificial Sequence: Synthetic oligonucleotide
  Target: LAMA2; (-) strand; PAM type: NNGRRT; PAM sequence: GAGGAT
aataatattgatttctttct

SEQ ID NO: 21977 - DNA, 20 bp, Artificial Sequence
  Description of Artificial Sequence: Synthetic oligonucleotide
  Target: LAMA2; (-) strand; PAM type: NNGRRT; PAM sequence: CTGAAT
aatttcttcttcccaatgct

SEQ ID NO: 21978 - DNA, 20 bp, Artificial Sequence
  Description of Artificial Sequence: Synthetic oligonucleotide
  Target: LAMA2; (-) strand; PAM type: NNGRRT; PAM sequence: TTGAAT
caggcactggtgaaattgct

SEQ ID NO: 21979 - DNA, 20 bp, Artificial Sequence
  Description of Artificial Sequence: Synthetic oligonucleotide
  Target: LAMA2; (-) strand; PAM type: NNGRRT; PAM sequence: GTGAGT
ttccccccactttttaaaat

SEQ ID NO: 21980 - DNA, 20 bp, Artificial Sequence
  Description of Artificial Sequence: Synthetic oligonucleotide
  Target: LAMA2; (-) strand; PAM type: NNGRRT; PAM sequence: TTGGAT
atcataagaagtttagtata

SEQ ID NO: 21981 - DNA, 20 bp, Artificial Sequence
  Description of Artificial Sequence: Synthetic oligonucleotide
  Target: LAMA2; (-) strand; PAM type: NNGRRT; PAM sequence: AAGAGT
tttttgcttcctcaaatgtt

SEQ ID NO: 21982 - DNA, 20 bp, Artificial Sequence
  Description of Artificial Sequence: Synthetic oligonucleotide
  Target: LAMA2; (-) strand; PAM type: NNGRRT; PAM sequence: TGGGAT
tttgatacatagataagttg

SEQ ID NO: 21983 - DNA, 20 bp, Artificial Sequence
  Description of Artificial Sequence: Synthetic oligonucleotide
  Target: LAMA2; (-) strand; PAM type: NNGRRT; PAM sequence: AAGGGT
tcctaaccaccatgttgttc

SEQ ID NO: 21984 - DNA, 20 bp, Artificial Sequence
  Description of Artificial Sequence: Synthetic oligonucleotide
  Target: LAMA2; (-) strand; PAM type: NNGRRT; PAM sequence: TGGGGT
ggatttctgactgcatgagg

SEQ ID NO: 21985 - DNA, 20 bp, Artificial Sequence
  Description of Artificial Sequence: Synthetic oligonucleotide
  Target: LAMA2; (-) strand; PAM type: NNGRRT; PAM sequence: GTGGAT
gaaggtatcaaaagttatat

SEQ ID NO: 21986 - DNA, 20 bp, Artificial Sequence
  Description of Artificial Sequence: Synthetic oligonucleotide
  Target: LAMA2; (-) strand; PAM type: NNGRRT; PAM sequence: AAGAAT
tctctagctcactttattat

SEQ ID NO: 21987 - DNA, 20 bp, Artificial Sequence
  Description of Artificial Sequence: Synthetic oligonucleotide
  Target: LAMA2; (-) strand; PAM type: NNGRRT; PAM sequence: TGGGAT
gctttggcctcccgaagtgc

SEQ ID NO: 21988 - DNA, 20 bp, Artificial Sequence
  Description of Artificial Sequence: Synthetic oligonucleotide
  Target: LAMA2; (-) strand; PAM type: NNGRRT; PAM sequence: CTGGGT
tattgtatttttagtagaaa

SEQ ID NO: 21989 - DNA, 20 bp, Artificial Sequence
  Description of Artificial Sequence: Synthetic oligonucleotide
  Target: LAMA2; (-) strand; PAM type: NNGRRT; PAM sequence: TGGGAT
gcctcagcctcctgagtagc

SEQ ID NO: 21990 - DNA, 20 bp, Artificial Sequence
  Description of Artificial Sequence: Synthetic oligonucleotide
  Target: LAMA2; (-) strand; PAM type: NNGRRT; PAM sequence: CTGAGT
gattctcctgcctcagcctc

SEQ ID NO: 21991 - DNA, 20 bp, Artificial Sequence
  Description of Artificial Sequence: Synthetic oligonucleotide
  Target: LAMA2; (-) strand; PAM type: NNGRRT; PAM sequence: TGGAGT
tctcactctgtcacccaggc

SEQ ID NO: 21992 - DNA, 20 bp, Artificial Sequence
  Description of Artificial Sequence: Synthetic oligonucleotide
  Target: LAMA2; (-) strand; PAM type: NNGRRT; PAM sequence: CAGAGT
atttatttatttatttgaga

SEQ ID NO: 21993 - DNA, 20 bp, Artificial Sequence
  Description of Artificial Sequence: Synthetic oligonucleotide
  Target: LAMA2; (-) strand; PAM type: NNGRRT; PAM sequence: GAGGAT
ctgctcaaaatgaagacaac

SEQ ID NO: 21994 - DNA, 20 bp, Artificial Sequence
  Description of Artificial Sequence: Synthetic oligonucleotide
  Target: LAMA2; (-) strand; PAM type: NNGRRT; PAM sequence: GGGGAT
ctgcatgggttcacttgtac

SEQ ID NO: 21995 - DNA, 20 bp, Artificial Sequence
  Description of Artificial Sequence: Synthetic oligonucleotide
  Target: LAMA2; (-) strand; PAM type: NNGRRT; PAM sequence: ATGGGT
acaatatgggcttgaactgc

SEQ ID NO: 21996 - DNA, 20 bp, Artificial Sequence
  Description of Artificial Sequence: Synthetic oligonucleotide
  Target: LAMA2; (-) strand; PAM type: NNGRRT; PAM sequence: GAGAAT
tcagaaatcctagaaacagc

SEQ ID NO: 21997 - DNA, 20 bp, Artificial Sequence
  Description of Artificial Sequence: Synthetic oligonucleotide
  Target: LAMA2; (-) strand; PAM type: NNGRRT; PAM sequence: AGGAGT
ttttcaatcaagtcagctgg

SEQ ID NO: 21998 - DNA, 20 bp, Artificial Sequence
  Description of Artificial Sequence: Synthetic oligonucleotide
  Target: LAMA2; (-) strand; PAM type: NNGRRT; PAM sequence: CAGAAT
gcttacctcacaggacaggc

SEQ ID NO: 21999 - DNA, 20 bp, Artificial Sequence
  Description of Artificial Sequence: Synthetic oligonucleotide
  Target: LAMA2; (-) strand; PAM type: NNGRRT; PAM sequence: GGGAGT
tatgcagtaaaggtacttct

SEQ ID NO: 22000 - DNA, 20 bp, Artificial Sequence
  Description of Artificial Sequence: Synthetic oligonucleotide
  Target: LAMA2; (-) strand; PAM type: NNGRRT; PAM sequence: AAGAAT
aagattaaataaaatagatt

SEQ ID NO: 22001 - DNA, 20 bp, Artificial Sequence
  Description of Artificial Sequence: Synthetic oligonucleotide
  Target: LAMA2; (-) strand; PAM type: NNGRRT; PAM sequence: GTGAGT
ttgccactgtgtctcacact

SEQ ID NO: 22002 - DNA, 20 bp, Artificial Sequence
  Description of Artificial Sequence: Synthetic oligonucleotide
  Target: LAMA2; (-) strand; PAM type: NNGRRT; PAM sequence: GAGAAT
acaatcttgaaggcagacaa

SEQ ID NO: 22003 - DNA, 20 bp, Artificial Sequence
  Description of Artificial Sequence: Synthetic oligonucleotide
  Target: LAMA2; (-) strand; PAM type: NNGRRT; PAM sequence: CAGGGT
aagaggtgtagcacccagtg

SEQ ID NO: 22004 - DNA, 20 bp, Artificial Sequence
  Description of Artificial Sequence: Synthetic oligonucleotide
  Target: LAMA2; (-) strand; PAM type: NNGRRT; PAM sequence: TGGGGT
gcatgccaggcttcagactg

SEQ ID NO: 22005 - DNA, 20 bp, Artificial Sequence
  Description of Artificial Sequence: Synthetic oligonucleotide
  Target: LAMA2; (-) strand; PAM type: NNGRRT; PAM sequence: AAGAAT
agccagcctgactaatgaga

SEQ ID NO: 22006 - DNA, 20 bp, Artificial Sequence
  Description of Artificial Sequence: Synthetic oligonucleotide
  Target: LAMA2; (-) strand; PAM type: NNGRRT; PAM sequence: ATGAAT
tctacacaccaggtgctgtg

SEQ ID NO: 22007 - DNA, 20 bp, Artificial Sequence
  Description of Artificial Sequence: Synthetic oligonucleotide
  Target: LAMA2; (-) strand; PAM type: NNGRRT; PAM sequence: ATGGGT
atttataactgaatcaatac

SEQ ID NO: 22008 - DNA, 20 bp, Artificial Sequence
  Description of Artificial Sequence: Synthetic oligonucleotide
  Target: LAMA2; (-) strand; PAM type: NNGRRT; PAM sequence: CTGAAT
atgtataaaattatttataa

SEQ ID NO: 22009 - DNA, 20 bp, Artificial Sequence
  Description of Artificial Sequence: Synthetic oligonucleotide
  Target: LAMA2; (-) strand; PAM type: NNGRRT; PAM sequence: TGGAAT
gcacttcagttttgacctag

SEQ ID NO: 22010 - DNA, 20 bp, Artificial Sequence
  Description of Artificial Sequence: Synthetic oligonucleotide
  Target: LAMA2; (-) strand; PAM type: NNGRRT; PAM sequence: TAGGAT
gtccaagtagtgcagctagg

SEQ ID NO: 22011 - DNA, 20 bp, Artificial Sequence
  Description of Artificial Sequence: Synthetic oligonucleotide
  Target: LAMA2; (-) strand; PAM type: NNGRRT; PAM sequence: TAGGAT
tttccatttaaatcaatcct

SEQ ID NO: 22012 - DNA, 20 bp, Artificial Sequence
  Description of Artificial Sequence: Synthetic oligonucleotide
  Target: LAMA2; (-) strand; PAM type: NNGRRT; PAM sequence: AGGGAT
aatggcatgtcagtttgtaa

SEQ ID NO: 22013 - DNA, 20 bp, Artificial Sequence
  Description of Artificial Sequence: Synthetic oligonucleotide
  Target: LAMA2; (-) strand; PAM type: NNGRRT; PAM sequence: CTGAAT
tccatgtgatggtaactaag

SEQ ID NO: 22014 - DNA, 20 bp, Artificial Sequence
  Description of Artificial Sequence: Synthetic oligonucleotide
  Target: LAMA2; (-) strand; PAM type: NNGRRT; PAM sequence: TGGAAT
aactttttccttgaactata

SEQ ID NO: 22015 - DNA, 20 bp, Artificial Sequence
  Description of Artificial Sequence: Synthetic oligonucleotide
  Target: LAMA2; (-) strand; PAM type: NNGRRT; PAM sequence: AAGAGT
ccttcagagaagtcacagga

SEQ ID NO: 22016 - DNA, 20 bp, Artificial Sequence
  Description of Artificial Sequence: Synthetic oligonucleotide
  Target: LAMA2; (-) strand; PAM type: NNGRRT; PAM sequence: ATGGAT
aaatacaatttaataaggag

SEQ ID NO: 22017 - DNA, 20 bp, Artificial Sequence
  Description of Artificial Sequence: Synthetic oligonucleotide
  Target: LAMA2; (-) strand; PAM type: NNGRRT; PAM sequence: TGGGAT
aagtaaaaccaaacgctacc

SEQ ID NO: 22018 - DNA, 20 bp, Artificial Sequence
  Description of Artificial Sequence: Synthetic oligonucleotide
  Target: LAMA2; (-) strand; PAM type: NNGRRT; PAM sequence: TTGGAT
tcaatctgtcattttataga

SEQ ID NO: 22019 - DNA, 20 bp, Artificial Sequence
  Description of Artificial Sequence: Synthetic oligonucleotide
  Target: LAMA2; (-) strand; PAM type: NNGRRT; PAM sequence: GAGAAT
aaaataatattgcagaatca

SEQ ID NO: 22020 - DNA, 20 bp, Artificial Sequence
  Description of Artificial Sequence: Synthetic oligonucleotide
  Target: LAMA2; (-) strand; PAM type: NNGRRT; PAM sequence: CAGAAT
tctatagcaaaataatattg

SEQ ID NO: 22021 - DNA, 20 bp, Artificial Sequence
  Description of Artificial Sequence: Synthetic oligonucleotide
  Target: LAMA2; (-) strand; PAM type: NNGRRT; PAM sequence: CAGAAT
aggtcaaccttgactactta

SEQ ID NO: 22022 - DNA, 20 bp, Artificial Sequence
  Description of Artificial Sequence: Synthetic oligonucleotide
  Target: LAMA2; (-) strand; PAM type: NNGRRT; PAM sequence: CAGAAT
ggtttttaacattttaaatc

SEQ ID NO: 22023 - DNA, 20 bp, Artificial Sequence
  Description of Artificial Sequence: Synthetic oligonucleotide
  Target: LAMA2; (-) strand; PAM type: NNGRRT; PAM sequence: TTGAAT
attaatgggaaagcatgtat

SEQ ID NO: 22024 - DNA, 20 bp, Artificial Sequence
  Description of Artificial Sequence: Synthetic oligonucleotide
  Target: LAMA2; (-) strand; PAM type: NNGRRT; PAM sequence: ATGGGT
ggtataatggattagaggcc

SEQ ID NO: 22025 - DNA, 20 bp, Artificial Sequence
  Description of Artificial Sequence: Synthetic oligonucleotide
  Target: LAMA2; (-) strand; PAM type: NNGRRT; PAM sequence: ATGGAT
aattataaataagaggtata

SEQ ID NO: 22026 - DNA, 20 bp, Artificial Sequence
  Description of Artificial Sequence: Synthetic oligonucleotide
  Target: LAMA2; (-) strand; PAM type: NNGRRT; PAM sequence: ATGAAT
aattacacttaggaatcaag

SEQ ID NO: 22027 - DNA, 20 bp, Artificial Sequence
  Description of Artificial Sequence: Synthetic oligonucleotide
  Target: LAMA2; (-) strand; PAM type: NNGRRT; PAM sequence: AGGAAT
atgcctgggtaattacactt

SEQ ID NO: 22028 - DNA, 20 bp, Artificial Sequence
  Description of Artificial Sequence: Synthetic oligonucleotide
  Target: LAMA2; (-) strand; PAM type: NNGRRT; PAM sequence: CTGGGT
ttgatgataagattttatgc

SEQ ID NO: 22029 - DNA, 20 bp, Artificial Sequence
  Description of Artificial Sequence: Synthetic oligonucleotide
  Target: LAMA2; (-) strand; PAM type: NNGRRT; PAM sequence: TGGGAT
caaagcatatgttactggaa

SEQ ID NO: 22030 - DNA, 20 bp, Artificial Sequence
  Description of Artificial Sequence: Synthetic oligonucleotide
  Target: LAMA2; (-) strand; PAM type: NNGRRT; PAM sequence: TGGAAT
tgacccaaagcatatgttac

SEQ ID NO: 22031 - DNA, 20 bp, Artificial Sequence
  Description of Artificial Sequence: Synthetic oligonucleotide
  Target: LAMA2; (-) strand; PAM type: NNGRRT; PAM sequence: TAGAAT
cctgtagatgcagatgtctc

SEQ ID NO: 22032 - DNA, 20 bp, Artificial Sequence
  Description of Artificial Sequence: Synthetic oligonucleotide
  Target: LAMA2; (-) strand; PAM type: NNGRRT; PAM sequence: GTGGAT
tgtttacttgcaaccatatt

SEQ ID NO: 22033 - DNA, 20 bp, Artificial Sequence
  Description of Artificial Sequence: Synthetic oligonucleotide
  Target: LAMA2; (-) strand; PAM type: NNGRRT; PAM sequence: AAGAGT
gcaggtaacaagcaaaggct

SEQ ID NO: 22034 - DNA, 20 bp, Artificial Sequence
  Description of Artificial Sequence: Synthetic oligonucleotide
  Target: LAMA2; (-) strand; PAM type: NNGRRT; PAM sequence: AAGAAT
taagaaagaaagtcataagt

SEQ ID NO: 22035 - DNA, 20 bp, Artificial Sequence
  Description of Artificial Sequence: Synthetic oligonucleotide
  Target: LAMA2; (-) strand; PAM type: NNGRRT; PAM sequence: CTGAAT
agagagctgcacacgcaagg

SEQ ID NO: 22036 - DNA, 20 bp, Artificial Sequence
  Description of Artificial Sequence: Synthetic oligonucleotide
  Target: LAMA2; (-) strand; PAM type: NNGRRT; PAM sequence: CAGGAT
ccttttaaaatatgggaaga

SEQ ID NO: 22037 - DNA, 20 bp, Artificial Sequence
  Description of Artificial Sequence: Synthetic oligonucleotide
  Target: LAMA2; (-) strand; PAM type: NNGRRT; PAM sequence: CTGAGT
atagccacaagggacagctt

SEQ ID NO: 22038 - DNA, 20 bp, Artificial Sequence
  Description of Artificial Sequence: Synthetic oligonucleotide
  Target: LAMA2; (-) strand; PAM type: NNGRRT; PAM sequence: AAGGAT
ggtgtgcaacagaagtgata

SEQ ID NO: 22039 - DNA, 20 bp, Artificial Sequence
  Description of Artificial Sequence: Synthetic oligonucleotide
  Target: LAMA2; (-) strand; PAM type: NNGRRT; PAM sequence: TTGGGT
tgtacatgaaaacagagact

SEQ ID NO: 22040 - DNA, 20 bp, Artificial Sequence
  Description of Artificial Sequence: Synthetic oligonucleotide
  Target: LAMA2; (-) strand; PAM type: NNGRRT; PAM sequence: GAGGAT
gcttttcatagggtggatct

SEQ ID NO: 22041 - DNA, 20 bp, Artificial Sequence
  Description of Artificial Sequence: Synthetic oligonucleotide
  Target: LAMA2; (-) strand; PAM type: NNGRRT; PAM sequence: GTGGAT
taggttctgcttttcatagg

SEQ ID NO: 22042 - DNA, 20 bp, Artificial Sequence
  Description of Artificial Sequence: Synthetic oligonucleotide
  Target: LAMA2; (-) strand; PAM type: NNGRRT; PAM sequence: TAGGGT
atggtaggttctgcttttca

SEQ ID NO: 22043 - DNA, 20 bp, Artificial Sequence
  Description of Artificial Sequence: Synthetic oligonucleotide
  Target: LAMA2; (-) strand; PAM type: NNGRRT; PAM sequence: GGGGAT
aattctctcacccgtaaaat

SEQ ID NO: 22044 - DNA, 20 bp, Artificial Sequence
  Description of Artificial Sequence: Synthetic oligonucleotide
  Target: LAMA2; (-) strand; PAM type: NNGRRT; PAM sequence: TTGAAT
ggaaacagattcattgaggt

SEQ ID NO: 22045 - DNA, 20 bp, Artificial Sequence
  Description of Artificial Sequence: Synthetic oligonucleotide
  Target: LAMA2; (-) strand; PAM type: NNGRRT; PAM sequence: TTGAGT
atgactgcataatataatag

SEQ ID NO: 22046 - DNA, 20 bp, Artificial Sequence
  Description of Artificial Sequence: Synthetic oligonucleotide
  Target: LAMA2; (-) strand; PAM type: NNGRRT; PAM sequence: AGGAAT
ggtttcctcacctggaatgt

SEQ ID NO: 22047 - DNA, 20 bp, Artificial Sequence
  Description of Artificial Sequence: Synthetic oligonucleotide
  Target: LAMA2; (-) strand; PAM type: NNGRRT; PAM sequence: TGGAAT
tgtgccttggtttcctcacc

SEQ ID NO: 22048 - DNA, 20 bp, Artificial Sequence
  Description of Artificial Sequence: Synthetic oligonucleotide
  Target: LAMA2; (-) strand; PAM type: NNGRRT; PAM sequence: CTGAAT
actttgtatgtagtaaggtt

SEQ ID NO: 22049 - DNA, 20 bp, Artificial Sequence
  Description of Artificial Sequence: Synthetic oligonucleotide
  Target: LAMA2; (-) strand; PAM type: NNGRRT; PAM sequence: CCGAGT
gattttgcaatcaggcagac

SEQ ID NO: 22050 - DNA, 20 bp, Artificial Sequence
  Description of Artificial Sequence: Synthetic oligonucleotide
  Target: LAMA2; (-) strand; PAM type: NNGRRT; PAM sequence: ATGGAT
actctatcttgtatctttgc

SEQ ID NO: 22051 - DNA, 20 bp, Artificial Sequence
  Description of Artificial Sequence: Synthetic oligonucleotide
  Target: LAMA2; (-) strand; PAM type: NNGRRT; PAM sequence: CAGAGT
actgcgctcctttctttctt

SEQ ID NO: 22052 - DNA, 20 bp, Artificial Sequence
  Description of Artificial Sequence: Synthetic oligonucleotide
  Target: LAMA2; (-) strand; PAM type: NNGRRT; PAM sequence: GAGAAT
atgtgggagggtagagagga

SEQ ID NO: 22053 - DNA, 20 bp, Artificial Sequence
  Description of Artificial Sequence: Synthetic oligonucleotide
  Target: LAMA2; (-) strand; PAM type: NNGRRT; PAM sequence: GAGGGT
aaatttacacaaaaatgtgg

SEQ ID NO: 22054 - DNA, 20 bp, Artificial Sequence
  Description of Artificial Sequence: Synthetic oligonucleotide
  Target: LAMA2; (-) strand; PAM type: NNGRRT; PAM sequence: GGGAAT
atcctttctggaacacaatg

SEQ ID NO: 22055 - DNA, 20 bp, Artificial Sequence
  Description of Artificial Sequence: Synthetic oligonucleotide
  Target: LAMA2; (-) strand; PAM type: NNGRRT; PAM sequence: TTGAGT
ggaagcaaaaaagttacttt

SEQ ID NO: 22056 - DNA, 20 bp, Artificial Sequence
  Description of Artificial Sequence: Synthetic oligonucleotide
  Target: LAMA2; (-) strand; PAM type: NNGRRT; PAM sequence: TGGAAT
gtttgtgagaatgattatgt

SEQ ID NO: 22057 - DNA, 20 bp, Artificial Sequence
  Description of Artificial Sequence: Synthetic oligonucleotide
  Target: LAMA2; (-) strand; PAM type: NNGRRT; PAM sequence: GAGAAT
gaactgagacaaaagtttgt

SEQ ID NO: 22058 - DNA, 20 bp, Artificial Sequence
  Description of Artificial Sequence: Synthetic oligonucleotide
  Target: LAMA2; (-) strand; PAM type: NNGRRT; PAM sequence: TTGAAT
ttttagggtgtttgtcaata

SEQ ID NO: 22059 - DNA, 20 bp, Artificial Sequence
  Description of Artificial Sequence: Synthetic oligonucleotide
  Target: LAMA2; (-) strand; PAM type: NNGRRT; PAM sequence: TAGGGT
ctttcaatttaaataatttt

SEQ ID NO: 22060 - DNA, 20 bp, Artificial Sequence
  Description of Artificial Sequence: Synthetic oligonucleotide
  Target: LAMA2; (-) strand; PAM type: NNGRRT; PAM sequence: GAGAGT
gaggtagcaaaagagagaga

SEQ ID NO: 22061 - DNA, 20 bp, Artificial Sequence
  Description of Artificial Sequence: Synthetic oligonucleotide
  Target: LAMA2; (-) strand; PAM type: NNGRRT; PAM sequence: ATGGAT
ttgatttatttcgtatcctg

SEQ ID NO: 22062 - DNA, 20 bp, Artificial Sequence
  Description of Artificial Sequence: Synthetic oligonucleotide
  Target: LAMA2; (-) strand; PAM type: NNGRRT; PAM sequence: ATGAGT
ccagtttcctcatcccacaa

SEQ ID NO: 22063 - DNA, 20 bp, Artificial Sequence
  Description of Artificial Sequence: Synthetic oligonucleotide
  Target: LAMA2; (-) strand; PAM type: NNGRRT; PAM sequence: ATGAAT
tccttggtactataaaagga

SEQ ID NO: 22064 - DNA, 20 bp, Artificial Sequence
  Description of Artificial Sequence: Synthetic oligonucleotide
  Target: LAMA2; (-) strand; PAM type: NNGRRT; PAM sequence: AGGAAT
ccactccttggtactataaa

SEQ ID NO: 22065 - DNA, 20 bp, Artificial Sequence
  Description of Artificial Sequence: Synthetic oligonucleotide
  Target: LAMA2; (-) strand; PAM type: NNGRRT; PAM sequence: CTGAGT
tctggccactgcactccagc

SEQ ID NO: 22066 - DNA, 20 bp, Artificial Sequence
  Description of Artificial Sequence: Synthetic oligonucleotide
  Target: LAMA2; (-) strand; PAM type: NNGRRT; PAM sequence: AGGAGT
tggctggattacttgaggtc

SEQ ID NO: 22067 - DNA, 20 bp, Artificial Sequence
  Description of Artificial Sequence: Synthetic oligonucleotide
  Target: LAMA2; (-) strand; PAM type: NNGRRT; PAM sequence: CTGGAT
attttgggaggctgaggtgg

SEQ ID NO: 22068 - DNA, 20 bp, Artificial Sequence
  Description of Artificial Sequence: Synthetic oligonucleotide
  Target: LAMA2; (-) strand; PAM type: NNGRRT; PAM sequence: CCGAGT
ctctgggggagagttgaggc

SEQ ID NO: 22069 - DNA, 20 bp, Artificial Sequence
  Description of Artificial Sequence: Synthetic oligonucleotide
  Target: LAMA2; (-) strand; PAM type: NNGRRT; PAM sequence: GAGAGT
tggagtcaattcctctgggg

SEQ ID NO: 22070 - DNA, 20 bp, Artificial Sequence
  Description of Artificial Sequence: Synthetic oligonucleotide
  Target: LAMA2; (-) strand; PAM type: NNGRRT; PAM sequence: TGGAGT
cggtccagccctagaggagg

SEQ ID NO: 22071 - DNA, 20 bp, Artificial Sequence
  Description of Artificial Sequence: Synthetic oligonucleotide
  Target: LAMA2; (-) strand; PAM type: NNGRRT; PAM sequence: GGGAGT
aatagacaagcgcccatagt

SEQ ID NO: 22072 - DNA, 20 bp, Artificial Sequence
  Description of Artificial Sequence: Synthetic oligonucleotide
  Target: LAMA2; (-) strand; PAM type: NNGRRT; PAM sequence: AGGAAT
agaagtaatactcctcatcg

SEQ ID NO: 22073 - DNA, 20 bp, Artificial Sequence
  Description of Artificial Sequence: Synthetic oligonucleotide
  Target: LAMA2; (-) strand; PAM type: NNGRRT; PAM sequence: TTGAAT
tctgtgcatggatttcatcc

SEQ ID NO: 22074 - DNA, 20 bp, Artificial Sequence
  Description of Artificial Sequence: Synthetic oligonucleotide
  Target: LAMA2; (-) strand; PAM type: NNGRRT; PAM sequence: ATGGAT
taaaactggattttctgtgc

SEQ ID NO: 22075 - DNA, 20 bp, Artificial Sequence
  Description of Artificial Sequence: Synthetic oligonucleotide
  Target: LAMA2; (-) strand; PAM type: NNGRRT; PAM sequence: CTGGAT
aagctgaccactgaataaaa

SEQ ID NO: 22076 - DNA, 20 bp, Artificial Sequence
  Description of Artificial Sequence: Synthetic oligonucleotide
  Target: LAMA2; (-) strand; PAM type: NNGRRT; PAM sequence: CTGAAT
attctttagcaagctgacca

SEQ ID NO: 22077 - DNA, 20 bp, Artificial Sequence
  Description of Artificial Sequence: Synthetic oligonucleotide
  Target: LAMA2; (-) strand; PAM type: NNGRRT; PAM sequence: GTGGGT
atttaaaagtggttcatagt

SEQ ID NO: 22078 - DNA, 20 bp, Artificial Sequence
  Description of Artificial Sequence: Synthetic oligonucleotide
  Target: LAMA2; (-) strand; PAM type: NNGRRT; PAM sequence: AAGAAT
agtcctggaaatgatggttg

SEQ ID NO: 22079 - DNA, 20 bp, Artificial Sequence
  Description of Artificial Sequence: Synthetic oligonucleotide
  Target: LAMA2; (-) strand; PAM type: NNGRRT; PAM sequence: TTGAAT
gttcatttttgccattatta

SEQ ID NO: 22080 - DNA, 20 bp, Artificial Sequence
  Description of Artificial Sequence: Synthetic oligonucleotide
  Target: LAMA2; (-) strand; PAM type: NNGRRT; PAM sequence: TTGAGT
agaatagtattcaaactatt

SEQ ID NO: 22081 - DNA, 20 bp, Artificial Sequence
  Description of Artificial Sequence: Synthetic oligonucleotide
  Target: LAMA2; (-) strand; PAM type: NNGRRT; PAM sequence: GAGAAT
ttgagcaagctgataaaact

SEQ ID NO: 22082 - DNA, 20 bp, Artificial Sequence
  Description of Artificial Sequence: Synthetic oligonucleotide
  Target: LAMA2; (-) strand; PAM type: NNGRRT; PAM sequence: TTGGAT
ccctccttgtttattttgat

SEQ ID NO: 22083 - DNA, 20 bp, Artificial Sequence
  Description of Artificial Sequence: Synthetic oligonucleotide
  Target: LAMA2; (-) strand; PAM type: NNGRRT; PAM sequence: TAGAAT
attttaccaccttggttaag

SEQ ID NO: 22084 - DNA, 20 bp, Artificial Sequence
  Description of Artificial Sequence: Synthetic oligonucleotide
  Target: LAMA2; (-) strand; PAM type: NNGRRT; PAM sequence: GAGAAT
tcagtttttcaaatcccatg

SEQ ID NO: 22085 - DNA, 20 bp, Artificial Sequence
  Description of Artificial Sequence: Synthetic oligonucleotide
  Target: LAMA2; (-) strand; PAM type: NNGRRT; PAM sequence: AGGAGT
ttgatttatgaataaaaggt

SEQ ID NO: 22086 - DNA, 20 bp, Artificial Sequence
  Description of Artificial Sequence: Synthetic oligonucleotide
  Target: LAMA2; (-) strand; PAM type: NNGRRT; PAM sequence: ATGAAT
ctgcagacattgcttgattt

SEQ ID NO: 22087 - DNA, 20 bp, Artificial Sequence
  Description of Artificial Sequence: Synthetic oligonucleotide
  Target: LAMA2; (-) strand; PAM type: NNGRRT; PAM sequence: TTGGGT
atcaagacttccatcttcat

SEQ ID NO: 22088 - DNA, 20 bp, Artificial Sequence
  Description of Artificial Sequence: Synthetic oligonucleotide
  Target: LAMA2; (-) strand; PAM type: NNGRRT; PAM sequence: ATGGAT
aaaactaaataaaaagtgtt

SEQ ID NO: 22089 - DNA, 20 bp, Artificial Sequence
  Description of Artificial Sequence: Synthetic oligonucleotide
  Target: LAMA2; (-) strand; PAM type: NNGRRT; PAM sequence: ATGGAT
atctgcttttactgtgcttg

SEQ ID NO: 22090 - DNA, 20 bp, Artificial Sequence
  Description of Artificial Sequence: Synthetic oligonucleotide
  Target: LAMA2; (-) strand; PAM type: NNGRRT; PAM sequence: TGGAAT
ttttaaataacattgtcata

SEQ ID NO: 22091 - DNA, 20 bp, Artificial Sequence
  Description of Artificial Sequence: Synthetic oligonucleotide
  Target: LAMA2; (-) strand; PAM type: NNGRRT; PAM sequence: AAGAGT
ttcagcctgaaaaagctcca

SEQ ID NO: 22092 - DNA, 20 bp, Artificial Sequence
  Description of Artificial Sequence: Synthetic oligonucleotide
  Target: LAMA2; (-) strand; PAM type: NNGRRT; PAM sequence: AGGGGT
caggtgcccagggttggtcc

SEQ ID NO: 22093 - DNA, 20 bp, Artificial Sequence
  Description of Artificial Sequence: Synthetic oligonucleotide
  Target: LAMA2; (-) strand; PAM type: NNGRRT; PAM sequence: CAGGGT
tgacatggaacacaggtgcc

SEQ ID NO: 22094 - DNA, 20 bp, Artificial Sequence
  Description of Artificial Sequence: Synthetic oligonucleotide
  Target: LAMA2; (-) strand; PAM type: NNGRRT; PAM sequence: CAGGGT
tacctggcatatcgatgttt

SEQ ID NO: 22095 - DNA, 20 bp, Artificial Sequence
  Description of Artificial Sequence: Synthetic oligonucleotide
  Target: LAMA2; (-) strand; PAM type: NNGRRT; PAM sequence: AGGAAT
gatgctgagcatgtgtaaag

SEQ ID NO: 22096 - DNA, 20 bp, Artificial Sequence
  Description of Artificial Sequence: Synthetic oligonucleotide
  Target: LAMA2; (-) strand; PAM type: NNGRRT; PAM sequence: GTGAAT
ctttttaaaatgcagaatct

SEQ ID NO: 22097 - DNA, 20 bp, Artificial Sequence
  Description of Artificial Sequence: Synthetic oligonucleotide
  Target: LAMA2; (-) strand; PAM type: NNGRRT; PAM sequence: CAGAAT
tttccttactttttaaaatg

SEQ ID NO: 22098 - DNA, 20 bp, Artificial Sequence
  Description of Artificial Sequence: Synthetic oligonucleotide
  Target: LAMA2; (-) strand; PAM type: NNGRRT; PAM sequence: GTGAAT
aatgttatgttgcattttgg

SEQ ID NO: 22099 - DNA, 20 bp, Artificial Sequence
  Description of Artificial Sequence: Synthetic oligonucleotide
  Target: LAMA2; (-) strand; PAM type: NNGRRT; PAM sequence: TTGGGT
ttaaaatgttatgttgcatt

SEQ ID NO: 22100 - DNA, 20 bp, Artificial Sequence
  Description of Artificial Sequence: Synthetic oligonucleotide
  Target: LAMA2; (-) strand; PAM type: NNGRRT; PAM sequence: ATGGGT
ctacctcaattctaagggaa

SEQ ID NO: 22101 - DNA, 20 bp, Artificial Sequence
  Description of Artificial Sequence: Synthetic oligonucleotide
  Target: LAMA2; (-) strand; PAM type: NNGRRT; PAM sequence: CAGGGT
gcagatggtggtagagagtg

SEQ ID NO: 22102 - DNA, 20 bp, Artificial Sequence
  Description of Artificial Sequence: Synthetic oligonucleotide
  Target: LAMA2; (-) strand; PAM type: NNGRRT; PAM sequence: GAGAGT
ttctaatgcagatggtggta

SEQ ID NO: 22103 - DNA, 20 bp, Artificial Sequence
  Description of Artificial Sequence: Synthetic oligonucleotide
  Target: LAMA2; (-) strand; PAM type: NNGRRT; PAM sequence: AAGGGT
cttacagtgactacgataaa

SEQ ID NO: 22104 - DNA, 20 bp, Artificial Sequence
  Description of Artificial Sequence: Synthetic oligonucleotide
  Target: LAMA2; (-) strand; PAM type: NNGRRT; PAM sequence: CTGAAT
caagtggtgacaggggcaac

SEQ ID NO: 22105 - DNA, 20 bp, Artificial Sequence
  Description of Artificial Sequence: Synthetic oligonucleotide
  Target: LAMA2; (-) strand; PAM type: NNGRRT; PAM sequence: TAGAAT
atgagttccacaaggctcag

SEQ ID NO: 22106 - DNA, 20 bp, Artificial Sequence
  Description of Artificial Sequence: Synthetic oligonucleotide
  Target: LAMA2; (-) strand; PAM type: NNGRRT; PAM sequence: ATGAGT
gtattttgcctgttttgacc

SEQ ID NO: 22107 - DNA, 20 bp, Artificial Sequence
  Description of Artificial Sequence: Synthetic oligonucleotide
  Target: LAMA2; (-) strand; PAM type: NNGRRT; PAM sequence: CGGGGT
gagggaagaggaggattctg

SEQ ID NO: 22108 - DNA, 20 bp, Artificial Sequence
  Description of Artificial Sequence: Synthetic oligonucleotide
  Target: LAMA2; (-) strand; PAM type: NNGRRT; PAM sequence: GAGGAT
agagaacactgagggaagag

SEQ ID NO: 22109 - DNA, 20 bp, Artificial Sequence
  Description of Artificial Sequence: Synthetic oligonucleotide
  Target: LAMA2; (-) strand; PAM type: NNGRRT; PAM sequence: TTGGGT
agcagcatgcaaagtgagag

SEQ ID NO: 22110 - DNA, 20 bp, Artificial Sequence
  Description of Artificial Sequence: Synthetic oligonucleotide
  Target: LAMA2; (-) strand; PAM type: NNGRRT; PAM sequence: GAGAGT
ggggtagcagcatgcaaagt

SEQ ID NO: 22111 - DNA, 20 bp, Artificial Sequence
  Description of Artificial Sequence: Synthetic oligonucleotide
  Target: LAMA2; (-) strand; PAM type: NNGRRT; PAM sequence: CGGGGT
ctactccttaagagggctgc

SEQ ID NO: 22112 - DNA, 20 bp, Artificial Sequence
  Description of Artificial Sequence: Synthetic oligonucleotide
  Target: LAMA2; (-) strand; PAM type: NNGRRT; PAM sequence: GTGAGT
cctccagcctgcacgacaga

SEQ ID NO: 22113 - DNA, 20 bp, Artificial Sequence
  Description of Artificial Sequence: Synthetic oligonucleotide
  Target: LAMA2; (-) strand; PAM type: NNGRRT; PAM sequence: CAGAGT
ctgccctccagcctgcacga

SEQ ID NO: 22114 - DNA, 20 bp, Artificial Sequence
  Description of Artificial Sequence: Synthetic oligonucleotide
  Target: LAMA2; (-) strand; PAM type: NNGRRT; PAM sequence: CAGGAT
agtcggaggttgcagtgagc

SEQ ID NO: 22115 - DNA, 20 bp, Artificial Sequence
  Description of Artificial Sequence: Synthetic oligonucleotide
  Target: LAMA2; (-) strand; PAM type: NNGRRT; PAM sequence: GGGAGT
catgagaatcacttgaaccc

SEQ ID NO: 22116 - DNA, 20 bp, Artificial Sequence
  Description of Artificial Sequence: Synthetic oligonucleotide
  Target: LAMA2; (-) strand; PAM type: NNGRRT; PAM sequence: GAGAAT
tactcaggaggctgaggcat

SEQ ID NO: 22117 - DNA, 20 bp, Artificial Sequence
  Description of Artificial Sequence: Synthetic oligonucleotide
  Target: LAMA2; (-) strand; PAM type: NNGRRT; PAM sequence: AGGAGT
tgggtggattacctgaggtt

SEQ ID NO: 22118 - DNA, 20 bp, Artificial Sequence
  Description of Artificial Sequence: Synthetic oligonucleotide
  Target: LAMA2; (-) strand; PAM type: NNGRRT; PAM sequence: GTGGAT
actttgggaggccaaggtgg

SEQ ID NO: 22119 - DNA, 20 bp, Artificial Sequence
  Description of Artificial Sequence: Synthetic oligonucleotide
  Target: LAMA2; (-) strand; PAM type: NNGRRT; PAM sequence: GTGGGT
cagcactttgggaggccaag

SEQ ID NO: 22120 - DNA, 20 bp, Artificial Sequence
  Description of Artificial Sequence: Synthetic oligonucleotide
  Target: LAMA2; (-) strand; PAM type: NNGRRT; PAM sequence: GGGAGT
ttcagactcaggggaatgaa

SEQ ID NO: 22121 - DNA, 20 bp, Artificial Sequence
  Description of Artificial Sequence: Synthetic oligonucleotide
  Target: LAMA2; (-) strand; PAM type: NNGRRT; PAM sequence: GGGAAT
gcccccaccttcagactcag

SEQ ID NO: 22122 - DNA, 20 bp, Artificial Sequence
  Description of Artificial Sequence: Synthetic oligonucleotide
  Target: LAMA2; (-) strand; PAM type: NNGRRT; PAM sequence: ATGGAT
ggaccctgatgtagaggagg

SEQ ID NO: 22123 - DNA, 20 bp, Artificial Sequence
  Description of Artificial Sequence: Synthetic oligonucleotide
  Target: LAMA2; (-) strand; PAM type: NNGRRT; PAM sequence: GAGGAT
ttgtggaccctgatgtagag

SEQ ID NO: 22124 - DNA, 20 bp, Artificial Sequence
  Description of Artificial Sequence: Synthetic oligonucleotide
  Target: LAMA2; (-) strand; PAM type: NNGRRT; PAM sequence: AGGGGT
ccaatatcctcctgtggccc

SEQ ID NO: 22125 - DNA, 20 bp, Artificial Sequence
  Description of Artificial Sequence: Synthetic oligonucleotide
  Target: LAMA2; (-) strand; PAM type: NNGRRT; PAM sequence: AGGAAT
tcaggcagtacagtaatacc

SEQ ID NO: 22126 - DNA, 20 bp, Artificial Sequence
  Description of Artificial Sequence: Synthetic oligonucleotide
  Target: LAMA2; (-) strand; PAM type: NNGRRT; PAM sequence: GAGAAT
aatagggtttgtgctcctat

SEQ ID NO: 22127 - DNA, 20 bp, Artificial Sequence
  Description of Artificial Sequence: Synthetic oligonucleotide
  Target: LAMA2; (-) strand; PAM type: NNGRRT; PAM sequence: TAGGGT
ctcacatgtgcagttcacaa

SEQ ID NO: 22128 - DNA, 20 bp, Artificial Sequence
  Description of Artificial Sequence: Synthetic oligonucleotide
  Target: LAMA2; (-) strand; PAM type: NNGRRT; PAM sequence: TGGGGT
gcaactagatagtcccatct

SEQ ID NO: 22129 - DNA, 20 bp, Artificial Sequence
  Description of Artificial Sequence: Synthetic oligonucleotide
  Target: LAMA2; (-) strand; PAM type: NNGRRT; PAM sequence: TAGAAT
ttatacaactcaccataaca

SEQ ID NO: 22130 - DNA, 20 bp, Artificial Sequence
  Description of Artificial Sequence: Synthetic oligonucleotide
  Target: LAMA2; (-) strand; PAM type: NNGRRT; PAM sequence: GGGGAT
ttttccatggactaggattg

SEQ ID NO: 22131 - DNA, 20 bp, Artificial Sequence
  Description of Artificial Sequence: Synthetic oligonucleotide
  Target: LAMA2; (-) strand; PAM type: NNGRRT; PAM sequence: TAGGAT
aaggcaatttttccatggac

SEQ ID NO: 22132 - DNA, 20 bp, Artificial Sequence
  Description of Artificial Sequence: Synthetic oligonucleotide
  Target: LAMA2; (-) strand; PAM type: NNGRRT; PAM sequence: CTGGGT
gggaagcatgagagtcaaag

SEQ ID NO: 22133 - DNA, 20 bp, Artificial Sequence
  Description of Artificial Sequence: Synthetic oligonucleotide
  Target: LAMA2; (-) strand; PAM type: NNGRRT; PAM sequence: GAGAGT
gggcacatagagggaagcat

SEQ ID NO: 22134 - DNA, 20 bp, Artificial Sequence
  Description of Artificial Sequence: Synthetic oligonucleotide
  Target: LAMA2; (-) strand; PAM type: NNGRRT; PAM sequence: TGGGGT
aaaatcagcaaggaatgatg

SEQ ID NO: 22135 - DNA, 20 bp, Artificial Sequence
  Description of Artificial Sequence: Synthetic oligonucleotide
  Target: LAMA2; (-) strand; PAM type: NNGRRT; PAM sequence: AGGAAT
ttagacagggaaaatcagca

SEQ ID NO: 22136 - DNA, 20 bp, Artificial Sequence
  Description of Artificial Sequence: Synthetic oligonucleotide
  Target: LAMA2; (-) strand; PAM type: NNGRRT; PAM sequence: AGGAGT
aaatcactaagaatgatgac

SEQ ID NO: 22137 - DNA, 20 bp, Artificial Sequence
  Description of Artificial Sequence: Synthetic oligonucleotide
  Target: LAMA2; (-) strand; PAM type: NNGRRT; PAM sequence: AAGAAT
tcatggacattaaaatcact

SEQ ID NO: 22138 - DNA, 20 bp, Artificial Sequence
  Description of Artificial Sequence: Synthetic oligonucleotide
  Target: LAMA2; (-) strand; PAM type: NNGRRT; PAM sequence: AAGAGT
actgaaagtgaagagtatgg

SEQ ID NO: 22139 - DNA, 20 bp, Artificial Sequence
  Description of Artificial Sequence: Synthetic oligonucleotide
  Target: LAMA2; (-) strand; PAM type: NNGRRT; PAM sequence: AAGAGT
ggcacaagaaactgaaagtg

SEQ ID NO: 22140 - DNA, 20 bp, Artificial Sequence
  Description of Artificial Sequence: Synthetic oligonucleotide
  Target: LAMA2; (-) strand; PAM type: NNGRRT; PAM sequence: AGGAGT
cttgagtaaaaaataagtaa

SEQ ID NO: 22141 - DNA, 20 bp, Artificial Sequence
  Description of Artificial Sequence: Synthetic oligonucleotide
  Target: LAMA2; (-) strand; PAM type: NNGRRT; PAM sequence: TTGAGT
ctcacagtgttggagttcac

SEQ ID NO: 22142 - DNA, 20 bp, Artificial Sequence
  Description of Artificial Sequence: Synthetic oligonucleotide
  Target: LAMA2; (-) strand; PAM type: NNGRRT; PAM sequence: TGGAGT
tggtaggattctcacagtgt

SEQ ID NO: 22143 - DNA, 20 bp, Artificial Sequence
  Description of Artificial Sequence: Synthetic oligonucleotide
  Target: LAMA2; (-) strand; PAM type: NNGRRT; PAM sequence: TAGGAT
tgcaggtatggaggagatgg

SEQ ID NO: 22144 - DNA, 20 bp, Artificial Sequence
  Description of Artificial Sequence: Synthetic oligonucleotide
  Target: LAMA2; (-) strand; PAM type: NNGRRT; PAM sequence: CTGGGT
tcgcgtcactgcactccagc

SEQ ID NO: 22145 - DNA, 20 bp, Artificial Sequence
  Description of Artificial Sequence: Synthetic oligonucleotide
  Target: LAMA2; (-) strand; PAM type: NNGRRT; PAM sequence: GAGAAT
tactcaggaggctgaggcag

SEQ ID NO: 22146 - DNA, 20 bp, Artificial Sequence
  Description of Artificial Sequence: Synthetic oligonucleotide
  Target: LAMA2; (-) strand; PAM type: NNGRRT; PAM sequence: TCGAGT
tggatcatgaggtcaggaga

SEQ ID NO: 22147 - DNA, 20 bp, Artificial Sequence
  Description of Artificial Sequence: Synthetic oligonucleotide
  Target: LAMA2; (-) strand; PAM type: NNGRRT; PAM sequence: ATGGAT
gaggccgaaggaggcgaatc

SEQ ID NO: 22148 - DNA, 20 bp, Artificial Sequence
  Description of Artificial Sequence: Synthetic oligonucleotide
  Target: LAMA2; (-) strand; PAM type: NNGRRT; PAM sequence: GCGAAT
actttgggaggccgaaggag

SEQ ID NO: 22149 - DNA, 20 bp, Artificial Sequence
  Description of Artificial Sequence: Synthetic oligonucleotide
  Target: LAMA2; (-) strand; PAM type: NNGRRT; PAM sequence: ATGAAT
tccatttgaagagagggatc

SEQ ID NO: 22150 - DNA, 20 bp, Artificial Sequence
  Description of Artificial Sequence: Synthetic oligonucleotide
  Target: LAMA2; (-) strand; PAM type: NNGRRT; PAM sequence: AGGGAT
caaagggtccatttgaagag

SEQ ID NO: 22151 - DNA, 20 bp, Artificial Sequence
  Description of Artificial Sequence: Synthetic oligonucleotide
  Target: LAMA2; (-) strand; PAM type: NNGRRT; PAM sequence: AAGGGT
catgattgcagagcagcaca

SEQ ID NO: 22152 - DNA, 20 bp, Artificial Sequence
  Description of Artificial Sequence: Synthetic oligonucleotide
  Target: LAMA2; (-) strand; PAM type: NNGRRT; PAM sequence: AAGGAT
ctaggaatgtggaaaagaaa

SEQ ID NO: 22153 - DNA, 20 bp, Artificial Sequence
  Description of Artificial Sequence: Synthetic oligonucleotide
  Target: LAMA2; (-) strand; PAM type: NNGRRT; PAM sequence: AGGAAT
gaggtatgaaataatcacct

SEQ ID NO: 22154 - DNA, 20 bp, Artificial Sequence
  Description of Artificial Sequence: Synthetic oligonucleotide
  Target: LAMA2; (-) strand; PAM type: NNGRRT; PAM sequence: GAGGAT
gagaggagaggtttaggctt

SEQ ID NO: 22155 - DNA, 20 bp, Artificial Sequence
  Description of Artificial Sequence: Synthetic oligonucleotide
  Target: LAMA2; (-) strand; PAM type: NNGRRT; PAM sequence: GGGGGT
aactgagggtaaggatggga

SEQ ID NO: 22156 - DNA, 20 bp, Artificial Sequence
  Description of Artificial Sequence: Synthetic oligonucleotide
  Target: LAMA2; (-) strand; PAM type: NNGRRT; PAM sequence: AAGGAT
caacaccatcaactgagggt

SEQ ID NO: 22157 - DNA, 20 bp, Artificial Sequence
  Description of Artificial Sequence: Synthetic oligonucleotide
  Target: LAMA2; (-) strand; PAM type: NNGRRT; PAM sequence: GAGGGT
aagaggcaacaccatcaact

SEQ ID NO: 22158 - DNA, 20 bp, Artificial Sequence
  Description of Artificial Sequence: Synthetic oligonucleotide
  Target: LAMA2; (-) strand; PAM type: NNGRRT; PAM sequence: GTGGGT
ttgggcacagatgcagaaaa

SEQ ID NO: 22159 - DNA, 20 bp, Artificial Sequence
  Description of Artificial Sequence: Synthetic oligonucleotide
  Target: LAMA2; (-) strand; PAM type: NNGRRT; PAM sequence: AAGAGT
attcatccaaagtaatagaa

SEQ ID NO: 22160 - DNA, 20 bp, Artificial Sequence
  Description of Artificial Sequence: Synthetic oligonucleotide
  Target: LAMA2; (-) strand; PAM type: NNGRRT; PAM sequence: AAGAAT
atgtgatcttttctggaaac

SEQ ID NO: 22161 - DNA, 20 bp, Artificial Sequence
  Description of Artificial Sequence: Synthetic oligonucleotide
  Target: LAMA2; (-) strand; PAM type: NNGRRT; PAM sequence: TAGAAT
gtcatcaagcgggagagggg

SEQ ID NO: 22162 - DNA, 20 bp, Artificial Sequence
  Description of Artificial Sequence: Synthetic oligonucleotide
  Target: LAMA2; (-) strand; PAM type: NNGRRT; PAM sequence: AGGGGT
gtgatgtcatcaagcgggag

SEQ ID NO: 22163 - DNA, 20 bp, Artificial Sequence
  Description of Artificial Sequence: Synthetic oligonucleotide
  Target: LAMA2; (-) strand; PAM type: NNGRRT; PAM sequence: CAGAGT
aagaaggaggagagattagc

SEQ ID NO: 22164 - DNA, 20 bp, Artificial Sequence
  Description of Artificial Sequence: Synthetic oligonucleotide
  Target: LAMA2; (-) strand; PAM type: NNGRRT; PAM sequence: GAGAGT
ttagaaaggaaatgagtcag

SEQ ID NO: 22165 - DNA, 20 bp, Artificial Sequence
  Description of Artificial Sequence: Synthetic oligonucleotide
  Target: LAMA2; (-) strand; PAM type: NNGRRT; PAM sequence: ATGAGT
agtggttacttagaaaggaa

SEQ ID NO: 22166 - DNA, 20 bp, Artificial Sequence
  Description of Artificial Sequence: Synthetic oligonucleotide
  Target: LAMA2; (-) strand; PAM type: NNGRRT; PAM sequence: AAGAAT
tctccattgtatggaaggag

SEQ ID NO: 22167 - DNA, 20 bp, Artificial Sequence
  Description of Artificial Sequence: Synthetic oligonucleotide
  Target: LAMA2; (-) strand; PAM type: NNGRRT; PAM sequence: CGGGAT
ggatgaagagaaattataga

SEQ ID NO: 22168 - DNA, 20 bp, Artificial Sequence
  Description of Artificial Sequence: Synthetic oligonucleotide
  Target: LAMA2; (-) strand; PAM type: NNGRRT; PAM sequence: ATGGAT
ttttagtaattcaaaggaga

SEQ ID NO: 22169 - DNA, 20 bp, Artificial Sequence
  Description of Artificial Sequence: Synthetic oligonucleotide
  Target: LAMA2; (-) strand; PAM type: NNGRRT; PAM sequence: GAGAAT
ctgtttttagtaattcaaag

SEQ ID NO: 22170 - DNA, 20 bp, Artificial Sequence
  Description of Artificial Sequence: Synthetic oligonucleotide
  Target: LAMA2; (-) strand; PAM type: NNGRRT; PAM sequence: TTGAAT
tggtggctgtagattagcca

SEQ ID NO: 22171 - DNA, 20 bp, Artificial Sequence
  Description of Artificial Sequence: Synthetic oligonucleotide
  Target: LAMA2; (-) strand; PAM type: NNGRRT; PAM sequence: TGGGGT
gcaaagggtttcaagaagaa

SEQ ID NO: 22172 - DNA, 20 bp, Artificial Sequence
  Description of Artificial Sequence: Synthetic oligonucleotide
  Target: LAMA2; (-) strand; PAM type: NNGRRT; PAM sequence: AAGAAT
attgagcaaagggtttcaag

SEQ ID NO: 22173 - DNA, 20 bp, Artificial Sequence
  Description of Artificial Sequence: Synthetic oligonucleotide
  Target: LAMA2; (-) strand; PAM type: NNGRRT; PAM sequence: AAGGGT
gctggaaagcaaattgagca

SEQ ID NO: 22174 - DNA, 20 bp, Artificial Sequence
  Description of Artificial Sequence: Synthetic oligonucleotide
  Target: LAMA2; (-) strand; PAM type: NNGRRT; PAM sequence: CAGAAT
ctatggaatttgaacatctc

SEQ ID NO: 22175 - DNA, 20 bp, Artificial Sequence
  Description of Artificial Sequence: Synthetic oligonucleotide
  Target: LAMA2; (-) strand; PAM type: NNGRRT; PAM sequence: TGGAAT
aagctgagaaggagccacta

SEQ ID NO: 22176 - DNA, 20 bp, Artificial Sequence
  Description of Artificial Sequence: Synthetic oligonucleotide
  Target: LAMA2; (-) strand; PAM type: NNGRRT; PAM sequence: CAGAGT
gaataccactatgtagattt

SEQ ID NO: 22177 - DNA, 20 bp, Artificial Sequence
  Description of Artificial Sequence: Synthetic oligonucleotide
  Target: LAMA2; (-) strand; PAM type: NNGRRT; PAM sequence: AGGAAT
tgctccaaggattgagtccc

SEQ ID NO: 22178 - DNA, 20 bp, Artificial Sequence
  Description of Artificial Sequence: Synthetic oligonucleotide
  Target: LAMA2; (-) strand; PAM type: NNGRRT; PAM sequence: TTGAGT
gaaacaaattgctccaagga

SEQ ID NO: 22179 - DNA, 20 bp, Artificial Sequence
  Description of Artificial Sequence: Synthetic oligonucleotide
  Target: LAMA2; (-) strand; PAM type: NNGRRT; PAM sequence: AAGGAT
ttagagaaacaaattgctcc

SEQ ID NO: 22180 - DNA, 20 bp, Artificial Sequence
  Description of Artificial Sequence: Synthetic oligonucleotide
  Target: LAMA2; (-) strand; PAM type: NNGRRT; PAM sequence: ATGAAT
tgggtaagatcaccatctga

SEQ ID NO: 22181 - DNA, 20 bp, Artificial Sequence
  Description of Artificial Sequence: Synthetic oligonucleotide
  Target: LAMA2; (-) strand; PAM type: NNGRRT; PAM sequence: CTGAAT
tgcctgggtaagatcaccat

SEQ ID NO: 22182 - DNA, 20 bp, Artificial Sequence
  Description of Artificial Sequence: Synthetic oligonucleotide
  Target: LAMA2; (-) strand; PAM type: NNGRRT; PAM sequence: CTGGGT
cagtacagaaagccacatgc

SEQ ID NO: 22183 - DNA, 20 bp, Artificial Sequence
  Description of Artificial Sequence: Synthetic oligonucleotide
  Target: LAMA2; (-) strand; PAM type: NNGRRT; PAM sequence: TGGGAT
aaacttaatagtaaatactg

SEQ ID NO: 22184 - DNA, 20 bp, Artificial Sequence
  Description of Artificial Sequence: Synthetic oligonucleotide
  Target: LAMA2; (-) strand; PAM type: NNGRRT; PAM sequence: GTGGAT
tccccacaccatagtaatga

SEQ ID NO: 22185 - DNA, 20 bp, Artificial Sequence
  Description of Artificial Sequence: Synthetic oligonucleotide
  Target: LAMA2; (-) strand; PAM type: NNGRRT; PAM sequence: ATGAGT
tacctccccacaccatagta

SEQ ID NO: 22186 - DNA, 20 bp, Artificial Sequence
  Description of Artificial Sequence: Synthetic oligonucleotide
  Target: LAMA2; (-) strand; PAM type: NNGRRT; PAM sequence: ATGGAT
atactgaaacatatcttaat

SEQ ID NO: 22187 - DNA, 20 bp, Artificial Sequence
  Description of Artificial Sequence: Synthetic oligonucleotide
  Target: LAMA2; (-) strand; PAM type: NNGRRT; PAM sequence: ATGGAT
taaaaggtaagtaaaacaaa

SEQ ID NO: 22188 - DNA, 20 bp, Artificial Sequence
  Description of Artificial Sequence: Synthetic oligonucleotide
  Target: LAMA2; (-) strand; PAM type: NNGRRT; PAM sequence: AAGAAT
tgcataaaagtgtcagctgg

SEQ ID NO: 22189 - DNA, 20 bp, Artificial Sequence
  Description of Artificial Sequence: Synthetic oligonucleotide
  Target: LAMA2; (-) strand; PAM type: NNGRRT; PAM sequence: AAGAGT
cataaaatatctgaagagag

SEQ ID NO: 22190 - DNA, 20 bp, Artificial Sequence
  Description of Artificial Sequence: Synthetic oligonucleotide
  Target: LAMA2; (-) strand; PAM type: NNGRRT; PAM sequence: AAGAAT
gaaaatgtaagatacataga

SEQ ID NO: 22191 - DNA, 20 bp, Artificial Sequence
  Description of Artificial Sequence: Synthetic oligonucleotide
  Target: LAMA2; (-) strand; PAM type: NNGRRT; PAM sequence: TTGGAT
tagaactaaaataaaagtta

SEQ ID NO: 22192 - DNA, 20 bp, Artificial Sequence
  Description of Artificial Sequence: Synthetic oligonucleotide
  Target: LAMA2; (-) strand; PAM type: NNGRRT; PAM sequence: CTGAAT
aatggtaaacttaacaataa

SEQ ID NO: 22193 - DNA, 20 bp, Artificial Sequence
  Description of Artificial Sequence: Synthetic oligonucleotide
  Target: LAMA2; (-) strand; PAM type: NNGRRT; PAM sequence: CTGGGT
tagcaccactgccctctagc

SEQ ID NO: 22194 - DNA, 20 bp, Artificial Sequence
  Description of Artificial Sequence: Synthetic oligonucleotide
  Target: LAMA2; (-) strand; PAM type: NNGRRT; PAM sequence: AGGAGT
caggcagatcacttgaggtc

SEQ ID NO: 22195 - DNA, 20 bp, Artificial Sequence
  Description of Artificial Sequence: Synthetic oligonucleotide
  Target: LAMA2; (-) strand; PAM type: NNGRRT; PAM sequence: AGGAAT
gaggatatctttaagaagct

SEQ ID NO: 22196 - DNA, 20 bp, Artificial Sequence
  Description of Artificial Sequence: Synthetic oligonucleotide
  Target: LAMA2; (-) strand; PAM type: NNGRRT; PAM sequence: GAGGAT
atatcttatcctgattgaaa

SEQ ID NO: 22197 - DNA, 20 bp, Artificial Sequence
  Description of Artificial Sequence: Synthetic oligonucleotide
  Target: LAMA2; (-) strand; PAM type: NNGRRT; PAM sequence: ATGAGT
cactctccacaattaagcat

SEQ ID NO: 22198 - DNA, 20 bp, Artificial Sequence
  Description of Artificial Sequence: Synthetic oligonucleotide
  Target: LAMA2; (-) strand; PAM type: NNGRRT; PAM sequence: ATGGAT
agtaattatttctggaattc

SEQ ID NO: 22199 - DNA, 20 bp, Artificial Sequence
  Description of Artificial Sequence: Synthetic oligonucleotide
  Target: LAMA2; (-) strand; PAM type: NNGRRT; PAM sequence: TGGAAT
agcaagatagtaattatttc

SEQ ID NO: 22200 - DNA, 20 bp, Artificial Sequence
  Description of Artificial Sequence: Synthetic oligonucleotide
  Target: LAMA2; (-) strand; PAM type: NNGRRT; PAM sequence: TTGAAT
ccttcctctcaaattgccta

SEQ ID NO: 22201 - DNA, 20 bp, Artificial Sequence
  Description of Artificial Sequence: Synthetic oligonucleotide
  Target: LAMA2; (-) strand; PAM type: NNGRRT; PAM sequence: AAGAAT
tatacatttaattcttgctt

SEQ ID NO: 22202 - DNA, 20 bp, Artificial Sequence
  Description of Artificial Sequence: Synthetic oligonucleotide
  Target: LAMA2; (-) strand; PAM type: NNGRRT; PAM sequence: TAGAAT
tcagaaaatagacatgcttt

SEQ ID NO: 22203 - DNA, 20 bp, Artificial Sequence
  Description of Artificial Sequence: Synthetic oligonucleotide
  Target: LAMA2; (-) strand; PAM type: NNGRRT; PAM sequence: AGGGAT
atttattttttacttcatct

SEQ ID NO: 22204 - DNA, 20 bp, Artificial Sequence
  Description of Artificial Sequence: Synthetic oligonucleotide
  Target: LAMA2; (-) strand; PAM type: NNGRRT; PAM sequence: GTGAGT
gttgcctaaattcaaaagtt

SEQ ID NO: 22205 - DNA, 20 bp, Artificial Sequence
  Description of Artificial Sequence: Synthetic oligonucleotide
  Target: LAMA2; (-) strand; PAM type: NNGRRT; PAM sequence: CAGAGT
gaggccatttcaaagatgaa

SEQ ID NO: 22206 - DNA, 20 bp, Artificial Sequence
  Description of Artificial Sequence: Synthetic oligonucleotide
  Target: LAMA2; (-) strand; PAM type: NNGRRT; PAM sequence: GGGAGT
agtttcctcacttactgtgt

SEQ ID NO: 22207 - DNA, 20 bp, Artificial Sequence
  Description of Artificial Sequence: Synthetic oligonucleotide
  Target: LAMA2; (-) strand; PAM type: NNGRRT; PAM sequence: ATGGAT
agagggcattgcactgtata

SEQ ID NO: 22208 - DNA, 20 bp, Artificial Sequence
  Description of Artificial Sequence: Synthetic oligonucleotide
  Target: LAMA2; (-) strand; PAM type: NNGRRT; PAM sequence: CAGAGT
gaatcaaggcactctgactg

SEQ ID NO: 22209 - DNA, 20 bp, Artificial Sequence
  Description of Artificial Sequence: Synthetic oligonucleotide
  Target: LAMA2; (-) strand; PAM type: NNGRRT; PAM sequence: TTGAAT
gtaaggggtgaagccaggat

SEQ ID NO: 22210 - DNA, 20 bp, Artificial Sequence
  Description of Artificial Sequence: Synthetic oligonucleotide
  Target: LAMA2; (-) strand; PAM type: NNGRRT; PAM sequence: CAGGAT
ctaccagtaaggggtgaagc

SEQ ID NO: 22211 - DNA, 20 bp, Artificial Sequence
  Description of Artificial Sequence: Synthetic oligonucleotide
  Target: LAMA2; (-) strand; PAM type: NNGRRT; PAM sequence: AGGGGT
gtaggctcacactaccagta

SEQ ID NO: 22212 - DNA, 20 bp, Artificial Sequence
  Description of Artificial Sequence: Synthetic oligonucleotide
  Target: LAMA2; (-) strand; PAM type: NNGRRT; PAM sequence: TTGAGT
cctcattcaggttaaataaa

SEQ ID NO: 22213 - DNA, 20 bp, Artificial Sequence
  Description of Artificial Sequence: Synthetic oligonucleotide
  Target: LAMA2; (-) strand; PAM type: NNGRRT; PAM sequence: GTGAGT
caaatccttacaaaaactct

SEQ ID NO: 22214 - DNA, 20 bp, Artificial Sequence
  Description of Artificial Sequence: Synthetic oligonucleotide
  Target: LAMA2; (-) strand; PAM type: NNGRRT; PAM sequence: TTGAGT
gtaatgttctaagcctttta

SEQ ID NO: 22215 - DNA, 20 bp, Artificial Sequence
  Description of Artificial Sequence: Synthetic oligonucleotide
  Target: LAMA2; (-) strand; PAM type: NNGRRT; PAM sequence: ATGAAT
aatctagcatagcgctagac

SEQ ID NO: 22216 - DNA, 20 bp, Artificial Sequence
  Description of Artificial Sequence: Synthetic oligonucleotide
  Target: LAMA2; (-) strand; PAM type: NNGRRT; PAM sequence: AGGGGT
cacgtgaagacaaagaaaga

SEQ ID NO: 22217 - DNA, 20 bp, Artificial Sequence
  Description of Artificial Sequence: Synthetic oligonucleotide
  Target: LAMA2; (-) strand; PAM type: NNGRRT; PAM sequence: TGGGAT
tgaggctggagcctcatgag

SEQ ID NO: 22218 - DNA, 20 bp, Artificial Sequence
  Description of Artificial Sequence: Synthetic oligonucleotide
  Target: LAMA2; (-) strand; PAM type: NNGRRT; PAM sequence: ATGAGT
catcatgaggctggagcctc

SEQ ID NO: 22219 - DNA, 20 bp, Artificial Sequence
  Description of Artificial Sequence: Synthetic oligonucleotide
  Target: LAMA2; (-) strand; PAM type: NNGRRT; PAM sequence: GGGGGT
tctccaaatatcatcatgtt

SEQ ID NO: 22220 - DNA, 20 bp, Artificial Sequence
  Description of Artificial Sequence: Synthetic oligonucleotide
  Target: LAMA2; (-) strand; PAM type: NNGRRT; PAM sequence: GTGAGT
gataaagaaaaacaagataa

SEQ ID NO: 22221 - DNA, 20 bp, Artificial Sequence
  Description of Artificial Sequence: Synthetic oligonucleotide
  Target: LAMA2; (-) strand; PAM type: NNGRRT; PAM sequence: CTGGGT
gagcatagttacaaggtgat

SEQ ID NO: 22222 - DNA, 20 bp, Artificial Sequence
  Description of Artificial Sequence: Synthetic oligonucleotide
  Target: LAMA2; (-) strand; PAM type: NNGRRT; PAM sequence: TAGGAT
gtacaggatttattaatgcc

SEQ ID NO: 22223 - DNA, 20 bp, Artificial Sequence
  Description of Artificial Sequence: Synthetic oligonucleotide
  Target: LAMA2; (-) strand; PAM type: NNGRRT; PAM sequence: CAGGAT
cataataacatgcctatgta

SEQ ID NO: 22224 - DNA, 20 bp, Artificial Sequence
  Description of Artificial Sequence: Synthetic oligonucleotide
  Target: LAMA2; (-) strand; PAM type: NNGRRT; PAM sequence: CAGGGT
taggagaaataatctgacta

SEQ ID NO: 22225 - DNA, 20 bp, Artificial Sequence
  Description of Artificial Sequence: Synthetic oligonucleotide
  Target: LAMA2; (-) strand; PAM type: NNGRRT; PAM sequence: TAGAGT
ttttaaaataagaattatga

SEQ ID NO: 22226 - DNA, 20 bp, Artificial Sequence
  Description of Artificial Sequence: Synthetic oligonucleotide
  Target: LAMA2; (-) strand; PAM type: NNGRRT; PAM sequence: AAGAAT
tattattttctttttaaaat

SEQ ID NO: 22227 - DNA, 20 bp, Artificial Sequence
  Description of Artificial Sequence: Synthetic oligonucleotide
  Target: LAMA2; (-) strand; PAM type: NNGRRT; PAM sequence: GTGAAT
ggtttacaaaacaaaaaata

SEQ ID NO: 22228 - DNA, 20 bp, Artificial Sequence
  Description of Artificial Sequence: Synthetic oligonucleotide
  Target: LAMA2; (-) strand; PAM type: NNGRRT; PAM sequence: GTGGAT
tctggagaacgcagtttgtg

SEQ ID NO: 22229 - DNA, 20 bp, Artificial Sequence
  Description of Artificial Sequence: Synthetic oligonucleotide
  Target: LAMA2; (-) strand; PAM type: NNGRRT; PAM sequence: GAGAGT
tcaaactcatttaatcagca

SEQ ID NO: 22230 - DNA, 20 bp, Artificial Sequence
  Description of Artificial Sequence: Synthetic oligonucleotide
  Target: LAMA2; (-) strand; PAM type: NNGRRT; PAM sequence: TAGGAT
ctcttggcctccaaaagtgc

SEQ ID NO: 22231 - DNA, 20 bp, Artificial Sequence
  Description of Artificial Sequence: Synthetic oligonucleotide
  Target: LAMA2; (-) strand; PAM type: NNGRRT; PAM sequence: CTGGAT
accatgctggtctcgaactc

SEQ ID NO: 22232 - DNA, 20 bp, Artificial Sequence
  Description of Artificial Sequence: Synthetic oligonucleotide
  Target: LAMA2; (-) strand; PAM type: NNGRRT; PAM sequence: TTGAAT
ttagtttgatatgtgttatt

SEQ ID NO: 22233 - DNA, 20 bp, Artificial Sequence
  Description of Artificial Sequence: Synthetic oligonucleotide
  Target: LAMA2; (-) strand; PAM type: NNGRRT; PAM sequence: TGGGAT
tgataaacttgatattttac

SEQ ID NO: 22234 - DNA, 20 bp, Artificial Sequence
  Description of Artificial Sequence: Synthetic oligonucleotide
  Target: LAMA2; (-) strand; PAM type: NNGRRT; PAM sequence: CTGAAT
atagcagttattattttttg

SEQ ID NO: 22235 - DNA, 20 bp, Artificial Sequence
  Description of Artificial Sequence: Synthetic oligonucleotide
  Target: LAMA2; (-) strand; PAM type: NNGRRT; PAM sequence: ATGGAT
aacaaaccagcatttgaaac

SEQ ID NO: 22236 - DNA, 20 bp, Artificial Sequence
  Description of Artificial Sequence: Synthetic oligonucleotide
  Target: LAMA2; (-) strand; PAM type: NNGRRT; PAM sequence: AAGGAT
atattttcaatcttgtgcac

SEQ ID NO: 22237 - DNA, 20 bp, Artificial Sequence
  Description of Artificial Sequence: Synthetic oligonucleotide
  Target: LAMA2; (-) strand; PAM type: NNGRRT; PAM sequence: CTGGGT
agatatcactagagtgtact

SEQ ID NO: 22238 - DNA, 20 bp, Artificial Sequence
  Description of Artificial Sequence: Synthetic oligonucleotide
  Target: LAMA2; (-) strand; PAM type: NNGRRT; PAM sequence: TAGAGT
ctcatcattggagatatcac

SEQ ID NO: 22239 - DNA, 20 bp, Artificial Sequence
  Description of Artificial Sequence: Synthetic oligonucleotide
  Target: LAMA2; (-) strand; PAM type: NNGRRT; PAM sequence: CTGAAT
tactttcagctttatattat

SEQ ID NO: 22240 - DNA, 20 bp, Artificial Sequence
  Description of Artificial Sequence: Synthetic oligonucleotide
  Target: LAMA2; (-) strand; PAM type: NNGRRT; PAM sequence: CAGGAT
taattcatagtatcatctgt

SEQ ID NO: 22241 - DNA, 20 bp, Artificial Sequence
  Description of Artificial Sequence: Synthetic oligonucleotide
  Target: LAMA2; (-) strand; PAM type: NNGRRT; PAM sequence: CTGAGT
gaacaaacaagtgagcttac

SEQ ID NO: 22242 - DNA, 20 bp, Artificial Sequence
  Description of Artificial Sequence: Synthetic oligonucleotide
  Target: LAMA2; (-) strand; PAM type: NNGRRT; PAM sequence: AGGAAT
acataattaacagatgccac

SEQ ID NO: 22243 - DNA, 20 bp, Artificial Sequence
  Description of Artificial Sequence: Synthetic oligonucleotide
  Target: LAMA2; (-) strand; PAM type: NNGRRT; PAM sequence: GAGAAT
ctgttctttcccctaaacta

SEQ ID NO: 22244 - DNA, 20 bp, Artificial Sequence
  Description of Artificial Sequence: Synthetic oligonucleotide
  Target: LAMA2; (-) strand; PAM type: NNGRRT; PAM sequence: ATGAAT
agtaaggactcttacttcac

SEQ ID NO: 22245 - DNA, 20 bp, Artificial Sequence
  Description of Artificial Sequence: Synthetic oligonucleotide
  Target: LAMA2; (-) strand; PAM type: NNGRRT; PAM sequence: GTGAAT
atgccctgtgttggcaccta

SEQ ID NO: 22246 - DNA, 20 bp, Artificial Sequence
  Description of Artificial Sequence: Synthetic oligonucleotide
  Target: LAMA2; (-) strand; PAM type: NNGRRT; PAM sequence: TTGGAT
aatgtacttcctcccttgat

SEQ ID NO: 22247 - DNA, 20 bp, Artificial Sequence
  Description of Artificial Sequence: Synthetic oligonucleotide
  Target: LAMA2; (-) strand; PAM type: NNGRRT; PAM sequence: CAGGGT
aaacatttagcaatcttact

SEQ ID NO: 22248 - DNA, 20 bp, Artificial Sequence
  Description of Artificial Sequence: Synthetic oligonucleotide
  Target: LAMA2; (-) strand; PAM type: NNGRRT; PAM sequence: AAGAAT
gggaaggtcctcaaatatct

SEQ ID NO: 22249 - DNA, 20 bp, Artificial Sequence
  Description of Artificial Sequence: Synthetic oligonucleotide
  Target: LAMA2; (-) strand; PAM type: NNGRRT; PAM sequence: GTGAGT
ttgatgcattctaattttca

SEQ ID NO: 22250 - DNA, 20 bp, Artificial Sequence
  Description of Artificial Sequence: Synthetic oligonucleotide
  Target: LAMA2; (-) strand; PAM type: NNGRRT; PAM sequence: GTGAAT
ctgtgaagtttttccttacg

SEQ ID NO: 22251 - DNA, 20 bp, Artificial Sequence
  Description of Artificial Sequence: Synthetic oligonucleotide
  Target: LAMA2; (-) strand; PAM type: NNGRRT; PAM sequence: ATGAAT
cttgagatatcattaaatgc

SEQ ID NO: 22252 - DNA, 20 bp, Artificial Sequence
  Description of Artificial Sequence: Synthetic oligonucleotide
  Target: LAMA2; (-) strand; PAM type: NNGRRT; PAM sequence: AGGAAT
atctaaccttcttgccatac

SEQ ID NO: 22253 - DNA, 20 bp, Artificial Sequence
  Description of Artificial Sequence: Synthetic oligonucleotide
  Target: LAMA2; (-) strand; PAM type: NNGRRT; PAM sequence: CAGAAT
gtatctcttcaataatacat

SEQ ID NO: 22254 - DNA, 20 bp, Artificial Sequence
  Description of Artificial Sequence: Synthetic oligonucleotide
  Target: LAMA2; (-) strand; PAM type: NNGRRT; PAM sequence: AAGAGT
agaagtttaattatattctc

SEQ ID NO: 22255 - DNA, 20 bp, Artificial Sequence
  Description of Artificial Sequence: Synthetic oligonucleotide
  Target: LAMA2; (-) strand; PAM type: NNGRRT; PAM sequence: TTGGAT
ttaggggaaattcctatatt

SEQ ID NO: 22256 - DNA, 20 bp, Artificial Sequence
  Description of Artificial Sequence: Synthetic oligonucleotide
  Target: LAMA2; (-) strand; PAM type: NNGRRT; PAM sequence: TTGAAT
gacatactaaacttggttaa

SEQ ID NO: 22257 - DNA, 20 bp, Artificial Sequence
  Description of Artificial Sequence: Synthetic oligonucleotide
  Target: LAMA2; (-) strand; PAM type: NNGRRT; PAM sequence: GAGGGT
tcaatcttctcaatctttca

SEQ ID NO: 22258 - DNA, 20 bp, Artificial Sequence
  Description of Artificial Sequence: Synthetic oligonucleotide
  Target: LAMA2; (-) strand; PAM type: NNGRRT; PAM sequence: CTGAAT
cctaaatataacattagtaa

SEQ ID NO: 22259 - DNA, 20 bp, Artificial Sequence
  Description of Artificial Sequence: Synthetic oligonucleotide
  Target: LAMA2; (-) strand; PAM type: NNGRRT; PAM sequence: ATGAAT
tgcagtaaaataattgcata

SEQ ID NO: 22260 - DNA, 20 bp, Artificial Sequence
  Description of Artificial Sequence: Synthetic oligonucleotide
  Target: LAMA2; (-) strand; PAM type: NNGRRT; PAM sequence: TGGGAT
atgaatgtgccaaaaataca

SEQ ID NO: 22261 - DNA, 20 bp, Artificial Sequence
  Description of Artificial Sequence: Synthetic oligonucleotide
  Target: LAMA2; (-) strand; PAM type: NNGRRT; PAM sequence: ATGAAT
taagaacttattttatagag

SEQ ID NO: 22262 - DNA, 20 bp, Artificial Sequence
  Description of Artificial Sequence: Synthetic oligonucleotide
  Target: LAMA2; (-) strand; PAM type: NNGRRT; PAM sequence: GGGAGT
tgatgaataagtgttaactg

SEQ ID NO: 22263 - DNA, 20 bp, Artificial Sequence
  Description of Artificial Sequence: Synthetic oligonucleotide
  Target: LAMA2; (-) strand; PAM type: NNGRRT; PAM sequence: ATGAAT
ttcagcaaggtgtcatgctg

SEQ ID NO: 22264 - DNA, 20 bp, Artificial Sequence
  Description of Artificial Sequence: Synthetic oligonucleotide
  Target: LAMA2; (-) strand; PAM type: NNGRRT; PAM sequence: ATGAAT
ccaagataaaataattatct

SEQ ID NO: 22265 - DNA, 20 bp, Artificial Sequence
  Description of Artificial Sequence: Synthetic oligonucleotide
  Target: LAMA2; (-) strand; PAM type: NNGRRT; PAM sequence: ATGAAT
tattttgaatgactgaatga

SEQ ID NO: 22266 - DNA, 20 bp, Artificial Sequence
  Description of Artificial Sequence: Synthetic oligonucleotide
  Target: LAMA2; (-) strand; PAM type: NNGRRT; PAM sequence: ATGAAT
tgactattttgaatgactga

SEQ ID NO: 22267 - DNA, 20 bp, Artificial Sequence
  Description of Artificial Sequence: Synthetic oligonucleotide
  Target: LAMA2; (-) strand; PAM type: NNGRRT; PAM sequence: CTGAAT
tcgatgactattttgaatga

SEQ ID NO: 22268 - DNA, 20 bp, Artificial Sequence
  Description of Artificial Sequence: Synthetic oligonucleotide
  Target: LAMA2; (-) strand; PAM type: NNGRRT; PAM sequence: TTGAAT
ggaggcattcgatgactatt

SEQ ID NO: 22269 - DNA, 20 bp, Artificial Sequence
  Description of Artificial Sequence: Synthetic oligonucleotide
  Target: LAMA2; (-) strand; PAM type: NNGRRT; PAM sequence: GCGGAT
atctgaaattctcaaattat

SEQ ID NO: 22270 - DNA, 20 bp, Artificial Sequence
  Description of Artificial Sequence: Synthetic oligonucleotide
  Target: LAMA2; (-) strand; PAM type: NNGRRT; PAM sequence: ATGAAT
agctcccaaatgcagtcagg

SEQ ID NO: 22271 - DNA, 20 bp, Artificial Sequence
  Description of Artificial Sequence: Synthetic oligonucleotide
  Target: LAMA2; (-) strand; PAM type: NNGRRT; PAM sequence: CAGGAT
cactagctcccaaatgcagt

SEQ ID NO: 22272 - DNA, 20 bp, Artificial Sequence
  Description of Artificial Sequence: Synthetic oligonucleotide
  Target: LAMA2; (-) strand; PAM type: NNGRRT; PAM sequence: CAGAGT
ctggtgatttctccacactg

SEQ ID NO: 22273 - DNA, 20 bp, Artificial Sequence
  Description of Artificial Sequence: Synthetic oligonucleotide
  Target: LAMA2; (-) strand; PAM type: NNGRRT; PAM sequence: TAGAAT
tcatattttatttggattat

SEQ ID NO: 22274 - DNA, 20 bp, Artificial Sequence
  Description of Artificial Sequence: Synthetic oligonucleotide
  Target: LAMA2; (-) strand; PAM type: NNGRRT; PAM sequence: TTGGAT
tggccactgtcatattttat

SEQ ID NO: 22275 - DNA, 20 bp, Artificial Sequence
  Description of Artificial Sequence: Synthetic oligonucleotide
  Target: LAMA2; (-) strand; PAM type: NNGRRT; PAM sequence: ATGAGT
tccattagatcatcagttcc

SEQ ID NO: 22276 - DNA, 20 bp, Artificial Sequence
  Description of Artificial Sequence: Synthetic oligonucleotide
  Target: LAMA2; (-) strand; PAM type: NNGRRT; PAM sequence: TTGAAT
cttctgcttctaattgcttc

SEQ ID NO: 22277 - DNA, 20 bp, Artificial Sequence
  Description of Artificial Sequence: Synthetic oligonucleotide
  Target: LAMA2; (-) strand; PAM type: NNGRRT; PAM sequence: ATGGGT
attcagcctggatatctcta

SEQ ID NO: 22278 - DNA, 20 bp, Artificial Sequence
  Description of Artificial Sequence: Synthetic oligonucleotide
  Target: LAMA2; (-) strand; PAM type: NNGRRT; PAM sequence: CTGGAT
ctgtattttatgtattcagc

SEQ ID NO: 22279 - DNA, 20 bp, Artificial Sequence
  Description of Artificial Sequence: Synthetic oligonucleotide
  Target: LAMA2; (-) strand; PAM type: NNGRRT; PAM sequence: TCGAAT
tctcctacttctgcggctac

SEQ ID NO: 22280 - DNA, 20 bp, Artificial Sequence
  Description of Artificial Sequence: Synthetic oligonucleotide
  Target: LAMA2; (-) strand; PAM type: NNGRRT; PAM sequence: AAGAGT
ccagcccccatggcttcttt

SEQ ID NO: 22281 - DNA, 20 bp, Artificial Sequence
  Description of Artificial Sequence: Synthetic oligonucleotide
  Target: LAMA2; (-) strand; PAM type: NNGRRT; PAM sequence: TGGGAT
gccctggcctcccaaagtgt

SEQ ID NO: 22282 - DNA, 20 bp, Artificial Sequence
  Description of Artificial Sequence: Synthetic oligonucleotide
  Target: LAMA2; (-) strand; PAM type: NNGRRT; PAM sequence: CAGGAT
cggggtttcaccatgctggc

SEQ ID NO: 22283 - DNA, 20 bp, Artificial Sequence
  Description of Artificial Sequence: Synthetic oligonucleotide
  Target: LAMA2; (-) strand; PAM type: NNGRRT; PAM sequence: CGGGGT
tttcgtattttcagtaaaga

SEQ ID NO: 22284 - DNA, 20 bp, Artificial Sequence
  Description of Artificial Sequence: Synthetic oligonucleotide
  Target: LAMA2; (-) strand; PAM type: NNGRRT; PAM sequence: CTGAGT
gattctcctgcctcagcctc

SEQ ID NO: 22285 - DNA, 20 bp, Artificial Sequence
  Description of Artificial Sequence: Synthetic oligonucleotide
  Target: LAMA2; (-) strand; PAM type: NNGRRT; PAM sequence: TGGAGT
gtctcgctctgtagtcaggc

SEQ ID NO: 22286 - DNA, 20 bp, Artificial Sequence
  Description of Artificial Sequence: Synthetic oligonucleotide
  Target: LAMA2; (-) strand; PAM type: NNGRRT; PAM sequence: CTGGAT
gtagccattgatagatattt

SEQ ID NO: 22287 - DNA, 20 bp, Artificial Sequence
  Description of Artificial Sequence: Synthetic oligonucleotide
  Target: LAMA2; (-) strand; PAM type: NNGRRT; PAM sequence: CAGGAT
ttcaccattaaacataatac

SEQ ID NO: 22288 - DNA, 20 bp, Artificial Sequence
  Description of Artificial Sequence: Synthetic oligonucleotide
  Target: LAMA2; (-) strand; PAM type: NNGRRT; PAM sequence: TTGGAT
agagataagaaagctctaat

SEQ ID NO: 22289 - DNA, 20 bp, Artificial Sequence
  Description of Artificial Sequence: Synthetic oligonucleotide
  Target: LAMA2; (-) strand; PAM type: NNGRRT; PAM sequence: TGGGGT
ttttgtatttttagtagaga

SEQ ID NO: 22290 - DNA, 20 bp, Artificial Sequence
  Description of Artificial Sequence: Synthetic oligonucleotide
  Target: LAMA2; (-) strand; PAM type: NNGRRT; PAM sequence: CCGAGT
gattctcctgcctcaccttc

SEQ ID NO: 22291 - DNA, 20 bp, Artificial Sequence
  Description of Artificial Sequence: Synthetic oligonucleotide
  Target: LAMA2; (-) strand; PAM type: NNGRRT; PAM sequence: AGGGAT
aacctctgcctcctgaataa

SEQ ID NO: 22292 - DNA, 20 bp, Artificial Sequence
  Description of Artificial Sequence: Synthetic oligonucleotide
  Target: LAMA2; (-) strand; PAM type: NNGRRT; PAM sequence: CTGAAT
ctcactgcaacctctgcctc

SEQ ID NO: 22293 - DNA, 20 bp, Artificial Sequence
  Description of Artificial Sequence: Synthetic oligonucleotide
  Target: LAMA2; (-) strand; PAM type: NNGRRT; PAM sequence: TGGAGT
cagagctctgtcgcccaggc

SEQ ID NO: 22294 - DNA, 20 bp, Artificial Sequence
  Description of Artificial Sequence: Synthetic oligonucleotide
  Target: LAMA2; (-) strand; PAM type: NNGRRT; PAM sequence: ATGAAT
agattttataacaatgtgaa

SEQ ID NO: 22295 - DNA, 20 bp, Artificial Sequence
  Description of Artificial Sequence: Synthetic oligonucleotide
  Target: LAMA2; (-) strand; PAM type: NNGRRT; PAM sequence: GTGAAT
gaaactatgacattgccaca

SEQ ID NO: 22296 - DNA, 20 bp, Artificial Sequence
  Description of Artificial Sequence: Synthetic oligonucleotide
  Target: LAMA2; (-) strand; PAM type: NNGRRT; PAM sequence: GAGAGT
aacttctattaactcttttt

SEQ ID NO: 22297 - DNA, 20 bp, Artificial Sequence
  Description of Artificial Sequence: Synthetic oligonucleotide
  Target: LAMA2; (-) strand; PAM type: NNGRRT; PAM sequence: TGGAAT
ttccaccacagatattgcca

SEQ ID NO: 22298 - DNA, 20 bp, Artificial Sequence
  Description of Artificial Sequence: Synthetic oligonucleotide
  Target: LAMA2; (-) strand; PAM type: NNGRRT; PAM sequence: GGGAAT
tggccagacaattgttggta

SEQ ID NO: 22299 - DNA, 20 bp, Artificial Sequence
  Description of Artificial Sequence: Synthetic oligonucleotide
  Target: LAMA2; (-) strand; PAM type: NNGRRT; PAM sequence: AAGAAT
gcttcatttagtcaatcaag

SEQ ID NO: 22300 - DNA, 20 bp, Artificial Sequence
  Description of Artificial Sequence: Synthetic oligonucleotide
  Target: LAMA2; (-) strand; PAM type: NNGRRT; PAM sequence: TTGGAT
acgaagccgccagcttgaac

SEQ ID NO: 22301 - DNA, 20 bp, Artificial Sequence
  Description of Artificial Sequence: Synthetic oligonucleotide
  Target: LAMA2; (-) strand; PAM type: NNGRRT; PAM sequence: GTGAAT
caaactagatggacatgtta

SEQ ID NO: 22302 - DNA, 20 bp, Artificial Sequence
  Description of Artificial Sequence: Synthetic oligonucleotide
  Target: LAMA2; (-) strand; PAM type: NNGRRT; PAM sequence: TGGAGT
ggattttataagacaggatt

SEQ ID NO: 22303 - DNA, 20 bp, Artificial Sequence
  Description of Artificial Sequence: Synthetic oligonucleotide
  Target: LAMA2; (-) strand; PAM type: NNGRRT; PAM sequence: CAGGAT
tttagctggattttataaga

SEQ ID NO: 22304 - DNA, 20 bp, Artificial Sequence
  Description of Artificial Sequence: Synthetic oligonucleotide
  Target: LAMA2; (-) strand; PAM type: NNGRRT; PAM sequence: CTGGAT
aatttggaattgaattttag

SEQ ID NO: 22305 - DNA, 20 bp, Artificial Sequence
  Description of Artificial Sequence: Synthetic oligonucleotide
  Target: LAMA2; (-) strand; PAM type: NNGRRT; PAM sequence: TTGAAT
aggaagaagggaatttggaa

SEQ ID NO: 22306 - DNA, 20 bp, Artificial Sequence
  Description of Artificial Sequence: Synthetic oligonucleotide
  Target: LAMA2; (-) strand; PAM type: NNGRRT; PAM sequence: TGGAAT
gaaaaaggaagaagggaatt

SEQ ID NO: 22307 - DNA, 20 bp, Artificial Sequence
  Description of Artificial Sequence: Synthetic oligonucleotide
  Target: LAMA2; (-) strand; PAM type: NNGRRT; PAM sequence: GGGAAT
gagttgagaaaaaggaagaa

SEQ ID NO: 22308 - DNA, 20 bp, Artificial Sequence
  Description of Artificial Sequence: Synthetic oligonucleotide
  Target: LAMA2; (-) strand; PAM type: NNGRRT; PAM sequence: GAGAGT
ggaatgcgatccttgcattt

SEQ ID NO: 22309 - DNA, 20 bp, Artificial Sequence
  Description of Artificial Sequence: Synthetic oligonucleotide
  Target: LAMA2; (-) strand; PAM type: NNGRRT; PAM sequence: GGGAAT
aacattgaatgttatcttgt

SEQ ID NO: 22310 - DNA, 20 bp, Artificial Sequence
  Description of Artificial Sequence: Synthetic oligonucleotide
  Target: LAMA2; (-) strand; PAM type: NNGRRT; PAM sequence: TTGAAT
atggcagcaagaatgcaaca

SEQ ID NO: 22311 - DNA, 20 bp, Artificial Sequence
  Description of Artificial Sequence: Synthetic oligonucleotide
  Target: LAMA2; (-) strand; PAM type: NNGRRT; PAM sequence: AAGAAT
caaaaaataaacatggcagc

SEQ ID NO: 22312 - DNA, 20 bp, Artificial Sequence
  Description of Artificial Sequence: Synthetic oligonucleotide
  Target: LAMA2; (-) strand; PAM type: NNGRRT; PAM sequence: TGGAAT
aggagttaggaagagctaca

SEQ ID NO: 22313 - DNA, 20 bp, Artificial Sequence
  Description of Artificial Sequence: Synthetic oligonucleotide
  Target: LAMA2; (-) strand; PAM type: NNGRRT; PAM sequence: AGGAGT
caataatcaattatgcaata

SEQ ID NO: 22314 - DNA, 20 bp, Artificial Sequence
  Description of Artificial Sequence: Synthetic oligonucleotide
  Target: LAMA2; (-) strand; PAM type: NNGRRT; PAM sequence: CAGAAT
aaattaaaattttcatgaag

SEQ ID NO: 22315 - DNA, 20 bp, Artificial Sequence
  Description of Artificial Sequence: Synthetic oligonucleotide
  Target: LAMA2; (-) strand; PAM type: NNGRRT; PAM sequence: CAGAAT
caaagaaatgagaatagctt

SEQ ID NO: 22316 - DNA, 20 bp, Artificial Sequence
  Description of Artificial Sequence: Synthetic oligonucleotide
  Target: LAMA2; (-) strand; PAM type: NNGRRT; PAM sequence: GAGAAT
acacctttccacaaagaaat

SEQ ID NO: 22317 - DNA, 20 bp, Artificial Sequence
  Description of Artificial Sequence: Synthetic oligonucleotide
  Target: LAMA2; (-) strand; PAM type: NNGRRT; PAM sequence: TGGGGT
gcttgcataataagagacat

SEQ ID NO: 22318 - DNA, 20 bp, Artificial Sequence
  Description of Artificial Sequence: Synthetic oligonucleotide
  Target: LAMA2; (-) strand; PAM type: NNGRRT; PAM sequence: AGGAGT
gtggttcttcataaatacag

SEQ ID NO: 22319 - DNA, 20 bp, Artificial Sequence
  Description of Artificial Sequence: Synthetic oligonucleotide
  Target: LAMA2; (-) strand; PAM type: NNGRRT; PAM sequence: TCGAGT
tctaaattggggaatagact

SEQ ID NO: 22320 - DNA, 20 bp, Artificial Sequence
  Description of Artificial Sequence: Synthetic oligonucleotide
  Target: LAMA2; (-) strand; PAM type: NNGRRT; PAM sequence: GGGAAT
ttttctcctactctaaattg

SEQ ID NO: 22321 - DNA, 20 bp, Artificial Sequence
  Description of Artificial Sequence: Synthetic oligonucleotide
  Target: LAMA2; (-) strand; PAM type: NNGRRT; PAM sequence: CTGAAT
gagttgctattctcttttcc

SEQ ID NO: 22322 - DNA, 20 bp, Artificial Sequence
  Description of Artificial Sequence: Synthetic oligonucleotide
  Target: LAMA2; (-) strand; PAM type: NNGRRT; PAM sequence: AAGAGT
atcgtagctacactgacaat

SEQ ID NO: 22323 - DNA, 20 bp, Artificial Sequence
  Description of Artificial Sequence: Synthetic oligonucleotide
  Target: LAMA2; (-) strand; PAM type: NNGRRT; PAM sequence: ATGAAT
ttatcatacagtccctagct

SEQ ID NO: 22324 - DNA, 20 bp, Artificial Sequence
  Description of Artificial Sequence: Synthetic oligonucleotide
  Target: LAMA2; (-) strand; PAM type: NNGRRT; PAM sequence: TAGAAT
gtttttaatttagtgatagt

SEQ ID NO: 22325 - DNA, 20 bp, Artificial Sequence
  Description of Artificial Sequence: Synthetic oligonucleotide
  Target: LAMA2; (-) strand; PAM type: NNGRRT; PAM sequence: CAGAGT
taagtattatttacttggga

SEQ ID NO: 22326 - DNA, 20 bp, Artificial Sequence
  Description of Artificial Sequence: Synthetic oligonucleotide
  Target: LAMA2; (-) strand; PAM type: NNGRRT; PAM sequence: TTGAAT
ttgataattatttcccaatc

SEQ ID NO: 22327 - DNA, 20 bp, Artificial Sequence
  Description of Artificial Sequence: Synthetic oligonucleotide
  Target: LAMA2; (-) strand; PAM type: NNGRRT; PAM sequence: CAGAAT
catcaatgtataaaccagtg

SEQ ID NO: 22328 - DNA, 20 bp, Artificial Sequence
  Description of Artificial Sequence: Synthetic oligonucleotide
  Target: LAMA2; (-) strand; PAM type: NNGRRT; PAM sequence: TAGGGT
aaaaggtaaatgaaaacacc

SEQ ID NO: 22329 - DNA, 20 bp, Artificial Sequence
  Description of Artificial Sequence: Synthetic oligonucleotide
  Target: LAMA2; (-) strand; PAM type: NNGRRT; PAM sequence: TAGAGT
tattttcaaaagcaaattct

SEQ ID NO: 22330 - DNA, 20 bp, Artificial Sequence
  Description of Artificial Sequence: Synthetic oligonucleotide
  Target: LAMA2; (-) strand; PAM type: NNGRRT; PAM sequence: CAGAAT
aacactcaagataaagtgtc

SEQ ID NO: 22331 - DNA, 20 bp, Artificial Sequence
  Description of Artificial Sequence: Synthetic oligonucleotide
  Target: LAMA2; (-) strand; PAM type: NNGRRT; PAM sequence: GTGAGT
agccgaagattaagaagaaa

SEQ ID NO: 22332 - DNA, 20 bp, Artificial Sequence
  Description of Artificial Sequence: Synthetic oligonucleotide
  Target: LAMA2; (-) strand; PAM type: NNGRRT; PAM sequence: CAGAAT
tgatttacaggaaatgtttt

SEQ ID NO: 22333 - DNA, 20 bp, Artificial Sequence
  Description of Artificial Sequence: Synthetic oligonucleotide
  Target: LAMA2; (-) strand; PAM type: NNGRRT; PAM sequence: CTGGAT
atacacatactacttggtcc

SEQ ID NO: 22334 - DNA, 20 bp, Artificial Sequence
  Description of Artificial Sequence: Synthetic oligonucleotide
  Target: LAMA2; (-) strand; PAM type: NNGRRT; PAM sequence: GGGAAT
ttattatagtgtactcacca

SEQ ID NO: 22335 - DNA, 20 bp, Artificial Sequence
  Description of Artificial Sequence: Synthetic oligonucleotide
  Target: LAMA2; (-) strand; PAM type: NNGRRT; PAM sequence: TTGAAT
aagtgtggtgttttgtgcct

SEQ ID NO: 22336 - DNA, 20 bp, Artificial Sequence
  Description of Artificial Sequence: Synthetic oligonucleotide
  Target: LAMA2; (-) strand; PAM type: NNGRRT; PAM sequence: AAGGAT
tatttcttagactggtattt

SEQ ID NO: 22337 - DNA, 20 bp, Artificial Sequence
  Description of Artificial Sequence: Synthetic oligonucleotide
  Target: LAMA2; (-) strand; PAM type: NNGRRT; PAM sequence: CCGAAT
ccctcacatctaattagttt

SEQ ID NO: 22338 - DNA, 20 bp, Artificial Sequence
  Description of Artificial Sequence: Synthetic oligonucleotide
  Target: LAMA2; (-) strand; PAM type: NNGRRT; PAM sequence: GGGGGT
ttaatagcaccaccattttt

SEQ ID NO: 22339 - DNA, 20 bp, Artificial Sequence
  Description of Artificial Sequence: Synthetic oligonucleotide
  Target: LAMA2; (-) strand; PAM type: NNGRRT; PAM sequence: TTGGAT
attctttctatatactcgcc

SEQ ID NO: 22340 - DNA, 20 bp, Artificial Sequence
  Description of Artificial Sequence: Synthetic oligonucleotide
  Target: LAMA2; (-) strand; PAM type: NNGRRT; PAM sequence: CTGGGT
ggtgtcaatggcagtgccgc

SEQ ID NO: 22341 - DNA, 20 bp, Artificial Sequence
  Description of Artificial Sequence: Synthetic oligonucleotide
  Target: LAMA2; (-) strand; PAM type: NNGRRT; PAM sequence: TTGGGT
gtcaattgccaccatattca

SEQ ID NO: 22342 - DNA, 20 bp, Artificial Sequence
  Description of Artificial Sequence: Synthetic oligonucleotide
  Target: LAMA2; (-) strand; PAM type: NNGRRT; PAM sequence: AGGGGT
ttggaactccttcagaaatg

SEQ ID NO: 22343 - DNA, 20 bp, Artificial Sequence
  Description of Artificial Sequence: Synthetic oligonucleotide
  Target: LAMA2; (-) strand; PAM type: NNGRRT; PAM sequence: GAGAGT
caaaattcatcaatgactct

SEQ ID NO: 22344 - DNA, 20 bp, Artificial Sequence
  Description of Artificial Sequence: Synthetic oligonucleotide
  Target: LAMA2; (-) strand; PAM type: NNGRRT; PAM sequence: CAGGGT
tattgatcctgctaaccaat

SEQ ID NO: 22345 - DNA, 20 bp, Artificial Sequence
  Description of Artificial Sequence: Synthetic oligonucleotide
  Target: LAMA2; (-) strand; PAM type: NNGRRT; PAM sequence: CAGGGT
atttgatattttgattcttt

SEQ ID NO: 22346 - DNA, 20 bp, Artificial Sequence
  Description of Artificial Sequence: Synthetic oligonucleotide
  Target: LAMA2; (-) strand; PAM type: NNGRRT; PAM sequence: GTGGAT
ataaaaaagtgtatcttaca

SEQ ID NO: 22347 - DNA, 20 bp, Artificial Sequence
  Description of Artificial Sequence: Synthetic oligonucleotide
  Target: LAMA2; (-) strand; PAM type: NNGRRT; PAM sequence: TTGAGT
taagtgactcatgaaatcca

SEQ ID NO: 22348 - DNA, 20 bp, Artificial Sequence
  Description of Artificial Sequence: Synthetic oligonucleotide
  Target: LAMA2; (-) strand; PAM type: NNGRRT; PAM sequence: CAGAAT
agcctcctccatctattcct

SEQ ID NO: 22349 - DNA, 20 bp, Artificial Sequence
  Description of Artificial Sequence: Synthetic oligonucleotide
  Target: LAMA2; (-) strand; PAM type: NNGRRT; PAM sequence: ATGAGT
cttgaactaatgccgtggaa

SEQ ID NO: 22350 - DNA, 20 bp, Artificial Sequence
  Description of Artificial Sequence: Synthetic oligonucleotide
  Target: LAMA2; (-) strand; PAM type: NNGRRT; PAM sequence: AAGAGT
gagcactgccactccgtcat

SEQ ID NO: 22351 - DNA, 20 bp, Artificial Sequence
  Description of Artificial Sequence: Synthetic oligonucleotide
  Target: LAMA2; (-) strand; PAM type: NNGRRT; PAM sequence: AAGGGT
ggaaggcactggaaacttct

SEQ ID NO: 22352 - DNA, 20 bp, Artificial Sequence
  Description of Artificial Sequence: Synthetic oligonucleotide
  Target: LAMA2; (-) strand; PAM type: NNGRRT; PAM sequence: AAGAGT
cagagggtttctaatgctca

SEQ ID NO: 22353 - DNA, 20 bp, Artificial Sequence
  Description of Artificial Sequence: Synthetic oligonucleotide
  Target: LAMA2; (-) strand; PAM type: NNGRRT; PAM sequence: GAGGGT
ggaaaggtagtcagattaca

SEQ ID NO: 22354 - DNA, 20 bp, Artificial Sequence
  Description of Artificial Sequence: Synthetic oligonucleotide
  Target: LAMA2; (-) strand; PAM type: NNGRRT; PAM sequence: TGGAGT
aaacttggcattatatagaa

SEQ ID NO: 22355 - DNA, 20 bp, Artificial Sequence
  Description of Artificial Sequence: Synthetic oligonucleotide
  Target: LAMA2; (-) strand; PAM type: NNGRRT; PAM sequence: TAGAAT
atgccaaacttggcattata

SEQ ID NO: 22356 - DNA, 20 bp, Artificial Sequence
  Description of Artificial Sequence: Synthetic oligonucleotide
  Target: LAMA2; (-) strand; PAM type: NNGRRT; PAM sequence: GGGAAT
atttcacagggattgtctga

SEQ ID NO: 22357 - DNA, 20 bp, Artificial Sequence
  Description of Artificial Sequence: Synthetic oligonucleotide
  Target: LAMA2; (-) strand; PAM type: NNGRRT; PAM sequence: AGGGAT
aaaaataaattagatttcac

SEQ ID NO: 22358 - DNA, 20 bp, Artificial Sequence
  Description of Artificial Sequence: Synthetic oligonucleotide
  Target: LAMA2; (-) strand; PAM type: NNGRRT; PAM sequence: TAGGGT
gataggttttgtggcagagg

SEQ ID NO: 22359 - DNA, 20 bp, Artificial Sequence
  Description of Artificial Sequence: Synthetic oligonucleotide
  Target: LAMA2; (-) strand; PAM type: NNGRRT; PAM sequence: ATGGAT
tacaaaatacattctgtgct

SEQ ID NO: 22360 - DNA, 20 bp, Artificial Sequence
  Description of Artificial Sequence: Synthetic oligonucleotide
  Target: LAMA2; (-) strand; PAM type: NNGRRT; PAM sequence: AAGAAT
agtaaatgttcatctcctga

SEQ ID NO: 22361 - DNA, 20 bp, Artificial Sequence
  Description of Artificial Sequence: Synthetic oligonucleotide
  Target: LAMA2; (-) strand; PAM type: NNGRRT; PAM sequence: TGGGAT
ttatcttttattcatagtgt

SEQ ID NO: 22362 - DNA, 20 bp, Artificial Sequence
  Description of Artificial Sequence: Synthetic oligonucleotide
  Target: LAMA2; (-) strand; PAM type: NNGRRT; PAM sequence: AAGAAT
agacattatgtttaccttca

SEQ ID NO: 22363 - DNA, 20 bp, Artificial Sequence
  Description of Artificial Sequence: Synthetic oligonucleotide
  Target: LAMA2; (-) strand; PAM type: NNGRRT; PAM sequence: TTGAAT
gggccctcattaactttttc

SEQ ID NO: 22364 - DNA, 20 bp, Artificial Sequence
  Description of Artificial Sequence: Synthetic oligonucleotide
  Target: LAMA2; (-) strand; PAM type: NNGRRT; PAM sequence: TTGAGT
acgaagagccatgcctagca

SEQ ID NO: 22365 - DNA, 20 bp, Artificial Sequence
  Description of Artificial Sequence: Synthetic oligonucleotide
  Target: LAMA2; (-) strand; PAM type: NNGRRT; PAM sequence: TTGAGT
ccttcatcactctaagttcc

SEQ ID NO: 22366 - DNA, 20 bp, Artificial Sequence
  Description of Artificial Sequence: Synthetic oligonucleotide
  Target: LAMA2; (-) strand; PAM type: NNGRRT; PAM sequence: ATGGGT
cctcctgttatctgccaagc

SEQ ID NO: 22367 - DNA, 20 bp, Artificial Sequence
  Description of Artificial Sequence: Synthetic oligonucleotide
  Target: LAMA2; (-) strand; PAM type: NNGRRT; PAM sequence: GAGAGT
ggaagatttttagccctcag

SEQ ID NO: 22368 - DNA, 20 bp, Artificial Sequence
  Description of Artificial Sequence: Synthetic oligonucleotide
  Target: LAMA2; (-) strand; PAM type: NNGRRT; PAM sequence: CTGGAT
tgcttccatcaataacacca

SEQ ID NO: 22369 - DNA, 20 bp, Artificial Sequence
  Description of Artificial Sequence: Synthetic oligonucleotide
  Target: LAMA2; (-) strand; PAM type: NNGRRT; PAM sequence: AGGGAT
aatgatctcacttagtccta

SEQ ID NO: 22370 - DNA, 20 bp, Artificial Sequence
  Description of Artificial Sequence: Synthetic oligonucleotide
  Target: LAMA2; (-) strand; PAM type: NNGRRT; PAM sequence: CTGAAT
gttcccttctcctctctcct

SEQ ID NO: 22371 - DNA, 20 bp, Artificial Sequence
  Description of Artificial Sequence: Synthetic oligonucleotide
  Target: LAMA2; (-) strand; PAM type: NNGRRT; PAM sequence: TTGGAT
ttccttttcagtttcctttg

SEQ ID NO: 22372 - DNA, 20 bp, Artificial Sequence
  Description of Artificial Sequence: Synthetic oligonucleotide
  Target: LAMA2; (-) strand; PAM type: NNGRRT; PAM sequence: CAGAAT
taattccaaactcccctcaa

SEQ ID NO: 22373 - DNA, 20 bp, Artificial Sequence
  Description of Artificial Sequence: Synthetic oligonucleotide
  Target: LAMA2; (-) strand; PAM type: NNGRRT; PAM sequence: TTGAGT
gattccatctcacttgaagc

SEQ ID NO: 22374 - DNA, 20 bp, Artificial Sequence
  Description of Artificial Sequence: Synthetic oligonucleotide
  Target: LAMA2; (-) strand; PAM type: NNGRRT; PAM sequence: AGGGAT
aaaggtcttctggagggagt

SEQ ID NO: 22375 - DNA, 20 bp, Artificial Sequence
  Description of Artificial Sequence: Synthetic oligonucleotide
  Target: LAMA2; (-) strand; PAM type: NNGRRT; PAM sequence: GGGAGT
cacataaaaggtcttctgga

SEQ ID NO: 22376 - DNA, 20 bp, Artificial Sequence
  Description of Artificial Sequence: Synthetic oligonucleotide
  Target: LAMA2; (-) strand; PAM type: NNGRRT; PAM sequence: GTGGAT
tttcaaattatgatattatg

SEQ ID NO: 22377 - DNA, 20 bp, Artificial Sequence
  Description of Artificial Sequence: Synthetic oligonucleotide
  Target: LAMA2; (-) strand; PAM type: NNGRRT; PAM sequence: TTGAAT
gtataggaatgtagtaattc

SEQ ID NO: 22378 - DNA, 20 bp, Artificial Sequence
  Description of Artificial Sequence: Synthetic oligonucleotide
  Target: LAMA2; (-) strand; PAM type: NNGRRT; PAM sequence: AGGAAT
taataaagtgtttactgtat

SEQ ID NO: 22379 - DNA, 20 bp, Artificial Sequence
  Description of Artificial Sequence: Synthetic oligonucleotide
  Target: LAMA2; (-) strand; PAM type: NNGRRT; PAM sequence: ATGAGT
gttacatcaatagtacatga

SEQ ID NO: 22380 - DNA, 20 bp, Artificial Sequence
  Description of Artificial Sequence: Synthetic oligonucleotide
  Target: LAMA2; (-) strand; PAM type: NNGRRT; PAM sequence: ATGAAT
atgcgttacatcaatagtac

SEQ ID NO: 22381 - DNA, 20 bp, Artificial Sequence
  Description of Artificial Sequence: Synthetic oligonucleotide
  Target: LAMA2; (-) strand; PAM type: NNGRRT; PAM sequence: CTGAAT
tgcattcccgttagataaaa

SEQ ID NO: 22382 - DNA, 20 bp, Artificial Sequence
  Description of Artificial Sequence: Synthetic oligonucleotide
  Target: LAMA2; (-) strand; PAM type: NNGRRT; PAM sequence: TTGGGT
aactatattagcatgtagtt

SEQ ID NO: 22383 - DNA, 20 bp, Artificial Sequence
  Description of Artificial Sequence: Synthetic oligonucleotide
  Target: LAMA2; (-) strand; PAM type: NNGRRT; PAM sequence: CTGGAT
acagccagtctgtcttgctc

SEQ ID NO: 22384 - DNA, 20 bp, Artificial Sequence
  Description of Artificial Sequence: Synthetic oligonucleotide
  Target: LAMA2; (-) strand; PAM type: NNGRRT; PAM sequence: TGGAAT
gtgtgaatacatgtttcact

SEQ ID NO: 22385 - DNA, 20 bp, Artificial Sequence
  Description of Artificial Sequence: Synthetic oligonucleotide
  Target: LAMA2; (-) strand; PAM type: NNGRRT; PAM sequence: GTGAAT
ggtgcttcaagacgtgaagt

SEQ ID NO: 22386 - DNA, 20 bp, Artificial Sequence
  Description of Artificial Sequence: Synthetic oligonucleotide
  Target: LAMA2; (-) strand; PAM type: NNGRRT; PAM sequence: TGGAAT
ttatgcacattgtctgatag

SEQ ID NO: 22387 - DNA, 20 bp, Artificial Sequence
  Description of Artificial Sequence: Synthetic oligonucleotide
  Target: LAMA2; (-) strand; PAM type: NNGRRT; PAM sequence: TAGAAT
aatcaaaagaaaaatctgac

SEQ ID NO: 22388 - DNA, 20 bp, Artificial Sequence
  Description of Artificial Sequence: Synthetic oligonucleotide
  Target: LAMA2; (-) strand; PAM type: NNGRRT; PAM sequence: ATGAAT
ttaataatgatgtgacagcc

SEQ ID NO: 22389 - DNA, 20 bp, Artificial Sequence
  Description of Artificial Sequence: Synthetic oligonucleotide
  Target: LAMA2; (-) strand; PAM type: NNGRRT; PAM sequence: TGGAAT
cacaaagcatgttaatattc

SEQ ID NO: 22390 - DNA, 20 bp, Artificial Sequence
  Description of Artificial Sequence: Synthetic oligonucleotide
  Target: LAMA2; (-) strand; PAM type: NNGRRT; PAM sequence: ATGGAT
tatatattgtttggtttatg

SEQ ID NO: 22391 - DNA, 20 bp, Artificial Sequence
  Description of Artificial Sequence: Synthetic oligonucleotide
  Target: LAMA2; (-) strand; PAM type: NNGRRT; PAM sequence: AAGGAT
tgaaactgaatcagaaagaa

SEQ ID NO: 22392 - DNA, 20 bp, Artificial Sequence
  Description of Artificial Sequence: Synthetic oligonucleotide
  Target: LAMA2; (-) strand; PAM type: NNGRRT; PAM sequence: CTGAAT
cgacacaagaggggctgaaa

SEQ ID NO: 22393 - DNA, 20 bp, Artificial Sequence
  Description of Artificial Sequence: Synthetic oligonucleotide
  Target: LAMA2; (-) strand; PAM type: NNGRRT; PAM sequence: ATGAAT
atattgaagttcttcaaata

SEQ ID NO: 22394 - DNA, 20 bp, Artificial Sequence
  Description of Artificial Sequence: Synthetic oligonucleotide
  Target: LAMA2; (-) strand; PAM type: NNGRRT; PAM sequence: AAGGAT
cattgtaatttaaacttcta

SEQ ID NO: 22395 - DNA, 20 bp, Artificial Sequence
  Description of Artificial Sequence: Synthetic oligonucleotide
  Target: LAMA2; (-) strand; PAM type: NNGRRT; PAM sequence: TGGAAT
ttagataattgtaaatagtt

SEQ ID NO: 22396 - DNA, 20 bp, Artificial Sequence
  Description of Artificial Sequence: Synthetic oligonucleotide
  Target: LAMA2; (-) strand; PAM type: NNGRRT; PAM sequence: GTGAAT
atagtgttcagaacaatgac

SEQ ID NO: 22397 - DNA, 20 bp, Artificial Sequence
  Description of Artificial Sequence: Synthetic oligonucleotide
  Target: LAMA2; (-) strand; PAM type: NNGRRT; PAM sequence: TTGAGT
ttcttgatactatttatatt

SEQ ID NO: 22398 - DNA, 20 bp, Artificial Sequence
  Description of Artificial Sequence: Synthetic oligonucleotide
  Target: LAMA2; (-) strand; PAM type: NNGRRT; PAM sequence: CTGGGT
aataacaaatactttattgt

SEQ ID NO: 22399 - DNA, 20 bp, Artificial Sequence
  Description of Artificial Sequence: Synthetic oligonucleotide
  Target: LAMA2; (-) strand; PAM type: NNGRRT; PAM sequence: CTGAAT
ttgcctattgaaaaggaaaa

SEQ ID NO: 22400 - DNA, 20 bp, Artificial Sequence
  Description of Artificial Sequence: Synthetic oligonucleotide
  Target: LAMA2; (-) strand; PAM type: NNGRRT; PAM sequence: GAGAAT
tttaccatttggattacact

SEQ ID NO: 22401 - DNA, 20 bp, Artificial Sequence
  Description of Artificial Sequence: Synthetic oligonucleotide
  Target: LAMA2; (-) strand; PAM type: NNGRRT; PAM sequence: TTGGAT
tgtactccttaatttaccat

SEQ ID NO: 22402 - DNA, 20 bp, Artificial Sequence
  Description of Artificial Sequence: Synthetic oligonucleotide
  Target: LAMA2; (-) strand; PAM type: NNGRRT; PAM sequence: CAGGAT
tggtgacaagtttgaatatc

SEQ ID NO: 22403 - DNA, 20 bp, Artificial Sequence
  Description of Artificial Sequence: Synthetic oligonucleotide
  Target: LAMA2; (-) strand; PAM type: NNGRRT; PAM sequence: TTGAAT
caaaagtggtggtgacaagt

SEQ ID NO: 22404 - DNA, 20 bp, Artificial Sequence
  Description of Artificial Sequence: Synthetic oligonucleotide
  Target: LAMA2; (-) strand; PAM type: NNGRRT; PAM sequence: ATGGAT
gttggaattgagcgaagtct

SEQ ID NO: 22405 - DNA, 20 bp, Artificial Sequence
  Description of Artificial Sequence: Synthetic oligonucleotide
  Target: LAMA2; (-) strand; PAM type: NNGRRT; PAM sequence: TGGAAT
atggaatgtagctgaactgt

SEQ ID NO: 22406 - DNA, 20 bp, Artificial Sequence
  Description of Artificial Sequence: Synthetic oligonucleotide
  Target: LAMA2; (-) strand; PAM type: NNGRRT; PAM sequence: TGGAAT
gagattatagatgaggaaaa

SEQ ID NO: 22407 - DNA, 20 bp, Artificial Sequence
  Description of Artificial Sequence: Synthetic oligonucleotide
  Target: LAMA2; (-) strand; PAM type: NNGRRT; PAM sequence: GCGGGT
catgggccactgcaggaagg

SEQ ID NO: 22408 - DNA, 20 bp, Artificial Sequence
  Description of Artificial Sequence: Synthetic oligonucleotide
  Target: LAMA2; (-) strand; PAM type: NNGRRT; PAM sequence: TGGAGT
ccagtcttagcctgattcca

SEQ ID NO: 22409 - DNA, 20 bp, Artificial Sequence
  Description of Artificial Sequence: Synthetic oligonucleotide
  Target: LAMA2; (-) strand; PAM type: NNGRRT; PAM sequence: AAGGGT
ggaaaagaaaagctctaatc

SEQ ID NO: 22410 - DNA, 20 bp, Artificial Sequence
  Description of Artificial Sequence: Synthetic oligonucleotide
  Target: LAMA2; (-) strand; PAM type: NNGRRT; PAM sequence: GTGGGT
taggagaatctagcaaagga

SEQ ID NO: 22411 - DNA, 20 bp, Artificial Sequence
  Description of Artificial Sequence: Synthetic oligonucleotide
  Target: LAMA2; (-) strand; PAM type: NNGRRT; PAM sequence: AGGAGT
ttcctaggagaatctagcaa

SEQ ID NO: 22412 - DNA, 20 bp, Artificial Sequence
  Description of Artificial Sequence: Synthetic oligonucleotide
  Target: LAMA2; (-) strand; PAM type: NNGRRT; PAM sequence: GAGAAT
taccatttaagtgttcctag

SEQ ID NO: 22413 - DNA, 20 bp, Artificial Sequence
  Description of Artificial Sequence: Synthetic oligonucleotide
  Target: LAMA2; (-) strand; PAM type: NNGRRT; PAM sequence: GTGGAT
atataaaacaagactcttaa

SEQ ID NO: 22414 - DNA, 20 bp, Artificial Sequence
  Description of Artificial Sequence: Synthetic oligonucleotide
  Target: LAMA2; (-) strand; PAM type: NNGRRT; PAM sequence: TGGGAT
caaatgtataaaaattgcat

SEQ ID NO: 22415 - DNA, 20 bp, Artificial Sequence
  Description of Artificial Sequence: Synthetic oligonucleotide
  Target: LAMA2; (-) strand; PAM type: NNGRRT; PAM sequence: ACGGAT
tgtgtttagagttaccacat

SEQ ID NO: 22416 - DNA, 20 bp, Artificial Sequence
  Description of Artificial Sequence: Synthetic oligonucleotide
  Target: LAMA2; (-) strand; PAM type: NNGRRT; PAM sequence: TAGAGT
caaatattggatactgtgtt

SEQ ID NO: 22417 - DNA, 20 bp, Artificial Sequence
  Description of Artificial Sequence: Synthetic oligonucleotide
  Target: LAMA2; (-) strand; PAM type: NNGRRT; PAM sequence: TTGGAT
gttttatatatatgcaaata

SEQ ID NO: 22418 - DNA, 20 bp, Artificial Sequence
  Description of Artificial Sequence: Synthetic oligonucleotide
  Target: LAMA2; (-) strand; PAM type: NNGRRT; PAM sequence: GTGAAT
tttctgttggtatggaaatt

SEQ ID NO: 22419 - DNA, 20 bp, Artificial Sequence
  Description of Artificial Sequence: Synthetic oligonucleotide
  Target: LAMA2; (-) strand; PAM type: NNGRRT; PAM sequence: ATGAGT
tttttagatttggtgttgct

SEQ ID NO: 22420 - DNA, 20 bp, Artificial Sequence
  Description of Artificial Sequence: Synthetic oligonucleotide
  Target: LAMA2; (-) strand; PAM type: NNGRRT; PAM sequence: GTGGGT
atgaataccaaagctcactg

SEQ ID NO: 22421 - DNA, 20 bp, Artificial Sequence
  Description of Artificial Sequence: Synthetic oligonucleotide
  Target: LAMA2; (-) strand; PAM type: NNGRRT; PAM sequence: ATGAAT
aaataaatattagtctaacc

SEQ ID NO: 22422 - DNA, 20 bp, Artificial Sequence
  Description of Artificial Sequence: Synthetic oligonucleotide
  Target: LAMA2; (-) strand; PAM type: NNGRRT; PAM sequence: ATGAAT
tatatcataatttttttttc

SEQ ID NO: 22423 - DNA, 20 bp, Artificial Sequence
  Description of Artificial Sequence: Synthetic oligonucleotide
  Target: LAMA2; (-) strand; PAM type: NNGRRT; PAM sequence: CTGGAT
cttttatcgattaaatacta

SEQ ID NO: 22424 - DNA, 20 bp, Artificial Sequence
  Description of Artificial Sequence: Synthetic oligonucleotide
  Target: LAMA2; (-) strand; PAM type: NNGRRT; PAM sequence: ATGAAT
tcatttatatgttagagatg

SEQ ID NO: 22425 - DNA, 20 bp, Artificial Sequence
  Description of Artificial Sequence: Synthetic oligonucleotide
  Target: LAMA2; (-) strand; PAM type: NNGRRT; PAM sequence: CTGAAT
agaactttggtttaatatag

SEQ ID NO: 22426 - DNA, 20 bp, Artificial Sequence
  Description of Artificial Sequence: Synthetic oligonucleotide
  Target: LAMA2; (-) strand; PAM type: NNGRRT; PAM sequence: AGGGAT
aggagaggtttctatattac

SEQ ID NO: 22427 - DNA, 20 bp, Artificial Sequence
  Description of Artificial Sequence: Synthetic oligonucleotide
  Target: LAMA2; (-) strand; PAM type: NNGRRT; PAM sequence: AAGAGT
atgttcaaagagtttattac

SEQ ID NO: 22428 - DNA, 20 bp, Artificial Sequence
  Description of Artificial Sequence: Synthetic oligonucleotide
  Target: LAMA2; (-) strand; PAM type: NNGRRT; PAM sequence: AAGAGT
tcagattgattaaatgttca

SEQ ID NO: 22429 - DNA, 20 bp, Artificial Sequence
  Description of Artificial Sequence: Synthetic oligonucleotide
  Target: LAMA2; (-) strand; PAM type: NNGRRT; PAM sequence: AAGAGT
ttgattatttttttcaatga

SEQ ID NO: 22430 - DNA, 20 bp, Artificial Sequence
  Description of Artificial Sequence: Synthetic oligonucleotide
  Target: LAMA2; (-) strand; PAM type: NNGRRT; PAM sequence: GGGGAT
gaggaagttgagagacagta

SEQ ID NO: 22431 - DNA, 20 bp, Artificial Sequence
  Description of Artificial Sequence: Synthetic oligonucleotide
  Target: LAMA2; (-) strand; PAM type: NNGRRT; PAM sequence: TAGAAT
gtgtaaatataacaaacagt

SEQ ID NO: 22432 - DNA, 20 bp, Artificial Sequence
  Description of Artificial Sequence: Synthetic oligonucleotide
  Target: LAMA2; (-) strand; PAM type: NNGRRT; PAM sequence: CTGGAT
aaagtagaaagagaatccaa

SEQ ID NO: 22433 - DNA, 20 bp, Artificial Sequence
  Description of Artificial Sequence: Synthetic oligonucleotide
  Target: LAMA2; (-) strand; PAM type: NNGRRT; PAM sequence: GAGAAT
ctgatttggaaaagtagaaa

SEQ ID NO: 22434 - DNA, 20 bp, Artificial Sequence
  Description of Artificial Sequence: Synthetic oligonucleotide
  Target: LAMA2; (-) strand; PAM type: NNGRRT; PAM sequence: GTGGGT
tttcatgtgtatctgtggaa

SEQ ID NO: 22435 - DNA, 20 bp, Artificial Sequence
  Description of Artificial Sequence: Synthetic oligonucleotide
  Target: LAMA2; (-) strand; PAM type: NNGRRT; PAM sequence: ATGGAT
tttgccatatcttcctcaag

SEQ ID NO: 22436 - DNA, 20 bp, Artificial Sequence
  Description of Artificial Sequence: Synthetic oligonucleotide
  Target: LAMA2; (-) strand; PAM type: NNGRRT; PAM sequence: ATGAAT
ttctgggcttccctatactc

SEQ ID NO: 22437 - DNA, 20 bp, Artificial Sequence
  Description of Artificial Sequence: Synthetic oligonucleotide
  Target: LAMA2; (-) strand; PAM type: NNGRRT; PAM sequence: ATGAGT
gtcctcttgtataattagag

SEQ ID NO: 22438 - DNA, 20 bp, Artificial Sequence
  Description of Artificial Sequence: Synthetic oligonucleotide
  Target: LAMA2; (-) strand; PAM type: NNGRRT; PAM sequence: GTGGGT
aaatgggccaaatttggcct

SEQ ID NO: 22439 - DNA, 20 bp, Artificial Sequence
  Description of Artificial Sequence: Synthetic oligonucleotide
  Target: LAMA2; (-) strand; PAM type: NNGRRT; PAM sequence: CAGAAT
gttcttaattgagtgccata

SEQ ID NO: 22440 - DNA, 20 bp, Artificial Sequence
  Description of Artificial Sequence: Synthetic oligonucleotide
  Target: LAMA2; (-) strand; PAM type: NNGRRT; PAM sequence: TTGAGT
cctgtaacaacagttcttaa

SEQ ID NO: 22441 - DNA, 20 bp, Artificial Sequence
  Description of Artificial Sequence: Synthetic oligonucleotide
  Target: LAMA2; (-) strand; PAM type: NNGRRT; PAM sequence: TTGGGT
ggtttgaaattatccttcat

SEQ ID NO: 22442 - DNA, 20 bp, Artificial Sequence
  Description of Artificial Sequence: Synthetic oligonucleotide
  Target: LAMA2; (-) strand; PAM type: NNGRRT; PAM sequence: TTGGAT
caggctactaatgagaagaa

SEQ ID NO: 22443 - DNA, 20 bp, Artificial Sequence
  Description of Artificial Sequence: Synthetic oligonucleotide
  Target: LAMA2; (-) strand; PAM type: NNGRRT; PAM sequence: AAGAAT
aatatcaggctactaatgag

SEQ ID NO: 22444 - DNA, 20 bp, Artificial Sequence
  Description of Artificial Sequence: Synthetic oligonucleotide
  Target: LAMA2; (-) strand; PAM type: NNGRRT; PAM sequence: TGGAAT
aagcattctgctgttgttga

SEQ ID NO: 22445 - DNA, 20 bp, Artificial Sequence
  Description of Artificial Sequence: Synthetic oligonucleotide
  Target: LAMA2; (-) strand; PAM type: NNGRRT; PAM sequence: AAGGGT
attagttaacttttcctgta

SEQ ID NO: 22446 - DNA, 20 bp, Artificial Sequence
  Description of Artificial Sequence: Synthetic oligonucleotide
  Target: LAMA2; (-) strand; PAM type: NNGRRT; PAM sequence: AAGAGT
gatgcaacaaaactgatagc

SEQ ID NO: 22447 - DNA, 20 bp, Artificial Sequence
  Description of Artificial Sequence: Synthetic oligonucleotide
  Target: LAMA2; (-) strand; PAM type: NNGRRT; PAM sequence: CTGAAT
cagtatagccaggggcacac

SEQ ID NO: 22448 - DNA, 20 bp, Artificial Sequence
  Description of Artificial Sequence: Synthetic oligonucleotide
  Target: LAMA2; (-) strand; PAM type: NNGRRT; PAM sequence: CAGGGT
acattcttggcaggagcctc

SEQ ID NO: 22449 - DNA, 20 bp, Artificial Sequence
  Description of Artificial Sequence: Synthetic oligonucleotide
  Target: LAMA2; (-) strand; PAM type: NNGRRT; PAM sequence: AGGGAT
gggcacaggcagtgagccat

SEQ ID NO: 22450 - DNA, 20 bp, Artificial Sequence
  Description of Artificial Sequence: Synthetic oligonucleotide
  Target: LAMA2; (-) strand; PAM type: NNGRRT; PAM sequence: CAGGGT
gcacgtgcagaatcctgtga

SEQ ID NO: 22451 - DNA, 20 bp, Artificial Sequence
  Description of Artificial Sequence: Synthetic oligonucleotide
  Target: LAMA2; (-) strand; PAM type: NNGRRT; PAM sequence: CAGAAT
tggctccaggtcggcacgtg

SEQ ID NO: 22452 - DNA, 20 bp, Artificial Sequence
  Description of Artificial Sequence: Synthetic oligonucleotide
  Target: LAMA2; (-) strand; PAM type: NNGRRT; PAM sequence: TGGAAT
cattggaaatgagacagaac

SEQ ID NO: 22453 - DNA, 20 bp, Artificial Sequence
  Description of Artificial Sequence: Synthetic oligonucleotide
  Target: LAMA2; (-) strand; PAM type: NNGRRT; PAM sequence: GAGAGT
aaaaaaaaaaggcgggcggg

SEQ ID NO: 22454 - DNA, 20 bp, Artificial Sequence
  Description of Artificial Sequence: Synthetic oligonucleotide
  Target: LAMA2; (-) strand; PAM type: NNGRRT; PAM sequence: AAGAGT
agatagtgtcagaaagaatg

SEQ ID NO: 22455 - DNA, 20 bp, Artificial Sequence
  Description of Artificial Sequence: Synthetic oligonucleotide
  Target: LAMA2; (-) strand; PAM type: NNGRRT; PAM sequence: AAGAAT
ggtggatagatagtgtcaga

SEQ ID NO: 22456 - DNA, 20 bp, Artificial Sequence
  Description of Artificial Sequence: Synthetic oligonucleotide
  Target: LAMA2; (-) strand; PAM type: NNGRRT; PAM sequence: GTGGAT
cagcaggtgaacagcagaag

SEQ ID NO: 22457 - DNA, 20 bp, Artificial Sequence
  Description of Artificial Sequence: Synthetic oligonucleotide
  Target: LAMA2; (-) strand; PAM type: NNGRRT; PAM sequence: CAGGAT
ctcagctgttcttggctcag

SEQ ID NO: 22458 - DNA, 20 bp, Artificial Sequence
  Description of Artificial Sequence: Synthetic oligonucleotide
  Target: LAMA2; (-) strand; PAM type: NNGRRT; PAM sequence: GAGGAT
tgaactgactaaagcacact

SEQ ID NO: 22459 - DNA, 20 bp, Artificial Sequence
  Description of Artificial Sequence: Synthetic oligonucleotide
  Target: LAMA2; (-) strand; PAM type: NNGRRT; PAM sequence: GAGGAT
ccagtcgattacaaattcag

SEQ ID NO: 22460 - DNA, 20 bp, Artificial Sequence
  Description of Artificial Sequence: Synthetic oligonucleotide
  Target: LAMA2; (-) strand; PAM type: NNGRRT; PAM sequence: ATGGAT
aattatgaagcagtatgccc

SEQ ID NO: 22461 - DNA, 20 bp, Artificial Sequence
  Description of Artificial Sequence: Synthetic oligonucleotide
  Target: LAMA2; (-) strand; PAM type: NNGRRT; PAM sequence: ACGGGT
tgacttcattgttactgctt

SEQ ID NO: 22462 - DNA, 20 bp, Artificial Sequence
  Description of Artificial Sequence: Synthetic oligonucleotide
  Target: LAMA2; (-) strand; PAM type: NNGRRT; PAM sequence: GTGAGT
ctgctctccacttactgtac

SEQ ID NO: 22463 - DNA, 20 bp, Artificial Sequence
  Description of Artificial Sequence: Synthetic oligonucleotide
  Target: LAMA2; (-) strand; PAM type: NNGRRT; PAM sequence: CAGAAT
caatatggcactagcgaatc

SEQ ID NO: 22464 - DNA, 20 bp, Artificial Sequence
  Description of Artificial Sequence: Synthetic oligonucleotide
  Target: LAMA2; (-) strand; PAM type: NNGRRT; PAM sequence: GCGAAT
gtactttcaatatggcacta

SEQ ID NO: 22465 - DNA, 20 bp, Artificial Sequence
  Description of Artificial Sequence: Synthetic oligonucleotide
  Target: LAMA2; (-) strand; PAM type: NNGRRT; PAM sequence: AAGAAT
tttgaatgtatgcaagatcc

SEQ ID NO: 22466 - DNA, 20 bp, Artificial Sequence
  Description of Artificial Sequence: Synthetic oligonucleotide
  Target: LAMA2; (-) strand; PAM type: NNGRRT; PAM sequence: TTGAAT
ataaataacctattttggat

SEQ ID NO: 22467 - DNA, 20 bp, Artificial Sequence
  Description of Artificial Sequence: Synthetic oligonucleotide
  Target: LAMA2; (-) strand; PAM type: NNGRRT; PAM sequence: TTGGAT
aaatttataaataacctatt

SEQ ID NO: 22468 - DNA, 20 bp, Artificial Sequence
  Description of Artificial Sequence: Synthetic oligonucleotide
  Target: LAMA2; (-) strand; PAM type: NNGRRT; PAM sequence: AAGAAT
aaataaatttccttgaggaa

SEQ ID NO: 22469 - DNA, 20 bp, Artificial Sequence
  Description of Artificial Sequence: Synthetic oligonucleotide
  Target: LAMA2; (-) strand; PAM type: NNGRRT; PAM sequence: AAGAAT
aatatatcattatacttggg

SEQ ID NO: 22470 - DNA, 20 bp, Artificial Sequence
  Description of Artificial Sequence: Synthetic oligonucleotide
  Target: LAMA2; (-) strand; PAM type: NNGRRT; PAM sequence: AAGAAT
attcaaggactgtttacatt

SEQ ID NO: 22471 - DNA, 20 bp, Artificial Sequence
  Description of Artificial Sequence: Synthetic oligonucleotide
  Target: LAMA2; (-) strand; PAM type: NNGRRT; PAM sequence: CTGGAT
tttttatttcaagtttgctt

SEQ ID NO: 22472 - DNA, 20 bp, Artificial Sequence
  Description of Artificial Sequence: Synthetic oligonucleotide
  Target: LAMA2; (-) strand; PAM type: NNGRRT; PAM sequence: CAGAAT
aagccattgttgttgatggg

SEQ ID NO: 22473 - DNA, 20 bp, Artificial Sequence
  Description of Artificial Sequence: Synthetic oligonucleotide
  Target: LAMA2; (-) strand; PAM type: NNGRRT; PAM sequence: ATGAAT
acatatgtgatagggaaaag

SEQ ID NO: 22474 - DNA, 20 bp, Artificial Sequence
  Description of Artificial Sequence: Synthetic oligonucleotide
  Target: LAMA2; (-) strand; PAM type: NNGRRT; PAM sequence: GAGGAT
ctggtgtagctttgtaactg

SEQ ID NO: 22475 - DNA, 20 bp, Artificial Sequence
  Description of Artificial Sequence: Synthetic oligonucleotide
  Target: LAMA2; (-) strand; PAM type: NNGRRT; PAM sequence: AAGAAT
ggggcaagaataaagcaaat

SEQ ID NO: 22476 - DNA, 20 bp, Artificial Sequence
  Description of Artificial Sequence: Synthetic oligonucleotide
  Target: LAMA2; (-) strand; PAM type: NNGRRT; PAM sequence: AAGAAT
aatacatttccttgtggggc

SEQ ID NO: 22477 - DNA, 20 bp, Artificial Sequence
  Description of Artificial Sequence: Synthetic oligonucleotide
  Target: LAMA2; (-) strand; PAM type: NNGRRT; PAM sequence: AAGAAT
aaaactgctattcttttaaa

SEQ ID NO: 22478 - DNA, 20 bp, Artificial Sequence
  Description of Artificial Sequence: Synthetic oligonucleotide
  Target: LAMA2; (-) strand; PAM type: NNGRRT; PAM sequence: TGGAAT
tataatttaatatttttttc

SEQ ID NO: 22479 - DNA, 20 bp, Artificial Sequence
  Description of Artificial Sequence: Synthetic oligonucleotide
  Target: LAMA2; (-) strand; PAM type: NNGRRT; PAM sequence: AAGAGT
aattaactgtgctttagcaa

SEQ ID NO: 22480 - DNA, 20 bp, Artificial Sequence
  Description of Artificial Sequence: Synthetic oligonucleotide
  Target: LAMA2; (-) strand; PAM type: NNGRRT; PAM sequence: TAGAGT
atactctgtgtaacaattct

SEQ ID NO: 22481 - DNA, 20 bp, Artificial Sequence
  Description of Artificial Sequence: Synthetic oligonucleotide
  Target: LAMA2; (-) strand; PAM type: NNGRRT; PAM sequence: TAGAAT
cctgggaaaggccaagatca

SEQ ID NO: 22482 - DNA, 20 bp, Artificial Sequence
  Description of Artificial Sequence: Synthetic oligonucleotide
  Target: LAMA2; (-) strand; PAM type: NNGRRT; PAM sequence: CCGAAT
actaggagtagaagtagaaa

SEQ ID NO: 22483 - DNA, 20 bp, Artificial Sequence
  Description of Artificial Sequence: Synthetic oligonucleotide
  Target: LAMA2; (-) strand; PAM type: NNGRRT; PAM sequence: AGGAGT
ttttatctgatttcaaaact

SEQ ID NO: 22484 - DNA, 20 bp, Artificial Sequence
  Description of Artificial Sequence: Synthetic oligonucleotide
  Target: LAMA2; (-) strand; PAM type: NNGRRT; PAM sequence: CAGAAT
aaggaaaattgagaataagt

SEQ ID NO: 22485 - DNA, 20 bp, Artificial Sequence
  Description of Artificial Sequence: Synthetic oligonucleotide
  Target: LAMA2; (-) strand; PAM type: NNGRRT; PAM sequence: GAGAAT
aatatattaaaaggaaaatt

SEQ ID NO: 22486 - DNA, 20 bp, Artificial Sequence
  Description of Artificial Sequence: Synthetic oligonucleotide
  Target: LAMA2; (-) strand; PAM type: NNGRRT; PAM sequence: AAGGAT
ctcttgcactaatttagctt

SEQ ID NO: 22487 - DNA, 20 bp, Artificial Sequence
  Description of Artificial Sequence: Synthetic oligonucleotide
  Target: LAMA2; (-) strand; PAM type: NNGRRT; PAM sequence: GTGAAT
ctgcagatcaaacaccccag

SEQ ID NO: 22488 - DNA, 20 bp, Artificial Sequence
  Description of Artificial Sequence: Synthetic oligonucleotide
  Target: LAMA2; (-) strand; PAM type: NNGRRT; PAM sequence: CTGAGT
gtacaatacatgctactaaa

SEQ ID NO: 22489 - DNA, 20 bp, Artificial Sequence
  Description of Artificial Sequence: Synthetic oligonucleotide
  Target: LAMA2; (-) strand; PAM type: NNGRRT; PAM sequence: GTGGAT
gaaatacacaaatccatgat

SEQ ID NO: 22490 - DNA, 20 bp, Artificial Sequence
  Description of Artificial Sequence: Synthetic oligonucleotide
  Target: LAMA2; (-) strand; PAM type: NNGRRT; PAM sequence: GTGAGT
gagcctaaactaaatttaca

SEQ ID NO: 22491 - DNA, 20 bp, Artificial Sequence
  Description of Artificial Sequence: Synthetic oligonucleotide
  Target: LAMA2; (-) strand; PAM type: NNGRRT; PAM sequence: CAGAAT
gttttgcctgatctcttcag

SEQ ID NO: 22492 - DNA, 20 bp, Artificial Sequence
  Description of Artificial Sequence: Synthetic oligonucleotide
  Target: LAMA2; (-) strand; PAM type: NNGRRT; PAM sequence: AGGGGT
ttttggatccagtaaaatcc

SEQ ID NO: 22493 - DNA, 20 bp, Artificial Sequence
  Description of Artificial Sequence: Synthetic oligonucleotide
  Target: LAMA2; (-) strand; PAM type: NNGRRT; PAM sequence: TTGGAT
gtgctgcaaaaaattccatt

SEQ ID NO: 22494 - DNA, 20 bp, Artificial Sequence
  Description of Artificial Sequence: Synthetic oligonucleotide
  Target: LAMA2; (-) strand; PAM type: NNGRRT; PAM sequence: CTGAAT
actgactctgcatggtgggg

SEQ ID NO: 22495 - DNA, 20 bp, Artificial Sequence
  Description of Artificial Sequence: Synthetic oligonucleotide
  Target: LAMA2; (-) strand; PAM type: NNGRRT; PAM sequence: GTGAAT
agaatgcctggaatttgaag

SEQ ID NO: 22496 - DNA, 20 bp, Artificial Sequence
  Description of Artificial Sequence: Synthetic oligonucleotide
  Target: LAMA2; (-) strand; PAM type: NNGRRT; PAM sequence: TGGAAT
aagggactttagagaatgcc

SEQ ID NO: 22497 - DNA, 20 bp, Artificial Sequence
  Description of Artificial Sequence: Synthetic oligonucleotide
  Target: LAMA2; (-) strand; PAM type: NNGRRT; PAM sequence: GAGAAT
gtgtggtaaaagggacttta

SEQ ID NO: 22498 - DNA, 20 bp, Artificial Sequence
  Description of Artificial Sequence: Synthetic oligonucleotide
  Target: LAMA2; (-) strand; PAM type: NNGRRT; PAM sequence: AAGAAT
ataaggaatgggaatgttac

SEQ ID NO: 22499 - DNA, 20 bp, Artificial Sequence
  Description of Artificial Sequence: Synthetic oligonucleotide
  Target: LAMA2; (-) strand; PAM type: NNGRRT; PAM sequence: GGGAAT
cagtggggatgataaggaat

SEQ ID NO: 22500 - DNA, 20 bp, Artificial Sequence
  Description of Artificial Sequence: Synthetic oligonucleotide
  Target: LAMA2; (-) strand; PAM type: NNGRRT; PAM sequence: AGGAAT
atcacacagtggggatgata

SEQ ID NO: 22501 - DNA, 20 bp, Artificial Sequence
  Description of Artificial Sequence: Synthetic oligonucleotide
  Target: LAMA2; (-) strand; PAM type: NNGRRT; PAM sequence: GGGGAT
cagttctcttatcacacagt

SEQ ID NO: 22502 - DNA, 20 bp, Artificial Sequence
  Description of Artificial Sequence: Synthetic oligonucleotide
  Target: LAMA2; (-) strand; PAM type: NNGRRT; PAM sequence: ACGGAT
gactgacccatgctcaaatc

SEQ ID NO: 22503 - DNA, 20 bp, Artificial Sequence
  Description of Artificial Sequence: Synthetic oligonucleotide
  Target: LAMA2; (-) strand; PAM type: NNGRRT; PAM sequence: TTGAAT
aagggctgaattcattaatg

SEQ ID NO: 22504 - DNA, 20 bp, Artificial Sequence
  Description of Artificial Sequence: Synthetic oligonucleotide
  Target: LAMA2; (-) strand; PAM type: NNGRRT; PAM sequence: CTGAAT
agcagtaaatgaataaaggg

SEQ ID NO: 22505 - DNA, 20 bp, Artificial Sequence
  Description of Artificial Sequence: Synthetic oligonucleotide
  Target: LAMA2; (-) strand; PAM type: NNGRRT; PAM sequence: ATGAAT
tctaaacatggaagcagtaa

SEQ ID NO: 22506 - DNA, 20 bp, Artificial Sequence
  Description of Artificial Sequence: Synthetic oligonucleotide
  Target: LAMA2; (-) strand; PAM type: NNGRRT; PAM sequence: TAGAAT
atatttatttttaatcgagg

SEQ ID NO: 22507 - DNA, 20 bp, Artificial Sequence
  Description of Artificial Sequence: Synthetic oligonucleotide
  Target: LAMA2; (-) strand; PAM type: NNGRRT; PAM sequence: AGGAGT
cataatgttttaaatcttag

SEQ ID NO: 22508 - DNA, 20 bp, Artificial Sequence
  Description of Artificial Sequence: Synthetic oligonucleotide
  Target: LAMA2; (-) strand; PAM type: NNGRRT; PAM sequence: AGGAAT
cttgacaatctctgatgaaa

SEQ ID NO: 22509 - DNA, 20 bp, Artificial Sequence
  Description of Artificial Sequence: Synthetic oligonucleotide
  Target: LAMA2; (-) strand; PAM type: NNGRRT; PAM sequence: ATGGAT
atgacagttgaaagaggagg

SEQ ID NO: 22510 - DNA, 20 bp, Artificial Sequence
  Description of Artificial Sequence: Synthetic oligonucleotide
  Target: LAMA2; (-) strand; PAM type: NNGRRT; PAM sequence: GAGGAT
atgaatgacagttgaaagag

SEQ ID NO: 22511 - DNA, 20 bp, Artificial Sequence
  Description of Artificial Sequence: Synthetic oligonucleotide
  Target: LAMA2; (-) strand; PAM type: NNGRRT; PAM sequence: ATGAAT
tataaaatgacatgtgaact

SEQ ID NO: 22512 - DNA, 20 bp, Artificial Sequence
  Description of Artificial Sequence: Synthetic oligonucleotide
  Target: LAMA2; (-) strand; PAM type: NNGRRT; PAM sequence: TAGGAT
tgatatgagtttacagaaaa

SEQ ID NO: 22513 - DNA, 20 bp, Artificial Sequence
  Description of Artificial Sequence: Synthetic oligonucleotide
  Target: LAMA2; (-) strand; PAM type: NNGRRT; PAM sequence: ATGAGT
ggttattctgtgttaatgat

SEQ ID NO: 22514 - DNA, 20 bp, Artificial Sequence
  Description of Artificial Sequence: Synthetic oligonucleotide
  Target: LAMA2; (-) strand; PAM type: NNGRRT; PAM sequence: ATGGGT
taatctattttaaacatcac

SEQ ID NO: 22515 - DNA, 20 bp, Artificial Sequence
  Description of Artificial Sequence: Synthetic oligonucleotide
  Target: LAMA2; (-) strand; PAM type: NNGRRT; PAM sequence: GAGAGT
ttttaatttctgttctctag

SEQ ID NO: 22516 - DNA, 20 bp, Artificial Sequence
  Description of Artificial Sequence: Synthetic oligonucleotide
  Target: LAMA2; (-) strand; PAM type: NNGRRT; PAM sequence: TAGAAT
tattttaaataaatatatgt

SEQ ID NO: 22517 - DNA, 20 bp, Artificial Sequence
  Description of Artificial Sequence: Synthetic oligonucleotide
  Target: LAMA2; (-) strand; PAM type: NNGRRT; PAM sequence: CAGAGT
gttggaagttgccaatttta

SEQ ID NO: 22518 - DNA, 20 bp, Artificial Sequence
  Description of Artificial Sequence: Synthetic oligonucleotide
  Target: LAMA2; (-) strand; PAM type: NNGRRT; PAM sequence: TAGGAT
tatatctctgtagatcaaga

SEQ ID NO: 22519 - DNA, 20 bp, Artificial Sequence
  Description of Artificial Sequence: Synthetic oligonucleotide
  Target: LAMA2; (-) strand; PAM type: NNGRRT; PAM sequence: CAGAAT
tgatgtttatcatcattttt

SEQ ID NO: 22520 - DNA, 20 bp, Artificial Sequence
  Description of Artificial Sequence: Synthetic oligonucleotide
  Target: LAMA2; (-) strand; PAM type: NNGRRT; PAM sequence: GGGGGT
cagagagaggatgacattta

SEQ ID NO: 22521 - DNA, 20 bp, Artificial Sequence
  Description of Artificial Sequence: Synthetic oligonucleotide
  Target: LAMA2; (-) strand; PAM type: NNGRRT; PAM sequence: GAGGAT
gcagtgagtacgagcagaga

SEQ ID NO: 22522 - DNA, 20 bp, Artificial Sequence
  Description of Artificial Sequence: Synthetic oligonucleotide
  Target: LAMA2; (-) strand; PAM type: NNGRRT; PAM sequence: GTGAGT
aataagaacttacttgagca

SEQ ID NO: 22523 - DNA, 20 bp, Artificial Sequence
  Description of Artificial Sequence: Synthetic oligonucleotide
  Target: LAMA2; (-) strand; PAM type: NNGRRT; PAM sequence: CTGGAT
ttttatagattgcctaacac

SEQ ID NO: 22524 - DNA, 20 bp, Artificial Sequence
  Description of Artificial Sequence: Synthetic oligonucleotide
  Target: LAMA2; (-) strand; PAM type: NNGRRT; PAM sequence: ATGAGT
atcttttactaacaaaacaa

SEQ ID NO: 22525 - DNA, 20 bp, Artificial Sequence
  Description of Artificial Sequence: Synthetic oligonucleotide
  Target: LAMA2; (-) strand; PAM type: NNGRRT; PAM sequence: TAGAAT
taacaactaggaaaatcatc

SEQ ID NO: 22526 - DNA, 20 bp, Artificial Sequence
  Description of Artificial Sequence: Synthetic oligonucleotide
  Target: LAMA2; (-) strand; PAM type: NNGRRT; PAM sequence: TAGAGT
agtagaaattgcaatcaaag

SEQ ID NO: 22527 - DNA, 20 bp, Artificial Sequence
  Description of Artificial Sequence: Synthetic oligonucleotide
  Target: LAMA2; (-) strand; PAM type: NNGRRT; PAM sequence: CAGAGT
taaaacctcctgagccttgc

SEQ ID NO: 22528 - DNA, 20 bp, Artificial Sequence
  Description of Artificial Sequence: Synthetic oligonucleotide
  Target: LAMA2; (-) strand; PAM type: NNGRRT; PAM sequence: GTGGAT
attaggatgctgtctgtttt

SEQ ID NO: 22529 - DNA, 20 bp, Artificial Sequence
  Description of Artificial Sequence: Synthetic oligonucleotide
  Target: LAMA2; (-) strand; PAM type: NNGRRT; PAM sequence: TAGGAT
aacaccatgcttccttgcat

SEQ ID NO: 22530 - DNA, 20 bp, Artificial Sequence
  Description of Artificial Sequence: Synthetic oligonucleotide
  Target: LAMA2; (-) strand; PAM type: NNGRRT; PAM sequence: GAGGAT
cattttacatccattttaca

SEQ ID NO: 22531 - DNA, 20 bp, Artificial Sequence
  Description of Artificial Sequence: Synthetic oligonucleotide
  Target: LAMA2; (-) strand; PAM type: NNGRRT; PAM sequence: TAGAAT
acaatgatgataacaatgcc

SEQ ID NO: 22532 - DNA, 20 bp, Artificial Sequence
  Description of Artificial Sequence: Synthetic oligonucleotide
  Target: LAMA2; (-) strand; PAM type: NNGRRT; PAM sequence: TAGAAT
tttcagtgacttgaagaacc

SEQ ID NO: 22533 - DNA, 20 bp, Artificial Sequence
  Description of Artificial Sequence: Synthetic oligonucleotide
  Target: LAMA2; (-) strand; PAM type: NNGRRT; PAM sequence: ATGAAT
tagtcacaaccagagtgttt

SEQ ID NO: 22534 - DNA, 20 bp, Artificial Sequence
  Description of Artificial Sequence: Synthetic oligonucleotide
  Target: LAMA2; (-) strand; PAM type: NNGRRT; PAM sequence: CAGAGT
atgagaaaaatagtcacaac

SEQ ID NO: 22535 - DNA, 20 bp, Artificial Sequence
  Description of Artificial Sequence: Synthetic oligonucleotide
  Target: LAMA2; (-) strand; PAM type: NNGRRT; PAM sequence: TGGGAT
gaaagtactataaataataa

SEQ ID NO: 22536 - DNA, 20 bp, Artificial Sequence
  Description of Artificial Sequence: Synthetic oligonucleotide
  Target: LAMA2; (-) strand; PAM type: NNGRRT; PAM sequence: ATGAAT
gtagacctcagctgagactg

SEQ ID NO: 22537 - DNA, 20 bp, Artificial Sequence
  Description of Artificial Sequence: Synthetic oligonucleotide
  Target: LAMA2; (-) strand; PAM type: NNGRRT; PAM sequence: TTGAAT
ccttttaacctgtcatttct

SEQ ID NO: 22538 - DNA, 20 bp, Artificial Sequence
  Description of Artificial Sequence: Synthetic oligonucleotide
  Target: LAMA2; (-) strand; PAM type: NNGRRT; PAM sequence: CAGAGT
ctcaaataaaaatttgattc

SEQ ID NO: 22539 - DNA, 20 bp, Artificial Sequence
  Description of Artificial Sequence: Synthetic oligonucleotide
  Target: LAMA2; (-) strand; PAM type: NNGRRT; PAM sequence: CTGAAT
ccattgacggttccctggat

SEQ ID NO: 22540 - DNA, 20 bp, Artificial Sequence
  Description of Artificial Sequence: Synthetic oligonucleotide
  Target: LAMA2; (-) strand; PAM type: NNGRRT; PAM sequence: CTGGAT
tgaatgccattgacggttcc

SEQ ID NO: 22541 - DNA, 20 bp, Artificial Sequence
  Description of Artificial Sequence: Synthetic oligonucleotide
  Target: LAMA2; (-) strand; PAM type: NNGRRT; PAM sequence: ATGAAT
tgttaaattaactctcctag

SEQ ID NO: 22542 - DNA, 20 bp, Artificial Sequence
  Description of Artificial Sequence: Synthetic oligonucleotide
  Target: LAMA2; (-) strand; PAM type: NNGRRT; PAM sequence: ATGAGT
tctaatcaaataggaataaa

SEQ ID NO: 22543 - DNA, 20 bp, Artificial Sequence
  Description of Artificial Sequence: Synthetic oligonucleotide
  Target: LAMA2; (-) strand; PAM type: NNGRRT; PAM sequence: AGGAAT
attctctgctctaatcaaat

SEQ ID NO: 22544 - DNA, 20 bp, Artificial Sequence
  Description of Artificial Sequence: Synthetic oligonucleotide
  Target: LAMA2; (-) strand; PAM type: NNGRRT; PAM sequence: CTGAGT
ctgaagctaaaatgaggaca

SEQ ID NO: 22545 - DNA, 20 bp, Artificial Sequence
  Description of Artificial Sequence: Synthetic oligonucleotide
  Target: LAMA2; (-) strand; PAM type: NNGRRT; PAM sequence: CAGGAT
acaaaatactgcatttctac

SEQ ID NO: 22546 - DNA, 20 bp, Artificial Sequence
  Description of Artificial Sequence: Synthetic oligonucleotide
  Target: LAMA2; (-) strand; PAM type: NNGRRT; PAM sequence: CAGGAT
ggctttgcctataaaagtgt

SEQ ID NO: 22547 - DNA, 20 bp, Artificial Sequence
  Description of Artificial Sequence: Synthetic oligonucleotide
  Target: LAMA2; (-) strand; PAM type: NNGRRT; PAM sequence: TGGAAT
ctgaagagtgtgtagagaca

SEQ ID NO: 22548 - DNA, 20 bp, Artificial Sequence
  Description of Artificial Sequence: Synthetic oligonucleotide
  Target: LAMA2; (-) strand; PAM type: NNGRRT; PAM sequence: AAGAGT
actatcatagggaaaatctg

SEQ ID NO: 22549 - DNA, 20 bp, Artificial Sequence
  Description of Artificial Sequence: Synthetic oligonucleotide
  Target: LAMA2; (-) strand; PAM type: NNGRRT; PAM sequence: TGGAAT
ctggcaacaaacattggaaa

SEQ ID NO: 22550 - DNA, 20 bp, Artificial Sequence
  Description of Artificial Sequence: Synthetic oligonucleotide
  Target: LAMA2; (-) strand; PAM type: NNGRRT; PAM sequence: GGGGAT
cttatgaatatgacagccat

SEQ ID NO: 22551 - DNA, 20 bp, Artificial Sequence
  Description of Artificial Sequence: Synthetic oligonucleotide
  Target: LAMA2; (-) strand; PAM type: NNGRRT; PAM sequence: ATGAAT
tgaatgggtcagagagactt

SEQ ID NO: 22552 - DNA, 20 bp, Artificial Sequence
  Description of Artificial Sequence: Synthetic oligonucleotide
  Target: LAMA2; (-) strand; PAM type: NNGRRT; PAM sequence: ATGGGT
atatactaacatctgtctga

SEQ ID NO: 22553 - DNA, 20 bp, Artificial Sequence
  Description of Artificial Sequence: Synthetic oligonucleotide
  Target: LAMA2; (-) strand; PAM type: NNGRRT; PAM sequence: CTGAAT
agcaatatactaacatctgt

SEQ ID NO: 22554 - DNA, 20 bp, Artificial Sequence
  Description of Artificial Sequence: Synthetic oligonucleotide
  Target: LAMA2; (-) strand; PAM type: NNGRRT; PAM sequence: ATGAAT
ctagaatgccaagaggcatg

SEQ ID NO: 22555 - DNA, 20 bp, Artificial Sequence
  Description of Artificial Sequence: Synthetic oligonucleotide
  Target: LAMA2; (-) strand; PAM type: NNGRRT; PAM sequence: TAGAAT
tgtaatatgctacggtgtac

SEQ ID NO: 22556 - DNA, 20 bp, Artificial Sequence
  Description of Artificial Sequence: Synthetic oligonucleotide
  Target: LAMA2; (-) strand; PAM type: NNGRRT; PAM sequence: CAGAAT
tacaagaataaatcagggac

SEQ ID NO: 22557 - DNA, 20 bp, Artificial Sequence
  Description of Artificial Sequence: Synthetic oligonucleotide
  Target: LAMA2; (-) strand; PAM type: NNGRRT; PAM sequence: AAGAAT
tctcagtttttacttcatac

SEQ ID NO: 22558 - DNA, 20 bp, Artificial Sequence
  Description of Artificial Sequence: Synthetic oligonucleotide
  Target: LAMA2; (-) strand; PAM type: NNGRRT; PAM sequence: CAGGAT
ttgaatcagtttgttgataa

SEQ ID NO: 22559 - DNA, 20 bp, Artificial Sequence
  Description of Artificial Sequence: Synthetic oligonucleotide
  Target: LAMA2; (-) strand; PAM type: NNGRRT; PAM sequence: TTGAAT
tacctatttccaagaaggaa

SEQ ID NO: 22560 - DNA, 20 bp, Artificial Sequence
  Description of Artificial Sequence: Synthetic oligonucleotide
  Target: LAMA2; (-) strand; PAM type: NNGRRT; PAM sequence: AGGAAT
taacctacctatttccaaga

SEQ ID NO: 22561 - DNA, 20 bp, Artificial Sequence
  Description of Artificial Sequence: Synthetic oligonucleotide
  Target: LAMA2; (-) strand; PAM type: NNGRRT; PAM sequence: TAGGAT
aagatacttggtaatgataa

SEQ ID NO: 22562 - DNA, 20 bp, Artificial Sequence
  Description of Artificial Sequence: Synthetic oligonucleotide
  Target: LAMA2; (-) strand; PAM type: NNGRRT; PAM sequence: TAGGAT
gtattttgggcagatgttcc

SEQ ID NO: 22563 - DNA, 20 bp, Artificial Sequence
  Description of Artificial Sequence: Synthetic oligonucleotide
  Target: LAMA2; (-) strand; PAM type: NNGRRT; PAM sequence: AAGAAT
taattttattaggaattatg

SEQ ID NO: 22564 - DNA, 20 bp, Artificial Sequence
  Description of Artificial Sequence: Synthetic oligonucleotide
  Target: LAMA2; (-) strand; PAM type: NNGRRT; PAM sequence: AGGAAT
gtaacaattataattttatt

SEQ ID NO: 22565 - DNA, 20 bp, Artificial Sequence
  Description of Artificial Sequence: Synthetic oligonucleotide
  Target: LAMA2; (-) strand; PAM type: NNGRRT; PAM sequence: TGGAAT
tgttttaagctactaaactt

SEQ ID NO: 22566 - DNA, 20 bp, Artificial Sequence
  Description of Artificial Sequence: Synthetic oligonucleotide
  Target: LAMA2; (-) strand; PAM type: NNGRRT; PAM sequence: GAGAGT
ttgccaacctacagaatcat

SEQ ID NO: 22567 - DNA, 20 bp, Artificial Sequence
  Description of Artificial Sequence: Synthetic oligonucleotide
  Target: LAMA2; (-) strand; PAM type: NNGRRT; PAM sequence: CAGAAT
cagcccaaattgccaaccta

SEQ ID NO: 22568 - DNA, 20 bp, Artificial Sequence
  Description of Artificial Sequence: Synthetic oligonucleotide
  Target: LAMA2; (-) strand; PAM type: NNGRRT; PAM sequence: CAGAAT
ttgcaacatactctgaccaa

SEQ ID NO: 22569 - DNA, 20 bp, Artificial Sequence
  Description of Artificial Sequence: Synthetic oligonucleotide
  Target: LAMA2; (-) strand; PAM type: NNGRRT; PAM sequence: CTGGGT
tacttcccttccccttgaat

SEQ ID NO: 22570 - DNA, 20 bp, Artificial Sequence
  Description of Artificial Sequence: Synthetic oligonucleotide
  Target: LAMA2; (-) strand; PAM type: NNGRRT; PAM sequence: TTGAAT
gaagtctacttcccttcccc

SEQ ID NO: 22571 - DNA, 20 bp, Artificial Sequence
  Description of Artificial Sequence: Synthetic oligonucleotide
  Target: LAMA2; (-) strand; PAM type: NNGRRT; PAM sequence: CAGAGT
ctgcacttcagcctgggaaa

SEQ ID NO: 22572 - DNA, 20 bp, Artificial Sequence
  Description of Artificial Sequence: Synthetic oligonucleotide
  Target: LAMA2; (-) strand; PAM type: NNGRRT; PAM sequence: AGGAGT
gctactcgggaggctgaggg

SEQ ID NO: 22573 - DNA, 20 bp, Artificial Sequence
  Description of Artificial Sequence: Synthetic oligonucleotide
  Target: LAMA2; (-) strand; PAM type: NNGRRT; PAM sequence: CTGGGT
ttaaaaatggttactactgg

SEQ ID NO: 22574 - DNA, 20 bp, Artificial Sequence
  Description of Artificial Sequence: Synthetic oligonucleotide
  Target: LAMA2; (-) strand; PAM type: NNGRRT; PAM sequence: AAGGAT
actattcagatacctgcctg

SEQ ID NO: 22575 - DNA, 20 bp, Artificial Sequence
  Description of Artificial Sequence: Synthetic oligonucleotide
  Target: LAMA2; (-) strand; PAM type: NNGRRT; PAM sequence: AAGAAT
gcagagactgtccgatcaac

SEQ ID NO: 22576 - DNA, 20 bp, Artificial Sequence
  Description of Artificial Sequence: Synthetic oligonucleotide
  Target: LAMA2; (-) strand; PAM type: NNGRRT; PAM sequence: GAGAAT
cacagatgtgtgaggaacag

SEQ ID NO: 22577 - DNA, 20 bp, Artificial Sequence
  Description of Artificial Sequence: Synthetic oligonucleotide
  Target: LAMA2; (-) strand; PAM type: NNGRRT; PAM sequence: CTGAAT
ggttggccggaagaaaactt

SEQ ID NO: 22578 - DNA, 20 bp, Artificial Sequence
  Description of Artificial Sequence: Synthetic oligonucleotide
  Target: LAMA2; (-) strand; PAM type: NNGRRT; PAM sequence: TGGGGT
gaggggaagagggaagaggt

SEQ ID NO: 22579 - DNA, 20 bp, Artificial Sequence
  Description of Artificial Sequence: Synthetic oligonucleotide
  Target: LAMA2; (-) strand; PAM type: NNGRRT; PAM sequence: TAGAAT
tagtgagaagatcagggagg

SEQ ID NO: 22580 - DNA, 20 bp, Artificial Sequence
  Description of Artificial Sequence: Synthetic oligonucleotide
  Target: LAMA2; (-) strand; PAM type: NNGRRT; PAM sequence: AAGGGT
ctttggacaaagagaatggc

SEQ ID NO: 22581 - DNA, 20 bp, Artificial Sequence
  Description of Artificial Sequence: Synthetic oligonucleotide
  Target: LAMA2; (-) strand; PAM type: NNGRRT; PAM sequence: GAGAAT
atcaaaacactttggacaaa

SEQ ID NO: 22582 - DNA, 20 bp, Artificial Sequence
  Description of Artificial Sequence: Synthetic oligonucleotide
  Target: LAMA2; (-) strand; PAM type: NNGRRT; PAM sequence: AAGGGT
ggctaatatttttgtgagag

SEQ ID NO: 22583 - DNA, 20 bp, Artificial Sequence
  Description of Artificial Sequence: Synthetic oligonucleotide
  Target: LAMA2; (-) strand; PAM type: NNGRRT; PAM sequence: AAGGGT
cttggttatggtgcctagga

SEQ ID NO: 22584 - DNA, 20 bp, Artificial Sequence
  Description of Artificial Sequence: Synthetic oligonucleotide
  Target: LAMA2; (-) strand; PAM type: NNGRRT; PAM sequence: TAGAAT
tgcttgctgtcttctctacc

SEQ ID NO: 22585 - DNA, 20 bp, Artificial Sequence
  Description of Artificial Sequence: Synthetic oligonucleotide
  Target: LAMA2; (-) strand; PAM type: NNGRRT; PAM sequence: AAGGAT
tgctcaatcttcaagggagc

SEQ ID NO: 22586 - DNA, 20 bp, Artificial Sequence
  Description of Artificial Sequence: Synthetic oligonucleotide
  Target: LAMA2; (-) strand; PAM type: NNGRRT; PAM sequence: AGGGAT
tggaccaggtgataaattat

SEQ ID NO: 22587 - DNA, 20 bp, Artificial Sequence
  Description of Artificial Sequence: Synthetic oligonucleotide
  Target: LAMA2; (-) strand; PAM type: NNGRRT; PAM sequence: AAGGAT
attgaaaaaccatgtagcca

SEQ ID NO: 22588 - DNA, 20 bp, Artificial Sequence
  Description of Artificial Sequence: Synthetic oligonucleotide
  Target: LAMA2; (-) strand; PAM type: NNGRRT; PAM sequence: TGGGAT
acctcagcttccccaagtgc

SEQ ID NO: 22589 - DNA, 20 bp, Artificial Sequence
  Description of Artificial Sequence: Synthetic oligonucleotide
  Target: LAMA2; (-) strand; PAM type: NNGRRT; PAM sequence: TGGGGT
ctagttttttaacatagaga

SEQ ID NO: 22590 - DNA, 20 bp, Artificial Sequence
  Description of Artificial Sequence: Synthetic oligonucleotide
  Target: LAMA2; (-) strand; PAM type: NNGRRT; PAM sequence: CCGAGT
gatcctcctgcctcagcctc

SEQ ID NO: 22591 - DNA, 20 bp, Artificial Sequence
  Description of Artificial Sequence: Synthetic oligonucleotide
  Target: LAMA2; (-) strand; PAM type: NNGRRT; PAM sequence: TGGAGT
tcttgctctgccacccatgc

SEQ ID NO: 22592 - DNA, 20 bp, Artificial Sequence
  Description of Artificial Sequence: Synthetic oligonucleotide
  Target: LAMA2; (-) strand; PAM type: NNGRRT; PAM sequence: CAGGGT
atttttatttttttctgaga

SEQ ID NO: 22593 - DNA, 20 bp, Artificial Sequence
  Description of Artificial Sequence: Synthetic oligonucleotide
  Target: LAMA2; (-) strand; PAM type: NNGRRT; PAM sequence: ATGGGT
accacagaatatgatttttg

SEQ ID NO: 22594 - DNA, 20 bp, Artificial Sequence
  Description of Artificial Sequence: Synthetic oligonucleotide
  Target: LAMA2; (-) strand; PAM type: NNGRRT; PAM sequence: CAGAAT
tctttccctcctcaccacca

SEQ ID NO: 22595 - DNA, 20 bp, Artificial Sequence
  Description of Artificial Sequence: Synthetic oligonucleotide
  Target: LAMA2; (-) strand; PAM type: NNGRRT; PAM sequence: TGGAAT
tctcacctttggctgcccat

SEQ ID NO: 22596 - DNA, 20 bp, Artificial Sequence
  Description of Artificial Sequence: Synthetic oligonucleotide
  Target: LAMA2; (-) strand; PAM type: NNGRRT; PAM sequence: GTGGAT
tagaatgtgacaacattggt

SEQ ID NO: 22597 - DNA, 20 bp, Artificial Sequence
  Description of Artificial Sequence: Synthetic oligonucleotide
  Target: LAMA2; (-) strand; PAM type: NNGRRT; PAM sequence: TAGAAT
cccacattatctctgcacat

SEQ ID NO: 22598 - DNA, 20 bp, Artificial Sequence
  Description of Artificial Sequence: Synthetic oligonucleotide
  Target: LAMA2; (-) strand; PAM type: NNGRRT; PAM sequence: CAGAAT
ctaccccagatctaggaaat

SEQ ID NO: 22599 - DNA, 20 bp, Artificial Sequence
  Description of Artificial Sequence: Synthetic oligonucleotide
  Target: LAMA2; (-) strand; PAM type: NNGRRT; PAM sequence: TTGAGT
gttggtctgtgcaccacact

SEQ ID NO: 22600 - DNA, 20 bp, Artificial Sequence
  Description of Artificial Sequence: Synthetic oligonucleotide
  Target: LAMA2; (-) strand; PAM type: NNGRRT; PAM sequence: GAGAAT
gtttctcttagtctctgact

SEQ ID NO: 22601 - DNA, 20 bp, Artificial Sequence
  Description of Artificial Sequence: Synthetic oligonucleotide
  Target: LAMA2; (-) strand; PAM type: NNGRRT; PAM sequence: CTGAAT
gtccacaccccctagtattt

SEQ ID NO: 22602 - DNA, 20 bp, Artificial Sequence
  Description of Artificial Sequence: Synthetic oligonucleotide
  Target: LAMA2; (-) strand; PAM type: NNGRRT; PAM sequence: CAGAAT
tctcttactcttctcctagc

SEQ ID NO: 22603 - DNA, 20 bp, Artificial Sequence
  Description of Artificial Sequence: Synthetic oligonucleotide
  Target: LAMA2; (-) strand; PAM type: NNGRRT; PAM sequence: CTGAAT
agctcctgatgcttcacaag

SEQ ID NO: 22604 - DNA, 20 bp, Artificial Sequence
  Description of Artificial Sequence: Synthetic oligonucleotide
  Target: LAMA2; (-) strand; PAM type: NNGRRT; PAM sequence: AGGGAT
gagttacaatatcacttcac

SEQ ID NO: 22605 - DNA, 20 bp, Artificial Sequence
  Description of Artificial Sequence: Synthetic oligonucleotide
  Target: LAMA2; (-) strand; PAM type: NNGRRT; PAM sequence: GTGAGT
tgataggacagcagctagag

SEQ ID NO: 22606 - DNA, 20 bp, Artificial Sequence
  Description of Artificial Sequence: Synthetic oligonucleotide
  Target: LAMA2; (-) strand; PAM type: NNGRRT; PAM sequence: GAGAGT
aaacaaagagaaggaggacg

SEQ ID NO: 22607 - DNA, 20 bp, Artificial Sequence
  Description of Artificial Sequence: Synthetic oligonucleotide
  Target: LAMA2; (-) strand; PAM type: NNGRRT; PAM sequence: AAGAAT
ggatcatgcccaaacttggc

SEQ ID NO: 22608 - DNA, 20 bp, Artificial Sequence
  Description of Artificial Sequence: Synthetic oligonucleotide
  Target: LAMA2; (-) strand; PAM type: NNGRRT; PAM sequence: CTGGAT
taccgagaattggagcagct

SEQ ID NO: 22609 - DNA, 20 bp, Artificial Sequence
  Description of Artificial Sequence: Synthetic oligonucleotide
  Target: LAMA2; (-) strand; PAM type: NNGRRT; PAM sequence: GAGAAT
tacatagcatggaaaatacc

SEQ ID NO: 22610 - DNA, 20 bp, Artificial Sequence
  Description of Artificial Sequence: Synthetic oligonucleotide
  Target: LAMA2; (-) strand; PAM type: NNGRRT; PAM sequence: TAGAAT
tatcaatgctatatacatgt

SEQ ID NO: 22611 - DNA, 20 bp, Artificial Sequence
  Description of Artificial Sequence: Synthetic oligonucleotide
  Target: LAMA2; (-) strand; PAM type: NNGRRT; PAM sequence: CAGAGT
atatttttagttttgcattg

SEQ ID NO: 22612 - DNA, 20 bp, Artificial Sequence
  Description of Artificial Sequence: Synthetic oligonucleotide
  Target: LAMA2; (-) strand; PAM type: NNGRRT; PAM sequence: TTGAAT
atttccaaaattaacatata

SEQ ID NO: 22613 - DNA, 20 bp, Artificial Sequence
  Description of Artificial Sequence: Synthetic oligonucleotide
  Target: LAMA2; (-) strand; PAM type: NNGRRT; PAM sequence: TGGAAT
ggattgttgactcttcatta

SEQ ID NO: 22614 - DNA, 20 bp, Artificial Sequence
  Description of Artificial Sequence: Synthetic oligonucleotide
  Target: LAMA2; (-) strand; PAM type: NNGRRT; PAM sequence: ATGGAT
tagaattggtagagagacaa

SEQ ID NO: 22615 - DNA, 20 bp, Artificial Sequence
  Description of Artificial Sequence: Synthetic oligonucleotide
  Target: LAMA2; (-) strand; PAM type: NNGRRT; PAM sequence: TAGAAT
gtaggggccaggataggtgg

SEQ ID NO: 22616 - DNA, 20 bp, Artificial Sequence
  Description of Artificial Sequence: Synthetic oligonucleotide
  Target: LAMA2; (-) strand; PAM type: NNGRRT; PAM sequence: CAGGAT
tcaaatttggtggtaggggc

SEQ ID NO: 22617 - DNA, 20 bp, Artificial Sequence
  Description of Artificial Sequence: Synthetic oligonucleotide
  Target: LAMA2; (-) strand; PAM type: NNGRRT; PAM sequence: ATGAGT
ctccagctttgccttctgcc

SEQ ID NO: 22618 - DNA, 20 bp, Artificial Sequence
  Description of Artificial Sequence: Synthetic oligonucleotide
  Target: LAMA2; (-) strand; PAM type: NNGRRT; PAM sequence: CAGAGT
ccctagtgatgttctcatga

SEQ ID NO: 22619 - DNA, 20 bp, Artificial Sequence
  Description of Artificial Sequence: Synthetic oligonucleotide
  Target: LAMA2; (-) strand; PAM type: NNGRRT; PAM sequence: TGGAGT
cgtgggaggtattgaatcac

SEQ ID NO: 22620 - DNA, 20 bp, Artificial Sequence
  Description of Artificial Sequence: Synthetic oligonucleotide
  Target: LAMA2; (-) strand; PAM type: NNGRRT; PAM sequence: TTGAAT
atggggcctcgtgggaggta

SEQ ID NO: 22621 - DNA, 20 bp, Artificial Sequence
  Description of Artificial Sequence: Synthetic oligonucleotide
  Target: LAMA2; (-) strand; PAM type: NNGRRT; PAM sequence: CTGGAT
ttgaaatgtcatccccaata

SEQ ID NO: 22622 - DNA, 20 bp, Artificial Sequence
  Description of Artificial Sequence: Synthetic oligonucleotide
  Target: LAMA2; (-) strand; PAM type: NNGRRT; PAM sequence: TTGGAT
aatattctaccagatatggt

SEQ ID NO: 22623 - DNA, 20 bp, Artificial Sequence
  Description of Artificial Sequence: Synthetic oligonucleotide
  Target: LAMA2; (-) strand; PAM type: NNGRRT; PAM sequence: AAGAAT
actatattctttaagtagcc

SEQ ID NO: 22624 - DNA, 20 bp, Artificial Sequence
  Description of Artificial Sequence: Synthetic oligonucleotide
  Target: LAMA2; (-) strand; PAM type: NNGRRT; PAM sequence: GAGAAT
tacccagaaggctgaggcag

SEQ ID NO: 22625 - DNA, 20 bp, Artificial Sequence
  Description of Artificial Sequence: Synthetic oligonucleotide
  Target: LAMA2; (-) strand; PAM type: NNGRRT; PAM sequence: AGGAGT
tgggtggatcacctgaggtc

SEQ ID NO: 22626 - DNA, 20 bp, Artificial Sequence
  Description of Artificial Sequence: Synthetic oligonucleotide
  Target: LAMA2; (-) strand; PAM type: NNGRRT; PAM sequence: GTGGAT
actttgagaggccgaggtgg

SEQ ID NO: 22627 - DNA, 20 bp, Artificial Sequence
  Description of Artificial Sequence: Synthetic oligonucleotide
  Target: LAMA2; (-) strand; PAM type: NNGRRT; PAM sequence: GTGGGT
caacactttgagaggccgag

SEQ ID NO: 22628 - DNA, 20 bp, Artificial Sequence
  Description of Artificial Sequence: Synthetic oligonucleotide
  Target: LAMA2; (-) strand; PAM type: NNGRRT; PAM sequence: CCGGGT
aaaaaaaagtctaaagaagg

SEQ ID NO: 22629 - DNA, 20 bp, Artificial Sequence
  Description of Artificial Sequence: Synthetic oligonucleotide
  Target: LAMA2; (-) strand; PAM type: NNGRRT; PAM sequence: TAGAAT
ttagcttggtatctattgag

SEQ ID NO: 22630 - DNA, 20 bp, Artificial Sequence
  Description of Artificial Sequence: Synthetic oligonucleotide
  Target: LAMA2; (-) strand; PAM type: NNGRRT; PAM sequence: TTGAGT
aatttttagcttggtatcta

SEQ ID NO: 22631 - DNA, 20 bp, Artificial Sequence
  Description of Artificial Sequence: Synthetic oligonucleotide
  Target: LAMA2; (-) strand; PAM type: NNGRRT; PAM sequence: CAGAGT
acagggaataaaacatgctc

SEQ ID NO: 22632 - DNA, 20 bp, Artificial Sequence
  Description of Artificial Sequence: Synthetic oligonucleotide
  Target: LAMA2; (-) strand; PAM type: NNGRRT; PAM sequence: GGGAAT
tcgaaaggaacctgtccaca

SEQ ID NO: 22633 - DNA, 20 bp, Artificial Sequence
  Description of Artificial Sequence: Synthetic oligonucleotide
  Target: LAMA2; (-) strand; PAM type: NNGRRT; PAM sequence: TAGAAT
tgaagatttcctttaaggca

SEQ ID NO: 22634 - DNA, 20 bp, Artificial Sequence
  Description of Artificial Sequence: Synthetic oligonucleotide
  Target: LAMA2; (-) strand; PAM type: NNGRRT; PAM sequence: ATGGAT
cagaatattaatgctatcaa

SEQ ID NO: 22635 - DNA, 20 bp, Artificial Sequence
  Description of Artificial Sequence: Synthetic oligonucleotide
  Target: LAMA2; (-) strand; PAM type: NNGRRT; PAM sequence: CAGAAT
gaagatgaaactactcatct

SEQ ID NO: 22636 - DNA, 20 bp, Artificial Sequence
  Description of Artificial Sequence: Synthetic oligonucleotide
  Target: LAMA2; (-) strand; PAM type: NNGRRT; PAM sequence: AAGAAT
tatgaaatattttatggtcc

SEQ ID NO: 22637 - DNA, 20 bp, Artificial Sequence
  Description of Artificial Sequence: Synthetic oligonucleotide
  Target: LAMA2; (-) strand; PAM type: NNGRRT; PAM sequence: AAGAAT
acatcccaggcagatgttca

SEQ ID NO: 22638 - DNA, 20 bp, Artificial Sequence
  Description of Artificial Sequence: Synthetic oligonucleotide
  Target: LAMA2; (-) strand; PAM type: NNGRRT; PAM sequence: AAGAGT
actgtgaaagagaagtgaca

SEQ ID NO: 22639 - DNA, 20 bp, Artificial Sequence
  Description of Artificial Sequence: Synthetic oligonucleotide
  Target: LAMA2; (-) strand; PAM type: NNGRRT; PAM sequence: CTGAGT
caccaacctacctttagctc

SEQ ID NO: 22640 - DNA, 20 bp, Artificial Sequence
  Description of Artificial Sequence: Synthetic oligonucleotide
  Target: LAMA2; (-) strand; PAM type: NNGRRT; PAM sequence: CTGAAT
aacactggttaagaaagtct

SEQ ID NO: 22641 - DNA, 20 bp, Artificial Sequence
  Description of Artificial Sequence: Synthetic oligonucleotide
  Target: LAMA2; (-) strand; PAM type: NNGRRT; PAM sequence: TTGAGT
aaatctgtatattatagttc

SEQ ID NO: 22642 - DNA, 20 bp, Artificial Sequence
  Description of Artificial Sequence: Synthetic oligonucleotide
  Target: LAMA2; (-) strand; PAM type: NNGRRT; PAM sequence: GGGGGT
ctgatttaggccagacactg

SEQ ID NO: 22643 - DNA, 20 bp, Artificial Sequence
  Description of Artificial Sequence: Synthetic oligonucleotide
  Target: LAMA2; (-) strand; PAM type: NNGRRT; PAM sequence: AAGAGT
tttatagagctataagtata

SEQ ID NO: 22644 - DNA, 20 bp, Artificial Sequence
  Description of Artificial Sequence: Synthetic oligonucleotide
  Target: LAMA2; (-) strand; PAM type: NNGRRT; PAM sequence: AAGGAT
ttgaattttattggttttgt

SEQ ID NO: 22645 - DNA, 20 bp, Artificial Sequence
  Description of Artificial Sequence: Synthetic oligonucleotide
  Target: LAMA2; (-) strand; PAM type: NNGRRT; PAM sequence: TTGAAT
tttatattaatgtttttaat

SEQ ID NO: 22646 - DNA, 20 bp, Artificial Sequence
  Description of Artificial Sequence: Synthetic oligonucleotide
  Target: LAMA2; (-) strand; PAM type: NNGRRT; PAM sequence: ATGAGT
aatgtggtaaggtaggagaa

SEQ ID NO: 22647 - DNA, 20 bp, Artificial Sequence
  Description of Artificial Sequence: Synthetic oligonucleotide
  Target: LAMA2; (-) strand; PAM type: NNGRRT; PAM sequence: ATGAAT
ccaggctaggcacctgagag

SEQ ID NO: 22648 - DNA, 20 bp, Artificial Sequence
  Description of Artificial Sequence: Synthetic oligonucleotide
  Target: LAMA2; (-) strand; PAM type: NNGRRT; PAM sequence: CTGGAT
aaatattaatgtaagcattt

SEQ ID NO: 22649 - DNA, 20 bp, Artificial Sequence
  Description of Artificial Sequence: Synthetic oligonucleotide
  Target: LAMA2; (-) strand; PAM type: NNGRRT; PAM sequence: AAGAGT
aagggtagtgaagatattaa

SEQ ID NO: 22650 - DNA, 20 bp, Artificial Sequence
  Description of Artificial Sequence: Synthetic oligonucleotide
  Target: LAMA2; (-) strand; PAM type: NNGRRT; PAM sequence: AAGGGT
acatagaatctacatttcct

SEQ ID NO: 22651 - DNA, 20 bp, Artificial Sequence
  Description of Artificial Sequence: Synthetic oligonucleotide
  Target: LAMA2; (-) strand; PAM type: NNGRRT; PAM sequence: TAGAAT
atgattatttttaaagcaca

SEQ ID NO: 22652 - DNA, 20 bp, Artificial Sequence
  Description of Artificial Sequence: Synthetic oligonucleotide
  Target: LAMA2; (-) strand; PAM type: NNGRRT; PAM sequence: TTGAAT
tctctgtgcgctaatgtact

SEQ ID NO: 22653 - DNA, 20 bp, Artificial Sequence
  Description of Artificial Sequence: Synthetic oligonucleotide
  Target: LAMA2; (-) strand; PAM type: NNGRRT; PAM sequence: CTGAAT
tggtacattctctggttacc

SEQ ID NO: 22654 - DNA, 20 bp, Artificial Sequence
  Description of Artificial Sequence: Synthetic oligonucleotide
  Target: LAMA2; (-) strand; PAM type: NNGRRT; PAM sequence: GTGAAT
agaatatctaccaatgtgta

SEQ ID NO: 22655 - DNA, 20 bp, Artificial Sequence
  Description of Artificial Sequence: Synthetic oligonucleotide
  Target: LAMA2; (-) strand; PAM type: NNGRRT; PAM sequence: AAGAAT
ttaaagaatatatttcctaa

SEQ ID NO: 22656 - DNA, 20 bp, Artificial Sequence
  Description of Artificial Sequence: Synthetic oligonucleotide
  Target: LAMA2; (-) strand; PAM type: NNGRRT; PAM sequence: AAGAAT
aaaggttatggtcagaatta

SEQ ID NO: 22657 - DNA, 20 bp, Artificial Sequence
  Description of Artificial Sequence: Synthetic oligonucleotide
  Target: LAMA2; (-) strand; PAM type: NNGRRT; PAM sequence: CAGAAT
cttaccttaaaggttatggt

SEQ ID NO: 22658 - DNA, 20 bp, Artificial Sequence
  Description of Artificial Sequence: Synthetic oligonucleotide
  Target: LAMA2; (-) strand; PAM type: NNGRRT; PAM sequence: AGGGAT
ggtttcttcttctggaaaat

SEQ ID NO: 22659 - DNA, 20 bp, Artificial Sequence
  Description of Artificial Sequence: Synthetic oligonucleotide
  Target: LAMA2; (-) strand; PAM type: NNGRRT; PAM sequence: TGGAGT
acaacttctttcctatttct

SEQ ID NO: 22660 - DNA, 20 bp, Artificial Sequence
  Description of Artificial Sequence: Synthetic oligonucleotide
  Target: LAMA2; (-) strand; PAM type: NNGRRT; PAM sequence: TGGGGT
gatattaaatgaattaaatg

SEQ ID NO: 22661 - DNA, 20 bp, Artificial Sequence
  Description of Artificial Sequence: Synthetic oligonucleotide
  Target: LAMA2; (-) strand; PAM type: NNGRRT; PAM sequence: ATGAAT
cctcagtatccagatattaa

SEQ ID NO: 22662 - DNA, 20 bp, Artificial Sequence
  Description of Artificial Sequence: Synthetic oligonucleotide
  Target: LAMA2; (-) strand; PAM type: NNGRRT; PAM sequence: TGGGAT
gagaatgtagccttcatgat

SEQ ID NO: 22663 - DNA, 20 bp, Artificial Sequence
  Description of Artificial Sequence: Synthetic oligonucleotide
  Target: LAMA2; (-) strand; PAM type: NNGRRT; PAM sequence: GAGAAT
ttgggaagtgattgagtcat

SEQ ID NO: 22664 - DNA, 20 bp, Artificial Sequence
  Description of Artificial Sequence: Synthetic oligonucleotide
  Target: LAMA2; (-) strand; PAM type: NNGRRT; PAM sequence: TTGAGT
gtggagcctttgggaagtga

SEQ ID NO: 22665 - DNA, 20 bp, Artificial Sequence
  Description of Artificial Sequence: Synthetic oligonucleotide
  Target: LAMA2; (-) strand; PAM type: NNGRRT; PAM sequence: CAGAAT
tgtcctcacacggcagaagg

SEQ ID NO: 22666 - DNA, 20 bp, Artificial Sequence
  Description of Artificial Sequence: Synthetic oligonucleotide
  Target: LAMA2; (-) strand; PAM type: NNGRRT; PAM sequence: CTGAAT
cattaaaactcttcacttcc

SEQ ID NO: 22667 - DNA, 20 bp, Artificial Sequence
  Description of Artificial Sequence: Synthetic oligonucleotide
  Target: LAMA2; (-) strand; PAM type: NNGRRT; PAM sequence: TAGGAT
acaaattggagcctcttcta

SEQ ID NO: 22668 - DNA, 20 bp, Artificial Sequence
  Description of Artificial Sequence: Synthetic oligonucleotide
  Target: LAMA2; (-) strand; PAM type: NNGRRT; PAM sequence: CTGAAT
agccagaagtggatgggtca

SEQ ID NO: 22669 - DNA, 20 bp, Artificial Sequence
  Description of Artificial Sequence: Synthetic oligonucleotide
  Target: LAMA2; (-) strand; PAM type: NNGRRT; PAM sequence: ATGGGT
caatatccagccagaagtgg

SEQ ID NO: 22670 - DNA, 20 bp, Artificial Sequence
  Description of Artificial Sequence: Synthetic oligonucleotide
  Target: LAMA2; (-) strand; PAM type: NNGRRT; PAM sequence: GTGGAT
ggatcaatatccagccagaa

SEQ ID NO: 22671 - DNA, 20 bp, Artificial Sequence
  Description of Artificial Sequence: Synthetic oligonucleotide
  Target: LAMA2; (-) strand; PAM type: NNGRRT; PAM sequence: CTGGAT
ttaaggataatccaggtcat

SEQ ID NO: 22672 - DNA, 20 bp, Artificial Sequence
  Description of Artificial Sequence: Synthetic oligonucleotide
  Target: LAMA2; (-) strand; PAM type: NNGRRT; PAM sequence: AAGGAT
atcaagaaagactagaattt

SEQ ID NO: 22673 - DNA, 20 bp, Artificial Sequence
  Description of Artificial Sequence: Synthetic oligonucleotide
  Target: LAMA2; (-) strand; PAM type: NNGRRT; PAM sequence: TAGAAT
aataaaaaatcaagaaagac

SEQ ID NO: 22674 - DNA, 20 bp, Artificial Sequence
  Description of Artificial Sequence: Synthetic oligonucleotide
  Target: LAMA2; (-) strand; PAM type: NNGRRT; PAM sequence: GTGAAT
cctcagtatacaaatgtcaa

SEQ ID NO: 22675 - DNA, 20 bp, Artificial Sequence
  Description of Artificial Sequence: Synthetic oligonucleotide
  Target: LAMA2; (-) strand; PAM type: NNGRRT; PAM sequence: TTGAGT
cacttctgaatagcacccag

SEQ ID NO: 22676 - DNA, 20 bp, Artificial Sequence
  Description of Artificial Sequence: Synthetic oligonucleotide
  Target: LAMA2; (-) strand; PAM type: NNGRRT; PAM sequence: CTGAAT
tcacagaattactcccactt

SEQ ID NO: 22677 - DNA, 20 bp, Artificial Sequence
  Description of Artificial Sequence: Synthetic oligonucleotide
  Target: LAMA2; (-) strand; PAM type: NNGRRT; PAM sequence: CAGAAT
taggattcacaaaatactca

SEQ ID NO: 22678 - DNA, 20 bp, Artificial Sequence
  Description of Artificial Sequence: Synthetic oligonucleotide
  Target: LAMA2; (-) strand; PAM type: NNGRRT; PAM sequence: TAGGAT
tgttcttccttccctctaga

SEQ ID NO: 22679 - DNA, 20 bp, Artificial Sequence
  Description of Artificial Sequence: Synthetic oligonucleotide
  Target: LAMA2; (-) strand; PAM type: NNGRRT; PAM sequence: ATGAAT
cctcccatttcctggctaat

SEQ ID NO: 22680 - DNA, 20 bp, Artificial Sequence
  Description of Artificial Sequence: Synthetic oligonucleotide
  Target: LAMA2; (-) strand; PAM type: NNGRRT; PAM sequence: GCGGGT
taagcgcagacaaaaccata

SEQ ID NO: 22681 - DNA, 20 bp, Artificial Sequence
  Description of Artificial Sequence: Synthetic oligonucleotide
  Target: LAMA2; (-) strand; PAM type: NNGRRT; PAM sequence: ATGAAT
aaggtcactctgaaccagtg

SEQ ID NO: 22682 - DNA, 20 bp, Artificial Sequence
  Description of Artificial Sequence: Synthetic oligonucleotide
  Target: LAMA2; (-) strand; PAM type: NNGRRT; PAM sequence: TAGAGT
atcacacagtcagtaagggg

SEQ ID NO: 22683 - DNA, 20 bp, Artificial Sequence
  Description of Artificial Sequence: Synthetic oligonucleotide
  Target: LAMA2; (-) strand; PAM type: NNGRRT; PAM sequence: AGGGGT
acgagatcacacagtcagta

SEQ ID NO: 22684 - DNA, 20 bp, Artificial Sequence
  Description of Artificial Sequence: Synthetic oligonucleotide
  Target: LAMA2; (-) strand; PAM type: NNGRRT; PAM sequence: GGGGGT
attttcacaacagctctatg

SEQ ID NO: 22685 - DNA, 20 bp, Artificial Sequence
  Description of Artificial Sequence: Synthetic oligonucleotide
  Target: LAMA2; (-) strand; PAM type: NNGRRT; PAM sequence: TTGAGT
ttcaactgggcacttacaca

SEQ ID NO: 22686 - DNA, 20 bp, Artificial Sequence
  Description of Artificial Sequence: Synthetic oligonucleotide
  Target: LAMA2; (-) strand; PAM type: NNGRRT; PAM sequence: CTGAAT
ttcagattgccctctgccag

SEQ ID NO: 22687 - DNA, 20 bp, Artificial Sequence
  Description of Artificial Sequence: Synthetic oligonucleotide
  Target: LAMA2; (-) strand; PAM type: NNGRRT; PAM sequence: ACGAGT
gcagctcgttcatttcggtc

SEQ ID NO: 22688 - DNA, 20 bp, Artificial Sequence
  Description of Artificial Sequence: Synthetic oligonucleotide
  Target: LAMA2; (-) strand; PAM type: NNGRRT; PAM sequence: GGGAAT
tctattttatataccaaatt

SEQ ID NO: 22689 - DNA, 20 bp, Artificial Sequence
  Description of Artificial Sequence: Synthetic oligonucleotide
  Target: LAMA2; (-) strand; PAM type: NNGRRT; PAM sequence: CAGAAT
ttgaagcagaattagcaagt

SEQ ID NO: 22690 - DNA, 20 bp, Artificial Sequence
  Description of Artificial Sequence: Synthetic oligonucleotide
  Target: LAMA2; (-) strand; PAM type: NNGRRT; PAM sequence: CAGAAT
ttctatgatttgatttgaag

SEQ ID NO: 22691 - DNA, 20 bp, Artificial Sequence
  Description of Artificial Sequence: Synthetic oligonucleotide
  Target: LAMA2; (-) strand; PAM type: NNGRRT; PAM sequence: CTGAAT
aaactttaccacggaggcta

SEQ ID NO: 22692 - DNA, 20 bp, Artificial Sequence
  Description of Artificial Sequence: Synthetic oligonucleotide
  Target: LAMA2; (-) strand; PAM type: NNGRRT; PAM sequence: TGGAGT
aaaaagtgtcttaagcactt

SEQ ID NO: 22693 - DNA, 20 bp, Artificial Sequence
  Description of Artificial Sequence: Synthetic oligonucleotide
  Target: LAMA2; (-) strand; PAM type: NNGRRT; PAM sequence: CTGAGT
actgggtccagcttaagtcc

SEQ ID NO: 22694 - DNA, 20 bp, Artificial Sequence
  Description of Artificial Sequence: Synthetic oligonucleotide
  Target: LAMA2; (-) strand; PAM type: NNGRRT; PAM sequence: CTGGGT
ggccagtgggaatcttgaga

SEQ ID NO: 22695 - DNA, 20 bp, Artificial Sequence
  Description of Artificial Sequence: Synthetic oligonucleotide
  Target: LAMA2; (-) strand; PAM type: NNGRRT; PAM sequence: GGGAAT
agaaaaagtactgggccagt

SEQ ID NO: 22696 - DNA, 20 bp, Artificial Sequence
  Description of Artificial Sequence: Synthetic oligonucleotide
  Target: LAMA2; (-) strand; PAM type: NNGRRT; PAM sequence: GTGGAT
gaagcctatttgattttcct

SEQ ID NO: 22697 - DNA, 20 bp, Artificial Sequence
  Description of Artificial Sequence: Synthetic oligonucleotide
  Target: LAMA2; (-) strand; PAM type: NNGRRT; PAM sequence: ATGAAT
aattcttatttataacaaat

SEQ ID NO: 22698 - DNA, 20 bp, Artificial Sequence
  Description of Artificial Sequence: Synthetic oligonucleotide
  Target: LAMA2; (-) strand; PAM type: NNGRRT; PAM sequence: CAGAAT
tctattattaaatatttctc

SEQ ID NO: 22699 - DNA, 20 bp, Artificial Sequence
  Description of Artificial Sequence: Synthetic oligonucleotide
  Target: LAMA2; (-) strand; PAM type: NNGRRT; PAM sequence: ATGAAT
agtattagttaagtgaatga

SEQ ID NO: 22700 - DNA, 20 bp, Artificial Sequence
  Description of Artificial Sequence: Synthetic oligonucleotide
  Target: LAMA2; (-) strand; PAM type: NNGRRT; PAM sequence: ATGAAT
aaaaagtattagttaagtga

SEQ ID NO: 22701 - DNA, 20 bp, Artificial Sequence
  Description of Artificial Sequence: Synthetic oligonucleotide
  Target: LAMA2; (-) strand; PAM type: NNGRRT; PAM sequence: GTGAAT
tcccaaaaagtattagttaa

SEQ ID NO: 22702 - DNA, 20 bp, Artificial Sequence
  Description of Artificial Sequence: Synthetic oligonucleotide
  Target: LAMA2; (-) strand; PAM type: NNGRRT; PAM sequence: AGGAGT
ggcaggcgaatcacaaggtc

SEQ ID NO: 22703 - DNA, 20 bp, Artificial Sequence
  Description of Artificial Sequence: Synthetic oligonucleotide
  Target: LAMA2; (-) strand; PAM type: NNGRRT; PAM sequence: GCGAAT
attttgggaggccaaggcag

SEQ ID NO: 22704 - DNA, 20 bp, Artificial Sequence
  Description of Artificial Sequence: Synthetic oligonucleotide
  Target: LAMA2; (-) strand; PAM type: NNGRRT; PAM sequence: AAGAGT
acaatctgctggaaagggta

SEQ ID NO: 22705 - DNA, 20 bp, Artificial Sequence
  Description of Artificial Sequence: Synthetic oligonucleotide
  Target: LAMA2; (-) strand; PAM type: NNGRRT; PAM sequence: AAGGGT
gcatgagacaatctgctgga

SEQ ID NO: 22706 - DNA, 20 bp, Artificial Sequence
  Description of Artificial Sequence: Synthetic oligonucleotide
  Target: LAMA2; (-) strand; PAM type: NNGRRT; PAM sequence: GGGAGT
tggggaaggttgtgggggca

SEQ ID NO: 22707 - DNA, 20 bp, Artificial Sequence
  Description of Artificial Sequence: Synthetic oligonucleotide
  Target: LAMA2; (-) strand; PAM type: NNGRRT; PAM sequence: TTGGGT
cctaatgtaaactatggact

SEQ ID NO: 22708 - DNA, 20 bp, Artificial Sequence
  Description of Artificial Sequence: Synthetic oligonucleotide
  Target: LAMA2; (-) strand; PAM type: NNGRRT; PAM sequence: TAGAAT
aatgcatttttccaaaccca

SEQ ID NO: 22709 - DNA, 20 bp, Artificial Sequence
  Description of Artificial Sequence: Synthetic oligonucleotide
  Target: LAMA2; (-) strand; PAM type: NNGRRT; PAM sequence: AGGAGT
tatgaataggtgaagcatag

SEQ ID NO: 22710 - DNA, 20 bp, Artificial Sequence
  Description of Artificial Sequence: Synthetic oligonucleotide
  Target: LAMA2; (-) strand; PAM type: NNGRRT; PAM sequence: ATGAAT
gggtcaaggaagagggaggt

SEQ ID NO: 22711 - DNA, 20 bp, Artificial Sequence
  Description of Artificial Sequence: Synthetic oligonucleotide
  Target: LAMA2; (-) strand; PAM type: NNGRRT; PAM sequence: AGGGGT
taaaaatatgagtggttgcc

SEQ ID NO: 22712 - DNA, 20 bp, Artificial Sequence
  Description of Artificial Sequence: Synthetic oligonucleotide
  Target: LAMA2; (-) strand; PAM type: NNGRRT; PAM sequence: ATGAGT
actatggatgtagtaaaaat

SEQ ID NO: 22713 - DNA, 20 bp, Artificial Sequence
  Description of Artificial Sequence: Synthetic oligonucleotide
  Target: LAMA2; (-) strand; PAM type: NNGRRT; PAM sequence: ATGGAT
attccaaaaaaggcaaaact

SEQ ID NO: 22714 - DNA, 20 bp, Artificial Sequence
  Description of Artificial Sequence: Synthetic oligonucleotide
  Target: LAMA2; (-) strand; PAM type: NNGRRT; PAM sequence: ATGAAT
agatgtccttcagtagggga

SEQ ID NO: 22715 - DNA, 20 bp, Artificial Sequence
  Description of Artificial Sequence: Synthetic oligonucleotide
  Target: LAMA2; (-) strand; PAM type: NNGRRT; PAM sequence: GGGAAT
accaagatgtccttcagtag

SEQ ID NO: 22716 - DNA, 20 bp, Artificial Sequence
  Description of Artificial Sequence: Synthetic oligonucleotide
  Target: LAMA2; (-) strand; PAM type: NNGRRT; PAM sequence: TGGAAT
gcaaaatagaaaagaccatt

SEQ ID NO: 22717 - DNA, 20 bp, Artificial Sequence
  Description of Artificial Sequence: Synthetic oligonucleotide
  Target: LAMA2; (-) strand; PAM type: NNGRRT; PAM sequence: GGGAAT
aactctcatttattgccggt

SEQ ID NO: 22718 - DNA, 20 bp, Artificial Sequence
  Description of Artificial Sequence: Synthetic oligonucleotide
  Target: LAMA2; (-) strand; PAM type: NNGRRT; PAM sequence: GAGGAT
taaaaacaccaaatgctatt

SEQ ID NO: 22719 - DNA, 20 bp, Artificial Sequence
  Description of Artificial Sequence: Synthetic oligonucleotide
  Target: LAMA2; (-) strand; PAM type: NNGRRT; PAM sequence: TAGAAT
gagataccatacacacttat

SEQ ID NO: 22720 - DNA, 20 bp, Artificial Sequence
  Description of Artificial Sequence: Synthetic oligonucleotide
  Target: LAMA2; (-) strand; PAM type: NNGRRT; PAM sequence: AAGAAT
aaggaattgcaaactaaaac

SEQ ID NO: 22721 - DNA, 20 bp, Artificial Sequence
  Description of Artificial Sequence: Synthetic oligonucleotide
  Target: LAMA2; (-) strand; PAM type: NNGRRT; PAM sequence: AGGAAT
ctcgacatcatatgtcatta

SEQ ID NO: 22722 - DNA, 20 bp, Artificial Sequence
  Description of Artificial Sequence: Synthetic oligonucleotide
  Target: LAMA2; (-) strand; PAM type: NNGRRT; PAM sequence: CTGAAT
cccaaaatatacaaaaaact

SEQ ID NO: 22723 - DNA, 20 bp, Artificial Sequence
  Description of Artificial Sequence: Synthetic oligonucleotide
  Target: LAMA2; (-) strand; PAM type: NNGRRT; PAM sequence: ATGAGT
agatgaccgtggatatggca

SEQ ID NO: 22724 - DNA, 20 bp, Artificial Sequence
  Description of Artificial Sequence: Synthetic oligonucleotide
  Target: LAMA2; (-) strand; PAM type: NNGRRT; PAM sequence: GTGGAT
aggagaaaatctagatgacc

SEQ ID NO: 22725 - DNA, 20 bp, Artificial Sequence
  Description of Artificial Sequence: Synthetic oligonucleotide
  Target: LAMA2; (-) strand; PAM type: NNGRRT; PAM sequence: ATGGAT
agtattggaattaactaaaa

SEQ ID NO: 22726 - DNA, 20 bp, Artificial Sequence
  Description of Artificial Sequence: Synthetic oligonucleotide
  Target: LAMA2; (-) strand; PAM type: NNGRRT; PAM sequence: TGGAAT
agtttattttaaaatagtat

SEQ ID NO: 22727 - DNA, 20 bp, Artificial Sequence
  Description of Artificial Sequence: Synthetic oligonucleotide
  Target: LAMA2; (-) strand; PAM type: NNGRRT; PAM sequence: TGGAGT
aacaatggggagactgggaa

SEQ ID NO: 22728 - DNA, 20 bp, Artificial Sequence
  Description of Artificial Sequence: Synthetic oligonucleotide
  Target: LAMA2; (-) strand; PAM type: NNGRRT; PAM sequence: GGGAAT
atgttaacaatggggagact

SEQ ID NO: 22729 - DNA, 20 bp, Artificial Sequence
  Description of Artificial Sequence: Synthetic oligonucleotide
  Target: LAMA2; (-) strand; PAM type: NNGRRT; PAM sequence: TTGGGT
gaaaaaatatgaatacagtc

SEQ ID NO: 22730 - DNA, 20 bp, Artificial Sequence
  Description of Artificial Sequence: Synthetic oligonucleotide
  Target: LAMA2; (-) strand; PAM type: NNGRRT; PAM sequence: ATGAAT
tcagtaaacactgaaaaaat

SEQ ID NO: 22731 - DNA, 20 bp, Artificial Sequence
  Description of Artificial Sequence: Synthetic oligonucleotide
  Target: LAMA2; (-) strand; PAM type: NNGRRT; PAM sequence: TGGGAT
atgtaatgtagtatcctgca

SEQ ID NO: 22732 - DNA, 20 bp, Artificial Sequence
  Description of Artificial Sequence: Synthetic oligonucleotide
  Target: LAMA2; (-) strand; PAM type: NNGRRT; PAM sequence: ATGGGT
taataagtcatattggtcac

SEQ ID NO: 22733 - DNA, 20 bp, Artificial Sequence
  Description of Artificial Sequence: Synthetic oligonucleotide
  Target: LAMA2; (-) strand; PAM type: NNGRRT; PAM sequence: CAGGGT
cactatgttagtcaggtgat

SEQ ID NO: 22734 - DNA, 20 bp, Artificial Sequence
  Description of Artificial Sequence: Synthetic oligonucleotide
  Target: LAMA2; (-) strand; PAM type: NNGRRT; PAM sequence: AAGAGT
agagtatgaaaagggcataa

SEQ ID NO: 22735 - DNA, 20 bp, Artificial Sequence
  Description of Artificial Sequence: Synthetic oligonucleotide
  Target: LAMA2; (-) strand; PAM type: NNGRRT; PAM sequence: TAGAGT
tgggcagataaaaatagtat

SEQ ID NO: 22736 - DNA, 20 bp, Artificial Sequence
  Description of Artificial Sequence: Synthetic oligonucleotide
  Target: LAMA2; (-) strand; PAM type: NNGRRT; PAM sequence: AAGAAT
cttttatgttactgaatctg

SEQ ID NO: 22737 - DNA, 20 bp, Artificial Sequence
  Description of Artificial Sequence: Synthetic oligonucleotide
  Target: LAMA2; (-) strand; PAM type: NNGRRT; PAM sequence: CTGAAT
tttctgcgccttttatgtta

SEQ ID NO: 22738 - DNA, 20 bp, Artificial Sequence
  Description of Artificial Sequence: Synthetic oligonucleotide
  Target: LAMA2; (-) strand; PAM type: NNGRRT; PAM sequence: ATGAGT
tggtaggaaaaaagtaatta

SEQ ID NO: 22739 - DNA, 20 bp, Artificial Sequence
  Description of Artificial Sequence: Synthetic oligonucleotide
  Target: LAMA2; (-) strand; PAM type: NNGRRT; PAM sequence: TTGAGT
agagaattggtcatgttgac

SEQ ID NO: 22740 - DNA, 20 bp, Artificial Sequence
  Description of Artificial Sequence: Synthetic oligonucleotide
  Target: LAMA2; (-) strand; PAM type: NNGRRT; PAM sequence: GAGAAT
agcttgaccacagggaaaga

SEQ ID NO: 22741 - DNA, 20 bp, Artificial Sequence
  Description of Artificial Sequence: Synthetic oligonucleotide
  Target: LAMA2; (-) strand; PAM type: NNGRRT; PAM sequence: TTGGAT
ttagcgtgcttagcctgatt

SEQ ID NO: 22742 - DNA, 20 bp, Artificial Sequence
  Description of Artificial Sequence: Synthetic oligonucleotide
  Target: LAMA2; (-) strand; PAM type: NNGRRT; PAM sequence: CAGGAT
tcataccctggtcacaactg

SEQ ID NO: 22743 - DNA, 20 bp, Artificial Sequence
  Description of Artificial Sequence: Synthetic oligonucleotide
  Target: LAMA2; (-) strand; PAM type: NNGRRT; PAM sequence: ATGGGT
ctgtctcctctaatgtagtc

SEQ ID NO: 22744 - DNA, 20 bp, Artificial Sequence
  Description of Artificial Sequence: Synthetic oligonucleotide
  Target: LAMA2; (-) strand; PAM type: NNGRRT; PAM sequence: ATGGGT
gaccaactgcatcacaacct

SEQ ID NO: 22745 - DNA, 20 bp, Artificial Sequence
  Description of Artificial Sequence: Synthetic oligonucleotide
  Target: LAMA2; (-) strand; PAM type: NNGRRT; PAM sequence: TTGAAT
cagtataatctggggagttc

SEQ ID NO: 22746 - DNA, 20 bp, Artificial Sequence
  Description of Artificial Sequence: Synthetic oligonucleotide
  Target: LAMA2; (-) strand; PAM type: NNGRRT; PAM sequence: GGGAGT
ttctttatcagtataatctg

SEQ ID NO: 22747 - DNA, 20 bp, Artificial Sequence
  Description of Artificial Sequence: Synthetic oligonucleotide
  Target: LAMA2; (-) strand; PAM type: NNGRRT; PAM sequence: CAGGAT
tcttagctattaggtaacta

SEQ ID NO: 22748 - DNA, 20 bp, Artificial Sequence
  Description of Artificial Sequence: Synthetic oligonucleotide
  Target: LAMA2; (-) strand; PAM type: NNGRRT; PAM sequence: GAGAGT
aaggcattttccagagggaa

SEQ ID NO: 22749 - DNA, 20 bp, Artificial Sequence
  Description of Artificial Sequence: Synthetic oligonucleotide
  Target: LAMA2; (-) strand; PAM type: NNGRRT; PAM sequence: AAGGGT
tgtactccagcctggacaac

SEQ ID NO: 22750 - DNA, 20 bp, Artificial Sequence
  Description of Artificial Sequence: Synthetic oligonucleotide
  Target: LAMA2; (-) strand; PAM type: NNGRRT; PAM sequence: CTGAGT
gaggtggaggttgcagtgag

SEQ ID NO: 22751 - DNA, 20 bp, Artificial Sequence
  Description of Artificial Sequence: Synthetic oligonucleotide
  Target: LAMA2; (-) strand; PAM type: NNGRRT; PAM sequence: GAGAAT
tacttgggaggctgaagcag

SEQ ID NO: 22752 - DNA, 20 bp, Artificial Sequence
  Description of Artificial Sequence: Synthetic oligonucleotide
  Target: LAMA2; (-) strand; PAM type: NNGRRT; PAM sequence: AGGGGT
cgggtggatcacccgaggtc

SEQ ID NO: 22753 - DNA, 20 bp, Artificial Sequence
  Description of Artificial Sequence: Synthetic oligonucleotide
  Target: LAMA2; (-) strand; PAM type: NNGRRT; PAM sequence: GTGGAT
actttgggaggctgaggcgg

SEQ ID NO: 22754 - DNA, 20 bp, Artificial Sequence
  Description of Artificial Sequence: Synthetic oligonucleotide
  Target: LAMA2; (-) strand; PAM type: NNGRRT; PAM sequence: GCGGGT
cagcactttgggaggctgag

SEQ ID NO: 22755 - DNA, 20 bp, Artificial Sequence
  Description of Artificial Sequence: Synthetic oligonucleotide
  Target: LAMA2; (-) strand; PAM type: NNGRRT; PAM sequence: CAGGAT
tagctcctacagcagtcatg

SEQ ID NO: 22756 - DNA, 20 bp, Artificial Sequence
  Description of Artificial Sequence: Synthetic oligonucleotide
  Target: LAMA2; (-) strand; PAM type: NNGRRT; PAM sequence: GAGGGT
ataaaagcccttaaagaaga

SEQ ID NO: 22757 - DNA, 20 bp, Artificial Sequence
  Description of Artificial Sequence: Synthetic oligonucleotide
  Target: LAMA2; (-) strand; PAM type: NNGRRT; PAM sequence: ATGAGT
gatttctccatttaaaaaca

SEQ ID NO: 22758 - DNA, 20 bp, Artificial Sequence
  Description of Artificial Sequence: Synthetic oligonucleotide
  Target: LAMA2; (-) strand; PAM type: NNGRRT; PAM sequence: GGGAAT
ttctttacccagggatatta

SEQ ID NO: 22759 - DNA, 20 bp, Artificial Sequence
  Description of Artificial Sequence: Synthetic oligonucleotide
  Target: LAMA2; (-) strand; PAM type: NNGRRT; PAM sequence: AGGGAT
gaataatgtcttctttaccc

SEQ ID NO: 22760 - DNA, 20 bp, Artificial Sequence
  Description of Artificial Sequence: Synthetic oligonucleotide
  Target: LAMA2; (-) strand; PAM type: NNGRRT; PAM sequence: TGGAAT
tttaaatatgagttcttggg

SEQ ID NO: 22761 - DNA, 20 bp, Artificial Sequence
  Description of Artificial Sequence: Synthetic oligonucleotide
  Target: LAMA2; (-) strand; PAM type: NNGRRT; PAM sequence: TTGGGT
tacattttaaatatgagttc

SEQ ID NO: 22762 - DNA, 20 bp, Artificial Sequence
  Description of Artificial Sequence: Synthetic oligonucleotide
  Target: LAMA2; (-) strand; PAM type: NNGRRT; PAM sequence: ATGAGT
tatcaaaatacattttaaat

SEQ ID NO: 22763 - DNA, 20 bp, Artificial Sequence
  Description of Artificial Sequence: Synthetic oligonucleotide
  Target: LAMA2; (-) strand; PAM type: NNGRRT; PAM sequence: ATGAAT
tttttactttatatttatac

SEQ ID NO: 22764 - DNA, 20 bp, Artificial Sequence
  Description of Artificial Sequence: Synthetic oligonucleotide
  Target: LAMA2; (-) strand; PAM type: NNGRRT; PAM sequence: GTGAGT
gaggaacttgggttcttcca

SEQ ID NO: 22765 - DNA, 20 bp, Artificial Sequence
  Description of Artificial Sequence: Synthetic oligonucleotide
  Target: LAMA2; (-) strand; PAM type: NNGRRT; PAM sequence: TTGGGT
gattctcatatgtgaggaac

SEQ ID NO: 22766 - DNA, 20 bp, Artificial Sequence
  Description of Artificial Sequence: Synthetic oligonucleotide
  Target: LAMA2; (-) strand; PAM type: NNGRRT; PAM sequence: TTGAAT
cacacatactgtagggcagt

SEQ ID NO: 22767 - DNA, 20 bp, Artificial Sequence
  Description of Artificial Sequence: Synthetic oligonucleotide
  Target: LAMA2; (-) strand; PAM type: NNGRRT; PAM sequence: TAGAGT
acaatagctatagaggtaag

SEQ ID NO: 22768 - DNA, 20 bp, Artificial Sequence
  Description of Artificial Sequence: Synthetic oligonucleotide
  Target: LAMA2; (-) strand; PAM type: NNGRRT; PAM sequence: TGGAGT
agtgaaaatccaggcagcag

SEQ ID NO: 22769 - DNA, 20 bp, Artificial Sequence
  Description of Artificial Sequence: Synthetic oligonucleotide
  Target: LAMA2; (-) strand; PAM type: NNGRRT; PAM sequence: GGGAGT
aacagtttcagtagtgggct

SEQ ID NO: 22770 - DNA, 20 bp, Artificial Sequence
  Description of Artificial Sequence: Synthetic oligonucleotide
  Target: LAMA2; (-) strand; PAM type: NNGRRT; PAM sequence: GTGGAT
gtaaaattaataagtatcca

SEQ ID NO: 22771 - DNA, 20 bp, Artificial Sequence
  Description of Artificial Sequence: Synthetic oligonucleotide
  Target: LAMA2; (-) strand; PAM type: NNGRRT; PAM sequence: GAGAAT
agccttagaatgaaaggttg

SEQ ID NO: 22772 - DNA, 20 bp, Artificial Sequence
  Description of Artificial Sequence: Synthetic oligonucleotide
  Target: LAMA2; (-) strand; PAM type: NNGRRT; PAM sequence: TAGAAT
gatgatgagaggaagagcct

SEQ ID NO: 22773 - DNA, 20 bp, Artificial Sequence
  Description of Artificial Sequence: Synthetic oligonucleotide
  Target: LAMA2; (-) strand; PAM type: NNGRRT; PAM sequence: AGGGAT
ccaaggaacaccgactttga

SEQ ID NO: 22774 - DNA, 20 bp, Artificial Sequence
  Description of Artificial Sequence: Synthetic oligonucleotide
  Target: LAMA2; (-) strand; PAM type: NNGRRT; PAM sequence: ATGAAT
agccttgaaaatatagattt

SEQ ID NO: 22775 - DNA, 20 bp, Artificial Sequence
  Description of Artificial Sequence: Synthetic oligonucleotide
  Target: LAMA2; (-) strand; PAM type: NNGRRT; PAM sequence: GAGAAT
ggcacataggaccaaagcat

SEQ ID NO: 22776 - DNA, 20 bp, Artificial Sequence
  Description of Artificial Sequence: Synthetic oligonucleotide
  Target: LAMA2; (-) strand; PAM type: NNGRRT; PAM sequence: ATGAGT
atgggctttaagaggaaatg

SEQ ID NO: 22777 - DNA, 20 bp, Artificial Sequence
  Description of Artificial Sequence: Synthetic oligonucleotide
  Target: LAMA2; (-) strand; PAM type: NNGRRT; PAM sequence: GCGGAT
gggagactgggcatatactg

SEQ ID NO: 22778 - DNA, 20 bp, Artificial Sequence
  Description of Artificial Sequence: Synthetic oligonucleotide
  Target: LAMA2; (-) strand; PAM type: NNGRRT; PAM sequence: TAGAGT
atgaaggatgaaagagggag

SEQ ID NO: 22779 - DNA, 20 bp, Artificial Sequence
  Description of Artificial Sequence: Synthetic oligonucleotide
  Target: LAMA2; (-) strand; PAM type: NNGRRT; PAM sequence: GGGAGT
atttgatgaaggatgaaaga

SEQ ID NO: 22780 - DNA, 20 bp, Artificial Sequence
  Description of Artificial Sequence: Synthetic oligonucleotide
  Target: LAMA2; (-) strand; PAM type: NNGRRT; PAM sequence: AAGGAT
gaaggaaactgaatttgatg

SEQ ID NO: 22781 - DNA, 20 bp, Artificial Sequence
  Description of Artificial Sequence: Synthetic oligonucleotide
  Target: LAMA2; (-) strand; PAM type: NNGRRT; PAM sequence: CTGAAT
agagtcaccatagaaggaaa

SEQ ID NO: 22782 - DNA, 20 bp, Artificial Sequence
  Description of Artificial Sequence: Synthetic oligonucleotide
  Target: LAMA2; (-) strand; PAM type: NNGRRT; PAM sequence: AAGAGT
agagttggataaggcttaca

SEQ ID NO: 22783 - DNA, 20 bp, Artificial Sequence
  Description of Artificial Sequence: Synthetic oligonucleotide
  Target: LAMA2; (-) strand; PAM type: NNGRRT; PAM sequence: TTGGAT
taaataacaacaggttagag

SEQ ID NO: 22784 - DNA, 20 bp, Artificial Sequence
  Description of Artificial Sequence: Synthetic oligonucleotide
  Target: LAMA2; (-) strand; PAM type: NNGRRT; PAM sequence: TAGAGT
ccatataaataacaacaggt

SEQ ID NO: 22785 - DNA, 20 bp, Artificial Sequence
  Description of Artificial Sequence: Synthetic oligonucleotide
  Target: LAMA2; (-) strand; PAM type: NNGRRT; PAM sequence: TAGAAT
acatgataggatctgcaatt

SEQ ID NO: 22786 - DNA, 20 bp, Artificial Sequence
  Description of Artificial Sequence: Synthetic oligonucleotide
  Target: LAMA2; (-) strand; PAM type: NNGRRT; PAM sequence: TAGGAT
taaggaagagaatgacatga

SEQ ID NO: 22787 - DNA, 20 bp, Artificial Sequence
  Description of Artificial Sequence: Synthetic oligonucleotide
  Target: LAMA2; (-) strand; PAM type: NNGRRT; PAM sequence: GAGAAT
ccatagtacaatttaaggaa

SEQ ID NO: 22788 - DNA, 20 bp, Artificial Sequence
  Description of Artificial Sequence: Synthetic oligonucleotide
  Target: LAMA2; (-) strand; PAM type: NNGRRT; PAM sequence: ATGAGT
ggggtccagatgaccagacc

SEQ ID NO: 22789 - DNA, 20 bp, Artificial Sequence
  Description of Artificial Sequence: Synthetic oligonucleotide
  Target: LAMA2; (-) strand; PAM type: NNGRRT; PAM sequence: AGGGGT
ggcttataccctcaatccgt

SEQ ID NO: 22790 - DNA, 20 bp, Artificial Sequence
  Description of Artificial Sequence: Synthetic oligonucleotide
  Target: LAMA2; (-) strand; PAM type: NNGRRT; PAM sequence: TTGGAT
gcccagtgtgtggtaatgaa

SEQ ID NO: 22791 - DNA, 20 bp, Artificial Sequence
  Description of Artificial Sequence: Synthetic oligonucleotide
  Target: LAMA2; (-) strand; PAM type: NNGRRT; PAM sequence: ATGAAT
tggaagcccagtgtgtggta

SEQ ID NO: 22792 - DNA, 20 bp, Artificial Sequence
  Description of Artificial Sequence: Synthetic oligonucleotide
  Target: LAMA2; (-) strand; PAM type: NNGRRT; PAM sequence: ATGAAT
atgagagtggggtagtagag

SEQ ID NO: 22793 - DNA, 20 bp, Artificial Sequence
  Description of Artificial Sequence: Synthetic oligonucleotide
  Target: LAMA2; (-) strand; PAM type: NNGRRT; PAM sequence: TGGGGT
aatatgagattggatgagag

SEQ ID NO: 22794 - DNA, 20 bp, Artificial Sequence
  Description of Artificial Sequence: Synthetic oligonucleotide
  Target: LAMA2; (-) strand; PAM type: NNGRRT; PAM sequence: GAGAGT
tacacaatatgagattggat

SEQ ID NO: 22795 - DNA, 20 bp, Artificial Sequence
  Description of Artificial Sequence: Synthetic oligonucleotide
  Target: LAMA2; (-) strand; PAM type: NNGRRT; PAM sequence: TTGGAT
ccaaactacacaatatgaga

SEQ ID NO: 22796 - DNA, 20 bp, Artificial Sequence
  Description of Artificial Sequence: Synthetic oligonucleotide
  Target: LAMA2; (-) strand; PAM type: NNGRRT; PAM sequence: AAGAGT
gaacagatttggaggagaac

SEQ ID NO: 22797 - DNA, 20 bp, Artificial Sequence
  Description of Artificial Sequence: Synthetic oligonucleotide
  Target: LAMA2; (-) strand; PAM type: NNGRRT; PAM sequence: TGGAAT
tgcgatgacgtattcacatt

SEQ ID NO: 22798 - DNA, 20 bp, Artificial Sequence
  Description of Artificial Sequence: Synthetic oligonucleotide
  Target: LAMA2; (-) strand; PAM type: NNGRRT; PAM sequence: AAGAGT
agcctaagggaagtcagggg

SEQ ID NO: 22799 - DNA, 20 bp, Artificial Sequence
  Description of Artificial Sequence: Synthetic oligonucleotide
  Target: LAMA2; (-) strand; PAM type: NNGRRT; PAM sequence: GAGAAT
atgggagatgtggccaaggg

SEQ ID NO: 22800 - DNA, 20 bp, Artificial Sequence
  Description of Artificial Sequence: Synthetic oligonucleotide
  Target: LAMA2; (-) strand; PAM type: NNGRRT; PAM sequence: TGGAGT
tggctgggggacagtatggc

SEQ ID NO: 22801 - DNA, 20 bp, Artificial Sequence
  Description of Artificial Sequence: Synthetic oligonucleotide
  Target: LAMA2; (-) strand; PAM type: NNGRRT; PAM sequence: TGGAGT
ctgagatttgaaaggtaaat

SEQ ID NO: 22802 - DNA, 20 bp, Artificial Sequence
  Description of Artificial Sequence: Synthetic oligonucleotide
  Target: LAMA2; (-) strand; PAM type: NNGRRT; PAM sequence: AGGAAT
tggtataagataagcacagg

SEQ ID NO: 22803 - DNA, 20 bp, Artificial Sequence
  Description of Artificial Sequence: Synthetic oligonucleotide
  Target: LAMA2; (-) strand; PAM type: NNGRRT; PAM sequence: TGGAGT
aaaaaggtttcttgcccatt

SEQ ID NO: 22804 - DNA, 20 bp, Artificial Sequence
  Description of Artificial Sequence: Synthetic oligonucleotide
  Target: LAMA2; (-) strand; PAM type: NNGRRT; PAM sequence: TTGGGT
gtgcaaaataaatgtttatt

SEQ ID NO: 22805 - DNA, 20 bp, Artificial Sequence
  Description of Artificial Sequence: Synthetic oligonucleotide
  Target: LAMA2; (-) strand; PAM type: NNGRRT; PAM sequence: AAGAGT
cctgattttaacacatttta

SEQ ID NO: 22806 - DNA, 20 bp, Artificial Sequence
  Description of Artificial Sequence: Synthetic oligonucleotide
  Target: LAMA2; (-) strand; PAM type: NNGRRT; PAM sequence: CAGAAT
tacatagcattctcccctta

SEQ ID NO: 22807 - DNA, 20 bp, Artificial Sequence
  Description of Artificial Sequence: Synthetic oligonucleotide
  Target: LAMA2; (-) strand; PAM type: NNGRRT; PAM sequence: TGGAAT
gacaatgagccagttccatg

SEQ ID NO: 22808 - DNA, 20 bp, Artificial Sequence
  Description of Artificial Sequence: Synthetic oligonucleotide
  Target: LAMA2; (-) strand; PAM type: NNGRRT; PAM sequence: TGGAAT
ggagcaaccagctgaccccg

SEQ ID NO: 22809 - DNA, 20 bp, Artificial Sequence
  Description of Artificial Sequence: Synthetic oligonucleotide
  Target: LAMA2; (-) strand; PAM type: NNGRRT; PAM sequence: AAGGGT
atcatttatatgatactctc

SEQ ID NO: 22810 - DNA, 20 bp, Artificial Sequence
  Description of Artificial Sequence: Synthetic oligonucleotide
  Target: LAMA2; (-) strand; PAM type: NNGRRT; PAM sequence: CTGAAT
taatggagcaaacctaacta

SEQ ID NO: 22811 - DNA, 20 bp, Artificial Sequence
  Description of Artificial Sequence: Synthetic oligonucleotide
  Target: LAMA2; (-) strand; PAM type: NNGRRT; PAM sequence: TAGAAT
tgccttctttatgttaaaac

SEQ ID NO: 22812 - DNA, 20 bp, Artificial Sequence
  Description of Artificial Sequence: Synthetic oligonucleotide
  Target: LAMA2; (-) strand; PAM type: NNGRRT; PAM sequence: TTGGAT
tctgcacataattttcttgg

SEQ ID NO: 22813 - DNA, 20 bp, Artificial Sequence
  Description of Artificial Sequence: Synthetic oligonucleotide
  Target: LAMA2; (-) strand; PAM type: NNGRRT; PAM sequence: TAGAGT
ttttttcttgttttgttttt

SEQ ID NO: 22814 - DNA, 20 bp, Artificial Sequence
  Description of Artificial Sequence: Synthetic oligonucleotide
  Target: LAMA2; (-) strand; PAM type: NNGRRT; PAM sequence: TTGGAT
tcttcctttcattctctatc

SEQ ID NO: 22815 - DNA, 20 bp, Artificial Sequence
  Description of Artificial Sequence: Synthetic oligonucleotide
  Target: LAMA2; (-) strand; PAM type: NNGRRT; PAM sequence: TTGAGT
attcactattatcttgtcct

SEQ ID NO: 22816 - DNA, 20 bp, Artificial Sequence
  Description of Artificial Sequence: Synthetic oligonucleotide
  Target: LAMA2; (-) strand; PAM type: NNGRRT; PAM sequence: ATGAAT
ggctattgataatgttatga

SEQ ID NO: 22817 - DNA, 20 bp, Artificial Sequence
  Description of Artificial Sequence: Synthetic oligonucleotide
  Target: LAMA2; (-) strand; PAM type: NNGRRT; PAM sequence: ATGAAT
gacaggctattgataatgtt

SEQ ID NO: 22818 - DNA, 20 bp, Artificial Sequence
  Description of Artificial Sequence: Synthetic oligonucleotide
  Target: LAMA2; (-) strand; PAM type: NNGRRT; PAM sequence: ATGGGT
tgacaaatgcactatcacct

SEQ ID NO: 22819 - DNA, 20 bp, Artificial Sequence
  Description of Artificial Sequence: Synthetic oligonucleotide
  Target: LAMA2; (-) strand; PAM type: NNGRRT; PAM sequence: GTGAGT
gaaaaactggagtattctag

SEQ ID NO: 22820 - DNA, 20 bp, Artificial Sequence
  Description of Artificial Sequence: Synthetic oligonucleotide
  Target: LAMA2; (-) strand; PAM type: NNGRRT; PAM sequence: TGGAGT
tagtaaaatacatgaaaaac

SEQ ID NO: 22821 - DNA, 20 bp, Artificial Sequence
  Description of Artificial Sequence: Synthetic oligonucleotide
  Target: LAMA2; (-) strand; PAM type: NNGRRT; PAM sequence: AAGAGT
gtgtttggctaacatccaga

SEQ ID NO: 22822 - DNA, 20 bp, Artificial Sequence
  Description of Artificial Sequence: Synthetic oligonucleotide
  Target: LAMA2; (-) strand; PAM type: NNGRRT; PAM sequence: GGGAAT
tatctgaacttacatgtaca

SEQ ID NO: 22823 - DNA, 20 bp, Artificial Sequence
  Description of Artificial Sequence: Synthetic oligonucleotide
  Target: LAMA2; (-) strand; PAM type: NNGRRT; PAM sequence: CTGAAT
gtgtgtctcacttactcttc

SEQ ID NO: 22824 - DNA, 20 bp, Artificial Sequence
  Description of Artificial Sequence: Synthetic oligonucleotide
  Target: LAMA2; (-) strand; PAM type: NNGRRT; PAM sequence: GTGAAT
gattccatgtctttgctatt

SEQ ID NO: 22825 - DNA, 20 bp, Artificial Sequence
  Description of Artificial Sequence: Synthetic oligonucleotide
  Target: LAMA2; (-) strand; PAM type: NNGRRT; PAM sequence: AAGGGT
tgttcctgtgttagtttgct

SEQ ID NO: 22826 - DNA, 20 bp, Artificial Sequence
  Description of Artificial Sequence: Synthetic oligonucleotide
  Target: LAMA2; (-) strand; PAM type: NNGRRT; PAM sequence: TGGGGT
aaaaaaaaacccatgcataa

SEQ ID NO: 22827 - DNA, 20 bp, Artificial Sequence
  Description of Artificial Sequence: Synthetic oligonucleotide
  Target: LAMA2; (-) strand; PAM type: NNGRRT; PAM sequence: CAGGAT
taagttcagggatacatgtg

SEQ ID NO: 22828 - DNA, 20 bp, Artificial Sequence
  Description of Artificial Sequence: Synthetic oligonucleotide
  Target: LAMA2; (-) strand; PAM type: NNGRRT; PAM sequence: AGGGAT
tttttttaacttttaagttc

SEQ ID NO: 22829 - DNA, 20 bp, Artificial Sequence
  Description of Artificial Sequence: Synthetic oligonucleotide
  Target: LAMA2; (-) strand; PAM type: NNGRRT; PAM sequence: CAGAAT
agtcaggctcatctgtacct

SEQ ID NO: 22830 - DNA, 20 bp, Artificial Sequence
  Description of Artificial Sequence: Synthetic oligonucleotide
  Target: LAMA2; (-) strand; PAM type: NNGRRT; PAM sequence: ATGAGT
gcgggttagcatgctaaagg

SEQ ID NO: 22831 - DNA, 20 bp, Artificial Sequence
  Description of Artificial Sequence: Synthetic oligonucleotide
  Target: LAMA2; (-) strand; PAM type: NNGRRT; PAM sequence: AAGGAT
taatgcgggttagcatgcta

SEQ ID NO: 22832 - DNA, 20 bp, Artificial Sequence
  Description of Artificial Sequence: Synthetic oligonucleotide
  Target: LAMA2; (-) strand; PAM type: NNGRRT; PAM sequence: GCGGGT
accaaaagcatcaacttaat

SEQ ID NO: 22833 - DNA, 20 bp, Artificial Sequence
  Description of Artificial Sequence: Synthetic oligonucleotide
  Target: LAMA2; (-) strand; PAM type: NNGRRT; PAM sequence: GAGGGT
gtggcagtagggggcaggaa

SEQ ID NO: 22834 - DNA, 20 bp, Artificial Sequence
  Description of Artificial Sequence: Synthetic oligonucleotide
  Target: LAMA2; (-) strand; PAM type: NNGRRT; PAM sequence: GGGAGT
aagttccacgctggtggggt

SEQ ID NO: 22835 - DNA, 20 bp, Artificial Sequence
  Description of Artificial Sequence: Synthetic oligonucleotide
  Target: LAMA2; (-) strand; PAM type: NNGRRT; PAM sequence: TGGGGT
cacacgaagttccacgctgg

SEQ ID NO: 22836 - DNA, 20 bp, Artificial Sequence
  Description of Artificial Sequence: Synthetic oligonucleotide
  Target: LAMA2; (-) strand; PAM type: NNGRRT; PAM sequence: TTGAAT
cagtaattcaaactggacct

SEQ ID NO: 22837 - DNA, 20 bp, Artificial Sequence
  Description of Artificial Sequence: Synthetic oligonucleotide
  Target: LAMA2; (-) strand; PAM type: NNGRRT; PAM sequence: GTGAAT
ttgggagaagagccaggcat

SEQ ID NO: 22838 - DNA, 20 bp, Artificial Sequence
  Description of Artificial Sequence: Synthetic oligonucleotide
  Target: LAMA2; (-) strand; PAM type: NNGRRT; PAM sequence: GTGGAT
tcatagatgttgggtgattg

SEQ ID NO: 22839 - DNA, 20 bp, Artificial Sequence
  Description of Artificial Sequence: Synthetic oligonucleotide
  Target: LAMA2; (-) strand; PAM type: NNGRRT; PAM sequence: TTGGGT
attgtcgtgggtcatagatg

SEQ ID NO: 22840 - DNA, 20 bp, Artificial Sequence
  Description of Artificial Sequence: Synthetic oligonucleotide
  Target: LAMA2; (-) strand; PAM type: NNGRRT; PAM sequence: GTGGGT
atagtgtctggcaaattgtc

SEQ ID NO: 22841 - DNA, 20 bp, Artificial Sequence
  Description of Artificial Sequence: Synthetic oligonucleotide
  Target: LAMA2; (-) strand; PAM type: NNGRRT; PAM sequence: CAGAGT
gtcttactctttttattcct

SEQ ID NO: 22842 - DNA, 20 bp, Artificial Sequence
  Description of Artificial Sequence: Synthetic oligonucleotide
  Target: LAMA2; (-) strand; PAM type: NNGRRT; PAM sequence: AGGGAT
tagatagattagaaaaggct

SEQ ID NO: 22843 - DNA, 20 bp, Artificial Sequence
  Description of Artificial Sequence: Synthetic oligonucleotide
  Target: LAMA2; (-) strand; PAM type: NNGRRT; PAM sequence: ATGGGT
taccactattcacaactcta

SEQ ID NO: 22844 - DNA, 20 bp, Artificial Sequence
  Description of Artificial Sequence: Synthetic oligonucleotide
  Target: LAMA2; (-) strand; PAM type: NNGRRT; PAM sequence: GGGGGT
aactgtaaggtaagctctaa

SEQ ID NO: 22845 - DNA, 20 bp, Artificial Sequence
  Description of Artificial Sequence: Synthetic oligonucleotide
  Target: LAMA2; (-) strand; PAM type: NNGRRT; PAM sequence: GAGAAT
cttcatagcaccatggattt

SEQ ID NO: 22846 - DNA, 20 bp, Artificial Sequence
  Description of Artificial Sequence: Synthetic oligonucleotide
  Target: LAMA2; (-) strand; PAM type: NNGRRT; PAM sequence: ATGGAT
gacgtttccttcatagcacc

SEQ ID NO: 22847 - DNA, 20 bp, Artificial Sequence
  Description of Artificial Sequence: Synthetic oligonucleotide
  Target: LAMA2; (-) strand; PAM type: NNGRRT; PAM sequence: CAGGGT
ctccttagcgtggccattcc

SEQ ID NO: 22848 - DNA, 20 bp, Artificial Sequence
  Description of Artificial Sequence: Synthetic oligonucleotide
  Target: LAMA2; (-) strand; PAM type: NNGRRT; PAM sequence: CTGGGT
ctcctcaacacctgtaaaga

SEQ ID NO: 22849 - DNA, 20 bp, Artificial Sequence
  Description of Artificial Sequence: Synthetic oligonucleotide
  Target: LAMA2; (-) strand; PAM type: NNGRRT; PAM sequence: TAGAAT
tgtatcccattgtctttacc

SEQ ID NO: 22850 - DNA, 20 bp, Artificial Sequence
  Description of Artificial Sequence: Synthetic oligonucleotide
  Target: LAMA2; (-) strand; PAM type: NNGRRT; PAM sequence: AAGAAT
tacttcaatactaaattgtc

SEQ ID NO: 22851 - DNA, 20 bp, Artificial Sequence
  Description of Artificial Sequence: Synthetic oligonucleotide
  Target: LAMA2; (-) strand; PAM type: NNGRRT; PAM sequence: AAGAGT
tcatttacgtagtaatgtgt

SEQ ID NO: 22852 - DNA, 20 bp, Artificial Sequence
  Description of Artificial Sequence: Synthetic oligonucleotide
  Target: LAMA2; (-) strand; PAM type: NNGRRT; PAM sequence: CTGGAT
tacactgtctcttttaaatt

SEQ ID NO: 22853 - DNA, 20 bp, Artificial Sequence
  Description of Artificial Sequence: Synthetic oligonucleotide
  Target: LAMA2; (-) strand; PAM type: NNGRRT; PAM sequence: ACGGAT
atcttccaatatcttacctt

SEQ ID NO: 22854 - DNA, 20 bp, Artificial Sequence
  Description of Artificial Sequence: Synthetic oligonucleotide
  Target: LAMA2; (-) strand; PAM type: NNGRRT; PAM sequence: TTGGAT
tgttcgtagtctaaactgct

SEQ ID NO: 22855 - DNA, 20 bp, Artificial Sequence
  Description of Artificial Sequence: Synthetic oligonucleotide
  Target: LAMA2; (-) strand; PAM type: NNGRRT; PAM sequence: CTGAAT
caattatttaaatgttactt

SEQ ID NO: 22856 - DNA, 20 bp, Artificial Sequence
  Description of Artificial Sequence: Synthetic oligonucleotide
  Target: LAMA2; (-) strand; PAM type: NNGRRT; PAM sequence: ATGGGT
tgtttgcactcaaaggtctg

SEQ ID NO: 22857 - DNA, 20 bp, Artificial Sequence
  Description of Artificial Sequence: Synthetic oligonucleotide
  Target: LAMA2; (-) strand; PAM type: NNGRRT; PAM sequence: GTGAGT
ctcaaatccttgcttttctg

SEQ ID NO: 22858 - DNA, 20 bp, Artificial Sequence
  Description of Artificial Sequence: Synthetic oligonucleotide
  Target: LAMA2; (-) strand; PAM type: NNGRRT; PAM sequence: TGGGAT
tttggatttaaaaatttttt

SEQ ID NO: 22859 - DNA, 20 bp, Artificial Sequence
  Description of Artificial Sequence: Synthetic oligonucleotide
  Target: LAMA2; (-) strand; PAM type: NNGRRT; PAM sequence: TTGGAT
taatggaattattttcactt

SEQ ID NO: 22860 - DNA, 20 bp, Artificial Sequence
  Description of Artificial Sequence: Synthetic oligonucleotide
  Target: LAMA2; (-) strand; PAM type: NNGRRT; PAM sequence: TGGAAT
ttcttctaaaacattaataa

SEQ ID NO: 22861 - DNA, 20 bp, Artificial Sequence
  Description of Artificial Sequence: Synthetic oligonucleotide
  Target: LAMA2; (-) strand; PAM type: NNGRRT; PAM sequence: CTGGAT
aaccaaagtattataatgct

SEQ ID NO: 22862 - DNA, 20 bp, Artificial Sequence
  Description of Artificial Sequence: Synthetic oligonucleotide
  Target: LAMA2; (-) strand; PAM type: NNGRRT; PAM sequence: GAGAGT
tacatatacacaataatttg

SEQ ID NO: 22863 - DNA, 20 bp, Artificial Sequence
  Description of Artificial Sequence: Synthetic oligonucleotide
  Target: LAMA2; (-) strand; PAM type: NNGRRT; PAM sequence: AAGAAT
aaatgaaaggatgaaaggat

SEQ ID NO: 22864 - DNA, 20 bp, Artificial Sequence
  Description of Artificial Sequence: Synthetic oligonucleotide
  Target: LAMA2; (-) strand; PAM type: NNGRRT; PAM sequence: AAGGAT
catcacaaatgaaaggatga

SEQ ID NO: 22865 - DNA, 20 bp, Artificial Sequence
  Description of Artificial Sequence: Synthetic oligonucleotide
  Target: LAMA2; (-) strand; PAM type: NNGRRT; PAM sequence: AAGGAT
agtgttaacatcacaaatga

SEQ ID NO: 22866 - DNA, 20 bp, Artificial Sequence
  Description of Artificial Sequence: Synthetic oligonucleotide
  Target: LAMA2; (-) strand; PAM type: NNGRRT; PAM sequence: AGGAAT
tcaaggttttgcacaaatga

SEQ ID NO: 22867 - DNA, 20 bp, Artificial Sequence
  Description of Artificial Sequence: Synthetic oligonucleotide
  Target: LAMA2; (-) strand; PAM type: NNGRRT; PAM sequence: AGGAAT
aacatggtaaaagacgctag

SEQ ID NO: 22868 - DNA, 20 bp, Artificial Sequence
  Description of Artificial Sequence: Synthetic oligonucleotide
  Target: LAMA2; (-) strand; PAM type: NNGRRT; PAM sequence: GTGGAT
aatatttaaaatatacgtaa

SEQ ID NO: 22869 - DNA, 20 bp, Artificial Sequence
  Description of Artificial Sequence: Synthetic oligonucleotide
  Target: LAMA2; (-) strand; PAM type: NNGRRT; PAM sequence: GAGAAT
ttgcatactaggcatggcca

SEQ ID NO: 22870 - DNA, 20 bp, Artificial Sequence
  Description of Artificial Sequence: Synthetic oligonucleotide
  Target: LAMA2; (-) strand; PAM type: NNGRRT; PAM sequence: CAGAGT
aacactctagaatcttgtac

SEQ ID NO: 22871 - DNA, 20 bp, Artificial Sequence
  Description of Artificial Sequence: Synthetic oligonucleotide
  Target: LAMA2; (-) strand; PAM type: NNGRRT; PAM sequence: TAGAAT
ttggcagcatattaacactc

SEQ ID NO: 22872 - DNA, 20 bp, Artificial Sequence
  Description of Artificial Sequence: Synthetic oligonucleotide
  Target: LAMA2; (-) strand; PAM type: NNGRRT; PAM sequence: TTGAAT
caaactgtctcaatatagtt

SEQ ID NO: 22873 - DNA, 20 bp, Artificial Sequence
  Description of Artificial Sequence: Synthetic oligonucleotide
  Target: LAMA2; (-) strand; PAM type: NNGRRT; PAM sequence: GAGAAT
taactacagataatgaatta

SEQ ID NO: 22874 - DNA, 20 bp, Artificial Sequence
  Description of Artificial Sequence: Synthetic oligonucleotide
  Target: LAMA2; (-) strand; PAM type: NNGRRT; PAM sequence: ATGAAT
ggatagtctaactacagata

SEQ ID NO: 22875 - DNA, 20 bp, Artificial Sequence
  Description of Artificial Sequence: Synthetic oligonucleotide
  Target: LAMA2; (-) strand; PAM type: NNGRRT; PAM sequence: ATGGAT
ttctcttttactaaaaagat

SEQ ID NO: 22876 - DNA, 20 bp, Artificial Sequence
  Description of Artificial Sequence: Synthetic oligonucleotide
  Target: LAMA2; (-) strand; PAM type: NNGRRT; PAM sequence: TAGAGT
tctttaaaaattacaaggtt

SEQ ID NO: 22877 - DNA, 20 bp, Artificial Sequence
  Description of Artificial Sequence: Synthetic oligonucleotide
  Target: LAMA2; (-) strand; PAM type: NNGRRT; PAM sequence: TGGAAT
taaaatatcatttgacacac

SEQ ID NO: 22878 - DNA, 20 bp, Artificial Sequence
  Description of Artificial Sequence: Synthetic oligonucleotide
  Target: LAMA2; (-) strand; PAM type: NNGRRT; PAM sequence: AAGAGT
caaaacagccccacctccca

SEQ ID NO: 22879 - DNA, 20 bp, Artificial Sequence
  Description of Artificial Sequence: Synthetic oligonucleotide
  Target: LAMA2; (-) strand; PAM type: NNGRRT; PAM sequence: CAGAAT
agaaatatgcttgttaatca

SEQ ID NO: 22880 - DNA, 20 bp, Artificial Sequence
  Description of Artificial Sequence: Synthetic oligonucleotide
  Target: LAMA2; (-) strand; PAM type: NNGRRT; PAM sequence: GAGAAT
atgccaataaaatgttaagg

SEQ ID NO: 22881 - DNA, 20 bp, Artificial Sequence
  Description of Artificial Sequence: Synthetic oligonucleotide
  Target: LAMA2; (-) strand; PAM type: NNGRRT; PAM sequence: TGGAGT
ttatttactgaaaaagtgtg

SEQ ID NO: 22882 - DNA, 20 bp, Artificial Sequence
  Description of Artificial Sequence: Synthetic oligonucleotide
  Target: LAMA2; (-) strand; PAM type: NNGRRT; PAM sequence: TGGAAT
cagatgccaaaagtccttaa

SEQ ID NO: 22883 - DNA, 20 bp, Artificial Sequence
  Description of Artificial Sequence: Synthetic oligonucleotide
  Target: LAMA2; (-) strand; PAM type: NNGRRT; PAM sequence: ATGAAT
ctttgagccaacggcaatcg

SEQ ID NO: 22884 - DNA, 20 bp, Artificial Sequence
  Description of Artificial Sequence: Synthetic oligonucleotide
  Target: LAMA2; (-) strand; PAM type: NNGRRT; PAM sequence: ATGAAT
catcccgggcaagctcctta

SEQ ID NO: 22885 - DNA, 20 bp, Artificial Sequence
  Description of Artificial Sequence: Synthetic oligonucleotide
  Target: LAMA2; (-) strand; PAM type: NNGRRT; PAM sequence: TTGAAT
gttctcagcagataataccc

SEQ ID NO: 22886 - DNA, 20 bp, Artificial Sequence
  Description of Artificial Sequence: Synthetic oligonucleotide
  Target: LAMA2; (-) strand; PAM type: NNGRRT; PAM sequence: AAGAAT
aattataatagccatgttac

SEQ ID NO: 22887 - DNA, 20 bp, Artificial Sequence
  Description of Artificial Sequence: Synthetic oligonucleotide
  Target: LAMA2; (-) strand; PAM type: NNGRRT; PAM sequence: TGGAAT
tgctgctttaatgtatcaag

SEQ ID NO: 22888 - DNA, 20 bp, Artificial Sequence
  Description of Artificial Sequence: Synthetic oligonucleotide
  Target: LAMA2; (-) strand; PAM type: NNGRRT; PAM sequence: GAGAAT
atggcaagaactaactccta

SEQ ID NO: 22889 - DNA, 20 bp, Artificial Sequence
  Description of Artificial Sequence: Synthetic oligonucleotide
  Target: LAMA2; (-) strand; PAM type: NNGRRT; PAM sequence: GCGGAT
ggtttttttggggggcgagt

SEQ ID NO: 22890 - DNA, 20 bp, Artificial Sequence
  Description of Artificial Sequence: Synthetic oligonucleotide
  Target: LAMA2; (-) strand; PAM type: NNGRRT; PAM sequence: GCGAGT
ggactaggtttttttggggg

SEQ ID NO: 22891 - DNA, 20 bp, Artificial Sequence
  Description of Artificial Sequence: Synthetic oligonucleotide
  Target: LAMA2; (-) strand; PAM type: NNGRRT; PAM sequence: CAGAAT
gatgcctaagaattatcagt

SEQ ID NO: 22892 - DNA, 20 bp, Artificial Sequence
  Description of Artificial Sequence: Synthetic oligonucleotide
  Target: LAMA2; (-) strand; PAM type: NNGRRT; PAM sequence: AAGAAT
cttcttggccagtgatgcct

SEQ ID NO: 22893 - DNA, 20 bp, Artificial Sequence
  Description of Artificial Sequence: Synthetic oligonucleotide
  Target: LAMA2; (-) strand; PAM type: NNGRRT; PAM sequence: GGGAGT
tcttgcagtggtgaacattt

SEQ ID NO: 22894 - DNA, 20 bp, Artificial Sequence
  Description of Artificial Sequence: Synthetic oligonucleotide
  Target: LAMA2; (-) strand; PAM type: NNGRRT; PAM sequence: ATGAAT
ctagcagaggataaaccaca

SEQ ID NO: 22895 - DNA, 20 bp, Artificial Sequence
  Description of Artificial Sequence: Synthetic oligonucleotide
  Target: LAMA2; (-) strand; PAM type: NNGRRT; PAM sequence: GAGGAT
tacaacagcttcatctagca

SEQ ID NO: 22896 - DNA, 20 bp, Artificial Sequence
  Description of Artificial Sequence: Synthetic oligonucleotide
  Target: LAMA2; (-) strand; PAM type: NNGRRT; PAM sequence: TTGGGT
gatttgttgttgttgttgtt

SEQ ID NO: 22897 - DNA, 20 bp, Artificial Sequence
  Description of Artificial Sequence: Synthetic oligonucleotide
  Target: LAMA2; (-) strand; PAM type: NNGRRT; PAM sequence: TGGGAT
tgaaggtgctctacctgcag

SEQ ID NO: 22898 - DNA, 20 bp, Artificial Sequence
  Description of Artificial Sequence: Synthetic oligonucleotide
  Target: LAMA2; (-) strand; PAM type: NNGRRT; PAM sequence: CAGAGT
agggcctttggggatccgct

SEQ ID NO: 22899 - DNA, 20 bp, Artificial Sequence
  Description of Artificial Sequence: Synthetic oligonucleotide
  Target: LAMA2; (-) strand; PAM type: NNGRRT; PAM sequence: GGGGAT
gagcattgactagggccttt

SEQ ID NO: 22900 - DNA, 20 bp, Artificial Sequence
  Description of Artificial Sequence: Synthetic oligonucleotide
  Target: LAMA2; (-) strand; PAM type: NNGRRT; PAM sequence: TTGGGT
ccaggatgggctgctaggtg

SEQ ID NO: 22901 - DNA, 20 bp, Artificial Sequence
  Description of Artificial Sequence: Synthetic oligonucleotide
  Target: LAMA2; (-) strand; PAM type: NNGRRT; PAM sequence: CAGGAT
acaaattgaaaatgagtccc

SEQ ID NO: 22902 - DNA, 20 bp, Artificial Sequence
  Description of Artificial Sequence: Synthetic oligonucleotide
  Target: LAMA2; (-) strand; PAM type: NNGRRT; PAM sequence: ATGAGT
ttgattgaaacaaattgaaa

SEQ ID NO: 22903 - DNA, 20 bp, Artificial Sequence
  Description of Artificial Sequence: Synthetic oligonucleotide
  Target: LAMA2; (-) strand; PAM type: NNGRRT; PAM sequence: TAGGAT
aaagtaagcagtgttgataa

SEQ ID NO: 22904 - DNA, 20 bp, Artificial Sequence
  Description of Artificial Sequence: Synthetic oligonucleotide
  Target: LAMA2; (-) strand; PAM type: NNGRRT; PAM sequence: ATGAAT
tattgaccaaagaggtaacc

SEQ ID NO: 22905 - DNA, 20 bp, Artificial Sequence
  Description of Artificial Sequence: Synthetic oligonucleotide
  Target: LAMA2; (-) strand; PAM type: NNGRRT; PAM sequence: TGGGAT
tttggggtggtgagcaagcc

SEQ ID NO: 22906 - DNA, 20 bp, Artificial Sequence
  Description of Artificial Sequence: Synthetic oligonucleotide
  Target: LAMA2; (-) strand; PAM type: NNGRRT; PAM sequence: TGGGGT
tggtgtatagacgtgggatt

SEQ ID NO: 22907 - DNA, 20 bp, Artificial Sequence
  Description of Artificial Sequence: Synthetic oligonucleotide
  Target: LAMA2; (-) strand; PAM type: NNGRRT; PAM sequence: TGGGAT
ctttctctggtgtatagacg

SEQ ID NO: 22908 - DNA, 20 bp, Artificial Sequence
  Description of Artificial Sequence: Synthetic oligonucleotide
  Target: LAMA2; (-) strand; PAM type: NNGRRT; PAM sequence: ATGGGT
aacgagagacacctttggtg

SEQ ID NO: 22909 - DNA, 20 bp, Artificial Sequence
  Description of Artificial Sequence: Synthetic oligonucleotide
  Target: LAMA2; (-) strand; PAM type: NNGRRT; PAM sequence: AAGGGT
gcacttcacataaattagaa

SEQ ID NO: 22910 - DNA, 20 bp, Artificial Sequence
  Description of Artificial Sequence: Synthetic oligonucleotide
  Target: LAMA2; (-) strand; PAM type: NNGRRT; PAM sequence: GTGAGT
aatagtgcctgcaggcaaaa

SEQ ID NO: 22911 - DNA, 20 bp, Artificial Sequence
  Description of Artificial Sequence: Synthetic oligonucleotide
  Target: LAMA2; (-) strand; PAM type: NNGRRT; PAM sequence: TTGGAT
ctttcattcaattttaacag

SEQ ID NO: 22912 - DNA, 20 bp, Artificial Sequence
  Description of Artificial Sequence: Synthetic oligonucleotide
  Target: LAMA2; (-) strand; PAM type: NNGRRT; PAM sequence: GTGAGT
aacctactttaaagcctttg

SEQ ID NO: 22913 - DNA, 20 bp, Artificial Sequence
  Description of Artificial Sequence: Synthetic oligonucleotide
  Target: LAMA2; (-) strand; PAM type: NNGRRT; PAM sequence: GTGGAT
agagagagagaaaaagaggt

SEQ ID NO: 22914 - DNA, 20 bp, Artificial Sequence
  Description of Artificial Sequence: Synthetic oligonucleotide
  Target: LAMA2; (-) strand; PAM type: NNGRRT; PAM sequence: ATGAAT
gactcataatgaaagatagg

SEQ ID NO: 22915 - DNA, 20 bp, Artificial Sequence
  Description of Artificial Sequence: Synthetic oligonucleotide
  Target: LAMA2; (-) strand; PAM type: NNGRRT; PAM sequence: TAGGAT
tcatgactcataatgaaaga

SEQ ID NO: 22916 - DNA, 20 bp, Artificial Sequence
  Description of Artificial Sequence: Synthetic oligonucleotide
  Target: LAMA2; (-) strand; PAM type: NNGRRT; PAM sequence: ATGAAT
gtgagataagaatgccttag

SEQ ID NO: 22917 - DNA, 20 bp, Artificial Sequence
  Description of Artificial Sequence: Synthetic oligonucleotide
  Target: LAMA2; (-) strand; PAM type: NNGRRT; PAM sequence: AAGAAT
ttataaaattatagtgagat

SEQ ID NO: 22918 - DNA, 20 bp, Artificial Sequence
  Description of Artificial Sequence: Synthetic oligonucleotide
  Target: LAMA2; (-) strand; PAM type: NNGRRT; PAM sequence: AGGAGT
agtttatttatgaactaatc

SEQ ID NO: 22919 - DNA, 20 bp, Artificial Sequence
  Description of Artificial Sequence: Synthetic oligonucleotide
  Target: LAMA2; (-) strand; PAM type: NNGRRT; PAM sequence: TGGAAT
tcattaattctaataatgcg

SEQ ID NO: 22920 - DNA, 20 bp, Artificial Sequence
  Description of Artificial Sequence: Synthetic oligonucleotide
  Target: LAMA2; (-) strand; PAM type: NNGRRT; PAM sequence: ATGGGT
atgtcaggaaataaacacta

SEQ ID NO: 22921 - DNA, 20 bp, Artificial Sequence
  Description of Artificial Sequence: Synthetic oligonucleotide
  Target: LAMA2; (-) strand; PAM type: NNGRRT; PAM sequence: AAGAAT
ctctgatgggtaaatttatt

SEQ ID NO: 22922 - DNA, 20 bp, Artificial Sequence
  Description of Artificial Sequence: Synthetic oligonucleotide
  Target: LAMA2; (-) strand; PAM type: NNGRRT; PAM sequence: ATGGGT
actgaaaacaaaatcctctg

SEQ ID NO: 22923 - DNA, 20 bp, Artificial Sequence
  Description of Artificial Sequence: Synthetic oligonucleotide
  Target: LAMA2; (-) strand; PAM type: NNGRRT; PAM sequence: TAGGAT
cgcgtagcagggaatacaaa

SEQ ID NO: 22924 - DNA, 20 bp, Artificial Sequence
  Description of Artificial Sequence: Synthetic oligonucleotide
  Target: LAMA2; (-) strand; PAM type: NNGRRT; PAM sequence: GGGAAT
ttagtagactacgcgtagca

SEQ ID NO: 22925 - DNA, 20 bp, Artificial Sequence
  Description of Artificial Sequence: Synthetic oligonucleotide
  Target: LAMA2; (-) strand; PAM type: NNGRRT; PAM sequence: AAGAAT
aaagttgtataaattaggga

SEQ ID NO: 22926 - DNA, 20 bp, Artificial Sequence
  Description of Artificial Sequence: Synthetic oligonucleotide
  Target: LAMA2; (-) strand; PAM type: NNGRRT; PAM sequence: GAGGAT
atttccaacttaattcaaag

SEQ ID NO: 22927 - DNA, 20 bp, Artificial Sequence
  Description of Artificial Sequence: Synthetic oligonucleotide
  Target: LAMA2; (-) strand; PAM type: NNGRRT; PAM sequence: TGGAAT
gattgtaaaagatgtatctt

SEQ ID NO: 22928 - DNA, 20 bp, Artificial Sequence
  Description of Artificial Sequence: Synthetic oligonucleotide
  Target: LAMA2; (-) strand; PAM type: NNGRRT; PAM sequence: ATGAAT
ttctctgagcattcttaaag

SEQ ID NO: 22929 - DNA, 20 bp, Artificial Sequence
  Description of Artificial Sequence: Synthetic oligonucleotide
  Target: LAMA2; (-) strand; PAM type: NNGRRT; PAM sequence: TAGGAT
ttccagatcctatgtataaa

SEQ ID NO: 22930 - DNA, 20 bp, Artificial Sequence
  Description of Artificial Sequence: Synthetic oligonucleotide
  Target: LAMA2; (-) strand; PAM type: NNGRRT; PAM sequence: TTGGAT
ttaaaacttgccagtttaat

SEQ ID NO: 22931 - DNA, 20 bp, Artificial Sequence
  Description of Artificial Sequence: Synthetic oligonucleotide
  Target: LAMA2; (-) strand; PAM type: NNGRRT; PAM sequence: ATGGGT
atgaaaaacaaattttagat

SEQ ID NO: 22932 - DNA, 20 bp, Artificial Sequence
  Description of Artificial Sequence: Synthetic oligonucleotide
  Target: LAMA2; (-) strand; PAM type: NNGRRT; PAM sequence: ATGGGT
taaatgagagcatctttcaa

SEQ ID NO: 22933 - DNA, 20 bp, Artificial Sequence
  Description of Artificial Sequence: Synthetic oligonucleotide
  Target: LAMA2; (-) strand; PAM type: NNGRRT; PAM sequence: TTGGAT
catgggccttcagtatcttt

SEQ ID NO: 22934 - DNA, 20 bp, Artificial Sequence
  Description of Artificial Sequence: Synthetic oligonucleotide
  Target: LAMA2; (-) strand; PAM type: NNGRRT; PAM sequence: TGGAAT
gcaaatatattggctgctta

SEQ ID NO: 22935 - DNA, 20 bp, Artificial Sequence
  Description of Artificial Sequence: Synthetic oligonucleotide
  Target: LAMA2; (-) strand; PAM type: NNGRRT; PAM sequence: TTGGAT
ggttgtttttttttttccag

SEQ ID NO: 22936 - DNA, 20 bp, Artificial Sequence
  Description of Artificial Sequence: Synthetic oligonucleotide
  Target: LAMA2; (-) strand; PAM type: NNGRRT; PAM sequence: GAGAAT
aaaaaggaaaataaaaacat

SEQ ID NO: 22937 - DNA, 20 bp, Artificial Sequence
  Description of Artificial Sequence: Synthetic oligonucleotide
  Target: LAMA2; (-) strand; PAM type: NNGRRT; PAM sequence: ATGGGT
tgcataaatgtcttcttttg

SEQ ID NO: 22938 - DNA, 20 bp, Artificial Sequence
  Description of Artificial Sequence: Synthetic oligonucleotide
  Target: LAMA2; (-) strand; PAM type: NNGRRT; PAM sequence: AGGAAT
tttctggttctggatccttg

SEQ ID NO: 22939 - DNA, 20 bp, Artificial Sequence
  Description of Artificial Sequence: Synthetic oligonucleotide
  Target: LAMA2; (-) strand; PAM type: NNGRRT; PAM sequence: CTGGAT
gtcaaatggtatttctggtt

SEQ ID NO: 22940 - DNA, 20 bp, Artificial Sequence
  Description of Artificial Sequence: Synthetic oligonucleotide
  Target: LAMA2; (-) strand; PAM type: NNGRRT; PAM sequence: CTGGGT
tatacccagttatggggttg

SEQ ID NO: 22941 - DNA, 20 bp, Artificial Sequence
  Description of Artificial Sequence: Synthetic oligonucleotide
  Target: LAMA2; (-) strand; PAM type: NNGRRT; PAM sequence: TGGGGT
tttgggtatatacccagtta

SEQ ID NO: 22942 - DNA, 20 bp, Artificial Sequence
  Description of Artificial Sequence: Synthetic oligonucleotide
  Target: LAMA2; (-) strand; PAM type: NNGRRT; PAM sequence: TTGGGT
gtagaatgatttatattcct

SEQ ID NO: 22943 - DNA, 20 bp, Artificial Sequence
  Description of Artificial Sequence: Synthetic oligonucleotide
  Target: LAMA2; (-) strand; PAM type: NNGRRT; PAM sequence: TAGAAT
ctgtatatgtgtctttagag

SEQ ID NO: 22944 - DNA, 20 bp, Artificial Sequence
  Description of Artificial Sequence: Synthetic oligonucleotide
  Target: LAMA2; (-) strand; PAM type: NNGRRT; PAM sequence: TAGAGT
acatactgtatatgtgtctt

SEQ ID NO: 22945 - DNA, 20 bp, Artificial Sequence
  Description of Artificial Sequence: Synthetic oligonucleotide
  Target: LAMA2; (-) strand; PAM type: NNGRRT; PAM sequence: TTGGGT
aatctatcattgatgggcat

SEQ ID NO: 22946 - DNA, 20 bp, Artificial Sequence
  Description of Artificial Sequence: Synthetic oligonucleotide
  Target: LAMA2; (-) strand; PAM type: NNGRRT; PAM sequence: GAGGAT
cattcctggattagtttgct

SEQ ID NO: 22947 - DNA, 20 bp, Artificial Sequence
  Description of Artificial Sequence: Synthetic oligonucleotide
  Target: LAMA2; (-) strand; PAM type: NNGRRT; PAM sequence: CTGGAT
tggtgtttggttttccattc

SEQ ID NO: 22948 - DNA, 20 bp, Artificial Sequence
  Description of Artificial Sequence: Synthetic oligonucleotide
  Target: LAMA2; (-) strand; PAM type: NNGRRT; PAM sequence: AGGAGT
tctcaaagtactgggattac

SEQ ID NO: 22949 - DNA, 20 bp, Artificial Sequence
  Description of Artificial Sequence: Synthetic oligonucleotide
  Target: LAMA2; (-) strand; PAM type: NNGRRT; PAM sequence: TGGGAT
gccttggcctctcaaagtac

SEQ ID NO: 22950 - DNA, 20 bp, Artificial Sequence
  Description of Artificial Sequence: Synthetic oligonucleotide
  Target: LAMA2; (-) strand; PAM type: NNGRRT; PAM sequence: TGGGGT
ttttgtatttttagtagaga

SEQ ID NO: 22951 - DNA, 20 bp, Artificial Sequence
  Description of Artificial Sequence: Synthetic oligonucleotide
  Target: LAMA2; (-) strand; PAM type: NNGRRT; PAM sequence: TGGAAT
gtctcagcctcccgagtagc

SEQ ID NO: 22952 - DNA, 20 bp, Artificial Sequence
  Description of Artificial Sequence: Synthetic oligonucleotide
  Target: LAMA2; (-) strand; PAM type: NNGRRT; PAM sequence: CCGAGT
gattctactgtctcagcctc

SEQ ID NO: 22953 - DNA, 20 bp, Artificial Sequence
  Description of Artificial Sequence: Synthetic oligonucleotide
  Target: LAMA2; (-) strand; PAM type: NNGRRT; PAM sequence: CTGGGT
gctcactgcgaccgcacctc

SEQ ID NO: 22954 - DNA, 20 bp, Artificial Sequence
  Description of Artificial Sequence: Synthetic oligonucleotide
  Target: LAMA2; (-) strand; PAM type: NNGRRT; PAM sequence: TGGAGT
tcttgctctgttgcccaggc

SEQ ID NO: 22955 - DNA, 20 bp, Artificial Sequence
  Description of Artificial Sequence: Synthetic oligonucleotide
  Target: LAMA2; (-) strand; PAM type: NNGRRT; PAM sequence: TGGAGT
ttgtttttttttttttgaga

SEQ ID NO: 22956 - DNA, 20 bp, Artificial Sequence
  Description of Artificial Sequence: Synthetic oligonucleotide
  Target: LAMA2; (-) strand; PAM type: NNGRRT; PAM sequence: AGGAAT
gaaagcaagctttgttacat

SEQ ID NO: 22957 - DNA, 20 bp, Artificial Sequence
  Description of Artificial Sequence: Synthetic oligonucleotide
  Target: LAMA2; (-) strand; PAM type: NNGRRT; PAM sequence: TTGGAT
ggcaaatatggctgtatctt

SEQ ID NO: 22958 - DNA, 20 bp, Artificial Sequence
  Description of Artificial Sequence: Synthetic oligonucleotide
  Target: LAMA2; (-) strand; PAM type: NNGRRT; PAM sequence: AAGAAT
agagaagaatctggtggaaa

SEQ ID NO: 22959 - DNA, 20 bp, Artificial Sequence
  Description of Artificial Sequence: Synthetic oligonucleotide
  Target: LAMA2; (-) strand; PAM type: NNGRRT; PAM sequence: AAGAAT
aaagctaaacttctgcagag

SEQ ID NO: 22960 - DNA, 20 bp, Artificial Sequence
  Description of Artificial Sequence: Synthetic oligonucleotide
  Target: LAMA2; (-) strand; PAM type: NNGRRT; PAM sequence: CAGAGT
aggaagggaaaaatgagaga

SEQ ID NO: 22961 - DNA, 20 bp, Artificial Sequence
  Description of Artificial Sequence: Synthetic oligonucleotide
  Target: LAMA2; (-) strand; PAM type: NNGRRT; PAM sequence: ATGAAT
gtatgttttttctttgttaa

SEQ ID NO: 22962 - DNA, 20 bp, Artificial Sequence
  Description of Artificial Sequence: Synthetic oligonucleotide
  Target: LAMA2; (-) strand; PAM type: NNGRRT; PAM sequence: CTGAGT
gtactatctcatcctttagt

SEQ ID NO: 22963 - DNA, 20 bp, Artificial Sequence
  Description of Artificial Sequence: Synthetic oligonucleotide
  Target: LAMA2; (-) strand; PAM type: NNGRRT; PAM sequence: CAGAGT
aaactaggtgggaagccttc

SEQ ID NO: 22964 - DNA, 20 bp, Artificial Sequence
  Description of Artificial Sequence: Synthetic oligonucleotide
  Target: LAMA2; (-) strand; PAM type: NNGRRT; PAM sequence: CAGAAT
gctgtgtctcaattttgtta

SEQ ID NO: 22965 - DNA, 20 bp, Artificial Sequence
  Description of Artificial Sequence: Synthetic oligonucleotide
  Target: LAMA2; (-) strand; PAM type: NNGRRT; PAM sequence: AAGAAT
ttataccttgacatatgcca

SEQ ID NO: 22966 - DNA, 20 bp, Artificial Sequence
  Description of Artificial Sequence: Synthetic oligonucleotide
  Target: LAMA2; (-) strand; PAM type: NNGRRT; PAM sequence: GAGGGT
ctgtattcctagaagttagt

SEQ ID NO: 22967 - DNA, 20 bp, Artificial Sequence
  Description of Artificial Sequence: Synthetic oligonucleotide
  Target: LAMA2; (-) strand; PAM type: NNGRRT; PAM sequence: TTGAAT
ggtttaattagcagaaatat

SEQ ID NO: 22968 - DNA, 20 bp, Artificial Sequence
  Description of Artificial Sequence: Synthetic oligonucleotide
  Target: LAMA2; (-) strand; PAM type: NNGRRT; PAM sequence: AGGGAT
gaaattagtgctcttataaa

SEQ ID NO: 22969 - DNA, 20 bp, Artificial Sequence
  Description of Artificial Sequence: Synthetic oligonucleotide
  Target: LAMA2; (-) strand; PAM type: NNGRRT; PAM sequence: AAGAAT
ggagattaggtcataagggc

SEQ ID NO: 22970 - DNA, 20 bp, Artificial Sequence
  Description of Artificial Sequence: Synthetic oligonucleotide
  Target: LAMA2; (-) strand; PAM type: NNGRRT; PAM sequence: GTGAAT
cccttgctgttcttgtgata

SEQ ID NO: 22971 - DNA, 20 bp, Artificial Sequence
  Description of Artificial Sequence: Synthetic oligonucleotide
  Target: LAMA2; (-) strand; PAM type: NNGRRT; PAM sequence: CTGAAT
aggggcctggtgggtggtga

SEQ ID NO: 22972 - DNA, 20 bp, Artificial Sequence
  Description of Artificial Sequence: Synthetic oligonucleotide
  Target: LAMA2; (-) strand; PAM type: NNGRRT; PAM sequence: GTGGGT
catgttgagggaggggcctg

SEQ ID NO: 22973 - DNA, 20 bp, Artificial Sequence
  Description of Artificial Sequence: Synthetic oligonucleotide
  Target: LAMA2; (-) strand; PAM type: NNGRRT; PAM sequence: TTGAAT
ctgatagccaatgctgtaga

SEQ ID NO: 22974 - DNA, 20 bp, Artificial Sequence
  Description of Artificial Sequence: Synthetic oligonucleotide
  Target: LAMA2; (-) strand; PAM type: NNGRRT; PAM sequence: TTGAGT
cactgggatagtagaaagaa

SEQ ID NO: 22975 - DNA, 20 bp, Artificial Sequence
  Description of Artificial Sequence: Synthetic oligonucleotide
  Target: LAMA2; (-) strand; PAM type: NNGRRT; PAM sequence: AAGAAT
agaaacactgggatagtaga

SEQ ID NO: 22976 - DNA, 20 bp, Artificial Sequence
  Description of Artificial Sequence: Synthetic oligonucleotide
  Target: LAMA2; (-) strand; PAM type: NNGRRT; PAM sequence: TGGGAT
ccctagagcttgagaaacac

SEQ ID NO: 22977 - DNA, 20 bp, Artificial Sequence
  Description of Artificial Sequence: Synthetic oligonucleotide
  Target: LAMA2; (-) strand; PAM type: NNGRRT; PAM sequence: GGGGGT
cctacagactcagaaattct

SEQ ID NO: 22978 - DNA, 20 bp, Artificial Sequence
  Description of Artificial Sequence: Synthetic oligonucleotide
  Target: LAMA2; (-) strand; PAM type: NNGRRT; PAM sequence: GTGGGT
gcagaggggtatgtgagaag

SEQ ID NO: 22979 - DNA, 20 bp, Artificial Sequence
  Description of Artificial Sequence: Synthetic oligonucleotide
  Target: LAMA2; (-) strand; PAM type: NNGRRT; PAM sequence: AGGGGT
aggacaagcagagcaggcag

SEQ ID NO: 22980 - DNA, 20 bp, Artificial Sequence
  Description of Artificial Sequence: Synthetic oligonucleotide
  Target: LAMA2; (-) strand; PAM type: NNGRRT; PAM sequence: GAGAGT
aattaatttctattcttgga

SEQ ID NO: 22981 - DNA, 20 bp, Artificial Sequence
  Description of Artificial Sequence: Synthetic oligonucleotide
  Target: LAMA2; (-) strand; PAM type: NNGRRT; PAM sequence: AAGGGT
agaggcattttctaccattc

SEQ ID NO: 22982 - DNA, 20 bp, Artificial Sequence
  Description of Artificial Sequence: Synthetic oligonucleotide
  Target: LAMA2; (-) strand; PAM type: NNGRRT; PAM sequence: AGGGGT
ctttgaaaactcctagaatg

SEQ ID NO: 22983 - DNA, 20 bp, Artificial Sequence
  Description of Artificial Sequence: Synthetic oligonucleotide
  Target: LAMA2; (-) strand; PAM type: NNGRRT; PAM sequence: TAGAAT
atattacctttgaaaactcc

SEQ ID NO: 22984 - DNA, 20 bp, Artificial Sequence
  Description of Artificial Sequence: Synthetic oligonucleotide
  Target: LAMA2; (-) strand; PAM type: NNGRRT; PAM sequence: CTGAAT
ttctcaaactcttttgtcag

SEQ ID NO: 22985 - DNA, 20 bp, Artificial Sequence
  Description of Artificial Sequence: Synthetic oligonucleotide
  Target: LAMA2; (-) strand; PAM type: NNGRRT; PAM sequence: GTGAAT
ttctataggacatttttttg

SEQ ID NO: 22986 - DNA, 20 bp, Artificial Sequence
  Description of Artificial Sequence: Synthetic oligonucleotide
  Target: LAMA2; (-) strand; PAM type: NNGRRT; PAM sequence: TGGAGT
agttttagactaaagtttcc

SEQ ID NO: 22987 - DNA, 20 bp, Artificial Sequence
  Description of Artificial Sequence: Synthetic oligonucleotide
  Target: LAMA2; (-) strand; PAM type: NNGRRT; PAM sequence: GTGAAT
tcaaataaaagtttaaaatg

SEQ ID NO: 22988 - DNA, 20 bp, Artificial Sequence
  Description of Artificial Sequence: Synthetic oligonucleotide
  Target: LAMA2; (-) strand; PAM type: NNGRRT; PAM sequence: AAGAAT
ggcaggatttcatttgagaa

SEQ ID NO: 22989 - DNA, 20 bp, Artificial Sequence
  Description of Artificial Sequence: Synthetic oligonucleotide
  Target: LAMA2; (-) strand; PAM type: NNGRRT; PAM sequence: CAGGAT
ttataggctgatgttctggg

SEQ ID NO: 22990 - DNA, 20 bp, Artificial Sequence
  Description of Artificial Sequence: Synthetic oligonucleotide
  Target: LAMA2; (-) strand; PAM type: NNGRRT; PAM sequence: AAGAGT
caaatgatgtctattctgcc

SEQ ID NO: 22991 - DNA, 20 bp, Artificial Sequence
  Description of Artificial Sequence: Synthetic oligonucleotide
  Target: LAMA2; (-) strand; PAM type: NNGRRT; PAM sequence: TAGGAT
aactgtactccttggaatcg

SEQ ID NO: 22992 - DNA, 20 bp, Artificial Sequence
  Description of Artificial Sequence: Synthetic oligonucleotide
  Target: LAMA2; (-) strand; PAM type: NNGRRT; PAM sequence: TGGAAT
gggtttcaaactgtactcct

SEQ ID NO: 22993 - DNA, 20 bp, Artificial Sequence
  Description of Artificial Sequence: Synthetic oligonucleotide
  Target: LAMA2; (-) strand; PAM type: NNGRRT; PAM sequence: TGGGGT
tgtgtttattatgcattaaa

SEQ ID NO: 22994 - DNA, 20 bp, Artificial Sequence
  Description of Artificial Sequence: Synthetic oligonucleotide
  Target: LAMA2; (-) strand; PAM type: NNGRRT; PAM sequence: AAGGGT
ccagcaatagcatccttcac

SEQ ID NO: 22995 - DNA, 20 bp, Artificial Sequence
  Description of Artificial Sequence: Synthetic oligonucleotide
  Target: LAMA2; (-) strand; PAM type: NNGRRT; PAM sequence: AAGGGT
acttataacccttctaggag

SEQ ID NO: 22996 - DNA, 20 bp, Artificial Sequence
  Description of Artificial Sequence: Synthetic oligonucleotide
  Target: LAMA2; (-) strand; PAM type: NNGRRT; PAM sequence: AGGAGT
ctcctgtgttcattttttaa

SEQ ID NO: 22997 - DNA, 20 bp, Artificial Sequence
  Description of Artificial Sequence: Synthetic oligonucleotide
  Target: LAMA2; (-) strand; PAM type: NNGRRT; PAM sequence: CTGAGT
tatcagtcagtttaaaaata

SEQ ID NO: 22998 - DNA, 20 bp, Artificial Sequence
  Description of Artificial Sequence: Synthetic oligonucleotide
  Target: LAMA2; (-) strand; PAM type: NNGRRT; PAM sequence: AAGAGT
aggtcgaagcatactcaggt

SEQ ID NO: 22999 - DNA, 20 bp, Artificial Sequence
  Description of Artificial Sequence: Synthetic oligonucleotide
  Target: LAMA2; (-) strand; PAM type: NNGRRT; PAM sequence: AAGAAT
ttctaacctcaaaagaaaga

SEQ ID NO: 23000 - DNA, 20 bp, Artificial Sequence
  Description of Artificial Sequence: Synthetic oligonucleotide
  Target: LAMA2; (-) strand; PAM type: NNGRRT; PAM sequence: GGGGGT
ctcaatattatatttctttt

SEQ ID NO: 23001 - DNA, 20 bp, Artificial Sequence
  Description of Artificial Sequence: Synthetic oligonucleotide
  Target: LAMA2; (-) strand; PAM type: NNGRRT; PAM sequence: GTGAGT
caaatgaagagtattttgcc

SEQ ID NO: 23002 - DNA, 20 bp, Artificial Sequence
  Description of Artificial Sequence: Synthetic oligonucleotide
  Target: LAMA2; (-) strand; PAM type: NNGRRT; PAM sequence: AAGAGT
ggcaccaccatctccaaatg

SEQ ID NO: 23003 - DNA, 20 bp, Artificial Sequence
  Description of Artificial Sequence: Synthetic oligonucleotide
  Target: LAMA2; (-) strand; PAM type: NNGRRT; PAM sequence: GGGGGT
ctttttcatttacagctgca

SEQ ID NO: 23004 - DNA, 20 bp, Artificial Sequence
  Description of Artificial Sequence: Synthetic oligonucleotide
  Target: LAMA2; (-) strand; PAM type: NNGRRT; PAM sequence: TAGAGT
aaggcctcgtctcgagttcc

SEQ ID NO: 23005 - DNA, 20 bp, Artificial Sequence
  Description of Artificial Sequence: Synthetic oligonucleotide
  Target: LAMA2; (-) strand; PAM type: NNGRRT; PAM sequence: TCGAGT
tttctctcaaaggcctcgtc

SEQ ID NO: 23006 - DNA, 20 bp, Artificial Sequence
  Description of Artificial Sequence: Synthetic oligonucleotide
  Target: LAMA2; (-) strand; PAM type: NNGRRT; PAM sequence: ATGAAT
aagtacaattaaataagtaa

SEQ ID NO: 23007 - DNA, 20 bp, Artificial Sequence
  Description of Artificial Sequence: Synthetic oligonucleotide
  Target: LAMA2; (-) strand; PAM type: NNGRRT; PAM sequence: ATGAAT
atgtataggttggccaatat

SEQ ID NO: 23008 - DNA, 20 bp, Artificial Sequence
  Description of Artificial Sequence: Synthetic oligonucleotide
  Target: LAMA2; (-) strand; PAM type: NNGRRT; PAM sequence: ATGGGT
tatcataaaagttctttagc

SEQ ID NO: 23009 - DNA, 20 bp, Artificial Sequence
  Description of Artificial Sequence: Synthetic oligonucleotide
  Target: LAMA2; (-) strand; PAM type: NNGRRT; PAM sequence: TTGAGT
gtagagatgtatctatttta

SEQ ID NO: 23010 - DNA, 20 bp, Artificial Sequence
  Description of Artificial Sequence: Synthetic oligonucleotide
  Target: LAMA2; (-) strand; PAM type: NNGRRT; PAM sequence: ATGAAT
cactttgaagttagctgact

SEQ ID NO: 23011 - DNA, 20 bp, Artificial Sequence
  Description of Artificial Sequence: Synthetic oligonucleotide
  Target: LAMA2; (-) strand; PAM type: NNGRRT; PAM sequence: GGGGGT
ctgattcaggaggtctggga

SEQ ID NO: 23012 - DNA, 20 bp, Artificial Sequence
  Description of Artificial Sequence: Synthetic oligonucleotide
  Target: LAMA2; (-) strand; PAM type: NNGRRT; PAM sequence: CTGGGT
gcttgttaatacatggtttg

SEQ ID NO: 23013 - DNA, 20 bp, Artificial Sequence
  Description of Artificial Sequence: Synthetic oligonucleotide
  Target: LAMA2; (-) strand; PAM type: NNGRRT; PAM sequence: TCGAGT
tttttctaaagtgataattt

SEQ ID NO: 23014 - DNA, 20 bp, Artificial Sequence
  Description of Artificial Sequence: Synthetic oligonucleotide
  Target: LAMA2; (-) strand; PAM type: NNGRRT; PAM sequence: TTGGAT
actgattgatctggaagttt

SEQ ID NO: 23015 - DNA, 20 bp, Artificial Sequence
  Description of Artificial Sequence: Synthetic oligonucleotide
  Target: LAMA2; (-) strand; PAM type: NNGRRT; PAM sequence: CAGAAT
gtttgctcagaaactgtgaa

SEQ ID NO: 23016 - DNA, 20 bp, Artificial Sequence
  Description of Artificial Sequence: Synthetic oligonucleotide
  Target: LAMA2; (-) strand; PAM type: NNGRRT; PAM sequence: ATGAAT
ctattactttgaatgtaatg

SEQ ID NO: 23017 - DNA, 20 bp, Artificial Sequence
  Description of Artificial Sequence: Synthetic oligonucleotide
  Target: LAMA2; (-) strand; PAM type: NNGRRT; PAM sequence: TTGAAT
gagaccttttctctattact

SEQ ID NO: 23018 - DNA, 20 bp, Artificial Sequence
  Description of Artificial Sequence: Synthetic oligonucleotide
  Target: LAMA2; (-) strand; PAM type: NNGRRT; PAM sequence: ATGAGT
ctaggaatctgattgatgaa

SEQ ID NO: 23019 - DNA, 20 bp, Artificial Sequence
  Description of Artificial Sequence: Synthetic oligonucleotide
  Target: LAMA2; (-) strand; PAM type: NNGRRT; PAM sequence: AGGAAT
attttgaatcatgtcattct

SEQ ID NO: 23020 - DNA, 20 bp, Artificial Sequence
  Description of Artificial Sequence: Synthetic oligonucleotide
  Target: LAMA2; (-) strand; PAM type: NNGRRT; PAM sequence: TTGAAT
tttgtaagtaaaataacatt

SEQ ID NO: 23021 - DNA, 20 bp, Artificial Sequence
  Description of Artificial Sequence: Synthetic oligonucleotide
  Target: LAMA2; (-) strand; PAM type: NNGRRT; PAM sequence: AAGAAT
caaagagatgctaacatgaa

SEQ ID NO: 23022 - DNA, 20 bp, Artificial Sequence
  Description of Artificial Sequence: Synthetic oligonucleotide
  Target: LAMA2; (-) strand; PAM type: NNGRRT; PAM sequence: TAGGGT
atgagctcatgtcactgcct

SEQ ID NO: 23023 - DNA, 20 bp, Artificial Sequence
  Description of Artificial Sequence: Synthetic oligonucleotide
  Target: LAMA2; (-) strand; PAM type: NNGRRT; PAM sequence: TTGAAT
ttttgtaaatgtgcatcaac

SEQ ID NO: 23024 - DNA, 20 bp, Artificial Sequence
  Description of Artificial Sequence: Synthetic oligonucleotide
  Target: LAMA2; (-) strand; PAM type: NNGRRT; PAM sequence: CAGAGT
gtttcttagaagcccccttt

SEQ ID NO: 23025 - DNA, 20 bp, Artificial Sequence
  Description of Artificial Sequence: Synthetic oligonucleotide
  Target: LAMA2; (-) strand; PAM type: NNGRRT; PAM sequence: ATGAAT
aagctgcaaaataatatgat

SEQ ID NO: 23026 - DNA, 20 bp, Artificial Sequence
  Description of Artificial Sequence: Synthetic oligonucleotide
  Target: LAMA2; (-) strand; PAM type: NNGRRT; PAM sequence: GTGAAT
aagatctctgaacaagattt

SEQ ID NO: 23027 - DNA, 20 bp, Artificial Sequence
  Description of Artificial Sequence: Synthetic oligonucleotide
  Target: LAMA2; (-) strand; PAM type: NNGRRT; PAM sequence: TTGAAT
ctatttgtcatgtgctcaga

SEQ ID NO: 23028 - DNA, 20 bp, Artificial Sequence
  Description of Artificial Sequence: Synthetic oligonucleotide
  Target: LAMA2; (-) strand; PAM type: NNGRRT; PAM sequence: TTGAGT
tagaggctgcccataatttc

SEQ ID NO: 23029 - DNA, 20 bp, Artificial Sequence
  Description of Artificial Sequence: Synthetic oligonucleotide
  Target: LAMA2; (-) strand; PAM type: NNGRRT; PAM sequence: AGGAAT
aaaagaagaaaaaataatgg

SEQ ID NO: 23030 - DNA, 20 bp, Artificial Sequence
  Description of Artificial Sequence: Synthetic oligonucleotide
  Target: LAMA2; (-) strand; PAM type: NNGRRT; PAM sequence: CTGAGT
gggtgctgctgttatatgtg

SEQ ID NO: 23031 - DNA, 20 bp, Artificial Sequence
  Description of Artificial Sequence: Synthetic oligonucleotide
  Target: LAMA2; (-) strand; PAM type: NNGRRT; PAM sequence: CAGGGT
ttaaatattaatatcacata

SEQ ID NO: 23032 - DNA, 20 bp, Artificial Sequence
  Description of Artificial Sequence: Synthetic oligonucleotide
  Target: LAMA2; (-) strand; PAM type: NNGRRT; PAM sequence: TGGAGT
gctgctgttttctgacctgt

SEQ ID NO: 23033 - DNA, 20 bp, Artificial Sequence
  Description of Artificial Sequence: Synthetic oligonucleotide
  Target: LAMA2; (-) strand; PAM type: NNGRRT; PAM sequence: CTGAGT
atactatatgccagagggtg

SEQ ID NO: 23034 - DNA, 20 bp, Artificial Sequence
  Description of Artificial Sequence: Synthetic oligonucleotide
  Target: LAMA2; (-) strand; PAM type: NNGRRT; PAM sequence: GAGGGT
tacatacatactatatgcca

SEQ ID NO: 23035 - DNA, 20 bp, Artificial Sequence
  Description of Artificial Sequence: Synthetic oligonucleotide
  Target: LAMA2; (-) strand; PAM type: NNGRRT; PAM sequence: ATGAAT
taatctaaaggaaaatagaa

SEQ ID NO: 23036 - DNA, 20 bp, Artificial Sequence
  Description of Artificial Sequence: Synthetic oligonucleotide
  Target: LAMA2; (-) strand; PAM type: NNGRRT; PAM sequence: CAGAAT
aagcctcttcaatattctac

SEQ ID NO: 23037 - DNA, 20 bp, Artificial Sequence
  Description of Artificial Sequence: Synthetic oligonucleotide
  Target: LAMA2; (-) strand; PAM type: NNGRRT; PAM sequence: TGGAAT
ctgcctcacagcagtatttc

SEQ ID NO: 23038 - DNA, 20 bp, Artificial Sequence
  Description of Artificial Sequence: Synthetic oligonucleotide
  Target: LAMA2; (-) strand; PAM type: NNGRRT; PAM sequence: GTGAAT
ctggtgtgtcaccgagcagg

SEQ ID NO: 23039 - DNA, 20 bp, Artificial Sequence
  Description of Artificial Sequence: Synthetic oligonucleotide
  Target: LAMA2; (-) strand; PAM type: NNGRRT; PAM sequence: CAGGGT
acggctggtgtgtcaccgag

SEQ ID NO: 23040 - DNA, 20 bp, Artificial Sequence
  Description of Artificial Sequence: Synthetic oligonucleotide
  Target: LAMA2; (-) strand; PAM type: NNGRRT; PAM sequence: TCGGGT
taaaatagacaggtgcacct

SEQ ID NO: 23041 - DNA, 20 bp, Artificial Sequence
  Description of Artificial Sequence: Synthetic oligonucleotide
  Target: LAMA2; (-) strand; PAM type: NNGRRT; PAM sequence: ACGAAT
tttaaacatcactaaaagaa

SEQ ID NO: 23042 - DNA, 20 bp, Artificial Sequence
  Description of Artificial Sequence: Synthetic oligonucleotide
  Target: LAMA2; (-) strand; PAM type: NNGRRT; PAM sequence: AAGAAT
aggtatttgtaggggtgccc

SEQ ID NO: 23043 - DNA, 20 bp, Artificial Sequence
  Description of Artificial Sequence: Synthetic oligonucleotide
  Target: LAMA2; (-) strand; PAM type: NNGRRT; PAM sequence: AGGGGT
cataagctccaggtatttgt

SEQ ID NO: 23044 - DNA, 20 bp, Artificial Sequence
  Description of Artificial Sequence: Synthetic oligonucleotide
  Target: LAMA2; (-) strand; PAM type: NNGRRT; PAM sequence: CAGAAT
aaaatccaaacaggaccact

SEQ ID NO: 23045 - DNA, 20 bp, Artificial Sequence
  Description of Artificial Sequence: Synthetic oligonucleotide
  Target: LAMA2; (-) strand; PAM type: NNGRRT; PAM sequence: TAGAAT
gattagcccagggagagtgt

SEQ ID NO: 23046 - DNA, 20 bp, Artificial Sequence
  Description of Artificial Sequence: Synthetic oligonucleotide
  Target: LAMA2; (-) strand; PAM type: NNGRRT; PAM sequence: GAGAGT
aggcatcagattagcccagg

SEQ ID NO: 23047 - DNA, 20 bp, Artificial Sequence
  Description of Artificial Sequence: Synthetic oligonucleotide
  Target: LAMA2; (-) strand; PAM type: NNGRRT; PAM sequence: GGGAGT
cattgtggacacagttataa

SEQ ID NO: 23048 - DNA, 20 bp, Artificial Sequence
  Description of Artificial Sequence: Synthetic oligonucleotide
  Target: LAMA2; (-) strand; PAM type: NNGRRT; PAM sequence: TTGGGT
ataaataaaaagtttttgag

SEQ ID NO: 23049 - DNA, 20 bp, Artificial Sequence
  Description of Artificial Sequence: Synthetic oligonucleotide
  Target: LAMA2; (-) strand; PAM type: NNGRRT; PAM sequence: TTGAGT
ttaaaataaataaaaagttt

SEQ ID NO: 23050 - DNA, 20 bp, Artificial Sequence
  Description of Artificial Sequence: Synthetic oligonucleotide
  Target: LAMA2; (-) strand; PAM type: NNGRRT; PAM sequence: ATGAAT
gtgtctagcacgtttcctga

SEQ ID NO: 23051 - DNA, 20 bp, Artificial Sequence
  Description of Artificial Sequence: Synthetic oligonucleotide
  Target: LAMA2; (-) strand; PAM type: NNGRRT; PAM sequence: CTGAAT
tttggtgtctagcacgtttc

SEQ ID NO: 23052 - DNA, 20 bp, Artificial Sequence
  Description of Artificial Sequence: Synthetic oligonucleotide
  Target: LAMA2; (-) strand; PAM type: NNGRRT; PAM sequence: AAGAAT
gtcatttagggatggggtcc

SEQ ID NO: 23053 - DNA, 20 bp, Artificial Sequence
  Description of Artificial Sequence: Synthetic oligonucleotide
  Target: LAMA2; (-) strand; PAM type: NNGRRT; PAM sequence: TGGGGT
ctgagttggtcatttaggga

SEQ ID NO: 23054 - DNA, 20 bp, Artificial Sequence
  Description of Artificial Sequence: Synthetic oligonucleotide
  Target: LAMA2; (-) strand; PAM type: NNGRRT; PAM sequence: AGGGAT
agtttctgagttggtcattt

SEQ ID NO: 23055 - DNA, 20 bp, Artificial Sequence
  Description of Artificial Sequence: Synthetic oligonucleotide
  Target: LAMA2; (-) strand; PAM type: NNGRRT; PAM sequence: CTGAGT
gggccccattctcagagttt

SEQ ID NO: 23056 - DNA, 20 bp, Artificial Sequence
  Description of Artificial Sequence: Synthetic oligonucleotide
  Target: LAMA2; (-) strand; PAM type: NNGRRT; PAM sequence: CAGAGT
ggatttctgggccccattct

SEQ ID NO: 23057 - DNA, 20 bp, Artificial Sequence
  Description of Artificial Sequence: Synthetic oligonucleotide
  Target: LAMA2; (-) strand; PAM type: NNGRRT; PAM sequence: ACGGAT
actggaggaatttttaaaac

SEQ ID NO: 23058 - DNA, 20 bp, Artificial Sequence
  Description of Artificial Sequence: Synthetic oligonucleotide
  Target: LAMA2; (-) strand; PAM type: NNGRRT; PAM sequence: AGGAAT
agctgcatcttaatcactgg

SEQ ID NO: 23059 - DNA, 20 bp, Artificial Sequence
  Description of Artificial Sequence: Synthetic oligonucleotide
  Target: LAMA2; (-) strand; PAM type: NNGRRT; PAM sequence: TGGAGT
gtgataattatggtagcgta

SEQ ID NO: 23060 - DNA, 20 bp, Artificial Sequence
  Description of Artificial Sequence: Synthetic oligonucleotide
  Target: LAMA2; (-) strand; PAM type: NNGRRT; PAM sequence: AGGGGT
acaaagctcttcctaaactc

SEQ ID NO: 23061 - DNA, 20 bp, Artificial Sequence
  Description of Artificial Sequence: Synthetic oligonucleotide
  Target: LAMA2; (-) strand; PAM type: NNGRRT; PAM sequence: TAGGAT
gtgacccagtgcttatcctt

SEQ ID NO: 23062 - DNA, 20 bp, Artificial Sequence
  Description of Artificial Sequence: Synthetic oligonucleotide
  Target: LAMA2; (-) strand; PAM type: NNGRRT; PAM sequence: CAGGAT
caattgcttcctatggctct

SEQ ID NO: 23063 - DNA, 20 bp, Artificial Sequence
  Description of Artificial Sequence: Synthetic oligonucleotide
  Target: LAMA2; (-) strand; PAM type: NNGRRT; PAM sequence: AGGAAT
gttgtaaattctttgaggcc

SEQ ID NO: 23064 - DNA, 20 bp, Artificial Sequence
  Description of Artificial Sequence: Synthetic oligonucleotide
  Target: LAMA2; (-) strand; PAM type: NNGRRT; PAM sequence: CTGAAT
agagtgaaaggttgacatgt

SEQ ID NO: 23065 - DNA, 20 bp, Artificial Sequence
  Description of Artificial Sequence: Synthetic oligonucleotide
  Target: LAMA2; (-) strand; PAM type: NNGRRT; PAM sequence: TAGAGT
aatattatcatagtattatg

SEQ ID NO: 23066 - DNA, 20 bp, Artificial Sequence
  Description of Artificial Sequence: Synthetic oligonucleotide
  Target: LAMA2; (-) strand; PAM type: NNGRRT; PAM sequence: CTGAAT
ttatttttgtgaaacttttg

SEQ ID NO: 23067 - DNA, 20 bp, Artificial Sequence
  Description of Artificial Sequence: Synthetic oligonucleotide
  Target: LAMA2; (-) strand; PAM type: NNGRRT; PAM sequence: TGGGGT
tacacttccaaagctctggc

SEQ ID NO: 23068 - DNA, 20 bp, Artificial Sequence
  Description of Artificial Sequence: Synthetic oligonucleotide
  Target: LAMA2; (-) strand; PAM type: NNGRRT; PAM sequence: GGGGAT
aaggatataatggtagattt

SEQ ID NO: 23069 - DNA, 20 bp, Artificial Sequence
  Description of Artificial Sequence: Synthetic oligonucleotide
  Target: LAMA2; (-) strand; PAM type: NNGRRT; PAM sequence: AAGGAT
tccgcactgccttctttggc

SEQ ID NO: 23070 - DNA, 20 bp, Artificial Sequence
  Description of Artificial Sequence: Synthetic oligonucleotide
  Target: LAMA2; (-) strand; PAM type: NNGRRT; PAM sequence: TAGGGT
tttgtatttttctatagaga

SEQ ID NO: 23071 - DNA, 20 bp, Artificial Sequence
  Description of Artificial Sequence: Synthetic oligonucleotide
  Target: LAMA2; (-) strand; PAM type: NNGRRT; PAM sequence: TGGAGT
tgtctcactgtcatccaggc

SEQ ID NO: 23072 - DNA, 20 bp, Artificial Sequence
  Description of Artificial Sequence: Synthetic oligonucleotide
  Target: LAMA2; (-) strand; PAM type: NNGRRT; PAM sequence: TTGGAT
tataattgctcaattattgt

SEQ ID NO: 23073 - DNA, 20 bp, Artificial Sequence
  Description of Artificial Sequence: Synthetic oligonucleotide
  Target: LAMA2; (-) strand; PAM type: NNGRRT; PAM sequence: GAGAAT
aaagaaggcctatgtatagg

SEQ ID NO: 23074 - DNA, 20 bp, Artificial Sequence
  Description of Artificial Sequence: Synthetic oligonucleotide
  Target: LAMA2; (-) strand; PAM type: NNGRRT; PAM sequence: TAGAGT
aatacctaagataggaaact

SEQ ID NO: 23075 - DNA, 20 bp, Artificial Sequence
  Description of Artificial Sequence: Synthetic oligonucleotide
  Target: LAMA2; (-) strand; PAM type: NNGRRT; PAM sequence: ATGAGT
tattcttaaagaaagattag

SEQ ID NO: 23076 - DNA, 20 bp, Artificial Sequence
  Description of Artificial Sequence: Synthetic oligonucleotide
  Target: LAMA2; (-) strand; PAM type: NNGRRT; PAM sequence: ATGAGT
gtggaggagagataaaatga

SEQ ID NO: 23077 - DNA, 20 bp, Artificial Sequence
  Description of Artificial Sequence: Synthetic oligonucleotide
  Target: LAMA2; (-) strand; PAM type: NNGRRT; PAM sequence: ATGAAT
ttgtgtggaggagagataaa

SEQ ID NO: 23078 - DNA, 20 bp, Artificial Sequence
  Description of Artificial Sequence: Synthetic oligonucleotide
  Target: LAMA2; (-) strand; PAM type: NNGRRT; PAM sequence: GGGGAT
tagatactgttctaggattg

SEQ ID NO: 23079 - DNA, 20 bp, Artificial Sequence
  Description of Artificial Sequence: Synthetic oligonucleotide
  Target: LAMA2; (-) strand; PAM type: NNGRRT; PAM sequence: TAGGAT
gcctttgctagatactgttc

SEQ ID NO: 23080 - DNA, 20 bp, Artificial Sequence
  Description of Artificial Sequence: Synthetic oligonucleotide
  Target: LAMA2; (-) strand; PAM type: NNGRRT; PAM sequence: CTGGGT
ttgacaaaagtatagagtat

SEQ ID NO: 23081 - DNA, 20 bp, Artificial Sequence
  Description of Artificial Sequence: Synthetic oligonucleotide
  Target: LAMA2; (-) strand; PAM type: NNGRRT; PAM sequence: TAGAGT
cacaaatattgacaaaagta

SEQ ID NO: 23082 - DNA, 20 bp, Artificial Sequence
  Description of Artificial Sequence: Synthetic oligonucleotide
  Target: LAMA2; (-) strand; PAM type: NNGRRT; PAM sequence: ATGGGT
tgttttcagattagatactg

SEQ ID NO: 23083 - DNA, 20 bp, Artificial Sequence
  Description of Artificial Sequence: Synthetic oligonucleotide
  Target: LAMA2; (-) strand; PAM type: NNGRRT; PAM sequence: TGGGAT
gcctcagcctcccagagtgc

SEQ ID NO: 23084 - DNA, 20 bp, Artificial Sequence
  Description of Artificial Sequence: Synthetic oligonucleotide
  Target: LAMA2; (-) strand; PAM type: NNGRRT; PAM sequence: CAGAGT
atcctcctgcctcagcctcc

SEQ ID NO: 23085 - DNA, 20 bp, Artificial Sequence
  Description of Artificial Sequence: Synthetic oligonucleotide
  Target: LAMA2; (-) strand; PAM type: NNGRRT; PAM sequence: CAGGAT
tggggtttcaccatgttagc

SEQ ID NO: 23086 - DNA, 20 bp, Artificial Sequence
  Description of Artificial Sequence: Synthetic oligonucleotide
  Target: LAMA2; (-) strand; PAM type: NNGRRT; PAM sequence: TGGGGT
attttcattttcagtagaga

SEQ ID NO: 23087 - DNA, 20 bp, Artificial Sequence
  Description of Artificial Sequence: Synthetic oligonucleotide
  Target: LAMA2; (-) strand; PAM type: NNGRRT; PAM sequence: CCGAGT
cattctcctgcctcagcctc

SEQ ID NO: 23088 - DNA, 20 bp, Artificial Sequence
  Description of Artificial Sequence: Synthetic oligonucleotide
  Target: LAMA2; (-) strand; PAM type: NNGRRT; PAM sequence: TGGAGT
tctcactctgtcgcccaggc

SEQ ID NO: 23089 - DNA, 20 bp, Artificial Sequence
  Description of Artificial Sequence: Synthetic oligonucleotide
  Target: LAMA2; (-) strand; PAM type: NNGRRT; PAM sequence: CGGAGT
ttttttttttttttctgaga

SEQ ID NO: 23090 - DNA, 20 bp, Artificial Sequence
  Description of Artificial Sequence: Synthetic oligonucleotide
  Target: LAMA2; (-) strand; PAM type: NNGRRT; PAM sequence: TAGAAT
atttcaataaagtagtgagt

SEQ ID NO: 23091 - DNA, 20 bp, Artificial Sequence
  Description of Artificial Sequence: Synthetic oligonucleotide
  Target: LAMA2; (-) strand; PAM type: NNGRRT; PAM sequence: GTGAGT
attttgatttcaataaagta

SEQ ID NO: 23092 - DNA, 20 bp, Artificial Sequence
  Description of Artificial Sequence: Synthetic oligonucleotide
  Target: LAMA2; (-) strand; PAM type: NNGRRT; PAM sequence: ATGGAT
aacatggcttgtttgaatta

SEQ ID NO: 23093 - DNA, 20 bp, Artificial Sequence
  Description of Artificial Sequence: Synthetic oligonucleotide
  Target: LAMA2; (-) strand; PAM type: NNGRRT; PAM sequence: TTGAAT
tcttttacaacatggcttgt

SEQ ID NO: 23094 - DNA, 20 bp, Artificial Sequence
  Description of Artificial Sequence: Synthetic oligonucleotide
  Target: LAMA2; (-) strand; PAM type: NNGRRT; PAM sequence: AAGAAT
tatagcatgtacagaaacac

SEQ ID NO: 23095 - DNA, 20 bp, Artificial Sequence
  Description of Artificial Sequence: Synthetic oligonucleotide
  Target: LAMA2; (-) strand; PAM type: NNGRRT; PAM sequence: AAGGGT
caagtcatatcttatcttcc

SEQ ID NO: 23096 - DNA, 20 bp, Artificial Sequence
  Description of Artificial Sequence: Synthetic oligonucleotide
  Target: LAMA2; (-) strand; PAM type: NNGRRT; PAM sequence: AAGAGT
tcacagacaacaaatgtggg

SEQ ID NO: 23097 - DNA, 20 bp, Artificial Sequence
  Description of Artificial Sequence: Synthetic oligonucleotide
  Target: LAMA2; (-) strand; PAM type: NNGRRT; PAM sequence: CTGGGT
ttgcaccattgcaatccagc

SEQ ID NO: 23098 - DNA, 20 bp, Artificial Sequence
  Description of Artificial Sequence: Synthetic oligonucleotide
  Target: LAMA2; (-) strand; PAM type: NNGRRT; PAM sequence: GAGAAT
tacttgggaggctgaggcag

SEQ ID NO: 23099 - DNA, 20 bp, Artificial Sequence
  Description of Artificial Sequence: Synthetic oligonucleotide
  Target: LAMA2; (-) strand; PAM type: NNGRRT; PAM sequence: CTGGGT
tactaaaaatacaaaattag

SEQ ID NO: 23100 - DNA, 20 bp, Artificial Sequence
  Description of Artificial Sequence: Synthetic oligonucleotide
  Target: LAMA2; (-) strand; PAM type: NNGRRT; PAM sequence: AGGAGT
caggtggatcacctgaggtc

SEQ ID NO: 23101 - DNA, 20 bp, Artificial Sequence
  Description of Artificial Sequence: Synthetic oligonucleotide
  Target: LAMA2; (-) strand; PAM type: NNGRRT; PAM sequence: GTGGAT
actttgggaggccaaggcag

SEQ ID NO: 23102 - DNA, 20 bp, Artificial Sequence
  Description of Artificial Sequence: Synthetic oligonucleotide
  Target: LAMA2; (-) strand; PAM type: NNGRRT; PAM sequence: ATGGGT
tttttaataaataaataaaa

SEQ ID NO: 23103 - DNA, 20 bp, Artificial Sequence
  Description of Artificial Sequence: Synthetic oligonucleotide
  Target: LAMA2; (-) strand; PAM type: NNGRRT; PAM sequence: ATGAGT
tcactatctctagtatgtag

SEQ ID NO: 23104 - DNA, 20 bp, Artificial Sequence
  Description of Artificial Sequence: Synthetic oligonucleotide
  Target: LAMA2; (-) strand; PAM type: NNGRRT; PAM sequence: TTGAAT
tgttaatgaaggacaacaca

SEQ ID NO: 23105 - DNA, 20 bp, Artificial Sequence
  Description of Artificial Sequence: Synthetic oligonucleotide
  Target: LAMA2; (-) strand; PAM type: NNGRRT; PAM sequence: GGGAGT
tcgtcttgattacttttgcc

SEQ ID NO: 23106 - DNA, 20 bp, Artificial Sequence
  Description of Artificial Sequence: Synthetic oligonucleotide
  Target: LAMA2; (-) strand; PAM type: NNGRRT; PAM sequence: CAGAGT
tttatctgaattatattcta

SEQ ID NO: 23107 - DNA, 20 bp, Artificial Sequence
  Description of Artificial Sequence: Synthetic oligonucleotide
  Target: LAMA2; (-) strand; PAM type: NNGRRT; PAM sequence: CTGAAT
tcttcttagaacccatttat

SEQ ID NO: 23108 - DNA, 20 bp, Artificial Sequence
  Description of Artificial Sequence: Synthetic oligonucleotide
  Target: LAMA2; (-) strand; PAM type: NNGRRT; PAM sequence: AAGAAT
tagacattgtaaaattggag

SEQ ID NO: 23109 - DNA, 20 bp, Artificial Sequence
  Description of Artificial Sequence: Synthetic oligonucleotide
  Target: LAMA2; (-) strand; PAM type: NNGRRT; PAM sequence: CAGAAT
attcctgggaactactgact

SEQ ID NO: 23110 - DNA, 20 bp, Artificial Sequence
  Description of Artificial Sequence: Synthetic oligonucleotide
  Target: LAMA2; (-) strand; PAM type: NNGRRT; PAM sequence: TGGGAT
aagtgacagcccttctggtt

SEQ ID NO: 23111 - DNA, 20 bp, Artificial Sequence
  Description of Artificial Sequence: Synthetic oligonucleotide
  Target: LAMA2; (-) strand; PAM type: NNGRRT; PAM sequence: CTGGGT
tgtctacttaatgatagatc

SEQ ID NO: 23112 - DNA, 20 bp, Artificial Sequence
  Description of Artificial Sequence: Synthetic oligonucleotide
  Target: LAMA2; (-) strand; PAM type: NNGRRT; PAM sequence: ATGGAT
aatctgccaatactttgatc

SEQ ID NO: 23113 - DNA, 20 bp, Artificial Sequence
  Description of Artificial Sequence: Synthetic oligonucleotide
  Target: LAMA2; (-) strand; PAM type: NNGRRT; PAM sequence: CGGGAT
tgaagcagagacttcataaa

SEQ ID NO: 23114 - DNA, 20 bp, Artificial Sequence
  Description of Artificial Sequence: Synthetic oligonucleotide
  Target: LAMA2; (-) strand; PAM type: NNGRRT; PAM sequence: TAGGAT
aatcctaatcctcaaggtga

SEQ ID NO: 23115 - DNA, 20 bp, Artificial Sequence
  Description of Artificial Sequence: Synthetic oligonucleotide
  Target: LAMA2; (-) strand; PAM type: NNGRRT; PAM sequence: CTGAAT
aataagtaaagggcagtggc

SEQ ID NO: 23116 - DNA, 20 bp, Artificial Sequence
  Description of Artificial Sequence: Synthetic oligonucleotide
  Target: LAMA2; (-) strand; PAM type: NNGRRT; PAM sequence: TTGAAT
ctttttacataagtgggaaa

SEQ ID NO: 23117 - DNA, 20 bp, Artificial Sequence
  Description of Artificial Sequence: Synthetic oligonucleotide
  Target: LAMA2; (-) strand; PAM type: NNGRRT; PAM sequence: TTGGAT
gcattttgttattccaatct

SEQ ID NO: 23118 - DNA, 20 bp, Artificial Sequence
  Description of Artificial Sequence: Synthetic oligonucleotide
  Target: LAMA2; (-) strand; PAM type: NNGRRT; PAM sequence: TGGGGT
aatattgctatttctccatt

SEQ ID NO: 23119 - DNA, 20 bp, Artificial Sequence
  Description of Artificial Sequence: Synthetic oligonucleotide
  Target: LAMA2; (-) strand; PAM type: NNGRRT; PAM sequence: AAGAGT
gaaactcaatcctggcctag

SEQ ID NO: 23120 - DNA, 20 bp, Artificial Sequence
  Description of Artificial Sequence: Synthetic oligonucleotide
  Target: LAMA2; (-) strand; PAM type: NNGRRT; PAM sequence: GAGAAT
cctaatggactgtttcatga

SEQ ID NO: 23121 - DNA, 20 bp, Artificial Sequence
  Description of Artificial Sequence: Synthetic oligonucleotide
  Target: LAMA2; (-) strand; PAM type: NNGRRT; PAM sequence: AAGAAT
atagagaaaccatcacatgg

SEQ ID NO: 23122 - DNA, 20 bp, Artificial Sequence
  Description of Artificial Sequence: Synthetic oligonucleotide
  Target: LAMA2; (-) strand; PAM type: NNGRRT; PAM sequence: GGGAGT
cataagcagatgtattcaat

SEQ ID NO: 23123 - DNA, 20 bp, Artificial Sequence
  Description of Artificial Sequence: Synthetic oligonucleotide
  Target: LAMA2; (-) strand; PAM type: NNGRRT; PAM sequence: ATGAGT
attctagaatctatatacaa

SEQ ID NO: 23124 - DNA, 20 bp, Artificial Sequence
  Description of Artificial Sequence: Synthetic oligonucleotide
  Target: LAMA2; (-) strand; PAM type: NNGRRT; PAM sequence: TAGAAT
tggtactacatattgaattc

SEQ ID NO: 23125 - DNA, 20 bp, Artificial Sequence
  Description of Artificial Sequence: Synthetic oligonucleotide
  Target: LAMA2; (-) strand; PAM type: NNGRRT; PAM sequence: TTGAAT
agttatattggtactacata

SEQ ID NO: 23126 - DNA, 20 bp, Artificial Sequence
  Description of Artificial Sequence: Synthetic oligonucleotide
  Target: LAMA2; (-) strand; PAM type: NNGRRT; PAM sequence: CTGAAT
ttctaactaaaatataagtg

SEQ ID NO: 23127 - DNA, 20 bp, Artificial Sequence
  Description of Artificial Sequence: Synthetic oligonucleotide
  Target: LAMA2; (-) strand; PAM type: NNGRRT; PAM sequence: AGGAAT
aagttatgcgatactagtta

SEQ ID NO: 23128 - DNA, 20 bp, Artificial Sequence
  Description of Artificial Sequence: Synthetic oligonucleotide
  Target: LAMA2; (-) strand; PAM type: NNGRRT; PAM sequence: AAGAGT
aactacttagccagtccttg

SEQ ID NO: 23129 - DNA, 20 bp, Artificial Sequence
  Description of Artificial Sequence: Synthetic oligonucleotide
  Target: LAMA2; (-) strand; PAM type: NNGRRT; PAM sequence: TTGAAT
tcctgactttcctgagctgt

SEQ ID NO: 23130 - DNA, 20 bp, Artificial Sequence
  Description of Artificial Sequence: Synthetic oligonucleotide
  Target: LAMA2; (-) strand; PAM type: NNGRRT; PAM sequence: TCGAGT
ctgcaagacggttggcttca

SEQ ID NO: 23131 - DNA, 20 bp, Artificial Sequence
  Description of Artificial Sequence: Synthetic oligonucleotide
  Target: LAMA2; (-) strand; PAM type: NNGRRT; PAM sequence: TGGAGT
cccaatactcacgtctatga

SEQ ID NO: 23132 - DNA, 20 bp, Artificial Sequence
  Description of Artificial Sequence: Synthetic oligonucleotide
  Target: LAMA2; (-) strand; PAM type: NNGRRT; PAM sequence: TTGAGT
tattcattatcatctctctt

SEQ ID NO: 23133 - DNA, 20 bp, Artificial Sequence
  Description of Artificial Sequence: Synthetic oligonucleotide
  Target: LAMA2; (-) strand; PAM type: NNGRRT; PAM sequence: TAGAAT
atagataggcatggtcacag

SEQ ID NO: 23134 - DNA, 20 bp, Artificial Sequence
  Description of Artificial Sequence: Synthetic oligonucleotide
  Target: LAMA2; (-) strand; PAM type: NNGRRT; PAM sequence: GTGAGT
aaacagatatgtgtgaatgt

SEQ ID NO: 23135 - DNA, 20 bp, Artificial Sequence
  Description of Artificial Sequence: Synthetic oligonucleotide
  Target: LAMA2; (-) strand; PAM type: NNGRRT; PAM sequence: GTGAAT
gtggacaaaaacagatatgt

SEQ ID NO: 23136 - DNA, 20 bp, Artificial Sequence
  Description of Artificial Sequence: Synthetic oligonucleotide
  Target: LAMA2; (-) strand; PAM type: NNGRRT; PAM sequence: TAGGAT
ttcataggtatacatgtcat

SEQ ID NO: 23137 - DNA, 20 bp, Artificial Sequence
  Description of Artificial Sequence: Synthetic oligonucleotide
  Target: LAMA2; (-) strand; PAM type: NNGRRT; PAM sequence: TGGAAT
gaattaaagtcattatttaa

SEQ ID NO: 23138 - DNA, 20 bp, Artificial Sequence
  Description of Artificial Sequence: Synthetic oligonucleotide
  Target: LAMA2; (-) strand; PAM type: NNGRRT; PAM sequence: GAGAAT
ctaacatagcaaaaagaata

SEQ ID NO: 23139 - DNA, 20 bp, Artificial Sequence
  Description of Artificial Sequence: Synthetic oligonucleotide
  Target: LAMA2; (-) strand; PAM type: NNGRRT; PAM sequence: AAGAAT
aaacttactaacatagcaaa

SEQ ID NO: 23140 - DNA, 20 bp, Artificial Sequence
  Description of Artificial Sequence: Synthetic oligonucleotide
  Target: LAMA2; (-) strand; PAM type: NNGRRT; PAM sequence: TGGGAT
acctcggcctcccaaagtgc

SEQ ID NO: 23141 - DNA, 20 bp, Artificial Sequence
  Description of Artificial Sequence: Synthetic oligonucleotide
  Target: LAMA2; (-) strand; PAM type: NNGRRT; PAM sequence: CGGGGT
ttttgaatatttaatagaga

SEQ ID NO: 23142 - DNA, 20 bp, Artificial Sequence
  Description of Artificial Sequence: Synthetic oligonucleotide
  Target: LAMA2; (-) strand; PAM type: NNGRRT; PAM sequence: TTGAAT
caccacacccagctaatttt

SEQ ID NO: 23143 - DNA, 20 bp, Artificial Sequence
  Description of Artificial Sequence: Synthetic oligonucleotide
  Target: LAMA2; (-) strand; PAM type: NNGRRT; PAM sequence: TGGGAT
gcctcagcctcctgagtagc

SEQ ID NO: 23144 - DNA, 20 bp, Artificial Sequence
  Description of Artificial Sequence: Synthetic oligonucleotide
  Target: LAMA2; (-) strand; PAM type: NNGRRT; PAM sequence: CTGAGT
aattctcctgcctcagcctc

SEQ ID NO: 23145 - DNA, 20 bp, Artificial Sequence
  Description of Artificial Sequence: Synthetic oligonucleotide
  Target: LAMA2; (-) strand; PAM type: NNGRRT; PAM sequence: TGGAAT
tcttgctctgtcacccaggc

SEQ ID NO: 23146 - DNA, 20 bp, Artificial Sequence
  Description of Artificial Sequence: Synthetic oligonucleotide
  Target: LAMA2; (-) strand; PAM type: NNGRRT; PAM sequence: CAGAGT
ttttttttttttttttgaga

SEQ ID NO: 23147 - DNA, 20 bp, Artificial Sequence
  Description of Artificial Sequence: Synthetic oligonucleotide
  Target: LAMA2; (-) strand; PAM type: NNGRRT; PAM sequence: GTGAAT
gaagagggcattttaagcaa

SEQ ID NO: 23148 - DNA, 20 bp, Artificial Sequence
  Description of Artificial Sequence: Synthetic oligonucleotide
  Target: LAMA2; (-) strand; PAM type: NNGRRT; PAM sequence: TTGGAT
gacataggtggcaatttagt

SEQ ID NO: 23149 - DNA, 20 bp, Artificial Sequence
  Description of Artificial Sequence: Synthetic oligonucleotide
  Target: LAMA2; (-) strand; PAM type: NNGRRT; PAM sequence: ATGAGT
atacccatcaaggacagcag

SEQ ID NO: 23150 - DNA, 20 bp, Artificial Sequence
  Description of Artificial Sequence: Synthetic oligonucleotide
  Target: LAMA2; (-) strand; PAM type: NNGRRT; PAM sequence: CAGGAT
tgttcataattaacagaaat

SEQ ID NO: 23151 - DNA, 20 bp, Artificial Sequence
  Description of Artificial Sequence: Synthetic oligonucleotide
  Target: LAMA2; (-) strand; PAM type: NNGRRT; PAM sequence: TTGAGT
cacttcctactaagccatat

SEQ ID NO: 23152 - DNA, 20 bp, Artificial Sequence
  Description of Artificial Sequence: Synthetic oligonucleotide
  Target: LAMA2; (-) strand; PAM type: NNGRRT; PAM sequence: CAGAAT
catgaaactgaaatttgaaa

SEQ ID NO: 23153 - DNA, 20 bp, Artificial Sequence
  Description of Artificial Sequence: Synthetic oligonucleotide
  Target: LAMA2; (-) strand; PAM type: NNGRRT; PAM sequence: TAGAAT
acctttgtaataatcccagc

SEQ ID NO: 23154 - DNA, 20 bp, Artificial Sequence
  Description of Artificial Sequence: Synthetic oligonucleotide
  Target: LAMA2; (-) strand; PAM type: NNGRRT; PAM sequence: CTGGAT
cccaagtaaggacttagagc

SEQ ID NO: 23155 - DNA, 20 bp, Artificial Sequence
  Description of Artificial Sequence: Synthetic oligonucleotide
  Target: LAMA2; (-) strand; PAM type: NNGRRT; PAM sequence: GTGAAT
cacttcccagaagagaccaa

SEQ ID NO: 23156 - DNA, 20 bp, Artificial Sequence
  Description of Artificial Sequence: Synthetic oligonucleotide
  Target: LAMA2; (-) strand; PAM type: NNGRRT; PAM sequence: TGGGGT
ttaatttcacaaaatctttc

SEQ ID NO: 23157 - DNA, 20 bp, Artificial Sequence
  Description of Artificial Sequence: Synthetic oligonucleotide
  Target: LAMA2; (-) strand; PAM type: NNGRRT; PAM sequence: TGGAAT
gagcacttgtactacattac

SEQ ID NO: 23158 - DNA, 20 bp, Artificial Sequence
  Description of Artificial Sequence: Synthetic oligonucleotide
  Target: LAMA2; (-) strand; PAM type: NNGRRT; PAM sequence: AGGAAT
ctggtgggatgattcaaaaa

SEQ ID NO: 23159 - DNA, 20 bp, Artificial Sequence
  Description of Artificial Sequence: Synthetic oligonucleotide
  Target: LAMA2; (-) strand; PAM type: NNGRRT; PAM sequence: TGGGAT
agcctcatcaaggattctgg

SEQ ID NO: 23160 - DNA, 20 bp, Artificial Sequence
  Description of Artificial Sequence: Synthetic oligonucleotide
  Target: LAMA2; (-) strand; PAM type: NNGRRT; PAM sequence: AAGGAT
gagatgtttttagcctcatc

SEQ ID NO: 23161 - DNA, 20 bp, Artificial Sequence
  Description of Artificial Sequence: Synthetic oligonucleotide
  Target: LAMA2; (-) strand; PAM type: NNGRRT; PAM sequence: TGGGAT
aaacaaatataccaatttac

SEQ ID NO: 23162 - DNA, 20 bp, Artificial Sequence
  Description of Artificial Sequence: Synthetic oligonucleotide
  Target: LAMA2; (-) strand; PAM type: NNGRRT; PAM sequence: GAGAAT
tgctataattatagcatacc

SEQ ID NO: 23163 - DNA, 20 bp, Artificial Sequence
  Description of Artificial Sequence: Synthetic oligonucleotide
  Target: LAMA2; (-) strand; PAM type: NNGRRT; PAM sequence: AAGAGT
tggtagtgggtgactgagaa

SEQ ID NO: 23164 - DNA, 20 bp, Artificial Sequence
  Description of Artificial Sequence: Synthetic oligonucleotide
  Target: LAMA2; (-) strand; PAM type: NNGRRT; PAM sequence: GTGGGT
ttaagaccctaacagtggta

SEQ ID NO: 23165 - DNA, 20 bp, Artificial Sequence
  Description of Artificial Sequence: Synthetic oligonucleotide
  Target: LAMA2; (-) strand; PAM type: NNGRRT; PAM sequence: GTGAGT
gtctttgcctgttttatttt

SEQ ID NO: 23166 - DNA, 20 bp, Artificial Sequence
  Description of Artificial Sequence: Synthetic oligonucleotide
  Target: LAMA2; (-) strand; PAM type: NNGRRT; PAM sequence: CAGAGT
tggtgataaaattccctatc

SEQ ID NO: 23167 - DNA, 20 bp, Artificial Sequence
  Description of Artificial Sequence: Synthetic oligonucleotide
  Target: LAMA2; (-) strand; PAM type: NNGRRT; PAM sequence: GTGAAT
cagtatgtttttattaaaaa

SEQ ID NO: 23168 - DNA, 20 bp, Artificial Sequence
  Description of Artificial Sequence: Synthetic oligonucleotide
  Target: LAMA2; (-) strand; PAM type: NNGRRT; PAM sequence: TGGAAT
tcaaataatgtgatagaact

SEQ ID NO: 23169 - DNA, 20 bp, Artificial Sequence
  Description of Artificial Sequence: Synthetic oligonucleotide
  Target: LAMA2; (-) strand; PAM type: NNGRRT; PAM sequence: CAGGAT
atggttctgaacattttatt

SEQ ID NO: 23170 - DNA, 20 bp, Artificial Sequence
  Description of Artificial Sequence: Synthetic oligonucleotide
  Target: LAMA2; (-) strand; PAM type: NNGRRT; PAM sequence: GGGGAT
tgctaagactggttcattta

SEQ ID NO: 23171 - DNA, 20 bp, Artificial Sequence
  Description of Artificial Sequence: Synthetic oligonucleotide
  Target: LAMA2; (-) strand; PAM type: NNGRRT; PAM sequence: TAGAAT
aaaacagtacaaattgctca

SEQ ID NO: 23172 - DNA, 20 bp, Artificial Sequence
  Description of Artificial Sequence: Synthetic oligonucleotide
  Target: LAMA2; (-) strand; PAM type: NNGRRT; PAM sequence: TTGAAT
gcaatgatcatgccactatt

SEQ ID NO: 23173 - DNA, 20 bp, Artificial Sequence
  Description of Artificial Sequence: Synthetic oligonucleotide
  Target: LAMA2; (-) strand; PAM type: NNGRRT; PAM sequence: AAGGAT
gaaaagtagattcattctga

SEQ ID NO: 23174 - DNA, 20 bp, Artificial Sequence
  Description of Artificial Sequence: Synthetic oligonucleotide
  Target: LAMA2; (-) strand; PAM type: NNGRRT; PAM sequence: ATGGAT
agaaaattatctaacagaag

SEQ ID NO: 23175 - DNA, 20 bp, Artificial Sequence
  Description of Artificial Sequence: Synthetic oligonucleotide
  Target: LAMA2; (-) strand; PAM type: NNGRRT; PAM sequence: TAGGGT
gaaaatggtgaacttgaaat

SEQ ID NO: 23176 - DNA, 20 bp, Artificial Sequence
  Description of Artificial Sequence: Synthetic oligonucleotide
  Target: LAMA2; (-) strand; PAM type: NNGRRT; PAM sequence: AAGGAT
aaatgttacaagaaatttat

SEQ ID NO: 23177 - DNA, 20 bp, Artificial Sequence
  Description of Artificial Sequence: Synthetic oligonucleotide
  Target: LAMA2; (-) strand; PAM type: NNGRRT; PAM sequence: TAGGGT
ttttcctaaaggtattaaat

SEQ ID NO: 23178 - DNA, 20 bp, Artificial Sequence
  Description of Artificial Sequence: Synthetic oligonucleotide
  Target: LAMA2; (-) strand; PAM type: NNGRRT; PAM sequence: ATGGGT
ttagcctaccatgtataagc

SEQ ID NO: 23179 - DNA, 20 bp, Artificial Sequence
  Description of Artificial Sequence: Synthetic oligonucleotide
  Target: LAMA2; (-) strand; PAM type: NNGRRT; PAM sequence: AGGAAT
aatgattgtggaaagagaga

SEQ ID NO: 23180 - DNA, 20 bp, Artificial Sequence
  Description of Artificial Sequence: Synthetic oligonucleotide
  Target: LAMA2; (-) strand; PAM type: NNGRRT; PAM sequence: TGGGAT
tatatcagatcttatattta

SEQ ID NO: 23181 - DNA, 20 bp, Artificial Sequence
  Description of Artificial Sequence: Synthetic oligonucleotide
  Target: LAMA2; (-) strand; PAM type: NNGRRT; PAM sequence: AGGAGT
ctttatagggctagactcaa

SEQ ID NO: 23182 - DNA, 20 bp, Artificial Sequence
  Description of Artificial Sequence: Synthetic oligonucleotide
  Target: LAMA2; (-) strand; PAM type: NNGRRT; PAM sequence: AAGGAT
ttagctttctcctgcttata

SEQ ID NO: 23183 - DNA, 20 bp, Artificial Sequence
  Description of Artificial Sequence: Synthetic oligonucleotide
  Target: LAMA2; (-) strand; PAM type: NNGRRT; PAM sequence: ATGAGT
ttccatttttattccatttt

SEQ ID NO: 23184 - DNA, 20 bp, Artificial Sequence
  Description of Artificial Sequence: Synthetic oligonucleotide
  Target: LAMA2; (-) strand; PAM type: NNGRRT; PAM sequence: TAGGAT
tgttattttagagtctctta

SEQ ID NO: 23185 - DNA, 20 bp, Artificial Sequence
  Description of Artificial Sequence: Synthetic oligonucleotide
  Target: LAMA2; (-) strand; PAM type: NNGRRT; PAM sequence: TAGAGT
catctaattctctgttattt

SEQ ID NO: 23186 - DNA, 20 bp, Artificial Sequence
  Description of Artificial Sequence: Synthetic oligonucleotide
  Target: LAMA2; (-) strand; PAM type: NNGRRT; PAM sequence: TTGAGT
tctgatagataatgtaggct

SEQ ID NO: 23187 - DNA, 20 bp, Artificial Sequence
  Description of Artificial Sequence: Synthetic oligonucleotide
  Target: LAMA2; (-) strand; PAM type: NNGRRT; PAM sequence: GTGGGT
ggacttcatcttgtgatggc

SEQ ID NO: 23188 - DNA, 20 bp, Artificial Sequence
  Description of Artificial Sequence: Synthetic oligonucleotide
  Target: LAMA2; (-) strand; PAM type: NNGRRT; PAM sequence: AGGGGT
tggattcctggacttacacc

SEQ ID NO: 23189 - DNA, 20 bp, Artificial Sequence
  Description of Artificial Sequence: Synthetic oligonucleotide
  Target: LAMA2; (-) strand; PAM type: NNGRRT; PAM sequence: TTGGAT
cactccaagttcttcagctt

SEQ ID NO: 23190 - DNA, 20 bp, Artificial Sequence
  Description of Artificial Sequence: Synthetic oligonucleotide
  Target: LAMA2; (-) strand; PAM type: NNGRRT; PAM sequence: CTGGAT
gccttcatctttcacccatg

SEQ ID NO: 23191 - DNA, 20 bp, Artificial Sequence
  Description of Artificial Sequence: Synthetic oligonucleotide
  Target: LAMA2; (-) strand; PAM type: NNGRRT; PAM sequence: AAGAGT
agcaggcagaagaaagtgga

SEQ ID NO: 23192 - DNA, 20 bp, Artificial Sequence
  Description of Artificial Sequence: Synthetic oligonucleotide
  Target: LAMA2; (-) strand; PAM type: NNGRRT; PAM sequence: TAGAAT
taataagctgccagtgtggc

SEQ ID NO: 23193 - DNA, 20 bp, Artificial Sequence
  Description of Artificial Sequence: Synthetic oligonucleotide
  Target: LAMA2; (-) strand; PAM type: NNGRRT; PAM sequence: GTGGGT
gaggcagacccaccctcaat

SEQ ID NO: 23194 - DNA, 20 bp, Artificial Sequence
  Description of Artificial Sequence: Synthetic oligonucleotide
  Target: LAMA2; (-) strand; PAM type: NNGRRT; PAM sequence: TTGAGT
ttgccaaaggagattaaaat

SEQ ID NO: 23195 - DNA, 20 bp, Artificial Sequence
  Description of Artificial Sequence: Synthetic oligonucleotide
  Target: LAMA2; (-) strand; PAM type: NNGRRT; PAM sequence: GAGGGT
ttgttcctgggtgtctctgt

SEQ ID NO: 23196 - DNA, 20 bp, Artificial Sequence
  Description of Artificial Sequence: Synthetic oligonucleotide
  Target: LAMA2; (-) strand; PAM type: NNGRRT; PAM sequence: CTGGGT
aacgatgcaaagtattgttc

SEQ ID NO: 23197 - DNA, 20 bp, Artificial Sequence
  Description of Artificial Sequence: Synthetic oligonucleotide
  Target: LAMA2; (-) strand; PAM type: NNGRRT; PAM sequence: TTGGAT
aatattgagtatcagcttga

SEQ ID NO: 23198 - DNA, 20 bp, Artificial Sequence
  Description of Artificial Sequence: Synthetic oligonucleotide
  Target: LAMA2; (-) strand; PAM type: NNGRRT; PAM sequence: TTGAGT
tggacttgtgatgactaata

SEQ ID NO: 23199 - DNA, 20 bp, Artificial Sequence
  Description of Artificial Sequence: Synthetic oligonucleotide
  Target: LAMA2; (-) strand; PAM type: NNGRRT; PAM sequence: AGGGGT
tgtatgggttcaagttgaca

SEQ ID NO: 23200 - DNA, 20 bp, Artificial Sequence
  Description of Artificial Sequence: Synthetic oligonucleotide
  Target: LAMA2; (-) strand; PAM type: NNGRRT; PAM sequence: ATGGGT
tatgatttcaggagatgtgt

SEQ ID NO: 23201 - DNA, 20 bp, Artificial Sequence
  Description of Artificial Sequence: Synthetic oligonucleotide
  Target: LAMA2; (-) strand; PAM type: NNGRRT; PAM sequence: AGGGAT
agtgtgcttctgattgtaca

SEQ ID NO: 23202 - DNA, 20 bp, Artificial Sequence
  Description of Artificial Sequence: Synthetic oligonucleotide
  Target: LAMA2; (-) strand; PAM type: NNGRRT; PAM sequence: AAGGAT
tatgtaatagcatttaggtt

SEQ ID NO: 23203 - DNA, 20 bp, Artificial Sequence
  Description of Artificial Sequence: Synthetic oligonucleotide
  Target: LAMA2; (-) strand; PAM type: NNGRRT; PAM sequence: AAGAAT
tatttcctccttattctgtt

SEQ ID NO: 23204 - DNA, 20 bp, Artificial Sequence
  Description of Artificial Sequence: Synthetic oligonucleotide
  Target: LAMA2; (-) strand; PAM type: NNGRRT; PAM sequence: GGGAAT
aggtgcttgcagaaggcaaa

SEQ ID NO: 23205 - DNA, 20 bp, Artificial Sequence
  Description of Artificial Sequence: Synthetic oligonucleotide
  Target: LAMA2; (-) strand; PAM type: NNGRRT; PAM sequence: TTGGGT
ggtccttccagaataaaggt

SEQ ID NO: 23206 - DNA, 20 bp, Artificial Sequence
  Description of Artificial Sequence: Synthetic oligonucleotide
  Target: LAMA2; (-) strand; PAM type: NNGRRT; PAM sequence: CAGAAT
acaaatggcacaggtccttc

SEQ ID NO: 23207 - DNA, 20 bp, Artificial Sequence
  Description of Artificial Sequence: Synthetic oligonucleotide
  Target: LAMA2; (-) strand; PAM type: NNGRRT; PAM sequence: TGGAAT
aaggcaaggaagagcatgca

SEQ ID NO: 23208 - DNA, 20 bp, Artificial Sequence
  Description of Artificial Sequence: Synthetic oligonucleotide
  Target: LAMA2; (-) strand; PAM type: NNGRRT; PAM sequence: CAGAAT
tgttggctgggtaattgacc

SEQ ID NO: 23209 - DNA, 20 bp, Artificial Sequence
  Description of Artificial Sequence: Synthetic oligonucleotide
  Target: LAMA2; (-) strand; PAM type: NNGRRT; PAM sequence: CTGGGT
gaagggggtttcagtgttgg

SEQ ID NO: 23210 - DNA, 20 bp, Artificial Sequence
  Description of Artificial Sequence: Synthetic oligonucleotide
  Target: LAMA2; (-) strand; PAM type: NNGRRT; PAM sequence: GGGGGT
ccaagtcaacaggctaagaa

SEQ ID NO: 23211 - DNA, 20 bp, Artificial Sequence
  Description of Artificial Sequence: Synthetic oligonucleotide
  Target: LAMA2; (-) strand; PAM type: NNGRRT; PAM sequence: AGGGAT
agggaagaatgctgtcacca

SEQ ID NO: 23212 - DNA, 20 bp, Artificial Sequence
  Description of Artificial Sequence: Synthetic oligonucleotide
  Target: LAMA2; (-) strand; PAM type: NNGRRT; PAM sequence: AAGAAT
gacatcttagttccagaggg

SEQ ID NO: 23213 - DNA, 20 bp, Artificial Sequence
  Description of Artificial Sequence: Synthetic oligonucleotide
  Target: LAMA2; (-) strand; PAM type: NNGRRT; PAM sequence: AGGGGT
gttcacgtgtcccagaatca

SEQ ID NO: 23214 - DNA, 20 bp, Artificial Sequence
  Description of Artificial Sequence: Synthetic oligonucleotide
  Target: LAMA2; (-) strand; PAM type: NNGRRT; PAM sequence: CAGAAT
tagccagtgttcacgtgtcc

SEQ ID NO: 23215 - DNA, 20 bp, Artificial Sequence
  Description of Artificial Sequence: Synthetic oligonucleotide
  Target: LAMA2; (-) strand; PAM type: NNGRRT; PAM sequence: TTGAAT
tccagaaggctgtgtatgcc

SEQ ID NO: 23216 - DNA, 20 bp, Artificial Sequence
  Description of Artificial Sequence: Synthetic oligonucleotide
  Target: LAMA2; (-) strand; PAM type: NNGRRT; PAM sequence: TGGAAT
caggtggattgatagaattg

SEQ ID NO: 23217 - DNA, 20 bp, Artificial Sequence
  Description of Artificial Sequence: Synthetic oligonucleotide
  Target: LAMA2; (-) strand; PAM type: NNGRRT; PAM sequence: TAGAAT
tcctgaagcaggtggattga

SEQ ID NO: 23218 - DNA, 20 bp, Artificial Sequence
  Description of Artificial Sequence: Synthetic oligonucleotide
  Target: LAMA2; (-) strand; PAM type: NNGRRT; PAM sequence: GTGGAT
ttcccatcatcctgaagcag

SEQ ID NO: 23219 - DNA, 20 bp, Artificial Sequence
  Description of Artificial Sequence: Synthetic oligonucleotide
  Target: LAMA2; (-) strand; PAM type: NNGRRT; PAM sequence: TGGAAT
cagcactgggctcatgctca

SEQ ID NO: 23220 - DNA, 20 bp, Artificial Sequence
  Description of Artificial Sequence: Synthetic oligonucleotide
  Target: LAMA2; (-) strand; PAM type: NNGRRT; PAM sequence: CAGAAT
gagtaccatccgtgaactcc

SEQ ID NO: 23221 - DNA, 20 bp, Artificial Sequence
  Description of Artificial Sequence: Synthetic oligonucleotide
  Target: LAMA2; (-) strand; PAM type: NNGRRT; PAM sequence: AAGAGT
ctacgcccaatgtttctgcc

SEQ ID NO: 23222 - DNA, 20 bp, Artificial Sequence
  Description of Artificial Sequence: Synthetic oligonucleotide
  Target: LAMA2; (-) strand; PAM type: NNGRRT; PAM sequence: ATGGAT
aataggcacttattctggat

SEQ ID NO: 23223 - DNA, 20 bp, Artificial Sequence
  Description of Artificial Sequence: Synthetic oligonucleotide
  Target: LAMA2; (-) strand; PAM type: NNGRRT; PAM sequence: CTGGAT
caatggaataggcacttatt

SEQ ID NO: 23224 - DNA, 20 bp, Artificial Sequence
  Description of Artificial Sequence: Synthetic oligonucleotide
  Target: LAMA2; (-) strand; PAM type: NNGRRT; PAM sequence: TGGAAT
aggcagaggtttgtcctcaa

SEQ ID NO: 23225 - DNA, 20 bp, Artificial Sequence
  Description of Artificial Sequence: Synthetic oligonucleotide
  Target: LAMA2; (-) strand; PAM type: NNGRRT; PAM sequence: CAGGGT
ctccgtctggcatccttcct

SEQ ID NO: 23226 - DNA, 20 bp, Artificial Sequence
  Description of Artificial Sequence: Synthetic oligonucleotide
  Target: LAMA2; (-) strand; PAM type: NNGRRT; PAM sequence: CTGAGT
tgacctgactatagccaccg

SEQ ID NO: 23227 - DNA, 20 bp, Artificial Sequence
  Description of Artificial Sequence: Synthetic oligonucleotide
  Target: LAMA2; (-) strand; PAM type: NNGRRT; PAM sequence: AGGAAT
aacaaagtggccatggtggc

SEQ ID NO: 23228 - DNA, 20 bp, Artificial Sequence
  Description of Artificial Sequence: Synthetic oligonucleotide
  Target: LAMA2; (-) strand; PAM type: NNGRRT; PAM sequence: TAGGAT
gattttaataatcaagtgga

SEQ ID NO: 23229 - DNA, 20 bp, Artificial Sequence
  Description of Artificial Sequence: Synthetic oligonucleotide
  Target: LAMA2; (-) strand; PAM type: NNGRRT; PAM sequence: GTGGAT
aggaggattttaataatcaa

SEQ ID NO: 23230 - DNA, 20 bp, Artificial Sequence
  Description of Artificial Sequence: Synthetic oligonucleotide
  Target: LAMA2; (-) strand; PAM type: NNGRRT; PAM sequence: GAGGAT
aacgggtgacctcagctgag

SEQ ID NO: 23231 - DNA, 20 bp, Artificial Sequence
  Description of Artificial Sequence: Synthetic oligonucleotide
  Target: LAMA2; (-) strand; PAM type: NNGRRT; PAM sequence: ACGGGT
tcctatgtgagtgctcacca

SEQ ID NO: 23232 - DNA, 20 bp, Artificial Sequence
  Description of Artificial Sequence: Synthetic oligonucleotide
  Target: LAMA2; (-) strand; PAM type: NNGRRT; PAM sequence: GTGAGT
tgaagatatttgtatcctat

SEQ ID NO: 23233 - DNA, 20 bp, Artificial Sequence
  Description of Artificial Sequence: Synthetic oligonucleotide
  Target: LAMA2; (-) strand; PAM type: NNGRRT; PAM sequence: CTGAGT
aggtatgtggatggacctct

SEQ ID NO: 23234 - DNA, 20 bp, Artificial Sequence
  Description of Artificial Sequence: Synthetic oligonucleotide
  Target: LAMA2; (-) strand; PAM type: NNGRRT; PAM sequence: GTGGAT
gtaatctggggaagaggtat

SEQ ID NO: 23235 - DNA, 20 bp, Artificial Sequence
  Description of Artificial Sequence: Synthetic oligonucleotide
  Target: LAMA2; (-) strand; PAM type: NNGRRT; PAM sequence: CTGGAT
tgctgtagccaatggtttgg

SEQ ID NO: 23236 - DNA, 20 bp, Artificial Sequence
  Description of Artificial Sequence: Synthetic oligonucleotide
  Target: LAMA2; (-) strand; PAM type: NNGRRT; PAM sequence: CAGAAT
agggaagtcttcccaggggg

SEQ ID NO: 23237 - DNA, 20 bp, Artificial Sequence
  Description of Artificial Sequence: Synthetic oligonucleotide
  Target: LAMA2; (-) strand; PAM type: NNGRRT; PAM sequence: GGGAGT
cctgcactgatggcctcaca

SEQ ID NO: 23238 - DNA, 20 bp, Artificial Sequence
  Description of Artificial Sequence: Synthetic oligonucleotide
  Target: LAMA2; (-) strand; PAM type: NNGRRT; PAM sequence: CTGGAT
cctaaactgcctttcatgaa

SEQ ID NO: 23239 - DNA, 20 bp, Artificial Sequence
  Description of Artificial Sequence: Synthetic oligonucleotide
  Target: LAMA2; (-) strand; PAM type: NNGRRT; PAM sequence: CTGAAT
ttactgggctttggtagaaa

SEQ ID NO: 23240 - DNA, 20 bp, Artificial Sequence
  Description of Artificial Sequence: Synthetic oligonucleotide
  Target: LAMA2; (-) strand; PAM type: NNGRRT; PAM sequence: TAGGAT
ctcctagaggtggaagcctc

SEQ ID NO: 23241 - DNA, 20 bp, Artificial Sequence
  Description of Artificial Sequence: Synthetic oligonucleotide
  Target: LAMA2; (-) strand; PAM type: NNGRRT; PAM sequence: AGGGAT
ttgaggtgtcaatggcagac

SEQ ID NO: 23242 - DNA, 20 bp, Artificial Sequence
  Description of Artificial Sequence: Synthetic oligonucleotide
  Target: LAMA2; (-) strand; PAM type: NNGRRT; PAM sequence: TTGAGT
tgttaaaatgggcccattta

SEQ ID NO: 23243 - DNA, 20 bp, Artificial Sequence
  Description of Artificial Sequence: Synthetic oligonucleotide
  Target: LAMA2; (-) strand; PAM type: NNGRRT; PAM sequence: CTGGGT
aaggatgcaaagcattgttc

SEQ ID NO: 23244 - DNA, 20 bp, Artificial Sequence
  Description of Artificial Sequence: Synthetic oligonucleotide
  Target: LAMA2; (-) strand; PAM type: NNGRRT; PAM sequence: AAGGAT
gtgccaacttgattgtattg

SEQ ID NO: 23245 - DNA, 20 bp, Artificial Sequence
  Description of Artificial Sequence: Synthetic oligonucleotide
  Target: LAMA2; (-) strand; PAM type: NNGRRT; PAM sequence: CTGAGT
attcactgtgatggttaata

SEQ ID NO: 23246 - DNA, 20 bp, Artificial Sequence
  Description of Artificial Sequence: Synthetic oligonucleotide
  Target: LAMA2; (-) strand; PAM type: NNGRRT; PAM sequence: AGGAGT
tgcctctggtggtcattcca

SEQ ID NO: 23247 - DNA, 20 bp, Artificial Sequence
  Description of Artificial Sequence: Synthetic oligonucleotide
  Target: LAMA2; (-) strand; PAM type: NNGRRT; PAM sequence: GAGAGT
cctcatatcctcgtgtcact

SEQ ID NO: 23248 - DNA, 20 bp, Artificial Sequence
  Description of Artificial Sequence: Synthetic oligonucleotide
  Target: LAMA2; (-) strand; PAM type: NNGRRT; PAM sequence: TTGGAT
tttatttgtttgtttgttgt

SEQ ID NO: 23249 - DNA, 20 bp, Artificial Sequence
  Description of Artificial Sequence: Synthetic oligonucleotide
  Target: LAMA2; (-) strand; PAM type: NNGRRT; PAM sequence: TGGAAT
atcttgaagaatctgaacta

SEQ ID NO: 23250 - DNA, 20 bp, Artificial Sequence
  Description of Artificial Sequence: Synthetic oligonucleotide
  Target: LAMA2; (-) strand; PAM type: NNGRRT; PAM sequence: AAGAAT
gataattttccattatcttg

SEQ ID NO: 23251 - DNA, 20 bp, Artificial Sequence
  Description of Artificial Sequence: Synthetic oligonucleotide
  Target: LAMA2; (-) strand; PAM type: NNGRRT; PAM sequence: GGGAAT
aggagaactccatttgccat

SEQ ID NO: 23252 - DNA, 20 bp, Artificial Sequence
  Description of Artificial Sequence: Synthetic oligonucleotide
  Target: LAMA2; (-) strand; PAM type: NNGRRT; PAM sequence: GTGAGT
ggaacattgtgagtgtatgt

SEQ ID NO: 23253 - DNA, 20 bp, Artificial Sequence
  Description of Artificial Sequence: Synthetic oligonucleotide
  Target: LAMA2; (-) strand; PAM type: NNGRRT; PAM sequence: GTGAGT
agaagatattaaggaacatt

SEQ ID NO: 23254 - DNA, 20 bp, Artificial Sequence
  Description of Artificial Sequence: Synthetic oligonucleotide
  Target: LAMA2; (-) strand; PAM type: NNGRRT; PAM sequence: CAGGAT
acaaattgagaaaggaaatt

SEQ ID NO: 23255 - DNA, 20 bp, Artificial Sequence
  Description of Artificial Sequence: Synthetic oligonucleotide
  Target: LAMA2; (-) strand; PAM type: NNGRRT; PAM sequence: ATGGAT
gactcaaagtgaactatatc

SEQ ID NO: 23256 - DNA, 20 bp, Artificial Sequence
  Description of Artificial Sequence: Synthetic oligonucleotide
  Target: LAMA2; (-) strand; PAM type: NNGRRT; PAM sequence: AGGAAT
gaacaaaaagcaaagaaagg

SEQ ID NO: 23257 - DNA, 20 bp, Artificial Sequence
  Description of Artificial Sequence: Synthetic oligonucleotide
  Target: LAMA2; (-) strand; PAM type: NNGRRT; PAM sequence: CTGAAT
atcacccaatctcttgaggg

SEQ ID NO: 23258 - DNA, 20 bp, Artificial Sequence
  Description of Artificial Sequence: Synthetic oligonucleotide
  Target: LAMA2; (-) strand; PAM type: NNGRRT; PAM sequence: CTGGAT
gtgtgtctgtgagggtgttt

SEQ ID NO: 23259 - DNA, 20 bp, Artificial Sequence
  Description of Artificial Sequence: Synthetic oligonucleotide
  Target: LAMA2; (-) strand; PAM type: NNGRRT; PAM sequence: GAGGGT
ttatttccgggtgtgtctgt

SEQ ID NO: 23260 - DNA, 20 bp, Artificial Sequence
  Description of Artificial Sequence: Synthetic oligonucleotide
  Target: LAMA2; (-) strand; PAM type: NNGRRT; PAM sequence: CCGGGT
acctaaattaaacattattt

SEQ ID NO: 23261 - DNA, 20 bp, Artificial Sequence
  Description of Artificial Sequence: Synthetic oligonucleotide
  Target: LAMA2; (-) strand; PAM type: NNGRRT; PAM sequence: TGGAGT
aggaagaccacattgtgcac

SEQ ID NO: 23262 - DNA, 20 bp, Artificial Sequence
  Description of Artificial Sequence: Synthetic oligonucleotide
  Target: LAMA2; (-) strand; PAM type: NNGRRT; PAM sequence: GAGAAT
agtaagagaacttgaatttg

SEQ ID NO: 23263 - DNA, 20 bp, Artificial Sequence
  Description of Artificial Sequence: Synthetic oligonucleotide
  Target: LAMA2; (-) strand; PAM type: NNGRRT; PAM sequence: TTGAAT
actgtagcaagtaagagaac

SEQ ID NO: 23264 - DNA, 20 bp, Artificial Sequence
  Description of Artificial Sequence: Synthetic oligonucleotide
  Target: LAMA2; (-) strand; PAM type: NNGRRT; PAM sequence: TAGAAT
aaggcctggtcaacattttt

SEQ ID NO: 23265 - DNA, 20 bp, Artificial Sequence
  Description of Artificial Sequence: Synthetic oligonucleotide
  Target: LAMA2; (-) strand; PAM type: NNGRRT; PAM sequence: AAGAAT
taagagaagttgacatattt

SEQ ID NO: 23266 - DNA, 20 bp, Artificial Sequence
  Description of Artificial Sequence: Synthetic oligonucleotide
  Target: LAMA2; (-) strand; PAM type: NNGRRT; PAM sequence: AGGAAT
gtttttactctccttgtatt

SEQ ID NO: 23267 - DNA, 20 bp, Artificial Sequence
  Description of Artificial Sequence: Synthetic oligonucleotide
  Target: LAMA2; (-) strand; PAM type: NNGRRT; PAM sequence: TGGAGT
agctctttttgaggtttcta

SEQ ID NO: 23268 - DNA, 20 bp, Artificial Sequence
  Description of Artificial Sequence: Synthetic oligonucleotide
  Target: LAMA2; (-) strand; PAM type: NNGRRT; PAM sequence: AAGAGT
tcctcactgatctgtcacat

SEQ ID NO: 23269 - DNA, 20 bp, Artificial Sequence
  Description of Artificial Sequence: Synthetic oligonucleotide
  Target: LAMA2; (-) strand; PAM type: NNGRRT; PAM sequence: GTGAAT
gtgaattttattatagttca

SEQ ID NO: 23270 - DNA, 20 bp, Artificial Sequence
  Description of Artificial Sequence: Synthetic oligonucleotide
  Target: LAMA2; (-) strand; PAM type: NNGRRT; PAM sequence: GTGAAT
ttgttcacattccttttgaa

SEQ ID NO: 23271 - DNA, 20 bp, Artificial Sequence
  Description of Artificial Sequence: Synthetic oligonucleotide
  Target: LAMA2; (-) strand; PAM type: NNGRRT; PAM sequence: AAGAAT
tgctttcctccccagaattc

SEQ ID NO: 23272 - DNA, 20 bp, Artificial Sequence
  Description of Artificial Sequence: Synthetic oligonucleotide
  Target: LAMA2; (-) strand; PAM type: NNGRRT; PAM sequence: CAGAAT
tagctttttgctttcctccc

SEQ ID NO: 23273 - DNA, 20 bp, Artificial Sequence
  Description of Artificial Sequence: Synthetic oligonucleotide
  Target: LAMA2; (-) strand; PAM type: NNGRRT; PAM sequence: TCGAAT
gttctgtttctctggagaac

SEQ ID NO: 23274 - DNA, 20 bp, Artificial Sequence
  Description of Artificial Sequence: Synthetic oligonucleotide
  Target: LAMA2; (-) strand; PAM type: NNGRRT; PAM sequence: ATGAGT
cagccagaccccacaatctc

SEQ ID NO: 23275 - DNA, 20 bp, Artificial Sequence
  Description of Artificial Sequence: Synthetic oligonucleotide
  Target: LAMA2; (-) strand; PAM type: NNGRRT; PAM sequence: TTGGAT
attctgcctccaaactgcct

SEQ ID NO: 23276 - DNA, 20 bp, Artificial Sequence
  Description of Artificial Sequence: Synthetic oligonucleotide
  Target: LAMA2; (-) strand; PAM type: NNGRRT; PAM sequence: AAGAAT
caacagtcagaggccttaag

SEQ ID NO: 23277 - DNA, 20 bp, Artificial Sequence
  Description of Artificial Sequence: Synthetic oligonucleotide
  Target: LAMA2; (-) strand; PAM type: NNGRRT; PAM sequence: TTGAGT
aacgtttcagtcagtagact

SEQ ID NO: 23278 - DNA, 20 bp, Artificial Sequence
  Description of Artificial Sequence: Synthetic oligonucleotide
  Target: LAMA2; (-) strand; PAM type: NNGRRT; PAM sequence: GTGAAT
acagcagtctagatgttgct

SEQ ID NO: 23279 - DNA, 20 bp, Artificial Sequence
  Description of Artificial Sequence: Synthetic oligonucleotide
  Target: LAMA2; (-) strand; PAM type: NNGRRT; PAM sequence: TGGAAT
tctctctctgtctgcttgtt

SEQ ID NO: 23280 - DNA, 20 bp, Artificial Sequence
  Description of Artificial Sequence: Synthetic oligonucleotide
  Target: LAMA2; (-) strand; PAM type: NNGRRT; PAM sequence: CAGAAT
ttctctttttttgtcttttc

SEQ ID NO: 23281 - DNA, 20 bp, Artificial Sequence
  Description of Artificial Sequence: Synthetic oligonucleotide
  Target: LAMA2; (-) strand; PAM type: NNGRRT; PAM sequence: ATGGAT
aattaccctgattgttgtat

SEQ ID NO: 23282 - DNA, 20 bp, Artificial Sequence
  Description of Artificial Sequence: Synthetic oligonucleotide
  Target: LAMA2; (-) strand; PAM type: NNGRRT; PAM sequence: AGGGGT
tgtccatcatgtgagatttc

SEQ ID NO: 23283 - DNA, 20 bp, Artificial Sequence
  Description of Artificial Sequence: Synthetic oligonucleotide
  Target: LAMA2; (-) strand; PAM type: NNGRRT; PAM sequence: TTGAAT
ttgtgatgtgagacataaac

SEQ ID NO: 23284 - DNA, 20 bp, Artificial Sequence
  Description of Artificial Sequence: Synthetic oligonucleotide
  Target: LAMA2; (-) strand; PAM type: NNGRRT; PAM sequence: ACGAAT
tttgtgtaagtcatacatag

SEQ ID NO: 23285 - DNA, 20 bp, Artificial Sequence
  Description of Artificial Sequence: Synthetic oligonucleotide
  Target: LAMA2; (-) strand; PAM type: NNGRRT; PAM sequence: TAGAGT
cataccagctttcttctggt

SEQ ID NO: 23286 - DNA, 20 bp, Artificial Sequence
  Description of Artificial Sequence: Synthetic oligonucleotide
  Target: LAMA2; (-) strand; PAM type: NNGRRT; PAM sequence: TAGAGT
aattaattatctagttgaca

SEQ ID NO: 23287 - DNA, 20 bp, Artificial Sequence
  Description of Artificial Sequence: Synthetic oligonucleotide
  Target: LAMA2; (-) strand; PAM type: NNGRRT; PAM sequence: TAGAAT
acttcatcgaatggggcatg

SEQ ID NO: 23288 - DNA, 20 bp, Artificial Sequence
  Description of Artificial Sequence: Synthetic oligonucleotide
  Target: LAMA2; (-) strand; PAM type: NNGRRT; PAM sequence: TCGAAT
ttgtttcatgagttacttca

SEQ ID NO: 23289 - DNA, 20 bp, Artificial Sequence
  Description of Artificial Sequence: Synthetic oligonucleotide
  Target: LAMA2; (-) strand; PAM type: NNGRRT; PAM sequence: ATGAGT
tgtggtcctttgtttgtttc

SEQ ID NO: 23290 - DNA, 20 bp, Artificial Sequence
  Description of Artificial Sequence: Synthetic oligonucleotide
  Target: LAMA2; (-) strand; PAM type: NNGRRT; PAM sequence: TAGGAT
tctagatgctattggatcat

SEQ ID NO: 23291 - DNA, 20 bp, Artificial Sequence
  Description of Artificial Sequence: Synthetic oligonucleotide
  Target: LAMA2; (-) strand; PAM type: NNGRRT; PAM sequence: TTGGAT
aggatgtagtctagatgcta

SEQ ID NO: 23292 - DNA, 20 bp, Artificial Sequence
  Description of Artificial Sequence: Synthetic oligonucleotide
  Target: LAMA2; (-) strand; PAM type: NNGRRT; PAM sequence: GAGGAT
attgtattgcattatgataa

SEQ ID NO: 23293 - DNA, 20 bp, Artificial Sequence
  Description of Artificial Sequence: Synthetic oligonucleotide
  Target: LAMA2; (-) strand; PAM type: NNGRRT; PAM sequence: ATGGAT
ctgtgtttttttctcaagcc

SEQ ID NO: 23294 - DNA, 20 bp, Artificial Sequence
  Description of Artificial Sequence: Synthetic oligonucleotide
  Target: LAMA2; (-) strand; PAM type: NNGRRT; PAM sequence: AAGAAT
tttatttgctagtttattct

SEQ ID NO: 23295 - DNA, 20 bp, Artificial Sequence
  Description of Artificial Sequence: Synthetic oligonucleotide
  Target: LAMA2; (-) strand; PAM type: NNGRRT; PAM sequence: TTGAAT
acctaagtattcaaatgtgt

SEQ ID NO: 23296 - DNA, 20 bp, Artificial Sequence
  Description of Artificial Sequence: Synthetic oligonucleotide
  Target: LAMA2; (-) strand; PAM type: NNGRRT; PAM sequence: TTGAGT
ctcaggtgtactatttcttt

SEQ ID NO: 23297 - DNA, 20 bp, Artificial Sequence
  Description of Artificial Sequence: Synthetic oligonucleotide
  Target: LAMA2; (-) strand; PAM type: NNGRRT; PAM sequence: ATGGGT
tcttgggaacaaattgcata

SEQ ID NO: 23298 - DNA, 20 bp, Artificial Sequence
  Description of Artificial Sequence: Synthetic oligonucleotide
  Target: LAMA2; (-) strand; PAM type: NNGRRT; PAM sequence: CTGGGT
ttaaaatatgtacatttgaa

SEQ ID NO: 23299 - DNA, 20 bp, Artificial Sequence
  Description of Artificial Sequence: Synthetic oligonucleotide
  Target: LAMA2; (-) strand; PAM type: NNGRRT; PAM sequence: GAGGGT
ttcttgctggtgtaaaggat

SEQ ID NO: 23300 - DNA, 20 bp, Artificial Sequence
  Description of Artificial Sequence: Synthetic oligonucleotide
  Target: LAMA2; (-) strand; PAM type: NNGRRT; PAM sequence: AAGGAT
tagaacttcttgctggtgta

SEQ ID NO: 23301 - DNA, 20 bp, Artificial Sequence
  Description of Artificial Sequence: Synthetic oligonucleotide
  Target: LAMA2; (-) strand; PAM type: NNGRRT; PAM sequence: ATGAAT
aattaaaacatgtatgcatc

SEQ ID NO: 23302 - DNA, 20 bp, Artificial Sequence
  Description of Artificial Sequence: Synthetic oligonucleotide
  Target: LAMA2; (-) strand; PAM type: NNGRRT; PAM sequence: GGGGAT
ttgagagaaaagttaggtta

SEQ ID NO: 23303 - DNA, 20 bp, Artificial Sequence
  Description of Artificial Sequence: Synthetic oligonucleotide
  Target: LAMA2; (-) strand; PAM type: NNGRRT; PAM sequence: TGGAAT
agaagaatatttgaaagatt

SEQ ID NO: 23304 - DNA, 20 bp, Artificial Sequence
  Description of Artificial Sequence: Synthetic oligonucleotide
  Target: LAMA2; (-) strand; PAM type: NNGRRT; PAM sequence: AAGAAT
actaagagatgtagtaaaag

SEQ ID NO: 23305 - DNA, 20 bp, Artificial Sequence
  Description of Artificial Sequence: Synthetic oligonucleotide
  Target: LAMA2; (-) strand; PAM type: NNGRRT; PAM sequence: AAGGGT
gtacctatattgggaaactg

SEQ ID NO: 23306 - DNA, 20 bp, Artificial Sequence
  Description of Artificial Sequence: Synthetic oligonucleotide
  Target: LAMA2; (-) strand; PAM type: NNGRRT; PAM sequence: AAGAAT
agtatattaggttaaaaatg

SEQ ID NO: 23307 - DNA, 20 bp, Artificial Sequence
  Description of Artificial Sequence: Synthetic oligonucleotide
  Target: LAMA2; (-) strand; PAM type: NNGRRT; PAM sequence: CAGAGT
tagcttcatcttaaagagtg

SEQ ID NO: 23308 - DNA, 20 bp, Artificial Sequence
  Description of Artificial Sequence: Synthetic oligonucleotide
  Target: LAMA2; (-) strand; PAM type: NNGRRT; PAM sequence: AAGAGT
acataaatagcttcatctta

SEQ ID NO: 23309 - DNA, 20 bp, Artificial Sequence
  Description of Artificial Sequence: Synthetic oligonucleotide
  Target: LAMA2; (-) strand; PAM type: NNGRRT; PAM sequence: AAGAAT
gaaaaaaggaagctaaaggg

SEQ ID NO: 23310 - DNA, 20 bp, Artificial Sequence
  Description of Artificial Sequence: Synthetic oligonucleotide
  Target: LAMA2; (-) strand; PAM type: NNGRRT; PAM sequence: AGGAAT
aaatcaaagggagtccttta

SEQ ID NO: 23311 - DNA, 20 bp, Artificial Sequence
  Description of Artificial Sequence: Synthetic oligonucleotide
  Target: LAMA2; (-) strand; PAM type: NNGRRT; PAM sequence: GGGAGT
cccactgaaaaaaaatcaaa

SEQ ID NO: 23312 - DNA, 20 bp, Artificial Sequence
  Description of Artificial Sequence: Synthetic oligonucleotide
  Target: LAMA2; (-) strand; PAM type: NNGRRT; PAM sequence: TGGAAT
attcactgcaagttatttta

SEQ ID NO: 23313 - DNA, 20 bp, Artificial Sequence
  Description of Artificial Sequence: Synthetic oligonucleotide
  Target: LAMA2; (-) strand; PAM type: NNGRRT; PAM sequence: AGGAAT
agtcagttgtgaaaataaaa

SEQ ID NO: 23314 - DNA, 20 bp, Artificial Sequence
  Description of Artificial Sequence: Synthetic oligonucleotide
  Target: LAMA2; (-) strand; PAM type: NNGRRT; PAM sequence: GAGAGT
gaacaggtaaggtagagaat

SEQ ID NO: 23315 - DNA, 20 bp, Artificial Sequence
  Description of Artificial Sequence: Synthetic oligonucleotide
  Target: LAMA2; (-) strand; PAM type: NNGRRT; PAM sequence: GAGAAT
cagaaagaacaggtaaggta

SEQ ID NO: 23316 - DNA, 20 bp, Artificial Sequence
  Description of Artificial Sequence: Synthetic oligonucleotide
  Target: LAMA2; (-) strand; PAM type: NNGRRT; PAM sequence: TAGGGT
tgtacccacaacttgcacta

SEQ ID NO: 23317 - DNA, 20 bp, Artificial Sequence
  Description of Artificial Sequence: Synthetic oligonucleotide
  Target: LAMA2; (-) strand; PAM type: NNGRRT; PAM sequence: ATGAGT
aaagtgctgggattaccggc

SEQ ID NO: 23318 - DNA, 20 bp, Artificial Sequence
  Description of Artificial Sequence: Synthetic oligonucleotide
  Target: LAMA2; (-) strand; PAM type: NNGRRT; PAM sequence: TGGGAT
acctcagcctcccaaagtgc

SEQ ID NO: 23319 - DNA, 20 bp, Artificial Sequence
  Description of Artificial Sequence: Synthetic oligonucleotide
  Target: LAMA2; (-) strand; PAM type: NNGRRT; PAM sequence: TGGGGT
ttttgtatttttagtagaga

SEQ ID NO: 23320 - DNA, 20 bp, Artificial Sequence
  Description of Artificial Sequence: Synthetic oligonucleotide
  Target: LAMA2; (-) strand; PAM type: NNGRRT; PAM sequence: CTGGAT
acctcagcctcctgagtagc

SEQ ID NO: 23321 - DNA, 20 bp, Artificial Sequence
  Description of Artificial Sequence: Synthetic oligonucleotide
  Target: LAMA2; (-) strand; PAM type: NNGRRT; PAM sequence: CTGAGT
gatcctcccacctcagcctc

SEQ ID NO: 23322 - DNA, 20 bp, Artificial Sequence
  Description of Artificial Sequence: Synthetic oligonucleotide
  Target: LAMA2; (-) strand; PAM type: NNGRRT; PAM sequence: GGGGAT
gccttgacttcccaggctca

SEQ ID NO: 23323 - DNA, 20 bp, Artificial Sequence
  Description of Artificial Sequence: Synthetic oligonucleotide
  Target: LAMA2; (-) strand; PAM type: NNGRRT; PAM sequence: TGGAGT
tcttgctctgtcacgcaggc

SEQ ID NO: 23324 - DNA, 20 bp, Artificial Sequence
  Description of Artificial Sequence: Synthetic oligonucleotide
  Target: LAMA2; (-) strand; PAM type: NNGRRT; PAM sequence: CAGGGT
aaagaaagcttccctttgga

SEQ ID NO: 23325 - DNA, 20 bp, Artificial Sequence
  Description of Artificial Sequence: Synthetic oligonucleotide
  Target: LAMA2; (-) strand; PAM type: NNGRRT; PAM sequence: GAGAAT
tacttgggaggctgaggcag

SEQ ID NO: 23326 - DNA, 20 bp, Artificial Sequence
  Description of Artificial Sequence: Synthetic oligonucleotide
  Target: LAMA2; (-) strand; PAM type: NNGRRT; PAM sequence: GCGGAT
aatcccagcactttgggcgg

SEQ ID NO: 23327 - DNA, 20 bp, Artificial Sequence
  Description of Artificial Sequence: Synthetic oligonucleotide
  Target: LAMA2; (-) strand; PAM type: NNGRRT; PAM sequence: CGGAGT
ggtggggaataaaactatga

SEQ ID NO: 23328 - DNA, 20 bp, Artificial Sequence
  Description of Artificial Sequence: Synthetic oligonucleotide
  Target: LAMA2; (-) strand; PAM type: NNGRRT; PAM sequence: GGGAAT
ctgtccgggggagattggtg

SEQ ID NO: 23329 - DNA, 20 bp, Artificial Sequence
  Description of Artificial Sequence: Synthetic oligonucleotide
  Target: LAMA2; (-) strand; PAM type: NNGRRT; PAM sequence: TGGAGT
taccaagagactaagtaaaa

SEQ ID NO: 23330 - DNA, 20 bp, Artificial Sequence
  Description of Artificial Sequence: Synthetic oligonucleotide
  Target: LAMA2; (-) strand; PAM type: NNGRRT; PAM sequence: GAGAAT
taatttaaaatttgaattct

SEQ ID NO: 23331 - DNA, 20 bp, Artificial Sequence
  Description of Artificial Sequence: Synthetic oligonucleotide
  Target: LAMA2; (-) strand; PAM type: NNGRRT; PAM sequence: TTGAAT
cagattaattaatttaaaat

SEQ ID NO: 23332 - DNA, 20 bp, Artificial Sequence
  Description of Artificial Sequence: Synthetic oligonucleotide
  Target: LAMA2; (-) strand; PAM type: NNGRRT; PAM sequence: GGGAAT
ctgggcgatggaactggcca

SEQ ID NO: 23333 - DNA, 20 bp, Artificial Sequence
  Description of Artificial Sequence: Synthetic oligonucleotide
  Target: LAMA2; (-) strand; PAM type: NNGRRT; PAM sequence: AAGGGT
tgcagtctgtgtagggccca

SEQ ID NO: 23334 - DNA, 20 bp, Artificial Sequence
  Description of Artificial Sequence: Synthetic oligonucleotide
  Target: LAMA2; (-) strand; PAM type: NNGRRT; PAM sequence: AAGGAT
agctggtgaagaaacacccc

SEQ ID NO: 23335 - DNA, 20 bp, Artificial Sequence
  Description of Artificial Sequence: Synthetic oligonucleotide
  Target: LAMA2; (-) strand; PAM type: NNGRRT; PAM sequence: CGGAAT
agcctgccaggctgagtggg

SEQ ID NO: 23336 - DNA, 20 bp, Artificial Sequence
  Description of Artificial Sequence: Synthetic oligonucleotide
  Target: LAMA2; (-) strand; PAM type: NNGRRT; PAM sequence: CTGAGT
gccaagtgtagcctgccagg

SEQ ID NO: 23337 - DNA, 20 bp, Artificial Sequence
  Description of Artificial Sequence: Synthetic oligonucleotide
  Target: LAMA2; (-) strand; PAM type: NNGRRT; PAM sequence: TGGGAT
tgaatcacccttggcaggtg

SEQ ID NO: 23338 - DNA, 20 bp, Artificial Sequence
  Description of Artificial Sequence: Synthetic oligonucleotide
  Target: LAMA2; (-) strand; PAM type: NNGRRT; PAM sequence: CTGAAT
acacccctcgccactctgcc

SEQ ID NO: 23339 - DNA, 20 bp, Artificial Sequence
  Description of Artificial Sequence: Synthetic oligonucleotide
  Target: LAMA2; (-) strand; PAM type: NNGRRT; PAM sequence: CTGGGT
ttcctggcatctccaagctc

SEQ ID NO: 23340 - DNA, 20 bp, Artificial Sequence
  Description of Artificial Sequence: Synthetic oligonucleotide
  Target: LAMA2; (-) strand; PAM type: NNGRRT; PAM sequence: CAGGGT
tgagagagctacaacacaaa

SEQ ID NO: 23341 - DNA, 20 bp, Artificial Sequence
  Description of Artificial Sequence: Synthetic oligonucleotide
  Target: LAMA2; (-) strand; PAM type: NNGRRT; PAM sequence: CAGGAT
gtctgcaaacctcattcttc

SEQ ID NO: 23342 - DNA, 20 bp, Artificial Sequence
  Description of Artificial Sequence: Synthetic oligonucleotide
  Target: LAMA2; (-) strand; PAM type: NNGRRT; PAM sequence: GAGAGT
ctacccatttcaggcctcct

SEQ ID NO: 23343 - DNA, 20 bp, Artificial Sequence
  Description of Artificial Sequence: Synthetic oligonucleotide
  Target: LAMA2; (-) strand; PAM type: NNGRRT; PAM sequence: TGGAAT
tgagggtgctgcacagatgc

SEQ ID NO: 23344 - DNA, 20 bp, Artificial Sequence
  Description of Artificial Sequence: Synthetic oligonucleotide
  Target: LAMA2; (-) strand; PAM type: NNGRRT; PAM sequence: GAGGGT
ctgtgtgtctcacctctgtt

SEQ ID NO: 23345 - DNA, 20 bp, Artificial Sequence
  Description of Artificial Sequence: Synthetic oligonucleotide
  Target: LAMA2; (-) strand; PAM type: NNGRRT; PAM sequence: GTGGAT
gacaacaggatgatctacct

SEQ ID NO: 23346 - DNA, 20 bp, Artificial Sequence
  Description of Artificial Sequence: Synthetic oligonucleotide
  Target: LAMA2; (-) strand; PAM type: NNGRRT; PAM sequence: CAGGAT
agccagacgtgggcagacaa

SEQ ID NO: 23347 - DNA, 20 bp, Artificial Sequence
  Description of Artificial Sequence: Synthetic oligonucleotide
  Target: LAMA2; (-) strand; PAM type: NNGRRT; PAM sequence: TGGAGT
ggactgtcggttccacaaac

SEQ ID NO: 23348 - DNA, 20 bp, Artificial Sequence
  Description of Artificial Sequence: Synthetic oligonucleotide
  Target: LAMA2; (-) strand; PAM type: NNGRRT; PAM sequence: AGGGGT
atacaggttcctgggtggaa

SEQ ID NO: 23349 - DNA, 20 bp, Artificial Sequence
  Description of Artificial Sequence: Synthetic oligonucleotide
  Target: LAMA2; (-) strand; PAM type: NNGRRT; PAM sequence: CTGGGT
ggcaggaggcatacaggttc

SEQ ID NO: 23350 - DNA, 20 bp, Artificial Sequence
  Description of Artificial Sequence: Synthetic oligonucleotide
  Target: LAMA2; (-) strand; PAM type: NNGRRT; PAM sequence: GTGGAT
cctgggtgccagtgggcgcc

SEQ ID NO: 23351 - DNA, 20 bp, Artificial Sequence
  Description of Artificial Sequence: Synthetic oligonucleotide
  Target: LAMA2; (-) strand; PAM type: NNGRRT; PAM sequence: CTGGGT
tgaccctaggcatgaacagc

SEQ ID NO: 23352 - DNA, 20 bp, Artificial Sequence
  Description of Artificial Sequence: Synthetic oligonucleotide
  Target: LAMA2; (-) strand; PAM type: NNGRRT; PAM sequence: GAGGGT
agggaggccaagggggagtt

SEQ ID NO: 23353 - DNA, 20 bp, Artificial Sequence
  Description of Artificial Sequence: Synthetic oligonucleotide
  Target: LAMA2; (-) strand; PAM type: NNGRRT; PAM sequence: GGGAGT
gcacattagggaggccaagg

SEQ ID NO: 23354 - DNA, 20 bp, Artificial Sequence
  Description of Artificial Sequence: Synthetic oligonucleotide
  Target: LAMA2; (-) strand; PAM type: NNGRRT; PAM sequence: TTGGGT
atcttggccccttctggatt

SEQ ID NO: 23355 - DNA, 20 bp, Artificial Sequence
  Description of Artificial Sequence: Synthetic oligonucleotide
  Target: LAMA2; (-) strand; PAM type: NNGRRT; PAM sequence: CTGGAT
ccctactatcttggcccctt

SEQ ID NO: 23356 - DNA, 20 bp, Artificial Sequence
  Description of Artificial Sequence: Synthetic oligonucleotide
  Target: LAMA2; (-) strand; PAM type: NNGRRT; PAM sequence: CTGGGT
ggtgggggaaccctgcccta

SEQ ID NO: 23357 - DNA, 20 bp, Artificial Sequence
  Description of Artificial Sequence: Synthetic oligonucleotide
  Target: LAMA2; (-) strand; PAM type: NNGRRT; PAM sequence: CCGAGT
agtgggagccatgtcccctt

SEQ ID NO: 23358 - DNA, 20 bp, Artificial Sequence
  Description of Artificial Sequence: Synthetic oligonucleotide
  Target: LAMA2; (-) strand; PAM type: NNGRRT; PAM sequence: GAGGGT
gaaaactcttctgagagcaa

SEQ ID NO: 23359 - DNA, 20 bp, Artificial Sequence
  Description of Artificial Sequence: Synthetic oligonucleotide
  Target: LAMA2; (-) strand; PAM type: NNGRRT; PAM sequence: GGGGAT
atttctgctccctggggaga

SEQ ID NO: 23360 - DNA, 20 bp, Artificial Sequence
  Description of Artificial Sequence: Synthetic oligonucleotide
  Target: LAMA2; (-) strand; PAM type: NNGRRT; PAM sequence: AGGGAT
ccgaaacactcaagaccttt

SEQ ID NO: 23361 - DNA, 20 bp, Artificial Sequence
  Description of Artificial Sequence: Synthetic oligonucleotide
  Target: LAMA2; (-) strand; PAM type: NNGRRT; PAM sequence: TTGAGT
tagataaaaatcatggaata

SEQ ID NO: 23362 - DNA, 20 bp, Artificial Sequence
  Description of Artificial Sequence: Synthetic oligonucleotide
  Target: LAMA2; (-) strand; PAM type: NNGRRT; PAM sequence: TGGAAT
gcatatctagataaaaatca

SEQ ID NO: 23363 - DNA, 20 bp, Artificial Sequence
  Description of Artificial Sequence: Synthetic oligonucleotide
  Target: LAMA2; (-) strand; PAM type: NNGRRT; PAM sequence: CAGAAT
ccattcctgatttctagcat

SEQ ID NO: 23364 - DNA, 20 bp, Artificial Sequence
  Description of Artificial Sequence: Synthetic oligonucleotide
  Target: LAMA2; (-) strand; PAM type: NNGRRT; PAM sequence: TAGGGT
tgttcaacttccgtatctct

SEQ ID NO: 23365 - DNA, 20 bp, Artificial Sequence
  Description of Artificial Sequence: Synthetic oligonucleotide
  Target: LAMA2; (-) strand; PAM type: NNGRRT; PAM sequence: TTGAAT
taattttatttacttttatt

SEQ ID NO: 23366 - DNA, 20 bp, Artificial Sequence
  Description of Artificial Sequence: Synthetic oligonucleotide
  Target: LAMA2; (-) strand; PAM type: NNGRRT; PAM sequence: TTGAAT
aattacatagacaatatgta

SEQ ID NO: 23367 - DNA, 20 bp, Artificial Sequence
  Description of Artificial Sequence: Synthetic oligonucleotide
  Target: LAMA2; (-) strand; PAM type: NNGRRT; PAM sequence: AGGAAT
tataggaattaagccaatgg

SEQ ID NO: 23368 - DNA, 20 bp, Artificial Sequence
  Description of Artificial Sequence: Synthetic oligonucleotide
  Target: LAMA2; (-) strand; PAM type: NNGRRT; PAM sequence: AGGAAT
ttggaaactatatttattat

SEQ ID NO: 23369 - DNA, 20 bp, Artificial Sequence
  Description of Artificial Sequence: Synthetic oligonucleotide
  Target: LAMA2; (-) strand; PAM type: NNGRRT; PAM sequence: GAGAGT
agccagcatggctttgctaa

SEQ ID NO: 23370 - DNA, 20 bp, Artificial Sequence
  Description of Artificial Sequence: Synthetic oligonucleotide
  Target: LAMA2; (-) strand; PAM type: NNGRRT; PAM sequence: GAGAGT
aaaaaattattgacccaaat

SEQ ID NO: 23371 - DNA, 20 bp, Artificial Sequence
  Description of Artificial Sequence: Synthetic oligonucleotide
  Target: LAMA2; (-) strand; PAM type: NNGRRT; PAM sequence: CTGGGT
acttttaaatacatctaagg

SEQ ID NO: 23372 - DNA, 20 bp, Artificial Sequence
  Description of Artificial Sequence: Synthetic oligonucleotide
  Target: LAMA2; (-) strand; PAM type: NNGRRT; PAM sequence: AAGAGT
tgcattgtggcattgttcaa

SEQ ID NO: 23373 - DNA, 20 bp, Artificial Sequence
  Description of Artificial Sequence: Synthetic oligonucleotide
  Target: LAMA2; (-) strand; PAM type: NNGRRT; PAM sequence: TAGGAT
tagaaatcataaagagcagg

SEQ ID NO: 23374 - DNA, 20 bp, Artificial Sequence
  Description of Artificial Sequence: Synthetic oligonucleotide
  Target: LAMA2; (-) strand; PAM type: NNGRRT; PAM sequence: ACGGGT
acctcttgattattctacct

SEQ ID NO: 23375 - DNA, 20 bp, Artificial Sequence
  Description of Artificial Sequence: Synthetic oligonucleotide
  Target: LAMA2; (-) strand; PAM type: NNGRRT; PAM sequence: CAGAAT
ttttccctctagttaatgtc

SEQ ID NO: 23376 - DNA, 20 bp, Artificial Sequence
  Description of Artificial Sequence: Synthetic oligonucleotide
  Target: LAMA2; (-) strand; PAM type: NNGRRT; PAM sequence: TCGAAT
gataccattcttagagggct

SEQ ID NO: 23377 - DNA, 20 bp, Artificial Sequence
  Description of Artificial Sequence: Synthetic oligonucleotide
  Target: LAMA2; (-) strand; PAM type: NNGRRT; PAM sequence: TTGAGT
taccacaaagagtcttagtt

SEQ ID NO: 23378 - DNA, 20 bp, Artificial Sequence
  Description of Artificial Sequence: Synthetic oligonucleotide
  Target: LAMA2; (-) strand; PAM type: NNGRRT; PAM sequence: AAGAGT
tggggtgggcccataccaca

SEQ ID NO: 23379 - DNA, 20 bp, Artificial Sequence
  Description of Artificial Sequence: Synthetic oligonucleotide
  Target: LAMA2; (-) strand; PAM type: NNGRRT; PAM sequence: TGGGGT
tagcagctggctactagagg

SEQ ID NO: 23380 - DNA, 20 bp, Artificial Sequence
  Description of Artificial Sequence: Synthetic oligonucleotide
  Target: LAMA2; (-) strand; PAM type: NNGRRT; PAM sequence: AAGGAT
tcaaaaatataaaatgaagt

SEQ ID NO: 23381 - DNA, 20 bp, Artificial Sequence
  Description of Artificial Sequence: Synthetic oligonucleotide
  Target: LAMA2; (-) strand; PAM type: NNGRRT; PAM sequence: GTGAAT
ataatttaaaattcgtgagt

SEQ ID NO: 23382 - DNA, 20 bp, Artificial Sequence
  Description of Artificial Sequence: Synthetic oligonucleotide
  Target: LAMA2; (-) strand; PAM type: NNGRRT; PAM sequence: GTGAGT
ctcatgataatttaaaattc

SEQ ID NO: 23383 - DNA, 20 bp, Artificial Sequence
  Description of Artificial Sequence: Synthetic oligonucleotide
  Target: LAMA2; (-) strand; PAM type: NNGRRT; PAM sequence: ATGAGT
aagggtggtagatgggtcag

SEQ ID NO: 23384 - DNA, 20 bp, Artificial Sequence
  Description of Artificial Sequence: Synthetic oligonucleotide
  Target: LAMA2; (-) strand; PAM type: NNGRRT; PAM sequence: ATGGGT
gcataccctaagggtggtag

SEQ ID NO: 23385 - DNA, 20 bp, Artificial Sequence
  Description of Artificial Sequence: Synthetic oligonucleotide
  Target: LAMA2; (-) strand; PAM type: NNGRRT; PAM sequence: AAGGGT
ggcatcgcatagcataccct

SEQ ID NO: 23386 - DNA, 20 bp, Artificial Sequence
  Description of Artificial Sequence: Synthetic oligonucleotide
  Target: LAMA2; (-) strand; PAM type: NNGRRT; PAM sequence: ATGAGT
aattaaataatgagtaaaaa

SEQ ID NO: 23387 - DNA, 20 bp, Artificial Sequence
  Description of Artificial Sequence: Synthetic oligonucleotide
  Target: LAMA2; (-) strand; PAM type: NNGRRT; PAM sequence: ATGAGT
taggttattaaaattaaata

SEQ ID NO: 23388 - DNA, 20 bp, Artificial Sequence
  Description of Artificial Sequence: Synthetic oligonucleotide
  Target: LAMA2; (-) strand; PAM type: NNGRRT; PAM sequence: ATGAGT
ctatttgcataggaaaagat

SEQ ID NO: 23389 - DNA, 20 bp, Artificial Sequence
  Description of Artificial Sequence: Synthetic oligonucleotide
  Target: LAMA2; (-) strand; PAM type: NNGRRT; PAM sequence: GAGAAT
cattttaaaaatatattttt

SEQ ID NO: 23390 - DNA, 20 bp, Artificial Sequence
  Description of Artificial Sequence: Synthetic oligonucleotide
  Target: LAMA2; (-) strand; PAM type: NNGRRT; PAM sequence: CAGAAT
ataataatgatgtaaattct

SEQ ID NO: 23391 - DNA, 20 bp, Artificial Sequence
  Description of Artificial Sequence: Synthetic oligonucleotide
  Target: LAMA2; (-) strand; PAM type: NNGRRT; PAM sequence: AAGGAT
ttagactatgaatcaaaatc

SEQ ID NO: 23392 - DNA, 20 bp, Artificial Sequence
  Description of Artificial Sequence: Synthetic oligonucleotide
  Target: LAMA2; (-) strand; PAM type: NNGRRT; PAM sequence: ATGAAT
agagtttggtatgttagact

SEQ ID NO: 23393 - DNA, 20 bp, Artificial Sequence
  Description of Artificial Sequence: Synthetic oligonucleotide
  Target: LAMA2; (-) strand; PAM type: NNGRRT; PAM sequence: TAGAGT
agtgagtaacagaagaaatt

SEQ ID NO: 23394 - DNA, 20 bp, Artificial Sequence
  Description of Artificial Sequence: Synthetic oligonucleotide
  Target: LAMA2; (-) strand; PAM type: NNGRRT; PAM sequence: GTGAGT
ctgcaatgtgtttatgtaaa

SEQ ID NO: 23395 - DNA, 20 bp, Artificial Sequence
  Description of Artificial Sequence: Synthetic oligonucleotide
  Target: LAMA2; (-) strand; PAM type: NNGRRT; PAM sequence: AAGGGT
aactgtgcagggatatatgt

SEQ ID NO: 23396 - DNA, 20 bp, Artificial Sequence
  Description of Artificial Sequence: Synthetic oligonucleotide
  Target: LAMA2; (-) strand; PAM type: NNGRRT; PAM sequence: AGGGAT
gaaaactgctcaaactgtgc

SEQ ID NO: 23397 - DNA, 20 bp, Artificial Sequence
  Description of Artificial Sequence: Synthetic oligonucleotide
  Target: LAMA2; (-) strand; PAM type: NNGRRT; PAM sequence: AGGGGT
gaagtcttacacatttccac

SEQ ID NO: 23398 - DNA, 20 bp, Artificial Sequence
  Description of Artificial Sequence: Synthetic oligonucleotide
  Target: LAMA2; (-) strand; PAM type: NNGRRT; PAM sequence: AAGAGT
gaaatttttgaactcattga

SEQ ID NO: 23399 - DNA, 20 bp, Artificial Sequence
  Description of Artificial Sequence: Synthetic oligonucleotide
  Target: LAMA2; (-) strand; PAM type: NNGRRT; PAM sequence: TAGAGT
agggaggtgtgaaggcaagt

SEQ ID NO: 23400 - DNA, 20 bp, Artificial Sequence
  Description of Artificial Sequence: Synthetic oligonucleotide
  Target: LAMA2; (-) strand; PAM type: NNGRRT; PAM sequence: TGGAGT
tatgccttccctaatggaac

SEQ ID NO: 23401 - DNA, 20 bp, Artificial Sequence
  Description of Artificial Sequence: Synthetic oligonucleotide
  Target: LAMA2; (-) strand; PAM type: NNGRRT; PAM sequence: GTGAAT
tgccattgattaatagataa

SEQ ID NO: 23402 - DNA, 20 bp, Artificial Sequence
  Description of Artificial Sequence: Synthetic oligonucleotide
  Target: LAMA2; (-) strand; PAM type: NNGRRT; PAM sequence: TAGGAT
aatgaaattataaagtctgt

SEQ ID NO: 23403 - DNA, 20 bp, Artificial Sequence
  Description of Artificial Sequence: Synthetic oligonucleotide
  Target: LAMA2; (-) strand; PAM type: NNGRRT; PAM sequence: CAGAGT
ttcaactatatcatgcaaaa

SEQ ID NO: 23404 - DNA, 20 bp, Artificial Sequence
  Description of Artificial Sequence: Synthetic oligonucleotide
  Target: LAMA2; (-) strand; PAM type: NNGRRT; PAM sequence: ATGGAT
atatatatatattcatacat

SEQ ID NO: 23405 - DNA, 20 bp, Artificial Sequence
  Description of Artificial Sequence: Synthetic oligonucleotide
  Target: LAMA2; (-) strand; PAM type: NNGRRT; PAM sequence: CTGAGT
aaattcttggtattctcttt

SEQ ID NO: 23406 - DNA, 20 bp, Artificial Sequence
  Description of Artificial Sequence: Synthetic oligonucleotide
  Target: LAMA2; (-) strand; PAM type: NNGRRT; PAM sequence: TTGAGT
tgaaatataaatgagattct

SEQ ID NO: 23407 - DNA, 20 bp, Artificial Sequence
  Description of Artificial Sequence: Synthetic oligonucleotide
  Target: LAMA2; (-) strand; PAM type: NNGRRT; PAM sequence: CTGAGT
catattcataagcatcacat

SEQ ID NO: 23408 - DNA, 20 bp, Artificial Sequence
  Description of Artificial Sequence: Synthetic oligonucleotide
  Target: LAMA2; (-) strand; PAM type: NNGRRT; PAM sequence: TGGAAT
aaagcaccgtttcaactcac

SEQ ID NO: 23409 - DNA, 20 bp, Artificial Sequence
  Description of Artificial Sequence: Synthetic oligonucleotide
  Target: LAMA2; (-) strand; PAM type: NNGRRT; PAM sequence: ATGGGT
atggaaaacactaacatgtt

SEQ ID NO: 23410 - DNA, 20 bp, Artificial Sequence
  Description of Artificial Sequence: Synthetic oligonucleotide
  Target: LAMA2; (-) strand; PAM type: NNGRRT; PAM sequence: GGGAAT
acaggcttttcacatgataa

SEQ ID NO: 23411 - DNA, 20 bp, Artificial Sequence
  Description of Artificial Sequence: Synthetic oligonucleotide
  Target: LAMA2; (-) strand; PAM type: NNGRRT; PAM sequence: CTGGGT
acaagcagtctgccagcaat

SEQ ID NO: 23412 - DNA, 20 bp, Artificial Sequence
  Description of Artificial Sequence: Synthetic oligonucleotide
  Target: LAMA2; (-) strand; PAM type: NNGRRT; PAM sequence: TGGAAT
gtcacctcatgcaagcaccg

SEQ ID NO: 23413 - DNA, 20 bp, Artificial Sequence
  Description of Artificial Sequence: Synthetic oligonucleotide
  Target: LAMA2; (-) strand; PAM type: NNGRRT; PAM sequence: GAGAAT
atagtataggccagagaaaa

SEQ ID NO: 23414 - DNA, 20 bp, Artificial Sequence
  Description of Artificial Sequence: Synthetic oligonucleotide
  Target: LAMA2; (-) strand; PAM type: NNGRRT; PAM sequence: ATGAAT
cagagctgtagtccaagaag

SEQ ID NO: 23415 - DNA, 20 bp, Artificial Sequence
  Description of Artificial Sequence: Synthetic oligonucleotide
  Target: LAMA2; (-) strand; PAM type: NNGRRT; PAM sequence: GAGAGT
ccttgaaagtttctgagtag

SEQ ID NO: 23416 - DNA, 20 bp, Artificial Sequence
  Description of Artificial Sequence: Synthetic oligonucleotide
  Target: LAMA2; (-) strand; PAM type: NNGRRT; PAM sequence: CTGAGT
tttggaggccttgaaagttt

SEQ ID NO: 23417 - DNA, 20 bp, Artificial Sequence
  Description of Artificial Sequence: Synthetic oligonucleotide
  Target: LAMA2; (-) strand; PAM type: NNGRRT; PAM sequence: GCGAGT
tttctggaaggtttgaatgt

SEQ ID NO: 23418 - DNA, 20 bp, Artificial Sequence
  Description of Artificial Sequence: Synthetic oligonucleotide
  Target: LAMA2; (-) strand; PAM type: NNGRRT; PAM sequence: TTGAAT
agagtcaatttctggaaggt

SEQ ID NO: 23419 - DNA, 20 bp, Artificial Sequence
  Description of Artificial Sequence: Synthetic oligonucleotide
  Target: LAMA2; (-) strand; PAM type: NNGRRT; PAM sequence: CAGAGT
agtaaggctattagacaggt

SEQ ID NO: 23420 - DNA, 20 bp, Artificial Sequence
  Description of Artificial Sequence: Synthetic oligonucleotide
  Target: LAMA2; (-) strand; PAM type: NNGRRT; PAM sequence: TAGGGT
atttcagctccctaagtttg

SEQ ID NO: 23421 - DNA, 20 bp, Artificial Sequence
  Description of Artificial Sequence: Synthetic oligonucleotide
  Target: LAMA2; (-) strand; PAM type: NNGRRT; PAM sequence: GCGAGT
tttgatgtgtggatgtgaga

SEQ ID NO: 23422 - DNA, 20 bp, Artificial Sequence
  Description of Artificial Sequence: Synthetic oligonucleotide
  Target: LAMA2; (-) strand; PAM type: NNGRRT; PAM sequence: GTGGAT
caggcagggacttttgatgt

SEQ ID NO: 23423 - DNA, 20 bp, Artificial Sequence
  Description of Artificial Sequence: Synthetic oligonucleotide
  Target: LAMA2; (-) strand; PAM type: NNGRRT; PAM sequence: AGGAAT
aggagacaggtagtatatac

SEQ ID NO: 23424 - DNA, 20 bp, Artificial Sequence
  Description of Artificial Sequence: Synthetic oligonucleotide
  Target: LAMA2; (-) strand; PAM type: NNGRRT; PAM sequence: CTGGAT
aggaagtcagtgatttcttc

SEQ ID NO: 23425 - DNA, 20 bp, Artificial Sequence
  Description of Artificial Sequence: Synthetic oligonucleotide
  Target: LAMA2; (-) strand; PAM type: NNGRRT; PAM sequence: CTGAAT
ttttctatcttcttgcattt

SEQ ID NO: 23426 - DNA, 20 bp, Artificial Sequence
  Description of Artificial Sequence: Synthetic oligonucleotide
  Target: LAMA2; (-) strand; PAM type: NNGRRT; PAM sequence: CTGGAT
tttttttctgattagtctgg

SEQ ID NO: 23427 - DNA, 20 bp, Artificial Sequence
  Description of Artificial Sequence: Synthetic oligonucleotide
  Target: LAMA2; (-) strand; PAM type: NNGRRT; PAM sequence: TTGAAT
tgccctttttatccaaattg

SEQ ID NO: 23428 - DNA, 20 bp, Artificial Sequence
  Description of Artificial Sequence: Synthetic oligonucleotide
  Target: LAMA2; (-) strand; PAM type: NNGRRT; PAM sequence: AAGAAT
ttggtagtttgtgattttca

SEQ ID NO: 23429 - DNA, 20 bp, Artificial Sequence
  Description of Artificial Sequence: Synthetic oligonucleotide
  Target: LAMA2; (-) strand; PAM type: NNGRRT; PAM sequence: GTGAGT
actattcagattatttatct

SEQ ID NO: 23430 - DNA, 20 bp, Artificial Sequence
  Description of Artificial Sequence: Synthetic oligonucleotide
  Target: LAMA2; (-) strand; PAM type: NNGRRT; PAM sequence: ATGAAT
actacaaattaaattctcta

SEQ ID NO: 23431 - DNA, 20 bp, Artificial Sequence
  Description of Artificial Sequence: Synthetic oligonucleotide
  Target: LAMA2; (-) strand; PAM type: NNGRRT; PAM sequence: CTGAAT
acaagtaaagtcatctggaa

SEQ ID NO: 23432 - DNA, 20 bp, Artificial Sequence
  Description of Artificial Sequence: Synthetic oligonucleotide
  Target: LAMA2; (-) strand; PAM type: NNGRRT; PAM sequence: TGGAAT
tttcttcattaaatatttgg

SEQ ID NO: 23433 - DNA, 20 bp, Artificial Sequence
  Description of Artificial Sequence: Synthetic oligonucleotide
  Target: LAMA2; (-) strand; PAM type: NNGRRT; PAM sequence: AAGAGT
tctcctcttcaattttctga

SEQ ID NO: 23434 - DNA, 20 bp, Artificial Sequence
  Description of Artificial Sequence: Synthetic oligonucleotide
  Target: LAMA2; (-) strand; PAM type: NNGRRT; PAM sequence: TTGGAT
actggcctcgtagaatgagg

SEQ ID NO: 23435 - DNA, 20 bp, Artificial Sequence
  Description of Artificial Sequence: Synthetic oligonucleotide
  Target: LAMA2; (-) strand; PAM type: NNGRRT; PAM sequence: TAGAAT
tcagagtaatactggcctcg

SEQ ID NO: 23436 - DNA, 20 bp, Artificial Sequence
  Description of Artificial Sequence: Synthetic oligonucleotide
  Target: LAMA2; (-) strand; PAM type: NNGRRT; PAM sequence: CAGAGT
tctttgtctgccattggtat

SEQ ID NO: 23437 - DNA, 20 bp, Artificial Sequence
  Description of Artificial Sequence: Synthetic oligonucleotide
  Target: LAMA2; (-) strand; PAM type: NNGRRT; PAM sequence: AGGGAT
ttttacatctatgttcatgg

SEQ ID NO: 23438 - DNA, 20 bp, Artificial Sequence
  Description of Artificial Sequence: Synthetic oligonucleotide
  Target: LAMA2; (-) strand; PAM type: NNGRRT; PAM sequence: TTGAGT
tagtgatcatgtataatcct

SEQ ID NO: 23439 - DNA, 20 bp, Artificial Sequence
  Description of Artificial Sequence: Synthetic oligonucleotide
  Target: LAMA2; (-) strand; PAM type: NNGRRT; PAM sequence: CTGGAT
atttgtacttatttttcaat

SEQ ID NO: 23440 - DNA, 20 bp, Artificial Sequence
  Description of Artificial Sequence: Synthetic oligonucleotide
  Target: LAMA2; (-) strand; PAM type: NNGRRT; PAM sequence: GTGAAT
cttagacttctatagtatct

SEQ ID NO: 23441 - DNA, 20 bp, Artificial Sequence
  Description of Artificial Sequence: Synthetic oligonucleotide
  Target: LAMA2; (-) strand; PAM type: NNGRRT; PAM sequence: CAGGAT
gggttacaggcatgaaccac

SEQ ID NO: 23442 - DNA, 20 bp, Artificial Sequence
  Description of Artificial Sequence: Synthetic oligonucleotide
  Target: LAMA2; (-) strand; PAM type: NNGRRT; PAM sequence: TAGGGT
gcctcagcctcctaaagcac

SEQ ID NO: 23443 - DNA, 20 bp, Artificial Sequence
  Description of Artificial Sequence: Synthetic oligonucleotide
  Target: LAMA2; (-) strand; PAM type: NNGRRT; PAM sequence: GGGGGT
tctccagagtattcagtgta

SEQ ID NO: 23444 - DNA, 20 bp, Artificial Sequence
  Description of Artificial Sequence: Synthetic oligonucleotide
  Target: LAMA2; (-) strand; PAM type: NNGRRT; PAM sequence: CAGAGT
gattttcttttatttatctc

SEQ ID NO: 23445 - DNA, 20 bp, Artificial Sequence
  Description of Artificial Sequence: Synthetic oligonucleotide
  Target: LAMA2; (-) strand; PAM type: NNGRRT; PAM sequence: TTGAAT
aaactaggattataggaata

SEQ ID NO: 23446 - DNA, 20 bp, Artificial Sequence
  Description of Artificial Sequence: Synthetic oligonucleotide
  Target: LAMA2; (-) strand; PAM type: NNGRRT; PAM sequence: AGGAAT
tatgtataaactaggattat

SEQ ID NO: 23447 - DNA, 20 bp, Artificial Sequence
  Description of Artificial Sequence: Synthetic oligonucleotide
  Target: LAMA2; (-) strand; PAM type: NNGRRT; PAM sequence: TAGGAT
gtaggtcaatatgtataaac

SEQ ID NO: 23448 - DNA, 20 bp, Artificial Sequence
  Description of Artificial Sequence: Synthetic oligonucleotide
  Target: LAMA2; (-) strand; PAM type: NNGRRT; PAM sequence: TTGAAT
ggatttttactgggattgca

SEQ ID NO: 23449 - DNA, 20 bp, Artificial Sequence
  Description of Artificial Sequence: Synthetic oligonucleotide
  Target: LAMA2; (-) strand; PAM type: NNGRRT; PAM sequence: TGGGAT
aaccttgctaggatttttac

SEQ ID NO: 23450 - DNA, 20 bp, Artificial Sequence
  Description of Artificial Sequence: Synthetic oligonucleotide
  Target: LAMA2; (-) strand; PAM type: NNGRRT; PAM sequence: TAGGAT
tttttaggaaaaaaccttgc

SEQ ID NO: 23451 - DNA, 20 bp, Artificial Sequence
  Description of Artificial Sequence: Synthetic oligonucleotide
  Target: LAMA2; (-) strand; PAM type: NNGRRT; PAM sequence: ATGAAT
tttctcctttccaattccat

SEQ ID NO: 23452 - DNA, 20 bp, Artificial Sequence
  Description of Artificial Sequence: Synthetic oligonucleotide
  Target: LAMA2; (-) strand; PAM type: NNGRRT; PAM sequence: CTGGAT
aatcatttgaccatacatgt

SEQ ID NO: 23453 - DNA, 20 bp, Artificial Sequence
  Description of Artificial Sequence: Synthetic oligonucleotide
  Target: LAMA2; (-) strand; PAM type: NNGRRT; PAM sequence: TAGAAT
tggatattcaattcctctag

SEQ ID NO: 23454 - DNA, 20 bp, Artificial Sequence
  Description of Artificial Sequence: Synthetic oligonucleotide
  Target: LAMA2; (-) strand; PAM type: NNGRRT; PAM sequence: ATGGAT
cattttttttgttgttgttc

SEQ ID NO: 23455 - DNA, 20 bp, Artificial Sequence
  Description of Artificial Sequence: Synthetic oligonucleotide
  Target: LAMA2; (-) strand; PAM type: NNGRRT; PAM sequence: TGGAAT
catctcttttgagttaattt

SEQ ID NO: 23456 - DNA, 20 bp, Artificial Sequence
  Description of Artificial Sequence: Synthetic oligonucleotide
  Target: LAMA2; (-) strand; PAM type: NNGRRT; PAM sequence: TTGAGT
agttaggtctagcatctctt

SEQ ID NO: 23457 - DNA, 20 bp, Artificial Sequence
  Description of Artificial Sequence: Synthetic oligonucleotide
  Target: LAMA2; (-) strand; PAM type: NNGRRT; PAM sequence: AAGAAT
atgcttttggtggtgtatct

SEQ ID NO: 23458 - DNA, 20 bp, Artificial Sequence
  Description of Artificial Sequence: Synthetic oligonucleotide
  Target: LAMA2; (-) strand; PAM type: NNGRRT; PAM sequence: GAGGAT
gttaattttgttttcctttt

SEQ ID NO: 23459 - DNA, 20 bp, Artificial Sequence
  Description of Artificial Sequence: Synthetic oligonucleotide
  Target: LAMA2; (-) strand; PAM type: NNGRRT; PAM sequence: ATGGGT
tacatatgaataatctggat

SEQ ID NO: 23460 - DNA, 20 bp, Artificial Sequence
  Description of Artificial Sequence: Synthetic oligonucleotide
  Target: LAMA2; (-) strand; PAM type: NNGRRT; PAM sequence: CTGGAT
gaatgatacatatgaataat

SEQ ID NO: 23461 - DNA, 20 bp, Artificial Sequence
  Description of Artificial Sequence: Synthetic oligonucleotide
  Target: LAMA2; (-) strand; PAM type: NNGRRT; PAM sequence: ATGAAT
ttgagttttgaatgatacat

SEQ ID NO: 23462 - DNA, 20 bp, Artificial Sequence
  Description of Artificial Sequence: Synthetic oligonucleotide
  Target: LAMA2; (-) strand; PAM type: NNGRRT; PAM sequence: TTGAAT
tttgctcttatttttgagtt

SEQ ID NO: 23463 - DNA, 20 bp, Artificial Sequence
  Description of Artificial Sequence: Synthetic oligonucleotide
  Target: LAMA2; (-) strand; PAM type: NNGRRT; PAM sequence: TTGAGT
tgggttatttgctcttattt

SEQ ID NO: 23464 - DNA, 20 bp, Artificial Sequence
  Description of Artificial Sequence: Synthetic oligonucleotide
  Target: LAMA2; (-) strand; PAM type: NNGRRT; PAM sequence: TTGGGT
aatcttttgttcaaattttc

SEQ ID NO: 23465 - DNA, 20 bp, Artificial Sequence
  Description of Artificial Sequence: Synthetic oligonucleotide
  Target: LAMA2; (-) strand; PAM type: NNGRRT; PAM sequence: CTGGAT
aatacacagaagcagaatgg

SEQ ID NO: 23466 - DNA, 20 bp, Artificial Sequence
  Description of Artificial Sequence: Synthetic oligonucleotide
  Target: LAMA2; (-) strand; PAM type: NNGRRT; PAM sequence: CAGAAT
ttggagtaaatacacagaag

SEQ ID NO: 23467 - DNA, 20 bp, Artificial Sequence
  Description of Artificial Sequence: Synthetic oligonucleotide
  Target: LAMA2; (-) strand; PAM type: NNGRRT; PAM sequence: TGGAGT
acatatgccatcatttatct

SEQ ID NO: 23468 - DNA, 20 bp, Artificial Sequence
  Description of Artificial Sequence: Synthetic oligonucleotide
  Target: LAMA2; (-) strand; PAM type: NNGRRT; PAM sequence: TTGGGT
acacatctgtgtacaaattt

SEQ ID NO: 23469 - DNA, 20 bp, Artificial Sequence
  Description of Artificial Sequence: Synthetic oligonucleotide
  Target: LAMA2; (-) strand; PAM type: NNGRRT; PAM sequence: AGGGAT
attggtaattatttcatcat

SEQ ID NO: 23470 - DNA, 20 bp, Artificial Sequence
  Description of Artificial Sequence: Synthetic oligonucleotide
  Target: LAMA2; (-) strand; PAM type: NNGRRT; PAM sequence: TAGAAT
cactgtaggtttgcatttca

SEQ ID NO: 23471 - DNA, 20 bp, Artificial Sequence
  Description of Artificial Sequence: Synthetic oligonucleotide
  Target: LAMA2; (-) strand; PAM type: NNGRRT; PAM sequence: TTGAAT
gaatatatccatcatttctt

SEQ ID NO: 23472 - DNA, 20 bp, Artificial Sequence
  Description of Artificial Sequence: Synthetic oligonucleotide
  Target: LAMA2; (-) strand; PAM type: NNGRRT; PAM sequence: GAGAAT
ccattaccacaaccatggta

SEQ ID NO: 23473 - DNA, 20 bp, Artificial Sequence
  Description of Artificial Sequence: Synthetic oligonucleotide
  Target: LAMA2; (-) strand; PAM type: NNGRRT; PAM sequence: TTGAAT
aatttacaattggataagtt

SEQ ID NO: 23474 - DNA, 20 bp, Artificial Sequence
  Description of Artificial Sequence: Synthetic oligonucleotide
  Target: LAMA2; (-) strand; PAM type: NNGRRT; PAM sequence: TTGGAT
ccatgcaaaccaatttacaa

SEQ ID NO: 23475 - DNA, 20 bp, Artificial Sequence
  Description of Artificial Sequence: Synthetic oligonucleotide
  Target: LAMA2; (-) strand; PAM type: NNGRRT; PAM sequence: TTGAGT
aatactgtttaatactttta

SEQ ID NO: 23476 - DNA, 20 bp, Artificial Sequence
  Description of Artificial Sequence: Synthetic oligonucleotide
  Target: LAMA2; (-) strand; PAM type: NNGRRT; PAM sequence: TGGAAT
aatttaaaaaagaaaataaa

SEQ ID NO: 23477 - DNA, 20 bp, Artificial Sequence
  Description of Artificial Sequence: Synthetic oligonucleotide
  Target: LAMA2; (-) strand; PAM type: NNGRRT; PAM sequence: AAGAAT
aaaaattaaaaaaaagtaaa

SEQ ID NO: 23478 - DNA, 20 bp, Artificial Sequence
  Description of Artificial Sequence: Synthetic oligonucleotide
  Target: LAMA2; (-) strand; PAM type: NNGRRT; PAM sequence: AAGAGT
atacaacaaacctccatgac

SEQ ID NO: 23479 - DNA, 20 bp, Artificial Sequence
  Description of Artificial Sequence: Synthetic oligonucleotide
  Target: LAMA2; (-) strand; PAM type: NNGRRT; PAM sequence: TTGGGT
gaaacagagaaaaataacta

SEQ ID NO: 23480 - DNA, 20 bp, Artificial Sequence
  Description of Artificial Sequence: Synthetic oligonucleotide
  Target: LAMA2; (-) strand; PAM type: NNGRRT; PAM sequence: GAGGGT
acatacaccgaggcctactt

SEQ ID NO: 23481 - DNA, 20 bp, Artificial Sequence
  Description of Artificial Sequence: Synthetic oligonucleotide
  Target: LAMA2; (-) strand; PAM type: NNGRRT; PAM sequence: TGGAGT
gtcctttgcaggaacatgga

SEQ ID NO: 23482 - DNA, 20 bp, Artificial Sequence
  Description of Artificial Sequence: Synthetic oligonucleotide
  Target: LAMA2; (-) strand; PAM type: NNGRRT; PAM sequence: ATGGAT
atcatgtcctttgcaggaac

SEQ ID NO: 23483 - DNA, 20 bp, Artificial Sequence
  Description of Artificial Sequence: Synthetic oligonucleotide
  Target: LAMA2; (-) strand; PAM type: NNGRRT; PAM sequence: ACGAAT
gaatactatgcagtcataaa

SEQ ID NO: 23484 - DNA, 20 bp, Artificial Sequence
  Description of Artificial Sequence: Synthetic oligonucleotide
  Target: LAMA2; (-) strand; PAM type: NNGRRT; PAM sequence: TGGAAT
aatgtggtacatatacacca

SEQ ID NO: 23485 - DNA, 20 bp, Artificial Sequence
  Description of Artificial Sequence: Synthetic oligonucleotide
  Target: LAMA2; (-) strand; PAM type: NNGRRT; PAM sequence: CTGGAT
ggaatagcatcagcggcaga

SEQ ID NO: 23486 - DNA, 20 bp, Artificial Sequence
  Description of Artificial Sequence: Synthetic oligonucleotide
  Target: LAMA2; (-) strand; PAM type: NNGRRT; PAM sequence: AGGAAT
ttgctgagcataagaaaata

SEQ ID NO: 23487 - DNA, 20 bp, Artificial Sequence
  Description of Artificial Sequence: Synthetic oligonucleotide
  Target: LAMA2; (-) strand; PAM type: NNGRRT; PAM sequence: CAGGAT
caggtgtgcaaagtgaggca

SEQ ID NO: 23488 - DNA, 20 bp, Artificial Sequence
  Description of Artificial Sequence: Synthetic oligonucleotide
  Target: LAMA2; (-) strand; PAM type: NNGRRT; PAM sequence: AAGAAT
gagtgtgaatacctttttgt

SEQ ID NO: 23489 - DNA, 20 bp, Artificial Sequence
  Description of Artificial Sequence: Synthetic oligonucleotide
  Target: LAMA2; (-) strand; PAM type: NNGRRT; PAM sequence: GTGAAT
tttccccagtgccttggagt

SEQ ID NO: 23490 - DNA, 20 bp, Artificial Sequence
  Description of Artificial Sequence: Synthetic oligonucleotide
  Target: LAMA2; (-) strand; PAM type: NNGRRT; PAM sequence: TGGAGT
aacagctttccccagtgcct

SEQ ID NO: 23491 - DNA, 20 bp, Artificial Sequence
  Description of Artificial Sequence: Synthetic oligonucleotide
  Target: LAMA2; (-) strand; PAM type: NNGRRT; PAM sequence: CTGAAT
ccaaggatgataatacaatc

SEQ ID NO: 23492 - DNA, 20 bp, Artificial Sequence
  Description of Artificial Sequence: Synthetic oligonucleotide
  Target: LAMA2; (-) strand; PAM type: NNGRRT; PAM sequence: AAGGAT
cttattgtggtaaaataacc

SEQ ID NO: 23493 - DNA, 20 bp, Artificial Sequence
  Description of Artificial Sequence: Synthetic oligonucleotide
  Target: LAMA2; (-) strand; PAM type: NNGRRT; PAM sequence: AGGGAT
gagtctgagtcaatttggaa

SEQ ID NO: 23494 - DNA, 20 bp, Artificial Sequence
  Description of Artificial Sequence: Synthetic oligonucleotide
  Target: LAMA2; (-) strand; PAM type: NNGRRT; PAM sequence: CTGAGT
aatttttgaagctcaggagt

SEQ ID NO: 23495 - DNA, 20 bp, Artificial Sequence
  Description of Artificial Sequence: Synthetic oligonucleotide
  Target: LAMA2; (-) strand; PAM type: NNGRRT; PAM sequence: AGGAGT
gagaggaatttttgaagctc

SEQ ID NO: 23496 - DNA, 20 bp, Artificial Sequence
  Description of Artificial Sequence: Synthetic oligonucleotide
  Target: LAMA2; (-) strand; PAM type: NNGRRT; PAM sequence: AGGAAT
aaactctaaaaagtggagag

SEQ ID NO: 23497 - DNA, 20 bp, Artificial Sequence
  Description of Artificial Sequence: Synthetic oligonucleotide
  Target: LAMA2; (-) strand; PAM type: NNGRRT; PAM sequence: AAGAAT
gagacaggaaattacaatga

SEQ ID NO: 23498 - DNA, 20 bp, Artificial Sequence
  Description of Artificial Sequence: Synthetic oligonucleotide
  Target: LAMA2; (-) strand; PAM type: NNGRRT; PAM sequence: CTGAAT
ctcccttggttataggtttt

SEQ ID NO: 23499 - DNA, 20 bp, Artificial Sequence
  Description of Artificial Sequence: Synthetic oligonucleotide
  Target: LAMA2; (-) strand; PAM type: NNGRRT; PAM sequence: AAGAGT
ttcatcttggaaaaaaaaaa

SEQ ID NO: 23500 - DNA, 20 bp, Artificial Sequence
  Description of Artificial Sequence: Synthetic oligonucleotide
  Target: LAMA2; (-) strand; PAM type: NNGRRT; PAM sequence: GGGAAT
ctcattgctacagttctctt

SEQ ID NO: 23501 - DNA, 20 bp, Artificial Sequence
  Description of Artificial Sequence: Synthetic oligonucleotide
  Target: LAMA2; (-) strand; PAM type: NNGRRT; PAM sequence: AGGAAT
tgttttctgctgggaaaaac

SEQ ID NO: 23502 - DNA, 20 bp, Artificial Sequence
  Description of Artificial Sequence: Synthetic oligonucleotide
  Target: LAMA2; (-) strand; PAM type: NNGRRT; PAM sequence: GAGAGT
tgcaagtgcaagaagggttg

SEQ ID NO: 23503 - DNA, 20 bp, Artificial Sequence
  Description of Artificial Sequence: Synthetic oligonucleotide
  Target: LAMA2; (-) strand; PAM type: NNGRRT; PAM sequence: AAGGGT
aaaagtattgcaagtgcaag

SEQ ID NO: 23504 - DNA, 20 bp, Artificial Sequence
  Description of Artificial Sequence: Synthetic oligonucleotide
  Target: LAMA2; (-) strand; PAM type: NNGRRT; PAM sequence: CAGGAT
ataccaagagataaatcaaa

SEQ ID NO: 23505 - DNA, 20 bp, Artificial Sequence
  Description of Artificial Sequence: Synthetic oligonucleotide
  Target: LAMA2; (-) strand; PAM type: NNGRRT; PAM sequence: TTGAAT
tgggaaaaggaatgtttaac

SEQ ID NO: 23506 - DNA, 20 bp, Artificial Sequence
  Description of Artificial Sequence: Synthetic oligonucleotide
  Target: LAMA2; (-) strand; PAM type: NNGRRT; PAM sequence: AGGAAT
taatagaatgatatgggaaa

SEQ ID NO: 23507 - DNA, 20 bp, Artificial Sequence
  Description of Artificial Sequence: Synthetic oligonucleotide
  Target: LAMA2; (-) strand; PAM type: NNGRRT; PAM sequence: TAGAAT
aaaaggtgacacaaagttaa

SEQ ID NO: 23508 - DNA, 20 bp, Artificial Sequence
  Description of Artificial Sequence: Synthetic oligonucleotide
  Target: LAMA2; (-) strand; PAM type: NNGRRT; PAM sequence: GGGAGT
cttaggaacttcaatgttta

SEQ ID NO: 23509 - DNA, 20 bp, Artificial Sequence
  Description of Artificial Sequence: Synthetic oligonucleotide
  Target: LAMA2; (-) strand; PAM type: NNGRRT; PAM sequence: CAGAGT
tatgagaagaagatctagaa

SEQ ID NO: 23510 - DNA, 20 bp, Artificial Sequence
  Description of Artificial Sequence: Synthetic oligonucleotide
  Target: LAMA2; (-) strand; PAM type: NNGRRT; PAM sequence: TAGAAT
agagctctgggctgcagata

SEQ ID NO: 23511 - DNA, 20 bp, Artificial Sequence
  Description of Artificial Sequence: Synthetic oligonucleotide
  Target: LAMA2; (-) strand; PAM type: NNGRRT; PAM sequence: CAGAGT
tccagaaggcagttggtaca

SEQ ID NO: 23512 - DNA, 20 bp, Artificial Sequence
  Description of Artificial Sequence: Synthetic oligonucleotide
  Target: LAMA2; (-) strand; PAM type: NNGRRT; PAM sequence: AGGGAT
accatagaataatggagtgg

SEQ ID NO: 23513 - DNA, 20 bp, Artificial Sequence
  Description of Artificial Sequence: Synthetic oligonucleotide
  Target: LAMA2; (-) strand; PAM type: NNGRRT; PAM sequence: TGGAGT
catctaaaaccatagaataa

SEQ ID NO: 23514 - DNA, 20 bp, Artificial Sequence
  Description of Artificial Sequence: Synthetic oligonucleotide
  Target: LAMA2; (-) strand; PAM type: NNGRRT; PAM sequence: TAGAAT
atgtcatacatctaaaacca

SEQ ID NO: 23515 - DNA, 20 bp, Artificial Sequence
  Description of Artificial Sequence: Synthetic oligonucleotide
  Target: LAMA2; (-) strand; PAM type: NNGRRT; PAM sequence: AAGAAT
gctaacttcttggcttcgtt

SEQ ID NO: 23516 - DNA, 20 bp, Artificial Sequence
  Description of Artificial Sequence: Synthetic oligonucleotide
  Target: LAMA2; (-) strand; PAM type: NNGRRT; PAM sequence: TGGAAT
tcagtaacaacccgattaac

SEQ ID NO: 23517 - DNA, 20 bp, Artificial Sequence
  Description of Artificial Sequence: Synthetic oligonucleotide
  Target: LAMA2; (-) strand; PAM type: NNGRRT; PAM sequence: TAGAAT
tacattctccaatagtgtga

SEQ ID NO: 23518 - DNA, 20 bp, Artificial Sequence
  Description of Artificial Sequence: Synthetic oligonucleotide
  Target: LAMA2; (-) strand; PAM type: NNGRRT; PAM sequence: TAGAAT
tacttgcattaaatagatta

SEQ ID NO: 23519 - DNA, 20 bp, Artificial Sequence
  Description of Artificial Sequence: Synthetic oligonucleotide
  Target: LAMA2; (-) strand; PAM type: NNGRRT; PAM sequence: CTGGGT
tgtgagccactatggctggc

SEQ ID NO: 23520 - DNA, 20 bp, Artificial Sequence
  Description of Artificial Sequence: Synthetic oligonucleotide
  Target: LAMA2; (-) strand; PAM type: NNGRRT; PAM sequence: TAGAAT
gcctcggcctccctaagcac

SEQ ID NO: 23521 - DNA, 20 bp, Artificial Sequence
  Description of Artificial Sequence: Synthetic oligonucleotide
  Target: LAMA2; (-) strand; PAM type: NNGRRT; PAM sequence: AGGGAT
gtctcaaattcttggcacca

SEQ ID NO: 23522 - DNA, 20 bp, Artificial Sequence
  Description of Artificial Sequence: Synthetic oligonucleotide
  Target: LAMA2; (-) strand; PAM type: NNGRRT; PAM sequence: CAGGAT
taaaaaatgttttgtagaga

SEQ ID NO: 23523 - DNA, 20 bp, Artificial Sequence
  Description of Artificial Sequence: Synthetic oligonucleotide
  Target: LAMA2; (-) strand; PAM type: NNGRRT; PAM sequence: CAGGAT
tttgtttttctttttagaga

SEQ ID NO: 23524 - DNA, 20 bp, Artificial Sequence
  Description of Artificial Sequence: Synthetic oligonucleotide
  Target: LAMA2; (-) strand; PAM type: NNGRRT; PAM sequence: AGGAGT
cgggaggatcacttgaggtc

SEQ ID NO: 23525 - DNA, 20 bp, Artificial Sequence
  Description of Artificial Sequence: Synthetic oligonucleotide
  Target: LAMA2; (-) strand; PAM type: NNGRRT; PAM sequence: GAGGAT
actttgggaggccgaggcgg

SEQ ID NO: 23526 - DNA, 20 bp, Artificial Sequence
  Description of Artificial Sequence: Synthetic oligonucleotide
  Target: LAMA2; (-) strand; PAM type: NNGRRT; PAM sequence: CTGAAT
tattttgtgcattttgattc

SEQ ID NO: 23527 - DNA, 20 bp, Artificial Sequence
  Description of Artificial Sequence: Synthetic oligonucleotide
  Target: LAMA2; (-) strand; PAM type: NNGRRT; PAM sequence: GGGAAT
atatgagacagaaaatggta

SEQ ID NO: 23528 - DNA, 20 bp, Artificial Sequence
  Description of Artificial Sequence: Synthetic oligonucleotide
  Target: LAMA2; (-) strand; PAM type: NNGRRT; PAM sequence: AAGGGT
ggaattatgaatacttaggt

SEQ ID NO: 23529 - DNA, 20 bp, Artificial Sequence
  Description of Artificial Sequence: Synthetic oligonucleotide
  Target: LAMA2; (-) strand; PAM type: NNGRRT; PAM sequence: ATGAAT
tagcatgtttgggaggaatt

SEQ ID NO: 23530 - DNA, 20 bp, Artificial Sequence
  Description of Artificial Sequence: Synthetic oligonucleotide
  Target: LAMA2; (-) strand; PAM type: NNGRRT; PAM sequence: AGGAAT
ggaatagtagcatgtttggg

SEQ ID NO: 23531 - DNA, 20 bp, Artificial Sequence
  Description of Artificial Sequence: Synthetic oligonucleotide
  Target: LAMA2; (-) strand; PAM type: NNGRRT; PAM sequence: TGGAAT
atactgaaaacatgaaggct

SEQ ID NO: 23532 - DNA, 20 bp, Artificial Sequence
  Description of Artificial Sequence: Synthetic oligonucleotide
  Target: LAMA2; (-) strand; PAM type: NNGRRT; PAM sequence: AAGGAT
ttaggcaaagaagagaggtg

SEQ ID NO: 23533 - DNA, 20 bp, Artificial Sequence
  Description of Artificial Sequence: Synthetic oligonucleotide
  Target: LAMA2; (-) strand; PAM type: NNGRRT; PAM sequence: TGGAAT
ttaaaaattgtaaaagaaga

SEQ ID NO: 23534 - DNA, 20 bp, Artificial Sequence
  Description of Artificial Sequence: Synthetic oligonucleotide
  Target: LAMA2; (-) strand; PAM type: NNGRRT; PAM sequence: TGGAAT
catgtctttcctcaagaaga

SEQ ID NO: 23535 - DNA, 20 bp, Artificial Sequence
  Description of Artificial Sequence: Synthetic oligonucleotide
  Target: LAMA2; (-) strand; PAM type: NNGRRT; PAM sequence: AAGAAT
cacctgtaatacacagcctg

SEQ ID NO: 23536 - DNA, 20 bp, Artificial Sequence
  Description of Artificial Sequence: Synthetic oligonucleotide
  Target: LAMA2; (-) strand; PAM type: NNGRRT; PAM sequence: GGGAGT
tgagcagaattatgtgtgta

SEQ ID NO: 23537 - DNA, 20 bp, Artificial Sequence
  Description of Artificial Sequence: Synthetic oligonucleotide
  Target: LAMA2; (-) strand; PAM type: NNGRRT; PAM sequence: CAGAAT
aataagaggtacctgctgag

SEQ ID NO: 23538 - DNA, 20 bp, Artificial Sequence
  Description of Artificial Sequence: Synthetic oligonucleotide
  Target: LAMA2; (-) strand; PAM type: NNGRRT; PAM sequence: TTGAGT
gtgaccgcaaagtcacggga

SEQ ID NO: 23539 - DNA, 20 bp, Artificial Sequence
  Description of Artificial Sequence: Synthetic oligonucleotide
  Target: LAMA2; (-) strand; PAM type: NNGRRT; PAM sequence: CGGGAT
aaggagtgaccgcaaagtca

SEQ ID NO: 23540 - DNA, 20 bp, Artificial Sequence
  Description of Artificial Sequence: Synthetic oligonucleotide
  Target: LAMA2; (-) strand; PAM type: NNGRRT; PAM sequence: AGGAGT
ggcaagggtatgagatagga

SEQ ID NO: 23541 - DNA, 20 bp, Artificial Sequence
  Description of Artificial Sequence: Synthetic oligonucleotide
  Target: LAMA2; (-) strand; PAM type: NNGRRT; PAM sequence: AAGGGT
ccctattcccagccctgggc

SEQ ID NO: 23542 - DNA, 20 bp, Artificial Sequence
  Description of Artificial Sequence: Synthetic oligonucleotide
  Target: LAMA2; (-) strand; PAM type: NNGRRT; PAM sequence: ATGAAT
ggattggttcttgcacttgc

SEQ ID NO: 23543 - DNA, 20 bp, Artificial Sequence
  Description of Artificial Sequence: Synthetic oligonucleotide
  Target: LAMA2; (-) strand; PAM type: NNGRRT; PAM sequence: CAGGAT
tattattaaaatcttaaaga

SEQ ID NO: 23544 - DNA, 20 bp, Artificial Sequence
  Description of Artificial Sequence: Synthetic oligonucleotide
  Target: LAMA2; (-) strand; PAM type: NNGRRT; PAM sequence: GTGGGT
aattattacttgagtagttt

SEQ ID NO: 23545 - DNA, 20 bp, Artificial Sequence
  Description of Artificial Sequence: Synthetic oligonucleotide
  Target: LAMA2; (-) strand; PAM type: NNGRRT; PAM sequence: TTGAGT
ttttctagaggaattattac

SEQ ID NO: 23546 - DNA, 20 bp, Artificial Sequence
  Description of Artificial Sequence: Synthetic oligonucleotide
  Target: LAMA2; (-) strand; PAM type: NNGRRT; PAM sequence: AGGAAT
gccttggcttggttttctag

SEQ ID NO: 23547 - DNA, 20 bp, Artificial Sequence
  Description of Artificial Sequence: Synthetic oligonucleotide
  Target: LAMA2; (-) strand; PAM type: NNGRRT; PAM sequence: AAGAGT
ctattttaatagctgctgtc

SEQ ID NO: 23548 - DNA, 20 bp, Artificial Sequence
  Description of Artificial Sequence: Synthetic oligonucleotide
  Target: LAMA2; (-) strand; PAM type: NNGRRT; PAM sequence: GAGGGT
agcaacaaattagaaatatg

SEQ ID NO: 23549 - DNA, 20 bp, Artificial Sequence
  Description of Artificial Sequence: Synthetic oligonucleotide
  Target: LAMA2; (-) strand; PAM type: NNGRRT; PAM sequence: CTGAAT
cacaaactaactgaactgta

SEQ ID NO: 23550 - DNA, 20 bp, Artificial Sequence
  Description of Artificial Sequence: Synthetic oligonucleotide
  Target: LAMA2; (-) strand; PAM type: NNGRRT; PAM sequence: TGGAAT
gcctcggcctcccaaaatgc

SEQ ID NO: 23551 - DNA, 20 bp, Artificial Sequence
  Description of Artificial Sequence: Synthetic oligonucleotide
  Target: LAMA2; (-) strand; PAM type: NNGRRT; PAM sequence: TAGAGT
tctcactctgtcacccaggc

SEQ ID NO: 23552 - DNA, 20 bp, Artificial Sequence
  Description of Artificial Sequence: Synthetic oligonucleotide
  Target: LAMA2; (-) strand; PAM type: NNGRRT; PAM sequence: GGGGAT
cttgggcaaagacaaaaatt

SEQ ID NO: 23553 - DNA, 20 bp, Artificial Sequence
  Description of Artificial Sequence: Synthetic oligonucleotide
  Target: LAMA2; (-) strand; PAM type: NNGRRT; PAM sequence: TAGGAT
acctcggtctcccgaagtgt

SEQ ID NO: 23554 - DNA, 20 bp, Artificial Sequence
  Description of Artificial Sequence: Synthetic oligonucleotide
  Target: LAMA2; (-) strand; PAM type: NNGRRT; PAM sequence: CAGGGT
ttttgcgtttttagtagaga

SEQ ID NO: 23555 - DNA, 20 bp, Artificial Sequence
  Description of Artificial Sequence: Synthetic oligonucleotide
  Target: LAMA2; (-) strand; PAM type: NNGRRT; PAM sequence: TGGGAT
acctcagcctcctgagtagc

SEQ ID NO: 23556 - DNA, 20 bp, Artificial Sequence
  Description of Artificial Sequence: Synthetic oligonucleotide
  Target: LAMA2; (-) strand; PAM type: NNGRRT; PAM sequence: CTGAGT
aattctcctacctcagcctc

SEQ ID NO: 23557 - DNA, 20 bp, Artificial Sequence
  Description of Artificial Sequence: Synthetic oligonucleotide
  Target: LAMA2; (-) strand; PAM type: NNGRRT; PAM sequence: CTGGGT
ctcactgtaacctccgtatc

SEQ ID NO: 23558 - DNA, 20 bp, Artificial Sequence
  Description of Artificial Sequence: Synthetic oligonucleotide
  Target: LAMA2; (-) strand; PAM type: NNGRRT; PAM sequence: TAGAGT
tttttttttttttttttaga

SEQ ID NO: 23559 - DNA, 20 bp, Artificial Sequence
  Description of Artificial Sequence: Synthetic oligonucleotide
  Target: LAMA2; (-) strand; PAM type: NNGRRT; PAM sequence: GGGAAT
tgagctgtcatagatctcca

SEQ ID NO: 23560 - DNA, 20 bp, Artificial Sequence
  Description of Artificial Sequence: Synthetic oligonucleotide
  Target: LAMA2; (-) strand; PAM type: NNGRRT; PAM sequence: AAGGGT
ctccaacccctgcattggtc

SEQ ID NO: 23561 - DNA, 20 bp, Artificial Sequence
  Description of Artificial Sequence: Synthetic oligonucleotide
  Target: LAMA2; (-) strand; PAM type: NNGRRT; PAM sequence: AGGGGT
acatggattttcaactgtgc

SEQ ID NO: 23562 - DNA, 20 bp, Artificial Sequence
  Description of Artificial Sequence: Synthetic oligonucleotide
  Target: LAMA2; (-) strand; PAM type: NNGRRT; PAM sequence: ATGGAT
tgaagagtctaatgttatac

SEQ ID NO: 23563 - DNA, 20 bp, Artificial Sequence
  Description of Artificial Sequence: Synthetic oligonucleotide
  Target: LAMA2; (-) strand; PAM type: NNGRRT; PAM sequence: AAGAGT
gtttagttatgaagtttatg

SEQ ID NO: 23564 - DNA, 20 bp, Artificial Sequence
  Description of Artificial Sequence: Synthetic oligonucleotide
  Target: LAMA2; (-) strand; PAM type: NNGRRT; PAM sequence: GGGAAT
ctgattcattatttgggctt

SEQ ID NO: 23565 - DNA, 20 bp, Artificial Sequence
  Description of Artificial Sequence: Synthetic oligonucleotide
  Target: LAMA2; (-) strand; PAM type: NNGRRT; PAM sequence: TGGAAT
gtttgataaaacttaatgat

SEQ ID NO: 23566 - DNA, 20 bp, Artificial Sequence
  Description of Artificial Sequence: Synthetic oligonucleotide
  Target: LAMA2; (-) strand; PAM type: NNGRRT; PAM sequence: CTGAGT
cacttgtctgaacggaatga

SEQ ID NO: 23567 - DNA, 20 bp, Artificial Sequence
  Description of Artificial Sequence: Synthetic oligonucleotide
  Target: LAMA2; (-) strand; PAM type: NNGRRT; PAM sequence: CGGAAT
tcaagacccacttgtctgaa

SEQ ID NO: 23568 - DNA, 20 bp, Artificial Sequence
  Description of Artificial Sequence: Synthetic oligonucleotide
  Target: LAMA2; (-) strand; PAM type: NNGRRT; PAM sequence: CAGAAT
gtgtattacatccatgatct

SEQ ID NO: 23569 - DNA, 20 bp, Artificial Sequence
  Description of Artificial Sequence: Synthetic oligonucleotide
  Target: LAMA2; (-) strand; PAM type: NNGRRT; PAM sequence: CAGAAT
taaaatataaaataataaca

SEQ ID NO: 23570 - DNA, 20 bp, Artificial Sequence
  Description of Artificial Sequence: Synthetic oligonucleotide
  Target: LAMA2; (-) strand; PAM type: NNGRRT; PAM sequence: AAGGAT
gagtatatctttaataataa

SEQ ID NO: 23571 - DNA, 20 bp, Artificial Sequence
  Description of Artificial Sequence: Synthetic oligonucleotide
  Target: LAMA2; (-) strand; PAM type: NNGRRT; PAM sequence: AGGAGT
gggtaatatgcaaattcaaa

SEQ ID NO: 23572 - DNA, 20 bp, Artificial Sequence
  Description of Artificial Sequence: Synthetic oligonucleotide
  Target: LAMA2; (-) strand; PAM type: NNGRRT; PAM sequence: AAGGGT
tggaaaggctgattcaggca

SEQ ID NO: 23573 - DNA, 20 bp, Artificial Sequence
  Description of Artificial Sequence: Synthetic oligonucleotide
  Target: LAMA2; (-) strand; PAM type: NNGRRT; PAM sequence: AGGGAT
aggaatcaaaactttgtatg

SEQ ID NO: 23574 - DNA, 20 bp, Artificial Sequence
  Description of Artificial Sequence: Synthetic oligonucleotide
  Target: LAMA2; (-) strand; PAM type: NNGRRT; PAM sequence: AGGAAT
caccattcacactctaaagg

SEQ ID NO: 23575 - DNA, 20 bp, Artificial Sequence
  Description of Artificial Sequence: Synthetic oligonucleotide
  Target: LAMA2; (-) strand; PAM type: NNGRRT; PAM sequence: AGGGAT
acaagctacgtctcgctctt

SEQ ID NO: 23576 - DNA, 20 bp, Artificial Sequence
  Description of Artificial Sequence: Synthetic oligonucleotide
  Target: LAMA2; (-) strand; PAM type: NNGRRT; PAM sequence: TTGGAT
cctctactcacatggtgggg

SEQ ID NO: 23577 - DNA, 20 bp, Artificial Sequence
  Description of Artificial Sequence: Synthetic oligonucleotide
  Target: LAMA2; (-) strand; PAM type: NNGRRT; PAM sequence: TGGGGT
cttgtcctctactcacatgg

SEQ ID NO: 23578 - DNA, 20 bp, Artificial Sequence
  Description of Artificial Sequence: Synthetic oligonucleotide
  Target: LAMA2; (-) strand; PAM type: NNGRRT; PAM sequence: CTGAAT
agatgatatacaggagtgtt

SEQ ID NO: 23579 - DNA, 20 bp, Artificial Sequence
  Description of Artificial Sequence: Synthetic oligonucleotide
  Target: LAMA2; (-) strand; PAM type: NNGRRT; PAM sequence: AGGAGT
ctcttgctgagatgatatac

SEQ ID NO: 23580 - DNA, 20 bp, Artificial Sequence
  Description of Artificial Sequence: Synthetic oligonucleotide
  Target: LAMA2; (-) strand; PAM type: NNGRRT; PAM sequence: TAGAAT
cttacttgcaaaaaacgcca

SEQ ID NO: 23581 - DNA, 20 bp, Artificial Sequence
  Description of Artificial Sequence: Synthetic oligonucleotide
  Target: LAMA2; (-) strand; PAM type: NNGRRT; PAM sequence: TTGAAT
gcccagcaagaaaattgagt

SEQ ID NO: 23582 - DNA, 20 bp, Artificial Sequence
  Description of Artificial Sequence: Synthetic oligonucleotide
  Target: LAMA2; (-) strand; PAM type: NNGRRT; PAM sequence: TTGAGT
tcttttgcccagcaagaaaa

SEQ ID NO: 23583 - DNA, 20 bp, Artificial Sequence
  Description of Artificial Sequence: Synthetic oligonucleotide
  Target: LAMA2; (-) strand; PAM type: NNGRRT; PAM sequence: TGGAAT
ggagtcccctctgcagccag

SEQ ID NO: 23584 - DNA, 20 bp, Artificial Sequence
  Description of Artificial Sequence: Synthetic oligonucleotide
  Target: LAMA2; (-) strand; PAM type: NNGRRT; PAM sequence: GGGAGT
ttcaggatattgggataaaa

SEQ ID NO: 23585 - DNA, 20 bp, Artificial Sequence
  Description of Artificial Sequence: Synthetic oligonucleotide
  Target: LAMA2; (-) strand; PAM type: NNGRRT; PAM sequence: TGGGAT
tctgcaaagattcaggatat

SEQ ID NO: 23586 - DNA, 20 bp, Artificial Sequence
  Description of Artificial Sequence: Synthetic oligonucleotide
  Target: LAMA2; (-) strand; PAM type: NNGRRT; PAM sequence: CAGGAT
tagcaggttctgcaaagatt

SEQ ID NO: 23587 - DNA, 20 bp, Artificial Sequence
  Description of Artificial Sequence: Synthetic oligonucleotide
  Target: LAMA2; (-) strand; PAM type: NNGRRT; PAM sequence: GGGGGT
atatgctcttcctcccacta

SEQ ID NO: 23588 - DNA, 20 bp, Artificial Sequence
  Description of Artificial Sequence: Synthetic oligonucleotide
  Target: LAMA2; (-) strand; PAM type: NNGRRT; PAM sequence: GGGAGT
tcagagatgactgtttcaca

SEQ ID NO: 23589 - DNA, 20 bp, Artificial Sequence
  Description of Artificial Sequence: Synthetic oligonucleotide
  Target: LAMA2; (-) strand; PAM type: NNGRRT; PAM sequence: TAGAGT
gcacagacagacatacatac

SEQ ID NO: 23590 - DNA, 20 bp, Artificial Sequence
  Description of Artificial Sequence: Synthetic oligonucleotide
  Target: LAMA2; (-) strand; PAM type: NNGRRT; PAM sequence: TGGGAT
cctagtagctgtcacaagtt

SEQ ID NO: 23591 - DNA, 20 bp, Artificial Sequence
  Description of Artificial Sequence: Synthetic oligonucleotide
  Target: LAMA2; (-) strand; PAM type: NNGRRT; PAM sequence: TTGAAT
ctgcattatgcaggcaatca

SEQ ID NO: 23592 - DNA, 20 bp, Artificial Sequence
  Description of Artificial Sequence: Synthetic oligonucleotide
  Target: LAMA2; (-) strand; PAM type: NNGRRT; PAM sequence: AAGAAT
agaagagcacccgagtgagg

SEQ ID NO: 23593 - DNA, 20 bp, Artificial Sequence
  Description of Artificial Sequence: Synthetic oligonucleotide
  Target: LAMA2; (-) strand; PAM type: NNGRRT; PAM sequence: CCGAGT
tgggtaggaaagaagagcac

SEQ ID NO: 23594 - DNA, 20 bp, Artificial Sequence
  Description of Artificial Sequence: Synthetic oligonucleotide
  Target: LAMA2; (-) strand; PAM type: NNGRRT; PAM sequence: CTGGGT
ccagtgcaggatcttgagac

SEQ ID NO: 23595 - DNA, 20 bp, Artificial Sequence
  Description of Artificial Sequence: Synthetic oligonucleotide
  Target: LAMA2; (-) strand; PAM type: NNGRRT; PAM sequence: CAGGAT
gtcaacctaaatacccagtg

SEQ ID NO: 23596 - DNA, 20 bp, Artificial Sequence
  Description of Artificial Sequence: Synthetic oligonucleotide
  Target: LAMA2; (-) strand; PAM type: NNGRRT; PAM sequence: TGGGAT
tgattacttttgaaaggacc

SEQ ID NO: 23597 - DNA, 20 bp, Artificial Sequence
  Description of Artificial Sequence: Synthetic oligonucleotide
  Target: LAMA2; (-) strand; PAM type: NNGRRT; PAM sequence: AAGGGT
tgaaagaatgccccattcac

SEQ ID NO: 23598 - DNA, 20 bp, Artificial Sequence
  Description of Artificial Sequence: Synthetic oligonucleotide
  Target: LAMA2; (-) strand; PAM type: NNGRRT; PAM sequence: AAGAAT
ggcacaaataaatgccctga

SEQ ID NO: 23599 - DNA, 20 bp, Artificial Sequence
  Description of Artificial Sequence: Synthetic oligonucleotide
  Target: LAMA2; (-) strand; PAM type: NNGRRT; PAM sequence: ATGAAT
aatttttattttttattaat

SEQ ID NO: 23600 - DNA, 20 bp, Artificial Sequence
  Description of Artificial Sequence: Synthetic oligonucleotide
  Target: LAMA2; (-) strand; PAM type: NNGRRT; PAM sequence: TGGAAT
atccagttgagtttctcaaa

SEQ ID NO: 23601 - DNA, 20 bp, Artificial Sequence
  Description of Artificial Sequence: Synthetic oligonucleotide
  Target: LAMA2; (-) strand; PAM type: NNGRRT; PAM sequence: TTGAGT
actattcaaattccatccag

SEQ ID NO: 23602 - DNA, 20 bp, Artificial Sequence
  Description of Artificial Sequence: Synthetic oligonucleotide
  Target: LAMA2; (-) strand; PAM type: NNGRRT; PAM sequence: CTGGAT
gggagatgtatgagaaagtg

SEQ ID NO: 23603 - DNA, 20 bp, Artificial Sequence
  Description of Artificial Sequence: Synthetic oligonucleotide
  Target: LAMA2; (-) strand; PAM type: NNGRRT; PAM sequence: GTGGGT
aggacacagagttggaagat

SEQ ID NO: 23604 - DNA, 20 bp, Artificial Sequence
  Description of Artificial Sequence: Synthetic oligonucleotide
  Target: LAMA2; (-) strand; PAM type: NNGRRT; PAM sequence: CAGAGT
aatgaaatcactataggaca

SEQ ID NO: 23605 - DNA, 20 bp, Artificial Sequence
  Description of Artificial Sequence: Synthetic oligonucleotide
  Target: LAMA2; (-) strand; PAM type: NNGRRT; PAM sequence: CAGAGT
ccagaataaaaatcgcaggg

SEQ ID NO: 23606 - DNA, 20 bp, Artificial Sequence
  Description of Artificial Sequence: Synthetic oligonucleotide
  Target: LAMA2; (-) strand; PAM type: NNGRRT; PAM sequence: CAGAAT
tggcacaagatagatatatc

SEQ ID NO: 23607 - DNA, 20 bp, Artificial Sequence
  Description of Artificial Sequence: Synthetic oligonucleotide
  Target: LAMA2; (-) strand; PAM type: NNGRRT; PAM sequence: AAGGGT
aatggaagcagcagagtagc

SEQ ID NO: 23608 - DNA, 20 bp, Artificial Sequence
  Description of Artificial Sequence: Synthetic oligonucleotide
  Target: LAMA2; (-) strand; PAM type: NNGRRT; PAM sequence: CAGAGT
caatgagggaatggaagcag

SEQ ID NO: 23609 - DNA, 20 bp, Artificial Sequence
  Description of Artificial Sequence: Synthetic oligonucleotide
  Target: LAMA2; (-) strand; PAM type: NNGRRT; PAM sequence: GGGAAT
aaaagcaggactcacaatga

SEQ ID NO: 23610 - DNA, 20 bp, Artificial Sequence
  Description of Artificial Sequence: Synthetic oligonucleotide
  Target: LAMA2; (-) strand; PAM type: NNGRRT; PAM sequence: TAGAAT
agagtagaagaaaaatgtgc

SEQ ID NO: 23611 - DNA, 20 bp, Artificial Sequence
  Description of Artificial Sequence: Synthetic oligonucleotide
  Target: LAMA2; (-) strand; PAM type: NNGRRT; PAM sequence: TAGAGT
cctttctcatctcctcctca

SEQ ID NO: 23612 - DNA, 20 bp, Artificial Sequence
  Description of Artificial Sequence: Synthetic oligonucleotide
  Target: LAMA2; (-) strand; PAM type: NNGRRT; PAM sequence: GAGAAT
ttttttacttgtgatttctg

SEQ ID NO: 23613 - DNA, 20 bp, Artificial Sequence
  Description of Artificial Sequence: Synthetic oligonucleotide
  Target: LAMA2; (-) strand; PAM type: NNGRRT; PAM sequence: CTGAAT
atagttaaaagaaaatccaa

SEQ ID NO: 23614 - DNA, 20 bp, Artificial Sequence
  Description of Artificial Sequence: Synthetic oligonucleotide
  Target: LAMA2; (-) strand; PAM type: NNGRRT; PAM sequence: TAGAAT
ttgtaacaagggtgaagaca

SEQ ID NO: 23615 - DNA, 20 bp, Artificial Sequence
  Description of Artificial Sequence: Synthetic oligonucleotide
  Target: LAMA2; (-) strand; PAM type: NNGRRT; PAM sequence: AAGGGT
gattcagtttgaattgtaac

SEQ ID NO: 23616 - DNA, 20 bp, Artificial Sequence
  Description of Artificial Sequence: Synthetic oligonucleotide
  Target: LAMA2; (-) strand; PAM type: NNGRRT; PAM sequence: TTGAAT
aagaactcttgtgattcagt

SEQ ID NO: 23617 - DNA, 20 bp, Artificial Sequence
  Description of Artificial Sequence: Synthetic oligonucleotide
  Target: LAMA2; (-) strand; PAM type: NNGRRT; PAM sequence: AAGAAT
tgagtagaagctattcagag

SEQ ID NO: 23618 - DNA, 20 bp, Artificial Sequence
  Description of Artificial Sequence: Synthetic oligonucleotide
  Target: LAMA2; (-) strand; PAM type: NNGRRT; PAM sequence: ATGAGT
agctttggtgatagaattag

SEQ ID NO: 23619 - DNA, 20 bp, Artificial Sequence
  Description of Artificial Sequence: Synthetic oligonucleotide
  Target: LAMA2; (-) strand; PAM type: NNGRRT; PAM sequence: TAGAAT
acattttgtagctttggtga

SEQ ID NO: 23620 - DNA, 20 bp, Artificial Sequence
  Description of Artificial Sequence: Synthetic oligonucleotide
  Target: LAMA2; (-) strand; PAM type: NNGRRT; PAM sequence: TGGAAT
cctttttctaaagtagtttc

SEQ ID NO: 23621 - DNA, 20 bp, Artificial Sequence
  Description of Artificial Sequence: Synthetic oligonucleotide
  Target: LAMA2; (-) strand; PAM type: NNGRRT; PAM sequence: AAGAAT
ttattcagaagactgacctg

SEQ ID NO: 23622 - DNA, 20 bp, Artificial Sequence
  Description of Artificial Sequence: Synthetic oligonucleotide
  Target: LAMA2; (-) strand; PAM type: NNGRRT; PAM sequence: CTGGGT
cattaatttgaagggtatcc

SEQ ID NO: 23623 - DNA, 20 bp, Artificial Sequence
  Description of Artificial Sequence: Synthetic oligonucleotide
  Target: LAMA2; (-) strand; PAM type: NNGRRT; PAM sequence: AAGGGT
tgagaaagatcattaatttg

SEQ ID NO: 23624 - DNA, 20 bp, Artificial Sequence
  Description of Artificial Sequence: Synthetic oligonucleotide
  Target: LAMA2; (-) strand; PAM type: NNGRRT; PAM sequence: TTGGAT
ttcatttcttagcttcttga

SEQ ID NO: 23625 - DNA, 20 bp, Artificial Sequence
  Description of Artificial Sequence: Synthetic oligonucleotide
  Target: LAMA2; (-) strand; PAM type: NNGRRT; PAM sequence: GAGAAT
gatatctatacaaattcttt

SEQ ID NO: 23626 - DNA, 20 bp, Artificial Sequence
  Description of Artificial Sequence: Synthetic oligonucleotide
  Target: LAMA2; (-) strand; PAM type: NNGRRT; PAM sequence: TTGGAT
tttatactaaaataaaatct

SEQ ID NO: 23627 - DNA, 20 bp, Artificial Sequence
  Description of Artificial Sequence: Synthetic oligonucleotide
  Target: LAMA2; (-) strand; PAM type: NNGRRT; PAM sequence: TTGGAT
aaaatatactttccaagtaa

SEQ ID NO: 23628 - DNA, 20 bp, Artificial Sequence
  Description of Artificial Sequence: Synthetic oligonucleotide
  Target: LAMA2; (-) strand; PAM type: NNGRRT; PAM sequence: AAGGGT
gattcactccacttcatata

SEQ ID NO: 23629 - DNA, 20 bp, Artificial Sequence
  Description of Artificial Sequence: Synthetic oligonucleotide
  Target: LAMA2; (-) strand; PAM type: NNGRRT; PAM sequence: AAGAGT
atcggtgtctggatgtgaag

SEQ ID NO: 23630 - DNA, 20 bp, Artificial Sequence
  Description of Artificial Sequence: Synthetic oligonucleotide
  Target: LAMA2; (-) strand; PAM type: NNGRRT; PAM sequence: CTGGAT
ggattctgaactatcggtgt

SEQ ID NO: 23631 - DNA, 20 bp, Artificial Sequence
  Description of Artificial Sequence: Synthetic oligonucleotide
  Target: LAMA2; (-) strand; PAM type: NNGRRT; PAM sequence: GAGGAT
aagggaaaggtggatagatg

SEQ ID NO: 23632 - DNA, 20 bp, Artificial Sequence
  Description of Artificial Sequence: Synthetic oligonucleotide
  Target: LAMA2; (-) strand; PAM type: NNGRRT; PAM sequence: GTGGAT
gaagaatagcaaagggaaag

SEQ ID NO: 23633 - DNA, 20 bp, Artificial Sequence
  Description of Artificial Sequence: Synthetic oligonucleotide
  Target: LAMA2; (-) strand; PAM type: NNGRRT; PAM sequence: AAGAAT
tttgttggcctgcatctgtg

SEQ ID NO: 23634 - DNA, 20 bp, Artificial Sequence
  Description of Artificial Sequence: Synthetic oligonucleotide
  Target: LAMA2; (-) strand; PAM type: NNGRRT; PAM sequence: AAGAAT
gtgggagagaatacgcccca

SEQ ID NO: 23635 - DNA, 20 bp, Artificial Sequence
  Description of Artificial Sequence: Synthetic oligonucleotide
  Target: LAMA2; (-) strand; PAM type: NNGRRT; PAM sequence: GAGAAT
cccagagaaggcaggtggga

SEQ ID NO: 23636 - DNA, 20 bp, Artificial Sequence
  Description of Artificial Sequence: Synthetic oligonucleotide
  Target: LAMA2; (-) strand; PAM type: NNGRRT; PAM sequence: AAGAAT
cttaaaccacctaactgggg

SEQ ID NO: 23637 - DNA, 20 bp, Artificial Sequence
  Description of Artificial Sequence: Synthetic oligonucleotide
  Target: LAMA2; (-) strand; PAM type: NNGRRT; PAM sequence: ATGAAT
atagtgggtagaaactggga

SEQ ID NO: 23638 - DNA, 20 bp, Artificial Sequence
  Description of Artificial Sequence: Synthetic oligonucleotide
  Target: LAMA2; (-) strand; PAM type: NNGRRT; PAM sequence: GGGAAT
attaatagtgggtagaaact

SEQ ID NO: 23639 - DNA, 20 bp, Artificial Sequence
  Description of Artificial Sequence: Synthetic oligonucleotide
  Target: LAMA2; (-) strand; PAM type: NNGRRT; PAM sequence: GTGGGT
aacctttacagtaattaata

SEQ ID NO: 23640 - DNA, 20 bp, Artificial Sequence
  Description of Artificial Sequence: Synthetic oligonucleotide
  Target: LAMA2; (-) strand; PAM type: NNGRRT; PAM sequence: CTGGGT
atggtaggggctggtgggag

SEQ ID NO: 23641 - DNA, 20 bp, Artificial Sequence
  Description of Artificial Sequence: Synthetic oligonucleotide
  Target: LAMA2; (-) strand; PAM type: NNGRRT; PAM sequence: ATGGAT
aaagaagtagatgagcggat

SEQ ID NO: 23642 - DNA, 20 bp, Artificial Sequence
  Description of Artificial Sequence: Synthetic oligonucleotide
  Target: LAMA2; (-) strand; PAM type: NNGRRT; PAM sequence: GCGGAT
ctataaaaagaagtagatga

SEQ ID NO: 23643 - DNA, 20 bp, Artificial Sequence
  Description of Artificial Sequence: Synthetic oligonucleotide
  Target: LAMA2; (-) strand; PAM type: NNGRRT; PAM sequence: GGGAAT
tgtaataaaaaaaaggaggg

SEQ ID NO: 23644 - DNA, 20 bp, Artificial Sequence
  Description of Artificial Sequence: Synthetic oligonucleotide
  Target: LAMA2; (-) strand; PAM type: NNGRRT; PAM sequence: GGGGAT
cctgtaaaagatttatcttt

SEQ ID NO: 23645 - DNA, 20 bp, Artificial Sequence
  Description of Artificial Sequence: Synthetic oligonucleotide
  Target: LAMA2; (-) strand; PAM type: NNGRRT; PAM sequence: TAGAAT
gagcaagttaataagtttat

SEQ ID NO: 23646 - DNA, 20 bp, Artificial Sequence
  Description of Artificial Sequence: Synthetic oligonucleotide
  Target: LAMA2; (-) strand; PAM type: NNGRRT; PAM sequence: AAGAGT
tgataatgccaagtgttcac

SEQ ID NO: 23647 - DNA, 20 bp, Artificial Sequence
  Description of Artificial Sequence: Synthetic oligonucleotide
  Target: LAMA2; (-) strand; PAM type: NNGRRT; PAM sequence: AAGAAT
aaggataatgaggaaaatat

SEQ ID NO: 23648 - DNA, 20 bp, Artificial Sequence
  Description of Artificial Sequence: Synthetic oligonucleotide
  Target: LAMA2; (-) strand; PAM type: NNGRRT; PAM sequence: AAGGAT
gcaaagtgttccatattttt

SEQ ID NO: 23649 - DNA, 20 bp, Artificial Sequence
  Description of Artificial Sequence: Synthetic oligonucleotide
  Target: LAMA2; (-) strand; PAM type: NNGRRT; PAM sequence: TAGAAT
caagttgtaattattcagag

SEQ ID NO: 23650 - DNA, 20 bp, Artificial Sequence
  Description of Artificial Sequence: Synthetic oligonucleotide
  Target: LAMA2; (-) strand; PAM type: NNGRRT; PAM sequence: CAGAGT
ataaccaagttgtaattatt

SEQ ID NO: 23651 - DNA, 20 bp, Artificial Sequence
  Description of Artificial Sequence: Synthetic oligonucleotide
  Target: LAMA2; (-) strand; PAM type: NNGRRT; PAM sequence: TTGGGT
ctagggattagtagagcatt

SEQ ID NO: 23652 - DNA, 20 bp, Artificial Sequence
  Description of Artificial Sequence: Synthetic oligonucleotide
  Target: LAMA2; (-) strand; PAM type: NNGRRT; PAM sequence: AGGGAT
aaggattgatagtcaaaact

SEQ ID NO: 23653 - DNA, 20 bp, Artificial Sequence
  Description of Artificial Sequence: Synthetic oligonucleotide
  Target: LAMA2; (-) strand; PAM type: NNGRRT; PAM sequence: AAGGAT
gctaactactgcattctacc

SEQ ID NO: 23654 - DNA, 20 bp, Artificial Sequence
  Description of Artificial Sequence: Synthetic oligonucleotide
  Target: LAMA2; (-) strand; PAM type: NNGRRT; PAM sequence: TTGAGT
gaaattgagacttagagaag

SEQ ID NO: 23655 - DNA, 20 bp, Artificial Sequence
  Description of Artificial Sequence: Synthetic oligonucleotide
  Target: LAMA2; (-) strand; PAM type: NNGRRT; PAM sequence: GTGGGT
tttagtgttcttcagtttca

SEQ ID NO: 23656 - DNA, 20 bp, Artificial Sequence
  Description of Artificial Sequence: Synthetic oligonucleotide
  Target: LAMA2; (-) strand; PAM type: NNGRRT; PAM sequence: TTGAAT
agagtaatgcctgacaagca

SEQ ID NO: 23657 - DNA, 20 bp, Artificial Sequence
  Description of Artificial Sequence: Synthetic oligonucleotide
  Target: LAMA2; (-) strand; PAM type: NNGRRT; PAM sequence: AAGAGT
aggatggacaagtatttagt

SEQ ID NO: 23658 - DNA, 20 bp, Artificial Sequence
  Description of Artificial Sequence: Synthetic oligonucleotide
  Target: LAMA2; (-) strand; PAM type: NNGRRT; PAM sequence: TAGGAT
ttgttctagtccctcctgga

SEQ ID NO: 23659 - DNA, 20 bp, Artificial Sequence
  Description of Artificial Sequence: Synthetic oligonucleotide
  Target: LAMA2; (-) strand; PAM type: NNGRRT; PAM sequence: CTGGAT
agaagttgttctagtccctc

SEQ ID NO: 23660 - DNA, 20 bp, Artificial Sequence
  Description of Artificial Sequence: Synthetic oligonucleotide
  Target: LAMA2; (-) strand; PAM type: NNGRRT; PAM sequence: CAGAGT
tgcaacatgtaaatacaaga

SEQ ID NO: 23661 - DNA, 20 bp, Artificial Sequence
  Description of Artificial Sequence: Synthetic oligonucleotide
  Target: LAMA2; (-) strand; PAM type: NNGRRT; PAM sequence: CTGGAT
atattatttacctctcttga

SEQ ID NO: 23662 - DNA, 20 bp, Artificial Sequence
  Description of Artificial Sequence: Synthetic oligonucleotide
  Target: LAMA2; (-) strand; PAM type: NNGRRT; PAM sequence: TGGAGT
aatatatcttaagactgaaa

SEQ ID NO: 23663 - DNA, 20 bp, Artificial Sequence
  Description of Artificial Sequence: Synthetic oligonucleotide
  Target: LAMA2; (-) strand; PAM type: NNGRRT; PAM sequence: AAGAGT
aattcgagtacaacaatata

SEQ ID NO: 23664 - DNA, 20 bp, Artificial Sequence
  Description of Artificial Sequence: Synthetic oligonucleotide
  Target: LAMA2; (-) strand; PAM type: NNGRRT; PAM sequence: TCGAGT
agtaactaagcagtttaaat

SEQ ID NO: 23665 - DNA, 20 bp, Artificial Sequence
  Description of Artificial Sequence: Synthetic oligonucleotide
  Target: LAMA2; (-) strand; PAM type: NNGRRT; PAM sequence: TTGGGT
gaaaacaatatttttacaaa

SEQ ID NO: 23666 - DNA, 20 bp, Artificial Sequence
  Description of Artificial Sequence: Synthetic oligonucleotide
  Target: LAMA2; (-) strand; PAM type: NNGRRT; PAM sequence: CAGAAT
tctcagatatgattgtttag

SEQ ID NO: 23667 - DNA, 20 bp, Artificial Sequence
  Description of Artificial Sequence: Synthetic oligonucleotide
  Target: LAMA2; (-) strand; PAM type: NNGRRT; PAM sequence: TTGGAT
tttattaccaaaatgaatca

SEQ ID NO: 23668 - DNA, 20 bp, Artificial Sequence
  Description of Artificial Sequence: Synthetic oligonucleotide
  Target: LAMA2; (-) strand; PAM type: NNGRRT; PAM sequence: ATGAAT
taaaaacttttattaccaaa

SEQ ID NO: 23669 - DNA, 20 bp, Artificial Sequence
  Description of Artificial Sequence: Synthetic oligonucleotide
  Target: LAMA2; (-) strand; PAM type: NNGRRT; PAM sequence: AAGAAT
ctatagagaagaaacctcca

SEQ ID NO: 23670 - DNA, 20 bp, Artificial Sequence
  Description of Artificial Sequence: Synthetic oligonucleotide
  Target: LAMA2; (-) strand; PAM type: NNGRRT; PAM sequence: TTGGAT
tttttattatcattgaatta

SEQ ID NO: 23671 - DNA, 20 bp, Artificial Sequence
  Description of Artificial Sequence: Synthetic oligonucleotide
  Target: LAMA2; (-) strand; PAM type: NNGRRT; PAM sequence: TTGAAT
aatatgtgtttttattatca

SEQ ID NO: 23672 - DNA, 20 bp, Artificial Sequence
  Description of Artificial Sequence: Synthetic oligonucleotide
  Target: LAMA2; (-) strand; PAM type: NNGRRT; PAM sequence: TTGGAT
tatcatccctgagcttatac

SEQ ID NO: 23673 - DNA, 20 bp, Artificial Sequence
  Description of Artificial Sequence: Synthetic oligonucleotide
  Target: LAMA2; (-) strand; PAM type: NNGRRT; PAM sequence: AAGGAT
tgcgaataaaaaacaaaaaa

SEQ ID NO: 23674 - DNA, 20 bp, Artificial Sequence
  Description of Artificial Sequence: Synthetic oligonucleotide
  Target: LAMA2; (-) strand; PAM type: NNGRRT; PAM sequence: GCGAAT
ttagatggtcttcattttct

SEQ ID NO: 23675 - DNA, 20 bp, Artificial Sequence
  Description of Artificial Sequence: Synthetic oligonucleotide
  Target: LAMA2; (-) strand; PAM type: NNGRRT; PAM sequence: TGGAAT
tgtcctgaatgcttaccatt

SEQ ID NO: 23676 - DNA, 20 bp, Artificial Sequence
  Description of Artificial Sequence: Synthetic oligonucleotide
  Target: LAMA2; (-) strand; PAM type: NNGRRT; PAM sequence: CTGAAT
ctgacacagttggtagtgtc

SEQ ID NO: 23677 - DNA, 20 bp, Artificial Sequence
  Description of Artificial Sequence: Synthetic oligonucleotide
  Target: LAMA2; (-) strand; PAM type: NNGRRT; PAM sequence: CAGAAT
taatttccagataatagtac

SEQ ID NO: 23678 - DNA, 20 bp, Artificial Sequence
  Description of Artificial Sequence: Synthetic oligonucleotide
  Target: LAMA2; (-) strand; PAM type: NNGRRT; PAM sequence: ATGAGT
attctcacaaagaagaattc

SEQ ID NO: 23679 - DNA, 20 bp, Artificial Sequence
  Description of Artificial Sequence: Synthetic oligonucleotide
  Target: LAMA2; (-) strand; PAM type: NNGRRT; PAM sequence: AAGAAT
agtttctcattctcacaaag

SEQ ID NO: 23680 - DNA, 20 bp, Artificial Sequence
  Description of Artificial Sequence: Synthetic oligonucleotide
  Target: LAMA2; (-) strand; PAM type: NNGRRT; PAM sequence: AAGGAT
cctttctgtaacacattcct

SEQ ID NO: 23681 - DNA, 20 bp, Artificial Sequence
  Description of Artificial Sequence: Synthetic oligonucleotide
  Target: LAMA2; (-) strand; PAM type: NNGRRT; PAM sequence: ATGAGT
tcccctgccaatactgaagg

SEQ ID NO: 23682 - DNA, 20 bp, Artificial Sequence
  Description of Artificial Sequence: Synthetic oligonucleotide
  Target: LAMA2; (-) strand; PAM type: NNGRRT; PAM sequence: AAGGAT
ccaatcccctgccaatactg

SEQ ID NO: 23683 - DNA, 20 bp, Artificial Sequence
  Description of Artificial Sequence: Synthetic oligonucleotide
  Target: LAMA2; (-) strand; PAM type: NNGRRT; PAM sequence: GGGGGT
gaattttgatatctgtgggg

SEQ ID NO: 23684 - DNA, 20 bp, Artificial Sequence
  Description of Artificial Sequence: Synthetic oligonucleotide
  Target: LAMA2; (-) strand; PAM type: NNGRRT; PAM sequence: AAGAAT
taaaagggacttgagtattc

SEQ ID NO: 23685 - DNA, 20 bp, Artificial Sequence
  Description of Artificial Sequence: Synthetic oligonucleotide
  Target: LAMA2; (-) strand; PAM type: NNGRRT; PAM sequence: TTGAGT
tgccattttataaaagggac

SEQ ID NO: 23686 - DNA, 20 bp, Artificial Sequence
  Description of Artificial Sequence: Synthetic oligonucleotide
  Target: LAMA2; (-) strand; PAM type: NNGRRT; PAM sequence: AGGGAT
ttaggtattataaatgatct

SEQ ID NO: 23687 - DNA, 20 bp, Artificial Sequence
  Description of Artificial Sequence: Synthetic oligonucleotide
  Target: LAMA2; (-) strand; PAM type: NNGRRT; PAM sequence: AAGAAT
tttcataaacaatacactgt

SEQ ID NO: 23688 - DNA, 20 bp, Artificial Sequence
  Description of Artificial Sequence: Synthetic oligonucleotide
  Target: LAMA2; (-) strand; PAM type: NNGRRT; PAM sequence: TTGGAT
aaccttggagagttggatat

SEQ ID NO: 23689 - DNA, 20 bp, Artificial Sequence
  Description of Artificial Sequence: Synthetic oligonucleotide
  Target: LAMA2; (-) strand; PAM type: NNGRRT; PAM sequence: TTGGAT
attcaaccaaccttggagag

SEQ ID NO: 23690 - DNA, 20 bp, Artificial Sequence
  Description of Artificial Sequence: Synthetic oligonucleotide
  Target: LAMA2; (-) strand; PAM type: NNGRRT; PAM sequence: GAGAGT
tgtaaattcaaccaaccttg

SEQ ID NO: 23691 - DNA, 20 bp, Artificial Sequence
  Description of Artificial Sequence: Synthetic oligonucleotide
  Target: LAMA2; (-) strand; PAM type: NNGRRT; PAM sequence: GAGAAT
gaaattgaattttatcaaga

SEQ ID NO: 23692 - DNA, 20 bp, Artificial Sequence
  Description of Artificial Sequence: Synthetic oligonucleotide
  Target: LAMA2; (-) strand; PAM type: NNGRRT; PAM sequence: TTGAAT
agttggaatagttaaagaaa

SEQ ID NO: 23693 - DNA, 20 bp, Artificial Sequence
  Description of Artificial Sequence: Synthetic oligonucleotide
  Target: LAMA2; (-) strand; PAM type: NNGRRT; PAM sequence: TGGAAT
ccactaatgtttttgaaagt

SEQ ID NO: 23694 - DNA, 20 bp, Artificial Sequence
  Description of Artificial Sequence: Synthetic oligonucleotide
  Target: LAMA2; (-) strand; PAM type: NNGRRT; PAM sequence: GAGGAT
gtttttgctccaattggtat

SEQ ID NO: 23695 - DNA, 20 bp, Artificial Sequence
  Description of Artificial Sequence: Synthetic oligonucleotide
  Target: LAMA2; (-) strand; PAM type: NNGRRT; PAM sequence: CTGAAT
aaagtagtgaagtgactatt

SEQ ID NO: 23696 - DNA, 20 bp, Artificial Sequence
  Description of Artificial Sequence: Synthetic oligonucleotide
  Target: LAMA2; (-) strand; PAM type: NNGRRT; PAM sequence: ATGAAT
tcagtaggttctgtatctgt

SEQ ID NO: 23697 - DNA, 20 bp, Artificial Sequence
  Description of Artificial Sequence: Synthetic oligonucleotide
  Target: LAMA2; (-) strand; PAM type: NNGRRT; PAM sequence: GGGGAT
ctgtttctcacctgtaaagt

SEQ ID NO: 23698 - DNA, 20 bp, Artificial Sequence
  Description of Artificial Sequence: Synthetic oligonucleotide
  Target: LAMA2; (-) strand; PAM type: NNGRRT; PAM sequence: TGGGGT
taggctctgaaatcaaactg

SEQ ID NO: 23699 - DNA, 20 bp, Artificial Sequence
  Description of Artificial Sequence: Synthetic oligonucleotide
  Target: LAMA2; (-) strand; PAM type: NNGRRT; PAM sequence: TAGGAT
aaactaacgtattttcattt

SEQ ID NO: 23700 - DNA, 20 bp, Artificial Sequence
  Description of Artificial Sequence: Synthetic oligonucleotide
  Target: LAMA2; (-) strand; PAM type: NNGRRT; PAM sequence: GGGGGT
agcagggcaggggttggggt

SEQ ID NO: 23701 - DNA, 20 bp, Artificial Sequence
  Description of Artificial Sequence: Synthetic oligonucleotide
  Target: LAMA2; (-) strand; PAM type: NNGRRT; PAM sequence: TGGGGT
ttccaaagcagggcaggggt

SEQ ID NO: 23702 - DNA, 20 bp, Artificial Sequence
  Description of Artificial Sequence: Synthetic oligonucleotide
  Target: LAMA2; (-) strand; PAM type: NNGRRT; PAM sequence: AGGGGT
ctgcatttccaaagcagggc

SEQ ID NO: 23703 - DNA, 20 bp, Artificial Sequence
  Description of Artificial Sequence: Synthetic oligonucleotide
  Target: LAMA2; (-) strand; PAM type: NNGRRT; PAM sequence: ATGAAT
ttttctcagggacttttgct

SEQ ID NO: 23704 - DNA, 20 bp, Artificial Sequence
  Description of Artificial Sequence: Synthetic oligonucleotide
  Target: LAMA2; (-) strand; PAM type: NNGRRT; PAM sequence: TGGAGT
gaaaaacaaaacaaagggtg

SEQ ID NO: 23705 - DNA, 20 bp, Artificial Sequence
  Description of Artificial Sequence: Synthetic oligonucleotide
  Target: LAMA2; (-) strand; PAM type: NNGRRT; PAM sequence: AAGGGT
agggtatgaaaaacaaaaca

SEQ ID NO: 23706 - DNA, 20 bp, Artificial Sequence
  Description of Artificial Sequence: Synthetic oligonucleotide
  Target: LAMA2; (-) strand; PAM type: NNGRRT; PAM sequence: GAGGGT
agctgtatctgtcagcagat

SEQ ID NO: 23707 - DNA, 20 bp, Artificial Sequence
  Description of Artificial Sequence: Synthetic oligonucleotide
  Target: LAMA2; (-) strand; PAM type: NNGRRT; PAM sequence: AAGGAT
ggagatcttactgttcttgg

SEQ ID NO: 23708 - DNA, 20 bp, Artificial Sequence
  Description of Artificial Sequence: Synthetic oligonucleotide
  Target: LAMA2; (-) strand; PAM type: NNGRRT; PAM sequence: TGGGAT
aactcgagcatttacaggtc

SEQ ID NO: 23709 - DNA, 20 bp, Artificial Sequence
  Description of Artificial Sequence: Synthetic oligonucleotide
  Target: LAMA2; (-) strand; PAM type: NNGRRT; PAM sequence: GAGGGT
aaggcagactacaccaccat

SEQ ID NO: 23710 - DNA, 20 bp, Artificial Sequence
  Description of Artificial Sequence: Synthetic oligonucleotide
  Target: LAMA2; (-) strand; PAM type: NNGRRT; PAM sequence: TTGGAT
ccggggcagagctagaagac

SEQ ID NO: 23711 - DNA, 20 bp, Artificial Sequence
  Description of Artificial Sequence: Synthetic oligonucleotide
  Target: LAMA2; (-) strand; PAM type: NNGRRT; PAM sequence: GAGAAT
ctgaatgttaggcacacctt

SEQ ID NO: 23712 - DNA, 20 bp, Artificial Sequence
  Description of Artificial Sequence: Synthetic oligonucleotide
  Target: LAMA2; (-) strand; PAM type: NNGRRT; PAM sequence: CTGAAT
aagtgttttgcatctctctg

SEQ ID NO: 23713 - DNA, 20 bp, Artificial Sequence
  Description of Artificial Sequence: Synthetic oligonucleotide
  Target: LAMA2; (-) strand; PAM type: NNGRRT; PAM sequence: ACGGAT
ctgtgtttttaattacacac

SEQ ID NO: 23714 - DNA, 20 bp, Artificial Sequence
  Description of Artificial Sequence: Synthetic oligonucleotide
  Target: LAMA2; (-) strand; PAM type: NNGRRT; PAM sequence: GAGGAT
catgacacttcgccagttct

SEQ ID NO: 23715 - DNA, 20 bp, Artificial Sequence
  Description of Artificial Sequence: Synthetic oligonucleotide
  Target: LAMA2; (-) strand; PAM type: NNGRRT; PAM sequence: TGGAAT
tcccagaaatgtgatgtaac

SEQ ID NO: 23716 - DNA, 20 bp, Artificial Sequence
  Description of Artificial Sequence: Synthetic oligonucleotide
  Target: LAMA2; (-) strand; PAM type: NNGRRT; PAM sequence: GTGAAT
ttatataatatataagagat

SEQ ID NO: 23717 - DNA, 20 bp, Artificial Sequence
  Description of Artificial Sequence: Synthetic oligonucleotide
  Target: LAMA2; (-) strand; PAM type: NNGRRT; PAM sequence: TCGAAT
ctatggtgcccaggctggtc

SEQ ID NO: 23718 - DNA, 20 bp, Artificial Sequence
  Description of Artificial Sequence: Synthetic oligonucleotide
  Target: LAMA2; (-) strand; PAM type: NNGRRT; PAM sequence: TGGGGT
ttttaaattttttgtaaaga

SEQ ID NO: 23719 - DNA, 20 bp, Artificial Sequence
  Description of Artificial Sequence: Synthetic oligonucleotide
  Target: LAMA2; (-) strand; PAM type: NNGRRT; PAM sequence: AGGGAT
gcctcacccttctgggttca

SEQ ID NO: 23720 - DNA, 20 bp, Artificial Sequence
  Description of Artificial Sequence: Synthetic oligonucleotide
  Target: LAMA2; (-) strand; PAM type: NNGRRT; PAM sequence: CTGGGT
ctcactgcagcctcaccctt

SEQ ID NO: 23721 - DNA, 20 bp, Artificial Sequence
  Description of Artificial Sequence: Synthetic oligonucleotide
  Target: LAMA2; (-) strand; PAM type: NNGRRT; PAM sequence: TGGAGT
tctcaatctgccacccaggc

SEQ ID NO: 23722 - DNA, 20 bp, Artificial Sequence
  Description of Artificial Sequence: Synthetic oligonucleotide
  Target: LAMA2; (-) strand; PAM type: NNGRRT; PAM sequence: AAGGAT
ctttggtgaaaccatgtaac

SEQ ID NO: 23723 - DNA, 20 bp, Artificial Sequence
  Description of Artificial Sequence: Synthetic oligonucleotide
  Target: LAMA2; (-) strand; PAM type: NNGRRT; PAM sequence: TTGAAT
attccccactcaaacagcat

SEQ ID NO: 23724 - DNA, 20 bp, Artificial Sequence
  Description of Artificial Sequence: Synthetic oligonucleotide
  Target: LAMA2; (-) strand; PAM type: NNGRRT; PAM sequence: TAGGAT
cataggatttgatttgaggc

SEQ ID NO: 23725 - DNA, 20 bp, Artificial Sequence
  Description of Artificial Sequence: Synthetic oligonucleotide
  Target: LAMA2; (-) strand; PAM type: NNGRRT; PAM sequence: TAGGAT
ctattatatcatagcatcca

SEQ ID NO: 23726 - DNA, 20 bp, Artificial Sequence
  Description of Artificial Sequence: Synthetic oligonucleotide
  Target: LAMA2; (-) strand; PAM type: NNGRRT; PAM sequence: AGGAGT
gtactcttccttgctcatga

SEQ ID NO: 23727 - DNA, 20 bp, Artificial Sequence
  Description of Artificial Sequence: Synthetic oligonucleotide
  Target: LAMA2; (-) strand; PAM type: NNGRRT; PAM sequence: GGGAAT
tgttttcattcatttttagt

SEQ ID NO: 23728 - DNA, 20 bp, Artificial Sequence
  Description of Artificial Sequence: Synthetic oligonucleotide
  Target: LAMA2; (-) strand; PAM type: NNGRRT; PAM sequence: ATGGGT
agggtcaggaaaaataacta

SEQ ID NO: 23729 - DNA, 20 bp, Artificial Sequence
  Description of Artificial Sequence: Synthetic oligonucleotide
  Target: LAMA2; (-) strand; PAM type: NNGRRT; PAM sequence: GAGGGT
gtggagagcaggaggaggga

SEQ ID NO: 23730 - DNA, 20 bp, Artificial Sequence
  Description of Artificial Sequence: Synthetic oligonucleotide
  Target: LAMA2; (-) strand; PAM type: NNGRRT; PAM sequence: GAGGGT
aatagaatggaattcttttg

SEQ ID NO: 23731 - DNA, 20 bp, Artificial Sequence
  Description of Artificial Sequence: Synthetic oligonucleotide
  Target: LAMA2; (-) strand; PAM type: NNGRRT; PAM sequence: TGGAAT
agaatcaatctaaaatagaa

SEQ ID NO: 23732 - DNA, 20 bp, Artificial Sequence
  Description of Artificial Sequence: Synthetic oligonucleotide
  Target: LAMA2; (-) strand; PAM type: NNGRRT; PAM sequence: TAGAAT
agttgagaatcaatctaaaa

SEQ ID NO: 23733 - DNA, 20 bp, Artificial Sequence
  Description of Artificial Sequence: Synthetic oligonucleotide
  Target: LAMA2; (-) strand; PAM type: NNGRRT; PAM sequence: GAGAAT
acaaaaggccactaccagtt

SEQ ID NO: 23734 - DNA, 20 bp, Artificial Sequence
  Description of Artificial Sequence: Synthetic oligonucleotide
  Target: LAMA2; (-) strand; PAM type: NNGRRT; PAM sequence: TAGGAT
ctatttctcataatagagga

SEQ ID NO: 23735 - DNA, 20 bp, Artificial Sequence
  Description of Artificial Sequence: Synthetic oligonucleotide
  Target: LAMA2; (-) strand; PAM type: NNGRRT; PAM sequence: GAGGAT
attaactatttctcataata

SEQ ID NO: 23736 - DNA, 20 bp, Artificial Sequence
  Description of Artificial Sequence: Synthetic oligonucleotide
  Target: LAMA2; (-) strand; PAM type: NNGRRT; PAM sequence: AAGAAT
attaatactgtaacagtgga

SEQ ID NO: 23737 - DNA, 20 bp, Artificial Sequence
  Description of Artificial Sequence: Synthetic oligonucleotide
  Target: LAMA2; (-) strand; PAM type: NNGRRT; PAM sequence: TAGAGT
acctcccaaatttctggggt

SEQ ID NO: 23738 - DNA, 20 bp, Artificial Sequence
  Description of Artificial Sequence: Synthetic oligonucleotide
  Target: LAMA2; (-) strand; PAM type: NNGRRT; PAM sequence: TGGGGT
accttgacctcccaaatttc

SEQ ID NO: 23739 - DNA, 20 bp, Artificial Sequence
  Description of Artificial Sequence: Synthetic oligonucleotide
  Target: LAMA2; (-) strand; PAM type: NNGRRT; PAM sequence: TAGAGT
atttttcctttttgtagaga

SEQ ID NO: 23740 - DNA, 20 bp, Artificial Sequence
  Description of Artificial Sequence: Synthetic oligonucleotide
  Target: LAMA2; (-) strand; PAM type: NNGRRT; PAM sequence: GTGAAT
taagtcattcgtgtgttggg

SEQ ID NO: 23741 - DNA, 20 bp, Artificial Sequence
  Description of Artificial Sequence: Synthetic oligonucleotide
  Target: LAMA2; (-) strand; PAM type: NNGRRT; PAM sequence: TGGGGT
caattaagtcattcgtgtgt

SEQ ID NO: 23742 - DNA, 20 bp, Artificial Sequence
  Description of Artificial Sequence: Synthetic oligonucleotide
  Target: LAMA2; (-) strand; PAM type: NNGRRT; PAM sequence: GTGGGT
agaggaaaaagtgagcttca

SEQ ID NO: 23743 - DNA, 20 bp, Artificial Sequence
  Description of Artificial Sequence: Synthetic oligonucleotide
  Target: LAMA2; (-) strand; PAM type: NNGRRT; PAM sequence: GAGAAT
aatataattctacagaagtt

SEQ ID NO: 23744 - DNA, 20 bp, Artificial Sequence
  Description of Artificial Sequence: Synthetic oligonucleotide
  Target: LAMA2; (-) strand; PAM type: NNGRRT; PAM sequence: TGGGAT
ttgactttcaatttaaactg

SEQ ID NO: 23745 - DNA, 20 bp, Artificial Sequence
  Description of Artificial Sequence: Synthetic oligonucleotide
  Target: LAMA2; (-) strand; PAM type: NNGRRT; PAM sequence: TAGAAT
agtcagcaaagttgattgtt

SEQ ID NO: 23746 - DNA, 20 bp, Artificial Sequence
  Description of Artificial Sequence: Synthetic oligonucleotide
  Target: LAMA2; (-) strand; PAM type: NNGRRT; PAM sequence: AGGAGT
atttttaatctatattccta

SEQ ID NO: 23747 - DNA, 20 bp, Artificial Sequence
  Description of Artificial Sequence: Synthetic oligonucleotide
  Target: LAMA2; (-) strand; PAM type: NNGRRT; PAM sequence: CTGGAT
cttcctgaaatgcatgttat

SEQ ID NO: 23748 - DNA, 20 bp, Artificial Sequence
  Description of Artificial Sequence: Synthetic oligonucleotide
  Target: LAMA2; (-) strand; PAM type: NNGRRT; PAM sequence: CTGAGT
tagatttgctatatcaagaa

SEQ ID NO: 23749 - DNA, 20 bp, Artificial Sequence
  Description of Artificial Sequence: Synthetic oligonucleotide
  Target: LAMA2; (-) strand; PAM type: NNGRRT; PAM sequence: ACGAAT
ctgagaactaaccctcagga

SEQ ID NO: 23750 - DNA, 20 bp, Artificial Sequence
  Description of Artificial Sequence: Synthetic oligonucleotide
  Target: LAMA2; (-) strand; PAM type: NNGRRT; PAM sequence: CTGAAT
gctacatgctgtgttagact

SEQ ID NO: 23751 - DNA, 20 bp, Artificial Sequence
  Description of Artificial Sequence: Synthetic oligonucleotide
  Target: LAMA2; (-) strand; PAM type: NNGRRT; PAM sequence: TGGGAT
taaaccacttattctattgc

SEQ ID NO: 23752 - DNA, 20 bp, Artificial Sequence
  Description of Artificial Sequence: Synthetic oligonucleotide
  Target: LAMA2; (-) strand; PAM type: NNGRRT; PAM sequence: AAGGGT
tttgtaggttaaaaaaaata

SEQ ID NO: 23753 - DNA, 20 bp, Artificial Sequence
  Description of Artificial Sequence: Synthetic oligonucleotide
  Target: LAMA2; (-) strand; PAM type: NNGRRT; PAM sequence: AAGAAT
tgcagttcaatttcattttg

SEQ ID NO: 23754 - DNA, 20 bp, Artificial Sequence
  Description of Artificial Sequence: Synthetic oligonucleotide
  Target: LAMA2; (-) strand; PAM type: NNGRRT; PAM sequence: CAGGGT
agccagaactgtatttaaat

SEQ ID NO: 23755 - DNA, 20 bp, Artificial Sequence
  Description of Artificial Sequence: Synthetic oligonucleotide
  Target: LAMA2; (-) strand; PAM type: NNGRRT; PAM sequence: CAGAAT
agccaaaaagttaaccttta

SEQ ID NO: 23756 - DNA, 20 bp, Artificial Sequence
  Description of Artificial Sequence: Synthetic oligonucleotide
  Target: LAMA2; (-) strand; PAM type: NNGRRT; PAM sequence: GAGAAT
aaaaattagcattgaaggta

SEQ ID NO: 23757 - DNA, 20 bp, Artificial Sequence
  Description of Artificial Sequence: Synthetic oligonucleotide
  Target: LAMA2; (-) strand; PAM type: NNGRRT; PAM sequence: GGGAGT
ttgagactcaagcaggccag

SEQ ID NO: 23758 - DNA, 20 bp, Artificial Sequence
  Description of Artificial Sequence: Synthetic oligonucleotide
  Target: LAMA2; (-) strand; PAM type: NNGRRT; PAM sequence: TAGAAT
cacacgtgcacacacagaat

SEQ ID NO: 23759 - DNA, 20 bp, Artificial Sequence
  Description of Artificial Sequence: Synthetic oligonucleotide
  Target: LAMA2; (-) strand; PAM type: NNGRRT; PAM sequence: CAGAAT
catgcacacacgtgcacaca

SEQ ID NO: 23760 - DNA, 20 bp, Artificial Sequence
  Description of Artificial Sequence: Synthetic oligonucleotide
  Target: LAMA2; (-) strand; PAM type: NNGRRT; PAM sequence: TTGAGT
cctcaagttccttgatgggt

SEQ ID NO: 23761 - DNA, 20 bp, Artificial Sequence
  Description of Artificial Sequence: Synthetic oligonucleotide
  Target: LAMA2; (-) strand; PAM type: NNGRRT; PAM sequence: ATGGGT
ggttatcctcaagttccttg

SEQ ID NO: 23762 - DNA, 20 bp, Artificial Sequence
  Description of Artificial Sequence: Synthetic oligonucleotide
  Target: LAMA2; (-) strand; PAM type: NNGRRT; PAM sequence: CAGAAT
ctgacgataaaaagaactta

SEQ ID NO: 23763 - DNA, 20 bp, Artificial Sequence
  Description of Artificial Sequence: Synthetic oligonucleotide
  Target: LAMA2; (-) strand; PAM type: NNGRRT; PAM sequence: ATGAAT
tggggaaagacattccctct

SEQ ID NO: 23764 - DNA, 20 bp, Artificial Sequence
  Description of Artificial Sequence: Synthetic oligonucleotide
  Target: LAMA2; (-) strand; PAM type: NNGRRT; PAM sequence: GGGAAT
ggacccaagatcattcaacg

SEQ ID NO: 23765 - DNA, 20 bp, Artificial Sequence
  Description of Artificial Sequence: Synthetic oligonucleotide
  Target: LAMA2; (-) strand; PAM type: NNGRRT; PAM sequence: TCGAGT
ccctcctaccccaaatcgct

SEQ ID NO: 23766 - DNA, 20 bp, Artificial Sequence
  Description of Artificial Sequence: Synthetic oligonucleotide
  Target: LAMA2; (-) strand; PAM type: NNGRRT; PAM sequence: CAGAAT
caaatagtaatagaatatac

SEQ ID NO: 23767 - DNA, 20 bp, Artificial Sequence
  Description of Artificial Sequence: Synthetic oligonucleotide
  Target: LAMA2; (-) strand; PAM type: NNGRRT; PAM sequence: TAGAAT
ttattctatgcaaatagtaa

SEQ ID NO: 23768 - DNA, 20 bp, Artificial Sequence
  Description of Artificial Sequence: Synthetic oligonucleotide
  Target: LAMA2; (-) strand; PAM type: NNGRRT; PAM sequence: AAGAAT
ttgttgtttataccagacaa

SEQ ID NO: 23769 - DNA, 20 bp, Artificial Sequence
  Description of Artificial Sequence: Synthetic oligonucleotide
  Target: LAMA2; (-) strand; PAM type: NNGRRT; PAM sequence: TTGGGT
ctatcctagtaaacttctaa

SEQ ID NO: 23770 - DNA, 20 bp, Artificial Sequence
  Description of Artificial Sequence: Synthetic oligonucleotide
  Target: LAMA2; (-) strand; PAM type: NNGRRT; PAM sequence: TTGAGT
actgaggtatctaaaaaggt

SEQ ID NO: 23771 - DNA, 20 bp, Artificial Sequence
  Description of Artificial Sequence: Synthetic oligonucleotide
  Target: LAMA2; (-) strand; PAM type: NNGRRT; PAM sequence: CAGAAT
ttccaaagttgttcaaaaaa

SEQ ID NO: 23772 - DNA, 20 bp, Artificial Sequence
  Description of Artificial Sequence: Synthetic oligonucleotide
  Target: LAMA2; (-) strand; PAM type: NNGRRT; PAM sequence: AAGAAT
agatgtgaataaggaggaaa

SEQ ID NO: 23773 - DNA, 20 bp, Artificial Sequence
  Description of Artificial Sequence: Synthetic oligonucleotide
  Target: LAMA2; (-) strand; PAM type: NNGRRT; PAM sequence: GTGAAT
gttgtttagaagtgttagat

SEQ ID NO: 23774 - DNA, 20 bp, Artificial Sequence
  Description of Artificial Sequence: Synthetic oligonucleotide
  Target: LAMA2; (-) strand; PAM type: NNGRRT; PAM sequence: TGGAGT
tcaccttgaacttactgtct

SEQ ID NO: 23775 - DNA, 20 bp, Artificial Sequence
  Description of Artificial Sequence: Synthetic oligonucleotide
  Target: LAMA2; (-) strand; PAM type: NNGRRT; PAM sequence: GTGAAT
aggttttttttcagtcagtc

SEQ ID NO: 23776 - DNA, 20 bp, Artificial Sequence
  Description of Artificial Sequence: Synthetic oligonucleotide
  Target: LAMA2; (-) strand; PAM type: NNGRRT; PAM sequence: CTGAAT
gcctggctttcatattctag

SEQ ID NO: 23777 - DNA, 20 bp, Artificial Sequence
  Description of Artificial Sequence: Synthetic oligonucleotide
  Target: LAMA2; (-) strand; PAM type: NNGRRT; PAM sequence: GTGAGT
cctactattttataaacttt

SEQ ID NO: 23778 - DNA, 20 bp, Artificial Sequence
  Description of Artificial Sequence: Synthetic oligonucleotide
  Target: LAMA2; (-) strand; PAM type: NNGRRT; PAM sequence: CAGAAT
tttaagtcattccctcttct

SEQ ID NO: 23779 - DNA, 20 bp, Artificial Sequence
  Description of Artificial Sequence: Synthetic oligonucleotide
  Target: LAMA2; (-) strand; PAM type: NNGRRT; PAM sequence: CTGGAT
atctaccccatacactgctt

SEQ ID NO: 23780 - DNA, 20 bp, Artificial Sequence
  Description of Artificial Sequence: Synthetic oligonucleotide
  Target: LAMA2; (-) strand; PAM type: NNGRRT; PAM sequence: TTGGGT
ttctcttgccacagctatag

SEQ ID NO: 23781 - DNA, 20 bp, Artificial Sequence
  Description of Artificial Sequence: Synthetic oligonucleotide
  Target: LAMA2; (-) strand; PAM type: NNGRRT; PAM sequence: AGGAGT
aagttaacattgcaaaatat

SEQ ID NO: 23782 - DNA, 20 bp, Artificial Sequence
  Description of Artificial Sequence: Synthetic oligonucleotide
  Target: LAMA2; (-) strand; PAM type: NNGRRT; PAM sequence: CTGAAT
ggttttatatgcttacatgt

SEQ ID NO: 23783 - DNA, 20 bp, Artificial Sequence
  Description of Artificial Sequence: Synthetic oligonucleotide
  Target: LAMA2; (-) strand; PAM type: NNGRRT; PAM sequence: TGGGAT
gcctcagcctcccaaagtgt

SEQ ID NO: 23784 - DNA, 20 bp, Artificial Sequence
  Description of Artificial Sequence: Synthetic oligonucleotide
  Target: LAMA2; (-) strand; PAM type: NNGRRT; PAM sequence: CTGAGT
cccaggctggtctcaaactc

SEQ ID NO: 23785 - DNA, 20 bp, Artificial Sequence
  Description of Artificial Sequence: Synthetic oligonucleotide
  Target: LAMA2; (-) strand; PAM type: NNGRRT; PAM sequence: TGGAGT
tttctatttgccacccaggc

SEQ ID NO: 23786 - DNA, 20 bp, Artificial Sequence
  Description of Artificial Sequence: Synthetic oligonucleotide
  Target: LAMA2; (-) strand; PAM type: NNGRRT; PAM sequence: CAGGGT
tctttttttttgggggggga

SEQ ID NO: 23787 - DNA, 20 bp, Artificial Sequence
  Description of Artificial Sequence: Synthetic oligonucleotide
  Target: LAMA2; (-) strand; PAM type: NNGRRT; PAM sequence: GGGAAT
ttccatttccaaaactgatt

SEQ ID NO: 23788 - DNA, 20 bp, Artificial Sequence
  Description of Artificial Sequence: Synthetic oligonucleotide
  Target: LAMA2; (-) strand; PAM type: NNGRRT; PAM sequence: CAGAAT
gagtatcagccactcaattt

SEQ ID NO: 23789 - DNA, 20 bp, Artificial Sequence
  Description of Artificial Sequence: Synthetic oligonucleotide
  Target: LAMA2; (-) strand; PAM type: NNGRRT; PAM sequence: AGGAGT
taagtaggtcattcatttaa

SEQ ID NO: 23790 - DNA, 20 bp, Artificial Sequence
  Description of Artificial Sequence: Synthetic oligonucleotide
  Target: LAMA2; (-) strand; PAM type: NNGRRT; PAM sequence: TTGGAT
gtatcccattattatatcta

SEQ ID NO: 23791 - DNA, 20 bp, Artificial Sequence
  Description of Artificial Sequence: Synthetic oligonucleotide
  Target: LAMA2; (-) strand; PAM type: NNGRRT; PAM sequence: TTGAGT
catgatgaactcaaacatta

SEQ ID NO: 23792 - DNA, 20 bp, Artificial Sequence
  Description of Artificial Sequence: Synthetic oligonucleotide
  Target: LAMA2; (-) strand; PAM type: NNGRRT; PAM sequence: TAGAAT
ctgaaattcaaacatccttt

SEQ ID NO: 23793 - DNA, 20 bp, Artificial Sequence
  Description of Artificial Sequence: Synthetic oligonucleotide
  Target: LAMA2; (-) strand; PAM type: NNGRRT; PAM sequence: TAGGAT
gtatctctagaagaaatctt

SEQ ID NO: 23794 - DNA, 20 bp, Artificial Sequence
  Description of Artificial Sequence: Synthetic oligonucleotide
  Target: LAMA2; (-) strand; PAM type: NNGRRT; PAM sequence: TTGAAT
taatcagtagtcttttcctt

SEQ ID NO: 23795 - DNA, 20 bp, Artificial Sequence
  Description of Artificial Sequence: Synthetic oligonucleotide
  Target: LAMA2; (-) strand; PAM type: NNGRRT; PAM sequence: TTGAAT
ctgctttctgttttctggtt

SEQ ID NO: 23796 - DNA, 20 bp, Artificial Sequence
  Description of Artificial Sequence: Synthetic oligonucleotide
  Target: LAMA2; (-) strand; PAM type: NNGRRT; PAM sequence: TTGGAT
cattcatatagaaaatactc

SEQ ID NO: 23797 - DNA, 20 bp, Artificial Sequence
  Description of Artificial Sequence: Synthetic oligonucleotide
  Target: LAMA2; (-) strand; PAM type: NNGRRT; PAM sequence: GAGAAT
ttcccagtctccagaactgt

SEQ ID NO: 23798 - DNA, 20 bp, Artificial Sequence
  Description of Artificial Sequence: Synthetic oligonucleotide
  Target: LAMA2; (-) strand; PAM type: NNGRRT; PAM sequence: AGGGGT
ccactattaaaaaggcttac

SEQ ID NO: 23799 - DNA, 20 bp, Artificial Sequence
  Description of Artificial Sequence: Synthetic oligonucleotide
  Target: LAMA2; (-) strand; PAM type: NNGRRT; PAM sequence: ATGAAT
tgagggctctgtcctcatga

SEQ ID NO: 23800 - DNA, 20 bp, Artificial Sequence
  Description of Artificial Sequence: Synthetic oligonucleotide
  Target: LAMA2; (-) strand; PAM type: NNGRRT; PAM sequence: ATGAAT
gtcatgagggctctgtcctc

SEQ ID NO: 23801 - DNA, 20 bp, Artificial Sequence
  Description of Artificial Sequence: Synthetic oligonucleotide
  Target: LAMA2; (-) strand; PAM type: NNGRRT; PAM sequence: TTGAAT
tacagagtaactgctatggc

SEQ ID NO: 23802 - DNA, 20 bp, Artificial Sequence
  Description of Artificial Sequence: Synthetic oligonucleotide
  Target: LAMA2; (-) strand; PAM type: NNGRRT; PAM sequence: CAGAGT
tatgccggcaattaatccta

SEQ ID NO: 23803 - DNA, 20 bp, Artificial Sequence
  Description of Artificial Sequence: Synthetic oligonucleotide
  Target: LAMA2; (-) strand; PAM type: NNGRRT; PAM sequence: TAGAAT
gttacaaccaatctattgta

SEQ ID NO: 23804 - DNA, 20 bp, Artificial Sequence
  Description of Artificial Sequence: Synthetic oligonucleotide
  Target: LAMA2; (-) strand; PAM type: NNGRRT; PAM sequence: CTGAGT
agagagaagccattttaaaa

SEQ ID NO: 23805 - DNA, 20 bp, Artificial Sequence
  Description of Artificial Sequence: Synthetic oligonucleotide
  Target: LAMA2; (-) strand; PAM type: NNGRRT; PAM sequence: CAGAGT
actgcactccagcctggcca

SEQ ID NO: 23806 - DNA, 20 bp, Artificial Sequence
  Description of Artificial Sequence: Synthetic oligonucleotide
  Target: LAMA2; (-) strand; PAM type: NNGRRT; PAM sequence: GAGAAT
tactcaggaggctgaggcag

SEQ ID NO: 23807 - DNA, 20 bp, Artificial Sequence
  Description of Artificial Sequence: Synthetic oligonucleotide
  Target: LAMA2; (-) strand; PAM type: NNGRRT; PAM sequence: GCGGAT
actttgggaggccaaggcag

SEQ ID NO: 23808 - DNA, 20 bp, Artificial Sequence
  Description of Artificial Sequence: Synthetic oligonucleotide
  Target: LAMA2; (-) strand; PAM type: NNGRRT; PAM sequence: CCGGGT
ccaaagtgtaacagacagag

SEQ ID NO: 23809 - DNA, 20 bp, Artificial Sequence
  Description of Artificial Sequence: Synthetic oligonucleotide
  Target: LAMA2; (-) strand; PAM type: NNGRRT; PAM sequence: GGGGGT
catgattagtgtgttgaaaa

SEQ ID NO: 23810 - DNA, 20 bp, Artificial Sequence
  Description of Artificial Sequence: Synthetic oligonucleotide
  Target: LAMA2; (-) strand; PAM type: NNGRRT; PAM sequence: CGGGAT
gcctggtaaaaaaaaaaaaa

SEQ ID NO: 23811 - DNA, 20 bp, Artificial Sequence
  Description of Artificial Sequence: Synthetic oligonucleotide
  Target: LAMA2; (-) strand; PAM type: NNGRRT; PAM sequence: ATGAAT
tgtgatcatttggtcacaga

SEQ ID NO: 23812 - DNA, 20 bp, Artificial Sequence
  Description of Artificial Sequence: Synthetic oligonucleotide
  Target: LAMA2; (-) strand; PAM type: NNGRRT; PAM sequence: CAGAAT
aatatgtgatcatttggtca

SEQ ID NO: 23813 - DNA, 20 bp, Artificial Sequence
  Description of Artificial Sequence: Synthetic oligonucleotide
  Target: LAMA2; (-) strand; PAM type: NNGRRT; PAM sequence: TTGAAT
aaacaaaacaaacaacacaa

SEQ ID NO: 23814 - DNA, 20 bp, Artificial Sequence
  Description of Artificial Sequence: Synthetic oligonucleotide
  Target: LAMA2; (-) strand; PAM type: NNGRRT; PAM sequence: CTGGGT
tcgtgccactgtactccagc

SEQ ID NO: 23815 - DNA, 20 bp, Artificial Sequence
  Description of Artificial Sequence: Synthetic oligonucleotide
  Target: LAMA2; (-) strand; PAM type: NNGRRT; PAM sequence: GAGAAT
tactcaggaggctgagtcag

SEQ ID NO: 23816 - DNA, 20 bp, Artificial Sequence
  Description of Artificial Sequence: Synthetic oligonucleotide
  Target: LAMA2; (-) strand; PAM type: NNGRRT; PAM sequence: CTGAGT
agtcccagctactcaggagg

SEQ ID NO: 23817 - DNA, 20 bp, Artificial Sequence
  Description of Artificial Sequence: Synthetic oligonucleotide
  Target: LAMA2; (-) strand; PAM type: NNGRRT; PAM sequence: GCGGAT
actttgggaggctgagatgg

SEQ ID NO: 23818 - DNA, 20 bp, Artificial Sequence
  Description of Artificial Sequence: Synthetic oligonucleotide
  Target: LAMA2; (-) strand; PAM type: NNGRRT; PAM sequence: CTGGGT
tttaaaaaacacagttgagg

SEQ ID NO: 23819 - DNA, 20 bp, Artificial Sequence
  Description of Artificial Sequence: Synthetic oligonucleotide
  Target: LAMA2; (-) strand; PAM type: NNGRRT; PAM sequence: CTGAAT
atatccaattctgaatgggg

SEQ ID NO: 23820 - DNA, 20 bp, Artificial Sequence
  Description of Artificial Sequence: Synthetic oligonucleotide
  Target: LAMA2; (-) strand; PAM type: NNGRRT; PAM sequence: CTGAAT
gcagacaatcatatccaatt

SEQ ID NO: 23821 - DNA, 20 bp, Artificial Sequence
  Description of Artificial Sequence: Synthetic oligonucleotide
  Target: LAMA2; (-) strand; PAM type: NNGRRT; PAM sequence: CTGAAT
actggaattcatgagtagaa

SEQ ID NO: 23822 - DNA, 20 bp, Artificial Sequence
  Description of Artificial Sequence: Synthetic oligonucleotide
  Target: LAMA2; (-) strand; PAM type: NNGRRT; PAM sequence: ATGAGT
tcaagatctgactggaattc

SEQ ID NO: 23823 - DNA, 20 bp, Artificial Sequence
  Description of Artificial Sequence: Synthetic oligonucleotide
  Target: LAMA2; (-) strand; PAM type: NNGRRT; PAM sequence: TGGAAT
acaagaaatcaagatctgac

SEQ ID NO: 23824 - DNA, 20 bp, Artificial Sequence
  Description of Artificial Sequence: Synthetic oligonucleotide
  Target: LAMA2; (-) strand; PAM type: NNGRRT; PAM sequence: GAGGAT
acgtaccattgacatcataa

SEQ ID NO: 23825 - DNA, 20 bp, Artificial Sequence
  Description of Artificial Sequence: Synthetic oligonucleotide
  Target: LAMA2; (-) strand; PAM type: NNGRRT; PAM sequence: AAGGGT
gatatttttaatgttcagga

SEQ ID NO: 23826 - DNA, 20 bp, Artificial Sequence
  Description of Artificial Sequence: Synthetic oligonucleotide
  Target: LAMA2; (-) strand; PAM type: NNGRRT; PAM sequence: AGGGAT
gctataccaagggtcatcca

SEQ ID NO: 23827 - DNA, 20 bp, Artificial Sequence
  Description of Artificial Sequence: Synthetic oligonucleotide
  Target: LAMA2; (-) strand; PAM type: NNGRRT; PAM sequence: AAGGGT
gatacaatggcagctatacc

SEQ ID NO: 23828 - DNA, 20 bp, Artificial Sequence
  Description of Artificial Sequence: Synthetic oligonucleotide
  Target: LAMA2; (-) strand; PAM type: NNGRRT; PAM sequence: AAGGGT
atgagcaatgggacttggca

SEQ ID NO: 23829 - DNA, 20 bp, Artificial Sequence
  Description of Artificial Sequence: Synthetic oligonucleotide
  Target: LAMA2; (-) strand; PAM type: NNGRRT; PAM sequence: TTGGAT
aggaaatgtacaatttttac

SEQ ID NO: 23830 - DNA, 20 bp, Artificial Sequence
  Description of Artificial Sequence: Synthetic oligonucleotide
  Target: LAMA2; (-) strand; PAM type: NNGRRT; PAM sequence: ATGAAT
ttgagagtaggtgagtgaaa

SEQ ID NO: 23831 - DNA, 20 bp, Artificial Sequence
  Description of Artificial Sequence: Synthetic oligonucleotide
  Target: LAMA2; (-) strand; PAM type: NNGRRT; PAM sequence: GTGAGT
acatacagtgttgagagtag

SEQ ID NO: 23832 - DNA, 20 bp, Artificial Sequence
  Description of Artificial Sequence: Synthetic oligonucleotide
  Target: LAMA2; (-) strand; PAM type: NNGRRT; PAM sequence: GAGAGT
tcccttctacatacagtgtt

SEQ ID NO: 23833 - DNA, 20 bp, Artificial Sequence
  Description of Artificial Sequence: Synthetic oligonucleotide
  Target: LAMA2; (-) strand; PAM type: NNGRRT; PAM sequence: TGGAAT
agttcctgcttcacaaatca

SEQ ID NO: 23834 - DNA, 20 bp, Artificial Sequence
  Description of Artificial Sequence: Synthetic oligonucleotide
  Target: LAMA2; (-) strand; PAM type: NNGRRT; PAM sequence: TAGGGT
tagggagacagtcttctgga

SEQ ID NO: 23835 - DNA, 20 bp, Artificial Sequence
  Description of Artificial Sequence: Synthetic oligonucleotide
  Target: LAMA2; (-) strand; PAM type: NNGRRT; PAM sequence: CTGGAT
tgtcctagggagacagtctt

SEQ ID NO: 23836 - DNA, 20 bp, Artificial Sequence
  Description of Artificial Sequence: Synthetic oligonucleotide
  Target: LAMA2; (-) strand; PAM type: NNGRRT; PAM sequence: CAGAGT
tcagggccaactatggtcct

SEQ ID NO: 23837 - DNA, 20 bp, Artificial Sequence
  Description of Artificial Sequence: Synthetic oligonucleotide
  Target: LAMA2; (-) strand; PAM type: NNGRRT; PAM sequence: CTGGGT
tggggccagcctgccaactg

SEQ ID NO: 23838 - DNA, 20 bp, Artificial Sequence
  Description of Artificial Sequence: Synthetic oligonucleotide
  Target: LAMA2; (-) strand; PAM type: NNGRRT; PAM sequence: CTGAGT
ggagggtgactgctggaggc

SEQ ID NO: 23839 - DNA, 20 bp, Artificial Sequence
  Description of Artificial Sequence: Synthetic oligonucleotide
  Target: LAMA2; (-) strand; PAM type: NNGRRT; PAM sequence: GAGGGT
gtttcctccaccacccagag

SEQ ID NO: 23840 - DNA, 20 bp, Artificial Sequence
  Description of Artificial Sequence: Synthetic oligonucleotide
  Target: LAMA2; (-) strand; PAM type: NNGRRT; PAM sequence: GGGGAT
atatagatttgagaccttct

SEQ ID NO: 23841 - DNA, 20 bp, Artificial Sequence
  Description of Artificial Sequence: Synthetic oligonucleotide
  Target: LAMA2; (-) strand; PAM type: NNGRRT; PAM sequence: AGGGAT
ttcaaaagagaaggctaaag

SEQ ID NO: 23842 - DNA, 20 bp, Artificial Sequence
  Description of Artificial Sequence: Synthetic oligonucleotide
  Target: LAMA2; (-) strand; PAM type: NNGRRT; PAM sequence: TTGGAT
aaggttgggtgccaaattgg

SEQ ID NO: 23843 - DNA, 20 bp, Artificial Sequence
  Description of Artificial Sequence: Synthetic oligonucleotide
  Target: LAMA2; (-) strand; PAM type: NNGRRT; PAM sequence: TTGGGT
atgcaagtatactgcaaagg

SEQ ID NO: 23844 - DNA, 20 bp, Artificial Sequence
  Description of Artificial Sequence: Synthetic oligonucleotide
  Target: LAMA2; (-) strand; PAM type: NNGRRT; PAM sequence: AAGGGT
cagaactgtggcccttctcc

SEQ ID NO: 23845 - DNA, 20 bp, Artificial Sequence
  Description of Artificial Sequence: Synthetic oligonucleotide
  Target: LAMA2; (-) strand; PAM type: NNGRRT; PAM sequence: TTGAGT
tccaagagcctcatttgtgt

SEQ ID NO: 23846 - DNA, 20 bp, Artificial Sequence
  Description of Artificial Sequence: Synthetic oligonucleotide
  Target: LAMA2; (-) strand; PAM type: NNGRRT; PAM sequence: GTGAAT
cctcttggccttcactagca

SEQ ID NO: 23847 - DNA, 20 bp, Artificial Sequence
  Description of Artificial Sequence: Synthetic oligonucleotide
  Target: LAMA2; (-) strand; PAM type: NNGRRT; PAM sequence: GAGAAT
aatagttgcttggactcaga

SEQ ID NO: 23848 - DNA, 20 bp, Artificial Sequence
  Description of Artificial Sequence: Synthetic oligonucleotide
  Target: LAMA2; (-) strand; PAM type: NNGRRT; PAM sequence: CAGGAT
caccatcaaagggttacttt

SEQ ID NO: 23849 - DNA, 20 bp, Artificial Sequence
  Description of Artificial Sequence: Synthetic oligonucleotide
  Target: LAMA2; (-) strand; PAM type: NNGRRT; PAM sequence: AAGGGT
cagatggaaaatcaccatca

SEQ ID NO: 23850 - DNA, 20 bp, Artificial Sequence
  Description of Artificial Sequence: Synthetic oligonucleotide
  Target: LAMA2; (-) strand; PAM type: NNGRRT; PAM sequence: TAGGGT
attatttgatttaatttctg

SEQ ID NO: 23851 - DNA, 20 bp, Artificial Sequence
  Description of Artificial Sequence: Synthetic oligonucleotide
  Target: LAMA2; (-) strand; PAM type: NNGRRT; PAM sequence: TAGAGT
aaaaggaatgcctatatgaa

SEQ ID NO: 23852 - DNA, 20 bp, Artificial Sequence
  Description of Artificial Sequence: Synthetic oligonucleotide
  Target: LAMA2; (-) strand; PAM type: NNGRRT; PAM sequence: ATGAAT
gctaaaaaaggaatgcctat

SEQ ID NO: 23853 - DNA, 20 bp, Artificial Sequence
  Description of Artificial Sequence: Synthetic oligonucleotide
  Target: LAMA2; (-) strand; PAM type: NNGRRT; PAM sequence: AGGAAT
ttactataaattgctaaaaa

SEQ ID NO: 23854 - DNA, 20 bp, Artificial Sequence
  Description of Artificial Sequence: Synthetic oligonucleotide
  Target: LAMA2; (-) strand; PAM type: NNGRRT; PAM sequence: TTGAAT
tttaacagctcccttttctt

SEQ ID NO: 23855 - DNA, 20 bp, Artificial Sequence
  Description of Artificial Sequence: Synthetic oligonucleotide
  Target: LAMA2; (-) strand; PAM type: NNGRRT; PAM sequence: CAGAAT
tctactcagaacatacattt

SEQ ID NO: 23856 - DNA, 20 bp, Artificial Sequence
  Description of Artificial Sequence: Synthetic oligonucleotide
  Target: LAMA2; (-) strand; PAM type: NNGRRT; PAM sequence: AAGAAT
ctagatgttctaacaataag

SEQ ID NO: 23857 - DNA, 20 bp, Artificial Sequence
  Description of Artificial Sequence: Synthetic oligonucleotide
  Target: LAMA2; (-) strand; PAM type: NNGRRT; PAM sequence: GAGAAT
tgattttacatggagctaat

SEQ ID NO: 23858 - DNA, 20 bp, Artificial Sequence
  Description of Artificial Sequence: Synthetic oligonucleotide
  Target: LAMA2; (-) strand; PAM type: NNGRRT; PAM sequence: TAGAAT
acagaagagcagttttccac

SEQ ID NO: 23859 - DNA, 20 bp, Artificial Sequence
  Description of Artificial Sequence: Synthetic oligonucleotide
  Target: LAMA2; (-) strand; PAM type: NNGRRT; PAM sequence: AAGAGT
aaaacaagatacaaagaacc

SEQ ID NO: 23860 - DNA, 20 bp, Artificial Sequence
  Description of Artificial Sequence: Synthetic oligonucleotide
  Target: LAMA2; (-) strand; PAM type: NNGRRT; PAM sequence: TCGAAT
ttgatttctggtttgtatgt

SEQ ID NO: 23861 - DNA, 20 bp, Artificial Sequence
  Description of Artificial Sequence: Synthetic oligonucleotide
  Target: LAMA2; (-) strand; PAM type: NNGRRT; PAM sequence: TTGAAT
tacagcagcctaatgaaaag

SEQ ID NO: 23862 - DNA, 20 bp, Artificial Sequence
  Description of Artificial Sequence: Synthetic oligonucleotide
  Target: LAMA2; (-) strand; PAM type: NNGRRT; PAM sequence: GGGGAT
tttggggaccatatacattt

SEQ ID NO: 23863 - DNA, 20 bp, Artificial Sequence
  Description of Artificial Sequence: Synthetic oligonucleotide
  Target: LAMA2; (-) strand; PAM type: NNGRRT; PAM sequence: CAGAAT
tctaacttaatttgactctt

SEQ ID NO: 23864 - DNA, 20 bp, Artificial Sequence
  Description of Artificial Sequence: Synthetic oligonucleotide
  Target: LAMA2; (-) strand; PAM type: NNGRRT; PAM sequence: CTGGAT
tcattagcattcttaaatca

SEQ ID NO: 23865 - DNA, 20 bp, Artificial Sequence
  Description of Artificial Sequence: Synthetic oligonucleotide
  Target: LAMA2; (-) strand; PAM type: NNGRRT; PAM sequence: AAGAGT
tattttcatttcattaacgg

SEQ ID NO: 23866 - DNA, 20 bp, Artificial Sequence
  Description of Artificial Sequence: Synthetic oligonucleotide
  Target: LAMA2; (-) strand; PAM type: NNGRRT; PAM sequence: AAGAGT
ataaattcaacacaagttag

SEQ ID NO: 23867 - DNA, 20 bp, Artificial Sequence
  Description of Artificial Sequence: Synthetic oligonucleotide
  Target: LAMA2; (-) strand; PAM type: NNGRRT; PAM sequence: ATGGGT
atggaagaaattagaacttt

SEQ ID NO: 23868 - DNA, 20 bp, Artificial Sequence
  Description of Artificial Sequence: Synthetic oligonucleotide
  Target: LAMA2; (-) strand; PAM type: NNGRRT; PAM sequence: ATGAAT
ggcaaatattgacttatgcc

SEQ ID NO: 23869 - DNA, 20 bp, Artificial Sequence
  Description of Artificial Sequence: Synthetic oligonucleotide
  Target: LAMA2; (-) strand; PAM type: NNGRRT; PAM sequence: CAGAAT
ttttatttcccaaattgacc

SEQ ID NO: 23870 - DNA, 20 bp, Artificial Sequence
  Description of Artificial Sequence: Synthetic oligonucleotide
  Target: LAMA2; (-) strand; PAM type: NNGRRT; PAM sequence: CAGAAT
taaaaacaaatatttaaatt

SEQ ID NO: 23871 - DNA, 20 bp, Artificial Sequence
  Description of Artificial Sequence: Synthetic oligonucleotide
  Target: LAMA2; (-) strand; PAM type: NNGRRT; PAM sequence: CAGAGT
acctttaaagaggagaccag

SEQ ID NO: 23872 - DNA, 20 bp, Artificial Sequence
  Description of Artificial Sequence: Synthetic oligonucleotide
  Target: LAMA2; (-) strand; PAM type: NNGRRT; PAM sequence: CTGGGT
tgagtcatcaatagtcaaat

SEQ ID NO: 23873 - DNA, 20 bp, Artificial Sequence
  Description of Artificial Sequence: Synthetic oligonucleotide
  Target: LAMA2; (-) strand; PAM type: NNGRRT; PAM sequence: ATGAGT
tgctacgatacggtaccaat

SEQ ID NO: 23874 - DNA, 20 bp, Artificial Sequence
  Description of Artificial Sequence: Synthetic oligonucleotide
  Target: LAMA2; (-) strand; PAM type: NNGRRT; PAM sequence: AGGAGT
taccttattgaaatggaaat

SEQ ID NO: 23875 - DNA, 20 bp, Artificial Sequence
  Description of Artificial Sequence: Synthetic oligonucleotide
  Target: LAMA2; (-) strand; PAM type: NNGRRT; PAM sequence: TGGAGT
caagatgaaggggtcagaaa

SEQ ID NO: 23876 - DNA, 20 bp, Artificial Sequence
  Description of Artificial Sequence: Synthetic oligonucleotide
  Target: LAMA2; (-) strand; PAM type: NNGRRT; PAM sequence: AGGGGT
tcctaccagacacaagatga

SEQ ID NO: 23877 - DNA, 20 bp, Artificial Sequence
  Description of Artificial Sequence: Synthetic oligonucleotide
  Target: LAMA2; (-) strand; PAM type: NNGRRT; PAM sequence: AAGAAT
tgctttggcttgtattgcat

SEQ ID NO: 23878 - DNA, 20 bp, Artificial Sequence
  Description of Artificial Sequence: Synthetic oligonucleotide
  Target: LAMA2; (-) strand; PAM type: NNGRRT; PAM sequence: AAGAAT
gtggacctggtatgttacat

SEQ ID NO: 23879 - DNA, 20 bp, Artificial Sequence
  Description of Artificial Sequence: Synthetic oligonucleotide
  Target: LAMA2; (-) strand; PAM type: NNGRRT; PAM sequence: TAGGGT
cagttacttcccattttaag

SEQ ID NO: 23880 - DNA, 20 bp, Artificial Sequence
  Description of Artificial Sequence: Synthetic oligonucleotide
  Target: LAMA2; (-) strand; PAM type: NNGRRT; PAM sequence: CTGAAT
aagctccaaagatagaataa

SEQ ID NO: 23881 - DNA, 20 bp, Artificial Sequence
  Description of Artificial Sequence: Synthetic oligonucleotide
  Target: LAMA2; (-) strand; PAM type: NNGRRT; PAM sequence: TAGAAT
ttgcattaaagctccaaaga

SEQ ID NO: 23882 - DNA, 20 bp, Artificial Sequence
  Description of Artificial Sequence: Synthetic oligonucleotide
  Target: LAMA2; (-) strand; PAM type: NNGRRT; PAM sequence: AGGGAT
gggagggaagtgctgaagac

SEQ ID NO: 23883 - DNA, 20 bp, Artificial Sequence
  Description of Artificial Sequence: Synthetic oligonucleotide
  Target: LAMA2; (-) strand; PAM type: NNGRRT; PAM sequence: GAGAAT
tttgggtttaacagggagtt

SEQ ID NO: 23884 - DNA, 20 bp, Artificial Sequence
  Description of Artificial Sequence: Synthetic oligonucleotide
  Target: LAMA2; (-) strand; PAM type: NNGRRT; PAM sequence: GGGAGT
tagctgctttgggtttaaca

SEQ ID NO: 23885 - DNA, 20 bp, Artificial Sequence
  Description of Artificial Sequence: Synthetic oligonucleotide
  Target: LAMA2; (-) strand; PAM type: NNGRRT; PAM sequence: TTGGGT
cctttcaactgttagctgct

SEQ ID NO: 23886 - DNA, 20 bp, Artificial Sequence
  Description of Artificial Sequence: Synthetic oligonucleotide
  Target: LAMA2; (-) strand; PAM type: NNGRRT; PAM sequence: CAGAGT
atgaaactctatgtatcacc

SEQ ID NO: 23887 - DNA, 20 bp, Artificial Sequence
  Description of Artificial Sequence: Synthetic oligonucleotide
  Target: LAMA2; (-) strand; PAM type: NNGRRT; PAM sequence: TTGAAT
gatcatcatggaccacagcc

SEQ ID NO: 23888 - DNA, 20 bp, Artificial Sequence
  Description of Artificial Sequence: Synthetic oligonucleotide
  Target: LAMA2; (-) strand; PAM type: NNGRRT; PAM sequence: ATGAGT
tgaaagaagaactgcacttt

SEQ ID NO: 23889 - DNA, 20 bp, Artificial Sequence
  Description of Artificial Sequence: Synthetic oligonucleotide
  Target: LAMA2; (-) strand; PAM type: NNGRRT; PAM sequence: CAGAAT
ataaggttcaccttctttaa

SEQ ID NO: 23890 - DNA, 20 bp, Artificial Sequence
  Description of Artificial Sequence: Synthetic oligonucleotide
  Target: LAMA2; (-) strand; PAM type: NNGRRT; PAM sequence: ATGAAT
aaatacatggtaacaaaaga

SEQ ID NO: 23891 - DNA, 20 bp, Artificial Sequence
  Description of Artificial Sequence: Synthetic oligonucleotide
  Target: LAMA2; (-) strand; PAM type: NNGRRT; PAM sequence: AAGAAT
agtgaaatacatggtaacaa

SEQ ID NO: 23892 - DNA, 20 bp, Artificial Sequence
  Description of Artificial Sequence: Synthetic oligonucleotide
  Target: LAMA2; (-) strand; PAM type: NNGRRT; PAM sequence: GAGGAT
tttggtaatcttttttcttt

SEQ ID NO: 23893 - DNA, 20 bp, Artificial Sequence
  Description of Artificial Sequence: Synthetic oligonucleotide
  Target: LAMA2; (-) strand; PAM type: NNGRRT; PAM sequence: CAGAAT
tcatttttaaattcaattaa

SEQ ID NO: 23894 - DNA, 20 bp, Artificial Sequence
  Description of Artificial Sequence: Synthetic oligonucleotide
  Target: LAMA2; (-) strand; PAM type: NNGRRT; PAM sequence: TAGAAT
gtttgttgaagtagtcttcc

SEQ ID NO: 23895 - DNA, 20 bp, Artificial Sequence
  Description of Artificial Sequence: Synthetic oligonucleotide
  Target: LAMA2; (-) strand; PAM type: NNGRRT; PAM sequence: TTGGAT
ctaaaattctttataatatc

SEQ ID NO: 23896 - DNA, 20 bp, Artificial Sequence
  Description of Artificial Sequence: Synthetic oligonucleotide
  Target: LAMA2; (-) strand; PAM type: NNGRRT; PAM sequence: TGGAAT
acacagcagcagttaactga

SEQ ID NO: 23897 - DNA, 20 bp, Artificial Sequence
  Description of Artificial Sequence: Synthetic oligonucleotide
  Target: LAMA2; (-) strand; PAM type: NNGRRT; PAM sequence: CAGAGT
ttagatctcgaatcaatact

SEQ ID NO: 23898 - DNA, 20 bp, Artificial Sequence
  Description of Artificial Sequence: Synthetic oligonucleotide
  Target: LAMA2; (-) strand; PAM type: NNGRRT; PAM sequence: TCGAAT
cattccaaattcattagatc

SEQ ID NO: 23899 - DNA, 20 bp, Artificial Sequence
  Description of Artificial Sequence: Synthetic oligonucleotide
  Target: LAMA2; (-) strand; PAM type: NNGRRT; PAM sequence: AAGAAT
aaatgcggagacttgttttt

SEQ ID NO: 23900 - DNA, 20 bp, Artificial Sequence
  Description of Artificial Sequence: Synthetic oligonucleotide
  Target: LAMA2; (-) strand; PAM type: NNGRRT; PAM sequence: AAGGGT
tccatttctcccagttcttc

SEQ ID NO: 23901 - DNA, 20 bp, Artificial Sequence
  Description of Artificial Sequence: Synthetic oligonucleotide
  Target: LAMA2; (-) strand; PAM type: NNGRRT; PAM sequence: TTGGGT
tgctgggcacaatgctggct

SEQ ID NO: 23902 - DNA, 20 bp, Artificial Sequence
  Description of Artificial Sequence: Synthetic oligonucleotide
  Target: LAMA2; (-) strand; PAM type: NNGRRT; PAM sequence: TCGAAT
cgtgtaccctggaggagacg

SEQ ID NO: 23903 - DNA, 20 bp, Artificial Sequence
  Description of Artificial Sequence: Synthetic oligonucleotide
  Target: LAMA2; (-) strand; PAM type: NNGRRT; PAM sequence: TAGAAT
attgcatttgcatccacatc

SEQ ID NO: 23904 - DNA, 20 bp, Artificial Sequence
  Description of Artificial Sequence: Synthetic oligonucleotide
  Target: LAMA2; (-) strand; PAM type: NNGRRT; PAM sequence: GAGGAT
aaagatgaaataaacaggag

SEQ ID NO: 23905 - DNA, 20 bp, Artificial Sequence
  Description of Artificial Sequence: Synthetic oligonucleotide
  Target: LAMA2; (-) strand; PAM type: NNGRRT; PAM sequence: TTGAAT
aaaaatattgtgtttccagg

SEQ ID NO: 23906 - DNA, 20 bp, Artificial Sequence
  Description of Artificial Sequence: Synthetic oligonucleotide
  Target: LAMA2; (-) strand; PAM type: NNGRRT; PAM sequence: AAGAAT
gctcttgaggcaactaaaac

SEQ ID NO: 23907 - DNA, 20 bp, Artificial Sequence
  Description of Artificial Sequence: Synthetic oligonucleotide
  Target: LAMA2; (-) strand; PAM type: NNGRRT; PAM sequence: GTGAGT
cataaatcttttaattagat

SEQ ID NO: 23908 - DNA, 20 bp, Artificial Sequence
  Description of Artificial Sequence: Synthetic oligonucleotide
  Target: LAMA2; (-) strand; PAM type: NNGRRT; PAM sequence: AAGAAT
tattaagtgcatcatcctat

SEQ ID NO: 23909 - DNA, 20 bp, Artificial Sequence
  Description of Artificial Sequence: Synthetic oligonucleotide
  Target: LAMA2; (-) strand; PAM type: NNGRRT; PAM sequence: ATGAAT
aggactgtcatgaagcaatt

SEQ ID NO: 23910 - DNA, 20 bp, Artificial Sequence
  Description of Artificial Sequence: Synthetic oligonucleotide
  Target: LAMA2; (-) strand; PAM type: NNGRRT; PAM sequence: CAGGAT
caggatgattctgacaagcc

SEQ ID NO: 23911 - DNA, 20 bp, Artificial Sequence
  Description of Artificial Sequence: Synthetic oligonucleotide
  Target: LAMA2; (-) strand; PAM type: NNGRRT; PAM sequence: CAGGAT
ttttctgactaatctcaact

SEQ ID NO: 23912 - DNA, 20 bp, Artificial Sequence
  Description of Artificial Sequence: Synthetic oligonucleotide
  Target: LAMA2; (-) strand; PAM type: NNGRRT; PAM sequence: TGGGGT
aggttgagtcctcataaatt

SEQ ID NO: 23913 - DNA, 20 bp, Artificial Sequence
  Description of Artificial Sequence: Synthetic oligonucleotide
  Target: LAMA2; (-) strand; PAM type: NNGRRT; PAM sequence: TTGAGT
aacctcattctatatgaagg

SEQ ID NO: 23914 - DNA, 20 bp, Artificial Sequence
  Description of Artificial Sequence: Synthetic oligonucleotide
  Target: LAMA2; (-) strand; PAM type: NNGRRT; PAM sequence: TAGAGT
tggaataaattctcatactt

SEQ ID NO: 23915 - DNA, 20 bp, Artificial Sequence
  Description of Artificial Sequence: Synthetic oligonucleotide
  Target: LAMA2; (-) strand; PAM type: NNGRRT; PAM sequence: TGGAAT
ataacttcagcgtgtggttt

SEQ ID NO: 23916 - DNA, 20 bp, Artificial Sequence
  Description of Artificial Sequence: Synthetic oligonucleotide
  Target: LAMA2; (-) strand; PAM type: NNGRRT; PAM sequence: GAGGAT
tatatgaagttctaagaaac

SEQ ID NO: 23917 - DNA, 20 bp, Artificial Sequence
  Description of Artificial Sequence: Synthetic oligonucleotide
  Target: LAMA2; (-) strand; PAM type: NNGRRT; PAM sequence: CTGGAT
ggaagaggaggaaatccaac

SEQ ID NO: 23918 - DNA, 20 bp, Artificial Sequence
  Description of Artificial Sequence: Synthetic oligonucleotide
  Target: LAMA2; (-) strand; PAM type: NNGRRT; PAM sequence: AGGGGT
gttgagataaccaaagccca

SEQ ID NO: 23919 - DNA, 20 bp, Artificial Sequence
  Description of Artificial Sequence: Synthetic oligonucleotide
  Target: LAMA2; (-) strand; PAM type: NNGRRT; PAM sequence: AAGAAT
tagcatataggaagagttat

SEQ ID NO: 23920 - DNA, 20 bp, Artificial Sequence
  Description of Artificial Sequence: Synthetic oligonucleotide
  Target: LAMA2; (-) strand; PAM type: NNGRRT; PAM sequence: AAGAGT
aacattacttagcatatagg

SEQ ID NO: 23921 - DNA, 20 bp, Artificial Sequence
  Description of Artificial Sequence: Synthetic oligonucleotide
  Target: LAMA2; (-) strand; PAM type: NNGRRT; PAM sequence: TGGGGT
atggactaagacatactttt

SEQ ID NO: 23922 - DNA, 20 bp, Artificial Sequence
  Description of Artificial Sequence: Synthetic oligonucleotide
  Target: LAMA2; (-) strand; PAM type: NNGRRT; PAM sequence: AAGAAT
atctcagacttcttagcttc

SEQ ID NO: 23923 - DNA, 20 bp, Artificial Sequence
  Description of Artificial Sequence: Synthetic oligonucleotide
  Target: LAMA2; (-) strand; PAM type: NNGRRT; PAM sequence: ATGAAT
tggtgaggggcagggccttc

SEQ ID NO: 23924 - DNA, 20 bp, Artificial Sequence
  Description of Artificial Sequence: Synthetic oligonucleotide
  Target: LAMA2; (-) strand; PAM type: NNGRRT; PAM sequence: GTGAGT
gcaggcagggcatttgagag

SEQ ID NO: 23925 - DNA, 20 bp, Artificial Sequence
  Description of Artificial Sequence: Synthetic oligonucleotide
  Target: LAMA2; (-) strand; PAM type: NNGRRT; PAM sequence: GTGAAT
agtatctgccttgctatagt

SEQ ID NO: 23926 - DNA, 20 bp, Artificial Sequence
  Description of Artificial Sequence: Synthetic oligonucleotide
  Target: LAMA2; (-) strand; PAM type: NNGRRT; PAM sequence: GAGAAT
agattccttaactacagaat

SEQ ID NO: 23927 - DNA, 20 bp, Artificial Sequence
  Description of Artificial Sequence: Synthetic oligonucleotide
  Target: LAMA2; (-) strand; PAM type: NNGRRT; PAM sequence: CAGAAT
ttcttcagattccttaacta

SEQ ID NO: 23928 - DNA, 20 bp, Artificial Sequence
  Description of Artificial Sequence: Synthetic oligonucleotide
  Target: LAMA2; (-) strand; PAM type: NNGRRT; PAM sequence: GAGAGT
tggcagtgaagcaagatgtt

SEQ ID NO: 23929 - DNA, 20 bp, Artificial Sequence
  Description of Artificial Sequence: Synthetic oligonucleotide
  Target: LAMA2; (-) strand; PAM type: NNGRRT; PAM sequence: TAGAAT
ctttctttttctgagactga

SEQ ID NO: 23930 - DNA, 20 bp, Artificial Sequence
  Description of Artificial Sequence: Synthetic oligonucleotide
  Target: LAMA2; (-) strand; PAM type: NNGRRT; PAM sequence: TTGAAT
tgagagattttcctgctcat

SEQ ID NO: 23931 - DNA, 20 bp, Artificial Sequence
  Description of Artificial Sequence: Synthetic oligonucleotide
  Target: LAMA2; (-) strand; PAM type: NNGRRT; PAM sequence: GTGAAT
agagattgattatcctactt

SEQ ID NO: 23932 - DNA, 20 bp, Artificial Sequence
  Description of Artificial Sequence: Synthetic oligonucleotide
  Target: LAMA2; (-) strand; PAM type: NNGRRT; PAM sequence: TGGAGT
ggagcccctgacttgcacat

SEQ ID NO: 23933 - DNA, 20 bp, Artificial Sequence
  Description of Artificial Sequence: Synthetic oligonucleotide
  Target: LAMA2; (-) strand; PAM type: NNGRRT; PAM sequence: CTGAAT
ttaaatagtaaaatcagtta

SEQ ID NO: 23934 - DNA, 20 bp, Artificial Sequence
  Description of Artificial Sequence: Synthetic oligonucleotide
  Target: LAMA2; (-) strand; PAM type: NNGRRT; PAM sequence: CTGAAT
cacacataagaaaacagtta

SEQ ID NO: 23935 - DNA, 20 bp, Artificial Sequence
  Description of Artificial Sequence: Synthetic oligonucleotide
  Target: LAMA2; (-) strand; PAM type: NNGRRT; PAM sequence: TTGAGT
ctcagaatgtattcttgtca

SEQ ID NO: 23936 - DNA, 20 bp, Artificial Sequence
  Description of Artificial Sequence: Synthetic oligonucleotide
  Target: LAMA2; (-) strand; PAM type: NNGRRT; PAM sequence: CAGAAT
ttgcctaattccaactttct

SEQ ID NO: 23937 - DNA, 20 bp, Artificial Sequence
  Description of Artificial Sequence: Synthetic oligonucleotide
  Target: LAMA2; (-) strand; PAM type: NNGRRT; PAM sequence: TTGAGT
aggtacacaaatacttacca

SEQ ID NO: 23938 - DNA, 20 bp, Artificial Sequence
  Description of Artificial Sequence: Synthetic oligonucleotide
  Target: LAMA2; (-) strand; PAM type: NNGRRT; PAM sequence: GAGAAT
gatacacaatcatgaagaaa

SEQ ID NO: 23939 - DNA, 20 bp, Artificial Sequence
  Description of Artificial Sequence: Synthetic oligonucleotide
  Target: LAMA2; (-) strand; PAM type: NNGRRT; PAM sequence: GAGAAT
acagggcctggagtcaaata

SEQ ID NO: 23940 - DNA, 20 bp, Artificial Sequence
  Description of Artificial Sequence: Synthetic oligonucleotide
  Target: LAMA2; (-) strand; PAM type: NNGRRT; PAM sequence: TGGAGT
tgtatacacagcacagggcc

SEQ ID NO: 23941 - DNA, 20 bp, Artificial Sequence
  Description of Artificial Sequence: Synthetic oligonucleotide
  Target: LAMA2; (-) strand; PAM type: NNGRRT; PAM sequence: GGGAAT
caagaagatttcgagttcaa

SEQ ID NO: 23942 - DNA, 20 bp, Artificial Sequence
  Description of Artificial Sequence: Synthetic oligonucleotide
  Target: LAMA2; (-) strand; PAM type: NNGRRT; PAM sequence: TCGAGT
tgttcacagccaagaagatt

SEQ ID NO: 23943 - DNA, 20 bp, Artificial Sequence
  Description of Artificial Sequence: Synthetic oligonucleotide
  Target: LAMA2; (-) strand; PAM type: NNGRRT; PAM sequence: GAGAAT
ctgtaatgtggaatttttgt

SEQ ID NO: 23944 - DNA, 20 bp, Artificial Sequence
  Description of Artificial Sequence: Synthetic oligonucleotide
  Target: LAMA2; (-) strand; PAM type: NNGRRT; PAM sequence: TGGAAT
ctattcttttgtctgtaatg

SEQ ID NO: 23945 - DNA, 20 bp, Artificial Sequence
  Description of Artificial Sequence: Synthetic oligonucleotide
  Target: LAMA2; (-) strand; PAM type: NNGRRT; PAM sequence: ACGAAT
aaagctcaactatttaatcc

SEQ ID NO: 23946 - DNA, 20 bp, Artificial Sequence
  Description of Artificial Sequence: Synthetic oligonucleotide
  Target: LAMA2; (-) strand; PAM type: NNGRRT; PAM sequence: ATGAGT
atccttagagctactacagg

SEQ ID NO: 23947 - DNA, 20 bp, Artificial Sequence
  Description of Artificial Sequence: Synthetic oligonucleotide
  Target: LAMA2; (-) strand; PAM type: NNGRRT; PAM sequence: CAGGAT
ccgtatccttagagctacta

SEQ ID NO: 23948 - DNA, 20 bp, Artificial Sequence
  Description of Artificial Sequence: Synthetic oligonucleotide
  Target: LAMA2; (-) strand; PAM type: NNGRRT; PAM sequence: GAGAGT
aataatcttggtttatccat

SEQ ID NO: 23949 - DNA, 20 bp, Artificial Sequence
  Description of Artificial Sequence: Synthetic oligonucleotide
  Target: LAMA2; (-) strand; PAM type: NNGRRT; PAM sequence: TGGAAT
taccgttatttgctagaatt

SEQ ID NO: 23950 - DNA, 20 bp, Artificial Sequence
  Description of Artificial Sequence: Synthetic oligonucleotide
  Target: LAMA2; (-) strand; PAM type: NNGRRT; PAM sequence: TAGAAT
aaagaaataccgttatttgc

SEQ ID NO: 23951 - DNA, 20 bp, Artificial Sequence
  Description of Artificial Sequence: Synthetic oligonucleotide
  Target: LAMA2; (-) strand; PAM type: NNGRRT; PAM sequence: GTGAAT
atgtttctcccatgcagcca

SEQ ID NO: 23952 - DNA, 20 bp, Artificial Sequence
  Description of Artificial Sequence: Synthetic oligonucleotide
  Target: LAMA2; (-) strand; PAM type: NNGRRT; PAM sequence: GAGAGT
atgcacaggacagaccctgg

SEQ ID NO: 23953 - DNA, 20 bp, Artificial Sequence
  Description of Artificial Sequence: Synthetic oligonucleotide
  Target: LAMA2; (-) strand; PAM type: NNGRRT; PAM sequence: TAGAAT
ccacatcatccacatgataa

SEQ ID NO: 23954 - DNA, 20 bp, Artificial Sequence
  Description of Artificial Sequence: Synthetic oligonucleotide
  Target: LAMA2; (-) strand; PAM type: NNGRRT; PAM sequence: CTGAGT
gttttgtggtaattccacct

SEQ ID NO: 23955 - DNA, 20 bp, Artificial Sequence
  Description of Artificial Sequence: Synthetic oligonucleotide
  Target: LAMA2; (-) strand; PAM type: NNGRRT; PAM sequence: TGGAGT
ccctcgacatgaaagaacat

SEQ ID NO: 23956 - DNA, 20 bp, Artificial Sequence
  Description of Artificial Sequence: Synthetic oligonucleotide
  Target: LAMA2; (-) strand; PAM type: NNGRRT; PAM sequence: GTGAAT
ttgttataaacataaatata

SEQ ID NO: 23957 - DNA, 20 bp, Artificial Sequence
  Description of Artificial Sequence: Synthetic oligonucleotide
  Target: LAMA2; (-) strand; PAM type: NNGRRT; PAM sequence: TGGGGT
gtaagagataaaacctaggc

SEQ ID NO: 23958 - DNA, 20 bp, Artificial Sequence
  Description of Artificial Sequence: Synthetic oligonucleotide
  Target: LAMA2; (-) strand; PAM type: NNGRRT; PAM sequence: TAGGAT
gtttccagttgaagcacttg

SEQ ID NO: 23959 - DNA, 20 bp, Artificial Sequence
  Description of Artificial Sequence: Synthetic oligonucleotide
  Target: LAMA2; (-) strand; PAM type: NNGRRT; PAM sequence: CAGAAT
gttctccttctctcttgaag

SEQ ID NO: 23960 - DNA, 20 bp, Artificial Sequence
  Description of Artificial Sequence: Synthetic oligonucleotide
  Target: LAMA2; (-) strand; PAM type: NNGRRT; PAM sequence: TAGGAT
tctacacatgcttagtatga

SEQ ID NO: 23961 - DNA, 20 bp, Artificial Sequence
  Description of Artificial Sequence: Synthetic oligonucleotide
  Target: LAMA2; (-) strand; PAM type: NNGRRT; PAM sequence: TTGGGT
ttaacaaaattgctttaggc

SEQ ID NO: 23962 - DNA, 20 bp, Artificial Sequence
  Description of Artificial Sequence: Synthetic oligonucleotide
  Target: LAMA2; (-) strand; PAM type: NNGRRT; PAM sequence: TTGAGT
tccttagcacttaatggttt

SEQ ID NO: 23963 - DNA, 20 bp, Artificial Sequence
  Description of Artificial Sequence: Synthetic oligonucleotide
  Target: LAMA2; (-) strand; PAM type: NNGRRT; PAM sequence: TTGGGT
gaagtgtactttgctaggat

SEQ ID NO: 23964 - DNA, 20 bp, Artificial Sequence
  Description of Artificial Sequence: Synthetic oligonucleotide
  Target: LAMA2; (-) strand; PAM type: NNGRRT; PAM sequence: TAGGAT
aaatgtgaagtgtactttgc

SEQ ID NO: 23965 - DNA, 20 bp, Artificial Sequence
  Description of Artificial Sequence: Synthetic oligonucleotide
  Target: LAMA2; (-) strand; PAM type: NNGRRT; PAM sequence: AGGGAT
ttggaagttaagacttttag

SEQ ID NO: 23966 - DNA, 20 bp, Artificial Sequence
  Description of Artificial Sequence: Synthetic oligonucleotide
  Target: LAMA2; (-) strand; PAM type: NNGRRT; PAM sequence: AAGAGT
catgatgtcaaaaagaaaca

SEQ ID NO: 23967 - DNA, 20 bp, Artificial Sequence
  Description of Artificial Sequence: Synthetic oligonucleotide
  Target: LAMA2; (-) strand; PAM type: NNGRRT; PAM sequence: ATGGGT
aaaaccattttaaacaatga

SEQ ID NO: 23968 - DNA, 20 bp, Artificial Sequence
  Description of Artificial Sequence: Synthetic oligonucleotide
  Target: LAMA2; (-) strand; PAM type: NNGRRT; PAM sequence: ATGAAT
tgacaaaaccattttaaaca

SEQ ID NO: 23969 - DNA, 20 bp, Artificial Sequence
  Description of Artificial Sequence: Synthetic oligonucleotide
  Target: LAMA2; (-) strand; PAM type: NNGRRT; PAM sequence: AAGAAT
cactgtctttcatgtattga

SEQ ID NO: 23970 - DNA, 20 bp, Artificial Sequence
  Description of Artificial Sequence: Synthetic oligonucleotide
  Target: LAMA2; (-) strand; PAM type: NNGRRT; PAM sequence: CAGAAT
tggtgttggtttgtgagtag

SEQ ID NO: 23971 - DNA, 20 bp, Artificial Sequence
  Description of Artificial Sequence: Synthetic oligonucleotide
  Target: LAMA2; (-) strand; PAM type: NNGRRT; PAM sequence: GTGAGT
ggaaaagttggtgttggttt

SEQ ID NO: 23972 - DNA, 20 bp, Artificial Sequence
  Description of Artificial Sequence: Synthetic oligonucleotide
  Target: LAMA2; (-) strand; PAM type: NNGRRT; PAM sequence: ATGGAT
cacatgacatgcactgctga

SEQ ID NO: 23973 - DNA, 20 bp, Artificial Sequence
  Description of Artificial Sequence: Synthetic oligonucleotide
  Target: LAMA2; (-) strand; PAM type: NNGRRT; PAM sequence: CTGAAT
gtttcacatgacatgcactg

SEQ ID NO: 23974 - DNA, 20 bp, Artificial Sequence
  Description of Artificial Sequence: Synthetic oligonucleotide
  Target: LAMA2; (-) strand; PAM type: NNGRRT; PAM sequence: CAGAAT
gttgaagtgcaaaatctttg

SEQ ID NO: 23975 - DNA, 20 bp, Artificial Sequence
  Description of Artificial Sequence: Synthetic oligonucleotide
  Target: LAMA2; (-) strand; PAM type: NNGRRT; PAM sequence: AGGAAT
aaaacaccctacgtatacat

SEQ ID NO: 23976 - DNA, 20 bp, Artificial Sequence
  Description of Artificial Sequence: Synthetic oligonucleotide
  Target: LAMA2; (-) strand; PAM type: NNGRRT; PAM sequence: GTGAAT
catcaggagaagttgtaaac

SEQ ID NO: 23977 - DNA, 20 bp, Artificial Sequence
  Description of Artificial Sequence: Synthetic oligonucleotide
  Target: LAMA2; (-) strand; PAM type: NNGRRT; PAM sequence: GTGGGT
catgatgcccttaatctgat

SEQ ID NO: 23978 - DNA, 20 bp, Artificial Sequence
  Description of Artificial Sequence: Synthetic oligonucleotide
  Target: LAMA2; (-) strand; PAM type: NNGRRT; PAM sequence: TAGAAT
ctcttactggtttcaggaat

SEQ ID NO: 23979 - DNA, 20 bp, Artificial Sequence
  Description of Artificial Sequence: Synthetic oligonucleotide
  Target: LAMA2; (-) strand; PAM type: NNGRRT; PAM sequence: AGGAAT
cctttgctcttactggtttc

SEQ ID NO: 23980 - DNA, 20 bp, Artificial Sequence
  Description of Artificial Sequence: Synthetic oligonucleotide
  Target: LAMA2; (-) strand; PAM type: NNGRRT; PAM sequence: GTGAAT
catttgccaatcttgtatga

SEQ ID NO: 23981 - DNA, 20 bp, Artificial Sequence
  Description of Artificial Sequence: Synthetic oligonucleotide
  Target: LAMA2; (-) strand; PAM type: NNGRRT; PAM sequence: ATGAGT
ctcccatttgccaatcttgt

SEQ ID NO: 23982 - DNA, 20 bp, Artificial Sequence
  Description of Artificial Sequence: Synthetic oligonucleotide
  Target: LAMA2; (-) strand; PAM type: NNGRRT; PAM sequence: CCGAAT
atgtggccactgcatcttac

SEQ ID NO: 23983 - DNA, 20 bp, Artificial Sequence
  Description of Artificial Sequence: Synthetic oligonucleotide
  Target: LAMA2; (-) strand; PAM type: NNGRRT; PAM sequence: TAGGGT
tttggattcagctaccgtta

SEQ ID NO: 23984 - DNA, 20 bp, Artificial Sequence
  Description of Artificial Sequence: Synthetic oligonucleotide
  Target: LAMA2; (-) strand; PAM type: NNGRRT; PAM sequence: TTGGAT
ttcagctatgttggtttact

SEQ ID NO: 23985 - DNA, 20 bp, Artificial Sequence
  Description of Artificial Sequence: Synthetic oligonucleotide
  Target: LAMA2; (-) strand; PAM type: NNGRRT; PAM sequence: GTGAAT
agctgaaggcaggcatatgg

SEQ ID NO: 23986 - DNA, 20 bp, Artificial Sequence
  Description of Artificial Sequence: Synthetic oligonucleotide
  Target: LAMA2; (-) strand; PAM type: NNGRRT; PAM sequence: ATGGGT
atcaagctgaaggcaggcat

SEQ ID NO: 23987 - DNA, 20 bp, Artificial Sequence
  Description of Artificial Sequence: Synthetic oligonucleotide
  Target: LAMA2; (-) strand; PAM type: NNGRRT; PAM sequence: TAGAGT
ggccacgaacatttccgaga

SEQ ID NO: 23988 - DNA, 20 bp, Artificial Sequence
  Description of Artificial Sequence: Synthetic oligonucleotide
  Target: LAMA2; (-) strand; PAM type: NNGRRT; PAM sequence: AGGGGT
gtgaatatagtttgatgaca

SEQ ID NO: 23989 - DNA, 20 bp, Artificial Sequence
  Description of Artificial Sequence: Synthetic oligonucleotide
  Target: LAMA2; (-) strand; PAM type: NNGRRT; PAM sequence: GTGAAT
cttcaccttaaaaggaaaat

SEQ ID NO: 23990 - DNA, 20 bp, Artificial Sequence
  Description of Artificial Sequence: Synthetic oligonucleotide
  Target: LAMA2; (-) strand; PAM type: NNGRRT; PAM sequence: TAGGAT
cactaaaacattaaaaaata

SEQ ID NO: 23991 - DNA, 20 bp, Artificial Sequence
  Description of Artificial Sequence: Synthetic oligonucleotide
  Target: LAMA2; (-) strand; PAM type: NNGRRT; PAM sequence: TAGGGT
taacagggcttatgggaaaa

SEQ ID NO: 23992 - DNA, 20 bp, Artificial Sequence
  Description of Artificial Sequence: Synthetic oligonucleotide
  Target: LAMA2; (-) strand; PAM type: NNGRRT; PAM sequence: AGGAGT
caaacaaacaaacaaacacc

SEQ ID NO: 23993 - DNA, 20 bp, Artificial Sequence
  Description of Artificial Sequence: Synthetic oligonucleotide
  Target: LAMA2; (-) strand; PAM type: NNGRRT; PAM sequence: AGGAAT
aatcactcctgctctttagt

SEQ ID NO: 23994 - DNA, 20 bp, Artificial Sequence
  Description of Artificial Sequence: Synthetic oligonucleotide
  Target: LAMA2; (-) strand; PAM type: NNGRRT; PAM sequence: TTGAAT
tttatctcttctactgacta

SEQ ID NO: 23995 - DNA, 20 bp, Artificial Sequence
  Description of Artificial Sequence: Synthetic oligonucleotide
  Target: LAMA2; (-) strand; PAM type: NNGRRT; PAM sequence: GTGAAT
ccccttactttaatcttaat

SEQ ID NO: 23996 - DNA, 20 bp, Artificial Sequence
  Description of Artificial Sequence: Synthetic oligonucleotide
  Target: LAMA2; (-) strand; PAM type: NNGRRT; PAM sequence: GTGAAT
ttggagcagctacgttctag

SEQ ID NO: 23997 - DNA, 20 bp, Artificial Sequence
  Description of Artificial Sequence: Synthetic oligonucleotide
  Target: LAMA2; (-) strand; PAM type: NNGRRT; PAM sequence: CTGAAT
atagagttatcctattcatt

SEQ ID NO: 23998 - DNA, 20 bp, Artificial Sequence
  Description of Artificial Sequence: Synthetic oligonucleotide
  Target: LAMA2; (-) strand; PAM type: NNGRRT; PAM sequence: TAGAGT
tatttcgacatagaatagaa

SEQ ID NO: 23999 - DNA, 20 bp, Artificial Sequence
  Description of Artificial Sequence: Synthetic oligonucleotide
  Target: LAMA2; (-) strand; PAM type: NNGRRT; PAM sequence: TAGAAT
tataatatttcgacatagaa

SEQ ID NO: 24000 - DNA, 20 bp, Artificial Sequence
  Description of Artificial Sequence: Synthetic oligonucleotide
  Target: LAMA2; (-) strand; PAM type: NNGRRT; PAM sequence: TAGAAT
cactctataatatttcgaca

SEQ ID NO: 24001 - DNA, 20 bp, Artificial Sequence
  Description of Artificial Sequence: Synthetic oligonucleotide
  Target: LAMA2; (-) strand; PAM type: NNGRRT; PAM sequence: ATGAGT
actatgggatgagaaataat

SEQ ID NO: 24002 - DNA, 20 bp, Artificial Sequence
  Description of Artificial Sequence: Synthetic oligonucleotide
  Target: LAMA2; (-) strand; PAM type: NNGRRT; PAM sequence: TGGGAT
tggctttgaattggtgacta

SEQ ID NO: 24003 - DNA, 20 bp, Artificial Sequence
  Description of Artificial Sequence: Synthetic oligonucleotide
  Target: LAMA2; (-) strand; PAM type: NNGRRT; PAM sequence: TTGAAT
gaaacaaggtaagtctggct

SEQ ID NO: 24004 - DNA, 20 bp, Artificial Sequence
  Description of Artificial Sequence: Synthetic oligonucleotide
  Target: LAMA2; (-) strand; PAM type: NNGRRT; PAM sequence: GGGAGT
gcgggaaagagttgtggact

SEQ ID NO: 24005 - DNA, 20 bp, Artificial Sequence
  Description of Artificial Sequence: Synthetic oligonucleotide
  Target: LAMA2; (-) strand; PAM type: NNGRRT; PAM sequence: AAGAGT
ttgtggagatacctgcggga

SEQ ID NO: 24006 - DNA, 20 bp, Artificial Sequence
  Description of Artificial Sequence: Synthetic oligonucleotide
  Target: LAMA2; (-) strand; PAM type: NNGRRT; PAM sequence: GTGAAT
gaatatctaagataagtctt

SEQ ID NO: 24007 - DNA, 20 bp, Artificial Sequence
  Description of Artificial Sequence: Synthetic oligonucleotide
  Target: LAMA2; (-) strand; PAM type: NNGRRT; PAM sequence: ATGAAT
caatattggatgcataatta

SEQ ID NO: 24008 - DNA, 20 bp, Artificial Sequence
  Description of Artificial Sequence: Synthetic oligonucleotide
  Target: LAMA2; (-) strand; PAM type: NNGRRT; PAM sequence: TTGGAT
gaatatatgtttaatcaata

SEQ ID NO: 24009 - DNA, 20 bp, Artificial Sequence
  Description of Artificial Sequence: Synthetic oligonucleotide
  Target: LAMA2; (-) strand; PAM type: NNGRRT; PAM sequence: GAGAAT
gtatagcaaattgcctcaca

SEQ ID NO: 24010 - DNA, 20 bp, Artificial Sequence
  Description of Artificial Sequence: Synthetic oligonucleotide
  Target: LAMA2; (-) strand; PAM type: NNGRRT; PAM sequence: TAGGAT
tagaatccagttgatgtttg

SEQ ID NO: 24011 - DNA, 20 bp, Artificial Sequence
  Description of Artificial Sequence: Synthetic oligonucleotide
  Target: LAMA2; (-) strand; PAM type: NNGRRT; PAM sequence: TAGAAT
acaatacagtacttggatcc

SEQ ID NO: 24012 - DNA, 20 bp, Artificial Sequence
  Description of Artificial Sequence: Synthetic oligonucleotide
  Target: LAMA2; (-) strand; PAM type: NNGRRT; PAM sequence: TTGGAT
tagtacatacaatacagtac

SEQ ID NO: 24013 - DNA, 20 bp, Artificial Sequence
  Description of Artificial Sequence: Synthetic oligonucleotide
  Target: LAMA2; (-) strand; PAM type: NNGRRT; PAM sequence: TAGAAT
gtttcttctgtctccttcac

SEQ ID NO: 24014 - DNA, 20 bp, Artificial Sequence
  Description of Artificial Sequence: Synthetic oligonucleotide
  Target: LAMA2; (-) strand; PAM type: NNGRRT; PAM sequence: CTGAAT
cttatatataggatcctact

SEQ ID NO: 24015 - DNA, 20 bp, Artificial Sequence
  Description of Artificial Sequence: Synthetic oligonucleotide
  Target: LAMA2; (-) strand; PAM type: NNGRRT; PAM sequence: TAGGAT
attattacatttcttatata

SEQ ID NO: 24016 - DNA, 20 bp, Artificial Sequence
  Description of Artificial Sequence: Synthetic oligonucleotide
  Target: LAMA2; (-) strand; PAM type: NNGRRT; PAM sequence: GAGAAT
gcggggtttctggatgggct

SEQ ID NO: 24017 - DNA, 20 bp, Artificial Sequence
  Description of Artificial Sequence: Synthetic oligonucleotide
  Target: LAMA2; (-) strand; PAM type: NNGRRT; PAM sequence: CTGGAT
tgggcaaaggggcggggttt

SEQ ID NO: 24018 - DNA, 20 bp, Artificial Sequence
  Description of Artificial Sequence: Synthetic oligonucleotide
  Target: LAMA2; (-) strand; PAM type: NNGRRT; PAM sequence: CGGGGT
gtggtatttgggcaaagggg

SEQ ID NO: 24019 - DNA, 20 bp, Artificial Sequence
  Description of Artificial Sequence: Synthetic oligonucleotide
  Target: LAMA2; (-) strand; PAM type: NNGRRT; PAM sequence: AAGGGT
agatagttatattgatgctt

SEQ ID NO: 24020 - DNA, 20 bp, Artificial Sequence
  Description of Artificial Sequence: Synthetic oligonucleotide
  Target: LAMA2; (-) strand; PAM type: NNGRRT; PAM sequence: TAGAAT
catctctactgccaccgtgc

SEQ ID NO: 24021 - DNA, 20 bp, Artificial Sequence
  Description of Artificial Sequence: Synthetic oligonucleotide
  Target: LAMA2; (-) strand; PAM type: NNGRRT; PAM sequence: CTGAAT
tgtcattattcaatgcatca

SEQ ID NO: 24022 - DNA, 20 bp, Artificial Sequence
  Description of Artificial Sequence: Synthetic oligonucleotide
  Target: LAMA2; (-) strand; PAM type: NNGRRT; PAM sequence: ATGAAT
tgagaagagagacatttcac

SEQ ID NO: 24023 - DNA, 20 bp, Artificial Sequence
  Description of Artificial Sequence: Synthetic oligonucleotide
  Target: LAMA2; (-) strand; PAM type: NNGRRT; PAM sequence: TTGAAT
gcataaccttctccatcaaa

SEQ ID NO: 24024 - DNA, 20 bp, Artificial Sequence
  Description of Artificial Sequence: Synthetic oligonucleotide
  Target: LAMA2; (-) strand; PAM type: NNGRRT; PAM sequence: GCGAAT
gtggagatgttggggtacca

SEQ ID NO: 24025 - DNA, 20 bp, Artificial Sequence
  Description of Artificial Sequence: Synthetic oligonucleotide
  Target: LAMA2; (-) strand; PAM type: NNGRRT; PAM sequence: TGGGGT
gaacatgacagtggagatgt

SEQ ID NO: 24026 - DNA, 20 bp, Artificial Sequence
  Description of Artificial Sequence: Synthetic oligonucleotide
  Target: LAMA2; (-) strand; PAM type: NNGRRT; PAM sequence: GGGAGT
attgcttaaaggattatgtg

SEQ ID NO: 24027 - DNA, 20 bp, Artificial Sequence
  Description of Artificial Sequence: Synthetic oligonucleotide
  Target: LAMA2; (-) strand; PAM type: NNGRRT; PAM sequence: AAGGAT
attaccggatgtattgctta

SEQ ID NO: 24028 - DNA, 20 bp, Artificial Sequence
  Description of Artificial Sequence: Synthetic oligonucleotide
  Target: LAMA2; (-) strand; PAM type: NNGRRT; PAM sequence: CCGGAT
catgctgggaaaaattatta

SEQ ID NO: 24029 - DNA, 20 bp, Artificial Sequence
  Description of Artificial Sequence: Synthetic oligonucleotide
  Target: LAMA2; (-) strand; PAM type: NNGRRT; PAM sequence: AAGAAT
accagaaaaaaatgaggcca

SEQ ID NO: 24030 - DNA, 20 bp, Artificial Sequence
  Description of Artificial Sequence: Synthetic oligonucleotide
  Target: LAMA2; (-) strand; PAM type: NNGRRT; PAM sequence: AAGAAT
ccaaaaggtatgttcccaga

SEQ ID NO: 24031 - DNA, 20 bp, Artificial Sequence
  Description of Artificial Sequence: Synthetic oligonucleotide
  Target: LAMA2; (-) strand; PAM type: NNGRRT; PAM sequence: GTGAGT
ttttattacagtcgtaaaat

SEQ ID NO: 24032 - DNA, 20 bp, Artificial Sequence
  Description of Artificial Sequence: Synthetic oligonucleotide
  Target: LAMA2; (-) strand; PAM type: NNGRRT; PAM sequence: CTGAAT
agaattggtgttactatttt

SEQ ID NO: 24033 - DNA, 20 bp, Artificial Sequence
  Description of Artificial Sequence: Synthetic oligonucleotide
  Target: LAMA2; (-) strand; PAM type: NNGRRT; PAM sequence: TAGAAT
gcagaaatccattttgaaaa

SEQ ID NO: 24034 - DNA, 20 bp, Artificial Sequence
  Description of Artificial Sequence: Synthetic oligonucleotide
  Target: LAMA2; (-) strand; PAM type: NNGRRT; PAM sequence: CTGAAT
agggtcttgtggctaaattg

SEQ ID NO: 24035 - DNA, 20 bp, Artificial Sequence
  Description of Artificial Sequence: Synthetic oligonucleotide
  Target: LAMA2; (-) strand; PAM type: NNGRRT; PAM sequence: TAGGGT
ttttcttgtgtggtttatgt

SEQ ID NO: 24036 - DNA, 20 bp, Artificial Sequence
  Description of Artificial Sequence: Synthetic oligonucleotide
  Target: LAMA2; (-) strand; PAM type: NNGRRT; PAM sequence: ATGAGT
ttagatacacagagaagtat

SEQ ID NO: 24037 - DNA, 20 bp, Artificial Sequence
  Description of Artificial Sequence: Synthetic oligonucleotide
  Target: LAMA2; (-) strand; PAM type: NNGRRT; PAM sequence: TAGAGT
tcatgaaatctctctattaa

SEQ ID NO: 24038 - DNA, 20 bp, Artificial Sequence
  Description of Artificial Sequence: Synthetic oligonucleotide
  Target: LAMA2; (-) strand; PAM type: NNGRRT; PAM sequence: GTGAAT
gtttttgaattcttgacaga

SEQ ID NO: 24039 - DNA, 20 bp, Artificial Sequence
  Description of Artificial Sequence: Synthetic oligonucleotide
  Target: LAMA2; (-) strand; PAM type: NNGRRT; PAM sequence: CAGAGT
ccttgtttttgaattcttga

SEQ ID NO: 24040 - DNA, 20 bp, Artificial Sequence
  Description of Artificial Sequence: Synthetic oligonucleotide
  Target: LAMA2; (-) strand; PAM type: NNGRRT; PAM sequence: TTGAAT
tgtaaaaactcaccttgttt

SEQ ID NO: 24041 - DNA, 20 bp, Artificial Sequence
  Description of Artificial Sequence: Synthetic oligonucleotide
  Target: LAMA2; (-) strand; PAM type: NNGRRT; PAM sequence: TTGGAT
tgatcaggtacatgtgcact

SEQ ID NO: 24042 - DNA, 20 bp, Artificial Sequence
  Description of Artificial Sequence: Synthetic oligonucleotide
  Target: LAMA2; (-) strand; PAM type: NNGRRT; PAM sequence: GTGAGT
ataaatttttcactgaactc

SEQ ID NO: 24043 - DNA, 20 bp, Artificial Sequence
  Description of Artificial Sequence: Synthetic oligonucleotide
  Target: LAMA2; (-) strand; PAM type: NNGRRT; PAM sequence: CAGGAT
aacatttttcaaacatatta

SEQ ID NO: 24044 - DNA, 20 bp, Artificial Sequence
  Description of Artificial Sequence: Synthetic oligonucleotide
  Target: LAMA2; (-) strand; PAM type: NNGRRT; PAM sequence: CCGAAT
gaaagtgttttaaaatgtcc

SEQ ID NO: 24045 - DNA, 20 bp, Artificial Sequence
  Description of Artificial Sequence: Synthetic oligonucleotide
  Target: LAMA2; (-) strand; PAM type: NNGRRT; PAM sequence: TTGAGT
gtctgtgaccacataaaagt

SEQ ID NO: 24046 - DNA, 20 bp, Artificial Sequence
  Description of Artificial Sequence: Synthetic oligonucleotide
  Target: LAMA2; (-) strand; PAM type: NNGRRT; PAM sequence: TTGGAT
tacactcagaattaatagac

SEQ ID NO: 24047 - DNA, 20 bp, Artificial Sequence
  Description of Artificial Sequence: Synthetic oligonucleotide
  Target: LAMA2; (-) strand; PAM type: NNGRRT; PAM sequence: CAGAAT
aaaagcaatagcactacact

SEQ ID NO: 24048 - DNA, 20 bp, Artificial Sequence
  Description of Artificial Sequence: Synthetic oligonucleotide
  Target: LAMA2; (-) strand; PAM type: NNGRRT; PAM sequence: CAGAAT
attggtaatgccatactaca

SEQ ID NO: 24049 - DNA, 20 bp, Artificial Sequence
  Description of Artificial Sequence: Synthetic oligonucleotide
  Target: LAMA2; (-) strand; PAM type: NNGRRT; PAM sequence: TTGAGT
actggcattggcaacattaa

SEQ ID NO: 24050 - DNA, 20 bp, Artificial Sequence
  Description of Artificial Sequence: Synthetic oligonucleotide
  Target: LAMA2; (-) strand; PAM type: NNGRRT; PAM sequence: CAGGGT
tcctcatccagcttgtgcct

SEQ ID NO: 24051 - DNA, 20 bp, Artificial Sequence
  Description of Artificial Sequence: Synthetic oligonucleotide
  Target: LAMA2; (-) strand; PAM type: NNGRRT; PAM sequence: AAGGAT
tgttggaaatgcagctggaa

SEQ ID NO: 24052 - DNA, 20 bp, Artificial Sequence
  Description of Artificial Sequence: Synthetic oligonucleotide
  Target: LAMA2; (-) strand; PAM type: NNGRRT; PAM sequence: TAGAGT
tcccatatgagaggtttctc

SEQ ID NO: 24053 - DNA, 20 bp, Artificial Sequence
  Description of Artificial Sequence: Synthetic oligonucleotide
  Target: LAMA2; (-) strand; PAM type: NNGRRT; PAM sequence: AAGAAT
tgcagcagcactccaaaata

SEQ ID NO: 24054 - DNA, 20 bp, Artificial Sequence
  Description of Artificial Sequence: Synthetic oligonucleotide
  Target: LAMA2; (-) strand; PAM type: NNGRRT; PAM sequence: CTGGGT
ttaaagaaatttgggaaatg

SEQ ID NO: 24055 - DNA, 20 bp, Artificial Sequence
  Description of Artificial Sequence: Synthetic oligonucleotide
  Target: LAMA2; (-) strand; PAM type: NNGRRT; PAM sequence: AAGGAT
tgctagtattacaggaatgg

SEQ ID NO: 24056 - DNA, 20 bp, Artificial Sequence
  Description of Artificial Sequence: Synthetic oligonucleotide
  Target: LAMA2; (-) strand; PAM type: NNGRRT; PAM sequence: AGGAAT
cagcagaatgctagtattac

SEQ ID NO: 24057 - DNA, 20 bp, Artificial Sequence
  Description of Artificial Sequence: Synthetic oligonucleotide
  Target: LAMA2; (-) strand; PAM type: NNGRRT; PAM sequence: CAGAAT
attccccaaagtgtgttcag

SEQ ID NO: 24058 - DNA, 20 bp, Artificial Sequence
  Description of Artificial Sequence: Synthetic oligonucleotide
  Target: LAMA2; (-) strand; PAM type: NNGRRT; PAM sequence: ATGGAT
aacattcattcgtgtaggct

SEQ ID NO: 24059 - DNA, 20 bp, Artificial Sequence
  Description of Artificial Sequence: Synthetic oligonucleotide
  Target: LAMA2; (-) strand; PAM type: NNGRRT; PAM sequence: CAGGAT
ctcggtatccctatggcttt

SEQ ID NO: 24060 - DNA, 20 bp, Artificial Sequence
  Description of Artificial Sequence: Synthetic oligonucleotide
  Target: LAMA2; (-) strand; PAM type: NNGRRT; PAM sequence: TAGAGT
acaccctttcttaaaactct

SEQ ID NO: 24061 - DNA, 20 bp, Artificial Sequence
  Description of Artificial Sequence: Synthetic oligonucleotide
  Target: LAMA2; (-) strand; PAM type: NNGRRT; PAM sequence: TAGGAT
tgtttctgggttatgtcact

SEQ ID NO: 24062 - DNA, 20 bp, Artificial Sequence
  Description of Artificial Sequence: Synthetic oligonucleotide
  Target: LAMA2; (-) strand; PAM type: NNGRRT; PAM sequence: CTGGGT
tggtattggattttctgttt

SEQ ID NO: 24063 - DNA, 20 bp, Artificial Sequence
  Description of Artificial Sequence: Synthetic oligonucleotide
  Target: LAMA2; (-) strand; PAM type: NNGRRT; PAM sequence: TTGGAT
gtaagtgagaacatatggta

SEQ ID NO: 24064 - DNA, 20 bp, Artificial Sequence
  Description of Artificial Sequence: Synthetic oligonucleotide
  Target: LAMA2; (-) strand; PAM type: NNGRRT; PAM sequence: TGGAGT
ttctcctccctccccccttt

SEQ ID NO: 24065 - DNA, 20 bp, Artificial Sequence
  Description of Artificial Sequence: Synthetic oligonucleotide
  Target: LAMA2; (-) strand; PAM type: NNGRRT; PAM sequence: AAGAGT
gtttcatggatatattgcat

SEQ ID NO: 24066 - DNA, 20 bp, Artificial Sequence
  Description of Artificial Sequence: Synthetic oligonucleotide
  Target: LAMA2; (-) strand; PAM type: NNGRRT; PAM sequence: ATGGAT
tgcatatgaaggtttgtttc

SEQ ID NO: 24067 - DNA, 20 bp, Artificial Sequence
  Description of Artificial Sequence: Synthetic oligonucleotide
  Target: LAMA2; (-) strand; PAM type: NNGRRT; PAM sequence: CCGAAT
agccaattcagcttagtgtt

SEQ ID NO: 24068 - DNA, 20 bp, Artificial Sequence
  Description of Artificial Sequence: Synthetic oligonucleotide
  Target: LAMA2; (-) strand; PAM type: NNGRRT; PAM sequence: TAGAGT
accaagcatattactatctt

SEQ ID NO: 24069 - DNA, 20 bp, Artificial Sequence
  Description of Artificial Sequence: Synthetic oligonucleotide
  Target: LAMA2; (-) strand; PAM type: NNGRRT; PAM sequence: TTGAAT
aaaattgttctcctaagttg

SEQ ID NO: 24070 - DNA, 20 bp, Artificial Sequence
  Description of Artificial Sequence: Synthetic oligonucleotide
  Target: LAMA2; (-) strand; PAM type: NNGRRT; PAM sequence: TAGAAT
tgtttatttgttttaatgga

SEQ ID NO: 24071 - DNA, 20 bp, Artificial Sequence
  Description of Artificial Sequence: Synthetic oligonucleotide
  Target: LAMA2; (-) strand; PAM type: NNGRRT; PAM sequence: ATGGAT
tcttttgtttatttgtttta

SEQ ID NO: 24072 - DNA, 20 bp, Artificial Sequence
  Description of Artificial Sequence: Synthetic oligonucleotide
  Target: LAMA2; (-) strand; PAM type: NNGRRT; PAM sequence: TGGAAT
ggaagaactttctgaattga

SEQ ID NO: 24073 - DNA, 20 bp, Artificial Sequence
  Description of Artificial Sequence: Synthetic oligonucleotide
  Target: LAMA2; (-) strand; PAM type: NNGRRT; PAM sequence: CTGAAT
cctattgggggaagaacttt

SEQ ID NO: 24074 - DNA, 20 bp, Artificial Sequence
  Description of Artificial Sequence: Synthetic oligonucleotide
  Target: LAMA2; (-) strand; PAM type: NNGRRT; PAM sequence: CAGAGT
tctttctgatttctggacca

SEQ ID NO: 24075 - DNA, 20 bp, Artificial Sequence
  Description of Artificial Sequence: Synthetic oligonucleotide
  Target: LAMA2; (-) strand; PAM type: NNGRRT; PAM sequence: TGGGAT
acagaagatactgagtaggc

SEQ ID NO: 24076 - DNA, 20 bp, Artificial Sequence
  Description of Artificial Sequence: Synthetic oligonucleotide
  Target: LAMA2; (-) strand; PAM type: NNGRRT; PAM sequence: CTGAGT
cagaaatgtcacagaagata

SEQ ID NO: 24077 - DNA, 20 bp, Artificial Sequence
  Description of Artificial Sequence: Synthetic oligonucleotide
  Target: LAMA2; (-) strand; PAM type: NNGRRT; PAM sequence: AGGGAT
gtatcagccaactgtgtcaa

SEQ ID NO: 24078 - DNA, 20 bp, Artificial Sequence
  Description of Artificial Sequence: Synthetic oligonucleotide
  Target: LAMA2; (-) strand; PAM type: NNGRRT; PAM sequence: TAGAGT
ggcaaaaagcaatgtgagtc

SEQ ID NO: 24079 - DNA, 20 bp, Artificial Sequence
  Description of Artificial Sequence: Synthetic oligonucleotide
  Target: LAMA2; (-) strand; PAM type: NNGRRT; PAM sequence: GTGAGT
tcagaaaggcaaaaagcaat

SEQ ID NO: 24080 - DNA, 20 bp, Artificial Sequence
  Description of Artificial Sequence: Synthetic oligonucleotide
  Target: LAMA2; (-) strand; PAM type: NNGRRT; PAM sequence: AGGAGT
gactgcttggtgcatttgac

SEQ ID NO: 24081 - DNA, 20 bp, Artificial Sequence
  Description of Artificial Sequence: Synthetic oligonucleotide
  Target: LAMA2; (-) strand; PAM type: NNGRRT; PAM sequence: GAGAAT
ttaatacccaaaataaaagt

SEQ ID NO: 24082 - DNA, 20 bp, Artificial Sequence
  Description of Artificial Sequence: Synthetic oligonucleotide
  Target: LAMA2; (-) strand; PAM type: NNGRRT; PAM sequence: GAGAAT
agatacaatagagaagtaag

SEQ ID NO: 24083 - DNA, 20 bp, Artificial Sequence
  Description of Artificial Sequence: Synthetic oligonucleotide
  Target: LAMA2; (-) strand; PAM type: NNGRRT; PAM sequence: AAGAAT
agaagttcccagtctaattt

SEQ ID NO: 24084 - DNA, 20 bp, Artificial Sequence
  Description of Artificial Sequence: Synthetic oligonucleotide
  Target: LAMA2; (-) strand; PAM type: NNGRRT; PAM sequence: ATGGGT
gacaccagagataatagaga

SEQ ID NO: 24085 - DNA, 20 bp, Artificial Sequence
  Description of Artificial Sequence: Synthetic oligonucleotide
  Target: LAMA2; (-) strand; PAM type: NNGRRT; PAM sequence: GAGAAT
gtgagacaccagagataata

SEQ ID NO: 24086 - DNA, 20 bp, Artificial Sequence
  Description of Artificial Sequence: Synthetic oligonucleotide
  Target: LAMA2; (-) strand; PAM type: NNGRRT; PAM sequence: TTGGAT
aaagtattagagaaaatata

SEQ ID NO: 24087 - DNA, 20 bp, Artificial Sequence
  Description of Artificial Sequence: Synthetic oligonucleotide
  Target: LAMA2; (-) strand; PAM type: NNGRRT; PAM sequence: GTGAAT
gaagtttgcatttttctttt

SEQ ID NO: 24088 - DNA, 20 bp, Artificial Sequence
  Description of Artificial Sequence: Synthetic oligonucleotide
  Target: LAMA2; (-) strand; PAM type: NNGRRT; PAM sequence: TTGGAT
tactgctttaagtgtgatct

SEQ ID NO: 24089 - DNA, 20 bp, Artificial Sequence
  Description of Artificial Sequence: Synthetic oligonucleotide
  Target: LAMA2; (-) strand; PAM type: NNGRRT; PAM sequence: AAGGGT
gtgcagcaggtaagttactc

SEQ ID NO: 24090 - DNA, 20 bp, Artificial Sequence
  Description of Artificial Sequence: Synthetic oligonucleotide
  Target: LAMA2; (-) strand; PAM type: NNGRRT; PAM sequence: CTGGAT
ttcatatgatgctttttggc

SEQ ID NO: 24091 - DNA, 20 bp, Artificial Sequence
  Description of Artificial Sequence: Synthetic oligonucleotide
  Target: LAMA2; (-) strand; PAM type: NNGRRT; PAM sequence: TCGAGT
atgtcttccacactgacacc

SEQ ID NO: 24092 - DNA, 20 bp, Artificial Sequence
  Description of Artificial Sequence: Synthetic oligonucleotide
  Target: LAMA2; (-) strand; PAM type: NNGRRT; PAM sequence: TTGAAT
acctcctgcctagactatta

SEQ ID NO: 24093 - DNA, 20 bp, Artificial Sequence
  Description of Artificial Sequence: Synthetic oligonucleotide
  Target: LAMA2; (-) strand; PAM type: NNGRRT; PAM sequence: GTGGAT
ctgtgtaatggtatcacatg

SEQ ID NO: 24094 - DNA, 20 bp, Artificial Sequence
  Description of Artificial Sequence: Synthetic oligonucleotide
  Target: LAMA2; (-) strand; PAM type: NNGRRT; PAM sequence: CTGAGT
gtctccaccttctgccagta

SEQ ID NO: 24095 - DNA, 20 bp, Artificial Sequence
  Description of Artificial Sequence: Synthetic oligonucleotide
  Target: LAMA2; (-) strand; PAM type: NNGRRT; PAM sequence: ATGAGT
tatatcctcagcagcagtgt

SEQ ID NO: 24096 - DNA, 20 bp, Artificial Sequence
  Description of Artificial Sequence: Synthetic oligonucleotide
  Target: LAMA2; (-) strand; PAM type: NNGRRT; PAM sequence: AGGAGT
tgtgtcctgggtgaataatt

SEQ ID NO: 24097 - DNA, 20 bp, Artificial Sequence
  Description of Artificial Sequence: Synthetic oligonucleotide
  Target: LAMA2; (-) strand; PAM type: NNGRRT; PAM sequence: GTGAAT
tatgctttcttgtgtcctgg

SEQ ID NO: 24098 - DNA, 20 bp, Artificial Sequence
  Description of Artificial Sequence: Synthetic oligonucleotide
  Target: LAMA2; (-) strand; PAM type: NNGRRT; PAM sequence: CTGGGT
aaaatatgctttcttgtgtc

SEQ ID NO: 24099 - DNA, 20 bp, Artificial Sequence
  Description of Artificial Sequence: Synthetic oligonucleotide
  Target: LAMA2; (-) strand; PAM type: NNGRRT; PAM sequence: TTGAGT
atgtgatttgttttcagttt

SEQ ID NO: 24100 - DNA, 20 bp, Artificial Sequence
  Description of Artificial Sequence: Synthetic oligonucleotide
  Target: LAMA2; (-) strand; PAM type: NNGRRT; PAM sequence: ATGGAT
gtatatctatttacctgtcg

SEQ ID NO: 24101 - DNA, 20 bp, Artificial Sequence
  Description of Artificial Sequence: Synthetic oligonucleotide
  Target: LAMA2; (-) strand; PAM type: NNGRRT; PAM sequence: ATGAGT
tattgctagtattccattgt

SEQ ID NO: 24102 - DNA, 20 bp, Artificial Sequence
  Description of Artificial Sequence: Synthetic oligonucleotide
  Target: LAMA2; (-) strand; PAM type: NNGRRT; PAM sequence: CTGAGT
taatactttattttttattg

SEQ ID NO: 24103 - DNA, 20 bp, Artificial Sequence
  Description of Artificial Sequence: Synthetic oligonucleotide
  Target: LAMA2; (-) strand; PAM type: NNGRRT; PAM sequence: TTGGAT
tgccttttttgtctgcctat

SEQ ID NO: 24104 - DNA, 20 bp, Artificial Sequence
  Description of Artificial Sequence: Synthetic oligonucleotide
  Target: LAMA2; (-) strand; PAM type: NNGRRT; PAM sequence: AGGAAT
tttttaaaacagttttactg

SEQ ID NO: 24105 - DNA, 20 bp, Artificial Sequence
  Description of Artificial Sequence: Synthetic oligonucleotide
  Target: LAMA2; (-) strand; PAM type: NNGRRT; PAM sequence: GAGAGT
ccacccaatctactaaacta

SEQ ID NO: 24106 - DNA, 20 bp, Artificial Sequence
  Description of Artificial Sequence: Synthetic oligonucleotide
  Target: LAMA2; (-) strand; PAM type: NNGRRT; PAM sequence: TGGGGT
tcattctcaatctcctaccc

SEQ ID NO: 24107 - DNA, 20 bp, Artificial Sequence
  Description of Artificial Sequence: Synthetic oligonucleotide
  Target: LAMA2; (-) strand; PAM type: NNGRRT; PAM sequence: CTGAAT
ggagttcttttaaactttat

SEQ ID NO: 24108 - DNA, 20 bp, Artificial Sequence
  Description of Artificial Sequence: Synthetic oligonucleotide
  Target: LAMA2; (-) strand; PAM type: NNGRRT; PAM sequence: TGGAGT
ctgcctatacccaaactcag

SEQ ID NO: 24109 - DNA, 20 bp, Artificial Sequence
  Description of Artificial Sequence: Synthetic oligonucleotide
  Target: LAMA2; (-) strand; PAM type: NNGRRT; PAM sequence: GAGAAT
agtgctcttgccaactagtt

SEQ ID NO: 24110 - DNA, 20 bp, Artificial Sequence
  Description of Artificial Sequence: Synthetic oligonucleotide
  Target: LAMA2; (-) strand; PAM type: NNGRRT; PAM sequence: TTGAAT
acactcctgaaggactgtac

SEQ ID NO: 24111 - DNA, 20 bp, Artificial Sequence
  Description of Artificial Sequence: Synthetic oligonucleotide
  Target: LAMA2; (-) strand; PAM type: NNGRRT; PAM sequence: GGGGAT
catcctacttgatgcattta

SEQ ID NO: 24112 - DNA, 20 bp, Artificial Sequence
  Description of Artificial Sequence: Synthetic oligonucleotide
  Target: LAMA2; (-) strand; PAM type: NNGRRT; PAM sequence: TTGAGT
ttgatccactgaaaatctaa

SEQ ID NO: 24113 - DNA, 20 bp, Artificial Sequence
  Description of Artificial Sequence: Synthetic oligonucleotide
  Target: LAMA2; (-) strand; PAM type: NNGRRT; PAM sequence: CTGAGT
gaaatattttataatcaatg

SEQ ID NO: 24114 - DNA, 20 bp, Artificial Sequence
  Description of Artificial Sequence: Synthetic oligonucleotide
  Target: LAMA2; (-) strand; PAM type: NNGRRT; PAM sequence: CAGAGT
attttattaaataatagaca

SEQ ID NO: 24115 - DNA, 20 bp, Artificial Sequence
  Description of Artificial Sequence: Synthetic oligonucleotide
  Target: LAMA2; (-) strand; PAM type: NNGRRT; PAM sequence: AAGGAT
ttataagtaggtagggaaat

SEQ ID NO: 24116 - DNA, 20 bp, Artificial Sequence
  Description of Artificial Sequence: Synthetic oligonucleotide
  Target: LAMA2; (-) strand; PAM type: NNGRRT; PAM sequence: ATGAGT
gacacaaaatttcacagttg

SEQ ID NO: 24117 - DNA, 20 bp, Artificial Sequence
  Description of Artificial Sequence: Synthetic oligonucleotide
  Target: LAMA2; (-) strand; PAM type: NNGRRT; PAM sequence: GTGGGT
tcatgagtgatagcgatgaa

SEQ ID NO: 24118 - DNA, 20 bp, Artificial Sequence
  Description of Artificial Sequence: Synthetic oligonucleotide
  Target: LAMA2; (-) strand; PAM type: NNGRRT; PAM sequence: ATGAGT
agtgctttactctatccttc

SEQ ID NO: 24119 - DNA, 20 bp, Artificial Sequence
  Description of Artificial Sequence: Synthetic oligonucleotide
  Target: LAMA2; (-) strand; PAM type: NNGRRT; PAM sequence: GGGAGT
catatttttactgacttaaa

SEQ ID NO: 24120 - DNA, 20 bp, Artificial Sequence
  Description of Artificial Sequence: Synthetic oligonucleotide
  Target: LAMA2; (-) strand; PAM type: NNGRRT; PAM sequence: CAGGAT
aaaggtaactggcagagaga

SEQ ID NO: 24121 - DNA, 20 bp, Artificial Sequence
  Description of Artificial Sequence: Synthetic oligonucleotide
  Target: LAMA2; (-) strand; PAM type: NNGRRT; PAM sequence: TTGAAT
attaaagagcagcaacacaa

SEQ ID NO: 24122 - DNA, 20 bp, Artificial Sequence
  Description of Artificial Sequence: Synthetic oligonucleotide
  Target: LAMA2; (-) strand; PAM type: NNGRRT; PAM sequence: ATGAAT
gttttcctccttatccatga

SEQ ID NO: 24123 - DNA, 20 bp, Artificial Sequence
  Description of Artificial Sequence: Synthetic oligonucleotide
  Target: LAMA2; (-) strand; PAM type: NNGRRT; PAM sequence: ATGAAT
ggtggttttcctccttatcc

SEQ ID NO: 24124 - DNA, 20 bp, Artificial Sequence
  Description of Artificial Sequence: Synthetic oligonucleotide
  Target: LAMA2; (-) strand; PAM type: NNGRRT; PAM sequence: GTGGGT
agtctctttctacagacttg

SEQ ID NO: 24125 - DNA, 20 bp, Artificial Sequence
  Description of Artificial Sequence: Synthetic oligonucleotide
  Target: LAMA2; (-) strand; PAM type: NNGRRT; PAM sequence: TTGAAT
agcaagttaagattttaaaa

SEQ ID NO: 24126 - DNA, 20 bp, Artificial Sequence
  Description of Artificial Sequence: Synthetic oligonucleotide
  Target: LAMA2; (-) strand; PAM type: NNGRRT; PAM sequence: AAGAAT
caaacaagaaaaatacctaa

SEQ ID NO: 24127 - DNA, 20 bp, Artificial Sequence
  Description of Artificial Sequence: Synthetic oligonucleotide
  Target: LAMA2; (-) strand; PAM type: NNGRRT; PAM sequence: CAGAAT
tcactcaactcatcatcttt

SEQ ID NO: 24128 - DNA, 20 bp, Artificial Sequence
  Description of Artificial Sequence: Synthetic oligonucleotide
  Target: LAMA2; (-) strand; PAM type: NNGRRT; PAM sequence: CTGGGT
tcaaataaatatgacaaata

SEQ ID NO: 24129 - DNA, 20 bp, Artificial Sequence
  Description of Artificial Sequence: Synthetic oligonucleotide
  Target: LAMA2; (-) strand; PAM type: NNGRRT; PAM sequence: TTGGAT
ttctttaggatgctagtttc

SEQ ID NO: 24130 - DNA, 20 bp, Artificial Sequence
  Description of Artificial Sequence: Synthetic oligonucleotide
  Target: LAMA2; (-) strand; PAM type: NNGRRT; PAM sequence: TAGGAT
atttctaaatgtttattctt

SEQ ID NO: 24131 - DNA, 20 bp, Artificial Sequence
  Description of Artificial Sequence: Synthetic oligonucleotide
  Target: LAMA2; (-) strand; PAM type: NNGRRT; PAM sequence: GGGAAT
tttgaaccagtgggttataa

SEQ ID NO: 24132 - DNA, 20 bp, Artificial Sequence
  Description of Artificial Sequence: Synthetic oligonucleotide
  Target: LAMA2; (-) strand; PAM type: NNGRRT; PAM sequence: GTGGGT
gaaaatgggcatttgaacca

SEQ ID NO: 24133 - DNA, 20 bp, Artificial Sequence
  Description of Artificial Sequence: Synthetic oligonucleotide
  Target: LAMA2; (-) strand; PAM type: NNGRRT; PAM sequence: AAGGGT
gatgtaggatctgaataagc

SEQ ID NO: 24134 - DNA, 20 bp, Artificial Sequence
  Description of Artificial Sequence: Synthetic oligonucleotide
  Target: LAMA2; (-) strand; PAM type: NNGRRT; PAM sequence: CTGAAT
acctttgtctgatgtaggat

SEQ ID NO: 24135 - DNA, 20 bp, Artificial Sequence
  Description of Artificial Sequence: Synthetic oligonucleotide
  Target: LAMA2; (-) strand; PAM type: NNGRRT; PAM sequence: TAGGAT
ctctaaacctttgtctgatg

SEQ ID NO: 24136 - DNA, 20 bp, Artificial Sequence
  Description of Artificial Sequence: Synthetic oligonucleotide
  Target: LAMA2; (-) strand; PAM type: NNGRRT; PAM sequence: CTGAAT
ggggtcaagctaggcttttt

SEQ ID NO: 24137 - DNA, 20 bp, Artificial Sequence
  Description of Artificial Sequence: Synthetic oligonucleotide
  Target: LAMA2; (-) strand; PAM type: NNGRRT; PAM sequence: AGGGGT
ctcactaccgcccccttctt

SEQ ID NO: 24138 - DNA, 20 bp, Artificial Sequence
  Description of Artificial Sequence: Synthetic oligonucleotide
  Target: LAMA2; (-) strand; PAM type: NNGRRT; PAM sequence: AAGAAT
atttttaatgtgatgaagat

SEQ ID NO: 24139 - DNA, 20 bp, Artificial Sequence
  Description of Artificial Sequence: Synthetic oligonucleotide
  Target: LAMA2; (-) strand; PAM type: NNGRRT; PAM sequence: TTGGGT
catgccttcttgcttttctt

SEQ ID NO: 24140 - DNA, 20 bp, Artificial Sequence
  Description of Artificial Sequence: Synthetic oligonucleotide
  Target: LAMA2; (-) strand; PAM type: NNGRRT; PAM sequence: CAGGAT
ctgtaaattacattttagac

SEQ ID NO: 24141 - DNA, 20 bp, Artificial Sequence
  Description of Artificial Sequence: Synthetic oligonucleotide
  Target: LAMA2; (-) strand; PAM type: NNGRRT; PAM sequence: GGGGAT
gattgtacatggaagtggaa

SEQ ID NO: 24142 - DNA, 20 bp, Artificial Sequence
  Description of Artificial Sequence: Synthetic oligonucleotide
  Target: LAMA2; (-) strand; PAM type: NNGRRT; PAM sequence: TGGGAT
ttactatccacaggaactac

SEQ ID NO: 24143 - DNA, 20 bp, Artificial Sequence
  Description of Artificial Sequence: Synthetic oligonucleotide
  Target: LAMA2; (-) strand; PAM type: NNGRRT; PAM sequence: AGGAAT
aataacaaagatatctaatt

SEQ ID NO: 24144 - DNA, 20 bp, Artificial Sequence
  Description of Artificial Sequence: Synthetic oligonucleotide
  Target: LAMA2; (-) strand; PAM type: NNGRRT; PAM sequence: GAGAAT
agacaaatttggtttaattc

SEQ ID NO: 24145 - DNA, 20 bp, Artificial Sequence
  Description of Artificial Sequence: Synthetic oligonucleotide
  Target: LAMA2; (-) strand; PAM type: NNGRRT; PAM sequence: AAGGGT
gattaggcctttctgcaacc

SEQ ID NO: 24146 - DNA, 20 bp, Artificial Sequence
  Description of Artificial Sequence: Synthetic oligonucleotide
  Target: LAMA2; (-) strand; PAM type: NNGRRT; PAM sequence: GTGAAT
tcagagtgccattatctcca

SEQ ID NO: 24147 - DNA, 20 bp, Artificial Sequence
  Description of Artificial Sequence: Synthetic oligonucleotide
  Target: LAMA2; (-) strand; PAM type: NNGRRT; PAM sequence: CAGAGT
ttcggaacactaagcaatgt

SEQ ID NO: 24148 - DNA, 20 bp, Artificial Sequence
  Description of Artificial Sequence: Synthetic oligonucleotide
  Target: LAMA2; (-) strand; PAM type: NNGRRT; PAM sequence: GTGAGT
gtaaattaactacacagcac

SEQ ID NO: 24149 - DNA, 20 bp, Artificial Sequence
  Description of Artificial Sequence: Synthetic oligonucleotide
  Target: LAMA2; (-) strand; PAM type: NNGRRT; PAM sequence: TAGAGT
tcaattaatcccattctaat

SEQ ID NO: 24150 - DNA, 20 bp, Artificial Sequence
  Description of Artificial Sequence: Synthetic oligonucleotide
  Target: LAMA2; (-) strand; PAM type: NNGRRT; PAM sequence: TGGAGT
ccaaacataatctgtctttt

SEQ ID NO: 24151 - DNA, 20 bp, Artificial Sequence
  Description of Artificial Sequence: Synthetic oligonucleotide
  Target: LAMA2; (-) strand; PAM type: NNGRRT; PAM sequence: TGGGAT
atcacacttttcagctattc

SEQ ID NO: 24152 - DNA, 20 bp, Artificial Sequence
  Description of Artificial Sequence: Synthetic oligonucleotide
  Target: LAMA2; (-) strand; PAM type: NNGRRT; PAM sequence: TAGAAT
agcctgcacactagctgtca

SEQ ID NO: 24153 - DNA, 20 bp, Artificial Sequence
  Description of Artificial Sequence: Synthetic oligonucleotide
  Target: LAMA2; (-) strand; PAM type: NNGRRT; PAM sequence: ATGAGT
attagacagttgcttcatct

SEQ ID NO: 24154 - DNA, 20 bp, Artificial Sequence
  Description of Artificial Sequence: Synthetic oligonucleotide
  Target: LAMA2; (-) strand; PAM type: NNGRRT; PAM sequence: ATGAAT
tctaacacaaatacattaca

SEQ ID NO: 24155 - DNA, 20 bp, Artificial Sequence
  Description of Artificial Sequence: Synthetic oligonucleotide
  Target: LAMA2; (-) strand; PAM type: NNGRRT; PAM sequence: ATGAAT
ttttggtgaatgactggcaa

SEQ ID NO: 24156 - DNA, 20 bp, Artificial Sequence
  Description of Artificial Sequence: Synthetic oligonucleotide
  Target: LAMA2; (-) strand; PAM type: NNGRRT; PAM sequence: GTGAAT
agatactcaacaaacttttg

SEQ ID NO: 24157 - DNA, 20 bp, Artificial Sequence
  Description of Artificial Sequence: Synthetic oligonucleotide
  Target: LAMA2; (-) strand; PAM type: NNGRRT; PAM sequence: CTGGAT
atcttagatttgaacaacca

SEQ ID NO: 24158 - DNA, 20 bp, Artificial Sequence
  Description of Artificial Sequence: Synthetic oligonucleotide
  Target: LAMA2; (-) strand; PAM type: NNGRRT; PAM sequence: TTGAAT
tagaataaatgaagctagat

SEQ ID NO: 24159 - DNA, 20 bp, Artificial Sequence
  Description of Artificial Sequence: Synthetic oligonucleotide
  Target: LAMA2; (-) strand; PAM type: NNGRRT; PAM sequence: TAGAAT
atgataattaaaatcatcac

SEQ ID NO: 24160 - DNA, 20 bp, Artificial Sequence
  Description of Artificial Sequence: Synthetic oligonucleotide
  Target: LAMA2; (-) strand; PAM type: NNGRRT; PAM sequence: TAGAAT
tcagattttaacagatttta

SEQ ID NO: 24161 - DNA, 20 bp, Artificial Sequence
  Description of Artificial Sequence: Synthetic oligonucleotide
  Target: LAMA2; (-) strand; PAM type: NNGRRT; PAM sequence: ATGAAT
aggcaaaataacaggtaact

SEQ ID NO: 24162 - DNA, 20 bp, Artificial Sequence
  Description of Artificial Sequence: Synthetic oligonucleotide
  Target: LAMA2; (-) strand; PAM type: NNGRRT; PAM sequence: ATGAAT
gtcactattctgtagtgttc

SEQ ID NO: 24163 - DNA, 20 bp, Artificial Sequence
  Description of Artificial Sequence: Synthetic oligonucleotide
  Target: LAMA2; (-) strand; PAM type: NNGRRT; PAM sequence: ATGAAT
gaaaatttttactttgaaat

SEQ ID NO: 24164 - DNA, 20 bp, Artificial Sequence
  Description of Artificial Sequence: Synthetic oligonucleotide
  Target: LAMA2; (-) strand; PAM type: NNGRRT; PAM sequence: TAGAAT
acccttgacggcagtgaaat

SEQ ID NO: 24165 - DNA, 20 bp, Artificial Sequence
  Description of Artificial Sequence: Synthetic oligonucleotide
  Target: LAMA2; (-) strand; PAM type: NNGRRT; PAM sequence: AGGGAT
tctttaaaaaatcatttcac

SEQ ID NO: 24166 - DNA, 20 bp, Artificial Sequence
  Description of Artificial Sequence: Synthetic oligonucleotide
  Target: LAMA2; (-) strand; PAM type: NNGRRT; PAM sequence: CAGAAT
gggcagcaggagaactctca

SEQ ID NO: 24167 - DNA, 20 bp, Artificial Sequence
  Description of Artificial Sequence: Synthetic oligonucleotide
  Target: LAMA2; (-) strand; PAM type: NNGRRT; PAM sequence: CAGAAT
aactgatggtgggtaagcag

SEQ ID NO: 24168 - DNA, 20 bp, Artificial Sequence
  Description of Artificial Sequence: Synthetic oligonucleotide
  Target: LAMA2; (-) strand; PAM type: NNGRRT; PAM sequence: GTGGGT
aaattgcagcccaactgatg

SEQ ID NO: 24169 - DNA, 20 bp, Artificial Sequence
  Description of Artificial Sequence: Synthetic oligonucleotide
  Target: LAMA2; (-) strand; PAM type: NNGRRT; PAM sequence: TTGAGT
agaaattgaccagctgcctt

SEQ ID NO: 24170 - DNA, 20 bp, Artificial Sequence
  Description of Artificial Sequence: Synthetic oligonucleotide
  Target: LAMA2; (-) strand; PAM type: NNGRRT; PAM sequence: CGGGGT
gcactagggaggccagggcc

SEQ ID NO: 24171 - DNA, 20 bp, Artificial Sequence
  Description of Artificial Sequence: Synthetic oligonucleotide
  Target: LAMA2; (-) strand; PAM type: NNGRRT; PAM sequence: AAGAAT
gcttttatgctaatgctagt

SEQ ID NO: 24172 - DNA, 20 bp, Artificial Sequence
  Description of Artificial Sequence: Synthetic oligonucleotide
  Target: LAMA2; (-) strand; PAM type: NNGRRT; PAM sequence: GAGGAT
caggcttttagctctagcca

SEQ ID NO: 24173 - DNA, 20 bp, Artificial Sequence
  Description of Artificial Sequence: Synthetic oligonucleotide
  Target: LAMA2; (-) strand; PAM type: NNGRRT; PAM sequence: TTGGAT
gcctcggttttaaaaatttc

SEQ ID NO: 24174 - DNA, 20 bp, Artificial Sequence
  Description of Artificial Sequence: Synthetic oligonucleotide
  Target: LAMA2; (-) strand; PAM type: NNGRRT; PAM sequence: CAGAAT
aaacctacacagtgccatcc

SEQ ID NO: 24175 - DNA, 20 bp, Artificial Sequence
  Description of Artificial Sequence: Synthetic oligonucleotide
  Target: LAMA2; (-) strand; PAM type: NNGRRT; PAM sequence: GAGGGT
accacgggtccctgtttctt

SEQ ID NO: 24176 - DNA, 20 bp, Artificial Sequence
  Description of Artificial Sequence: Synthetic oligonucleotide
  Target: LAMA2; (-) strand; PAM type: NNGRRT; PAM sequence: ACGGGT
gactggactcaatggtaacc

SEQ ID NO: 24177 - DNA, 20 bp, Artificial Sequence
  Description of Artificial Sequence: Synthetic oligonucleotide
  Target: LAMA2; (-) strand; PAM type: NNGRRT; PAM sequence: GGGGAT
tcaatattaggacaattaca

SEQ ID NO: 24178 - DNA, 20 bp, Artificial Sequence
  Description of Artificial Sequence: Synthetic oligonucleotide
  Target: LAMA2; (-) strand; PAM type: NNGRRT; PAM sequence: GTGAAT
ttgcataatgcacagagaag

SEQ ID NO: 24179 - DNA, 20 bp, Artificial Sequence
  Description of Artificial Sequence: Synthetic oligonucleotide
  Target: LAMA2; (-) strand; PAM type: NNGRRT; PAM sequence: GAGAAT
aacatgcccaactgtagggt

SEQ ID NO: 24180 - DNA, 20 bp, Artificial Sequence
  Description of Artificial Sequence: Synthetic oligonucleotide
  Target: LAMA2; (-) strand; PAM type: NNGRRT; PAM sequence: TAGGGT
ataaagaacatgcccaactg

SEQ ID NO: 24181 - DNA, 20 bp, Artificial Sequence
  Description of Artificial Sequence: Synthetic oligonucleotide
  Target: LAMA2; (-) strand; PAM type: NNGRRT; PAM sequence: TAGGGT
catcaatatattgtagttga

SEQ ID NO: 24182 - DNA, 20 bp, Artificial Sequence
  Description of Artificial Sequence: Synthetic oligonucleotide
  Target: LAMA2; (-) strand; PAM type: NNGRRT; PAM sequence: TTGAAT
tgtgacttgtggctactatt

SEQ ID NO: 24183 - DNA, 20 bp, Artificial Sequence
  Description of Artificial Sequence: Synthetic oligonucleotide
  Target: LAMA2; (-) strand; PAM type: NNGRRT; PAM sequence: CTGAAT
tagcttgtctcaatgagaaa

SEQ ID NO: 24184 - DNA, 20 bp, Artificial Sequence
  Description of Artificial Sequence: Synthetic oligonucleotide
  Target: LAMA2; (-) strand; PAM type: NNGRRT; PAM sequence: ATGGAT
ccacagaacttcctgtgatg

SEQ ID NO: 24185 - DNA, 20 bp, Artificial Sequence
  Description of Artificial Sequence: Synthetic oligonucleotide
  Target: LAMA2; (-) strand; PAM type: NNGRRT; PAM sequence: CAGAAT
gctcaacaaacaaaggctat

SEQ ID NO: 24186 - DNA, 20 bp, Artificial Sequence
  Description of Artificial Sequence: Synthetic oligonucleotide
  Target: LAMA2; (-) strand; PAM type: NNGRRT; PAM sequence: AGGAAT
tgcaaaggtttaataaatta

SEQ ID NO: 24187 - DNA, 20 bp, Artificial Sequence
  Description of Artificial Sequence: Synthetic oligonucleotide
  Target: LAMA2; (-) strand; PAM type: NNGRRT; PAM sequence: TTGAGT
aggaaatgaagtccttgccc

SEQ ID NO: 24188 - DNA, 20 bp, Artificial Sequence
  Description of Artificial Sequence: Synthetic oligonucleotide
  Target: LAMA2; (-) strand; PAM type: NNGRRT; PAM sequence: TTGAAT
cttttatactcaaactacac

SEQ ID NO: 24189 - DNA, 20 bp, Artificial Sequence
  Description of Artificial Sequence: Synthetic oligonucleotide
  Target: LAMA2; (-) strand; PAM type: NNGRRT; PAM sequence: CAGAGT
ctgcactccagcctgggcta

SEQ ID NO: 24190 - DNA, 20 bp, Artificial Sequence
  Description of Artificial Sequence: Synthetic oligonucleotide
  Target: LAMA2; (-) strand; PAM type: NNGRRT; PAM sequence: GTGAAT
cccaggaggccaaggctgca

SEQ ID NO: 24191 - DNA, 20 bp, Artificial Sequence
  Description of Artificial Sequence: Synthetic oligonucleotide
  Target: LAMA2; (-) strand; PAM type: NNGRRT; PAM sequence: GAGGAT
acttggagatgctgaggaga

SEQ ID NO: 24192 - DNA, 20 bp, Artificial Sequence
  Description of Artificial Sequence: Synthetic oligonucleotide
  Target: LAMA2; (-) strand; PAM type: NNGRRT; PAM sequence: TGGAGT
tgggcatgttggtgtgtgcc

SEQ ID NO: 24193 - DNA, 20 bp, Artificial Sequence
  Description of Artificial Sequence: Synthetic oligonucleotide
  Target: LAMA2; (-) strand; PAM type: NNGRRT; PAM sequence: CAGAGT
acaagaccagcctgaggcaa

SEQ ID NO: 24194 - DNA, 20 bp, Artificial Sequence
  Description of Artificial Sequence: Synthetic oligonucleotide
  Target: LAMA2; (-) strand; PAM type: NNGRRT; PAM sequence: ACGAGT
agggaggatcgcttgaggcc

SEQ ID NO: 24195 - DNA, 20 bp, Artificial Sequence
  Description of Artificial Sequence: Synthetic oligonucleotide
  Target: LAMA2; (-) strand; PAM type: NNGRRT; PAM sequence: GAGGAT
attttgggaggccgaagagg

SEQ ID NO: 24196 - DNA, 20 bp, Artificial Sequence
  Description of Artificial Sequence: Synthetic oligonucleotide
  Target: LAMA2; (-) strand; PAM type: NNGRRT; PAM sequence: CCGAGT
ttaaaaattaggtttactgg

SEQ ID NO: 24197 - DNA, 20 bp, Artificial Sequence
  Description of Artificial Sequence: Synthetic oligonucleotide
  Target: LAMA2; (-) strand; PAM type: NNGRRT; PAM sequence: TTGGAT
aaagtccaagaaacattctt

SEQ ID NO: 24198 - DNA, 20 bp, Artificial Sequence
  Description of Artificial Sequence: Synthetic oligonucleotide
  Target: LAMA2; (-) strand; PAM type: NNGRRT; PAM sequence: AGGAAT
agcatttaaacatgaggtac

SEQ ID NO: 24199 - DNA, 20 bp, Artificial Sequence
  Description of Artificial Sequence: Synthetic oligonucleotide
  Target: LAMA2; (-) strand; PAM type: NNGRRT; PAM sequence: AGGAGT
tgttcatgttatcctgcaga

SEQ ID NO: 24200 - DNA, 20 bp, Artificial Sequence
  Description of Artificial Sequence: Synthetic oligonucleotide
  Target: LAMA2; (-) strand; PAM type: NNGRRT; PAM sequence: ATGGAT
ttgtctactggttggtctaa

SEQ ID NO: 24201 - DNA, 20 bp, Artificial Sequence
  Description of Artificial Sequence: Synthetic oligonucleotide
  Target: LAMA2; (-) strand; PAM type: NNGRRT; PAM sequence: TAGGGT
aaaagcaaaagcaatatcat

SEQ ID NO: 24202 - DNA, 20 bp, Artificial Sequence
  Description of Artificial Sequence: Synthetic oligonucleotide
  Target: LAMA2; (-) strand; PAM type: NNGRRT; PAM sequence: TTGAAT
tcagatttacttctggccta

SEQ ID NO: 24203 - DNA, 20 bp, Artificial Sequence
  Description of Artificial Sequence: Synthetic oligonucleotide
  Target: LAMA2; (-) strand; PAM type: NNGRRT; PAM sequence: CGGAAT
ttcaatatctttgaggcagc

SEQ ID NO: 24204 - DNA, 20 bp, Artificial Sequence
  Description of Artificial Sequence: Synthetic oligonucleotide
  Target: LAMA2; (-) strand; PAM type: NNGRRT; PAM sequence: CGGAGT
ggactactgagtatattgta

SEQ ID NO: 24205 - DNA, 20 bp, Artificial Sequence
  Description of Artificial Sequence: Synthetic oligonucleotide
  Target: LAMA2; (-) strand; PAM type: NNGRRT; PAM sequence: CTGAGT
caccaacataatcgggacta

SEQ ID NO: 24206 - DNA, 20 bp, Artificial Sequence
  Description of Artificial Sequence: Synthetic oligonucleotide
  Target: LAMA2; (-) strand; PAM type: NNGRRT; PAM sequence: TAGGAT
cttgctttatcgtttaagag

SEQ ID NO: 24207 - DNA, 20 bp, Artificial Sequence
  Description of Artificial Sequence: Synthetic oligonucleotide
  Target: LAMA2; (-) strand; PAM type: NNGRRT; PAM sequence: AAGAGT
ttaatcttgctttatcgttt

SEQ ID NO: 24208 - DNA, 20 bp, Artificial Sequence
  Description of Artificial Sequence: Synthetic oligonucleotide
  Target: LAMA2; (-) strand; PAM type: NNGRRT; PAM sequence: GAGAAT
ttttttatcatggtaattta

SEQ ID NO: 24209 - DNA, 20 bp, Artificial Sequence
  Description of Artificial Sequence: Synthetic oligonucleotide
  Target: LAMA2; (-) strand; PAM type: NNGRRT; PAM sequence: TTGGAT
agagctatacatttggaaaa

SEQ ID NO: 24210 - DNA, 20 bp, Artificial Sequence
  Description of Artificial Sequence: Synthetic oligonucleotide
  Target: LAMA2; (-) strand; PAM type: NNGRRT; PAM sequence: ATGGAT
aaaagtaaaataaatttaaa

SEQ ID NO: 24211 - DNA, 20 bp, Artificial Sequence
  Description of Artificial Sequence: Synthetic oligonucleotide
  Target: LAMA2; (-) strand; PAM type: NNGRRT; PAM sequence: CAGAGT
atgtcaaacacaagtctttg

SEQ ID NO: 24212 - DNA, 20 bp, Artificial Sequence
  Description of Artificial Sequence: Synthetic oligonucleotide
  Target: LAMA2; (-) strand; PAM type: NNGRRT; PAM sequence: GAGGAT
agcatcaaagaagagttact

SEQ ID NO: 24213 - DNA, 20 bp, Artificial Sequence
  Description of Artificial Sequence: Synthetic oligonucleotide
  Target: LAMA2; (-) strand; PAM type: NNGRRT; PAM sequence: AAGAGT
aggatgctttagcatcaaag

SEQ ID NO: 24214 - DNA, 20 bp, Artificial Sequence
  Description of Artificial Sequence: Synthetic oligonucleotide
  Target: LAMA2; (-) strand; PAM type: NNGRRT; PAM sequence: TAGGAT
aaacgaaaataggggaatgc

SEQ ID NO: 24215 - DNA, 20 bp, Artificial Sequence
  Description of Artificial Sequence: Synthetic oligonucleotide
  Target: LAMA2; (-) strand; PAM type: NNGRRT; PAM sequence: GGGAAT
aaatagttaaacgaaaatag

SEQ ID NO: 24216 - DNA, 20 bp, Artificial Sequence
  Description of Artificial Sequence: Synthetic oligonucleotide
  Target: LAMA2; (-) strand; PAM type: NNGRRT; PAM sequence: ATGGGT
ggccggggtctttctcacat

SEQ ID NO: 24217 - DNA, 20 bp, Artificial Sequence
  Description of Artificial Sequence: Synthetic oligonucleotide
  Target: LAMA2; (-) strand; PAM type: NNGRRT; PAM sequence: CGGGGT
taagagagtagagctatggc

SEQ ID NO: 24218 - DNA, 20 bp, Artificial Sequence
  Description of Artificial Sequence: Synthetic oligonucleotide
  Target: LAMA2; (-) strand; PAM type: NNGRRT; PAM sequence: GAGAGT
cttgcttatggatattttaa

SEQ ID NO: 24219 - DNA, 20 bp, Artificial Sequence
  Description of Artificial Sequence: Synthetic oligonucleotide
  Target: LAMA2; (-) strand; PAM type: NNGRRT; PAM sequence: ATGGAT
ttgactattgactcttgctt

SEQ ID NO: 24220 - DNA, 20 bp, Artificial Sequence
  Description of Artificial Sequence: Synthetic oligonucleotide
  Target: LAMA2; (-) strand; PAM type: NNGRRT; PAM sequence: TTGAGT
taaaaacaagctgatcacta

SEQ ID NO: 24221 - DNA, 20 bp, Artificial Sequence
  Description of Artificial Sequence: Synthetic oligonucleotide
  Target: LAMA2; (-) strand; PAM type: NNGRRT; PAM sequence: GAGAAT
taggataattaaaaatgtat

SEQ ID NO: 24222 - DNA, 20 bp, Artificial Sequence
  Description of Artificial Sequence: Synthetic oligonucleotide
  Target: LAMA2; (-) strand; PAM type: NNGRRT; PAM sequence: TAGGAT
aatgaataattgtattatga

SEQ ID NO: 24223 - DNA, 20 bp, Artificial Sequence
  Description of Artificial Sequence: Synthetic oligonucleotide
  Target: LAMA2; (-) strand; PAM type: NNGRRT; PAM sequence: ATGAAT
gattagaagcagcagacaaa

SEQ ID NO: 24224 - DNA, 20 bp, Artificial Sequence
  Description of Artificial Sequence: Synthetic oligonucleotide
  Target: LAMA2; (-) strand; PAM type: NNGRRT; PAM sequence: TGGAGT
cttcatttccctaattctat

SEQ ID NO: 24225 - DNA, 20 bp, Artificial Sequence
  Description of Artificial Sequence: Synthetic oligonucleotide
  Target: LAMA2; (-) strand; PAM type: NNGRRT; PAM sequence: GTGGAT
taaacctcatcattcaagtg

SEQ ID NO: 24226 - DNA, 20 bp, Artificial Sequence
  Description of Artificial Sequence: Synthetic oligonucleotide
  Target: LAMA2; (-) strand; PAM type: NNGRRT; PAM sequence: GTGGGT
ttattcccaaacttctcaga

SEQ ID NO: 24227 - DNA, 20 bp, Artificial Sequence
  Description of Artificial Sequence: Synthetic oligonucleotide
  Target: LAMA2; (-) strand; PAM type: NNGRRT; PAM sequence: CAGAGT
tttcttattcccaaacttct

SEQ ID NO: 24228 - DNA, 20 bp, Artificial Sequence
  Description of Artificial Sequence: Synthetic oligonucleotide
  Target: LAMA2; (-) strand; PAM type: NNGRRT; PAM sequence: ATGGGT
acttcctttaagaagccagt

SEQ ID NO: 24229 - DNA, 20 bp, Artificial Sequence
  Description of Artificial Sequence: Synthetic oligonucleotide
  Target: LAMA2; (-) strand; PAM type: NNGRRT; PAM sequence: GAGAGT
tatatcttttgaatgtgaat

SEQ ID NO: 24230 - DNA, 20 bp, Artificial Sequence
  Description of Artificial Sequence: Synthetic oligonucleotide
  Target: LAMA2; (-) strand; PAM type: NNGRRT; PAM sequence: GTGAAT
catgtatatatcttttgaat

SEQ ID NO: 24231 - DNA, 20 bp, Artificial Sequence
  Description of Artificial Sequence: Synthetic oligonucleotide
  Target: LAMA2; (-) strand; PAM type: NNGRRT; PAM sequence: TTGAAT
catcctcatgtatatatctt

SEQ ID NO: 24232 - DNA, 20 bp, Artificial Sequence
  Description of Artificial Sequence: Synthetic oligonucleotide
  Target: LAMA2; (-) strand; PAM type: NNGRRT; PAM sequence: GGGAAT
gttactgcaaagtgccttta

SEQ ID NO: 24233 - DNA, 20 bp, Artificial Sequence
  Description of Artificial Sequence: Synthetic oligonucleotide
  Target: LAMA2; (-) strand; PAM type: NNGRRT; PAM sequence: TGGAGT
ctattccaattttcaaatca

SEQ ID NO: 24234 - DNA, 20 bp, Artificial Sequence
  Description of Artificial Sequence: Synthetic oligonucleotide
  Target: LAMA2; (-) strand; PAM type: NNGRRT; PAM sequence: AAGAAT
attttgtaggagtaaaagca

SEQ ID NO: 24235 - DNA, 20 bp, Artificial Sequence
  Description of Artificial Sequence: Synthetic oligonucleotide
  Target: LAMA2; (-) strand; PAM type: NNGRRT; PAM sequence: AGGAGT
tttaaagtcctagattttgt

SEQ ID NO: 24236 - DNA, 20 bp, Artificial Sequence
  Description of Artificial Sequence: Synthetic oligonucleotide
  Target: LAMA2; (-) strand; PAM type: NNGRRT; PAM sequence: AGGAAT
ttaagcaagcccatgtagtt

SEQ ID NO: 24237 - DNA, 20 bp, Artificial Sequence
  Description of Artificial Sequence: Synthetic oligonucleotide
  Target: LAMA2; (-) strand; PAM type: NNGRRT; PAM sequence: ATGAAT
gcaggaggactttctacttt

SEQ ID NO: 24238 - DNA, 20 bp, Artificial Sequence
  Description of Artificial Sequence: Synthetic oligonucleotide
  Target: LAMA2; (-) strand; PAM type: NNGRRT; PAM sequence: ATGAAT
tcctcctccctgtatttaaa

SEQ ID NO: 24239 - DNA, 20 bp, Artificial Sequence
  Description of Artificial Sequence: Synthetic oligonucleotide
  Target: LAMA2; (-) strand; PAM type: NNGRRT; PAM sequence: ATGGGT
taattgtttatgttttacag

SEQ ID NO: 24240 - DNA, 20 bp, Artificial Sequence
  Description of Artificial Sequence: Synthetic oligonucleotide
  Target: LAMA2; (-) strand; PAM type: NNGRRT; PAM sequence: TTGAAT
aacactgtaacgaatatctc

SEQ ID NO: 24241 - DNA, 20 bp, Artificial Sequence
  Description of Artificial Sequence: Synthetic oligonucleotide
  Target: LAMA2; (-) strand; PAM type: NNGRRT; PAM sequence: ACGAAT
tttcctttgaaaacactgta

SEQ ID NO: 24242 - DNA, 20 bp, Artificial Sequence
  Description of Artificial Sequence: Synthetic oligonucleotide
  Target: LAMA2; (-) strand; PAM type: NNGRRT; PAM sequence: CAGAAT
tgagcagtttttgttaaaat

SEQ ID NO: 24243 - DNA, 20 bp, Artificial Sequence
  Description of Artificial Sequence: Synthetic oligonucleotide
  Target: LAMA2; (-) strand; PAM type: NNGRRT; PAM sequence: AAGAGT
ttctgtgagtaaaggaaaag

SEQ ID NO: 24244 - DNA, 20 bp, Artificial Sequence
  Description of Artificial Sequence: Synthetic oligonucleotide
  Target: LAMA2; (-) strand; PAM type: NNGRRT; PAM sequence: GTGAGT
gctaactgtgtaaacattct

SEQ ID NO: 24245 - DNA, 20 bp, Artificial Sequence
  Description of Artificial Sequence: Synthetic oligonucleotide
  Target: LAMA2; (-) strand; PAM type: NNGRRT; PAM sequence: CTGAAT
tgccggactcattcttggtg

SEQ ID NO: 24246 - DNA, 20 bp, Artificial Sequence
  Description of Artificial Sequence: Synthetic oligonucleotide
  Target: LAMA2; (-) strand; PAM type: NNGRRT; PAM sequence: AAGAAT
ggtgtccctccacttcccaa

SEQ ID NO: 24247 - DNA, 20 bp, Artificial Sequence
  Description of Artificial Sequence: Synthetic oligonucleotide
  Target: LAMA2; (-) strand; PAM type: NNGRRT; PAM sequence: GAGGGT
atgcattatcagctaggtgt

SEQ ID NO: 24248 - DNA, 20 bp, Artificial Sequence
  Description of Artificial Sequence: Synthetic oligonucleotide
  Target: LAMA2; (-) strand; PAM type: NNGRRT; PAM sequence: TGGAAT
aggaggccagcatggaaata

SEQ ID NO: 24249 - DNA, 20 bp, Artificial Sequence
  Description of Artificial Sequence: Synthetic oligonucleotide
  Target: LAMA2; (-) strand; PAM type: NNGRRT; PAM sequence: GTGAGT
aattgtcctggggagatgat

SEQ ID NO: 24250 - DNA, 20 bp, Artificial Sequence
  Description of Artificial Sequence: Synthetic oligonucleotide
  Target: LAMA2; (-) strand; PAM type: NNGRRT; PAM sequence: GAGGGT
ggaaatataggtgcaaatat

SEQ ID NO: 24251 - DNA, 20 bp, Artificial Sequence
  Description of Artificial Sequence: Synthetic oligonucleotide
  Target: LAMA2; (-) strand; PAM type: NNGRRT; PAM sequence: GTGAAT
acagtagaaattaagataat

SEQ ID NO: 24252 - DNA, 20 bp, Artificial Sequence
  Description of Artificial Sequence: Synthetic oligonucleotide
  Target: LAMA2; (-) strand; PAM type: NNGRRT; PAM sequence: AGGAGT
gactgtctacagatttggta

SEQ ID NO: 24253 - DNA, 20 bp, Artificial Sequence
  Description of Artificial Sequence: Synthetic oligonucleotide
  Target: LAMA2; (-) strand; PAM type: NNGRRT; PAM sequence: AGGAAT
aactgggaaaatgatcttag

SEQ ID NO: 24254 - DNA, 20 bp, Artificial Sequence
  Description of Artificial Sequence: Synthetic oligonucleotide
  Target: LAMA2; (-) strand; PAM type: NNGRRT; PAM sequence: ATGAGT
ttgtgtccagagaggatggg

SEQ ID NO: 24255 - DNA, 20 bp, Artificial Sequence
  Description of Artificial Sequence: Synthetic oligonucleotide
  Target: LAMA2; (-) strand; PAM type: NNGRRT; PAM sequence: TGGGAT
ttctttgtgtccagagagga

SEQ ID NO: 24256 - DNA, 20 bp, Artificial Sequence
  Description of Artificial Sequence: Synthetic oligonucleotide
  Target: LAMA2; (-) strand; PAM type: NNGRRT; PAM sequence: GAGGAT
tgcccttctttgtgtccaga

SEQ ID NO: 24257 - DNA, 20 bp, Artificial Sequence
  Description of Artificial Sequence: Synthetic oligonucleotide
  Target: LAMA2; (-) strand; PAM type: NNGRRT; PAM sequence: TGGGAT
ttaacatccttgaatgctat

SEQ ID NO: 24258 - DNA, 20 bp, Artificial Sequence
  Description of Artificial Sequence: Synthetic oligonucleotide
  Target: LAMA2; (-) strand; PAM type: NNGRRT; PAM sequence: TTGAAT
ttctttaggctttaacatcc

SEQ ID NO: 24259 - DNA, 20 bp, Artificial Sequence
  Description of Artificial Sequence: Synthetic oligonucleotide
  Target: LAMA2; (-) strand; PAM type: NNGRRT; PAM sequence: TGGGAT
gctttgacctgccaaagtgc

SEQ ID NO: 24260 - DNA, 20 bp, Artificial Sequence
  Description of Artificial Sequence: Synthetic oligonucleotide
  Target: LAMA2; (-) strand; PAM type: NNGRRT; PAM sequence: AAGGGT
ttaaacattttttgtagaga

SEQ ID NO: 24261 - DNA, 20 bp, Artificial Sequence
  Description of Artificial Sequence: Synthetic oligonucleotide
  Target: LAMA2; (-) strand; PAM type: NNGRRT; PAM sequence: TGGAAT
gaatagcagtcctgaatagc

SEQ ID NO: 24262 - DNA, 20 bp, Artificial Sequence
  Description of Artificial Sequence: Synthetic oligonucleotide
  Target: LAMA2; (-) strand; PAM type: NNGRRT; PAM sequence: CTGAAT
tgaacagctgaatagcagtc

SEQ ID NO: 24263 - DNA, 20 bp, Artificial Sequence
  Description of Artificial Sequence: Synthetic oligonucleotide
  Target: LAMA2; (-) strand; PAM type: NNGRRT; PAM sequence: CTGAAT
gagtgtggtggcgtgaacag

SEQ ID NO: 24264 - DNA, 20 bp, Artificial Sequence
  Description of Artificial Sequence: Synthetic oligonucleotide
  Target: LAMA2; (-) strand; PAM type: NNGRRT; PAM sequence: TAGAGT
tctcactctgtcatccaggc

SEQ ID NO: 24265 - DNA, 20 bp, Artificial Sequence
  Description of Artificial Sequence: Synthetic oligonucleotide
  Target: LAMA2; (-) strand; PAM type: NNGRRT; PAM sequence: CAGAGT
ttttaaaaaaagttttgaga

SEQ ID NO: 24266 - DNA, 20 bp, Artificial Sequence
  Description of Artificial Sequence: Synthetic oligonucleotide
  Target: LAMA2; (-) strand; PAM type: NNGRRT; PAM sequence: GGGGAT
ttaacagaatcaaatggaca

SEQ ID NO: 24267 - DNA, 20 bp, Artificial Sequence
  Description of Artificial Sequence: Synthetic oligonucleotide
  Target: LAMA2; (-) strand; PAM type: NNGRRT; PAM sequence: CAGAAT
agttgagggattgcttttaa

SEQ ID NO: 24268 - DNA, 20 bp, Artificial Sequence
  Description of Artificial Sequence: Synthetic oligonucleotide
  Target: LAMA2; (-) strand; PAM type: NNGRRT; PAM sequence: AGGGAT
tgcttaaatctgggcagttg

SEQ ID NO: 24269 - DNA, 20 bp, Artificial Sequence
  Description of Artificial Sequence: Synthetic oligonucleotide
  Target: LAMA2; (-) strand; PAM type: NNGRRT; PAM sequence: AAGAAT
aaatgtgattgaagatatta

SEQ ID NO: 24270 - DNA, 20 bp, Artificial Sequence
  Description of Artificial Sequence: Synthetic oligonucleotide
  Target: LAMA2; (-) strand; PAM type: NNGRRT; PAM sequence: AAGGAT
acaagggtatgtgcatactt

SEQ ID NO: 24271 - DNA, 20 bp, Artificial Sequence
  Description of Artificial Sequence: Synthetic oligonucleotide
  Target: LAMA2; (-) strand; PAM type: NNGRRT; PAM sequence: AAGGGT
aataacatgatctggtttac

SEQ ID NO: 24272 - DNA, 20 bp, Artificial Sequence
  Description of Artificial Sequence: Synthetic oligonucleotide
  Target: LAMA2; (-) strand; PAM type: NNGRRT; PAM sequence: GTGAAT
tacatctttgggttctcttt

SEQ ID NO: 24273 - DNA, 20 bp, Artificial Sequence
  Description of Artificial Sequence: Synthetic oligonucleotide
  Target: LAMA2; (-) strand; PAM type: NNGRRT; PAM sequence: TTGGGT
ttactcgtggttatacatct

SEQ ID NO: 24274 - DNA, 20 bp, Artificial Sequence
  Description of Artificial Sequence: Synthetic oligonucleotide
  Target: LAMA2; (-) strand; PAM type: NNGRRT; PAM sequence: TGGGAT
accttggcctcccaaagtgc

SEQ ID NO: 24275 - DNA, 20 bp, Artificial Sequence
  Description of Artificial Sequence: Synthetic oligonucleotide
  Target: LAMA2; (-) strand; PAM type: NNGRRT; PAM sequence: CAGGAT
tttttagtatacaaattaga

SEQ ID NO: 24276 - DNA, 20 bp, Artificial Sequence
  Description of Artificial Sequence: Synthetic oligonucleotide
  Target: LAMA2; (-) strand; PAM type: NNGRRT; PAM sequence: TGGGAT
gcctcagcctcccaagtaac

SEQ ID NO: 24277 - DNA, 20 bp, Artificial Sequence
  Description of Artificial Sequence: Synthetic oligonucleotide
  Target: LAMA2; (-) strand; PAM type: NNGRRT; PAM sequence: TGGAGT
tctcacattgtcgcgcaggc

SEQ ID NO: 24278 - DNA, 20 bp, Artificial Sequence
  Description of Artificial Sequence: Synthetic oligonucleotide
  Target: LAMA2; (-) strand; PAM type: NNGRRT; PAM sequence: CGGAGT
tttttttttttttttcgagt

SEQ ID NO: 24279 - DNA, 20 bp, Artificial Sequence
  Description of Artificial Sequence: Synthetic oligonucleotide
  Target: LAMA2; (-) strand; PAM type: NNGRRT; PAM sequence: TCGAGT
tttttctttttttttttttt

SEQ ID NO: 24280 - DNA, 20 bp, Artificial Sequence
  Description of Artificial Sequence: Synthetic oligonucleotide
  Target: LAMA2; (-) strand; PAM type: NNGRRT; PAM sequence: ATGAAT
ttaagtattttttaaaaatc

SEQ ID NO: 24281 - DNA, 20 bp, Artificial Sequence
  Description of Artificial Sequence: Synthetic oligonucleotide
  Target: LAMA2; (-) strand; PAM type: NNGRRT; PAM sequence: AGGAAT
taatgtcttttttttaaatc

SEQ ID NO: 24282 - DNA, 20 bp, Artificial Sequence
  Description of Artificial Sequence: Synthetic oligonucleotide
  Target: LAMA2; (-) strand; PAM type: NNGRRT; PAM sequence: TTGAGT
gaaatgacatatttttaata

SEQ ID NO: 24283 - DNA, 20 bp, Artificial Sequence
  Description of Artificial Sequence: Synthetic oligonucleotide
  Target: LAMA2; (-) strand; PAM type: NNGRRT; PAM sequence: TTGAAT
aggtgatatttttattataa

SEQ ID NO: 24284 - DNA, 20 bp, Artificial Sequence
  Description of Artificial Sequence: Synthetic oligonucleotide
  Target: LAMA2; (-) strand; PAM type: NNGRRT; PAM sequence: TAGAAT
ttcatctttgatataaattt

SEQ ID NO: 24285 - DNA, 20 bp, Artificial Sequence
  Description of Artificial Sequence: Synthetic oligonucleotide
  Target: LAMA2; (-) strand; PAM type: NNGRRT; PAM sequence: AGGAAT
ctacgctattcttctattct

SEQ ID NO: 24286 - DNA, 20 bp, Artificial Sequence
  Description of Artificial Sequence: Synthetic oligonucleotide
  Target: LAMA2; (-) strand; PAM type: NNGRRT; PAM sequence: ATGAAT
tcctatttgcacagttatac

SEQ ID NO: 24287 - DNA, 20 bp, Artificial Sequence
  Description of Artificial Sequence: Synthetic oligonucleotide
  Target: LAMA2; (-) strand; PAM type: NNGRRT; PAM sequence: CAGGGT
catctatgcttgtgtatttt

SEQ ID NO: 24288 - DNA, 20 bp, Artificial Sequence
  Description of Artificial Sequence: Synthetic oligonucleotide
  Target: LAMA2; (-) strand; PAM type: NNGRRT; PAM sequence: ATGAAT
tttagtttcatcttttccat

SEQ ID NO: 24289 - DNA, 20 bp, Artificial Sequence
  Description of Artificial Sequence: Synthetic oligonucleotide
  Target: LAMA2; (-) strand; PAM type: NNGRRT; PAM sequence: GTGAAT
atttaagactttaatttatt

SEQ ID NO: 24290 - DNA, 20 bp, Artificial Sequence
  Description of Artificial Sequence: Synthetic oligonucleotide
  Target: LAMA2; (-) strand; PAM type: NNGRRT; PAM sequence: AAGAAT
atcctggtatattttcttct

SEQ ID NO: 24291 - DNA, 20 bp, Artificial Sequence
  Description of Artificial Sequence: Synthetic oligonucleotide
  Target: LAMA2; (-) strand; PAM type: NNGRRT; PAM sequence: AAGAGT
tttgtgttgtttgatgacca

SEQ ID NO: 24292 - DNA, 20 bp, Artificial Sequence
  Description of Artificial Sequence: Synthetic oligonucleotide
  Target: LAMA2; (-) strand; PAM type: NNGRRT; PAM sequence: GAGAGT
agtggaattgctggcttgta

SEQ ID NO: 24293 - DNA, 20 bp, Artificial Sequence
  Description of Artificial Sequence: Synthetic oligonucleotide
  Target: LAMA2; (-) strand; PAM type: NNGRRT; PAM sequence: TGGAAT
tctgggtctgtacccaggag

SEQ ID NO: 24294 - DNA, 20 bp, Artificial Sequence
  Description of Artificial Sequence: Synthetic oligonucleotide
  Target: LAMA2; (-) strand; PAM type: NNGRRT; PAM sequence: AGGAGT
aaaaatctgggtctgtaccc

SEQ ID NO: 24295 - DNA, 20 bp, Artificial Sequence
  Description of Artificial Sequence: Synthetic oligonucleotide
  Target: LAMA2; (-) strand; PAM type: NNGRRT; PAM sequence: CTGGGT
ttatgcccatgtgcaaaaat

SEQ ID NO: 24296 - DNA, 20 bp, Artificial Sequence
  Description of Artificial Sequence: Synthetic oligonucleotide
  Target: LAMA2; (-) strand; PAM type: NNGRRT; PAM sequence: AAGAAT
ctagtttctctgctattata

SEQ ID NO: 24297 - DNA, 20 bp, Artificial Sequence
  Description of Artificial Sequence: Synthetic oligonucleotide
  Target: LAMA2; (-) strand; PAM type: NNGRRT; PAM sequence: TTGGGT
gttctccagctgatgaacac

SEQ ID NO: 24298 - DNA, 20 bp, Artificial Sequence
  Description of Artificial Sequence: Synthetic oligonucleotide
  Target: LAMA2; (-) strand; PAM type: NNGRRT; PAM sequence: GTGGAT
tctcagaggtaaccacaaat

SEQ ID NO: 24299 - DNA, 20 bp, Artificial Sequence
  Description of Artificial Sequence: Synthetic oligonucleotide
  Target: LAMA2; (-) strand; PAM type: NNGRRT; PAM sequence: ATGAGT
acaataccattgcatctctt

SEQ ID NO: 24300 - DNA, 20 bp, Artificial Sequence
  Description of Artificial Sequence: Synthetic oligonucleotide
  Target: LAMA2; (-) strand; PAM type: NNGRRT; PAM sequence: ATGAAT
cgttaacactgtataataac

SEQ ID NO: 24301 - DNA, 20 bp, Artificial Sequence
  Description of Artificial Sequence: Synthetic oligonucleotide
  Target: LAMA2; (-) strand; PAM type: NNGRRT; PAM sequence: ATGAGT
tttgatatattcttcacaat

SEQ ID NO: 24302 - DNA, 20 bp, Artificial Sequence
  Description of Artificial Sequence: Synthetic oligonucleotide
  Target: LAMA2; (-) strand; PAM type: NNGRRT; PAM sequence: CAGAAT
cctttagtggaaatctattt

SEQ ID NO: 24303 - DNA, 20 bp, Artificial Sequence
  Description of Artificial Sequence: Synthetic oligonucleotide
  Target: LAMA2; (-) strand; PAM type: NNGRRT; PAM sequence: AGGAAT
taaatatctggcaatgatga

SEQ ID NO: 24304 - DNA, 20 bp, Artificial Sequence
  Description of Artificial Sequence: Synthetic oligonucleotide
  Target: LAMA2; (-) strand; PAM type: NNGRRT; PAM sequence: AGGAAT
cttattgtaattgttttaat

SEQ ID NO: 24305 - DNA, 20 bp, Artificial Sequence
  Description of Artificial Sequence: Synthetic oligonucleotide
  Target: LAMA2; (-) strand; PAM type: NNGRRT; PAM sequence: ATGAGT
tgatattttataaagtagat

SEQ ID NO: 24306 - DNA, 20 bp, Artificial Sequence
  Description of Artificial Sequence: Synthetic oligonucleotide
  Target: LAMA2; (-) strand; PAM type: NNGRRT; PAM sequence: CTGAAT
acttgtcaatttaaccagca

SEQ ID NO: 24307 - DNA, 20 bp, Artificial Sequence
  Description of Artificial Sequence: Synthetic oligonucleotide
  Target: LAMA2; (-) strand; PAM type: NNGRRT; PAM sequence: ATGGGT
aaggaatcacaaataactct

SEQ ID NO: 24308 - DNA, 20 bp, Artificial Sequence
  Description of Artificial Sequence: Synthetic oligonucleotide
  Target: LAMA2; (-) strand; PAM type: NNGRRT; PAM sequence: AGGAAT
atcaaacccatttagcagaa

SEQ ID NO: 24309 - DNA, 20 bp, Artificial Sequence
  Description of Artificial Sequence: Synthetic oligonucleotide
  Target: LAMA2; (-) strand; PAM type: NNGRRT; PAM sequence: ATGGAT
aattaaaaattccttagctc

SEQ ID NO: 24310 - DNA, 20 bp, Artificial Sequence
  Description of Artificial Sequence: Synthetic oligonucleotide
  Target: LAMA2; (-) strand; PAM type: NNGRRT; PAM sequence: CTGGAT
ccacagaacattttgaggat

SEQ ID NO: 24311 - DNA, 20 bp, Artificial Sequence
  Description of Artificial Sequence: Synthetic oligonucleotide
  Target: LAMA2; (-) strand; PAM type: NNGRRT; PAM sequence: GAGGAT
tgtccaccacagaacatttt

SEQ ID NO: 24312 - DNA, 20 bp, Artificial Sequence
  Description of Artificial Sequence: Synthetic oligonucleotide
  Target: LAMA2; (-) strand; PAM type: NNGRRT; PAM sequence: ATGAGT
cagtgatggctcagttctcc

SEQ ID NO: 24313 - DNA, 20 bp, Artificial Sequence
  Description of Artificial Sequence: Synthetic oligonucleotide
  Target: LAMA2; (-) strand; PAM type: NNGRRT; PAM sequence: TGGAGT
cacgtgctctccctttcttg

SEQ ID NO: 24314 - DNA, 20 bp, Artificial Sequence
  Description of Artificial Sequence: Synthetic oligonucleotide
  Target: LAMA2; (-) strand; PAM type: NNGRRT; PAM sequence: CTGAAT
catcatgaaccccagggagc

SEQ ID NO: 24315 - DNA, 20 bp, Artificial Sequence
  Description of Artificial Sequence: Synthetic oligonucleotide
  Target: LAMA2; (-) strand; PAM type: NNGRRT; PAM sequence: TAGAAT
caatttgttctctgagctgg

SEQ ID NO: 24316 - DNA, 20 bp, Artificial Sequence
  Description of Artificial Sequence: Synthetic oligonucleotide
  Target: LAMA2; (-) strand; PAM type: NNGRRT; PAM sequence: CTGAGT
actcccaaccttgtggcatt

SEQ ID NO: 24317 - DNA, 20 bp, Artificial Sequence
  Description of Artificial Sequence: Synthetic oligonucleotide
  Target: LAMA2; (-) strand; PAM type: NNGRRT; PAM sequence: GAGAAT
caagtggacagctagcttct

SEQ ID NO: 24318 - DNA, 20 bp, Artificial Sequence
  Description of Artificial Sequence: Synthetic oligonucleotide
  Target: LAMA2; (-) strand; PAM type: NNGRRT; PAM sequence: AAGGGT
ataaaacccatcaggagaca

SEQ ID NO: 24319 - DNA, 20 bp, Artificial Sequence
  Description of Artificial Sequence: Synthetic oligonucleotide
  Target: LAMA2; (-) strand; PAM type: NNGRRT; PAM sequence: GTGGAT
cttgtgagatgatctggaaa

SEQ ID NO: 24320 - DNA, 20 bp, Artificial Sequence
  Description of Artificial Sequence: Synthetic oligonucleotide
  Target: LAMA2; (-) strand; PAM type: NNGRRT; PAM sequence: AGGAGT
cttccagacggcccctgttg

SEQ ID NO: 24321 - DNA, 20 bp, Artificial Sequence
  Description of Artificial Sequence: Synthetic oligonucleotide
  Target: LAMA2; (-) strand; PAM type: NNGRRT; PAM sequence: CGGAAT
tctagttcgctctacatgaa

SEQ ID NO: 24322 - DNA, 20 bp, Artificial Sequence
  Description of Artificial Sequence: Synthetic oligonucleotide
  Target: LAMA2; (-) strand; PAM type: NNGRRT; PAM sequence: CTGAGT
tgctagcaaaggaagttcac

SEQ ID NO: 24323 - DNA, 20 bp, Artificial Sequence
  Description of Artificial Sequence: Synthetic oligonucleotide
  Target: LAMA2; (-) strand; PAM type: NNGRRT; PAM sequence: GGGAAT
agtatgaaaagtaaagaaga

SEQ ID NO: 24324 - DNA, 20 bp, Artificial Sequence
  Description of Artificial Sequence: Synthetic oligonucleotide
  Target: LAMA2; (-) strand; PAM type: NNGRRT; PAM sequence: AAGGGT
actgcacgaataaaaatgtt

SEQ ID NO: 24325 - DNA, 20 bp, Artificial Sequence
  Description of Artificial Sequence: Synthetic oligonucleotide
  Target: LAMA2; (-) strand; PAM type: NNGRRT; PAM sequence: ACGAAT
ccaaaggtggagataactgc

SEQ ID NO: 24326 - DNA, 20 bp, Artificial Sequence
  Description of Artificial Sequence: Synthetic oligonucleotide
  Target: LAMA2; (-) strand; PAM type: NNGRRT; PAM sequence: AGGGAT
tatttaagaggggcagaggg

SEQ ID NO: 24327 - DNA, 20 bp, Artificial Sequence
  Description of Artificial Sequence: Synthetic oligonucleotide
  Target: LAMA2; (-) strand; PAM type: NNGRRT; PAM sequence: GTGAGT
ggctccagtggagctgattt

SEQ ID NO: 24328 - DNA, 20 bp, Artificial Sequence
  Description of Artificial Sequence: Synthetic oligonucleotide
  Target: LAMA2; (-) strand; PAM type: NNGRRT; PAM sequence: CTGAAT
tgccataactgctttggaac

SEQ ID NO: 24329 - DNA, 20 bp, Artificial Sequence
  Description of Artificial Sequence: Synthetic oligonucleotide
  Target: LAMA2; (-) strand; PAM type: NNGRRT; PAM sequence: ATGAGT
agaaagtcatcagtttgtgc

SEQ ID NO: 24330 - DNA, 20 bp, Artificial Sequence
  Description of Artificial Sequence: Synthetic oligonucleotide
  Target: LAMA2; (-) strand; PAM type: NNGRRT; PAM sequence: CTGAGT
cttctaaactaattatctct

SEQ ID NO: 24331 - DNA, 20 bp, Artificial Sequence
  Description of Artificial Sequence: Synthetic oligonucleotide
  Target: LAMA2; (-) strand; PAM type: NNGRRT; PAM sequence: ATGGAT
ctatgtcttcagtctgataa

SEQ ID NO: 24332 - DNA, 20 bp, Artificial Sequence
  Description of Artificial Sequence: Synthetic oligonucleotide
  Target: LAMA2; (-) strand; PAM type: NNGRRT; PAM sequence: TTGGAT
tgttttgaggcctcatcaaa

SEQ ID NO: 24333 - DNA, 20 bp, Artificial Sequence
  Description of Artificial Sequence: Synthetic oligonucleotide
  Target: LAMA2; (-) strand; PAM type: NNGRRT; PAM sequence: CAGGAT
taaatgtaggtctttcactg

SEQ ID NO: 24334 - DNA, 20 bp, Artificial Sequence
  Description of Artificial Sequence: Synthetic oligonucleotide
  Target: LAMA2; (-) strand; PAM type: NNGRRT; PAM sequence: GAGGAT
tatctaaatgttttccccaa

SEQ ID NO: 24335 - DNA, 20 bp, Artificial Sequence
  Description of Artificial Sequence: Synthetic oligonucleotide
  Target: LAMA2; (-) strand; PAM type: NNGRRT; PAM sequence: CAGGAT
atctagaagacatgtgaaac

SEQ ID NO: 24336 - DNA, 20 bp, Artificial Sequence
  Description of Artificial Sequence: Synthetic oligonucleotide
  Target: LAMA2; (-) strand; PAM type: NNGRRT; PAM sequence: AAGGAT
aaagtcctttccgcaatgaa

SEQ ID NO: 24337 - DNA, 20 bp, Artificial Sequence
  Description of Artificial Sequence: Synthetic oligonucleotide
  Target: LAMA2; (-) strand; PAM type: NNGRRT; PAM sequence: TGGGAT
gccttggcctcccaaagtgc

SEQ ID NO: 24338 - DNA, 20 bp, Artificial Sequence
  Description of Artificial Sequence: Synthetic oligonucleotide
  Target: LAMA2; (-) strand; PAM type: NNGRRT; PAM sequence: CGGGGT
ttttgcatttttagtagaga

SEQ ID NO: 24339 - DNA, 20 bp, Artificial Sequence
  Description of Artificial Sequence: Synthetic oligonucleotide
  Target: LAMA2; (-) strand; PAM type: NNGRRT; PAM sequence: CAGAGT
atttctcctgcctcagcctc

SEQ ID NO: 24340 - DNA, 20 bp, Artificial Sequence
  Description of Artificial Sequence: Synthetic oligonucleotide
  Target: LAMA2; (-) strand; PAM type: NNGRRT; PAM sequence: TGGAGT
tcttgctctgttgcccaggc

SEQ ID NO: 24341 - DNA, 20 bp, Artificial Sequence
  Description of Artificial Sequence: Synthetic oligonucleotide
  Target: LAMA2; (-) strand; PAM type: NNGRRT; PAM sequence: TGGAGT
ttgttttgttttttccgagt

SEQ ID NO: 24342 - DNA, 20 bp, Artificial Sequence
  Description of Artificial Sequence: Synthetic oligonucleotide
  Target: LAMA2; (-) strand; PAM type: NNGRRT; PAM sequence: CCGAGT
tttgttttgttttgtttttt

SEQ ID NO: 24343 - DNA, 20 bp, Artificial Sequence
  Description of Artificial Sequence: Synthetic oligonucleotide
  Target: LAMA2; (-) strand; PAM type: NNGRRT; PAM sequence: TTGAGT
tctcaacaaaataacacatt

SEQ ID NO: 24344 - DNA, 20 bp, Artificial Sequence
  Description of Artificial Sequence: Synthetic oligonucleotide
  Target: LAMA2; (-) strand; PAM type: NNGRRT; PAM sequence: CAGAAT
tgtaatgcatttgggaattc

SEQ ID NO: 24345 - DNA, 20 bp, Artificial Sequence
  Description of Artificial Sequence: Synthetic oligonucleotide
  Target: LAMA2; (-) strand; PAM type: NNGRRT; PAM sequence: GGGAAT
tacaatagtgtaatgcattt

SEQ ID NO: 24346 - DNA, 20 bp, Artificial Sequence
  Description of Artificial Sequence: Synthetic oligonucleotide
  Target: LAMA2; (-) strand; PAM type: NNGRRT; PAM sequence: TTGGAT
tgagcttaatcaaataaagg

SEQ ID NO: 24347 - DNA, 20 bp, Artificial Sequence
  Description of Artificial Sequence: Synthetic oligonucleotide
  Target: LAMA2; (-) strand; PAM type: NNGRRT; PAM sequence: ATGAAT
atattatcctgtaattaaca

SEQ ID NO: 24348 - DNA, 20 bp, Artificial Sequence
  Description of Artificial Sequence: Synthetic oligonucleotide
  Target: LAMA2; (-) strand; PAM type: NNGRRT; PAM sequence: CAGAGT
aatgtattactgttttggca

SEQ ID NO: 24349 - DNA, 20 bp, Artificial Sequence
  Description of Artificial Sequence: Synthetic oligonucleotide
  Target: LAMA2; (-) strand; PAM type: NNGRRT; PAM sequence: CCGAAT
tgcattttaaccttagagtg

SEQ ID NO: 24350 - DNA, 20 bp, Artificial Sequence
  Description of Artificial Sequence: Synthetic oligonucleotide
  Target: LAMA2; (-) strand; PAM type: NNGRRT; PAM sequence: TAGAGT
agtagattgcattttaacct

SEQ ID NO: 24351 - DNA, 20 bp, Artificial Sequence
  Description of Artificial Sequence: Synthetic oligonucleotide
  Target: LAMA2; (-) strand; PAM type: NNGRRT; PAM sequence: TAGAGT
tttaatgtggcacttgctta

SEQ ID NO: 24352 - DNA, 20 bp, Artificial Sequence
  Description of Artificial Sequence: Synthetic oligonucleotide
  Target: LAMA2; (-) strand; PAM type: NNGRRT; PAM sequence: CTGGGT
taaagcattaaaaatttttt

SEQ ID NO: 24353 - DNA, 20 bp, Artificial Sequence
  Description of Artificial Sequence: Synthetic oligonucleotide
  Target: LAMA2; (-) strand; PAM type: NNGRRT; PAM sequence: TAGAAT
atgtgacacaaatcatgcca

SEQ ID NO: 24354 - DNA, 20 bp, Artificial Sequence
  Description of Artificial Sequence: Synthetic oligonucleotide
  Target: LAMA2; (-) strand; PAM type: NNGRRT; PAM sequence: AAGGAT
tattttctcatctgtgatga

SEQ ID NO: 24355 - DNA, 20 bp, Artificial Sequence
  Description of Artificial Sequence: Synthetic oligonucleotide
  Target: LAMA2; (-) strand; PAM type: NNGRRT; PAM sequence: AAGAAT
ttatggtcacacaaaaatgt

SEQ ID NO: 24356 - DNA, 20 bp, Artificial Sequence
  Description of Artificial Sequence: Synthetic oligonucleotide
  Target: LAMA2; (-) strand; PAM type: NNGRRT; PAM sequence: TGGGAT
tctgaaaatctgaaaagtgt

SEQ ID NO: 24357 - DNA, 20 bp, Artificial Sequence
  Description of Artificial Sequence: Synthetic oligonucleotide
  Target: LAMA2; (-) strand; PAM type: NNGRRT; PAM sequence: CAGGAT
attaaagctatcattttgtc

SEQ ID NO: 24358 - DNA, 20 bp, Artificial Sequence
  Description of Artificial Sequence: Synthetic oligonucleotide
  Target: LAMA2; (-) strand; PAM type: NNGRRT; PAM sequence: AGGAGT
gggagagagaatgagggagg

SEQ ID NO: 24359 - DNA, 20 bp, Artificial Sequence
  Description of Artificial Sequence: Synthetic oligonucleotide
  Target: LAMA2; (-) strand; PAM type: NNGRRT; PAM sequence: GAGAAT
atgaaggggtggaagggaga

SEQ ID NO: 24360 - DNA, 20 bp, Artificial Sequence
  Description of Artificial Sequence: Synthetic oligonucleotide
  Target: LAMA2; (-) strand; PAM type: NNGRRT; PAM sequence: AGGGGT
agggagatttttccagatga

SEQ ID NO: 24361 - DNA, 20 bp, Artificial Sequence
  Description of Artificial Sequence: Synthetic oligonucleotide
  Target: LAMA2; (-) strand; PAM type: NNGRRT; PAM sequence: TGGAGT
atataggaggcagaggtcac

SEQ ID NO: 24362 - DNA, 20 bp, Artificial Sequence
  Description of Artificial Sequence: Synthetic oligonucleotide
  Target: LAMA2; (-) strand; PAM type: NNGRRT; PAM sequence: AAGGAT
accaaggcggatgccaggag

SEQ ID NO: 24363 - DNA, 20 bp, Artificial Sequence
  Description of Artificial Sequence: Synthetic oligonucleotide
  Target: LAMA2; (-) strand; PAM type: NNGRRT; PAM sequence: GCGGAT
aagaactgctggccaccaag

SEQ ID NO: 24364 - DNA, 20 bp, Artificial Sequence
  Description of Artificial Sequence: Synthetic oligonucleotide
  Target: LAMA2; (-) strand; PAM type: NNGRRT; PAM sequence: TAGGGT
aagtaactacttcaggctct

SEQ ID NO: 24365 - DNA, 20 bp, Artificial Sequence
  Description of Artificial Sequence: Synthetic oligonucleotide
  Target: LAMA2; (-) strand; PAM type: NNGRRT; PAM sequence: TAGGGT
atgttaagaaagaaaatatt

SEQ ID NO: 24366 - DNA, 20 bp, Artificial Sequence
  Description of Artificial Sequence: Synthetic oligonucleotide
  Target: LAMA2; (-) strand; PAM type: NNGRRT; PAM sequence: TTGGAT
tttttctgtttgaacatact

SEQ ID NO: 24367 - DNA, 20 bp, Artificial Sequence
  Description of Artificial Sequence: Synthetic oligonucleotide
  Target: LAMA2; (-) strand; PAM type: NNGRRT; PAM sequence: TAGAAT
tttgtaatttacataataaa

SEQ ID NO: 24368 - DNA, 20 bp, Artificial Sequence
  Description of Artificial Sequence: Synthetic oligonucleotide
  Target: LAMA2; (-) strand; PAM type: NNGRRT; PAM sequence: TTGGAT
tttttttaaaaccatatcag

SEQ ID NO: 24369 - DNA, 20 bp, Artificial Sequence
  Description of Artificial Sequence: Synthetic oligonucleotide
  Target: LAMA2; (-) strand; PAM type: NNGRRT; PAM sequence: GTGGGT
atttcttatttgtttggaat

SEQ ID NO: 24370 - DNA, 20 bp, Artificial Sequence
  Description of Artificial Sequence: Synthetic oligonucleotide
  Target: LAMA2; (-) strand; PAM type: NNGRRT; PAM sequence: TGGAAT
taccctatttcttatttgtt

SEQ ID NO: 24371 - DNA, 20 bp, Artificial Sequence
  Description of Artificial Sequence: Synthetic oligonucleotide
  Target: LAMA2; (-) strand; PAM type: NNGRRT; PAM sequence: TAGAGT
cagtttcagtggctgattct

SEQ ID NO: 24372 - DNA, 20 bp, Artificial Sequence
  Description of Artificial Sequence: Synthetic oligonucleotide
  Target: LAMA2; (-) strand; PAM type: NNGRRT; PAM sequence: AGGGAT
acagcggaaaatattaatta

SEQ ID NO: 24373 - DNA, 20 bp, Artificial Sequence
  Description of Artificial Sequence: Synthetic oligonucleotide
  Target: LAMA2; (-) strand; PAM type: NNGRRT; PAM sequence: TGGAAT
ggctttcaggaggaacatac

SEQ ID NO: 24374 - DNA, 20 bp, Artificial Sequence
  Description of Artificial Sequence: Synthetic oligonucleotide
  Target: LAMA2; (-) strand; PAM type: NNGRRT; PAM sequence: ATGAGT
tcacagggtggtgatggaga

SEQ ID NO: 24375 - DNA, 20 bp, Artificial Sequence
  Description of Artificial Sequence: Synthetic oligonucleotide
  Target: LAMA2; (-) strand; PAM type: NNGRRT; PAM sequence: GAGAAT
caattcacagggtggtgatg

SEQ ID NO: 24376 - DNA, 20 bp, Artificial Sequence
  Description of Artificial Sequence: Synthetic oligonucleotide
  Target: LAMA2; (-) strand; PAM type: NNGRRT; PAM sequence: CAGGGT
attttttttaaaccaattca

SEQ ID NO: 24377 - DNA, 20 bp, Artificial Sequence
  Description of Artificial Sequence: Synthetic oligonucleotide
  Target: LAMA2; (-) strand; PAM type: NNGRRT; PAM sequence: TAGAAT
agtaaatctctgttcttgat

SEQ ID NO: 24378 - DNA, 20 bp, Artificial Sequence
  Description of Artificial Sequence: Synthetic oligonucleotide
  Target: LAMA2; (-) strand; PAM type: NNGRRT; PAM sequence: GAGAGT
tctgttaaagattgtccaag

SEQ ID NO: 24379 - DNA, 20 bp, Artificial Sequence
  Description of Artificial Sequence: Synthetic oligonucleotide
  Target: LAMA2; (-) strand; PAM type: NNGRRT; PAM sequence: AAGGAT
gggcttctaaggttttaatg

SEQ ID NO: 24380 - DNA, 20 bp, Artificial Sequence
  Description of Artificial Sequence: Synthetic oligonucleotide
  Target: LAMA2; (-) strand; PAM type: NNGRRT; PAM sequence: CCGGGT
tttcagaaaaccactcactt

SEQ ID NO: 24381 - DNA, 20 bp, Artificial Sequence
  Description of Artificial Sequence: Synthetic oligonucleotide
  Target: LAMA2; (-) strand; PAM type: NNGRRT; PAM sequence: GAGAAT
tgtcggtggtttcctgagac

SEQ ID NO: 24382 - DNA, 20 bp, Artificial Sequence
  Description of Artificial Sequence: Synthetic oligonucleotide
  Target: LAMA2; (-) strand; PAM type: NNGRRT; PAM sequence: AAGAGT
ggaggttcagcttccttgct

SEQ ID NO: 24383 - DNA, 20 bp, Artificial Sequence
  Description of Artificial Sequence: Synthetic oligonucleotide
  Target: LAMA2; (-) strand; PAM type: NNGRRT; PAM sequence: GGGGGT
ctcaaaaacgtcactgttaa

SEQ ID NO: 24384 - DNA, 20 bp, Artificial Sequence
  Description of Artificial Sequence: Synthetic oligonucleotide
  Target: LAMA2; (-) strand; PAM type: NNGRRT; PAM sequence: ATGGAT
gtaagagaaagggacaaaaa

SEQ ID NO: 24385 - DNA, 20 bp, Artificial Sequence
  Description of Artificial Sequence: Synthetic oligonucleotide
  Target: LAMA2; (-) strand; PAM type: NNGRRT; PAM sequence: CTGAAT
taagccagggtaaagatgct

SEQ ID NO: 24386 - DNA, 20 bp, Artificial Sequence
  Description of Artificial Sequence: Synthetic oligonucleotide
  Target: LAMA2; (-) strand; PAM type: NNGRRT; PAM sequence: CAGGGT
aactggaaaaaacaataagc

SEQ ID NO: 24387 - DNA, 20 bp, Artificial Sequence
  Description of Artificial Sequence: Synthetic oligonucleotide
  Target: LAMA2; (-) strand; PAM type: NNGRRT; PAM sequence: TTGGAT
tggagagaaaaccggagtac

SEQ ID NO: 24388 - DNA, 20 bp, Artificial Sequence
  Description of Artificial Sequence: Synthetic oligonucleotide
  Target: LAMA2; (-) strand; PAM type: NNGRRT; PAM sequence: CGGAGT
ttcatatctggagagaaaac

SEQ ID NO: 24389 - DNA, 20 bp, Artificial Sequence
  Description of Artificial Sequence: Synthetic oligonucleotide
  Target: LAMA2; (-) strand; PAM type: NNGRRT; PAM sequence: ATGGAT
cactagcctggggatcatga

SEQ ID NO: 24390 - DNA, 20 bp, Artificial Sequence
  Description of Artificial Sequence: Synthetic oligonucleotide
  Target: LAMA2; (-) strand; PAM type: NNGRRT; PAM sequence: ATGAAT
tagtcactagcctggggatc

SEQ ID NO: 24391 - DNA, 20 bp, Artificial Sequence
  Description of Artificial Sequence: Synthetic oligonucleotide
  Target: LAMA2; (-) strand; PAM type: NNGRRT; PAM sequence: GGGGAT
taagcattagtcactagcct

SEQ ID NO: 24392 - DNA, 20 bp, Artificial Sequence
  Description of Artificial Sequence: Synthetic oligonucleotide
  Target: LAMA2; (-) strand; PAM type: NNGRRT; PAM sequence: TTGAGT
ttttgttccggaagcaagtt

SEQ ID NO: 24393 - DNA, 20 bp, Artificial Sequence
  Description of Artificial Sequence: Synthetic oligonucleotide
  Target: LAMA2; (-) strand; PAM type: NNGRRT; PAM sequence: AAGAGT
ccaagaatcagaaggagaca

SEQ ID NO: 24394 - DNA, 20 bp, Artificial Sequence
  Description of Artificial Sequence: Synthetic oligonucleotide
  Target: LAMA2; (-) strand; PAM type: NNGRRT; PAM sequence: AAGAAT
aatccttggatccctgggcc

SEQ ID NO: 24395 - DNA, 20 bp, Artificial Sequence
  Description of Artificial Sequence: Synthetic oligonucleotide
  Target: LAMA2; (-) strand; PAM type: NNGRRT; PAM sequence: TTGGAT
ctacttatttacaacaatcc

SEQ ID NO: 24396 - DNA, 20 bp, Artificial Sequence
  Description of Artificial Sequence: Synthetic oligonucleotide
  Target: LAMA2; (-) strand; PAM type: NNGRRT; PAM sequence: TTGAAT
aagaatgtagctgatggctt

SEQ ID NO: 24397 - DNA, 20 bp, Artificial Sequence
  Description of Artificial Sequence: Synthetic oligonucleotide
  Target: LAMA2; (-) strand; PAM type: NNGRRT; PAM sequence: AAGAAT
cacttaaagcaccttttata

SEQ ID NO: 24398 - DNA, 20 bp, Artificial Sequence
  Description of Artificial Sequence: Synthetic oligonucleotide
  Target: LAMA2; (-) strand; PAM type: NNGRRT; PAM sequence: AGGAAT
ctcctgagagcttagattgc

SEQ ID NO: 24399 - DNA, 20 bp, Artificial Sequence
  Description of Artificial Sequence: Synthetic oligonucleotide
  Target: LAMA2; (-) strand; PAM type: NNGRRT; PAM sequence: TTGGGT
agcaaagcatggggtcttcc

SEQ ID NO: 24400 - DNA, 20 bp, Artificial Sequence
  Description of Artificial Sequence: Synthetic oligonucleotide
  Target: LAMA2; (-) strand; PAM type: NNGRRT; PAM sequence: TGGGGT
ttggcaggtttagcaaagca

SEQ ID NO: 24401 - DNA, 20 bp, Artificial Sequence
  Description of Artificial Sequence: Synthetic oligonucleotide
  Target: LAMA2; (-) strand; PAM type: NNGRRT; PAM sequence: AAGGGT
gcagtaatgtctaaccgtat

SEQ ID NO: 24402 - DNA, 20 bp, Artificial Sequence
  Description of Artificial Sequence: Synthetic oligonucleotide
  Target: LAMA2; (-) strand; PAM type: NNGRRT; PAM sequence: CAGGAT
cactaagcaaacgctgttct

SEQ ID NO: 24403 - DNA, 20 bp, Artificial Sequence
  Description of Artificial Sequence: Synthetic oligonucleotide
  Target: LAMA2; (-) strand; PAM type: NNGRRT; PAM sequence: AGGAAT
ggagccaaaattggatgctt

SEQ ID NO: 24404 - DNA, 20 bp, Artificial Sequence
  Description of Artificial Sequence: Synthetic oligonucleotide
  Target: LAMA2; (-) strand; PAM type: NNGRRT; PAM sequence: TTGGAT
agcttttaagggagccaaaa

SEQ ID NO: 24405 - DNA, 20 bp, Artificial Sequence
  Description of Artificial Sequence: Synthetic oligonucleotide
  Target: LAMA2; (-) strand; PAM type: NNGRRT; PAM sequence: CTGAGT
cttcaaaaggaggaatattt

SEQ ID NO: 24406 - DNA, 20 bp, Artificial Sequence
  Description of Artificial Sequence: Synthetic oligonucleotide
  Target: LAMA2; (-) strand; PAM type: NNGRRT; PAM sequence: AGGAAT
catatgcagccttcaaaagg

SEQ ID NO: 24407 - DNA, 20 bp, Artificial Sequence
  Description of Artificial Sequence: Synthetic oligonucleotide
  Target: LAMA2; (-) strand; PAM type: NNGRRT; PAM sequence: CAGAGT
aatgaggagatccacttaca

SEQ ID NO: 24408 - DNA, 20 bp, Artificial Sequence
  Description of Artificial Sequence: Synthetic oligonucleotide
  Target: LAMA2; (-) strand; PAM type: NNGRRT; PAM sequence: TAGAAT
tgcaaagtccatggggctaa

SEQ ID NO: 24409 - DNA, 20 bp, Artificial Sequence
  Description of Artificial Sequence: Synthetic oligonucleotide
  Target: LAMA2; (-) strand; PAM type: NNGRRT; PAM sequence: CGGAGT
ctgctccatcttcatcttca

SEQ ID NO: 24410 - DNA, 20 bp, Artificial Sequence
  Description of Artificial Sequence: Synthetic oligonucleotide
  Target: LAMA2; (-) strand; PAM type: NNGRRT; PAM sequence: CTGGAT
ggggtgggaactggctcagg

SEQ ID NO: 24411 - DNA, 20 bp, Artificial Sequence
  Description of Artificial Sequence: Synthetic oligonucleotide
  Target: LAMA2; (-) strand; PAM type: NNGRRT; PAM sequence: TGGGGT
ggggtgggcgtaggaaaggc

SEQ ID NO: 24412 - DNA, 20 bp, Artificial Sequence
  Description of Artificial Sequence: Synthetic oligonucleotide
  Target: LAMA2; (-) strand; PAM type: NNGRRT; PAM sequence: TGGGGT
acacttacatgtgtcagaac

SEQ ID NO: 24413 - DNA, 20 bp, Artificial Sequence
  Description of Artificial Sequence: Synthetic oligonucleotide
  Target: LAMA2; (-) strand; PAM type: NNGRRT; PAM sequence: GGGGAT
ggtaaaaattagaaagcaat

SEQ ID NO: 24414 - DNA, 20 bp, Artificial Sequence
  Description of Artificial Sequence: Synthetic oligonucleotide
  Target: LAMA2; (-) strand; PAM type: NNGRRT; PAM sequence: CTGGGT
ttctgaaatgactcagaata

SEQ ID NO: 24415 - DNA, 20 bp, Artificial Sequence
  Description of Artificial Sequence: Synthetic oligonucleotide
  Target: LAMA2; (-) strand; PAM type: NNGRRT; PAM sequence: CAGAAT
atcttccttctgaaatgact

SEQ ID NO: 24416 - DNA, 20 bp, Artificial Sequence
  Description of Artificial Sequence: Synthetic oligonucleotide
  Target: LAMA2; (-) strand; PAM type: NNGRRT; PAM sequence: CTGAAT
atcagagtgtactagatatc

SEQ ID NO: 24417 - DNA, 20 bp, Artificial Sequence
  Description of Artificial Sequence: Synthetic oligonucleotide
  Target: LAMA2; (-) strand; PAM type: NNGRRT; PAM sequence: CAGAGT
atttctttcaattctaatat

SEQ ID NO: 24418 - DNA, 20 bp, Artificial Sequence
  Description of Artificial Sequence: Synthetic oligonucleotide
  Target: LAMA2; (-) strand; PAM type: NNGRRT; PAM sequence: AAGAAT
aagtcattcaatgaagatgt

SEQ ID NO: 24419 - DNA, 20 bp, Artificial Sequence
  Description of Artificial Sequence: Synthetic oligonucleotide
  Target: LAMA2; (-) strand; PAM type: NNGRRT; PAM sequence: CTGGAT
agtgtcttttattcatgatt

SEQ ID NO: 24420 - DNA, 20 bp, Artificial Sequence
  Description of Artificial Sequence: Synthetic oligonucleotide
  Target: LAMA2; (-) strand; PAM type: NNGRRT; PAM sequence: TAGGAT
gccttggcctcccaaagtgc

SEQ ID NO: 24421 - DNA, 20 bp, Artificial Sequence
  Description of Artificial Sequence: Synthetic oligonucleotide
  Target: LAMA2; (-) strand; PAM type: NNGRRT; PAM sequence: CGGGGT
tttttgtattttagaagaga

SEQ ID NO: 24422 - DNA, 20 bp, Artificial Sequence
  Description of Artificial Sequence: Synthetic oligonucleotide
  Target: LAMA2; (-) strand; PAM type: NNGRRT; PAM sequence: CTGAGT
gattctcctgcctcagccta

SEQ ID NO: 24423 - DNA, 20 bp, Artificial Sequence
  Description of Artificial Sequence: Synthetic oligonucleotide
  Target: LAMA2; (-) strand; PAM type: NNGRRT; PAM sequence: CTGGGT
ctcactgcaacctccgcctc

SEQ ID NO: 24424 - DNA, 20 bp, Artificial Sequence
  Description of Artificial Sequence: Synthetic oligonucleotide
  Target: LAMA2; (-) strand; PAM type: NNGRRT; PAM sequence: TGGAGT
tctcgctctgttgcccaggc

SEQ ID NO: 24425 - DNA, 20 bp, Artificial Sequence
  Description of Artificial Sequence: Synthetic oligonucleotide
  Target: LAMA2; (-) strand; PAM type: NNGRRT; PAM sequence: TGGAGT
ttatttttattttttggaga

SEQ ID NO: 24426 - DNA, 20 bp, Artificial Sequence
  Description of Artificial Sequence: Synthetic oligonucleotide
  Target: LAMA2; (-) strand; PAM type: NNGRRT; PAM sequence: TTGAAT
gtcggttacagtgctgggat

SEQ ID NO: 24427 - DNA, 20 bp, Artificial Sequence
  Description of Artificial Sequence: Synthetic oligonucleotide
  Target: LAMA2; (-) strand; PAM type: NNGRRT; PAM sequence: TGGGAT
cagatggtcggttacagtgc

SEQ ID NO: 24428 - DNA, 20 bp, Artificial Sequence
  Description of Artificial Sequence: Synthetic oligonucleotide
  Target: LAMA2; (-) strand; PAM type: NNGRRT; PAM sequence: TTGGAT
gggttgggcccggttagtac

SEQ ID NO: 24429 - DNA, 20 bp, Artificial Sequence
  Description of Artificial Sequence: Synthetic oligonucleotide
  Target: LAMA2; (-) strand; PAM type: NNGRRT; PAM sequence: CAGGGT
ttctgatctcaaaagctaag

SEQ ID NO: 24430 - DNA, 20 bp, Artificial Sequence
  Description of Artificial Sequence: Synthetic oligonucleotide
  Target: LAMA2; (-) strand; PAM type: NNGRRT; PAM sequence: GTGAGT
ttattaaacgttcagtatat

SEQ ID NO: 24431 - DNA, 20 bp, Artificial Sequence
  Description of Artificial Sequence: Synthetic oligonucleotide
  Target: LAMA2; (-) strand; PAM type: NNGRRT; PAM sequence: TTGAAT
tatgagaattacatataata

SEQ ID NO: 24432 - DNA, 20 bp, Artificial Sequence
  Description of Artificial Sequence: Synthetic oligonucleotide
  Target: LAMA2; (-) strand; PAM type: NNGRRT; PAM sequence: GAGAAT
atattttacagagccgttat

SEQ ID NO: 24433 - DNA, 20 bp, Artificial Sequence
  Description of Artificial Sequence: Synthetic oligonucleotide
  Target: LAMA2; (-) strand; PAM type: NNGRRT; PAM sequence: GTGGGT
gccttttactagtggtgtga

SEQ ID NO: 24434 - DNA, 20 bp, Artificial Sequence
  Description of Artificial Sequence: Synthetic oligonucleotide
  Target: LAMA2; (-) strand; PAM type: NNGRRT; PAM sequence: GTGAGT
ctctgccttttactagtggt

SEQ ID NO: 24435 - DNA, 20 bp, Artificial Sequence
  Description of Artificial Sequence: Synthetic oligonucleotide
  Target: LAMA2; (-) strand; PAM type: NNGRRT; PAM sequence: TAGAAT
gactttggagtctgactcgc

SEQ ID NO: 24436 - DNA, 20 bp, Artificial Sequence
  Description of Artificial Sequence: Synthetic oligonucleotide
  Target: LAMA2; (-) strand; PAM type: NNGRRT; PAM sequence: TGGAGT
agagataaggagtcagactt

SEQ ID NO: 24437 - DNA, 20 bp, Artificial Sequence
  Description of Artificial Sequence: Synthetic oligonucleotide
  Target: LAMA2; (-) strand; PAM type: NNGRRT; PAM sequence: AGGAGT
ggcagagtgttccagagata

SEQ ID NO: 24438 - DNA, 20 bp, Artificial Sequence
  Description of Artificial Sequence: Synthetic oligonucleotide
  Target: LAMA2; (-) strand; PAM type: NNGRRT; PAM sequence: CAGAGT
agtagaataaattggaaagg

SEQ ID NO: 24439 - DNA, 20 bp, Artificial Sequence
  Description of Artificial Sequence: Synthetic oligonucleotide
  Target: LAMA2; (-) strand; PAM type: NNGRRT; PAM sequence: TAGAAT
ctaccatggtctattaaaag

SEQ ID NO: 24440 - DNA, 20 bp, Artificial Sequence
  Description of Artificial Sequence: Synthetic oligonucleotide
  Target: LAMA2; (-) strand; PAM type: NNGRRT; PAM sequence: CAGAGT
tgatgcatagaggagctcat

SEQ ID NO: 24441 - DNA, 20 bp, Artificial Sequence
  Description of Artificial Sequence: Synthetic oligonucleotide
  Target: LAMA2; (-) strand; PAM type: NNGRRT; PAM sequence: AAGAAT
cctaactacttatctatttt

SEQ ID NO: 24442 - DNA, 20 bp, Artificial Sequence
  Description of Artificial Sequence: Synthetic oligonucleotide
  Target: LAMA2; (-) strand; PAM type: NNGRRT; PAM sequence: AAGAAT
atctttgttgtattggtgat

SEQ ID NO: 24443 - DNA, 20 bp, Artificial Sequence
  Description of Artificial Sequence: Synthetic oligonucleotide
  Target: LAMA2; (-) strand; PAM type: NNGRRT; PAM sequence: AAGAGT
accacaacacatgagctgta

SEQ ID NO: 24444 - DNA, 20 bp, Artificial Sequence
  Description of Artificial Sequence: Synthetic oligonucleotide
  Target: LAMA2; (-) strand; PAM type: NNGRRT; PAM sequence: TGGAAT
ttgcccacccattactggta

SEQ ID NO: 24445 - DNA, 20 bp, Artificial Sequence
  Description of Artificial Sequence: Synthetic oligonucleotide
  Target: LAMA2; (-) strand; PAM type: NNGRRT; PAM sequence: AAGAGT
aggaagagaatgagatattc

SEQ ID NO: 24446 - DNA, 20 bp, Artificial Sequence
  Description of Artificial Sequence: Synthetic oligonucleotide
  Target: LAMA2; (-) strand; PAM type: NNGRRT; PAM sequence: GAGAAT
ccatcgtggacactaaggaa

SEQ ID NO: 24447 - DNA, 20 bp, Artificial Sequence
  Description of Artificial Sequence: Synthetic oligonucleotide
  Target: LAMA2; (-) strand; PAM type: NNGRRT; PAM sequence: TTGAAT
gatggttatctggcctctca

SEQ ID NO: 24448 - DNA, 20 bp, Artificial Sequence
  Description of Artificial Sequence: Synthetic oligonucleotide
  Target: LAMA2; (-) strand; PAM type: NNGRRT; PAM sequence: TTGAAT
ggagtaaataaccagttttc

SEQ ID NO: 24449 - DNA, 20 bp, Artificial Sequence
  Description of Artificial Sequence: Synthetic oligonucleotide
  Target: LAMA2; (-) strand; PAM type: NNGRRT; PAM sequence: TGGAGT
acaaaggatgaaaggatgct

SEQ ID NO: 24450 - DNA, 20 bp, Artificial Sequence
  Description of Artificial Sequence: Synthetic oligonucleotide
  Target: LAMA2; (-) strand; PAM type: NNGRRT; PAM sequence: AAGGAT
ctctattttacaaaggatga

SEQ ID NO: 24451 - DNA, 20 bp, Artificial Sequence
  Description of Artificial Sequence: Synthetic oligonucleotide
  Target: LAMA2; (-) strand; PAM type: NNGRRT; PAM sequence: AAGGAT
tgaaatatctctattttaca

SEQ ID NO: 24452 - DNA, 20 bp, Artificial Sequence
  Description of Artificial Sequence: Synthetic oligonucleotide
  Target: LAMA2; (-) strand; PAM type: NNGRRT; PAM sequence: GTGGGT
ggattcctcagagtgtctat

SEQ ID NO: 24453 - DNA, 20 bp, Artificial Sequence
  Description of Artificial Sequence: Synthetic oligonucleotide
  Target: LAMA2; (-) strand; PAM type: NNGRRT; PAM sequence: CAGAGT
cactaaatgcagggattcct

SEQ ID NO: 24454 - DNA, 20 bp, Artificial Sequence
  Description of Artificial Sequence: Synthetic oligonucleotide
  Target: LAMA2; (-) strand; PAM type: NNGRRT; PAM sequence: AGGGAT
agtagttattcactaaatgc

SEQ ID NO: 24455 - DNA, 20 bp, Artificial Sequence
  Description of Artificial Sequence: Synthetic oligonucleotide
  Target: LAMA2; (-) strand; PAM type: NNGRRT; PAM sequence: CAGAGT
aacagatatgaaatgcctgg

SEQ ID NO: 24456 - DNA, 20 bp, Artificial Sequence
  Description of Artificial Sequence: Synthetic oligonucleotide
  Target: LAMA2; (-) strand; PAM type: NNGRRT; PAM sequence: GGGAAT
tgtaaataaaacaatagggt

SEQ ID NO: 24457 - DNA, 20 bp, Artificial Sequence
  Description of Artificial Sequence: Synthetic oligonucleotide
  Target: LAMA2; (-) strand; PAM type: NNGRRT; PAM sequence: TAGGGT
aataaatgtaaataaaacaa

SEQ ID NO: 24458 - DNA, 20 bp, Artificial Sequence
  Description of Artificial Sequence: Synthetic oligonucleotide
  Target: LAMA2; (-) strand; PAM type: NNGRRT; PAM sequence: TAGGAT
ggcagatctcaggaatgctt

SEQ ID NO: 24459 - DNA, 20 bp, Artificial Sequence
  Description of Artificial Sequence: Synthetic oligonucleotide
  Target: LAMA2; (-) strand; PAM type: NNGRRT; PAM sequence: AGGAAT
aaatccatgtggcagatctc

SEQ ID NO: 24460 - DNA, 20 bp, Artificial Sequence
  Description of Artificial Sequence: Synthetic oligonucleotide
  Target: LAMA2; (-) strand; PAM type: NNGRRT; PAM sequence: CTGAAT
agcaaagatctaacctgtgg

SEQ ID NO: 24461 - DNA, 20 bp, Artificial Sequence
  Description of Artificial Sequence: Synthetic oligonucleotide
  Target: LAMA2; (-) strand; PAM type: NNGRRT; PAM sequence: GAGGAT
aggtatatgagggtgaagag

SEQ ID NO: 24462 - DNA, 20 bp, Artificial Sequence
  Description of Artificial Sequence: Synthetic oligonucleotide
  Target: LAMA2; (-) strand; PAM type: NNGRRT; PAM sequence: GAGGGT
cacatgattttcaggtatat

SEQ ID NO: 24463 - DNA, 20 bp, Artificial Sequence
  Description of Artificial Sequence: Synthetic oligonucleotide
  Target: LAMA2; (-) strand; PAM type: NNGRRT; PAM sequence: ATGAGT
cttcaactgaaaacatgttt

SEQ ID NO: 24464 - DNA, 20 bp, Artificial Sequence
  Description of Artificial Sequence: Synthetic oligonucleotide
  Target: LAMA2; (-) strand; PAM type: NNGRRT; PAM sequence: TAGGAT
acatttttataagtggacat

SEQ ID NO: 24465 - DNA, 20 bp, Artificial Sequence
  Description of Artificial Sequence: Synthetic oligonucleotide
  Target: LAMA2; (-) strand; PAM type: NNGRRT; PAM sequence: AGGGAT
agctattttcaaattattga

SEQ ID NO: 24466 - DNA, 20 bp, Artificial Sequence
  Description of Artificial Sequence: Synthetic oligonucleotide
  Target: LAMA2; (-) strand; PAM type: NNGRRT; PAM sequence: AAGAAT
attagaaatgagataataca

SEQ ID NO: 24467 - DNA, 20 bp, Artificial Sequence
  Description of Artificial Sequence: Synthetic oligonucleotide
  Target: LAMA2; (-) strand; PAM type: NNGRRT; PAM sequence: GGGGAT
ttaagaatactgatcatgga

SEQ ID NO: 24468 - DNA, 20 bp, Artificial Sequence
  Description of Artificial Sequence: Synthetic oligonucleotide
  Target: LAMA2; (-) strand; PAM type: NNGRRT; PAM sequence: AAGAAT
gaagggaatatttcaaattt

SEQ ID NO: 24469 - DNA, 20 bp, Artificial Sequence
  Description of Artificial Sequence: Synthetic oligonucleotide
  Target: LAMA2; (-) strand; PAM type: NNGRRT; PAM sequence: GGGAAT
agtaggtgccatattatgaa

SEQ ID NO: 24470 - DNA, 20 bp, Artificial Sequence
  Description of Artificial Sequence: Synthetic oligonucleotide
  Target: LAMA2; (-) strand; PAM type: NNGRRT; PAM sequence: AGGGGT
tggtaacaattaagggaggg

SEQ ID NO: 24471 - DNA, 20 bp, Artificial Sequence
  Description of Artificial Sequence: Synthetic oligonucleotide
  Target: LAMA2; (-) strand; PAM type: NNGRRT; PAM sequence: TGGAAT
attgaatatggtacccgatt

SEQ ID NO: 24472 - DNA, 20 bp, Artificial Sequence
  Description of Artificial Sequence: Synthetic oligonucleotide
  Target: LAMA2; (-) strand; PAM type: NNGRRT; PAM sequence: TTGAAT
gtccatgaggttctgcttga

SEQ ID NO: 24473 - DNA, 20 bp, Artificial Sequence
  Description of Artificial Sequence: Synthetic oligonucleotide
  Target: LAMA2; (-) strand; PAM type: NNGRRT; PAM sequence: GAGGAT
caggctgagagacctgcctg

SEQ ID NO: 24474 - DNA, 20 bp, Artificial Sequence
  Description of Artificial Sequence: Synthetic oligonucleotide
  Target: LAMA2; (-) strand; PAM type: NNGRRT; PAM sequence: CAGGGT
aggtgatccatggaggctgg

SEQ ID NO: 24475 - DNA, 20 bp, Artificial Sequence
  Description of Artificial Sequence: Synthetic oligonucleotide
  Target: LAMA2; (-) strand; PAM type: NNGRRT; PAM sequence: ATGAGT
aaaaaaaaaaagaaccttaa

SEQ ID NO: 24476 - DNA, 20 bp, Artificial Sequence
  Description of Artificial Sequence: Synthetic oligonucleotide
  Target: LAMA2; (-) strand; PAM type: NNGRRT; PAM sequence: TGGAAT
cttctgtctcatctactaag

SEQ ID NO: 24477 - DNA, 20 bp, Artificial Sequence
  Description of Artificial Sequence: Synthetic oligonucleotide
  Target: LAMA2; (-) strand; PAM type: NNGRRT; PAM sequence: TAGGGT
aagttaagagttggaatctt

SEQ ID NO: 24478 - DNA, 20 bp, Artificial Sequence
  Description of Artificial Sequence: Synthetic oligonucleotide
  Target: LAMA2; (-) strand; PAM type: NNGRRT; PAM sequence: TGGAAT
ctcatgtgcaagttaagagt

SEQ ID NO: 24479 - DNA, 20 bp, Artificial Sequence
  Description of Artificial Sequence: Synthetic oligonucleotide
  Target: LAMA2; (-) strand; PAM type: NNGRRT; PAM sequence: AAGAGT
tctttcctcatgtgcaagtt

SEQ ID NO: 24480 - DNA, 20 bp, Artificial Sequence
  Description of Artificial Sequence: Synthetic oligonucleotide
  Target: LAMA2; (-) strand; PAM type: NNGRRT; PAM sequence: CTGGGT
agcagttggaatttagatat

SEQ ID NO: 24481 - DNA, 20 bp, Artificial Sequence
  Description of Artificial Sequence: Synthetic oligonucleotide
  Target: LAMA2; (-) strand; PAM type: NNGRRT; PAM sequence: TGGAAT
aaagaaggtgaaatagcagt

SEQ ID NO: 24482 - DNA, 20 bp, Artificial Sequence
  Description of Artificial Sequence: Synthetic oligonucleotide
  Target: LAMA2; (-) strand; PAM type: NNGRRT; PAM sequence: AAGAGT
tacactccagcctgggtagc

SEQ ID NO: 24483 - DNA, 20 bp, Artificial Sequence
  Description of Artificial Sequence: Synthetic oligonucleotide
  Target: LAMA2; (-) strand; PAM type: NNGRRT; PAM sequence: CTGGGT
ttgtgacattacactccagc

SEQ ID NO: 24484 - DNA, 20 bp, Artificial Sequence
  Description of Artificial Sequence: Synthetic oligonucleotide
  Target: LAMA2; (-) strand; PAM type: NNGRRT; PAM sequence: GAGAAT
tactcgggaggctgaagcag

SEQ ID NO: 24485 - DNA, 20 bp, Artificial Sequence
  Description of Artificial Sequence: Synthetic oligonucleotide
  Target: LAMA2; (-) strand; PAM type: NNGRRT; PAM sequence: AAGAGT
ctaaaaatacaaaattagcc

SEQ ID NO: 24486 - DNA, 20 bp, Artificial Sequence
  Description of Artificial Sequence: Synthetic oligonucleotide
  Target: LAMA2; (-) strand; PAM type: NNGRRT; PAM sequence: TGGAAT
aagtaacctgccagaattca

SEQ ID NO: 24487 - DNA, 20 bp, Artificial Sequence
  Description of Artificial Sequence: Synthetic oligonucleotide
  Target: LAMA2; (-) strand; PAM type: NNGRRT; PAM sequence: CAGAAT
agaagggacaagtaacctgc

SEQ ID NO: 24488 - DNA, 20 bp, Artificial Sequence
  Description of Artificial Sequence: Synthetic oligonucleotide
  Target: LAMA2; (-) strand; PAM type: NNGRRT; PAM sequence: TGGAAT
caaaagaataaatagagaga

SEQ ID NO: 24489 - DNA, 20 bp, Artificial Sequence
  Description of Artificial Sequence: Synthetic oligonucleotide
  Target: LAMA2; (-) strand; PAM type: NNGRRT; PAM sequence: AAGAAT
agttaaagttaaactaacaa

SEQ ID NO: 24490 - DNA, 20 bp, Artificial Sequence
  Description of Artificial Sequence: Synthetic oligonucleotide
  Target: LAMA2; (-) strand; PAM type: NNGRRT; PAM sequence: TAGAAT
atgtgaaaagttaaactaac

SEQ ID NO: 24491 - DNA, 20 bp, Artificial Sequence
  Description of Artificial Sequence: Synthetic oligonucleotide
  Target: LAMA2; (-) strand; PAM type: NNGRRT; PAM sequence: TTGAAT
ggtttggaattgcttaaaaa

SEQ ID NO: 24492 - DNA, 20 bp, Artificial Sequence
  Description of Artificial Sequence: Synthetic oligonucleotide
  Target: LAMA2; (-) strand; PAM type: NNGRRT; PAM sequence: TGGAAT
atcaaaccaataaaagggtt

SEQ ID NO: 24493 - DNA, 20 bp, Artificial Sequence
  Description of Artificial Sequence: Synthetic oligonucleotide
  Target: LAMA2; (-) strand; PAM type: NNGRRT; PAM sequence: AAGGGT
attacatatcaaaccaataa

SEQ ID NO: 24494 - DNA, 20 bp, Artificial Sequence
  Description of Artificial Sequence: Synthetic oligonucleotide
  Target: LAMA2; (-) strand; PAM type: NNGRRT; PAM sequence: AAGAAT
agagcaagaaaaaaaaaata

SEQ ID NO: 24495 - DNA, 20 bp, Artificial Sequence
  Description of Artificial Sequence: Synthetic oligonucleotide
  Target: LAMA2; (-) strand; PAM type: NNGRRT; PAM sequence: CTGGGT
ttgcgccactgcacaccagc

SEQ ID NO: 24496 - DNA, 20 bp, Artificial Sequence
  Description of Artificial Sequence: Synthetic oligonucleotide
  Target: LAMA2; (-) strand; PAM type: NNGRRT; PAM sequence: GAGGAT
tactcaggaggctgaggcat

SEQ ID NO: 24497 - DNA, 20 bp, Artificial Sequence
  Description of Artificial Sequence: Synthetic oligonucleotide
  Target: LAMA2; (-) strand; PAM type: NNGRRT; PAM sequence: TGGAAT
caaaaattagccgggcatgg

SEQ ID NO: 24498 - DNA, 20 bp, Artificial Sequence
  Description of Artificial Sequence: Synthetic oligonucleotide
  Target: LAMA2; (-) strand; PAM type: NNGRRT; PAM sequence: AAGAGT
aggcaggtggatcacttccc

SEQ ID NO: 24499 - DNA, 20 bp, Artificial Sequence
  Description of Artificial Sequence: Synthetic oligonucleotide
  Target: LAMA2; (-) strand; PAM type: NNGRRT; PAM sequence: GTGGAT
actttggcaggctgaggcag

SEQ ID NO: 24500 - DNA, 20 bp, Artificial Sequence
  Description of Artificial Sequence: Synthetic oligonucleotide
  Target: LAMA2; (-) strand; PAM type: NNGRRT; PAM sequence: AGGAGT
aaataggcagttctcacttc

SEQ ID NO: 24501 - DNA, 20 bp, Artificial Sequence
  Description of Artificial Sequence: Synthetic oligonucleotide
  Target: LAMA2; (-) strand; PAM type: NNGRRT; PAM sequence: GAGAAT
agaagaaaaagaagggcact

SEQ ID NO: 24502 - DNA, 20 bp, Artificial Sequence
  Description of Artificial Sequence: Synthetic oligonucleotide
  Target: LAMA2; (-) strand; PAM type: NNGRRT; PAM sequence: ATGGGT
tgctggcaggattgggtgtg

SEQ ID NO: 24503 - DNA, 20 bp, Artificial Sequence
  Description of Artificial Sequence: Synthetic oligonucleotide
  Target: LAMA2; (-) strand; PAM type: NNGRRT; PAM sequence: TTGGGT
gctgtaagttgctggcagga

SEQ ID NO: 24504 - DNA, 20 bp, Artificial Sequence
  Description of Artificial Sequence: Synthetic oligonucleotide
  Target: LAMA2; (-) strand; PAM type: NNGRRT; PAM sequence: CAGGAT
ctcatgctgtaagttgctgg

SEQ ID NO: 24505 - DNA, 20 bp, Artificial Sequence
  Description of Artificial Sequence: Synthetic oligonucleotide
  Target: LAMA2; (-) strand; PAM type: NNGRRT; PAM sequence: GTGAAT
ttacattgccctgtagtata

SEQ ID NO: 24506 - DNA, 20 bp, Artificial Sequence
  Description of Artificial Sequence: Synthetic oligonucleotide
  Target: LAMA2; (-) strand; PAM type: NNGRRT; PAM sequence: ATGAAT
tttaatctagcgtgttcaac

SEQ ID NO: 24507 - DNA, 20 bp, Artificial Sequence
  Description of Artificial Sequence: Synthetic oligonucleotide
  Target: LAMA2; (-) strand; PAM type: NNGRRT; PAM sequence: AAGAAT
ctctagctctcgatgggcta

SEQ ID NO: 24508 - DNA, 20 bp, Artificial Sequence
  Description of Artificial Sequence: Synthetic oligonucleotide
  Target: LAMA2; (-) strand; PAM type: NNGRRT; PAM sequence: AAGAAT
cttcaataaaattcaagtaa

SEQ ID NO: 24509 - DNA, 20 bp, Artificial Sequence
  Description of Artificial Sequence: Synthetic oligonucleotide
  Target: LAMA2; (-) strand; PAM type: NNGRRT; PAM sequence: AGGAAT
caaagagagctcatcagtac

SEQ ID NO: 24510 - DNA, 20 bp, Artificial Sequence
  Description of Artificial Sequence: Synthetic oligonucleotide
  Target: LAMA2; (-) strand; PAM type: NNGRRT; PAM sequence: AAGGAT
ttatacattaatgtctaaac

SEQ ID NO: 24511 - DNA, 20 bp, Artificial Sequence
  Description of Artificial Sequence: Synthetic oligonucleotide
  Target: LAMA2; (-) strand; PAM type: NNGRRT; PAM sequence: GTGGGT
actgcacttaagctcttttg

SEQ ID NO: 24512 - DNA, 20 bp, Artificial Sequence
  Description of Artificial Sequence: Synthetic oligonucleotide
  Target: LAMA2; (-) strand; PAM type: NNGRRT; PAM sequence: CTGAAT
tcaagatgtttattgagaaa

SEQ ID NO: 24513 - DNA, 20 bp, Artificial Sequence
  Description of Artificial Sequence: Synthetic oligonucleotide
  Target: LAMA2; (-) strand; PAM type: NNGRRT; PAM sequence: ATGAAT
tgtcatgattttctttatgg

SEQ ID NO: 24514 - DNA, 20 bp, Artificial Sequence
  Description of Artificial Sequence: Synthetic oligonucleotide
  Target: LAMA2; (-) strand; PAM type: NNGRRT; PAM sequence: ATGGAT
tatttgtcatgattttcttt

SEQ ID NO: 24515 - DNA, 20 bp, Artificial Sequence
  Description of Artificial Sequence: Synthetic oligonucleotide
  Target: LAMA2; (-) strand; PAM type: NNGRRT; PAM sequence: ATGAGT
ttgcataattttcttctttc

SEQ ID NO: 24516 - DNA, 20 bp, Artificial Sequence
  Description of Artificial Sequence: Synthetic oligonucleotide
  Target: LAMA2; (-) strand; PAM type: NNGRRT; PAM sequence: ATGAAT
gttcttgaaagcaccaaaca

SEQ ID NO: 24517 - DNA, 20 bp, Artificial Sequence
  Description of Artificial Sequence: Synthetic oligonucleotide
  Target: LAMA2; (-) strand; PAM type: NNGRRT; PAM sequence: CTGGGT
ataagcatctcttgaatttc

SEQ ID NO: 24518 - DNA, 20 bp, Artificial Sequence
  Description of Artificial Sequence: Synthetic oligonucleotide
  Target: LAMA2; (-) strand; PAM type: NNGRRT; PAM sequence: TTGAAT
gattcgttgataagcatctc

SEQ ID NO: 24519 - DNA, 20 bp, Artificial Sequence
  Description of Artificial Sequence: Synthetic oligonucleotide
  Target: LAMA2; (-) strand; PAM type: NNGRRT; PAM sequence: AGGAGT
ggaaatgagttcttagattc

SEQ ID NO: 24520 - DNA, 20 bp, Artificial Sequence
  Description of Artificial Sequence: Synthetic oligonucleotide
  Target: LAMA2; (-) strand; PAM type: NNGRRT; PAM sequence: ATGAGT
ttggtggctgacatttggaa

SEQ ID NO: 24521 - DNA, 20 bp, Artificial Sequence
  Description of Artificial Sequence: Synthetic oligonucleotide
  Target: LAMA2; (-) strand; PAM type: NNGRRT; PAM sequence: CAGAAT
tcactcatttaacttcaggt

SEQ ID NO: 24522 - DNA, 20 bp, Artificial Sequence
  Description of Artificial Sequence: Synthetic oligonucleotide
  Target: LAMA2; (-) strand; PAM type: NNGRRT; PAM sequence: GGGAAT
attagagcagtgatgtggtt

SEQ ID NO: 24523 - DNA, 20 bp, Artificial Sequence
  Description of Artificial Sequence: Synthetic oligonucleotide
  Target: LAMA2; (-) strand; PAM type: NNGRRT; PAM sequence: GGGAGT
aggcagacaggacttgggtg

SEQ ID NO: 24524 - DNA, 20 bp, Artificial Sequence
  Description of Artificial Sequence: Synthetic oligonucleotide
  Target: LAMA2; (-) strand; PAM type: NNGRRT; PAM sequence: TTGGGT
aagttgtaggcagacaggac

SEQ ID NO: 24525 - DNA, 20 bp, Artificial Sequence
  Description of Artificial Sequence: Synthetic oligonucleotide
  Target: LAMA2; (-) strand; PAM type: NNGRRT; PAM sequence: TGGGAT
gaaatagataatggggaaaa

SEQ ID NO: 24526 - DNA, 20 bp, Artificial Sequence
  Description of Artificial Sequence: Synthetic oligonucleotide
  Target: LAMA2; (-) strand; PAM type: NNGRRT; PAM sequence: ATGGAT
ttgaaggcgtcctcatctct

SEQ ID NO: 24527 - DNA, 20 bp, Artificial Sequence
  Description of Artificial Sequence: Synthetic oligonucleotide
  Target: LAMA2; (-) strand; PAM type: NNGRRT; PAM sequence: ATGAAT
taaagaatggtcattgcaag

SEQ ID NO: 24528 - DNA, 20 bp, Artificial Sequence
  Description of Artificial Sequence: Synthetic oligonucleotide
  Target: LAMA2; (-) strand; PAM type: NNGRRT; PAM sequence: AAGAAT
gtaattttaaggaactttta

SEQ ID NO: 24529 - DNA, 20 bp, Artificial Sequence
  Description of Artificial Sequence: Synthetic oligonucleotide
  Target: LAMA2; (-) strand; PAM type: NNGRRT; PAM sequence: AAGGGT
tgaaatctaagctaagaaaa

SEQ ID NO: 24530 - DNA, 20 bp, Artificial Sequence
  Description of Artificial Sequence: Synthetic oligonucleotide
  Target: LAMA2; (-) strand; PAM type: NNGRRT; PAM sequence: AAGGAT
aataaaatgatcttgtcact

SEQ ID NO: 24531 - DNA, 20 bp, Artificial Sequence
  Description of Artificial Sequence: Synthetic oligonucleotide
  Target: LAMA2; (-) strand; PAM type: NNGRRT; PAM sequence: TGGAAT
taaagggggaacaagtgaga

SEQ ID NO: 24532 - DNA, 20 bp, Artificial Sequence
  Description of Artificial Sequence: Synthetic oligonucleotide
  Target: LAMA2; (-) strand; PAM type: NNGRRT; PAM sequence: GTGGGT
cttctgcctcatgtcccaca

SEQ ID NO: 24533 - DNA, 20 bp, Artificial Sequence
  Description of Artificial Sequence: Synthetic oligonucleotide
  Target: LAMA2; (-) strand; PAM type: NNGRRT; PAM sequence: TAGAGT
tgagcctaggagttcaaggt

SEQ ID NO: 24534 - DNA, 20 bp, Artificial Sequence
  Description of Artificial Sequence: Synthetic oligonucleotide
  Target: LAMA2; (-) strand; PAM type: NNGRRT; PAM sequence: AGGAGT
caggagaatcacttgagcct

SEQ ID NO: 24535 - DNA, 20 bp, Artificial Sequence
  Description of Artificial Sequence: Synthetic oligonucleotide
  Target: LAMA2; (-) strand; PAM type: NNGRRT; PAM sequence: GAGAAT
tactcgggaggccaaggcag

SEQ ID NO: 24536 - DNA, 20 bp, Artificial Sequence
  Description of Artificial Sequence: Synthetic oligonucleotide
  Target: LAMA2; (-) strand; PAM type: NNGRRT; PAM sequence: AGGGAT
aaccaagtctgatgggtgta

SEQ ID NO: 24537 - DNA, 20 bp, Artificial Sequence
  Description of Artificial Sequence: Synthetic oligonucleotide
  Target: LAMA2; (-) strand; PAM type: NNGRRT; PAM sequence: ATGGGT
gtaaactgaaaccaagtctg

SEQ ID NO: 24538 - DNA, 20 bp, Artificial Sequence
  Description of Artificial Sequence: Synthetic oligonucleotide
  Target: LAMA2; (-) strand; PAM type: NNGRRT; PAM sequence: TTGGGT
cttccttgcatcacttttcc

SEQ ID NO: 24539 - DNA, 20 bp, Artificial Sequence
  Description of Artificial Sequence: Synthetic oligonucleotide
  Target: LAMA2; (-) strand; PAM type: NNGRRT; PAM sequence: AAGGGT
acctcccccttgcttggtta

SEQ ID NO: 24540 - DNA, 20 bp, Artificial Sequence
  Description of Artificial Sequence: Synthetic oligonucleotide
  Target: LAMA2; (-) strand; PAM type: NNGRRT; PAM sequence: TAGGAT
gtttttaaaaatatgtacct

SEQ ID NO: 24541 - DNA, 20 bp, Artificial Sequence
  Description of Artificial Sequence: Synthetic oligonucleotide
  Target: LAMA2; (-) strand; PAM type: NNGRRT; PAM sequence: GAGGGT
actgagaagtgctggtgtaa

SEQ ID NO: 24542 - DNA, 20 bp, Artificial Sequence
  Description of Artificial Sequence: Synthetic oligonucleotide
  Target: LAMA2; (-) strand; PAM type: NNGRRT; PAM sequence: ATGGAT
aatcattgatttgcaacagg

SEQ ID NO: 24543 - DNA, 20 bp, Artificial Sequence
  Description of Artificial Sequence: Synthetic oligonucleotide
  Target: LAMA2; (-) strand; PAM type: NNGRRT; PAM sequence: CAGGAT
tatcaatcattgatttgcaa

SEQ ID NO: 24544 - DNA, 20 bp, Artificial Sequence
  Description of Artificial Sequence: Synthetic oligonucleotide
  Target: LAMA2; (-) strand; PAM type: NNGRRT; PAM sequence: AAGAGT
gatgagccaatgttatggaa

SEQ ID NO: 24545 - DNA, 20 bp, Artificial Sequence
  Description of Artificial Sequence: Synthetic oligonucleotide
  Target: LAMA2; (-) strand; PAM type: NNGRRT; PAM sequence: CTGGAT
tttaggaagaagaacacctc

SEQ ID NO: 24546 - DNA, 20 bp, Artificial Sequence
  Description of Artificial Sequence: Synthetic oligonucleotide
  Target: LAMA2; (-) strand; PAM type: NNGRRT; PAM sequence: AAGAAT
gactttgtcaaagttctttt

SEQ ID NO: 24547 - DNA, 20 bp, Artificial Sequence
  Description of Artificial Sequence: Synthetic oligonucleotide
  Target: LAMA2; (-) strand; PAM type: NNGRRT; PAM sequence: TTGGAT
ctgtatgttatggggaactt

SEQ ID NO: 24548 - DNA, 20 bp, Artificial Sequence
  Description of Artificial Sequence: Synthetic oligonucleotide
  Target: LAMA2; (-) strand; PAM type: NNGRRT; PAM sequence: GTGGGT
agcttaaaagagaaccacca

SEQ ID NO: 24549 - DNA, 20 bp, Artificial Sequence
  Description of Artificial Sequence: Synthetic oligonucleotide
  Target: LAMA2; (-) strand; PAM type: NNGRRT; PAM sequence: AGGAAT
agaaaggtggatggatgctg

SEQ ID NO: 24550 - DNA, 20 bp, Artificial Sequence
  Description of Artificial Sequence: Synthetic oligonucleotide
  Target: LAMA2; (-) strand; PAM type: NNGRRT; PAM sequence: ATGGAT
tgagggattaagaaaggtgg

SEQ ID NO: 24551 - DNA, 20 bp, Artificial Sequence
  Description of Artificial Sequence: Synthetic oligonucleotide
  Target: LAMA2; (-) strand; PAM type: NNGRRT; PAM sequence: GTGGAT
aaattgagggattaagaaag

SEQ ID NO: 24552 - DNA, 20 bp, Artificial Sequence
  Description of Artificial Sequence: Synthetic oligonucleotide
  Target: LAMA2; (-) strand; PAM type: NNGRRT; PAM sequence: AGGGAT
accctcagctctgaaaattg

SEQ ID NO: 24553 - DNA, 20 bp, Artificial Sequence
  Description of Artificial Sequence: Synthetic oligonucleotide
  Target: LAMA2; (-) strand; PAM type: NNGRRT; PAM sequence: CAGAAT
tgctgtgagtccactggggg

SEQ ID NO: 24554 - DNA, 20 bp, Artificial Sequence
  Description of Artificial Sequence: Synthetic oligonucleotide
  Target: LAMA2; (-) strand; PAM type: NNGRRT; PAM sequence: GTGAGT
ctaagataatcctatctgct

SEQ ID NO: 24555 - DNA, 20 bp, Artificial Sequence
  Description of Artificial Sequence: Synthetic oligonucleotide
  Target: LAMA2; (-) strand; PAM type: NNGRRT; PAM sequence: TGGGAT
aatacttctattaatagaat

SEQ ID NO: 24556 - DNA, 20 bp, Artificial Sequence
  Description of Artificial Sequence: Synthetic oligonucleotide
  Target: LAMA2; (-) strand; PAM type: NNGRRT; PAM sequence: TAGAAT
gtcatgaatacttctattaa

SEQ ID NO: 24557 - DNA, 20 bp, Artificial Sequence
  Description of Artificial Sequence: Synthetic oligonucleotide
  Target: LAMA2; (-) strand; PAM type: NNGRRT; PAM sequence: ATGAAT
tgtagcttaagatctcagtc

SEQ ID NO: 24558 - DNA, 20 bp, Artificial Sequence
  Description of Artificial Sequence: Synthetic oligonucleotide
  Target: LAMA2; (-) strand; PAM type: NNGRRT; PAM sequence: CCGAAT
acgctgcctgcaaaaagagc

SEQ ID NO: 24559 - DNA, 20 bp, Artificial Sequence
  Description of Artificial Sequence: Synthetic oligonucleotide
  Target: LAMA2; (-) strand; PAM type: NNGRRT; PAM sequence: CTGAAT
aatgctattcattcgcacag

SEQ ID NO: 24560 - DNA, 20 bp, Artificial Sequence
  Description of Artificial Sequence: Synthetic oligonucleotide
  Target: LAMA2; (-) strand; PAM type: NNGRRT; PAM sequence: GTGGGT
acacagctatgcaaaacccc

SEQ ID NO: 24561 - DNA, 20 bp, Artificial Sequence
  Description of Artificial Sequence: Synthetic oligonucleotide
  Target: LAMA2; (-) strand; PAM type: NNGRRT; PAM sequence: AAGAGT
gatgcacagtgttcttccca

SEQ ID NO: 24562 - DNA, 20 bp, Artificial Sequence
  Description of Artificial Sequence: Synthetic oligonucleotide
  Target: LAMA2; (-) strand; PAM type: NNGRRT; PAM sequence: GTGAGT
ctggctgggccgctgcccca

SEQ ID NO: 24563 - DNA, 20 bp, Artificial Sequence
  Description of Artificial Sequence: Synthetic oligonucleotide
  Target: LAMA2; (-) strand; PAM type: NNGRRT; PAM sequence: CTGAGT
aaagcatacagcagtcctgg

SEQ ID NO: 24564 - DNA, 20 bp, Artificial Sequence
  Description of Artificial Sequence: Synthetic oligonucleotide
  Target: LAMA2; (-) strand; PAM type: NNGRRT; PAM sequence: TAGGGT
ctgttcaaagatcagcttcc

SEQ ID NO: 24565 - DNA, 20 bp, Artificial Sequence
  Description of Artificial Sequence: Synthetic oligonucleotide
  Target: LAMA2; (-) strand; PAM type: NNGRRT; PAM sequence: ATGAAT
cagtccactagaaggtttcc

SEQ ID NO: 24566 - DNA, 20 bp, Artificial Sequence
  Description of Artificial Sequence: Synthetic oligonucleotide
  Target: LAMA2; (-) strand; PAM type: NNGRRT; PAM sequence: AAGAGT
aagctagccacttgggttat

SEQ ID NO: 24567 - DNA, 20 bp, Artificial Sequence
  Description of Artificial Sequence: Synthetic oligonucleotide
  Target: LAMA2; (-) strand; PAM type: NNGRRT; PAM sequence: TTGGGT
gaaaatgacaagctagccac

SEQ ID NO: 24568 - DNA, 20 bp, Artificial Sequence
  Description of Artificial Sequence: Synthetic oligonucleotide
  Target: LAMA2; (-) strand; PAM type: NNGRRT; PAM sequence: TGGAAT
atgtatatttctgagaaaac

SEQ ID NO: 24569 - DNA, 20 bp, Artificial Sequence
  Description of Artificial Sequence: Synthetic oligonucleotide
  Target: LAMA2; (-) strand; PAM type: NNGRRT; PAM sequence: AGGAAT
tcacaccctggaatggctaa

SEQ ID NO: 24570 - DNA, 20 bp, Artificial Sequence
  Description of Artificial Sequence: Synthetic oligonucleotide
  Target: LAMA2; (-) strand; PAM type: NNGRRT; PAM sequence: TGGAAT
agttttctcatatcacaccc

SEQ ID NO: 24571 - DNA, 20 bp, Artificial Sequence
  Description of Artificial Sequence: Synthetic oligonucleotide
  Target: LAMA2; (-) strand; PAM type: NNGRRT; PAM sequence: GTGAAT
ttattgagtgctcagtgcgt

SEQ ID NO: 24572 - DNA, 20 bp, Artificial Sequence
  Description of Artificial Sequence: Synthetic oligonucleotide
  Target: LAMA2; (-) strand; PAM type: NNGRRT; PAM sequence: TTGAGT
tgcatagtaagtacttatta

SEQ ID NO: 24573 - DNA, 20 bp, Artificial Sequence
  Description of Artificial Sequence: Synthetic oligonucleotide
  Target: LAMA2; (-) strand; PAM type: NNGRRT; PAM sequence: AAGAAT
acatattagcgtaattcttt

SEQ ID NO: 24574 - DNA, 20 bp, Artificial Sequence
  Description of Artificial Sequence: Synthetic oligonucleotide
  Target: LAMA2; (-) strand; PAM type: NNGRRT; PAM sequence: CAGGAT
tcggttctttcccagtgtct

SEQ ID NO: 24575 - DNA, 20 bp, Artificial Sequence
  Description of Artificial Sequence: Synthetic oligonucleotide
  Target: LAMA2; (-) strand; PAM type: NNGRRT; PAM sequence: GTGAAT
tctattctctattgtactca

SEQ ID NO: 24576 - DNA, 20 bp, Artificial Sequence
  Description of Artificial Sequence: Synthetic oligonucleotide
  Target: LAMA2; (-) strand; PAM type: NNGRRT; PAM sequence: GAGAGT
gtggctgcattttcataaag

SEQ ID NO: 24577 - DNA, 20 bp, Artificial Sequence
  Description of Artificial Sequence: Synthetic oligonucleotide
  Target: LAMA2; (-) strand; PAM type: NNGRRT; PAM sequence: CCGGAT
gagccatgtaaaaaagcaag

SEQ ID NO: 24578 - DNA, 20 bp, Artificial Sequence
  Description of Artificial Sequence: Synthetic oligonucleotide
  Target: LAMA2; (-) strand; PAM type: NNGRRT; PAM sequence: GTGGGT
attttggtggggatcatggt

SEQ ID NO: 24579 - DNA, 20 bp, Artificial Sequence
  Description of Artificial Sequence: Synthetic oligonucleotide
  Target: LAMA2; (-) strand; PAM type: NNGRRT; PAM sequence: GGGGAT
tggccatcattgattttggt

SEQ ID NO: 24580 - DNA, 20 bp, Artificial Sequence
  Description of Artificial Sequence: Synthetic oligonucleotide
  Target: LAMA2; (-) strand; PAM type: NNGRRT; PAM sequence: TAGGGT
ctgccactcagtaattccct

SEQ ID NO: 24581 - DNA, 20 bp, Artificial Sequence
  Description of Artificial Sequence: Synthetic oligonucleotide
  Target: LAMA2; (-) strand; PAM type: NNGRRT; PAM sequence: GAGAAT
gcaaaatatactggcaccag

SEQ ID NO: 24582 - DNA, 20 bp, Artificial Sequence
  Description of Artificial Sequence: Synthetic oligonucleotide
  Target: LAMA2; (-) strand; PAM type: NNGRRT; PAM sequence: CAGAGT
attttatttttagcttctgc

SEQ ID NO: 24583 - DNA, 20 bp, Artificial Sequence
  Description of Artificial Sequence: Synthetic oligonucleotide
  Target: LAMA2; (-) strand; PAM type: NNGRRT; PAM sequence: ATGGGT
cagccacctggcctcagttt

SEQ ID NO: 24584 - DNA, 20 bp, Artificial Sequence
  Description of Artificial Sequence: Synthetic oligonucleotide
  Target: LAMA2; (-) strand; PAM type: NNGRRT; PAM sequence: TTGAAT
ataaatattattccttaaaa

SEQ ID NO: 24585 - DNA, 20 bp, Artificial Sequence
  Description of Artificial Sequence: Synthetic oligonucleotide
  Target: LAMA2; (-) strand; PAM type: NNGRRT; PAM sequence: CAGAAT
aaaatgctataatataatct

SEQ ID NO: 24586 - DNA, 20 bp, Artificial Sequence
  Description of Artificial Sequence: Synthetic oligonucleotide
  Target: LAMA2; (-) strand; PAM type: NNGRRT; PAM sequence: GGGAGT
gaccactgtgtggttaggtg

SEQ ID NO: 24587 - DNA, 20 bp, Artificial Sequence
  Description of Artificial Sequence: Synthetic oligonucleotide
  Target: LAMA2; (-) strand; PAM type: NNGRRT; PAM sequence: CTGGAT
acacgatcaaccagagattc

SEQ ID NO: 24588 - DNA, 20 bp, Artificial Sequence
  Description of Artificial Sequence: Synthetic oligonucleotide
  Target: LAMA2; (-) strand; PAM type: NNGRRT; PAM sequence: CTGGGT
gcccataatagtaccagttt

SEQ ID NO: 24589 - DNA, 20 bp, Artificial Sequence
  Description of Artificial Sequence: Synthetic oligonucleotide
  Target: LAMA2; (-) strand; PAM type: NNGRRT; PAM sequence: TAGAAT
tttaaggttctttggctttc

SEQ ID NO: 24590 - DNA, 20 bp, Artificial Sequence
  Description of Artificial Sequence: Synthetic oligonucleotide
  Target: LAMA2; (-) strand; PAM type: NNGRRT; PAM sequence: TTGGAT
cttaatgagagctccttcat

SEQ ID NO: 24591 - DNA, 20 bp, Artificial Sequence
  Description of Artificial Sequence: Synthetic oligonucleotide
  Target: LAMA2; (-) strand; PAM type: NNGRRT; PAM sequence: TAGAGT
aaatgagtctgggtcaggat

SEQ ID NO: 24592 - DNA, 20 bp, Artificial Sequence
  Description of Artificial Sequence: Synthetic oligonucleotide
  Target: LAMA2; (-) strand; PAM type: NNGRRT; PAM sequence: CAGGAT
gtttaaaaatgagtctgggt

SEQ ID NO: 24593 - DNA, 20 bp, Artificial Sequence
  Description of Artificial Sequence: Synthetic oligonucleotide
  Target: LAMA2; (-) strand; PAM type: NNGRRT; PAM sequence: CTGGGT
atgatggtttaaaaatgagt

SEQ ID NO: 24594 - DNA, 20 bp, Artificial Sequence
  Description of Artificial Sequence: Synthetic oligonucleotide
  Target: LAMA2; (-) strand; PAM type: NNGRRT; PAM sequence: ATGAGT
agtaccatgatggtttaaaa

SEQ ID NO: 24595 - DNA, 20 bp, Artificial Sequence
  Description of Artificial Sequence: Synthetic oligonucleotide
  Target: LAMA2; (-) strand; PAM type: NNGRRT; PAM sequence: CTGAAT
ggagtataaaaaccttgagt

SEQ ID NO: 24596 - DNA, 20 bp, Artificial Sequence
  Description of Artificial Sequence: Synthetic oligonucleotide
  Target: LAMA2; (-) strand; PAM type: NNGRRT; PAM sequence: TTGAGT
ctggctggagtataaaaacc

SEQ ID NO: 24597 - DNA, 20 bp, Artificial Sequence
  Description of Artificial Sequence: Synthetic oligonucleotide
  Target: LAMA2; (-) strand; PAM type: NNGRRT; PAM sequence: TGGAGT
taaggggtgtaaagactggc

SEQ ID NO: 24598 - DNA, 20 bp, Artificial Sequence
  Description of Artificial Sequence: Synthetic oligonucleotide
  Target: LAMA2; (-) strand; PAM type: NNGRRT; PAM sequence: AGGGGT
ttctgagacagaatgaaata

SEQ ID NO: 24599 - DNA, 20 bp, Artificial Sequence
  Description of Artificial Sequence: Synthetic oligonucleotide
  Target: LAMA2; (-) strand; PAM type: NNGRRT; PAM sequence: CAGAAT
gagtgaattatcttctgaga

SEQ ID NO: 24600 - DNA, 20 bp, Artificial Sequence
  Description of Artificial Sequence: Synthetic oligonucleotide
  Target: LAMA2; (-) strand; PAM type: NNGRRT; PAM sequence: GTGAAT
ctgaaatttagggcggtgga

SEQ ID NO: 24601 - DNA, 20 bp, Artificial Sequence
  Description of Artificial Sequence: Synthetic oligonucleotide
  Target: LAMA2; (-) strand; PAM type: NNGRRT; PAM sequence: TGGAGT
gaggctgaaatttagggcgg

SEQ ID NO: 24602 - DNA, 20 bp, Artificial Sequence
  Description of Artificial Sequence: Synthetic oligonucleotide
  Target: LAMA2; (-) strand; PAM type: NNGRRT; PAM sequence: GGGAGT
acctgatgagtacaaagtgg

SEQ ID NO: 24603 - DNA, 20 bp, Artificial Sequence
  Description of Artificial Sequence: Synthetic oligonucleotide
  Target: LAMA2; (-) strand; PAM type: NNGRRT; PAM sequence: ATGAGT
actactttctgcagaacctg

SEQ ID NO: 24604 - DNA, 20 bp, Artificial Sequence
  Description of Artificial Sequence: Synthetic oligonucleotide
  Target: LAMA2; (-) strand; PAM type: NNGRRT; PAM sequence: AAGAGT
ttcttgtgcagaattaaaga

SEQ ID NO: 24605 - DNA, 20 bp, Artificial Sequence
  Description of Artificial Sequence: Synthetic oligonucleotide
  Target: LAMA2; (-) strand; PAM type: NNGRRT; PAM sequence: CAGAAT
cctaacaggcccttcttgtg

SEQ ID NO: 24606 - DNA, 20 bp, Artificial Sequence
  Description of Artificial Sequence: Synthetic oligonucleotide
  Target: LAMA2; (-) strand; PAM type: NNGRRT; PAM sequence: GTGGGT
atagcactttcataaattaa

SEQ ID NO: 24607 - DNA, 20 bp, Artificial Sequence
  Description of Artificial Sequence: Synthetic oligonucleotide
  Target: LAMA2; (-) strand; PAM type: NNGRRT; PAM sequence: AGGAAT
gtggatatgtgtggagaggg

SEQ ID NO: 24608 - DNA, 20 bp, Artificial Sequence
  Description of Artificial Sequence: Synthetic oligonucleotide
  Target: LAMA2; (-) strand; PAM type: NNGRRT; PAM sequence: GTGGAT
tcctcggtagattgccaaat

SEQ ID NO: 24609 - DNA, 20 bp, Artificial Sequence
  Description of Artificial Sequence: Synthetic oligonucleotide
  Target: LAMA2; (-) strand; PAM type: NNGRRT; PAM sequence: CTGGGT
caaaagaataccaaattttc

SEQ ID NO: 24610 - DNA, 20 bp, Artificial Sequence
  Description of Artificial Sequence: Synthetic oligonucleotide
  Target: LAMA2; (-) strand; PAM type: NNGRRT; PAM sequence: AAGAAT
tccatgactactatcaccaa

SEQ ID NO: 24611 - DNA, 20 bp, Artificial Sequence
  Description of Artificial Sequence: Synthetic oligonucleotide
  Target: LAMA2; (-) strand; PAM type: NNGRRT; PAM sequence: CAGAAT
ggaaagttaaacccatttta

SEQ ID NO: 24612 - DNA, 20 bp, Artificial Sequence
  Description of Artificial Sequence: Synthetic oligonucleotide
  Target: LAMA2; (-) strand; PAM type: NNGRRT; PAM sequence: CAGAGT
ctgaacaaatttcacatatg

SEQ ID NO: 24613 - DNA, 20 bp, Artificial Sequence
  Description of Artificial Sequence: Synthetic oligonucleotide
  Target: LAMA2; (-) strand; PAM type: NNGRRT; PAM sequence: AGGAGT
tcttaatctacaaaaaagaa

SEQ ID NO: 24614 - DNA, 20 bp, Artificial Sequence
  Description of Artificial Sequence: Synthetic oligonucleotide
  Target: LAMA2; (-) strand; PAM type: NNGRRT; PAM sequence: AAGAAT
ttggaagccccatctacata

SEQ ID NO: 24615 - DNA, 20 bp, Artificial Sequence
  Description of Artificial Sequence: Synthetic oligonucleotide
  Target: LAMA2; (-) strand; PAM type: NNGRRT; PAM sequence: CAGGAT
tacagcattcccacgacatc

SEQ ID NO: 24616 - DNA, 20 bp, Artificial Sequence
  Description of Artificial Sequence: Synthetic oligonucleotide
  Target: LAMA2; (-) strand; PAM type: NNGRRT; PAM sequence: ATGGGT
ttcttcgggtagtgtagttg

SEQ ID NO: 24617 - DNA, 20 bp, Artificial Sequence
  Description of Artificial Sequence: Synthetic oligonucleotide
  Target: LAMA2; (-) strand; PAM type: NNGRRT; PAM sequence: TCGGGT
atatttactggaccaattct

SEQ ID NO: 24618 - DNA, 20 bp, Artificial Sequence
  Description of Artificial Sequence: Synthetic oligonucleotide
  Target: LAMA2; (-) strand; PAM type: NNGRRT; PAM sequence: ATGAAT
aagtcaaaatatatcaataa

SEQ ID NO: 24619 - DNA, 20 bp, Artificial Sequence
  Description of Artificial Sequence: Synthetic oligonucleotide
  Target: LAMA2; (-) strand; PAM type: NNGRRT; PAM sequence: GAGAAT
tactagggaggctgaggcag

SEQ ID NO: 24620 - DNA, 20 bp, Artificial Sequence
  Description of Artificial Sequence: Synthetic oligonucleotide
  Target: LAMA2; (-) strand; PAM type: NNGRRT; PAM sequence: GCGGAT
actttgggaggccgaggcag

SEQ ID NO: 24621 - DNA, 20 bp, Artificial Sequence
  Description of Artificial Sequence: Synthetic oligonucleotide
  Target: LAMA2; (-) strand; PAM type: NNGRRT; PAM sequence: TGGGAT
gccttggcctcccaaagtgc

SEQ ID NO: 24622 - DNA, 20 bp, Artificial Sequence
  Description of Artificial Sequence: Synthetic oligonucleotide
  Target: LAMA2; (-) strand; PAM type: NNGRRT; PAM sequence: CAGGGT
tttttgtatttttgtagaga

SEQ ID NO: 24623 - DNA, 20 bp, Artificial Sequence
  Description of Artificial Sequence: Synthetic oligonucleotide
  Target: LAMA2; (-) strand; PAM type: NNGRRT; PAM sequence: TCGGGT
ctcactgcaacctctgaccc

SEQ ID NO: 24624 - DNA, 20 bp, Artificial Sequence
  Description of Artificial Sequence: Synthetic oligonucleotide
  Target: LAMA2; (-) strand; PAM type: NNGRRT; PAM sequence: TGGAAT
tctcgctctgttgcccaggc

SEQ ID NO: 24625 - DNA, 20 bp, Artificial Sequence
  Description of Artificial Sequence: Synthetic oligonucleotide
  Target: LAMA2; (-) strand; PAM type: NNGRRT; PAM sequence: CAGGGT
atttatttatttttttgaga

SEQ ID NO: 24626 - DNA, 20 bp, Artificial Sequence
  Description of Artificial Sequence: Synthetic oligonucleotide
  Target: LAMA2; (-) strand; PAM type: NNGRRT; PAM sequence: ATGAAT
atctctatgcctgaaacacc

SEQ ID NO: 24627 - DNA, 20 bp, Artificial Sequence
  Description of Artificial Sequence: Synthetic oligonucleotide
  Target: LAMA2; (-) strand; PAM type: NNGRRT; PAM sequence: TTGGAT
tttaaattctgaatccaaaa

SEQ ID NO: 24628 - DNA, 20 bp, Artificial Sequence
  Description of Artificial Sequence: Synthetic oligonucleotide
  Target: LAMA2; (-) strand; PAM type: NNGRRT; PAM sequence: CTGAAT
aactgtgagggctttaaatt

SEQ ID NO: 24629 - DNA, 20 bp, Artificial Sequence
  Description of Artificial Sequence: Synthetic oligonucleotide
  Target: LAMA2; (-) strand; PAM type: NNGRRT; PAM sequence: GTGAAT
gtctaataaaaaattatttt

SEQ ID NO: 24630 - DNA, 20 bp, Artificial Sequence
  Description of Artificial Sequence: Synthetic oligonucleotide
  Target: LAMA2; (-) strand; PAM type: NNGRRT; PAM sequence: TAGGAT
taacactttccaaagcaaac

SEQ ID NO: 24631 - DNA, 20 bp, Artificial Sequence
  Description of Artificial Sequence: Synthetic oligonucleotide
  Target: LAMA2; (-) strand; PAM type: NNGRRT; PAM sequence: CAGAGT
tcaatcccccgtgcttctct

SEQ ID NO: 24632 - DNA, 20 bp, Artificial Sequence
  Description of Artificial Sequence: Synthetic oligonucleotide
  Target: LAMA2; (-) strand; PAM type: NNGRRT; PAM sequence: TTGAGT
acattatcatgtgttctaat

SEQ ID NO: 24633 - DNA, 20 bp, Artificial Sequence
  Description of Artificial Sequence: Synthetic oligonucleotide
  Target: LAMA2; (-) strand; PAM type: NNGRRT; PAM sequence: ATGAAT
ataatgggtgattgtctttg

SEQ ID NO: 24634 - DNA, 20 bp, Artificial Sequence
  Description of Artificial Sequence: Synthetic oligonucleotide
  Target: LAMA2; (-) strand; PAM type: NNGRRT; PAM sequence: ATGGGT
tactgagaattacaactata

SEQ ID NO: 24635 - DNA, 20 bp, Artificial Sequence
  Description of Artificial Sequence: Synthetic oligonucleotide
  Target: LAMA2; (-) strand; PAM type: NNGRRT; PAM sequence: GAGAAT
cacaagagaagccaaatact

SEQ ID NO: 24636 - DNA, 20 bp, Artificial Sequence
  Description of Artificial Sequence: Synthetic oligonucleotide
  Target: LAMA2; (-) strand; PAM type: NNGRRT; PAM sequence: GTGAAT
atctgtttttagaaattcaa

SEQ ID NO: 24637 - DNA, 20 bp, Artificial Sequence
  Description of Artificial Sequence: Synthetic oligonucleotide
  Target: LAMA2; (-) strand; PAM type: NNGRRT; PAM sequence: AGGAAT
catgaaacattgggggttca

SEQ ID NO: 24638 - DNA, 20 bp, Artificial Sequence
  Description of Artificial Sequence: Synthetic oligonucleotide
  Target: LAMA2; (-) strand; PAM type: NNGRRT; PAM sequence: GGGGGT
gaaagtttgcatgaaacatt

SEQ ID NO: 24639 - DNA, 20 bp, Artificial Sequence
  Description of Artificial Sequence: Synthetic oligonucleotide
  Target: LAMA2; (-) strand; PAM type: NNGRRT; PAM sequence: TTGAAT
tggttcagtgcttcttcctt

SEQ ID NO: 24640 - DNA, 20 bp, Artificial Sequence
  Description of Artificial Sequence: Synthetic oligonucleotide
  Target: LAMA2; (-) strand; PAM type: NNGRRT; PAM sequence: TGGAAT
caacttggatgtgtctatcc

SEQ ID NO: 24641 - DNA, 20 bp, Artificial Sequence
  Description of Artificial Sequence: Synthetic oligonucleotide
  Target: LAMA2; (-) strand; PAM type: NNGRRT; PAM sequence: TTGGAT
cctgtgttgtgcttctcaac

SEQ ID NO: 24642 - DNA, 20 bp, Artificial Sequence
  Description of Artificial Sequence: Synthetic oligonucleotide
  Target: LAMA2; (-) strand; PAM type: NNGRRT; PAM sequence: ATGGAT
ttaccaccaggcctcctggc

SEQ ID NO: 24643 - DNA, 20 bp, Artificial Sequence
  Description of Artificial Sequence: Synthetic oligonucleotide
  Target: LAMA2; (-) strand; PAM type: NNGRRT; PAM sequence: CTGGGT
gggatatcccccaaagctgc

SEQ ID NO: 24644 - DNA, 20 bp, Artificial Sequence
  Description of Artificial Sequence: Synthetic oligonucleotide
  Target: LAMA2; (-) strand; PAM type: NNGRRT; PAM sequence: TGGGAT
gttatccagttgtcttagga

SEQ ID NO: 24645 - DNA, 20 bp, Artificial Sequence
  Description of Artificial Sequence: Synthetic oligonucleotide
  Target: LAMA2; (-) strand; PAM type: NNGRRT; PAM sequence: TAGGAT
gtgtagttatccagttgtct

SEQ ID NO: 24646 - DNA, 20 bp, Artificial Sequence
  Description of Artificial Sequence: Synthetic oligonucleotide
  Target: LAMA2; (-) strand; PAM type: NNGRRT; PAM sequence: CAGGGT
atgtagaatacagtcatttg

SEQ ID NO: 24647 - DNA, 20 bp, Artificial Sequence
  Description of Artificial Sequence: Synthetic oligonucleotide
  Target: LAMA2; (-) strand; PAM type: NNGRRT; PAM sequence: TAGAAT
agcagaactttgcctttatg

SEQ ID NO: 24648 - DNA, 20 bp, Artificial Sequence
  Description of Artificial Sequence: Synthetic oligonucleotide
  Target: LAMA2; (-) strand; PAM type: NNGRRT; PAM sequence: GTGGGT
tcccaacatggaagctggag

SEQ ID NO: 24649 - DNA, 20 bp, Artificial Sequence
  Description of Artificial Sequence: Synthetic oligonucleotide
  Target: LAMA2; (-) strand; PAM type: NNGRRT; PAM sequence: AAGGAT
gtttctttttggcttaaata

SEQ ID NO: 24650 - DNA, 20 bp, Artificial Sequence
  Description of Artificial Sequence: Synthetic oligonucleotide
  Target: LAMA2; (-) strand; PAM type: NNGRRT; PAM sequence: ATGAAT
ttcttatcaggatcagatac

SEQ ID NO: 24651 - DNA, 20 bp, Artificial Sequence
  Description of Artificial Sequence: Synthetic oligonucleotide
  Target: LAMA2; (-) strand; PAM type: NNGRRT; PAM sequence: CAGGAT
tttcttctattaattcttat

SEQ ID NO: 24652 - DNA, 20 bp, Artificial Sequence
  Description of Artificial Sequence: Synthetic oligonucleotide
  Target: LAMA2; (-) strand; PAM type: NNGRRT; PAM sequence: TGGAAT
ttaacctccagtgaaggaga

SEQ ID NO: 24653 - DNA, 20 bp, Artificial Sequence
  Description of Artificial Sequence: Synthetic oligonucleotide
  Target: LAMA2; (-) strand; PAM type: NNGRRT; PAM sequence: ATGAGT
aaacaacatagtataaacat

SEQ ID NO: 24654 - DNA, 20 bp, Artificial Sequence
  Description of Artificial Sequence: Synthetic oligonucleotide
  Target: LAMA2; (-) strand; PAM type: NNGRRT; PAM sequence: GGGAAT
ttatgaaatacagccttgca

SEQ ID NO: 24655 - DNA, 20 bp, Artificial Sequence
  Description of Artificial Sequence: Synthetic oligonucleotide
  Target: LAMA2; (-) strand; PAM type: NNGRRT; PAM sequence: ATGGGT
catgggtgtgcattgtgtgt

SEQ ID NO: 24656 - DNA, 20 bp, Artificial Sequence
  Description of Artificial Sequence: Synthetic oligonucleotide
  Target: LAMA2; (-) strand; PAM type: NNGRRT; PAM sequence: ATGGGT
actatcaacaagaaacagac

SEQ ID NO: 24657 - DNA, 20 bp, Artificial Sequence
  Description of Artificial Sequence: Synthetic oligonucleotide
  Target: LAMA2; (-) strand; PAM type: NNGRRT; PAM sequence: CGGAGT
ctggaaatgttcattagaaa

SEQ ID NO: 24658 - DNA, 20 bp, Artificial Sequence
  Description of Artificial Sequence: Synthetic oligonucleotide
  Target: LAMA2; (-) strand; PAM type: NNGRRT; PAM sequence: AAGGAT
cccacaaaaattaaaaatta

SEQ ID NO: 24659 - DNA, 20 bp, Artificial Sequence
  Description of Artificial Sequence: Synthetic oligonucleotide
  Target: LAMA2; (-) strand; PAM type: NNGRRT; PAM sequence: ATGGAT
aaggatacatgtttgaggtg

SEQ ID NO: 24660 - DNA, 20 bp, Artificial Sequence
  Description of Artificial Sequence: Synthetic oligonucleotide
  Target: LAMA2; (-) strand; PAM type: NNGRRT; PAM sequence: AAGGAT
atcagattgtttgaaacata

SEQ ID NO: 24661 - DNA, 20 bp, Artificial Sequence
  Description of Artificial Sequence: Synthetic oligonucleotide
  Target: LAMA2; (-) strand; PAM type: NNGRRT; PAM sequence: AAGAGT
gtacatttaaaaataactaa

SEQ ID NO: 24662 - DNA, 20 bp, Artificial Sequence
  Description of Artificial Sequence: Synthetic oligonucleotide
  Target: LAMA2; (-) strand; PAM type: NNGRRT; PAM sequence: AAGGGT
gatttagtatttgctagcac

SEQ ID NO: 24663 - DNA, 20 bp, Artificial Sequence
  Description of Artificial Sequence: Synthetic oligonucleotide
  Target: LAMA2; (-) strand; PAM type: NNGRRT; PAM sequence: TTGAAT
gttaatgatacaaaaatagt

SEQ ID NO: 24664 - DNA, 20 bp, Artificial Sequence
  Description of Artificial Sequence: Synthetic oligonucleotide
  Target: LAMA2; (-) strand; PAM type: NNGRRT; PAM sequence: AGGGAT
ggttagtggcagggaggagt

SEQ ID NO: 24665 - DNA, 20 bp, Artificial Sequence
  Description of Artificial Sequence: Synthetic oligonucleotide
  Target: LAMA2; (-) strand; PAM type: NNGRRT; PAM sequence: AGGAGT
tgggaaggttagtggcaggg

SEQ ID NO: 24666 - DNA, 20 bp, Artificial Sequence
  Description of Artificial Sequence: Synthetic oligonucleotide
  Target: LAMA2; (-) strand; PAM type: NNGRRT; PAM sequence: AAGGAT
tggagatagatagaaagtag

SEQ ID NO: 24667 - DNA, 20 bp, Artificial Sequence
  Description of Artificial Sequence: Synthetic oligonucleotide
  Target: LAMA2; (-) strand; PAM type: NNGRRT; PAM sequence: ATGGGT
atcctatcatctgcaacaac

SEQ ID NO: 24668 - DNA, 20 bp, Artificial Sequence
  Description of Artificial Sequence: Synthetic oligonucleotide
  Target: LAMA2; (-) strand; PAM type: NNGRRT; PAM sequence: AAGAAT
gatatgaataagccataaaa

SEQ ID NO: 24669 - DNA, 20 bp, Artificial Sequence
  Description of Artificial Sequence: Synthetic oligonucleotide
  Target: LAMA2; (-) strand; PAM type: NNGRRT; PAM sequence: ATGAAT
ggtacatatacatactggat

SEQ ID NO: 24670 - DNA, 20 bp, Artificial Sequence
  Description of Artificial Sequence: Synthetic oligonucleotide
  Target: LAMA2; (-) strand; PAM type: NNGRRT; PAM sequence: CTGGAT
aagtgtggtacatatacata

SEQ ID NO: 24671 - DNA, 20 bp, Artificial Sequence
  Description of Artificial Sequence: Synthetic oligonucleotide
  Target: LAMA2; (-) strand; PAM type: NNGRRT; PAM sequence: ACGGAT
aagtgtccatcagcagatga

SEQ ID NO: 24672 - DNA, 20 bp, Artificial Sequence
  Description of Artificial Sequence: Synthetic oligonucleotide
  Target: LAMA2; (-) strand; PAM type: NNGRRT; PAM sequence: AAGAAT
actcttagatatatacccaa

SEQ ID NO: 24673 - DNA, 20 bp, Artificial Sequence
  Description of Artificial Sequence: Synthetic oligonucleotide
  Target: LAMA2; (-) strand; PAM type: NNGRRT; PAM sequence: GAGGAT
aggcaataacaaatgctgac

SEQ ID NO: 24674 - DNA, 20 bp, Artificial Sequence
  Description of Artificial Sequence: Synthetic oligonucleotide
  Target: LAMA2; (-) strand; PAM type: NNGRRT; PAM sequence: TTGGAT
tttaaaaatgggtacaagat

SEQ ID NO: 24675 - DNA, 20 bp, Artificial Sequence
  Description of Artificial Sequence: Synthetic oligonucleotide
  Target: LAMA2; (-) strand; PAM type: NNGRRT; PAM sequence: ATGGGT
tctaataatcctatttaaaa

SEQ ID NO: 24676 - DNA, 20 bp, Artificial Sequence
  Description of Artificial Sequence: Synthetic oligonucleotide
  Target: LAMA2; (-) strand; PAM type: NNGRRT; PAM sequence: AGGAAT
attaataaccagaatataaa

SEQ ID NO: 24677 - DNA, 20 bp, Artificial Sequence
  Description of Artificial Sequence: Synthetic oligonucleotide
  Target: LAMA2; (-) strand; PAM type: NNGRRT; PAM sequence: CAGAAT
tctgagaagggattaataac

SEQ ID NO: 24678 - DNA, 20 bp, Artificial Sequence
  Description of Artificial Sequence: Synthetic oligonucleotide
  Target: LAMA2; (-) strand; PAM type: NNGRRT; PAM sequence: AGGGAT
tgcaaactacccatctgaga

SEQ ID NO: 24679 - DNA, 20 bp, Artificial Sequence
  Description of Artificial Sequence: Synthetic oligonucleotide
  Target: LAMA2; (-) strand; PAM type: NNGRRT; PAM sequence: TGGGAT
tgaagtgacaacccacagaa

SEQ ID NO: 24680 - DNA, 20 bp, Artificial Sequence
  Description of Artificial Sequence: Synthetic oligonucleotide
  Target: LAMA2; (-) strand; PAM type: NNGRRT; PAM sequence: CAGAAT
caaagtgaagtgacaaccca

SEQ ID NO: 24681 - DNA, 20 bp, Artificial Sequence
  Description of Artificial Sequence: Synthetic oligonucleotide
  Target: LAMA2; (-) strand; PAM type: NNGRRT; PAM sequence: TGGGAT
ccaaagtaaaaatagacaaa

SEQ ID NO: 24682 - DNA, 20 bp, Artificial Sequence
  Description of Artificial Sequence: Synthetic oligonucleotide
  Target: LAMA2; (-) strand; PAM type: NNGRRT; PAM sequence: CTGAGT
ttgaaatgggcaaagacttc

SEQ ID NO: 24683 - DNA, 20 bp, Artificial Sequence
  Description of Artificial Sequence: Synthetic oligonucleotide
  Target: LAMA2; (-) strand; PAM type: NNGRRT; PAM sequence: TTGAAT
aatcaaagtggattagagac

SEQ ID NO: 24684 - DNA, 20 bp, Artificial Sequence
  Description of Artificial Sequence: Synthetic oligonucleotide
  Target: LAMA2; (-) strand; PAM type: NNGRRT; PAM sequence: GTGGAT
tatacaaaaatcaaatcaaa

SEQ ID NO: 24685 - DNA, 20 bp, Artificial Sequence
  Description of Artificial Sequence: Synthetic oligonucleotide
  Target: LAMA2; (-) strand; PAM type: NNGRRT; PAM sequence: AAGAAT
aactggatattcatatgcgg

SEQ ID NO: 24686 - DNA, 20 bp, Artificial Sequence
  Description of Artificial Sequence: Synthetic oligonucleotide
  Target: LAMA2; (-) strand; PAM type: NNGRRT; PAM sequence: CTGGAT
aataaatggtgcagggaaaa

SEQ ID NO: 24687 - DNA, 20 bp, Artificial Sequence
  Description of Artificial Sequence: Synthetic oligonucleotide
  Target: LAMA2; (-) strand; PAM type: NNGRRT; PAM sequence: CAGGAT
aggcacatagaccagtggaa

SEQ ID NO: 24688 - DNA, 20 bp, Artificial Sequence
  Description of Artificial Sequence: Synthetic oligonucleotide
  Target: LAMA2; (-) strand; PAM type: NNGRRT; PAM sequence: AAGAAT
tgcaaaaggaacaaaattgg

SEQ ID NO: 24689 - DNA, 20 bp, Artificial Sequence
  Description of Artificial Sequence: Synthetic oligonucleotide
  Target: LAMA2; (-) strand; PAM type: NNGRRT; PAM sequence: CAGAAT
cctaaaattcatatgaaacc

SEQ ID NO: 24690 - DNA, 20 bp, Artificial Sequence
  Description of Artificial Sequence: Synthetic oligonucleotide
  Target: LAMA2; (-) strand; PAM type: NNGRRT; PAM sequence: AAGAAT
attccatgttaatggattgg

SEQ ID NO: 24691 - DNA, 20 bp, Artificial Sequence
  Description of Artificial Sequence: Synthetic oligonucleotide
  Target: LAMA2; (-) strand; PAM type: NNGRRT; PAM sequence: ATGGAT
aaataagatattccatgtta

SEQ ID NO: 24692 - DNA, 20 bp, Artificial Sequence
  Description of Artificial Sequence: Synthetic oligonucleotide
  Target: LAMA2; (-) strand; PAM type: NNGRRT; PAM sequence: GAGAGT
ctatgttgaataacagtggt

SEQ ID NO: 24693 - DNA, 20 bp, Artificial Sequence
  Description of Artificial Sequence: Synthetic oligonucleotide
  Target: LAMA2; (-) strand; PAM type: NNGRRT; PAM sequence: TTGAAT
ctaggacttccaatactatg

SEQ ID NO: 24694 - DNA, 20 bp, Artificial Sequence
  Description of Artificial Sequence: Synthetic oligonucleotide
  Target: LAMA2; (-) strand; PAM type: NNGRRT; PAM sequence: TTGGAT
aggataatttgacttcttcc

SEQ ID NO: 24695 - DNA, 20 bp, Artificial Sequence
  Description of Artificial Sequence: Synthetic oligonucleotide
  Target: LAMA2; (-) strand; PAM type: NNGRRT; PAM sequence: AAGGAT
aaatcatatcatttgcaaac

SEQ ID NO: 24696 - DNA, 20 bp, Artificial Sequence
  Description of Artificial Sequence: Synthetic oligonucleotide
  Target: LAMA2; (-) strand; PAM type: NNGRRT; PAM sequence: TGGGGT
cagttctaatggttttttgg

SEQ ID NO: 24697 - DNA, 20 bp, Artificial Sequence
  Description of Artificial Sequence: Synthetic oligonucleotide
  Target: LAMA2; (-) strand; PAM type: NNGRRT; PAM sequence: CTGAAT
ctttgtatcctgcagcttta

SEQ ID NO: 24698 - DNA, 20 bp, Artificial Sequence
  Description of Artificial Sequence: Synthetic oligonucleotide
  Target: LAMA2; (-) strand; PAM type: NNGRRT; PAM sequence: TGGAAT
ttatttgtagctactgtaaa

SEQ ID NO: 24699 - DNA, 20 bp, Artificial Sequence
  Description of Artificial Sequence: Synthetic oligonucleotide
  Target: LAMA2; (-) strand; PAM type: NNGRRT; PAM sequence: CTGAAT
atttctatgataccacggga

SEQ ID NO: 24700 - DNA, 20 bp, Artificial Sequence
  Description of Artificial Sequence: Synthetic oligonucleotide
  Target: LAMA2; (-) strand; PAM type: NNGRRT; PAM sequence: GGGAGT
tatcacccactactttgtat

SEQ ID NO: 24701 - DNA, 20 bp, Artificial Sequence
  Description of Artificial Sequence: Synthetic oligonucleotide
  Target: LAMA2; (-) strand; PAM type: NNGRRT; PAM sequence: GAGGGT
ttcctacctatattttggtg

SEQ ID NO: 24702 - DNA, 20 bp, Artificial Sequence
  Description of Artificial Sequence: Synthetic oligonucleotide
  Target: LAMA2; (-) strand; PAM type: NNGRRT; PAM sequence: TGGGGT
gttttctgcttccctgtagg

SEQ ID NO: 24703 - DNA, 20 bp, Artificial Sequence
  Description of Artificial Sequence: Synthetic oligonucleotide
  Target: LAMA2; (-) strand; PAM type: NNGRRT; PAM sequence: CGGGGT
ctttcatagcacatggaatt

SEQ ID NO: 24704 - DNA, 20 bp, Artificial Sequence
  Description of Artificial Sequence: Synthetic oligonucleotide
  Target: LAMA2; (-) strand; PAM type: NNGRRT; PAM sequence: TGGAAT
ttttagactttcatagcaca

SEQ ID NO: 24705 - DNA, 20 bp, Artificial Sequence
  Description of Artificial Sequence: Synthetic oligonucleotide
  Target: LAMA2; (-) strand; PAM type: NNGRRT; PAM sequence: GTGAAT
taagagaatgccagccatct

SEQ ID NO: 24706 - DNA, 20 bp, Artificial Sequence
  Description of Artificial Sequence: Synthetic oligonucleotide
  Target: LAMA2; (-) strand; PAM type: NNGRRT; PAM sequence: GAGAAT
ttgtcataaaatttgactaa

SEQ ID NO: 24707 - DNA, 20 bp, Artificial Sequence
  Description of Artificial Sequence: Synthetic oligonucleotide
  Target: LAMA2; (-) strand; PAM type: NNGRRT; PAM sequence: CAGGAT
cagaattataagagcccagg

SEQ ID NO: 24708 - DNA, 20 bp, Artificial Sequence
  Description of Artificial Sequence: Synthetic oligonucleotide
  Target: LAMA2; (-) strand; PAM type: NNGRRT; PAM sequence: CAGAAT
ttttctggttttgtttgatc

SEQ ID NO: 24709 - DNA, 20 bp, Artificial Sequence
  Description of Artificial Sequence: Synthetic oligonucleotide
  Target: LAMA2; (-) strand; PAM type: NNGRRT; PAM sequence: GTGAGT
ggacattagaaacagaggaa

SEQ ID NO: 24710 - DNA, 20 bp, Artificial Sequence
  Description of Artificial Sequence: Synthetic oligonucleotide
  Target: LAMA2; (-) strand; PAM type: NNGRRT; PAM sequence: GGGGAT
tgtattacactgtgtgttca

SEQ ID NO: 24711 - DNA, 20 bp, Artificial Sequence
  Description of Artificial Sequence: Synthetic oligonucleotide
  Target: LAMA2; (-) strand; PAM type: NNGRRT; PAM sequence: ATGAAT
caaagatgtcaaaggttaag

SEQ ID NO: 24712 - DNA, 20 bp, Artificial Sequence
  Description of Artificial Sequence: Synthetic oligonucleotide
  Target: LAMA2; (-) strand; PAM type: NNGRRT; PAM sequence: TTGGGT
ccaaaaaaaagccccagtga

SEQ ID NO: 24713 - DNA, 20 bp, Artificial Sequence
  Description of Artificial Sequence: Synthetic oligonucleotide
  Target: LAMA2; (-) strand; PAM type: NNGRRT; PAM sequence: AGGAAT
gaagttcggctgaggacaga

SEQ ID NO: 24714 - DNA, 20 bp, Artificial Sequence
  Description of Artificial Sequence: Synthetic oligonucleotide
  Target: LAMA2; (-) strand; PAM type: NNGRRT; PAM sequence: AGGAAT
gggagaagtaaggagaagag

SEQ ID NO: 24715 - DNA, 20 bp, Artificial Sequence
  Description of Artificial Sequence: Synthetic oligonucleotide
  Target: LAMA2; (-) strand; PAM type: NNGRRT; PAM sequence: CTGAAT
aaagtaaagggtagaagaag

SEQ ID NO: 24716 - DNA, 20 bp, Artificial Sequence
  Description of Artificial Sequence: Synthetic oligonucleotide
  Target: LAMA2; (-) strand; PAM type: NNGRRT; PAM sequence: AAGGGT
ataaacgaaaaaataaagta

SEQ ID NO: 24717 - DNA, 20 bp, Artificial Sequence
  Description of Artificial Sequence: Synthetic oligonucleotide
  Target: LAMA2; (-) strand; PAM type: NNGRRT; PAM sequence: ATGAAT
gtgggtttatagcagatttt

SEQ ID NO: 24718 - DNA, 20 bp, Artificial Sequence
  Description of Artificial Sequence: Synthetic oligonucleotide
  Target: LAMA2; (-) strand; PAM type: NNGRRT; PAM sequence: GTGGGT
atgggtttggattggcaaag

SEQ ID NO: 24719 - DNA, 20 bp, Artificial Sequence
  Description of Artificial Sequence: Synthetic oligonucleotide
  Target: LAMA2; (-) strand; PAM type: NNGRRT; PAM sequence: TTGGAT
tactgagaaccttgatgggt

SEQ ID NO: 24720 - DNA, 20 bp, Artificial Sequence
  Description of Artificial Sequence: Synthetic oligonucleotide
  Target: LAMA2; (-) strand; PAM type: NNGRRT; PAM sequence: ATGGGT
ttgttctactgagaaccttg

SEQ ID NO: 24721 - DNA, 20 bp, Artificial Sequence
  Description of Artificial Sequence: Synthetic oligonucleotide
  Target: LAMA2; (-) strand; PAM type: NNGRRT; PAM sequence: AAGGAT
agccacggctgtctgcaatg

SEQ ID NO: 24722 - DNA, 20 bp, Artificial Sequence
  Description of Artificial Sequence: Synthetic oligonucleotide
  Target: LAMA2; (-) strand; PAM type: NNGRRT; PAM sequence: GGGAAT
agtatcagagaaatactcag

SEQ ID NO: 24723 - DNA, 20 bp, Artificial Sequence
  Description of Artificial Sequence: Synthetic oligonucleotide
  Target: LAMA2; (-) strand; PAM type: NNGRRT; PAM sequence: CTGAGT
tctagaccacaccaactgaa

SEQ ID NO: 24724 - DNA, 20 bp, Artificial Sequence
  Description of Artificial Sequence: Synthetic oligonucleotide
  Target: LAMA2; (-) strand; PAM type: NNGRRT; PAM sequence: TTGGGT
ttatcttagaagtctctctg

SEQ ID NO: 24725 - DNA, 20 bp, Artificial Sequence
  Description of Artificial Sequence: Synthetic oligonucleotide
  Target: LAMA2; (-) strand; PAM type: NNGRRT; PAM sequence: AAGAAT
tacacactgagattgactta

SEQ ID NO: 24726 - DNA, 20 bp, Artificial Sequence
  Description of Artificial Sequence: Synthetic oligonucleotide
  Target: LAMA2; (-) strand; PAM type: NNGRRT; PAM sequence: ATGGAT
actatgtattatttgaataa

SEQ ID NO: 24727 - DNA, 20 bp, Artificial Sequence
  Description of Artificial Sequence: Synthetic oligonucleotide
  Target: LAMA2; (-) strand; PAM type: NNGRRT; PAM sequence: TTGAAT
gagggtttactatgtattat

SEQ ID NO: 24728 - DNA, 20 bp, Artificial Sequence
  Description of Artificial Sequence: Synthetic oligonucleotide
  Target: LAMA2; (-) strand; PAM type: NNGRRT; PAM sequence: GAGGGT
caaagtatctggcacaacat

SEQ ID NO: 24729 - DNA, 20 bp, Artificial Sequence
  Description of Artificial Sequence: Synthetic oligonucleotide
  Target: LAMA2; (-) strand; PAM type: NNGRRT; PAM sequence: TAGAAT
ttctgggctaccttcccttt

SEQ ID NO: 24730 - DNA, 20 bp, Artificial Sequence
  Description of Artificial Sequence: Synthetic oligonucleotide
  Target: LAMA2; (-) strand; PAM type: NNGRRT; PAM sequence: GGGGAT
aatattttggattagaggat

SEQ ID NO: 24731 - DNA, 20 bp, Artificial Sequence
  Description of Artificial Sequence: Synthetic oligonucleotide
  Target: LAMA2; (-) strand; PAM type: NNGRRT; PAM sequence: GAGGAT
ttttaaaatattttggatta

SEQ ID NO: 24732 - DNA, 20 bp, Artificial Sequence
  Description of Artificial Sequence: Synthetic oligonucleotide
  Target: LAMA2; (-) strand; PAM type: NNGRRT; PAM sequence: TTGGAT
aatgaagattttaaaatatt

SEQ ID NO: 24733 - DNA, 20 bp, Artificial Sequence
  Description of Artificial Sequence: Synthetic oligonucleotide
  Target: LAMA2; (-) strand; PAM type: NNGRRT; PAM sequence: TTGAAT
caagaaggtccaatcccact

SEQ ID NO: 24734 - DNA, 20 bp, Artificial Sequence
  Description of Artificial Sequence: Synthetic oligonucleotide
  Target: LAMA2; (-) strand; PAM type: NNGRRT; PAM sequence: CGGAAT
ctccagtcgttgtagttgtg

SEQ ID NO: 24735 - DNA, 20 bp, Artificial Sequence
  Description of Artificial Sequence: Synthetic oligonucleotide
  Target: LAMA2; (-) strand; PAM type: NNGRRT; PAM sequence: ATGGAT
aatattcgagtttcccacac

SEQ ID NO: 24736 - DNA, 20 bp, Artificial Sequence
  Description of Artificial Sequence: Synthetic oligonucleotide
  Target: LAMA2; (-) strand; PAM type: NNGRRT; PAM sequence: TCGAGT
acagccgggcttcaaaatat

SEQ ID NO: 24737 - DNA, 20 bp, Artificial Sequence
  Description of Artificial Sequence: Synthetic oligonucleotide
  Target: LAMA2; (-) strand; PAM type: NNGRRT; PAM sequence: AAGAAT
aatttagctttctcccaaca

SEQ ID NO: 24738 - DNA, 20 bp, Artificial Sequence
  Description of Artificial Sequence: Synthetic oligonucleotide
  Target: LAMA2; (-) strand; PAM type: NNGRRT; PAM sequence: AAGGAT
cacaaattgaagtaatccag

SEQ ID NO: 24739 - DNA, 20 bp, Artificial Sequence
  Description of Artificial Sequence: Synthetic oligonucleotide
  Target: LAMA2; (-) strand; PAM type: NNGRRT; PAM sequence: AAGAGT
gtgttccttaagaggagaat

SEQ ID NO: 24740 - DNA, 20 bp, Artificial Sequence
  Description of Artificial Sequence: Synthetic oligonucleotide
  Target: LAMA2; (-) strand; PAM type: NNGRRT; PAM sequence: GAGAAT
gactgtgtgttccttaagag

SEQ ID NO: 24741 - DNA, 20 bp, Artificial Sequence
  Description of Artificial Sequence: Synthetic oligonucleotide
  Target: LAMA2; (-) strand; PAM type: NNGRRT; PAM sequence: TGGAGT
ctctctgccttttctcccac

SEQ ID NO: 24742 - DNA, 20 bp, Artificial Sequence
  Description of Artificial Sequence: Synthetic oligonucleotide
  Target: LAMA2; (-) strand; PAM type: NNGRRT; PAM sequence: CTGGAT
gctgttttttgaaatggtag

SEQ ID NO: 24743 - DNA, 20 bp, Artificial Sequence
  Description of Artificial Sequence: Synthetic oligonucleotide
  Target: LAMA2; (-) strand; PAM type: NNGRRT; PAM sequence: TAGAAT
gcagggctgaaagaggtgtt

SEQ ID NO: 24744 - DNA, 20 bp, Artificial Sequence
  Description of Artificial Sequence: Synthetic oligonucleotide
  Target: LAMA2; (-) strand; PAM type: NNGRRT; PAM sequence: CTGAGT
actaagggtggaaacgtgaa

SEQ ID NO: 24745 - DNA, 20 bp, Artificial Sequence
  Description of Artificial Sequence: Synthetic oligonucleotide
  Target: LAMA2; (-) strand; PAM type: NNGRRT; PAM sequence: AAGGGT
tcttcttgggaggcaacact

SEQ ID NO: 24746 - DNA, 20 bp, Artificial Sequence
  Description of Artificial Sequence: Synthetic oligonucleotide
  Target: LAMA2; (-) strand; PAM type: NNGRRT; PAM sequence: GTGGAT
tcctttttacctctaagctg

SEQ ID NO: 24747 - DNA, 20 bp, Artificial Sequence
  Description of Artificial Sequence: Synthetic oligonucleotide
  Target: LAMA2; (-) strand; PAM type: NNGRRT; PAM sequence: TTGAGT
ttgaaaatttggtaaaacta

SEQ ID NO: 24748 - DNA, 20 bp, Artificial Sequence
  Description of Artificial Sequence: Synthetic oligonucleotide
  Target: LAMA2; (-) strand; PAM type: NNGRRT; PAM sequence: TGGAGT
gaaatgtttactatattggg

SEQ ID NO: 24749 - DNA, 20 bp, Artificial Sequence
  Description of Artificial Sequence: Synthetic oligonucleotide
  Target: LAMA2; (-) strand; PAM type: NNGRRT; PAM sequence: TTGGGT
ttaatgaaatgtttactata

SEQ ID NO: 24750 - DNA, 20 bp, Artificial Sequence
  Description of Artificial Sequence: Synthetic oligonucleotide
  Target: LAMA2; (-) strand; PAM type: NNGRRT; PAM sequence: CAGAAT
gcccctgaaatttgagatga

SEQ ID NO: 24751 - DNA, 20 bp, Artificial Sequence
  Description of Artificial Sequence: Synthetic oligonucleotide
  Target: LAMA2; (-) strand; PAM type: NNGRRT; PAM sequence: GAGAGT
ttcattttatatacaagatt

SEQ ID NO: 24752 - DNA, 20 bp, Artificial Sequence
  Description of Artificial Sequence: Synthetic oligonucleotide
  Target: LAMA2; (-) strand; PAM type: NNGRRT; PAM sequence: ATGGAT
taattatatttttttccttc

SEQ ID NO: 24753 - DNA, 20 bp, Artificial Sequence
  Description of Artificial Sequence: Synthetic oligonucleotide
  Target: LAMA2; (-) strand; PAM type: NNGRRT; PAM sequence: AAGGAT
tggtttacaaattcaaagta

SEQ ID NO: 24754 - DNA, 20 bp, Artificial Sequence
  Description of Artificial Sequence: Synthetic oligonucleotide
  Target: LAMA2; (-) strand; PAM type: NNGRRT; PAM sequence: GAGAGT
ctcacgtctttttagaatgt

SEQ ID NO: 24755 - DNA, 20 bp, Artificial Sequence
  Description of Artificial Sequence: Synthetic oligonucleotide
  Target: LAMA2; (-) strand; PAM type: NNGRRT; PAM sequence: TAGAAT
aattctacctcacgtctttt

SEQ ID NO: 24756 - DNA, 20 bp, Artificial Sequence
  Description of Artificial Sequence: Synthetic oligonucleotide
  Target: LAMA2; (-) strand; PAM type: NNGRRT; PAM sequence: GGGAGT
ctttgctttggggcattgtt

SEQ ID NO: 24757 - DNA, 20 bp, Artificial Sequence
  Description of Artificial Sequence: Synthetic oligonucleotide
  Target: LAMA2; (-) strand; PAM type: NNGRRT; PAM sequence: ATGGAT
atcagccagaatcatttgaa

SEQ ID NO: 24758 - DNA, 20 bp, Artificial Sequence
  Description of Artificial Sequence: Synthetic oligonucleotide
  Target: LAMA2; (-) strand; PAM type: NNGRRT; PAM sequence: CAGAAT
tctctaggaaagacatcagc

SEQ ID NO: 24759 - DNA, 20 bp, Artificial Sequence
  Description of Artificial Sequence: Synthetic oligonucleotide
  Target: LAMA2; (-) strand; PAM type: NNGRRT; PAM sequence: GTGAAT
ccccagcatcatagacagca

SEQ ID NO: 24760 - DNA, 20 bp, Artificial Sequence
  Description of Artificial Sequence: Synthetic oligonucleotide
  Target: LAMA2; (-) strand; PAM type: NNGRRT; PAM sequence: CTGGGT
tgtgtcagctgatgtagatg

SEQ ID NO: 24761 - DNA, 20 bp, Artificial Sequence
  Description of Artificial Sequence: Synthetic oligonucleotide
  Target: LAMA2; (-) strand; PAM type: NNGRRT; PAM sequence: CAGGGT
tgggaagcctccaacaaaca

SEQ ID NO: 24762 - DNA, 20 bp, Artificial Sequence
  Description of Artificial Sequence: Synthetic oligonucleotide
  Target: LAMA2; (-) strand; PAM type: NNGRRT; PAM sequence: TGGGGT
gagagcaaagaaattgttgc

SEQ ID NO: 24763 - DNA, 20 bp, Artificial Sequence
  Description of Artificial Sequence: Synthetic oligonucleotide
  Target: LAMA2; (-) strand; PAM type: NNGRRT; PAM sequence: GAGGAT
gctagagaaggattctgaat

SEQ ID NO: 24764 - DNA, 20 bp, Artificial Sequence
  Description of Artificial Sequence: Synthetic oligonucleotide
  Target: LAMA2; (-) strand; PAM type: NNGRRT; PAM sequence: CTGAAT
taatgtgctagagaaggatt

SEQ ID NO: 24765 - DNA, 20 bp, Artificial Sequence
  Description of Artificial Sequence: Synthetic oligonucleotide
  Target: LAMA2; (-) strand; PAM type: NNGRRT; PAM sequence: AAGGAT
ctatatttaatgtgctagag

SEQ ID NO: 24766 - DNA, 20 bp, Artificial Sequence
  Description of Artificial Sequence: Synthetic oligonucleotide
  Target: LAMA2; (-) strand; PAM type: NNGRRT; PAM sequence: AGGGAT
caaaggagctttatataaac

SEQ ID NO: 24767 - DNA, 20 bp, Artificial Sequence
  Description of Artificial Sequence: Synthetic oligonucleotide
  Target: LAMA2; (-) strand; PAM type: NNGRRT; PAM sequence: CTGAAT
cattgctctgtcaacaattg

SEQ ID NO: 24768 - DNA, 20 bp, Artificial Sequence
  Description of Artificial Sequence: Synthetic oligonucleotide
  Target: LAMA2; (-) strand; PAM type: NNGRRT; PAM sequence: TGGAAT
ttacctccttcataatatct

SEQ ID NO: 24769 - DNA, 20 bp, Artificial Sequence
  Description of Artificial Sequence: Synthetic oligonucleotide
  Target: LAMA2; (-) strand; PAM type: NNGRRT; PAM sequence: CTGAAT
taggatcccattatcataga

SEQ ID NO: 24770 - DNA, 20 bp, Artificial Sequence
  Description of Artificial Sequence: Synthetic oligonucleotide
  Target: LAMA2; (-) strand; PAM type: NNGRRT; PAM sequence: TAGGAT
taggcctactaggtgttaat

SEQ ID NO: 24771 - DNA, 20 bp, Artificial Sequence
  Description of Artificial Sequence: Synthetic oligonucleotide
  Target: LAMA2; (-) strand; PAM type: NNGRRT; PAM sequence: TAGAAT
aagtaggttggatattcatg

SEQ ID NO: 24772 - DNA, 20 bp, Artificial Sequence
  Description of Artificial Sequence: Synthetic oligonucleotide
  Target: LAMA2; (-) strand; PAM type: NNGRRT; PAM sequence: TTGGAT
atccctaaaggttaagtagg

SEQ ID NO: 24773 - DNA, 20 bp, Artificial Sequence
  Description of Artificial Sequence: Synthetic oligonucleotide
  Target: LAMA2; (-) strand; PAM type: NNGRRT; PAM sequence: TGGGAT
agacatgaaataacttggtt

SEQ ID NO: 24774 - DNA, 20 bp, Artificial Sequence
  Description of Artificial Sequence: Synthetic oligonucleotide
  Target: LAMA2; (-) strand; PAM type: NNGRRT; PAM sequence: TAGAAT
ttataacatatgaaaacatc

SEQ ID NO: 24775 - DNA, 20 bp, Artificial Sequence
  Description of Artificial Sequence: Synthetic oligonucleotide
  Target: LAMA2; (-) strand; PAM type: NNGRRT; PAM sequence: TGGGAT
aaagtgtaattccaaagtgt

SEQ ID NO: 24776 - DNA, 20 bp, Artificial Sequence
  Description of Artificial Sequence: Synthetic oligonucleotide
  Target: LAMA2; (-) strand; PAM type: NNGRRT; PAM sequence: TGGAGT
tcttgctctgttgcccaggc

SEQ ID NO: 24777 - DNA, 20 bp, Artificial Sequence
  Description of Artificial Sequence: Synthetic oligonucleotide
  Target: LAMA2; (-) strand; PAM type: NNGRRT; PAM sequence: TAGAAT
tttgtttttagccttactaa

SEQ ID NO: 24778 - DNA, 20 bp, Artificial Sequence
  Description of Artificial Sequence: Synthetic oligonucleotide
  Target: LAMA2; (-) strand; PAM type: NNGRRT; PAM sequence: TGGAAT
ctgttagcttgagattaaat

SEQ ID NO: 24779 - DNA, 20 bp, Artificial Sequence
  Description of Artificial Sequence: Synthetic oligonucleotide
  Target: LAMA2; (-) strand; PAM type: NNGRRT; PAM sequence: CGGAAT
gatctgatgcaacctcggaa

SEQ ID NO: 24780 - DNA, 20 bp, Artificial Sequence
  Description of Artificial Sequence: Synthetic oligonucleotide
  Target: LAMA2; (-) strand; PAM type: NNGRRT; PAM sequence: AGGGAT
ctgtgcctttggtgagcttc

SEQ ID NO: 24781 - DNA, 20 bp, Artificial Sequence
  Description of Artificial Sequence: Synthetic oligonucleotide
  Target: LAMA2; (-) strand; PAM type: NNGRRT; PAM sequence: TGGGGT
ttgttttgacagactcttcc

SEQ ID NO: 24782 - DNA, 20 bp, Artificial Sequence
  Description of Artificial Sequence: Synthetic oligonucleotide
  Target: LAMA2; (-) strand; PAM type: NNGRRT; PAM sequence: AAGAAT
tagcaccatctgaatacaga

SEQ ID NO: 24783 - DNA, 20 bp, Artificial Sequence
  Description of Artificial Sequence: Synthetic oligonucleotide
  Target: LAMA2; (-) strand; PAM type: NNGRRT; PAM sequence: CTGAAT
ggagtctgaattagcaccat

SEQ ID NO: 24784 - DNA, 20 bp, Artificial Sequence
  Description of Artificial Sequence: Synthetic oligonucleotide
  Target: LAMA2; (-) strand; PAM type: NNGRRT; PAM sequence: CTGAAT
attaaaattcagtctggagt

SEQ ID NO: 24785 - DNA, 20 bp, Artificial Sequence
  Description of Artificial Sequence: Synthetic oligonucleotide
  Target: LAMA2; (-) strand; PAM type: NNGRRT; PAM sequence: TGGAGT
acttgaattaaaattcagtc

SEQ ID NO: 24786 - DNA, 20 bp, Artificial Sequence
  Description of Artificial Sequence: Synthetic oligonucleotide
  Target: LAMA2; (-) strand; PAM type: NNGRRT; PAM sequence: TTGAAT
ttatagacttgagaaagaac

SEQ ID NO: 24787 - DNA, 20 bp, Artificial Sequence
  Description of Artificial Sequence: Synthetic oligonucleotide
  Target: LAMA2; (-) strand; PAM type: NNGRRT; PAM sequence: TAGAAT
acacaaaacaggcaattatt

SEQ ID NO: 24788 - DNA, 20 bp, Artificial Sequence
  Description of Artificial Sequence: Synthetic oligonucleotide
  Target: LAMA2; (-) strand; PAM type: NNGRRT; PAM sequence: AGGAAT
aagaaagaagaagtattgat

SEQ ID NO: 24789 - DNA, 20 bp, Artificial Sequence
  Description of Artificial Sequence: Synthetic oligonucleotide
  Target: LAMA2; (-) strand; PAM type: NNGRRT; PAM sequence: AAGGAT
caaagctgtcatacatggta

SEQ ID NO: 24790 - DNA, 20 bp, Artificial Sequence
  Description of Artificial Sequence: Synthetic oligonucleotide
  Target: LAMA2; (-) strand; PAM type: NNGRRT; PAM sequence: TAGAGT
gctaataattctttcataaa

SEQ ID NO: 24791 - DNA, 20 bp, Artificial Sequence
  Description of Artificial Sequence: Synthetic oligonucleotide
  Target: LAMA2; (-) strand; PAM type: NNGRRT; PAM sequence: TTGGGT
taaactctctaataatgaac

SEQ ID NO: 24792 - DNA, 20 bp, Artificial Sequence
  Description of Artificial Sequence: Synthetic oligonucleotide
  Target: LAMA2; (-) strand; PAM type: NNGRRT; PAM sequence: CTGAAT
aagtaattaagctttctggc

SEQ ID NO: 24793 - DNA, 20 bp, Artificial Sequence
  Description of Artificial Sequence: Synthetic oligonucleotide
  Target: LAMA2; (-) strand; PAM type: NNGRRT; PAM sequence: ATGAAT
acacagaacgtttatagaaa

SEQ ID NO: 24794 - DNA, 20 bp, Artificial Sequence
  Description of Artificial Sequence: Synthetic oligonucleotide
  Target: LAMA2; (-) strand; PAM type: NNGRRT; PAM sequence: ATGGGT
ctttgaagatgactgaaatc

SEQ ID NO: 24795 - DNA, 20 bp, Artificial Sequence
  Description of Artificial Sequence: Synthetic oligonucleotide
  Target: LAMA2; (-) strand; PAM type: NNGRRT; PAM sequence: GTGAAT
aacgtttcctttttaagctg

SEQ ID NO: 24796 - DNA, 20 bp, Artificial Sequence
  Description of Artificial Sequence: Synthetic oligonucleotide
  Target: LAMA2; (-) strand; PAM type: NNGRRT; PAM sequence: CTGAAT
ttcctgttcttttacatgtt

SEQ ID NO: 24797 - DNA, 20 bp, Artificial Sequence
  Description of Artificial Sequence: Synthetic oligonucleotide
  Target: LAMA2; (-) strand; PAM type: NNGRRT; PAM sequence: AGGAGT
ctaaaatttccataggagaa

SEQ ID NO: 24798 - DNA, 20 bp, Artificial Sequence
  Description of Artificial Sequence: Synthetic oligonucleotide
  Target: LAMA2; (-) strand; PAM type: NNGRRT; PAM sequence: GAGGAT
tggataacaacattgtcaga

SEQ ID NO: 24799 - DNA, 20 bp, Artificial Sequence
  Description of Artificial Sequence: Synthetic oligonucleotide
  Target: LAMA2; (-) strand; PAM type: NNGRRT; PAM sequence: GTGGAT
acagcaccttccttccccta

SEQ ID NO: 24800 - DNA, 20 bp, Artificial Sequence
  Description of Artificial Sequence: Synthetic oligonucleotide
  Target: LAMA2; (-) strand; PAM type: NNGRRT; PAM sequence: GTGAGT
aacaggacggtggtgaaata

SEQ ID NO: 24801 - DNA, 20 bp, Artificial Sequence
  Description of Artificial Sequence: Synthetic oligonucleotide
  Target: LAMA2; (-) strand; PAM type: NNGRRT; PAM sequence: TAGAAT
aagcttgagaattgcttctg

SEQ ID NO: 24802 - DNA, 20 bp, Artificial Sequence
  Description of Artificial Sequence: Synthetic oligonucleotide
  Target: LAMA2; (-) strand; PAM type: NNGRRT; PAM sequence: GAGAAT
aaaaacactgagctaagctt

SEQ ID NO: 24803 - DNA, 20 bp, Artificial Sequence
  Description of Artificial Sequence: Synthetic oligonucleotide
  Target: LAMA2; (-) strand; PAM type: NNGRRT; PAM sequence: CAGAAT
ggctatgtcctagacaaaat

SEQ ID NO: 24804 - DNA, 20 bp, Artificial Sequence
  Description of Artificial Sequence: Synthetic oligonucleotide
  Target: LAMA2; (-) strand; PAM type: NNGRRT; PAM sequence: CTGGGT
tggtgccattgcactcctgc

SEQ ID NO: 24805 - DNA, 20 bp, Artificial Sequence
  Description of Artificial Sequence: Synthetic oligonucleotide
  Target: LAMA2; (-) strand; PAM type: NNGRRT; PAM sequence: GAGGAT
ctacttggggagtgaggcag

SEQ ID NO: 24806 - DNA, 20 bp, Artificial Sequence
  Description of Artificial Sequence: Synthetic oligonucleotide
  Target: LAMA2; (-) strand; PAM type: NNGRRT; PAM sequence: GGGAGT
cctgtagtcccagctacttg

SEQ ID NO: 24807 - DNA, 20 bp, Artificial Sequence
  Description of Artificial Sequence: Synthetic oligonucleotide
  Target: LAMA2; (-) strand; PAM type: NNGRRT; PAM sequence: CTGGGT
actaaaaatataaaaattag

SEQ ID NO: 24808 - DNA, 20 bp, Artificial Sequence
  Description of Artificial Sequence: Synthetic oligonucleotide
  Target: LAMA2; (-) strand; PAM type: NNGRRT; PAM sequence: AGGAGT
caggcagatttcttgagctc

SEQ ID NO: 24809 - DNA, 20 bp, Artificial Sequence
  Description of Artificial Sequence: Synthetic oligonucleotide
  Target: LAMA2; (-) strand; PAM type: NNGRRT; PAM sequence: AAGAAT
aattgcctgggaatgttttt

SEQ ID NO: 24810 - DNA, 20 bp, Artificial Sequence
  Description of Artificial Sequence: Synthetic oligonucleotide
  Target: LAMA2; (-) strand; PAM type: NNGRRT; PAM sequence: GGGAAT
acaacacattagaattgcct

SEQ ID NO: 24811 - DNA, 20 bp, Artificial Sequence
  Description of Artificial Sequence: Synthetic oligonucleotide
  Target: LAMA2; (-) strand; PAM type: NNGRRT; PAM sequence: TAGAAT
gttcatccttgacaacacat

SEQ ID NO: 24812 - DNA, 20 bp, Artificial Sequence
  Description of Artificial Sequence: Synthetic oligonucleotide
  Target: LAMA2; (-) strand; PAM type: NNGRRT; PAM sequence: GGGAAT
ccagcaccatttattaaata

SEQ ID NO: 24813 - DNA, 20 bp, Artificial Sequence
  Description of Artificial Sequence: Synthetic oligonucleotide
  Target: LAMA2; (-) strand; PAM type: NNGRRT; PAM sequence: AGGGAT
ttttgtataaggtgtaagga

SEQ ID NO: 24814 - DNA, 20 bp, Artificial Sequence
  Description of Artificial Sequence: Synthetic oligonucleotide
  Target: LAMA2; (-) strand; PAM type: NNGRRT; PAM sequence: TTGAAT
gtttaagtctttaatccatc

SEQ ID NO: 24815 - DNA, 20 bp, Artificial Sequence
  Description of Artificial Sequence: Synthetic oligonucleotide
  Target: LAMA2; (-) strand; PAM type: NNGRRT; PAM sequence: TAGGGT
gtaatgcctaggttttcttc

SEQ ID NO: 24816 - DNA, 20 bp, Artificial Sequence
  Description of Artificial Sequence: Synthetic oligonucleotide
  Target: LAMA2; (-) strand; PAM type: NNGRRT; PAM sequence: CTGAAT
tccttgcccatgcctatgtc

SEQ ID NO: 24817 - DNA, 20 bp, Artificial Sequence
  Description of Artificial Sequence: Synthetic oligonucleotide
  Target: LAMA2; (-) strand; PAM type: NNGRRT; PAM sequence: ATGAGT
ggatattagccctttgtcag

SEQ ID NO: 24818 - DNA, 20 bp, Artificial Sequence
  Description of Artificial Sequence: Synthetic oligonucleotide
  Target: LAMA2; (-) strand; PAM type: NNGRRT; PAM sequence: CTGGAT
gtttgagttcattgtagatt

SEQ ID NO: 24819 - DNA, 20 bp, Artificial Sequence
  Description of Artificial Sequence: Synthetic oligonucleotide
  Target: LAMA2; (-) strand; PAM type: NNGRRT; PAM sequence: TTGAGT
tttttttcttgtaaatttgt

SEQ ID NO: 24820 - DNA, 20 bp, Artificial Sequence
  Description of Artificial Sequence: Synthetic oligonucleotide
  Target: LAMA2; (-) strand; PAM type: NNGRRT; PAM sequence: TGGGGT
atcctttgcccactttttga

SEQ ID NO: 24821 - DNA, 20 bp, Artificial Sequence
  Description of Artificial Sequence: Synthetic oligonucleotide
  Target: LAMA2; (-) strand; PAM type: NNGRRT; PAM sequence: AGGAAT
tttctagttctagatccctg

SEQ ID NO: 24822 - DNA, 20 bp, Artificial Sequence
  Description of Artificial Sequence: Synthetic oligonucleotide
  Target: LAMA2; (-) strand; PAM type: NNGRRT; PAM sequence: CTGGGT
tatacccagtaatgggatgg

SEQ ID NO: 24823 - DNA, 20 bp, Artificial Sequence
  Description of Artificial Sequence: Synthetic oligonucleotide
  Target: LAMA2; (-) strand; PAM type: NNGRRT; PAM sequence: TGGGAT
tttgggtatatacccagtaa

SEQ ID NO: 24824 - DNA, 20 bp, Artificial Sequence
  Description of Artificial Sequence: Synthetic oligonucleotide
  Target: LAMA2; (-) strand; PAM type: NNGRRT; PAM sequence: TTGGGT
gcagcatgatttatagtcct

SEQ ID NO: 24825 - DNA, 20 bp, Artificial Sequence
  Description of Artificial Sequence: Synthetic oligonucleotide
  Target: LAMA2; (-) strand; PAM type: NNGRRT; PAM sequence: GTGAAT
ggttccaagtctttgctatt

SEQ ID NO: 24826 - DNA, 20 bp, Artificial Sequence
  Description of Artificial Sequence: Synthetic oligonucleotide
  Target: LAMA2; (-) strand; PAM type: NNGRRT; PAM sequence: TTGGGT
agtctatcattgttggacat

SEQ ID NO: 24827 - DNA, 20 bp, Artificial Sequence
  Description of Artificial Sequence: Synthetic oligonucleotide
  Target: LAMA2; (-) strand; PAM type: NNGRRT; PAM sequence: GAGAAT
tgtccttgtgatagtttact

SEQ ID NO: 24828 - DNA, 20 bp, Artificial Sequence
  Description of Artificial Sequence: Synthetic oligonucleotide
  Target: LAMA2; (-) strand; PAM type: NNGRRT; PAM sequence: ATGAGT
tcattgttcaattcccatct

SEQ ID NO: 24829 - DNA, 20 bp, Artificial Sequence
  Description of Artificial Sequence: Synthetic oligonucleotide
  Target: LAMA2; (-) strand; PAM type: NNGRRT; PAM sequence: CAGAGT
ccccaccccaaaacagtccc

SEQ ID NO: 24830 - DNA, 20 bp, Artificial Sequence
  Description of Artificial Sequence: Synthetic oligonucleotide
  Target: LAMA2; (-) strand; PAM type: NNGRRT; PAM sequence: AAGGGT
tattattatactttaagttt

SEQ ID NO: 24831 - DNA, 20 bp, Artificial Sequence
  Description of Artificial Sequence: Synthetic oligonucleotide
  Target: LAMA2; (-) strand; PAM type: NNGRRT; PAM sequence: TAGAAT
tggaggataatgtttctttt

SEQ ID NO: 24832 - DNA, 20 bp, Artificial Sequence
  Description of Artificial Sequence: Synthetic oligonucleotide
  Target: LAMA2; (-) strand; PAM type: NNGRRT; PAM sequence: GAGGAT
taaaactctttgttggcatg

SEQ ID NO: 24833 - DNA, 20 bp, Artificial Sequence
  Description of Artificial Sequence: Synthetic oligonucleotide
  Target: LAMA2; (-) strand; PAM type: NNGRRT; PAM sequence: TAGAAT
tgccaagacaaagctaatag

SEQ ID NO: 24834 - DNA, 20 bp, Artificial Sequence
  Description of Artificial Sequence: Synthetic oligonucleotide
  Target: LAMA2; (-) strand; PAM type: NNGRRT; PAM sequence: ATGGGT
ctataatattattattttta

SEQ ID NO: 24835 - DNA, 20 bp, Artificial Sequence
  Description of Artificial Sequence: Synthetic oligonucleotide
  Target: LAMA2; (-) strand; PAM type: NNGRRT; PAM sequence: TGGGAT
tgcctgagcgaccaaagtgc

SEQ ID NO: 24836 - DNA, 20 bp, Artificial Sequence
  Description of Artificial Sequence: Synthetic oligonucleotide
  Target: LAMA2; (-) strand; PAM type: NNGRRT; PAM sequence: CTGGGT
cccaggctggtctcaaactc

SEQ ID NO: 24837 - DNA, 20 bp, Artificial Sequence
  Description of Artificial Sequence: Synthetic oligonucleotide
  Target: LAMA2; (-) strand; PAM type: NNGRRT; PAM sequence: CAGGGT
ttttaaatttttggtagaga

SEQ ID NO: 24838 - DNA, 20 bp, Artificial Sequence
  Description of Artificial Sequence: Synthetic oligonucleotide
  Target: LAMA2; (-) strand; PAM type: NNGRRT; PAM sequence: TGGAGT
atcttcctgcatcaacctcc

SEQ ID NO: 24839 - DNA, 20 bp, Artificial Sequence
  Description of Artificial Sequence: Synthetic oligonucleotide
  Target: LAMA2; (-) strand; PAM type: NNGRRT; PAM sequence: TGGAGT
tcttgctctgttgcccaggc

SEQ ID NO: 24840 - DNA, 20 bp, Artificial Sequence
  Description of Artificial Sequence: Synthetic oligonucleotide
  Target: LAMA2; (-) strand; PAM type: NNGRRT; PAM sequence: CAGGGT
gatatttctttcatttgaga

SEQ ID NO: 24841 - DNA, 20 bp, Artificial Sequence
  Description of Artificial Sequence: Synthetic oligonucleotide
  Target: LAMA2; (-) strand; PAM type: NNGRRT; PAM sequence: AGGAGT
aggcaggactttattctgat

SEQ ID NO: 24842 - DNA, 20 bp, Artificial Sequence
  Description of Artificial Sequence: Synthetic oligonucleotide
  Target: LAMA2; (-) strand; PAM type: NNGRRT; PAM sequence: GAGAAT
ttaaacatctagctagactt

SEQ ID NO: 24843 - DNA, 20 bp, Artificial Sequence
  Description of Artificial Sequence: Synthetic oligonucleotide
  Target: LAMA2; (-) strand; PAM type: NNGRRT; PAM sequence: TGGGAT
gccttggcctcccagagtgt

SEQ ID NO: 24844 - DNA, 20 bp, Artificial Sequence
  Description of Artificial Sequence: Synthetic oligonucleotide
  Target: LAMA2; (-) strand; PAM type: NNGRRT; PAM sequence: CAGAGT
atcctcctgccttggcctcc

SEQ ID NO: 24845 - DNA, 20 bp, Artificial Sequence
  Description of Artificial Sequence: Synthetic oligonucleotide
  Target: LAMA2; (-) strand; PAM type: NNGRRT; PAM sequence: CAGGAT
tttttttttcttttttgaga

SEQ ID NO: 24846 - DNA, 20 bp, Artificial Sequence
  Description of Artificial Sequence: Synthetic oligonucleotide
  Target: LAMA2; (-) strand; PAM type: NNGRRT; PAM sequence: TGGGGT
agattatagtttaattgggc

SEQ ID NO: 24847 - DNA, 20 bp, Artificial Sequence
  Description of Artificial Sequence: Synthetic oligonucleotide
  Target: LAMA2; (-) strand; PAM type: NNGRRT; PAM sequence: GGGGAT
gtttcacatttgaatcaagt

SEQ ID NO: 24848 - DNA, 20 bp, Artificial Sequence
  Description of Artificial Sequence: Synthetic oligonucleotide
  Target: LAMA2; (-) strand; PAM type: NNGRRT; PAM sequence: TTGAAT
tttcagtcttggtttcacat

SEQ ID NO: 24849 - DNA, 20 bp, Artificial Sequence
  Description of Artificial Sequence: Synthetic oligonucleotide
  Target: LAMA2; (-) strand; PAM type: NNGRRT; PAM sequence: AGGGGT
tgtggaggtgacaggagccc

SEQ ID NO: 24850 - DNA, 20 bp, Artificial Sequence
  Description of Artificial Sequence: Synthetic oligonucleotide
  Target: LAMA2; (-) strand; PAM type: NNGRRT; PAM sequence: TTGAGT
gcacagttatcaaaatatcc

SEQ ID NO: 24851 - DNA, 20 bp, Artificial Sequence
  Description of Artificial Sequence: Synthetic oligonucleotide
  Target: LAMA2; (-) strand; PAM type: NNGRRT; PAM sequence: TTGGAT
cctaattcagtgaattctgc

SEQ ID NO: 24852 - DNA, 20 bp, Artificial Sequence
  Description of Artificial Sequence: Synthetic oligonucleotide
  Target: LAMA2; (-) strand; PAM type: NNGRRT; PAM sequence: GTGAAT
ttttgtccaaacctaattca

SEQ ID NO: 24853 - DNA, 20 bp, Artificial Sequence
  Description of Artificial Sequence: Synthetic oligonucleotide
  Target: LAMA2; (-) strand; PAM type: NNGRRT; PAM sequence: ATGAAT
ttcatgggtcactctggagt

SEQ ID NO: 24854 - DNA, 20 bp, Artificial Sequence
  Description of Artificial Sequence: Synthetic oligonucleotide
  Target: LAMA2; (-) strand; PAM type: NNGRRT; PAM sequence: TGGAGT
tccaaattcatgggtcactc

SEQ ID NO: 24855 - DNA, 20 bp, Artificial Sequence
  Description of Artificial Sequence: Synthetic oligonucleotide
  Target: LAMA2; (-) strand; PAM type: NNGRRT; PAM sequence: ATGGGT
atttttggttatccaaattc

SEQ ID NO: 24856 - DNA, 20 bp, Artificial Sequence
  Description of Artificial Sequence: Synthetic oligonucleotide
  Target: LAMA2; (-) strand; PAM type: NNGRRT; PAM sequence: TGGGAT
gcttcagcctcccaaagtgc

SEQ ID NO: 24857 - DNA, 20 bp, Artificial Sequence
  Description of Artificial Sequence: Synthetic oligonucleotide
  Target: LAMA2; (-) strand; PAM type: NNGRRT; PAM sequence: TGGGGT
ttttgtattgttagtagaga

SEQ ID NO: 24858 - DNA, 20 bp, Artificial Sequence
  Description of Artificial Sequence: Synthetic oligonucleotide
  Target: LAMA2; (-) strand; PAM type: NNGRRT; PAM sequence: CCGAGT
gattctcctgcctcagcctc

SEQ ID NO: 24859 - DNA, 20 bp, Artificial Sequence
  Description of Artificial Sequence: Synthetic oligonucleotide
  Target: LAMA2; (-) strand; PAM type: NNGRRT; PAM sequence: TTGGGT
ctcactgcaacctccgcctc

SEQ ID NO: 24860 - DNA, 20 bp, Artificial Sequence
  Description of Artificial Sequence: Synthetic oligonucleotide
  Target: LAMA2; (-) strand; PAM type: NNGRRT; PAM sequence: TGGAGT
tgtcactctgtcgcccaggc

SEQ ID NO: 24861 - DNA, 20 bp, Artificial Sequence
  Description of Artificial Sequence: Synthetic oligonucleotide
  Target: LAMA2; (-) strand; PAM type: NNGRRT; PAM sequence: TGGGAT
ggaaatattttatcttgttt

SEQ ID NO: 24862 - DNA, 20 bp, Artificial Sequence
  Description of Artificial Sequence: Synthetic oligonucleotide
  Target: LAMA2; (-) strand; PAM type: NNGRRT; PAM sequence: TTGGGT
aaatcattgaggggacaagg

SEQ ID NO: 24863 - DNA, 20 bp, Artificial Sequence
  Description of Artificial Sequence: Synthetic oligonucleotide
  Target: LAMA2; (-) strand; PAM type: NNGRRT; PAM sequence: GTGGGT
ctgctttcttcataattgct

SEQ ID NO: 24864 - DNA, 20 bp, Artificial Sequence
  Description of Artificial Sequence: Synthetic oligonucleotide
  Target: LAMA2; (-) strand; PAM type: NNGRRT; PAM sequence: GTGGGT
aggctgacaacctggtagga

SEQ ID NO: 24865 - DNA, 20 bp, Artificial Sequence
  Description of Artificial Sequence: Synthetic oligonucleotide
  Target: LAMA2; (-) strand; PAM type: NNGRRT; PAM sequence: AGGAGT
aagaaggctgacaacctggt

SEQ ID NO: 24866 - DNA, 20 bp, Artificial Sequence
  Description of Artificial Sequence: Synthetic oligonucleotide
  Target: LAMA2; (+) strand; PAM type: NNGRRT; PAM sequence: TAGAAT
caaaactataaggcactgct

SEQ ID NO: 24867 - DNA, 20 bp, Artificial Sequence
  Description of Artificial Sequence: Synthetic oligonucleotide
  Target: LAMA2; (+) strand; PAM type: NNGRRT; PAM sequence: GTGAAT
aatgaagacgggctatattt

SEQ ID NO: 24868 - DNA, 20 bp, Artificial Sequence
  Description of Artificial Sequence: Synthetic oligonucleotide
  Target: LAMA2; (+) strand; PAM type: NNGRRT; PAM sequence: TTGGGT
atgttccctactctcctttt

SEQ ID NO: 24869 - DNA, 20 bp, Artificial Sequence
  Description of Artificial Sequence: Synthetic oligonucleotide
  Target: LAMA2; (+) strand; PAM type: NNGRRT; PAM sequence: CTGGGT
tgatccaggcaattgtgctt

SEQ ID NO: 24870 - DNA, 20 bp, Artificial Sequence
  Description of Artificial Sequence: Synthetic oligonucleotide
  Target: LAMA2; (+) strand; PAM type: NNGRRT; PAM sequence: AGGAGT
gcttctgggtatttactcaa

SEQ ID NO: 24871 - DNA, 20 bp, Artificial Sequence
  Description of Artificial Sequence: Synthetic oligonucleotide
  Target: LAMA2; (+) strand; PAM type: NNGRRT; PAM sequence: GAGAAT
aaccttcacatgtgaaatat

SEQ ID NO: 24872 - DNA, 20 bp, Artificial Sequence
  Description of Artificial Sequence: Synthetic oligonucleotide
  Target: LAMA2; (+) strand; PAM type: NNGRRT; PAM sequence: GGGAAT
atcagcagttgcctttttct

SEQ ID NO: 24873 - DNA, 20 bp, Artificial Sequence
  Description of Artificial Sequence: Synthetic oligonucleotide
  Target: LAMA2; (+) strand; PAM type: NNGRRT; PAM sequence: GGGGAT
ttttctgggaatggaggttg

SEQ ID NO: 24874 - DNA, 20 bp, Artificial Sequence
  Description of Artificial Sequence: Synthetic oligonucleotide
  Target: LAMA2; (+) strand; PAM type: NNGRRT; PAM sequence: ATGAAT
accaaggtgtttttcattag

SEQ ID NO: 24875 - DNA, 20 bp, Artificial Sequence
  Description of Artificial Sequence: Synthetic oligonucleotide
  Target: LAMA2; (+) strand; PAM type: NNGRRT; PAM sequence: ATGGAT
aggtgtttttcattagatga

SEQ ID NO: 24876 - DNA, 20 bp, Artificial Sequence
  Description of Artificial Sequence: Synthetic oligonucleotide
  Target: LAMA2; (+) strand; PAM type: NNGRRT; PAM sequence: ATGAGT
gtttttcattagatgaatgg

SEQ ID NO: 24877 - DNA, 20 bp, Artificial Sequence
  Description of Artificial Sequence: Synthetic oligonucleotide
  Target: LAMA2; (+) strand; PAM type: NNGRRT; PAM sequence: ATGAAT
ggtggggacagggaggaggc

SEQ ID NO: 24878 - DNA, 20 bp, Artificial Sequence
  Description of Artificial Sequence: Synthetic oligonucleotide
  Target: LAMA2; (+) strand; PAM type: NNGRRT; PAM sequence: AGGAAT
catgaatacgtggagcacag

SEQ ID NO: 24879 - DNA, 20 bp, Artificial Sequence
  Description of Artificial Sequence: Synthetic oligonucleotide
  Target: LAMA2; (+) strand; PAM type: NNGRRT; PAM sequence: TTGGAT
ctctatatgatagtgtaatg

SEQ ID NO: 24880 - DNA, 20 bp, Artificial Sequence
  Description of Artificial Sequence: Synthetic oligonucleotide
  Target: LAMA2; (+) strand; PAM type: NNGRRT; PAM sequence: CGGAGT
cctaatgtaaactatgaaat

SEQ ID NO: 24881 - DNA, 20 bp, Artificial Sequence
  Description of Artificial Sequence: Synthetic oligonucleotide
  Target: LAMA2; (+) strand; PAM type: NNGRRT; PAM sequence: ATGAAT
tgttgataaagggggaggct

SEQ ID NO: 24882 - DNA, 20 bp, Artificial Sequence
  Description of Artificial Sequence: Synthetic oligonucleotide
  Target: LAMA2; (+) strand; PAM type: NNGRRT; PAM sequence: TTGGGT
agggggaggctatgaatgtg

SEQ ID NO: 24883 - DNA, 20 bp, Artificial Sequence
  Description of Artificial Sequence: Synthetic oligonucleotide
  Target: LAMA2; (+) strand; PAM type: NNGRRT; PAM sequence: GTGAAT
accttctgctcaactttgtt

SEQ ID NO: 24884 - DNA, 20 bp, Artificial Sequence
  Description of Artificial Sequence: Synthetic oligonucleotide
  Target: LAMA2; (+) strand; PAM type: NNGRRT; PAM sequence: ATGAAT
taaaatattcaacttcacca

SEQ ID NO: 24885 - DNA, 20 bp, Artificial Sequence
  Description of Artificial Sequence: Synthetic oligonucleotide
  Target: LAMA2; (+) strand; PAM type: NNGRRT; PAM sequence: TAGGAT
tgttttgtaaaacaacatta

SEQ ID NO: 24886 - DNA, 20 bp, Artificial Sequence
  Description of Artificial Sequence: Synthetic oligonucleotide
  Target: LAMA2; (+) strand; PAM type: NNGRRT; PAM sequence: TGGAAT
agtaatagagactgtgatag

SEQ ID NO: 24887 - DNA, 20 bp, Artificial Sequence
  Description of Artificial Sequence: Synthetic oligonucleotide
  Target: LAMA2; (+) strand; PAM type: NNGRRT; PAM sequence: GAGAGT
tatatatatgccaatgaaaa

SEQ ID NO: 24888 - DNA, 20 bp, Artificial Sequence
  Description of Artificial Sequence: Synthetic oligonucleotide
  Target: LAMA2; (+) strand; PAM type: NNGRRT; PAM sequence: GTGAAT
tctcaacaaatgatgatgaa

SEQ ID NO: 24889 - DNA, 20 bp, Artificial Sequence
  Description of Artificial Sequence: Synthetic oligonucleotide
  Target: LAMA2; (+) strand; PAM type: NNGRRT; PAM sequence: ATGGAT
aacaaatgatgatgaagtga

SEQ ID NO: 24890 - DNA, 20 bp, Artificial Sequence
  Description of Artificial Sequence: Synthetic oligonucleotide
  Target: LAMA2; (+) strand; PAM type: NNGRRT; PAM sequence: ATGAAT
gacaaaaaatattaagcata

SEQ ID NO: 24891 - DNA, 20 bp, Artificial Sequence
  Description of Artificial Sequence: Synthetic oligonucleotide
  Target: LAMA2; (+) strand; PAM type: NNGRRT; PAM sequence: CAGAAT
tttaataaattgtatttaat

SEQ ID NO: 24892 - DNA, 20 bp, Artificial Sequence
  Description of Artificial Sequence: Synthetic oligonucleotide
  Target: LAMA2; (+) strand; PAM type: NNGRRT; PAM sequence: TAGAAT
cttgacaaaggtcttttctc

SEQ ID NO: 24893 - DNA, 20 bp, Artificial Sequence
  Description of Artificial Sequence: Synthetic oligonucleotide
  Target: LAMA2; (+) strand; PAM type: NNGRRT; PAM sequence: AAGAAT
aaatgagcaaagatttcaag

SEQ ID NO: 24894 - DNA, 20 bp, Artificial Sequence
  Description of Artificial Sequence: Synthetic oligonucleotide
  Target: LAMA2; (+) strand; PAM type: NNGRRT; PAM sequence: TAGAAT
aggtatcaccacacaagcac

SEQ ID NO: 24895 - DNA, 20 bp, Artificial Sequence
  Description of Artificial Sequence: Synthetic oligonucleotide
  Target: LAMA2; (+) strand; PAM type: NNGRRT; PAM sequence: AGGAAT
ctcctatatattgctgtggg

SEQ ID NO: 24896 - DNA, 20 bp, Artificial Sequence
  Description of Artificial Sequence: Synthetic oligonucleotide
  Target: LAMA2; (+) strand; PAM type: NNGRRT; PAM sequence: AGGAAT
tataactcctaagacttgat

SEQ ID NO: 24897 - DNA, 20 bp, Artificial Sequence
  Description of Artificial Sequence: Synthetic oligonucleotide
  Target: LAMA2; (+) strand; PAM type: NNGRRT; PAM sequence: TTGAAT
acccaaatgtactttaatag

SEQ ID NO: 24898 - DNA, 20 bp, Artificial Sequence
  Description of Artificial Sequence: Synthetic oligonucleotide
  Target: LAMA2; (+) strand; PAM type: NNGRRT; PAM sequence: TAGAAT
tgtgatatatccatacgata

SEQ ID NO: 24899 - DNA, 20 bp, Artificial Sequence
  Description of Artificial Sequence: Synthetic oligonucleotide
  Target: LAMA2; (+) strand; PAM type: NNGRRT; PAM sequence: TAGAAT
tatagaatgatagatactat

SEQ ID NO: 24900 - DNA, 20 bp, Artificial Sequence
  Description of Artificial Sequence: Synthetic oligonucleotide
  Target: LAMA2; (+) strand; PAM type: NNGRRT; PAM sequence: TAGAAT
gatagatactattagaatga

SEQ ID NO: 24901 - DNA, 20 bp, Artificial Sequence
  Description of Artificial Sequence: Synthetic oligonucleotide
  Target: LAMA2; (+) strand; PAM type: NNGRRT; PAM sequence: AGGAAT
aatattattcagagatgaaa

SEQ ID NO: 24902 - DNA, 20 bp, Artificial Sequence
  Description of Artificial Sequence: Synthetic oligonucleotide
  Target: LAMA2; (+) strand; PAM type: NNGRRT; PAM sequence: GAGAAT
attgtatttacatgaaatat

SEQ ID NO: 24903 - DNA, 20 bp, Artificial Sequence
  Description of Artificial Sequence: Synthetic oligonucleotide
  Target: LAMA2; (+) strand; PAM type: NNGRRT; PAM sequence: GGGAAT
atcagcagttgcctttttct

SEQ ID NO: 24904 - DNA, 20 bp, Artificial Sequence
  Description of Artificial Sequence: Synthetic oligonucleotide
  Target: LAMA2; (+) strand; PAM type: NNGRRT; PAM sequence: GGGGAT
ttttctgggaatggaggttg

SEQ ID NO: 24905 - DNA, 20 bp, Artificial Sequence
  Description of Artificial Sequence: Synthetic oligonucleotide
  Target: LAMA2; (+) strand; PAM type: NNGRRT; PAM sequence: TTGGGT
ttatagaaatagactatgta

SEQ ID NO: 24906 - DNA, 20 bp, Artificial Sequence
  Description of Artificial Sequence: Synthetic oligonucleotide
  Target: LAMA2; (+) strand; PAM type: NNGRRT; PAM sequence: ATGAGT
tgtattgggtactttgtcag

SEQ ID NO: 24907 - DNA, 20 bp, Artificial Sequence
  Description of Artificial Sequence: Synthetic oligonucleotide
  Target: LAMA2; (+) strand; PAM type: NNGRRT; PAM sequence: TTGGGT
atatactggttcattttaat

SEQ ID NO: 24908 - DNA, 20 bp, Artificial Sequence
  Description of Artificial Sequence: Synthetic oligonucleotide
  Target: LAMA2; (+) strand; PAM type: NNGRRT; PAM sequence: AAGAAT
ttaatttgggttaaatattt

SEQ ID NO: 24909 - DNA, 20 bp, Artificial Sequence
  Description of Artificial Sequence: Synthetic oligonucleotide
  Target: LAMA2; (+) strand; PAM type: NNGRRT; PAM sequence: CTGAAT
ttaagaattttttccatgtg

SEQ ID NO: 24910 - DNA, 20 bp, Artificial Sequence
  Description of Artificial Sequence: Synthetic oligonucleotide
  Target: LAMA2; (+) strand; PAM type: NNGRRT; PAM sequence: TAGAGT
catgtgctgaatcaaacaag

SEQ ID NO: 24911 - DNA, 20 bp, Artificial Sequence
  Description of Artificial Sequence: Synthetic oligonucleotide
  Target: LAMA2; (+) strand; PAM type: NNGRRT; PAM sequence: GGGGAT
tgggaaaatgtaaagaggaa

SEQ ID NO: 24912 - DNA, 20 bp, Artificial Sequence
  Description of Artificial Sequence: Synthetic oligonucleotide
  Target: LAMA2; (+) strand; PAM type: NNGRRT; PAM sequence: TAGAGT
gtatattttcattccacaat

SEQ ID NO: 24913 - DNA, 20 bp, Artificial Sequence
  Description of Artificial Sequence: Synthetic oligonucleotide
  Target: LAMA2; (+) strand; PAM type: NNGRRT; PAM sequence: TTGAGT
tatttattagattaactaat

SEQ ID NO: 24914 - DNA, 20 bp, Artificial Sequence
  Description of Artificial Sequence: Synthetic oligonucleotide
  Target: LAMA2; (+) strand; PAM type: NNGRRT; PAM sequence: TTGAGT
gagttgaggccacaacatgg

SEQ ID NO: 24915 - DNA, 20 bp, Artificial Sequence
  Description of Artificial Sequence: Synthetic oligonucleotide
  Target: LAMA2; (+) strand; PAM type: NNGRRT; PAM sequence: TTGAGT
tatttattagattaactaat

SEQ ID NO: 24916 - DNA, 20 bp, Artificial Sequence
  Description of Artificial Sequence: Synthetic oligonucleotide
  Target: LAMA2; (+) strand; PAM type: NNGRRT; PAM sequence: TTGAGT
gagttgaggccacaacgtgg

SEQ ID NO: 24917 - DNA, 20 bp, Artificial Sequence
  Description of Artificial Sequence: Synthetic oligonucleotide
  Target: LAMA2; (+) strand; PAM type: NNGRRT; PAM sequence: GAGAAT
tgagtaaaaataatcattct

SEQ ID NO: 24918 - DNA, 20 bp, Artificial Sequence
  Description of Artificial Sequence: Synthetic oligonucleotide
  Target: LAMA2; (+) strand; PAM type: NNGRRT; PAM sequence: TAGGGT
ataggtttagaaggttaatt

SEQ ID NO: 24919 - DNA, 20 bp, Artificial Sequence
  Description of Artificial Sequence: Synthetic oligonucleotide
  Target: LAMA2; (+) strand; PAM type: NNGRRT; PAM sequence: AAGGAT
aaatttccacagtaaggtaa

SEQ ID NO: 24920 - DNA, 20 bp, Artificial Sequence
  Description of Artificial Sequence: Synthetic oligonucleotide
  Target: LAMA2; (+) strand; PAM type: NNGRRT; PAM sequence: ATGAAT
tattaacagaactaaaagac

SEQ ID NO: 24921 - DNA, 20 bp, Artificial Sequence
  Description of Artificial Sequence: Synthetic oligonucleotide
  Target: LAMA2; (+) strand; PAM type: NNGRRT; PAM sequence: AAGAAT
aaaagacatgaataatatta

SEQ ID NO: 24922 - DNA, 20 bp, Artificial Sequence
  Description of Artificial Sequence: Synthetic oligonucleotide
  Target: LAMA2; (+) strand; PAM type: NNGRRT; PAM sequence: TTGGGT
gtatttcaacatataaatgc

SEQ ID NO: 24923 - DNA, 20 bp, Artificial Sequence
  Description of Artificial Sequence: Synthetic oligonucleotide
  Target: LAMA2; (+) strand; PAM type: NNGRRT; PAM sequence: TGGGAT
gatgaccccagtgtaatcga

SEQ ID NO: 24924 - DNA, 20 bp, Artificial Sequence
  Description of Artificial Sequence: Synthetic oligonucleotide
  Target: LAMA2; (+) strand; PAM type: NNGRRT; PAM sequence: ATGGGT
atctttacacccattgacaa

SEQ ID NO: 24925 - DNA, 20 bp, Artificial Sequence
  Description of Artificial Sequence: Synthetic oligonucleotide
  Target: LAMA2; (+) strand; PAM type: NNGRRT; PAM sequence: CGGAGT
cctgcagtacccaccgttcc

SEQ ID NO: 24926 - DNA, 20 bp, Artificial Sequence
  Description of Artificial Sequence: Synthetic oligonucleotide
  Target: LAMA2; (+) strand; PAM type: NNGRRT; PAM sequence: TGGAGT
gcgactcacaaaatccatta

SEQ ID NO: 24927 - DNA, 20 bp, Artificial Sequence
  Description of Artificial Sequence: Synthetic oligonucleotide
  Target: LAMA2; (+) strand; PAM type: NNGRRT; PAM sequence: AGGAAT
atgaaaaaacaacaaaaact

SEQ ID NO: 24928 - DNA, 20 bp, Artificial Sequence
  Description of Artificial Sequence: Synthetic oligonucleotide
  Target: LAMA2; (+) strand; PAM type: NNGRRT; PAM sequence: TTGAGT
taggaatggcagtagttctg

SEQ ID NO: 24929 - DNA, 20 bp, Artificial Sequence
  Description of Artificial Sequence: Synthetic oligonucleotide
  Target: LAMA2; (+) strand; PAM type: NNGRRT; PAM sequence: GTGAGT
ggactggaagagatgaaatt

SEQ ID NO: 24930 - DNA, 20 bp, Artificial Sequence
  Description of Artificial Sequence: Synthetic oligonucleotide
  Target: LAMA2; (+) strand; PAM type: NNGRRT; PAM sequence: CAGGGT
caggaacatttcagggacgc

SEQ ID NO: 24931 - DNA, 20 bp, Artificial Sequence
  Description of Artificial Sequence: Synthetic oligonucleotide
  Target: LAMA2; (+) strand; PAM type: NNGRRT; PAM sequence: GGGGAT
ttctcagacactctggcctt

SEQ ID NO: 24932 - DNA, 20 bp, Artificial Sequence
  Description of Artificial Sequence: Synthetic oligonucleotide
  Target: LAMA2; (+) strand; PAM type: NNGRRT; PAM sequence: TTGGAT
actctggccttggggatgtc

SEQ ID NO: 24933 - DNA, 20 bp, Artificial Sequence
  Description of Artificial Sequence: Synthetic oligonucleotide
  Target: LAMA2; (+) strand; PAM type: NNGRRT; PAM sequence: AGGGAT
aaataatgttttccatgtgt

SEQ ID NO: 24934 - DNA, 20 bp, Artificial Sequence
  Description of Artificial Sequence: Synthetic oligonucleotide
  Target: LAMA2; (+) strand; PAM type: NNGRRT; PAM sequence: AGGAAT
ttcagataccaggtcaagct

SEQ ID NO: 24935 - DNA, 20 bp, Artificial Sequence
  Description of Artificial Sequence: Synthetic oligonucleotide
  Target: LAMA2; (+) strand; PAM type: NNGRRT; PAM sequence: GAGGAT
gaaggagcgctctaggaaag

SEQ ID NO: 24936 - DNA, 20 bp, Artificial Sequence
  Description of Artificial Sequence: Synthetic oligonucleotide
  Target: LAMA2; (+) strand; PAM type: NNGRRT; PAM sequence: GAGAGT
gccgcgtgcccatggaaggc

SEQ ID NO: 24937 - DNA, 20 bp, Artificial Sequence
  Description of Artificial Sequence: Synthetic oligonucleotide
  Target: LAMA2; (+) strand; PAM type: NNGRRT; PAM sequence: AGGAGT
cccatggaaggcgagagtgg

SEQ ID NO: 24938 - DNA, 20 bp, Artificial Sequence
  Description of Artificial Sequence: Synthetic oligonucleotide
  Target: LAMA2; (+) strand; PAM type: NNGRRT; PAM sequence: GTGGAT
actcctctggctcccgagaa

SEQ ID NO: 24939 - DNA, 20 bp, Artificial Sequence
  Description of Artificial Sequence: Synthetic oligonucleotide
  Target: LAMA2; (+) strand; PAM type: NNGRRT; PAM sequence: CGGGGT
actacgatgccgggagccgc

SEQ ID NO: 24940 - DNA, 20 bp, Artificial Sequence
  Description of Artificial Sequence: Synthetic oligonucleotide
  Target: LAMA2; (+) strand; PAM type: NNGRRT; PAM sequence: TTGGGT
ggtacagtcgaggcatgggc

SEQ ID NO: 24941 - DNA, 20 bp, Artificial Sequence
  Description of Artificial Sequence: Synthetic oligonucleotide
  Target: LAMA2; (+) strand; PAM type: NNGRRT; PAM sequence: GAGAGT
ctcacttcttccactcttcc

SEQ ID NO: 24942 - DNA, 20 bp, Artificial Sequence
  Description of Artificial Sequence: Synthetic oligonucleotide
  Target: LAMA2; (+) strand; PAM type: NNGRRT; PAM sequence: GAGAGT
gccgtcttgcttcgccttca

SEQ ID NO: 24943 - DNA, 20 bp, Artificial Sequence
  Description of Artificial Sequence: Synthetic oligonucleotide
  Target: LAMA2; (+) strand; PAM type: NNGRRT; PAM sequence: GGGAAT
ccatgagagcgtagtgtagg

SEQ ID NO: 24944 - DNA, 20 bp, Artificial Sequence
  Description of Artificial Sequence: Synthetic oligonucleotide
  Target: LAMA2; (+) strand; PAM type: NNGRRT; PAM sequence: GGGAGT
taagtcctgcaaaaggaacg

SEQ ID NO: 24945 - DNA, 20 bp, Artificial Sequence
  Description of Artificial Sequence: Synthetic oligonucleotide
  Target: LAMA2; (+) strand; PAM type: NNGRRT; PAM sequence: AAGAAT
ctttttccaattggaaaaaa

SEQ ID NO: 24946 - DNA, 20 bp, Artificial Sequence
  Description of Artificial Sequence: Synthetic oligonucleotide
  Target: LAMA2; (+) strand; PAM type: NNGRRT; PAM sequence: GAGGGT
gttcatcctgggactttatg

SEQ ID NO: 24947 - DNA, 20 bp, Artificial Sequence
  Description of Artificial Sequence: Synthetic oligonucleotide
  Target: LAMA2; (+) strand; PAM type: NNGRRT; PAM sequence: CAGGAT
tttgttttcaacttttaaaa

SEQ ID NO: 24948 - DNA, 20 bp, Artificial Sequence
  Description of Artificial Sequence: Synthetic oligonucleotide
  Target: LAMA2; (+) strand; PAM type: NNGRRT; PAM sequence: GGGAGT
ctctcatttctgaaactttg

SEQ ID NO: 24949 - DNA, 20 bp, Artificial Sequence
  Description of Artificial Sequence: Synthetic oligonucleotide
  Target: LAMA2; (+) strand; PAM type: NNGRRT; PAM sequence: AAGAGT
gaaactttggggagtctttg

SEQ ID NO: 24950 - DNA, 20 bp, Artificial Sequence
  Description of Artificial Sequence: Synthetic oligonucleotide
  Target: LAMA2; (+) strand; PAM type: NNGRRT; PAM sequence: ATGAAT
tgaagagttattttattatc

SEQ ID NO: 24951 - DNA, 20 bp, Artificial Sequence
  Description of Artificial Sequence: Synthetic oligonucleotide
  Target: LAMA2; (+) strand; PAM type: NNGRRT; PAM sequence: AAGAGT
aatatgaaaatgtttaacct

SEQ ID NO: 24952 - DNA, 20 bp, Artificial Sequence
  Description of Artificial Sequence: Synthetic oligonucleotide
  Target: LAMA2; (+) strand; PAM type: NNGRRT; PAM sequence: CTGAAT
ttttaaaagttttaatgagg

SEQ ID NO: 24953 - DNA, 20 bp, Artificial Sequence
  Description of Artificial Sequence: Synthetic oligonucleotide
  Target: LAMA2; (+) strand; PAM type: NNGRRT; PAM sequence: AGGAGT
tttagcagtactatttttta

SEQ ID NO: 24954 - DNA, 20 bp, Artificial Sequence
  Description of Artificial Sequence: Synthetic oligonucleotide
  Target: LAMA2; (+) strand; PAM type: NNGRRT; PAM sequence: TGGAAT
aactccctgattaaaattct

SEQ ID NO: 24955 - DNA, 20 bp, Artificial Sequence
  Description of Artificial Sequence: Synthetic oligonucleotide
  Target: LAMA2; (+) strand; PAM type: NNGRRT; PAM sequence: GAGAGT
acttaattaatataatttac

SEQ ID NO: 24956 - DNA, 20 bp, Artificial Sequence
  Description of Artificial Sequence: Synthetic oligonucleotide
  Target: LAMA2; (+) strand; PAM type: NNGRRT; PAM sequence: AAGAGT
taatttacgagagtgatttt

SEQ ID NO: 24957 - DNA, 20 bp, Artificial Sequence
  Description of Artificial Sequence: Synthetic oligonucleotide
  Target: LAMA2; (+) strand; PAM type: NNGRRT; PAM sequence: TGGAAT
caccaatccttatgtccact

SEQ ID NO: 24958 - DNA, 20 bp, Artificial Sequence
  Description of Artificial Sequence: Synthetic oligonucleotide
  Target: LAMA2; (+) strand; PAM type: NNGRRT; PAM sequence: CAGAGT
gggcagaaactcaaagcatg

SEQ ID NO: 24959 - DNA, 20 bp, Artificial Sequence
  Description of Artificial Sequence: Synthetic oligonucleotide
  Target: LAMA2; (+) strand; PAM type: NNGRRT; PAM sequence: AAGGAT
aaactcaaagcatgcagagt

SEQ ID NO: 24960 - DNA, 20 bp, Artificial Sequence
  Description of Artificial Sequence: Synthetic oligonucleotide
  Target: LAMA2; (+) strand; PAM type: NNGRRT; PAM sequence: AAGAAT
ggatcaagtaaattgttgct

SEQ ID NO: 24961 - DNA, 20 bp, Artificial Sequence
  Description of Artificial Sequence: Synthetic oligonucleotide
  Target: LAMA2; (+) strand; PAM type: NNGRRT; PAM sequence: CAGGAT
agaattatcctgaacacaca

SEQ ID NO: 24962 - DNA, 20 bp, Artificial Sequence
  Description of Artificial Sequence: Synthetic oligonucleotide
  Target: LAMA2; (+) strand; PAM type: NNGRRT; PAM sequence: GTGAAT
tgacccaggcacaagatgaa

SEQ ID NO: 24963 - DNA, 20 bp, Artificial Sequence
  Description of Artificial Sequence: Synthetic oligonucleotide
  Target: LAMA2; (+) strand; PAM type: NNGRRT; PAM sequence: AAGGGT
gatgaagtgaattcaggagg

SEQ ID NO: 24964 - DNA, 20 bp, Artificial Sequence
  Description of Artificial Sequence: Synthetic oligonucleotide
  Target: LAMA2; (+) strand; PAM type: NNGRRT; PAM sequence: AGGAAT
cttaaatgctacatacaata

SEQ ID NO: 24965 - DNA, 20 bp, Artificial Sequence
  Description of Artificial Sequence: Synthetic oligonucleotide
  Target: LAMA2; (+) strand; PAM type: NNGRRT; PAM sequence: AAGGAT
atatatctggaggttggctc

SEQ ID NO: 24966 - DNA, 20 bp, Artificial Sequence
  Description of Artificial Sequence: Synthetic oligonucleotide
  Target: LAMA2; (+) strand; PAM type: NNGRRT; PAM sequence: TTGGAT
aaattcatgaaactttaaaa

SEQ ID NO: 24967 - DNA, 20 bp, Artificial Sequence
  Description of Artificial Sequence: Synthetic oligonucleotide
  Target: LAMA2; (+) strand; PAM type: NNGRRT; PAM sequence: CTGAAT
cacttccggtattgtttgtg

SEQ ID NO: 24968 - DNA, 20 bp, Artificial Sequence
  Description of Artificial Sequence: Synthetic oligonucleotide
  Target: LAMA2; (+) strand; PAM type: NNGRRT; PAM sequence: CGGGAT
caagccctctgtgaaaatca

SEQ ID NO: 24969 - DNA, 20 bp, Artificial Sequence
  Description of Artificial Sequence: Synthetic oligonucleotide
  Target: LAMA2; (+) strand; PAM type: NNGRRT; PAM sequence: ATGAGT
ctctgtgaaaatcacgggat

SEQ ID NO: 24970 - DNA, 20 bp, Artificial Sequence
  Description of Artificial Sequence: Synthetic oligonucleotide
  Target: LAMA2; (+) strand; PAM type: NNGRRT; PAM sequence: AAGGGT
ggatatgagtttgactggag

SEQ ID NO: 24971 - DNA, 20 bp, Artificial Sequence
  Description of Artificial Sequence: Synthetic oligonucleotide
  Target: LAMA2; (+) strand; PAM type: NNGRRT; PAM sequence: AAGAAT
taattcgataccactttatt

SEQ ID NO: 24972 - DNA, 20 bp, Artificial Sequence
  Description of Artificial Sequence: Synthetic oligonucleotide
  Target: LAMA2; (+) strand; PAM type: NNGRRT; PAM sequence: ATGAAT
ctttattaagaatttttgac

SEQ ID NO: 24973 - DNA, 20 bp, Artificial Sequence
  Description of Artificial Sequence: Synthetic oligonucleotide
  Target: LAMA2; (+) strand; PAM type: NNGRRT; PAM sequence: TTGAGT
accatttttagatgttgcag

SEQ ID NO: 24974 - DNA, 20 bp, Artificial Sequence
  Description of Artificial Sequence: Synthetic oligonucleotide
  Target: LAMA2; (+) strand; PAM type: NNGRRT; PAM sequence: ATGAAT
atagcatactcgattgtagt

SEQ ID NO: 24975 - DNA, 20 bp, Artificial Sequence
  Description of Artificial Sequence: Synthetic oligonucleotide
  Target: LAMA2; (+) strand; PAM type: NNGRRT; PAM sequence: AAGAAT
atgaatagcattgattcagc

SEQ ID NO: 24976 - DNA, 20 bp, Artificial Sequence
  Description of Artificial Sequence: Synthetic oligonucleotide
  Target: LAMA2; (+) strand; PAM type: NNGRRT; PAM sequence: TAGAAT
tatatttaaaattgacgaaa

SEQ ID NO: 24977 - DNA, 20 bp, Artificial Sequence
  Description of Artificial Sequence: Synthetic oligonucleotide
  Target: LAMA2; (+) strand; PAM type: NNGRRT; PAM sequence: GTGAAT
aaatgttttctgatattctt

SEQ ID NO: 24978 - DNA, 20 bp, Artificial Sequence
  Description of Artificial Sequence: Synthetic oligonucleotide
  Target: LAMA2; (+) strand; PAM type: NNGRRT; PAM sequence: AAGAAT
tgattgaaaaatagttcaca

SEQ ID NO: 24979 - DNA, 20 bp, Artificial Sequence
  Description of Artificial Sequence: Synthetic oligonucleotide
  Target: LAMA2; (+) strand; PAM type: NNGRRT; PAM sequence: GTGGAT
ttcacaaagaatattgcata

SEQ ID NO: 24980 - DNA, 20 bp, Artificial Sequence
  Description of Artificial Sequence: Synthetic oligonucleotide
  Target: LAMA2; (+) strand; PAM type: NNGRRT; PAM sequence: ATGAAT
aggtctctatagccttgacc

SEQ ID NO: 24981 - DNA, 20 bp, Artificial Sequence
  Description of Artificial Sequence: Synthetic oligonucleotide
  Target: LAMA2; (+) strand; PAM type: NNGRRT; PAM sequence: AGGAAT
gttacattgtttatatgttt

SEQ ID NO: 24982 - DNA, 20 bp, Artificial Sequence
  Description of Artificial Sequence: Synthetic oligonucleotide
  Target: LAMA2; (+) strand; PAM type: NNGRRT; PAM sequence: ATGAAT
cattgtttatatgtttagga

SEQ ID NO: 24983 - DNA, 20 bp, Artificial Sequence
  Description of Artificial Sequence: Synthetic oligonucleotide
  Target: LAMA2; (+) strand; PAM type: NNGRRT; PAM sequence: CTGAAT
acaggaagagaaaggccact

SEQ ID NO: 24984 - DNA, 20 bp, Artificial Sequence
  Description of Artificial Sequence: Synthetic oligonucleotide
  Target: LAMA2; (+) strand; PAM type: NNGRRT; PAM sequence: TTGGGT
gtctgttgcttaacacacat

SEQ ID NO: 24985 - DNA, 20 bp, Artificial Sequence
  Description of Artificial Sequence: Synthetic oligonucleotide
  Target: LAMA2; (+) strand; PAM type: NNGRRT; PAM sequence: ATGGGT
tttgggtatttcattgacaa

SEQ ID NO: 24986 - DNA, 20 bp, Artificial Sequence
  Description of Artificial Sequence: Synthetic oligonucleotide
  Target: LAMA2; (+) strand; PAM type: NNGRRT; PAM sequence: CAGAAT
tagatgcagagaagggagag

SEQ ID NO: 24987 - DNA, 20 bp, Artificial Sequence
  Description of Artificial Sequence: Synthetic oligonucleotide
  Target: LAMA2; (+) strand; PAM type: NNGRRT; PAM sequence: AAGAGT
gaagggagagcagaatggtt

SEQ ID NO: 24988 - DNA, 20 bp, Artificial Sequence
  Description of Artificial Sequence: Synthetic oligonucleotide
  Target: LAMA2; (+) strand; PAM type: NNGRRT; PAM sequence: AGGAAT
tctgagaagattttcagaag

SEQ ID NO: 24989 - DNA, 20 bp, Artificial Sequence
  Description of Artificial Sequence: Synthetic oligonucleotide
  Target: LAMA2; (+) strand; PAM type: NNGRRT; PAM sequence: AAGAGT
gactgtcctcaaattttcag

SEQ ID NO: 24990 - DNA, 20 bp, Artificial Sequence
  Description of Artificial Sequence: Synthetic oligonucleotide
  Target: LAMA2; (+) strand; PAM type: NNGRRT; PAM sequence: GTGGAT
gactattctaaaggctgaag

SEQ ID NO: 24991 - DNA, 20 bp, Artificial Sequence
  Description of Artificial Sequence: Synthetic oligonucleotide
  Target: LAMA2; (+) strand; PAM type: NNGRRT; PAM sequence: TTGAAT
aacatgacaaacaaccaggt

SEQ ID NO: 24992 - DNA, 20 bp, Artificial Sequence
  Description of Artificial Sequence: Synthetic oligonucleotide
  Target: LAMA2; (+) strand; PAM type: NNGRRT; PAM sequence: TTGAGT
cacttcctccccatgccatt

SEQ ID NO: 24993 - DNA, 20 bp, Artificial Sequence
  Description of Artificial Sequence: Synthetic oligonucleotide
  Target: LAMA2; (+) strand; PAM type: NNGRRT; PAM sequence: CTGAAT
tttgagttgttcagaaatag

SEQ ID NO: 24994 - DNA, 20 bp, Artificial Sequence
  Description of Artificial Sequence: Synthetic oligonucleotide
  Target: LAMA2; (+) strand; PAM type: NNGRRT; PAM sequence: AGGGAT
gatcagatgtacagttagtg

SEQ ID NO: 24995 - DNA, 20 bp, Artificial Sequence
  Description of Artificial Sequence: Synthetic oligonucleotide
  Target: LAMA2; (+) strand; PAM type: NNGRRT; PAM sequence: GGGAAT
tagtgagggatgctttatga

SEQ ID NO: 24996 - DNA, 20 bp, Artificial Sequence
  Description of Artificial Sequence: Synthetic oligonucleotide
  Target: LAMA2; (+) strand; PAM type: NNGRRT; PAM sequence: TAGAGT
atattatagtctattgcttt

SEQ ID NO: 24997 - DNA, 20 bp, Artificial Sequence
  Description of Artificial Sequence: Synthetic oligonucleotide
  Target: LAMA2; (+) strand; PAM type: NNGRRT; PAM sequence: CTGAAT
gcatacttgcatttaaattt

SEQ ID NO: 24998 - DNA, 20 bp, Artificial Sequence
  Description of Artificial Sequence: Synthetic oligonucleotide
  Target: LAMA2; (+) strand; PAM type: NNGRRT; PAM sequence: TGGGAT
atgtgtttttaaatcccttc

SEQ ID NO: 24999 - DNA, 20 bp, Artificial Sequence
  Description of Artificial Sequence: Synthetic oligonucleotide
  Target: LAMA2; (+) strand; PAM type: NNGRRT; PAM sequence: AAGAAT
aatcctcacacatttttggc

SEQ ID NO: 25000 - DNA, 20 bp, Artificial Sequence
  Description of Artificial Sequence: Synthetic oligonucleotide
  Target: LAMA2; (+) strand; PAM type: NNGRRT; PAM sequence: ATGGAT
agaatacttagatatttagc

SEQ ID NO: 25001 - DNA, 20 bp, Artificial Sequence
  Description of Artificial Sequence: Synthetic oligonucleotide
  Target: LAMA2; (+) strand; PAM type: NNGRRT; PAM sequence: AAGAAT
catcttgtgttataacacgc

SEQ ID NO: 25002 - DNA, 20 bp, Artificial Sequence
  Description of Artificial Sequence: Synthetic oligonucleotide
  Target: LAMA2; (+) strand; PAM type: NNGRRT; PAM sequence: GGGGAT
aattacctgagaaattttca

SEQ ID NO: 25003 - DNA, 20 bp, Artificial Sequence
  Description of Artificial Sequence: Synthetic oligonucleotide
  Target: LAMA2; (+) strand; PAM type: NNGRRT; PAM sequence: TGGAAT
attcatagtggccataaacc

SEQ ID NO: 25004 - DNA, 20 bp, Artificial Sequence
  Description of Artificial Sequence: Synthetic oligonucleotide
  Target: LAMA2; (+) strand; PAM type: NNGRRT; PAM sequence: CTGAAT
ttatatgaacatattcaaca

SEQ ID NO: 25005 - DNA, 20 bp, Artificial Sequence
  Description of Artificial Sequence: Synthetic oligonucleotide
  Target: LAMA2; (+) strand; PAM type: NNGRRT; PAM sequence: TAGAAT
actgaatattatagatgtga

SEQ ID NO: 25006 - DNA, 20 bp, Artificial Sequence
  Description of Artificial Sequence: Synthetic oligonucleotide
  Target: LAMA2; (+) strand; PAM type: NNGRRT; PAM sequence: TAGGAT
atcttaagatttttctaccc

SEQ ID NO: 25007 - DNA, 20 bp, Artificial Sequence
  Description of Artificial Sequence: Synthetic oligonucleotide
  Target: LAMA2; (+) strand; PAM type: NNGRRT; PAM sequence: CTGAAT
atttcatgcaaactaatgaa

SEQ ID NO: 25008 - DNA, 20 bp, Artificial Sequence
  Description of Artificial Sequence: Synthetic oligonucleotide
  Target: LAMA2; (+) strand; PAM type: NNGRRT; PAM sequence: AGGGAT
aatgaactgaatctatatca

SEQ ID NO: 25009 - DNA, 20 bp, Artificial Sequence
  Description of Artificial Sequence: Synthetic oligonucleotide
  Target: LAMA2; (+) strand; PAM type: NNGRRT; PAM sequence: GTGGGT
cagcactttgggaggcctag

SEQ ID NO: 25010 - DNA, 20 bp, Artificial Sequence
  Description of Artificial Sequence: Synthetic oligonucleotide
  Target: LAMA2; (+) strand; PAM type: NNGRRT; PAM sequence: GTGGAT
actttgggaggcctaggtgg

SEQ ID NO: 25011 - DNA, 20 bp, Artificial Sequence
  Description of Artificial Sequence: Synthetic oligonucleotide
  Target: LAMA2; (+) strand; PAM type: NNGRRT; PAM sequence: AGGAGT
tgggtggatcaccttaggtc

SEQ ID NO: 25012 - DNA, 20 bp, Artificial Sequence
  Description of Artificial Sequence: Synthetic oligonucleotide
  Target: LAMA2; (+) strand; PAM type: NNGRRT; PAM sequence: GAGAAT
tactcaggaggctgaggcag

SEQ ID NO: 25013 - DNA, 20 bp, Artificial Sequence
  Description of Artificial Sequence: Synthetic oligonucleotide
  Target: LAMA2; (+) strand; PAM type: NNGRRT; PAM sequence: TCGGGT
taacttctaatctagaagat

SEQ ID NO: 25014 - DNA, 20 bp, Artificial Sequence
  Description of Artificial Sequence: Synthetic oligonucleotide
  Target: LAMA2; (+) strand; PAM type: NNGRRT; PAM sequence: TAGGAT
taatctagaagattcgggtt

SEQ ID NO: 25015 - DNA, 20 bp, Artificial Sequence
  Description of Artificial Sequence: Synthetic oligonucleotide
  Target: LAMA2; (+) strand; PAM type: NNGRRT; PAM sequence: AGGAAT
ttgagcctcgatagctaaac

SEQ ID NO: 25016 - DNA, 20 bp, Artificial Sequence
  Description of Artificial Sequence: Synthetic oligonucleotide
  Target: LAMA2; (+) strand; PAM type: NNGRRT; PAM sequence: CAGAGT
cagtaaatgagaaaacaaga

SEQ ID NO: 25017 - DNA, 20 bp, Artificial Sequence
  Description of Artificial Sequence: Synthetic oligonucleotide
  Target: LAMA2; (+) strand; PAM type: NNGRRT; PAM sequence: CTGAAT
ggctttccccattggtaaga

SEQ ID NO: 25018 - DNA, 20 bp, Artificial Sequence
  Description of Artificial Sequence: Synthetic oligonucleotide
  Target: LAMA2; (+) strand; PAM type: NNGRRT; PAM sequence: TGGGGT
gaagttgtgaaggaaattgg

SEQ ID NO: 25019 - DNA, 20 bp, Artificial Sequence
  Description of Artificial Sequence: Synthetic oligonucleotide
  Target: LAMA2; (+) strand; PAM type: NNGRRT; PAM sequence: TGGAAT
ggggttgggcctatatgcat

SEQ ID NO: 25020 - DNA, 20 bp, Artificial Sequence
  Description of Artificial Sequence: Synthetic oligonucleotide
  Target: LAMA2; (+) strand; PAM type: NNGRRT; PAM sequence: ATGAAT
tatgcattggaatgtggtaa

SEQ ID NO: 25021 - DNA, 20 bp, Artificial Sequence
  Description of Artificial Sequence: Synthetic oligonucleotide
  Target: LAMA2; (+) strand; PAM type: NNGRRT; PAM sequence: ATGAAT
cattggaatgtggtaaatga

SEQ ID NO: 25022 - DNA, 20 bp, Artificial Sequence
  Description of Artificial Sequence: Synthetic oligonucleotide
  Target: LAMA2; (+) strand; PAM type: NNGRRT; PAM sequence: GTGAGT
taaatgaatgaatgtttaca

SEQ ID NO: 25023 - DNA, 20 bp, Artificial Sequence
  Description of Artificial Sequence: Synthetic oligonucleotide
  Target: LAMA2; (+) strand; PAM type: NNGRRT; PAM sequence: TGGGAT
ttgtggaactaatatttagt

SEQ ID NO: 25024 - DNA, 20 bp, Artificial Sequence
  Description of Artificial Sequence: Synthetic oligonucleotide
  Target: LAMA2; (+) strand; PAM type: NNGRRT; PAM sequence: ATGAAT
gatgagcagacaggactatg

SEQ ID NO: 25025 - DNA, 20 bp, Artificial Sequence
  Description of Artificial Sequence: Synthetic oligonucleotide
  Target: LAMA2; (+) strand; PAM type: NNGRRT; PAM sequence: CGGGGT
tcctggacaaacaaatacaa

SEQ ID NO: 25026 - DNA, 20 bp, Artificial Sequence
  Description of Artificial Sequence: Synthetic oligonucleotide
  Target: LAMA2; (+) strand; PAM type: NNGRRT; PAM sequence: AGGAGT
acaacggggtaaggacagtc

SEQ ID NO: 25027 - DNA, 20 bp, Artificial Sequence
  Description of Artificial Sequence: Synthetic oligonucleotide
  Target: LAMA2; (+) strand; PAM type: NNGRRT; PAM sequence: AGGAAT
taaggacagtcaggagttct

SEQ ID NO: 25028 - DNA, 20 bp, Artificial Sequence
  Description of Artificial Sequence: Synthetic oligonucleotide
  Target: LAMA2; (+) strand; PAM type: NNGRRT; PAM sequence: GAGGAT
gtaaaggttgacctctttga

SEQ ID NO: 25029 - DNA, 20 bp, Artificial Sequence
  Description of Artificial Sequence: Synthetic oligonucleotide
  Target: LAMA2; (+) strand; PAM type: NNGRRT; PAM sequence: GGGAGT
caaacacttgaagatgacgt

SEQ ID NO: 25030 - DNA, 20 bp, Artificial Sequence
  Description of Artificial Sequence: Synthetic oligonucleotide
  Target: LAMA2; (+) strand; PAM type: NNGRRT; PAM sequence: AAGAGT
tttgtgcagttatcaggggg

SEQ ID NO: 25031 - DNA, 20 bp, Artificial Sequence
  Description of Artificial Sequence: Synthetic oligonucleotide
  Target: LAMA2; (+) strand; PAM type: NNGRRT; PAM sequence: GAGGAT
tgtacagggagcaggcctat

SEQ ID NO: 25032 - DNA, 20 bp, Artificial Sequence
  Description of Artificial Sequence: Synthetic oligonucleotide
  Target: LAMA2; (+) strand; PAM type: NNGRRT; PAM sequence: CTGAGT
taaagattttgcctttttgt

SEQ ID NO: 25033 - DNA, 20 bp, Artificial Sequence
  Description of Artificial Sequence: Synthetic oligonucleotide
  Target: LAMA2; (+) strand; PAM type: NNGRRT; PAM sequence: GTGAGT
agtgagatgaggaggcatcg

SEQ ID NO: 25034 - DNA, 20 bp, Artificial Sequence
  Description of Artificial Sequence: Synthetic oligonucleotide
  Target: LAMA2; (+) strand; PAM type: NNGRRT; PAM sequence: CAGAGT
gaggcatcggtgagttttaa

SEQ ID NO: 25035 - DNA, 20 bp, Artificial Sequence
  Description of Artificial Sequence: Synthetic oligonucleotide
  Target: LAMA2; (+) strand; PAM type: NNGRRT; PAM sequence: ATGAAT
gttttaacagagttaaataa

SEQ ID NO: 25036 - DNA, 20 bp, Artificial Sequence
  Description of Artificial Sequence: Synthetic oligonucleotide
  Target: LAMA2; (+) strand; PAM type: NNGRRT; PAM sequence: TAGAAT
ctagaccaacagtccaagca

SEQ ID NO: 25037 - DNA, 20 bp, Artificial Sequence
  Description of Artificial Sequence: Synthetic oligonucleotide
  Target: LAMA2; (+) strand; PAM type: NNGRRT; PAM sequence: AAGGGT
tagaaatatgacagattttt

SEQ ID NO: 25038 - DNA, 20 bp, Artificial Sequence
  Description of Artificial Sequence: Synthetic oligonucleotide
  Target: LAMA2; (+) strand; PAM type: NNGRRT; PAM sequence: ATGAAT
gtatgcactttaaaacaaaa

SEQ ID NO: 25039 - DNA, 20 bp, Artificial Sequence
  Description of Artificial Sequence: Synthetic oligonucleotide
  Target: LAMA2; (+) strand; PAM type: NNGRRT; PAM sequence: TGGAGT
acatggacatataggtactt

SEQ ID NO: 25040 - DNA, 20 bp, Artificial Sequence
  Description of Artificial Sequence: Synthetic oligonucleotide
  Target: LAMA2; (+) strand; PAM type: NNGRRT; PAM sequence: AAGAAT
tccatttttgttactgtttt

SEQ ID NO: 25041 - DNA, 20 bp, Artificial Sequence
  Description of Artificial Sequence: Synthetic oligonucleotide
  Target: LAMA2; (+) strand; PAM type: NNGRRT; PAM sequence: TTGGAT
gaacaaaaaaggtaaaaaaa

SEQ ID NO: 25042 - DNA, 20 bp, Artificial Sequence
  Description of Artificial Sequence: Synthetic oligonucleotide
  Target: LAMA2; (+) strand; PAM type: NNGRRT; PAM sequence: GTGAAT
tttcccttagtattcttcct

SEQ ID NO: 25043 - DNA, 20 bp, Artificial Sequence
  Description of Artificial Sequence: Synthetic oligonucleotide
  Target: LAMA2; (+) strand; PAM type: NNGRRT; PAM sequence: CAGGGT
gatagtttgagacatatttt

SEQ ID NO: 25044 - DNA, 20 bp, Artificial Sequence
  Description of Artificial Sequence: Synthetic oligonucleotide
  Target: LAMA2; (+) strand; PAM type: NNGRRT; PAM sequence: GTGAGT
gtttgagacatattttcagg

SEQ ID NO: 25045 - DNA, 20 bp, Artificial Sequence
  Description of Artificial Sequence: Synthetic oligonucleotide
  Target: LAMA2; (+) strand; PAM type: NNGRRT; PAM sequence: ATGGGT
gcttgtcaaagatgtataat

SEQ ID NO: 25046 - DNA, 20 bp, Artificial Sequence
  Description of Artificial Sequence: Synthetic oligonucleotide
  Target: LAMA2; (+) strand; PAM type: NNGRRT; PAM sequence: TTGAGT
tgtttttctcctaagtaatc

SEQ ID NO: 25047 - DNA, 20 bp, Artificial Sequence
  Description of Artificial Sequence: Synthetic oligonucleotide
  Target: LAMA2; (+) strand; PAM type: NNGRRT; PAM sequence: GTGGAT
tctcctaagtaatcttgagt

SEQ ID NO: 25048 - DNA, 20 bp, Artificial Sequence
  Description of Artificial Sequence: Synthetic oligonucleotide
  Target: LAMA2; (+) strand; PAM type: NNGRRT; PAM sequence: TTGGAT
atatgggaactttatgctat

SEQ ID NO: 25049 - DNA, 20 bp, Artificial Sequence
  Description of Artificial Sequence: Synthetic oligonucleotide
  Target: LAMA2; (+) strand; PAM type: NNGRRT; PAM sequence: GAGGAT
gacatttacaaaagatcatt

SEQ ID NO: 25050 - DNA, 20 bp, Artificial Sequence
  Description of Artificial Sequence: Synthetic oligonucleotide
  Target: LAMA2; (+) strand; PAM type: NNGRRT; PAM sequence: ATGGGT
tcattgaggattgcctatta

SEQ ID NO: 25051 - DNA, 20 bp, Artificial Sequence
  Description of Artificial Sequence: Synthetic oligonucleotide
  Target: LAMA2; (+) strand; PAM type: NNGRRT; PAM sequence: TTGAGT
gctcttcatttagctgcgtc

SEQ ID NO: 25052 - DNA, 20 bp, Artificial Sequence
  Description of Artificial Sequence: Synthetic oligonucleotide
  Target: LAMA2; (+) strand; PAM type: NNGRRT; PAM sequence: TAGAAT
aaaaattccaatgcttattt

SEQ ID NO: 25053 - DNA, 20 bp, Artificial Sequence
  Description of Artificial Sequence: Synthetic oligonucleotide
  Target: LAMA2; (+) strand; PAM type: NNGRRT; PAM sequence: AAGGGT
aaataaaatgtgtagtcttg

SEQ ID NO: 25054 - DNA, 20 bp, Artificial Sequence
  Description of Artificial Sequence: Synthetic oligonucleotide
  Target: LAMA2; (+) strand; PAM type: NNGRRT; PAM sequence: AAGAAT
tactgtataatgaacccttt

SEQ ID NO: 25055 - DNA, 20 bp, Artificial Sequence
  Description of Artificial Sequence: Synthetic oligonucleotide
  Target: LAMA2; (+) strand; PAM type: NNGRRT; PAM sequence: GTGAAT
tagtcaatgtgtaaatgtca

SEQ ID NO: 25056 - DNA, 20 bp, Artificial Sequence
  Description of Artificial Sequence: Synthetic oligonucleotide
  Target: LAMA2; (+) strand; PAM type: NNGRRT; PAM sequence: AAGAAT
agaaccaaacagatatacct

SEQ ID NO: 25057 - DNA, 20 bp, Artificial Sequence
  Description of Artificial Sequence: Synthetic oligonucleotide
  Target: LAMA2; (+) strand; PAM type: NNGRRT; PAM sequence: GAGGGT
tccaatctcccagattttga

SEQ ID NO: 25058 - DNA, 20 bp, Artificial Sequence
  Description of Artificial Sequence: Synthetic oligonucleotide
  Target: LAMA2; (+) strand; PAM type: NNGRRT; PAM sequence: TTGAAT
gattttgtttatcaaaatct

SEQ ID NO: 25059 - DNA, 20 bp, Artificial Sequence
  Description of Artificial Sequence: Synthetic oligonucleotide
  Target: LAMA2; (+) strand; PAM type: NNGRRT; PAM sequence: TTGAAT
tgaataagaaaatctaaaaa

SEQ ID NO: 25060 - DNA, 20 bp, Artificial Sequence
  Description of Artificial Sequence: Synthetic oligonucleotide
  Target: LAMA2; (+) strand; PAM type: NNGRRT; PAM sequence: AAGAAT
tgacaaatgattatggacca

SEQ ID NO: 25061 - DNA, 20 bp, Artificial Sequence
  Description of Artificial Sequence: Synthetic oligonucleotide
  Target: LAMA2; (+) strand; PAM type: NNGRRT; PAM sequence: TCGAGT
attccaaggtataatccctt

SEQ ID NO: 25062 - DNA, 20 bp, Artificial Sequence
  Description of Artificial Sequence: Synthetic oligonucleotide
  Target: LAMA2; (+) strand; PAM type: NNGRRT; PAM sequence: TAGAGT
gtcctattctatagaagaaa

SEQ ID NO: 25063 - DNA, 20 bp, Artificial Sequence
  Description of Artificial Sequence: Synthetic oligonucleotide
  Target: LAMA2; (+) strand; PAM type: NNGRRT; PAM sequence: TAGAGT
tatagaagaaatagagttag

SEQ ID NO: 25064 - DNA, 20 bp, Artificial Sequence
  Description of Artificial Sequence: Synthetic oligonucleotide
  Target: LAMA2; (+) strand; PAM type: NNGRRT; PAM sequence: TTGGAT
ttctgtgcaattttcaatta

SEQ ID NO: 25065 - DNA, 20 bp, Artificial Sequence
  Description of Artificial Sequence: Synthetic oligonucleotide
  Target: LAMA2; (+) strand; PAM type: NNGRRT; PAM sequence: GAGAAT
atgaggctgaaagtttgaaa

SEQ ID NO: 25066 - DNA, 20 bp, Artificial Sequence
  Description of Artificial Sequence: Synthetic oligonucleotide
  Target: LAMA2; (+) strand; PAM type: NNGRRT; PAM sequence: CTGAAT
cgtggtacatatgtaaaaca

SEQ ID NO: 25067 - DNA, 20 bp, Artificial Sequence
  Description of Artificial Sequence: Synthetic oligonucleotide
  Target: LAMA2; (+) strand; PAM type: NNGRRT; PAM sequence: ATGAAT
ttttcaaaatgcctcaaaaa

SEQ ID NO: 25068 - DNA, 20 bp, Artificial Sequence
  Description of Artificial Sequence: Synthetic oligonucleotide
  Target: LAMA2; (+) strand; PAM type: NNGRRT; PAM sequence: AGGAAT
ttgagactgtttgtgaagga

SEQ ID NO: 25069 - DNA, 20 bp, Artificial Sequence
  Description of Artificial Sequence: Synthetic oligonucleotide
  Target: LAMA2; (+) strand; PAM type: NNGRRT; PAM sequence: TTGAAT
atacttaaacacacaagtat

SEQ ID NO: 25070 - DNA, 20 bp, Artificial Sequence
  Description of Artificial Sequence: Synthetic oligonucleotide
  Target: LAMA2; (+) strand; PAM type: NNGRRT; PAM sequence: TAGAAT
acaagtatttgaattctaat

SEQ ID NO: 25071 - DNA, 20 bp, Artificial Sequence
  Description of Artificial Sequence: Synthetic oligonucleotide
  Target: LAMA2; (+) strand; PAM type: NNGRRT; PAM sequence: CTGAAT
gtactcttctttggaggtaa

SEQ ID NO: 25072 - DNA, 20 bp, Artificial Sequence
  Description of Artificial Sequence: Synthetic oligonucleotide
  Target: LAMA2; (+) strand; PAM type: NNGRRT; PAM sequence: TCGGAT
gacttaggagaaggctagac

SEQ ID NO: 25073 - DNA, 20 bp, Artificial Sequence
  Description of Artificial Sequence: Synthetic oligonucleotide
  Target: LAMA2; (+) strand; PAM type: NNGRRT; PAM sequence: CTGAGT
actttactaagatcaaaagc

SEQ ID NO: 25074 - DNA, 20 bp, Artificial Sequence
  Description of Artificial Sequence: Synthetic oligonucleotide
  Target: LAMA2; (+) strand; PAM type: NNGRRT; PAM sequence: CGGAGT
agatcaaaagcctgagtcaa

SEQ ID NO: 25075 - DNA, 20 bp, Artificial Sequence
  Description of Artificial Sequence: Synthetic oligonucleotide
  Target: LAMA2; (+) strand; PAM type: NNGRRT; PAM sequence: TTGAAT
tttatctcattgccaagaga

SEQ ID NO: 25076 - DNA, 20 bp, Artificial Sequence
  Description of Artificial Sequence: Synthetic oligonucleotide
  Target: LAMA2; (+) strand; PAM type: NNGRRT; PAM sequence: AGGAAT
gtacaataaacgttttttct

SEQ ID NO: 25077 - DNA, 20 bp, Artificial Sequence
  Description of Artificial Sequence: Synthetic oligonucleotide
  Target: LAMA2; (+) strand; PAM type: NNGRRT; PAM sequence: TTGAAT
tttttctaggaatctcattg

SEQ ID NO: 25078 - DNA, 20 bp, Artificial Sequence
  Description of Artificial Sequence: Synthetic oligonucleotide
  Target: LAMA2; (+) strand; PAM type: NNGRRT; PAM sequence: TTGGGT
atgttttcattgacatctgc

SEQ ID NO: 25079 - DNA, 20 bp, Artificial Sequence
  Description of Artificial Sequence: Synthetic oligonucleotide
  Target: LAMA2; (+) strand; PAM type: NNGRRT; PAM sequence: TTGGAT
gccttcagtggaaagtctaa

SEQ ID NO: 25080 - DNA, 20 bp, Artificial Sequence
  Description of Artificial Sequence: Synthetic oligonucleotide
  Target: LAMA2; (+) strand; PAM type: NNGRRT; PAM sequence: TGGAAT
actatagtaaaaaaaattct

SEQ ID NO: 25081 - DNA, 20 bp, Artificial Sequence
  Description of Artificial Sequence: Synthetic oligonucleotide
  Target: LAMA2; (+) strand; PAM type: NNGRRT; PAM sequence: CTGGAT
atacattatttaatacaact

SEQ ID NO: 25082 - DNA, 20 bp, Artificial Sequence
  Description of Artificial Sequence: Synthetic oligonucleotide
  Target: LAMA2; (+) strand; PAM type: NNGRRT; PAM sequence: GAGGAT
ttaatacaactctggatagg

SEQ ID NO: 25083 - DNA, 20 bp, Artificial Sequence
  Description of Artificial Sequence: Synthetic oligonucleotide
  Target: LAMA2; (+) strand; PAM type: NNGRRT; PAM sequence: CTGGAT
cttttctaaacttgggaacg

SEQ ID NO: 25084 - DNA, 20 bp, Artificial Sequence
  Description of Artificial Sequence: Synthetic oligonucleotide
  Target: LAMA2; (+) strand; PAM type: NNGRRT; PAM sequence: CTGGAT
ctgatacattagaaaagtca

SEQ ID NO: 25085 - DNA, 20 bp, Artificial Sequence
  Description of Artificial Sequence: Synthetic oligonucleotide
  Target: LAMA2; (+) strand; PAM type: NNGRRT; PAM sequence: TGGAAT
aaagtcactggatttgtaat

SEQ ID NO: 25086 - DNA, 20 bp, Artificial Sequence
  Description of Artificial Sequence: Synthetic oligonucleotide
  Target: LAMA2; (+) strand; PAM type: NNGRRT; PAM sequence: ATGGAT
ctaaagagattaccttaaac

SEQ ID NO: 25087 - DNA, 20 bp, Artificial Sequence
  Description of Artificial Sequence: Synthetic oligonucleotide
  Target: LAMA2; (+) strand; PAM type: NNGRRT; PAM sequence: TCGAAT
aaaaaatgacaatgtaatgt

SEQ ID NO: 25088 - DNA, 20 bp, Artificial Sequence
  Description of Artificial Sequence: Synthetic oligonucleotide
  Target: LAMA2; (+) strand; PAM type: NNGRRT; PAM sequence: TGGGGT
taatgttcgaatctatttca

SEQ ID NO: 25089 - DNA, 20 bp, Artificial Sequence
  Description of Artificial Sequence: Synthetic oligonucleotide
  Target: LAMA2; (+) strand; PAM type: NNGRRT; PAM sequence: AAGGGT
ctatttcatggggttgttat

SEQ ID NO: 25090 - DNA, 20 bp, Artificial Sequence
  Description of Artificial Sequence: Synthetic oligonucleotide
  Target: LAMA2; (+) strand; PAM type: NNGRRT; PAM sequence: CAGAGT
tttgttattataataaatga

SEQ ID NO: 25091 - DNA, 20 bp, Artificial Sequence
  Description of Artificial Sequence: Synthetic oligonucleotide
  Target: LAMA2; (+) strand; PAM type: NNGRRT; PAM sequence: AAGAGT
cttcctacaaacaagtagca

SEQ ID NO: 25092 - DNA, 20 bp, Artificial Sequence
  Description of Artificial Sequence: Synthetic oligonucleotide
  Target: LAMA2; (+) strand; PAM type: NNGRRT; PAM sequence: CTGGAT
tctggcttaatagaagagaa

SEQ ID NO: 25093 - DNA, 20 bp, Artificial Sequence
  Description of Artificial Sequence: Synthetic oligonucleotide
  Target: LAMA2; (+) strand; PAM type: NNGRRT; PAM sequence: AGGAGT
gataagctattggaaaaaag

SEQ ID NO: 25094 - DNA, 20 bp, Artificial Sequence
  Description of Artificial Sequence: Synthetic oligonucleotide
  Target: LAMA2; (+) strand; PAM type: NNGRRT; PAM sequence: ACGGAT
acgcttttatattaaaatct

SEQ ID NO: 25095 - DNA, 20 bp, Artificial Sequence
  Description of Artificial Sequence: Synthetic oligonucleotide
  Target: LAMA2; (+) strand; PAM type: NNGRRT; PAM sequence: AAGAAT
ggatctatcttacacctgga

SEQ ID NO: 25096 - DNA, 20 bp, Artificial Sequence
  Description of Artificial Sequence: Synthetic oligonucleotide
  Target: LAMA2; (+) strand; PAM type: NNGRRT; PAM sequence: CAGAAT
aatggtagagacaaattttt

SEQ ID NO: 25097 - DNA, 20 bp, Artificial Sequence
  Description of Artificial Sequence: Synthetic oligonucleotide
  Target: LAMA2; (+) strand; PAM type: NNGRRT; PAM sequence: ATGAGT
agaaaatgtttatcaaacaa

SEQ ID NO: 25098 - DNA, 20 bp, Artificial Sequence
  Description of Artificial Sequence: Synthetic oligonucleotide
  Target: LAMA2; (+) strand; PAM type: NNGRRT; PAM sequence: TAGGGT
tagatcctttttgtagtaca

SEQ ID NO: 25099 - DNA, 20 bp, Artificial Sequence
  Description of Artificial Sequence: Synthetic oligonucleotide
  Target: LAMA2; (+) strand; PAM type: NNGRRT; PAM sequence: GGGAGT
actagttgtttttttcttct

SEQ ID NO: 25100 - DNA, 20 bp, Artificial Sequence
  Description of Artificial Sequence: Synthetic oligonucleotide
  Target: LAMA2; (+) strand; PAM type: NNGRRT; PAM sequence: AAGGAT
taattaaatcttgttactaa

SEQ ID NO: 25101 - DNA, 20 bp, Artificial Sequence
  Description of Artificial Sequence: Synthetic oligonucleotide
  Target: LAMA2; (+) strand; PAM type: NNGRRT; PAM sequence: ATGGAT
atttttgaacttgtgtacct

SEQ ID NO: 25102 - DNA, 20 bp, Artificial Sequence
  Description of Artificial Sequence: Synthetic oligonucleotide
  Target: LAMA2; (+) strand; PAM type: NNGRRT; PAM sequence: AGGGAT
ataatgtattgtggactccc

SEQ ID NO: 25103 - DNA, 20 bp, Artificial Sequence
  Description of Artificial Sequence: Synthetic oligonucleotide
  Target: LAMA2; (+) strand; PAM type: NNGRRT; PAM sequence: CAGGGT
agatctttctttgagctcta

SEQ ID NO: 25104 - DNA, 20 bp, Artificial Sequence
  Description of Artificial Sequence: Synthetic oligonucleotide
  Target: LAMA2; (+) strand; PAM type: NNGRRT; PAM sequence: GAGAGT
ttacctcaggtctagtctag

SEQ ID NO: 25105 - DNA, 20 bp, Artificial Sequence
  Description of Artificial Sequence: Synthetic oligonucleotide
  Target: LAMA2; (+) strand; PAM type: NNGRRT; PAM sequence: GCGGGT
cagcactttgggaggccggg

SEQ ID NO: 25106 - DNA, 20 bp, Artificial Sequence
  Description of Artificial Sequence: Synthetic oligonucleotide
  Target: LAMA2; (+) strand; PAM type: NNGRRT; PAM sequence: GTGGAT
actttgggaggccggggcgg

SEQ ID NO: 25107 - DNA, 20 bp, Artificial Sequence
  Description of Artificial Sequence: Synthetic oligonucleotide
  Target: LAMA2; (+) strand; PAM type: NNGRRT; PAM sequence: GAGAAT
tactctggaggctgaggcag

SEQ ID NO: 25108 - DNA, 20 bp, Artificial Sequence
  Description of Artificial Sequence: Synthetic oligonucleotide
  Target: LAMA2; (+) strand; PAM type: NNGRRT; PAM sequence: GTGAAT
ggctgaggcaggagaatggc

SEQ ID NO: 25109 - DNA, 20 bp, Artificial Sequence
  Description of Artificial Sequence: Synthetic oligonucleotide
  Target: LAMA2; (+) strand; PAM type: NNGRRT; PAM sequence: CTGAAT
acatactaatatctgtaatt

SEQ ID NO: 25110 - DNA, 20 bp, Artificial Sequence
  Description of Artificial Sequence: Synthetic oligonucleotide
  Target: LAMA2; (+) strand; PAM type: NNGRRT; PAM sequence: AGGGGT
gctcctgaactcacatcagg

SEQ ID NO: 25111 - DNA, 20 bp, Artificial Sequence
  Description of Artificial Sequence: Synthetic oligonucleotide
  Target: LAMA2; (+) strand; PAM type: NNGRRT; PAM sequence: AAGAAT
tcctttgttcttttcataga

SEQ ID NO: 25112 - DNA, 20 bp, Artificial Sequence
  Description of Artificial Sequence: Synthetic oligonucleotide
  Target: LAMA2; (+) strand; PAM type: NNGRRT; PAM sequence: CTGGAT
aagaattcctgttggaagca

SEQ ID NO: 25113 - DNA, 20 bp, Artificial Sequence
  Description of Artificial Sequence: Synthetic oligonucleotide
  Target: LAMA2; (+) strand; PAM type: NNGRRT; PAM sequence: TGGAAT
atatcgtatttctcaaaata

SEQ ID NO: 25114 - DNA, 20 bp, Artificial Sequence
  Description of Artificial Sequence: Synthetic oligonucleotide
  Target: LAMA2; (+) strand; PAM type: NNGRRT; PAM sequence: ATGGAT
cattgtatgtgtgtcatatg

SEQ ID NO: 25115 - DNA, 20 bp, Artificial Sequence
  Description of Artificial Sequence: Synthetic oligonucleotide
  Target: LAMA2; (+) strand; PAM type: NNGRRT; PAM sequence: AAGGAT
tgggagatgtccagagactc

SEQ ID NO: 25116 - DNA, 20 bp, Artificial Sequence
  Description of Artificial Sequence: Synthetic oligonucleotide
  Target: LAMA2; (+) strand; PAM type: NNGRRT; PAM sequence: ATGGGT
atattgcttatcaaacactg

SEQ ID NO: 25117 - DNA, 20 bp, Artificial Sequence
  Description of Artificial Sequence: Synthetic oligonucleotide
  Target: LAMA2; (+) strand; PAM type: NNGRRT; PAM sequence: ATGAGT
aaacactgatgggtctgaac

SEQ ID NO: 25118 - DNA, 20 bp, Artificial Sequence
  Description of Artificial Sequence: Synthetic oligonucleotide
  Target: LAMA2; (+) strand; PAM type: NNGRRT; PAM sequence: TGGAAT
acaaagtgaacagattactt

SEQ ID NO: 25119 - DNA, 20 bp, Artificial Sequence
  Description of Artificial Sequence: Synthetic oligonucleotide
  Target: LAMA2; (+) strand; PAM type: NNGRRT; PAM sequence: CTGAAT
gaatccatgtcctggtcctg

SEQ ID NO: 25120 - DNA, 20 bp, Artificial Sequence
  Description of Artificial Sequence: Synthetic oligonucleotide
  Target: LAMA2; (+) strand; PAM type: NNGRRT; PAM sequence: AAGAGT
acacattccagtaacactga

SEQ ID NO: 25121 - DNA, 20 bp, Artificial Sequence
  Description of Artificial Sequence: Synthetic oligonucleotide
  Target: LAMA2; (+) strand; PAM type: NNGRRT; PAM sequence: TAGAGT
ttagggactgattttctcca

SEQ ID NO: 25122 - DNA, 20 bp, Artificial Sequence
  Description of Artificial Sequence: Synthetic oligonucleotide
  Target: LAMA2; (+) strand; PAM type: NNGRRT; PAM sequence: TGGAGT
agttcctgatgtggtgctac

SEQ ID NO: 25123 - DNA, 20 bp, Artificial Sequence
  Description of Artificial Sequence: Synthetic oligonucleotide
  Target: LAMA2; (+) strand; PAM type: NNGRRT; PAM sequence: CAGAAT
tttagaaaacatcattcacc

SEQ ID NO: 25124 - DNA, 20 bp, Artificial Sequence
  Description of Artificial Sequence: Synthetic oligonucleotide
  Target: LAMA2; (+) strand; PAM type: NNGRRT; PAM sequence: TTGGAT
atctttatttatttattcct

SEQ ID NO: 25125 - DNA, 20 bp, Artificial Sequence
  Description of Artificial Sequence: Synthetic oligonucleotide
  Target: LAMA2; (+) strand; PAM type: NNGRRT; PAM sequence: TGGAAT
ataaaactagttaacatcta

SEQ ID NO: 25126 - DNA, 20 bp, Artificial Sequence
  Description of Artificial Sequence: Synthetic oligonucleotide
  Target: LAMA2; (+) strand; PAM type: NNGRRT; PAM sequence: AAGAGT
gcgtgtgacctcaaccctga

SEQ ID NO: 25127 - DNA, 20 bp, Artificial Sequence
  Description of Artificial Sequence: Synthetic oligonucleotide
  Target: LAMA2; (+) strand; PAM type: NNGRRT; PAM sequence: AAGAGT
actatgtcctgatatatcag

SEQ ID NO: 25128 - DNA, 20 bp, Artificial Sequence
  Description of Artificial Sequence: Synthetic oligonucleotide
  Target: LAMA2; (+) strand; PAM type: NNGRRT; PAM sequence: ATGAAT
aagactccttggagatagca

SEQ ID NO: 25129 - DNA, 20 bp, Artificial Sequence
  Description of Artificial Sequence: Synthetic oligonucleotide
  Target: LAMA2; (+) strand; PAM type: NNGRRT; PAM sequence: ATGAAT
ctccttggagatagcaatga

SEQ ID NO: 25130 - DNA, 20 bp, Artificial Sequence
  Description of Artificial Sequence: Synthetic oligonucleotide
  Target: LAMA2; (+) strand; PAM type: NNGRRT; PAM sequence: CTGAAT
cttaactgtgtcaggcatgc

SEQ ID NO: 25131 - DNA, 20 bp, Artificial Sequence
  Description of Artificial Sequence: Synthetic oligonucleotide
  Target: LAMA2; (+) strand; PAM type: NNGRRT; PAM sequence: TTGAGT
gtcaggcatgcctgaatttt

SEQ ID NO: 25132 - DNA, 20 bp, Artificial Sequence
  Description of Artificial Sequence: Synthetic oligonucleotide
  Target: LAMA2; (+) strand; PAM type: NNGRRT; PAM sequence: AAGAGT
ctgaattttttgagtcatat

SEQ ID NO: 25133 - DNA, 20 bp, Artificial Sequence
  Description of Artificial Sequence: Synthetic oligonucleotide
  Target: LAMA2; (+) strand; PAM type: NNGRRT; PAM sequence: TAGAAT
ataagagtttgtagcactcc

SEQ ID NO: 25134 - DNA, 20 bp, Artificial Sequence
  Description of Artificial Sequence: Synthetic oligonucleotide
  Target: LAMA2; (+) strand; PAM type: NNGRRT; PAM sequence: AAGAAT
gaattgttaacttaattggt

SEQ ID NO: 25135 - DNA, 20 bp, Artificial Sequence
  Description of Artificial Sequence: Synthetic oligonucleotide
  Target: LAMA2; (+) strand; PAM type: NNGRRT; PAM sequence: ATGGAT
gggcttttcctggtccatta

SEQ ID NO: 25136 - DNA, 20 bp, Artificial Sequence
  Description of Artificial Sequence: Synthetic oligonucleotide
  Target: LAMA2; (+) strand; PAM type: NNGRRT; PAM sequence: AAGGAT
tatatgacaagtgatggcaa

SEQ ID NO: 25137 - DNA, 20 bp, Artificial Sequence
  Description of Artificial Sequence: Synthetic oligonucleotide
  Target: LAMA2; (+) strand; PAM type: NNGRRT; PAM sequence: CAGGGT
aacttaatcattaattggct

SEQ ID NO: 25138 - DNA, 20 bp, Artificial Sequence
  Description of Artificial Sequence: Synthetic oligonucleotide
  Target: LAMA2; (+) strand; PAM type: NNGRRT; PAM sequence: GGGAGT
gaaataaataagcaaaaaga

SEQ ID NO: 25139 - DNA, 20 bp, Artificial Sequence
  Description of Artificial Sequence: Synthetic oligonucleotide
  Target: LAMA2; (+) strand; PAM type: NNGRRT; PAM sequence: CAGAGT
attctgcttatggtaactcc

SEQ ID NO: 25140 - DNA, 20 bp, Artificial Sequence
  Description of Artificial Sequence: Synthetic oligonucleotide
  Target: LAMA2; (+) strand; PAM type: NNGRRT; PAM sequence: GAGAAT
ttatggtaactcccagagta

SEQ ID NO: 25141 - DNA, 20 bp, Artificial Sequence
  Description of Artificial Sequence: Synthetic oligonucleotide
  Target: LAMA2; (+) strand; PAM type: NNGRRT; PAM sequence: TTGGAT
agttggccccctttatgaac

SEQ ID NO: 25142 - DNA, 20 bp, Artificial Sequence
  Description of Artificial Sequence: Synthetic oligonucleotide
  Target: LAMA2; (+) strand; PAM type: NNGRRT; PAM sequence: GAGAGT
cacttttgaagttagacatc

SEQ ID NO: 25143 - DNA, 20 bp, Artificial Sequence
  Description of Artificial Sequence: Synthetic oligonucleotide
  Target: LAMA2; (+) strand; PAM type: NNGRRT; PAM sequence: TTGAGT
tgaagttagacatcgagagt

SEQ ID NO: 25144 - DNA, 20 bp, Artificial Sequence
  Description of Artificial Sequence: Synthetic oligonucleotide
  Target: LAMA2; (+) strand; PAM type: NNGRRT; PAM sequence: CTGAGT
ctagattcacaccttgctgg

SEQ ID NO: 25145 - DNA, 20 bp, Artificial Sequence
  Description of Artificial Sequence: Synthetic oligonucleotide
  Target: LAMA2; (+) strand; PAM type: NNGRRT; PAM sequence: TTGAGT
gtgctgttgcaatagtgctg

SEQ ID NO: 25146 - DNA, 20 bp, Artificial Sequence
  Description of Artificial Sequence: Synthetic oligonucleotide
  Target: LAMA2; (+) strand; PAM type: NNGRRT; PAM sequence: GTGAGT
tgttgcaatagtgctgttga

SEQ ID NO: 25147 - DNA, 20 bp, Artificial Sequence
  Description of Artificial Sequence: Synthetic oligonucleotide
  Target: LAMA2; (+) strand; PAM type: NNGRRT; PAM sequence: GAGAAT
ctgatcatcctcacctttaa

SEQ ID NO: 25148 - DNA, 20 bp, Artificial Sequence
  Description of Artificial Sequence: Synthetic oligonucleotide
  Target: LAMA2; (+) strand; PAM type: NNGRRT; PAM sequence: AAGGAT
gaaaatagtagtgccttttt

SEQ ID NO: 25149 - DNA, 20 bp, Artificial Sequence
  Description of Artificial Sequence: Synthetic oligonucleotide
  Target: LAMA2; (+) strand; PAM type: NNGRRT; PAM sequence: TGGAAT
gtgcctttttaaggattaaa

SEQ ID NO: 25150 - DNA, 20 bp, Artificial Sequence
  Description of Artificial Sequence: Synthetic oligonucleotide
  Target: LAMA2; (+) strand; PAM type: NNGRRT; PAM sequence: GAGGAT
tatttaatttgtattcagaa

SEQ ID NO: 25151 - DNA, 20 bp, Artificial Sequence
  Description of Artificial Sequence: Synthetic oligonucleotide
  Target: LAMA2; (+) strand; PAM type: NNGRRT; PAM sequence: TGGAAT
aatttgtattcagaagagga

SEQ ID NO: 25152 - DNA, 20 bp, Artificial Sequence
  Description of Artificial Sequence: Synthetic oligonucleotide
  Target: LAMA2; (+) strand; PAM type: NNGRRT; PAM sequence: TAGGGT
agtgtgattagaggtggtca

SEQ ID NO: 25153 - DNA, 20 bp, Artificial Sequence
  Description of Artificial Sequence: Synthetic oligonucleotide
  Target: LAMA2; (+) strand; PAM type: NNGRRT; PAM sequence: ATGGAT
aagttgccactatcctggtt

SEQ ID NO: 25154 - DNA, 20 bp, Artificial Sequence
  Description of Artificial Sequence: Synthetic oligonucleotide
  Target: LAMA2; (+) strand; PAM type: NNGRRT; PAM sequence: CAGGAT
ccttcacagcgaacatttgc

SEQ ID NO: 25155 - DNA, 20 bp, Artificial Sequence
  Description of Artificial Sequence: Synthetic oligonucleotide
  Target: LAMA2; (+) strand; PAM type: NNGRRT; PAM sequence: TTGAAT
atggtaccatcattcacccc

SEQ ID NO: 25156 - DNA, 20 bp, Artificial Sequence
  Description of Artificial Sequence: Synthetic oligonucleotide
  Target: LAMA2; (+) strand; PAM type: NNGRRT; PAM sequence: CAGAGT
atgtctgtcatccacaccac

SEQ ID NO: 25157 - DNA, 20 bp, Artificial Sequence
  Description of Artificial Sequence: Synthetic oligonucleotide
  Target: LAMA2; (+) strand; PAM type: NNGRRT; PAM sequence: AAGAAT
tttcaatgcatttctattat

SEQ ID NO: 25158 - DNA, 20 bp, Artificial Sequence
  Description of Artificial Sequence: Synthetic oligonucleotide
  Target: LAMA2; (+) strand; PAM type: NNGRRT; PAM sequence: TTGAAT
tgaacaattaaatgtttatc

SEQ ID NO: 25159 - DNA, 20 bp, Artificial Sequence
  Description of Artificial Sequence: Synthetic oligonucleotide
  Target: LAMA2; (+) strand; PAM type: NNGRRT; PAM sequence: TGGAAT
tgtttgtctccccagactgt

SEQ ID NO: 25160 - DNA, 20 bp, Artificial Sequence
  Description of Artificial Sequence: Synthetic oligonucleotide
  Target: LAMA2; (+) strand; PAM type: NNGRRT; PAM sequence: TTGAAT
atacataaatattttttatt

SEQ ID NO: 25161 - DNA, 20 bp, Artificial Sequence
  Description of Artificial Sequence: Synthetic oligonucleotide
  Target: LAMA2; (+) strand; PAM type: NNGRRT; PAM sequence: CTGAAT
atggctgtgttcaggctctt

SEQ ID NO: 25162 - DNA, 20 bp, Artificial Sequence
  Description of Artificial Sequence: Synthetic oligonucleotide
  Target: LAMA2; (+) strand; PAM type: NNGRRT; PAM sequence: TTGGAT
ttccatggaggaggtcaaaa

SEQ ID NO: 25163 - DNA, 20 bp, Artificial Sequence
  Description of Artificial Sequence: Synthetic oligonucleotide
  Target: LAMA2; (+) strand; PAM type: NNGRRT; PAM sequence: GTGAAT
aaattggattcctgtatgta

SEQ ID NO: 25164 - DNA, 20 bp, Artificial Sequence
  Description of Artificial Sequence: Synthetic oligonucleotide
  Target: LAMA2; (+) strand; PAM type: NNGRRT; PAM sequence: AAGGGT
ttgctatggcagagaactag

SEQ ID NO: 25165 - DNA, 20 bp, Artificial Sequence
  Description of Artificial Sequence: Synthetic oligonucleotide
  Target: LAMA2; (+) strand; PAM type: NNGRRT; PAM sequence: TTGGAT
atatggtaggcactcaaaaa

SEQ ID NO: 25166 - DNA, 20 bp, Artificial Sequence
  Description of Artificial Sequence: Synthetic oligonucleotide
  Target: LAMA2; (+) strand; PAM type: NNGRRT; PAM sequence: AAGAGT
cagctctttttggacagacc

SEQ ID NO: 25167 - DNA, 20 bp, Artificial Sequence
  Description of Artificial Sequence: Synthetic oligonucleotide
  Target: LAMA2; (+) strand; PAM type: NNGRRT; PAM sequence: ATGAAT
ccccctgatccttttatagt

SEQ ID NO: 25168 - DNA, 20 bp, Artificial Sequence
  Description of Artificial Sequence: Synthetic oligonucleotide
  Target: LAMA2; (+) strand; PAM type: NNGRRT; PAM sequence: ATGAAT
ctgatccttttatagtatga

SEQ ID NO: 25169 - DNA, 20 bp, Artificial Sequence
  Description of Artificial Sequence: Synthetic oligonucleotide
  Target: LAMA2; (+) strand; PAM type: NNGRRT; PAM sequence: ATGAGT
gaaacacagtatggacagat

SEQ ID NO: 25170 - DNA, 20 bp, Artificial Sequence
  Description of Artificial Sequence: Synthetic oligonucleotide
  Target: LAMA2; (+) strand; PAM type: NNGRRT; PAM sequence: TTGAGT
accttaaattatcttgcttc

SEQ ID NO: 25171 - DNA, 20 bp, Artificial Sequence
  Description of Artificial Sequence: Synthetic oligonucleotide
  Target: LAMA2; (+) strand; PAM type: NNGRRT; PAM sequence: AAGGAT
gagttttttttttcccctct

SEQ ID NO: 25172 - DNA, 20 bp, Artificial Sequence
  Description of Artificial Sequence: Synthetic oligonucleotide
  Target: LAMA2; (+) strand; PAM type: NNGRRT; PAM sequence: AAGAGT
ccctctaaggatattccagt

SEQ ID NO: 25173 - DNA, 20 bp, Artificial Sequence
  Description of Artificial Sequence: Synthetic oligonucleotide
  Target: LAMA2; (+) strand; PAM type: NNGRRT; PAM sequence: TTGGAT
agttgagcagtatttaagct

SEQ ID NO: 25174 - DNA, 20 bp, Artificial Sequence
  Description of Artificial Sequence: Synthetic oligonucleotide
  Target: LAMA2; (+) strand; PAM type: NNGRRT; PAM sequence: AGGAAT
cagtatttaagctttggata

SEQ ID NO: 25175 - DNA, 20 bp, Artificial Sequence
  Description of Artificial Sequence: Synthetic oligonucleotide
  Target: LAMA2; (+) strand; PAM type: NNGRRT; PAM sequence: CTGGAT
ttggcttagtcagaactttt

SEQ ID NO: 25176 - DNA, 20 bp, Artificial Sequence
  Description of Artificial Sequence: Synthetic oligonucleotide
  Target: LAMA2; (+) strand; PAM type: NNGRRT; PAM sequence: TTGGAT
tttctggatggaaggtcttt

SEQ ID NO: 25177 - DNA, 20 bp, Artificial Sequence
  Description of Artificial Sequence: Synthetic oligonucleotide
  Target: LAMA2; (+) strand; PAM type: NNGRRT; PAM sequence: GAGAAT
gatggaaggtctttttggat

SEQ ID NO: 25178 - DNA, 20 bp, Artificial Sequence
  Description of Artificial Sequence: Synthetic oligonucleotide
  Target: LAMA2; (+) strand; PAM type: NNGRRT; PAM sequence: AGGGAT
ccatttaagatgtaaattat

SEQ ID NO: 25179 - DNA, 20 bp, Artificial Sequence
  Description of Artificial Sequence: Synthetic oligonucleotide
  Target: LAMA2; (+) strand; PAM type: NNGRRT; PAM sequence: TGGGGT
taaaatatagataactcaca

SEQ ID NO: 25180 - DNA, 20 bp, Artificial Sequence
  Description of Artificial Sequence: Synthetic oligonucleotide
  Target: LAMA2; (+) strand; PAM type: NNGRRT; PAM sequence: GTGAAT
atgtcagataatgcatgtgc

SEQ ID NO: 25181 - DNA, 20 bp, Artificial Sequence
  Description of Artificial Sequence: Synthetic oligonucleotide
  Target: LAMA2; (+) strand; PAM type: NNGRRT; PAM sequence: TTGGAT
atgcatgtgcgtgaatgtcc

SEQ ID NO: 25182 - DNA, 20 bp, Artificial Sequence
  Description of Artificial Sequence: Synthetic oligonucleotide
  Target: LAMA2; (+) strand; PAM type: NNGRRT; PAM sequence: TAGAAT
cagcaaaatggtgaaatact

SEQ ID NO: 25183 - DNA, 20 bp, Artificial Sequence
  Description of Artificial Sequence: Synthetic oligonucleotide
  Target: LAMA2; (+) strand; PAM type: NNGRRT; PAM sequence: AAGAAT
tatattcttctccttacttt

SEQ ID NO: 25184 - DNA, 20 bp, Artificial Sequence
  Description of Artificial Sequence: Synthetic oligonucleotide
  Target: LAMA2; (+) strand; PAM type: NNGRRT; PAM sequence: AGGGAT
agctggcccttcagcaaagg

SEQ ID NO: 25185 - DNA, 20 bp, Artificial Sequence
  Description of Artificial Sequence: Synthetic oligonucleotide
  Target: LAMA2; (+) strand; PAM type: NNGRRT; PAM sequence: ATGAGT
aaaggagggatttttattat

SEQ ID NO: 25186 - DNA, 20 bp, Artificial Sequence
  Description of Artificial Sequence: Synthetic oligonucleotide
  Target: LAMA2; (+) strand; PAM type: NNGRRT; PAM sequence: GTGAAT
gagggatttttattatatga

SEQ ID NO: 25187 - DNA, 20 bp, Artificial Sequence
  Description of Artificial Sequence: Synthetic oligonucleotide
  Target: LAMA2; (+) strand; PAM type: NNGRRT; PAM sequence: TTGAAT
tagcatggtcacagtaaaga

SEQ ID NO: 25188 - DNA, 20 bp, Artificial Sequence
  Description of Artificial Sequence: Synthetic oligonucleotide
  Target: LAMA2; (+) strand; PAM type: NNGRRT; PAM sequence: TCGGAT
tggttaacatcatgatactg

SEQ ID NO: 25189 - DNA, 20 bp, Artificial Sequence
  Description of Artificial Sequence: Synthetic oligonucleotide
  Target: LAMA2; (+) strand; PAM type: NNGRRT; PAM sequence: GAGAAT
cgatagaaaaaagaactaaa

SEQ ID NO: 25190 - DNA, 20 bp, Artificial Sequence
  Description of Artificial Sequence: Synthetic oligonucleotide
  Target: LAMA2; (+) strand; PAM type: NNGRRT; PAM sequence: ATGGAT
tgaaagaaaggtgtaagatc

SEQ ID NO: 25191 - DNA, 20 bp, Artificial Sequence
  Description of Artificial Sequence: Synthetic oligonucleotide
  Target: LAMA2; (+) strand; PAM type: NNGRRT; PAM sequence: CAGGAT
aagatcatggattcctgaaa

SEQ ID NO: 25192 - DNA, 20 bp, Artificial Sequence
  Description of Artificial Sequence: Synthetic oligonucleotide
  Target: LAMA2; (+) strand; PAM type: NNGRRT; PAM sequence: GAGGAT
ttaaatatttaaatttaagt

SEQ ID NO: 25193 - DNA, 20 bp, Artificial Sequence
  Description of Artificial Sequence: Synthetic oligonucleotide
  Target: LAMA2; (+) strand; PAM type: NNGRRT; PAM sequence: AGGAGT
taaatttaagtgaggattgt

SEQ ID NO: 25194 - DNA, 20 bp, Artificial Sequence
  Description of Artificial Sequence: Synthetic oligonucleotide
  Target: LAMA2; (+) strand; PAM type: NNGRRT; PAM sequence: TTGGAT
acaccttcaaagctcatcac

SEQ ID NO: 25195 - DNA, 20 bp, Artificial Sequence
  Description of Artificial Sequence: Synthetic oligonucleotide
  Target: LAMA2; (+) strand; PAM type: NNGRRT; PAM sequence: GAGGAT
tctttggaaggccaaggcag

SEQ ID NO: 25196 - DNA, 20 bp, Artificial Sequence
  Description of Artificial Sequence: Synthetic oligonucleotide
  Target: LAMA2; (+) strand; PAM type: NNGRRT; PAM sequence: AGGAGT
caggaggatggcttgaggcc

SEQ ID NO: 25197 - DNA, 20 bp, Artificial Sequence
  Description of Artificial Sequence: Synthetic oligonucleotide
  Target: LAMA2; (+) strand; PAM type: NNGRRT; PAM sequence: TGGAAT
agaaatgctactttccatat

SEQ ID NO: 25198 - DNA, 20 bp, Artificial Sequence
  Description of Artificial Sequence: Synthetic oligonucleotide
  Target: LAMA2; (+) strand; PAM type: NNGRRT; PAM sequence: ATGAAT
atgctactttccatattgga

SEQ ID NO: 25199 - DNA, 20 bp, Artificial Sequence
  Description of Artificial Sequence: Synthetic oligonucleotide
  Target: LAMA2; (+) strand; PAM type: NNGRRT; PAM sequence: TGGGAT
atagaaccaaaatgcatgtc

SEQ ID NO: 25200 - DNA, 20 bp, Artificial Sequence
  Description of Artificial Sequence: Synthetic oligonucleotide
  Target: LAMA2; (+) strand; PAM type: NNGRRT; PAM sequence: TGGGAT
gtctgggatttagaaaatct

SEQ ID NO: 25201 - DNA, 20 bp, Artificial Sequence
  Description of Artificial Sequence: Synthetic oligonucleotide
  Target: LAMA2; (+) strand; PAM type: NNGRRT; PAM sequence: AAGAGT
ggttagtgaagaggcataga

SEQ ID NO: 25202 - DNA, 20 bp, Artificial Sequence
  Description of Artificial Sequence: Synthetic oligonucleotide
  Target: LAMA2; (+) strand; PAM type: NNGRRT; PAM sequence: TGGAAT
aaatttagacattaagtttg

SEQ ID NO: 25203 - DNA, 20 bp, Artificial Sequence
  Description of Artificial Sequence: Synthetic oligonucleotide
  Target: LAMA2; (+) strand; PAM type: NNGRRT; PAM sequence: GAGAAT
tattaattctcaagtcttag

SEQ ID NO: 25204 - DNA, 20 bp, Artificial Sequence
  Description of Artificial Sequence: Synthetic oligonucleotide
  Target: LAMA2; (+) strand; PAM type: NNGRRT; PAM sequence: CAGAGT
aataattctacagttgactg

SEQ ID NO: 25205 - DNA, 20 bp, Artificial Sequence
  Description of Artificial Sequence: Synthetic oligonucleotide
  Target: LAMA2; (+) strand; PAM type: NNGRRT; PAM sequence: AAGAAT
ttactgtttcttgattcatg

SEQ ID NO: 25206 - DNA, 20 bp, Artificial Sequence
  Description of Artificial Sequence: Synthetic oligonucleotide
  Target: LAMA2; (+) strand; PAM type: NNGRRT; PAM sequence: GGGAAT
ctatcctgagaacagcatgg

SEQ ID NO: 25207 - DNA, 20 bp, Artificial Sequence
  Description of Artificial Sequence: Synthetic oligonucleotide
  Target: LAMA2; (+) strand; PAM type: NNGRRT; PAM sequence: GGGGAT
aggtccctcccccaacacat

SEQ ID NO: 25208 - DNA, 20 bp, Artificial Sequence
  Description of Artificial Sequence: Synthetic oligonucleotide
  Target: LAMA2; (+) strand; PAM type: NNGRRT; PAM sequence: TTGGAT
caacacatggggattacaat

SEQ ID NO: 25209 - DNA, 20 bp, Artificial Sequence
  Description of Artificial Sequence: Synthetic oligonucleotide
  Target: LAMA2; (+) strand; PAM type: NNGRRT; PAM sequence: GAGAAT
gagccagaccatatcactaa

SEQ ID NO: 25210 - DNA, 20 bp, Artificial Sequence
  Description of Artificial Sequence: Synthetic oligonucleotide
  Target: LAMA2; (+) strand; PAM type: NNGRRT; PAM sequence: CAGAAT
taagagaataaaaatggaca

SEQ ID NO: 25211 - DNA, 20 bp, Artificial Sequence
  Description of Artificial Sequence: Synthetic oligonucleotide
  Target: LAMA2; (+) strand; PAM type: NNGRRT; PAM sequence: GTGAGT
gaaagtatttccatgaccta

SEQ ID NO: 25212 - DNA, 20 bp, Artificial Sequence
  Description of Artificial Sequence: Synthetic oligonucleotide
  Target: LAMA2; (+) strand; PAM type: NNGRRT; PAM sequence: GAGAAT
catgacctagtgagttctta

SEQ ID NO: 25213 - DNA, 20 bp, Artificial Sequence
  Description of Artificial Sequence: Synthetic oligonucleotide
  Target: LAMA2; (+) strand; PAM type: NNGRRT; PAM sequence: AAGAAT
atcaaatatataatatgatg

SEQ ID NO: 25214 - DNA, 20 bp, Artificial Sequence
  Description of Artificial Sequence: Synthetic oligonucleotide
  Target: LAMA2; (+) strand; PAM type: NNGRRT; PAM sequence: TAGGGT
ttttaaagtagaagagaagg

SEQ ID NO: 25215 - DNA, 20 bp, Artificial Sequence
  Description of Artificial Sequence: Synthetic oligonucleotide
  Target: LAMA2; (+) strand; PAM type: NNGRRT; PAM sequence: TAGGGT
agaaggtagggtatcaaaag

SEQ ID NO: 25216 - DNA, 20 bp, Artificial Sequence
  Description of Artificial Sequence: Synthetic oligonucleotide
  Target: LAMA2; (+) strand; PAM type: NNGRRT; PAM sequence: GAGGGT
agggtgcgctacgcaaagtg

SEQ ID NO: 25217 - DNA, 20 bp, Artificial Sequence
  Description of Artificial Sequence: Synthetic oligonucleotide
  Target: LAMA2; (+) strand; PAM type: NNGRRT; PAM sequence: CAGGGT
gttgttgttgtttttagaga

SEQ ID NO: 25218 - DNA, 20 bp, Artificial Sequence
  Description of Artificial Sequence: Synthetic oligonucleotide
  Target: LAMA2; (+) strand; PAM type: NNGRRT; PAM sequence: TGGGAT
gcctcagtctccctcagtgc

SEQ ID NO: 25219 - DNA, 20 bp, Artificial Sequence
  Description of Artificial Sequence: Synthetic oligonucleotide
  Target: LAMA2; (+) strand; PAM type: NNGRRT; PAM sequence: TAGAAT
aaatatgaccagtcacaact

SEQ ID NO: 25220 - DNA, 20 bp, Artificial Sequence
  Description of Artificial Sequence: Synthetic oligonucleotide
  Target: LAMA2; (+) strand; PAM type: NNGRRT; PAM sequence: TAGAGT
ttgtgtatggtttcatatat

SEQ ID NO: 25221 - DNA, 20 bp, Artificial Sequence
  Description of Artificial Sequence: Synthetic oligonucleotide
  Target: LAMA2; (+) strand; PAM type: NNGRRT; PAM sequence: TTGAAT
atatattagagtgttaaata

SEQ ID NO: 25222 - DNA, 20 bp, Artificial Sequence
  Description of Artificial Sequence: Synthetic oligonucleotide
  Target: LAMA2; (+) strand; PAM type: NNGRRT; PAM sequence: AGGGAT
acatctagtatgtttatttg

SEQ ID NO: 25223 - DNA, 20 bp, Artificial Sequence
  Description of Artificial Sequence: Synthetic oligonucleotide
  Target: LAMA2; (+) strand; PAM type: NNGRRT; PAM sequence: TGGAAT
tctttgtaagacactgttac

SEQ ID NO: 25224 - DNA, 20 bp, Artificial Sequence
  Description of Artificial Sequence: Synthetic oligonucleotide
  Target: LAMA2; (+) strand; PAM type: NNGRRT; PAM sequence: TGGAAT
ccattctacttcactacaaa

SEQ ID NO: 25225 - DNA, 20 bp, Artificial Sequence
  Description of Artificial Sequence: Synthetic oligonucleotide
  Target: LAMA2; (+) strand; PAM type: NNGRRT; PAM sequence: GTGGGT
tatatctgactccacaataa

SEQ ID NO: 25226 - DNA, 20 bp, Artificial Sequence
  Description of Artificial Sequence: Synthetic oligonucleotide
  Target: LAMA2; (+) strand; PAM type: NNGRRT; PAM sequence: CAGAAT
actccacaataagtgggttc

SEQ ID NO: 25227 - DNA, 20 bp, Artificial Sequence
  Description of Artificial Sequence: Synthetic oligonucleotide
  Target: LAMA2; (+) strand; PAM type: NNGRRT; PAM sequence: TAGAAT
ccagaatcgttgacatttag

SEQ ID NO: 25228 - DNA, 20 bp, Artificial Sequence
  Description of Artificial Sequence: Synthetic oligonucleotide
  Target: LAMA2; (+) strand; PAM type: NNGRRT; PAM sequence: AAGAGT
tgatttacatggttgtatgg

SEQ ID NO: 25229 - DNA, 20 bp, Artificial Sequence
  Description of Artificial Sequence: Synthetic oligonucleotide
  Target: LAMA2; (+) strand; PAM type: NNGRRT; PAM sequence: TAGGGT
aatcatttacaaatatttct

SEQ ID NO: 25230 - DNA, 20 bp, Artificial Sequence
  Description of Artificial Sequence: Synthetic oligonucleotide
  Target: LAMA2; (+) strand; PAM type: NNGRRT; PAM sequence: ATGGAT
tttgaaatgagatacaactt

SEQ ID NO: 25231 - DNA, 20 bp, Artificial Sequence
  Description of Artificial Sequence: Synthetic oligonucleotide
  Target: LAMA2; (+) strand; PAM type: NNGRRT; PAM sequence: TAGGAT
gataaagagcttggcaaata

SEQ ID NO: 25232 - DNA, 20 bp, Artificial Sequence
  Description of Artificial Sequence: Synthetic oligonucleotide
  Target: LAMA2; (+) strand; PAM type: NNGRRT; PAM sequence: CTGGAT
tggcaaatataggatctttc

SEQ ID NO: 25233 - DNA, 20 bp, Artificial Sequence
  Description of Artificial Sequence: Synthetic oligonucleotide
  Target: LAMA2; (+) strand; PAM type: NNGRRT; PAM sequence: GAGGAT
gtgacagagcgtctgctgtg

SEQ ID NO: 25234 - DNA, 20 bp, Artificial Sequence
  Description of Artificial Sequence: Synthetic oligonucleotide
  Target: LAMA2; (+) strand; PAM type: NNGRRT; PAM sequence: ACGGAT
gctgtggaggatggggaagg

SEQ ID NO: 25235 - DNA, 20 bp, Artificial Sequence
  Description of Artificial Sequence: Synthetic oligonucleotide
  Target: LAMA2; (+) strand; PAM type: NNGRRT; PAM sequence: TGGGAT
ggttttaagaggcctgctgc

SEQ ID NO: 25236 - DNA, 20 bp, Artificial Sequence
  Description of Artificial Sequence: Synthetic oligonucleotide
  Target: LAMA2; (+) strand; PAM type: NNGRRT; PAM sequence: TAGAGT
tttgggctcaaaggagccct

SEQ ID NO: 25237 - DNA, 20 bp, Artificial Sequence
  Description of Artificial Sequence: Synthetic oligonucleotide
  Target: LAMA2; (+) strand; PAM type: NNGRRT; PAM sequence: AAGAGT
ctaaagaggcaactcccgat

SEQ ID NO: 25238 - DNA, 20 bp, Artificial Sequence
  Description of Artificial Sequence: Synthetic oligonucleotide
  Target: LAMA2; (+) strand; PAM type: NNGRRT; PAM sequence: AAGAGT
tctagaaccgccatttcctt

SEQ ID NO: 25239 - DNA, 20 bp, Artificial Sequence
  Description of Artificial Sequence: Synthetic oligonucleotide
  Target: LAMA2; (+) strand; PAM type: NNGRRT; PAM sequence: TGGAGT
tcctccgcctcttttctgtc

SEQ ID NO: 25240 - DNA, 20 bp, Artificial Sequence
  Description of Artificial Sequence: Synthetic oligonucleotide
  Target: LAMA2; (+) strand; PAM type: NNGRRT; PAM sequence: GAGGGT
tcttacttttagcttggttt

SEQ ID NO: 25241 - DNA, 20 bp, Artificial Sequence
  Description of Artificial Sequence: Synthetic oligonucleotide
  Target: LAMA2; (+) strand; PAM type: NNGRRT; PAM sequence: TGGAGT
attacttacagaaacagatt

SEQ ID NO: 25242 - DNA, 20 bp, Artificial Sequence
  Description of Artificial Sequence: Synthetic oligonucleotide
  Target: LAMA2; (+) strand; PAM type: NNGRRT; PAM sequence: GTGAAT
tacagaaacagatttggagt

SEQ ID NO: 25243 - DNA, 20 bp, Artificial Sequence
  Description of Artificial Sequence: Synthetic oligonucleotide
  Target: LAMA2; (+) strand; PAM type: NNGRRT; PAM sequence: GAGAAT
ttctacaataatgtgattca

SEQ ID NO: 25244 - DNA, 20 bp, Artificial Sequence
  Description of Artificial Sequence: Synthetic oligonucleotide
  Target: LAMA2; (+) strand; PAM type: NNGRRT; PAM sequence: TTGGAT
tagatagaaatatgtggagg

SEQ ID NO: 25245 - DNA, 20 bp, Artificial Sequence
  Description of Artificial Sequence: Synthetic oligonucleotide
  Target: LAMA2; (+) strand; PAM type: NNGRRT; PAM sequence: CTGAGT
tgtggaggttggatttcctg

SEQ ID NO: 25246 - DNA, 20 bp, Artificial Sequence
  Description of Artificial Sequence: Synthetic oligonucleotide
  Target: LAMA2; (+) strand; PAM type: NNGRRT; PAM sequence: TGGAGT
ttttttttttttttttaaga

SEQ ID NO: 25247 - DNA, 20 bp, Artificial Sequence
  Description of Artificial Sequence: Synthetic oligonucleotide
  Target: LAMA2; (+) strand; PAM type: NNGRRT; PAM sequence: TGGAGT
tctcaccctgttgcccaggc

SEQ ID NO: 25248 - DNA, 20 bp, Artificial Sequence
  Description of Artificial Sequence: Synthetic oligonucleotide
  Target: LAMA2; (+) strand; PAM type: NNGRRT; PAM sequence: CCGGGT
ctcactgcaacctccgcctc

SEQ ID NO: 25249 - DNA, 20 bp, Artificial Sequence
  Description of Artificial Sequence: Synthetic oligonucleotide
  Target: LAMA2; (+) strand; PAM type: NNGRRT; PAM sequence: CTGAGT
gattctcctgcctcagcctc

SEQ ID NO: 25250 - DNA, 20 bp, Artificial Sequence
  Description of Artificial Sequence: Synthetic oligonucleotide
  Target: LAMA2; (+) strand; PAM type: NNGRRT; PAM sequence: TGGGAT
gcctcagcctcctgagtagc

SEQ ID NO: 25251 - DNA, 20 bp, Artificial Sequence
  Description of Artificial Sequence: Synthetic oligonucleotide
  Target: LAMA2; (+) strand; PAM type: NNGRRT; PAM sequence: AGGGAT
tttattcttgtatttttagt

SEQ ID NO: 25252 - DNA, 20 bp, Artificial Sequence
  Description of Artificial Sequence: Synthetic oligonucleotide
  Target: LAMA2; (+) strand; PAM type: NNGRRT; PAM sequence: TGGGGT
tcttgtatttttagtaggga

SEQ ID NO: 25253 - DNA, 20 bp, Artificial Sequence
  Description of Artificial Sequence: Synthetic oligonucleotide
  Target: LAMA2; (+) strand; PAM type: NNGRRT; PAM sequence: TGGGAT
gccttggcctcccaaagttc

SEQ ID NO: 25254 - DNA, 20 bp, Artificial Sequence
  Description of Artificial Sequence: Synthetic oligonucleotide
  Target: LAMA2; (+) strand; PAM type: NNGRRT; PAM sequence: CTGAGT
cacagtgcccagccttcctg

SEQ ID NO: 25255 - DNA, 20 bp, Artificial Sequence
  Description of Artificial Sequence: Synthetic oligonucleotide
  Target: LAMA2; (+) strand; PAM type: NNGRRT; PAM sequence: CAGAAT
catgttctgcatctgaaggc

SEQ ID NO: 25256 - DNA, 20 bp, Artificial Sequence
  Description of Artificial Sequence: Synthetic oligonucleotide
  Target: LAMA2; (+) strand; PAM type: NNGRRT; PAM sequence: CAGAAT
tgtgtatgtgtgggagataa

SEQ ID NO: 25257 - DNA, 20 bp, Artificial Sequence
  Description of Artificial Sequence: Synthetic oligonucleotide
  Target: LAMA2; (+) strand; PAM type: NNGRRT; PAM sequence: TCGGAT
taaccattttataattttag

SEQ ID NO: 25258 - DNA, 20 bp, Artificial Sequence
  Description of Artificial Sequence: Synthetic oligonucleotide
  Target: LAMA2; (+) strand; PAM type: NNGRRT; PAM sequence: CTGGAT
atggtataaagttctagaaa

SEQ ID NO: 25259 - DNA, 20 bp, Artificial Sequence
  Description of Artificial Sequence: Synthetic oligonucleotide
  Target: LAMA2; (+) strand; PAM type: NNGRRT; PAM sequence: CTGGGT
tccatataatgcattatatt

SEQ ID NO: 25260 - DNA, 20 bp, Artificial Sequence
  Description of Artificial Sequence: Synthetic oligonucleotide
  Target: LAMA2; (+) strand; PAM type: NNGRRT; PAM sequence: TGGGGT
ttattttcaaaatcaatctt

SEQ ID NO: 25261 - DNA, 20 bp, Artificial Sequence
  Description of Artificial Sequence: Synthetic oligonucleotide
  Target: LAMA2; (+) strand; PAM type: NNGRRT; PAM sequence: GTGGAT
tttagattagtcttatttat

SEQ ID NO: 25262 - DNA, 20 bp, Artificial Sequence
  Description of Artificial Sequence: Synthetic oligonucleotide
  Target: LAMA2; (+) strand; PAM type: NNGRRT; PAM sequence: TTGAGT
tctttggaaaatatggttta

SEQ ID NO: 25263 - DNA, 20 bp, Artificial Sequence
  Description of Artificial Sequence: Synthetic oligonucleotide
  Target: LAMA2; (+) strand; PAM type: NNGRRT; PAM sequence: GAGGAT
caactgttcttgagatcccg

SEQ ID NO: 25264 - DNA, 20 bp, Artificial Sequence
  Description of Artificial Sequence: Synthetic oligonucleotide
  Target: LAMA2; (+) strand; PAM type: NNGRRT; PAM sequence: TAGAGT
tatctggacaggaagatatt

SEQ ID NO: 25265 - DNA, 20 bp, Artificial Sequence
  Description of Artificial Sequence: Synthetic oligonucleotide
  Target: LAMA2; (+) strand; PAM type: NNGRRT; PAM sequence: TAGGGT
tattattatactttaagttt

SEQ ID NO: 25266 - DNA, 20 bp, Artificial Sequence
  Description of Artificial Sequence: Synthetic oligonucleotide
  Target: LAMA2; (+) strand; PAM type: NNGRRT; PAM sequence: CAGAGT
ccccaccccacaacagtccc

SEQ ID NO: 25267 - DNA, 20 bp, Artificial Sequence
  Description of Artificial Sequence: Synthetic oligonucleotide
  Target: LAMA2; (+) strand; PAM type: NNGRRT; PAM sequence: GAGAAT
tattcttgtgatagtttgct

SEQ ID NO: 25268 - DNA, 20 bp, Artificial Sequence
  Description of Artificial Sequence: Synthetic oligonucleotide
  Target: LAMA2; (+) strand; PAM type: NNGRRT; PAM sequence: TTGGGT
agtctatcgttgttggacat

SEQ ID NO: 25269 - DNA, 20 bp, Artificial Sequence
  Description of Artificial Sequence: Synthetic oligonucleotide
  Target: LAMA2; (+) strand; PAM type: NNGRRT; PAM sequence: GTGAAT
ggttccaagtctttgctatt

SEQ ID NO: 25270 - DNA, 20 bp, Artificial Sequence
  Description of Artificial Sequence: Synthetic oligonucleotide
  Target: LAMA2; (+) strand; PAM type: NNGRRT; PAM sequence: TTGGGT
gcagcatgatttatagtcct

SEQ ID NO: 25271 - DNA, 20 bp, Artificial Sequence
  Description of Artificial Sequence: Synthetic oligonucleotide
  Target: LAMA2; (+) strand; PAM type: NNGRRT; PAM sequence: TGGGAT
tttgggtatatacccagtaa

SEQ ID NO: 25272 - DNA, 20 bp, Artificial Sequence
  Description of Artificial Sequence: Synthetic oligonucleotide
  Target: LAMA2; (+) strand; PAM type: NNGRRT; PAM sequence: CTGGGT
tatacccagtaatgggatgg

SEQ ID NO: 25273 - DNA, 20 bp, Artificial Sequence
  Description of Artificial Sequence: Synthetic oligonucleotide
  Target: LAMA2; (+) strand; PAM type: NNGRRT; PAM sequence: AGGAAT
tttctagttctagatccctg

SEQ ID NO: 25274 - DNA, 20 bp, Artificial Sequence
  Description of Artificial Sequence: Synthetic oligonucleotide
  Target: LAMA2; (+) strand; PAM type: NNGRRT; PAM sequence: TGGGGT
gtccttcgcccactttttga

SEQ ID NO: 25275 - DNA, 20 bp, Artificial Sequence
  Description of Artificial Sequence: Synthetic oligonucleotide
  Target: LAMA2; (+) strand; PAM type: NNGRRT; PAM sequence: TTGAGT
tttttttcttgtaaatttgt

SEQ ID NO: 25276 - DNA, 20 bp, Artificial Sequence
  Description of Artificial Sequence: Synthetic oligonucleotide
  Target: LAMA2; (+) strand; PAM type: NNGRRT; PAM sequence: CTGGAT
gtttgagttcattgtagatt

SEQ ID NO: 25277 - DNA, 20 bp, Artificial Sequence
  Description of Artificial Sequence: Synthetic oligonucleotide
  Target: LAMA2; (+) strand; PAM type: NNGRRT; PAM sequence: ATGAGT
ggatattagccctttgtcag

SEQ ID NO: 25278 - DNA, 20 bp, Artificial Sequence
  Description of Artificial Sequence: Synthetic oligonucleotide
  Target: LAMA2; (+) strand; PAM type: NNGRRT; PAM sequence: CTGAAT
tccttacccatgcctatgtc

SEQ ID NO: 25279 - DNA, 20 bp, Artificial Sequence
  Description of Artificial Sequence: Synthetic oligonucleotide
  Target: LAMA2; (+) strand; PAM type: NNGRRT; PAM sequence: TAGGGT
gtactgcctaggttttcttc

SEQ ID NO: 25280 - DNA, 20 bp, Artificial Sequence
  Description of Artificial Sequence: Synthetic oligonucleotide
  Target: LAMA2; (+) strand; PAM type: NNGRRT; PAM sequence: TTGAAT
gtttaagtctttaatccatc

SEQ ID NO: 25281 - DNA, 20 bp, Artificial Sequence
  Description of Artificial Sequence: Synthetic oligonucleotide
  Target: LAMA2; (+) strand; PAM type: NNGRRT; PAM sequence: AGGGAT
ttttgtataaggtgtaagga

SEQ ID NO: 25282 - DNA, 20 bp, Artificial Sequence
  Description of Artificial Sequence: Synthetic oligonucleotide
  Target: LAMA2; (+) strand; PAM type: NNGRRT; PAM sequence: GGGAAT
ccagcaccatttattaaata

SEQ ID NO: 25283 - DNA, 20 bp, Artificial Sequence
  Description of Artificial Sequence: Synthetic oligonucleotide
  Target: LAMA2; (+) strand; PAM type: NNGRRT; PAM sequence: TAGGAT
ccagctttgttcttttggct

SEQ ID NO: 25284 - DNA, 20 bp, Artificial Sequence
  Description of Artificial Sequence: Synthetic oligonucleotide
  Target: LAMA2; (+) strand; PAM type: NNGRRT; PAM sequence: GGGGAT
aaaggcattggtagcttgat

SEQ ID NO: 25285 - DNA, 20 bp, Artificial Sequence
  Description of Artificial Sequence: Synthetic oligonucleotide
  Target: LAMA2; (+) strand; PAM type: NNGRRT; PAM sequence: TTGAAT
gtagcttgatggggatggca

SEQ ID NO: 25286 - DNA, 20 bp, Artificial Sequence
  Description of Artificial Sequence: Synthetic oligonucleotide
  Target: LAMA2; (+) strand; PAM type: NNGRRT; PAM sequence: TGGAAT
attcttcctacccatgagca

SEQ ID NO: 25287 - DNA, 20 bp, Artificial Sequence
  Description of Artificial Sequence: Synthetic oligonucleotide
  Target: LAMA2; (+) strand; PAM type: NNGRRT; PAM sequence: TTGGAT
tccttcacatcccttgtaag

SEQ ID NO: 25288 - DNA, 20 bp, Artificial Sequence
  Description of Artificial Sequence: Synthetic oligonucleotide
  Target: LAMA2; (+) strand; PAM type: NNGRRT; PAM sequence: GTGAAT
ttattctctttgaagcaatt

SEQ ID NO: 25289 - DNA, 20 bp, Artificial Sequence
  Description of Artificial Sequence: Synthetic oligonucleotide
  Target: LAMA2; (+) strand; PAM type: NNGRRT; PAM sequence: GGGAGT
tctttgaagcaattgtgaat

SEQ ID NO: 25290 - DNA, 20 bp, Artificial Sequence
  Description of Artificial Sequence: Synthetic oligonucleotide
  Target: LAMA2; (+) strand; PAM type: NNGRRT; PAM sequence: AAGAAT
tttgtctgttgttggtgtat

SEQ ID NO: 25291 - DNA, 20 bp, Artificial Sequence
  Description of Artificial Sequence: Synthetic oligonucleotide
  Target: LAMA2; (+) strand; PAM type: NNGRRT; PAM sequence: TGGGGT
gagattttggactgagacaa

SEQ ID NO: 25292 - DNA, 20 bp, Artificial Sequence
  Description of Artificial Sequence: Synthetic oligonucleotide
  Target: LAMA2; (+) strand; PAM type: NNGRRT; PAM sequence: TTGAAT
ttgacttcctcttttcctaa

SEQ ID NO: 25293 - DNA, 20 bp, Artificial Sequence
  Description of Artificial Sequence: Synthetic oligonucleotide
  Target: LAMA2; (+) strand; PAM type: NNGRRT; PAM sequence: TTGAAT
ccagaacttccaacactata

SEQ ID NO: 25294 - DNA, 20 bp, Artificial Sequence
  Description of Artificial Sequence: Synthetic oligonucleotide
  Target: LAMA2; (+) strand; PAM type: NNGRRT; PAM sequence: AGGAGT
cttccaacactatattgaat

SEQ ID NO: 25295 - DNA, 20 bp, Artificial Sequence
  Description of Artificial Sequence: Synthetic oligonucleotide
  Target: LAMA2; (+) strand; PAM type: NNGRRT; PAM sequence: GGGAAT
gtcttgtgccagttttcaaa

SEQ ID NO: 25296 - DNA, 20 bp, Artificial Sequence
  Description of Artificial Sequence: Synthetic oligonucleotide
  Target: LAMA2; (+) strand; PAM type: NNGRRT; PAM sequence: GTGGGT
aattcagtatgatattcgct

SEQ ID NO: 25297 - DNA, 20 bp, Artificial Sequence
  Description of Artificial Sequence: Synthetic oligonucleotide
  Target: LAMA2; (+) strand; PAM type: NNGRRT; PAM sequence: GAGAGT
ccatcaatacctaatttatt

SEQ ID NO: 25298 - DNA, 20 bp, Artificial Sequence
  Description of Artificial Sequence: Synthetic oligonucleotide
  Target: LAMA2; (+) strand; PAM type: NNGRRT; PAM sequence: TTGAAT
gtttttagcatgaagtgtgg

SEQ ID NO: 25299 - DNA, 20 bp, Artificial Sequence
  Description of Artificial Sequence: Synthetic oligonucleotide
  Target: LAMA2; (+) strand; PAM type: NNGRRT; PAM sequence: CTGGAT
tctttggccctgtttatatg

SEQ ID NO: 25300 - DNA, 20 bp, Artificial Sequence
  Description of Artificial Sequence: Synthetic oligonucleotide
  Target: LAMA2; (+) strand; PAM type: NNGRRT; PAM sequence: AGGGAT
ttgaaccagccttgcatccc

SEQ ID NO: 25301 - DNA, 20 bp, Artificial Sequence
  Description of Artificial Sequence: Synthetic oligonucleotide
  Target: LAMA2; (+) strand; PAM type: NNGRRT; PAM sequence: GTGGAT
atgaagcccacttgatcatg

SEQ ID NO: 25302 - DNA, 20 bp, Artificial Sequence
  Description of Artificial Sequence: Synthetic oligonucleotide
  Target: LAMA2; (+) strand; PAM type: NNGRRT; PAM sequence: CTGGAT
ataagctttttgatgtgctg

SEQ ID NO: 25303 - DNA, 20 bp, Artificial Sequence
  Description of Artificial Sequence: Synthetic oligonucleotide
  Target: LAMA2; (+) strand; PAM type: NNGRRT; PAM sequence: GAGGAT
tgttttgccagtattttatt

SEQ ID NO: 25304 - DNA, 20 bp, Artificial Sequence
  Description of Artificial Sequence: Synthetic oligonucleotide
  Target: LAMA2; (+) strand; PAM type: NNGRRT; PAM sequence: AAGGAT
tttttgcatcaatgttcatc

SEQ ID NO: 25305 - DNA, 20 bp, Artificial Sequence
  Description of Artificial Sequence: Synthetic oligonucleotide
  Target: LAMA2; (+) strand; PAM type: NNGRRT; PAM sequence: CAGAAT
tctctgcctggctttggtat

SEQ ID NO: 25306 - DNA, 20 bp, Artificial Sequence
  Description of Artificial Sequence: Synthetic oligonucleotide
  Target: LAMA2; (+) strand; PAM type: NNGRRT; PAM sequence: ATGAGT
aatgatgctggcctcataaa

SEQ ID NO: 25307 - DNA, 20 bp, Artificial Sequence
  Description of Artificial Sequence: Synthetic oligonucleotide
  Target: LAMA2; (+) strand; PAM type: NNGRRT; PAM sequence: GAGGAT
gcctcataaaatgagttagg

SEQ ID NO: 25308 - DNA, 20 bp, Artificial Sequence
  Description of Artificial Sequence: Synthetic oligonucleotide
  Target: LAMA2; (+) strand; PAM type: NNGRRT; PAM sequence: TGGAAT
ttccctctttttctattgat

SEQ ID NO: 25309 - DNA, 20 bp, Artificial Sequence
  Description of Artificial Sequence: Synthetic oligonucleotide
  Target: LAMA2; (+) strand; PAM type: NNGRRT; PAM sequence: AGGAAT
ttgattggaatagtttcaga

SEQ ID NO: 25310 - DNA, 20 bp, Artificial Sequence
  Description of Artificial Sequence: Synthetic oligonucleotide
  Target: LAMA2; (+) strand; PAM type: NNGRRT; PAM sequence: TAGAAT
gttcctccttgtacctctgg

SEQ ID NO: 25311 - DNA, 20 bp, Artificial Sequence
  Description of Artificial Sequence: Synthetic oligonucleotide
  Target: LAMA2; (+) strand; PAM type: NNGRRT; PAM sequence: GTGAAT
acctctggtagaattcggct

SEQ ID NO: 25312 - DNA, 20 bp, Artificial Sequence
  Description of Artificial Sequence: Synthetic oligonucleotide
  Target: LAMA2; (+) strand; PAM type: NNGRRT; PAM sequence: GAGAGT
tcttcctggtttagtcttgg

SEQ ID NO: 25313 - DNA, 20 bp, Artificial Sequence
  Description of Artificial Sequence: Synthetic oligonucleotide
  Target: LAMA2; (+) strand; PAM type: NNGRRT; PAM sequence: AGGAAT
ttgggagagtgtatgtgtcg

SEQ ID NO: 25314 - DNA, 20 bp, Artificial Sequence
  Description of Artificial Sequence: Synthetic oligonucleotide
  Target: LAMA2; (+) strand; PAM type: NNGRRT; PAM sequence: TGGGAT
gatggtagtttgtatttctg

SEQ ID NO: 25315 - DNA, 20 bp, Artificial Sequence
  Description of Artificial Sequence: Synthetic oligonucleotide
  Target: LAMA2; (+) strand; PAM type: NNGRRT; PAM sequence: CTGGAT
tcctttcaaaaaaccagctc

SEQ ID NO: 25316 - DNA, 20 bp, Artificial Sequence
  Description of Artificial Sequence: Synthetic oligonucleotide
  Target: LAMA2; (+) strand; PAM type: NNGRRT; PAM sequence: AAGGGT
ctggattcattaattttttg

SEQ ID NO: 25317 - DNA, 20 bp, Artificial Sequence
  Description of Artificial Sequence: Synthetic oligonucleotide
  Target: LAMA2; (+) strand; PAM type: NNGRRT; PAM sequence: TTGAAT
ttcttgccttctgctagctt

SEQ ID NO: 25318 - DNA, 20 bp, Artificial Sequence
  Description of Artificial Sequence: Synthetic oligonucleotide
  Target: LAMA2; (+) strand; PAM type: NNGRRT; PAM sequence: TAGGGT
agttcttttaattgtgatgt

SEQ ID NO: 25319 - DNA, 20 bp, Artificial Sequence
  Description of Artificial Sequence: Synthetic oligonucleotide
  Target: LAMA2; (+) strand; PAM type: NNGRRT; PAM sequence: TTGGAT
gtgatgttagggtgtcaatt

SEQ ID NO: 25320 - DNA, 20 bp, Artificial Sequence
  Description of Artificial Sequence: Synthetic oligonucleotide
  Target: LAMA2; (+) strand; PAM type: NNGRRT; PAM sequence: TTGAAT
atttccctctacacactgct

SEQ ID NO: 25321 - DNA, 20 bp, Artificial Sequence
  Description of Artificial Sequence: Synthetic oligonucleotide
  Target: LAMA2; (+) strand; PAM type: NNGRRT; PAM sequence: TTGAGT
ttccatgtagttgagcagtt

SEQ ID NO: 25322 - DNA, 20 bp, Artificial Sequence
  Description of Artificial Sequence: Synthetic oligonucleotide
  Target: LAMA2; (+) strand; PAM type: NNGRRT; PAM sequence: CTGAGT
tttgagtgagattcttaatc

SEQ ID NO: 25323 - DNA, 20 bp, Artificial Sequence
  Description of Artificial Sequence: Synthetic oligonucleotide
  Target: LAMA2; (+) strand; PAM type: NNGRRT; PAM sequence: TGGAAT
tccaagtatgtggtcaattt

SEQ ID NO: 25324 - DNA, 20 bp, Artificial Sequence
  Description of Artificial Sequence: Synthetic oligonucleotide
  Target: LAMA2; (+) strand; PAM type: NNGRRT; PAM sequence: TGGGGT
aaatgtatattctgttgatt

SEQ ID NO: 25325 - DNA, 20 bp, Artificial Sequence
  Description of Artificial Sequence: Synthetic oligonucleotide
  Target: LAMA2; (+) strand; PAM type: NNGRRT; PAM sequence: GAGAGT
tattctgttgatttggggtg

SEQ ID NO: 25326 - DNA, 20 bp, Artificial Sequence
  Description of Artificial Sequence: Synthetic oligonucleotide
  Target: LAMA2; (+) strand; PAM type: NNGRRT; PAM sequence: CTGAGT
caggtccgcttggtgcagag

SEQ ID NO: 25327 - DNA, 20 bp, Artificial Sequence
  Description of Artificial Sequence: Synthetic oligonucleotide
  Target: LAMA2; (+) strand; PAM type: NNGRRT; PAM sequence: CTGGGT
tgcagagctgagttcaattc

SEQ ID NO: 25328 - DNA, 20 bp, Artificial Sequence
  Description of Artificial Sequence: Synthetic oligonucleotide
  Target: LAMA2; (+) strand; PAM type: NNGRRT; PAM sequence: TGGGGT
gatctgtctagtgttgacag

SEQ ID NO: 25329 - DNA, 20 bp, Artificial Sequence
  Description of Artificial Sequence: Synthetic oligonucleotide
  Target: LAMA2; (+) strand; PAM type: NNGRRT; PAM sequence: GGGAGT
gtctcccattattaatgtgt

SEQ ID NO: 25330 - DNA, 20 bp, Artificial Sequence
  Description of Artificial Sequence: Synthetic oligonucleotide
  Target: LAMA2; (+) strand; PAM type: NNGRRT; PAM sequence: ATGAAT
ggtcactcaggacttgcttt

SEQ ID NO: 25331 - DNA, 20 bp, Artificial Sequence
  Description of Artificial Sequence: Synthetic oligonucleotide
  Target: LAMA2; (+) strand; PAM type: NNGRRT; PAM sequence: CTGGGT
tcaggacttgctttatgaat

SEQ ID NO: 25332 - DNA, 20 bp, Artificial Sequence
  Description of Artificial Sequence: Synthetic oligonucleotide
  Target: LAMA2; (+) strand; PAM type: NNGRRT; PAM sequence: TTGGGT
tgaatctgggtgctcctgtg

SEQ ID NO: 25333 - DNA, 20 bp, Artificial Sequence
  Description of Artificial Sequence: Synthetic oligonucleotide
  Target: LAMA2; (+) strand; PAM type: NNGRRT; PAM sequence: TTGAAT
aggttagttagctcttcttg

SEQ ID NO: 25334 - DNA, 20 bp, Artificial Sequence
  Description of Artificial Sequence: Synthetic oligonucleotide
  Target: LAMA2; (+) strand; PAM type: NNGRRT; PAM sequence: TAGGAT
aaatctgttttatcagagac

SEQ ID NO: 25335 - DNA, 20 bp, Artificial Sequence
  Description of Artificial Sequence: Synthetic oligonucleotide
  Target: LAMA2; (+) strand; PAM type: NNGRRT; PAM sequence: ATGGGT
tgtgtgtctctgcacgtgag

SEQ ID NO: 25336 - DNA, 20 bp, Artificial Sequence
  Description of Artificial Sequence: Synthetic oligonucleotide
  Target: LAMA2; (+) strand; PAM type: NNGRRT; PAM sequence: CTGAAT
ctgcacgtgagatgggtttc

SEQ ID NO: 25337 - DNA, 20 bp, Artificial Sequence
  Description of Artificial Sequence: Synthetic oligonucleotide
  Target: LAMA2; (+) strand; PAM type: NNGRRT; PAM sequence: ATGGGT
ttcctgaatacagcacactg

SEQ ID NO: 25338 - DNA, 20 bp, Artificial Sequence
  Description of Artificial Sequence: Synthetic oligonucleotide
  Target: LAMA2; (+) strand; PAM type: NNGRRT; PAM sequence: GTGAAT
taaagttaatattgttatgt

SEQ ID NO: 25339 - DNA, 20 bp, Artificial Sequence
  Description of Artificial Sequence: Synthetic oligonucleotide
  Target: LAMA2; (+) strand; PAM type: NNGRRT; PAM sequence: CTGGAT
gcttatgaagcttagtttgg

SEQ ID NO: 25340 - DNA, 20 bp, Artificial Sequence
  Description of Artificial Sequence: Synthetic oligonucleotide
  Target: LAMA2; (+) strand; PAM type: NNGRRT; PAM sequence: CTGGGT
gtttggctggatatgaaatt

SEQ ID NO: 25341 - DNA, 20 bp, Artificial Sequence
  Description of Artificial Sequence: Synthetic oligonucleotide
  Target: LAMA2; (+) strand; PAM type: NNGRRT; PAM sequence: AAGAAT
ggttgaaaattcttttcttt

SEQ ID NO: 25342 - DNA, 20 bp, Artificial Sequence
  Description of Artificial Sequence: Synthetic oligonucleotide
  Target: LAMA2; (+) strand; PAM type: NNGRRT; PAM sequence: TTGAAT
aattcttttctttaagaatg

SEQ ID NO: 25343 - DNA, 20 bp, Artificial Sequence
  Description of Artificial Sequence: Synthetic oligonucleotide
  Target: LAMA2; (+) strand; PAM type: NNGRRT; PAM sequence: TAGGGT
ccccactctcttctggcttg

SEQ ID NO: 25344 - DNA, 20 bp, Artificial Sequence
  Description of Artificial Sequence: Synthetic oligonucleotide
  Target: LAMA2; (+) strand; PAM type: NNGRRT; PAM sequence: CAGGGT
agtctgatgggcttcccttc

SEQ ID NO: 25345 - DNA, 20 bp, Artificial Sequence
  Description of Artificial Sequence: Synthetic oligonucleotide
  Target: LAMA2; (+) strand; PAM type: NNGRRT; PAM sequence: GTGAAT
tttccttcatttcaactttg

SEQ ID NO: 25346 - DNA, 20 bp, Artificial Sequence
  Description of Artificial Sequence: Synthetic oligonucleotide
  Target: LAMA2; (+) strand; PAM type: NNGRRT; PAM sequence: TGGAGT
aatctgacaattatgtgtct

SEQ ID NO: 25347 - DNA, 20 bp, Artificial Sequence
  Description of Artificial Sequence: Synthetic oligonucleotide
  Target: LAMA2; (+) strand; PAM type: NNGRRT; PAM sequence: CTGAAT
tgtggccttctctgtatttc

SEQ ID NO: 25348 - DNA, 20 bp, Artificial Sequence
  Description of Artificial Sequence: Synthetic oligonucleotide
  Target: LAMA2; (+) strand; PAM type: NNGRRT; PAM sequence: CTGGAT
gctagattggggaagttctc

SEQ ID NO: 25349 - DNA, 20 bp, Artificial Sequence
  Description of Artificial Sequence: Synthetic oligonucleotide
  Target: LAMA2; (+) strand; PAM type: NNGRRT; PAM sequence: CAGAGT
ttctcctggataatatcctg

SEQ ID NO: 25350 - DNA, 20 bp, Artificial Sequence
  Description of Artificial Sequence: Synthetic oligonucleotide
  Target: LAMA2; (+) strand; PAM type: NNGRRT; PAM sequence: GTGGAT
ttcaggtacaccaatcagac

SEQ ID NO: 25351 - DNA, 20 bp, Artificial Sequence
  Description of Artificial Sequence: Synthetic oligonucleotide
  Target: LAMA2; (+) strand; PAM type: NNGRRT; PAM sequence: TTGAAT
tcaacttctttgcctttggt

SEQ ID NO: 25352 - DNA, 20 bp, Artificial Sequence
  Description of Artificial Sequence: Synthetic oligonucleotide
  Target: LAMA2; (+) strand; PAM type: NNGRRT; PAM sequence: CAGAGT
ttgaatgtcctcccgtagct

SEQ ID NO: 25353 - DNA, 20 bp, Artificial Sequence
  Description of Artificial Sequence: Synthetic oligonucleotide
  Target: LAMA2; (+) strand; PAM type: NNGRRT; PAM sequence: TAGAGT
aggagaggcgctctgctttt

SEQ ID NO: 25354 - DNA, 20 bp, Artificial Sequence
  Description of Artificial Sequence: Synthetic oligonucleotide
  Target: LAMA2; (+) strand; PAM type: NNGRRT; PAM sequence: ATGGGT
ttgatgatggtgatgtacag

SEQ ID NO: 25355 - DNA, 20 bp, Artificial Sequence
  Description of Artificial Sequence: Synthetic oligonucleotide
  Target: LAMA2; (+) strand; PAM type: NNGRRT; PAM sequence: GTGGAT
tgtacagatgggttcttggt

SEQ ID NO: 25356 - DNA, 20 bp, Artificial Sequence
  Description of Artificial Sequence: Synthetic oligonucleotide
  Target: LAMA2; (+) strand; PAM type: NNGRRT; PAM sequence: TGGAGT
accctcaactgcaggtctgt

SEQ ID NO: 25357 - DNA, 20 bp, Artificial Sequence
  Description of Artificial Sequence: Synthetic oligonucleotide
  Target: LAMA2; (+) strand; PAM type: NNGRRT; PAM sequence: GGGGGT
gtgtcagtgtgcccctgctg

SEQ ID NO: 25358 - DNA, 20 bp, Artificial Sequence
  Description of Artificial Sequence: Synthetic oligonucleotide
  Target: LAMA2; (+) strand; PAM type: NNGRRT; PAM sequence: GGGGGT
gcctcccagttaggctgctc

SEQ ID NO: 25359 - DNA, 20 bp, Artificial Sequence
  Description of Artificial Sequence: Synthetic oligonucleotide
  Target: LAMA2; (+) strand; PAM type: NNGRRT; PAM sequence: AGGGGT
agttaggctgctcgggggtc

SEQ ID NO: 25360 - DNA, 20 bp, Artificial Sequence
  Description of Artificial Sequence: Synthetic oligonucleotide
  Target: LAMA2; (+) strand; PAM type: NNGRRT; PAM sequence: CAGGAT
agtaccttcccagccaggtg

SEQ ID NO: 25361 - DNA, 20 bp, Artificial Sequence
  Description of Artificial Sequence: Synthetic oligonucleotide
  Target: LAMA2; (+) strand; PAM type: NNGRRT; PAM sequence: TCGGGT
ccgtcggaaaggcgcagtat

SEQ ID NO: 25362 - DNA, 20 bp, Artificial Sequence
  Description of Artificial Sequence: Synthetic oligonucleotide
  Target: LAMA2; (+) strand; PAM type: NNGRRT; PAM sequence: GGGAGT
gaaaggcgcagtattcgggt

SEQ ID NO: 25363 - DNA, 20 bp, Artificial Sequence
  Description of Artificial Sequence: Synthetic oligonucleotide
  Target: LAMA2; (+) strand; PAM type: NNGRRT; PAM sequence: CCGAGT
tccctgaccccttgcgcttc

SEQ ID NO: 25364 - DNA, 20 bp, Artificial Sequence
  Description of Artificial Sequence: Synthetic oligonucleotide
  Target: LAMA2; (+) strand; PAM type: NNGRRT; PAM sequence: TAGAAT
ctgattagtttcatctgtct

SEQ ID NO: 25365 - DNA, 20 bp, Artificial Sequence
  Description of Artificial Sequence: Synthetic oligonucleotide
  Target: LAMA2; (+) strand; PAM type: NNGRRT; PAM sequence: TTGAAT
ttaatcgctaacattttccg

SEQ ID NO: 25366 - DNA, 20 bp, Artificial Sequence
  Description of Artificial Sequence: Synthetic oligonucleotide
  Target: LAMA2; (+) strand; PAM type: NNGRRT; PAM sequence: ATGAAT
tcgctaacattttccgttga

SEQ ID NO: 25367 - DNA, 20 bp, Artificial Sequence
  Description of Artificial Sequence: Synthetic oligonucleotide
  Target: LAMA2; (+) strand; PAM type: NNGRRT; PAM sequence: ATGAAT
gtttccagtttttaattatc

SEQ ID NO: 25368 - DNA, 20 bp, Artificial Sequence
  Description of Artificial Sequence: Synthetic oligonucleotide
  Target: LAMA2; (+) strand; PAM type: NNGRRT; PAM sequence: GGGAGT
ttcatttgtcatgtttatct

SEQ ID NO: 25369 - DNA, 20 bp, Artificial Sequence
  Description of Artificial Sequence: Synthetic oligonucleotide
  Target: LAMA2; (+) strand; PAM type: NNGRRT; PAM sequence: CTGGGT
tttatctgggagtaaaattc

SEQ ID NO: 25370 - DNA, 20 bp, Artificial Sequence
  Description of Artificial Sequence: Synthetic oligonucleotide
  Target: LAMA2; (+) strand; PAM type: NNGRRT; PAM sequence: TTGGAT
gtgtttggtaagttaatttt

SEQ ID NO: 25371 - DNA, 20 bp, Artificial Sequence
  Description of Artificial Sequence: Synthetic oligonucleotide
  Target: LAMA2; (+) strand; PAM type: NNGRRT; PAM sequence: ATGAAT
gtaagttaattttttggata

SEQ ID NO: 25372 - DNA, 20 bp, Artificial Sequence
  Description of Artificial Sequence: Synthetic oligonucleotide
  Target: LAMA2; (+) strand; PAM type: NNGRRT; PAM sequence: ATGGAT
ggataatgaatgataccgta

SEQ ID NO: 25373 - DNA, 20 bp, Artificial Sequence
  Description of Artificial Sequence: Synthetic oligonucleotide
  Target: LAMA2; (+) strand; PAM type: NNGRRT; PAM sequence: CAGAGT
ttcttcataggtatataaaa

SEQ ID NO: 25374 - DNA, 20 bp, Artificial Sequence
  Description of Artificial Sequence: Synthetic oligonucleotide
  Target: LAMA2; (+) strand; PAM type: NNGRRT; PAM sequence: CAGGGT
attttgtttaacttttaaag

SEQ ID NO: 25375 - DNA, 20 bp, Artificial Sequence
  Description of Artificial Sequence: Synthetic oligonucleotide
  Target: LAMA2; (+) strand; PAM type: NNGRRT; PAM sequence: ATGGGT
gtttaaaatctactataatt

SEQ ID NO: 25376 - DNA, 20 bp, Artificial Sequence
  Description of Artificial Sequence: Synthetic oligonucleotide
  Target: LAMA2; (+) strand; PAM type: NNGRRT; PAM sequence: AAGAAT
tcccaatttattcattaaat

SEQ ID NO: 25377 - DNA, 20 bp, Artificial Sequence
  Description of Artificial Sequence: Synthetic oligonucleotide
  Target: LAMA2; (+) strand; PAM type: NNGRRT; PAM sequence: TTGAAT
taagaatgtgtcaatgcatt

SEQ ID NO: 25378 - DNA, 20 bp, Artificial Sequence
  Description of Artificial Sequence: Synthetic oligonucleotide
  Target: LAMA2; (+) strand; PAM type: NNGRRT; PAM sequence: AGGAAT
caagacgattttttaacctc

SEQ ID NO: 25379 - DNA, 20 bp, Artificial Sequence
  Description of Artificial Sequence: Synthetic oligonucleotide
  Target: LAMA2; (+) strand; PAM type: NNGRRT; PAM sequence: CTGAAT
attagattcatacagtcagg

SEQ ID NO: 25380 - DNA, 20 bp, Artificial Sequence
  Description of Artificial Sequence: Synthetic oligonucleotide
  Target: LAMA2; (+) strand; PAM type: NNGRRT; PAM sequence: AGGAGT
ggaacagggcagtttcacag

SEQ ID NO: 25381 - DNA, 20 bp, Artificial Sequence
  Description of Artificial Sequence: Synthetic oligonucleotide
  Target: LAMA2; (+) strand; PAM type: NNGRRT; PAM sequence: TGGAAT
gggcagtttcacagaggagt

SEQ ID NO: 25382 - DNA, 20 bp, Artificial Sequence
  Description of Artificial Sequence: Synthetic oligonucleotide
  Target: LAMA2; (+) strand; PAM type: NNGRRT; PAM sequence: CTGAGT
cagaggagttggaatttgga

SEQ ID NO: 25383 - DNA, 20 bp, Artificial Sequence
  Description of Artificial Sequence: Synthetic oligonucleotide
  Target: LAMA2; (+) strand; PAM type: NNGRRT; PAM sequence: GAGAAT
ggactgagttttgaacagaa

SEQ ID NO: 25384 - DNA, 20 bp, Artificial Sequence
  Description of Artificial Sequence: Synthetic oligonucleotide
  Target: LAMA2; (+) strand; PAM type: NNGRRT; PAM sequence: GGGAAT
aaaagagcagttcaggagga

SEQ ID NO: 25385 - DNA, 20 bp, Artificial Sequence
  Description of Artificial Sequence: Synthetic oligonucleotide
  Target: LAMA2; (+) strand; PAM type: NNGRRT; PAM sequence: CAGGGT
aaaggcagattaagttaaaa

SEQ ID NO: 25386 - DNA, 20 bp, Artificial Sequence
  Description of Artificial Sequence: Synthetic oligonucleotide
  Target: LAMA2; (+) strand; PAM type: NNGRRT; PAM sequence: CAGGAT
gttgacaaattgggagaaca

SEQ ID NO: 25387 - DNA, 20 bp, Artificial Sequence
  Description of Artificial Sequence: Synthetic oligonucleotide
  Target: LAMA2; (+) strand; PAM type: NNGRRT; PAM sequence: TGGAAT
agaacacaggattaagggac

SEQ ID NO: 25388 - DNA, 20 bp, Artificial Sequence
  Description of Artificial Sequence: Synthetic oligonucleotide
  Target: LAMA2; (+) strand; PAM type: NNGRRT; PAM sequence: TGGGGT
gagattaattaaagtgaaga

SEQ ID NO: 25389 - DNA, 20 bp, Artificial Sequence
  Description of Artificial Sequence: Synthetic oligonucleotide
  Target: LAMA2; (+) strand; PAM type: NNGRRT; PAM sequence: CAGAGT
tgtgttactgaagtgaactg

SEQ ID NO: 25390 - DNA, 20 bp, Artificial Sequence
  Description of Artificial Sequence: Synthetic oligonucleotide
  Target: LAMA2; (+) strand; PAM type: NNGRRT; PAM sequence: ATGAGT
gagtacagtcactggcattg

SEQ ID NO: 25391 - DNA, 20 bp, Artificial Sequence
  Description of Artificial Sequence: Synthetic oligonucleotide
  Target: LAMA2; (+) strand; PAM type: NNGRRT; PAM sequence: TGGAAT
agacaccatattcttacttc

SEQ ID NO: 25392 - DNA, 20 bp, Artificial Sequence
  Description of Artificial Sequence: Synthetic oligonucleotide
  Target: LAMA2; (+) strand; PAM type: NNGRRT; PAM sequence: TGGAAT
ataatcatatttttatgtag

SEQ ID NO: 25393 - DNA, 20 bp, Artificial Sequence
  Description of Artificial Sequence: Synthetic oligonucleotide
  Target: LAMA2; (+) strand; PAM type: NNGRRT; PAM sequence: GAGAAT
tggaattacctcagcacatg

SEQ ID NO: 25394 - DNA, 20 bp, Artificial Sequence
  Description of Artificial Sequence: Synthetic oligonucleotide
  Target: LAMA2; (+) strand; PAM type: NNGRRT; PAM sequence: ATGAGT
acatggagaatctaaattaa

SEQ ID NO: 25395 - DNA, 20 bp, Artificial Sequence
  Description of Artificial Sequence: Synthetic oligonucleotide
  Target: LAMA2; (+) strand; PAM type: NNGRRT; PAM sequence: GAGGGT
caaagtcttagttacctttt

SEQ ID NO: 25396 - DNA, 20 bp, Artificial Sequence
  Description of Artificial Sequence: Synthetic oligonucleotide
  Target: LAMA2; (+) strand; PAM type: NNGRRT; PAM sequence: GTGGGT
ttcagctatcctcttctgct

SEQ ID NO: 25397 - DNA, 20 bp, Artificial Sequence
  Description of Artificial Sequence: Synthetic oligonucleotide
  Target: LAMA2; (+) strand; PAM type: NNGRRT; PAM sequence: AAGGAT
gcaaaaattagaaaaataaa

SEQ ID NO: 25398 - DNA, 20 bp, Artificial Sequence
  Description of Artificial Sequence: Synthetic oligonucleotide
  Target: LAMA2; (+) strand; PAM type: NNGRRT; PAM sequence: TGGGAT
tcccaaaaaccagctggttc

SEQ ID NO: 25399 - DNA, 20 bp, Artificial Sequence
  Description of Artificial Sequence: Synthetic oligonucleotide
  Target: LAMA2; (+) strand; PAM type: NNGRRT; PAM sequence: GTGAAT
aaatgctacttaaatagtag

SEQ ID NO: 25400 - DNA, 20 bp, Artificial Sequence
  Description of Artificial Sequence: Synthetic oligonucleotide
  Target: LAMA2; (+) strand; PAM type: NNGRRT; PAM sequence: GTGAAT
tctgcatgtttattagagaa

SEQ ID NO: 25401 - DNA, 20 bp, Artificial Sequence
  Description of Artificial Sequence: Synthetic oligonucleotide
  Target: LAMA2; (+) strand; PAM type: NNGRRT; PAM sequence: AAGAGT
tcatggacacctcaatttag

SEQ ID NO: 25402 - DNA, 20 bp, Artificial Sequence
  Description of Artificial Sequence: Synthetic oligonucleotide
  Target: LAMA2; (+) strand; PAM type: NNGRRT; PAM sequence: CTGGGT
aaaacagactgataattaaa

SEQ ID NO: 25403 - DNA, 20 bp, Artificial Sequence
  Description of Artificial Sequence: Synthetic oligonucleotide
  Target: LAMA2; (+) strand; PAM type: NNGRRT; PAM sequence: TTGGGT
ttaaactgggttgatcatta

SEQ ID NO: 25404 - DNA, 20 bp, Artificial Sequence
  Description of Artificial Sequence: Synthetic oligonucleotide
  Target: LAMA2; (+) strand; PAM type: NNGRRT; PAM sequence: TAGAAT
aaatgtgttcttaaattcag

SEQ ID NO: 25405 - DNA, 20 bp, Artificial Sequence
  Description of Artificial Sequence: Synthetic oligonucleotide
  Target: LAMA2; (+) strand; PAM type: NNGRRT; PAM sequence: ATGAGT
acaattagccagacctattt

SEQ ID NO: 25406 - DNA, 20 bp, Artificial Sequence
  Description of Artificial Sequence: Synthetic oligonucleotide
  Target: LAMA2; (+) strand; PAM type: NNGRRT; PAM sequence: CTGAAT
tagagataaggttgagatgg

SEQ ID NO: 25407 - DNA, 20 bp, Artificial Sequence
  Description of Artificial Sequence: Synthetic oligonucleotide
  Target: LAMA2; (+) strand; PAM type: NNGRRT; PAM sequence: CTGAAT
ggtgtcacatggaccttttc

SEQ ID NO: 25408 - DNA, 20 bp, Artificial Sequence
  Description of Artificial Sequence: Synthetic oligonucleotide
  Target: LAMA2; (+) strand; PAM type: NNGRRT; PAM sequence: ATGGAT
taaacaaggcagaaaggtta

SEQ ID NO: 25409 - DNA, 20 bp, Artificial Sequence
  Description of Artificial Sequence: Synthetic oligonucleotide
  Target: LAMA2; (+) strand; PAM type: NNGRRT; PAM sequence: ACGAAT
ttaaaaaaatacatacacat

SEQ ID NO: 25410 - DNA, 20 bp, Artificial Sequence
  Description of Artificial Sequence: Synthetic oligonucleotide
  Target: LAMA2; (+) strand; PAM type: NNGRRT; PAM sequence: AGGAAT
aacaaggtgagagctaagga

SEQ ID NO: 25411 - DNA, 20 bp, Artificial Sequence
  Description of Artificial Sequence: Synthetic oligonucleotide
  Target: LAMA2; (+) strand; PAM type: NNGRRT; PAM sequence: TAGGAT
agacatgtcttccagttgtg

SEQ ID NO: 25412 - DNA, 20 bp, Artificial Sequence
  Description of Artificial Sequence: Synthetic oligonucleotide
  Target: LAMA2; (+) strand; PAM type: NNGRRT; PAM sequence: TTGAAT
ccctttcttttcttctatat

SEQ ID NO: 25413 - DNA, 20 bp, Artificial Sequence
  Description of Artificial Sequence: Synthetic oligonucleotide
  Target: LAMA2; (+) strand; PAM type: NNGRRT; PAM sequence: GGGAGT
cttatataactacactcgat

SEQ ID NO: 25414 - DNA, 20 bp, Artificial Sequence
  Description of Artificial Sequence: Synthetic oligonucleotide
  Target: LAMA2; (+) strand; PAM type: NNGRRT; PAM sequence: TGGAAT
ataaaaattgtatcacaatt

SEQ ID NO: 25415 - DNA, 20 bp, Artificial Sequence
  Description of Artificial Sequence: Synthetic oligonucleotide
  Target: LAMA2; (+) strand; PAM type: NNGRRT; PAM sequence: GTGGAT
ttggaatgacgtttatgcaa

SEQ ID NO: 25416 - DNA, 20 bp, Artificial Sequence
  Description of Artificial Sequence: Synthetic oligonucleotide
  Target: LAMA2; (+) strand; PAM type: NNGRRT; PAM sequence: GGGAAT
tgtagtgaaaacaaccgtgg

SEQ ID NO: 25417 - DNA, 20 bp, Artificial Sequence
  Description of Artificial Sequence: Synthetic oligonucleotide
  Target: LAMA2; (+) strand; PAM type: NNGRRT; PAM sequence: AGGAAT
taattagtcactattttaaa

SEQ ID NO: 25418 - DNA, 20 bp, Artificial Sequence
  Description of Artificial Sequence: Synthetic oligonucleotide
  Target: LAMA2; (+) strand; PAM type: NNGRRT; PAM sequence: GTGGGT
tagcagtttaatggtcttaa

SEQ ID NO: 25419 - DNA, 20 bp, Artificial Sequence
  Description of Artificial Sequence: Synthetic oligonucleotide
  Target: LAMA2; (+) strand; PAM type: NNGRRT; PAM sequence: TGGGAT
aaaaaaactatttggcaaat

SEQ ID NO: 25420 - DNA, 20 bp, Artificial Sequence
  Description of Artificial Sequence: Synthetic oligonucleotide
  Target: LAMA2; (+) strand; PAM type: NNGRRT; PAM sequence: GAGAAT
tatttggcaaattgggatat

SEQ ID NO: 25421 - DNA, 20 bp, Artificial Sequence
  Description of Artificial Sequence: Synthetic oligonucleotide
  Target: LAMA2; (+) strand; PAM type: NNGRRT; PAM sequence: TTGGGT
ttgattcatattcccatttg

SEQ ID NO: 25422 - DNA, 20 bp, Artificial Sequence
  Description of Artificial Sequence: Synthetic oligonucleotide
  Target: LAMA2; (+) strand; PAM type: NNGRRT; PAM sequence: ATGAAT
aatcactgagcttctgttac

SEQ ID NO: 25423 - DNA, 20 bp, Artificial Sequence
  Description of Artificial Sequence: Synthetic oligonucleotide
  Target: LAMA2; (+) strand; PAM type: NNGRRT; PAM sequence: CTGAGT
agcttctgttacatgaatac

SEQ ID NO: 25424 - DNA, 20 bp, Artificial Sequence
  Description of Artificial Sequence: Synthetic oligonucleotide
  Target: LAMA2; (+) strand; PAM type: NNGRRT; PAM sequence: TGGAGT
ttatgtggctacttctgaaa

SEQ ID NO: 25425 - DNA, 20 bp, Artificial Sequence
  Description of Artificial Sequence: Synthetic oligonucleotide
  Target: LAMA2; (+) strand; PAM type: NNGRRT; PAM sequence: TAGAAT
caatgattgcttttttaagt

SEQ ID NO: 25426 - DNA, 20 bp, Artificial Sequence
  Description of Artificial Sequence: Synthetic oligonucleotide
  Target: LAMA2; (+) strand; PAM type: NNGRRT; PAM sequence: GTGAGT
ccatgaacttagggctagag

SEQ ID NO: 25427 - DNA, 20 bp, Artificial Sequence
  Description of Artificial Sequence: Synthetic oligonucleotide
  Target: LAMA2; (+) strand; PAM type: NNGRRT; PAM sequence: CTGGAT
gaaacctgttggccctccag

SEQ ID NO: 25428 - DNA, 20 bp, Artificial Sequence
  Description of Artificial Sequence: Synthetic oligonucleotide
  Target: LAMA2; (+) strand; PAM type: NNGRRT; PAM sequence: TGGAAT
gatctttccactgttttaac

SEQ ID NO: 25429 - DNA, 20 bp, Artificial Sequence
  Description of Artificial Sequence: Synthetic oligonucleotide
  Target: LAMA2; (+) strand; PAM type: NNGRRT; PAM sequence: ATGAAT
tttccactgttttaactgga

SEQ ID NO: 25430 - DNA, 20 bp, Artificial Sequence
  Description of Artificial Sequence: Synthetic oligonucleotide
  Target: LAMA2; (+) strand; PAM type: NNGRRT; PAM sequence: TTGGAT
actgttttaactggaatgaa

SEQ ID NO: 25431 - DNA, 20 bp, Artificial Sequence
  Description of Artificial Sequence: Synthetic oligonucleotide
  Target: LAMA2; (+) strand; PAM type: NNGRRT; PAM sequence: TTGGAT
ttataaggcagatggtaaga

SEQ ID NO: 25432 - DNA, 20 bp, Artificial Sequence
  Description of Artificial Sequence: Synthetic oligonucleotide
  Target: LAMA2; (+) strand; PAM type: NNGRRT; PAM sequence: TGGGAT
gatggtaagattggatctga

SEQ ID NO: 25433 - DNA, 20 bp, Artificial Sequence
  Description of Artificial Sequence: Synthetic oligonucleotide
  Target: LAMA2; (+) strand; PAM type: NNGRRT; PAM sequence: TGGAGT
taagattggatctgatggga

SEQ ID NO: 25434 - DNA, 20 bp, Artificial Sequence
  Description of Artificial Sequence: Synthetic oligonucleotide
  Target: LAMA2; (+) strand; PAM type: NNGRRT; PAM sequence: GGGAGT
cattaggtttgagatagcta

SEQ ID NO: 25435 - DNA, 20 bp, Artificial Sequence
  Description of Artificial Sequence: Synthetic oligonucleotide
  Target: LAMA2; (+) strand; PAM type: NNGRRT; PAM sequence: CAGAAT
aaaaaaaaaaaaactaatta

SEQ ID NO: 25436 - DNA, 20 bp, Artificial Sequence
  Description of Artificial Sequence: Synthetic oligonucleotide
  Target: LAMA2; (+) strand; PAM type: NNGRRT; PAM sequence: TTGAGT
caatccacatgcaaaattgg

SEQ ID NO: 25437 - DNA, 20 bp, Artificial Sequence
  Description of Artificial Sequence: Synthetic oligonucleotide
  Target: LAMA2; (+) strand; PAM type: NNGRRT; PAM sequence: ATGAAT
tattcctttttaagcaacaa

SEQ ID NO: 25438 - DNA, 20 bp, Artificial Sequence
  Description of Artificial Sequence: Synthetic oligonucleotide
  Target: LAMA2; (+) strand; PAM type: NNGRRT; PAM sequence: TGGAAT
tcagcactagttcttcccca

SEQ ID NO: 25439 - DNA, 20 bp, Artificial Sequence
  Description of Artificial Sequence: Synthetic oligonucleotide
  Target: LAMA2; (+) strand; PAM type: NNGRRT; PAM sequence: CTGAAT
gtttctccacaaccacttta

SEQ ID NO: 25440 - DNA, 20 bp, Artificial Sequence
  Description of Artificial Sequence: Synthetic oligonucleotide
  Target: LAMA2; (+) strand; PAM type: NNGRRT; PAM sequence: AAGAAT
tactgaatgtgtataattat

SEQ ID NO: 25441 - DNA, 20 bp, Artificial Sequence
  Description of Artificial Sequence: Synthetic oligonucleotide
  Target: LAMA2; (+) strand; PAM type: NNGRRT; PAM sequence: CAGGAT
cccaggctgaagtgcagtgg

SEQ ID NO: 25442 - DNA, 20 bp, Artificial Sequence
  Description of Artificial Sequence: Synthetic oligonucleotide
  Target: LAMA2; (+) strand; PAM type: NNGRRT; PAM sequence: TAGGAT
acctcggcctcccatagtgc

SEQ ID NO: 25443 - DNA, 20 bp, Artificial Sequence
  Description of Artificial Sequence: Synthetic oligonucleotide
  Target: LAMA2; (+) strand; PAM type: NNGRRT; PAM sequence: ATGGGT
actcgttgttataaagtggt

SEQ ID NO: 25444 - DNA, 20 bp, Artificial Sequence
  Description of Artificial Sequence: Synthetic oligonucleotide
  Target: LAMA2; (+) strand; PAM type: NNGRRT; PAM sequence: AAGAGT
taaagtggtatgggttaatc

SEQ ID NO: 25445 - DNA, 20 bp, Artificial Sequence
  Description of Artificial Sequence: Synthetic oligonucleotide
  Target: LAMA2; (+) strand; PAM type: NNGRRT; PAM sequence: GTGAGT
ttagctctgtttttctgtgt

SEQ ID NO: 25446 - DNA, 20 bp, Artificial Sequence
  Description of Artificial Sequence: Synthetic oligonucleotide
  Target: LAMA2; (+) strand; PAM type: NNGRRT; PAM sequence: ATGGAT
agtaaagtaggacttctgaa

SEQ ID NO: 25447 - DNA, 20 bp, Artificial Sequence
  Description of Artificial Sequence: Synthetic oligonucleotide
  Target: LAMA2; (+) strand; PAM type: NNGRRT; PAM sequence: CAGGAT
tatattggggaaaaacaatt

SEQ ID NO: 25448 - DNA, 20 bp, Artificial Sequence
  Description of Artificial Sequence: Synthetic oligonucleotide
  Target: LAMA2; (+) strand; PAM type: NNGRRT; PAM sequence: TAGGAT
aggatctaaggtaaactttt

SEQ ID NO: 25449 - DNA, 20 bp, Artificial Sequence
  Description of Artificial Sequence: Synthetic oligonucleotide
  Target: LAMA2; (+) strand; PAM type: NNGRRT; PAM sequence: TAGAAT
taaatcatctcaagtgaaat

SEQ ID NO: 25450 - DNA, 20 bp, Artificial Sequence
  Description of Artificial Sequence: Synthetic oligonucleotide
  Target: LAMA2; (+) strand; PAM type: NNGRRT; PAM sequence: CTGAAT
cagatttattaggtgttaaa

SEQ ID NO: 25451 - DNA, 20 bp, Artificial Sequence
  Description of Artificial Sequence: Synthetic oligonucleotide
  Target: LAMA2; (+) strand; PAM type: NNGRRT; PAM sequence: ATGGGT
gtttccttagggcaaacaat

SEQ ID NO: 25452 - DNA, 20 bp, Artificial Sequence
  Description of Artificial Sequence: Synthetic oligonucleotide
  Target: LAMA2; (+) strand; PAM type: NNGRRT; PAM sequence: TGGAAT
ttctgatcattttcctgata

SEQ ID NO: 25453 - DNA, 20 bp, Artificial Sequence
  Description of Artificial Sequence: Synthetic oligonucleotide
  Target: LAMA2; (+) strand; PAM type: NNGRRT; PAM sequence: CAGGAT
cataagtaatgtcacggtgt

SEQ ID NO: 25454 - DNA, 20 bp, Artificial Sequence
  Description of Artificial Sequence: Synthetic oligonucleotide
  Target: LAMA2; (+) strand; PAM type: NNGRRT; PAM sequence: TTGGAT
aggattgggaggtgtgcatt

SEQ ID NO: 25455 - DNA, 20 bp, Artificial Sequence
  Description of Artificial Sequence: Synthetic oligonucleotide
  Target: LAMA2; (+) strand; PAM type: NNGRRT; PAM sequence: AGGAAT
tgtttcaaatagtggagatc

SEQ ID NO: 25456 - DNA, 20 bp, Artificial Sequence
  Description of Artificial Sequence: Synthetic oligonucleotide
  Target: LAMA2; (+) strand; PAM type: NNGRRT; PAM sequence: GAGAAT
tttcttctatttctctcttt

SEQ ID NO: 25457 - DNA, 20 bp, Artificial Sequence
  Description of Artificial Sequence: Synthetic oligonucleotide
  Target: LAMA2; (+) strand; PAM type: NNGRRT; PAM sequence: TGGGAT
gagaatcatgaggcactcat

SEQ ID NO: 25458 - DNA, 20 bp, Artificial Sequence
  Description of Artificial Sequence: Synthetic oligonucleotide
  Target: LAMA2; (+) strand; PAM type: NNGRRT; PAM sequence: TTGGAT
actcattgggattgtggttc

SEQ ID NO: 25459 - DNA, 20 bp, Artificial Sequence
  Description of Artificial Sequence: Synthetic oligonucleotide
  Target: LAMA2; (+) strand; PAM type: NNGRRT; PAM sequence: GTGAGT
cctttttgtcggttcaaatg

SEQ ID NO: 25460 - DNA, 20 bp, Artificial Sequence
  Description of Artificial Sequence: Synthetic oligonucleotide
  Target: LAMA2; (+) strand; PAM type: NNGRRT; PAM sequence: ATGGAT
atcatcactgtggccttcta

SEQ ID NO: 25461 - DNA, 20 bp, Artificial Sequence
  Description of Artificial Sequence: Synthetic oligonucleotide
  Target: LAMA2; (+) strand; PAM type: NNGRRT; PAM sequence: ATGAAT
gaagtggactggtttagatg

SEQ ID NO: 25462 - DNA, 20 bp, Artificial Sequence
  Description of Artificial Sequence: Synthetic oligonucleotide
  Target: LAMA2; (+) strand; PAM type: NNGRRT; PAM sequence: CTGAAT
aaaaatgagctgtatccatt

SEQ ID NO: 25463 - DNA, 20 bp, Artificial Sequence
  Description of Artificial Sequence: Synthetic oligonucleotide
  Target: LAMA2; (+) strand; PAM type: NNGRRT; PAM sequence: TTGGAT
tgtatccattctgaattcct

SEQ ID NO: 25464 - DNA, 20 bp, Artificial Sequence
  Description of Artificial Sequence: Synthetic oligonucleotide
  Target: LAMA2; (+) strand; PAM type: NNGRRT; PAM sequence: TGGAAT
tctgaattcctttggattta

SEQ ID NO: 25465 - DNA, 20 bp, Artificial Sequence
  Description of Artificial Sequence: Synthetic oligonucleotide
  Target: LAMA2; (+) strand; PAM type: NNGRRT; PAM sequence: CGGAGT
tttcttttttttttttttga

SEQ ID NO: 25466 - DNA, 20 bp, Artificial Sequence
  Description of Artificial Sequence: Synthetic oligonucleotide
  Target: LAMA2; (+) strand; PAM type: NNGRRT; PAM sequence: TGGAGT
tcctgctctgtcacccaggc

SEQ ID NO: 25467 - DNA, 20 bp, Artificial Sequence
  Description of Artificial Sequence: Synthetic oligonucleotide
  Target: LAMA2; (+) strand; PAM type: NNGRRT; PAM sequence: CCGGGT
ctcactgcaacctccacctc

SEQ ID NO: 25468 - DNA, 20 bp, Artificial Sequence
  Description of Artificial Sequence: Synthetic oligonucleotide
  Target: LAMA2; (+) strand; PAM type: NNGRRT; PAM sequence: TAGAGT
gattctccttcctcagcctc

SEQ ID NO: 25469 - DNA, 20 bp, Artificial Sequence
  Description of Artificial Sequence: Synthetic oligonucleotide
  Target: LAMA2; (+) strand; PAM type: NNGRRT; PAM sequence: CAGGAT
ttttgtatttttagtagaga

SEQ ID NO: 25470 - DNA, 20 bp, Artificial Sequence
  Description of Artificial Sequence: Synthetic oligonucleotide
  Target: LAMA2; (+) strand; PAM type: NNGRRT; PAM sequence: TGGGAT
gcctcaggctcccaaagtgc

SEQ ID NO: 25471 - DNA, 20 bp, Artificial Sequence
  Description of Artificial Sequence: Synthetic oligonucleotide
  Target: LAMA2; (+) strand; PAM type: NNGRRT; PAM sequence: TTGAAT
tttctgacctctagactagt

SEQ ID NO: 25472 - DNA, 20 bp, Artificial Sequence
  Description of Artificial Sequence: Synthetic oligonucleotide
  Target: LAMA2; (+) strand; PAM type: NNGRRT; PAM sequence: GAGAGT
atatatgcacacatgtatat

SEQ ID NO: 25473 - DNA, 20 bp, Artificial Sequence
  Description of Artificial Sequence: Synthetic oligonucleotide
  Target: LAMA2; (+) strand; PAM type: NNGRRT; PAM sequence: AGGGAT
ttgactttttatgttgagaa

SEQ ID NO: 25474 - DNA, 20 bp, Artificial Sequence
  Description of Artificial Sequence: Synthetic oligonucleotide
  Target: LAMA2; (+) strand; PAM type: NNGRRT; PAM sequence: GAGAGT
tatgttgagaaagggatgtt

SEQ ID NO: 25475 - DNA, 20 bp, Artificial Sequence
  Description of Artificial Sequence: Synthetic oligonucleotide
  Target: LAMA2; (+) strand; PAM type: NNGRRT; PAM sequence: TTGAAT
gaccagaaaagggctgatta

SEQ ID NO: 25476 - DNA, 20 bp, Artificial Sequence
  Description of Artificial Sequence: Synthetic oligonucleotide
  Target: LAMA2; (+) strand; PAM type: NNGRRT; PAM sequence: TTGGAT
agaggctttgaactgacaat

SEQ ID NO: 25477 - DNA, 20 bp, Artificial Sequence
  Description of Artificial Sequence: Synthetic oligonucleotide
  Target: LAMA2; (+) strand; PAM type: NNGRRT; PAM sequence: AGGAAT
ttttcagtataagtatagat

SEQ ID NO: 25478 - DNA, 20 bp, Artificial Sequence
  Description of Artificial Sequence: Synthetic oligonucleotide
  Target: LAMA2; (+) strand; PAM type: NNGRRT; PAM sequence: TTGAGT
gataggaattacgtttaaat

SEQ ID NO: 25479 - DNA, 20 bp, Artificial Sequence
  Description of Artificial Sequence: Synthetic oligonucleotide
  Target: LAMA2; (+) strand; PAM type: NNGRRT; PAM sequence: AAGGGT
ctaaaatgatgactaaaagt

SEQ ID NO: 25480 - DNA, 20 bp, Artificial Sequence
  Description of Artificial Sequence: Synthetic oligonucleotide
  Target: LAMA2; (+) strand; PAM type: NNGRRT; PAM sequence: TTGAAT
ttctaagctatttttgtagg

SEQ ID NO: 25481 - DNA, 20 bp, Artificial Sequence
  Description of Artificial Sequence: Synthetic oligonucleotide
  Target: LAMA2; (+) strand; PAM type: NNGRRT; PAM sequence: ATGAAT
agtcttaaccccaggtaact

SEQ ID NO: 25482 - DNA, 20 bp, Artificial Sequence
  Description of Artificial Sequence: Synthetic oligonucleotide
  Target: LAMA2; (+) strand; PAM type: NNGRRT; PAM sequence: TAGGGT
aatgtgaccttatttgcaaa

SEQ ID NO: 25483 - DNA, 20 bp, Artificial Sequence
  Description of Artificial Sequence: Synthetic oligonucleotide
  Target: LAMA2; (+) strand; PAM type: NNGRRT; PAM sequence: TAGGGT
aaggtgatgtcatactggtt

SEQ ID NO: 25484 - DNA, 20 bp, Artificial Sequence
  Description of Artificial Sequence: Synthetic oligonucleotide
  Target: LAMA2; (+) strand; PAM type: NNGRRT; PAM sequence: GGGAGT
gtaaagatggaggcagagat

SEQ ID NO: 25485 - DNA, 20 bp, Artificial Sequence
  Description of Artificial Sequence: Synthetic oligonucleotide
  Target: LAMA2; (+) strand; PAM type: NNGRRT; PAM sequence: CAGAGT
ctaggctgacattttggttt

SEQ ID NO: 25486 - DNA, 20 bp, Artificial Sequence
  Description of Artificial Sequence: Synthetic oligonucleotide
  Target: LAMA2; (+) strand; PAM type: NNGRRT; PAM sequence: ATGAAT
acagcctcctgaactgtgaa

SEQ ID NO: 25487 - DNA, 20 bp, Artificial Sequence
  Description of Artificial Sequence: Synthetic oligonucleotide
  Target: LAMA2; (+) strand; PAM type: NNGRRT; PAM sequence: TAGGGT
tattattatactttaagttt

SEQ ID NO: 25488 - DNA, 20 bp, Artificial Sequence
  Description of Artificial Sequence: Synthetic oligonucleotide
  Target: LAMA2; (+) strand; PAM type: NNGRRT; PAM sequence: CAGAGT
ccccaccccacaacagtccc

SEQ ID NO: 25489 - DNA, 20 bp, Artificial Sequence
  Description of Artificial Sequence: Synthetic oligonucleotide
  Target: LAMA2; (+) strand; PAM type: NNGRRT; PAM sequence: ATGAGT
tcattgttcaattcccacct

SEQ ID NO: 25490 - DNA, 20 bp, Artificial Sequence
  Description of Artificial Sequence: Synthetic oligonucleotide
  Target: LAMA2; (+) strand; PAM type: NNGRRT; PAM sequence: GAGAAT
ttcaattcccacctatgagt

SEQ ID NO: 25491 - DNA, 20 bp, Artificial Sequence
  Description of Artificial Sequence: Synthetic oligonucleotide
  Target: LAMA2; (+) strand; PAM type: NNGRRT; PAM sequence: GAGAAT
tgtccttgtgatagtttact

SEQ ID NO: 25492 - DNA, 20 bp, Artificial Sequence
  Description of Artificial Sequence: Synthetic oligonucleotide
  Target: LAMA2; (+) strand; PAM type: NNGRRT; PAM sequence: TTGGGT
agtctatctttgttggacat

SEQ ID NO: 25493 - DNA, 20 bp, Artificial Sequence
  Description of Artificial Sequence: Synthetic oligonucleotide
  Target: LAMA2; (+) strand; PAM type: NNGRRT; PAM sequence: TTGGGT
gcagcatgatttatagtcct

SEQ ID NO: 25494 - DNA, 20 bp, Artificial Sequence
  Description of Artificial Sequence: Synthetic oligonucleotide
  Target: LAMA2; (+) strand; PAM type: NNGRRT; PAM sequence: TGGGAT
tttgggtatatacccagtaa

SEQ ID NO: 25495 - DNA, 20 bp, Artificial Sequence
  Description of Artificial Sequence: Synthetic oligonucleotide
  Target: LAMA2; (+) strand; PAM type: NNGRRT; PAM sequence: CTGGGT
tatacccagtaatgggatgg

SEQ ID NO: 25496 - DNA, 20 bp, Artificial Sequence
  Description of Artificial Sequence: Synthetic oligonucleotide
  Target: LAMA2; (+) strand; PAM type: NNGRRT; PAM sequence: AGGAAT
tttctagttctagatccctg

SEQ ID NO: 25497 - DNA, 20 bp, Artificial Sequence
  Description of Artificial Sequence: Synthetic oligonucleotide
  Target: LAMA2; (+) strand; PAM type: NNGRRT; PAM sequence: TGGGGT
gtccttcgcccacttgttga

SEQ ID NO: 25498 - DNA, 20 bp, Artificial Sequence
  Description of Artificial Sequence: Synthetic oligonucleotide
  Target: LAMA2; (+) strand; PAM type: NNGRRT; PAM sequence: TTGAGT
tttttttcttgtaaatttgt

SEQ ID NO: 25499 - DNA, 20 bp, Artificial Sequence
  Description of Artificial Sequence: Synthetic oligonucleotide
  Target: LAMA2; (+) strand; PAM type: NNGRRT; PAM sequence: CTGGAT
gtttgagttcattgtagatt

SEQ ID NO: 25500 - DNA, 20 bp, Artificial Sequence
  Description of Artificial Sequence: Synthetic oligonucleotide
  Target: LAMA2; (+) strand; PAM type: NNGRRT; PAM sequence: CTGAAT
tctttgcccatgcctatgtc

SEQ ID NO: 25501 - DNA, 20 bp, Artificial Sequence
  Description of Artificial Sequence: Synthetic oligonucleotide
  Target: LAMA2; (+) strand; PAM type: NNGRRT; PAM sequence: TTGAAT
gtttaattctttaatccatc

SEQ ID NO: 25502 - DNA, 20 bp, Artificial Sequence
  Description of Artificial Sequence: Synthetic oligonucleotide
  Target: LAMA2; (+) strand; PAM type: NNGRRT; PAM sequence: AGGGAT
ttttgtataaggtgtaagga

SEQ ID NO: 25503 - DNA, 20 bp, Artificial Sequence
  Description of Artificial Sequence: Synthetic oligonucleotide
  Target: LAMA2; (+) strand; PAM type: NNGRRT; PAM sequence: GGGAAT
ccagcaccatttattaaata

SEQ ID NO: 25504 - DNA, 20 bp, Artificial Sequence
  Description of Artificial Sequence: Synthetic oligonucleotide
  Target: LAMA2; (+) strand; PAM type: NNGRRT; PAM sequence: TAGGAT
ccagctttgttcttttggct

SEQ ID NO: 25505 - DNA, 20 bp, Artificial Sequence
  Description of Artificial Sequence: Synthetic oligonucleotide
  Target: LAMA2; (+) strand; PAM type: NNGRRT; PAM sequence: GGGAAT
aaagtcattggtagcttgat

SEQ ID NO: 25506 - DNA, 20 bp, Artificial Sequence
  Description of Artificial Sequence: Synthetic oligonucleotide
  Target: LAMA2; (+) strand; PAM type: NNGRRT; PAM sequence: TTGAAT
gtagcttgatgggaatggca

SEQ ID NO: 25507 - DNA, 20 bp, Artificial Sequence
  Description of Artificial Sequence: Synthetic oligonucleotide
  Target: LAMA2; (+) strand; PAM type: NNGRRT; PAM sequence: TGGAAT
attcttcctacccatgagca

SEQ ID NO: 25508 - DNA, 20 bp, Artificial Sequence
  Description of Artificial Sequence: Synthetic oligonucleotide
  Target: LAMA2; (+) strand; PAM type: NNGRRT; PAM sequence: TTGGAT
tccttcacatcccttgtaag

SEQ ID NO: 25509 - DNA, 20 bp, Artificial Sequence
  Description of Artificial Sequence: Synthetic oligonucleotide
  Target: LAMA2; (+) strand; PAM type: NNGRRT; PAM sequence: TAGAAT
agttggattcctaggtattt

SEQ ID NO: 25510 - DNA, 20 bp, Artificial Sequence
  Description of Artificial Sequence: Synthetic oligonucleotide
  Target: LAMA2; (+) strand; PAM type: NNGRRT; PAM sequence: GGGGAT
caaatataactatattaaaa

SEQ ID NO: 25511 - DNA, 20 bp, Artificial Sequence
  Description of Artificial Sequence: Synthetic oligonucleotide
  Target: LAMA2; (+) strand; PAM type: NNGRRT; PAM sequence: AAGGAT
tccaatatatttaatacaga

SEQ ID NO: 25512 - DNA, 20 bp, Artificial Sequence
  Description of Artificial Sequence: Synthetic oligonucleotide
  Target: LAMA2; (+) strand; PAM type: NNGRRT; PAM sequence: TAGAAT
aaggatgaagatatagatag

SEQ ID NO: 25513 - DNA, 20 bp, Artificial Sequence
  Description of Artificial Sequence: Synthetic oligonucleotide
  Target: LAMA2; (+) strand; PAM type: NNGRRT; PAM sequence: AGGAAT
atagatagtagaatgatcag

SEQ ID NO: 25514 - DNA, 20 bp, Artificial Sequence
  Description of Artificial Sequence: Synthetic oligonucleotide
  Target: LAMA2; (+) strand; PAM type: NNGRRT; PAM sequence: AGGAAT
ttgatgctaagccatgctgc

SEQ ID NO: 25515 - DNA, 20 bp, Artificial Sequence
  Description of Artificial Sequence: Synthetic oligonucleotide
  Target: LAMA2; (+) strand; PAM type: NNGRRT; PAM sequence: ATGAAT
tgctaagccatgctgcagga

SEQ ID NO: 25516 - DNA, 20 bp, Artificial Sequence
  Description of Artificial Sequence: Synthetic oligonucleotide
  Target: LAMA2; (+) strand; PAM type: NNGRRT; PAM sequence: CAGGGT
tacaggtccatctggtgact

SEQ ID NO: 25517 - DNA, 20 bp, Artificial Sequence
  Description of Artificial Sequence: Synthetic oligonucleotide
  Target: LAMA2; (+) strand; PAM type: NNGRRT; PAM sequence: AGGAGT
ttgctatggcagaggaagag

SEQ ID NO: 25518 - DNA, 20 bp, Artificial Sequence
  Description of Artificial Sequence: Synthetic oligonucleotide
  Target: LAMA2; (+) strand; PAM type: NNGRRT; PAM sequence: AAGAAT
gctccacatttttacaatct

SEQ ID NO: 25519 - DNA, 20 bp, Artificial Sequence
  Description of Artificial Sequence: Synthetic oligonucleotide
  Target: LAMA2; (+) strand; PAM type: NNGRRT; PAM sequence: AAGAAT
ctgagaagtgtagggaacac

SEQ ID NO: 25520 - DNA, 20 bp, Artificial Sequence
  Description of Artificial Sequence: Synthetic oligonucleotide
  Target: LAMA2; (+) strand; PAM type: NNGRRT; PAM sequence: TAGAGT
aaattttccaggtaagttta

SEQ ID NO: 25521 - DNA, 20 bp, Artificial Sequence
  Description of Artificial Sequence: Synthetic oligonucleotide
  Target: LAMA2; (+) strand; PAM type: NNGRRT; PAM sequence: TTGAGT
aacctgccattttgattgtt

SEQ ID NO: 25522 - DNA, 20 bp, Artificial Sequence
  Description of Artificial Sequence: Synthetic oligonucleotide
  Target: LAMA2; (+) strand; PAM type: NNGRRT; PAM sequence: TAGGGT
aagctcaatgtacaggtagc

SEQ ID NO: 25523 - DNA, 20 bp, Artificial Sequence
  Description of Artificial Sequence: Synthetic oligonucleotide
  Target: LAMA2; (+) strand; PAM type: NNGRRT; PAM sequence: CTGGAT
ggtgccccccgtcttccctg

SEQ ID NO: 25524 - DNA, 20 bp, Artificial Sequence
  Description of Artificial Sequence: Synthetic oligonucleotide
  Target: LAMA2; (+) strand; PAM type: NNGRRT; PAM sequence: AGGGGT
tgtaggtcctgctcatgcag

SEQ ID NO: 25525 - DNA, 20 bp, Artificial Sequence
  Description of Artificial Sequence: Synthetic oligonucleotide
  Target: LAMA2; (+) strand; PAM type: NNGRRT; PAM sequence: GTGGAT
gaggggttatttcccagcat

SEQ ID NO: 25526 - DNA, 20 bp, Artificial Sequence
  Description of Artificial Sequence: Synthetic oligonucleotide
  Target: LAMA2; (+) strand; PAM type: NNGRRT; PAM sequence: GAGAAT
ttacgtcttcttttagagaa

SEQ ID NO: 25527 - DNA, 20 bp, Artificial Sequence
  Description of Artificial Sequence: Synthetic oligonucleotide
  Target: LAMA2; (+) strand; PAM type: NNGRRT; PAM sequence: CAGAAT
taacatcaacaagcctttta

SEQ ID NO: 25528 - DNA, 20 bp, Artificial Sequence
  Description of Artificial Sequence: Synthetic oligonucleotide
  Target: LAMA2; (+) strand; PAM type: NNGRRT; PAM sequence: GTGAAT
aagtgtttaaaaaatagtat

SEQ ID NO: 25529 - DNA, 20 bp, Artificial Sequence
  Description of Artificial Sequence: Synthetic oligonucleotide
  Target: LAMA2; (+) strand; PAM type: NNGRRT; PAM sequence: TAGGAT
aaaggaagctttatacccat

SEQ ID NO: 25530 - DNA, 20 bp, Artificial Sequence
  Description of Artificial Sequence: Synthetic oligonucleotide
  Target: LAMA2; (+) strand; PAM type: NNGRRT; PAM sequence: GAGGAT
aatggaaggtagaaattggt

SEQ ID NO: 25531 - DNA, 20 bp, Artificial Sequence
  Description of Artificial Sequence: Synthetic oligonucleotide
  Target: LAMA2; (+) strand; PAM type: NNGRRT; PAM sequence: AGGAAT
agaaattggtgaggatgtga

SEQ ID NO: 25532 - DNA, 20 bp, Artificial Sequence
  Description of Artificial Sequence: Synthetic oligonucleotide
  Target: LAMA2; (+) strand; PAM type: NNGRRT; PAM sequence: GGGAAT
aagccttatgcattgttgat

SEQ ID NO: 25533 - DNA, 20 bp, Artificial Sequence
  Description of Artificial Sequence: Synthetic oligonucleotide
  Target: LAMA2; (+) strand; PAM type: NNGRRT; PAM sequence: GAGGGT
caatcatggaaaacagtatg

SEQ ID NO: 25534 - DNA, 20 bp, Artificial Sequence
  Description of Artificial Sequence: Synthetic oligonucleotide
  Target: LAMA2; (+) strand; PAM type: NNGRRT; PAM sequence: TAGAAT
ggtcctcaaaacattacaaa

SEQ ID NO: 25535 - DNA, 20 bp, Artificial Sequence
  Description of Artificial Sequence: Synthetic oligonucleotide
  Target: LAMA2; (+) strand; PAM type: NNGRRT; PAM sequence: TAGGAT
cattacaaatagaattacaa

SEQ ID NO: 25536 - DNA, 20 bp, Artificial Sequence
  Description of Artificial Sequence: Synthetic oligonucleotide
  Target: LAMA2; (+) strand; PAM type: NNGRRT; PAM sequence: GGGAAT
gatccaacaattccacttct

SEQ ID NO: 25537 - DNA, 20 bp, Artificial Sequence
  Description of Artificial Sequence: Synthetic oligonucleotide
  Target: LAMA2; (+) strand; PAM type: NNGRRT; PAM sequence: CAGGGT
atgccccaaataattaaaag

SEQ ID NO: 25538 - DNA, 20 bp, Artificial Sequence
  Description of Artificial Sequence: Synthetic oligonucleotide
  Target: LAMA2; (+) strand; PAM type: NNGRRT; PAM sequence: ACGAAT
agaaacctggctgttgacag

SEQ ID NO: 25539 - DNA, 20 bp, Artificial Sequence
  Description of Artificial Sequence: Synthetic oligonucleotide
  Target: LAMA2; (+) strand; PAM type: NNGRRT; PAM sequence: ATGAAT
attctgacacatgctaccat

SEQ ID NO: 25540 - DNA, 20 bp, Artificial Sequence
  Description of Artificial Sequence: Synthetic oligonucleotide
  Target: LAMA2; (+) strand; PAM type: NNGRRT; PAM sequence: TAGAGT
ctgttatgattctacttacc

SEQ ID NO: 25541 - DNA, 20 bp, Artificial Sequence
  Description of Artificial Sequence: Synthetic oligonucleotide
  Target: LAMA2; (+) strand; PAM type: NNGRRT; PAM sequence: CAGAAT
ttctacttacctagagtagt

SEQ ID NO: 25542 - DNA, 20 bp, Artificial Sequence
  Description of Artificial Sequence: Synthetic oligonucleotide
  Target: LAMA2; (+) strand; PAM type: NNGRRT; PAM sequence: AGGAAT
actagcggctgcagggagag

SEQ ID NO: 25543 - DNA, 20 bp, Artificial Sequence
  Description of Artificial Sequence: Synthetic oligonucleotide
  Target: LAMA2; (+) strand; PAM type: NNGRRT; PAM sequence: GGGAGT
gctgcagggagagaggaata

SEQ ID NO: 25544 - DNA, 20 bp, Artificial Sequence
  Description of Artificial Sequence: Synthetic oligonucleotide
  Target: LAMA2; (+) strand; PAM type: NNGRRT; PAM sequence: ATGAGT
gaatagggagttattattta

SEQ ID NO: 25545 - DNA, 20 bp, Artificial Sequence
  Description of Artificial Sequence: Synthetic oligonucleotide
  Target: LAMA2; (+) strand; PAM type: NNGRRT; PAM sequence: CCGAGT
gagttattatttaatgagta

SEQ ID NO: 25546 - DNA, 20 bp, Artificial Sequence
  Description of Artificial Sequence: Synthetic oligonucleotide
  Target: LAMA2; (+) strand; PAM type: NNGRRT; PAM sequence: CTGGAT
tttgcaagatgaaaagcatt

SEQ ID NO: 25547 - DNA, 20 bp, Artificial Sequence
  Description of Artificial Sequence: Synthetic oligonucleotide
  Target: LAMA2; (+) strand; PAM type: NNGRRT; PAM sequence: GTGAAT
agatgaaaagcattctggat

SEQ ID NO: 25548 - DNA, 20 bp, Artificial Sequence
  Description of Artificial Sequence: Synthetic oligonucleotide
  Target: LAMA2; (+) strand; PAM type: NNGRRT; PAM sequence: ATGAAT
acttaaaaatggttacaatg

SEQ ID NO: 25549 - DNA, 20 bp, Artificial Sequence
  Description of Artificial Sequence: Synthetic oligonucleotide
  Target: LAMA2; (+) strand; PAM type: NNGRRT; PAM sequence: CTGAAT
ggaaacttcctgggcctaaa

SEQ ID NO: 25550 - DNA, 20 bp, Artificial Sequence
  Description of Artificial Sequence: Synthetic oligonucleotide
  Target: LAMA2; (+) strand; PAM type: NNGRRT; PAM sequence: GAGAAT
tattctcatgaaatattcat

SEQ ID NO: 25551 - DNA, 20 bp, Artificial Sequence
  Description of Artificial Sequence: Synthetic oligonucleotide
  Target: LAMA2; (+) strand; PAM type: NNGRRT; PAM sequence: TAGGAT
tgagaatgtttcaccagatc

SEQ ID NO: 25552 - DNA, 20 bp, Artificial Sequence
  Description of Artificial Sequence: Synthetic oligonucleotide
  Target: LAMA2; (+) strand; PAM type: NNGRRT; PAM sequence: TAGAGT
ttatcacctacatggggagg

SEQ ID NO: 25553 - DNA, 20 bp, Artificial Sequence
  Description of Artificial Sequence: Synthetic oligonucleotide
  Target: LAMA2; (+) strand; PAM type: NNGRRT; PAM sequence: CTGAGT
aattgcatctttccacaact

SEQ ID NO: 25554 - DNA, 20 bp, Artificial Sequence
  Description of Artificial Sequence: Synthetic oligonucleotide
  Target: LAMA2; (+) strand; PAM type: NNGRRT; PAM sequence: CTGAGT
tttccacaactctgagtttt

SEQ ID NO: 25555 - DNA, 20 bp, Artificial Sequence
  Description of Artificial Sequence: Synthetic oligonucleotide
  Target: LAMA2; (+) strand; PAM type: NNGRRT; PAM sequence: TTGAGT
aactctgagttttctgagtt

SEQ ID NO: 25556 - DNA, 20 bp, Artificial Sequence
  Description of Artificial Sequence: Synthetic oligonucleotide
  Target: LAMA2; (+) strand; PAM type: NNGRRT; PAM sequence: TAGAGT
gtcatggtggcaatagaggt

SEQ ID NO: 25557 - DNA, 20 bp, Artificial Sequence
  Description of Artificial Sequence: Synthetic oligonucleotide
  Target: LAMA2; (+) strand; PAM type: NNGRRT; PAM sequence: ATGAAT
gtggcaatagaggttagagt

SEQ ID NO: 25558 - DNA, 20 bp, Artificial Sequence
  Description of Artificial Sequence: Synthetic oligonucleotide
  Target: LAMA2; (+) strand; PAM type: NNGRRT; PAM sequence: AAGGAT
tatggtcattttaccgcttc

SEQ ID NO: 25559 - DNA, 20 bp, Artificial Sequence
  Description of Artificial Sequence: Synthetic oligonucleotide
  Target: LAMA2; (+) strand; PAM type: NNGRRT; PAM sequence: AAGAGT
tttaaagtgaacccaagatg

SEQ ID NO: 25560 - DNA, 20 bp, Artificial Sequence
  Description of Artificial Sequence: Synthetic oligonucleotide
  Target: LAMA2; (+) strand; PAM type: NNGRRT; PAM sequence: CAGAAT
tttggcaacatataaaaatc

SEQ ID NO: 25561 - DNA, 20 bp, Artificial Sequence
  Description of Artificial Sequence: Synthetic oligonucleotide
  Target: LAMA2; (+) strand; PAM type: NNGRRT; PAM sequence: TTGAAT
aagacaccatagaccacatt

SEQ ID NO: 25562 - DNA, 20 bp, Artificial Sequence
  Description of Artificial Sequence: Synthetic oligonucleotide
  Target: LAMA2; (+) strand; PAM type: NNGRRT; PAM sequence: AGGAAT
taaagaccacttttccaatt

SEQ ID NO: 25563 - DNA, 20 bp, Artificial Sequence
  Description of Artificial Sequence: Synthetic oligonucleotide
  Target: LAMA2; (+) strand; PAM type: NNGRRT; PAM sequence: CAGAGT
tctaatgtagtgttaaagct

SEQ ID NO: 25564 - DNA, 20 bp, Artificial Sequence
  Description of Artificial Sequence: Synthetic oligonucleotide
  Target: LAMA2; (+) strand; PAM type: NNGRRT; PAM sequence: GAGAAT
ctgctaacaaagatgaaata

SEQ ID NO: 25565 - DNA, 20 bp, Artificial Sequence
  Description of Artificial Sequence: Synthetic oligonucleotide
  Target: LAMA2; (+) strand; PAM type: NNGRRT; PAM sequence: CTGAAT
gagaataaagtaggtgtatg

SEQ ID NO: 25566 - DNA, 20 bp, Artificial Sequence
  Description of Artificial Sequence: Synthetic oligonucleotide
  Target: LAMA2; (+) strand; PAM type: NNGRRT; PAM sequence: TTGAAT
tattaaggttgacatccagt

SEQ ID NO: 25567 - DNA, 20 bp, Artificial Sequence
  Description of Artificial Sequence: Synthetic oligonucleotide
  Target: LAMA2; (+) strand; PAM type: NNGRRT; PAM sequence: TTGGGT
tcatcctctaaggtatagtt

SEQ ID NO: 25568 - DNA, 20 bp, Artificial Sequence
  Description of Artificial Sequence: Synthetic oligonucleotide
  Target: LAMA2; (+) strand; PAM type: NNGRRT; PAM sequence: GTGGAT
ctgcagaacatagagatctg

SEQ ID NO: 25569 - DNA, 20 bp, Artificial Sequence
  Description of Artificial Sequence: Synthetic oligonucleotide
  Target: LAMA2; (+) strand; PAM type: NNGRRT; PAM sequence: GAGAAT
ctggtggattctaaaggact

SEQ ID NO: 25570 - DNA, 20 bp, Artificial Sequence
  Description of Artificial Sequence: Synthetic oligonucleotide
  Target: LAMA2; (+) strand; PAM type: NNGRRT; PAM sequence: GAGAAT
taacaaatgcacttaaattg

SEQ ID NO: 25571 - DNA, 20 bp, Artificial Sequence
  Description of Artificial Sequence: Synthetic oligonucleotide
  Target: LAMA2; (+) strand; PAM type: NNGRRT; PAM sequence: GTGAGT
ctatgttagtgacctcttct

SEQ ID NO: 25572 - DNA, 20 bp, Artificial Sequence
  Description of Artificial Sequence: Synthetic oligonucleotide
  Target: LAMA2; (+) strand; PAM type: NNGRRT; PAM sequence: TTGGAT
tctctaactttctatctcct

SEQ ID NO: 25573 - DNA, 20 bp, Artificial Sequence
  Description of Artificial Sequence: Synthetic oligonucleotide
  Target: LAMA2; (+) strand; PAM type: NNGRRT; PAM sequence: GAGGGT
cctgtttccaaatttctgct

SEQ ID NO: 25574 - DNA, 20 bp, Artificial Sequence
  Description of Artificial Sequence: Synthetic oligonucleotide
  Target: LAMA2; (+) strand; PAM type: NNGRRT; PAM sequence: ATGAAT
gaagttgctaattttaaaaa

SEQ ID NO: 25575 - DNA, 20 bp, Artificial Sequence
  Description of Artificial Sequence: Synthetic oligonucleotide
  Target: LAMA2; (+) strand; PAM type: NNGRRT; PAM sequence: CAGAAT
ccatttgcttataggtcttt

SEQ ID NO: 25576 - DNA, 20 bp, Artificial Sequence
  Description of Artificial Sequence: Synthetic oligonucleotide
  Target: LAMA2; (+) strand; PAM type: NNGRRT; PAM sequence: GGGAGT
cctctctgggacaggcaatg

SEQ ID NO: 25577 - DNA, 20 bp, Artificial Sequence
  Description of Artificial Sequence: Synthetic oligonucleotide
  Target: LAMA2; (+) strand; PAM type: NNGRRT; PAM sequence: AGGAAT
gagttaagcagtcatcataa

SEQ ID NO: 25578 - DNA, 20 bp, Artificial Sequence
  Description of Artificial Sequence: Synthetic oligonucleotide
  Target: LAMA2; (+) strand; PAM type: NNGRRT; PAM sequence: TAGAAT
ctcagactgttatttgctgt

SEQ ID NO: 25579 - DNA, 20 bp, Artificial Sequence
  Description of Artificial Sequence: Synthetic oligonucleotide
  Target: LAMA2; (+) strand; PAM type: NNGRRT; PAM sequence: TTGGAT
ctgtgattttaggaaatagt

SEQ ID NO: 25580 - DNA, 20 bp, Artificial Sequence
  Description of Artificial Sequence: Synthetic oligonucleotide
  Target: LAMA2; (+) strand; PAM type: NNGRRT; PAM sequence: CAGAGT
aattaggttcactgctctgg

SEQ ID NO: 25581 - DNA, 20 bp, Artificial Sequence
  Description of Artificial Sequence: Synthetic oligonucleotide
  Target: LAMA2; (+) strand; PAM type: NNGRRT; PAM sequence: AAGGGT
gttcactgctctggcagagt

SEQ ID NO: 25582 - DNA, 20 bp, Artificial Sequence
  Description of Artificial Sequence: Synthetic oligonucleotide
  Target: LAMA2; (+) strand; PAM type: NNGRRT; PAM sequence: ATGAGT
atctttataatatatatata

SEQ ID NO: 25583 - DNA, 20 bp, Artificial Sequence
  Description of Artificial Sequence: Synthetic oligonucleotide
  Target: LAMA2; (+) strand; PAM type: NNGRRT; PAM sequence: TAGAAT
tcatagtcttaaatcatact

SEQ ID NO: 25584 - DNA, 20 bp, Artificial Sequence
  Description of Artificial Sequence: Synthetic oligonucleotide
  Target: LAMA2; (+) strand; PAM type: NNGRRT; PAM sequence: TAGAAT
ccttctccttattcttacga

SEQ ID NO: 25585 - DNA, 20 bp, Artificial Sequence
  Description of Artificial Sequence: Synthetic oligonucleotide
  Target: LAMA2; (+) strand; PAM type: NNGRRT; PAM sequence: CTGAAT
ttatgcaaaagaacgtcttt

SEQ ID NO: 25586 - DNA, 20 bp, Artificial Sequence
  Description of Artificial Sequence: Synthetic oligonucleotide
  Target: LAMA2; (+) strand; PAM type: NNGRRT; PAM sequence: GTGAAT
aagaacgtctttctgaatca

SEQ ID NO: 25587 - DNA, 20 bp, Artificial Sequence
  Description of Artificial Sequence: Synthetic oligonucleotide
  Target: LAMA2; (+) strand; PAM type: NNGRRT; PAM sequence: CAGAAT
cagtgaatagtaatgctcat

SEQ ID NO: 25588 - DNA, 20 bp, Artificial Sequence
  Description of Artificial Sequence: Synthetic oligonucleotide
  Target: LAMA2; (+) strand; PAM type: NNGRRT; PAM sequence: TTGAGT
tgtatacactgttcaccaat

SEQ ID NO: 25589 - DNA, 20 bp, Artificial Sequence
  Description of Artificial Sequence: Synthetic oligonucleotide
  Target: LAMA2; (+) strand; PAM type: NNGRRT; PAM sequence: GAGAAT
gagtaaagtggactttgtga

SEQ ID NO: 25590 - DNA, 20 bp, Artificial Sequence
  Description of Artificial Sequence: Synthetic oligonucleotide
  Target: LAMA2; (+) strand; PAM type: NNGRRT; PAM sequence: TGGAAT
tttgggcatttcttcctaag

SEQ ID NO: 25591 - DNA, 20 bp, Artificial Sequence
  Description of Artificial Sequence: Synthetic oligonucleotide
  Target: LAMA2; (+) strand; PAM type: NNGRRT; PAM sequence: GGGAGT
gtggaatacacaacagataa

SEQ ID NO: 25592 - DNA, 20 bp, Artificial Sequence
  Description of Artificial Sequence: Synthetic oligonucleotide
  Target: LAMA2; (+) strand; PAM type: NNGRRT; PAM sequence: AGGAGT
tccagctcagaaggagcaga

SEQ ID NO: 25593 - DNA, 20 bp, Artificial Sequence
  Description of Artificial Sequence: Synthetic oligonucleotide
  Target: LAMA2; (+) strand; PAM type: NNGRRT; PAM sequence: GTGGAT
gccaatggtatcctctagct

SEQ ID NO: 25594 - DNA, 20 bp, Artificial Sequence
  Description of Artificial Sequence: Synthetic oligonucleotide
  Target: LAMA2; (+) strand; PAM type: NNGRRT; PAM sequence: CAGAAT
tagtggctaatgtggtcatc

SEQ ID NO: 25595 - DNA, 20 bp, Artificial Sequence
  Description of Artificial Sequence: Synthetic oligonucleotide
  Target: LAMA2; (+) strand; PAM type: NNGRRT; PAM sequence: CTGGAT
cccgtacagatccaaaaact

SEQ ID NO: 25596 - DNA, 20 bp, Artificial Sequence
  Description of Artificial Sequence: Synthetic oligonucleotide
  Target: LAMA2; (+) strand; PAM type: NNGRRT; PAM sequence: AGGGAT
cagatccaaaaactctggat

SEQ ID NO: 25597 - DNA, 20 bp, Artificial Sequence
  Description of Artificial Sequence: Synthetic oligonucleotide
  Target: LAMA2; (+) strand; PAM type: NNGRRT; PAM sequence: CAGGAT
aaactctggatagggattta

SEQ ID NO: 25598 - DNA, 20 bp, Artificial Sequence
  Description of Artificial Sequence: Synthetic oligonucleotide
  Target: LAMA2; (+) strand; PAM type: NNGRRT; PAM sequence: ATGAAT
tccaatggccggtagataaa

SEQ ID NO: 25599 - DNA, 20 bp, Artificial Sequence
  Description of Artificial Sequence: Synthetic oligonucleotide
  Target: LAMA2; (+) strand; PAM type: NNGRRT; PAM sequence: GGGGAT
ggccggtagataaaatgaat

SEQ ID NO: 25600 - DNA, 20 bp, Artificial Sequence
  Description of Artificial Sequence: Synthetic oligonucleotide
  Target: LAMA2; (+) strand; PAM type: NNGRRT; PAM sequence: GCGGAT
gctaagttcccgtcattgat

SEQ ID NO: 25601 - DNA, 20 bp, Artificial Sequence
  Description of Artificial Sequence: Synthetic oligonucleotide
  Target: LAMA2; (+) strand; PAM type: NNGRRT; PAM sequence: TGGGGT
caagtacacggcccaaagac

SEQ ID NO: 25602 - DNA, 20 bp, Artificial Sequence
  Description of Artificial Sequence: Synthetic oligonucleotide
  Target: LAMA2; (+) strand; PAM type: NNGRRT; PAM sequence: GAGAAT
agactggggtgagacctcga

SEQ ID NO: 25603 - DNA, 20 bp, Artificial Sequence
  Description of Artificial Sequence: Synthetic oligonucleotide
  Target: LAMA2; (+) strand; PAM type: NNGRRT; PAM sequence: GAGGAT
aagaagttcatcagtcatgt

SEQ ID NO: 25604 - DNA, 20 bp, Artificial Sequence
  Description of Artificial Sequence: Synthetic oligonucleotide
  Target: LAMA2; (+) strand; PAM type: NNGRRT; PAM sequence: ATGAGT
agttcatcagtcatgtgagg

SEQ ID NO: 25605 - DNA, 20 bp, Artificial Sequence
  Description of Artificial Sequence: Synthetic oligonucleotide
  Target: LAMA2; (+) strand; PAM type: NNGRRT; PAM sequence: TTGAGT
gtgatagcacacctccatct

SEQ ID NO: 25606 - DNA, 20 bp, Artificial Sequence
  Description of Artificial Sequence: Synthetic oligonucleotide
  Target: LAMA2; (+) strand; PAM type: NNGRRT; PAM sequence: AGGAGT
ctttgagtagcttttggaga

SEQ ID NO: 25607 - DNA, 20 bp, Artificial Sequence
  Description of Artificial Sequence: Synthetic oligonucleotide
  Target: LAMA2; (+) strand; PAM type: NNGRRT; PAM sequence: GTGAGT
ttttggagaaggagtggacg

SEQ ID NO: 25608 - DNA, 20 bp, Artificial Sequence
  Description of Artificial Sequence: Synthetic oligonucleotide
  Target: LAMA2; (+) strand; PAM type: NNGRRT; PAM sequence: TGGAAT
gatgctgacctgctcaaata

SEQ ID NO: 25609 - DNA, 20 bp, Artificial Sequence
  Description of Artificial Sequence: Synthetic oligonucleotide
  Target: LAMA2; (+) strand; PAM type: NNGRRT; PAM sequence: CTGGAT
aattcttgtaccaatcgtag

SEQ ID NO: 25610 - DNA, 20 bp, Artificial Sequence
  Description of Artificial Sequence: Synthetic oligonucleotide
  Target: LAMA2; (+) strand; PAM type: NNGRRT; PAM sequence: CAGAGT
ctgacttccaaccacaccca

SEQ ID NO: 25611 - DNA, 20 bp, Artificial Sequence
  Description of Artificial Sequence: Synthetic oligonucleotide
  Target: LAMA2; (+) strand; PAM type: NNGRRT; PAM sequence: ACGAGT
aaacttgcctgaagacttcc

SEQ ID NO: 25612 - DNA, 20 bp, Artificial Sequence
  Description of Artificial Sequence: Synthetic oligonucleotide
  Target: LAMA2; (+) strand; PAM type: NNGRRT; PAM sequence: CTGAGT
gagtgaagatcaggtgacag

SEQ ID NO: 25613 - DNA, 20 bp, Artificial Sequence
  Description of Artificial Sequence: Synthetic oligonucleotide
  Target: LAMA2; (+) strand; PAM type: NNGRRT; PAM sequence: TGGGAT
tcaggtgacagctgagtgta

SEQ ID NO: 25614 - DNA, 20 bp, Artificial Sequence
  Description of Artificial Sequence: Synthetic oligonucleotide
  Target: LAMA2; (+) strand; PAM type: NNGRRT; PAM sequence: CGGGGT
cctgcagggccggccggcag

SEQ ID NO: 25615 - DNA, 20 bp, Artificial Sequence
  Description of Artificial Sequence: Synthetic oligonucleotide
  Target: LAMA2; (+) strand; PAM type: NNGRRT; PAM sequence: CCGGGT
gactgccacaagggaagtgc

SEQ ID NO: 25616 - DNA, 20 bp, Artificial Sequence
  Description of Artificial Sequence: Synthetic oligonucleotide
  Target: LAMA2; (+) strand; PAM type: NNGRRT; PAM sequence: TAGGAT
ttctccttttgggcatatag

SEQ ID NO: 25617 - DNA, 20 bp, Artificial Sequence
  Description of Artificial Sequence: Synthetic oligonucleotide
  Target: LAMA2; (+) strand; PAM type: NNGRRT; PAM sequence: TTGAAT
tgacatgctttactcttaga

SEQ ID NO: 25618 - DNA, 20 bp, Artificial Sequence
  Description of Artificial Sequence: Synthetic oligonucleotide
  Target: LAMA2; (+) strand; PAM type: NNGRRT; PAM sequence: ACGAGT
gctttactcttagattgaat

SEQ ID NO: 25619 - DNA, 20 bp, Artificial Sequence
  Description of Artificial Sequence: Synthetic oligonucleotide
  Target: LAMA2; (+) strand; PAM type: NNGRRT; PAM sequence: ATGGAT
agagacagatgatcttccag

SEQ ID NO: 25620 - DNA, 20 bp, Artificial Sequence
  Description of Artificial Sequence: Synthetic oligonucleotide
  Target: LAMA2; (+) strand; PAM type: NNGRRT; PAM sequence: CTGAGT
atgatcttccagatggatgc

SEQ ID NO: 25621 - DNA, 20 bp, Artificial Sequence
  Description of Artificial Sequence: Synthetic oligonucleotide
  Target: LAMA2; (+) strand; PAM type: NNGRRT; PAM sequence: TAGAAT
tccagatggatgcctgagtg

SEQ ID NO: 25622 - DNA, 20 bp, Artificial Sequence
  Description of Artificial Sequence: Synthetic oligonucleotide
  Target: LAMA2; (+) strand; PAM type: NNGRRT; PAM sequence: TGGAGT
agtttaatccacagagactt

SEQ ID NO: 25623 - DNA, 20 bp, Artificial Sequence
  Description of Artificial Sequence: Synthetic oligonucleotide
  Target: LAMA2; (+) strand; PAM type: NNGRRT; PAM sequence: TTGAAT
taaattccttatgaaaatct

SEQ ID NO: 25624 - DNA, 20 bp, Artificial Sequence
  Description of Artificial Sequence: Synthetic oligonucleotide
  Target: LAMA2; (+) strand; PAM type: NNGRRT; PAM sequence: CTGGAT
gtatctctatgaggcttttt

SEQ ID NO: 25625 - DNA, 20 bp, Artificial Sequence
  Description of Artificial Sequence: Synthetic oligonucleotide
  Target: LAMA2; (+) strand; PAM type: NNGRRT; PAM sequence: AAGAAT
accttcctcccaaaggaaca

SEQ ID NO: 25626 - DNA, 20 bp, Artificial Sequence
  Description of Artificial Sequence: Synthetic oligonucleotide
  Target: LAMA2; (+) strand; PAM type: NNGRRT; PAM sequence: AAGGAT
aacaaaagaaatttatcata

SEQ ID NO: 25627 - DNA, 20 bp, Artificial Sequence
  Description of Artificial Sequence: Synthetic oligonucleotide
  Target: LAMA2; (+) strand; PAM type: NNGRRT; PAM sequence: ATGAAT
tttaaaaaataactaaataa

SEQ ID NO: 25628 - DNA, 20 bp, Artificial Sequence
  Description of Artificial Sequence: Synthetic oligonucleotide
  Target: LAMA2; (+) strand; PAM type: NNGRRT; PAM sequence: TTGAGT
aaatgaattcccaaatgatt

SEQ ID NO: 25629 - DNA, 20 bp, Artificial Sequence
  Description of Artificial Sequence: Synthetic oligonucleotide
  Target: LAMA2; (+) strand; PAM type: NNGRRT; PAM sequence: TTGAAT
gcctagcaaatatcttaatg

SEQ ID NO: 25630 - DNA, 20 bp, Artificial Sequence
  Description of Artificial Sequence: Synthetic oligonucleotide
  Target: LAMA2; (+) strand; PAM type: NNGRRT; PAM sequence: CTGAAT
aatatcttaatgttgaatat

SEQ ID NO: 25631 - DNA, 20 bp, Artificial Sequence
  Description of Artificial Sequence: Synthetic oligonucleotide
  Target: LAMA2; (+) strand; PAM type: NNGRRT; PAM sequence: ATGAAT
tcttaatgttgaatatctga

SEQ ID NO: 25632 - DNA, 20 bp, Artificial Sequence
  Description of Artificial Sequence: Synthetic oligonucleotide
  Target: LAMA2; (+) strand; PAM type: NNGRRT; PAM sequence: ATGAAT
aatgttgaatatctgaatga

SEQ ID NO: 25633 - DNA, 20 bp, Artificial Sequence
  Description of Artificial Sequence: Synthetic oligonucleotide
  Target: LAMA2; (+) strand; PAM type: NNGRRT; PAM sequence: ATGAAT
ttgaatatctgaatgaatga

SEQ ID NO: 25634 - DNA, 20 bp, Artificial Sequence
  Description of Artificial Sequence: Synthetic oligonucleotide
  Target: LAMA2; (+) strand; PAM type: NNGRRT; PAM sequence: ATGAAT
atatctgaatgaatgaatga

SEQ ID NO: 25635 - DNA, 20 bp, Artificial Sequence
  Description of Artificial Sequence: Synthetic oligonucleotide
  Target: LAMA2; (+) strand; PAM type: NNGRRT; PAM sequence: ACGAAT
atgaatgaatgaatgaatga

SEQ ID NO: 25636 - DNA, 20 bp, Artificial Sequence
  Description of Artificial Sequence: Synthetic oligonucleotide
  Target: LAMA2; (+) strand; PAM type: NNGRRT; PAM sequence: ATGAAT
aggagaaatccttacaggac

SEQ ID NO: 25637 - DNA, 20 bp, Artificial Sequence
  Description of Artificial Sequence: Synthetic oligonucleotide
  Target: LAMA2; (+) strand; PAM type: NNGRRT; PAM sequence: GAGAAT
acaggacatgaatggtacag

SEQ ID NO: 25638 - DNA, 20 bp, Artificial Sequence
  Description of Artificial Sequence: Synthetic oligonucleotide
  Target: LAMA2; (+) strand; PAM type: NNGRRT; PAM sequence: AAGGGT
caggagaatagtacatatca

SEQ ID NO: 25639 - DNA, 20 bp, Artificial Sequence
  Description of Artificial Sequence: Synthetic oligonucleotide
  Target: LAMA2; (+) strand; PAM type: NNGRRT; PAM sequence: CTGGGT
tacatatcaaagggtgaact

SEQ ID NO: 25640 - DNA, 20 bp, Artificial Sequence
  Description of Artificial Sequence: Synthetic oligonucleotide
  Target: LAMA2; (+) strand; PAM type: NNGRRT; PAM sequence: TGGGAT
gaactctgggtcacagcttg

SEQ ID NO: 25641 - DNA, 20 bp, Artificial Sequence
  Description of Artificial Sequence: Synthetic oligonucleotide
  Target: LAMA2; (+) strand; PAM type: NNGRRT; PAM sequence: CAGAAT
aacaaataaaaattacatta

SEQ ID NO: 25642 - DNA, 20 bp, Artificial Sequence
  Description of Artificial Sequence: Synthetic oligonucleotide
  Target: LAMA2; (+) strand; PAM type: NNGRRT; PAM sequence: TTGAAT
tctttgacattatcctagcc

SEQ ID NO: 25643 - DNA, 20 bp, Artificial Sequence
  Description of Artificial Sequence: Synthetic oligonucleotide
  Target: LAMA2; (+) strand; PAM type: NNGRRT; PAM sequence: CTGAGT
caacagtcaagagaacaaga

SEQ ID NO: 25644 - DNA, 20 bp, Artificial Sequence
  Description of Artificial Sequence: Synthetic oligonucleotide
  Target: LAMA2; (+) strand; PAM type: NNGRRT; PAM sequence: GAGAAT
tatgtctcctctgttgtgag

SEQ ID NO: 25645 - DNA, 20 bp, Artificial Sequence
  Description of Artificial Sequence: Synthetic oligonucleotide
  Target: LAMA2; (+) strand; PAM type: NNGRRT; PAM sequence: CTGGGT
atattctcacaagtggagct

SEQ ID NO: 25646 - DNA, 20 bp, Artificial Sequence
  Description of Artificial Sequence: Synthetic oligonucleotide
  Target: LAMA2; (+) strand; PAM type: NNGRRT; PAM sequence: AGGAGT
gctaataagaaatcttcagt

SEQ ID NO: 25647 - DNA, 20 bp, Artificial Sequence
  Description of Artificial Sequence: Synthetic oligonucleotide
  Target: LAMA2; (+) strand; PAM type: NNGRRT; PAM sequence: CAGAAT
ctagtgacgcattagagcct

SEQ ID NO: 25648 - DNA, 20 bp, Artificial Sequence
  Description of Artificial Sequence: Synthetic oligonucleotide
  Target: LAMA2; (+) strand; PAM type: NNGRRT; PAM sequence: CAGAAT
gaccttaaactgttaccaaa

SEQ ID NO: 25649 - DNA, 20 bp, Artificial Sequence
  Description of Artificial Sequence: Synthetic oligonucleotide
  Target: LAMA2; (+) strand; PAM type: NNGRRT; PAM sequence: TGGGAT
accaaacagaatgccagata

SEQ ID NO: 25650 - DNA, 20 bp, Artificial Sequence
  Description of Artificial Sequence: Synthetic oligonucleotide
  Target: LAMA2; (+) strand; PAM type: NNGRRT; PAM sequence: AAGAGT
tgggatataattccagcctg

SEQ ID NO: 25651 - DNA, 20 bp, Artificial Sequence
  Description of Artificial Sequence: Synthetic oligonucleotide
  Target: LAMA2; (+) strand; PAM type: NNGRRT; PAM sequence: ATGAAT
aggagaaattgatatggaac

SEQ ID NO: 25652 - DNA, 20 bp, Artificial Sequence
  Description of Artificial Sequence: Synthetic oligonucleotide
  Target: LAMA2; (+) strand; PAM type: NNGRRT; PAM sequence: GAGGGT
cttaggaaggccagacatga

SEQ ID NO: 25653 - DNA, 20 bp, Artificial Sequence
  Description of Artificial Sequence: Synthetic oligonucleotide
  Target: LAMA2; (+) strand; PAM type: NNGRRT; PAM sequence: TAGGAT
gagctctaggtgaccacctg

SEQ ID NO: 25654 - DNA, 20 bp, Artificial Sequence
  Description of Artificial Sequence: Synthetic oligonucleotide
  Target: LAMA2; (+) strand; PAM type: NNGRRT; PAM sequence: TGGAGT
ggaaagaacatatctagtcc

SEQ ID NO: 25655 - DNA, 20 bp, Artificial Sequence
  Description of Artificial Sequence: Synthetic oligonucleotide
  Target: LAMA2; (+) strand; PAM type: NNGRRT; PAM sequence: ATGAGT
ccattctactctctgcttct

SEQ ID NO: 25656 - DNA, 20 bp, Artificial Sequence
  Description of Artificial Sequence: Synthetic oligonucleotide
  Target: LAMA2; (+) strand; PAM type: NNGRRT; PAM sequence: GTGAGT
caactttttagattccacat

SEQ ID NO: 25657 - DNA, 20 bp, Artificial Sequence
  Description of Artificial Sequence: Synthetic oligonucleotide
  Target: LAMA2; (+) strand; PAM type: NNGRRT; PAM sequence: CAGGAT
atccatgtcattgcaaatag

SEQ ID NO: 25658 - DNA, 20 bp, Artificial Sequence
  Description of Artificial Sequence: Synthetic oligonucleotide
  Target: LAMA2; (+) strand; PAM type: NNGRRT; PAM sequence: CTGAAT
gatttccttctcttttatgg

SEQ ID NO: 25659 - DNA, 20 bp, Artificial Sequence
  Description of Artificial Sequence: Synthetic oligonucleotide
  Target: LAMA2; (+) strand; PAM type: NNGRRT; PAM sequence: ATGGAT
ctttatccattcattcactg

SEQ ID NO: 25660 - DNA, 20 bp, Artificial Sequence
  Description of Artificial Sequence: Synthetic oligonucleotide
  Target: LAMA2; (+) strand; PAM type: NNGRRT; PAM sequence: GTGAAT
atttatttatcttgactgtt

SEQ ID NO: 25661 - DNA, 20 bp, Artificial Sequence
  Description of Artificial Sequence: Synthetic oligonucleotide
  Target: LAMA2; (+) strand; PAM type: NNGRRT; PAM sequence: GTGGAT
aatgatgctgctatgaacat

SEQ ID NO: 25662 - DNA, 20 bp, Artificial Sequence
  Description of Artificial Sequence: Synthetic oligonucleotide
  Target: LAMA2; (+) strand; PAM type: NNGRRT; PAM sequence: TGGGAT
ttaaaatatatagctagaaa

SEQ ID NO: 25663 - DNA, 20 bp, Artificial Sequence
  Description of Artificial Sequence: Synthetic oligonucleotide
  Target: LAMA2; (+) strand; PAM type: NNGRRT; PAM sequence: CTGGGT
tatagctagaaatgggattg

SEQ ID NO: 25664 - DNA, 20 bp, Artificial Sequence
  Description of Artificial Sequence: Synthetic oligonucleotide
  Target: LAMA2; (+) strand; PAM type: NNGRRT; PAM sequence: AAGAAT
agtactattttcatttttgg

SEQ ID NO: 25665 - DNA, 20 bp, Artificial Sequence
  Description of Artificial Sequence: Synthetic oligonucleotide
  Target: LAMA2; (+) strand; PAM type: NNGRRT; PAM sequence: AAGGGT
cattcccaccaaaagtgtag

SEQ ID NO: 25666 - DNA, 20 bp, Artificial Sequence
  Description of Artificial Sequence: Synthetic oligonucleotide
  Target: LAMA2; (+) strand; PAM type: NNGRRT; PAM sequence: TTGAGT
tattttgtgttttcttgcta

SEQ ID NO: 25667 - DNA, 20 bp, Artificial Sequence
  Description of Artificial Sequence: Synthetic oligonucleotide
  Target: LAMA2; (+) strand; PAM type: NNGRRT; PAM sequence: ATGAAT
ttttcttgctattgagttgt

SEQ ID NO: 25668 - DNA, 20 bp, Artificial Sequence
  Description of Artificial Sequence: Synthetic oligonucleotide
  Target: LAMA2; (+) strand; PAM type: NNGRRT; PAM sequence: TTGAAT
gtatgaattccttatatatt

SEQ ID NO: 25669 - DNA, 20 bp, Artificial Sequence
  Description of Artificial Sequence: Synthetic oligonucleotide
  Target: LAMA2; (+) strand; PAM type: NNGRRT; PAM sequence: TCGGGT
ttgctttcattgcctgtgct

SEQ ID NO: 25670 - DNA, 20 bp, Artificial Sequence
  Description of Artificial Sequence: Synthetic oligonucleotide
  Target: LAMA2; (+) strand; PAM type: NNGRRT; PAM sequence: TTGAAT
tcaggtcatacatttcagtc

SEQ ID NO: 25671 - DNA, 20 bp, Artificial Sequence
  Description of Artificial Sequence: Synthetic oligonucleotide
  Target: LAMA2; (+) strand; PAM type: NNGRRT; PAM sequence: TGGAAT
tttcagttgatttttgtata

SEQ ID NO: 25672 - DNA, 20 bp, Artificial Sequence
  Description of Artificial Sequence: Synthetic oligonucleotide
  Target: LAMA2; (+) strand; PAM type: NNGRRT; PAM sequence: GTGGAT
ccaaaatcattcttttgcat

SEQ ID NO: 25673 - DNA, 20 bp, Artificial Sequence
  Description of Artificial Sequence: Synthetic oligonucleotide
  Target: LAMA2; (+) strand; PAM type: NNGRRT; PAM sequence: GTGGGT
gattagttggccatatattt

SEQ ID NO: 25674 - DNA, 20 bp, Artificial Sequence
  Description of Artificial Sequence: Synthetic oligonucleotide
  Target: LAMA2; (+) strand; PAM type: NNGRRT; PAM sequence: TTGGAT
ccttctttcttaagattgct

SEQ ID NO: 25675 - DNA, 20 bp, Artificial Sequence
  Description of Artificial Sequence: Synthetic oligonucleotide
  Target: LAMA2; (+) strand; PAM type: NNGRRT; PAM sequence: TTGGGT
ttaagattgctttggatatt

SEQ ID NO: 25676 - DNA, 20 bp, Artificial Sequence
  Description of Artificial Sequence: Synthetic oligonucleotide
  Target: LAMA2; (+) strand; PAM type: NNGRRT; PAM sequence: ATGAAT
tgggtcatttgtgatttcat

SEQ ID NO: 25677 - DNA, 20 bp, Artificial Sequence
  Description of Artificial Sequence: Synthetic oligonucleotide
  Target: LAMA2; (+) strand; PAM type: NNGRRT; PAM sequence: TGGAAT
tctttcttttttttctgagg

SEQ ID NO: 25678 - DNA, 20 bp, Artificial Sequence
  Description of Artificial Sequence: Synthetic oligonucleotide
  Target: LAMA2; (+) strand; PAM type: NNGRRT; PAM sequence: TGGAGT
ttccctcttttcgctcaagg

SEQ ID NO: 25679 - DNA, 20 bp, Artificial Sequence
  Description of Artificial Sequence: Synthetic oligonucleotide
  Target: LAMA2; (+) strand; PAM type: NNGRRT; PAM sequence: CTGGGT
ctcactgcaacctccgtctc

SEQ ID NO: 25680 - DNA, 20 bp, Artificial Sequence
  Description of Artificial Sequence: Synthetic oligonucleotide
  Target: LAMA2; (+) strand; PAM type: NNGRRT; PAM sequence: CTGAGT
gattctcctgcctcagcctc

SEQ ID NO: 25681 - DNA, 20 bp, Artificial Sequence
  Description of Artificial Sequence: Synthetic oligonucleotide
  Target: LAMA2; (+) strand; PAM type: NNGRRT; PAM sequence: TGGGGT
tttgtatttcttagtagaga

SEQ ID NO: 25682 - DNA, 20 bp, Artificial Sequence
  Description of Artificial Sequence: Synthetic oligonucleotide
  Target: LAMA2; (+) strand; PAM type: NNGRRT; PAM sequence: TGGGAT
acctcagcctcccaaagtgc

SEQ ID NO: 25683 - DNA, 20 bp, Artificial Sequence
  Description of Artificial Sequence: Synthetic oligonucleotide
  Target: LAMA2; (+) strand; PAM type: NNGRRT; PAM sequence: TTGAGT
aaaaaattgccattgaaatg

SEQ ID NO: 25684 - DNA, 20 bp, Artificial Sequence
  Description of Artificial Sequence: Synthetic oligonucleotide
  Target: LAMA2; (+) strand; PAM type: NNGRRT; PAM sequence: TTGGGT
cattgactctgtagatcatt

SEQ ID NO: 25685 - DNA, 20 bp, Artificial Sequence
  Description of Artificial Sequence: Synthetic oligonucleotide
  Target: LAMA2; (+) strand; PAM type: NNGRRT; PAM sequence: TTGAGT
tttcttattattattatact

SEQ ID NO: 25686 - DNA, 20 bp, Artificial Sequence
  Description of Artificial Sequence: Synthetic oligonucleotide
  Target: LAMA2; (+) strand; PAM type: NNGRRT; PAM sequence: TAGGGT
tattattatactttgagttc

SEQ ID NO: 25687 - DNA, 20 bp, Artificial Sequence
  Description of Artificial Sequence: Synthetic oligonucleotide
  Target: LAMA2; (+) strand; PAM type: NNGRRT; PAM sequence: ATGAGT
tcattgttcaactcccactt

SEQ ID NO: 25688 - DNA, 20 bp, Artificial Sequence
  Description of Artificial Sequence: Synthetic oligonucleotide
  Target: LAMA2; (+) strand; PAM type: NNGRRT; PAM sequence: GAGAAT
tgtccttgtgatattttgct

SEQ ID NO: 25689 - DNA, 20 bp, Artificial Sequence
  Description of Artificial Sequence: Synthetic oligonucleotide
  Target: LAMA2; (+) strand; PAM type: NNGRRT; PAM sequence: TTGGGT
agtctattattgatggacat

SEQ ID NO: 25690 - DNA, 20 bp, Artificial Sequence
  Description of Artificial Sequence: Synthetic oligonucleotide
  Target: LAMA2; (+) strand; PAM type: NNGRRT; PAM sequence: GTGAAT
ggttccaagtctttgctatt

SEQ ID NO: 25691 - DNA, 20 bp, Artificial Sequence
  Description of Artificial Sequence: Synthetic oligonucleotide
  Target: LAMA2; (+) strand; PAM type: NNGRRT; PAM sequence: TTGGGT
gtagcatgatttataatcct

SEQ ID NO: 25692 - DNA, 20 bp, Artificial Sequence
  Description of Artificial Sequence: Synthetic oligonucleotide
  Target: LAMA2; (+) strand; PAM type: NNGRRT; PAM sequence: TTGGAT
tttgggtacttaattctttt

SEQ ID NO: 25693 - DNA, 20 bp, Artificial Sequence
  Description of Artificial Sequence: Synthetic oligonucleotide
  Target: LAMA2; (+) strand; PAM type: NNGRRT; PAM sequence: TTGAAT
tttcatatcctgcaacttta

SEQ ID NO: 25694 - DNA, 20 bp, Artificial Sequence
  Description of Artificial Sequence: Synthetic oligonucleotide
  Target: LAMA2; (+) strand; PAM type: NNGRRT; PAM sequence: TGGAGT
gcttctaatagcactttaga

SEQ ID NO: 25695 - DNA, 20 bp, Artificial Sequence
  Description of Artificial Sequence: Synthetic oligonucleotide
  Target: LAMA2; (+) strand; PAM type: NNGRRT; PAM sequence: TAGGGT
atagcactttagatggagtt

SEQ ID NO: 25696 - DNA, 20 bp, Artificial Sequence
  Description of Artificial Sequence: Synthetic oligonucleotide
  Target: LAMA2; (+) strand; PAM type: NNGRRT; PAM sequence: ATGAAT
cttcttcctttccaatttag

SEQ ID NO: 25697 - DNA, 20 bp, Artificial Sequence
  Description of Artificial Sequence: Synthetic oligonucleotide
  Target: LAMA2; (+) strand; PAM type: NNGRRT; PAM sequence: CCGAAT
aatgttatatctttttcttg

SEQ ID NO: 25698 - DNA, 20 bp, Artificial Sequence
  Description of Artificial Sequence: Synthetic oligonucleotide
  Target: LAMA2; (+) strand; PAM type: NNGRRT; PAM sequence: GGGAGT
ctcatagtactatgttgatt

SEQ ID NO: 25699 - DNA, 20 bp, Artificial Sequence
  Description of Artificial Sequence: Synthetic oligonucleotide
  Target: LAMA2; (+) strand; PAM type: NNGRRT; PAM sequence: TTGAAT
aggaaaccagatgaaggtaa

SEQ ID NO: 25700 - DNA, 20 bp, Artificial Sequence
  Description of Artificial Sequence: Synthetic oligonucleotide
  Target: LAMA2; (+) strand; PAM type: NNGRRT; PAM sequence: GTGAGT
ccgatgcttttcttgtgata

SEQ ID NO: 25701 - DNA, 20 bp, Artificial Sequence
  Description of Artificial Sequence: Synthetic oligonucleotide
  Target: LAMA2; (+) strand; PAM type: NNGRRT; PAM sequence: GTGAGT
tgcttttcttgtgatagtga

SEQ ID NO: 25702 - DNA, 20 bp, Artificial Sequence
  Description of Artificial Sequence: Synthetic oligonucleotide
  Target: LAMA2; (+) strand; PAM type: NNGRRT; PAM sequence: CAGGAT
gttgggagcttttatcatga

SEQ ID NO: 25703 - DNA, 20 bp, Artificial Sequence
  Description of Artificial Sequence: Synthetic oligonucleotide
  Target: LAMA2; (+) strand; PAM type: NNGRRT; PAM sequence: TTGAAT
gcttttatcatgacaggatg

SEQ ID NO: 25704 - DNA, 20 bp, Artificial Sequence
  Description of Artificial Sequence: Synthetic oligonucleotide
  Target: LAMA2; (+) strand; PAM type: NNGRRT; PAM sequence: GGGGAT
gtagtccccctttatgcatg

SEQ ID NO: 25705 - DNA, 20 bp, Artificial Sequence
  Description of Artificial Sequence: Synthetic oligonucleotide
  Target: LAMA2; (+) strand; PAM type: NNGRRT; PAM sequence: CAGAGT
gggatacattccaggacccc

SEQ ID NO: 25706 - DNA, 20 bp, Artificial Sequence
  Description of Artificial Sequence: Synthetic oligonucleotide
  Target: LAMA2; (+) strand; PAM type: NNGRRT; PAM sequence: AAGAGT
ttataacaatttactataat

SEQ ID NO: 25707 - DNA, 20 bp, Artificial Sequence
  Description of Artificial Sequence: Synthetic oligonucleotide
  Target: LAMA2; (+) strand; PAM type: NNGRRT; PAM sequence: GTGAAT
tttactataataagagttat

SEQ ID NO: 25708 - DNA, 20 bp, Artificial Sequence
  Description of Artificial Sequence: Synthetic oligonucleotide
  Target: LAMA2; (+) strand; PAM type: NNGRRT; PAM sequence: TTGGAT
agctatgacaatgttgatgg

SEQ ID NO: 25709 - DNA, 20 bp, Artificial Sequence
  Description of Artificial Sequence: Synthetic oligonucleotide
  Target: LAMA2; (+) strand; PAM type: NNGRRT; PAM sequence: TTGGAT
caggtcggttgtgatacagt

SEQ ID NO: 25710 - DNA, 20 bp, Artificial Sequence
  Description of Artificial Sequence: Synthetic oligonucleotide
  Target: LAMA2; (+) strand; PAM type: NNGRRT; PAM sequence: AGGAAT
agtttggataccctagaaaa

SEQ ID NO: 25711 - DNA, 20 bp, Artificial Sequence
  Description of Artificial Sequence: Synthetic oligonucleotide
  Target: LAMA2; (+) strand; PAM type: NNGRRT; PAM sequence: CTGGGT
aaaaaggaatggttcatctc

SEQ ID NO: 25712 - DNA, 20 bp, Artificial Sequence
  Description of Artificial Sequence: Synthetic oligonucleotide
  Target: LAMA2; (+) strand; PAM type: NNGRRT; PAM sequence: ATGAAT
aaatgcacaattcaaaactt

SEQ ID NO: 25713 - DNA, 20 bp, Artificial Sequence
  Description of Artificial Sequence: Synthetic oligonucleotide
  Target: LAMA2; (+) strand; PAM type: NNGRRT; PAM sequence: TTGAGT
ttaatattttcagaccatga

SEQ ID NO: 25714 - DNA, 20 bp, Artificial Sequence
  Description of Artificial Sequence: Synthetic oligonucleotide
  Target: LAMA2; (+) strand; PAM type: NNGRRT; PAM sequence: GAGAAT
aagtgaaacaaagcataagt

SEQ ID NO: 25715 - DNA, 20 bp, Artificial Sequence
  Description of Artificial Sequence: Synthetic oligonucleotide
  Target: LAMA2; (+) strand; PAM type: NNGRRT; PAM sequence: TTGAAT
catttatcgactcatgtatg

SEQ ID NO: 25716 - DNA, 20 bp, Artificial Sequence
  Description of Artificial Sequence: Synthetic oligonucleotide
  Target: LAMA2; (+) strand; PAM type: NNGRRT; PAM sequence: AAGGAT
ttgaattatccatttattcc

SEQ ID NO: 25717 - DNA, 20 bp, Artificial Sequence
  Description of Artificial Sequence: Synthetic oligonucleotide
  Target: LAMA2; (+) strand; PAM type: NNGRRT; PAM sequence: GTGAAT
ataaatccctcttaatcatg

SEQ ID NO: 25718 - DNA, 20 bp, Artificial Sequence
  Description of Artificial Sequence: Synthetic oligonucleotide
  Target: LAMA2; (+) strand; PAM type: NNGRRT; PAM sequence: TTGAAT
atgttccttttgatatgccg

SEQ ID NO: 25719 - DNA, 20 bp, Artificial Sequence
  Description of Artificial Sequence: Synthetic oligonucleotide
  Target: LAMA2; (+) strand; PAM type: NNGRRT; PAM sequence: GAGGAT
tgatttgctagtattttttt

SEQ ID NO: 25720 - DNA, 20 bp, Artificial Sequence
  Description of Artificial Sequence: Synthetic oligonucleotide
  Target: LAMA2; (+) strand; PAM type: NNGRRT; PAM sequence: CTGGGT
tttatttgtagtgtccttat

SEQ ID NO: 25721 - DNA, 20 bp, Artificial Sequence
  Description of Artificial Sequence: Synthetic oligonucleotide
  Target: LAMA2; (+) strand; PAM type: NNGRRT; PAM sequence: TTGAAT
taatttataattttatttag

SEQ ID NO: 25722 - DNA, 20 bp, Artificial Sequence
  Description of Artificial Sequence: Synthetic oligonucleotide
  Target: LAMA2; (+) strand; PAM type: NNGRRT; PAM sequence: TTGGAT
aagatacttttgatttctct

SEQ ID NO: 25723 - DNA, 20 bp, Artificial Sequence
  Description of Artificial Sequence: Synthetic oligonucleotide
  Target: LAMA2; (+) strand; PAM type: NNGRRT; PAM sequence: TGGAGT
ctttgacccattggtcattt

SEQ ID NO: 25724 - DNA, 20 bp, Artificial Sequence
  Description of Artificial Sequence: Synthetic oligonucleotide
  Target: LAMA2; (+) strand; PAM type: NNGRRT; PAM sequence: TGGGAT
tactttccatatatctgtgc

SEQ ID NO: 25725 - DNA, 20 bp, Artificial Sequence
  Description of Artificial Sequence: Synthetic oligonucleotide
  Target: LAMA2; (+) strand; PAM type: NNGRRT; PAM sequence: ATGAGT
cagtccccttatctgtaaaa

SEQ ID NO: 25726 - DNA, 20 bp, Artificial Sequence
  Description of Artificial Sequence: Synthetic oligonucleotide
  Target: LAMA2; (+) strand; PAM type: NNGRRT; PAM sequence: GAGAGT
gtgatattaataataataat

SEQ ID NO: 25727 - DNA, 20 bp, Artificial Sequence
  Description of Artificial Sequence: Synthetic oligonucleotide
  Target: LAMA2; (+) strand; PAM type: NNGRRT; PAM sequence: TAGAAT
aatagtcagtagaaagtagt

SEQ ID NO: 25728 - DNA, 20 bp, Artificial Sequence
  Description of Artificial Sequence: Synthetic oligonucleotide
  Target: LAMA2; (+) strand; PAM type: NNGRRT; PAM sequence: TAGAGT
ctaatgttttatgaggtcct

SEQ ID NO: 25729 - DNA, 20 bp, Artificial Sequence
  Description of Artificial Sequence: Synthetic oligonucleotide
  Target: LAMA2; (+) strand; PAM type: NNGRRT; PAM sequence: ATGAAT
gagtgctagacactgtttgc

SEQ ID NO: 25730 - DNA, 20 bp, Artificial Sequence
  Description of Artificial Sequence: Synthetic oligonucleotide
  Target: LAMA2; (+) strand; PAM type: NNGRRT; PAM sequence: AGGAGT
gttttagacggcgtagttat

SEQ ID NO: 25731 - DNA, 20 bp, Artificial Sequence
  Description of Artificial Sequence: Synthetic oligonucleotide
  Target: LAMA2; (+) strand; PAM type: NNGRRT; PAM sequence: AAGGGT
atgcctaggtcccatgaggg

SEQ ID NO: 25732 - DNA, 20 bp, Artificial Sequence
  Description of Artificial Sequence: Synthetic oligonucleotide
  Target: LAMA2; (+) strand; PAM type: NNGRRT; PAM sequence: GAGGAT
atgttaaaatgtacttctca

SEQ ID NO: 25733 - DNA, 20 bp, Artificial Sequence
  Description of Artificial Sequence: Synthetic oligonucleotide
  Target: LAMA2; (+) strand; PAM type: NNGRRT; PAM sequence: GGGAGT
agaaatgaagggaaggtcct

SEQ ID NO: 25734 - DNA, 20 bp, Artificial Sequence
  Description of Artificial Sequence: Synthetic oligonucleotide
  Target: LAMA2; (+) strand; PAM type: NNGRRT; PAM sequence: AAGAGT
tcctgggagtaccaacattt

SEQ ID NO: 25735 - DNA, 20 bp, Artificial Sequence
  Description of Artificial Sequence: Synthetic oligonucleotide
  Target: LAMA2; (+) strand; PAM type: NNGRRT; PAM sequence: AAGAAT
caacatttaagagtgaccaa

SEQ ID NO: 25736 - DNA, 20 bp, Artificial Sequence
  Description of Artificial Sequence: Synthetic oligonucleotide
  Target: LAMA2; (+) strand; PAM type: NNGRRT; PAM sequence: AGGGAT
aaagaatggaagccagcaaa

SEQ ID NO: 25737 - DNA, 20 bp, Artificial Sequence
  Description of Artificial Sequence: Synthetic oligonucleotide
  Target: LAMA2; (+) strand; PAM type: NNGRRT; PAM sequence: TAGAAT
atggaagccagcaaaaggga

SEQ ID NO: 25738 - DNA, 20 bp, Artificial Sequence
  Description of Artificial Sequence: Synthetic oligonucleotide
  Target: LAMA2; (+) strand; PAM type: NNGRRT; PAM sequence: CAGAGT
tattcagcttaccctaagtc

SEQ ID NO: 25739 - DNA, 20 bp, Artificial Sequence
  Description of Artificial Sequence: Synthetic oligonucleotide
  Target: LAMA2; (+) strand; PAM type: NNGRRT; PAM sequence: GTGAAT
cagcttaccctaagtccaga

SEQ ID NO: 25740 - DNA, 20 bp, Artificial Sequence
  Description of Artificial Sequence: Synthetic oligonucleotide
  Target: LAMA2; (+) strand; PAM type: NNGRRT; PAM sequence: AAGGAT
attgttgccttttcatgaaa

SEQ ID NO: 25741 - DNA, 20 bp, Artificial Sequence
  Description of Artificial Sequence: Synthetic oligonucleotide
  Target: LAMA2; (+) strand; PAM type: NNGRRT; PAM sequence: AAGAGT
gaggaaagcaccacaagacc

SEQ ID NO: 25742 - DNA, 20 bp, Artificial Sequence
  Description of Artificial Sequence: Synthetic oligonucleotide
  Target: LAMA2; (+) strand; PAM type: NNGRRT; PAM sequence: TTGAAT
agccatttgataagtacatg

SEQ ID NO: 25743 - DNA, 20 bp, Artificial Sequence
  Description of Artificial Sequence: Synthetic oligonucleotide
  Target: LAMA2; (+) strand; PAM type: NNGRRT; PAM sequence: ATGAAT
agtacatgttgaatgaaagc

SEQ ID NO: 25744 - DNA, 20 bp, Artificial Sequence
  Description of Artificial Sequence: Synthetic oligonucleotide
  Target: LAMA2; (+) strand; PAM type: NNGRRT; PAM sequence: TGGAGT
atatataccttcacctgact

SEQ ID NO: 25745 - DNA, 20 bp, Artificial Sequence
  Description of Artificial Sequence: Synthetic oligonucleotide
  Target: LAMA2; (+) strand; PAM type: NNGRRT; PAM sequence: AGGAAT
acctgacttggagtttcata

SEQ ID NO: 25746 - DNA, 20 bp, Artificial Sequence
  Description of Artificial Sequence: Synthetic oligonucleotide
  Target: LAMA2; (+) strand; PAM type: NNGRRT; PAM sequence: TTGAAT
ttaaaggagacagaaaagat

SEQ ID NO: 25747 - DNA, 20 bp, Artificial Sequence
  Description of Artificial Sequence: Synthetic oligonucleotide
  Target: LAMA2; (+) strand; PAM type: NNGRRT; PAM sequence: AGGAAT
cagaaaagatttgaatatcc

SEQ ID NO: 25748 - DNA, 20 bp, Artificial Sequence
  Description of Artificial Sequence: Synthetic oligonucleotide
  Target: LAMA2; (+) strand; PAM type: NNGRRT; PAM sequence: CAGAGT
ggcggttacaagtaggtaag

SEQ ID NO: 25749 - DNA, 20 bp, Artificial Sequence
  Description of Artificial Sequence: Synthetic oligonucleotide
  Target: LAMA2; (+) strand; PAM type: NNGRRT; PAM sequence: TAGGGT
ggtaagcagagtccaaaatg

SEQ ID NO: 25750 - DNA, 20 bp, Artificial Sequence
  Description of Artificial Sequence: Synthetic oligonucleotide
  Target: LAMA2; (+) strand; PAM type: NNGRRT; PAM sequence: AGGAAT
ggtcattttcaatggcagag

SEQ ID NO: 25751 - DNA, 20 bp, Artificial Sequence
  Description of Artificial Sequence: Synthetic oligonucleotide
  Target: LAMA2; (+) strand; PAM type: NNGRRT; PAM sequence: GAGAGT
tcaatggcagagaggaatag

SEQ ID NO: 25752 - DNA, 20 bp, Artificial Sequence
  Description of Artificial Sequence: Synthetic oligonucleotide
  Target: LAMA2; (+) strand; PAM type: NNGRRT; PAM sequence: TTGAGT
gaagcaaatgctcaaggagc

SEQ ID NO: 25753 - DNA, 20 bp, Artificial Sequence
  Description of Artificial Sequence: Synthetic oligonucleotide
  Target: LAMA2; (+) strand; PAM type: NNGRRT; PAM sequence: GGGAAT
caaggagcttgagtagagac

SEQ ID NO: 25754 - DNA, 20 bp, Artificial Sequence
  Description of Artificial Sequence: Synthetic oligonucleotide
  Target: LAMA2; (+) strand; PAM type: NNGRRT; PAM sequence: AAGAAT
aagctaattatctaagaaac

SEQ ID NO: 25755 - DNA, 20 bp, Artificial Sequence
  Description of Artificial Sequence: Synthetic oligonucleotide
  Target: LAMA2; (+) strand; PAM type: NNGRRT; PAM sequence: CTGAGT
gttgcctttcctggttctcc

SEQ ID NO: 25756 - DNA, 20 bp, Artificial Sequence
  Description of Artificial Sequence: Synthetic oligonucleotide
  Target: LAMA2; (+) strand; PAM type: NNGRRT; PAM sequence: CTGAGT
cctggttctccctgagtgct

SEQ ID NO: 25757 - DNA, 20 bp, Artificial Sequence
  Description of Artificial Sequence: Synthetic oligonucleotide
  Target: LAMA2; (+) strand; PAM type: NNGRRT; PAM sequence: CAGAAT
tctgatcccttcacggcatc

SEQ ID NO: 25758 - DNA, 20 bp, Artificial Sequence
  Description of Artificial Sequence: Synthetic oligonucleotide
  Target: LAMA2; (+) strand; PAM type: NNGRRT; PAM sequence: TTGGGT
cagaatgatgatccaaaagt

SEQ ID NO: 25759 - DNA, 20 bp, Artificial Sequence
  Description of Artificial Sequence: Synthetic oligonucleotide
  Target: LAMA2; (+) strand; PAM type: NNGRRT; PAM sequence: ATGGAT
caagttatgttttgttcata

SEQ ID NO: 25760 - DNA, 20 bp, Artificial Sequence
  Description of Artificial Sequence: Synthetic oligonucleotide
  Target: LAMA2; (+) strand; PAM type: NNGRRT; PAM sequence: CTGAAT
gatttttttttgtttgtttt

SEQ ID NO: 25761 - DNA, 20 bp, Artificial Sequence
  Description of Artificial Sequence: Synthetic oligonucleotide
  Target: LAMA2; (+) strand; PAM type: NNGRRT; PAM sequence: CTGAGT
gccttaaaaagccctcatca

SEQ ID NO: 25762 - DNA, 20 bp, Artificial Sequence
  Description of Artificial Sequence: Synthetic oligonucleotide
  Target: LAMA2; (+) strand; PAM type: NNGRRT; PAM sequence: CTGAAT
cctcacctccacttacccta

SEQ ID NO: 25763 - DNA, 20 bp, Artificial Sequence
  Description of Artificial Sequence: Synthetic oligonucleotide
  Target: LAMA2; (+) strand; PAM type: NNGRRT; PAM sequence: GGGAAT
gtcaaatattacttccttag

SEQ ID NO: 25764 - DNA, 20 bp, Artificial Sequence
  Description of Artificial Sequence: Synthetic oligonucleotide
  Target: LAMA2; (+) strand; PAM type: NNGRRT; PAM sequence: AGGGGT
ctagatcacatccctttatt

SEQ ID NO: 25765 - DNA, 20 bp, Artificial Sequence
  Description of Artificial Sequence: Synthetic oligonucleotide
  Target: LAMA2; (+) strand; PAM type: NNGRRT; PAM sequence: TTGAAT
caattataattattgaccca

SEQ ID NO: 25766 - DNA, 20 bp, Artificial Sequence
  Description of Artificial Sequence: Synthetic oligonucleotide
  Target: LAMA2; (+) strand; PAM type: NNGRRT; PAM sequence: ATGAGT
tataattattgacccattga

SEQ ID NO: 25767 - DNA, 20 bp, Artificial Sequence
  Description of Artificial Sequence: Synthetic oligonucleotide
  Target: LAMA2; (+) strand; PAM type: NNGRRT; PAM sequence: AGGAAT
tctaataaatatttgtcgga

SEQ ID NO: 25768 - DNA, 20 bp, Artificial Sequence
  Description of Artificial Sequence: Synthetic oligonucleotide
  Target: LAMA2; (+) strand; PAM type: NNGRRT; PAM sequence: GAGAAT
gaaggaataaatattagtga

SEQ ID NO: 25769 - DNA, 20 bp, Artificial Sequence
  Description of Artificial Sequence: Synthetic oligonucleotide
  Target: LAMA2; (+) strand; PAM type: NNGRRT; PAM sequence: ATGGGT
aaatattagtgagagaataa

SEQ ID NO: 25770 - DNA, 20 bp, Artificial Sequence
  Description of Artificial Sequence: Synthetic oligonucleotide
  Target: LAMA2; (+) strand; PAM type: NNGRRT; PAM sequence: ATGAGT
aataaatgggtaatgcattc

SEQ ID NO: 25771 - DNA, 20 bp, Artificial Sequence
  Description of Artificial Sequence: Synthetic oligonucleotide
  Target: LAMA2; (+) strand; PAM type: NNGRRT; PAM sequence: GTGAAT
aatgggtaatgcattcatga

SEQ ID NO: 25772 - DNA, 20 bp, Artificial Sequence
  Description of Artificial Sequence: Synthetic oligonucleotide
  Target: LAMA2; (+) strand; PAM type: NNGRRT; PAM sequence: AAGAGT
taccttcaatgactgaaaca

SEQ ID NO: 25773 - DNA, 20 bp, Artificial Sequence
  Description of Artificial Sequence: Synthetic oligonucleotide
  Target: LAMA2; (+) strand; PAM type: NNGRRT; PAM sequence: TGGAAT
gaaatatgacctgaaagcca

SEQ ID NO: 25774 - DNA, 20 bp, Artificial Sequence
  Description of Artificial Sequence: Synthetic oligonucleotide
  Target: LAMA2; (+) strand; PAM type: NNGRRT; PAM sequence: CAGGGT
atcccagcatttctagagac

SEQ ID NO: 25775 - DNA, 20 bp, Artificial Sequence
  Description of Artificial Sequence: Synthetic oligonucleotide
  Target: LAMA2; (+) strand; PAM type: NNGRRT; PAM sequence: GAGAAT
atttctagagaccagggtga

SEQ ID NO: 25776 - DNA, 20 bp, Artificial Sequence
  Description of Artificial Sequence: Synthetic oligonucleotide
  Target: LAMA2; (+) strand; PAM type: NNGRRT; PAM sequence: CTGGGT
ctcagaagttcaaggccagc

SEQ ID NO: 25777 - DNA, 20 bp, Artificial Sequence
  Description of Artificial Sequence: Synthetic oligonucleotide
  Target: LAMA2; (+) strand; PAM type: NNGRRT; PAM sequence: GAGGAT
tactccaaaggctgaagtgg

SEQ ID NO: 25778 - DNA, 20 bp, Artificial Sequence
  Description of Artificial Sequence: Synthetic oligonucleotide
  Target: LAMA2; (+) strand; PAM type: NNGRRT; PAM sequence: AGGAGT
tgggaggattgcatgagccc

SEQ ID NO: 25779 - DNA, 20 bp, Artificial Sequence
  Description of Artificial Sequence: Synthetic oligonucleotide
  Target: LAMA2; (+) strand; PAM type: NNGRRT; PAM sequence: CTGGGT
tcatgccactgtgctccagg

SEQ ID NO: 25780 - DNA, 20 bp, Artificial Sequence
  Description of Artificial Sequence: Synthetic oligonucleotide
  Target: LAMA2; (+) strand; PAM type: NNGRRT; PAM sequence: CAGAAT
aataagaaagttttaataag

SEQ ID NO: 25781 - DNA, 20 bp, Artificial Sequence
  Description of Artificial Sequence: Synthetic oligonucleotide
  Target: LAMA2; (+) strand; PAM type: NNGRRT; PAM sequence: ATGAAT
agcagaatattagtttaatt

SEQ ID NO: 25782 - DNA, 20 bp, Artificial Sequence
  Description of Artificial Sequence: Synthetic oligonucleotide
  Target: LAMA2; (+) strand; PAM type: NNGRRT; PAM sequence: AGGGGT
aagagatgtatagcatttgt

SEQ ID NO: 25783 - DNA, 20 bp, Artificial Sequence
  Description of Artificial Sequence: Synthetic oligonucleotide
  Target: LAMA2; (+) strand; PAM type: NNGRRT; PAM sequence: TGGAAT
agaagttaagagcaatgatg

SEQ ID NO: 25784 - DNA, 20 bp, Artificial Sequence
  Description of Artificial Sequence: Synthetic oligonucleotide
  Target: LAMA2; (+) strand; PAM type: NNGRRT; PAM sequence: GAGGAT
tttaagaacttgtctgaaaa

SEQ ID NO: 25785 - DNA, 20 bp, Artificial Sequence
  Description of Artificial Sequence: Synthetic oligonucleotide
  Target: LAMA2; (+) strand; PAM type: NNGRRT; PAM sequence: TGGAGT
aaaaataaaataagccttgc

SEQ ID NO: 25786 - DNA, 20 bp, Artificial Sequence
  Description of Artificial Sequence: Synthetic oligonucleotide
  Target: LAMA2; (+) strand; PAM type: NNGRRT; PAM sequence: TAGAAT
gctggggaaatagaagtaag

SEQ ID NO: 25787 - DNA, 20 bp, Artificial Sequence
  Description of Artificial Sequence: Synthetic oligonucleotide
  Target: LAMA2; (+) strand; PAM type: NNGRRT; PAM sequence: AAGGGT
ataatcaaagtttgtgttag

SEQ ID NO: 25788 - DNA, 20 bp, Artificial Sequence
  Description of Artificial Sequence: Synthetic oligonucleotide
  Target: LAMA2; (+) strand; PAM type: NNGRRT; PAM sequence: ATGGAT
aatctgaaggcttttgaaaa

SEQ ID NO: 25789 - DNA, 20 bp, Artificial Sequence
  Description of Artificial Sequence: Synthetic oligonucleotide
  Target: LAMA2; (+) strand; PAM type: NNGRRT; PAM sequence: TGGGAT
aggcttttgaaaaatggatc

SEQ ID NO: 25790 - DNA, 20 bp, Artificial Sequence
  Description of Artificial Sequence: Synthetic oligonucleotide
  Target: LAMA2; (+) strand; PAM type: NNGRRT; PAM sequence: GAGGAT
aaaaatggatctgggatagg

SEQ ID NO: 25791 - DNA, 20 bp, Artificial Sequence
  Description of Artificial Sequence: Synthetic oligonucleotide
  Target: LAMA2; (+) strand; PAM type: NNGRRT; PAM sequence: TTGAAT
tgggatagggaggatgtttg

SEQ ID NO: 25792 - DNA, 20 bp, Artificial Sequence
  Description of Artificial Sequence: Synthetic oligonucleotide
  Target: LAMA2; (+) strand; PAM type: NNGRRT; PAM sequence: ATGAAT
atagggaggatgtttgttga

SEQ ID NO: 25793 - DNA, 20 bp, Artificial Sequence
  Description of Artificial Sequence: Synthetic oligonucleotide
  Target: LAMA2; (+) strand; PAM type: NNGRRT; PAM sequence: ATGAAT
ggaggatgtttgttgaatga

SEQ ID NO: 25794 - DNA, 20 bp, Artificial Sequence
  Description of Artificial Sequence: Synthetic oligonucleotide
  Target: LAMA2; (+) strand; PAM type: NNGRRT; PAM sequence: GTGAGT
ataaactaatcatgatttta

SEQ ID NO: 25795 - DNA, 20 bp, Artificial Sequence
  Description of Artificial Sequence: Synthetic oligonucleotide
  Target: LAMA2; (+) strand; PAM type: NNGRRT; PAM sequence: GCGAGT
aatttcgttctctgtgccca

SEQ ID NO: 25796 - DNA, 20 bp, Artificial Sequence
  Description of Artificial Sequence: Synthetic oligonucleotide
  Target: LAMA2; (+) strand; PAM type: NNGRRT; PAM sequence: GAGGAT
cattaatcttagcttgaaaa

SEQ ID NO: 25797 - DNA, 20 bp, Artificial Sequence
  Description of Artificial Sequence: Synthetic oligonucleotide
  Target: LAMA2; (+) strand; PAM type: NNGRRT; PAM sequence: ATGAGT
agaaaacaattccaagatat

SEQ ID NO: 25798 - DNA, 20 bp, Artificial Sequence
  Description of Artificial Sequence: Synthetic oligonucleotide
  Target: LAMA2; (+) strand; PAM type: NNGRRT; PAM sequence: TTGAGT
atttccccttttatctttta

SEQ ID NO: 25799 - DNA, 20 bp, Artificial Sequence
  Description of Artificial Sequence: Synthetic oligonucleotide
  Target: LAMA2; (+) strand; PAM type: NNGRRT; PAM sequence: GTGAAT
aagtgttctattgtagttaa

SEQ ID NO: 25800 - DNA, 20 bp, Artificial Sequence
  Description of Artificial Sequence: Synthetic oligonucleotide
  Target: LAMA2; (+) strand; PAM type: NNGRRT; PAM sequence: CTGAAT
atggacagaagccagaaatg

SEQ ID NO: 25801 - DNA, 20 bp, Artificial Sequence
  Description of Artificial Sequence: Synthetic oligonucleotide
  Target: LAMA2; (+) strand; PAM type: NNGRRT; PAM sequence: ATGAAT
ttatttactttttaaaaact

SEQ ID NO: 25802 - DNA, 20 bp, Artificial Sequence
  Description of Artificial Sequence: Synthetic oligonucleotide
  Target: LAMA2; (+) strand; PAM type: NNGRRT; PAM sequence: GTGGGT
gattctaaaagtatttgtat

SEQ ID NO: 25803 - DNA, 20 bp, Artificial Sequence
  Description of Artificial Sequence: Synthetic oligonucleotide
  Target: LAMA2; (+) strand; PAM type: NNGRRT; PAM sequence: TAGAAT
tcttctagttgatgcttctg

SEQ ID NO: 25804 - DNA, 20 bp, Artificial Sequence
  Description of Artificial Sequence: Synthetic oligonucleotide
  Target: LAMA2; (+) strand; PAM type: NNGRRT; PAM sequence: TGGAAT
ctgagaaaggtaggtcttaa

SEQ ID NO: 25805 - DNA, 20 bp, Artificial Sequence
  Description of Artificial Sequence: Synthetic oligonucleotide
  Target: LAMA2; (+) strand; PAM type: NNGRRT; PAM sequence: TTGGAT
tgttaatatgtagtcttatt

SEQ ID NO: 25806 - DNA, 20 bp, Artificial Sequence
  Description of Artificial Sequence: Synthetic oligonucleotide
  Target: LAMA2; (+) strand; PAM type: NNGRRT; PAM sequence: GTGGAT
atcacttacgtatttaatct

SEQ ID NO: 25807 - DNA, 20 bp, Artificial Sequence
  Description of Artificial Sequence: Synthetic oligonucleotide
  Target: LAMA2; (+) strand; PAM type: NNGRRT; PAM sequence: TGGGGT
cttaccaaagggagctcatt

SEQ ID NO: 25808 - DNA, 20 bp, Artificial Sequence
  Description of Artificial Sequence: Synthetic oligonucleotide
  Target: LAMA2; (+) strand; PAM type: NNGRRT; PAM sequence: AGGGGT
gggagctcatttggggtggc

SEQ ID NO: 25809 - DNA, 20 bp, Artificial Sequence
  Description of Artificial Sequence: Synthetic oligonucleotide
  Target: LAMA2; (+) strand; PAM type: NNGRRT; PAM sequence: TGGAAT
ctcgggcaacttctactttt

SEQ ID NO: 25810 - DNA, 20 bp, Artificial Sequence
  Description of Artificial Sequence: Synthetic oligonucleotide
  Target: LAMA2; (+) strand; PAM type: NNGRRT; PAM sequence: GAGAGT
cgcacatataaatacacaga

SEQ ID NO: 25811 - DNA, 20 bp, Artificial Sequence
  Description of Artificial Sequence: Synthetic oligonucleotide
  Target: LAMA2; (+) strand; PAM type: NNGRRT; PAM sequence: GAGAGT
gagagagagagagagagaga

SEQ ID NO: 25812 - DNA, 20 bp, Artificial Sequence
  Description of Artificial Sequence: Synthetic oligonucleotide
  Target: LAMA2; (+) strand; PAM type: NNGRRT; PAM sequence: TGGGGT
gtcttgctctgttaaccagc

SEQ ID NO: 25813 - DNA, 20 bp, Artificial Sequence
  Description of Artificial Sequence: Synthetic oligonucleotide
  Target: LAMA2; (+) strand; PAM type: NNGRRT; PAM sequence: CTGAGT
aattctcatgcctcagcctt

SEQ ID NO: 25814 - DNA, 20 bp, Artificial Sequence
  Description of Artificial Sequence: Synthetic oligonucleotide
  Target: LAMA2; (+) strand; PAM type: NNGRRT; PAM sequence: CAGGGT
tttttttttttttgaagaga

SEQ ID NO: 25815 - DNA, 20 bp, Artificial Sequence
  Description of Artificial Sequence: Synthetic oligonucleotide
  Target: LAMA2; (+) strand; PAM type: NNGRRT; PAM sequence: ATGGAT
gaaatcatcaaatgctaccc

SEQ ID NO: 25816 - DNA, 20 bp, Artificial Sequence
  Description of Artificial Sequence: Synthetic oligonucleotide
  Target: LAMA2; (+) strand; PAM type: NNGRRT; PAM sequence: GAGAAT
aagaaaaatgtctgctttgt

SEQ ID NO: 25817 - DNA, 20 bp, Artificial Sequence
  Description of Artificial Sequence: Synthetic oligonucleotide
  Target: LAMA2; (+) strand; PAM type: NNGRRT; PAM sequence: GGGAAT
tttggtacatgtatgtatga

SEQ ID NO: 25818 - DNA, 20 bp, Artificial Sequence
  Description of Artificial Sequence: Synthetic oligonucleotide
  Target: LAMA2; (+) strand; PAM type: NNGRRT; PAM sequence: TAGAGT
ctgaaaagattttcatcggt

SEQ ID NO: 25819 - DNA, 20 bp, Artificial Sequence
  Description of Artificial Sequence: Synthetic oligonucleotide
  Target: LAMA2; (+) strand; PAM type: NNGRRT; PAM sequence: ATGAAT
caaatgggaccttaaacaat

SEQ ID NO: 25820 - DNA, 20 bp, Artificial Sequence
  Description of Artificial Sequence: Synthetic oligonucleotide
  Target: LAMA2; (+) strand; PAM type: NNGRRT; PAM sequence: AAGAAT
tgaatagacatggtttctca

SEQ ID NO: 25821 - DNA, 20 bp, Artificial Sequence
  Description of Artificial Sequence: Synthetic oligonucleotide
  Target: LAMA2; (+) strand; PAM type: NNGRRT; PAM sequence: AAGGAT
tcacctgagcacacatcaca

SEQ ID NO: 25822 - DNA, 20 bp, Artificial Sequence
  Description of Artificial Sequence: Synthetic oligonucleotide
  Target: LAMA2; (+) strand; PAM type: NNGRRT; PAM sequence: ATGAAT
aggtaccccacctagattaa

SEQ ID NO: 25823 - DNA, 20 bp, Artificial Sequence
  Description of Artificial Sequence: Synthetic oligonucleotide
  Target: LAMA2; (+) strand; PAM type: NNGRRT; PAM sequence: TTGGGT
taaatgaattaattttggac

SEQ ID NO: 25824 - DNA, 20 bp, Artificial Sequence
  Description of Artificial Sequence: Synthetic oligonucleotide
  Target: LAMA2; (+) strand; PAM type: NNGRRT; PAM sequence: AGGGAT
cctcaggtgccagacttcag

SEQ ID NO: 25825 - DNA, 20 bp, Artificial Sequence
  Description of Artificial Sequence: Synthetic oligonucleotide
  Target: LAMA2; (+) strand; PAM type: NNGRRT; PAM sequence: CTGGAT
cattgctaaaatcctaaaga

SEQ ID NO: 25826 - DNA, 20 bp, Artificial Sequence
  Description of Artificial Sequence: Synthetic oligonucleotide
  Target: LAMA2; (+) strand; PAM type: NNGRRT; PAM sequence: CGGGAT
taaagaaaagatgattaagg

SEQ ID NO: 25827 - DNA, 20 bp, Artificial Sequence
  Description of Artificial Sequence: Synthetic oligonucleotide
  Target: LAMA2; (+) strand; PAM type: NNGRRT; PAM sequence: CAGGAT
gtggctcacgcctgtaatcc

SEQ ID NO: 25828 - DNA, 20 bp, Artificial Sequence
  Description of Artificial Sequence: Synthetic oligonucleotide
  Target: LAMA2; (+) strand; PAM type: NNGRRT; PAM sequence: AGGAGT
ggtgagcagaccacgatgtc

SEQ ID NO: 25829 - DNA, 20 bp, Artificial Sequence
  Description of Artificial Sequence: Synthetic oligonucleotide
  Target: LAMA2; (+) strand; PAM type: NNGRRT; PAM sequence: GAGAGT
ctgcataaacaggagcaaga

SEQ ID NO: 25830 - DNA, 20 bp, Artificial Sequence
  Description of Artificial Sequence: Synthetic oligonucleotide
  Target: LAMA2; (+) strand; PAM type: NNGRRT; PAM sequence: GGGGAT
gtcatgaggacagttccaag

SEQ ID NO: 25831 - DNA, 20 bp, Artificial Sequence
  Description of Artificial Sequence: Synthetic oligonucleotide
  Target: LAMA2; (+) strand; PAM type: NNGRRT; PAM sequence: TTGGGT
attacatttcaatacgagat

SEQ ID NO: 25832 - DNA, 20 bp, Artificial Sequence
  Description of Artificial Sequence: Synthetic oligonucleotide
  Target: LAMA2; (+) strand; PAM type: NNGRRT; PAM sequence: TAGGAT
atttcaatacgagatttggg

SEQ ID NO: 25833 - DNA, 20 bp, Artificial Sequence
  Description of Artificial Sequence: Synthetic oligonucleotide
  Target: LAMA2; (+) strand; PAM type: NNGRRT; PAM sequence: AAGAGT
tcctatatcacttttggaga

SEQ ID NO: 25834 - DNA, 20 bp, Artificial Sequence
  Description of Artificial Sequence: Synthetic oligonucleotide
  Target: LAMA2; (+) strand; PAM type: NNGRRT; PAM sequence: AGGAAT
ttgttacatcacagcatttg

SEQ ID NO: 25835 - DNA, 20 bp, Artificial Sequence
  Description of Artificial Sequence: Synthetic oligonucleotide
  Target: LAMA2; (+) strand; PAM type: NNGRRT; PAM sequence: TGGGGT
cacagcatttgaggaatggc

SEQ ID NO: 25836 - DNA, 20 bp, Artificial Sequence
  Description of Artificial Sequence: Synthetic oligonucleotide
  Target: LAMA2; (+) strand; PAM type: NNGRRT; PAM sequence: ATGAGT
cagtaagaagaagtatagtc

SEQ ID NO: 25837 - DNA, 20 bp, Artificial Sequence
  Description of Artificial Sequence: Synthetic oligonucleotide
  Target: LAMA2; (+) strand; PAM type: NNGRRT; PAM sequence: AGGGAT
aaatccaggtaccaataact

SEQ ID NO: 25838 - DNA, 20 bp, Artificial Sequence
  Description of Artificial Sequence: Synthetic oligonucleotide
  Target: LAMA2; (+) strand; PAM type: NNGRRT; PAM sequence: CAGAAT
aaataccagattaattttca

SEQ ID NO: 25839 - DNA, 20 bp, Artificial Sequence
  Description of Artificial Sequence: Synthetic oligonucleotide
  Target: LAMA2; (+) strand; PAM type: NNGRRT; PAM sequence: TGGGGT
ccctcaagattcacaacctc

SEQ ID NO: 25840 - DNA, 20 bp, Artificial Sequence
  Description of Artificial Sequence: Synthetic oligonucleotide
  Target: LAMA2; (+) strand; PAM type: NNGRRT; PAM sequence: TTGAGT
tcctatatgatcccctcctg

SEQ ID NO: 25841 - DNA, 20 bp, Artificial Sequence
  Description of Artificial Sequence: Synthetic oligonucleotide
  Target: LAMA2; (+) strand; PAM type: NNGRRT; PAM sequence: GTGAAT
gttgagtgtgattggagcct

SEQ ID NO: 25842 - DNA, 20 bp, Artificial Sequence
  Description of Artificial Sequence: Synthetic oligonucleotide
  Target: LAMA2; (+) strand; PAM type: NNGRRT; PAM sequence: TCGGAT
aacaaagtagaagatataat

SEQ ID NO: 25843 - DNA, 20 bp, Artificial Sequence
  Description of Artificial Sequence: Synthetic oligonucleotide
  Target: LAMA2; (+) strand; PAM type: NNGRRT; PAM sequence: AAGAGT
ttaatcaagtgaactcctaa

SEQ ID NO: 25844 - DNA, 20 bp, Artificial Sequence
  Description of Artificial Sequence: Synthetic oligonucleotide
  Target: LAMA2; (+) strand; PAM type: NNGRRT; PAM sequence: CTGGAT
tctagaagctgagagcagca

SEQ ID NO: 25845 - DNA, 20 bp, Artificial Sequence
  Description of Artificial Sequence: Synthetic oligonucleotide
  Target: LAMA2; (+) strand; PAM type: NNGRRT; PAM sequence: ATGAAT
tcgacaggaactgattatca

SEQ ID NO: 25846 - DNA, 20 bp, Artificial Sequence
  Description of Artificial Sequence: Synthetic oligonucleotide
  Target: LAMA2; (+) strand; PAM type: NNGRRT; PAM sequence: CCGAAT
taagttgaagatatcttaaa

SEQ ID NO: 25847 - DNA, 20 bp, Artificial Sequence
  Description of Artificial Sequence: Synthetic oligonucleotide
  Target: LAMA2; (+) strand; PAM type: NNGRRT; PAM sequence: TGGAAT
cctggcaacacagtacactg

SEQ ID NO: 25848 - DNA, 20 bp, Artificial Sequence
  Description of Artificial Sequence: Synthetic oligonucleotide
  Target: LAMA2; (+) strand; PAM type: NNGRRT; PAM sequence: TGGGAT
ctcatgaacatgtggtggac

SEQ ID NO: 25849 - DNA, 20 bp, Artificial Sequence
  Description of Artificial Sequence: Synthetic oligonucleotide
  Target: LAMA2; (+) strand; PAM type: NNGRRT; PAM sequence: AAGGAT
caatacttcttgatttgaaa

SEQ ID NO: 25850 - DNA, 20 bp, Artificial Sequence
  Description of Artificial Sequence: Synthetic oligonucleotide
  Target: LAMA2; (+) strand; PAM type: NNGRRT; PAM sequence: TTGGAT
cttcttgatttgaaaaagga

SEQ ID NO: 25851 - DNA, 20 bp, Artificial Sequence
  Description of Artificial Sequence: Synthetic oligonucleotide
  Target: LAMA2; (+) strand; PAM type: NNGRRT; PAM sequence: TTGAAT
tgataatagaagtgaaaagt

SEQ ID NO: 25852 - DNA, 20 bp, Artificial Sequence
  Description of Artificial Sequence: Synthetic oligonucleotide
  Target: LAMA2; (+) strand; PAM type: NNGRRT; PAM sequence: TTGAAT
catttgataagtaggtccca

SEQ ID NO: 25853 - DNA, 20 bp, Artificial Sequence
  Description of Artificial Sequence: Synthetic oligonucleotide
  Target: LAMA2; (+) strand; PAM type: NNGRRT; PAM sequence: TTGAAT
tttcccctaattcatgggca

SEQ ID NO: 25854 - DNA, 20 bp, Artificial Sequence
  Description of Artificial Sequence: Synthetic oligonucleotide
  Target: LAMA2; (+) strand; PAM type: NNGRRT; PAM sequence: AGGGGT
cctgtaccaaatggtatgcc

SEQ ID NO: 25855 - DNA, 20 bp, Artificial Sequence
  Description of Artificial Sequence: Synthetic oligonucleotide
  Target: LAMA2; (+) strand; PAM type: NNGRRT; PAM sequence: GAGGAT
ccaaatggtatgccaggggt

SEQ ID NO: 25856 - DNA, 20 bp, Artificial Sequence
  Description of Artificial Sequence: Synthetic oligonucleotide
  Target: LAMA2; (+) strand; PAM type: NNGRRT; PAM sequence: TAGAAT
caggggtgaggatacaaaga

SEQ ID NO: 25857 - DNA, 20 bp, Artificial Sequence
  Description of Artificial Sequence: Synthetic oligonucleotide
  Target: LAMA2; (+) strand; PAM type: NNGRRT; PAM sequence: TTGGAT
ttgacttctttatgcttcat

SEQ ID NO: 25858 - DNA, 20 bp, Artificial Sequence
  Description of Artificial Sequence: Synthetic oligonucleotide
  Target: LAMA2; (+) strand; PAM type: NNGRRT; PAM sequence: AAGGGT
ccgtttttaagactaagctc

SEQ ID NO: 25859 - DNA, 20 bp, Artificial Sequence
  Description of Artificial Sequence: Synthetic oligonucleotide
  Target: LAMA2; (+) strand; PAM type: NNGRRT; PAM sequence: AAGAGT
tttatgtttccatctataag

SEQ ID NO: 25860 - DNA, 20 bp, Artificial Sequence
  Description of Artificial Sequence: Synthetic oligonucleotide
  Target: LAMA2; (+) strand; PAM type: NNGRRT; PAM sequence: TTGAGT
aaagtgctttcaatgtactg

SEQ ID NO: 25861 - DNA, 20 bp, Artificial Sequence
  Description of Artificial Sequence: Synthetic oligonucleotide
  Target: LAMA2; (+) strand; PAM type: NNGRRT; PAM sequence: GTGAAT
tttactctcaatccatatat

SEQ ID NO: 25862 - DNA, 20 bp, Artificial Sequence
  Description of Artificial Sequence: Synthetic oligonucleotide
  Target: LAMA2; (+) strand; PAM type: NNGRRT; PAM sequence: ATGGAT
cattattgaaaaagaagagc

SEQ ID NO: 25863 - DNA, 20 bp, Artificial Sequence
  Description of Artificial Sequence: Synthetic oligonucleotide
  Target: LAMA2; (+) strand; PAM type: NNGRRT; PAM sequence: GAGGAT
gaagagcatggatttaaagc

SEQ ID NO: 25864 - DNA, 20 bp, Artificial Sequence
  Description of Artificial Sequence: Synthetic oligonucleotide
  Target: LAMA2; (+) strand; PAM type: NNGRRT; PAM sequence: AGGGAT
ccttggttaagaaggcaaag

SEQ ID NO: 25865 - DNA, 20 bp, Artificial Sequence
  Description of Artificial Sequence: Synthetic oligonucleotide
  Target: LAMA2; (+) strand; PAM type: NNGRRT; PAM sequence: AAGAGT
taatatgagcagaaattgca

SEQ ID NO: 25866 - DNA, 20 bp, Artificial Sequence
  Description of Artificial Sequence: Synthetic oligonucleotide
  Target: LAMA2; (+) strand; PAM type: NNGRRT; PAM sequence: CAGAAT
cagatttgaaatataggtga

SEQ ID NO: 25867 - DNA, 20 bp, Artificial Sequence
  Description of Artificial Sequence: Synthetic oligonucleotide
  Target: LAMA2; (+) strand; PAM type: NNGRRT; PAM sequence: GAGAGT
gagactataagaaaggaggt

SEQ ID NO: 25868 - DNA, 20 bp, Artificial Sequence
  Description of Artificial Sequence: Synthetic oligonucleotide
  Target: LAMA2; (+) strand; PAM type: NNGRRT; PAM sequence: AAGGGT
cataaaaaatacagagatga

SEQ ID NO: 25869 - DNA, 20 bp, Artificial Sequence
  Description of Artificial Sequence: Synthetic oligonucleotide
  Target: LAMA2; (+) strand; PAM type: NNGRRT; PAM sequence: GGGAGT
aatacagagatgaaagggtg

SEQ ID NO: 25870 - DNA, 20 bp, Artificial Sequence
  Description of Artificial Sequence: Synthetic oligonucleotide
  Target: LAMA2; (+) strand; PAM type: NNGRRT; PAM sequence: TGGGAT
tcattagccgaaattgacaa

SEQ ID NO: 25871 - DNA, 20 bp, Artificial Sequence
  Description of Artificial Sequence: Synthetic oligonucleotide
  Target: LAMA2; (+) strand; PAM type: NNGRRT; PAM sequence: AGGGGT
gccgaaattgacaatgggat

SEQ ID NO: 25872 - DNA, 20 bp, Artificial Sequence
  Description of Artificial Sequence: Synthetic oligonucleotide
  Target: LAMA2; (+) strand; PAM type: NNGRRT; PAM sequence: CAGGGT
gactgtgaacagatttgagg

SEQ ID NO: 25873 - DNA, 20 bp, Artificial Sequence
  Description of Artificial Sequence: Synthetic oligonucleotide
  Target: LAMA2; (+) strand; PAM type: NNGRRT; PAM sequence: AGGAAT
acctgtagtgggaactctat

SEQ ID NO: 25874 - DNA, 20 bp, Artificial Sequence
  Description of Artificial Sequence: Synthetic oligonucleotide
  Target: LAMA2; (+) strand; PAM type: NNGRRT; PAM sequence: TTGAGT
acaaaaaacacacactatgc

SEQ ID NO: 25875 - DNA, 20 bp, Artificial Sequence
  Description of Artificial Sequence: Synthetic oligonucleotide
  Target: LAMA2; (+) strand; PAM type: NNGRRT; PAM sequence: TTGGAT
tggggactggtgggaggtga

SEQ ID NO: 25876 - DNA, 20 bp, Artificial Sequence
  Description of Artificial Sequence: Synthetic oligonucleotide
  Target: LAMA2; (+) strand; PAM type: NNGRRT; PAM sequence: ATGAAT
atcatggggacagatccctc

SEQ ID NO: 25877 - DNA, 20 bp, Artificial Sequence
  Description of Artificial Sequence: Synthetic oligonucleotide
  Target: LAMA2; (+) strand; PAM type: NNGRRT; PAM sequence: GTGAGT
caccatccccttggtgataa

SEQ ID NO: 25878 - DNA, 20 bp, Artificial Sequence
  Description of Artificial Sequence: Synthetic oligonucleotide
  Target: LAMA2; (+) strand; PAM type: NNGRRT; PAM sequence: TGGGAT
tctggttgtttaaaagaaat

SEQ ID NO: 25879 - DNA, 20 bp, Artificial Sequence
  Description of Artificial Sequence: Synthetic oligonucleotide
  Target: LAMA2; (+) strand; PAM type: NNGRRT; PAM sequence: CAGAAT
aagcttcctgaggccctcac

SEQ ID NO: 25880 - DNA, 20 bp, Artificial Sequence
  Description of Artificial Sequence: Synthetic oligonucleotide
  Target: LAMA2; (+) strand; PAM type: NNGRRT; PAM sequence: TAGGAT
tagtgcacatccccccgatg

SEQ ID NO: 25881 - DNA, 20 bp, Artificial Sequence
  Description of Artificial Sequence: Synthetic oligonucleotide
  Target: LAMA2; (+) strand; PAM type: NNGRRT; PAM sequence: ATGAAT
cgatgtaggataaatatggt

SEQ ID NO: 25882 - DNA, 20 bp, Artificial Sequence
  Description of Artificial Sequence: Synthetic oligonucleotide
  Target: LAMA2; (+) strand; PAM type: NNGRRT; PAM sequence: TTGAAT
gataaatatggtatgaatat

SEQ ID NO: 25883 - DNA, 20 bp, Artificial Sequence
  Description of Artificial Sequence: Synthetic oligonucleotide
  Target: LAMA2; (+) strand; PAM type: NNGRRT; PAM sequence: ATGAGT
atgaatatttgaatattttt

SEQ ID NO: 25884 - DNA, 20 bp, Artificial Sequence
  Description of Artificial Sequence: Synthetic oligonucleotide
  Target: LAMA2; (+) strand; PAM type: NNGRRT; PAM sequence: TTGAAT
atgagtaataattaagctta

SEQ ID NO: 25885 - DNA, 20 bp, Artificial Sequence
  Description of Artificial Sequence: Synthetic oligonucleotide
  Target: LAMA2; (+) strand; PAM type: NNGRRT; PAM sequence: ATGAAT
agactatttcaaattgactg

SEQ ID NO: 25886 - DNA, 20 bp, Artificial Sequence
  Description of Artificial Sequence: Synthetic oligonucleotide
  Target: LAMA2; (+) strand; PAM type: NNGRRT; PAM sequence: AAGGAT
gtttgaaaaagaaagacaag

SEQ ID NO: 25887 - DNA, 20 bp, Artificial Sequence
  Description of Artificial Sequence: Synthetic oligonucleotide
  Target: LAMA2; (+) strand; PAM type: NNGRRT; PAM sequence: AAGAAT
aaggataggggaaaatagag

SEQ ID NO: 25888 - DNA, 20 bp, Artificial Sequence
  Description of Artificial Sequence: Synthetic oligonucleotide
  Target: LAMA2; (+) strand; PAM type: NNGRRT; PAM sequence: GAGAAT
gaggagagaagggaaggaag

SEQ ID NO: 25889 - DNA, 20 bp, Artificial Sequence
  Description of Artificial Sequence: Synthetic oligonucleotide
  Target: LAMA2; (+) strand; PAM type: NNGRRT; PAM sequence: AAGGAT
gaatgtttgatgagcttatg

SEQ ID NO: 25890 - DNA, 20 bp, Artificial Sequence
  Description of Artificial Sequence: Synthetic oligonucleotide
  Target: LAMA2; (+) strand; PAM type: NNGRRT; PAM sequence: CTGAGT
tgaaggatgtctctttgcaa

SEQ ID NO: 25891 - DNA, 20 bp, Artificial Sequence
  Description of Artificial Sequence: Synthetic oligonucleotide
  Target: LAMA2; (+) strand; PAM type: NNGRRT; PAM sequence: GTGAAT
atgtctctttgcaactgagt

SEQ ID NO: 25892 - DNA, 20 bp, Artificial Sequence
  Description of Artificial Sequence: Synthetic oligonucleotide
  Target: LAMA2; (+) strand; PAM type: NNGRRT; PAM sequence: TGGGAT
caactgagtgtgaatttaga

SEQ ID NO: 25893 - DNA, 20 bp, Artificial Sequence
  Description of Artificial Sequence: Synthetic oligonucleotide
  Target: LAMA2; (+) strand; PAM type: NNGRRT; PAM sequence: TGGGGT
tacattcagtgatttaaaaa

SEQ ID NO: 25894 - DNA, 20 bp, Artificial Sequence
  Description of Artificial Sequence: Synthetic oligonucleotide
  Target: LAMA2; (+) strand; PAM type: NNGRRT; PAM sequence: TAGAGT
aagtcttttgtaacttattt

SEQ ID NO: 25895 - DNA, 20 bp, Artificial Sequence
  Description of Artificial Sequence: Synthetic oligonucleotide
  Target: LAMA2; (+) strand; PAM type: NNGRRT; PAM sequence: GAGAAT
gaaacttttttgatatactt

SEQ ID NO: 25896 - DNA, 20 bp, Artificial Sequence
  Description of Artificial Sequence: Synthetic oligonucleotide
  Target: LAMA2; (+) strand; PAM type: NNGRRT; PAM sequence: GAGAAT
atatatgtaaatactatgtg

SEQ ID NO: 25897 - DNA, 20 bp, Artificial Sequence
  Description of Artificial Sequence: Synthetic oligonucleotide
  Target: LAMA2; (+) strand; PAM type: NNGRRT; PAM sequence: TCGAGT
agatgcaatggttactgact

SEQ ID NO: 25898 - DNA, 20 bp, Artificial Sequence
  Description of Artificial Sequence: Synthetic oligonucleotide
  Target: LAMA2; (+) strand; PAM type: NNGRRT; PAM sequence: ATGAAT
ttttgaaacagagggcagaa

SEQ ID NO: 25899 - DNA, 20 bp, Artificial Sequence
  Description of Artificial Sequence: Synthetic oligonucleotide
  Target: LAMA2; (+) strand; PAM type: NNGRRT; PAM sequence: GAGAAT
tgtgagcttgttccatactg

SEQ ID NO: 25900 - DNA, 20 bp, Artificial Sequence
  Description of Artificial Sequence: Synthetic oligonucleotide
  Target: LAMA2; (+) strand; PAM type: NNGRRT; PAM sequence: AAGAGT
agaatggggcactcagagaa

SEQ ID NO: 25901 - DNA, 20 bp, Artificial Sequence
  Description of Artificial Sequence: Synthetic oligonucleotide
  Target: LAMA2; (+) strand; PAM type: NNGRRT; PAM sequence: TTGGGT
actgcaggtggggagaagct

SEQ ID NO: 25902 - DNA, 20 bp, Artificial Sequence
  Description of Artificial Sequence: Synthetic oligonucleotide
  Target: LAMA2; (+) strand; PAM type: NNGRRT; PAM sequence: AAGGGT
ggaagatatgttcaaagcag

SEQ ID NO: 25903 - DNA, 20 bp, Artificial Sequence
  Description of Artificial Sequence: Synthetic oligonucleotide
  Target: LAMA2; (+) strand; PAM type: NNGRRT; PAM sequence: GTGAGT
gcactgattgttcaagaaaa

SEQ ID NO: 25904 - DNA, 20 bp, Artificial Sequence
  Description of Artificial Sequence: Synthetic oligonucleotide
  Target: LAMA2; (+) strand; PAM type: NNGRRT; PAM sequence: AAGGGT
agaaaagtgagtagtctgga

SEQ ID NO: 25905 - DNA, 20 bp, Artificial Sequence
  Description of Artificial Sequence: Synthetic oligonucleotide
  Target: LAMA2; (+) strand; PAM type: NNGRRT; PAM sequence: ATGGGT
acaaaacagcagcatggaag

SEQ ID NO: 25906 - DNA, 20 bp, Artificial Sequence
  Description of Artificial Sequence: Synthetic oligonucleotide
  Target: LAMA2; (+) strand; PAM type: NNGRRT; PAM sequence: GTGGGT
tgggtgaggagccaggccac

SEQ ID NO: 25907 - DNA, 20 bp, Artificial Sequence
  Description of Artificial Sequence: Synthetic oligonucleotide
  Target: LAMA2; (+) strand; PAM type: NNGRRT; PAM sequence: TTGAGT
ccaggccacgtgggtagaac

SEQ ID NO: 25908 - DNA, 20 bp, Artificial Sequence
  Description of Artificial Sequence: Synthetic oligonucleotide
  Target: LAMA2; (+) strand; PAM type: NNGRRT; PAM sequence: AAGAGT
gcccacgtcagtgacagata

SEQ ID NO: 25909 - DNA, 20 bp, Artificial Sequence
  Description of Artificial Sequence: Synthetic oligonucleotide
  Target: LAMA2; (+) strand; PAM type: NNGRRT; PAM sequence: GGGAGT
cagataaagagtcaacatct

SEQ ID NO: 25910 - DNA, 20 bp, Artificial Sequence
  Description of Artificial Sequence: Synthetic oligonucleotide
  Target: LAMA2; (+) strand; PAM type: NNGRRT; PAM sequence: GTGGGT
aacatctgggagtagcttag

SEQ ID NO: 25911 - DNA, 20 bp, Artificial Sequence
  Description of Artificial Sequence: Synthetic oligonucleotide
  Target: LAMA2; (+) strand; PAM type: NNGRRT; PAM sequence: CAGGAT
taggtgggttccacatggcc

SEQ ID NO: 25912 - DNA, 20 bp, Artificial Sequence
  Description of Artificial Sequence: Synthetic oligonucleotide
  Target: LAMA2; (+) strand; PAM type: NNGRRT; PAM sequence: GGGAAT
tgttttcttgtctgtaaatt

SEQ ID NO: 25913 - DNA, 20 bp, Artificial Sequence
  Description of Artificial Sequence: Synthetic oligonucleotide
  Target: LAMA2; (+) strand; PAM type: NNGRRT; PAM sequence: GAGGAT
aaggtaataataagtattgt

SEQ ID NO: 25914 - DNA, 20 bp, Artificial Sequence
  Description of Artificial Sequence: Synthetic oligonucleotide
  Target: LAMA2; (+) strand; PAM type: NNGRRT; PAM sequence: CAGAGT
tatacatgtaaggtgcttaa

SEQ ID NO: 25915 - DNA, 20 bp, Artificial Sequence
  Description of Artificial Sequence: Synthetic oligonucleotide
  Target: LAMA2; (+) strand; PAM type: NNGRRT; PAM sequence: CTGAAT
tccctggtaccaaataagca

SEQ ID NO: 25916 - DNA, 20 bp, Artificial Sequence
  Description of Artificial Sequence: Synthetic oligonucleotide
  Target: LAMA2; (+) strand; PAM type: NNGRRT; PAM sequence: TTGGGT
attgaaactttttcacattt

SEQ ID NO: 25917 - DNA, 20 bp, Artificial Sequence
  Description of Artificial Sequence: Synthetic oligonucleotide
  Target: LAMA2; (+) strand; PAM type: NNGRRT; PAM sequence: CAGGAT
ttttcacatttttgggtatc

SEQ ID NO: 25918 - DNA, 20 bp, Artificial Sequence
  Description of Artificial Sequence: Synthetic oligonucleotide
  Target: LAMA2; (+) strand; PAM type: NNGRRT; PAM sequence: AAGGAT
ccaggatagagaaggggagg

SEQ ID NO: 25919 - DNA, 20 bp, Artificial Sequence
  Description of Artificial Sequence: Synthetic oligonucleotide
  Target: LAMA2; (+) strand; PAM type: NNGRRT; PAM sequence: GAGAGT
gatctagtcacataatattt

SEQ ID NO: 25920 - DNA, 20 bp, Artificial Sequence
  Description of Artificial Sequence: Synthetic oligonucleotide
  Target: LAMA2; (+) strand; PAM type: NNGRRT; PAM sequence: ATGAAT
gactttgaaattaggcagat

SEQ ID NO: 25921 - DNA, 20 bp, Artificial Sequence
  Description of Artificial Sequence: Synthetic oligonucleotide
  Target: LAMA2; (+) strand; PAM type: NNGRRT; PAM sequence: AGGGAT
ttttttattattaaaaaaat

SEQ ID NO: 25922 - DNA, 20 bp, Artificial Sequence
  Description of Artificial Sequence: Synthetic oligonucleotide
  Target: LAMA2; (+) strand; PAM type: NNGRRT; PAM sequence: GAGGAT
ttctttgtaagatttttcaa

SEQ ID NO: 25923 - DNA, 20 bp, Artificial Sequence
  Description of Artificial Sequence: Synthetic oligonucleotide
  Target: LAMA2; (+) strand; PAM type: NNGRRT; PAM sequence: AAGGGT
tcatagataaatcctcaatg

SEQ ID NO: 25924 - DNA, 20 bp, Artificial Sequence
  Description of Artificial Sequence: Synthetic oligonucleotide
  Target: LAMA2; (+) strand; PAM type: NNGRRT; PAM sequence: AGGGGT
ttcatttgtaagcataagaa

SEQ ID NO: 25925 - DNA, 20 bp, Artificial Sequence
  Description of Artificial Sequence: Synthetic oligonucleotide
  Target: LAMA2; (+) strand; PAM type: NNGRRT; PAM sequence: TGGAGT
cagtccactgaactgtagct

SEQ ID NO: 25926 - DNA, 20 bp, Artificial Sequence
  Description of Artificial Sequence: Synthetic oligonucleotide
  Target: LAMA2; (+) strand; PAM type: NNGRRT; PAM sequence: CTGAGT
actgaactgtagcttggagt

SEQ ID NO: 25927 - DNA, 20 bp, Artificial Sequence
  Description of Artificial Sequence: Synthetic oligonucleotide
  Target: LAMA2; (+) strand; PAM type: NNGRRT; PAM sequence: GGGAGT
agtaatctatagtgatctga

SEQ ID NO: 25928 - DNA, 20 bp, Artificial Sequence
  Description of Artificial Sequence: Synthetic oligonucleotide
  Target: LAMA2; (+) strand; PAM type: NNGRRT; PAM sequence: TAGAAT
aaactccaagttaatgactg

SEQ ID NO: 25929 - DNA, 20 bp, Artificial Sequence
  Description of Artificial Sequence: Synthetic oligonucleotide
  Target: LAMA2; (+) strand; PAM type: NNGRRT; PAM sequence: GAGGAT
actttgggaggcttgtgcag

SEQ ID NO: 25930 - DNA, 20 bp, Artificial Sequence
  Description of Artificial Sequence: Synthetic oligonucleotide
  Target: LAMA2; (+) strand; PAM type: NNGRRT; PAM sequence: AGGAGT
caggaggatcgcttgaggcc

SEQ ID NO: 25931 - DNA, 20 bp, Artificial Sequence
  Description of Artificial Sequence: Synthetic oligonucleotide
  Target: LAMA2; (+) strand; PAM type: NNGRRT; PAM sequence: GAGAAT
tactcgagaggctgaggtgg

SEQ ID NO: 25932 - DNA, 20 bp, Artificial Sequence
  Description of Artificial Sequence: Synthetic oligonucleotide
  Target: LAMA2; (+) strand; PAM type: NNGRRT; PAM sequence: TTGAGT
ggctgaggtgggagaattgc

SEQ ID NO: 25933 - DNA, 20 bp, Artificial Sequence
  Description of Artificial Sequence: Synthetic oligonucleotide
  Target: LAMA2; (+) strand; PAM type: NNGRRT; PAM sequence: AGGAGT
tgggagaattgcttgagtcc

SEQ ID NO: 25934 - DNA, 20 bp, Artificial Sequence
  Description of Artificial Sequence: Synthetic oligonucleotide
  Target: LAMA2; (+) strand; PAM type: NNGRRT; PAM sequence: CTGAAT
tcaaattcaaacatattttt

SEQ ID NO: 25935 - DNA, 20 bp, Artificial Sequence
  Description of Artificial Sequence: Synthetic oligonucleotide
  Target: LAMA2; (+) strand; PAM type: NNGRRT; PAM sequence: TAGAGT
gaaaaagcaaatatctttcc

SEQ ID NO: 25936 - DNA, 20 bp, Artificial Sequence
  Description of Artificial Sequence: Synthetic oligonucleotide
  Target: LAMA2; (+) strand; PAM type: NNGRRT; PAM sequence: CTGGAT
ggtctagtgcttgtggtaat

SEQ ID NO: 25937 - DNA, 20 bp, Artificial Sequence
  Description of Artificial Sequence: Synthetic oligonucleotide
  Target: LAMA2; (+) strand; PAM type: NNGRRT; PAM sequence: AAGAAT
taatctggatgttagctaac

SEQ ID NO: 25938 - DNA, 20 bp, Artificial Sequence
  Description of Artificial Sequence: Synthetic oligonucleotide
  Target: LAMA2; (+) strand; PAM type: NNGRRT; PAM sequence: AAGAAT
tccatacgttatcaacagca

SEQ ID NO: 25939 - DNA, 20 bp, Artificial Sequence
  Description of Artificial Sequence: Synthetic oligonucleotide
  Target: LAMA2; (+) strand; PAM type: NNGRRT; PAM sequence: AAGGAT
aagatataatttcagccctc

SEQ ID NO: 25940 - DNA, 20 bp, Artificial Sequence
  Description of Artificial Sequence: Synthetic oligonucleotide
  Target: LAMA2; (+) strand; PAM type: NNGRRT; PAM sequence: TTGAAT
atcataacaaataaatgttc

SEQ ID NO: 25941 - DNA, 20 bp, Artificial Sequence
  Description of Artificial Sequence: Synthetic oligonucleotide
  Target: LAMA2; (+) strand; PAM type: NNGRRT; PAM sequence: CTGAGT
ttatattttataatgcagat

SEQ ID NO: 25942 - DNA, 20 bp, Artificial Sequence
  Description of Artificial Sequence: Synthetic oligonucleotide
  Target: LAMA2; (+) strand; PAM type: NNGRRT; PAM sequence: AAGAGT
ttcactttttgtacaagtag

SEQ ID NO: 25943 - DNA, 20 bp, Artificial Sequence
  Description of Artificial Sequence: Synthetic oligonucleotide
  Target: LAMA2; (+) strand; PAM type: NNGRRT; PAM sequence: TTGGAT
tgataatattattaacactg

SEQ ID NO: 25944 - DNA, 20 bp, Artificial Sequence
  Description of Artificial Sequence: Synthetic oligonucleotide
  Target: LAMA2; (+) strand; PAM type: NNGRRT; PAM sequence: TAGAAT
ctagatattttacttattcc

SEQ ID NO: 25945 - DNA, 20 bp, Artificial Sequence
  Description of Artificial Sequence: Synthetic oligonucleotide
  Target: LAMA2; (+) strand; PAM type: NNGRRT; PAM sequence: TAGAAT
tacttattcctagaatttta

SEQ ID NO: 25946 - DNA, 20 bp, Artificial Sequence
  Description of Artificial Sequence: Synthetic oligonucleotide
  Target: LAMA2; (+) strand; PAM type: NNGRRT; PAM sequence: TAGGGT
tttgttgtctttattttcac

SEQ ID NO: 25947 - DNA, 20 bp, Artificial Sequence
  Description of Artificial Sequence: Synthetic oligonucleotide
  Target: LAMA2; (+) strand; PAM type: NNGRRT; PAM sequence: ATGGGT
ttaatctctgttggccttgc

SEQ ID NO: 25948 - DNA, 20 bp, Artificial Sequence
  Description of Artificial Sequence: Synthetic oligonucleotide
  Target: LAMA2; (+) strand; PAM type: NNGRRT; PAM sequence: TGGAAT
catagctagcaaatgacaac

SEQ ID NO: 25949 - DNA, 20 bp, Artificial Sequence
  Description of Artificial Sequence: Synthetic oligonucleotide
  Target: LAMA2; (+) strand; PAM type: NNGRRT; PAM sequence: CCGAGT
aattgaagtccatgcttctt

SEQ ID NO: 25950 - DNA, 20 bp, Artificial Sequence
  Description of Artificial Sequence: Synthetic oligonucleotide
  Target: LAMA2; (+) strand; PAM type: NNGRRT; PAM sequence: TTGAGT
agtgatcactgtccctctaa

SEQ ID NO: 25951 - DNA, 20 bp, Artificial Sequence
  Description of Artificial Sequence: Synthetic oligonucleotide
  Target: LAMA2; (+) strand; PAM type: NNGRRT; PAM sequence: CTGGAT
cctttactatgtaatgtctc

SEQ ID NO: 25952 - DNA, 20 bp, Artificial Sequence
  Description of Artificial Sequence: Synthetic oligonucleotide
  Target: LAMA2; (+) strand; PAM type: NNGRRT; PAM sequence: GTGAAT
gtgtgtgtgtgtgtgtgtgt

SEQ ID NO: 25953 - DNA, 20 bp, Artificial Sequence
  Description of Artificial Sequence: Synthetic oligonucleotide
  Target: LAMA2; (+) strand; PAM type: NNGRRT; PAM sequence: AAGAAT
gaggcaaagagaagagaaaa

SEQ ID NO: 25954 - DNA, 20 bp, Artificial Sequence
  Description of Artificial Sequence: Synthetic oligonucleotide
  Target: LAMA2; (+) strand; PAM type: NNGRRT; PAM sequence: TAGAGT
ttttatgtatactttactga

SEQ ID NO: 25955 - DNA, 20 bp, Artificial Sequence
  Description of Artificial Sequence: Synthetic oligonucleotide
  Target: LAMA2; (+) strand; PAM type: NNGRRT; PAM sequence: TTGAGT
ctgatagagtcctttaaatg

SEQ ID NO: 25956 - DNA, 20 bp, Artificial Sequence
  Description of Artificial Sequence: Synthetic oligonucleotide
  Target: LAMA2; (+) strand; PAM type: NNGRRT; PAM sequence: AGGGAT
tcttaatcttcaaaaagttt

SEQ ID NO: 25957 - DNA, 20 bp, Artificial Sequence
  Description of Artificial Sequence: Synthetic oligonucleotide
  Target: LAMA2; (+) strand; PAM type: NNGRRT; PAM sequence: TTGAGT
aagattgtttgaaagtagac

SEQ ID NO: 25958 - DNA, 20 bp, Artificial Sequence
  Description of Artificial Sequence: Synthetic oligonucleotide
  Target: LAMA2; (+) strand; PAM type: NNGRRT; PAM sequence: GTGGAT
gaaacttgtctcttcgacca

SEQ ID NO: 25959 - DNA, 20 bp, Artificial Sequence
  Description of Artificial Sequence: Synthetic oligonucleotide
  Target: LAMA2; (+) strand; PAM type: NNGRRT; PAM sequence: ATGAAT
ccattaaataaagtgaaggt

SEQ ID NO: 25960 - DNA, 20 bp, Artificial Sequence
  Description of Artificial Sequence: Synthetic oligonucleotide
  Target: LAMA2; (+) strand; PAM type: NNGRRT; PAM sequence: TAGAAT
gaaggtatgaatatttaaat

SEQ ID NO: 25961 - DNA, 20 bp, Artificial Sequence
  Description of Artificial Sequence: Synthetic oligonucleotide
  Target: LAMA2; (+) strand; PAM type: NNGRRT; PAM sequence: GTGGGT
aacatggcagttgtttttat

SEQ ID NO: 25962 - DNA, 20 bp, Artificial Sequence
  Description of Artificial Sequence: Synthetic oligonucleotide
  Target: LAMA2; (+) strand; PAM type: NNGRRT; PAM sequence: TGGGAT
ctctgtgctgacctgtcata

SEQ ID NO: 25963 - DNA, 20 bp, Artificial Sequence
  Description of Artificial Sequence: Synthetic oligonucleotide
  Target: LAMA2; (+) strand; PAM type: NNGRRT; PAM sequence: TTGGGT
gtaagccagatataatacat

SEQ ID NO: 25964 - DNA, 20 bp, Artificial Sequence
  Description of Artificial Sequence: Synthetic oligonucleotide
  Target: LAMA2; (+) strand; PAM type: NNGRRT; PAM sequence: GGGGAT
aaaactacaaaatcatagag

SEQ ID NO: 25965 - DNA, 20 bp, Artificial Sequence
  Description of Artificial Sequence: Synthetic oligonucleotide
  Target: LAMA2; (+) strand; PAM type: NNGRRT; PAM sequence: AAGAAT
tttctttggtatgtcagaag

SEQ ID NO: 25966 - DNA, 20 bp, Artificial Sequence
  Description of Artificial Sequence: Synthetic oligonucleotide
  Target: LAMA2; (+) strand; PAM type: NNGRRT; PAM sequence: AAGAAT
tgagcaaaaaaaaaaataat

SEQ ID NO: 25967 - DNA, 20 bp, Artificial Sequence
  Description of Artificial Sequence: Synthetic oligonucleotide
  Target: LAMA2; (+) strand; PAM type: NNGRRT; PAM sequence: AGGGAT
tatttttaatataagatctg

SEQ ID NO: 25968 - DNA, 20 bp, Artificial Sequence
  Description of Artificial Sequence: Synthetic oligonucleotide
  Target: LAMA2; (+) strand; PAM type: NNGRRT; PAM sequence: GTGGAT
taatcaaagcaaaggcttat

SEQ ID NO: 25969 - DNA, 20 bp, Artificial Sequence
  Description of Artificial Sequence: Synthetic oligonucleotide
  Target: LAMA2; (+) strand; PAM type: NNGRRT; PAM sequence: CTGAAT
acacatgattcattaatttt

SEQ ID NO: 25970 - DNA, 20 bp, Artificial Sequence
  Description of Artificial Sequence: Synthetic oligonucleotide
  Target: LAMA2; (+) strand; PAM type: NNGRRT; PAM sequence: AGGAAT
tttactggggccacacagct

SEQ ID NO: 25971 - DNA, 20 bp, Artificial Sequence
  Description of Artificial Sequence: Synthetic oligonucleotide
  Target: LAMA2; (+) strand; PAM type: NNGRRT; PAM sequence: CAGGAT
cagctaggaattggcagaac

SEQ ID NO: 25972 - DNA, 20 bp, Artificial Sequence
  Description of Artificial Sequence: Synthetic oligonucleotide
  Target: LAMA2; (+) strand; PAM type: NNGRRT; PAM sequence: ATGAAT
agcctacatggccattggaa

SEQ ID NO: 25973 - DNA, 20 bp, Artificial Sequence
  Description of Artificial Sequence: Synthetic oligonucleotide
  Target: LAMA2; (+) strand; PAM type: NNGRRT; PAM sequence: GAGAAT
atgtaaaagaactcaaaact

SEQ ID NO: 25974 - DNA, 20 bp, Artificial Sequence
  Description of Artificial Sequence: Synthetic oligonucleotide
  Target: LAMA2; (+) strand; PAM type: NNGRRT; PAM sequence: TAGAAT
actgagaatatttttaaaaa

SEQ ID NO: 25975 - DNA, 20 bp, Artificial Sequence
  Description of Artificial Sequence: Synthetic oligonucleotide
  Target: LAMA2; (+) strand; PAM type: NNGRRT; PAM sequence: AAGAGT
catagaaaaaaatcacattt

SEQ ID NO: 25976 - DNA, 20 bp, Artificial Sequence
  Description of Artificial Sequence: Synthetic oligonucleotide
  Target: LAMA2; (+) strand; PAM type: NNGRRT; PAM sequence: TTGGAT
accattgcagttatgggcgt

SEQ ID NO: 25977 - DNA, 20 bp, Artificial Sequence
  Description of Artificial Sequence: Synthetic oligonucleotide
  Target: LAMA2; (+) strand; PAM type: NNGRRT; PAM sequence: TTGGGT
tatgggcgtttggatacagt

SEQ ID NO: 25978 - DNA, 20 bp, Artificial Sequence
  Description of Artificial Sequence: Synthetic oligonucleotide
  Target: LAMA2; (+) strand; PAM type: NNGRRT; PAM sequence: TGGGGT
tgatagctacacattaaaga

SEQ ID NO: 25979 - DNA, 20 bp, Artificial Sequence
  Description of Artificial Sequence: Synthetic oligonucleotide
  Target: LAMA2; (+) strand; PAM type: NNGRRT; PAM sequence: TAGGGT
cattaaagatggggtgtagg

SEQ ID NO: 25980 - DNA, 20 bp, Artificial Sequence
  Description of Artificial Sequence: Synthetic oligonucleotide
  Target: LAMA2; (+) strand; PAM type: NNGRRT; PAM sequence: ATGAAT
aagacagctgatcaaaacac

SEQ ID NO: 25981 - DNA, 20 bp, Artificial Sequence
  Description of Artificial Sequence: Synthetic oligonucleotide
  Target: LAMA2; (+) strand; PAM type: NNGRRT; PAM sequence: CAGGAT
ccatgtggtatatggagcca

SEQ ID NO: 25982 - DNA, 20 bp, Artificial Sequence
  Description of Artificial Sequence: Synthetic oligonucleotide
  Target: LAMA2; (+) strand; PAM type: NNGRRT; PAM sequence: TAGAAT
aaaggaagcatatgatactg

SEQ ID NO: 25983 - DNA, 20 bp, Artificial Sequence
  Description of Artificial Sequence: Synthetic oligonucleotide
  Target: LAMA2; (+) strand; PAM type: NNGRRT; PAM sequence: TGGGGT
ggaactatgccaccagaccc

SEQ ID NO: 25984 - DNA, 20 bp, Artificial Sequence
  Description of Artificial Sequence: Synthetic oligonucleotide
  Target: LAMA2; (+) strand; PAM type: NNGRRT; PAM sequence: GGGAAT
tttattcttctctgccttta

SEQ ID NO: 25985 - DNA, 20 bp, Artificial Sequence
  Description of Artificial Sequence: Synthetic oligonucleotide
  Target: LAMA2; (+) strand; PAM type: NNGRRT; PAM sequence: ATGAAT
gtaaatttttgatacttatt

SEQ ID NO: 25986 - DNA, 20 bp, Artificial Sequence
  Description of Artificial Sequence: Synthetic oligonucleotide
  Target: LAMA2; (+) strand; PAM type: NNGRRT; PAM sequence: AAGAGT
ttgatacttattatgaatcc

SEQ ID NO: 25987 - DNA, 20 bp, Artificial Sequence
  Description of Artificial Sequence: Synthetic oligonucleotide
  Target: LAMA2; (+) strand; PAM type: NNGRRT; PAM sequence: CTGGAT
agtggaggtgaaacatagca

SEQ ID NO: 25988 - DNA, 20 bp, Artificial Sequence
  Description of Artificial Sequence: Synthetic oligonucleotide
  Target: LAMA2; (+) strand; PAM type: NNGRRT; PAM sequence: TAGAAT
agttacatgatatgacagca

SEQ ID NO: 25989 - DNA, 20 bp, Artificial Sequence
  Description of Artificial Sequence: Synthetic oligonucleotide
  Target: LAMA2; (+) strand; PAM type: NNGRRT; PAM sequence: TCGAAT
tttttaaaggaacaccaaaa

SEQ ID NO: 25990 - DNA, 20 bp, Artificial Sequence
  Description of Artificial Sequence: Synthetic oligonucleotide
  Target: LAMA2; (+) strand; PAM type: NNGRRT; PAM sequence: ATGGAT
caaaatcgaatgatggtatg

SEQ ID NO: 25991 - DNA, 20 bp, Artificial Sequence
  Description of Artificial Sequence: Synthetic oligonucleotide
  Target: LAMA2; (+) strand; PAM type: NNGRRT; PAM sequence: TGGAGT
tatgtgtgactgagcttgtg

SEQ ID NO: 25992 - DNA, 20 bp, Artificial Sequence
  Description of Artificial Sequence: Synthetic oligonucleotide
  Target: LAMA2; (+) strand; PAM type: NNGRRT; PAM sequence: TTGGGT
ggttatactctcattctgtt

SEQ ID NO: 25993 - DNA, 20 bp, Artificial Sequence
  Description of Artificial Sequence: Synthetic oligonucleotide
  Target: LAMA2; (+) strand; PAM type: NNGRRT; PAM sequence: AAGAAT
tctgtcaatattatcaaatt

SEQ ID NO: 25994 - DNA, 20 bp, Artificial Sequence
  Description of Artificial Sequence: Synthetic oligonucleotide
  Target: LAMA2; (+) strand; PAM type: NNGRRT; PAM sequence: TTGAGT
ccaaaaattcttttaaatta

SEQ ID NO: 25995 - DNA, 20 bp, Artificial Sequence
  Description of Artificial Sequence: Synthetic oligonucleotide
  Target: LAMA2; (+) strand; PAM type: NNGRRT; PAM sequence: ATGAGT
taaattattgagtgtttatt

SEQ ID NO: 25996 - DNA, 20 bp, Artificial Sequence
  Description of Artificial Sequence: Synthetic oligonucleotide
  Target: LAMA2; (+) strand; PAM type: NNGRRT; PAM sequence: GTGAAT
atttttattttgtagtctgt

SEQ ID NO: 25997 - DNA, 20 bp, Artificial Sequence
  Description of Artificial Sequence: Synthetic oligonucleotide
  Target: LAMA2; (+) strand; PAM type: NNGRRT; PAM sequence: AGGGAT
tatacctaccatagactgta

SEQ ID NO: 25998 - DNA, 20 bp, Artificial Sequence
  Description of Artificial Sequence: Synthetic oligonucleotide
  Target: LAMA2; (+) strand; PAM type: NNGRRT; PAM sequence: TCGAGT
atagactgtaagggattatt

SEQ ID NO: 25999 - DNA, 20 bp, Artificial Sequence
  Description of Artificial Sequence: Synthetic oligonucleotide
  Target: LAMA2; (+) strand; PAM type: NNGRRT; PAM sequence: TGGGGT
gattatttcgagtagtcagt

SEQ ID NO: 26000 - DNA, 20 bp, Artificial Sequence
  Description of Artificial Sequence: Synthetic oligonucleotide
  Target: LAMA2; (+) strand; PAM type: NNGRRT; PAM sequence: AGGAGT
gtgcttattacagatatgtg

SEQ ID NO: 26001 - DNA, 20 bp, Artificial Sequence
  Description of Artificial Sequence: Synthetic oligonucleotide
  Target: LAMA2; (+) strand; PAM type: NNGRRT; PAM sequence: TAGAAT
gggaaggggagaaacagatg

SEQ ID NO: 26002 - DNA, 20 bp, Artificial Sequence
  Description of Artificial Sequence: Synthetic oligonucleotide
  Target: LAMA2; (+) strand; PAM type: NNGRRT; PAM sequence: CTGGAT
cttgttggctgtctccgtgg

SEQ ID NO: 26003 - DNA, 20 bp, Artificial Sequence
  Description of Artificial Sequence: Synthetic oligonucleotide
  Target: LAMA2; (+) strand; PAM type: NNGRRT; PAM sequence: ATGAGT
ttggctgtctccgtggctgg

SEQ ID NO: 26004 - DNA, 20 bp, Artificial Sequence
  Description of Artificial Sequence: Synthetic oligonucleotide
  Target: LAMA2; (+) strand; PAM type: NNGRRT; PAM sequence: TGGAGT
atcatcctttaagtatagtt

SEQ ID NO: 26005 - DNA, 20 bp, Artificial Sequence
  Description of Artificial Sequence: Synthetic oligonucleotide
  Target: LAMA2; (+) strand; PAM type: NNGRRT; PAM sequence: TAGAGT
ttttttttgcctattgtatt

SEQ ID NO: 26006 - DNA, 20 bp, Artificial Sequence
  Description of Artificial Sequence: Synthetic oligonucleotide
  Target: LAMA2; (+) strand; PAM type: NNGRRT; PAM sequence: ATGAAT
tatttagagtttttcctgaa

SEQ ID NO: 26007 - DNA, 20 bp, Artificial Sequence
  Description of Artificial Sequence: Synthetic oligonucleotide
  Target: LAMA2; (+) strand; PAM type: NNGRRT; PAM sequence: AAGAGT
ctatgtatttgactatcaag

SEQ ID NO: 26008 - DNA, 20 bp, Artificial Sequence
  Description of Artificial Sequence: Synthetic oligonucleotide
  Target: LAMA2; (+) strand; PAM type: NNGRRT; PAM sequence: GGGAAT
aaatcctattagcccataca

SEQ ID NO: 26009 - DNA, 20 bp, Artificial Sequence
  Description of Artificial Sequence: Synthetic oligonucleotide
  Target: LAMA2; (+) strand; PAM type: NNGRRT; PAM sequence: ATGAAT
aagcagaaataagtaatcta

SEQ ID NO: 26010 - DNA, 20 bp, Artificial Sequence
  Description of Artificial Sequence: Synthetic oligonucleotide
  Target: LAMA2; (+) strand; PAM type: NNGRRT; PAM sequence: ATGAAT
cttaatcattacaattattt

SEQ ID NO: 26011 - DNA, 20 bp, Artificial Sequence
  Description of Artificial Sequence: Synthetic oligonucleotide
  Target: LAMA2; (+) strand; PAM type: NNGRRT; PAM sequence: CTGGGT
taaaataatctaacaggctc

SEQ ID NO: 26012 - DNA, 20 bp, Artificial Sequence
  Description of Artificial Sequence: Synthetic oligonucleotide
  Target: LAMA2; (+) strand; PAM type: NNGRRT; PAM sequence: ATGAAT
ataatgtgtgatttgtgatc

SEQ ID NO: 26013 - DNA, 20 bp, Artificial Sequence
  Description of Artificial Sequence: Synthetic oligonucleotide
  Target: LAMA2; (+) strand; PAM type: NNGRRT; PAM sequence: CTGAAT
ggagattaaatatattttca

SEQ ID NO: 26014 - DNA, 20 bp, Artificial Sequence
  Description of Artificial Sequence: Synthetic oligonucleotide
  Target: LAMA2; (+) strand; PAM type: NNGRRT; PAM sequence: AAGAGT
tatctaagtaatacctttcg

SEQ ID NO: 26015 - DNA, 20 bp, Artificial Sequence
  Description of Artificial Sequence: Synthetic oligonucleotide
  Target: LAMA2; (+) strand; PAM type: NNGRRT; PAM sequence: CCGGAT
gtttcttctagcatttaccc

SEQ ID NO: 26016 - DNA, 20 bp, Artificial Sequence
  Description of Artificial Sequence: Synthetic oligonucleotide
  Target: LAMA2; (+) strand; PAM type: NNGRRT; PAM sequence: CAGAAT
ttttaaactacactttctga

SEQ ID NO: 26017 - DNA, 20 bp, Artificial Sequence
  Description of Artificial Sequence: Synthetic oligonucleotide
  Target: LAMA2; (+) strand; PAM type: NNGRRT; PAM sequence: AAGAGT
atttttgtagcttccttaga

SEQ ID NO: 26018 - DNA, 20 bp, Artificial Sequence
  Description of Artificial Sequence: Synthetic oligonucleotide
  Target: LAMA2; (+) strand; PAM type: NNGRRT; PAM sequence: TAGAAT
ttttagatatcagctggctc

SEQ ID NO: 26019 - DNA, 20 bp, Artificial Sequence
  Description of Artificial Sequence: Synthetic oligonucleotide
  Target: LAMA2; (+) strand; PAM type: NNGRRT; PAM sequence: CAGAAT
aggtagaaagcatctcttct

SEQ ID NO: 26020 - DNA, 20 bp, Artificial Sequence
  Description of Artificial Sequence: Synthetic oligonucleotide
  Target: LAMA2; (+) strand; PAM type: NNGRRT; PAM sequence: CAGGGT
tcaccttactctatgaaccc

SEQ ID NO: 26021 - DNA, 20 bp, Artificial Sequence
  Description of Artificial Sequence: Synthetic oligonucleotide
  Target: LAMA2; (+) strand; PAM type: NNGRRT; PAM sequence: TGGAAT
gcactggctggtcttctatc

SEQ ID NO: 26022 - DNA, 20 bp, Artificial Sequence
  Description of Artificial Sequence: Synthetic oligonucleotide
  Target: LAMA2; (+) strand; PAM type: NNGRRT; PAM sequence: AAGAGT
gatttttcacattgaagttg

SEQ ID NO: 26023 - DNA, 20 bp, Artificial Sequence
  Description of Artificial Sequence: Synthetic oligonucleotide
  Target: LAMA2; (+) strand; PAM type: NNGRRT; PAM sequence: TAGGAT
tttttgcctctgtaaacttt

SEQ ID NO: 26024 - DNA, 20 bp, Artificial Sequence
  Description of Artificial Sequence: Synthetic oligonucleotide
  Target: LAMA2; (+) strand; PAM type: NNGRRT; PAM sequence: ATGAAT
atcacaatatgacctgtgct

SEQ ID NO: 26025 - DNA, 20 bp, Artificial Sequence
  Description of Artificial Sequence: Synthetic oligonucleotide
  Target: LAMA2; (+) strand; PAM type: NNGRRT; PAM sequence: AAGGAT
gaaattcatacacctaactt

SEQ ID NO: 26026 - DNA, 20 bp, Artificial Sequence
  Description of Artificial Sequence: Synthetic oligonucleotide
  Target: LAMA2; (+) strand; PAM type: NNGRRT; PAM sequence: TTGAAT
gaactcttctttgttagata

SEQ ID NO: 26027 - DNA, 20 bp, Artificial Sequence
  Description of Artificial Sequence: Synthetic oligonucleotide
  Target: LAMA2; (+) strand; PAM type: NNGRRT; PAM sequence: ATGGAT
tttgttagatattgaatttc

SEQ ID NO: 26028 - DNA, 20 bp, Artificial Sequence
  Description of Artificial Sequence: Synthetic oligonucleotide
  Target: LAMA2; (+) strand; PAM type: NNGRRT; PAM sequence: TGGAGT
ctcgctcttgtcccccaggc

SEQ ID NO: 26029 - DNA, 20 bp, Artificial Sequence
  Description of Artificial Sequence: Synthetic oligonucleotide
  Target: LAMA2; (+) strand; PAM type: NNGRRT; PAM sequence: ATGAGT
ccccgcccccgccgaccccc

SEQ ID NO: 26030 - DNA, 20 bp, Artificial Sequence
  Description of Artificial Sequence: Synthetic oligonucleotide
  Target: LAMA2; (+) strand; PAM type: NNGRRT; PAM sequence: TGGGAT
cgccgacccccatgagtagc

SEQ ID NO: 26031 - DNA, 20 bp, Artificial Sequence
  Description of Artificial Sequence: Synthetic oligonucleotide
  Target: LAMA2; (+) strand; PAM type: NNGRRT; PAM sequence: TGGGGT
ttttgtatttttagtagaga

SEQ ID NO: 26032 - DNA, 20 bp, Artificial Sequence
  Description of Artificial Sequence: Synthetic oligonucleotide
  Target: LAMA2; (+) strand; PAM type: NNGRRT; PAM sequence: TCGGGT
ctggtctggaacgcctgacc

SEQ ID NO: 26033 - DNA, 20 bp, Artificial Sequence
  Description of Artificial Sequence: Synthetic oligonucleotide
  Target: LAMA2; (+) strand; PAM type: NNGRRT; PAM sequence: TGGGAT
gcctggtcctcccaaagtgc

SEQ ID NO: 26034 - DNA, 20 bp, Artificial Sequence
  Description of Artificial Sequence: Synthetic oligonucleotide
  Target: LAMA2; (+) strand; PAM type: NNGRRT; PAM sequence: TTGAGT
tttaataattcttttgtgct

SEQ ID NO: 26035 - DNA, 20 bp, Artificial Sequence
  Description of Artificial Sequence: Synthetic oligonucleotide
  Target: LAMA2; (+) strand; PAM type: NNGRRT; PAM sequence: GAGAAT
atatgttttgctagttctcc

SEQ ID NO: 26036 - DNA, 20 bp, Artificial Sequence
  Description of Artificial Sequence: Synthetic oligonucleotide
  Target: LAMA2; (+) strand; PAM type: NNGRRT; PAM sequence: CGGAGT
gctagcatttttgttgagaa

SEQ ID NO: 26037 - DNA, 20 bp, Artificial Sequence
  Description of Artificial Sequence: Synthetic oligonucleotide
  Target: LAMA2; (+) strand; PAM type: NNGRRT; PAM sequence: AAGGAT
ttgagaacggagtatgagct

SEQ ID NO: 26038 - DNA, 20 bp, Artificial Sequence
  Description of Artificial Sequence: Synthetic oligonucleotide
  Target: LAMA2; (+) strand; PAM type: NNGRRT; PAM sequence: GAGAAT
acggagtatgagctaaggat

SEQ ID NO: 26039 - DNA, 20 bp, Artificial Sequence
  Description of Artificial Sequence: Synthetic oligonucleotide
  Target: LAMA2; (+) strand; PAM type: NNGRRT; PAM sequence: ATGAAT
ttcactttttcatttttagt

SEQ ID NO: 26040 - DNA, 20 bp, Artificial Sequence
  Description of Artificial Sequence: Synthetic oligonucleotide
  Target: LAMA2; (+) strand; PAM type: NNGRRT; PAM sequence: GAGAAT
tttcttattaaatttcccta

SEQ ID NO: 26041 - DNA, 20 bp, Artificial Sequence
  Description of Artificial Sequence: Synthetic oligonucleotide
  Target: LAMA2; (+) strand; PAM type: NNGRRT; PAM sequence: TAGGGT
atttccctagagaattgtat

SEQ ID NO: 26042 - DNA, 20 bp, Artificial Sequence
  Description of Artificial Sequence: Synthetic oligonucleotide
  Target: LAMA2; (+) strand; PAM type: NNGRRT; PAM sequence: GGGAGT
tatatatatgtatatatcat

SEQ ID NO: 26043 - DNA, 20 bp, Artificial Sequence
  Description of Artificial Sequence: Synthetic oligonucleotide
  Target: LAMA2; (+) strand; PAM type: NNGRRT; PAM sequence: CTGGGT
gaggagcaaggagagccagt

SEQ ID NO: 26044 - DNA, 20 bp, Artificial Sequence
  Description of Artificial Sequence: Synthetic oligonucleotide
  Target: LAMA2; (+) strand; PAM type: NNGRRT; PAM sequence: TGGAGT
ggtcccaaaactgaagaact

SEQ ID NO: 26045 - DNA, 20 bp, Artificial Sequence
  Description of Artificial Sequence: Synthetic oligonucleotide
  Target: LAMA2; (+) strand; PAM type: NNGRRT; PAM sequence: AAGGGT
tagattgtgcccaccagatt

SEQ ID NO: 26046 - DNA, 20 bp, Artificial Sequence
  Description of Artificial Sequence: Synthetic oligonucleotide
  Target: LAMA2; (+) strand; PAM type: NNGRRT; PAM sequence: GTGGGT
ttgtgcccaccagattaagg

SEQ ID NO: 26047 - DNA, 20 bp, Artificial Sequence
  Description of Artificial Sequence: Synthetic oligonucleotide
  Target: LAMA2; (+) strand; PAM type: NNGRRT; PAM sequence: AAGAAT
acacttgtattaaccatcac

SEQ ID NO: 26048 - DNA, 20 bp, Artificial Sequence
  Description of Artificial Sequence: Synthetic oligonucleotide
  Target: LAMA2; (+) strand; PAM type: NNGRRT; PAM sequence: TGGGAT
gtctcttgccaggtcagcaa

SEQ ID NO: 26049 - DNA, 20 bp, Artificial Sequence
  Description of Artificial Sequence: Synthetic oligonucleotide
  Target: LAMA2; (+) strand; PAM type: NNGRRT; PAM sequence: TAGGGT
tgggatagtaacgaggttta

SEQ ID NO: 26050 - DNA, 20 bp, Artificial Sequence
  Description of Artificial Sequence: Synthetic oligonucleotide
  Target: LAMA2; (+) strand; PAM type: NNGRRT; PAM sequence: GGGGAT
gaggtttatagggttggcag

SEQ ID NO: 26051 - DNA, 20 bp, Artificial Sequence
  Description of Artificial Sequence: Synthetic oligonucleotide
  Target: LAMA2; (+) strand; PAM type: NNGRRT; PAM sequence: CTGGAT
tatagggttggcagggggat

SEQ ID NO: 26052 - DNA, 20 bp, Artificial Sequence
  Description of Artificial Sequence: Synthetic oligonucleotide
  Target: LAMA2; (+) strand; PAM type: NNGRRT; PAM sequence: GGGGAT
taaaatttcagagacattct

SEQ ID NO: 26053 - DNA, 20 bp, Artificial Sequence
  Description of Artificial Sequence: Synthetic oligonucleotide
  Target: LAMA2; (+) strand; PAM type: NNGRRT; PAM sequence: CTGAGT
gtttaaccaaagtcctaggc

SEQ ID NO: 26054 - DNA, 20 bp, Artificial Sequence
  Description of Artificial Sequence: Synthetic oligonucleotide
  Target: LAMA2; (+) strand; PAM type: NNGRRT; PAM sequence: CAGAAT
atttcaatgtgaagaacaaa

SEQ ID NO: 26055 - DNA, 20 bp, Artificial Sequence
  Description of Artificial Sequence: Synthetic oligonucleotide
  Target: LAMA2; (+) strand; PAM type: NNGRRT; PAM sequence: GAGGGT
ttttgtgtgtctcacgttta

SEQ ID NO: 26056 - DNA, 20 bp, Artificial Sequence
  Description of Artificial Sequence: Synthetic oligonucleotide
  Target: LAMA2; (+) strand; PAM type: NNGRRT; PAM sequence: GAGGAT
aactgcatgactattgtgag

SEQ ID NO: 26057 - DNA, 20 bp, Artificial Sequence
  Description of Artificial Sequence: Synthetic oligonucleotide
  Target: LAMA2; (+) strand; PAM type: NNGRRT; PAM sequence: ATGAGT
ctattgtgaggaggatactt

SEQ ID NO: 26058 - DNA, 20 bp, Artificial Sequence
  Description of Artificial Sequence: Synthetic oligonucleotide
  Target: LAMA2; (+) strand; PAM type: NNGRRT; PAM sequence: CAGAGT
aaaatacagtataatacatt

SEQ ID NO: 26059 - DNA, 20 bp, Artificial Sequence
  Description of Artificial Sequence: Synthetic oligonucleotide
  Target: LAMA2; (+) strand; PAM type: NNGRRT; PAM sequence: CTGGGT
catccatatgatgtggacct

SEQ ID NO: 26060 - DNA, 20 bp, Artificial Sequence
  Description of Artificial Sequence: Synthetic oligonucleotide
  Target: LAMA2; (+) strand; PAM type: NNGRRT; PAM sequence: TAGAAT
tctttagctaaagacagagg

SEQ ID NO: 26061 - DNA, 20 bp, Artificial Sequence
  Description of Artificial Sequence: Synthetic oligonucleotide
  Target: LAMA2; (+) strand; PAM type: NNGRRT; PAM sequence: CAGAAT
tatttctcttcatttgaaaa

SEQ ID NO: 26062 - DNA, 20 bp, Artificial Sequence
  Description of Artificial Sequence: Synthetic oligonucleotide
  Target: LAMA2; (+) strand; PAM type: NNGRRT; PAM sequence: CTGAAT
atatactcacatttctcctt

SEQ ID NO: 26063 - DNA, 20 bp, Artificial Sequence
  Description of Artificial Sequence: Synthetic oligonucleotide
  Target: LAMA2; (+) strand; PAM type: NNGRRT; PAM sequence: AAGAAT
agacatgattatattgggag

SEQ ID NO: 26064 - DNA, 20 bp, Artificial Sequence
  Description of Artificial Sequence: Synthetic oligonucleotide
  Target: LAMA2; (+) strand; PAM type: NNGRRT; PAM sequence: TGGGGT
aaaatgtatgtagaaaatgc

SEQ ID NO: 26065 - DNA, 20 bp, Artificial Sequence
  Description of Artificial Sequence: Synthetic oligonucleotide
  Target: LAMA2; (+) strand; PAM type: NNGRRT; PAM sequence: CTGAGT
cctaaattatgtgaaattca

SEQ ID NO: 26066 - DNA, 20 bp, Artificial Sequence
  Description of Artificial Sequence: Synthetic oligonucleotide
  Target: LAMA2; (+) strand; PAM type: NNGRRT; PAM sequence: CAGAGT
aattcactgagtattttcca

SEQ ID NO: 26067 - DNA, 20 bp, Artificial Sequence
  Description of Artificial Sequence: Synthetic oligonucleotide
  Target: LAMA2; (+) strand; PAM type: NNGRRT; PAM sequence: AAGAGT
tcaaaatgttacatcaaagg

SEQ ID NO: 26068 - DNA, 20 bp, Artificial Sequence
  Description of Artificial Sequence: Synthetic oligonucleotide
  Target: LAMA2; (+) strand; PAM type: NNGRRT; PAM sequence: CTGGGT
aacattcattgaaatgctat

SEQ ID NO: 26069 - DNA, 20 bp, Artificial Sequence
  Description of Artificial Sequence: Synthetic oligonucleotide
  Target: LAMA2; (+) strand; PAM type: NNGRRT; PAM sequence: CTGAAT
agcactgagaaattaatcat

SEQ ID NO: 26070 - DNA, 20 bp, Artificial Sequence
  Description of Artificial Sequence: Synthetic oligonucleotide
  Target: LAMA2; (+) strand; PAM type: NNGRRT; PAM sequence: AAGAAT
agtctaaattatagtacatg

SEQ ID NO: 26071 - DNA, 20 bp, Artificial Sequence
  Description of Artificial Sequence: Synthetic oligonucleotide
  Target: LAMA2; (+) strand; PAM type: NNGRRT; PAM sequence: TTGAAT
tgtgttttctcttttgatct

SEQ ID NO: 26072 - DNA, 20 bp, Artificial Sequence
  Description of Artificial Sequence: Synthetic oligonucleotide
  Target: LAMA2; (+) strand; PAM type: NNGRRT; PAM sequence: TGGAGT
aaagagaaatcattaaagcc

SEQ ID NO: 26073 - DNA, 20 bp, Artificial Sequence
  Description of Artificial Sequence: Synthetic oligonucleotide
  Target: LAMA2; (+) strand; PAM type: NNGRRT; PAM sequence: CAGAAT
aatcattaaagcctggagtg

SEQ ID NO: 26074 - DNA, 20 bp, Artificial Sequence
  Description of Artificial Sequence: Synthetic oligonucleotide
  Target: LAMA2; (+) strand; PAM type: NNGRRT; PAM sequence: GTGAGT
gtcgactgaaatggtatcaa

SEQ ID NO: 26075 - DNA, 20 bp, Artificial Sequence
  Description of Artificial Sequence: Synthetic oligonucleotide
  Target: LAMA2; (+) strand; PAM type: NNGRRT; PAM sequence: TTGAAT
ctgaaatggtatcaagtgag

SEQ ID NO: 26076 - DNA, 20 bp, Artificial Sequence
  Description of Artificial Sequence: Synthetic oligonucleotide
  Target: LAMA2; (+) strand; PAM type: NNGRRT; PAM sequence: AGGGAT
tgtgatatctgacatgggaa

SEQ ID NO: 26077 - DNA, 20 bp, Artificial Sequence
  Description of Artificial Sequence: Synthetic oligonucleotide
  Target: LAMA2; (+) strand; PAM type: NNGRRT; PAM sequence: ATGAGT
acatgggaaagggatgcttg

SEQ ID NO: 26078 - DNA, 20 bp, Artificial Sequence
  Description of Artificial Sequence: Synthetic oligonucleotide
  Target: LAMA2; (+) strand; PAM type: NNGRRT; PAM sequence: GGGAAT
aggttcattacacaatgcct

SEQ ID NO: 26079 - DNA, 20 bp, Artificial Sequence
  Description of Artificial Sequence: Synthetic oligonucleotide
  Target: LAMA2; (+) strand; PAM type: NNGRRT; PAM sequence: GTGAAT
tacaattcacctctcccaca

SEQ ID NO: 26080 - DNA, 20 bp, Artificial Sequence
  Description of Artificial Sequence: Synthetic oligonucleotide
  Target: LAMA2; (+) strand; PAM type: NNGRRT; PAM sequence: CAGGGT
attggcatgattttatagga

SEQ ID NO: 26081 - DNA, 20 bp, Artificial Sequence
  Description of Artificial Sequence: Synthetic oligonucleotide
  Target: LAMA2; (+) strand; PAM type: NNGRRT; PAM sequence: CAGAAT
ccaatttcattcataatgga

SEQ ID NO: 26082 - DNA, 20 bp, Artificial Sequence
  Description of Artificial Sequence: Synthetic oligonucleotide
  Target: LAMA2; (+) strand; PAM type: NNGRRT; PAM sequence: TTGAAT
gacagaatatctacaatgtt

SEQ ID NO: 26083 - DNA, 20 bp, Artificial Sequence
  Description of Artificial Sequence: Synthetic oligonucleotide
  Target: LAMA2; (+) strand; PAM type: NNGRRT; PAM sequence: AAGAAT
gcacactggaacaaatatta

SEQ ID NO: 26084 - DNA, 20 bp, Artificial Sequence
  Description of Artificial Sequence: Synthetic oligonucleotide
  Target: LAMA2; (+) strand; PAM type: NNGRRT; PAM sequence: ATGGGT
actggaacaaatattaaaga

SEQ ID NO: 26085 - DNA, 20 bp, Artificial Sequence
  Description of Artificial Sequence: Synthetic oligonucleotide
  Target: LAMA2; (+) strand; PAM type: NNGRRT; PAM sequence: TTGAAT
acaaatattaaagaatgggt

SEQ ID NO: 26086 - DNA, 20 bp, Artificial Sequence
  Description of Artificial Sequence: Synthetic oligonucleotide
  Target: LAMA2; (+) strand; PAM type: NNGRRT; PAM sequence: ATGAGT
atgggtttgaatctaagtag

SEQ ID NO: 26087 - DNA, 20 bp, Artificial Sequence
  Description of Artificial Sequence: Synthetic oligonucleotide
  Target: LAMA2; (+) strand; PAM type: NNGRRT; PAM sequence: CTGAAT
tctcatctggcaggacattt

SEQ ID NO: 26088 - DNA, 20 bp, Artificial Sequence
  Description of Artificial Sequence: Synthetic oligonucleotide
  Target: LAMA2; (+) strand; PAM type: NNGRRT; PAM sequence: TTGAAT
ttctgaatttatttgggaaa

SEQ ID NO: 26089 - DNA, 20 bp, Artificial Sequence
  Description of Artificial Sequence: Synthetic oligonucleotide
  Target: LAMA2; (+) strand; PAM type: NNGRRT; PAM sequence: TTGGGT
tgaatatatgtcaggtaggt

SEQ ID NO: 26090 - DNA, 20 bp, Artificial Sequence
  Description of Artificial Sequence: Synthetic oligonucleotide
  Target: LAMA2; (+) strand; PAM type: NNGRRT; PAM sequence: CTGGGT
tgtcaggtaggtttgggttg

SEQ ID NO: 26091 - DNA, 20 bp, Artificial Sequence
  Description of Artificial Sequence: Synthetic oligonucleotide
  Target: LAMA2; (+) strand; PAM type: NNGRRT; PAM sequence: ATGAGT
aggtttgggttgctgggtaa

SEQ ID NO: 26092 - DNA, 20 bp, Artificial Sequence
  Description of Artificial Sequence: Synthetic oligonucleotide
  Target: LAMA2; (+) strand; PAM type: NNGRRT; PAM sequence: CAGAAT
aaacctgtaacataaaagta

SEQ ID NO: 26093 - DNA, 20 bp, Artificial Sequence
  Description of Artificial Sequence: Synthetic oligonucleotide
  Target: LAMA2; (+) strand; PAM type: NNGRRT; PAM sequence: AAGAGT
acagaatacattcctgtttc

SEQ ID NO: 26094 - DNA, 20 bp, Artificial Sequence
  Description of Artificial Sequence: Synthetic oligonucleotide
  Target: LAMA2; (+) strand; PAM type: NNGRRT; PAM sequence: AGGAGT
ctgtttcaagagtctgtaag

SEQ ID NO: 26095 - DNA, 20 bp, Artificial Sequence
  Description of Artificial Sequence: Synthetic oligonucleotide
  Target: LAMA2; (+) strand; PAM type: NNGRRT; PAM sequence: GAGGAT
ctcatgaacagtttatatga

SEQ ID NO: 26096 - DNA, 20 bp, Artificial Sequence
  Description of Artificial Sequence: Synthetic oligonucleotide
  Target: LAMA2; (+) strand; PAM type: NNGRRT; PAM sequence: GTGAAT
cagtagcacaagcaactgca

SEQ ID NO: 26097 - DNA, 20 bp, Artificial Sequence
  Description of Artificial Sequence: Synthetic oligonucleotide
  Target: LAMA2; (+) strand; PAM type: NNGRRT; PAM sequence: AAGGAT
catgaaaaaaatatactttc

SEQ ID NO: 26098 - DNA, 20 bp, Artificial Sequence
  Description of Artificial Sequence: Synthetic oligonucleotide
  Target: LAMA2; (+) strand; PAM type: NNGRRT; PAM sequence: AAGGGT
ggtaaatagcaattggaaag

SEQ ID NO: 26099 - DNA, 20 bp, Artificial Sequence
  Description of Artificial Sequence: Synthetic oligonucleotide
  Target: LAMA2; (+) strand; PAM type: NNGRRT; PAM sequence: CTGAGT
gcaggccagtgatctctatt

SEQ ID NO: 26100 - DNA, 20 bp, Artificial Sequence
  Description of Artificial Sequence: Synthetic oligonucleotide
  Target: LAMA2; (+) strand; PAM type: NNGRRT; PAM sequence: CTGGGT
tattttgctctgtttgacat

SEQ ID NO: 26101 - DNA, 20 bp, Artificial Sequence
  Description of Artificial Sequence: Synthetic oligonucleotide
  Target: LAMA2; (+) strand; PAM type: NNGRRT; PAM sequence: TAGGAT
caggaggaaggaaattgcct

SEQ ID NO: 26102 - DNA, 20 bp, Artificial Sequence
  Description of Artificial Sequence: Synthetic oligonucleotide
  Target: LAMA2; (+) strand; PAM type: NNGRRT; PAM sequence: ATGAAT
gaaggaaattgccttaggat

SEQ ID NO: 26103 - DNA, 20 bp, Artificial Sequence
  Description of Artificial Sequence: Synthetic oligonucleotide
  Target: LAMA2; (+) strand; PAM type: NNGRRT; PAM sequence: TGGGAT
aaaacatcatgaaagataat

SEQ ID NO: 26104 - DNA, 20 bp, Artificial Sequence
  Description of Artificial Sequence: Synthetic oligonucleotide
  Target: LAMA2; (+) strand; PAM type: NNGRRT; PAM sequence: TTGAAT
tcctcttgtttcttgcttat

SEQ ID NO: 26105 - DNA, 20 bp, Artificial Sequence
  Description of Artificial Sequence: Synthetic oligonucleotide
  Target: LAMA2; (+) strand; PAM type: NNGRRT; PAM sequence: GAGAGT
cagattaaaaatattttctg

SEQ ID NO: 26106 - DNA, 20 bp, Artificial Sequence
  Description of Artificial Sequence: Synthetic oligonucleotide
  Target: LAMA2; (+) strand; PAM type: NNGRRT; PAM sequence: GTGAAT
ttattttacaatgtttacaa

SEQ ID NO: 26107 - DNA, 20 bp, Artificial Sequence
  Description of Artificial Sequence: Synthetic oligonucleotide
  Target: LAMA2; (+) strand; PAM type: NNGRRT; PAM sequence: TTGAGT
cagcaatctttaaatcctgc

SEQ ID NO: 26108 - DNA, 20 bp, Artificial Sequence
  Description of Artificial Sequence: Synthetic oligonucleotide
  Target: LAMA2; (+) strand; PAM type: NNGRRT; PAM sequence: TTGAGT
ttattccagttttccttttt

SEQ ID NO: 26109 - DNA, 20 bp, Artificial Sequence
  Description of Artificial Sequence: Synthetic oligonucleotide
  Target: LAMA2; (+) strand; PAM type: NNGRRT; PAM sequence: TGGAAT
ttgaaatatagcttgctctt

SEQ ID NO: 26110 - DNA, 20 bp, Artificial Sequence
  Description of Artificial Sequence: Synthetic oligonucleotide
  Target: LAMA2; (+) strand; PAM type: NNGRRT; PAM sequence: TAGGAT
gactattctaaaacactttt

SEQ ID NO: 26111 - DNA, 20 bp, Artificial Sequence
  Description of Artificial Sequence: Synthetic oligonucleotide
  Target: LAMA2; (+) strand; PAM type: NNGRRT; PAM sequence: AGGAAT
gatatcactaattgtcaata

SEQ ID NO: 26112 - DNA, 20 bp, Artificial Sequence
  Description of Artificial Sequence: Synthetic oligonucleotide
  Target: LAMA2; (+) strand; PAM type: NNGRRT; PAM sequence: TTGAAT
atcaggaacagaaaattgtt

SEQ ID NO: 26113 - DNA, 20 bp, Artificial Sequence
  Description of Artificial Sequence: Synthetic oligonucleotide
  Target: LAMA2; (+) strand; PAM type: NNGRRT; PAM sequence: TTGAAT
atttttttttaaagattctg

SEQ ID NO: 26114 - DNA, 20 bp, Artificial Sequence
  Description of Artificial Sequence: Synthetic oligonucleotide
  Target: LAMA2; (+) strand; PAM type: NNGRRT; PAM sequence: TTGGAT
tgaataggtaggacttcaca

SEQ ID NO: 26115 - DNA, 20 bp, Artificial Sequence
  Description of Artificial Sequence: Synthetic oligonucleotide
  Target: LAMA2; (+) strand; PAM type: NNGRRT; PAM sequence: AGGGAT
agaaaaataatttaaactca

SEQ ID NO: 26116 - DNA, 20 bp, Artificial Sequence
  Description of Artificial Sequence: Synthetic oligonucleotide
  Target: LAMA2; (+) strand; PAM type: NNGRRT; PAM sequence: TTGGGT
tttaaactcaagggattttc

SEQ ID NO: 26117 - DNA, 20 bp, Artificial Sequence
  Description of Artificial Sequence: Synthetic oligonucleotide
  Target: LAMA2; (+) strand; PAM type: NNGRRT; PAM sequence: GAGAAT
ttttcttgggtaaggcctca

SEQ ID NO: 26118 - DNA, 20 bp, Artificial Sequence
  Description of Artificial Sequence: Synthetic oligonucleotide
  Target: LAMA2; (+) strand; PAM type: NNGRRT; PAM sequence: CTGAAT
tatataaaggccacatttag

SEQ ID NO: 26119 - DNA, 20 bp, Artificial Sequence
  Description of Artificial Sequence: Synthetic oligonucleotide
  Target: LAMA2; (+) strand; PAM type: NNGRRT; PAM sequence: AGGAAT
ataatgaaagtactatatgc

SEQ ID NO: 26120 - DNA, 20 bp, Artificial Sequence
  Description of Artificial Sequence: Synthetic oligonucleotide
  Target: LAMA2; (+) strand; PAM type: NNGRRT; PAM sequence: ATGAAT
cttatgtaaacatgactact

SEQ ID NO: 26121 - DNA, 20 bp, Artificial Sequence
  Description of Artificial Sequence: Synthetic oligonucleotide
  Target: LAMA2; (+) strand; PAM type: NNGRRT; PAM sequence: AGGGAT
gactactatgaatacagacc

SEQ ID NO: 26122 - DNA, 20 bp, Artificial Sequence
  Description of Artificial Sequence: Synthetic oligonucleotide
  Target: LAMA2; (+) strand; PAM type: NNGRRT; PAM sequence: CAGAGT
tacagaccagggatgtgccc

SEQ ID NO: 26123 - DNA, 20 bp, Artificial Sequence
  Description of Artificial Sequence: Synthetic oligonucleotide
  Target: LAMA2; (+) strand; PAM type: NNGRRT; PAM sequence: ATGAGT
agggatgtgccccagagtca

SEQ ID NO: 26124 - DNA, 20 bp, Artificial Sequence
  Description of Artificial Sequence: Synthetic oligonucleotide
  Target: LAMA2; (+) strand; PAM type: NNGRRT; PAM sequence: GGGAAT
gcagacagagagcagcatca

SEQ ID NO: 26125 - DNA, 20 bp, Artificial Sequence
  Description of Artificial Sequence: Synthetic oligonucleotide
  Target: LAMA2; (+) strand; PAM type: NNGRRT; PAM sequence: CAGGGT
tgattattacctgtgcccag

SEQ ID NO: 26126 - DNA, 20 bp, Artificial Sequence
  Description of Artificial Sequence: Synthetic oligonucleotide
  Target: LAMA2; (+) strand; PAM type: NNGRRT; PAM sequence: GGGGGT
tatgtctcatactgtgctaa

SEQ ID NO: 26127 - DNA, 20 bp, Artificial Sequence
  Description of Artificial Sequence: Synthetic oligonucleotide
  Target: LAMA2; (+) strand; PAM type: NNGRRT; PAM sequence: ATGAGT
tctatattgaccaatacttg

SEQ ID NO: 26128 - DNA, 20 bp, Artificial Sequence
  Description of Artificial Sequence: Synthetic oligonucleotide
  Target: LAMA2; (+) strand; PAM type: NNGRRT; PAM sequence: CGGGAT
aaccctgctcaaaaatgtaa

SEQ ID NO: 26129 - DNA, 20 bp, Artificial Sequence
  Description of Artificial Sequence: Synthetic oligonucleotide
  Target: LAMA2; (+) strand; PAM type: NNGRRT; PAM sequence: CAGGAT
gtaacgggatctttactaat

SEQ ID NO: 26130 - DNA, 20 bp, Artificial Sequence
  Description of Artificial Sequence: Synthetic oligonucleotide
  Target: LAMA2; (+) strand; PAM type: NNGRRT; PAM sequence: ATGGGT
aatcaggatcataggtttgc

SEQ ID NO: 26131 - DNA, 20 bp, Artificial Sequence
  Description of Artificial Sequence: Synthetic oligonucleotide
  Target: LAMA2; (+) strand; PAM type: NNGRRT; PAM sequence: AAGAAT
gcatgggttcctaggaggaa

SEQ ID NO: 26132 - DNA, 20 bp, Artificial Sequence
  Description of Artificial Sequence: Synthetic oligonucleotide
  Target: LAMA2; (+) strand; PAM type: NNGRRT; PAM sequence: ATGAGT
gggttcctaggaggaaaaga

SEQ ID NO: 26133 - DNA, 20 bp, Artificial Sequence
  Description of Artificial Sequence: Synthetic oligonucleotide
  Target: LAMA2; (+) strand; PAM type: NNGRRT; PAM sequence: ACGGAT
cattctcaccctagggaaac

SEQ ID NO: 26134 - DNA, 20 bp, Artificial Sequence
  Description of Artificial Sequence: Synthetic oligonucleotide
  Target: LAMA2; (+) strand; PAM type: NNGRRT; PAM sequence: GGGGAT
aacacggattttactgctca

SEQ ID NO: 26135 - DNA, 20 bp, Artificial Sequence
  Description of Artificial Sequence: Synthetic oligonucleotide
  Target: LAMA2; (+) strand; PAM type: NNGRRT; PAM sequence: TTGGAT
tgctcaggggatgatgaaaa

SEQ ID NO: 26136 - DNA, 20 bp, Artificial Sequence
  Description of Artificial Sequence: Synthetic oligonucleotide
  Target: LAMA2; (+) strand; PAM type: NNGRRT; PAM sequence: AAGGGT
ccccaggtccatcgttgctc

SEQ ID NO: 26137 - DNA, 20 bp, Artificial Sequence
  Description of Artificial Sequence: Synthetic oligonucleotide
  Target: LAMA2; (+) strand; PAM type: NNGRRT; PAM sequence: GGGAAT
atttattcaatcaaacaaaa

SEQ ID NO: 26138 - DNA, 20 bp, Artificial Sequence
  Description of Artificial Sequence: Synthetic oligonucleotide
  Target: LAMA2; (+) strand; PAM type: NNGRRT; PAM sequence: GGGAAT
agatgtaaccatccgttctg

SEQ ID NO: 26139 - DNA, 20 bp, Artificial Sequence
  Description of Artificial Sequence: Synthetic oligonucleotide
  Target: LAMA2; (+) strand; PAM type: NNGRRT; PAM sequence: AGGAGT
gttctaagcaatgggaaaac

SEQ ID NO: 26140 - DNA, 20 bp, Artificial Sequence
  Description of Artificial Sequence: Synthetic oligonucleotide
  Target: LAMA2; (+) strand; PAM type: NNGRRT; PAM sequence: GGGGAT
tatgatgtttttattttaga

SEQ ID NO: 26141 - DNA, 20 bp, Artificial Sequence
  Description of Artificial Sequence: Synthetic oligonucleotide
  Target: LAMA2; (+) strand; PAM type: NNGRRT; PAM sequence: ATGAAT
ggaagaaggagaaaaagcca

SEQ ID NO: 26142 - DNA, 20 bp, Artificial Sequence
  Description of Artificial Sequence: Synthetic oligonucleotide
  Target: LAMA2; (+) strand; PAM type: NNGRRT; PAM sequence: AAGGAT
agataatttcatataatgct

SEQ ID NO: 26143 - DNA, 20 bp, Artificial Sequence
  Description of Artificial Sequence: Synthetic oligonucleotide
  Target: LAMA2; (+) strand; PAM type: NNGRRT; PAM sequence: TGGAAT
gaagaaatgaaaacaggtgt

SEQ ID NO: 26144 - DNA, 20 bp, Artificial Sequence
  Description of Artificial Sequence: Synthetic oligonucleotide
  Target: LAMA2; (+) strand; PAM type: NNGRRT; PAM sequence: TGGGGT
acaggtgttggaatagatca

SEQ ID NO: 26145 - DNA, 20 bp, Artificial Sequence
  Description of Artificial Sequence: Synthetic oligonucleotide
  Target: LAMA2; (+) strand; PAM type: NNGRRT; PAM sequence: GGGAGT
gttggaatagatcatggggt

SEQ ID NO: 26146 - DNA, 20 bp, Artificial Sequence
  Description of Artificial Sequence: Synthetic oligonucleotide
  Target: LAMA2; (+) strand; PAM type: NNGRRT; PAM sequence: AGGGGT
atggggtgggagttaattga

SEQ ID NO: 26147 - DNA, 20 bp, Artificial Sequence
  Description of Artificial Sequence: Synthetic oligonucleotide
  Target: LAMA2; (+) strand; PAM type: NNGRRT; PAM sequence: TTGGGT
aaggccctgctaaagaagtg

SEQ ID NO: 26148 - DNA, 20 bp, Artificial Sequence
  Description of Artificial Sequence: Synthetic oligonucleotide
  Target: LAMA2; (+) strand; PAM type: NNGRRT; PAM sequence: GGGAAT
aaatgcagaggtcctaatat

SEQ ID NO: 26149 - DNA, 20 bp, Artificial Sequence
  Description of Artificial Sequence: Synthetic oligonucleotide
  Target: LAMA2; (+) strand; PAM type: NNGRRT; PAM sequence: TAGGGT
atgggaatgaacatctcatg

SEQ ID NO: 26150 - DNA, 20 bp, Artificial Sequence
  Description of Artificial Sequence: Synthetic oligonucleotide
  Target: LAMA2; (+) strand; PAM type: NNGRRT; PAM sequence: CAGGAT
aaggctctaatattgtgagc

SEQ ID NO: 26151 - DNA, 20 bp, Artificial Sequence
  Description of Artificial Sequence: Synthetic oligonucleotide
  Target: LAMA2; (+) strand; PAM type: NNGRRT; PAM sequence: CAGGGT
tgagccaggataagggcagc

SEQ ID NO: 26152 - DNA, 20 bp, Artificial Sequence
  Description of Artificial Sequence: Synthetic oligonucleotide
  Target: LAMA2; (+) strand; PAM type: NNGRRT; PAM sequence: AGGAGT
acgtaggaccttgtacatgt

SEQ ID NO: 26153 - DNA, 20 bp, Artificial Sequence
  Description of Artificial Sequence: Synthetic oligonucleotide
  Target: LAMA2; (+) strand; PAM type: NNGRRT; PAM sequence: TTGAAT
cgtgggaccttgtgcttcgt

SEQ ID NO: 26154 - DNA, 20 bp, Artificial Sequence
  Description of Artificial Sequence: Synthetic oligonucleotide
  Target: LAMA2; (+) strand; PAM type: NNGRRT; PAM sequence: GGGAAT
tgaattttattctaaatgtt

SEQ ID NO: 26155 - DNA, 20 bp, Artificial Sequence
  Description of Artificial Sequence: Synthetic oligonucleotide
  Target: LAMA2; (+) strand; PAM type: NNGRRT; PAM sequence: AAGGGT
gaaacagatcataaggagac

SEQ ID NO: 26156 - DNA, 20 bp, Artificial Sequence
  Description of Artificial Sequence: Synthetic oligonucleotide
  Target: LAMA2; (+) strand; PAM type: NNGRRT; PAM sequence: AAGGGT
ctaacaccttggccagtgag

SEQ ID NO: 26157 - DNA, 20 bp, Artificial Sequence
  Description of Artificial Sequence: Synthetic oligonucleotide
  Target: LAMA2; (+) strand; PAM type: NNGRRT; PAM sequence: ATGAAT
aatttctaaagacagtggac

SEQ ID NO: 26158 - DNA, 20 bp, Artificial Sequence
  Description of Artificial Sequence: Synthetic oligonucleotide
  Target: LAMA2; (+) strand; PAM type: NNGRRT; PAM sequence: GAGAAT
atgaattcctgcagctctct

SEQ ID NO: 26159 - DNA, 20 bp, Artificial Sequence
  Description of Artificial Sequence: Synthetic oligonucleotide
  Target: LAMA2; (+) strand; PAM type: NNGRRT; PAM sequence: GTGAAT
aatttaggttaatgattcct

SEQ ID NO: 26160 - DNA, 20 bp, Artificial Sequence
  Description of Artificial Sequence: Synthetic oligonucleotide
  Target: LAMA2; (+) strand; PAM type: NNGRRT; PAM sequence: TGGGGT
ttatttttatttttttgaaa

SEQ ID NO: 26161 - DNA, 20 bp, Artificial Sequence
  Description of Artificial Sequence: Synthetic oligonucleotide
  Target: LAMA2; (+) strand; PAM type: NNGRRT; PAM sequence: TGGAGT
tctcactctgttgcccaggc

SEQ ID NO: 26162 - DNA, 20 bp, Artificial Sequence
  Description of Artificial Sequence: Synthetic oligonucleotide
  Target: LAMA2; (+) strand; PAM type: NNGRRT; PAM sequence: GAGAGT
gatcctcctgcctcagccac

SEQ ID NO: 26163 - DNA, 20 bp, Artificial Sequence
  Description of Artificial Sequence: Synthetic oligonucleotide
  Target: LAMA2; (+) strand; PAM type: NNGRRT; PAM sequence: TGGGAT
gcctcagccacgagagtagc

SEQ ID NO: 26164 - DNA, 20 bp, Artificial Sequence
  Description of Artificial Sequence: Synthetic oligonucleotide
  Target: LAMA2; (+) strand; PAM type: NNGRRT; PAM sequence: GTGAAT
actacaggcatgagccacct

SEQ ID NO: 26165 - DNA, 20 bp, Artificial Sequence
  Description of Artificial Sequence: Synthetic oligonucleotide
  Target: LAMA2; (+) strand; PAM type: NNGRRT; PAM sequence: TTGGAT
tacaataaaaatgcttctat

SEQ ID NO: 26166 - DNA, 20 bp, Artificial Sequence
  Description of Artificial Sequence: Synthetic oligonucleotide
  Target: LAMA2; (+) strand; PAM type: NNGRRT; PAM sequence: AGGGAT
agttatttcgaggtctcaaa

SEQ ID NO: 26167 - DNA, 20 bp, Artificial Sequence
  Description of Artificial Sequence: Synthetic oligonucleotide
  Target: LAMA2; (+) strand; PAM type: NNGRRT; PAM sequence: CAGAAT
caaaaatctataatagaaaa

SEQ ID NO: 26168 - DNA, 20 bp, Artificial Sequence
  Description of Artificial Sequence: Synthetic oligonucleotide
  Target: LAMA2; (+) strand; PAM type: NNGRRT; PAM sequence: CTGGGT
tctataatagaaaacagaat

SEQ ID NO: 26169 - DNA, 20 bp, Artificial Sequence
  Description of Artificial Sequence: Synthetic oligonucleotide
  Target: LAMA2; (+) strand; PAM type: NNGRRT; PAM sequence: CAGAAT
agtggaaataatttttattt

SEQ ID NO: 26170 - DNA, 20 bp, Artificial Sequence
  Description of Artificial Sequence: Synthetic oligonucleotide
  Target: LAMA2; (+) strand; PAM type: NNGRRT; PAM sequence: TTGAGT
ttatttcagaattaaataaa

SEQ ID NO: 26171 - DNA, 20 bp, Artificial Sequence
  Description of Artificial Sequence: Synthetic oligonucleotide
  Target: LAMA2; (+) strand; PAM type: NNGRRT; PAM sequence: ATGAAT
tcagtagcatcattatgttg

SEQ ID NO: 26172 - DNA, 20 bp, Artificial Sequence
  Description of Artificial Sequence: Synthetic oligonucleotide
  Target: LAMA2; (+) strand; PAM type: NNGRRT; PAM sequence: AAGAAT
gtttaatcaataattcctga

SEQ ID NO: 26173 - DNA, 20 bp, Artificial Sequence
  Description of Artificial Sequence: Synthetic oligonucleotide
  Target: LAMA2; (+) strand; PAM type: NNGRRT; PAM sequence: TTGAAT
caaggtttaaaaaaatttgc

SEQ ID NO: 26174 - DNA, 20 bp, Artificial Sequence
  Description of Artificial Sequence: Synthetic oligonucleotide
  Target: LAMA2; (+) strand; PAM type: NNGRRT; PAM sequence: TGGAGT
tttgcttgaataaaacatta

SEQ ID NO: 26175 - DNA, 20 bp, Artificial Sequence
  Description of Artificial Sequence: Synthetic oligonucleotide
  Target: LAMA2; (+) strand; PAM type: NNGRRT; PAM sequence: CTGAAT
tgaataaaacattatggagt

SEQ ID NO: 26176 - DNA, 20 bp, Artificial Sequence
  Description of Artificial Sequence: Synthetic oligonucleotide
  Target: LAMA2; (+) strand; PAM type: NNGRRT; PAM sequence: ACGAAT
tgttctatgttatatgacct

SEQ ID NO: 26177 - DNA, 20 bp, Artificial Sequence
  Description of Artificial Sequence: Synthetic oligonucleotide
  Target: LAMA2; (+) strand; PAM type: NNGRRT; PAM sequence: AAGAGT
ttatatgacctacgaatgtt

SEQ ID NO: 26178 - DNA, 20 bp, Artificial Sequence
  Description of Artificial Sequence: Synthetic oligonucleotide
  Target: LAMA2; (+) strand; PAM type: NNGRRT; PAM sequence: AAGAGT
tacgaatgttaagagtctgt

SEQ ID NO: 26179 - DNA, 20 bp, Artificial Sequence
  Description of Artificial Sequence: Synthetic oligonucleotide
  Target: LAMA2; (+) strand; PAM type: NNGRRT; PAM sequence: GTGGGT
tttgattttaccaacacctt

SEQ ID NO: 26180 - DNA, 20 bp, Artificial Sequence
  Description of Artificial Sequence: Synthetic oligonucleotide
  Target: LAMA2; (+) strand; PAM type: NNGRRT; PAM sequence: TTGGAT
ttgaggctttataactgaaa

SEQ ID NO: 26181 - DNA, 20 bp, Artificial Sequence
  Description of Artificial Sequence: Synthetic oligonucleotide
  Target: LAMA2; (+) strand; PAM type: NNGRRT; PAM sequence: AAGAAT
gatataaacatattttaatt

SEQ ID NO: 26182 - DNA, 20 bp, Artificial Sequence
  Description of Artificial Sequence: Synthetic oligonucleotide
  Target: LAMA2; (+) strand; PAM type: NNGRRT; PAM sequence: TAGAAT
gtgtgttttatgatttgtga

SEQ ID NO: 26183 - DNA, 20 bp, Artificial Sequence
  Description of Artificial Sequence: Synthetic oligonucleotide
  Target: LAMA2; (+) strand; PAM type: NNGRRT; PAM sequence: ATGAGT
atgtactgccttttagtgac

SEQ ID NO: 26184 - DNA, 20 bp, Artificial Sequence
  Description of Artificial Sequence: Synthetic oligonucleotide
  Target: LAMA2; (+) strand; PAM type: NNGRRT; PAM sequence: AAGAAT
acatgagttcaattctaatt

SEQ ID NO: 26185 - DNA, 20 bp, Artificial Sequence
  Description of Artificial Sequence: Synthetic oligonucleotide
  Target: LAMA2; (+) strand; PAM type: NNGRRT; PAM sequence: GAGAAT
gttcaattctaattaagaat

SEQ ID NO: 26186 - DNA, 20 bp, Artificial Sequence
  Description of Artificial Sequence: Synthetic oligonucleotide
  Target: LAMA2; (+) strand; PAM type: NNGRRT; PAM sequence: CGGAAT
ctttgacatttctcttaaag

SEQ ID NO: 26187 - DNA, 20 bp, Artificial Sequence
  Description of Artificial Sequence: Synthetic oligonucleotide
  Target: LAMA2; (+) strand; PAM type: NNGRRT; PAM sequence: TGGGGT
ctcttaaagcggaatttatt

SEQ ID NO: 26188 - DNA, 20 bp, Artificial Sequence
  Description of Artificial Sequence: Synthetic oligonucleotide
  Target: LAMA2; (+) strand; PAM type: NNGRRT; PAM sequence: TGGAAT
tcatttctactgctggcatg

SEQ ID NO: 26189 - DNA, 20 bp, Artificial Sequence
  Description of Artificial Sequence: Synthetic oligonucleotide
  Target: LAMA2; (+) strand; PAM type: NNGRRT; PAM sequence: AAGAGT
ccttagctttgaccatcaag

SEQ ID NO: 26190 - DNA, 20 bp, Artificial Sequence
  Description of Artificial Sequence: Synthetic oligonucleotide
  Target: LAMA2; (+) strand; PAM type: NNGRRT; PAM sequence: TAGGAT
tgtcataggtataaatcaag

SEQ ID NO: 26191 - DNA, 20 bp, Artificial Sequence
  Description of Artificial Sequence: Synthetic oligonucleotide
  Target: LAMA2; (+) strand; PAM type: NNGRRT; PAM sequence: ATGAGT
tttatgcgtagagataagag

SEQ ID NO: 26192 - DNA, 20 bp, Artificial Sequence
  Description of Artificial Sequence: Synthetic oligonucleotide
  Target: LAMA2; (+) strand; PAM type: NNGRRT; PAM sequence: ATGAAT
gagtactttcgcagaaacaa

SEQ ID NO: 26193 - DNA, 20 bp, Artificial Sequence
  Description of Artificial Sequence: Synthetic oligonucleotide
  Target: LAMA2; (+) strand; PAM type: NNGRRT; PAM sequence: GTGAAT
tggagaacttaagctcatag

SEQ ID NO: 26194 - DNA, 20 bp, Artificial Sequence
  Description of Artificial Sequence: Synthetic oligonucleotide
  Target: LAMA2; (+) strand; PAM type: NNGRRT; PAM sequence: GGGAAT
ttaagctcataggtgaatgt

SEQ ID NO: 26195 - DNA, 20 bp, Artificial Sequence
  Description of Artificial Sequence: Synthetic oligonucleotide
  Target: LAMA2; (+) strand; PAM type: NNGRRT; PAM sequence: GAGAAT
gtgaatgtgggaatatggag

SEQ ID NO: 26196 - DNA, 20 bp, Artificial Sequence
  Description of Artificial Sequence: Synthetic oligonucleotide
  Target: LAMA2; (+) strand; PAM type: NNGRRT; PAM sequence: GTGAGT
agaatgaaaatcattgccag

SEQ ID NO: 26197 - DNA, 20 bp, Artificial Sequence
  Description of Artificial Sequence: Synthetic oligonucleotide
  Target: LAMA2; (+) strand; PAM type: NNGRRT; PAM sequence: AAGAGT
cattgccaggtgagtgatca

SEQ ID NO: 26198 - DNA, 20 bp, Artificial Sequence
  Description of Artificial Sequence: Synthetic oligonucleotide
  Target: LAMA2; (+) strand; PAM type: NNGRRT; PAM sequence: AGGGGT
agaaaaggtggtacctgtac

SEQ ID NO: 26199 - DNA, 20 bp, Artificial Sequence
  Description of Artificial Sequence: Synthetic oligonucleotide
  Target: LAMA2; (+) strand; PAM type: NNGRRT; PAM sequence: GAGGAT
ggtacctgtacaggggtttg

SEQ ID NO: 26200 - DNA, 20 bp, Artificial Sequence
  Description of Artificial Sequence: Synthetic oligonucleotide
  Target: LAMA2; (+) strand; PAM type: NNGRRT; PAM sequence: CAGAGT
gggaagacacatcttccagg

SEQ ID NO: 26201 - DNA, 20 bp, Artificial Sequence
  Description of Artificial Sequence: Synthetic oligonucleotide
  Target: LAMA2; (+) strand; PAM type: NNGRRT; PAM sequence: CAGGAT
aagaggtaccccttaaggaa

SEQ ID NO: 26202 - DNA, 20 bp, Artificial Sequence
  Description of Artificial Sequence: Synthetic oligonucleotide
  Target: LAMA2; (+) strand; PAM type: NNGRRT; PAM sequence: CAGGAT
ccccttaaggaacaggatgc

SEQ ID NO: 26203 - DNA, 20 bp, Artificial Sequence
  Description of Artificial Sequence: Synthetic oligonucleotide
  Target: LAMA2; (+) strand; PAM type: NNGRRT; PAM sequence: CAGGGT
atgtatcttgctggaagtct

SEQ ID NO: 26204 - DNA, 20 bp, Artificial Sequence
  Description of Artificial Sequence: Synthetic oligonucleotide
  Target: LAMA2; (+) strand; PAM type: NNGRRT; PAM sequence: TGGAAT
cattcaaagaggcaggtctc

SEQ ID NO: 26205 - DNA, 20 bp, Artificial Sequence
  Description of Artificial Sequence: Synthetic oligonucleotide
  Target: LAMA2; (+) strand; PAM type: NNGRRT; PAM sequence: ATGGGT
acccttgcctcagctgagag

SEQ ID NO: 26206 - DNA, 20 bp, Artificial Sequence
  Description of Artificial Sequence: Synthetic oligonucleotide
  Target: LAMA2; (+) strand; PAM type: NNGRRT; PAM sequence: CAGGAT
ctcagctgagagatgggtac

SEQ ID NO: 26207 - DNA, 20 bp, Artificial Sequence
  Description of Artificial Sequence: Synthetic oligonucleotide
  Target: LAMA2; (+) strand; PAM type: NNGRRT; PAM sequence: AAGGGT
ccaggatgaaaggcctggta

SEQ ID NO: 26208 - DNA, 20 bp, Artificial Sequence
  Description of Artificial Sequence: Synthetic oligonucleotide
  Target: LAMA2; (+) strand; PAM type: NNGRRT; PAM sequence: TGGAAT
ggttatggctgtgccaccag

SEQ ID NO: 26209 - DNA, 20 bp, Artificial Sequence
  Description of Artificial Sequence: Synthetic oligonucleotide
  Target: LAMA2; (+) strand; PAM type: NNGRRT; PAM sequence: GGGAAT
ccagtggaatttcctacact

SEQ ID NO: 26210 - DNA, 20 bp, Artificial Sequence
  Description of Artificial Sequence: Synthetic oligonucleotide
  Target: LAMA2; (+) strand; PAM type: NNGRRT; PAM sequence: TAGAAT
gaatatacatgctaggtgca

SEQ ID NO: 26211 - DNA, 20 bp, Artificial Sequence
  Description of Artificial Sequence: Synthetic oligonucleotide
  Target: LAMA2; (+) strand; PAM type: NNGRRT; PAM sequence: AAGAAT
ttcattaatgcatatttgtc

SEQ ID NO: 26212 - DNA, 20 bp, Artificial Sequence
  Description of Artificial Sequence: Synthetic oligonucleotide
  Target: LAMA2; (+) strand; PAM type: NNGRRT; PAM sequence: ATGAGT
tgctgtataaatggttttgt

SEQ ID NO: 26213 - DNA, 20 bp, Artificial Sequence
  Description of Artificial Sequence: Synthetic oligonucleotide
  Target: LAMA2; (+) strand; PAM type: NNGRRT; PAM sequence: GTGGAT
caaattcccatcagttatat

SEQ ID NO: 26214 - DNA, 20 bp, Artificial Sequence
  Description of Artificial Sequence: Synthetic oligonucleotide
  Target: LAMA2; (+) strand; PAM type: NNGRRT; PAM sequence: CAGGGT
atatgaagaagcaatgaaca

SEQ ID NO: 26215 - DNA, 20 bp, Artificial Sequence
  Description of Artificial Sequence: Synthetic oligonucleotide
  Target: LAMA2; (+) strand; PAM type: NNGRRT; PAM sequence: CTGGAT
atgatagacattacttcctt

SEQ ID NO: 26216 - DNA, 20 bp, Artificial Sequence
  Description of Artificial Sequence: Synthetic oligonucleotide
  Target: LAMA2; (+) strand; PAM type: NNGRRT; PAM sequence: TTGAAT
gaaggtatttggaactatgg

SEQ ID NO: 26217 - DNA, 20 bp, Artificial Sequence
  Description of Artificial Sequence: Synthetic oligonucleotide
  Target: LAMA2; (+) strand; PAM type: NNGRRT; PAM sequence: GGGGGT
actatggttgaatcttttct

SEQ ID NO: 26218 - DNA, 20 bp, Artificial Sequence
  Description of Artificial Sequence: Synthetic oligonucleotide
  Target: LAMA2; (+) strand; PAM type: NNGRRT; PAM sequence: TAGAGT
tctgggggtattgatgggac

SEQ ID NO: 26219 - DNA, 20 bp, Artificial Sequence
  Description of Artificial Sequence: Synthetic oligonucleotide
  Target: LAMA2; (+) strand; PAM type: NNGRRT; PAM sequence: CAGGAT
ggtattgatgggactagagt

SEQ ID NO: 26220 - DNA, 20 bp, Artificial Sequence
  Description of Artificial Sequence: Synthetic oligonucleotide
  Target: LAMA2; (+) strand; PAM type: NNGRRT; PAM sequence: GTGGAT
gggactagagtcaggatgag

SEQ ID NO: 26221 - DNA, 20 bp, Artificial Sequence
  Description of Artificial Sequence: Synthetic oligonucleotide
  Target: LAMA2; (+) strand; PAM type: NNGRRT; PAM sequence: GAGAGT
tactttcatctgtatgactt

SEQ ID NO: 26222 - DNA, 20 bp, Artificial Sequence
  Description of Artificial Sequence: Synthetic oligonucleotide
  Target: LAMA2; (+) strand; PAM type: NNGRRT; PAM sequence: AAGGAT
ttaaaaaaaatgaaattgga

SEQ ID NO: 26223 - DNA, 20 bp, Artificial Sequence
  Description of Artificial Sequence: Synthetic oligonucleotide
  Target: LAMA2; (+) strand; PAM type: NNGRRT; PAM sequence: CTGAAT
cttgagatatacaatttcaa

SEQ ID NO: 26224 - DNA, 20 bp, Artificial Sequence
  Description of Artificial Sequence: Synthetic oligonucleotide
  Target: LAMA2; (+) strand; PAM type: NNGRRT; PAM sequence: CAGAGT
caactgaatggcaactatga

SEQ ID NO: 26225 - DNA, 20 bp, Artificial Sequence
  Description of Artificial Sequence: Synthetic oligonucleotide
  Target: LAMA2; (+) strand; PAM type: NNGRRT; PAM sequence: CAGGAT
cattagagctcatttgagag

SEQ ID NO: 26226 - DNA, 20 bp, Artificial Sequence
  Description of Artificial Sequence: Synthetic oligonucleotide
  Target: LAMA2; (+) strand; PAM type: NNGRRT; PAM sequence: GAGAGT
gagaaggacactgataataa

SEQ ID NO: 26227 - DNA, 20 bp, Artificial Sequence
  Description of Artificial Sequence: Synthetic oligonucleotide
  Target: LAMA2; (+) strand; PAM type: NNGRRT; PAM sequence: CAGGAT
ctttataatttttcttttgc

SEQ ID NO: 26228 - DNA, 20 bp, Artificial Sequence
  Description of Artificial Sequence: Synthetic oligonucleotide
  Target: LAMA2; (+) strand; PAM type: NNGRRT; PAM sequence: TTGAAT
tgccaggatccttataatcc

SEQ ID NO: 26229 - DNA, 20 bp, Artificial Sequence
  Description of Artificial Sequence: Synthetic oligonucleotide
  Target: LAMA2; (+) strand; PAM type: NNGRRT; PAM sequence: GAGAGT
ccttaggcagtgttaattat

SEQ ID NO: 26230 - DNA, 20 bp, Artificial Sequence
  Description of Artificial Sequence: Synthetic oligonucleotide
  Target: LAMA2; (+) strand; PAM type: NNGRRT; PAM sequence: CCGAGT
gtgttaattatgagagtttg

SEQ ID NO: 26231 - DNA, 20 bp, Artificial Sequence
  Description of Artificial Sequence: Synthetic oligonucleotide
  Target: LAMA2; (+) strand; PAM type: NNGRRT; PAM sequence: GGGAAT
agtttgccgagtttcttctt

SEQ ID NO: 26232 - DNA, 20 bp, Artificial Sequence
  Description of Artificial Sequence: Synthetic oligonucleotide
  Target: LAMA2; (+) strand; PAM type: NNGRRT; PAM sequence: GAGAAT
gagtttcttcttgggaattt

SEQ ID NO: 26233 - DNA, 20 bp, Artificial Sequence
  Description of Artificial Sequence: Synthetic oligonucleotide
  Target: LAMA2; (+) strand; PAM type: NNGRRT; PAM sequence: AAGGAT
ttcttgggaatttgagaata

SEQ ID NO: 26234 - DNA, 20 bp, Artificial Sequence
  Description of Artificial Sequence: Synthetic oligonucleotide
  Target: LAMA2; (+) strand; PAM type: NNGRRT; PAM sequence: GTGGGT
aaggatgcgggaaagaggag

SEQ ID NO: 26235 - DNA, 20 bp, Artificial Sequence
  Description of Artificial Sequence: Synthetic oligonucleotide
  Target: LAMA2; (+) strand; PAM type: NNGRRT; PAM sequence: GAGGAT
cgggaaagaggaggtgggtg

SEQ ID NO: 26236 - DNA, 20 bp, Artificial Sequence
  Description of Artificial Sequence: Synthetic oligonucleotide
  Target: LAMA2; (+) strand; PAM type: NNGRRT; PAM sequence: ATGGAT
aaagaggaggtgggtggagg

SEQ ID NO: 26237 - DNA, 20 bp, Artificial Sequence
  Description of Artificial Sequence: Synthetic oligonucleotide
  Target: LAMA2; (+) strand; PAM type: NNGRRT; PAM sequence: AAGAAT
aaggcatttcagattaccag

SEQ ID NO: 26238 - DNA, 20 bp, Artificial Sequence
  Description of Artificial Sequence: Synthetic oligonucleotide
  Target: LAMA2; (+) strand; PAM type: NNGRRT; PAM sequence: TAGGGT
gacaagggaccatttagcca

SEQ ID NO: 26239 - DNA, 20 bp, Artificial Sequence
  Description of Artificial Sequence: Synthetic oligonucleotide
  Target: LAMA2; (+) strand; PAM type: NNGRRT; PAM sequence: GGGAGT
tgaaagtgcttagctaccat

SEQ ID NO: 26240 - DNA, 20 bp, Artificial Sequence
  Description of Artificial Sequence: Synthetic oligonucleotide
  Target: LAMA2; (+) strand; PAM type: NNGRRT; PAM sequence: GTGGAT
agtgcttagctaccatggga

SEQ ID NO: 26241 - DNA, 20 bp, Artificial Sequence
  Description of Artificial Sequence: Synthetic oligonucleotide
  Target: LAMA2; (+) strand; PAM type: NNGRRT; PAM sequence: TGGAGT
ttagctaccatgggagtgga

SEQ ID NO: 26242 - DNA, 20 bp, Artificial Sequence
  Description of Artificial Sequence: Synthetic oligonucleotide
  Target: LAMA2; (+) strand; PAM type: NNGRRT; PAM sequence: GGGAAT
ccccatccataagggaccct

SEQ ID NO: 26243 - DNA, 20 bp, Artificial Sequence
  Description of Artificial Sequence: Synthetic oligonucleotide
  Target: LAMA2; (+) strand; PAM type: NNGRRT; PAM sequence: GTGAGT
cagtcgccagcccaatcaag

SEQ ID NO: 26244 - DNA, 20 bp, Artificial Sequence
  Description of Artificial Sequence: Synthetic oligonucleotide
  Target: LAMA2; (+) strand; PAM type: NNGRRT; PAM sequence: TAGAGT
cacagtatgctagttggcct

SEQ ID NO: 26245 - DNA, 20 bp, Artificial Sequence
  Description of Artificial Sequence: Synthetic oligonucleotide
  Target: LAMA2; (+) strand; PAM type: NNGRRT; PAM sequence: CAGGGT
tagttggccttagagtaata

SEQ ID NO: 26246 - DNA, 20 bp, Artificial Sequence
  Description of Artificial Sequence: Synthetic oligonucleotide
  Target: LAMA2; (+) strand; PAM type: NNGRRT; PAM sequence: AAGAGT
gtgtccttgcatcgtatgaa

SEQ ID NO: 26247 - DNA, 20 bp, Artificial Sequence
  Description of Artificial Sequence: Synthetic oligonucleotide
  Target: LAMA2; (+) strand; PAM type: NNGRRT; PAM sequence: CAGAAT
aaaagagttgcttgaaatca

SEQ ID NO: 26248 - DNA, 20 bp, Artificial Sequence
  Description of Artificial Sequence: Synthetic oligonucleotide
  Target: LAMA2; (+) strand; PAM type: NNGRRT; PAM sequence: TAGGAT
aaatcaattatttaggtaaa

SEQ ID NO: 26249 - DNA, 20 bp, Artificial Sequence
  Description of Artificial Sequence: Synthetic oligonucleotide
  Target: LAMA2; (+) strand; PAM type: NNGRRT; PAM sequence: TAGAGT
actcaaacactcagacctat

SEQ ID NO: 26250 - DNA, 20 bp, Artificial Sequence
  Description of Artificial Sequence: Synthetic oligonucleotide
  Target: LAMA2; (+) strand; PAM type: NNGRRT; PAM sequence: TGGAAT
ataaatatggaaccatcttg

SEQ ID NO: 26251 - DNA, 20 bp, Artificial Sequence
  Description of Artificial Sequence: Synthetic oligonucleotide
  Target: LAMA2; (+) strand; PAM type: NNGRRT; PAM sequence: AGGAGT
aatttcagttaaaggtttta

SEQ ID NO: 26252 - DNA, 20 bp, Artificial Sequence
  Description of Artificial Sequence: Synthetic oligonucleotide
  Target: LAMA2; (+) strand; PAM type: NNGRRT; PAM sequence: TGGGAT
aaatgtattcaattatatta

SEQ ID NO: 26253 - DNA, 20 bp, Artificial Sequence
  Description of Artificial Sequence: Synthetic oligonucleotide
  Target: LAMA2; (+) strand; PAM type: NNGRRT; PAM sequence: CTGGGT
ccccaaagttaatatatttc

SEQ ID NO: 26254 - DNA, 20 bp, Artificial Sequence
  Description of Artificial Sequence: Synthetic oligonucleotide
  Target: LAMA2; (+) strand; PAM type: NNGRRT; PAM sequence: GTGGGT
gttccagtggaaatgagcct

SEQ ID NO: 26255 - DNA, 20 bp, Artificial Sequence
  Description of Artificial Sequence: Synthetic oligonucleotide
  Target: LAMA2; (+) strand; PAM type: NNGRRT; PAM sequence: TTGAAT
tatggactattttattaact

SEQ ID NO: 26256 - DNA, 20 bp, Artificial Sequence
  Description of Artificial Sequence: Synthetic oligonucleotide
  Target: LAMA2; (+) strand; PAM type: NNGRRT; PAM sequence: ATGAGT
ctgctttgtgacacaattta

SEQ ID NO: 26257 - DNA, 20 bp, Artificial Sequence
  Description of Artificial Sequence: Synthetic oligonucleotide
  Target: LAMA2; (+) strand; PAM type: NNGRRT; PAM sequence: AGGAGT
ttttttttttttttttgaga

SEQ ID NO: 26258 - DNA, 20 bp, Artificial Sequence
  Description of Artificial Sequence: Synthetic oligonucleotide
  Target: LAMA2; (+) strand; PAM type: NNGRRT; PAM sequence: TGGAGT
tctcactctgttgcccaggc

SEQ ID NO: 26259 - DNA, 20 bp, Artificial Sequence
  Description of Artificial Sequence: Synthetic oligonucleotide
  Target: LAMA2; (+) strand; PAM type: NNGRRT; PAM sequence: ACGGGT
ttcactgcaagctccgcctc

SEQ ID NO: 26260 - DNA, 20 bp, Artificial Sequence
  Description of Artificial Sequence: Synthetic oligonucleotide
  Target: LAMA2; (+) strand; PAM type: NNGRRT; PAM sequence: CGGAGT
cattctcctgcctcggcctc

SEQ ID NO: 26261 - DNA, 20 bp, Artificial Sequence
  Description of Artificial Sequence: Synthetic oligonucleotide
  Target: LAMA2; (+) strand; PAM type: NNGRRT; PAM sequence: CAGGAT
cgaggtttcactgtgttagc

SEQ ID NO: 26262 - DNA, 20 bp, Artificial Sequence
  Description of Artificial Sequence: Synthetic oligonucleotide
  Target: LAMA2; (+) strand; PAM type: NNGRRT; PAM sequence: TGGGAT
gcctctgcctcccaaagtgc

SEQ ID NO: 26263 - DNA, 20 bp, Artificial Sequence
  Description of Artificial Sequence: Synthetic oligonucleotide
  Target: LAMA2; (+) strand; PAM type: NNGRRT; PAM sequence: ATGAGT
ctgagccatcgcgcctggcc

SEQ ID NO: 26264 - DNA, 20 bp, Artificial Sequence
  Description of Artificial Sequence: Synthetic oligonucleotide
  Target: LAMA2; (+) strand; PAM type: NNGRRT; PAM sequence: ATGAGT
ataaaaataaatagcaaatg

SEQ ID NO: 26265 - DNA, 20 bp, Artificial Sequence
  Description of Artificial Sequence: Synthetic oligonucleotide
  Target: LAMA2; (+) strand; PAM type: NNGRRT; PAM sequence: CAGAAT
accatatggcagaaaaacaa

SEQ ID NO: 26266 - DNA, 20 bp, Artificial Sequence
  Description of Artificial Sequence: Synthetic oligonucleotide
  Target: LAMA2; (+) strand; PAM type: NNGRRT; PAM sequence: AAGAGT
gaaaaacaacagaatcttag

SEQ ID NO: 26267 - DNA, 20 bp, Artificial Sequence
  Description of Artificial Sequence: Synthetic oligonucleotide
  Target: LAMA2; (+) strand; PAM type: NNGRRT; PAM sequence: GAGAAT
agatttttaaagatgagcag

SEQ ID NO: 26268 - DNA, 20 bp, Artificial Sequence
  Description of Artificial Sequence: Synthetic oligonucleotide
  Target: LAMA2; (+) strand; PAM type: NNGRRT; PAM sequence: TGGGGT
caggcaaataaaacttgcag

SEQ ID NO: 26269 - DNA, 20 bp, Artificial Sequence
  Description of Artificial Sequence: Synthetic oligonucleotide
  Target: LAMA2; (+) strand; PAM type: NNGRRT; PAM sequence: GGGAGT
ataaaacttgcagtggggtt

SEQ ID NO: 26270 - DNA, 20 bp, Artificial Sequence
  Description of Artificial Sequence: Synthetic oligonucleotide
  Target: LAMA2; (+) strand; PAM type: NNGRRT; PAM sequence: GTGGAT
tgcagtggggttgggagtag

SEQ ID NO: 26271 - DNA, 20 bp, Artificial Sequence
  Description of Artificial Sequence: Synthetic oligonucleotide
  Target: LAMA2; (+) strand; PAM type: NNGRRT; PAM sequence: GTGAAT
gatggaccatgatattccag

SEQ ID NO: 26272 - DNA, 20 bp, Artificial Sequence
  Description of Artificial Sequence: Synthetic oligonucleotide
  Target: LAMA2; (+) strand; PAM type: NNGRRT; PAM sequence: TGGAAT
ttcaggaactgaaagaaatt

SEQ ID NO: 26273 - DNA, 20 bp, Artificial Sequence
  Description of Artificial Sequence: Synthetic oligonucleotide
  Target: LAMA2; (+) strand; PAM type: NNGRRT; PAM sequence: TGGAAT
tgaaagaaatttggaatgct

SEQ ID NO: 26274 - DNA, 20 bp, Artificial Sequence
  Description of Artificial Sequence: Synthetic oligonucleotide
  Target: LAMA2; (+) strand; PAM type: NNGRRT; PAM sequence: AGGGAT
atggaggacaaagaggcagc

SEQ ID NO: 26275 - DNA, 20 bp, Artificial Sequence
  Description of Artificial Sequence: Synthetic oligonucleotide
  Target: LAMA2; (+) strand; PAM type: NNGRRT; PAM sequence: TTGAAT
gtctccacccagatctcatc

SEQ ID NO: 26276 - DNA, 20 bp, Artificial Sequence
  Description of Artificial Sequence: Synthetic oligonucleotide
  Target: LAMA2; (+) strand; PAM type: NNGRRT; PAM sequence: AAGGGT
ttgcagttcccacaattccc

SEQ ID NO: 26277 - DNA, 20 bp, Artificial Sequence
  Description of Artificial Sequence: Synthetic oligonucleotide
  Target: LAMA2; (+) strand; PAM type: NNGRRT; PAM sequence: GTGAAT
cccatgcttttctcatgata

SEQ ID NO: 26278 - DNA, 20 bp, Artificial Sequence
  Description of Artificial Sequence: Synthetic oligonucleotide
  Target: LAMA2; (+) strand; PAM type: NNGRRT; PAM sequence: GAGAGT
gatctgatgattttataaag

SEQ ID NO: 26279 - DNA, 20 bp, Artificial Sequence
  Description of Artificial Sequence: Synthetic oligonucleotide
  Target: LAMA2; (+) strand; PAM type: NNGRRT; PAM sequence: TGGAAT
gtgaggcctccccagccatg

SEQ ID NO: 26280 - DNA, 20 bp, Artificial Sequence
  Description of Artificial Sequence: Synthetic oligonucleotide
  Target: LAMA2; (+) strand; PAM type: NNGRRT; PAM sequence: GTGAGT
ctccccagccatgtggaatt

SEQ ID NO: 26281 - DNA, 20 bp, Artificial Sequence
  Description of Artificial Sequence: Synthetic oligonucleotide
  Target: LAMA2; (+) strand; PAM type: NNGRRT; PAM sequence: TTGGGT
cctttataaattaccctgtc

SEQ ID NO: 26282 - DNA, 20 bp, Artificial Sequence
  Description of Artificial Sequence: Synthetic oligonucleotide
  Target: LAMA2; (+) strand; PAM type: NNGRRT; PAM sequence: GAGAAT
tatttctttattagcagcat

SEQ ID NO: 26283 - DNA, 20 bp, Artificial Sequence
  Description of Artificial Sequence: Synthetic oligonucleotide
  Target: LAMA2; (+) strand; PAM type: NNGRRT; PAM sequence: ATGGAT
tctttattagcagcatgaga

SEQ ID NO: 26284 - DNA, 20 bp, Artificial Sequence
  Description of Artificial Sequence: Synthetic oligonucleotide
  Target: LAMA2; (+) strand; PAM type: NNGRRT; PAM sequence: AAGAGT
aatacaaggcattagaggga

SEQ ID NO: 26285 - DNA, 20 bp, Artificial Sequence
  Description of Artificial Sequence: Synthetic oligonucleotide
  Target: LAMA2; (+) strand; PAM type: NNGRRT; PAM sequence: GTGAGT
acgctttgtgagccttgtta

SEQ ID NO: 26286 - DNA, 20 bp, Artificial Sequence
  Description of Artificial Sequence: Synthetic oligonucleotide
  Target: LAMA2; (+) strand; PAM type: NNGRRT; PAM sequence: ATGAAT
ctctaactgcaatgtggaaa

SEQ ID NO: 26287 - DNA, 20 bp, Artificial Sequence
  Description of Artificial Sequence: Synthetic oligonucleotide
  Target: LAMA2; (+) strand; PAM type: NNGRRT; PAM sequence: AAGGAT
agaagaggaaaattcattaa

SEQ ID NO: 26288 - DNA, 20 bp, Artificial Sequence
  Description of Artificial Sequence: Synthetic oligonucleotide
  Target: LAMA2; (+) strand; PAM type: NNGRRT; PAM sequence: AGGGAT
aaaggatgtgaagtaattaa

SEQ ID NO: 26289 - DNA, 20 bp, Artificial Sequence
  Description of Artificial Sequence: Synthetic oligonucleotide
  Target: LAMA2; (+) strand; PAM type: NNGRRT; PAM sequence: TAGGAT
gtgaagtaattaaagggatt

SEQ ID NO: 26290 - DNA, 20 bp, Artificial Sequence
  Description of Artificial Sequence: Synthetic oligonucleotide
  Target: LAMA2; (+) strand; PAM type: NNGRRT; PAM sequence: GGGAAT
tgaactaagatggtggcagt

SEQ ID NO: 26291 - DNA, 20 bp, Artificial Sequence
  Description of Artificial Sequence: Synthetic oligonucleotide
  Target: LAMA2; (+) strand; PAM type: NNGRRT; PAM sequence: ATGAAT
ctaagatggtggcagtggga

SEQ ID NO: 26292 - DNA, 20 bp, Artificial Sequence
  Description of Artificial Sequence: Synthetic oligonucleotide
  Target: LAMA2; (+) strand; PAM type: NNGRRT; PAM sequence: ATGAAT
tggcagtgggaatgaataat

SEQ ID NO: 26293 - DNA, 20 bp, Artificial Sequence
  Description of Artificial Sequence: Synthetic oligonucleotide
  Target: LAMA2; (+) strand; PAM type: NNGRRT; PAM sequence: CAGGAT
gaataatatgaatggactga

SEQ ID NO: 26294 - DNA, 20 bp, Artificial Sequence
  Description of Artificial Sequence: Synthetic oligonucleotide
  Target: LAMA2; (+) strand; PAM type: NNGRRT; PAM sequence: GAGAGT
tgttggtagcattagatata

SEQ ID NO: 26295 - DNA, 20 bp, Artificial Sequence
  Description of Artificial Sequence: Synthetic oligonucleotide
  Target: LAMA2; (+) strand; PAM type: NNGRRT; PAM sequence: AAGAAT
gatacatctggagaggaaac

SEQ ID NO: 26296 - DNA, 20 bp, Artificial Sequence
  Description of Artificial Sequence: Synthetic oligonucleotide
  Target: LAMA2; (+) strand; PAM type: NNGRRT; PAM sequence: TTGAGT
ctcaagtgtcccagtggcag

SEQ ID NO: 26297 - DNA, 20 bp, Artificial Sequence
  Description of Artificial Sequence: Synthetic oligonucleotide
  Target: LAMA2; (+) strand; PAM type: NNGRRT; PAM sequence: TAGAGT
cccagtggcagttgagtatt

SEQ ID NO: 26298 - DNA, 20 bp, Artificial Sequence
  Description of Artificial Sequence: Synthetic oligonucleotide
  Target: LAMA2; (+) strand; PAM type: NNGRRT; PAM sequence: GGGAAT
ctagctggtgataatgattt

SEQ ID NO: 26299 - DNA, 20 bp, Artificial Sequence
  Description of Artificial Sequence: Synthetic oligonucleotide
  Target: LAMA2; (+) strand; PAM type: NNGRRT; PAM sequence: CAGGAT
gggaaatgggaggtaacatc

SEQ ID NO: 26300 - DNA, 20 bp, Artificial Sequence
  Description of Artificial Sequence: Synthetic oligonucleotide
  Target: LAMA2; (+) strand; PAM type: NNGRRT; PAM sequence: GAGGGT
gaggaagagatgctttgctt

SEQ ID NO: 26301 - DNA, 20 bp, Artificial Sequence
  Description of Artificial Sequence: Synthetic oligonucleotide
  Target: LAMA2; (+) strand; PAM type: NNGRRT; PAM sequence: AAGAAT
taaatttttctctttgagag

SEQ ID NO: 26302 - DNA, 20 bp, Artificial Sequence
  Description of Artificial Sequence: Synthetic oligonucleotide
  Target: LAMA2; (+) strand; PAM type: NNGRRT; PAM sequence: AGGAGT
agtggtatgtcactaatgaa

SEQ ID NO: 26303 - DNA, 20 bp, Artificial Sequence
  Description of Artificial Sequence: Synthetic oligonucleotide
  Target: LAMA2; (+) strand; PAM type: NNGRRT; PAM sequence: GTGAAT
actaatgaaaggagtgtgaa

SEQ ID NO: 26304 - DNA, 20 bp, Artificial Sequence
  Description of Artificial Sequence: Synthetic oligonucleotide
  Target: LAMA2; (+) strand; PAM type: NNGRRT; PAM sequence: ACGAAT
gtaaatatcataaatatcat

SEQ ID NO: 26305 - DNA, 20 bp, Artificial Sequence
  Description of Artificial Sequence: Synthetic oligonucleotide
  Target: LAMA2; (+) strand; PAM type: NNGRRT; PAM sequence: TGGGAT
atacgaatcctaagaaattc

SEQ ID NO: 26306 - DNA, 20 bp, Artificial Sequence
  Description of Artificial Sequence: Synthetic oligonucleotide
  Target: LAMA2; (+) strand; PAM type: NNGRRT; PAM sequence: AAGGAT
cctaagaaattctgggattt

SEQ ID NO: 26307 - DNA, 20 bp, Artificial Sequence
  Description of Artificial Sequence: Synthetic oligonucleotide
  Target: LAMA2; (+) strand; PAM type: NNGRRT; PAM sequence: ATGAGT
agaaattctgggatttaagg

SEQ ID NO: 26308 - DNA, 20 bp, Artificial Sequence
  Description of Artificial Sequence: Synthetic oligonucleotide
  Target: LAMA2; (+) strand; PAM type: NNGRRT; PAM sequence: TGGGGT
actgttcctgtcttctaaat

SEQ ID NO: 26309 - DNA, 20 bp, Artificial Sequence
  Description of Artificial Sequence: Synthetic oligonucleotide
  Target: LAMA2; (+) strand; PAM type: NNGRRT; PAM sequence: TTGGAT
atttgaccatattttcctcg

SEQ ID NO: 26310 - DNA, 20 bp, Artificial Sequence
  Description of Artificial Sequence: Synthetic oligonucleotide
  Target: LAMA2; (+) strand; PAM type: NNGRRT; PAM sequence: ATGGAT
tttcctcgttggatgtgttt

SEQ ID NO: 26311 - DNA, 20 bp, Artificial Sequence
  Description of Artificial Sequence: Synthetic oligonucleotide
  Target: LAMA2; (+) strand; PAM type: NNGRRT; PAM sequence: ATGAGT
cttatctggccttttttcct

SEQ ID NO: 26312 - DNA, 20 bp, Artificial Sequence
  Description of Artificial Sequence: Synthetic oligonucleotide
  Target: LAMA2; (+) strand; PAM type: NNGRRT; PAM sequence: TGGAGT
tcttgacgtgttgcccaggc

SEQ ID NO: 26313 - DNA, 20 bp, Artificial Sequence
  Description of Artificial Sequence: Synthetic oligonucleotide
  Target: LAMA2; (+) strand; PAM type: NNGRRT; PAM sequence: TGGGAT
gcctcagcctttcaaagtgc

SEQ ID NO: 26314 - DNA, 20 bp, Artificial Sequence
  Description of Artificial Sequence: Synthetic oligonucleotide
  Target: LAMA2; (+) strand; PAM type: NNGRRT; PAM sequence: CTGAAT
gtgtatactttatatttcac

SEQ ID NO: 26315 - DNA, 20 bp, Artificial Sequence
  Description of Artificial Sequence: Synthetic oligonucleotide
  Target: LAMA2; (+) strand; PAM type: NNGRRT; PAM sequence: CTGAGT
tcggttgagacaataatttt

SEQ ID NO: 26316 - DNA, 20 bp, Artificial Sequence
  Description of Artificial Sequence: Synthetic oligonucleotide
  Target: LAMA2; (+) strand; PAM type: NNGRRT; PAM sequence: CAGAGT
tttttttctcttgtttgcct

SEQ ID NO: 26317 - DNA, 20 bp, Artificial Sequence
  Description of Artificial Sequence: Synthetic oligonucleotide
  Target: LAMA2; (+) strand; PAM type: NNGRRT; PAM sequence: CAGAAT
tccctaggttggagccattg

SEQ ID NO: 26318 - DNA, 20 bp, Artificial Sequence
  Description of Artificial Sequence: Synthetic oligonucleotide
  Target: LAMA2; (+) strand; PAM type: NNGRRT; PAM sequence: ATGAGT
agctaagtactttcagcact

SEQ ID NO: 26319 - DNA, 20 bp, Artificial Sequence
  Description of Artificial Sequence: Synthetic oligonucleotide
  Target: LAMA2; (+) strand; PAM type: NNGRRT; PAM sequence: CGGAGT
tgtataagagaagataagta

SEQ ID NO: 26320 - DNA, 20 bp, Artificial Sequence
  Description of Artificial Sequence: Synthetic oligonucleotide
  Target: LAMA2; (+) strand; PAM type: NNGRRT; PAM sequence: TAGAAT
acggagttgtaaacctgcaa

SEQ ID NO: 26321 - DNA, 20 bp, Artificial Sequence
  Description of Artificial Sequence: Synthetic oligonucleotide
  Target: LAMA2; (+) strand; PAM type: NNGRRT; PAM sequence: CTGGAT
acctgcaatagaataatacc

SEQ ID NO: 26322 - DNA, 20 bp, Artificial Sequence
  Description of Artificial Sequence: Synthetic oligonucleotide
  Target: LAMA2; (+) strand; PAM type: NNGRRT; PAM sequence: ATGAGT
ctggatatccaccttcactg

SEQ ID NO: 26323 - DNA, 20 bp, Artificial Sequence
  Description of Artificial Sequence: Synthetic oligonucleotide
  Target: LAMA2; (+) strand; PAM type: NNGRRT; PAM sequence: GAGAGT
cctgttaaccaaatgctttt

SEQ ID NO: 26324 - DNA, 20 bp, Artificial Sequence
  Description of Artificial Sequence: Synthetic oligonucleotide
  Target: LAMA2; (+) strand; PAM type: NNGRRT; PAM sequence: CAGGGT
atgcttttgagagtcaaagg

SEQ ID NO: 26325 - DNA, 20 bp, Artificial Sequence
  Description of Artificial Sequence: Synthetic oligonucleotide
  Target: LAMA2; (+) strand; PAM type: NNGRRT; PAM sequence: AGGAAT
agtcaaaggcagggtctgag

SEQ ID NO: 26326 - DNA, 20 bp, Artificial Sequence
  Description of Artificial Sequence: Synthetic oligonucleotide
  Target: LAMA2; (+) strand; PAM type: NNGRRT; PAM sequence: ATGAAT
gggtctgagaggaattatca

SEQ ID NO: 26327 - DNA, 20 bp, Artificial Sequence
  Description of Artificial Sequence: Synthetic oligonucleotide
  Target: LAMA2; (+) strand; PAM type: NNGRRT; PAM sequence: ATGAAT
attatcaatgaatatttgta

SEQ ID NO: 26328 - DNA, 20 bp, Artificial Sequence
  Description of Artificial Sequence: Synthetic oligonucleotide
  Target: LAMA2; (+) strand; PAM type: NNGRRT; PAM sequence: GTGAAT
atgaatcattgaggtcgctt

SEQ ID NO: 26329 - DNA, 20 bp, Artificial Sequence
  Description of Artificial Sequence: Synthetic oligonucleotide
  Target: LAMA2; (+) strand; PAM type: NNGRRT; PAM sequence: AAGAAT
atattaaggctgtgtaggcc

SEQ ID NO: 26330 - DNA, 20 bp, Artificial Sequence
  Description of Artificial Sequence: Synthetic oligonucleotide
  Target: LAMA2; (+) strand; PAM type: NNGRRT; PAM sequence: CCGGGT
ctcactgcaacattcgcctc

SEQ ID NO: 26331 - DNA, 20 bp, Artificial Sequence
  Description of Artificial Sequence: Synthetic oligonucleotide
  Target: LAMA2; (+) strand; PAM type: NNGRRT; PAM sequence: CTGAGT
gattcacttgcctcagcctc

SEQ ID NO: 26332 - DNA, 20 bp, Artificial Sequence
  Description of Artificial Sequence: Synthetic oligonucleotide
  Target: LAMA2; (+) strand; PAM type: NNGRRT; PAM sequence: TGGGAT
gcctcagcctcctgagtagc

SEQ ID NO: 26333 - DNA, 20 bp, Artificial Sequence
  Description of Artificial Sequence: Synthetic oligonucleotide
  Target: LAMA2; (+) strand; PAM type: NNGRRT; PAM sequence: TGGGAT
gcctgagcctcccaaagtgc

SEQ ID NO: 26334 - DNA, 20 bp, Artificial Sequence
  Description of Artificial Sequence: Synthetic oligonucleotide
  Target: LAMA2; (+) strand; PAM type: NNGRRT; PAM sequence: CAGGGT
acttgagaaaagataagaaa

SEQ ID NO: 26335 - DNA, 20 bp, Artificial Sequence
  Description of Artificial Sequence: Synthetic oligonucleotide
  Target: LAMA2; (+) strand; PAM type: NNGRRT; PAM sequence: AAGAAT
tctgaggaagtgactcttgg

SEQ ID NO: 26336 - DNA, 20 bp, Artificial Sequence
  Description of Artificial Sequence: Synthetic oligonucleotide
  Target: LAMA2; (+) strand; PAM type: NNGRRT; PAM sequence: TCGGGT
taagagctaggtgggcaaat

SEQ ID NO: 26337 - DNA, 20 bp, Artificial Sequence
  Description of Artificial Sequence: Synthetic oligonucleotide
  Target: LAMA2; (+) strand; PAM type: NNGRRT; PAM sequence: TGGAAT
tataaaaatgtcattgtggc

SEQ ID NO: 26338 - DNA, 20 bp, Artificial Sequence
  Description of Artificial Sequence: Synthetic oligonucleotide
  Target: LAMA2; (+) strand; PAM type: NNGRRT; PAM sequence: AAGAGT
ggaatgcaaagatgaaggga

SEQ ID NO: 26339 - DNA, 20 bp, Artificial Sequence
  Description of Artificial Sequence: Synthetic oligonucleotide
  Target: LAMA2; (+) strand; PAM type: NNGRRT; PAM sequence: TTGAAT
caaagatgaagggaaagagt

SEQ ID NO: 26340 - DNA, 20 bp, Artificial Sequence
  Description of Artificial Sequence: Synthetic oligonucleotide
  Target: LAMA2; (+) strand; PAM type: NNGRRT; PAM sequence: AGGGAT
gaaagagtttgaattgagga

SEQ ID NO: 26341 - DNA, 20 bp, Artificial Sequence
  Description of Artificial Sequence: Synthetic oligonucleotide
  Target: LAMA2; (+) strand; PAM type: NNGRRT; PAM sequence: AAGGAT
aggaagggatcagagcatgc

SEQ ID NO: 26342 - DNA, 20 bp, Artificial Sequence
  Description of Artificial Sequence: Synthetic oligonucleotide
  Target: LAMA2; (+) strand; PAM type: NNGRRT; PAM sequence: AAGAAT
aaggatttaaagattacttt

SEQ ID NO: 26343 - DNA, 20 bp, Artificial Sequence
  Description of Artificial Sequence: Synthetic oligonucleotide
  Target: LAMA2; (+) strand; PAM type: NNGRRT; PAM sequence: TTGGGT
cattaaatgatgtttgccac

SEQ ID NO: 26344 - DNA, 20 bp, Artificial Sequence
  Description of Artificial Sequence: Synthetic oligonucleotide
  Target: LAMA2; (+) strand; PAM type: NNGRRT; PAM sequence: GTGAGT
gatataaacaatatgtatgt

SEQ ID NO: 26345 - DNA, 20 bp, Artificial Sequence
  Description of Artificial Sequence: Synthetic oligonucleotide
  Target: LAMA2; (+) strand; PAM type: NNGRRT; PAM sequence: AGGGAT
gtctccgtttgaactagtgc

SEQ ID NO: 26346 - DNA, 20 bp, Artificial Sequence
  Description of Artificial Sequence: Synthetic oligonucleotide
  Target: LAMA2; (+) strand; PAM type: NNGRRT; PAM sequence: TCGGGT
tgtactttagacattgaaaa

SEQ ID NO: 26347 - DNA, 20 bp, Artificial Sequence
  Description of Artificial Sequence: Synthetic oligonucleotide
  Target: LAMA2; (+) strand; PAM type: NNGRRT; PAM sequence: AGGAGT
gtaactaggtactagaggaa

SEQ ID NO: 26348 - DNA, 20 bp, Artificial Sequence
  Description of Artificial Sequence: Synthetic oligonucleotide
  Target: LAMA2; (+) strand; PAM type: NNGRRT; PAM sequence: AGGGAT
gtgctaagaaaatgttcaaa

SEQ ID NO: 26349 - DNA, 20 bp, Artificial Sequence
  Description of Artificial Sequence: Synthetic oligonucleotide
  Target: LAMA2; (+) strand; PAM type: NNGRRT; PAM sequence: TTGAGT
gactctgtagttgcaaagta

SEQ ID NO: 26350 - DNA, 20 bp, Artificial Sequence
  Description of Artificial Sequence: Synthetic oligonucleotide
  Target: LAMA2; (+) strand; PAM type: NNGRRT; PAM sequence: GTGGAT
gcaaagcttaacagactaag

SEQ ID NO: 26351 - DNA, 20 bp, Artificial Sequence
  Description of Artificial Sequence: Synthetic oligonucleotide
  Target: LAMA2; (+) strand; PAM type: NNGRRT; PAM sequence: TTGAGT
ttaatccagtgctaatttct

SEQ ID NO: 26352 - DNA, 20 bp, Artificial Sequence
  Description of Artificial Sequence: Synthetic oligonucleotide
  Target: LAMA2; (+) strand; PAM type: NNGRRT; PAM sequence: TGGAAT
ccagtgtatttaaaatattt

SEQ ID NO: 26353 - DNA, 20 bp, Artificial Sequence
  Description of Artificial Sequence: Synthetic oligonucleotide
  Target: LAMA2; (+) strand; PAM type: NNGRRT; PAM sequence: AGGAAT
catagtcagcagggggctcc

SEQ ID NO: 26354 - DNA, 20 bp, Artificial Sequence
  Description of Artificial Sequence: Synthetic oligonucleotide
  Target: LAMA2; (+) strand; PAM type: NNGRRT; PAM sequence: TAGAAT
ctaacacttggtgtgcattt

SEQ ID NO: 26355 - DNA, 20 bp, Artificial Sequence
  Description of Artificial Sequence: Synthetic oligonucleotide
  Target: LAMA2; (+) strand; PAM type: NNGRRT; PAM sequence: TAGGGT
atgtgtaggtgaaatttttg

SEQ ID NO: 26356 - DNA, 20 bp, Artificial Sequence
  Description of Artificial Sequence: Synthetic oligonucleotide
  Target: LAMA2; (+) strand; PAM type: NNGRRT; PAM sequence: TGGAAT
agaaggcaagaggttctctt

SEQ ID NO: 26357 - DNA, 20 bp, Artificial Sequence
  Description of Artificial Sequence: Synthetic oligonucleotide
  Target: LAMA2; (+) strand; PAM type: NNGRRT; PAM sequence: TGGAAT
tgtgtgtggaacatttctca

SEQ ID NO: 26358 - DNA, 20 bp, Artificial Sequence
  Description of Artificial Sequence: Synthetic oligonucleotide
  Target: LAMA2; (+) strand; PAM type: NNGRRT; PAM sequence: ATGGGT
ggaacatttctcatggaata

SEQ ID NO: 26359 - DNA, 20 bp, Artificial Sequence
  Description of Artificial Sequence: Synthetic oligonucleotide
  Target: LAMA2; (+) strand; PAM type: NNGRRT; PAM sequence: AGGAAT
gctgtgcacatatctgctaa

SEQ ID NO: 26360 - DNA, 20 bp, Artificial Sequence
  Description of Artificial Sequence: Synthetic oligonucleotide
  Target: LAMA2; (+) strand; PAM type: NNGRRT; PAM sequence: AGGAGT
gcatgtccattttagaaagt

SEQ ID NO: 26361 - DNA, 20 bp, Artificial Sequence
  Description of Artificial Sequence: Synthetic oligonucleotide
  Target: LAMA2; (+) strand; PAM type: NNGRRT; PAM sequence: GCGAAT
aatgaaaataaacctgaaac

SEQ ID NO: 26362 - DNA, 20 bp, Artificial Sequence
  Description of Artificial Sequence: Synthetic oligonucleotide
  Target: LAMA2; (+) strand; PAM type: NNGRRT; PAM sequence: CAGGAT
tttggtcggcttctgtcacc

SEQ ID NO: 26363 - DNA, 20 bp, Artificial Sequence
  Description of Artificial Sequence: Synthetic oligonucleotide
  Target: LAMA2; (+) strand; PAM type: NNGRRT; PAM sequence: GAGAGT
aggataaacgtgaaactcct

SEQ ID NO: 26364 - DNA, 20 bp, Artificial Sequence
  Description of Artificial Sequence: Synthetic oligonucleotide
  Target: LAMA2; (+) strand; PAM type: NNGRRT; PAM sequence: TTGGAT
aaacgtgaaactcctgagag

SEQ ID NO: 26365 - DNA, 20 bp, Artificial Sequence
  Description of Artificial Sequence: Synthetic oligonucleotide
  Target: LAMA2; (+) strand; PAM type: NNGRRT; PAM sequence: AGGAGT
ccagcagatcacttgagctc

SEQ ID NO: 26366 - DNA, 20 bp, Artificial Sequence
  Description of Artificial Sequence: Synthetic oligonucleotide
  Target: LAMA2; (+) strand; PAM type: NNGRRT; PAM sequence: GAGGAT
tactcaggaggctgaggtgg

SEQ ID NO: 26367 - DNA, 20 bp, Artificial Sequence
  Description of Artificial Sequence: Synthetic oligonucleotide
  Target: LAMA2; (+) strand; PAM type: NNGRRT; PAM sequence: TTGAGT
ggctgaggtgggaggatccc

SEQ ID NO: 26368 - DNA, 20 bp, Artificial Sequence
  Description of Artificial Sequence: Synthetic oligonucleotide
  Target: LAMA2; (+) strand; PAM type: NNGRRT; PAM sequence: ATGAGT
ggctgtccctctaacatagc

SEQ ID NO: 26369 - DNA, 20 bp, Artificial Sequence
  Description of Artificial Sequence: Synthetic oligonucleotide
  Target: LAMA2; (+) strand; PAM type: NNGRRT; PAM sequence: AAGGAT
gcattgctccttgaggtagc

SEQ ID NO: 26370 - DNA, 20 bp, Artificial Sequence
  Description of Artificial Sequence: Synthetic oligonucleotide
  Target: LAMA2; (+) strand; PAM type: NNGRRT; PAM sequence: TTGAGT
tagatctcaaaaacataaca

SEQ ID NO: 26371 - DNA, 20 bp, Artificial Sequence
  Description of Artificial Sequence: Synthetic oligonucleotide
  Target: LAMA2; (+) strand; PAM type: NNGRRT; PAM sequence: GTGAAT
tctcaaaaacataacattga

SEQ ID NO: 26372 - DNA, 20 bp, Artificial Sequence
  Description of Artificial Sequence: Synthetic oligonucleotide
  Target: LAMA2; (+) strand; PAM type: NNGRRT; PAM sequence: TAGAAT
tgagtgaatatgccaatagg

SEQ ID NO: 26373 - DNA, 20 bp, Artificial Sequence
  Description of Artificial Sequence: Synthetic oligonucleotide
  Target: LAMA2; (+) strand; PAM type: NNGRRT; PAM sequence: ATGAGT
gtttaatttttgtcaatttt

SEQ ID NO: 26374 - DNA, 20 bp, Artificial Sequence
  Description of Artificial Sequence: Synthetic oligonucleotide
  Target: LAMA2; (+) strand; PAM type: NNGRRT; PAM sequence: TAGGGT
ttttattatactttaagttt

SEQ ID NO: 26375 - DNA, 20 bp, Artificial Sequence
  Description of Artificial Sequence: Synthetic oligonucleotide
  Target: LAMA2; (+) strand; PAM type: NNGRRT; PAM sequence: CAGAGT
ccccaccccacaacagtccc

SEQ ID NO: 26376 - DNA, 20 bp, Artificial Sequence
  Description of Artificial Sequence: Synthetic oligonucleotide
  Target: LAMA2; (+) strand; PAM type: NNGRRT; PAM sequence: ATGAGT
tcattgttcaattcccacct

SEQ ID NO: 26377 - DNA, 20 bp, Artificial Sequence
  Description of Artificial Sequence: Synthetic oligonucleotide
  Target: LAMA2; (+) strand; PAM type: NNGRRT; PAM sequence: GAGAAT
tgtccttgtgatagtttact

SEQ ID NO: 26378 - DNA, 20 bp, Artificial Sequence
  Description of Artificial Sequence: Synthetic oligonucleotide
  Target: LAMA2; (+) strand; PAM type: NNGRRT; PAM sequence: TTGGGT
agtctatcattgttgtacat

SEQ ID NO: 26379 - DNA, 20 bp, Artificial Sequence
  Description of Artificial Sequence: Synthetic oligonucleotide
  Target: LAMA2; (+) strand; PAM type: NNGRRT; PAM sequence: GTGAAT
ggttccaagtctttgctatt

SEQ ID NO: 26380 - DNA, 20 bp, Artificial Sequence
  Description of Artificial Sequence: Synthetic oligonucleotide
  Target: LAMA2; (+) strand; PAM type: NNGRRT; PAM sequence: TTGGGT
gcagcatgatttatagtcct

SEQ ID NO: 26381 - DNA, 20 bp, Artificial Sequence
  Description of Artificial Sequence: Synthetic oligonucleotide
  Target: LAMA2; (+) strand; PAM type: NNGRRT; PAM sequence: TGGGAT
tttgggtacatacccagtaa

SEQ ID NO: 26382 - DNA, 20 bp, Artificial Sequence
  Description of Artificial Sequence: Synthetic oligonucleotide
  Target: LAMA2; (+) strand; PAM type: NNGRRT; PAM sequence: CTGGGT
catacccagtaatgggatgg

SEQ ID NO: 26383 - DNA, 20 bp, Artificial Sequence
  Description of Artificial Sequence: Synthetic oligonucleotide
  Target: LAMA2; (+) strand; PAM type: NNGRRT; PAM sequence: AAGGGT
gtaatgggatggctgggtca

SEQ ID NO: 26384 - DNA, 20 bp, Artificial Sequence
  Description of Artificial Sequence: Synthetic oligonucleotide
  Target: LAMA2; (+) strand; PAM type: NNGRRT; PAM sequence: AGGAAT
tttctagttctagatccctg

SEQ ID NO: 26385 - DNA, 20 bp, Artificial Sequence
  Description of Artificial Sequence: Synthetic oligonucleotide
  Target: LAMA2; (+) strand; PAM type: NNGRRT; PAM sequence: ATGAAT
ctgcataaatgtcttctttg

SEQ ID NO: 26386 - DNA, 20 bp, Artificial Sequence
  Description of Artificial Sequence: Synthetic oligonucleotide
  Target: LAMA2; (+) strand; PAM type: NNGRRT; PAM sequence: CTGAAT
ccattcacatgttcccaact

SEQ ID NO: 26387 - DNA, 20 bp, Artificial Sequence
  Description of Artificial Sequence: Synthetic oligonucleotide
  Target: LAMA2; (+) strand; PAM type: NNGRRT; PAM sequence: GAGAAT
agtaaattcatgtttttcca

SEQ ID NO: 26388 - DNA, 20 bp, Artificial Sequence
  Description of Artificial Sequence: Synthetic oligonucleotide
  Target: LAMA2; (+) strand; PAM type: NNGRRT; PAM sequence: AAGAGT
catgtttttccagagaatga

SEQ ID NO: 26389 - DNA, 20 bp, Artificial Sequence
  Description of Artificial Sequence: Synthetic oligonucleotide
  Target: LAMA2; (+) strand; PAM type: NNGRRT; PAM sequence: GTGAAT
tttttccagagaatgaaaga

SEQ ID NO: 26390 - DNA, 20 bp, Artificial Sequence
  Description of Artificial Sequence: Synthetic oligonucleotide
  Target: LAMA2; (+) strand; PAM type: NNGRRT; PAM sequence: GGGAGT
ggccactgtcttgaggaaat

SEQ ID NO: 26391 - DNA, 20 bp, Artificial Sequence
  Description of Artificial Sequence: Synthetic oligonucleotide
  Target: LAMA2; (+) strand; PAM type: NNGRRT; PAM sequence: AAGAAT
cagtgtgattagtatagtgc

SEQ ID NO: 26392 - DNA, 20 bp, Artificial Sequence
  Description of Artificial Sequence: Synthetic oligonucleotide
  Target: LAMA2; (+) strand; PAM type: NNGRRT; PAM sequence: AAGGAT
atagtgcaagaatggtagga

SEQ ID NO: 26393 - DNA, 20 bp, Artificial Sequence
  Description of Artificial Sequence: Synthetic oligonucleotide
  Target: LAMA2; (+) strand; PAM type: NNGRRT; PAM sequence: TTGGAT
aaaacaccttgctaaaaagt

SEQ ID NO: 26394 - DNA, 20 bp, Artificial Sequence
  Description of Artificial Sequence: Synthetic oligonucleotide
  Target: LAMA2; (+) strand; PAM type: NNGRRT; PAM sequence: ATGGGT
atgtactgatggtccctgac

SEQ ID NO: 26395 - DNA, 20 bp, Artificial Sequence
  Description of Artificial Sequence: Synthetic oligonucleotide
  Target: LAMA2; (+) strand; PAM type: NNGRRT; PAM sequence: CTGAAT
gggtaacagctgctttagag

SEQ ID NO: 26396 - DNA, 20 bp, Artificial Sequence
  Description of Artificial Sequence: Synthetic oligonucleotide
  Target: LAMA2; (+) strand; PAM type: NNGRRT; PAM sequence: AAGAAT
ctgctttagagctgaatttc

SEQ ID NO: 26397 - DNA, 20 bp, Artificial Sequence
  Description of Artificial Sequence: Synthetic oligonucleotide
  Target: LAMA2; (+) strand; PAM type: NNGRRT; PAM sequence: ATGAGT
agaaatggtaatggcctgaa

SEQ ID NO: 26398 - DNA, 20 bp, Artificial Sequence
  Description of Artificial Sequence: Synthetic oligonucleotide
  Target: LAMA2; (+) strand; PAM type: NNGRRT; PAM sequence: GGGAGT
aatggcctgaaatgagtgga

SEQ ID NO: 26399 - DNA, 20 bp, Artificial Sequence
  Description of Artificial Sequence: Synthetic oligonucleotide
  Target: LAMA2; (+) strand; PAM type: NNGRRT; PAM sequence: CTGAAT
gttgccatttattggagaaa

SEQ ID NO: 26400 - DNA, 20 bp, Artificial Sequence
  Description of Artificial Sequence: Synthetic oligonucleotide
  Target: LAMA2; (+) strand; PAM type: NNGRRT; PAM sequence: AGGGAT
tattggagaaactgaatttc

SEQ ID NO: 26401 - DNA, 20 bp, Artificial Sequence
  Description of Artificial Sequence: Synthetic oligonucleotide
  Target: LAMA2; (+) strand; PAM type: NNGRRT; PAM sequence: TTGGAT
agaaactgaatttcagggat

SEQ ID NO: 26402 - DNA, 20 bp, Artificial Sequence
  Description of Artificial Sequence: Synthetic oligonucleotide
  Target: LAMA2; (+) strand; PAM type: NNGRRT; PAM sequence: CTGAAT
tcagaacctagtaaacattg

SEQ ID NO: 26403 - DNA, 20 bp, Artificial Sequence
  Description of Artificial Sequence: Synthetic oligonucleotide
  Target: LAMA2; (+) strand; PAM type: NNGRRT; PAM sequence: ATGAAT
taatacacaaaaagtataca

SEQ ID NO: 26404 - DNA, 20 bp, Artificial Sequence
  Description of Artificial Sequence: Synthetic oligonucleotide
  Target: LAMA2; (+) strand; PAM type: NNGRRT; PAM sequence: CAGAAT
gtcgtgtcttaccaattttg

SEQ ID NO: 26405 - DNA, 20 bp, Artificial Sequence
  Description of Artificial Sequence: Synthetic oligonucleotide
  Target: LAMA2; (+) strand; PAM type: NNGRRT; PAM sequence: TTGAAT
gtcttaccaattttgcagaa

SEQ ID NO: 26406 - DNA, 20 bp, Artificial Sequence
  Description of Artificial Sequence: Synthetic oligonucleotide
  Target: LAMA2; (+) strand; PAM type: NNGRRT; PAM sequence: GAGAAT
caaggttcttttgtagagat

SEQ ID NO: 26407 - DNA, 20 bp, Artificial Sequence
  Description of Artificial Sequence: Synthetic oligonucleotide
  Target: LAMA2; (+) strand; PAM type: NNGRRT; PAM sequence: GGGAGT
tccgtcctcagttttcctga

SEQ ID NO: 26408 - DNA, 20 bp, Artificial Sequence
  Description of Artificial Sequence: Synthetic oligonucleotide
  Target: LAMA2; (+) strand; PAM type: NNGRRT; PAM sequence: GGGAAT
aaattccatgtatccaccct

SEQ ID NO: 26409 - DNA, 20 bp, Artificial Sequence
  Description of Artificial Sequence: Synthetic oligonucleotide
  Target: LAMA2; (+) strand; PAM type: NNGRRT; PAM sequence: TTGAAT
ctgggaatcacttcactgcg

SEQ ID NO: 26410 - DNA, 20 bp, Artificial Sequence
  Description of Artificial Sequence: Synthetic oligonucleotide
  Target: LAMA2; (+) strand; PAM type: NNGRRT; PAM sequence: CTGGAT
atcacttcactgcgttgaat

SEQ ID NO: 26411 - DNA, 20 bp, Artificial Sequence
  Description of Artificial Sequence: Synthetic oligonucleotide
  Target: LAMA2; (+) strand; PAM type: NNGRRT; PAM sequence: ATGAAT
tggataggaaataaagattc

SEQ ID NO: 26412 - DNA, 20 bp, Artificial Sequence
  Description of Artificial Sequence: Synthetic oligonucleotide
  Target: LAMA2; (+) strand; PAM type: NNGRRT; PAM sequence: GTGGAT
tcactttcttgctcttccgt

SEQ ID NO: 26413 - DNA, 20 bp, Artificial Sequence
  Description of Artificial Sequence: Synthetic oligonucleotide
  Target: LAMA2; (+) strand; PAM type: NNGRRT; PAM sequence: CTGAAT
tgcccatgatgtgcatggtc

SEQ ID NO: 26414 - DNA, 20 bp, Artificial Sequence
  Description of Artificial Sequence: Synthetic oligonucleotide
  Target: LAMA2; (+) strand; PAM type: NNGRRT; PAM sequence: TGGAAT
gatgtgcatggtcctgaatg

SEQ ID NO: 26415 - DNA, 20 bp, Artificial Sequence
  Description of Artificial Sequence: Synthetic oligonucleotide
  Target: LAMA2; (+) strand; PAM type: NNGRRT; PAM sequence: ATGGGT
tgcatggtcctgaatgtgga

SEQ ID NO: 26416 - DNA, 20 bp, Artificial Sequence
  Description of Artificial Sequence: Synthetic oligonucleotide
  Target: LAMA2; (+) strand; PAM type: NNGRRT; PAM sequence: GTGGGT
atgggtctctctgaagaaaa

SEQ ID NO: 26417 - DNA, 20 bp, Artificial Sequence
  Description of Artificial Sequence: Synthetic oligonucleotide
  Target: LAMA2; (+) strand; PAM type: NNGRRT; PAM sequence: AAGGGT
tagcttcctggtctcttttg

SEQ ID NO: 26418 - DNA, 20 bp, Artificial Sequence
  Description of Artificial Sequence: Synthetic oligonucleotide
  Target: LAMA2; (+) strand; PAM type: NNGRRT; PAM sequence: AGGAGT
aggtcttttgatgttggggc

SEQ ID NO: 26419 - DNA, 20 bp, Artificial Sequence
  Description of Artificial Sequence: Synthetic oligonucleotide
  Target: LAMA2; (+) strand; PAM type: NNGRRT; PAM sequence: TGGAAT
ggcaggagtagacattttat

SEQ ID NO: 26420 - DNA, 20 bp, Artificial Sequence
  Description of Artificial Sequence: Synthetic oligonucleotide
  Target: LAMA2; (+) strand; PAM type: NNGRRT; PAM sequence: TTGAAT
caaaaatagagatgaaaaca

SEQ ID NO: 26421 - DNA, 20 bp, Artificial Sequence
  Description of Artificial Sequence: Synthetic oligonucleotide
  Target: LAMA2; (+) strand; PAM type: NNGRRT; PAM sequence: GGGGAT
cattgaatcatttttggtgg

SEQ ID NO: 26422 - DNA, 20 bp, Artificial Sequence
  Description of Artificial Sequence: Synthetic oligonucleotide
  Target: LAMA2; (+) strand; PAM type: NNGRRT; PAM sequence: TGGAAT
caactgttctcctttcccac

SEQ ID NO: 26423 - DNA, 20 bp, Artificial Sequence
  Description of Artificial Sequence: Synthetic oligonucleotide
  Target: LAMA2; (+) strand; PAM type: NNGRRT; PAM sequence: TAGAAT
aagtatgcatatctaaaagt

SEQ ID NO: 26424 - DNA, 20 bp, Artificial Sequence
  Description of Artificial Sequence: Synthetic oligonucleotide
  Target: LAMA2; (+) strand; PAM type: NNGRRT; PAM sequence: TAGAAT
ttcttttactatatattggc

SEQ ID NO: 26425 - DNA, 20 bp, Artificial Sequence
  Description of Artificial Sequence: Synthetic oligonucleotide
  Target: LAMA2; (+) strand; PAM type: NNGRRT; PAM sequence: TAGAAT
gactcttatttacctacagg

SEQ ID NO: 26426 - DNA, 20 bp, Artificial Sequence
  Description of Artificial Sequence: Synthetic oligonucleotide
  Target: LAMA2; (+) strand; PAM type: NNGRRT; PAM sequence: ATGAGT
tttcccagtttttagaaaaa

SEQ ID NO: 26427 - DNA, 20 bp, Artificial Sequence
  Description of Artificial Sequence: Synthetic oligonucleotide
  Target: LAMA2; (+) strand; PAM type: NNGRRT; PAM sequence: AAGAGT
ttgtctcatctttggttggt

SEQ ID NO: 26428 - DNA, 20 bp, Artificial Sequence
  Description of Artificial Sequence: Synthetic oligonucleotide
  Target: LAMA2; (+) strand; PAM type: NNGRRT; PAM sequence: TAGGAT
ttttcagtgttaagatgtgg

SEQ ID NO: 26429 - DNA, 20 bp, Artificial Sequence
  Description of Artificial Sequence: Synthetic oligonucleotide
  Target: LAMA2; (+) strand; PAM type: NNGRRT; PAM sequence: AAGGGT
cctggttccttatagtgaaa

SEQ ID NO: 26430 - DNA, 20 bp, Artificial Sequence
  Description of Artificial Sequence: Synthetic oligonucleotide
  Target: LAMA2; (+) strand; PAM type: NNGRRT; PAM sequence: GTGGAT
gttgtttctaggtcttttca

SEQ ID NO: 26431 - DNA, 20 bp, Artificial Sequence
  Description of Artificial Sequence: Synthetic oligonucleotide
  Target: LAMA2; (+) strand; PAM type: NNGRRT; PAM sequence: AGGAAT
ttattctgacatgcccattt

SEQ ID NO: 26432 - DNA, 20 bp, Artificial Sequence
  Description of Artificial Sequence: Synthetic oligonucleotide
  Target: LAMA2; (+) strand; PAM type: NNGRRT; PAM sequence: TAGGGT
taatgtgtaaccattttatt

SEQ ID NO: 26433 - DNA, 20 bp, Artificial Sequence
  Description of Artificial Sequence: Synthetic oligonucleotide
  Target: LAMA2; (+) strand; PAM type: NNGRRT; PAM sequence: AAGAAT
tttgtttaaacagtccgctt

SEQ ID NO: 26434 - DNA, 20 bp, Artificial Sequence
  Description of Artificial Sequence: Synthetic oligonucleotide
  Target: LAMA2; (+) strand; PAM type: NNGRRT; PAM sequence: TAGGAT
gctttttgtcattgcatctt

SEQ ID NO: 26435 - DNA, 20 bp, Artificial Sequence
  Description of Artificial Sequence: Synthetic oligonucleotide
  Target: LAMA2; (+) strand; PAM type: NNGRRT; PAM sequence: CAGAGT
ttttttttttttttttgagg

SEQ ID NO: 26436 - DNA, 20 bp, Artificial Sequence
  Description of Artificial Sequence: Synthetic oligonucleotide
  Target: LAMA2; (+) strand; PAM type: NNGRRT; PAM sequence: TGGAGT
tctctctctgtcacccaggc

SEQ ID NO: 26437 - DNA, 20 bp, Artificial Sequence
  Description of Artificial Sequence: Synthetic oligonucleotide
  Target: LAMA2; (+) strand; PAM type: NNGRRT; PAM sequence: CAGGAT
cccaggctggagtgcagtgg

SEQ ID NO: 26438 - DNA, 20 bp, Artificial Sequence
  Description of Artificial Sequence: Synthetic oligonucleotide
  Target: LAMA2; (+) strand; PAM type: NNGRRT; PAM sequence: GTGAGT
ctcttgcttcccaggttcaa

SEQ ID NO: 26439 - DNA, 20 bp, Artificial Sequence
  Description of Artificial Sequence: Synthetic oligonucleotide
  Target: LAMA2; (+) strand; PAM type: NNGRRT; PAM sequence: ACGGGT
ttttcgcatttttggtagag

SEQ ID NO: 26440 - DNA, 20 bp, Artificial Sequence
  Description of Artificial Sequence: Synthetic oligonucleotide
  Target: LAMA2; (+) strand; PAM type: NNGRRT; PAM sequence: TGGGAT
tggtctcaaagtcctgacct

SEQ ID NO: 26441 - DNA, 20 bp, Artificial Sequence
  Description of Artificial Sequence: Synthetic oligonucleotide
  Target: LAMA2; (+) strand; PAM type: NNGRRT; PAM sequence: TGGGAT
gcctcggcctcccaaactgc

SEQ ID NO: 26442 - DNA, 20 bp, Artificial Sequence
  Description of Artificial Sequence: Synthetic oligonucleotide
  Target: LAMA2; (+) strand; PAM type: NNGRRT; PAM sequence: CAGGAT
tgtgagctaccgtgccctgc

SEQ ID NO: 26443 - DNA, 20 bp, Artificial Sequence
  Description of Artificial Sequence: Synthetic oligonucleotide
  Target: LAMA2; (+) strand; PAM type: NNGRRT; PAM sequence: GGGAGT
atgttgtcaaattcttcttt

SEQ ID NO: 26444 - DNA, 20 bp, Artificial Sequence
  Description of Artificial Sequence: Synthetic oligonucleotide
  Target: LAMA2; (+) strand; PAM type: NNGRRT; PAM sequence: GAGAAT
caatcctaagatcagcatgt

SEQ ID NO: 26445 - DNA, 20 bp, Artificial Sequence
  Description of Artificial Sequence: Synthetic oligonucleotide
  Target: LAMA2; (+) strand; PAM type: NNGRRT; PAM sequence: GGGGAT
tttatgttccaaagctttgt

SEQ ID NO: 26446 - DNA, 20 bp, Artificial Sequence
  Description of Artificial Sequence: Synthetic oligonucleotide
  Target: LAMA2; (+) strand; PAM type: NNGRRT; PAM sequence: AAGAGT
gaaaaacttagtatgaagaa

SEQ ID NO: 26447 - DNA, 20 bp, Artificial Sequence
  Description of Artificial Sequence: Synthetic oligonucleotide
  Target: LAMA2; (+) strand; PAM type: NNGRRT; PAM sequence: AAGGAT
ctgctccacagatctgtggt

SEQ ID NO: 26448 - DNA, 20 bp, Artificial Sequence
  Description of Artificial Sequence: Synthetic oligonucleotide
  Target: LAMA2; (+) strand; PAM type: NNGRRT; PAM sequence: CAGAAT
gacatccatgaaacatatga

SEQ ID NO: 26449 - DNA, 20 bp, Artificial Sequence
  Description of Artificial Sequence: Synthetic oligonucleotide
  Target: LAMA2; (+) strand; PAM type: NNGRRT; PAM sequence: CAGAGT
ttttgtttgtttctttgaga

SEQ ID NO: 26450 - DNA, 20 bp, Artificial Sequence
  Description of Artificial Sequence: Synthetic oligonucleotide
  Target: LAMA2; (+) strand; PAM type: NNGRRT; PAM sequence: TGGAGT
gtctccctctgtcaccaggc

SEQ ID NO: 26451 - DNA, 20 bp, Artificial Sequence
  Description of Artificial Sequence: Synthetic oligonucleotide
  Target: LAMA2; (+) strand; PAM type: NNGRRT; PAM sequence: CTGGAT
ctcactgcaacctctgcctg

SEQ ID NO: 26452 - DNA, 20 bp, Artificial Sequence
  Description of Artificial Sequence: Synthetic oligonucleotide
  Target: LAMA2; (+) strand; PAM type: NNGRRT; PAM sequence: TGGGAT
tgattctcctcccaaatagc

SEQ ID NO: 26453 - DNA, 20 bp, Artificial Sequence
  Description of Artificial Sequence: Synthetic oligonucleotide
  Target: LAMA2; (+) strand; PAM type: NNGRRT; PAM sequence: CGGGGT
ttttgtatttttagtagaga

SEQ ID NO: 26454 - DNA, 20 bp, Artificial Sequence
  Description of Artificial Sequence: Synthetic oligonucleotide
  Target: LAMA2; (+) strand; PAM type: NNGRRT; PAM sequence: TCGGGT
ctggtctcgaactcctgacc

SEQ ID NO: 26455 - DNA, 20 bp, Artificial Sequence
  Description of Artificial Sequence: Synthetic oligonucleotide
  Target: LAMA2; (+) strand; PAM type: NNGRRT; PAM sequence: TGGGAT
gtcttggcctcccaaagtgc

SEQ ID NO: 26456 - DNA, 20 bp, Artificial Sequence
  Description of Artificial Sequence: Synthetic oligonucleotide
  Target: LAMA2; (+) strand; PAM type: NNGRRT; PAM sequence: TTGGAT
aattgaaatttgtaaagcat

SEQ ID NO: 26457 - DNA, 20 bp, Artificial Sequence
  Description of Artificial Sequence: Synthetic oligonucleotide
  Target: LAMA2; (+) strand; PAM type: NNGRRT; PAM sequence: TAGGAT
ctcttatggactggtaattt

SEQ ID NO: 26458 - DNA, 20 bp, Artificial Sequence
  Description of Artificial Sequence: Synthetic oligonucleotide
  Target: LAMA2; (+) strand; PAM type: NNGRRT; PAM sequence: TGGGGT
cctaatgccaaaccaacaca

SEQ ID NO: 26459 - DNA, 20 bp, Artificial Sequence
  Description of Artificial Sequence: Synthetic oligonucleotide
  Target: LAMA2; (+) strand; PAM type: NNGRRT; PAM sequence: AAGAAT
gccaaaccaacacatggggt

SEQ ID NO: 26460 - DNA, 20 bp, Artificial Sequence
  Description of Artificial Sequence: Synthetic oligonucleotide
  Target: LAMA2; (+) strand; PAM type: NNGRRT; PAM sequence: AAGGGT
gtatgggcaaatgttttact

SEQ ID NO: 26461 - DNA, 20 bp, Artificial Sequence
  Description of Artificial Sequence: Synthetic oligonucleotide
  Target: LAMA2; (+) strand; PAM type: NNGRRT; PAM sequence: TTGGGT
aaatgttttactaagggtgt

SEQ ID NO: 26462 - DNA, 20 bp, Artificial Sequence
  Description of Artificial Sequence: Synthetic oligonucleotide
  Target: LAMA2; (+) strand; PAM type: NNGRRT; PAM sequence: AAGGAT
gatgctactgtcagcaagag

SEQ ID NO: 26463 - DNA, 20 bp, Artificial Sequence
  Description of Artificial Sequence: Synthetic oligonucleotide
  Target: LAMA2; (+) strand; PAM type: NNGRRT; PAM sequence: TGGGAT
acaattaaacagtcagttat

SEQ ID NO: 26464 - DNA, 20 bp, Artificial Sequence
  Description of Artificial Sequence: Synthetic oligonucleotide
  Target: LAMA2; (+) strand; PAM type: NNGRRT; PAM sequence: TTGAGT
aattcttagcttttttaact

SEQ ID NO: 26465 - DNA, 20 bp, Artificial Sequence
  Description of Artificial Sequence: Synthetic oligonucleotide
  Target: LAMA2; (+) strand; PAM type: NNGRRT; PAM sequence: TTGAAT
ttttctgggcttgatgaaga

SEQ ID NO: 26466 - DNA, 20 bp, Artificial Sequence
  Description of Artificial Sequence: Synthetic oligonucleotide
  Target: LAMA2; (+) strand; PAM type: NNGRRT; PAM sequence: TAGGAT
ttgttagattctcaaattaa

SEQ ID NO: 26467 - DNA, 20 bp, Artificial Sequence
  Description of Artificial Sequence: Synthetic oligonucleotide
  Target: LAMA2; (+) strand; PAM type: NNGRRT; PAM sequence: CTGAAT
attctcaaattaataggata

SEQ ID NO: 26468 - DNA, 20 bp, Artificial Sequence
  Description of Artificial Sequence: Synthetic oligonucleotide
  Target: LAMA2; (+) strand; PAM type: NNGRRT; PAM sequence: CAGAAT
agttaaatggaaaaacagga

SEQ ID NO: 26469 - DNA, 20 bp, Artificial Sequence
  Description of Artificial Sequence: Synthetic oligonucleotide
  Target: LAMA2; (+) strand; PAM type: NNGRRT; PAM sequence: AAGGAT
tattaagtcaagaaatagta

SEQ ID NO: 26470 - DNA, 20 bp, Artificial Sequence
  Description of Artificial Sequence: Synthetic oligonucleotide
  Target: LAMA2; (+) strand; PAM type: NNGRRT; PAM sequence: AAGAAT
cttcaagaaaacatcctgta

SEQ ID NO: 26471 - DNA, 20 bp, Artificial Sequence
  Description of Artificial Sequence: Synthetic oligonucleotide
  Target: LAMA2; (+) strand; PAM type: NNGRRT; PAM sequence: AAGAAT
atagatgtaaaatgcttaaa

SEQ ID NO: 26472 - DNA, 20 bp, Artificial Sequence
  Description of Artificial Sequence: Synthetic oligonucleotide
  Target: LAMA2; (+) strand; PAM type: NNGRRT; PAM sequence: AAGAAT
taacaatacaatttatagta

SEQ ID NO: 26473 - DNA, 20 bp, Artificial Sequence
  Description of Artificial Sequence: Synthetic oligonucleotide
  Target: LAMA2; (+) strand; PAM type: NNGRRT; PAM sequence: TAGAAT
tcaaatatataatatgaaga

SEQ ID NO: 26474 - DNA, 20 bp, Artificial Sequence
  Description of Artificial Sequence: Synthetic oligonucleotide
  Target: LAMA2; (+) strand; PAM type: NNGRRT; PAM sequence: AGGGGT
agagaagttaaagaggagaa

SEQ ID NO: 26475 - DNA, 20 bp, Artificial Sequence
  Description of Artificial Sequence: Synthetic oligonucleotide
  Target: LAMA2; (+) strand; PAM type: NNGRRT; PAM sequence: CTGAAT
ggagaaaggggtgactgatt

SEQ ID NO: 26476 - DNA, 20 bp, Artificial Sequence
  Description of Artificial Sequence: Synthetic oligonucleotide
  Target: LAMA2; (+) strand; PAM type: NNGRRT; PAM sequence: GTGAGT
ggtgactgattctgaatcaa

SEQ ID NO: 26477 - DNA, 20 bp, Artificial Sequence
  Description of Artificial Sequence: Synthetic oligonucleotide
  Target: LAMA2; (+) strand; PAM type: NNGRRT; PAM sequence: TAGAAT
atgtataaaacatcaattta

SEQ ID NO: 26478 - DNA, 20 bp, Artificial Sequence
  Description of Artificial Sequence: Synthetic oligonucleotide
  Target: LAMA2; (+) strand; PAM type: NNGRRT; PAM sequence: TTGAAT
atcaatttatagaatagtat

SEQ ID NO: 26479 - DNA, 20 bp, Artificial Sequence
  Description of Artificial Sequence: Synthetic oligonucleotide
  Target: LAMA2; (+) strand; PAM type: NNGRRT; PAM sequence: TTGAAT
ggctttgcaagcctagacct

SEQ ID NO: 26480 - DNA, 20 bp, Artificial Sequence
  Description of Artificial Sequence: Synthetic oligonucleotide
  Target: LAMA2; (+) strand; PAM type: NNGRRT; PAM sequence: AAGGAT
ctgccttgcaccgctgtcct

SEQ ID NO: 26481 - DNA, 20 bp, Artificial Sequence
  Description of Artificial Sequence: Synthetic oligonucleotide
  Target: LAMA2; (+) strand; PAM type: NNGRRT; PAM sequence: CTGAAT
ccagttttgtagataatttg

SEQ ID NO: 26482 - DNA, 20 bp, Artificial Sequence
  Description of Artificial Sequence: Synthetic oligonucleotide
  Target: LAMA2; (+) strand; PAM type: NNGRRT; PAM sequence: AAGAAT
ataatttgctgaatagaact

SEQ ID NO: 26483 - DNA, 20 bp, Artificial Sequence
  Description of Artificial Sequence: Synthetic oligonucleotide
  Target: LAMA2; (+) strand; PAM type: NNGRRT; PAM sequence: TTGGGT
actaagaatagttataaata

SEQ ID NO: 26484 - DNA, 20 bp, Artificial Sequence
  Description of Artificial Sequence: Synthetic oligonucleotide
  Target: LAMA2; (+) strand; PAM type: NNGRRT; PAM sequence: CTGGAT
ctatgataacataccataaa

SEQ ID NO: 26485 - DNA, 20 bp, Artificial Sequence
  Description of Artificial Sequence: Synthetic oligonucleotide
  Target: LAMA2; (+) strand; PAM type: NNGRRT; PAM sequence: ATGGAT
gataacataccataaactgg

SEQ ID NO: 26486 - DNA, 20 bp, Artificial Sequence
  Description of Artificial Sequence: Synthetic oligonucleotide
  Target: LAMA2; (+) strand; PAM type: NNGRRT; PAM sequence: GTGAGT
agtggcaaattcagtgtcca

SEQ ID NO: 26487 - DNA, 20 bp, Artificial Sequence
  Description of Artificial Sequence: Synthetic oligonucleotide
  Target: LAMA2; (+) strand; PAM type: NNGRRT; PAM sequence: ATGAAT
tggagattaggtttcaacat

SEQ ID NO: 26488 - DNA, 20 bp, Artificial Sequence
  Description of Artificial Sequence: Synthetic oligonucleotide
  Target: LAMA2; (+) strand; PAM type: NNGRRT; PAM sequence: AGGAGT
cttacagagatatgtttcag

SEQ ID NO: 26489 - DNA, 20 bp, Artificial Sequence
  Description of Artificial Sequence: Synthetic oligonucleotide
  Target: LAMA2; (+) strand; PAM type: NNGRRT; PAM sequence: AAGAAT
tcggcctatgctattacaga

SEQ ID NO: 26490 - DNA, 20 bp, Artificial Sequence
  Description of Artificial Sequence: Synthetic oligonucleotide
  Target: LAMA2; (+) strand; PAM type: NNGRRT; PAM sequence: AGGAAT
accattgtattctaactcac

SEQ ID NO: 26491 - DNA, 20 bp, Artificial Sequence
  Description of Artificial Sequence: Synthetic oligonucleotide
  Target: LAMA2; (+) strand; PAM type: NNGRRT; PAM sequence: TAGGAT
aggaataaaacaataacaaa

SEQ ID NO: 26492 - DNA, 20 bp, Artificial Sequence
  Description of Artificial Sequence: Synthetic oligonucleotide
  Target: LAMA2; (+) strand; PAM type: NNGRRT; PAM sequence: ACGAAT
taaaacatacatcttcaaat

SEQ ID NO: 26493 - DNA, 20 bp, Artificial Sequence
  Description of Artificial Sequence: Synthetic oligonucleotide
  Target: LAMA2; (+) strand; PAM type: NNGRRT; PAM sequence: ATGGAT
tgcttcaactccctattata

SEQ ID NO: 26494 - DNA, 20 bp, Artificial Sequence
  Description of Artificial Sequence: Synthetic oligonucleotide
  Target: LAMA2; (+) strand; PAM type: NNGRRT; PAM sequence: TTGGGT
gatgctacacatggaagctc

SEQ ID NO: 26495 - DNA, 20 bp, Artificial Sequence
  Description of Artificial Sequence: Synthetic oligonucleotide
  Target: LAMA2; (+) strand; PAM type: NNGRRT; PAM sequence: TAGAGT
ttggaggtaatagcgcccta

SEQ ID NO: 26496 - DNA, 20 bp, Artificial Sequence
  Description of Artificial Sequence: Synthetic oligonucleotide
  Target: LAMA2; (+) strand; PAM type: NNGRRT; PAM sequence: GGGAGT
tatttatcttgccttaatta

SEQ ID NO: 26497 - DNA, 20 bp, Artificial Sequence
  Description of Artificial Sequence: Synthetic oligonucleotide
  Target: LAMA2; (+) strand; PAM type: NNGRRT; PAM sequence: GTGGGT
atctgaactactttcattgt

SEQ ID NO: 26498 - DNA, 20 bp, Artificial Sequence
  Description of Artificial Sequence: Synthetic oligonucleotide
  Target: LAMA2; (+) strand; PAM type: NNGRRT; PAM sequence: GAGGAT
tatctctatatatgcataaa

SEQ ID NO: 26499 - DNA, 20 bp, Artificial Sequence
  Description of Artificial Sequence: Synthetic oligonucleotide
  Target: LAMA2; (+) strand; PAM type: NNGRRT; PAM sequence: AAGAAT
aagaaccgctctacagagct

SEQ ID NO: 26500 - DNA, 20 bp, Artificial Sequence
  Description of Artificial Sequence: Synthetic oligonucleotide
  Target: LAMA2; (+) strand; PAM type: NNGRRT; PAM sequence: AGGGAT
tgtttctttagtgtttgatg

SEQ ID NO: 26501 - DNA, 20 bp, Artificial Sequence
  Description of Artificial Sequence: Synthetic oligonucleotide
  Target: LAMA2; (+) strand; PAM type: NNGRRT; PAM sequence: TTGGAT
cacagcgatgatcatttaag

SEQ ID NO: 26502 - DNA, 20 bp, Artificial Sequence
  Description of Artificial Sequence: Synthetic oligonucleotide
  Target: LAMA2; (+) strand; PAM type: NNGRRT; PAM sequence: TGGAAT
tgattcgaaaagtaagttct

SEQ ID NO: 26503 - DNA, 20 bp, Artificial Sequence
  Description of Artificial Sequence: Synthetic oligonucleotide
  Target: LAMA2; (+) strand; PAM type: NNGRRT; PAM sequence: TAGGGT
aaaagtaagttcttggaatt

SEQ ID NO: 26504 - DNA, 20 bp, Artificial Sequence
  Description of Artificial Sequence: Synthetic oligonucleotide
  Target: LAMA2; (+) strand; PAM type: NNGRRT; PAM sequence: GAGAAT
ttttactaatttttttccgt

SEQ ID NO: 26505 - DNA, 20 bp, Artificial Sequence
  Description of Artificial Sequence: Synthetic oligonucleotide
  Target: LAMA2; (+) strand; PAM type: NNGRRT; PAM sequence: TAGAAT
ctaatttttttccgtgagaa

SEQ ID NO: 26506 - DNA, 20 bp, Artificial Sequence
  Description of Artificial Sequence: Synthetic oligonucleotide
  Target: LAMA2; (+) strand; PAM type: NNGRRT; PAM sequence: ATGGAT
cagtgctctaaaaaatgtaa

SEQ ID NO: 26507 - DNA, 20 bp, Artificial Sequence
  Description of Artificial Sequence: Synthetic oligonucleotide
  Target: LAMA2; (+) strand; PAM type: NNGRRT; PAM sequence: CCGAGT
tatttgctttacaaattttt

SEQ ID NO: 26508 - DNA, 20 bp, Artificial Sequence
  Description of Artificial Sequence: Synthetic oligonucleotide
  Target: LAMA2; (+) strand; PAM type: NNGRRT; PAM sequence: TAGAAT
cattgcataaaaacttgttt

SEQ ID NO: 26509 - DNA, 20 bp, Artificial Sequence
  Description of Artificial Sequence: Synthetic oligonucleotide
  Target: LAMA2; (+) strand; PAM type: NNGRRT; PAM sequence: GAGAAT
attctaggacaaaataaaat

SEQ ID NO: 26510 - DNA, 20 bp, Artificial Sequence
  Description of Artificial Sequence: Synthetic oligonucleotide
  Target: LAMA2; (+) strand; PAM type: NNGRRT; PAM sequence: TAGAAT
aggacaaaataaaatgagaa

SEQ ID NO: 26511 - DNA, 20 bp, Artificial Sequence
  Description of Artificial Sequence: Synthetic oligonucleotide
  Target: LAMA2; (+) strand; PAM type: NNGRRT; PAM sequence: TTGAGT
aatacttcaagtgatctcat

SEQ ID NO: 26512 - DNA, 20 bp, Artificial Sequence
  Description of Artificial Sequence: Synthetic oligonucleotide
  Target: LAMA2; (+) strand; PAM type: NNGRRT; PAM sequence: AGGAAT
ttcagtttcagacatttgtg

SEQ ID NO: 26513 - DNA, 20 bp, Artificial Sequence
  Description of Artificial Sequence: Synthetic oligonucleotide
  Target: LAMA2; (+) strand; PAM type: NNGRRT; PAM sequence: GCGGGT
aaccttatttcatagcagga

SEQ ID NO: 26514 - DNA, 20 bp, Artificial Sequence
  Description of Artificial Sequence: Synthetic oligonucleotide
  Target: LAMA2; (+) strand; PAM type: NNGRRT; PAM sequence: AAGAAT
tgatctcaagactatccctc

SEQ ID NO: 26515 - DNA, 20 bp, Artificial Sequence
  Description of Artificial Sequence: Synthetic oligonucleotide
  Target: LAMA2; (+) strand; PAM type: NNGRRT; PAM sequence: TTGGGT
acatgtgataaaaatctctt

SEQ ID NO: 26516 - DNA, 20 bp, Artificial Sequence
  Description of Artificial Sequence: Synthetic oligonucleotide
  Target: LAMA2; (+) strand; PAM type: NNGRRT; PAM sequence: CAGGAT
taaaaatctcttttgggttt

SEQ ID NO: 26517 - DNA, 20 bp, Artificial Sequence
  Description of Artificial Sequence: Synthetic oligonucleotide
  Target: LAMA2; (+) strand; PAM type: NNGRRT; PAM sequence: AAGAGT
attgtgtagtggggaaaatg

SEQ ID NO: 26518 - DNA, 20 bp, Artificial Sequence
  Description of Artificial Sequence: Synthetic oligonucleotide
  Target: LAMA2; (+) strand; PAM type: NNGRRT; PAM sequence: TTGAAT
gtagtggggaaaatgaagag

SEQ ID NO: 26519 - DNA, 20 bp, Artificial Sequence
  Description of Artificial Sequence: Synthetic oligonucleotide
  Target: LAMA2; (+) strand; PAM type: NNGRRT; PAM sequence: TAGGGT
gaatttctggttagctagac

SEQ ID NO: 26520 - DNA, 20 bp, Artificial Sequence
  Description of Artificial Sequence: Synthetic oligonucleotide
  Target: LAMA2; (+) strand; PAM type: NNGRRT; PAM sequence: TTGAAT
gttgtaggtacgtcacctcc

SEQ ID NO: 26521 - DNA, 20 bp, Artificial Sequence
  Description of Artificial Sequence: Synthetic oligonucleotide
  Target: LAMA2; (+) strand; PAM type: NNGRRT; PAM sequence: AGGAAT
aatagctgcatcttttaagt

SEQ ID NO: 26522 - DNA, 20 bp, Artificial Sequence
  Description of Artificial Sequence: Synthetic oligonucleotide
  Target: LAMA2; (+) strand; PAM type: NNGRRT; PAM sequence: GAGGAT
acacattgtgagatctttct

SEQ ID NO: 26523 - DNA, 20 bp, Artificial Sequence
  Description of Artificial Sequence: Synthetic oligonucleotide
  Target: LAMA2; (+) strand; PAM type: NNGRRT; PAM sequence: ATGAGT
ttatagatactgacttaaca

SEQ ID NO: 26524 - DNA, 20 bp, Artificial Sequence
  Description of Artificial Sequence: Synthetic oligonucleotide
  Target: LAMA2; (+) strand; PAM type: NNGRRT; PAM sequence: GTGGAT
tcagcagcgttgtcttgaca

SEQ ID NO: 26525 - DNA, 20 bp, Artificial Sequence
  Description of Artificial Sequence: Synthetic oligonucleotide
  Target: LAMA2; (+) strand; PAM type: NNGRRT; PAM sequence: GGGGAT
tgtgttgctaggcaacccga

SEQ ID NO: 26526 - DNA, 20 bp, Artificial Sequence
  Description of Artificial Sequence: Synthetic oligonucleotide
  Target: LAMA2; (+) strand; PAM type: NNGRRT; PAM sequence: GAGAGT
gattttagacatattatatt

SEQ ID NO: 26527 - DNA, 20 bp, Artificial Sequence
  Description of Artificial Sequence: Synthetic oligonucleotide
  Target: LAMA2; (+) strand; PAM type: NNGRRT; PAM sequence: GTGAGT
atttctattctgtcttttat

SEQ ID NO: 26528 - DNA, 20 bp, Artificial Sequence
  Description of Artificial Sequence: Synthetic oligonucleotide
  Target: LAMA2; (+) strand; PAM type: NNGRRT; PAM sequence: TAGGGT
atatgcagaagaaaaattaa

SEQ ID NO: 26529 - DNA, 20 bp, Artificial Sequence
  Description of Artificial Sequence: Synthetic oligonucleotide
  Target: LAMA2; (+) strand; PAM type: NNGRRT; PAM sequence: GTGGAT
agatattaaatgtcaaaaat

SEQ ID NO: 26530 - DNA, 20 bp, Artificial Sequence
  Description of Artificial Sequence: Synthetic oligonucleotide
  Target: LAMA2; (+) strand; PAM type: NNGRRT; PAM sequence: TTGAAT
aatgtcaaaaatgtggatat

SEQ ID NO: 26531 - DNA, 20 bp, Artificial Sequence
  Description of Artificial Sequence: Synthetic oligonucleotide
  Target: LAMA2; (+) strand; PAM type: NNGRRT; PAM sequence: GAGAGT
gtagcatattaatttcaagt

SEQ ID NO: 26532 - DNA, 20 bp, Artificial Sequence
  Description of Artificial Sequence: Synthetic oligonucleotide
  Target: LAMA2; (+) strand; PAM type: NNGRRT; PAM sequence: GTGAAT
ttgataactgcagtggtttt

SEQ ID NO: 26533 - DNA, 20 bp, Artificial Sequence
  Description of Artificial Sequence: Synthetic oligonucleotide
  Target: LAMA2; (+) strand; PAM type: NNGRRT; PAM sequence: AAGAGT
ggttttgtgaatccaatttt

SEQ ID NO: 26534 - DNA, 20 bp, Artificial Sequence
  Description of Artificial Sequence: Synthetic oligonucleotide
  Target: LAMA2; (+) strand; PAM type: NNGRRT; PAM sequence: ATGAAT
ttaaatgttgtgtcaatgcc

SEQ ID NO: 26535 - DNA, 20 bp, Artificial Sequence
  Description of Artificial Sequence: Synthetic oligonucleotide
  Target: LAMA2; (+) strand; PAM type: NNGRRT; PAM sequence: GAGAAT
tgtgtcaatgccatgaatca

SEQ ID NO: 26536 - DNA, 20 bp, Artificial Sequence
  Description of Artificial Sequence: Synthetic oligonucleotide
  Target: LAMA2; (+) strand; PAM type: NNGRRT; PAM sequence: AAGGAT
aaattgatggtctaaatcaa

SEQ ID NO: 26537 - DNA, 20 bp, Artificial Sequence
  Description of Artificial Sequence: Synthetic oligonucleotide
  Target: LAMA2; (+) strand; PAM type: NNGRRT; PAM sequence: ATGGAT
tgatggtctaaatcaaaagg

SEQ ID NO: 26538 - DNA, 20 bp, Artificial Sequence
  Description of Artificial Sequence: Synthetic oligonucleotide
  Target: LAMA2; (+) strand; PAM type: NNGRRT; PAM sequence: AGGAAT
ctaaatcaaaaggatggatt

SEQ ID NO: 26539 - DNA, 20 bp, Artificial Sequence
  Description of Artificial Sequence: Synthetic oligonucleotide
  Target: LAMA2; (+) strand; PAM type: NNGRRT; PAM sequence: CGGAAT
ggatggattaggaatctttg

SEQ ID NO: 26540 - DNA, 20 bp, Artificial Sequence
  Description of Artificial Sequence: Synthetic oligonucleotide
  Target: LAMA2; (+) strand; PAM type: NNGRRT; PAM sequence: GAGAAT
gtagttttgtgagaaaagca

SEQ ID NO: 26541 - DNA, 20 bp, Artificial Sequence
  Description of Artificial Sequence: Synthetic oligonucleotide
  Target: LAMA2; (+) strand; PAM type: NNGRRT; PAM sequence: GAGGAT
tcaaggtcttttacttcaag

SEQ ID NO: 26542 - DNA, 20 bp, Artificial Sequence
  Description of Artificial Sequence: Synthetic oligonucleotide
  Target: LAMA2; (+) strand; PAM type: NNGRRT; PAM sequence: GGGGGT
aaggaggatttgaagtattt

SEQ ID NO: 26543 - DNA, 20 bp, Artificial Sequence
  Description of Artificial Sequence: Synthetic oligonucleotide
  Target: LAMA2; (+) strand; PAM type: NNGRRT; PAM sequence: GAGGAT
gacagtgcaaacttgtgaag

SEQ ID NO: 26544 - DNA, 20 bp, Artificial Sequence
  Description of Artificial Sequence: Synthetic oligonucleotide
  Target: LAMA2; (+) strand; PAM type: NNGRRT; PAM sequence: TAGGAT
atgttttcagtatatcacac

SEQ ID NO: 26545 - DNA, 20 bp, Artificial Sequence
  Description of Artificial Sequence: Synthetic oligonucleotide
  Target: LAMA2; (+) strand; PAM type: NNGRRT; PAM sequence: GGGAAT
ccatatacacacctatgtgt

SEQ ID NO: 26546 - DNA, 20 bp, Artificial Sequence
  Description of Artificial Sequence: Synthetic oligonucleotide
  Target: LAMA2; (+) strand; PAM type: NNGRRT; PAM sequence: TGGGAT
cctatgtgtgggaatgctaa

SEQ ID NO: 26547 - DNA, 20 bp, Artificial Sequence
  Description of Artificial Sequence: Synthetic oligonucleotide
  Target: LAMA2; (+) strand; PAM type: NNGRRT; PAM sequence: TAGAAT
gtgtgggaatgctaatggga

SEQ ID NO: 26548 - DNA, 20 bp, Artificial Sequence
  Description of Artificial Sequence: Synthetic oligonucleotide
  Target: LAMA2; (+) strand; PAM type: NNGRRT; PAM sequence: TAGGGT
gggatagaatctgatacagt

SEQ ID NO: 26549 - DNA, 20 bp, Artificial Sequence
  Description of Artificial Sequence: Synthetic oligonucleotide
  Target: LAMA2; (+) strand; PAM type: NNGRRT; PAM sequence: ACGAGT
cagttagggtctgaaacact

SEQ ID NO: 26550 - DNA, 20 bp, Artificial Sequence
  Description of Artificial Sequence: Synthetic oligonucleotide
  Target: LAMA2; (+) strand; PAM type: NNGRRT; PAM sequence: TTGAGT
tactttgattcaatatttag

SEQ ID NO: 26551 - DNA, 20 bp, Artificial Sequence
  Description of Artificial Sequence: Synthetic oligonucleotide
  Target: LAMA2; (+) strand; PAM type: NNGRRT; PAM sequence: TTGAAT
ctttgaaactaaagattaaa

SEQ ID NO: 26552 - DNA, 20 bp, Artificial Sequence
  Description of Artificial Sequence: Synthetic oligonucleotide
  Target: LAMA2; (+) strand; PAM type: NNGRRT; PAM sequence: AGGAAT
tttaaaatagcttgtatcac

SEQ ID NO: 26553 - DNA, 20 bp, Artificial Sequence
  Description of Artificial Sequence: Synthetic oligonucleotide
  Target: LAMA2; (+) strand; PAM type: NNGRRT; PAM sequence: CTGAGT
tagcttgtatcacaggaatc

SEQ ID NO: 26554 - DNA, 20 bp, Artificial Sequence
  Description of Artificial Sequence: Synthetic oligonucleotide
  Target: LAMA2; (+) strand; PAM type: NNGRRT; PAM sequence: CTGGAT
aataatgaaaaagtatactc

SEQ ID NO: 26555 - DNA, 20 bp, Artificial Sequence
  Description of Artificial Sequence: Synthetic oligonucleotide
  Target: LAMA2; (+) strand; PAM type: NNGRRT; PAM sequence: TAGAAT
aactttaagcaggtatcatg

SEQ ID NO: 26556 - DNA, 20 bp, Artificial Sequence
  Description of Artificial Sequence: Synthetic oligonucleotide
  Target: LAMA2; (+) strand; PAM type: NNGRRT; PAM sequence: GTGGGT
tactcaacagatattatttt

SEQ ID NO: 26557 - DNA, 20 bp, Artificial Sequence
  Description of Artificial Sequence: Synthetic oligonucleotide
  Target: LAMA2; (+) strand; PAM type: NNGRRT; PAM sequence: GTGAAT
ataacaccctatatacctcg

SEQ ID NO: 26558 - DNA, 20 bp, Artificial Sequence
  Description of Artificial Sequence: Synthetic oligonucleotide
  Target: LAMA2; (+) strand; PAM type: NNGRRT; PAM sequence: AAGGAT
gtgaataaagaagatttcta

SEQ ID NO: 26559 - DNA, 20 bp, Artificial Sequence
  Description of Artificial Sequence: Synthetic oligonucleotide
  Target: LAMA2; (+) strand; PAM type: NNGRRT; PAM sequence: ATGAGT
ataaagaagatttctaaagg

SEQ ID NO: 26560 - DNA, 20 bp, Artificial Sequence
  Description of Artificial Sequence: Synthetic oligonucleotide
  Target: LAMA2; (+) strand; PAM type: NNGRRT; PAM sequence: GTGAAT
atttaattagttaatgcttt

SEQ ID NO: 26561 - DNA, 20 bp, Artificial Sequence
  Description of Artificial Sequence: Synthetic oligonucleotide
  Target: LAMA2; (+) strand; PAM type: NNGRRT; PAM sequence: CAGAAT
agttaatgctttgtgaatcc

SEQ ID NO: 26562 - DNA, 20 bp, Artificial Sequence
  Description of Artificial Sequence: Synthetic oligonucleotide
  Target: LAMA2; (+) strand; PAM type: NNGRRT; PAM sequence: ATGAAT
taattctgattctcctatag

SEQ ID NO: 26563 - DNA, 20 bp, Artificial Sequence
  Description of Artificial Sequence: Synthetic oligonucleotide
  Target: LAMA2; (+) strand; PAM type: NNGRRT; PAM sequence: TTGAAT
gttctatctttcatgctact

SEQ ID NO: 26564 - DNA, 20 bp, Artificial Sequence
  Description of Artificial Sequence: Synthetic oligonucleotide
  Target: LAMA2; (+) strand; PAM type: NNGRRT; PAM sequence: CTGAAT
tttgaattcggtttttaaaa

SEQ ID NO: 26565 - DNA, 20 bp, Artificial Sequence
  Description of Artificial Sequence: Synthetic oligonucleotide
  Target: LAMA2; (+) strand; PAM type: NNGRRT; PAM sequence: TAGAAT
tattttatcaacttttattt

SEQ ID NO: 26566 - DNA, 20 bp, Artificial Sequence
  Description of Artificial Sequence: Synthetic oligonucleotide
  Target: LAMA2; (+) strand; PAM type: NNGRRT; PAM sequence: GGGAGT
caacttttattttagaatca

SEQ ID NO: 26567 - DNA, 20 bp, Artificial Sequence
  Description of Artificial Sequence: Synthetic oligonucleotide
  Target: LAMA2; (+) strand; PAM type: NNGRRT; PAM sequence: TGGAGT
tattgtgtgatgctgaggtt

SEQ ID NO: 26568 - DNA, 20 bp, Artificial Sequence
  Description of Artificial Sequence: Synthetic oligonucleotide
  Target: LAMA2; (+) strand; PAM type: NNGRRT; PAM sequence: ATGAAT
tgctgaggtttggagtacaa

SEQ ID NO: 26569 - DNA, 20 bp, Artificial Sequence
  Description of Artificial Sequence: Synthetic oligonucleotide
  Target: LAMA2; (+) strand; PAM type: NNGRRT; PAM sequence: GTGGGT
atgaatctgtcattcaggta

SEQ ID NO: 26570 - DNA, 20 bp, Artificial Sequence
  Description of Artificial Sequence: Synthetic oligonucleotide
  Target: LAMA2; (+) strand; PAM type: NNGRRT; PAM sequence: TGGAGT
tctcactctgtaacccaggc

SEQ ID NO: 26571 - DNA, 20 bp, Artificial Sequence
  Description of Artificial Sequence: Synthetic oligonucleotide
  Target: LAMA2; (+) strand; PAM type: NNGRRT; PAM sequence: CTGGGT
ctcactgcaacctccacctc

SEQ ID NO: 26572 - DNA, 20 bp, Artificial Sequence
  Description of Artificial Sequence: Synthetic oligonucleotide
  Target: LAMA2; (+) strand; PAM type: NNGRRT; PAM sequence: TGGGAT
gcttcagcctccatagtagc

SEQ ID NO: 26573 - DNA, 20 bp, Artificial Sequence
  Description of Artificial Sequence: Synthetic oligonucleotide
  Target: LAMA2; (+) strand; PAM type: NNGRRT; PAM sequence: CTGGAT
acaggtgcctgccaccacgc

SEQ ID NO: 26574 - DNA, 20 bp, Artificial Sequence
  Description of Artificial Sequence: Synthetic oligonucleotide
  Target: LAMA2; (+) strand; PAM type: NNGRRT; PAM sequence: CAGGGT
ttttgtatttttagtagaga

SEQ ID NO: 26575 - DNA, 20 bp, Artificial Sequence
  Description of Artificial Sequence: Synthetic oligonucleotide
  Target: LAMA2; (+) strand; PAM type: NNGRRT; PAM sequence: TGGGAT
gccttggccttccaaagtgc

SEQ ID NO: 26576 - DNA, 20 bp, Artificial Sequence
  Description of Artificial Sequence: Synthetic oligonucleotide
  Target: LAMA2; (+) strand; PAM type: NNGRRT; PAM sequence: TAGAAT
aaatcaatttttgcagagat

SEQ ID NO: 26577 - DNA, 20 bp, Artificial Sequence
  Description of Artificial Sequence: Synthetic oligonucleotide
  Target: LAMA2; (+) strand; PAM type: NNGRRT; PAM sequence: TAGAGT
acttttttctttaggacgtt

SEQ ID NO: 26578 - DNA, 20 bp, Artificial Sequence
  Description of Artificial Sequence: Synthetic oligonucleotide
  Target: LAMA2; (+) strand; PAM type: NNGRRT; PAM sequence: ATGAAT
ttctctctgatgatttgtat

SEQ ID NO: 26579 - DNA, 20 bp, Artificial Sequence
  Description of Artificial Sequence: Synthetic oligonucleotide
  Target: LAMA2; (+) strand; PAM type: NNGRRT; PAM sequence: ATGGAT
catacaaggcctttgtccta

SEQ ID NO: 26580 - DNA, 20 bp, Artificial Sequence
  Description of Artificial Sequence: Synthetic oligonucleotide
  Target: LAMA2; (+) strand; PAM type: NNGRRT; PAM sequence: AGGAAT
atatgcggtaagtgctatga

SEQ ID NO: 26581 - DNA, 20 bp, Artificial Sequence
  Description of Artificial Sequence: Synthetic oligonucleotide
  Target: LAMA2; (+) strand; PAM type: NNGRRT; PAM sequence: GCGAGT
gggcaattttagataaaatg

SEQ ID NO: 26582 - DNA, 20 bp, Artificial Sequence
  Description of Artificial Sequence: Synthetic oligonucleotide
  Target: LAMA2; (+) strand; PAM type: NNGRRT; PAM sequence: GTGAAT
aattttagataaaatggcga

SEQ ID NO: 26583 - DNA, 20 bp, Artificial Sequence
  Description of Artificial Sequence: Synthetic oligonucleotide
  Target: LAMA2; (+) strand; PAM type: NNGRRT; PAM sequence: GAGAAT
tgacatcttgccagagacag

SEQ ID NO: 26584 - DNA, 20 bp, Artificial Sequence
  Description of Artificial Sequence: Synthetic oligonucleotide
  Target: LAMA2; (+) strand; PAM type: NNGRRT; PAM sequence: AAGAGT
ccagagacaggagaatgaga

SEQ ID NO: 26585 - DNA, 20 bp, Artificial Sequence
  Description of Artificial Sequence: Synthetic oligonucleotide
  Target: LAMA2; (+) strand; PAM type: NNGRRT; PAM sequence: GGGAGT
tgtgaaaaggcatgatggtg

SEQ ID NO: 26586 - DNA, 20 bp, Artificial Sequence
  Description of Artificial Sequence: Synthetic oligonucleotide
  Target: LAMA2; (+) strand; PAM type: NNGRRT; PAM sequence: AGGGGT
atgatggtggggagtgtttg

SEQ ID NO: 26587 - DNA, 20 bp, Artificial Sequence
  Description of Artificial Sequence: Synthetic oligonucleotide
  Target: LAMA2; (+) strand; PAM type: NNGRRT; PAM sequence: CAGAGT
ggggtgagagaaactatcat

SEQ ID NO: 26588 - DNA, 20 bp, Artificial Sequence
  Description of Artificial Sequence: Synthetic oligonucleotide
  Target: LAMA2; (+) strand; PAM type: NNGRRT; PAM sequence: CAGAAT
tcagagtaacaggcaaccta

SEQ ID NO: 26589 - DNA, 20 bp, Artificial Sequence
  Description of Artificial Sequence: Synthetic oligonucleotide
  Target: LAMA2; (+) strand; PAM type: NNGRRT; PAM sequence: CAGAAT
tctgacaaagggctaatacc

SEQ ID NO: 26590 - DNA, 20 bp, Artificial Sequence
  Description of Artificial Sequence: Synthetic oligonucleotide
  Target: LAMA2; (+) strand; PAM type: NNGRRT; PAM sequence: AAGGAT
accccatcgaaaagtgggca

SEQ ID NO: 26591 - DNA, 20 bp, Artificial Sequence
  Description of Artificial Sequence: Synthetic oligonucleotide
  Target: LAMA2; (+) strand; PAM type: NNGRRT; PAM sequence: TAGAAT
agataccaactcatgccagt

SEQ ID NO: 26592 - DNA, 20 bp, Artificial Sequence
  Description of Artificial Sequence: Synthetic oligonucleotide
  Target: LAMA2; (+) strand; PAM type: NNGRRT; PAM sequence: GAGGAT
aggaaacaacagatgctgga

SEQ ID NO: 26593 - DNA, 20 bp, Artificial Sequence
  Description of Artificial Sequence: Synthetic oligonucleotide
  Target: LAMA2; (+) strand; PAM type: NNGRRT; PAM sequence: AGGAAT
tggagaggatgtggagaaat

SEQ ID NO: 26594 - DNA, 20 bp, Artificial Sequence
  Description of Artificial Sequence: Synthetic oligonucleotide
  Target: LAMA2; (+) strand; PAM type: NNGRRT; PAM sequence: GTGAAT
aatgcttttacactgttagt

SEQ ID NO: 26595 - DNA, 20 bp, Artificial Sequence
  Description of Artificial Sequence: Synthetic oligonucleotide
  Target: LAMA2; (+) strand; PAM type: NNGRRT; PAM sequence: AAGGAT
agacagtgtggtgattcctc

SEQ ID NO: 26596 - DNA, 20 bp, Artificial Sequence
  Description of Artificial Sequence: Synthetic oligonucleotide
  Target: LAMA2; (+) strand; PAM type: NNGRRT; PAM sequence: CTGGGT
ttgacccagccatcccatta

SEQ ID NO: 26597 - DNA, 20 bp, Artificial Sequence
  Description of Artificial Sequence: Synthetic oligonucleotide
  Target: LAMA2; (+) strand; PAM type: NNGRRT; PAM sequence: AAGGAT
cattactgggtatttatcca

SEQ ID NO: 26598 - DNA, 20 bp, Artificial Sequence
  Description of Artificial Sequence: Synthetic oligonucleotide
  Target: LAMA2; (+) strand; PAM type: NNGRRT; PAM sequence: CTGGAT
aaatgcctatcaatgataga

SEQ ID NO: 26599 - DNA, 20 bp, Artificial Sequence
  Description of Artificial Sequence: Synthetic oligonucleotide
  Target: LAMA2; (+) strand; PAM type: NNGRRT; PAM sequence: AAGGAT
aacactaggcagccgtgaaa

SEQ ID NO: 26600 - DNA, 20 bp, Artificial Sequence
  Description of Artificial Sequence: Synthetic oligonucleotide
  Target: LAMA2; (+) strand; PAM type: NNGRRT; PAM sequence: ATGAGT
ctaggcagccgtgaaaaagg

SEQ ID NO: 26601 - DNA, 20 bp, Artificial Sequence
  Description of Artificial Sequence: Synthetic oligonucleotide
  Target: LAMA2; (+) strand; PAM type: NNGRRT; PAM sequence: ATGGAT
ttcatgtcctttgcagggac

SEQ ID NO: 26602 - DNA, 20 bp, Artificial Sequence
  Description of Artificial Sequence: Synthetic oligonucleotide
  Target: LAMA2; (+) strand; PAM type: NNGRRT; PAM sequence: GTGGGT
ctgcatgttctcactcataa

SEQ ID NO: 26603 - DNA, 20 bp, Artificial Sequence
  Description of Artificial Sequence: Synthetic oligonucleotide
  Target: LAMA2; (+) strand; PAM type: NNGRRT; PAM sequence: AGGGGT
acactggggcctgttggggg

SEQ ID NO: 26604 - DNA, 20 bp, Artificial Sequence
  Description of Artificial Sequence: Synthetic oligonucleotide
  Target: LAMA2; (+) strand; PAM type: NNGRRT; PAM sequence: AGGGAT
gaggggtgggaggcaagggg

SEQ ID NO: 26605 - DNA, 20 bp, Artificial Sequence
  Description of Artificial Sequence: Synthetic oligonucleotide
  Target: LAMA2; (+) strand; PAM type: NNGRRT; PAM sequence: ATGGGT
agaaatacctaatgtagatg

SEQ ID NO: 26606 - DNA, 20 bp, Artificial Sequence
  Description of Artificial Sequence: Synthetic oligonucleotide
  Target: LAMA2; (+) strand; PAM type: NNGRRT; PAM sequence: GGGGAT
ggaagagagggagggaggga

SEQ ID NO: 26607 - DNA, 20 bp, Artificial Sequence
  Description of Artificial Sequence: Synthetic oligonucleotide
  Target: LAMA2; (+) strand; PAM type: NNGRRT; PAM sequence: TAGAGT
gaggggatggccaatgtgac

SEQ ID NO: 26608 - DNA, 20 bp, Artificial Sequence
  Description of Artificial Sequence: Synthetic oligonucleotide
  Target: LAMA2; (+) strand; PAM type: NNGRRT; PAM sequence: AAGAAT
agagtgaagtaagagagggg

SEQ ID NO: 26609 - DNA, 20 bp, Artificial Sequence
  Description of Artificial Sequence: Synthetic oligonucleotide
  Target: LAMA2; (+) strand; PAM type: NNGRRT; PAM sequence: GTGGAT
actttcggaggctgaggcag

SEQ ID NO: 26610 - DNA, 20 bp, Artificial Sequence
  Description of Artificial Sequence: Synthetic oligonucleotide
  Target: LAMA2; (+) strand; PAM type: NNGRRT; PAM sequence: AGGGGT
caggtggatcacttgaggtc

SEQ ID NO: 26611 - DNA, 20 bp, Artificial Sequence
  Description of Artificial Sequence: Synthetic oligonucleotide
  Target: LAMA2; (+) strand; PAM type: NNGRRT; PAM sequence: GAGAAT
tactcgggaggctgaggtag

SEQ ID NO: 26612 - DNA, 20 bp, Artificial Sequence
  Description of Artificial Sequence: Synthetic oligonucleotide
  Target: LAMA2; (+) strand; PAM type: NNGRRT; PAM sequence: AGGAGT
tttctcagacagaagataaa

SEQ ID NO: 26613 - DNA, 20 bp, Artificial Sequence
  Description of Artificial Sequence: Synthetic oligonucleotide
  Target: LAMA2; (+) strand; PAM type: NNGRRT; PAM sequence: AAGGAT
gttcgtaacgaggtgatttt

SEQ ID NO: 26614 - DNA, 20 bp, Artificial Sequence
  Description of Artificial Sequence: Synthetic oligonucleotide
  Target: LAMA2; (+) strand; PAM type: NNGRRT; PAM sequence: ATGGAT
gtaacgaggtgattttaagg

SEQ ID NO: 26615 - DNA, 20 bp, Artificial Sequence
  Description of Artificial Sequence: Synthetic oligonucleotide
  Target: LAMA2; (+) strand; PAM type: NNGRRT; PAM sequence: TAGAAT
gtgattttaaggatggatca

SEQ ID NO: 26616 - DNA, 20 bp, Artificial Sequence
  Description of Artificial Sequence: Synthetic oligonucleotide
  Target: LAMA2; (+) strand; PAM type: NNGRRT; PAM sequence: GAGAGT
aatcatcaagccaggaagga

SEQ ID NO: 26617 - DNA, 20 bp, Artificial Sequence
  Description of Artificial Sequence: Synthetic oligonucleotide
  Target: LAMA2; (+) strand; PAM type: NNGRRT; PAM sequence: ATGGAT
gtgaaatcaaggagaaggtg

SEQ ID NO: 26618 - DNA, 20 bp, Artificial Sequence
  Description of Artificial Sequence: Synthetic oligonucleotide
  Target: LAMA2; (+) strand; PAM type: NNGRRT; PAM sequence: CTGAGT
gatggataggagaaaggacc

SEQ ID NO: 26619 - DNA, 20 bp, Artificial Sequence
  Description of Artificial Sequence: Synthetic oligonucleotide
  Target: LAMA2; (+) strand; PAM type: NNGRRT; PAM sequence: CAGAGT
aggaccctgagttattataa

SEQ ID NO: 26620 - DNA, 20 bp, Artificial Sequence
  Description of Artificial Sequence: Synthetic oligonucleotide
  Target: LAMA2; (+) strand; PAM type: NNGRRT; PAM sequence: AAGAGT
gagttattataacagagtcc

SEQ ID NO: 26621 - DNA, 20 bp, Artificial Sequence
  Description of Artificial Sequence: Synthetic oligonucleotide
  Target: LAMA2; (+) strand; PAM type: NNGRRT; PAM sequence: TGGGGT
gagtcagagagctgcacaga

SEQ ID NO: 26622 - DNA, 20 bp, Artificial Sequence
  Description of Artificial Sequence: Synthetic oligonucleotide
  Target: LAMA2; (+) strand; PAM type: NNGRRT; PAM sequence: TGGGAT
agagagctgcacagatgggg

SEQ ID NO: 26623 - DNA, 20 bp, Artificial Sequence
  Description of Artificial Sequence: Synthetic oligonucleotide
  Target: LAMA2; (+) strand; PAM type: NNGRRT; PAM sequence: GGGAGT
caggtcaaggaaagggccat

SEQ ID NO: 26624 - DNA, 20 bp, Artificial Sequence
  Description of Artificial Sequence: Synthetic oligonucleotide
  Target: LAMA2; (+) strand; PAM type: NNGRRT; PAM sequence: GTGGGT
tcaaggaaagggccatggga

SEQ ID NO: 26625 - DNA, 20 bp, Artificial Sequence
  Description of Artificial Sequence: Synthetic oligonucleotide
  Target: LAMA2; (+) strand; PAM type: NNGRRT; PAM sequence: AGGGAT
ggctggaaggtggttttatg

SEQ ID NO: 26626 - DNA, 20 bp, Artificial Sequence
  Description of Artificial Sequence: Synthetic oligonucleotide
  Target: LAMA2; (+) strand; PAM type: NNGRRT; PAM sequence: GTGGAT
aaggtggttttatgagggat

SEQ ID NO: 26627 - DNA, 20 bp, Artificial Sequence
  Description of Artificial Sequence: Synthetic oligonucleotide
  Target: LAMA2; (+) strand; PAM type: NNGRRT; PAM sequence: TAGAAT
tctagatcttgaaggtctta

SEQ ID NO: 26628 - DNA, 20 bp, Artificial Sequence
  Description of Artificial Sequence: Synthetic oligonucleotide
  Target: LAMA2; (+) strand; PAM type: NNGRRT; PAM sequence: CCGAAT
agggggaggagccaagatgg

SEQ ID NO: 26629 - DNA, 20 bp, Artificial Sequence
  Description of Artificial Sequence: Synthetic oligonucleotide
  Target: LAMA2; (+) strand; PAM type: NNGRRT; PAM sequence: CCGGGT
ctgcatttccatctgaggta

SEQ ID NO: 26630 - DNA, 20 bp, Artificial Sequence
  Description of Artificial Sequence: Synthetic oligonucleotide
  Target: LAMA2; (+) strand; PAM type: NNGRRT; PAM sequence: GGGAGT
gtaccgggttcatctcacta

SEQ ID NO: 26631 - DNA, 20 bp, Artificial Sequence
  Description of Artificial Sequence: Synthetic oligonucleotide
  Target: LAMA2; (+) strand; PAM type: NNGRRT; PAM sequence: AGGGGT
tgcctcacctgggaagcgca

SEQ ID NO: 26632 - DNA, 20 bp, Artificial Sequence
  Description of Artificial Sequence: Synthetic oligonucleotide
  Target: LAMA2; (+) strand; PAM type: NNGRRT; PAM sequence: GGGAGT
ctgggaagcgcaaggggtca

SEQ ID NO: 26633 - DNA, 20 bp, Artificial Sequence
  Description of Artificial Sequence: Synthetic oligonucleotide
  Target: LAMA2; (+) strand; PAM type: NNGRRT; PAM sequence: CCGAGT
ggggtcagggagttcccttt

SEQ ID NO: 26634 - DNA, 20 bp, Artificial Sequence
  Description of Artificial Sequence: Synthetic oligonucleotide
  Target: LAMA2; (+) strand; PAM type: NNGRRT; PAM sequence: AGGGGT
tccctttccgagtcaaagaa

SEQ ID NO: 26635 - DNA, 20 bp, Artificial Sequence
  Description of Artificial Sequence: Synthetic oligonucleotide
  Target: LAMA2; (+) strand; PAM type: NNGRRT; PAM sequence: TCGGGT
tgacggacgcacctggaaaa

SEQ ID NO: 26636 - DNA, 20 bp, Artificial Sequence
  Description of Artificial Sequence: Synthetic oligonucleotide
  Target: LAMA2; (+) strand; PAM type: NNGRRT; PAM sequence: CCGAAT
gaaaatcgggtcactcccac

SEQ ID NO: 26637 - DNA, 20 bp, Artificial Sequence
  Description of Artificial Sequence: Synthetic oligonucleotide
  Target: LAMA2; (+) strand; PAM type: NNGRRT; PAM sequence: GAGGGT
tatatcccacacctggctcg

SEQ ID NO: 26638 - DNA, 20 bp, Artificial Sequence
  Description of Artificial Sequence: Synthetic oligonucleotide
  Target: LAMA2; (+) strand; PAM type: NNGRRT; PAM sequence: CGGAAT
ctcggagggtcctacgccca

SEQ ID NO: 26639 - DNA, 20 bp, Artificial Sequence
  Description of Artificial Sequence: Synthetic oligonucleotide
  Target: LAMA2; (+) strand; PAM type: NNGRRT; PAM sequence: CTGGGT
aagcagccgggaagctcgaa

SEQ ID NO: 26640 - DNA, 20 bp, Artificial Sequence
  Description of Artificial Sequence: Synthetic oligonucleotide
  Target: LAMA2; (+) strand; PAM type: NNGRRT; PAM sequence: GAGAAT
cagtacgcagctggagatct

SEQ ID NO: 26641 - DNA, 20 bp, Artificial Sequence
  Description of Artificial Sequence: Synthetic oligonucleotide
  Target: LAMA2; (+) strand; PAM type: NNGRRT; PAM sequence: GTGGGT
tgggcagactgcctcctcaa

SEQ ID NO: 26642 - DNA, 20 bp, Artificial Sequence
  Description of Artificial Sequence: Synthetic oligonucleotide
  Target: LAMA2; (+) strand; PAM type: NNGRRT; PAM sequence: CAGGGT
cacactgacacctcacacgg

SEQ ID NO: 26643 - DNA, 20 bp, Artificial Sequence
  Description of Artificial Sequence: Synthetic oligonucleotide
  Target: LAMA2; (+) strand; PAM type: NNGRRT; PAM sequence: GAGGGT
attccaacagacctgcagct

SEQ ID NO: 26644 - DNA, 20 bp, Artificial Sequence
  Description of Artificial Sequence: Synthetic oligonucleotide
  Target: LAMA2; (+) strand; PAM type: NNGRRT; PAM sequence: CTGGAT
tcaccagcaacagaacaaag

SEQ ID NO: 26645 - DNA, 20 bp, Artificial Sequence
  Description of Artificial Sequence: Synthetic oligonucleotide
  Target: LAMA2; (+) strand; PAM type: NNGRRT; PAM sequence: GAGAAT
caacagaacaaagctggatg

SEQ ID NO: 26646 - DNA, 20 bp, Artificial Sequence
  Description of Artificial Sequence: Synthetic oligonucleotide
  Target: LAMA2; (+) strand; PAM type: NNGRRT; PAM sequence: AAGAAT
aaactttgaaaaaaatttag

SEQ ID NO: 26647 - DNA, 20 bp, Artificial Sequence
  Description of Artificial Sequence: Synthetic oligonucleotide
  Target: LAMA2; (+) strand; PAM type: NNGRRT; PAM sequence: TAGAAT
aatttagaagaatgtataac

SEQ ID NO: 26648 - DNA, 20 bp, Artificial Sequence
  Description of Artificial Sequence: Synthetic oligonucleotide
  Target: LAMA2; (+) strand; PAM type: NNGRRT; PAM sequence: AAGAAT
caaggctcgagaactacgtg

SEQ ID NO: 26649 - DNA, 20 bp, Artificial Sequence
  Description of Artificial Sequence: Synthetic oligonucleotide
  Target: LAMA2; (+) strand; PAM type: NNGRRT; PAM sequence: AAGGGT
cgatgcgatcaactggaaga

SEQ ID NO: 26650 - DNA, 20 bp, Artificial Sequence
  Description of Artificial Sequence: Synthetic oligonucleotide
  Target: LAMA2; (+) strand; PAM type: NNGRRT; PAM sequence: ATGAAT
tatcagcaatggaagatgaa

SEQ ID NO: 26651 - DNA, 20 bp, Artificial Sequence
  Description of Artificial Sequence: Synthetic oligonucleotide
  Target: LAMA2; (+) strand; PAM type: NNGRRT; PAM sequence: AAGAAT
gaagggaagtttagagaaaa

SEQ ID NO: 26652 - DNA, 20 bp, Artificial Sequence
  Description of Artificial Sequence: Synthetic oligonucleotide
  Target: LAMA2; (+) strand; PAM type: NNGRRT; PAM sequence: GAGAAT
gtgtacctgaaagtgatgtg

SEQ ID NO: 26653 - DNA, 20 bp, Artificial Sequence
  Description of Artificial Sequence: Synthetic oligonucleotide
  Target: LAMA2; (+) strand; PAM type: NNGRRT; PAM sequence: CAGGAT
ccaagttggaaaacactctg

SEQ ID NO: 26654 - DNA, 20 bp, Artificial Sequence
  Description of Artificial Sequence: Synthetic oligonucleotide
  Target: LAMA2; (+) strand; PAM type: NNGRRT; PAM sequence: TCGGGT
agggcagccagagagaaagg

SEQ ID NO: 26655 - DNA, 20 bp, Artificial Sequence
  Description of Artificial Sequence: Synthetic oligonucleotide
  Target: LAMA2; (+) strand; PAM type: NNGRRT; PAM sequence: GCGGAT
gaaagcccatcagactaaca

SEQ ID NO: 26656 - DNA, 20 bp, Artificial Sequence
  Description of Artificial Sequence: Synthetic oligonucleotide
  Target: LAMA2; (+) strand; PAM type: NNGRRT; PAM sequence: GAGAGT
agaaaccctacaagccagaa

SEQ ID NO: 26657 - DNA, 20 bp, Artificial Sequence
  Description of Artificial Sequence: Synthetic oligonucleotide
  Target: LAMA2; (+) strand; PAM type: NNGRRT; PAM sequence: AAGAAT
tattcaacattcttaaagaa

SEQ ID NO: 26658 - DNA, 20 bp, Artificial Sequence
  Description of Artificial Sequence: Synthetic oligonucleotide
  Target: LAMA2; (+) strand; PAM type: NNGRRT; PAM sequence: CAGAAT
aaagaaaagaattttcaacc

SEQ ID NO: 26659 - DNA, 20 bp, Artificial Sequence
  Description of Artificial Sequence: Synthetic oligonucleotide
  Target: LAMA2; (+) strand; PAM type: NNGRRT; PAM sequence: CAGGAT
accagctaacatcatcatga

SEQ ID NO: 26660 - DNA, 20 bp, Artificial Sequence
  Description of Artificial Sequence: Synthetic oligonucleotide
  Target: LAMA2; (+) strand; PAM type: NNGRRT; PAM sequence: TTGGAT
aaaagacacaaactggcaag

SEQ ID NO: 26661 - DNA, 20 bp, Artificial Sequence
  Description of Artificial Sequence: Synthetic oligonucleotide
  Target: LAMA2; (+) strand; PAM type: NNGRRT; PAM sequence: AAGAGT
acaaactggcaagttggata

SEQ ID NO: 26662 - DNA, 20 bp, Artificial Sequence
  Description of Artificial Sequence: Synthetic oligonucleotide
  Target: LAMA2; (+) strand; PAM type: NNGRRT; PAM sequence: AAGGAT
cacacataggctcaaaataa

SEQ ID NO: 26663 - DNA, 20 bp, Artificial Sequence
  Description of Artificial Sequence: Synthetic oligonucleotide
  Target: LAMA2; (+) strand; PAM type: NNGRRT; PAM sequence: AGGGGT
aatggaaaacaaaaaaaggc

SEQ ID NO: 26664 - DNA, 20 bp, Artificial Sequence
  Description of Artificial Sequence: Synthetic oligonucleotide
  Target: LAMA2; (+) strand; PAM type: NNGRRT; PAM sequence: AGGGAT
aggccattacataatggtaa

SEQ ID NO: 26665 - DNA, 20 bp, Artificial Sequence
  Description of Artificial Sequence: Synthetic oligonucleotide
  Target: LAMA2; (+) strand; PAM type: NNGRRT; PAM sequence: AAGGAT
caacgagacagaaagtcaac

SEQ ID NO: 26666 - DNA, 20 bp, Artificial Sequence
  Description of Artificial Sequence: Synthetic oligonucleotide
  Target: LAMA2; (+) strand; PAM type: NNGRRT; PAM sequence: AGGAAT
gaaagtcaacaaggataccc

SEQ ID NO: 26667 - DNA, 20 bp, Artificial Sequence
  Description of Artificial Sequence: Synthetic oligonucleotide
  Target: LAMA2; (+) strand; PAM type: NNGRRT; PAM sequence: CAGAAT
aactctccaccccaaatcaa

SEQ ID NO: 26668 - DNA, 20 bp, Artificial Sequence
  Description of Artificial Sequence: Synthetic oligonucleotide
  Target: LAMA2; (+) strand; PAM type: NNGRRT; PAM sequence: CAGGAT
agtgcaatcaaactagaact

SEQ ID NO: 26669 - DNA, 20 bp, Artificial Sequence
  Description of Artificial Sequence: Synthetic oligonucleotide
  Target: LAMA2; (+) strand; PAM type: NNGRRT; PAM sequence: AAGAAT
tcaaactagaactcaggatt

SEQ ID NO: 26670 - DNA, 20 bp, Artificial Sequence
  Description of Artificial Sequence: Synthetic oligonucleotide
  Target: LAMA2; (+) strand; PAM type: NNGRRT; PAM sequence: CTGAAT
ggaaactgaacaacctgctc

SEQ ID NO: 26671 - DNA, 20 bp, Artificial Sequence
  Description of Artificial Sequence: Synthetic oligonucleotide
  Target: LAMA2; (+) strand; PAM type: NNGRRT; PAM sequence: CTGGGT
aacctgctcctgaatgacta

SEQ ID NO: 26672 - DNA, 20 bp, Artificial Sequence
  Description of Artificial Sequence: Synthetic oligonucleotide
  Target: LAMA2; (+) strand; PAM type: NNGRRT; PAM sequence: CAGAAT
agaacaaagacaccacatac

SEQ ID NO: 26673 - DNA, 20 bp, Artificial Sequence
  Description of Artificial Sequence: Synthetic oligonucleotide
  Target: LAMA2; (+) strand; PAM type: NNGRRT; PAM sequence: ATGAAT
aaaaacccttcaaaaaatca

SEQ ID NO: 26674 - DNA, 20 bp, Artificial Sequence
  Description of Artificial Sequence: Synthetic oligonucleotide
  Target: LAMA2; (+) strand; PAM type: NNGRRT; PAM sequence: AAGGAT
tccaggagctggttttttga

SEQ ID NO: 26675 - DNA, 20 bp, Artificial Sequence
  Description of Artificial Sequence: Synthetic oligonucleotide
  Target: LAMA2; (+) strand; PAM type: NNGRRT; PAM sequence: AAGAAT
taataaagaaaaaaagagag

SEQ ID NO: 26676 - DNA, 20 bp, Artificial Sequence
  Description of Artificial Sequence: Synthetic oligonucleotide
  Target: LAMA2; (+) strand; PAM type: NNGRRT; PAM sequence: GGGGAT
acacaataaaaaatgataaa

SEQ ID NO: 26677 - DNA, 20 bp, Artificial Sequence
  Description of Artificial Sequence: Synthetic oligonucleotide
  Target: LAMA2; (+) strand; PAM type: NNGRRT; PAM sequence: GAGAAT
agaaatacaaactaccatca

SEQ ID NO: 26678 - DNA, 20 bp, Artificial Sequence
  Description of Artificial Sequence: Synthetic oligonucleotide
  Target: LAMA2; (+) strand; PAM type: NNGRRT; PAM sequence: ATGGAT
aactagaaaatctagaagaa

SEQ ID NO: 26679 - DNA, 20 bp, Artificial Sequence
  Description of Artificial Sequence: Synthetic oligonucleotide
  Target: LAMA2; (+) strand; PAM type: NNGRRT; PAM sequence: TTGAAT
aagactaaaccaggaagaag

SEQ ID NO: 26680 - DNA, 20 bp, Artificial Sequence
  Description of Artificial Sequence: Synthetic oligonucleotide
  Target: LAMA2; (+) strand; PAM type: NNGRRT; PAM sequence: CTGAAT
accaggaagaagttgaatct

SEQ ID NO: 26681 - DNA, 20 bp, Artificial Sequence
  Description of Artificial Sequence: Synthetic oligonucleotide
  Target: LAMA2; (+) strand; PAM type: NNGRRT; PAM sequence: AAGAGT
tcaatagtttaccaaccaaa

SEQ ID NO: 26682 - DNA, 20 bp, Artificial Sequence
  Description of Artificial Sequence: Synthetic oligonucleotide
  Target: LAMA2; (+) strand; PAM type: NNGRRT; PAM sequence: ATGGAT
caaaaagagtccaggaccag

SEQ ID NO: 26683 - DNA, 20 bp, Artificial Sequence
  Description of Artificial Sequence: Synthetic oligonucleotide
  Target: LAMA2; (+) strand; PAM type: NNGRRT; PAM sequence: CCGAAT
aggaccagatggattcacag

SEQ ID NO: 26684 - DNA, 20 bp, Artificial Sequence
  Description of Artificial Sequence: Synthetic oligonucleotide
  Target: LAMA2; (+) strand; PAM type: NNGRRT; PAM sequence: GGGAAT
ttccaatcaatagaaaaaga

SEQ ID NO: 26685 - DNA, 20 bp, Artificial Sequence
  Description of Artificial Sequence: Synthetic oligonucleotide
  Target: LAMA2; (+) strand; PAM type: NNGRRT; PAM sequence: GAGAAT
gcagagacacaaccaaaaaa

SEQ ID NO: 26686 - DNA, 20 bp, Artificial Sequence
  Description of Artificial Sequence: Synthetic oligonucleotide
  Target: LAMA2; (+) strand; PAM type: NNGRRT; PAM sequence: CCGAAT
ctcaataaaatactggcaaa

SEQ ID NO: 26687 - DNA, 20 bp, Artificial Sequence
  Description of Artificial Sequence: Synthetic oligonucleotide
  Target: LAMA2; (+) strand; PAM type: NNGRRT; PAM sequence: TGGGAT
gatcaagtgggcttcatccc

SEQ ID NO: 26688 - DNA, 20 bp, Artificial Sequence
  Description of Artificial Sequence: Synthetic oligonucleotide
  Target: LAMA2; (+) strand; PAM type: NNGRRT; PAM sequence: TGGGAT
ctcaataaattaggtattga

SEQ ID NO: 26689 - DNA, 20 bp, Artificial Sequence
  Description of Artificial Sequence: Synthetic oligonucleotide
  Target: LAMA2; (+) strand; PAM type: NNGRRT; PAM sequence: CTGAAT
aacccacagccaatatcata

SEQ ID NO: 26690 - DNA, 20 bp, Artificial Sequence
  Description of Artificial Sequence: Synthetic oligonucleotide
  Target: LAMA2; (+) strand; PAM type: NNGRRT; PAM sequence: AGGGAT
tttgaaaactggcacaagac

SEQ ID NO: 26691 - DNA, 20 bp, Artificial Sequence
  Description of Artificial Sequence: Synthetic oligonucleotide
  Target: LAMA2; (+) strand; PAM type: NNGRRT; PAM sequence: AAGGGT
tcaggcaggagaaggaaata

SEQ ID NO: 26692 - DNA, 20 bp, Artificial Sequence
  Description of Artificial Sequence: Synthetic oligonucleotide
  Target: LAMA2; (+) strand; PAM type: NNGRRT; PAM sequence: CAGGAT
aagcaacttcagcaaagtct

SEQ ID NO: 26693 - DNA, 20 bp, Artificial Sequence
  Description of Artificial Sequence: Synthetic oligonucleotide
  Target: LAMA2; (+) strand; PAM type: NNGRRT; PAM sequence: ATGGGT
gacaaacagagagccaaatc

SEQ ID NO: 26694 - DNA, 20 bp, Artificial Sequence
  Description of Artificial Sequence: Synthetic oligonucleotide
  Target: LAMA2; (+) strand; PAM type: NNGRRT; PAM sequence: GAGAAT
ccattcacaattgcttcaaa

SEQ ID NO: 26695 - DNA, 20 bp, Artificial Sequence
  Description of Artificial Sequence: Synthetic oligonucleotide
  Target: LAMA2; (+) strand; PAM type: NNGRRT; PAM sequence: AGGAAT
tcaaagagaataaaatacct

SEQ ID NO: 26696 - DNA, 20 bp, Artificial Sequence
  Description of Artificial Sequence: Synthetic oligonucleotide
  Target: LAMA2; (+) strand; PAM type: NNGRRT; PAM sequence: AGGGAT
acctaggaatccaacttaca

SEQ ID NO: 26697 - DNA, 20 bp, Artificial Sequence
  Description of Artificial Sequence: Synthetic oligonucleotide
  Target: LAMA2; (+) strand; PAM type: NNGRRT; PAM sequence: ATGGGT
tggaagaacattccatgctc

SEQ ID NO: 26698 - DNA, 20 bp, Artificial Sequence
  Description of Artificial Sequence: Synthetic oligonucleotide
  Target: LAMA2; (+) strand; PAM type: NNGRRT; PAM sequence: AAGAAT
attccatgctcatgggtagg

SEQ ID NO: 26699 - DNA, 20 bp, Artificial Sequence
  Description of Artificial Sequence: Synthetic oligonucleotide
  Target: LAMA2; (+) strand; PAM type: NNGRRT; PAM sequence: CAGAAT
gctaccaatgactttcttca

SEQ ID NO: 26700 - DNA, 20 bp, Artificial Sequence
  Description of Artificial Sequence: Synthetic oligonucleotide
  Target: LAMA2; (+) strand; PAM type: NNGRRT; PAM sequence: AAGGAT
agaaaaacaagcaatgggga

SEQ ID NO: 26701 - DNA, 20 bp, Artificial Sequence
  Description of Artificial Sequence: Synthetic oligonucleotide
  Target: LAMA2; (+) strand; PAM type: NNGRRT; PAM sequence: CTGGAT
ccatatgtagaaagctgaaa

SEQ ID NO: 26702 - DNA, 20 bp, Artificial Sequence
  Description of Artificial Sequence: Synthetic oligonucleotide
  Target: LAMA2; (+) strand; PAM type: NNGRRT; PAM sequence: ATGGAT
tatacaaaaatcaattcaag

SEQ ID NO: 26703 - DNA, 20 bp, Artificial Sequence
  Description of Artificial Sequence: Synthetic oligonucleotide
  Target: LAMA2; (+) strand; PAM type: NNGRRT; PAM sequence: TGGGAT
caaaagacaaaattgacaaa

SEQ ID NO: 26704 - DNA, 20 bp, Artificial Sequence
  Description of Artificial Sequence: Synthetic oligonucleotide
  Target: LAMA2; (+) strand; PAM type: NNGRRT; PAM sequence: CAGAGT
acagcaaaagaaactaccat

SEQ ID NO: 26705 - DNA, 20 bp, Artificial Sequence
  Description of Artificial Sequence: Synthetic oligonucleotide
  Target: LAMA2; (+) strand; PAM type: NNGRRT; PAM sequence: CAGAAT
tctgacaaagggctaatatc

SEQ ID NO: 26706 - DNA, 20 bp, Artificial Sequence
  Description of Artificial Sequence: Synthetic oligonucleotide
  Target: LAMA2; (+) strand; PAM type: NNGRRT; PAM sequence: TAGAAT
agatatcatctcacaccagt

SEQ ID NO: 26707 - DNA, 20 bp, Artificial Sequence
  Description of Artificial Sequence: Synthetic oligonucleotide
  Target: LAMA2; (+) strand; PAM type: NNGRRT; PAM sequence: GAGGAT
aggaaacaacaggtgctgga

SEQ ID NO: 26708 - DNA, 20 bp, Artificial Sequence
  Description of Artificial Sequence: Synthetic oligonucleotide
  Target: LAMA2; (+) strand; PAM type: NNGRRT; PAM sequence: AGGGAT
agtcagtgtggcgattcctc

SEQ ID NO: 26709 - DNA, 20 bp, Artificial Sequence
  Description of Artificial Sequence: Synthetic oligonucleotide
  Target: LAMA2; (+) strand; PAM type: NNGRRT; PAM sequence: CTGGGT
ttgacccagccatcccatta

SEQ ID NO: 26710 - DNA, 20 bp, Artificial Sequence
  Description of Artificial Sequence: Synthetic oligonucleotide
  Target: LAMA2; (+) strand; PAM type: NNGRRT; PAM sequence: ATGAGT
attactgggtatatacccaa

SEQ ID NO: 26711 - DNA, 20 bp, Artificial Sequence
  Description of Artificial Sequence: Synthetic oligonucleotide
  Target: LAMA2; (+) strand; PAM type: NNGRRT; PAM sequence: CTGGAT
aaatgtccaacaatgataga

SEQ ID NO: 26712 - DNA, 20 bp, Artificial Sequence
  Description of Artificial Sequence: Synthetic oligonucleotide
  Target: LAMA2; (+) strand; PAM type: NNGRRT; PAM sequence: TGGAAT
aatgtggcacatatacacca

SEQ ID NO: 26713 - DNA, 20 bp, Artificial Sequence
  Description of Artificial Sequence: Synthetic oligonucleotide
  Target: LAMA2; (+) strand; PAM type: NNGRRT; PAM sequence: ATGAGT
ctatgcagccataaaaaatg

SEQ ID NO: 26714 - DNA, 20 bp, Artificial Sequence
  Description of Artificial Sequence: Synthetic oligonucleotide
  Target: LAMA2; (+) strand; PAM type: NNGRRT; PAM sequence: ATGGAT
ttcatatcctttgtagggac

SEQ ID NO: 26715 - DNA, 20 bp, Artificial Sequence
  Description of Artificial Sequence: Synthetic oligonucleotide
  Target: LAMA2; (+) strand; PAM type: NNGRRT; PAM sequence: GGGAAT
gcatattctcactcataggt

SEQ ID NO: 26716 - DNA, 20 bp, Artificial Sequence
  Description of Artificial Sequence: Synthetic oligonucleotide
  Target: LAMA2; (+) strand; PAM type: NNGRRT; PAM sequence: GGGAAT
gatcacatggacacaggaag

SEQ ID NO: 26717 - DNA, 20 bp, Artificial Sequence
  Description of Artificial Sequence: Synthetic oligonucleotide
  Target: LAMA2; (+) strand; PAM type: NNGRRT; PAM sequence: TGGGGT
tcacactctggggactgtgg

SEQ ID NO: 26718 - DNA, 20 bp, Artificial Sequence
  Description of Artificial Sequence: Synthetic oligonucleotide
  Target: LAMA2; (+) strand; PAM type: NNGRRT; PAM sequence: AGGGAT
gtggggtcgggggagggggg

SEQ ID NO: 26719 - DNA, 20 bp, Artificial Sequence
  Description of Artificial Sequence: Synthetic oligonucleotide
  Target: LAMA2; (+) strand; PAM type: NNGRRT; PAM sequence: GTGGGT
taatgctagatgacacatta

SEQ ID NO: 26720 - DNA, 20 bp, Artificial Sequence
  Description of Artificial Sequence: Synthetic oligonucleotide
  Target: LAMA2; (+) strand; PAM type: NNGRRT; PAM sequence: TAGAGT
tgcacatgtaccctaaaact

SEQ ID NO: 26721 - DNA, 20 bp, Artificial Sequence
  Description of Artificial Sequence: Synthetic oligonucleotide
  Target: LAMA2; (+) strand; PAM type: NNGRRT; PAM sequence: AGGGAT
agcatgtatttccacaatac

SEQ ID NO: 26722 - DNA, 20 bp, Artificial Sequence
  Description of Artificial Sequence: Synthetic oligonucleotide
  Target: LAMA2; (+) strand; PAM type: NNGRRT; PAM sequence: TTGGGT
cacacgttgacttaaatcag

SEQ ID NO: 26723 - DNA, 20 bp, Artificial Sequence
  Description of Artificial Sequence: Synthetic oligonucleotide
  Target: LAMA2; (+) strand; PAM type: NNGRRT; PAM sequence: AAGAAT
ttgactttagtttgcaaatt

SEQ ID NO: 26724 - DNA, 20 bp, Artificial Sequence
  Description of Artificial Sequence: Synthetic oligonucleotide
  Target: LAMA2; (+) strand; PAM type: NNGRRT; PAM sequence: CAGGAT
ctttttcataaaacactttt

SEQ ID NO: 26725 - DNA, 20 bp, Artificial Sequence
  Description of Artificial Sequence: Synthetic oligonucleotide
  Target: LAMA2; (+) strand; PAM type: NNGRRT; PAM sequence: CCGAAT
ttgatttcaatttatgcaat

SEQ ID NO: 26726 - DNA, 20 bp, Artificial Sequence
  Description of Artificial Sequence: Synthetic oligonucleotide
  Target: LAMA2; (+) strand; PAM type: NNGRRT; PAM sequence: TGGAAT
aattttcaagtaaaacctca

SEQ ID NO: 26727 - DNA, 20 bp, Artificial Sequence
  Description of Artificial Sequence: Synthetic oligonucleotide
  Target: LAMA2; (+) strand; PAM type: NNGRRT; PAM sequence: CTGAGT
aaacttttataacacatctg

SEQ ID NO: 26728 - DNA, 20 bp, Artificial Sequence
  Description of Artificial Sequence: Synthetic oligonucleotide
  Target: LAMA2; (+) strand; PAM type: NNGRRT; PAM sequence: AAGGAT
atatctctttttataggaga

SEQ ID NO: 26729 - DNA, 20 bp, Artificial Sequence
  Description of Artificial Sequence: Synthetic oligonucleotide
  Target: LAMA2; (+) strand; PAM type: NNGRRT; PAM sequence: ATGGAT
ctctttttataggagaaagg

SEQ ID NO: 26730 - DNA, 20 bp, Artificial Sequence
  Description of Artificial Sequence: Synthetic oligonucleotide
  Target: LAMA2; (+) strand; PAM type: NNGRRT; PAM sequence: ATGGGT
acttgtattttaccaaattc

SEQ ID NO: 26731 - DNA, 20 bp, Artificial Sequence
  Description of Artificial Sequence: Synthetic oligonucleotide
  Target: LAMA2; (+) strand; PAM type: NNGRRT; PAM sequence: TTGGAT
gtatgtgtgtgtataatttt

SEQ ID NO: 26732 - DNA, 20 bp, Artificial Sequence
  Description of Artificial Sequence: Synthetic oligonucleotide
  Target: LAMA2; (+) strand; PAM type: NNGRRT; PAM sequence: GAGGAT
ttttggatctatctatctat

SEQ ID NO: 26733 - DNA, 20 bp, Artificial Sequence
  Description of Artificial Sequence: Synthetic oligonucleotide
  Target: LAMA2; (+) strand; PAM type: NNGRRT; PAM sequence: ATGGAT
tttcagtacaatttatatat

SEQ ID NO: 26734 - DNA, 20 bp, Artificial Sequence
  Description of Artificial Sequence: Synthetic oligonucleotide
  Target: LAMA2; (+) strand; PAM type: NNGRRT; PAM sequence: TTGGGT
taaacttcagcattttttgt

SEQ ID NO: 26735 - DNA, 20 bp, Artificial Sequence
  Description of Artificial Sequence: Synthetic oligonucleotide
  Target: LAMA2; (+) strand; PAM type: NNGRRT; PAM sequence: TGGAAT
ctcttgttttccttcttgtt

SEQ ID NO: 26736 - DNA, 20 bp, Artificial Sequence
  Description of Artificial Sequence: Synthetic oligonucleotide
  Target: LAMA2; (+) strand; PAM type: NNGRRT; PAM sequence: TTGAAT
agtatacagtaaatctataa

SEQ ID NO: 26737 - DNA, 20 bp, Artificial Sequence
  Description of Artificial Sequence: Synthetic oligonucleotide
  Target: LAMA2; (+) strand; PAM type: NNGRRT; PAM sequence: TAGGAT
tagaagcaaatatcacaggc

SEQ ID NO: 26738 - DNA, 20 bp, Artificial Sequence
  Description of Artificial Sequence: Synthetic oligonucleotide
  Target: LAMA2; (+) strand; PAM type: NNGRRT; PAM sequence: ATGAGT
atagattgttttagcaagaa

SEQ ID NO: 26739 - DNA, 20 bp, Artificial Sequence
  Description of Artificial Sequence: Synthetic oligonucleotide
  Target: LAMA2; (+) strand; PAM type: NNGRRT; PAM sequence: GAGAAT
tgccttgatcttagaggctg

SEQ ID NO: 26740 - DNA, 20 bp, Artificial Sequence
  Description of Artificial Sequence: Synthetic oligonucleotide
  Target: LAMA2; (+) strand; PAM type: NNGRRT; PAM sequence: AAGGGT
ttctttcctcagccttagtg

SEQ ID NO: 26741 - DNA, 20 bp, Artificial Sequence
  Description of Artificial Sequence: Synthetic oligonucleotide
  Target: LAMA2; (+) strand; PAM type: NNGRRT; PAM sequence: GTGGAT
tccacaccatgagccatact

SEQ ID NO: 26742 - DNA, 20 bp, Artificial Sequence
  Description of Artificial Sequence: Synthetic oligonucleotide
  Target: LAMA2; (+) strand; PAM type: NNGRRT; PAM sequence: CAGAAT
ttacagccactgccttcatt

SEQ ID NO: 26743 - DNA, 20 bp, Artificial Sequence
  Description of Artificial Sequence: Synthetic oligonucleotide
  Target: LAMA2; (+) strand; PAM type: NNGRRT; PAM sequence: ATGGGT
ctaaacctcaccatatttgc

SEQ ID NO: 26744 - DNA, 20 bp, Artificial Sequence
  Description of Artificial Sequence: Synthetic oligonucleotide
  Target: LAMA2; (+) strand; PAM type: NNGRRT; PAM sequence: AAGAAT
gtaacatgtcctcacctttt

SEQ ID NO: 26745 - DNA, 20 bp, Artificial Sequence
  Description of Artificial Sequence: Synthetic oligonucleotide
  Target: LAMA2; (+) strand; PAM type: NNGRRT; PAM sequence: CTGAGT
cctgttccccatcgtggctc

SEQ ID NO: 26746 - DNA, 20 bp, Artificial Sequence
  Description of Artificial Sequence: Synthetic oligonucleotide
  Target: LAMA2; (+) strand; PAM type: NNGRRT; PAM sequence: ATGGAT
ttagattatatctatttaag

SEQ ID NO: 26747 - DNA, 20 bp, Artificial Sequence
  Description of Artificial Sequence: Synthetic oligonucleotide
  Target: LAMA2; (+) strand; PAM type: NNGRRT; PAM sequence: TGGAGT
ctgctgtgtttcctctactg

SEQ ID NO: 26748 - DNA, 20 bp, Artificial Sequence
  Description of Artificial Sequence: Synthetic oligonucleotide
  Target: LAMA2; (+) strand; PAM type: NNGRRT; PAM sequence: GTGAAT
aggctcttaataaataagaa

SEQ ID NO: 26749 - DNA, 20 bp, Artificial Sequence
  Description of Artificial Sequence: Synthetic oligonucleotide
  Target: LAMA2; (+) strand; PAM type: NNGRRT; PAM sequence: GAGGAT
taataaataagaagtgaatt

SEQ ID NO: 26750 - DNA, 20 bp, Artificial Sequence
  Description of Artificial Sequence: Synthetic oligonucleotide
  Target: LAMA2; (+) strand; PAM type: NNGRRT; PAM sequence: ATGAGT
catgtacatgtaaatattgc

SEQ ID NO: 26751 - DNA, 20 bp, Artificial Sequence
  Description of Artificial Sequence: Synthetic oligonucleotide
  Target: LAMA2; (+) strand; PAM type: NNGRRT; PAM sequence: GGGGAT
cttacattttcttcactaat

SEQ ID NO: 26752 - DNA, 20 bp, Artificial Sequence
  Description of Artificial Sequence: Synthetic oligonucleotide
  Target: LAMA2; (+) strand; PAM type: NNGRRT; PAM sequence: AGGAAT
tgttcagtattttctgatga

SEQ ID NO: 26753 - DNA, 20 bp, Artificial Sequence
  Description of Artificial Sequence: Synthetic oligonucleotide
  Target: LAMA2; (+) strand; PAM type: NNGRRT; PAM sequence: TGGGGT
tgtgttgattagtttgtctt

SEQ ID NO: 26754 - DNA, 20 bp, Artificial Sequence
  Description of Artificial Sequence: Synthetic oligonucleotide
  Target: LAMA2; (+) strand; PAM type: NNGRRT; PAM sequence: CAGGGT
aaaagtcaatgtacaccaca

SEQ ID NO: 26755 - DNA, 20 bp, Artificial Sequence
  Description of Artificial Sequence: Synthetic oligonucleotide
  Target: LAMA2; (+) strand; PAM type: NNGRRT; PAM sequence: TGGGAT
tgctgtcattaactgcacaa

SEQ ID NO: 26756 - DNA, 20 bp, Artificial Sequence
  Description of Artificial Sequence: Synthetic oligonucleotide
  Target: LAMA2; (+) strand; PAM type: NNGRRT; PAM sequence: GGGGAT
gatcttaagattactccttt

SEQ ID NO: 26757 - DNA, 20 bp, Artificial Sequence
  Description of Artificial Sequence: Synthetic oligonucleotide
  Target: LAMA2; (+) strand; PAM type: NNGRRT; PAM sequence: GTGAGT
ttaaaaaaaaaatgctcaaa

SEQ ID NO: 26758 - DNA, 20 bp, Artificial Sequence
  Description of Artificial Sequence: Synthetic oligonucleotide
  Target: LAMA2; (+) strand; PAM type: NNGRRT; PAM sequence: AAGAGT
ttcttccagtactgaaaatt

SEQ ID NO: 26759 - DNA, 20 bp, Artificial Sequence
  Description of Artificial Sequence: Synthetic oligonucleotide
  Target: LAMA2; (+) strand; PAM type: NNGRRT; PAM sequence: CTGGAT
agaaagtagtcctatgactg

SEQ ID NO: 26760 - DNA, 20 bp, Artificial Sequence
  Description of Artificial Sequence: Synthetic oligonucleotide
  Target: LAMA2; (+) strand; PAM type: NNGRRT; PAM sequence: GAGAGT
ctaatttatcataaccctgg

SEQ ID NO: 26761 - DNA, 20 bp, Artificial Sequence
  Description of Artificial Sequence: Synthetic oligonucleotide
  Target: LAMA2; (+) strand; PAM type: NNGRRT; PAM sequence: CCGGGT
tgatttgctggtttttgatc

SEQ ID NO: 26762 - DNA, 20 bp, Artificial Sequence
  Description of Artificial Sequence: Synthetic oligonucleotide
  Target: LAMA2; (+) strand; PAM type: NNGRRT; PAM sequence: ATGAAT
gtttttgatcccgggtctac

SEQ ID NO: 26763 - DNA, 20 bp, Artificial Sequence
  Description of Artificial Sequence: Synthetic oligonucleotide
  Target: LAMA2; (+) strand; PAM type: NNGRRT; PAM sequence: TAGGGT
catctttaattagttctcta

SEQ ID NO: 26764 - DNA, 20 bp, Artificial Sequence
  Description of Artificial Sequence: Synthetic oligonucleotide
  Target: LAMA2; (+) strand; PAM type: NNGRRT; PAM sequence: AGGGAT
aataatatttccacaaataa

SEQ ID NO: 26765 - DNA, 20 bp, Artificial Sequence
  Description of Artificial Sequence: Synthetic oligonucleotide
  Target: LAMA2; (+) strand; PAM type: NNGRRT; PAM sequence: AAGAAT
gttaaccaaaattaatgttc

SEQ ID NO: 26766 - DNA, 20 bp, Artificial Sequence
  Description of Artificial Sequence: Synthetic oligonucleotide
  Target: LAMA2; (+) strand; PAM type: NNGRRT; PAM sequence: TTGGAT
gcaggacgagagattacttt

SEQ ID NO: 26767 - DNA, 20 bp, Artificial Sequence
  Description of Artificial Sequence: Synthetic oligonucleotide
  Target: LAMA2; (+) strand; PAM type: NNGRRT; PAM sequence: TAGAAT
acgagagattactttttgga

SEQ ID NO: 26768 - DNA, 20 bp, Artificial Sequence
  Description of Artificial Sequence: Synthetic oligonucleotide
  Target: LAMA2; (+) strand; PAM type: NNGRRT; PAM sequence: AGGAAT
ttttggatagaatcagttgc

SEQ ID NO: 26769 - DNA, 20 bp, Artificial Sequence
  Description of Artificial Sequence: Synthetic oligonucleotide
  Target: LAMA2; (+) strand; PAM type: NNGRRT; PAM sequence: CAGGAT
ccacaaatacatattgtacc

SEQ ID NO: 26770 - DNA, 20 bp, Artificial Sequence
  Description of Artificial Sequence: Synthetic oligonucleotide
  Target: LAMA2; (+) strand; PAM type: NNGRRT; PAM sequence: GAGAAT
aaacaaaagctcttctacaa

SEQ ID NO: 26771 - DNA, 20 bp, Artificial Sequence
  Description of Artificial Sequence: Synthetic oligonucleotide
  Target: LAMA2; (+) strand; PAM type: NNGRRT; PAM sequence: ATGAAT
caatatctcaagtaagtatg

SEQ ID NO: 26772 - DNA, 20 bp, Artificial Sequence
  Description of Artificial Sequence: Synthetic oligonucleotide
  Target: LAMA2; (+) strand; PAM type: NNGRRT; PAM sequence: AGGGAT
agtatgatgaattttgagat

SEQ ID NO: 26773 - DNA, 20 bp, Artificial Sequence
  Description of Artificial Sequence: Synthetic oligonucleotide
  Target: LAMA2; (+) strand; PAM type: NNGRRT; PAM sequence: TGGGGT
tgagatagggatcatgccat

SEQ ID NO: 26774 - DNA, 20 bp, Artificial Sequence
  Description of Artificial Sequence: Synthetic oligonucleotide
  Target: LAMA2; (+) strand; PAM type: NNGRRT; PAM sequence: TTGGAT
tggggaaatggtcctctttc

SEQ ID NO: 26775 - DNA, 20 bp, Artificial Sequence
  Description of Artificial Sequence: Synthetic oligonucleotide
  Target: LAMA2; (+) strand; PAM type: NNGRRT; PAM sequence: GAGAGT
ctctttcttggatatctttg

SEQ ID NO: 26776 - DNA, 20 bp, Artificial Sequence
  Description of Artificial Sequence: Synthetic oligonucleotide
  Target: LAMA2; (+) strand; PAM type: NNGRRT; PAM sequence: GAGGAT
tttgactctttagtcaaact

SEQ ID NO: 26777 - DNA, 20 bp, Artificial Sequence
  Description of Artificial Sequence: Synthetic oligonucleotide
  Target: LAMA2; (+) strand; PAM type: NNGRRT; PAM sequence: AGGAAT
taatctctgaaataattatt

SEQ ID NO: 26778 - DNA, 20 bp, Artificial Sequence
  Description of Artificial Sequence: Synthetic oligonucleotide
  Target: LAMA2; (+) strand; PAM type: NNGRRT; PAM sequence: TGGAAT
tctttttctttcaaacactt

SEQ ID NO: 26779 - DNA, 20 bp, Artificial Sequence
  Description of Artificial Sequence: Synthetic oligonucleotide
  Target: LAMA2; (+) strand; PAM type: NNGRRT; PAM sequence: CTGAGT
taatttagattctttaaaaa

SEQ ID NO: 26780 - DNA, 20 bp, Artificial Sequence
  Description of Artificial Sequence: Synthetic oligonucleotide
  Target: LAMA2; (+) strand; PAM type: NNGRRT; PAM sequence: TAGGAT
gttgcatttttttttccaat

SEQ ID NO: 26781 - DNA, 20 bp, Artificial Sequence
  Description of Artificial Sequence: Synthetic oligonucleotide
  Target: LAMA2; (+) strand; PAM type: NNGRRT; PAM sequence: TGGAGT
aatcattttttgaaaaagtg

SEQ ID NO: 26782 - DNA, 20 bp, Artificial Sequence
  Description of Artificial Sequence: Synthetic oligonucleotide
  Target: LAMA2; (+) strand; PAM type: NNGRRT; PAM sequence: ATGAAT
gcagttagaaggaaaagact

SEQ ID NO: 26783 - DNA, 20 bp, Artificial Sequence
  Description of Artificial Sequence: Synthetic oligonucleotide
  Target: LAMA2; (+) strand; PAM type: NNGRRT; PAM sequence: TTGAAT
actttttaaaatttaaaccc

SEQ ID NO: 26784 - DNA, 20 bp, Artificial Sequence
  Description of Artificial Sequence: Synthetic oligonucleotide
  Target: LAMA2; (+) strand; PAM type: NNGRRT; PAM sequence: CAGAGT
tgaatatggtatctcaggca

SEQ ID NO: 26785 - DNA, 20 bp, Artificial Sequence
  Description of Artificial Sequence: Synthetic oligonucleotide
  Target: LAMA2; (+) strand; PAM type: NNGRRT; PAM sequence: GTGAGT
tatggtatctcaggcacaga

SEQ ID NO: 26786 - DNA, 20 bp, Artificial Sequence
  Description of Artificial Sequence: Synthetic oligonucleotide
  Target: LAMA2; (+) strand; PAM type: NNGRRT; PAM sequence: GGGAGT
tggagaacaattatcatgac

SEQ ID NO: 26787 - DNA, 20 bp, Artificial Sequence
  Description of Artificial Sequence: Synthetic oligonucleotide
  Target: LAMA2; (+) strand; PAM type: NNGRRT; PAM sequence: CAGGAT
atgctttcttgattatatgg

SEQ ID NO: 26788 - DNA, 20 bp, Artificial Sequence
  Description of Artificial Sequence: Synthetic oligonucleotide
  Target: LAMA2; (+) strand; PAM type: NNGRRT; PAM sequence: AAGGAT
ctttcccacctctgcttttg

SEQ ID NO: 26789 - DNA, 20 bp, Artificial Sequence
  Description of Artificial Sequence: Synthetic oligonucleotide
  Target: LAMA2; (+) strand; PAM type: NNGRRT; PAM sequence: AGGGAT
cttgtttgccagcagctgtt

SEQ ID NO: 26790 - DNA, 20 bp, Artificial Sequence
  Description of Artificial Sequence: Synthetic oligonucleotide
  Target: LAMA2; (+) strand; PAM type: NNGRRT; PAM sequence: AGGGGT
agatttagactggctactga

SEQ ID NO: 26791 - DNA, 20 bp, Artificial Sequence
  Description of Artificial Sequence: Synthetic oligonucleotide
  Target: LAMA2; (+) strand; PAM type: NNGRRT; PAM sequence: CAGAGT
aaaagatttaaaaatctctt

SEQ ID NO: 26792 - DNA, 20 bp, Artificial Sequence
  Description of Artificial Sequence: Synthetic oligonucleotide
  Target: LAMA2; (+) strand; PAM type: NNGRRT; PAM sequence: CAGAAT
gttaattctacctggtgaac

SEQ ID NO: 26793 - DNA, 20 bp, Artificial Sequence
  Description of Artificial Sequence: Synthetic oligonucleotide
  Target: LAMA2; (+) strand; PAM type: NNGRRT; PAM sequence: CTGGGT
cagacttatattttctaaat

SEQ ID NO: 26794 - DNA, 20 bp, Artificial Sequence
  Description of Artificial Sequence: Synthetic oligonucleotide
  Target: LAMA2; (+) strand; PAM type: NNGRRT; PAM sequence: GAGGAT
tctttcgtttaggtgaaata

SEQ ID NO: 26795 - DNA, 20 bp, Artificial Sequence
  Description of Artificial Sequence: Synthetic oligonucleotide
  Target: LAMA2; (+) strand; PAM type: NNGRRT; PAM sequence: TAGAAT
gaggatacagctctgatcat

SEQ ID NO: 26796 - DNA, 20 bp, Artificial Sequence
  Description of Artificial Sequence: Synthetic oligonucleotide
  Target: LAMA2; (+) strand; PAM type: NNGRRT; PAM sequence: GTGGAT
ggcaaacgctcacacacata

SEQ ID NO: 26797 - DNA, 20 bp, Artificial Sequence
  Description of Artificial Sequence: Synthetic oligonucleotide
  Target: LAMA2; (+) strand; PAM type: NNGRRT; PAM sequence: AGGGAT
aattctctcctcaagagaaa

SEQ ID NO: 26798 - DNA, 20 bp, Artificial Sequence
  Description of Artificial Sequence: Synthetic oligonucleotide
  Target: LAMA2; (+) strand; PAM type: NNGRRT; PAM sequence: TAGAAT
tgactttacccttcctggta

SEQ ID NO: 26799 - DNA, 20 bp, Artificial Sequence
  Description of Artificial Sequence: Synthetic oligonucleotide
  Target: LAMA2; (+) strand; PAM type: NNGRRT; PAM sequence: AAGAAT
aaaactagggagaagcactg

SEQ ID NO: 26800 - DNA, 20 bp, Artificial Sequence
  Description of Artificial Sequence: Synthetic oligonucleotide
  Target: LAMA2; (+) strand; PAM type: NNGRRT; PAM sequence: GTGAAT
ttggaggttctgtagagaag

SEQ ID NO: 26801 - DNA, 20 bp, Artificial Sequence
  Description of Artificial Sequence: Synthetic oligonucleotide
  Target: LAMA2; (+) strand; PAM type: NNGRRT; PAM sequence: TGGAGT
attcttttttttctttgaga

SEQ ID NO: 26802 - DNA, 20 bp, Artificial Sequence
  Description of Artificial Sequence: Synthetic oligonucleotide
  Target: LAMA2; (+) strand; PAM type: NNGRRT; PAM sequence: TGGAGT
tcgctctgtcaccccctggc

SEQ ID NO: 26803 - DNA, 20 bp, Artificial Sequence
  Description of Artificial Sequence: Synthetic oligonucleotide
  Target: LAMA2; (+) strand; PAM type: NNGRRT; PAM sequence: CCGAGT
aattctcctgcctcagcctc

SEQ ID NO: 26804 - DNA, 20 bp, Artificial Sequence
  Description of Artificial Sequence: Synthetic oligonucleotide
  Target: LAMA2; (+) strand; PAM type: NNGRRT; PAM sequence: GAGAAT
taatcccatttatccatgtg

SEQ ID NO: 26805 - DNA, 20 bp, Artificial Sequence
  Description of Artificial Sequence: Synthetic oligonucleotide
  Target: LAMA2; (+) strand; PAM type: NNGRRT; PAM sequence: AGGAGT
tttcagctactaagacacac

SEQ ID NO: 26806 - DNA, 20 bp, Artificial Sequence
  Description of Artificial Sequence: Synthetic oligonucleotide
  Target: LAMA2; (+) strand; PAM type: NNGRRT; PAM sequence: GAGAGT
acacacaggagtcctttcta

SEQ ID NO: 26807 - DNA, 20 bp, Artificial Sequence
  Description of Artificial Sequence: Synthetic oligonucleotide
  Target: LAMA2; (+) strand; PAM type: NNGRRT; PAM sequence: TTGGGT
tagtaccaagtccctgctct

SEQ ID NO: 26808 - DNA, 20 bp, Artificial Sequence
  Description of Artificial Sequence: Synthetic oligonucleotide
  Target: LAMA2; (+) strand; PAM type: NNGRRT; PAM sequence: GTGGAT
tccctgctctttgggtaaca

SEQ ID NO: 26809 - DNA, 20 bp, Artificial Sequence
  Description of Artificial Sequence: Synthetic oligonucleotide
  Target: LAMA2; (+) strand; PAM type: NNGRRT; PAM sequence: CTGGGT
cccaggtggctcgtccatct

SEQ ID NO: 26810 - DNA, 20 bp, Artificial Sequence
  Description of Artificial Sequence: Synthetic oligonucleotide
  Target: LAMA2; (+) strand; PAM type: NNGRRT; PAM sequence: CAGGGT
tactgtttactccggacttt

SEQ ID NO: 26811 - DNA, 20 bp, Artificial Sequence
  Description of Artificial Sequence: Synthetic oligonucleotide
  Target: LAMA2; (+) strand; PAM type: NNGRRT; PAM sequence: AGGGAT
taattcattttaagtggaaa

SEQ ID NO: 26812 - DNA, 20 bp, Artificial Sequence
  Description of Artificial Sequence: Synthetic oligonucleotide
  Target: LAMA2; (+) strand; PAM type: NNGRRT; PAM sequence: AAGGGT
gtggaaaagggatggagata

SEQ ID NO: 26813 - DNA, 20 bp, Artificial Sequence
  Description of Artificial Sequence: Synthetic oligonucleotide
  Target: LAMA2; (+) strand; PAM type: NNGRRT; PAM sequence: TAGAAT
ggatggagataaagggtagg

SEQ ID NO: 26814 - DNA, 20 bp, Artificial Sequence
  Description of Artificial Sequence: Synthetic oligonucleotide
  Target: LAMA2; (+) strand; PAM type: NNGRRT; PAM sequence: AGGGGT
caaacattgtagaagcaaga

SEQ ID NO: 26815 - DNA, 20 bp, Artificial Sequence
  Description of Artificial Sequence: Synthetic oligonucleotide
  Target: LAMA2; (+) strand; PAM type: NNGRRT; PAM sequence: CAGGAT
aggactccattgtaaatgct

SEQ ID NO: 26816 - DNA, 20 bp, Artificial Sequence
  Description of Artificial Sequence: Synthetic oligonucleotide
  Target: LAMA2; (+) strand; PAM type: NNGRRT; PAM sequence: GGGAAT
ttggctatccaccaccatga

SEQ ID NO: 26817 - DNA, 20 bp, Artificial Sequence
  Description of Artificial Sequence: Synthetic oligonucleotide
  Target: LAMA2; (+) strand; PAM type: NNGRRT; PAM sequence: CTGAAT
cagctatattttgtacttac

SEQ ID NO: 26818 - DNA, 20 bp, Artificial Sequence
  Description of Artificial Sequence: Synthetic oligonucleotide
  Target: LAMA2; (+) strand; PAM type: NNGRRT; PAM sequence: TAGAAT
acttacctgaattttaaaaa

SEQ ID NO: 26819 - DNA, 20 bp, Artificial Sequence
  Description of Artificial Sequence: Synthetic oligonucleotide
  Target: LAMA2; (+) strand; PAM type: NNGRRT; PAM sequence: TTGAAT
ttaatagttatttttctaat

SEQ ID NO: 26820 - DNA, 20 bp, Artificial Sequence
  Description of Artificial Sequence: Synthetic oligonucleotide
  Target: LAMA2; (+) strand; PAM type: NNGRRT; PAM sequence: GTGGAT
tatgatataagaagtattct

SEQ ID NO: 26821 - DNA, 20 bp, Artificial Sequence
  Description of Artificial Sequence: Synthetic oligonucleotide
  Target: LAMA2; (+) strand; PAM type: NNGRRT; PAM sequence: TTGGAT
ggataaagtatacatttatt

SEQ ID NO: 26822 - DNA, 20 bp, Artificial Sequence
  Description of Artificial Sequence: Synthetic oligonucleotide
  Target: LAMA2; (+) strand; PAM type: NNGRRT; PAM sequence: TAGAAT
atacatttattttggatatt

SEQ ID NO: 26823 - DNA, 20 bp, Artificial Sequence
  Description of Artificial Sequence: Synthetic oligonucleotide
  Target: LAMA2; (+) strand; PAM type: NNGRRT; PAM sequence: ATGGAT
cctaagtctcattcaagcta

SEQ ID NO: 26824 - DNA, 20 bp, Artificial Sequence
  Description of Artificial Sequence: Synthetic oligonucleotide
  Target: LAMA2; (+) strand; PAM type: NNGRRT; PAM sequence: AAGAAT
aagtttgctcactgaaggac

SEQ ID NO: 26825 - DNA, 20 bp, Artificial Sequence
  Description of Artificial Sequence: Synthetic oligonucleotide
  Target: LAMA2; (+) strand; PAM type: NNGRRT; PAM sequence: AAGAAT
cttcaaggtgatagttcata

SEQ ID NO: 26826 - DNA, 20 bp, Artificial Sequence
  Description of Artificial Sequence: Synthetic oligonucleotide
  Target: LAMA2; (+) strand; PAM type: NNGRRT; PAM sequence: ACGGAT
tatgtttttgcctgtgagat

SEQ ID NO: 26827 - DNA, 20 bp, Artificial Sequence
  Description of Artificial Sequence: Synthetic oligonucleotide
  Target: LAMA2; (+) strand; PAM type: NNGRRT; PAM sequence: CTGAAT
agtgattcctcaatgagcag

SEQ ID NO: 26828 - DNA, 20 bp, Artificial Sequence
  Description of Artificial Sequence: Synthetic oligonucleotide
  Target: LAMA2; (+) strand; PAM type: NNGRRT; PAM sequence: TTGAAT
tgtccaaatgtcaccaatta

SEQ ID NO: 26829 - DNA, 20 bp, Artificial Sequence
  Description of Artificial Sequence: Synthetic oligonucleotide
  Target: LAMA2; (+) strand; PAM type: NNGRRT; PAM sequence: TTGAAT
tacatttttatttaaaaatt

SEQ ID NO: 26830 - DNA, 20 bp, Artificial Sequence
  Description of Artificial Sequence: Synthetic oligonucleotide
  Target: LAMA2; (+) strand; PAM type: NNGRRT; PAM sequence: CTGGGT
atttaaaaattttgaatagg

SEQ ID NO: 26831 - DNA, 20 bp, Artificial Sequence
  Description of Artificial Sequence: Synthetic oligonucleotide
  Target: LAMA2; (+) strand; PAM type: NNGRRT; PAM sequence: GCGGAT
actttgggaggctgaggcgg

SEQ ID NO: 26832 - DNA, 20 bp, Artificial Sequence
  Description of Artificial Sequence: Synthetic oligonucleotide
  Target: LAMA2; (+) strand; PAM type: NNGRRT; PAM sequence: GAGAAT
tactcgggaggctgaggcag

SEQ ID NO: 26833 - DNA, 20 bp, Artificial Sequence
  Description of Artificial Sequence: Synthetic oligonucleotide
  Target: LAMA2; (+) strand; PAM type: NNGRRT; PAM sequence: TTGAAT
caaaaaaaaaaaaatttttt

SEQ ID NO: 26834 - DNA, 20 bp, Artificial Sequence
  Description of Artificial Sequence: Synthetic oligonucleotide
  Target: LAMA2; (+) strand; PAM type: NNGRRT; PAM sequence: TAGAAT
aaaaattttttttgaataaa

SEQ ID NO: 26835 - DNA, 20 bp, Artificial Sequence
  Description of Artificial Sequence: Synthetic oligonucleotide
  Target: LAMA2; (+) strand; PAM type: NNGRRT; PAM sequence: GTGGGT
tttgtatgagcatagaaggt

SEQ ID NO: 26836 - DNA, 20 bp, Artificial Sequence
  Description of Artificial Sequence: Synthetic oligonucleotide
  Target: LAMA2; (+) strand; PAM type: NNGRRT; PAM sequence: GAGAAT
atagagccagttctcatata

SEQ ID NO: 26837 - DNA, 20 bp, Artificial Sequence
  Description of Artificial Sequence: Synthetic oligonucleotide
  Target: LAMA2; (+) strand; PAM type: NNGRRT; PAM sequence: GAGAAT
agagaatttattctctatat

SEQ ID NO: 26838 - DNA, 20 bp, Artificial Sequence
  Description of Artificial Sequence: Synthetic oligonucleotide
  Target: LAMA2; (+) strand; PAM type: NNGRRT; PAM sequence: GAGAAT
ttattctctatatgagaata

SEQ ID NO: 26839 - DNA, 20 bp, Artificial Sequence
  Description of Artificial Sequence: Synthetic oligonucleotide
  Target: LAMA2; (+) strand; PAM type: NNGRRT; PAM sequence: TCGGGT
tttggtgcaagaaataaata

SEQ ID NO: 26840 - DNA, 20 bp, Artificial Sequence
  Description of Artificial Sequence: Synthetic oligonucleotide
  Target: LAMA2; (+) strand; PAM type: NNGRRT; PAM sequence: TTGGAT
gaagacaggttatgaggctg

SEQ ID NO: 26841 - DNA, 20 bp, Artificial Sequence
  Description of Artificial Sequence: Synthetic oligonucleotide
  Target: LAMA2; (+) strand; PAM type: NNGRRT; PAM sequence: TTGGAT
atccccattataatggcagc

SEQ ID NO: 26842 - DNA, 20 bp, Artificial Sequence
  Description of Artificial Sequence: Synthetic oligonucleotide
  Target: LAMA2; (+) strand; PAM type: NNGRRT; PAM sequence: TGGGAT
tgggaaaaagcagacatgtg

SEQ ID NO: 26843 - DNA, 20 bp, Artificial Sequence
  Description of Artificial Sequence: Synthetic oligonucleotide
  Target: LAMA2; (+) strand; PAM type: NNGRRT; PAM sequence: TGGAAT
tgtgggatgttttaggcagc

SEQ ID NO: 26844 - DNA, 20 bp, Artificial Sequence
  Description of Artificial Sequence: Synthetic oligonucleotide
  Target: LAMA2; (+) strand; PAM type: NNGRRT; PAM sequence: CTGGGT
cttattaatggcccagaggt

SEQ ID NO: 26845 - DNA, 20 bp, Artificial Sequence
  Description of Artificial Sequence: Synthetic oligonucleotide
  Target: LAMA2; (+) strand; PAM type: NNGRRT; PAM sequence: AAGGAT
gcagttagagaaggaaaatc

SEQ ID NO: 26846 - DNA, 20 bp, Artificial Sequence
  Description of Artificial Sequence: Synthetic oligonucleotide
  Target: LAMA2; (+) strand; PAM type: NNGRRT; PAM sequence: ATGGAT
tttttgtcttgagcaactgc

SEQ ID NO: 26847 - DNA, 20 bp, Artificial Sequence
  Description of Artificial Sequence: Synthetic oligonucleotide
  Target: LAMA2; (+) strand; PAM type: NNGRRT; PAM sequence: TTGAAT
ctgcatggatggtgatgtca

SEQ ID NO: 26848 - DNA, 20 bp, Artificial Sequence
  Description of Artificial Sequence: Synthetic oligonucleotide
  Target: LAMA2; (+) strand; PAM type: NNGRRT; PAM sequence: TGGAAT
ggtgatgtcattgaatgtga

SEQ ID NO: 26849 - DNA, 20 bp, Artificial Sequence
  Description of Artificial Sequence: Synthetic oligonucleotide
  Target: LAMA2; (+) strand; PAM type: NNGRRT; PAM sequence: AGGGGT
atgtgatggaatagatcggg

SEQ ID NO: 26850 - DNA, 20 bp, Artificial Sequence
  Description of Artificial Sequence: Synthetic oligonucleotide
  Target: LAMA2; (+) strand; PAM type: NNGRRT; PAM sequence: CTGAAT
acagttctgctatagccata

SEQ ID NO: 26851 - DNA, 20 bp, Artificial Sequence
  Description of Artificial Sequence: Synthetic oligonucleotide
  Target: LAMA2; (+) strand; PAM type: NNGRRT; PAM sequence: TTGGAT
tagaactattgatttaatat

SEQ ID NO: 26852 - DNA, 20 bp, Artificial Sequence
  Description of Artificial Sequence: Synthetic oligonucleotide
  Target: LAMA2; (+) strand; PAM type: NNGRRT; PAM sequence: TCGGAT
ctgttctggctatcttacat

SEQ ID NO: 26853 - DNA, 20 bp, Artificial Sequence
  Description of Artificial Sequence: Synthetic oligonucleotide
  Target: LAMA2; (+) strand; PAM type: NNGRRT; PAM sequence: TTGAGT
catttgtacacaagtatttg

SEQ ID NO: 26854 - DNA, 20 bp, Artificial Sequence
  Description of Artificial Sequence: Synthetic oligonucleotide
  Target: LAMA2; (+) strand; PAM type: NNGRRT; PAM sequence: TCGGAT
aagccatataaacactgcct

SEQ ID NO: 26855 - DNA, 20 bp, Artificial Sequence
  Description of Artificial Sequence: Synthetic oligonucleotide
  Target: LAMA2; (+) strand; PAM type: NNGRRT; PAM sequence: TTGGAT
aaaaaatatgctatttaggt

SEQ ID NO: 26856 - DNA, 20 bp, Artificial Sequence
  Description of Artificial Sequence: Synthetic oligonucleotide
  Target: LAMA2; (+) strand; PAM type: NNGRRT; PAM sequence: AAGGAT
aacctatcatctttaaaaca

SEQ ID NO: 26857 - DNA, 20 bp, Artificial Sequence
  Description of Artificial Sequence: Synthetic oligonucleotide
  Target: LAMA2; (+) strand; PAM type: NNGRRT; PAM sequence: TAGAGT
acaaaggatataaaatctaa

SEQ ID NO: 26858 - DNA, 20 bp, Artificial Sequence
  Description of Artificial Sequence: Synthetic oligonucleotide
  Target: LAMA2; (+) strand; PAM type: NNGRRT; PAM sequence: GTGGAT
aggatataaaatctaataga

SEQ ID NO: 26859 - DNA, 20 bp, Artificial Sequence
  Description of Artificial Sequence: Synthetic oligonucleotide
  Target: LAMA2; (+) strand; PAM type: NNGRRT; PAM sequence: ATGAGT
tcattagactctaatcaata

SEQ ID NO: 26860 - DNA, 20 bp, Artificial Sequence
  Description of Artificial Sequence: Synthetic oligonucleotide
  Target: LAMA2; (+) strand; PAM type: NNGRRT; PAM sequence: TAGAAT
atctattaaaataaattaaa

SEQ ID NO: 26861 - DNA, 20 bp, Artificial Sequence
  Description of Artificial Sequence: Synthetic oligonucleotide
  Target: LAMA2; (+) strand; PAM type: NNGRRT; PAM sequence: CAGAAT
aatgttttcccatattaact

SEQ ID NO: 26862 - DNA, 20 bp, Artificial Sequence
  Description of Artificial Sequence: Synthetic oligonucleotide
  Target: LAMA2; (+) strand; PAM type: NNGRRT; PAM sequence: CTGAAT
taactttgtctgaaattaaa

SEQ ID NO: 26863 - DNA, 20 bp, Artificial Sequence
  Description of Artificial Sequence: Synthetic oligonucleotide
  Target: LAMA2; (+) strand; PAM type: NNGRRT; PAM sequence: TAGAGT
atcatttatagatacaagca

SEQ ID NO: 26864 - DNA, 20 bp, Artificial Sequence
  Description of Artificial Sequence: Synthetic oligonucleotide
  Target: LAMA2; (+) strand; PAM type: NNGRRT; PAM sequence: TTGGAT
ttaaattcaggtaatcttat

SEQ ID NO: 26865 - DNA, 20 bp, Artificial Sequence
  Description of Artificial Sequence: Synthetic oligonucleotide
  Target: LAMA2; (+) strand; PAM type: NNGRRT; PAM sequence: GTGAAT
cttatttggatgtacaaacc

SEQ ID NO: 26866 - DNA, 20 bp, Artificial Sequence
  Description of Artificial Sequence: Synthetic oligonucleotide
  Target: LAMA2; (+) strand; PAM type: NNGRRT; PAM sequence: TCGAAT
agtagtcataattaattata

SEQ ID NO: 26867 - DNA, 20 bp, Artificial Sequence
  Description of Artificial Sequence: Synthetic oligonucleotide
  Target: LAMA2; (+) strand; PAM type: NNGRRT; PAM sequence: CAGAGT
aattaattatatcgaatctt

SEQ ID NO: 26868 - DNA, 20 bp, Artificial Sequence
  Description of Artificial Sequence: Synthetic oligonucleotide
  Target: LAMA2; (+) strand; PAM type: NNGRRT; PAM sequence: ATGGAT
ctctccagtttatctgtgtt

SEQ ID NO: 26869 - DNA, 20 bp, Artificial Sequence
  Description of Artificial Sequence: Synthetic oligonucleotide
  Target: LAMA2; (+) strand; PAM type: NNGRRT; PAM sequence: AAGAGT
ttatctgtgttatggattgt

SEQ ID NO: 26870 - DNA, 20 bp, Artificial Sequence
  Description of Artificial Sequence: Synthetic oligonucleotide
  Target: LAMA2; (+) strand; PAM type: NNGRRT; PAM sequence: TAGAAT
actctaaggtactctaacac

SEQ ID NO: 26871 - DNA, 20 bp, Artificial Sequence
  Description of Artificial Sequence: Synthetic oligonucleotide
  Target: LAMA2; (+) strand; PAM type: NNGRRT; PAM sequence: ACGAAT
gttatatttgttactttggt

SEQ ID NO: 26872 - DNA, 20 bp, Artificial Sequence
  Description of Artificial Sequence: Synthetic oligonucleotide
  Target: LAMA2; (+) strand; PAM type: NNGRRT; PAM sequence: AAGAAT
ttcctcattgttcctaaaca

SEQ ID NO: 26873 - DNA, 20 bp, Artificial Sequence
  Description of Artificial Sequence: Synthetic oligonucleotide
  Target: LAMA2; (+) strand; PAM type: NNGRRT; PAM sequence: AGGAAT
ctttttatgtagtctgcact

SEQ ID NO: 26874 - DNA, 20 bp, Artificial Sequence
  Description of Artificial Sequence: Synthetic oligonucleotide
  Target: LAMA2; (+) strand; PAM type: NNGRRT; PAM sequence: TTGGAT
cttttaactgtagtggaaat

SEQ ID NO: 26875 - DNA, 20 bp, Artificial Sequence
  Description of Artificial Sequence: Synthetic oligonucleotide
  Target: LAMA2; (+) strand; PAM type: NNGRRT; PAM sequence: CTGAGT
tgccctttgtgttttaacta

SEQ ID NO: 26876 - DNA, 20 bp, Artificial Sequence
  Description of Artificial Sequence: Synthetic oligonucleotide
  Target: LAMA2; (+) strand; PAM type: NNGRRT; PAM sequence: CTGAAT
aatagaccaagcaccattat

SEQ ID NO: 26877 - DNA, 20 bp, Artificial Sequence
  Description of Artificial Sequence: Synthetic oligonucleotide
  Target: LAMA2; (+) strand; PAM type: NNGRRT; PAM sequence: AAGAAT
atgtgtacaaagacatattc

SEQ ID NO: 26878 - DNA, 20 bp, Artificial Sequence
  Description of Artificial Sequence: Synthetic oligonucleotide
  Target: LAMA2; (+) strand; PAM type: NNGRRT; PAM sequence: ATGAAT
caaatgacatcgctattggc

SEQ ID NO: 26879 - DNA, 20 bp, Artificial Sequence
  Description of Artificial Sequence: Synthetic oligonucleotide
  Target: LAMA2; (+) strand; PAM type: NNGRRT; PAM sequence: AGGAAT
tttcatagtatcataatatt

SEQ ID NO: 26880 - DNA, 20 bp, Artificial Sequence
  Description of Artificial Sequence: Synthetic oligonucleotide
  Target: LAMA2; (+) strand; PAM type: NNGRRT; PAM sequence: ACGGGT
caactgttatacccaacagc

SEQ ID NO: 26881 - DNA, 20 bp, Artificial Sequence
  Description of Artificial Sequence: Synthetic oligonucleotide
  Target: LAMA2; (+) strand; PAM type: NNGRRT; PAM sequence: AAGAGT
ggaaaagaaattagacataa

SEQ ID NO: 26882 - DNA, 20 bp, Artificial Sequence
  Description of Artificial Sequence: Synthetic oligonucleotide
  Target: LAMA2; (+) strand; PAM type: NNGRRT; PAM sequence: CAGGAT
ctttcatgctagatagaagt

SEQ ID NO: 26883 - DNA, 20 bp, Artificial Sequence
  Description of Artificial Sequence: Synthetic oligonucleotide
  Target: LAMA2; (+) strand; PAM type: NNGRRT; PAM sequence: AAGGGT
ggatactagttatctttgga

SEQ ID NO: 26884 - DNA, 20 bp, Artificial Sequence
  Description of Artificial Sequence: Synthetic oligonucleotide
  Target: LAMA2; (+) strand; PAM type: NNGRRT; PAM sequence: GAGGAT
ttggaaagggtagagatagg

SEQ ID NO: 26885 - DNA, 20 bp, Artificial Sequence
  Description of Artificial Sequence: Synthetic oligonucleotide
  Target: LAMA2; (+) strand; PAM type: NNGRRT; PAM sequence: ATGAAT
ccatttccttgtcactagag

SEQ ID NO: 26886 - DNA, 20 bp, Artificial Sequence
  Description of Artificial Sequence: Synthetic oligonucleotide
  Target: LAMA2; (+) strand; PAM type: NNGRRT; PAM sequence: CTGAAT
atatatgtatctaaaatatg

SEQ ID NO: 26887 - DNA, 20 bp, Artificial Sequence
  Description of Artificial Sequence: Synthetic oligonucleotide
  Target: LAMA2; (+) strand; PAM type: NNGRRT; PAM sequence: AAGAAT
tgcattttatctcacactta

SEQ ID NO: 26888 - DNA, 20 bp, Artificial Sequence
  Description of Artificial Sequence: Synthetic oligonucleotide
  Target: LAMA2; (+) strand; PAM type: NNGRRT; PAM sequence: ATGAGT
tgaccataagtaaatgtaat

SEQ ID NO: 26889 - DNA, 20 bp, Artificial Sequence
  Description of Artificial Sequence: Synthetic oligonucleotide
  Target: LAMA2; (+) strand; PAM type: NNGRRT; PAM sequence: TTGGAT
gttttgtaactcaatgtctg

SEQ ID NO: 26890 - DNA, 20 bp, Artificial Sequence
  Description of Artificial Sequence: Synthetic oligonucleotide
  Target: LAMA2; (+) strand; PAM type: NNGRRT; PAM sequence: GAGAGT
acttagaaaatgttattcat

SEQ ID NO: 26891 - DNA, 20 bp, Artificial Sequence
  Description of Artificial Sequence: Synthetic oligonucleotide
  Target: LAMA2; (+) strand; PAM type: NNGRRT; PAM sequence: TGGGAT
aatggtttttcataatttca

SEQ ID NO: 26892 - DNA, 20 bp, Artificial Sequence
  Description of Artificial Sequence: Synthetic oligonucleotide
  Target: LAMA2; (+) strand; PAM type: NNGRRT; PAM sequence: GAGAAT
tcatgggatgcatcatccaa

SEQ ID NO: 26893 - DNA, 20 bp, Artificial Sequence
  Description of Artificial Sequence: Synthetic oligonucleotide
  Target: LAMA2; (+) strand; PAM type: NNGRRT; PAM sequence: GAGAGT
atgtgataggtgtttcccaa

SEQ ID NO: 26894 - DNA, 20 bp, Artificial Sequence
  Description of Artificial Sequence: Synthetic oligonucleotide
  Target: LAMA2; (+) strand; PAM type: NNGRRT; PAM sequence: AAGGAT
cctgtcatctgagataccca

SEQ ID NO: 26895 - DNA, 20 bp, Artificial Sequence
  Description of Artificial Sequence: Synthetic oligonucleotide
  Target: LAMA2; (+) strand; PAM type: NNGRRT; PAM sequence: AAGGGT
tttttttttaagttagcatc

SEQ ID NO: 26896 - DNA, 20 bp, Artificial Sequence
  Description of Artificial Sequence: Synthetic oligonucleotide
  Target: LAMA2; (+) strand; PAM type: NNGRRT; PAM sequence: AGGGAT
tatgtgatttgaaacatttt

SEQ ID NO: 26897 - DNA, 20 bp, Artificial Sequence
  Description of Artificial Sequence: Synthetic oligonucleotide
  Target: LAMA2; (+) strand; PAM type: NNGRRT; PAM sequence: AAGAAT
aaatctagttgccttggaag

SEQ ID NO: 26898 - DNA, 20 bp, Artificial Sequence
  Description of Artificial Sequence: Synthetic oligonucleotide
  Target: LAMA2; (+) strand; PAM type: NNGRRT; PAM sequence: ATGAAT
ctagttgccttggaagaaga

SEQ ID NO: 26899 - DNA, 20 bp, Artificial Sequence
  Description of Artificial Sequence: Synthetic oligonucleotide
  Target: LAMA2; (+) strand; PAM type: NNGRRT; PAM sequence: TTGAAT
atatttttgctatttcaagt

SEQ ID NO: 26900 - DNA, 20 bp, Artificial Sequence
  Description of Artificial Sequence: Synthetic oligonucleotide
  Target: LAMA2; (+) strand; PAM type: NNGRRT; PAM sequence: AAGAAT
ggcaaatcttcacatatgaa

SEQ ID NO: 26901 - DNA, 20 bp, Artificial Sequence
  Description of Artificial Sequence: Synthetic oligonucleotide
  Target: LAMA2; (+) strand; PAM type: NNGRRT; PAM sequence: AAGAAT
tcaggtcttaaataaaaagg

SEQ ID NO: 26902 - DNA, 20 bp, Artificial Sequence
  Description of Artificial Sequence: Synthetic oligonucleotide
  Target: LAMA2; (+) strand; PAM type: NNGRRT; PAM sequence: CTGGAT
aacacttcttggctatttca

SEQ ID NO: 26903 - DNA, 20 bp, Artificial Sequence
  Description of Artificial Sequence: Synthetic oligonucleotide
  Target: LAMA2; (+) strand; PAM type: NNGRRT; PAM sequence: TAGGGT
cactggatatttctaaatga

SEQ ID NO: 26904 - DNA, 20 bp, Artificial Sequence
  Description of Artificial Sequence: Synthetic oligonucleotide
  Target: LAMA2; (+) strand; PAM type: NNGRRT; PAM sequence: CTGGGT
attttatttgtttatttttc

SEQ ID NO: 26905 - DNA, 20 bp, Artificial Sequence
  Description of Artificial Sequence: Synthetic oligonucleotide
  Target: LAMA2; (+) strand; PAM type: NNGRRT; PAM sequence: TAGAGT
taaatagtctgacttttctt

SEQ ID NO: 26906 - DNA, 20 bp, Artificial Sequence
  Description of Artificial Sequence: Synthetic oligonucleotide
  Target: LAMA2; (+) strand; PAM type: NNGRRT; PAM sequence: CTGAAT
caaagtcctctatgttctgc

SEQ ID NO: 26907 - DNA, 20 bp, Artificial Sequence
  Description of Artificial Sequence: Synthetic oligonucleotide
  Target: LAMA2; (+) strand; PAM type: NNGRRT; PAM sequence: TAGGAT
cctctatgttctgcctgaat

SEQ ID NO: 26908 - DNA, 20 bp, Artificial Sequence
  Description of Artificial Sequence: Synthetic oligonucleotide
  Target: LAMA2; (+) strand; PAM type: NNGRRT; PAM sequence: TTGGAT
cactgtactgtttttctaca

SEQ ID NO: 26909 - DNA, 20 bp, Artificial Sequence
  Description of Artificial Sequence: Synthetic oligonucleotide
  Target: LAMA2; (+) strand; PAM type: NNGRRT; PAM sequence: AGGGAT
tacattggatctaccttgtc

SEQ ID NO: 26910 - DNA, 20 bp, Artificial Sequence
  Description of Artificial Sequence: Synthetic oligonucleotide
  Target: LAMA2; (+) strand; PAM type: NNGRRT; PAM sequence: GTGAAT
taagaaatattacatgggca

SEQ ID NO: 26911 - DNA, 20 bp, Artificial Sequence
  Description of Artificial Sequence: Synthetic oligonucleotide
  Target: LAMA2; (+) strand; PAM type: NNGRRT; PAM sequence: CTGAGT
ttacatgggcagtgaatttt

SEQ ID NO: 26912 - DNA, 20 bp, Artificial Sequence
  Description of Artificial Sequence: Synthetic oligonucleotide
  Target: LAMA2; (+) strand; PAM type: NNGRRT; PAM sequence: ATGAGT
tctacttttttgaaactccc

SEQ ID NO: 26913 - DNA, 20 bp, Artificial Sequence
  Description of Artificial Sequence: Synthetic oligonucleotide
  Target: LAMA2; (+) strand; PAM type: NNGRRT; PAM sequence: GTGGGT
tatttttttgtttctctttt

SEQ ID NO: 26914 - DNA, 20 bp, Artificial Sequence
  Description of Artificial Sequence: Synthetic oligonucleotide
  Target: LAMA2; (+) strand; PAM type: NNGRRT; PAM sequence: AAGAGT
tgccttcaacttttttgtcc

SEQ ID NO: 26915 - DNA, 20 bp, Artificial Sequence
  Description of Artificial Sequence: Synthetic oligonucleotide
  Target: LAMA2; (+) strand; PAM type: NNGRRT; PAM sequence: TTGAAT
atattattctatttttcttc

SEQ ID NO: 26916 - DNA, 20 bp, Artificial Sequence
  Description of Artificial Sequence: Synthetic oligonucleotide
  Target: LAMA2; (+) strand; PAM type: NNGRRT; PAM sequence: AGGAGT
caggcagatcacctgaggtc

SEQ ID NO: 26917 - DNA, 20 bp, Artificial Sequence
  Description of Artificial Sequence: Synthetic oligonucleotide
  Target: LAMA2; (+) strand; PAM type: NNGRRT; PAM sequence: GAGAAT
tactcaggaggctgaggcag

SEQ ID NO: 26918 - DNA, 20 bp, Artificial Sequence
  Description of Artificial Sequence: Synthetic oligonucleotide
  Target: LAMA2; (+) strand; PAM type: NNGRRT; PAM sequence: AAGAGT
ttgctaaaaacttgggaggc

SEQ ID NO: 26919 - DNA, 20 bp, Artificial Sequence
  Description of Artificial Sequence: Synthetic oligonucleotide
  Target: LAMA2; (+) strand; PAM type: NNGRRT; PAM sequence: AAGAAT
tgccaggcagcattaaatgt

SEQ ID NO: 26920 - DNA, 20 bp, Artificial Sequence
  Description of Artificial Sequence: Synthetic oligonucleotide
  Target: LAMA2; (+) strand; PAM type: NNGRRT; PAM sequence: TGGGAT
aatgtgcagattttttcctc

SEQ ID NO: 26921 - DNA, 20 bp, Artificial Sequence
  Description of Artificial Sequence: Synthetic oligonucleotide
  Target: LAMA2; (+) strand; PAM type: NNGRRT; PAM sequence: CAGAAT
ctgggatcctgtcatttctc

SEQ ID NO: 26922 - DNA, 20 bp, Artificial Sequence
  Description of Artificial Sequence: Synthetic oligonucleotide
  Target: LAMA2; (+) strand; PAM type: NNGRRT; PAM sequence: TGGAAT
acccctgaagtttccatcac

SEQ ID NO: 26923 - DNA, 20 bp, Artificial Sequence
  Description of Artificial Sequence: Synthetic oligonucleotide
  Target: LAMA2; (+) strand; PAM type: NNGRRT; PAM sequence: GGGAGT
aggtggtggcaacaagctgt

SEQ ID NO: 26924 - DNA, 20 bp, Artificial Sequence
  Description of Artificial Sequence: Synthetic oligonucleotide
  Target: LAMA2; (+) strand; PAM type: NNGRRT; PAM sequence: GGGAGT
tgtcccaggcgtggtgtccc

SEQ ID NO: 26925 - DNA, 20 bp, Artificial Sequence
  Description of Artificial Sequence: Synthetic oligonucleotide
  Target: LAMA2; (+) strand; PAM type: NNGRRT; PAM sequence: TAGGAT
gggagtttcctctcctgaga

SEQ ID NO: 26926 - DNA, 20 bp, Artificial Sequence
  Description of Artificial Sequence: Synthetic oligonucleotide
  Target: LAMA2; (+) strand; PAM type: NNGRRT; PAM sequence: AGGGGT
gttcatgtagattccaggga

SEQ ID NO: 26927 - DNA, 20 bp, Artificial Sequence
  Description of Artificial Sequence: Synthetic oligonucleotide
  Target: LAMA2; (+) strand; PAM type: NNGRRT; PAM sequence: GGGAGT
gaggcagaggggcgagagat

SEQ ID NO: 26928 - DNA, 20 bp, Artificial Sequence
  Description of Artificial Sequence: Synthetic oligonucleotide
  Target: LAMA2; (+) strand; PAM type: NNGRRT; PAM sequence: TGGAGT
ctcctcaaagcgccatactt

SEQ ID NO: 26929 - DNA, 20 bp, Artificial Sequence
  Description of Artificial Sequence: Synthetic oligonucleotide
  Target: LAMA2; (+) strand; PAM type: NNGRRT; PAM sequence: ATGAAT
tcttaatataatcacatttt

SEQ ID NO: 26930 - DNA, 20 bp, Artificial Sequence
  Description of Artificial Sequence: Synthetic oligonucleotide
  Target: LAMA2; (+) strand; PAM type: NNGRRT; PAM sequence: TTGGAT
ctcttagaagtttctccttt

SEQ ID NO: 26931 - DNA, 20 bp, Artificial Sequence
  Description of Artificial Sequence: Synthetic oligonucleotide
  Target: LAMA2; (+) strand; PAM type: NNGRRT; PAM sequence: TTGAGT
tttaacacaacccccagctt

SEQ ID NO: 26932 - DNA, 20 bp, Artificial Sequence
  Description of Artificial Sequence: Synthetic oligonucleotide
  Target: LAMA2; (+) strand; PAM type: NNGRRT; PAM sequence: TAGGAT
tcaagtagattgtaattggc

SEQ ID NO: 26933 - DNA, 20 bp, Artificial Sequence
  Description of Artificial Sequence: Synthetic oligonucleotide
  Target: LAMA2; (+) strand; PAM type: NNGRRT; PAM sequence: TAGAGT
caatttgctacaaacatata

SEQ ID NO: 26934 - DNA, 20 bp, Artificial Sequence
  Description of Artificial Sequence: Synthetic oligonucleotide
  Target: LAMA2; (+) strand; PAM type: NNGRRT; PAM sequence: AAGAAT
tgtagttattttctagccat

SEQ ID NO: 26935 - DNA, 20 bp, Artificial Sequence
  Description of Artificial Sequence: Synthetic oligonucleotide
  Target: LAMA2; (+) strand; PAM type: NNGRRT; PAM sequence: CTGAAT
tggagagaaaaggtaggaga

SEQ ID NO: 26936 - DNA, 20 bp, Artificial Sequence
  Description of Artificial Sequence: Synthetic oligonucleotide
  Target: LAMA2; (+) strand; PAM type: NNGRRT; PAM sequence: TTGAAT
tgaatgccctgagcatccct

SEQ ID NO: 26937 - DNA, 20 bp, Artificial Sequence
  Description of Artificial Sequence: Synthetic oligonucleotide
  Target: LAMA2; (+) strand; PAM type: NNGRRT; PAM sequence: CTGGAT
gtaattcaagtatgtcctgc

SEQ ID NO: 26938 - DNA, 20 bp, Artificial Sequence
  Description of Artificial Sequence: Synthetic oligonucleotide
  Target: LAMA2; (+) strand; PAM type: NNGRRT; PAM sequence: GTGGGT
tcctgcctggataaggactt

SEQ ID NO: 26939 - DNA, 20 bp, Artificial Sequence
  Description of Artificial Sequence: Synthetic oligonucleotide
  Target: LAMA2; (+) strand; PAM type: NNGRRT; PAM sequence: CAGAGT
aggacttgtgggtaaggaaa

SEQ ID NO: 26940 - DNA, 20 bp, Artificial Sequence
  Description of Artificial Sequence: Synthetic oligonucleotide
  Target: LAMA2; (+) strand; PAM type: NNGRRT; PAM sequence: CGGAAT
caaagagatgaagactaatt

SEQ ID NO: 26941 - DNA, 20 bp, Artificial Sequence
  Description of Artificial Sequence: Synthetic oligonucleotide
  Target: LAMA2; (+) strand; PAM type: NNGRRT; PAM sequence: CAGAAT
ccaaaagaaaaagactcctc

SEQ ID NO: 26942 - DNA, 20 bp, Artificial Sequence
  Description of Artificial Sequence: Synthetic oligonucleotide
  Target: LAMA2; (+) strand; PAM type: NNGRRT; PAM sequence: GAGAGT
ctaggaaatttcatccattg

SEQ ID NO: 26943 - DNA, 20 bp, Artificial Sequence
  Description of Artificial Sequence: Synthetic oligonucleotide
  Target: LAMA2; (+) strand; PAM type: NNGRRT; PAM sequence: CTGAGT
atctctcctgcaagacatta

SEQ ID NO: 26944 - DNA, 20 bp, Artificial Sequence
  Description of Artificial Sequence: Synthetic oligonucleotide
  Target: LAMA2; (+) strand; PAM type: NNGRRT; PAM sequence: TTGGAT
cattgttgttgtattgttgg

SEQ ID NO: 26945 - DNA, 20 bp, Artificial Sequence
  Description of Artificial Sequence: Synthetic oligonucleotide
  Target: LAMA2; (+) strand; PAM type: NNGRRT; PAM sequence: TTGGAT
tgttggttggatggtttgcc

SEQ ID NO: 26946 - DNA, 20 bp, Artificial Sequence
  Description of Artificial Sequence: Synthetic oligonucleotide
  Target: LAMA2; (+) strand; PAM type: NNGRRT; PAM sequence: AGGAAT
tctattttgttttacttaaa

SEQ ID NO: 26947 - DNA, 20 bp, Artificial Sequence
  Description of Artificial Sequence: Synthetic oligonucleotide
  Target: LAMA2; (+) strand; PAM type: NNGRRT; PAM sequence: AGGAGT
aatcaatagatagatgcata

SEQ ID NO: 26948 - DNA, 20 bp, Artificial Sequence
  Description of Artificial Sequence: Synthetic oligonucleotide
  Target: LAMA2; (+) strand; PAM type: NNGRRT; PAM sequence: CAGAAT
gaggacttctttgcaggagg

SEQ ID NO: 26949 - DNA, 20 bp, Artificial Sequence
  Description of Artificial Sequence: Synthetic oligonucleotide
  Target: LAMA2; (+) strand; PAM type: NNGRRT; PAM sequence: TAGAAT
taataactcaacaaaataaa

SEQ ID NO: 26950 - DNA, 20 bp, Artificial Sequence
  Description of Artificial Sequence: Synthetic oligonucleotide
  Target: LAMA2; (+) strand; PAM type: NNGRRT; PAM sequence: GGGAAT
ctattatccccaaaagtaat

SEQ ID NO: 26951 - DNA, 20 bp, Artificial Sequence
  Description of Artificial Sequence: Synthetic oligonucleotide
  Target: LAMA2; (+) strand; PAM type: NNGRRT; PAM sequence: CTGAAT
atccaataagcctttcattt

SEQ ID NO: 26952 - DNA, 20 bp, Artificial Sequence
  Description of Artificial Sequence: Synthetic oligonucleotide
  Target: LAMA2; (+) strand; PAM type: NNGRRT; PAM sequence: CTGAAT
aagatttttctctatctttg

SEQ ID NO: 26953 - DNA, 20 bp, Artificial Sequence
  Description of Artificial Sequence: Synthetic oligonucleotide
  Target: LAMA2; (+) strand; PAM type: NNGRRT; PAM sequence: CTGAAT
aatccttacataccaatgtt

SEQ ID NO: 26954 - DNA, 20 bp, Artificial Sequence
  Description of Artificial Sequence: Synthetic oligonucleotide
  Target: LAMA2; (+) strand; PAM type: NNGRRT; PAM sequence: TAGAGT
gctcctctttttccattcca

SEQ ID NO: 26955 - DNA, 20 bp, Artificial Sequence
  Description of Artificial Sequence: Synthetic oligonucleotide
  Target: LAMA2; (+) strand; PAM type: NNGRRT; PAM sequence: CTGAGT
gtactttctgtattctatac

SEQ ID NO: 26956 - DNA, 20 bp, Artificial Sequence
  Description of Artificial Sequence: Synthetic oligonucleotide
  Target: LAMA2; (+) strand; PAM type: NNGRRT; PAM sequence: TTGAGT
aagacgcctgggagctgtct

SEQ ID NO: 26957 - DNA, 20 bp, Artificial Sequence
  Description of Artificial Sequence: Synthetic oligonucleotide
  Target: LAMA2; (+) strand; PAM type: NNGRRT; PAM sequence: ATGGAT
ctctcttacctccatattta

SEQ ID NO: 26958 - DNA, 20 bp, Artificial Sequence
  Description of Artificial Sequence: Synthetic oligonucleotide
  Target: LAMA2; (+) strand; PAM type: NNGRRT; PAM sequence: GTGAAT
tggttttagagacgaggcag

SEQ ID NO: 26959 - DNA, 20 bp, Artificial Sequence
  Description of Artificial Sequence: Synthetic oligonucleotide
  Target: LAMA2; (+) strand; PAM type: NNGRRT; PAM sequence: CTGAAT
ggcaggtgaataggtataga

SEQ ID NO: 26960 - DNA, 20 bp, Artificial Sequence
  Description of Artificial Sequence: Synthetic oligonucleotide
  Target: LAMA2; (+) strand; PAM type: NNGRRT; PAM sequence: AGGGAT
gaccaaatgattactgagac

SEQ ID NO: 26961 - DNA, 20 bp, Artificial Sequence
  Description of Artificial Sequence: Synthetic oligonucleotide
  Target: LAMA2; (+) strand; PAM type: NNGRRT; PAM sequence: AAGGAT
gcgatggtcagtgaaattga

SEQ ID NO: 26962 - DNA, 20 bp, Artificial Sequence
  Description of Artificial Sequence: Synthetic oligonucleotide
  Target: LAMA2; (+) strand; PAM type: NNGRRT; PAM sequence: TAGAAT
tataaaactcaaataaacct

SEQ ID NO: 26963 - DNA, 20 bp, Artificial Sequence
  Description of Artificial Sequence: Synthetic oligonucleotide
  Target: LAMA2; (+) strand; PAM type: NNGRRT; PAM sequence: TTGGAT
aactcaaataaaccttagaa

SEQ ID NO: 26964 - DNA, 20 bp, Artificial Sequence
  Description of Artificial Sequence: Synthetic oligonucleotide
  Target: LAMA2; (+) strand; PAM type: NNGRRT; PAM sequence: TCGAGT
aaccttagaattggatctta

SEQ ID NO: 26965 - DNA, 20 bp, Artificial Sequence
  Description of Artificial Sequence: Synthetic oligonucleotide
  Target: LAMA2; (+) strand; PAM type: NNGRRT; PAM sequence: GAGAAT
atcgagtattgtgttataca

SEQ ID NO: 26966 - DNA, 20 bp, Artificial Sequence
  Description of Artificial Sequence: Synthetic oligonucleotide
  Target: LAMA2; (+) strand; PAM type: NNGRRT; PAM sequence: GAGAAT
tgtgttatacagagaatatg

SEQ ID NO: 26967 - DNA, 20 bp, Artificial Sequence
  Description of Artificial Sequence: Synthetic oligonucleotide
  Target: LAMA2; (+) strand; PAM type: NNGRRT; PAM sequence: TGGGAT
cagagaatatggagaatatg

SEQ ID NO: 26968 - DNA, 20 bp, Artificial Sequence
  Description of Artificial Sequence: Synthetic oligonucleotide
  Target: LAMA2; (+) strand; PAM type: NNGRRT; PAM sequence: ATGAGT
atggagaatatgtgggataa

SEQ ID NO: 26969 - DNA, 20 bp, Artificial Sequence
  Description of Artificial Sequence: Synthetic oligonucleotide
  Target: LAMA2; (+) strand; PAM type: NNGRRT; PAM sequence: CAGAGT
ttcttaattcctagaggaaa

SEQ ID NO: 26970 - DNA, 20 bp, Artificial Sequence
  Description of Artificial Sequence: Synthetic oligonucleotide
  Target: LAMA2; (+) strand; PAM type: NNGRRT; PAM sequence: TGGGAT
gcctcagcctcccaagtagc

SEQ ID NO: 26971 - DNA, 20 bp, Artificial Sequence
  Description of Artificial Sequence: Synthetic oligonucleotide
  Target: LAMA2; (+) strand; PAM type: NNGRRT; PAM sequence: TGGGAT
accttggcctcccaaagtgc

SEQ ID NO: 26972 - DNA, 20 bp, Artificial Sequence
  Description of Artificial Sequence: Synthetic oligonucleotide
  Target: LAMA2; (+) strand; PAM type: NNGRRT; PAM sequence: CAGAGT
gaagtatgcttatggtcagt

SEQ ID NO: 26973 - DNA, 20 bp, Artificial Sequence
  Description of Artificial Sequence: Synthetic oligonucleotide
  Target: LAMA2; (+) strand; PAM type: NNGRRT; PAM sequence: AGGAGT
caggaggaccctttgagctt

SEQ ID NO: 26974 - DNA, 20 bp, Artificial Sequence
  Description of Artificial Sequence: Synthetic oligonucleotide
  Target: LAMA2; (+) strand; PAM type: NNGRRT; PAM sequence: ATGAAT
agcacactatgattatgcct

SEQ ID NO: 26975 - DNA, 20 bp, Artificial Sequence
  Description of Artificial Sequence: Synthetic oligonucleotide
  Target: LAMA2; (+) strand; PAM type: NNGRRT; PAM sequence: AAGAAT
caagaccctatctctgaaaa

SEQ ID NO: 26976 - DNA, 20 bp, Artificial Sequence
  Description of Artificial Sequence: Synthetic oligonucleotide
  Target: LAMA2; (+) strand; PAM type: NNGRRT; PAM sequence: TTGGGT
ttaacttagagctaaatagt

SEQ ID NO: 26977 - DNA, 20 bp, Artificial Sequence
  Description of Artificial Sequence: Synthetic oligonucleotide
  Target: LAMA2; (+) strand; PAM type: NNGRRT; PAM sequence: ATGAAT
gggtttcattatgtgtagaa

SEQ ID NO: 26978 - DNA, 20 bp, Artificial Sequence
  Description of Artificial Sequence: Synthetic oligonucleotide
  Target: LAMA2; (+) strand; PAM type: NNGRRT; PAM sequence: TTGAGT
acacattataagtgtctgtt

SEQ ID NO: 26979 - DNA, 20 bp, Artificial Sequence
  Description of Artificial Sequence: Synthetic oligonucleotide
  Target: LAMA2; (+) strand; PAM type: NNGRRT; PAM sequence: AGGAGT
tgttttgagtaaatttgttg

SEQ ID NO: 26980 - DNA, 20 bp, Artificial Sequence
  Description of Artificial Sequence: Synthetic oligonucleotide
  Target: LAMA2; (+) strand; PAM type: NNGRRT; PAM sequence: TTGAAT
gttgaggagtctaatttagt

SEQ ID NO: 26981 - DNA, 20 bp, Artificial Sequence
  Description of Artificial Sequence: Synthetic oligonucleotide
  Target: LAMA2; (+) strand; PAM type: NNGRRT; PAM sequence: TTGAGT
aaaaattttttttttctcac

SEQ ID NO: 26982 - DNA, 20 bp, Artificial Sequence
  Description of Artificial Sequence: Synthetic oligonucleotide
  Target: LAMA2; (+) strand; PAM type: NNGRRT; PAM sequence: ATGAAT
aaaaatcaaaagctcaaatc

SEQ ID NO: 26983 - DNA, 20 bp, Artificial Sequence
  Description of Artificial Sequence: Synthetic oligonucleotide
  Target: LAMA2; (+) strand; PAM type: NNGRRT; PAM sequence: AAGGAT
tcatgaattctgtttgtgtt

SEQ ID NO: 26984 - DNA, 20 bp, Artificial Sequence
  Description of Artificial Sequence: Synthetic oligonucleotide
  Target: LAMA2; (+) strand; PAM type: NNGRRT; PAM sequence: GAGAAT
atttaaaaaaatagtggcgt

SEQ ID NO: 26985 - DNA, 20 bp, Artificial Sequence
  Description of Artificial Sequence: Synthetic oligonucleotide
  Target: LAMA2; (+) strand; PAM type: NNGRRT; PAM sequence: CAGAGT
agaaaagagacaaaccatat

SEQ ID NO: 26986 - DNA, 20 bp, Artificial Sequence
  Description of Artificial Sequence: Synthetic oligonucleotide
  Target: LAMA2; (+) strand; PAM type: NNGRRT; PAM sequence: CTGGGT
aatgatgtgagctctgtggt

SEQ ID NO: 26987 - DNA, 20 bp, Artificial Sequence
  Description of Artificial Sequence: Synthetic oligonucleotide
  Target: LAMA2; (+) strand; PAM type: NNGRRT; PAM sequence: GTGGAT
atgtgagctctgtggtctgg

SEQ ID NO: 26988 - DNA, 20 bp, Artificial Sequence
  Description of Artificial Sequence: Synthetic oligonucleotide
  Target: LAMA2; (+) strand; PAM type: NNGRRT; PAM sequence: GTGGGT
tctgggtggatgcagggcat

SEQ ID NO: 26989 - DNA, 20 bp, Artificial Sequence
  Description of Artificial Sequence: Synthetic oligonucleotide
  Target: LAMA2; (+) strand; PAM type: NNGRRT; PAM sequence: CAGGAT
gtatatgctcttttccagct

SEQ ID NO: 26990 - DNA, 20 bp, Artificial Sequence
  Description of Artificial Sequence: Synthetic oligonucleotide
  Target: LAMA2; (+) strand; PAM type: NNGRRT; PAM sequence: ACGAAT
acacacacatgcaaggtttc

SEQ ID NO: 26991 - DNA, 20 bp, Artificial Sequence
  Description of Artificial Sequence: Synthetic oligonucleotide
  Target: LAMA2; (+) strand; PAM type: NNGRRT; PAM sequence: TGGAAT
tgtcaaacttagccatcaac

SEQ ID NO: 26992 - DNA, 20 bp, Artificial Sequence
  Description of Artificial Sequence: Synthetic oligonucleotide
  Target: LAMA2; (+) strand; PAM type: NNGRRT; PAM sequence: TTGGAT
actggaatttgtgttttagt

SEQ ID NO: 26993 - DNA, 20 bp, Artificial Sequence
  Description of Artificial Sequence: Synthetic oligonucleotide
  Target: LAMA2; (+) strand; PAM type: NNGRRT; PAM sequence: TGGAAT
atttcatatttaatgtgata

SEQ ID NO: 26994 - DNA, 20 bp, Artificial Sequence
  Description of Artificial Sequence: Synthetic oligonucleotide
  Target: LAMA2; (+) strand; PAM type: NNGRRT; PAM sequence: TAGAAT
atatttaatgtgatatggaa

SEQ ID NO: 26995 - DNA, 20 bp, Artificial Sequence
  Description of Artificial Sequence: Synthetic oligonucleotide
  Target: LAMA2; (+) strand; PAM type: NNGRRT; PAM sequence: CAGAAT
tcaattatctttctgtcatg

SEQ ID NO: 26996 - DNA, 20 bp, Artificial Sequence
  Description of Artificial Sequence: Synthetic oligonucleotide
  Target: LAMA2; (+) strand; PAM type: NNGRRT; PAM sequence: TAGAAT
tactgtatcagctaaatttg

SEQ ID NO: 26997 - DNA, 20 bp, Artificial Sequence
  Description of Artificial Sequence: Synthetic oligonucleotide
  Target: LAMA2; (+) strand; PAM type: NNGRRT; PAM sequence: TCGAGT
taattaaaataaatatattg

SEQ ID NO: 26998 - DNA, 20 bp, Artificial Sequence
  Description of Artificial Sequence: Synthetic oligonucleotide
  Target: LAMA2; (+) strand; PAM type: NNGRRT; PAM sequence: AAGAAT
gttgtgagcagcacagtggt

SEQ ID NO: 26999 - DNA, 20 bp, Artificial Sequence
  Description of Artificial Sequence: Synthetic oligonucleotide
  Target: LAMA2; (+) strand; PAM type: NNGRRT; PAM sequence: TTGAGT
tacataaatatgcactaaaa

SEQ ID NO: 27000 - DNA, 20 bp, Artificial Sequence
  Description of Artificial Sequence: Synthetic oligonucleotide
  Target: LAMA2; (+) strand; PAM type: NNGRRT; PAM sequence: ATGAAT
ttgagtctaactgcaaaaaa

SEQ ID NO: 27001 - DNA, 20 bp, Artificial Sequence
  Description of Artificial Sequence: Synthetic oligonucleotide
  Target: LAMA2; (+) strand; PAM type: NNGRRT; PAM sequence: AAGAAT
cacatttagaaagaagttct

SEQ ID NO: 27002 - DNA, 20 bp, Artificial Sequence
  Description of Artificial Sequence: Synthetic oligonucleotide
  Target: LAMA2; (+) strand; PAM type: NNGRRT; PAM sequence: GAGAAT
atatgctttgttagaagaaa

SEQ ID NO: 27003 - DNA, 20 bp, Artificial Sequence
  Description of Artificial Sequence: Synthetic oligonucleotide
  Target: LAMA2; (+) strand; PAM type: NNGRRT; PAM sequence: GTGAGT
tagaagaaagagaatttatt

SEQ ID NO: 27004 - DNA, 20 bp, Artificial Sequence
  Description of Artificial Sequence: Synthetic oligonucleotide
  Target: LAMA2; (+) strand; PAM type: NNGRRT; PAM sequence: TGGGAT
gaaagagaatttattgtgag

SEQ ID NO: 27005 - DNA, 20 bp, Artificial Sequence
  Description of Artificial Sequence: Synthetic oligonucleotide
  Target: LAMA2; (+) strand; PAM type: NNGRRT; PAM sequence: AAGGAT
ctttaactctttcagatgtt

SEQ ID NO: 27006 - DNA, 20 bp, Artificial Sequence
  Description of Artificial Sequence: Synthetic oligonucleotide
  Target: LAMA2; (+) strand; PAM type: NNGRRT; PAM sequence: GTGAGT
atgtaagaagtatatttcat

SEQ ID NO: 27007 - DNA, 20 bp, Artificial Sequence
  Description of Artificial Sequence: Synthetic oligonucleotide
  Target: LAMA2; (+) strand; PAM type: NNGRRT; PAM sequence: AAGGGT
aatgtgggaaagtgaaatac

SEQ ID NO: 27008 - DNA, 20 bp, Artificial Sequence
  Description of Artificial Sequence: Synthetic oligonucleotide
  Target: LAMA2; (+) strand; PAM type: NNGRRT; PAM sequence: GGGGAT
caagggtttgaaatggttct

SEQ ID NO: 27009 - DNA, 20 bp, Artificial Sequence
  Description of Artificial Sequence: Synthetic oligonucleotide
  Target: LAMA2; (+) strand; PAM type: NNGRRT; PAM sequence: TAGAAT
cgtggaagacagggcaaata

SEQ ID NO: 27010 - DNA, 20 bp, Artificial Sequence
  Description of Artificial Sequence: Synthetic oligonucleotide
  Target: LAMA2; (+) strand; PAM type: NNGRRT; PAM sequence: CAGAGT
atagcatcaaattgattttg

SEQ ID NO: 27011 - DNA, 20 bp, Artificial Sequence
  Description of Artificial Sequence: Synthetic oligonucleotide
  Target: LAMA2; (+) strand; PAM type: NNGRRT; PAM sequence: ATGAGT
aggcctcaccttattatcaa

SEQ ID NO: 27012 - DNA, 20 bp, Artificial Sequence
  Description of Artificial Sequence: Synthetic oligonucleotide
  Target: LAMA2; (+) strand; PAM type: NNGRRT; PAM sequence: ATGGGT
acactgaggaagttatagaa

SEQ ID NO: 27013 - DNA, 20 bp, Artificial Sequence
  Description of Artificial Sequence: Synthetic oligonucleotide
  Target: LAMA2; (+) strand; PAM type: NNGRRT; PAM sequence: GTGAAT
tagaaatgggtaattccaag

SEQ ID NO: 27014 - DNA, 20 bp, Artificial Sequence
  Description of Artificial Sequence: Synthetic oligonucleotide
  Target: LAMA2; (+) strand; PAM type: NNGRRT; PAM sequence: AAGGAT
aattccaaggtgaatgttcc

SEQ ID NO: 27015 - DNA, 20 bp, Artificial Sequence
  Description of Artificial Sequence: Synthetic oligonucleotide
  Target: LAMA2; (+) strand; PAM type: NNGRRT; PAM sequence: CTGAAT
aagcacttcatcattatttg

SEQ ID NO: 27016 - DNA, 20 bp, Artificial Sequence
  Description of Artificial Sequence: Synthetic oligonucleotide
  Target: LAMA2; (+) strand; PAM type: NNGRRT; PAM sequence: ATGAAT
acttcatcattatttgctga

SEQ ID NO: 27017 - DNA, 20 bp, Artificial Sequence
  Description of Artificial Sequence: Synthetic oligonucleotide
  Target: LAMA2; (+) strand; PAM type: NNGRRT; PAM sequence: TAGAAT
tgctgaatgaatgcgtatgt

SEQ ID NO: 27018 - DNA, 20 bp, Artificial Sequence
  Description of Artificial Sequence: Synthetic oligonucleotide
  Target: LAMA2; (+) strand; PAM type: NNGRRT; PAM sequence: GTGGGT
tacatatctctgtgtttttt

SEQ ID NO: 27019 - DNA, 20 bp, Artificial Sequence
  Description of Artificial Sequence: Synthetic oligonucleotide
  Target: LAMA2; (+) strand; PAM type: NNGRRT; PAM sequence: GTGAAT
tgtaggctaacatgtcgtaa

SEQ ID NO: 27020 - DNA, 20 bp, Artificial Sequence
  Description of Artificial Sequence: Synthetic oligonucleotide
  Target: LAMA2; (+) strand; PAM type: NNGRRT; PAM sequence: AAGAAT
tatgattacatctacagaca

SEQ ID NO: 27021 - DNA, 20 bp, Artificial Sequence
  Description of Artificial Sequence: Synthetic oligonucleotide
  Target: LAMA2; (+) strand; PAM type: NNGRRT; PAM sequence: ATGAGT
atgataaagaacaggaaaag

SEQ ID NO: 27022 - DNA, 20 bp, Artificial Sequence
  Description of Artificial Sequence: Synthetic oligonucleotide
  Target: LAMA2; (+) strand; PAM type: NNGRRT; PAM sequence: AAGGAT
tgagtttttttctctatcag

SEQ ID NO: 27023 - DNA, 20 bp, Artificial Sequence
  Description of Artificial Sequence: Synthetic oligonucleotide
  Target: LAMA2; (+) strand; PAM type: NNGRRT; PAM sequence: GAGAAT
atactaaatttagacttatg

SEQ ID NO: 27024 - DNA, 20 bp, Artificial Sequence
  Description of Artificial Sequence: Synthetic oligonucleotide
  Target: LAMA2; (+) strand; PAM type: NNGRRT; PAM sequence: CAGAGT
gggaagtgagatgctgtgtt

SEQ ID NO: 27025 - DNA, 20 bp, Artificial Sequence
  Description of Artificial Sequence: Synthetic oligonucleotide
  Target: LAMA2; (+) strand; PAM type: NNGRRT; PAM sequence: TGGGAT
gaaataatttgaccagagca

SEQ ID NO: 27026 - DNA, 20 bp, Artificial Sequence
  Description of Artificial Sequence: Synthetic oligonucleotide
  Target: LAMA2; (+) strand; PAM type: NNGRRT; PAM sequence: GAGAAT
cagagcatgggattttaatt

SEQ ID NO: 27027 - DNA, 20 bp, Artificial Sequence
  Description of Artificial Sequence: Synthetic oligonucleotide
  Target: LAMA2; (+) strand; PAM type: NNGRRT; PAM sequence: CAGAGT
taaatgtagggaaggtgtat

SEQ ID NO: 27028 - DNA, 20 bp, Artificial Sequence
  Description of Artificial Sequence: Synthetic oligonucleotide
  Target: LAMA2; (+) strand; PAM type: NNGRRT; PAM sequence: TGGAGT
aagtcaagtgagagagattc

SEQ ID NO: 27029 - DNA, 20 bp, Artificial Sequence
  Description of Artificial Sequence: Synthetic oligonucleotide
  Target: LAMA2; (+) strand; PAM type: NNGRRT; PAM sequence: AAGAAT
gagagattctggagtgagac

SEQ ID NO: 27030 - DNA, 20 bp, Artificial Sequence
  Description of Artificial Sequence: Synthetic oligonucleotide
  Target: LAMA2; (+) strand; PAM type: NNGRRT; PAM sequence: AGGAAT
tggagtgagacaagaatgtg

SEQ ID NO: 27031 - DNA, 20 bp, Artificial Sequence
  Description of Artificial Sequence: Synthetic oligonucleotide
  Target: LAMA2; (+) strand; PAM type: NNGRRT; PAM sequence: TGGAGT
gtgaggaatggggacttctg

SEQ ID NO: 27032 - DNA, 20 bp, Artificial Sequence
  Description of Artificial Sequence: Synthetic oligonucleotide
  Target: LAMA2; (+) strand; PAM type: NNGRRT; PAM sequence: ATGAAT
tttaatctatagtaatgcac

SEQ ID NO: 27033 - DNA, 20 bp, Artificial Sequence
  Description of Artificial Sequence: Synthetic oligonucleotide
  Target: LAMA2; (+) strand; PAM type: NNGRRT; PAM sequence: GGGGAT
tctttgcttttagtagaaat

SEQ ID NO: 27034 - DNA, 20 bp, Artificial Sequence
  Description of Artificial Sequence: Synthetic oligonucleotide
  Target: LAMA2; (+) strand; PAM type: NNGRRT; PAM sequence: TAGAGT
ttttagtagaaatggggatt

SEQ ID NO: 27035 - DNA, 20 bp, Artificial Sequence
  Description of Artificial Sequence: Synthetic oligonucleotide
  Target: LAMA2; (+) strand; PAM type: NNGRRT; PAM sequence: GTGAAT
cagtacaggtggcgaaaaat

SEQ ID NO: 27036 - DNA, 20 bp, Artificial Sequence
  Description of Artificial Sequence: Synthetic oligonucleotide
  Target: LAMA2; (+) strand; PAM type: NNGRRT; PAM sequence: AAGGAT
taaaacatattttgaaaaac

SEQ ID NO: 27037 - DNA, 20 bp, Artificial Sequence
  Description of Artificial Sequence: Synthetic oligonucleotide
  Target: LAMA2; (+) strand; PAM type: NNGRRT; PAM sequence: AAGAAT
atattttgaaaaacaaggat

SEQ ID NO: 27038 - DNA, 20 bp, Artificial Sequence
  Description of Artificial Sequence: Synthetic oligonucleotide
  Target: LAMA2; (+) strand; PAM type: NNGRRT; PAM sequence: AAGAAT
gtgtttaaaagctaaaagag

SEQ ID NO: 27039 - DNA, 20 bp, Artificial Sequence
  Description of Artificial Sequence: Synthetic oligonucleotide
  Target: LAMA2; (+) strand; PAM type: NNGRRT; PAM sequence: TTGGGT
aatatgtcttcagtactttt

SEQ ID NO: 27040 - DNA, 20 bp, Artificial Sequence
  Description of Artificial Sequence: Synthetic oligonucleotide
  Target: LAMA2; (+) strand; PAM type: NNGRRT; PAM sequence: AGGGAT
tcaatttagttcagggaaag

SEQ ID NO: 27041 - DNA, 20 bp, Artificial Sequence
  Description of Artificial Sequence: Synthetic oligonucleotide
  Target: LAMA2; (+) strand; PAM type: NNGRRT; PAM sequence: ATGAGT
gagggatgataaatattatt

SEQ ID NO: 27042 - DNA, 20 bp, Artificial Sequence
  Description of Artificial Sequence: Synthetic oligonucleotide
  Target: LAMA2; (+) strand; PAM type: NNGRRT; PAM sequence: CCGAAT
tgtttagaaatattaagaac

SEQ ID NO: 27043 - DNA, 20 bp, Artificial Sequence
  Description of Artificial Sequence: Synthetic oligonucleotide
  Target: LAMA2; (+) strand; PAM type: NNGRRT; PAM sequence: CAGGGT
caagcttgtttcatttctca

SEQ ID NO: 27044 - DNA, 20 bp, Artificial Sequence
  Description of Artificial Sequence: Synthetic oligonucleotide
  Target: LAMA2; (+) strand; PAM type: NNGRRT; PAM sequence: TAGAAT
gttgtagccaagcaaatata

SEQ ID NO: 27045 - DNA, 20 bp, Artificial Sequence
  Description of Artificial Sequence: Synthetic oligonucleotide
  Target: LAMA2; (+) strand; PAM type: NNGRRT; PAM sequence: GTGAGT
aagttaatgtttacagtttt

SEQ ID NO: 27046 - DNA, 20 bp, Artificial Sequence
  Description of Artificial Sequence: Synthetic oligonucleotide
  Target: LAMA2; (+) strand; PAM type: NNGRRT; PAM sequence: GTGAAT
taatgtttacagttttgtga

SEQ ID NO: 27047 - DNA, 20 bp, Artificial Sequence
  Description of Artificial Sequence: Synthetic oligonucleotide
  Target: LAMA2; (+) strand; PAM type: NNGRRT; PAM sequence: ATGAAT
gtttacagttttgtgagtga

SEQ ID NO: 27048 - DNA, 20 bp, Artificial Sequence
  Description of Artificial Sequence: Synthetic oligonucleotide
  Target: LAMA2; (+) strand; PAM type: NNGRRT; PAM sequence: TTGAAT
taagttgaccttcttgaggt

SEQ ID NO: 27049 - DNA, 20 bp, Artificial Sequence
  Description of Artificial Sequence: Synthetic oligonucleotide
  Target: LAMA2; (+) strand; PAM type: NNGRRT; PAM sequence: GGGAAT
gaataaattttggagcctga

SEQ ID NO: 27050 - DNA, 20 bp, Artificial Sequence
  Description of Artificial Sequence: Synthetic oligonucleotide
  Target: LAMA2; (+) strand; PAM type: NNGRRT; PAM sequence: TGGAAT
tcattacattaattatcttt

SEQ ID NO: 27051 - DNA, 20 bp, Artificial Sequence
  Description of Artificial Sequence: Synthetic oligonucleotide
  Target: LAMA2; (+) strand; PAM type: NNGRRT; PAM sequence: CAGGAT
tctcacttccaaaatagtct

SEQ ID NO: 27052 - DNA, 20 bp, Artificial Sequence
  Description of Artificial Sequence: Synthetic oligonucleotide
  Target: LAMA2; (+) strand; PAM type: NNGRRT; PAM sequence: TGGAGT
ctagatatgatcttagatga

SEQ ID NO: 27053 - DNA, 20 bp, Artificial Sequence
  Description of Artificial Sequence: Synthetic oligonucleotide
  Target: LAMA2; (+) strand; PAM type: NNGRRT; PAM sequence: AGGAAT
tattaaaaatacaaggagaa

SEQ ID NO: 27054 - DNA, 20 bp, Artificial Sequence
  Description of Artificial Sequence: Synthetic oligonucleotide
  Target: LAMA2; (+) strand; PAM type: NNGRRT; PAM sequence: GAGAGT
accatgcaattaaaatacta

SEQ ID NO: 27055 - DNA, 20 bp, Artificial Sequence
  Description of Artificial Sequence: Synthetic oligonucleotide
  Target: LAMA2; (+) strand; PAM type: NNGRRT; PAM sequence: AGGAAT
tataaaaactcagaagtgga

SEQ ID NO: 27056 - DNA, 20 bp, Artificial Sequence
  Description of Artificial Sequence: Synthetic oligonucleotide
  Target: LAMA2; (+) strand; PAM type: NNGRRT; PAM sequence: ACGGAT
tgttactcttgaaaaagcaa

SEQ ID NO: 27057 - DNA, 20 bp, Artificial Sequence
  Description of Artificial Sequence: Synthetic oligonucleotide
  Target: LAMA2; (+) strand; PAM type: NNGRRT; PAM sequence: AGGAAT
cttgaaaaagcaaacggatt

SEQ ID NO: 27058 - DNA, 20 bp, Artificial Sequence
  Description of Artificial Sequence: Synthetic oligonucleotide
  Target: LAMA2; (+) strand; PAM type: NNGRRT; PAM sequence: AAGAAT
ttctgtaatattattcaagt

SEQ ID NO: 27059 - DNA, 20 bp, Artificial Sequence
  Description of Artificial Sequence: Synthetic oligonucleotide
  Target: LAMA2; (+) strand; PAM type: NNGRRT; PAM sequence: ATGAAT
acagatatgctccgaaatat

SEQ ID NO: 27060 - DNA, 20 bp, Artificial Sequence
  Description of Artificial Sequence: Synthetic oligonucleotide
  Target: LAMA2; (+) strand; PAM type: NNGRRT; PAM sequence: AGGAAT
aaaatcttaaattgattttt

SEQ ID NO: 27061 - DNA, 20 bp, Artificial Sequence
  Description of Artificial Sequence: Synthetic oligonucleotide
  Target: LAMA2; (+) strand; PAM type: NNGRRT; PAM sequence: AAGAGT
tctggttctcagctggaaaa

SEQ ID NO: 27062 - DNA, 20 bp, Artificial Sequence
  Description of Artificial Sequence: Synthetic oligonucleotide
  Target: LAMA2; (+) strand; PAM type: NNGRRT; PAM sequence: CAGAAT
cccttttgaaacagttgact

SEQ ID NO: 27063 - DNA, 20 bp, Artificial Sequence
  Description of Artificial Sequence: Synthetic oligonucleotide
  Target: LAMA2; (+) strand; PAM type: NNGRRT; PAM sequence: TGGGGT
aattactttgtcttctaacc

SEQ ID NO: 27064 - DNA, 20 bp, Artificial Sequence
  Description of Artificial Sequence: Synthetic oligonucleotide
  Target: LAMA2; (+) strand; PAM type: NNGRRT; PAM sequence: AGGAAT
tggggtcctaatctttgcct

SEQ ID NO: 27065 - DNA, 20 bp, Artificial Sequence
  Description of Artificial Sequence: Synthetic oligonucleotide
  Target: LAMA2; (+) strand; PAM type: NNGRRT; PAM sequence: CCGAAT
gaatttaaagtaaagattgg

SEQ ID NO: 27066 - DNA, 20 bp, Artificial Sequence
  Description of Artificial Sequence: Synthetic oligonucleotide
  Target: LAMA2; (+) strand; PAM type: NNGRRT; PAM sequence: TTGAGT
ggcctctagccagtctcact

SEQ ID NO: 27067 - DNA, 20 bp, Artificial Sequence
  Description of Artificial Sequence: Synthetic oligonucleotide
  Target: LAMA2; (+) strand; PAM type: NNGRRT; PAM sequence: ATGGGT
ctatcatataatgttcttgc

SEQ ID NO: 27068 - DNA, 20 bp, Artificial Sequence
  Description of Artificial Sequence: Synthetic oligonucleotide
  Target: LAMA2; (+) strand; PAM type: NNGRRT; PAM sequence: AAGGGT
gtctgaagctctttgaaggc

SEQ ID NO: 27069 - DNA, 20 bp, Artificial Sequence
  Description of Artificial Sequence: Synthetic oligonucleotide
  Target: LAMA2; (+) strand; PAM type: NNGRRT; PAM sequence: ATGAGT
gttgtgtaattactgcctag

SEQ ID NO: 27070 - DNA, 20 bp, Artificial Sequence
  Description of Artificial Sequence: Synthetic oligonucleotide
  Target: LAMA2; (+) strand; PAM type: NNGRRT; PAM sequence: TGGAGT
tagatgagtacttggaaagg

SEQ ID NO: 27071 - DNA, 20 bp, Artificial Sequence
  Description of Artificial Sequence: Synthetic oligonucleotide
  Target: LAMA2; (+) strand; PAM type: NNGRRT; PAM sequence: ATGAAT
tggaaaggtggagtgattca

SEQ ID NO: 27072 - DNA, 20 bp, Artificial Sequence
  Description of Artificial Sequence: Synthetic oligonucleotide
  Target: LAMA2; (+) strand; PAM type: NNGRRT; PAM sequence: TGGAAT
agtttaagaagaactgggac

SEQ ID NO: 27073 - DNA, 20 bp, Artificial Sequence
  Description of Artificial Sequence: Synthetic oligonucleotide
  Target: LAMA2; (+) strand; PAM type: NNGRRT; PAM sequence: AGGGAT
tagctttgttggaagactca

SEQ ID NO: 27074 - DNA, 20 bp, Artificial Sequence
  Description of Artificial Sequence: Synthetic oligonucleotide
  Target: LAMA2; (+) strand; PAM type: NNGRRT; PAM sequence: TAGAGT
gataaagtgaaaatgctttg

SEQ ID NO: 27075 - DNA, 20 bp, Artificial Sequence
  Description of Artificial Sequence: Synthetic oligonucleotide
  Target: LAMA2; (+) strand; PAM type: NNGRRT; PAM sequence: TGGAGT
caaagaaaggcttatggttt

SEQ ID NO: 27076 - DNA, 20 bp, Artificial Sequence
  Description of Artificial Sequence: Synthetic oligonucleotide
  Target: LAMA2; (+) strand; PAM type: NNGRRT; PAM sequence: ATGAAT
tgaggtcatttattaatttt

SEQ ID NO: 27077 - DNA, 20 bp, Artificial Sequence
  Description of Artificial Sequence: Synthetic oligonucleotide
  Target: LAMA2; (+) strand; PAM type: NNGRRT; PAM sequence: TAGAGT
gcttctgccttcaaggaact

SEQ ID NO: 27078 - DNA, 20 bp, Artificial Sequence
  Description of Artificial Sequence: Synthetic oligonucleotide
  Target: LAMA2; (+) strand; PAM type: NNGRRT; PAM sequence: TAGAAT
aacttagagtttagtggtta

SEQ ID NO: 27079 - DNA, 20 bp, Artificial Sequence
  Description of Artificial Sequence: Synthetic oligonucleotide
  Target: LAMA2; (+) strand; PAM type: NNGRRT; PAM sequence: GAGAGT
gacaaaaactcataatatct

SEQ ID NO: 27080 - DNA, 20 bp, Artificial Sequence
  Description of Artificial Sequence: Synthetic oligonucleotide
  Target: LAMA2; (+) strand; PAM type: NNGRRT; PAM sequence: AAGAAT
atatgtgcttgctaaatgaa

SEQ ID NO: 27081 - DNA, 20 bp, Artificial Sequence
  Description of Artificial Sequence: Synthetic oligonucleotide
  Target: LAMA2; (+) strand; PAM type: NNGRRT; PAM sequence: CTGAAT
gaattattagcaatactatg

SEQ ID NO: 27082 - DNA, 20 bp, Artificial Sequence
  Description of Artificial Sequence: Synthetic oligonucleotide
  Target: LAMA2; (+) strand; PAM type: NNGRRT; PAM sequence: CAGAAT
gaaatatttacaagaggaaa

SEQ ID NO: 27083 - DNA, 20 bp, Artificial Sequence
  Description of Artificial Sequence: Synthetic oligonucleotide
  Target: LAMA2; (+) strand; PAM type: NNGRRT; PAM sequence: GTGGGT
caagaggaaacagaatattt

SEQ ID NO: 27084 - DNA, 20 bp, Artificial Sequence
  Description of Artificial Sequence: Synthetic oligonucleotide
  Target: LAMA2; (+) strand; PAM type: NNGRRT; PAM sequence: TAGAAT
atagatatactaaagctgca

SEQ ID NO: 27085 - DNA, 20 bp, Artificial Sequence
  Description of Artificial Sequence: Synthetic oligonucleotide
  Target: LAMA2; (+) strand; PAM type: NNGRRT; PAM sequence: CAGAAT
tttgcttttatagcataaaa

SEQ ID NO: 27086 - DNA, 20 bp, Artificial Sequence
  Description of Artificial Sequence: Synthetic oligonucleotide
  Target: LAMA2; (+) strand; PAM type: NNGRRT; PAM sequence: TTGAGT
cataaaacagaattagatgc

SEQ ID NO: 27087 - DNA, 20 bp, Artificial Sequence
  Description of Artificial Sequence: Synthetic oligonucleotide
  Target: LAMA2; (+) strand; PAM type: NNGRRT; PAM sequence: GGGGGT
atagagaaattccagaagct

SEQ ID NO: 27088 - DNA, 20 bp, Artificial Sequence
  Description of Artificial Sequence: Synthetic oligonucleotide
  Target: LAMA2; (+) strand; PAM type: NNGRRT; PAM sequence: GGGAAT
ttccagaagctgggggtggg

SEQ ID NO: 27089 - DNA, 20 bp, Artificial Sequence
  Description of Artificial Sequence: Synthetic oligonucleotide
  Target: LAMA2; (+) strand; PAM type: NNGRRT; PAM sequence: CTGGAT
ctgggggtggggggaataga

SEQ ID NO: 27090 - DNA, 20 bp, Artificial Sequence
  Description of Artificial Sequence: Synthetic oligonucleotide
  Target: LAMA2; (+) strand; PAM type: NNGRRT; PAM sequence: GAGAAT
caaaccaacctaatcccata

SEQ ID NO: 27091 - DNA, 20 bp, Artificial Sequence
  Description of Artificial Sequence: Synthetic oligonucleotide
  Target: LAMA2; (+) strand; PAM type: NNGRRT; PAM sequence: ATGGGT
actatccagaggacagtggt

SEQ ID NO: 27092 - DNA, 20 bp, Artificial Sequence
  Description of Artificial Sequence: Synthetic oligonucleotide
  Target: LAMA2; (+) strand; PAM type: NNGRRT; PAM sequence: ATGAAT
tttatgtactaaatcctgat

SEQ ID NO: 27093 - DNA, 20 bp, Artificial Sequence
  Description of Artificial Sequence: Synthetic oligonucleotide
  Target: LAMA2; (+) strand; PAM type: NNGRRT; PAM sequence: TGGAGT
tcttttctttttttttgaaa

SEQ ID NO: 27094 - DNA, 20 bp, Artificial Sequence
  Description of Artificial Sequence: Synthetic oligonucleotide
  Target: LAMA2; (+) strand; PAM type: NNGRRT; PAM sequence: TGGAGT
tcttactctgttgcccaggc

SEQ ID NO: 27095 - DNA, 20 bp, Artificial Sequence
  Description of Artificial Sequence: Synthetic oligonucleotide
  Target: LAMA2; (+) strand; PAM type: NNGRRT; PAM sequence: CTGGGT
atctctgcaacctctacctc

SEQ ID NO: 27096 - DNA, 20 bp, Artificial Sequence
  Description of Artificial Sequence: Synthetic oligonucleotide
  Target: LAMA2; (+) strand; PAM type: NNGRRT; PAM sequence: CCGAGT
gattctcctgccttatcctc

SEQ ID NO: 27097 - DNA, 20 bp, Artificial Sequence
  Description of Artificial Sequence: Synthetic oligonucleotide
  Target: LAMA2; (+) strand; PAM type: NNGRRT; PAM sequence: TGGGAT
gccttatcctcccgagtagc

SEQ ID NO: 27098 - DNA, 20 bp, Artificial Sequence
  Description of Artificial Sequence: Synthetic oligonucleotide
  Target: LAMA2; (+) strand; PAM type: NNGRRT; PAM sequence: CAGGGT
ttttgtatttttagtagaga

SEQ ID NO: 27099 - DNA, 20 bp, Artificial Sequence
  Description of Artificial Sequence: Synthetic oligonucleotide
  Target: LAMA2; (+) strand; PAM type: NNGRRT; PAM sequence: TGGGAT
gcctcggcctcccaaagtgc

SEQ ID NO: 27100 - DNA, 20 bp, Artificial Sequence
  Description of Artificial Sequence: Synthetic oligonucleotide
  Target: LAMA2; (+) strand; PAM type: NNGRRT; PAM sequence: ATGAAT
caccaggcccatcctctgat

SEQ ID NO: 27101 - DNA, 20 bp, Artificial Sequence
  Description of Artificial Sequence: Synthetic oligonucleotide
  Target: LAMA2; (+) strand; PAM type: NNGRRT; PAM sequence: GAGAAT
ctgatatgaatttcttattg

SEQ ID NO: 27102 - DNA, 20 bp, Artificial Sequence
  Description of Artificial Sequence: Synthetic oligonucleotide
  Target: LAMA2; (+) strand; PAM type: NNGRRT; PAM sequence: GAGAAT
ccagccctgtggtaggctct

SEQ ID NO: 27103 - DNA, 20 bp, Artificial Sequence
  Description of Artificial Sequence: Synthetic oligonucleotide
  Target: LAMA2; (+) strand; PAM type: NNGRRT; PAM sequence: CAGAAT
gctatgcaagaaaaataagg

SEQ ID NO: 27104 - DNA, 20 bp, Artificial Sequence
  Description of Artificial Sequence: Synthetic oligonucleotide
  Target: LAMA2; (+) strand; PAM type: NNGRRT; PAM sequence: TAGAAT
gaaaaagcagagctttattc

SEQ ID NO: 27105 - DNA, 20 bp, Artificial Sequence
  Description of Artificial Sequence: Synthetic oligonucleotide
  Target: LAMA2; (+) strand; PAM type: NNGRRT; PAM sequence: TTGAAT
cggactaaaggcagtattcg

SEQ ID NO: 27106 - DNA, 20 bp, Artificial Sequence
  Description of Artificial Sequence: Synthetic oligonucleotide
  Target: LAMA2; (+) strand; PAM type: NNGRRT; PAM sequence: CAGGAT
gatcagaggacattgtaagc

SEQ ID NO: 27107 - DNA, 20 bp, Artificial Sequence
  Description of Artificial Sequence: Synthetic oligonucleotide
  Target: LAMA2; (+) strand; PAM type: NNGRRT; PAM sequence: TTGAAT
tgtaagccaggataatcatt

SEQ ID NO: 27108 - DNA, 20 bp, Artificial Sequence
  Description of Artificial Sequence: Synthetic oligonucleotide
  Target: LAMA2; (+) strand; PAM type: NNGRRT; PAM sequence: TTGAAT
gaagactgacttgatcagat

SEQ ID NO: 27109 - DNA, 20 bp, Artificial Sequence
  Description of Artificial Sequence: Synthetic oligonucleotide
  Target: LAMA2; (+) strand; PAM type: NNGRRT; PAM sequence: AAGGAT
tgtaaaaaaagggctaaaga

SEQ ID NO: 27110 - DNA, 20 bp, Artificial Sequence
  Description of Artificial Sequence: Synthetic oligonucleotide
  Target: LAMA2; (+) strand; PAM type: NNGRRT; PAM sequence: AAGGGT
aaaagggctaaagaaaggat

SEQ ID NO: 27111 - DNA, 20 bp, Artificial Sequence
  Description of Artificial Sequence: Synthetic oligonucleotide
  Target: LAMA2; (+) strand; PAM type: NNGRRT; PAM sequence: ATGGAT
atgaccctggagagaagcag

SEQ ID NO: 27112 - DNA, 20 bp, Artificial Sequence
  Description of Artificial Sequence: Synthetic oligonucleotide
  Target: LAMA2; (+) strand; PAM type: NNGRRT; PAM sequence: CGGAGT
gatggatctgatatttattt

SEQ ID NO: 27113 - DNA, 20 bp, Artificial Sequence
  Description of Artificial Sequence: Synthetic oligonucleotide
  Target: LAMA2; (+) strand; PAM type: NNGRRT; PAM sequence: CTGGGT
ccggttttctctatgagaca

SEQ ID NO: 27114 - DNA, 20 bp, Artificial Sequence
  Description of Artificial Sequence: Synthetic oligonucleotide
  Target: LAMA2; (+) strand; PAM type: NNGRRT; PAM sequence: GTGGGT
ttttctctatgagacactgg

SEQ ID NO: 27115 - DNA, 20 bp, Artificial Sequence
  Description of Artificial Sequence: Synthetic oligonucleotide
  Target: LAMA2; (+) strand; PAM type: NNGRRT; PAM sequence: GAGAAT
ctaagatgtgttgagcttga

SEQ ID NO: 27116 - DNA, 20 bp, Artificial Sequence
  Description of Artificial Sequence: Synthetic oligonucleotide
  Target: LAMA2; (+) strand; PAM type: NNGRRT; PAM sequence: AGGAGT
tgttgagcttgagagaattc

SEQ ID NO: 27117 - DNA, 20 bp, Artificial Sequence
  Description of Artificial Sequence: Synthetic oligonucleotide
  Target: LAMA2; (+) strand; PAM type: NNGRRT; PAM sequence: CTGGGT
gaattcaggagtagctaaat

SEQ ID NO: 27118 - DNA, 20 bp, Artificial Sequence
  Description of Artificial Sequence: Synthetic oligonucleotide
  Target: LAMA2; (+) strand; PAM type: NNGRRT; PAM sequence: TCGGGT
agctaaatctgggtgtccct

SEQ ID NO: 27119 - DNA, 20 bp, Artificial Sequence
  Description of Artificial Sequence: Synthetic oligonucleotide
  Target: LAMA2; (+) strand; PAM type: NNGRRT; PAM sequence: GGGGAT
atctgggtgtcccttcgggt

SEQ ID NO: 27120 - DNA, 20 bp, Artificial Sequence
  Description of Artificial Sequence: Synthetic oligonucleotide
  Target: LAMA2; (+) strand; PAM type: NNGRRT; PAM sequence: GAGAGT
aaaccacgaactctactttg

SEQ ID NO: 27121 - DNA, 20 bp, Artificial Sequence
  Description of Artificial Sequence: Synthetic oligonucleotide
  Target: LAMA2; (+) strand; PAM type: NNGRRT; PAM sequence: TTGGAT
atggagatttaaccaggcat

SEQ ID NO: 27122 - DNA, 20 bp, Artificial Sequence
  Description of Artificial Sequence: Synthetic oligonucleotide
  Target: LAMA2; (+) strand; PAM type: NNGRRT; PAM sequence: GGGAGT
ctggtctggagatataactt

SEQ ID NO: 27123 - DNA, 20 bp, Artificial Sequence
  Description of Artificial Sequence: Synthetic oligonucleotide
  Target: LAMA2; (+) strand; PAM type: NNGRRT; PAM sequence: ATGGGT
actctacagatggtgtgtaa

SEQ ID NO: 27124 - DNA, 20 bp, Artificial Sequence
  Description of Artificial Sequence: Synthetic oligonucleotide
  Target: LAMA2; (+) strand; PAM type: NNGRRT; PAM sequence: GTGGGT
ggtgtgtaaatgggttggaa

SEQ ID NO: 27125 - DNA, 20 bp, Artificial Sequence
  Description of Artificial Sequence: Synthetic oligonucleotide
  Target: LAMA2; (+) strand; PAM type: NNGRRT; PAM sequence: AAGAAT
gggtaagatttggggaagag

SEQ ID NO: 27126 - DNA, 20 bp, Artificial Sequence
  Description of Artificial Sequence: Synthetic oligonucleotide
  Target: LAMA2; (+) strand; PAM type: NNGRRT; PAM sequence: CAGGAT
aatgaaataagaaaatgatc

SEQ ID NO: 27127 - DNA, 20 bp, Artificial Sequence
  Description of Artificial Sequence: Synthetic oligonucleotide
  Target: LAMA2; (+) strand; PAM type: NNGRRT; PAM sequence: AAGAAT
tgataaaaaaaaaaaaagaa

SEQ ID NO: 27128 - DNA, 20 bp, Artificial Sequence
  Description of Artificial Sequence: Synthetic oligonucleotide
  Target: LAMA2; (+) strand; PAM type: NNGRRT; PAM sequence: ATGAAT
aaaagaaaagaatgaagtaa

SEQ ID NO: 27129 - DNA, 20 bp, Artificial Sequence
  Description of Artificial Sequence: Synthetic oligonucleotide
  Target: LAMA2; (+) strand; PAM type: NNGRRT; PAM sequence: ATGAGT
ttgtattcatcaaagcatag

SEQ ID NO: 27130 - DNA, 20 bp, Artificial Sequence
  Description of Artificial Sequence: Synthetic oligonucleotide
  Target: LAMA2; (+) strand; PAM type: NNGRRT; PAM sequence: ATGAAT
gatatttttgtttgaggaac

SEQ ID NO: 27131 - DNA, 20 bp, Artificial Sequence
  Description of Artificial Sequence: Synthetic oligonucleotide
  Target: LAMA2; (+) strand; PAM type: NNGRRT; PAM sequence: TTGAAT
cattgttttatttttatttt

SEQ ID NO: 27132 - DNA, 20 bp, Artificial Sequence
  Description of Artificial Sequence: Synthetic oligonucleotide
  Target: LAMA2; (+) strand; PAM type: NNGRRT; PAM sequence: TTGAGT
tcctctccttgctttatatt

SEQ ID NO: 27133 - DNA, 20 bp, Artificial Sequence
  Description of Artificial Sequence: Synthetic oligonucleotide
  Target: LAMA2; (+) strand; PAM type: NNGRRT; PAM sequence: ATGAAT
ctccaactgccaccccctct

SEQ ID NO: 27134 - DNA, 20 bp, Artificial Sequence
  Description of Artificial Sequence: Synthetic oligonucleotide
  Target: LAMA2; (+) strand; PAM type: NNGRRT; PAM sequence: TTGGGT
ccaccccctctatgaatatt

SEQ ID NO: 27135 - DNA, 20 bp, Artificial Sequence
  Description of Artificial Sequence: Synthetic oligonucleotide
  Target: LAMA2; (+) strand; PAM type: NNGRRT; PAM sequence: ATGGGT
tccaaataagtgccccagct

SEQ ID NO: 27136 - DNA, 20 bp, Artificial Sequence
  Description of Artificial Sequence: Synthetic oligonucleotide
  Target: LAMA2; (+) strand; PAM type: NNGRRT; PAM sequence: TGGGAT
ataatgattctgaaagcctt

SEQ ID NO: 27137 - DNA, 20 bp, Artificial Sequence
  Description of Artificial Sequence: Synthetic oligonucleotide
  Target: LAMA2; (+) strand; PAM type: NNGRRT; PAM sequence: TAGGAT
tgaaagcctttgggatgatt

SEQ ID NO: 27138 - DNA, 20 bp, Artificial Sequence
  Description of Artificial Sequence: Synthetic oligonucleotide
  Target: LAMA2; (+) strand; PAM type: NNGRRT; PAM sequence: ATGGGT
ttcgtggactctaattttaa

SEQ ID NO: 27139 - DNA, 20 bp, Artificial Sequence
  Description of Artificial Sequence: Synthetic oligonucleotide
  Target: LAMA2; (+) strand; PAM type: NNGRRT; PAM sequence: ATGGAT
actctaattttaaatgggtg

SEQ ID NO: 27140 - DNA, 20 bp, Artificial Sequence
  Description of Artificial Sequence: Synthetic oligonucleotide
  Target: LAMA2; (+) strand; PAM type: NNGRRT; PAM sequence: CAGGGT
tactcaataaatgacagaag

SEQ ID NO: 27141 - DNA, 20 bp, Artificial Sequence
  Description of Artificial Sequence: Synthetic oligonucleotide
  Target: LAMA2; (+) strand; PAM type: NNGRRT; PAM sequence: AAGAAT
aaatagacttgaagttagac

SEQ ID NO: 27142 - DNA, 20 bp, Artificial Sequence
  Description of Artificial Sequence: Synthetic oligonucleotide
  Target: LAMA2; (+) strand; PAM type: NNGRRT; PAM sequence: TGGAGT
tttttgttgctttggttttt

SEQ ID NO: 27143 - DNA, 20 bp, Artificial Sequence
  Description of Artificial Sequence: Synthetic oligonucleotide
  Target: LAMA2; (+) strand; PAM type: NNGRRT; PAM sequence: AGGAGT
gtattttaacaagtatttgg

SEQ ID NO: 27144 - DNA, 20 bp, Artificial Sequence
  Description of Artificial Sequence: Synthetic oligonucleotide
  Target: LAMA2; (+) strand; PAM type: NNGRRT; PAM sequence: CTGGAT
ttagtgttcctacaagaaat

SEQ ID NO: 27145 - DNA, 20 bp, Artificial Sequence
  Description of Artificial Sequence: Synthetic oligonucleotide
  Target: LAMA2; (+) strand; PAM type: NNGRRT; PAM sequence: GGGGAT
tttttttaattttagattta

SEQ ID NO: 27146 - DNA, 20 bp, Artificial Sequence
  Description of Artificial Sequence: Synthetic oligonucleotide
  Target: LAMA2; (+) strand; PAM type: NNGRRT; PAM sequence: GTGGGT
tagatttaggggatacatgt

SEQ ID NO: 27147 - DNA, 20 bp, Artificial Sequence
  Description of Artificial Sequence: Synthetic oligonucleotide
  Target: LAMA2; (+) strand; PAM type: NNGRRT; PAM sequence: ATGGGT
tacatgtgtgggtttgtgac

SEQ ID NO: 27148 - DNA, 20 bp, Artificial Sequence
  Description of Artificial Sequence: Synthetic oligonucleotide
  Target: LAMA2; (+) strand; PAM type: NNGRRT; PAM sequence: CTGGGT
gcctcttcccttttgtattc

SEQ ID NO: 27149 - DNA, 20 bp, Artificial Sequence
  Description of Artificial Sequence: Synthetic oligonucleotide
  Target: LAMA2; (+) strand; PAM type: NNGRRT; PAM sequence: CTGAGT
tcatattcaattttctgctt

SEQ ID NO: 27150 - DNA, 20 bp, Artificial Sequence
  Description of Artificial Sequence: Synthetic oligonucleotide
  Target: LAMA2; (+) strand; PAM type: NNGRRT; PAM sequence: TAGGAT
tgcttctgagttatttcact

SEQ ID NO: 27151 - DNA, 20 bp, Artificial Sequence
  Description of Artificial Sequence: Synthetic oligonucleotide
  Target: LAMA2; (+) strand; PAM type: NNGRRT; PAM sequence: TTGAGT
tagattgttgagcacataga

SEQ ID NO: 27152 - DNA, 20 bp, Artificial Sequence
  Description of Artificial Sequence: Synthetic oligonucleotide
  Target: LAMA2; (+) strand; PAM type: NNGRRT; PAM sequence: GTGAAT
gagtccatgactttgctatt

SEQ ID NO: 27153 - DNA, 20 bp, Artificial Sequence
  Description of Artificial Sequence: Synthetic oligonucleotide
  Target: LAMA2; (+) strand; PAM type: NNGRRT; PAM sequence: TTGGGT
atatagttagttcttttcct

SEQ ID NO: 27154 - DNA, 20 bp, Artificial Sequence
  Description of Artificial Sequence: Synthetic oligonucleotide
  Target: LAMA2; (+) strand; PAM type: NNGRRT; PAM sequence: TGGGAT
tttgggtagatacccagtaa

SEQ ID NO: 27155 - DNA, 20 bp, Artificial Sequence
  Description of Artificial Sequence: Synthetic oligonucleotide
  Target: LAMA2; (+) strand; PAM type: NNGRRT; PAM sequence: AGGGGT
ctctccatattgatttccat

SEQ ID NO: 27156 - DNA, 20 bp, Artificial Sequence
  Description of Artificial Sequence: Synthetic oligonucleotide
  Target: LAMA2; (+) strand; PAM type: NNGRRT; PAM sequence: CTGGAT
atttaagtttcttatagttt

SEQ ID NO: 27157 - DNA, 20 bp, Artificial Sequence
  Description of Artificial Sequence: Synthetic oligonucleotide
  Target: LAMA2; (+) strand; PAM type: NNGRRT; PAM sequence: GAGAAT
tctttacctaggccaatgtc

SEQ ID NO: 27158 - DNA, 20 bp, Artificial Sequence
  Description of Artificial Sequence: Synthetic oligonucleotide
  Target: LAMA2; (+) strand; PAM type: NNGRRT; PAM sequence: TTGAGT
atttaagtctttaattgatc

SEQ ID NO: 27159 - DNA, 20 bp, Artificial Sequence
  Description of Artificial Sequence: Synthetic oligonucleotide
  Target: LAMA2; (+) strand; PAM type: NNGRRT; PAM sequence: TAGGGT
tttttgtatatggtgacaca

SEQ ID NO: 27160 - DNA, 20 bp, Artificial Sequence
  Description of Artificial Sequence: Synthetic oligonucleotide
  Target: LAMA2; (+) strand; PAM type: NNGRRT; PAM sequence: TAGGGT
tccgctagccagttattaaa

SEQ ID NO: 27161 - DNA, 20 bp, Artificial Sequence
  Description of Artificial Sequence: Synthetic oligonucleotide
  Target: LAMA2; (+) strand; PAM type: NNGRRT; PAM sequence: AGGAAT
ctttgtcgaagattagttgt

SEQ ID NO: 27162 - DNA, 20 bp, Artificial Sequence
  Description of Artificial Sequence: Synthetic oligonucleotide
  Target: LAMA2; (+) strand; PAM type: NNGRRT; PAM sequence: ATGGAT
cgaagattagttgtaggaat

SEQ ID NO: 27163 - DNA, 20 bp, Artificial Sequence
  Description of Artificial Sequence: Synthetic oligonucleotide
  Target: LAMA2; (+) strand; PAM type: NNGRRT; PAM sequence: TAGAAT
ccagcgttgatctttttgct

SEQ ID NO: 27164 - DNA, 20 bp, Artificial Sequence
  Description of Artificial Sequence: Synthetic oligonucleotide
  Target: LAMA2; (+) strand; PAM type: NNGRRT; PAM sequence: TAGAAT
ttttgtttccatattaattt

SEQ ID NO: 27165 - DNA, 20 bp, Artificial Sequence
  Description of Artificial Sequence: Synthetic oligonucleotide
  Target: LAMA2; (+) strand; PAM type: NNGRRT; PAM sequence: AGGGAT
aatgacattggtaatttgat

SEQ ID NO: 27166 - DNA, 20 bp, Artificial Sequence
  Description of Artificial Sequence: Synthetic oligonucleotide
  Target: LAMA2; (+) strand; PAM type: NNGRRT; PAM sequence: CTGAAT
gtaatttgatagggattgca

SEQ ID NO: 27167 - DNA, 20 bp, Artificial Sequence
  Description of Artificial Sequence: Synthetic oligonucleotide
  Target: LAMA2; (+) strand; PAM type: NNGRRT; PAM sequence: TTGGGT
cactgaatctgtagattgtt

SEQ ID NO: 27168 - DNA, 20 bp, Artificial Sequence
  Description of Artificial Sequence: Synthetic oligonucleotide
  Target: LAMA2; (+) strand; PAM type: NNGRRT; PAM sequence: TGGAAT
attctttctatccatgagca

SEQ ID NO: 27169 - DNA, 20 bp, Artificial Sequence
  Description of Artificial Sequence: Synthetic oligonucleotide
  Target: LAMA2; (+) strand; PAM type: NNGRRT; PAM sequence: ATGGAT
tgtaatcctatcttaattag

SEQ ID NO: 27170 - DNA, 20 bp, Artificial Sequence
  Description of Artificial Sequence: Synthetic oligonucleotide
  Target: LAMA2; (+) strand; PAM type: NNGRRT; PAM sequence: GGGAAT
gatggatgatgtcctttgtt

SEQ ID NO: 27171 - DNA, 20 bp, Artificial Sequence
  Description of Artificial Sequence: Synthetic oligonucleotide
  Target: LAMA2; (+) strand; PAM type: NNGRRT; PAM sequence: GTGGAT
atactgcttagctggaccaa

SEQ ID NO: 27172 - DNA, 20 bp, Artificial Sequence
  Description of Artificial Sequence: Synthetic oligonucleotide
  Target: LAMA2; (+) strand; PAM type: NNGRRT; PAM sequence: TTGAAT
ccaagtggataagatgacat

SEQ ID NO: 27173 - DNA, 20 bp, Artificial Sequence
  Description of Artificial Sequence: Synthetic oligonucleotide
  Target: LAMA2; (+) strand; PAM type: NNGRRT; PAM sequence: TTGGGT
ccttgtagcccttcttttat

SEQ ID NO: 27174 - DNA, 20 bp, Artificial Sequence
  Description of Artificial Sequence: Synthetic oligonucleotide
  Target: LAMA2; (+) strand; PAM type: NNGRRT; PAM sequence: TGGAGT
taaacatgcctaagatccat

SEQ ID NO: 27175 - DNA, 20 bp, Artificial Sequence
  Description of Artificial Sequence: Synthetic oligonucleotide
  Target: LAMA2; (+) strand; PAM type: NNGRRT; PAM sequence: GAGAGT
tgtaacctgtttggaaggaa

SEQ ID NO: 27176 - DNA, 20 bp, Artificial Sequence
  Description of Artificial Sequence: Synthetic oligonucleotide
  Target: LAMA2; (+) strand; PAM type: NNGRRT; PAM sequence: AGGAAT
aaattgaaagtcctataaac

SEQ ID NO: 27177 - DNA, 20 bp, Artificial Sequence
  Description of Artificial Sequence: Synthetic oligonucleotide
  Target: LAMA2; (+) strand; PAM type: NNGRRT; PAM sequence: TAGAAT
gaaagtcctataaacaggaa

SEQ ID NO: 27178 - DNA, 20 bp, Artificial Sequence
  Description of Artificial Sequence: Synthetic oligonucleotide
  Target: LAMA2; (+) strand; PAM type: NNGRRT; PAM sequence: CTGGAT
ttttgtttgcttctgaacaa

SEQ ID NO: 27179 - DNA, 20 bp, Artificial Sequence
  Description of Artificial Sequence: Synthetic oligonucleotide
  Target: LAMA2; (+) strand; PAM type: NNGRRT; PAM sequence: GTGGAT
ttaaacccttcatctgcatc

SEQ ID NO: 27180 - DNA, 20 bp, Artificial Sequence
  Description of Artificial Sequence: Synthetic oligonucleotide
  Target: LAMA2; (+) strand; PAM type: NNGRRT; PAM sequence: CAGGAT
tctgacacacccacatagct

SEQ ID NO: 27181 - DNA, 20 bp, Artificial Sequence
  Description of Artificial Sequence: Synthetic oligonucleotide
  Target: LAMA2; (+) strand; PAM type: NNGRRT; PAM sequence: TTGAAT
tctcttttgtcttttaaata

SEQ ID NO: 27182 - DNA, 20 bp, Artificial Sequence
  Description of Artificial Sequence: Synthetic oligonucleotide
  Target: LAMA2; (+) strand; PAM type: NNGRRT; PAM sequence: ATGAAT
ttgcaaacatctctgcttgc

SEQ ID NO: 27183 - DNA, 20 bp, Artificial Sequence
  Description of Artificial Sequence: Synthetic oligonucleotide
  Target: LAMA2; (+) strand; PAM type: NNGRRT; PAM sequence: TAGAAT
tagaagctgaaatggaaagt

SEQ ID NO: 27184 - DNA, 20 bp, Artificial Sequence
  Description of Artificial Sequence: Synthetic oligonucleotide
  Target: LAMA2; (+) strand; PAM type: NNGRRT; PAM sequence: CAGGAT
aggtgattggcatgaaatag

SEQ ID NO: 27185 - DNA, 20 bp, Artificial Sequence
  Description of Artificial Sequence: Synthetic oligonucleotide
  Target: LAMA2; (+) strand; PAM type: NNGRRT; PAM sequence: AAGGAT
gacagagagacagagacaga

SEQ ID NO: 27186 - DNA, 20 bp, Artificial Sequence
  Description of Artificial Sequence: Synthetic oligonucleotide
  Target: LAMA2; (+) strand; PAM type: NNGRRT; PAM sequence: AAGGAT
gagacagagacagaaaggat

SEQ ID NO: 27187 - DNA, 20 bp, Artificial Sequence
  Description of Artificial Sequence: Synthetic oligonucleotide
  Target: LAMA2; (+) strand; PAM type: NNGRRT; PAM sequence: ATGAAT
atcttagagattattttaaa

SEQ ID NO: 27188 - DNA, 20 bp, Artificial Sequence
  Description of Artificial Sequence: Synthetic oligonucleotide
  Target: LAMA2; (+) strand; PAM type: NNGRRT; PAM sequence: GTGAAT
tttaaaatgaatatattgaa

SEQ ID NO: 27189 - DNA, 20 bp, Artificial Sequence
  Description of Artificial Sequence: Synthetic oligonucleotide
  Target: LAMA2; (+) strand; PAM type: NNGRRT; PAM sequence: CTGAAT
gaagtgaattgttgcattga

SEQ ID NO: 27190 - DNA, 20 bp, Artificial Sequence
  Description of Artificial Sequence: Synthetic oligonucleotide
  Target: LAMA2; (+) strand; PAM type: NNGRRT; PAM sequence: CGGAGT
ttttttttttttttttgaga

SEQ ID NO: 27191 - DNA, 20 bp, Artificial Sequence
  Description of Artificial Sequence: Synthetic oligonucleotide
  Target: LAMA2; (+) strand; PAM type: NNGRRT; PAM sequence: CTGGAT
gtctcgctctgtcgcccagg

SEQ ID NO: 27192 - DNA, 20 bp, Artificial Sequence
  Description of Artificial Sequence: Synthetic oligonucleotide
  Target: LAMA2; (+) strand; PAM type: NNGRRT; PAM sequence: TGGAGT
gctctgtcgcccaggctgga

SEQ ID NO: 27193 - DNA, 20 bp, Artificial Sequence
  Description of Artificial Sequence: Synthetic oligonucleotide
  Target: LAMA2; (+) strand; PAM type: NNGRRT; PAM sequence: CCGAGT
cattctcccgcctcagcctc

SEQ ID NO: 27194 - DNA, 20 bp, Artificial Sequence
  Description of Artificial Sequence: Synthetic oligonucleotide
  Target: LAMA2; (+) strand; PAM type: NNGRRT; PAM sequence: CAGGGT
ttttgtatttttagtagaga

SEQ ID NO: 27195 - DNA, 20 bp, Artificial Sequence
  Description of Artificial Sequence: Synthetic oligonucleotide
  Target: LAMA2; (+) strand; PAM type: NNGRRT; PAM sequence: CAGGAT
cagggtttcaccgtgttagc

SEQ ID NO: 27196 - DNA, 20 bp, Artificial Sequence
  Description of Artificial Sequence: Synthetic oligonucleotide
  Target: LAMA2; (+) strand; PAM type: NNGRRT; PAM sequence: CAGAAT
tggaaattttcactgtgaaa

SEQ ID NO: 27197 - DNA, 20 bp, Artificial Sequence
  Description of Artificial Sequence: Synthetic oligonucleotide
  Target: LAMA2; (+) strand; PAM type: NNGRRT; PAM sequence: TTGAGT
tcatggtcattgtacaacca

SEQ ID NO: 27198 - DNA, 20 bp, Artificial Sequence
  Description of Artificial Sequence: Synthetic oligonucleotide
  Target: LAMA2; (+) strand; PAM type: NNGRRT; PAM sequence: GTGAGT
tgagtctttgtataattgct

SEQ ID NO: 27199 - DNA, 20 bp, Artificial Sequence
  Description of Artificial Sequence: Synthetic oligonucleotide
  Target: LAMA2; (+) strand; PAM type: NNGRRT; PAM sequence: GTGAGT
tttctatcttcactctgtgt

SEQ ID NO: 27200 - DNA, 20 bp, Artificial Sequence
  Description of Artificial Sequence: Synthetic oligonucleotide
  Target: LAMA2; (+) strand; PAM type: NNGRRT; PAM sequence: CAGAGT
gaaatataccatataacttg

SEQ ID NO: 27201 - DNA, 20 bp, Artificial Sequence
  Description of Artificial Sequence: Synthetic oligonucleotide
  Target: LAMA2; (+) strand; PAM type: NNGRRT; PAM sequence: CAGGGT
tgatgggaaaatttgaaaac

SEQ ID NO: 27202 - DNA, 20 bp, Artificial Sequence
  Description of Artificial Sequence: Synthetic oligonucleotide
  Target: LAMA2; (+) strand; PAM type: NNGRRT; PAM sequence: CAGAAT
cctaggttttgatacctgta

SEQ ID NO: 27203 - DNA, 20 bp, Artificial Sequence
  Description of Artificial Sequence: Synthetic oligonucleotide
  Target: LAMA2; (+) strand; PAM type: NNGRRT; PAM sequence: TAGGGT
tgtacatgccctaactgcta

SEQ ID NO: 27204 - DNA, 20 bp, Artificial Sequence
  Description of Artificial Sequence: Synthetic oligonucleotide
  Target: LAMA2; (+) strand; PAM type: NNGRRT; PAM sequence: GAGGAT
attactcaagaaaagaaatg

SEQ ID NO: 27205 - DNA, 20 bp, Artificial Sequence
  Description of Artificial Sequence: Synthetic oligonucleotide
  Target: LAMA2; (+) strand; PAM type: NNGRRT; PAM sequence: ATGAAT
ctcaagaaaagaaatggagg

SEQ ID NO: 27206 - DNA, 20 bp, Artificial Sequence
  Description of Artificial Sequence: Synthetic oligonucleotide
  Target: LAMA2; (+) strand; PAM type: NNGRRT; PAM sequence: TTGAAT
catataggttggctttttct

SEQ ID NO: 27207 - DNA, 20 bp, Artificial Sequence
  Description of Artificial Sequence: Synthetic oligonucleotide
  Target: LAMA2; (+) strand; PAM type: NNGRRT; PAM sequence: TTGAGT
cttattcagtaaatttaaat

SEQ ID NO: 27208 - DNA, 20 bp, Artificial Sequence
  Description of Artificial Sequence: Synthetic oligonucleotide
  Target: LAMA2; (+) strand; PAM type: NNGRRT; PAM sequence: GAGGGT
tactaaagttacagtatgat

SEQ ID NO: 27209 - DNA, 20 bp, Artificial Sequence
  Description of Artificial Sequence: Synthetic oligonucleotide
  Target: LAMA2; (+) strand; PAM type: NNGRRT; PAM sequence: GGGAAT
gaaaacactttcacagagca

SEQ ID NO: 27210 - DNA, 20 bp, Artificial Sequence
  Description of Artificial Sequence: Synthetic oligonucleotide
  Target: LAMA2; (+) strand; PAM type: NNGRRT; PAM sequence: GAGGAT
atgtataagaaggcatgaag

SEQ ID NO: 27211 - DNA, 20 bp, Artificial Sequence
  Description of Artificial Sequence: Synthetic oligonucleotide
  Target: LAMA2; (+) strand; PAM type: NNGRRT; PAM sequence: ATGAGT
atgaaggaggatagcaacag

SEQ ID NO: 27212 - DNA, 20 bp, Artificial Sequence
  Description of Artificial Sequence: Synthetic oligonucleotide
  Target: LAMA2; (+) strand; PAM type: NNGRRT; PAM sequence: AGGAGT
tataaatgtttagatcacca

SEQ ID NO: 27213 - DNA, 20 bp, Artificial Sequence
  Description of Artificial Sequence: Synthetic oligonucleotide
  Target: LAMA2; (+) strand; PAM type: NNGRRT; PAM sequence: GTGAGT
aaaagtctttaaaaaagaaa

SEQ ID NO: 27214 - DNA, 20 bp, Artificial Sequence
  Description of Artificial Sequence: Synthetic oligonucleotide
  Target: LAMA2; (+) strand; PAM type: NNGRRT; PAM sequence: GGGAGT
caacaatggggaagattaat

SEQ ID NO: 27215 - DNA, 20 bp, Artificial Sequence
  Description of Artificial Sequence: Synthetic oligonucleotide
  Target: LAMA2; (+) strand; PAM type: NNGRRT; PAM sequence: TAGAGT
atggggaagattaatgggag

SEQ ID NO: 27216 - DNA, 20 bp, Artificial Sequence
  Description of Artificial Sequence: Synthetic oligonucleotide
  Target: LAMA2; (+) strand; PAM type: NNGRRT; PAM sequence: AGGGAT
aagacaatttttccattgac

SEQ ID NO: 27217 - DNA, 20 bp, Artificial Sequence
  Description of Artificial Sequence: Synthetic oligonucleotide
  Target: LAMA2; (+) strand; PAM type: NNGRRT; PAM sequence: AGGGGT
atttttccattgacagggat

SEQ ID NO: 27218 - DNA, 20 bp, Artificial Sequence
  Description of Artificial Sequence: Synthetic oligonucleotide
  Target: LAMA2; (+) strand; PAM type: NNGRRT; PAM sequence: GTGGAT
ttccattgacagggataggg

SEQ ID NO: 27219 - DNA, 20 bp, Artificial Sequence
  Description of Artificial Sequence: Synthetic oligonucleotide
  Target: LAMA2; (+) strand; PAM type: NNGRRT; PAM sequence: CAGGAT
gggataggggtggatggttt

SEQ ID NO: 27220 - DNA, 20 bp, Artificial Sequence
  Description of Artificial Sequence: Synthetic oligonucleotide
  Target: LAMA2; (+) strand; PAM type: NNGRRT; PAM sequence: GAGAGT
aatatggttcacgttcctgt

SEQ ID NO: 27221 - DNA, 20 bp, Artificial Sequence
  Description of Artificial Sequence: Synthetic oligonucleotide
  Target: LAMA2; (+) strand; PAM type: NNGRRT; PAM sequence: TGGGGT
ctggtactggtctgcagccc

SEQ ID NO: 27222 - DNA, 20 bp, Artificial Sequence
  Description of Artificial Sequence: Synthetic oligonucleotide
  Target: LAMA2; (+) strand; PAM type: NNGRRT; PAM sequence: CCGGGT
cagccctggggttggggacc

SEQ ID NO: 27223 - DNA, 20 bp, Artificial Sequence
  Description of Artificial Sequence: Synthetic oligonucleotide
  Target: LAMA2; (+) strand; PAM type: NNGRRT; PAM sequence: TAGGAT
tggggttggggaccccgggt

SEQ ID NO: 27224 - DNA, 20 bp, Artificial Sequence
  Description of Artificial Sequence: Synthetic oligonucleotide
  Target: LAMA2; (+) strand; PAM type: NNGRRT; PAM sequence: TAGGAT
taataaatgtaaagtaaggt

SEQ ID NO: 27225 - DNA, 20 bp, Artificial Sequence
  Description of Artificial Sequence: Synthetic oligonucleotide
  Target: LAMA2; (+) strand; PAM type: NNGRRT; PAM sequence: CTGAAT
gtaaagtaaggttaggatat

SEQ ID NO: 27226 - DNA, 20 bp, Artificial Sequence
  Description of Artificial Sequence: Synthetic oligonucleotide
  Target: LAMA2; (+) strand; PAM type: NNGRRT; PAM sequence: CTGAAT
gcggggagcggtgtgtgtag

SEQ ID NO: 27227 - DNA, 20 bp, Artificial Sequence
  Description of Artificial Sequence: Synthetic oligonucleotide
  Target: LAMA2; (+) strand; PAM type: NNGRRT; PAM sequence: TAGAAT
taaactggaagcagaaatct

SEQ ID NO: 27228 - DNA, 20 bp, Artificial Sequence
  Description of Artificial Sequence: Synthetic oligonucleotide
  Target: LAMA2; (+) strand; PAM type: NNGRRT; PAM sequence: TGGAGT
ttaacattttctggtttctg

SEQ ID NO: 27229 - DNA, 20 bp, Artificial Sequence
  Description of Artificial Sequence: Synthetic oligonucleotide
  Target: LAMA2; (+) strand; PAM type: NNGRRT; PAM sequence: ATGAAT
tttcaggaacaaaggtgact

SEQ ID NO: 27230 - DNA, 20 bp, Artificial Sequence
  Description of Artificial Sequence: Synthetic oligonucleotide
  Target: LAMA2; (+) strand; PAM type: NNGRRT; PAM sequence: GTGGAT
aattaggtaccaatattttt

SEQ ID NO: 27231 - DNA, 20 bp, Artificial Sequence
  Description of Artificial Sequence: Synthetic oligonucleotide
  Target: LAMA2; (+) strand; PAM type: NNGRRT; PAM sequence: ATGAGT
gaagtcagccaataatggag

SEQ ID NO: 27232 - DNA, 20 bp, Artificial Sequence
  Description of Artificial Sequence: Synthetic oligonucleotide
  Target: LAMA2; (+) strand; PAM type: NNGRRT; PAM sequence: AAGGAT
aatggagatgagtatgtgga

SEQ ID NO: 27233 - DNA, 20 bp, Artificial Sequence
  Description of Artificial Sequence: Synthetic oligonucleotide
  Target: LAMA2; (+) strand; PAM type: NNGRRT; PAM sequence: ATGGAT
gagatgagtatgtggaaagg

SEQ ID NO: 27234 - DNA, 20 bp, Artificial Sequence
  Description of Artificial Sequence: Synthetic oligonucleotide
  Target: LAMA2; (+) strand; PAM type: NNGRRT; PAM sequence: TTGGGT
gactttttgaaaagaagtta

SEQ ID NO: 27235 - DNA, 20 bp, Artificial Sequence
  Description of Artificial Sequence: Synthetic oligonucleotide
  Target: LAMA2; (+) strand; PAM type: NNGRRT; PAM sequence: GAGGAT
agtttgggaggttgaggtgg

SEQ ID NO: 27236 - DNA, 20 bp, Artificial Sequence
  Description of Artificial Sequence: Synthetic oligonucleotide
  Target: LAMA2; (+) strand; PAM type: NNGRRT; PAM sequence: AGGAGT
tgggaggatcacttgaggcc

SEQ ID NO: 27237 - DNA, 20 bp, Artificial Sequence
  Description of Artificial Sequence: Synthetic oligonucleotide
  Target: LAMA2; (+) strand; PAM type: NNGRRT; PAM sequence: CAGGAT
cacctgtagttctagctact

SEQ ID NO: 27238 - DNA, 20 bp, Artificial Sequence
  Description of Artificial Sequence: Synthetic oligonucleotide
  Target: LAMA2; (+) strand; PAM type: NNGRRT; PAM sequence: GAGGAT
tactcaggatgctcaggcaa

SEQ ID NO: 27239 - DNA, 20 bp, Artificial Sequence
  Description of Artificial Sequence: Synthetic oligonucleotide
  Target: LAMA2; (+) strand; PAM type: NNGRRT; PAM sequence: AAGAGT
tgcactccagcctgggcaac

SEQ ID NO: 27240 - DNA, 20 bp, Artificial Sequence
  Description of Artificial Sequence: Synthetic oligonucleotide
  Target: LAMA2; (+) strand; PAM type: NNGRRT; PAM sequence: TTGAGT
attaaaaagaaatgaagtta

SEQ ID NO: 27241 - DNA, 20 bp, Artificial Sequence
  Description of Artificial Sequence: Synthetic oligonucleotide
  Target: LAMA2; (+) strand; PAM type: NNGRRT; PAM sequence: ATGAAT
tgtctttccccagtgatttt

SEQ ID NO: 27242 - DNA, 20 bp, Artificial Sequence
  Description of Artificial Sequence: Synthetic oligonucleotide
  Target: LAMA2; (+) strand; PAM type: NNGRRT; PAM sequence: AGGAGT
ccaaggcttcacttgcaaaa

SEQ ID NO: 27243 - DNA, 20 bp, Artificial Sequence
  Description of Artificial Sequence: Synthetic oligonucleotide
  Target: LAMA2; (+) strand; PAM type: NNGRRT; PAM sequence: ATGAGT
gctatgatggaagttagccc

SEQ ID NO: 27244 - DNA, 20 bp, Artificial Sequence
  Description of Artificial Sequence: Synthetic oligonucleotide
  Target: LAMA2; (+) strand; PAM type: NNGRRT; PAM sequence: AGGGAT
agctagatggcataagactc

SEQ ID NO: 27245 - DNA, 20 bp, Artificial Sequence
  Description of Artificial Sequence: Synthetic oligonucleotide
  Target: LAMA2; (+) strand; PAM type: NNGRRT; PAM sequence: TAGAGT
aggtgataaatatttttgtt

SEQ ID NO: 27246 - DNA, 20 bp, Artificial Sequence
  Description of Artificial Sequence: Synthetic oligonucleotide
  Target: LAMA2; (+) strand; PAM type: NNGRRT; PAM sequence: AAGAGT
tttttgtttagagtagtgag

SEQ ID NO: 27247 - DNA, 20 bp, Artificial Sequence
  Description of Artificial Sequence: Synthetic oligonucleotide
  Target: LAMA2; (+) strand; PAM type: NNGRRT; PAM sequence: TGGAAT
taataaaattttcactcatt

SEQ ID NO: 27248 - DNA, 20 bp, Artificial Sequence
  Description of Artificial Sequence: Synthetic oligonucleotide
  Target: LAMA2; (+) strand; PAM type: NNGRRT; PAM sequence: CTGGGT
ccagctgtgccatttaaatt

SEQ ID NO: 27249 - DNA, 20 bp, Artificial Sequence
  Description of Artificial Sequence: Synthetic oligonucleotide
  Target: LAMA2; (+) strand; PAM type: NNGRRT; PAM sequence: ATGAAT
gaagaccccttaattgttca

SEQ ID NO: 27250 - DNA, 20 bp, Artificial Sequence
  Description of Artificial Sequence: Synthetic oligonucleotide
  Target: LAMA2; (+) strand; PAM type: NNGRRT; PAM sequence: GTGGGT
cacctgctgattgcaggcct

SEQ ID NO: 27251 - DNA, 20 bp, Artificial Sequence
  Description of Artificial Sequence: Synthetic oligonucleotide
  Target: LAMA2; (+) strand; PAM type: NNGRRT; PAM sequence: AAGAAT
ttgaaaatacataaaatcca

SEQ ID NO: 27252 - DNA, 20 bp, Artificial Sequence
  Description of Artificial Sequence: Synthetic oligonucleotide
  Target: LAMA2; (+) strand; PAM type: NNGRRT; PAM sequence: AAGAAT
catgcacttggtaaggttga

SEQ ID NO: 27253 - DNA, 20 bp, Artificial Sequence
  Description of Artificial Sequence: Synthetic oligonucleotide
  Target: LAMA2; (+) strand; PAM type: NNGRRT; PAM sequence: AGGGAT
tggctgatgcctgtaatccc

SEQ ID NO: 27254 - DNA, 20 bp, Artificial Sequence
  Description of Artificial Sequence: Synthetic oligonucleotide
  Target: LAMA2; (+) strand; PAM type: NNGRRT; PAM sequence: CAGGAT
gtgggagcattgcctgaggg

SEQ ID NO: 27255 - DNA, 20 bp, Artificial Sequence
  Description of Artificial Sequence: Synthetic oligonucleotide
  Target: LAMA2; (+) strand; PAM type: NNGRRT; PAM sequence: GAGGAT
tactcaggaagctgaggcag

SEQ ID NO: 27256 - DNA, 20 bp, Artificial Sequence
  Description of Artificial Sequence: Synthetic oligonucleotide
  Target: LAMA2; (+) strand; PAM type: NNGRRT; PAM sequence: AGGAGT
caggaggattgcttgagccc

SEQ ID NO: 27257 - DNA, 20 bp, Artificial Sequence
  Description of Artificial Sequence: Synthetic oligonucleotide
  Target: LAMA2; (+) strand; PAM type: NNGRRT; PAM sequence: CAGAAT
ttgcactccaacctgggcaa

SEQ ID NO: 27258 - DNA, 20 bp, Artificial Sequence
  Description of Artificial Sequence: Synthetic oligonucleotide
  Target: LAMA2; (+) strand; PAM type: NNGRRT; PAM sequence: GTGGAT
actttcagaggctgaggcag

SEQ ID NO: 27259 - DNA, 20 bp, Artificial Sequence
  Description of Artificial Sequence: Synthetic oligonucleotide
  Target: LAMA2; (+) strand; PAM type: NNGRRT; PAM sequence: AGGAGT
caggtggatcagttgaggtc

SEQ ID NO: 27260 - DNA, 20 bp, Artificial Sequence
  Description of Artificial Sequence: Synthetic oligonucleotide
  Target: LAMA2; (+) strand; PAM type: NNGRRT; PAM sequence: GAGAAT
tactcgggaggctgaggcag

SEQ ID NO: 27261 - DNA, 20 bp, Artificial Sequence
  Description of Artificial Sequence: Synthetic oligonucleotide
  Target: LAMA2; (+) strand; PAM type: NNGRRT; PAM sequence: GTGAGT
cctgagaggcggaggttgca

SEQ ID NO: 27262 - DNA, 20 bp, Artificial Sequence
  Description of Artificial Sequence: Synthetic oligonucleotide
  Target: LAMA2; (+) strand; PAM type: NNGRRT; PAM sequence: TGGGAT
aggcggaggttgcagtgagt

SEQ ID NO: 27263 - DNA, 20 bp, Artificial Sequence
  Description of Artificial Sequence: Synthetic oligonucleotide
  Target: LAMA2; (+) strand; PAM type: NNGRRT; PAM sequence: TTGAGT
gataaattaatttaacatgt

SEQ ID NO: 27264 - DNA, 20 bp, Artificial Sequence
  Description of Artificial Sequence: Synthetic oligonucleotide
  Target: LAMA2; (+) strand; PAM type: NNGRRT; PAM sequence: ATGAAT
tcattcctatacacatgatc

SEQ ID NO: 27265 - DNA, 20 bp, Artificial Sequence
  Description of Artificial Sequence: Synthetic oligonucleotide
  Target: LAMA2; (+) strand; PAM type: NNGRRT; PAM sequence: TGGAGT
tgatcatgaatatcattaac

SEQ ID NO: 27266 - DNA, 20 bp, Artificial Sequence
  Description of Artificial Sequence: Synthetic oligonucleotide
  Target: LAMA2; (+) strand; PAM type: NNGRRT; PAM sequence: CTGAAT
ccccgtgtaacattcactca

SEQ ID NO: 27267 - DNA, 20 bp, Artificial Sequence
  Description of Artificial Sequence: Synthetic oligonucleotide
  Target: LAMA2; (+) strand; PAM type: NNGRRT; PAM sequence: AAGAAT
ttataatacaaactgctatc

SEQ ID NO: 27268 - DNA, 20 bp, Artificial Sequence
  Description of Artificial Sequence: Synthetic oligonucleotide
  Target: LAMA2; (+) strand; PAM type: NNGRRT; PAM sequence: ATGAAT
tgtttaaaaagatcatataa

SEQ ID NO: 27269 - DNA, 20 bp, Artificial Sequence
  Description of Artificial Sequence: Synthetic oligonucleotide
  Target: LAMA2; (+) strand; PAM type: NNGRRT; PAM sequence: TAGAGT
aagatcatataaatgaataa

SEQ ID NO: 27270 - DNA, 20 bp, Artificial Sequence
  Description of Artificial Sequence: Synthetic oligonucleotide
  Target: LAMA2; (+) strand; PAM type: NNGRRT; PAM sequence: TGGAGT
ttatgtggcataatcctttt

SEQ ID NO: 27271 - DNA, 20 bp, Artificial Sequence
  Description of Artificial Sequence: Synthetic oligonucleotide
  Target: LAMA2; (+) strand; PAM type: NNGRRT; PAM sequence: TTGAAT
taatttgttccatttttatg

SEQ ID NO: 27272 - DNA, 20 bp, Artificial Sequence
  Description of Artificial Sequence: Synthetic oligonucleotide
  Target: LAMA2; (+) strand; PAM type: NNGRRT; PAM sequence: TTGGAT
gacatgtaatgtcatttatc

SEQ ID NO: 27273 - DNA, 20 bp, Artificial Sequence
  Description of Artificial Sequence: Synthetic oligonucleotide
  Target: LAMA2; (+) strand; PAM type: NNGRRT; PAM sequence: AAGGGT
aaaaactacctgttttctaa

SEQ ID NO: 27274 - DNA, 20 bp, Artificial Sequence
  Description of Artificial Sequence: Synthetic oligonucleotide
  Target: LAMA2; (+) strand; PAM type: NNGRRT; PAM sequence: AAGAAT
aaatattaatatgcatttaa

SEQ ID NO: 27275 - DNA, 20 bp, Artificial Sequence
  Description of Artificial Sequence: Synthetic oligonucleotide
  Target: LAMA2; (+) strand; PAM type: NNGRRT; PAM sequence: GTGGAT
ttttctattaatcacatgta

SEQ ID NO: 27276 - DNA, 20 bp, Artificial Sequence
  Description of Artificial Sequence: Synthetic oligonucleotide
  Target: LAMA2; (+) strand; PAM type: NNGRRT; PAM sequence: CAGAAT
tgtgttacatttttcagtca

SEQ ID NO: 27277 - DNA, 20 bp, Artificial Sequence
  Description of Artificial Sequence: Synthetic oligonucleotide
  Target: LAMA2; (+) strand; PAM type: NNGRRT; PAM sequence: AAGAAT
taccatttcttttttgctac

SEQ ID NO: 27278 - DNA, 20 bp, Artificial Sequence
  Description of Artificial Sequence: Synthetic oligonucleotide
  Target: LAMA2; (+) strand; PAM type: NNGRRT; PAM sequence: TTGAGT
tttcgtatgtgtgtatgtcc

SEQ ID NO: 27279 - DNA, 20 bp, Artificial Sequence
  Description of Artificial Sequence: Synthetic oligonucleotide
  Target: LAMA2; (+) strand; PAM type: NNGRRT; PAM sequence: ATGAGT
gattgctttttctcataagt

SEQ ID NO: 27280 - DNA, 20 bp, Artificial Sequence
  Description of Artificial Sequence: Synthetic oligonucleotide
  Target: LAMA2; (+) strand; PAM type: NNGRRT; PAM sequence: CTGGAT
tatttttttttaattgcaac

SEQ ID NO: 27281 - DNA, 20 bp, Artificial Sequence
  Description of Artificial Sequence: Synthetic oligonucleotide
  Target: LAMA2; (+) strand; PAM type: NNGRRT; PAM sequence: ATGAAT
ttaattgcaacctggatgtc

SEQ ID NO: 27282 - DNA, 20 bp, Artificial Sequence
  Description of Artificial Sequence: Synthetic oligonucleotide
  Target: LAMA2; (+) strand; PAM type: NNGRRT; PAM sequence: CTGGGT
aatagcacattgtagaaact

SEQ ID NO: 27283 - DNA, 20 bp, Artificial Sequence
  Description of Artificial Sequence: Synthetic oligonucleotide
  Target: LAMA2; (+) strand; PAM type: NNGRRT; PAM sequence: TAGAGT
cccaacttttttctttcctg

SEQ ID NO: 27284 - DNA, 20 bp, Artificial Sequence
  Description of Artificial Sequence: Synthetic oligonucleotide
  Target: LAMA2; (+) strand; PAM type: NNGRRT; PAM sequence: TGGAAT
tcagccctagctgggctact

SEQ ID NO: 27285 - DNA, 20 bp, Artificial Sequence
  Description of Artificial Sequence: Synthetic oligonucleotide
  Target: LAMA2; (+) strand; PAM type: NNGRRT; PAM sequence: CAGAGT
gcatcagtgagcaatttgga

SEQ ID NO: 27286 - DNA, 20 bp, Artificial Sequence
  Description of Artificial Sequence: Synthetic oligonucleotide
  Target: LAMA2; (+) strand; PAM type: NNGRRT; PAM sequence: GTGGGT
ttcttcaagccagtaaaact

SEQ ID NO: 27287 - DNA, 20 bp, Artificial Sequence
  Description of Artificial Sequence: Synthetic oligonucleotide
  Target: LAMA2; (+) strand; PAM type: NNGRRT; PAM sequence: TTGAGT
gtaaaactgtgggtttctat

SEQ ID NO: 27288 - DNA, 20 bp, Artificial Sequence
  Description of Artificial Sequence: Synthetic oligonucleotide
  Target: LAMA2; (+) strand; PAM type: NNGRRT; PAM sequence: CAGAAT
acacacaccaaatatataca

SEQ ID NO: 27289 - DNA, 20 bp, Artificial Sequence
  Description of Artificial Sequence: Synthetic oligonucleotide
  Target: LAMA2; (+) strand; PAM type: NNGRRT; PAM sequence: TGGGAT
tgccatttgaaaccaaaaag

SEQ ID NO: 27290 - DNA, 20 bp, Artificial Sequence
  Description of Artificial Sequence: Synthetic oligonucleotide
  Target: LAMA2; (+) strand; PAM type: NNGRRT; PAM sequence: GAGAAT
aaaccaaaaagtgggatttt

SEQ ID NO: 27291 - DNA, 20 bp, Artificial Sequence
  Description of Artificial Sequence: Synthetic oligonucleotide
  Target: LAMA2; (+) strand; PAM type: NNGRRT; PAM sequence: CAGAAT
aaatgtttgccatattgtag

SEQ ID NO: 27292 - DNA, 20 bp, Artificial Sequence
  Description of Artificial Sequence: Synthetic oligonucleotide
  Target: LAMA2; (+) strand; PAM type: NNGRRT; PAM sequence: CAGAAT
tatatatatacactatagaa

SEQ ID NO: 27293 - DNA, 20 bp, Artificial Sequence
  Description of Artificial Sequence: Synthetic oligonucleotide
  Target: LAMA2; (+) strand; PAM type: NNGRRT; PAM sequence: ATGAAT
tatattattctatatataat

SEQ ID NO: 27294 - DNA, 20 bp, Artificial Sequence
  Description of Artificial Sequence: Synthetic oligonucleotide
  Target: LAMA2; (+) strand; PAM type: NNGRRT; PAM sequence: CAGAAT
aataaaatacatagtataaa

SEQ ID NO: 27295 - DNA, 20 bp, Artificial Sequence
  Description of Artificial Sequence: Synthetic oligonucleotide
  Target: LAMA2; (+) strand; PAM type: NNGRRT; PAM sequence: ATGGAT
aaaatgtcaatcatagttgt

SEQ ID NO: 27296 - DNA, 20 bp, Artificial Sequence
  Description of Artificial Sequence: Synthetic oligonucleotide
  Target: LAMA2; (+) strand; PAM type: NNGRRT; PAM sequence: TTGAGT
taacattacaggaccttaag

SEQ ID NO: 27297 - DNA, 20 bp, Artificial Sequence
  Description of Artificial Sequence: Synthetic oligonucleotide
  Target: LAMA2; (+) strand; PAM type: NNGRRT; PAM sequence: TTGAAT
tcttaaccaagtaacacata

SEQ ID NO: 27298 - DNA, 20 bp, Artificial Sequence
  Description of Artificial Sequence: Synthetic oligonucleotide
  Target: LAMA2; (+) strand; PAM type: NNGRRT; PAM sequence: TTGAAT
taaatattgccctggtgctt

SEQ ID NO: 27299 - DNA, 20 bp, Artificial Sequence
  Description of Artificial Sequence: Synthetic oligonucleotide
  Target: LAMA2; (+) strand; PAM type: NNGRRT; PAM sequence: GGGAAT
ttgccctggtgcttttgaat

SEQ ID NO: 27300 - DNA, 20 bp, Artificial Sequence
  Description of Artificial Sequence: Synthetic oligonucleotide
  Target: LAMA2; (+) strand; PAM type: NNGRRT; PAM sequence: ATGGGT
agatttaacatataatgaaa

SEQ ID NO: 27301 - DNA, 20 bp, Artificial Sequence
  Description of Artificial Sequence: Synthetic oligonucleotide
  Target: LAMA2; (+) strand; PAM type: NNGRRT; PAM sequence: AAGAAT
aatagaaacaaatcaaagaa

SEQ ID NO: 27302 - DNA, 20 bp, Artificial Sequence
  Description of Artificial Sequence: Synthetic oligonucleotide
  Target: LAMA2; (+) strand; PAM type: NNGRRT; PAM sequence: AGGGAT
gaagcaacaatggcatggtg

SEQ ID NO: 27303 - DNA, 20 bp, Artificial Sequence
  Description of Artificial Sequence: Synthetic oligonucleotide
  Target: LAMA2; (+) strand; PAM type: NNGRRT; PAM sequence: AAGAAT
cttcatttttataaagtgga

SEQ ID NO: 27304 - DNA, 20 bp, Artificial Sequence
  Description of Artificial Sequence: Synthetic oligonucleotide
  Target: LAMA2; (+) strand; PAM type: NNGRRT; PAM sequence: ATGGGT
gaattaataaaatttataca

SEQ ID NO: 27305 - DNA, 20 bp, Artificial Sequence
  Description of Artificial Sequence: Synthetic oligonucleotide
  Target: LAMA2; (+) strand; PAM type: NNGRRT; PAM sequence: GGGAAT
atttatacaatgggttatat

SEQ ID NO: 27306 - DNA, 20 bp, Artificial Sequence
  Description of Artificial Sequence: Synthetic oligonucleotide
  Target: LAMA2; (+) strand; PAM type: NNGRRT; PAM sequence: AAGAAT
tatgggaattaaataatatg

SEQ ID NO: 27307 - DNA, 20 bp, Artificial Sequence
  Description of Artificial Sequence: Synthetic oligonucleotide
  Target: LAMA2; (+) strand; PAM type: NNGRRT; PAM sequence: TAGAAT
attaaataatatgaagaata

SEQ ID NO: 27308 - DNA, 20 bp, Artificial Sequence
  Description of Artificial Sequence: Synthetic oligonucleotide
  Target: LAMA2; (+) strand; PAM type: NNGRRT; PAM sequence: CAGAAT
tgaagaatatagaatagctt

SEQ ID NO: 27309 - DNA, 20 bp, Artificial Sequence
  Description of Artificial Sequence: Synthetic oligonucleotide
  Target: LAMA2; (+) strand; PAM type: NNGRRT; PAM sequence: TGGGAT
tctttatttatttaattatg

SEQ ID NO: 27310 - DNA, 20 bp, Artificial Sequence
  Description of Artificial Sequence: Synthetic oligonucleotide
  Target: LAMA2; (+) strand; PAM type: NNGRRT; PAM sequence: GGGAGT
gcagaccaaagcagggcaca

SEQ ID NO: 27311 - DNA, 20 bp, Artificial Sequence
  Description of Artificial Sequence: Synthetic oligonucleotide
  Target: LAMA2; (+) strand; PAM type: NNGRRT; PAM sequence: AGGAAT
cttacccatacctgcaaaac

SEQ ID NO: 27312 - DNA, 20 bp, Artificial Sequence
  Description of Artificial Sequence: Synthetic oligonucleotide
  Target: LAMA2; (+) strand; PAM type: NNGRRT; PAM sequence: CAGGGT
aacaggaatgaggccatggt

SEQ ID NO: 27313 - DNA, 20 bp, Artificial Sequence
  Description of Artificial Sequence: Synthetic oligonucleotide
  Target: LAMA2; (+) strand; PAM type: NNGRRT; PAM sequence: CAGAAT
taattttgctctcctttaaa

SEQ ID NO: 27314 - DNA, 20 bp, Artificial Sequence
  Description of Artificial Sequence: Synthetic oligonucleotide
  Target: LAMA2; (+) strand; PAM type: NNGRRT; PAM sequence: CTGGAT
taataaagacatacccaaga

SEQ ID NO: 27315 - DNA, 20 bp, Artificial Sequence
  Description of Artificial Sequence: Synthetic oligonucleotide
  Target: LAMA2; (+) strand; PAM type: NNGRRT; PAM sequence: GGGGAT
gtgtccctcccacaacacat

SEQ ID NO: 27316 - DNA, 20 bp, Artificial Sequence
  Description of Artificial Sequence: Synthetic oligonucleotide
  Target: LAMA2; (+) strand; PAM type: NNGRRT; PAM sequence: TTGGGT
gctacaattcaagatgagat

SEQ ID NO: 27317 - DNA, 20 bp, Artificial Sequence
  Description of Artificial Sequence: Synthetic oligonucleotide
  Target: LAMA2; (+) strand; PAM type: NNGRRT; PAM sequence: AGGAAT
gctcaaaacatatttgatga

SEQ ID NO: 27318 - DNA, 20 bp, Artificial Sequence
  Description of Artificial Sequence: Synthetic oligonucleotide
  Target: LAMA2; (+) strand; PAM type: NNGRRT; PAM sequence: ATGAAT
ccgttaaatgcaaaatggtg

SEQ ID NO: 27319 - DNA, 20 bp, Artificial Sequence
  Description of Artificial Sequence: Synthetic oligonucleotide
  Target: LAMA2; (+) strand; PAM type: NNGRRT; PAM sequence: ATGAAT
aatgaaataaataatacttt

SEQ ID NO: 27320 - DNA, 20 bp, Artificial Sequence
  Description of Artificial Sequence: Synthetic oligonucleotide
  Target: LAMA2; (+) strand; PAM type: NNGRRT; PAM sequence: CAGAAT
ctttccttatgtcacactga

SEQ ID NO: 27321 - DNA, 20 bp, Artificial Sequence
  Description of Artificial Sequence: Synthetic oligonucleotide
  Target: LAMA2; (+) strand; PAM type: NNGRRT; PAM sequence: GGGAAT
agagagcacagagatgaggg

SEQ ID NO: 27322 - DNA, 20 bp, Artificial Sequence
  Description of Artificial Sequence: Synthetic oligonucleotide
  Target: LAMA2; (+) strand; PAM type: NNGRRT; PAM sequence: GAGAGT
cacaaggcaggaggccagat

SEQ ID NO: 27323 - DNA, 20 bp, Artificial Sequence
  Description of Artificial Sequence: Synthetic oligonucleotide
  Target: LAMA2; (+) strand; PAM type: NNGRRT; PAM sequence: GGGGGT
caggaggccagatgagagtt

SEQ ID NO: 27324 - DNA, 20 bp, Artificial Sequence
  Description of Artificial Sequence: Synthetic oligonucleotide
  Target: LAMA2; (+) strand; PAM type: NNGRRT; PAM sequence: CAGGAT
gggtcactattttggaggaa

SEQ ID NO: 27325 - DNA, 20 bp, Artificial Sequence
  Description of Artificial Sequence: Synthetic oligonucleotide
  Target: LAMA2; (+) strand; PAM type: NNGRRT; PAM sequence: AGGGAT
attttggaggaacaggatta

SEQ ID NO: 27326 - DNA, 20 bp, Artificial Sequence
  Description of Artificial Sequence: Synthetic oligonucleotide
  Target: LAMA2; (+) strand; PAM type: NNGRRT; PAM sequence: AAGAAT
gcagctctttgggagatctt

SEQ ID NO: 27327 - DNA, 20 bp, Artificial Sequence
  Description of Artificial Sequence: Synthetic oligonucleotide
  Target: LAMA2; (+) strand; PAM type: NNGRRT; PAM sequence: CTGAGT
aagaatgactgagacaagaa

SEQ ID NO: 27328 - DNA, 20 bp, Artificial Sequence
  Description of Artificial Sequence: Synthetic oligonucleotide
  Target: LAMA2; (+) strand; PAM type: NNGRRT; PAM sequence: TTGAAT
ctgagttgtcacttgatctt

SEQ ID NO: 27329 - DNA, 20 bp, Artificial Sequence
  Description of Artificial Sequence: Synthetic oligonucleotide
  Target: LAMA2; (+) strand; PAM type: NNGRRT; PAM sequence: TGGAAT
cttttgaattcatttacctg

SEQ ID NO: 27330 - DNA, 20 bp, Artificial Sequence
  Description of Artificial Sequence: Synthetic oligonucleotide
  Target: LAMA2; (+) strand; PAM type: NNGRRT; PAM sequence: TGGAGT
catttacctgtggaattttt

SEQ ID NO: 27331 - DNA, 20 bp, Artificial Sequence
  Description of Artificial Sequence: Synthetic oligonucleotide
  Target: LAMA2; (+) strand; PAM type: NNGRRT; PAM sequence: TAGAGT
acattgtagatgccattcag

SEQ ID NO: 27332 - DNA, 20 bp, Artificial Sequence
  Description of Artificial Sequence: Synthetic oligonucleotide
  Target: LAMA2; (+) strand; PAM type: NNGRRT; PAM sequence: GAGGAT
ccattcagtagagtgattaa

SEQ ID NO: 27333 - DNA, 20 bp, Artificial Sequence
  Description of Artificial Sequence: Synthetic oligonucleotide
  Target: LAMA2; (+) strand; PAM type: NNGRRT; PAM sequence: GCGAGT
cttgctagctgtaatcagga

SEQ ID NO: 27334 - DNA, 20 bp, Artificial Sequence
  Description of Artificial Sequence: Synthetic oligonucleotide
  Target: LAMA2; (+) strand; PAM type: NNGRRT; PAM sequence: GTGGAT
aatagtggtatgaagctcat

SEQ ID NO: 27335 - DNA, 20 bp, Artificial Sequence
  Description of Artificial Sequence: Synthetic oligonucleotide
  Target: LAMA2; (+) strand; PAM type: NNGRRT; PAM sequence: ATGAGT
gatgatacagacaaacattt

SEQ ID NO: 27336 - DNA, 20 bp, Artificial Sequence
  Description of Artificial Sequence: Synthetic oligonucleotide
  Target: LAMA2; (+) strand; PAM type: NNGRRT; PAM sequence: TTGAGT
tcgtttattttacaaataca

SEQ ID NO: 27337 - DNA, 20 bp, Artificial Sequence
  Description of Artificial Sequence: Synthetic oligonucleotide
  Target: LAMA2; (+) strand; PAM type: NNGRRT; PAM sequence: GAGGAT
cctactatgtgccaagcttt

SEQ ID NO: 27338 - DNA, 20 bp, Artificial Sequence
  Description of Artificial Sequence: Synthetic oligonucleotide
  Target: LAMA2; (+) strand; PAM type: NNGRRT; PAM sequence: AGGGAT
aaaacacaaactcaagatct

SEQ ID NO: 27339 - DNA, 20 bp, Artificial Sequence
  Description of Artificial Sequence: Synthetic oligonucleotide
  Target: LAMA2; (+) strand; PAM type: NNGRRT; PAM sequence: CAGAGT
tctctctctctctttcttga

SEQ ID NO: 27340 - DNA, 20 bp, Artificial Sequence
  Description of Artificial Sequence: Synthetic oligonucleotide
  Target: LAMA2; (+) strand; PAM type: NNGRRT; PAM sequence: TGGAGT
tcttcctctgtctcccaggc

SEQ ID NO: 27341 - DNA, 20 bp, Artificial Sequence
  Description of Artificial Sequence: Synthetic oligonucleotide
  Target: LAMA2; (+) strand; PAM type: NNGRRT; PAM sequence: TGGGAT
gcctcaggtttccaagtagc

SEQ ID NO: 27342 - DNA, 20 bp, Artificial Sequence
  Description of Artificial Sequence: Synthetic oligonucleotide
  Target: LAMA2; (+) strand; PAM type: NNGRRT; PAM sequence: CAGGGT
ttttgtatttttagtagaga

SEQ ID NO: 27343 - DNA, 20 bp, Artificial Sequence
  Description of Artificial Sequence: Synthetic oligonucleotide
  Target: LAMA2; (+) strand; PAM type: NNGRRT; PAM sequence: TGGGAT
acctcagcctcccaaagtgc

SEQ ID NO: 27344 - DNA, 20 bp, Artificial Sequence
  Description of Artificial Sequence: Synthetic oligonucleotide
  Target: LAMA2; (+) strand; PAM type: NNGRRT; PAM sequence: GTGAGT
aaagtgctgggattacaggc

SEQ ID NO: 27345 - DNA, 20 bp, Artificial Sequence
  Description of Artificial Sequence: Synthetic oligonucleotide
  Target: LAMA2; (+) strand; PAM type: NNGRRT; PAM sequence: AGGAAT
gtgagtcaccacacccggcg

SEQ ID NO: 27346 - DNA, 20 bp, Artificial Sequence
  Description of Artificial Sequence: Synthetic oligonucleotide
  Target: LAMA2; (+) strand; PAM type: NNGRRT; PAM sequence: TTGAAT
gaatgactttctatcagaag

SEQ ID NO: 27347 - DNA, 20 bp, Artificial Sequence
  Description of Artificial Sequence: Synthetic oligonucleotide
  Target: LAMA2; (+) strand; PAM type: NNGRRT; PAM sequence: TAGAGT
cggcatattttctccataaa

SEQ ID NO: 27348 - DNA, 20 bp, Artificial Sequence
  Description of Artificial Sequence: Synthetic oligonucleotide
  Target: LAMA2; (+) strand; PAM type: NNGRRT; PAM sequence: AAGAGT
aagaacagatttttcagtta

SEQ ID NO: 27349 - DNA, 20 bp, Artificial Sequence
  Description of Artificial Sequence: Synthetic oligonucleotide
  Target: LAMA2; (+) strand; PAM type: NNGRRT; PAM sequence: ATGAGT
cagttaaagagtggcttttg

SEQ ID NO: 27350 - DNA, 20 bp, Artificial Sequence
  Description of Artificial Sequence: Synthetic oligonucleotide
  Target: LAMA2; (+) strand; PAM type: NNGRRT; PAM sequence: AAGGGT
ttgctatactgttattgaaa

SEQ ID NO: 27351 - DNA, 20 bp, Artificial Sequence
  Description of Artificial Sequence: Synthetic oligonucleotide
  Target: LAMA2; (+) strand; PAM type: NNGRRT; PAM sequence: CTGAAT
acttacaggaagaaaagaga

SEQ ID NO: 27352 - DNA, 20 bp, Artificial Sequence
  Description of Artificial Sequence: Synthetic oligonucleotide
  Target: LAMA2; (+) strand; PAM type: NNGRRT; PAM sequence: GGGAAT
gactgaatttggttctcaga

SEQ ID NO: 27353 - DNA, 20 bp, Artificial Sequence
  Description of Artificial Sequence: Synthetic oligonucleotide
  Target: LAMA2; (+) strand; PAM type: NNGRRT; PAM sequence: CTGGAT
tatattgctttattatattg

SEQ ID NO: 27354 - DNA, 20 bp, Artificial Sequence
  Description of Artificial Sequence: Synthetic oligonucleotide
  Target: LAMA2; (+) strand; PAM type: NNGRRT; PAM sequence: TGGGAT
attatctatcttctctagtc

SEQ ID NO: 27355 - DNA, 20 bp, Artificial Sequence
  Description of Artificial Sequence: Synthetic oligonucleotide
  Target: LAMA2; (+) strand; PAM type: NNGRRT; PAM sequence: AAGGAT
tttaataattatttacactg

SEQ ID NO: 27356 - DNA, 20 bp, Artificial Sequence
  Description of Artificial Sequence: Synthetic oligonucleotide
  Target: LAMA2; (+) strand; PAM type: NNGRRT; PAM sequence: TGGGAT
atggaagatggaagatttag

SEQ ID NO: 27357 - DNA, 20 bp, Artificial Sequence
  Description of Artificial Sequence: Synthetic oligonucleotide
  Target: LAMA2; (+) strand; PAM type: NNGRRT; PAM sequence: TAGAAT
tcaacagaagatttgtgttt

SEQ ID NO: 27358 - DNA, 20 bp, Artificial Sequence
  Description of Artificial Sequence: Synthetic oligonucleotide
  Target: LAMA2; (+) strand; PAM type: NNGRRT; PAM sequence: CTGAAT
catagtatttatgtagtata

SEQ ID NO: 27359 - DNA, 20 bp, Artificial Sequence
  Description of Artificial Sequence: Synthetic oligonucleotide
  Target: LAMA2; (+) strand; PAM type: NNGRRT; PAM sequence: TTGGGT
ttatcattaattatctcatg

SEQ ID NO: 27360 - DNA, 20 bp, Artificial Sequence
  Description of Artificial Sequence: Synthetic oligonucleotide
  Target: LAMA2; (+) strand; PAM type: NNGRRT; PAM sequence: CTGAAT
caggtttattccctgctgtc

SEQ ID NO: 27361 - DNA, 20 bp, Artificial Sequence
  Description of Artificial Sequence: Synthetic oligonucleotide
  Target: LAMA2; (+) strand; PAM type: NNGRRT; PAM sequence: TCGAAT
cctgtgaggaacccgcagtg

SEQ ID NO: 27362 - DNA, 20 bp, Artificial Sequence
  Description of Artificial Sequence: Synthetic oligonucleotide
  Target: LAMA2; (+) strand; PAM type: NNGRRT; PAM sequence: CTGGGT
tagtgtgtaggtgtgtggcg

SEQ ID NO: 27363 - DNA, 20 bp, Artificial Sequence
  Description of Artificial Sequence: Synthetic oligonucleotide
  Target: LAMA2; (+) strand; PAM type: NNGRRT; PAM sequence: TAGGAT
tgtaggtgtgtggcgctggg

SEQ ID NO: 27364 - DNA, 20 bp, Artificial Sequence
  Description of Artificial Sequence: Synthetic oligonucleotide
  Target: LAMA2; (+) strand; PAM type: NNGRRT; PAM sequence: AAGGGT
ggccaagttgcattaaattc

SEQ ID NO: 27365 - DNA, 20 bp, Artificial Sequence
  Description of Artificial Sequence: Synthetic oligonucleotide
  Target: LAMA2; (+) strand; PAM type: NNGRRT; PAM sequence: AAGAAT
attcaagggtttgtaatact

SEQ ID NO: 27366 - DNA, 20 bp, Artificial Sequence
  Description of Artificial Sequence: Synthetic oligonucleotide
  Target: LAMA2; (+) strand; PAM type: NNGRRT; PAM sequence: TAGAAT
tttgtaatactaagaattcc

SEQ ID NO: 27367 - DNA, 20 bp, Artificial Sequence
  Description of Artificial Sequence: Synthetic oligonucleotide
  Target: LAMA2; (+) strand; PAM type: NNGRRT; PAM sequence: TGGAGT
tgtcattcagcaaacattat

SEQ ID NO: 27368 - DNA, 20 bp, Artificial Sequence
  Description of Artificial Sequence: Synthetic oligonucleotide
  Target: LAMA2; (+) strand; PAM type: NNGRRT; PAM sequence: TTGGGT
ctgaaggcctgtggcagtca

SEQ ID NO: 27369 - DNA, 20 bp, Artificial Sequence
  Description of Artificial Sequence: Synthetic oligonucleotide
  Target: LAMA2; (+) strand; PAM type: NNGRRT; PAM sequence: GAGGGT
cagataccaaagtggtttct

SEQ ID NO: 27370 - DNA, 20 bp, Artificial Sequence
  Description of Artificial Sequence: Synthetic oligonucleotide
  Target: LAMA2; (+) strand; PAM type: NNGRRT; PAM sequence: AGGAAT
tattgtgcctgagatccagg

SEQ ID NO: 27371 - DNA, 20 bp, Artificial Sequence
  Description of Artificial Sequence: Synthetic oligonucleotide
  Target: LAMA2; (+) strand; PAM type: NNGRRT; PAM sequence: TAGGAT
gagatccaggaggaataagg

SEQ ID NO: 27372 - DNA, 20 bp, Artificial Sequence
  Description of Artificial Sequence: Synthetic oligonucleotide
  Target: LAMA2; (+) strand; PAM type: NNGRRT; PAM sequence: AAGAAT
agtgtggtaagtacaaagga

SEQ ID NO: 27373 - DNA, 20 bp, Artificial Sequence
  Description of Artificial Sequence: Synthetic oligonucleotide
  Target: LAMA2; (+) strand; PAM type: NNGRRT; PAM sequence: GAGGAT
acagcgttctgcagaagaga

SEQ ID NO: 27374 - DNA, 20 bp, Artificial Sequence
  Description of Artificial Sequence: Synthetic oligonucleotide
  Target: LAMA2; (+) strand; PAM type: NNGRRT; PAM sequence: AAGGGT
accaaggacatgagctaaac

SEQ ID NO: 27375 - DNA, 20 bp, Artificial Sequence
  Description of Artificial Sequence: Synthetic oligonucleotide
  Target: LAMA2; (+) strand; PAM type: NNGRRT; PAM sequence: CAGAAT
gtcatgccaggaagagaaat

SEQ ID NO: 27376 - DNA, 20 bp, Artificial Sequence
  Description of Artificial Sequence: Synthetic oligonucleotide
  Target: LAMA2; (+) strand; PAM type: NNGRRT; PAM sequence: AGGAAT
ttactcggggagctacaagt

SEQ ID NO: 27377 - DNA, 20 bp, Artificial Sequence
  Description of Artificial Sequence: Synthetic oligonucleotide
  Target: LAMA2; (+) strand; PAM type: NNGRRT; PAM sequence: GAGAGT
actgaaagtgccaaagggca

SEQ ID NO: 27378 - DNA, 20 bp, Artificial Sequence
  Description of Artificial Sequence: Synthetic oligonucleotide
  Target: LAMA2; (+) strand; PAM type: NNGRRT; PAM sequence: ATGAAT
aaattcagtgctaaaataac

SEQ ID NO: 27379 - DNA, 20 bp, Artificial Sequence
  Description of Artificial Sequence: Synthetic oligonucleotide
  Target: LAMA2; (+) strand; PAM type: NNGRRT; PAM sequence: CAGAAT
tttttattttgtttttgagg

SEQ ID NO: 27380 - DNA, 20 bp, Artificial Sequence
  Description of Artificial Sequence: Synthetic oligonucleotide
  Target: LAMA2; (+) strand; PAM type: NNGRRT; PAM sequence: TGGAGT
tctcactctgtcacccaggc

SEQ ID NO: 27381 - DNA, 20 bp, Artificial Sequence
  Description of Artificial Sequence: Synthetic oligonucleotide
  Target: LAMA2; (+) strand; PAM type: NNGRRT; PAM sequence: CCGGGT
ctcactgcaaccgccatctc

SEQ ID NO: 27382 - DNA, 20 bp, Artificial Sequence
  Description of Artificial Sequence: Synthetic oligonucleotide
  Target: LAMA2; (+) strand; PAM type: NNGRRT; PAM sequence: CCGAGT
aattctcctgcctcagcctc

SEQ ID NO: 27383 - DNA, 20 bp, Artificial Sequence
  Description of Artificial Sequence: Synthetic oligonucleotide
  Target: LAMA2; (+) strand; PAM type: NNGRRT; PAM sequence: CTGGAT
tgcctcagcctcccgagtag

SEQ ID NO: 27384 - DNA, 20 bp, Artificial Sequence
  Description of Artificial Sequence: Synthetic oligonucleotide
  Target: LAMA2; (+) strand; PAM type: NNGRRT; PAM sequence: TGGGGT
ttttgtatttcaagtagaaa

SEQ ID NO: 27385 - DNA, 20 bp, Artificial Sequence
  Description of Artificial Sequence: Synthetic oligonucleotide
  Target: LAMA2; (+) strand; PAM type: NNGRRT; PAM sequence: ATGAAT
atatagaggccagaaagtaa

SEQ ID NO: 27386 - DNA, 20 bp, Artificial Sequence
  Description of Artificial Sequence: Synthetic oligonucleotide
  Target: LAMA2; (+) strand; PAM type: NNGRRT; PAM sequence: ATGGAT
gccagaaagtaaatgaattg

SEQ ID NO: 27387 - DNA, 20 bp, Artificial Sequence
  Description of Artificial Sequence: Synthetic oligonucleotide
  Target: LAMA2; (+) strand; PAM type: NNGRRT; PAM sequence: AAGAAT
gtggccttgaaaatttcatg

SEQ ID NO: 27388 - DNA, 20 bp, Artificial Sequence
  Description of Artificial Sequence: Synthetic oligonucleotide
  Target: LAMA2; (+) strand; PAM type: NNGRRT; PAM sequence: CGGAGT
agaaagcccaggggcatgaa

SEQ ID NO: 27389 - DNA, 20 bp, Artificial Sequence
  Description of Artificial Sequence: Synthetic oligonucleotide
  Target: LAMA2; (+) strand; PAM type: NNGRRT; PAM sequence: GCGAGT
cggagttgtggggaggaggt

SEQ ID NO: 27390 - DNA, 20 bp, Artificial Sequence
  Description of Artificial Sequence: Synthetic oligonucleotide
  Target: LAMA2; (+) strand; PAM type: NNGRRT; PAM sequence: TAGGAT
cgagtgtgtagatgtgtgtt

SEQ ID NO: 27391 - DNA, 20 bp, Artificial Sequence
  Description of Artificial Sequence: Synthetic oligonucleotide
  Target: LAMA2; (+) strand; PAM type: NNGRRT; PAM sequence: GAGAAT
ggatgggctgtgcagacggg

SEQ ID NO: 27392 - DNA, 20 bp, Artificial Sequence
  Description of Artificial Sequence: Synthetic oligonucleotide
  Target: LAMA2; (+) strand; PAM type: NNGRRT; PAM sequence: GTGAAT
gagagaaaggaggtaataac

SEQ ID NO: 27393 - DNA, 20 bp, Artificial Sequence
  Description of Artificial Sequence: Synthetic oligonucleotide
  Target: LAMA2; (+) strand; PAM type: NNGRRT; PAM sequence: GGGGGT
caagtgaggtgaactatgat

SEQ ID NO: 27394 - DNA, 20 bp, Artificial Sequence
  Description of Artificial Sequence: Synthetic oligonucleotide
  Target: LAMA2; (+) strand; PAM type: NNGRRT; PAM sequence: CAGAGT
tttttttttttttttttagg

SEQ ID NO: 27395 - DNA, 20 bp, Artificial Sequence
  Description of Artificial Sequence: Synthetic oligonucleotide
  Target: LAMA2; (+) strand; PAM type: NNGRRT; PAM sequence: CCGGGT
ctcactgcaagctccgcctc

SEQ ID NO: 27396 - DNA, 20 bp, Artificial Sequence
  Description of Artificial Sequence: Synthetic oligonucleotide
  Target: LAMA2; (+) strand; PAM type: NNGRRT; PAM sequence: CGGGGT
ttttgtatttttagttgaga

SEQ ID NO: 27397 - DNA, 20 bp, Artificial Sequence
  Description of Artificial Sequence: Synthetic oligonucleotide
  Target: LAMA2; (+) strand; PAM type: NNGRRT; PAM sequence: TGGGAT
gcctcggcctcccaaagtgc

SEQ ID NO: 27398 - DNA, 20 bp, Artificial Sequence
  Description of Artificial Sequence: Synthetic oligonucleotide
  Target: LAMA2; (+) strand; PAM type: NNGRRT; PAM sequence: CAGAGT
ccattaccaaaatccccctc

SEQ ID NO: 27399 - DNA, 20 bp, Artificial Sequence
  Description of Artificial Sequence: Synthetic oligonucleotide
  Target: LAMA2; (+) strand; PAM type: NNGRRT; PAM sequence: TAGGGT
ccaaacttcatagactgcat

SEQ ID NO: 27400 - DNA, 20 bp, Artificial Sequence
  Description of Artificial Sequence: Synthetic oligonucleotide
  Target: LAMA2; (+) strand; PAM type: NNGRRT; PAM sequence: ATGGGT
cttttggtggtgtacctttt

SEQ ID NO: 27401 - DNA, 20 bp, Artificial Sequence
  Description of Artificial Sequence: Synthetic oligonucleotide
  Target: LAMA2; (+) strand; PAM type: NNGRRT; PAM sequence: TAGAGT
taatgatatatatctaccat

SEQ ID NO: 27402 - DNA, 20 bp, Artificial Sequence
  Description of Artificial Sequence: Synthetic oligonucleotide
  Target: LAMA2; (+) strand; PAM type: NNGRRT; PAM sequence: AGGAAT
gtcccctcattatataattt

SEQ ID NO: 27403 - DNA, 20 bp, Artificial Sequence
  Description of Artificial Sequence: Synthetic oligonucleotide
  Target: LAMA2; (+) strand; PAM type: NNGRRT; PAM sequence: CAGAAT
attagtggtcgtgtgtatca

SEQ ID NO: 27404 - DNA, 20 bp, Artificial Sequence
  Description of Artificial Sequence: Synthetic oligonucleotide
  Target: LAMA2; (+) strand; PAM type: NNGRRT; PAM sequence: CGGAGT
tgttttgttttattttgaga

SEQ ID NO: 27405 - DNA, 20 bp, Artificial Sequence
  Description of Artificial Sequence: Synthetic oligonucleotide
  Target: LAMA2; (+) strand; PAM type: NNGRRT; PAM sequence: TGGAGT
tttgctcttgttgcccaggc

SEQ ID NO: 27406 - DNA, 20 bp, Artificial Sequence
  Description of Artificial Sequence: Synthetic oligonucleotide
  Target: LAMA2; (+) strand; PAM type: NNGRRT; PAM sequence: CCGGGT
ctcaccgcaacctccgcctc

SEQ ID NO: 27407 - DNA, 20 bp, Artificial Sequence
  Description of Artificial Sequence: Synthetic oligonucleotide
  Target: LAMA2; (+) strand; PAM type: NNGRRT; PAM sequence: TGGGAT
gcctcggcctcccaaagtgc

SEQ ID NO: 27408 - DNA, 20 bp, Artificial Sequence
  Description of Artificial Sequence: Synthetic oligonucleotide
  Target: LAMA2; (+) strand; PAM type: NNGRRT; PAM sequence: GTGAAT
actgcgcccggccgactctg

SEQ ID NO: 27409 - DNA, 20 bp, Artificial Sequence
  Description of Artificial Sequence: Synthetic oligonucleotide
  Target: LAMA2; (+) strand; PAM type: NNGRRT; PAM sequence: TCGGAT
ggccgactctggtgaatttc

SEQ ID NO: 27410 - DNA, 20 bp, Artificial Sequence
  Description of Artificial Sequence: Synthetic oligonucleotide
  Target: LAMA2; (+) strand; PAM type: NNGRRT; PAM sequence: AGGAGT
agttgttatggtatgtgtgt

SEQ ID NO: 27411 - DNA, 20 bp, Artificial Sequence
  Description of Artificial Sequence: Synthetic oligonucleotide
  Target: LAMA2; (+) strand; PAM type: NNGRRT; PAM sequence: GGGAGT
atggtatgtgtgtaggagtg

SEQ ID NO: 27412 - DNA, 20 bp, Artificial Sequence
  Description of Artificial Sequence: Synthetic oligonucleotide
  Target: LAMA2; (+) strand; PAM type: NNGRRT; PAM sequence: TAGAAT
tgtgtttgctagctcttgta

SEQ ID NO: 27413 - DNA, 20 bp, Artificial Sequence
  Description of Artificial Sequence: Synthetic oligonucleotide
  Target: LAMA2; (+) strand; PAM type: NNGRRT; PAM sequence: GGGAGT
tgcttttatgtaaaagccaa

SEQ ID NO: 27414 - DNA, 20 bp, Artificial Sequence
  Description of Artificial Sequence: Synthetic oligonucleotide
  Target: LAMA2; (+) strand; PAM type: NNGRRT; PAM sequence: TGGAGT
gccaagggagttcaggtaaa

SEQ ID NO: 27415 - DNA, 20 bp, Artificial Sequence
  Description of Artificial Sequence: Synthetic oligonucleotide
  Target: LAMA2; (+) strand; PAM type: NNGRRT; PAM sequence: AAGAAT
attaggtatgtgatgaagga

SEQ ID NO: 27416 - DNA, 20 bp, Artificial Sequence
  Description of Artificial Sequence: Synthetic oligonucleotide
  Target: LAMA2; (+) strand; PAM type: NNGRRT; PAM sequence: TTGAGT
tttaaatgcttcgaagataa

SEQ ID NO: 27417 - DNA, 20 bp, Artificial Sequence
  Description of Artificial Sequence: Synthetic oligonucleotide
  Target: LAMA2; (+) strand; PAM type: NNGRRT; PAM sequence: ATGAAT
gcacactgaagaggtaataa

SEQ ID NO: 27418 - DNA, 20 bp, Artificial Sequence
  Description of Artificial Sequence: Synthetic oligonucleotide
  Target: LAMA2; (+) strand; PAM type: NNGRRT; PAM sequence: GAGAAT
caagtatccttgatgtgaaa

SEQ ID NO: 27419 - DNA, 20 bp, Artificial Sequence
  Description of Artificial Sequence: Synthetic oligonucleotide
  Target: LAMA2; (+) strand; PAM type: NNGRRT; PAM sequence: TGGAGT
atgaaggacagaggaggttg

SEQ ID NO: 27420 - DNA, 20 bp, Artificial Sequence
  Description of Artificial Sequence: Synthetic oligonucleotide
  Target: LAMA2; (+) strand; PAM type: NNGRRT; PAM sequence: TTGAGT
ttttcaaagataagagacat

SEQ ID NO: 27421 - DNA, 20 bp, Artificial Sequence
  Description of Artificial Sequence: Synthetic oligonucleotide
  Target: LAMA2; (+) strand; PAM type: NNGRRT; PAM sequence: ATGGGT
ctctctagaagtaaaaacat

SEQ ID NO: 27422 - DNA, 20 bp, Artificial Sequence
  Description of Artificial Sequence: Synthetic oligonucleotide
  Target: LAMA2; (+) strand; PAM type: NNGRRT; PAM sequence: AAGAAT
tcaccaaatcagaaagaaga

SEQ ID NO: 27423 - DNA, 20 bp, Artificial Sequence
  Description of Artificial Sequence: Synthetic oligonucleotide
  Target: LAMA2; (+) strand; PAM type: NNGRRT; PAM sequence: ATGAAT
caaatcagaaagaagaaaga

SEQ ID NO: 27424 - DNA, 20 bp, Artificial Sequence
  Description of Artificial Sequence: Synthetic oligonucleotide
  Target: LAMA2; (+) strand; PAM type: NNGRRT; PAM sequence: CTGGGT
ttcttcattaagatgtaaat

SEQ ID NO: 27425 - DNA, 20 bp, Artificial Sequence
  Description of Artificial Sequence: Synthetic oligonucleotide
  Target: LAMA2; (+) strand; PAM type: NNGRRT; PAM sequence: GGGAAT
ttagattatgagcctctcag

SEQ ID NO: 27426 - DNA, 20 bp, Artificial Sequence
  Description of Artificial Sequence: Synthetic oligonucleotide
  Target: LAMA2; (+) strand; PAM type: NNGRRT; PAM sequence: GGGGAT
agcctctcaggggaatagga

SEQ ID NO: 27427 - DNA, 20 bp, Artificial Sequence
  Description of Artificial Sequence: Synthetic oligonucleotide
  Target: LAMA2; (+) strand; PAM type: NNGRRT; PAM sequence: CAGAAT
ggggatcactgagccgtaat

SEQ ID NO: 27428 - DNA, 20 bp, Artificial Sequence
  Description of Artificial Sequence: Synthetic oligonucleotide
  Target: LAMA2; (+) strand; PAM type: NNGRRT; PAM sequence: TGGAGT
aataaagtggcaattccata

SEQ ID NO: 27429 - DNA, 20 bp, Artificial Sequence
  Description of Artificial Sequence: Synthetic oligonucleotide
  Target: LAMA2; (+) strand; PAM type: NNGRRT; PAM sequence: AAGAAT
attccatatggagtaaaata

SEQ ID NO: 27430 - DNA, 20 bp, Artificial Sequence
  Description of Artificial Sequence: Synthetic oligonucleotide
  Target: LAMA2; (+) strand; PAM type: NNGRRT; PAM sequence: TAGAAT
ttggagcattacagggaaag

SEQ ID NO: 27431 - DNA, 20 bp, Artificial Sequence
  Description of Artificial Sequence: Synthetic oligonucleotide
  Target: LAMA2; (+) strand; PAM type: NNGRRT; PAM sequence: ATGAAT
aagaaaaggtcagaaagtaa

SEQ ID NO: 27432 - DNA, 20 bp, Artificial Sequence
  Description of Artificial Sequence: Synthetic oligonucleotide
  Target: LAMA2; (+) strand; PAM type: NNGRRT; PAM sequence: ATGGAT
gtcagaaagtaaatgaattg

SEQ ID NO: 27433 - DNA, 20 bp, Artificial Sequence
  Description of Artificial Sequence: Synthetic oligonucleotide
  Target: LAMA2; (+) strand; PAM type: NNGRRT; PAM sequence: GAGAAT
gtggccttgaaaatttcata

SEQ ID NO: 27434 - DNA, 20 bp, Artificial Sequence
  Description of Artificial Sequence: Synthetic oligonucleotide
  Target: LAMA2; (+) strand; PAM type: NNGRRT; PAM sequence: CGGAGT
agaaagcccaggggcatgaa

SEQ ID NO: 27435 - DNA, 20 bp, Artificial Sequence
  Description of Artificial Sequence: Synthetic oligonucleotide
  Target: LAMA2; (+) strand; PAM type: NNGRRT; PAM sequence: GCGAGT
cggagttgtggggaggaggt

SEQ ID NO: 27436 - DNA, 20 bp, Artificial Sequence
  Description of Artificial Sequence: Synthetic oligonucleotide
  Target: LAMA2; (+) strand; PAM type: NNGRRT; PAM sequence: TAGGAT
cgagtgtgtagacgtgtatt

SEQ ID NO: 27437 - DNA, 20 bp, Artificial Sequence
  Description of Artificial Sequence: Synthetic oligonucleotide
  Target: LAMA2; (+) strand; PAM type: NNGRRT; PAM sequence: GAGAAT
ggatggactgtgcagacagg

SEQ ID NO: 27438 - DNA, 20 bp, Artificial Sequence
  Description of Artificial Sequence: Synthetic oligonucleotide
  Target: LAMA2; (+) strand; PAM type: NNGRRT; PAM sequence: TGGGAT
aatgtatccaatcataaaaa

SEQ ID NO: 27439 - DNA, 20 bp, Artificial Sequence
  Description of Artificial Sequence: Synthetic oligonucleotide
  Target: LAMA2; (+) strand; PAM type: NNGRRT; PAM sequence: AGGAAT
caatcataaaaatgggatgg

SEQ ID NO: 27440 - DNA, 20 bp, Artificial Sequence
  Description of Artificial Sequence: Synthetic oligonucleotide
  Target: LAMA2; (+) strand; PAM type: NNGRRT; PAM sequence: TGGGGT
tggaggaatgatgcaaagat

SEQ ID NO: 27441 - DNA, 20 bp, Artificial Sequence
  Description of Artificial Sequence: Synthetic oligonucleotide
  Target: LAMA2; (+) strand; PAM type: NNGRRT; PAM sequence: ATGGAT
ttttattcttggctggaaaa

SEQ ID NO: 27442 - DNA, 20 bp, Artificial Sequence
  Description of Artificial Sequence: Synthetic oligonucleotide
  Target: LAMA2; (+) strand; PAM type: NNGRRT; PAM sequence: TTGAGT
ggatgagatgcattgtcaga

SEQ ID NO: 27443 - DNA, 20 bp, Artificial Sequence
  Description of Artificial Sequence: Synthetic oligonucleotide
  Target: LAMA2; (+) strand; PAM type: NNGRRT; PAM sequence: CAGAGT
cctcttgaaagttctacatt

SEQ ID NO: 27444 - DNA, 20 bp, Artificial Sequence
  Description of Artificial Sequence: Synthetic oligonucleotide
  Target: LAMA2; (+) strand; PAM type: NNGRRT; PAM sequence: ATGAAT
ttttcacattgaaaccaaaa

SEQ ID NO: 27445 - DNA, 20 bp, Artificial Sequence
  Description of Artificial Sequence: Synthetic oligonucleotide
  Target: LAMA2; (+) strand; PAM type: NNGRRT; PAM sequence: CTGGAT
ttttctaaaccagtcacagt

SEQ ID NO: 27446 - DNA, 20 bp, Artificial Sequence
  Description of Artificial Sequence: Synthetic oligonucleotide
  Target: LAMA2; (+) strand; PAM type: NNGRRT; PAM sequence: TGGAGT
attattattattatttgaga

SEQ ID NO: 27447 - DNA, 20 bp, Artificial Sequence
  Description of Artificial Sequence: Synthetic oligonucleotide
  Target: LAMA2; (+) strand; PAM type: NNGRRT; PAM sequence: TGGAGT
tctcactctgtcacccgggc

SEQ ID NO: 27448 - DNA, 20 bp, Artificial Sequence
  Description of Artificial Sequence: Synthetic oligonucleotide
  Target: LAMA2; (+) strand; PAM type: NNGRRT; PAM sequence: CTGAGT
gattctcaagcctcagcctc

SEQ ID NO: 27449 - DNA, 20 bp, Artificial Sequence
  Description of Artificial Sequence: Synthetic oligonucleotide
  Target: LAMA2; (+) strand; PAM type: NNGRRT; PAM sequence: TGGAGT
ttttgtatttttagtagaga

SEQ ID NO: 27450 - DNA, 20 bp, Artificial Sequence
  Description of Artificial Sequence: Synthetic oligonucleotide
  Target: LAMA2; (+) strand; PAM type: NNGRRT; PAM sequence: TGGGAT
gccttggcctcccaaagtgc

SEQ ID NO: 27451 - DNA, 20 bp, Artificial Sequence
  Description of Artificial Sequence: Synthetic oligonucleotide
  Target: LAMA2; (+) strand; PAM type: NNGRRT; PAM sequence: AAGAAT
tttgatactagaaatttaga

SEQ ID NO: 27452 - DNA, 20 bp, Artificial Sequence
  Description of Artificial Sequence: Synthetic oligonucleotide
  Target: LAMA2; (+) strand; PAM type: NNGRRT; PAM sequence: AAGAAT
tagaaagaataaaaccccac

SEQ ID NO: 27453 - DNA, 20 bp, Artificial Sequence
  Description of Artificial Sequence: Synthetic oligonucleotide
  Target: LAMA2; (+) strand; PAM type: NNGRRT; PAM sequence: ATGAAT
aaaatctagcaatcaactgc

SEQ ID NO: 27454 - DNA, 20 bp, Artificial Sequence
  Description of Artificial Sequence: Synthetic oligonucleotide
  Target: LAMA2; (+) strand; PAM type: NNGRRT; PAM sequence: GAGAAT
ccacaaattcagtgaactct

SEQ ID NO: 27455 - DNA, 20 bp, Artificial Sequence
  Description of Artificial Sequence: Synthetic oligonucleotide
  Target: LAMA2; (+) strand; PAM type: NNGRRT; PAM sequence: TTGGAT
ttttcagatgcagttagccc

SEQ ID NO: 27456 - DNA, 20 bp, Artificial Sequence
  Description of Artificial Sequence: Synthetic oligonucleotide
  Target: LAMA2; (+) strand; PAM type: NNGRRT; PAM sequence: GAGGAT
cttgcatatttatccctgtt

SEQ ID NO: 27457 - DNA, 20 bp, Artificial Sequence
  Description of Artificial Sequence: Synthetic oligonucleotide
  Target: LAMA2; (+) strand; PAM type: NNGRRT; PAM sequence: AGGGAT
tatgattaaactttcataat

SEQ ID NO: 27458 - DNA, 20 bp, Artificial Sequence
  Description of Artificial Sequence: Synthetic oligonucleotide
  Target: LAMA2; (+) strand; PAM type: NNGRRT; PAM sequence: ATGAAT
ctcacaattacctaagagcc

SEQ ID NO: 27459 - DNA, 20 bp, Artificial Sequence
  Description of Artificial Sequence: Synthetic oligonucleotide
  Target: LAMA2; (+) strand; PAM type: NNGRRT; PAM sequence: TGGGGT
ccatgaatttgatttagaaa

SEQ ID NO: 27460 - DNA, 20 bp, Artificial Sequence
  Description of Artificial Sequence: Synthetic oligonucleotide
  Target: LAMA2; (+) strand; PAM type: NNGRRT; PAM sequence: GAGGAT
aatctgtaaaaaagattcag

SEQ ID NO: 27461 - DNA, 20 bp, Artificial Sequence
  Description of Artificial Sequence: Synthetic oligonucleotide
  Target: LAMA2; (+) strand; PAM type: NNGRRT; PAM sequence: CAGGGT
tcagcaccctcttatttcac

SEQ ID NO: 27462 - DNA, 20 bp, Artificial Sequence
  Description of Artificial Sequence: Synthetic oligonucleotide
  Target: LAMA2; (+) strand; PAM type: NNGRRT; PAM sequence: TTGAAT
aagtccagccagctgttaag

SEQ ID NO: 27463 - DNA, 20 bp, Artificial Sequence
  Description of Artificial Sequence: Synthetic oligonucleotide
  Target: LAMA2; (+) strand; PAM type: NNGRRT; PAM sequence: TGGAAT
aaaaaatttaccaataataa

SEQ ID NO: 27464 - DNA, 20 bp, Artificial Sequence
  Description of Artificial Sequence: Synthetic oligonucleotide
  Target: LAMA2; (+) strand; PAM type: NNGRRT; PAM sequence: ATGAAT
gtcatattaagatttgcaat

SEQ ID NO: 27465 - DNA, 20 bp, Artificial Sequence
  Description of Artificial Sequence: Synthetic oligonucleotide
  Target: LAMA2; (+) strand; PAM type: NNGRRT; PAM sequence: TGGAAT
gcaatatgaatatccatatc

SEQ ID NO: 27466 - DNA, 20 bp, Artificial Sequence
  Description of Artificial Sequence: Synthetic oligonucleotide
  Target: LAMA2; (+) strand; PAM type: NNGRRT; PAM sequence: GTGAAT
atctgaaaatgccaaattta

SEQ ID NO: 27467 - DNA, 20 bp, Artificial Sequence
  Description of Artificial Sequence: Synthetic oligonucleotide
  Target: LAMA2; (+) strand; PAM type: NNGRRT; PAM sequence: TGGAGT
cagctttttaaattttgaaa

SEQ ID NO: 27468 - DNA, 20 bp, Artificial Sequence
  Description of Artificial Sequence: Synthetic oligonucleotide
  Target: LAMA2; (+) strand; PAM type: NNGRRT; PAM sequence: TGGAGT
tctcactctgtcacctaggc

SEQ ID NO: 27469 - DNA, 20 bp, Artificial Sequence
  Description of Artificial Sequence: Synthetic oligonucleotide
  Target: LAMA2; (+) strand; PAM type: NNGRRT; PAM sequence: CTGGGT
ctcactgcaacctctacctc

SEQ ID NO: 27470 - DNA, 20 bp, Artificial Sequence
  Description of Artificial Sequence: Synthetic oligonucleotide
  Target: LAMA2; (+) strand; PAM type: NNGRRT; PAM sequence: GGGAAT
cctcagcctcccaagtagct

SEQ ID NO: 27471 - DNA, 20 bp, Artificial Sequence
  Description of Artificial Sequence: Synthetic oligonucleotide
  Target: LAMA2; (+) strand; PAM type: NNGRRT; PAM sequence: TGGGGT
ttttttttttttcatagaga

SEQ ID NO: 27472 - DNA, 20 bp, Artificial Sequence
  Description of Artificial Sequence: Synthetic oligonucleotide
  Target: LAMA2; (+) strand; PAM type: NNGRRT; PAM sequence: TGGGAT
acctcagcctcccaaagtgc

SEQ ID NO: 27473 - DNA, 20 bp, Artificial Sequence
  Description of Artificial Sequence: Synthetic oligonucleotide
  Target: LAMA2; (+) strand; PAM type: NNGRRT; PAM sequence: TTGAAT
gattcaaaacagtgtacatt

SEQ ID NO: 27474 - DNA, 20 bp, Artificial Sequence
  Description of Artificial Sequence: Synthetic oligonucleotide
  Target: LAMA2; (+) strand; PAM type: NNGRRT; PAM sequence: TAGAAT
tgtatatgcataataatggt

SEQ ID NO: 27475 - DNA, 20 bp, Artificial Sequence
  Description of Artificial Sequence: Synthetic oligonucleotide
  Target: LAMA2; (+) strand; PAM type: NNGRRT; PAM sequence: GTGAAT
tactgttcatcagtaaccct

SEQ ID NO: 27476 - DNA, 20 bp, Artificial Sequence
  Description of Artificial Sequence: Synthetic oligonucleotide
  Target: LAMA2; (+) strand; PAM type: NNGRRT; PAM sequence: CAGGGT
catcagtaaccctgtgaata

SEQ ID NO: 27477 - DNA, 20 bp, Artificial Sequence
  Description of Artificial Sequence: Synthetic oligonucleotide
  Target: LAMA2; (+) strand; PAM type: NNGRRT; PAM sequence: AAGGAT
acatttttcataaaaataga

SEQ ID NO: 27478 - DNA, 20 bp, Artificial Sequence
  Description of Artificial Sequence: Synthetic oligonucleotide
  Target: LAMA2; (+) strand; PAM type: NNGRRT; PAM sequence: ATGGGT
ttgtcctccattttgatatt

SEQ ID NO: 27479 - DNA, 20 bp, Artificial Sequence
  Description of Artificial Sequence: Synthetic oligonucleotide
  Target: LAMA2; (+) strand; PAM type: NNGRRT; PAM sequence: ATGAAT
atattttttctctgaaaatt

SEQ ID NO: 27480 - DNA, 20 bp, Artificial Sequence
  Description of Artificial Sequence: Synthetic oligonucleotide
  Target: LAMA2; (+) strand; PAM type: NNGRRT; PAM sequence: CGGAAT
ctggaaaccactgctgtgag

SEQ ID NO: 27481 - DNA, 20 bp, Artificial Sequence
  Description of Artificial Sequence: Synthetic oligonucleotide
  Target: LAMA2; (+) strand; PAM type: NNGRRT; PAM sequence: TTGAAT
atcagagatgacacataatg

SEQ ID NO: 27482 - DNA, 20 bp, Artificial Sequence
  Description of Artificial Sequence: Synthetic oligonucleotide
  Target: LAMA2; (+) strand; PAM type: NNGRRT; PAM sequence: AGGAAT
tactaagtggtggagccagg

SEQ ID NO: 27483 - DNA, 20 bp, Artificial Sequence
  Description of Artificial Sequence: Synthetic oligonucleotide
  Target: LAMA2; (+) strand; PAM type: NNGRRT; PAM sequence: TAGAAT
cctctcatcaccattattat

SEQ ID NO: 27484 - DNA, 20 bp, Artificial Sequence
  Description of Artificial Sequence: Synthetic oligonucleotide
  Target: LAMA2; (+) strand; PAM type: NNGRRT; PAM sequence: GAGAGT
caatattaggtaggcaaatt

SEQ ID NO: 27485 - DNA, 20 bp, Artificial Sequence
  Description of Artificial Sequence: Synthetic oligonucleotide
  Target: LAMA2; (+) strand; PAM type: NNGRRT; PAM sequence: AAGGAT
ggtattccttcaaatttaaa

SEQ ID NO: 27486 - DNA, 20 bp, Artificial Sequence
  Description of Artificial Sequence: Synthetic oligonucleotide
  Target: LAMA2; (+) strand; PAM type: NNGRRT; PAM sequence: AGGAGT
ccttaatctataataaacac

SEQ ID NO: 27487 - DNA, 20 bp, Artificial Sequence
  Description of Artificial Sequence: Synthetic oligonucleotide
  Target: LAMA2; (+) strand; PAM type: NNGRRT; PAM sequence: AGGAAT
cgactttctagtgagatgtg

SEQ ID NO: 27488 - DNA, 20 bp, Artificial Sequence
  Description of Artificial Sequence: Synthetic oligonucleotide
  Target: LAMA2; (+) strand; PAM type: NNGRRT; PAM sequence: GGGAAT
agtgcccttactgcagcctt

SEQ ID NO: 27489 - DNA, 20 bp, Artificial Sequence
  Description of Artificial Sequence: Synthetic oligonucleotide
  Target: LAMA2; (+) strand; PAM type: NNGRRT; PAM sequence: CAGGAT
tgcagccttgggaatagaaa

SEQ ID NO: 27490 - DNA, 20 bp, Artificial Sequence
  Description of Artificial Sequence: Synthetic oligonucleotide
  Target: LAMA2; (+) strand; PAM type: NNGRRT; PAM sequence: AGGAGT
caatgagggcttggcagccc

SEQ ID NO: 27491 - DNA, 20 bp, Artificial Sequence
  Description of Artificial Sequence: Synthetic oligonucleotide
  Target: LAMA2; (+) strand; PAM type: NNGRRT; PAM sequence: GAGGAT
gatgagaaactgtgagcttt

SEQ ID NO: 27492 - DNA, 20 bp, Artificial Sequence
  Description of Artificial Sequence: Synthetic oligonucleotide
  Target: LAMA2; (+) strand; PAM type: NNGRRT; PAM sequence: TGGGGT
caacaaaggtcacaggtctg

SEQ ID NO: 27493 - DNA, 20 bp, Artificial Sequence
  Description of Artificial Sequence: Synthetic oligonucleotide
  Target: LAMA2; (+) strand; PAM type: NNGRRT; PAM sequence: CTGGGT
ttggtcctgttcttatatgt

SEQ ID NO: 27494 - DNA, 20 bp, Artificial Sequence
  Description of Artificial Sequence: Synthetic oligonucleotide
  Target: LAMA2; (+) strand; PAM type: NNGRRT; PAM sequence: TAGGAT
ggaagatctgtggtttttgg

SEQ ID NO: 27495 - DNA, 20 bp, Artificial Sequence
  Description of Artificial Sequence: Synthetic oligonucleotide
  Target: LAMA2; (+) strand; PAM type: NNGRRT; PAM sequence: TAGAGT
atctgtggtttttggtagga

SEQ ID NO: 27496 - DNA, 20 bp, Artificial Sequence
  Description of Artificial Sequence: Synthetic oligonucleotide
  Target: LAMA2; (+) strand; PAM type: NNGRRT; PAM sequence: TAGAGT
tattgtaaagattcctccac

SEQ ID NO: 27497 - DNA, 20 bp, Artificial Sequence
  Description of Artificial Sequence: Synthetic oligonucleotide
  Target: LAMA2; (+) strand; PAM type: NNGRRT; PAM sequence: CCGGAT
atgatggcaacagacaaatg

SEQ ID NO: 27498 - DNA, 20 bp, Artificial Sequence
  Description of Artificial Sequence: Synthetic oligonucleotide
  Target: LAMA2; (+) strand; PAM type: NNGRRT; PAM sequence: TTGGGT
acaaatgccggatgagaggt

SEQ ID NO: 27499 - DNA, 20 bp, Artificial Sequence
  Description of Artificial Sequence: Synthetic oligonucleotide
  Target: LAMA2; (+) strand; PAM type: NNGRRT; PAM sequence: AAGAAT
ttttaacatgcatagcatgg

SEQ ID NO: 27500 - DNA, 20 bp, Artificial Sequence
  Description of Artificial Sequence: Synthetic oligonucleotide
  Target: LAMA2; (+) strand; PAM type: NNGRRT; PAM sequence: GAGGAT
atagcatggaagaatcacag

SEQ ID NO: 27501 - DNA, 20 bp, Artificial Sequence
  Description of Artificial Sequence: Synthetic oligonucleotide
  Target: LAMA2; (+) strand; PAM type: NNGRRT; PAM sequence: GGGAAT
aatagtaaatgattttttag

SEQ ID NO: 27502 - DNA, 20 bp, Artificial Sequence
  Description of Artificial Sequence: Synthetic oligonucleotide
  Target: LAMA2; (+) strand; PAM type: NNGRRT; PAM sequence: ATGAGT
tcagtctctcttcatgtgaa

SEQ ID NO: 27503 - DNA, 20 bp, Artificial Sequence
  Description of Artificial Sequence: Synthetic oligonucleotide
  Target: LAMA2; (+) strand; PAM type: NNGRRT; PAM sequence: TGGGAT
gaggaaacttttcctcctgg

SEQ ID NO: 27504 - DNA, 20 bp, Artificial Sequence
  Description of Artificial Sequence: Synthetic oligonucleotide
  Target: LAMA2; (+) strand; PAM type: NNGRRT; PAM sequence: GGGAGT
atcagactgtaagtagatac

SEQ ID NO: 27505 - DNA, 20 bp, Artificial Sequence
  Description of Artificial Sequence: Synthetic oligonucleotide
  Target: LAMA2; (+) strand; PAM type: NNGRRT; PAM sequence: CAGAGT
gtaagtagatacgggagtat

SEQ ID NO: 27506 - DNA, 20 bp, Artificial Sequence
  Description of Artificial Sequence: Synthetic oligonucleotide
  Target: LAMA2; (+) strand; PAM type: NNGRRT; PAM sequence: TCGGGT
cataccagcatgctatattt

SEQ ID NO: 27507 - DNA, 20 bp, Artificial Sequence
  Description of Artificial Sequence: Synthetic oligonucleotide
  Target: LAMA2; (+) strand; PAM type: NNGRRT; PAM sequence: TAGAAT
ttctgagcctcaatatctca

SEQ ID NO: 27508 - DNA, 20 bp, Artificial Sequence
  Description of Artificial Sequence: Synthetic oligonucleotide
  Target: LAMA2; (+) strand; PAM type: NNGRRT; PAM sequence: ATGAAT
gagcctcaatatctcataga

SEQ ID NO: 27509 - DNA, 20 bp, Artificial Sequence
  Description of Artificial Sequence: Synthetic oligonucleotide
  Target: LAMA2; (+) strand; PAM type: NNGRRT; PAM sequence: ATGAAT
ctccctacgtcttaataata

SEQ ID NO: 27510 - DNA, 20 bp, Artificial Sequence
  Description of Artificial Sequence: Synthetic oligonucleotide
  Target: LAMA2; (+) strand; PAM type: NNGRRT; PAM sequence: CAGGAT
agtgtatttcaaccacaagt

SEQ ID NO: 27511 - DNA, 20 bp, Artificial Sequence
  Description of Artificial Sequence: Synthetic oligonucleotide
  Target: LAMA2; (+) strand; PAM type: NNGRRT; PAM sequence: TTGAAT
aatagttagttgttgctttt

SEQ ID NO: 27512 - DNA, 20 bp, Artificial Sequence
  Description of Artificial Sequence: Synthetic oligonucleotide
  Target: LAMA2; (+) strand; PAM type: NNGRRT; PAM sequence: CAGAGT
tgcccattttggttaatggc

SEQ ID NO: 27513 - DNA, 20 bp, Artificial Sequence
  Description of Artificial Sequence: Synthetic oligonucleotide
  Target: LAMA2; (+) strand; PAM type: NNGRRT; PAM sequence: GAGAAT
gtcattgaagaaattctgtt

SEQ ID NO: 27514 - DNA, 20 bp, Artificial Sequence
  Description of Artificial Sequence: Synthetic oligonucleotide
  Target: LAMA2; (+) strand; PAM type: NNGRRT; PAM sequence: CTGAAT
gaagaaattctgttgagaat

SEQ ID NO: 27515 - DNA, 20 bp, Artificial Sequence
  Description of Artificial Sequence: Synthetic oligonucleotide
  Target: LAMA2; (+) strand; PAM type: NNGRRT; PAM sequence: CAGAGT
atggaaagaacacttggtgg

SEQ ID NO: 27516 - DNA, 20 bp, Artificial Sequence
  Description of Artificial Sequence: Synthetic oligonucleotide
  Target: LAMA2; (+) strand; PAM type: NNGRRT; PAM sequence: AAGAAT
ggtggcagagtcccagtatt

SEQ ID NO: 27517 - DNA, 20 bp, Artificial Sequence
  Description of Artificial Sequence: Synthetic oligonucleotide
  Target: LAMA2; (+) strand; PAM type: NNGRRT; PAM sequence: TGGAAT
cagagtcccagtattaagaa

SEQ ID NO: 27518 - DNA, 20 bp, Artificial Sequence
  Description of Artificial Sequence: Synthetic oligonucleotide
  Target: LAMA2; (+) strand; PAM type: NNGRRT; PAM sequence: TCGAAT
tcccagtattaagaatggaa

SEQ ID NO: 27519 - DNA, 20 bp, Artificial Sequence
  Description of Artificial Sequence: Synthetic oligonucleotide
  Target: LAMA2; (+) strand; PAM type: NNGRRT; PAM sequence: CTGGAT
accattatgtgacaattacc

SEQ ID NO: 27520 - DNA, 20 bp, Artificial Sequence
  Description of Artificial Sequence: Synthetic oligonucleotide
  Target: LAMA2; (+) strand; PAM type: NNGRRT; PAM sequence: GTGGGT
atttgtttagttagtggttt

SEQ ID NO: 27521 - DNA, 20 bp, Artificial Sequence
  Description of Artificial Sequence: Synthetic oligonucleotide
  Target: LAMA2; (+) strand; PAM type: NNGRRT; PAM sequence: AAGGAT
agttagtggtttgtgggtga

SEQ ID NO: 27522 - DNA, 20 bp, Artificial Sequence
  Description of Artificial Sequence: Synthetic oligonucleotide
  Target: LAMA2; (+) strand; PAM type: NNGRRT; PAM sequence: AAGGGT
ttttcttgataagatgaaca

SEQ ID NO: 27523 - DNA, 20 bp, Artificial Sequence
  Description of Artificial Sequence: Synthetic oligonucleotide
  Target: LAMA2; (+) strand; PAM type: NNGRRT; PAM sequence: ACGAGT
catatagcgtattgttattt

SEQ ID NO: 27524 - DNA, 20 bp, Artificial Sequence
  Description of Artificial Sequence: Synthetic oligonucleotide
  Target: LAMA2; (+) strand; PAM type: NNGRRT; PAM sequence: ATGAAT
agcacgtgaagagcttagaa

SEQ ID NO: 27525 - DNA, 20 bp, Artificial Sequence
  Description of Artificial Sequence: Synthetic oligonucleotide
  Target: LAMA2; (+) strand; PAM type: NNGRRT; PAM sequence: ATGGAT
ctggacttaatgatgaaaat

SEQ ID NO: 27526 - DNA, 20 bp, Artificial Sequence
  Description of Artificial Sequence: Synthetic oligonucleotide
  Target: LAMA2; (+) strand; PAM type: NNGRRT; PAM sequence: TTGGAT
gtgtgtgcacttaaaggttc

SEQ ID NO: 27527 - DNA, 20 bp, Artificial Sequence
  Description of Artificial Sequence: Synthetic oligonucleotide
  Target: LAMA2; (+) strand; PAM type: NNGRRT; PAM sequence: TTGGGT
cagttgctttcaagttaaac

SEQ ID NO: 27528 - DNA, 20 bp, Artificial Sequence
  Description of Artificial Sequence: Synthetic oligonucleotide
  Target: LAMA2; (+) strand; PAM type: NNGRRT; PAM sequence: CTGGGT
caagtttgtcttgcataggc

SEQ ID NO: 27529 - DNA, 20 bp, Artificial Sequence
  Description of Artificial Sequence: Synthetic oligonucleotide
  Target: LAMA2; (+) strand; PAM type: NNGRRT; PAM sequence: AGGAAT
tcaggctgaagttattaatc

SEQ ID NO: 27530 - DNA, 20 bp, Artificial Sequence
  Description of Artificial Sequence: Synthetic oligonucleotide
  Target: LAMA2; (+) strand; PAM type: NNGRRT; PAM sequence: TAGGAT
aaattatttaggcttgcaat

SEQ ID NO: 27531 - DNA, 20 bp, Artificial Sequence
  Description of Artificial Sequence: Synthetic oligonucleotide
  Target: LAMA2; (+) strand; PAM type: NNGRRT; PAM sequence: AGGGGT
tgtatgcctaaataatgtgc

SEQ ID NO: 27532 - DNA, 20 bp, Artificial Sequence
  Description of Artificial Sequence: Synthetic oligonucleotide
  Target: LAMA2; (+) strand; PAM type: NNGRRT; PAM sequence: CAGGAT
taatgtgcaggggtgatggt

SEQ ID NO: 27533 - DNA, 20 bp, Artificial Sequence
  Description of Artificial Sequence: Synthetic oligonucleotide
  Target: LAMA2; (+) strand; PAM type: NNGRRT; PAM sequence: ATGGAT
cagcacaagacattttccta

SEQ ID NO: 27534 - DNA, 20 bp, Artificial Sequence
  Description of Artificial Sequence: Synthetic oligonucleotide
  Target: LAMA2; (+) strand; PAM type: NNGRRT; PAM sequence: ATGAGT
ggatgccatttgccaccagc

SEQ ID NO: 27535 - DNA, 20 bp, Artificial Sequence
  Description of Artificial Sequence: Synthetic oligonucleotide
  Target: LAMA2; (+) strand; PAM type: NNGRRT; PAM sequence: GTGGAT
tggctggagcaaacaagctg

SEQ ID NO: 27536 - DNA, 20 bp, Artificial Sequence
  Description of Artificial Sequence: Synthetic oligonucleotide
  Target: LAMA2; (+) strand; PAM type: NNGRRT; PAM sequence: CGGGAT
tccacccatatgggcctcct

SEQ ID NO: 27537 - DNA, 20 bp, Artificial Sequence
  Description of Artificial Sequence: Synthetic oligonucleotide
  Target: LAMA2; (+) strand; PAM type: NNGRRT; PAM sequence: CTGAAT
ccctcactaatatacagcag

SEQ ID NO: 27538 - DNA, 20 bp, Artificial Sequence
  Description of Artificial Sequence: Synthetic oligonucleotide
  Target: LAMA2; (+) strand; PAM type: NNGRRT; PAM sequence: CTGAGT
acagcagctgaatgtcagtc

SEQ ID NO: 27539 - DNA, 20 bp, Artificial Sequence
  Description of Artificial Sequence: Synthetic oligonucleotide
  Target: LAMA2; (+) strand; PAM type: NNGRRT; PAM sequence: GAGAAT
gaagtctcagagcactatca

SEQ ID NO: 27540 - DNA, 20 bp, Artificial Sequence
  Description of Artificial Sequence: Synthetic oligonucleotide
  Target: LAMA2; (+) strand; PAM type: NNGRRT; PAM sequence: ATGAAT
taggaaaattaatcctgtgc

SEQ ID NO: 27541 - DNA, 20 bp, Artificial Sequence
  Description of Artificial Sequence: Synthetic oligonucleotide
  Target: LAMA2; (+) strand; PAM type: NNGRRT; PAM sequence: GGGGAT
atcctgtgcatgaatcccct

SEQ ID NO: 27542 - DNA, 20 bp, Artificial Sequence
  Description of Artificial Sequence: Synthetic oligonucleotide
  Target: LAMA2; (+) strand; PAM type: NNGRRT; PAM sequence: AAGAGT
ctttgtcctttattggtcac

SEQ ID NO: 27543 - DNA, 20 bp, Artificial Sequence
  Description of Artificial Sequence: Synthetic oligonucleotide
  Target: LAMA2; (+) strand; PAM type: NNGRRT; PAM sequence: AAGAGT
gaaagtctagtctcccaatc

SEQ ID NO: 27544 - DNA, 20 bp, Artificial Sequence
  Description of Artificial Sequence: Synthetic oligonucleotide
  Target: LAMA2; (+) strand; PAM type: NNGRRT; PAM sequence: GTGAGT
gtctagtctcccaatcaaga

SEQ ID NO: 27545 - DNA, 20 bp, Artificial Sequence
  Description of Artificial Sequence: Synthetic oligonucleotide
  Target: LAMA2; (+) strand; PAM type: NNGRRT; PAM sequence: TGGGGT
ttagattgcacatagaacaa

SEQ ID NO: 27546 - DNA, 20 bp, Artificial Sequence
  Description of Artificial Sequence: Synthetic oligonucleotide
  Target: LAMA2; (+) strand; PAM type: NNGRRT; PAM sequence: CTGGAT
tttcccctcctaatttacaa

SEQ ID NO: 27547 - DNA, 20 bp, Artificial Sequence
  Description of Artificial Sequence: Synthetic oligonucleotide
  Target: LAMA2; (+) strand; PAM type: NNGRRT; PAM sequence: AAGAGT
tttatcaattcagcaagtca

SEQ ID NO: 27548 - DNA, 20 bp, Artificial Sequence
  Description of Artificial Sequence: Synthetic oligonucleotide
  Target: LAMA2; (+) strand; PAM type: NNGRRT; PAM sequence: AAGAAT
ccattcccacacagtatctt

SEQ ID NO: 27549 - DNA, 20 bp, Artificial Sequence
  Description of Artificial Sequence: Synthetic oligonucleotide
  Target: LAMA2; (+) strand; PAM type: NNGRRT; PAM sequence: GTGGAT
cacagtatcttaagaattat

SEQ ID NO: 27550 - DNA, 20 bp, Artificial Sequence
  Description of Artificial Sequence: Synthetic oligonucleotide
  Target: LAMA2; (+) strand; PAM type: NNGRRT; PAM sequence: ATGAGT
tttagtttaatggaggtaag

SEQ ID NO: 27551 - DNA, 20 bp, Artificial Sequence
  Description of Artificial Sequence: Synthetic oligonucleotide
  Target: LAMA2; (+) strand; PAM type: NNGRRT; PAM sequence: GTGAAT
gtttaatggaggtaagatga

SEQ ID NO: 27552 - DNA, 20 bp, Artificial Sequence
  Description of Artificial Sequence: Synthetic oligonucleotide
  Target: LAMA2; (+) strand; PAM type: NNGRRT; PAM sequence: CAGAAT
cattcatcataacaaagtgc

SEQ ID NO: 27553 - DNA, 20 bp, Artificial Sequence
  Description of Artificial Sequence: Synthetic oligonucleotide
  Target: LAMA2; (+) strand; PAM type: NNGRRT; PAM sequence: TGGAAT
aaagtctgaaattcaccaag

SEQ ID NO: 27554 - DNA, 20 bp, Artificial Sequence
  Description of Artificial Sequence: Synthetic oligonucleotide
  Target: LAMA2; (+) strand; PAM type: NNGRRT; PAM sequence: CAGGAT
gttcaaattgtcccatattc

SEQ ID NO: 27555 - DNA, 20 bp, Artificial Sequence
  Description of Artificial Sequence: Synthetic oligonucleotide
  Target: LAMA2; (+) strand; PAM type: NNGRRT; PAM sequence: GGGAAT
tactgtgtgtgtagaagaag

SEQ ID NO: 27556 - DNA, 20 bp, Artificial Sequence
  Description of Artificial Sequence: Synthetic oligonucleotide
  Target: LAMA2; (+) strand; PAM type: NNGRRT; PAM sequence: TGGAAT
tccaatttggcctcaggctt

SEQ ID NO: 27557 - DNA, 20 bp, Artificial Sequence
  Description of Artificial Sequence: Synthetic oligonucleotide
  Target: LAMA2; (+) strand; PAM type: NNGRRT; PAM sequence: ATGGAT
tttataatacttattcagct

SEQ ID NO: 27558 - DNA, 20 bp, Artificial Sequence
  Description of Artificial Sequence: Synthetic oligonucleotide
  Target: LAMA2; (+) strand; PAM type: NNGRRT; PAM sequence: CTGAAT
tgtaactcctcacaataatc

SEQ ID NO: 27559 - DNA, 20 bp, Artificial Sequence
  Description of Artificial Sequence: Synthetic oligonucleotide
  Target: LAMA2; (+) strand; PAM type: NNGRRT; PAM sequence: ATGAAT
atgggcagggctggggcaac

SEQ ID NO: 27560 - DNA, 20 bp, Artificial Sequence
  Description of Artificial Sequence: Synthetic oligonucleotide
  Target: LAMA2; (+) strand; PAM type: NNGRRT; PAM sequence: CTGAAT
gctggggcaacatgaatagt

SEQ ID NO: 27561 - DNA, 20 bp, Artificial Sequence
  Description of Artificial Sequence: Synthetic oligonucleotide
  Target: LAMA2; (+) strand; PAM type: NNGRRT; PAM sequence: ATGGGT
caaatacactatcttttcta

SEQ ID NO: 27562 - DNA, 20 bp, Artificial Sequence
  Description of Artificial Sequence: Synthetic oligonucleotide
  Target: LAMA2; (+) strand; PAM type: NNGRRT; PAM sequence: CAGGAT
agacataatcctagggagct

SEQ ID NO: 27563 - DNA, 20 bp, Artificial Sequence
  Description of Artificial Sequence: Synthetic oligonucleotide
  Target: LAMA2; (+) strand; PAM type: NNGRRT; PAM sequence: TGGGAT
ctatcttctcctggcttcta

SEQ ID NO: 27564 - DNA, 20 bp, Artificial Sequence
  Description of Artificial Sequence: Synthetic oligonucleotide
  Target: LAMA2; (+) strand; PAM type: NNGRRT; PAM sequence: AAGGAT
tcttttctacctaccgcatg

SEQ ID NO: 27565 - DNA, 20 bp, Artificial Sequence
  Description of Artificial Sequence: Synthetic oligonucleotide
  Target: LAMA2; (+) strand; PAM type: NNGRRT; PAM sequence: TGGGAT
aagatgagctattatccaac

SEQ ID NO: 27566 - DNA, 20 bp, Artificial Sequence
  Description of Artificial Sequence: Synthetic oligonucleotide
  Target: LAMA2; (+) strand; PAM type: NNGRRT; PAM sequence: ATGAAT
taaaaggcagtaaaattata

SEQ ID NO: 27567 - DNA, 20 bp, Artificial Sequence
  Description of Artificial Sequence: Synthetic oligonucleotide
  Target: LAMA2; (+) strand; PAM type: NNGRRT; PAM sequence: GTGGGT
ttaaatcactatagattaca

SEQ ID NO: 27568 - DNA, 20 bp, Artificial Sequence
  Description of Artificial Sequence: Synthetic oligonucleotide
  Target: LAMA2; (+) strand; PAM type: NNGRRT; PAM sequence: AGGGAT
ttcttagatacgtattacta

SEQ ID NO: 27569 - DNA, 20 bp, Artificial Sequence
  Description of Artificial Sequence: Synthetic oligonucleotide
  Target: LAMA2; (+) strand; PAM type: NNGRRT; PAM sequence: AAGGAT
ctcacaattacagctattaa

SEQ ID NO: 27570 - DNA, 20 bp, Artificial Sequence
  Description of Artificial Sequence: Synthetic oligonucleotide
  Target: LAMA2; (+) strand; PAM type: NNGRRT; PAM sequence: TAGAGT
ttacagctattaaaaggatc

SEQ ID NO: 27571 - DNA, 20 bp, Artificial Sequence
  Description of Artificial Sequence: Synthetic oligonucleotide
  Target: LAMA2; (+) strand; PAM type: NNGRRT; PAM sequence: CAGAAT
tttttcctaccagatttcac

SEQ ID NO: 27572 - DNA, 20 bp, Artificial Sequence
  Description of Artificial Sequence: Synthetic oligonucleotide
  Target: LAMA2; (+) strand; PAM type: NNGRRT; PAM sequence: CGGGGT
gaagaaagctgattggcagg

SEQ ID NO: 27573 - DNA, 20 bp, Artificial Sequence
  Description of Artificial Sequence: Synthetic oligonucleotide
  Target: LAMA2; (+) strand; PAM type: NNGRRT; PAM sequence: AGGAAT
tactcactcctggctaatcc

SEQ ID NO: 27574 - DNA, 20 bp, Artificial Sequence
  Description of Artificial Sequence: Synthetic oligonucleotide
  Target: LAMA2; (+) strand; PAM type: NNGRRT; PAM sequence: AGGAGT
gttaagctcatgtcttaact

SEQ ID NO: 27575 - DNA, 20 bp, Artificial Sequence
  Description of Artificial Sequence: Synthetic oligonucleotide
  Target: LAMA2; (+) strand; PAM type: NNGRRT; PAM sequence: AAGAAT
ctggtctatccctcaaaact

SEQ ID NO: 27576 - DNA, 20 bp, Artificial Sequence
  Description of Artificial Sequence: Synthetic oligonucleotide
  Target: LAMA2; (+) strand; PAM type: NNGRRT; PAM sequence: TGGAAT
gacaagttaacagttttaac

SEQ ID NO: 27577 - DNA, 20 bp, Artificial Sequence
  Description of Artificial Sequence: Synthetic oligonucleotide
  Target: LAMA2; (+) strand; PAM type: NNGRRT; PAM sequence: GAGGAT
tggaatttatgttttaggag

SEQ ID NO: 27578 - DNA, 20 bp, Artificial Sequence
  Description of Artificial Sequence: Synthetic oligonucleotide
  Target: LAMA2; (+) strand; PAM type: NNGRRT; PAM sequence: TAGAAT
tgcaaatattactatacttt

SEQ ID NO: 27579 - DNA, 20 bp, Artificial Sequence
  Description of Artificial Sequence: Synthetic oligonucleotide
  Target: LAMA2; (+) strand; PAM type: NNGRRT; PAM sequence: GTGAAT
actatacttttagaatccat

SEQ ID NO: 27580 - DNA, 20 bp, Artificial Sequence
  Description of Artificial Sequence: Synthetic oligonucleotide
  Target: LAMA2; (+) strand; PAM type: NNGRRT; PAM sequence: TAGAAT
aatgatttttctctaaagcc

SEQ ID NO: 27581 - DNA, 20 bp, Artificial Sequence
  Description of Artificial Sequence: Synthetic oligonucleotide
  Target: LAMA2; (+) strand; PAM type: NNGRRT; PAM sequence: AAGGAT
tgattcctgattactgatta

SEQ ID NO: 27582 - DNA, 20 bp, Artificial Sequence
  Description of Artificial Sequence: Synthetic oligonucleotide
  Target: LAMA2; (+) strand; PAM type: NNGRRT; PAM sequence: GGGAAT
aaggatgtgttgtacaagga

SEQ ID NO: 27583 - DNA, 20 bp, Artificial Sequence
  Description of Artificial Sequence: Synthetic oligonucleotide
  Target: LAMA2; (+) strand; PAM type: NNGRRT; PAM sequence: ATGGAT
aacatactcccaaacaacca

SEQ ID NO: 27584 - DNA, 20 bp, Artificial Sequence
  Description of Artificial Sequence: Synthetic oligonucleotide
  Target: LAMA2; (+) strand; PAM type: NNGRRT; PAM sequence: GAGAAT
aaaaataacttgagacaaat

SEQ ID NO: 27585 - DNA, 20 bp, Artificial Sequence
  Description of Artificial Sequence: Synthetic oligonucleotide
  Target: LAMA2; (+) strand; PAM type: NNGRRT; PAM sequence: CTGGGT
aagaaggaaataataaaggt

SEQ ID NO: 27586 - DNA, 20 bp, Artificial Sequence
  Description of Artificial Sequence: Synthetic oligonucleotide
  Target: LAMA2; (+) strand; PAM type: NNGRRT; PAM sequence: TTGGGT
gagattagcaaaactgtcac

SEQ ID NO: 27587 - DNA, 20 bp, Artificial Sequence
  Description of Artificial Sequence: Synthetic oligonucleotide
  Target: LAMA2; (+) strand; PAM type: NNGRRT; PAM sequence: CAGAAT
aactttctaagaaaaaagat

SEQ ID NO: 27588 - DNA, 20 bp, Artificial Sequence
  Description of Artificial Sequence: Synthetic oligonucleotide
  Target: LAMA2; (+) strand; PAM type: NNGRRT; PAM sequence: AAGGAT
actgatacttcagaaataca

SEQ ID NO: 27589 - DNA, 20 bp, Artificial Sequence
  Description of Artificial Sequence: Synthetic oligonucleotide
  Target: LAMA2; (+) strand; PAM type: NNGRRT; PAM sequence: CTGGAT
aacaattatatgccaacaaa

SEQ ID NO: 27590 - DNA, 20 bp, Artificial Sequence
  Description of Artificial Sequence: Synthetic oligonucleotide
  Target: LAMA2; (+) strand; PAM type: NNGRRT; PAM sequence: CTGAAT
aattcctagacctactaaca

SEQ ID NO: 27591 - DNA, 20 bp, Artificial Sequence
  Description of Artificial Sequence: Synthetic oligonucleotide
  Target: LAMA2; (+) strand; PAM type: NNGRRT; PAM sequence: AAGAGT
ataacatgagcagatcaatg

SEQ ID NO: 27592 - DNA, 20 bp, Artificial Sequence
  Description of Artificial Sequence: Synthetic oligonucleotide
  Target: LAMA2; (+) strand; PAM type: NNGRRT; PAM sequence: TTGAAT
atcaatgaagagtaaggaga

SEQ ID NO: 27593 - DNA, 20 bp, Artificial Sequence
  Description of Artificial Sequence: Synthetic oligonucleotide
  Target: LAMA2; (+) strand; PAM type: NNGRRT; PAM sequence: AGGAAT
aagagtaaggagattgaatc

SEQ ID NO: 27594 - DNA, 20 bp, Artificial Sequence
  Description of Artificial Sequence: Synthetic oligonucleotide
  Target: LAMA2; (+) strand; PAM type: NNGRRT; PAM sequence: CTGAAT
agaacctgatggttttactg

SEQ ID NO: 27595 - DNA, 20 bp, Artificial Sequence
  Description of Artificial Sequence: Synthetic oligonucleotide
  Target: LAMA2; (+) strand; PAM type: NNGRRT; PAM sequence: GGGAGT
ctccaaataactgaagatga

SEQ ID NO: 27596 - DNA, 20 bp, Artificial Sequence
  Description of Artificial Sequence: Synthetic oligonucleotide
  Target: LAMA2; (+) strand; PAM type: NNGRRT; PAM sequence: AAGGAT
caaattcagcagcacattaa

SEQ ID NO: 27597 - DNA, 20 bp, Artificial Sequence
  Description of Artificial Sequence: Synthetic oligonucleotide
  Target: LAMA2; (+) strand; PAM type: NNGRRT; PAM sequence: TGGGAT
gatcattcactgtgatcaag

SEQ ID NO: 27598 - DNA, 20 bp, Artificial Sequence
  Description of Artificial Sequence: Synthetic oligonucleotide
  Target: LAMA2; (+) strand; PAM type: NNGRRT; PAM sequence: AGGGAT
gatcaagtgggatcactacc

SEQ ID NO: 27599 - DNA, 20 bp, Artificial Sequence
  Description of Artificial Sequence: Synthetic oligonucleotide
  Target: LAMA2; (+) strand; PAM type: NNGRRT; PAM sequence: TAGAAT
aatgtgataccttacattag

SEQ ID NO: 27600 - DNA, 20 bp, Artificial Sequence
  Description of Artificial Sequence: Synthetic oligonucleotide
  Target: LAMA2; (+) strand; PAM type: NNGRRT; PAM sequence: AGGAAT
gtcaacaaattagctataga

SEQ ID NO: 27601 - DNA, 20 bp, Artificial Sequence
  Description of Artificial Sequence: Synthetic oligonucleotide
  Target: LAMA2; (+) strand; PAM type: NNGRRT; PAM sequence: AGGAAT
aaaggtttttctctaagatc

SEQ ID NO: 27602 - DNA, 20 bp, Artificial Sequence
  Description of Artificial Sequence: Synthetic oligonucleotide
  Target: LAMA2; (+) strand; PAM type: NNGRRT; PAM sequence: AAGGAT
tctaagatcaggaataagac

SEQ ID NO: 27603 - DNA, 20 bp, Artificial Sequence
  Description of Artificial Sequence: Synthetic oligonucleotide
  Target: LAMA2; (+) strand; PAM type: NNGRRT; PAM sequence: CAGGAT
aaacaaattctgtaaattag

SEQ ID NO: 27604 - DNA, 20 bp, Artificial Sequence
  Description of Artificial Sequence: Synthetic oligonucleotide
  Target: LAMA2; (+) strand; PAM type: NNGRRT; PAM sequence: GAGGAT
ttggtaataaatttaaccaa

SEQ ID NO: 27605 - DNA, 20 bp, Artificial Sequence
  Description of Artificial Sequence: Synthetic oligonucleotide
  Target: LAMA2; (+) strand; PAM type: NNGRRT; PAM sequence: TTGAAT
gtccccacccaaatttcatc

SEQ ID NO: 27606 - DNA, 20 bp, Artificial Sequence
  Description of Artificial Sequence: Synthetic oligonucleotide
  Target: LAMA2; (+) strand; PAM type: NNGRRT; PAM sequence: CTGAAT
agggacctggtgggagatgg

SEQ ID NO: 27607 - DNA, 20 bp, Artificial Sequence
  Description of Artificial Sequence: Synthetic oligonucleotide
  Target: LAMA2; (+) strand; PAM type: NNGRRT; PAM sequence: GGGAGT
gtgggagatggctgaatcat

SEQ ID NO: 27608 - DNA, 20 bp, Artificial Sequence
  Description of Artificial Sequence: Synthetic oligonucleotide
  Target: LAMA2; (+) strand; PAM type: NNGRRT; PAM sequence: AGGGGT
tgagatctggtagttttatc

SEQ ID NO: 27609 - DNA, 20 bp, Artificial Sequence
  Description of Artificial Sequence: Synthetic oligonucleotide
  Target: LAMA2; (+) strand; PAM type: NNGRRT; PAM sequence: TGGAGT
tctcgctctgtcgcccaggc

SEQ ID NO: 27610 - DNA, 20 bp, Artificial Sequence
  Description of Artificial Sequence: Synthetic oligonucleotide
  Target: LAMA2; (+) strand; PAM type: NNGRRT; PAM sequence: CGGGAT
cccaggctggagtgcagtgg

SEQ ID NO: 27611 - DNA, 20 bp, Artificial Sequence
  Description of Artificial Sequence: Synthetic oligonucleotide
  Target: LAMA2; (+) strand; PAM type: NNGRRT; PAM sequence: CCGGGT
ctcactgcaagctccgcctc

SEQ ID NO: 27612 - DNA, 20 bp, Artificial Sequence
  Description of Artificial Sequence: Synthetic oligonucleotide
  Target: LAMA2; (+) strand; PAM type: NNGRRT; PAM sequence: CGGGGT
ttttgtatttttagtagaga

SEQ ID NO: 27613 - DNA, 20 bp, Artificial Sequence
  Description of Artificial Sequence: Synthetic oligonucleotide
  Target: LAMA2; (+) strand; PAM type: NNGRRT; PAM sequence: CGGGAT
cggggtttcaccgttttagc

SEQ ID NO: 27614 - DNA, 20 bp, Artificial Sequence
  Description of Artificial Sequence: Synthetic oligonucleotide
  Target: LAMA2; (+) strand; PAM type: NNGRRT; PAM sequence: TGGGAT
gcctcggcctcccaaagtgc

SEQ ID NO: 27615 - DNA, 20 bp, Artificial Sequence
  Description of Artificial Sequence: Synthetic oligonucleotide
  Target: LAMA2; (+) strand; PAM type: NNGRRT; PAM sequence: TGGAAT
ggaaaacatcctgtgttttg

SEQ ID NO: 27616 - DNA, 20 bp, Artificial Sequence
  Description of Artificial Sequence: Synthetic oligonucleotide
  Target: LAMA2; (+) strand; PAM type: NNGRRT; PAM sequence: CAGAAT
aaaacagatacatagaccaa

SEQ ID NO: 27617 - DNA, 20 bp, Artificial Sequence
  Description of Artificial Sequence: Synthetic oligonucleotide
  Target: LAMA2; (+) strand; PAM type: NNGRRT; PAM sequence: TAGAAT
agatacatagaccaacagaa

SEQ ID NO: 27618 - DNA, 20 bp, Artificial Sequence
  Description of Artificial Sequence: Synthetic oligonucleotide
  Target: LAMA2; (+) strand; PAM type: NNGRRT; PAM sequence: TGGGAT
aagatgccaagaacacacaa

SEQ ID NO: 27619 - DNA, 20 bp, Artificial Sequence
  Description of Artificial Sequence: Synthetic oligonucleotide
  Target: LAMA2; (+) strand; PAM type: NNGRRT; PAM sequence: AAGGGT
attgaactgtctgtccagtg

SEQ ID NO: 27620 - DNA, 20 bp, Artificial Sequence
  Description of Artificial Sequence: Synthetic oligonucleotide
  Target: LAMA2; (+) strand; PAM type: NNGRRT; PAM sequence: AAGAAT
cagtagatgtccacatgcag

SEQ ID NO: 27621 - DNA, 20 bp, Artificial Sequence
  Description of Artificial Sequence: Synthetic oligonucleotide
  Target: LAMA2; (+) strand; PAM type: NNGRRT; PAM sequence: ATGAGT
agatgtccacatgcagaaga

SEQ ID NO: 27622 - DNA, 20 bp, Artificial Sequence
  Description of Artificial Sequence: Synthetic oligonucleotide
  Target: LAMA2; (+) strand; PAM type: NNGRRT; PAM sequence: ATGAAT
aaaatccattcaaattctaa

SEQ ID NO: 27623 - DNA, 20 bp, Artificial Sequence
  Description of Artificial Sequence: Synthetic oligonucleotide
  Target: LAMA2; (+) strand; PAM type: NNGRRT; PAM sequence: CTGGAT
tacattaaactgaaacacat

SEQ ID NO: 27624 - DNA, 20 bp, Artificial Sequence
  Description of Artificial Sequence: Synthetic oligonucleotide
  Target: LAMA2; (+) strand; PAM type: NNGRRT; PAM sequence: CTGAAT
catggctgctcttcaaatca

SEQ ID NO: 27625 - DNA, 20 bp, Artificial Sequence
  Description of Artificial Sequence: Synthetic oligonucleotide
  Target: LAMA2; (+) strand; PAM type: NNGRRT; PAM sequence: TTGGGT
atttattttgttggtactat

SEQ ID NO: 27626 - DNA, 20 bp, Artificial Sequence
  Description of Artificial Sequence: Synthetic oligonucleotide
  Target: LAMA2; (+) strand; PAM type: NNGRRT; PAM sequence: GTGAAT
tttgggtcactgctaaattg

SEQ ID NO: 27627 - DNA, 20 bp, Artificial Sequence
  Description of Artificial Sequence: Synthetic oligonucleotide
  Target: LAMA2; (+) strand; PAM type: NNGRRT; PAM sequence: CTGAGT
aaatgtagattataccttac

SEQ ID NO: 27628 - DNA, 20 bp, Artificial Sequence
  Description of Artificial Sequence: Synthetic oligonucleotide
  Target: LAMA2; (+) strand; PAM type: NNGRRT; PAM sequence: CAGAAT
tgagtataccttaagtacaa

SEQ ID NO: 27629 - DNA, 20 bp, Artificial Sequence
  Description of Artificial Sequence: Synthetic oligonucleotide
  Target: LAMA2; (+) strand; PAM type: NNGRRT; PAM sequence: TAGAAT
catttgttcagtatcacaag

SEQ ID NO: 27630 - DNA, 20 bp, Artificial Sequence
  Description of Artificial Sequence: Synthetic oligonucleotide
  Target: LAMA2; (+) strand; PAM type: NNGRRT; PAM sequence: ATGAAT
aaaatatattttccctttaa

SEQ ID NO: 27631 - DNA, 20 bp, Artificial Sequence
  Description of Artificial Sequence: Synthetic oligonucleotide
  Target: LAMA2; (+) strand; PAM type: NNGRRT; PAM sequence: TAGAAT
cacttgatatttcttatgtc

SEQ ID NO: 27632 - DNA, 20 bp, Artificial Sequence
  Description of Artificial Sequence: Synthetic oligonucleotide
  Target: LAMA2; (+) strand; PAM type: NNGRRT; PAM sequence: TTGAAT
atgtacatgttactgttcag

SEQ ID NO: 27633 - DNA, 20 bp, Artificial Sequence
  Description of Artificial Sequence: Synthetic oligonucleotide
  Target: LAMA2; (+) strand; PAM type: NNGRRT; PAM sequence: TAGAAT
atcattgctttctaagcact

SEQ ID NO: 27634 - DNA, 20 bp, Artificial Sequence
  Description of Artificial Sequence: Synthetic oligonucleotide
  Target: LAMA2; (+) strand; PAM type: NNGRRT; PAM sequence: CTGAAT
tgtattaagttaataaatga

SEQ ID NO: 27635 - DNA, 20 bp, Artificial Sequence
  Description of Artificial Sequence: Synthetic oligonucleotide
  Target: LAMA2; (+) strand; PAM type: NNGRRT; PAM sequence: ATGAAT
ttaagttaataaatgactga

SEQ ID NO: 27636 - DNA, 20 bp, Artificial Sequence
  Description of Artificial Sequence: Synthetic oligonucleotide
  Target: LAMA2; (+) strand; PAM type: NNGRRT; PAM sequence: AAGAAT
aaaccaccaatccataattt

SEQ ID NO: 27637 - DNA, 20 bp, Artificial Sequence
  Description of Artificial Sequence: Synthetic oligonucleotide
  Target: LAMA2; (+) strand; PAM type: NNGRRT; PAM sequence: TTGAAT
tccataatttaagaatctta

SEQ ID NO: 27638 - DNA, 20 bp, Artificial Sequence
  Description of Artificial Sequence: Synthetic oligonucleotide
  Target: LAMA2; (+) strand; PAM type: NNGRRT; PAM sequence: GAGAAT
ttaagaatcttattgaatct

SEQ ID NO: 27639 - DNA, 20 bp, Artificial Sequence
  Description of Artificial Sequence: Synthetic oligonucleotide
  Target: LAMA2; (+) strand; PAM type: NNGRRT; PAM sequence: AAGGAT
cttattgaatctgagaatta

SEQ ID NO: 27640 - DNA, 20 bp, Artificial Sequence
  Description of Artificial Sequence: Synthetic oligonucleotide
  Target: LAMA2; (+) strand; PAM type: NNGRRT; PAM sequence: TTGAAT
ttatgaaatttcctttaagg

SEQ ID NO: 27641 - DNA, 20 bp, Artificial Sequence
  Description of Artificial Sequence: Synthetic oligonucleotide
  Target: LAMA2; (+) strand; PAM type: NNGRRT; PAM sequence: GAGGGT
tggcagattcaatgtctggt

SEQ ID NO: 27642 - DNA, 20 bp, Artificial Sequence
  Description of Artificial Sequence: Synthetic oligonucleotide
  Target: LAMA2; (+) strand; PAM type: NNGRRT; PAM sequence: TGGGGT
gaaggggcaaataagctttc

SEQ ID NO: 27643 - DNA, 20 bp, Artificial Sequence
  Description of Artificial Sequence: Synthetic oligonucleotide
  Target: LAMA2; (+) strand; PAM type: NNGRRT; PAM sequence: AAGGGT
ctttctggggtttcatttat

SEQ ID NO: 27644 - DNA, 20 bp, Artificial Sequence
  Description of Artificial Sequence: Synthetic oligonucleotide
  Target: LAMA2; (+) strand; PAM type: NNGRRT; PAM sequence: AGGGGT
tcacctaataccatcacatt

SEQ ID NO: 27645 - DNA, 20 bp, Artificial Sequence
  Description of Artificial Sequence: Synthetic oligonucleotide
  Target: LAMA2; (+) strand; PAM type: NNGRRT; PAM sequence: TAGGAT
aataccatcacattaggggt

SEQ ID NO: 27646 - DNA, 20 bp, Artificial Sequence
  Description of Artificial Sequence: Synthetic oligonucleotide
  Target: LAMA2; (+) strand; PAM type: NNGRRT; PAM sequence: ATGAAT
aggggttaggatttcaacat

SEQ ID NO: 27647 - DNA, 20 bp, Artificial Sequence
  Description of Artificial Sequence: Synthetic oligonucleotide
  Target: LAMA2; (+) strand; PAM type: NNGRRT; PAM sequence: AAGAGT
tacaatgatgctgtttaaac

SEQ ID NO: 27648 - DNA, 20 bp, Artificial Sequence
  Description of Artificial Sequence: Synthetic oligonucleotide
  Target: LAMA2; (+) strand; PAM type: NNGRRT; PAM sequence: TAGGAT
tttaaacaagagtgtaaatg

SEQ ID NO: 27649 - DNA, 20 bp, Artificial Sequence
  Description of Artificial Sequence: Synthetic oligonucleotide
  Target: LAMA2; (+) strand; PAM type: NNGRRT; PAM sequence: TAGAGT
gacccagatcctatttcaaa

SEQ ID NO: 27650 - DNA, 20 bp, Artificial Sequence
  Description of Artificial Sequence: Synthetic oligonucleotide
  Target: LAMA2; (+) strand; PAM type: NNGRRT; PAM sequence: TGGAAT
gaaaatgcttcttgaagtca

SEQ ID NO: 27651 - DNA, 20 bp, Artificial Sequence
  Description of Artificial Sequence: Synthetic oligonucleotide
  Target: LAMA2; (+) strand; PAM type: NNGRRT; PAM sequence: ATGAAT
tgttaaaatgttgaaaccac

SEQ ID NO: 27652 - DNA, 20 bp, Artificial Sequence
  Description of Artificial Sequence: Synthetic oligonucleotide
  Target: LAMA2; (+) strand; PAM type: NNGRRT; PAM sequence: TTGAAT
acaagactttctaaaataga

SEQ ID NO: 27653 - DNA, 20 bp, Artificial Sequence
  Description of Artificial Sequence: Synthetic oligonucleotide
  Target: LAMA2; (+) strand; PAM type: NNGRRT; PAM sequence: TGGAAT
tccacatttcatccttttgg

SEQ ID NO: 27654 - DNA, 20 bp, Artificial Sequence
  Description of Artificial Sequence: Synthetic oligonucleotide
  Target: LAMA2; (+) strand; PAM type: NNGRRT; PAM sequence: TAGAGT
gtattttccaattttattct

SEQ ID NO: 27655 - DNA, 20 bp, Artificial Sequence
  Description of Artificial Sequence: Synthetic oligonucleotide
  Target: LAMA2; (+) strand; PAM type: NNGRRT; PAM sequence: AGGAAT
atattatttatttaaaaata

SEQ ID NO: 27656 - DNA, 20 bp, Artificial Sequence
  Description of Artificial Sequence: Synthetic oligonucleotide
  Target: LAMA2; (+) strand; PAM type: NNGRRT; PAM sequence: AGGAAT
atattatttgtttttaaata

SEQ ID NO: 27657 - DNA, 20 bp, Artificial Sequence
  Description of Artificial Sequence: Synthetic oligonucleotide
  Target: LAMA2; (+) strand; PAM type: NNGRRT; PAM sequence: TTGAGT
cccatgcacagagaaaattc

SEQ ID NO: 27658 - DNA, 20 bp, Artificial Sequence
  Description of Artificial Sequence: Synthetic oligonucleotide
  Target: LAMA2; (+) strand; PAM type: NNGRRT; PAM sequence: ATGAAT
tgagtcaaatggcttcattg

SEQ ID NO: 27659 - DNA, 20 bp, Artificial Sequence
  Description of Artificial Sequence: Synthetic oligonucleotide
  Target: LAMA2; (+) strand; PAM type: NNGRRT; PAM sequence: TAGAAT
cttcattgatgaatagaagt

SEQ ID NO: 27660 - DNA, 20 bp, Artificial Sequence
  Description of Artificial Sequence: Synthetic oligonucleotide
  Target: LAMA2; (+) strand; PAM type: NNGRRT; PAM sequence: GAGGGT
agggaagataatgactggga

SEQ ID NO: 27661 - DNA, 20 bp, Artificial Sequence
  Description of Artificial Sequence: Synthetic oligonucleotide
  Target: LAMA2; (+) strand; PAM type: NNGRRT; PAM sequence: TTGAAT
tctagaaattgactacatat

SEQ ID NO: 27662 - DNA, 20 bp, Artificial Sequence
  Description of Artificial Sequence: Synthetic oligonucleotide
  Target: LAMA2; (+) strand; PAM type: NNGRRT; PAM sequence: TGGAGT
caaacatggcaaaaaaaggc

SEQ ID NO: 27663 - DNA, 20 bp, Artificial Sequence
  Description of Artificial Sequence: Synthetic oligonucleotide
  Target: LAMA2; (+) strand; PAM type: NNGRRT; PAM sequence: AAGGAT
cttattacgaggcatattat

SEQ ID NO: 27664 - DNA, 20 bp, Artificial Sequence
  Description of Artificial Sequence: Synthetic oligonucleotide
  Target: LAMA2; (+) strand; PAM type: NNGRRT; PAM sequence: GTGAAT
cttccacattgaaaataatg

SEQ ID NO: 27665 - DNA, 20 bp, Artificial Sequence
  Description of Artificial Sequence: Synthetic oligonucleotide
  Target: LAMA2; (+) strand; PAM type: NNGRRT; PAM sequence: GAGAAT
attgaaaataatggtgaatg

SEQ ID NO: 27666 - DNA, 20 bp, Artificial Sequence
  Description of Artificial Sequence: Synthetic oligonucleotide
  Target: LAMA2; (+) strand; PAM type: NNGRRT; PAM sequence: CTGGAT
gctcaaaaatgctttaatta

SEQ ID NO: 27667 - DNA, 20 bp, Artificial Sequence
  Description of Artificial Sequence: Synthetic oligonucleotide
  Target: LAMA2; (+) strand; PAM type: NNGRRT; PAM sequence: AAGAAT
gttcactttgtatatcacct

SEQ ID NO: 27668 - DNA, 20 bp, Artificial Sequence
  Description of Artificial Sequence: Synthetic oligonucleotide
  Target: LAMA2; (+) strand; PAM type: NNGRRT; PAM sequence: GTGGAT
taatgaaacatgcattttca

SEQ ID NO: 27669 - DNA, 20 bp, Artificial Sequence
  Description of Artificial Sequence: Synthetic oligonucleotide
  Target: LAMA2; (+) strand; PAM type: NNGRRT; PAM sequence: GAGAAT
ggtgacaaataaaagtctga

SEQ ID NO: 27670 - DNA, 20 bp, Artificial Sequence
  Description of Artificial Sequence: Synthetic oligonucleotide
  Target: LAMA2; (+) strand; PAM type: NNGRRT; PAM sequence: AGGAGT
ccagtgaagccatttgatct

SEQ ID NO: 27671 - DNA, 20 bp, Artificial Sequence
  Description of Artificial Sequence: Synthetic oligonucleotide
  Target: LAMA2; (+) strand; PAM type: NNGRRT; PAM sequence: ATGGGT
tctaggagttttctctgtgc

SEQ ID NO: 27672 - DNA, 20 bp, Artificial Sequence
  Description of Artificial Sequence: Synthetic oligonucleotide
  Target: LAMA2; (+) strand; PAM type: NNGRRT; PAM sequence: TGGAGT
ataataaatgtgggactcac

SEQ ID NO: 27673 - DNA, 20 bp, Artificial Sequence
  Description of Artificial Sequence: Synthetic oligonucleotide
  Target: LAMA2; (+) strand; PAM type: NNGRRT; PAM sequence: TTGAGT
ttcttatattttcagtttag

SEQ ID NO: 27674 - DNA, 20 bp, Artificial Sequence
  Description of Artificial Sequence: Synthetic oligonucleotide
  Target: LAMA2; (+) strand; PAM type: NNGRRT; PAM sequence: ATGAGT
aatttttcaaatatatcgac

SEQ ID NO: 27675 - DNA, 20 bp, Artificial Sequence
  Description of Artificial Sequence: Synthetic oligonucleotide
  Target: LAMA2; (+) strand; PAM type: NNGRRT; PAM sequence: TTGAAT
cgtgaaattgttatattgta

SEQ ID NO: 27676 - DNA, 20 bp, Artificial Sequence
  Description of Artificial Sequence: Synthetic oligonucleotide
  Target: LAMA2; (+) strand; PAM type: NNGRRT; PAM sequence: ATGGAT
cattttcttagcttcttgaa

SEQ ID NO: 27677 - DNA, 20 bp, Artificial Sequence
  Description of Artificial Sequence: Synthetic oligonucleotide
  Target: LAMA2; (+) strand; PAM type: NNGRRT; PAM sequence: CTGAGT
agtaaatttttctgtggcct

SEQ ID NO: 27678 - DNA, 20 bp, Artificial Sequence
  Description of Artificial Sequence: Synthetic oligonucleotide
  Target: LAMA2; (+) strand; PAM type: NNGRRT; PAM sequence: TTGAGT
agtgcttaatttctgaacaa

SEQ ID NO: 27679 - DNA, 20 bp, Artificial Sequence
  Description of Artificial Sequence: Synthetic oligonucleotide
  Target: LAMA2; (+) strand; PAM type: NNGRRT; PAM sequence: GCGGAT
actttgggaggccaaggcag

SEQ ID NO: 27680 - DNA, 20 bp, Artificial Sequence
  Description of Artificial Sequence: Synthetic oligonucleotide
  Target: LAMA2; (+) strand; PAM type: NNGRRT; PAM sequence: CTGGGT
aaaaccccaaaacaaattag

SEQ ID NO: 27681 - DNA, 20 bp, Artificial Sequence
  Description of Artificial Sequence: Synthetic oligonucleotide
  Target: LAMA2; (+) strand; PAM type: NNGRRT; PAM sequence: TGGAGT
gcctgtagtcccagctattc

SEQ ID NO: 27682 - DNA, 20 bp, Artificial Sequence
  Description of Artificial Sequence: Synthetic oligonucleotide
  Target: LAMA2; (+) strand; PAM type: NNGRRT; PAM sequence: GAGAAT
tattctggagtctgaggtgg

SEQ ID NO: 27683 - DNA, 20 bp, Artificial Sequence
  Description of Artificial Sequence: Synthetic oligonucleotide
  Target: LAMA2; (+) strand; PAM type: NNGRRT; PAM sequence: CTGGGT
ttacgccactgcactccagc

SEQ ID NO: 27684 - DNA, 20 bp, Artificial Sequence
  Description of Artificial Sequence: Synthetic oligonucleotide
  Target: LAMA2; (+) strand; PAM type: NNGRRT; PAM sequence: AAGAAT
gtctaaaaaaaagcaaagaa

SEQ ID NO: 27685 - DNA, 20 bp, Artificial Sequence
  Description of Artificial Sequence: Synthetic oligonucleotide
  Target: LAMA2; (+) strand; PAM type: NNGRRT; PAM sequence: GTGAGT
gcagtactacaaatatatca

SEQ ID NO: 27686 - DNA, 20 bp, Artificial Sequence
  Description of Artificial Sequence: Synthetic oligonucleotide
  Target: LAMA2; (+) strand; PAM type: NNGRRT; PAM sequence: TAGGAT
aaattagagacatacaaatt

SEQ ID NO: 27687 - DNA, 20 bp, Artificial Sequence
  Description of Artificial Sequence: Synthetic oligonucleotide
  Target: LAMA2; (+) strand; PAM type: NNGRRT; PAM sequence: TAGAGT
gccagcagtacttctatctt

SEQ ID NO: 27688 - DNA, 20 bp, Artificial Sequence
  Description of Artificial Sequence: Synthetic oligonucleotide
  Target: LAMA2; (+) strand; PAM type: NNGRRT; PAM sequence: TTGAGT
gatataggttttctcatatg

SEQ ID NO: 27689 - DNA, 20 bp, Artificial Sequence
  Description of Artificial Sequence: Synthetic oligonucleotide
  Target: LAMA2; (+) strand; PAM type: NNGRRT; PAM sequence: TTGAAT
cttctgtgagcagcataaat

SEQ ID NO: 27690 - DNA, 20 bp, Artificial Sequence
  Description of Artificial Sequence: Synthetic oligonucleotide
  Target: LAMA2; (+) strand; PAM type: NNGRRT; PAM sequence: TTGGAT
tgataatcttttcctttaaa

SEQ ID NO: 27691 - DNA, 20 bp, Artificial Sequence
  Description of Artificial Sequence: Synthetic oligonucleotide
  Target: LAMA2; (+) strand; PAM type: NNGRRT; PAM sequence: ATGGGT
tagtgttactatactgatat

SEQ ID NO: 27692 - DNA, 20 bp, Artificial Sequence
  Description of Artificial Sequence: Synthetic oligonucleotide
  Target: LAMA2; (+) strand; PAM type: NNGRRT; PAM sequence: TGGAAT
cctcataactttcttacttt

SEQ ID NO: 27693 - DNA, 20 bp, Artificial Sequence
  Description of Artificial Sequence: Synthetic oligonucleotide
  Target: LAMA2; (+) strand; PAM type: NNGRRT; PAM sequence: TAGAAT
attttccaccaagtataaag

SEQ ID NO: 27694 - DNA, 20 bp, Artificial Sequence
  Description of Artificial Sequence: Synthetic oligonucleotide
  Target: LAMA2; (+) strand; PAM type: NNGRRT; PAM sequence: TGGAAT
agtagaatttcttgcctggt

SEQ ID NO: 27695 - DNA, 20 bp, Artificial Sequence
  Description of Artificial Sequence: Synthetic oligonucleotide
  Target: LAMA2; (+) strand; PAM type: NNGRRT; PAM sequence: AGGGGT
taattttgcttttggtgttc

SEQ ID NO: 27696 - DNA, 20 bp, Artificial Sequence
  Description of Artificial Sequence: Synthetic oligonucleotide
  Target: LAMA2; (+) strand; PAM type: NNGRRT; PAM sequence: AGGAAT
gggtttaccacaatgtactt

SEQ ID NO: 27697 - DNA, 20 bp, Artificial Sequence
  Description of Artificial Sequence: Synthetic oligonucleotide
  Target: LAMA2; (+) strand; PAM type: NNGRRT; PAM sequence: TGGGAT
ttattggtattaatactatt

SEQ ID NO: 27698 - DNA, 20 bp, Artificial Sequence
  Description of Artificial Sequence: Synthetic oligonucleotide
  Target: LAMA2; (+) strand; PAM type: NNGRRT; PAM sequence: GTGGAT
ttcaaaagcttctagattct

SEQ ID NO: 27699 - DNA, 20 bp, Artificial Sequence
  Description of Artificial Sequence: Synthetic oligonucleotide
  Target: LAMA2; (+) strand; PAM type: NNGRRT; PAM sequence: TCGAAT
aattcttagccgatattttc

SEQ ID NO: 27700 - DNA, 20 bp, Artificial Sequence
  Description of Artificial Sequence: Synthetic oligonucleotide
  Target: LAMA2; (+) strand; PAM type: NNGRRT; PAM sequence: CTGGGT
tttctcagtctgtacatttt

SEQ ID NO: 27701 - DNA, 20 bp, Artificial Sequence
  Description of Artificial Sequence: Synthetic oligonucleotide
  Target: LAMA2; (+) strand; PAM type: NNGRRT; PAM sequence: CTGGAT
taaataatcccttttttctg

SEQ ID NO: 27702 - DNA, 20 bp, Artificial Sequence
  Description of Artificial Sequence: Synthetic oligonucleotide
  Target: LAMA2; (+) strand; PAM type: NNGRRT; PAM sequence: CTGGAT
tcttctattacatacattta

SEQ ID NO: 27703 - DNA, 20 bp, Artificial Sequence
  Description of Artificial Sequence: Synthetic oligonucleotide
  Target: LAMA2; (+) strand; PAM type: NNGRRT; PAM sequence: TAGAAT
gtatttttattttttagttt

SEQ ID NO: 27704 - DNA, 20 bp, Artificial Sequence
  Description of Artificial Sequence: Synthetic oligonucleotide
  Target: LAMA2; (+) strand; PAM type: NNGRRT; PAM sequence: GGGAGT
ctctgacgttggaaacaact

SEQ ID NO: 27705 - DNA, 20 bp, Artificial Sequence
  Description of Artificial Sequence: Synthetic oligonucleotide
  Target: LAMA2; (+) strand; PAM type: NNGRRT; PAM sequence: AAGAGT
tgatttattttcattctgtc

SEQ ID NO: 27706 - DNA, 20 bp, Artificial Sequence
  Description of Artificial Sequence: Synthetic oligonucleotide
  Target: LAMA2; (+) strand; PAM type: NNGRRT; PAM sequence: AGGGAT
tctagtttactcttagttct

SEQ ID NO: 27707 - DNA, 20 bp, Artificial Sequence
  Description of Artificial Sequence: Synthetic oligonucleotide
  Target: LAMA2; (+) strand; PAM type: NNGRRT; PAM sequence: AAGGAT
ccaactctgggagacttccc

SEQ ID NO: 27708 - DNA, 20 bp, Artificial Sequence
  Description of Artificial Sequence: Synthetic oligonucleotide
  Target: LAMA2; (+) strand; PAM type: NNGRRT; PAM sequence: ATGAGT
ttcttagtttttcacttctc

SEQ ID NO: 27709 - DNA, 20 bp, Artificial Sequence
  Description of Artificial Sequence: Synthetic oligonucleotide
  Target: LAMA2; (+) strand; PAM type: NNGRRT; PAM sequence: AAGAAT
tcttgaaggcaaaagctgtg

SEQ ID NO: 27710 - DNA, 20 bp, Artificial Sequence
  Description of Artificial Sequence: Synthetic oligonucleotide
  Target: LAMA2; (+) strand; PAM type: NNGRRT; PAM sequence: ATGAAT
aatgtaggtctcatttctct

SEQ ID NO: 27711 - DNA, 20 bp, Artificial Sequence
  Description of Artificial Sequence: Synthetic oligonucleotide
  Target: LAMA2; (+) strand; PAM type: NNGRRT; PAM sequence: CTGAAT
tcctagctgacttcatagcc

SEQ ID NO: 27712 - DNA, 20 bp, Artificial Sequence
  Description of Artificial Sequence: Synthetic oligonucleotide
  Target: LAMA2; (+) strand; PAM type: NNGRRT; PAM sequence: GTGAAT
taaaattattattgcttttt

SEQ ID NO: 27713 - DNA, 20 bp, Artificial Sequence
  Description of Artificial Sequence: Synthetic oligonucleotide
  Target: LAMA2; (+) strand; PAM type: NNGRRT; PAM sequence: AGGAAT
tattgctttttgtgaattta

SEQ ID NO: 27714 - DNA, 20 bp, Artificial Sequence
  Description of Artificial Sequence: Synthetic oligonucleotide
  Target: LAMA2; (+) strand; PAM type: NNGRRT; PAM sequence: CTGAAT
ttgtgaatttaaggaatgtt

SEQ ID NO: 27715 - DNA, 20 bp, Artificial Sequence
  Description of Artificial Sequence: Synthetic oligonucleotide
  Target: LAMA2; (+) strand; PAM type: NNGRRT; PAM sequence: ATGGAT
ataattattggaacattttg

SEQ ID NO: 27716 - DNA, 20 bp, Artificial Sequence
  Description of Artificial Sequence: Synthetic oligonucleotide
  Target: LAMA2; (+) strand; PAM type: NNGRRT; PAM sequence: AAGAAT
attttgatggattatgaaga

SEQ ID NO: 27717 - DNA, 20 bp, Artificial Sequence
  Description of Artificial Sequence: Synthetic oligonucleotide
  Target: LAMA2; (+) strand; PAM type: NNGRRT; PAM sequence: TGGGAT
gaagaaagaatatgtaaaat

SEQ ID NO: 27718 - DNA, 20 bp, Artificial Sequence
  Description of Artificial Sequence: Synthetic oligonucleotide
  Target: LAMA2; (+) strand; PAM type: NNGRRT; PAM sequence: CTGAAT
ccccttatggcatatctgcc

SEQ ID NO: 27719 - DNA, 20 bp, Artificial Sequence
  Description of Artificial Sequence: Synthetic oligonucleotide
  Target: LAMA2; (+) strand; PAM type: NNGRRT; PAM sequence: AGGAGT
ggtctgtccatgaaggagac

SEQ ID NO: 27720 - DNA, 20 bp, Artificial Sequence
  Description of Artificial Sequence: Synthetic oligonucleotide
  Target: LAMA2; (+) strand; PAM type: NNGRRT; PAM sequence: CAGGGT
agacaggagtccttgcattc

SEQ ID NO: 27721 - DNA, 20 bp, Artificial Sequence
  Description of Artificial Sequence: Synthetic oligonucleotide
  Target: LAMA2; (+) strand; PAM type: NNGRRT; PAM sequence: TAGAAT
gggttttcaagtaaacaatt

SEQ ID NO: 27722 - DNA, 20 bp, Artificial Sequence
  Description of Artificial Sequence: Synthetic oligonucleotide
  Target: LAMA2; (+) strand; PAM type: NNGRRT; PAM sequence: GAGAAT
caggaagtgatatttgagct

SEQ ID NO: 27723 - DNA, 20 bp, Artificial Sequence
  Description of Artificial Sequence: Synthetic oligonucleotide
  Target: LAMA2; (+) strand; PAM type: NNGRRT; PAM sequence: CTGGGT
aataccagtcatagaaaaat

SEQ ID NO: 27724 - DNA, 20 bp, Artificial Sequence
  Description of Artificial Sequence: Synthetic oligonucleotide
  Target: LAMA2; (+) strand; PAM type: NNGRRT; PAM sequence: TAGAGT
cagtcatagaaaaatctggg

SEQ ID NO: 27725 - DNA, 20 bp, Artificial Sequence
  Description of Artificial Sequence: Synthetic oligonucleotide
  Target: LAMA2; (+) strand; PAM type: NNGRRT; PAM sequence: AGGAAT
gggtagagtttattaccagc

SEQ ID NO: 27726 - DNA, 20 bp, Artificial Sequence
  Description of Artificial Sequence: Synthetic oligonucleotide
  Target: LAMA2; (+) strand; PAM type: NNGRRT; PAM sequence: TGGGGT
attaccagcaggaataaatg

SEQ ID NO: 27727 - DNA, 20 bp, Artificial Sequence
  Description of Artificial Sequence: Synthetic oligonucleotide
  Target: LAMA2; (+) strand; PAM type: NNGRRT; PAM sequence: GGGAGT
aggtcttcttagctcctgaa

SEQ ID NO: 27728 - DNA, 20 bp, Artificial Sequence
  Description of Artificial Sequence: Synthetic oligonucleotide
  Target: LAMA2; (+) strand; PAM type: NNGRRT; PAM sequence: TTGAAT
gtcatgataaacagtttata

SEQ ID NO: 27729 - DNA, 20 bp, Artificial Sequence
  Description of Artificial Sequence: Synthetic oligonucleotide
  Target: LAMA2; (+) strand; PAM type: NNGRRT; PAM sequence: CTGGGT
taaacagtttatattgaatt

SEQ ID NO: 27730 - DNA, 20 bp, Artificial Sequence
  Description of Artificial Sequence: Synthetic oligonucleotide
  Target: LAMA2; (+) strand; PAM type: NNGRRT; PAM sequence: GAGAAT
aagtaacattctgctaaatg

SEQ ID NO: 27731 - DNA, 20 bp, Artificial Sequence
  Description of Artificial Sequence: Synthetic oligonucleotide
  Target: LAMA2; (+) strand; PAM type: NNGRRT; PAM sequence: TGGAAT
gcaaagagatgatggtaact

SEQ ID NO: 27732 - DNA, 20 bp, Artificial Sequence
  Description of Artificial Sequence: Synthetic oligonucleotide
  Target: LAMA2; (+) strand; PAM type: NNGRRT; PAM sequence: TAGAGT
gagatgatggtaacttggaa

SEQ ID NO: 27733 - DNA, 20 bp, Artificial Sequence
  Description of Artificial Sequence: Synthetic oligonucleotide
  Target: LAMA2; (+) strand; PAM type: NNGRRT; PAM sequence: TGGAGT
gtggcaggctgagatttatc

SEQ ID NO: 27734 - DNA, 20 bp, Artificial Sequence
  Description of Artificial Sequence: Synthetic oligonucleotide
  Target: LAMA2; (+) strand; PAM type: NNGRRT; PAM sequence: CCGAAT
tatctggagttcggcatcac

SEQ ID NO: 27735 - DNA, 20 bp, Artificial Sequence
  Description of Artificial Sequence: Synthetic oligonucleotide
  Target: LAMA2; (+) strand; PAM type: NNGRRT; PAM sequence: GAGAGT
ttgatggtggaacaaatgtg

SEQ ID NO: 27736 - DNA, 20 bp, Artificial Sequence
  Description of Artificial Sequence: Synthetic oligonucleotide
  Target: LAMA2; (+) strand; PAM type: NNGRRT; PAM sequence: AGGAGT
gggccaaaatgttgactcct

SEQ ID NO: 27737 - DNA, 20 bp, Artificial Sequence
  Description of Artificial Sequence: Synthetic oligonucleotide
  Target: LAMA2; (+) strand; PAM type: NNGRRT; PAM sequence: ATGGAT
agaaattttcctgaaatagt

SEQ ID NO: 27738 - DNA, 20 bp, Artificial Sequence
  Description of Artificial Sequence: Synthetic oligonucleotide
  Target: LAMA2; (+) strand; PAM type: NNGRRT; PAM sequence: CAGAAT
agtatggattaaaggaggag

SEQ ID NO: 27739 - DNA, 20 bp, Artificial Sequence
  Description of Artificial Sequence: Synthetic oligonucleotide
  Target: LAMA2; (+) strand; PAM type: NNGRRT; PAM sequence: CTGGGT
ggaggagcagaatggagata

SEQ ID NO: 27740 - DNA, 20 bp, Artificial Sequence
  Description of Artificial Sequence: Synthetic oligonucleotide
  Target: LAMA2; (+) strand; PAM type: NNGRRT; PAM sequence: AAGGGT
ggagatactgggtggcaatt

SEQ ID NO: 27741 - DNA, 20 bp, Artificial Sequence
  Description of Artificial Sequence: Synthetic oligonucleotide
  Target: LAMA2; (+) strand; PAM type: NNGRRT; PAM sequence: TCGAGT
acgtgttatctttgaagcat

SEQ ID NO: 27742 - DNA, 20 bp, Artificial Sequence
  Description of Artificial Sequence: Synthetic oligonucleotide
  Target: LAMA2; (+) strand; PAM type: NNGRRT; PAM sequence: GAGGAT
actttgggaggttgaggtgg

SEQ ID NO: 27743 - DNA, 20 bp, Artificial Sequence
  Description of Artificial Sequence: Synthetic oligonucleotide
  Target: LAMA2; (+) strand; PAM type: NNGRRT; PAM sequence: GAGAAT
tactcaggaggttgaggcag

SEQ ID NO: 27744 - DNA, 20 bp, Artificial Sequence
  Description of Artificial Sequence: Synthetic oligonucleotide
  Target: LAMA2; (+) strand; PAM type: NNGRRT; PAM sequence: TTGGGT
ggttgaggcaggagaatcac

SEQ ID NO: 27745 - DNA, 20 bp, Artificial Sequence
  Description of Artificial Sequence: Synthetic oligonucleotide
  Target: LAMA2; (+) strand; PAM type: NNGRRT; PAM sequence: TTGGAT
tggaaatattaaagggacaa

SEQ ID NO: 27746 - DNA, 20 bp, Artificial Sequence
  Description of Artificial Sequence: Synthetic oligonucleotide
  Target: LAMA2; (+) strand; PAM type: NNGRRT; PAM sequence: ATGAGT
ttaaagggacaattggattt

SEQ ID NO: 27747 - DNA, 20 bp, Artificial Sequence
  Description of Artificial Sequence: Synthetic oligonucleotide
  Target: LAMA2; (+) strand; PAM type: NNGRRT; PAM sequence: TGGAGT
gacaattggatttatgagtc

SEQ ID NO: 27748 - DNA, 20 bp, Artificial Sequence
  Description of Artificial Sequence: Synthetic oligonucleotide
  Target: LAMA2; (+) strand; PAM type: NNGRRT; PAM sequence: TTGAGT
ttggatttatgagtctggag

SEQ ID NO: 27749 - DNA, 20 bp, Artificial Sequence
  Description of Artificial Sequence: Synthetic oligonucleotide
  Target: LAMA2; (+) strand; PAM type: NNGRRT; PAM sequence: TTGAAT
gataaaaagagggcctataa

SEQ ID NO: 27750 - DNA, 20 bp, Artificial Sequence
  Description of Artificial Sequence: Synthetic oligonucleotide
  Target: LAMA2; (+) strand; PAM type: NNGRRT; PAM sequence: GGGAAT
atcaaatacatcaagaaaga

SEQ ID NO: 27751 - DNA, 20 bp, Artificial Sequence
  Description of Artificial Sequence: Synthetic oligonucleotide
  Target: LAMA2; (+) strand; PAM type: NNGRRT; PAM sequence: ATGAGT
gaaaaaacacctaaattgta

SEQ ID NO: 27752 - DNA, 20 bp, Artificial Sequence
  Description of Artificial Sequence: Synthetic oligonucleotide
  Target: LAMA2; (+) strand; PAM type: NNGRRT; PAM sequence: GAGAAT
atataatatatataaaatta

SEQ ID NO: 27753 - DNA, 20 bp, Artificial Sequence
  Description of Artificial Sequence: Synthetic oligonucleotide
  Target: LAMA2; (+) strand; PAM type: NNGRRT; PAM sequence: GTGAAT
tagagaatctttaataagag

SEQ ID NO: 27754 - DNA, 20 bp, Artificial Sequence
  Description of Artificial Sequence: Synthetic oligonucleotide
  Target: LAMA2; (+) strand; PAM type: NNGRRT; PAM sequence: GTGGAT
gttttcacaaatattttaat

SEQ ID NO: 27755 - DNA, 20 bp, Artificial Sequence
  Description of Artificial Sequence: Synthetic oligonucleotide
  Target: LAMA2; (+) strand; PAM type: NNGRRT; PAM sequence: TTGAGT
caaatattttaatgtggatt

SEQ ID NO: 27756 - DNA, 20 bp, Artificial Sequence
  Description of Artificial Sequence: Synthetic oligonucleotide
  Target: LAMA2; (+) strand; PAM type: NNGRRT; PAM sequence: AGGAGT
atcagtttaaaacactaatg

SEQ ID NO: 27757 - DNA, 20 bp, Artificial Sequence
  Description of Artificial Sequence: Synthetic oligonucleotide
  Target: LAMA2; (+) strand; PAM type: NNGRRT; PAM sequence: CTGGGT
tgaggagttgcctctcagca

SEQ ID NO: 27758 - DNA, 20 bp, Artificial Sequence
  Description of Artificial Sequence: Synthetic oligonucleotide
  Target: LAMA2; (+) strand; PAM type: NNGRRT; PAM sequence: ATGAAT
gttcaggttagaaagcaaag

SEQ ID NO: 27759 - DNA, 20 bp, Artificial Sequence
  Description of Artificial Sequence: Synthetic oligonucleotide
  Target: LAMA2; (+) strand; PAM type: NNGRRT; PAM sequence: TAGAAT
aaaagcttacagttgtgggc

SEQ ID NO: 27760 - DNA, 20 bp, Artificial Sequence
  Description of Artificial Sequence: Synthetic oligonucleotide
  Target: LAMA2; (+) strand; PAM type: NNGRRT; PAM sequence: TTGAAT
ttcacgtaataatatttaaa

SEQ ID NO: 27761 - DNA, 20 bp, Artificial Sequence
  Description of Artificial Sequence: Synthetic oligonucleotide
  Target: LAMA2; (+) strand; PAM type: NNGRRT; PAM sequence: AAGAAT
attttccatccatcattgtg

SEQ ID NO: 27762 - DNA, 20 bp, Artificial Sequence
  Description of Artificial Sequence: Synthetic oligonucleotide
  Target: LAMA2; (+) strand; PAM type: NNGRRT; PAM sequence: GGGAAT
cttaatgattctggaaatat

SEQ ID NO: 27763 - DNA, 20 bp, Artificial Sequence
  Description of Artificial Sequence: Synthetic oligonucleotide
  Target: LAMA2; (+) strand; PAM type: NNGRRT; PAM sequence: TGGAGT
gaaatacaaaaattaagaaa

SEQ ID NO: 27764 - DNA, 20 bp, Artificial Sequence
  Description of Artificial Sequence: Synthetic oligonucleotide
  Target: LAMA2; (+) strand; PAM type: NNGRRT; PAM sequence: TAGAAT
agacattttcccactgattt

SEQ ID NO: 27765 - DNA, 20 bp, Artificial Sequence
  Description of Artificial Sequence: Synthetic oligonucleotide
  Target: LAMA2; (+) strand; PAM type: NNGRRT; PAM sequence: TCGAAT
ataaagttgttttattttgt

SEQ ID NO: 27766 - DNA, 20 bp, Artificial Sequence
  Description of Artificial Sequence: Synthetic oligonucleotide
  Target: LAMA2; (+) strand; PAM type: NNGRRT; PAM sequence: CAGGAT
cactttctttaaaactaaat

SEQ ID NO: 27767 - DNA, 20 bp, Artificial Sequence
  Description of Artificial Sequence: Synthetic oligonucleotide
  Target: LAMA2; (+) strand; PAM type: NNGRRT; PAM sequence: GGGAGT
aaaactaaatcaggatttga

SEQ ID NO: 27768 - DNA, 20 bp, Artificial Sequence
  Description of Artificial Sequence: Synthetic oligonucleotide
  Target: LAMA2; (+) strand; PAM type: NNGRRT; PAM sequence: AGGGAT
atcaggatttgagggagtgg

SEQ ID NO: 27769 - DNA, 20 bp, Artificial Sequence
  Description of Artificial Sequence: Synthetic oligonucleotide
  Target: LAMA2; (+) strand; PAM type: NNGRRT; PAM sequence: AAGGAT
gggatgactaggcagagcaa

SEQ ID NO: 27770 - DNA, 20 bp, Artificial Sequence
  Description of Artificial Sequence: Synthetic oligonucleotide
  Target: LAMA2; (+) strand; PAM type: NNGRRT; PAM sequence: TAGGAT
aaggcagtgaaaatactctg

SEQ ID NO: 27771 - DNA, 20 bp, Artificial Sequence
  Description of Artificial Sequence: Synthetic oligonucleotide
  Target: LAMA2; (+) strand; PAM type: NNGRRT; PAM sequence: ATGGGT
ctctgtaggatagtataatg

SEQ ID NO: 27772 - DNA, 20 bp, Artificial Sequence
  Description of Artificial Sequence: Synthetic oligonucleotide
  Target: LAMA2; (+) strand; PAM type: NNGRRT; PAM sequence: AAGAGT
cccgcaggacgtgcaaggcc

SEQ ID NO: 27773 - DNA, 20 bp, Artificial Sequence
  Description of Artificial Sequence: Synthetic oligonucleotide
  Target: LAMA2; (+) strand; PAM type: NNGRRT; PAM sequence: CCGAAT
gtgcaaggccaagagtgaag

SEQ ID NO: 27774 - DNA, 20 bp, Artificial Sequence
  Description of Artificial Sequence: Synthetic oligonucleotide
  Target: LAMA2; (+) strand; PAM type: NNGRRT; PAM sequence: TTGGGT
ccgaatgtaaactataggct

SEQ ID NO: 27775 - DNA, 20 bp, Artificial Sequence
  Description of Artificial Sequence: Synthetic oligonucleotide
  Target: LAMA2; (+) strand; PAM type: NNGRRT; PAM sequence: GGGGAT
acaaatgtactactctactg

SEQ ID NO: 27776 - DNA, 20 bp, Artificial Sequence
  Description of Artificial Sequence: Synthetic oligonucleotide
  Target: LAMA2; (+) strand; PAM type: NNGRRT; PAM sequence: TGGAGT
tcttgctgtgtcgctcagac

SEQ ID NO: 27777 - DNA, 20 bp, Artificial Sequence
  Description of Artificial Sequence: Synthetic oligonucleotide
  Target: LAMA2; (+) strand; PAM type: NNGRRT; PAM sequence: CTGAGT
gattctcctgcctcggcttc

SEQ ID NO: 27778 - DNA, 20 bp, Artificial Sequence
  Description of Artificial Sequence: Synthetic oligonucleotide
  Target: LAMA2; (+) strand; PAM type: NNGRRT; PAM sequence: TAGGAT
atgtcagcctcccaaagtgc

SEQ ID NO: 27779 - DNA, 20 bp, Artificial Sequence
  Description of Artificial Sequence: Synthetic oligonucleotide
  Target: LAMA2; (+) strand; PAM type: NNGRRT; PAM sequence: CAGAGT
ttccacgttgtagcatatat

SEQ ID NO: 27780 - DNA, 20 bp, Artificial Sequence
  Description of Artificial Sequence: Synthetic oligonucleotide
  Target: LAMA2; (+) strand; PAM type: NNGRRT; PAM sequence: CTGAAT
agtttccttcatttttaagg

SEQ ID NO: 27781 - DNA, 20 bp, Artificial Sequence
  Description of Artificial Sequence: Synthetic oligonucleotide
  Target: LAMA2; (+) strand; PAM type: NNGRRT; PAM sequence: TTGAAT
gtatatatgggcttcacgca

SEQ ID NO: 27782 - DNA, 20 bp, Artificial Sequence
  Description of Artificial Sequence: Synthetic oligonucleotide
  Target: LAMA2; (+) strand; PAM type: NNGRRT; PAM sequence: GAGGGT
atgggcttcacgcattgaat

SEQ ID NO: 27783 - DNA, 20 bp, Artificial Sequence
  Description of Artificial Sequence: Synthetic oligonucleotide
  Target: LAMA2; (+) strand; PAM type: NNGRRT; PAM sequence: TAGGAT
cacgcattgaatgagggtct

SEQ ID NO: 27784 - DNA, 20 bp, Artificial Sequence
  Description of Artificial Sequence: Synthetic oligonucleotide
  Target: LAMA2; (+) strand; PAM type: NNGRRT; PAM sequence: GAGGAT
ggtcttaggatgtatcccct

SEQ ID NO: 27785 - DNA, 20 bp, Artificial Sequence
  Description of Artificial Sequence: Synthetic oligonucleotide
  Target: LAMA2; (+) strand; PAM type: NNGRRT; PAM sequence: AAGGAT
cattcccatcggccatacac

SEQ ID NO: 27786 - DNA, 20 bp, Artificial Sequence
  Description of Artificial Sequence: Synthetic oligonucleotide
  Target: LAMA2; (+) strand; PAM type: NNGRRT; PAM sequence: AAGAAT
aaaataactttgatgttgga

SEQ ID NO: 27787 - DNA, 20 bp, Artificial Sequence
  Description of Artificial Sequence: Synthetic oligonucleotide
  Target: LAMA2; (+) strand; PAM type: NNGRRT; PAM sequence: AAGAAT
tgttggaaagaatagcagtg

SEQ ID NO: 27788 - DNA, 20 bp, Artificial Sequence
  Description of Artificial Sequence: Synthetic oligonucleotide
  Target: LAMA2; (+) strand; PAM type: NNGRRT; PAM sequence: GAGAAT
agaatgcccatgtaaaattt

SEQ ID NO: 27789 - DNA, 20 bp, Artificial Sequence
  Description of Artificial Sequence: Synthetic oligonucleotide
  Target: LAMA2; (+) strand; PAM type: NNGRRT; PAM sequence: AAGAGT
aaggcccatgaaaactcaaa

SEQ ID NO: 27790 - DNA, 20 bp, Artificial Sequence
  Description of Artificial Sequence: Synthetic oligonucleotide
  Target: LAMA2; (+) strand; PAM type: NNGRRT; PAM sequence: ATGAAT
ttataatttaaatgtaacat

SEQ ID NO: 27791 - DNA, 20 bp, Artificial Sequence
  Description of Artificial Sequence: Synthetic oligonucleotide
  Target: LAMA2; (+) strand; PAM type: NNGRRT; PAM sequence: TGGAAT
aacatatgaatacttgtgtc

SEQ ID NO: 27792 - DNA, 20 bp, Artificial Sequence
  Description of Artificial Sequence: Synthetic oligonucleotide
  Target: LAMA2; (+) strand; PAM type: NNGRRT; PAM sequence: GAGAGT
tagacacatttttatctcca

SEQ ID NO: 27793 - DNA, 20 bp, Artificial Sequence
  Description of Artificial Sequence: Synthetic oligonucleotide
  Target: LAMA2; (+) strand; PAM type: NNGRRT; PAM sequence: ATGAAT
agaaaacaatagagcacaag

SEQ ID NO: 27794 - DNA, 20 bp, Artificial Sequence
  Description of Artificial Sequence: Synthetic oligonucleotide
  Target: LAMA2; (+) strand; PAM type: NNGRRT; PAM sequence: TAGAGT
actccagatgacctgaacct

SEQ ID NO: 27795 - DNA, 20 bp, Artificial Sequence
  Description of Artificial Sequence: Synthetic oligonucleotide
  Target: LAMA2; (+) strand; PAM type: NNGRRT; PAM sequence: GAGAAT
cttctctgatatataattgt

SEQ ID NO: 27796 - DNA, 20 bp, Artificial Sequence
  Description of Artificial Sequence: Synthetic oligonucleotide
  Target: LAMA2; (+) strand; PAM type: NNGRRT; PAM sequence: AGGAGT
acaagattaaattactacag

SEQ ID NO: 27797 - DNA, 20 bp, Artificial Sequence
  Description of Artificial Sequence: Synthetic oligonucleotide
  Target: LAMA2; (+) strand; PAM type: NNGRRT; PAM sequence: TAGAAT
aaattactacagaggagtct

SEQ ID NO: 27798 - DNA, 20 bp, Artificial Sequence
  Description of Artificial Sequence: Synthetic oligonucleotide
  Target: LAMA2; (+) strand; PAM type: NNGRRT; PAM sequence: TAGGAT
aaactctaaaaagtgaaact

SEQ ID NO: 27799 - DNA, 20 bp, Artificial Sequence
  Description of Artificial Sequence: Synthetic oligonucleotide
  Target: LAMA2; (+) strand; PAM type: NNGRRT; PAM sequence: ATGGAT
ctaacttctcatatacatgt

SEQ ID NO: 27800 - DNA, 20 bp, Artificial Sequence
  Description of Artificial Sequence: Synthetic oligonucleotide
  Target: LAMA2; (+) strand; PAM type: NNGRRT; PAM sequence: CTGGGT
tatggatgtaacctgaaatg

SEQ ID NO: 27801 - DNA, 20 bp, Artificial Sequence
  Description of Artificial Sequence: Synthetic oligonucleotide
  Target: LAMA2; (+) strand; PAM type: NNGRRT; PAM sequence: AAGGAT
accccatcaaaaagtgggca

SEQ ID NO: 27802 - DNA, 20 bp, Artificial Sequence
  Description of Artificial Sequence: Synthetic oligonucleotide
  Target: LAMA2; (+) strand; PAM type: NNGRRT; PAM sequence: TAGAAT
agataccatcccacaccagt

SEQ ID NO: 27803 - DNA, 20 bp, Artificial Sequence
  Description of Artificial Sequence: Synthetic oligonucleotide
  Target: LAMA2; (+) strand; PAM type: NNGRRT; PAM sequence: GAGGAT
aggaaacaacaggtgctgga

SEQ ID NO: 27804 - DNA, 20 bp, Artificial Sequence
  Description of Artificial Sequence: Synthetic oligonucleotide
  Target: LAMA2; (+) strand; PAM type: NNGRRT; PAM sequence: AGGAAT
tggagaggatgtggagaaat

SEQ ID NO: 27805 - DNA, 20 bp, Artificial Sequence
  Description of Artificial Sequence: Synthetic oligonucleotide
  Target: LAMA2; (+) strand; PAM type: NNGRRT; PAM sequence: AAGGAT
agacagtgtggcgattcctc

SEQ ID NO: 27806 - DNA, 20 bp, Artificial Sequence
  Description of Artificial Sequence: Synthetic oligonucleotide
  Target: LAMA2; (+) strand; PAM type: NNGRRT; PAM sequence: CTGGGT
ttgacccagccatcccatta

SEQ ID NO: 27807 - DNA, 20 bp, Artificial Sequence
  Description of Artificial Sequence: Synthetic oligonucleotide
  Target: LAMA2; (+) strand; PAM type: NNGRRT; PAM sequence: AAGGAT
cattactgggtatataccca

SEQ ID NO: 27808 - DNA, 20 bp, Artificial Sequence
  Description of Artificial Sequence: Synthetic oligonucleotide
  Target: LAMA2; (+) strand; PAM type: NNGRRT; PAM sequence: TGGAAT
aatgtggcacatatatacca

SEQ ID NO: 27809 - DNA, 20 bp, Artificial Sequence
  Description of Artificial Sequence: Synthetic oligonucleotide
  Target: LAMA2; (+) strand; PAM type: NNGRRT; PAM sequence: AAGAGT
ctatgtagccataaaaaatg

SEQ ID NO: 27810 - DNA, 20 bp, Artificial Sequence
  Description of Artificial Sequence: Synthetic oligonucleotide
  Target: LAMA2; (+) strand; PAM type: NNGRRT; PAM sequence: AGGGAT
gaagagttcatgtcctttgt

SEQ ID NO: 27811 - DNA, 20 bp, Artificial Sequence
  Description of Artificial Sequence: Synthetic oligonucleotide
  Target: LAMA2; (+) strand; PAM type: NNGRRT; PAM sequence: ATGGAT
ttcatgtcctttgtagggat

SEQ ID NO: 27812 - DNA, 20 bp, Artificial Sequence
  Description of Artificial Sequence: Synthetic oligonucleotide
  Target: LAMA2; (+) strand; PAM type: NNGRRT; PAM sequence: CAGGGT
acaatgagaacacttggaca

SEQ ID NO: 27813 - DNA, 20 bp, Artificial Sequence
  Description of Artificial Sequence: Synthetic oligonucleotide
  Target: LAMA2; (+) strand; PAM type: NNGRRT; PAM sequence: GTGGGT
tgagaacacttggacacagg

SEQ ID NO: 27814 - DNA, 20 bp, Artificial Sequence
  Description of Artificial Sequence: Synthetic oligonucleotide
  Target: LAMA2; (+) strand; PAM type: NNGRRT; PAM sequence: TGGGGT
tcacacaccggggcctgttg

SEQ ID NO: 27815 - DNA, 20 bp, Artificial Sequence
  Description of Artificial Sequence: Synthetic oligonucleotide
  Target: LAMA2; (+) strand; PAM type: NNGRRT; PAM sequence: TGGGGT
caccggggcctgttgtgggg

SEQ ID NO: 27816 - DNA, 20 bp, Artificial Sequence
  Description of Artificial Sequence: Synthetic oligonucleotide
  Target: LAMA2; (+) strand; PAM type: NNGRRT; PAM sequence: AGGGAT
gtggggtggggtgagggggg

SEQ ID NO: 27817 - DNA, 20 bp, Artificial Sequence
  Description of Artificial Sequence: Synthetic oligonucleotide
  Target: LAMA2; (+) strand; PAM type: NNGRRT; PAM sequence: ACGAGT
agatacacctaatgtaaatg

SEQ ID NO: 27818 - DNA, 20 bp, Artificial Sequence
  Description of Artificial Sequence: Synthetic oligonucleotide
  Target: LAMA2; (+) strand; PAM type: NNGRRT; PAM sequence: ATGGAT
ctaatgtaaatgacgagtta

SEQ ID NO: 27819 - DNA, 20 bp, Artificial Sequence
  Description of Artificial Sequence: Synthetic oligonucleotide
  Target: LAMA2; (+) strand; PAM type: NNGRRT; PAM sequence: TTGGGT
gtccttgatcgtaattcttt

SEQ ID NO: 27820 - DNA, 20 bp, Artificial Sequence
  Description of Artificial Sequence: Synthetic oligonucleotide
  Target: LAMA2; (+) strand; PAM type: NNGRRT; PAM sequence: AGGAAT
aacttctctcagtattcaca

SEQ ID NO: 27821 - DNA, 20 bp, Artificial Sequence
  Description of Artificial Sequence: Synthetic oligonucleotide
  Target: LAMA2; (+) strand; PAM type: NNGRRT; PAM sequence: TTGAAT
tattcacaaggaatacctgc

SEQ ID NO: 27822 - DNA, 20 bp, Artificial Sequence
  Description of Artificial Sequence: Synthetic oligonucleotide
  Target: LAMA2; (+) strand; PAM type: NNGRRT; PAM sequence: GAGGAT
tgaatgtttaagtaccaaca

SEQ ID NO: 27823 - DNA, 20 bp, Artificial Sequence
  Description of Artificial Sequence: Synthetic oligonucleotide
  Target: LAMA2; (+) strand; PAM type: NNGRRT; PAM sequence: ATGAAT
ttattacttatgagcattaa

SEQ ID NO: 27824 - DNA, 20 bp, Artificial Sequence
  Description of Artificial Sequence: Synthetic oligonucleotide
  Target: LAMA2; (+) strand; PAM type: NNGRRT; PAM sequence: AAGGAT
catttctgaagatagaaaat

SEQ ID NO: 27825 - DNA, 20 bp, Artificial Sequence
  Description of Artificial Sequence: Synthetic oligonucleotide
  Target: LAMA2; (+) strand; PAM type: NNGRRT; PAM sequence: CTGGGT
ttaattaatatgtcaaatat

SEQ ID NO: 27826 - DNA, 20 bp, Artificial Sequence
  Description of Artificial Sequence: Synthetic oligonucleotide
  Target: LAMA2; (+) strand; PAM type: NNGRRT; PAM sequence: TGGAAT
ttaacaaaacattttacagt

SEQ ID NO: 27827 - DNA, 20 bp, Artificial Sequence
  Description of Artificial Sequence: Synthetic oligonucleotide
  Target: LAMA2; (+) strand; PAM type: NNGRRT; PAM sequence: CTGGAT
cagttggaatgaaattagta

SEQ ID NO: 27828 - DNA, 20 bp, Artificial Sequence
  Description of Artificial Sequence: Synthetic oligonucleotide
  Target: LAMA2; (+) strand; PAM type: NNGRRT; PAM sequence: TTGGAT
atgaaattagtactggatga

SEQ ID NO: 27829 - DNA, 20 bp, Artificial Sequence
  Description of Artificial Sequence: Synthetic oligonucleotide
  Target: LAMA2; (+) strand; PAM type: NNGRRT; PAM sequence: GTGGAT
ttactttttccagtacctaa

SEQ ID NO: 27830 - DNA, 20 bp, Artificial Sequence
  Description of Artificial Sequence: Synthetic oligonucleotide
  Target: LAMA2; (+) strand; PAM type: NNGRRT; PAM sequence: ATGAAT
tggtatataataagtaacca

SEQ ID NO: 27831 - DNA, 20 bp, Artificial Sequence
  Description of Artificial Sequence: Synthetic oligonucleotide
  Target: LAMA2; (+) strand; PAM type: NNGRRT; PAM sequence: TTGAAT
aagtaaccaatgaatagata

SEQ ID NO: 27832 - DNA, 20 bp, Artificial Sequence
  Description of Artificial Sequence: Synthetic oligonucleotide
  Target: LAMA2; (+) strand; PAM type: NNGRRT; PAM sequence: AAGAAT
acagatgttattccctgatt

SEQ ID NO: 27833 - DNA, 20 bp, Artificial Sequence
  Description of Artificial Sequence: Synthetic oligonucleotide
  Target: LAMA2; (+) strand; PAM type: NNGRRT; PAM sequence: GAGAAT
taatgtggagattctgtttt

SEQ ID NO: 27834 - DNA, 20 bp, Artificial Sequence
  Description of Artificial Sequence: Synthetic oligonucleotide
  Target: LAMA2; (+) strand; PAM type: NNGRRT; PAM sequence: CTGGAT
atcttatctttatagcctct

SEQ ID NO: 27835 - DNA, 20 bp, Artificial Sequence
  Description of Artificial Sequence: Synthetic oligonucleotide
  Target: LAMA2; (+) strand; PAM type: NNGRRT; PAM sequence: TTGAAT
ctttatagcctctctggata

SEQ ID NO: 27836 - DNA, 20 bp, Artificial Sequence
  Description of Artificial Sequence: Synthetic oligonucleotide
  Target: LAMA2; (+) strand; PAM type: NNGRRT; PAM sequence: TTGGAT
atagttaacaccattaacgt

SEQ ID NO: 27837 - DNA, 20 bp, Artificial Sequence
  Description of Artificial Sequence: Synthetic oligonucleotide
  Target: LAMA2; (+) strand; PAM type: NNGRRT; PAM sequence: CTGGAT
taaagttttacattttgtaa

SEQ ID NO: 27838 - DNA, 20 bp, Artificial Sequence
  Description of Artificial Sequence: Synthetic oligonucleotide
  Target: LAMA2; (+) strand; PAM type: NNGRRT; PAM sequence: CAGGGT
ctgtggactccctgaaatgc

SEQ ID NO: 27839 - DNA, 20 bp, Artificial Sequence
  Description of Artificial Sequence: Synthetic oligonucleotide
  Target: LAMA2; (+) strand; PAM type: NNGRRT; PAM sequence: GGGAAT
gaacagctagcagaacctca

SEQ ID NO: 27840 - DNA, 20 bp, Artificial Sequence
  Description of Artificial Sequence: Synthetic oligonucleotide
  Target: LAMA2; (+) strand; PAM type: NNGRRT; PAM sequence: GGGAAT
aatcaaatgactgttgatgg

SEQ ID NO: 27841 - DNA, 20 bp, Artificial Sequence
  Description of Artificial Sequence: Synthetic oligonucleotide
  Target: LAMA2; (+) strand; PAM type: NNGRRT; PAM sequence: AAGAAT
actgttgatgggggaattat

SEQ ID NO: 27842 - DNA, 20 bp, Artificial Sequence
  Description of Artificial Sequence: Synthetic oligonucleotide
  Target: LAMA2; (+) strand; PAM type: NNGRRT; PAM sequence: GGGAGT
ggggaattataagaatagat

SEQ ID NO: 27843 - DNA, 20 bp, Artificial Sequence
  Description of Artificial Sequence: Synthetic oligonucleotide
  Target: LAMA2; (+) strand; PAM type: NNGRRT; PAM sequence: TGGAAT
ttagatccaacgtatcaacc

SEQ ID NO: 27844 - DNA, 20 bp, Artificial Sequence
  Description of Artificial Sequence: Synthetic oligonucleotide
  Target: LAMA2; (+) strand; PAM type: NNGRRT; PAM sequence: ATGGAT
tgataatatttgtaaaacaa

SEQ ID NO: 27845 - DNA, 20 bp, Artificial Sequence
  Description of Artificial Sequence: Synthetic oligonucleotide
  Target: LAMA2; (+) strand; PAM type: NNGRRT; PAM sequence: CAGAAT
ttaaaatatatatggaaatg

SEQ ID NO: 27846 - DNA, 20 bp, Artificial Sequence
  Description of Artificial Sequence: Synthetic oligonucleotide
  Target: LAMA2; (+) strand; PAM type: NNGRRT; PAM sequence: GAGAGT
atattttgaaaaacaaaggt

SEQ ID NO: 27847 - DNA, 20 bp, Artificial Sequence
  Description of Artificial Sequence: Synthetic oligonucleotide
  Target: LAMA2; (+) strand; PAM type: NNGRRT; PAM sequence: AAGAGT
cttcccactcttcttaattg

SEQ ID NO: 27848 - DNA, 20 bp, Artificial Sequence
  Description of Artificial Sequence: Synthetic oligonucleotide
  Target: LAMA2; (+) strand; PAM type: NNGRRT; PAM sequence: TTGAAT
agagtcacctcaatccccat

SEQ ID NO: 27849 - DNA, 20 bp, Artificial Sequence
  Description of Artificial Sequence: Synthetic oligonucleotide
  Target: LAMA2; (+) strand; PAM type: NNGRRT; PAM sequence: GAGAAT
aacctcctaaaaagattact

SEQ ID NO: 27850 - DNA, 20 bp, Artificial Sequence
  Description of Artificial Sequence: Synthetic oligonucleotide
  Target: LAMA2; (+) strand; PAM type: NNGRRT; PAM sequence: AAGAAT
tctaaaatgttgttcatgtc

SEQ ID NO: 27851 - DNA, 20 bp, Artificial Sequence
  Description of Artificial Sequence: Synthetic oligonucleotide
  Target: LAMA2; (+) strand; PAM type: NNGRRT; PAM sequence: AAGAAT
gacacaaaaatgattaactg

SEQ ID NO: 27852 - DNA, 20 bp, Artificial Sequence
  Description of Artificial Sequence: Synthetic oligonucleotide
  Target: LAMA2; (+) strand; PAM type: NNGRRT; PAM sequence: TGGGAT
ctcactgcaggcataaaccc

SEQ ID NO: 27853 - DNA, 20 bp, Artificial Sequence
  Description of Artificial Sequence: Synthetic oligonucleotide
  Target: LAMA2; (+) strand; PAM type: NNGRRT; PAM sequence: CAGAGT
ccacttatgtttaggtttaa

SEQ ID NO: 27854 - DNA, 20 bp, Artificial Sequence
  Description of Artificial Sequence: Synthetic oligonucleotide
  Target: LAMA2; (+) strand; PAM type: NNGRRT; PAM sequence: TAGAAT
gtttacacatatgttcatag

SEQ ID NO: 27855 - DNA, 20 bp, Artificial Sequence
  Description of Artificial Sequence: Synthetic oligonucleotide
  Target: LAMA2; (+) strand; PAM type: NNGRRT; PAM sequence: TTGGGT
catggactcagttttatccc

SEQ ID NO: 27856 - DNA, 20 bp, Artificial Sequence
  Description of Artificial Sequence: Synthetic oligonucleotide
  Target: LAMA2; (+) strand; PAM type: NNGRRT; PAM sequence: AAGAGT
cttgggtatcacaaatgagg

SEQ ID NO: 27857 - DNA, 20 bp, Artificial Sequence
  Description of Artificial Sequence: Synthetic oligonucleotide
  Target: LAMA2; (+) strand; PAM type: NNGRRT; PAM sequence: AGGGAT
gattaaatgttttattggac

SEQ ID NO: 27858 - DNA, 20 bp, Artificial Sequence
  Description of Artificial Sequence: Synthetic oligonucleotide
  Target: LAMA2; (+) strand; PAM type: NNGRRT; PAM sequence: AAGAAT
gttttattggacagggattt

SEQ ID NO: 27859 - DNA, 20 bp, Artificial Sequence
  Description of Artificial Sequence: Synthetic oligonucleotide
  Target: LAMA2; (+) strand; PAM type: NNGRRT; PAM sequence: CAGAAT
ttggacagggatttaagaat

SEQ ID NO: 27860 - DNA, 20 bp, Artificial Sequence
  Description of Artificial Sequence: Synthetic oligonucleotide
  Target: LAMA2; (+) strand; PAM type: NNGRRT; PAM sequence: AGGGAT
gaaggcttttacaaatgtta

SEQ ID NO: 27861 - DNA, 20 bp, Artificial Sequence
  Description of Artificial Sequence: Synthetic oligonucleotide
  Target: LAMA2; (+) strand; PAM type: NNGRRT; PAM sequence: TTGAAT
ttacaaatgttaagggatga

SEQ ID NO: 27862 - DNA, 20 bp, Artificial Sequence
  Description of Artificial Sequence: Synthetic oligonucleotide
  Target: LAMA2; (+) strand; PAM type: NNGRRT; PAM sequence: TTGAAT
tttgtgacactcataacctg

SEQ ID NO: 27863 - DNA, 20 bp, Artificial Sequence
  Description of Artificial Sequence: Synthetic oligonucleotide
  Target: LAMA2; (+) strand; PAM type: NNGRRT; PAM sequence: ATGAGT
ccttttttgcctcctgtagc

SEQ ID NO: 27864 - DNA, 20 bp, Artificial Sequence
  Description of Artificial Sequence: Synthetic oligonucleotide
  Target: LAMA2; (+) strand; PAM type: NNGRRT; PAM sequence: AGGAGT
aggcagcatgaaaaggacgg

SEQ ID NO: 27865 - DNA, 20 bp, Artificial Sequence
  Description of Artificial Sequence: Synthetic oligonucleotide
  Target: LAMA2; (+) strand; PAM type: NNGRRT; PAM sequence: GTGAGT
ggaggagttctctaaggact

SEQ ID NO: 27866 - DNA, 20 bp, Artificial Sequence
  Description of Artificial Sequence: Synthetic oligonucleotide
  Target: LAMA2; (+) strand; PAM type: NNGRRT; PAM sequence: ACGGGT
ctctaaggactgtgagttcc

SEQ ID NO: 27867 - DNA, 20 bp, Artificial Sequence
  Description of Artificial Sequence: Synthetic oligonucleotide
  Target: LAMA2; (+) strand; PAM type: NNGRRT; PAM sequence: AAGAAT
ttgggagaaaatacaaggag

SEQ ID NO: 27868 - DNA, 20 bp, Artificial Sequence
  Description of Artificial Sequence: Synthetic oligonucleotide
  Target: LAMA2; (+) strand; PAM type: NNGRRT; PAM sequence: CAGGGT
aatacaaggagaagaatttg

SEQ ID NO: 27869 - DNA, 20 bp, Artificial Sequence
  Description of Artificial Sequence: Synthetic oligonucleotide
  Target: LAMA2; (+) strand; PAM type: NNGRRT; PAM sequence: TAGGGT
gaggtcaccactttaaaatt

SEQ ID NO: 27870 - DNA, 20 bp, Artificial Sequence
  Description of Artificial Sequence: Synthetic oligonucleotide
  Target: LAMA2; (+) strand; PAM type: NNGRRT; PAM sequence: CGGAAT
ccagcttgacaaactgttgg

SEQ ID NO: 27871 - DNA, 20 bp, Artificial Sequence
  Description of Artificial Sequence: Synthetic oligonucleotide
  Target: LAMA2; (+) strand; PAM type: NNGRRT; PAM sequence: AAGAAT
gcaagtcttcgttttgaaga

SEQ ID NO: 27872 - DNA, 20 bp, Artificial Sequence
  Description of Artificial Sequence: Synthetic oligonucleotide
  Target: LAMA2; (+) strand; PAM type: NNGRRT; PAM sequence: CAGGGT
gaacttctcatctatcaatg

SEQ ID NO: 27873 - DNA, 20 bp, Artificial Sequence
  Description of Artificial Sequence: Synthetic oligonucleotide
  Target: LAMA2; (+) strand; PAM type: NNGRRT; PAM sequence: GAGAAT
taaaatataaaatgagacat

SEQ ID NO: 27874 - DNA, 20 bp, Artificial Sequence
  Description of Artificial Sequence: Synthetic oligonucleotide
  Target: LAMA2; (+) strand; PAM type: NNGRRT; PAM sequence: CTGGAT
aaaagcaaaagtaggcaaaa

SEQ ID NO: 27875 - DNA, 20 bp, Artificial Sequence
  Description of Artificial Sequence: Synthetic oligonucleotide
  Target: LAMA2; (+) strand; PAM type: NNGRRT; PAM sequence: GTGGGT
cactgagctaaagtccaggt

SEQ ID NO: 27876 - DNA, 20 bp, Artificial Sequence
  Description of Artificial Sequence: Synthetic oligonucleotide
  Target: LAMA2; (+) strand; PAM type: NNGRRT; PAM sequence: TAGAAT
tctttctggaggctctaagg

SEQ ID NO: 27877 - DNA, 20 bp, Artificial Sequence
  Description of Artificial Sequence: Synthetic oligonucleotide
  Target: LAMA2; (+) strand; PAM type: NNGRRT; PAM sequence: TAGGAT
ttttctaaaattcattcatt

SEQ ID NO: 27878 - DNA, 20 bp, Artificial Sequence
  Description of Artificial Sequence: Synthetic oligonucleotide
  Target: LAMA2; (+) strand; PAM type: NNGRRT; PAM sequence: AAGAAT
tcatttaggatagaagctga

SEQ ID NO: 27879 - DNA, 20 bp, Artificial Sequence
  Description of Artificial Sequence: Synthetic oligonucleotide
  Target: LAMA2; (+) strand; PAM type: NNGRRT; PAM sequence: TTGAAT
tcttcaaagccaggaacagg

SEQ ID NO: 27880 - DNA, 20 bp, Artificial Sequence
  Description of Artificial Sequence: Synthetic oligonucleotide
  Target: LAMA2; (+) strand; PAM type: NNGRRT; PAM sequence: GTGGAT
ttatgattacattgagccca

SEQ ID NO: 27881 - DNA, 20 bp, Artificial Sequence
  Description of Artificial Sequence: Synthetic oligonucleotide
  Target: LAMA2; (+) strand; PAM type: NNGRRT; PAM sequence: CAGGGT
attgagcccagtggattatc

SEQ ID NO: 27882 - DNA, 20 bp, Artificial Sequence
  Description of Artificial Sequence: Synthetic oligonucleotide
  Target: LAMA2; (+) strand; PAM type: NNGRRT; PAM sequence: CTGAAT
tttcatctcaaggtctttaa

SEQ ID NO: 27883 - DNA, 20 bp, Artificial Sequence
  Description of Artificial Sequence: Synthetic oligonucleotide
  Target: LAMA2; (+) strand; PAM type: NNGRRT; PAM sequence: AAGGGT
aaagttccctttgccataaa

SEQ ID NO: 27884 - DNA, 20 bp, Artificial Sequence
  Description of Artificial Sequence: Synthetic oligonucleotide
  Target: LAMA2; (+) strand; PAM type: NNGRRT; PAM sequence: AAGAAT
gggtcatattcacaggttcc

SEQ ID NO: 27885 - DNA, 20 bp, Artificial Sequence
  Description of Artificial Sequence: Synthetic oligonucleotide
  Target: LAMA2; (+) strand; PAM type: NNGRRT; PAM sequence: TAGAGT
atcagttactacctgtctct

SEQ ID NO: 27886 - DNA, 20 bp, Artificial Sequence
  Description of Artificial Sequence: Synthetic oligonucleotide
  Target: LAMA2; (+) strand; PAM type: NNGRRT; PAM sequence: AGGAAT
tccccaagggaaagattatt

SEQ ID NO: 27887 - DNA, 20 bp, Artificial Sequence
  Description of Artificial Sequence: Synthetic oligonucleotide
  Target: LAMA2; (+) strand; PAM type: NNGRRT; PAM sequence: AGGGGT
cacagcaggggcgcacatac

SEQ ID NO: 27888 - DNA, 20 bp, Artificial Sequence
  Description of Artificial Sequence: Synthetic oligonucleotide
  Target: LAMA2; (+) strand; PAM type: NNGRRT; PAM sequence: AAGGAT
tctgtggacactttaaagat

SEQ ID NO: 27889 - DNA, 20 bp, Artificial Sequence
  Description of Artificial Sequence: Synthetic oligonucleotide
  Target: LAMA2; (+) strand; PAM type: NNGRRT; PAM sequence: CTGAAT
ataaggatgatggagaaaga

SEQ ID NO: 27890 - DNA, 20 bp, Artificial Sequence
  Description of Artificial Sequence: Synthetic oligonucleotide
  Target: LAMA2; (+) strand; PAM type: NNGRRT; PAM sequence: GAGAGT
agcaggttataataactcct

SEQ ID NO: 27891 - DNA, 20 bp, Artificial Sequence
  Description of Artificial Sequence: Synthetic oligonucleotide
  Target: LAMA2; (+) strand; PAM type: NNGRRT; PAM sequence: TAGGGT
actcctgagagtgattgtaa

SEQ ID NO: 27892 - DNA, 20 bp, Artificial Sequence
  Description of Artificial Sequence: Synthetic oligonucleotide
  Target: LAMA2; (+) strand; PAM type: NNGRRT; PAM sequence: AGGGAT
taggtcatgcatggactaca

SEQ ID NO: 27893 - DNA, 20 bp, Artificial Sequence
  Description of Artificial Sequence: Synthetic oligonucleotide
  Target: LAMA2; (+) strand; PAM type: NNGRRT; PAM sequence: AGGAGT
tacaagggatcaagtagaaa

SEQ ID NO: 27894 - DNA, 20 bp, Artificial Sequence
  Description of Artificial Sequence: Synthetic oligonucleotide
  Target: LAMA2; (+) strand; PAM type: NNGRRT; PAM sequence: GAGGGT
tggtaaagtagtaaacagca

SEQ ID NO: 27895 - DNA, 20 bp, Artificial Sequence
  Description of Artificial Sequence: Synthetic oligonucleotide
  Target: LAMA2; (+) strand; PAM type: NNGRRT; PAM sequence: AAGGAT
tcttaagaaagtccctagag

SEQ ID NO: 27896 - DNA, 20 bp, Artificial Sequence
  Description of Artificial Sequence: Synthetic oligonucleotide
  Target: LAMA2; (+) strand; PAM type: NNGRRT; PAM sequence: TTGGGT
attttttttattaatcattc

SEQ ID NO: 27897 - DNA, 20 bp, Artificial Sequence
  Description of Artificial Sequence: Synthetic oligonucleotide
  Target: LAMA2; (+) strand; PAM type: NNGRRT; PAM sequence: GGGGAT
cttgggtgtttctcacagag

SEQ ID NO: 27898 - DNA, 20 bp, Artificial Sequence
  Description of Artificial Sequence: Synthetic oligonucleotide
  Target: LAMA2; (+) strand; PAM type: NNGRRT; PAM sequence: CAGGGT
tctcacagagggggatttgg

SEQ ID NO: 27899 - DNA, 20 bp, Artificial Sequence
  Description of Artificial Sequence: Synthetic oligonucleotide
  Target: LAMA2; (+) strand; PAM type: NNGRRT; PAM sequence: CTGGGT
cttccgccgtgtttgtgtcc

SEQ ID NO: 27900 - DNA, 20 bp, Artificial Sequence
  Description of Artificial Sequence: Synthetic oligonucleotide
  Target: LAMA2; (+) strand; PAM type: NNGRRT; PAM sequence: GGGAGT
tccctgggtacttgagatca

SEQ ID NO: 27901 - DNA, 20 bp, Artificial Sequence
  Description of Artificial Sequence: Synthetic oligonucleotide
  Target: LAMA2; (+) strand; PAM type: NNGRRT; PAM sequence: CTGAGT
cgcccttaatccattcaacc

SEQ ID NO: 27902 - DNA, 20 bp, Artificial Sequence
  Description of Artificial Sequence: Synthetic oligonucleotide
  Target: LAMA2; (+) strand; PAM type: NNGRRT; PAM sequence: CGGGGT
agcacatgtttcagagagca

SEQ ID NO: 27903 - DNA, 20 bp, Artificial Sequence
  Description of Artificial Sequence: Synthetic oligonucleotide
  Target: LAMA2; (+) strand; PAM type: NNGRRT; PAM sequence: GGGAGT
gtttcagagagcacggggtt

SEQ ID NO: 27904 - DNA, 20 bp, Artificial Sequence
  Description of Artificial Sequence: Synthetic oligonucleotide
  Target: LAMA2; (+) strand; PAM type: NNGRRT; PAM sequence: AAGAAT
tcaacagcatcccaaggcag

SEQ ID NO: 27905 - DNA, 20 bp, Artificial Sequence
  Description of Artificial Sequence: Synthetic oligonucleotide
  Target: LAMA2; (+) strand; PAM type: NNGRRT; PAM sequence: TGGAGT
tttcttagtacagaacaaaa

SEQ ID NO: 27906 - DNA, 20 bp, Artificial Sequence
  Description of Artificial Sequence: Synthetic oligonucleotide
  Target: LAMA2; (+) strand; PAM type: NNGRRT; PAM sequence: CTGGGT
ggcccgttctcaatgagctg

SEQ ID NO: 27907 - DNA, 20 bp, Artificial Sequence
  Description of Artificial Sequence: Synthetic oligonucleotide
  Target: LAMA2; (+) strand; PAM type: NNGRRT; PAM sequence: TGGGGT
tgctgggtacacctcccaga

SEQ ID NO: 27908 - DNA, 20 bp, Artificial Sequence
  Description of Artificial Sequence: Synthetic oligonucleotide
  Target: LAMA2; (+) strand; PAM type: NNGRRT; PAM sequence: AGGGGT
ggggctcctcacttcccaga

SEQ ID NO: 27909 - DNA, 20 bp, Artificial Sequence
  Description of Artificial Sequence: Synthetic oligonucleotide
  Target: LAMA2; (+) strand; PAM type: NNGRRT; PAM sequence: CGGGGT
ccccccacctccctcccaga

SEQ ID NO: 27910 - DNA, 20 bp, Artificial Sequence
  Description of Artificial Sequence: Synthetic oligonucleotide
  Target: LAMA2; (+) strand; PAM type: NNGRRT; PAM sequence: CAGGGT
ctcctggacggggcggctgg

SEQ ID NO: 27911 - DNA, 20 bp, Artificial Sequence
  Description of Artificial Sequence: Synthetic oligonucleotide
  Target: LAMA2; (+) strand; PAM type: NNGRRT; PAM sequence: CGGGGT
gcccccacctccctcccgga

SEQ ID NO: 27912 - DNA, 20 bp, Artificial Sequence
  Description of Artificial Sequence: Synthetic oligonucleotide
  Target: LAMA2; (+) strand; PAM type: NNGRRT; PAM sequence: TGGGGT
gacgctcctcacttcccaga

SEQ ID NO: 27913 - DNA, 20 bp, Artificial Sequence
  Description of Artificial Sequence: Synthetic oligonucleotide
  Target: LAMA2; (+) strand; PAM type: NNGRRT; PAM sequence: AGGGGT
acggggcggctgccgggcgg

SEQ ID NO: 27914 - DNA, 20 bp, Artificial Sequence
  Description of Artificial Sequence: Synthetic oligonucleotide
  Target: LAMA2; (+) strand; PAM type: NNGRRT; PAM sequence: CGGGAT
gacgctcctcacttcctaga

SEQ ID NO: 27915 - DNA, 20 bp, Artificial Sequence
  Description of Artificial Sequence: Synthetic oligonucleotide
  Target: LAMA2; (+) strand; PAM type: NNGRRT; PAM sequence: CTGGGT
ggcactcctcacttcccaga

SEQ ID NO: 27916 - DNA, 20 bp, Artificial Sequence
  Description of Artificial Sequence: Synthetic oligonucleotide
  Target: LAMA2; (+) strand; PAM type: NNGRRT; PAM sequence: CGGGGT
gacgctcctcacttcccaga

SEQ ID NO: 27917 - DNA, 20 bp, Artificial Sequence
  Description of Artificial Sequence: Synthetic oligonucleotide
  Target: LAMA2; (+) strand; PAM type: NNGRRT; PAM sequence: CTGAGT
agcctgggcaacattgagca

SEQ ID NO: 27918 - DNA, 20 bp, Artificial Sequence
  Description of Artificial Sequence: Synthetic oligonucleotide
  Target: LAMA2; (+) strand; PAM type: NNGRRT; PAM sequence: AAGAAT
aagtgactctgatctgttga

SEQ ID NO: 27919 - DNA, 20 bp, Artificial Sequence
  Description of Artificial Sequence: Synthetic oligonucleotide
  Target: LAMA2; (+) strand; PAM type: NNGRRT; PAM sequence: TAGAGT
agtccccaaatgctttgaac

SEQ ID NO: 27920 - DNA, 20 bp, Artificial Sequence
  Description of Artificial Sequence: Synthetic oligonucleotide
  Target: LAMA2; (+) strand; PAM type: NNGRRT; PAM sequence: GAGAAT
gtgtgtaatgtcataaattg

SEQ ID NO: 27921 - DNA, 20 bp, Artificial Sequence
  Description of Artificial Sequence: Synthetic oligonucleotide
  Target: LAMA2; (+) strand; PAM type: NNGRRT; PAM sequence: CAGGGT
ggcaatgccaggtatttctc

SEQ ID NO: 27922 - DNA, 20 bp, Artificial Sequence
  Description of Artificial Sequence: Synthetic oligonucleotide
  Target: LAMA2; (+) strand; PAM type: NNGRRT; PAM sequence: GTGAAT
atgccaggtatttctccagg

SEQ ID NO: 27923 - DNA, 20 bp, Artificial Sequence
  Description of Artificial Sequence: Synthetic oligonucleotide
  Target: LAMA2; (+) strand; PAM type: NNGRRT; PAM sequence: GAGAAT
gagagaaaaatatgtgagaa

SEQ ID NO: 27924 - DNA, 20 bp, Artificial Sequence
  Description of Artificial Sequence: Synthetic oligonucleotide
  Target: LAMA2; (+) strand; PAM type: NNGRRT; PAM sequence: AAGGGT
gtgagaagagaatagatgtc

SEQ ID NO: 27925 - DNA, 20 bp, Artificial Sequence
  Description of Artificial Sequence: Synthetic oligonucleotide
  Target: LAMA2; (+) strand; PAM type: NNGRRT; PAM sequence: CTGGGT
aagacaaggaaaatgcttgc

SEQ ID NO: 27926 - DNA, 20 bp, Artificial Sequence
  Description of Artificial Sequence: Synthetic oligonucleotide
  Target: LAMA2; (+) strand; PAM type: NNGRRT; PAM sequence: AAGAAT
agagctgataattaatttga

SEQ ID NO: 27927 - DNA, 20 bp, Artificial Sequence
  Description of Artificial Sequence: Synthetic oligonucleotide
  Target: LAMA2; (+) strand; PAM type: NNGRRT; PAM sequence: AAGAAT
taaagcatatttcttgagct

SEQ ID NO: 27928 - DNA, 20 bp, Artificial Sequence
  Description of Artificial Sequence: Synthetic oligonucleotide
  Target: LAMA2; (+) strand; PAM type: NNGRRT; PAM sequence: CAGAGT
agtgtattcacagtaagagg

SEQ ID NO: 27929 - DNA, 20 bp, Artificial Sequence
  Description of Artificial Sequence: Synthetic oligonucleotide
  Target: LAMA2; (+) strand; PAM type: NNGRRT; PAM sequence: GGGAAT
agtaatattattatgtgaaa

SEQ ID NO: 27930 - DNA, 20 bp, Artificial Sequence
  Description of Artificial Sequence: Synthetic oligonucleotide
  Target: LAMA2; (+) strand; PAM type: NNGRRT; PAM sequence: GAGAAT
caaatatacacaaaagtata

SEQ ID NO: 27931 - DNA, 20 bp, Artificial Sequence
  Description of Artificial Sequence: Synthetic oligonucleotide
  Target: LAMA2; (+) strand; PAM type: NNGRRT; PAM sequence: AAGGAT
tacttcattatgtatctctg

SEQ ID NO: 27932 - DNA, 20 bp, Artificial Sequence
  Description of Artificial Sequence: Synthetic oligonucleotide
  Target: LAMA2; (+) strand; PAM type: NNGRRT; PAM sequence: TTGAAT
tccaagttttttaaaaacag

SEQ ID NO: 27933 - DNA, 20 bp, Artificial Sequence
  Description of Artificial Sequence: Synthetic oligonucleotide
  Target: LAMA2; (+) strand; PAM type: NNGRRT; PAM sequence: CAGGAT
ttttttaaaaacagttgaat

SEQ ID NO: 27934 - DNA, 20 bp, Artificial Sequence
  Description of Artificial Sequence: Synthetic oligonucleotide
  Target: LAMA2; (+) strand; PAM type: NNGRRT; PAM sequence: TAGGGT
acatcctgcattttgctact

SEQ ID NO: 27935 - DNA, 20 bp, Artificial Sequence
  Description of Artificial Sequence: Synthetic oligonucleotide
  Target: LAMA2; (+) strand; PAM type: NNGRRT; PAM sequence: GAGAGT
aaaactgatagataaattta

SEQ ID NO: 27936 - DNA, 20 bp, Artificial Sequence
  Description of Artificial Sequence: Synthetic oligonucleotide
  Target: LAMA2; (+) strand; PAM type: NNGRRT; PAM sequence: CAGGGT
tttagagagttactctgatt

SEQ ID NO: 27937 - DNA, 20 bp, Artificial Sequence
  Description of Artificial Sequence: Synthetic oligonucleotide
  Target: LAMA2; (+) strand; PAM type: NNGRRT; PAM sequence: CTGGGT
catcacactgcagaaaatat

SEQ ID NO: 27938 - DNA, 20 bp, Artificial Sequence
  Description of Artificial Sequence: Synthetic oligonucleotide
  Target: LAMA2; (+) strand; PAM type: NNGRRT; PAM sequence: GGGGAT
tatctgggtgtctctttttt

SEQ ID NO: 27939 - DNA, 20 bp, Artificial Sequence
  Description of Artificial Sequence: Synthetic oligonucleotide
  Target: LAMA2; (+) strand; PAM type: NNGRRT; PAM sequence: CAGGGT
cattcattgctcttccatct

SEQ ID NO: 27940 - DNA, 20 bp, Artificial Sequence
  Description of Artificial Sequence: Synthetic oligonucleotide
  Target: LAMA2; (+) strand; PAM type: NNGRRT; PAM sequence: CAGAGT
ctttgagatttgcttttttg

SEQ ID NO: 27941 - DNA, 20 bp, Artificial Sequence
  Description of Artificial Sequence: Synthetic oligonucleotide
  Target: LAMA2; (+) strand; PAM type: NNGRRT; PAM sequence: AAGAGT
ccttcaaatactgtcccttg

SEQ ID NO: 27942 - DNA, 20 bp, Artificial Sequence
  Description of Artificial Sequence: Synthetic oligonucleotide
  Target: LAMA2; (+) strand; PAM type: NNGRRT; PAM sequence: AGGAAT
ccagttagattattattatt

SEQ ID NO: 27943 - DNA, 20 bp, Artificial Sequence
  Description of Artificial Sequence: Synthetic oligonucleotide
  Target: LAMA2; (+) strand; PAM type: NNGRRT; PAM sequence: TGGAAT
tattaggaattctgaggtgg

SEQ ID NO: 27944 - DNA, 20 bp, Artificial Sequence
  Description of Artificial Sequence: Synthetic oligonucleotide
  Target: LAMA2; (+) strand; PAM type: NNGRRT; PAM sequence: ATGAGT
ttccaatgtgttaacttctc

SEQ ID NO: 27945 - DNA, 20 bp, Artificial Sequence
  Description of Artificial Sequence: Synthetic oligonucleotide
  Target: LAMA2; (+) strand; PAM type: NNGRRT; PAM sequence: GTGAGT
taacttctcatgagtttaat

SEQ ID NO: 27946 - DNA, 20 bp, Artificial Sequence
  Description of Artificial Sequence: Synthetic oligonucleotide
  Target: LAMA2; (+) strand; PAM type: NNGRRT; PAM sequence: CAGAGT
aagtctgttttaactgaggg

SEQ ID NO: 27947 - DNA, 20 bp, Artificial Sequence
  Description of Artificial Sequence: Synthetic oligonucleotide
  Target: LAMA2; (+) strand; PAM type: NNGRRT; PAM sequence: AGGAAT
gtttgcttacctgcaacttc

SEQ ID NO: 27948 - DNA, 20 bp, Artificial Sequence
  Description of Artificial Sequence: Synthetic oligonucleotide
  Target: LAMA2; (+) strand; PAM type: NNGRRT; PAM sequence: GGGGGT
taattgcagtacacacttgt

SEQ ID NO: 27949 - DNA, 20 bp, Artificial Sequence
  Description of Artificial Sequence: Synthetic oligonucleotide
  Target: LAMA2; (+) strand; PAM type: NNGRRT; PAM sequence: AGGGGT
cagtacacacttgtgggggt

SEQ ID NO: 27950 - DNA, 20 bp, Artificial Sequence
  Description of Artificial Sequence: Synthetic oligonucleotide
  Target: LAMA2; (+) strand; PAM type: NNGRRT; PAM sequence: TTGGAT
gtgggggtaggggtaggagg

SEQ ID NO: 27951 - DNA, 20 bp, Artificial Sequence
  Description of Artificial Sequence: Synthetic oligonucleotide
  Target: LAMA2; (+) strand; PAM type: NNGRRT; PAM sequence: GTGGGT
aggggtaggaggttggataa

SEQ ID NO: 27952 - DNA, 20 bp, Artificial Sequence
  Description of Artificial Sequence: Synthetic oligonucleotide
  Target: LAMA2; (+) strand; PAM type: NNGRRT; PAM sequence: ATGGGT
tttacctgaagatagaaaat

SEQ ID NO: 27953 - DNA, 20 bp, Artificial Sequence
  Description of Artificial Sequence: Synthetic oligonucleotide
  Target: LAMA2; (+) strand; PAM type: NNGRRT; PAM sequence: CAGAAT
aagtccacttatagcattgt

SEQ ID NO: 27954 - DNA, 20 bp, Artificial Sequence
  Description of Artificial Sequence: Synthetic oligonucleotide
  Target: LAMA2; (+) strand; PAM type: NNGRRT; PAM sequence: GGGAAT
tctgtataagtatctcttca

SEQ ID NO: 27955 - DNA, 20 bp, Artificial Sequence
  Description of Artificial Sequence: Synthetic oligonucleotide
  Target: LAMA2; (+) strand; PAM type: NNGRRT; PAM sequence: GAGAGT
cttcagggaatttttaagat

SEQ ID NO: 27956 - DNA, 20 bp, Artificial Sequence
  Description of Artificial Sequence: Synthetic oligonucleotide
  Target: LAMA2; (+) strand; PAM type: NNGRRT; PAM sequence: GGGGAT
aggttctatgtggcttaggt

SEQ ID NO: 27957 - DNA, 20 bp, Artificial Sequence
  Description of Artificial Sequence: Synthetic oligonucleotide
  Target: LAMA2; (+) strand; PAM type: NNGRRT; PAM sequence: TTGAGT
gcttaggtggggatggggct

SEQ ID NO: 27958 - DNA, 20 bp, Artificial Sequence
  Description of Artificial Sequence: Synthetic oligonucleotide
  Target: LAMA2; (+) strand; PAM type: NNGRRT; PAM sequence: GTGAAT
aggtggggatggggctttga

SEQ ID NO: 27959 - DNA, 20 bp, Artificial Sequence
  Description of Artificial Sequence: Synthetic oligonucleotide
  Target: LAMA2; (+) strand; PAM type: NNGRRT; PAM sequence: ATGGGT
aagattcccagattattcca

SEQ ID NO: 27960 - DNA, 20 bp, Artificial Sequence
  Description of Artificial Sequence: Synthetic oligonucleotide
  Target: LAMA2; (+) strand; PAM type: NNGRRT; PAM sequence: TTGGAT
atgaaagccaccgttcctat

SEQ ID NO: 27961 - DNA, 20 bp, Artificial Sequence
  Description of Artificial Sequence: Synthetic oligonucleotide
  Target: LAMA2; (+) strand; PAM type: NNGRRT; PAM sequence: GAGAAT
gttcctatttggataaataa

SEQ ID NO: 27962 - DNA, 20 bp, Artificial Sequence
  Description of Artificial Sequence: Synthetic oligonucleotide
  Target: LAMA2; (+) strand; PAM type: NNGRRT; PAM sequence: GAGAGT
aaaaacgcactattagaact

SEQ ID NO: 27963 - DNA, 20 bp, Artificial Sequence
  Description of Artificial Sequence: Synthetic oligonucleotide
  Target: LAMA2; (+) strand; PAM type: NNGRRT; PAM sequence: AGGAGT
catgcacatcaatttgctat

SEQ ID NO: 27964 - DNA, 20 bp, Artificial Sequence
  Description of Artificial Sequence: Synthetic oligonucleotide
  Target: LAMA2; (+) strand; PAM type: NNGRRT; PAM sequence: AAGAAT
gttctcttgagagattaaga

SEQ ID NO: 27965 - DNA, 20 bp, Artificial Sequence
  Description of Artificial Sequence: Synthetic oligonucleotide
  Target: LAMA2; (+) strand; PAM type: NNGRRT; PAM sequence: GAGAGT
ttaagaaagaataaatagaa

SEQ ID NO: 27966 - DNA, 20 bp, Artificial Sequence
  Description of Artificial Sequence: Synthetic oligonucleotide
  Target: LAMA2; (+) strand; PAM type: NNGRRT; PAM sequence: AAGGAT
agtaagtcaggtcctatgag

SEQ ID NO: 27967 - DNA, 20 bp, Artificial Sequence
  Description of Artificial Sequence: Synthetic oligonucleotide
  Target: LAMA2; (+) strand; PAM type: NNGRRT; PAM sequence: GAGAGT
ataaagcattgtcttccata

SEQ ID NO: 27968 - DNA, 20 bp, Artificial Sequence
  Description of Artificial Sequence: Synthetic oligonucleotide
  Target: LAMA2; (+) strand; PAM type: NNGRRT; PAM sequence: CAGAAT
atggccttattacatcatta

SEQ ID NO: 27969 - DNA, 20 bp, Artificial Sequence
  Description of Artificial Sequence: Synthetic oligonucleotide
  Target: LAMA2; (+) strand; PAM type: NNGRRT; PAM sequence: CTGGGT
attacagaatcacactttgg

SEQ ID NO: 27970 - DNA, 20 bp, Artificial Sequence
  Description of Artificial Sequence: Synthetic oligonucleotide
  Target: LAMA2; (+) strand; PAM type: NNGRRT; PAM sequence: AAGGAT
ttgtgattcttctggggaca

SEQ ID NO: 27971 - DNA, 20 bp, Artificial Sequence
  Description of Artificial Sequence: Synthetic oligonucleotide
  Target: LAMA2; (+) strand; PAM type: NNGRRT; PAM sequence: TGGGAT
tcttctggggacaaaggatc

SEQ ID NO: 27972 - DNA, 20 bp, Artificial Sequence
  Description of Artificial Sequence: Synthetic oligonucleotide
  Target: LAMA2; (+) strand; PAM type: NNGRRT; PAM sequence: ATGGGT
gacaaaggatctgggataca

SEQ ID NO: 27973 - DNA, 20 bp, Artificial Sequence
  Description of Artificial Sequence: Synthetic oligonucleotide
  Target: LAMA2; (+) strand; PAM type: NNGRRT; PAM sequence: CCGAGT
atctgggatacaatgggttc

SEQ ID NO: 27974 - DNA, 20 bp, Artificial Sequence
  Description of Artificial Sequence: Synthetic oligonucleotide
  Target: LAMA2; (+) strand; PAM type: NNGRRT; PAM sequence: CGGAGT
gattctcctgcctcagcttc

SEQ ID NO: 27975 - DNA, 20 bp, Artificial Sequence
  Description of Artificial Sequence: Synthetic oligonucleotide
  Target: LAMA2; (+) strand; PAM type: NNGRRT; PAM sequence: TGGGAT
gcctcagcttccggagtagc

SEQ ID NO: 27976 - DNA, 20 bp, Artificial Sequence
  Description of Artificial Sequence: Synthetic oligonucleotide
  Target: LAMA2; (+) strand; PAM type: NNGRRT; PAM sequence: CGGAGT
tttgtattttttagtagaga

SEQ ID NO: 27977 - DNA, 20 bp, Artificial Sequence
  Description of Artificial Sequence: Synthetic oligonucleotide
  Target: LAMA2; (+) strand; PAM type: NNGRRT; PAM sequence: TGGGAT
gccccagcctcccaaagtgc

SEQ ID NO: 27978 - DNA, 20 bp, Artificial Sequence
  Description of Artificial Sequence: Synthetic oligonucleotide
  Target: LAMA2; (+) strand; PAM type: NNGRRT; PAM sequence: GAGGAT
gtgagccaccgtgcccggcc

SEQ ID NO: 27979 - DNA, 20 bp, Artificial Sequence
  Description of Artificial Sequence: Synthetic oligonucleotide
  Target: LAMA2; (+) strand; PAM type: NNGRRT; PAM sequence: ATGGGT
ggttttcagacttaactaac

SEQ ID NO: 27980 - DNA, 20 bp, Artificial Sequence
  Description of Artificial Sequence: Synthetic oligonucleotide
  Target: LAMA2; (+) strand; PAM type: NNGRRT; PAM sequence: AAGGGT
taagatattaagctgcaggg

SEQ ID NO: 27981 - DNA, 20 bp, Artificial Sequence
  Description of Artificial Sequence: Synthetic oligonucleotide
  Target: LAMA2; (+) strand; PAM type: NNGRRT; PAM sequence: TAGAGT
ttaagctgcagggaagggtc

SEQ ID NO: 27982 - DNA, 20 bp, Artificial Sequence
  Description of Artificial Sequence: Synthetic oligonucleotide
  Target: LAMA2; (+) strand; PAM type: NNGRRT; PAM sequence: TAGAGT
agggaagggtctagagtagc

SEQ ID NO: 27983 - DNA, 20 bp, Artificial Sequence
  Description of Artificial Sequence: Synthetic oligonucleotide
  Target: LAMA2; (+) strand; PAM type: NNGRRT; PAM sequence: AAGGAT
tgcttattattttgagacta

SEQ ID NO: 27984 - DNA, 20 bp, Artificial Sequence
  Description of Artificial Sequence: Synthetic oligonucleotide
  Target: LAMA2; (+) strand; PAM type: NNGRRT; PAM sequence: ATGAGT
ttttgttaggtgacatgcaa

SEQ ID NO: 27985 - DNA, 20 bp, Artificial Sequence
  Description of Artificial Sequence: Synthetic oligonucleotide
  Target: LAMA2; (+) strand; PAM type: NNGRRT; PAM sequence: TGGAAT
acatgcaaatgagtaacaaa

SEQ ID NO: 27986 - DNA, 20 bp, Artificial Sequence
  Description of Artificial Sequence: Synthetic oligonucleotide
  Target: LAMA2; (+) strand; PAM type: NNGRRT; PAM sequence: TGGGAT
atattgtttttaaagttatt

SEQ ID NO: 27987 - DNA, 20 bp, Artificial Sequence
  Description of Artificial Sequence: Synthetic oligonucleotide
  Target: LAMA2; (+) strand; PAM type: NNGRRT; PAM sequence: TTGGAT
cccttcaacagaaaagacac

SEQ ID NO: 27988 - DNA, 20 bp, Artificial Sequence
  Description of Artificial Sequence: Synthetic oligonucleotide
  Target: LAMA2; (+) strand; PAM type: NNGRRT; PAM sequence: GGGAGT
cattttaatacttactagtg

SEQ ID NO: 27989 - DNA, 20 bp, Artificial Sequence
  Description of Artificial Sequence: Synthetic oligonucleotide
  Target: LAMA2; (+) strand; PAM type: NNGRRT; PAM sequence: TGGGGT
tgctgcacaccagaacagac

SEQ ID NO: 27990 - DNA, 20 bp, Artificial Sequence
  Description of Artificial Sequence: Synthetic oligonucleotide
  Target: LAMA2; (+) strand; PAM type: NNGRRT; PAM sequence: GGGGGT
acaccagaacagactggggt

SEQ ID NO: 27991 - DNA, 20 bp, Artificial Sequence
  Description of Artificial Sequence: Synthetic oligonucleotide
  Target: LAMA2; (+) strand; PAM type: NNGRRT; PAM sequence: AAGAGT
tattataactactgattttg

SEQ ID NO: 27992 - DNA, 20 bp, Artificial Sequence
  Description of Artificial Sequence: Synthetic oligonucleotide
  Target: LAMA2; (+) strand; PAM type: NNGRRT; PAM sequence: GAGAGT
aagtagcatagaaaacatta

SEQ ID NO: 27993 - DNA, 20 bp, Artificial Sequence
  Description of Artificial Sequence: Synthetic oligonucleotide
  Target: LAMA2; (+) strand; PAM type: NNGRRT; PAM sequence: TGGAGT
tattagggccattaaatatt

SEQ ID NO: 27994 - DNA, 20 bp, Artificial Sequence
  Description of Artificial Sequence: Synthetic oligonucleotide
  Target: LAMA2; (+) strand; PAM type: NNGRRT; PAM sequence: AAGAAT
gttactctctgaagcctgct

SEQ ID NO: 27995 - DNA, 20 bp, Artificial Sequence
  Description of Artificial Sequence: Synthetic oligonucleotide
  Target: LAMA2; (+) strand; PAM type: NNGRRT; PAM sequence: TGGAAT
caaatttaattaattttgca

SEQ ID NO: 27996 - DNA, 20 bp, Artificial Sequence
  Description of Artificial Sequence: Synthetic oligonucleotide
  Target: LAMA2; (+) strand; PAM type: NNGRRT; PAM sequence: AGGGAT
ccatagaaaataaatgaaag

SEQ ID NO: 27997 - DNA, 20 bp, Artificial Sequence
  Description of Artificial Sequence: Synthetic oligonucleotide
  Target: LAMA2; (+) strand; PAM type: NNGRRT; PAM sequence: TTGAAT
tgtcactgctggcagttatg

SEQ ID NO: 27998 - DNA, 20 bp, Artificial Sequence
  Description of Artificial Sequence: Synthetic oligonucleotide
  Target: LAMA2; (+) strand; PAM type: NNGRRT; PAM sequence: AAGAGT
cagttatgttgaattataga

SEQ ID NO: 27999 - DNA, 20 bp, Artificial Sequence
  Description of Artificial Sequence: Synthetic oligonucleotide
  Target: LAMA2; (+) strand; PAM type: NNGRRT; PAM sequence: TGGGGT
tgaattatagaaagagtctg

SEQ ID NO: 28000 - DNA, 20 bp, Artificial Sequence
  Description of Artificial Sequence: Synthetic oligonucleotide
  Target: LAMA2; (+) strand; PAM type: NNGRRT; PAM sequence: GTGGAT
ctctagtagaacttctcttc

SEQ ID NO: 28001 - DNA, 20 bp, Artificial Sequence
  Description of Artificial Sequence: Synthetic oligonucleotide
  Target: LAMA2; (+) strand; PAM type: NNGRRT; PAM sequence: GTGGGT
gtgtagtcttatttttctta

SEQ ID NO: 28002 - DNA, 20 bp, Artificial Sequence
  Description of Artificial Sequence: Synthetic oligonucleotide
  Target: LAMA2; (+) strand; PAM type: NNGRRT; PAM sequence: TGGAAT
tggaaggaaacaggctcact

SEQ ID NO: 28003 - DNA, 20 bp, Artificial Sequence
  Description of Artificial Sequence: Synthetic oligonucleotide
  Target: LAMA2; (+) strand; PAM type: NNGRRT; PAM sequence: ATGGAT
gtgtctttagaaaagaaaca

SEQ ID NO: 28004 - DNA, 20 bp, Artificial Sequence
  Description of Artificial Sequence: Synthetic oligonucleotide
  Target: LAMA2; (+) strand; PAM type: NNGRRT; PAM sequence: GAGGGT
aaaagaaacaatggataaca

SEQ ID NO: 28005 - DNA, 20 bp, Artificial Sequence
  Description of Artificial Sequence: Synthetic oligonucleotide
  Target: LAMA2; (+) strand; PAM type: NNGRRT; PAM sequence: AAGAGT
caatggataacagagggtaa

SEQ ID NO: 28006 - DNA, 20 bp, Artificial Sequence
  Description of Artificial Sequence: Synthetic oligonucleotide
  Target: LAMA2; (+) strand; PAM type: NNGRRT; PAM sequence: TGGGAT
agatgacaatatatgctaac

SEQ ID NO: 28007 - DNA, 20 bp, Artificial Sequence
  Description of Artificial Sequence: Synthetic oligonucleotide
  Target: LAMA2; (+) strand; PAM type: NNGRRT; PAM sequence: AAGAAT
tcaaatgcccaccatttcag

SEQ ID NO: 28008 - DNA, 20 bp, Artificial Sequence
  Description of Artificial Sequence: Synthetic oligonucleotide
  Target: LAMA2; (+) strand; PAM type: NNGRRT; PAM sequence: AGGAAT
atttcagaagaattataata

SEQ ID NO: 28009 - DNA, 20 bp, Artificial Sequence
  Description of Artificial Sequence: Synthetic oligonucleotide
  Target: LAMA2; (+) strand; PAM type: NNGRRT; PAM sequence: AAGAAT
acccatttctcatttgcctg

SEQ ID NO: 28010 - DNA, 20 bp, Artificial Sequence
  Description of Artificial Sequence: Synthetic oligonucleotide
  Target: LAMA2; (+) strand; PAM type: NNGRRT; PAM sequence: TAGGAT
catatacatttctgttacat

SEQ ID NO: 28011 - DNA, 20 bp, Artificial Sequence
  Description of Artificial Sequence: Synthetic oligonucleotide
  Target: LAMA2; (+) strand; PAM type: NNGRRT; PAM sequence: ATGGGT
attttttttcctaatgggac

SEQ ID NO: 28012 - DNA, 20 bp, Artificial Sequence
  Description of Artificial Sequence: Synthetic oligonucleotide
  Target: LAMA2; (+) strand; PAM type: NNGRRT; PAM sequence: ATGGGT
ttcctaatgggacatgggtt

SEQ ID NO: 28013 - DNA, 20 bp, Artificial Sequence
  Description of Artificial Sequence: Synthetic oligonucleotide
  Target: LAMA2; (+) strand; PAM type: NNGRRT; PAM sequence: GTGGAT
actttgtgaggctgaggcaa

SEQ ID NO: 28014 - DNA, 20 bp, Artificial Sequence
  Description of Artificial Sequence: Synthetic oligonucleotide
  Target: LAMA2; (+) strand; PAM type: NNGRRT; PAM sequence: AGGAGT
caagtggatcacctgaggtt

SEQ ID NO: 28015 - DNA, 20 bp, Artificial Sequence
  Description of Artificial Sequence: Synthetic oligonucleotide
  Target: LAMA2; (+) strand; PAM type: NNGRRT; PAM sequence: GAGAAT
tacttgggaggctgaggcag

SEQ ID NO: 28016 - DNA, 20 bp, Artificial Sequence
  Description of Artificial Sequence: Synthetic oligonucleotide
  Target: LAMA2; (+) strand; PAM type: NNGRRT; PAM sequence: AGGAAT
tatgattttaagaccttgtc

SEQ ID NO: 28017 - DNA, 20 bp, Artificial Sequence
  Description of Artificial Sequence: Synthetic oligonucleotide
  Target: LAMA2; (+) strand; PAM type: NNGRRT; PAM sequence: TGGGAT
agaccttgtcaggaatactt

SEQ ID NO: 28018 - DNA, 20 bp, Artificial Sequence
  Description of Artificial Sequence: Synthetic oligonucleotide
  Target: LAMA2; (+) strand; PAM type: NNGRRT; PAM sequence: TTGAAT
atccattggtatgtttcttg

SEQ ID NO: 28019 - DNA, 20 bp, Artificial Sequence
  Description of Artificial Sequence: Synthetic oligonucleotide
  Target: LAMA2; (+) strand; PAM type: NNGRRT; PAM sequence: ATGAGT
atataaagacattctacgtg

SEQ ID NO: 28020 - DNA, 20 bp, Artificial Sequence
  Description of Artificial Sequence: Synthetic oligonucleotide
  Target: LAMA2; (+) strand; PAM type: NNGRRT; PAM sequence: ATGAAT
tgtctaaaaaacaattcctt

SEQ ID NO: 28021 - DNA, 20 bp, Artificial Sequence
  Description of Artificial Sequence: Synthetic oligonucleotide
  Target: LAMA2; (+) strand; PAM type: NNGRRT; PAM sequence: CAGAAT
tgttcatacaaaaaatatag

SEQ ID NO: 28022 - DNA, 20 bp, Artificial Sequence
  Description of Artificial Sequence: Synthetic oligonucleotide
  Target: LAMA2; (+) strand; PAM type: NNGRRT; PAM sequence: CGGGAT
acaaaaaatatagcagaata

SEQ ID NO: 28023 - DNA, 20 bp, Artificial Sequence
  Description of Artificial Sequence: Synthetic oligonucleotide
  Target: LAMA2; (+) strand; PAM type: NNGRRT; PAM sequence: CAGAAT
tgcagtgatactcaataaaa

SEQ ID NO: 28024 - DNA, 20 bp, Artificial Sequence
  Description of Artificial Sequence: Synthetic oligonucleotide
  Target: LAMA2; (+) strand; PAM type: NNGRRT; PAM sequence: TGGGGT
cttggctgtccttgctatgc

SEQ ID NO: 28025 - DNA, 20 bp, Artificial Sequence
  Description of Artificial Sequence: Synthetic oligonucleotide
  Target: LAMA2; (+) strand; PAM type: NNGRRT; PAM sequence: ATGGGT
accctactttgactcattcg

SEQ ID NO: 28026 - DNA, 20 bp, Artificial Sequence
  Description of Artificial Sequence: Synthetic oligonucleotide
  Target: LAMA2; (+) strand; PAM type: NNGRRT; PAM sequence: AGGAAT
cattcaagtaaacatcttga

SEQ ID NO: 28027 - DNA, 20 bp, Artificial Sequence
  Description of Artificial Sequence: Synthetic oligonucleotide
  Target: LAMA2; (+) strand; PAM type: NNGRRT; PAM sequence: TAGGGT
tatttttaaatctagtccct

SEQ ID NO: 28028 - DNA, 20 bp, Artificial Sequence
  Description of Artificial Sequence: Synthetic oligonucleotide
  Target: LAMA2; (+) strand; PAM type: NNGRRT; PAM sequence: ATGAGT
tagatcctatacacgtatgc

SEQ ID NO: 28029 - DNA, 20 bp, Artificial Sequence
  Description of Artificial Sequence: Synthetic oligonucleotide
  Target: LAMA2; (+) strand; PAM type: NNGRRT; PAM sequence: CAGGAT
tgtttctagagcatcccttt

SEQ ID NO: 28030 - DNA, 20 bp, Artificial Sequence
  Description of Artificial Sequence: Synthetic oligonucleotide
  Target: LAMA2; (+) strand; PAM type: NNGRRT; PAM sequence: TGGAAT
tattaacaacacattgatgg

SEQ ID NO: 28031 - DNA, 20 bp, Artificial Sequence
  Description of Artificial Sequence: Synthetic oligonucleotide
  Target: LAMA2; (+) strand; PAM type: NNGRRT; PAM sequence: TAGAAT
atgcactaccacaaaacatc

SEQ ID NO: 28032 - DNA, 20 bp, Artificial Sequence
  Description of Artificial Sequence: Synthetic oligonucleotide
  Target: LAMA2; (+) strand; PAM type: NNGRRT; PAM sequence: TGGAAT
atccgttgtcttcataacac

SEQ ID NO: 28033 - DNA, 20 bp, Artificial Sequence
  Description of Artificial Sequence: Synthetic oligonucleotide
  Target: LAMA2; (+) strand; PAM type: NNGRRT; PAM sequence: GGGGAT
tcctccattattttctattt

SEQ ID NO: 28034 - DNA, 20 bp, Artificial Sequence
  Description of Artificial Sequence: Synthetic oligonucleotide
  Target: LAMA2; (+) strand; PAM type: NNGRRT; PAM sequence: AGGAAT
ttttctatttggggatgtaa

SEQ ID NO: 28035 - DNA, 20 bp, Artificial Sequence
  Description of Artificial Sequence: Synthetic oligonucleotide
  Target: LAMA2; (+) strand; PAM type: NNGRRT; PAM sequence: GAGGAT
taaaggaatggacatttatt

SEQ ID NO: 28036 - DNA, 20 bp, Artificial Sequence
  Description of Artificial Sequence: Synthetic oligonucleotide
  Target: LAMA2; (+) strand; PAM type: NNGRRT; PAM sequence: AGGAAT
tagaaccacaatctgaacat

SEQ ID NO: 28037 - DNA, 20 bp, Artificial Sequence
  Description of Artificial Sequence: Synthetic oligonucleotide
  Target: LAMA2; (+) strand; PAM type: NNGRRT; PAM sequence: GAGGAT
cctctaaatggcactttttt

SEQ ID NO: 28038 - DNA, 20 bp, Artificial Sequence
  Description of Artificial Sequence: Synthetic oligonucleotide
  Target: LAMA2; (+) strand; PAM type: NNGRRT; PAM sequence: GGGAAT
tatcaagcactattcacact

SEQ ID NO: 28039 - DNA, 20 bp, Artificial Sequence
  Description of Artificial Sequence: Synthetic oligonucleotide
  Target: LAMA2; (+) strand; PAM type: NNGRRT; PAM sequence: GTGAGT
acagtctttaacacagtaag

SEQ ID NO: 28040 - DNA, 20 bp, Artificial Sequence
  Description of Artificial Sequence: Synthetic oligonucleotide
  Target: LAMA2; (+) strand; PAM type: NNGRRT; PAM sequence: ATGAGT
catcaggtgaaatgttgcca

SEQ ID NO: 28041 - DNA, 20 bp, Artificial Sequence
  Description of Artificial Sequence: Synthetic oligonucleotide
  Target: LAMA2; (+) strand; PAM type: NNGRRT; PAM sequence: TAGAAT
cagagaacattataagatta

SEQ ID NO: 28042 - DNA, 20 bp, Artificial Sequence
  Description of Artificial Sequence: Synthetic oligonucleotide
  Target: LAMA2; (+) strand; PAM type: NNGRRT; PAM sequence: GAGAAT
tatatttgacataaaatgat

SEQ ID NO: 28043 - DNA, 20 bp, Artificial Sequence
  Description of Artificial Sequence: Synthetic oligonucleotide
  Target: LAMA2; (+) strand; PAM type: NNGRRT; PAM sequence: GGGAAT
ataaaatgatgagaatattt

SEQ ID NO: 28044 - DNA, 20 bp, Artificial Sequence
  Description of Artificial Sequence: Synthetic oligonucleotide
  Target: LAMA2; (+) strand; PAM type: NNGRRT; PAM sequence: CTGGAT
aactccccccggcctggaaa

SEQ ID NO: 28045 - DNA, 20 bp, Artificial Sequence
  Description of Artificial Sequence: Synthetic oligonucleotide
  Target: LAMA2; (+) strand; PAM type: NNGRRT; PAM sequence: TTGAAT
ggaacgctctcttgatgatg

SEQ ID NO: 28046 - DNA, 20 bp, Artificial Sequence
  Description of Artificial Sequence: Synthetic oligonucleotide
  Target: LAMA2; (+) strand; PAM type: NNGRRT; PAM sequence: CGGAGT
gtatcatgctgtgacagaca

SEQ ID NO: 28047 - DNA, 20 bp, Artificial Sequence
  Description of Artificial Sequence: Synthetic oligonucleotide
  Target: LAMA2; (+) strand; PAM type: NNGRRT; PAM sequence: CTGAAT
aataggcctgtcagaaagac

SEQ ID NO: 28048 - DNA, 20 bp, Artificial Sequence
  Description of Artificial Sequence: Synthetic oligonucleotide
  Target: LAMA2; (+) strand; PAM type: NNGRRT; PAM sequence: TAGGAT
atgtcagggagattttaaaa

SEQ ID NO: 28049 - DNA, 20 bp, Artificial Sequence
  Description of Artificial Sequence: Synthetic oligonucleotide
  Target: LAMA2; (+) strand; PAM type: NNGRRT; PAM sequence: ATGAGT
tttagcaaaagtacatttaa

SEQ ID NO: 28050 - DNA, 20 bp, Artificial Sequence
  Description of Artificial Sequence: Synthetic oligonucleotide
  Target: LAMA2; (+) strand; PAM type: NNGRRT; PAM sequence: TAGAAT
aaagaaaaacctgaggtgat

SEQ ID NO: 28051 - DNA, 20 bp, Artificial Sequence
  Description of Artificial Sequence: Synthetic oligonucleotide
  Target: LAMA2; (+) strand; PAM type: NNGRRT; PAM sequence: GAGGAT
aaagagactttctcaacaat

SEQ ID NO: 28052 - DNA, 20 bp, Artificial Sequence
  Description of Artificial Sequence: Synthetic oligonucleotide
  Target: LAMA2; (+) strand; PAM type: NNGRRT; PAM sequence: AAGGAT
aggattgctaatgattagag

SEQ ID NO: 28053 - DNA, 20 bp, Artificial Sequence
  Description of Artificial Sequence: Synthetic oligonucleotide
  Target: LAMA2; (+) strand; PAM type: NNGRRT; PAM sequence: TTGAGT
ccttaaaggtggccttacat

SEQ ID NO: 28054 - DNA, 20 bp, Artificial Sequence
  Description of Artificial Sequence: Synthetic oligonucleotide
  Target: LAMA2; (+) strand; PAM type: NNGRRT; PAM sequence: ATGAAT
tgaagatggagacaaaagaa

SEQ ID NO: 28055 - DNA, 20 bp, Artificial Sequence
  Description of Artificial Sequence: Synthetic oligonucleotide
  Target: LAMA2; (+) strand; PAM type: NNGRRT; PAM sequence: TGGGGT
gtcaccacatagggctacag

SEQ ID NO: 28056 - DNA, 20 bp, Artificial Sequence
  Description of Artificial Sequence: Synthetic oligonucleotide
  Target: LAMA2; (+) strand; PAM type: NNGRRT; PAM sequence: CTGGGT
gctacagtggggtttcttcc

SEQ ID NO: 28057 - DNA, 20 bp, Artificial Sequence
  Description of Artificial Sequence: Synthetic oligonucleotide
  Target: LAMA2; (+) strand; PAM type: NNGRRT; PAM sequence: AGGAAT
agtttcatcgcccataaatc

SEQ ID NO: 28058 - DNA, 20 bp, Artificial Sequence
  Description of Artificial Sequence: Synthetic oligonucleotide
  Target: LAMA2; (+) strand; PAM type: NNGRRT; PAM sequence: GAGGAT
ttacctcatataattgtcaa

SEQ ID NO: 28059 - DNA, 20 bp, Artificial Sequence
  Description of Artificial Sequence: Synthetic oligonucleotide
  Target: LAMA2; (+) strand; PAM type: NNGRRT; PAM sequence: TTGAAT
actttgacttagtgactctc

SEQ ID NO: 28060 - DNA, 20 bp, Artificial Sequence
  Description of Artificial Sequence: Synthetic oligonucleotide
  Target: LAMA2; (+) strand; PAM type: NNGRRT; PAM sequence: TAGGGT
catgcccaccccagccaatc

SEQ ID NO: 28061 - DNA, 20 bp, Artificial Sequence
  Description of Artificial Sequence: Synthetic oligonucleotide
  Target: LAMA2; (+) strand; PAM type: NNGRRT; PAM sequence: TAGGGT
tcaacacttctagggaaaat

SEQ ID NO: 28062 - DNA, 20 bp, Artificial Sequence
  Description of Artificial Sequence: Synthetic oligonucleotide
  Target: LAMA2; (+) strand; PAM type: NNGRRT; PAM sequence: GTGAGT
atgacaaggactcaaatgca

SEQ ID NO: 28063 - DNA, 20 bp, Artificial Sequence
  Description of Artificial Sequence: Synthetic oligonucleotide
  Target: LAMA2; (+) strand; PAM type: NNGRRT; PAM sequence: GAGGAT
attcctggccagtttggcct

SEQ ID NO: 28064 - DNA, 20 bp, Artificial Sequence
  Description of Artificial Sequence: Synthetic oligonucleotide
  Target: LAMA2; (+) strand; PAM type: NNGRRT; PAM sequence: GGGAGT
ccagtttggcctgaggatat

SEQ ID NO: 28065 - DNA, 20 bp, Artificial Sequence
  Description of Artificial Sequence: Synthetic oligonucleotide
  Target: LAMA2; (+) strand; PAM type: NNGRRT; PAM sequence: GGGAGT
ggcctgaggatatgggagta

SEQ ID NO: 28066 - DNA, 20 bp, Artificial Sequence
  Description of Artificial Sequence: Synthetic oligonucleotide
  Target: LAMA2; (+) strand; PAM type: NNGRRT; PAM sequence: AAGAGT
atgggagtagggagtgcaga

SEQ ID NO: 28067 - DNA, 20 bp, Artificial Sequence
  Description of Artificial Sequence: Synthetic oligonucleotide
  Target: LAMA2; (+) strand; PAM type: NNGRRT; PAM sequence: TTGAGT
tagggagtgcagaaagagtt

SEQ ID NO: 28068 - DNA, 20 bp, Artificial Sequence
  Description of Artificial Sequence: Synthetic oligonucleotide
  Target: LAMA2; (+) strand; PAM type: NNGRRT; PAM sequence: TTGAAT
agtgcagaaagagttttgag

SEQ ID NO: 28069 - DNA, 20 bp, Artificial Sequence
  Description of Artificial Sequence: Synthetic oligonucleotide
  Target: LAMA2; (+) strand; PAM type: NNGRRT; PAM sequence: GTGAAT
tatttgtcactcatggggaa

SEQ ID NO: 28070 - DNA, 20 bp, Artificial Sequence
  Description of Artificial Sequence: Synthetic oligonucleotide
  Target: LAMA2; (+) strand; PAM type: NNGRRT; PAM sequence: TAGAAT
gtaattcaaaatatttgcca

SEQ ID NO: 28071 - DNA, 20 bp, Artificial Sequence
  Description of Artificial Sequence: Synthetic oligonucleotide
  Target: LAMA2; (+) strand; PAM type: NNGRRT; PAM sequence: AAGAAT
gccatagaatgataagactg

SEQ ID NO: 28072 - DNA, 20 bp, Artificial Sequence
  Description of Artificial Sequence: Synthetic oligonucleotide
  Target: LAMA2; (+) strand; PAM type: NNGRRT; PAM sequence: AAGAAT
gaatgataagactgaagaat

SEQ ID NO: 28073 - DNA, 20 bp, Artificial Sequence
  Description of Artificial Sequence: Synthetic oligonucleotide
  Target: LAMA2; (+) strand; PAM type: NNGRRT; PAM sequence: TGGAAT
attttatatagcttactttg

SEQ ID NO: 28074 - DNA, 20 bp, Artificial Sequence
  Description of Artificial Sequence: Synthetic oligonucleotide
  Target: LAMA2; (+) strand; PAM type: NNGRRT; PAM sequence: TTGAAT
ttgtggaatatgttactttt

SEQ ID NO: 28075 - DNA, 20 bp, Artificial Sequence
  Description of Artificial Sequence: Synthetic oligonucleotide
  Target: LAMA2; (+) strand; PAM type: NNGRRT; PAM sequence: AAGGAT
tatttcatccataatctggt

SEQ ID NO: 28076 - DNA, 20 bp, Artificial Sequence
  Description of Artificial Sequence: Synthetic oligonucleotide
  Target: LAMA2; (+) strand; PAM type: NNGRRT; PAM sequence: CTGGAT
tcagaggagatacaatattg

SEQ ID NO: 28077 - DNA, 20 bp, Artificial Sequence
  Description of Artificial Sequence: Synthetic oligonucleotide
  Target: LAMA2; (+) strand; PAM type: NNGRRT; PAM sequence: AAGAAT
ctggatctaatgtaagtaga

SEQ ID NO: 28078 - DNA, 20 bp, Artificial Sequence
  Description of Artificial Sequence: Synthetic oligonucleotide
  Target: LAMA2; (+) strand; PAM type: NNGRRT; PAM sequence: AGGAAT
atggcatagaaaaagacaca

SEQ ID NO: 28079 - DNA, 20 bp, Artificial Sequence
  Description of Artificial Sequence: Synthetic oligonucleotide
  Target: LAMA2; (+) strand; PAM type: NNGRRT; PAM sequence: CTGGAT
gacacaaggaattagaagac

SEQ ID NO: 28080 - DNA, 20 bp, Artificial Sequence
  Description of Artificial Sequence: Synthetic oligonucleotide
  Target: LAMA2; (+) strand; PAM type: NNGRRT; PAM sequence: TGGGAT
gtcaaatgatttaatctctc

SEQ ID NO: 28081 - DNA, 20 bp, Artificial Sequence
  Description of Artificial Sequence: Synthetic oligonucleotide
  Target: LAMA2; (+) strand; PAM type: NNGRRT; PAM sequence: ATGAAT
ggattaaatttctttaatag

SEQ ID NO: 28082 - DNA, 20 bp, Artificial Sequence
  Description of Artificial Sequence: Synthetic oligonucleotide
  Target: LAMA2; (+) strand; PAM type: NNGRRT; PAM sequence: GAGGAT
ttggctatcatacaacattt

SEQ ID NO: 28083 - DNA, 20 bp, Artificial Sequence
  Description of Artificial Sequence: Synthetic oligonucleotide
  Target: LAMA2; (+) strand; PAM type: NNGRRT; PAM sequence: TTGGAT
ttgaggatattctaaaagtt

SEQ ID NO: 28084 - DNA, 20 bp, Artificial Sequence
  Description of Artificial Sequence: Synthetic oligonucleotide
  Target: LAMA2; (+) strand; PAM type: NNGRRT; PAM sequence: TGGAAT
ttatccagacaaagtagctg

SEQ ID NO: 28085 - DNA, 20 bp, Artificial Sequence
  Description of Artificial Sequence: Synthetic oligonucleotide
  Target: LAMA2; (+) strand; PAM type: NNGRRT; PAM sequence: TGGAAT
atgtactttcacataatccc

SEQ ID NO: 28086 - DNA, 20 bp, Artificial Sequence
  Description of Artificial Sequence: Synthetic oligonucleotide
  Target: LAMA2; (+) strand; PAM type: NNGRRT; PAM sequence: TTGAGT
agcaataaatctccccctgc

SEQ ID NO: 28087 - DNA, 20 bp, Artificial Sequence
  Description of Artificial Sequence: Synthetic oligonucleotide
  Target: LAMA2; (+) strand; PAM type: NNGRRT; PAM sequence: CAGAAT
acattgagaagataacttct

SEQ ID NO: 28088 - DNA, 20 bp, Artificial Sequence
  Description of Artificial Sequence: Synthetic oligonucleotide
  Target: LAMA2; (+) strand; PAM type: NNGRRT; PAM sequence: CAGAAT
tgtgttaaactcggtacata

SEQ ID NO: 28089 - DNA, 20 bp, Artificial Sequence
  Description of Artificial Sequence: Synthetic oligonucleotide
  Target: LAMA2; (+) strand; PAM type: NNGRRT; PAM sequence: AGGGAT
agaatttacctccattgttg

SEQ ID NO: 28090 - DNA, 20 bp, Artificial Sequence
  Description of Artificial Sequence: Synthetic oligonucleotide
  Target: LAMA2; (+) strand; PAM type: NNGRRT; PAM sequence: TAGAAT
agggatattgttatcagatg

SEQ ID NO: 28091 - DNA, 20 bp, Artificial Sequence
  Description of Artificial Sequence: Synthetic oligonucleotide
  Target: LAMA2; (+) strand; PAM type: NNGRRT; PAM sequence: GAGAAT
tgatttccattgcttatgta

SEQ ID NO: 28092 - DNA, 20 bp, Artificial Sequence
  Description of Artificial Sequence: Synthetic oligonucleotide
  Target: LAMA2; (+) strand; PAM type: NNGRRT; PAM sequence: TGGAGT
gctatccgattactatcttt

SEQ ID NO: 28093 - DNA, 20 bp, Artificial Sequence
  Description of Artificial Sequence: Synthetic oligonucleotide
  Target: LAMA2; (+) strand; PAM type: NNGRRT; PAM sequence: CTGGAT
tgggactagcagccaccaca

SEQ ID NO: 28094 - DNA, 20 bp, Artificial Sequence
  Description of Artificial Sequence: Synthetic oligonucleotide
  Target: LAMA2; (+) strand; PAM type: NNGRRT; PAM sequence: CTGGAT
ttcattctaggtattttctt

SEQ ID NO: 28095 - DNA, 20 bp, Artificial Sequence
  Description of Artificial Sequence: Synthetic oligonucleotide
  Target: LAMA2; (+) strand; PAM type: NNGRRT; PAM sequence: TAGGAT
attgctattaaagttattca

SEQ ID NO: 28096 - DNA, 20 bp, Artificial Sequence
  Description of Artificial Sequence: Synthetic oligonucleotide
  Target: LAMA2; (+) strand; PAM type: NNGRRT; PAM sequence: CCGAGT
ttttttttttttttttgaga

SEQ ID NO: 28097 - DNA, 20 bp, Artificial Sequence
  Description of Artificial Sequence: Synthetic oligonucleotide
  Target: LAMA2; (+) strand; PAM type: NNGRRT; PAM sequence: TGGAGT
tctcgctctgtcacccaggc

SEQ ID NO: 28098 - DNA, 20 bp, Artificial Sequence
  Description of Artificial Sequence: Synthetic oligonucleotide
  Target: LAMA2; (+) strand; PAM type: NNGRRT; PAM sequence: CCGGGT
ctcactgtaacctccgcctc

SEQ ID NO: 28099 - DNA, 20 bp, Artificial Sequence
  Description of Artificial Sequence: Synthetic oligonucleotide
  Target: LAMA2; (+) strand; PAM type: NNGRRT; PAM sequence: CCGGGT
aacctccgcctcccgggttc

SEQ ID NO: 28100 - DNA, 20 bp, Artificial Sequence
  Description of Artificial Sequence: Synthetic oligonucleotide
  Target: LAMA2; (+) strand; PAM type: NNGRRT; PAM sequence: CTGAGT
ggttctcctgcctcagcctc

SEQ ID NO: 28101 - DNA, 20 bp, Artificial Sequence
  Description of Artificial Sequence: Synthetic oligonucleotide
  Target: LAMA2; (+) strand; PAM type: NNGRRT; PAM sequence: TGGGAT
gcctcagcctcctgagtagc

SEQ ID NO: 28102 - DNA, 20 bp, Artificial Sequence
  Description of Artificial Sequence: Synthetic oligonucleotide
  Target: LAMA2; (+) strand; PAM type: NNGRRT; PAM sequence: CAGGGT
ttttgtgttttcagtacaga

SEQ ID NO: 28103 - DNA, 20 bp, Artificial Sequence
  Description of Artificial Sequence: Synthetic oligonucleotide
  Target: LAMA2; (+) strand; PAM type: NNGRRT; PAM sequence: CAGGAT
cagggtttcaccatgttggt

SEQ ID NO: 28104 - DNA, 20 bp, Artificial Sequence
  Description of Artificial Sequence: Synthetic oligonucleotide
  Target: LAMA2; (+) strand; PAM type: NNGRRT; PAM sequence: TAGGAT
accttggcctcccaaagtgc

SEQ ID NO: 28105 - DNA, 20 bp, Artificial Sequence
  Description of Artificial Sequence: Synthetic oligonucleotide
  Target: LAMA2; (+) strand; PAM type: NNGRRT; PAM sequence: TTGGAT
aattctaatatatggccttt

SEQ ID NO: 28106 - DNA, 20 bp, Artificial Sequence
  Description of Artificial Sequence: Synthetic oligonucleotide
  Target: LAMA2; (+) strand; PAM type: NNGRRT; PAM sequence: GAGAAT
aacagaagttgtatttgaaa

SEQ ID NO: 28107 - DNA, 20 bp, Artificial Sequence
  Description of Artificial Sequence: Synthetic oligonucleotide
  Target: LAMA2; (+) strand; PAM type: NNGRRT; PAM sequence: CTGGAT
tactgccaggcaatggaaat

SEQ ID NO: 28108 - DNA, 20 bp, Artificial Sequence
  Description of Artificial Sequence: Synthetic oligonucleotide
  Target: LAMA2; (+) strand; PAM type: NNGRRT; PAM sequence: AGGGAT
gatcatcttaattcaatttt

SEQ ID NO: 28109 - DNA, 20 bp, Artificial Sequence
  Description of Artificial Sequence: Synthetic oligonucleotide
  Target: LAMA2; (+) strand; PAM type: NNGRRT; PAM sequence: TGGAGT
attcccatgctgcttatctt

SEQ ID NO: 28110 - DNA, 20 bp, Artificial Sequence
  Description of Artificial Sequence: Synthetic oligonucleotide
  Target: LAMA2; (+) strand; PAM type: NNGRRT; PAM sequence: GGGAAT
gagtccaagccagcgtgtgt

SEQ ID NO: 28111 - DNA, 20 bp, Artificial Sequence
  Description of Artificial Sequence: Synthetic oligonucleotide
  Target: LAMA2; (+) strand; PAM type: NNGRRT; PAM sequence: TGGAAT
aagtcccacccatgcagtcc

SEQ ID NO: 28112 - DNA, 20 bp, Artificial Sequence
  Description of Artificial Sequence: Synthetic oligonucleotide
  Target: LAMA2; (+) strand; PAM type: NNGRRT; PAM sequence: GAGAGT
tttgtctagttgttgtcatt

SEQ ID NO: 28113 - DNA, 20 bp, Artificial Sequence
  Description of Artificial Sequence: Synthetic oligonucleotide
  Target: LAMA2; (+) strand; PAM type: NNGRRT; PAM sequence: TGGAAT
gcatttaattttttttattt

SEQ ID NO: 28114 - DNA, 20 bp, Artificial Sequence
  Description of Artificial Sequence: Synthetic oligonucleotide
  Target: LAMA2; (+) strand; PAM type: NNGRRT; PAM sequence: GAGAAT
acacatgtatgaagattata

SEQ ID NO: 28115 - DNA, 20 bp, Artificial Sequence
  Description of Artificial Sequence: Synthetic oligonucleotide
  Target: LAMA2; (+) strand; PAM type: NNGRRT; PAM sequence: AGGAAT
tccctcatccagctatccct

SEQ ID NO: 28116 - DNA, 20 bp, Artificial Sequence
  Description of Artificial Sequence: Synthetic oligonucleotide
  Target: LAMA2; (+) strand; PAM type: NNGRRT; PAM sequence: TGGGAT
caatttcattttttctcttc

SEQ ID NO: 28117 - DNA, 20 bp, Artificial Sequence
  Description of Artificial Sequence: Synthetic oligonucleotide
  Target: LAMA2; (+) strand; PAM type: NNGRRT; PAM sequence: TTGGGT
tttatagactattattcagt

SEQ ID NO: 28118 - DNA, 20 bp, Artificial Sequence
  Description of Artificial Sequence: Synthetic oligonucleotide
  Target: LAMA2; (+) strand; PAM type: NNGRRT; PAM sequence: CTGGAT
ttcatggttaaactgggctt

SEQ ID NO: 28119 - DNA, 20 bp, Artificial Sequence
  Description of Artificial Sequence: Synthetic oligonucleotide
  Target: LAMA2; (+) strand; PAM type: NNGRRT; PAM sequence: TTGAAT
tgtatatttttcactaagca

SEQ ID NO: 28120 - DNA, 20 bp, Artificial Sequence
  Description of Artificial Sequence: Synthetic oligonucleotide
  Target: LAMA2; (+) strand; PAM type: NNGRRT; PAM sequence: TAGAGT
tctcattgtgttgatcaggc

SEQ ID NO: 28121 - DNA, 20 bp, Artificial Sequence
  Description of Artificial Sequence: Synthetic oligonucleotide
  Target: LAMA2; (+) strand; PAM type: NNGRRT; PAM sequence: CAGGGT
ttaaaatttttttgtagaga

SEQ ID NO: 28122 - DNA, 20 bp, Artificial Sequence
  Description of Artificial Sequence: Synthetic oligonucleotide
  Target: LAMA2; (+) strand; PAM type: NNGRRT; PAM sequence: AGGAAT
aaccaccatgcctggcccag

SEQ ID NO: 28123 - DNA, 20 bp, Artificial Sequence
  Description of Artificial Sequence: Synthetic oligonucleotide
  Target: LAMA2; (+) strand; PAM type: NNGRRT; PAM sequence: CTGAGT
tgtgactaatgccaaatcca

SEQ ID NO: 28124 - DNA, 20 bp, Artificial Sequence
  Description of Artificial Sequence: Synthetic oligonucleotide
  Target: LAMA2; (+) strand; PAM type: NNGRRT; PAM sequence: AAGAAT
attacatttccacttgtcta

SEQ ID NO: 28125 - DNA, 20 bp, Artificial Sequence
  Description of Artificial Sequence: Synthetic oligonucleotide
  Target: LAMA2; (+) strand; PAM type: NNGRRT; PAM sequence: AAGGAT
aatttctcatcaatctatta

SEQ ID NO: 28126 - DNA, 20 bp, Artificial Sequence
  Description of Artificial Sequence: Synthetic oligonucleotide
  Target: LAMA2; (+) strand; PAM type: NNGRRT; PAM sequence: CTGGGT
gatcaacaaatgttagagaa

SEQ ID NO: 28127 - DNA, 20 bp, Artificial Sequence
  Description of Artificial Sequence: Synthetic oligonucleotide
  Target: LAMA2; (+) strand; PAM type: NNGRRT; PAM sequence: AGGGAT
gtctcagggcctggcaaagg

SEQ ID NO: 28128 - DNA, 20 bp, Artificial Sequence
  Description of Artificial Sequence: Synthetic oligonucleotide
  Target: LAMA2; (+) strand; PAM type: NNGRRT; PAM sequence: GAGGAT
ctggcaaaggagggataatg

SEQ ID NO: 28129 - DNA, 20 bp, Artificial Sequence
  Description of Artificial Sequence: Synthetic oligonucleotide
  Target: LAMA2; (+) strand; PAM type: NNGRRT; PAM sequence: CTGGGT
taggcaagataataatatga

SEQ ID NO: 28130 - DNA, 20 bp, Artificial Sequence
  Description of Artificial Sequence: Synthetic oligonucleotide
  Target: LAMA2; (+) strand; PAM type: NNGRRT; PAM sequence: AGGAGT
atgatactgagctccctaat

SEQ ID NO: 28131 - DNA, 20 bp, Artificial Sequence
  Description of Artificial Sequence: Synthetic oligonucleotide
  Target: LAMA2; (+) strand; PAM type: NNGRRT; PAM sequence: CAGGGT
gagctccctaataggagttg

SEQ ID NO: 28132 - DNA, 20 bp, Artificial Sequence
  Description of Artificial Sequence: Synthetic oligonucleotide
  Target: LAMA2; (+) strand; PAM type: NNGRRT; PAM sequence: CAGGGT
cattactttgaggccaacca

SEQ ID NO: 28133 - DNA, 20 bp, Artificial Sequence
  Description of Artificial Sequence: Synthetic oligonucleotide
  Target: LAMA2; (+) strand; PAM type: NNGRRT; PAM sequence: AAGAAT
gggcaccagttatttaggga

SEQ ID NO: 28134 - DNA, 20 bp, Artificial Sequence
  Description of Artificial Sequence: Synthetic oligonucleotide
  Target: LAMA2; (+) strand; PAM type: NNGRRT; PAM sequence: CTGAGT
atgtgataggttttggtgga

SEQ ID NO: 28135 - DNA, 20 bp, Artificial Sequence
  Description of Artificial Sequence: Synthetic oligonucleotide
  Target: LAMA2; (+) strand; PAM type: NNGRRT; PAM sequence: TTGAGT
gactgagtctcttggcaggt

SEQ ID NO: 28136 - DNA, 20 bp, Artificial Sequence
  Description of Artificial Sequence: Synthetic oligonucleotide
  Target: LAMA2; (+) strand; PAM type: NNGRRT; PAM sequence: AGGGGT
actaggttattgatggtcaa

SEQ ID NO: 28137 - DNA, 20 bp, Artificial Sequence
  Description of Artificial Sequence: Synthetic oligonucleotide
  Target: LAMA2; (+) strand; PAM type: NNGRRT; PAM sequence: AAGAAT
gtcaaaggggtatctgagag

SEQ ID NO: 28138 - DNA, 20 bp, Artificial Sequence
  Description of Artificial Sequence: Synthetic oligonucleotide
  Target: LAMA2; (+) strand; PAM type: NNGRRT; PAM sequence: TAGAAT
tggcactgctttagagatcc

SEQ ID NO: 28139 - DNA, 20 bp, Artificial Sequence
  Description of Artificial Sequence: Synthetic oligonucleotide
  Target: LAMA2; (+) strand; PAM type: NNGRRT; PAM sequence: TTGGAT
cattattgcttttaatttat

SEQ ID NO: 28140 - DNA, 20 bp, Artificial Sequence
  Description of Artificial Sequence: Synthetic oligonucleotide
  Target: LAMA2; (+) strand; PAM type: NNGRRT; PAM sequence: CAGAAT
tattttgatttcctatgtga

SEQ ID NO: 28141 - DNA, 20 bp, Artificial Sequence
  Description of Artificial Sequence: Synthetic oligonucleotide
  Target: LAMA2; (+) strand; PAM type: NNGRRT; PAM sequence: CAGAAT
cagaattttatatatacaga

SEQ ID NO: 28142 - DNA, 20 bp, Artificial Sequence
  Description of Artificial Sequence: Synthetic oligonucleotide
  Target: LAMA2; (+) strand; PAM type: NNGRRT; PAM sequence: TAGAAT
tctgacattatggtggtcct

SEQ ID NO: 28143 - DNA, 20 bp, Artificial Sequence
  Description of Artificial Sequence: Synthetic oligonucleotide
  Target: LAMA2; (+) strand; PAM type: NNGRRT; PAM sequence: GTGAGT
gttataacatgattttgcat

SEQ ID NO: 28144 - DNA, 20 bp, Artificial Sequence
  Description of Artificial Sequence: Synthetic oligonucleotide
  Target: LAMA2; (+) strand; PAM type: NNGRRT; PAM sequence: GGGAAT
gtgagtttgtatggaaatga

SEQ ID NO: 28145 - DNA, 20 bp, Artificial Sequence
  Description of Artificial Sequence: Synthetic oligonucleotide
  Target: LAMA2; (+) strand; PAM type: NNGRRT; PAM sequence: CGGAGT
gttcctttagggagaaacag

SEQ ID NO: 28146 - DNA, 20 bp, Artificial Sequence
  Description of Artificial Sequence: Synthetic oligonucleotide
  Target: LAMA2; (+) strand; PAM type: NNGRRT; PAM sequence: TGGGGT
aatttaggtaaataattatt

SEQ ID NO: 28147 - DNA, 20 bp, Artificial Sequence
  Description of Artificial Sequence: Synthetic oligonucleotide
  Target: LAMA2; (+) strand; PAM type: NNGRRT; PAM sequence: TGGAGT
tccttacagtgaggtttata

SEQ ID NO: 28148 - DNA, 20 bp, Artificial Sequence
  Description of Artificial Sequence: Synthetic oligonucleotide
  Target: LAMA2; (+) strand; PAM type: NNGRRT; PAM sequence: TGGAAT
tgaaatgtttcaactctggt

SEQ ID NO: 28149 - DNA, 20 bp, Artificial Sequence
  Description of Artificial Sequence: Synthetic oligonucleotide
  Target: LAMA2; (+) strand; PAM type: NNGRRT; PAM sequence: GAGGAT
taaaataaagataaaattaa

SEQ ID NO: 28150 - DNA, 20 bp, Artificial Sequence
  Description of Artificial Sequence: Synthetic oligonucleotide
  Target: LAMA2; (+) strand; PAM type: NNGRRT; PAM sequence: CTGAAT
aacaaagatggccagagaaa

SEQ ID NO: 28151 - DNA, 20 bp, Artificial Sequence
  Description of Artificial Sequence: Synthetic oligonucleotide
  Target: LAMA2; (+) strand; PAM type: NNGRRT; PAM sequence: GAGAAT
gatggccagagaaactgaat

SEQ ID NO: 28152 - DNA, 20 bp, Artificial Sequence
  Description of Artificial Sequence: Synthetic oligonucleotide
  Target: LAMA2; (+) strand; PAM type: NNGRRT; PAM sequence: TGGAAT
ccagagaaactgaatgagaa

SEQ ID NO: 28153 - DNA, 20 bp, Artificial Sequence
  Description of Artificial Sequence: Synthetic oligonucleotide
  Target: LAMA2; (+) strand; PAM type: NNGRRT; PAM sequence: CAGGAT
gttctctcagtgttgtggaa

SEQ ID NO: 28154 - DNA, 20 bp, Artificial Sequence
  Description of Artificial Sequence: Synthetic oligonucleotide
  Target: LAMA2; (+) strand; PAM type: NNGRRT; PAM sequence: AAGGGT
gatccactgatatggaacag

SEQ ID NO: 28155 - DNA, 20 bp, Artificial Sequence
  Description of Artificial Sequence: Synthetic oligonucleotide
  Target: LAMA2; (+) strand; PAM type: NNGRRT; PAM sequence: TAGGGT
ttaagctaggtaaggaagct

SEQ ID NO: 28156 - DNA, 20 bp, Artificial Sequence
  Description of Artificial Sequence: Synthetic oligonucleotide
  Target: LAMA2; (+) strand; PAM type: NNGRRT; PAM sequence: GGGAAT
acactgcacactgacttttg

SEQ ID NO: 28157 - DNA, 20 bp, Artificial Sequence
  Description of Artificial Sequence: Synthetic oligonucleotide
  Target: LAMA2; (+) strand; PAM type: NNGRRT; PAM sequence: CTGGAT
actgacttttggggaattac

SEQ ID NO: 28158 - DNA, 20 bp, Artificial Sequence
  Description of Artificial Sequence: Synthetic oligonucleotide
  Target: LAMA2; (+) strand; PAM type: NNGRRT; PAM sequence: AAGGAT
ggctttcaggtagctctgcc

SEQ ID NO: 28159 - DNA, 20 bp, Artificial Sequence
  Description of Artificial Sequence: Synthetic oligonucleotide
  Target: LAMA2; (+) strand; PAM type: NNGRRT; PAM sequence: TAGGGT
gctctgccaaggattaacaa

SEQ ID NO: 28160 - DNA, 20 bp, Artificial Sequence
  Description of Artificial Sequence: Synthetic oligonucleotide
  Target: LAMA2; (+) strand; PAM type: NNGRRT; PAM sequence: AAGAGT
taacaatagggttcagaaag

SEQ ID NO: 28161 - DNA, 20 bp, Artificial Sequence
  Description of Artificial Sequence: Synthetic oligonucleotide
  Target: LAMA2; (+) strand; PAM type: NNGRRT; PAM sequence: TGGAAT
atgactgagctggctcagcc

SEQ ID NO: 28162 - DNA, 20 bp, Artificial Sequence
  Description of Artificial Sequence: Synthetic oligonucleotide
  Target: LAMA2; (+) strand; PAM type: NNGRRT; PAM sequence: GAGAGT
gagctggctcagcctggaat

SEQ ID NO: 28163 - DNA, 20 bp, Artificial Sequence
  Description of Artificial Sequence: Synthetic oligonucleotide
  Target: LAMA2; (+) strand; PAM type: NNGRRT; PAM sequence: AGGAAT
aggctactgaacaagactga

SEQ ID NO: 28164 - DNA, 20 bp, Artificial Sequence
  Description of Artificial Sequence: Synthetic oligonucleotide
  Target: LAMA2; (+) strand; PAM type: NNGRRT; PAM sequence: AGGAAT
gctgaagttggaggaccaga

SEQ ID NO: 28165 - DNA, 20 bp, Artificial Sequence
  Description of Artificial Sequence: Synthetic oligonucleotide
  Target: LAMA2; (+) strand; PAM type: NNGRRT; PAM sequence: GAGGGT
gaggaccagaaggaataggt

SEQ ID NO: 28166 - DNA, 20 bp, Artificial Sequence
  Description of Artificial Sequence: Synthetic oligonucleotide
  Target: LAMA2; (+) strand; PAM type: NNGRRT; PAM sequence: TAGGGT
tgagggtctcagtgctaatg

SEQ ID NO: 28167 - DNA, 20 bp, Artificial Sequence
  Description of Artificial Sequence: Synthetic oligonucleotide
  Target: LAMA2; (+) strand; PAM type: NNGRRT; PAM sequence: GAGGGT
tgttgcacatttattttatg

SEQ ID NO: 28168 - DNA, 20 bp, Artificial Sequence
  Description of Artificial Sequence: Synthetic oligonucleotide
  Target: LAMA2; (+) strand; PAM type: NNGRRT; PAM sequence: CAGGGT
gagaggtcaaataactttcc

SEQ ID NO: 28169 - DNA, 20 bp, Artificial Sequence
  Description of Artificial Sequence: Synthetic oligonucleotide
  Target: LAMA2; (+) strand; PAM type: NNGRRT; PAM sequence: TTGAAT
gtaatttttggagctgtgat

SEQ ID NO: 28170 - DNA, 20 bp, Artificial Sequence
  Description of Artificial Sequence: Synthetic oligonucleotide
  Target: LAMA2; (+) strand; PAM type: NNGRRT; PAM sequence: TGGGGT
taaaagtttccttctgtgtc

SEQ ID NO: 28171 - DNA, 20 bp, Artificial Sequence
  Description of Artificial Sequence: Synthetic oligonucleotide
  Target: LAMA2; (+) strand; PAM type: NNGRRT; PAM sequence: AGGAGT
ctgctctgccctataagctc

SEQ ID NO: 28172 - DNA, 20 bp, Artificial Sequence
  Description of Artificial Sequence: Synthetic oligonucleotide
  Target: LAMA2; (+) strand; PAM type: NNGRRT; PAM sequence: CTGAGT
ctatgtgagattgcacagac

SEQ ID NO: 28173 - DNA, 20 bp, Artificial Sequence
  Description of Artificial Sequence: Synthetic oligonucleotide
  Target: LAMA2; (+) strand; PAM type: NNGRRT; PAM sequence: TGGGGT
ctgctgcttattttttattt

SEQ ID NO: 28174 - DNA, 20 bp, Artificial Sequence
  Description of Artificial Sequence: Synthetic oligonucleotide
  Target: LAMA2; (+) strand; PAM type: NNGRRT; PAM sequence: ATGAAT
ttctttaccttttagctttg

SEQ ID NO: 28175 - DNA, 20 bp, Artificial Sequence
  Description of Artificial Sequence: Synthetic oligonucleotide
  Target: LAMA2; (+) strand; PAM type: NNGRRT; PAM sequence: TGGAAT
atattttttatttttgtttc

SEQ ID NO: 28176 - DNA, 20 bp, Artificial Sequence
  Description of Artificial Sequence: Synthetic oligonucleotide
  Target: LAMA2; (+) strand; PAM type: NNGRRT; PAM sequence: TAGAAT
cagttgtgcaatagacttgt

SEQ ID NO: 28177 - DNA, 20 bp, Artificial Sequence
  Description of Artificial Sequence: Synthetic oligonucleotide
  Target: LAMA2; (+) strand; PAM type: NNGRRT; PAM sequence: ATGGGT
aaacacataaggaaggtgat

SEQ ID NO: 28178 - DNA, 20 bp, Artificial Sequence
  Description of Artificial Sequence: Synthetic oligonucleotide
  Target: LAMA2; (+) strand; PAM type: NNGRRT; PAM sequence: AAGGAT
atacctgatttggttttaat

SEQ ID NO: 28179 - DNA, 20 bp, Artificial Sequence
  Description of Artificial Sequence: Synthetic oligonucleotide
  Target: LAMA2; (+) strand; PAM type: NNGRRT; PAM sequence: TTGAAT
atccattataacattactat

SEQ ID NO: 28180 - DNA, 20 bp, Artificial Sequence
  Description of Artificial Sequence: Synthetic oligonucleotide
  Target: LAMA2; (+) strand; PAM type: NNGRRT; PAM sequence: TAGAAT
acttccttccaatatacctg

SEQ ID NO: 28181 - DNA, 20 bp, Artificial Sequence
  Description of Artificial Sequence: Synthetic oligonucleotide
  Target: LAMA2; (+) strand; PAM type: NNGRRT; PAM sequence: TTGAGT
tatacctgtagaatgagcta

SEQ ID NO: 28182 - DNA, 20 bp, Artificial Sequence
  Description of Artificial Sequence: Synthetic oligonucleotide
  Target: LAMA2; (+) strand; PAM type: NNGRRT; PAM sequence: GTGGGT
gttatggagcctgctagtgt

SEQ ID NO: 28183 - DNA, 20 bp, Artificial Sequence
  Description of Artificial Sequence: Synthetic oligonucleotide
  Target: LAMA2; (+) strand; PAM type: NNGRRT; PAM sequence: ATGGAT
ttaaataggctagtgataaa

SEQ ID NO: 28184 - DNA, 20 bp, Artificial Sequence
  Description of Artificial Sequence: Synthetic oligonucleotide
  Target: LAMA2; (+) strand; PAM type: NNGRRT; PAM sequence: CAGAAT
atcaggaacatttttaaaca

SEQ ID NO: 28185 - DNA, 20 bp, Artificial Sequence
  Description of Artificial Sequence: Synthetic oligonucleotide
  Target: LAMA2; (+) strand; PAM type: NNGRRT; PAM sequence: AAGAAT
ggtccacaagaaaggcctct

SEQ ID NO: 28186 - DNA, 20 bp, Artificial Sequence
  Description of Artificial Sequence: Synthetic oligonucleotide
  Target: LAMA2; (+) strand; PAM type: NNGRRT; PAM sequence: TAGGGT
ataagtgaggctgtagaaac

SEQ ID NO: 28187 - DNA, 20 bp, Artificial Sequence
  Description of Artificial Sequence: Synthetic oligonucleotide
  Target: LAMA2; (+) strand; PAM type: NNGRRT; PAM sequence: CTGAAT
ctactcaggtaaaattctat

SEQ ID NO: 28188 - DNA, 20 bp, Artificial Sequence
  Description of Artificial Sequence: Synthetic oligonucleotide
  Target: LAMA2; (+) strand; PAM type: NNGRRT; PAM sequence: TTGAAT
caggtaaaattctatctgaa

SEQ ID NO: 28189 - DNA, 20 bp, Artificial Sequence
  Description of Artificial Sequence: Synthetic oligonucleotide
  Target: LAMA2; (+) strand; PAM type: NNGRRT; PAM sequence: TGGAAT
tgaaaaacagtatggtttca

SEQ ID NO: 28190 - DNA, 20 bp, Artificial Sequence
  Description of Artificial Sequence: Synthetic oligonucleotide
  Target: LAMA2; (+) strand; PAM type: NNGRRT; PAM sequence: TGGAAT
cacaagcaaacattccatga

SEQ ID NO: 28191 - DNA, 20 bp, Artificial Sequence
  Description of Artificial Sequence: Synthetic oligonucleotide
  Target: LAMA2; (+) strand; PAM type: NNGRRT; PAM sequence: TAGAAT
tttattttacgttacctaag

SEQ ID NO: 28192 - DNA, 20 bp, Artificial Sequence
  Description of Artificial Sequence: Synthetic oligonucleotide
  Target: LAMA2; (+) strand; PAM type: NNGRRT; PAM sequence: GAGGAT
tgactcccaagcaaaaggaa

SEQ ID NO: 28193 - DNA, 20 bp, Artificial Sequence
  Description of Artificial Sequence: Synthetic oligonucleotide
  Target: LAMA2; (+) strand; PAM type: NNGRRT; PAM sequence: ATGGAT
aagcaaaaggaagaggatta

SEQ ID NO: 28194 - DNA, 20 bp, Artificial Sequence
  Description of Artificial Sequence: Synthetic oligonucleotide
  Target: LAMA2; (+) strand; PAM type: NNGRRT; PAM sequence: AAGAGT
gtgtatttactgttggtcac

SEQ ID NO: 28195 - DNA, 20 bp, Artificial Sequence
  Description of Artificial Sequence: Synthetic oligonucleotide
  Target: LAMA2; (+) strand; PAM type: NNGRRT; PAM sequence: GTGGAT
aagagtttgtgtgacactgt

SEQ ID NO: 28196 - DNA, 20 bp, Artificial Sequence
  Description of Artificial Sequence: Synthetic oligonucleotide
  Target: LAMA2; (+) strand; PAM type: NNGRRT; PAM sequence: AAGGGT
atctctactcggaaaaaccc

SEQ ID NO: 28197 - DNA, 20 bp, Artificial Sequence
  Description of Artificial Sequence: Synthetic oligonucleotide
  Target: LAMA2; (+) strand; PAM type: NNGRRT; PAM sequence: AAGGAT
gtacacttgaaaatacaaca

SEQ ID NO: 28198 - DNA, 20 bp, Artificial Sequence
  Description of Artificial Sequence: Synthetic oligonucleotide
  Target: LAMA2; (+) strand; PAM type: NNGRRT; PAM sequence: AGGAGT
gtccttgagacaagtaaccc

SEQ ID NO: 28199 - DNA, 20 bp, Artificial Sequence
  Description of Artificial Sequence: Synthetic oligonucleotide
  Target: LAMA2; (+) strand; PAM type: NNGRRT; PAM sequence: TGGAAT
tgagacaagtaacccaggag

SEQ ID NO: 28200 - DNA, 20 bp, Artificial Sequence
  Description of Artificial Sequence: Synthetic oligonucleotide
  Target: LAMA2; (+) strand; PAM type: NNGRRT; PAM sequence: GAGGAT
acagcaaagcattctagcct

SEQ ID NO: 28201 - DNA, 20 bp, Artificial Sequence
  Description of Artificial Sequence: Synthetic oligonucleotide
  Target: LAMA2; (+) strand; PAM type: NNGRRT; PAM sequence: CTGGGT
atgttgctcaattctgctac

SEQ ID NO: 28202 - DNA, 20 bp, Artificial Sequence
  Description of Artificial Sequence: Synthetic oligonucleotide
  Target: LAMA2; (+) strand; PAM type: NNGRRT; PAM sequence: AGGGAT
atgtaatttaaattctaatc

SEQ ID NO: 28203 - DNA, 20 bp, Artificial Sequence
  Description of Artificial Sequence: Synthetic oligonucleotide
  Target: LAMA2; (+) strand; PAM type: NNGRRT; PAM sequence: CAGAAT
ctttagcttcattcagtaat

SEQ ID NO: 28204 - DNA, 20 bp, Artificial Sequence
  Description of Artificial Sequence: Synthetic oligonucleotide
  Target: LAMA2; (+) strand; PAM type: NNGRRT; PAM sequence: ATGAAT
aaactaatatgtgccaaagc

SEQ ID NO: 28205 - DNA, 20 bp, Artificial Sequence
  Description of Artificial Sequence: Synthetic oligonucleotide
  Target: LAMA2; (+) strand; PAM type: NNGRRT; PAM sequence: AGGAAT
gcatgaatagaaatacttgc

SEQ ID NO: 28206 - DNA, 20 bp, Artificial Sequence
  Description of Artificial Sequence: Synthetic oligonucleotide
  Target: LAMA2; (+) strand; PAM type: NNGRRT; PAM sequence: GTGAAT
tttaccaaattagtaatatg

SEQ ID NO: 28207 - DNA, 20 bp, Artificial Sequence
  Description of Artificial Sequence: Synthetic oligonucleotide
  Target: LAMA2; (+) strand; PAM type: NNGRRT; PAM sequence: CTGAGT
tggtgaatattaaactaaac

SEQ ID NO: 28208 - DNA, 20 bp, Artificial Sequence
  Description of Artificial Sequence: Synthetic oligonucleotide
  Target: LAMA2; (+) strand; PAM type: NNGRRT; PAM sequence: GGGAAT
ttaaattttgtagggaaggg

SEQ ID NO: 28209 - DNA, 20 bp, Artificial Sequence
  Description of Artificial Sequence: Synthetic oligonucleotide
  Target: LAMA2; (+) strand; PAM type: NNGRRT; PAM sequence: CAGAAT
aactgtgttgttttggctca

SEQ ID NO: 28210 - DNA, 20 bp, Artificial Sequence
  Description of Artificial Sequence: Synthetic oligonucleotide
  Target: LAMA2; (+) strand; PAM type: NNGRRT; PAM sequence: TGGAGT
gtgtagatgttcattgtatc

SEQ ID NO: 28211 - DNA, 20 bp, Artificial Sequence
  Description of Artificial Sequence: Synthetic oligonucleotide
  Target: LAMA2; (+) strand; PAM type: NNGRRT; PAM sequence: CAGGAT
cacttatctactactctctt

SEQ ID NO: 28212 - DNA, 20 bp, Artificial Sequence
  Description of Artificial Sequence: Synthetic oligonucleotide
  Target: LAMA2; (+) strand; PAM type: NNGRRT; PAM sequence: CAGAAT
ctttttaaagaaaaaattat

SEQ ID NO: 28213 - DNA, 20 bp, Artificial Sequence
  Description of Artificial Sequence: Synthetic oligonucleotide
  Target: LAMA2; (+) strand; PAM type: NNGRRT; PAM sequence: TTGAAT
tagaaagataaacttttgtg

SEQ ID NO: 28214 - DNA, 20 bp, Artificial Sequence
  Description of Artificial Sequence: Synthetic oligonucleotide
  Target: LAMA2; (+) strand; PAM type: NNGRRT; PAM sequence: TGGAAT
agaggacaacaaaaatgagc

SEQ ID NO: 28215 - DNA, 20 bp, Artificial Sequence
  Description of Artificial Sequence: Synthetic oligonucleotide
  Target: LAMA2; (+) strand; PAM type: NNGRRT; PAM sequence: ATGAAT
ccaccaaacgatttgatatc

SEQ ID NO: 28216 - DNA, 20 bp, Artificial Sequence
  Description of Artificial Sequence: Synthetic oligonucleotide
  Target: LAMA2; (+) strand; PAM type: NNGRRT; PAM sequence: TTGGGT
tgatatcatgaataaatttc

SEQ ID NO: 28217 - DNA, 20 bp, Artificial Sequence
  Description of Artificial Sequence: Synthetic oligonucleotide
  Target: LAMA2; (+) strand; PAM type: NNGRRT; PAM sequence: GGGGAT
caaacactgtcttaggtgca

SEQ ID NO: 28218 - DNA, 20 bp, Artificial Sequence
  Description of Artificial Sequence: Synthetic oligonucleotide
  Target: LAMA2; (+) strand; PAM type: NNGRRT; PAM sequence: GGGGAT
taatggacattatgcttttg

SEQ ID NO: 28219 - DNA, 20 bp, Artificial Sequence
  Description of Artificial Sequence: Synthetic oligonucleotide
  Target: LAMA2; (+) strand; PAM type: NNGRRT; PAM sequence: GGGAGT
gccacatagaaaatgtggaa

SEQ ID NO: 28220 - DNA, 20 bp, Artificial Sequence
  Description of Artificial Sequence: Synthetic oligonucleotide
  Target: LAMA2; (+) strand; PAM type: NNGRRT; PAM sequence: CTGAAT
caccataattatttcaccta

SEQ ID NO: 28221 - DNA, 20 bp, Artificial Sequence
  Description of Artificial Sequence: Synthetic oligonucleotide
  Target: LAMA2; (+) strand; PAM type: NNGRRT; PAM sequence: CTGAAT
ttatttcacctactgaataa

SEQ ID NO: 28222 - DNA, 20 bp, Artificial Sequence
  Description of Artificial Sequence: Synthetic oligonucleotide
  Target: LAMA2; (+) strand; PAM type: NNGRRT; PAM sequence: TTGAGT
ctactgaataactgaataaa

SEQ ID NO: 28223 - DNA, 20 bp, Artificial Sequence
  Description of Artificial Sequence: Synthetic oligonucleotide
  Target: LAMA2; (+) strand; PAM type: NNGRRT; PAM sequence: CAGGAT
accaaactgtaaaacagttt

SEQ ID NO: 28224 - DNA, 20 bp, Artificial Sequence
  Description of Artificial Sequence: Synthetic oligonucleotide
  Target: LAMA2; (+) strand; PAM type: NNGRRT; PAM sequence: CAGAAT
tcatagaaacagattttagg

SEQ ID NO: 28225 - DNA, 20 bp, Artificial Sequence
  Description of Artificial Sequence: Synthetic oligonucleotide
  Target: LAMA2; (+) strand; PAM type: NNGRRT; PAM sequence: AAGGAT
gtaaatgttaaaataaaaag

SEQ ID NO: 28226 - DNA, 20 bp, Artificial Sequence
  Description of Artificial Sequence: Synthetic oligonucleotide
  Target: LAMA2; (+) strand; PAM type: NNGRRT; PAM sequence: AGGAAT
gaaggatgtttagcagcata

SEQ ID NO: 28227 - DNA, 20 bp, Artificial Sequence
  Description of Artificial Sequence: Synthetic oligonucleotide
  Target: LAMA2; (+) strand; PAM type: NNGRRT; PAM sequence: TGGAGT
gcataaggaatagaaacatt

SEQ ID NO: 28228 - DNA, 20 bp, Artificial Sequence
  Description of Artificial Sequence: Synthetic oligonucleotide
  Target: LAMA2; (+) strand; PAM type: NNGRRT; PAM sequence: GAGGGT
caacaatgtttacataatgg

SEQ ID NO: 28229 - DNA, 20 bp, Artificial Sequence
  Description of Artificial Sequence: Synthetic oligonucleotide
  Target: LAMA2; (+) strand; PAM type: NNGRRT; PAM sequence: TAGAAT
aacatgaggggctctgtcac

SEQ ID NO: 28230 - DNA, 20 bp, Artificial Sequence
  Description of Artificial Sequence: Synthetic oligonucleotide
  Target: LAMA2; (+) strand; PAM type: NNGRRT; PAM sequence: GGGGGT
taataatttccaaaacaatc

SEQ ID NO: 28231 - DNA, 20 bp, Artificial Sequence
  Description of Artificial Sequence: Synthetic oligonucleotide
  Target: LAMA2; (+) strand; PAM type: NNGRRT; PAM sequence: TCGAAT
aaaacaatcgggggtaatgt

SEQ ID NO: 28232 - DNA, 20 bp, Artificial Sequence
  Description of Artificial Sequence: Synthetic oligonucleotide
  Target: LAMA2; (+) strand; PAM type: NNGRRT; PAM sequence: ATGAAT
attctaagttcttgtcataa

SEQ ID NO: 28233 - DNA, 20 bp, Artificial Sequence
  Description of Artificial Sequence: Synthetic oligonucleotide
  Target: LAMA2; (+) strand; PAM type: NNGRRT; PAM sequence: ATGGAT
atcaatccagttggcaggag

SEQ ID NO: 28234 - DNA, 20 bp, Artificial Sequence
  Description of Artificial Sequence: Synthetic oligonucleotide
  Target: LAMA2; (+) strand; PAM type: NNGRRT; PAM sequence: GAGAGT
aaagcacacacatttttctt

SEQ ID NO: 28235 - DNA, 20 bp, Artificial Sequence
  Description of Artificial Sequence: Synthetic oligonucleotide
  Target: LAMA2; (+) strand; PAM type: NNGRRT; PAM sequence: GAGAAT
tggctagccgaaaagcatct

SEQ ID NO: 28236 - DNA, 20 bp, Artificial Sequence
  Description of Artificial Sequence: Synthetic oligonucleotide
  Target: LAMA2; (+) strand; PAM type: NNGRRT; PAM sequence: TGGAAT
gaaaagcatctgagaattga

SEQ ID NO: 28237 - DNA, 20 bp, Artificial Sequence
  Description of Artificial Sequence: Synthetic oligonucleotide
  Target: LAMA2; (+) strand; PAM type: NNGRRT; PAM sequence: CTGGGT
cagcacttacagtttgttgt

SEQ ID NO: 28238 - DNA, 20 bp, Artificial Sequence
  Description of Artificial Sequence: Synthetic oligonucleotide
  Target: LAMA2; (+) strand; PAM type: NNGRRT; PAM sequence: AGGAAT
aagacagtagcaaaatgaga

SEQ ID NO: 28239 - DNA, 20 bp, Artificial Sequence
  Description of Artificial Sequence: Synthetic oligonucleotide
  Target: LAMA2; (+) strand; PAM type: NNGRRT; PAM sequence: CAGAAT
atcaaaaaagcaagcaaagg

SEQ ID NO: 28240 - DNA, 20 bp, Artificial Sequence
  Description of Artificial Sequence: Synthetic oligonucleotide
  Target: LAMA2; (+) strand; PAM type: NNGRRT; PAM sequence: AAGGAT
gagctgatatcagtaattcc

SEQ ID NO: 28241 - DNA, 20 bp, Artificial Sequence
  Description of Artificial Sequence: Synthetic oligonucleotide
  Target: LAMA2; (+) strand; PAM type: NNGRRT; PAM sequence: TTGGAT
ttagactttggactccaaaa

SEQ ID NO: 28242 - DNA, 20 bp, Artificial Sequence
  Description of Artificial Sequence: Synthetic oligonucleotide
  Target: LAMA2; (+) strand; PAM type: NNGRRT; PAM sequence: TAGGAT
aaaattggatgcagatcaaa

SEQ ID NO: 28243 - DNA, 20 bp, Artificial Sequence
  Description of Artificial Sequence: Synthetic oligonucleotide
  Target: LAMA2; (+) strand; PAM type: NNGRRT; PAM sequence: GAGAAT
ttgatattctggtctggaaa

SEQ ID NO: 28244 - DNA, 20 bp, Artificial Sequence
  Description of Artificial Sequence: Synthetic oligonucleotide
  Target: LAMA2; (+) strand; PAM type: NNGRRT; PAM sequence: TGGGGT
tctggtctggaaagagaatt

SEQ ID NO: 28245 - DNA, 20 bp, Artificial Sequence
  Description of Artificial Sequence: Synthetic oligonucleotide
  Target: LAMA2; (+) strand; PAM type: NNGRRT; PAM sequence: ATGAGT
cagaacccacagctgcagaa

SEQ ID NO: 28246 - DNA, 20 bp, Artificial Sequence
  Description of Artificial Sequence: Synthetic oligonucleotide
  Target: LAMA2; (+) strand; PAM type: NNGRRT; PAM sequence: AAGGAT
ccctaaaggaaaactacaaa

SEQ ID NO: 28247 - DNA, 20 bp, Artificial Sequence
  Description of Artificial Sequence: Synthetic oligonucleotide
  Target: LAMA2; (+) strand; PAM type: NNGRRT; PAM sequence: AGGAAT
aaaaggatgtttcttgagat

SEQ ID NO: 28248 - DNA, 20 bp, Artificial Sequence
  Description of Artificial Sequence: Synthetic oligonucleotide
  Target: LAMA2; (+) strand; PAM type: NNGRRT; PAM sequence: AAGAAT
tttgttttaaatccagtgat

SEQ ID NO: 28249 - DNA, 20 bp, Artificial Sequence
  Description of Artificial Sequence: Synthetic oligonucleotide
  Target: LAMA2; (+) strand; PAM type: NNGRRT; PAM sequence: ATGAAT
ttttaaatccagtgataaga

SEQ ID NO: 28250 - DNA, 20 bp, Artificial Sequence
  Description of Artificial Sequence: Synthetic oligonucleotide
  Target: LAMA2; (+) strand; PAM type: NNGRRT; PAM sequence: TTGGGT
cgaggcattgctaaaagctt

SEQ ID NO: 28251 - DNA, 20 bp, Artificial Sequence
  Description of Artificial Sequence: Synthetic oligonucleotide
  Target: LAMA2; (+) strand; PAM type: NNGRRT; PAM sequence: AGGAGT
aaatcagacaaatcatgcct

SEQ ID NO: 28252 - DNA, 20 bp, Artificial Sequence
  Description of Artificial Sequence: Synthetic oligonucleotide
  Target: LAMA2; (+) strand; PAM type: NNGRRT; PAM sequence: TTGAAT
tgggaactgatttgtctagt

SEQ ID NO: 28253 - DNA, 20 bp, Artificial Sequence
  Description of Artificial Sequence: Synthetic oligonucleotide
  Target: LAMA2; (+) strand; PAM type: NNGRRT; PAM sequence: TAGAAT
gattagtgaactagctagct

SEQ ID NO: 28254 - DNA, 20 bp, Artificial Sequence
  Description of Artificial Sequence: Synthetic oligonucleotide
  Target: LAMA2; (+) strand; PAM type: NNGRRT; PAM sequence: AAGAAT
ttaaattttaaaatccacat

SEQ ID NO: 28255 - DNA, 20 bp, Artificial Sequence
  Description of Artificial Sequence: Synthetic oligonucleotide
  Target: LAMA2; (+) strand; PAM type: NNGRRT; PAM sequence: CAGAAT
gcaaaatgttacagagacac

SEQ ID NO: 28256 - DNA, 20 bp, Artificial Sequence
  Description of Artificial Sequence: Synthetic oligonucleotide
  Target: LAMA2; (+) strand; PAM type: NNGRRT; PAM sequence: TCGGGT
cagcttgactttcttttgcc

SEQ ID NO: 28257 - DNA, 20 bp, Artificial Sequence
  Description of Artificial Sequence: Synthetic oligonucleotide
  Target: LAMA2; (+) strand; PAM type: NNGRRT; PAM sequence: CTGGAT
tttcttttgcctcgggtatt

SEQ ID NO: 28258 - DNA, 20 bp, Artificial Sequence
  Description of Artificial Sequence: Synthetic oligonucleotide
  Target: LAMA2; (+) strand; PAM type: NNGRRT; PAM sequence: CTGGAT
ggattatcattttgtagcat

SEQ ID NO: 28259 - DNA, 20 bp, Artificial Sequence
  Description of Artificial Sequence: Synthetic oligonucleotide
  Target: LAMA2; (+) strand; PAM type: NNGRRT; PAM sequence: TGGAGT
gataattttacattaacatc

SEQ ID NO: 28260 - DNA, 20 bp, Artificial Sequence
  Description of Artificial Sequence: Synthetic oligonucleotide
  Target: LAMA2; (+) strand; PAM type: NNGRRT; PAM sequence: GAGGGT
ttacattaacatctggagtt

SEQ ID NO: 28261 - DNA, 20 bp, Artificial Sequence
  Description of Artificial Sequence: Synthetic oligonucleotide
  Target: LAMA2; (+) strand; PAM type: NNGRRT; PAM sequence: TCGGAT
gttgagggtctttttatttg

SEQ ID NO: 28262 - DNA, 20 bp, Artificial Sequence
  Description of Artificial Sequence: Synthetic oligonucleotide
  Target: LAMA2; (+) strand; PAM type: NNGRRT; PAM sequence: TAGAAT
ttttatttgtcggatgcata

SEQ ID NO: 28263 - DNA, 20 bp, Artificial Sequence
  Description of Artificial Sequence: Synthetic oligonucleotide
  Target: LAMA2; (+) strand; PAM type: NNGRRT; PAM sequence: CTGAGT
tctggtaacaggtggtgttg

SEQ ID NO: 28264 - DNA, 20 bp, Artificial Sequence
  Description of Artificial Sequence: Synthetic oligonucleotide
  Target: LAMA2; (+) strand; PAM type: NNGRRT; PAM sequence: TGGAAT
ctttgaaatcaggcctggtt

SEQ ID NO: 28265 - DNA, 20 bp, Artificial Sequence
  Description of Artificial Sequence: Synthetic oligonucleotide
  Target: LAMA2; (+) strand; PAM type: NNGRRT; PAM sequence: AAGAAT
gaagtttagtttccgcatct

SEQ ID NO: 28266 - DNA, 20 bp, Artificial Sequence
  Description of Artificial Sequence: Synthetic oligonucleotide
  Target: LAMA2; (+) strand; PAM type: NNGRRT; PAM sequence: TGGGAT
tatgcatgcaattagcaatt

SEQ ID NO: 28267 - DNA, 20 bp, Artificial Sequence
  Description of Artificial Sequence: Synthetic oligonucleotide
  Target: LAMA2; (+) strand; PAM type: NNGRRT; PAM sequence: CAGAGT
ggatttgcacaaggtttttc

SEQ ID NO: 28268 - DNA, 20 bp, Artificial Sequence
  Description of Artificial Sequence: Synthetic oligonucleotide
  Target: LAMA2; (+) strand; PAM type: NNGRRT; PAM sequence: CTGAAT
aagatttttgagagctgtga

SEQ ID NO: 28269 - DNA, 20 bp, Artificial Sequence
  Description of Artificial Sequence: Synthetic oligonucleotide
  Target: LAMA2; (+) strand; PAM type: NNGRRT; PAM sequence: TTGAGT
attctttagaaacttgctct

SEQ ID NO: 28270 - DNA, 20 bp, Artificial Sequence
  Description of Artificial Sequence: Synthetic oligonucleotide
  Target: LAMA2; (+) strand; PAM type: NNGRRT; PAM sequence: GAGAAT
tgacattataaaagcaggta

SEQ ID NO: 28271 - DNA, 20 bp, Artificial Sequence
  Description of Artificial Sequence: Synthetic oligonucleotide
  Target: LAMA2; (+) strand; PAM type: NNGRRT; PAM sequence: TAGAAT
aaagttgttcaaaatgtttt

SEQ ID NO: 28272 - DNA, 20 bp, Artificial Sequence
  Description of Artificial Sequence: Synthetic oligonucleotide
  Target: LAMA2; (+) strand; PAM type: NNGRRT; PAM sequence: TGGAGT
aatgtttttagaatttttct

SEQ ID NO: 28273 - DNA, 20 bp, Artificial Sequence
  Description of Artificial Sequence: Synthetic oligonucleotide
  Target: LAMA2; (+) strand; PAM type: NNGRRT; PAM sequence: AGGAAT
ggtaatattaagacagtcaa

SEQ ID NO: 28274 - DNA, 20 bp, Artificial Sequence
  Description of Artificial Sequence: Synthetic oligonucleotide
  Target: LAMA2; (+) strand; PAM type: NNGRRT; PAM sequence: ATGAAT
ctgaagttctgatcacagct

SEQ ID NO: 28275 - DNA, 20 bp, Artificial Sequence
  Description of Artificial Sequence: Synthetic oligonucleotide
  Target: LAMA2; (+) strand; PAM type: NNGRRT; PAM sequence: TGGGAT
taaaatcttctaaatatttt

SEQ ID NO: 28276 - DNA, 20 bp, Artificial Sequence
  Description of Artificial Sequence: Synthetic oligonucleotide
  Target: LAMA2; (+) strand; PAM type: NNGRRT; PAM sequence: AAGGGT
gaaccaagatgatttgtgtg

SEQ ID NO: 28277 - DNA, 20 bp, Artificial Sequence
  Description of Artificial Sequence: Synthetic oligonucleotide
  Target: LAMA2; (+) strand; PAM type: NNGRRT; PAM sequence: ATGAAT
aaaggcagtttttaaaggag

SEQ ID NO: 28278 - DNA, 20 bp, Artificial Sequence
  Description of Artificial Sequence: Synthetic oligonucleotide
  Target: LAMA2; (+) strand; PAM type: NNGRRT; PAM sequence: CTGAAT
caataatactagatgagcaa

SEQ ID NO: 28279 - DNA, 20 bp, Artificial Sequence
  Description of Artificial Sequence: Synthetic oligonucleotide
  Target: LAMA2; (+) strand; PAM type: NNGRRT; PAM sequence: ATGAAT
tgaagagatgacaaaaataa

SEQ ID NO: 28280 - DNA, 20 bp, Artificial Sequence
  Description of Artificial Sequence: Synthetic oligonucleotide
  Target: LAMA2; (+) strand; PAM type: NNGRRT; PAM sequence: TGGGAT
atgcatactagctgctcatc

SEQ ID NO: 28281 - DNA, 20 bp, Artificial Sequence
  Description of Artificial Sequence: Synthetic oligonucleotide
  Target: LAMA2; (+) strand; PAM type: NNGRRT; PAM sequence: ATGAGT
atactagctgctcatctggg

SEQ ID NO: 28282 - DNA, 20 bp, Artificial Sequence
  Description of Artificial Sequence: Synthetic oligonucleotide
  Target: LAMA2; (+) strand; PAM type: NNGRRT; PAM sequence: CAGAAT
attcaacttgtaatttaatg

SEQ ID NO: 28283 - DNA, 20 bp, Artificial Sequence
  Description of Artificial Sequence: Synthetic oligonucleotide
  Target: LAMA2; (+) strand; PAM type: NNGRRT; PAM sequence: ATGAAT
agacgaacattttattagca

SEQ ID NO: 28284 - DNA, 20 bp, Artificial Sequence
  Description of Artificial Sequence: Synthetic oligonucleotide
  Target: LAMA2; (+) strand; PAM type: NNGRRT; PAM sequence: AAGGAT
atttaatgcagtccttatgt

SEQ ID NO: 28285 - DNA, 20 bp, Artificial Sequence
  Description of Artificial Sequence: Synthetic oligonucleotide
  Target: LAMA2; (+) strand; PAM type: NNGRRT; PAM sequence: AAGGAT
tgtcagatagaaaaaagtaa

SEQ ID NO: 28286 - DNA, 20 bp, Artificial Sequence
  Description of Artificial Sequence: Synthetic oligonucleotide
  Target: LAMA2; (+) strand; PAM type: NNGRRT; PAM sequence: TGGGAT
atgatttaattctgtgcttt

SEQ ID NO: 28287 - DNA, 20 bp, Artificial Sequence
  Description of Artificial Sequence: Synthetic oligonucleotide
  Target: LAMA2; (+) strand; PAM type: NNGRRT; PAM sequence: AGGAGT
tagtctaacttaattcatga

SEQ ID NO: 28288 - DNA, 20 bp, Artificial Sequence
  Description of Artificial Sequence: Synthetic oligonucleotide
  Target: LAMA2; (+) strand; PAM type: NNGRRT; PAM sequence: GGGGAT
ttaattcatgaaggagtaca

SEQ ID NO: 28289 - DNA, 20 bp, Artificial Sequence
  Description of Artificial Sequence: Synthetic oligonucleotide
  Target: LAMA2; (+) strand; PAM type: NNGRRT; PAM sequence: CAGAGT
cagatgtgcaggcaaattct

SEQ ID NO: 28290 - DNA, 20 bp, Artificial Sequence
  Description of Artificial Sequence: Synthetic oligonucleotide
  Target: LAMA2; (+) strand; PAM type: NNGRRT; PAM sequence: CAGAAT
tcttctgtgtggttaaagta

SEQ ID NO: 28291 - DNA, 20 bp, Artificial Sequence
  Description of Artificial Sequence: Synthetic oligonucleotide
  Target: LAMA2; (+) strand; PAM type: NNGRRT; PAM sequence: TTGAGT
atatttttctagcatacagt

SEQ ID NO: 28292 - DNA, 20 bp, Artificial Sequence
  Description of Artificial Sequence: Synthetic oligonucleotide
  Target: LAMA2; (+) strand; PAM type: NNGRRT; PAM sequence: CAGAGT
tttatacagctggtaagtgg

SEQ ID NO: 28293 - DNA, 20 bp, Artificial Sequence
  Description of Artificial Sequence: Synthetic oligonucleotide
  Target: LAMA2; (+) strand; PAM type: NNGRRT; PAM sequence: CAGGAT
cagctggtaagtggcagagt

SEQ ID NO: 28294 - DNA, 20 bp, Artificial Sequence
  Description of Artificial Sequence: Synthetic oligonucleotide
  Target: LAMA2; (+) strand; PAM type: NNGRRT; PAM sequence: GTGGAT
gcctgtgtttgcataatcat

SEQ ID NO: 28295 - DNA, 20 bp, Artificial Sequence
  Description of Artificial Sequence: Synthetic oligonucleotide
  Target: LAMA2; (+) strand; PAM type: NNGRRT; PAM sequence: CAGGAT
gcataatcatgtggatacta

SEQ ID NO: 28296 - DNA, 20 bp, Artificial Sequence
  Description of Artificial Sequence: Synthetic oligonucleotide
  Target: LAMA2; (+) strand; PAM type: NNGRRT; PAM sequence: AGGAAT
ttagactcatcttatgtagg

SEQ ID NO: 28297 - DNA, 20 bp, Artificial Sequence
  Description of Artificial Sequence: Synthetic oligonucleotide
  Target: LAMA2; (+) strand; PAM type: NNGRRT; PAM sequence: ACGAAT
atgtacactgaaatagctga

SEQ ID NO: 28298 - DNA, 20 bp, Artificial Sequence
  Description of Artificial Sequence: Synthetic oligonucleotide
  Target: LAMA2; (+) strand; PAM type: NNGRRT; PAM sequence: ATGAAT
acactgaaatagctgaacga

SEQ ID NO: 28299 - DNA, 20 bp, Artificial Sequence
  Description of Artificial Sequence: Synthetic oligonucleotide
  Target: LAMA2; (+) strand; PAM type: NNGRRT; PAM sequence: AAGAAT
tttatagcattgtgctggag

SEQ ID NO: 28300 - DNA, 20 bp, Artificial Sequence
  Description of Artificial Sequence: Synthetic oligonucleotide
  Target: LAMA2; (+) strand; PAM type: NNGRRT; PAM sequence: CTGGAT
tgtgtctaataaaaactgca

SEQ ID NO: 28301 - DNA, 20 bp, Artificial Sequence
  Description of Artificial Sequence: Synthetic oligonucleotide
  Target: LAMA2; (+) strand; PAM type: NNGRRT; PAM sequence: CTGGAT
taaaaaataaaaaacaaaaa

SEQ ID NO: 28302 - DNA, 20 bp, Artificial Sequence
  Description of Artificial Sequence: Synthetic oligonucleotide
  Target: LAMA2; (+) strand; PAM type: NNGRRT; PAM sequence: TGGGAT
aacctcctagtctctttcac

SEQ ID NO: 28303 - DNA, 20 bp, Artificial Sequence
  Description of Artificial Sequence: Synthetic oligonucleotide
  Target: LAMA2; (+) strand; PAM type: NNGRRT; PAM sequence: GTGAGT
gaagctaaattttcttatct

SEQ ID NO: 28304 - DNA, 20 bp, Artificial Sequence
  Description of Artificial Sequence: Synthetic oligonucleotide
  Target: LAMA2; (+) strand; PAM type: NNGRRT; PAM sequence: AAGAGT
aatagactggaacatatgcc

SEQ ID NO: 28305 - DNA, 20 bp, Artificial Sequence
  Description of Artificial Sequence: Synthetic oligonucleotide
  Target: LAMA2; (+) strand; PAM type: NNGRRT; PAM sequence: CAGAAT
atatgccaagagtatacagt

SEQ ID NO: 28306 - DNA, 20 bp, Artificial Sequence
  Description of Artificial Sequence: Synthetic oligonucleotide
  Target: LAMA2; (+) strand; PAM type: NNGRRT; PAM sequence: AAGAAT
tatacagtcagaatctctct

SEQ ID NO: 28307 - DNA, 20 bp, Artificial Sequence
  Description of Artificial Sequence: Synthetic oligonucleotide
  Target: LAMA2; (+) strand; PAM type: NNGRRT; PAM sequence: AAGAAT
tgtttttaattgcttcccta

SEQ ID NO: 28308 - DNA, 20 bp, Artificial Sequence
  Description of Artificial Sequence: Synthetic oligonucleotide
  Target: LAMA2; (+) strand; PAM type: NNGRRT; PAM sequence: AAGAGT
gctccttatccatgatgtgt

SEQ ID NO: 28309 - DNA, 20 bp, Artificial Sequence
  Description of Artificial Sequence: Synthetic oligonucleotide
  Target: LAMA2; (+) strand; PAM type: NNGRRT; PAM sequence: GAGAAT
attgtataacgcaattatat

SEQ ID NO: 28310 - DNA, 20 bp, Artificial Sequence
  Description of Artificial Sequence: Synthetic oligonucleotide
  Target: LAMA2; (+) strand; PAM type: NNGRRT; PAM sequence: TGGGAT
caattatatgagaattgttt

SEQ ID NO: 28311 - DNA, 20 bp, Artificial Sequence
  Description of Artificial Sequence: Synthetic oligonucleotide
  Target: LAMA2; (+) strand; PAM type: NNGRRT; PAM sequence: TGGAAT
agttcttgttttaacacaag

SEQ ID NO: 28312 - DNA, 20 bp, Artificial Sequence
  Description of Artificial Sequence: Synthetic oligonucleotide
  Target: LAMA2; (+) strand; PAM type: NNGRRT; PAM sequence: CGGAGT
ttatttatttatttttgaga

SEQ ID NO: 28313 - DNA, 20 bp, Artificial Sequence
  Description of Artificial Sequence: Synthetic oligonucleotide
  Target: LAMA2; (+) strand; PAM type: NNGRRT; PAM sequence: CCGGGT
ctcactgcaagctccgcctc

SEQ ID NO: 28314 - DNA, 20 bp, Artificial Sequence
  Description of Artificial Sequence: Synthetic oligonucleotide
  Target: LAMA2; (+) strand; PAM type: NNGRRT; PAM sequence: CTGAGT
cattctcctgcctcagcctc

SEQ ID NO: 28315 - DNA, 20 bp, Artificial Sequence
  Description of Artificial Sequence: Synthetic oligonucleotide
  Target: LAMA2; (+) strand; PAM type: NNGRRT; PAM sequence: CGGGGT
ttttgtatttttagtacaga

SEQ ID NO: 28316 - DNA, 20 bp, Artificial Sequence
  Description of Artificial Sequence: Synthetic oligonucleotide
  Target: LAMA2; (+) strand; PAM type: NNGRRT; PAM sequence: CAGGAT
cggggtttcaccgtgttagc

SEQ ID NO: 28317 - DNA, 20 bp, Artificial Sequence
  Description of Artificial Sequence: Synthetic oligonucleotide
  Target: LAMA2; (+) strand; PAM type: NNGRRT; PAM sequence: AGGAAT
ccaattaataaatatgtcta

SEQ ID NO: 28318 - DNA, 20 bp, Artificial Sequence
  Description of Artificial Sequence: Synthetic oligonucleotide
  Target: LAMA2; (+) strand; PAM type: NNGRRT; PAM sequence: TTGGGT
ttatttacaaccagaaattg

SEQ ID NO: 28319 - DNA, 20 bp, Artificial Sequence
  Description of Artificial Sequence: Synthetic oligonucleotide
  Target: LAMA2; (+) strand; PAM type: NNGRRT; PAM sequence: CTGAGT
agatttcaagatattccagc

SEQ ID NO: 28320 - DNA, 20 bp, Artificial Sequence
  Description of Artificial Sequence: Synthetic oligonucleotide
  Target: LAMA2; (+) strand; PAM type: NNGRRT; PAM sequence: GTGAGT
gtccgaaagtcacaatatgc

SEQ ID NO: 28321 - DNA, 20 bp, Artificial Sequence
  Description of Artificial Sequence: Synthetic oligonucleotide
  Target: LAMA2; (+) strand; PAM type: NNGRRT; PAM sequence: TTGAGT
acaataagataaggctaaaa

SEQ ID NO: 28322 - DNA, 20 bp, Artificial Sequence
  Description of Artificial Sequence: Synthetic oligonucleotide
  Target: LAMA2; (+) strand; PAM type: NNGRRT; PAM sequence: TGGGAT
aaattgagtttcagatattt

SEQ ID NO: 28323 - DNA, 20 bp, Artificial Sequence
  Description of Artificial Sequence: Synthetic oligonucleotide
  Target: LAMA2; (+) strand; PAM type: NNGRRT; PAM sequence: TGGGAT
ataaaacaagctttgttcca

SEQ ID NO: 28324 - DNA, 20 bp, Artificial Sequence
  Description of Artificial Sequence: Synthetic oligonucleotide
  Target: LAMA2; (+) strand; PAM type: NNGRRT; PAM sequence: CAGGGT
gctaattcattttgagctta

SEQ ID NO: 28325 - DNA, 20 bp, Artificial Sequence
  Description of Artificial Sequence: Synthetic oligonucleotide
  Target: LAMA2; (+) strand; PAM type: NNGRRT; PAM sequence: CAGGAT
ttgagcttacagggttttat

SEQ ID NO: 28326 - DNA, 20 bp, Artificial Sequence
  Description of Artificial Sequence: Synthetic oligonucleotide
  Target: LAMA2; (+) strand; PAM type: NNGRRT; PAM sequence: TGGGGT
ttttataaataaaaatgttt

SEQ ID NO: 28327 - DNA, 20 bp, Artificial Sequence
  Description of Artificial Sequence: Synthetic oligonucleotide
  Target: LAMA2; (+) strand; PAM type: NNGRRT; PAM sequence: AAGAGT
gggtttcagatttaaaaatc

SEQ ID NO: 28328 - DNA, 20 bp, Artificial Sequence
  Description of Artificial Sequence: Synthetic oligonucleotide
  Target: LAMA2; (+) strand; PAM type: NNGRRT; PAM sequence: TTGGGT
tttctacatgtctcttcaca

SEQ ID NO: 28329 - DNA, 20 bp, Artificial Sequence
  Description of Artificial Sequence: Synthetic oligonucleotide
  Target: LAMA2; (+) strand; PAM type: NNGRRT; PAM sequence: TCGGGT
cttcaaggaaattaatatcc

SEQ ID NO: 28330 - DNA, 20 bp, Artificial Sequence
  Description of Artificial Sequence: Synthetic oligonucleotide
  Target: LAMA2; (+) strand; PAM type: NNGRRT; PAM sequence: AAGAAT
tgtagaagtgggcattatag

SEQ ID NO: 28331 - DNA, 20 bp, Artificial Sequence
  Description of Artificial Sequence: Synthetic oligonucleotide
  Target: LAMA2; (+) strand; PAM type: NNGRRT; PAM sequence: CTGAAT
ctttatttaaaaaatagctt

SEQ ID NO: 28332 - DNA, 20 bp, Artificial Sequence
  Description of Artificial Sequence: Synthetic oligonucleotide
  Target: LAMA2; (+) strand; PAM type: NNGRRT; PAM sequence: AAGGAT
aaaaatagcttctgaattgc

SEQ ID NO: 28333 - DNA, 20 bp, Artificial Sequence
  Description of Artificial Sequence: Synthetic oligonucleotide
  Target: LAMA2; (+) strand; PAM type: NNGRRT; PAM sequence: ATGAAT
caaggatatttttaagccac

SEQ ID NO: 28334 - DNA, 20 bp, Artificial Sequence
  Description of Artificial Sequence: Synthetic oligonucleotide
  Target: LAMA2; (+) strand; PAM type: NNGRRT; PAM sequence: GTGAAT
ctggacttttcaaggagcct

SEQ ID NO: 28335 - DNA, 20 bp, Artificial Sequence
  Description of Artificial Sequence: Synthetic oligonucleotide
  Target: LAMA2; (+) strand; PAM type: NNGRRT; PAM sequence: GTGGGT
aaccatgtggtgtggcaata

SEQ ID NO: 28336 - DNA, 20 bp, Artificial Sequence
  Description of Artificial Sequence: Synthetic oligonucleotide
  Target: LAMA2; (+) strand; PAM type: NNGRRT; PAM sequence: TGGGAT
tcccgcactgatggtgggct

SEQ ID NO: 28337 - DNA, 20 bp, Artificial Sequence
  Description of Artificial Sequence: Synthetic oligonucleotide
  Target: LAMA2; (+) strand; PAM type: NNGRRT; PAM sequence: ATGAAT
cagggaacttataaaaacaa

SEQ ID NO: 28338 - DNA, 20 bp, Artificial Sequence
  Description of Artificial Sequence: Synthetic oligonucleotide
  Target: LAMA2; (+) strand; PAM type: NNGRRT; PAM sequence: TGGGAT
tcactgtgcttgttccgttt

SEQ ID NO: 28339 - DNA, 20 bp, Artificial Sequence
  Description of Artificial Sequence: Synthetic oligonucleotide
  Target: LAMA2; (+) strand; PAM type: NNGRRT; PAM sequence: TTGAAT
ccattgcatttttatttaac

SEQ ID NO: 28340 - DNA, 20 bp, Artificial Sequence
  Description of Artificial Sequence: Synthetic oligonucleotide
  Target: LAMA2; (+) strand; PAM type: NNGRRT; PAM sequence: ATGAGT
cttgaatattttaatttagc

SEQ ID NO: 28341 - DNA, 20 bp, Artificial Sequence
  Description of Artificial Sequence: Synthetic oligonucleotide
  Target: LAMA2; (+) strand; PAM type: NNGRRT; PAM sequence: ATGGAT
atttagcatgagtcattccc

SEQ ID NO: 28342 - DNA, 20 bp, Artificial Sequence
  Description of Artificial Sequence: Synthetic oligonucleotide
  Target: LAMA2; (+) strand; PAM type: NNGRRT; PAM sequence: CTGAAT
ctgctactccaaagatcttc

SEQ ID NO: 28343 - DNA, 20 bp, Artificial Sequence
  Description of Artificial Sequence: Synthetic oligonucleotide
  Target: LAMA2; (+) strand; PAM type: NNGRRT; PAM sequence: GTGAAT
aaaataaagtcatcttgtta

SEQ ID NO: 28344 - DNA, 20 bp, Artificial Sequence
  Description of Artificial Sequence: Synthetic oligonucleotide
  Target: LAMA2; (+) strand; PAM type: NNGRRT; PAM sequence: CTGGAT
tcgagaaactagggaaaaag

SEQ ID NO: 28345 - DNA, 20 bp, Artificial Sequence
  Description of Artificial Sequence: Synthetic oligonucleotide
  Target: LAMA2; (+) strand; PAM type: NNGRRT; PAM sequence: TTGAAT
taaattataaacaatatatt

SEQ ID NO: 28346 - DNA, 20 bp, Artificial Sequence
  Description of Artificial Sequence: Synthetic oligonucleotide
  Target: LAMA2; (+) strand; PAM type: NNGRRT; PAM sequence: ACGAGT
tgaattcataattaaaatta

SEQ ID NO: 28347 - DNA, 20 bp, Artificial Sequence
  Description of Artificial Sequence: Synthetic oligonucleotide
  Target: LAMA2; (+) strand; PAM type: NNGRRT; PAM sequence: ATGAGT
cattgacctattaaagattt

SEQ ID NO: 28348 - DNA, 20 bp, Artificial Sequence
  Description of Artificial Sequence: Synthetic oligonucleotide
  Target: LAMA2; (+) strand; PAM type: NNGRRT; PAM sequence: CAGAAT
attgctttataaattattac

SEQ ID NO: 28349 - DNA, 20 bp, Artificial Sequence
  Description of Artificial Sequence: Synthetic oligonucleotide
  Target: LAMA2; (+) strand; PAM type: NNGRRT; PAM sequence: CTGGAT
tttttgtttactctgtgcaa

SEQ ID NO: 28350 - DNA, 20 bp, Artificial Sequence
  Description of Artificial Sequence: Synthetic oligonucleotide
  Target: LAMA2; (+) strand; PAM type: NNGRRT; PAM sequence: TAGAGT
caaaccatcttaccgatact

SEQ ID NO: 28351 - DNA, 20 bp, Artificial Sequence
  Description of Artificial Sequence: Synthetic oligonucleotide
  Target: LAMA2; (+) strand; PAM type: NNGRRT; PAM sequence: CAGAAT
ggagaccctgtatcactaga

SEQ ID NO: 28352 - DNA, 20 bp, Artificial Sequence
  Description of Artificial Sequence: Synthetic oligonucleotide
  Target: LAMA2; (+) strand; PAM type: NNGRRT; PAM sequence: CAGGAT
ctagacagaatactgaaaag

SEQ ID NO: 28353 - DNA, 20 bp, Artificial Sequence
  Description of Artificial Sequence: Synthetic oligonucleotide
  Target: LAMA2; (+) strand; PAM type: NNGRRT; PAM sequence: AAGGGT
taccatctgatttttttcct

SEQ ID NO: 28354 - DNA, 20 bp, Artificial Sequence
  Description of Artificial Sequence: Synthetic oligonucleotide
  Target: LAMA2; (+) strand; PAM type: NNGRRT; PAM sequence: GTGGAT
tttattccttgtctttttgt

SEQ ID NO: 28355 - DNA, 20 bp, Artificial Sequence
  Description of Artificial Sequence: Synthetic oligonucleotide
  Target: LAMA2; (+) strand; PAM type: NNGRRT; PAM sequence: AGGGGT
aatctccaggtttactgaac

SEQ ID NO: 28356 - DNA, 20 bp, Artificial Sequence
  Description of Artificial Sequence: Synthetic oligonucleotide
  Target: LAMA2; (+) strand; PAM type: NNGRRT; PAM sequence: TTGAAT
gctccaccacactattgggc

SEQ ID NO: 28357 - DNA, 20 bp, Artificial Sequence
  Description of Artificial Sequence: Synthetic oligonucleotide
  Target: LAMA2; (+) strand; PAM type: NNGRRT; PAM sequence: AAGGAT
cctgtttcctcatccacaaa

SEQ ID NO: 28358 - DNA, 20 bp, Artificial Sequence
  Description of Artificial Sequence: Synthetic oligonucleotide
  Target: LAMA2; (+) strand; PAM type: NNGRRT; PAM sequence: GGGAAT
aattataaaatcagcacaga

SEQ ID NO: 28359 - DNA, 20 bp, Artificial Sequence
  Description of Artificial Sequence: Synthetic oligonucleotide
  Target: LAMA2; (+) strand; PAM type: NNGRRT; PAM sequence: CCGGGT
ttcaaaatgggactgcgagg

SEQ ID NO: 28360 - DNA, 20 bp, Artificial Sequence
  Description of Artificial Sequence: Synthetic oligonucleotide
  Target: LAMA2; (+) strand; PAM type: NNGRRT; PAM sequence: AGGAGT
aggcagagcattttgaggtc

SEQ ID NO: 28361 - DNA, 20 bp, Artificial Sequence
  Description of Artificial Sequence: Synthetic oligonucleotide
  Target: LAMA2; (+) strand; PAM type: NNGRRT; PAM sequence: AAGAAT
tacttgggaggctgaggcag

SEQ ID NO: 28362 - DNA, 20 bp, Artificial Sequence
  Description of Artificial Sequence: Synthetic oligonucleotide
  Target: LAMA2; (+) strand; PAM type: NNGRRT; PAM sequence: TAGAGT
ctgcacttcagcctgagcga

SEQ ID NO: 28363 - DNA, 20 bp, Artificial Sequence
  Description of Artificial Sequence: Synthetic oligonucleotide
  Target: LAMA2; (+) strand; PAM type: NNGRRT; PAM sequence: CAGGAT
atattcaaagcaattgaaat

SEQ ID NO: 28364 - DNA, 20 bp, Artificial Sequence
  Description of Artificial Sequence: Synthetic oligonucleotide
  Target: LAMA2; (+) strand; PAM type: NNGRRT; PAM sequence: ATGAAT
acctaaatatctgttgacag

SEQ ID NO: 28365 - DNA, 20 bp, Artificial Sequence
  Description of Artificial Sequence: Synthetic oligonucleotide
  Target: LAMA2; (+) strand; PAM type: NNGRRT; PAM sequence: TAGGAT
aatgtggtatatacatacaa

SEQ ID NO: 28366 - DNA, 20 bp, Artificial Sequence
  Description of Artificial Sequence: Synthetic oligonucleotide
  Target: LAMA2; (+) strand; PAM type: NNGRRT; PAM sequence: AGGAGT
tatgttaagtgaagtaagcc

SEQ ID NO: 28367 - DNA, 20 bp, Artificial Sequence
  Description of Artificial Sequence: Synthetic oligonucleotide
  Target: LAMA2; (+) strand; PAM type: NNGRRT; PAM sequence: GAGAGT
tagtcaaaactcagaaacat

SEQ ID NO: 28368 - DNA, 20 bp, Artificial Sequence
  Description of Artificial Sequence: Synthetic oligonucleotide
  Target: LAMA2; (+) strand; PAM type: NNGRRT; PAM sequence: TAGAAT
aaaactcagaaacatgagag

SEQ ID NO: 28369 - DNA, 20 bp, Artificial Sequence
  Description of Artificial Sequence: Synthetic oligonucleotide
  Target: LAMA2; (+) strand; PAM type: NNGRRT; PAM sequence: CAGGGT
gagagtagaatggtagttac

SEQ ID NO: 28370 - DNA, 20 bp, Artificial Sequence
  Description of Artificial Sequence: Synthetic oligonucleotide
  Target: LAMA2; (+) strand; PAM type: NNGRRT; PAM sequence: CTGGGT
agaatggtagttaccagggt

SEQ ID NO: 28371 - DNA, 20 bp, Artificial Sequence
  Description of Artificial Sequence: Synthetic oligonucleotide
  Target: LAMA2; (+) strand; PAM type: NNGRRT; PAM sequence: AAGGAT
aaacaggaaagtattagtga

SEQ ID NO: 28372 - DNA, 20 bp, Artificial Sequence
  Description of Artificial Sequence: Synthetic oligonucleotide
  Target: LAMA2; (+) strand; PAM type: NNGRRT; PAM sequence: ATGAAT
aaaagttttatttatacaag

SEQ ID NO: 28373 - DNA, 20 bp, Artificial Sequence
  Description of Artificial Sequence: Synthetic oligonucleotide
  Target: LAMA2; (+) strand; PAM type: NNGRRT; PAM sequence: GAGAGT
cacaaaataataataataaa

SEQ ID NO: 28374 - DNA, 20 bp, Artificial Sequence
  Description of Artificial Sequence: Synthetic oligonucleotide
  Target: LAMA2; (+) strand; PAM type: NNGRRT; PAM sequence: AGGGAT
ttgttccagacgatcttctc

SEQ ID NO: 28375 - DNA, 20 bp, Artificial Sequence
  Description of Artificial Sequence: Synthetic oligonucleotide
  Target: LAMA2; (+) strand; PAM type: NNGRRT; PAM sequence: AAGGGT
tgatgtccccctgggaagca

SEQ ID NO: 28376 - DNA, 20 bp, Artificial Sequence
  Description of Artificial Sequence: Synthetic oligonucleotide
  Target: LAMA2; (+) strand; PAM type: NNGRRT; PAM sequence: GGGAAT
ggtgtctccctccagatgag

SEQ ID NO: 28377 - DNA, 20 bp, Artificial Sequence
  Description of Artificial Sequence: Synthetic oligonucleotide
  Target: LAMA2; (+) strand; PAM type: NNGRRT; PAM sequence: GAGGGT
agatttgaacccattaagct

SEQ ID NO: 28378 - DNA, 20 bp, Artificial Sequence
  Description of Artificial Sequence: Synthetic oligonucleotide
  Target: LAMA2; (+) strand; PAM type: NNGRRT; PAM sequence: GTGAGT
cttctgtaacaccacccact

SEQ ID NO: 28379 - DNA, 20 bp, Artificial Sequence
  Description of Artificial Sequence: Synthetic oligonucleotide
  Target: LAMA2; (+) strand; PAM type: NNGRRT; PAM sequence: GTGAGT
cttatgctgcttcctgggct

SEQ ID NO: 28380 - DNA, 20 bp, Artificial Sequence
  Description of Artificial Sequence: Synthetic oligonucleotide
  Target: LAMA2; (+) strand; PAM type: NNGRRT; PAM sequence: TAGAAT
ctaaattgctgtcttgcaag

SEQ ID NO: 28381 - DNA, 20 bp, Artificial Sequence
  Description of Artificial Sequence: Synthetic oligonucleotide
  Target: LAMA2; (+) strand; PAM type: NNGRRT; PAM sequence: CAGAAT
tatatttaccgcatacagtt

SEQ ID NO: 28382 - DNA, 20 bp, Artificial Sequence
  Description of Artificial Sequence: Synthetic oligonucleotide
  Target: LAMA2; (+) strand; PAM type: NNGRRT; PAM sequence: CAGAGT
atttattaatagtatattca

SEQ ID NO: 28383 - DNA, 20 bp, Artificial Sequence
  Description of Artificial Sequence: Synthetic oligonucleotide
  Target: LAMA2; (+) strand; PAM type: NNGRRT; PAM sequence: TTGGAT
atctgcttgctctagctgtg

SEQ ID NO: 28384 - DNA, 20 bp, Artificial Sequence
  Description of Artificial Sequence: Synthetic oligonucleotide
  Target: LAMA2; (+) strand; PAM type: NNGRRT; PAM sequence: CAGGGT
caaatgatagtggcttggag

SEQ ID NO: 28385 - DNA, 20 bp, Artificial Sequence
  Description of Artificial Sequence: Synthetic oligonucleotide
  Target: LAMA2; (+) strand; PAM type: NNGRRT; PAM sequence: CGGAAT
atgaaagtagtgagaagtgg

SEQ ID NO: 28386 - DNA, 20 bp, Artificial Sequence
  Description of Artificial Sequence: Synthetic oligonucleotide
  Target: LAMA2; (+) strand; PAM type: NNGRRT; PAM sequence: GAGGAT
tgaccaattggctctgccaa

SEQ ID NO: 28387 - DNA, 20 bp, Artificial Sequence
  Description of Artificial Sequence: Synthetic oligonucleotide
  Target: LAMA2; (+) strand; PAM type: NNGRRT; PAM sequence: GAGAAT
atcaattttccgtgaggtgt

SEQ ID NO: 28388 - DNA, 20 bp, Artificial Sequence
  Description of Artificial Sequence: Synthetic oligonucleotide
  Target: LAMA2; (+) strand; PAM type: NNGRRT; PAM sequence: AGGGAT
gtgtgagaatgagatggctg

SEQ ID NO: 28389 - DNA, 20 bp, Artificial Sequence
  Description of Artificial Sequence: Synthetic oligonucleotide
  Target: LAMA2; (+) strand; PAM type: NNGRRT; PAM sequence: ATGAGT
gagaatgagatggctgaggg

SEQ ID NO: 28390 - DNA, 20 bp, Artificial Sequence
  Description of Artificial Sequence: Synthetic oligonucleotide
  Target: LAMA2; (+) strand; PAM type: NNGRRT; PAM sequence: AAGGAT
gttttggcatgagcaaaggg

SEQ ID NO: 28391 - DNA, 20 bp, Artificial Sequence
  Description of Artificial Sequence: Synthetic oligonucleotide
  Target: LAMA2; (+) strand; PAM type: NNGRRT; PAM sequence: TTGAGT
ggcatgagcaaagggaagga

SEQ ID NO: 28392 - DNA, 20 bp, Artificial Sequence
  Description of Artificial Sequence: Synthetic oligonucleotide
  Target: LAMA2; (+) strand; PAM type: NNGRRT; PAM sequence: ATGAGT
aaggattgagttgctttgaa

SEQ ID NO: 28393 - DNA, 20 bp, Artificial Sequence
  Description of Artificial Sequence: Synthetic oligonucleotide
  Target: LAMA2; (+) strand; PAM type: NNGRRT; PAM sequence: AAGAAT
catagcaggttttgacagag

SEQ ID NO: 28394 - DNA, 20 bp, Artificial Sequence
  Description of Artificial Sequence: Synthetic oligonucleotide
  Target: LAMA2; (+) strand; PAM type: NNGRRT; PAM sequence: AGGAGT
aggttttgacagagaagaat

SEQ ID NO: 28395 - DNA, 20 bp, Artificial Sequence
  Description of Artificial Sequence: Synthetic oligonucleotide
  Target: LAMA2; (+) strand; PAM type: NNGRRT; PAM sequence: CTGAAT
tattagacattttggtgaag

SEQ ID NO: 28396 - DNA, 20 bp, Artificial Sequence
  Description of Artificial Sequence: Synthetic oligonucleotide
  Target: LAMA2; (+) strand; PAM type: NNGRRT; PAM sequence: TGGAAT
atagatagtgtatagtattc

SEQ ID NO: 28397 - DNA, 20 bp, Artificial Sequence
  Description of Artificial Sequence: Synthetic oligonucleotide
  Target: LAMA2; (+) strand; PAM type: NNGRRT; PAM sequence: ACGAAT
gagaaatgctgcttaaagat

SEQ ID NO: 28398 - DNA, 20 bp, Artificial Sequence
  Description of Artificial Sequence: Synthetic oligonucleotide
  Target: LAMA2; (+) strand; PAM type: NNGRRT; PAM sequence: GAGAAT
ctgcttaaagatacgaatta

SEQ ID NO: 28399 - DNA, 20 bp, Artificial Sequence
  Description of Artificial Sequence: Synthetic oligonucleotide
  Target: LAMA2; (+) strand; PAM type: NNGRRT; PAM sequence: TTGGAT
aacgttacatattctctttg

SEQ ID NO: 28400 - DNA, 20 bp, Artificial Sequence
  Description of Artificial Sequence: Synthetic oligonucleotide
  Target: LAMA2; (+) strand; PAM type: NNGRRT; PAM sequence: AGGAGT
aaataaacagcgtcagggca

SEQ ID NO: 28401 - DNA, 20 bp, Artificial Sequence
  Description of Artificial Sequence: Synthetic oligonucleotide
  Target: LAMA2; (+) strand; PAM type: NNGRRT; PAM sequence: GTGAAT
agaaaaacttgcacagcatg

SEQ ID NO: 28402 - DNA, 20 bp, Artificial Sequence
  Description of Artificial Sequence: Synthetic oligonucleotide
  Target: LAMA2; (+) strand; PAM type: NNGRRT; PAM sequence: AAGAGT
gcagattttaaaattgctaa

SEQ ID NO: 28403 - DNA, 20 bp, Artificial Sequence
  Description of Artificial Sequence: Synthetic oligonucleotide
  Target: LAMA2; (+) strand; PAM type: NNGRRT; PAM sequence: GGGAAT
taaaaaatattagtatttga

SEQ ID NO: 28404 - DNA, 20 bp, Artificial Sequence
  Description of Artificial Sequence: Synthetic oligonucleotide
  Target: LAMA2; (+) strand; PAM type: NNGRRT; PAM sequence: ATGGGT
aaatattagtatttgaggga

SEQ ID NO: 28405 - DNA, 20 bp, Artificial Sequence
  Description of Artificial Sequence: Synthetic oligonucleotide
  Target: LAMA2; (+) strand; PAM type: NNGRRT; PAM sequence: TTGAAT
tgggtatgttactagcttaa

SEQ ID NO: 28406 - DNA, 20 bp, Artificial Sequence
  Description of Artificial Sequence: Synthetic oligonucleotide
  Target: LAMA2; (+) strand; PAM type: NNGRRT; PAM sequence: TTGAAT
tcagtataaaatctcatatt

SEQ ID NO: 28407 - DNA, 20 bp, Artificial Sequence
  Description of Artificial Sequence: Synthetic oligonucleotide
  Target: LAMA2; (+) strand; PAM type: NNGRRT; PAM sequence: TGGAGT
taaaatgtccttccagcttg

SEQ ID NO: 28408 - DNA, 20 bp, Artificial Sequence
  Description of Artificial Sequence: Synthetic oligonucleotide
  Target: LAMA2; (+) strand; PAM type: NNGRRT; PAM sequence: TTGAGT
acataaaaataaaatgtttc

SEQ ID NO: 28409 - DNA, 20 bp, Artificial Sequence
  Description of Artificial Sequence: Synthetic oligonucleotide
  Target: LAMA2; (+) strand; PAM type: NNGRRT; PAM sequence: ATGAAT
ataatggggaggaaactaat

SEQ ID NO: 28410 - DNA, 20 bp, Artificial Sequence
  Description of Artificial Sequence: Synthetic oligonucleotide
  Target: LAMA2; (+) strand; PAM type: NNGRRT; PAM sequence: CAGAAT
ggaaactaatatgaatgaag

SEQ ID NO: 28411 - DNA, 20 bp, Artificial Sequence
  Description of Artificial Sequence: Synthetic oligonucleotide
  Target: LAMA2; (+) strand; PAM type: NNGRRT; PAM sequence: CAGAAT
tttacaaatacaaagaaagc

SEQ ID NO: 28412 - DNA, 20 bp, Artificial Sequence
  Description of Artificial Sequence: Synthetic oligonucleotide
  Target: LAMA2; (+) strand; PAM type: NNGRRT; PAM sequence: TTGAAT
gccagaatcaaaacccaatt

SEQ ID NO: 28413 - DNA, 20 bp, Artificial Sequence
  Description of Artificial Sequence: Synthetic oligonucleotide
  Target: LAMA2; (+) strand; PAM type: NNGRRT; PAM sequence: ATGAAT
ttgaatatcaagtgttaaat

SEQ ID NO: 28414 - DNA, 20 bp, Artificial Sequence
  Description of Artificial Sequence: Synthetic oligonucleotide
  Target: LAMA2; (+) strand; PAM type: NNGRRT; PAM sequence: CTGAAT
ttaaatatgaatatcagaaa

SEQ ID NO: 28415 - DNA, 20 bp, Artificial Sequence
  Description of Artificial Sequence: Synthetic oligonucleotide
  Target: LAMA2; (+) strand; PAM type: NNGRRT; PAM sequence: CAGAGT
aaaaaataagtttgtaaatt

SEQ ID NO: 28416 - DNA, 20 bp, Artificial Sequence
  Description of Artificial Sequence: Synthetic oligonucleotide
  Target: LAMA2; (+) strand; PAM type: NNGRRT; PAM sequence: TTGAAT
tatatcatagtgacatatcc

SEQ ID NO: 28417 - DNA, 20 bp, Artificial Sequence
  Description of Artificial Sequence: Synthetic oligonucleotide
  Target: LAMA2; (+) strand; PAM type: NNGRRT; PAM sequence: ATGGAT
attttgggaggctgaggcag

SEQ ID NO: 28418 - DNA, 20 bp, Artificial Sequence
  Description of Artificial Sequence: Synthetic oligonucleotide
  Target: LAMA2; (+) strand; PAM type: NNGRRT; PAM sequence: AGGAGT
cagatggattgcttgagctc

SEQ ID NO: 28419 - DNA, 20 bp, Artificial Sequence
  Description of Artificial Sequence: Synthetic oligonucleotide
  Target: LAMA2; (+) strand; PAM type: NNGRRT; PAM sequence: CAGAAT
tgagctcaggagtttgagac

SEQ ID NO: 28420 - DNA, 20 bp, Artificial Sequence
  Description of Artificial Sequence: Synthetic oligonucleotide
  Target: LAMA2; (+) strand; PAM type: NNGRRT; PAM sequence: GAGGAT
gacttcggaggttgagctgg

SEQ ID NO: 28421 - DNA, 20 bp, Artificial Sequence
  Description of Artificial Sequence: Synthetic oligonucleotide
  Target: LAMA2; (+) strand; PAM type: NNGRRT; PAM sequence: CTGGAT
ctgtgctactgcacttcagc

SEQ ID NO: 28422 - DNA, 20 bp, Artificial Sequence
  Description of Artificial Sequence: Synthetic oligonucleotide
  Target: LAMA2; (+) strand; PAM type: NNGRRT; PAM sequence: TAGAAT
aaaaatctgatatgataatt

SEQ ID NO: 28423 - DNA, 20 bp, Artificial Sequence
  Description of Artificial Sequence: Synthetic oligonucleotide
  Target: LAMA2; (+) strand; PAM type: NNGRRT; PAM sequence: ATGGGT
ctgatatgataatttagaat

SEQ ID NO: 28424 - DNA, 20 bp, Artificial Sequence
  Description of Artificial Sequence: Synthetic oligonucleotide
  Target: LAMA2; (+) strand; PAM type: NNGRRT; PAM sequence: AAGAAT
ctatttcactcactccttct

SEQ ID NO: 28425 - DNA, 20 bp, Artificial Sequence
  Description of Artificial Sequence: Synthetic oligonucleotide
  Target: LAMA2; (+) strand; PAM type: NNGRRT; PAM sequence: CAGAAT
catgtaatctttccaaatga

SEQ ID NO: 28426 - DNA, 20 bp, Artificial Sequence
  Description of Artificial Sequence: Synthetic oligonucleotide
  Target: LAMA2; (+) strand; PAM type: NNGRRT; PAM sequence: GGGAGT
tgaagtgctgcagtgaacat

SEQ ID NO: 28427 - DNA, 20 bp, Artificial Sequence
  Description of Artificial Sequence: Synthetic oligonucleotide
  Target: LAMA2; (+) strand; PAM type: NNGRRT; PAM sequence: TTGGGT
caaaactgatttcacatctt

SEQ ID NO: 28428 - DNA, 20 bp, Artificial Sequence
  Description of Artificial Sequence: Synthetic oligonucleotide
  Target: LAMA2; (+) strand; PAM type: NNGRRT; PAM sequence: AAGGAT
cattcccaccaacagtgtac

SEQ ID NO: 28429 - DNA, 20 bp, Artificial Sequence
  Description of Artificial Sequence: Synthetic oligonucleotide
  Target: LAMA2; (+) strand; PAM type: NNGRRT; PAM sequence: GTGGAT
atggaactctttatatattt

SEQ ID NO: 28430 - DNA, 20 bp, Artificial Sequence
  Description of Artificial Sequence: Synthetic oligonucleotide
  Target: LAMA2; (+) strand; PAM type: NNGRRT; PAM sequence: TTGAAT
ttgtggatattaacttttta

SEQ ID NO: 28431 - DNA, 20 bp, Artificial Sequence
  Description of Artificial Sequence: Synthetic oligonucleotide
  Target: LAMA2; (+) strand; PAM type: NNGRRT; PAM sequence: GGGGGT
acttttgtggcctatacttt

SEQ ID NO: 28432 - DNA, 20 bp, Artificial Sequence
  Description of Artificial Sequence: Synthetic oligonucleotide
  Target: LAMA2; (+) strand; PAM type: NNGRRT; PAM sequence: TGGAGT
tgtgttttcttctagcaatt

SEQ ID NO: 28433 - DNA, 20 bp, Artificial Sequence
  Description of Artificial Sequence: Synthetic oligonucleotide
  Target: LAMA2; (+) strand; PAM type: NNGRRT; PAM sequence: TCGAAT
acttaaggctttaattcatt

SEQ ID NO: 28434 - DNA, 20 bp, Artificial Sequence
  Description of Artificial Sequence: Synthetic oligonucleotide
  Target: LAMA2; (+) strand; PAM type: NNGRRT; PAM sequence: TTGAGT
aggctttaattcatttcgaa

SEQ ID NO: 28435 - DNA, 20 bp, Artificial Sequence
  Description of Artificial Sequence: Synthetic oligonucleotide
  Target: LAMA2; (+) strand; PAM type: NNGRRT; PAM sequence: GTGGAT
ccaattttattcttctgcat

SEQ ID NO: 28436 - DNA, 20 bp, Artificial Sequence
  Description of Artificial Sequence: Synthetic oligonucleotide
  Target: LAMA2; (+) strand; PAM type: NNGRRT; PAM sequence: TTGGGT
actgaaatctgtagattgct

SEQ ID NO: 28437 - DNA, 20 bp, Artificial Sequence
  Description of Artificial Sequence: Synthetic oligonucleotide
  Target: LAMA2; (+) strand; PAM type: NNGRRT; PAM sequence: CAGGAT
attcttccaatccatgaaca

SEQ ID NO: 28438 - DNA, 20 bp, Artificial Sequence
  Description of Artificial Sequence: Synthetic oligonucleotide
  Target: LAMA2; (+) strand; PAM type: NNGRRT; PAM sequence: TGGGAT
ttttttatagctattgtaaa

SEQ ID NO: 28439 - DNA, 20 bp, Artificial Sequence
  Description of Artificial Sequence: Synthetic oligonucleotide
  Target: LAMA2; (+) strand; PAM type: NNGRRT; PAM sequence: GTGAAT
atagtaaaatcttttccatg

SEQ ID NO: 28440 - DNA, 20 bp, Artificial Sequence
  Description of Artificial Sequence: Synthetic oligonucleotide
  Target: LAMA2; (+) strand; PAM type: NNGRRT; PAM sequence: AAGGAT
acttcctgtggttgactctt

SEQ ID NO: 28441 - DNA, 20 bp, Artificial Sequence
  Description of Artificial Sequence: Synthetic oligonucleotide
  Target: LAMA2; (+) strand; PAM type: NNGRRT; PAM sequence: CTGGGT
ctgaaaggagcccagcaatt

SEQ ID NO: 28442 - DNA, 20 bp, Artificial Sequence
  Description of Artificial Sequence: Synthetic oligonucleotide
  Target: LAMA2; (+) strand; PAM type: NNGRRT; PAM sequence: TTGAAT
tatcttcctcaattttcaac

SEQ ID NO: 28443 - DNA, 20 bp, Artificial Sequence
  Description of Artificial Sequence: Synthetic oligonucleotide
  Target: LAMA2; (+) strand; PAM type: NNGRRT; PAM sequence: AGGAAT
gccatttaaagaaaaatttc

SEQ ID NO: 28444 - DNA, 20 bp, Artificial Sequence
  Description of Artificial Sequence: Synthetic oligonucleotide
  Target: LAMA2; (+) strand; PAM type: NNGRRT; PAM sequence: AGGAGT
tcaggaataaggaaaaacac

SEQ ID NO: 28445 - DNA, 20 bp, Artificial Sequence
  Description of Artificial Sequence: Synthetic oligonucleotide
  Target: LAMA2; (+) strand; PAM type: NNGRRT; PAM sequence: TTGAAT
tttgaaagagatgcactcat

SEQ ID NO: 28446 - DNA, 20 bp, Artificial Sequence
  Description of Artificial Sequence: Synthetic oligonucleotide
  Target: LAMA2; (+) strand; PAM type: NNGRRT; PAM sequence: TGGAAT
tcatttgaatttataaactc

SEQ ID NO: 28447 - DNA, 20 bp, Artificial Sequence
  Description of Artificial Sequence: Synthetic oligonucleotide
  Target: LAMA2; (+) strand; PAM type: NNGRRT; PAM sequence: GAGGAT
acatacagattgtacacatt

SEQ ID NO: 28448 - DNA, 20 bp, Artificial Sequence
  Description of Artificial Sequence: Synthetic oligonucleotide
  Target: LAMA2; (+) strand; PAM type: NNGRRT; PAM sequence: GAGAAT
ggatgatgtttatgccataa

SEQ ID NO: 28449 - DNA, 20 bp, Artificial Sequence
  Description of Artificial Sequence: Synthetic oligonucleotide
  Target: LAMA2; (+) strand; PAM type: NNGRRT; PAM sequence: AGGGAT
atagaccactgttaggaagt

SEQ ID NO: 28450 - DNA, 20 bp, Artificial Sequence
  Description of Artificial Sequence: Synthetic oligonucleotide
  Target: LAMA2; (+) strand; PAM type: NNGRRT; PAM sequence: CAGAGT
ggaggagactcaagtaaaac

SEQ ID NO: 28451 - DNA, 20 bp, Artificial Sequence
  Description of Artificial Sequence: Synthetic oligonucleotide
  Target: LAMA2; (+) strand; PAM type: NNGRRT; PAM sequence: GAGAAT
tggtgcatatcctacaaatt

SEQ ID NO: 28452 - DNA, 20 bp, Artificial Sequence
  Description of Artificial Sequence: Synthetic oligonucleotide
  Target: LAMA2; (+) strand; PAM type: NNGRRT; PAM sequence: GCGGAT
actttgggaggccgaggcgg

SEQ ID NO: 28453 - DNA, 20 bp, Artificial Sequence
  Description of Artificial Sequence: Synthetic oligonucleotide
  Target: LAMA2; (+) strand; PAM type: NNGRRT; PAM sequence: GAGAAT
tacttgggaggctgaggcag

SEQ ID NO: 28454 - DNA, 20 bp, Artificial Sequence
  Description of Artificial Sequence: Synthetic oligonucleotide
  Target: LAMA2; (+) strand; PAM type: NNGRRT; PAM sequence: GAGGAT
tcagctacagcacattattg

SEQ ID NO: 28455 - DNA, 20 bp, Artificial Sequence
  Description of Artificial Sequence: Synthetic oligonucleotide
  Target: LAMA2; (+) strand; PAM type: NNGRRT; PAM sequence: AAGGAT
cttaattataatagagcaga

SEQ ID NO: 28456 - DNA, 20 bp, Artificial Sequence
  Description of Artificial Sequence: Synthetic oligonucleotide
  Target: LAMA2; (+) strand; PAM type: NNGRRT; PAM sequence: GTGGAT
gattagaaacagaaaagaag

SEQ ID NO: 28457 - DNA, 20 bp, Artificial Sequence
  Description of Artificial Sequence: Synthetic oligonucleotide
  Target: LAMA2; (+) strand; PAM type: NNGRRT; PAM sequence: AGGAAT
agaaaagaaggtggattatc

SEQ ID NO: 28458 - DNA, 20 bp, Artificial Sequence
  Description of Artificial Sequence: Synthetic oligonucleotide
  Target: LAMA2; (+) strand; PAM type: NNGRRT; PAM sequence: CTGAAT
gaataaagtcaaagaaggga

SEQ ID NO: 28459 - DNA, 20 bp, Artificial Sequence
  Description of Artificial Sequence: Synthetic oligonucleotide
  Target: LAMA2; (+) strand; PAM type: NNGRRT; PAM sequence: GTGAAT
ctggtgcactctggttcact

SEQ ID NO: 28460 - DNA, 20 bp, Artificial Sequence
  Description of Artificial Sequence: Synthetic oligonucleotide
  Target: LAMA2; (+) strand; PAM type: NNGRRT; PAM sequence: TAGAGT
ctgtgaatataagtgggcca

SEQ ID NO: 28461 - DNA, 20 bp, Artificial Sequence
  Description of Artificial Sequence: Synthetic oligonucleotide
  Target: LAMA2; (+) strand; PAM type: NNGRRT; PAM sequence: TGGAGT
tggtctctggccctaggcca

SEQ ID NO: 28462 - DNA, 20 bp, Artificial Sequence
  Description of Artificial Sequence: Synthetic oligonucleotide
  Target: LAMA2; (+) strand; PAM type: NNGRRT; PAM sequence: TGGAAT
ccacacttagccatctgata

SEQ ID NO: 28463 - DNA, 20 bp, Artificial Sequence
  Description of Artificial Sequence: Synthetic oligonucleotide
  Target: LAMA2; (+) strand; PAM type: NNGRRT; PAM sequence: AAGGGT
gaagcctgagataggagaga

SEQ ID NO: 28464 - DNA, 20 bp, Artificial Sequence
  Description of Artificial Sequence: Synthetic oligonucleotide
  Target: LAMA2; (+) strand; PAM type: NNGRRT; PAM sequence: AAGGAT
gaaataagataatgggaggg

SEQ ID NO: 28465 - DNA, 20 bp, Artificial Sequence
  Description of Artificial Sequence: Synthetic oligonucleotide
  Target: LAMA2; (+) strand; PAM type: NNGRRT; PAM sequence: CTGGAT
aagcaattcagccctggccc

SEQ ID NO: 28466 - DNA, 20 bp, Artificial Sequence
  Description of Artificial Sequence: Synthetic oligonucleotide
  Target: LAMA2; (+) strand; PAM type: NNGRRT; PAM sequence: AGGAAT
ttgtcaagaggaaagagaaa

SEQ ID NO: 28467 - DNA, 20 bp, Artificial Sequence
  Description of Artificial Sequence: Synthetic oligonucleotide
  Target: LAMA2; (+) strand; PAM type: NNGRRT; PAM sequence: TTGAGT
cagctgtttattcatttttc

SEQ ID NO: 28468 - DNA, 20 bp, Artificial Sequence
  Description of Artificial Sequence: Synthetic oligonucleotide
  Target: LAMA2; (+) strand; PAM type: NNGRRT; PAM sequence: CTGAGT
acccgacagaaaataaggtc

SEQ ID NO: 28469 - DNA, 20 bp, Artificial Sequence
  Description of Artificial Sequence: Synthetic oligonucleotide
  Target: LAMA2; (+) strand; PAM type: NNGRRT; PAM sequence: CTGAGT
ccctgtggtcagttattagt

SEQ ID NO: 28470 - DNA, 20 bp, Artificial Sequence
  Description of Artificial Sequence: Synthetic oligonucleotide
  Target: LAMA2; (+) strand; PAM type: NNGRRT; PAM sequence: AGGGAT
tctgtttctttgaaggaact

SEQ ID NO: 28471 - DNA, 20 bp, Artificial Sequence
  Description of Artificial Sequence: Synthetic oligonucleotide
  Target: LAMA2; (+) strand; PAM type: NNGRRT; PAM sequence: TAGGAT
aaaactagtaaatagatgat

SEQ ID NO: 28472 - DNA, 20 bp, Artificial Sequence
  Description of Artificial Sequence: Synthetic oligonucleotide
  Target: LAMA2; (+) strand; PAM type: NNGRRT; PAM sequence: CAGAAT
gattaggatccaactctgta

SEQ ID NO: 28473 - DNA, 20 bp, Artificial Sequence
  Description of Artificial Sequence: Synthetic oligonucleotide
  Target: LAMA2; (+) strand; PAM type: NNGRRT; PAM sequence: TGGGGT
aatggtaggaacctaaacct

SEQ ID NO: 28474 - DNA, 20 bp, Artificial Sequence
  Description of Artificial Sequence: Synthetic oligonucleotide
  Target: LAMA2; (+) strand; PAM type: NNGRRT; PAM sequence: GAGGAT
agtatgaagtcagatgtata

SEQ ID NO: 28475 - DNA, 20 bp, Artificial Sequence
  Description of Artificial Sequence: Synthetic oligonucleotide
  Target: LAMA2; (+) strand; PAM type: NNGRRT; PAM sequence: GGGGAT
gatctcaaccgcaaaagtca

SEQ ID NO: 28476 - DNA, 20 bp, Artificial Sequence
  Description of Artificial Sequence: Synthetic oligonucleotide
  Target: LAMA2; (+) strand; PAM type: NNGRRT; PAM sequence: GGGGAT
cacctcagcacagatctgga

SEQ ID NO: 28477 - DNA, 20 bp, Artificial Sequence
  Description of Artificial Sequence: Synthetic oligonucleotide
  Target: LAMA2; (+) strand; PAM type: NNGRRT; PAM sequence: CAGAGT
ttttttttttttttttgaga

SEQ ID NO: 28478 - DNA, 20 bp, Artificial Sequence
  Description of Artificial Sequence: Synthetic oligonucleotide
  Target: LAMA2; (+) strand; PAM type: NNGRRT; PAM sequence: TGGAGT
tctcgctctgtcacccaggc

SEQ ID NO: 28479 - DNA, 20 bp, Artificial Sequence
  Description of Artificial Sequence: Synthetic oligonucleotide
  Target: LAMA2; (+) strand; PAM type: NNGRRT; PAM sequence: CCGGGT
ctcactgcaagctccacctc

SEQ ID NO: 28480 - DNA, 20 bp, Artificial Sequence
  Description of Artificial Sequence: Synthetic oligonucleotide
  Target: LAMA2; (+) strand; PAM type: NNGRRT; PAM sequence: CTGAGT
cattctcccacctcagcctc

SEQ ID NO: 28481 - DNA, 20 bp, Artificial Sequence
  Description of Artificial Sequence: Synthetic oligonucleotide
  Target: LAMA2; (+) strand; PAM type: NNGRRT; PAM sequence: CGGGGT
ttttgtatttttagtagaga

SEQ ID NO: 28482 - DNA, 20 bp, Artificial Sequence
  Description of Artificial Sequence: Synthetic oligonucleotide
  Target: LAMA2; (+) strand; PAM type: NNGRRT; PAM sequence: CAGGAT
cggggtttcactgtgttagc

SEQ ID NO: 28483 - DNA, 20 bp, Artificial Sequence
  Description of Artificial Sequence: Synthetic oligonucleotide
  Target: LAMA2; (+) strand; PAM type: NNGRRT; PAM sequence: TGGGAT
gcctcggcctcccaaagtgc

SEQ ID NO: 28484 - DNA, 20 bp, Artificial Sequence
  Description of Artificial Sequence: Synthetic oligonucleotide
  Target: LAMA2; (+) strand; PAM type: NNGRRT; PAM sequence: TTGGAT
cttaattgcttgcatgaaaa

SEQ ID NO: 28485 - DNA, 20 bp, Artificial Sequence
  Description of Artificial Sequence: Synthetic oligonucleotide
  Target: LAMA2; (+) strand; PAM type: NNGRRT; PAM sequence: ATGGAT
tgcttgcatgaaaattggat

SEQ ID NO: 28486 - DNA, 20 bp, Artificial Sequence
  Description of Artificial Sequence: Synthetic oligonucleotide
  Target: LAMA2; (+) strand; PAM type: NNGRRT; PAM sequence: AAGAAT
catgaaaattggatatggat

SEQ ID NO: 28487 - DNA, 20 bp, Artificial Sequence
  Description of Artificial Sequence: Synthetic oligonucleotide
  Target: LAMA2; (+) strand; PAM type: NNGRRT; PAM sequence: GTGGAT
tccagaagcacctctttatt

SEQ ID NO: 28488 - DNA, 20 bp, Artificial Sequence
  Description of Artificial Sequence: Synthetic oligonucleotide
  Target: LAMA2; (+) strand; PAM type: NNGRRT; PAM sequence: AAGGGT
ggtaacaggtaactgctata

SEQ ID NO: 28489 - DNA, 20 bp, Artificial Sequence
  Description of Artificial Sequence: Synthetic oligonucleotide
  Target: LAMA2; (+) strand; PAM type: NNGRRT; PAM sequence: AAGGGT
acattttttttaactctttc

SEQ ID NO: 28490 - DNA, 20 bp, Artificial Sequence
  Description of Artificial Sequence: Synthetic oligonucleotide
  Target: LAMA2; (+) strand; PAM type: NNGRRT; PAM sequence: CAGAAT
cagatagtaagtggaggagc

SEQ ID NO: 28491 - DNA, 20 bp, Artificial Sequence
  Description of Artificial Sequence: Synthetic oligonucleotide
  Target: LAMA2; (+) strand; PAM type: NNGRRT; PAM sequence: GGGGAT
acacaaagtatcaggcacat

SEQ ID NO: 28492 - DNA, 20 bp, Artificial Sequence
  Description of Artificial Sequence: Synthetic oligonucleotide
  Target: LAMA2; (+) strand; PAM type: NNGRRT; PAM sequence: TAGAGT
gctaggccaggggctgtatt

SEQ ID NO: 28493 - DNA, 20 bp, Artificial Sequence
  Description of Artificial Sequence: Synthetic oligonucleotide
  Target: LAMA2; (+) strand; PAM type: NNGRRT; PAM sequence: TTGAAT
aattgaacacatgattttac

SEQ ID NO: 28494 - DNA, 20 bp, Artificial Sequence
  Description of Artificial Sequence: Synthetic oligonucleotide
  Target: LAMA2; (+) strand; PAM type: NNGRRT; PAM sequence: GTGAAT
gcggagaaacttgaccaact

SEQ ID NO: 28495 - DNA, 20 bp, Artificial Sequence
  Description of Artificial Sequence: Synthetic oligonucleotide
  Target: LAMA2; (+) strand; PAM type: NNGRRT; PAM sequence: AAGAAT
taaacggggcaaaagtaaag

SEQ ID NO: 28496 - DNA, 20 bp, Artificial Sequence
  Description of Artificial Sequence: Synthetic oligonucleotide
  Target: LAMA2; (+) strand; PAM type: NNGRRT; PAM sequence: GAGAAT
gcaaaagaagggaacattca

SEQ ID NO: 28497 - DNA, 20 bp, Artificial Sequence
  Description of Artificial Sequence: Synthetic oligonucleotide
  Target: LAMA2; (+) strand; PAM type: NNGRRT; PAM sequence: GAGAAT
atgttgatatattgagaggt

SEQ ID NO: 28498 - DNA, 20 bp, Artificial Sequence
  Description of Artificial Sequence: Synthetic oligonucleotide
  Target: LAMA2; (+) strand; PAM type: NNGRRT; PAM sequence: GGGAGT
tatattgagaggtgagaata

SEQ ID NO: 28499 - DNA, 20 bp, Artificial Sequence
  Description of Artificial Sequence: Synthetic oligonucleotide
  Target: LAMA2; (+) strand; PAM type: NNGRRT; PAM sequence: CAGAGT
gggagttggtaggcaagtgt

SEQ ID NO: 28500 - DNA, 20 bp, Artificial Sequence
  Description of Artificial Sequence: Synthetic oligonucleotide
  Target: LAMA2; (+) strand; PAM type: NNGRRT; PAM sequence: GAGGAT
aggcaagtgtcagagtgtgg

SEQ ID NO: 28501 - DNA, 20 bp, Artificial Sequence
  Description of Artificial Sequence: Synthetic oligonucleotide
  Target: LAMA2; (+) strand; PAM type: NNGRRT; PAM sequence: TGGAAT
attagaaattagctagccaa

SEQ ID NO: 28502 - DNA, 20 bp, Artificial Sequence
  Description of Artificial Sequence: Synthetic oligonucleotide
  Target: LAMA2; (+) strand; PAM type: NNGRRT; PAM sequence: TTGAGT
aatttaaagtctctgacatc

SEQ ID NO: 28503 - DNA, 20 bp, Artificial Sequence
  Description of Artificial Sequence: Synthetic oligonucleotide
  Target: LAMA2; (+) strand; PAM type: NNGRRT; PAM sequence: ATGAGT
gaaatgctgcttctatacat

SEQ ID NO: 28504 - DNA, 20 bp, Artificial Sequence
  Description of Artificial Sequence: Synthetic oligonucleotide
  Target: LAMA2; (+) strand; PAM type: NNGRRT; PAM sequence: TTGAGT
aacttttctctgaagaacct

SEQ ID NO: 28505 - DNA, 20 bp, Artificial Sequence
  Description of Artificial Sequence: Synthetic oligonucleotide
  Target: LAMA2; (+) strand; PAM type: NNGRRT; PAM sequence: GAGAAT
tctgaagaacctttgagtca

SEQ ID NO: 28506 - DNA, 20 bp, Artificial Sequence
  Description of Artificial Sequence: Synthetic oligonucleotide
  Target: LAMA2; (+) strand; PAM type: NNGRRT; PAM sequence: GAGAAT
gaacctttgagtcagagaat

SEQ ID NO: 28507 - DNA, 20 bp, Artificial Sequence
  Description of Artificial Sequence: Synthetic oligonucleotide
  Target: LAMA2; (+) strand; PAM type: NNGRRT; PAM sequence: CTGAAT
gagaatgagaatgaaggaga

SEQ ID NO: 28508 - DNA, 20 bp, Artificial Sequence
  Description of Artificial Sequence: Synthetic oligonucleotide
  Target: LAMA2; (+) strand; PAM type: NNGRRT; PAM sequence: CAGGAT
tttgttccaatctaatgaca

SEQ ID NO: 28509 - DNA, 20 bp, Artificial Sequence
  Description of Artificial Sequence: Synthetic oligonucleotide
  Target: LAMA2; (+) strand; PAM type: NNGRRT; PAM sequence: TAGAAT
ttttagcactttcttctttg

SEQ ID NO: 28510 - DNA, 20 bp, Artificial Sequence
  Description of Artificial Sequence: Synthetic oligonucleotide
  Target: LAMA2; (+) strand; PAM type: NNGRRT; PAM sequence: GGGAAT
atacgtatttttgaaaacta

SEQ ID NO: 28511 - DNA, 20 bp, Artificial Sequence
  Description of Artificial Sequence: Synthetic oligonucleotide
  Target: LAMA2; (+) strand; PAM type: NNGRRT; PAM sequence: AGGAGT
taagatgttagtaagacttt

SEQ ID NO: 28512 - DNA, 20 bp, Artificial Sequence
  Description of Artificial Sequence: Synthetic oligonucleotide
  Target: LAMA2; (+) strand; PAM type: NNGRRT; PAM sequence: GAGAAT
gagttgttggttcttttccg

SEQ ID NO: 28513 - DNA, 20 bp, Artificial Sequence
  Description of Artificial Sequence: Synthetic oligonucleotide
  Target: LAMA2; (+) strand; PAM type: NNGRRT; PAM sequence: AGGGAT
tccccaacctttttggtacc

SEQ ID NO: 28514 - DNA, 20 bp, Artificial Sequence
  Description of Artificial Sequence: Synthetic oligonucleotide
  Target: LAMA2; (+) strand; PAM type: NNGRRT; PAM sequence: TGGAAT
tgtggaagacagtttttcca

SEQ ID NO: 28515 - DNA, 20 bp, Artificial Sequence
  Description of Artificial Sequence: Synthetic oligonucleotide
  Target: LAMA2; (+) strand; PAM type: NNGRRT; PAM sequence: GGGGAT
ttttccatggaattgacagg

SEQ ID NO: 28516 - DNA, 20 bp, Artificial Sequence
  Description of Artificial Sequence: Synthetic oligonucleotide
  Target: LAMA2; (+) strand; PAM type: NNGRRT; PAM sequence: GGGAGT
tggaattgacaggggggatg

SEQ ID NO: 28517 - DNA, 20 bp, Artificial Sequence
  Description of Artificial Sequence: Synthetic oligonucleotide
  Target: LAMA2; (+) strand; PAM type: NNGRRT; PAM sequence: GGGGAT
tgacaggggggatggggagt

SEQ ID NO: 28518 - DNA, 20 bp, Artificial Sequence
  Description of Artificial Sequence: Synthetic oligonucleotide
  Target: LAMA2; (+) strand; PAM type: NNGRRT; PAM sequence: ATGGGT
aggggggatggggagtgggg

SEQ ID NO: 28519 - DNA, 20 bp, Artificial Sequence
  Description of Artificial Sequence: Synthetic oligonucleotide
  Target: LAMA2; (+) strand; PAM type: NNGRRT; PAM sequence: TAGAGT
tcatatcatcaagcattagt

SEQ ID NO: 28520 - DNA, 20 bp, Artificial Sequence
  Description of Artificial Sequence: Synthetic oligonucleotide
  Target: LAMA2; (+) strand; PAM type: NNGRRT; PAM sequence: GAGGGT
gctttccttctatttaccag

SEQ ID NO: 28521 - DNA, 20 bp, Artificial Sequence
  Description of Artificial Sequence: Synthetic oligonucleotide
  Target: LAMA2; (+) strand; PAM type: NNGRRT; PAM sequence: ATGGAT
ccaggagggtctctactgat

SEQ ID NO: 28522 - DNA, 20 bp, Artificial Sequence
  Description of Artificial Sequence: Synthetic oligonucleotide
  Target: LAMA2; (+) strand; PAM type: NNGRRT; PAM sequence: TTGGGT
atcaatggcaggaggtgata

SEQ ID NO: 28523 - DNA, 20 bp, Artificial Sequence
  Description of Artificial Sequence: Synthetic oligonucleotide
  Target: LAMA2; (+) strand; PAM type: NNGRRT; PAM sequence: TCGGAT
ctcaggggacctgggcaccg

SEQ ID NO: 28524 - DNA, 20 bp, Artificial Sequence
  Description of Artificial Sequence: Synthetic oligonucleotide
  Target: LAMA2; (+) strand; PAM type: NNGRRT; PAM sequence: TAGAAT
aaagtctaccccaggaagcc

SEQ ID NO: 28525 - DNA, 20 bp, Artificial Sequence
  Description of Artificial Sequence: Synthetic oligonucleotide
  Target: LAMA2; (+) strand; PAM type: NNGRRT; PAM sequence: ATGGAT
tctaccccaggaagcctaga

SEQ ID NO: 28526 - DNA, 20 bp, Artificial Sequence
  Description of Artificial Sequence: Synthetic oligonucleotide
  Target: LAMA2; (+) strand; PAM type: NNGRRT; PAM sequence: TAGAAT
cccaggaagcctagaatgga

SEQ ID NO: 28527 - DNA, 20 bp, Artificial Sequence
  Description of Artificial Sequence: Synthetic oligonucleotide
  Target: LAMA2; (+) strand; PAM type: NNGRRT; PAM sequence: TGGAGT
ggaggacgataaagaggaga

SEQ ID NO: 28528 - DNA, 20 bp, Artificial Sequence
  Description of Artificial Sequence: Synthetic oligonucleotide
  Target: LAMA2; (+) strand; PAM type: NNGRRT; PAM sequence: CTGGGT
gaggagatggagttaaaata

SEQ ID NO: 28529 - DNA, 20 bp, Artificial Sequence
  Description of Artificial Sequence: Synthetic oligonucleotide
  Target: LAMA2; (+) strand; PAM type: NNGRRT; PAM sequence: CAGGAT
aatactgggtctgtcataga

SEQ ID NO: 28530 - DNA, 20 bp, Artificial Sequence
  Description of Artificial Sequence: Synthetic oligonucleotide
  Target: LAMA2; (+) strand; PAM type: NNGRRT; PAM sequence: TGGAAT
gggtctgtcatagacaggat

SEQ ID NO: 28531 - DNA, 20 bp, Artificial Sequence
  Description of Artificial Sequence: Synthetic oligonucleotide
  Target: LAMA2; (+) strand; PAM type: NNGRRT; PAM sequence: TGGAAT
tgtcatagacaggattggaa

SEQ ID NO: 28532 - DNA, 20 bp, Artificial Sequence
  Description of Artificial Sequence: Synthetic oligonucleotide
  Target: LAMA2; (+) strand; PAM type: NNGRRT; PAM sequence: TAGAAT
tggaatcccaaatcagatga

SEQ ID NO: 28533 - DNA, 20 bp, Artificial Sequence
  Description of Artificial Sequence: Synthetic oligonucleotide
  Target: LAMA2; (+) strand; PAM type: NNGRRT; PAM sequence: TGGAAT
tagaatgaagggaaggtaca

SEQ ID NO: 28534 - DNA, 20 bp, Artificial Sequence
  Description of Artificial Sequence: Synthetic oligonucleotide
  Target: LAMA2; (+) strand; PAM type: NNGRRT; PAM sequence: GTGGGT
gcttattgaacccttcctct

SEQ ID NO: 28535 - DNA, 20 bp, Artificial Sequence
  Description of Artificial Sequence: Synthetic oligonucleotide
  Target: LAMA2; (+) strand; PAM type: NNGRRT; PAM sequence: GTGAAT
ggtagtgatgggcacattca

SEQ ID NO: 28536 - DNA, 20 bp, Artificial Sequence
  Description of Artificial Sequence: Synthetic oligonucleotide
  Target: LAMA2; (+) strand; PAM type: NNGRRT; PAM sequence: TGGAAT
cacattcagtgaattcagac

SEQ ID NO: 28537 - DNA, 20 bp, Artificial Sequence
  Description of Artificial Sequence: Synthetic oligonucleotide
  Target: LAMA2; (+) strand; PAM type: NNGRRT; PAM sequence: ATGAGT
gaacacattgtaaccattaa

SEQ ID NO: 28538 - DNA, 20 bp, Artificial Sequence
  Description of Artificial Sequence: Synthetic oligonucleotide
  Target: LAMA2; (+) strand; PAM type: NNGRRT; PAM sequence: ATGAGT
attaaatgagttaatcttat

SEQ ID NO: 28539 - DNA, 20 bp, Artificial Sequence
  Description of Artificial Sequence: Synthetic oligonucleotide
  Target: LAMA2; (+) strand; PAM type: NNGRRT; PAM sequence: AAGAGT
catacatacagatcacatgc

SEQ ID NO: 28540 - DNA, 20 bp, Artificial Sequence
  Description of Artificial Sequence: Synthetic oligonucleotide
  Target: LAMA2; (+) strand; PAM type: NNGRRT; PAM sequence: AAGAAT
ctcatatccagtaagtttgc

SEQ ID NO: 28541 - DNA, 20 bp, Artificial Sequence
  Description of Artificial Sequence: Synthetic oligonucleotide
  Target: LAMA2; (+) strand; PAM type: NNGRRT; PAM sequence: TGGAAT
ttctgaaatagcaatgaggt

SEQ ID NO: 28542 - DNA, 20 bp, Artificial Sequence
  Description of Artificial Sequence: Synthetic oligonucleotide
  Target: LAMA2; (+) strand; PAM type: NNGRRT; PAM sequence: GAGAGT
gagcaatgcaaatgttcgag

SEQ ID NO: 28543 - DNA, 20 bp, Artificial Sequence
  Description of Artificial Sequence: Synthetic oligonucleotide
  Target: LAMA2; (+) strand; PAM type: NNGRRT; PAM sequence: TCGAGT
ataaatacaatatttcaact

SEQ ID NO: 28544 - DNA, 20 bp, Artificial Sequence
  Description of Artificial Sequence: Synthetic oligonucleotide
  Target: LAMA2; (+) strand; PAM type: NNGRRT; PAM sequence: CAGGAT
atgcccaatgggaacgatac

SEQ ID NO: 28545 - DNA, 20 bp, Artificial Sequence
  Description of Artificial Sequence: Synthetic oligonucleotide
  Target: LAMA2; (+) strand; PAM type: NNGRRT; PAM sequence: GTGGAT
aggatctttcactcaattct

SEQ ID NO: 28546 - DNA, 20 bp, Artificial Sequence
  Description of Artificial Sequence: Synthetic oligonucleotide
  Target: LAMA2; (+) strand; PAM type: NNGRRT; PAM sequence: TTGAGT
gaaactaacctaagctcatc

SEQ ID NO: 28547 - DNA, 20 bp, Artificial Sequence
  Description of Artificial Sequence: Synthetic oligonucleotide
  Target: LAMA2; (+) strand; PAM type: NNGRRT; PAM sequence: TTGAGT
taaatgctttgttggttgct

SEQ ID NO: 28548 - DNA, 20 bp, Artificial Sequence
  Description of Artificial Sequence: Synthetic oligonucleotide
  Target: LAMA2; (+) strand; PAM type: NNGRRT; PAM sequence: AAGAAT
accagaggctttctaagaaa

SEQ ID NO: 28549 - DNA, 20 bp, Artificial Sequence
  Description of Artificial Sequence: Synthetic oligonucleotide
  Target: LAMA2; (+) strand; PAM type: NNGRRT; PAM sequence: AAGAAT
aaagactgttgtgttgactg

SEQ ID NO: 28550 - DNA, 20 bp, Artificial Sequence
  Description of Artificial Sequence: Synthetic oligonucleotide
  Target: LAMA2; (+) strand; PAM type: NNGRRT; PAM sequence: AGGAAT
ggaaggcaaagctttcattc

SEQ ID NO: 28551 - DNA, 20 bp, Artificial Sequence
  Description of Artificial Sequence: Synthetic oligonucleotide
  Target: LAMA2; (+) strand; PAM type: NNGRRT; PAM sequence: AAGAAT
ctaaagaaattaaagaaaag

SEQ ID NO: 28552 - DNA, 20 bp, Artificial Sequence
  Description of Artificial Sequence: Synthetic oligonucleotide
  Target: LAMA2; (+) strand; PAM type: NNGRRT; PAM sequence: TGGAAT
aatttaagttcagggacaat

SEQ ID NO: 28553 - DNA, 20 bp, Artificial Sequence
  Description of Artificial Sequence: Synthetic oligonucleotide
  Target: LAMA2; (+) strand; PAM type: NNGRRT; PAM sequence: AAGGAT
tatgcgttatgaccagtggg

SEQ ID NO: 28554 - DNA, 20 bp, Artificial Sequence
  Description of Artificial Sequence: Synthetic oligonucleotide
  Target: LAMA2; (+) strand; PAM type: NNGRRT; PAM sequence: CAGGAT
atgaccagtgggaaggatac

SEQ ID NO: 28555 - DNA, 20 bp, Artificial Sequence
  Description of Artificial Sequence: Synthetic oligonucleotide
  Target: LAMA2; (+) strand; PAM type: NNGRRT; PAM sequence: ATGGGT
ggatcttccattcagttatt

SEQ ID NO: 28556 - DNA, 20 bp, Artificial Sequence
  Description of Artificial Sequence: Synthetic oligonucleotide
  Target: LAMA2; (+) strand; PAM type: NNGRRT; PAM sequence: AGGGGT
gacctgttaagtctaagctt

SEQ ID NO: 28557 - DNA, 20 bp, Artificial Sequence
  Description of Artificial Sequence: Synthetic oligonucleotide
  Target: LAMA2; (+) strand; PAM type: NNGRRT; PAM sequence: TAGAGT
gttaagtctaagcttagggg

SEQ ID NO: 28558 - DNA, 20 bp, Artificial Sequence
  Description of Artificial Sequence: Synthetic oligonucleotide
  Target: LAMA2; (+) strand; PAM type: NNGRRT; PAM sequence: AAGAGT
tcagtagtcatcggacatgt

SEQ ID NO: 28559 - DNA, 20 bp, Artificial Sequence
  Description of Artificial Sequence: Synthetic oligonucleotide
  Target: LAMA2; (+) strand; PAM type: NNGRRT; PAM sequence: CTGAGT
aaaatgaggactttccagtt

SEQ ID NO: 28560 - DNA, 20 bp, Artificial Sequence
  Description of Artificial Sequence: Synthetic oligonucleotide
  Target: LAMA2; (+) strand; PAM type: NNGRRT; PAM sequence: AGGAAT
actttccagttctgagtaga

SEQ ID NO: 28561 - DNA, 20 bp, Artificial Sequence
  Description of Artificial Sequence: Synthetic oligonucleotide
  Target: LAMA2; (+) strand; PAM type: NNGRRT; PAM sequence: TAGAAT
tctaaaataatttattagac

SEQ ID NO: 28562 - DNA, 20 bp, Artificial Sequence
  Description of Artificial Sequence: Synthetic oligonucleotide
  Target: LAMA2; (+) strand; PAM type: NNGRRT; PAM sequence: TAGAAT
tagaataaataaatttatac

SEQ ID NO: 28563 - DNA, 20 bp, Artificial Sequence
  Description of Artificial Sequence: Synthetic oligonucleotide
  Target: LAMA2; (+) strand; PAM type: NNGRRT; PAM sequence: TGGAAT
tatgatgaacagtcaataaa

SEQ ID NO: 28564 - DNA, 20 bp, Artificial Sequence
  Description of Artificial Sequence: Synthetic oligonucleotide
  Target: LAMA2; (+) strand; PAM type: NNGRRT; PAM sequence: GAGGGT
aaatcattatgctaaacact

SEQ ID NO: 28565 - DNA, 20 bp, Artificial Sequence
  Description of Artificial Sequence: Synthetic oligonucleotide
  Target: LAMA2; (+) strand; PAM type: NNGRRT; PAM sequence: GGGAGT
aaattggcaataaaaatagg

SEQ ID NO: 28566 - DNA, 20 bp, Artificial Sequence
  Description of Artificial Sequence: Synthetic oligonucleotide
  Target: LAMA2; (+) strand; PAM type: NNGRRT; PAM sequence: GGGAGT
ataaaaatagggggagtcaa

SEQ ID NO: 28567 - DNA, 20 bp, Artificial Sequence
  Description of Artificial Sequence: Synthetic oligonucleotide
  Target: LAMA2; (+) strand; PAM type: NNGRRT; PAM sequence: TTGGAT
atagggggagtcaagggagt

SEQ ID NO: 28568 - DNA, 20 bp, Artificial Sequence
  Description of Artificial Sequence: Synthetic oligonucleotide
  Target: LAMA2; (+) strand; PAM type: NNGRRT; PAM sequence: GAGGAT
gtccatggaggtatttgtgg

SEQ ID NO: 28569 - DNA, 20 bp, Artificial Sequence
  Description of Artificial Sequence: Synthetic oligonucleotide
  Target: LAMA2; (+) strand; PAM type: NNGRRT; PAM sequence: TGGAAT
tggaggtatttgtgggagga

SEQ ID NO: 28570 - DNA, 20 bp, Artificial Sequence
  Description of Artificial Sequence: Synthetic oligonucleotide
  Target: LAMA2; (+) strand; PAM type: NNGRRT; PAM sequence: TTGAGT
tagatatccaatacatatat

SEQ ID NO: 28571 - DNA, 20 bp, Artificial Sequence
  Description of Artificial Sequence: Synthetic oligonucleotide
  Target: LAMA2; (+) strand; PAM type: NNGRRT; PAM sequence: GTGAAT
tatccaatacatatatttga

SEQ ID NO: 28572 - DNA, 20 bp, Artificial Sequence
  Description of Artificial Sequence: Synthetic oligonucleotide
  Target: LAMA2; (+) strand; PAM type: NNGRRT; PAM sequence: ATGAGT
caatacatatatttgagtga

SEQ ID NO: 28573 - DNA, 20 bp, Artificial Sequence
  Description of Artificial Sequence: Synthetic oligonucleotide
  Target: LAMA2; (+) strand; PAM type: NNGRRT; PAM sequence: ATGAAT
atgagtgatagactgactat

SEQ ID NO: 28574 - DNA, 20 bp, Artificial Sequence
  Description of Artificial Sequence: Synthetic oligonucleotide
  Target: LAMA2; (+) strand; PAM type: NNGRRT; PAM sequence: CAGAGT
aagcatatattttaagactt

SEQ ID NO: 28575 - DNA, 20 bp, Artificial Sequence
  Description of Artificial Sequence: Synthetic oligonucleotide
  Target: LAMA2; (+) strand; PAM type: NNGRRT; PAM sequence: CTGAAT
acttcagagtacctaatttt

SEQ ID NO: 28576 - DNA, 20 bp, Artificial Sequence
  Description of Artificial Sequence: Synthetic oligonucleotide
  Target: LAMA2; (+) strand; PAM type: NNGRRT; PAM sequence: TAGAAT
aatatgcaaatgagcagtat

SEQ ID NO: 28577 - DNA, 20 bp, Artificial Sequence
  Description of Artificial Sequence: Synthetic oligonucleotide
  Target: LAMA2; (+) strand; PAM type: NNGRRT; PAM sequence: CAGAAT
atgaagtaaaggaaaattga

SEQ ID NO: 28578 - DNA, 20 bp, Artificial Sequence
  Description of Artificial Sequence: Synthetic oligonucleotide
  Target: LAMA2; (+) strand; PAM type: NNGRRT; PAM sequence: TTGAGT
aaataatgcctggaaacaga

SEQ ID NO: 28579 - DNA, 20 bp, Artificial Sequence
  Description of Artificial Sequence: Synthetic oligonucleotide
  Target: LAMA2; (+) strand; PAM type: NNGRRT; PAM sequence: TTGAAT
ttgtcatttatccagtatat

SEQ ID NO: 28580 - DNA, 20 bp, Artificial Sequence
  Description of Artificial Sequence: Synthetic oligonucleotide
  Target: LAMA2; (+) strand; PAM type: NNGRRT; PAM sequence: TTGAAT
tatttcaatattccattgat

SEQ ID NO: 28581 - DNA, 20 bp, Artificial Sequence
  Description of Artificial Sequence: Synthetic oligonucleotide
  Target: LAMA2; (+) strand; PAM type: NNGRRT; PAM sequence: TGGGAT
tagtacaaactgagcttcaa

SEQ ID NO: 28582 - DNA, 20 bp, Artificial Sequence
  Description of Artificial Sequence: Synthetic oligonucleotide
  Target: LAMA2; (+) strand; PAM type: NNGRRT; PAM sequence: ATGAGT
agcttcaatgggattactaa

SEQ ID NO: 28583 - DNA, 20 bp, Artificial Sequence
  Description of Artificial Sequence: Synthetic oligonucleotide
  Target: LAMA2; (+) strand; PAM type: NNGRRT; PAM sequence: AAGGGT
acagagcagaggaaaaggcc

SEQ ID NO: 28584 - DNA, 20 bp, Artificial Sequence
  Description of Artificial Sequence: Synthetic oligonucleotide
  Target: LAMA2; (+) strand; PAM type: NNGRRT; PAM sequence: AAGGAT
tctattatgagaaagttagg

SEQ ID NO: 28585 - DNA, 20 bp, Artificial Sequence
  Description of Artificial Sequence: Synthetic oligonucleotide
  Target: LAMA2; (+) strand; PAM type: NNGRRT; PAM sequence: GGGGAT
ggattaaagttggcactgaa

SEQ ID NO: 28586 - DNA, 20 bp, Artificial Sequence
  Description of Artificial Sequence: Synthetic oligonucleotide
  Target: LAMA2; (+) strand; PAM type: NNGRRT; PAM sequence: AGGAGT
ggcactgaaggggattgaga

SEQ ID NO: 28587 - DNA, 20 bp, Artificial Sequence
  Description of Artificial Sequence: Synthetic oligonucleotide
  Target: LAMA2; (+) strand; PAM type: NNGRRT; PAM sequence: TGGAGT
cagtgtgtcctggaagtcag

SEQ ID NO: 28588 - DNA, 20 bp, Artificial Sequence
  Description of Artificial Sequence: Synthetic oligonucleotide
  Target: LAMA2; (+) strand; PAM type: NNGRRT; PAM sequence: TGGAAT
tttcccaagagcagtttcag

SEQ ID NO: 28589 - DNA, 20 bp, Artificial Sequence
  Description of Artificial Sequence: Synthetic oligonucleotide
  Target: LAMA2; (+) strand; PAM type: NNGRRT; PAM sequence: TGGAAT
gtggaatggaggaagaccaa

SEQ ID NO: 28590 - DNA, 20 bp, Artificial Sequence
  Description of Artificial Sequence: Synthetic oligonucleotide
  Target: LAMA2; (+) strand; PAM type: NNGRRT; PAM sequence: AGGAAT
gaataataggagcattgtgg

SEQ ID NO: 28591 - DNA, 20 bp, Artificial Sequence
  Description of Artificial Sequence: Synthetic oligonucleotide
  Target: LAMA2; (+) strand; PAM type: NNGRRT; PAM sequence: CTGAAT
aaacatgtacaatcagacct

SEQ ID NO: 28592 - DNA, 20 bp, Artificial Sequence
  Description of Artificial Sequence: Synthetic oligonucleotide
  Target: LAMA2; (+) strand; PAM type: NNGRRT; PAM sequence: GTGGAT
acaatcagacctctgaatct

SEQ ID NO: 28593 - DNA, 20 bp, Artificial Sequence
  Description of Artificial Sequence: Synthetic oligonucleotide
  Target: LAMA2; (+) strand; PAM type: NNGRRT; PAM sequence: ATGGAT
aatctgtggattccacatcc

SEQ ID NO: 28594 - DNA, 20 bp, Artificial Sequence
  Description of Artificial Sequence: Synthetic oligonucleotide
  Target: LAMA2; (+) strand; PAM type: NNGRRT; PAM sequence: TTGGGT
tacatagcctttacattgta

SEQ ID NO: 28595 - DNA, 20 bp, Artificial Sequence
  Description of Artificial Sequence: Synthetic oligonucleotide
  Target: LAMA2; (+) strand; PAM type: NNGRRT; PAM sequence: AGGGGT
ccctgaaactataactgatg

SEQ ID NO: 28596 - DNA, 20 bp, Artificial Sequence
  Description of Artificial Sequence: Synthetic oligonucleotide
  Target: LAMA2; (+) strand; PAM type: NNGRRT; PAM sequence: CTGGAT
taatgccatattgagcatga

SEQ ID NO: 28597 - DNA, 20 bp, Artificial Sequence
  Description of Artificial Sequence: Synthetic oligonucleotide
  Target: LAMA2; (+) strand; PAM type: NNGRRT; PAM sequence: ATGGAT
cttaatctcaagctacacat

SEQ ID NO: 28598 - DNA, 20 bp, Artificial Sequence
  Description of Artificial Sequence: Synthetic oligonucleotide
  Target: LAMA2; (+) strand; PAM type: NNGRRT; PAM sequence: GGGAAT
tcaagaaacttgtattgtta

SEQ ID NO: 28599 - DNA, 20 bp, Artificial Sequence
  Description of Artificial Sequence: Synthetic oligonucleotide
  Target: LAMA2; (+) strand; PAM type: NNGRRT; PAM sequence: TAGAAT
tgtattgttagggaatgtat

SEQ ID NO: 28600 - DNA, 20 bp, Artificial Sequence
  Description of Artificial Sequence: Synthetic oligonucleotide
  Target: LAMA2; (+) strand; PAM type: NNGRRT; PAM sequence: CAGGAT
gtatgcttacattagtaaat

SEQ ID NO: 28601 - DNA, 20 bp, Artificial Sequence
  Description of Artificial Sequence: Synthetic oligonucleotide
  Target: LAMA2; (+) strand; PAM type: NNGRRT; PAM sequence: TTGGGT
cattagtaaatcaggattat

SEQ ID NO: 28602 - DNA, 20 bp, Artificial Sequence
  Description of Artificial Sequence: Synthetic oligonucleotide
  Target: LAMA2; (+) strand; PAM type: NNGRRT; PAM sequence: CAGAGT
atcaggattatttgggtgaa

SEQ ID NO: 28603 - DNA, 20 bp, Artificial Sequence
  Description of Artificial Sequence: Synthetic oligonucleotide
  Target: LAMA2; (+) strand; PAM type: NNGRRT; PAM sequence: AAGAGT
ttggaaaacaaatttcaaag

SEQ ID NO: 28604 - DNA, 20 bp, Artificial Sequence
  Description of Artificial Sequence: Synthetic oligonucleotide
  Target: LAMA2; (+) strand; PAM type: NNGRRT; PAM sequence: TGGAAT
catagtctgatatttgcagt

SEQ ID NO: 28605 - DNA, 20 bp, Artificial Sequence
  Description of Artificial Sequence: Synthetic oligonucleotide
  Target: LAMA2; (+) strand; PAM type: NNGRRT; PAM sequence: ATGAAT
gtctgatatttgcagttgga

SEQ ID NO: 28606 - DNA, 20 bp, Artificial Sequence
  Description of Artificial Sequence: Synthetic oligonucleotide
  Target: LAMA2; (+) strand; PAM type: NNGRRT; PAM sequence: GGGGAT
agcaagacagtggtggtctt

SEQ ID NO: 28607 - DNA, 20 bp, Artificial Sequence
  Description of Artificial Sequence: Synthetic oligonucleotide
  Target: LAMA2; (+) strand; PAM type: NNGRRT; PAM sequence: ATGGAT
agacagtggtggtcttgggg

SEQ ID NO: 28608 - DNA, 20 bp, Artificial Sequence
  Description of Artificial Sequence: Synthetic oligonucleotide
  Target: LAMA2; (+) strand; PAM type: NNGRRT; PAM sequence: TGGAAT
gctaagctatccagtggact

SEQ ID NO: 28609 - DNA, 20 bp, Artificial Sequence
  Description of Artificial Sequence: Synthetic oligonucleotide
  Target: LAMA2; (+) strand; PAM type: NNGRRT; PAM sequence: CAGAGT
atattcacaagatctcttgg

SEQ ID NO: 28610 - DNA, 20 bp, Artificial Sequence
  Description of Artificial Sequence: Synthetic oligonucleotide
  Target: LAMA2; (+) strand; PAM type: NNGRRT; PAM sequence: CTGAAT
ctgtgagaagtgttcttttg

SEQ ID NO: 28611 - DNA, 20 bp, Artificial Sequence
  Description of Artificial Sequence: Synthetic oligonucleotide
  Target: LAMA2; (+) strand; PAM type: NNGRRT; PAM sequence: GAGAAT
cacggtttattaacctaaat

SEQ ID NO: 28612 - DNA, 20 bp, Artificial Sequence
  Description of Artificial Sequence: Synthetic oligonucleotide
  Target: LAMA2; (+) strand; PAM type: NNGRRT; PAM sequence: GAGAAT
atttttggggacagtcaaga

SEQ ID NO: 28613 - DNA, 20 bp, Artificial Sequence
  Description of Artificial Sequence: Synthetic oligonucleotide
  Target: LAMA2; (+) strand; PAM type: NNGRRT; PAM sequence: CTGAGT
aatttgatagaaatgtaagc

SEQ ID NO: 28614 - DNA, 20 bp, Artificial Sequence
  Description of Artificial Sequence: Synthetic oligonucleotide
  Target: LAMA2; (+) strand; PAM type: NNGRRT; PAM sequence: GCGGAT
acctgctaggtgccagaaat

SEQ ID NO: 28615 - DNA, 20 bp, Artificial Sequence
  Description of Artificial Sequence: Synthetic oligonucleotide
  Target: LAMA2; (+) strand; PAM type: NNGRRT; PAM sequence: AGGAAT
tgccagaaatgcggatcttg

SEQ ID NO: 28616 - DNA, 20 bp, Artificial Sequence
  Description of Artificial Sequence: Synthetic oligonucleotide
  Target: LAMA2; (+) strand; PAM type: NNGRRT; PAM sequence: TAGAAT
caagatctgcttcactcttt

SEQ ID NO: 28617 - DNA, 20 bp, Artificial Sequence
  Description of Artificial Sequence: Synthetic oligonucleotide
  Target: LAMA2; (+) strand; PAM type: NNGRRT; PAM sequence: GAGGAT
tttagaatccctgcattaga

SEQ ID NO: 28618 - DNA, 20 bp, Artificial Sequence
  Description of Artificial Sequence: Synthetic oligonucleotide
  Target: LAMA2; (+) strand; PAM type: NNGRRT; PAM sequence: TTGAGT
tatttttatcatgaggcatt

SEQ ID NO: 28619 - DNA, 20 bp, Artificial Sequence
  Description of Artificial Sequence: Synthetic oligonucleotide
  Target: LAMA2; (+) strand; PAM type: NNGRRT; PAM sequence: CAGAAT
gagtctattctttgtgacac

SEQ ID NO: 28620 - DNA, 20 bp, Artificial Sequence
  Description of Artificial Sequence: Synthetic oligonucleotide
  Target: LAMA2; (+) strand; PAM type: NNGRRT; PAM sequence: CAGAGT
ccagaattagtttctcatct

SEQ ID NO: 28621 - DNA, 20 bp, Artificial Sequence
  Description of Artificial Sequence: Synthetic oligonucleotide
  Target: LAMA2; (+) strand; PAM type: NNGRRT; PAM sequence: TGGGAT
tcagtttgtaaaaggctccc

SEQ ID NO: 28622 - DNA, 20 bp, Artificial Sequence
  Description of Artificial Sequence: Synthetic oligonucleotide
  Target: LAMA2; (+) strand; PAM type: NNGRRT; PAM sequence: AGGAAT
ttatctaaatgcaggacgtt

SEQ ID NO: 28623 - DNA, 20 bp, Artificial Sequence
  Description of Artificial Sequence: Synthetic oligonucleotide
  Target: LAMA2; (+) strand; PAM type: NNGRRT; PAM sequence: GTGGAT
atgatatatcatcttacaaa

SEQ ID NO: 28624 - DNA, 20 bp, Artificial Sequence
  Description of Artificial Sequence: Synthetic oligonucleotide
  Target: LAMA2; (+) strand; PAM type: NNGRRT; PAM sequence: GTGGGT
caaagtggatgaaaattcca

SEQ ID NO: 28625 - DNA, 20 bp, Artificial Sequence
  Description of Artificial Sequence: Synthetic oligonucleotide
  Target: LAMA2; (+) strand; PAM type: NNGRRT; PAM sequence: TTGAGT
gaaaattccagtgggtgacc

SEQ ID NO: 28626 - DNA, 20 bp, Artificial Sequence
  Description of Artificial Sequence: Synthetic oligonucleotide
  Target: LAMA2; (+) strand; PAM type: NNGRRT; PAM sequence: GTGAGT
gtttgtgtgtgtatgtgtgt

SEQ ID NO: 28627 - DNA, 20 bp, Artificial Sequence
  Description of Artificial Sequence: Synthetic oligonucleotide
  Target: LAMA2; (+) strand; PAM type: NNGRRT; PAM sequence: GTGAGT
gtgtgtatgtgtgtgtgagt

SEQ ID NO: 28628 - DNA, 20 bp, Artificial Sequence
  Description of Artificial Sequence: Synthetic oligonucleotide
  Target: LAMA2; (+) strand; PAM type: NNGRRT; PAM sequence: CAGAAT
aggtaataataatccattta

SEQ ID NO: 28629 - DNA, 20 bp, Artificial Sequence
  Description of Artificial Sequence: Synthetic oligonucleotide
  Target: LAMA2; (+) strand; PAM type: NNGRRT; PAM sequence: ATGGAT
atttaaccagtcccatattg

SEQ ID NO: 28630 - DNA, 20 bp, Artificial Sequence
  Description of Artificial Sequence: Synthetic oligonucleotide
  Target: LAMA2; (+) strand; PAM type: NNGRRT; PAM sequence: AAGAAT
attataataaaaaatgctga

SEQ ID NO: 28631 - DNA, 20 bp, Artificial Sequence
  Description of Artificial Sequence: Synthetic oligonucleotide
  Target: LAMA2; (+) strand; PAM type: NNGRRT; PAM sequence: GTGGGT
aagaaagttccatagactag

SEQ ID NO: 28632 - DNA, 20 bp, Artificial Sequence
  Description of Artificial Sequence: Synthetic oligonucleotide
  Target: LAMA2; (+) strand; PAM type: NNGRRT; PAM sequence: CAGGGT
ggaggctgaaaatctgagat

SEQ ID NO: 28633 - DNA, 20 bp, Artificial Sequence
  Description of Artificial Sequence: Synthetic oligonucleotide
  Target: LAMA2; (+) strand; PAM type: NNGRRT; PAM sequence: CAGGAT
attcaggagggctccaccct

SEQ ID NO: 28634 - DNA, 20 bp, Artificial Sequence
  Description of Artificial Sequence: Synthetic oligonucleotide
  Target: LAMA2; (+) strand; PAM type: NNGRRT; PAM sequence: TGGGAT
cccccaaatatcatcacatt

SEQ ID NO: 28635 - DNA, 20 bp, Artificial Sequence
  Description of Artificial Sequence: Synthetic oligonucleotide
  Target: LAMA2; (+) strand; PAM type: NNGRRT; PAM sequence: TAGGGT
aatatcatcacatttgggat

SEQ ID NO: 28636 - DNA, 20 bp, Artificial Sequence
  Description of Artificial Sequence: Synthetic oligonucleotide
  Target: LAMA2; (+) strand; PAM type: NNGRRT; PAM sequence: ATGAAT
tgggattagggtttcaacat

SEQ ID NO: 28637 - DNA, 20 bp, Artificial Sequence
  Description of Artificial Sequence: Synthetic oligonucleotide
  Target: LAMA2; (+) strand; PAM type: NNGRRT; PAM sequence: TAGAAT
tctgtattattttatgtctg

SEQ ID NO: 28638 - DNA, 20 bp, Artificial Sequence
  Description of Artificial Sequence: Synthetic oligonucleotide
  Target: LAMA2; (+) strand; PAM type: NNGRRT; PAM sequence: TGGAAT
tgtagaataattcctagaag

SEQ ID NO: 28639 - DNA, 20 bp, Artificial Sequence
  Description of Artificial Sequence: Synthetic oligonucleotide
  Target: LAMA2; (+) strand; PAM type: NNGRRT; PAM sequence: CAGAAT
tagaagtggaattgctagct

SEQ ID NO: 28640 - DNA, 20 bp, Artificial Sequence
  Description of Artificial Sequence: Synthetic oligonucleotide
  Target: LAMA2; (+) strand; PAM type: NNGRRT; PAM sequence: GAGAGT
ctctcttagtctaaccatca

SEQ ID NO: 28641 - DNA, 20 bp, Artificial Sequence
  Description of Artificial Sequence: Synthetic oligonucleotide
  Target: LAMA2; (+) strand; PAM type: NNGRRT; PAM sequence: TGGGGT
gagagtattaccaatatttg

SEQ ID NO: 28642 - DNA, 20 bp, Artificial Sequence
  Description of Artificial Sequence: Synthetic oligonucleotide
  Target: LAMA2; (+) strand; PAM type: NNGRRT; PAM sequence: GAGGAT
acatttatcctattatgagg

SEQ ID NO: 28643 - DNA, 20 bp, Artificial Sequence
  Description of Artificial Sequence: Synthetic oligonucleotide
  Target: LAMA2; (+) strand; PAM type: NNGRRT; PAM sequence: TTGAAT
tcattttaattttcttttct

SEQ ID NO: 28644 - DNA, 20 bp, Artificial Sequence
  Description of Artificial Sequence: Synthetic oligonucleotide
  Target: LAMA2; (+) strand; PAM type: NNGRRT; PAM sequence: AAGAGT
gcatttctttattgatttac

SEQ ID NO: 28645 - DNA, 20 bp, Artificial Sequence
  Description of Artificial Sequence: Synthetic oligonucleotide
  Target: LAMA2; (+) strand; PAM type: NNGRRT; PAM sequence: TTGAGT
tattgatttacaagagttct

SEQ ID NO: 28646 - DNA, 20 bp, Artificial Sequence
  Description of Artificial Sequence: Synthetic oligonucleotide
  Target: LAMA2; (+) strand; PAM type: NNGRRT; PAM sequence: CAGAAT
tcacacagtttattcttcat

SEQ ID NO: 28647 - DNA, 20 bp, Artificial Sequence
  Description of Artificial Sequence: Synthetic oligonucleotide
  Target: LAMA2; (+) strand; PAM type: NNGRRT; PAM sequence: CTGAAT
tcacatagaaaatgatctga

SEQ ID NO: 28648 - DNA, 20 bp, Artificial Sequence
  Description of Artificial Sequence: Synthetic oligonucleotide
  Target: LAMA2; (+) strand; PAM type: NNGRRT; PAM sequence: CTGAAT
ttctcttgatgtcaactgtg

SEQ ID NO: 28649 - DNA, 20 bp, Artificial Sequence
  Description of Artificial Sequence: Synthetic oligonucleotide
  Target: LAMA2; (+) strand; PAM type: NNGRRT; PAM sequence: TAGAGT
ttcaggtttaacatattttt

SEQ ID NO: 28650 - DNA, 20 bp, Artificial Sequence
  Description of Artificial Sequence: Synthetic oligonucleotide
  Target: LAMA2; (+) strand; PAM type: NNGRRT; PAM sequence: TAGGGT
tttttagagtgtgattttca

SEQ ID NO: 28651 - DNA, 20 bp, Artificial Sequence
  Description of Artificial Sequence: Synthetic oligonucleotide
  Target: LAMA2; (+) strand; PAM type: NNGRRT; PAM sequence: ATGAAT
tagggtatgttacattcttg

SEQ ID NO: 28652 - DNA, 20 bp, Artificial Sequence
  Description of Artificial Sequence: Synthetic oligonucleotide
  Target: LAMA2; (+) strand; PAM type: NNGRRT; PAM sequence: CAGAAT
taatgtgatgttttcaagta

SEQ ID NO: 28653 - DNA, 20 bp, Artificial Sequence
  Description of Artificial Sequence: Synthetic oligonucleotide
  Target: LAMA2; (+) strand; PAM type: NNGRRT; PAM sequence: ATGGGT
agaattattttaagttccta

SEQ ID NO: 28654 - DNA, 20 bp, Artificial Sequence
  Description of Artificial Sequence: Synthetic oligonucleotide
  Target: LAMA2; (+) strand; PAM type: NNGRRT; PAM sequence: AAGAAT
ggcacaataattttcagaga

SEQ ID NO: 28655 - DNA, 20 bp, Artificial Sequence
  Description of Artificial Sequence: Synthetic oligonucleotide
  Target: LAMA2; (+) strand; PAM type: NNGRRT; PAM sequence: AAGAAT
ttttcagagaaagaatgatt

SEQ ID NO: 28656 - DNA, 20 bp, Artificial Sequence
  Description of Artificial Sequence: Synthetic oligonucleotide
  Target: LAMA2; (+) strand; PAM type: NNGRRT; PAM sequence: TCGAAT
ttatggaaatcttaggaagg

SEQ ID NO: 28657 - DNA, 20 bp, Artificial Sequence
  Description of Artificial Sequence: Synthetic oligonucleotide
  Target: LAMA2; (+) strand; PAM type: NNGRRT; PAM sequence: CTGAAT
gccagtgcataggcatgtac

SEQ ID NO: 28658 - DNA, 20 bp, Artificial Sequence
  Description of Artificial Sequence: Synthetic oligonucleotide
  Target: LAMA2; (+) strand; PAM type: NNGRRT; PAM sequence: GAGAAT
gaatctgcgtaactaattgg

SEQ ID NO: 28659 - DNA, 20 bp, Artificial Sequence
  Description of Artificial Sequence: Synthetic oligonucleotide
  Target: LAMA2; (+) strand; PAM type: NNGRRT; PAM sequence: TAGAAT
tgatccttctccagaactgc

SEQ ID NO: 28660 - DNA, 20 bp, Artificial Sequence
  Description of Artificial Sequence: Synthetic oligonucleotide
  Target: LAMA2; (+) strand; PAM type: NNGRRT; PAM sequence: GAGGAT
tatattcgcctgagatttca

SEQ ID NO: 28661 - DNA, 20 bp, Artificial Sequence
  Description of Artificial Sequence: Synthetic oligonucleotide
  Target: LAMA2; (+) strand; PAM type: NNGRRT; PAM sequence: CTGAAT
gatttcagaggatccgcaca

SEQ ID NO: 28662 - DNA, 20 bp, Artificial Sequence
  Description of Artificial Sequence: Synthetic oligonucleotide
  Target: LAMA2; (+) strand; PAM type: NNGRRT; PAM sequence: AAGAGT
attgaccccattgtcaccag

SEQ ID NO: 28663 - DNA, 20 bp, Artificial Sequence
  Description of Artificial Sequence: Synthetic oligonucleotide
  Target: LAMA2; (+) strand; PAM type: NNGRRT; PAM sequence: ATGAAT
caccagaagagtaagttatg

SEQ ID NO: 28664 - DNA, 20 bp, Artificial Sequence
  Description of Artificial Sequence: Synthetic oligonucleotide
  Target: LAMA2; (+) strand; PAM type: NNGRRT; PAM sequence: AGGAGT
aaatgttttcagtgatttgt

SEQ ID NO: 28665 - DNA, 20 bp, Artificial Sequence
  Description of Artificial Sequence: Synthetic oligonucleotide
  Target: LAMA2; (+) strand; PAM type: NNGRRT; PAM sequence: TAGAAT
ttattatcaaatttttattt

SEQ ID NO: 28666 - DNA, 20 bp, Artificial Sequence
  Description of Artificial Sequence: Synthetic oligonucleotide
  Target: LAMA2; (+) strand; PAM type: NNGRRT; PAM sequence: GAGAAT
aatttcttcttttgtaaaat

SEQ ID NO: 28667 - DNA, 20 bp, Artificial Sequence
  Description of Artificial Sequence: Synthetic oligonucleotide
  Target: LAMA2; (+) strand; PAM type: NNGRRT; PAM sequence: CAGAAT
tacttaataatcttattttt

SEQ ID NO: 28668 - DNA, 20 bp, Artificial Sequence
  Description of Artificial Sequence: Synthetic oligonucleotide
  Target: LAMA2; (+) strand; PAM type: NNGRRT; PAM sequence: GGGGAT
aattagcctttgtcacctta

SEQ ID NO: 28669 - DNA, 20 bp, Artificial Sequence
  Description of Artificial Sequence: Synthetic oligonucleotide
  Target: LAMA2; (+) strand; PAM type: NNGRRT; PAM sequence: GCGAGT
tactattataattggctttg

SEQ ID NO: 28670 - DNA, 20 bp, Artificial Sequence
  Description of Artificial Sequence: Synthetic oligonucleotide
  Target: LAMA2; (+) strand; PAM type: NNGRRT; PAM sequence: TGGGAT
gtcttaaaccttaatgtgta

SEQ ID NO: 28671 - DNA, 20 bp, Artificial Sequence
  Description of Artificial Sequence: Synthetic oligonucleotide
  Target: LAMA2; (+) strand; PAM type: NNGRRT; PAM sequence: ATGAAT
tttggttttatgcttgatta

SEQ ID NO: 28672 - DNA, 20 bp, Artificial Sequence
  Description of Artificial Sequence: Synthetic oligonucleotide
  Target: LAMA2; (+) strand; PAM type: NNGRRT; PAM sequence: AGGAAT
gctgtcttccagtgttaaac

SEQ ID NO: 28673 - DNA, 20 bp, Artificial Sequence
  Description of Artificial Sequence: Synthetic oligonucleotide
  Target: LAMA2; (+) strand; PAM type: NNGRRT; PAM sequence: TGGGAT
cagtgttaaacaggaatttg

SEQ ID NO: 28674 - DNA, 20 bp, Artificial Sequence
  Description of Artificial Sequence: Synthetic oligonucleotide
  Target: LAMA2; (+) strand; PAM type: NNGRRT; PAM sequence: ATGAGT
gatgatcaacccagattgct

SEQ ID NO: 28675 - DNA, 20 bp, Artificial Sequence
  Description of Artificial Sequence: Synthetic oligonucleotide
  Target: LAMA2; (+) strand; PAM type: NNGRRT; PAM sequence: GTGAAT
actctataaagtaaactcct

SEQ ID NO: 28676 - DNA, 20 bp, Artificial Sequence
  Description of Artificial Sequence: Synthetic oligonucleotide
  Target: LAMA2; (+) strand; PAM type: NNGRRT; PAM sequence: TAGAGT
ataaagtaaactcctgtgaa

SEQ ID NO: 28677 - DNA, 20 bp, Artificial Sequence
  Description of Artificial Sequence: Synthetic oligonucleotide
  Target: LAMA2; (+) strand; PAM type: NNGRRT; PAM sequence: TAGAAT
taggacaaagcatttaattc

SEQ ID NO: 28678 - DNA, 20 bp, Artificial Sequence
  Description of Artificial Sequence: Synthetic oligonucleotide
  Target: LAMA2; (+) strand; PAM type: NNGRRT; PAM sequence: CTGAAT
cgtcatcggttgcaaaattg

SEQ ID NO: 28679 - DNA, 20 bp, Artificial Sequence
  Description of Artificial Sequence: Synthetic oligonucleotide
  Target: LAMA2; (+) strand; PAM type: NNGRRT; PAM sequence: TAGGGT
ttgcaaaattgctgaatcac

SEQ ID NO: 28680 - DNA, 20 bp, Artificial Sequence
  Description of Artificial Sequence: Synthetic oligonucleotide
  Target: LAMA2; (+) strand; PAM type: NNGRRT; PAM sequence: TTGGAT
tcattattttatagcaatgt

SEQ ID NO: 28681 - DNA, 20 bp, Artificial Sequence
  Description of Artificial Sequence: Synthetic oligonucleotide
  Target: LAMA2; (+) strand; PAM type: NNGRRT; PAM sequence: TGGAGT
aaggaagactggtgtgaaat

SEQ ID NO: 28682 - DNA, 20 bp, Artificial Sequence
  Description of Artificial Sequence: Synthetic oligonucleotide
  Target: LAMA2; (+) strand; PAM type: NNGRRT; PAM sequence: TAGAGT
ctatcatctcttgcaggagg

SEQ ID NO: 28683 - DNA, 20 bp, Artificial Sequence
  Description of Artificial Sequence: Synthetic oligonucleotide
  Target: LAMA2; (+) strand; PAM type: NNGRRT; PAM sequence: GGGGGT
tctcttgcaggaggtagagt

SEQ ID NO: 28684 - DNA, 20 bp, Artificial Sequence
  Description of Artificial Sequence: Synthetic oligonucleotide
  Target: LAMA2; (+) strand; PAM type: NNGRRT; PAM sequence: TGGGGT
gcaggaggtagagtgggggt

SEQ ID NO: 28685 - DNA, 20 bp, Artificial Sequence
  Description of Artificial Sequence: Synthetic oligonucleotide
  Target: LAMA2; (+) strand; PAM type: NNGRRT; PAM sequence: ATGAGT
tatttataactttatcgtac

SEQ ID NO: 28686 - DNA, 20 bp, Artificial Sequence
  Description of Artificial Sequence: Synthetic oligonucleotide
  Target: LAMA2; (+) strand; PAM type: NNGRRT; PAM sequence: GGGGAT
aaagaagtaaattggaaaaa

SEQ ID NO: 28687 - DNA, 20 bp, Artificial Sequence
  Description of Artificial Sequence: Synthetic oligonucleotide
  Target: LAMA2; (+) strand; PAM type: NNGRRT; PAM sequence: TGGAAT
tttttgtgtgtgtgtataat

SEQ ID NO: 28688 - DNA, 20 bp, Artificial Sequence
  Description of Artificial Sequence: Synthetic oligonucleotide
  Target: LAMA2; (+) strand; PAM type: NNGRRT; PAM sequence: TTGAAT
tctaacgctaagatgattat

SEQ ID NO: 28689 - DNA, 20 bp, Artificial Sequence
  Description of Artificial Sequence: Synthetic oligonucleotide
  Target: LAMA2; (+) strand; PAM type: NNGRRT; PAM sequence: CTGGGT
taattatccttaaaaaatag

SEQ ID NO: 28690 - DNA, 20 bp, Artificial Sequence
  Description of Artificial Sequence: Synthetic oligonucleotide
  Target: LAMA2; (+) strand; PAM type: NNGRRT; PAM sequence: AGGAAT
ttttcttcttaatatggtta

SEQ ID NO: 28691 - DNA, 20 bp, Artificial Sequence
  Description of Artificial Sequence: Synthetic oligonucleotide
  Target: LAMA2; (+) strand; PAM type: NNGRRT; PAM sequence: GTGAAT
aaacagtgtgcgtatgattt

SEQ ID NO: 28692 - DNA, 20 bp, Artificial Sequence
  Description of Artificial Sequence: Synthetic oligonucleotide
  Target: LAMA2; (+) strand; PAM type: NNGRRT; PAM sequence: GAGGGT
ttgctataatcacaataaaa

SEQ ID NO: 28693 - DNA, 20 bp, Artificial Sequence
  Description of Artificial Sequence: Synthetic oligonucleotide
  Target: LAMA2; (+) strand; PAM type: NNGRRT; PAM sequence: AAGAAT
tatgtaaaacaacttttatg

SEQ ID NO: 28694 - DNA, 20 bp, Artificial Sequence
  Description of Artificial Sequence: Synthetic oligonucleotide
  Target: LAMA2; (+) strand; PAM type: NNGRRT; PAM sequence: AAGAGT
tgggctaagatcacagtgct

SEQ ID NO: 28695 - DNA, 20 bp, Artificial Sequence
  Description of Artificial Sequence: Synthetic oligonucleotide
  Target: LAMA2; (+) strand; PAM type: NNGRRT; PAM sequence: GTGAGT
agagttactttgtcagtttt

SEQ ID NO: 28696 - DNA, 20 bp, Artificial Sequence
  Description of Artificial Sequence: Synthetic oligonucleotide
  Target: LAMA2; (+) strand; PAM type: NNGRRT; PAM sequence: AAGGAT
acacaaatgtccttcaaact

SEQ ID NO: 28697 - DNA, 20 bp, Artificial Sequence
  Description of Artificial Sequence: Synthetic oligonucleotide
  Target: LAMA2; (+) strand; PAM type: NNGRRT; PAM sequence: CTGAAT
agcagaaaataaagttttta

SEQ ID NO: 28698 - DNA, 20 bp, Artificial Sequence
  Description of Artificial Sequence: Synthetic oligonucleotide
  Target: LAMA2; (+) strand; PAM type: NNGRRT; PAM sequence: CAGGAT
tgaccttgcagtcatcttaa

SEQ ID NO: 28699 - DNA, 20 bp, Artificial Sequence
  Description of Artificial Sequence: Synthetic oligonucleotide
  Target: LAMA2; (+) strand; PAM type: NNGRRT; PAM sequence: CTGGAT
catcttaacaggatttctct

SEQ ID NO: 28700 - DNA, 20 bp, Artificial Sequence
  Description of Artificial Sequence: Synthetic oligonucleotide
  Target: LAMA2; (+) strand; PAM type: NNGRRT; PAM sequence: AAGGAT
tgcagtattactactcggtc

SEQ ID NO: 28701 - DNA, 20 bp, Artificial Sequence
  Description of Artificial Sequence: Synthetic oligonucleotide
  Target: LAMA2; (+) strand; PAM type: NNGRRT; PAM sequence: AGGGAT
gtcaaggatatttcagttgg

SEQ ID NO: 28702 - DNA, 20 bp, Artificial Sequence
  Description of Artificial Sequence: Synthetic oligonucleotide
  Target: LAMA2; (+) strand; PAM type: NNGRRT; PAM sequence: TAGGAT
gacaaatgtatgtatattta

SEQ ID NO: 28703 - DNA, 20 bp, Artificial Sequence
  Description of Artificial Sequence: Synthetic oligonucleotide
  Target: LAMA2; (+) strand; PAM type: NNGRRT; PAM sequence: GGGAGT
tgacagagaacgctgtaaat

SEQ ID NO: 28704 - DNA, 20 bp, Artificial Sequence
  Description of Artificial Sequence: Synthetic oligonucleotide
  Target: LAMA2; (+) strand; PAM type: NNGRRT; PAM sequence: CAGGGT
agtgtaacagaaatccatgc

SEQ ID NO: 28705 - DNA, 20 bp, Artificial Sequence
  Description of Artificial Sequence: Synthetic oligonucleotide
  Target: LAMA2; (+) strand; PAM type: NNGRRT; PAM sequence: TAGGAT
gtgaaataagagctggcagt

SEQ ID NO: 28706 - DNA, 20 bp, Artificial Sequence
  Description of Artificial Sequence: Synthetic oligonucleotide
  Target: LAMA2; (+) strand; PAM type: NNGRRT; PAM sequence: ATGAGT
taatcaaaaaattaatgcaa

SEQ ID NO: 28707 - DNA, 20 bp, Artificial Sequence
  Description of Artificial Sequence: Synthetic oligonucleotide
  Target: LAMA2; (+) strand; PAM type: NNGRRT; PAM sequence: GAGGAT
tataagtgacaatggaacag

SEQ ID NO: 28708 - DNA, 20 bp, Artificial Sequence
  Description of Artificial Sequence: Synthetic oligonucleotide
  Target: LAMA2; (+) strand; PAM type: NNGRRT; PAM sequence: GGGGGT
aaatagggcaggggcaataa

SEQ ID NO: 28709 - DNA, 20 bp, Artificial Sequence
  Description of Artificial Sequence: Synthetic oligonucleotide
  Target: LAMA2; (+) strand; PAM type: NNGRRT; PAM sequence: GGGGGT
aggggcaataagggggtgga

SEQ ID NO: 28710 - DNA, 20 bp, Artificial Sequence
  Description of Artificial Sequence: Synthetic oligonucleotide
  Target: LAMA2; (+) strand; PAM type: NNGRRT; PAM sequence: TGGAGT
caataagggggtggaggggg

SEQ ID NO: 28711 - DNA, 20 bp, Artificial Sequence
  Description of Artificial Sequence: Synthetic oligonucleotide
  Target: LAMA2; (+) strand; PAM type: NNGRRT; PAM sequence: GTGGGT
aagggggtggagggggtgga

SEQ ID NO: 28712 - DNA, 20 bp, Artificial Sequence
  Description of Artificial Sequence: Synthetic oligonucleotide
  Target: LAMA2; (+) strand; PAM type: NNGRRT; PAM sequence: GAGAGT
ggagggggtggagtgggtga

SEQ ID NO: 28713 - DNA, 20 bp, Artificial Sequence
  Description of Artificial Sequence: Synthetic oligonucleotide
  Target: LAMA2; (+) strand; PAM type: NNGRRT; PAM sequence: GAGAGT
ggagtgggtgagagagtcaa

SEQ ID NO: 28714 - DNA, 20 bp, Artificial Sequence
  Description of Artificial Sequence: Synthetic oligonucleotide
  Target: LAMA2; (+) strand; PAM type: NNGRRT; PAM sequence: CAGAAT
agtggcaagccggaaaatgc

SEQ ID NO: 28715 - DNA, 20 bp, Artificial Sequence
  Description of Artificial Sequence: Synthetic oligonucleotide
  Target: LAMA2; (+) strand; PAM type: NNGRRT; PAM sequence: TAGAAT
aatgccagaatgctttttga

SEQ ID NO: 28716 - DNA, 20 bp, Artificial Sequence
  Description of Artificial Sequence: Synthetic oligonucleotide
  Target: LAMA2; (+) strand; PAM type: NNGRRT; PAM sequence: ATGAAT
gaattttttcattaatgaca

SEQ ID NO: 28717 - DNA, 20 bp, Artificial Sequence
  Description of Artificial Sequence: Synthetic oligonucleotide
  Target: LAMA2; (+) strand; PAM type: NNGRRT; PAM sequence: ATGAAT
aacataacctaaaggagaag

SEQ ID NO: 28718 - DNA, 20 bp, Artificial Sequence
  Description of Artificial Sequence: Synthetic oligonucleotide
  Target: LAMA2; (+) strand; PAM type: NNGRRT; PAM sequence: TTGAAT
atagtatatggaaaaataca

SEQ ID NO: 28719 - DNA, 20 bp, Artificial Sequence
  Description of Artificial Sequence: Synthetic oligonucleotide
  Target: LAMA2; (+) strand; PAM type: NNGRRT; PAM sequence: GTGAAT
tacattgaatagtaagatca

SEQ ID NO: 28720 - DNA, 20 bp, Artificial Sequence
  Description of Artificial Sequence: Synthetic oligonucleotide
  Target: LAMA2; (+) strand; PAM type: NNGRRT; PAM sequence: TTGGAT
caaagctagttttctgatga

SEQ ID NO: 28721 - DNA, 20 bp, Artificial Sequence
  Description of Artificial Sequence: Synthetic oligonucleotide
  Target: LAMA2; (+) strand; PAM type: NNGRRT; PAM sequence: ATGGGT
agtgctgctttctgcctggt

SEQ ID NO: 28722 - DNA, 20 bp, Artificial Sequence
  Description of Artificial Sequence: Synthetic oligonucleotide
  Target: LAMA2; (+) strand; PAM type: NNGRRT; PAM sequence: CTGGAT
ttaaaattttactttaaatc

SEQ ID NO: 28723 - DNA, 20 bp, Artificial Sequence
  Description of Artificial Sequence: Synthetic oligonucleotide
  Target: LAMA2; (+) strand; PAM type: NNGRRT; PAM sequence: CAGAGT
ataattttccacaggcttta

SEQ ID NO: 28724 - DNA, 20 bp, Artificial Sequence
  Description of Artificial Sequence: Synthetic oligonucleotide
  Target: LAMA2; (+) strand; PAM type: NNGRRT; PAM sequence: TAGAAT
aaaaaatgcatatgccacca

SEQ ID NO: 28725 - DNA, 20 bp, Artificial Sequence
  Description of Artificial Sequence: Synthetic oligonucleotide
  Target: LAMA2; (+) strand; PAM type: NNGRRT; PAM sequence: AGGAAT
aatactacgctgccataaaa

SEQ ID NO: 28726 - DNA, 20 bp, Artificial Sequence
  Description of Artificial Sequence: Synthetic oligonucleotide
  Target: LAMA2; (+) strand; PAM type: NNGRRT; PAM sequence: ATGGAT
atcatgtcctttgcagggac

SEQ ID NO: 28727 - DNA, 20 bp, Artificial Sequence
  Description of Artificial Sequence: Synthetic oligonucleotide
  Target: LAMA2; (+) strand; PAM type: NNGRRT; PAM sequence: CAGGGT
ggacagacagctaatgcatg

SEQ ID NO: 28728 - DNA, 20 bp, Artificial Sequence
  Description of Artificial Sequence: Synthetic oligonucleotide
  Target: LAMA2; (+) strand; PAM type: NNGRRT; PAM sequence: AGGAAT
acctgcacccctagaggcct

SEQ ID NO: 28729 - DNA, 20 bp, Artificial Sequence
  Description of Artificial Sequence: Synthetic oligonucleotide
  Target: LAMA2; (+) strand; PAM type: NNGRRT; PAM sequence: GAGAAT
gatcccaggcatcagagaag

SEQ ID NO: 28730 - DNA, 20 bp, Artificial Sequence
  Description of Artificial Sequence: Synthetic oligonucleotide
  Target: LAMA2; (+) strand; PAM type: NNGRRT; PAM sequence: GTGAGT
ttttgactagaaatctcgct

SEQ ID NO: 28731 - DNA, 20 bp, Artificial Sequence
  Description of Artificial Sequence: Synthetic oligonucleotide
  Target: LAMA2; (+) strand; PAM type: NNGRRT; PAM sequence: CAGGAT
tagctgtgatcagtgctgtc

SEQ ID NO: 28732 - DNA, 20 bp, Artificial Sequence
  Description of Artificial Sequence: Synthetic oligonucleotide
  Target: LAMA2; (+) strand; PAM type: NNGRRT; PAM sequence: CTGAAT
tggaacttttctaactaaaa

SEQ ID NO: 28733 - DNA, 20 bp, Artificial Sequence
  Description of Artificial Sequence: Synthetic oligonucleotide
  Target: LAMA2; (+) strand; PAM type: NNGRRT; PAM sequence: CTGAAT
tagtatgaagtccaattcaa

SEQ ID NO: 28734 - DNA, 20 bp, Artificial Sequence
  Description of Artificial Sequence: Synthetic oligonucleotide
  Target: LAMA2; (+) strand; PAM type: NNGRRT; PAM sequence: TTGAAT
ataccaacactatatatcct

SEQ ID NO: 28735 - DNA, 20 bp, Artificial Sequence
  Description of Artificial Sequence: Synthetic oligonucleotide
  Target: LAMA2; (+) strand; PAM type: NNGRRT; PAM sequence: TTGAAT
atgacaggtctttaaaacta

SEQ ID NO: 28736 - DNA, 20 bp, Artificial Sequence
  Description of Artificial Sequence: Synthetic oligonucleotide
  Target: LAMA2; (+) strand; PAM type: NNGRRT; PAM sequence: ATGGGT
tatccatggtttctccatcc

SEQ ID NO: 28737 - DNA, 20 bp, Artificial Sequence
  Description of Artificial Sequence: Synthetic oligonucleotide
  Target: LAMA2; (+) strand; PAM type: NNGRRT; PAM sequence: GAGGAT
agatgatctaaagtgtacag

SEQ ID NO: 28738 - DNA, 20 bp, Artificial Sequence
  Description of Artificial Sequence: Synthetic oligonucleotide
  Target: LAMA2; (+) strand; PAM type: NNGRRT; PAM sequence: TTGAGT
tgccactgtataacaggaac

SEQ ID NO: 28739 - DNA, 20 bp, Artificial Sequence
  Description of Artificial Sequence: Synthetic oligonucleotide
  Target: LAMA2; (+) strand; PAM type: NNGRRT; PAM sequence: TTGAAT
taacaggaacttgagtatcc

SEQ ID NO: 28740 - DNA, 20 bp, Artificial Sequence
  Description of Artificial Sequence: Synthetic oligonucleotide
  Target: LAMA2; (+) strand; PAM type: NNGRRT; PAM sequence: ATGGAT
gaggtcctggaaccattccc

SEQ ID NO: 28741 - DNA, 20 bp, Artificial Sequence
  Description of Artificial Sequence: Synthetic oligonucleotide
  Target: LAMA2; (+) strand; PAM type: NNGRRT; PAM sequence: AGGGAT
aaccattcccatggatattg

SEQ ID NO: 28742 - DNA, 20 bp, Artificial Sequence
  Description of Artificial Sequence: Synthetic oligonucleotide
  Target: LAMA2; (+) strand; PAM type: NNGRRT; PAM sequence: TTGGAT
tgcactcacttcatttgctt

SEQ ID NO: 28743 - DNA, 20 bp, Artificial Sequence
  Description of Artificial Sequence: Synthetic oligonucleotide
  Target: LAMA2; (+) strand; PAM type: NNGRRT; PAM sequence: ATGGAT
tgcctgtttataaagatatt

SEQ ID NO: 28744 - DNA, 20 bp, Artificial Sequence
  Description of Artificial Sequence: Synthetic oligonucleotide
  Target: LAMA2; (+) strand; PAM type: NNGRRT; PAM sequence: TTGGAT
tctggaggcatgagccacca

SEQ ID NO: 28745 - DNA, 20 bp, Artificial Sequence
  Description of Artificial Sequence: Synthetic oligonucleotide
  Target: LAMA2; (+) strand; PAM type: NNGRRT; PAM sequence: AGGGAT
ctttaaatgtaatgccaccc

SEQ ID NO: 28746 - DNA, 20 bp, Artificial Sequence
  Description of Artificial Sequence: Synthetic oligonucleotide
  Target: LAMA2; (+) strand; PAM type: NNGRRT; PAM sequence: TAGAAT
ttaaatttctcttctgtttg

SEQ ID NO: 28747 - DNA, 20 bp, Artificial Sequence
  Description of Artificial Sequence: Synthetic oligonucleotide
  Target: LAMA2; (+) strand; PAM type: NNGRRT; PAM sequence: AGGGGT
tgggagcagcacttgaaggt

SEQ ID NO: 28748 - DNA, 20 bp, Artificial Sequence
  Description of Artificial Sequence: Synthetic oligonucleotide
  Target: LAMA2; (+) strand; PAM type: NNGRRT; PAM sequence: TGGAAT
tgtacacatttttaaaatag

SEQ ID NO: 28749 - DNA, 20 bp, Artificial Sequence
  Description of Artificial Sequence: Synthetic oligonucleotide
  Target: LAMA2; (+) strand; PAM type: NNGRRT; PAM sequence: GGGGAT
aaaacgcagaaattcaagat

SEQ ID NO: 28750 - DNA, 20 bp, Artificial Sequence
  Description of Artificial Sequence: Synthetic oligonucleotide
  Target: LAMA2; (+) strand; PAM type: NNGRRT; PAM sequence: ATGAGT
taaaaatcacactttcagca

SEQ ID NO: 28751 - DNA, 20 bp, Artificial Sequence
  Description of Artificial Sequence: Synthetic oligonucleotide
  Target: LAMA2; (+) strand; PAM type: NNGRRT; PAM sequence: TTGAAT
taaaaattttcttttccaag

SEQ ID NO: 28752 - DNA, 20 bp, Artificial Sequence
  Description of Artificial Sequence: Synthetic oligonucleotide
  Target: LAMA2; (+) strand; PAM type: NNGRRT; PAM sequence: ATGAAT
atgacaaatccctccataaa

SEQ ID NO: 28753 - DNA, 20 bp, Artificial Sequence
  Description of Artificial Sequence: Synthetic oligonucleotide
  Target: LAMA2; (+) strand; PAM type: NNGRRT; PAM sequence: TTGAGT
ataatcacattctaattcat

SEQ ID NO: 28754 - DNA, 20 bp, Artificial Sequence
  Description of Artificial Sequence: Synthetic oligonucleotide
  Target: LAMA2; (+) strand; PAM type: NNGRRT; PAM sequence: TTGGAT
ctaattcatttgagtttaat

SEQ ID NO: 28755 - DNA, 20 bp, Artificial Sequence
  Description of Artificial Sequence: Synthetic oligonucleotide
  Target: LAMA2; (+) strand; PAM type: NNGRRT; PAM sequence: TAGAAT
gataatatctctaaaaagca

SEQ ID NO: 28756 - DNA, 20 bp, Artificial Sequence
  Description of Artificial Sequence: Synthetic oligonucleotide
  Target: LAMA2; (+) strand; PAM type: NNGRRT; PAM sequence: CGGGGT
cttgaaggttacagacagag

SEQ ID NO: 28757 - DNA, 20 bp, Artificial Sequence
  Description of Artificial Sequence: Synthetic oligonucleotide
  Target: LAMA2; (+) strand; PAM type: NNGRRT; PAM sequence: TAGGGT
agaaagtggggctgtaggtg

SEQ ID NO: 28758 - DNA, 20 bp, Artificial Sequence
  Description of Artificial Sequence: Synthetic oligonucleotide
  Target: LAMA2; (+) strand; PAM type: NNGRRT; PAM sequence: CAGAGT
ggtgtagggtcctggctgca

SEQ ID NO: 28759 - DNA, 20 bp, Artificial Sequence
  Description of Artificial Sequence: Synthetic oligonucleotide
  Target: LAMA2; (+) strand; PAM type: NNGRRT; PAM sequence: CAGGGT
atggaccgtttatttggcat

SEQ ID NO: 28760 - DNA, 20 bp, Artificial Sequence
  Description of Artificial Sequence: Synthetic oligonucleotide
  Target: LAMA2; (+) strand; PAM type: NNGRRT; PAM sequence: ACGAAT
ttctaaacactcttgacaac

SEQ ID NO: 28761 - DNA, 20 bp, Artificial Sequence
  Description of Artificial Sequence: Synthetic oligonucleotide
  Target: LAMA2; (+) strand; PAM type: NNGRRT; PAM sequence: GAGAAT
acacgaattctaaatagtgt

SEQ ID NO: 28762 - DNA, 20 bp, Artificial Sequence
  Description of Artificial Sequence: Synthetic oligonucleotide
  Target: LAMA2; (+) strand; PAM type: NNGRRT; PAM sequence: AAGAAT
actattacaacaaagctttt

SEQ ID NO: 28763 - DNA, 20 bp, Artificial Sequence
  Description of Artificial Sequence: Synthetic oligonucleotide
  Target: LAMA2; (+) strand; PAM type: NNGRRT; PAM sequence: GAGGAT
ctggaaagaagctatggtgg

SEQ ID NO: 28764 - DNA, 20 bp, Artificial Sequence
  Description of Artificial Sequence: Synthetic oligonucleotide
  Target: LAMA2; (+) strand; PAM type: NNGRRT; PAM sequence: AGGAGT
tgggaggatctcttgagccc

SEQ ID NO: 28765 - DNA, 20 bp, Artificial Sequence
  Description of Artificial Sequence: Synthetic oligonucleotide
  Target: LAMA2; (+) strand; PAM type: NNGRRT; PAM sequence: CTGGGT
tgtaaagatactacccgaga

SEQ ID NO: 28766 - DNA, 20 bp, Artificial Sequence
  Description of Artificial Sequence: Synthetic oligonucleotide
  Target: LAMA2; (+) strand; PAM type: NNGRRT; PAM sequence: GTGAAT
tacaggagagagaggagaaa

SEQ ID NO: 28767 - DNA, 20 bp, Artificial Sequence
  Description of Artificial Sequence: Synthetic oligonucleotide
  Target: LAMA2; (+) strand; PAM type: NNGRRT; PAM sequence: TTGGGT
attacaatttcaaatgagat

SEQ ID NO: 28768 - DNA, 20 bp, Artificial Sequence
  Description of Artificial Sequence: Synthetic oligonucleotide
  Target: LAMA2; (+) strand; PAM type: NNGRRT; PAM sequence: AGGAAT
tgtctttctgaagaaaaaaa

SEQ ID NO: 28769 - DNA, 20 bp, Artificial Sequence
  Description of Artificial Sequence: Synthetic oligonucleotide
  Target: LAMA2; (+) strand; PAM type: NNGRRT; PAM sequence: GGGGAT
atttacaacaaacatgacaa

SEQ ID NO: 28770 - DNA, 20 bp, Artificial Sequence
  Description of Artificial Sequence: Synthetic oligonucleotide
  Target: LAMA2; (+) strand; PAM type: NNGRRT; PAM sequence: TTGAAT
ttcttctactcaacaaatat

SEQ ID NO: 28771 - DNA, 20 bp, Artificial Sequence
  Description of Artificial Sequence: Synthetic oligonucleotide
  Target: LAMA2; (+) strand; PAM type: NNGRRT; PAM sequence: AGGAAT
tttgaatgcttattatgtcc

SEQ ID NO: 28772 - DNA, 20 bp, Artificial Sequence
  Description of Artificial Sequence: Synthetic oligonucleotide
  Target: LAMA2; (+) strand; PAM type: NNGRRT; PAM sequence: AAGGGT
tatgtccaggaattgtattc

SEQ ID NO: 28773 - DNA, 20 bp, Artificial Sequence
  Description of Artificial Sequence: Synthetic oligonucleotide
  Target: LAMA2; (+) strand; PAM type: NNGRRT; PAM sequence: GGGAAT
ttgtcatagcgttcctggag

SEQ ID NO: 28774 - DNA, 20 bp, Artificial Sequence
  Description of Artificial Sequence: Synthetic oligonucleotide
  Target: LAMA2; (+) strand; PAM type: NNGRRT; PAM sequence: AGGAAT
tgactagaaattatgcttcc

SEQ ID NO: 28775 - DNA, 20 bp, Artificial Sequence
  Description of Artificial Sequence: Synthetic oligonucleotide
  Target: LAMA2; (+) strand; PAM type: NNGRRT; PAM sequence: TCGAGT
tactaaagtgatgctaggac

SEQ ID NO: 28776 - DNA, 20 bp, Artificial Sequence
  Description of Artificial Sequence: Synthetic oligonucleotide
  Target: LAMA2; (+) strand; PAM type: NNGRRT; PAM sequence: GGGGAT
tagtaccctgtgtaccctta

SEQ ID NO: 28777 - DNA, 20 bp, Artificial Sequence
  Description of Artificial Sequence: Synthetic oligonucleotide
  Target: LAMA2; (+) strand; PAM type: NNGRRT; PAM sequence: TAGAAT
caaatgccccttcccttttg

SEQ ID NO: 28778 - DNA, 20 bp, Artificial Sequence
  Description of Artificial Sequence: Synthetic oligonucleotide
  Target: LAMA2; (+) strand; PAM type: NNGRRT; PAM sequence: AAGAGT
tataaattcttcatatttag

SEQ ID NO: 28779 - DNA, 20 bp, Artificial Sequence
  Description of Artificial Sequence: Synthetic oligonucleotide
  Target: LAMA2; (+) strand; PAM type: NNGRRT; PAM sequence: TGGAAT
gaaagtgatttttcacttct

SEQ ID NO: 28780 - DNA, 20 bp, Artificial Sequence
  Description of Artificial Sequence: Synthetic oligonucleotide
  Target: LAMA2; (+) strand; PAM type: NNGRRT; PAM sequence: CCGGGT
catgtatcttatttcattca

SEQ ID NO: 28781 - DNA, 20 bp, Artificial Sequence
  Description of Artificial Sequence: Synthetic oligonucleotide
  Target: LAMA2; (+) strand; PAM type: NNGRRT; PAM sequence: TAGGAT
atcttatttcattcaccggg

SEQ ID NO: 28782 - DNA, 20 bp, Artificial Sequence
  Description of Artificial Sequence: Synthetic oligonucleotide
  Target: LAMA2; (+) strand; PAM type: NNGRRT; PAM sequence: TGGAGT
gtctttagcagtgcagactc

SEQ ID NO: 28783 - DNA, 20 bp, Artificial Sequence
  Description of Artificial Sequence: Synthetic oligonucleotide
  Target: LAMA2; (+) strand; PAM type: NNGRRT; PAM sequence: TAGAAT
ggttggtttccaatactgat

SEQ ID NO: 28784 - DNA, 20 bp, Artificial Sequence
  Description of Artificial Sequence: Synthetic oligonucleotide
  Target: LAMA2; (+) strand; PAM type: NNGRRT; PAM sequence: GAGGAT
taattcctaaaagcattttt

SEQ ID NO: 28785 - DNA, 20 bp, Artificial Sequence
  Description of Artificial Sequence: Synthetic oligonucleotide
  Target: LAMA2; (+) strand; PAM type: NNGRRT; PAM sequence: AGGAAT
tgttattagtattaaaagaa

SEQ ID NO: 28786 - DNA, 20 bp, Artificial Sequence
  Description of Artificial Sequence: Synthetic oligonucleotide
  Target: LAMA2; (+) strand; PAM type: NNGRRT; PAM sequence: TTGAAT
ttaatcattcagtgccatca

SEQ ID NO: 28787 - DNA, 20 bp, Artificial Sequence
  Description of Artificial Sequence: Synthetic oligonucleotide
  Target: LAMA2; (+) strand; PAM type: NNGRRT; PAM sequence: GTGAAT
ttcaaattctattaaaatgt

SEQ ID NO: 28788 - DNA, 20 bp, Artificial Sequence
  Description of Artificial Sequence: Synthetic oligonucleotide
  Target: LAMA2; (+) strand; PAM type: NNGRRT; PAM sequence: CTGGAT
ccaatacatccagatacttt

SEQ ID NO: 28789 - DNA, 20 bp, Artificial Sequence
  Description of Artificial Sequence: Synthetic oligonucleotide
  Target: LAMA2; (+) strand; PAM type: NNGRRT; PAM sequence: GCGGGT
cagcactttgagaggctgag

SEQ ID NO: 28790 - DNA, 20 bp, Artificial Sequence
  Description of Artificial Sequence: Synthetic oligonucleotide
  Target: LAMA2; (+) strand; PAM type: NNGRRT; PAM sequence: GTGGAT
actttgagaggctgaggcgg

SEQ ID NO: 28791 - DNA, 20 bp, Artificial Sequence
  Description of Artificial Sequence: Synthetic oligonucleotide
  Target: LAMA2; (+) strand; PAM type: NNGRRT; PAM sequence: ATGGGT
gaggctgaggcgggtggatc

SEQ ID NO: 28792 - DNA, 20 bp, Artificial Sequence
  Description of Artificial Sequence: Synthetic oligonucleotide
  Target: LAMA2; (+) strand; PAM type: NNGRRT; PAM sequence: AAGAGT
aggcgggtggatcatgggtc

SEQ ID NO: 28793 - DNA, 20 bp, Artificial Sequence
  Description of Artificial Sequence: Synthetic oligonucleotide
  Target: LAMA2; (+) strand; PAM type: NNGRRT; PAM sequence: CTGGGT
actaaaaatacagaaattag

SEQ ID NO: 28794 - DNA, 20 bp, Artificial Sequence
  Description of Artificial Sequence: Synthetic oligonucleotide
  Target: LAMA2; (+) strand; PAM type: NNGRRT; PAM sequence: GAGGAT
tactcgggaggctgagacag

SEQ ID NO: 28795 - DNA, 20 bp, Artificial Sequence
  Description of Artificial Sequence: Synthetic oligonucleotide
  Target: LAMA2; (+) strand; PAM type: NNGRRT; PAM sequence: CAGAGT
ctgcactccagcctgggcga

SEQ ID NO: 28796 - DNA, 20 bp, Artificial Sequence
  Description of Artificial Sequence: Synthetic oligonucleotide
  Target: LAMA2; (+) strand; PAM type: NNGRRT; PAM sequence: AAGAAT
caattgtcatggaaaagctg

SEQ ID NO: 28797 - DNA, 20 bp, Artificial Sequence
  Description of Artificial Sequence: Synthetic oligonucleotide
  Target: LAMA2; (+) strand; PAM type: NNGRRT; PAM sequence: CTGAGT
aaaatgttgccagaagaaat

SEQ ID NO: 28798 - DNA, 20 bp, Artificial Sequence
  Description of Artificial Sequence: Synthetic oligonucleotide
  Target: LAMA2; (+) strand; PAM type: NNGRRT; PAM sequence: TTGAAT
ttgccagaagaaatctgagt

SEQ ID NO: 28799 - DNA, 20 bp, Artificial Sequence
  Description of Artificial Sequence: Synthetic oligonucleotide
  Target: LAMA2; (+) strand; PAM type: NNGRRT; PAM sequence: GGGGGT
tacgtggaaagtacattgga

SEQ ID NO: 28800 - DNA, 20 bp, Artificial Sequence
  Description of Artificial Sequence: Synthetic oligonucleotide
  Target: LAMA2; (+) strand; PAM type: NNGRRT; PAM sequence: AGGGGT
gatggcttcttcagacccaa

SEQ ID NO: 28801 - DNA, 20 bp, Artificial Sequence
  Description of Artificial Sequence: Synthetic oligonucleotide
  Target: LAMA2; (+) strand; PAM type: NNGRRT; PAM sequence: AAGAGT
agtatgctttttctttcata

SEQ ID NO: 28802 - DNA, 20 bp, Artificial Sequence
  Description of Artificial Sequence: Synthetic oligonucleotide
  Target: LAMA2; (+) strand; PAM type: NNGRRT; PAM sequence: GAGGAT
tgaaactgacctaaatcttt

SEQ ID NO: 28803 - DNA, 20 bp, Artificial Sequence
  Description of Artificial Sequence: Synthetic oligonucleotide
  Target: LAMA2; (+) strand; PAM type: NNGRRT; PAM sequence: AGGAGT
atcatggctccttccagtca

SEQ ID NO: 28804 - DNA, 20 bp, Artificial Sequence
  Description of Artificial Sequence: Synthetic oligonucleotide
  Target: LAMA2; (+) strand; PAM type: NNGRRT; PAM sequence: GAGAAT
taaattagttgtgcctctta

SEQ ID NO: 28805 - DNA, 20 bp, Artificial Sequence
  Description of Artificial Sequence: Synthetic oligonucleotide
  Target: LAMA2; (+) strand; PAM type: NNGRRT; PAM sequence: GTGAGT
aaatcatacagtacatacta

SEQ ID NO: 28806 - DNA, 20 bp, Artificial Sequence
  Description of Artificial Sequence: Synthetic oligonucleotide
  Target: LAMA2; (+) strand; PAM type: NNGRRT; PAM sequence: CTGAGT
ttttcttttgaaagaaattg

SEQ ID NO: 28807 - DNA, 20 bp, Artificial Sequence
  Description of Artificial Sequence: Synthetic oligonucleotide
  Target: LAMA2; (+) strand; PAM type: NNGRRT; PAM sequence: TAGGAT
attctcctgttgatagaaat

SEQ ID NO: 28808 - DNA, 20 bp, Artificial Sequence
  Description of Artificial Sequence: Synthetic oligonucleotide
  Target: LAMA2; (+) strand; PAM type: NNGRRT; PAM sequence: AGGAAT
tttaccttgtgtaaatactt

SEQ ID NO: 28809 - DNA, 20 bp, Artificial Sequence
  Description of Artificial Sequence: Synthetic oligonucleotide
  Target: LAMA2; (+) strand; PAM type: NNGRRT; PAM sequence: TAGGAT
ggaatagaaagcttttttca

SEQ ID NO: 28810 - DNA, 20 bp, Artificial Sequence
  Description of Artificial Sequence: Synthetic oligonucleotide
  Target: LAMA2; (+) strand; PAM type: NNGRRT; PAM sequence: ATGAGT
aatgttcaccaaaaagttat

SEQ ID NO: 28811 - DNA, 20 bp, Artificial Sequence
  Description of Artificial Sequence: Synthetic oligonucleotide
  Target: LAMA2; (+) strand; PAM type: NNGRRT; PAM sequence: TTGGAT
atttgatgttgactatcttt

SEQ ID NO: 28812 - DNA, 20 bp, Artificial Sequence
  Description of Artificial Sequence: Synthetic oligonucleotide
  Target: LAMA2; (+) strand; PAM type: NNGRRT; PAM sequence: GTGGGT
ttttggattttagtcatcta

SEQ ID NO: 28813 - DNA, 20 bp, Artificial Sequence
  Description of Artificial Sequence: Synthetic oligonucleotide
  Target: LAMA2; (+) strand; PAM type: NNGRRT; PAM sequence: ATGGAT
gtgtgaaatggcatctgatt

SEQ ID NO: 28814 - DNA, 20 bp, Artificial Sequence
  Description of Artificial Sequence: Synthetic oligonucleotide
  Target: LAMA2; (+) strand; PAM type: NNGRRT; PAM sequence: GTGAAT
agtaaatgtttgtgtgtggt

SEQ ID NO: 28815 - DNA, 20 bp, Artificial Sequence
  Description of Artificial Sequence: Synthetic oligonucleotide
  Target: LAMA2; (+) strand; PAM type: NNGRRT; PAM sequence: ATGGAT
aaatcaattgatcatattac

SEQ ID NO: 28816 - DNA, 20 bp, Artificial Sequence
  Description of Artificial Sequence: Synthetic oligonucleotide
  Target: LAMA2; (+) strand; PAM type: NNGRRT; PAM sequence: TAGAAT
cttcattgctttagtaagtc

SEQ ID NO: 28817 - DNA, 20 bp, Artificial Sequence
  Description of Artificial Sequence: Synthetic oligonucleotide
  Target: LAMA2; (+) strand; PAM type: NNGRRT; PAM sequence: TAGAAT
tgtgtgtttctatacaattt

SEQ ID NO: 28818 - DNA, 20 bp, Artificial Sequence
  Description of Artificial Sequence: Synthetic oligonucleotide
  Target: LAMA2; (+) strand; PAM type: NNGRRT; PAM sequence: TAGGAT
ttgtcaattacagaaaatat

SEQ ID NO: 28819 - DNA, 20 bp, Artificial Sequence
  Description of Artificial Sequence: Synthetic oligonucleotide
  Target: LAMA2; (+) strand; PAM type: NNGRRT; PAM sequence: AAGAAT
gcttgaggagatgttggtca

SEQ ID NO: 28820 - DNA, 20 bp, Artificial Sequence
  Description of Artificial Sequence: Synthetic oligonucleotide
  Target: LAMA2; (+) strand; PAM type: NNGRRT; PAM sequence: AGGAAT
taaaatttcagttagatagt

SEQ ID NO: 28821 - DNA, 20 bp, Artificial Sequence
  Description of Artificial Sequence: Synthetic oligonucleotide
  Target: LAMA2; (+) strand; PAM type: NNGRRT; PAM sequence: GAGAGT
atttactcttaaaaaatgct

SEQ ID NO: 28822 - DNA, 20 bp, Artificial Sequence
  Description of Artificial Sequence: Synthetic oligonucleotide
  Target: LAMA2; (+) strand; PAM type: NNGRRT; PAM sequence: TTGAAT
aaaataacatcataataata

SEQ ID NO: 28823 - DNA, 20 bp, Artificial Sequence
  Description of Artificial Sequence: Synthetic oligonucleotide
  Target: LAMA2; (+) strand; PAM type: NNGRRT; PAM sequence: TAGAAT
tcttttgttaaattaatctt

SEQ ID NO: 28824 - DNA, 20 bp, Artificial Sequence
  Description of Artificial Sequence: Synthetic oligonucleotide
  Target: LAMA2; (+) strand; PAM type: NNGRRT; PAM sequence: AAGAAT
attatttaatgtaattgtta

SEQ ID NO: 28825 - DNA, 20 bp, Artificial Sequence
  Description of Artificial Sequence: Synthetic oligonucleotide
  Target: LAMA2; (+) strand; PAM type: NNGRRT; PAM sequence: TTGAAT
aatgtaattgttaaagaatt

SEQ ID NO: 28826 - DNA, 20 bp, Artificial Sequence
  Description of Artificial Sequence: Synthetic oligonucleotide
  Target: LAMA2; (+) strand; PAM type: NNGRRT; PAM sequence: GAGAAT
cttcccttttaaaagttact

SEQ ID NO: 28827 - DNA, 20 bp, Artificial Sequence
  Description of Artificial Sequence: Synthetic oligonucleotide
  Target: LAMA2; (+) strand; PAM type: NNGRRT; PAM sequence: AAGAAT
tttaaaagttactgagaata

SEQ ID NO: 28828 - DNA, 20 bp, Artificial Sequence
  Description of Artificial Sequence: Synthetic oligonucleotide
  Target: LAMA2; (+) strand; PAM type: NNGRRT; PAM sequence: AGGAAT
cttacattgctatcaaatgc

SEQ ID NO: 28829 - DNA, 20 bp, Artificial Sequence
  Description of Artificial Sequence: Synthetic oligonucleotide
  Target: LAMA2; (+) strand; PAM type: NNGRRT; PAM sequence: GAGGAT
atagaagctccaacttagga

SEQ ID NO: 28830 - DNA, 20 bp, Artificial Sequence
  Description of Artificial Sequence: Synthetic oligonucleotide
  Target: LAMA2; (+) strand; PAM type: NNGRRT; PAM sequence: GCGAAT
aaatggcttgtatgagattg

SEQ ID NO: 28831 - DNA, 20 bp, Artificial Sequence
  Description of Artificial Sequence: Synthetic oligonucleotide
  Target: LAMA2; (+) strand; PAM type: NNGRRT; PAM sequence: AGGAAT
tctaattcaaatggcaacag

SEQ ID NO: 28832 - DNA, 20 bp, Artificial Sequence
  Description of Artificial Sequence: Synthetic oligonucleotide
  Target: LAMA2; (+) strand; PAM type: NNGRRT; PAM sequence: TGGAAT
tataggctgttttacaaagg

SEQ ID NO: 28833 - DNA, 20 bp, Artificial Sequence
  Description of Artificial Sequence: Synthetic oligonucleotide
  Target: LAMA2; (+) strand; PAM type: NNGRRT; PAM sequence: CTGAAT
aaaggtggaatacaaacgaa

SEQ ID NO: 28834 - DNA, 20 bp, Artificial Sequence
  Description of Artificial Sequence: Synthetic oligonucleotide
  Target: LAMA2; (+) strand; PAM type: NNGRRT; PAM sequence: CAGGAT
gcttgactggagacactaat

SEQ ID NO: 28835 - DNA, 20 bp, Artificial Sequence
  Description of Artificial Sequence: Synthetic oligonucleotide
  Target: LAMA2; (+) strand; PAM type: NNGRRT; PAM sequence: AAGAAT
aataaagttgtccatatata

SEQ ID NO: 28836 - DNA, 20 bp, Artificial Sequence
  Description of Artificial Sequence: Synthetic oligonucleotide
  Target: LAMA2; (+) strand; PAM type: NNGRRT; PAM sequence: AAGAGT
ttcccagcttgtatcctaat

SEQ ID NO: 28837 - DNA, 20 bp, Artificial Sequence
  Description of Artificial Sequence: Synthetic oligonucleotide
  Target: LAMA2; (+) strand; PAM type: NNGRRT; PAM sequence: AAGAGT
ctgtgaacacgtagtgaaga

SEQ ID NO: 28838 - DNA, 20 bp, Artificial Sequence
  Description of Artificial Sequence: Synthetic oligonucleotide
  Target: LAMA2; (+) strand; PAM type: NNGRRT; PAM sequence: ATGGGT
actctaattccacccatgcc

SEQ ID NO: 28839 - DNA, 20 bp, Artificial Sequence
  Description of Artificial Sequence: Synthetic oligonucleotide
  Target: LAMA2; (+) strand; PAM type: NNGRRT; PAM sequence: TAGAGT
taaaaacagttcttgcagtc

SEQ ID NO: 28840 - DNA, 20 bp, Artificial Sequence
  Description of Artificial Sequence: Synthetic oligonucleotide
  Target: LAMA2; (+) strand; PAM type: NNGRRT; PAM sequence: TGGGAT
accgtcagatttttacatct

SEQ ID NO: 28841 - DNA, 20 bp, Artificial Sequence
  Description of Artificial Sequence: Synthetic oligonucleotide
  Target: LAMA2; (+) strand; PAM type: NNGRRT; PAM sequence: GTGAGT
tcttcttaattctcaacgct

SEQ ID NO: 28842 - DNA, 20 bp, Artificial Sequence
  Description of Artificial Sequence: Synthetic oligonucleotide
  Target: LAMA2; (+) strand; PAM type: NNGRRT; PAM sequence: CTGGAT
caacgctgtgagtctggggg

SEQ ID NO: 28843 - DNA, 20 bp, Artificial Sequence
  Description of Artificial Sequence: Synthetic oligonucleotide
  Target: LAMA2; (+) strand; PAM type: NNGRRT; PAM sequence: ACGGAT
ctcacgcatatcttcgtatg

SEQ ID NO: 28844 - DNA, 20 bp, Artificial Sequence
  Description of Artificial Sequence: Synthetic oligonucleotide
  Target: LAMA2; (+) strand; PAM type: NNGRRT; PAM sequence: TTGAAT
caacttcatttgtgtcactg

SEQ ID NO: 28845 - DNA, 20 bp, Artificial Sequence
  Description of Artificial Sequence: Synthetic oligonucleotide
  Target: LAMA2; (+) strand; PAM type: NNGRRT; PAM sequence: GAGGAT
caactcccatttttcttgat

SEQ ID NO: 28846 - DNA, 20 bp, Artificial Sequence
  Description of Artificial Sequence: Synthetic oligonucleotide
  Target: LAMA2; (+) strand; PAM type: NNGRRT; PAM sequence: TTGGGT
tgagcaattgcgggctttcc

SEQ ID NO: 28847 - DNA, 20 bp, Artificial Sequence
  Description of Artificial Sequence: Synthetic oligonucleotide
  Target: LAMA2; (+) strand; PAM type: NNGRRT; PAM sequence: CTGAAT
gtggcacagaccacaggcag

SEQ ID NO: 28848 - DNA, 20 bp, Artificial Sequence
  Description of Artificial Sequence: Synthetic oligonucleotide
  Target: LAMA2; (+) strand; PAM type: NNGRRT; PAM sequence: CTGAGT
taatcagtaatcaaatagag

SEQ ID NO: 28849 - DNA, 20 bp, Artificial Sequence
  Description of Artificial Sequence: Synthetic oligonucleotide
  Target: LAMA2; (+) strand; PAM type: NNGRRT; PAM sequence: AAGAAT
agctggcttcttcagtggta

SEQ ID NO: 28850 - DNA, 20 bp, Artificial Sequence
  Description of Artificial Sequence: Synthetic oligonucleotide
  Target: LAMA2; (+) strand; PAM type: NNGRRT; PAM sequence: CTGAAT
ttaccaacttgccggaccat

SEQ ID NO: 28851 - DNA, 20 bp, Artificial Sequence
  Description of Artificial Sequence: Synthetic oligonucleotide
  Target: LAMA2; (+) strand; PAM type: NNGRRT; PAM sequence: TGGAAT
tcttttagtgattttccaac

SEQ ID NO: 28852 - DNA, 20 bp, Artificial Sequence
  Description of Artificial Sequence: Synthetic oligonucleotide
  Target: LAMA2; (+) strand; PAM type: NNGRRT; PAM sequence: TCGAAT
gaaatgagcaaaaccagcca

SEQ ID NO: 28853 - DNA, 20 bp, Artificial Sequence
  Description of Artificial Sequence: Synthetic oligonucleotide
  Target: LAMA2; (+) strand; PAM type: NNGRRT; PAM sequence: GTGGGT
cctatgacaacagggggcat

SEQ ID NO: 28854 - DNA, 20 bp, Artificial Sequence
  Description of Artificial Sequence: Synthetic oligonucleotide
  Target: LAMA2; (+) strand; PAM type: NNGRRT; PAM sequence: GAGAAT
ccggcgtagctgggcttttg

SEQ ID NO: 28855 - DNA, 20 bp, Artificial Sequence
  Description of Artificial Sequence: Synthetic oligonucleotide
  Target: LAMA2; (+) strand; PAM type: NNGRRT; PAM sequence: CGGAGT
attttctgactttttctggt

SEQ ID NO: 28856 - DNA, 20 bp, Artificial Sequence
  Description of Artificial Sequence: Synthetic oligonucleotide
  Target: LAMA2; (+) strand; PAM type: NNGRRT; PAM sequence: CTGAGT
aatctgatgtaaatgtatag

SEQ ID NO: 28857 - DNA, 20 bp, Artificial Sequence
  Description of Artificial Sequence: Synthetic oligonucleotide
  Target: LAMA2; (+) strand; PAM type: NNGRRT; PAM sequence: ATGAAT
ttgacctatgcttccatctc

SEQ ID NO: 28858 - DNA, 20 bp, Artificial Sequence
  Description of Artificial Sequence: Synthetic oligonucleotide
  Target: LAMA2; (+) strand; PAM type: NNGRRT; PAM sequence: CAGGGT
ccagcgtgccgaggcgcagg

SEQ ID NO: 28859 - DNA, 20 bp, Artificial Sequence
  Description of Artificial Sequence: Synthetic oligonucleotide
  Target: LAMA2; (+) strand; PAM type: NNGRRT; PAM sequence: GAGGAT
gatggaggcgccccggccgg

SEQ ID NO: 28860 - DNA, 20 bp, Artificial Sequence
  Description of Artificial Sequence: Synthetic oligonucleotide
  Target: LAMA2; (+) strand; PAM type: NNGRRT; PAM sequence: CTGAAT
gctgacatcttcactttgtt

SEQ ID NO: 28861 - DNA, 20 bp, Artificial Sequence
  Description of Artificial Sequence: Synthetic oligonucleotide
  Target: LAMA2; (+) strand; PAM type: NNGRRT; PAM sequence: TGGAGT
ggaaacctaatatttcacta

SEQ ID NO: 28862 - DNA, 20 bp, Artificial Sequence
  Description of Artificial Sequence: Synthetic oligonucleotide
  Target: LAMA2; (+) strand; PAM type: NNGRRT; PAM sequence: GAGAGT
cctactattcctaagttgca

SEQ ID NO: 28863 - DNA, 20 bp, Artificial Sequence
  Description of Artificial Sequence: Synthetic oligonucleotide
  Target: LAMA2; (+) strand; PAM type: NNGRRT; PAM sequence: AAGGAT
aaacctactgaaatgaacat

SEQ ID NO: 28864 - DNA, 20 bp, Artificial Sequence
  Description of Artificial Sequence: Synthetic oligonucleotide
  Target: LAMA2; (+) strand; PAM type: NNGRRT; PAM sequence: TTGAAT
acggggacaatttatgcaaa

SEQ ID NO: 28865 - DNA, 20 bp, Artificial Sequence
  Description of Artificial Sequence: Synthetic oligonucleotide
  Target: LAMA2; (+) strand; PAM type: NNGRRT; PAM sequence: GTGAAT
atgaaggcagctttgcattt

SEQ ID NO: 28866 - DNA, 20 bp, Artificial Sequence
  Description of Artificial Sequence: Synthetic oligonucleotide
  Target: LAMA2; (+) strand; PAM type: NNGRRT; PAM sequence: TTGGAT
tatattatcatttttatata

SEQ ID NO: 28867 - DNA, 20 bp, Artificial Sequence
  Description of Artificial Sequence: Synthetic oligonucleotide
  Target: LAMA2; (+) strand; PAM type: NNGRRT; PAM sequence: AAGAAT
caattgactaatgtttggtt

SEQ ID NO: 28868 - DNA, 20 bp, Artificial Sequence
  Description of Artificial Sequence: Synthetic oligonucleotide
  Target: LAMA2; (+) strand; PAM type: NNGRRT; PAM sequence: TGGGGT
gtttttgtcaggttttttat

SEQ ID NO: 28869 - DNA, 20 bp, Artificial Sequence
  Description of Artificial Sequence: Synthetic oligonucleotide
  Target: LAMA2; (+) strand; PAM type: NNGRRT; PAM sequence: CTGAGT
aaatttcctagtgaaactat

SEQ ID NO: 28870 - DNA, 20 bp, Artificial Sequence
  Description of Artificial Sequence: Synthetic oligonucleotide
  Target: LAMA2; (+) strand; PAM type: NNGRRT; PAM sequence: TAGGGT
tggctattttttattagaca

SEQ ID NO: 28871 - DNA, 20 bp, Artificial Sequence
  Description of Artificial Sequence: Synthetic oligonucleotide
  Target: LAMA2; (+) strand; PAM type: NNGRRT; PAM sequence: GAGGGT
tttgtattaatatctttagg

SEQ ID NO: 28872 - DNA, 20 bp, Artificial Sequence
  Description of Artificial Sequence: Synthetic oligonucleotide
  Target: LAMA2; (+) strand; PAM type: NNGRRT; PAM sequence: AGGGGT
ttttattgatcacttatgtt

SEQ ID NO: 28873 - DNA, 20 bp, Artificial Sequence
  Description of Artificial Sequence: Synthetic oligonucleotide
  Target: LAMA2; (+) strand; PAM type: NNGRRT; PAM sequence: ATGAAT
cagttctttagctgtttctc

SEQ ID NO: 28874 - DNA, 20 bp, Artificial Sequence
  Description of Artificial Sequence: Synthetic oligonucleotide
  Target: LAMA2; (+) strand; PAM type: NNGRRT; PAM sequence: AGGAAT
tagctgtttctcatgaattc

SEQ ID NO: 28875 - DNA, 20 bp, Artificial Sequence
  Description of Artificial Sequence: Synthetic oligonucleotide
  Target: LAMA2; (+) strand; PAM type: NNGRRT; PAM sequence: CTGGAT
ttatatttttgatttctaca

SEQ ID NO: 28876 - DNA, 20 bp, Artificial Sequence
  Description of Artificial Sequence: Synthetic oligonucleotide
  Target: LAMA2; (+) strand; PAM type: NNGRRT; PAM sequence: GTGGAT
ctcttggcaaacaaataaat

SEQ ID NO: 28877 - DNA, 20 bp, Artificial Sequence
  Description of Artificial Sequence: Synthetic oligonucleotide
  Target: LAMA2; (+) strand; PAM type: NNGRRT; PAM sequence: ATGGAT
gatttttccaatctgcgatt

SEQ ID NO: 28878 - DNA, 20 bp, Artificial Sequence
  Description of Artificial Sequence: Synthetic oligonucleotide
  Target: LAMA2; (+) strand; PAM type: NNGRRT; PAM sequence: TAGAAT
ttatgaggcacatacatatt

SEQ ID NO: 28879 - DNA, 20 bp, Artificial Sequence
  Description of Artificial Sequence: Synthetic oligonucleotide
  Target: LAMA2; (+) strand; PAM type: NNGRRT; PAM sequence: TTGAAT
acatacatatttagaatatt

SEQ ID NO: 28880 - DNA, 20 bp, Artificial Sequence
  Description of Artificial Sequence: Synthetic oligonucleotide
  Target: LAMA2; (+) strand; PAM type: NNGRRT; PAM sequence: AAGAGT
catttaaaagatttcttata

SEQ ID NO: 28881 - DNA, 20 bp, Artificial Sequence
  Description of Artificial Sequence: Synthetic oligonucleotide
  Target: LAMA2; (+) strand; PAM type: NNGRRT; PAM sequence: ATGGAT
tcttataaagagtaaaatag

SEQ ID NO: 28882 - DNA, 20 bp, Artificial Sequence
  Description of Artificial Sequence: Synthetic oligonucleotide
  Target: LAMA2; (+) strand; PAM type: NNGRRT; PAM sequence: TTGGGT
taatatagttaataatatga

SEQ ID NO: 28883 - DNA, 20 bp, Artificial Sequence
  Description of Artificial Sequence: Synthetic oligonucleotide
  Target: LAMA2; (+) strand; PAM type: NNGRRT; PAM sequence: ATGGGT
attttaggttcaggtagtac

SEQ ID NO: 28884 - DNA, 20 bp, Artificial Sequence
  Description of Artificial Sequence: Synthetic oligonucleotide
  Target: LAMA2; (+) strand; PAM type: NNGRRT; PAM sequence: TGGGAT
catgggtaaattatgtgtca

SEQ ID NO: 28885 - DNA, 20 bp, Artificial Sequence
  Description of Artificial Sequence: Synthetic oligonucleotide
  Target: LAMA2; (+) strand; PAM type: NNGRRT; PAM sequence: TAGGAT
tattcttgcattaattcact

SEQ ID NO: 28886 - DNA, 20 bp, Artificial Sequence
  Description of Artificial Sequence: Synthetic oligonucleotide
  Target: LAMA2; (+) strand; PAM type: NNGRRT; PAM sequence: GTGAAT
gattccatgtctttgttatt

SEQ ID NO: 28887 - DNA, 20 bp, Artificial Sequence
  Description of Artificial Sequence: Synthetic oligonucleotide
  Target: LAMA2; (+) strand; PAM type: NNGRRT; PAM sequence: TAGAAT
gcatgcatgtggctttatga

SEQ ID NO: 28888 - DNA, 20 bp, Artificial Sequence
  Description of Artificial Sequence: Synthetic oligonucleotide
  Target: LAMA2; (+) strand; PAM type: NNGRRT; PAM sequence: TGGGAT
tttgggcatatacgcagtaa

SEQ ID NO: 28889 - DNA, 20 bp, Artificial Sequence
  Description of Artificial Sequence: Synthetic oligonucleotide
  Target: LAMA2; (+) strand; PAM type: NNGRRT; PAM sequence: CTGAGT
tatacgcagtaatgggattg

SEQ ID NO: 28890 - DNA, 20 bp, Artificial Sequence
  Description of Artificial Sequence: Synthetic oligonucleotide
  Target: LAMA2; (+) strand; PAM type: NNGRRT; PAM sequence: TTGAGT
gcagtaatgggattgctgag

SEQ ID NO: 28891 - DNA, 20 bp, Artificial Sequence
  Description of Artificial Sequence: Synthetic oligonucleotide
  Target: LAMA2; (+) strand; PAM type: NNGRRT; PAM sequence: AAGGAT
ttaatctactttcattattg

SEQ ID NO: 28892 - DNA, 20 bp, Artificial Sequence
  Description of Artificial Sequence: Synthetic oligonucleotide
  Target: LAMA2; (+) strand; PAM type: NNGRRT; PAM sequence: CTGGAT
agatgtggcaccattatttt

SEQ ID NO: 28893 - DNA, 20 bp, Artificial Sequence
  Description of Artificial Sequence: Synthetic oligonucleotide
  Target: LAMA2; (+) strand; PAM type: NNGRRT; PAM sequence: AAGGAT
atttgtatgatctgtaagca

SEQ ID NO: 28894 - DNA, 20 bp, Artificial Sequence
  Description of Artificial Sequence: Synthetic oligonucleotide
  Target: LAMA2; (+) strand; PAM type: NNGRRT; PAM sequence: GAGAAT
aaggagaagtagaagaaggg

SEQ ID NO: 28895 - DNA, 20 bp, Artificial Sequence
  Description of Artificial Sequence: Synthetic oligonucleotide
  Target: LAMA2; (+) strand; PAM type: NNGRRT; PAM sequence: AAGAAT
ggggggggaagaagaggagg

SEQ ID NO: 28896 - DNA, 20 bp, Artificial Sequence
  Description of Artificial Sequence: Synthetic oligonucleotide
  Target: LAMA2; (+) strand; PAM type: NNGRRT; PAM sequence: GAGAGT
agaagaggaggaagaatgaa

SEQ ID NO: 28897 - DNA, 20 bp, Artificial Sequence
  Description of Artificial Sequence: Synthetic oligonucleotide
  Target: LAMA2; (+) strand; PAM type: NNGRRT; PAM sequence: CAGAGT
acagaaaagttttccaacct

SEQ ID NO: 28898 - DNA, 20 bp, Artificial Sequence
  Description of Artificial Sequence: Synthetic oligonucleotide
  Target: LAMA2; (+) strand; PAM type: NNGRRT; PAM sequence: TTGGAT
ttctttctccgttctttaga

SEQ ID NO: 28899 - DNA, 20 bp, Artificial Sequence
  Description of Artificial Sequence: Synthetic oligonucleotide
  Target: LAMA2; (+) strand; PAM type: NNGRRT; PAM sequence: AGGAAT
cgggcacagtggttcacccc

SEQ ID NO: 28900 - DNA, 20 bp, Artificial Sequence
  Description of Artificial Sequence: Synthetic oligonucleotide
  Target: LAMA2; (+) strand; PAM type: NNGRRT; PAM sequence: AGGAGT
caggcaagtcgcttgcggtc

SEQ ID NO: 28901 - DNA, 20 bp, Artificial Sequence
  Description of Artificial Sequence: Synthetic oligonucleotide
  Target: LAMA2; (+) strand; PAM type: NNGRRT; PAM sequence: GAGAAT
tactcaggagactgaggcag

SEQ ID NO: 28902 - DNA, 20 bp, Artificial Sequence
  Description of Artificial Sequence: Synthetic oligonucleotide
  Target: LAMA2; (+) strand; PAM type: NNGRRT; PAM sequence: GTGGGT
acccaggaagtgaggttgca

SEQ ID NO: 28903 - DNA, 20 bp, Artificial Sequence
  Description of Artificial Sequence: Synthetic oligonucleotide
  Target: LAMA2; (+) strand; PAM type: NNGRRT; PAM sequence: GTGAAT
cctgatgttaagcatatcca

SEQ ID NO: 28904 - DNA, 20 bp, Artificial Sequence
  Description of Artificial Sequence: Synthetic oligonucleotide
  Target: LAMA2; (+) strand; PAM type: NNGRRT; PAM sequence: TGGAGT
tattttacttttcagctttc

SEQ ID NO: 28905 - DNA, 20 bp, Artificial Sequence
  Description of Artificial Sequence: Synthetic oligonucleotide
  Target: LAMA2; (+) strand; PAM type: NNGRRT; PAM sequence: CTGGGT
ttgtatgctaatttcaatat

SEQ ID NO: 28906 - DNA, 20 bp, Artificial Sequence
  Description of Artificial Sequence: Synthetic oligonucleotide
  Target: LAMA2; (+) strand; PAM type: NNGRRT; PAM sequence: CAGGAT
tttcaatatctgggtcacct

SEQ ID NO: 28907 - DNA, 20 bp, Artificial Sequence
  Description of Artificial Sequence: Synthetic oligonucleotide
  Target: LAMA2; (+) strand; PAM type: NNGRRT; PAM sequence: GAGGAT
gtagtcctcctttattcaca

SEQ ID NO: 28908 - DNA, 20 bp, Artificial Sequence
  Description of Artificial Sequence: Synthetic oligonucleotide
  Target: LAMA2; (+) strand; PAM type: NNGRRT; PAM sequence: GAGGGT
tgggactaagtgactaacag

SEQ ID NO: 28909 - DNA, 20 bp, Artificial Sequence
  Description of Artificial Sequence: Synthetic oligonucleotide
  Target: LAMA2; (+) strand; PAM type: NNGRRT; PAM sequence: GGGGAT
agcatagatatgctggacaa

SEQ ID NO: 28910 - DNA, 20 bp, Artificial Sequence
  Description of Artificial Sequence: Synthetic oligonucleotide
  Target: LAMA2; (+) strand; PAM type: NNGRRT; PAM sequence: TGGAGT
acttttcaattatttatttc

SEQ ID NO: 28911 - DNA, 20 bp, Artificial Sequence
  Description of Artificial Sequence: Synthetic oligonucleotide
  Target: LAMA2; (+) strand; PAM type: NNGRRT; PAM sequence: GAGAAT
catctctacaggacatttcg

SEQ ID NO: 28912 - DNA, 20 bp, Artificial Sequence
  Description of Artificial Sequence: Synthetic oligonucleotide
  Target: LAMA2; (+) strand; PAM type: NNGRRT; PAM sequence: AAGAGT
gtttctgttatgttcctctg

SEQ ID NO: 28913 - DNA, 20 bp, Artificial Sequence
  Description of Artificial Sequence: Synthetic oligonucleotide
  Target: LAMA2; (+) strand; PAM type: NNGRRT; PAM sequence: TTGAAT
gttatgttcctctgaagagt

SEQ ID NO: 28914 - DNA, 20 bp, Artificial Sequence
  Description of Artificial Sequence: Synthetic oligonucleotide
  Target: LAMA2; (+) strand; PAM type: NNGRRT; PAM sequence: CTGAGT
tctaattagtaataaacttg

SEQ ID NO: 28915 - DNA, 20 bp, Artificial Sequence
  Description of Artificial Sequence: Synthetic oligonucleotide
  Target: LAMA2; (+) strand; PAM type: NNGRRT; PAM sequence: CTGAAT
taatgtagttaacttaaagt

SEQ ID NO: 28916 - DNA, 20 bp, Artificial Sequence
  Description of Artificial Sequence: Synthetic oligonucleotide
  Target: LAMA2; (+) strand; PAM type: NNGRRT; PAM sequence: CTGAAT
tttccagcggttgctttcca

SEQ ID NO: 28917 - DNA, 20 bp, Artificial Sequence
  Description of Artificial Sequence: Synthetic oligonucleotide
  Target: LAMA2; (+) strand; PAM type: NNGRRT; PAM sequence: TAGAAT
ttgctttccactgaatttcc

SEQ ID NO: 28918 - DNA, 20 bp, Artificial Sequence
  Description of Artificial Sequence: Synthetic oligonucleotide
  Target: LAMA2; (+) strand; PAM type: NNGRRT; PAM sequence: CTGAGT
actgaatttcctagaatctc

SEQ ID NO: 28919 - DNA, 20 bp, Artificial Sequence
  Description of Artificial Sequence: Synthetic oligonucleotide
  Target: LAMA2; (+) strand; PAM type: NNGRRT; PAM sequence: GTGAAT
aatttcctagaatctcctga

SEQ ID NO: 28920 - DNA, 20 bp, Artificial Sequence
  Description of Artificial Sequence: Synthetic oligonucleotide
  Target: LAMA2; (+) strand; PAM type: NNGRRT; PAM sequence: AGGGAT
cctgagtgaatatacaataa

SEQ ID NO: 28921 - DNA, 20 bp, Artificial Sequence
  Description of Artificial Sequence: Synthetic oligonucleotide
  Target: LAMA2; (+) strand; PAM type: NNGRRT; PAM sequence: AAGGGT
agggatcagttaaggctggg

SEQ ID NO: 28922 - DNA, 20 bp, Artificial Sequence
  Description of Artificial Sequence: Synthetic oligonucleotide
  Target: LAMA2; (+) strand; PAM type: NNGRRT; PAM sequence: GTGAAT
ggtattgttatgcaaatttt

SEQ ID NO: 28923 - DNA, 20 bp, Artificial Sequence
  Description of Artificial Sequence: Synthetic oligonucleotide
  Target: LAMA2; (+) strand; PAM type: NNGRRT; PAM sequence: AAGAAT
gaattgcagtttaacagcta

SEQ ID NO: 28924 - DNA, 20 bp, Artificial Sequence
  Description of Artificial Sequence: Synthetic oligonucleotide
  Target: LAMA2; (+) strand; PAM type: NNGRRT; PAM sequence: GGGAAT
cagtcccaacttcataatgg

SEQ ID NO: 28925 - DNA, 20 bp, Artificial Sequence
  Description of Artificial Sequence: Synthetic oligonucleotide
  Target: LAMA2; (+) strand; PAM type: NNGRRT; PAM sequence: ATGAAT
cccaacttcataatggggga

SEQ ID NO: 28926 - DNA, 20 bp, Artificial Sequence
  Description of Artificial Sequence: Synthetic oligonucleotide
  Target: LAMA2; (+) strand; PAM type: NNGRRT; PAM sequence: ATGAAT
acttcataatgggggaatga

SEQ ID NO: 28927 - DNA, 20 bp, Artificial Sequence
  Description of Artificial Sequence: Synthetic oligonucleotide
  Target: LAMA2; (+) strand; PAM type: NNGRRT; PAM sequence: TTGAAT
atatatacatatgaactata

SEQ ID NO: 28928 - DNA, 20 bp, Artificial Sequence
  Description of Artificial Sequence: Synthetic oligonucleotide
  Target: LAMA2; (+) strand; PAM type: NNGRRT; PAM sequence: AGGAAT
actatgtatacaagataaaa

SEQ ID NO: 28929 - DNA, 20 bp, Artificial Sequence
  Description of Artificial Sequence: Synthetic oligonucleotide
  Target: LAMA2; (+) strand; PAM type: NNGRRT; PAM sequence: TTGAAT
catgaaaatatcaataagta

SEQ ID NO: 28930 - DNA, 20 bp, Artificial Sequence
  Description of Artificial Sequence: Synthetic oligonucleotide
  Target: LAMA2; (+) strand; PAM type: NNGRRT; PAM sequence: AGGAAT
aatctaagtaacaaatatat

SEQ ID NO: 28931 - DNA, 20 bp, Artificial Sequence
  Description of Artificial Sequence: Synthetic oligonucleotide
  Target: LAMA2; (+) strand; PAM type: NNGRRT; PAM sequence: CTGGAT
tgtgtaagcatgtaaaagaa

SEQ ID NO: 28932 - DNA, 20 bp, Artificial Sequence
  Description of Artificial Sequence: Synthetic oligonucleotide
  Target: LAMA2; (+) strand; PAM type: NNGRRT; PAM sequence: AAGGAT
ccttaaatgaagtctgtgtc

SEQ ID NO: 28933 - DNA, 20 bp, Artificial Sequence
  Description of Artificial Sequence: Synthetic oligonucleotide
  Target: LAMA2; (+) strand; PAM type: NNGRRT; PAM sequence: CAGAAT
cgacgaggtgagagctgcag

SEQ ID NO: 28934 - DNA, 20 bp, Artificial Sequence
  Description of Artificial Sequence: Synthetic oligonucleotide
  Target: LAMA2; (+) strand; PAM type: NNGRRT; PAM sequence: AAGAAT
ccaaatatgattattttcag

SEQ ID NO: 28935 - DNA, 20 bp, Artificial Sequence
  Description of Artificial Sequence: Synthetic oligonucleotide
  Target: LAMA2; (+) strand; PAM type: NNGRRT; PAM sequence: AAGAGT
tataatgttttcatagcaag

SEQ ID NO: 28936 - DNA, 20 bp, Artificial Sequence
  Description of Artificial Sequence: Synthetic oligonucleotide
  Target: LAMA2; (+) strand; PAM type: NNGRRT; PAM sequence: TTGAAT
tgttttcatagcaagaagag

SEQ ID NO: 28937 - DNA, 20 bp, Artificial Sequence
  Description of Artificial Sequence: Synthetic oligonucleotide
  Target: LAMA2; (+) strand; PAM type: NNGRRT; PAM sequence: GAGAGT
cacagagataaagaaagaga

SEQ ID NO: 28938 - DNA, 20 bp, Artificial Sequence
  Description of Artificial Sequence: Synthetic oligonucleotide
  Target: LAMA2; (+) strand; PAM type: NNGRRT; PAM sequence: ATGAGT
ttagattgtttgtagcttct

SEQ ID NO: 28939 - DNA, 20 bp, Artificial Sequence
  Description of Artificial Sequence: Synthetic oligonucleotide
  Target: LAMA2; (+) strand; PAM type: NNGRRT; PAM sequence: AGGAAT
tgaaatgccagcgttcactg

SEQ ID NO: 28940 - DNA, 20 bp, Artificial Sequence
  Description of Artificial Sequence: Synthetic oligonucleotide
  Target: LAMA2; (+) strand; PAM type: NNGRRT; PAM sequence: ATGAAT
ggactaagaaggtagtagtc

SEQ ID NO: 28941 - DNA, 20 bp, Artificial Sequence
  Description of Artificial Sequence: Synthetic oligonucleotide
  Target: LAMA2; (+) strand; PAM type: NNGRRT; PAM sequence: AGGAAT
taagctaaagccttcctttg

SEQ ID NO: 28942 - DNA, 20 bp, Artificial Sequence
  Description of Artificial Sequence: Synthetic oligonucleotide
  Target: LAMA2; (+) strand; PAM type: NNGRRT; PAM sequence: TAGAAT
aagtttaagtaggaaattca

SEQ ID NO: 28943 - DNA, 20 bp, Artificial Sequence
  Description of Artificial Sequence: Synthetic oligonucleotide
  Target: LAMA2; (+) strand; PAM type: NNGRRT; PAM sequence: TAGGAT
ctgctttctttataaaactg

SEQ ID NO: 28944 - DNA, 20 bp, Artificial Sequence
  Description of Artificial Sequence: Synthetic oligonucleotide
  Target: LAMA2; (+) strand; PAM type: NNGRRT; PAM sequence: ACGGAT
aaattttgaaatattaaaaa

SEQ ID NO: 28945 - DNA, 20 bp, Artificial Sequence
  Description of Artificial Sequence: Synthetic oligonucleotide
  Target: LAMA2; (+) strand; PAM type: NNGRRT; PAM sequence: TCGAAT
aaacggatacgttttgatag

SEQ ID NO: 28946 - DNA, 20 bp, Artificial Sequence
  Description of Artificial Sequence: Synthetic oligonucleotide
  Target: LAMA2; (+) strand; PAM type: NNGRRT; PAM sequence: ATGAAT
tacgttttgatagtcgaatg

SEQ ID NO: 28947 - DNA, 20 bp, Artificial Sequence
  Description of Artificial Sequence: Synthetic oligonucleotide
  Target: LAMA2; (+) strand; PAM type: NNGRRT; PAM sequence: TTGAGT
taactcttccctaccccttt

SEQ ID NO: 28948 - DNA, 20 bp, Artificial Sequence
  Description of Artificial Sequence: Synthetic oligonucleotide
  Target: LAMA2; (+) strand; PAM type: NNGRRT; PAM sequence: ATGAGT
tccctacccctttttgagta

SEQ ID NO: 28949 - DNA, 20 bp, Artificial Sequence
  Description of Artificial Sequence: Synthetic oligonucleotide
  Target: LAMA2; (+) strand; PAM type: NNGRRT; PAM sequence: CAGAAT
gagtaatgagtatatgatca

SEQ ID NO: 28950 - DNA, 20 bp, Artificial Sequence
  Description of Artificial Sequence: Synthetic oligonucleotide
  Target: LAMA2; (+) strand; PAM type: NNGRRT; PAM sequence: ATGAGT
gctcctcttaactttatgtg

SEQ ID NO: 28951 - DNA, 20 bp, Artificial Sequence
  Description of Artificial Sequence: Synthetic oligonucleotide
  Target: LAMA2; (+) strand; PAM type: NNGRRT; PAM sequence: TAGGGT
tttaattatactttaagttt

SEQ ID NO: 28952 - DNA, 20 bp, Artificial Sequence
  Description of Artificial Sequence: Synthetic oligonucleotide
  Target: LAMA2; (+) strand; PAM type: NNGRRT; PAM sequence: CAGAGT
ccccaccccacaacagtccc

SEQ ID NO: 28953 - DNA, 20 bp, Artificial Sequence
  Description of Artificial Sequence: Synthetic oligonucleotide
  Target: LAMA2; (+) strand; PAM type: NNGRRT; PAM sequence: ATGAGT
gcattgttcaattcccacct

SEQ ID NO: 28954 - DNA, 20 bp, Artificial Sequence
  Description of Artificial Sequence: Synthetic oligonucleotide
  Target: LAMA2; (+) strand; PAM type: NNGRRT; PAM sequence: GAGAAT
ttcaattcccacctatgagt

SEQ ID NO: 28955 - DNA, 20 bp, Artificial Sequence
  Description of Artificial Sequence: Synthetic oligonucleotide
  Target: LAMA2; (+) strand; PAM type: NNGRRT; PAM sequence: GAGAAT
tgttcttgcaatcgtttact

SEQ ID NO: 28956 - DNA, 20 bp, Artificial Sequence
  Description of Artificial Sequence: Synthetic oligonucleotide
  Target: LAMA2; (+) strand; PAM type: NNGRRT; PAM sequence: TTGGGT
agtctatcattgttggacat

SEQ ID NO: 28957 - DNA, 20 bp, Artificial Sequence
  Description of Artificial Sequence: Synthetic oligonucleotide
  Target: LAMA2; (+) strand; PAM type: NNGRRT; PAM sequence: GTGGAT
ggttccaagtctttgctatt

SEQ ID NO: 28958 - DNA, 20 bp, Artificial Sequence
  Description of Artificial Sequence: Synthetic oligonucleotide
  Target: LAMA2; (+) strand; PAM type: NNGRRT; PAM sequence: TTGGGT
gcagcatgatttacagtcct

SEQ ID NO: 28959 - DNA, 20 bp, Artificial Sequence
  Description of Artificial Sequence: Synthetic oligonucleotide
  Target: LAMA2; (+) strand; PAM type: NNGRRT; PAM sequence: TGGGAT
tttgggtatatacccagtaa

SEQ ID NO: 28960 - DNA, 20 bp, Artificial Sequence
  Description of Artificial Sequence: Synthetic oligonucleotide
  Target: LAMA2; (+) strand; PAM type: NNGRRT; PAM sequence: CTGGGT
tatacccagtaatgggatgg

SEQ ID NO: 28961 - DNA, 20 bp, Artificial Sequence
  Description of Artificial Sequence: Synthetic oligonucleotide
  Target: LAMA2; (+) strand; PAM type: NNGRRT; PAM sequence: AAGGGT
gtaatgggatggctgggtca

SEQ ID NO: 28962 - DNA, 20 bp, Artificial Sequence
  Description of Artificial Sequence: Synthetic oligonucleotide
  Target: LAMA2; (+) strand; PAM type: NNGRRT; PAM sequence: AGGAAT
tttccagttctagatccctg

SEQ ID NO: 28963 - DNA, 20 bp, Artificial Sequence
  Description of Artificial Sequence: Synthetic oligonucleotide
  Target: LAMA2; (+) strand; PAM type: NNGRRT; PAM sequence: TGGGGT
gtccttcgcccacttgttga

SEQ ID NO: 28964 - DNA, 20 bp, Artificial Sequence
  Description of Artificial Sequence: Synthetic oligonucleotide
  Target: LAMA2; (+) strand; PAM type: NNGRRT; PAM sequence: TTGAGT
tttttttcttgtaaatttgt

SEQ ID NO: 28965 - DNA, 20 bp, Artificial Sequence
  Description of Artificial Sequence: Synthetic oligonucleotide
  Target: LAMA2; (+) strand; PAM type: NNGRRT; PAM sequence: CTGGAT
gtttgagttcattgtagatt

SEQ ID NO: 28966 - DNA, 20 bp, Artificial Sequence
  Description of Artificial Sequence: Synthetic oligonucleotide
  Target: LAMA2; (+) strand; PAM type: NNGRRT; PAM sequence: ATGAGT
ggatattagccctttgtcag

SEQ ID NO: 28967 - DNA, 20 bp, Artificial Sequence
  Description of Artificial Sequence: Synthetic oligonucleotide
  Target: LAMA2; (+) strand; PAM type: NNGRRT; PAM sequence: CTGAAT
tccttgcccatgcctatgtc

SEQ ID NO: 28968 - DNA, 20 bp, Artificial Sequence
  Description of Artificial Sequence: Synthetic oligonucleotide
  Target: LAMA2; (+) strand; PAM type: NNGRRT; PAM sequence: TAGGGT
gtactgcctaggttttcttc

SEQ ID NO: 28969 - DNA, 20 bp, Artificial Sequence
  Description of Artificial Sequence: Synthetic oligonucleotide
  Target: LAMA2; (+) strand; PAM type: NNGRRT; PAM sequence: TTGAAT
gtttaagtctttaatccatc

SEQ ID NO: 28970 - DNA, 20 bp, Artificial Sequence
  Description of Artificial Sequence: Synthetic oligonucleotide
  Target: LAMA2; (+) strand; PAM type: NNGRRT; PAM sequence: AGGGAT
ttttgtataaggtgtaagga

SEQ ID NO: 28971 - DNA, 20 bp, Artificial Sequence
  Description of Artificial Sequence: Synthetic oligonucleotide
  Target: LAMA2; (+) strand; PAM type: NNGRRT; PAM sequence: GGGAAT
ccagcaccatttattaaaca

SEQ ID NO: 28972 - DNA, 20 bp, Artificial Sequence
  Description of Artificial Sequence: Synthetic oligonucleotide
  Target: LAMA2; (+) strand; PAM type: NNGRRT; PAM sequence: TAGGAT
ccagctttgttcttttggct

SEQ ID NO: 28973 - DNA, 20 bp, Artificial Sequence
  Description of Artificial Sequence: Synthetic oligonucleotide
  Target: LAMA2; (+) strand; PAM type: NNGRRT; PAM sequence: GGGGAT
aaaggcattggtagcttgat

SEQ ID NO: 28974 - DNA, 20 bp, Artificial Sequence
  Description of Artificial Sequence: Synthetic oligonucleotide
  Target: LAMA2; (+) strand; PAM type: NNGRRT; PAM sequence: TTGAAT
gtagcttgatggggatggca

SEQ ID NO: 28975 - DNA, 20 bp, Artificial Sequence
  Description of Artificial Sequence: Synthetic oligonucleotide
  Target: LAMA2; (+) strand; PAM type: NNGRRT; PAM sequence: TGGAAT
attcttcctacccatgagca

SEQ ID NO: 28976 - DNA, 20 bp, Artificial Sequence
  Description of Artificial Sequence: Synthetic oligonucleotide
  Target: LAMA2; (+) strand; PAM type: NNGRRT; PAM sequence: TTGGAT
tccttcacatcccttgtaag

SEQ ID NO: 28977 - DNA, 20 bp, Artificial Sequence
  Description of Artificial Sequence: Synthetic oligonucleotide
  Target: LAMA2; (+) strand; PAM type: NNGRRT; PAM sequence: GTGAAT
ttattctctttgaagcaatt

SEQ ID NO: 28978 - DNA, 20 bp, Artificial Sequence
  Description of Artificial Sequence: Synthetic oligonucleotide
  Target: LAMA2; (+) strand; PAM type: NNGRRT; PAM sequence: GGGAGT
tctttgaagcaattgtgaat

SEQ ID NO: 28979 - DNA, 20 bp, Artificial Sequence
  Description of Artificial Sequence: Synthetic oligonucleotide
  Target: LAMA2; (+) strand; PAM type: NNGRRT; PAM sequence: AAGAAT
tctgtttgttgttgttgtat

SEQ ID NO: 28980 - DNA, 20 bp, Artificial Sequence
  Description of Artificial Sequence: Synthetic oligonucleotide
  Target: LAMA2; (+) strand; PAM type: NNGRRT; PAM sequence: TGGGGT
gagattttggactgagacaa

SEQ ID NO: 28981 - DNA, 20 bp, Artificial Sequence
  Description of Artificial Sequence: Synthetic oligonucleotide
  Target: LAMA2; (+) strand; PAM type: NNGRRT; PAM sequence: TTGAAT
ttgacttcctcttttcctaa

SEQ ID NO: 28982 - DNA, 20 bp, Artificial Sequence
  Description of Artificial Sequence: Synthetic oligonucleotide
  Target: LAMA2; (+) strand; PAM type: NNGRRT; PAM sequence: TTGAAT
ccagaacttccaacactatg

SEQ ID NO: 28983 - DNA, 20 bp, Artificial Sequence
  Description of Artificial Sequence: Synthetic oligonucleotide
  Target: LAMA2; (+) strand; PAM type: NNGRRT; PAM sequence: GGGAAT
gtcttgtgccagttttcaaa

SEQ ID NO: 28984 - DNA, 20 bp, Artificial Sequence
  Description of Artificial Sequence: Synthetic oligonucleotide
  Target: LAMA2; (+) strand; PAM type: NNGRRT; PAM sequence: GTGGGT
cattctgtatgatactggct

SEQ ID NO: 28985 - DNA, 20 bp, Artificial Sequence
  Description of Artificial Sequence: Synthetic oligonucleotide
  Target: LAMA2; (+) strand; PAM type: NNGRRT; PAM sequence: TTGAAT
catagatagctcttaatatt

SEQ ID NO: 28986 - DNA, 20 bp, Artificial Sequence
  Description of Artificial Sequence: Synthetic oligonucleotide
  Target: LAMA2; (+) strand; PAM type: NNGRRT; PAM sequence: GAGAGT
ccatcaatacctaatttatt

SEQ ID NO: 28987 - DNA, 20 bp, Artificial Sequence
  Description of Artificial Sequence: Synthetic oligonucleotide
  Target: LAMA2; (+) strand; PAM type: NNGRRT; PAM sequence: AAGGGT
tattgagagtttttagcatg

SEQ ID NO: 28988 - DNA, 20 bp, Artificial Sequence
  Description of Artificial Sequence: Synthetic oligonucleotide
  Target: LAMA2; (+) strand; PAM type: NNGRRT; PAM sequence: TTGAAT
gtttttagcatgaagggttg

SEQ ID NO: 28989 - DNA, 20 bp, Artificial Sequence
  Description of Artificial Sequence: Synthetic oligonucleotide
  Target: LAMA2; (+) strand; PAM type: NNGRRT; PAM sequence: CTGGAT
tctttggctctgtttatatg

SEQ ID NO: 28990 - DNA, 20 bp, Artificial Sequence
  Description of Artificial Sequence: Synthetic oligonucleotide
  Target: LAMA2; (+) strand; PAM type: NNGRRT; PAM sequence: AGGGAT
ttgaaccagccttgcatccc

SEQ ID NO: 28991 - DNA, 20 bp, Artificial Sequence
  Description of Artificial Sequence: Synthetic oligonucleotide
  Target: LAMA2; (+) strand; PAM type: NNGRRT; PAM sequence: GTGGAT
atgaagcctacttgatcatg

SEQ ID NO: 28992 - DNA, 20 bp, Artificial Sequence
  Description of Artificial Sequence: Synthetic oligonucleotide
  Target: LAMA2; (+) strand; PAM type: NNGRRT; PAM sequence: CTGGAT
ataagctttttgatgtgctg

SEQ ID NO: 28993 - DNA, 20 bp, Artificial Sequence
  Description of Artificial Sequence: Synthetic oligonucleotide
  Target: LAMA2; (+) strand; PAM type: NNGRRT; PAM sequence: GAGGAT
cgttttgccagtattttact

SEQ ID NO: 28994 - DNA, 20 bp, Artificial Sequence
  Description of Artificial Sequence: Synthetic oligonucleotide
  Target: LAMA2; (+) strand; PAM type: NNGRRT; PAM sequence: AAGGAT
tttttgcatcaatgttcatc

SEQ ID NO: 28995 - DNA, 20 bp, Artificial Sequence
  Description of Artificial Sequence: Synthetic oligonucleotide
  Target: LAMA2; (+) strand; PAM type: NNGRRT; PAM sequence: CAGAAT
tctctgcctggctttggtat

SEQ ID NO: 28996 - DNA, 20 bp, Artificial Sequence
  Description of Artificial Sequence: Synthetic oligonucleotide
  Target: LAMA2; (+) strand; PAM type: NNGRRT; PAM sequence: ATGAGT
aatgatgctggcctcataaa

SEQ ID NO: 28997 - DNA, 20 bp, Artificial Sequence
  Description of Artificial Sequence: Synthetic oligonucleotide
  Target: LAMA2; (+) strand; PAM type: NNGRRT; PAM sequence: GAGGAT
gcctcataaaatgagttagg

SEQ ID NO: 28998 - DNA, 20 bp, Artificial Sequence
  Description of Artificial Sequence: Synthetic oligonucleotide
  Target: LAMA2; (+) strand; PAM type: NNGRRT; PAM sequence: TGGAAT
ttccctctttttctattgat

SEQ ID NO: 28999 - DNA, 20 bp, Artificial Sequence
  Description of Artificial Sequence: Synthetic oligonucleotide
  Target: LAMA2; (+) strand; PAM type: NNGRRT; PAM sequence: AGGAAT
ttgattggaatagtttcaga

SEQ ID NO: 29000 - DNA, 20 bp, Artificial Sequence
  Description of Artificial Sequence: Synthetic oligonucleotide
  Target: LAMA2; (+) strand; PAM type: NNGRRT; PAM sequence: TAGAAT
gttcctccttgtacctctgg

SEQ ID NO: 29001 - DNA, 20 bp, Artificial Sequence
  Description of Artificial Sequence: Synthetic oligonucleotide
  Target: LAMA2; (+) strand; PAM type: NNGRRT; PAM sequence: GTGAAT
acctctggtagaattcggct

SEQ ID NO: 29002 - DNA, 20 bp, Artificial Sequence
  Description of Artificial Sequence: Synthetic oligonucleotide
  Target: LAMA2; (+) strand; PAM type: NNGRRT; PAM sequence: GAGAGT
tcttcctggtttagtcttgg

SEQ ID NO: 29003 - DNA, 20 bp, Artificial Sequence
  Description of Artificial Sequence: Synthetic oligonucleotide
  Target: LAMA2; (+) strand; PAM type: NNGRRT; PAM sequence: AGGAAT
ttgggagagtgtatgtgtcg

SEQ ID NO: 29004 - DNA, 20 bp, Artificial Sequence
  Description of Artificial Sequence: Synthetic oligonucleotide
  Target: LAMA2; (+) strand; PAM type: NNGRRT; PAM sequence: TGGGAT
gattttagtttgtatttctg

SEQ ID NO: 29005 - DNA, 20 bp, Artificial Sequence
  Description of Artificial Sequence: Synthetic oligonucleotide
  Target: LAMA2; (+) strand; PAM type: NNGRRT; PAM sequence: CTGGAT
ccctttcaaaaaaccagctc

SEQ ID NO: 29006 - DNA, 20 bp, Artificial Sequence
  Description of Artificial Sequence: Synthetic oligonucleotide
  Target: LAMA2; (+) strand; PAM type: NNGRRT; PAM sequence: AAGGGT
ctggattcattaattttttg

SEQ ID NO: 29007 - DNA, 20 bp, Artificial Sequence
  Description of Artificial Sequence: Synthetic oligonucleotide
  Target: LAMA2; (+) strand; PAM type: NNGRRT; PAM sequence: TTGAAT
ttcttgccttctgctagctt

SEQ ID NO: 29008 - DNA, 20 bp, Artificial Sequence
  Description of Artificial Sequence: Synthetic oligonucleotide
  Target: LAMA2; (+) strand; PAM type: NNGRRT; PAM sequence: TAGGGT
agttcttttaattgtgatgt

SEQ ID NO: 29009 - DNA, 20 bp, Artificial Sequence
  Description of Artificial Sequence: Synthetic oligonucleotide
  Target: LAMA2; (+) strand; PAM type: NNGRRT; PAM sequence: TTGGAT
gtgatgttagggtgtcaatt

SEQ ID NO: 29010 - DNA, 20 bp, Artificial Sequence
  Description of Artificial Sequence: Synthetic oligonucleotide
  Target: LAMA2; (+) strand; PAM type: NNGRRT; PAM sequence: TTGAAT
atttccctctacacactgct

SEQ ID NO: 29011 - DNA, 20 bp, Artificial Sequence
  Description of Artificial Sequence: Synthetic oligonucleotide
  Target: LAMA2; (+) strand; PAM type: NNGRRT; PAM sequence: ATGGGT
tatgttgtgtctttgttctc

SEQ ID NO: 29012 - DNA, 20 bp, Artificial Sequence
  Description of Artificial Sequence: Synthetic oligonucleotide
  Target: LAMA2; (+) strand; PAM type: NNGRRT; PAM sequence: TTGAGT
ttccatgtagttgagcagtt

SEQ ID NO: 29013 - DNA, 20 bp, Artificial Sequence
  Description of Artificial Sequence: Synthetic oligonucleotide
  Target: LAMA2; (+) strand; PAM type: NNGRRT; PAM sequence: CTGAGT
tttgagtgagattcttaatc

SEQ ID NO: 29014 - DNA, 20 bp, Artificial Sequence
  Description of Artificial Sequence: Synthetic oligonucleotide
  Target: LAMA2; (+) strand; PAM type: NNGRRT; PAM sequence: TGGAAT
tccaagtatgtggtcaattt

SEQ ID NO: 29015 - DNA, 20 bp, Artificial Sequence
  Description of Artificial Sequence: Synthetic oligonucleotide
  Target: LAMA2; (+) strand; PAM type: NNGRRT; PAM sequence: TGGGGT
aaatgtatattctgttgatt

SEQ ID NO: 29016 - DNA, 20 bp, Artificial Sequence
  Description of Artificial Sequence: Synthetic oligonucleotide
  Target: LAMA2; (+) strand; PAM type: NNGRRT; PAM sequence: GAGAGT
tattctgttgatttggggtg

SEQ ID NO: 29017 - DNA, 20 bp, Artificial Sequence
  Description of Artificial Sequence: Synthetic oligonucleotide
  Target: LAMA2; (+) strand; PAM type: NNGRRT; PAM sequence: CTGGGT
tgcagagctgtgttcaattc

SEQ ID NO: 29018 - DNA, 20 bp, Artificial Sequence
  Description of Artificial Sequence: Synthetic oligonucleotide
  Target: LAMA2; (+) strand; PAM type: NNGRRT; PAM sequence: TGGGGT
gatctgtctaatgttgacag

SEQ ID NO: 29019 - DNA, 20 bp, Artificial Sequence
  Description of Artificial Sequence: Synthetic oligonucleotide
  Target: LAMA2; (+) strand; PAM type: NNGRRT; PAM sequence: GGGAGT
gtctcccattattaatgtgt

SEQ ID NO: 29020 - DNA, 20 bp, Artificial Sequence
  Description of Artificial Sequence: Synthetic oligonucleotide
  Target: LAMA2; (+) strand; PAM type: NNGRRT; PAM sequence: ATGAAT
ggtcactcaggacttgcttt

SEQ ID NO: 29021 - DNA, 20 bp, Artificial Sequence
  Description of Artificial Sequence: Synthetic oligonucleotide
  Target: LAMA2; (+) strand; PAM type: NNGRRT; PAM sequence: CTGGGT
tcaggacttgctttatgaat

SEQ ID NO: 29022 - DNA, 20 bp, Artificial Sequence
  Description of Artificial Sequence: Synthetic oligonucleotide
  Target: LAMA2; (+) strand; PAM type: NNGRRT; PAM sequence: TTGGGT
tgaatctgggtgctcctgta

SEQ ID NO: 29023 - DNA, 20 bp, Artificial Sequence
  Description of Artificial Sequence: Synthetic oligonucleotide
  Target: LAMA2; (+) strand; PAM type: NNGRRT; PAM sequence: TAGGAT
gtattgggtgcatatatatt

SEQ ID NO: 29024 - DNA, 20 bp, Artificial Sequence
  Description of Artificial Sequence: Synthetic oligonucleotide
  Target: LAMA2; (+) strand; PAM type: NNGRRT; PAM sequence: TTGAAT
aggatagttagctcttcttg

SEQ ID NO: 29025 - DNA, 20 bp, Artificial Sequence
  Description of Artificial Sequence: Synthetic oligonucleotide
  Target: LAMA2; (+) strand; PAM type: NNGRRT; PAM sequence: TAGGAT
aagtctgttttatcagagac

SEQ ID NO: 29026 - DNA, 20 bp, Artificial Sequence
  Description of Artificial Sequence: Synthetic oligonucleotide
  Target: LAMA2; (+) strand; PAM type: NNGRRT; PAM sequence: ATGGGT
tgtgtgtctctgcacatgag

SEQ ID NO: 29027 - DNA, 20 bp, Artificial Sequence
  Description of Artificial Sequence: Synthetic oligonucleotide
  Target: LAMA2; (+) strand; PAM type: NNGRRT; PAM sequence: CTGAAT
ctgcacatgagatgggtttc

SEQ ID NO: 29028 - DNA, 20 bp, Artificial Sequence
  Description of Artificial Sequence: Synthetic oligonucleotide
  Target: LAMA2; (+) strand; PAM type: NNGRRT; PAM sequence: ATGGGT
ttcctgaatacggaacactg

SEQ ID NO: 29029 - DNA, 20 bp, Artificial Sequence
  Description of Artificial Sequence: Synthetic oligonucleotide
  Target: LAMA2; (+) strand; PAM type: NNGRRT; PAM sequence: GTGAAT
taaagttaatattgttatgt

SEQ ID NO: 29030 - DNA, 20 bp, Artificial Sequence
  Description of Artificial Sequence: Synthetic oligonucleotide
  Target: LAMA2; (+) strand; PAM type: NNGRRT; PAM sequence: CTGGAT
gcttatgaagcttagtttgg

SEQ ID NO: 29031 - DNA, 20 bp, Artificial Sequence
  Description of Artificial Sequence: Synthetic oligonucleotide
  Target: LAMA2; (+) strand; PAM type: NNGRRT; PAM sequence: CTGGGT
gtttggctggatatgaaatt

SEQ ID NO: 29032 - DNA, 20 bp, Artificial Sequence
  Description of Artificial Sequence: Synthetic oligonucleotide
  Target: LAMA2; (+) strand; PAM type: NNGRRT; PAM sequence: AAGAAT
ggttgaaaattcttttcttt

SEQ ID NO: 29033 - DNA, 20 bp, Artificial Sequence
  Description of Artificial Sequence: Synthetic oligonucleotide
  Target: LAMA2; (+) strand; PAM type: NNGRRT; PAM sequence: TTGAAT
aattcttttctttaagaatg

SEQ ID NO: 29034 - DNA, 20 bp, Artificial Sequence
  Description of Artificial Sequence: Synthetic oligonucleotide
  Target: LAMA2; (+) strand; PAM type: NNGRRT; PAM sequence: TAGAGT
ccccactctcttccggcttg

SEQ ID NO: 29035 - DNA, 20 bp, Artificial Sequence
  Description of Artificial Sequence: Synthetic oligonucleotide
  Target: LAMA2; (+) strand; PAM type: NNGRRT; PAM sequence: GAGGGT
agtctgatgggcttcccttt

SEQ ID NO: 29036 - DNA, 20 bp, Artificial Sequence
  Description of Artificial Sequence: Synthetic oligonucleotide
  Target: LAMA2; (+) strand; PAM type: NNGRRT; PAM sequence: GTGAAT
tttccttcatttcagctttg

SEQ ID NO: 29037 - DNA, 20 bp, Artificial Sequence
  Description of Artificial Sequence: Synthetic oligonucleotide
  Target: LAMA2; (+) strand; PAM type: NNGRRT; PAM sequence: TGGAGT
aatctgacaattatgtgtct

SEQ ID NO: 29038 - DNA, 20 bp, Artificial Sequence
  Description of Artificial Sequence: Synthetic oligonucleotide
  Target: LAMA2; (+) strand; PAM type: NNGRRT; PAM sequence: AGGAGT
tcttggagttgctcttctcg

SEQ ID NO: 29039 - DNA, 20 bp, Artificial Sequence
  Description of Artificial Sequence: Synthetic oligonucleotide
  Target: LAMA2; (+) strand; PAM type: NNGRRT; PAM sequence: CTGAAT
tgtggcgttctctgtatttc

SEQ ID NO: 29040 - DNA, 20 bp, Artificial Sequence
  Description of Artificial Sequence: Synthetic oligonucleotide
  Target: LAMA2; (+) strand; PAM type: NNGRRT; PAM sequence: CTGGAT
gctagattggggaagttctc

SEQ ID NO: 29041 - DNA, 20 bp, Artificial Sequence
  Description of Artificial Sequence: Synthetic oligonucleotide
  Target: LAMA2; (+) strand; PAM type: NNGRRT; PAM sequence: CAGAGT
ttctcctggataatatcctg

SEQ ID NO: 29042 - DNA, 20 bp, Artificial Sequence
  Description of Artificial Sequence: Synthetic oligonucleotide
  Target: LAMA2; (+) strand; PAM type: NNGRRT; PAM sequence: TTGAAT
tcaacttctttgcctttggt

SEQ ID NO: 29043 - DNA, 20 bp, Artificial Sequence
  Description of Artificial Sequence: Synthetic oligonucleotide
  Target: LAMA2; (+) strand; PAM type: NNGRRT; PAM sequence: CAGAGT
ttgaatgtcctcccgtagct

SEQ ID NO: 29044 - DNA, 20 bp, Artificial Sequence
  Description of Artificial Sequence: Synthetic oligonucleotide
  Target: LAMA2; (+) strand; PAM type: NNGRRT; PAM sequence: TAGAGT
aggagaggcactctgctttt

SEQ ID NO: 29045 - DNA, 20 bp, Artificial Sequence
  Description of Artificial Sequence: Synthetic oligonucleotide
  Target: LAMA2; (+) strand; PAM type: NNGRRT; PAM sequence: ATGGGT
ttgatgatggtgatgtacag

SEQ ID NO: 29046 - DNA, 20 bp, Artificial Sequence
  Description of Artificial Sequence: Synthetic oligonucleotide
  Target: LAMA2; (+) strand; PAM type: NNGRRT; PAM sequence: GTGGAT
tgtacagatgggtttttcgt

SEQ ID NO: 29047 - DNA, 20 bp, Artificial Sequence
  Description of Artificial Sequence: Synthetic oligonucleotide
  Target: LAMA2; (+) strand; PAM type: NNGRRT; PAM sequence: GGGGGT
gtgtcagtgtgcccctgctg

SEQ ID NO: 29048 - DNA, 20 bp, Artificial Sequence
  Description of Artificial Sequence: Synthetic oligonucleotide
  Target: LAMA2; (+) strand; PAM type: NNGRRT; PAM sequence: AGGGGT
gcctcccagttacgctgctc

SEQ ID NO: 29049 - DNA, 20 bp, Artificial Sequence
  Description of Artificial Sequence: Synthetic oligonucleotide
  Target: LAMA2; (+) strand; PAM type: NNGRRT; PAM sequence: AGGGGT
agttacgctgctcaggggtc

SEQ ID NO: 29050 - DNA, 20 bp, Artificial Sequence
  Description of Artificial Sequence: Synthetic oligonucleotide
  Target: LAMA2; (+) strand; PAM type: NNGRRT; PAM sequence: CAGGAT
aggaccctccaagccaggtg

SEQ ID NO: 29051 - DNA, 20 bp, Artificial Sequence
  Description of Artificial Sequence: Synthetic oligonucleotide
  Target: LAMA2; (+) strand; PAM type: NNGRRT; PAM sequence: GGGAGT
gaaaagcgcagtattccggt

SEQ ID NO: 29052 - DNA, 20 bp, Artificial Sequence
  Description of Artificial Sequence: Synthetic oligonucleotide
  Target: LAMA2; (+) strand; PAM type: NNGRRT; PAM sequence: CAGGGT
tcgccctgcttcggctcgcg

SEQ ID NO: 29053 - DNA, 20 bp, Artificial Sequence
  Description of Artificial Sequence: Synthetic oligonucleotide
  Target: LAMA2; (+) strand; PAM type: NNGRRT; PAM sequence: GTGAGT
ctccccgattcagtttttta

SEQ ID NO: 29054 - DNA, 20 bp, Artificial Sequence
  Description of Artificial Sequence: Synthetic oligonucleotide
  Target: LAMA2; (+) strand; PAM type: NNGRRT; PAM sequence: TCGAAT
acatattatttgatacaggc

SEQ ID NO: 29055 - DNA, 20 bp, Artificial Sequence
  Description of Artificial Sequence: Synthetic oligonucleotide
  Target: LAMA2; (+) strand; PAM type: NNGRRT; PAM sequence: AAGAGT
ctctgataacttatttagga

SEQ ID NO: 29056 - DNA, 20 bp, Artificial Sequence
  Description of Artificial Sequence: Synthetic oligonucleotide
  Target: LAMA2; (+) strand; PAM type: NNGRRT; PAM sequence: AAGGAT
tacataaccagatagtagaa

SEQ ID NO: 29057 - DNA, 20 bp, Artificial Sequence
  Description of Artificial Sequence: Synthetic oligonucleotide
  Target: LAMA2; (+) strand; PAM type: NNGRRT; PAM sequence: TAGAAT
acttaattttttattccatc

SEQ ID NO: 29058 - DNA, 20 bp, Artificial Sequence
  Description of Artificial Sequence: Synthetic oligonucleotide
  Target: LAMA2; (+) strand; PAM type: NNGRRT; PAM sequence: CGGAAT
aaatatatttattttatttt

SEQ ID NO: 29059 - DNA, 20 bp, Artificial Sequence
  Description of Artificial Sequence: Synthetic oligonucleotide
  Target: LAMA2; (+) strand; PAM type: NNGRRT; PAM sequence: TTGAGT
ctgttagaagcactctgtta

SEQ ID NO: 29060 - DNA, 20 bp, Artificial Sequence
  Description of Artificial Sequence: Synthetic oligonucleotide
  Target: LAMA2; (+) strand; PAM type: NNGRRT; PAM sequence: CTGAGT
gaagcactctgttattgagt

SEQ ID NO: 29061 - DNA, 20 bp, Artificial Sequence
  Description of Artificial Sequence: Synthetic oligonucleotide
  Target: LAMA2; (+) strand; PAM type: NNGRRT; PAM sequence: GTGGAT
tgtgtgtatgtgtgtgtttt

SEQ ID NO: 29062 - DNA, 20 bp, Artificial Sequence
  Description of Artificial Sequence: Synthetic oligonucleotide
  Target: LAMA2; (+) strand; PAM type: NNGRRT; PAM sequence: TTGAAT
agtttattctttcagaagcc

SEQ ID NO: 29063 - DNA, 20 bp, Artificial Sequence
  Description of Artificial Sequence: Synthetic oligonucleotide
  Target: LAMA2; (+) strand; PAM type: NNGRRT; PAM sequence: TAGAAT
gacctaccttatataggacc

SEQ ID NO: 29064 - DNA, 20 bp, Artificial Sequence
  Description of Artificial Sequence: Synthetic oligonucleotide
  Target: LAMA2; (+) strand; PAM type: NNGRRT; PAM sequence: CAGAAT
ctgaactgtagtctagtcat

SEQ ID NO: 29065 - DNA, 20 bp, Artificial Sequence
  Description of Artificial Sequence: Synthetic oligonucleotide
  Target: LAMA2; (+) strand; PAM type: NNGRRT; PAM sequence: AAGAAT
ccaggaaagacattgtttta

SEQ ID NO: 29066 - DNA, 20 bp, Artificial Sequence
  Description of Artificial Sequence: Synthetic oligonucleotide
  Target: LAMA2; (+) strand; PAM type: NNGRRT; PAM sequence: AGGGGT
tttgtagtttctcatctcca

SEQ ID NO: 29067 - DNA, 20 bp, Artificial Sequence
  Description of Artificial Sequence: Synthetic oligonucleotide
  Target: LAMA2; (+) strand; PAM type: NNGRRT; PAM sequence: AGGGGT
cttcaactgttctgaacagg

SEQ ID NO: 29068 - DNA, 20 bp, Artificial Sequence
  Description of Artificial Sequence: Synthetic oligonucleotide
  Target: LAMA2; (+) strand; PAM type: NNGRRT; PAM sequence: TTGGGT
tttatttcccatttggtcta

SEQ ID NO: 29069 - DNA, 20 bp, Artificial Sequence
  Description of Artificial Sequence: Synthetic oligonucleotide
  Target: LAMA2; (+) strand; PAM type: NNGRRT; PAM sequence: CAGAGT
tcaaacaatatttattttac

SEQ ID NO: 29070 - DNA, 20 bp, Artificial Sequence
  Description of Artificial Sequence: Synthetic oligonucleotide
  Target: LAMA2; (+) strand; PAM type: NNGRRT; PAM sequence: GAGGAT
tgttctacttggacatcata

SEQ ID NO: 29071 - DNA, 20 bp, Artificial Sequence
  Description of Artificial Sequence: Synthetic oligonucleotide
  Target: LAMA2; (+) strand; PAM type: NNGRRT; PAM sequence: TAGGAT
aggatccttttaatgtactt

SEQ ID NO: 29072 - DNA, 20 bp, Artificial Sequence
  Description of Artificial Sequence: Synthetic oligonucleotide
  Target: LAMA2; (+) strand; PAM type: NNGRRT; PAM sequence: CTGGAT
cagtttggtgttttgctcat

SEQ ID NO: 29073 - DNA, 20 bp, Artificial Sequence
  Description of Artificial Sequence: Synthetic oligonucleotide
  Target: LAMA2; (+) strand; PAM type: NNGRRT; PAM sequence: TTGAGT
gtctatctcatatagatgtt

SEQ ID NO: 29074 - DNA, 20 bp, Artificial Sequence
  Description of Artificial Sequence: Synthetic oligonucleotide
  Target: LAMA2; (+) strand; PAM type: NNGRRT; PAM sequence: CTGAAT
atagatgttttgagtactaa

SEQ ID NO: 29075 - DNA, 20 bp, Artificial Sequence
  Description of Artificial Sequence: Synthetic oligonucleotide
  Target: LAMA2; (+) strand; PAM type: NNGRRT; PAM sequence: TTGAGT
taccataagataagtgctat

SEQ ID NO: 29076 - DNA, 20 bp, Artificial Sequence
  Description of Artificial Sequence: Synthetic oligonucleotide
  Target: LAMA2; (+) strand; PAM type: NNGRRT; PAM sequence: TGGGGT
tcttagaagttttgtttatt

SEQ ID NO: 29077 - DNA, 20 bp, Artificial Sequence
  Description of Artificial Sequence: Synthetic oligonucleotide
  Target: LAMA2; (+) strand; PAM type: NNGRRT; PAM sequence: TTGGGT
tttggggttatcatttgcat

SEQ ID NO: 29078 - DNA, 20 bp, Artificial Sequence
  Description of Artificial Sequence: Synthetic oligonucleotide
  Target: LAMA2; (+) strand; PAM type: NNGRRT; PAM sequence: TAGAAT
tttgcatttgggtatcaagt

SEQ ID NO: 29079 - DNA, 20 bp, Artificial Sequence
  Description of Artificial Sequence: Synthetic oligonucleotide
  Target: LAMA2; (+) strand; PAM type: NNGRRT; PAM sequence: TTGAAT
gttagaatttgcttcataaa

SEQ ID NO: 29080 - DNA, 20 bp, Artificial Sequence
  Description of Artificial Sequence: Synthetic oligonucleotide
  Target: LAMA2; (+) strand; PAM type: NNGRRT; PAM sequence: AAGAGT
ctccatttttatatgaccat

SEQ ID NO: 29081 - DNA, 20 bp, Artificial Sequence
  Description of Artificial Sequence: Synthetic oligonucleotide
  Target: LAMA2; (+) strand; PAM type: NNGRRT; PAM sequence: GGGAGT
gcatgttcttactcgtaagt

SEQ ID NO: 29082 - DNA, 20 bp, Artificial Sequence
  Description of Artificial Sequence: Synthetic oligonucleotide
  Target: LAMA2; (+) strand; PAM type: NNGRRT; PAM sequence: GTGGGT
tcacatgccagggcctgtca

SEQ ID NO: 29083 - DNA, 20 bp, Artificial Sequence
  Description of Artificial Sequence: Synthetic oligonucleotide
  Target: LAMA2; (+) strand; PAM type: NNGRRT; PAM sequence: GGGGGT
gccagggcctgtcagtgggt

SEQ ID NO: 29084 - DNA, 20 bp, Artificial Sequence
  Description of Artificial Sequence: Synthetic oligonucleotide
  Target: LAMA2; (+) strand; PAM type: NNGRRT; PAM sequence: CTGGAT
tgcatacctatgtgacaaac

SEQ ID NO: 29085 - DNA, 20 bp, Artificial Sequence
  Description of Artificial Sequence: Synthetic oligonucleotide
  Target: LAMA2; (+) strand; PAM type: NNGRRT; PAM sequence: ATGAAT
tttctcttttttatacttaa

SEQ ID NO: 29086 - DNA, 20 bp, Artificial Sequence
  Description of Artificial Sequence: Synthetic oligonucleotide
  Target: LAMA2; (+) strand; PAM type: NNGRRT; PAM sequence: TTGGGT
ttaagcctataagtttactt

SEQ ID NO: 29087 - DNA, 20 bp, Artificial Sequence
  Description of Artificial Sequence: Synthetic oligonucleotide
  Target: LAMA2; (+) strand; PAM type: NNGRRT; PAM sequence: AAGAGT
cttgattttctctttaaccc

SEQ ID NO: 29088 - DNA, 20 bp, Artificial Sequence
  Description of Artificial Sequence: Synthetic oligonucleotide
  Target: LAMA2; (+) strand; PAM type: NNGRRT; PAM sequence: TTGAAT
ggcattaatttttagaacag

SEQ ID NO: 29089 - DNA, 20 bp, Artificial Sequence
  Description of Artificial Sequence: Synthetic oligonucleotide
  Target: LAMA2; (+) strand; PAM type: NNGRRT; PAM sequence: TTGAGT
gataatttctgctttgataa

SEQ ID NO: 29090 - DNA, 20 bp, Artificial Sequence
  Description of Artificial Sequence: Synthetic oligonucleotide
  Target: LAMA2; (+) strand; PAM type: NNGRRT; PAM sequence: ATGAGT
ttcatctgtaaatacttaag

SEQ ID NO: 29091 - DNA, 20 bp, Artificial Sequence
  Description of Artificial Sequence: Synthetic oligonucleotide
  Target: LAMA2; (+) strand; PAM type: NNGRRT; PAM sequence: TTGAGT
ccttactgaacctagtttat

SEQ ID NO: 29092 - DNA, 20 bp, Artificial Sequence
  Description of Artificial Sequence: Synthetic oligonucleotide
  Target: LAMA2; (+) strand; PAM type: NNGRRT; PAM sequence: ATGAAT
tctattttttaatcaaagac

SEQ ID NO: 29093 - DNA, 20 bp, Artificial Sequence
  Description of Artificial Sequence: Synthetic oligonucleotide
  Target: LAMA2; (+) strand; PAM type: NNGRRT; PAM sequence: TAGAGT
tactgccagtggcatgttct

SEQ ID NO: 29094 - DNA, 20 bp, Artificial Sequence
  Description of Artificial Sequence: Synthetic oligonucleotide
  Target: LAMA2; (+) strand; PAM type: NNGRRT; PAM sequence: CTGGAT
tctttctttaggtttggcac

SEQ ID NO: 29095 - DNA, 20 bp, Artificial Sequence
  Description of Artificial Sequence: Synthetic oligonucleotide
  Target: LAMA2; (+) strand; PAM type: NNGRRT; PAM sequence: GTGGGT
ctgcaaagcctgtaactgca

SEQ ID NO: 29096 - DNA, 20 bp, Artificial Sequence
  Description of Artificial Sequence: Synthetic oligonucleotide
  Target: LAMA2; (+) strand; PAM type: NNGRRT; PAM sequence: GAGGAT
gtgggttagggagcaaaaat

SEQ ID NO: 29097 - DNA, 20 bp, Artificial Sequence
  Description of Artificial Sequence: Synthetic oligonucleotide
  Target: LAMA2; (+) strand; PAM type: NNGRRT; PAM sequence: CAGGAT
acccaccaggttcactgtag

SEQ ID NO: 29098 - DNA, 20 bp, Artificial Sequence
  Description of Artificial Sequence: Synthetic oligonucleotide
  Target: LAMA2; (+) strand; PAM type: NNGRRT; PAM sequence: GAGGAT
taaaagcctacaaatgcacg

SEQ ID NO: 29099 - DNA, 20 bp, Artificial Sequence
  Description of Artificial Sequence: Synthetic oligonucleotide
  Target: LAMA2; (+) strand; PAM type: NNGRRT; PAM sequence: ATGAAT
cctttgcatctaattcagta

SEQ ID NO: 29100 - DNA, 20 bp, Artificial Sequence
  Description of Artificial Sequence: Synthetic oligonucleotide
  Target: LAMA2; (+) strand; PAM type: NNGRRT; PAM sequence: AAGGGT
attcagtaatgaattctgtc

SEQ ID NO: 29101 - DNA, 20 bp, Artificial Sequence
  Description of Artificial Sequence: Synthetic oligonucleotide
  Target: LAMA2; (+) strand; PAM type: NNGRRT; PAM sequence: CTGAAT
attctgtcaagggttttatt

SEQ ID NO: 29102 - DNA, 20 bp, Artificial Sequence
  Description of Artificial Sequence: Synthetic oligonucleotide
  Target: LAMA2; (+) strand; PAM type: NNGRRT; PAM sequence: TGGAAT
aaaaaagtacaaagccctaa

SEQ ID NO: 29103 - DNA, 20 bp, Artificial Sequence
  Description of Artificial Sequence: Synthetic oligonucleotide
  Target: LAMA2; (+) strand; PAM type: NNGRRT; PAM sequence: AGGGAT
aacaaatcatgttaacacca

SEQ ID NO: 29104 - DNA, 20 bp, Artificial Sequence
  Description of Artificial Sequence: Synthetic oligonucleotide
  Target: LAMA2; (+) strand; PAM type: NNGRRT; PAM sequence: ATGAGT
gatttactttacctatagta

SEQ ID NO: 29105 - DNA, 20 bp, Artificial Sequence
  Description of Artificial Sequence: Synthetic oligonucleotide
  Target: LAMA2; (+) strand; PAM type: NNGRRT; PAM sequence: GAGAAT
tgtataactacattagctga

SEQ ID NO: 29106 - DNA, 20 bp, Artificial Sequence
  Description of Artificial Sequence: Synthetic oligonucleotide
  Target: LAMA2; (+) strand; PAM type: NNGRRT; PAM sequence: ATGAAT
ttagttttaatgaagtgttt

SEQ ID NO: 29107 - DNA, 20 bp, Artificial Sequence
  Description of Artificial Sequence: Synthetic oligonucleotide
  Target: LAMA2; (+) strand; PAM type: NNGRRT; PAM sequence: AAGAAT
aagtgtttatgaattgggac

SEQ ID NO: 29108 - DNA, 20 bp, Artificial Sequence
  Description of Artificial Sequence: Synthetic oligonucleotide
  Target: LAMA2; (+) strand; PAM type: NNGRRT; PAM sequence: TGGAAT
agtaaaaagttgccatgtcc

SEQ ID NO: 29109 - DNA, 20 bp, Artificial Sequence
  Description of Artificial Sequence: Synthetic oligonucleotide
  Target: LAMA2; (+) strand; PAM type: NNGRRT; PAM sequence: TTGAGT
tatctgaaatgaaaaattgc

SEQ ID NO: 29110 - DNA, 20 bp, Artificial Sequence
  Description of Artificial Sequence: Synthetic oligonucleotide
  Target: LAMA2; (+) strand; PAM type: NNGRRT; PAM sequence: GTGAGT
ccaagattgtgtagcagtgt

SEQ ID NO: 29111 - DNA, 20 bp, Artificial Sequence
  Description of Artificial Sequence: Synthetic oligonucleotide
  Target: LAMA2; (+) strand; PAM type: NNGRRT; PAM sequence: CTGAGT
taaaatggaaaagaaacctc

SEQ ID NO: 29112 - DNA, 20 bp, Artificial Sequence
  Description of Artificial Sequence: Synthetic oligonucleotide
  Target: LAMA2; (+) strand; PAM type: NNGRRT; PAM sequence: TAGAAT
aaagaaacctcctgagtttc

SEQ ID NO: 29113 - DNA, 20 bp, Artificial Sequence
  Description of Artificial Sequence: Synthetic oligonucleotide
  Target: LAMA2; (+) strand; PAM type: NNGRRT; PAM sequence: GGGAGT
gtctggtatttgcaaggaaa

SEQ ID NO: 29114 - DNA, 20 bp, Artificial Sequence
  Description of Artificial Sequence: Synthetic oligonucleotide
  Target: LAMA2; (+) strand; PAM type: NNGRRT; PAM sequence: GCGAGT
gcaaggaaagggagtaataa

SEQ ID NO: 29115 - DNA, 20 bp, Artificial Sequence
  Description of Artificial Sequence: Synthetic oligonucleotide
  Target: LAMA2; (+) strand; PAM type: NNGRRT; PAM sequence: GAGAAT
gccgaactcaatattgtact

SEQ ID NO: 29116 - DNA, 20 bp, Artificial Sequence
  Description of Artificial Sequence: Synthetic oligonucleotide
  Target: LAMA2; (+) strand; PAM type: NNGRRT; PAM sequence: GAGAAT
gcaattaagaaatcataaaa

SEQ ID NO: 29117 - DNA, 20 bp, Artificial Sequence
  Description of Artificial Sequence: Synthetic oligonucleotide
  Target: LAMA2; (+) strand; PAM type: NNGRRT; PAM sequence: CAGGAT
tcttataaactaaattgttt

SEQ ID NO: 29118 - DNA, 20 bp, Artificial Sequence
  Description of Artificial Sequence: Synthetic oligonucleotide
  Target: LAMA2; (+) strand; PAM type: NNGRRT; PAM sequence: ATGAAT
acaaattatatgcatataac

SEQ ID NO: 29119 - DNA, 20 bp, Artificial Sequence
  Description of Artificial Sequence: Synthetic oligonucleotide
  Target: LAMA2; (+) strand; PAM type: NNGRRT; PAM sequence: CAGAAT
atataacatgaattacatca

SEQ ID NO: 29120 - DNA, 20 bp, Artificial Sequence
  Description of Artificial Sequence: Synthetic oligonucleotide
  Target: LAMA2; (+) strand; PAM type: NNGRRT; PAM sequence: ATGAGT
taatatcacaatatgccacg

SEQ ID NO: 29121 - DNA, 20 bp, Artificial Sequence
  Description of Artificial Sequence: Synthetic oligonucleotide
  Target: LAMA2; (+) strand; PAM type: NNGRRT; PAM sequence: ATGGAT
caactgattgtaaaaacagc

SEQ ID NO: 29122 - DNA, 20 bp, Artificial Sequence
  Description of Artificial Sequence: Synthetic oligonucleotide
  Target: LAMA2; (+) strand; PAM type: NNGRRT; PAM sequence: AAGAAT
caggtttttagcagaagggg

SEQ ID NO: 29123 - DNA, 20 bp, Artificial Sequence
  Description of Artificial Sequence: Synthetic oligonucleotide
  Target: LAMA2; (+) strand; PAM type: NNGRRT; PAM sequence: ATGAGT
attctcttatactataacat

SEQ ID NO: 29124 - DNA, 20 bp, Artificial Sequence
  Description of Artificial Sequence: Synthetic oligonucleotide
  Target: LAMA2; (+) strand; PAM type: NNGRRT; PAM sequence: GTGGGT
gaggctgtattatttttcct

SEQ ID NO: 29125 - DNA, 20 bp, Artificial Sequence
  Description of Artificial Sequence: Synthetic oligonucleotide
  Target: LAMA2; (+) strand; PAM type: NNGRRT; PAM sequence: TGGGGT
ctcaagctaaactgagcaac

SEQ ID NO: 29126 - DNA, 20 bp, Artificial Sequence
  Description of Artificial Sequence: Synthetic oligonucleotide
  Target: LAMA2; (+) strand; PAM type: NNGRRT; PAM sequence: TGGGGT
aaactgagcaactggggtca

SEQ ID NO: 29127 - DNA, 20 bp, Artificial Sequence
  Description of Artificial Sequence: Synthetic oligonucleotide
  Target: LAMA2; (+) strand; PAM type: NNGRRT; PAM sequence: GAGGGT
gcaactggggtcatggggtg

SEQ ID NO: 29128 - DNA, 20 bp, Artificial Sequence
  Description of Artificial Sequence: Synthetic oligonucleotide
  Target: LAMA2; (+) strand; PAM type: NNGRRT; PAM sequence: TGGAGT
ctaagatcagggctaaagtt

SEQ ID NO: 29129 - DNA, 20 bp, Artificial Sequence
  Description of Artificial Sequence: Synthetic oligonucleotide
  Target: LAMA2; (+) strand; PAM type: NNGRRT; PAM sequence: TAGGAT
ccctcactaggacttgacac

SEQ ID NO: 29130 - DNA, 20 bp, Artificial Sequence
  Description of Artificial Sequence: Synthetic oligonucleotide
  Target: LAMA2; (+) strand; PAM type: NNGRRT; PAM sequence: CTGGGT
aaatttttctcttaggggct

SEQ ID NO: 29131 - DNA, 20 bp, Artificial Sequence
  Description of Artificial Sequence: Synthetic oligonucleotide
  Target: LAMA2; (+) strand; PAM type: NNGRRT; PAM sequence: GTGGGT
ttttctcttaggggctctgg

SEQ ID NO: 29132 - DNA, 20 bp, Artificial Sequence
  Description of Artificial Sequence: Synthetic oligonucleotide
  Target: LAMA2; (+) strand; PAM type: NNGRRT; PAM sequence: CCGAAT
agttactaccttgtgtagga

SEQ ID NO: 29133 - DNA, 20 bp, Artificial Sequence
  Description of Artificial Sequence: Synthetic oligonucleotide
  Target: LAMA2; (+) strand; PAM type: NNGRRT; PAM sequence: GGGAAT
cccaaacctgtgtgccacgt

SEQ ID NO: 29134 - DNA, 20 bp, Artificial Sequence
  Description of Artificial Sequence: Synthetic oligonucleotide
  Target: LAMA2; (+) strand; PAM type: NNGRRT; PAM sequence: TGGGAT
acctgtgtgccacgtgggaa

SEQ ID NO: 29135 - DNA, 20 bp, Artificial Sequence
  Description of Artificial Sequence: Synthetic oligonucleotide
  Target: LAMA2; (+) strand; PAM type: NNGRRT; PAM sequence: GAGGAT
aaaccagtagccacaaaaat

SEQ ID NO: 29136 - DNA, 20 bp, Artificial Sequence
  Description of Artificial Sequence: Synthetic oligonucleotide
  Target: LAMA2; (+) strand; PAM type: NNGRRT; PAM sequence: AAGGGT
tttgtacacaaagaactaga

SEQ ID NO: 29137 - DNA, 20 bp, Artificial Sequence
  Description of Artificial Sequence: Synthetic oligonucleotide
  Target: LAMA2; (+) strand; PAM type: NNGRRT; PAM sequence: AAGAAT
aaagcatgattagaagattg

SEQ ID NO: 29138 - DNA, 20 bp, Artificial Sequence
  Description of Artificial Sequence: Synthetic oligonucleotide
  Target: LAMA2; (+) strand; PAM type: NNGRRT; PAM sequence: AGGAAT
gattgaagaataaacaaaga

SEQ ID NO: 29139 - DNA, 20 bp, Artificial Sequence
  Description of Artificial Sequence: Synthetic oligonucleotide
  Target: LAMA2; (+) strand; PAM type: NNGRRT; PAM sequence: TTGGGT
tgaaattaaaaattcaatga

SEQ ID NO: 29140 - DNA, 20 bp, Artificial Sequence
  Description of Artificial Sequence: Synthetic oligonucleotide
  Target: LAMA2; (+) strand; PAM type: NNGRRT; PAM sequence: CAGGAT
aaacaagagatgagaaactg

SEQ ID NO: 29141 - DNA, 20 bp, Artificial Sequence
  Description of Artificial Sequence: Synthetic oligonucleotide
  Target: LAMA2; (+) strand; PAM type: NNGRRT; PAM sequence: CAGAAT
atatgatgctaactgactca

SEQ ID NO: 29142 - DNA, 20 bp, Artificial Sequence
  Description of Artificial Sequence: Synthetic oligonucleotide
  Target: LAMA2; (+) strand; PAM type: NNGRRT; PAM sequence: AAGAAT
aaaaaaataatgaaggagag

SEQ ID NO: 29143 - DNA, 20 bp, Artificial Sequence
  Description of Artificial Sequence: Synthetic oligonucleotide
  Target: LAMA2; (+) strand; PAM type: NNGRRT; PAM sequence: ATGAGT
tgaaggagagaagaatgatc

SEQ ID NO: 29144 - DNA, 20 bp, Artificial Sequence
  Description of Artificial Sequence: Synthetic oligonucleotide
  Target: LAMA2; (+) strand; PAM type: NNGRRT; PAM sequence: GAGGAT
ctattataaatcctcagttt

SEQ ID NO: 29145 - DNA, 20 bp, Artificial Sequence
  Description of Artificial Sequence: Synthetic oligonucleotide
  Target: LAMA2; (+) strand; PAM type: NNGRRT; PAM sequence: GTGAGT
tgggggcaaatatctttatt

SEQ ID NO: 29146 - DNA, 20 bp, Artificial Sequence
  Description of Artificial Sequence: Synthetic oligonucleotide
  Target: LAMA2; (+) strand; PAM type: NNGRRT; PAM sequence: AAGAAT
tcacagtccaacttcatgga

SEQ ID NO: 29147 - DNA, 20 bp, Artificial Sequence
  Description of Artificial Sequence: Synthetic oligonucleotide
  Target: LAMA2; (+) strand; PAM type: NNGRRT; PAM sequence: AAGAAT
aataatatatgtcctttagt

SEQ ID NO: 29148 - DNA, 20 bp, Artificial Sequence
  Description of Artificial Sequence: Synthetic oligonucleotide
  Target: LAMA2; (+) strand; PAM type: NNGRRT; PAM sequence: AAGAAT
ttcactagattatagtccag

SEQ ID NO: 29149 - DNA, 20 bp, Artificial Sequence
  Description of Artificial Sequence: Synthetic oligonucleotide
  Target: LAMA2; (+) strand; PAM type: NNGRRT; PAM sequence: TAGAAT
aaaaatgtaataaaaatact

SEQ ID NO: 29150 - DNA, 20 bp, Artificial Sequence
  Description of Artificial Sequence: Synthetic oligonucleotide
  Target: LAMA2; (+) strand; PAM type: NNGRRT; PAM sequence: GAGGAT
ttctaaatgaggagacagct

SEQ ID NO: 29151 - DNA, 20 bp, Artificial Sequence
  Description of Artificial Sequence: Synthetic oligonucleotide
  Target: LAMA2; (+) strand; PAM type: NNGRRT; PAM sequence: TAGAGT
atgtttaccatttctattaa

SEQ ID NO: 29152 - DNA, 20 bp, Artificial Sequence
  Description of Artificial Sequence: Synthetic oligonucleotide
  Target: LAMA2; (+) strand; PAM type: NNGRRT; PAM sequence: GTGAAT
aaaacaatgctacattgttt

SEQ ID NO: 29153 - DNA, 20 bp, Artificial Sequence
  Description of Artificial Sequence: Synthetic oligonucleotide
  Target: LAMA2; (+) strand; PAM type: NNGRRT; PAM sequence: TAGGGT
aaaaaatttaaatacacttg

SEQ ID NO: 29154 - DNA, 20 bp, Artificial Sequence
  Description of Artificial Sequence: Synthetic oligonucleotide
  Target: LAMA2; (+) strand; PAM type: NNGRRT; PAM sequence: CAGAAT
tgtagggtaagtactaattt

SEQ ID NO: 29155 - DNA, 20 bp, Artificial Sequence
  Description of Artificial Sequence: Synthetic oligonucleotide
  Target: LAMA2; (+) strand; PAM type: NNGRRT; PAM sequence: GGGAAT
acctctagagaaacaggaaa

SEQ ID NO: 29156 - DNA, 20 bp, Artificial Sequence
  Description of Artificial Sequence: Synthetic oligonucleotide
  Target: LAMA2; (+) strand; PAM type: NNGRRT; PAM sequence: ATGGGT
ttttgttacctctaggttgc

SEQ ID NO: 29157 - DNA, 20 bp, Artificial Sequence
  Description of Artificial Sequence: Synthetic oligonucleotide
  Target: LAMA2; (+) strand; PAM type: NNGRRT; PAM sequence: TTGAAT
atgcatgttatatgtgcttt

SEQ ID NO: 29158 - DNA, 20 bp, Artificial Sequence
  Description of Artificial Sequence: Synthetic oligonucleotide
  Target: LAMA2; (+) strand; PAM type: NNGRRT; PAM sequence: TTGAAT
ctaatttaaaatttctttaa

SEQ ID NO: 29159 - DNA, 20 bp, Artificial Sequence
  Description of Artificial Sequence: Synthetic oligonucleotide
  Target: LAMA2; (+) strand; PAM type: NNGRRT; PAM sequence: AAGAAT
ttctttaattgaatgtaaaa

SEQ ID NO: 29160 - DNA, 20 bp, Artificial Sequence
  Description of Artificial Sequence: Synthetic oligonucleotide
  Target: LAMA2; (+) strand; PAM type: NNGRRT; PAM sequence: GAGAAT
aattccagatttaaaaagag

SEQ ID NO: 29161 - DNA, 20 bp, Artificial Sequence
  Description of Artificial Sequence: Synthetic oligonucleotide
  Target: LAMA2; (+) strand; PAM type: NNGRRT; PAM sequence: ATGAAT
tctcttcaacaatgatgtta

SEQ ID NO: 29162 - DNA, 20 bp, Artificial Sequence
  Description of Artificial Sequence: Synthetic oligonucleotide
  Target: LAMA2; (+) strand; PAM type: NNGRRT; PAM sequence: ACGAAT
aaaatgttgaaatttctctc

SEQ ID NO: 29163 - DNA, 20 bp, Artificial Sequence
  Description of Artificial Sequence: Synthetic oligonucleotide
  Target: LAMA2; (+) strand; PAM type: NNGRRT; PAM sequence: TAGAAT
atgcaaaatcagttggtatg

SEQ ID NO: 29164 - DNA, 20 bp, Artificial Sequence
  Description of Artificial Sequence: Synthetic oligonucleotide
  Target: LAMA2; (+) strand; PAM type: NNGRRT; PAM sequence: CAGAAT
ctggccttggcttacctctc

SEQ ID NO: 29165 - DNA, 20 bp, Artificial Sequence
  Description of Artificial Sequence: Synthetic oligonucleotide
  Target: LAMA2; (+) strand; PAM type: NNGRRT; PAM sequence: TTGAGT
cttacctctccagaatgttc

SEQ ID NO: 29166 - DNA, 20 bp, Artificial Sequence
  Description of Artificial Sequence: Synthetic oligonucleotide
  Target: LAMA2; (+) strand; PAM type: NNGRRT; PAM sequence: TTGAGT
ttcagctttgcttaaatttc

SEQ ID NO: 29167 - DNA, 20 bp, Artificial Sequence
  Description of Artificial Sequence: Synthetic oligonucleotide
  Target: LAMA2; (+) strand; PAM type: NNGRRT; PAM sequence: TGGAAT
tcttagttgtttgtagcatc

SEQ ID NO: 29168 - DNA, 20 bp, Artificial Sequence
  Description of Artificial Sequence: Synthetic oligonucleotide
  Target: LAMA2; (+) strand; PAM type: NNGRRT; PAM sequence: TGGGAT
taagttctattcagatttct

SEQ ID NO: 29169 - DNA, 20 bp, Artificial Sequence
  Description of Artificial Sequence: Synthetic oligonucleotide
  Target: LAMA2; (+) strand; PAM type: NNGRRT; PAM sequence: ATGAGT
ttttcttttatgatctcata

SEQ ID NO: 29170 - DNA, 20 bp, Artificial Sequence
  Description of Artificial Sequence: Synthetic oligonucleotide
  Target: LAMA2; (+) strand; PAM type: NNGRRT; PAM sequence: TTGAAT
taatctatgaaatggtgtta

SEQ ID NO: 29171 - DNA, 20 bp, Artificial Sequence
  Description of Artificial Sequence: Synthetic oligonucleotide
  Target: LAMA2; (+) strand; PAM type: NNGRRT; PAM sequence: CTGGAT
agtataaccataaataccta

SEQ ID NO: 29172 - DNA, 20 bp, Artificial Sequence
  Description of Artificial Sequence: Synthetic oligonucleotide
  Target: LAMA2; (+) strand; PAM type: NNGRRT; PAM sequence: AAGGAT
tttctgttctttttccctga

SEQ ID NO: 29173 - DNA, 20 bp, Artificial Sequence
  Description of Artificial Sequence: Synthetic oligonucleotide
  Target: LAMA2; (+) strand; PAM type: NNGRRT; PAM sequence: TTGGAT
tgttaacatttttattggtt

SEQ ID NO: 29174 - DNA, 20 bp, Artificial Sequence
  Description of Artificial Sequence: Synthetic oligonucleotide
  Target: LAMA2; (+) strand; PAM type: NNGRRT; PAM sequence: AGGAAT
cttctttttcatttgtgtac

SEQ ID NO: 29175 - DNA, 20 bp, Artificial Sequence
  Description of Artificial Sequence: Synthetic oligonucleotide
  Target: LAMA2; (+) strand; PAM type: NNGRRT; PAM sequence: CTGAAT
ttcaatgtgtacatttaatc

SEQ ID NO: 29176 - DNA, 20 bp, Artificial Sequence
  Description of Artificial Sequence: Synthetic oligonucleotide
  Target: LAMA2; (+) strand; PAM type: NNGRRT; PAM sequence: TAGAAT
ctgaatctaaattacagatg

SEQ ID NO: 29177 - DNA, 20 bp, Artificial Sequence
  Description of Artificial Sequence: Synthetic oligonucleotide
  Target: LAMA2; (+) strand; PAM type: NNGRRT; PAM sequence: ATGAAT
ttggcataaaaggttcatgc

SEQ ID NO: 29178 - DNA, 20 bp, Artificial Sequence
  Description of Artificial Sequence: Synthetic oligonucleotide
  Target: LAMA2; (+) strand; PAM type: NNGRRT; PAM sequence: ATGAAT
cataaaaggttcatgcatga

SEQ ID NO: 29179 - DNA, 20 bp, Artificial Sequence
  Description of Artificial Sequence: Synthetic oligonucleotide
  Target: LAMA2; (+) strand; PAM type: NNGRRT; PAM sequence: CTGAGT
caaattttggaaagtcttct

SEQ ID NO: 29180 - DNA, 20 bp, Artificial Sequence
  Description of Artificial Sequence: Synthetic oligonucleotide
  Target: LAMA2; (+) strand; PAM type: NNGRRT; PAM sequence: AAGAAT
aaacctagcttggttaaagc

SEQ ID NO: 29181 - DNA, 20 bp, Artificial Sequence
  Description of Artificial Sequence: Synthetic oligonucleotide
  Target: LAMA2; (+) strand; PAM type: NNGRRT; PAM sequence: AAGAAT
ccctctggcctgtcttcaac

SEQ ID NO: 29182 - DNA, 20 bp, Artificial Sequence
  Description of Artificial Sequence: Synthetic oligonucleotide
  Target: LAMA2; (+) strand; PAM type: NNGRRT; PAM sequence: AAGAAT
tcctgttaatttggtttagc

SEQ ID NO: 29183 - DNA, 20 bp, Artificial Sequence
  Description of Artificial Sequence: Synthetic oligonucleotide
  Target: LAMA2; (+) strand; PAM type: NNGRRT; PAM sequence: CTGAAT
ctctacccttttccttggca

SEQ ID NO: 29184 - DNA, 20 bp, Artificial Sequence
  Description of Artificial Sequence: Synthetic oligonucleotide
  Target: LAMA2; (+) strand; PAM type: NNGRRT; PAM sequence: GGGAAT
ctacttgttcatgttgtatt

SEQ ID NO: 29185 - DNA, 20 bp, Artificial Sequence
  Description of Artificial Sequence: Synthetic oligonucleotide
  Target: LAMA2; (+) strand; PAM type: NNGRRT; PAM sequence: AGGAGT
gccttggaaaagtgtgtttt

SEQ ID NO: 29186 - DNA, 20 bp, Artificial Sequence
  Description of Artificial Sequence: Synthetic oligonucleotide
  Target: LAMA2; (+) strand; PAM type: NNGRRT; PAM sequence: TAGGAT
ttgttaacttattttaatac

SEQ ID NO: 29187 - DNA, 20 bp, Artificial Sequence
  Description of Artificial Sequence: Synthetic oligonucleotide
  Target: LAMA2; (+) strand; PAM type: NNGRRT; PAM sequence: AAGAAT
aagcagtagcttctatgaga

SEQ ID NO: 29188 - DNA, 20 bp, Artificial Sequence
  Description of Artificial Sequence: Synthetic oligonucleotide
  Target: LAMA2; (+) strand; PAM type: NNGRRT; PAM sequence: AAGAAT
aagcacacatttcttcctaa

SEQ ID NO: 29189 - DNA, 20 bp, Artificial Sequence
  Description of Artificial Sequence: Synthetic oligonucleotide
  Target: LAMA2; (+) strand; PAM type: NNGRRT; PAM sequence: TGGAGT
atctgtacataaaatatatc

SEQ ID NO: 29190 - DNA, 20 bp, Artificial Sequence
  Description of Artificial Sequence: Synthetic oligonucleotide
  Target: LAMA2; (+) strand; PAM type: NNGRRT; PAM sequence: GGGGAT
gagtattaaagtttcatggt

SEQ ID NO: 29191 - DNA, 20 bp, Artificial Sequence
  Description of Artificial Sequence: Synthetic oligonucleotide
  Target: LAMA2; (+) strand; PAM type: NNGRRT; PAM sequence: GAGAAT
gttttaatatcataatatgt

SEQ ID NO: 29192 - DNA, 20 bp, Artificial Sequence
  Description of Artificial Sequence: Synthetic oligonucleotide
  Target: LAMA2; (+) strand; PAM type: NNGRRT; PAM sequence: ATGGAT
gaatataaaagtatttacgt

SEQ ID NO: 29193 - DNA, 20 bp, Artificial Sequence
  Description of Artificial Sequence: Synthetic oligonucleotide
  Target: LAMA2; (+) strand; PAM type: NNGRRT; PAM sequence: TAGAAT
attttattaatgtaattgat

SEQ ID NO: 29194 - DNA, 20 bp, Artificial Sequence
  Description of Artificial Sequence: Synthetic oligonucleotide
  Target: LAMA2; (+) strand; PAM type: NNGRRT; PAM sequence: CAGAAT
tggtatagaaatagcaaaag

SEQ ID NO: 29195 - DNA, 20 bp, Artificial Sequence
  Description of Artificial Sequence: Synthetic oligonucleotide
  Target: LAMA2; (+) strand; PAM type: NNGRRT; PAM sequence: GGGAAT
aagaaaatatggtgatataa

SEQ ID NO: 29196 - DNA, 20 bp, Artificial Sequence
  Description of Artificial Sequence: Synthetic oligonucleotide
  Target: LAMA2; (+) strand; PAM type: NNGRRT; PAM sequence: ATGAAT
aaatatggtgatataaggga

SEQ ID NO: 29197 - DNA, 20 bp, Artificial Sequence
  Description of Artificial Sequence: Synthetic oligonucleotide
  Target: LAMA2; (+) strand; PAM type: NNGRRT; PAM sequence: TAGAGT
agggaatgaatattaatttc

SEQ ID NO: 29198 - DNA, 20 bp, Artificial Sequence
  Description of Artificial Sequence: Synthetic oligonucleotide
  Target: LAMA2; (+) strand; PAM type: NNGRRT; PAM sequence: AAGAAT
cattaaatacgcaaattgaa

SEQ ID NO: 29199 - DNA, 20 bp, Artificial Sequence
  Description of Artificial Sequence: Synthetic oligonucleotide
  Target: LAMA2; (+) strand; PAM type: NNGRRT; PAM sequence: ATGAAT
tatacaaataaagtgttaaa

SEQ ID NO: 29200 - DNA, 20 bp, Artificial Sequence
  Description of Artificial Sequence: Synthetic oligonucleotide
  Target: LAMA2; (+) strand; PAM type: NNGRRT; PAM sequence: TTGGAT
aaagtgttaaaatgaattta

SEQ ID NO: 29201 - DNA, 20 bp, Artificial Sequence
  Description of Artificial Sequence: Synthetic oligonucleotide
  Target: LAMA2; (+) strand; PAM type: NNGRRT; PAM sequence: AGGAAT
atcaataggagcttcccagt

SEQ ID NO: 29202 - DNA, 20 bp, Artificial Sequence
  Description of Artificial Sequence: Synthetic oligonucleotide
  Target: LAMA2; (+) strand; PAM type: NNGRRT; PAM sequence: TAGAAT
tcatcagtacaaataaatta

SEQ ID NO: 29203 - DNA, 20 bp, Artificial Sequence
  Description of Artificial Sequence: Synthetic oligonucleotide
  Target: LAMA2; (+) strand; PAM type: NNGRRT; PAM sequence: CTGAAT
tcccatctatgctttaggga

SEQ ID NO: 29204 - DNA, 20 bp, Artificial Sequence
  Description of Artificial Sequence: Synthetic oligonucleotide
  Target: LAMA2; (+) strand; PAM type: NNGRRT; PAM sequence: TTGGAT
tctatgctttagggactgaa

SEQ ID NO: 29205 - DNA, 20 bp, Artificial Sequence
  Description of Artificial Sequence: Synthetic oligonucleotide
  Target: LAMA2; (+) strand; PAM type: NNGRRT; PAM sequence: ATGGAT
atatggtctgtgccaatctt

SEQ ID NO: 29206 - DNA, 20 bp, Artificial Sequence
  Description of Artificial Sequence: Synthetic oligonucleotide
  Target: LAMA2; (+) strand; PAM type: NNGRRT; PAM sequence: TGGGAT
taatcttgtcatgaaaatct

SEQ ID NO: 29207 - DNA, 20 bp, Artificial Sequence
  Description of Artificial Sequence: Synthetic oligonucleotide
  Target: LAMA2; (+) strand; PAM type: NNGRRT; PAM sequence: ATGAAT
gggcatagtggacactggtg

SEQ ID NO: 29208 - DNA, 20 bp, Artificial Sequence
  Description of Artificial Sequence: Synthetic oligonucleotide
  Target: LAMA2; (+) strand; PAM type: NNGRRT; PAM sequence: ATGAGT
ttgtatatagtagttcagct

SEQ ID NO: 29209 - DNA, 20 bp, Artificial Sequence
  Description of Artificial Sequence: Synthetic oligonucleotide
  Target: LAMA2; (+) strand; PAM type: NNGRRT; PAM sequence: ACGAAT
gttcagctatgagttgatga

SEQ ID NO: 29210 - DNA, 20 bp, Artificial Sequence
  Description of Artificial Sequence: Synthetic oligonucleotide
  Target: LAMA2; (+) strand; PAM type: NNGRRT; PAM sequence: AAGAAT
gttgatgaacgaataatata

SEQ ID NO: 29211 - DNA, 20 bp, Artificial Sequence
  Description of Artificial Sequence: Synthetic oligonucleotide
  Target: LAMA2; (+) strand; PAM type: NNGRRT; PAM sequence: GGGAAT
gatggcttcactttcaagct

SEQ ID NO: 29212 - DNA, 20 bp, Artificial Sequence
  Description of Artificial Sequence: Synthetic oligonucleotide
  Target: LAMA2; (+) strand; PAM type: NNGRRT; PAM sequence: TAGAAT
aatcaaaaaactttaagtgc

SEQ ID NO: 29213 - DNA, 20 bp, Artificial Sequence
  Description of Artificial Sequence: Synthetic oligonucleotide
  Target: LAMA2; (+) strand; PAM type: NNGRRT; PAM sequence: GAGGAT
tgctagaatattcatgtcaa

SEQ ID NO: 29214 - DNA, 20 bp, Artificial Sequence
  Description of Artificial Sequence: Synthetic oligonucleotide
  Target: LAMA2; (+) strand; PAM type: NNGRRT; PAM sequence: AAGAAT
tcatgtcaagaggatcttcc

SEQ ID NO: 29215 - DNA, 20 bp, Artificial Sequence
  Description of Artificial Sequence: Synthetic oligonucleotide
  Target: LAMA2; (+) strand; PAM type: NNGRRT; PAM sequence: AGGAAT
ggatcttccaagaataagcc

SEQ ID NO: 29216 - DNA, 20 bp, Artificial Sequence
  Description of Artificial Sequence: Synthetic oligonucleotide
  Target: LAMA2; (+) strand; PAM type: NNGRRT; PAM sequence: ATGGAT
atgcaattaggggctgactc

SEQ ID NO: 29217 - DNA, 20 bp, Artificial Sequence
  Description of Artificial Sequence: Synthetic oligonucleotide
  Target: LAMA2; (+) strand; PAM type: NNGRRT; PAM sequence: ATGAGT
ctcatggatgacaatggtcg

SEQ ID NO: 29218 - DNA, 20 bp, Artificial Sequence
  Description of Artificial Sequence: Synthetic oligonucleotide
  Target: LAMA2; (+) strand; PAM type: NNGRRT; PAM sequence: AAGAAT
tgtccctggggacacataga

SEQ ID NO: 29219 - DNA, 20 bp, Artificial Sequence
  Description of Artificial Sequence: Synthetic oligonucleotide
  Target: LAMA2; (+) strand; PAM type: NNGRRT; PAM sequence: AGGAAT
taatgacttaccaattccta

SEQ ID NO: 29220 - DNA, 20 bp, Artificial Sequence
  Description of Artificial Sequence: Synthetic oligonucleotide
  Target: LAMA2; (+) strand; PAM type: NNGRRT; PAM sequence: TAGGAT
aattcctaaggaatatctct

SEQ ID NO: 29221 - DNA, 20 bp, Artificial Sequence
  Description of Artificial Sequence: Synthetic oligonucleotide
  Target: LAMA2; (+) strand; PAM type: NNGRRT; PAM sequence: CTGGAT
gactttctgagggcagggcc

SEQ ID NO: 29222 - DNA, 20 bp, Artificial Sequence
  Description of Artificial Sequence: Synthetic oligonucleotide
  Target: LAMA2; (+) strand; PAM type: NNGRRT; PAM sequence: CTGAGT
caggaagtattaaatacagg

SEQ ID NO: 29223 - DNA, 20 bp, Artificial Sequence
  Description of Artificial Sequence: Synthetic oligonucleotide
  Target: LAMA2; (+) strand; PAM type: NNGRRT; PAM sequence: TCGGAT
gtttccgatttggtattttt

SEQ ID NO: 29224 - DNA, 20 bp, Artificial Sequence
  Description of Artificial Sequence: Synthetic oligonucleotide
  Target: LAMA2; (+) strand; PAM type: NNGRRT; PAM sequence: TGGAAT
tttggtattttttcggattt

SEQ ID NO: 29225 - DNA, 20 bp, Artificial Sequence
  Description of Artificial Sequence: Synthetic oligonucleotide
  Target: LAMA2; (+) strand; PAM type: NNGRRT; PAM sequence: CAGAAT
ttcggattttggaatatttg

SEQ ID NO: 29226 - DNA, 20 bp, Artificial Sequence
  Description of Artificial Sequence: Synthetic oligonucleotide
  Target: LAMA2; (+) strand; PAM type: NNGRRT; PAM sequence: TTGGAT
attttgaaacatttaagatt

SEQ ID NO: 29227 - DNA, 20 bp, Artificial Sequence
  Description of Artificial Sequence: Synthetic oligonucleotide
  Target: LAMA2; (+) strand; PAM type: NNGRRT; PAM sequence: AGGGAT
agattttggattttctgatt

SEQ ID NO: 29228 - DNA, 20 bp, Artificial Sequence
  Description of Artificial Sequence: Synthetic oligonucleotide
  Target: LAMA2; (+) strand; PAM type: NNGRRT; PAM sequence: ATGAAT
tttgtcttgaaaaataaata

SEQ ID NO: 29229 - DNA, 20 bp, Artificial Sequence
  Description of Artificial Sequence: Synthetic oligonucleotide
  Target: LAMA2; (+) strand; PAM type: NNGRRT; PAM sequence: ATGAAT
ataaacctccaacttttaaa

SEQ ID NO: 29230 - DNA, 20 bp, Artificial Sequence
  Description of Artificial Sequence: Synthetic oligonucleotide
  Target: LAMA2; (+) strand; PAM type: NNGRRT; PAM sequence: TTGAAT
attctatctatgtccacaag

SEQ ID NO: 29231 - DNA, 20 bp, Artificial Sequence
  Description of Artificial Sequence: Synthetic oligonucleotide
  Target: LAMA2; (+) strand; PAM type: NNGRRT; PAM sequence: AAGGAT
gaatttttaaaccatgcttc

SEQ ID NO: 29232 - DNA, 20 bp, Artificial Sequence
  Description of Artificial Sequence: Synthetic oligonucleotide
  Target: LAMA2; (+) strand; PAM type: NNGRRT; PAM sequence: GTGAGT
accttgcattatagttgatt

SEQ ID NO: 29233 - DNA, 20 bp, Artificial Sequence
  Description of Artificial Sequence: Synthetic oligonucleotide
  Target: LAMA2; (+) strand; PAM type: NNGRRT; PAM sequence: TAGAAT
ttatttatcttcatagtgcc

SEQ ID NO: 29234 - DNA, 20 bp, Artificial Sequence
  Description of Artificial Sequence: Synthetic oligonucleotide
  Target: LAMA2; (+) strand; PAM type: NNGRRT; PAM sequence: TTGAAT
cttcaggttattaaataaaa

SEQ ID NO: 29235 - DNA, 20 bp, Artificial Sequence
  Description of Artificial Sequence: Synthetic oligonucleotide
  Target: LAMA2; (+) strand; PAM type: NNGRRT; PAM sequence: CTGAAT
ttctaattgttgaacttagt

SEQ ID NO: 29236 - DNA, 20 bp, Artificial Sequence
  Description of Artificial Sequence: Synthetic oligonucleotide
  Target: LAMA2; (+) strand; PAM type: NNGRRT; PAM sequence: CAGAAT
gttgaacttagtctgaatct

SEQ ID NO: 29237 - DNA, 20 bp, Artificial Sequence
  Description of Artificial Sequence: Synthetic oligonucleotide
  Target: LAMA2; (+) strand; PAM type: NNGRRT; PAM sequence: TAGAGT
ggcattataagctttcaaat

SEQ ID NO: 29238 - DNA, 20 bp, Artificial Sequence
  Description of Artificial Sequence: Synthetic oligonucleotide
  Target: LAMA2; (+) strand; PAM type: NNGRRT; PAM sequence: CGGGAT
cagctgtactgtgtcctcaa

SEQ ID NO: 29239 - DNA, 20 bp, Artificial Sequence
  Description of Artificial Sequence: Synthetic oligonucleotide
  Target: LAMA2; (+) strand; PAM type: NNGRRT; PAM sequence: GGGGAT
gctctcaacttcagtgcttt

SEQ ID NO: 29240 - DNA, 20 bp, Artificial Sequence
  Description of Artificial Sequence: Synthetic oligonucleotide
  Target: LAMA2; (+) strand; PAM type: NNGRRT; PAM sequence: CTGAGT
aggttcccacatagaagtgg

SEQ ID NO: 29241 - DNA, 20 bp, Artificial Sequence
  Description of Artificial Sequence: Synthetic oligonucleotide
  Target: LAMA2; (+) strand; PAM type: NNGRRT; PAM sequence: ATGAGT
agaagtggctgagtttgtaa

SEQ ID NO: 29242 - DNA, 20 bp, Artificial Sequence
  Description of Artificial Sequence: Synthetic oligonucleotide
  Target: LAMA2; (+) strand; PAM type: NNGRRT; PAM sequence: TTGGAT
atttaaaacaaattattctc

SEQ ID NO: 29243 - DNA, 20 bp, Artificial Sequence
  Description of Artificial Sequence: Synthetic oligonucleotide
  Target: LAMA2; (+) strand; PAM type: NNGRRT; PAM sequence: CTGGGT
atccctatcttctgctcaat

SEQ ID NO: 29244 - DNA, 20 bp, Artificial Sequence
  Description of Artificial Sequence: Synthetic oligonucleotide
  Target: LAMA2; (+) strand; PAM type: NNGRRT; PAM sequence: CAGAAT
agactataaagttagtaaga

SEQ ID NO: 29245 - DNA, 20 bp, Artificial Sequence
  Description of Artificial Sequence: Synthetic oligonucleotide
  Target: LAMA2; (+) strand; PAM type: NNGRRT; PAM sequence: CTGAAT
gtaagacagaatttctacct

SEQ ID NO: 29246 - DNA, 20 bp, Artificial Sequence
  Description of Artificial Sequence: Synthetic oligonucleotide
  Target: LAMA2; (+) strand; PAM type: NNGRRT; PAM sequence: TAGGGT
atacttttttgtggttgtga

SEQ ID NO: 29247 - DNA, 20 bp, Artificial Sequence
  Description of Artificial Sequence: Synthetic oligonucleotide
  Target: LAMA2; (+) strand; PAM type: NNGRRT; PAM sequence: GGGAAT
gagagaagttagttgtccaa

SEQ ID NO: 29248 - DNA, 20 bp, Artificial Sequence
  Description of Artificial Sequence: Synthetic oligonucleotide
  Target: LAMA2; (+) strand; PAM type: NNGRRT; PAM sequence: GGGAAT
agcctcagtattgataataa

SEQ ID NO: 29249 - DNA, 20 bp, Artificial Sequence
  Description of Artificial Sequence: Synthetic oligonucleotide
  Target: LAMA2; (+) strand; PAM type: NNGRRT; PAM sequence: GGGAAT
gtagagaaaatgcgtatgta

SEQ ID NO: 29250 - DNA, 20 bp, Artificial Sequence
  Description of Artificial Sequence: Synthetic oligonucleotide
  Target: LAMA2; (+) strand; PAM type: NNGRRT; PAM sequence: CAGGAT
caaatctgtttcctggaaag

SEQ ID NO: 29251 - DNA, 20 bp, Artificial Sequence
  Description of Artificial Sequence: Synthetic oligonucleotide
  Target: LAMA2; (+) strand; PAM type: NNGRRT; PAM sequence: TAGAAT
gaaagcaggatgccttcctt

SEQ ID NO: 29252 - DNA, 20 bp, Artificial Sequence
  Description of Artificial Sequence: Synthetic oligonucleotide
  Target: LAMA2; (+) strand; PAM type: NNGRRT; PAM sequence: CTGAGT
tatggtcagctttcactggc

SEQ ID NO: 29253 - DNA, 20 bp, Artificial Sequence
  Description of Artificial Sequence: Synthetic oligonucleotide
  Target: LAMA2; (+) strand; PAM type: NNGRRT; PAM sequence: GAGAGT
aaataatttttcagtatact

SEQ ID NO: 29254 - DNA, 20 bp, Artificial Sequence
  Description of Artificial Sequence: Synthetic oligonucleotide
  Target: LAMA2; (+) strand; PAM type: NNGRRT; PAM sequence: TAGGAT
atttttcagtatactgagag

SEQ ID NO: 29255 - DNA, 20 bp, Artificial Sequence
  Description of Artificial Sequence: Synthetic oligonucleotide
  Target: LAMA2; (+) strand; PAM type: NNGRRT; PAM sequence: CAGAAT
accagtctggagagcagtca

SEQ ID NO: 29256 - DNA, 20 bp, Artificial Sequence
  Description of Artificial Sequence: Synthetic oligonucleotide
  Target: LAMA2; (+) strand; PAM type: NNGRRT; PAM sequence: GAGAAT
ctggagagcagtcacagaat

SEQ ID NO: 29257 - DNA, 20 bp, Artificial Sequence
  Description of Artificial Sequence: Synthetic oligonucleotide
  Target: LAMA2; (+) strand; PAM type: NNGRRT; PAM sequence: GAGAGT
atcaacatagtcacttttac

SEQ ID NO: 29258 - DNA, 20 bp, Artificial Sequence
  Description of Artificial Sequence: Synthetic oligonucleotide
  Target: LAMA2; (+) strand; PAM type: NNGRRT; PAM sequence: AAGGAT
ttctcaccagtgtaattaga

SEQ ID NO: 29259 - DNA, 20 bp, Artificial Sequence
  Description of Artificial Sequence: Synthetic oligonucleotide
  Target: LAMA2; (+) strand; PAM type: NNGRRT; PAM sequence: GAGGGT
tatacgttaaatatagttga

SEQ ID NO: 29260 - DNA, 20 bp, Artificial Sequence
  Description of Artificial Sequence: Synthetic oligonucleotide
  Target: LAMA2; (+) strand; PAM type: NNGRRT; PAM sequence: AAGAAT
atagttgagagggtaaaatg

SEQ ID NO: 29261 - DNA, 20 bp, Artificial Sequence
  Description of Artificial Sequence: Synthetic oligonucleotide
  Target: LAMA2; (+) strand; PAM type: NNGRRT; PAM sequence: AAGGAT
ggacgcagctcataatgttg

SEQ ID NO: 29262 - DNA, 20 bp, Artificial Sequence
  Description of Artificial Sequence: Synthetic oligonucleotide
  Target: LAMA2; (+) strand; PAM type: NNGRRT; PAM sequence: GAGGAT
ccggcttcttcaatttgcaa

SEQ ID NO: 29263 - DNA, 20 bp, Artificial Sequence
  Description of Artificial Sequence: Synthetic oligonucleotide
  Target: LAMA2; (+) strand; PAM type: NNGRRT; PAM sequence: ATGAGT
ggataattggaaaggctgcg

SEQ ID NO: 29264 - DNA, 20 bp, Artificial Sequence
  Description of Artificial Sequence: Synthetic oligonucleotide
  Target: LAMA2; (+) strand; PAM type: NNGRRT; PAM sequence: AGGGGT
tgcgatgagtgtttctgttc

SEQ ID NO: 29265 - DNA, 20 bp, Artificial Sequence
  Description of Artificial Sequence: Synthetic oligonucleotide
  Target: LAMA2; (+) strand; PAM type: NNGRRT; PAM sequence: CAGAGT
caggggtttcaaacagatgt

SEQ ID NO: 29266 - DNA, 20 bp, Artificial Sequence
  Description of Artificial Sequence: Synthetic oligonucleotide
  Target: LAMA2; (+) strand; PAM type: NNGRRT; PAM sequence: TGGAAT
aaagttacaggaagaagtaa

SEQ ID NO: 29267 - DNA, 20 bp, Artificial Sequence
  Description of Artificial Sequence: Synthetic oligonucleotide
  Target: LAMA2; (+) strand; PAM type: NNGRRT; PAM sequence: TGGAAT
atttgtaatattgtgtagac

SEQ ID NO: 29268 - DNA, 20 bp, Artificial Sequence
  Description of Artificial Sequence: Synthetic oligonucleotide
  Target: LAMA2; (+) strand; PAM type: NNGRRT; PAM sequence: TAGAAT
ttgtgtagactggaatttct

SEQ ID NO: 29269 - DNA, 20 bp, Artificial Sequence
  Description of Artificial Sequence: Synthetic oligonucleotide
  Target: LAMA2; (+) strand; PAM type: NNGRRT; PAM sequence: AAGGGT
gcaattaaggtttcaactcc

SEQ ID NO: 29270 - DNA, 20 bp, Artificial Sequence
  Description of Artificial Sequence: Synthetic oligonucleotide
  Target: LAMA2; (+) strand; PAM type: NNGRRT; PAM sequence: ATGAAT
agaaaacactacattgtgat

SEQ ID NO: 29271 - DNA, 20 bp, Artificial Sequence
  Description of Artificial Sequence: Synthetic oligonucleotide
  Target: LAMA2; (+) strand; PAM type: NNGRRT; PAM sequence: CTGAGT
atataggcaataccttcatt

SEQ ID NO: 29272 - DNA, 20 bp, Artificial Sequence
  Description of Artificial Sequence: Synthetic oligonucleotide
  Target: LAMA2; (+) strand; PAM type: NNGRRT; PAM sequence: GGGAAT
agaggaaaatgggaccttct

SEQ ID NO: 29273 - DNA, 20 bp, Artificial Sequence
  Description of Artificial Sequence: Synthetic oligonucleotide
  Target: LAMA2; (+) strand; PAM type: NNGRRT; PAM sequence: AAGAGT
cagcctgtgtggctggactt

SEQ ID NO: 29274 - DNA, 20 bp, Artificial Sequence
  Description of Artificial Sequence: Synthetic oligonucleotide
  Target: LAMA2; (+) strand; PAM type: NNGRRT; PAM sequence: CAGAAT
tgtggctggacttaagagtg

SEQ ID NO: 29275 - DNA, 20 bp, Artificial Sequence
  Description of Artificial Sequence: Synthetic oligonucleotide
  Target: LAMA2; (+) strand; PAM type: NNGRRT; PAM sequence: GGGAAT
agagaaagaagtctagacgg

SEQ ID NO: 29276 - DNA, 20 bp, Artificial Sequence
  Description of Artificial Sequence: Synthetic oligonucleotide
  Target: LAMA2; (+) strand; PAM type: NNGRRT; PAM sequence: GAGAAT
agaagtctagacgggggaat

SEQ ID NO: 29277 - DNA, 20 bp, Artificial Sequence
  Description of Artificial Sequence: Synthetic oligonucleotide
  Target: LAMA2; (+) strand; PAM type: NNGRRT; PAM sequence: TAGGGT
gaatgagaatctagaactta

SEQ ID NO: 29278 - DNA, 20 bp, Artificial Sequence
  Description of Artificial Sequence: Synthetic oligonucleotide
  Target: LAMA2; (+) strand; PAM type: NNGRRT; PAM sequence: TTGAAT
agaatctagaacttataggg

SEQ ID NO: 29279 - DNA, 20 bp, Artificial Sequence
  Description of Artificial Sequence: Synthetic oligonucleotide
  Target: LAMA2; (+) strand; PAM type: NNGRRT; PAM sequence: AAGAAT
cttatagggttgaatatact

SEQ ID NO: 29280 - DNA, 20 bp, Artificial Sequence
  Description of Artificial Sequence: Synthetic oligonucleotide
  Target: LAMA2; (+) strand; PAM type: NNGRRT; PAM sequence: TGGAGT
agaatttgagatattttact

SEQ ID NO: 29281 - DNA, 20 bp, Artificial Sequence
  Description of Artificial Sequence: Synthetic oligonucleotide
  Target: LAMA2; (+) strand; PAM type: NNGRRT; PAM sequence: CAGAGT
aagctaaagactgacattat

SEQ ID NO: 29282 - DNA, 20 bp, Artificial Sequence
  Description of Artificial Sequence: Synthetic oligonucleotide
  Target: LAMA2; (+) strand; PAM type: NNGRRT; PAM sequence: AAGAAT
tgctttcagagcagacttca

SEQ ID NO: 29283 - DNA, 20 bp, Artificial Sequence
  Description of Artificial Sequence: Synthetic oligonucleotide
  Target: LAMA2; (+) strand; PAM type: NNGRRT; PAM sequence: CAGAAT
atcatcagatgctagagaca

SEQ ID NO: 29284 - DNA, 20 bp, Artificial Sequence
  Description of Artificial Sequence: Synthetic oligonucleotide
  Target: LAMA2; (+) strand; PAM type: NNGRRT; PAM sequence: AAGGGT
caactgtcttacaatgcctc

SEQ ID NO: 29285 - DNA, 20 bp, Artificial Sequence
  Description of Artificial Sequence: Synthetic oligonucleotide
  Target: LAMA2; (+) strand; PAM type: NNGRRT; PAM sequence: AGGAAT
ttagaaagggaagaaatgca

SEQ ID NO: 29286 - DNA, 20 bp, Artificial Sequence
  Description of Artificial Sequence: Synthetic oligonucleotide
  Target: LAMA2; (+) strand; PAM type: NNGRRT; PAM sequence: GGGAAT
tctatttctcatttaactaa

SEQ ID NO: 29287 - DNA, 20 bp, Artificial Sequence
  Description of Artificial Sequence: Synthetic oligonucleotide
  Target: LAMA2; (+) strand; PAM type: NNGRRT; PAM sequence: TGGGAT
ttgcagtgattccacagctt

SEQ ID NO: 29288 - DNA, 20 bp, Artificial Sequence
  Description of Artificial Sequence: Synthetic oligonucleotide
  Target: LAMA2; (+) strand; PAM type: NNGRRT; PAM sequence: CAGAGT
ttccacagctttgggataag

SEQ ID NO: 29289 - DNA, 20 bp, Artificial Sequence
  Description of Artificial Sequence: Synthetic oligonucleotide
  Target: LAMA2; (+) strand; PAM type: NNGRRT; PAM sequence: TAGAGT
taaaaaatatttcagccaca

SEQ ID NO: 29290 - DNA, 20 bp, Artificial Sequence
  Description of Artificial Sequence: Synthetic oligonucleotide
  Target: LAMA2; (+) strand; PAM type: NNGRRT; PAM sequence: TAGGAT
agtgttttgtcctgactagg

SEQ ID NO: 29291 - DNA, 20 bp, Artificial Sequence
  Description of Artificial Sequence: Synthetic oligonucleotide
  Target: LAMA2; (+) strand; PAM type: NNGRRT; PAM sequence: AGGGAT
gttccttccatttctgggcc

SEQ ID NO: 29292 - DNA, 20 bp, Artificial Sequence
  Description of Artificial Sequence: Synthetic oligonucleotide
  Target: LAMA2; (+) strand; PAM type: NNGRRT; PAM sequence: AGGAAT
gcacttctgaccctatctga

SEQ ID NO: 29293 - DNA, 20 bp, Artificial Sequence
  Description of Artificial Sequence: Synthetic oligonucleotide
  Target: LAMA2; (+) strand; PAM type: NNGRRT; PAM sequence: GTGGGT
ttgtcatagcaccaaggctg

SEQ ID NO: 29294 - DNA, 20 bp, Artificial Sequence
  Description of Artificial Sequence: Synthetic oligonucleotide
  Target: LAMA2; (+) strand; PAM type: NNGRRT; PAM sequence: AGGGGT
tagaaattttaaaaagtggg

SEQ ID NO: 29295 - DNA, 20 bp, Artificial Sequence
  Description of Artificial Sequence: Synthetic oligonucleotide
  Target: LAMA2; (+) strand; PAM type: NNGRRT; PAM sequence: CTGAAT
aagtgggaggggtggaaata

SEQ ID NO: 29296 - DNA, 20 bp, Artificial Sequence
  Description of Artificial Sequence: Synthetic oligonucleotide
  Target: LAMA2; (+) strand; PAM type: NNGRRT; PAM sequence: TGGAGT
aagcaacaataaactactag

SEQ ID NO: 29297 - DNA, 20 bp, Artificial Sequence
  Description of Artificial Sequence: Synthetic oligonucleotide
  Target: LAMA2; (+) strand; PAM type: NNGRRT; PAM sequence: TTGAGT
gttataaccattgtatgact

SEQ ID NO: 29298 - DNA, 20 bp, Artificial Sequence
  Description of Artificial Sequence: Synthetic oligonucleotide
  Target: LAMA2; (+) strand; PAM type: NNGRRT; PAM sequence: GTGAAT
taaccattgtatgactttga

SEQ ID NO: 29299 - DNA, 20 bp, Artificial Sequence
  Description of Artificial Sequence: Synthetic oligonucleotide
  Target: LAMA2; (+) strand; PAM type: NNGRRT; PAM sequence: TAGAAT
tcaatgaaaacagattatta

SEQ ID NO: 29300 - DNA, 20 bp, Artificial Sequence
  Description of Artificial Sequence: Synthetic oligonucleotide
  Target: LAMA2; (+) strand; PAM type: NNGRRT; PAM sequence: GTGAGT
aataaacaatggaagcctat

SEQ ID NO: 29301 - DNA, 20 bp, Artificial Sequence
  Description of Artificial Sequence: Synthetic oligonucleotide
  Target: LAMA2; (+) strand; PAM type: NNGRRT; PAM sequence: ATGAGT
ttttctctaagatacaagat

SEQ ID NO: 29302 - DNA, 20 bp, Artificial Sequence
  Description of Artificial Sequence: Synthetic oligonucleotide
  Target: LAMA2; (+) strand; PAM type: NNGRRT; PAM sequence: TCGAGT
actgaccttcctggccgcat

SEQ ID NO: 29303 - DNA, 20 bp, Artificial Sequence
  Description of Artificial Sequence: Synthetic oligonucleotide
  Target: LAMA2; (+) strand; PAM type: NNGRRT; PAM sequence: GAGAAT
tgctttaactgactgatcgt

SEQ ID NO: 29304 - DNA, 20 bp, Artificial Sequence
  Description of Artificial Sequence: Synthetic oligonucleotide
  Target: LAMA2; (+) strand; PAM type: NNGRRT; PAM sequence: ATGGGT
ttaactgactgatcgtgaga

SEQ ID NO: 29305 - DNA, 20 bp, Artificial Sequence
  Description of Artificial Sequence: Synthetic oligonucleotide
  Target: LAMA2; (+) strand; PAM type: NNGRRT; PAM sequence: CTGAAT
aagacaaaatcaaatacaca

SEQ ID NO: 29306 - DNA, 20 bp, Artificial Sequence
  Description of Artificial Sequence: Synthetic oligonucleotide
  Target: LAMA2; (+) strand; PAM type: NNGRRT; PAM sequence: TTGGAT
aaaatcaaatacacactgaa

SEQ ID NO: 29307 - DNA, 20 bp, Artificial Sequence
  Description of Artificial Sequence: Synthetic oligonucleotide
  Target: LAMA2; (+) strand; PAM type: NNGRRT; PAM sequence: TTGAGT
ccagaaccagctaaatcaca

SEQ ID NO: 29308 - DNA, 20 bp, Artificial Sequence
  Description of Artificial Sequence: Synthetic oligonucleotide
  Target: LAMA2; (+) strand; PAM type: NNGRRT; PAM sequence: TTGAAT
tgatgttctatgtaaacttt

SEQ ID NO: 29309 - DNA, 20 bp, Artificial Sequence
  Description of Artificial Sequence: Synthetic oligonucleotide
  Target: LAMA2; (+) strand; PAM type: NNGRRT; PAM sequence: TGGAGT
atgtgaaaagagctgttttc

SEQ ID NO: 29310 - DNA, 20 bp, Artificial Sequence
  Description of Artificial Sequence: Synthetic oligonucleotide
  Target: LAMA2; (+) strand; PAM type: NNGRRT; PAM sequence: TGGGAT
ttttctggagttgtctgtgg

SEQ ID NO: 29311 - DNA, 20 bp, Artificial Sequence
  Description of Artificial Sequence: Synthetic oligonucleotide
  Target: LAMA2; (+) strand; PAM type: NNGRRT; PAM sequence: ATGAAT
tacttttccttctacctgat

SEQ ID NO: 29312 - DNA, 20 bp, Artificial Sequence
  Description of Artificial Sequence: Synthetic oligonucleotide
  Target: LAMA2; (+) strand; PAM type: NNGRRT; PAM sequence: GTGGAT
caggcttatttttttctgtt

SEQ ID NO: 29313 - DNA, 20 bp, Artificial Sequence
  Description of Artificial Sequence: Synthetic oligonucleotide
  Target: LAMA2; (+) strand; PAM type: NNGRRT; PAM sequence: TGGGGT
ttctatctagatagatatcc

SEQ ID NO: 29314 - DNA, 20 bp, Artificial Sequence
  Description of Artificial Sequence: Synthetic oligonucleotide
  Target: LAMA2; (+) strand; PAM type: NNGRRT; PAM sequence: TAGAAT
tagatagatatcctggggtt

SEQ ID NO: 29315 - DNA, 20 bp, Artificial Sequence
  Description of Artificial Sequence: Synthetic oligonucleotide
  Target: LAMA2; (+) strand; PAM type: NNGRRT; PAM sequence: GTGAAT
ttggtgacttatttataaac

SEQ ID NO: 29316 - DNA, 20 bp, Artificial Sequence
  Description of Artificial Sequence: Synthetic oligonucleotide
  Target: LAMA2; (+) strand; PAM type: NNGRRT; PAM sequence: GTGAGT
gtggttttcttgcatgacat

SEQ ID NO: 29317 - DNA, 20 bp, Artificial Sequence
  Description of Artificial Sequence: Synthetic oligonucleotide
  Target: LAMA2; (+) strand; PAM type: NNGRRT; PAM sequence: GTGAAT
agtatctcatatgctactca

SEQ ID NO: 29318 - DNA, 20 bp, Artificial Sequence
  Description of Artificial Sequence: Synthetic oligonucleotide
  Target: LAMA2; (+) strand; PAM type: NNGRRT; PAM sequence: CTGAAT
ttcttatatttaacagaact

SEQ ID NO: 29319 - DNA, 20 bp, Artificial Sequence
  Description of Artificial Sequence: Synthetic oligonucleotide
  Target: LAMA2; (+) strand; PAM type: NNGRRT; PAM sequence: CAGAGT
tgaacatgtattttaagaga

SEQ ID NO: 29320 - DNA, 20 bp, Artificial Sequence
  Description of Artificial Sequence: Synthetic oligonucleotide
  Target: LAMA2; (+) strand; PAM type: NNGRRT; PAM sequence: TCGAAT
caatagctgtaaaataaaaa

SEQ ID NO: 29321 - DNA, 20 bp, Artificial Sequence
  Description of Artificial Sequence: Synthetic oligonucleotide
  Target: LAMA2; (+) strand; PAM type: NNGRRT; PAM sequence: TTGAAT
aacaaaacagcacataagac

SEQ ID NO: 29322 - DNA, 20 bp, Artificial Sequence
  Description of Artificial Sequence: Synthetic oligonucleotide
  Target: LAMA2; (+) strand; PAM type: NNGRRT; PAM sequence: TTGGAT
agaagagccttaggtcaaaa

SEQ ID NO: 29323 - DNA, 20 bp, Artificial Sequence
  Description of Artificial Sequence: Synthetic oligonucleotide
  Target: LAMA2; (+) strand; PAM type: NNGRRT; PAM sequence: ATGAAT
gagccttaggtcaaaattgg

SEQ ID NO: 29324 - DNA, 20 bp, Artificial Sequence
  Description of Artificial Sequence: Synthetic oligonucleotide
  Target: LAMA2; (+) strand; PAM type: NNGRRT; PAM sequence: TGGAAT
acagaaggaaagcaagcaaa

SEQ ID NO: 29325 - DNA, 20 bp, Artificial Sequence
  Description of Artificial Sequence: Synthetic oligonucleotide
  Target: LAMA2; (+) strand; PAM type: NNGRRT; PAM sequence: TAGAAT
caagcaaatggaatattcgg

SEQ ID NO: 29326 - DNA, 20 bp, Artificial Sequence
  Description of Artificial Sequence: Synthetic oligonucleotide
  Target: LAMA2; (+) strand; PAM type: NNGRRT; PAM sequence: AAGAAT
tattcggtagaatcagaaca

SEQ ID NO: 29327 - DNA, 20 bp, Artificial Sequence
  Description of Artificial Sequence: Synthetic oligonucleotide
  Target: LAMA2; (+) strand; PAM type: NNGRRT; PAM sequence: CAGGGT
agtgaacaaaataacattaa

SEQ ID NO: 29328 - DNA, 20 bp, Artificial Sequence
  Description of Artificial Sequence: Synthetic oligonucleotide
  Target: LAMA2; (+) strand; PAM type: NNGRRT; PAM sequence: TTGAAT
taacagggtgtgcaaattgt

SEQ ID NO: 29329 - DNA, 20 bp, Artificial Sequence
  Description of Artificial Sequence: Synthetic oligonucleotide
  Target: LAMA2; (+) strand; PAM type: NNGRRT; PAM sequence: ATGAAT
ttactgtcaggcatctcagt

SEQ ID NO: 29330 - DNA, 20 bp, Artificial Sequence
  Description of Artificial Sequence: Synthetic oligonucleotide
  Target: LAMA2; (+) strand; PAM type: NNGRRT; PAM sequence: TCGAAT
tctttaccagtaattgctgt

SEQ ID NO: 29331 - DNA, 20 bp, Artificial Sequence
  Description of Artificial Sequence: Synthetic oligonucleotide
  Target: LAMA2; (+) strand; PAM type: NNGRRT; PAM sequence: CAGAAT
gttcgaatcagaaccattgc

SEQ ID NO: 29332 - DNA, 20 bp, Artificial Sequence
  Description of Artificial Sequence: Synthetic oligonucleotide
  Target: LAMA2; (+) strand; PAM type: NNGRRT; PAM sequence: TTGAAT
caagtgcatctgcttaaata

SEQ ID NO: 29333 - DNA, 20 bp, Artificial Sequence
  Description of Artificial Sequence: Synthetic oligonucleotide
  Target: LAMA2; (+) strand; PAM type: NNGRRT; PAM sequence: AGGAGT
ttttatttacatccatgacc

SEQ ID NO: 29334 - DNA, 20 bp, Artificial Sequence
  Description of Artificial Sequence: Synthetic oligonucleotide
  Target: LAMA2; (+) strand; PAM type: NNGRRT; PAM sequence: ATGGAT
tgggacacatttttgctaac

SEQ ID NO: 29335 - DNA, 20 bp, Artificial Sequence
  Description of Artificial Sequence: Synthetic oligonucleotide
  Target: LAMA2; (+) strand; PAM type: NNGRRT; PAM sequence: AAGAAT
gcctggttgtaataaaactc

SEQ ID NO: 29336 - DNA, 20 bp, Artificial Sequence
  Description of Artificial Sequence: Synthetic oligonucleotide
  Target: LAMA2; (+) strand; PAM type: NNGRRT; PAM sequence: AGGAGT
aatactagccaatttagcaa

SEQ ID NO: 29337 - DNA, 20 bp, Artificial Sequence
  Description of Artificial Sequence: Synthetic oligonucleotide
  Target: LAMA2; (+) strand; PAM type: NNGRRT; PAM sequence: TGGAAT
ttttcacatttttactgttt

SEQ ID NO: 29338 - DNA, 20 bp, Artificial Sequence
  Description of Artificial Sequence: Synthetic oligonucleotide
  Target: LAMA2; (+) strand; PAM type: NNGRRT; PAM sequence: GTGGAT
aagtgattataagtgtatgt

SEQ ID NO: 29339 - DNA, 20 bp, Artificial Sequence
  Description of Artificial Sequence: Synthetic oligonucleotide
  Target: LAMA2; (+) strand; PAM type: NNGRRT; PAM sequence: ATGGAT
tataagtgtatgtgtggata

SEQ ID NO: 29340 - DNA, 20 bp, Artificial Sequence
  Description of Artificial Sequence: Synthetic oligonucleotide
  Target: LAMA2; (+) strand; PAM type: NNGRRT; PAM sequence: AGGAGT
aaattcccacagtctcagct

SEQ ID NO: 29341 - DNA, 20 bp, Artificial Sequence
  Description of Artificial Sequence: Synthetic oligonucleotide
  Target: LAMA2; (+) strand; PAM type: NNGRRT; PAM sequence: GTGAAT
attttttcccctatgtacca

SEQ ID NO: 29342 - DNA, 20 bp, Artificial Sequence
  Description of Artificial Sequence: Synthetic oligonucleotide
  Target: LAMA2; (+) strand; PAM type: NNGRRT; PAM sequence: CAGAAT
tgaatatttggcacaactgg

SEQ ID NO: 29343 - DNA, 20 bp, Artificial Sequence
  Description of Artificial Sequence: Synthetic oligonucleotide
  Target: LAMA2; (+) strand; PAM type: NNGRRT; PAM sequence: GAGAAT
cctcgttcttgatagtcaaa

SEQ ID NO: 29344 - DNA, 20 bp, Artificial Sequence
  Description of Artificial Sequence: Synthetic oligonucleotide
  Target: LAMA2; (+) strand; PAM type: NNGRRT; PAM sequence: AAGAAT
gtggaaagagctagaggaca

SEQ ID NO: 29345 - DNA, 20 bp, Artificial Sequence
  Description of Artificial Sequence: Synthetic oligonucleotide
  Target: LAMA2; (+) strand; PAM type: NNGRRT; PAM sequence: GGGAAT
cagctattcagaaacagttt

SEQ ID NO: 29346 - DNA, 20 bp, Artificial Sequence
  Description of Artificial Sequence: Synthetic oligonucleotide
  Target: LAMA2; (+) strand; PAM type: NNGRRT; PAM sequence: CAGAGT
cagaaacagtttgggaattt

SEQ ID NO: 29347 - DNA, 20 bp, Artificial Sequence
  Description of Artificial Sequence: Synthetic oligonucleotide
  Target: LAMA2; (+) strand; PAM type: NNGRRT; PAM sequence: TGGGAT
cagtttgggaatttcagagt

SEQ ID NO: 29348 - DNA, 20 bp, Artificial Sequence
  Description of Artificial Sequence: Synthetic oligonucleotide
  Target: LAMA2; (+) strand; PAM type: NNGRRT; PAM sequence: CTGAAT
taaggtttgaaattctctct

SEQ ID NO: 29349 - DNA, 20 bp, Artificial Sequence
  Description of Artificial Sequence: Synthetic oligonucleotide
  Target: LAMA2; (+) strand; PAM type: NNGRRT; PAM sequence: AAGAAT
aatttgttcatatagttgcc

SEQ ID NO: 29350 - DNA, 20 bp, Artificial Sequence
  Description of Artificial Sequence: Synthetic oligonucleotide
  Target: LAMA2; (+) strand; PAM type: NNGRRT; PAM sequence: GAGAGT
tagtttaagatgcacattag

SEQ ID NO: 29351 - DNA, 20 bp, Artificial Sequence
  Description of Artificial Sequence: Synthetic oligonucleotide
  Target: LAMA2; (+) strand; PAM type: NNGRRT; PAM sequence: ACGGAT
ttgactttccattctacttc

SEQ ID NO: 29352 - DNA, 20 bp, Artificial Sequence
  Description of Artificial Sequence: Synthetic oligonucleotide
  Target: LAMA2; (+) strand; PAM type: NNGRRT; PAM sequence: CAGGGT
gatatttgagatttgtagga

SEQ ID NO: 29353 - DNA, 20 bp, Artificial Sequence
  Description of Artificial Sequence: Synthetic oligonucleotide
  Target: LAMA2; (+) strand; PAM type: NNGRRT; PAM sequence: TTGAGT
aggttgctcagaaatgccca

SEQ ID NO: 29354 - DNA, 20 bp, Artificial Sequence
  Description of Artificial Sequence: Synthetic oligonucleotide
  Target: LAMA2; (+) strand; PAM type: NNGRRT; PAM sequence: TTGGAT
gctcagaaatgcccattgag

SEQ ID NO: 29355 - DNA, 20 bp, Artificial Sequence
  Description of Artificial Sequence: Synthetic oligonucleotide
  Target: LAMA2; (+) strand; PAM type: NNGRRT; PAM sequence: GGGAGT
gcccattgagttggatttgt

SEQ ID NO: 29356 - DNA, 20 bp, Artificial Sequence
  Description of Artificial Sequence: Synthetic oligonucleotide
  Target: LAMA2; (+) strand; PAM type: NNGRRT; PAM sequence: ATGAAT
ggatttgtgggagttgaaag

SEQ ID NO: 29357 - DNA, 20 bp, Artificial Sequence
  Description of Artificial Sequence: Synthetic oligonucleotide
  Target: LAMA2; (+) strand; PAM type: NNGRRT; PAM sequence: TGGAGT
tcctcaaaattattcagaag

SEQ ID NO: 29358 - DNA, 20 bp, Artificial Sequence
  Description of Artificial Sequence: Synthetic oligonucleotide
  Target: LAMA2; (+) strand; PAM type: NNGRRT; PAM sequence: TTGGAT
aacttcctcctatttaaatc

SEQ ID NO: 29359 - DNA, 20 bp, Artificial Sequence
  Description of Artificial Sequence: Synthetic oligonucleotide
  Target: LAMA2; (+) strand; PAM type: NNGRRT; PAM sequence: ATGGGT
ctatttaaatcttggattaa

SEQ ID NO: 29360 - DNA, 20 bp, Artificial Sequence
  Description of Artificial Sequence: Synthetic oligonucleotide
  Target: LAMA2; (+) strand; PAM type: NNGRRT; PAM sequence: AAGAAT
agaagatcattatgcaagtg

SEQ ID NO: 29361 - DNA, 20 bp, Artificial Sequence
  Description of Artificial Sequence: Synthetic oligonucleotide
  Target: LAMA2; (+) strand; PAM type: NNGRRT; PAM sequence: TAGGAT
ggtatggctataaaagtaaa

SEQ ID NO: 29362 - DNA, 20 bp, Artificial Sequence
  Description of Artificial Sequence: Synthetic oligonucleotide
  Target: LAMA2; (+) strand; PAM type: NNGRRT; PAM sequence: TGGAGT
catcaagactaacttggcaa

SEQ ID NO: 29363 - DNA, 20 bp, Artificial Sequence
  Description of Artificial Sequence: Synthetic oligonucleotide
  Target: LAMA2; (+) strand; PAM type: NNGRRT; PAM sequence: TAGAAT
caggaagaaggtttgctgcc

SEQ ID NO: 29364 - DNA, 20 bp, Artificial Sequence
  Description of Artificial Sequence: Synthetic oligonucleotide
  Target: LAMA2; (+) strand; PAM type: NNGRRT; PAM sequence: CTGAAT
ggtttgctgcctagaataaa

SEQ ID NO: 29365 - DNA, 20 bp, Artificial Sequence
  Description of Artificial Sequence: Synthetic oligonucleotide
  Target: LAMA2; (+) strand; PAM type: NNGRRT; PAM sequence: ATGAAT
tgctgcctagaataaactga

SEQ ID NO: 29366 - DNA, 20 bp, Artificial Sequence
  Description of Artificial Sequence: Synthetic oligonucleotide
  Target: LAMA2; (+) strand; PAM type: NNGRRT; PAM sequence: GGGAAT
cggacccccttcttggccaa

SEQ ID NO: 29367 - DNA, 20 bp, Artificial Sequence
  Description of Artificial Sequence: Synthetic oligonucleotide
  Target: LAMA2; (+) strand; PAM type: NNGRRT; PAM sequence: TGGAGT
tcattataccctgctccctt

SEQ ID NO: 29368 - DNA, 20 bp, Artificial Sequence
  Description of Artificial Sequence: Synthetic oligonucleotide
  Target: LAMA2; (+) strand; PAM type: NNGRRT; PAM sequence: GAGAAT
ggggaaatttgcattctata

SEQ ID NO: 29369 - DNA, 20 bp, Artificial Sequence
  Description of Artificial Sequence: Synthetic oligonucleotide
  Target: LAMA2; (+) strand; PAM type: NNGRRT; PAM sequence: GAGAGT
cccttactaagtcttttctg

SEQ ID NO: 29370 - DNA, 20 bp, Artificial Sequence
  Description of Artificial Sequence: Synthetic oligonucleotide
  Target: LAMA2; (+) strand; PAM type: NNGRRT; PAM sequence: CAGAAT
gctgacttcaactgttcagg

SEQ ID NO: 29371 - DNA, 20 bp, Artificial Sequence
  Description of Artificial Sequence: Synthetic oligonucleotide
  Target: LAMA2; (+) strand; PAM type: NNGRRT; PAM sequence: TTGAAT
aattgccagtcagaaaatct

SEQ ID NO: 29372 - DNA, 20 bp, Artificial Sequence
  Description of Artificial Sequence: Synthetic oligonucleotide
  Target: LAMA2; (+) strand; PAM type: NNGRRT; PAM sequence: AAGGAT
tttttggtttacaaattgtt

SEQ ID NO: 29373 - DNA, 20 bp, Artificial Sequence
  Description of Artificial Sequence: Synthetic oligonucleotide
  Target: LAMA2; (+) strand; PAM type: NNGRRT; PAM sequence: TAGAAT
tttatttcccatagctatga

SEQ ID NO: 29374 - DNA, 20 bp, Artificial Sequence
  Description of Artificial Sequence: Synthetic oligonucleotide
  Target: LAMA2; (+) strand; PAM type: NNGRRT; PAM sequence: CTGAAT
ttttgtttataattcgtcaa

SEQ ID NO: 29375 - DNA, 20 bp, Artificial Sequence
  Description of Artificial Sequence: Synthetic oligonucleotide
  Target: LAMA2; (+) strand; PAM type: NNGRRT; PAM sequence: ATGAAT
gtttataattcgtcaactga

SEQ ID NO: 29376 - DNA, 20 bp, Artificial Sequence
  Description of Artificial Sequence: Synthetic oligonucleotide
  Target: LAMA2; (+) strand; PAM type: NNGRRT; PAM sequence: GAGAAT
actgaatgaatactagatag

SEQ ID NO: 29377 - DNA, 20 bp, Artificial Sequence
  Description of Artificial Sequence: Synthetic oligonucleotide
  Target: LAMA2; (+) strand; PAM type: NNGRRT; PAM sequence: GTGAGT
tacttaacagtaatttcaat

SEQ ID NO: 29378 - DNA, 20 bp, Artificial Sequence
  Description of Artificial Sequence: Synthetic oligonucleotide
  Target: LAMA2; (+) strand; PAM type: NNGRRT; PAM sequence: AGGAAT
taatctagggctacattggc

SEQ ID NO: 29379 - DNA, 20 bp, Artificial Sequence
  Description of Artificial Sequence: Synthetic oligonucleotide
  Target: LAMA2; (+) strand; PAM type: NNGRRT; PAM sequence: GTGAAT
tattaatatttagcttactt

SEQ ID NO: 29380 - DNA, 20 bp, Artificial Sequence
  Description of Artificial Sequence: Synthetic oligonucleotide
  Target: LAMA2; (+) strand; PAM type: NNGRRT; PAM sequence: CAGGAT
aaattaggaagaaatagagc

SEQ ID NO: 29381 - DNA, 20 bp, Artificial Sequence
  Description of Artificial Sequence: Synthetic oligonucleotide
  Target: LAMA2; (+) strand; PAM type: NNGRRT; PAM sequence: TGGAAT
tcttgcaaggcattgatctt

SEQ ID NO: 29382 - DNA, 20 bp, Artificial Sequence
  Description of Artificial Sequence: Synthetic oligonucleotide
  Target: LAMA2; (+) strand; PAM type: NNGRRT; PAM sequence: ATGAAT
agaaagggaacgacaaagat

SEQ ID NO: 29383 - DNA, 20 bp, Artificial Sequence
  Description of Artificial Sequence: Synthetic oligonucleotide
  Target: LAMA2; (+) strand; PAM type: NNGRRT; PAM sequence: ATGAAT
atgaatttataaaaatacaa

SEQ ID NO: 29384 - DNA, 20 bp, Artificial Sequence
  Description of Artificial Sequence: Synthetic oligonucleotide
  Target: LAMA2; (+) strand; PAM type: NNGRRT; PAM sequence: ATGAAT
taaaaatacaaatgaatgag

SEQ ID NO: 29385 - DNA, 20 bp, Artificial Sequence
  Description of Artificial Sequence: Synthetic oligonucleotide
  Target: LAMA2; (+) strand; PAM type: NNGRRT; PAM sequence: GTGGGT
caagattaatcaagcaaaac

SEQ ID NO: 29386 - DNA, 20 bp, Artificial Sequence
  Description of Artificial Sequence: Synthetic oligonucleotide
  Target: LAMA2; (+) strand; PAM type: NNGRRT; PAM sequence: AAGAGT
tatcagaaaataaacaaatt

SEQ ID NO: 29387 - DNA, 20 bp, Artificial Sequence
  Description of Artificial Sequence: Synthetic oligonucleotide
  Target: LAMA2; (+) strand; PAM type: NNGRRT; PAM sequence: AAGAAT
tatgaaaatttacacacaat

SEQ ID NO: 29388 - DNA, 20 bp, Artificial Sequence
  Description of Artificial Sequence: Synthetic oligonucleotide
  Target: LAMA2; (+) strand; PAM type: NNGRRT; PAM sequence: AGGAAT
taagaatacaatttagaaaa

SEQ ID NO: 29389 - DNA, 20 bp, Artificial Sequence
  Description of Artificial Sequence: Synthetic oligonucleotide
  Target: LAMA2; (+) strand; PAM type: NNGRRT; PAM sequence: TTGAAT
tcagataaacattaaagtaa

SEQ ID NO: 29390 - DNA, 20 bp, Artificial Sequence
  Description of Artificial Sequence: Synthetic oligonucleotide
  Target: LAMA2; (+) strand; PAM type: NNGRRT; PAM sequence: GAGAAT
aaaattatacaaactttcca

SEQ ID NO: 29391 - DNA, 20 bp, Artificial Sequence
  Description of Artificial Sequence: Synthetic oligonucleotide
  Target: LAMA2; (+) strand; PAM type: NNGRRT; PAM sequence: GTGGAT
agtcaggctaaattggccaa

SEQ ID NO: 29392 - DNA, 20 bp, Artificial Sequence
  Description of Artificial Sequence: Synthetic oligonucleotide
  Target: LAMA2; (+) strand; PAM type: NNGRRT; PAM sequence: ATGGGT
caatagacacagaaaaagaa

SEQ ID NO: 29393 - DNA, 20 bp, Artificial Sequence
  Description of Artificial Sequence: Synthetic oligonucleotide
  Target: LAMA2; (+) strand; PAM type: NNGRRT; PAM sequence: TAGAAT
gtctgaaaaattttgaaaac

SEQ ID NO: 29394 - DNA, 20 bp, Artificial Sequence
  Description of Artificial Sequence: Synthetic oligonucleotide
  Target: LAMA2; (+) strand; PAM type: NNGRRT; PAM sequence: AGGGAT
agataggaaataaaatatat

SEQ ID NO: 29395 - DNA, 20 bp, Artificial Sequence
  Description of Artificial Sequence: Synthetic oligonucleotide
  Target: LAMA2; (+) strand; PAM type: NNGRRT; PAM sequence: GAGAAT
ttatctgcttgtaaaatcaa

SEQ ID NO: 29396 - DNA, 20 bp, Artificial Sequence
  Description of Artificial Sequence: Synthetic oligonucleotide
  Target: LAMA2; (+) strand; PAM type: NNGRRT; PAM sequence: GTGAGT
tacagacaaattcttaatca

SEQ ID NO: 29397 - DNA, 20 bp, Artificial Sequence
  Description of Artificial Sequence: Synthetic oligonucleotide
  Target: LAMA2; (+) strand; PAM type: NNGRRT; PAM sequence: AAGGAT
caatacatataaatagtacc

SEQ ID NO: 29398 - DNA, 20 bp, Artificial Sequence
  Description of Artificial Sequence: Synthetic oligonucleotide
  Target: LAMA2; (+) strand; PAM type: NNGRRT; PAM sequence: AAGAAT
gtagggaaaagccaatggcc

SEQ ID NO: 29399 - DNA, 20 bp, Artificial Sequence
  Description of Artificial Sequence: Synthetic oligonucleotide
  Target: LAMA2; (+) strand; PAM type: NNGRRT; PAM sequence: TGGGGT
taatcaaaagaaattataga

SEQ ID NO: 29400 - DNA, 20 bp, Artificial Sequence
  Description of Artificial Sequence: Synthetic oligonucleotide
  Target: LAMA2; (+) strand; PAM type: NNGRRT; PAM sequence: GTGGAT
actttgggaggccaaggtag

SEQ ID NO: 29401 - DNA, 20 bp, Artificial Sequence
  Description of Artificial Sequence: Synthetic oligonucleotide
  Target: LAMA2; (+) strand; PAM type: NNGRRT; PAM sequence: GAGAAT
tactcgggaggctgatgcaa

SEQ ID NO: 29402 - DNA, 20 bp, Artificial Sequence
  Description of Artificial Sequence: Synthetic oligonucleotide
  Target: LAMA2; (+) strand; PAM type: NNGRRT; PAM sequence: TTGGGT
gaggctgcagtgagccaaga

SEQ ID NO: 29403 - DNA, 20 bp, Artificial Sequence
  Description of Artificial Sequence: Synthetic oligonucleotide
  Target: LAMA2; (+) strand; PAM type: NNGRRT; PAM sequence: GTGAGT
atatgcatatatgtatatat

SEQ ID NO: 29404 - DNA, 20 bp, Artificial Sequence
  Description of Artificial Sequence: Synthetic oligonucleotide
  Target: LAMA2; (+) strand; PAM type: NNGRRT; PAM sequence: AGGGAT
agaagtggggctttttggaa

SEQ ID NO: 29405 - DNA, 20 bp, Artificial Sequence
  Description of Artificial Sequence: Synthetic oligonucleotide
  Target: LAMA2; (+) strand; PAM type: NNGRRT; PAM sequence: GAGGGT
ttggaaagggattaggtcat

SEQ ID NO: 29406 - DNA, 20 bp, Artificial Sequence
  Description of Artificial Sequence: Synthetic oligonucleotide
  Target: LAMA2; (+) strand; PAM type: NNGRRT; PAM sequence: ATGAAT
tcatgagggttctaatctcc

SEQ ID NO: 29407 - DNA, 20 bp, Artificial Sequence
  Description of Artificial Sequence: Synthetic oligonucleotide
  Target: LAMA2; (+) strand; PAM type: NNGRRT; PAM sequence: TGGAAT
agggttctaatctccatgaa

SEQ ID NO: 29408 - DNA, 20 bp, Artificial Sequence
  Description of Artificial Sequence: Synthetic oligonucleotide
  Target: LAMA2; (+) strand; PAM type: NNGRRT; PAM sequence: AAGAGT
tgaaaatcttatctgatata

SEQ ID NO: 29409 - DNA, 20 bp, Artificial Sequence
  Description of Artificial Sequence: Synthetic oligonucleotide
  Target: LAMA2; (+) strand; PAM type: NNGRRT; PAM sequence: ATGAAT
catagatatcacatacatag

SEQ ID NO: 29410 - DNA, 20 bp, Artificial Sequence
  Description of Artificial Sequence: Synthetic oligonucleotide
  Target: LAMA2; (+) strand; PAM type: NNGRRT; PAM sequence: TGGGAT
gcattgcagatcaatgacaa

SEQ ID NO: 29411 - DNA, 20 bp, Artificial Sequence
  Description of Artificial Sequence: Synthetic oligonucleotide
  Target: LAMA2; (+) strand; PAM type: NNGRRT; PAM sequence: TTGAAT
atttctgctcctgaccataa

SEQ ID NO: 29412 - DNA, 20 bp, Artificial Sequence
  Description of Artificial Sequence: Synthetic oligonucleotide
  Target: LAMA2; (+) strand; PAM type: NNGRRT; PAM sequence: TGGGGT
ctctgaaaaagagaaacaaa

SEQ ID NO: 29413 - DNA, 20 bp, Artificial Sequence
  Description of Artificial Sequence: Synthetic oligonucleotide
  Target: LAMA2; (+) strand; PAM type: NNGRRT; PAM sequence: CAGGGT
tattgcctggggacagtctc

SEQ ID NO: 29414 - DNA, 20 bp, Artificial Sequence
  Description of Artificial Sequence: Synthetic oligonucleotide
  Target: LAMA2; (+) strand; PAM type: NNGRRT; PAM sequence: TAGGGT
ccaaattgaaagacagaggt

SEQ ID NO: 29415 - DNA, 20 bp, Artificial Sequence
  Description of Artificial Sequence: Synthetic oligonucleotide
  Target: LAMA2; (+) strand; PAM type: NNGRRT; PAM sequence: CGGAGT
agctatctgcaaagagaaac

SEQ ID NO: 29416 - DNA, 20 bp, Artificial Sequence
  Description of Artificial Sequence: Synthetic oligonucleotide
  Target: LAMA2; (+) strand; PAM type: NNGRRT; PAM sequence: CTGAGT
tgcaaagagaaaccggagta

SEQ ID NO: 29417 - DNA, 20 bp, Artificial Sequence
  Description of Artificial Sequence: Synthetic oligonucleotide
  Target: LAMA2; (+) strand; PAM type: NNGRRT; PAM sequence: AAGAAT
aaactacctaaggctaatga

SEQ ID NO: 29418 - DNA, 20 bp, Artificial Sequence
  Description of Artificial Sequence: Synthetic oligonucleotide
  Target: LAMA2; (+) strand; PAM type: NNGRRT; PAM sequence: TGGAAT
tattttcctaacacccaaag

SEQ ID NO: 29419 - DNA, 20 bp, Artificial Sequence
  Description of Artificial Sequence: Synthetic oligonucleotide
  Target: LAMA2; (+) strand; PAM type: NNGRRT; PAM sequence: CAGAAT
aaaatcatgtcaagatatat

SEQ ID NO: 29420 - DNA, 20 bp, Artificial Sequence
  Description of Artificial Sequence: Synthetic oligonucleotide
  Target: LAMA2; (+) strand; PAM type: NNGRRT; PAM sequence: GTGGAT
actttgggaggccaaggcag

SEQ ID NO: 29421 - DNA, 20 bp, Artificial Sequence
  Description of Artificial Sequence: Synthetic oligonucleotide
  Target: LAMA2; (+) strand; PAM type: NNGRRT; PAM sequence: AGGAGT
ggcaggtggatcacgaggtc

SEQ ID NO: 29422 - DNA, 20 bp, Artificial Sequence
  Description of Artificial Sequence: Synthetic oligonucleotide
  Target: LAMA2; (+) strand; PAM type: NNGRRT; PAM sequence: GAGAAT
tgctcaggaggctgaggcag

SEQ ID NO: 29423 - DNA, 20 bp, Artificial Sequence
  Description of Artificial Sequence: Synthetic oligonucleotide
  Target: LAMA2; (+) strand; PAM type: NNGRRT; PAM sequence: GAGAGT
tccagcctaagcaacagagc

SEQ ID NO: 29424 - DNA, 20 bp, Artificial Sequence
  Description of Artificial Sequence: Synthetic oligonucleotide
  Target: LAMA2; (+) strand; PAM type: NNGRRT; PAM sequence: AAGAAT
gcagaggaacaaagataagg

SEQ ID NO: 29425 - DNA, 20 bp, Artificial Sequence
  Description of Artificial Sequence: Synthetic oligonucleotide
  Target: LAMA2; (+) strand; PAM type: NNGRRT; PAM sequence: GGGAGT
tttagaggtggggcttttgg

SEQ ID NO: 29426 - DNA, 20 bp, Artificial Sequence
  Description of Artificial Sequence: Synthetic oligonucleotide
  Target: LAMA2; (+) strand; PAM type: NNGRRT; PAM sequence: ATGAAT
tcatgagggctctaatctcc

SEQ ID NO: 29427 - DNA, 20 bp, Artificial Sequence
  Description of Artificial Sequence: Synthetic oligonucleotide
  Target: LAMA2; (+) strand; PAM type: NNGRRT; PAM sequence: TGGGAT
agggctctaatctccatgaa

SEQ ID NO: 29428 - DNA, 20 bp, Artificial Sequence
  Description of Artificial Sequence: Synthetic oligonucleotide
  Target: LAMA2; (+) strand; PAM type: NNGRRT; PAM sequence: GAGGAT
acatccttacaaaagaggtt

SEQ ID NO: 29429 - DNA, 20 bp, Artificial Sequence
  Description of Artificial Sequence: Synthetic oligonucleotide
  Target: LAMA2; (+) strand; PAM type: NNGRRT; PAM sequence: CTGGAT
cacatcaaatctgctgatgc

SEQ ID NO: 29430 - DNA, 20 bp, Artificial Sequence
  Description of Artificial Sequence: Synthetic oligonucleotide
  Target: LAMA2; (+) strand; PAM type: NNGRRT; PAM sequence: TTGGAT
aatctgctgatgcctggatc

SEQ ID NO: 29431 - DNA, 20 bp, Artificial Sequence
  Description of Artificial Sequence: Synthetic oligonucleotide
  Target: LAMA2; (+) strand; PAM type: NNGRRT; PAM sequence: CTGAAT
tgttattttgttgtagcagc

SEQ ID NO: 29432 - DNA, 20 bp, Artificial Sequence
  Description of Artificial Sequence: Synthetic oligonucleotide
  Target: LAMA2; (+) strand; PAM type: NNGRRT; PAM sequence: CAGAAT
catcagtacactttgcaagc

SEQ ID NO: 29433 - DNA, 20 bp, Artificial Sequence
  Description of Artificial Sequence: Synthetic oligonucleotide
  Target: LAMA2; (+) strand; PAM type: NNGRRT; PAM sequence: AAGAAT
ttcagagaaatagaagttga

SEQ ID NO: 29434 - DNA, 20 bp, Artificial Sequence
  Description of Artificial Sequence: Synthetic oligonucleotide
  Target: LAMA2; (+) strand; PAM type: NNGRRT; PAM sequence: GTGAAT
aaattaagtgtatcaaacag

SEQ ID NO: 29435 - DNA, 20 bp, Artificial Sequence
  Description of Artificial Sequence: Synthetic oligonucleotide
  Target: LAMA2; (+) strand; PAM type: NNGRRT; PAM sequence: AGGAAT
agggcctaacaccatggtta

SEQ ID NO: 29436 - DNA, 20 bp, Artificial Sequence
  Description of Artificial Sequence: Synthetic oligonucleotide
  Target: LAMA2; (+) strand; PAM type: NNGRRT; PAM sequence: CTGGGT
tgaagttttaaaaagaaaga

SEQ ID NO: 29437 - DNA, 20 bp, Artificial Sequence
  Description of Artificial Sequence: Synthetic oligonucleotide
  Target: LAMA2; (+) strand; PAM type: NNGRRT; PAM sequence: AAGAGT
aagaaagactgggttgtaag

SEQ ID NO: 29438 - DNA, 20 bp, Artificial Sequence
  Description of Artificial Sequence: Synthetic oligonucleotide
  Target: LAMA2; (+) strand; PAM type: NNGRRT; PAM sequence: GTGGAT
tggggaactatctgtatcca

SEQ ID NO: 29439 - DNA, 20 bp, Artificial Sequence
  Description of Artificial Sequence: Synthetic oligonucleotide
  Target: LAMA2; (+) strand; PAM type: NNGRRT; PAM sequence: TTGAGT
atcagacccaccccttgtgg

SEQ ID NO: 29440 - DNA, 20 bp, Artificial Sequence
  Description of Artificial Sequence: Synthetic oligonucleotide
  Target: LAMA2; (+) strand; PAM type: NNGRRT; PAM sequence: TTGAGT
tggcattttgtttactgttg

SEQ ID NO: 29441 - DNA, 20 bp, Artificial Sequence
  Description of Artificial Sequence: Synthetic oligonucleotide
  Target: LAMA2; (+) strand; PAM type: NNGRRT; PAM sequence: GAGAAT
ttttcctccttgatttccat

SEQ ID NO: 29442 - DNA, 20 bp, Artificial Sequence
  Description of Artificial Sequence: Synthetic oligonucleotide
  Target: LAMA2; (+) strand; PAM type: NNGRRT; PAM sequence: TTGGGT
ctccttgatttccatgagaa

SEQ ID NO: 29443 - DNA, 20 bp, Artificial Sequence
  Description of Artificial Sequence: Synthetic oligonucleotide
  Target: LAMA2; (+) strand; PAM type: NNGRRT; PAM sequence: GCGGAT
gaaagctattactcatataa

SEQ ID NO: 29444 - DNA, 20 bp, Artificial Sequence
  Description of Artificial Sequence: Synthetic oligonucleotide
  Target: LAMA2; (+) strand; PAM type: NNGRRT; PAM sequence: CTGGAT
tcacagacctgattcaaatg

SEQ ID NO: 29445 - DNA, 20 bp, Artificial Sequence
  Description of Artificial Sequence: Synthetic oligonucleotide
  Target: LAMA2; (+) strand; PAM type: NNGRRT; PAM sequence: CAGAAT
atgaggcttctagcacccct

SEQ ID NO: 29446 - DNA, 20 bp, Artificial Sequence
  Description of Artificial Sequence: Synthetic oligonucleotide
  Target: LAMA2; (+) strand; PAM type: NNGRRT; PAM sequence: ATGAAT
cgataaatgccaattgcttt

SEQ ID NO: 29447 - DNA, 20 bp, Artificial Sequence
  Description of Artificial Sequence: Synthetic oligonucleotide
  Target: LAMA2; (+) strand; PAM type: NNGRRT; PAM sequence: AAGGAT
acatagtatctggtggtagt

SEQ ID NO: 29448 - DNA, 20 bp, Artificial Sequence
  Description of Artificial Sequence: Synthetic oligonucleotide
  Target: LAMA2; (+) strand; PAM type: NNGRRT; PAM sequence: GAGAGT
aataaaaattgacaatcaga

SEQ ID NO: 29449 - DNA, 20 bp, Artificial Sequence
  Description of Artificial Sequence: Synthetic oligonucleotide
  Target: LAMA2; (+) strand; PAM type: NNGRRT; PAM sequence: CAGAGT
ccagatttgtgaaatacccg

SEQ ID NO: 29450 - DNA, 20 bp, Artificial Sequence
  Description of Artificial Sequence: Synthetic oligonucleotide
  Target: LAMA2; (+) strand; PAM type: NNGRRT; PAM sequence: AGGGAT
actgacaacctggcagtgaa

SEQ ID NO: 29451 - DNA, 20 bp, Artificial Sequence
  Description of Artificial Sequence: Synthetic oligonucleotide
  Target: LAMA2; (+) strand; PAM type: NNGRRT; PAM sequence: CAGGGT
tttggagataaacacaccga

SEQ ID NO: 29452 - DNA, 20 bp, Artificial Sequence
  Description of Artificial Sequence: Synthetic oligonucleotide
  Target: LAMA2; (+) strand; PAM type: NNGRRT; PAM sequence: ATGAAT
aggccagcagtccaacagaa

SEQ ID NO: 29453 - DNA, 20 bp, Artificial Sequence
  Description of Artificial Sequence: Synthetic oligonucleotide
  Target: LAMA2; (+) strand; PAM type: NNGRRT; PAM sequence: ATGAAT
catataggaaagtcaaccaa

SEQ ID NO: 29454 - DNA, 20 bp, Artificial Sequence
  Description of Artificial Sequence: Synthetic oligonucleotide
  Target: LAMA2; (+) strand; PAM type: NNGRRT; PAM sequence: GTGAAT
ggtcctcctaaattggtagt

SEQ ID NO: 29455 - DNA, 20 bp, Artificial Sequence
  Description of Artificial Sequence: Synthetic oligonucleotide
  Target: LAMA2; (+) strand; PAM type: NNGRRT; PAM sequence: CAGGGT
aatccaaagttatagctggg

SEQ ID NO: 29456 - DNA, 20 bp, Artificial Sequence
  Description of Artificial Sequence: Synthetic oligonucleotide
  Target: LAMA2; (+) strand; PAM type: NNGRRT; PAM sequence: ATGGAT
actttgggaggctgaggcag

SEQ ID NO: 29457 - DNA, 20 bp, Artificial Sequence
  Description of Artificial Sequence: Synthetic oligonucleotide
  Target: LAMA2; (+) strand; PAM type: NNGRRT; PAM sequence: GAGAAT
tacttgagaggctgaggcag

SEQ ID NO: 29458 - DNA, 20 bp, Artificial Sequence
  Description of Artificial Sequence: Synthetic oligonucleotide
  Target: LAMA2; (+) strand; PAM type: NNGRRT; PAM sequence: TTGAAT
ggctgaggcaggagaatcgc

SEQ ID NO: 29459 - DNA, 20 bp, Artificial Sequence
  Description of Artificial Sequence: Synthetic oligonucleotide
  Target: LAMA2; (+) strand; PAM type: NNGRRT; PAM sequence: CTGGGT
tcatgccactacactccagc

SEQ ID NO: 29460 - DNA, 20 bp, Artificial Sequence
  Description of Artificial Sequence: Synthetic oligonucleotide
  Target: LAMA2; (+) strand; PAM type: NNGRRT; PAM sequence: AGGGAT
ccagcctgggtgacagagca

SEQ ID NO: 29461 - DNA, 20 bp, Artificial Sequence
  Description of Artificial Sequence: Synthetic oligonucleotide
  Target: LAMA2; (+) strand; PAM type: NNGRRT; PAM sequence: GGGAAT
gtcttacatacttctcttct

SEQ ID NO: 29462 - DNA, 20 bp, Artificial Sequence
  Description of Artificial Sequence: Synthetic oligonucleotide
  Target: LAMA2; (+) strand; PAM type: NNGRRT; PAM sequence: ATGAGT
atcactgagagactgattaa

SEQ ID NO: 29463 - DNA, 20 bp, Artificial Sequence
  Description of Artificial Sequence: Synthetic oligonucleotide
  Target: LAMA2; (+) strand; PAM type: NNGRRT; PAM sequence: TGGAAT
aagatttttgtataataata

SEQ ID NO: 29464 - DNA, 20 bp, Artificial Sequence
  Description of Artificial Sequence: Synthetic oligonucleotide
  Target: LAMA2; (+) strand; PAM type: NNGRRT; PAM sequence: AGGAGT
caggcagatcactggagacc

SEQ ID NO: 29465 - DNA, 20 bp, Artificial Sequence
  Description of Artificial Sequence: Synthetic oligonucleotide
  Target: LAMA2; (+) strand; PAM type: NNGRRT; PAM sequence: GCGGGT
tactaaaaatacaaaaatta

SEQ ID NO: 29466 - DNA, 20 bp, Artificial Sequence
  Description of Artificial Sequence: Synthetic oligonucleotide
  Target: LAMA2; (+) strand; PAM type: NNGRRT; PAM sequence: GAGAAT
taccagggaggctgaggcat

SEQ ID NO: 29467 - DNA, 20 bp, Artificial Sequence
  Description of Artificial Sequence: Synthetic oligonucleotide
  Target: LAMA2; (+) strand; PAM type: NNGRRT; PAM sequence: CTGGGT
ttgtgccactgcactccagc

SEQ ID NO: 29468 - DNA, 20 bp, Artificial Sequence
  Description of Artificial Sequence: Synthetic oligonucleotide
  Target: LAMA2; (+) strand; PAM type: NNGRRT; PAM sequence: ACGAAT
ttgtcttttaaagtggagaa

SEQ ID NO: 29469 - DNA, 20 bp, Artificial Sequence
  Description of Artificial Sequence: Synthetic oligonucleotide
  Target: LAMA2; (+) strand; PAM type: NNGRRT; PAM sequence: TAGAGT
tataaggtgacttagctatt

SEQ ID NO: 29470 - DNA, 20 bp, Artificial Sequence
  Description of Artificial Sequence: Synthetic oligonucleotide
  Target: LAMA2; (+) strand; PAM type: NNGRRT; PAM sequence: GTGAGT
catctagcatttgcatcaag

SEQ ID NO: 29471 - DNA, 20 bp, Artificial Sequence
  Description of Artificial Sequence: Synthetic oligonucleotide
  Target: LAMA2; (+) strand; PAM type: NNGRRT; PAM sequence: TGGAAT
tttgtaaaagatattttaac

SEQ ID NO: 29472 - DNA, 20 bp, Artificial Sequence
  Description of Artificial Sequence: Synthetic oligonucleotide
  Target: LAMA2; (+) strand; PAM type: NNGRRT; PAM sequence: AAGGAT
tggcatgtttaattgatcac

SEQ ID NO: 29473 - DNA, 20 bp, Artificial Sequence
  Description of Artificial Sequence: Synthetic oligonucleotide
  Target: LAMA2; (+) strand; PAM type: NNGRRT; PAM sequence: TTGAAT
gtttaattgatcacaaggat

SEQ ID NO: 29474 - DNA, 20 bp, Artificial Sequence
  Description of Artificial Sequence: Synthetic oligonucleotide
  Target: LAMA2; (+) strand; PAM type: NNGRRT; PAM sequence: CTGAGT
atcacttccaacagtagcca

SEQ ID NO: 29475 - DNA, 20 bp, Artificial Sequence
  Description of Artificial Sequence: Synthetic oligonucleotide
  Target: LAMA2; (+) strand; PAM type: NNGRRT; PAM sequence: ATGAAT
gggcctccaactgaaatgtg

SEQ ID NO: 29476 - DNA, 20 bp, Artificial Sequence
  Description of Artificial Sequence: Synthetic oligonucleotide
  Target: LAMA2; (+) strand; PAM type: NNGRRT; PAM sequence: TTGGGT
attattaaacaggtagtttg

SEQ ID NO: 29477 - DNA, 20 bp, Artificial Sequence
  Description of Artificial Sequence: Synthetic oligonucleotide
  Target: LAMA2; (+) strand; PAM type: NNGRRT; PAM sequence: AAGAGT
tgattgaaaattacctgtga

SEQ ID NO: 29478 - DNA, 20 bp, Artificial Sequence
  Description of Artificial Sequence: Synthetic oligonucleotide
  Target: LAMA2; (+) strand; PAM type: NNGRRT; PAM sequence: CGGAAT
tgaggcacatcgaaagctga

SEQ ID NO: 29479 - DNA, 20 bp, Artificial Sequence
  Description of Artificial Sequence: Synthetic oligonucleotide
  Target: LAMA2; (+) strand; PAM type: NNGRRT; PAM sequence: ATGAGT
ttagactgactgtctcttca

SEQ ID NO: 29480 - DNA, 20 bp, Artificial Sequence
  Description of Artificial Sequence: Synthetic oligonucleotide
  Target: LAMA2; (+) strand; PAM type: NNGRRT; PAM sequence: CTGAGT
cccatctctcaaactgaagc

SEQ ID NO: 29481 - DNA, 20 bp, Artificial Sequence
  Description of Artificial Sequence: Synthetic oligonucleotide
  Target: LAMA2; (+) strand; PAM type: NNGRRT; PAM sequence: TTGAAT
tacacacttcagcagttgcc

SEQ ID NO: 29482 - DNA, 20 bp, Artificial Sequence
  Description of Artificial Sequence: Synthetic oligonucleotide
  Target: LAMA2; (+) strand; PAM type: NNGRRT; PAM sequence: ATGAAT
cagatgattgttttactcag

SEQ ID NO: 29483 - DNA, 20 bp, Artificial Sequence
  Description of Artificial Sequence: Synthetic oligonucleotide
  Target: LAMA2; (+) strand; PAM type: NNGRRT; PAM sequence: CTGGAT
gctgtagcattctgaaataa

SEQ ID NO: 29484 - DNA, 20 bp, Artificial Sequence
  Description of Artificial Sequence: Synthetic oligonucleotide
  Target: LAMA2; (+) strand; PAM type: NNGRRT; PAM sequence: GTGAGT
tgttttaatttctcattctt

SEQ ID NO: 29485 - DNA, 20 bp, Artificial Sequence
  Description of Artificial Sequence: Synthetic oligonucleotide
  Target: LAMA2; (+) strand; PAM type: NNGRRT; PAM sequence: CAGAAT
ctcctggttaagtaaaattt

SEQ ID NO: 29486 - DNA, 20 bp, Artificial Sequence
  Description of Artificial Sequence: Synthetic oligonucleotide
  Target: LAMA2; (+) strand; PAM type: NNGRRT; PAM sequence: GTGGGT
tttcacattttatatttgat

SEQ ID NO: 29487 - DNA, 20 bp, Artificial Sequence
  Description of Artificial Sequence: Synthetic oligonucleotide
  Target: LAMA2; (+) strand; PAM type: NNGRRT; PAM sequence: AAGAAT
tttgtagagatcaatagtgt

SEQ ID NO: 29488 - DNA, 20 bp, Artificial Sequence
  Description of Artificial Sequence: Synthetic oligonucleotide
  Target: LAMA2; (+) strand; PAM type: NNGRRT; PAM sequence: AAGAAT
attgatacattttgttttag

SEQ ID NO: 29489 - DNA, 20 bp, Artificial Sequence
  Description of Artificial Sequence: Synthetic oligonucleotide
  Target: LAMA2; (+) strand; PAM type: NNGRRT; PAM sequence: AAGGGT
tttagaagaattaggagcaa

SEQ ID NO: 29490 - DNA, 20 bp, Artificial Sequence
  Description of Artificial Sequence: Synthetic oligonucleotide
  Target: LAMA2; (+) strand; PAM type: NNGRRT; PAM sequence: GAGGGT
ttagtaatgtctcagaaggt

SEQ ID NO: 29491 - DNA, 20 bp, Artificial Sequence
  Description of Artificial Sequence: Synthetic oligonucleotide
  Target: LAMA2; (+) strand; PAM type: NNGRRT; PAM sequence: TTGAGT
ggttgatttcaaggcaaatc

SEQ ID NO: 29492 - DNA, 20 bp, Artificial Sequence
  Description of Artificial Sequence: Synthetic oligonucleotide
  Target: LAMA2; (+) strand; PAM type: NNGRRT; PAM sequence: TGGGAT
ttgagtgagagggaactggt

SEQ ID NO: 29493 - DNA, 20 bp, Artificial Sequence
  Description of Artificial Sequence: Synthetic oligonucleotide
  Target: LAMA2; (+) strand; PAM type: NNGRRT; PAM sequence: CAGGGT
gggaactggttgggattctg

SEQ ID NO: 29494 - DNA, 20 bp, Artificial Sequence
  Description of Artificial Sequence: Synthetic oligonucleotide
  Target: LAMA2; (+) strand; PAM type: NNGRRT; PAM sequence: TTGGAT
gggtttattatataatagtt

SEQ ID NO: 29495 - DNA, 20 bp, Artificial Sequence
  Description of Artificial Sequence: Synthetic oligonucleotide
  Target: LAMA2; (+) strand; PAM type: NNGRRT; PAM sequence: CAGAGT
aatagttttggatttgtcac

SEQ ID NO: 29496 - DNA, 20 bp, Artificial Sequence
  Description of Artificial Sequence: Synthetic oligonucleotide
  Target: LAMA2; (+) strand; PAM type: NNGRRT; PAM sequence: ATGAGT
caaacattgaagaacatgtt

SEQ ID NO: 29497 - DNA, 20 bp, Artificial Sequence
  Description of Artificial Sequence: Synthetic oligonucleotide
  Target: LAMA2; (+) strand; PAM type: NNGRRT; PAM sequence: ATGGAT
ctataaggaagttagcttag

SEQ ID NO: 29498 - DNA, 20 bp, Artificial Sequence
  Description of Artificial Sequence: Synthetic oligonucleotide
  Target: LAMA2; (+) strand; PAM type: NNGRRT; PAM sequence: GGGGGT
ctcacagcattcttaaaata

SEQ ID NO: 29499 - DNA, 20 bp, Artificial Sequence
  Description of Artificial Sequence: Synthetic oligonucleotide
  Target: LAMA2; (+) strand; PAM type: NNGRRT; PAM sequence: ATGAAT
atgtataaaatgaaaataat

SEQ ID NO: 29500 - DNA, 20 bp, Artificial Sequence
  Description of Artificial Sequence: Synthetic oligonucleotide
  Target: LAMA2; (+) strand; PAM type: NNGRRT; PAM sequence: GAGGGT
ctactttatagtgttatttt

SEQ ID NO: 29501 - DNA, 20 bp, Artificial Sequence
  Description of Artificial Sequence: Synthetic oligonucleotide
  Target: LAMA2; (+) strand; PAM type: NNGRRT; PAM sequence: ATGAGT
agtgttattttgagggttaa

SEQ ID NO: 29502 - DNA, 20 bp, Artificial Sequence
  Description of Artificial Sequence: Synthetic oligonucleotide
  Target: LAMA2; (+) strand; PAM type: NNGRRT; PAM sequence: AAGAAT
aaggaaagaagagagggaga

SEQ ID NO: 29503 - DNA, 20 bp, Artificial Sequence
  Description of Artificial Sequence: Synthetic oligonucleotide
  Target: LAMA2; (+) strand; PAM type: NNGRRT; PAM sequence: AAGAAT
aaggaaaggaaaacaatgga

SEQ ID NO: 29504 - DNA, 20 bp, Artificial Sequence
  Description of Artificial Sequence: Synthetic oligonucleotide
  Target: LAMA2; (+) strand; PAM type: NNGRRT; PAM sequence: AAGAAT
aaatgcagcaggaaaggaaa

SEQ ID NO: 29505 - DNA, 20 bp, Artificial Sequence
  Description of Artificial Sequence: Synthetic oligonucleotide
  Target: LAMA2; (+) strand; PAM type: NNGRRT; PAM sequence: AAGAAT
aggaaaggaaaaagaatagg

SEQ ID NO: 29506 - DNA, 20 bp, Artificial Sequence
  Description of Artificial Sequence: Synthetic oligonucleotide
  Target: LAMA2; (+) strand; PAM type: NNGRRT; PAM sequence: TAGGGT
gctcatatctgtctaatttt

SEQ ID NO: 29507 - DNA, 20 bp, Artificial Sequence
  Description of Artificial Sequence: Synthetic oligonucleotide
  Target: LAMA2; (+) strand; PAM type: NNGRRT; PAM sequence: CTGGGT
tttccagttttcatctggga

SEQ ID NO: 29508 - DNA, 20 bp, Artificial Sequence
  Description of Artificial Sequence: Synthetic oligonucleotide
  Target: LAMA2; (+) strand; PAM type: NNGRRT; PAM sequence: AAGAGT
actcatactgcaggaaaaaa

SEQ ID NO: 29509 - DNA, 20 bp, Artificial Sequence
  Description of Artificial Sequence: Synthetic oligonucleotide
  Target: LAMA2; (+) strand; PAM type: NNGRRT; PAM sequence: GTGAGT
atactgcaggaaaaaaaaga

SEQ ID NO: 29510 - DNA, 20 bp, Artificial Sequence
  Description of Artificial Sequence: Synthetic oligonucleotide
  Target: LAMA2; (+) strand; PAM type: NNGRRT; PAM sequence: AGGGAT
tttttgttcaagacaagtac

SEQ ID NO: 29511 - DNA, 20 bp, Artificial Sequence
  Description of Artificial Sequence: Synthetic oligonucleotide
  Target: LAMA2; (+) strand; PAM type: NNGRRT; PAM sequence: GAGGGT
cacaatctagcagagatttg

SEQ ID NO: 29512 - DNA, 20 bp, Artificial Sequence
  Description of Artificial Sequence: Synthetic oligonucleotide
  Target: LAMA2; (+) strand; PAM type: NNGRRT; PAM sequence: ATGGAT
tagcagagatttggagggtg

SEQ ID NO: 29513 - DNA, 20 bp, Artificial Sequence
  Description of Artificial Sequence: Synthetic oligonucleotide
  Target: LAMA2; (+) strand; PAM type: NNGRRT; PAM sequence: TAGAAT
gagatttggagggtgatgga

SEQ ID NO: 29514 - DNA, 20 bp, Artificial Sequence
  Description of Artificial Sequence: Synthetic oligonucleotide
  Target: LAMA2; (+) strand; PAM type: NNGRRT; PAM sequence: GGGAAT
aagaaaatgttaactatgca

SEQ ID NO: 29515 - DNA, 20 bp, Artificial Sequence
  Description of Artificial Sequence: Synthetic oligonucleotide
  Target: LAMA2; (+) strand; PAM type: NNGRRT; PAM sequence: AAGGAT
ttgatcccataaaactcagc

SEQ ID NO: 29516 - DNA, 20 bp, Artificial Sequence
  Description of Artificial Sequence: Synthetic oligonucleotide
  Target: LAMA2; (+) strand; PAM type: NNGRRT; PAM sequence: AGGGGT
aaaggagataagccaggtta

SEQ ID NO: 29517 - DNA, 20 bp, Artificial Sequence
  Description of Artificial Sequence: Synthetic oligonucleotide
  Target: LAMA2; (+) strand; PAM type: NNGRRT; PAM sequence: TGGAGT
gcttttttgcatcagtcatc

SEQ ID NO: 29518 - DNA, 20 bp, Artificial Sequence
  Description of Artificial Sequence: Synthetic oligonucleotide
  Target: LAMA2; (+) strand; PAM type: NNGRRT; PAM sequence: GCGGAT
actttgggaggctgaggcgg

SEQ ID NO: 29519 - DNA, 20 bp, Artificial Sequence
  Description of Artificial Sequence: Synthetic oligonucleotide
  Target: LAMA2; (+) strand; PAM type: NNGRRT; PAM sequence: CAGGGT
atacataaaaattagccagg

SEQ ID NO: 29520 - DNA, 20 bp, Artificial Sequence
  Description of Artificial Sequence: Synthetic oligonucleotide
  Target: LAMA2; (+) strand; PAM type: NNGRRT; PAM sequence: GAGAAT
tactcgggaggctgaggcag

SEQ ID NO: 29521 - DNA, 20 bp, Artificial Sequence
  Description of Artificial Sequence: Synthetic oligonucleotide
  Target: LAMA2; (+) strand; PAM type: NNGRRT; PAM sequence: CTGGAT
ttttactattgacccttact

SEQ ID NO: 29522 - DNA, 20 bp, Artificial Sequence
  Description of Artificial Sequence: Synthetic oligonucleotide
  Target: LAMA2; (+) strand; PAM type: NNGRRT; PAM sequence: AAGAAT
ccaagtgattatttacccat

SEQ ID NO: 29523 - DNA, 20 bp, Artificial Sequence
  Description of Artificial Sequence: Synthetic oligonucleotide
  Target: LAMA2; (+) strand; PAM type: NNGRRT; PAM sequence: CTGAAT
acctgcagtatgcttttagt

SEQ ID NO: 29524 - DNA, 20 bp, Artificial Sequence
  Description of Artificial Sequence: Synthetic oligonucleotide
  Target: LAMA2; (+) strand; PAM type: NNGRRT; PAM sequence: AGGGAT
tatgcttttagtctgaattc

SEQ ID NO: 29525 - DNA, 20 bp, Artificial Sequence
  Description of Artificial Sequence: Synthetic oligonucleotide
  Target: LAMA2; (+) strand; PAM type: NNGRRT; PAM sequence: TGGAAT
caccaaccacacatttacat

SEQ ID NO: 29526 - DNA, 20 bp, Artificial Sequence
  Description of Artificial Sequence: Synthetic oligonucleotide
  Target: LAMA2; (+) strand; PAM type: NNGRRT; PAM sequence: ATGAAT
cacatttacattggaataaa

SEQ ID NO: 29527 - DNA, 20 bp, Artificial Sequence
  Description of Artificial Sequence: Synthetic oligonucleotide
  Target: LAMA2; (+) strand; PAM type: NNGRRT; PAM sequence: TGGAAT
aacatgtactgccattaatt

SEQ ID NO: 29528 - DNA, 20 bp, Artificial Sequence
  Description of Artificial Sequence: Synthetic oligonucleotide
  Target: LAMA2; (+) strand; PAM type: NNGRRT; PAM sequence: CAGAAT
gaaaggagacttggcagaac

SEQ ID NO: 29529 - DNA, 20 bp, Artificial Sequence
  Description of Artificial Sequence: Synthetic oligonucleotide
  Target: LAMA2; (+) strand; PAM type: NNGRRT; PAM sequence: GAGGAT
gcagaaccagaatattgcgt

SEQ ID NO: 29530 - DNA, 20 bp, Artificial Sequence
  Description of Artificial Sequence: Synthetic oligonucleotide
  Target: LAMA2; (+) strand; PAM type: NNGRRT; PAM sequence: AAGAGT
aagatagcttcagattctag

SEQ ID NO: 29531 - DNA, 20 bp, Artificial Sequence
  Description of Artificial Sequence: Synthetic oligonucleotide
  Target: LAMA2; (+) strand; PAM type: NNGRRT; PAM sequence: CTGAAT
agaagagtttctagctcttt

SEQ ID NO: 29532 - DNA, 20 bp, Artificial Sequence
  Description of Artificial Sequence: Synthetic oligonucleotide
  Target: LAMA2; (+) strand; PAM type: NNGRRT; PAM sequence: AAGGAT
acccaaaaacaaacaaaata

SEQ ID NO: 29533 - DNA, 20 bp, Artificial Sequence
  Description of Artificial Sequence: Synthetic oligonucleotide
  Target: LAMA2; (+) strand; PAM type: NNGRRT; PAM sequence: ATGGGT
aaacaaaataaaggattcaa

SEQ ID NO: 29534 - DNA, 20 bp, Artificial Sequence
  Description of Artificial Sequence: Synthetic oligonucleotide
  Target: LAMA2; (+) strand; PAM type: NNGRRT; PAM sequence: CAGAGT
atgctggctacagtggtcga

SEQ ID NO: 29535 - DNA, 20 bp, Artificial Sequence
  Description of Artificial Sequence: Synthetic oligonucleotide
  Target: LAMA2; (+) strand; PAM type: NNGRRT; PAM sequence: CAGAGT
tttctggttatagcacatgg

SEQ ID NO: 29536 - DNA, 20 bp, Artificial Sequence
  Description of Artificial Sequence: Synthetic oligonucleotide
  Target: LAMA2; (+) strand; PAM type: NNGRRT; PAM sequence: GTGAAT
acatgatacaaacagatcag

SEQ ID NO: 29537 - DNA, 20 bp, Artificial Sequence
  Description of Artificial Sequence: Synthetic oligonucleotide
  Target: LAMA2; (+) strand; PAM type: NNGRRT; PAM sequence: ATGAAT
tcctgcagatttaaaatttt

SEQ ID NO: 29538 - DNA, 20 bp, Artificial Sequence
  Description of Artificial Sequence: Synthetic oligonucleotide
  Target: LAMA2; (+) strand; PAM type: NNGRRT; PAM sequence: TAGAAT
atgtgtcagagcaaagcaac

SEQ ID NO: 29539 - DNA, 20 bp, Artificial Sequence
  Description of Artificial Sequence: Synthetic oligonucleotide
  Target: LAMA2; (+) strand; PAM type: NNGRRT; PAM sequence: AAGAAT
tattcacatacctggtggag

SEQ ID NO: 29540 - DNA, 20 bp, Artificial Sequence
  Description of Artificial Sequence: Synthetic oligonucleotide
  Target: LAMA2; (+) strand; PAM type: NNGRRT; PAM sequence: CGGGAT
ctcacaatgtcccttcagta

SEQ ID NO: 29541 - DNA, 20 bp, Artificial Sequence
  Description of Artificial Sequence: Synthetic oligonucleotide
  Target: LAMA2; (+) strand; PAM type: NNGRRT; PAM sequence: CTGAGT
gatttctttctaccattttc

SEQ ID NO: 29542 - DNA, 20 bp, Artificial Sequence
  Description of Artificial Sequence: Synthetic oligonucleotide
  Target: LAMA2; (+) strand; PAM type: NNGRRT; PAM sequence: TTGAAT
attcaaaaagcatttaagca

SEQ ID NO: 29543 - DNA, 20 bp, Artificial Sequence
  Description of Artificial Sequence: Synthetic oligonucleotide
  Target: LAMA2; (+) strand; PAM type: NNGRRT; PAM sequence: CTGAGT
accctatcccccagctctgg

SEQ ID NO: 29544 - DNA, 20 bp, Artificial Sequence
  Description of Artificial Sequence: Synthetic oligonucleotide
  Target: LAMA2; (+) strand; PAM type: NNGRRT; PAM sequence: GTGAGT
cactaaactgcaaattcctg

SEQ ID NO: 29545 - DNA, 20 bp, Artificial Sequence
  Description of Artificial Sequence: Synthetic oligonucleotide
  Target: LAMA2; (+) strand; PAM type: NNGRRT; PAM sequence: CTGGAT
aaattcctggtgagtgacaa

SEQ ID NO: 29546 - DNA, 20 bp, Artificial Sequence
  Description of Artificial Sequence: Synthetic oligonucleotide
  Target: LAMA2; (+) strand; PAM type: NNGRRT; PAM sequence: TTGAGT
aggaacttaataattctttg

SEQ ID NO: 29547 - DNA, 20 bp, Artificial Sequence
  Description of Artificial Sequence: Synthetic oligonucleotide
  Target: LAMA2; (+) strand; PAM type: NNGRRT; PAM sequence: GTGAAT
acttaataattctttgttga

SEQ ID NO: 29548 - DNA, 20 bp, Artificial Sequence
  Description of Artificial Sequence: Synthetic oligonucleotide
  Target: LAMA2; (+) strand; PAM type: NNGRRT; PAM sequence: AGGGAT
attctttgttgagtgaataa

SEQ ID NO: 29549 - DNA, 20 bp, Artificial Sequence
  Description of Artificial Sequence: Synthetic oligonucleotide
  Target: LAMA2; (+) strand; PAM type: NNGRRT; PAM sequence: TTGGAT
tttgaaacttacaaaaagtg

SEQ ID NO: 29550 - DNA, 20 bp, Artificial Sequence
  Description of Artificial Sequence: Synthetic oligonucleotide
  Target: LAMA2; (+) strand; PAM type: NNGRRT; PAM sequence: CTGGAT
atttaagttcctttgtctgt

SEQ ID NO: 29551 - DNA, 20 bp, Artificial Sequence
  Description of Artificial Sequence: Synthetic oligonucleotide
  Target: LAMA2; (+) strand; PAM type: NNGRRT; PAM sequence: TGGGAT
tatttttaaaagattttttc

SEQ ID NO: 29552 - DNA, 20 bp, Artificial Sequence
  Description of Artificial Sequence: Synthetic oligonucleotide
  Target: LAMA2; (+) strand; PAM type: NNGRRT; PAM sequence: CTGAGT
agccctcaaattttatgagc

SEQ ID NO: 29553 - DNA, 20 bp, Artificial Sequence
  Description of Artificial Sequence: Synthetic oligonucleotide
  Target: LAMA2; (+) strand; PAM type: NNGRRT; PAM sequence: GTGGGT
atgagcctgagttgcattgt

SEQ ID NO: 29554 - DNA, 20 bp, Artificial Sequence
  Description of Artificial Sequence: Synthetic oligonucleotide
  Target: LAMA2; (+) strand; PAM type: NNGRRT; PAM sequence: GTGGAT
gggtaaaagtcttgtgctct

SEQ ID NO: 29555 - DNA, 20 bp, Artificial Sequence
  Description of Artificial Sequence: Synthetic oligonucleotide
  Target: LAMA2; (+) strand; PAM type: NNGRRT; PAM sequence: TTGGAT
tcaggaggaagttagatgtt

SEQ ID NO: 29556 - DNA, 20 bp, Artificial Sequence
  Description of Artificial Sequence: Synthetic oligonucleotide
  Target: LAMA2; (+) strand; PAM type: NNGRRT; PAM sequence: AAGAAT
tggatatttacatagaaaca

SEQ ID NO: 29557 - DNA, 20 bp, Artificial Sequence
  Description of Artificial Sequence: Synthetic oligonucleotide
  Target: LAMA2; (+) strand; PAM type: NNGRRT; PAM sequence: TAGGAT
tccatgctaggggcaggagg

SEQ ID NO: 29558 - DNA, 20 bp, Artificial Sequence
  Description of Artificial Sequence: Synthetic oligonucleotide
  Target: LAMA2; (+) strand; PAM type: NNGRRT; PAM sequence: GGGAGT
gaggtaggatggagcagata

SEQ ID NO: 29559 - DNA, 20 bp, Artificial Sequence
  Description of Artificial Sequence: Synthetic oligonucleotide
  Target: LAMA2; (+) strand; PAM type: NNGRRT; PAM sequence: CCGGAT
gagtctcttttcctcttaaa

SEQ ID NO: 29560 - DNA, 20 bp, Artificial Sequence
  Description of Artificial Sequence: Synthetic oligonucleotide
  Target: LAMA2; (+) strand; PAM type: NNGRRT; PAM sequence: GAGAGT
taaaatcagttttatatgtt

SEQ ID NO: 29561 - DNA, 20 bp, Artificial Sequence
  Description of Artificial Sequence: Synthetic oligonucleotide
  Target: LAMA2; (+) strand; PAM type: NNGRRT; PAM sequence: TGGAAT
ttttatatgttgagagtcca

SEQ ID NO: 29562 - DNA, 20 bp, Artificial Sequence
  Description of Artificial Sequence: Synthetic oligonucleotide
  Target: LAMA2; (+) strand; PAM type: NNGRRT; PAM sequence: TGGAAT
tatgttgagagtccatggaa

SEQ ID NO: 29563 - DNA, 20 bp, Artificial Sequence
  Description of Artificial Sequence: Synthetic oligonucleotide
  Target: LAMA2; (+) strand; PAM type: NNGRRT; PAM sequence: GAGAGT
atctcttaccatttttctat

SEQ ID NO: 29564 - DNA, 20 bp, Artificial Sequence
  Description of Artificial Sequence: Synthetic oligonucleotide
  Target: LAMA2; (+) strand; PAM type: NNGRRT; PAM sequence: AAGAAT
ttctatgagagtcataaaaa

SEQ ID NO: 29565 - DNA, 20 bp, Artificial Sequence
  Description of Artificial Sequence: Synthetic oligonucleotide
  Target: LAMA2; (+) strand; PAM type: NNGRRT; PAM sequence: GTGGGT
ctatttactttctagtcaag

SEQ ID NO: 29566 - DNA, 20 bp, Artificial Sequence
  Description of Artificial Sequence: Synthetic oligonucleotide
  Target: LAMA2; (+) strand; PAM type: NNGRRT; PAM sequence: TCGGGT
cttgttttcaaacatcgatt

SEQ ID NO: 29567 - DNA, 20 bp, Artificial Sequence
  Description of Artificial Sequence: Synthetic oligonucleotide
  Target: LAMA2; (+) strand; PAM type: NNGRRT; PAM sequence: CTGAGT
aaattaaaaaattcacttaa

SEQ ID NO: 29568 - DNA, 20 bp, Artificial Sequence
  Description of Artificial Sequence: Synthetic oligonucleotide
  Target: LAMA2; (+) strand; PAM type: NNGRRT; PAM sequence: CTGGAT
atttaatgttgtttagtttg

SEQ ID NO: 29569 - DNA, 20 bp, Artificial Sequence
  Description of Artificial Sequence: Synthetic oligonucleotide
  Target: LAMA2; (+) strand; PAM type: NNGRRT; PAM sequence: TGGGGT
tttttcagaagtgacaaaag

SEQ ID NO: 29570 - DNA, 20 bp, Artificial Sequence
  Description of Artificial Sequence: Synthetic oligonucleotide
  Target: LAMA2; (+) strand; PAM type: NNGRRT; PAM sequence: TAGAAT
tttccaagatgtcatgtagt

SEQ ID NO: 29571 - DNA, 20 bp, Artificial Sequence
  Description of Artificial Sequence: Synthetic oligonucleotide
  Target: LAMA2; (+) strand; PAM type: NNGRRT; PAM sequence: CTGAAT
taattcatttctttttagct

SEQ ID NO: 29572 - DNA, 20 bp, Artificial Sequence
  Description of Artificial Sequence: Synthetic oligonucleotide
  Target: LAMA2; (+) strand; PAM type: NNGRRT; PAM sequence: CTGGAT
tctgaatactattttgttgt

SEQ ID NO: 29573 - DNA, 20 bp, Artificial Sequence
  Description of Artificial Sequence: Synthetic oligonucleotide
  Target: LAMA2; (+) strand; PAM type: NNGRRT; PAM sequence: TTGAAT
ttgtctggatataaccacag

SEQ ID NO: 29574 - DNA, 20 bp, Artificial Sequence
  Description of Artificial Sequence: Synthetic oligonucleotide
  Target: LAMA2; (+) strand; PAM type: NNGRRT; PAM sequence: ATGAAT
tgctaccatgttctggcaat

SEQ ID NO: 29575 - DNA, 20 bp, Artificial Sequence
  Description of Artificial Sequence: Synthetic oligonucleotide
  Target: LAMA2; (+) strand; PAM type: NNGRRT; PAM sequence: GTGGAT
acttatgtgataagtcttgt

SEQ ID NO: 29576 - DNA, 20 bp, Artificial Sequence
  Description of Artificial Sequence: Synthetic oligonucleotide
  Target: LAMA2; (+) strand; PAM type: NNGRRT; PAM sequence: TTGGGT
gatataaatattcaacttat

SEQ ID NO: 29577 - DNA, 20 bp, Artificial Sequence
  Description of Artificial Sequence: Synthetic oligonucleotide
  Target: LAMA2; (+) strand; PAM type: NNGRRT; PAM sequence: AAGAGT
acttatttgggtaaatacca

SEQ ID NO: 29578 - DNA, 20 bp, Artificial Sequence
  Description of Artificial Sequence: Synthetic oligonucleotide
  Target: LAMA2; (+) strand; PAM type: NNGRRT; PAM sequence: CTGGAT
aataccaaagagtgcaatta

SEQ ID NO: 29579 - DNA, 20 bp, Artificial Sequence
  Description of Artificial Sequence: Synthetic oligonucleotide
  Target: LAMA2; (+) strand; PAM type: NNGRRT; PAM sequence: AAGAGT
cattctcaccagcaatgaac

SEQ ID NO: 29580 - DNA, 20 bp, Artificial Sequence
  Description of Artificial Sequence: Synthetic oligonucleotide
  Target: LAMA2; (+) strand; PAM type: NNGRRT; PAM sequence: AAGAGT
ttttcttgttgttgagattt

SEQ ID NO: 29581 - DNA, 20 bp, Artificial Sequence
  Description of Artificial Sequence: Synthetic oligonucleotide
  Target: LAMA2; (+) strand; PAM type: NNGRRT; PAM sequence: ATGAAT
taattttaataaaatctaaa

SEQ ID NO: 29582 - DNA, 20 bp, Artificial Sequence
  Description of Artificial Sequence: Synthetic oligonucleotide
  Target: LAMA2; (+) strand; PAM type: NNGRRT; PAM sequence: ATGGAT
ctaaaatgaatttttatttc

SEQ ID NO: 29583 - DNA, 20 bp, Artificial Sequence
  Description of Artificial Sequence: Synthetic oligonucleotide
  Target: LAMA2; (+) strand; PAM type: NNGRRT; PAM sequence: AAGAGT
tgactttagtgttatatata

SEQ ID NO: 29584 - DNA, 20 bp, Artificial Sequence
  Description of Artificial Sequence: Synthetic oligonucleotide
  Target: LAMA2; (+) strand; PAM type: NNGRRT; PAM sequence: CAGGGT
ataaagagttactgcaaact

SEQ ID NO: 29585 - DNA, 20 bp, Artificial Sequence
  Description of Artificial Sequence: Synthetic oligonucleotide
  Target: LAMA2; (+) strand; PAM type: NNGRRT; PAM sequence: AAGAGT
tttcttctatgttatcttcc

SEQ ID NO: 29586 - DNA, 20 bp, Artificial Sequence
  Description of Artificial Sequence: Synthetic oligonucleotide
  Target: LAMA2; (+) strand; PAM type: NNGRRT; PAM sequence: GAGGGT
cattttgtgttaatttttgt

SEQ ID NO: 29587 - DNA, 20 bp, Artificial Sequence
  Description of Artificial Sequence: Synthetic oligonucleotide
  Target: LAMA2; (+) strand; PAM type: NNGRRT; PAM sequence: CAGAAT
tcaattttctgttgctataa

SEQ ID NO: 29588 - DNA, 20 bp, Artificial Sequence
  Description of Artificial Sequence: Synthetic oligonucleotide
  Target: LAMA2; (+) strand; PAM type: NNGRRT; PAM sequence: GAGAGT
actaggtaatttataaagga

SEQ ID NO: 29589 - DNA, 20 bp, Artificial Sequence
  Description of Artificial Sequence: Synthetic oligonucleotide
  Target: LAMA2; (+) strand; PAM type: NNGRRT; PAM sequence: GAGAGT
gcatttggtcaagttctggt

SEQ ID NO: 29590 - DNA, 20 bp, Artificial Sequence
  Description of Artificial Sequence: Synthetic oligonucleotide
  Target: LAMA2; (+) strand; PAM type: NNGRRT; PAM sequence: ATGGAT
attaggaaccaaacctcact

SEQ ID NO: 29591 - DNA, 20 bp, Artificial Sequence
  Description of Artificial Sequence: Synthetic oligonucleotide
  Target: LAMA2; (+) strand; PAM type: NNGRRT; PAM sequence: TTGAAT
aaaacactttcctttcttca

SEQ ID NO: 29592 - DNA, 20 bp, Artificial Sequence
  Description of Artificial Sequence: Synthetic oligonucleotide
  Target: LAMA2; (+) strand; PAM type: NNGRRT; PAM sequence: GCGGGT
gatcagatggccatattcat

SEQ ID NO: 29593 - DNA, 20 bp, Artificial Sequence
  Description of Artificial Sequence: Synthetic oligonucleotide
  Target: LAMA2; (+) strand; PAM type: NNGRRT; PAM sequence: TTGGGT
ttttatactaagtcttgaag

SEQ ID NO: 29594 - DNA, 20 bp, Artificial Sequence
  Description of Artificial Sequence: Synthetic oligonucleotide
  Target: LAMA2; (+) strand; PAM type: NNGRRT; PAM sequence: TAGAAT
tttcctctccatataaattt

SEQ ID NO: 29595 - DNA, 20 bp, Artificial Sequence
  Description of Artificial Sequence: Synthetic oligonucleotide
  Target: LAMA2; (+) strand; PAM type: NNGRRT; PAM sequence: TGGGAT
atatccaaaaaataacttgc

SEQ ID NO: 29596 - DNA, 20 bp, Artificial Sequence
  Description of Artificial Sequence: Synthetic oligonucleotide
  Target: LAMA2; (+) strand; PAM type: NNGRRT; PAM sequence: TGGGAT
taacttgctgggattttgac

SEQ ID NO: 29597 - DNA, 20 bp, Artificial Sequence
  Description of Artificial Sequence: Synthetic oligonucleotide
  Target: LAMA2; (+) strand; PAM type: NNGRRT; PAM sequence: TTGAAT
ggattttgactgggattacc

SEQ ID NO: 29598 - DNA, 20 bp, Artificial Sequence
  Description of Artificial Sequence: Synthetic oligonucleotide
  Target: LAMA2; (+) strand; PAM type: NNGRRT; PAM sequence: TTGAGT
ggaagaactgacatcctacc

SEQ ID NO: 29599 - DNA, 20 bp, Artificial Sequence
  Description of Artificial Sequence: Synthetic oligonucleotide
  Target: LAMA2; (+) strand; PAM type: NNGRRT; PAM sequence: TGGAAT
agtcttcctatttatggaca

SEQ ID NO: 29600 - DNA, 20 bp, Artificial Sequence
  Description of Artificial Sequence: Synthetic oligonucleotide
  Target: LAMA2; (+) strand; PAM type: NNGRRT; PAM sequence: TGGAGT
ttttctttgatttctttcac

SEQ ID NO: 29601 - DNA, 20 bp, Artificial Sequence
  Description of Artificial Sequence: Synthetic oligonucleotide
  Target: LAMA2; (+) strand; PAM type: NNGRRT; PAM sequence: TGGAAT
cacctttttcttcagacaga

SEQ ID NO: 29602 - DNA, 20 bp, Artificial Sequence
  Description of Artificial Sequence: Synthetic oligonucleotide
  Target: LAMA2; (+) strand; PAM type: NNGRRT; PAM sequence: CTGAGT
aattggctttgttgctctgc

SEQ ID NO: 29603 - DNA, 20 bp, Artificial Sequence
  Description of Artificial Sequence: Synthetic oligonucleotide
  Target: LAMA2; (+) strand; PAM type: NNGRRT; PAM sequence: CAGAGT
ctcaagagattattcaaaat

SEQ ID NO: 29604 - DNA, 20 bp, Artificial Sequence
  Description of Artificial Sequence: Synthetic oligonucleotide
  Target: LAMA2; (+) strand; PAM type: NNGRRT; PAM sequence: TAGAGT
tcagagttgttgattcccag

SEQ ID NO: 29605 - DNA, 20 bp, Artificial Sequence
  Description of Artificial Sequence: Synthetic oligonucleotide
  Target: LAMA2; (+) strand; PAM type: NNGRRT; PAM sequence: AAGGAT
gccacaaaaatgcatttctg

SEQ ID NO: 29606 - DNA, 20 bp, Artificial Sequence
  Description of Artificial Sequence: Synthetic oligonucleotide
  Target: LAMA2; (+) strand; PAM type: NNGRRT; PAM sequence: TAGAAT
ctcaaggctgtgtgatatca

SEQ ID NO: 29607 - DNA, 20 bp, Artificial Sequence
  Description of Artificial Sequence: Synthetic oligonucleotide
  Target: LAMA2; (+) strand; PAM type: NNGRRT; PAM sequence: ATGAAT
aggctgtgtgatatcataga

SEQ ID NO: 29608 - DNA, 20 bp, Artificial Sequence
  Description of Artificial Sequence: Synthetic oligonucleotide
  Target: LAMA2; (+) strand; PAM type: NNGRRT; PAM sequence: TGGAGT
tgatatcatagaatgaatga

SEQ ID NO: 29609 - DNA, 20 bp, Artificial Sequence
  Description of Artificial Sequence: Synthetic oligonucleotide
  Target: LAMA2; (+) strand; PAM type: NNGRRT; PAM sequence: GAGAGT
gtcactttatctataaaatg

SEQ ID NO: 29610 - DNA, 20 bp, Artificial Sequence
  Description of Artificial Sequence: Synthetic oligonucleotide
  Target: LAMA2; (+) strand; PAM type: NNGRRT; PAM sequence: TAGAGT
agagtgtaaatactacttct

SEQ ID NO: 29611 - DNA, 20 bp, Artificial Sequence
  Description of Artificial Sequence: Synthetic oligonucleotide
  Target: LAMA2; (+) strand; PAM type: NNGRRT; PAM sequence: CTGGAT
atctaataactcatgagaca

SEQ ID NO: 29612 - DNA, 20 bp, Artificial Sequence
  Description of Artificial Sequence: Synthetic oligonucleotide
  Target: LAMA2; (+) strand; PAM type: NNGRRT; PAM sequence: CTGAAT
cactggatatgtaataggaa

SEQ ID NO: 29613 - DNA, 20 bp, Artificial Sequence
  Description of Artificial Sequence: Synthetic oligonucleotide
  Target: LAMA2; (+) strand; PAM type: NNGRRT; PAM sequence: TTGAGT
ttccagaaaataaaacttga

SEQ ID NO: 29614 - DNA, 20 bp, Artificial Sequence
  Description of Artificial Sequence: Synthetic oligonucleotide
  Target: LAMA2; (+) strand; PAM type: NNGRRT; PAM sequence: GTGAAT
aacagatcccactagactaa

SEQ ID NO: 29615 - DNA, 20 bp, Artificial Sequence
  Description of Artificial Sequence: Synthetic oligonucleotide
  Target: LAMA2; (+) strand; PAM type: NNGRRT; PAM sequence: TAGAAT
ttaaaaagtatcattagaaa

SEQ ID NO: 29616 - DNA, 20 bp, Artificial Sequence
  Description of Artificial Sequence: Synthetic oligonucleotide
  Target: LAMA2; (+) strand; PAM type: NNGRRT; PAM sequence: ATGAAT
ctcaagatattatcaaagtc

SEQ ID NO: 29617 - DNA, 20 bp, Artificial Sequence
  Description of Artificial Sequence: Synthetic oligonucleotide
  Target: LAMA2; (+) strand; PAM type: NNGRRT; PAM sequence: GAGAAT
tcaaagtcatgaatcagaaa

SEQ ID NO: 29618 - DNA, 20 bp, Artificial Sequence
  Description of Artificial Sequence: Synthetic oligonucleotide
  Target: LAMA2; (+) strand; PAM type: NNGRRT; PAM sequence: ATGGAT
agaatttcgttttacaaatg

SEQ ID NO: 29619 - DNA, 20 bp, Artificial Sequence
  Description of Artificial Sequence: Synthetic oligonucleotide
  Target: LAMA2; (+) strand; PAM type: NNGRRT; PAM sequence: GAGAGT
ttttgtttttatgtcagttt

SEQ ID NO: 29620 - DNA, 20 bp, Artificial Sequence
  Description of Artificial Sequence: Synthetic oligonucleotide
  Target: LAMA2; (+) strand; PAM type: NNGRRT; PAM sequence: AAGAAT
ttatgtcagtttgagagtag

SEQ ID NO: 29621 - DNA, 20 bp, Artificial Sequence
  Description of Artificial Sequence: Synthetic oligonucleotide
  Target: LAMA2; (+) strand; PAM type: NNGRRT; PAM sequence: TGGAAT
ataattaaactgatgttctt

SEQ ID NO: 29622 - DNA, 20 bp, Artificial Sequence
  Description of Artificial Sequence: Synthetic oligonucleotide
  Target: LAMA2; (+) strand; PAM type: NNGRRT; PAM sequence: GAGGAT
aaactgatgttctttggaat

SEQ ID NO: 29623 - DNA, 20 bp, Artificial Sequence
  Description of Artificial Sequence: Synthetic oligonucleotide
  Target: LAMA2; (+) strand; PAM type: NNGRRT; PAM sequence: CTGAAT
ggatggagacacatagttat

SEQ ID NO: 29624 - DNA, 20 bp, Artificial Sequence
  Description of Artificial Sequence: Synthetic oligonucleotide
  Target: LAMA2; (+) strand; PAM type: NNGRRT; PAM sequence: TAGAAT
taagtagatttttactattc

SEQ ID NO: 29625 - DNA, 20 bp, Artificial Sequence
  Description of Artificial Sequence: Synthetic oligonucleotide
  Target: LAMA2; (+) strand; PAM type: NNGRRT; PAM sequence: ATGAAT
ttactattctagaatatgta

SEQ ID NO: 29626 - DNA, 20 bp, Artificial Sequence
  Description of Artificial Sequence: Synthetic oligonucleotide
  Target: LAMA2; (+) strand; PAM type: NNGRRT; PAM sequence: ATGAAT
tattctagaatatgtaatga

SEQ ID NO: 29627 - DNA, 20 bp, Artificial Sequence
  Description of Artificial Sequence: Synthetic oligonucleotide
  Target: LAMA2; (+) strand; PAM type: NNGRRT; PAM sequence: TTGAAT
gaagtacaaaaacatcttcc

SEQ ID NO: 29628 - DNA, 20 bp, Artificial Sequence
  Description of Artificial Sequence: Synthetic oligonucleotide
  Target: LAMA2; (+) strand; PAM type: NNGRRT; PAM sequence: AGGAAT
ataatctacatcacagtgaa

SEQ ID NO: 29629 - DNA, 20 bp, Artificial Sequence
  Description of Artificial Sequence: Synthetic oligonucleotide
  Target: LAMA2; (+) strand; PAM type: NNGRRT; PAM sequence: TTGAAT
atgacaaatgctagtcaatg

SEQ ID NO: 29630 - DNA, 20 bp, Artificial Sequence
  Description of Artificial Sequence: Synthetic oligonucleotide
  Target: LAMA2; (+) strand; PAM type: NNGRRT; PAM sequence: GTGGAT
tatatctttttattaatatg

SEQ ID NO: 29631 - DNA, 20 bp, Artificial Sequence
  Description of Artificial Sequence: Synthetic oligonucleotide
  Target: LAMA2; (+) strand; PAM type: NNGRRT; PAM sequence: GAGAAT
tagaaaatacttaagttctt

SEQ ID NO: 29632 - DNA, 20 bp, Artificial Sequence
  Description of Artificial Sequence: Synthetic oligonucleotide
  Target: LAMA2; (+) strand; PAM type: NNGRRT; PAM sequence: AAGGGT
agttcttgagaatagttgga

SEQ ID NO: 29633 - DNA, 20 bp, Artificial Sequence
  Description of Artificial Sequence: Synthetic oligonucleotide
  Target: LAMA2; (+) strand; PAM type: NNGRRT; PAM sequence: TAGAAT
aagctgtatcattacgttct

SEQ ID NO: 29634 - DNA, 20 bp, Artificial Sequence
  Description of Artificial Sequence: Synthetic oligonucleotide
  Target: LAMA2; (+) strand; PAM type: NNGRRT; PAM sequence: CAGGGT
atcattacgttcttagaata

SEQ ID NO: 29635 - DNA, 20 bp, Artificial Sequence
  Description of Artificial Sequence: Synthetic oligonucleotide
  Target: LAMA2; (+) strand; PAM type: NNGRRT; PAM sequence: GCGGGT
cagcattttgggaggctgag

SEQ ID NO: 29636 - DNA, 20 bp, Artificial Sequence
  Description of Artificial Sequence: Synthetic oligonucleotide
  Target: LAMA2; (+) strand; PAM type: NNGRRT; PAM sequence: GTGGAT
attttgggaggctgaggcgg

SEQ ID NO: 29637 - DNA, 20 bp, Artificial Sequence
  Description of Artificial Sequence: Synthetic oligonucleotide
  Target: LAMA2; (+) strand; PAM type: NNGRRT; PAM sequence: CTGGGT
actaaaaatacaaaaattac

SEQ ID NO: 29638 - DNA, 20 bp, Artificial Sequence
  Description of Artificial Sequence: Synthetic oligonucleotide
  Target: LAMA2; (+) strand; PAM type: NNGRRT; PAM sequence: GAGAAT
tacttgggaggctgaggcag

SEQ ID NO: 29639 - DNA, 20 bp, Artificial Sequence
  Description of Artificial Sequence: Synthetic oligonucleotide
  Target: LAMA2; (+) strand; PAM type: NNGRRT; PAM sequence: AAGGGT
aaaaaaataataataataat

SEQ ID NO: 29640 - DNA, 20 bp, Artificial Sequence
  Description of Artificial Sequence: Synthetic oligonucleotide
  Target: LAMA2; (+) strand; PAM type: NNGRRT; PAM sequence: AGGAGT
taataataagggtaaataca

SEQ ID NO: 29641 - DNA, 20 bp, Artificial Sequence
  Description of Artificial Sequence: Synthetic oligonucleotide
  Target: LAMA2; (+) strand; PAM type: NNGRRT; PAM sequence: TTGAAT
gtaaatacaaggagtgtgtt

SEQ ID NO: 29642 - DNA, 20 bp, Artificial Sequence
  Description of Artificial Sequence: Synthetic oligonucleotide
  Target: LAMA2; (+) strand; PAM type: NNGRRT; PAM sequence: TAGAAT
gaatacaaaatatctatttt

SEQ ID NO: 29643 - DNA, 20 bp, Artificial Sequence
  Description of Artificial Sequence: Synthetic oligonucleotide
  Target: LAMA2; (+) strand; PAM type: NNGRRT; PAM sequence: ATGAGT
atttttagaatctcaaaccc

SEQ ID NO: 29644 - DNA, 20 bp, Artificial Sequence
  Description of Artificial Sequence: Synthetic oligonucleotide
  Target: LAMA2; (+) strand; PAM type: NNGRRT; PAM sequence: ATGAAT
tattaattatgtaaatgcac

SEQ ID NO: 29645 - DNA, 20 bp, Artificial Sequence
  Description of Artificial Sequence: Synthetic oligonucleotide
  Target: LAMA2; (+) strand; PAM type: NNGRRT; PAM sequence: TCGAAT
ccaaattatttggttaatct

SEQ ID NO: 29646 - DNA, 20 bp, Artificial Sequence
  Description of Artificial Sequence: Synthetic oligonucleotide
  Target: LAMA2; (+) strand; PAM type: NNGRRT; PAM sequence: AAGGAT
gctatgcattactctgtaca

SEQ ID NO: 29647 - DNA, 20 bp, Artificial Sequence
  Description of Artificial Sequence: Synthetic oligonucleotide
  Target: LAMA2; (+) strand; PAM type: NNGRRT; PAM sequence: TGGAAT
aattcaaatattttctcttt

SEQ ID NO: 29648 - DNA, 20 bp, Artificial Sequence
  Description of Artificial Sequence: Synthetic oligonucleotide
  Target: LAMA2; (+) strand; PAM type: NNGRRT; PAM sequence: TTGAAT
tcttaaaccataagaccttt

SEQ ID NO: 29649 - DNA, 20 bp, Artificial Sequence
  Description of Artificial Sequence: Synthetic oligonucleotide
  Target: LAMA2; (+) strand; PAM type: NNGRRT; PAM sequence: CAGAGT
gaaaaaaattaaacaaatat

SEQ ID NO: 29650 - DNA, 20 bp, Artificial Sequence
  Description of Artificial Sequence: Synthetic oligonucleotide
  Target: LAMA2; (+) strand; PAM type: NNGRRT; PAM sequence: CAGGAT
atcagagttgctgggaaccc

SEQ ID NO: 29651 - DNA, 20 bp, Artificial Sequence
  Description of Artificial Sequence: Synthetic oligonucleotide
  Target: LAMA2; (+) strand; PAM type: NNGRRT; PAM sequence: GTGGAT
accccaggatataatctact

SEQ ID NO: 29652 - DNA, 20 bp, Artificial Sequence
  Description of Artificial Sequence: Synthetic oligonucleotide
  Target: LAMA2; (+) strand; PAM type: NNGRRT; PAM sequence: GAGAGT
ttcagcttctccaacttgaa

SEQ ID NO: 29653 - DNA, 20 bp, Artificial Sequence
  Description of Artificial Sequence: Synthetic oligonucleotide
  Target: LAMA2; (+) strand; PAM type: NNGRRT; PAM sequence: ATGGGT
gttttgaagatcaaatacaa

SEQ ID NO: 29654 - DNA, 20 bp, Artificial Sequence
  Description of Artificial Sequence: Synthetic oligonucleotide
  Target: LAMA2; (+) strand; PAM type: NNGRRT; PAM sequence: AGGGGT
catcagattttcattgccat

SEQ ID NO: 29655 - DNA, 20 bp, Artificial Sequence
  Description of Artificial Sequence: Synthetic oligonucleotide
  Target: LAMA2; (+) strand; PAM type: NNGRRT; PAM sequence: ATGAAT
aagtgcagaaactatctgta

SEQ ID NO: 29656 - DNA, 20 bp, Artificial Sequence
  Description of Artificial Sequence: Synthetic oligonucleotide
  Target: LAMA2; (+) strand; PAM type: NNGRRT; PAM sequence: GTGAGT
acttttaatatatcaaaaat

SEQ ID NO: 29657 - DNA, 20 bp, Artificial Sequence
  Description of Artificial Sequence: Synthetic oligonucleotide
  Target: LAMA2; (+) strand; PAM type: NNGRRT; PAM sequence: GAGAAT
caaattataaagctgttcct

SEQ ID NO: 29658 - DNA, 20 bp, Artificial Sequence
  Description of Artificial Sequence: Synthetic oligonucleotide
  Target: LAMA2; (+) strand; PAM type: NNGRRT; PAM sequence: TAGAAT
aattgtcatccactcatagg

SEQ ID NO: 29659 - DNA, 20 bp, Artificial Sequence
  Description of Artificial Sequence: Synthetic oligonucleotide
  Target: LAMA2; (+) strand; PAM type: NNGRRT; PAM sequence: GAGAAT
ctcataggtagaataaatga

SEQ ID NO: 29660 - DNA, 20 bp, Artificial Sequence
  Description of Artificial Sequence: Synthetic oligonucleotide
  Target: LAMA2; (+) strand; PAM type: NNGRRT; PAM sequence: AAGAAT
ccaattctttttattcctta

SEQ ID NO: 29661 - DNA, 20 bp, Artificial Sequence
  Description of Artificial Sequence: Synthetic oligonucleotide
  Target: LAMA2; (+) strand; PAM type: NNGRRT; PAM sequence: TTGAGT
atttgctggtttgtataagt

SEQ ID NO: 29662 - DNA, 20 bp, Artificial Sequence
  Description of Artificial Sequence: Synthetic oligonucleotide
  Target: LAMA2; (+) strand; PAM type: NNGRRT; PAM sequence: ATGGGT
cagtatatatgtcaaaatac

SEQ ID NO: 29663 - DNA, 20 bp, Artificial Sequence
  Description of Artificial Sequence: Synthetic oligonucleotide
  Target: LAMA2; (+) strand; PAM type: NNGRRT; PAM sequence: AGGAGT
ccaggaagtatgtgatccat

SEQ ID NO: 29664 - DNA, 20 bp, Artificial Sequence
  Description of Artificial Sequence: Synthetic oligonucleotide
  Target: LAMA2; (+) strand; PAM type: NNGRRT; PAM sequence: TAGAAT
agataccatctcacaccaat

SEQ ID NO: 29665 - DNA, 20 bp, Artificial Sequence
  Description of Artificial Sequence: Synthetic oligonucleotide
  Target: LAMA2; (+) strand; PAM type: NNGRRT; PAM sequence: GAGGAT
aggaaacaacagatgctgga

SEQ ID NO: 29666 - DNA, 20 bp, Artificial Sequence
  Description of Artificial Sequence: Synthetic oligonucleotide
  Target: LAMA2; (+) strand; PAM type: NNGRRT; PAM sequence: AGGGAT
agtcagtgtggtgattcctc

SEQ ID NO: 29667 - DNA, 20 bp, Artificial Sequence
  Description of Artificial Sequence: Synthetic oligonucleotide
  Target: LAMA2; (+) strand; PAM type: NNGRRT; PAM sequence: CTGGGT
ttgacccagccatcccatta

SEQ ID NO: 29668 - DNA, 20 bp, Artificial Sequence
  Description of Artificial Sequence: Synthetic oligonucleotide
  Target: LAMA2; (+) strand; PAM type: NNGRRT; PAM sequence: CTGGAT
aaatgtccaacaatgataga

SEQ ID NO: 29669 - DNA, 20 bp, Artificial Sequence
  Description of Artificial Sequence: Synthetic oligonucleotide
  Target: LAMA2; (+) strand; PAM type: NNGRRT; PAM sequence: TGGAAT
aatgtggcacatatacacca

SEQ ID NO: 29670 - DNA, 20 bp, Artificial Sequence
  Description of Artificial Sequence: Synthetic oligonucleotide
  Target: LAMA2; (+) strand; PAM type: NNGRRT; PAM sequence: ATGAGT
ctatgcagccataaaaaatg

SEQ ID NO: 29671 - DNA, 20 bp, Artificial Sequence
  Description of Artificial Sequence: Synthetic oligonucleotide
  Target: LAMA2; (+) strand; PAM type: NNGRRT; PAM sequence: ATGGAT
ttcatgtcctttgtagggac

SEQ ID NO: 29672 - DNA, 20 bp, Artificial Sequence
  Description of Artificial Sequence: Synthetic oligonucleotide
  Target: LAMA2; (+) strand; PAM type: NNGRRT; PAM sequence: GGGAAT
acatgttctcactcataggt

SEQ ID NO: 29673 - DNA, 20 bp, Artificial Sequence
  Description of Artificial Sequence: Synthetic oligonucleotide
  Target: LAMA2; (+) strand; PAM type: NNGRRT; PAM sequence: TGGGGT
tcacactctggggactgttg

SEQ ID NO: 29674 - DNA, 20 bp, Artificial Sequence
  Description of Artificial Sequence: Synthetic oligonucleotide
  Target: LAMA2; (+) strand; PAM type: NNGRRT; PAM sequence: ACGAGT
gcattaggagatgctaaatg

SEQ ID NO: 29675 - DNA, 20 bp, Artificial Sequence
  Description of Artificial Sequence: Synthetic oligonucleotide
  Target: LAMA2; (+) strand; PAM type: NNGRRT; PAM sequence: ATGGGT
agatgctaaatgacgagtta

SEQ ID NO: 29676 - DNA, 20 bp, Artificial Sequence
  Description of Artificial Sequence: Synthetic oligonucleotide
  Target: LAMA2; (+) strand; PAM type: NNGRRT; PAM sequence: ATGGAT
attaaaaaaaagttcatcgt

SEQ ID NO: 29677 - DNA, 20 bp, Artificial Sequence
  Description of Artificial Sequence: Synthetic oligonucleotide
  Target: LAMA2; (+) strand; PAM type: NNGRRT; PAM sequence: TGGAGT
gacactgggctgctccctgg

SEQ ID NO: 29678 - DNA, 20 bp, Artificial Sequence
  Description of Artificial Sequence: Synthetic oligonucleotide
  Target: LAMA2; (+) strand; PAM type: NNGRRT; PAM sequence: GAGGAT
aatttgcatttaccaagtgg

SEQ ID NO: 29679 - DNA, 20 bp, Artificial Sequence
  Description of Artificial Sequence: Synthetic oligonucleotide
  Target: LAMA2; (+) strand; PAM type: NNGRRT; PAM sequence: CTGAAT
tttaactaaatgaagctttg

SEQ ID NO: 29680 - DNA, 20 bp, Artificial Sequence
  Description of Artificial Sequence: Synthetic oligonucleotide
  Target: LAMA2; (+) strand; PAM type: NNGRRT; PAM sequence: CTGGAT
aaagtaatgacaaggtaaaa

SEQ ID NO: 29681 - DNA, 20 bp, Artificial Sequence
  Description of Artificial Sequence: Synthetic oligonucleotide
  Target: LAMA2; (+) strand; PAM type: NNGRRT; PAM sequence: AGGAAT
tgaaaattggtcaacaagtg

SEQ ID NO: 29682 - DNA, 20 bp, Artificial Sequence
  Description of Artificial Sequence: Synthetic oligonucleotide
  Target: LAMA2; (+) strand; PAM type: NNGRRT; PAM sequence: GAGAAT
accaagaacctaatttgtga

SEQ ID NO: 29683 - DNA, 20 bp, Artificial Sequence
  Description of Artificial Sequence: Synthetic oligonucleotide
  Target: LAMA2; (+) strand; PAM type: NNGRRT; PAM sequence: ATGAGT
atttgtgagagaattgaaaa

SEQ ID NO: 29684 - DNA, 20 bp, Artificial Sequence
  Description of Artificial Sequence: Synthetic oligonucleotide
  Target: LAMA2; (+) strand; PAM type: NNGRRT; PAM sequence: GAGGGT
cagcactgtgggaggccgag

SEQ ID NO: 29685 - DNA, 20 bp, Artificial Sequence
  Description of Artificial Sequence: Synthetic oligonucleotide
  Target: LAMA2; (+) strand; PAM type: NNGRRT; PAM sequence: GTGGAT
actgtgggaggccgaggagg

SEQ ID NO: 29686 - DNA, 20 bp, Artificial Sequence
  Description of Artificial Sequence: Synthetic oligonucleotide
  Target: LAMA2; (+) strand; PAM type: NNGRRT; PAM sequence: AGGAGT
agggtggatcacttcagatc

SEQ ID NO: 29687 - DNA, 20 bp, Artificial Sequence
  Description of Artificial Sequence: Synthetic oligonucleotide
  Target: LAMA2; (+) strand; PAM type: NNGRRT; PAM sequence: GAGAAT
tactcgtgaggctgaggcag

SEQ ID NO: 29688 - DNA, 20 bp, Artificial Sequence
  Description of Artificial Sequence: Synthetic oligonucleotide
  Target: LAMA2; (+) strand; PAM type: NNGRRT; PAM sequence: AAGGAT
atacagctaaaaacatatgg

SEQ ID NO: 29689 - DNA, 20 bp, Artificial Sequence
  Description of Artificial Sequence: Synthetic oligonucleotide
  Target: LAMA2; (+) strand; PAM type: NNGRRT; PAM sequence: TTGAGT
taaaaacatatggaaggatc

SEQ ID NO: 29690 - DNA, 20 bp, Artificial Sequence
  Description of Artificial Sequence: Synthetic oligonucleotide
  Target: LAMA2; (+) strand; PAM type: NNGRRT; PAM sequence: TAGAAT
ttgatgagcaaatcaatatg

SEQ ID NO: 29691 - DNA, 20 bp, Artificial Sequence
  Description of Artificial Sequence: Synthetic oligonucleotide
  Target: LAMA2; (+) strand; PAM type: NNGRRT; PAM sequence: ATGGAT
gtatcattatcaaagagata

SEQ ID NO: 29692 - DNA, 20 bp, Artificial Sequence
  Description of Artificial Sequence: Synthetic oligonucleotide
  Target: LAMA2; (+) strand; PAM type: NNGRRT; PAM sequence: AAGAAT
tcaatttattggcaataatt

SEQ ID NO: 29693 - DNA, 20 bp, Artificial Sequence
  Description of Artificial Sequence: Synthetic oligonucleotide
  Target: LAMA2; (+) strand; PAM type: NNGRRT; PAM sequence: TTGAAT
acagaaatattgaaaagtat

SEQ ID NO: 29694 - DNA, 20 bp, Artificial Sequence
  Description of Artificial Sequence: Synthetic oligonucleotide
  Target: LAMA2; (+) strand; PAM type: NNGRRT; PAM sequence: TGGAAT
taaacaaattgtaatatatc

SEQ ID NO: 29695 - DNA, 20 bp, Artificial Sequence
  Description of Artificial Sequence: Synthetic oligonucleotide
  Target: LAMA2; (+) strand; PAM type: NNGRRT; PAM sequence: CAGGGT
aaacacaaaattcagcatgt

SEQ ID NO: 29696 - DNA, 20 bp, Artificial Sequence
  Description of Artificial Sequence: Synthetic oligonucleotide
  Target: LAMA2; (+) strand; PAM type: NNGRRT; PAM sequence: CAGGGT
agcatgtcagggttatgctg

SEQ ID NO: 29697 - DNA, 20 bp, Artificial Sequence
  Description of Artificial Sequence: Synthetic oligonucleotide
  Target: LAMA2; (+) strand; PAM type: NNGRRT; PAM sequence: CGGGGT
agggttatgctgcagggtaa

SEQ ID NO: 29698 - DNA, 20 bp, Artificial Sequence
  Description of Artificial Sequence: Synthetic oligonucleotide
  Target: LAMA2; (+) strand; PAM type: NNGRRT; PAM sequence: GAGGAT
ctgcagggtaacggggtggt

SEQ ID NO: 29699 - DNA, 20 bp, Artificial Sequence
  Description of Artificial Sequence: Synthetic oligonucleotide
  Target: LAMA2; (+) strand; PAM type: NNGRRT; PAM sequence: TTGGGT
cattgctcatgttcaacttc

SEQ ID NO: 29700 - DNA, 20 bp, Artificial Sequence
  Description of Artificial Sequence: Synthetic oligonucleotide
  Target: LAMA2; (+) strand; PAM type: NNGRRT; PAM sequence: TTGGGT
ctcatgttcaacttcttggg

SEQ ID NO: 29701 - DNA, 20 bp, Artificial Sequence
  Description of Artificial Sequence: Synthetic oligonucleotide
  Target: LAMA2; (+) strand; PAM type: NNGRRT; PAM sequence: GGGAAT
actaacaaagtaataagcca

SEQ ID NO: 29702 - DNA, 20 bp, Artificial Sequence
  Description of Artificial Sequence: Synthetic oligonucleotide
  Target: LAMA2; (+) strand; PAM type: NNGRRT; PAM sequence: ATGGGT
gtaataagccagggaataca

SEQ ID NO: 29703 - DNA, 20 bp, Artificial Sequence
  Description of Artificial Sequence: Synthetic oligonucleotide
  Target: LAMA2; (+) strand; PAM type: NNGRRT; PAM sequence: TAGAGT
gggtaaatgaaaaaataaaa

SEQ ID NO: 29704 - DNA, 20 bp, Artificial Sequence
  Description of Artificial Sequence: Synthetic oligonucleotide
  Target: LAMA2; (+) strand; PAM type: NNGRRT; PAM sequence: TGGAAT
aagtcttctcatctttaaaa

SEQ ID NO: 29705 - DNA, 20 bp, Artificial Sequence
  Description of Artificial Sequence: Synthetic oligonucleotide
  Target: LAMA2; (+) strand; PAM type: NNGRRT; PAM sequence: AGGAGT
atctttaaaatggaattagt

SEQ ID NO: 29706 - DNA, 20 bp, Artificial Sequence
  Description of Artificial Sequence: Synthetic oligonucleotide
  Target: LAMA2; (+) strand; PAM type: NNGRRT; PAM sequence: TAGGGT
agtaggagtacttagcttcc

SEQ ID NO: 29707 - DNA, 20 bp, Artificial Sequence
  Description of Artificial Sequence: Synthetic oligonucleotide
  Target: LAMA2; (+) strand; PAM type: NNGRRT; PAM sequence: TAGAAT
gttatgaaggttgaaattct

SEQ ID NO: 29708 - DNA, 20 bp, Artificial Sequence
  Description of Artificial Sequence: Synthetic oligonucleotide
  Target: LAMA2; (+) strand; PAM type: NNGRRT; PAM sequence: TAGGGT
tttttttttaagttaagttc

SEQ ID NO: 29709 - DNA, 20 bp, Artificial Sequence
  Description of Artificial Sequence: Synthetic oligonucleotide
  Target: LAMA2; (+) strand; PAM type: NNGRRT; PAM sequence: ATGAGT
tcattgttcagttcccacct

SEQ ID NO: 29710 - DNA, 20 bp, Artificial Sequence
  Description of Artificial Sequence: Synthetic oligonucleotide
  Target: LAMA2; (+) strand; PAM type: NNGRRT; PAM sequence: GAGAAT
ttcagttcccacctatgagt

SEQ ID NO: 29711 - DNA, 20 bp, Artificial Sequence
  Description of Artificial Sequence: Synthetic oligonucleotide
  Target: LAMA2; (+) strand; PAM type: NNGRRT; PAM sequence: GAGAAT
tgtccttgtgatagtttgct

SEQ ID NO: 29712 - DNA, 20 bp, Artificial Sequence
  Description of Artificial Sequence: Synthetic oligonucleotide
  Target: LAMA2; (+) strand; PAM type: NNGRRT; PAM sequence: TTGGGT
agtctatcattgatggacat

SEQ ID NO: 29713 - DNA, 20 bp, Artificial Sequence
  Description of Artificial Sequence: Synthetic oligonucleotide
  Target: LAMA2; (+) strand; PAM type: NNGRRT; PAM sequence: ATGAAT
ggttccaagtctttgctatt

SEQ ID NO: 29714 - DNA, 20 bp, Artificial Sequence
  Description of Artificial Sequence: Synthetic oligonucleotide
  Target: LAMA2; (+) strand; PAM type: NNGRRT; PAM sequence: TTGGGT
gcagcatgatttataatcct

SEQ ID NO: 29715 - DNA, 20 bp, Artificial Sequence
  Description of Artificial Sequence: Synthetic oligonucleotide
  Target: LAMA2; (+) strand; PAM type: NNGRRT; PAM sequence: TGGGAT
tttgggtatatacccagtaa

SEQ ID NO: 29716 - DNA, 20 bp, Artificial Sequence
  Description of Artificial Sequence: Synthetic oligonucleotide
  Target: LAMA2; (+) strand; PAM type: NNGRRT; PAM sequence: CTGGGT
tatacccagtaatgggatga

SEQ ID NO: 29717 - DNA, 20 bp, Artificial Sequence
  Description of Artificial Sequence: Synthetic oligonucleotide
  Target: LAMA2; (+) strand; PAM type: NNGRRT; PAM sequence: AGGAAT
tttctagttctagatccttg

SEQ ID NO: 29718 - DNA, 20 bp, Artificial Sequence
  Description of Artificial Sequence: Synthetic oligonucleotide
  Target: LAMA2; (+) strand; PAM type: NNGRRT; PAM sequence: TAGGAT
gatcaccagtctaactggtg

SEQ ID NO: 29719 - DNA, 20 bp, Artificial Sequence
  Description of Artificial Sequence: Synthetic oligonucleotide
  Target: LAMA2; (+) strand; PAM type: NNGRRT; PAM sequence: TGGGGT
tatcctttgcccaattttga

SEQ ID NO: 29720 - DNA, 20 bp, Artificial Sequence
  Description of Artificial Sequence: Synthetic oligonucleotide
  Target: LAMA2; (+) strand; PAM type: NNGRRT; PAM sequence: TTGAGT
tttttttcttgtaagtttgt

SEQ ID NO: 29721 - DNA, 20 bp, Artificial Sequence
  Description of Artificial Sequence: Synthetic oligonucleotide
  Target: LAMA2; (+) strand; PAM type: NNGRRT; PAM sequence: CTGGAT
gtttgagttctttgtagatt

SEQ ID NO: 29722 - DNA, 20 bp, Artificial Sequence
  Description of Artificial Sequence: Synthetic oligonucleotide
  Target: LAMA2; (+) strand; PAM type: NNGRRT; PAM sequence: ATGAGT
ggatattagccctttgtcag

SEQ ID NO: 29723 - DNA, 20 bp, Artificial Sequence
  Description of Artificial Sequence: Synthetic oligonucleotide
  Target: LAMA2; (+) strand; PAM type: NNGRRT; PAM sequence: TAGGGT
gtattgcctaggttttcttc

SEQ ID NO: 29724 - DNA, 20 bp, Artificial Sequence
  Description of Artificial Sequence: Synthetic oligonucleotide
  Target: LAMA2; (+) strand; PAM type: NNGRRT; PAM sequence: TTGAAT
atttaagtctttaatccatc

SEQ ID NO: 29725 - DNA, 20 bp, Artificial Sequence
  Description of Artificial Sequence: Synthetic oligonucleotide
  Target: LAMA2; (+) strand; PAM type: NNGRRT; PAM sequence: AGGGAT
ttttgtataaggtgtaagga

SEQ ID NO: 29726 - DNA, 20 bp, Artificial Sequence
  Description of Artificial Sequence: Synthetic oligonucleotide
  Target: LAMA2; (+) strand; PAM type: NNGRRT; PAM sequence: GGGAAT
ccagcaccatttattaaata

SEQ ID NO: 29727 - DNA, 20 bp, Artificial Sequence
  Description of Artificial Sequence: Synthetic oligonucleotide
  Target: LAMA2; (+) strand; PAM type: NNGRRT; PAM sequence: TAGGAT
ccagctttgttcttttggct

SEQ ID NO: 29728 - DNA, 20 bp, Artificial Sequence
  Description of Artificial Sequence: Synthetic oligonucleotide
  Target: LAMA2; (+) strand; PAM type: NNGRRT; PAM sequence: GGGAAT
ttttggcttaggattgactt

SEQ ID NO: 29729 - DNA, 20 bp, Artificial Sequence
  Description of Artificial Sequence: Synthetic oligonucleotide
  Target: LAMA2; (+) strand; PAM type: NNGRRT; PAM sequence: AGGGAT
aaagtcactggtagcttgat

SEQ ID NO: 29730 - DNA, 20 bp, Artificial Sequence
  Description of Artificial Sequence: Synthetic oligonucleotide
  Target: LAMA2; (+) strand; PAM type: NNGRRT; PAM sequence: TTGAAT
gtagcttgatagggatggca

SEQ ID NO: 29731 - DNA, 20 bp, Artificial Sequence
  Description of Artificial Sequence: Synthetic oligonucleotide
  Target: LAMA2; (+) strand; PAM type: NNGRRT; PAM sequence: ATGAAT
atagggatggcattgaatct

SEQ ID NO: 29732 - DNA, 20 bp, Artificial Sequence
  Description of Artificial Sequence: Synthetic oligonucleotide
  Target: LAMA2; (+) strand; PAM type: NNGRRT; PAM sequence: TGGAAT
attcttcctatccataagca

SEQ ID NO: 29733 - DNA, 20 bp, Artificial Sequence
  Description of Artificial Sequence: Synthetic oligonucleotide
  Target: LAMA2; (+) strand; PAM type: NNGRRT; PAM sequence: TTGGAT
tccttcacatcccttgtaag

SEQ ID NO: 29734 - DNA, 20 bp, Artificial Sequence
  Description of Artificial Sequence: Synthetic oligonucleotide
  Target: LAMA2; (+) strand; PAM type: NNGRRT; PAM sequence: GTGAAT
ttattctctttgaagcaatt

SEQ ID NO: 29735 - DNA, 20 bp, Artificial Sequence
  Description of Artificial Sequence: Synthetic oligonucleotide
  Target: LAMA2; (+) strand; PAM type: NNGRRT; PAM sequence: AGGAGT
tctttgaagcaattgtgaat

SEQ ID NO: 29736 - DNA, 20 bp, Artificial Sequence
  Description of Artificial Sequence: Synthetic oligonucleotide
  Target: LAMA2; (+) strand; PAM type: NNGRRT; PAM sequence: AAGAAT
attgtctgttgttagtgtat

SEQ ID NO: 29737 - DNA, 20 bp, Artificial Sequence
  Description of Artificial Sequence: Synthetic oligonucleotide
  Target: LAMA2; (+) strand; PAM type: NNGRRT; PAM sequence: TGGGGT
gagattttgggctgagacaa

SEQ ID NO: 29738 - DNA, 20 bp, Artificial Sequence
  Description of Artificial Sequence: Synthetic oligonucleotide
  Target: LAMA2; (+) strand; PAM type: NNGRRT; PAM sequence: TTGAAT
ccagaacttccaacactatg

SEQ ID NO: 29739 - DNA, 20 bp, Artificial Sequence
  Description of Artificial Sequence: Synthetic oligonucleotide
  Target: LAMA2; (+) strand; PAM type: NNGRRT; PAM sequence: AGGAGT
cttccaacactatgttgaat

SEQ ID NO: 29740 - DNA, 20 bp, Artificial Sequence
  Description of Artificial Sequence: Synthetic oligonucleotide
  Target: LAMA2; (+) strand; PAM type: NNGRRT; PAM sequence: GGGAAT
gtcttgtgccagttttcaaa

SEQ ID NO: 29741 - DNA, 20 bp, Artificial Sequence
  Description of Artificial Sequence: Synthetic oligonucleotide
  Target: LAMA2; (+) strand; PAM type: NNGRRT; PAM sequence: GTGGGT
cattcagtatgatattggct

SEQ ID NO: 29742 - DNA, 20 bp, Artificial Sequence
  Description of Artificial Sequence: Synthetic oligonucleotide
  Target: LAMA2; (+) strand; PAM type: NNGRRT; PAM sequence: GAGAGT
ccatcaatacctaatttatt

SEQ ID NO: 29743 - DNA, 20 bp, Artificial Sequence
  Description of Artificial Sequence: Synthetic oligonucleotide
  Target: LAMA2; (+) strand; PAM type: NNGRRT; PAM sequence: TTGAAT
gtttttggcatgaagggctg

SEQ ID NO: 29744 - DNA, 20 bp, Artificial Sequence
  Description of Artificial Sequence: Synthetic oligonucleotide
  Target: LAMA2; (+) strand; PAM type: NNGRRT; PAM sequence: CTGGAT
atgtggtttttgtttatatg

SEQ ID NO: 29745 - DNA, 20 bp, Artificial Sequence
  Description of Artificial Sequence: Synthetic oligonucleotide
  Target: LAMA2; (+) strand; PAM type: NNGRRT; PAM sequence: GTGGAT
ttgaaccagccttgcatccc

SEQ ID NO: 29746 - DNA, 20 bp, Artificial Sequence
  Description of Artificial Sequence: Synthetic oligonucleotide
  Target: LAMA2; (+) strand; PAM type: NNGRRT; PAM sequence: GTGGAT
atgaagcccacttgatcgtg

SEQ ID NO: 29747 - DNA, 20 bp, Artificial Sequence
  Description of Artificial Sequence: Synthetic oligonucleotide
  Target: LAMA2; (+) strand; PAM type: NNGRRT; PAM sequence: GAGGAT
cagtttgccattattttatt

SEQ ID NO: 29748 - DNA, 20 bp, Artificial Sequence
  Description of Artificial Sequence: Synthetic oligonucleotide
  Target: LAMA2; (+) strand; PAM type: NNGRRT; PAM sequence: AGGGAT
tttttgcattgatgttcatc

SEQ ID NO: 29749 - DNA, 20 bp, Artificial Sequence
  Description of Artificial Sequence: Synthetic oligonucleotide
  Target: LAMA2; (+) strand; PAM type: NNGRRT; PAM sequence: GAGGAT
ctgccaggcttttgtatcag

SEQ ID NO: 29750 - DNA, 20 bp, Artificial Sequence
  Description of Artificial Sequence: Synthetic oligonucleotide
  Target: LAMA2; (+) strand; PAM type: NNGRRT; PAM sequence: ATGAGT
gaggatgctggcctcatcaa

SEQ ID NO: 29751 - DNA, 20 bp, Artificial Sequence
  Description of Artificial Sequence: Synthetic oligonucleotide
  Target: LAMA2; (+) strand; PAM type: NNGRRT; PAM sequence: GAGGAT
gcctcatcaaatgagttaga

SEQ ID NO: 29752 - DNA, 20 bp, Artificial Sequence
  Description of Artificial Sequence: Synthetic oligonucleotide
  Target: LAMA2; (+) strand; PAM type: NNGRRT; PAM sequence: TGGAAT
ttccctctttttctattgat

SEQ ID NO: 29753 - DNA, 20 bp, Artificial Sequence
  Description of Artificial Sequence: Synthetic oligonucleotide
  Target: LAMA2; (+) strand; PAM type: NNGRRT; PAM sequence: AGGAAT
ttgattggaatagtttcaga

SEQ ID NO: 29754 - DNA, 20 bp, Artificial Sequence
  Description of Artificial Sequence: Synthetic oligonucleotide
  Target: LAMA2; (+) strand; PAM type: NNGRRT; PAM sequence: TAGAAT
cctcctccttgtacctctgg

SEQ ID NO: 29755 - DNA, 20 bp, Artificial Sequence
  Description of Artificial Sequence: Synthetic oligonucleotide
  Target: LAMA2; (+) strand; PAM type: NNGRRT; PAM sequence: GTGAAT
acctctggtagaattcggct

SEQ ID NO: 29756 - DNA, 20 bp, Artificial Sequence
  Description of Artificial Sequence: Synthetic oligonucleotide
  Target: LAMA2; (+) strand; PAM type: NNGRRT; PAM sequence: GAGGGT
tcttccttgtttagtattgg

SEQ ID NO: 29757 - DNA, 20 bp, Artificial Sequence
  Description of Artificial Sequence: Synthetic oligonucleotide
  Target: LAMA2; (+) strand; PAM type: NNGRRT; PAM sequence: AGGAAT
ttgggagggtgtatgtgtcc

SEQ ID NO: 29758 - DNA, 20 bp, Artificial Sequence
  Description of Artificial Sequence: Synthetic oligonucleotide
  Target: LAMA2; (+) strand; PAM type: NNGRRT; PAM sequence: TGGGAT
gatggtagtttgtatttctg

SEQ ID NO: 29759 - DNA, 20 bp, Artificial Sequence
  Description of Artificial Sequence: Synthetic oligonucleotide
  Target: LAMA2; (+) strand; PAM type: NNGRRT; PAM sequence: CTGGAT
tcttttcaaaaaatcatctc

SEQ ID NO: 29760 - DNA, 20 bp, Artificial Sequence
  Description of Artificial Sequence: Synthetic oligonucleotide
  Target: LAMA2; (+) strand; PAM type: NNGRRT; PAM sequence: AAGGGT
ctggattcactgatttgttg

SEQ ID NO: 29761 - DNA, 20 bp, Artificial Sequence
  Description of Artificial Sequence: Synthetic oligonucleotide
  Target: LAMA2; (+) strand; PAM type: NNGRRT; PAM sequence: TTGAGT
ttcttgccttctgctagctt

SEQ ID NO: 29762 - DNA, 20 bp, Artificial Sequence
  Description of Artificial Sequence: Synthetic oligonucleotide
  Target: LAMA2; (+) strand; PAM type: NNGRRT; PAM sequence: TAGGGT
agttcttttaattgtgatgt

SEQ ID NO: 29763 - DNA, 20 bp, Artificial Sequence
  Description of Artificial Sequence: Synthetic oligonucleotide
  Target: LAMA2; (+) strand; PAM type: NNGRRT; PAM sequence: TTGGAT
gtgatgttagggtgtcaatt

SEQ ID NO: 29764 - DNA, 20 bp, Artificial Sequence
  Description of Artificial Sequence: Synthetic oligonucleotide
  Target: LAMA2; (+) strand; PAM type: NNGRRT; PAM sequence: GTGAGT
atgtagttgagccgttttca

SEQ ID NO: 29765 - DNA, 20 bp, Artificial Sequence
  Description of Artificial Sequence: Synthetic oligonucleotide
  Target: LAMA2; (+) strand; PAM type: NNGRRT; PAM sequence: CTGAGT
tttcagtgagtttcttaatc

SEQ ID NO: 29766 - DNA, 20 bp, Artificial Sequence
  Description of Artificial Sequence: Synthetic oligonucleotide
  Target: LAMA2; (+) strand; PAM type: NNGRRT; PAM sequence: AGGAGT
ctgatcttttacatttgctg

SEQ ID NO: 29767 - DNA, 20 bp, Artificial Sequence
  Description of Artificial Sequence: Synthetic oligonucleotide
  Target: LAMA2; (+) strand; PAM type: NNGRRT; PAM sequence: TGGAAT
tccaactatgtggtcaattt

SEQ ID NO: 29768 - DNA, 20 bp, Artificial Sequence
  Description of Artificial Sequence: Synthetic oligonucleotide
  Target: LAMA2; (+) strand; PAM type: NNGRRT; PAM sequence: CAGAAT
aagtgtgatgtggtgctgag

SEQ ID NO: 29769 - DNA, 20 bp, Artificial Sequence
  Description of Artificial Sequence: Synthetic oligonucleotide
  Target: LAMA2; (+) strand; PAM type: NNGRRT; PAM sequence: TGGGGT
gaatgtatattctgttgatt

SEQ ID NO: 29770 - DNA, 20 bp, Artificial Sequence
  Description of Artificial Sequence: Synthetic oligonucleotide
  Target: LAMA2; (+) strand; PAM type: NNGRRT; PAM sequence: GAGAGT
tattctgttgatttggggtg

SEQ ID NO: 29771 - DNA, 20 bp, Artificial Sequence
  Description of Artificial Sequence: Synthetic oligonucleotide
  Target: LAMA2; (+) strand; PAM type: NNGRRT; PAM sequence: CTGAGT
taggtccacttggtgcagag

SEQ ID NO: 29772 - DNA, 20 bp, Artificial Sequence
  Description of Artificial Sequence: Synthetic oligonucleotide
  Target: LAMA2; (+) strand; PAM type: NNGRRT; PAM sequence: CTGGAT
tgcagagctgagttcaattc

SEQ ID NO: 29773 - DNA, 20 bp, Artificial Sequence
  Description of Artificial Sequence: Synthetic oligonucleotide
  Target: LAMA2; (+) strand; PAM type: NNGRRT; PAM sequence: TGGGGT
gatctgtctaatgttgacag

SEQ ID NO: 29774 - DNA, 20 bp, Artificial Sequence
  Description of Artificial Sequence: Synthetic oligonucleotide
  Target: LAMA2; (+) strand; PAM type: NNGRRT; PAM sequence: GGGAGT
gtctcccattattattgtgt

SEQ ID NO: 29775 - DNA, 20 bp, Artificial Sequence
  Description of Artificial Sequence: Synthetic oligonucleotide
  Target: LAMA2; (+) strand; PAM type: NNGRRT; PAM sequence: ATGAAT
ggtctctaaggacttgcttt

SEQ ID NO: 29776 - DNA, 20 bp, Artificial Sequence
  Description of Artificial Sequence: Synthetic oligonucleotide
  Target: LAMA2; (+) strand; PAM type: NNGRRT; PAM sequence: CTGAGT
taaggacttgctttatgaat

SEQ ID NO: 29777 - DNA, 20 bp, Artificial Sequence
  Description of Artificial Sequence: Synthetic oligonucleotide
  Target: LAMA2; (+) strand; PAM type: NNGRRT; PAM sequence: TTGGGT
tgaatctgagtgctcctgta

SEQ ID NO: 29778 - DNA, 20 bp, Artificial Sequence
  Description of Artificial Sequence: Synthetic oligonucleotide
  Target: LAMA2; (+) strand; PAM type: NNGRRT; PAM sequence: TAGGAT
gtattgggtgcatatatatt

SEQ ID NO: 29779 - DNA, 20 bp, Artificial Sequence
  Description of Artificial Sequence: Synthetic oligonucleotide
  Target: LAMA2; (+) strand; PAM type: NNGRRT; PAM sequence: TTGAAT
aggatagttagctcttcttg

SEQ ID NO: 29780 - DNA, 20 bp, Artificial Sequence
  Description of Artificial Sequence: Synthetic oligonucleotide
  Target: LAMA2; (+) strand; PAM type: NNGRRT; PAM sequence: ATGGGT
tgtgtgtctctgcacatgag

SEQ ID NO: 29781 - DNA, 20 bp, Artificial Sequence
  Description of Artificial Sequence: Synthetic oligonucleotide
  Target: LAMA2; (+) strand; PAM type: NNGRRT; PAM sequence: TTGAAT
ctgcacatgagatgggtctc

SEQ ID NO: 29782 - DNA, 20 bp, Artificial Sequence
  Description of Artificial Sequence: Synthetic oligonucleotide
  Target: LAMA2; (+) strand; PAM type: NNGRRT; PAM sequence: ATGGGT
ctcttgaatacagcacactg

SEQ ID NO: 29783 - DNA, 20 bp, Artificial Sequence
  Description of Artificial Sequence: Synthetic oligonucleotide
  Target: LAMA2; (+) strand; PAM type: NNGRRT; PAM sequence: TTGAGT
atacagcacactgatgggtc

SEQ ID NO: 29784 - DNA, 20 bp, Artificial Sequence
  Description of Artificial Sequence: Synthetic oligonucleotide
  Target: LAMA2; (+) strand; PAM type: NNGRRT; PAM sequence: GTGAAT
gtttaaggttaatattatgt

SEQ ID NO: 29785 - DNA, 20 bp, Artificial Sequence
  Description of Artificial Sequence: Synthetic oligonucleotide
  Target: LAMA2; (+) strand; PAM type: NNGRRT; PAM sequence: CTGGAT
acttatgaagcttagtttgg

SEQ ID NO: 29786 - DNA, 20 bp, Artificial Sequence
  Description of Artificial Sequence: Synthetic oligonucleotide
  Target: LAMA2; (+) strand; PAM type: NNGRRT; PAM sequence: CTGGGT
gtttggctggatatgaaatt

SEQ ID NO: 29787 - DNA, 20 bp, Artificial Sequence
  Description of Artificial Sequence: Synthetic oligonucleotide
  Target: LAMA2; (+) strand; PAM type: NNGRRT; PAM sequence: AAGAAT
ggttgaaaattcttttcttt

SEQ ID NO: 29788 - DNA, 20 bp, Artificial Sequence
  Description of Artificial Sequence: Synthetic oligonucleotide
  Target: LAMA2; (+) strand; PAM type: NNGRRT; PAM sequence: TTGAAT
aattcttttctttaagaatg

SEQ ID NO: 29789 - DNA, 20 bp, Artificial Sequence
  Description of Artificial Sequence: Synthetic oligonucleotide
  Target: LAMA2; (+) strand; PAM type: NNGRRT; PAM sequence: TAGAGT
ccccactctcttccggcttg

SEQ ID NO: 29790 - DNA, 20 bp, Artificial Sequence
  Description of Artificial Sequence: Synthetic oligonucleotide
  Target: LAMA2; (+) strand; PAM type: NNGRRT; PAM sequence: GAGGGT
agtctgatgggcttcccttt

SEQ ID NO: 29791 - DNA, 20 bp, Artificial Sequence
  Description of Artificial Sequence: Synthetic oligonucleotide
  Target: LAMA2; (+) strand; PAM type: NNGRRT; PAM sequence: GTGAAT
tttccttcatttcaactttg

SEQ ID NO: 29792 - DNA, 20 bp, Artificial Sequence
  Description of Artificial Sequence: Synthetic oligonucleotide
  Target: LAMA2; (+) strand; PAM type: NNGRRT; PAM sequence: AGGAGT
tcttgaagttgctcttctcg

SEQ ID NO: 29793 - DNA, 20 bp, Artificial Sequence
  Description of Artificial Sequence: Synthetic oligonucleotide
  Target: LAMA2; (+) strand; PAM type: NNGRRT; PAM sequence: CTGAAT
tgtggcattctctgtgtttc

SEQ ID NO: 29794 - DNA, 20 bp, Artificial Sequence
  Description of Artificial Sequence: Synthetic oligonucleotide
  Target: LAMA2; (+) strand; PAM type: NNGRRT; PAM sequence: TTGAAT
attctctgtgtttcctgaat

SEQ ID NO: 29795 - DNA, 20 bp, Artificial Sequence
  Description of Artificial Sequence: Synthetic oligonucleotide
  Target: LAMA2; (+) strand; PAM type: NNGRRT; PAM sequence: CTGGAT
gctaggttggggaagttctc

SEQ ID NO: 29796 - DNA, 20 bp, Artificial Sequence
  Description of Artificial Sequence: Synthetic oligonucleotide
  Target: LAMA2; (+) strand; PAM type: NNGRRT; PAM sequence: CAGAAT
ttctcctggataatatcctg

SEQ ID NO: 29797 - DNA, 20 bp, Artificial Sequence
  Description of Artificial Sequence: Synthetic oligonucleotide
  Target: LAMA2; (+) strand; PAM type: NNGRRT; PAM sequence: TCGAAT
ataccctttcttccagttga

SEQ ID NO: 29798 - DNA, 20 bp, Artificial Sequence
  Description of Artificial Sequence: Synthetic oligonucleotide
  Target: LAMA2; (+) strand; PAM type: NNGRRT; PAM sequence: ATGGGT
aggtttttagcttctttgtg

SEQ ID NO: 29799 - DNA, 20 bp, Artificial Sequence
  Description of Artificial Sequence: Synthetic oligonucleotide
  Target: LAMA2; (+) strand; PAM type: NNGRRT; PAM sequence: TAGAGT
aggagaggcgctctgatttt

SEQ ID NO: 29800 - DNA, 20 bp, Artificial Sequence
  Description of Artificial Sequence: Synthetic oligonucleotide
  Target: LAMA2; (+) strand; PAM type: NNGRRT; PAM sequence: ACGGAT
ttggtctttgatgatgatgt

SEQ ID NO: 29801 - DNA, 20 bp, Artificial Sequence
  Description of Artificial Sequence: Synthetic oligonucleotide
  Target: LAMA2; (+) strand; PAM type: NNGRRT; PAM sequence: TGGGGT
ctttgatgatgatgtacgga

SEQ ID NO: 29802 - DNA, 20 bp, Artificial Sequence
  Description of Artificial Sequence: Synthetic oligonucleotide
  Target: LAMA2; (+) strand; PAM type: NNGRRT; PAM sequence: GTGGGT
tgtacggatggggttttggt

SEQ ID NO: 29803 - DNA, 20 bp, Artificial Sequence
  Description of Artificial Sequence: Synthetic oligonucleotide
  Target: LAMA2; (+) strand; PAM type: NNGRRT; PAM sequence: TGGAGT
accctcagctgcaggtctgt

SEQ ID NO: 29804 - DNA, 20 bp, Artificial Sequence
  Description of Artificial Sequence: Synthetic oligonucleotide
  Target: LAMA2; (+) strand; PAM type: NNGRRT; PAM sequence: CTGGGT
ccactccagaccctgtttgc

SEQ ID NO: 29805 - DNA, 20 bp, Artificial Sequence
  Description of Artificial Sequence: Synthetic oligonucleotide
  Target: LAMA2; (+) strand; PAM type: NNGRRT; PAM sequence: AGGGGT
ctctggaagcttcgtctcag

SEQ ID NO: 29806 - DNA, 20 bp, Artificial Sequence
  Description of Artificial Sequence: Synthetic oligonucleotide
  Target: LAMA2; (+) strand; PAM type: NNGRRT; PAM sequence: TGGGAT
cagaggggtactcggccgtg

SEQ ID NO: 29807 - DNA, 20 bp, Artificial Sequence
  Description of Artificial Sequence: Synthetic oligonucleotide
  Target: LAMA2; (+) strand; PAM type: NNGRRT; PAM sequence: CTGGGT
gggatgtcagtctgccccta

SEQ ID NO: 29808 - DNA, 20 bp, Artificial Sequence
  Description of Artificial Sequence: Synthetic oligonucleotide
  Target: LAMA2; (+) strand; PAM type: NNGRRT; PAM sequence: AGGGAT
agttaggctattcagggctc

SEQ ID NO: 29809 - DNA, 20 bp, Artificial Sequence
  Description of Artificial Sequence: Synthetic oligonucleotide
  Target: LAMA2; (+) strand; PAM type: NNGRRT; PAM sequence: TGGAGT
ctatgtcctactcccagagg

SEQ ID NO: 29810 - DNA, 20 bp, Artificial Sequence
  Description of Artificial Sequence: Synthetic oligonucleotide
  Target: LAMA2; (+) strand; PAM type: NNGRRT; PAM sequence: TGGGAT
gggaccctccgagccaggtg

SEQ ID NO: 29811 - DNA, 20 bp, Artificial Sequence
  Description of Artificial Sequence: Synthetic oligonucleotide
  Target: LAMA2; (+) strand; PAM type: NNGRRT; PAM sequence: TAGGGT
ccattggaaaagcgtggtat

SEQ ID NO: 29812 - DNA, 20 bp, Artificial Sequence
  Description of Artificial Sequence: Synthetic oligonucleotide
  Target: LAMA2; (+) strand; PAM type: NNGRRT; PAM sequence: GGGAGT
gaaaagcgtggtattagggt

SEQ ID NO: 29813 - DNA, 20 bp, Artificial Sequence
  Description of Artificial Sequence: Synthetic oligonucleotide
  Target: LAMA2; (+) strand; PAM type: NNGRRT; PAM sequence: GGGAAT
agcttcccttggctaggaaa

SEQ ID NO: 29814 - DNA, 20 bp, Artificial Sequence
  Description of Artificial Sequence: Synthetic oligonucleotide
  Target: LAMA2; (+) strand; PAM type: NNGRRT; PAM sequence: CCGGGT
ttcctgaccccttgtgcttc

SEQ ID NO: 29815 - DNA, 20 bp, Artificial Sequence
  Description of Artificial Sequence: Synthetic oligonucleotide
  Target: LAMA2; (+) strand; PAM type: NNGRRT; PAM sequence: GAGAGT
aaagattgtaatatattgtt

SEQ ID NO: 29816 - DNA, 20 bp, Artificial Sequence
  Description of Artificial Sequence: Synthetic oligonucleotide
  Target: LAMA2; (+) strand; PAM type: NNGRRT; PAM sequence: GGGAGT
aatatattgttgagagtgaa

SEQ ID NO: 29817 - DNA, 20 bp, Artificial Sequence
  Description of Artificial Sequence: Synthetic oligonucleotide
  Target: LAMA2; (+) strand; PAM type: NNGRRT; PAM sequence: ATGGAT
ctgtggctctaactgtcctg

SEQ ID NO: 29818 - DNA, 20 bp, Artificial Sequence
  Description of Artificial Sequence: Synthetic oligonucleotide
  Target: LAMA2; (+) strand; PAM type: NNGRRT; PAM sequence: CAGGAT
attatatggttttagacatc

SEQ ID NO: 29819 - DNA, 20 bp, Artificial Sequence
  Description of Artificial Sequence: Synthetic oligonucleotide
  Target: LAMA2; (+) strand; PAM type: NNGRRT; PAM sequence: AGGAAT
catccaggatagacactgaa

SEQ ID NO: 29820 - DNA, 20 bp, Artificial Sequence
  Description of Artificial Sequence: Synthetic oligonucleotide
  Target: LAMA2; (+) strand; PAM type: NNGRRT; PAM sequence: TTGAAT
gtattcattgtgtgtatgta

SEQ ID NO: 29821 - DNA, 20 bp, Artificial Sequence
  Description of Artificial Sequence: Synthetic oligonucleotide
  Target: LAMA2; (+) strand; PAM type: NNGRRT; PAM sequence: GTGAAT
aactttctagtttccaaaca

SEQ ID NO: 29822 - DNA, 20 bp, Artificial Sequence
  Description of Artificial Sequence: Synthetic oligonucleotide
  Target: LAMA2; (+) strand; PAM type: NNGRRT; PAM sequence: GAGAAT
cttacattctagttagaaga

SEQ ID NO: 29823 - DNA, 20 bp, Artificial Sequence
  Description of Artificial Sequence: Synthetic oligonucleotide
  Target: LAMA2; (+) strand; PAM type: NNGRRT; PAM sequence: AAGGAT
tagagcatggagggcctagg

SEQ ID NO: 29824 - DNA, 20 bp, Artificial Sequence
  Description of Artificial Sequence: Synthetic oligonucleotide
  Target: LAMA2; (+) strand; PAM type: NNGRRT; PAM sequence: TTGAAT
cctaggaaggatgatagtgg

SEQ ID NO: 29825 - DNA, 20 bp, Artificial Sequence
  Description of Artificial Sequence: Synthetic oligonucleotide
  Target: LAMA2; (+) strand; PAM type: NNGRRT; PAM sequence: TAGAAT
gaatagactttaattttata

SEQ ID NO: 29826 - DNA, 20 bp, Artificial Sequence
  Description of Artificial Sequence: Synthetic oligonucleotide
  Target: LAMA2; (+) strand; PAM type: NNGRRT; PAM sequence: GTGGGT
ggtgactaggaaaaagttat

SEQ ID NO: 29827 - DNA, 20 bp, Artificial Sequence
  Description of Artificial Sequence: Synthetic oligonucleotide
  Target: LAMA2; (+) strand; PAM type: NNGRRT; PAM sequence: ATGAAT
aagtgaaaaggccctaagat

SEQ ID NO: 29828 - DNA, 20 bp, Artificial Sequence
  Description of Artificial Sequence: Synthetic oligonucleotide
  Target: LAMA2; (+) strand; PAM type: NNGRRT; PAM sequence: AAGGAT
tggcatgttcaaagaccctc

SEQ ID NO: 29829 - DNA, 20 bp, Artificial Sequence
  Description of Artificial Sequence: Synthetic oligonucleotide
  Target: LAMA2; (+) strand; PAM type: NNGRRT; PAM sequence: TGGGGT
tgttcaaagaccctcaagga

SEQ ID NO: 29830 - DNA, 20 bp, Artificial Sequence
  Description of Artificial Sequence: Synthetic oligonucleotide
  Target: LAMA2; (+) strand; PAM type: NNGRRT; PAM sequence: AAGAGT
aagaccctcaaggatggggt

SEQ ID NO: 29831 - DNA, 20 bp, Artificial Sequence
  Description of Artificial Sequence: Synthetic oligonucleotide
  Target: LAMA2; (+) strand; PAM type: NNGRRT; PAM sequence: AAGAGT
aggatggggtaagagtgggg

SEQ ID NO: 29832 - DNA, 20 bp, Artificial Sequence
  Description of Artificial Sequence: Synthetic oligonucleotide
  Target: LAMA2; (+) strand; PAM type: NNGRRT; PAM sequence: AAGGAT
gtaagagtggggaagagttg

SEQ ID NO: 29833 - DNA, 20 bp, Artificial Sequence
  Description of Artificial Sequence: Synthetic oligonucleotide
  Target: LAMA2; (+) strand; PAM type: NNGRRT; PAM sequence: CTGAGT
aaacacagacatgtaatgat

SEQ ID NO: 29834 - DNA, 20 bp, Artificial Sequence
  Description of Artificial Sequence: Synthetic oligonucleotide
  Target: LAMA2; (+) strand; PAM type: NNGRRT; PAM sequence: TAGGGT
tgatctgagttatgttttaa

SEQ ID NO: 29835 - DNA, 20 bp, Artificial Sequence
  Description of Artificial Sequence: Synthetic oligonucleotide
  Target: LAMA2; (+) strand; PAM type: NNGRRT; PAM sequence: GAGAGT
gttagtatgattgttacttt

SEQ ID NO: 29836 - DNA, 20 bp, Artificial Sequence
  Description of Artificial Sequence: Synthetic oligonucleotide
  Target: LAMA2; (+) strand; PAM type: NNGRRT; PAM sequence: TTGAAT
attgttactttgagagttgg

SEQ ID NO: 29837 - DNA, 20 bp, Artificial Sequence
  Description of Artificial Sequence: Synthetic oligonucleotide
  Target: LAMA2; (+) strand; PAM type: NNGRRT; PAM sequence: AGGAGT
ctgtggaacatgaaagaaag

SEQ ID NO: 29838 - DNA, 20 bp, Artificial Sequence
  Description of Artificial Sequence: Synthetic oligonucleotide
  Target: LAMA2; (+) strand; PAM type: NNGRRT; PAM sequence: GAGGAT
acatgaaagaaagaggagtt

SEQ ID NO: 29839 - DNA, 20 bp, Artificial Sequence
  Description of Artificial Sequence: Synthetic oligonucleotide
  Target: LAMA2; (+) strand; PAM type: NNGRRT; PAM sequence: TTGGGT
gtatacaagtctgaagttca

SEQ ID NO: 29840 - DNA, 20 bp, Artificial Sequence
  Description of Artificial Sequence: Synthetic oligonucleotide
  Target: LAMA2; (+) strand; PAM type: NNGRRT; PAM sequence: TTGAAT
gaactgaagatgtaaaatgt

SEQ ID NO: 29841 - DNA, 20 bp, Artificial Sequence
  Description of Artificial Sequence: Synthetic oligonucleotide
  Target: LAMA2; (+) strand; PAM type: NNGRRT; PAM sequence: ATGAAT
tagatgtgataaccaagaaa

SEQ ID NO: 29842 - DNA, 20 bp, Artificial Sequence
  Description of Artificial Sequence: Synthetic oligonucleotide
  Target: LAMA2; (+) strand; PAM type: NNGRRT; PAM sequence: AAGGAT
cgagacaaaatatgagatct

SEQ ID NO: 29843 - DNA, 20 bp, Artificial Sequence
  Description of Artificial Sequence: Synthetic oligonucleotide
  Target: LAMA2; (+) strand; PAM type: NNGRRT; PAM sequence: AAGAAT
gacgaactagaaaggagact

SEQ ID NO: 29844 - DNA, 20 bp, Artificial Sequence
  Description of Artificial Sequence: Synthetic oligonucleotide
  Target: LAMA2; (+) strand; PAM type: NNGRRT; PAM sequence: TTGAAT
agtcatgtattgaaagtcat

SEQ ID NO: 29845 - DNA, 20 bp, Artificial Sequence
  Description of Artificial Sequence: Synthetic oligonucleotide
  Target: LAMA2; (+) strand; PAM type: NNGRRT; PAM sequence: ATGAAT
atgtattgaaagtcatttga

SEQ ID NO: 29846 - DNA, 20 bp, Artificial Sequence
  Description of Artificial Sequence: Synthetic oligonucleotide
  Target: LAMA2; (+) strand; PAM type: NNGRRT; PAM sequence: GAGAAT
ggccaaataaggtaagaaat

SEQ ID NO: 29847 - DNA, 20 bp, Artificial Sequence
  Description of Artificial Sequence: Synthetic oligonucleotide
  Target: LAMA2; (+) strand; PAM type: NNGRRT; PAM sequence: TTGGAT
taagaaatgagaattgacca

SEQ ID NO: 29848 - DNA, 20 bp, Artificial Sequence
  Description of Artificial Sequence: Synthetic oligonucleotide
  Target: LAMA2; (+) strand; PAM type: NNGRRT; PAM sequence: AAGAGT
attcgaccaatgaccttgag

SEQ ID NO: 29849 - DNA, 20 bp, Artificial Sequence
  Description of Artificial Sequence: Synthetic oligonucleotide
  Target: LAMA2; (+) strand; PAM type: NNGRRT; PAM sequence: TGGAAT
ccttgagaagagtatttcag

SEQ ID NO: 29850 - DNA, 20 bp, Artificial Sequence
  Description of Artificial Sequence: Synthetic oligonucleotide
  Target: LAMA2; (+) strand; PAM type: NNGRRT; PAM sequence: TAGAGT
atgaagggcaacatggaaac

SEQ ID NO: 29851 - DNA, 20 bp, Artificial Sequence
  Description of Artificial Sequence: Synthetic oligonucleotide
  Target: LAMA2; (+) strand; PAM type: NNGRRT; PAM sequence: GTGGAT
agggcaacatggaaactaga

SEQ ID NO: 29852 - DNA, 20 bp, Artificial Sequence
  Description of Artificial Sequence: Synthetic oligonucleotide
  Target: LAMA2; (+) strand; PAM type: NNGRRT; PAM sequence: GAGAAT
aaactagagtggatttaaga

SEQ ID NO: 29853 - DNA, 20 bp, Artificial Sequence
  Description of Artificial Sequence: Synthetic oligonucleotide
  Target: LAMA2; (+) strand; PAM type: NNGRRT; PAM sequence: AAGAAT
tttaagagagaataagaaga

SEQ ID NO: 29854 - DNA, 20 bp, Artificial Sequence
  Description of Artificial Sequence: Synthetic oligonucleotide
  Target: LAMA2; (+) strand; PAM type: NNGRRT; PAM sequence: TGGGAT
taagggcatagatactttta

SEQ ID NO: 29855 - DNA, 20 bp, Artificial Sequence
  Description of Artificial Sequence: Synthetic oligonucleotide
  Target: LAMA2; (+) strand; PAM type: NNGRRT; PAM sequence: TGGAAT
atagatacttttatgggatg

SEQ ID NO: 29856 - DNA, 20 bp, Artificial Sequence
  Description of Artificial Sequence: Synthetic oligonucleotide
  Target: LAMA2; (+) strand; PAM type: NNGRRT; PAM sequence: TTGAGT
tcttagaaaatagaaaataa

SEQ ID NO: 29857 - DNA, 20 bp, Artificial Sequence
  Description of Artificial Sequence: Synthetic oligonucleotide
  Target: LAMA2; (+) strand; PAM type: NNGRRT; PAM sequence: AGGGAT
aacatggaccagacagcatt

SEQ ID NO: 29858 - DNA, 20 bp, Artificial Sequence
  Description of Artificial Sequence: Synthetic oligonucleotide
  Target: LAMA2; (+) strand; PAM type: NNGRRT; PAM sequence: GTGAGT
agacagcattagggatctat

SEQ ID NO: 29859 - DNA, 20 bp, Artificial Sequence
  Description of Artificial Sequence: Synthetic oligonucleotide
  Target: LAMA2; (+) strand; PAM type: NNGRRT; PAM sequence: ATGAAT
tctatgtgagtttagtaatc

SEQ ID NO: 29860 - DNA, 20 bp, Artificial Sequence
  Description of Artificial Sequence: Synthetic oligonucleotide
  Target: LAMA2; (+) strand; PAM type: NNGRRT; PAM sequence: ATGAGT
aaggtcagtcaacaggtact

SEQ ID NO: 29861 - DNA, 20 bp, Artificial Sequence
  Description of Artificial Sequence: Synthetic oligonucleotide
  Target: LAMA2; (+) strand; PAM type: NNGRRT; PAM sequence: GTGAAT
tgacgttgtggttaagccaa

SEQ ID NO: 29862 - DNA, 20 bp, Artificial Sequence
  Description of Artificial Sequence: Synthetic oligonucleotide
  Target: LAMA2; (+) strand; PAM type: NNGRRT; PAM sequence: TGGAAT
gagattaaaataattgacca

SEQ ID NO: 29863 - DNA, 20 bp, Artificial Sequence
  Description of Artificial Sequence: Synthetic oligonucleotide
  Target: LAMA2; (+) strand; PAM type: NNGRRT; PAM sequence: GAGGAT
taggactatacaaggcctta

SEQ ID NO: 29864 - DNA, 20 bp, Artificial Sequence
  Description of Artificial Sequence: Synthetic oligonucleotide
  Target: LAMA2; (+) strand; PAM type: NNGRRT; PAM sequence: AAGGAT
tatttagtatccttggccta

SEQ ID NO: 29865 - DNA, 20 bp, Artificial Sequence
  Description of Artificial Sequence: Synthetic oligonucleotide
  Target: LAMA2; (+) strand; PAM type: NNGRRT; PAM sequence: TAGAAT
cattgcatttccttcttttt

SEQ ID NO: 29866 - DNA, 20 bp, Artificial Sequence
  Description of Artificial Sequence: Synthetic oligonucleotide
  Target: LAMA2; (+) strand; PAM type: NNGRRT; PAM sequence: TGGAAT
catttccttcttttttagaa

SEQ ID NO: 29867 - DNA, 20 bp, Artificial Sequence
  Description of Artificial Sequence: Synthetic oligonucleotide
  Target: LAMA2; (+) strand; PAM type: NNGRRT; PAM sequence: AGGAAT
ttatgctttactgaacacat

SEQ ID NO: 29868 - DNA, 20 bp, Artificial Sequence
  Description of Artificial Sequence: Synthetic oligonucleotide
  Target: LAMA2; (+) strand; PAM type: NNGRRT; PAM sequence: TGGAAT
ggagcattcatgcatatatt

SEQ ID NO: 29869 - DNA, 20 bp, Artificial Sequence
  Description of Artificial Sequence: Synthetic oligonucleotide
  Target: LAMA2; (+) strand; PAM type: NNGRRT; PAM sequence: CAGAGT
gttcatgtgtatacctggcg

SEQ ID NO: 29870 - DNA, 20 bp, Artificial Sequence
  Description of Artificial Sequence: Synthetic oligonucleotide
  Target: LAMA2; (+) strand; PAM type: NNGRRT; PAM sequence: ATGAAT
ttcccacagtgccatgaagt

SEQ ID NO: 29871 - DNA, 20 bp, Artificial Sequence
  Description of Artificial Sequence: Synthetic oligonucleotide
  Target: LAMA2; (+) strand; PAM type: NNGRRT; PAM sequence: GAGAAT
aaaaatgtgtctatgacttg

SEQ ID NO: 29872 - DNA, 20 bp, Artificial Sequence
  Description of Artificial Sequence: Synthetic oligonucleotide
  Target: LAMA2; (+) strand; PAM type: NNGRRT; PAM sequence: TTGAAT
cccttccattcatgttgaca

SEQ ID NO: 29873 - DNA, 20 bp, Artificial Sequence
  Description of Artificial Sequence: Synthetic oligonucleotide
  Target: LAMA2; (+) strand; PAM type: NNGRRT; PAM sequence: CTGAAT
tgatgattaaaatagtgagc

SEQ ID NO: 29874 - DNA, 20 bp, Artificial Sequence
  Description of Artificial Sequence: Synthetic oligonucleotide
  Target: LAMA2; (+) strand; PAM type: NNGRRT; PAM sequence: TGGAGT
atatagccatgcaatatata

SEQ ID NO: 29875 - DNA, 20 bp, Artificial Sequence
  Description of Artificial Sequence: Synthetic oligonucleotide
  Target: LAMA2; (+) strand; PAM type: NNGRRT; PAM sequence: CAGAAT
gaagacattttcttgtttgg

SEQ ID NO: 29876 - DNA, 20 bp, Artificial Sequence
  Description of Artificial Sequence: Synthetic oligonucleotide
  Target: LAMA2; (+) strand; PAM type: NNGRRT; PAM sequence: TGGAGT
aagttttactaaatttattt

SEQ ID NO: 29877 - DNA, 20 bp, Artificial Sequence
  Description of Artificial Sequence: Synthetic oligonucleotide
  Target: LAMA2; (+) strand; PAM type: NNGRRT; PAM sequence: CAGAAT
tcctgttgttagaaggctgt

SEQ ID NO: 29878 - DNA, 20 bp, Artificial Sequence
  Description of Artificial Sequence: Synthetic oligonucleotide
  Target: LAMA2; (+) strand; PAM type: NNGRRT; PAM sequence: ATGGAT
tcaaaattataataatagca

SEQ ID NO: 29879 - DNA, 20 bp, Artificial Sequence
  Description of Artificial Sequence: Synthetic oligonucleotide
  Target: LAMA2; (+) strand; PAM type: NNGRRT; PAM sequence: GTGAAT
tcaaattaaaattctggcta

SEQ ID NO: 29880 - DNA, 20 bp, Artificial Sequence
  Description of Artificial Sequence: Synthetic oligonucleotide
  Target: LAMA2; (+) strand; PAM type: NNGRRT; PAM sequence: CTGAAT
ctcctccaagatacccatag

SEQ ID NO: 29881 - DNA, 20 bp, Artificial Sequence
  Description of Artificial Sequence: Synthetic oligonucleotide
  Target: LAMA2; (+) strand; PAM type: NNGRRT; PAM sequence: CCGAAT
tcctgcgttatccaggtgga

SEQ ID NO: 29882 - DNA, 20 bp, Artificial Sequence
  Description of Artificial Sequence: Synthetic oligonucleotide
  Target: LAMA2; (+) strand; PAM type: NNGRRT; PAM sequence: GGGGGT
gagaccttaaaagtagaaga

SEQ ID NO: 29883 - DNA, 20 bp, Artificial Sequence
  Description of Artificial Sequence: Synthetic oligonucleotide
  Target: LAMA2; (+) strand; PAM type: NNGRRT; PAM sequence: CAGAGT
ttaaaagtagaagagggggt

SEQ ID NO: 29884 - DNA, 20 bp, Artificial Sequence
  Description of Artificial Sequence: Synthetic oligonucleotide
  Target: LAMA2; (+) strand; PAM type: NNGRRT; PAM sequence: GAGAGT
catttctggctttaaagatg

SEQ ID NO: 29885 - DNA, 20 bp, Artificial Sequence
  Description of Artificial Sequence: Synthetic oligonucleotide
  Target: LAMA2; (+) strand; PAM type: NNGRRT; PAM sequence: AGGAAT
atggagagtcccttgaacca

SEQ ID NO: 29886 - DNA, 20 bp, Artificial Sequence
  Description of Artificial Sequence: Synthetic oligonucleotide
  Target: LAMA2; (+) strand; PAM type: NNGRRT; PAM sequence: GTGAAT
agtcccttgaaccaaggaat

SEQ ID NO: 29887 - DNA, 20 bp, Artificial Sequence
  Description of Artificial Sequence: Synthetic oligonucleotide
  Target: LAMA2; (+) strand; PAM type: NNGRRT; PAM sequence: ATGAAT
cagttccacaaccacaagaa

SEQ ID NO: 29888 - DNA, 20 bp, Artificial Sequence
  Description of Artificial Sequence: Synthetic oligonucleotide
  Target: LAMA2; (+) strand; PAM type: NNGRRT; PAM sequence: CTGAAT
aaatgaattctgccaacaac

SEQ ID NO: 29889 - DNA, 20 bp, Artificial Sequence
  Description of Artificial Sequence: Synthetic oligonucleotide
  Target: LAMA2; (+) strand; PAM type: NNGRRT; PAM sequence: AGGAAT
ctcctctagagccaccagaa

SEQ ID NO: 29890 - DNA, 20 bp, Artificial Sequence
  Description of Artificial Sequence: Synthetic oligonucleotide
  Target: LAMA2; (+) strand; PAM type: NNGRRT; PAM sequence: TGGAAT
tagctaaaggagacccatat

SEQ ID NO: 29891 - DNA, 20 bp, Artificial Sequence
  Description of Artificial Sequence: Synthetic oligonucleotide
  Target: LAMA2; (+) strand; PAM type: NNGRRT; PAM sequence: AAGGAT
ctacagaactgtattccaac

SEQ ID NO: 29892 - DNA, 20 bp, Artificial Sequence
  Description of Artificial Sequence: Synthetic oligonucleotide
  Target: LAMA2; (+) strand; PAM type: NNGRRT; PAM sequence: TGGAAT
tccaacaaggatgcatatgt

SEQ ID NO: 29893 - DNA, 20 bp, Artificial Sequence
  Description of Artificial Sequence: Synthetic oligonucleotide
  Target: LAMA2; (+) strand; PAM type: NNGRRT; PAM sequence: AGGGAT
agttgacccttgcacaatgc

SEQ ID NO: 29894 - DNA, 20 bp, Artificial Sequence
  Description of Artificial Sequence: Synthetic oligonucleotide
  Target: LAMA2; (+) strand; PAM type: NNGRRT; PAM sequence: AGGGAT
ccttgcacaatgcagggatt

SEQ ID NO: 29895 - DNA, 20 bp, Artificial Sequence
  Description of Artificial Sequence: Synthetic oligonucleotide
  Target: LAMA2; (+) strand; PAM type: NNGRRT; PAM sequence: AAGAGT
tccctaaaaacataactact

SEQ ID NO: 29896 - DNA, 20 bp, Artificial Sequence
  Description of Artificial Sequence: Synthetic oligonucleotide
  Target: LAMA2; (+) strand; PAM type: NNGRRT; PAM sequence: AGGGGT
taaggaggaggaagaagagg

SEQ ID NO: 29897 - DNA, 20 bp, Artificial Sequence
  Description of Artificial Sequence: Synthetic oligonucleotide
  Target: LAMA2; (+) strand; PAM type: NNGRRT; PAM sequence: TGGGAT
ccaagatttggagaaagcaa

SEQ ID NO: 29898 - DNA, 20 bp, Artificial Sequence
  Description of Artificial Sequence: Synthetic oligonucleotide
  Target: LAMA2; (+) strand; PAM type: NNGRRT; PAM sequence: AAGGGT
ttttccttttccccttcact

SEQ ID NO: 29899 - DNA, 20 bp, Artificial Sequence
  Description of Artificial Sequence: Synthetic oligonucleotide
  Target: LAMA2; (+) strand; PAM type: NNGRRT; PAM sequence: CAGGGT
ttgtgagacaaattttgaca

SEQ ID NO: 29900 - DNA, 20 bp, Artificial Sequence
  Description of Artificial Sequence: Synthetic oligonucleotide
  Target: LAMA2; (+) strand; PAM type: NNGRRT; PAM sequence: CCGAGT
ctcactatgggaagttgcag

SEQ ID NO: 29901 - DNA, 20 bp, Artificial Sequence
  Description of Artificial Sequence: Synthetic oligonucleotide
  Target: LAMA2; (+) strand; PAM type: NNGRRT; PAM sequence: AAGAGT
gaagttgcagccgagtagtg

SEQ ID NO: 29902 - DNA, 20 bp, Artificial Sequence
  Description of Artificial Sequence: Synthetic oligonucleotide
  Target: LAMA2; (+) strand; PAM type: NNGRRT; PAM sequence: CTGAAT
tcagagggcaccccattttg

SEQ ID NO: 29903 - DNA, 20 bp, Artificial Sequence
  Description of Artificial Sequence: Synthetic oligonucleotide
  Target: LAMA2; (+) strand; PAM type: NNGRRT; PAM sequence: TTGAGT
accccattttgctgaatttc

SEQ ID NO: 29904 - DNA, 20 bp, Artificial Sequence
  Description of Artificial Sequence: Synthetic oligonucleotide
  Target: LAMA2; (+) strand; PAM type: NNGRRT; PAM sequence: CAGAAT
tgagttttttacttatatca

SEQ ID NO: 29905 - DNA, 20 bp, Artificial Sequence
  Description of Artificial Sequence: Synthetic oligonucleotide
  Target: LAMA2; (+) strand; PAM type: NNGRRT; PAM sequence: CAGGAT
ttttacttatatcacagaat

SEQ ID NO: 29906 - DNA, 20 bp, Artificial Sequence
  Description of Artificial Sequence: Synthetic oligonucleotide
  Target: LAMA2; (+) strand; PAM type: NNGRRT; PAM sequence: AAGAAT
gatgagaagtaagttgaaaa

SEQ ID NO: 29907 - DNA, 20 bp, Artificial Sequence
  Description of Artificial Sequence: Synthetic oligonucleotide
  Target: LAMA2; (+) strand; PAM type: NNGRRT; PAM sequence: TGGAAT
ctaccatatacatgttatct

SEQ ID NO: 29908 - DNA, 20 bp, Artificial Sequence
  Description of Artificial Sequence: Synthetic oligonucleotide
  Target: LAMA2; (+) strand; PAM type: NNGRRT; PAM sequence: TGGAAT
tatacatgttatcttggaat

SEQ ID NO: 29909 - DNA, 20 bp, Artificial Sequence
  Description of Artificial Sequence: Synthetic oligonucleotide
  Target: LAMA2; (+) strand; PAM type: NNGRRT; PAM sequence: TTGAAT
tagcataaatacagtttaaa

SEQ ID NO: 29910 - DNA, 20 bp, Artificial Sequence
  Description of Artificial Sequence: Synthetic oligonucleotide
  Target: LAMA2; (+) strand; PAM type: NNGRRT; PAM sequence: GGGGGT
taaaaacaaaatatttattt

SEQ ID NO: 29911 - DNA, 20 bp, Artificial Sequence
  Description of Artificial Sequence: Synthetic oligonucleotide
  Target: LAMA2; (+) strand; PAM type: NNGRRT; PAM sequence: AGGAAT
attcaatagataaaccacct

SEQ ID NO: 29912 - DNA, 20 bp, Artificial Sequence
  Description of Artificial Sequence: Synthetic oligonucleotide
  Target: LAMA2; (+) strand; PAM type: NNGRRT; PAM sequence: TTGAGT
gtaaattgaggtctatgttt

SEQ ID NO: 29913 - DNA, 20 bp, Artificial Sequence
  Description of Artificial Sequence: Synthetic oligonucleotide
  Target: LAMA2; (+) strand; PAM type: NNGRRT; PAM sequence: GTGAAT
attgaggtctatgtttttga

SEQ ID NO: 29914 - DNA, 20 bp, Artificial Sequence
  Description of Artificial Sequence: Synthetic oligonucleotide
  Target: LAMA2; (+) strand; PAM type: NNGRRT; PAM sequence: GGGAGT
aatgtatgatttttaaaagt

SEQ ID NO: 29915 - DNA, 20 bp, Artificial Sequence
  Description of Artificial Sequence: Synthetic oligonucleotide
  Target: LAMA2; (+) strand; PAM type: NNGRRT; PAM sequence: GTGAAT
agcaaattttacattcacta

SEQ ID NO: 29916 - DNA, 20 bp, Artificial Sequence
  Description of Artificial Sequence: Synthetic oligonucleotide
  Target: LAMA2; (+) strand; PAM type: NNGRRT; PAM sequence: TAGAGT
acattaggtatttcagtacg

SEQ ID NO: 29917 - DNA, 20 bp, Artificial Sequence
  Description of Artificial Sequence: Synthetic oligonucleotide
  Target: LAMA2; (+) strand; PAM type: NNGRRT; PAM sequence: AAGAAT
acgtagagtttgtggacaaa

SEQ ID NO: 29918 - DNA, 20 bp, Artificial Sequence
  Description of Artificial Sequence: Synthetic oligonucleotide
  Target: LAMA2; (+) strand; PAM type: NNGRRT; PAM sequence: TAGAAT
cttaccaattactatgctac

SEQ ID NO: 29919 - DNA, 20 bp, Artificial Sequence
  Description of Artificial Sequence: Synthetic oligonucleotide
  Target: LAMA2; (+) strand; PAM type: NNGRRT; PAM sequence: GTGAAT
ttaccaagccttagtgaaaa

SEQ ID NO: 29920 - DNA, 20 bp, Artificial Sequence
  Description of Artificial Sequence: Synthetic oligonucleotide
  Target: LAMA2; (+) strand; PAM type: NNGRRT; PAM sequence: ATGAAT
caagccttagtgaaaagtga

SEQ ID NO: 29921 - DNA, 20 bp, Artificial Sequence
  Description of Artificial Sequence: Synthetic oligonucleotide
  Target: LAMA2; (+) strand; PAM type: NNGRRT; PAM sequence: GAGAGT
ataaatatttgcaccccttt

SEQ ID NO: 29922 - DNA, 20 bp, Artificial Sequence
  Description of Artificial Sequence: Synthetic oligonucleotide
  Target: LAMA2; (+) strand; PAM type: NNGRRT; PAM sequence: TGGAAT
tgaactcttagcaggaactt

SEQ ID NO: 29923 - DNA, 20 bp, Artificial Sequence
  Description of Artificial Sequence: Synthetic oligonucleotide
  Target: LAMA2; (+) strand; PAM type: NNGRRT; PAM sequence: GAGGGT
caggaactttggaatgtcct

SEQ ID NO: 29924 - DNA, 20 bp, Artificial Sequence
  Description of Artificial Sequence: Synthetic oligonucleotide
  Target: LAMA2; (+) strand; PAM type: NNGRRT; PAM sequence: AAGGGT
gtttgtactcctttgttcta

SEQ ID NO: 29925 - DNA, 20 bp, Artificial Sequence
  Description of Artificial Sequence: Synthetic oligonucleotide
  Target: LAMA2; (+) strand; PAM type: NNGRRT; PAM sequence: GGGAAT
aaagggtacctatagtttat

SEQ ID NO: 29926 - DNA, 20 bp, Artificial Sequence
  Description of Artificial Sequence: Synthetic oligonucleotide
  Target: LAMA2; (+) strand; PAM type: NNGRRT; PAM sequence: TTGGGT
ttcttcttctccttcctctt

SEQ ID NO: 29927 - DNA, 20 bp, Artificial Sequence
  Description of Artificial Sequence: Synthetic oligonucleotide
  Target: LAMA2; (+) strand; PAM type: NNGRRT; PAM sequence: GGGAAT
ttttattatcatttaagtca

SEQ ID NO: 29928 - DNA, 20 bp, Artificial Sequence
  Description of Artificial Sequence: Synthetic oligonucleotide
  Target: LAMA2; (+) strand; PAM type: NNGRRT; PAM sequence: ATGAAT
tgtgttaaacattagttcat

SEQ ID NO: 29929 - DNA, 20 bp, Artificial Sequence
  Description of Artificial Sequence: Synthetic oligonucleotide
  Target: LAMA2; (+) strand; PAM type: NNGRRT; PAM sequence: CTGAAT
tcacccttctataaaaacct

SEQ ID NO: 29930 - DNA, 20 bp, Artificial Sequence
  Description of Artificial Sequence: Synthetic oligonucleotide
  Target: LAMA2; (+) strand; PAM type: NNGRRT; PAM sequence: CTGAAT
ctataaaaacctctgaatat

SEQ ID NO: 29931 - DNA, 20 bp, Artificial Sequence
  Description of Artificial Sequence: Synthetic oligonucleotide
  Target: LAMA2; (+) strand; PAM type: NNGRRT; PAM sequence: ATGAGT
gtagtaaggctgatattttt

SEQ ID NO: 29932 - DNA, 20 bp, Artificial Sequence
  Description of Artificial Sequence: Synthetic oligonucleotide
  Target: LAMA2; (+) strand; PAM type: NNGRRT; PAM sequence: AAGAAT
tcatctgacaaaattaattt

SEQ ID NO: 29933 - DNA, 20 bp, Artificial Sequence
  Description of Artificial Sequence: Synthetic oligonucleotide
  Target: LAMA2; (+) strand; PAM type: NNGRRT; PAM sequence: TTGGAT
aatttgaagttaattccata

SEQ ID NO: 29934 - DNA, 20 bp, Artificial Sequence
  Description of Artificial Sequence: Synthetic oligonucleotide
  Target: LAMA2; (+) strand; PAM type: NNGRRT; PAM sequence: TTGAAT
atctatgattgtgtatttca

SEQ ID NO: 29935 - DNA, 20 bp, Artificial Sequence
  Description of Artificial Sequence: Synthetic oligonucleotide
  Target: LAMA2; (+) strand; PAM type: NNGRRT; PAM sequence: ATGAAT
atgattgtgtatttcattga

SEQ ID NO: 29936 - DNA, 20 bp, Artificial Sequence
  Description of Artificial Sequence: Synthetic oligonucleotide
  Target: LAMA2; (+) strand; PAM type: NNGRRT; PAM sequence: GAGAAT
aaggttgtgtgtggtgtttt

SEQ ID NO: 29937 - DNA, 20 bp, Artificial Sequence
  Description of Artificial Sequence: Synthetic oligonucleotide
  Target: LAMA2; (+) strand; PAM type: NNGRRT; PAM sequence: ATGAAT
tgtggtgttttgagaatgta

SEQ ID NO: 29938 - DNA, 20 bp, Artificial Sequence
  Description of Artificial Sequence: Synthetic oligonucleotide
  Target: LAMA2; (+) strand; PAM type: NNGRRT; PAM sequence: TAGAGT
acatatccaaagccacattg

SEQ ID NO: 29939 - DNA, 20 bp, Artificial Sequence
  Description of Artificial Sequence: Synthetic oligonucleotide
  Target: LAMA2; (+) strand; PAM type: NNGRRT; PAM sequence: GTGAGT
ttgcaaagcataatgtcagt

SEQ ID NO: 29940 - DNA, 20 bp, Artificial Sequence
  Description of Artificial Sequence: Synthetic oligonucleotide
  Target: LAMA2; (+) strand; PAM type: NNGRRT; PAM sequence: TGGAGT
gttgttgttgttgttggaga

SEQ ID NO: 29941 - DNA, 20 bp, Artificial Sequence
  Description of Artificial Sequence: Synthetic oligonucleotide
  Target: LAMA2; (+) strand; PAM type: NNGRRT; PAM sequence: TGGAGT
tcttgctctatcacccaggc

SEQ ID NO: 29942 - DNA, 20 bp, Artificial Sequence
  Description of Artificial Sequence: Synthetic oligonucleotide
  Target: LAMA2; (+) strand; PAM type: NNGRRT; PAM sequence: CCGGGT
ctcactgcaacctccacctc

SEQ ID NO: 29943 - DNA, 20 bp, Artificial Sequence
  Description of Artificial Sequence: Synthetic oligonucleotide
  Target: LAMA2; (+) strand; PAM type: NNGRRT; PAM sequence: CCGAGT
tgattctctgcctcagcctc

SEQ ID NO: 29944 - DNA, 20 bp, Artificial Sequence
  Description of Artificial Sequence: Synthetic oligonucleotide
  Target: LAMA2; (+) strand; PAM type: NNGRRT; PAM sequence: TGGGAT
gcctcagcctcccgagtagc

SEQ ID NO: 29945 - DNA, 20 bp, Artificial Sequence
  Description of Artificial Sequence: Synthetic oligonucleotide
  Target: LAMA2; (+) strand; PAM type: NNGRRT; PAM sequence: CAGGGT
ttttgtatttttagtagaga

SEQ ID NO: 29946 - DNA, 20 bp, Artificial Sequence
  Description of Artificial Sequence: Synthetic oligonucleotide
  Target: LAMA2; (+) strand; PAM type: NNGRRT; PAM sequence: ATGAGT
ggtcttgaactcctgaactc

SEQ ID NO: 29947 - DNA, 20 bp, Artificial Sequence
  Description of Artificial Sequence: Synthetic oligonucleotide
  Target: LAMA2; (+) strand; PAM type: NNGRRT; PAM sequence: TGGGAT
ttctcagcctcccaaagtgc

SEQ ID NO: 29948 - DNA, 20 bp, Artificial Sequence
  Description of Artificial Sequence: Synthetic oligonucleotide
  Target: LAMA2; (+) strand; PAM type: NNGRRT; PAM sequence: GTGAAT
gggattgcaagcgtgtttca

SEQ ID NO: 29949 - DNA, 20 bp, Artificial Sequence
  Description of Artificial Sequence: Synthetic oligonucleotide
  Target: LAMA2; (+) strand; PAM type: NNGRRT; PAM sequence: TGGGAT
cacatgcacccttataactg

SEQ ID NO: 29950 - DNA, 20 bp, Artificial Sequence
  Description of Artificial Sequence: Synthetic oligonucleotide
  Target: LAMA2; (+) strand; PAM type: NNGRRT; PAM sequence: GAGAGT
acatgctaccaccaatgcat

SEQ ID NO: 29951 - DNA, 20 bp, Artificial Sequence
  Description of Artificial Sequence: Synthetic oligonucleotide
  Target: LAMA2; (+) strand; PAM type: NNGRRT; PAM sequence: TAGAGT
ttccctaaacccctctctaa

SEQ ID NO: 29952 - DNA, 20 bp, Artificial Sequence
  Description of Artificial Sequence: Synthetic oligonucleotide
  Target: LAMA2; (+) strand; PAM type: NNGRRT; PAM sequence: TTGGGT
tagagtatattatcaaactt

SEQ ID NO: 29953 - DNA, 20 bp, Artificial Sequence
  Description of Artificial Sequence: Synthetic oligonucleotide
  Target: LAMA2; (+) strand; PAM type: NNGRRT; PAM sequence: ATGGGT
tttgggtctttggcaatcca

SEQ ID NO: 29954 - DNA, 20 bp, Artificial Sequence
  Description of Artificial Sequence: Synthetic oligonucleotide
  Target: LAMA2; (+) strand; PAM type: NNGRRT; PAM sequence: CTGGGT
gtgaaaaatgacattttggg

SEQ ID NO: 29955 - DNA, 20 bp, Artificial Sequence
  Description of Artificial Sequence: Synthetic oligonucleotide
  Target: LAMA2; (+) strand; PAM type: NNGRRT; PAM sequence: GCGAAT
actttgggaggctgaggcag

SEQ ID NO: 29956 - DNA, 20 bp, Artificial Sequence
  Description of Artificial Sequence: Synthetic oligonucleotide
  Target: LAMA2; (+) strand; PAM type: NNGRRT; PAM sequence: ATGAGT
gcaggcgaatccctgaggcc

SEQ ID NO: 29957 - DNA, 20 bp, Artificial Sequence
  Description of Artificial Sequence: Synthetic oligonucleotide
  Target: LAMA2; (+) strand; PAM type: NNGRRT; PAM sequence: GAGAAT
tacttgggaggctgaggcat

SEQ ID NO: 29958 - DNA, 20 bp, Artificial Sequence
  Description of Artificial Sequence: Synthetic oligonucleotide
  Target: LAMA2; (+) strand; PAM type: NNGRRT; PAM sequence: CTGAAT
aaaaatctattctgaactta

SEQ ID NO: 29959 - DNA, 20 bp, Artificial Sequence
  Description of Artificial Sequence: Synthetic oligonucleotide
  Target: LAMA2; (+) strand; PAM type: NNGRRT; PAM sequence: AAGAAT
ttctgaacttactgaatccc

SEQ ID NO: 29960 - DNA, 20 bp, Artificial Sequence
  Description of Artificial Sequence: Synthetic oligonucleotide
  Target: LAMA2; (+) strand; PAM type: NNGRRT; PAM sequence: AAGAAT
gcctgttactatagaacatg

SEQ ID NO: 29961 - DNA, 20 bp, Artificial Sequence
  Description of Artificial Sequence: Synthetic oligonucleotide
  Target: LAMA2; (+) strand; PAM type: NNGRRT; PAM sequence: ATGGGT
gttactatagaacatgaaga

SEQ ID NO: 29962 - DNA, 20 bp, Artificial Sequence
  Description of Artificial Sequence: Synthetic oligonucleotide
  Target: LAMA2; (+) strand; PAM type: NNGRRT; PAM sequence: ATGAAT
atgggttctgtgttcctctt

SEQ ID NO: 29963 - DNA, 20 bp, Artificial Sequence
  Description of Artificial Sequence: Synthetic oligonucleotide
  Target: LAMA2; (+) strand; PAM type: NNGRRT; PAM sequence: CAGAGT
acataacataacgtataatt

SEQ ID NO: 29964 - DNA, 20 bp, Artificial Sequence
  Description of Artificial Sequence: Synthetic oligonucleotide
  Target: LAMA2; (+) strand; PAM type: NNGRRT; PAM sequence: TTGAAT
acataacgtataattcagag

SEQ ID NO: 29965 - DNA, 20 bp, Artificial Sequence
  Description of Artificial Sequence: Synthetic oligonucleotide
  Target: LAMA2; (+) strand; PAM type: NNGRRT; PAM sequence: GTGGGT
atatagactacaattagaaa

SEQ ID NO: 29966 - DNA, 20 bp, Artificial Sequence
  Description of Artificial Sequence: Synthetic oligonucleotide
  Target: LAMA2; (+) strand; PAM type: NNGRRT; PAM sequence: AAGAGT
gagagagagagagaaagccc

SEQ ID NO: 29967 - DNA, 20 bp, Artificial Sequence
  Description of Artificial Sequence: Synthetic oligonucleotide
  Target: LAMA2; (+) strand; PAM type: NNGRRT; PAM sequence: GAGAGT
gagagagaaagcccaagagt

SEQ ID NO: 29968 - DNA, 20 bp, Artificial Sequence
  Description of Artificial Sequence: Synthetic oligonucleotide
  Target: LAMA2; (+) strand; PAM type: NNGRRT; PAM sequence: AGGAAT
cttgaggagaagtgtttaaa

SEQ ID NO: 29969 - DNA, 20 bp, Artificial Sequence
  Description of Artificial Sequence: Synthetic oligonucleotide
  Target: LAMA2; (+) strand; PAM type: NNGRRT; PAM sequence: AAGGAT
ttaaaaggaatatataaatc

SEQ ID NO: 29970 - DNA, 20 bp, Artificial Sequence
  Description of Artificial Sequence: Synthetic oligonucleotide
  Target: LAMA2; (+) strand; PAM type: NNGRRT; PAM sequence: TAGAAT
cgattgctccatctatacaa

SEQ ID NO: 29971 - DNA, 20 bp, Artificial Sequence
  Description of Artificial Sequence: Synthetic oligonucleotide
  Target: LAMA2; (+) strand; PAM type: NNGRRT; PAM sequence: GAGGAT
acaatttccggagattaaat

SEQ ID NO: 29972 - DNA, 20 bp, Artificial Sequence
  Description of Artificial Sequence: Synthetic oligonucleotide
  Target: LAMA2; (+) strand; PAM type: NNGRRT; PAM sequence: AAGAGT
ccggagattaaatgaggata

SEQ ID NO: 29973 - DNA, 20 bp, Artificial Sequence
  Description of Artificial Sequence: Synthetic oligonucleotide
  Target: LAMA2; (+) strand; PAM type: NNGRRT; PAM sequence: TTGGGT
gattacatatggttcagcaa

SEQ ID NO: 29974 - DNA, 20 bp, Artificial Sequence
  Description of Artificial Sequence: Synthetic oligonucleotide
  Target: LAMA2; (+) strand; PAM type: NNGRRT; PAM sequence: GAGAAT
ttgccatggtatagtagtca

SEQ ID NO: 29975 - DNA, 20 bp, Artificial Sequence
  Description of Artificial Sequence: Synthetic oligonucleotide
  Target: LAMA2; (+) strand; PAM type: NNGRRT; PAM sequence: TTGAAT
tactattctagattattcaa

SEQ ID NO: 29976 - DNA, 20 bp, Artificial Sequence
  Description of Artificial Sequence: Synthetic oligonucleotide
  Target: LAMA2; (+) strand; PAM type: NNGRRT; PAM sequence: CTGAGT
acagctaaaaagtggcagag

SEQ ID NO: 29977 - DNA, 20 bp, Artificial Sequence
  Description of Artificial Sequence: Synthetic oligonucleotide
  Target: LAMA2; (+) strand; PAM type: NNGRRT; PAM sequence: GTGGAT
aattgcagagcaggaagcag

SEQ ID NO: 29978 - DNA, 20 bp, Artificial Sequence
  Description of Artificial Sequence: Synthetic oligonucleotide
  Target: LAMA2; (+) strand; PAM type: NNGRRT; PAM sequence: AGGAAT
tccaatgtctcagcagatat

SEQ ID NO: 29979 - DNA, 20 bp, Artificial Sequence
  Description of Artificial Sequence: Synthetic oligonucleotide
  Target: LAMA2; (+) strand; PAM type: NNGRRT; PAM sequence: GTGGAT
ttttctatcaccccagacag

SEQ ID NO: 29980 - DNA, 20 bp, Artificial Sequence
  Description of Artificial Sequence: Synthetic oligonucleotide
  Target: LAMA2; (+) strand; PAM type: NNGRRT; PAM sequence: ATGGAT
actcatgtatcttcagagaa

SEQ ID NO: 29981 - DNA, 20 bp, Artificial Sequence
  Description of Artificial Sequence: Synthetic oligonucleotide
  Target: LAMA2; (+) strand; PAM type: NNGRRT; PAM sequence: TGGAAT
gcctcagcctcccaagtagc

SEQ ID NO: 29982 - DNA, 20 bp, Artificial Sequence
  Description of Artificial Sequence: Synthetic oligonucleotide
  Target: LAMA2; (+) strand; PAM type: NNGRRT; PAM sequence: CAGGGT
tttagaagttaattcttaca

SEQ ID NO: 29983 - DNA, 20 bp, Artificial Sequence
  Description of Artificial Sequence: Synthetic oligonucleotide
  Target: LAMA2; (+) strand; PAM type: NNGRRT; PAM sequence: TAGGAT
ttctggagggacagaactaa

SEQ ID NO: 29984 - DNA, 20 bp, Artificial Sequence
  Description of Artificial Sequence: Synthetic oligonucleotide
  Target: LAMA2; (+) strand; PAM type: NNGRRT; PAM sequence: GGGAGT
ggattgatgtatatatgaag

SEQ ID NO: 29985 - DNA, 20 bp, Artificial Sequence
  Description of Artificial Sequence: Synthetic oligonucleotide
  Target: LAMA2; (+) strand; PAM type: NNGRRT; PAM sequence: GAGAAT
tatgaaggggagtttgttag

SEQ ID NO: 29986 - DNA, 20 bp, Artificial Sequence
  Description of Artificial Sequence: Synthetic oligonucleotide
  Target: LAMA2; (+) strand; PAM type: NNGRRT; PAM sequence: CTGAGT
cacaataggccatctgcaag

SEQ ID NO: 29987 - DNA, 20 bp, Artificial Sequence
  Description of Artificial Sequence: Synthetic oligonucleotide
  Target: LAMA2; (+) strand; PAM type: NNGRRT; PAM sequence: AAGGGT
caaattactggtgtaagtgc

SEQ ID NO: 29988 - DNA, 20 bp, Artificial Sequence
  Description of Artificial Sequence: Synthetic oligonucleotide
  Target: LAMA2; (+) strand; PAM type: NNGRRT; PAM sequence: TGGAAT
ggtccaaaagctgaaaaact

SEQ ID NO: 29989 - DNA, 20 bp, Artificial Sequence
  Description of Artificial Sequence: Synthetic oligonucleotide
  Target: LAMA2; (+) strand; PAM type: NNGRRT; PAM sequence: CAGAAT
ctgattaaatggtgcctacc

SEQ ID NO: 29990 - DNA, 20 bp, Artificial Sequence
  Description of Artificial Sequence: Synthetic oligonucleotide
  Target: LAMA2; (+) strand; PAM type: NNGRRT; PAM sequence: GAGGGT
aaatggtgcctacccagaat

SEQ ID NO: 29991 - DNA, 20 bp, Artificial Sequence
  Description of Artificial Sequence: Synthetic oligonucleotide
  Target: LAMA2; (+) strand; PAM type: NNGRRT; PAM sequence: ATGGAT
aacatcctggtcacacctct

SEQ ID NO: 29992 - DNA, 20 bp, Artificial Sequence
  Description of Artificial Sequence: Synthetic oligonucleotide
  Target: LAMA2; (+) strand; PAM type: NNGRRT; PAM sequence: ATGAAT
ctctcttaaatggtggtgtc

SEQ ID NO: 29993 - DNA, 20 bp, Artificial Sequence
  Description of Artificial Sequence: Synthetic oligonucleotide
  Target: LAMA2; (+) strand; PAM type: NNGRRT; PAM sequence: CTGGAT
catgaattgatcacagtgct

SEQ ID NO: 29994 - DNA, 20 bp, Artificial Sequence
  Description of Artificial Sequence: Synthetic oligonucleotide
  Target: LAMA2; (+) strand; PAM type: NNGRRT; PAM sequence: CTGGAT
ctgactagctatgactgctc

SEQ ID NO: 29995 - DNA, 20 bp, Artificial Sequence
  Description of Artificial Sequence: Synthetic oligonucleotide
  Target: LAMA2; (+) strand; PAM type: NNGRRT; PAM sequence: GAGAGT
ctatgtgtcttcctaataca

SEQ ID NO: 29996 - DNA, 20 bp, Artificial Sequence
  Description of Artificial Sequence: Synthetic oligonucleotide
  Target: LAMA2; (+) strand; PAM type: NNGRRT; PAM sequence: TAGAAT
aagtatatattactaggtgc

SEQ ID NO: 29997 - DNA, 20 bp, Artificial Sequence
  Description of Artificial Sequence: Synthetic oligonucleotide
  Target: LAMA2; (+) strand; PAM type: NNGRRT; PAM sequence: TAGAGT
agctgggaaaagtaatgcca

SEQ ID NO: 29998 - DNA, 20 bp, Artificial Sequence
  Description of Artificial Sequence: Synthetic oligonucleotide
  Target: LAMA2; (+) strand; PAM type: NNGRRT; PAM sequence: CAGGGT
aagacatattttaatgatgg

SEQ ID NO: 29999 - DNA, 20 bp, Artificial Sequence
  Description of Artificial Sequence: Synthetic oligonucleotide
  Target: LAMA2; (+) strand; PAM type: NNGRRT; PAM sequence: TGGGGT
aatgatggcagggtatctca

SEQ ID NO: 30000 - DNA, 20 bp, Artificial Sequence
  Description of Artificial Sequence: Synthetic oligonucleotide
  Target: LAMA2; (+) strand; PAM type: NNGRRT; PAM sequence: TTGAAT
cattgaagtgatatatggtg

SEQ ID NO: 30001 - DNA, 20 bp, Artificial Sequence
  Description of Artificial Sequence: Synthetic oligonucleotide
  Target: LAMA2; (+) strand; PAM type: NNGRRT; PAM sequence: GTGAAT
ccatagggaaacattaagac

SEQ ID NO: 30002 - DNA, 20 bp, Artificial Sequence
  Description of Artificial Sequence: Synthetic oligonucleotide
  Target: LAMA2; (+) strand; PAM type: NNGRRT; PAM sequence: CTGAAT
cattaagacgtgaataaaat

SEQ ID NO: 30003 - DNA, 20 bp, Artificial Sequence
  Description of Artificial Sequence: Synthetic oligonucleotide
  Target: LAMA2; (+) strand; PAM type: NNGRRT; PAM sequence: TGGGAT
tatgatctctccccaaaacg

SEQ ID NO: 30004 - DNA, 20 bp, Artificial Sequence
  Description of Artificial Sequence: Synthetic oligonucleotide
  Target: LAMA2; (+) strand; PAM type: NNGRRT; PAM sequence: TAGAAT
gtgggattttcaagtgcatt

SEQ ID NO: 30005 - DNA, 20 bp, Artificial Sequence
  Description of Artificial Sequence: Synthetic oligonucleotide
  Target: LAMA2; (+) strand; PAM type: NNGRRT; PAM sequence: TTGAAT
aaacagtatgacaacattta

SEQ ID NO: 30006 - DNA, 20 bp, Artificial Sequence
  Description of Artificial Sequence: Synthetic oligonucleotide
  Target: LAMA2; (+) strand; PAM type: NNGRRT; PAM sequence: GGGAGT
tatgtgctaggtaccaagtg

SEQ ID NO: 30007 - DNA, 20 bp, Artificial Sequence
  Description of Artificial Sequence: Synthetic oligonucleotide
  Target: LAMA2; (+) strand; PAM type: NNGRRT; PAM sequence: CAGAAT
ggccttgtagtgcttaaagg

SEQ ID NO: 30008 - DNA, 20 bp, Artificial Sequence
  Description of Artificial Sequence: Synthetic oligonucleotide
  Target: LAMA2; (+) strand; PAM type: NNGRRT; PAM sequence: TGGAGT
ttaccctgttgattctcctc

SEQ ID NO: 30009 - DNA, 20 bp, Artificial Sequence
  Description of Artificial Sequence: Synthetic oligonucleotide
  Target: LAMA2; (+) strand; PAM type: NNGRRT; PAM sequence: TGGGAT
cttagtatccattgcacctt

SEQ ID NO: 30010 - DNA, 20 bp, Artificial Sequence
  Description of Artificial Sequence: Synthetic oligonucleotide
  Target: LAMA2; (+) strand; PAM type: NNGRRT; PAM sequence: AAGAAT
cactttctactgctgtaaga

SEQ ID NO: 30011 - DNA, 20 bp, Artificial Sequence
  Description of Artificial Sequence: Synthetic oligonucleotide
  Target: LAMA2; (+) strand; PAM type: NNGRRT; PAM sequence: CAGAGT
ctgtaagaaagaatcacctg

SEQ ID NO: 30012 - DNA, 20 bp, Artificial Sequence
  Description of Artificial Sequence: Synthetic oligonucleotide
  Target: LAMA2; (+) strand; PAM type: NNGRRT; PAM sequence: ACGAAT
aagaatcacctgcagagttc

SEQ ID NO: 30013 - DNA, 20 bp, Artificial Sequence
  Description of Artificial Sequence: Synthetic oligonucleotide
  Target: LAMA2; (+) strand; PAM type: NNGRRT; PAM sequence: AAGAGT
gcagagttcacgaatgaggg

SEQ ID NO: 30014 - DNA, 20 bp, Artificial Sequence
  Description of Artificial Sequence: Synthetic oligonucleotide
  Target: LAMA2; (+) strand; PAM type: NNGRRT; PAM sequence: GGGAAT
gaatgagggaagagtgaaaa

SEQ ID NO: 30015 - DNA, 20 bp, Artificial Sequence
  Description of Artificial Sequence: Synthetic oligonucleotide
  Target: LAMA2; (+) strand; PAM type: NNGRRT; PAM sequence: CTGAAT
tatttcaaaatgccctccat

SEQ ID NO: 30016 - DNA, 20 bp, Artificial Sequence
  Description of Artificial Sequence: Synthetic oligonucleotide
  Target: LAMA2; (+) strand; PAM type: NNGRRT; PAM sequence: CAGGGT
ttagcactttaggccatatc

SEQ ID NO: 30017 - DNA, 20 bp, Artificial Sequence
  Description of Artificial Sequence: Synthetic oligonucleotide
  Target: LAMA2; (+) strand; PAM type: NNGRRT; PAM sequence: GAGGAT
ggaaggtgtacgtaagcaat

SEQ ID NO: 30018 - DNA, 20 bp, Artificial Sequence
  Description of Artificial Sequence: Synthetic oligonucleotide
  Target: LAMA2; (+) strand; PAM type: NNGRRT; PAM sequence: ATGAAT
gccatctactgtccaacatg

SEQ ID NO: 30019 - DNA, 20 bp, Artificial Sequence
  Description of Artificial Sequence: Synthetic oligonucleotide
  Target: LAMA2; (+) strand; PAM type: NNGRRT; PAM sequence: AAGGAT
ttgttacataaattttccac

SEQ ID NO: 30020 - DNA, 20 bp, Artificial Sequence
  Description of Artificial Sequence: Synthetic oligonucleotide
  Target: LAMA2; (+) strand; PAM type: NNGRRT; PAM sequence: TTGGAT
tctctttagcttaaaggaac

SEQ ID NO: 30021 - DNA, 20 bp, Artificial Sequence
  Description of Artificial Sequence: Synthetic oligonucleotide
  Target: LAMA2; (+) strand; PAM type: NNGRRT; PAM sequence: ATGGAT
gattagatcaatgtttaatt

SEQ ID NO: 30022 - DNA, 20 bp, Artificial Sequence
  Description of Artificial Sequence: Synthetic oligonucleotide
  Target: LAMA2; (+) strand; PAM type: NNGRRT; PAM sequence: CTGAAT
gataacatgtattttttgca

SEQ ID NO: 30023 - DNA, 20 bp, Artificial Sequence
  Description of Artificial Sequence: Synthetic oligonucleotide
  Target: LAMA2; (+) strand; PAM type: NNGRRT; PAM sequence: TGGAAT
gcccatagtaaaagtgctaa

SEQ ID NO: 30024 - DNA, 20 bp, Artificial Sequence
  Description of Artificial Sequence: Synthetic oligonucleotide
  Target: LAMA2; (+) strand; PAM type: NNGRRT; PAM sequence: TTGGGT
ctgttgcaaagaccctgttt

SEQ ID NO: 30025 - DNA, 20 bp, Artificial Sequence
  Description of Artificial Sequence: Synthetic oligonucleotide
  Target: LAMA2; (+) strand; PAM type: NNGRRT; PAM sequence: GAGAAT
taacagcacgaagcacttca

SEQ ID NO: 30026 - DNA, 20 bp, Artificial Sequence
  Description of Artificial Sequence: Synthetic oligonucleotide
  Target: LAMA2; (+) strand; PAM type: NNGRRT; PAM sequence: TGGAAT
ttaaatactcatttcctata

SEQ ID NO: 30027 - DNA, 20 bp, Artificial Sequence
  Description of Artificial Sequence: Synthetic oligonucleotide
  Target: LAMA2; (+) strand; PAM type: NNGRRT; PAM sequence: ATGGAT
atattttcaagtgtgctcaa

SEQ ID NO: 30028 - DNA, 20 bp, Artificial Sequence
  Description of Artificial Sequence: Synthetic oligonucleotide
  Target: LAMA2; (+) strand; PAM type: NNGRRT; PAM sequence: TTGAAT
ctcttcaaattctatttact

SEQ ID NO: 30029 - DNA, 20 bp, Artificial Sequence
  Description of Artificial Sequence: Synthetic oligonucleotide
  Target: LAMA2; (+) strand; PAM type: NNGRRT; PAM sequence: CTGAGT
ctatttactttgaattatag

SEQ ID NO: 30030 - DNA, 20 bp, Artificial Sequence
  Description of Artificial Sequence: Synthetic oligonucleotide
  Target: LAMA2; (+) strand; PAM type: NNGRRT; PAM sequence: GTGAAT
gataggtcagtgctattcca

SEQ ID NO: 30031 - DNA, 20 bp, Artificial Sequence
  Description of Artificial Sequence: Synthetic oligonucleotide
  Target: LAMA2; (+) strand; PAM type: NNGRRT; PAM sequence: ATGAAT
ttgccaatcaaaacactata

SEQ ID NO: 30032 - DNA, 20 bp, Artificial Sequence
  Description of Artificial Sequence: Synthetic oligonucleotide
  Target: LAMA2; (+) strand; PAM type: NNGRRT; PAM sequence: GAGAAT
ttgtctaggctgtattttat

SEQ ID NO: 30033 - DNA, 20 bp, Artificial Sequence
  Description of Artificial Sequence: Synthetic oligonucleotide
  Target: LAMA2; (+) strand; PAM type: NNGRRT; PAM sequence: TGGAGT
ggctgtattttatgagaatg

SEQ ID NO: 30034 - DNA, 20 bp, Artificial Sequence
  Description of Artificial Sequence: Synthetic oligonucleotide
  Target: LAMA2; (+) strand; PAM type: NNGRRT; PAM sequence: ATGAGT
gaaatgtaggaagaaaaaat

SEQ ID NO: 30035 - DNA, 20 bp, Artificial Sequence
  Description of Artificial Sequence: Synthetic oligonucleotide
  Target: LAMA2; (+) strand; PAM type: NNGRRT; PAM sequence: GTGAGT
tgtaggaagaaaaaatatga

SEQ ID NO: 30036 - DNA, 20 bp, Artificial Sequence
  Description of Artificial Sequence: Synthetic oligonucleotide
  Target: LAMA2; (+) strand; PAM type: NNGRRT; PAM sequence: ATGGGT
agaagaaagctaaggagaag

SEQ ID NO: 30037 - DNA, 20 bp, Artificial Sequence
  Description of Artificial Sequence: Synthetic oligonucleotide
  Target: LAMA2; (+) strand; PAM type: NNGRRT; PAM sequence: ATGAAT
aaaaaaggtggaagagagaa

SEQ ID NO: 30038 - DNA, 20 bp, Artificial Sequence
  Description of Artificial Sequence: Synthetic oligonucleotide
  Target: LAMA2; (+) strand; PAM type: NNGRRT; PAM sequence: CAGGAT
gagaaatgaatgcaggcagg

SEQ ID NO: 30039 - DNA, 20 bp, Artificial Sequence
  Description of Artificial Sequence: Synthetic oligonucleotide
  Target: LAMA2; (+) strand; PAM type: NNGRRT; PAM sequence: TAGAAT
cccttctaaaccaacttttc

SEQ ID NO: 30040 - DNA, 20 bp, Artificial Sequence
  Description of Artificial Sequence: Synthetic oligonucleotide
  Target: LAMA2; (+) strand; PAM type: NNGRRT; PAM sequence: AAGGAT
tggttcattttctatgcatt

SEQ ID NO: 30041 - DNA, 20 bp, Artificial Sequence
  Description of Artificial Sequence: Synthetic oligonucleotide
  Target: LAMA2; (+) strand; PAM type: NNGRRT; PAM sequence: ATGAAT
agagctctacaaatagatgc

SEQ ID NO: 30042 - DNA, 20 bp, Artificial Sequence
  Description of Artificial Sequence: Synthetic oligonucleotide
  Target: LAMA2; (+) strand; PAM type: NNGRRT; PAM sequence: AGGGAT
tgaataaacacttctatggg

SEQ ID NO: 30043 - DNA, 20 bp, Artificial Sequence
  Description of Artificial Sequence: Synthetic oligonucleotide
  Target: LAMA2; (+) strand; PAM type: NNGRRT; PAM sequence: CAGAGT
ctatgggagggatacctttt

SEQ ID NO: 30044 - DNA, 20 bp, Artificial Sequence
  Description of Artificial Sequence: Synthetic oligonucleotide
  Target: LAMA2; (+) strand; PAM type: NNGRRT; PAM sequence: TGGGAT
agtttaaggctcgcgggctt

SEQ ID NO: 30045 - DNA, 20 bp, Artificial Sequence
  Description of Artificial Sequence: Synthetic oligonucleotide
  Target: LAMA2; (+) strand; PAM type: NNGRRT; PAM sequence: ATGAAT
gggctttgggatctaagaag

SEQ ID NO: 30046 - DNA, 20 bp, Artificial Sequence
  Description of Artificial Sequence: Synthetic oligonucleotide
  Target: LAMA2; (+) strand; PAM type: NNGRRT; PAM sequence: AAGGAT
ttccaggcttatttcatgaa

SEQ ID NO: 30047 - DNA, 20 bp, Artificial Sequence
  Description of Artificial Sequence: Synthetic oligonucleotide
  Target: LAMA2; (+) strand; PAM type: NNGRRT; PAM sequence: ATGAAT
cttttatgaagcttagtttt

SEQ ID NO: 30048 - DNA, 20 bp, Artificial Sequence
  Description of Artificial Sequence: Synthetic oligonucleotide
  Target: LAMA2; (+) strand; PAM type: NNGRRT; PAM sequence: TAGAAT
ctggtttttccccctgaagg

SEQ ID NO: 30049 - DNA, 20 bp, Artificial Sequence
  Description of Artificial Sequence: Synthetic oligonucleotide
  Target: LAMA2; (+) strand; PAM type: NNGRRT; PAM sequence: TGGGGT
ttgtgttcttcttttcttaa

SEQ ID NO: 30050 - DNA, 20 bp, Artificial Sequence
  Description of Artificial Sequence: Synthetic oligonucleotide
  Target: LAMA2; (+) strand; PAM type: NNGRRT; PAM sequence: GTGAAT
tgaagctgaagaacaggaaa

SEQ ID NO: 30051 - DNA, 20 bp, Artificial Sequence
  Description of Artificial Sequence: Synthetic oligonucleotide
  Target: LAMA2; (+) strand; PAM type: NNGRRT; PAM sequence: AGGAAT
cttagcctagaaccatctcc

SEQ ID NO: 30052 - DNA, 20 bp, Artificial Sequence
  Description of Artificial Sequence: Synthetic oligonucleotide
  Target: LAMA2; (+) strand; PAM type: NNGRRT; PAM sequence: CTGAAT
gtgccttctcaatttgatat

SEQ ID NO: 30053 - DNA, 20 bp, Artificial Sequence
  Description of Artificial Sequence: Synthetic oligonucleotide
  Target: LAMA2; (+) strand; PAM type: NNGRRT; PAM sequence: GAGAAT
gatatctgaatctccctgaa

SEQ ID NO: 30054 - DNA, 20 bp, Artificial Sequence
  Description of Artificial Sequence: Synthetic oligonucleotide
  Target: LAMA2; (+) strand; PAM type: NNGRRT; PAM sequence: TGGAAT
ctttggagacccttatgaaa

SEQ ID NO: 30055 - DNA, 20 bp, Artificial Sequence
  Description of Artificial Sequence: Synthetic oligonucleotide
  Target: LAMA2; (+) strand; PAM type: NNGRRT; PAM sequence: TCGAAT
ttcatccctagtaaatatag

SEQ ID NO: 30056 - DNA, 20 bp, Artificial Sequence
  Description of Artificial Sequence: Synthetic oligonucleotide
  Target: LAMA2; (+) strand; PAM type: NNGRRT; PAM sequence: AAGAAT
tcgaatccatccagtaatat

SEQ ID NO: 30057 - DNA, 20 bp, Artificial Sequence
  Description of Artificial Sequence: Synthetic oligonucleotide
  Target: LAMA2; (+) strand; PAM type: NNGRRT; PAM sequence: ATGAGT
aagactcgtaaaattaataa

SEQ ID NO: 30058 - DNA, 20 bp, Artificial Sequence
  Description of Artificial Sequence: Synthetic oligonucleotide
  Target: LAMA2; (+) strand; PAM type: NNGRRT; PAM sequence: TAGAAT
caagaccacttatattttgt

SEQ ID NO: 30059 - DNA, 20 bp, Artificial Sequence
  Description of Artificial Sequence: Synthetic oligonucleotide
  Target: LAMA2; (+) strand; PAM type: NNGRRT; PAM sequence: ATGAAT
tattttgttagaatttttca

SEQ ID NO: 30060 - DNA, 20 bp, Artificial Sequence
  Description of Artificial Sequence: Synthetic oligonucleotide
  Target: LAMA2; (+) strand; PAM type: NNGRRT; PAM sequence: ATGGAT
gaatttttcaatgaatgtta

SEQ ID NO: 30061 - DNA, 20 bp, Artificial Sequence
  Description of Artificial Sequence: Synthetic oligonucleotide
  Target: LAMA2; (+) strand; PAM type: NNGRRT; PAM sequence: ATGAAT
ttttcaatgaatgttaatgg

SEQ ID NO: 30062 - DNA, 20 bp, Artificial Sequence
  Description of Artificial Sequence: Synthetic oligonucleotide
  Target: LAMA2; (+) strand; PAM type: NNGRRT; PAM sequence: TAGAGT
aatggatgaatttttttata

SEQ ID NO: 30063 - DNA, 20 bp, Artificial Sequence
  Description of Artificial Sequence: Synthetic oligonucleotide
  Target: LAMA2; (+) strand; PAM type: NNGRRT; PAM sequence: TGGAAT
tatatagagttctccctgtt

SEQ ID NO: 30064 - DNA, 20 bp, Artificial Sequence
  Description of Artificial Sequence: Synthetic oligonucleotide
  Target: LAMA2; (+) strand; PAM type: NNGRRT; PAM sequence: TTGAAT
caaacaaagaaaataagtgt

SEQ ID NO: 30065 - DNA, 20 bp, Artificial Sequence
  Description of Artificial Sequence: Synthetic oligonucleotide
  Target: LAMA2; (+) strand; PAM type: NNGRRT; PAM sequence: AAGAAT
ttgaatggtcagagaactat

SEQ ID NO: 30066 - DNA, 20 bp, Artificial Sequence
  Description of Artificial Sequence: Synthetic oligonucleotide
  Target: LAMA2; (+) strand; PAM type: NNGRRT; PAM sequence: GAGAAT
ggtcagagaactataagaat

SEQ ID NO: 30067 - DNA, 20 bp, Artificial Sequence
  Description of Artificial Sequence: Synthetic oligonucleotide
  Target: LAMA2; (+) strand; PAM type: NNGRRT; PAM sequence: CAGAAT
atttttaaaaatccaagtaa

SEQ ID NO: 30068 - DNA, 20 bp, Artificial Sequence
  Description of Artificial Sequence: Synthetic oligonucleotide
  Target: LAMA2; (+) strand; PAM type: NNGRRT; PAM sequence: ATGGAT
ttaaaaatccaagtaacaga

SEQ ID NO: 30069 - DNA, 20 bp, Artificial Sequence
  Description of Artificial Sequence: Synthetic oligonucleotide
  Target: LAMA2; (+) strand; PAM type: NNGRRT; PAM sequence: CAGAAT
atacccagacattctcagtt

SEQ ID NO: 30070 - DNA, 20 bp, Artificial Sequence
  Description of Artificial Sequence: Synthetic oligonucleotide
  Target: LAMA2; (+) strand; PAM type: NNGRRT; PAM sequence: CAGAAT
taatttttttcataaataac

SEQ ID NO: 30071 - DNA, 20 bp, Artificial Sequence
  Description of Artificial Sequence: Synthetic oligonucleotide
  Target: LAMA2; (+) strand; PAM type: NNGRRT; PAM sequence: TGGGAT
taaccagaatcacttactga

SEQ ID NO: 30072 - DNA, 20 bp, Artificial Sequence
  Description of Artificial Sequence: Synthetic oligonucleotide
  Target: LAMA2; (+) strand; PAM type: NNGRRT; PAM sequence: TGGGGT
ctgatgggatgtggtacctt

SEQ ID NO: 30073 - DNA, 20 bp, Artificial Sequence
  Description of Artificial Sequence: Synthetic oligonucleotide
  Target: LAMA2; (+) strand; PAM type: NNGRRT; PAM sequence: TTGAGT
tagtatataccttctcaaac

SEQ ID NO: 30074 - DNA, 20 bp, Artificial Sequence
  Description of Artificial Sequence: Synthetic oligonucleotide
  Target: LAMA2; (+) strand; PAM type: NNGRRT; PAM sequence: TTGGAT
tctcaaacttgagtatcaga

SEQ ID NO: 30075 - DNA, 20 bp, Artificial Sequence
  Description of Artificial Sequence: Synthetic oligonucleotide
  Target: LAMA2; (+) strand; PAM type: NNGRRT; PAM sequence: TGGAAT
atgttgagaacattcttaag

SEQ ID NO: 30076 - DNA, 20 bp, Artificial Sequence
  Description of Artificial Sequence: Synthetic oligonucleotide
  Target: LAMA2; (+) strand; PAM type: NNGRRT; PAM sequence: TTGAAT
gtttcaacttgtgaaccacc

SEQ ID NO: 30077 - DNA, 20 bp, Artificial Sequence
  Description of Artificial Sequence: Synthetic oligonucleotide
  Target: LAMA2; (+) strand; PAM type: NNGRRT; PAM sequence: GTGAGT
caatattccactgtgccttt

SEQ ID NO: 30078 - DNA, 20 bp, Artificial Sequence
  Description of Artificial Sequence: Synthetic oligonucleotide
  Target: LAMA2; (+) strand; PAM type: NNGRRT; PAM sequence: AGGGGT
tacacacagtttgtgaacac

SEQ ID NO: 30079 - DNA, 20 bp, Artificial Sequence
  Description of Artificial Sequence: Synthetic oligonucleotide
  Target: LAMA2; (+) strand; PAM type: NNGRRT; PAM sequence: TTGAAT
cattgaaactacacggaaac

SEQ ID NO: 30080 - DNA, 20 bp, Artificial Sequence
  Description of Artificial Sequence: Synthetic oligonucleotide
  Target: LAMA2; (+) strand; PAM type: NNGRRT; PAM sequence: AGGGAT
acggaaacttgaatgacgtt

SEQ ID NO: 30081 - DNA, 20 bp, Artificial Sequence
  Description of Artificial Sequence: Synthetic oligonucleotide
  Target: LAMA2; (+) strand; PAM type: NNGRRT; PAM sequence: GGGAAT
tagggatcccagagccactg

SEQ ID NO: 30082 - DNA, 20 bp, Artificial Sequence
  Description of Artificial Sequence: Synthetic oligonucleotide
  Target: LAMA2; (+) strand; PAM type: NNGRRT; PAM sequence: ATGAAT
aaaaaactgaagtcagagag

SEQ ID NO: 30083 - DNA, 20 bp, Artificial Sequence
  Description of Artificial Sequence: Synthetic oligonucleotide
  Target: LAMA2; (+) strand; PAM type: NNGRRT; PAM sequence: ATGGAT
tgatgagaacctacttggta

SEQ ID NO: 30084 - DNA, 20 bp, Artificial Sequence
  Description of Artificial Sequence: Synthetic oligonucleotide
  Target: LAMA2; (+) strand; PAM type: NNGRRT; PAM sequence: GAGAGT
ttggtaatggatttgaagga

SEQ ID NO: 30085 - DNA, 20 bp, Artificial Sequence
  Description of Artificial Sequence: Synthetic oligonucleotide
  Target: LAMA2; (+) strand; PAM type: NNGRRT; PAM sequence: TAGGAT
ttgaaggagagagtaaacgt

SEQ ID NO: 30086 - DNA, 20 bp, Artificial Sequence
  Description of Artificial Sequence: Synthetic oligonucleotide
  Target: LAMA2; (+) strand; PAM type: NNGRRT; PAM sequence: AGGGAT
agtaaacgttaggatactga

SEQ ID NO: 30087 - DNA, 20 bp, Artificial Sequence
  Description of Artificial Sequence: Synthetic oligonucleotide
  Target: LAMA2; (+) strand; PAM type: NNGRRT; PAM sequence: GAGAGT
ggatactgaagggattctaa

SEQ ID NO: 30088 - DNA, 20 bp, Artificial Sequence
  Description of Artificial Sequence: Synthetic oligonucleotide
  Target: LAMA2; (+) strand; PAM type: NNGRRT; PAM sequence: AGGAGT
aggcggcacctggaacatgg

SEQ ID NO: 30089 - DNA, 20 bp, Artificial Sequence
  Description of Artificial Sequence: Synthetic oligonucleotide
  Target: LAMA2; (+) strand; PAM type: NNGRRT; PAM sequence: GAGAAT
ggacagatggagaagaggca

SEQ ID NO: 30090 - DNA, 20 bp, Artificial Sequence
  Description of Artificial Sequence: Synthetic oligonucleotide
  Target: LAMA2; (+) strand; PAM type: NNGRRT; PAM sequence: CAGAAT
aggaaagggcaacgtatact

SEQ ID NO: 30091 - DNA, 20 bp, Artificial Sequence
  Description of Artificial Sequence: Synthetic oligonucleotide
  Target: LAMA2; (+) strand; PAM type: NNGRRT; PAM sequence: CTGAAT
atattctcaaagctttttcc

SEQ ID NO: 30092 - DNA, 20 bp, Artificial Sequence
  Description of Artificial Sequence: Synthetic oligonucleotide
  Target: LAMA2; (+) strand; PAM type: NNGRRT; PAM sequence: TGGAGT
tacagcttatggaaagattg

SEQ ID NO: 30093 - DNA, 20 bp, Artificial Sequence
  Description of Artificial Sequence: Synthetic oligonucleotide
  Target: LAMA2; (+) strand; PAM type: NNGRRT; PAM sequence: AAGAAT
agaaggaaagaaattttaaa

SEQ ID NO: 30094 - DNA, 20 bp, Artificial Sequence
  Description of Artificial Sequence: Synthetic oligonucleotide
  Target: LAMA2; (+) strand; PAM type: NNGRRT; PAM sequence: AGGGGT
aagaataagttaatattcct

SEQ ID NO: 30095 - DNA, 20 bp, Artificial Sequence
  Description of Artificial Sequence: Synthetic oligonucleotide
  Target: LAMA2; (+) strand; PAM type: NNGRRT; PAM sequence: CAGAGT
ggggtgcatcctctaaattg

SEQ ID NO: 30096 - DNA, 20 bp, Artificial Sequence
  Description of Artificial Sequence: Synthetic oligonucleotide
  Target: LAMA2; (+) strand; PAM type: NNGRRT; PAM sequence: AAGAAT
atatcttaagcaatcctttt

SEQ ID NO: 30097 - DNA, 20 bp, Artificial Sequence
  Description of Artificial Sequence: Synthetic oligonucleotide
  Target: LAMA2; (+) strand; PAM type: NNGRRT; PAM sequence: GTGAGT
cagcactttgggagacggag

SEQ ID NO: 30098 - DNA, 20 bp, Artificial Sequence
  Description of Artificial Sequence: Synthetic oligonucleotide
  Target: LAMA2; (+) strand; PAM type: NNGRRT; PAM sequence: AGGAGT
tgagtagattgcttgaggtt

SEQ ID NO: 30099 - DNA, 20 bp, Artificial Sequence
  Description of Artificial Sequence: Synthetic oligonucleotide
  Target: LAMA2; (+) strand; PAM type: NNGRRT; PAM sequence: CTGAAT
tggtgccactccacatcagc

SEQ ID NO: 30100 - DNA, 20 bp, Artificial Sequence
  Description of Artificial Sequence: Synthetic oligonucleotide
  Target: LAMA2; (+) strand; PAM type: NNGRRT; PAM sequence: CAGAAT
ggtcaaaaaataaagaaaga

SEQ ID NO: 30101 - DNA, 20 bp, Artificial Sequence
  Description of Artificial Sequence: Synthetic oligonucleotide
  Target: LAMA2; (+) strand; PAM type: NNGRRT; PAM sequence: TAGGGT
tgatcataaacgcatacctt

SEQ ID NO: 30102 - DNA, 20 bp, Artificial Sequence
  Description of Artificial Sequence: Synthetic oligonucleotide
  Target: LAMA2; (+) strand; PAM type: NNGRRT; PAM sequence: ATGGGT
ttgattctaatattgtgtaa

SEQ ID NO: 30103 - DNA, 20 bp, Artificial Sequence
  Description of Artificial Sequence: Synthetic oligonucleotide
  Target: LAMA2; (+) strand; PAM type: NNGRRT; PAM sequence: ATGAGT
acgttgtaataatggcaaac

SEQ ID NO: 30104 - DNA, 20 bp, Artificial Sequence
  Description of Artificial Sequence: Synthetic oligonucleotide
  Target: LAMA2; (+) strand; PAM type: NNGRRT; PAM sequence: AAGAGT
tgagtatcagagatacacaa

SEQ ID NO: 30105 - DNA, 20 bp, Artificial Sequence
  Description of Artificial Sequence: Synthetic oligonucleotide
  Target: LAMA2; (+) strand; PAM type: NNGRRT; PAM sequence: CAGAAT
ctattattattagccctcag

SEQ ID NO: 30106 - DNA, 20 bp, Artificial Sequence
  Description of Artificial Sequence: Synthetic oligonucleotide
  Target: LAMA2; (+) strand; PAM type: NNGRRT; PAM sequence: TAGGGT
attattagccctcagcagaa

SEQ ID NO: 30107 - DNA, 20 bp, Artificial Sequence
  Description of Artificial Sequence: Synthetic oligonucleotide
  Target: LAMA2; (+) strand; PAM type: NNGRRT; PAM sequence: AGGGAT
atagtattttagtttatgtc

SEQ ID NO: 30108 - DNA, 20 bp, Artificial Sequence
  Description of Artificial Sequence: Synthetic oligonucleotide
  Target: LAMA2; (+) strand; PAM type: NNGRRT; PAM sequence: AAGAAT
atacaggtctgtggcctgtt

SEQ ID NO: 30109 - DNA, 20 bp, Artificial Sequence
  Description of Artificial Sequence: Synthetic oligonucleotide
  Target: LAMA2; (+) strand; PAM type: NNGRRT; PAM sequence: AGGGAT
tattgtgaactgcgcatgcg

SEQ ID NO: 30110 - DNA, 20 bp, Artificial Sequence
  Description of Artificial Sequence: Synthetic oligonucleotide
  Target: LAMA2; (+) strand; PAM type: NNGRRT; PAM sequence: GAGAAT
ctaggctgcacgctccttat

SEQ ID NO: 30111 - DNA, 20 bp, Artificial Sequence
  Description of Artificial Sequence: Synthetic oligonucleotide
  Target: LAMA2; (+) strand; PAM type: NNGRRT; PAM sequence: GGGAGT
tgcctgatgccaaaaaggtg

SEQ ID NO: 30112 - DNA, 20 bp, Artificial Sequence
  Description of Artificial Sequence: Synthetic oligonucleotide
  Target: LAMA2; (+) strand; PAM type: NNGRRT; PAM sequence: TAGAAT
ttttttttctcctgcctttc

SEQ ID NO: 30113 - DNA, 20 bp, Artificial Sequence
  Description of Artificial Sequence: Synthetic oligonucleotide
  Target: LAMA2; (+) strand; PAM type: NNGRRT; PAM sequence: TTGAAT
gaagcatgctgtgtgaaatt

SEQ ID NO: 30114 - DNA, 20 bp, Artificial Sequence
  Description of Artificial Sequence: Synthetic oligonucleotide
  Target: LAMA2; (+) strand; PAM type: NNGRRT; PAM sequence: TCGAAT
ttttatatgtgaaaagacat

SEQ ID NO: 30115 - DNA, 20 bp, Artificial Sequence
  Description of Artificial Sequence: Synthetic oligonucleotide
  Target: LAMA2; (+) strand; PAM type: NNGRRT; PAM sequence: GTGGAT
tcgaataaggccatttctca

SEQ ID NO: 30116 - DNA, 20 bp, Artificial Sequence
  Description of Artificial Sequence: Synthetic oligonucleotide
  Target: LAMA2; (+) strand; PAM type: NNGRRT; PAM sequence: GGGAAT
gccatttctcagtggattag

SEQ ID NO: 30117 - DNA, 20 bp, Artificial Sequence
  Description of Artificial Sequence: Synthetic oligonucleotide
  Target: LAMA2; (+) strand; PAM type: NNGRRT; PAM sequence: CAGAGT
tctcagtggattaggggaat

SEQ ID NO: 30118 - DNA, 20 bp, Artificial Sequence
  Description of Artificial Sequence: Synthetic oligonucleotide
  Target: LAMA2; (+) strand; PAM type: NNGRRT; PAM sequence: CTGAAT
attaggggaatcagagtttt

SEQ ID NO: 30119 - DNA, 20 bp, Artificial Sequence
  Description of Artificial Sequence: Synthetic oligonucleotide
  Target: LAMA2; (+) strand; PAM type: NNGRRT; PAM sequence: AGGAAT
attctctgtggaacactaag

SEQ ID NO: 30120 - DNA, 20 bp, Artificial Sequence
  Description of Artificial Sequence: Synthetic oligonucleotide
  Target: LAMA2; (+) strand; PAM type: NNGRRT; PAM sequence: CAGGGT
tgtggaacactaagaggaat

SEQ ID NO: 30121 - DNA, 20 bp, Artificial Sequence
  Description of Artificial Sequence: Synthetic oligonucleotide
  Target: LAMA2; (+) strand; PAM type: NNGRRT; PAM sequence: AGGAAT
catccagtacattcccaacc

SEQ ID NO: 30122 - DNA, 20 bp, Artificial Sequence
  Description of Artificial Sequence: Synthetic oligonucleotide
  Target: LAMA2; (+) strand; PAM type: NNGRRT; PAM sequence: CAGGGT
accaggaattgctgtctggt

SEQ ID NO: 30123 - DNA, 20 bp, Artificial Sequence
  Description of Artificial Sequence: Synthetic oligonucleotide
  Target: LAMA2; (+) strand; PAM type: NNGRRT; PAM sequence: CAGAAT
tgtcagcacagagcaagcag

SEQ ID NO: 30124 - DNA, 20 bp, Artificial Sequence
  Description of Artificial Sequence: Synthetic oligonucleotide
  Target: LAMA2; (+) strand; PAM type: NNGRRT; PAM sequence: ATGAAT
cagatcatcagctttgtttt

SEQ ID NO: 30125 - DNA, 20 bp, Artificial Sequence
  Description of Artificial Sequence: Synthetic oligonucleotide
  Target: LAMA2; (+) strand; PAM type: NNGRRT; PAM sequence: TGGAGT
aatatctctatttacagtgc

SEQ ID NO: 30126 - DNA, 20 bp, Artificial Sequence
  Description of Artificial Sequence: Synthetic oligonucleotide
  Target: LAMA2; (+) strand; PAM type: NNGRRT; PAM sequence: TGGAAT
ctctatttacagtgctggag

SEQ ID NO: 30127 - DNA, 20 bp, Artificial Sequence
  Description of Artificial Sequence: Synthetic oligonucleotide
  Target: LAMA2; (+) strand; PAM type: NNGRRT; PAM sequence: AAGGAT
ctggagtggaattttaaaaa

SEQ ID NO: 30128 - DNA, 20 bp, Artificial Sequence
  Description of Artificial Sequence: Synthetic oligonucleotide
  Target: LAMA2; (+) strand; PAM type: NNGRRT; PAM sequence: TTGAAT
aaaggattgcagcatttgca

SEQ ID NO: 30129 - DNA, 20 bp, Artificial Sequence
  Description of Artificial Sequence: Synthetic oligonucleotide
  Target: LAMA2; (+) strand; PAM type: NNGRRT; PAM sequence: CTGAAT
tcttgctttcctattttttt

SEQ ID NO: 30130 - DNA, 20 bp, Artificial Sequence
  Description of Artificial Sequence: Synthetic oligonucleotide
  Target: LAMA2; (+) strand; PAM type: NNGRRT; PAM sequence: GAGGAT
agaagtttgcttaatgaaaa

SEQ ID NO: 30131 - DNA, 20 bp, Artificial Sequence
  Description of Artificial Sequence: Synthetic oligonucleotide
  Target: LAMA2; (+) strand; PAM type: NNGRRT; PAM sequence: TTGAAT
accttctttgcctgttttgt

SEQ ID NO: 30132 - DNA, 20 bp, Artificial Sequence
  Description of Artificial Sequence: Synthetic oligonucleotide
  Target: LAMA2; (+) strand; PAM type: NNGRRT; PAM sequence: AGGGAT
gtaaagtgcctgtcaaatgg

SEQ ID NO: 30133 - DNA, 20 bp, Artificial Sequence
  Description of Artificial Sequence: Synthetic oligonucleotide
  Target: LAMA2; (+) strand; PAM type: NNGRRT; PAM sequence: AAGAAT
tggagggatgtctttgttga

SEQ ID NO: 30134 - DNA, 20 bp, Artificial Sequence
  Description of Artificial Sequence: Synthetic oligonucleotide
  Target: LAMA2; (+) strand; PAM type: NNGRRT; PAM sequence: GTGAGT
agaatccagactcacagaaa

SEQ ID NO: 30135 - DNA, 20 bp, Artificial Sequence
  Description of Artificial Sequence: Synthetic oligonucleotide
  Target: LAMA2; (+) strand; PAM type: NNGRRT; PAM sequence: TGGGAT
gacaaagatcgttctctgtt

SEQ ID NO: 30136 - DNA, 20 bp, Artificial Sequence
  Description of Artificial Sequence: Synthetic oligonucleotide
  Target: LAMA2; (+) strand; PAM type: NNGRRT; PAM sequence: GAGGAT
gtagactaagatgatgacag

SEQ ID NO: 30137 - DNA, 20 bp, Artificial Sequence
  Description of Artificial Sequence: Synthetic oligonucleotide
  Target: LAMA2; (+) strand; PAM type: NNGRRT; PAM sequence: ATGGGT
ttatgtcaggcttgcagttg

SEQ ID NO: 30138 - DNA, 20 bp, Artificial Sequence
  Description of Artificial Sequence: Synthetic oligonucleotide
  Target: LAMA2; (+) strand; PAM type: NNGRRT; PAM sequence: TAGAGT
gcttatgattatcttagagg

SEQ ID NO: 30139 - DNA, 20 bp, Artificial Sequence
  Description of Artificial Sequence: Synthetic oligonucleotide
  Target: LAMA2; (+) strand; PAM type: NNGRRT; PAM sequence: TTGAGT
tctgagacatatctagaaga

SEQ ID NO: 30140 - DNA, 20 bp, Artificial Sequence
  Description of Artificial Sequence: Synthetic oligonucleotide
  Target: LAMA2; (+) strand; PAM type: NNGRRT; PAM sequence: TTGGGT
tagaagattgagtatatttg

SEQ ID NO: 30141 - DNA, 20 bp, Artificial Sequence
  Description of Artificial Sequence: Synthetic oligonucleotide
  Target: LAMA2; (+) strand; PAM type: NNGRRT; PAM sequence: TTGAAT
attgagtatatttgttgggt

SEQ ID NO: 30142 - DNA, 20 bp, Artificial Sequence
  Description of Artificial Sequence: Synthetic oligonucleotide
  Target: LAMA2; (+) strand; PAM type: NNGRRT; PAM sequence: CAGAAT
ctatagttaaatcttgactt

SEQ ID NO: 30143 - DNA, 20 bp, Artificial Sequence
  Description of Artificial Sequence: Synthetic oligonucleotide
  Target: LAMA2; (+) strand; PAM type: NNGRRT; PAM sequence: ATGGGT
atgcatgttcattattccaa

SEQ ID NO: 30144 - DNA, 20 bp, Artificial Sequence
  Description of Artificial Sequence: Synthetic oligonucleotide
  Target: LAMA2; (+) strand; PAM type: NNGRRT; PAM sequence: GTGAAT
gtcttgaaactttcatgcat

SEQ ID NO: 30145 - DNA, 20 bp, Artificial Sequence
  Description of Artificial Sequence: Synthetic oligonucleotide
  Target: LAMA2; (+) strand; PAM type: NNGRRT; PAM sequence: TTGGAT
aaaatggacattttccagta

SEQ ID NO: 30146 - DNA, 20 bp, Artificial Sequence
  Description of Artificial Sequence: Synthetic oligonucleotide
  Target: LAMA2; (+) strand; PAM type: NNGRRT; PAM sequence: TGGAAT
tggcaactagatgtatactt

SEQ ID NO: 30147 - DNA, 20 bp, Artificial Sequence
  Description of Artificial Sequence: Synthetic oligonucleotide
  Target: LAMA2; (+) strand; PAM type: NNGRRT; PAM sequence: AAGAGT
tggaattcctttaaggtgaa

SEQ ID NO: 30148 - DNA, 20 bp, Artificial Sequence
  Description of Artificial Sequence: Synthetic oligonucleotide
  Target: LAMA2; (+) strand; PAM type: NNGRRT; PAM sequence: TTGAGT
agttctctaaatgtaaagtg

SEQ ID NO: 30149 - DNA, 20 bp, Artificial Sequence
  Description of Artificial Sequence: Synthetic oligonucleotide
  Target: LAMA2; (+) strand; PAM type: NNGRRT; PAM sequence: GTGAAT
tgaaattatttagcattcat

SEQ ID NO: 30150 - DNA, 20 bp, Artificial Sequence
  Description of Artificial Sequence: Synthetic oligonucleotide
  Target: LAMA2; (+) strand; PAM type: NNGRRT; PAM sequence: AAGGAT
tgtgaatgaactaagacaag

SEQ ID NO: 30151 - DNA, 20 bp, Artificial Sequence
  Description of Artificial Sequence: Synthetic oligonucleotide
  Target: LAMA2; (+) strand; PAM type: NNGRRT; PAM sequence: GAGAAT
agatgccattgtcctatttt

SEQ ID NO: 30152 - DNA, 20 bp, Artificial Sequence
  Description of Artificial Sequence: Synthetic oligonucleotide
  Target: LAMA2; (+) strand; PAM type: NNGRRT; PAM sequence: ATGAGT
ttgtaatcacatatatgttt

SEQ ID NO: 30153 - DNA, 20 bp, Artificial Sequence
  Description of Artificial Sequence: Synthetic oligonucleotide
  Target: LAMA2; (+) strand; PAM type: NNGRRT; PAM sequence: CTGAAT
gtataccacaaatatattcc

SEQ ID NO: 30154 - DNA, 20 bp, Artificial Sequence
  Description of Artificial Sequence: Synthetic oligonucleotide
  Target: LAMA2; (+) strand; PAM type: NNGRRT; PAM sequence: CCGGGT
aaaataaaagtctactaagg

SEQ ID NO: 30155 - DNA, 20 bp, Artificial Sequence
  Description of Artificial Sequence: Synthetic oligonucleotide
  Target: LAMA2; (+) strand; PAM type: NNGRRT; PAM sequence: GTGGAT
actttgggaggctgaggcag

SEQ ID NO: 30156 - DNA, 20 bp, Artificial Sequence
  Description of Artificial Sequence: Synthetic oligonucleotide
  Target: LAMA2; (+) strand; PAM type: NNGRRT; PAM sequence: AGGAGT
caggtggatcacctgatgtc

SEQ ID NO: 30157 - DNA, 20 bp, Artificial Sequence
  Description of Artificial Sequence: Synthetic oligonucleotide
  Target: LAMA2; (+) strand; PAM type: NNGRRT; PAM sequence: GAGAAT
tattatggaggctgaggcat

SEQ ID NO: 30158 - DNA, 20 bp, Artificial Sequence
  Description of Artificial Sequence: Synthetic oligonucleotide
  Target: LAMA2; (+) strand; PAM type: NNGRRT; PAM sequence: GGGGAT
cgccgttgcactccagcctg

SEQ ID NO: 30159 - DNA, 20 bp, Artificial Sequence
  Description of Artificial Sequence: Synthetic oligonucleotide
  Target: LAMA2; (+) strand; PAM type: NNGRRT; PAM sequence: GAGGGT
tttaaagttaaaagtctatt

SEQ ID NO: 30160 - DNA, 20 bp, Artificial Sequence
  Description of Artificial Sequence: Synthetic oligonucleotide
  Target: LAMA2; (+) strand; PAM type: NNGRRT; PAM sequence: GAGGAT
ttaaaagtctattgagggtg

SEQ ID NO: 30161 - DNA, 20 bp, Artificial Sequence
  Description of Artificial Sequence: Synthetic oligonucleotide
  Target: LAMA2; (+) strand; PAM type: NNGRRT; PAM sequence: TAGGGT
atttcttttttttccccctt

SEQ ID NO: 30162 - DNA, 20 bp, Artificial Sequence
  Description of Artificial Sequence: Synthetic oligonucleotide
  Target: LAMA2; (+) strand; PAM type: NNGRRT; PAM sequence: AAGAAT
taatgtattgttacttaaag

SEQ ID NO: 30163 - DNA, 20 bp, Artificial Sequence
  Description of Artificial Sequence: Synthetic oligonucleotide
  Target: LAMA2; (+) strand; PAM type: NNGRRT; PAM sequence: AGGAAT
acattttccagtccgtagaa

SEQ ID NO: 30164 - DNA, 20 bp, Artificial Sequence
  Description of Artificial Sequence: Synthetic oligonucleotide
  Target: LAMA2; (+) strand; PAM type: NNGRRT; PAM sequence: GCGAAT
aggaatttatgacagtgctt

SEQ ID NO: 30165 - DNA, 20 bp, Artificial Sequence
  Description of Artificial Sequence: Synthetic oligonucleotide
  Target: LAMA2; (+) strand; PAM type: NNGRRT; PAM sequence: GAGAGT
acagtgcttgcgaatttgaa

SEQ ID NO: 30166 - DNA, 20 bp, Artificial Sequence
  Description of Artificial Sequence: Synthetic oligonucleotide
  Target: LAMA2; (+) strand; PAM type: NNGRRT; PAM sequence: TGGGAT
ctacaaatcacatacagctt

SEQ ID NO: 30167 - DNA, 20 bp, Artificial Sequence
  Description of Artificial Sequence: Synthetic oligonucleotide
  Target: LAMA2; (+) strand; PAM type: NNGRRT; PAM sequence: ATGGAT
aaatcacatacagctttggg

SEQ ID NO: 30168 - DNA, 20 bp, Artificial Sequence
  Description of Artificial Sequence: Synthetic oligonucleotide
  Target: LAMA2; (+) strand; PAM type: NNGRRT; PAM sequence: AGGAGT
caaggtgcaggagccgcccc

SEQ ID NO: 30169 - DNA, 20 bp, Artificial Sequence
  Description of Artificial Sequence: Synthetic oligonucleotide
  Target: LAMA2; (+) strand; PAM type: NNGRRT; PAM sequence: GTGAAT
gtgcaggagccgccccagga

SEQ ID NO: 30170 - DNA, 20 bp, Artificial Sequence
  Description of Artificial Sequence: Synthetic oligonucleotide
  Target: LAMA2; (+) strand; PAM type: NNGRRT; PAM sequence: TAGGAT
agtgaattttttaaggcacc

SEQ ID NO: 30171 - DNA, 20 bp, Artificial Sequence
  Description of Artificial Sequence: Synthetic oligonucleotide
  Target: LAMA2; (+) strand; PAM type: NNGRRT; PAM sequence: CAGAAT
cctttacagttttaaatatg

SEQ ID NO: 30172 - DNA, 20 bp, Artificial Sequence
  Description of Artificial Sequence: Synthetic oligonucleotide
  Target: LAMA2; (+) strand; PAM type: NNGRRT; PAM sequence: AAGAAT
cagccatatggtataaagga

SEQ ID NO: 30173 - DNA, 20 bp, Artificial Sequence
  Description of Artificial Sequence: Synthetic oligonucleotide
  Target: LAMA2; (+) strand; PAM type: NNGRRT; PAM sequence: CTGAAT
atatgaactttggagccaaa

SEQ ID NO: 30174 - DNA, 20 bp, Artificial Sequence
  Description of Artificial Sequence: Synthetic oligonucleotide
  Target: LAMA2; (+) strand; PAM type: NNGRRT; PAM sequence: GTGGAT
acgtttcttttcagtgtaaa

SEQ ID NO: 30175 - DNA, 20 bp, Artificial Sequence
  Description of Artificial Sequence: Synthetic oligonucleotide
  Target: LAMA2; (+) strand; PAM type: NNGRRT; PAM sequence: CAGGGT
atatagtaatgcctactttt

SEQ ID NO: 30176 - DNA, 20 bp, Artificial Sequence
  Description of Artificial Sequence: Synthetic oligonucleotide
  Target: LAMA2; (+) strand; PAM type: NNGRRT; PAM sequence: AAGAGT
tccccgccccctttttttaa

SEQ ID NO: 30177 - DNA, 20 bp, Artificial Sequence
  Description of Artificial Sequence: Synthetic oligonucleotide
  Target: LAMA2; (+) strand; PAM type: NNGRRT; PAM sequence: TCGGGT
ctgacttgaaccaaatatgc

SEQ ID NO: 30178 - DNA, 20 bp, Artificial Sequence
  Description of Artificial Sequence: Synthetic oligonucleotide
  Target: LAMA2; (+) strand; PAM type: NNGRRT; PAM sequence: CAGAAT
acaatgacatttttatctga

SEQ ID NO: 30179 - DNA, 20 bp, Artificial Sequence
  Description of Artificial Sequence: Synthetic oligonucleotide
  Target: LAMA2; (+) strand; PAM type: NNGRRT; PAM sequence: CTGAAT
aattttaacttcaactgtgt

SEQ ID NO: 30180 - DNA, 20 bp, Artificial Sequence
  Description of Artificial Sequence: Synthetic oligonucleotide
  Target: LAMA2; (+) strand; PAM type: NNGRRT; PAM sequence: TGGAGT
gaaagcaatgtctccaatat

SEQ ID NO: 30181 - DNA, 20 bp, Artificial Sequence
  Description of Artificial Sequence: Synthetic oligonucleotide
  Target: LAMA2; (+) strand; PAM type: NNGRRT; PAM sequence: CAGAAT
tttcccaaaggagagaactg

SEQ ID NO: 30182 - DNA, 20 bp, Artificial Sequence
  Description of Artificial Sequence: Synthetic oligonucleotide
  Target: LAMA2; (+) strand; PAM type: NNGRRT; PAM sequence: CTGGGT
ataggcaattcttctagaag

SEQ ID NO: 30183 - DNA, 20 bp, Artificial Sequence
  Description of Artificial Sequence: Synthetic oligonucleotide
  Target: LAMA2; (+) strand; PAM type: NNGRRT; PAM sequence: AGGAAT
ggagatgagaagcagcactt

SEQ ID NO: 30184 - DNA, 20 bp, Artificial Sequence
  Description of Artificial Sequence: Synthetic oligonucleotide
  Target: LAMA2; (+) strand; PAM type: NNGRRT; PAM sequence: ATGAGT
tgtttaaacagtacaaagaa

SEQ ID NO: 30185 - DNA, 20 bp, Artificial Sequence
  Description of Artificial Sequence: Synthetic oligonucleotide
  Target: LAMA2; (+) strand; PAM type: NNGRRT; PAM sequence: ATGAAT
tgagtcctccagctttcaaa

SEQ ID NO: 30186 - DNA, 20 bp, Artificial Sequence
  Description of Artificial Sequence: Synthetic oligonucleotide
  Target: LAMA2; (+) strand; PAM type: NNGRRT; PAM sequence: AGGAAT
ctgaggtttcgccatacagg

SEQ ID NO: 30187 - DNA, 20 bp, Artificial Sequence
  Description of Artificial Sequence: Synthetic oligonucleotide
  Target: LAMA2; (+) strand; PAM type: NNGRRT; PAM sequence: ATGAAT
caggtgagctgaaagtcggc

SEQ ID NO: 30188 - DNA, 20 bp, Artificial Sequence
  Description of Artificial Sequence: Synthetic oligonucleotide
  Target: LAMA2; (+) strand; PAM type: NNGRRT; PAM sequence: TGGAGT
gctgaaagtcggcatgaatc

SEQ ID NO: 30189 - DNA, 20 bp, Artificial Sequence
  Description of Artificial Sequence: Synthetic oligonucleotide
  Target: LAMA2; (+) strand; PAM type: NNGRRT; PAM sequence: TTGAGT
atctttgatctactagtaga

SEQ ID NO: 30190 - DNA, 20 bp, Artificial Sequence
  Description of Artificial Sequence: Synthetic oligonucleotide
  Target: LAMA2; (+) strand; PAM type: NNGRRT; PAM sequence: TTGAAT
tcatatttgtaaaacatcac

SEQ ID NO: 30191 - DNA, 20 bp, Artificial Sequence
  Description of Artificial Sequence: Synthetic oligonucleotide
  Target: LAMA2; (+) strand; PAM type: NNGRRT; PAM sequence: GTGGAT
catattcagacttatttaca

SEQ ID NO: 30192 - DNA, 20 bp, Artificial Sequence
  Description of Artificial Sequence: Synthetic oligonucleotide
  Target: LAMA2; (+) strand; PAM type: NNGRRT; PAM sequence: TGGAAT
cagttagttatatgattaga

SEQ ID NO: 30193 - DNA, 20 bp, Artificial Sequence
  Description of Artificial Sequence: Synthetic oligonucleotide
  Target: LAMA2; (+) strand; PAM type: NNGRRT; PAM sequence: GCGGGT
aacagaaggagaactggact

SEQ ID NO: 30194 - DNA, 20 bp, Artificial Sequence
  Description of Artificial Sequence: Synthetic oligonucleotide
  Target: LAMA2; (+) strand; PAM type: NNGRRT; PAM sequence: AAGAAT
ggagaactggactgcgggtc

SEQ ID NO: 30195 - DNA, 20 bp, Artificial Sequence
  Description of Artificial Sequence: Synthetic oligonucleotide
  Target: LAMA2; (+) strand; PAM type: NNGRRT; PAM sequence: AAGAAT
cagcttcaaaaagtcaccgc

SEQ ID NO: 30196 - DNA, 20 bp, Artificial Sequence
  Description of Artificial Sequence: Synthetic oligonucleotide
  Target: LAMA2; (+) strand; PAM type: NNGRRT; PAM sequence: TTGAAT
tcaaaaagtcaccgcaagaa

SEQ ID NO: 30197 - DNA, 20 bp, Artificial Sequence
  Description of Artificial Sequence: Synthetic oligonucleotide
  Target: LAMA2; (+) strand; PAM type: NNGRRT; PAM sequence: AAGGAT
atcttatctacttcatccca

SEQ ID NO: 30198 - DNA, 20 bp, Artificial Sequence
  Description of Artificial Sequence: Synthetic oligonucleotide
  Target: LAMA2; (+) strand; PAM type: NNGRRT; PAM sequence: CAGAAT
ttcttactatcatttttatc

SEQ ID NO: 30199 - DNA, 20 bp, Artificial Sequence
  Description of Artificial Sequence: Synthetic oligonucleotide
  Target: LAMA2; (+) strand; PAM type: NNGRRT; PAM sequence: AAGAAT
aaactcttcattcttctttt

SEQ ID NO: 30200 - DNA, 20 bp, Artificial Sequence
  Description of Artificial Sequence: Synthetic oligonucleotide
  Target: LAMA2; (+) strand; PAM type: NNGRRT; PAM sequence: TTGGAT
acctttaaattatccaagac

SEQ ID NO: 30201 - DNA, 20 bp, Artificial Sequence
  Description of Artificial Sequence: Synthetic oligonucleotide
  Target: LAMA2; (+) strand; PAM type: NNGRRT; PAM sequence: TAGAGT
aactttacagtagacattag

SEQ ID NO: 30202 - DNA, 20 bp, Artificial Sequence
  Description of Artificial Sequence: Synthetic oligonucleotide
  Target: LAMA2; (+) strand; PAM type: NNGRRT; PAM sequence: GGGGAT
aatttccaatctcatctata

SEQ ID NO: 30203 - DNA, 20 bp, Artificial Sequence
  Description of Artificial Sequence: Synthetic oligonucleotide
  Target: LAMA2; (+) strand; PAM type: NNGRRT; PAM sequence: GAGGGT
attgcatttctctaatcctg

SEQ ID NO: 30204 - DNA, 20 bp, Artificial Sequence
  Description of Artificial Sequence: Synthetic oligonucleotide
  Target: LAMA2; (+) strand; PAM type: NNGRRT; PAM sequence: TTGAAT
tttttttcctgaggtaaaca

SEQ ID NO: 30205 - DNA, 20 bp, Artificial Sequence
  Description of Artificial Sequence: Synthetic oligonucleotide
  Target: LAMA2; (+) strand; PAM type: NNGRRT; PAM sequence: TAGAAT
tactcaggaggctgaggcag

SEQ ID NO: 30206 - DNA, 20 bp, Artificial Sequence
  Description of Artificial Sequence: Synthetic oligonucleotide
  Target: LAMA2; (+) strand; PAM type: NNGRRT; PAM sequence: CGGGAT
gcagtagaatcacttgaacc

SEQ ID NO: 30207 - DNA, 20 bp, Artificial Sequence
  Description of Artificial Sequence: Synthetic oligonucleotide
  Target: LAMA2; (+) strand; PAM type: NNGRRT; PAM sequence: CTGGGT
tcgcgccattgcactccagc

SEQ ID NO: 30208 - DNA, 20 bp, Artificial Sequence
  Description of Artificial Sequence: Synthetic oligonucleotide
  Target: LAMA2; (+) strand; PAM type: NNGRRT; PAM sequence: TGGAAT
aaaaaaaaaaaaaaaaagcc

SEQ ID NO: 30209 - DNA, 20 bp, Artificial Sequence
  Description of Artificial Sequence: Synthetic oligonucleotide
  Target: LAMA2; (+) strand; PAM type: NNGRRT; PAM sequence: GAGGAT
aacagtcacccaggcctgta

SEQ ID NO: 30210 - DNA, 20 bp, Artificial Sequence
  Description of Artificial Sequence: Synthetic oligonucleotide
  Target: LAMA2; (+) strand; PAM type: NNGRRT; PAM sequence: ATGAGT
aggcctgtagaggattttac

SEQ ID NO: 30211 - DNA, 20 bp, Artificial Sequence
  Description of Artificial Sequence: Synthetic oligonucleotide
  Target: LAMA2; (+) strand; PAM type: NNGRRT; PAM sequence: TGGAGT
ctgttaagccattgagattt

SEQ ID NO: 30212 - DNA, 20 bp, Artificial Sequence
  Description of Artificial Sequence: Synthetic oligonucleotide
  Target: LAMA2; (+) strand; PAM type: NNGRRT; PAM sequence: CCGAGT
gagttgttaccacagcataa

SEQ ID NO: 30213 - DNA, 20 bp, Artificial Sequence
  Description of Artificial Sequence: Synthetic oligonucleotide
  Target: LAMA2; (+) strand; PAM type: NNGRRT; PAM sequence: ATGAGT
acttcatcacgatataactc

SEQ ID NO: 30214 - DNA, 20 bp, Artificial Sequence
  Description of Artificial Sequence: Synthetic oligonucleotide
  Target: LAMA2; (+) strand; PAM type: NNGRRT; PAM sequence: CAGAAT
gtattgcttgaaaataaata

SEQ ID NO: 30215 - DNA, 20 bp, Artificial Sequence
  Description of Artificial Sequence: Synthetic oligonucleotide
  Target: LAMA2; (+) strand; PAM type: NNGRRT; PAM sequence: TGGGAT
ttagtgtaaattttgcggtt

SEQ ID NO: 30216 - DNA, 20 bp, Artificial Sequence
  Description of Artificial Sequence: Synthetic oligonucleotide
  Target: LAMA2; (+) strand; PAM type: NNGRRT; PAM sequence: CAGAAT
tgggatcaaaaaagattata

SEQ ID NO: 30217 - DNA, 20 bp, Artificial Sequence
  Description of Artificial Sequence: Synthetic oligonucleotide
  Target: LAMA2; (+) strand; PAM type: NNGRRT; PAM sequence: AGGAGT
aaaaattcctttgtaaacaa

SEQ ID NO: 30218 - DNA, 20 bp, Artificial Sequence
  Description of Artificial Sequence: Synthetic oligonucleotide
  Target: LAMA2; (+) strand; PAM type: NNGRRT; PAM sequence: TTGGGT
tgccttctgaagttaatgat

SEQ ID NO: 30219 - DNA, 20 bp, Artificial Sequence
  Description of Artificial Sequence: Synthetic oligonucleotide
  Target: LAMA2; (+) strand; PAM type: NNGRRT; PAM sequence: TTGGAT
ccaatgctattccataagtg

SEQ ID NO: 30220 - DNA, 20 bp, Artificial Sequence
  Description of Artificial Sequence: Synthetic oligonucleotide
  Target: LAMA2; (+) strand; PAM type: NNGRRT; PAM sequence: CAGGGT
acatatgttgggaggcaatg

SEQ ID NO: 30221 - DNA, 20 bp, Artificial Sequence
  Description of Artificial Sequence: Synthetic oligonucleotide
  Target: LAMA2; (+) strand; PAM type: NNGRRT; PAM sequence: TGGAGT
aacaaggagatctttggttt

SEQ ID NO: 30222 - DNA, 20 bp, Artificial Sequence
  Description of Artificial Sequence: Synthetic oligonucleotide
  Target: LAMA2; (+) strand; PAM type: NNGRRT; PAM sequence: TTGGGT
ctttggttttggagtcatgc

SEQ ID NO: 30223 - DNA, 20 bp, Artificial Sequence
  Description of Artificial Sequence: Synthetic oligonucleotide
  Target: LAMA2; (+) strand; PAM type: NNGRRT; PAM sequence: TTGAAT
ttttggagtcatgcttgggt

SEQ ID NO: 30224 - DNA, 20 bp, Artificial Sequence
  Description of Artificial Sequence: Synthetic oligonucleotide
  Target: LAMA2; (+) strand; PAM type: NNGRRT; PAM sequence: GTGAAT
cagattcttcatttgtaaat

SEQ ID NO: 30225 - DNA, 20 bp, Artificial Sequence
  Description of Artificial Sequence: Synthetic oligonucleotide
  Target: LAMA2; (+) strand; PAM type: NNGRRT; PAM sequence: ATGGGT
atttgtaaatgtgaatagac

SEQ ID NO: 30226 - DNA, 20 bp, Artificial Sequence
  Description of Artificial Sequence: Synthetic oligonucleotide
  Target: LAMA2; (+) strand; PAM type: NNGRRT; PAM sequence: AAGGAT
gtcattctaggctaggctat

SEQ ID NO: 30227 - DNA, 20 bp, Artificial Sequence
  Description of Artificial Sequence: Synthetic oligonucleotide
  Target: LAMA2; (+) strand; PAM type: NNGRRT; PAM sequence: ATGAAT
gtagaactaagaaggaagca

SEQ ID NO: 30228 - DNA, 20 bp, Artificial Sequence
  Description of Artificial Sequence: Synthetic oligonucleotide
  Target: LAMA2; (+) strand; PAM type: NNGRRT; PAM sequence: TGGGAT
gttactgctcttactcgatg

SEQ ID NO: 30229 - DNA, 20 bp, Artificial Sequence
  Description of Artificial Sequence: Synthetic oligonucleotide
  Target: LAMA2; (+) strand; PAM type: NNGRRT; PAM sequence: GTGGGT
tatatatatatatatatata

SEQ ID NO: 30230 - DNA, 20 bp, Artificial Sequence
  Description of Artificial Sequence: Synthetic oligonucleotide
  Target: LAMA2; (+) strand; PAM type: NNGRRT; PAM sequence: AAGGGT
aaaaagacaattgtaacatc

SEQ ID NO: 30231 - DNA, 20 bp, Artificial Sequence
  Description of Artificial Sequence: Synthetic oligonucleotide
  Target: LAMA2; (+) strand; PAM type: NNGRRT; PAM sequence: AAGAGT
aaggcataaaaataagaggg

SEQ ID NO: 30232 - DNA, 20 bp, Artificial Sequence
  Description of Artificial Sequence: Synthetic oligonucleotide
  Target: LAMA2; (+) strand; PAM type: NNGRRT; PAM sequence: ATGAAT
tgccaacattatgtatttaa

SEQ ID NO: 30233 - DNA, 20 bp, Artificial Sequence
  Description of Artificial Sequence: Synthetic oligonucleotide
  Target: LAMA2; (+) strand; PAM type: NNGRRT; PAM sequence: GAGAAT
tgaatgcagcttgatatcaa

SEQ ID NO: 30234 - DNA, 20 bp, Artificial Sequence
  Description of Artificial Sequence: Synthetic oligonucleotide
  Target: LAMA2; (+) strand; PAM type: NNGRRT; PAM sequence: ATGAGT
aataaactgcagccttcttc

SEQ ID NO: 30235 - DNA, 20 bp, Artificial Sequence
  Description of Artificial Sequence: Synthetic oligonucleotide
  Target: LAMA2; (+) strand; PAM type: NNGRRT; PAM sequence: TGGGAT
tagcagaacctaatgaacat

SEQ ID NO: 30236 - DNA, 20 bp, Artificial Sequence
  Description of Artificial Sequence: Synthetic oligonucleotide
  Target: LAMA2; (+) strand; PAM type: NNGRRT; PAM sequence: GTGAGT
atgaacattgggattgctca

SEQ ID NO: 30237 - DNA, 20 bp, Artificial Sequence
  Description of Artificial Sequence: Synthetic oligonucleotide
  Target: LAMA2; (+) strand; PAM type: NNGRRT; PAM sequence: TGGAAT
ttgctcagtgagtactaatg

SEQ ID NO: 30238 - DNA, 20 bp, Artificial Sequence
  Description of Artificial Sequence: Synthetic oligonucleotide
  Target: LAMA2; (+) strand; PAM type: NNGRRT; PAM sequence: TTGAGT
aatattactgggaaagatgt

SEQ ID NO: 30239 - DNA, 20 bp, Artificial Sequence
  Description of Artificial Sequence: Synthetic oligonucleotide
  Target: LAMA2; (+) strand; PAM type: NNGRRT; PAM sequence: CAGAAT
tgttgaagtttctcatagct

SEQ ID NO: 30240 - DNA, 20 bp, Artificial Sequence
  Description of Artificial Sequence: Synthetic oligonucleotide
  Target: LAMA2; (+) strand; PAM type: NNGRRT; PAM sequence: AGGAAT
tggttacacagattaaggag

SEQ ID NO: 30241 - DNA, 20 bp, Artificial Sequence
  Description of Artificial Sequence: Synthetic oligonucleotide
  Target: LAMA2; (+) strand; PAM type: NNGRRT; PAM sequence: AAGGAT
tcatctaattctgaaattaa

SEQ ID NO: 30242 - DNA, 20 bp, Artificial Sequence
  Description of Artificial Sequence: Synthetic oligonucleotide
  Target: LAMA2; (+) strand; PAM type: NNGRRT; PAM sequence: CAGAAT
aattctgaaattaaaaggat

SEQ ID NO: 30243 - DNA, 20 bp, Artificial Sequence
  Description of Artificial Sequence: Synthetic oligonucleotide
  Target: LAMA2; (+) strand; PAM type: NNGRRT; PAM sequence: GCGAGT
agatttcacaatacattcag

SEQ ID NO: 30244 - DNA, 20 bp, Artificial Sequence
  Description of Artificial Sequence: Synthetic oligonucleotide
  Target: LAMA2; (+) strand; PAM type: NNGRRT; PAM sequence: TGGAGT
ctttattgtatcctttgcca

SEQ ID NO: 30245 - DNA, 20 bp, Artificial Sequence
  Description of Artificial Sequence: Synthetic oligonucleotide
  Target: LAMA2; (+) strand; PAM type: NNGRRT; PAM sequence: AGGAGT
aagataggtttctgttctca

SEQ ID NO: 30246 - DNA, 20 bp, Artificial Sequence
  Description of Artificial Sequence: Synthetic oligonucleotide
  Target: LAMA2; (+) strand; PAM type: NNGRRT; PAM sequence: ATGAAT
aaaataggtattatgtgttc

SEQ ID NO: 30247 - DNA, 20 bp, Artificial Sequence
  Description of Artificial Sequence: Synthetic oligonucleotide
  Target: LAMA2; (+) strand; PAM type: NNGRRT; PAM sequence: ATGAAT
ggtattatgtgttcatgaat

SEQ ID NO: 30248 - DNA, 20 bp, Artificial Sequence
  Description of Artificial Sequence: Synthetic oligonucleotide
  Target: LAMA2; (+) strand; PAM type: NNGRRT; PAM sequence: ATGAAT
atccaaatattcatcaactg

SEQ ID NO: 30249 - DNA, 20 bp, Artificial Sequence
  Description of Artificial Sequence: Synthetic oligonucleotide
  Target: LAMA2; (+) strand; PAM type: NNGRRT; PAM sequence: ATGAAT
aaatattcatcaactgatga

SEQ ID NO: 30250 - DNA, 20 bp, Artificial Sequence
  Description of Artificial Sequence: Synthetic oligonucleotide
  Target: LAMA2; (+) strand; PAM type: NNGRRT; PAM sequence: AGGAAT
agtgaacattagtcattaaa

SEQ ID NO: 30251 - DNA, 20 bp, Artificial Sequence
  Description of Artificial Sequence: Synthetic oligonucleotide
  Target: LAMA2; (+) strand; PAM type: NNGRRT; PAM sequence: TAGAAT
catgctgcaatgaagttatc

SEQ ID NO: 30252 - DNA, 20 bp, Artificial Sequence
  Description of Artificial Sequence: Synthetic oligonucleotide
  Target: LAMA2; (+) strand; PAM type: NNGRRT; PAM sequence: AGGGGT
aaagcagattgttagtttac

SEQ ID NO: 30253 - DNA, 20 bp, Artificial Sequence
  Description of Artificial Sequence: Synthetic oligonucleotide
  Target: LAMA2; (+) strand; PAM type: NNGRRT; PAM sequence: GAGAAT
gttagaggaagaggggaaaa

SEQ ID NO: 30254 - DNA, 20 bp, Artificial Sequence
  Description of Artificial Sequence: Synthetic oligonucleotide
  Target: LAMA2; (+) strand; PAM type: NNGRRT; PAM sequence: ATGGAT
gaaaagagaatgactgccta

SEQ ID NO: 30255 - DNA, 20 bp, Artificial Sequence
  Description of Artificial Sequence: Synthetic oligonucleotide
  Target: LAMA2; (+) strand; PAM type: NNGRRT; PAM sequence: CTGGGT
gaatgactgcctaatggatt

SEQ ID NO: 30256 - DNA, 20 bp, Artificial Sequence
  Description of Artificial Sequence: Synthetic oligonucleotide
  Target: LAMA2; (+) strand; PAM type: NNGRRT; PAM sequence: TAGAAT
tttgggctgataaaatgtct

SEQ ID NO: 30257 - DNA, 20 bp, Artificial Sequence
  Description of Artificial Sequence: Synthetic oligonucleotide
  Target: LAMA2; (+) strand; PAM type: NNGRRT; PAM sequence: CAGAAT
attgtaaatgtactaaatca

SEQ ID NO: 30258 - DNA, 20 bp, Artificial Sequence
  Description of Artificial Sequence: Synthetic oligonucleotide
  Target: LAMA2; (+) strand; PAM type: NNGRRT; PAM sequence: GTGAAT
aatgcttaattttatatgat

SEQ ID NO: 30259 - DNA, 20 bp, Artificial Sequence
  Description of Artificial Sequence: Synthetic oligonucleotide
  Target: LAMA2; (+) strand; PAM type: NNGRRT; PAM sequence: CAGGGT
gacactgcatttttcattga

SEQ ID NO: 30260 - DNA, 20 bp, Artificial Sequence
  Description of Artificial Sequence: Synthetic oligonucleotide
  Target: LAMA2; (+) strand; PAM type: NNGRRT; PAM sequence: GAGAAT
ttgtccaagatgtgccccta

SEQ ID NO: 30261 - DNA, 20 bp, Artificial Sequence
  Description of Artificial Sequence: Synthetic oligonucleotide
  Target: LAMA2; (+) strand; PAM type: NNGRRT; PAM sequence: TTGGAT
atagcactcaattaatagtg

SEQ ID NO: 30262 - DNA, 20 bp, Artificial Sequence
  Description of Artificial Sequence: Synthetic oligonucleotide
  Target: LAMA2; (+) strand; PAM type: NNGRRT; PAM sequence: ATGAGT
cactcaattaatagtgttgg

SEQ ID NO: 30263 - DNA, 20 bp, Artificial Sequence
  Description of Artificial Sequence: Synthetic oligonucleotide
  Target: LAMA2; (+) strand; PAM type: NNGRRT; PAM sequence: GAGGGT
agataattgccttgtgttta

SEQ ID NO: 30264 - DNA, 20 bp, Artificial Sequence
  Description of Artificial Sequence: Synthetic oligonucleotide
  Target: LAMA2; (+) strand; PAM type: NNGRRT; PAM sequence: CAGGAT
gccatctggcactcagcagc

SEQ ID NO: 30265 - DNA, 20 bp, Artificial Sequence
  Description of Artificial Sequence: Synthetic oligonucleotide
  Target: LAMA2; (+) strand; PAM type: NNGRRT; PAM sequence: CAGGGT
ctgcctatatctggtgattt

SEQ ID NO: 30266 - DNA, 20 bp, Artificial Sequence
  Description of Artificial Sequence: Synthetic oligonucleotide
  Target: LAMA2; (+) strand; PAM type: NNGRRT; PAM sequence: TAGGAT
caaaagtactgtcaagtgtc

SEQ ID NO: 30267 - DNA, 20 bp, Artificial Sequence
  Description of Artificial Sequence: Synthetic oligonucleotide
  Target: LAMA2; (+) strand; PAM type: NNGRRT; PAM sequence: GGGGGT
gtgtctaggattagcaaagt

SEQ ID NO: 30268 - DNA, 20 bp, Artificial Sequence
  Description of Artificial Sequence: Synthetic oligonucleotide
  Target: LAMA2; (+) strand; PAM type: NNGRRT; PAM sequence: TTGGAT
attgctgaaaagcttacaat

SEQ ID NO: 30269 - DNA, 20 bp, Artificial Sequence
  Description of Artificial Sequence: Synthetic oligonucleotide
  Target: LAMA2; (+) strand; PAM type: NNGRRT; PAM sequence: GTGAAT
taacaagttatttggtaatt

SEQ ID NO: 30270 - DNA, 20 bp, Artificial Sequence
  Description of Artificial Sequence: Synthetic oligonucleotide
  Target: LAMA2; (+) strand; PAM type: NNGRRT; PAM sequence: GAGAAT
tgaaaaatgcaggccatagc

SEQ ID NO: 30271 - DNA, 20 bp, Artificial Sequence
  Description of Artificial Sequence: Synthetic oligonucleotide
  Target: LAMA2; (+) strand; PAM type: NNGRRT; PAM sequence: ATGAGT
tttttaaaactgtgattatt

SEQ ID NO: 30272 - DNA, 20 bp, Artificial Sequence
  Description of Artificial Sequence: Synthetic oligonucleotide
  Target: LAMA2; (+) strand; PAM type: NNGRRT; PAM sequence: TAGAGT
gtcatttaattatgtgctct

SEQ ID NO: 30273 - DNA, 20 bp, Artificial Sequence
  Description of Artificial Sequence: Synthetic oligonucleotide
  Target: LAMA2; (+) strand; PAM type: NNGRRT; PAM sequence: AAGAAT
agaaaaaattgaggcctaga

SEQ ID NO: 30274 - DNA, 20 bp, Artificial Sequence
  Description of Artificial Sequence: Synthetic oligonucleotide
  Target: LAMA2; (+) strand; PAM type: NNGRRT; PAM sequence: CAGGAT
aggctggtaaatatcagaga

SEQ ID NO: 30275 - DNA, 20 bp, Artificial Sequence
  Description of Artificial Sequence: Synthetic oligonucleotide
  Target: LAMA2; (+) strand; PAM type: NNGRRT; PAM sequence: GTGAAT
caataacatttatttaaaat

SEQ ID NO: 30276 - DNA, 20 bp, Artificial Sequence
  Description of Artificial Sequence: Synthetic oligonucleotide
  Target: LAMA2; (+) strand; PAM type: NNGRRT; PAM sequence: ATGAGT
accagcttttctctaaaata

SEQ ID NO: 30277 - DNA, 20 bp, Artificial Sequence
  Description of Artificial Sequence: Synthetic oligonucleotide
  Target: LAMA2; (+) strand; PAM type: NNGRRT; PAM sequence: ATGGAT
ggccatagatacagagaaca

SEQ ID NO: 30278 - DNA, 20 bp, Artificial Sequence
  Description of Artificial Sequence: Synthetic oligonucleotide
  Target: LAMA2; (+) strand; PAM type: NNGRRT; PAM sequence: TGGAAT
tttcaatttaaaagctaaga

SEQ ID NO: 30279 - DNA, 20 bp, Artificial Sequence
  Description of Artificial Sequence: Synthetic oligonucleotide
  Target: LAMA2; (+) strand; PAM type: NNGRRT; PAM sequence: TGGAAT
aaaagaaatcaagcagtcat

SEQ ID NO: 30280 - DNA, 20 bp, Artificial Sequence
  Description of Artificial Sequence: Synthetic oligonucleotide
  Target: LAMA2; (+) strand; PAM type: NNGRRT; PAM sequence: TTGAAT
taggttgagctctgttaacc

SEQ ID NO: 30281 - DNA, 20 bp, Artificial Sequence
  Description of Artificial Sequence: Synthetic oligonucleotide
  Target: LAMA2; (+) strand; PAM type: NNGRRT; PAM sequence: CAGGGT
agaagtgtgtcagtgcccac

SEQ ID NO: 30282 - DNA, 20 bp, Artificial Sequence
  Description of Artificial Sequence: Synthetic oligonucleotide
  Target: LAMA2; (+) strand; PAM type: NNGRRT; PAM sequence: AAGAAT
ctcttgtgaagtaagcttgc

SEQ ID NO: 30283 - DNA, 20 bp, Artificial Sequence
  Description of Artificial Sequence: Synthetic oligonucleotide
  Target: LAMA2; (+) strand; PAM type: NNGRRT; PAM sequence: TTGAAT
gtatcacttaaaaacaaaac

SEQ ID NO: 30284 - DNA, 20 bp, Artificial Sequence
  Description of Artificial Sequence: Synthetic oligonucleotide
  Target: LAMA2; (+) strand; PAM type: NNGRRT; PAM sequence: TAGAGT
caaaagctgtggctttcaat

SEQ ID NO: 30285 - DNA, 20 bp, Artificial Sequence
  Description of Artificial Sequence: Synthetic oligonucleotide
  Target: LAMA2; (+) strand; PAM type: NNGRRT; PAM sequence: CTGGAT
catatttgatctattgtatg

SEQ ID NO: 30286 - DNA, 20 bp, Artificial Sequence
  Description of Artificial Sequence: Synthetic oligonucleotide
  Target: LAMA2; (+) strand; PAM type: NNGRRT; PAM sequence: CAGAAT
tattgtatgctggatggtag

SEQ ID NO: 30287 - DNA, 20 bp, Artificial Sequence
  Description of Artificial Sequence: Synthetic oligonucleotide
  Target: LAMA2; (+) strand; PAM type: NNGRRT; PAM sequence: AAGAAT
ttttcctctacttcatttct

SEQ ID NO: 30288 - DNA, 20 bp, Artificial Sequence
  Description of Artificial Sequence: Synthetic oligonucleotide
  Target: LAMA2; (+) strand; PAM type: NNGRRT; PAM sequence: CAGAAT
catctgaagcatataatctt

SEQ ID NO: 30289 - DNA, 20 bp, Artificial Sequence
  Description of Artificial Sequence: Synthetic oligonucleotide
  Target: LAMA2; (+) strand; PAM type: NNGRRT; PAM sequence: AAGAAT
catataatcttcagaatgtc

SEQ ID NO: 30290 - DNA, 20 bp, Artificial Sequence
  Description of Artificial Sequence: Synthetic oligonucleotide
  Target: LAMA2; (+) strand; PAM type: NNGRRT; PAM sequence: AGGAAT
tctttaaaatggtgccttta

SEQ ID NO: 30291 - DNA, 20 bp, Artificial Sequence
  Description of Artificial Sequence: Synthetic oligonucleotide
  Target: LAMA2; (+) strand; PAM type: NNGRRT; PAM sequence: TTGAGT
tggtgcctttaaggaatcat

SEQ ID NO: 30292 - DNA, 20 bp, Artificial Sequence
  Description of Artificial Sequence: Synthetic oligonucleotide
  Target: LAMA2; (+) strand; PAM type: NNGRRT; PAM sequence: ATGGAT
tagatgagagaaaaataatt

SEQ ID NO: 30293 - DNA, 20 bp, Artificial Sequence
  Description of Artificial Sequence: Synthetic oligonucleotide
  Target: LAMA2; (+) strand; PAM type: NNGRRT; PAM sequence: CTGAAT
atacaaattctaagtgccca

SEQ ID NO: 30294 - DNA, 20 bp, Artificial Sequence
  Description of Artificial Sequence: Synthetic oligonucleotide
  Target: LAMA2; (+) strand; PAM type: NNGRRT; PAM sequence: TTGAAT
cccactgaatataaaattac

SEQ ID NO: 30295 - DNA, 20 bp, Artificial Sequence
  Description of Artificial Sequence: Synthetic oligonucleotide
  Target: LAMA2; (+) strand; PAM type: NNGRRT; PAM sequence: TGGGAT
caataaatatctatgaaaaa

SEQ ID NO: 30296 - DNA, 20 bp, Artificial Sequence
  Description of Artificial Sequence: Synthetic oligonucleotide
  Target: LAMA2; (+) strand; PAM type: NNGRRT; PAM sequence: AGGGAT
tacatgcaataatcattcaa

SEQ ID NO: 30297 - DNA, 20 bp, Artificial Sequence
  Description of Artificial Sequence: Synthetic oligonucleotide
  Target: LAMA2; (+) strand; PAM type: NNGRRT; PAM sequence: TGGAGT
gagagagatgcaaagtgtcc

SEQ ID NO: 30298 - DNA, 20 bp, Artificial Sequence
  Description of Artificial Sequence: Synthetic oligonucleotide
  Target: LAMA2; (+) strand; PAM type: NNGRRT; PAM sequence: TTGGAT
tggagtggagaaatcttaaa

SEQ ID NO: 30299 - DNA, 20 bp, Artificial Sequence
  Description of Artificial Sequence: Synthetic oligonucleotide
  Target: LAMA2; (+) strand; PAM type: NNGRRT; PAM sequence: TTGAGT
taacagatagatagaagcat

SEQ ID NO: 30300 - DNA, 20 bp, Artificial Sequence
  Description of Artificial Sequence: Synthetic oligonucleotide
  Target: LAMA2; (+) strand; PAM type: NNGRRT; PAM sequence: TTGAAT
taatccataaaagaacttaa

SEQ ID NO: 30301 - DNA, 20 bp, Artificial Sequence
  Description of Artificial Sequence: Synthetic oligonucleotide
  Target: LAMA2; (+) strand; PAM type: NNGRRT; PAM sequence: ATGAAT
cttaattgaatcaagagaca

SEQ ID NO: 30302 - DNA, 20 bp, Artificial Sequence
  Description of Artificial Sequence: Synthetic oligonucleotide
  Target: LAMA2; (+) strand; PAM type: NNGRRT; PAM sequence: TTGGAT
agacaatgaattttggaact

SEQ ID NO: 30303 - DNA, 20 bp, Artificial Sequence
  Description of Artificial Sequence: Synthetic oligonucleotide
  Target: LAMA2; (+) strand; PAM type: NNGRRT; PAM sequence: TGGGAT
ccttgttatcactaatatcc

SEQ ID NO: 30304 - DNA, 20 bp, Artificial Sequence
  Description of Artificial Sequence: Synthetic oligonucleotide
  Target: LAMA2; (+) strand; PAM type: NNGRRT; PAM sequence: CTGAGT
atcctgggatcccttaaaag

SEQ ID NO: 30305 - DNA, 20 bp, Artificial Sequence
  Description of Artificial Sequence: Synthetic oligonucleotide
  Target: LAMA2; (+) strand; PAM type: NNGRRT; PAM sequence: AAGGAT
ctgagaacctctggccaaaa

SEQ ID NO: 30306 - DNA, 20 bp, Artificial Sequence
  Description of Artificial Sequence: Synthetic oligonucleotide
  Target: LAMA2; (+) strand; PAM type: NNGRRT; PAM sequence: CAGGAT
ttggggccatagtgttgatt

SEQ ID NO: 30307 - DNA, 20 bp, Artificial Sequence
  Description of Artificial Sequence: Synthetic oligonucleotide
  Target: LAMA2; (+) strand; PAM type: NNGRRT; PAM sequence: GGGGAT
ttcacttgacagatgagaca

SEQ ID NO: 30308 - DNA, 20 bp, Artificial Sequence
  Description of Artificial Sequence: Synthetic oligonucleotide
  Target: LAMA2; (+) strand; PAM type: NNGRRT; PAM sequence: AAGAGT
acaggggatatactattaaa

SEQ ID NO: 30309 - DNA, 20 bp, Artificial Sequence
  Description of Artificial Sequence: Synthetic oligonucleotide
  Target: LAMA2; (+) strand; PAM type: NNGRRT; PAM sequence: TAGAAT
aaataatattaaccacctca

SEQ ID NO: 30310 - DNA, 20 bp, Artificial Sequence
  Description of Artificial Sequence: Synthetic oligonucleotide
  Target: LAMA2; (+) strand; PAM type: NNGRRT; PAM sequence: CTGAGT
ctgtccccaaggacgttgca

SEQ ID NO: 30311 - DNA, 20 bp, Artificial Sequence
  Description of Artificial Sequence: Synthetic oligonucleotide
  Target: LAMA2; (+) strand; PAM type: NNGRRT; PAM sequence: CAGGGT
aattctatgaaggaaataaa

SEQ ID NO: 30312 - DNA, 20 bp, Artificial Sequence
  Description of Artificial Sequence: Synthetic oligonucleotide
  Target: LAMA2; (+) strand; PAM type: NNGRRT; PAM sequence: CAGGGT
aataaacagggtgaaataaa

SEQ ID NO: 30313 - DNA, 20 bp, Artificial Sequence
  Description of Artificial Sequence: Synthetic oligonucleotide
  Target: LAMA2; (+) strand; PAM type: NNGRRT; PAM sequence: TCGAGT
ctgaggtggtgacagctaaa

SEQ ID NO: 30314 - DNA, 20 bp, Artificial Sequence
  Description of Artificial Sequence: Synthetic oligonucleotide
  Target: LAMA2; (+) strand; PAM type: NNGRRT; PAM sequence: AAGAAT
gacagctaaatcgagtgttg

SEQ ID NO: 30315 - DNA, 20 bp, Artificial Sequence
  Description of Artificial Sequence: Synthetic oligonucleotide
  Target: LAMA2; (+) strand; PAM type: NNGRRT; PAM sequence: TGGAGT
taaggaagcagcatagatcg

SEQ ID NO: 30316 - DNA, 20 bp, Artificial Sequence
  Description of Artificial Sequence: Synthetic oligonucleotide
  Target: LAMA2; (+) strand; PAM type: NNGRRT; PAM sequence: CAGAGT
catcattacaagcctttcag

SEQ ID NO: 30317 - DNA, 20 bp, Artificial Sequence
  Description of Artificial Sequence: Synthetic oligonucleotide
  Target: LAMA2; (+) strand; PAM type: NNGRRT; PAM sequence: TGGAGT
caagcctttcagcagagtag

SEQ ID NO: 30318 - DNA, 20 bp, Artificial Sequence
  Description of Artificial Sequence: Synthetic oligonucleotide
  Target: LAMA2; (+) strand; PAM type: NNGRRT; PAM sequence: TTGGGT
gtgtaatctgatttacattt

SEQ ID NO: 30319 - DNA, 20 bp, Artificial Sequence
  Description of Artificial Sequence: Synthetic oligonucleotide
  Target: LAMA2; (+) strand; PAM type: NNGRRT; PAM sequence: TGGGGT
tgatttacatttttgggttt

SEQ ID NO: 30320 - DNA, 20 bp, Artificial Sequence
  Description of Artificial Sequence: Synthetic oligonucleotide
  Target: LAMA2; (+) strand; PAM type: NNGRRT; PAM sequence: CAGGGT
gtgttttttgttgtttgaga

SEQ ID NO: 30321 - DNA, 20 bp, Artificial Sequence
  Description of Artificial Sequence: Synthetic oligonucleotide
  Target: LAMA2; (+) strand; PAM type: NNGRRT; PAM sequence: TGGAGT
tcttgctctgtcacctaggc

SEQ ID NO: 30322 - DNA, 20 bp, Artificial Sequence
  Description of Artificial Sequence: Synthetic oligonucleotide
  Target: LAMA2; (+) strand; PAM type: NNGRRT; PAM sequence: CTGAGT
gatcctcctgcctcagcctc

SEQ ID NO: 30323 - DNA, 20 bp, Artificial Sequence
  Description of Artificial Sequence: Synthetic oligonucleotide
  Target: LAMA2; (+) strand; PAM type: NNGRRT; PAM sequence: TGGGGT
acctcagcctcccaaagttc

SEQ ID NO: 30324 - DNA, 20 bp, Artificial Sequence
  Description of Artificial Sequence: Synthetic oligonucleotide
  Target: LAMA2; (+) strand; PAM type: NNGRRT; PAM sequence: CTGAGT
catgggccaacgcacccagc

SEQ ID NO: 30325 - DNA, 20 bp, Artificial Sequence
  Description of Artificial Sequence: Synthetic oligonucleotide
  Target: LAMA2; (+) strand; PAM type: NNGRRT; PAM sequence: AAGAAT
ggcattatggctacagtagg

SEQ ID NO: 30326 - DNA, 20 bp, Artificial Sequence
  Description of Artificial Sequence: Synthetic oligonucleotide
  Target: LAMA2; (+) strand; PAM type: NNGRRT; PAM sequence: ATGAAT
agaatgtgtcttaggagggc

SEQ ID NO: 30327 - DNA, 20 bp, Artificial Sequence
  Description of Artificial Sequence: Synthetic oligonucleotide
  Target: LAMA2; (+) strand; PAM type: NNGRRT; PAM sequence: AAGGGT
gcatgaataataggaaggag

SEQ ID NO: 30328 - DNA, 20 bp, Artificial Sequence
  Description of Artificial Sequence: Synthetic oligonucleotide
  Target: LAMA2; (+) strand; PAM type: NNGRRT; PAM sequence: TAGGAT
gcaatgacagtagttgctgt

SEQ ID NO: 30329 - DNA, 20 bp, Artificial Sequence
  Description of Artificial Sequence: Synthetic oligonucleotide
  Target: LAMA2; (+) strand; PAM type: NNGRRT; PAM sequence: GGGAAT
ttgctgttaggatcatggca

SEQ ID NO: 30330 - DNA, 20 bp, Artificial Sequence
  Description of Artificial Sequence: Synthetic oligonucleotide
  Target: LAMA2; (+) strand; PAM type: NNGRRT; PAM sequence: AAGAGT
atcatggcagggaatataaa

SEQ ID NO: 30331 - DNA, 20 bp, Artificial Sequence
  Description of Artificial Sequence: Synthetic oligonucleotide
  Target: LAMA2; (+) strand; PAM type: NNGRRT; PAM sequence: AAGAGT
ggggagagattaaagaaata

SEQ ID NO: 30332 - DNA, 20 bp, Artificial Sequence
  Description of Artificial Sequence: Synthetic oligonucleotide
  Target: LAMA2; (+) strand; PAM type: NNGRRT; PAM sequence: AAGAAT
attaaagaaataaagagttt

SEQ ID NO: 30333 - DNA, 20 bp, Artificial Sequence
  Description of Artificial Sequence: Synthetic oligonucleotide
  Target: LAMA2; (+) strand; PAM type: NNGRRT; PAM sequence: ATGAGT
aagaaataaagagtttaaga

SEQ ID NO: 30334 - DNA, 20 bp, Artificial Sequence
  Description of Artificial Sequence: Synthetic oligonucleotide
  Target: LAMA2; (+) strand; PAM type: NNGRRT; PAM sequence: TTGAAT
atgagtcatagatgaccagt

SEQ ID NO: 30335 - DNA, 20 bp, Artificial Sequence
  Description of Artificial Sequence: Synthetic oligonucleotide
  Target: LAMA2; (+) strand; PAM type: NNGRRT; PAM sequence: AGGAAT
tggtgtcatttactgagctg

SEQ ID NO: 30336 - DNA, 20 bp, Artificial Sequence
  Description of Artificial Sequence: Synthetic oligonucleotide
  Target: LAMA2; (+) strand; PAM type: NNGRRT; PAM sequence: GGGGGT
ggaatagttggtgtgtgtgg

SEQ ID NO: 30337 - DNA, 20 bp, Artificial Sequence
  Description of Artificial Sequence: Synthetic oligonucleotide
  Target: LAMA2; (+) strand; PAM type: NNGRRT; PAM sequence: TGGAAT
tgtgtgggggggtgggggca

SEQ ID NO: 30338 - DNA, 20 bp, Artificial Sequence
  Description of Artificial Sequence: Synthetic oligonucleotide
  Target: LAMA2; (+) strand; PAM type: NNGRRT; PAM sequence: CTGAAT
aggcgtcataaactatggaa

SEQ ID NO: 30339 - DNA, 20 bp, Artificial Sequence
  Description of Artificial Sequence: Synthetic oligonucleotide
  Target: LAMA2; (+) strand; PAM type: NNGRRT; PAM sequence: CAGGGT
gagctcctgacgttaagaag

SEQ ID NO: 30340 - DNA, 20 bp, Artificial Sequence
  Description of Artificial Sequence: Synthetic oligonucleotide
  Target: LAMA2; (+) strand; PAM type: NNGRRT; PAM sequence: AGGAGT
aaagaaattgtgggaggaaa

SEQ ID NO: 30341 - DNA, 20 bp, Artificial Sequence
  Description of Artificial Sequence: Synthetic oligonucleotide
  Target: LAMA2; (+) strand; PAM type: NNGRRT; PAM sequence: TTGGAT
ggcccaaggctgatgaaagg

SEQ ID NO: 30342 - DNA, 20 bp, Artificial Sequence
  Description of Artificial Sequence: Synthetic oligonucleotide
  Target: LAMA2; (+) strand; PAM type: NNGRRT; PAM sequence: CAGAAT
ggttggataaaatgcaattg

SEQ ID NO: 30343 - DNA, 20 bp, Artificial Sequence
  Description of Artificial Sequence: Synthetic oligonucleotide
  Target: LAMA2; (+) strand; PAM type: NNGRRT; PAM sequence: TCGAAT
tgcaattgcagaattgtcca

SEQ ID NO: 30344 - DNA, 20 bp, Artificial Sequence
  Description of Artificial Sequence: Synthetic oligonucleotide
  Target: LAMA2; (+) strand; PAM type: NNGRRT; PAM sequence: TGGAAT
gtccatcgaatttggctgca

SEQ ID NO: 30345 - DNA, 20 bp, Artificial Sequence
  Description of Artificial Sequence: Synthetic oligonucleotide
  Target: LAMA2; (+) strand; PAM type: NNGRRT; PAM sequence: TAGAAT
ggtggtgacacaaaacagat

SEQ ID NO: 30346 - DNA, 20 bp, Artificial Sequence
  Description of Artificial Sequence: Synthetic oligonucleotide
  Target: LAMA2; (+) strand; PAM type: NNGRRT; PAM sequence: TGGAAT
tgacacaaaacagattagaa

SEQ ID NO: 30347 - DNA, 20 bp, Artificial Sequence
  Description of Artificial Sequence: Synthetic oligonucleotide
  Target: LAMA2; (+) strand; PAM type: NNGRRT; PAM sequence: AGGAAT
tgaagtgtgaaaaagaggtg

SEQ ID NO: 30348 - DNA, 20 bp, Artificial Sequence
  Description of Artificial Sequence: Synthetic oligonucleotide
  Target: LAMA2; (+) strand; PAM type: NNGRRT; PAM sequence: AAGAGT
tgaggaatataatacttgtt

SEQ ID NO: 30349 - DNA, 20 bp, Artificial Sequence
  Description of Artificial Sequence: Synthetic oligonucleotide
  Target: LAMA2; (+) strand; PAM type: NNGRRT; PAM sequence: GAGAGT
gttattactaatccatcaga

SEQ ID NO: 30350 - DNA, 20 bp, Artificial Sequence
  Description of Artificial Sequence: Synthetic oligonucleotide
  Target: LAMA2; (+) strand; PAM type: NNGRRT; PAM sequence: GTGAAT
ttactaatccatcagagaga

SEQ ID NO: 30351 - DNA, 20 bp, Artificial Sequence
  Description of Artificial Sequence: Synthetic oligonucleotide
  Target: LAMA2; (+) strand; PAM type: NNGRRT; PAM sequence: TGGAAT
attgagaagataacagatgc

SEQ ID NO: 30352 - DNA, 20 bp, Artificial Sequence
  Description of Artificial Sequence: Synthetic oligonucleotide
  Target: LAMA2; (+) strand; PAM type: NNGRRT; PAM sequence: TGGAGT
tgctggaatcagatgacaag

SEQ ID NO: 30353 - DNA, 20 bp, Artificial Sequence
  Description of Artificial Sequence: Synthetic oligonucleotide
  Target: LAMA2; (+) strand; PAM type: NNGRRT; PAM sequence: TGGAAT
cattccccacatcacttgtt

SEQ ID NO: 30354 - DNA, 20 bp, Artificial Sequence
  Description of Artificial Sequence: Synthetic oligonucleotide
  Target: LAMA2; (+) strand; PAM type: NNGRRT; PAM sequence: GGGAAT
ccacatcacttgtttggaat

SEQ ID NO: 30355 - DNA, 20 bp, Artificial Sequence
  Description of Artificial Sequence: Synthetic oligonucleotide
  Target: LAMA2; (+) strand; PAM type: NNGRRT; PAM sequence: GTGAGT
ggcagctttaatttttttct

SEQ ID NO: 30356 - DNA, 20 bp, Artificial Sequence
  Description of Artificial Sequence: Synthetic oligonucleotide
  Target: LAMA2; (+) strand; PAM type: NNGRRT; PAM sequence: AGGAGT
ctggctaaaagagaggtgta

SEQ ID NO: 30357 - DNA, 20 bp, Artificial Sequence
  Description of Artificial Sequence: Synthetic oligonucleotide
  Target: LAMA2; (+) strand; PAM type: NNGRRT; PAM sequence: ATGAGT
ttgaagaaagaagacgtggt

SEQ ID NO: 30358 - DNA, 20 bp, Artificial Sequence
  Description of Artificial Sequence: Synthetic oligonucleotide
  Target: LAMA2; (+) strand; PAM type: NNGRRT; PAM sequence: CAGAGT
tggtatgagtactgcatttg

SEQ ID NO: 30359 - DNA, 20 bp, Artificial Sequence
  Description of Artificial Sequence: Synthetic oligonucleotide
  Target: LAMA2; (+) strand; PAM type: NNGRRT; PAM sequence: ATGAAT
aacttattaaggaaaacttc

SEQ ID NO: 30360 - DNA, 20 bp, Artificial Sequence
  Description of Artificial Sequence: Synthetic oligonucleotide
  Target: LAMA2; (+) strand; PAM type: NNGRRT; PAM sequence: ATGAAT
tccttaatttctaccccctt

SEQ ID NO: 30361 - DNA, 20 bp, Artificial Sequence
  Description of Artificial Sequence: Synthetic oligonucleotide
  Target: LAMA2; (+) strand; PAM type: NNGRRT; PAM sequence: ATGAAT
agaaggaaatcacttctata

SEQ ID NO: 30362 - DNA, 20 bp, Artificial Sequence
  Description of Artificial Sequence: Synthetic oligonucleotide
  Target: LAMA2; (+) strand; PAM type: NNGRRT; PAM sequence: AGGGAT
tgtaatggggagaaatggga

SEQ ID NO: 30363 - DNA, 20 bp, Artificial Sequence
  Description of Artificial Sequence: Synthetic oligonucleotide
  Target: LAMA2; (+) strand; PAM type: NNGRRT; PAM sequence: CAGGAT
tgggagaaatggaaacggaa

SEQ ID NO: 30364 - DNA, 20 bp, Artificial Sequence
  Description of Artificial Sequence: Synthetic oligonucleotide
  Target: LAMA2; (+) strand; PAM type: NNGRRT; PAM sequence: TTGGGT
aggatagaaatttgacaatt

SEQ ID NO: 30365 - DNA, 20 bp, Artificial Sequence
  Description of Artificial Sequence: Synthetic oligonucleotide
  Target: LAMA2; (+) strand; PAM type: NNGRRT; PAM sequence: GGGGGT
gacaattttgggttggttgt

SEQ ID NO: 30366 - DNA, 20 bp, Artificial Sequence
  Description of Artificial Sequence: Synthetic oligonucleotide
  Target: LAMA2; (+) strand; PAM type: NNGRRT; PAM sequence: GAGGGT
ttatacactggggcctgtcg

SEQ ID NO: 30367 - DNA, 20 bp, Artificial Sequence
  Description of Artificial Sequence: Synthetic oligonucleotide
  Target: LAMA2; (+) strand; PAM type: NNGRRT; PAM sequence: AAGGAT
ggagggtggggggctagggg

SEQ ID NO: 30368 - DNA, 20 bp, Artificial Sequence
  Description of Artificial Sequence: Synthetic oligonucleotide
  Target: LAMA2; (+) strand; PAM type: NNGRRT; PAM sequence: ATGGGT
agaaatatctaatgtagatg

SEQ ID NO: 30369 - DNA, 20 bp, Artificial Sequence
  Description of Artificial Sequence: Synthetic oligonucleotide
  Target: LAMA2; (+) strand; PAM type: NNGRRT; PAM sequence: ATGGGT
ctaatgtagatgatgggttg

SEQ ID NO: 30370 - DNA, 20 bp, Artificial Sequence
  Description of Artificial Sequence: Synthetic oligonucleotide
  Target: LAMA2; (+) strand; PAM type: NNGRRT; PAM sequence: GAGAGT
cattattgatgttcaaattt

SEQ ID NO: 30371 - DNA, 20 bp, Artificial Sequence
  Description of Artificial Sequence: Synthetic oligonucleotide
  Target: LAMA2; (+) strand; PAM type: NNGRRT; PAM sequence: GAGGGT
cacaagatgcaatttcactg

SEQ ID NO: 30372 - DNA, 20 bp, Artificial Sequence
  Description of Artificial Sequence: Synthetic oligonucleotide
  Target: LAMA2; (+) strand; PAM type: NNGRRT; PAM sequence: AAGGAT
cacagatggaaaacttaatt

SEQ ID NO: 30373 - DNA, 20 bp, Artificial Sequence
  Description of Artificial Sequence: Synthetic oligonucleotide
  Target: LAMA2; (+) strand; PAM type: NNGRRT; PAM sequence: GGGAAT
ttagagcaggcactgacaca

SEQ ID NO: 30374 - DNA, 20 bp, Artificial Sequence
  Description of Artificial Sequence: Synthetic oligonucleotide
  Target: LAMA2; (+) strand; PAM type: NNGRRT; PAM sequence: CAGAAT
ctaaaataccctgttttaat

SEQ ID NO: 30375 - DNA, 20 bp, Artificial Sequence
  Description of Artificial Sequence: Synthetic oligonucleotide
  Target: LAMA2; (+) strand; PAM type: NNGRRT; PAM sequence: AGGAAT
agtgtttcacattttaaaca

SEQ ID NO: 30376 - DNA, 20 bp, Artificial Sequence
  Description of Artificial Sequence: Synthetic oligonucleotide
  Target: LAMA2; (+) strand; PAM type: NNGRRT; PAM sequence: AAGAAT
aaatacaagcaaagttacag

SEQ ID NO: 30377 - DNA, 20 bp, Artificial Sequence
  Description of Artificial Sequence: Synthetic oligonucleotide
  Target: LAMA2; (+) strand; PAM type: NNGRRT; PAM sequence: AAGAAT
atgccataaaataagctatc

SEQ ID NO: 30378 - DNA, 20 bp, Artificial Sequence
  Description of Artificial Sequence: Synthetic oligonucleotide
  Target: LAMA2; (+) strand; PAM type: NNGRRT; PAM sequence: TAGGAT
gtaaatttgagaaagcataa

SEQ ID NO: 30379 - DNA, 20 bp, Artificial Sequence
  Description of Artificial Sequence: Synthetic oligonucleotide
  Target: LAMA2; (+) strand; PAM type: NNGRRT; PAM sequence: ATGAAT
ggaaatttagcatgaaatac

SEQ ID NO: 30380 - DNA, 20 bp, Artificial Sequence
  Description of Artificial Sequence: Synthetic oligonucleotide
  Target: LAMA2; (+) strand; PAM type: NNGRRT; PAM sequence: GTGGGT
gtatgtggtcaaatataagt

SEQ ID NO: 30381 - DNA, 20 bp, Artificial Sequence
  Description of Artificial Sequence: Synthetic oligonucleotide
  Target: LAMA2; (+) strand; PAM type: NNGRRT; PAM sequence: GAGAAT
gggcaagtgaacacattcca

SEQ ID NO: 30382 - DNA, 20 bp, Artificial Sequence
  Description of Artificial Sequence: Synthetic oligonucleotide
  Target: LAMA2; (+) strand; PAM type: NNGRRT; PAM sequence: TGGGAT
tccagagaatcaaaattgct

SEQ ID NO: 30383 - DNA, 20 bp, Artificial Sequence
  Description of Artificial Sequence: Synthetic oligonucleotide
  Target: LAMA2; (+) strand; PAM type: NNGRRT; PAM sequence: TCGGGT
caaaattgcttgggatgaca

SEQ ID NO: 30384 - DNA, 20 bp, Artificial Sequence
  Description of Artificial Sequence: Synthetic oligonucleotide
  Target: LAMA2; (+) strand; PAM type: NNGRRT; PAM sequence: ATGAGT
tcttaggctaagactatatg

SEQ ID NO: 30385 - DNA, 20 bp, Artificial Sequence
  Description of Artificial Sequence: Synthetic oligonucleotide
  Target: LAMA2; (+) strand; PAM type: NNGRRT; PAM sequence: AGGAAT
tgcaaagccccagtgtcagg

SEQ ID NO: 30386 - DNA, 20 bp, Artificial Sequence
  Description of Artificial Sequence: Synthetic oligonucleotide
  Target: LAMA2; (+) strand; PAM type: NNGRRT; PAM sequence: ATGAGT
tgctttgacaagcacatttg

SEQ ID NO: 30387 - DNA, 20 bp, Artificial Sequence
  Description of Artificial Sequence: Synthetic oligonucleotide
  Target: LAMA2; (+) strand; PAM type: NNGRRT; PAM sequence: GCGAGT
tcttgttggcctaggcacag

SEQ ID NO: 30388 - DNA, 20 bp, Artificial Sequence
  Description of Artificial Sequence: Synthetic oligonucleotide
  Target: LAMA2; (+) strand; PAM type: NNGRRT; PAM sequence: CGGAGT
atgtcagtgctttggtcatg

SEQ ID NO: 30389 - DNA, 20 bp, Artificial Sequence
  Description of Artificial Sequence: Synthetic oligonucleotide
  Target: LAMA2; (+) strand; PAM type: NNGRRT; PAM sequence: GAGAAT
gtcctgtgatgacgtcactg

SEQ ID NO: 30390 - DNA, 20 bp, Artificial Sequence
  Description of Artificial Sequence: Synthetic oligonucleotide
  Target: LAMA2; (+) strand; PAM type: NNGRRT; PAM sequence: GGGGAT
tggtaagtgctctcttcttt

SEQ ID NO: 30391 - DNA, 20 bp, Artificial Sequence
  Description of Artificial Sequence: Synthetic oligonucleotide
  Target: LAMA2; (+) strand; PAM type: NNGRRT; PAM sequence: TTGAGT
accctggggaccttaaacac

SEQ ID NO: 30392 - DNA, 20 bp, Artificial Sequence
  Description of Artificial Sequence: Synthetic oligonucleotide
  Target: LAMA2; (+) strand; PAM type: NNGRRT; PAM sequence: CTGAAT
acaaagatctttgtattgaa

SEQ ID NO: 30393 - DNA, 20 bp, Artificial Sequence
  Description of Artificial Sequence: Synthetic oligonucleotide
  Target: LAMA2; (+) strand; PAM type: NNGRRT; PAM sequence: GAGAAT
tattgaactgaattggaact

SEQ ID NO: 30394 - DNA, 20 bp, Artificial Sequence
  Description of Artificial Sequence: Synthetic oligonucleotide
  Target: LAMA2; (+) strand; PAM type: NNGRRT; PAM sequence: ATGAAT
tttcatatgtgatctcccta

SEQ ID NO: 30395 - DNA, 20 bp, Artificial Sequence
  Description of Artificial Sequence: Synthetic oligonucleotide
  Target: LAMA2; (+) strand; PAM type: NNGRRT; PAM sequence: AAGAAT
gtgtttattcatattaaatc

SEQ ID NO: 30396 - DNA, 20 bp, Artificial Sequence
  Description of Artificial Sequence: Synthetic oligonucleotide
  Target: LAMA2; (+) strand; PAM type: NNGRRT; PAM sequence: TAGAAT
tattaaatcaagaattaaat

SEQ ID NO: 30397 - DNA, 20 bp, Artificial Sequence
  Description of Artificial Sequence: Synthetic oligonucleotide
  Target: LAMA2; (+) strand; PAM type: NNGRRT; PAM sequence: ATGAAT
tgattggaagtataactacc

SEQ ID NO: 30398 - DNA, 20 bp, Artificial Sequence
  Description of Artificial Sequence: Synthetic oligonucleotide
  Target: LAMA2; (+) strand; PAM type: NNGRRT; PAM sequence: TAGGAT
tccatcctgctaagaaacct

SEQ ID NO: 30399 - DNA, 20 bp, Artificial Sequence
  Description of Artificial Sequence: Synthetic oligonucleotide
  Target: LAMA2; (+) strand; PAM type: NNGRRT; PAM sequence: GAGAAT
gctaagaaaccttaggattg

SEQ ID NO: 30400 - DNA, 20 bp, Artificial Sequence
  Description of Artificial Sequence: Synthetic oligonucleotide
  Target: LAMA2; (+) strand; PAM type: NNGRRT; PAM sequence: CTGAAT
cttaggattggagaattaca

SEQ ID NO: 30401 - DNA, 20 bp, Artificial Sequence
  Description of Artificial Sequence: Synthetic oligonucleotide
  Target: LAMA2; (+) strand; PAM type: NNGRRT; PAM sequence: GAGGAT
ttaaaatggtgccaattaag

SEQ ID NO: 30402 - DNA, 20 bp, Artificial Sequence
  Description of Artificial Sequence: Synthetic oligonucleotide
  Target: LAMA2; (+) strand; PAM type: NNGRRT; PAM sequence: AAGAAT
attatactctcatttccctg

SEQ ID NO: 30403 - DNA, 20 bp, Artificial Sequence
  Description of Artificial Sequence: Synthetic oligonucleotide
  Target: LAMA2; (+) strand; PAM type: NNGRRT; PAM sequence: GCGGAT
atttccctgaagaatttaag

SEQ ID NO: 30404 - DNA, 20 bp, Artificial Sequence
  Description of Artificial Sequence: Synthetic oligonucleotide
  Target: LAMA2; (+) strand; PAM type: NNGRRT; PAM sequence: GTGGAT
aagcatgagagccttaattt

SEQ ID NO: 30405 - DNA, 20 bp, Artificial Sequence
  Description of Artificial Sequence: Synthetic oligonucleotide
  Target: LAMA2; (+) strand; PAM type: NNGRRT; PAM sequence: GTGGAT
gagccttaatttgtggatca

SEQ ID NO: 30406 - DNA, 20 bp, Artificial Sequence
  Description of Artificial Sequence: Synthetic oligonucleotide
  Target: LAMA2; (+) strand; PAM type: NNGRRT; PAM sequence: ATGAAT
atttttgaaatgacattttt

SEQ ID NO: 30407 - DNA, 20 bp, Artificial Sequence
  Description of Artificial Sequence: Synthetic oligonucleotide
  Target: LAMA2; (+) strand; PAM type: NNGRRT; PAM sequence: TTGGGT
aatgtactttgggaaaaata

SEQ ID NO: 30408 - DNA, 20 bp, Artificial Sequence
  Description of Artificial Sequence: Synthetic oligonucleotide
  Target: LAMA2; (+) strand; PAM type: NNGRRT; PAM sequence: TGGAAT
tactcagcccaaaactgaca

SEQ ID NO: 30409 - DNA, 20 bp, Artificial Sequence
  Description of Artificial Sequence: Synthetic oligonucleotide
  Target: LAMA2; (+) strand; PAM type: NNGRRT; PAM sequence: ATGAAT
gttccatatagtcatatttc

SEQ ID NO: 30410 - DNA, 20 bp, Artificial Sequence
  Description of Artificial Sequence: Synthetic oligonucleotide
  Target: LAMA2; (+) strand; PAM type: NNGRRT; PAM sequence: TAGGAT
gtcatatttcatgaattcat

SEQ ID NO: 30411 - DNA, 20 bp, Artificial Sequence
  Description of Artificial Sequence: Synthetic oligonucleotide
  Target: LAMA2; (+) strand; PAM type: NNGRRT; PAM sequence: CTGAAT
aatcaaatcaaattttcatg

SEQ ID NO: 30412 - DNA, 20 bp, Artificial Sequence
  Description of Artificial Sequence: Synthetic oligonucleotide
  Target: LAMA2; (+) strand; PAM type: NNGRRT; PAM sequence: TAGGAT
aattttcatgctgaattcat

SEQ ID NO: 30413 - DNA, 20 bp, Artificial Sequence
  Description of Artificial Sequence: Synthetic oligonucleotide
  Target: LAMA2; (+) strand; PAM type: NNGRRT; PAM sequence: CAGAAT
ggacatcttgatgataaaga

SEQ ID NO: 30414 - DNA, 20 bp, Artificial Sequence
  Description of Artificial Sequence: Synthetic oligonucleotide
  Target: LAMA2; (+) strand; PAM type: NNGRRT; PAM sequence: CTGAAT
aagacagaatctggtgtttc

SEQ ID NO: 30415 - DNA, 20 bp, Artificial Sequence
  Description of Artificial Sequence: Synthetic oligonucleotide
  Target: LAMA2; (+) strand; PAM type: NNGRRT; PAM sequence: TAGGAT
ctagtaaataggtgatcatg

SEQ ID NO: 30416 - DNA, 20 bp, Artificial Sequence
  Description of Artificial Sequence: Synthetic oligonucleotide
  Target: LAMA2; (+) strand; PAM type: NNGRRT; PAM sequence: TTGAGT
ctaagtgctgatattccatt

SEQ ID NO: 30417 - DNA, 20 bp, Artificial Sequence
  Description of Artificial Sequence: Synthetic oligonucleotide
  Target: LAMA2; (+) strand; PAM type: NNGRRT; PAM sequence: ATGGGT
tgatattccattttgagtat

SEQ ID NO: 30418 - DNA, 20 bp, Artificial Sequence
  Description of Artificial Sequence: Synthetic oligonucleotide
  Target: LAMA2; (+) strand; PAM type: NNGRRT; PAM sequence: GAGAAT
ctgatacaatacacaaagag

SEQ ID NO: 30419 - DNA, 20 bp, Artificial Sequence
  Description of Artificial Sequence: Synthetic oligonucleotide
  Target: LAMA2; (+) strand; PAM type: NNGRRT; PAM sequence: TTGAAT
atacacaaagaggagaatat

SEQ ID NO: 30420 - DNA, 20 bp, Artificial Sequence
  Description of Artificial Sequence: Synthetic oligonucleotide
  Target: LAMA2; (+) strand; PAM type: NNGRRT; PAM sequence: CAGAGT
tgtaaaaataaccaatccat

SEQ ID NO: 30421 - DNA, 20 bp, Artificial Sequence
  Description of Artificial Sequence: Synthetic oligonucleotide
  Target: LAMA2; (+) strand; PAM type: NNGRRT; PAM sequence: TTGAGT
ggtttccactacaaaaatac

SEQ ID NO: 30422 - DNA, 20 bp, Artificial Sequence
  Description of Artificial Sequence: Synthetic oligonucleotide
  Target: LAMA2; (+) strand; PAM type: NNGRRT; PAM sequence: TTGAAT
caattatgcaagattttcag

SEQ ID NO: 30423 - DNA, 20 bp, Artificial Sequence
  Description of Artificial Sequence: Synthetic oligonucleotide
  Target: LAMA2; (+) strand; PAM type: NNGRRT; PAM sequence: ATGGAT
gggaaaaaatctttcttcaa

SEQ ID NO: 30424 - DNA, 20 bp, Artificial Sequence
  Description of Artificial Sequence: Synthetic oligonucleotide
  Target: LAMA2; (+) strand; PAM type: NNGRRT; PAM sequence: AAGAAT
tgttaaaaataaatttgaga

SEQ ID NO: 30425 - DNA, 20 bp, Artificial Sequence
  Description of Artificial Sequence: Synthetic oligonucleotide
  Target: LAMA2; (+) strand; PAM type: NNGRRT; PAM sequence: ATGAGT
aattttctccatgtttaatt

SEQ ID NO: 30426 - DNA, 20 bp, Artificial Sequence
  Description of Artificial Sequence: Synthetic oligonucleotide
  Target: LAMA2; (+) strand; PAM type: NNGRRT; PAM sequence: CAGAGT
tagtgcattgtccaaaccat

SEQ ID NO: 30427 - DNA, 20 bp, Artificial Sequence
  Description of Artificial Sequence: Synthetic oligonucleotide
  Target: LAMA2; (+) strand; PAM type: NNGRRT; PAM sequence: GAGGAT
gctaagaggccatagccccg

SEQ ID NO: 30428 - DNA, 20 bp, Artificial Sequence
  Description of Artificial Sequence: Synthetic oligonucleotide
  Target: LAMA2; (+) strand; PAM type: NNGRRT; PAM sequence: TAGAAT
ctgaacaattgatttttacc

SEQ ID NO: 30429 - DNA, 20 bp, Artificial Sequence
  Description of Artificial Sequence: Synthetic oligonucleotide
  Target: LAMA2; (+) strand; PAM type: NNGRRT; PAM sequence: ATGAAT
gcataatgaaaaacattaaa

SEQ ID NO: 30430 - DNA, 20 bp, Artificial Sequence
  Description of Artificial Sequence: Synthetic oligonucleotide
  Target: LAMA2; (+) strand; PAM type: NNGRRT; PAM sequence: AAGGAT
catttctttctcagaactgt

SEQ ID NO: 30431 - DNA, 20 bp, Artificial Sequence
  Description of Artificial Sequence: Synthetic oligonucleotide
  Target: LAMA2; (+) strand; PAM type: NNGRRT; PAM sequence: ATGAAT
gtaagtaacaaacttacccc

SEQ ID NO: 30432 - DNA, 20 bp, Artificial Sequence
  Description of Artificial Sequence: Synthetic oligonucleotide
  Target: LAMA2; (+) strand; PAM type: NNGRRT; PAM sequence: ATGAAT
aataaataataaacacagac

SEQ ID NO: 30433 - DNA, 20 bp, Artificial Sequence
  Description of Artificial Sequence: Synthetic oligonucleotide
  Target: LAMA2; (+) strand; PAM type: NNGRRT; PAM sequence: ATGAAT
aattttttcaggaaaattat

SEQ ID NO: 30434 - DNA, 20 bp, Artificial Sequence
  Description of Artificial Sequence: Synthetic oligonucleotide
  Target: LAMA2; (+) strand; PAM type: NNGRRT; PAM sequence: GAGGAT
cctaagatatttaaaactat

SEQ ID NO: 30435 - DNA, 20 bp, Artificial Sequence
  Description of Artificial Sequence: Synthetic oligonucleotide
  Target: LAMA2; (+) strand; PAM type: NNGRRT; PAM sequence: AAGAAT
ttaaaactatgaggatttct

SEQ ID NO: 30436 - DNA, 20 bp, Artificial Sequence
  Description of Artificial Sequence: Synthetic oligonucleotide
  Target: LAMA2; (+) strand; PAM type: NNGRRT; PAM sequence: AAGAGT
gttttggtgatttaatttct

SEQ ID NO: 30437 - DNA, 20 bp, Artificial Sequence
  Description of Artificial Sequence: Synthetic oligonucleotide
  Target: LAMA2; (+) strand; PAM type: NNGRRT; PAM sequence: TAGAAT
ttctaagagtagaactcaaa

SEQ ID NO: 30438 - DNA, 20 bp, Artificial Sequence
  Description of Artificial Sequence: Synthetic oligonucleotide
  Target: LAMA2; (+) strand; PAM type: NNGRRT; PAM sequence: AAGGAT
ccatcttcataccttaataa

SEQ ID NO: 30439 - DNA, 20 bp, Artificial Sequence
  Description of Artificial Sequence: Synthetic oligonucleotide
  Target: LAMA2; (+) strand; PAM type: NNGRRT; PAM sequence: TTGGGT
aggatataaatacagctaat

SEQ ID NO: 30440 - DNA, 20 bp, Artificial Sequence
  Description of Artificial Sequence: Synthetic oligonucleotide
  Target: LAMA2; (+) strand; PAM type: NNGRRT; PAM sequence: GTGAAT
tacccatacactattttttt

SEQ ID NO: 30441 - DNA, 20 bp, Artificial Sequence
  Description of Artificial Sequence: Synthetic oligonucleotide
  Target: LAMA2; (+) strand; PAM type: NNGRRT; PAM sequence: AGGAAT
ctcatttccttaccttttag

SEQ ID NO: 30442 - DNA, 20 bp, Artificial Sequence
  Description of Artificial Sequence: Synthetic oligonucleotide
  Target: LAMA2; (+) strand; PAM type: NNGRRT; PAM sequence: TTGAAT
ggaatgctatatccagctgc

SEQ ID NO: 30443 - DNA, 20 bp, Artificial Sequence
  Description of Artificial Sequence: Synthetic oligonucleotide
  Target: LAMA2; (+) strand; PAM type: NNGRRT; PAM sequence: TGGGAT
atgttgttttgtttttaaat

SEQ ID NO: 30444 - DNA, 20 bp, Artificial Sequence
  Description of Artificial Sequence: Synthetic oligonucleotide
  Target: LAMA2; (+) strand; PAM type: NNGRRT; PAM sequence: CAGAGT
ttttttttttttttttgaga

SEQ ID NO: 30445 - DNA, 20 bp, Artificial Sequence
  Description of Artificial Sequence: Synthetic oligonucleotide
  Target: LAMA2; (+) strand; PAM type: NNGRRT; PAM sequence: TAGAGT
tctcgctctgttgcccaggc

SEQ ID NO: 30446 - DNA, 20 bp, Artificial Sequence
  Description of Artificial Sequence: Synthetic oligonucleotide
  Target: LAMA2; (+) strand; PAM type: NNGRRT; PAM sequence: CCGGGT
ctcactgcaagctctgcctc

SEQ ID NO: 30447 - DNA, 20 bp, Artificial Sequence
  Description of Artificial Sequence: Synthetic oligonucleotide
  Target: LAMA2; (+) strand; PAM type: NNGRRT; PAM sequence: TTGAAT
cagctggactacaggctgtg

SEQ ID NO: 30448 - DNA, 20 bp, Artificial Sequence
  Description of Artificial Sequence: Synthetic oligonucleotide
  Target: LAMA2; (+) strand; PAM type: NNGRRT; PAM sequence: CAGAAT
tcatacttcaaactcttacc

SEQ ID NO: 30449 - DNA, 20 bp, Artificial Sequence
  Description of Artificial Sequence: Synthetic oligonucleotide
  Target: LAMA2; (+) strand; PAM type: NNGRRT; PAM sequence: ATGAAT
atggtcttttgttagattca

SEQ ID NO: 30450 - DNA, 20 bp, Artificial Sequence
  Description of Artificial Sequence: Synthetic oligonucleotide
  Target: LAMA2; (+) strand; PAM type: NNGRRT; PAM sequence: CAGAAT
tcccaatgaccttctttact

SEQ ID NO: 30451 - DNA, 20 bp, Artificial Sequence
  Description of Artificial Sequence: Synthetic oligonucleotide
  Target: LAMA2; (+) strand; PAM type: NNGRRT; PAM sequence: CTGGGT
cagactctttggtttaaatg

SEQ ID NO: 30452 - DNA, 20 bp, Artificial Sequence
  Description of Artificial Sequence: Synthetic oligonucleotide
  Target: LAMA2; (+) strand; PAM type: NNGRRT; PAM sequence: TAGGGT
tagttataataggactctca

SEQ ID NO: 30453 - DNA, 20 bp, Artificial Sequence
  Description of Artificial Sequence: Synthetic oligonucleotide
  Target: LAMA2; (+) strand; PAM type: NNGRRT; PAM sequence: CTGGAT
gtaaaccacctaaactgtga

SEQ ID NO: 30454 - DNA, 20 bp, Artificial Sequence
  Description of Artificial Sequence: Synthetic oligonucleotide
  Target: LAMA2; (+) strand; PAM type: NNGRRT; PAM sequence: CAGAGT
ctgattgttattaacctgct

SEQ ID NO: 30455 - DNA, 20 bp, Artificial Sequence
  Description of Artificial Sequence: Synthetic oligonucleotide
  Target: LAMA2; (+) strand; PAM type: NNGRRT; PAM sequence: CAGAGT
gtcataaagtattaaagtat

SEQ ID NO: 30456 - DNA, 20 bp, Artificial Sequence
  Description of Artificial Sequence: Synthetic oligonucleotide
  Target: LAMA2; (+) strand; PAM type: NNGRRT; PAM sequence: TGGAAT
aagtattaaagtatcagagt

SEQ ID NO: 30457 - DNA, 20 bp, Artificial Sequence
  Description of Artificial Sequence: Synthetic oligonucleotide
  Target: LAMA2; (+) strand; PAM type: NNGRRT; PAM sequence: TTGGAT
taaaagcagtaattaattca

SEQ ID NO: 30458 - DNA, 20 bp, Artificial Sequence
  Description of Artificial Sequence: Synthetic oligonucleotide
  Target: LAMA2; (+) strand; PAM type: NNGRRT; PAM sequence: AGGGGT
ataagacattggtttaatgc

SEQ ID NO: 30459 - DNA, 20 bp, Artificial Sequence
  Description of Artificial Sequence: Synthetic oligonucleotide
  Target: LAMA2; (+) strand; PAM type: NNGRRT; PAM sequence: GTGAGT
accgggctgcctagcaggaa

SEQ ID NO: 30460 - DNA, 20 bp, Artificial Sequence
  Description of Artificial Sequence: Synthetic oligonucleotide
  Target: LAMA2; (+) strand; PAM type: NNGRRT; PAM sequence: AGGGAT
tattgcgaactgcacctgcg

SEQ ID NO: 30461 - DNA, 20 bp, Artificial Sequence
  Description of Artificial Sequence: Synthetic oligonucleotide
  Target: LAMA2; (+) strand; PAM type: NNGRRT; PAM sequence: GAGAGT
ctagcttgtatgctccttat

SEQ ID NO: 30462 - DNA, 20 bp, Artificial Sequence
  Description of Artificial Sequence: Synthetic oligonucleotide
  Target: LAMA2; (+) strand; PAM type: NNGRRT; PAM sequence: CTGAAT
ccagggcctaaggcatgagc

SEQ ID NO: 30463 - DNA, 20 bp, Artificial Sequence
  Description of Artificial Sequence: Synthetic oligonucleotide
  Target: LAMA2; (+) strand; PAM type: NNGRRT; PAM sequence: AAGGAT
ctgaagattctttaacaacc

SEQ ID NO: 30464 - DNA, 20 bp, Artificial Sequence
  Description of Artificial Sequence: Synthetic oligonucleotide
  Target: LAMA2; (+) strand; PAM type: NNGRRT; PAM sequence: AAGGGT
tgcactttggtatatatgcg

SEQ ID NO: 30465 - DNA, 20 bp, Artificial Sequence
  Description of Artificial Sequence: Synthetic oligonucleotide
  Target: LAMA2; (+) strand; PAM type: NNGRRT; PAM sequence: CTGAAT
gacctacttgtttgccatgg

SEQ ID NO: 30466 - DNA, 20 bp, Artificial Sequence
  Description of Artificial Sequence: Synthetic oligonucleotide
  Target: LAMA2; (+) strand; PAM type: NNGRRT; PAM sequence: GTGAAT
ctggctgcccattgcatcat

SEQ ID NO: 30467 - DNA, 20 bp, Artificial Sequence
  Description of Artificial Sequence: Synthetic oligonucleotide
  Target: LAMA2; (+) strand; PAM type: NNGRRT; PAM sequence: CTGAAT
ttgcatcatgtgaattccag

SEQ ID NO: 30468 - DNA, 20 bp, Artificial Sequence
  Description of Artificial Sequence: Synthetic oligonucleotide
  Target: LAMA2; (+) strand; PAM type: NNGRRT; PAM sequence: TAGAAT
aattccagctgaatacatat

SEQ ID NO: 30469 - DNA, 20 bp, Artificial Sequence
  Description of Artificial Sequence: Synthetic oligonucleotide
  Target: LAMA2; (+) strand; PAM type: NNGRRT; PAM sequence: TTGAGT
tattagaattatataattga

SEQ ID NO: 30470 - DNA, 20 bp, Artificial Sequence
  Description of Artificial Sequence: Synthetic oligonucleotide
  Target: LAMA2; (+) strand; PAM type: NNGRRT; PAM sequence: ATGGAT
tgattgagtatgcaaaccct

SEQ ID NO: 30471 - DNA, 20 bp, Artificial Sequence
  Description of Artificial Sequence: Synthetic oligonucleotide
  Target: LAMA2; (+) strand; PAM type: NNGRRT; PAM sequence: TTGGAT
cattagggagataattttgc

SEQ ID NO: 30472 - DNA, 20 bp, Artificial Sequence
  Description of Artificial Sequence: Synthetic oligonucleotide
  Target: LAMA2; (+) strand; PAM type: NNGRRT; PAM sequence: TTGGAT
tttatttgttgtgcatttac

SEQ ID NO: 30473 - DNA, 20 bp, Artificial Sequence
  Description of Artificial Sequence: Synthetic oligonucleotide
  Target: LAMA2; (+) strand; PAM type: NNGRRT; PAM sequence: ATGGGT
gttgtgcatttacttggata

SEQ ID NO: 30474 - DNA, 20 bp, Artificial Sequence
  Description of Artificial Sequence: Synthetic oligonucleotide
  Target: LAMA2; (+) strand; PAM type: NNGRRT; PAM sequence: AGGGAT
acacaatccatcagtgccaa

SEQ ID NO: 30475 - DNA, 20 bp, Artificial Sequence
  Description of Artificial Sequence: Synthetic oligonucleotide
  Target: LAMA2; (+) strand; PAM type: NNGRRT; PAM sequence: TTGGGT
atccatcagtgccaaaggga

SEQ ID NO: 30476 - DNA, 20 bp, Artificial Sequence
  Description of Artificial Sequence: Synthetic oligonucleotide
  Target: LAMA2; (+) strand; PAM type: NNGRRT; PAM sequence: TAGAGT
attttcaaaatgttttcact

SEQ ID NO: 30477 - DNA, 20 bp, Artificial Sequence
  Description of Artificial Sequence: Synthetic oligonucleotide
  Target: LAMA2; (+) strand; PAM type: NNGRRT; PAM sequence: TAGAAT
aataattttacttctagcag

SEQ ID NO: 30478 - DNA, 20 bp, Artificial Sequence
  Description of Artificial Sequence: Synthetic oligonucleotide
  Target: LAMA2; (+) strand; PAM type: NNGRRT; PAM sequence: TAGAAT
tctagcagtagaattgggac

SEQ ID NO: 30479 - DNA, 20 bp, Artificial Sequence
  Description of Artificial Sequence: Synthetic oligonucleotide
  Target: LAMA2; (+) strand; PAM type: NNGRRT; PAM sequence: GAGGGT
aaatcctagaagttttgtga

SEQ ID NO: 30480 - DNA, 20 bp, Artificial Sequence
  Description of Artificial Sequence: Synthetic oligonucleotide
  Target: LAMA2; (+) strand; PAM type: NNGRRT; PAM sequence: ATGAAT
tgagctagaaactctgagat

SEQ ID NO: 30481 - DNA, 20 bp, Artificial Sequence
  Description of Artificial Sequence: Synthetic oligonucleotide
  Target: LAMA2; (+) strand; PAM type: NNGRRT; PAM sequence: TTGAAT
tagaaactctgagatatgaa

SEQ ID NO: 30482 - DNA, 20 bp, Artificial Sequence
  Description of Artificial Sequence: Synthetic oligonucleotide
  Target: LAMA2; (+) strand; PAM type: NNGRRT; PAM sequence: ATGAAT
tggtataattattatgatgt

SEQ ID NO: 30483 - DNA, 20 bp, Artificial Sequence
  Description of Artificial Sequence: Synthetic oligonucleotide
  Target: LAMA2; (+) strand; PAM type: NNGRRT; PAM sequence: TCGAAT
caaataacaatgtaactatt

SEQ ID NO: 30484 - DNA, 20 bp, Artificial Sequence
  Description of Artificial Sequence: Synthetic oligonucleotide
  Target: LAMA2; (+) strand; PAM type: NNGRRT; PAM sequence: GTGAAT
ataaaatatgaaagagacat

SEQ ID NO: 30485 - DNA, 20 bp, Artificial Sequence
  Description of Artificial Sequence: Synthetic oligonucleotide
  Target: LAMA2; (+) strand; PAM type: NNGRRT; PAM sequence: TTGAAT
agacatgtgaatctctgcct

SEQ ID NO: 30486 - DNA, 20 bp, Artificial Sequence
  Description of Artificial Sequence: Synthetic oligonucleotide
  Target: LAMA2; (+) strand; PAM type: NNGRRT; PAM sequence: TAGGAT
aatctctgcctttgaatact

SEQ ID NO: 30487 - DNA, 20 bp, Artificial Sequence
  Description of Artificial Sequence: Synthetic oligonucleotide
  Target: LAMA2; (+) strand; PAM type: NNGRRT; PAM sequence: TTGAAT
tttgaatacttaggatgtgt

SEQ ID NO: 30488 - DNA, 20 bp, Artificial Sequence
  Description of Artificial Sequence: Synthetic oligonucleotide
  Target: LAMA2; (+) strand; PAM type: NNGRRT; PAM sequence: GTGGGT
tgtaaatactactggtttgt

SEQ ID NO: 30489 - DNA, 20 bp, Artificial Sequence
  Description of Artificial Sequence: Synthetic oligonucleotide
  Target: LAMA2; (+) strand; PAM type: NNGRRT; PAM sequence: AGGAAT
actactggtttgtgtgggtc

SEQ ID NO: 30490 - DNA, 20 bp, Artificial Sequence
  Description of Artificial Sequence: Synthetic oligonucleotide
  Target: LAMA2; (+) strand; PAM type: NNGRRT; PAM sequence: AAGAAT
gctgaaatttaagtttttga

SEQ ID NO: 30491 - DNA, 20 bp, Artificial Sequence
  Description of Artificial Sequence: Synthetic oligonucleotide
  Target: LAMA2; (+) strand; PAM type: NNGRRT; PAM sequence: TTGAGT
tgaaagaatgaaactcaaat

SEQ ID NO: 30492 - DNA, 20 bp, Artificial Sequence
  Description of Artificial Sequence: Synthetic oligonucleotide
  Target: LAMA2; (+) strand; PAM type: NNGRRT; PAM sequence: TTGAAT
ggctcactcaagagatcata

SEQ ID NO: 30493 - DNA, 20 bp, Artificial Sequence
  Description of Artificial Sequence: Synthetic oligonucleotide
  Target: LAMA2; (+) strand; PAM type: NNGRRT; PAM sequence: GAGAAT
gccatattctctagaaaatt

SEQ ID NO: 30494 - DNA, 20 bp, Artificial Sequence
  Description of Artificial Sequence: Synthetic oligonucleotide
  Target: LAMA2; (+) strand; PAM type: NNGRRT; PAM sequence: ATGGGT
tgtgcacatgggagattatg

SEQ ID NO: 30495 - DNA, 20 bp, Artificial Sequence
  Description of Artificial Sequence: Synthetic oligonucleotide
  Target: LAMA2; (+) strand; PAM type: NNGRRT; PAM sequence: TAGAAT
aagaagcaaaaaaaaatcaa

SEQ ID NO: 30496 - DNA, 20 bp, Artificial Sequence
  Description of Artificial Sequence: Synthetic oligonucleotide
  Target: LAMA2; (+) strand; PAM type: NNGRRT; PAM sequence: AAGAGT
gtaaatcttcactgtttggc

SEQ ID NO: 30497 - DNA, 20 bp, Artificial Sequence
  Description of Artificial Sequence: Synthetic oligonucleotide
  Target: LAMA2; (+) strand; PAM type: NNGRRT; PAM sequence: CAGGAT
gttaatataagggactagag

SEQ ID NO: 30498 - DNA, 20 bp, Artificial Sequence
  Description of Artificial Sequence: Synthetic oligonucleotide
  Target: LAMA2; (+) strand; PAM type: NNGRRT; PAM sequence: AAGGGT
ttcatactttttcagtataa

SEQ ID NO: 30499 - DNA, 20 bp, Artificial Sequence
  Description of Artificial Sequence: Synthetic oligonucleotide
  Target: LAMA2; (+) strand; PAM type: NNGRRT; PAM sequence: CAGAAT
aatcatattattccattttg

SEQ ID NO: 30500 - DNA, 20 bp, Artificial Sequence
  Description of Artificial Sequence: Synthetic oligonucleotide
  Target: LAMA2; (+) strand; PAM type: NNGRRT; PAM sequence: GAGAAT
gtttgcttaatgattctcct

SEQ ID NO: 30501 - DNA, 20 bp, Artificial Sequence
  Description of Artificial Sequence: Synthetic oligonucleotide
  Target: LAMA2; (+) strand; PAM type: NNGRRT; PAM sequence: ATGAAT
acaccaaaatcatgaagtaa

SEQ ID NO: 30502 - DNA, 20 bp, Artificial Sequence
  Description of Artificial Sequence: Synthetic oligonucleotide
  Target: LAMA2; (+) strand; PAM type: NNGRRT; PAM sequence: GTGAAT
ctgccccttttcagttatgt

SEQ ID NO: 30503 - DNA, 20 bp, Artificial Sequence
  Description of Artificial Sequence: Synthetic oligonucleotide
  Target: LAMA2; (+) strand; PAM type: NNGRRT; PAM sequence: AGGAGT
caagataataattagttgaa

SEQ ID NO: 30504 - DNA, 20 bp, Artificial Sequence
  Description of Artificial Sequence: Synthetic oligonucleotide
  Target: LAMA2; (+) strand; PAM type: NNGRRT; PAM sequence: AGGAGT
aattttatacccatgattaa

SEQ ID NO: 30505 - DNA, 20 bp, Artificial Sequence
  Description of Artificial Sequence: Synthetic oligonucleotide
  Target: LAMA2; (+) strand; PAM type: NNGRRT; PAM sequence: TAGAGT
atatgtgtttaattttattt

SEQ ID NO: 30506 - DNA, 20 bp, Artificial Sequence
  Description of Artificial Sequence: Synthetic oligonucleotide
  Target: LAMA2; (+) strand; PAM type: NNGRRT; PAM sequence: TTGGAT
tttaattttattttagagta

SEQ ID NO: 30507 - DNA, 20 bp, Artificial Sequence
  Description of Artificial Sequence: Synthetic oligonucleotide
  Target: LAMA2; (+) strand; PAM type: NNGRRT; PAM sequence: CTGAAT
gggagcatttaacgttagaa

SEQ ID NO: 30508 - DNA, 20 bp, Artificial Sequence
  Description of Artificial Sequence: Synthetic oligonucleotide
  Target: LAMA2; (+) strand; PAM type: NNGRRT; PAM sequence: AGGAAT
ttccctaatgtctgataatc

SEQ ID NO: 30509 - DNA, 20 bp, Artificial Sequence
  Description of Artificial Sequence: Synthetic oligonucleotide
  Target: LAMA2; (+) strand; PAM type: NNGRRT; PAM sequence: CTGAAT
gcttttggcttctggctgct

SEQ ID NO: 30510 - DNA, 20 bp, Artificial Sequence
  Description of Artificial Sequence: Synthetic oligonucleotide
  Target: LAMA2; (+) strand; PAM type: NNGRRT; PAM sequence: TTGAAT
catatgttataacatgcatt

SEQ ID NO: 30511 - DNA, 20 bp, Artificial Sequence
  Description of Artificial Sequence: Synthetic oligonucleotide
  Target: LAMA2; (+) strand; PAM type: NNGRRT; PAM sequence: TAGAAT
aatgcacatattttgacaga

SEQ ID NO: 30512 - DNA, 20 bp, Artificial Sequence
  Description of Artificial Sequence: Synthetic oligonucleotide
  Target: LAMA2; (+) strand; PAM type: NNGRRT; PAM sequence: AGGGAT
gtatatattcagccattaag

SEQ ID NO: 30513 - DNA, 20 bp, Artificial Sequence
  Description of Artificial Sequence: Synthetic oligonucleotide
  Target: LAMA2; (+) strand; PAM type: NNGRRT; PAM sequence: TTGGAT
tgtgtttcctgtggcgtggt

SEQ ID NO: 30514 - DNA, 20 bp, Artificial Sequence
  Description of Artificial Sequence: Synthetic oligonucleotide
  Target: LAMA2; (+) strand; PAM type: NNGRRT; PAM sequence: CGGGAT
gtggcgtggtttggataatc

SEQ ID NO: 30515 - DNA, 20 bp, Artificial Sequence
  Description of Artificial Sequence: Synthetic oligonucleotide
  Target: LAMA2; (+) strand; PAM type: NNGRRT; PAM sequence: TAGAGT
ctggtgtggagctagccaaa

SEQ ID NO: 30516 - DNA, 20 bp, Artificial Sequence
  Description of Artificial Sequence: Synthetic oligonucleotide
  Target: LAMA2; (+) strand; PAM type: NNGRRT; PAM sequence: TGGAAT
agagttaaatgacataatct

SEQ ID NO: 30517 - DNA, 20 bp, Artificial Sequence
  Description of Artificial Sequence: Synthetic oligonucleotide
  Target: LAMA2; (+) strand; PAM type: NNGRRT; PAM sequence: TTGAAT
ctctaattttatttttgttg

SEQ ID NO: 30518 - DNA, 20 bp, Artificial Sequence
  Description of Artificial Sequence: Synthetic oligonucleotide
  Target: LAMA2; (+) strand; PAM type: NNGRRT; PAM sequence: GAGAGT
aactgcaattacagcaataa

SEQ ID NO: 30519 - DNA, 20 bp, Artificial Sequence
  Description of Artificial Sequence: Synthetic oligonucleotide
  Target: LAMA2; (+) strand; PAM type: NNGRRT; PAM sequence: GTGAAT
gcaattacagcaataagaga

SEQ ID NO: 30520 - DNA, 20 bp, Artificial Sequence
  Description of Artificial Sequence: Synthetic oligonucleotide
  Target: LAMA2; (+) strand; PAM type: NNGRRT; PAM sequence: AAGAAT
tcttcagtttatgttgttga

SEQ ID NO: 30521 - DNA, 20 bp, Artificial Sequence
  Description of Artificial Sequence: Synthetic oligonucleotide
  Target: LAMA2; (+) strand; PAM type: NNGRRT; PAM sequence: TTGGAT
attttatgagaaagttttat

SEQ ID NO: 30522 - DNA, 20 bp, Artificial Sequence
  Description of Artificial Sequence: Synthetic oligonucleotide
  Target: LAMA2; (+) strand; PAM type: NNGRRT; PAM sequence: TCGAGT
ttttatttggatgcgttatg

SEQ ID NO: 30523 - DNA, 20 bp, Artificial Sequence
  Description of Artificial Sequence: Synthetic oligonucleotide
  Target: LAMA2; (+) strand; PAM type: NNGRRT; PAM sequence: GAGAAT
acaattggttataggaagaa

SEQ ID NO: 30524 - DNA, 20 bp, Artificial Sequence
  Description of Artificial Sequence: Synthetic oligonucleotide
  Target: LAMA2; (+) strand; PAM type: NNGRRT; PAM sequence: AAGAAT
gaagaagagaatatcacatt

SEQ ID NO: 30525 - DNA, 20 bp, Artificial Sequence
  Description of Artificial Sequence: Synthetic oligonucleotide
  Target: LAMA2; (+) strand; PAM type: NNGRRT; PAM sequence: TAGGAT
tgcctgccctaaccagctca

SEQ ID NO: 30526 - DNA, 20 bp, Artificial Sequence
  Description of Artificial Sequence: Synthetic oligonucleotide
  Target: LAMA2; (+) strand; PAM type: NNGRRT; PAM sequence: GTGAGT
atgttggttttaactgacat

SEQ ID NO: 30527 - DNA, 20 bp, Artificial Sequence
  Description of Artificial Sequence: Synthetic oligonucleotide
  Target: LAMA2; (+) strand; PAM type: NNGRRT; PAM sequence: AAGAAT
actgacatgtgagtgtattt

SEQ ID NO: 30528 - DNA, 20 bp, Artificial Sequence
  Description of Artificial Sequence: Synthetic oligonucleotide
  Target: LAMA2; (+) strand; PAM type: NNGRRT; PAM sequence: ATGAAT
aagaatctgaaatctatttt

SEQ ID NO: 30529 - DNA, 20 bp, Artificial Sequence
  Description of Artificial Sequence: Synthetic oligonucleotide
  Target: LAMA2; (+) strand; PAM type: NNGRRT; PAM sequence: GTGGAT
actttgggaggccaaggcag

SEQ ID NO: 30530 - DNA, 20 bp, Artificial Sequence
  Description of Artificial Sequence: Synthetic oligonucleotide
  Target: LAMA2; (+) strand; PAM type: NNGRRT; PAM sequence: AGGAGT
caggtggatcacttgaggtc

SEQ ID NO: 30531 - DNA, 20 bp, Artificial Sequence
  Description of Artificial Sequence: Synthetic oligonucleotide
  Target: LAMA2; (+) strand; PAM type: NNGRRT; PAM sequence: TAGAAT
tactcaggaggctgagacac

SEQ ID NO: 30532 - DNA, 20 bp, Artificial Sequence
  Description of Artificial Sequence: Synthetic oligonucleotide
  Target: LAMA2; (+) strand; PAM type: NNGRRT; PAM sequence: AGGGGT
atcgcttgaacccagtaggc

SEQ ID NO: 30533 - DNA, 20 bp, Artificial Sequence
  Description of Artificial Sequence: Synthetic oligonucleotide
  Target: LAMA2; (+) strand; PAM type: NNGRRT; PAM sequence: AAGAGT
ccttgtcaaccaccattgac

SEQ ID NO: 30534 - DNA, 20 bp, Artificial Sequence
  Description of Artificial Sequence: Synthetic oligonucleotide
  Target: LAMA2; (+) strand; PAM type: NNGRRT; PAM sequence: TAGGAT
agagttatgataaactgatt

SEQ ID NO: 30535 - DNA, 20 bp, Artificial Sequence
  Description of Artificial Sequence: Synthetic oligonucleotide
  Target: LAMA2; (+) strand; PAM type: NNGRRT; PAM sequence: TGGAGT
ggaaacccagtgcttctggt

SEQ ID NO: 30536 - DNA, 20 bp, Artificial Sequence
  Description of Artificial Sequence: Synthetic oligonucleotide
  Target: LAMA2; (+) strand; PAM type: NNGRRT; PAM sequence: CAGAAT
agtagatgatgagatagtta

SEQ ID NO: 30537 - DNA, 20 bp, Artificial Sequence
  Description of Artificial Sequence: Synthetic oligonucleotide
  Target: LAMA2; (+) strand; PAM type: NNGRRT; PAM sequence: CCGGAT
aaaacagtaacagcaaatca

SEQ ID NO: 30538 - DNA, 20 bp, Artificial Sequence
  Description of Artificial Sequence: Synthetic oligonucleotide
  Target: LAMA2; (+) strand; PAM type: NNGRRT; PAM sequence: GTGGAT
gtaacagcaaatcaccggat

SEQ ID NO: 30539 - DNA, 20 bp, Artificial Sequence
  Description of Artificial Sequence: Synthetic oligonucleotide
  Target: LAMA2; (+) strand; PAM type: NNGRRT; PAM sequence: TTGGGT
tcacccatagtgaactgtct

SEQ ID NO: 30540 - DNA, 20 bp, Artificial Sequence
  Description of Artificial Sequence: Synthetic oligonucleotide
  Target: LAMA2; (+) strand; PAM type: NNGRRT; PAM sequence: CAGGAT
gggtcatgcgtagcaaagta

SEQ ID NO: 30541 - DNA, 20 bp, Artificial Sequence
  Description of Artificial Sequence: Synthetic oligonucleotide
  Target: LAMA2; (+) strand; PAM type: NNGRRT; PAM sequence: CTGGGT
ctttactcgcagtgcacacg

SEQ ID NO: 30542 - DNA, 20 bp, Artificial Sequence
  Description of Artificial Sequence: Synthetic oligonucleotide
  Target: LAMA2; (+) strand; PAM type: NNGRRT; PAM sequence: TGGAAT
gctaccagaactccttaatg

SEQ ID NO: 30543 - DNA, 20 bp, Artificial Sequence
  Description of Artificial Sequence: Synthetic oligonucleotide
  Target: LAMA2; (+) strand; PAM type: NNGRRT; PAM sequence: CTGAGT
agattcatttagactttcca

SEQ ID NO: 30544 - DNA, 20 bp, Artificial Sequence
  Description of Artificial Sequence: Synthetic oligonucleotide
  Target: LAMA2; (+) strand; PAM type: NNGRRT; PAM sequence: CTGAGT
taaatctttacagaactacc

SEQ ID NO: 30545 - DNA, 20 bp, Artificial Sequence
  Description of Artificial Sequence: Synthetic oligonucleotide
  Target: LAMA2; (+) strand; PAM type: NNGRRT; PAM sequence: CAGGAT
agtaattcaagtgtcaggag

SEQ ID NO: 30546 - DNA, 20 bp, Artificial Sequence
  Description of Artificial Sequence: Synthetic oligonucleotide
  Target: LAMA2; (+) strand; PAM type: NNGRRT; PAM sequence: TGGAAT
agcaggatcaaatcaggact

SEQ ID NO: 30547 - DNA, 20 bp, Artificial Sequence
  Description of Artificial Sequence: Synthetic oligonucleotide
  Target: LAMA2; (+) strand; PAM type: NNGRRT; PAM sequence: TTGAAT
agccatcaagcaagtctcta

SEQ ID NO: 30548 - DNA, 20 bp, Artificial Sequence
  Description of Artificial Sequence: Synthetic oligonucleotide
  Target: LAMA2; (+) strand; PAM type: NNGRRT; PAM sequence: CAGAAT
cggtagcgcaacagacctta

SEQ ID NO: 30549 - DNA, 20 bp, Artificial Sequence
  Description of Artificial Sequence: Synthetic oligonucleotide
  Target: LAMA2; (+) strand; PAM type: NNGRRT; PAM sequence: TGGGGT
gcattaccgtgtgtcaatct

SEQ ID NO: 30550 - DNA, 20 bp, Artificial Sequence
  Description of Artificial Sequence: Synthetic oligonucleotide
  Target: LAMA2; (+) strand; PAM type: NNGRRT; PAM sequence: AGGGGT
ccgtgtgtcaatcttggggt

SEQ ID NO: 30551 - DNA, 20 bp, Artificial Sequence
  Description of Artificial Sequence: Synthetic oligonucleotide
  Target: LAMA2; (+) strand; PAM type: NNGRRT; PAM sequence: TGGAGT
acaaggcaaagaagcatggc

SEQ ID NO: 30552 - DNA, 20 bp, Artificial Sequence
  Description of Artificial Sequence: Synthetic oligonucleotide
  Target: LAMA2; (+) strand; PAM type: NNGRRT; PAM sequence: CTGAGT
ctgaaagctaaagctagcac

SEQ ID NO: 30553 - DNA, 20 bp, Artificial Sequence
  Description of Artificial Sequence: Synthetic oligonucleotide
  Target: LAMA2; (+) strand; PAM type: NNGRRT; PAM sequence: GTGAAT
aaatatgtgcaaagagagaa

SEQ ID NO: 30554 - DNA, 20 bp, Artificial Sequence
  Description of Artificial Sequence: Synthetic oligonucleotide
  Target: LAMA2; (+) strand; PAM type: NNGRRT; PAM sequence: GAGGGT
gtgaattttgaaacatgcca

SEQ ID NO: 30555 - DNA, 20 bp, Artificial Sequence
  Description of Artificial Sequence: Synthetic oligonucleotide
  Target: LAMA2; (+) strand; PAM type: NNGRRT; PAM sequence: TAGAAT
aggtttatgataagtttagg

SEQ ID NO: 30556 - DNA, 20 bp, Artificial Sequence
  Description of Artificial Sequence: Synthetic oligonucleotide
  Target: LAMA2; (+) strand; PAM type: NNGRRT; PAM sequence: GAGGAT
tctcttctgaaagctttcct

SEQ ID NO: 30557 - DNA, 20 bp, Artificial Sequence
  Description of Artificial Sequence: Synthetic oligonucleotide
  Target: LAMA2; (+) strand; PAM type: NNGRRT; PAM sequence: AGGGAT
ccaggctgcttcaaattcag

SEQ ID NO: 30558 - DNA, 20 bp, Artificial Sequence
  Description of Artificial Sequence: Synthetic oligonucleotide
  Target: LAMA2; (+) strand; PAM type: NNGRRT; PAM sequence: AGGAAT
tgcatatgtgccaggcctgg

SEQ ID NO: 30559 - DNA, 20 bp, Artificial Sequence
  Description of Artificial Sequence: Synthetic oligonucleotide
  Target: LAMA2; (+) strand; PAM type: NNGRRT; PAM sequence: AGGGAT
gtcagttaataacatgtcac

SEQ ID NO: 30560 - DNA, 20 bp, Artificial Sequence
  Description of Artificial Sequence: Synthetic oligonucleotide
  Target: LAMA2; (+) strand; PAM type: NNGRRT; PAM sequence: TGGGGT
cagaccctaatctctgtctc

SEQ ID NO: 30561 - DNA, 20 bp, Artificial Sequence
  Description of Artificial Sequence: Synthetic oligonucleotide
  Target: LAMA2; (+) strand; PAM type: NNGRRT; PAM sequence: GAGAAT
ctaatctctgtctctggggt

SEQ ID NO: 30562 - DNA, 20 bp, Artificial Sequence
  Description of Artificial Sequence: Synthetic oligonucleotide
  Target: LAMA2; (+) strand; PAM type: NNGRRT; PAM sequence: CGGAGT
gcccaacgtgccatttagac

SEQ ID NO: 30563 - DNA, 20 bp, Artificial Sequence
  Description of Artificial Sequence: Synthetic oligonucleotide
  Target: LAMA2; (+) strand; PAM type: NNGRRT; PAM sequence: TTGGAT
gtgccatttagaccggagtc

SEQ ID NO: 30564 - DNA, 20 bp, Artificial Sequence
  Description of Artificial Sequence: Synthetic oligonucleotide
  Target: LAMA2; (+) strand; PAM type: NNGRRT; PAM sequence: ATGGAT
gagtcttggattgatctgtg

SEQ ID NO: 30565 - DNA, 20 bp, Artificial Sequence
  Description of Artificial Sequence: Synthetic oligonucleotide
  Target: LAMA2; (+) strand; PAM type: NNGRRT; PAM sequence: TCGGGT
gatctgtgatggatgccctg

SEQ ID NO: 30566 - DNA, 20 bp, Artificial Sequence
  Description of Artificial Sequence: Synthetic oligonucleotide
  Target: LAMA2; (+) strand; PAM type: NNGRRT; PAM sequence: AAGAGT
aggaccacgctgtgagaggt

SEQ ID NO: 30567 - DNA, 20 bp, Artificial Sequence
  Description of Artificial Sequence: Synthetic oligonucleotide
  Target: LAMA2; (+) strand; PAM type: NNGRRT; PAM sequence: GGGAGT
tgcaaaatgatttctacctt

SEQ ID NO: 30568 - DNA, 20 bp, Artificial Sequence
  Description of Artificial Sequence: Synthetic oligonucleotide
  Target: LAMA2; (+) strand; PAM type: NNGRRT; PAM sequence: GAGAAT
cataaatcttcattcactca

SEQ ID NO: 30569 - DNA, 20 bp, Artificial Sequence
  Description of Artificial Sequence: Synthetic oligonucleotide
  Target: LAMA2; (+) strand; PAM type: NNGRRT; PAM sequence: CTGGGT
tttaattcctgttgatttta

SEQ ID NO: 30570 - DNA, 20 bp, Artificial Sequence
  Description of Artificial Sequence: Synthetic oligonucleotide
  Target: LAMA2; (+) strand; PAM type: NNGRRT; PAM sequence: AAGAGT
ggttgctttgcagcagaaac

SEQ ID NO: 30571 - DNA, 20 bp, Artificial Sequence
  Description of Artificial Sequence: Synthetic oligonucleotide
  Target: LAMA2; (+) strand; PAM type: NNGRRT; PAM sequence: AGGGGT
tgccacccttcctgggaggg

SEQ ID NO: 30572 - DNA, 20 bp, Artificial Sequence
  Description of Artificial Sequence: Synthetic oligonucleotide
  Target: LAMA2; (+) strand; PAM type: NNGRRT; PAM sequence: CAGGAT
gctatcacccctgtttcaac

SEQ ID NO: 30573 - DNA, 20 bp, Artificial Sequence
  Description of Artificial Sequence: Synthetic oligonucleotide
  Target: LAMA2; (+) strand; PAM type: NNGRRT; PAM sequence: GAGAAT
gcaggagcctatcacccaga

SEQ ID NO: 30574 - DNA, 20 bp, Artificial Sequence
  Description of Artificial Sequence: Synthetic oligonucleotide
  Target: LAMA2; (+) strand; PAM type: NNGRRT; PAM sequence: GTGAGT
agcagcaacaagtactattt

SEQ ID NO: 30575 - DNA, 20 bp, Artificial Sequence
  Description of Artificial Sequence: Synthetic oligonucleotide
  Target: LAMA2; (+) strand; PAM type: NNGRRT; PAM sequence: AGGAAT
tatggaagcatctgtaaatt

SEQ ID NO: 30576 - DNA, 20 bp, Artificial Sequence
  Description of Artificial Sequence: Synthetic oligonucleotide
  Target: LAMA2; (+) strand; PAM type: NNGRRT; PAM sequence: CTGGGT
tgtttagcaactaccatgtg

SEQ ID NO: 30577 - DNA, 20 bp, Artificial Sequence
  Description of Artificial Sequence: Synthetic oligonucleotide
  Target: LAMA2; (+) strand; PAM type: NNGRRT; PAM sequence: TTGGAT
gctgggtacaaggctagaca

SEQ ID NO: 30578 - DNA, 20 bp, Artificial Sequence
  Description of Artificial Sequence: Synthetic oligonucleotide
  Target: LAMA2; (+) strand; PAM type: NNGRRT; PAM sequence: GAGGAT
catctttctttaatgcaagt

SEQ ID NO: 30579 - DNA, 20 bp, Artificial Sequence
  Description of Artificial Sequence: Synthetic oligonucleotide
  Target: LAMA2; (+) strand; PAM type: NNGRRT; PAM sequence: GAGAAT
atggttgcttgtattcttgg

SEQ ID NO: 30580 - DNA, 20 bp, Artificial Sequence
  Description of Artificial Sequence: Synthetic oligonucleotide
  Target: LAMA2; (+) strand; PAM type: NNGRRT; PAM sequence: TTGAAT
tattcttgggagaattccat

SEQ ID NO: 30581 - DNA, 20 bp, Artificial Sequence
  Description of Artificial Sequence: Synthetic oligonucleotide
  Target: LAMA2; (+) strand; PAM type: NNGRRT; PAM sequence: ATGAAT
caacatgcatatgcagtgta

SEQ ID NO: 30582 - DNA, 20 bp, Artificial Sequence
  Description of Artificial Sequence: Synthetic oligonucleotide
  Target: LAMA2; (+) strand; PAM type: NNGRRT; PAM sequence: CAGAAT
tgataccatatttttctagc

SEQ ID NO: 30583 - DNA, 20 bp, Artificial Sequence
  Description of Artificial Sequence: Synthetic oligonucleotide
  Target: LAMA2; (+) strand; PAM type: NNGRRT; PAM sequence: TAGGGT
tttctagccagaatttagat

SEQ ID NO: 30584 - DNA, 20 bp, Artificial Sequence
  Description of Artificial Sequence: Synthetic oligonucleotide
  Target: LAMA2; (+) strand; PAM type: NNGRRT; PAM sequence: AGGAAT
aatttagattagggttttcc

SEQ ID NO: 30585 - DNA, 20 bp, Artificial Sequence
  Description of Artificial Sequence: Synthetic oligonucleotide
  Target: LAMA2; (+) strand; PAM type: NNGRRT; PAM sequence: AAGGGT
aagtagaagagagggaagat

SEQ ID NO: 30586 - DNA, 20 bp, Artificial Sequence
  Description of Artificial Sequence: Synthetic oligonucleotide
  Target: LAMA2; (+) strand; PAM type: NNGRRT; PAM sequence: CAGGGT
aagagagggaagataagggt

SEQ ID NO: 30587 - DNA, 20 bp, Artificial Sequence
  Description of Artificial Sequence: Synthetic oligonucleotide
  Target: LAMA2; (+) strand; PAM type: NNGRRT; PAM sequence: CAGAAT
gcacatcatctaaataagac

SEQ ID NO: 30588 - DNA, 20 bp, Artificial Sequence
  Description of Artificial Sequence: Synthetic oligonucleotide
  Target: LAMA2; (+) strand; PAM type: NNGRRT; PAM sequence: TGGAAT
tcccaaattgtagatgttcc

SEQ ID NO: 30589 - DNA, 20 bp, Artificial Sequence
  Description of Artificial Sequence: Synthetic oligonucleotide
  Target: LAMA2; (+) strand; PAM type: NNGRRT; PAM sequence: AAGAAT
ttgtagatgttcctggaata

SEQ ID NO: 30590 - DNA, 20 bp, Artificial Sequence
  Description of Artificial Sequence: Synthetic oligonucleotide
  Target: LAMA2; (+) strand; PAM type: NNGRRT; PAM sequence: ATGAGT
ataaagaattctgtgatcac

SEQ ID NO: 30591 - DNA, 20 bp, Artificial Sequence
  Description of Artificial Sequence: Synthetic oligonucleotide
  Target: LAMA2; (+) strand; PAM type: NNGRRT; PAM sequence: AAGAAT
ctctgctttaactatatagc

SEQ ID NO: 30592 - DNA, 20 bp, Artificial Sequence
  Description of Artificial Sequence: Synthetic oligonucleotide
  Target: LAMA2; (+) strand; PAM type: NNGRRT; PAM sequence: AAGAGT
gactacagctcaggtgggac

SEQ ID NO: 30593 - DNA, 20 bp, Artificial Sequence
  Description of Artificial Sequence: Synthetic oligonucleotide
  Target: LAMA2; (+) strand; PAM type: NNGRRT; PAM sequence: TAGAAT
ttcttctcctctctcccagc

SEQ ID NO: 30594 - DNA, 20 bp, Artificial Sequence
  Description of Artificial Sequence: Synthetic oligonucleotide
  Target: LAMA2; (+) strand; PAM type: NNGRRT; PAM sequence: AAGGGT
gtaccaaaggccttatatgc

SEQ ID NO: 30595 - DNA, 20 bp, Artificial Sequence
  Description of Artificial Sequence: Synthetic oligonucleotide
  Target: LAMA2; (+) strand; PAM type: NNGRRT; PAM sequence: GAGGGT
ttatatgcaagggtagaggg

SEQ ID NO: 30596 - DNA, 20 bp, Artificial Sequence
  Description of Artificial Sequence: Synthetic oligonucleotide
  Target: LAMA2; (+) strand; PAM type: NNGRRT; PAM sequence: CTGAGT
tgtgatagggccagccagta

SEQ ID NO: 30597 - DNA, 20 bp, Artificial Sequence
  Description of Artificial Sequence: Synthetic oligonucleotide
  Target: LAMA2; (+) strand; PAM type: NNGRRT; PAM sequence: AGGAAT
cattccattcttagaggcac

SEQ ID NO: 30598 - DNA, 20 bp, Artificial Sequence
  Description of Artificial Sequence: Synthetic oligonucleotide
  Target: LAMA2; (+) strand; PAM type: NNGRRT; PAM sequence: AAGGAT
atcccattttctatttgaaa

SEQ ID NO: 30599 - DNA, 20 bp, Artificial Sequence
  Description of Artificial Sequence: Synthetic oligonucleotide
  Target: LAMA2; (+) strand; PAM type: NNGRRT; PAM sequence: CGGGGT
aactggtggctttcagagct

SEQ ID NO: 30600 - DNA, 20 bp, Artificial Sequence
  Description of Artificial Sequence: Synthetic oligonucleotide
  Target: LAMA2; (+) strand; PAM type: NNGRRT; PAM sequence: TTGAAT
gcacaagatggccttgcttc

SEQ ID NO: 30601 - DNA, 20 bp, Artificial Sequence
  Description of Artificial Sequence: Synthetic oligonucleotide
  Target: LAMA2; (+) strand; PAM type: NNGRRT; PAM sequence: GGGGGT
ggccttgcttcttgaatcga

SEQ ID NO: 30602 - DNA, 20 bp, Artificial Sequence
  Description of Artificial Sequence: Synthetic oligonucleotide
  Target: LAMA2; (+) strand; PAM type: NNGRRT; PAM sequence: GGGAAT
tgaagagaaacagtgaacag

SEQ ID NO: 30603 - DNA, 20 bp, Artificial Sequence
  Description of Artificial Sequence: Synthetic oligonucleotide
  Target: LAMA2; (+) strand; PAM type: NNGRRT; PAM sequence: ATGGAT
caaacaagatacaacaaaac

SEQ ID NO: 30604 - DNA, 20 bp, Artificial Sequence
  Description of Artificial Sequence: Synthetic oligonucleotide
  Target: LAMA2; (+) strand; PAM type: NNGRRT; PAM sequence: GGGAAT
gaggtatcactgctttgctg

SEQ ID NO: 30605 - DNA, 20 bp, Artificial Sequence
  Description of Artificial Sequence: Synthetic oligonucleotide
  Target: LAMA2; (+) strand; PAM type: NNGRRT; PAM sequence: AAGAGT
gatttaaacaaaggaaaaaa

SEQ ID NO: 30606 - DNA, 20 bp, Artificial Sequence
  Description of Artificial Sequence: Synthetic oligonucleotide
  Target: LAMA2; (+) strand; PAM type: NNGRRT; PAM sequence: GAGAGT
caaaggaaaaaaaagagtca

SEQ ID NO: 30607 - DNA, 20 bp, Artificial Sequence
  Description of Artificial Sequence: Synthetic oligonucleotide
  Target: LAMA2; (+) strand; PAM type: NNGRRT; PAM sequence: CAGAAT
gaacaaaaataacaaagaga

SEQ ID NO: 30608 - DNA, 20 bp, Artificial Sequence
  Description of Artificial Sequence: Synthetic oligonucleotide
  Target: LAMA2; (+) strand; PAM type: NNGRRT; PAM sequence: TGGAAT
aaagagattaagtaagcaat

SEQ ID NO: 30609 - DNA, 20 bp, Artificial Sequence
  Description of Artificial Sequence: Synthetic oligonucleotide
  Target: LAMA2; (+) strand; PAM type: NNGRRT; PAM sequence: GTGAGT
aaaagactgttgagctaaaa

SEQ ID NO: 30610 - DNA, 20 bp, Artificial Sequence
  Description of Artificial Sequence: Synthetic oligonucleotide
  Target: LAMA2; (+) strand; PAM type: NNGRRT; PAM sequence: GAGGAT
ctaaaagtgagtcaaatgct

SEQ ID NO: 30611 - DNA, 20 bp, Artificial Sequence
  Description of Artificial Sequence: Synthetic oligonucleotide
  Target: LAMA2; (+) strand; PAM type: NNGRRT; PAM sequence: CAGAAT
atcggacactaagttacttt

SEQ ID NO: 30612 - DNA, 20 bp, Artificial Sequence
  Description of Artificial Sequence: Synthetic oligonucleotide
  Target: LAMA2; (+) strand; PAM type: NNGRRT; PAM sequence: GTGGAT
aaggcaggcaagttcatctg

SEQ ID NO: 30613 - DNA, 20 bp, Artificial Sequence
  Description of Artificial Sequence: Synthetic oligonucleotide
  Target: LAMA2; (+) strand; PAM type: NNGRRT; PAM sequence: TGGGAT
taggacaacatgaaacttaa

SEQ ID NO: 30614 - DNA, 20 bp, Artificial Sequence
  Description of Artificial Sequence: Synthetic oligonucleotide
  Target: LAMA2; (+) strand; PAM type: NNGRRT; PAM sequence: AGGGGT
ttctccttaagtgatgagag

SEQ ID NO: 30615 - DNA, 20 bp, Artificial Sequence
  Description of Artificial Sequence: Synthetic oligonucleotide
  Target: LAMA2; (+) strand; PAM type: NNGRRT; PAM sequence: TTGAAT
actgaaaatgtggaaggtgt

SEQ ID NO: 30616 - DNA, 20 bp, Artificial Sequence
  Description of Artificial Sequence: Synthetic oligonucleotide
  Target: LAMA2; (+) strand; PAM type: NNGRRT; PAM sequence: CAGAAT
catttagattttgtctgctt

SEQ ID NO: 30617 - DNA, 20 bp, Artificial Sequence
  Description of Artificial Sequence: Synthetic oligonucleotide
  Target: LAMA2; (+) strand; PAM type: NNGRRT; PAM sequence: CTGAAT
ttttgtctgcttcagaatgt

SEQ ID NO: 30618 - DNA, 20 bp, Artificial Sequence
  Description of Artificial Sequence: Synthetic oligonucleotide
  Target: LAMA2; (+) strand; PAM type: NNGRRT; PAM sequence: TCGAAT
ctgcttcagaatgtctgaat

SEQ ID NO: 30619 - DNA, 20 bp, Artificial Sequence
  Description of Artificial Sequence: Synthetic oligonucleotide
  Target: LAMA2; (+) strand; PAM type: NNGRRT; PAM sequence: GTGAGT
atgggaccttctattcactt

SEQ ID NO: 30620 - DNA, 20 bp, Artificial Sequence
  Description of Artificial Sequence: Synthetic oligonucleotide
  Target: LAMA2; (+) strand; PAM type: NNGRRT; PAM sequence: TTGGGT
ttgtgagtctccttgtgcct

SEQ ID NO: 30621 - DNA, 20 bp, Artificial Sequence
  Description of Artificial Sequence: Synthetic oligonucleotide
  Target: LAMA2; (+) strand; PAM type: NNGRRT; PAM sequence: CTGAAT
tctccttgtgcctttgggtc

SEQ ID NO: 30622 - DNA, 20 bp, Artificial Sequence
  Description of Artificial Sequence: Synthetic oligonucleotide
  Target: LAMA2; (+) strand; PAM type: NNGRRT; PAM sequence: TTGAAT
ggaaggggaagattgagggc

SEQ ID NO: 30623 - DNA, 20 bp, Artificial Sequence
  Description of Artificial Sequence: Synthetic oligonucleotide
  Target: LAMA2; (+) strand; PAM type: NNGRRT; PAM sequence: CTGGGT
tcttcttttccatgaagtcc

SEQ ID NO: 30624 - DNA, 20 bp, Artificial Sequence
  Description of Artificial Sequence: Synthetic oligonucleotide
  Target: LAMA2; (+) strand; PAM type: NNGRRT; PAM sequence: CTGAGT
tgtccttgattgggcctaat

SEQ ID NO: 30625 - DNA, 20 bp, Artificial Sequence
  Description of Artificial Sequence: Synthetic oligonucleotide
  Target: LAMA2; (+) strand; PAM type: NNGRRT; PAM sequence: ATGGGT
tgctcagctgatttttttta

SEQ ID NO: 30626 - DNA, 20 bp, Artificial Sequence
  Description of Artificial Sequence: Synthetic oligonucleotide
  Target: LAMA2; (+) strand; PAM type: NNGRRT; PAM sequence: CAGAAT
ttgctgaaaaaatgatgggg

SEQ ID NO: 30627 - DNA, 20 bp, Artificial Sequence
  Description of Artificial Sequence: Synthetic oligonucleotide
  Target: LAMA2; (+) strand; PAM type: NNGRRT; PAM sequence: TGGAGT
aaataactgcatgtgttatc

SEQ ID NO: 30628 - DNA, 20 bp, Artificial Sequence
  Description of Artificial Sequence: Synthetic oligonucleotide
  Target: LAMA2; (+) strand; PAM type: NNGRRT; PAM sequence: TGGAGT
cacattacaattatttttgg

SEQ ID NO: 30629 - DNA, 20 bp, Artificial Sequence
  Description of Artificial Sequence: Synthetic oligonucleotide
  Target: LAMA2; (+) strand; PAM type: NNGRRT; PAM sequence: GTGAAT
tttaaactaattttaattag

SEQ ID NO: 30630 - DNA, 20 bp, Artificial Sequence
  Description of Artificial Sequence: Synthetic oligonucleotide
  Target: LAMA2; (+) strand; PAM type: NNGRRT; PAM sequence: ATGAAT
cactttcagtaacatggcat

SEQ ID NO: 30631 - DNA, 20 bp, Artificial Sequence
  Description of Artificial Sequence: Synthetic oligonucleotide
  Target: LAMA2; (+) strand; PAM type: NNGRRT; PAM sequence: ATGAGT
atagttattttcctcctgaa

SEQ ID NO: 30632 - DNA, 20 bp, Artificial Sequence
  Description of Artificial Sequence: Synthetic oligonucleotide
  Target: LAMA2; (+) strand; PAM type: NNGRRT; PAM sequence: GAGAAT
aaatgagtttttttattatg

SEQ ID NO: 30633 - DNA, 20 bp, Artificial Sequence
  Description of Artificial Sequence: Synthetic oligonucleotide
  Target: LAMA2; (+) strand; PAM type: NNGRRT; PAM sequence: GTGAAT
agtggtaaacaaaatgagat

SEQ ID NO: 30634 - DNA, 20 bp, Artificial Sequence
  Description of Artificial Sequence: Synthetic oligonucleotide
  Target: LAMA2; (+) strand; PAM type: NNGRRT; PAM sequence: GTGGAT
aaaatgagatgtgaatatat

SEQ ID NO: 30635 - DNA, 20 bp, Artificial Sequence
  Description of Artificial Sequence: Synthetic oligonucleotide
  Target: LAMA2; (+) strand; PAM type: NNGRRT; PAM sequence: CTGAAT
tgtggatgtgatcataagct

SEQ ID NO: 30636 - DNA, 20 bp, Artificial Sequence
  Description of Artificial Sequence: Synthetic oligonucleotide
  Target: LAMA2; (+) strand; PAM type: NNGRRT; PAM sequence: AAGAAT
tgaatattaaataagacaag

SEQ ID NO: 30637 - DNA, 20 bp, Artificial Sequence
  Description of Artificial Sequence: Synthetic oligonucleotide
  Target: LAMA2; (+) strand; PAM type: NNGRRT; PAM sequence: AAGAAT
agaatcaggttaaaattcaa

SEQ ID NO: 30638 - DNA, 20 bp, Artificial Sequence
  Description of Artificial Sequence: Synthetic oligonucleotide
  Target: LAMA2; (+) strand; PAM type: NNGRRT; PAM sequence: AGGGAT
ttatcaaatgcctctcttga

SEQ ID NO: 30639 - DNA, 20 bp, Artificial Sequence
  Description of Artificial Sequence: Synthetic oligonucleotide
  Target: LAMA2; (+) strand; PAM type: NNGRRT; PAM sequence: GGGAAT
ctctcttgaagggattttgg

SEQ ID NO: 30640 - DNA, 20 bp, Artificial Sequence
  Description of Artificial Sequence: Synthetic oligonucleotide
  Target: LAMA2; (+) strand; PAM type: NNGRRT; PAM sequence: CAGAAT
ttattgcatattttataata

SEQ ID NO: 30641 - DNA, 20 bp, Artificial Sequence
  Description of Artificial Sequence: Synthetic oligonucleotide
  Target: LAMA2; (+) strand; PAM type: NNGRRT; PAM sequence: GTGAAT
ataagtgtataaaatctttt

SEQ ID NO: 30642 - DNA, 20 bp, Artificial Sequence
  Description of Artificial Sequence: Synthetic oligonucleotide
  Target: LAMA2; (+) strand; PAM type: NNGRRT; PAM sequence: ATGAAT
tatgataaaacatcaaatct

SEQ ID NO: 30643 - DNA, 20 bp, Artificial Sequence
  Description of Artificial Sequence: Synthetic oligonucleotide
  Target: LAMA2; (+) strand; PAM type: NNGRRT; PAM sequence: TAGAAT
tatacattttctagaaaact

SEQ ID NO: 30644 - DNA, 20 bp, Artificial Sequence
  Description of Artificial Sequence: Synthetic oligonucleotide
  Target: LAMA2; (+) strand; PAM type: NNGRRT; PAM sequence: CAGAAT
ccaaattaatggctctgccc

SEQ ID NO: 30645 - DNA, 20 bp, Artificial Sequence
  Description of Artificial Sequence: Synthetic oligonucleotide
  Target: LAMA2; (+) strand; PAM type: NNGRRT; PAM sequence: TGGGAT
taatggctctgccccagaat

SEQ ID NO: 30646 - DNA, 20 bp, Artificial Sequence
  Description of Artificial Sequence: Synthetic oligonucleotide
  Target: LAMA2; (+) strand; PAM type: NNGRRT; PAM sequence: CTGGAT
agtactctcaatataatgta

SEQ ID NO: 30647 - DNA, 20 bp, Artificial Sequence
  Description of Artificial Sequence: Synthetic oligonucleotide
  Target: LAMA2; (+) strand; PAM type: NNGRRT; PAM sequence: GTGAGT
taaataatgactgcatatct

SEQ ID NO: 30648 - DNA, 20 bp, Artificial Sequence
  Description of Artificial Sequence: Synthetic oligonucleotide
  Target: LAMA2; (+) strand; PAM type: NNGRRT; PAM sequence: CAGAAT
cattgaaagagaagacagag

SEQ ID NO: 30649 - DNA, 20 bp, Artificial Sequence
  Description of Artificial Sequence: Synthetic oligonucleotide
  Target: LAMA2; (+) strand; PAM type: NNGRRT; PAM sequence: TGGAGT
ggaagaaagggagaaagacc

SEQ ID NO: 30650 - DNA, 20 bp, Artificial Sequence
  Description of Artificial Sequence: Synthetic oligonucleotide
  Target: LAMA2; (+) strand; PAM type: NNGRRT; PAM sequence: TAGAGT
aaagacctggagtttgctaa

SEQ ID NO: 30651 - DNA, 20 bp, Artificial Sequence
  Description of Artificial Sequence: Synthetic oligonucleotide
  Target: LAMA2; (+) strand; PAM type: NNGRRT; PAM sequence: CTGAAT
ccttcaatgaaaatttgcct

SEQ ID NO: 30652 - DNA, 20 bp, Artificial Sequence
  Description of Artificial Sequence: Synthetic oligonucleotide
  Target: LAMA2; (+) strand; PAM type: NNGRRT; PAM sequence: AAGAAT
acagctcccatccaattaat

SEQ ID NO: 30653 - DNA, 20 bp, Artificial Sequence
  Description of Artificial Sequence: Synthetic oligonucleotide
  Target: LAMA2; (+) strand; PAM type: NNGRRT; PAM sequence: CTGAGT
atccaattaataagaatctt

SEQ ID NO: 30654 - DNA, 20 bp, Artificial Sequence
  Description of Artificial Sequence: Synthetic oligonucleotide
  Target: LAMA2; (+) strand; PAM type: NNGRRT; PAM sequence: CTGAAT
taaattctgaactcttatta

SEQ ID NO: 30655 - DNA, 20 bp, Artificial Sequence
  Description of Artificial Sequence: Synthetic oligonucleotide
  Target: LAMA2; (+) strand; PAM type: NNGRRT; PAM sequence: TGGAGT
ttgtagagaaaataaccaat

SEQ ID NO: 30656 - DNA, 20 bp, Artificial Sequence
  Description of Artificial Sequence: Synthetic oligonucleotide
  Target: LAMA2; (+) strand; PAM type: NNGRRT; PAM sequence: CTGGAT
aaaggctttccaacatggac

SEQ ID NO: 30657 - DNA, 20 bp, Artificial Sequence
  Description of Artificial Sequence: Synthetic oligonucleotide
  Target: LAMA2; (+) strand; PAM type: NNGRRT; PAM sequence: CAGAGT
aacatggacctggattcctc

SEQ ID NO: 30658 - DNA, 20 bp, Artificial Sequence
  Description of Artificial Sequence: Synthetic oligonucleotide
  Target: LAMA2; (+) strand; PAM type: NNGRRT; PAM sequence: CAGGAT
tctaattactagtgggctgg

SEQ ID NO: 30659 - DNA, 20 bp, Artificial Sequence
  Description of Artificial Sequence: Synthetic oligonucleotide
  Target: LAMA2; (+) strand; PAM type: NNGRRT; PAM sequence: GAGAAT
ccatcatcctgggagaaggg

SEQ ID NO: 30660 - DNA, 20 bp, Artificial Sequence
  Description of Artificial Sequence: Synthetic oligonucleotide
  Target: LAMA2; (+) strand; PAM type: NNGRRT; PAM sequence: GAGGAT
tggacaaccctctgtacctg

SEQ ID NO: 30661 - DNA, 20 bp, Artificial Sequence
  Description of Artificial Sequence: Synthetic oligonucleotide
  Target: LAMA2; (+) strand; PAM type: NNGRRT; PAM sequence: ATGGAT
gtactgtgagctctgtgctg

SEQ ID NO: 30662 - DNA, 20 bp, Artificial Sequence
  Description of Artificial Sequence: Synthetic oligonucleotide
  Target: LAMA2; (+) strand; PAM type: NNGRRT; PAM sequence: CAGAAT
tgaactattgatgcccctga

SEQ ID NO: 30663 - DNA, 20 bp, Artificial Sequence
  Description of Artificial Sequence: Synthetic oligonucleotide
  Target: LAMA2; (+) strand; PAM type: NNGRRT; PAM sequence: ATGAGT
attgtacctcaaagtagctg

SEQ ID NO: 30664 - DNA, 20 bp, Artificial Sequence
  Description of Artificial Sequence: Synthetic oligonucleotide
  Target: LAMA2; (+) strand; PAM type: NNGRRT; PAM sequence: TTGAGT
tcaaagtagctgatgagttc

SEQ ID NO: 30665 - DNA, 20 bp, Artificial Sequence
  Description of Artificial Sequence: Synthetic oligonucleotide
  Target: LAMA2; (+) strand; PAM type: NNGRRT; PAM sequence: GTGGAT
tagctgatgagttcttgagt

SEQ ID NO: 30666 - DNA, 20 bp, Artificial Sequence
  Description of Artificial Sequence: Synthetic oligonucleotide
  Target: LAMA2; (+) strand; PAM type: NNGRRT; PAM sequence: AAGAGT
gagttcttgagtgtggattg

SEQ ID NO: 30667 - DNA, 20 bp, Artificial Sequence
  Description of Artificial Sequence: Synthetic oligonucleotide
  Target: LAMA2; (+) strand; PAM type: NNGRRT; PAM sequence: TGGAAT
ttgaagagtaggaaattatg

SEQ ID NO: 30668 - DNA, 20 bp, Artificial Sequence
  Description of Artificial Sequence: Synthetic oligonucleotide
  Target: LAMA2; (+) strand; PAM type: NNGRRT; PAM sequence: TAGAAT
atacatggttgatagatgca

SEQ ID NO: 30669 - DNA, 20 bp, Artificial Sequence
  Description of Artificial Sequence: Synthetic oligonucleotide
  Target: LAMA2; (+) strand; PAM type: NNGRRT; PAM sequence: CAGAGT
tgatagatgcatagaatata

SEQ ID NO: 30670 - DNA, 20 bp, Artificial Sequence
  Description of Artificial Sequence: Synthetic oligonucleotide
  Target: LAMA2; (+) strand; PAM type: NNGRRT; PAM sequence: TAGAGT
catttccttgtactaactaa

SEQ ID NO: 30671 - DNA, 20 bp, Artificial Sequence
  Description of Artificial Sequence: Synthetic oligonucleotide
  Target: LAMA2; (+) strand; PAM type: NNGRRT; PAM sequence: AAGAAT
ttatgtccacagcaggaaag

SEQ ID NO: 30672 - DNA, 20 bp, Artificial Sequence
  Description of Artificial Sequence: Synthetic oligonucleotide
  Target: LAMA2; (+) strand; PAM type: NNGRRT; PAM sequence: TTGAAT
cacacaggcatttgtcattg

SEQ ID NO: 30673 - DNA, 20 bp, Artificial Sequence
  Description of Artificial Sequence: Synthetic oligonucleotide
  Target: LAMA2; (+) strand; PAM type: NNGRRT; PAM sequence: TAGAAT
agtcatttaaggactatttc

SEQ ID NO: 30674 - DNA, 20 bp, Artificial Sequence
  Description of Artificial Sequence: Synthetic oligonucleotide
  Target: LAMA2; (+) strand; PAM type: NNGRRT; PAM sequence: TAGAAT
tttgctgtattaatactaca

SEQ ID NO: 30675 - DNA, 20 bp, Artificial Sequence
  Description of Artificial Sequence: Synthetic oligonucleotide
  Target: LAMA2; (+) strand; PAM type: NNGRRT; PAM sequence: TGGGAT
ttccaaatccttaatgtcag

SEQ ID NO: 30676 - DNA, 20 bp, Artificial Sequence
  Description of Artificial Sequence: Synthetic oligonucleotide
  Target: LAMA2; (+) strand; PAM type: NNGRRT; PAM sequence: TAGAAT
atccttaatgtcagtgggat

SEQ ID NO: 30677 - DNA, 20 bp, Artificial Sequence
  Description of Artificial Sequence: Synthetic oligonucleotide
  Target: LAMA2; (+) strand; PAM type: NNGRRT; PAM sequence: GCGGAT
agtgggattagaatatgaag

SEQ ID NO: 30678 - DNA, 20 bp, Artificial Sequence
  Description of Artificial Sequence: Synthetic oligonucleotide
  Target: LAMA2; (+) strand; PAM type: NNGRRT; PAM sequence: GTGAAT
tgcagaagatcaaatggaaa

SEQ ID NO: 30679 - DNA, 20 bp, Artificial Sequence
  Description of Artificial Sequence: Synthetic oligonucleotide
  Target: LAMA2; (+) strand; PAM type: NNGRRT; PAM sequence: CAGAGT
ttactatcataatgtttaag

SEQ ID NO: 30680 - DNA, 20 bp, Artificial Sequence
  Description of Artificial Sequence: Synthetic oligonucleotide
  Target: LAMA2; (+) strand; PAM type: NNGRRT; PAM sequence: GTGGGT
agactcttccaattattcag

SEQ ID NO: 30681 - DNA, 20 bp, Artificial Sequence
  Description of Artificial Sequence: Synthetic oligonucleotide
  Target: LAMA2; (+) strand; PAM type: NNGRRT; PAM sequence: CAGAAT
caggtgggtcccaggacatg

SEQ ID NO: 30682 - DNA, 20 bp, Artificial Sequence
  Description of Artificial Sequence: Synthetic oligonucleotide
  Target: LAMA2; (+) strand; PAM type: NNGRRT; PAM sequence: TAGGGT
tgtaagcaccaaagacccag

SEQ ID NO: 30683 - DNA, 20 bp, Artificial Sequence
  Description of Artificial Sequence: Synthetic oligonucleotide
  Target: LAMA2; (+) strand; PAM type: NNGRRT; PAM sequence: ATGAGT
tctcatcacaggtttagaag

SEQ ID NO: 30684 - DNA, 20 bp, Artificial Sequence
  Description of Artificial Sequence: Synthetic oligonucleotide
  Target: LAMA2; (+) strand; PAM type: NNGRRT; PAM sequence: TTGAAT
tatttaataatgataattca

SEQ ID NO: 30685 - DNA, 20 bp, Artificial Sequence
  Description of Artificial Sequence: Synthetic oligonucleotide
  Target: LAMA2; (+) strand; PAM type: NNGRRT; PAM sequence: CTGGAT
cagctcagtgcctttaaaca

SEQ ID NO: 30686 - DNA, 20 bp, Artificial Sequence
  Description of Artificial Sequence: Synthetic oligonucleotide
  Target: LAMA2; (+) strand; PAM type: NNGRRT; PAM sequence: TAGGAT
ttcctttcccacagatcatc

SEQ ID NO: 30687 - DNA, 20 bp, Artificial Sequence
  Description of Artificial Sequence: Synthetic oligonucleotide
  Target: LAMA2; (+) strand; PAM type: NNGRRT; PAM sequence: GAGAGT
acagttttctagtctacaaa

SEQ ID NO: 30688 - DNA, 20 bp, Artificial Sequence
  Description of Artificial Sequence: Synthetic oligonucleotide
  Target: LAMA2; (+) strand; PAM type: NNGRRT; PAM sequence: ATGAAT
tctagtctacaaagagagtc

SEQ ID NO: 30689 - DNA, 20 bp, Artificial Sequence
  Description of Artificial Sequence: Synthetic oligonucleotide
  Target: LAMA2; (+) strand; PAM type: NNGRRT; PAM sequence: AAGGAT
tgaattttctgtggggacta

SEQ ID NO: 30690 - DNA, 20 bp, Artificial Sequence
  Description of Artificial Sequence: Synthetic oligonucleotide
  Target: LAMA2; (+) strand; PAM type: NNGRRT; PAM sequence: GAGGGT
actaaaggatttggcacata

SEQ ID NO: 30691 - DNA, 20 bp, Artificial Sequence
  Description of Artificial Sequence: Synthetic oligonucleotide
  Target: LAMA2; (+) strand; PAM type: NNGRRT; PAM sequence: GTGAGT
tggcacatagagggtatcca

SEQ ID NO: 30692 - DNA, 20 bp, Artificial Sequence
  Description of Artificial Sequence: Synthetic oligonucleotide
  Target: LAMA2; (+) strand; PAM type: NNGRRT; PAM sequence: GTGAAT
tgcatatcagttgttcacca

SEQ ID NO: 30693 - DNA, 20 bp, Artificial Sequence
  Description of Artificial Sequence: Synthetic oligonucleotide
  Target: LAMA2; (+) strand; PAM type: NNGRRT; PAM sequence: AGGGAT
acccccacccccataaagtt

SEQ ID NO: 30694 - DNA, 20 bp, Artificial Sequence
  Description of Artificial Sequence: Synthetic oligonucleotide
  Target: LAMA2; (+) strand; PAM type: NNGRRT; PAM sequence: TGGGAT
tttattatggtaatttattg

SEQ ID NO: 30695 - DNA, 20 bp, Artificial Sequence
  Description of Artificial Sequence: Synthetic oligonucleotide
  Target: LAMA2; (+) strand; PAM type: NNGRRT; PAM sequence: TGGGAT
attattgtagaaaattatta

SEQ ID NO: 30696 - DNA, 20 bp, Artificial Sequence
  Description of Artificial Sequence: Synthetic oligonucleotide
  Target: LAMA2; (+) strand; PAM type: NNGRRT; PAM sequence: TGGGAT
tttattatggtaatttatta

SEQ ID NO: 30697 - DNA, 20 bp, Artificial Sequence
  Description of Artificial Sequence: Synthetic oligonucleotide
  Target: LAMA2; (+) strand; PAM type: NNGRRT; PAM sequence: AAGAAT
gaagtcttaagaacataaaa

SEQ ID NO: 30698 - DNA, 20 bp, Artificial Sequence
  Description of Artificial Sequence: Synthetic oligonucleotide
  Target: LAMA2; (+) strand; PAM type: NNGRRT; PAM sequence: GAGAAT
aagaacataaaaaagaatgt

SEQ ID NO: 30699 - DNA, 20 bp, Artificial Sequence
  Description of Artificial Sequence: Synthetic oligonucleotide
  Target: LAMA2; (+) strand; PAM type: NNGRRT; PAM sequence: GTGAGT
cagttttcatactacttgcc

SEQ ID NO: 30700 - DNA, 20 bp, Artificial Sequence
  Description of Artificial Sequence: Synthetic oligonucleotide
  Target: LAMA2; (+) strand; PAM type: NNGRRT; PAM sequence: ATGGAT
acttatttttataatttttc

SEQ ID NO: 30701 - DNA, 20 bp, Artificial Sequence
  Description of Artificial Sequence: Synthetic oligonucleotide
  Target: LAMA2; (+) strand; PAM type: NNGRRT; PAM sequence: ATGGAT
attcgataaatcagatgaaa

SEQ ID NO: 30702 - DNA, 20 bp, Artificial Sequence
  Description of Artificial Sequence: Synthetic oligonucleotide
  Target: LAMA2; (+) strand; PAM type: NNGRRT; PAM sequence: GAGAAT
aaaggagaacctagagccag

SEQ ID NO: 30703 - DNA, 20 bp, Artificial Sequence
  Description of Artificial Sequence: Synthetic oligonucleotide
  Target: LAMA2; (+) strand; PAM type: NNGRRT; PAM sequence: TAGAGT
aaaatattagcataggctga

SEQ ID NO: 30704 - DNA, 20 bp, Artificial Sequence
  Description of Artificial Sequence: Synthetic oligonucleotide
  Target: LAMA2; (+) strand; PAM type: NNGRRT; PAM sequence: ATGAGT
gaaatttaacaaaatcatct

SEQ ID NO: 30705 - DNA, 20 bp, Artificial Sequence
  Description of Artificial Sequence: Synthetic oligonucleotide
  Target: LAMA2; (+) strand; PAM type: NNGRRT; PAM sequence: TAGGGT
tatatgtaccattaaaaata

SEQ ID NO: 30706 - DNA, 20 bp, Artificial Sequence
  Description of Artificial Sequence: Synthetic oligonucleotide
  Target: LAMA2; (+) strand; PAM type: NNGRRT; PAM sequence: TAGAAT
gactgatttactctacgttt

SEQ ID NO: 30707 - DNA, 20 bp, Artificial Sequence
  Description of Artificial Sequence: Synthetic oligonucleotide
  Target: LAMA2; (+) strand; PAM type: NNGRRT; PAM sequence: CTGAAT
ttttgttgtcttttaaactt

SEQ ID NO: 30708 - DNA, 20 bp, Artificial Sequence
  Description of Artificial Sequence: Synthetic oligonucleotide
  Target: LAMA2; (+) strand; PAM type: NNGRRT; PAM sequence: AGGGGT
agtaacattaaaattttgcc

SEQ ID NO: 30709 - DNA, 20 bp, Artificial Sequence
  Description of Artificial Sequence: Synthetic oligonucleotide
  Target: LAMA2; (+) strand; PAM type: NNGRRT; PAM sequence: TGGGAT
tcagtatgcattacttacaa

SEQ ID NO: 30710 - DNA, 20 bp, Artificial Sequence
  Description of Artificial Sequence: Synthetic oligonucleotide
  Target: LAMA2; (+) strand; PAM type: NNGRRT; PAM sequence: TTGAGT
aactaaaacagcgttacacc

SEQ ID NO: 30711 - DNA, 20 bp, Artificial Sequence
  Description of Artificial Sequence: Synthetic oligonucleotide
  Target: LAMA2; (+) strand; PAM type: NNGRRT; PAM sequence: TTGAAT
ttgtataagctatggcttct

SEQ ID NO: 30712 - DNA, 20 bp, Artificial Sequence
  Description of Artificial Sequence: Synthetic oligonucleotide
  Target: LAMA2; (+) strand; PAM type: NNGRRT; PAM sequence: TGGAAT
agtgtcttcatgctcaaaat

SEQ ID NO: 30713 - DNA, 20 bp, Artificial Sequence
  Description of Artificial Sequence: Synthetic oligonucleotide
  Target: LAMA2; (+) strand; PAM type: NNGRRT; PAM sequence: GTGAAT
catgatgctaaagcctttat

SEQ ID NO: 30714 - DNA, 20 bp, Artificial Sequence
  Description of Artificial Sequence: Synthetic oligonucleotide
  Target: LAMA2; (+) strand; PAM type: NNGRRT; PAM sequence: TAGAGT
tgaattatccctacagcttg

SEQ ID NO: 30715 - DNA, 20 bp, Artificial Sequence
  Description of Artificial Sequence: Synthetic oligonucleotide
  Target: LAMA2; (+) strand; PAM type: NNGRRT; PAM sequence: AGGGAT
acagcttgtagagttgttat

SEQ ID NO: 30716 - DNA, 20 bp, Artificial Sequence
  Description of Artificial Sequence: Synthetic oligonucleotide
  Target: LAMA2; (+) strand; PAM type: NNGRRT; PAM sequence: TAGAAT
ttgttatagggattaaatga

SEQ ID NO: 30717 - DNA, 20 bp, Artificial Sequence
  Description of Artificial Sequence: Synthetic oligonucleotide
  Target: LAMA2; (+) strand; PAM type: NNGRRT; PAM sequence: TGGGGT
taggcgtccatgttaccatg

SEQ ID NO: 30718 - DNA, 20 bp, Artificial Sequence
  Description of Artificial Sequence: Synthetic oligonucleotide
  Target: LAMA2; (+) strand; PAM type: NNGRRT; PAM sequence: GTGAGT
ccacagtcaaactggacagt

SEQ ID NO: 30719 - DNA, 20 bp, Artificial Sequence
  Description of Artificial Sequence: Synthetic oligonucleotide
  Target: LAMA2; (+) strand; PAM type: NNGRRT; PAM sequence: CAGGGT
gtgagtgcagagccaacgtt

SEQ ID NO: 30720 - DNA, 20 bp, Artificial Sequence
  Description of Artificial Sequence: Synthetic oligonucleotide
  Target: LAMA2; (+) strand; PAM type: NNGRRT; PAM sequence: AGGAGT
gatgtgacaaatgcaaggta

SEQ ID NO: 30721 - DNA, 20 bp, Artificial Sequence
  Description of Artificial Sequence: Synthetic oligonucleotide
  Target: LAMA2; (+) strand; PAM type: NNGRRT; PAM sequence: TGGGAT
cgtatattaaaaggaaggtt

SEQ ID NO: 30722 - DNA, 20 bp, Artificial Sequence
  Description of Artificial Sequence: Synthetic oligonucleotide
  Target: LAMA2; (+) strand; PAM type: NNGRRT; PAM sequence: GTGAAT
ttaaacatttttttttggca

SEQ ID NO: 30723 - DNA, 20 bp, Artificial Sequence
  Description of Artificial Sequence: Synthetic oligonucleotide
  Target: LAMA2; (+) strand; PAM type: NNGRRT; PAM sequence: GCGAAT
atttctgaaacaaatagcag

SEQ ID NO: 30724 - DNA, 20 bp, Artificial Sequence
  Description of Artificial Sequence: Synthetic oligonucleotide
  Target: LAMA2; (+) strand; PAM type: NNGRRT; PAM sequence: CAGAAT
ctttgcctttacatttttgg

SEQ ID NO: 30725 - DNA, 20 bp, Artificial Sequence
  Description of Artificial Sequence: Synthetic oligonucleotide
  Target: LAMA2; (+) strand; PAM type: NNGRRT; PAM sequence: GTGGAT
actttgggaggccaaggcag

SEQ ID NO: 30726 - DNA, 20 bp, Artificial Sequence
  Description of Artificial Sequence: Synthetic oligonucleotide
  Target: LAMA2; (+) strand; PAM type: NNGRRT; PAM sequence: AGGAGT
ggcaggtggatcacgaggtc

SEQ ID NO: 30727 - DNA, 20 bp, Artificial Sequence
  Description of Artificial Sequence: Synthetic oligonucleotide
  Target: LAMA2; (+) strand; PAM type: NNGRRT; PAM sequence: GAGAAT
tactcaggaggctgaggcgg

SEQ ID NO: 30728 - DNA, 20 bp, Artificial Sequence
  Description of Artificial Sequence: Synthetic oligonucleotide
  Target: LAMA2; (+) strand; PAM type: NNGRRT; PAM sequence: CTGGGT
ggcgggagaatcgcttgaac

SEQ ID NO: 30729 - DNA, 20 bp, Artificial Sequence
  Description of Artificial Sequence: Synthetic oligonucleotide
  Target: LAMA2; (+) strand; PAM type: NNGRRT; PAM sequence: CCGAGT
ctgcactccagcctgggcga

SEQ ID NO: 30730 - DNA, 20 bp, Artificial Sequence
  Description of Artificial Sequence: Synthetic oligonucleotide
  Target: LAMA2; (+) strand; PAM type: NNGRRT; PAM sequence: GAGGGT
gcaacttcagattcctccat

SEQ ID NO: 30731 - DNA, 20 bp, Artificial Sequence
  Description of Artificial Sequence: Synthetic oligonucleotide
  Target: LAMA2; (+) strand; PAM type: NNGRRT; PAM sequence: TTGAAT
atatcatctgcttctgtctc

SEQ ID NO: 30732 - DNA, 20 bp, Artificial Sequence
  Description of Artificial Sequence: Synthetic oligonucleotide
  Target: LAMA2; (+) strand; PAM type: NNGRRT; PAM sequence: CGGGAT
ttttaaagcccaatatgtgg

SEQ ID NO: 30733 - DNA, 20 bp, Artificial Sequence
  Description of Artificial Sequence: Synthetic oligonucleotide
  Target: LAMA2; (+) strand; PAM type: NNGRRT; PAM sequence: ACGGGT
gagcagccgcggagagcgca

SEQ ID NO: 30734 - DNA, 20 bp, Artificial Sequence
  Description of Artificial Sequence: Synthetic oligonucleotide
  Target: LAMA2; (+) strand; PAM type: NNGRRT; PAM sequence: CTGGGT
cgcggagagcgcaacgggtg

SEQ ID NO: 30735 - DNA, 20 bp, Artificial Sequence
  Description of Artificial Sequence: Synthetic oligonucleotide
  Target: LAMA2; (+) strand; PAM type: NNGRRT; PAM sequence: GCGGGT
gtgggctatcggcagctcca

SEQ ID NO: 30736 - DNA, 20 bp, Artificial Sequence
  Description of Artificial Sequence: Synthetic oligonucleotide
  Target: LAMA2; (+) strand; PAM type: NNGRRT; PAM sequence: TAGGGT
aaaaagcatattcaagttca

SEQ ID NO: 30737 - DNA, 20 bp, Artificial Sequence
  Description of Artificial Sequence: Synthetic oligonucleotide
  Target: LAMA2; (+) strand; PAM type: NNGRRT; PAM sequence: ATGAAT
aaccaaactttcaattaacc

SEQ ID NO: 30738 - DNA, 20 bp, Artificial Sequence
  Description of Artificial Sequence: Synthetic oligonucleotide
  Target: LAMA2; (+) strand; PAM type: NNGRRT; PAM sequence: AAGAAT
tcaggcatttcatcataatt

SEQ ID NO: 30739 - DNA, 20 bp, Artificial Sequence
  Description of Artificial Sequence: Synthetic oligonucleotide
  Target: LAMA2; (+) strand; PAM type: NNGRRT; PAM sequence: AAGAGT
ggtcccaggctgagctgcag

SEQ ID NO: 30740 - DNA, 20 bp, Artificial Sequence
  Description of Artificial Sequence: Synthetic oligonucleotide
  Target: LAMA2; (+) strand; PAM type: NNGRRT; PAM sequence: TAGAGT
ggagacaagacttaccagta

SEQ ID NO: 30741 - DNA, 20 bp, Artificial Sequence
  Description of Artificial Sequence: Synthetic oligonucleotide
  Target: LAMA2; (+) strand; PAM type: NNGRRT; PAM sequence: GAGAAT
gtatagagtcaggacctgta

SEQ ID NO: 30742 - DNA, 20 bp, Artificial Sequence
  Description of Artificial Sequence: Synthetic oligonucleotide
  Target: LAMA2; (+) strand; PAM type: NNGRRT; PAM sequence: GAGGAT
gtcaggacctgtagagaatt

SEQ ID NO: 30743 - DNA, 20 bp, Artificial Sequence
  Description of Artificial Sequence: Synthetic oligonucleotide
  Target: LAMA2; (+) strand; PAM type: NNGRRT; PAM sequence: TTGAAT
acttcctagctataaattcc

SEQ ID NO: 30744 - DNA, 20 bp, Artificial Sequence
  Description of Artificial Sequence: Synthetic oligonucleotide
  Target: LAMA2; (+) strand; PAM type: NNGRRT; PAM sequence: GAGGGT
ctgtagtaagatccacttca

SEQ ID NO: 30745 - DNA, 20 bp, Artificial Sequence
  Description of Artificial Sequence: Synthetic oligonucleotide
  Target: LAMA2; (+) strand; PAM type: NNGRRT; PAM sequence: TGGGGT
agcatagccttctgctgcaa

SEQ ID NO: 30746 - DNA, 20 bp, Artificial Sequence
  Description of Artificial Sequence: Synthetic oligonucleotide
  Target: LAMA2; (+) strand; PAM type: NNGRRT; PAM sequence: CTGGGT
ggaaaacacagaaagaaaga

SEQ ID NO: 30747 - DNA, 20 bp, Artificial Sequence
  Description of Artificial Sequence: Synthetic oligonucleotide
  Target: LAMA2; (+) strand; PAM type: NNGRRT; PAM sequence: TGGGAT
taaattcttggccaagccaa

SEQ ID NO: 30748 - DNA, 20 bp, Artificial Sequence
  Description of Artificial Sequence: Synthetic oligonucleotide
  Target: LAMA2; (+) strand; PAM type: NNGRRT; PAM sequence: AGGAAT
aagcaaattttacccactaa

SEQ ID NO: 30749 - DNA, 20 bp, Artificial Sequence
  Description of Artificial Sequence: Synthetic oligonucleotide
  Target: LAMA2; (+) strand; PAM type: NNGRRT; PAM sequence: CTGAAT
ttttacccactaaaggaatc

SEQ ID NO: 30750 - DNA, 20 bp, Artificial Sequence
  Description of Artificial Sequence: Synthetic oligonucleotide
  Target: LAMA2; (+) strand; PAM type: NNGRRT; PAM sequence: AAGGAT
tacagtaatcagcctgagag

SEQ ID NO: 30751 - DNA, 20 bp, Artificial Sequence
  Description of Artificial Sequence: Synthetic oligonucleotide
  Target: LAMA2; (+) strand; PAM type: NNGRRT; PAM sequence: CAGAGT
gaagctcatcttaattcatt

SEQ ID NO: 30752 - DNA, 20 bp, Artificial Sequence
  Description of Artificial Sequence: Synthetic oligonucleotide
  Target: LAMA2; (+) strand; PAM type: NNGRRT; PAM sequence: GAGGGT
cctgtctataccaccacctt

SEQ ID NO: 30753 - DNA, 20 bp, Artificial Sequence
  Description of Artificial Sequence: Synthetic oligonucleotide
  Target: LAMA2; (+) strand; PAM type: NNGRRT; PAM sequence: ATGAAT
gagggttaagatttctacat

SEQ ID NO: 30754 - DNA, 20 bp, Artificial Sequence
  Description of Artificial Sequence: Synthetic oligonucleotide
  Target: LAMA2; (+) strand; PAM type: NNGRRT; PAM sequence: ATGGGT
tccattacagagcacctctg

SEQ ID NO: 30755 - DNA, 20 bp, Artificial Sequence
  Description of Artificial Sequence: Synthetic oligonucleotide
  Target: LAMA2; (+) strand; PAM type: NNGRRT; PAM sequence: TCGGAT
taggttgtcttgcaggtaga

SEQ ID NO: 30756 - DNA, 20 bp, Artificial Sequence
  Description of Artificial Sequence: Synthetic oligonucleotide
  Target: LAMA2; (+) strand; PAM type: NNGRRT; PAM sequence: CAGGGT
aggcgcctccaaggctgtct

SEQ ID NO: 30757 - DNA, 20 bp, Artificial Sequence
  Description of Artificial Sequence: Synthetic oligonucleotide
  Target: LAMA2; (+) strand; PAM type: NNGRRT; PAM sequence: GAGAGT
gtgcatcaggcaggagcata

SEQ ID NO: 30758 - DNA, 20 bp, Artificial Sequence
  Description of Artificial Sequence: Synthetic oligonucleotide
  Target: LAMA2; (+) strand; PAM type: NNGRRT; PAM sequence: CAGGGT
tacagtactattgtatgaag

SEQ ID NO: 30759 - DNA, 20 bp, Artificial Sequence
  Description of Artificial Sequence: Synthetic oligonucleotide
  Target: LAMA2; (+) strand; PAM type: NNGRRT; PAM sequence: TGGAAT
tggagccaacctagctgatc

SEQ ID NO: 30760 - DNA, 20 bp, Artificial Sequence
  Description of Artificial Sequence: Synthetic oligonucleotide
  Target: LAMA2; (+) strand; PAM type: NNGRRT; PAM sequence: GAGAAT
ccactcaataaaaaagtggt

SEQ ID NO: 30761 - DNA, 20 bp, Artificial Sequence
  Description of Artificial Sequence: Synthetic oligonucleotide
  Target: LAMA2; (+) strand; PAM type: NNGRRT; PAM sequence: CAGGGT
tgagaatgacaactctctgc

SEQ ID NO: 30762 - DNA, 20 bp, Artificial Sequence
  Description of Artificial Sequence: Synthetic oligonucleotide
  Target: LAMA2; (+) strand; PAM type: NNGRRT; PAM sequence: AGGAGT
tctctgccagggttgtcctg

SEQ ID NO: 30763 - DNA, 20 bp, Artificial Sequence
  Description of Artificial Sequence: Synthetic oligonucleotide
  Target: LAMA2; (+) strand; PAM type: NNGRRT; PAM sequence: ATGAGT
agggttgtcctgaggagtaa

SEQ ID NO: 30764 - DNA, 20 bp, Artificial Sequence
  Description of Artificial Sequence: Synthetic oligonucleotide
  Target: LAMA2; (+) strand; PAM type: NNGRRT; PAM sequence: AAGAGT
taaatgagtacatatttgta

SEQ ID NO: 30765 - DNA, 20 bp, Artificial Sequence
  Description of Artificial Sequence: Synthetic oligonucleotide
  Target: LAMA2; (+) strand; PAM type: NNGRRT; PAM sequence: AAGGGT
gtaaagagtttagatttgta

SEQ ID NO: 30766 - DNA, 20 bp, Artificial Sequence
  Description of Artificial Sequence: Synthetic oligonucleotide
  Target: LAMA2; (+) strand; PAM type: NNGRRT; PAM sequence: TAGAAT
gtttagatttgtaaagggtt

SEQ ID NO: 30767 - DNA, 20 bp, Artificial Sequence
  Description of Artificial Sequence: Synthetic oligonucleotide
  Target: LAMA2; (+) strand; PAM type: NNGRRT; PAM sequence: ATGAAT
gcaaaaaggaagcacaatat

SEQ ID NO: 30768 - DNA, 20 bp, Artificial Sequence
  Description of Artificial Sequence: Synthetic oligonucleotide
  Target: LAMA2; (+) strand; PAM type: NNGRRT; PAM sequence: CTGGGT
ggaacctatacagtttctca

SEQ ID NO: 30769 - DNA, 20 bp, Artificial Sequence
  Description of Artificial Sequence: Synthetic oligonucleotide
  Target: LAMA2; (+) strand; PAM type: NNGRRT; PAM sequence: CTGGAT
tatacagtttctcactgggt

SEQ ID NO: 30770 - DNA, 20 bp, Artificial Sequence
  Description of Artificial Sequence: Synthetic oligonucleotide
  Target: LAMA2; (+) strand; PAM type: NNGRRT; PAM sequence: ATGAAT
attaatctcaattactgacc

SEQ ID NO: 30771 - DNA, 20 bp, Artificial Sequence
  Description of Artificial Sequence: Synthetic oligonucleotide
  Target: LAMA2; (+) strand; PAM type: NNGRRT; PAM sequence: TGGGGT
tccttaagtttgtttactag

SEQ ID NO: 30772 - DNA, 20 bp, Artificial Sequence
  Description of Artificial Sequence: Synthetic oligonucleotide
  Target: LAMA2; (+) strand; PAM type: NNGRRT; PAM sequence: TGGAAT
tttccttacataatcgactt

SEQ ID NO: 30773 - DNA, 20 bp, Artificial Sequence
  Description of Artificial Sequence: Synthetic oligonucleotide
  Target: LAMA2; (+) strand; PAM type: NNGRRT; PAM sequence: TGGAAT
ttaaaatgatagctataatt

SEQ ID NO: 30774 - DNA, 20 bp, Artificial Sequence
  Description of Artificial Sequence: Synthetic oligonucleotide
  Target: LAMA2; (+) strand; PAM type: NNGRRT; PAM sequence: AGGGGT
ttgatatttgattgatttaa

SEQ ID NO: 30775 - DNA, 20 bp, Artificial Sequence
  Description of Artificial Sequence: Synthetic oligonucleotide
  Target: LAMA2; (+) strand; PAM type: NNGRRT; PAM sequence: ATGAGT
ggtgtacacacaccccttta

SEQ ID NO: 30776 - DNA, 20 bp, Artificial Sequence
  Description of Artificial Sequence: Synthetic oligonucleotide
  Target: LAMA2; (+) strand; PAM type: NNGRRT; PAM sequence: GAGAGT
tttaatgagtaaatcaatat

SEQ ID NO: 30777 - DNA, 20 bp, Artificial Sequence
  Description of Artificial Sequence: Synthetic oligonucleotide
  Target: LAMA2; (+) strand; PAM type: NNGRRT; PAM sequence: GTGGAT
gagtaaatcaatatgagagt

SEQ ID NO: 30778 - DNA, 20 bp, Artificial Sequence
  Description of Artificial Sequence: Synthetic oligonucleotide
  Target: LAMA2; (+) strand; PAM type: NNGRRT; PAM sequence: ATGAGT
atatatagatgtaaatatat

SEQ ID NO: 30779 - DNA, 20 bp, Artificial Sequence
  Description of Artificial Sequence: Synthetic oligonucleotide
  Target: LAMA2; (+) strand; PAM type: NNGRRT; PAM sequence: ATGAGT
atgagtaaatgtatatatat

SEQ ID NO: 30780 - DNA, 20 bp, Artificial Sequence
  Description of Artificial Sequence: Synthetic oligonucleotide
  Target: LAMA2; (+) strand; PAM type: NNGRRT; PAM sequence: ATGAGT
acatatatcggcatagatat

SEQ ID NO: 30781 - DNA, 20 bp, Artificial Sequence
  Description of Artificial Sequence: Synthetic oligonucleotide
  Target: LAMA2; (+) strand; PAM type: NNGRRT; PAM sequence: ATGAAT
agacaatttctgaaataaag

SEQ ID NO: 30782 - DNA, 20 bp, Artificial Sequence
  Description of Artificial Sequence: Synthetic oligonucleotide
  Target: LAMA2; (+) strand; PAM type: NNGRRT; PAM sequence: ATGGGT
ctgtttgtgtgtctggtggt

SEQ ID NO: 30783 - DNA, 20 bp, Artificial Sequence
  Description of Artificial Sequence: Synthetic oligonucleotide
  Target: LAMA2; (+) strand; PAM type: NNGRRT; PAM sequence: CAGGAT
tcattaaaactgcttcaaaa

SEQ ID NO: 30784 - DNA, 20 bp, Artificial Sequence
  Description of Artificial Sequence: Synthetic oligonucleotide
  Target: LAMA2; (+) strand; PAM type: NNGRRT; PAM sequence: GTGGAT
cttgcatattatttcataat

SEQ ID NO: 30785 - DNA, 20 bp, Artificial Sequence
  Description of Artificial Sequence: Synthetic oligonucleotide
  Target: LAMA2; (+) strand; PAM type: NNGRRT; PAM sequence: ATGAAT
ccaggtatctaaaattttac

SEQ ID NO: 30786 - DNA, 20 bp, Artificial Sequence
  Description of Artificial Sequence: Synthetic oligonucleotide
  Target: LAMA2; (+) strand; PAM type: NNGRRT; PAM sequence: GTGAAT
ggttagttttttttatatag

SEQ ID NO: 30787 - DNA, 20 bp, Artificial Sequence
  Description of Artificial Sequence: Synthetic oligonucleotide
  Target: LAMA2; (+) strand; PAM type: NNGRRT; PAM sequence: CTGAAT
ctttaatcatataccacaat

SEQ ID NO: 30788 - DNA, 20 bp, Artificial Sequence
  Description of Artificial Sequence: Synthetic oligonucleotide
  Target: LAMA2; (+) strand; PAM type: NNGRRT; PAM sequence: GAGAAT
ccaacagtaaatgtaaagat

SEQ ID NO: 30789 - DNA, 20 bp, Artificial Sequence
  Description of Artificial Sequence: Synthetic oligonucleotide
  Target: LAMA2; (+) strand; PAM type: NNGRRT; PAM sequence: TTGGGT
tgaggcttattaatttctct

SEQ ID NO: 30790 - DNA, 20 bp, Artificial Sequence
  Description of Artificial Sequence: Synthetic oligonucleotide
  Target: LAMA2; (+) strand; PAM type: NNGRRT; PAM sequence: AAGAAT
taagtctaattttccaaaat

SEQ ID NO: 30791 - DNA, 20 bp, Artificial Sequence
  Description of Artificial Sequence: Synthetic oligonucleotide
  Target: LAMA2; (+) strand; PAM type: NNGRRT; PAM sequence: GAGAAT
tttacaaagaagtaattacc

SEQ ID NO: 30792 - DNA, 20 bp, Artificial Sequence
  Description of Artificial Sequence: Synthetic oligonucleotide
  Target: LAMA2; (+) strand; PAM type: NNGRRT; PAM sequence: CAGGAT
taaccctgaagtattttaag

SEQ ID NO: 30793 - DNA, 20 bp, Artificial Sequence
  Description of Artificial Sequence: Synthetic oligonucleotide
  Target: LAMA2; (+) strand; PAM type: NNGRRT; PAM sequence: CGGAGT
atgattttcatttttctgct

SEQ ID NO: 30794 - DNA, 20 bp, Artificial Sequence
  Description of Artificial Sequence: Synthetic oligonucleotide
  Target: LAMA2; (+) strand; PAM type: NNGRRT; PAM sequence: ATGAAT
gatagataagagatatgcat

SEQ ID NO: 30795 - DNA, 20 bp, Artificial Sequence
  Description of Artificial Sequence: Synthetic oligonucleotide
  Target: LAMA2; (+) strand; PAM type: NNGRRT; PAM sequence: GAGAAT
tgcatatgaataactcatca

SEQ ID NO: 30796 - DNA, 20 bp, Artificial Sequence
  Description of Artificial Sequence: Synthetic oligonucleotide
  Target: LAMA2; (+) strand; PAM type: NNGRRT; PAM sequence: TAGAAT
cactaatcaatttcaattgt

SEQ ID NO: 30797 - DNA, 20 bp, Artificial Sequence
  Description of Artificial Sequence: Synthetic oligonucleotide
  Target: LAMA2; (+) strand; PAM type: NNGRRT; PAM sequence: ATGGAT
agcaatgattaaaagtattt

SEQ ID NO: 30798 - DNA, 20 bp, Artificial Sequence
  Description of Artificial Sequence: Synthetic oligonucleotide
  Target: LAMA2; (+) strand; PAM type: NNGRRT; PAM sequence: AAGGAT
ctatcaaatattagggcaaa

SEQ ID NO: 30799 - DNA, 20 bp, Artificial Sequence
  Description of Artificial Sequence: Synthetic oligonucleotide
  Target: LAMA2; (+) strand; PAM type: NNGRRT; PAM sequence: AGGAGT
tgaaagtatttttaccaagt

SEQ ID NO: 30800 - DNA, 20 bp, Artificial Sequence
  Description of Artificial Sequence: Synthetic oligonucleotide
  Target: LAMA2; (+) strand; PAM type: NNGRRT; PAM sequence: CAGAAT
agttaattttgataaaattt

SEQ ID NO: 30801 - DNA, 20 bp, Artificial Sequence
  Description of Artificial Sequence: Synthetic oligonucleotide
  Target: LAMA2; (+) strand; PAM type: NNGRRT; PAM sequence: TTGGAT
gaataattgaacttttctct

SEQ ID NO: 30802 - DNA, 20 bp, Artificial Sequence
  Description of Artificial Sequence: Synthetic oligonucleotide
  Target: LAMA2; (+) strand; PAM type: NNGRRT; PAM sequence: TTGAAT
catagaaaaggtccatttga

SEQ ID NO: 30803 - DNA, 20 bp, Artificial Sequence
  Description of Artificial Sequence: Synthetic oligonucleotide
  Target: LAMA2; (+) strand; PAM type: NNGRRT; PAM sequence: AGGAAT
caattgtcataacatcagtg

SEQ ID NO: 30804 - DNA, 20 bp, Artificial Sequence
  Description of Artificial Sequence: Synthetic oligonucleotide
  Target: LAMA2; (+) strand; PAM type: NNGRRT; PAM sequence: TCGAGT
attgtgcatcttgcttcact

SEQ ID NO: 30805 - DNA, 20 bp, Artificial Sequence
  Description of Artificial Sequence: Synthetic oligonucleotide
  Target: LAMA2; (+) strand; PAM type: NNGRRT; PAM sequence: TTGGGT
tccctgcaactgcaattctt

SEQ ID NO: 30806 - DNA, 20 bp, Artificial Sequence
  Description of Artificial Sequence: Synthetic oligonucleotide
  Target: LAMA2; (+) strand; PAM type: NNGRRT; PAM sequence: GAGAGT
ctaagtcattcgactgtgaa

SEQ ID NO: 30807 - DNA, 20 bp, Artificial Sequence
  Description of Artificial Sequence: Synthetic oligonucleotide
  Target: LAMA2; (+) strand; PAM type: NNGRRT; PAM sequence: TGGAGT
ggacaatgttggtgccaacc

SEQ ID NO: 30808 - DNA, 20 bp, Artificial Sequence
  Description of Artificial Sequence: Synthetic oligonucleotide
  Target: LAMA2; (+) strand; PAM type: NNGRRT; PAM sequence: TAGGGT
catattcactctgatagttt

SEQ ID NO: 30809 - DNA, 20 bp, Artificial Sequence
  Description of Artificial Sequence: Synthetic oligonucleotide
  Target: LAMA2; (+) strand; PAM type: NNGRRT; PAM sequence: ATGAGT
gatacaacgtatttaacata

SEQ ID NO: 30810 - DNA, 20 bp, Artificial Sequence
  Description of Artificial Sequence: Synthetic oligonucleotide
  Target: LAMA2; (+) strand; PAM type: NNGRRT; PAM sequence: CCGGAT
tcctattgcaaaattggtat

SEQ ID NO: 30811 - DNA, 20 bp, Artificial Sequence
  Description of Artificial Sequence: Synthetic oligonucleotide
  Target: LAMA2; (+) strand; PAM type: NNGRRT; PAM sequence: AAGAGT
gcattctgcagatgaaagta

SEQ ID NO: 30812 - DNA, 20 bp, Artificial Sequence
  Description of Artificial Sequence: Synthetic oligonucleotide
  Target: LAMA2; (+) strand; PAM type: NNGRRT; PAM sequence: TTGAAT
ttattccaacaatcactagt

SEQ ID NO: 30813 - DNA, 20 bp, Artificial Sequence
  Description of Artificial Sequence: Synthetic oligonucleotide
  Target: LAMA2; (+) strand; PAM type: NNGRRT; PAM sequence: ATGGAT
tacctttgtttactaatgtc

SEQ ID NO: 30814 - DNA, 20 bp, Artificial Sequence
  Description of Artificial Sequence: Synthetic oligonucleotide
  Target: LAMA2; (+) strand; PAM type: NNGRRT; PAM sequence: CTGGAT
actaatgtcatggattcaac

SEQ ID NO: 30815 - DNA, 20 bp, Artificial Sequence
  Description of Artificial Sequence: Synthetic oligonucleotide
  Target: LAMA2; (+) strand; PAM type: NNGRRT; PAM sequence: AGGAAT
aaatttaagtaggaagcagt

SEQ ID NO: 30816 - DNA, 20 bp, Artificial Sequence
  Description of Artificial Sequence: Synthetic oligonucleotide
  Target: LAMA2; (+) strand; PAM type: NNGRRT; PAM sequence: GTGGAT
ttctccagcactttagatat

SEQ ID NO: 30817 - DNA, 20 bp, Artificial Sequence
  Description of Artificial Sequence: Synthetic oligonucleotide
  Target: LAMA2; (+) strand; PAM type: NNGRRT; PAM sequence: AAGAAT
tttataattgtagatcctct

SEQ ID NO: 30818 - DNA, 20 bp, Artificial Sequence
  Description of Artificial Sequence: Synthetic oligonucleotide
  Target: LAMA2; (+) strand; PAM type: NNGRRT; PAM sequence: ATGAAT
cactgacatttttacttaat

SEQ ID NO: 30819 - DNA, 20 bp, Artificial Sequence
  Description of Artificial Sequence: Synthetic oligonucleotide
  Target: LAMA2; (+) strand; PAM type: NNGRRT; PAM sequence: AAGAAT
aacaaattataaatgagacc

SEQ ID NO: 30820 - DNA, 20 bp, Artificial Sequence
  Description of Artificial Sequence: Synthetic oligonucleotide
  Target: LAMA2; (+) strand; PAM type: NNGRRT; PAM sequence: AAGAAT
aaaaaaaagcacaaaacagg

SEQ ID NO: 30821 - DNA, 20 bp, Artificial Sequence
  Description of Artificial Sequence: Synthetic oligonucleotide
  Target: LAMA2; (+) strand; PAM type: NNGRRT; PAM sequence: CTGGAT
catgacttgcacaaaatagc

SEQ ID NO: 30822 - DNA, 20 bp, Artificial Sequence
  Description of Artificial Sequence: Synthetic oligonucleotide
  Target: LAMA2; (+) strand; PAM type: NNGRRT; PAM sequence: CTGAGT
aactagttctgggaccttga

SEQ ID NO: 30823 - DNA, 20 bp, Artificial Sequence
  Description of Artificial Sequence: Synthetic oligonucleotide
  Target: LAMA2; (+) strand; PAM type: NNGRRT; PAM sequence: TTGAGT
atggtttttgttacaattag

SEQ ID NO: 30824 - DNA, 20 bp, Artificial Sequence
  Description of Artificial Sequence: Synthetic oligonucleotide
  Target: LAMA2; (+) strand; PAM type: NNGRRT; PAM sequence: TAGAGT
gttagcggctataaaatatt

SEQ ID NO: 30825 - DNA, 20 bp, Artificial Sequence
  Description of Artificial Sequence: Synthetic oligonucleotide
  Target: LAMA2; (+) strand; PAM type: NNGRRT; PAM sequence: ATGAAT
ggtgtgtaatgctgtgagca

SEQ ID NO: 30826 - DNA, 20 bp, Artificial Sequence
  Description of Artificial Sequence: Synthetic oligonucleotide
  Target: LAMA2; (+) strand; PAM type: NNGRRT; PAM sequence: GTGAAT
atattgtcatttcataaaaa

SEQ ID NO: 30827 - DNA, 20 bp, Artificial Sequence
  Description of Artificial Sequence: Synthetic oligonucleotide
  Target: LAMA2; (+) strand; PAM type: NNGRRT; PAM sequence: TTGAAT
tcataacattagtcttccat

SEQ ID NO: 30828 - DNA, 20 bp, Artificial Sequence
  Description of Artificial Sequence: Synthetic oligonucleotide
  Target: LAMA2; (+) strand; PAM type: NNGRRT; PAM sequence: TTGGGT
ttccatttgaattcaagtat

SEQ ID NO: 30829 - DNA, 20 bp, Artificial Sequence
  Description of Artificial Sequence: Synthetic oligonucleotide
  Target: LAMA2; (+) strand; PAM type: NNGRRT; PAM sequence: CTGGGT
actagaaatattcttagtag

SEQ ID NO: 30830 - DNA, 20 bp, Artificial Sequence
  Description of Artificial Sequence: Synthetic oligonucleotide
  Target: LAMA2; (+) strand; PAM type: NNGRRT; PAM sequence: TTGGAT
tgtggcatgcattccttgtc

SEQ ID NO: 30831 - DNA, 20 bp, Artificial Sequence
  Description of Artificial Sequence: Synthetic oligonucleotide
  Target: LAMA2; (+) strand; PAM type: NNGRRT; PAM sequence: TTGAAT
ggtagataactttgtaccct

SEQ ID NO: 30832 - DNA, 20 bp, Artificial Sequence
  Description of Artificial Sequence: Synthetic oligonucleotide
  Target: LAMA2; (+) strand; PAM type: NNGRRT; PAM sequence: TTGGAT
attttaaagtatttgcaaaa

SEQ ID NO: 30833 - DNA, 20 bp, Artificial Sequence
  Description of Artificial Sequence: Synthetic oligonucleotide
  Target: LAMA2; (+) strand; PAM type: NNGRRT; PAM sequence: CCGAAT
ctaactatatacatgatgta

SEQ ID NO: 30834 - DNA, 20 bp, Artificial Sequence
  Description of Artificial Sequence: Synthetic oligonucleotide
  Target: LAMA2; (+) strand; PAM type: NNGRRT; PAM sequence: CCGAAT
aatagtaaactttgtagtac

SEQ ID NO: 30835 - DNA, 20 bp, Artificial Sequence
  Description of Artificial Sequence: Synthetic oligonucleotide
  Target: LAMA2; (+) strand; PAM type: NNGRRT; PAM sequence: TGGAAT
ataaggtgttacagttaaca

SEQ ID NO: 30836 - DNA, 20 bp, Artificial Sequence
  Description of Artificial Sequence: Synthetic oligonucleotide
  Target: LAMA2; (+) strand; PAM type: NNGRRT; PAM sequence: ATGAAT
attgtactataatataaaag

SEQ ID NO: 30837 - DNA, 20 bp, Artificial Sequence
  Description of Artificial Sequence: Synthetic oligonucleotide
  Target: LAMA2; (+) strand; PAM type: NNGRRT; PAM sequence: GTGAAT
ctcttataccggtgaagctt

SEQ ID NO: 30838 - DNA, 20 bp, Artificial Sequence
  Description of Artificial Sequence: Synthetic oligonucleotide
  Target: LAMA2; (+) strand; PAM type: NNGRRT; PAM sequence: CTGGGT
aagcttgtgaatgttctcat

SEQ ID NO: 30839 - DNA, 20 bp, Artificial Sequence
  Description of Artificial Sequence: Synthetic oligonucleotide
  Target: LAMA2; (+) strand; PAM type: NNGRRT; PAM sequence: GTGAGT
gcattaccactggttgtaag

SEQ ID NO: 30840 - DNA, 20 bp, Artificial Sequence
  Description of Artificial Sequence: Synthetic oligonucleotide
  Target: LAMA2; (+) strand; PAM type: NNGRRT; PAM sequence: AGGGGT
gaacacttgaaatctacaag

SEQ ID NO: 30841 - DNA, 20 bp, Artificial Sequence
  Description of Artificial Sequence: Synthetic oligonucleotide
  Target: LAMA2; (+) strand; PAM type: NNGRRT; PAM sequence: GAGGAT
gacatacatgtgcaaagtat

SEQ ID NO: 30842 - DNA, 20 bp, Artificial Sequence
  Description of Artificial Sequence: Synthetic oligonucleotide
  Target: LAMA2; (+) strand; PAM type: NNGRRT; PAM sequence: CTGAAT
aaaatctatagaaattgccc

SEQ ID NO: 30843 - DNA, 20 bp, Artificial Sequence
  Description of Artificial Sequence: Synthetic oligonucleotide
  Target: LAMA2; (+) strand; PAM type: NNGRRT; PAM sequence: AAGAGT
aagtagttgagatcattctg

SEQ ID NO: 30844 - DNA, 20 bp, Artificial Sequence
  Description of Artificial Sequence: Synthetic oligonucleotide
  Target: LAMA2; (+) strand; PAM type: NNGRRT; PAM sequence: CAGAGT
accatagaaattgacatggc

SEQ ID NO: 30845 - DNA, 20 bp, Artificial Sequence
  Description of Artificial Sequence: Synthetic oligonucleotide
  Target: LAMA2; (+) strand; PAM type: NNGRRT; PAM sequence: AGGGAT
gagatctatctagcatcagc

SEQ ID NO: 30846 - DNA, 20 bp, Artificial Sequence
  Description of Artificial Sequence: Synthetic oligonucleotide
  Target: LAMA2; (+) strand; PAM type: NNGRRT; PAM sequence: GCGAGT
tcagtgaagatatatagggc

SEQ ID NO: 30847 - DNA, 20 bp, Artificial Sequence
  Description of Artificial Sequence: Synthetic oligonucleotide
  Target: LAMA2; (+) strand; PAM type: NNGRRT; PAM sequence: GTGAAT
actcaggctgatacagcctg

SEQ ID NO: 30848 - DNA, 20 bp, Artificial Sequence
  Description of Artificial Sequence: Synthetic oligonucleotide
  Target: LAMA2; (+) strand; PAM type: NNGRRT; PAM sequence: GGGAAT
ctggtgaattcattgatttg

SEQ ID NO: 30849 - DNA, 20 bp, Artificial Sequence
  Description of Artificial Sequence: Synthetic oligonucleotide
  Target: LAMA2; (+) strand; PAM type: NNGRRT; PAM sequence: TAGGAT
ggaataagaaagagaagact

SEQ ID NO: 30850 - DNA, 20 bp, Artificial Sequence
  Description of Artificial Sequence: Synthetic oligonucleotide
  Target: LAMA2; (+) strand; PAM type: NNGRRT; PAM sequence: TGGAGT
tcctaggttttgctttgcaa

SEQ ID NO: 30851 - DNA, 20 bp, Artificial Sequence
  Description of Artificial Sequence: Synthetic oligonucleotide
  Target: LAMA2; (+) strand; PAM type: NNGRRT; PAM sequence: AGGAAT
taagtaccatgtgcagctat

SEQ ID NO: 30852 - DNA, 20 bp, Artificial Sequence
  Description of Artificial Sequence: Synthetic oligonucleotide
  Target: LAMA2; (+) strand; PAM type: NNGRRT; PAM sequence: ATGAAT
aaattcacccatttatagta

SEQ ID NO: 30853 - DNA, 20 bp, Artificial Sequence
  Description of Artificial Sequence: Synthetic oligonucleotide
  Target: LAMA2; (+) strand; PAM type: NNGRRT; PAM sequence: TAGAAT
tttctacaacttctgaaaaa

SEQ ID NO: 30854 - DNA, 20 bp, Artificial Sequence
  Description of Artificial Sequence: Synthetic oligonucleotide
  Target: LAMA2; (+) strand; PAM type: NNGRRT; PAM sequence: GGGGGT
cgtagtctgtttttttgagg

SEQ ID NO: 30855 - DNA, 20 bp, Artificial Sequence
  Description of Artificial Sequence: Synthetic oligonucleotide
  Target: LAMA2; (+) strand; PAM type: NNGRRT; PAM sequence: ATGGGT
gcttacctgtttaccattta

SEQ ID NO: 30856 - DNA, 20 bp, Artificial Sequence
  Description of Artificial Sequence: Synthetic oligonucleotide
  Target: LAMA2; (+) strand; PAM type: NNGRRT; PAM sequence: TTGGGT
gtttaccatttaatgggtgt

SEQ ID NO: 30857 - DNA, 20 bp, Artificial Sequence
  Description of Artificial Sequence: Synthetic oligonucleotide
  Target: LAMA2; (+) strand; PAM type: NNGRRT; PAM sequence: TGGGGT
tgtttgggtcatttctagtt

SEQ ID NO: 30858 - DNA, 20 bp, Artificial Sequence
  Description of Artificial Sequence: Synthetic oligonucleotide
  Target: LAMA2; (+) strand; PAM type: NNGRRT; PAM sequence: AAGAAT
tttaacccttttttaatttt

SEQ ID NO: 30859 - DNA, 20 bp, Artificial Sequence
  Description of Artificial Sequence: Synthetic oligonucleotide
  Target: LAMA2; (+) strand; PAM type: NNGRRT; PAM sequence: GGGAAT
atttaatgcccagtaatgtt

SEQ ID NO: 30860 - DNA, 20 bp, Artificial Sequence
  Description of Artificial Sequence: Synthetic oligonucleotide
  Target: LAMA2; (+) strand; PAM type: NNGRRT; PAM sequence: TTGAGT
agcttatgcccatttctatt

SEQ ID NO: 30861 - DNA, 20 bp, Artificial Sequence
  Description of Artificial Sequence: Synthetic oligonucleotide
  Target: LAMA2; (+) strand; PAM type: NNGRRT; PAM sequence: AAGGAT
tttccttagtaatgcattgc

SEQ ID NO: 30862 - DNA, 20 bp, Artificial Sequence
  Description of Artificial Sequence: Synthetic oligonucleotide
  Target: LAMA2; (+) strand; PAM type: NNGRRT; PAM sequence: CTGGAT
gcaaggattatttatatatt

SEQ ID NO: 30863 - DNA, 20 bp, Artificial Sequence
  Description of Artificial Sequence: Synthetic oligonucleotide
  Target: LAMA2; (+) strand; PAM type: NNGRRT; PAM sequence: TAGAGT
atgttttcttcaagaagttt

SEQ ID NO: 30864 - DNA, 20 bp, Artificial Sequence
  Description of Artificial Sequence: Synthetic oligonucleotide
  Target: LAMA2; (+) strand; PAM type: NNGRRT; PAM sequence: TTGGAT
tttagctcttaaatgtaggt

SEQ ID NO: 30865 - DNA, 20 bp, Artificial Sequence
  Description of Artificial Sequence: Synthetic oligonucleotide
  Target: LAMA2; (+) strand; PAM type: NNGRRT; PAM sequence: TTGAAT
atgtaggtttggattccatt

SEQ ID NO: 30866 - DNA, 20 bp, Artificial Sequence
  Description of Artificial Sequence: Synthetic oligonucleotide
  Target: LAMA2; (+) strand; PAM type: NNGRRT; PAM sequence: ATGGAT
atggtcagagctcacttttt

SEQ ID NO: 30867 - DNA, 20 bp, Artificial Sequence
  Description of Artificial Sequence: Synthetic oligonucleotide
  Target: LAMA2; (+) strand; PAM type: NNGRRT; PAM sequence: TTGAAT
aaagactatcctttttccca

SEQ ID NO: 30868 - DNA, 20 bp, Artificial Sequence
  Description of Artificial Sequence: Synthetic oligonucleotide
  Target: LAMA2; (+) strand; PAM type: NNGRRT; PAM sequence: TTGAGT
ttcatcgtttccaatacctt

SEQ ID NO: 30869 - DNA, 20 bp, Artificial Sequence
  Description of Artificial Sequence: Synthetic oligonucleotide
  Target: LAMA2; (+) strand; PAM type: NNGRRT; PAM sequence: TAGGAT
ttctttaccaaaaagcctgc

SEQ ID NO: 30870 - DNA, 20 bp, Artificial Sequence
  Description of Artificial Sequence: Synthetic oligonucleotide
  Target: LAMA2; (+) strand; PAM type: NNGRRT; PAM sequence: TTGAAT
aggatttggctgaaattata

SEQ ID NO: 30871 - DNA, 20 bp, Artificial Sequence
  Description of Artificial Sequence: Synthetic oligonucleotide
  Target: LAMA2; (+) strand; PAM type: NNGRRT; PAM sequence: AAGAAT
aattgatagatcaatttggg

SEQ ID NO: 30872 - DNA, 20 bp, Artificial Sequence
  Description of Artificial Sequence: Synthetic oligonucleotide
  Target: LAMA2; (+) strand; PAM type: NNGRRT; PAM sequence: TAGAAT
agttttaaattgcttgttac

SEQ ID NO: 30873 - DNA, 20 bp, Artificial Sequence
  Description of Artificial Sequence: Synthetic oligonucleotide
  Target: LAMA2; (+) strand; PAM type: NNGRRT; PAM sequence: GAGGAT
taggtgctttttattgtttt

SEQ ID NO: 30874 - DNA, 20 bp, Artificial Sequence
  Description of Artificial Sequence: Synthetic oligonucleotide
  Target: LAMA2; (+) strand; PAM type: NNGRRT; PAM sequence: AAGAAT
gtttgctaagagcttttatc

SEQ ID NO: 30875 - DNA, 20 bp, Artificial Sequence
  Description of Artificial Sequence: Synthetic oligonucleotide
  Target: LAMA2; (+) strand; PAM type: NNGRRT; PAM sequence: GGGGAT
gattaatcctgcttggccat

SEQ ID NO: 30876 - DNA, 20 bp, Artificial Sequence
  Description of Artificial Sequence: Synthetic oligonucleotide
  Target: LAMA2; (+) strand; PAM type: NNGRRT; PAM sequence: TTGAAT
attatccttttaaaattatg

SEQ ID NO: 30877 - DNA, 20 bp, Artificial Sequence
  Description of Artificial Sequence: Synthetic oligonucleotide
  Target: LAMA2; (+) strand; PAM type: NNGRRT; PAM sequence: TTGGAT
ctagcattttcttaatgatt

SEQ ID NO: 30878 - DNA, 20 bp, Artificial Sequence
  Description of Artificial Sequence: Synthetic oligonucleotide
  Target: LAMA2; (+) strand; PAM type: NNGRRT; PAM sequence: CGGGAT
ttttcttgtagcgttgtcgt

SEQ ID NO: 30879 - DNA, 20 bp, Artificial Sequence
  Description of Artificial Sequence: Synthetic oligonucleotide
  Target: LAMA2; (+) strand; PAM type: NNGRRT; PAM sequence: ATGGAT
ggtactgcaagcttcatgaa

SEQ ID NO: 30880 - DNA, 20 bp, Artificial Sequence
  Description of Artificial Sequence: Synthetic oligonucleotide
  Target: LAMA2; (+) strand; PAM type: NNGRRT; PAM sequence: TTGAGT
cattccttcttttgcttact

SEQ ID NO: 30881 - DNA, 20 bp, Artificial Sequence
  Description of Artificial Sequence: Synthetic oligonucleotide
  Target: LAMA2; (+) strand; PAM type: NNGRRT; PAM sequence: CGGAGT
tttgttttttgtttttgaga

SEQ ID NO: 30882 - DNA, 20 bp, Artificial Sequence
  Description of Artificial Sequence: Synthetic oligonucleotide
  Target: LAMA2; (+) strand; PAM type: NNGRRT; PAM sequence: TCGAGT
tcttgctctgacccccaggc

SEQ ID NO: 30883 - DNA, 20 bp, Artificial Sequence
  Description of Artificial Sequence: Synthetic oligonucleotide
  Target: LAMA2; (+) strand; PAM type: NNGRRT; PAM sequence: CCGGGT
ctcactgccagctccgcctc

SEQ ID NO: 30884 - DNA, 20 bp, Artificial Sequence
  Description of Artificial Sequence: Synthetic oligonucleotide
  Target: LAMA2; (+) strand; PAM type: NNGRRT; PAM sequence: CTGAGT
cattctcctgcctcagcctc

SEQ ID NO: 30885 - DNA, 20 bp, Artificial Sequence
  Description of Artificial Sequence: Synthetic oligonucleotide
  Target: LAMA2; (+) strand; PAM type: NNGRRT; PAM sequence: CGGGGT
ttttgtatttttagtagaga

SEQ ID NO: 30886 - DNA, 20 bp, Artificial Sequence
  Description of Artificial Sequence: Synthetic oligonucleotide
  Target: LAMA2; (+) strand; PAM type: NNGRRT; PAM sequence: CAGGAT
cggggtttcaccgcgttagc

SEQ ID NO: 30887 - DNA, 20 bp, Artificial Sequence
  Description of Artificial Sequence: Synthetic oligonucleotide
  Target: LAMA2; (+) strand; PAM type: NNGRRT; PAM sequence: TAGGAT
gcctcagcctcccaaaatgc

SEQ ID NO: 30888 - DNA, 20 bp, Artificial Sequence
  Description of Artificial Sequence: Synthetic oligonucleotide
  Target: LAMA2; (+) strand; PAM type: NNGRRT; PAM sequence: GGGGAT
tataatctttaatttatttt

SEQ ID NO: 30889 - DNA, 20 bp, Artificial Sequence
  Description of Artificial Sequence: Synthetic oligonucleotide
  Target: LAMA2; (+) strand; PAM type: NNGRRT; PAM sequence: GGGAAT
gtttagtttctaaatatttg

SEQ ID NO: 30890 - DNA, 20 bp, Artificial Sequence
  Description of Artificial Sequence: Synthetic oligonucleotide
  Target: LAMA2; (+) strand; PAM type: NNGRRT; PAM sequence: CGGAAT
ttgagatttgttttatggcc

SEQ ID NO: 30891 - DNA, 20 bp, Artificial Sequence
  Description of Artificial Sequence: Synthetic oligonucleotide
  Target: LAMA2; (+) strand; PAM type: NNGRRT; PAM sequence: TGGAGT
cttgaaaataatgtgtattc

SEQ ID NO: 30892 - DNA, 20 bp, Artificial Sequence
  Description of Artificial Sequence: Synthetic oligonucleotide
  Target: LAMA2; (+) strand; PAM type: NNGRRT; PAM sequence: TTGGAT
taatgtgtattctggagttg

SEQ ID NO: 30893 - DNA, 20 bp, Artificial Sequence
  Description of Artificial Sequence: Synthetic oligonucleotide
  Target: LAMA2; (+) strand; PAM type: NNGRRT; PAM sequence: GAGAGT
tacatgttctctcagttact

SEQ ID NO: 30894 - DNA, 20 bp, Artificial Sequence
  Description of Artificial Sequence: Synthetic oligonucleotide
  Target: LAMA2; (+) strand; PAM type: NNGRRT; PAM sequence: TAGGAT
atactaggtgcatgaacatt

SEQ ID NO: 30895 - DNA, 20 bp, Artificial Sequence
  Description of Artificial Sequence: Synthetic oligonucleotide
  Target: LAMA2; (+) strand; PAM type: NNGRRT; PAM sequence: CAGGGT
tttttttttttattctgaga

SEQ ID NO: 30896 - DNA, 20 bp, Artificial Sequence
  Description of Artificial Sequence: Synthetic oligonucleotide
  Target: LAMA2; (+) strand; PAM type: NNGRRT; PAM sequence: TAGAGT
tcttactccattgcccaggc

SEQ ID NO: 30897 - DNA, 20 bp, Artificial Sequence
  Description of Artificial Sequence: Synthetic oligonucleotide
  Target: LAMA2; (+) strand; PAM type: NNGRRT; PAM sequence: CAGAGT
aatcctctcacctcagcctc

SEQ ID NO: 30898 - DNA, 20 bp, Artificial Sequence
  Description of Artificial Sequence: Synthetic oligonucleotide
  Target: LAMA2; (+) strand; PAM type: NNGRRT; PAM sequence: TGGGAT
caagtgatcctgcaaaattc

SEQ ID NO: 30899 - DNA, 20 bp, Artificial Sequence
  Description of Artificial Sequence: Synthetic oligonucleotide
  Target: LAMA2; (+) strand; PAM type: NNGRRT; PAM sequence: GAGAGT
gtgagagagagacagagaga

SEQ ID NO: 30900 - DNA, 20 bp, Artificial Sequence
  Description of Artificial Sequence: Synthetic oligonucleotide
  Target: LAMA2; (+) strand; PAM type: NNGRRT; PAM sequence: ACGAAT
attcagatctttatttttca

SEQ ID NO: 30901 - DNA, 20 bp, Artificial Sequence
  Description of Artificial Sequence: Synthetic oligonucleotide
  Target: LAMA2; (+) strand; PAM type: NNGRRT; PAM sequence: AGGAGT
taatttggccttttaatttg

SEQ ID NO: 30902 - DNA, 20 bp, Artificial Sequence
  Description of Artificial Sequence: Synthetic oligonucleotide
  Target: LAMA2; (+) strand; PAM type: NNGRRT; PAM sequence: TTGGAT
taatgtaaatattggtatga

SEQ ID NO: 30903 - DNA, 20 bp, Artificial Sequence
  Description of Artificial Sequence: Synthetic oligonucleotide
  Target: LAMA2; (+) strand; PAM type: NNGRRT; PAM sequence: TTGGAT
ataacatcttctcttgactt

SEQ ID NO: 30904 - DNA, 20 bp, Artificial Sequence
  Description of Artificial Sequence: Synthetic oligonucleotide
  Target: LAMA2; (+) strand; PAM type: NNGRRT; PAM sequence: AGGAAT
ttatttctttggttttgtct

SEQ ID NO: 30905 - DNA, 20 bp, Artificial Sequence
  Description of Artificial Sequence: Synthetic oligonucleotide
  Target: LAMA2; (+) strand; PAM type: NNGRRT; PAM sequence: CAGAAT
aatatacatctttaactttc

SEQ ID NO: 30906 - DNA, 20 bp, Artificial Sequence
  Description of Artificial Sequence: Synthetic oligonucleotide
  Target: LAMA2; (+) strand; PAM type: NNGRRT; PAM sequence: CAGAGT
tttttccgaagatgtttttg

SEQ ID NO: 30907 - DNA, 20 bp, Artificial Sequence
  Description of Artificial Sequence: Synthetic oligonucleotide
  Target: LAMA2; (+) strand; PAM type: NNGRRT; PAM sequence: TGGGAT
gtttaataattattttttca

SEQ ID NO: 30908 - DNA, 20 bp, Artificial Sequence
  Description of Artificial Sequence: Synthetic oligonucleotide
  Target: LAMA2; (+) strand; PAM type: NNGRRT; PAM sequence: TAGGAT
agttagatctgttggccctg

SEQ ID NO: 30909 - DNA, 20 bp, Artificial Sequence
  Description of Artificial Sequence: Synthetic oligonucleotide
  Target: LAMA2; (+) strand; PAM type: NNGRRT; PAM sequence: TTGAGT
ctaacctgtttttaatccaa

SEQ ID NO: 30910 - DNA, 20 bp, Artificial Sequence
  Description of Artificial Sequence: Synthetic oligonucleotide
  Target: LAMA2; (+) strand; PAM type: NNGRRT; PAM sequence: CTGAGT
gactgacttttctcctgttt

SEQ ID NO: 30911 - DNA, 20 bp, Artificial Sequence
  Description of Artificial Sequence: Synthetic oligonucleotide
  Target: LAMA2; (+) strand; PAM type: NNGRRT; PAM sequence: TTGGAT
acatgcctgataatttttat

SEQ ID NO: 30912 - DNA, 20 bp, Artificial Sequence
  Description of Artificial Sequence: Synthetic oligonucleotide
  Target: LAMA2; (+) strand; PAM type: NNGRRT; PAM sequence: TTGGAT
atacttttcattgttgtgta

SEQ ID NO: 30913 - DNA, 20 bp, Artificial Sequence
  Description of Artificial Sequence: Synthetic oligonucleotide
  Target: LAMA2; (+) strand; PAM type: NNGRRT; PAM sequence: AAGAAT
gattttattgtatttcttta

SEQ ID NO: 30914 - DNA, 20 bp, Artificial Sequence
  Description of Artificial Sequence: Synthetic oligonucleotide
  Target: LAMA2; (+) strand; PAM type: NNGRRT; PAM sequence: ACGGGT
ggcaaacagtttaggtagtc

SEQ ID NO: 30915 - DNA, 20 bp, Artificial Sequence
  Description of Artificial Sequence: Synthetic oligonucleotide
  Target: LAMA2; (+) strand; PAM type: NNGRRT; PAM sequence: TTGGAT
tttaggtagtcacgggtcac

SEQ ID NO: 30916 - DNA, 20 bp, Artificial Sequence
  Description of Artificial Sequence: Synthetic oligonucleotide
  Target: LAMA2; (+) strand; PAM type: NNGRRT; PAM sequence: TTGAGT
gattcttttgaagcttgctt

SEQ ID NO: 30917 - DNA, 20 bp, Artificial Sequence
  Description of Artificial Sequence: Synthetic oligonucleotide
  Target: LAMA2; (+) strand; PAM type: NNGRRT; PAM sequence: GAGAAT
tactaagctgtgaaacttct

SEQ ID NO: 30918 - DNA, 20 bp, Artificial Sequence
  Description of Artificial Sequence: Synthetic oligonucleotide
  Target: LAMA2; (+) strand; PAM type: NNGRRT; PAM sequence: AAGAAT
ccaagctttctctgggctgt

SEQ ID NO: 30919 - DNA, 20 bp, Artificial Sequence
  Description of Artificial Sequence: Synthetic oligonucleotide
  Target: LAMA2; (+) strand; PAM type: NNGRRT; PAM sequence: TAGGGT
ctgtaagaatttttgcagcc

SEQ ID NO: 30920 - DNA, 20 bp, Artificial Sequence
  Description of Artificial Sequence: Synthetic oligonucleotide
  Target: LAMA2; (+) strand; PAM type: NNGRRT; PAM sequence: TGGAAT
agaacgcttctgcacatctc

SEQ ID NO: 30921 - DNA, 20 bp, Artificial Sequence
  Description of Artificial Sequence: Synthetic oligonucleotide
  Target: LAMA2; (+) strand; PAM type: NNGRRT; PAM sequence: TTGGGT
actcagctataatgcgggct

SEQ ID NO: 30922 - DNA, 20 bp, Artificial Sequence
  Description of Artificial Sequence: Synthetic oligonucleotide
  Target: LAMA2; (+) strand; PAM type: NNGRRT; PAM sequence: AAGAAT
actttaacagcttaacaaag

SEQ ID NO: 30923 - DNA, 20 bp, Artificial Sequence
  Description of Artificial Sequence: Synthetic oligonucleotide
  Target: LAMA2; (+) strand; PAM type: NNGRRT; PAM sequence: AAGAAT
aagaagaggctgttcaaaag

SEQ ID NO: 30924 - DNA, 20 bp, Artificial Sequence
  Description of Artificial Sequence: Synthetic oligonucleotide
  Target: LAMA2; (+) strand; PAM type: NNGRRT; PAM sequence: TAGGAT
aatgcaacacaaaggtcaag

SEQ ID NO: 30925 - DNA, 20 bp, Artificial Sequence
  Description of Artificial Sequence: Synthetic oligonucleotide
  Target: LAMA2; (+) strand; PAM type: NNGRRT; PAM sequence: GGGAGT
gggcatttttttatgttagt

SEQ ID NO: 30926 - DNA, 20 bp, Artificial Sequence
  Description of Artificial Sequence: Synthetic oligonucleotide
  Target: LAMA2; (+) strand; PAM type: NNGRRT; PAM sequence: CTGGGT
agtcgttccaattgattcca

SEQ ID NO: 30927 - DNA, 20 bp, Artificial Sequence
  Description of Artificial Sequence: Synthetic oligonucleotide
  Target: LAMA2; (+) strand; PAM type: NNGRRT; PAM sequence: CTGAGT
gatgtaaactttttttcctg

SEQ ID NO: 30928 - DNA, 20 bp, Artificial Sequence
  Description of Artificial Sequence: Synthetic oligonucleotide
  Target: LAMA2; (+) strand; PAM type: NNGRRT; PAM sequence: TAGAAT
taaaacatttgaacctggtc

SEQ ID NO: 30929 - DNA, 20 bp, Artificial Sequence
  Description of Artificial Sequence: Synthetic oligonucleotide
  Target: LAMA2; (+) strand; PAM type: NNGRRT; PAM sequence: CAGAAT
gaaagaaatcaaaaactcct

SEQ ID NO: 30930 - DNA, 20 bp, Artificial Sequence
  Description of Artificial Sequence: Synthetic oligonucleotide
  Target: LAMA2; (+) strand; PAM type: NNGRRT; PAM sequence: ATGAAT
cagaatttcaaagtgttctt

SEQ ID NO: 30931 - DNA, 20 bp, Artificial Sequence
  Description of Artificial Sequence: Synthetic oligonucleotide
  Target: LAMA2; (+) strand; PAM type: NNGRRT; PAM sequence: AGGAGT
ccaccatatcacttggactc

SEQ ID NO: 30932 - DNA, 20 bp, Artificial Sequence
  Description of Artificial Sequence: Synthetic oligonucleotide
  Target: LAMA2; (+) strand; PAM type: NNGRRT; PAM sequence: AAGAGT
taagccctagggaaacttac

SEQ ID NO: 30933 - DNA, 20 bp, Artificial Sequence
  Description of Artificial Sequence: Synthetic oligonucleotide
  Target: LAMA2; (+) strand; PAM type: NNGRRT; PAM sequence: CAGAAT
caagagttccgttttatcca

SEQ ID NO: 30934 - DNA, 20 bp, Artificial Sequence
  Description of Artificial Sequence: Synthetic oligonucleotide
  Target: LAMA2; (+) strand; PAM type: NNGRRT; PAM sequence: CAGGAT
ctcatgttcaagatataaat

SEQ ID NO: 30935 - DNA, 20 bp, Artificial Sequence
  Description of Artificial Sequence: Synthetic oligonucleotide
  Target: LAMA2; (+) strand; PAM type: NNGRRT; PAM sequence: CTGAAT
actctgttgactaaagttga

SEQ ID NO: 30936 - DNA, 20 bp, Artificial Sequence
  Description of Artificial Sequence: Synthetic oligonucleotide
  Target: LAMA2; (+) strand; PAM type: NNGRRT; PAM sequence: CTGAAT
accatcaaaagtctagactt

SEQ ID NO: 30937 - DNA, 20 bp, Artificial Sequence
  Description of Artificial Sequence: Synthetic oligonucleotide
  Target: LAMA2; (+) strand; PAM type: NNGRRT; PAM sequence: AAGAAT
agaaatacttcaccattatg

SEQ ID NO: 30938 - DNA, 20 bp, Artificial Sequence
  Description of Artificial Sequence: Synthetic oligonucleotide
  Target: LAMA2; (+) strand; PAM type: NNGRRT; PAM sequence: GAGGGT
ttaatgggctcacagttctg

SEQ ID NO: 30939 - DNA, 20 bp, Artificial Sequence
  Description of Artificial Sequence: Synthetic oligonucleotide
  Target: LAMA2; (+) strand; PAM type: NNGRRT; PAM sequence: CAGGAT
aaggacagacttccacatgg

SEQ ID NO: 30940 - DNA, 20 bp, Artificial Sequence
  Description of Artificial Sequence: Synthetic oligonucleotide
  Target: LAMA2; (+) strand; PAM type: NNGRRT; PAM sequence: AGGGAT
ggcaggatcaggagaaaagc

SEQ ID NO: 30941 - DNA, 20 bp, Artificial Sequence
  Description of Artificial Sequence: Synthetic oligonucleotide
  Target: LAMA2; (+) strand; PAM type: NNGRRT; PAM sequence: AGGGAT
aaggacagcaccaagccctg

SEQ ID NO: 30942 - DNA, 20 bp, Artificial Sequence
  Description of Artificial Sequence: Synthetic oligonucleotide
  Target: LAMA2; (+) strand; PAM type: NNGRRT; PAM sequence: GGGGAT
caggctccacctccaacact

SEQ ID NO: 30943 - DNA, 20 bp, Artificial Sequence
  Description of Artificial Sequence: Synthetic oligonucleotide
  Target: LAMA2; (+) strand; PAM type: NNGRRT; PAM sequence: GAGAAT
tggggattatattttaacac

SEQ ID NO: 30944 - DNA, 20 bp, Artificial Sequence
  Description of Artificial Sequence: Synthetic oligonucleotide
  Target: LAMA2; (+) strand; PAM type: NNGRRT; PAM sequence: TGGGAT
tgttttactgtttttaaaac

SEQ ID NO: 30945 - DNA, 20 bp, Artificial Sequence
  Description of Artificial Sequence: Synthetic oligonucleotide
  Target: LAMA2; (+) strand; PAM type: NNGRRT; PAM sequence: ATGGAT
agcttccctttctttgtgtc

SEQ ID NO: 30946 - DNA, 20 bp, Artificial Sequence
  Description of Artificial Sequence: Synthetic oligonucleotide
  Target: LAMA2; (+) strand; PAM type: NNGRRT; PAM sequence: TAGAAT
catttgggctgttattgaag

SEQ ID NO: 30947 - DNA, 20 bp, Artificial Sequence
  Description of Artificial Sequence: Synthetic oligonucleotide
  Target: LAMA2; (+) strand; PAM type: NNGRRT; PAM sequence: GGGAAT
ctgccttctttcactagcag

SEQ ID NO: 30948 - DNA, 20 bp, Artificial Sequence
  Description of Artificial Sequence: Synthetic oligonucleotide
  Target: LAMA2; (+) strand; PAM type: NNGRRT; PAM sequence: GTGAGT
ctttcactagcaggggaata

SEQ ID NO: 30949 - DNA, 20 bp, Artificial Sequence
  Description of Artificial Sequence: Synthetic oligonucleotide
  Target: LAMA2; (+) strand; PAM type: NNGRRT; PAM sequence: CTGAAT
ttattctccactataacttc

SEQ ID NO: 30950 - DNA, 20 bp, Artificial Sequence
  Description of Artificial Sequence: Synthetic oligonucleotide
  Target: LAMA2; (+) strand; PAM type: NNGRRT; PAM sequence: TTGGAT
ctttggttttatacaattat

SEQ ID NO: 30951 - DNA, 20 bp, Artificial Sequence
  Description of Artificial Sequence: Synthetic oligonucleotide
  Target: LAMA2; (+) strand; PAM type: NNGRRT; PAM sequence: CAGGAT
ttaaagataaagatgcctca

SEQ ID NO: 30952 - DNA, 20 bp, Artificial Sequence
  Description of Artificial Sequence: Synthetic oligonucleotide
  Target: LAMA2; (+) strand; PAM type: NNGRRT; PAM sequence: GTGAGT
ttatggcctattttgtttaa

SEQ ID NO: 30953 - DNA, 20 bp, Artificial Sequence
  Description of Artificial Sequence: Synthetic oligonucleotide
  Target: LAMA2; (+) strand; PAM type: NNGRRT; PAM sequence: GTGAAT
ggcaaagaaaaactatgtaa

SEQ ID NO: 30954 - DNA, 20 bp, Artificial Sequence
  Description of Artificial Sequence: Synthetic oligonucleotide
  Target: LAMA2; (+) strand; PAM type: NNGRRT; PAM sequence: GTGGGT
gttacttggcggtgaggtta

SEQ ID NO: 30955 - DNA, 20 bp, Artificial Sequence
  Description of Artificial Sequence: Synthetic oligonucleotide
  Target: LAMA2; (+) strand; PAM type: NNGRRT; PAM sequence: TTGGGT
aataatcacattttagatct

SEQ ID NO: 30956 - DNA, 20 bp, Artificial Sequence
  Description of Artificial Sequence: Synthetic oligonucleotide
  Target: LAMA2; (+) strand; PAM type: NNGRRT; PAM sequence: CGGAGT
atttttttttttttttgaga

SEQ ID NO: 30957 - DNA, 20 bp, Artificial Sequence
  Description of Artificial Sequence: Synthetic oligonucleotide
  Target: LAMA2; (+) strand; PAM type: NNGRRT; PAM sequence: TGGAGT
tctcgctctgtcacccaggc

SEQ ID NO: 30958 - DNA, 20 bp, Artificial Sequence
  Description of Artificial Sequence: Synthetic oligonucleotide
  Target: LAMA2; (+) strand; PAM type: NNGRRT; PAM sequence: CCGGGT
ctcactgcaagctccgcctc

SEQ ID NO: 30959 - DNA, 20 bp, Artificial Sequence
  Description of Artificial Sequence: Synthetic oligonucleotide
  Target: LAMA2; (+) strand; PAM type: NNGRRT; PAM sequence: CCGAGT
cattctcctgcctcagcctc

SEQ ID NO: 30960 - DNA, 20 bp, Artificial Sequence
  Description of Artificial Sequence: Synthetic oligonucleotide
  Target: LAMA2; (+) strand; PAM type: NNGRRT; PAM sequence: CGGGGT
ttttgtatttttagtagaga

SEQ ID NO: 30961 - DNA, 20 bp, Artificial Sequence
  Description of Artificial Sequence: Synthetic oligonucleotide
  Target: LAMA2; (+) strand; PAM type: NNGRRT; PAM sequence: CAGGAT
cggggtttcaccgtgttagc

SEQ ID NO: 30962 - DNA, 20 bp, Artificial Sequence
  Description of Artificial Sequence: Synthetic oligonucleotide
  Target: LAMA2; (+) strand; PAM type: NNGRRT; PAM sequence: TGGGAT
gcctcggcctcccaaagtgc

SEQ ID NO: 30963 - DNA, 20 bp, Artificial Sequence
  Description of Artificial Sequence: Synthetic oligonucleotide
  Target: LAMA2; (+) strand; PAM type: NNGRRT; PAM sequence: CAGAAT
gccgataatcattttaataa

SEQ ID NO: 30964 - DNA, 20 bp, Artificial Sequence
  Description of Artificial Sequence: Synthetic oligonucleotide
  Target: LAMA2; (+) strand; PAM type: NNGRRT; PAM sequence: GTGGAT
acataatactcctggtaatg

SEQ ID NO: 30965 - DNA, 20 bp, Artificial Sequence
  Description of Artificial Sequence: Synthetic oligonucleotide
  Target: LAMA2; (+) strand; PAM type: NNGRRT; PAM sequence: AAGAAT
ctcctggtaatggtggatat

SEQ ID NO: 30966 - DNA, 20 bp, Artificial Sequence
  Description of Artificial Sequence: Synthetic oligonucleotide
  Target: LAMA2; (+) strand; PAM type: NNGRRT; PAM sequence: TTGGAT
acagtgagatgcagccagac

SEQ ID NO: 30967 - DNA, 20 bp, Artificial Sequence
  Description of Artificial Sequence: Synthetic oligonucleotide
  Target: LAMA2; (+) strand; PAM type: NNGRRT; PAM sequence: AGGAGT
atgcagccagacttggatct

SEQ ID NO: 30968 - DNA, 20 bp, Artificial Sequence
  Description of Artificial Sequence: Synthetic oligonucleotide
  Target: LAMA2; (+) strand; PAM type: NNGRRT; PAM sequence: AAGGAT
cactgggctgtagatctgag

SEQ ID NO: 30969 - DNA, 20 bp, Artificial Sequence
  Description of Artificial Sequence: Synthetic oligonucleotide
  Target: LAMA2; (+) strand; PAM type: NNGRRT; PAM sequence: AAGAGT
gataatagaacagcaccaaa

SEQ ID NO: 30970 - DNA, 20 bp, Artificial Sequence
  Description of Artificial Sequence: Synthetic oligonucleotide
  Target: LAMA2; (+) strand; PAM type: NNGRRT; PAM sequence: TGGAAT
tggttttttaaacagtgaaa

SEQ ID NO: 30971 - DNA, 20 bp, Artificial Sequence
  Description of Artificial Sequence: Synthetic oligonucleotide
  Target: LAMA2; (+) strand; PAM type: NNGRRT; PAM sequence: AAGGAT
aaggtggttggttactaaaa

SEQ ID NO: 30972 - DNA, 20 bp, Artificial Sequence
  Description of Artificial Sequence: Synthetic oligonucleotide
  Target: LAMA2; (+) strand; PAM type: NNGRRT; PAM sequence: CCGAGT
aaagaaagctataaggtgtc

SEQ ID NO: 30973 - DNA, 20 bp, Artificial Sequence
  Description of Artificial Sequence: Synthetic oligonucleotide
  Target: LAMA2; (+) strand; PAM type: NNGRRT; PAM sequence: AGGAGT
tgagggaggaaagacagtga

SEQ ID NO: 30974 - DNA, 20 bp, Artificial Sequence
  Description of Artificial Sequence: Synthetic oligonucleotide
  Target: LAMA2; (+) strand; PAM type: NNGRRT; PAM sequence: AGGAAT
caagagggcgttgctgtcat

SEQ ID NO: 30975 - DNA, 20 bp, Artificial Sequence
  Description of Artificial Sequence: Synthetic oligonucleotide
  Target: LAMA2; (+) strand; PAM type: NNGRRT; PAM sequence: ATGGAT
gtcataggaatgtacagcct

SEQ ID NO: 30976 - DNA, 20 bp, Artificial Sequence
  Description of Artificial Sequence: Synthetic oligonucleotide
  Target: LAMA2; (+) strand; PAM type: NNGRRT; PAM sequence: CGGAGT
aaaaccaaaaacaaacacgt

SEQ ID NO: 30977 - DNA, 20 bp, Artificial Sequence
  Description of Artificial Sequence: Synthetic oligonucleotide
  Target: LAMA2; (+) strand; PAM type: NNGRRT; PAM sequence: GAGGAT
gaagctgcccaccgttcttg

SEQ ID NO: 30978 - DNA, 20 bp, Artificial Sequence
  Description of Artificial Sequence: Synthetic oligonucleotide
  Target: LAMA2; (+) strand; PAM type: NNGRRT; PAM sequence: AAGGGT
tgcagaccaaagctagtcag

SEQ ID NO: 30979 - DNA, 20 bp, Artificial Sequence
  Description of Artificial Sequence: Synthetic oligonucleotide
  Target: LAMA2; (+) strand; PAM type: NNGRRT; PAM sequence: TGGGAT
ctcccaactaaaggcacacc

SEQ ID NO: 30980 - DNA, 20 bp, Artificial Sequence
  Description of Artificial Sequence: Synthetic oligonucleotide
  Target: LAMA2; (+) strand; PAM type: NNGRRT; PAM sequence: TGGAGT
ccttgctctgtcgcctaggc

SEQ ID NO: 30981 - DNA, 20 bp, Artificial Sequence
  Description of Artificial Sequence: Synthetic oligonucleotide
  Target: LAMA2; (+) strand; PAM type: NNGRRT; PAM sequence: CTGGGT
ctcactgcaagctgcacctc

SEQ ID NO: 30982 - DNA, 20 bp, Artificial Sequence
  Description of Artificial Sequence: Synthetic oligonucleotide
  Target: LAMA2; (+) strand; PAM type: NNGRRT; PAM sequence: AGGAGT
cattctcctgcctcagcctc

SEQ ID NO: 30983 - DNA, 20 bp, Artificial Sequence
  Description of Artificial Sequence: Synthetic oligonucleotide
  Target: LAMA2; (+) strand; PAM type: NNGRRT; PAM sequence: CAGGGT
ttttgtgtttttaatagaga

SEQ ID NO: 30984 - DNA, 20 bp, Artificial Sequence
  Description of Artificial Sequence: Synthetic oligonucleotide
  Target: LAMA2; (+) strand; PAM type: NNGRRT; PAM sequence: TGGGAT
tcctcggcctcccaaagtgc

SEQ ID NO: 30985 - DNA, 20 bp, Artificial Sequence
  Description of Artificial Sequence: Synthetic oligonucleotide
  Target: LAMA2; (+) strand; PAM type: NNGRRT; PAM sequence: TTGGGT
gggccgccattatggactta

SEQ ID NO: 30986 - DNA, 20 bp, Artificial Sequence
  Description of Artificial Sequence: Synthetic oligonucleotide
  Target: LAMA2; (+) strand; PAM type: NNGRRT; PAM sequence: CCGGAT
ctaagcctatcattctgcca

SEQ ID NO: 30987 - DNA, 20 bp, Artificial Sequence
  Description of Artificial Sequence: Synthetic oligonucleotide
  Target: LAMA2; (+) strand; PAM type: NNGRRT; PAM sequence: CGGGGT
cggatacggagaaatgtcta

SEQ ID NO: 30988 - DNA, 20 bp, Artificial Sequence
  Description of Artificial Sequence: Synthetic oligonucleotide
  Target: LAMA2; (+) strand; PAM type: NNGRRT; PAM sequence: CAGGGT
ctacctactgtatcacaaag

SEQ ID NO: 30989 - DNA, 20 bp, Artificial Sequence
  Description of Artificial Sequence: Synthetic oligonucleotide
  Target: LAMA2; (+) strand; PAM type: NNGRRT; PAM sequence: GTGAAT
ctactgtatcacaaagcagg

SEQ ID NO: 30990 - DNA, 20 bp, Artificial Sequence
  Description of Artificial Sequence: Synthetic oligonucleotide
  Target: LAMA2; (+) strand; PAM type: NNGRRT; PAM sequence: AAGGAT
tcaagagcagaaacctttaa

SEQ ID NO: 30991 - DNA, 20 bp, Artificial Sequence
  Description of Artificial Sequence: Synthetic oligonucleotide
  Target: LAMA2; (+) strand; PAM type: NNGRRT; PAM sequence: ATGGAT
aatgtaagacaaaaagacaa

SEQ ID NO: 30992 - DNA, 20 bp, Artificial Sequence
  Description of Artificial Sequence: Synthetic oligonucleotide
  Target: LAMA2; (+) strand; PAM type: NNGRRT; PAM sequence: TAGGGT
aaaagaagttaagattgcaa

SEQ ID NO: 30993 - DNA, 20 bp, Artificial Sequence
  Description of Artificial Sequence: Synthetic oligonucleotide
  Target: LAMA2; (+) strand; PAM type: NNGRRT; PAM sequence: TAGGAT
taaaacaggagctgtgaaag

SEQ ID NO: 30994 - DNA, 20 bp, Artificial Sequence
  Description of Artificial Sequence: Synthetic oligonucleotide
  Target: LAMA2; (+) strand; PAM type: NNGRRT; PAM sequence: TAGGAT
aaaatgattgcagaagacat

SEQ ID NO: 30995 - DNA, 20 bp, Artificial Sequence
  Description of Artificial Sequence: Synthetic oligonucleotide
  Target: LAMA2; (+) strand; PAM type: NNGRRT; PAM sequence: CAGAGT
tatagatttggcagagagaa

SEQ ID NO: 30996 - DNA, 20 bp, Artificial Sequence
  Description of Artificial Sequence: Synthetic oligonucleotide
  Target: LAMA2; (+) strand; PAM type: NNGRRT; PAM sequence: AAGAAT
agaacagagtgatgtacttt

SEQ ID NO: 30997 - DNA, 20 bp, Artificial Sequence
  Description of Artificial Sequence: Synthetic oligonucleotide
  Target: LAMA2; (+) strand; PAM type: NNGRRT; PAM sequence: CTGAAT
aatctgaagaagaaacagta

SEQ ID NO: 30998 - DNA, 20 bp, Artificial Sequence
  Description of Artificial Sequence: Synthetic oligonucleotide
  Target: LAMA2; (+) strand; PAM type: NNGRRT; PAM sequence: ATGAAT
cagaaaattctagcaaaaat

SEQ ID NO: 30999 - DNA, 20 bp, Artificial Sequence
  Description of Artificial Sequence: Synthetic oligonucleotide
  Target: LAMA2; (+) strand; PAM type: NNGRRT; PAM sequence: CAGAAT
tactaacagagacctcaaat

SEQ ID NO: 31000 - DNA, 20 bp, Artificial Sequence
  Description of Artificial Sequence: Synthetic oligonucleotide
  Target: LAMA2; (+) strand; PAM type: NNGRRT; PAM sequence: AAGAAT
ctcaaatcagaattgtatgc

SEQ ID NO: 31001 - DNA, 20 bp, Artificial Sequence
  Description of Artificial Sequence: Synthetic oligonucleotide
  Target: LAMA2; (+) strand; PAM type: NNGRRT; PAM sequence: TTGGAT
tacttctcttcaagctctcc

SEQ ID NO: 31002 - DNA, 20 bp, Artificial Sequence
  Description of Artificial Sequence: Synthetic oligonucleotide
  Target: LAMA2; (+) strand; PAM type: NNGRRT; PAM sequence: TAGAAT
tgtttcccaagtgactaaac

SEQ ID NO: 31003 - DNA, 20 bp, Artificial Sequence
  Description of Artificial Sequence: Synthetic oligonucleotide
  Target: LAMA2; (+) strand; PAM type: NNGRRT; PAM sequence: TAGAAT
taatggaagcatagaaacat

SEQ ID NO: 31004 - DNA, 20 bp, Artificial Sequence
  Description of Artificial Sequence: Synthetic oligonucleotide
  Target: LAMA2; (+) strand; PAM type: NNGRRT; PAM sequence: TGGGAT
ggcttgtaactgcagcacag

SEQ ID NO: 31005 - DNA, 20 bp, Artificial Sequence
  Description of Artificial Sequence: Synthetic oligonucleotide
  Target: LAMA2; (+) strand; PAM type: NNGRRT; PAM sequence: TTGGAT
actgcagcacagtgggatcc

SEQ ID NO: 31006 - DNA, 20 bp, Artificial Sequence
  Description of Artificial Sequence: Synthetic oligonucleotide
  Target: LAMA2; (+) strand; PAM type: NNGRRT; PAM sequence: CAGAGT
attctctggtgcaaaatgta

SEQ ID NO: 31007 - DNA, 20 bp, Artificial Sequence
  Description of Artificial Sequence: Synthetic oligonucleotide
  Target: LAMA2; (+) strand; PAM type: NNGRRT; PAM sequence: TGGAGT
caaaatctcattgccagaca

SEQ ID NO: 31008 - DNA, 20 bp, Artificial Sequence
  Description of Artificial Sequence: Synthetic oligonucleotide
  Target: LAMA2; (+) strand; PAM type: NNGRRT; PAM sequence: AGGGGT
ttcgataaggacaatctggg

SEQ ID NO: 31009 - DNA, 20 bp, Artificial Sequence
  Description of Artificial Sequence: Synthetic oligonucleotide
  Target: LAMA2; (+) strand; PAM type: NNGRRT; PAM sequence: AAGGAT
gagccaattaaaaaggtaaa

SEQ ID NO: 31010 - DNA, 20 bp, Artificial Sequence
  Description of Artificial Sequence: Synthetic oligonucleotide
  Target: LAMA2; (+) strand; PAM type: NNGRRT; PAM sequence: CAGGAT
tagttctgaaaaatcaattc

SEQ ID NO: 31011 - DNA, 20 bp, Artificial Sequence
  Description of Artificial Sequence: Synthetic oligonucleotide
  Target: LAMA2; (+) strand; PAM type: NNGRRT; PAM sequence: CTGGGT
aggaaacaggaagataaaat

SEQ ID NO: 31012 - DNA, 20 bp, Artificial Sequence
  Description of Artificial Sequence: Synthetic oligonucleotide
  Target: LAMA2; (+) strand; PAM type: NNGRRT; PAM sequence: GAGAAT
gtggttgttaaaatggcctt

SEQ ID NO: 31013 - DNA, 20 bp, Artificial Sequence
  Description of Artificial Sequence: Synthetic oligonucleotide
  Target: LAMA2; (+) strand; PAM type: NNGRRT; PAM sequence: CCGAGT
atcaagggcttcggccaata

SEQ ID NO: 31014 - DNA, 20 bp, Artificial Sequence
  Description of Artificial Sequence: Synthetic oligonucleotide
  Target: LAMA2; (+) strand; PAM type: NNGRRT; PAM sequence: ATGAGT
atgttgcttttgaaattttc

SEQ ID NO: 31015 - DNA, 20 bp, Artificial Sequence
  Description of Artificial Sequence: Synthetic oligonucleotide
  Target: LAMA2; (+) strand; PAM type: NNGRRT; PAM sequence: GCGGAT
actttgggaggccgaggcgg

SEQ ID NO: 31016 - DNA, 20 bp, Artificial Sequence
  Description of Artificial Sequence: Synthetic oligonucleotide
  Target: LAMA2; (+) strand; PAM type: NNGRRT; PAM sequence: GAGAAT
tactcggaaggctgaggccg

SEQ ID NO: 31017 - DNA, 20 bp, Artificial Sequence
  Description of Artificial Sequence: Synthetic oligonucleotide
  Target: LAMA2; (+) strand; PAM type: NNGRRT; PAM sequence: GTGAGT
ctacatgtgccatttgagat

SEQ ID NO: 31018 - DNA, 20 bp, Artificial Sequence
  Description of Artificial Sequence: Synthetic oligonucleotide
  Target: LAMA2; (+) strand; PAM type: NNGRRT; PAM sequence: AAGAGT
tttgttttaaattttttaaa

SEQ ID NO: 31019 - DNA, 20 bp, Artificial Sequence
  Description of Artificial Sequence: Synthetic oligonucleotide
  Target: LAMA2; (+) strand; PAM type: NNGRRT; PAM sequence: CAGGGT
atgctcccgttatgcattct

SEQ ID NO: 31020 - DNA, 20 bp, Artificial Sequence
  Description of Artificial Sequence: Synthetic oligonucleotide
  Target: LAMA2; (+) strand; PAM type: NNGRRT; PAM sequence: GAGGGT
actttgccgttataaactct

SEQ ID NO: 31021 - DNA, 20 bp, Artificial Sequence
  Description of Artificial Sequence: Synthetic oligonucleotide
  Target: LAMA2; (+) strand; PAM type: NNGRRT; PAM sequence: GTGAAT
ggtctcttgtctttcctcag

SEQ ID NO: 31022 - DNA, 20 bp, Artificial Sequence
  Description of Artificial Sequence: Synthetic oligonucleotide
  Target: LAMA2; (+) strand; PAM type: NNGRRT; PAM sequence: AAGAAT
gcaaattcggactcgatgcc

SEQ ID NO: 31023 - DNA, 20 bp, Artificial Sequence
  Description of Artificial Sequence: Synthetic oligonucleotide
  Target: LAMA2; (+) strand; PAM type: NNGRRT; PAM sequence: GTGGGT
gcaaaaggactgatccggac

SEQ ID NO: 31024 - DNA, 20 bp, Artificial Sequence
  Description of Artificial Sequence: Synthetic oligonucleotide
  Target: LAMA2; (+) strand; PAM type: NNGRRT; PAM sequence: GTGAGT
aaggactgatccggacgtgg

SEQ ID NO: 31025 - DNA, 20 bp, Artificial Sequence
  Description of Artificial Sequence: Synthetic oligonucleotide
  Target: LAMA2; (+) strand; PAM type: NNGRRT; PAM sequence: AGGGGT
tgtcttttagtcaggcactg

SEQ ID NO: 31026 - DNA, 20 bp, Artificial Sequence
  Description of Artificial Sequence: Synthetic oligonucleotide
  Target: LAMA2; (+) strand; PAM type: NNGRRT; PAM sequence: AGGGGT
tgaacatttaggaacagcaa

SEQ ID NO: 31027 - DNA, 20 bp, Artificial Sequence
  Description of Artificial Sequence: Synthetic oligonucleotide
  Target: LAMA2; (+) strand; PAM type: NNGRRT; PAM sequence: GAGAGT
aaaggggtcacgtgccatta

SEQ ID NO: 31028 - DNA, 20 bp, Artificial Sequence
  Description of Artificial Sequence: Synthetic oligonucleotide
  Target: LAMA2; (+) strand; PAM type: NNGRRT; PAM sequence: TGGAGT
gtcacgtgccattagagagt

SEQ ID NO: 31029 - DNA, 20 bp, Artificial Sequence
  Description of Artificial Sequence: Synthetic oligonucleotide
  Target: LAMA2; (+) strand; PAM type: NNGRRT; PAM sequence: AAGAGT
gcattatgttttgagatggg

SEQ ID NO: 31030 - DNA, 20 bp, Artificial Sequence
  Description of Artificial Sequence: Synthetic oligonucleotide
  Target: LAMA2; (+) strand; PAM type: NNGRRT; PAM sequence: ATGAAT
aagagtgagggcaccagagc

SEQ ID NO: 31031 - DNA, 20 bp, Artificial Sequence
  Description of Artificial Sequence: Synthetic oligonucleotide
  Target: LAMA2; (+) strand; PAM type: NNGRRT; PAM sequence: TGGAGT
ccttaggcaatcatgatttt

SEQ ID NO: 31032 - DNA, 20 bp, Artificial Sequence
  Description of Artificial Sequence: Synthetic oligonucleotide
  Target: LAMA2; (+) strand; PAM type: NNGRRT; PAM sequence: GTGAAT
gatattgtggctttcactat

SEQ ID NO: 31033 - DNA, 20 bp, Artificial Sequence
  Description of Artificial Sequence: Synthetic oligonucleotide
  Target: LAMA2; (+) strand; PAM type: NNGRRT; PAM sequence: GTGAGT
gccatgcttgcccactgcgt

SEQ ID NO: 31034 - DNA, 20 bp, Artificial Sequence
  Description of Artificial Sequence: Synthetic oligonucleotide
  Target: LAMA2; (+) strand; PAM type: NNGRRT; PAM sequence: CAGAAT
gttgcttgtgagaacatcat

SEQ ID NO: 31035 - DNA, 20 bp, Artificial Sequence
  Description of Artificial Sequence: Synthetic oligonucleotide
  Target: LAMA2; (+) strand; PAM type: NNGRRT; PAM sequence: ATGGGT
cttgtgagaacatcatcaga

SEQ ID NO: 31036 - DNA, 20 bp, Artificial Sequence
  Description of Artificial Sequence: Synthetic oligonucleotide
  Target: LAMA2; (+) strand; PAM type: NNGRRT; PAM sequence: TAGAAT
agaacaagataaaatctttt

SEQ ID NO: 31037 - DNA, 20 bp, Artificial Sequence
  Description of Artificial Sequence: Synthetic oligonucleotide
  Target: LAMA2; (+) strand; PAM type: NNGRRT; PAM sequence: TAGAAT
ggtgggacacctactcatgc

SEQ ID NO: 31038 - DNA, 20 bp, Artificial Sequence
  Description of Artificial Sequence: Synthetic oligonucleotide
  Target: LAMA2; (+) strand; PAM type: NNGRRT; PAM sequence: AAGAAT
tttctcttcttgttaacaga

SEQ ID NO: 31039 - DNA, 20 bp, Artificial Sequence
  Description of Artificial Sequence: Synthetic oligonucleotide
  Target: LAMA2; (+) strand; PAM type: NNGRRT; PAM sequence: GGGGAT
agaaagaatggaaatattat

SEQ ID NO: 31040 - DNA, 20 bp, Artificial Sequence
  Description of Artificial Sequence: Synthetic oligonucleotide
  Target: LAMA2; (+) strand; PAM type: NNGRRT; PAM sequence: TCGAGT
aaatattatggggatgatcc

SEQ ID NO: 31041 - DNA, 20 bp, Artificial Sequence
  Description of Artificial Sequence: Synthetic oligonucleotide
  Target: LAMA2; (+) strand; PAM type: NNGRRT; PAM sequence: TTGGAT
ctgtgacccgagaagacttc

SEQ ID NO: 31042 - DNA, 20 bp, Artificial Sequence
  Description of Artificial Sequence: Synthetic oligonucleotide
  Target: LAMA2; (+) strand; PAM type: NNGRRT; PAM sequence: TAGAGT
aaatattcaagctcttattt

SEQ ID NO: 31043 - DNA, 20 bp, Artificial Sequence
  Description of Artificial Sequence: Synthetic oligonucleotide
  Target: LAMA2; (+) strand; PAM type: NNGRRT; PAM sequence: TGGAAT
gttaaagggaaaaaaaaata

SEQ ID NO: 31044 - DNA, 20 bp, Artificial Sequence
  Description of Artificial Sequence: Synthetic oligonucleotide
  Target: LAMA2; (+) strand; PAM type: NNGRRT; PAM sequence: GTGAGT
tggaattcactgcagacata

SEQ ID NO: 31045 - DNA, 20 bp, Artificial Sequence
  Description of Artificial Sequence: Synthetic oligonucleotide
  Target: LAMA2; (+) strand; PAM type: NNGRRT; PAM sequence: ATGGAT
aattaactgttgtggtataa

SEQ ID NO: 31046 - DNA, 20 bp, Artificial Sequence
  Description of Artificial Sequence: Synthetic oligonucleotide
  Target: LAMA2; (+) strand; PAM type: NNGRRT; PAM sequence: CTGAAT
catcatgttgagaaatgatt

SEQ ID NO: 31047 - DNA, 20 bp, Artificial Sequence
  Description of Artificial Sequence: Synthetic oligonucleotide
  Target: LAMA2; (+) strand; PAM type: NNGRRT; PAM sequence: AAGAAT
aaaaaatcacacagaacagc

SEQ ID NO: 31048 - DNA, 20 bp, Artificial Sequence
  Description of Artificial Sequence: Synthetic oligonucleotide
  Target: LAMA2; (+) strand; PAM type: NNGRRT; PAM sequence: ATGAAT
aatcacacagaacagcaaga

SEQ ID NO: 31049 - DNA, 20 bp, Artificial Sequence
  Description of Artificial Sequence: Synthetic oligonucleotide
  Target: LAMA2; (+) strand; PAM type: NNGRRT; PAM sequence: GGGAAT
tgttgtcgaacctacatgat

SEQ ID NO: 31050 - DNA, 20 bp, Artificial Sequence
  Description of Artificial Sequence: Synthetic oligonucleotide
  Target: LAMA2; (+) strand; PAM type: NNGRRT; PAM sequence: GGGAGT
acatgatgggaatacttcaa

SEQ ID NO: 31051 - DNA, 20 bp, Artificial Sequence
  Description of Artificial Sequence: Synthetic oligonucleotide
  Target: LAMA2; (+) strand; PAM type: NNGRRT; PAM sequence: TTGGGT
gccaactgaaatgaggcttg

SEQ ID NO: 31052 - DNA, 20 bp, Artificial Sequence
  Description of Artificial Sequence: Synthetic oligonucleotide
  Target: LAMA2; (+) strand; PAM type: NNGRRT; PAM sequence: CAGAAT
ccggtctcagtgtcctgggg

SEQ ID NO: 31053 - DNA, 20 bp, Artificial Sequence
  Description of Artificial Sequence: Synthetic oligonucleotide
  Target: LAMA2; (+) strand; PAM type: NNGRRT; PAM sequence: AAGAAT
taatctcaagcttttaaaga

SEQ ID NO: 31054 - DNA, 20 bp, Artificial Sequence
  Description of Artificial Sequence: Synthetic oligonucleotide
  Target: LAMA2; (+) strand; PAM type: NNGRRT; PAM sequence: ATGAGT
tgacacatgagcccaatatt

SEQ ID NO: 31055 - DNA, 20 bp, Artificial Sequence
  Description of Artificial Sequence: Synthetic oligonucleotide
  Target: LAMA2; (+) strand; PAM type: NNGRRT; PAM sequence: ATGAAT
agtgtaaactattattttcc

SEQ ID NO: 31056 - DNA, 20 bp, Artificial Sequence
  Description of Artificial Sequence: Synthetic oligonucleotide
  Target: LAMA2; (+) strand; PAM type: NNGRRT; PAM sequence: AGGAAT
tgaatataattgtaaaaaga

SEQ ID NO: 31057 - DNA, 20 bp, Artificial Sequence
  Description of Artificial Sequence: Synthetic oligonucleotide
  Target: LAMA2; (+) strand; PAM type: NNGRRT; PAM sequence: AAGAGT
aagatgattgtttaatttga

SEQ ID NO: 31058 - DNA, 20 bp, Artificial Sequence
  Description of Artificial Sequence: Synthetic oligonucleotide
  Target: LAMA2; (+) strand; PAM type: NNGRRT; PAM sequence: GGGAAT
agagtatgtttacagaacat

SEQ ID NO: 31059 - DNA, 20 bp, Artificial Sequence
  Description of Artificial Sequence: Synthetic oligonucleotide
  Target: LAMA2; (+) strand; PAM type: NNGRRT; PAM sequence: ATGGAT
tatgtttacagaacatggga

SEQ ID NO: 31060 - DNA, 20 bp, Artificial Sequence
  Description of Artificial Sequence: Synthetic oligonucleotide
  Target: LAMA2; (+) strand; PAM type: NNGRRT; PAM sequence: GAGAAT
attgaaatataaaataaaga

SEQ ID NO: 31061 - DNA, 20 bp, Artificial Sequence
  Description of Artificial Sequence: Synthetic oligonucleotide
  Target: LAMA2; (+) strand; PAM type: NNGRRT; PAM sequence: TTGAGT
gaccctcatggtcatattct

SEQ ID NO: 31062 - DNA, 20 bp, Artificial Sequence
  Description of Artificial Sequence: Synthetic oligonucleotide
  Target: LAMA2; (+) strand; PAM type: NNGRRT; PAM sequence: TGGGAT
agacggttcaccttatccaa

SEQ ID NO: 31063 - DNA, 20 bp, Artificial Sequence
  Description of Artificial Sequence: Synthetic oligonucleotide
  Target: LAMA2; (+) strand; PAM type: NNGRRT; PAM sequence: CTGAGT
catggaggcagaaagttgaa

SEQ ID NO: 31064 - DNA, 20 bp, Artificial Sequence
  Description of Artificial Sequence: Synthetic oligonucleotide
  Target: LAMA2; (+) strand; PAM type: NNGRRT; PAM sequence: GAGAAT
cagtctctgttacattctat

SEQ ID NO: 31065 - DNA, 20 bp, Artificial Sequence
  Description of Artificial Sequence: Synthetic oligonucleotide
  Target: LAMA2; (+) strand; PAM type: NNGRRT; PAM sequence: TAGAAT
tgttacattctatgagaata

SEQ ID NO: 31066 - DNA, 20 bp, Artificial Sequence
  Description of Artificial Sequence: Synthetic oligonucleotide
  Target: LAMA2; (+) strand; PAM type: NNGRRT; PAM sequence: ATGAAT
agtctctcaatggccaacta

SEQ ID NO: 31067 - DNA, 20 bp, Artificial Sequence
  Description of Artificial Sequence: Synthetic oligonucleotide
  Target: LAMA2; (+) strand; PAM type: NNGRRT; PAM sequence: TGGAAT
tatttttcaaatgtttatac

SEQ ID NO: 31068 - DNA, 20 bp, Artificial Sequence
  Description of Artificial Sequence: Synthetic oligonucleotide
  Target: LAMA2; (+) strand; PAM type: NNGRRT; PAM sequence: AAGAGT
gatgtagagacttttagtaa

SEQ ID NO: 31069 - DNA, 20 bp, Artificial Sequence
  Description of Artificial Sequence: Synthetic oligonucleotide
  Target: LAMA2; (+) strand; PAM type: NNGRRT; PAM sequence: TTGGGT
cacttttatatatgtattcc

SEQ ID NO: 31070 - DNA, 20 bp, Artificial Sequence
  Description of Artificial Sequence: Synthetic oligonucleotide
  Target: LAMA2; (+) strand; PAM type: NNGRRT; PAM sequence: TAGAAT
atctatactgttaattattt

SEQ ID NO: 31071 - DNA, 20 bp, Artificial Sequence
  Description of Artificial Sequence: Synthetic oligonucleotide
  Target: LAMA2; (+) strand; PAM type: NNGRRT; PAM sequence: GTGAGT
agaaaatagcaggtaatttc

SEQ ID NO: 31072 - DNA, 20 bp, Artificial Sequence
  Description of Artificial Sequence: Synthetic oligonucleotide
  Target: LAMA2; (+) strand; PAM type: NNGRRT; PAM sequence: AAGAGT
atggttctgtactgcagtaa

SEQ ID NO: 31073 - DNA, 20 bp, Artificial Sequence
  Description of Artificial Sequence: Synthetic oligonucleotide
  Target: LAMA2; (+) strand; PAM type: NNGRRT; PAM sequence: TAGAAT
tgaccgtttttttgaaactt

SEQ ID NO: 31074 - DNA, 20 bp, Artificial Sequence
  Description of Artificial Sequence: Synthetic oligonucleotide
  Target: LAMA2; (+) strand; PAM type: NNGRRT; PAM sequence: TGGGGT
ttcctaatctcagtaaaaac

SEQ ID NO: 31075 - DNA, 20 bp, Artificial Sequence
  Description of Artificial Sequence: Synthetic oligonucleotide
  Target: LAMA2; (+) strand; PAM type: NNGRRT; PAM sequence: TGGAAT
catttgattttgtaaggcag

SEQ ID NO: 31076 - DNA, 20 bp, Artificial Sequence
  Description of Artificial Sequence: Synthetic oligonucleotide
  Target: LAMA2; (+) strand; PAM type: NNGRRT; PAM sequence: TTGAAT
ggcaaaggtttttaaaaggt

SEQ ID NO: 31077 - DNA, 20 bp, Artificial Sequence
  Description of Artificial Sequence: Synthetic oligonucleotide
  Target: LAMA2; (+) strand; PAM type: NNGRRT; PAM sequence: GAGAGT
aaatttaaatctcaaaagca

SEQ ID NO: 31078 - DNA, 20 bp, Artificial Sequence
  Description of Artificial Sequence: Synthetic oligonucleotide
  Target: LAMA2; (+) strand; PAM type: NNGRRT; PAM sequence: AAGAGT
atctcaaaagcagagagttt

SEQ ID NO: 31079 - DNA, 20 bp, Artificial Sequence
  Description of Artificial Sequence: Synthetic oligonucleotide
  Target: LAMA2; (+) strand; PAM type: NNGRRT; PAM sequence: TGGAGT
gtagttatttaaatggaagc

SEQ ID NO: 31080 - DNA, 20 bp, Artificial Sequence
  Description of Artificial Sequence: Synthetic oligonucleotide
  Target: LAMA2; (+) strand; PAM type: NNGRRT; PAM sequence: GCGGGT
cacttgatttgtaaacactt

SEQ ID NO: 31081 - DNA, 20 bp, Artificial Sequence
  Description of Artificial Sequence: Synthetic oligonucleotide
  Target: LAMA2; (+) strand; PAM type: NNGRRT; PAM sequence: GAGAAT
cattcatgtgcaagagaaag

SEQ ID NO: 31082 - DNA, 20 bp, Artificial Sequence
  Description of Artificial Sequence: Synthetic oligonucleotide
  Target: LAMA2; (+) strand; PAM type: NNGRRT; PAM sequence: GGGAGT
agaagtttttcttgcagaag

SEQ ID NO: 31083 - DNA, 20 bp, Artificial Sequence
  Description of Artificial Sequence: Synthetic oligonucleotide
  Target: LAMA2; (+) strand; PAM type: NNGRRT; PAM sequence: GAGAGT
gtgtgtacttacagggagca

SEQ ID NO: 31084 - DNA, 20 bp, Artificial Sequence
  Description of Artificial Sequence: Synthetic oligonucleotide
  Target: LAMA2; (+) strand; PAM type: NNGRRT; PAM sequence: CTGAAT
cagggagcagagagtgaaac

SEQ ID NO: 31085 - DNA, 20 bp, Artificial Sequence
  Description of Artificial Sequence: Synthetic oligonucleotide
  Target: LAMA2; (+) strand; PAM type: NNGRRT; PAM sequence: TTGAAT
gagtgaaacctgaattttaa

SEQ ID NO: 31086 - DNA, 20 bp, Artificial Sequence
  Description of Artificial Sequence: Synthetic oligonucleotide
  Target: LAMA2; (+) strand; PAM type: NNGRRT; PAM sequence: CAGAGT
gtttcatcaagaccaatctt

SEQ ID NO: 31087 - DNA, 20 bp, Artificial Sequence
  Description of Artificial Sequence: Synthetic oligonucleotide
  Target: LAMA2; (+) strand; PAM type: NNGRRT; PAM sequence: AAGGGT
tacatttattttttaatgaa

SEQ ID NO: 31088 - DNA, 20 bp, Artificial Sequence
  Description of Artificial Sequence: Synthetic oligonucleotide
  Target: LAMA2; (+) strand; PAM type: NNGRRT; PAM sequence: GTGAGT
ctatttcaccatcagaaaag

SEQ ID NO: 31089 - DNA, 20 bp, Artificial Sequence
  Description of Artificial Sequence: Synthetic oligonucleotide
  Target: LAMA2; (+) strand; PAM type: NNGRRT; PAM sequence: AGGAAT
aggtgagttaagttacttga

SEQ ID NO: 31090 - DNA, 20 bp, Artificial Sequence
  Description of Artificial Sequence: Synthetic oligonucleotide
  Target: LAMA2; (+) strand; PAM type: NNGRRT; PAM sequence: TGGGAT
agcattgggaagaagaaatt

SEQ ID NO: 31091 - DNA, 20 bp, Artificial Sequence
  Description of Artificial Sequence: Synthetic oligonucleotide
  Target: LAMA2; (+) strand; PAM type: NNGRRT; PAM sequence: TTGAAT
ccagtgcctgtacgaaataa

SEQ ID NO: 31092 - DNA, 20 bp, Artificial Sequence
  Description of Artificial Sequence: Synthetic oligonucleotide
  Target: LAMA2; (+) strand; PAM type: NNGRRT; PAM sequence: GGGAAT
ctgtacgaaataattgaatg

SEQ ID NO: 31093 - DNA, 20 bp, Artificial Sequence
  Description of Artificial Sequence: Synthetic oligonucleotide
  Target: LAMA2; (+) strand; PAM type: NNGRRT; PAM sequence: TTGGGT
taattgaatggggaatgacc

SEQ ID NO: 31094 - DNA, 20 bp, Artificial Sequence
  Description of Artificial Sequence: Synthetic oligonucleotide
  Target: LAMA2; (+) strand; PAM type: NNGRRT; PAM sequence: AAGAAT
accttgggttgtctgtttgc

SEQ ID NO: 31095 - DNA, 20 bp, Artificial Sequence
  Description of Artificial Sequence: Synthetic oligonucleotide
  Target: LAMA2; (+) strand; PAM type: NNGRRT; PAM sequence: GGGAAT
ctcacattttaaaaagtggg

SEQ ID NO: 31096 - DNA, 20 bp, Artificial Sequence
  Description of Artificial Sequence: Synthetic oligonucleotide
  Target: LAMA2; (+) strand; PAM type: NNGRRT; PAM sequence: CAGGAT
tctttataataacttttcaa

SEQ ID NO: 31097 - DNA, 20 bp, Artificial Sequence
  Description of Artificial Sequence: Synthetic oligonucleotide
  Target: LAMA2; (+) strand; PAM type: NNGRRT; PAM sequence: GTGAAT
ctaaacttcttatgatttat

SEQ ID NO: 31098 - DNA, 20 bp, Artificial Sequence
  Description of Artificial Sequence: Synthetic oligonucleotide
  Target: LAMA2; (+) strand; PAM type: NNGRRT; PAM sequence: TAGGAT
aggaagcaaaaatgcaatat

SEQ ID NO: 31099 - DNA, 20 bp, Artificial Sequence
  Description of Artificial Sequence: Synthetic oligonucleotide
  Target: LAMA2; (+) strand; PAM type: NNGRRT; PAM sequence: GTGGGT
gtagattaacatatatttgt

SEQ ID NO: 31100 - DNA, 20 bp, Artificial Sequence
  Description of Artificial Sequence: Synthetic oligonucleotide
  Target: LAMA2; (+) strand; PAM type: NNGRRT; PAM sequence: GAGAAT
tactcaggaggctgaggcag

SEQ ID NO: 31101 - DNA, 20 bp, Artificial Sequence
  Description of Artificial Sequence: Synthetic oligonucleotide
  Target: LAMA2; (+) strand; PAM type: NNGRRT; PAM sequence: CTGGGT
ttatgccactacactccagc

SEQ ID NO: 31102 - DNA, 20 bp, Artificial Sequence
  Description of Artificial Sequence: Synthetic oligonucleotide
  Target: LAMA2; (+) strand; PAM type: NNGRRT; PAM sequence: CAGAGT
ctacactccagcctgggtga

SEQ ID NO: 31103 - DNA, 20 bp, Artificial Sequence
  Description of Artificial Sequence: Synthetic oligonucleotide
  Target: LAMA2; (+) strand; PAM type: NNGRRT; PAM sequence: AAGAAT
aaaaagaaaaaaaaaaagaa

SEQ ID NO: 31104 - DNA, 20 bp, Artificial Sequence
  Description of Artificial Sequence: Synthetic oligonucleotide
  Target: LAMA2; (+) strand; PAM type: NNGRRT; PAM sequence: GTGGAT
agcaaatatattaagtggaa

SEQ ID NO: 31105 - DNA, 20 bp, Artificial Sequence
  Description of Artificial Sequence: Synthetic oligonucleotide
  Target: LAMA2; (+) strand; PAM type: NNGRRT; PAM sequence: AGGGAT
agaggaggaggaagaagagg

SEQ ID NO: 31106 - DNA, 20 bp, Artificial Sequence
  Description of Artificial Sequence: Synthetic oligonucleotide
  Target: LAMA2; (+) strand; PAM type: NNGRRT; PAM sequence: CTGGGT
agggattggtcctgctatct

SEQ ID NO: 31107 - DNA, 20 bp, Artificial Sequence
  Description of Artificial Sequence: Synthetic oligonucleotide
  Target: LAMA2; (+) strand; PAM type: NNGRRT; PAM sequence: AAGGGT
agttcaagcccatattgttc

SEQ ID NO: 31108 - DNA, 20 bp, Artificial Sequence
  Description of Artificial Sequence: Synthetic oligonucleotide
  Target: LAMA2; (+) strand; PAM type: NNGRRT; PAM sequence: AAGGAT
gaggttgacaaaaacgtgag

SEQ ID NO: 31109 - DNA, 20 bp, Artificial Sequence
  Description of Artificial Sequence: Synthetic oligonucleotide
  Target: LAMA2; (+) strand; PAM type: NNGRRT; PAM sequence: TAGGAT
acgtgagaaggatattgctg

SEQ ID NO: 31110 - DNA, 20 bp, Artificial Sequence
  Description of Artificial Sequence: Synthetic oligonucleotide
  Target: LAMA2; (+) strand; PAM type: NNGRRT; PAM sequence: TAGGAT
aagtacattctcgctgtttc

SEQ ID NO: 31111 - DNA, 20 bp, Artificial Sequence
  Description of Artificial Sequence: Synthetic oligonucleotide
  Target: LAMA2; (+) strand; PAM type: NNGRRT; PAM sequence: GAGGAT
agtgtgagacacagtggcaa

SEQ ID NO: 31112 - DNA, 20 bp, Artificial Sequence
  Description of Artificial Sequence: Synthetic oligonucleotide
  Target: LAMA2; (+) strand; PAM type: NNGRRT; PAM sequence: AGGAAT
tgtgaaaatatttaacaatc

SEQ ID NO: 31113 - DNA, 20 bp, Artificial Sequence
  Description of Artificial Sequence: Synthetic oligonucleotide
  Target: LAMA2; (+) strand; PAM type: NNGRRT; PAM sequence: AAGAAT
atatttaacaatcaggaatt

SEQ ID NO: 31114 - DNA, 20 bp, Artificial Sequence
  Description of Artificial Sequence: Synthetic oligonucleotide
  Target: LAMA2; (+) strand; PAM type: NNGRRT; PAM sequence: AAGAGT
attttcttggaccacttctg

SEQ ID NO: 31115 - DNA, 20 bp, Artificial Sequence
  Description of Artificial Sequence: Synthetic oligonucleotide
  Target: LAMA2; (+) strand; PAM type: NNGRRT; PAM sequence: TAGGAT
aaactgcaatgattaggaga

SEQ ID NO: 31116 - DNA, 20 bp, Artificial Sequence
  Description of Artificial Sequence: Synthetic oligonucleotide
  Target: LAMA2; (+) strand; PAM type: NNGRRT; PAM sequence: CTGGGT
gattaggagataggattata

SEQ ID NO: 31117 - DNA, 20 bp, Artificial Sequence
  Description of Artificial Sequence: Synthetic oligonucleotide
  Target: LAMA2; (+) strand; PAM type: NNGRRT; PAM sequence: ATGAGT
tttgttccaacagtgctgct

SEQ ID NO: 31118 - DNA, 20 bp, Artificial Sequence
  Description of Artificial Sequence: Synthetic oligonucleotide
  Target: LAMA2; (+) strand; PAM type: NNGRRT; PAM sequence: TAGGAT
ttcaagattgtcaaatttct

SEQ ID NO: 31119 - DNA, 20 bp, Artificial Sequence
  Description of Artificial Sequence: Synthetic oligonucleotide
  Target: LAMA2; (+) strand; PAM type: NNGRRT; PAM sequence: TGGAAT
acagtacgacttaagggagg

SEQ ID NO: 31120 - DNA, 20 bp, Artificial Sequence
  Description of Artificial Sequence: Synthetic oligonucleotide
  Target: LAMA2; (+) strand; PAM type: NNGRRT; PAM sequence: ATGAAT
tacgacttaagggaggtgga

SEQ ID NO: 31121 - DNA, 20 bp, Artificial Sequence
  Description of Artificial Sequence: Synthetic oligonucleotide
  Target: LAMA2; (+) strand; PAM type: NNGRRT; PAM sequence: CTGGGT
tgaatagatgagaaactggc

SEQ ID NO: 31122 - DNA, 20 bp, Artificial Sequence
  Description of Artificial Sequence: Synthetic oligonucleotide
  Target: LAMA2; (+) strand; PAM type: NNGRRT; PAM sequence: TTGAAT
gatgagaaactggcctgggt

SEQ ID NO: 31123 - DNA, 20 bp, Artificial Sequence
  Description of Artificial Sequence: Synthetic oligonucleotide
  Target: LAMA2; (+) strand; PAM type: NNGRRT; PAM sequence: CTGGGT
agtaagcctgagaccctgca

SEQ ID NO: 31124 - DNA, 20 bp, Artificial Sequence
  Description of Artificial Sequence: Synthetic oligonucleotide
  Target: LAMA2; (+) strand; PAM type: NNGRRT; PAM sequence: CTGAGT
agcaggtaaacaccaagtcc

SEQ ID NO: 31125 - DNA, 20 bp, Artificial Sequence
  Description of Artificial Sequence: Synthetic oligonucleotide
  Target: LAMA2; (+) strand; PAM type: NNGRRT; PAM sequence: TGGGAT
gactgctccagccctacagc

SEQ ID NO: 31126 - DNA, 20 bp, Artificial Sequence
  Description of Artificial Sequence: Synthetic oligonucleotide
  Target: LAMA2; (+) strand; PAM type: NNGRRT; PAM sequence: CTGAGT
aaatctccctcacctacagc

SEQ ID NO: 31127 - DNA, 20 bp, Artificial Sequence
  Description of Artificial Sequence: Synthetic oligonucleotide
  Target: LAMA2; (+) strand; PAM type: NNGRRT; PAM sequence: AAGGAT
ctaaatgagctgttaatgtt

SEQ ID NO: 31128 - DNA, 20 bp, Artificial Sequence
  Description of Artificial Sequence: Synthetic oligonucleotide
  Target: LAMA2; (+) strand; PAM type: NNGRRT; PAM sequence: TAGGAT
tatacatcttattttgtaaa

SEQ ID NO: 31129 - DNA, 20 bp, Artificial Sequence
  Description of Artificial Sequence: Synthetic oligonucleotide
  Target: LAMA2; (+) strand; PAM type: NNGRRT; PAM sequence: ATGAGT
tgaagtgcaacttaaaaata

SEQ ID NO: 31130 - DNA, 20 bp, Artificial Sequence
  Description of Artificial Sequence: Synthetic oligonucleotide
  Target: LAMA2; (+) strand; PAM type: NNGRRT; PAM sequence: AGGAAT
atggcatcatgaaaagaaaa

SEQ ID NO: 31131 - DNA, 20 bp, Artificial Sequence
  Description of Artificial Sequence: Synthetic oligonucleotide
  Target: LAMA2; (+) strand; PAM type: NNGRRT; PAM sequence: GTGAAT
gaaaaaggaatttggtttca

SEQ ID NO: 31132 - DNA, 20 bp, Artificial Sequence
  Description of Artificial Sequence: Synthetic oligonucleotide
  Target: LAMA2; (+) strand; PAM type: NNGRRT; PAM sequence: TTGGGT
tgctctgtttttgctaaatc

SEQ ID NO: 31133 - DNA, 20 bp, Artificial Sequence
  Description of Artificial Sequence: Synthetic oligonucleotide
  Target: LAMA2; (+) strand; PAM type: NNGRRT; PAM sequence: AAGGAT
ggtttttacctatacatcct

SEQ ID NO: 31134 - DNA, 20 bp, Artificial Sequence
  Description of Artificial Sequence: Synthetic oligonucleotide
  Target: LAMA2; (+) strand; PAM type: NNGRRT; PAM sequence: ATGGAT
ttcagcttagttaccatcac

SEQ ID NO: 31135 - DNA, 20 bp, Artificial Sequence
  Description of Artificial Sequence: Synthetic oligonucleotide
  Target: LAMA2; (+) strand; PAM type: NNGRRT; PAM sequence: ATGGGT
tacatatgtacacatagtgt

SEQ ID NO: 31136 - DNA, 20 bp, Artificial Sequence
  Description of Artificial Sequence: Synthetic oligonucleotide
  Target: LAMA2; (+) strand; PAM type: NNGRRT; PAM sequence: ATGAGT
gactgtgtggcacatatgaa

SEQ ID NO: 31137 - DNA, 20 bp, Artificial Sequence
  Description of Artificial Sequence: Synthetic oligonucleotide
  Target: LAMA2; (+) strand; PAM type: NNGRRT; PAM sequence: AAGAAT
attttaaaatggaggacaga

SEQ ID NO: 31138 - DNA, 20 bp, Artificial Sequence
  Description of Artificial Sequence: Synthetic oligonucleotide
  Target: LAMA2; (+) strand; PAM type: NNGRRT; PAM sequence: TGGAAT
agatttttctagacaagaga

SEQ ID NO: 31139 - DNA, 20 bp, Artificial Sequence
  Description of Artificial Sequence: Synthetic oligonucleotide
  Target: LAMA2; (+) strand; PAM type: NNGRRT; PAM sequence: TTGAGT
ccaatctataaaatgacaga

SEQ ID NO: 31140 - DNA, 20 bp, Artificial Sequence
  Description of Artificial Sequence: Synthetic oligonucleotide
  Target: LAMA2; (+) strand; PAM type: NNGRRT; PAM sequence: TAGAAT
cttgtgaacaaaaatgttag

SEQ ID NO: 31141 - DNA, 20 bp, Artificial Sequence
  Description of Artificial Sequence: Synthetic oligonucleotide
  Target: LAMA2; (+) strand; PAM type: NNGRRT; PAM sequence: CTGGAT
catgcaaccaaccttccatt

SEQ ID NO: 31142 - DNA, 20 bp, Artificial Sequence
  Description of Artificial Sequence: Synthetic oligonucleotide
  Target: LAMA2; (+) strand; PAM type: NNGRRT; PAM sequence: TTGAAT
tcatatgattgatagacttt

SEQ ID NO: 31143 - DNA, 20 bp, Artificial Sequence
  Description of Artificial Sequence: Synthetic oligonucleotide
  Target: LAMA2; (+) strand; PAM type: NNGRRT; PAM sequence: TTGAGT
atacatgctttcccattaat

SEQ ID NO: 31144 - DNA, 20 bp, Artificial Sequence
  Description of Artificial Sequence: Synthetic oligonucleotide
  Target: LAMA2; (+) strand; PAM type: NNGRRT; PAM sequence: AAGAAT
aatgaaaatcaagaaaaact

SEQ ID NO: 31145 - DNA, 20 bp, Artificial Sequence
  Description of Artificial Sequence: Synthetic oligonucleotide
  Target: LAMA2; (+) strand; PAM type: NNGRRT; PAM sequence: TTGGGT
ccattccagtaacatatgct

SEQ ID NO: 31146 - DNA, 20 bp, Artificial Sequence
  Description of Artificial Sequence: Synthetic oligonucleotide
  Target: LAMA2; (+) strand; PAM type: NNGRRT; PAM sequence: ATGAAT
agtaacatatgctttgggtc

SEQ ID NO: 31147 - DNA, 20 bp, Artificial Sequence
  Description of Artificial Sequence: Synthetic oligonucleotide
  Target: LAMA2; (+) strand; PAM type: NNGRRT; PAM sequence: AGGAGT
gaaggggccagattaccttc

SEQ ID NO: 31148 - DNA, 20 bp, Artificial Sequence
  Description of Artificial Sequence: Synthetic oligonucleotide
  Target: LAMA2; (+) strand; PAM type: NNGRRT; PAM sequence: TTGAGT
atttcttggtgttggagcca

SEQ ID NO: 31149 - DNA, 20 bp, Artificial Sequence
  Description of Artificial Sequence: Synthetic oligonucleotide
  Target: LAMA2; (+) strand; PAM type: NNGRRT; PAM sequence: TTGAGT
atactttatttaacctgtct

SEQ ID NO: 31150 - DNA, 20 bp, Artificial Sequence
  Description of Artificial Sequence: Synthetic oligonucleotide
  Target: LAMA2; (+) strand; PAM type: NNGRRT; PAM sequence: TTGAAT
aaagggctttaggcttgcag

SEQ ID NO: 31151 - DNA, 20 bp, Artificial Sequence
  Description of Artificial Sequence: Synthetic oligonucleotide
  Target: LAMA2; (+) strand; PAM type: NNGRRT; PAM sequence: TTGGAT
agttgaatggccggtgtcta

SEQ ID NO: 31152 - DNA, 20 bp, Artificial Sequence
  Description of Artificial Sequence: Synthetic oligonucleotide
  Target: LAMA2; (+) strand; PAM type: NNGRRT; PAM sequence: ATGGGT
caagtgttgaggaacatggc

SEQ ID NO: 31153 - DNA, 20 bp, Artificial Sequence
  Description of Artificial Sequence: Synthetic oligonucleotide
  Target: LAMA2; (+) strand; PAM type: NNGRRT; PAM sequence: TTGAGT
aaagcagaacctaccattga

SEQ ID NO: 31154 - DNA, 20 bp, Artificial Sequence
  Description of Artificial Sequence: Synthetic oligonucleotide
  Target: LAMA2; (+) strand; PAM type: NNGRRT; PAM sequence: ACGGGT
taatttatgatccccatttt

SEQ ID NO: 31155 - DNA, 20 bp, Artificial Sequence
  Description of Artificial Sequence: Synthetic oligonucleotide
  Target: LAMA2; (+) strand; PAM type: NNGRRT; PAM sequence: GAGAAT
gatccccattttacgggtga

SEQ ID NO: 31156 - DNA, 20 bp, Artificial Sequence
  Description of Artificial Sequence: Synthetic oligonucleotide
  Target: LAMA2; (+) strand; PAM type: NNGRRT; PAM sequence: ATGAAT
acacagcaattcaaacctca

SEQ ID NO: 31157 - DNA, 20 bp, Artificial Sequence
  Description of Artificial Sequence: Synthetic oligonucleotide
  Target: LAMA2; (+) strand; PAM type: NNGRRT; PAM sequence: AGGGAT
gtcatgtgctgcttaacgac

SEQ ID NO: 31158 - DNA, 20 bp, Artificial Sequence
  Description of Artificial Sequence: Synthetic oligonucleotide
  Target: LAMA2; (+) strand; PAM type: NNGRRT; PAM sequence: TAGAGT
tcctcattgtgcaaacatca

SEQ ID NO: 31159 - DNA, 20 bp, Artificial Sequence
  Description of Artificial Sequence: Synthetic oligonucleotide
  Target: LAMA2; (+) strand; PAM type: NNGRRT; PAM sequence: TGGGAT
tactacacacctaggctaca

SEQ ID NO: 31160 - DNA, 20 bp, Artificial Sequence
  Description of Artificial Sequence: Synthetic oligonucleotide
  Target: LAMA2; (+) strand; PAM type: NNGRRT; PAM sequence: CTGAAT
tgcacagcatgttattggta

SEQ ID NO: 31161 - DNA, 20 bp, Artificial Sequence
  Description of Artificial Sequence: Synthetic oligonucleotide
  Target: LAMA2; (+) strand; PAM type: NNGRRT; PAM sequence: AGGAAT
tacatacaaagtggtgaaac

SEQ ID NO: 31162 - DNA, 20 bp, Artificial Sequence
  Description of Artificial Sequence: Synthetic oligonucleotide
  Target: LAMA2; (+) strand; PAM type: NNGRRT; PAM sequence: TCGGGT
tggtgaaacaggaattaaac

SEQ ID NO: 31163 - DNA, 20 bp, Artificial Sequence
  Description of Artificial Sequence: Synthetic oligonucleotide
  Target: LAMA2; (+) strand; PAM type: NNGRRT; PAM sequence: TAGAGT
atccatgcaaagatacaaga

SEQ ID NO: 31164 - DNA, 20 bp, Artificial Sequence
  Description of Artificial Sequence: Synthetic oligonucleotide
  Target: LAMA2; (+) strand; PAM type: NNGRRT; PAM sequence: TAGGAT
gcagtgtgcagccctgagcc

SEQ ID NO: 31165 - DNA, 20 bp, Artificial Sequence
  Description of Artificial Sequence: Synthetic oligonucleotide
  Target: LAMA2; (+) strand; PAM type: NNGRRT; PAM sequence: TAGGAT
gtgcagccctgagcctagga

SEQ ID NO: 31166 - DNA, 20 bp, Artificial Sequence
  Description of Artificial Sequence: Synthetic oligonucleotide
  Target: LAMA2; (+) strand; PAM type: NNGRRT; PAM sequence: ATGAAT
gagcagaagaaaattgagcc

SEQ ID NO: 31167 - DNA, 20 bp, Artificial Sequence
  Description of Artificial Sequence: Synthetic oligonucleotide
  Target: LAMA2; (+) strand; PAM type: NNGRRT; PAM sequence: TAGAGT
aactttggaaaagtttaaat

SEQ ID NO: 31168 - DNA, 20 bp, Artificial Sequence
  Description of Artificial Sequence: Synthetic oligonucleotide
  Target: LAMA2; (+) strand; PAM type: NNGRRT; PAM sequence: ATGGGT
aagtttaaattagagtagaa

SEQ ID NO: 31169 - DNA, 20 bp, Artificial Sequence
  Description of Artificial Sequence: Synthetic oligonucleotide
  Target: LAMA2; (+) strand; PAM type: NNGRRT; PAM sequence: AAGGAT
attccccattgtgttccaga

SEQ ID NO: 31170 - DNA, 20 bp, Artificial Sequence
  Description of Artificial Sequence: Synthetic oligonucleotide
  Target: LAMA2; (+) strand; PAM type: NNGRRT; PAM sequence: AAGAAT
ctaaaaattatttaaattga

SEQ ID NO: 31171 - DNA, 20 bp, Artificial Sequence
  Description of Artificial Sequence: Synthetic oligonucleotide
  Target: LAMA2; (+) strand; PAM type: NNGRRT; PAM sequence: GAGAAT
caaaataatcaaggaaaaga

SEQ ID NO: 31172 - DNA, 20 bp, Artificial Sequence
  Description of Artificial Sequence: Synthetic oligonucleotide
  Target: LAMA2; (+) strand; PAM type: NNGRRT; PAM sequence: CAGGAT
ctcatagaaatttaatccat

SEQ ID NO: 31173 - DNA, 20 bp, Artificial Sequence
  Description of Artificial Sequence: Synthetic oligonucleotide
  Target: LAMA2; (+) strand; PAM type: NNGRRT; PAM sequence: CTGAGT
aaagacactttagaagtcat

SEQ ID NO: 31174 - DNA, 20 bp, Artificial Sequence
  Description of Artificial Sequence: Synthetic oligonucleotide
  Target: LAMA2; (+) strand; PAM type: NNGRRT; PAM sequence: TGGGAT
tgagttaacctactcatttg

SEQ ID NO: 31175 - DNA, 20 bp, Artificial Sequence
  Description of Artificial Sequence: Synthetic oligonucleotide
  Target: LAMA2; (+) strand; PAM type: NNGRRT; PAM sequence: CTGGGT
tcatttgtgggatgaggaaa

SEQ ID NO: 31176 - DNA, 20 bp, Artificial Sequence
  Description of Artificial Sequence: Synthetic oligonucleotide
  Target: LAMA2; (+) strand; PAM type: NNGRRT; PAM sequence: AGGAGT
tcattccttttatagtacca

SEQ ID NO: 31177 - DNA, 20 bp, Artificial Sequence
  Description of Artificial Sequence: Synthetic oligonucleotide
  Target: LAMA2; (+) strand; PAM type: NNGRRT; PAM sequence: TGGAGT
atttatttatttttttgaga

SEQ ID NO: 31178 - DNA, 20 bp, Artificial Sequence
  Description of Artificial Sequence: Synthetic oligonucleotide
  Target: LAMA2; (+) strand; PAM type: NNGRRT; PAM sequence: TGGAGT
tctcgctttgtcactcaggc

SEQ ID NO: 31179 - DNA, 20 bp, Artificial Sequence
  Description of Artificial Sequence: Synthetic oligonucleotide
  Target: LAMA2; (+) strand; PAM type: NNGRRT; PAM sequence: CAGAGT
gatgctcgtgcctcagcctc

SEQ ID NO: 31180 - DNA, 20 bp, Artificial Sequence
  Description of Artificial Sequence: Synthetic oligonucleotide
  Target: LAMA2; (+) strand; PAM type: NNGRRT; PAM sequence: TGGGAT
acctcagcctcccaaaatgc

SEQ ID NO: 31181 - DNA, 20 bp, Artificial Sequence
  Description of Artificial Sequence: Synthetic oligonucleotide
  Target: LAMA2; (+) strand; PAM type: NNGRRT; PAM sequence: GAGAAT
aaatgcacacatacacaaca

SEQ ID NO: 31182 - DNA, 20 bp, Artificial Sequence
  Description of Artificial Sequence: Synthetic oligonucleotide
  Target: LAMA2; (+) strand; PAM type: NNGRRT; PAM sequence: AAGAGT
attgtctgttagacttttct

SEQ ID NO: 31183 - DNA, 20 bp, Artificial Sequence
  Description of Artificial Sequence: Synthetic oligonucleotide
  Target: LAMA2; (+) strand; PAM type: NNGRRT; PAM sequence: AGGAAT
gggcctcaactctcccccag

SEQ ID NO: 31184 - DNA, 20 bp, Artificial Sequence
  Description of Artificial Sequence: Synthetic oligonucleotide
  Target: LAMA2; (+) strand; PAM type: NNGRRT; PAM sequence: TAGAGT
aggaaaaatgtgttgtgcgt

SEQ ID NO: 31185 - DNA, 20 bp, Artificial Sequence
  Description of Artificial Sequence: Synthetic oligonucleotide
  Target: LAMA2; (+) strand; PAM type: NNGRRT; PAM sequence: AGGAGT
aactgtacaattcctcgatg

SEQ ID NO: 31186 - DNA, 20 bp, Artificial Sequence
  Description of Artificial Sequence: Synthetic oligonucleotide
  Target: LAMA2; (+) strand; PAM type: NNGRRT; PAM sequence: AAGGAT
tataattaatatatatattc

SEQ ID NO: 31187 - DNA, 20 bp, Artificial Sequence
  Description of Artificial Sequence: Synthetic oligonucleotide
  Target: LAMA2; (+) strand; PAM type: NNGRRT; PAM sequence: AAGAAT
attcagtggtcagcttgcta

SEQ ID NO: 31188 - DNA, 20 bp, Artificial Sequence
  Description of Artificial Sequence: Synthetic oligonucleotide
  Target: LAMA2; (+) strand; PAM type: NNGRRT; PAM sequence: TGGAAT
tggtcagcttgctaaagaat

SEQ ID NO: 31189 - DNA, 20 bp, Artificial Sequence
  Description of Artificial Sequence: Synthetic oligonucleotide
  Target: LAMA2; (+) strand; PAM type: NNGRRT; PAM sequence: TTGAAT
caaataagactcaaaatagt

SEQ ID NO: 31190 - DNA, 20 bp, Artificial Sequence
  Description of Artificial Sequence: Synthetic oligonucleotide
  Target: LAMA2; (+) strand; PAM type: NNGRRT; PAM sequence: TAGAAT
gggacattattaaatctcat

SEQ ID NO: 31191 - DNA, 20 bp, Artificial Sequence
  Description of Artificial Sequence: Synthetic oligonucleotide
  Target: LAMA2; (+) strand; PAM type: NNGRRT; PAM sequence: GAGAGT
tttaggctgtgataaaagca

SEQ ID NO: 31192 - DNA, 20 bp, Artificial Sequence
  Description of Artificial Sequence: Synthetic oligonucleotide
  Target: LAMA2; (+) strand; PAM type: NNGRRT; PAM sequence: GAGGGT
tccaaatcaaaataaacaag

SEQ ID NO: 31193 - DNA, 20 bp, Artificial Sequence
  Description of Artificial Sequence: Synthetic oligonucleotide
  Target: LAMA2; (+) strand; PAM type: NNGRRT; PAM sequence: AGGGAT
actgtctaggccagaaccaa

SEQ ID NO: 31194 - DNA, 20 bp, Artificial Sequence
  Description of Artificial Sequence: Synthetic oligonucleotide
  Target: LAMA2; (+) strand; PAM type: NNGRRT; PAM sequence: TGGGAT
agtccccttgtaattctcca

SEQ ID NO: 31195 - DNA, 20 bp, Artificial Sequence
  Description of Artificial Sequence: Synthetic oligonucleotide
  Target: LAMA2; (+) strand; PAM type: NNGRRT; PAM sequence: TTGGAT
catgtacagcttttattatt

SEQ ID NO: 31196 - DNA, 20 bp, Artificial Sequence
  Description of Artificial Sequence: Synthetic oligonucleotide
  Target: LAMA2; (+) strand; PAM type: NNGRRT; PAM sequence: TGGAAT
attttaggtgttaaagacat

SEQ ID NO: 31197 - DNA, 20 bp, Artificial Sequence
  Description of Artificial Sequence: Synthetic oligonucleotide
  Target: LAMA2; (+) strand; PAM type: NNGRRT; PAM sequence: CTGAAT
ctctttggagctttttcagg

SEQ ID NO: 31198 - DNA, 20 bp, Artificial Sequence
  Description of Artificial Sequence: Synthetic oligonucleotide
  Target: LAMA2; (+) strand; PAM type: NNGRRT; PAM sequence: ATGGAT
tggttaaaatctgattacac

SEQ ID NO: 31199 - DNA, 20 bp, Artificial Sequence
  Description of Artificial Sequence: Synthetic oligonucleotide
  Target: LAMA2; (+) strand; PAM type: NNGRRT; PAM sequence: CGGGAT
tttctttcaggcatgcttgc

SEQ ID NO: 31200 - DNA, 20 bp, Artificial Sequence
  Description of Artificial Sequence: Synthetic oligonucleotide
  Target: LAMA2; (+) strand; PAM type: NNGRRT; PAM sequence: GGGAAT
agaggccagctaaactgtaa

SEQ ID NO: 31201 - DNA, 20 bp, Artificial Sequence
  Description of Artificial Sequence: Synthetic oligonucleotide
  Target: LAMA2; (+) strand; PAM type: NNGRRT; PAM sequence: TAGAAT
ccactgagcatgtcaagaaa

SEQ ID NO: 31202 - DNA, 20 bp, Artificial Sequence
  Description of Artificial Sequence: Synthetic oligonucleotide
  Target: LAMA2; (+) strand; PAM type: NNGRRT; PAM sequence: AAGAAT
aaaatttggaaattacagaa

SEQ ID NO: 31203 - DNA, 20 bp, Artificial Sequence
  Description of Artificial Sequence: Synthetic oligonucleotide
  Target: LAMA2; (+) strand; PAM type: NNGRRT; PAM sequence: ATGAAT
accaatttttacatgtgttt

SEQ ID NO: 31204 - DNA, 20 bp, Artificial Sequence
  Description of Artificial Sequence: Synthetic oligonucleotide
  Target: LAMA2; (+) strand; PAM type: NNGRRT; PAM sequence: ATGGAT
aataagatttatataacacc

SEQ ID NO: 31205 - DNA, 20 bp, Artificial Sequence
  Description of Artificial Sequence: Synthetic oligonucleotide
  Target: LAMA2; (+) strand; PAM type: NNGRRT; PAM sequence: TTGGAT
aaaatctttacgatctttgt

SEQ ID NO: 31206 - DNA, 20 bp, Artificial Sequence
  Description of Artificial Sequence: Synthetic oligonucleotide
  Target: LAMA2; (+) strand; PAM type: NNGRRT; PAM sequence: TAGAAT
cataatttacccatttccct

SEQ ID NO: 31207 - DNA, 20 bp, Artificial Sequence
  Description of Artificial Sequence: Synthetic oligonucleotide
  Target: LAMA2; (+) strand; PAM type: NNGRRT; PAM sequence: CAGAAT
aaaacaggcaaaataccccg

SEQ ID NO: 31208 - DNA, 20 bp, Artificial Sequence
  Description of Artificial Sequence: Synthetic oligonucleotide
  Target: LAMA2; (+) strand; PAM type: NNGRRT; PAM sequence: AGGAGT
ctaccccggcagccctctta

SEQ ID NO: 31209 - DNA, 20 bp, Artificial Sequence
  Description of Artificial Sequence: Synthetic oligonucleotide
  Target: LAMA2; (+) strand; PAM type: NNGRRT; PAM sequence: CCGGGT
ctcactgcaacctccgactc

SEQ ID NO: 31210 - DNA, 20 bp, Artificial Sequence
  Description of Artificial Sequence: Synthetic oligonucleotide
  Target: LAMA2; (+) strand; PAM type: NNGRRT; PAM sequence: CTGAGT
gattctcatgcctcagcctc

SEQ ID NO: 31211 - DNA, 20 bp, Artificial Sequence
  Description of Artificial Sequence: Synthetic oligonucleotide
  Target: LAMA2; (+) strand; PAM type: NNGRRT; PAM sequence: CTGGAT
acaggctcacgccaccacac

SEQ ID NO: 31212 - DNA, 20 bp, Artificial Sequence
  Description of Artificial Sequence: Synthetic oligonucleotide
  Target: LAMA2; (+) strand; PAM type: NNGRRT; PAM sequence: CGGGGT
ttttttatttttagtagaga

SEQ ID NO: 31213 - DNA, 20 bp, Artificial Sequence
  Description of Artificial Sequence: Synthetic oligonucleotide
  Target: LAMA2; (+) strand; PAM type: NNGRRT; PAM sequence: TGGGAT
accttggcctcccaaagtgc

SEQ ID NO: 31214 - DNA, 20 bp, Artificial Sequence
  Description of Artificial Sequence: Synthetic oligonucleotide
  Target: LAMA2; (+) strand; PAM type: NNGRRT; PAM sequence: CTGAGT
ctttcactcccttcattccc

SEQ ID NO: 31215 - DNA, 20 bp, Artificial Sequence
  Description of Artificial Sequence: Synthetic oligonucleotide
  Target: LAMA2; (+) strand; PAM type: NNGRRT; PAM sequence: CAGGGT
ttatccatcctcctctacat

SEQ ID NO: 31216 - DNA, 20 bp, Artificial Sequence
  Description of Artificial Sequence: Synthetic oligonucleotide
  Target: LAMA2; (+) strand; PAM type: NNGRRT; PAM sequence: GAGGAT
ccacaacccctgggccacag

SEQ ID NO: 31217 - DNA, 20 bp, Artificial Sequence
  Description of Artificial Sequence: Synthetic oligonucleotide
  Target: LAMA2; (+) strand; PAM type: NNGRRT; PAM sequence: AGGGAT
tattgtgaactgcacatgtg

SEQ ID NO: 31218 - DNA, 20 bp, Artificial Sequence
  Description of Artificial Sequence: Synthetic oligonucleotide
  Target: LAMA2; (+) strand; PAM type: NNGRRT; PAM sequence: GAGAAT
gatctaggttgtgcgctcct

SEQ ID NO: 31219 - DNA, 20 bp, Artificial Sequence
  Description of Artificial Sequence: Synthetic oligonucleotide
  Target: LAMA2; (+) strand; PAM type: NNGRRT; PAM sequence: GTGAGT
tccactgattctatgttatg

SEQ ID NO: 31220 - DNA, 20 bp, Artificial Sequence
  Description of Artificial Sequence: Synthetic oligonucleotide
  Target: LAMA2; (+) strand; PAM type: NNGRRT; PAM sequence: GAGAAT
caagtgaactccaacactgt

SEQ ID NO: 31221 - DNA, 20 bp, Artificial Sequence
  Description of Artificial Sequence: Synthetic oligonucleotide
  Target: LAMA2; (+) strand; PAM type: NNGRRT; PAM sequence: CGGAGT
ccttctttttttttttgaga

SEQ ID NO: 31222 - DNA, 20 bp, Artificial Sequence
  Description of Artificial Sequence: Synthetic oligonucleotide
  Target: LAMA2; (+) strand; PAM type: NNGRRT; PAM sequence: TGGAGT
tcttgctctgtcacccaggc

SEQ ID NO: 31223 - DNA, 20 bp, Artificial Sequence
  Description of Artificial Sequence: Synthetic oligonucleotide
  Target: LAMA2; (+) strand; PAM type: NNGRRT; PAM sequence: CTGAGT
cattctcctgcctcagcctc

SEQ ID NO: 31224 - DNA, 20 bp, Artificial Sequence
  Description of Artificial Sequence: Synthetic oligonucleotide
  Target: LAMA2; (+) strand; PAM type: NNGRRT; PAM sequence: CGGGGT
ttttgtatttttaatagaga

SEQ ID NO: 31225 - DNA, 20 bp, Artificial Sequence
  Description of Artificial Sequence: Synthetic oligonucleotide
  Target: LAMA2; (+) strand; PAM type: NNGRRT; PAM sequence: CAGGAT
cggggtttcactgtgttagc

SEQ ID NO: 31226 - DNA, 20 bp, Artificial Sequence
  Description of Artificial Sequence: Synthetic oligonucleotide
  Target: LAMA2; (+) strand; PAM type: NNGRRT; PAM sequence: GAGAAT
gtgttgcctcttatttcatt

SEQ ID NO: 31227 - DNA, 20 bp, Artificial Sequence
  Description of Artificial Sequence: Synthetic oligonucleotide
  Target: LAMA2; (+) strand; PAM type: NNGRRT; PAM sequence: TTGGAT
tatgactcttttctattact

SEQ ID NO: 31228 - DNA, 20 bp, Artificial Sequence
  Description of Artificial Sequence: Synthetic oligonucleotide
  Target: LAMA2; (+) strand; PAM type: NNGRRT; PAM sequence: ATGAAT
actcttttctattactttgg

SEQ ID NO: 31229 - DNA, 20 bp, Artificial Sequence
  Description of Artificial Sequence: Synthetic oligonucleotide
  Target: LAMA2; (+) strand; PAM type: NNGRRT; PAM sequence: TTGAAT
ttctcttcatccattctcct

SEQ ID NO: 31230 - DNA, 20 bp, Artificial Sequence
  Description of Artificial Sequence: Synthetic oligonucleotide
  Target: LAMA2; (+) strand; PAM type: NNGRRT; PAM sequence: CTGGAT
ctatcacctcctcttctata

SEQ ID NO: 31231 - DNA, 20 bp, Artificial Sequence
  Description of Artificial Sequence: Synthetic oligonucleotide
  Target: LAMA2; (+) strand; PAM type: NNGRRT; PAM sequence: GTGAAT
taacagccatgtttgccact

SEQ ID NO: 31232 - DNA, 20 bp, Artificial Sequence
  Description of Artificial Sequence: Synthetic oligonucleotide
  Target: LAMA2; (+) strand; PAM type: NNGRRT; PAM sequence: TGGAAT
ttaattacaatcaaaattac

SEQ ID NO: 31233 - DNA, 20 bp, Artificial Sequence
  Description of Artificial Sequence: Synthetic oligonucleotide
  Target: LAMA2; (+) strand; PAM type: NNGRRT; PAM sequence: AAGAAT
attaaattagcctatttgta

SEQ ID NO: 31234 - DNA, 20 bp, Artificial Sequence
  Description of Artificial Sequence: Synthetic oligonucleotide
  Target: LAMA2; (+) strand; PAM type: NNGRRT; PAM sequence: TAGAAT
tattggtaaaccttaactat

SEQ ID NO: 31235 - DNA, 20 bp, Artificial Sequence
  Description of Artificial Sequence: Synthetic oligonucleotide
  Target: LAMA2; (+) strand; PAM type: NNGRRT; PAM sequence: GGGAGT
ttttttttttttttttgaga

SEQ ID NO: 31236 - DNA, 20 bp, Artificial Sequence
  Description of Artificial Sequence: Synthetic oligonucleotide
  Target: LAMA2; (+) strand; PAM type: NNGRRT; PAM sequence: CTGAGT
gattttcctgcctcagcctc

SEQ ID NO: 31237 - DNA, 20 bp, Artificial Sequence
  Description of Artificial Sequence: Synthetic oligonucleotide
  Target: LAMA2; (+) strand; PAM type: NNGRRT; PAM sequence: TGGGAT
gcctcagcctcctgagtagc

SEQ ID NO: 31238 - DNA, 20 bp, Artificial Sequence
  Description of Artificial Sequence: Synthetic oligonucleotide
  Target: LAMA2; (+) strand; PAM type: NNGRRT; PAM sequence: TGGGGT
tttttgcattttagtagaga

SEQ ID NO: 31239 - DNA, 20 bp, Artificial Sequence
  Description of Artificial Sequence: Synthetic oligonucleotide
  Target: LAMA2; (+) strand; PAM type: NNGRRT; PAM sequence: AGGGAT
gcctcggcctcccaaagttc

SEQ ID NO: 31240 - DNA, 20 bp, Artificial Sequence
  Description of Artificial Sequence: Synthetic oligonucleotide
  Target: LAMA2; (+) strand; PAM type: NNGRRT; PAM sequence: CAGGAT
taaagatatcctctttcaat

SEQ ID NO: 31241 - DNA, 20 bp, Artificial Sequence
  Description of Artificial Sequence: Synthetic oligonucleotide
  Target: LAMA2; (+) strand; PAM type: NNGRRT; PAM sequence: GAGAGT
tactcatatgcttaattgtg

SEQ ID NO: 31242 - DNA, 20 bp, Artificial Sequence
  Description of Artificial Sequence: Synthetic oligonucleotide
  Target: LAMA2; (+) strand; PAM type: NNGRRT; PAM sequence: TGGAGT
atatgcttaattgtggagag

SEQ ID NO: 31243 - DNA, 20 bp, Artificial Sequence
  Description of Artificial Sequence: Synthetic oligonucleotide
  Target: LAMA2; (+) strand; PAM type: NNGRRT; PAM sequence: GGGAAT
ttaattgtggagagtggagt

SEQ ID NO: 31244 - DNA, 20 bp, Artificial Sequence
  Description of Artificial Sequence: Synthetic oligonucleotide
  Target: LAMA2; (+) strand; PAM type: NNGRRT; PAM sequence: ATGAAT
taacttaatattagccatcc

SEQ ID NO: 31245 - DNA, 20 bp, Artificial Sequence
  Description of Artificial Sequence: Synthetic oligonucleotide
  Target: LAMA2; (+) strand; PAM type: NNGRRT; PAM sequence: AGGGGT
caataggcaatttgagagga

SEQ ID NO: 31246 - DNA, 20 bp, Artificial Sequence
  Description of Artificial Sequence: Synthetic oligonucleotide
  Target: LAMA2; (+) strand; PAM type: NNGRRT; PAM sequence: AAGAAT
atctatacacattcttaagc

SEQ ID NO: 31247 - DNA, 20 bp, Artificial Sequence
  Description of Artificial Sequence: Synthetic oligonucleotide
  Target: LAMA2; (+) strand; PAM type: NNGRRT; PAM sequence: TAGGAT
cagtttaatttcaattttgt

SEQ ID NO: 31248 - DNA, 20 bp, Artificial Sequence
  Description of Artificial Sequence: Synthetic oligonucleotide
  Target: LAMA2; (+) strand; PAM type: NNGRRT; PAM sequence: AAGAAT
tatgactatttttgttctct

SEQ ID NO: 31249 - DNA, 20 bp, Artificial Sequence
  Description of Artificial Sequence: Synthetic oligonucleotide
  Target: LAMA2; (+) strand; PAM type: NNGRRT; PAM sequence: AGGAAT
aaaagcatgtctattttctg

SEQ ID NO: 31250 - DNA, 20 bp, Artificial Sequence
  Description of Artificial Sequence: Synthetic oligonucleotide
  Target: LAMA2; (+) strand; PAM type: NNGRRT; PAM sequence: TTGAAT
tttcatggaactcacaactt

SEQ ID NO: 31251 - DNA, 20 bp, Artificial Sequence
  Description of Artificial Sequence: Synthetic oligonucleotide
  Target: LAMA2; (+) strand; PAM type: NNGRRT; PAM sequence: CAGAGT
gcaagcatgaactctgcagt

SEQ ID NO: 31252 - DNA, 20 bp, Artificial Sequence
  Description of Artificial Sequence: Synthetic oligonucleotide
  Target: LAMA2; (+) strand; PAM type: NNGRRT; PAM sequence: CTGAAT
gcctactcaatttatttaac

SEQ ID NO: 31253 - DNA, 20 bp, Artificial Sequence
  Description of Artificial Sequence: Synthetic oligonucleotide
  Target: LAMA2; (+) strand; PAM type: NNGRRT; PAM sequence: CAGAGT
acaataatagtggctactca

SEQ ID NO: 31254 - DNA, 20 bp, Artificial Sequence
  Description of Artificial Sequence: Synthetic oligonucleotide
  Target: LAMA2; (+) strand; PAM type: NNGRRT; PAM sequence: AAGGAT
gctactcacagagtttttgt

SEQ ID NO: 31255 - DNA, 20 bp, Artificial Sequence
  Description of Artificial Sequence: Synthetic oligonucleotide
  Target: LAMA2; (+) strand; PAM type: NNGRRT; PAM sequence: TCGGAT
tcttactgtctcagtccatt

SEQ ID NO: 31256 - DNA, 20 bp, Artificial Sequence
  Description of Artificial Sequence: Synthetic oligonucleotide
  Target: LAMA2; (+) strand; PAM type: NNGRRT; PAM sequence: CTGGGT
ttgtaacaaaatatcataaa

SEQ ID NO: 31257 - DNA, 20 bp, Artificial Sequence
  Description of Artificial Sequence: Synthetic oligonucleotide
  Target: LAMA2; (+) strand; PAM type: NNGRRT; PAM sequence: TGGGGT
gaaggcactagatagctctc

SEQ ID NO: 31258 - DNA, 20 bp, Artificial Sequence
  Description of Artificial Sequence: Synthetic oligonucleotide
  Target: LAMA2; (+) strand; PAM type: NNGRRT; PAM sequence: CAGGAT
attactatcacactgggaga

SEQ ID NO: 31259 - DNA, 20 bp, Artificial Sequence
  Description of Artificial Sequence: Synthetic oligonucleotide
  Target: LAMA2; (+) strand; PAM type: NNGRRT; PAM sequence: ATGAAT
ctgtacataggcatgttatt

SEQ ID NO: 31260 - DNA, 20 bp, Artificial Sequence
  Description of Artificial Sequence: Synthetic oligonucleotide
  Target: LAMA2; (+) strand; PAM type: NNGRRT; PAM sequence: CTGAGT
agactaaaacctatgtaata

SEQ ID NO: 31261 - DNA, 20 bp, Artificial Sequence
  Description of Artificial Sequence: Synthetic oligonucleotide
  Target: LAMA2; (+) strand; PAM type: NNGRRT; PAM sequence: GGGGAT
ctatgtaatactgagtccaa

SEQ ID NO: 31262 - DNA, 20 bp, Artificial Sequence
  Description of Artificial Sequence: Synthetic oligonucleotide
  Target: LAMA2; (+) strand; PAM type: NNGRRT; PAM sequence: GGGAAT
tcctattttttttttcacat

SEQ ID NO: 31263 - DNA, 20 bp, Artificial Sequence
  Description of Artificial Sequence: Synthetic oligonucleotide
  Target: LAMA2; (+) strand; PAM type: NNGRRT; PAM sequence: TAGAAT
taaatagacagatttgtaac

SEQ ID NO: 31264 - DNA, 20 bp, Artificial Sequence
  Description of Artificial Sequence: Synthetic oligonucleotide
  Target: LAMA2; (+) strand; PAM type: NNGRRT; PAM sequence: CAGAAT
aatctacctaacaaccttgc

SEQ ID NO: 31265 - DNA, 20 bp, Artificial Sequence
  Description of Artificial Sequence: Synthetic oligonucleotide
  Target: LAMA2; (+) strand; PAM type: NNGRRT; PAM sequence: GAGAGT
ctgcgttctccagacggcaa

SEQ ID NO: 31266 - DNA, 20 bp, Artificial Sequence
  Description of Artificial Sequence: Synthetic oligonucleotide
  Target: LAMA2; (+) strand; PAM type: NNGRRT; PAM sequence: ATGAGT
aaacactctctgctgattaa

SEQ ID NO: 31267 - DNA, 20 bp, Artificial Sequence
  Description of Artificial Sequence: Synthetic oligonucleotide
  Target: LAMA2; (+) strand; PAM type: NNGRRT; PAM sequence: GTGAAT
gtttgattttacaagctcaa

SEQ ID NO: 31268 - DNA, 20 bp, Artificial Sequence
  Description of Artificial Sequence: Synthetic oligonucleotide
  Target: LAMA2; (+) strand; PAM type: NNGRRT; PAM sequence: TAGAGT
agctcaagtgaattatatct

SEQ ID NO: 31269 - DNA, 20 bp, Artificial Sequence
  Description of Artificial Sequence: Synthetic oligonucleotide
  Target: LAMA2; (+) strand; PAM type: NNGRRT; PAM sequence: CAGAAT
attatatcttagagtcggga

SEQ ID NO: 31270 - DNA, 20 bp, Artificial Sequence
  Description of Artificial Sequence: Synthetic oligonucleotide
  Target: LAMA2; (+) strand; PAM type: NNGRRT; PAM sequence: AGGGGT
cagaatctgcaaaagtgact

SEQ ID NO: 31271 - DNA, 20 bp, Artificial Sequence
  Description of Artificial Sequence: Synthetic oligonucleotide
  Target: LAMA2; (+) strand; PAM type: NNGRRT; PAM sequence: CAGGAT
tgagaacataaaatttgtcg

SEQ ID NO: 31272 - DNA, 20 bp, Artificial Sequence
  Description of Artificial Sequence: Synthetic oligonucleotide
  Target: LAMA2; (+) strand; PAM type: NNGRRT; PAM sequence: AGGAAT
aaaaataaacagtgctcatt

SEQ ID NO: 31273 - DNA, 20 bp, Artificial Sequence
  Description of Artificial Sequence: Synthetic oligonucleotide
  Target: LAMA2; (+) strand; PAM type: NNGRRT; PAM sequence: CAGAAT
aaacagtgctcattaggaat

SEQ ID NO: 31274 - DNA, 20 bp, Artificial Sequence
  Description of Artificial Sequence: Synthetic oligonucleotide
  Target: LAMA2; (+) strand; PAM type: NNGRRT; PAM sequence: GAGGAT
acttttggaggccaagagcg

SEQ ID NO: 31275 - DNA, 20 bp, Artificial Sequence
  Description of Artificial Sequence: Synthetic oligonucleotide
  Target: LAMA2; (+) strand; PAM type: NNGRRT; PAM sequence: AGGAGT
aggccaagagcggaggatcc

SEQ ID NO: 31276 - DNA, 20 bp, Artificial Sequence
  Description of Artificial Sequence: Synthetic oligonucleotide
  Target: LAMA2; (+) strand; PAM type: NNGRRT; PAM sequence: AAGAAT
aaaaattaaaaattaaaaaa

SEQ ID NO: 31277 - DNA, 20 bp, Artificial Sequence
  Description of Artificial Sequence: Synthetic oligonucleotide
  Target: LAMA2; (+) strand; PAM type: NNGRRT; PAM sequence: CAGAGT
gttgctaaaaaaatgtgacc

SEQ ID NO: 31278 - DNA, 20 bp, Artificial Sequence
  Description of Artificial Sequence: Synthetic oligonucleotide
  Target: LAMA2; (+) strand; PAM type: NNGRRT; PAM sequence: TTGGAT
tcaaaatatctgtaaatgct

SEQ ID NO: 31279 - DNA, 20 bp, Artificial Sequence
  Description of Artificial Sequence: Synthetic oligonucleotide
  Target: LAMA2; (+) strand; PAM type: NNGRRT; PAM sequence: TTGGAT
tgaaagtattatctaatgtg

SEQ ID NO: 31280 - DNA, 20 bp, Artificial Sequence
  Description of Artificial Sequence: Synthetic oligonucleotide
  Target: LAMA2; (+) strand; PAM type: NNGRRT; PAM sequence: ATGAAT
atatcctgacagatgatact

SEQ ID NO: 31281 - DNA, 20 bp, Artificial Sequence
  Description of Artificial Sequence: Synthetic oligonucleotide
  Target: LAMA2; (+) strand; PAM type: NNGRRT; PAM sequence: AAGAAT
tatggcctatggtagatagt

SEQ ID NO: 31282 - DNA, 20 bp, Artificial Sequence
  Description of Artificial Sequence: Synthetic oligonucleotide
  Target: LAMA2; (+) strand; PAM type: NNGRRT; PAM sequence: ATGGGT
agtaagaatatgaagactgc

SEQ ID NO: 31283 - DNA, 20 bp, Artificial Sequence
  Description of Artificial Sequence: Synthetic oligonucleotide
  Target: LAMA2; (+) strand; PAM type: NNGRRT; PAM sequence: AAGAGT
attagcaattcatgtgaagt

SEQ ID NO: 31284 - DNA, 20 bp, Artificial Sequence
  Description of Artificial Sequence: Synthetic oligonucleotide
  Target: LAMA2; (+) strand; PAM type: NNGRRT; PAM sequence: CTGAGT
actatattttgaaagaaacc

SEQ ID NO: 31285 - DNA, 20 bp, Artificial Sequence
  Description of Artificial Sequence: Synthetic oligonucleotide
  Target: LAMA2; (+) strand; PAM type: NNGRRT; PAM sequence: GGGAAT
gaggaccttccctaggaaaa

SEQ ID NO: 31286 - DNA, 20 bp, Artificial Sequence
  Description of Artificial Sequence: Synthetic oligonucleotide
  Target: LAMA2; (+) strand; PAM type: NNGRRT; PAM sequence: TTGGAT
atagcttcagaaggcagaac

SEQ ID NO: 31287 - DNA, 20 bp, Artificial Sequence
  Description of Artificial Sequence: Synthetic oligonucleotide
  Target: LAMA2; (+) strand; PAM type: NNGRRT; PAM sequence: TAGAAT
ttggatcactcactgaaaat

SEQ ID NO: 31288 - DNA, 20 bp, Artificial Sequence
  Description of Artificial Sequence: Synthetic oligonucleotide
  Target: LAMA2; (+) strand; PAM type: NNGRRT; PAM sequence: AAGAAT
gacgaaaaaagctgtcttat

SEQ ID NO: 31289 - DNA, 20 bp, Artificial Sequence
  Description of Artificial Sequence: Synthetic oligonucleotide
  Target: LAMA2; (+) strand; PAM type: NNGRRT; PAM sequence: AGGAAT
tagtcatttgattttgtaga

SEQ ID NO: 31290 - DNA, 20 bp, Artificial Sequence
  Description of Artificial Sequence: Synthetic oligonucleotide
  Target: LAMA2; (+) strand; PAM type: NNGRRT; PAM sequence: GAGAAT
tactagcacataccactctt

SEQ ID NO: 31291 - DNA, 20 bp, Artificial Sequence
  Description of Artificial Sequence: Synthetic oligonucleotide
  Target: LAMA2; (+) strand; PAM type: NNGRRT; PAM sequence: AGGAAT
tcattaggcatccaaaatat

SEQ ID NO: 31292 - DNA, 20 bp, Artificial Sequence
  Description of Artificial Sequence: Synthetic oligonucleotide
  Target: LAMA2; (+) strand; PAM type: NNGRRT; PAM sequence: AAGGGT
agacagaaaagtcatatgaa

SEQ ID NO: 31293 - DNA, 20 bp, Artificial Sequence
  Description of Artificial Sequence: Synthetic oligonucleotide
  Target: LAMA2; (+) strand; PAM type: NNGRRT; PAM sequence: GAGAAT
ttgagaagattgactgtcca

SEQ ID NO: 31294 - DNA, 20 bp, Artificial Sequence
  Description of Artificial Sequence: Synthetic oligonucleotide
  Target: LAMA2; (+) strand; PAM type: NNGRRT; PAM sequence: TTGAAT
agagaaacaaaatcatattt

SEQ ID NO: 31295 - DNA, 20 bp, Artificial Sequence
  Description of Artificial Sequence: Synthetic oligonucleotide
  Target: LAMA2; (+) strand; PAM type: NNGRRT; PAM sequence: AAGGAT
tagtaatgattattggcttt

SEQ ID NO: 31296 - DNA, 20 bp, Artificial Sequence
  Description of Artificial Sequence: Synthetic oligonucleotide
  Target: LAMA2; (+) strand; PAM type: NNGRRT; PAM sequence: CTGAAT
ttcatcagcatgacaccttg

SEQ ID NO: 31297 - DNA, 20 bp, Artificial Sequence
  Description of Artificial Sequence: Synthetic oligonucleotide
  Target: LAMA2; (+) strand; PAM type: NNGRRT; PAM sequence: TGGAAT
cataatgctactgttaaata

SEQ ID NO: 31298 - DNA, 20 bp, Artificial Sequence
  Description of Artificial Sequence: Synthetic oligonucleotide
  Target: LAMA2; (+) strand; PAM type: NNGRRT; PAM sequence: TTGGAT
gcttaaaaatggtggttcct

SEQ ID NO: 31299 - DNA, 20 bp, Artificial Sequence
  Description of Artificial Sequence: Synthetic oligonucleotide
  Target: LAMA2; (+) strand; PAM type: NNGRRT; PAM sequence: TTGAAT
atggtggttcctttggatgg

SEQ ID NO: 31300 - DNA, 20 bp, Artificial Sequence
  Description of Artificial Sequence: Synthetic oligonucleotide
  Target: LAMA2; (+) strand; PAM type: NNGRRT; PAM sequence: GAGGAT
ctttggatggttgaataaaa

SEQ ID NO: 31301 - DNA, 20 bp, Artificial Sequence
  Description of Artificial Sequence: Synthetic oligonucleotide
  Target: LAMA2; (+) strand; PAM type: NNGRRT; PAM sequence: TCGAAT
tcagtcattcaaaatagtca

SEQ ID NO: 31302 - DNA, 20 bp, Artificial Sequence
  Description of Artificial Sequence: Synthetic oligonucleotide
  Target: LAMA2; (+) strand; PAM type: NNGRRT; PAM sequence: GGGAAT
aagccagttttaggtcatcg

SEQ ID NO: 31303 - DNA, 20 bp, Artificial Sequence
  Description of Artificial Sequence: Synthetic oligonucleotide
  Target: LAMA2; (+) strand; PAM type: NNGRRT; PAM sequence: ATGAAT
catttaaaatgagagctgaa

SEQ ID NO: 31304 - DNA, 20 bp, Artificial Sequence
  Description of Artificial Sequence: Synthetic oligonucleotide
  Target: LAMA2; (+) strand; PAM type: NNGRRT; PAM sequence: AAGGAT
ctgatatacactgtagagct

SEQ ID NO: 31305 - DNA, 20 bp, Artificial Sequence
  Description of Artificial Sequence: Synthetic oligonucleotide
  Target: LAMA2; (+) strand; PAM type: NNGRRT; PAM sequence: AAGAGT
gaaaagtcccagcagtgata

SEQ ID NO: 31306 - DNA, 20 bp, Artificial Sequence
  Description of Artificial Sequence: Synthetic oligonucleotide
  Target: LAMA2; (+) strand; PAM type: NNGRRT; PAM sequence: GAGAAT
aaagagtatccgcataattt

SEQ ID NO: 31307 - DNA, 20 bp, Artificial Sequence
  Description of Artificial Sequence: Synthetic oligonucleotide
  Target: LAMA2; (+) strand; PAM type: NNGRRT; PAM sequence: AGGGGT
gtggctacagctacatatgg

SEQ ID NO: 31308 - DNA, 20 bp, Artificial Sequence
  Description of Artificial Sequence: Synthetic oligonucleotide
  Target: LAMA2; (+) strand; PAM type: NNGRRT; PAM sequence: GGGGGT
agcacagtggtggtgaaggc

SEQ ID NO: 31309 - DNA, 20 bp, Artificial Sequence
  Description of Artificial Sequence: Synthetic oligonucleotide
  Target: LAMA2; (+) strand; PAM type: NNGRRT; PAM sequence: GGGGGT
gtggtggtgaaggcgggggt

SEQ ID NO: 31310 - DNA, 20 bp, Artificial Sequence
  Description of Artificial Sequence: Synthetic oligonucleotide
  Target: LAMA2; (+) strand; PAM type: NNGRRT; PAM sequence: TAGGAT
gtcatggtttgatatgttca

SEQ ID NO: 31311 - DNA, 20 bp, Artificial Sequence
  Description of Artificial Sequence: Synthetic oligonucleotide
  Target: LAMA2; (+) strand; PAM type: NNGRRT; PAM sequence: CAGGAT
cagataagaaaatatggaga

SEQ ID NO: 31312 - DNA, 20 bp, Artificial Sequence
  Description of Artificial Sequence: Synthetic oligonucleotide
  Target: LAMA2; (+) strand; PAM type: NNGRRT; PAM sequence: GAGAGT
aacaagaaagtcaagaaaca

SEQ ID NO: 31313 - DNA, 20 bp, Artificial Sequence
  Description of Artificial Sequence: Synthetic oligonucleotide
  Target: LAMA2; (+) strand; PAM type: NNGRRT; PAM sequence: ATGGAT
ctcatggaactgatgatcta

SEQ ID NO: 31314 - DNA, 20 bp, Artificial Sequence
  Description of Artificial Sequence: Synthetic oligonucleotide
  Target: LAMA2; (+) strand; PAM type: NNGRRT; PAM sequence: TCGGAT
ctgatgatctaatggatacc

SEQ ID NO: 31315 - DNA, 20 bp, Artificial Sequence
  Description of Artificial Sequence: Synthetic oligonucleotide
  Target: LAMA2; (+) strand; PAM type: NNGRRT; PAM sequence: TTGAGT
taggttgctgaccttggcaa

SEQ ID NO: 31316 - DNA, 20 bp, Artificial Sequence
  Description of Artificial Sequence: Synthetic oligonucleotide
  Target: LAMA2; (+) strand; PAM type: NNGRRT; PAM sequence: GTGAAT
ttgctgaccttggcaattga

SEQ ID NO: 31317 - DNA, 20 bp, Artificial Sequence
  Description of Artificial Sequence: Synthetic oligonucleotide
  Target: LAMA2; (+) strand; PAM type: NNGRRT; PAM sequence: AGGAGT
tcagatgaaacgagaaatac

SEQ ID NO: 31318 - DNA, 20 bp, Artificial Sequence
  Description of Artificial Sequence: Synthetic oligonucleotide
  Target: LAMA2; (+) strand; PAM type: NNGRRT; PAM sequence: CTGAAT
acccattagagatatccagg

SEQ ID NO: 31319 - DNA, 20 bp, Artificial Sequence
  Description of Artificial Sequence: Synthetic oligonucleotide
  Target: LAMA2; (+) strand; PAM type: NNGRRT; PAM sequence: CAGAGT
caggctgaatacataaaata

SEQ ID NO: 31320 - DNA, 20 bp, Artificial Sequence
  Description of Artificial Sequence: Synthetic oligonucleotide
  Target: LAMA2; (+) strand; PAM type: NNGRRT; PAM sequence: ATGGAT
cattaactgaagtcatagta

SEQ ID NO: 31321 - DNA, 20 bp, Artificial Sequence
  Description of Artificial Sequence: Synthetic oligonucleotide
  Target: LAMA2; (+) strand; PAM type: NNGRRT; PAM sequence: TAGAAT
aaagagatgaggaccaaagt

SEQ ID NO: 31322 - DNA, 20 bp, Artificial Sequence
  Description of Artificial Sequence: Synthetic oligonucleotide
  Target: LAMA2; (+) strand; PAM type: NNGRRT; PAM sequence: AAGAGT
tattgaacagaaagggaagg

SEQ ID NO: 31323 - DNA, 20 bp, Artificial Sequence
  Description of Artificial Sequence: Synthetic oligonucleotide
  Target: LAMA2; (+) strand; PAM type: NNGRRT; PAM sequence: GAGAAT
ggaaggaagagtcgataaag

SEQ ID NO: 31324 - DNA, 20 bp, Artificial Sequence
  Description of Artificial Sequence: Synthetic oligonucleotide
  Target: LAMA2; (+) strand; PAM type: NNGRRT; PAM sequence: TCGAGT
aagagtcgataaaggagaat

SEQ ID NO: 31325 - DNA, 20 bp, Artificial Sequence
  Description of Artificial Sequence: Synthetic oligonucleotide
  Target: LAMA2; (+) strand; PAM type: NNGRRT; PAM sequence: CGGGGT
aggccagggcaggcagatca

SEQ ID NO: 31326 - DNA, 20 bp, Artificial Sequence
  Description of Artificial Sequence: Synthetic oligonucleotide
  Target: LAMA2; (+) strand; PAM type: NNGRRT; PAM sequence: GAGAAT
tactcaggaggctgaggcag

SEQ ID NO: 31327 - DNA, 20 bp, Artificial Sequence
  Description of Artificial Sequence: Synthetic oligonucleotide
  Target: LAMA2; (+) strand; PAM type: NNGRRT; PAM sequence: GAGAGT
aaagaaagaaaccatgggaa

SEQ ID NO: 31328 - DNA, 20 bp, Artificial Sequence
  Description of Artificial Sequence: Synthetic oligonucleotide
  Target: LAMA2; (+) strand; PAM type: NNGRRT; PAM sequence: ATGGGT
gctttagcaacaaagatctt

SEQ ID NO: 31329 - DNA, 20 bp, Artificial Sequence
  Description of Artificial Sequence: Synthetic oligonucleotide
  Target: LAMA2; (+) strand; PAM type: NNGRRT; PAM sequence: GAGAAT
accagaagcctgtttaaagg

SEQ ID NO: 31330 - DNA, 20 bp, Artificial Sequence
  Description of Artificial Sequence: Synthetic oligonucleotide
  Target: LAMA2; (+) strand; PAM type: NNGRRT; PAM sequence: AGGAAT
gagatgaagaagtagagacc

SEQ ID NO: 31331 - DNA, 20 bp, Artificial Sequence
  Description of Artificial Sequence: Synthetic oligonucleotide
  Target: LAMA2; (+) strand; PAM type: NNGRRT; PAM sequence: TAGGAT
ttttaaaagcttatcgaaaa

SEQ ID NO: 31332 - DNA, 20 bp, Artificial Sequence
  Description of Artificial Sequence: Synthetic oligonucleotide
  Target: LAMA2; (+) strand; PAM type: NNGRRT; PAM sequence: GAGAAT
gaccaatttcaaatattaat

SEQ ID NO: 31333 - DNA, 20 bp, Artificial Sequence
  Description of Artificial Sequence: Synthetic oligonucleotide
  Target: LAMA2; (+) strand; PAM type: NNGRRT; PAM sequence: GGGAAT
gagaatgagcctgcaaagga

SEQ ID NO: 31334 - DNA, 20 bp, Artificial Sequence
  Description of Artificial Sequence: Synthetic oligonucleotide
  Target: LAMA2; (+) strand; PAM type: NNGRRT; PAM sequence: AGGAGT
ggaggaaaggaaaccaattt

SEQ ID NO: 31335 - DNA, 20 bp, Artificial Sequence
  Description of Artificial Sequence: Synthetic oligonucleotide
  Target: LAMA2; (+) strand; PAM type: NNGRRT; PAM sequence: TGGAGT
aaaggaaaccaatttaggag

SEQ ID NO: 31336 - DNA, 20 bp, Artificial Sequence
  Description of Artificial Sequence: Synthetic oligonucleotide
  Target: LAMA2; (+) strand; PAM type: NNGRRT; PAM sequence: AGGGAT
aggacggaaacaaatgtcaa

SEQ ID NO: 31337 - DNA, 20 bp, Artificial Sequence
  Description of Artificial Sequence: Synthetic oligonucleotide
  Target: LAMA2; (+) strand; PAM type: NNGRRT; PAM sequence: CTGAAT
gaaaataatgtggcaatata

SEQ ID NO: 31338 - DNA, 20 bp, Artificial Sequence
  Description of Artificial Sequence: Synthetic oligonucleotide
  Target: LAMA2; (+) strand; PAM type: NNGRRT; PAM sequence: TAGGGT
agctttcttatctcttaaag

SEQ ID NO: 31339 - DNA, 20 bp, Artificial Sequence
  Description of Artificial Sequence: Synthetic oligonucleotide
  Target: LAMA2; (+) strand; PAM type: NNGRRT; PAM sequence: GTGGGT
gggcacgttgggaggctgag

SEQ ID NO: 31340 - DNA, 20 bp, Artificial Sequence
  Description of Artificial Sequence: Synthetic oligonucleotide
  Target: LAMA2; (+) strand; PAM type: NNGRRT; PAM sequence: GTGGAT
acgttgggaggctgaggtgg

SEQ ID NO: 31341 - DNA, 20 bp, Artificial Sequence
  Description of Artificial Sequence: Synthetic oligonucleotide
  Target: LAMA2; (+) strand; PAM type: NNGRRT; PAM sequence: AGGAGT
tgggtggatcacctgaggtc

SEQ ID NO: 31342 - DNA, 20 bp, Artificial Sequence
  Description of Artificial Sequence: Synthetic oligonucleotide
  Target: LAMA2; (+) strand; PAM type: NNGRRT; PAM sequence: GAGAAT
tactcgggaaggtgaggcag

SEQ ID NO: 31343 - DNA, 20 bp, Artificial Sequence
  Description of Artificial Sequence: Synthetic oligonucleotide
  Target: LAMA2; (+) strand; PAM type: NNGRRT; PAM sequence: AAGAGT
aaatagcataaactctcaaa

SEQ ID NO: 31344 - DNA, 20 bp, Artificial Sequence
  Description of Artificial Sequence: Synthetic oligonucleotide
  Target: LAMA2; (+) strand; PAM type: NNGRRT; PAM sequence: GTGAAT
gacgtcagctattgtttgtt

SEQ ID NO: 31345 - DNA, 20 bp, Artificial Sequence
  Description of Artificial Sequence: Synthetic oligonucleotide
  Target: LAMA2; (+) strand; PAM type: NNGRRT; PAM sequence: TGGGAT
atgaagcagagcccagtcta

SEQ ID NO: 31346 - DNA, 20 bp, Artificial Sequence
  Description of Artificial Sequence: Synthetic oligonucleotide
  Target: LAMA2; (+) strand; PAM type: NNGRRT; PAM sequence: AAGGAT
ttttctcaactctcaaatgc

SEQ ID NO: 31347 - DNA, 20 bp, Artificial Sequence
  Description of Artificial Sequence: Synthetic oligonucleotide
  Target: LAMA2; (+) strand; PAM type: NNGRRT; PAM sequence: TAGGAT
ctaagtaaatttctagaagg

SEQ ID NO: 31348 - DNA, 20 bp, Artificial Sequence
  Description of Artificial Sequence: Synthetic oligonucleotide
  Target: LAMA2; (+) strand; PAM type: NNGRRT; PAM sequence: AAGGGT
ttctttgtggaaaggtgtta

SEQ ID NO: 31349 - DNA, 20 bp, Artificial Sequence
  Description of Artificial Sequence: Synthetic oligonucleotide
  Target: LAMA2; (+) strand; PAM type: NNGRRT; PAM sequence: TGGGAT
catctcatagagctaaaacc

SEQ ID NO: 31350 - DNA, 20 bp, Artificial Sequence
  Description of Artificial Sequence: Synthetic oligonucleotide
  Target: LAMA2; (+) strand; PAM type: NNGRRT; PAM sequence: TAGAGT
tcgaagtctattccccaatt

SEQ ID NO: 31351 - DNA, 20 bp, Artificial Sequence
  Description of Artificial Sequence: Synthetic oligonucleotide
  Target: LAMA2; (+) strand; PAM type: NNGRRT; PAM sequence: GAGAAT
agagattgattcagggaaaa

SEQ ID NO: 31352 - DNA, 20 bp, Artificial Sequence
  Description of Artificial Sequence: Synthetic oligonucleotide
  Target: LAMA2; (+) strand; PAM type: NNGRRT; PAM sequence: AAGAGT
agtattagtttctcaaatca

SEQ ID NO: 31353 - DNA, 20 bp, Artificial Sequence
  Description of Artificial Sequence: Synthetic oligonucleotide
  Target: LAMA2; (+) strand; PAM type: NNGRRT; PAM sequence: CTGAGT
aaaaatatttatatcaaaga

SEQ ID NO: 31354 - DNA, 20 bp, Artificial Sequence
  Description of Artificial Sequence: Synthetic oligonucleotide
  Target: LAMA2; (+) strand; PAM type: NNGRRT; PAM sequence: GTGAGT
gtcagtgataaagtgtgtgt

SEQ ID NO: 31355 - DNA, 20 bp, Artificial Sequence
  Description of Artificial Sequence: Synthetic oligonucleotide
  Target: LAMA2; (+) strand; PAM type: NNGRRT; PAM sequence: CAGAAT
ttcttctcccttttccttta

SEQ ID NO: 31356 - DNA, 20 bp, Artificial Sequence
  Description of Artificial Sequence: Synthetic oligonucleotide
  Target: LAMA2; (+) strand; PAM type: NNGRRT; PAM sequence: TTGGAT
cttctgtgaacgatgtgctc

SEQ ID NO: 31357 - DNA, 20 bp, Artificial Sequence
  Description of Artificial Sequence: Synthetic oligonucleotide
  Target: LAMA2; (+) strand; PAM type: NNGRRT; PAM sequence: TGGAAT
cgatgtgctcttggatacta

SEQ ID NO: 31358 - DNA, 20 bp, Artificial Sequence
  Description of Artificial Sequence: Synthetic oligonucleotide
  Target: LAMA2; (+) strand; PAM type: NNGRRT; PAM sequence: AGGGAT
tggatactatggaattgtca

SEQ ID NO: 31359 - DNA, 20 bp, Artificial Sequence
  Description of Artificial Sequence: Synthetic oligonucleotide
  Target: LAMA2; (+) strand; PAM type: NNGRRT; PAM sequence: GTGAGT
aatatagaaacatgacaaaa

SEQ ID NO: 31360 - DNA, 20 bp, Artificial Sequence
  Description of Artificial Sequence: Synthetic oligonucleotide
  Target: LAMA2; (+) strand; PAM type: NNGRRT; PAM sequence: AAGGAT
tgcccataatatcatctatg

SEQ ID NO: 31361 - DNA, 20 bp, Artificial Sequence
  Description of Artificial Sequence: Synthetic oligonucleotide
  Target: LAMA2; (+) strand; PAM type: NNGRRT; PAM sequence: TCGGGT
tatcatctatgaaggattgt

SEQ ID NO: 31362 - DNA, 20 bp, Artificial Sequence
  Description of Artificial Sequence: Synthetic oligonucleotide
  Target: LAMA2; (+) strand; PAM type: NNGRRT; PAM sequence: CGGAAT
ctccaaaaaatgtcatctcc

SEQ ID NO: 31363 - DNA, 20 bp, Artificial Sequence
  Description of Artificial Sequence: Synthetic oligonucleotide
  Target: LAMA2; (+) strand; PAM type: NNGRRT; PAM sequence: TGGAAT
ccctaagaagaaacaaaagc

SEQ ID NO: 31364 - DNA, 20 bp, Artificial Sequence
  Description of Artificial Sequence: Synthetic oligonucleotide
  Target: LAMA2; (+) strand; PAM type: NNGRRT; PAM sequence: CAGGGT
atttatagacttcagtaagg

SEQ ID NO: 31365 - DNA, 20 bp, Artificial Sequence
  Description of Artificial Sequence: Synthetic oligonucleotide
  Target: LAMA2; (+) strand; PAM type: NNGRRT; PAM sequence: AAGAAT
aggcagggtagttttactct

SEQ ID NO: 31366 - DNA, 20 bp, Artificial Sequence
  Description of Artificial Sequence: Synthetic oligonucleotide
  Target: LAMA2; (+) strand; PAM type: NNGRRT; PAM sequence: CAGAAT
ataatgtatggcagtttgtt

SEQ ID NO: 31367 - DNA, 20 bp, Artificial Sequence
  Description of Artificial Sequence: Synthetic oligonucleotide
  Target: LAMA2; (+) strand; PAM type: NNGRRT; PAM sequence: TAGAAT
tatggcagtttgttcagaat

SEQ ID NO: 31368 - DNA, 20 bp, Artificial Sequence
  Description of Artificial Sequence: Synthetic oligonucleotide
  Target: LAMA2; (+) strand; PAM type: NNGRRT; PAM sequence: TTGAGT
agaattctggacactttatc

SEQ ID NO: 31369 - DNA, 20 bp, Artificial Sequence
  Description of Artificial Sequence: Synthetic oligonucleotide
  Target: LAMA2; (+) strand; PAM type: NNGRRT; PAM sequence: TGGAAT
agctcctcttttttgttggc

SEQ ID NO: 31370 - DNA, 20 bp, Artificial Sequence
  Description of Artificial Sequence: Synthetic oligonucleotide
  Target: LAMA2; (+) strand; PAM type: NNGRRT; PAM sequence: CAGGGT
ctggaatcacaagcctttta

SEQ ID NO: 31371 - DNA, 20 bp, Artificial Sequence
  Description of Artificial Sequence: Synthetic oligonucleotide
  Target: LAMA2; (+) strand; PAM type: NNGRRT; PAM sequence: CTGGAT
aatgtcaatttttaggtaag

SEQ ID NO: 31372 - DNA, 20 bp, Artificial Sequence
  Description of Artificial Sequence: Synthetic oligonucleotide
  Target: LAMA2; (+) strand; PAM type: NNGRRT; PAM sequence: GAGGAT
taggtaagctggatattgaa

SEQ ID NO: 31373 - DNA, 20 bp, Artificial Sequence
  Description of Artificial Sequence: Synthetic oligonucleotide
  Target: LAMA2; (+) strand; PAM type: NNGRRT; PAM sequence: TTGGAT
tgttttaaaaagtaagccat

SEQ ID NO: 31374 - DNA, 20 bp, Artificial Sequence
  Description of Artificial Sequence: Synthetic oligonucleotide
  Target: LAMA2; (+) strand; PAM type: NNGRRT; PAM sequence: GTGAGT
aattaattgataattccctg

SEQ ID NO: 31375 - DNA, 20 bp, Artificial Sequence
  Description of Artificial Sequence: Synthetic oligonucleotide
  Target: LAMA2; (+) strand; PAM type: NNGRRT; PAM sequence: AGGGGT
actgtaaaacctgtgtgtta

SEQ ID NO: 31376 - DNA, 20 bp, Artificial Sequence
  Description of Artificial Sequence: Synthetic oligonucleotide
  Target: LAMA2; (+) strand; PAM type: NNGRRT; PAM sequence: ATGGGT
aagaaatagtagcatgtata

SEQ ID NO: 31377 - DNA, 20 bp, Artificial Sequence
  Description of Artificial Sequence: Synthetic oligonucleotide
  Target: LAMA2; (+) strand; PAM type: NNGRRT; PAM sequence: CAGGAT
gggtcttaaacaattaattt

SEQ ID NO: 31378 - DNA, 20 bp, Artificial Sequence
  Description of Artificial Sequence: Synthetic oligonucleotide
  Target: LAMA2; (+) strand; PAM type: NNGRRT; PAM sequence: GGGAAT
atttcaggattttcactggt

SEQ ID NO: 31379 - DNA, 20 bp, Artificial Sequence
  Description of Artificial Sequence: Synthetic oligonucleotide
  Target: LAMA2; (+) strand; PAM type: NNGRRT; PAM sequence: CAGAAT
gtgcaaaacctaataagtaa

SEQ ID NO: 31380 - DNA, 20 bp, Artificial Sequence
  Description of Artificial Sequence: Synthetic oligonucleotide
  Target: LAMA2; (+) strand; PAM type: NNGRRT; PAM sequence: ATGAAT
tttcatgatcacagatgaaa

SEQ ID NO: 31381 - DNA, 20 bp, Artificial Sequence
  Description of Artificial Sequence: Synthetic oligonucleotide
  Target: LAMA2; (+) strand; PAM type: NNGRRT; PAM sequence: GAGAAT
tcacagatgaaaatgaatgg

SEQ ID NO: 31382 - DNA, 20 bp, Artificial Sequence
  Description of Artificial Sequence: Synthetic oligonucleotide
  Target: LAMA2; (+) strand; PAM type: NNGRRT; PAM sequence: TAGAAT
ttttaggaaaactattatca

SEQ ID NO: 31383 - DNA, 20 bp, Artificial Sequence
  Description of Artificial Sequence: Synthetic oligonucleotide
  Target: LAMA2; (+) strand; PAM type: NNGRRT; PAM sequence: TTGAGT
ggaaaactattatcatagaa

SEQ ID NO: 31384 - DNA, 20 bp, Artificial Sequence
  Description of Artificial Sequence: Synthetic oligonucleotide
  Target: LAMA2; (+) strand; PAM type: NNGRRT; PAM sequence: ATGAAT
ttatcatagaattgagtata

SEQ ID NO: 31385 - DNA, 20 bp, Artificial Sequence
  Description of Artificial Sequence: Synthetic oligonucleotide
  Target: LAMA2; (+) strand; PAM type: NNGRRT; PAM sequence: AAGAAT
cagaagtaggtaatagtaat

SEQ ID NO: 31386 - DNA, 20 bp, Artificial Sequence
  Description of Artificial Sequence: Synthetic oligonucleotide
  Target: LAMA2; (+) strand; PAM type: NNGRRT; PAM sequence: AGGAAT
agtaataagaatggagacaa

SEQ ID NO: 31387 - DNA, 20 bp, Artificial Sequence
  Description of Artificial Sequence: Synthetic oligonucleotide
  Target: LAMA2; (+) strand; PAM type: NNGRRT; PAM sequence: ATGAAT
ataagaatggagacaaagga

SEQ ID NO: 31388 - DNA, 20 bp, Artificial Sequence
  Description of Artificial Sequence: Synthetic oligonucleotide
  Target: LAMA2; (+) strand; PAM type: NNGRRT; PAM sequence: AGGGGT
tcggaaactaattagatgtg

SEQ ID NO: 31389 - DNA, 20 bp, Artificial Sequence
  Description of Artificial Sequence: Synthetic oligonucleotide
  Target: LAMA2; (+) strand; PAM type: NNGRRT; PAM sequence: GAGGGT
actaattagatgtgaggggt

SEQ ID NO: 31390 - DNA, 20 bp, Artificial Sequence
  Description of Artificial Sequence: Synthetic oligonucleotide
  Target: LAMA2; (+) strand; PAM type: NNGRRT; PAM sequence: CTGAAT
gattgatagaacatatctgt

SEQ ID NO: 31391 - DNA, 20 bp, Artificial Sequence
  Description of Artificial Sequence: Synthetic oligonucleotide
  Target: LAMA2; (+) strand; PAM type: NNGRRT; PAM sequence: GTGAAT
aggaagagatatgttaataa

SEQ ID NO: 31392 - DNA, 20 bp, Artificial Sequence
  Description of Artificial Sequence: Synthetic oligonucleotide
  Target: LAMA2; (+) strand; PAM type: NNGRRT; PAM sequence: TTGGAT
tgttaataagtgaattaaag

SEQ ID NO: 31393 - DNA, 20 bp, Artificial Sequence
  Description of Artificial Sequence: Synthetic oligonucleotide
  Target: LAMA2; (+) strand; PAM type: NNGRRT; PAM sequence: GCGAGT
ccaggctaatgttatccaag

SEQ ID NO: 31394 - DNA, 20 bp, Artificial Sequence
  Description of Artificial Sequence: Synthetic oligonucleotide
  Target: LAMA2; (+) strand; PAM type: NNGRRT; PAM sequence: AAGAAT
atccaaggcgagtatataga

SEQ ID NO: 31395 - DNA, 20 bp, Artificial Sequence
  Description of Artificial Sequence: Synthetic oligonucleotide
  Target: LAMA2; (+) strand; PAM type: NNGRRT; PAM sequence: ATGAAT
gctctcacaagggagaccca

SEQ ID NO: 31396 - DNA, 20 bp, Artificial Sequence
  Description of Artificial Sequence: Synthetic oligonucleotide
  Target: LAMA2; (+) strand; PAM type: NNGRRT; PAM sequence: AAGAGT
aaattgttcagcaaggagac

SEQ ID NO: 31397 - DNA, 20 bp, Artificial Sequence
  Description of Artificial Sequence: Synthetic oligonucleotide
  Target: LAMA2; (+) strand; PAM type: NNGRRT; PAM sequence: TGGGAT
tcaaatctgtctccctaatt

SEQ ID NO: 31398 - DNA, 20 bp, Artificial Sequence
  Description of Artificial Sequence: Synthetic oligonucleotide
  Target: LAMA2; (+) strand; PAM type: NNGRRT; PAM sequence: AGGGGT
gggatatggggaaggttgca

SEQ ID NO: 31399 - DNA, 20 bp, Artificial Sequence
  Description of Artificial Sequence: Synthetic oligonucleotide
  Target: LAMA2; (+) strand; PAM type: NNGRRT; PAM sequence: AAGGAT
aggggtcagaaggcaaggca

SEQ ID NO: 31400 - DNA, 20 bp, Artificial Sequence
  Description of Artificial Sequence: Synthetic oligonucleotide
  Target: LAMA2; (+) strand; PAM type: NNGRRT; PAM sequence: CAGAGT
atttagaaatgctggcttgg

SEQ ID NO: 31401 - DNA, 20 bp, Artificial Sequence
  Description of Artificial Sequence: Synthetic oligonucleotide
  Target: LAMA2; (+) strand; PAM type: NNGRRT; PAM sequence: CTGGAT
tattgaggcagattttagcc

SEQ ID NO: 31402 - DNA, 20 bp, Artificial Sequence
  Description of Artificial Sequence: Synthetic oligonucleotide
  Target: LAMA2; (+) strand; PAM type: NNGRRT; PAM sequence: AGGAGT
aatggacccctcatttctga

SEQ ID NO: 31403 - DNA, 20 bp, Artificial Sequence
  Description of Artificial Sequence: Synthetic oligonucleotide
  Target: LAMA2; (+) strand; PAM type: NNGRRT; PAM sequence: AGGAAT
tgtcttgttggttcaagggg

SEQ ID NO: 31404 - DNA, 20 bp, Artificial Sequence
  Description of Artificial Sequence: Synthetic oligonucleotide
  Target: LAMA2; (+) strand; PAM type: NNGRRT; PAM sequence: CAGGGT
acttgacattttgttatcaa

SEQ ID NO: 31405 - DNA, 20 bp, Artificial Sequence
  Description of Artificial Sequence: Synthetic oligonucleotide
  Target: LAMA2; (+) strand; PAM type: NNGRRT; PAM sequence: CAGAGT
tggtcctgtagttacactct

SEQ ID NO: 31406 - DNA, 20 bp, Artificial Sequence
  Description of Artificial Sequence: Synthetic oligonucleotide
  Target: LAMA2; (+) strand; PAM type: NNGRRT; PAM sequence: ATGAAT
ttacactctcagagtcattg

SEQ ID NO: 31407 - DNA, 20 bp, Artificial Sequence
  Description of Artificial Sequence: Synthetic oligonucleotide
  Target: LAMA2; (+) strand; PAM type: NNGRRT; PAM sequence: CAGAAT
ttgaccatcaataatgaaag

SEQ ID NO: 31408 - DNA, 20 bp, Artificial Sequence
  Description of Artificial Sequence: Synthetic oligonucleotide
  Target: LAMA2; (+) strand; PAM type: NNGRRT; PAM sequence: TTGAAT
atcaataatgaaagcagaat

SEQ ID NO: 31409 - DNA, 20 bp, Artificial Sequence
  Description of Artificial Sequence: Synthetic oligonucleotide
  Target: LAMA2; (+) strand; PAM type: NNGRRT; PAM sequence: AAGAAT
ttacagttttaagaaatttc

SEQ ID NO: 31410 - DNA, 20 bp, Artificial Sequence
  Description of Artificial Sequence: Synthetic oligonucleotide
  Target: LAMA2; (+) strand; PAM type: NNGRRT; PAM sequence: TAGAAT
aaatttcaagaataaaatga

SEQ ID NO: 31411 - DNA, 20 bp, Artificial Sequence
  Description of Artificial Sequence: Synthetic oligonucleotide
  Target: LAMA2; (+) strand; PAM type: NNGRRT; PAM sequence: CAGGAT
atactaccctgattggttag

SEQ ID NO: 31412 - DNA, 20 bp, Artificial Sequence
  Description of Artificial Sequence: Synthetic oligonucleotide
  Target: LAMA2; (+) strand; PAM type: NNGRRT; PAM sequence: CAGGGT
ttggttagcaggatcaataa

SEQ ID NO: 31413 - DNA, 20 bp, Artificial Sequence
  Description of Artificial Sequence: Synthetic oligonucleotide
  Target: LAMA2; (+) strand; PAM type: NNGRRT; PAM sequence: TTGAGT
ttttatatgatttgtataat

SEQ ID NO: 31414 - DNA, 20 bp, Artificial Sequence
  Description of Artificial Sequence: Synthetic oligonucleotide
  Target: LAMA2; (+) strand; PAM type: NNGRRT; PAM sequence: AAGAAT
ttttatgcaaaagaccctga

SEQ ID NO: 31415 - DNA, 20 bp, Artificial Sequence
  Description of Artificial Sequence: Synthetic oligonucleotide
  Target: LAMA2; (+) strand; PAM type: NNGRRT; PAM sequence: ATGGAT
ttttagccaaaacctactca

SEQ ID NO: 31416 - DNA, 20 bp, Artificial Sequence
  Description of Artificial Sequence: Synthetic oligonucleotide
  Target: LAMA2; (+) strand; PAM type: NNGRRT; PAM sequence: ATGAGT
aaacctactcaatggatttc

SEQ ID NO: 31417 - DNA, 20 bp, Artificial Sequence
  Description of Artificial Sequence: Synthetic oligonucleotide
  Target: LAMA2; (+) strand; PAM type: NNGRRT; PAM sequence: AAGAAT
cctataaattgtgagaagag

SEQ ID NO: 31418 - DNA, 20 bp, Artificial Sequence
  Description of Artificial Sequence: Synthetic oligonucleotide
  Target: LAMA2; (+) strand; PAM type: NNGRRT; PAM sequence: AGGAAT
agacataaaaacagattctg

SEQ ID NO: 31419 - DNA, 20 bp, Artificial Sequence
  Description of Artificial Sequence: Synthetic oligonucleotide
  Target: LAMA2; (+) strand; PAM type: NNGRRT; PAM sequence: ATGAGT
gtgagaaatatggaggcatg

SEQ ID NO: 31420 - DNA, 20 bp, Artificial Sequence
  Description of Artificial Sequence: Synthetic oligonucleotide
  Target: LAMA2; (+) strand; PAM type: NNGRRT; PAM sequence: CGGAGT
tagaaatttaactcttatga

SEQ ID NO: 31421 - DNA, 20 bp, Artificial Sequence
  Description of Artificial Sequence: Synthetic oligonucleotide
  Target: LAMA2; (+) strand; PAM type: NNGRRT; PAM sequence: CAGAAT
cacaaaacctatccatagca

SEQ ID NO: 31422 - DNA, 20 bp, Artificial Sequence
  Description of Artificial Sequence: Synthetic oligonucleotide
  Target: LAMA2; (+) strand; PAM type: NNGRRT; PAM sequence: CAGAAT
aacgaacacattttactata

SEQ ID NO: 31423 - DNA, 20 bp, Artificial Sequence
  Description of Artificial Sequence: Synthetic oligonucleotide
  Target: LAMA2; (+) strand; PAM type: NNGRRT; PAM sequence: ATGAAT
atatacttcatcccaacact

SEQ ID NO: 31424 - DNA, 20 bp, Artificial Sequence
  Description of Artificial Sequence: Synthetic oligonucleotide
  Target: LAMA2; (+) strand; PAM type: NNGRRT; PAM sequence: CAGAAT
gtacatatctgtgtctcaca

SEQ ID NO: 31425 - DNA, 20 bp, Artificial Sequence
  Description of Artificial Sequence: Synthetic oligonucleotide
  Target: LAMA2; (+) strand; PAM type: NNGRRT; PAM sequence: GGGAAT
taggcatggctcttcgtact

SEQ ID NO: 31426 - DNA, 20 bp, Artificial Sequence
  Description of Artificial Sequence: Synthetic oligonucleotide
  Target: LAMA2; (+) strand; PAM type: NNGRRT; PAM sequence: GAGAGT
ggagcttgtattttttataa

SEQ ID NO: 31427 - DNA, 20 bp, Artificial Sequence
  Description of Artificial Sequence: Synthetic oligonucleotide
  Target: LAMA2; (+) strand; PAM type: NNGRRT; PAM sequence: TAGAGT
taaaggagactcaaggaact

SEQ ID NO: 31428 - DNA, 20 bp, Artificial Sequence
  Description of Artificial Sequence: Synthetic oligonucleotide
  Target: LAMA2; (+) strand; PAM type: NNGRRT; PAM sequence: GTGAAT
gatgagacttgtgcagaaat

SEQ ID NO: 31429 - DNA, 20 bp, Artificial Sequence
  Description of Artificial Sequence: Synthetic oligonucleotide
  Target: LAMA2; (+) strand; PAM type: NNGRRT; PAM sequence: GTGAAT
atgtgaatggtgtgagccat

SEQ ID NO: 31430 - DNA, 20 bp, Artificial Sequence
  Description of Artificial Sequence: Synthetic oligonucleotide
  Target: LAMA2; (+) strand; PAM type: NNGRRT; PAM sequence: CAGGGT
cttggcagataacaggaggc

SEQ ID NO: 31431 - DNA, 20 bp, Artificial Sequence
  Description of Artificial Sequence: Synthetic oligonucleotide
  Target: LAMA2; (+) strand; PAM type: NNGRRT; PAM sequence: CAGAGT
ggaggccagggtggttggaa

SEQ ID NO: 31432 - DNA, 20 bp, Artificial Sequence
  Description of Artificial Sequence: Synthetic oligonucleotide
  Target: LAMA2; (+) strand; PAM type: NNGRRT; PAM sequence: GTGAAT
gccagggtggttggaacaga

SEQ ID NO: 31433 - DNA, 20 bp, Artificial Sequence
  Description of Artificial Sequence: Synthetic oligonucleotide
  Target: LAMA2; (+) strand; PAM type: NNGRRT; PAM sequence: ATGAAT
atgaagtcagcaaagctcta

SEQ ID NO: 31434 - DNA, 20 bp, Artificial Sequence
  Description of Artificial Sequence: Synthetic oligonucleotide
  Target: LAMA2; (+) strand; PAM type: NNGRRT; PAM sequence: CAGGAT
tggcaagaggtggcttggta

SEQ ID NO: 31435 - DNA, 20 bp, Artificial Sequence
  Description of Artificial Sequence: Synthetic oligonucleotide
  Target: LAMA2; (+) strand; PAM type: NNGRRT; PAM sequence: TGGAGT
atttgcagataggagataag

SEQ ID NO: 31436 - DNA, 20 bp, Artificial Sequence
  Description of Artificial Sequence: Synthetic oligonucleotide
  Target: LAMA2; (+) strand; PAM type: NNGRRT; PAM sequence: TGGAGT
tggcagagcaaatggaaaca

SEQ ID NO: 31437 - DNA, 20 bp, Artificial Sequence
  Description of Artificial Sequence: Synthetic oligonucleotide
  Target: LAMA2; (+) strand; PAM type: NNGRRT; PAM sequence: TGGGAT
aacatggagtggctgttgac

SEQ ID NO: 31438 - DNA, 20 bp, Artificial Sequence
  Description of Artificial Sequence: Synthetic oligonucleotide
  Target: LAMA2; (+) strand; PAM type: NNGRRT; PAM sequence: CTGAAT
agggaacagaaatcagaaaa

SEQ ID NO: 31439 - DNA, 20 bp, Artificial Sequence
  Description of Artificial Sequence: Synthetic oligonucleotide
  Target: LAMA2; (+) strand; PAM type: NNGRRT; PAM sequence: TGGGAT
aaaaggaacaaccaatgaac

SEQ ID NO: 31440 - DNA, 20 bp, Artificial Sequence
  Description of Artificial Sequence: Synthetic oligonucleotide
  Target: LAMA2; (+) strand; PAM type: NNGRRT; PAM sequence: GGGAGT
attttaaaaattctgttgag

SEQ ID NO: 31441 - DNA, 20 bp, Artificial Sequence
  Description of Artificial Sequence: Synthetic oligonucleotide
  Target: LAMA2; (+) strand; PAM type: NNGRRT; PAM sequence: TGGAAT
aaattctgttgaggggagtt

SEQ ID NO: 31442 - DNA, 20 bp, Artificial Sequence
  Description of Artificial Sequence: Synthetic oligonucleotide
  Target: LAMA2; (+) strand; PAM type: NNGRRT; PAM sequence: AAGGAT
ggtcaccatgagaaaagcac

SEQ ID NO: 31443 - DNA, 20 bp, Artificial Sequence
  Description of Artificial Sequence: Synthetic oligonucleotide
  Target: LAMA2; (+) strand; PAM type: NNGRRT; PAM sequence: CTGAGT
tgagaaaagcacaaggattt

SEQ ID NO: 31444 - DNA, 20 bp, Artificial Sequence
  Description of Artificial Sequence: Synthetic oligonucleotide
  Target: LAMA2; (+) strand; PAM type: NNGRRT; PAM sequence: GGGAGT
tgataattgagagaagatta

SEQ ID NO: 31445 - DNA, 20 bp, Artificial Sequence
  Description of Artificial Sequence: Synthetic oligonucleotide
  Target: LAMA2; (+) strand; PAM type: NNGRRT; PAM sequence: AAGAAT
attagggagttgtgaacaga

SEQ ID NO: 31446 - DNA, 20 bp, Artificial Sequence
  Description of Artificial Sequence: Synthetic oligonucleotide
  Target: LAMA2; (+) strand; PAM type: NNGRRT; PAM sequence: TGGAAT
aactcaagcttcaagtgaga

SEQ ID NO: 31447 - DNA, 20 bp, Artificial Sequence
  Description of Artificial Sequence: Synthetic oligonucleotide
  Target: LAMA2; (+) strand; PAM type: NNGRRT; PAM sequence: AAGAAT
aaaaattgtatcaactattc

SEQ ID NO: 31448 - DNA, 20 bp, Artificial Sequence
  Description of Artificial Sequence: Synthetic oligonucleotide
  Target: LAMA2; (+) strand; PAM type: NNGRRT; PAM sequence: TAGAGT
atttaatcatactggctctt

SEQ ID NO: 31449 - DNA, 20 bp, Artificial Sequence
  Description of Artificial Sequence: Synthetic oligonucleotide
  Target: LAMA2; (+) strand; PAM type: NNGRRT; PAM sequence: AAGAGT
cttagagcccatatatgtat

SEQ ID NO: 31450 - DNA, 20 bp, Artificial Sequence
  Description of Artificial Sequence: Synthetic oligonucleotide
  Target: LAMA2; (+) strand; PAM type: NNGRRT; PAM sequence: GTGAGT
tcgcgtatgcgtgcatgtgc

SEQ ID NO: 31451 - DNA, 20 bp, Artificial Sequence
  Description of Artificial Sequence: Synthetic oligonucleotide
  Target: LAMA2; (+) strand; PAM type: NNGRRT; PAM sequence: ATGAAT
cagtcagtatcaggctttaa

SEQ ID NO: 31452 - DNA, 20 bp, Artificial Sequence
  Description of Artificial Sequence: Synthetic oligonucleotide
  Target: LAMA2; (+) strand; PAM type: NNGRRT; PAM sequence: CAGAGT
tgaatgagctaaaaatttgg

SEQ ID NO: 31453 - DNA, 20 bp, Artificial Sequence
  Description of Artificial Sequence: Synthetic oligonucleotide
  Target: LAMA2; (+) strand; PAM type: NNGRRT; PAM sequence: TTGGAT
tgaaggcaaaaataaatttg

SEQ ID NO: 31454 - DNA, 20 bp, Artificial Sequence
  Description of Artificial Sequence: Synthetic oligonucleotide
  Target: LAMA2; (+) strand; PAM type: NNGRRT; PAM sequence: GTGAGT
atttgttggataatgcgttt

SEQ ID NO: 31455 - DNA, 20 bp, Artificial Sequence
  Description of Artificial Sequence: Synthetic oligonucleotide
  Target: LAMA2; (+) strand; PAM type: NNGRRT; PAM sequence: GGGAAT
atcattcagttttatctaac

SEQ ID NO: 31456 - DNA, 20 bp, Artificial Sequence
  Description of Artificial Sequence: Synthetic oligonucleotide
  Target: LAMA2; (+) strand; PAM type: NNGRRT; PAM sequence: TGGAGT
agtttagttttcaagtcttg

SEQ ID NO: 31457 - DNA, 20 bp, Artificial Sequence
  Description of Artificial Sequence: Synthetic oligonucleotide
  Target: LAMA2; (+) strand; PAM type: NNGRRT; PAM sequence: TGGAAT
tggagtctttttttttttaa

SEQ ID NO: 31458 - DNA, 20 bp, Artificial Sequence
  Description of Artificial Sequence: Synthetic oligonucleotide
  Target: LAMA2; (+) strand; PAM type: NNGRRT; PAM sequence: CTGAAT
aagctttccctttcctcaca

SEQ ID NO: 31459 - DNA, 20 bp, Artificial Sequence
  Description of Artificial Sequence: Synthetic oligonucleotide
  Target: LAMA2; (+) strand; PAM type: NNGRRT; PAM sequence: CTGGAT
ggtaaaatgtagtttgaaat

SEQ ID NO: 31460 - DNA, 20 bp, Artificial Sequence
  Description of Artificial Sequence: Synthetic oligonucleotide
  Target: LAMA2; (+) strand; PAM type: NNGRRT; PAM sequence: CTGAGT
agcaccagtggccatttggg

SEQ ID NO: 31461 - DNA, 20 bp, Artificial Sequence
  Description of Artificial Sequence: Synthetic oligonucleotide
  Target: LAMA2; (+) strand; PAM type: NNGRRT; PAM sequence: CTGGAT
tgaacaataggacaattttg

SEQ ID NO: 31462 - DNA, 20 bp, Artificial Sequence
  Description of Artificial Sequence: Synthetic oligonucleotide
  Target: LAMA2; (+) strand; PAM type: NNGRRT; PAM sequence: CAGAAT
gtcacatcattattaaattc

SEQ ID NO: 31463 - DNA, 20 bp, Artificial Sequence
  Description of Artificial Sequence: Synthetic oligonucleotide
  Target: LAMA2; (+) strand; PAM type: NNGRRT; PAM sequence: ATGGAT
atgtcccaataaccttgatc

SEQ ID NO: 31464 - DNA, 20 bp, Artificial Sequence
  Description of Artificial Sequence: Synthetic oligonucleotide
  Target: LAMA2; (+) strand; PAM type: NNGRRT; PAM sequence: AGGAAT
caataaccttgatcatggat

SEQ ID NO: 31465 - DNA, 20 bp, Artificial Sequence
  Description of Artificial Sequence: Synthetic oligonucleotide
  Target: LAMA2; (+) strand; PAM type: NNGRRT; PAM sequence: ATGGAT
aatactattttataaaataa

SEQ ID NO: 31466 - DNA, 20 bp, Artificial Sequence
  Description of Artificial Sequence: Synthetic oligonucleotide
  Target: LAMA2; (+) strand; PAM type: NNGRRT; PAM sequence: GGGGAT
ccgctgcacggcttgtccac

SEQ ID NO: 31467 - DNA, 20 bp, Artificial Sequence
  Description of Artificial Sequence: Synthetic oligonucleotide
  Target: LAMA2; (+) strand; PAM type: NNGRRT; PAM sequence: CAGAGT
accaacagccatgaaacgta

SEQ ID NO: 31468 - DNA, 20 bp, Artificial Sequence
  Description of Artificial Sequence: Synthetic oligonucleotide
  Target: LAMA2; (+) strand; PAM type: NNGRRT; PAM sequence: AAGGGT
tatgtagggactatatggta

SEQ ID NO: 31469 - DNA, 20 bp, Artificial Sequence
  Description of Artificial Sequence: Synthetic oligonucleotide
  Target: LAMA2; (+) strand; PAM type: NNGRRT; PAM sequence: TAGAAT
tcaaaaccacttgtgtatct

SEQ ID NO: 31470 - DNA, 20 bp, Artificial Sequence
  Description of Artificial Sequence: Synthetic oligonucleotide
  Target: LAMA2; (+) strand; PAM type: NNGRRT; PAM sequence: AAGAAT
atgtaaatataacatttcat

SEQ ID NO: 31471 - DNA, 20 bp, Artificial Sequence
  Description of Artificial Sequence: Synthetic oligonucleotide
  Target: LAMA2; (+) strand; PAM type: NNGRRT; PAM sequence: CTGAAT
aaaatattgtctggaagtaa

SEQ ID NO: 31472 - DNA, 20 bp, Artificial Sequence
  Description of Artificial Sequence: Synthetic oligonucleotide
  Target: LAMA2; (+) strand; PAM type: NNGRRT; PAM sequence: AAGAAT
ctcaaaatataaatagtatc

SEQ ID NO: 31473 - DNA, 20 bp, Artificial Sequence
  Description of Artificial Sequence: Synthetic oligonucleotide
  Target: LAMA2; (+) strand; PAM type: NNGRRT; PAM sequence: TTGAAT
gcatgtatacagctgttaaa

SEQ ID NO: 31474 - DNA, 20 bp, Artificial Sequence
  Description of Artificial Sequence: Synthetic oligonucleotide
  Target: LAMA2; (+) strand; PAM type: NNGRRT; PAM sequence: AGGAGT
gtaatccaaatggtaaatta

SEQ ID NO: 31475 - DNA, 20 bp, Artificial Sequence
  Description of Artificial Sequence: Synthetic oligonucleotide
  Target: LAMA2; (+) strand; PAM type: NNGRRT; PAM sequence: CTGGAT
ttttctgtaagatcagtatc

SEQ ID NO: 31476 - DNA, 20 bp, Artificial Sequence
  Description of Artificial Sequence: Synthetic oligonucleotide
  Target: LAMA2; (+) strand; PAM type: NNGRRT; PAM sequence: GAGAGT
atattatctttaatgtaaca

SEQ ID NO: 31477 - DNA, 20 bp, Artificial Sequence
  Description of Artificial Sequence: Synthetic oligonucleotide
  Target: LAMA2; (+) strand; PAM type: NNGRRT; PAM sequence: AGGAAT
ttttcctcatctataatctc

SEQ ID NO: 31478 - DNA, 20 bp, Artificial Sequence
  Description of Artificial Sequence: Synthetic oligonucleotide
  Target: LAMA2; (+) strand; PAM type: NNGRRT; PAM sequence: CTGAAT
aacagaagaggcagaaaggc

SEQ ID NO: 31479 - DNA, 20 bp, Artificial Sequence
  Description of Artificial Sequence: Synthetic oligonucleotide
  Target: LAMA2; (+) strand; PAM type: NNGRRT; PAM sequence: GAGAGT
ggcccatgactaaccagcgt

SEQ ID NO: 31480 - DNA, 20 bp, Artificial Sequence
  Description of Artificial Sequence: Synthetic oligonucleotide
  Target: LAMA2; (+) strand; PAM type: NNGRRT; PAM sequence: TGGAAT
ttatgctccagagcactcca

SEQ ID NO: 31481 - DNA, 20 bp, Artificial Sequence
  Description of Artificial Sequence: Synthetic oligonucleotide
  Target: LAMA2; (+) strand; PAM type: NNGRRT; PAM sequence: AAGAGT
ctaattatcagcatccactt

SEQ ID NO: 31482 - DNA, 20 bp, Artificial Sequence
  Description of Artificial Sequence: Synthetic oligonucleotide
  Target: LAMA2; (+) strand; PAM type: NNGRRT; PAM sequence: TAGGGT
gcaataagtaactaaataat

SEQ ID NO: 31483 - DNA, 20 bp, Artificial Sequence
  Description of Artificial Sequence: Synthetic oligonucleotide
  Target: LAMA2; (+) strand; PAM type: NNGRRT; PAM sequence: GTGGAT
atttgcatatatataaaaca

SEQ ID NO: 31484 - DNA, 20 bp, Artificial Sequence
  Description of Artificial Sequence: Synthetic oligonucleotide
  Target: LAMA2; (+) strand; PAM type: NNGRRT; PAM sequence: TTGGAT
tctgaagatatatacatctt

SEQ ID NO: 31485 - DNA, 20 bp, Artificial Sequence
  Description of Artificial Sequence: Synthetic oligonucleotide
  Target: LAMA2; (+) strand; PAM type: NNGRRT; PAM sequence: TAGGAT
cctgtacctttaaacaccag

SEQ ID NO: 31486 - DNA, 20 bp, Artificial Sequence
  Description of Artificial Sequence: Synthetic oligonucleotide
  Target: LAMA2; (+) strand; PAM type: NNGRRT; PAM sequence: TAGAAT
tttctacaaaagcatgtgta

SEQ ID NO: 31487 - DNA, 20 bp, Artificial Sequence
  Description of Artificial Sequence: Synthetic oligonucleotide
  Target: LAMA2; (+) strand; PAM type: NNGRRT; PAM sequence: AAGGGT
atgtgtatagaataggctag

SEQ ID NO: 31488 - DNA, 20 bp, Artificial Sequence
  Description of Artificial Sequence: Synthetic oligonucleotide
  Target: LAMA2; (+) strand; PAM type: NNGRRT; PAM sequence: CAGAAT
taacaattattgtgttaaag

SEQ ID NO: 31489 - DNA, 20 bp, Artificial Sequence
  Description of Artificial Sequence: Synthetic oligonucleotide
  Target: LAMA2; (+) strand; PAM type: NNGRRT; PAM sequence: GTGAGT
agggccatacagtatcaaat

SEQ ID NO: 31490 - DNA, 20 bp, Artificial Sequence
  Description of Artificial Sequence: Synthetic oligonucleotide
  Target: LAMA2; (+) strand; PAM type: NNGRRT; PAM sequence: TTGAGT
tctaaaactgcttaaatttc

SEQ ID NO: 31491 - DNA, 20 bp, Artificial Sequence
  Description of Artificial Sequence: Synthetic oligonucleotide
  Target: LAMA2; (+) strand; PAM type: NNGRRT; PAM sequence: CTGAAT
tctttgaacatttaatcaat

SEQ ID NO: 31492 - DNA, 20 bp, Artificial Sequence
  Description of Artificial Sequence: Synthetic oligonucleotide
  Target: LAMA2; (+) strand; PAM type: NNGRRT; PAM sequence: TAGAAT
ttaatcaatctgaatctgct

SEQ ID NO: 31493 - DNA, 20 bp, Artificial Sequence
  Description of Artificial Sequence: Synthetic oligonucleotide
  Target: LAMA2; (+) strand; PAM type: NNGRRT; PAM sequence: ATGAAT
tgaaaaaaataatcaaaaac

SEQ ID NO: 31494 - DNA, 20 bp, Artificial Sequence
  Description of Artificial Sequence: Synthetic oligonucleotide
  Target: LAMA2; (+) strand; PAM type: NNGRRT; PAM sequence: CAGGGT
tttgccttttctaaccagca

SEQ ID NO: 31495 - DNA, 20 bp, Artificial Sequence
  Description of Artificial Sequence: Synthetic oligonucleotide
  Target: LAMA2; (+) strand; PAM type: NNGRRT; PAM sequence: GTGAAT
ccttttctaaccagcacagg

SEQ ID NO: 31496 - DNA, 20 bp, Artificial Sequence
  Description of Artificial Sequence: Synthetic oligonucleotide
  Target: LAMA2; (+) strand; PAM type: NNGRRT; PAM sequence: CAGAAT
ggaaattgtcctgggcaaac

SEQ ID NO: 31497 - DNA, 20 bp, Artificial Sequence
  Description of Artificial Sequence: Synthetic oligonucleotide
  Target: LAMA2; (+) strand; PAM type: NNGRRT; PAM sequence: CGGAGT
aaacttccagtgtcataaca

SEQ ID NO: 31498 - DNA, 20 bp, Artificial Sequence
  Description of Artificial Sequence: Synthetic oligonucleotide
  Target: LAMA2; (+) strand; PAM type: NNGRRT; PAM sequence: GTGAAT
acggagtgaaatacacttag

SEQ ID NO: 31499 - DNA, 20 bp, Artificial Sequence
  Description of Artificial Sequence: Synthetic oligonucleotide
  Target: LAMA2; (+) strand; PAM type: NNGRRT; PAM sequence: ATGGAT
agtgaaatacacttaggtga

SEQ ID NO: 31500 - DNA, 20 bp, Artificial Sequence
  Description of Artificial Sequence: Synthetic oligonucleotide
  Target: LAMA2; (+) strand; PAM type: NNGRRT; PAM sequence: AAGAGT
atggatgcatagatacgtgg

SEQ ID NO: 31501 - DNA, 20 bp, Artificial Sequence
  Description of Artificial Sequence: Synthetic oligonucleotide
  Target: LAMA2; (+) strand; PAM type: NNGRRT; PAM sequence: TAGGGT
gtcaattaatggactgcatt

SEQ ID NO: 31502 - DNA, 20 bp, Artificial Sequence
  Description of Artificial Sequence: Synthetic oligonucleotide
  Target: LAMA2; (+) strand; PAM type: NNGRRT; PAM sequence: TTGGAT
tgcatttagggttcatccag

SEQ ID NO: 31503 - DNA, 20 bp, Artificial Sequence
  Description of Artificial Sequence: Synthetic oligonucleotide
  Target: LAMA2; (+) strand; PAM type: NNGRRT; PAM sequence: ATGAAT
agatatggcaaaaagaaaag

SEQ ID NO: 31504 - DNA, 20 bp, Artificial Sequence
  Description of Artificial Sequence: Synthetic oligonucleotide
  Target: LAMA2; (+) strand; PAM type: NNGRRT; PAM sequence: CTGAGT
aataaaagtaaacagaaaat

SEQ ID NO: 31505 - DNA, 20 bp, Artificial Sequence
  Description of Artificial Sequence: Synthetic oligonucleotide
  Target: LAMA2; (+) strand; PAM type: NNGRRT; PAM sequence: ATGGGT
ttgcctcattggtaaaatta

SEQ ID NO: 31506 - DNA, 20 bp, Artificial Sequence
  Description of Artificial Sequence: Synthetic oligonucleotide
  Target: LAMA2; (+) strand; PAM type: NNGRRT; PAM sequence: ATGAGT
tattttgagatctgaaattc

SEQ ID NO: 31507 - DNA, 20 bp, Artificial Sequence
  Description of Artificial Sequence: Synthetic oligonucleotide
  Target: LAMA2; (+) strand; PAM type: NNGRRT; PAM sequence: TAGAAT
gggaagcccagaagtcaata

SEQ ID NO: 31508 - DNA, 20 bp, Artificial Sequence
  Description of Artificial Sequence: Synthetic oligonucleotide
  Target: LAMA2; (+) strand; PAM type: NNGRRT; PAM sequence: AAGGAT
actaagttataacccaaatg

SEQ ID NO: 31509 - DNA, 20 bp, Artificial Sequence
  Description of Artificial Sequence: Synthetic oligonucleotide
  Target: LAMA2; (+) strand; PAM type: NNGRRT; PAM sequence: AAGAAT
ggataatttcaaacctcagg

SEQ ID NO: 31510 - DNA, 20 bp, Artificial Sequence
  Description of Artificial Sequence: Synthetic oligonucleotide
  Target: LAMA2; (+) strand; PAM type: NNGRRT; PAM sequence: CAGAAT
ttcaattccatcaacaacag

SEQ ID NO: 31511 - DNA, 20 bp, Artificial Sequence
  Description of Artificial Sequence: Synthetic oligonucleotide
  Target: LAMA2; (+) strand; PAM type: NNGRRT; PAM sequence: TAGAAT
tcaacaacagcagaatgctt

SEQ ID NO: 31512 - DNA, 20 bp, Artificial Sequence
  Description of Artificial Sequence: Synthetic oligonucleotide
  Target: LAMA2; (+) strand; PAM type: NNGRRT; PAM sequence: AAGAAT
caaccctggaggctcctgcc

SEQ ID NO: 31513 - DNA, 20 bp, Artificial Sequence
  Description of Artificial Sequence: Synthetic oligonucleotide
  Target: LAMA2; (+) strand; PAM type: NNGRRT; PAM sequence: GTGAGT
tggaggctcctgccaagaat

SEQ ID NO: 31514 - DNA, 20 bp, Artificial Sequence
  Description of Artificial Sequence: Synthetic oligonucleotide
  Target: LAMA2; (+) strand; PAM type: NNGRRT; PAM sequence: CAGGAT
tgtgccctgtgaccctgtca

SEQ ID NO: 31515 - DNA, 20 bp, Artificial Sequence
  Description of Artificial Sequence: Synthetic oligonucleotide
  Target: LAMA2; (+) strand; PAM type: NNGRRT; PAM sequence: GGGAGT
ctggcatgcacgcgagggct

SEQ ID NO: 31516 - DNA, 20 bp, Artificial Sequence
  Description of Artificial Sequence: Synthetic oligonucleotide
  Target: LAMA2; (+) strand; PAM type: NNGRRT; PAM sequence: AAGAGT
ctgtctcatttccaatgaga

SEQ ID NO: 31517 - DNA, 20 bp, Artificial Sequence
  Description of Artificial Sequence: Synthetic oligonucleotide
  Target: LAMA2; (+) strand; PAM type: NNGRRT; PAM sequence: CAGGGT
tttatttgatttgtccatct

SEQ ID NO: 31518 - DNA, 20 bp, Artificial Sequence
  Description of Artificial Sequence: Synthetic oligonucleotide
  Target: LAMA2; (+) strand; PAM type: NNGRRT; PAM sequence: GTGAGT
ctttgtgacagattaaagat

SEQ ID NO: 31519 - DNA, 20 bp, Artificial Sequence
  Description of Artificial Sequence: Synthetic oligonucleotide
  Target: LAMA2; (+) strand; PAM type: NNGRRT; PAM sequence: TAGAAT
tgtgagtgtattaaaaaatt

SEQ ID NO: 31520 - DNA, 20 bp, Artificial Sequence
  Description of Artificial Sequence: Synthetic oligonucleotide
  Target: LAMA2; (+) strand; PAM type: NNGRRT; PAM sequence: CTGAAT
ttaaaaaatttagaatcctc

SEQ ID NO: 31521 - DNA, 20 bp, Artificial Sequence
  Description of Artificial Sequence: Synthetic oligonucleotide
  Target: LAMA2; (+) strand; PAM type: NNGRRT; PAM sequence: TTGAAT
ctggacagatactttaagcc

SEQ ID NO: 31522 - DNA, 20 bp, Artificial Sequence
  Description of Artificial Sequence: Synthetic oligonucleotide
  Target: LAMA2; (+) strand; PAM type: NNGRRT; PAM sequence: CTGGAT
tctcttttttcttactgatt

SEQ ID NO: 31523 - DNA, 20 bp, Artificial Sequence
  Description of Artificial Sequence: Synthetic oligonucleotide
  Target: LAMA2; (+) strand; PAM type: NNGRRT; PAM sequence: TTGGAT
tcagtagctaaatataattc

SEQ ID NO: 31524 - DNA, 20 bp, Artificial Sequence
  Description of Artificial Sequence: Synthetic oligonucleotide
  Target: LAMA2; (+) strand; PAM type: NNGRRT; PAM sequence: AGGAGT
gttatttataaatttaagga

SEQ ID NO: 31525 - DNA, 20 bp, Artificial Sequence
  Description of Artificial Sequence: Synthetic oligonucleotide
  Target: LAMA2; (+) strand; PAM type: NNGRRT; PAM sequence: TTGAGT
ttcttgttttagcatattgt

SEQ ID NO: 31526 - DNA, 20 bp, Artificial Sequence
  Description of Artificial Sequence: Synthetic oligonucleotide
  Target: LAMA2; (+) strand; PAM type: NNGRRT; PAM sequence: AAGAAT
cttaatagtatcttaaatag

SEQ ID NO: 31527 - DNA, 20 bp, Artificial Sequence
  Description of Artificial Sequence: Synthetic oligonucleotide
  Target: LAMA2; (+) strand; PAM type: NNGRRT; PAM sequence: AAGAGT
tgtttatgttctagttttat

SEQ ID NO: 31528 - DNA, 20 bp, Artificial Sequence
  Description of Artificial Sequence: Synthetic oligonucleotide
  Target: LAMA2; (+) strand; PAM type: NNGRRT; PAM sequence: CTGGAT
gttaacctcagaagctaaag

SEQ ID NO: 31529 - DNA, 20 bp, Artificial Sequence
  Description of Artificial Sequence: Synthetic oligonucleotide
  Target: LAMA2; (+) strand; PAM type: NNGRRT; PAM sequence: CTGGGT
aatacaccaaaaagttaaga

SEQ ID NO: 31530 - DNA, 20 bp, Artificial Sequence
  Description of Artificial Sequence: Synthetic oligonucleotide
  Target: LAMA2; (+) strand; PAM type: NNGRRT; PAM sequence: TTGAAT
attcttaatgtaaacagtcc

SEQ ID NO: 31531 - DNA, 20 bp, Artificial Sequence
  Description of Artificial Sequence: Synthetic oligonucleotide
  Target: LAMA2; (+) strand; PAM type: NNGRRT; PAM sequence: TGGGGT
aacaatagtacattaaaatc

SEQ ID NO: 31532 - DNA, 20 bp, Artificial Sequence
  Description of Artificial Sequence: Synthetic oligonucleotide
  Target: LAMA2; (+) strand; PAM type: NNGRRT; PAM sequence: TGGGAT
atctggggtagataatataa

SEQ ID NO: 31533 - DNA, 20 bp, Artificial Sequence
  Description of Artificial Sequence: Synthetic oligonucleotide
  Target: LAMA2; (+) strand; PAM type: NNGRRT; PAM sequence: GAGAAT
tggggaacatttcttttaaa

SEQ ID NO: 31534 - DNA, 20 bp, Artificial Sequence
  Description of Artificial Sequence: Synthetic oligonucleotide
  Target: LAMA2; (+) strand; PAM type: NNGRRT; PAM sequence: TTGAAT
atcaatacttttttaacatt

SEQ ID NO: 31535 - DNA, 20 bp, Artificial Sequence
  Description of Artificial Sequence: Synthetic oligonucleotide
  Target: LAMA2; (+) strand; PAM type: NNGRRT; PAM sequence: GTGGGT
atcttttccctatcacatat

SEQ ID NO: 31536 - DNA, 20 bp, Artificial Sequence
  Description of Artificial Sequence: Synthetic oligonucleotide
  Target: LAMA2; (+) strand; PAM type: NNGRRT; PAM sequence: AGGGGT
ccacaaggaaatgtatttac

SEQ ID NO: 31537 - DNA, 20 bp, Artificial Sequence
  Description of Artificial Sequence: Synthetic oligonucleotide
  Target: LAMA2; (+) strand; PAM type: NNGRRT; PAM sequence: AAGAAT
agtgtttatattctttttaa

SEQ ID NO: 31538 - DNA, 20 bp, Artificial Sequence
  Description of Artificial Sequence: Synthetic oligonucleotide
  Target: LAMA2; (+) strand; PAM type: NNGRRT; PAM sequence: TAGGAT
cagaaaaaaatattaaatta

SEQ ID NO: 31539 - DNA, 20 bp, Artificial Sequence
  Description of Artificial Sequence: Synthetic oligonucleotide
  Target: LAMA2; (+) strand; PAM type: NNGRRT; PAM sequence: AGGAAT
agtgatttccacttacttct

SEQ ID NO: 31540 - DNA, 20 bp, Artificial Sequence
  Description of Artificial Sequence: Synthetic oligonucleotide
  Target: LAMA2; (+) strand; PAM type: NNGRRT; PAM sequence: AAGAAT
cctttcactaaactaactct

SEQ ID NO: 31541 - DNA, 20 bp, Artificial Sequence
  Description of Artificial Sequence: Synthetic oligonucleotide
  Target: LAMA2; (+) strand; PAM type: NNGRRT; PAM sequence: CAGAGT
taactctaagaattgttaca

SEQ ID NO: 31542 - DNA, 20 bp, Artificial Sequence
  Description of Artificial Sequence: Synthetic oligonucleotide
  Target: LAMA2; (+) strand; PAM type: NNGRRT; PAM sequence: CAGGAT
tctatgatcttggcctttcc

SEQ ID NO: 31543 - DNA, 20 bp, Artificial Sequence
  Description of Artificial Sequence: Synthetic oligonucleotide
  Target: LAMA2; (+) strand; PAM type: NNGRRT; PAM sequence: GAGGAT
agataaaataagacacaagt

SEQ ID NO: 31544 - DNA, 20 bp, Artificial Sequence
  Description of Artificial Sequence: Synthetic oligonucleotide
  Target: LAMA2; (+) strand; PAM type: NNGRRT; PAM sequence: ATGGAT
ttagtgcaagagaccaaaaa

SEQ ID NO: 31545 - DNA, 20 bp, Artificial Sequence
  Description of Artificial Sequence: Synthetic oligonucleotide
  Target: LAMA2; (+) strand; PAM type: NNGRRT; PAM sequence: TGGGGT
gaccaaaaaatggattcacc

SEQ ID NO: 31546 - DNA, 20 bp, Artificial Sequence
  Description of Artificial Sequence: Synthetic oligonucleotide
  Target: LAMA2; (+) strand; PAM type: NNGRRT; PAM sequence: TGGAAT
tttagcacatgtaatcatgg

SEQ ID NO: 31547 - DNA, 20 bp, Artificial Sequence
  Description of Artificial Sequence: Synthetic oligonucleotide
  Target: LAMA2; (+) strand; PAM type: NNGRRT; PAM sequence: GGGGGT
ggtggaattgcataaggcct

SEQ ID NO: 31548 - DNA, 20 bp, Artificial Sequence
  Description of Artificial Sequence: Synthetic oligonucleotide
  Target: LAMA2; (+) strand; PAM type: NNGRRT; PAM sequence: GAGAGT
attgcataaggcctgggggt

SEQ ID NO: 31549 - DNA, 20 bp, Artificial Sequence
  Description of Artificial Sequence: Synthetic oligonucleotide
  Target: LAMA2; (+) strand; PAM type: NNGRRT; PAM sequence: GAGAAT
aggtagcttggctctagcaa

SEQ ID NO: 31550 - DNA, 20 bp, Artificial Sequence
  Description of Artificial Sequence: Synthetic oligonucleotide
  Target: LAMA2; (+) strand; PAM type: NNGRRT; PAM sequence: TAGAAT
ataaactttctcctattgct

SEQ ID NO: 31551 - DNA, 20 bp, Artificial Sequence
  Description of Artificial Sequence: Synthetic oligonucleotide
  Target: LAMA2; (+) strand; PAM type: NNGRRT; PAM sequence: AAGAGT
tttagtagcatgtattgtac

SEQ ID NO: 31552 - DNA, 20 bp, Artificial Sequence
  Description of Artificial Sequence: Synthetic oligonucleotide
  Target: LAMA2; (+) strand; PAM type: NNGRRT; PAM sequence: ATGGAT
aatttagactgatccacatc

SEQ ID NO: 31553 - DNA, 20 bp, Artificial Sequence
  Description of Artificial Sequence: Synthetic oligonucleotide
  Target: LAMA2; (+) strand; PAM type: NNGRRT; PAM sequence: AGGAAT
gtaatttgcatattggtgaa

SEQ ID NO: 31554 - DNA, 20 bp, Artificial Sequence
  Description of Artificial Sequence: Synthetic oligonucleotide
  Target: LAMA2; (+) strand; PAM type: NNGRRT; PAM sequence: CTGGAT
gggacagttgccagtgaccc

SEQ ID NO: 31555 - DNA, 20 bp, Artificial Sequence
  Description of Artificial Sequence: Synthetic oligonucleotide
  Target: LAMA2; (+) strand; PAM type: NNGRRT; PAM sequence: CTGGAT
ccagtgacccctggatttta

SEQ ID NO: 31556 - DNA, 20 bp, Artificial Sequence
  Description of Artificial Sequence: Synthetic oligonucleotide
  Target: LAMA2; (+) strand; PAM type: NNGRRT; PAM sequence: TGGAAT
ggattttactggatccaaaa

SEQ ID NO: 31557 - DNA, 20 bp, Artificial Sequence
  Description of Artificial Sequence: Synthetic oligonucleotide
  Target: LAMA2; (+) strand; PAM type: NNGRRT; PAM sequence: GTGGAT
agcacacaggccttttatat

SEQ ID NO: 31558 - DNA, 20 bp, Artificial Sequence
  Description of Artificial Sequence: Synthetic oligonucleotide
  Target: LAMA2; (+) strand; PAM type: NNGRRT; PAM sequence: AAGAAT
ggattttcactactatcatg

SEQ ID NO: 31559 - DNA, 20 bp, Artificial Sequence
  Description of Artificial Sequence: Synthetic oligonucleotide
  Target: LAMA2; (+) strand; PAM type: NNGRRT; PAM sequence: CAGAGT
ctaaattcagccccaccatg

SEQ ID NO: 31560 - DNA, 20 bp, Artificial Sequence
  Description of Artificial Sequence: Synthetic oligonucleotide
  Target: LAMA2; (+) strand; PAM type: NNGRRT; PAM sequence: CAGGGT
ctaaagtcccttttaccaca

SEQ ID NO: 31561 - DNA, 20 bp, Artificial Sequence
  Description of Artificial Sequence: Synthetic oligonucleotide
  Target: LAMA2; (+) strand; PAM type: NNGRRT; PAM sequence: CTGAAT
cccactgtgtgataagagaa

SEQ ID NO: 31562 - DNA, 20 bp, Artificial Sequence
  Description of Artificial Sequence: Synthetic oligonucleotide
  Target: LAMA2; (+) strand; PAM type: NNGRRT; PAM sequence: ATGGGT
agtagatccgtgatttgagc

SEQ ID NO: 31563 - DNA, 20 bp, Artificial Sequence
  Description of Artificial Sequence: Synthetic oligonucleotide
  Target: LAMA2; (+) strand; PAM type: NNGRRT; PAM sequence: ATGAAT
agccagtatattcaacatta

SEQ ID NO: 31564 - DNA, 20 bp, Artificial Sequence
  Description of Artificial Sequence: Synthetic oligonucleotide
  Target: LAMA2; (+) strand; PAM type: NNGRRT; PAM sequence: CTGGGT
tgcagaagaaaagatactag

SEQ ID NO: 31565 - DNA, 20 bp, Artificial Sequence
  Description of Artificial Sequence: Synthetic oligonucleotide
  Target: LAMA2; (+) strand; PAM type: NNGRRT; PAM sequence: AGGAAT
acagcctctttttttctaaa

SEQ ID NO: 31566 - DNA, 20 bp, Artificial Sequence
  Description of Artificial Sequence: Synthetic oligonucleotide
  Target: LAMA2; (+) strand; PAM type: NNGRRT; PAM sequence: GTGAGT
ttacaatgttatgtaagttg

SEQ ID NO: 31567 - DNA, 20 bp, Artificial Sequence
  Description of Artificial Sequence: Synthetic oligonucleotide
  Target: LAMA2; (+) strand; PAM type: NNGRRT; PAM sequence: TTGGAT
agtattttgaaacacaaaac

SEQ ID NO: 31568 - DNA, 20 bp, Artificial Sequence
  Description of Artificial Sequence: Synthetic oligonucleotide
  Target: LAMA2; (+) strand; PAM type: NNGRRT; PAM sequence: CAGAAT
gtaaactcatatcattaaca

SEQ ID NO: 31569 - DNA, 20 bp, Artificial Sequence
  Description of Artificial Sequence: Synthetic oligonucleotide
  Target: LAMA2; (+) strand; PAM type: NNGRRT; PAM sequence: ATGAGT
tgtgatgtttaaaatagatt

SEQ ID NO: 31570 - DNA, 20 bp, Artificial Sequence
  Description of Artificial Sequence: Synthetic oligonucleotide
  Target: LAMA2; (+) strand; PAM type: NNGRRT; PAM sequence: TGGGGT
tatttttaatcactgcatag

SEQ ID NO: 31571 - DNA, 20 bp, Artificial Sequence
  Description of Artificial Sequence: Synthetic oligonucleotide
  Target: LAMA2; (+) strand; PAM type: NNGRRT; PAM sequence: TGGGAT
tcactgcatagtggggtttt

SEQ ID NO: 31572 - DNA, 20 bp, Artificial Sequence
  Description of Artificial Sequence: Synthetic oligonucleotide
  Target: LAMA2; (+) strand; PAM type: NNGRRT; PAM sequence: TAGAAT
atatgggagcagaaacaaaa

SEQ ID NO: 31573 - DNA, 20 bp, Artificial Sequence
  Description of Artificial Sequence: Synthetic oligonucleotide
  Target: LAMA2; (+) strand; PAM type: NNGRRT; PAM sequence: TTGAGT
gttttgttagtaaaagatat

SEQ ID NO: 31574 - DNA, 20 bp, Artificial Sequence
  Description of Artificial Sequence: Synthetic oligonucleotide
  Target: LAMA2; (+) strand; PAM type: NNGRRT; PAM sequence: TGGAAT
tggtccaggctaacaatgtg

SEQ ID NO: 31575 - DNA, 20 bp, Artificial Sequence
  Description of Artificial Sequence: Synthetic oligonucleotide
  Target: LAMA2; (+) strand; PAM type: NNGRRT; PAM sequence: AGGAGT
gctgttctgctagctgatta

SEQ ID NO: 31576 - DNA, 20 bp, Artificial Sequence
  Description of Artificial Sequence: Synthetic oligonucleotide
  Target: LAMA2; (+) strand; PAM type: NNGRRT; PAM sequence: TTGAAT
ctgattaaggagttgcacag

SEQ ID NO: 31577 - DNA, 20 bp, Artificial Sequence
  Description of Artificial Sequence: Synthetic oligonucleotide
  Target: LAMA2; (+) strand; PAM type: NNGRRT; PAM sequence: AAGAGT
ttttcagcaagttttatttg

SEQ ID NO: 31578 - DNA, 20 bp, Artificial Sequence
  Description of Artificial Sequence: Synthetic oligonucleotide
  Target: LAMA2; (+) strand; PAM type: NNGRRT; PAM sequence: ATGGAT
tcattttcatcctctgtaaa

SEQ ID NO: 31579 - DNA, 20 bp, Artificial Sequence
  Description of Artificial Sequence: Synthetic oligonucleotide
  Target: LAMA2; (+) strand; PAM type: NNGRRT; PAM sequence: GAGGAT
atttttctcatctgtaaaat

SEQ ID NO: 31580 - DNA, 20 bp, Artificial Sequence
  Description of Artificial Sequence: Synthetic oligonucleotide
  Target: LAMA2; (+) strand; PAM type: NNGRRT; PAM sequence: ATGAAT
ctcatctgtaaaatgaggat

SEQ ID NO: 31581 - DNA, 20 bp, Artificial Sequence
  Description of Artificial Sequence: Synthetic oligonucleotide
  Target: LAMA2; (+) strand; PAM type: NNGRRT; PAM sequence: TAGAAT
tatgaatggtacttacctca

SEQ ID NO: 31582 - DNA, 20 bp, Artificial Sequence
  Description of Artificial Sequence: Synthetic oligonucleotide
  Target: LAMA2; (+) strand; PAM type: NNGRRT; PAM sequence: AAGAGT
aagtttccattagtgttttg

SEQ ID NO: 31583 - DNA, 20 bp, Artificial Sequence
  Description of Artificial Sequence: Synthetic oligonucleotide
  Target: LAMA2; (+) strand; PAM type: NNGRRT; PAM sequence: TAGAAT
gttttcccatgtattatata

SEQ ID NO: 31584 - DNA, 20 bp, Artificial Sequence
  Description of Artificial Sequence: Synthetic oligonucleotide
  Target: LAMA2; (+) strand; PAM type: NNGRRT; PAM sequence: TGGAAT
aaaggtcttcttaatgactc

SEQ ID NO: 31585 - DNA, 20 bp, Artificial Sequence
  Description of Artificial Sequence: Synthetic oligonucleotide
  Target: LAMA2; (+) strand; PAM type: NNGRRT; PAM sequence: TAGAAT
agaagatatttattttaaaa

SEQ ID NO: 31586 - DNA, 20 bp, Artificial Sequence
  Description of Artificial Sequence: Synthetic oligonucleotide
  Target: LAMA2; (+) strand; PAM type: NNGRRT; PAM sequence: GAGAGT
cgtcaatggcattcatctag

SEQ ID NO: 31587 - DNA, 20 bp, Artificial Sequence
  Description of Artificial Sequence: Synthetic oligonucleotide
  Target: LAMA2; (+) strand; PAM type: NNGRRT; PAM sequence: GAGAAT
attcctatttgattagagca

SEQ ID NO: 31588 - DNA, 20 bp, Artificial Sequence
  Description of Artificial Sequence: Synthetic oligonucleotide
  Target: LAMA2; (+) strand; PAM type: NNGRRT; PAM sequence: TTGGAT
ttagcttcagcttctttggt

SEQ ID NO: 31589 - DNA, 20 bp, Artificial Sequence
  Description of Artificial Sequence: Synthetic oligonucleotide
  Target: LAMA2; (+) strand; PAM type: NNGRRT; PAM sequence: GGGAAT
gccagtagttattatgcatg

SEQ ID NO: 31590 - DNA, 20 bp, Artificial Sequence
  Description of Artificial Sequence: Synthetic oligonucleotide
  Target: LAMA2; (+) strand; PAM type: NNGRRT; PAM sequence: CTGAAT
atgtgcccagccataacaat

SEQ ID NO: 31591 - DNA, 20 bp, Artificial Sequence
  Description of Artificial Sequence: Synthetic oligonucleotide
  Target: LAMA2; (+) strand; PAM type: NNGRRT; PAM sequence: CAGGAT
ttgctcctgtgcattttagg

SEQ ID NO: 31592 - DNA, 20 bp, Artificial Sequence
  Description of Artificial Sequence: Synthetic oligonucleotide
  Target: LAMA2; (+) strand; PAM type: NNGRRT; PAM sequence: CTGAAT
ttgtaaccttattagtattg

SEQ ID NO: 31593 - DNA, 20 bp, Artificial Sequence
  Description of Artificial Sequence: Synthetic oligonucleotide
  Target: LAMA2; (+) strand; PAM type: NNGRRT; PAM sequence: GAGAAT
tattagtattgctgaatttg

SEQ ID NO: 31594 - DNA, 20 bp, Artificial Sequence
  Description of Artificial Sequence: Synthetic oligonucleotide
  Target: LAMA2; (+) strand; PAM type: NNGRRT; PAM sequence: CAGAAT
tatcaaagaacagttgttta

SEQ ID NO: 31595 - DNA, 20 bp, Artificial Sequence
  Description of Artificial Sequence: Synthetic oligonucleotide
  Target: LAMA2; (+) strand; PAM type: NNGRRT; PAM sequence: GTGAAT
agaacagttgtttacagaat

SEQ ID NO: 31596 - DNA, 20 bp, Artificial Sequence
  Description of Artificial Sequence: Synthetic oligonucleotide
  Target: LAMA2; (+) strand; PAM type: NNGRRT; PAM sequence: CAGAAT
gtaagtgaaatattttgtgt

SEQ ID NO: 31597 - DNA, 20 bp, Artificial Sequence
  Description of Artificial Sequence: Synthetic oligonucleotide
  Target: LAMA2; (+) strand; PAM type: NNGRRT; PAM sequence: TGGGAT
aatacagataccataagaca

SEQ ID NO: 31598 - DNA, 20 bp, Artificial Sequence
  Description of Artificial Sequence: Synthetic oligonucleotide
  Target: LAMA2; (+) strand; PAM type: NNGRRT; PAM sequence: TGGAAT
ttggacacagaaacataaaa

SEQ ID NO: 31599 - DNA, 20 bp, Artificial Sequence
  Description of Artificial Sequence: Synthetic oligonucleotide
  Target: LAMA2; (+) strand; PAM type: NNGRRT; PAM sequence: GGGGAT
ggaaccaaaacagatgggca

SEQ ID NO: 31600 - DNA, 20 bp, Artificial Sequence
  Description of Artificial Sequence: Synthetic oligonucleotide
  Target: LAMA2; (+) strand; PAM type: NNGRRT; PAM sequence: TAGAAT
caaaacagatgggcagggga

SEQ ID NO: 31601 - DNA, 20 bp, Artificial Sequence
  Description of Artificial Sequence: Synthetic oligonucleotide
  Target: LAMA2; (+) strand; PAM type: NNGRRT; PAM sequence: AGGAGT
atttctggaaccatctagta

SEQ ID NO: 31602 - DNA, 20 bp, Artificial Sequence
  Description of Artificial Sequence: Synthetic oligonucleotide
  Target: LAMA2; (+) strand; PAM type: NNGRRT; PAM sequence: AAGAAT
atatattattaaataaatta

SEQ ID NO: 31603 - DNA, 20 bp, Artificial Sequence
  Description of Artificial Sequence: Synthetic oligonucleotide
  Target: LAMA2; (+) strand; PAM type: NNGRRT; PAM sequence: ATGAAT
actactgctgtttttaacct

SEQ ID NO: 31604 - DNA, 20 bp, Artificial Sequence
  Description of Artificial Sequence: Synthetic oligonucleotide
  Target: LAMA2; (+) strand; PAM type: NNGRRT; PAM sequence: CTGAAT
gcagcttgaaagtctctgat

SEQ ID NO: 31605 - DNA, 20 bp, Artificial Sequence
  Description of Artificial Sequence: Synthetic oligonucleotide
  Target: LAMA2; (+) strand; PAM type: NNGRRT; PAM sequence: TGGGAT
cttcctcaaggaggctaacc

SEQ ID NO: 31606 - DNA, 20 bp, Artificial Sequence
  Description of Artificial Sequence: Synthetic oligonucleotide
  Target: LAMA2; (+) strand; PAM type: NNGRRT; PAM sequence: AGGGGT
gggattgttctgaaggcagc

SEQ ID NO: 31607 - DNA, 20 bp, Artificial Sequence
  Description of Artificial Sequence: Synthetic oligonucleotide
  Target: LAMA2; (+) strand; PAM type: NNGRRT; PAM sequence: AAGAGT
tctgaaggcagcaggggtcc

SEQ ID NO: 31608 - DNA, 20 bp, Artificial Sequence
  Description of Artificial Sequence: Synthetic oligonucleotide
  Target: LAMA2; (+) strand; PAM type: NNGRRT; PAM sequence: CAGAGT
ctctgccacattctgttggt

SEQ ID NO: 31609 - DNA, 20 bp, Artificial Sequence
  Description of Artificial Sequence: Synthetic oligonucleotide
  Target: LAMA2; (+) strand; PAM type: NNGRRT; PAM sequence: TGGAGT
ttttttttttttttttgaga

SEQ ID NO: 31610 - DNA, 20 bp, Artificial Sequence
  Description of Artificial Sequence: Synthetic oligonucleotide
  Target: LAMA2; (+) strand; PAM type: NNGRRT; PAM sequence: CTGGGT
ctcactgcagcctctacctc

SEQ ID NO: 31611 - DNA, 20 bp, Artificial Sequence
  Description of Artificial Sequence: Synthetic oligonucleotide
  Target: LAMA2; (+) strand; PAM type: NNGRRT; PAM sequence: CCGAGT
gatactcctccctcagcctc

SEQ ID NO: 31612 - DNA, 20 bp, Artificial Sequence
  Description of Artificial Sequence: Synthetic oligonucleotide
  Target: LAMA2; (+) strand; PAM type: NNGRRT; PAM sequence: TGGGGT
ttttgtatttttagtagaga

SEQ ID NO: 31613 - DNA, 20 bp, Artificial Sequence
  Description of Artificial Sequence: Synthetic oligonucleotide
  Target: LAMA2; (+) strand; PAM type: NNGRRT; PAM sequence: TTGGAT
tctcaagcctcccatactgc

SEQ ID NO: 31614 - DNA, 20 bp, Artificial Sequence
  Description of Artificial Sequence: Synthetic oligonucleotide
  Target: LAMA2; (+) strand; PAM type: NNGRRT; PAM sequence: CTGAGT
cccgtccatctctccctttc

SEQ ID NO: 31615 - DNA, 20 bp, Artificial Sequence
  Description of Artificial Sequence: Synthetic oligonucleotide
  Target: LAMA2; (+) strand; PAM type: NNGRRT; PAM sequence: CTGAAT
gaaatccttcaggcaggtat

SEQ ID NO: 31616 - DNA, 20 bp, Artificial Sequence
  Description of Artificial Sequence: Synthetic oligonucleotide
  Target: LAMA2; (+) strand; PAM type: NNGRRT; PAM sequence: CTGAAT
tattagcccacaaatattta

SEQ ID NO: 31617 - DNA, 20 bp, Artificial Sequence
  Description of Artificial Sequence: Synthetic oligonucleotide
  Target: LAMA2; (+) strand; PAM type: NNGRRT; PAM sequence: AAGAAT
cccttctttaacgaggaaga

SEQ ID NO: 31618 - DNA, 20 bp, Artificial Sequence
  Description of Artificial Sequence: Synthetic oligonucleotide
  Target: LAMA2; (+) strand; PAM type: NNGRRT; PAM sequence: CAGGGT
aaatgcagtagtgactggcg

SEQ ID NO: 31619 - DNA, 20 bp, Artificial Sequence
  Description of Artificial Sequence: Synthetic oligonucleotide
  Target: LAMA2; (+) strand; PAM type: NNGRRT; PAM sequence: GGGGGT
ctggcgcagggtatagggct

SEQ ID NO: 31620 - DNA, 20 bp, Artificial Sequence
  Description of Artificial Sequence: Synthetic oligonucleotide
  Target: LAMA2; (+) strand; PAM type: NNGRRT; PAM sequence: GGGAGT
gtatagggctgggggtggtg

SEQ ID NO: 31621 - DNA, 20 bp, Artificial Sequence
  Description of Artificial Sequence: Synthetic oligonucleotide
  Target: LAMA2; (+) strand; PAM type: NNGRRT; PAM sequence: TAGAAT
gtttcaggtaacagtaattt

SEQ ID NO: 31622 - DNA, 20 bp, Artificial Sequence
  Description of Artificial Sequence: Synthetic oligonucleotide
  Target: LAMA2; (+) strand; PAM type: NNGRRT; PAM sequence: AAGAAT
gtgggagaagaccaagggag

SEQ ID NO: 31623 - DNA, 20 bp, Artificial Sequence
  Description of Artificial Sequence: Synthetic oligonucleotide
  Target: LAMA2; (+) strand; PAM type: NNGRRT; PAM sequence: TGGAAT
ctacatggtttttcaattac

SEQ ID NO: 31624 - DNA, 20 bp, Artificial Sequence
  Description of Artificial Sequence: Synthetic oligonucleotide
  Target: LAMA2; (+) strand; PAM type: NNGRRT; PAM sequence: GAGGAT
acttggggaagctgaggtgg

SEQ ID NO: 31625 - DNA, 20 bp, Artificial Sequence
  Description of Artificial Sequence: Synthetic oligonucleotide
  Target: LAMA2; (+) strand; PAM type: NNGRRT; PAM sequence: AGGAGT
tgggaggatcacttgaggcc

SEQ ID NO: 31626 - DNA, 20 bp, Artificial Sequence
  Description of Artificial Sequence: Synthetic oligonucleotide
  Target: LAMA2; (+) strand; PAM type: NNGRRT; PAM sequence: CTGGAT
tctctatgttaaaaaactag

SEQ ID NO: 31627 - DNA, 20 bp, Artificial Sequence
  Description of Artificial Sequence: Synthetic oligonucleotide
  Target: LAMA2; (+) strand; PAM type: NNGRRT; PAM sequence: GAGGAT
cactcgggaggctgaggcag

SEQ ID NO: 31628 - DNA, 20 bp, Artificial Sequence
  Description of Artificial Sequence: Synthetic oligonucleotide
  Target: LAMA2; (+) strand; PAM type: NNGRRT; PAM sequence: AGGAGT
caggaggatcactttagccc

SEQ ID NO: 31629 - DNA, 20 bp, Artificial Sequence
  Description of Artificial Sequence: Synthetic oligonucleotide
  Target: LAMA2; (+) strand; PAM type: NNGRRT; PAM sequence: GTGAGT
cccaggagtttgaggccgca

SEQ ID NO: 31630 - DNA, 20 bp, Artificial Sequence
  Description of Artificial Sequence: Synthetic oligonucleotide
  Target: LAMA2; (+) strand; PAM type: NNGRRT; PAM sequence: ATGGGT
tcacaccactgtactccagc

SEQ ID NO: 31631 - DNA, 20 bp, Artificial Sequence
  Description of Artificial Sequence: Synthetic oligonucleotide
  Target: LAMA2; (+) strand; PAM type: NNGRRT; PAM sequence: TGGGGT
agattctgatttcctagatc

SEQ ID NO: 31632 - DNA, 20 bp, Artificial Sequence
  Description of Artificial Sequence: Synthetic oligonucleotide
  Target: LAMA2; (+) strand; PAM type: NNGRRT; PAM sequence: GGGGGT
ctcctgattcagaaatacta

SEQ ID NO: 31633 - DNA, 20 bp, Artificial Sequence
  Description of Artificial Sequence: Synthetic oligonucleotide
  Target: LAMA2; (+) strand; PAM type: NNGRRT; PAM sequence: TAGGAT
gggggtgtggaccagccctc

SEQ ID NO: 31634 - DNA, 20 bp, Artificial Sequence
  Description of Artificial Sequence: Synthetic oligonucleotide
  Target: LAMA2; (+) strand; PAM type: NNGRRT; PAM sequence: GTGGAT
taaagcttgagaaccagact

SEQ ID NO: 31635 - DNA, 20 bp, Artificial Sequence
  Description of Artificial Sequence: Synthetic oligonucleotide
  Target: LAMA2; (+) strand; PAM type: NNGRRT; PAM sequence: CTGAGT
acagtcaatttggcacttaa

SEQ ID NO: 31636 - DNA, 20 bp, Artificial Sequence
  Description of Artificial Sequence: Synthetic oligonucleotide
  Target: LAMA2; (+) strand; PAM type: NNGRRT; PAM sequence: AAGAGT
ggtttcattctggctaggag

SEQ ID NO: 31637 - DNA, 20 bp, Artificial Sequence
  Description of Artificial Sequence: Synthetic oligonucleotide
  Target: LAMA2; (+) strand; PAM type: NNGRRT; PAM sequence: TTGAAT
actgctgtttagagacctaa

SEQ ID NO: 31638 - DNA, 20 bp, Artificial Sequence
  Description of Artificial Sequence: Synthetic oligonucleotide
  Target: LAMA2; (+) strand; PAM type: NNGRRT; PAM sequence: CAGAAT
agcattgatacctctatctg

SEQ ID NO: 31639 - DNA, 20 bp, Artificial Sequence
  Description of Artificial Sequence: Synthetic oligonucleotide
  Target: LAMA2; (+) strand; PAM type: NNGRRT; PAM sequence: GAGAGT
gaaattgtaactgtatacat

SEQ ID NO: 31640 - DNA, 20 bp, Artificial Sequence
  Description of Artificial Sequence: Synthetic oligonucleotide
  Target: LAMA2; (+) strand; PAM type: NNGRRT; PAM sequence: AAGAGT
atgagatctattccataatg

SEQ ID NO: 31641 - DNA, 20 bp, Artificial Sequence
  Description of Artificial Sequence: Synthetic oligonucleotide
  Target: LAMA2; (+) strand; PAM type: NNGRRT; PAM sequence: TTGAAT
cctggcccctaccaccaaat

SEQ ID NO: 31642 - DNA, 20 bp, Artificial Sequence
  Description of Artificial Sequence: Synthetic oligonucleotide
  Target: LAMA2; (+) strand; PAM type: NNGRRT; PAM sequence: GTGAGT
tgatggccaaaaatattatg

SEQ ID NO: 31643 - DNA, 20 bp, Artificial Sequence
  Description of Artificial Sequence: Synthetic oligonucleotide
  Target: LAMA2; (+) strand; PAM type: NNGRRT; PAM sequence: TGGGGT
ggctgtacaggaagcatggc

SEQ ID NO: 31644 - DNA, 20 bp, Artificial Sequence
  Description of Artificial Sequence: Synthetic oligonucleotide
  Target: LAMA2; (+) strand; PAM type: NNGRRT; PAM sequence: GGGGAT
gaggccccatatccagtatt

SEQ ID NO: 31645 - DNA, 20 bp, Artificial Sequence
  Description of Artificial Sequence: Synthetic oligonucleotide
  Target: LAMA2; (+) strand; PAM type: NNGRRT; PAM sequence: TTGGAT
atgacatttcaatatgagat

SEQ ID NO: 31646 - DNA, 20 bp, Artificial Sequence
  Description of Artificial Sequence: Synthetic oligonucleotide
  Target: LAMA2; (+) strand; PAM type: NNGRRT; PAM sequence: TAGAAT
cagatccaaaccatatctgg

SEQ ID NO: 31647 - DNA, 20 bp, Artificial Sequence
  Description of Artificial Sequence: Synthetic oligonucleotide
  Target: LAMA2; (+) strand; PAM type: NNGRRT; PAM sequence: AAGAAT
ttagcattcttggctactta

SEQ ID NO: 31648 - DNA, 20 bp, Artificial Sequence
  Description of Artificial Sequence: Synthetic oligonucleotide
  Target: LAMA2; (+) strand; PAM type: NNGRRT; PAM sequence: AGGGAT
aagaggttaatcatcaaagt

SEQ ID NO: 31649 - DNA, 20 bp, Artificial Sequence
  Description of Artificial Sequence: Synthetic oligonucleotide
  Target: LAMA2; (+) strand; PAM type: NNGRRT; PAM sequence: ATGGGT
ttgtgagactgcatctaatc

SEQ ID NO: 31650 - DNA, 20 bp, Artificial Sequence
  Description of Artificial Sequence: Synthetic oligonucleotide
  Target: LAMA2; (+) strand; PAM type: NNGRRT; PAM sequence: AGGGAT
catgggtggtaatagactga

SEQ ID NO: 31651 - DNA, 20 bp, Artificial Sequence
  Description of Artificial Sequence: Synthetic oligonucleotide
  Target: LAMA2; (+) strand; PAM type: NNGRRT; PAM sequence: GGGGGT
actttttattttattttttg

SEQ ID NO: 31652 - DNA, 20 bp, Artificial Sequence
  Description of Artificial Sequence: Synthetic oligonucleotide
  Target: LAMA2; (+) strand; PAM type: NNGRRT; PAM sequence: TGGAGT
ttattttattttttgggggg

SEQ ID NO: 31653 - DNA, 20 bp, Artificial Sequence
  Description of Artificial Sequence: Synthetic oligonucleotide
  Target: LAMA2; (+) strand; PAM type: NNGRRT; PAM sequence: TGGAGT
tctcagtctgtcgcccaggc

SEQ ID NO: 31654 - DNA, 20 bp, Artificial Sequence
  Description of Artificial Sequence: Synthetic oligonucleotide
  Target: LAMA2; (+) strand; PAM type: NNGRRT; PAM sequence: CTGGGT
gattctcctgcctcagcctt

SEQ ID NO: 31655 - DNA, 20 bp, Artificial Sequence
  Description of Artificial Sequence: Synthetic oligonucleotide
  Target: LAMA2; (+) strand; PAM type: NNGRRT; PAM sequence: CAGGGT
ttttgtatttttagtagaga

SEQ ID NO: 31656 - DNA, 20 bp, Artificial Sequence
  Description of Artificial Sequence: Synthetic oligonucleotide
  Target: LAMA2; (+) strand; PAM type: NNGRRT; PAM sequence: TGGGAT
acctcggcctctcaaagtgt

SEQ ID NO: 31657 - DNA, 20 bp, Artificial Sequence
  Description of Artificial Sequence: Synthetic oligonucleotide
  Target: LAMA2; (+) strand; PAM type: NNGRRT; PAM sequence: TTGAAT
gctaaaaatttatatacttt

SEQ ID NO: 31658 - DNA, 20 bp, Artificial Sequence
  Description of Artificial Sequence: Synthetic oligonucleotide
  Target: LAMA2; (+) strand; PAM type: NNGRRT; PAM sequence: AGGGAT
ttcctttcgattgctcatgt

SEQ ID NO: 31659 - DNA, 20 bp, Artificial Sequence
  Description of Artificial Sequence: Synthetic oligonucleotide
  Target: LAMA2; (+) strand; PAM type: NNGRRT; PAM sequence: GGGGGT
attgctcatgtagggattta

SEQ ID NO: 31660 - DNA, 20 bp, Artificial Sequence
  Description of Artificial Sequence: Synthetic oligonucleotide
  Target: LAMA2; (+) strand; PAM type: NNGRRT; PAM sequence: ATGAGT
gatagcattaatattctgag

SEQ ID NO: 31661 - DNA, 20 bp, Artificial Sequence
  Description of Artificial Sequence: Synthetic oligonucleotide
  Target: LAMA2; (+) strand; PAM type: NNGRRT; PAM sequence: TGGAAT
atgagtagtttcatcttcca

SEQ ID NO: 31662 - DNA, 20 bp, Artificial Sequence
  Description of Artificial Sequence: Synthetic oligonucleotide
  Target: LAMA2; (+) strand; PAM type: NNGRRT; PAM sequence: CTGAAT
gaccataaaatatttcatag

SEQ ID NO: 31663 - DNA, 20 bp, Artificial Sequence
  Description of Artificial Sequence: Synthetic oligonucleotide
  Target: LAMA2; (+) strand; PAM type: NNGRRT; PAM sequence: TGGGAT
gaattctttgaacatctgcc

SEQ ID NO: 31664 - DNA, 20 bp, Artificial Sequence
  Description of Artificial Sequence: Synthetic oligonucleotide
  Target: LAMA2; (+) strand; PAM type: NNGRRT; PAM sequence: ATGAGT
ctctttcacagtttgtggag

SEQ ID NO: 31665 - DNA, 20 bp, Artificial Sequence
  Description of Artificial Sequence: Synthetic oligonucleotide
  Target: LAMA2; (+) strand; PAM type: NNGRRT; PAM sequence: AAGAGT
acagatttctattaagggaa

SEQ ID NO: 31666 - DNA, 20 bp, Artificial Sequence
  Description of Artificial Sequence: Synthetic oligonucleotide
  Target: LAMA2; (+) strand; PAM type: NNGRRT; PAM sequence: CTGAAT
ataaagtaacatgattttgg

SEQ ID NO: 31667 - DNA, 20 bp, Artificial Sequence
  Description of Artificial Sequence: Synthetic oligonucleotide
  Target: LAMA2; (+) strand; PAM type: NNGRRT; PAM sequence: AAGAAT
tggaaattgctgcttgcaac

SEQ ID NO: 31668 - DNA, 20 bp, Artificial Sequence
  Description of Artificial Sequence: Synthetic oligonucleotide
  Target: LAMA2; (+) strand; PAM type: NNGRRT; PAM sequence: TAGGAT
attgctgcttgcaacaagaa

SEQ ID NO: 31669 - DNA, 20 bp, Artificial Sequence
  Description of Artificial Sequence: Synthetic oligonucleotide
  Target: LAMA2; (+) strand; PAM type: NNGRRT; PAM sequence: AAGGGT
gaaccagagagccccctaca

SEQ ID NO: 31670 - DNA, 20 bp, Artificial Sequence
  Description of Artificial Sequence: Synthetic oligonucleotide
  Target: LAMA2; (+) strand; PAM type: NNGRRT; PAM sequence: ATGAAT
cccctacaaagggtcctgaa

SEQ ID NO: 31671 - DNA, 20 bp, Artificial Sequence
  Description of Artificial Sequence: Synthetic oligonucleotide
  Target: LAMA2; (+) strand; PAM type: NNGRRT; PAM sequence: TGGGAT
catctctcaggtgcctagcc

SEQ ID NO: 31672 - DNA, 20 bp, Artificial Sequence
  Description of Artificial Sequence: Synthetic oligonucleotide
  Target: LAMA2; (+) strand; PAM type: NNGRRT; PAM sequence: TAGAAT
tcaaaatgaaaacacatgat

SEQ ID NO: 31673 - DNA, 20 bp, Artificial Sequence
  Description of Artificial Sequence: Synthetic oligonucleotide
  Target: LAMA2; (+) strand; PAM type: NNGRRT; PAM sequence: TGGGGT
ggagaaaacattaaagaaat

SEQ ID NO: 31674 - DNA, 20 bp, Artificial Sequence
  Description of Artificial Sequence: Synthetic oligonucleotide
  Target: LAMA2; (+) strand; PAM type: NNGRRT; PAM sequence: TAGAAT
agatatttattaagaaatta

SEQ ID NO: 31675 - DNA, 20 bp, Artificial Sequence
  Description of Artificial Sequence: Synthetic oligonucleotide
  Target: LAMA2; (+) strand; PAM type: NNGRRT; PAM sequence: GGGGAT
agcattgcacttggttccct

SEQ ID NO: 31676 - DNA, 20 bp, Artificial Sequence
  Description of Artificial Sequence: Synthetic oligonucleotide
  Target: LAMA2; (+) strand; PAM type: NNGRRT; PAM sequence: AAGAAT
acaataatcaagcaattagc

SEQ ID NO: 31677 - DNA, 20 bp, Artificial Sequence
  Description of Artificial Sequence: Synthetic oligonucleotide
  Target: LAMA2; (+) strand; PAM type: NNGRRT; PAM sequence: CAGGGT
ctggagaaatcagtaagatt

SEQ ID NO: 31678 - DNA, 20 bp, Artificial Sequence
  Description of Artificial Sequence: Synthetic oligonucleotide
  Target: LAMA2; (+) strand; PAM type: NNGRRT; PAM sequence: GAGAAT
agtaagattcagggtaacca

SEQ ID NO: 31679 - DNA, 20 bp, Artificial Sequence
  Description of Artificial Sequence: Synthetic oligonucleotide
  Target: LAMA2; (+) strand; PAM type: NNGRRT; PAM sequence: GAGAGT
ccagagaatgtaccattact

SEQ ID NO: 31680 - DNA, 20 bp, Artificial Sequence
  Description of Artificial Sequence: Synthetic oligonucleotide
  Target: LAMA2; (+) strand; PAM type: NNGRRT; PAM sequence: TGGAAT
actgagagtataatttctgt

SEQ ID NO: 31681 - DNA, 20 bp, Artificial Sequence
  Description of Artificial Sequence: Synthetic oligonucleotide
  Target: LAMA2; (+) strand; PAM type: NNGRRT; PAM sequence: AAGAAT
aaaccaataatgatgataac

SEQ ID NO: 31682 - DNA, 20 bp, Artificial Sequence
  Description of Artificial Sequence: Synthetic oligonucleotide
  Target: LAMA2; (+) strand; PAM type: NNGRRT; PAM sequence: ATGGAT
gcaattgactgaagtcttaa

SEQ ID NO: 31683 - DNA, 20 bp, Artificial Sequence
  Description of Artificial Sequence: Synthetic oligonucleotide
  Target: LAMA2; (+) strand; PAM type: NNGRRT; PAM sequence: CTGAAT
aggaaagaagttgtcatggt

SEQ ID NO: 31684 - DNA, 20 bp, Artificial Sequence
  Description of Artificial Sequence: Synthetic oligonucleotide
  Target: LAMA2; (+) strand; PAM type: NNGRRT; PAM sequence: GAGGGT
gtgaaggcctgttcctcaca

SEQ ID NO: 31685 - DNA, 20 bp, Artificial Sequence
  Description of Artificial Sequence: Synthetic oligonucleotide
  Target: LAMA2; (+) strand; PAM type: NNGRRT; PAM sequence: CTGGAT
acatttaattcatttaatat

SEQ ID NO: 31686 - DNA, 20 bp, Artificial Sequence
  Description of Artificial Sequence: Synthetic oligonucleotide
  Target: LAMA2; (+) strand; PAM type: NNGRRT; PAM sequence: AAGGAT
aatatctggatactgaggaa

SEQ ID NO: 31687 - DNA, 20 bp, Artificial Sequence
  Description of Artificial Sequence: Synthetic oligonucleotide
  Target: LAMA2; (+) strand; PAM type: NNGRRT; PAM sequence: TGGGGT
gaaaaggatagctagctctc

SEQ ID NO: 31688 - DNA, 20 bp, Artificial Sequence
  Description of Artificial Sequence: Synthetic oligonucleotide
  Target: LAMA2; (+) strand; PAM type: NNGRRT; PAM sequence: TAGGAT
aatatcatcacattgggaac

SEQ ID NO: 31689 - DNA, 20 bp, Artificial Sequence
  Description of Artificial Sequence: Synthetic oligonucleotide
  Target: LAMA2; (+) strand; PAM type: NNGRRT; PAM sequence: ATGGAT
gggaactaggatgtcaacac

SEQ ID NO: 31690 - DNA, 20 bp, Artificial Sequence
  Description of Artificial Sequence: Synthetic oligonucleotide
  Target: LAMA2; (+) strand; PAM type: NNGRRT; PAM sequence: GTGAAT
atgtgagcagaggcagtggt

SEQ ID NO: 31691 - DNA, 20 bp, Artificial Sequence
  Description of Artificial Sequence: Synthetic oligonucleotide
  Target: LAMA2; (+) strand; PAM type: NNGRRT; PAM sequence: CAGGGT
ggctggagacttcagtgagg

SEQ ID NO: 31692 - DNA, 20 bp, Artificial Sequence
  Description of Artificial Sequence: Synthetic oligonucleotide
  Target: LAMA2; (+) strand; PAM type: NNGRRT; PAM sequence: CTGAGT
tgaaagccaggcagaggaac

SEQ ID NO: 31693 - DNA, 20 bp, Artificial Sequence
  Description of Artificial Sequence: Synthetic oligonucleotide
  Target: LAMA2; (+) strand; PAM type: NNGRRT; PAM sequence: AAGAGT
tcctggtattcagggaagtg

SEQ ID NO: 31694 - DNA, 20 bp, Artificial Sequence
  Description of Artificial Sequence: Synthetic oligonucleotide
  Target: LAMA2; (+) strand; PAM type: NNGRRT; PAM sequence: AAGAAT
aagtgaagagttttaatgaa

SEQ ID NO: 31695 - DNA, 20 bp, Artificial Sequence
  Description of Artificial Sequence: Synthetic oligonucleotide
  Target: LAMA2; (+) strand; PAM type: NNGRRT; PAM sequence: GAGAAT
ttattttccttgtatatgga

SEQ ID NO: 31696 - DNA, 20 bp, Artificial Sequence
  Description of Artificial Sequence: Synthetic oligonucleotide
  Target: LAMA2; (+) strand; PAM type: NNGRRT; PAM sequence: ATGGAT
ttaaaactaatacttaagca

SEQ ID NO: 31697 - DNA, 20 bp, Artificial Sequence
  Description of Artificial Sequence: Synthetic oligonucleotide
  Target: LAMA2; (+) strand; PAM type: NNGRRT; PAM sequence: GAGGAT
gcaatggatgatgaagtaaa

SEQ ID NO: 31698 - DNA, 20 bp, Artificial Sequence
  Description of Artificial Sequence: Synthetic oligonucleotide
  Target: LAMA2; (+) strand; PAM type: NNGRRT; PAM sequence: AGGGAT
tgtgaacatcttctaagcca

SEQ ID NO: 31699 - DNA, 20 bp, Artificial Sequence
  Description of Artificial Sequence: Synthetic oligonucleotide
  Target: LAMA2; (+) strand; PAM type: NNGRRT; PAM sequence: CTGGAT
agtgacccatccacttctgg

SEQ ID NO: 31700 - DNA, 20 bp, Artificial Sequence
  Description of Artificial Sequence: Synthetic oligonucleotide
  Target: LAMA2; (+) strand; PAM type: NNGRRT; PAM sequence: CTGGAT
tggatattgatccagatgac

SEQ ID NO: 31701 - DNA, 20 bp, Artificial Sequence
  Description of Artificial Sequence: Synthetic oligonucleotide
  Target: LAMA2; (+) strand; PAM type: NNGRRT; PAM sequence: GAGGAT
tcacttgacatttgtatact

SEQ ID NO: 31702 - DNA, 20 bp, Artificial Sequence
  Description of Artificial Sequence: Synthetic oligonucleotide
  Target: LAMA2; (+) strand; PAM type: NNGRRT; PAM sequence: TGGGAT
acacatgtgatggaacaaag

SEQ ID NO: 31703 - DNA, 20 bp, Artificial Sequence
  Description of Artificial Sequence: Synthetic oligonucleotide
  Target: LAMA2; (+) strand; PAM type: NNGRRT; PAM sequence: GGGAAT
aggggcactgaacaccatgg

SEQ ID NO: 31704 - DNA, 20 bp, Artificial Sequence
  Description of Artificial Sequence: Synthetic oligonucleotide
  Target: LAMA2; (+) strand; PAM type: NNGRRT; PAM sequence: AGGAAT
tgtctcaataagaaggtgtt

SEQ ID NO: 31705 - DNA, 20 bp, Artificial Sequence
  Description of Artificial Sequence: Synthetic oligonucleotide
  Target: LAMA2; (+) strand; PAM type: NNGRRT; PAM sequence: CTGGGT
aacttaaggttagcactcaa

SEQ ID NO: 31706 - DNA, 20 bp, Artificial Sequence
  Description of Artificial Sequence: Synthetic oligonucleotide
  Target: LAMA2; (+) strand; PAM type: NNGRRT; PAM sequence: GGGAGT
actgggtgctattcagaagt

SEQ ID NO: 31707 - DNA, 20 bp, Artificial Sequence
  Description of Artificial Sequence: Synthetic oligonucleotide
  Target: LAMA2; (+) strand; PAM type: NNGRRT; PAM sequence: GTGAGT
tcagaagtgggagtaattct

SEQ ID NO: 31708 - DNA, 20 bp, Artificial Sequence
  Description of Artificial Sequence: Synthetic oligonucleotide
  Target: LAMA2; (+) strand; PAM type: NNGRRT; PAM sequence: GTGAAT
agtaattctgtgagtatttt

SEQ ID NO: 31709 - DNA, 20 bp, Artificial Sequence
  Description of Artificial Sequence: Synthetic oligonucleotide
  Target: LAMA2; (+) strand; PAM type: NNGRRT; PAM sequence: GAGGAT
gagggaaggaagaacagagg

SEQ ID NO: 31710 - DNA, 20 bp, Artificial Sequence
  Description of Artificial Sequence: Synthetic oligonucleotide
  Target: LAMA2; (+) strand; PAM type: NNGRRT; PAM sequence: TGGGGT
ttagccaggaaatgggaggt

SEQ ID NO: 31711 - DNA, 20 bp, Artificial Sequence
  Description of Artificial Sequence: Synthetic oligonucleotide
  Target: LAMA2; (+) strand; PAM type: NNGRRT; PAM sequence: CAGGGT
ttgtctgcgcttagacatta

SEQ ID NO: 31712 - DNA, 20 bp, Artificial Sequence
  Description of Artificial Sequence: Synthetic oligonucleotide
  Target: LAMA2; (+) strand; PAM type: NNGRRT; PAM sequence: CAGAGT
tgtttcattcatcactggtt

SEQ ID NO: 31713 - DNA, 20 bp, Artificial Sequence
  Description of Artificial Sequence: Synthetic oligonucleotide
  Target: LAMA2; (+) strand; PAM type: NNGRRT; PAM sequence: TGGAAT
tgatctgtgtctctgttaat

SEQ ID NO: 31714 - DNA, 20 bp, Artificial Sequence
  Description of Artificial Sequence: Synthetic oligonucleotide
  Target: LAMA2; (+) strand; PAM type: NNGRRT; PAM sequence: AGGAGT
agccttaaatgggccaggca

SEQ ID NO: 31715 - DNA, 20 bp, Artificial Sequence
  Description of Artificial Sequence: Synthetic oligonucleotide
  Target: LAMA2; (+) strand; PAM type: NNGRRT; PAM sequence: TGGAAT
cagtttgctctttcatgaaa

SEQ ID NO: 31716 - DNA, 20 bp, Artificial Sequence
  Description of Artificial Sequence: Synthetic oligonucleotide
  Target: LAMA2; (+) strand; PAM type: NNGRRT; PAM sequence: CTGAAT
ctgcaatttttattatttgc

SEQ ID NO: 31717 - DNA, 20 bp, Artificial Sequence
  Description of Artificial Sequence: Synthetic oligonucleotide
  Target: LAMA2; (+) strand; PAM type: NNGRRT; PAM sequence: TGGGAT
ccatttactaaaaatgttta

SEQ ID NO: 31718 - DNA, 20 bp, Artificial Sequence
  Description of Artificial Sequence: Synthetic oligonucleotide
  Target: LAMA2; (+) strand; PAM type: NNGRRT; PAM sequence: TGGAAT
tactaaaaatgtttatggga

SEQ ID NO: 31719 - DNA, 20 bp, Artificial Sequence
  Description of Artificial Sequence: Synthetic oligonucleotide
  Target: LAMA2; (+) strand; PAM type: NNGRRT; PAM sequence: CTGAAT
ttcagctggcagagggcaat

SEQ ID NO: 31720 - DNA, 20 bp, Artificial Sequence
  Description of Artificial Sequence: Synthetic oligonucleotide
  Target: LAMA2; (+) strand; PAM type: NNGRRT; PAM sequence: CAGGGT
gaaatgaacgagctgctgac

SEQ ID NO: 31721 - DNA, 20 bp, Artificial Sequence
  Description of Artificial Sequence: Synthetic oligonucleotide
  Target: LAMA2; (+) strand; PAM type: NNGRRT; PAM sequence: ATGAAT
cagggtaaggtggcaaaatt

SEQ ID NO: 31722 - DNA, 20 bp, Artificial Sequence
  Description of Artificial Sequence: Synthetic oligonucleotide
  Target: LAMA2; (+) strand; PAM type: NNGRRT; PAM sequence: GGGGAT
cagtagcacgcagaaaaatt

SEQ ID NO: 31723 - DNA, 20 bp, Artificial Sequence
  Description of Artificial Sequence: Synthetic oligonucleotide
  Target: LAMA2; (+) strand; PAM type: NNGRRT; PAM sequence: CAGAAT
ttgtcaatggctaaaaagtc

SEQ ID NO: 31724 - DNA, 20 bp, Artificial Sequence
  Description of Artificial Sequence: Synthetic oligonucleotide
  Target: LAMA2; (+) strand; PAM type: NNGRRT; PAM sequence: TGGGAT
tggtctctttcatctcatcg

SEQ ID NO: 31725 - DNA, 20 bp, Artificial Sequence
  Description of Artificial Sequence: Synthetic oligonucleotide
  Target: LAMA2; (+) strand; PAM type: NNGRRT; PAM sequence: CAGAAT
cttaagacactttttaaagt

SEQ ID NO: 31726 - DNA, 20 bp, Artificial Sequence
  Description of Artificial Sequence: Synthetic oligonucleotide
  Target: LAMA2; (+) strand; PAM type: NNGRRT; PAM sequence: AAGAAT
tgcatttatcaggcttttta

SEQ ID NO: 31727 - DNA, 20 bp, Artificial Sequence
  Description of Artificial Sequence: Synthetic oligonucleotide
  Target: LAMA2; (+) strand; PAM type: NNGRRT; PAM sequence: GAGAAT
ttaaaaactttttgcagtta

SEQ ID NO: 31728 - DNA, 20 bp, Artificial Sequence
  Description of Artificial Sequence: Synthetic oligonucleotide
  Target: LAMA2; (+) strand; PAM type: NNGRRT; PAM sequence: ACGGAT
tagaaacggggctgcaaagt

SEQ ID NO: 31729 - DNA, 20 bp, Artificial Sequence
  Description of Artificial Sequence: Synthetic oligonucleotide
  Target: LAMA2; (+) strand; PAM type: NNGRRT; PAM sequence: AAGAGT
tctaagagctttaaatgata

SEQ ID NO: 31730 - DNA, 20 bp, Artificial Sequence
  Description of Artificial Sequence: Synthetic oligonucleotide
  Target: LAMA2; (+) strand; PAM type: NNGRRT; PAM sequence: GGGGAT
attggagctagaaggttcct

SEQ ID NO: 31731 - DNA, 20 bp, Artificial Sequence
  Description of Artificial Sequence: Synthetic oligonucleotide
  Target: LAMA2; (+) strand; PAM type: NNGRRT; PAM sequence: TCGAGT
tagaaggttcctggggatta

SEQ ID NO: 31732 - DNA, 20 bp, Artificial Sequence
  Description of Artificial Sequence: Synthetic oligonucleotide
  Target: LAMA2; (+) strand; PAM type: NNGRRT; PAM sequence: ACGAAT
cctcgggccatgacagtgaa

SEQ ID NO: 31733 - DNA, 20 bp, Artificial Sequence
  Description of Artificial Sequence: Synthetic oligonucleotide
  Target: LAMA2; (+) strand; PAM type: NNGRRT; PAM sequence: CAGAAT
tagcatactaaacacttttt

SEQ ID NO: 31734 - DNA, 20 bp, Artificial Sequence
  Description of Artificial Sequence: Synthetic oligonucleotide
  Target: LAMA2; (+) strand; PAM type: NNGRRT; PAM sequence: TAGAAT
agaatctcatagcaacaata

SEQ ID NO: 31735 - DNA, 20 bp, Artificial Sequence
  Description of Artificial Sequence: Synthetic oligonucleotide
  Target: LAMA2; (+) strand; PAM type: NNGRRT; PAM sequence: CGGAGT
tagaatgtacagatacaaca

SEQ ID NO: 31736 - DNA, 20 bp, Artificial Sequence
  Description of Artificial Sequence: Synthetic oligonucleotide
  Target: LAMA2; (+) strand; PAM type: NNGRRT; PAM sequence: TTGAGT
tatgtagacattagattaaa

SEQ ID NO: 31737 - DNA, 20 bp, Artificial Sequence
  Description of Artificial Sequence: Synthetic oligonucleotide
  Target: LAMA2; (+) strand; PAM type: NNGRRT; PAM sequence: AAGAAT
aattcatatttgttataaat

SEQ ID NO: 31738 - DNA, 20 bp, Artificial Sequence
  Description of Artificial Sequence: Synthetic oligonucleotide
  Target: LAMA2; (+) strand; PAM type: NNGRRT; PAM sequence: TAGAAT
aattttctaacaggtcatgg

SEQ ID NO: 31739 - DNA, 20 bp, Artificial Sequence
  Description of Artificial Sequence: Synthetic oligonucleotide
  Target: LAMA2; (+) strand; PAM type: NNGRRT; PAM sequence: ATGAAT
cgtgttggcagatgaaaaat

SEQ ID NO: 31740 - DNA, 20 bp, Artificial Sequence
  Description of Artificial Sequence: Synthetic oligonucleotide
  Target: LAMA2; (+) strand; PAM type: NNGRRT; PAM sequence: TAGAAT
tctggagaaatatttaataa

SEQ ID NO: 31741 - DNA, 20 bp, Artificial Sequence
  Description of Artificial Sequence: Synthetic oligonucleotide
  Target: LAMA2; (+) strand; PAM type: NNGRRT; PAM sequence: AGGGGT
tagaataatttcatctgctt

SEQ ID NO: 31742 - DNA, 20 bp, Artificial Sequence
  Description of Artificial Sequence: Synthetic oligonucleotide
  Target: LAMA2; (+) strand; PAM type: NNGRRT; PAM sequence: GGGAGT
tcacttaactaatacttttt

SEQ ID NO: 31743 - DNA, 20 bp, Artificial Sequence
  Description of Artificial Sequence: Synthetic oligonucleotide
  Target: LAMA2; (+) strand; PAM type: NNGRRT; PAM sequence: AGGAAT
ttgggagtctctcatgttct

SEQ ID NO: 31744 - DNA, 20 bp, Artificial Sequence
  Description of Artificial Sequence: Synthetic oligonucleotide
  Target: LAMA2; (+) strand; PAM type: NNGRRT; PAM sequence: GGGGAT
gttctaggaattatgacact

SEQ ID NO: 31745 - DNA, 20 bp, Artificial Sequence
  Description of Artificial Sequence: Synthetic oligonucleotide
  Target: LAMA2; (+) strand; PAM type: NNGRRT; PAM sequence: CAGAGT
ttttttttttttttttgaga

SEQ ID NO: 31746 - DNA, 20 bp, Artificial Sequence
  Description of Artificial Sequence: Synthetic oligonucleotide
  Target: LAMA2; (+) strand; PAM type: NNGRRT; PAM sequence: TGGAGT
tcttgctctgtcgccgaggc

SEQ ID NO: 31747 - DNA, 20 bp, Artificial Sequence
  Description of Artificial Sequence: Synthetic oligonucleotide
  Target: LAMA2; (+) strand; PAM type: NNGRRT; PAM sequence: CCGGGT
ctcactgcaacctccgcctc

SEQ ID NO: 31748 - DNA, 20 bp, Artificial Sequence
  Description of Artificial Sequence: Synthetic oligonucleotide
  Target: LAMA2; (+) strand; PAM type: NNGRRT; PAM sequence: TGGGAT
gcctcagcctcccaagtagc

SEQ ID NO: 31749 - DNA, 20 bp, Artificial Sequence
  Description of Artificial Sequence: Synthetic oligonucleotide
  Target: LAMA2; (+) strand; PAM type: NNGRRT; PAM sequence: ACGGGT
tttttgtatttttagtagag

SEQ ID NO: 31750 - DNA, 20 bp, Artificial Sequence
  Description of Artificial Sequence: Synthetic oligonucleotide
  Target: LAMA2; (+) strand; PAM type: NNGRRT; PAM sequence: TGGGAT
gccttggcctcccaaaatgc

SEQ ID NO: 31751 - DNA, 20 bp, Artificial Sequence
  Description of Artificial Sequence: Synthetic oligonucleotide
  Target: LAMA2; (+) strand; PAM type: NNGRRT; PAM sequence: AAGAGT
gccacaagaagtatttcatt

SEQ ID NO: 31752 - DNA, 20 bp, Artificial Sequence
  Description of Artificial Sequence: Synthetic oligonucleotide
  Target: LAMA2; (+) strand; PAM type: NNGRRT; PAM sequence: TTGAGT
gcttaaagttcaaagaaaaa

SEQ ID NO: 31753 - DNA, 20 bp, Artificial Sequence
  Description of Artificial Sequence: Synthetic oligonucleotide
  Target: LAMA2; (+) strand; PAM type: NNGRRT; PAM sequence: CAGAGT
gaaaaattgagtgtaaagtt

SEQ ID NO: 31754 - DNA, 20 bp, Artificial Sequence
  Description of Artificial Sequence: Synthetic oligonucleotide
  Target: LAMA2; (+) strand; PAM type: NNGRRT; PAM sequence: CAGAAT
gcccccacaaccttccccac

SEQ ID NO: 31755 - DNA, 20 bp, Artificial Sequence
  Description of Artificial Sequence: Synthetic oligonucleotide
  Target: LAMA2; (+) strand; PAM type: NNGRRT; PAM sequence: TAGGGT
ccaaagtccatagtttacat

SEQ ID NO: 31756 - DNA, 20 bp, Artificial Sequence
  Description of Artificial Sequence: Synthetic oligonucleotide
  Target: LAMA2; (+) strand; PAM type: NNGRRT; PAM sequence: ATGGGT
ctcttggtattgtacattct

SEQ ID NO: 31757 - DNA, 20 bp, Artificial Sequence
  Description of Artificial Sequence: Synthetic oligonucleotide
  Target: LAMA2; (+) strand; PAM type: NNGRRT; PAM sequence: TGGAAT
atccatagttttgccttttt

SEQ ID NO: 31758 - DNA, 20 bp, Artificial Sequence
  Description of Artificial Sequence: Synthetic oligonucleotide
  Target: LAMA2; (+) strand; PAM type: NNGRRT; PAM sequence: TGGAAT
ccttttttggaatatatagc

SEQ ID NO: 31759 - DNA, 20 bp, Artificial Sequence
  Description of Artificial Sequence: Synthetic oligonucleotide
  Target: LAMA2; (+) strand; PAM type: NNGRRT; PAM sequence: TTGAAT
tagctcatttctttgtagtg

SEQ ID NO: 31760 - DNA, 20 bp, Artificial Sequence
  Description of Artificial Sequence: Synthetic oligonucleotide
  Target: LAMA2; (+) strand; PAM type: NNGRRT; PAM sequence: ATGAAT
tgcttccaaattttggcagc

SEQ ID NO: 31761 - DNA, 20 bp, Artificial Sequence
  Description of Artificial Sequence: Synthetic oligonucleotide
  Target: LAMA2; (+) strand; PAM type: NNGRRT; PAM sequence: TTGGGT
gacttaagttttcaacctat

SEQ ID NO: 31762 - DNA, 20 bp, Artificial Sequence
  Description of Artificial Sequence: Synthetic oligonucleotide
  Target: LAMA2; (+) strand; PAM type: NNGRRT; PAM sequence: GTGAAT
taagttttcaacctatttgg

SEQ ID NO: 31763 - DNA, 20 bp, Artificial Sequence
  Description of Artificial Sequence: Synthetic oligonucleotide
  Target: LAMA2; (+) strand; PAM type: NNGRRT; PAM sequence: CTGGAT
aatataaaggagcatgattg

SEQ ID NO: 31764 - DNA, 20 bp, Artificial Sequence
  Description of Artificial Sequence: Synthetic oligonucleotide
  Target: LAMA2; (+) strand; PAM type: NNGRRT; PAM sequence: AAGAGT
tgattgctggatggtatggt

SEQ ID NO: 31765 - DNA, 20 bp, Artificial Sequence
  Description of Artificial Sequence: Synthetic oligonucleotide
  Target: LAMA2; (+) strand; PAM type: NNGRRT; PAM sequence: GAGAGT
cattcccaccggcaataaat

SEQ ID NO: 31766 - DNA, 20 bp, Artificial Sequence
  Description of Artificial Sequence: Synthetic oligonucleotide
  Target: LAMA2; (+) strand; PAM type: NNGRRT; PAM sequence: TTGGAT
gcatttggtgtttttagtgt

SEQ ID NO: 31767 - DNA, 20 bp, Artificial Sequence
  Description of Artificial Sequence: Synthetic oligonucleotide
  Target: LAMA2; (+) strand; PAM type: NNGRRT; PAM sequence: TTGGGT
ggtctttttccattttttca

SEQ ID NO: 31768 - DNA, 20 bp, Artificial Sequence
  Description of Artificial Sequence: Synthetic oligonucleotide
  Target: LAMA2; (+) strand; PAM type: NNGRRT; PAM sequence: TCGAAT
ttcattgggttgttttcttg

SEQ ID NO: 31769 - DNA, 20 bp, Artificial Sequence
  Description of Artificial Sequence: Synthetic oligonucleotide
  Target: LAMA2; (+) strand; PAM type: NNGRRT; PAM sequence: CAGAGT
ggttgttttcttgtcgaatt

SEQ ID NO: 31770 - DNA, 20 bp, Artificial Sequence
  Description of Artificial Sequence: Synthetic oligonucleotide
  Target: LAMA2; (+) strand; PAM type: NNGRRT; PAM sequence: TTGGGT
ttcagagttttttgtatatt

SEQ ID NO: 31771 - DNA, 20 bp, Artificial Sequence
  Description of Artificial Sequence: Synthetic oligonucleotide
  Target: LAMA2; (+) strand; PAM type: NNGRRT; PAM sequence: GAGAGT
gatttcaaaaaacttgcaaa

SEQ ID NO: 31772 - DNA, 20 bp, Artificial Sequence
  Description of Artificial Sequence: Synthetic oligonucleotide
  Target: LAMA2; (+) strand; PAM type: NNGRRT; PAM sequence: CTGAAT
tcatattttttcagtgttta

SEQ ID NO: 31773 - DNA, 20 bp, Artificial Sequence
  Description of Artificial Sequence: Synthetic oligonucleotide
  Target: LAMA2; (+) strand; PAM type: NNGRRT; PAM sequence: CAGGAT
tgaatgtttttttactgttt

SEQ ID NO: 31774 - DNA, 20 bp, Artificial Sequence
  Description of Artificial Sequence: Synthetic oligonucleotide
  Target: LAMA2; (+) strand; PAM type: NNGRRT; PAM sequence: CAGGAT
tactgtttcaggatcccatg

SEQ ID NO: 31775 - DNA, 20 bp, Artificial Sequence
  Description of Artificial Sequence: Synthetic oligonucleotide
  Target: LAMA2; (+) strand; PAM type: NNGRRT; PAM sequence: TAGGGT
atttagccattgtgtcttct

SEQ ID NO: 31776 - DNA, 20 bp, Artificial Sequence
  Description of Artificial Sequence: Synthetic oligonucleotide
  Target: LAMA2; (+) strand; PAM type: NNGRRT; PAM sequence: GAGAGT
acagtgtttctgatgacttt

SEQ ID NO: 31777 - DNA, 20 bp, Artificial Sequence
  Description of Artificial Sequence: Synthetic oligonucleotide
  Target: LAMA2; (+) strand; PAM type: NNGRRT; PAM sequence: TGGGGT
ttggtaagctgtccctcaat

SEQ ID NO: 31778 - DNA, 20 bp, Artificial Sequence
  Description of Artificial Sequence: Synthetic oligonucleotide
  Target: LAMA2; (+) strand; PAM type: NNGRRT; PAM sequence: TAGAAT
cctcatatctttctcatgat

SEQ ID NO: 31779 - DNA, 20 bp, Artificial Sequence
  Description of Artificial Sequence: Synthetic oligonucleotide
  Target: LAMA2; (+) strand; PAM type: NNGRRT; PAM sequence: TGGAAT
tatctttctcatgattagaa

SEQ ID NO: 31780 - DNA, 20 bp, Artificial Sequence
  Description of Artificial Sequence: Synthetic oligonucleotide
  Target: LAMA2; (+) strand; PAM type: NNGRRT; PAM sequence: ATGAGT
ctcatgattagaatggaatt

SEQ ID NO: 31781 - DNA, 20 bp, Artificial Sequence
  Description of Artificial Sequence: Synthetic oligonucleotide
  Target: LAMA2; (+) strand; PAM type: NNGRRT; PAM sequence: GTGGAT
gaccaatatgacttattact

SEQ ID NO: 31782 - DNA, 20 bp, Artificial Sequence
  Description of Artificial Sequence: Synthetic oligonucleotide
  Target: LAMA2; (+) strand; PAM type: NNGRRT; PAM sequence: ATGGGT
tgaaagcaaagatcactttg

SEQ ID NO: 31783 - DNA, 20 bp, Artificial Sequence
  Description of Artificial Sequence: Synthetic oligonucleotide
  Target: LAMA2; (+) strand; PAM type: NNGRRT; PAM sequence: GTGAAT
agctgcatgacaatcaaaag

SEQ ID NO: 31784 - DNA, 20 bp, Artificial Sequence
  Description of Artificial Sequence: Synthetic oligonucleotide
  Target: LAMA2; (+) strand; PAM type: NNGRRT; PAM sequence: TGGAAT
aaaaggtgaattaatacaga

SEQ ID NO: 31785 - DNA, 20 bp, Artificial Sequence
  Description of Artificial Sequence: Synthetic oligonucleotide
  Target: LAMA2; (+) strand; PAM type: NNGRRT; PAM sequence: GAGAGT
tacagatggaattataatta

SEQ ID NO: 31786 - DNA, 20 bp, Artificial Sequence
  Description of Artificial Sequence: Synthetic oligonucleotide
  Target: LAMA2; (+) strand; PAM type: NNGRRT; PAM sequence: CAGAGT
gcacgctaatgcctctatct

SEQ ID NO: 31787 - DNA, 20 bp, Artificial Sequence
  Description of Artificial Sequence: Synthetic oligonucleotide
  Target: LAMA2; (+) strand; PAM type: NNGRRT; PAM sequence: ATGAAT
aatgcctctatctcagagtc

SEQ ID NO: 31788 - DNA, 20 bp, Artificial Sequence
  Description of Artificial Sequence: Synthetic oligonucleotide
  Target: LAMA2; (+) strand; PAM type: NNGRRT; PAM sequence: CAGGGT
aatgatcctgcagttgtgac

SEQ ID NO: 31789 - DNA, 20 bp, Artificial Sequence
  Description of Artificial Sequence: Synthetic oligonucleotide
  Target: LAMA2; (+) strand; PAM type: NNGRRT; PAM sequence: TGGAAT
tctagactaggactgcacat

SEQ ID NO: 31790 - DNA, 20 bp, Artificial Sequence
  Description of Artificial Sequence: Synthetic oligonucleotide
  Target: LAMA2; (+) strand; PAM type: NNGRRT; PAM sequence: TGGGGT
aggttgtgatgcagttggtc

SEQ ID NO: 31791 - DNA, 20 bp, Artificial Sequence
  Description of Artificial Sequence: Synthetic oligonucleotide
  Target: LAMA2; (+) strand; PAM type: NNGRRT; PAM sequence: TAGAGT
gtgatgcagttggtctgggg

SEQ ID NO: 31792 - DNA, 20 bp, Artificial Sequence
  Description of Artificial Sequence: Synthetic oligonucleotide
  Target: LAMA2; (+) strand; PAM type: NNGRRT; PAM sequence: TGGGAT
ctggggtagagtcagaccac

SEQ ID NO: 31793 - DNA, 20 bp, Artificial Sequence
  Description of Artificial Sequence: Synthetic oligonucleotide
  Target: LAMA2; (+) strand; PAM type: NNGRRT; PAM sequence: AAGAAT
ctccccagattatactgata

SEQ ID NO: 31794 - DNA, 20 bp, Artificial Sequence
  Description of Artificial Sequence: Synthetic oligonucleotide
  Target: LAMA2; (+) strand; PAM type: NNGRRT; PAM sequence: CAGAGT
cttttttttttttttttaaa

SEQ ID NO: 31795 - DNA, 20 bp, Artificial Sequence
  Description of Artificial Sequence: Synthetic oligonucleotide
  Target: LAMA2; (+) strand; PAM type: NNGRRT; PAM sequence: TGGAGT
ttcacccttgttgtccaggc

SEQ ID NO: 31796 - DNA, 20 bp, Artificial Sequence
  Description of Artificial Sequence: Synthetic oligonucleotide
  Target: LAMA2; (+) strand; PAM type: NNGRRT; PAM sequence: TGGGAT
gcttcagcctcccaagtagc

SEQ ID NO: 31797 - DNA, 20 bp, Artificial Sequence
  Description of Artificial Sequence: Synthetic oligonucleotide
  Target: LAMA2; (+) strand; PAM type: NNGRRT; PAM sequence: CAGGGT
tttttttttttaagtagaga

SEQ ID NO: 31798 - DNA, 20 bp, Artificial Sequence
  Description of Artificial Sequence: Synthetic oligonucleotide
  Target: LAMA2; (+) strand; PAM type: NNGRRT; PAM sequence: TCGGGT
ctggtctcgaacccctgacc

SEQ ID NO: 31799 - DNA, 20 bp, Artificial Sequence
  Description of Artificial Sequence: Synthetic oligonucleotide
  Target: LAMA2; (+) strand; PAM type: NNGRRT; PAM sequence: TGGGAT
gcctcagcctcccaaagtgc

SEQ ID NO: 31800 - DNA, 20 bp, Artificial Sequence
  Description of Artificial Sequence: Synthetic oligonucleotide
  Target: LAMA2; (+) strand; PAM type: NNGRRT; PAM sequence: CTGGGT
aatctaattccctaatatcc

SEQ ID NO: 31801 - DNA, 20 bp, Artificial Sequence
  Description of Artificial Sequence: Synthetic oligonucleotide
  Target: LAMA2; (+) strand; PAM type: NNGRRT; PAM sequence: GAGAAT
aacccaagttcctcacatat

SEQ ID NO: 31802 - DNA, 20 bp, Artificial Sequence
  Description of Artificial Sequence: Synthetic oligonucleotide
  Target: LAMA2; (+) strand; PAM type: NNGRRT; PAM sequence: CTGGAT
atttctcactccactgctgc

SEQ ID NO: 31803 - DNA, 20 bp, Artificial Sequence
  Description of Artificial Sequence: Synthetic oligonucleotide
  Target: LAMA2; (+) strand; PAM type: NNGRRT; PAM sequence: CTGGAT
caatctggtaactaaatcca

SEQ ID NO: 31804 - DNA, 20 bp, Artificial Sequence
  Description of Artificial Sequence: Synthetic oligonucleotide
  Target: LAMA2; (+) strand; PAM type: NNGRRT; PAM sequence: ATGGAT
ttggtcctatgtgccttact

SEQ ID NO: 31805 - DNA, 20 bp, Artificial Sequence
  Description of Artificial Sequence: Synthetic oligonucleotide
  Target: LAMA2; (+) strand; PAM type: NNGRRT; PAM sequence: CAGAGT
acctgttgttatttatatgg

SEQ ID NO: 31806 - DNA, 20 bp, Artificial Sequence
  Description of Artificial Sequence: Synthetic oligonucleotide
  Target: LAMA2; (+) strand; PAM type: NNGRRT; PAM sequence: CAGGAT
ctatggctttccactttttt

SEQ ID NO: 31807 - DNA, 20 bp, Artificial Sequence
  Description of Artificial Sequence: Synthetic oligonucleotide
  Target: LAMA2; (+) strand; PAM type: NNGRRT; PAM sequence: ACGGAT
gtctggtcatctggacccct

SEQ ID NO: 31808 - DNA, 20 bp, Artificial Sequence
  Description of Artificial Sequence: Synthetic oligonucleotide
  Target: LAMA2; (+) strand; PAM type: NNGRRT; PAM sequence: GAGGGT
catctggacccctacggatt

SEQ ID NO: 31809 - DNA, 20 bp, Artificial Sequence
  Description of Artificial Sequence: Synthetic oligonucleotide
  Target: LAMA2; (+) strand; PAM type: NNGRRT; PAM sequence: TGGGAT
caatctcatattgtgtagtt

SEQ ID NO: 31810 - DNA, 20 bp, Artificial Sequence
  Description of Artificial Sequence: Synthetic oligonucleotide
  Target: LAMA2; (+) strand; PAM type: NNGRRT; PAM sequence: CAGAAT
tctgttctccgtaacgtagc

SEQ ID NO: 31811 - DNA, 20 bp, Artificial Sequence
  Description of Artificial Sequence: Synthetic oligonucleotide
  Target: LAMA2; (+) strand; PAM type: NNGRRT; PAM sequence: ATGAAT
ttctccgtaacgtagccaga

SEQ ID NO: 31812 - DNA, 20 bp, Artificial Sequence
  Description of Artificial Sequence: Synthetic oligonucleotide
  Target: LAMA2; (+) strand; PAM type: NNGRRT; PAM sequence: GTGAAT
gaatgtttgctattccaaat

SEQ ID NO: 31813 - DNA, 20 bp, Artificial Sequence
  Description of Artificial Sequence: Synthetic oligonucleotide
  Target: LAMA2; (+) strand; PAM type: NNGRRT; PAM sequence: TAGGAT
cctgacttcccttaggctcg

SEQ ID NO: 31814 - DNA, 20 bp, Artificial Sequence
  Description of Artificial Sequence: Synthetic oligonucleotide
  Target: LAMA2; (+) strand; PAM type: NNGRRT; PAM sequence: AGGGGT
aaagccctctgtgccatcgc

SEQ ID NO: 31815 - DNA, 20 bp, Artificial Sequence
  Description of Artificial Sequence: Synthetic oligonucleotide
  Target: LAMA2; (+) strand; PAM type: NNGRRT; PAM sequence: GTGAAT
caatatttgtttaattaatt

SEQ ID NO: 31816 - DNA, 20 bp, Artificial Sequence
  Description of Artificial Sequence: Synthetic oligonucleotide
  Target: LAMA2; (+) strand; PAM type: NNGRRT; PAM sequence: TTGAAT
atatatttataattatattg

SEQ ID NO: 31817 - DNA, 20 bp, Artificial Sequence
  Description of Artificial Sequence: Synthetic oligonucleotide
  Target: LAMA2; (+) strand; PAM type: NNGRRT; PAM sequence: GAGAAT
ctatttatattctgtaaggg

SEQ ID NO: 31818 - DNA, 20 bp, Artificial Sequence
  Description of Artificial Sequence: Synthetic oligonucleotide
  Target: LAMA2; (+) strand; PAM type: NNGRRT; PAM sequence: TTGAAT
atattgtattttattgccta

SEQ ID NO: 31819 - DNA, 20 bp, Artificial Sequence
  Description of Artificial Sequence: Synthetic oligonucleotide
  Target: LAMA2; (+) strand; PAM type: NNGRRT; PAM sequence: AAGGAT
tgaaaatgaaacatttccaa

SEQ ID NO: 31820 - DNA, 20 bp, Artificial Sequence
  Description of Artificial Sequence: Synthetic oligonucleotide
  Target: LAMA2; (+) strand; PAM type: NNGRRT; PAM sequence: CGGGGT
actggctcattgtcattcca

SEQ ID NO: 31821 - DNA, 20 bp, Artificial Sequence
  Description of Artificial Sequence: Synthetic oligonucleotide
  Target: LAMA2; (+) strand; PAM type: NNGRRT; PAM sequence: ATGAGT
tggtccttatggcttgcctg

SEQ ID NO: 31822 - DNA, 20 bp, Artificial Sequence
  Description of Artificial Sequence: Synthetic oligonucleotide
  Target: LAMA2; (+) strand; PAM type: NNGRRT; PAM sequence: GAGAGT
aatattggaagatgaccctt

SEQ ID NO: 31823 - DNA, 20 bp, Artificial Sequence
  Description of Artificial Sequence: Synthetic oligonucleotide
  Target: LAMA2; (+) strand; PAM type: NNGRRT; PAM sequence: ATGAGT
taattttagcaggaaaccat

SEQ ID NO: 31824 - DNA, 20 bp, Artificial Sequence
  Description of Artificial Sequence: Synthetic oligonucleotide
  Target: LAMA2; (+) strand; PAM type: NNGRRT; PAM sequence: TTGAGT
atgggaaaaaaaaaacctag

SEQ ID NO: 31825 - DNA, 20 bp, Artificial Sequence
  Description of Artificial Sequence: Synthetic oligonucleotide
  Target: LAMA2; (+) strand; PAM type: NNGRRT; PAM sequence: GTGAAT
gaaaaaaaaaacctagttga

SEQ ID NO: 31826 - DNA, 20 bp, Artificial Sequence
  Description of Artificial Sequence: Synthetic oligonucleotide
  Target: LAMA2; (+) strand; PAM type: NNGRRT; PAM sequence: CAGAAT
aaggaacactgtaaagattg

SEQ ID NO: 31827 - DNA, 20 bp, Artificial Sequence
  Description of Artificial Sequence: Synthetic oligonucleotide
  Target: LAMA2; (+) strand; PAM type: NNGRRT; PAM sequence: GAGAAT
agattgcagaatagaggtaa

SEQ ID NO: 31828 - DNA, 20 bp, Artificial Sequence
  Description of Artificial Sequence: Synthetic oligonucleotide
  Target: LAMA2; (+) strand; PAM type: NNGRRT; PAM sequence: GAGAAT
aaataagaaaatccaagata

SEQ ID NO: 31829 - DNA, 20 bp, Artificial Sequence
  Description of Artificial Sequence: Synthetic oligonucleotide
  Target: LAMA2; (+) strand; PAM type: NNGRRT; PAM sequence: TAGGAT
aggaagattgtacaacatat

SEQ ID NO: 31830 - DNA, 20 bp, Artificial Sequence
  Description of Artificial Sequence: Synthetic oligonucleotide
  Target: LAMA2; (+) strand; PAM type: NNGRRT; PAM sequence: GTGAAT
actcaaaggacaagataata

SEQ ID NO: 31831 - DNA, 20 bp, Artificial Sequence
  Description of Artificial Sequence: Synthetic oligonucleotide
  Target: LAMA2; (+) strand; PAM type: NNGRRT; PAM sequence: AAGGAT
agataatagtgaataagaag

SEQ ID NO: 31832 - DNA, 20 bp, Artificial Sequence
  Description of Artificial Sequence: Synthetic oligonucleotide
  Target: LAMA2; (+) strand; PAM type: NNGRRT; PAM sequence: CTGAAT
aaaacacagaaagagccaaa

SEQ ID NO: 31833 - DNA, 20 bp, Artificial Sequence
  Description of Artificial Sequence: Synthetic oligonucleotide
  Target: LAMA2; (+) strand; PAM type: NNGRRT; PAM sequence: CTGGGT
aacattatcaatagcctgtc

SEQ ID NO: 31834 - DNA, 20 bp, Artificial Sequence
  Description of Artificial Sequence: Synthetic oligonucleotide
  Target: LAMA2; (+) strand; PAM type: NNGRRT; PAM sequence: GTGAAT
cctgggtgagattgattttt

SEQ ID NO: 31835 - DNA, 20 bp, Artificial Sequence
  Description of Artificial Sequence: Synthetic oligonucleotide
  Target: LAMA2; (+) strand; PAM type: NNGRRT; PAM sequence: GTGGGT
gcttctttatgaagtctctc

SEQ ID NO: 31836 - DNA, 20 bp, Artificial Sequence
  Description of Artificial Sequence: Synthetic oligonucleotide
  Target: LAMA2; (+) strand; PAM type: NNGRRT; PAM sequence: CAGGGT
ctctcgtgggtatttttgac

SEQ ID NO: 31837 - DNA, 20 bp, Artificial Sequence
  Description of Artificial Sequence: Synthetic oligonucleotide
  Target: LAMA2; (+) strand; PAM type: NNGRRT; PAM sequence: GTGAAT
cgtgggtatttttgaccagg

SEQ ID NO: 31838 - DNA, 20 bp, Artificial Sequence
  Description of Artificial Sequence: Synthetic oligonucleotide
  Target: LAMA2; (+) strand; PAM type: NNGRRT; PAM sequence: TAGAAT
agcagtgtcctccactcacc

SEQ ID NO: 31839 - DNA, 20 bp, Artificial Sequence
  Description of Artificial Sequence: Synthetic oligonucleotide
  Target: LAMA2; (+) strand; PAM type: NNGRRT; PAM sequence: CTGGAT
catgtattttactactcttt

SEQ ID NO: 31840 - DNA, 20 bp, Artificial Sequence
  Description of Artificial Sequence: Synthetic oligonucleotide
  Target: LAMA2; (+) strand; PAM type: NNGRRT; PAM sequence: TTGGGT
tagccaaacacaaaatagtg

SEQ ID NO: 31841 - DNA, 20 bp, Artificial Sequence
  Description of Artificial Sequence: Synthetic oligonucleotide
  Target: LAMA2; (+) strand; PAM type: NNGRRT; PAM sequence: AGGGAT
cttttcacctgtgtaaaaag

SEQ ID NO: 31842 - DNA, 20 bp, Artificial Sequence
  Description of Artificial Sequence: Synthetic oligonucleotide
  Target: LAMA2; (+) strand; PAM type: NNGRRT; PAM sequence: AAGAGT
tatatatctctaaattcagg

SEQ ID NO: 31843 - DNA, 20 bp, Artificial Sequence
  Description of Artificial Sequence: Synthetic oligonucleotide
  Target: LAMA2; (+) strand; PAM type: NNGRRT; PAM sequence: GAGAGT
gaagagtaagtgagacacac

SEQ ID NO: 31844 - DNA, 20 bp, Artificial Sequence
  Description of Artificial Sequence: Synthetic oligonucleotide
  Target: LAMA2; (+) strand; PAM type: NNGRRT; PAM sequence: TGGAAT
tattcacaatagcaaagaca

SEQ ID NO: 31845 - DNA, 20 bp, Artificial Sequence
  Description of Artificial Sequence: Synthetic oligonucleotide
  Target: LAMA2; (+) strand; PAM type: NNGRRT; PAM sequence: TGGAAT
aatgtggtacatacacacca

SEQ ID NO: 31846 - DNA, 20 bp, Artificial Sequence
  Description of Artificial Sequence: Synthetic oligonucleotide
  Target: LAMA2; (+) strand; PAM type: NNGRRT; PAM sequence: AAGAAT
aatactatgcagccataaaa

SEQ ID NO: 31847 - DNA, 20 bp, Artificial Sequence
  Description of Artificial Sequence: Synthetic oligonucleotide
  Target: LAMA2; (+) strand; PAM type: NNGRRT; PAM sequence: ATGAGT
ctatgcagccataaaaaaga

SEQ ID NO: 31848 - DNA, 20 bp, Artificial Sequence
  Description of Artificial Sequence: Synthetic oligonucleotide
  Target: LAMA2; (+) strand; PAM type: NNGRRT; PAM sequence: ATGGAT
ttcatgtcctttgcagggac

SEQ ID NO: 31849 - DNA, 20 bp, Artificial Sequence
  Description of Artificial Sequence: Synthetic oligonucleotide
  Target: LAMA2; (+) strand; PAM type: NNGRRT; PAM sequence: GGGAGT
tgtatgtcccacttataaat

SEQ ID NO: 31850 - DNA, 20 bp, Artificial Sequence
  Description of Artificial Sequence: Synthetic oligonucleotide
  Target: LAMA2; (+) strand; PAM type: NNGRRT; PAM sequence: GAGGAT
ctggggcctaccagagggcg

SEQ ID NO: 31851 - DNA, 20 bp, Artificial Sequence
  Description of Artificial Sequence: Synthetic oligonucleotide
  Target: LAMA2; (+) strand; PAM type: NNGRRT; PAM sequence: AAGGAT
accagagggcggaggatggg

SEQ ID NO: 31852 - DNA, 20 bp, Artificial Sequence
  Description of Artificial Sequence: Synthetic oligonucleotide
  Target: LAMA2; (+) strand; PAM type: NNGRRT; PAM sequence: GAGGAT
gcggaggatgggaaggatga

SEQ ID NO: 31853 - DNA, 20 bp, Artificial Sequence
  Description of Artificial Sequence: Synthetic oligonucleotide
  Target: LAMA2; (+) strand; PAM type: NNGRRT; PAM sequence: GAGGAT
gggaaggatgagaggatgga

SEQ ID NO: 31854 - DNA, 20 bp, Artificial Sequence
  Description of Artificial Sequence: Synthetic oligonucleotide
  Target: LAMA2; (+) strand; PAM type: NNGRRT; PAM sequence: AAGAAT
agaggatggagaggattagg

SEQ ID NO: 31855 - DNA, 20 bp, Artificial Sequence
  Description of Artificial Sequence: Synthetic oligonucleotide
  Target: LAMA2; (+) strand; PAM type: NNGRRT; PAM sequence: CTGGGT
atgggcactgggcttaatac

SEQ ID NO: 31856 - DNA, 20 bp, Artificial Sequence
  Description of Artificial Sequence: Synthetic oligonucleotide
  Target: LAMA2; (+) strand; PAM type: NNGRRT; PAM sequence: ATGGGT
tgcaacaaaccccattatgc

SEQ ID NO: 31857 - DNA, 20 bp, Artificial Sequence
  Description of Artificial Sequence: Synthetic oligonucleotide
  Target: LAMA2; (+) strand; PAM type: NNGRRT; PAM sequence: TGGAAT
cctcacgtctcctcctcttc

SEQ ID NO: 31858 - DNA, 20 bp, Artificial Sequence
  Description of Artificial Sequence: Synthetic oligonucleotide
  Target: LAMA2; (+) strand; PAM type: NNGRRT; PAM sequence: AAGAGT
taagcactgtgctggccctg

SEQ ID NO: 31859 - DNA, 20 bp, Artificial Sequence
  Description of Artificial Sequence: Synthetic oligonucleotide
  Target: LAMA2; (+) strand; PAM type: NNGRRT; PAM sequence: TTGAAT
tgtgtattcaaaggtccagt

SEQ ID NO: 31860 - DNA, 20 bp, Artificial Sequence
  Description of Artificial Sequence: Synthetic oligonucleotide
  Target: LAMA2; (+) strand; PAM type: NNGRRT; PAM sequence: TTGAGT
gcaccaggcatatggtcagt

SEQ ID NO: 31861 - DNA, 20 bp, Artificial Sequence
  Description of Artificial Sequence: Synthetic oligonucleotide
  Target: LAMA2; (+) strand; PAM type: NNGRRT; PAM sequence: AGGGAT
gataggctttagaacttcca

SEQ ID NO: 31862 - DNA, 20 bp, Artificial Sequence
  Description of Artificial Sequence: Synthetic oligonucleotide
  Target: LAMA2; (+) strand; PAM type: NNGRRT; PAM sequence: AGGAAT
acactatgcttggcactctg

SEQ ID NO: 31863 - DNA, 20 bp, Artificial Sequence
  Description of Artificial Sequence: Synthetic oligonucleotide
  Target: LAMA2; (+) strand; PAM type: NNGRRT; PAM sequence: AAGAGT
ttggcactctgaggaataaa

SEQ ID NO: 31864 - DNA, 20 bp, Artificial Sequence
  Description of Artificial Sequence: Synthetic oligonucleotide
  Target: LAMA2; (+) strand; PAM type: NNGRRT; PAM sequence: TAGAGT
ctaacaaagtcactacccat

SEQ ID NO: 31865 - DNA, 20 bp, Artificial Sequence
  Description of Artificial Sequence: Synthetic oligonucleotide
  Target: LAMA2; (+) strand; PAM type: NNGRRT; PAM sequence: GTGAAT
agtcactacccattagagtt

SEQ ID NO: 31866 - DNA, 20 bp, Artificial Sequence
  Description of Artificial Sequence: Synthetic oligonucleotide
  Target: LAMA2; (+) strand; PAM type: NNGRRT; PAM sequence: TAGAAT
taagaaaagagagcatgtgc

SEQ ID NO: 31867 - DNA, 20 bp, Artificial Sequence
  Description of Artificial Sequence: Synthetic oligonucleotide
  Target: LAMA2; (+) strand; PAM type: NNGRRT; PAM sequence: TGGAGT
ggagggcttcactgagaaga

SEQ ID NO: 31868 - DNA, 20 bp, Artificial Sequence
  Description of Artificial Sequence: Synthetic oligonucleotide
  Target: LAMA2; (+) strand; PAM type: NNGRRT; PAM sequence: TGGAAT
cttcactgagaagatggagt

SEQ ID NO: 31869 - DNA, 20 bp, Artificial Sequence
  Description of Artificial Sequence: Synthetic oligonucleotide
  Target: LAMA2; (+) strand; PAM type: NNGRRT; PAM sequence: TTGAAT
ctgagaagatggagttggaa

SEQ ID NO: 31870 - DNA, 20 bp, Artificial Sequence
  Description of Artificial Sequence: Synthetic oligonucleotide
  Target: LAMA2; (+) strand; PAM type: NNGRRT; PAM sequence: CTGGAT
ttggaattgaatctcgaaag

SEQ ID NO: 31871 - DNA, 20 bp, Artificial Sequence
  Description of Artificial Sequence: Synthetic oligonucleotide
  Target: LAMA2; (+) strand; PAM type: NNGRRT; PAM sequence: TTGGAT
tctcgaaagctggatttgtt

SEQ ID NO: 31872 - DNA, 20 bp, Artificial Sequence
  Description of Artificial Sequence: Synthetic oligonucleotide
  Target: LAMA2; (+) strand; PAM type: NNGRRT; PAM sequence: AAGAGT
tttgttttggataagtagag

SEQ ID NO: 31873 - DNA, 20 bp, Artificial Sequence
  Description of Artificial Sequence: Synthetic oligonucleotide
  Target: LAMA2; (+) strand; PAM type: NNGRRT; PAM sequence: GAGAAT
tatgaacaaaatcttttttt

SEQ ID NO: 31874 - DNA, 20 bp, Artificial Sequence
  Description of Artificial Sequence: Synthetic oligonucleotide
  Target: LAMA2; (+) strand; PAM type: NNGRRT; PAM sequence: AAGAAT
tccaaaaggaagtaggcaag

SEQ ID NO: 31875 - DNA, 20 bp, Artificial Sequence
  Description of Artificial Sequence: Synthetic oligonucleotide
  Target: LAMA2; (+) strand; PAM type: NNGRRT; PAM sequence: GAGAAT
tcctgtatataacaacttta

SEQ ID NO: 31876 - DNA, 20 bp, Artificial Sequence
  Description of Artificial Sequence: Synthetic oligonucleotide
  Target: LAMA2; (+) strand; PAM type: NNGRRT; PAM sequence: CTGGAT
gttaggcatcatactaggag

SEQ ID NO: 31877 - DNA, 20 bp, Artificial Sequence
  Description of Artificial Sequence: Synthetic oligonucleotide
  Target: LAMA2; (+) strand; PAM type: NNGRRT; PAM sequence: GGGAAT
ggaaacctaggtagcaccct

SEQ ID NO: 31878 - DNA, 20 bp, Artificial Sequence
  Description of Artificial Sequence: Synthetic oligonucleotide
  Target: LAMA2; (+) strand; PAM type: NNGRRT; PAM sequence: ATGGGT
agcacttaaactgaaagctg

SEQ ID NO: 31879 - DNA, 20 bp, Artificial Sequence
  Description of Artificial Sequence: Synthetic oligonucleotide
  Target: LAMA2; (+) strand; PAM type: NNGRRT; PAM sequence: TGGGAT
ctcattctaggtaaagacaa

SEQ ID NO: 31880 - DNA, 20 bp, Artificial Sequence
  Description of Artificial Sequence: Synthetic oligonucleotide
  Target: LAMA2; (+) strand; PAM type: NNGRRT; PAM sequence: AGGGAT
gatacaagaaggtgctaaga

SEQ ID NO: 31881 - DNA, 20 bp, Artificial Sequence
  Description of Artificial Sequence: Synthetic oligonucleotide
  Target: LAMA2; (+) strand; PAM type: NNGRRT; PAM sequence: ATGAGT
caagaaggtgctaagaaggg

SEQ ID NO: 31882 - DNA, 20 bp, Artificial Sequence
  Description of Artificial Sequence: Synthetic oligonucleotide
  Target: LAMA2; (+) strand; PAM type: NNGRRT; PAM sequence: TAGGGT
tgccagggaggttgattgca

SEQ ID NO: 31883 - DNA, 20 bp, Artificial Sequence
  Description of Artificial Sequence: Synthetic oligonucleotide
  Target: LAMA2; (+) strand; PAM type: NNGRRT; PAM sequence: TGGAGT
ttttaacttctttcttatca

SEQ ID NO: 31884 - DNA, 20 bp, Artificial Sequence
  Description of Artificial Sequence: Synthetic oligonucleotide
  Target: LAMA2; (+) strand; PAM type: NNGRRT; PAM sequence: TAGGAT
ctttcttatcatggagtttg

SEQ ID NO: 31885 - DNA, 20 bp, Artificial Sequence
  Description of Artificial Sequence: Synthetic oligonucleotide
  Target: LAMA2; (+) strand; PAM type: NNGRRT; PAM sequence: AAGAAT
gtaatcatataatcaatact

SEQ ID NO: 31886 - DNA, 20 bp, Artificial Sequence
  Description of Artificial Sequence: Synthetic oligonucleotide
  Target: LAMA2; (+) strand; PAM type: NNGRRT; PAM sequence: GTGAAT
atactaagaataaaatgcat

SEQ ID NO: 31887 - DNA, 20 bp, Artificial Sequence
  Description of Artificial Sequence: Synthetic oligonucleotide
  Target: LAMA2; (+) strand; PAM type: NNGRRT; PAM sequence: ATGAAT
agccagaggaagttaagaca

SEQ ID NO: 31888 - DNA, 20 bp, Artificial Sequence
  Description of Artificial Sequence: Synthetic oligonucleotide
  Target: LAMA2; (+) strand; PAM type: NNGRRT; PAM sequence: CAGAAT
tgaatatgatcttgatcatc

SEQ ID NO: 31889 - DNA, 20 bp, Artificial Sequence
  Description of Artificial Sequence: Synthetic oligonucleotide
  Target: LAMA2; (+) strand; PAM type: NNGRRT; PAM sequence: TTGAGT
ctttttaaaatttagacact

SEQ ID NO: 31890 - DNA, 20 bp, Artificial Sequence
  Description of Artificial Sequence: Synthetic oligonucleotide
  Target: LAMA2; (+) strand; PAM type: NNGRRT; PAM sequence: AAGAAT
agacactttgagttataaat

SEQ ID NO: 31891 - DNA, 20 bp, Artificial Sequence
  Description of Artificial Sequence: Synthetic oligonucleotide
  Target: LAMA2; (+) strand; PAM type: NNGRRT; PAM sequence: AAGAAT
aaaatatattgatgaagaaa

SEQ ID NO: 31892 - DNA, 20 bp, Artificial Sequence
  Description of Artificial Sequence: Synthetic oligonucleotide
  Target: LAMA2; (+) strand; PAM type: NNGRRT; PAM sequence: AAGAGT
gttcagtaatatgtgaaagt

SEQ ID NO: 31893 - DNA, 20 bp, Artificial Sequence
  Description of Artificial Sequence: Synthetic oligonucleotide
  Target: LAMA2; (+) strand; PAM type: NNGRRT; PAM sequence: TGGAGT
ggctcgctctgtcgccaggc

SEQ ID NO: 31894 - DNA, 20 bp, Artificial Sequence
  Description of Artificial Sequence: Synthetic oligonucleotide
  Target: LAMA2; (+) strand; PAM type: NNGRRT; PAM sequence: TTGGGT
cagaagtaacatttaaataa

SEQ ID NO: 31895 - DNA, 20 bp, Artificial Sequence
  Description of Artificial Sequence: Synthetic oligonucleotide
  Target: LAMA2; (+) strand; PAM type: NNGRRT; PAM sequence: ATGAGT
taacatttaaataattgggt

SEQ ID NO: 31896 - DNA, 20 bp, Artificial Sequence
  Description of Artificial Sequence: Synthetic oligonucleotide
  Target: LAMA2; (+) strand; PAM type: NNGRRT; PAM sequence: GTGAAT
atgagtatgtgtgtgtgtat

SEQ ID NO: 31897 - DNA, 20 bp, Artificial Sequence
  Description of Artificial Sequence: Synthetic oligonucleotide
  Target: LAMA2; (+) strand; PAM type: NNGRRT; PAM sequence: TTGAGT
ttatttgacccatcagacct

SEQ ID NO: 31898 - DNA, 20 bp, Artificial Sequence
  Description of Artificial Sequence: Synthetic oligonucleotide
  Target: LAMA2; (+) strand; PAM type: NNGRRT; PAM sequence: AAGGAT
acaacactcaccagaaaagc

SEQ ID NO: 31899 - DNA, 20 bp, Artificial Sequence
  Description of Artificial Sequence: Synthetic oligonucleotide
  Target: LAMA2; (+) strand; PAM type: NNGRRT; PAM sequence: TTGAGT
ctcaccagaaaagcaaggat

SEQ ID NO: 31900 - DNA, 20 bp, Artificial Sequence
  Description of Artificial Sequence: Synthetic oligonucleotide
  Target: LAMA2; (+) strand; PAM type: NNGRRT; PAM sequence: CTGGAT
ggatttgagtaacctaggga

SEQ ID NO: 31901 - DNA, 20 bp, Artificial Sequence
  Description of Artificial Sequence: Synthetic oligonucleotide
  Target: LAMA2; (+) strand; PAM type: NNGRRT; PAM sequence: AAGAAT
ttccattattaatgttttag

SEQ ID NO: 31902 - DNA, 20 bp, Artificial Sequence
  Description of Artificial Sequence: Synthetic oligonucleotide
  Target: LAMA2; (+) strand; PAM type: NNGRRT; PAM sequence: ATGGAT
aaaaaaattttaattttcca

SEQ ID NO: 31903 - DNA, 20 bp, Artificial Sequence
  Description of Artificial Sequence: Synthetic oligonucleotide
  Target: LAMA2; (+) strand; PAM type: NNGRRT; PAM sequence: CAGGAT
atttgtgatgttaacacttg

SEQ ID NO: 31904 - DNA, 20 bp, Artificial Sequence
  Description of Artificial Sequence: Synthetic oligonucleotide
  Target: LAMA2; (+) strand; PAM type: NNGRRT; PAM sequence: TAGAGT
agcactctggtacaagattc

SEQ ID NO: 31905 - DNA, 20 bp, Artificial Sequence
  Description of Artificial Sequence: Synthetic oligonucleotide
  Target: LAMA2; (+) strand; PAM type: NNGRRT; PAM sequence: CAGGGT
aaaatgaagtataaaccttt

SEQ ID NO: 31906 - DNA, 20 bp, Artificial Sequence
  Description of Artificial Sequence: Synthetic oligonucleotide
  Target: LAMA2; (+) strand; PAM type: NNGRRT; PAM sequence: TTGAAT
atattttaaccgtgaacacg

SEQ ID NO: 31907 - DNA, 20 bp, Artificial Sequence
  Description of Artificial Sequence: Synthetic oligonucleotide
  Target: LAMA2; (+) strand; PAM type: NNGRRT; PAM sequence: GTGAAT
tattttaaatgtaaatagag

SEQ ID NO: 31908 - DNA, 20 bp, Artificial Sequence
  Description of Artificial Sequence: Synthetic oligonucleotide
  Target: LAMA2; (+) strand; PAM type: NNGRRT; PAM sequence: GAGAAT
aaatagaggtgaatgtgcct

SEQ ID NO: 31909 - DNA, 20 bp, Artificial Sequence
  Description of Artificial Sequence: Synthetic oligonucleotide
  Target: LAMA2; (+) strand; PAM type: NNGRRT; PAM sequence: TGGGGT
tttgggaggtggggctgttt

SEQ ID NO: 31910 - DNA, 20 bp, Artificial Sequence
  Description of Artificial Sequence: Synthetic oligonucleotide
  Target: LAMA2; (+) strand; PAM type: NNGRRT; PAM sequence: CTGAGT
tataaaacaggcatttacta

SEQ ID NO: 31911 - DNA, 20 bp, Artificial Sequence
  Description of Artificial Sequence: Synthetic oligonucleotide
  Target: LAMA2; (+) strand; PAM type: NNGRRT; PAM sequence: TAGGAT
attgatctaaaacaaatcta

SEQ ID NO: 31912 - DNA, 20 bp, Artificial Sequence
  Description of Artificial Sequence: Synthetic oligonucleotide
  Target: LAMA2; (+) strand; PAM type: NNGRRT; PAM sequence: CCGAAT
ctctattaattatgtgtttc

SEQ ID NO: 31913 - DNA, 20 bp, Artificial Sequence
  Description of Artificial Sequence: Synthetic oligonucleotide
  Target: LAMA2; (+) strand; PAM type: NNGRRT; PAM sequence: TTGGAT
taattatgtgtttcccgaat

SEQ ID NO: 31914 - DNA, 20 bp, Artificial Sequence
  Description of Artificial Sequence: Synthetic oligonucleotide
  Target: LAMA2; (+) strand; PAM type: NNGRRT; PAM sequence: CAGGAT
cagatggcgagcagaccgga

SEQ ID NO: 31915 - DNA, 20 bp, Artificial Sequence
  Description of Artificial Sequence: Synthetic oligonucleotide
  Target: LAMA2; (+) strand; PAM type: NNGRRT; PAM sequence: GAGAAT
cacaagagcaaagtccctgg

SEQ ID NO: 31916 - DNA, 20 bp, Artificial Sequence
  Description of Artificial Sequence: Synthetic oligonucleotide
  Target: LAMA2; (+) strand; PAM type: NNGRRT; PAM sequence: CGGGAT
aattcattaaggagcttgcc

SEQ ID NO: 31917 - DNA, 20 bp, Artificial Sequence
  Description of Artificial Sequence: Synthetic oligonucleotide
  Target: LAMA2; (+) strand; PAM type: NNGRRT; PAM sequence: AAGAAT
gggatgcagaaggtattaga

SEQ ID NO: 31918 - DNA, 20 bp, Artificial Sequence
  Description of Artificial Sequence: Synthetic oligonucleotide
  Target: LAMA2; (+) strand; PAM type: NNGRRT; PAM sequence: AGGGAT
cccaacagaaaaacacagaa

SEQ ID NO: 31919 - DNA, 20 bp, Artificial Sequence
  Description of Artificial Sequence: Synthetic oligonucleotide
  Target: LAMA2; (+) strand; PAM type: NNGRRT; PAM sequence: TGGAAT
agaaagggatgacacaggac

SEQ ID NO: 31920 - DNA, 20 bp, Artificial Sequence
  Description of Artificial Sequence: Synthetic oligonucleotide
  Target: LAMA2; (+) strand; PAM type: NNGRRT; PAM sequence: TAGAGT
gacatctgtaaaatcaaagg

SEQ ID NO: 31921 - DNA, 20 bp, Artificial Sequence
  Description of Artificial Sequence: Synthetic oligonucleotide
  Target: LAMA2; (+) strand; PAM type: NNGRRT; PAM sequence: AAGGGT
gtagtgtggttaagatattc

SEQ ID NO: 31922 - DNA, 20 bp, Artificial Sequence
  Description of Artificial Sequence: Synthetic oligonucleotide
  Target: LAMA2; (+) strand; PAM type: NNGRRT; PAM sequence: GTGAAT
gtgttaaattagcgacaata

SEQ ID NO: 31923 - DNA, 20 bp, Artificial Sequence
  Description of Artificial Sequence: Synthetic oligonucleotide
  Target: LAMA2; (+) strand; PAM type: NNGRRT; PAM sequence: CAGAAT
tgaattagcgacaatgaggg

SEQ ID NO: 31924 - DNA, 20 bp, Artificial Sequence
  Description of Artificial Sequence: Synthetic oligonucleotide
  Target: LAMA2; (+) strand; PAM type: NNGRRT; PAM sequence: AAGAAT
catggctattataattacat

SEQ ID NO: 31925 - DNA, 20 bp, Artificial Sequence
  Description of Artificial Sequence: Synthetic oligonucleotide
  Target: LAMA2; (+) strand; PAM type: NNGRRT; PAM sequence: TGGGAT
tttaatgaacatctgttgct

SEQ ID NO: 31926 - DNA, 20 bp, Artificial Sequence
  Description of Artificial Sequence: Synthetic oligonucleotide
  Target: LAMA2; (+) strand; PAM type: NNGRRT; PAM sequence: TTGGAT
gaacatctgttgcttgggat

SEQ ID NO: 31927 - DNA, 20 bp, Artificial Sequence
  Description of Artificial Sequence: Synthetic oligonucleotide
  Target: LAMA2; (+) strand; PAM type: NNGRRT; PAM sequence: AGGAGT
catttagctcacaattctct

SEQ ID NO: 31928 - DNA, 20 bp, Artificial Sequence
  Description of Artificial Sequence: Synthetic oligonucleotide
  Target: LAMA2; (+) strand; PAM type: NNGRRT; PAM sequence: ATGAAT
agttcttgccatctactaac

SEQ ID NO: 31929 - DNA, 20 bp, Artificial Sequence
  Description of Artificial Sequence: Synthetic oligonucleotide
  Target: LAMA2; (+) strand; PAM type: NNGRRT; PAM sequence: AAGAAT
agcccaaattaagaaactta

SEQ ID NO: 31930 - DNA, 20 bp, Artificial Sequence
  Description of Artificial Sequence: Synthetic oligonucleotide
  Target: LAMA2; (+) strand; PAM type: NNGRRT; PAM sequence: AAGGAT
cataatgtagccaaataaat

SEQ ID NO: 31931 - DNA, 20 bp, Artificial Sequence
  Description of Artificial Sequence: Synthetic oligonucleotide
  Target: LAMA2; (+) strand; PAM type: NNGRRT; PAM sequence: CAGGGT
ttcaccactgcaagaagcaa

SEQ ID NO: 31932 - DNA, 20 bp, Artificial Sequence
  Description of Artificial Sequence: Synthetic oligonucleotide
  Target: LAMA2; (+) strand; PAM type: NNGRRT; PAM sequence: GCGGAT
gtagagcaccttcactctga

SEQ ID NO: 31933 - DNA, 20 bp, Artificial Sequence
  Description of Artificial Sequence: Synthetic oligonucleotide
  Target: LAMA2; (+) strand; PAM type: NNGRRT; PAM sequence: GAGAAT
tttcaatcaaacactggtat

SEQ ID NO: 31934 - DNA, 20 bp, Artificial Sequence
  Description of Artificial Sequence: Synthetic oligonucleotide
  Target: LAMA2; (+) strand; PAM type: NNGRRT; PAM sequence: ATGAAT
tggttacctctttggtcaat

SEQ ID NO: 31935 - DNA, 20 bp, Artificial Sequence
  Description of Artificial Sequence: Synthetic oligonucleotide
  Target: LAMA2; (+) strand; PAM type: NNGRRT; PAM sequence: CTGGGT
aatatgaatatttgcttctt

SEQ ID NO: 31936 - DNA, 20 bp, Artificial Sequence
  Description of Artificial Sequence: Synthetic oligonucleotide
  Target: LAMA2; (+) strand; PAM type: NNGRRT; PAM sequence: AGGGGT
tgtacaatttgtggaccaac

SEQ ID NO: 31937 - DNA, 20 bp, Artificial Sequence
  Description of Artificial Sequence: Synthetic oligonucleotide
  Target: LAMA2; (+) strand; PAM type: NNGRRT; PAM sequence: AAGGAT
ccacgtctatacaccagaga

SEQ ID NO: 31938 - DNA, 20 bp, Artificial Sequence
  Description of Artificial Sequence: Synthetic oligonucleotide
  Target: LAMA2; (+) strand; PAM type: NNGRRT; PAM sequence: TGGGAT
aatttatgtgaagtgccatg

SEQ ID NO: 31939 - DNA, 20 bp, Artificial Sequence
  Description of Artificial Sequence: Synthetic oligonucleotide
  Target: LAMA2; (+) strand; PAM type: NNGRRT; PAM sequence: TAGAAT
tgcctgcaggcactatttgg

SEQ ID NO: 31940 - DNA, 20 bp, Artificial Sequence
  Description of Artificial Sequence: Synthetic oligonucleotide
  Target: LAMA2; (+) strand; PAM type: NNGRRT; PAM sequence: TTGAAT
aattaatccaactgttaaaa

SEQ ID NO: 31941 - DNA, 20 bp, Artificial Sequence
  Description of Artificial Sequence: Synthetic oligonucleotide
  Target: LAMA2; (+) strand; PAM type: NNGRRT; PAM sequence: AGGGAT
ctctctaaactataataatg

SEQ ID NO: 31942 - DNA, 20 bp, Artificial Sequence
  Description of Artificial Sequence: Synthetic oligonucleotide
  Target: LAMA2; (+) strand; PAM type: NNGRRT; PAM sequence: TTGGAT
tatctatttcagctttatgt

SEQ ID NO: 31943 - DNA, 20 bp, Artificial Sequence
  Description of Artificial Sequence: Synthetic oligonucleotide
  Target: LAMA2; (+) strand; PAM type: NNGRRT; PAM sequence: ATGAGT
tattcatcctatctttcatt

SEQ ID NO: 31944 - DNA, 20 bp, Artificial Sequence
  Description of Artificial Sequence: Synthetic oligonucleotide
  Target: LAMA2; (+) strand; PAM type: NNGRRT; PAM sequence: TAGAAT
tgttttattccacgcattat

SEQ ID NO: 31945 - DNA, 20 bp, Artificial Sequence
  Description of Artificial Sequence: Synthetic oligonucleotide
  Target: LAMA2; (+) strand; PAM type: NNGRRT; PAM sequence: ATGAGT
tccacgcattattagaatta

SEQ ID NO: 31946 - DNA, 20 bp, Artificial Sequence
  Description of Artificial Sequence: Synthetic oligonucleotide
  Target: LAMA2; (+) strand; PAM type: NNGRRT; PAM sequence: CAGAGT
ttccttcctgtttctcagat

SEQ ID NO: 31947 - DNA, 20 bp, Artificial Sequence
  Description of Artificial Sequence: Synthetic oligonucleotide
  Target: LAMA2; (+) strand; PAM type: NNGRRT; PAM sequence: GAGGAT
cttaataaatttacccatca

SEQ ID NO: 31948 - DNA, 20 bp, Artificial Sequence
  Description of Artificial Sequence: Synthetic oligonucleotide
  Target: LAMA2; (+) strand; PAM type: NNGRRT; PAM sequence: AGGAAT
aaacagttttgcttctcctg

SEQ ID NO: 31949 - DNA, 20 bp, Artificial Sequence
  Description of Artificial Sequence: Synthetic oligonucleotide
  Target: LAMA2; (+) strand; PAM type: NNGRRT; PAM sequence: AAGAAT
atagatactgtatgcctctt
